United States Patent Application Publication US 2022/0213167 A1 - sequence listing, part 34

SEQ ID NO: 721334 - protein, 13 aa, Homo sapiens
  CDR3 for beta chain variable domain of TCR clone 360667 (TRBV20-1, TRBJ1-2)
CSATGIQGSGYTF

SEQ ID NO: 721335 - protein, 14 aa, Homo sapiens
  CDR3 for alpha chain variable domain of TCR clone 360668 (TRAV12-2, TRAJ44)
CAVNPAGTASKLTF

SEQ ID NO: 721336 - protein, 16 aa, Homo sapiens
  CDR3 for beta chain variable domain of TCR clone 360668 (TRBV2, TRBJ2-6)
CASSEVGGAGANVPTF

SEQ ID NO: 721337 - protein, 14 aa, Homo sapiens
  CDR3 for alpha chain variable domain of TCR clone 360669 (TRAV23/DV6, TRAJ8)
REASKATGFQKLVF

SEQ ID NO: 721338 - protein, 15 aa, Homo sapiens
  CDR3 for beta chain variable domain of TCR clone 360669 (TRBV28, TRBJ2-3)
CASSPDRQGANTQYF

SEQ ID NO: 721339 - protein, 12 aa, Homo sapiens
  CDR3 for alpha chain variable domain of TCR clone 360670 (TRAV8-3, TRAJ26)
CAGDNYGQNFVF

SEQ ID NO: 721340 - protein, 11 aa, Homo sapiens
  CDR3 for beta chain variable domain of TCR clone 360670 (TRBV12-4, TRBJ2-7)
CASRQSYEQYF

SEQ ID NO: 721341 - protein, 18 aa, Homo sapiens
  CDR3 for alpha chain variable domain of TCR clone 360671 (TRAV21, TRAJ52)
CAVRPSPAGGTSYGKLTF

SEQ ID NO: 721342 - protein, 13 aa, Homo sapiens
  CDR3 for beta chain variable domain of TCR clone 360671 (TRBV7-9, TRBJ2-7)
CASSLDHTHEQYF

SEQ ID NO: 721343 - protein, 15 aa, Homo sapiens
  CDR3 for alpha chain variable domain of TCR clone 360672 (TRAV21, TRAJ52)
CATLNSGGSNYKLTF

SEQ ID NO: 721344 - protein, 17 aa, Homo sapiens
  CDR3 for beta chain variable domain of TCR clone 360672 (TRBV7-3, TRBJ2-3)
CASSLMKRMRGADTQYF

SEQ ID NO: 721345 - protein, 18 aa, Homo sapiens
  CDR3 for alpha chain variable domain of TCR clone 360673 (TRAV21, TRAJ52)
CAVRPYPAGGTSYGKLTF

SEQ ID NO: 721346 - protein, 13 aa, Homo sapiens
  CDR3 for beta chain variable domain of TCR clone 360673 (TRBV7-3, TRBJ1-1)
CASSQDWGAEAFF

SEQ ID NO: 721347 - protein, 13 aa, Homo sapiens
  CDR3 for alpha chain variable domain of TCR clone 360674 (TRAV29/DV5, TRAJ31)
WAASRNNNARLLF

SEQ ID NO: 721348 - protein, 12 aa, Homo sapiens
  CDR3 for beta chain variable domain of TCR clone 360674 (TRBV14, TRBJ2-5)
CASSQLKETQYF

SEQ ID NO: 721349 - protein, 10 aa, Homo sapiens
  CDR3 for alpha chain variable domain of TCR clone 360675 (TRAV3, TRAJ30)
CAVREFEIFF

SEQ ID NO: 721350 - protein, 14 aa, Homo sapiens
  CDR3 for beta chain variable domain of TCR clone 360675 (TRBV15, TRBJ2-3)
CATRSGTSTDTQYF

SEQ ID NO: 721351 - protein, 12 aa, Homo sapiens
  CDR3 for alpha chain variable domain of TCR clone 360676 (TRAV21, TRAJ43)
CAVSWNNNNMRF

SEQ ID NO: 721352 - protein, 15 aa, Homo sapiens
  CDR3 for beta chain variable domain of TCR clone 360676 (TRBV20-1, TRBJ2-1)
CSASPPSGGYNEQFF

SEQ ID NO: 721353 - protein, 13 aa, Homo sapiens
  CDR3 for alpha chain variable domain of TCR clone 360677 (TRAV13-1, TRAJ9)
CASSGTGGFKTIF

SEQ ID NO: 721354 - protein, 13 aa, Homo sapiens
  CDR3 for beta chain variable domain of TCR clone 360677 (TRBV12-4, TRBJ2-7)
CASSLERVREQYF

SEQ ID NO: 721355 - protein, 13 aa, Homo sapiens
  CDR3 for alpha chain variable domain of TCR clone 360678 (TRAV3, TRAJ20)
CALRSLNDYKLSF

SEQ ID NO: 721356 - protein, 13 aa, Homo sapiens
  CDR3 for beta chain variable domain of TCR clone 360678 (TRBV6-1, TRBJ2-1)
CAGMDPTNNAQFF

SEQ ID NO: 721357 - protein, 15 aa, Homo sapiens
  CDR3 for alpha chain variable domain of TCR clone 360679 (TRAV23/DV6, TRAJ27)
CSASKPMQANQPLVM

SEQ ID NO: 721358 - protein, 14 aa, Homo sapiens
  CDR3 for beta chain variable domain of TCR clone 360679 (TRBV5-4, TRBJ1-1)
CASSLDSRRDEAFF

SEQ ID NO: 721359 - protein, 16 aa, Homo sapiens
  CDR3 for alpha chain variable domain of TCR clone 360680 (TRAV12-2, TRAJ53)
SPVIQPPRGSNYKLTF

SEQ ID NO: 721360 - protein, 15 aa, Homo sapiens
  CDR3 for beta chain variable domain of TCR clone 360680 (TRBV11-2, TRBJ2-1)
CASSLGTSGLNEQFF

SEQ ID NO: 721361 - protein, 15 aa, Homo sapiens
  CDR3 for alpha chain variable domain of TCR clone 360681 (TRAV4, TRAJ39)
CLVGPNNNAGNMLTF

SEQ ID NO: 721362 - protein, 16 aa, Homo sapiens
  CDR3 for beta chain variable domain of TCR clone 360681 (TRBV2, TRBJ1-4)
CASNLLQGATNEKLFF

SEQ ID NO: 721363 - protein, 15 aa, Homo sapiens
  CDR3 for alpha chain variable domain of TCR clone 360682 (TRAV17, TRAJ57)
CATGPSQGGSENLVF

SEQ ID NO: 721364 - protein, 15 aa, Homo sapiens
  CDR3 for beta chain variable domain of TCR clone 360682 (TRBV6-3, TRBJ2-7)
CASSSPGTVFYEQYF

SEQ ID NO: 721365 - protein, 13 aa, Homo sapiens
  CDR3 for alpha chain variable domain of TCR clone 360683 (TRAV3, TRAJ21)
CAVREPDFNKFYF

SEQ ID NO: 721366 - protein, 13 aa, Homo sapiens
  CDR3 for beta chain variable domain of TCR clone 360683 (TRBV7-8, TRBJ2-7)
CASSLSGPYEQYF

SEQ ID NO: 721367 - protein, 20 aa, Homo sapiens
  CDR3 for alpha chain variable domain of TCR clone 360684 (TRAV26-1, TRAJ42)
CCVLLHRQTYYGGSQGNLIS

SEQ ID NO: 721368 - protein, 16 aa, Homo sapiens
  CDR3 for beta chain variable domain of TCR clone 360684 (TRBV7-3, TRBJ2-2)
CASSLKRGILSGELFF

SEQ ID NO: 721369 - protein, 13 aa, Homo sapiens
  CDR3 for alpha chain variable domain of TCR clone 360685 (TRAV2, TRAJ40)
CAVVTSGTYKYLF

SEQ ID NO: 721370 - protein, 16 aa, Homo sapiens
  CDR3 for beta chain variable domain of TCR clone 360685 (TRBV19, TRBJ2-2)
CASRSPGTGATGELFF

SEQ ID NO: 721371 - protein, 14 aa, Homo sapiens
  CDR3 for alpha chain variable domain of TCR clone 360686 (TRAV3, TRAJ21)
CAVESQANFNKFYF

SEQ ID NO: 721372 - protein, 16 aa, Homo sapiens
  CDR3 for beta chain variable domain of TCR clone 360686 (TRBV5-4, TRBJ2-1)
CASSLALAGAYNEQFF

SEQ ID NO: 721373 - protein, 15 aa, Homo sapiens
  CDR3 for alpha chain variable domain of TCR clone 360687 (TRAV17, TRAJ57)
CATGPSQGGSEKMVF

SEQ ID NO: 721374 - protein, 18 aa, Homo sapiens
  CDR3 for beta chain variable domain of TCR clone 360687 (TRBV7-9, TRBJ2-7)
CASSLTTGGSRTWYEQYF

SEQ ID NO: 721375 - protein, 15 aa, Homo sapiens
  CDR3 for alpha chain variable domain of TCR clone 360688 (TRAV16, TRAJ12)
CSKWPLRDSSYKLIF

SEQ ID NO: 721376 - protein, 13 aa, Homo sapiens
  CDR3 for beta chain variable domain of TCR clone 360688 (TRBV4-2, TRBJ1-1)
CASSQAGNTEAFF

SEQ ID NO: 721377 - protein, 15 aa, Homo sapiens
  CDR3 for alpha chain variable domain of TCR clone 360689 (TRAV4, TRAJ39)
CLVGPNNNAGNMLNF

SEQ ID NO: 721378 - protein, 12 aa, Homo sapiens
  CDR3 for beta chain variable domain of TCR clone 360689 (TRBV7-8, TRBJ2-7)
CASSLGDREQYF

SEQ ID NO: 721379 - protein, 16 aa, Homo sapiens
  CDR3 for alpha chain variable domain of TCR clone 360690 (TRAV17, TRAJ36)
CATVSLNWGKQTLLWD

SEQ ID NO: 721380 - protein, 13 aa, Homo sapiens
  CDR3 for beta chain variable domain of TCR clone 360690 (TRBV4-1, TRBJ1-1)
CASSQLGTGEAFF

SEQ ID NO: 721381 - protein, 10 aa, Homo sapiens
  CDR3 for alpha chain variable domain of TCR clone 360691 (TRAV1-2, TRAJ31)
CVSEDARLMF

SEQ ID NO: 721382 - protein, 14 aa, Homo sapiens
  CDR3 for beta chain variable domain of TCR clone 360691 (TRBV19, TRBJ2-1)
CASPTFVLRGEQFF

SEQ ID NO: 721383 - protein, 11 aa, Homo sapiens
  CDR3 for alpha chain variable domain of TCR clone 360692 (TRAV35, TRAJ30)
CAGLRDDKIIF

SEQ ID NO: 721384 - protein, 16 aa, Homo sapiens
  CDR3 for beta chain variable domain of TCR clone 360692 (TRBV12-4, TRBJ1-5)
CASSRPVGGSNQPQHF

SEQ ID NO: 721385 - protein, 13 aa, Homo sapiens
  CDR3 for alpha chain variable domain of TCR clone 360693 (TRAV17, TRAJ54)
FATSWGGAQKLVF

SEQ ID NO: 721386 - protein, 15 aa, Homo sapiens
  CDR3 for beta chain variable domain of TCR clone 360693 (TRBV4-3, TRBJ2-3)
CASSPSLLSTDTQYF

SEQ ID NO: 721387 - protein, 14 aa, Homo sapiens
  CDR3 for alpha chain variable domain of TCR clone 360694 (TRAV8-3, TRAJ6)
CAVGASGGSYIPTF

SEQ ID NO: 721388 - protein, 16 aa, Homo sapiens
  CDR3 for beta chain variable domain of TCR clone 360694 (TRBV18, TRBJ2-2)
CQLTMDPWQNTGELFF

SEQ ID NO: 721389 - protein, 14 aa, Homo sapiens
  CDR3 for alpha chain variable domain of TCR clone 360695 (TRAV1-1, TRAJ23)
CAVSIYNQGGKLIF

SEQ ID NO: 721390 - protein, 20 aa, Homo sapiens
  CDR3 for beta chain variable domain of TCR clone 360695 (TRBV6-4, TRBJ2-7)
CTSSDSSVSGQVPTSYEQYF

SEQ ID NO: 721391 - protein, 11 aa, Homo sapiens
  CDR3 for alpha chain variable domain of TCR clone 360696 (TRAV12-3, TRAJ27)
CAMANAGKSTF

SEQ ID NO: 721392 - protein, 14 aa, Homo sapiens
  CDR3 for beta chain variable domain of TCR clone 360696 (TRBV6-1, TRBJ1-3)
CASVQGGGGNTMYF

SEQ ID NO: 721393 - protein, 14 aa, Homo sapiens
  CDR3 for alpha chain variable domain of TCR clone 360697 (TRAV12-1, TRAJ17)
CVVNYKAAGNKLTS

SEQ ID NO: 721394 - protein, 12 aa, Homo sapiens
  CDR3 for beta chain variable domain of TCR clone 360697 (TRBV11-2, TRBJ2-2)
CASSLGGGELFF

SEQ ID NO: 721395 - protein, 14 aa, Homo sapiens
  CDR3 for alpha chain variable domain of TCR clone 360698 (TRAV9-2, TRAJ39)
CALYIYNAGNMLTF

SEQ ID NO: 721396 - protein, 17 aa, Homo sapiens
  CDR3 for beta chain variable domain of TCR clone 360698 (TRBV28, TRBJ2-5)
CASGTPEGDALQATQYF

SEQ ID NO: 721397 - protein, 14 aa, Homo sapiens
  CDR3 for alpha chain variable domain of TCR clone 360699 (TRAV8-4, TRAJ39)
CAVSEGNAGNMLTF

SEQ ID NO: 721398 - protein, 15 aa, Homo sapiens
  CDR3 for beta chain variable domain of TCR clone 360699 (TRBV29-1, TRBJ2-1)
CSVEAPRGSPNEQFF

SEQ ID NO: 721399 - protein, 10 aa, Homo sapiens
  CDR3 for alpha chain variable domain of TCR clone 360700 (TRAV12-1, TRAJ21)
CVVNPIKFYF

SEQ ID NO: 721400 - protein, 16 aa, Homo sapiens
  CDR3 for beta chain variable domain of TCR clone 360700 (TRBV20-1, TRBJ2-1)
CSARGLAESPYNEQFF

SEQ ID NO: 721401 - protein, 15 aa, Homo sapiens
  CDR3 for alpha chain variable domain of TCR clone 360701 (TRAV13-1, TRAJ5)
CAVSPTDKGRRALTF

SEQ ID NO: 721402 - protein, 18 aa, Homo sapiens
  CDR3 for beta chain variable domain of TCR clone 360701 (TRBV4-1, TRBJ2-2)
CASSFRTSGGEGPGELFF

SEQ ID NO: 721403 - protein, 14 aa, Homo sapiens
  CDR3 for alpha chain variable domain of TCR clone 360702 (TRAV26-1, TRAJ49)
CIVRLTNTGIQFYF

SEQ ID NO: 721404 - protein, 11 aa, Homo sapiens
  CDR3 for beta chain variable domain of TCR clone 360702 (TRBV29-1, TRBJ2-5)
CSEDRTGTQYF

SEQ ID NO: 721405 - protein, 13 aa, Homo sapiens
  CDR3 for alpha chain variable domain of TCR clone 360703 (TRAV3, TRAJ20)
CCEAFCNDYKLSF

SEQ ID NO: 721406 - protein, 15 aa, Homo sapiens
  CDR3 for beta chain variable domain of TCR clone 360703 (TRBV19, TRBJ2-6)
CASVRRDSGANVLTL

SEQ ID NO: 721407 - protein, 17 aa, Homo sapiens
  CDR3 for alpha chain variable domain of TCR clone 360704 (TRAV38-2/DV8, TRAJ38)
CAYRSARGAGNNRTRIW

SEQ ID NO: 721408 - protein, 13 aa, Homo sapiens
  CDR3 for beta chain variable domain of TCR clone 360704 (TRBV6-5, TRBJ2-1)
CASRGRVGNEQFF

SEQ ID NO: 721409 - protein, 14 aa, Homo sapiens
  CDR3 for alpha chain variable domain of TCR clone 360705 (TRAV34, TRAJ22)
CGADTSGSARQLNF

SEQ ID NO: 721410 - protein, 15 aa, Homo sapiens
  CDR3 for beta chain variable domain of TCR clone 360705 (TRBV5-1, TRBJ2-1)
CASSPPRVPYNEQFF

SEQ ID NO: 721411 - protein, 23 aa, Homo sapiens
  CDR3 for alpha chain variable domain of TCR clone 360706 (TRAV8-3, )
CAVVTIRIPDIQNPDPAVYQLRD

SEQ ID NO: 721412 - protein, 14 aa, Homo sapiens
  CDR3 for beta chain variable domain of TCR clone 360706 (TRBV11-2, TRBJ2-7)
CASSPSTTSYEQYF

SEQ ID NO: 721413 - protein, 16 aa, Homo sapiens
  CDR3 for alpha chain variable domain of TCR clone 360707 (TRAV17, TRAJ52)
CATDGAGGTSFGKLTF

SEQ ID NO: 721414 - protein, 14 aa, Homo sapiens
  CDR3 for beta chain variable domain of TCR clone 360707 (TRBV6-1, TRBJ2-1)
CASSLGLAGLWEFF

SEQ ID NO: 721415 - protein, 14 aa, Homo sapiens
  CDR3 for alpha chain variable domain of TCR clone 360708 (TRAV12-2, TRAJ11)
CAVNRESGYSTLTV

SEQ ID NO: 721416 - protein, 14 aa, Homo sapiens
  CDR3 for beta chain variable domain of TCR clone 360708 (TRBV6-1, TRBJ1-3)
FASVQGGGGNTIYF

SEQ ID NO: 721417 - protein, 15 aa, Homo sapiens
  CDR3 for alpha chain variable domain of TCR clone 360709 (TRAV27, TRAJ38)
CAGRFNAGNSRKLIW

SEQ ID NO: 721418 - protein, 13 aa, Homo sapiens
  CDR3 for beta chain variable domain of TCR clone 360709 (TRBV12-5, TRBJ2-3)
CASQNRGTDTQYF

SEQ ID NO: 721419 - protein, 13 aa, Homo sapiens
  CDR3 for alpha chain variable domain of TCR clone 360710 (TRAV1-2, TRAJ11)
CAVRREGYSTLPF

SEQ ID NO: 721420 - protein, 14 aa, Homo sapiens
  CDR3 for beta chain variable domain of TCR clone 360710 (TRBV14, TRBJ2-7)
CASRHRDKPYEQYF

SEQ ID NO: 721421 - protein, 13 aa, Homo sapiens
  CDR3 for alpha chain variable domain of TCR clone 360711 (TRAV12-2, TRAJ12)
CAVNGDSSYKLIF

SEQ ID NO: 721422 - protein, 14 aa, Homo sapiens
  CDR3 for beta chain variable domain of TCR clone 360711 (TRBV7-2, TRBJ1-2)
CASSQTGSTYGYTF

SEQ ID NO: 721423 - protein, 14 aa, Homo sapiens
  CDR3 for alpha chain variable domain of TCR clone 360712 (TRAV2, TRAJ9)
CAVEDRSGGFKTIF

SEQ ID NO: 721424 - protein, 15 aa, Homo sapiens
  CDR3 for beta chain variable domain of TCR clone 360712 (TRBV7-2, TRBJ2-1)
CASSCGLAGGNEQFF

SEQ ID NO: 721425 - protein, 12 aa, Homo sapiens
  CDR3 for alpha chain variable domain of TCR clone 360713 (TRAV17, TRAJ20)
CATQSNDYKLSF

SEQ ID NO: 721426 - protein, 16 aa, Homo sapiens
  CDR3 for beta chain variable domain of TCR clone 360713 (TRBV12-5, TRBJ2-5)
CASGPRTSGNQETQYF

SEQ ID NO: 721427 - protein, 14 aa, Homo sapiens
  CDR3 for alpha chain variable domain of TCR clone 360714 (TRAV1-2, TRAJ8)
CAVREDTGFQKLVF

SEQ ID NO: 721428 - protein, 12 aa, Homo sapiens
  CDR3 for beta chain variable domain of TCR clone 360714 (TRBV24-1, TRBJ1-1)
CATLYPDAEAFF

SEQ ID NO: 721429 - protein, 15 aa, Homo sapiens
  CDR3 for alpha chain variable domain of TCR clone 360715 (TRAV26-1, TRAJ29)
CIVKVEGSGNTHLVF

SEQ ID NO: 721430 - protein, 14 aa, Homo sapiens
  CDR3 for beta chain variable domain of TCR clone 360715 (TRBV18, TRBJ2-5)
CASSPGVSQETQYF

SEQ ID NO: 721431 - protein, 12 aa, Homo sapiens
  CDR3 for alpha chain variable domain of TCR clone 360716 (TRAV13-1, TRAJ20)
CAARQNDCKLSF

SEQ ID NO: 721432 - protein, 14 aa, Homo sapiens
  CDR3 for beta chain variable domain of TCR clone 360716 (TRBV5-1, TRBJ2-7)
CASSFASGVNEQYF

SEQ ID NO: 721433 - protein, 16 aa, Homo sapiens
  CDR3 for alpha chain variable domain of TCR clone 360717 (TRAV3, TRAJ10)
CAVRDMRAGGGNKLTF

SEQ ID NO: 721434 - protein, 14 aa, Homo sapiens
  CDR3 for beta chain variable domain of TCR clone 360717 (TRBV15, TRBJ2-7)
CATSPDRGLYEQYF

SEQ ID NO: 721435 - protein, 12 aa, Homo sapiens
  CDR3 for alpha chain variable domain of TCR clone 360718 (TRAV12-3, TRAJ17)
CAMTLTGNKLTF

SEQ ID NO: 721436 - protein, 15 aa, Homo sapiens
  CDR3 for beta chain variable domain of TCR clone 360718 (TRBV6-1, TRBJ2-5)
CASSEFPLMGETQYF

SEQ ID NO: 721437 - protein, 16 aa, Homo sapiens
  CDR3 for alpha chain variable domain of TCR clone 360719 (TRAV17, TRAJ53)
CATDALSGGSNYKLTF

SEQ ID NO: 721438 - protein, 12 aa, Homo sapiens
  CDR3 for beta chain variable domain of TCR clone 360719 (TRBV19, TRBJ2-1)
CASSRQGAEQFF

SEQ ID NO: 721439 - protein, 12 aa, Homo sapiens
  CDR3 for alpha chain variable domain of TCR clone 360720 (TRAV8-3, TRAJ20)
CAVGANDYKLSF

SEQ ID NO: 721440 - protein, 13 aa, Homo sapiens
  CDR3 for beta chain variable domain of TCR clone 360720 (TRBV11-2, TRBJ2-5)
CASSVSSQETQYF

SEQ ID NO: 721441 - protein, 13 aa, Homo sapiens
  CDR3 for alpha chain variable domain of TCR clone 360721 (TRAV21, TRAJ27)
CAARPGNAGKSTF

SEQ ID NO: 721442 - protein, 17 aa, Homo sapiens
  CDR3 for beta chain variable domain of TCR clone 360721 (TRBV20-1, TRBJ2-1)
CSARDPLAGVWDNEQFF

SEQ ID NO: 721443 - protein, 12 aa, Homo sapiens
  CDR3 for alpha chain variable domain of TCR clone 360722 (TRAV8-4, TRAJ22)
CAATGSARQLTF

SEQ ID NO: 721444 - protein, 12 aa, Homo sapiens
  CDR3 for beta chain variable domain of TCR clone 360722 (TRBV14, TRBJ2-7)
CASSLYKDEQYF

SEQ ID NO: 721445 - protein, 15 aa, Homo sapiens
  CDR3 for alpha chain variable domain of TCR clone 360723 (TRAV21, TRAJ24)
CAARSSADSWGKLQF

SEQ ID NO: 721446 - protein, 11 aa, Homo sapiens
  CDR3 for beta chain variable domain of TCR clone 360723 (TRBV11-2, TRBJ2-2)
CASSLPGELFF

SEQ ID NO: 721447 - protein, 23 aa, Homo sapiens
  CDR3 for alpha chain variable domain of TCR clone 360724 (TRAV26-1, TRAJ38)
CIADNAGNNHIQNPDPAVYQLRD

SEQ ID NO: 721448 - protein, 13 aa, Homo sapiens
  CDR3 for beta chain variable domain of TCR clone 360724 (TRBV19, TRBJ1-5)
CASSIGGEQPQHF

SEQ ID NO: 721449 - protein, 14 aa, Homo sapiens
  CDR3 for alpha chain variable domain of TCR clone 360725 (TRAV29/DV5, TRAJ32)
CAAAYGGATNKLIF

SEQ ID NO: 721450 - protein, 15 aa, Homo sapiens
  CDR3 for beta chain variable domain of TCR clone 360725 (TRBV27, TRBJ2-7)
CARSTAGTGSYEQYF

SEQ ID NO: 721451 - protein, 14 aa, Homo sapiens
  CDR3 for alpha chain variable domain of TCR clone 360726 (TRAV38-1, TRAJ29)
CACITPSGNTLLVF

SEQ ID NO: 721452 - protein, 14 aa, Homo sapiens
  CDR3 for beta chain variable domain of TCR clone 360726 (TRBV18, TRBJ2-7)
CASSPRGGAYEQYF

SEQ ID NO: 721453 - protein, 14 aa, Homo sapiens
  CDR3 for alpha chain variable domain of TCR clone 360727 (TRAV8-2, TRAJ37)
CVVSISGNTGKLIF

SEQ ID NO: 721454 - protein, 12 aa, Homo sapiens
  CDR3 for beta chain variable domain of TCR clone 360727 (TRBV11-2, TRBJ2-2)
CASSPGGGELFF

SEQ ID NO: 721455 - protein, 16 aa, Homo sapiens
  CDR3 for alpha chain variable domain of TCR clone 360728 (TRAV12-3, TRAJ53)
CAMSVGSGGSNYKLRF

SEQ ID NO: 721456 - protein, 11 aa, Homo sapiens
  CDR3 for beta chain variable domain of TCR clone 360728 (TRBV29-1, TRBJ2-5)
CSVASGETQYF

SEQ ID NO: 721457 - protein, 14 aa, Homo sapiens
  CDR3 for alpha chain variable domain of TCR clone 360729 (TRAV8-3, TRAJ47)
CAVGAQGYGNRLVF

SEQ ID NO: 721458 - protein, 14 aa, Homo sapiens
  CDR3 for beta chain variable domain of TCR clone 360729 (TRBV6-5, TRBJ2-7)
CASSSGVPPYEQYF

SEQ ID NO: 721459 - protein, 14 aa, Homo sapiens
  CDR3 for alpha chain variable domain of TCR clone 360730 (TRAV12-3, TRAJ9)
CATSPNTGGFKTIF

SEQ ID NO: 721460 - protein, 12 aa, Homo sapiens
  CDR3 for beta chain variable domain of TCR clone 360730 (TRBV11-2, TRBJ2-2)
CASSLGGGELFF

SEQ ID NO: 721461 - protein, 13 aa, Homo sapiens
  CDR3 for alpha chain variable domain of TCR clone 360731 (TRAV12-3, TRAJ33)
CAMSLNSNYQLIL

SEQ ID NO: 721462 - protein, 13 aa, Homo sapiens
  CDR3 for beta chain variable domain of TCR clone 360731 (TRBV7-2, TRBJ2-2)
CASSLAVTGELFF

SEQ ID NO: 721463 - protein, 17 aa, Homo sapiens
  CDR3 for alpha chain variable domain of TCR clone 360732 (TRAV13-1, TRAJ27)
CAASGETPMQANQPLGM

SEQ ID NO: 721464 - protein, 15 aa, Homo sapiens
  CDR3 for beta chain variable domain of TCR clone 360732 (TRBV12-4, TRBJ1-5)
CASTRQGSGNQPQHF

SEQ ID NO: 721465 - protein, 13 aa, Homo sapiens
  CDR3 for alpha chain variable domain of TCR clone 360733 (TRAV12-2, TRAJ50)
CAVLVTSYDKVIF

SEQ ID NO: 721466 - protein, 12 aa, Homo sapiens
  CDR3 for beta chain variable domain of TCR clone 360733 (TRBV20-1, TRBJ1-2)
CSAPGFNYGYTF

SEQ ID NO: 721467 - protein, 14 aa, Homo sapiens
  CDR3 for alpha chain variable domain of TCR clone 360734 (TRAV20, TRAJ42)
CAVQAGGSQGNLIF

SEQ ID NO: 721468 - protein, 14 aa, Homo sapiens
  CDR3 for beta chain variable domain of TCR clone 360734 (TRBV28, TRBJ1-2)
CASRIQEANYGYTF

SEQ ID NO: 721469 - protein, 19 aa, Homo sapiens
  CDR3 for alpha chain variable domain of TCR clone 360735 (TRAV2, TRAJ20)
ILQVREADAAVYRDCKLSF

SEQ ID NO: 721470 - protein, 13 aa, Homo sapiens
  CDR3 for beta chain variable domain of TCR clone 360735 (TRBV20-1, TRBJ2-7)
CSATTPGIYEQYF

SEQ ID NO: 721471 - protein, 15 aa, Homo sapiens
  CDR3 for alpha chain variable domain of TCR clone 360736 (TRAV4, TRAJ28)
CPPSYSGAGSYQLTF

SEQ ID NO: 721472 - protein, 17 aa, Homo sapiens
  CDR3 for beta chain variable domain of TCR clone 360736 (TRBV20-1, TRBJ2-2)
CSASGSGQGGLTGELFF

SEQ ID NO: 721473 - protein, 15 aa, Homo sapiens
  CDR3 for alpha chain variable domain of TCR clone 360737 (TRAV34, TRAJ38)
CGADFTPGNNRKLIW

SEQ ID NO: 721474 - protein, 16 aa, Homo sapiens
  CDR3 for beta chain variable domain of TCR clone 360737 (TRBV12-5, TRBJ2-5)
CASGPRTSRNQETQYF

SEQ ID NO: 721475 - protein, 13 aa, Homo sapiens
  CDR3 for alpha chain variable domain of TCR clone 360738 (TRAV14/DV4, TRAJ49)
CAMREDTGNQFYF

SEQ ID NO: 721476 - protein, 18 aa, Homo sapiens
  CDR3 for beta chain variable domain of TCR clone 360738 (TRBV4-1, TRBJ2-6)
CASSQRTSGNSGANVLTF

SEQ ID NO: 721477 - protein, 16 aa, Homo sapiens
  CDR3 for alpha chain variable domain of TCR clone 360739 (TRAV12-3, TRAJ53)
CAMSPGSGGSNYKLTF

SEQ ID NO: 721478 - protein, 20 aa, Homo sapiens
  CDR3 for beta chain variable domain of TCR clone 360739 (TRBV20-1, TRBJ2-1)
CSARPYSVAGGPSYYNEQFF

SEQ ID NO: 721479 - protein, 12 aa, Homo sapiens
  CDR3 for alpha chain variable domain of TCR clone 360740 (TRAV21, TRAJ21)
CAAHLPSNKFYF

SEQ ID NO: 721480 - protein, 14 aa, Homo sapiens
  CDR3 for beta chain variable domain of TCR clone 360740 (TRBV6-5, TRBJ1-1)
CASSYGAVTDWAFF

SEQ ID NO: 721481 - protein, 13 aa, Homo sapiens
  CDR3 for alpha chain variable domain of TCR clone 360741 (TRAV8-3, TRAJ44)
CAVVPGTASKLTF

SEQ ID NO: 721482 - protein, 13 aa, Homo sapiens
  CDR3 for beta chain variable domain of TCR clone 360741 (TRBV11-2, TRBJ2-3)
CQQQTSPTDTQYF

SEQ ID NO: 721483 - protein, 14 aa, Homo sapiens
  CDR3 for alpha chain variable domain of TCR clone 360742 (TRAV13-1, TRAJ44)
CAAKATGTASKLTF

SEQ ID NO: 721484 - protein, 14 aa, Homo sapiens
  CDR3 for beta chain variable domain of TCR clone 360742 (TRBV11-2, TRBJ1-2)
CASSLGTANYGYTF

SEQ ID NO: 721485 - protein, 16 aa, Homo sapiens
  CDR3 for alpha chain variable domain of TCR clone 360743 (TRAV3, TRAJ10)
CAVRDMRVGGGNKLTF

SEQ ID NO: 721486 - protein, 14 aa, Homo sapiens
  CDR3 for beta chain variable domain of TCR clone 360743 (TRBV25-1, TRBJ1-1)
CASTHLGGNNEAFF

SEQ ID NO: 721487 - protein, 13 aa, Homo sapiens
  CDR3 for alpha chain variable domain of TCR clone 360744 (TRAV2, TRAJ40)
CAVVTSGTYKYIF

SEQ ID NO: 721488 - protein, 15 aa, Homo sapiens
  CDR3 for beta chain variable domain of TCR clone 360744 (TRBV19, TRBJ2-2)
CQPISRDRATGELFF

SEQ ID NO: 721489 - protein, 12 aa, Homo sapiens
  CDR3 for alpha chain variable domain of TCR clone 360745 (TRAV12-1, TRAJ40)
CVVPSGTYKYIF

SEQ ID NO: 721490 - protein, 15 aa, Homo sapiens
  CDR3 for beta chain variable domain of TCR clone 360745 (TRBV12-4, TRBJ2-1)
CASSPLSRRNNEQFF

SEQ ID NO: 721491 - protein, 14 aa, Homo sapiens
  CDR3 for alpha chain variable domain of TCR clone 360746 (TRAV26-1, TRAJ38)
CIADNAGNNRKLIW

SEQ ID NO: 721492 - protein, 14 aa, Homo sapiens
  CDR3 for beta chain variable domain of TCR clone 360746 (TRBV6-5, TRBJ1-5)
CASSPGVSNQPQHF

SEQ ID NO: 721493 - protein, 14 aa, Homo sapiens
  CDR3 for alpha chain variable domain of TCR clone 360747 (TRAV17, TRAJ22)
CATSPSVSARQLTF

SEQ ID NO: 721494 - protein, 15 aa, Homo sapiens
  CDR3 for beta chain variable domain of TCR clone 360747 (TRBV4-1, TRBJ2-5)
CASSPWDLYQETQYF

SEQ ID NO: 721495 - protein, 16 aa, Homo sapiens
  CDR3 for alpha chain variable domain of TCR clone 360748 (TRAV1-2, TRAJ10)
RAVRGVLTGGGNKLTF

SEQ ID NO: 721496 - protein, 14 aa, Homo sapiens
  CDR3 for beta chain variable domain of TCR clone 360748 (TRBV11-2, TRBJ1-2)
CASSLGTANYGYTF

SEQ ID NO: 721497 - protein, 14 aa, Homo sapiens
  CDR3 for alpha chain variable domain of TCR clone 360749 (TRAV12-2, TRAJ53)
CAVKGGGSNYKLTF

SEQ ID NO: 721498 - protein, 14 aa, Homo sapiens
  CDR3 for beta chain variable domain of TCR clone 360749 (TRBV19, TRBJ2-1)
CASPTFGLSGERFF

SEQ ID NO: 721499 - protein, 16 aa, Homo sapiens
  CDR3 for alpha chain variable domain of TCR clone 360750 (TRAV30, TRAJ24)
CVTEMVDADSWGKFQF

SEQ ID NO: 721500 - protein, 14 aa, Homo sapiens
  CDR3 for beta chain variable domain of TCR clone 360750 (TRBV12-5, TRBJ2-5)
CASGSRTHQETQYF

SEQ ID NO: 721501 - protein, 18 aa, Homo sapiens
  CDR3 for alpha chain variable domain of TCR clone 360751 (TRAV13-1, TRAJ52)
CAASKRSAGGISYGKLTF

SEQ ID NO: 721502 - protein, 16 aa, Homo sapiens
  CDR3 for beta chain variable domain of TCR clone 360751 (TRBV19, TRBJ2-1)
CASSIWGQGARNEQFF

SEQ ID NO: 721503 - protein, 21 aa, Homo sapiens
  CDR3 for alpha chain variable domain of TCR clone 360752 (TRAV9-2, )
CALIQIGDIQNPDPAVYQLRD

SEQ ID NO: 721504 - protein, 14 aa, Homo sapiens
  CDR3 for beta chain variable domain of TCR clone 360752 (TRBV19, TRBJ2-1)
CASPTFVLSGEQFF

SEQ ID NO: 721505 - protein, 14 aa, Homo sapiens
  CDR3 for alpha chain variable domain of TCR clone 360753 (TRAV8-1, TRAJ5)
CDVRTDTGRGALTF

SEQ ID NO: 721506 - protein, 14 aa, Homo sapiens
  CDR3 for beta chain variable domain of TCR clone 360753 (TRBV7-8, TRBJ2-3)
CASSFPDGQDTQYF

SEQ ID NO: 721507 - protein, 14 aa, Homo sapiens
  CDR3 for alpha chain variable domain of TCR clone 360754 (TRAV1-2, TRAJ16)
CAVNRFSDGQKLLF

SEQ ID NO: 721508 - protein, 13 aa, Homo sapiens
  CDR3 for beta chain variable domain of TCR clone 360754 (TRBV7-2, TRBJ1-1)
CASNLKGAKVSFF

SEQ ID NO: 721509 - protein, 13 aa, Homo sapiens
  CDR3 for alpha chain variable domain of TCR clone 360755 (TRAV36/DV7, TRAJ38)
CVANAGKNRKLIW

SEQ ID NO: 721510 - protein, 14 aa, Homo sapiens
  CDR3 for beta chain variable domain of TCR clone 360755 (TRBV7-2, TRBJ2-7)
CASSLRWEVNEQYF

SEQ ID NO: 721511 - protein, 11 aa, Homo sapiens
  CDR3 for alpha chain variable domain of TCR clone 360756 (TRAV20, TRAJ40)
CAVGGTYKYIF

SEQ ID NO: 721512 - protein, 15 aa, Homo sapiens
  CDR3 for beta chain variable domain of TCR clone 360756 (TRBV6-3, TRBJ2-2)
CASSFLATVTGELFF

SEQ ID NO: 721513 - protein, 12 aa, Homo sapiens
  CDR3 for alpha chain variable domain of TCR clone 360757 (TRAV8-4, TRAJ43)
CAVSVNNNDMRF

SEQ ID NO: 721514 - protein, 14 aa, Homo sapiens
  CDR3 for beta chain variable domain of TCR clone 360757 (TRBV11-3, TRBJ1-2)
CASSLGTANYGYTF

SEQ ID NO: 721515 - protein, 16 aa, Homo sapiens
  CDR3 for alpha chain variable domain of TCR clone 360758 (TRAV20, TRAJ22)
CAVQASSSGSARQLTF

SEQ ID NO: 721516 - protein, 16 aa, Homo sapiens
  CDR3 for beta chain variable domain of TCR clone 360758 (TRBV20-1, TRBJ2-1)
CSARDHLAGGRGEQFF

SEQ ID NO: 721517 - protein, 15 aa, Homo sapiens
  CDR3 for alpha chain variable domain of TCR clone 360759 (TRAV3, TRAJ22)
CAVRDRGGSARQLTF

SEQ ID NO: 721518 - protein, 17 aa, Homo sapiens
  CDR3 for beta chain variable domain of TCR clone 360759 (TRBV5-5, TRBJ1-2)
CASSLGSLDGQSEGYTF

SEQ ID NO: 721519 - protein, 16 aa, Homo sapiens
  CDR3 for alpha chain variable domain of TCR clone 360760 (TRAV12-2, TRAJ45)
CAVKRNPGGGADGLTF

SEQ ID NO: 721520 - protein, 12 aa, Homo sapiens
  CDR3 for beta chain variable domain of TCR clone 360760 (TRBV6-1, TRBJ2-5)
CASSEGREAPYF

SEQ ID NO: 721521 - protein, 14 aa, Homo sapiens
  CDR3 for alpha chain variable domain of TCR clone 360761 (TRAV26-1, TRAJ38)
CIADNAGNNRKLIW

SEQ ID NO: 721522 - protein, 14 aa, Homo sapiens
  CDR3 for beta chain variable domain of TCR clone 360761 (TRBV12-5, TRBJ2-5)
CASGSRTHQETQYL

SEQ ID NO: 721523 - protein, 15 aa, Homo sapiens
  CDR3 for alpha chain variable domain of TCR clone 360762 (TRAV13-2, TRAJ5)
CAENPHWTGRRALTL

SEQ ID NO: 721524 - protein, 16 aa, Homo sapiens
  CDR3 for beta chain variable domain of TCR clone 360762 (TRBV7-9, TRBJ1-3)
CASSQTSGLRMGTIYF

SEQ ID NO: 721525 - protein, 11 aa, Homo sapiens
  CDR3 for alpha chain variable domain of TCR clone 360763 (TRAV4, TRAJ23)
CLVAPGGKLIF

SEQ ID NO: 721526 - protein, 15 aa, Homo sapiens
  CDR3 for beta chain variable domain of TCR clone 360763 (TRBV5-1, TRBJ1-4)
FAPAAWKDGNEKLFF

SEQ ID NO: 721527 - protein, 12 aa, Homo sapiens
  CDR3 for alpha chain variable domain of TCR clone 360764 (TRAV21, TRAJ33)
CAKMDSNYQLIW

SEQ ID NO: 721528 - protein, 14 aa, Homo sapiens
  CDR3 for beta chain variable domain of TCR clone 360764 (TRBV11-1, TRBJ2-7)
CASSFRQGSHEQYF

SEQ ID NO: 721529 - protein, 13 aa, Homo sapiens
  CDR3 for alpha chain variable domain of TCR clone 360765 (TRAV1-1, TRAJ23)
CAVVANQGGKLIF

SEQ ID NO: 721530 - protein, 16 aa, Homo sapiens
  CDR3 for beta chain variable domain of TCR clone 360765 (TRBV5-5, TRBJ1-2)
CASSPTWGRGLYGYTF

SEQ ID NO: 721531 - protein, 12 aa, Homo sapiens
  CDR3 for alpha chain variable domain of TCR clone 360766 (TRAV13-1, TRAJ43)
CAAVRRNNDMRF

SEQ ID NO: 721532 - protein, 18 aa, Homo sapiens
  CDR3 for beta chain variable domain of TCR clone 360766 (TRBV24-1, TRBJ2-1)
CATSDLMFLGRGVHEQFF

SEQ ID NO: 721533 - protein, 15 aa, Homo sapiens
  CDR3 for alpha chain variable domain of TCR clone 360767 (TRAV3, TRAJ5)
CAVRDLDTGRRALTF

SEQ ID NO: 721534 - protein, 16 aa, Homo sapiens
  CDR3 for beta chain variable domain of TCR clone 360767 (TRBV20-1, TRBJ1-2)
CSASMRQGVANYGYTF

SEQ ID NO: 721535 - protein, 16 aa, Homo sapiens
  CDR3 for alpha chain variable domain of TCR clone 360768 (TRAV8-4, TRAJ5)
CAVSPLTDTGRRALTF

SEQ ID NO: 721536 - protein, 14 aa, Homo sapiens
  CDR3 for beta chain variable domain of TCR clone 360768 (TRBV19, TRBJ1-6)
CASSTDGWNSPLYF

SEQ ID NO: 721537 - protein, 14 aa, Homo sapiens
  CDR3 for alpha chain variable domain of TCR clone 360769 (TRAV1-2, TRAJ16)
CAVTRFSDGQKLPF

SEQ ID NO: 721538 - protein, 15 aa, Homo sapiens
  CDR3 for beta chain variable domain of TCR clone 360769 (TRBV9, TRBJ1-6)
CASSVAGTGDSPLHF

SEQ ID NO: 721539 - protein, 17 aa, Homo sapiens
  CDR3 for alpha chain variable domain of TCR clone 360770 (TRAV19, TRAJ28)
CALSEASSGAGSYQLTF

SEQ ID NO: 721540 - protein, 14 aa, Homo sapiens
  CDR3 for beta chain variable domain of TCR clone 360770 (TRBV6-1, TRBJ1-3)
CASVQGGGGNTIYF

SEQ ID NO: 721541 - protein, 16 aa, Homo sapiens
  CDR3 for alpha chain variable domain of TCR clone 360771 (TRAV14/DV4, TRAJ21)
CAMREGPENNFNKFYF

SEQ ID NO: 721542 - protein, 16 aa, Homo sapiens
  CDR3 for beta chain variable domain of TCR clone 360771 (TRBV7-7, TRBJ2-1)
CASSLASGTSYNEQFF

SEQ ID NO: 721543 - protein, 18 aa, Homo sapiens
  CDR3 for alpha chain variable domain of TCR clone 360772 (TRAV26-2, TRAJ54)
CILRDVEVGLQGAQKLVF

SEQ ID NO: 721544 - protein, 15 aa, Homo sapiens
  CDR3 for beta chain variable domain of TCR clone 360772 (TRBV4-1, TRBJ1-4)
CASSDTGGTNEKLFF

SEQ ID NO: 721545 - protein, 14 aa, Homo sapiens
  CDR3 for alpha chain variable domain of TCR clone 360773 (TRAV8-4, TRAJ9)
CAVRINTGGFKTIL

SEQ ID NO: 721546 - protein, 14 aa, Homo sapiens
  CDR3 for beta chain variable domain of TCR clone 360773 (TRBV5-1, TRBJ1-1)
CASSLQGASTEAFF

SEQ ID NO: 721547 - protein, 14 aa, Homo sapiens
  CDR3 for alpha chain variable domain of TCR clone 360774 (TRAV8-1, TRAJ34)
CAVNPSYNTDKLIF

SEQ ID NO: 721548 - protein, 15 aa, Homo sapiens
  CDR3 for beta chain variable domain of TCR clone 360774 (TRBV11-2, TRBJ2-5)
CASSSTTGGRETQYF

SEQ ID NO: 721549 - protein, 14 aa, Homo sapiens
  CDR3 for alpha chain variable domain of TCR clone 360775 (TRAV38-1, TRAJ40)
CALRPASGTYKYIF

SEQ ID NO: 721550 - protein, 14 aa, Homo sapiens
  CDR3 for beta chain variable domain of TCR clone 360775 (TRBV25-1, TRBJ1-1)
CAGTHLGGNTEAFF

SEQ ID NO: 721551 - protein, 11 aa, Homo sapiens
  CDR3 for alpha chain variable domain of TCR clone 360776 (TRAV12-2, TRAJ33)
CAVGSNYQLIW

SEQ ID NO: 721552 - protein, 16 aa, Homo sapiens
  CDR3 for beta chain variable domain of TCR clone 360776 (TRBV27, TRBJ2-7)
CACSSERRDSAYEQYF

SEQ ID NO: 721553 - protein, 12 aa, Homo sapiens
  CDR3 for alpha chain variable domain of TCR clone 360777 (TRAV3, TRAJ43)
CAVRDPDNDMRF

SEQ ID NO: 721554 - protein, 17 aa, Homo sapiens
  CDR3 for beta chain variable domain of TCR clone 360777 (TRBV7-8, TRBJ2-6)
CASSAGTGGAGANVLTF

SEQ ID NO: 721555 - protein, 14 aa, Homo sapiens
  CDR3 for alpha chain variable domain of TCR clone 360778 (TRAV1-2, TRAJ16)
CAVNRFSDVQKLLF

SEQ ID NO: 721556 - protein, 14 aa, Homo sapiens
  CDR3 for beta chain variable domain of TCR clone 360778 (TRBV7-9, TRBJ2-1)
CASSPRDSLYEQFF

SEQ ID NO: 721557 - protein, 14 aa, Homo sapiens
  CDR3 for alpha chain variable domain of TCR clone 360779 (TRAV1-2, TRAJ16)
CAVNRFSDGQKLLF

SEQ ID NO: 721558 - protein, 15 aa, Homo sapiens
  CDR3 for beta chain variable domain of TCR clone 360779 (TRBV9, TRBJ1-1)
CASSVAGTGDSPLHF

SEQ ID NO: 721559 - protein, 14 aa, Homo sapiens
  CDR3 for alpha chain variable domain of TCR clone 360780 (TRAV13-1, TRAJ35)
CAAGKGGFGNVLHC

SEQ ID NO: 721560 - protein, 13 aa, Homo sapiens
  CDR3 for beta chain variable domain of TCR clone 360780 (TRBV7-3, TRBJ1-1)
CASSQEWGAEAFF

SEQ ID NO: 721561 - protein, 11 aa, Homo sapiens
  CDR3 for alpha chain variable domain of TCR clone 360781 (TRAV2, TRAJ13)
CASGGYQKVTF

SEQ ID NO: 721562 - protein, 16 aa, Homo sapiens
  CDR3 for beta chain variable domain of TCR clone 360781 (TRBV19, TRBJ2-1)
CASSMGGGSYYNEQFF

SEQ ID NO: 721563 - protein, 11 aa, Homo sapiens
  CDR3 for alpha chain variable domain of TCR clone 360782 (TRAV2, TRAJ33)
CAVESNYQLIW

SEQ ID NO: 721564 - protein, 10 aa, Homo sapiens
  CDR3 for beta chain variable domain of TCR clone 360782 (TRBV19, TRBJ1-1)
GQIQNTEAFF

SEQ ID NO: 721565 - protein, 16 aa, Homo sapiens
  CDR3 for alpha chain variable domain of TCR clone 360783 (TRAV30, TRAJ24)
CGTEIVDADSWGKFQF

SEQ ID NO: 721566 - protein, 17 aa, Homo sapiens
  CDR3 for beta chain variable domain of TCR clone 360783 (TRBV20-1, TRBJ2-1)
CSASSSGLAVSYNEQFF

SEQ ID NO: 721567 - protein, 23 aa, Homo sapiens
  CDR3 for alpha chain variable domain of TCR clone 360784 (TRAV30, TRAJ43)
CNLRPPSSVTQEPTSAALSDMRF

SEQ ID NO: 721568 - protein, 13 aa, Homo sapiens
  CDR3 for beta chain variable domain of TCR clone 360784 (TRBV12-4, TRBJ2-2)
CASSITGSGELFF

SEQ ID NO: 721569 - protein, 12 aa, Homo sapiens
  CDR3 for alpha chain variable domain of TCR clone 360785 (TRAV13-2, TRAJ23)
CAERHRGGKLIF

SEQ ID NO: 721570 - protein, 16 aa, Homo sapiens
  CDR3 for beta chain variable domain of TCR clone 360785 (TRBV7-2, TRBJ2-6)
CAILSRVSSGANVLTF

SEQ ID NO: 721571 - protein, 14 aa, Homo sapiens
  CDR3 for alpha chain variable domain of TCR clone 360786 (TRAV8-4, TRAJ8)
CAVSLNTGFQKLVF

SEQ ID NO: 721572 - protein, 15 aa, Homo sapiens
  CDR3 for beta chain variable domain of TCR clone 360786 (TRBV20-1, TRBJ2-7)
CSAESGTSGAYEQYF

SEQ ID NO: 721573 - protein, 13 aa, Homo sapiens
  CDR3 for alpha chain variable domain of TCR clone 360787 (TRAV38-2/DV8, TRAJ49)
CAYRRRTGNQFYF

SEQ ID NO: 721574 - protein, 15 aa, Homo sapiens
  CDR3 for beta chain variable domain of TCR clone 360787 (TRBV24-1, TRBJ1-1)
CATSDSMTVNTEAFF

SEQ ID NO: 721575 - protein, 13 aa, Homo sapiens
  CDR3 for alpha chain variable domain of TCR clone 360788 (TRAV13-2, TRAJ53)
CAENMGSNYKLTF

SEQ ID NO: 721576 - protein, 15 aa, Homo sapiens
  CDR3 for beta chain variable domain of TCR clone 360788 (TRBV19, TRBJ1-6)
CASSTQGAVGSPLHF

SEQ ID NO: 721577 - protein, 17 aa, Homo sapiens
  CDR3 for alpha chain variable domain of TCR clone 360789 (TRAV38-2/DV8, TRAJ38)
CAYRRARGAGNNRKLIW

SEQ ID NO: 721578 - protein, 13 aa, Homo sapiens
  CDR3 for beta chain variable domain of TCR clone 360789 (TRBV6-5, TRBJ2-1)
CASRGRVGNEQFF

SEQ ID NO: 721579 - protein, 15 aa, Homo sapiens
  CDR3 for alpha chain variable domain of TCR clone 360790 (TRAV8-3, TRAJ40)
CAAPSLGSGTYRYIF

SEQ ID NO: 721580 - protein, 16 aa, Homo sapiens
  CDR3 for beta chain variable domain of TCR clone 360790 (TRBV7-3, TRBJ2-3)
CASGLSGYRPEDTQYF

SEQ ID NO: 721581 - protein, 12 aa, Homo sapiens
  CDR3 for alpha chain variable domain of TCR clone 360791 (TRAV13-1, TRAJ3)
CAATGVQKCFQD

SEQ ID NO: 721582 - protein, 16 aa, Homo sapiens
  CDR3 for beta chain variable domain of TCR clone 360791 (TRBV7-3, TRBJ2-2)
CASSLKRGTLSGELFC

SEQ ID NO: 721583 - protein, 21 aa, Homo sapiens
  CDR3 for alpha chain variable domain of TCR clone 360792 (TRAV26-1, TRAJ17)
CCVLLHRQSSGSKAAGNKLTF

SEQ ID NO: 721584 - protein, 11 aa, Homo sapiens
  CDR3 for beta chain variable domain of TCR clone 360792 (TRBV7-2, TRBJ2-3)
CASSSSDTQYF

SEQ ID NO: 721585 - protein, 13 aa, Homo sapiens
  CDR3 for alpha chain variable domain of TCR clone 360793 (TRAV16, TRAJ48)
CSPLNFGNEKLTF

SEQ ID NO: 721586 - protein, 11 aa, Homo sapiens
  CDR3 for beta chain variable domain of TCR clone 360793 (TRBV7-9, TRBJ2-3)
CASSPTDPQYF

SEQ ID NO: 721587 - protein, 14 aa, Homo sapiens
  CDR3 for alpha chain variable domain of TCR clone 360794 (TRAV17, TRAJ34)
CATDSLEGTDKPIF

SEQ ID NO: 721588 - protein, 15 aa, Homo sapiens
  CDR3 for beta chain variable domain of TCR clone 360794 (TRBV12-4, TRBJ1-2)
CASSPITGGGYGYTF

SEQ ID NO: 721589 - protein, 14 aa, Homo sapiens
  CDR3 for alpha chain variable domain of TCR clone 360795 (TRAV35, TRAJ38)
CAGSNAGNNRKLIW

SEQ ID NO: 721590 - protein, 15 aa, Homo sapiens
  CDR3 for beta chain variable domain of TCR clone 360795 (TRBV7-3, TRBJ2-2)
CASSETGQGTGELFF

SEQ ID NO: 721591 - protein, 15 aa, Homo sapiens
  CDR3 for alpha chain variable domain of TCR clone 360796 (TRAV30, TRAJ57)
CGTAIPQGGSDKLVF

SEQ ID NO: 721592 - protein, 13 aa, Homo sapiens
  CDR3 for beta chain variable domain of TCR clone 360796 (TRBV7-9, TRBJ1-2)
CASSPSNFWGYTF

SEQ ID NO: 721593 - protein, 14 aa, Homo sapiens
  CDR3 for alpha chain variable domain of TCR clone 360797 (TRAV1-2, TRAJ8)
CALREDTGFQKLVF

SEQ ID NO: 721594 - protein, 13 aa, Homo sapiens
  CDR3 for beta chain variable domain of TCR clone 360797 (TRBV7-3, TRBJ2-1)
CASSLDSYNEQFF

SEQ ID NO: 721595 - protein, 18 aa, Homo sapiens
  CDR3 for alpha chain variable domain of TCR clone 360798 (TRAV26-1, TRAJ52)
CIVRVAGAGSTSYGKLTF

SEQ ID NO: 721596 - protein, 13 aa, Homo sapiens
  CDR3 for beta chain variable domain of TCR clone 360798 (TRBV7-8, TRBJ1-2)
CASSAQSYYGYTF

SEQ ID NO: 721597 - protein, 13 aa, Homo sapiens
  CDR3 for alpha chain variable domain of TCR clone 360799 (TRAV8-3, TRAJ6)
CAVEKGGSYIPTF

SEQ ID NO: 721598 - protein, 13 aa, Homo sapiens
  CDR3 for beta chain variable domain of TCR clone 360799 (TRBV7-9, TRBJ1-2)
CASSLRQNYGYTF

SEQ ID NO: 721599 - protein, 14 aa, Homo sapiens
  CDR3 for alpha chain variable domain of TCR clone 360800 (TRAV12-2, TRAJ13)
CAVKKTGGYQKVTF

SEQ ID NO: 721600 - protein, 17 aa, Homo sapiens
  CDR3 for beta chain variable domain of TCR clone 360800 (TRBV11-2, TRBJ2-1)
CASSLCPPGVEYNEQFF

SEQ ID NO: 721601 - protein, 11 aa, Homo sapiens
  CDR3 for alpha chain variable domain of TCR clone 360801 (TRAV3, TRAJ21)
CAVGNFNKLYF

SEQ ID NO: 721602 - protein, 13 aa, Homo sapiens
  CDR3 for beta chain variable domain of TCR clone 360801 (TRBV7-3, TRBJ1-1)
CASSQDWGAEAFF

SEQ ID NO: 721603 - protein, 20 aa, Homo sapiens
  CDR3 for alpha chain variable domain of TCR clone 360802 (TRAV8-3, TRAJ44)
LSTSVLWVRLSTGTASKLTF

SEQ ID NO: 721604 - protein, 15 aa, Homo sapiens
  CDR3 for beta chain variable domain of TCR clone 360802 (TRBV6-5, TRBJ1-2)
CASSYSQAFNYGYTF

SEQ ID NO: 721605 - protein, 17 aa, Homo sapiens
  CDR3 for alpha chain variable domain of TCR clone 360803 (TRAV3, TRAJ6)
CAVRDGPRAGGSYIPTF

SEQ ID NO: 721606 - protein, 15 aa, Homo sapiens
  CDR3 for beta chain variable domain of TCR clone 360803 (TRBV28, TRBJ2-5)
CASSSPGDPGETQYF

SEQ ID NO: 721607 - protein, 22 aa, Homo sapiens
  CDR3 for alpha chain variable domain of TCR clone 360804 (TRAV12-1, )
CVVLRGIPDIQNPDPAVSQLRD

SEQ ID NO: 721608 - protein, 15 aa, Homo sapiens
  CDR3 for beta chain variable domain of TCR clone 360804 (TRBV2, TRBJ2-1)
CASSEARSAYNEQFF

SEQ ID NO: 721609 - protein, 14 aa, Homo sapiens
  CDR3 for alpha chain variable domain of TCR clone 360805 (TRAV2, TRAJ9)
CAVEDRSGGFKTIF

SEQ ID NO: 721610 - protein, 12 aa, Homo sapiens
  CDR3 for beta chain variable domain of TCR clone 360805 (TRBV7-9, TRBJ2-7)
CASSLEGYEQYV

SEQ ID NO: 721611 - protein, 16 aa, Homo sapiens
  CDR3 for alpha chain variable domain of TCR clone 360806 (TRAV30, TRAJ24)
CGTEIVDADSWGKFQF

SEQ ID NO: 721612 - protein, 14 aa, Homo sapiens
  CDR3 for beta chain variable domain of TCR clone 360806 (TRBV7-2, TRBJ2-7)
CASSPKTSFYEQFF

SEQ ID NO: 721613 - protein, 14 aa, Homo sapiens
  CDR3 for alpha chain variable domain of TCR clone 360807 (TRAV17, TRAJ34)
CATDSLEGTDKLIF

SEQ ID NO: 721614 - protein, 17 aa, Homo sapiens
  CDR3 for beta chain variable domain of TCR clone 360807 (TRBV7-8, TRBJ2-6)
CASSAGTGGAGANVLTF

SEQ ID NO: 721615 - protein, 18 aa, Homo sapiens
  CDR3 for alpha chain variable domain of TCR clone 360808 (TRAV26-1, TRAJ57)
CTVRVALRFQGGSEKLVF

SEQ ID NO: 721616 - protein, 15 aa, Homo sapiens
  CDR3 for beta chain variable domain of TCR clone 360808 (TRBV27, TRBJ2-1)
CASSNGGGSSNEQFF

SEQ ID NO: 721617 - protein, 13 aa, Homo sapiens
  CDR3 for alpha chain variable domain of TCR clone 360809 (TRAV8-6, TRAJ49)
CAVITNTGNQFYF

SEQ ID NO: 721618 - protein, 13 aa, Homo sapiens
  CDR3 for beta chain variable domain of TCR clone 360809 (TRBV4-1, TRBJ2-7)
CASSQGQAYEQYF

SEQ ID NO: 721619 - protein, 13 aa, Homo sapiens
  CDR3 for alpha chain variable domain of TCR clone 360810 (TRAV30, TRAJ24)
FGTVTDSWGKWQF

SEQ ID NO: 721620 - protein, 14 aa, Homo sapiens
  CDR3 for beta chain variable domain of TCR clone 360810 (TRBV6-3, TRBJ2-2)
CASTYTPDTGELFF

SEQ ID NO: 721621 - protein, 14 aa, Homo sapiens
  CDR3 for alpha chain variable domain of TCR clone 360811 (TRAV23/DV6, TRAJ11)
CAASLESGYSTLTF

SEQ ID NO: 721622 - protein, 13 aa, Homo sapiens
  CDR3 for beta chain variable domain of TCR clone 360811 (TRBV4-1, TRBJ2-5)
CARSLTRGETQYF

SEQ ID NO: 721623 - protein, 10 aa, Homo sapiens
  CDR3 for alpha chain variable domain of TCR clone 360812 (TRAV8-3, TRAJ45)
SGGGADGLTF

SEQ ID NO: 721624 - protein, 17 aa, Homo sapiens
  CDR3 for beta chain variable domain of TCR clone 360812 (TRBV7-8, TRBJ1-2)
CASSLRPLQGHLYGYTF

SEQ ID NO: 721625 - protein, 14 aa, Homo sapiens
  CDR3 for alpha chain variable domain of TCR clone 360813 (TRAV8-1, TRAJ5)
CAVRTDTARRALTF

SEQ ID NO: 721626 - protein, 14 aa, Homo sapiens
  CDR3 for beta chain variable domain of TCR clone 360813 (TRBV7-8, TRBJ2-3)
CASSFPDGQDTQYF

SEQ ID NO: 721627 - protein, 10 aa, Homo sapiens
  CDR3 for alpha chain variable domain of TCR clone 360814 (TRAV16, TRAJ22)
SAMYLRQLTF

SEQ ID NO: 721628 - protein, 13 aa, Homo sapiens
  CDR3 for beta chain variable domain of TCR clone 360814 (TRBV7-2, TRBJ2-2)
CASSLAVTGELFF

SEQ ID NO: 721629 - protein, 11 aa, Homo sapiens
  CDR3 for alpha chain variable domain of TCR clone 360815 (TRAV12-1, TRAJ8)
CVVTGFQKLVF

SEQ ID NO: 721630 - protein, 14 aa, Homo sapiens
  CDR3 for beta chain variable domain of TCR clone 360815 (TRBV11-2, TRBJ2-5)
CASSRTGGIETQYF

SEQ ID NO: 721631 - protein, 13 aa, Homo sapiens
  CDR3 for alpha chain variable domain of TCR clone 360816 (TRAV23/DV6, TRAJ9)
CAASTTGGFKTIF

SEQ ID NO: 721632 - protein, 13 aa, Homo sapiens
  CDR3 for beta chain variable domain of TCR clone 360816 (TRBV7-9, TRBJ2-7)
CASSFAGAYEQYF

SEQ ID NO: 721633 - protein, 15 aa, Homo sapiens
  CDR3 for alpha chain variable domain of TCR clone 360817 (TRAV29/DV5, TRAJ53)
CAASASGGSNYKLTF

SEQ ID NO: 721634 - protein, 14 aa, Homo sapiens
  CDR3 for beta chain variable domain of TCR clone 360817 (TRBV28, TRBJ1-5)
CASSLDRLNQPQHF

SEQ ID NO: 721635 - protein, 13 aa, Homo sapiens
  CDR3 for alpha chain variable domain of TCR clone 360818 (TRAV20, TRAJ42)
CAVQGESQGNLIF

SEQ ID NO: 721636 - protein, 15 aa, Homo sapiens
  CDR3 for beta chain variable domain of TCR clone 360818 (TRBV9, TRBJ1-6)
CASSVAGTGDSPLHF

SEQ ID NO: 721637 - protein, 14 aa, Homo sapiens
  CDR3 for alpha chain variable domain of TCR clone 360819 (TRAV9-2, TRAJ39)
CALYIYNAGNMLTF

SEQ ID NO: 721638 - protein, 14 aa, Homo sapiens
  CDR3 for beta chain variable domain of TCR clone 360819 (TRBV19, TRBJ2-1)
CASPTFVLRGEQFF

SEQ ID NO: 721639 - protein, 16 aa, Homo sapiens
  CDR3 for alpha chain variable domain of TCR clone 360820 (TRAV8-3, TRAJ13)
CAVGAYPSGGYQKVTF

SEQ ID NO: 721640 - protein, 15 aa, Homo sapiens
  CDR3 for beta chain variable domain of TCR clone 360820 (TRBV19, TRBJ1-5)
CASSIVWADNQPHHF

SEQ ID NO: 721641 - protein, 14 aa, Homo sapiens
  CDR3 for alpha chain variable domain of TCR clone 360821 (TRAV8-3, TRAJ4)
CAVGAAGGYNKLIF

SEQ ID NO: 721642 - protein, 15 aa, Homo sapiens
  CDR3 for beta chain variable domain of TCR clone 360821 (TRBV7-3, TRBJ2-1)
CASSLGQGPFGEQFF

SEQ ID NO: 721643 - protein, 13 aa, Homo sapiens
  CDR3 for alpha chain variable domain of TCR clone 360822 (TRAV17, TRAJ40)
CATAPGGTYKYIF

SEQ ID NO: 721644 - protein, 12 aa, Homo sapiens
  CDR3 for beta chain variable domain of TCR clone 360822 (TRBV2, TRBJ1-5)
CASSEKRTPQHF

SEQ ID NO: 721645 - protein, 12 aa, Homo sapiens
  CDR3 for alpha chain variable domain of TCR clone 360823 (TRAV17, TRAJ57)
CATDGGSEKLVF

SEQ ID NO: 721646 - protein, 13 aa, Homo sapiens
  CDR3 for beta chain variable domain of TCR clone 360823 (TRBV7-9, TRBJ2-7)
CVSSFAGTYEQYF

SEQ ID NO: 721647 - protein, 13 aa, Homo sapiens
  CDR3 for alpha chain variable domain of TCR clone 360824 (TRAV17, TRAJ5)
CAPMDTGRRALTF

SEQ ID NO: 721648 - protein, 13 aa, Homo sapiens
  CDR3 for beta chain variable domain of TCR clone 360824 (TRBV7-9, TRBJ1-2)
CASSVKQNYGYTF

SEQ ID NO: 721649 - protein, 14 aa, Homo sapiens
  CDR3 for alpha chain variable domain of TCR clone 360825 (TRAV1-2, TRAJ16)
CAVNRFSAGQKLLF

SEQ ID NO: 721650 - protein, 16 aa, Homo sapiens
  CDR3 for beta chain variable domain of TCR clone 360825 (TRBV7-3, TRBJ2-2)
CASSLKRGTLSGELFF

SEQ ID NO: 721651 - protein, 18 aa, Homo sapiens
  CDR3 for alpha chain variable domain of TCR clone 360826 (TRAV3, TRAJ17)
CAVRARRGGLSCRQQANF

SEQ ID NO: 721652 - protein, 14 aa, Homo sapiens
  CDR3 for beta chain variable domain of TCR clone 360826 (TRBV4-1, TRBJ2-2)
CASSQAVNTGELFF

SEQ ID NO: 721653 - protein, 13 aa, Homo sapiens
  CDR3 for alpha chain variable domain of TCR clone 360827 (TRAV8-3, TRAJ44)
CAVVPGTASKLTF

SEQ ID NO: 721654 - protein, 12 aa, Homo sapiens
  CDR3 for beta chain variable domain of TCR clone 360827 (TRBV12-4, TRBJ1-3)
CASSFSGNTIYF

SEQ ID NO: 721655 - protein, 17 aa, Homo sapiens
  CDR3 for alpha chain variable domain of TCR clone 360828 (TRAV26-1, TRAJ10)
CIVSLRGLTGGGNKLTF

SEQ ID NO: 721656 - protein, 13 aa, Homo sapiens
  CDR3 for beta chain variable domain of TCR clone 360828 (TRBV20-1, TRBJ2-3)
CSASRQAADTQYF

SEQ ID NO: 721657 - protein, 15 aa, Homo sapiens
  CDR3 for alpha chain variable domain of TCR clone 360829 (TRAV21, TRAJ22)
CAVRLFFWFCKATDL

SEQ ID NO: 721658 - protein, 14 aa, Homo sapiens
  CDR3 for beta chain variable domain of TCR clone 360829 (TRBV19, TRBJ1-5)
CASRAPDSFRAQHF

SEQ ID NO: 721659 - protein, 13 aa, Homo sapiens
  CDR3 for alpha chain variable domain of TCR clone 360830 (TRAV2, TRAJ15)
CAVASQAGTALIF

SEQ ID NO: 721660 - protein, 14 aa, Homo sapiens
  CDR3 for beta chain variable domain of TCR clone 360830 (TRBV19, TRBJ2-2)
CASSGQGIAGELFF

SEQ ID NO: 721661 - protein, 15 aa, Homo sapiens
  CDR3 for alpha chain variable domain of TCR clone 360831 (TRAV8-3, TRAJ11)
CAVGLLNSGSSTLTF

SEQ ID NO: 721662 - protein, 16 aa, Homo sapiens
  CDR3 for beta chain variable domain of TCR clone 360831 (TRBV15, TRBJ2-7)
CATSRGRAGGTYEQYF

SEQ ID NO: 721663 - protein, 15 aa, Homo sapiens
  CDR3 for alpha chain variable domain of TCR clone 360832 (TRAV20, TRAJ50)
CAVRQMKTSYDKVIF

SEQ ID NO: 721664 - protein, 17 aa, Homo sapiens
  CDR3 for beta chain variable domain of TCR clone 360832 (TRBV25-1, TRBJ2-5)
CASSRRGGRGGQETQYF

SEQ ID NO: 721665 - protein, 12 aa, Homo sapiens
  CDR3 for alpha chain variable domain of TCR clone 360833 (TRAV26-1, TRAJ13)
CIVSRGYQKVNF

SEQ ID NO: 721666 - protein, 15 aa, Homo sapiens
  CDR3 for beta chain variable domain of TCR clone 360833 (TRBV13, TRBJ2-1)
CASSLLSGLNNEQFF

SEQ ID NO: 721667 - protein, 16 aa, Homo sapiens
  CDR3 for alpha chain variable domain of TCR clone 360834 (TRAV23/DV6, TRAJ52)
CAARPSGGTSYGKLNF

SEQ ID NO: 721668 - protein, 14 aa, Homo sapiens
  CDR3 for beta chain variable domain of TCR clone 360834 (TRBV20-1, TRBJ2-3)
CSARDASSTDTQYF

SEQ ID NO: 721669 - protein, 14 aa, Homo sapiens
  CDR3 for alpha chain variable domain of TCR clone 360835 (TRAV17, TRAJ57)
CATDPQGGSEKLVF

SEQ ID NO: 721670 - protein, 13 aa, Homo sapiens
  CDR3 for beta chain variable domain of TCR clone 360835 (TRBV5-8, TRBJ2-3)
CQQLGGGTDTQYF

SEQ ID NO: 721671 - protein, 13 aa, Homo sapiens
  CDR3 for alpha chain variable domain of TCR clone 360836 (TRAV17, TRAJ15)
CATVNQSVTALIF

SEQ ID NO: 721672 - protein, 13 aa, Homo sapiens
  CDR3 for beta chain variable domain of TCR clone 360836 (TRBV3-1, TRBJ1-1)
CASSPGVITEAFF

SEQ ID NO: 721673 - protein, 13 aa, Homo sapiens
  CDR3 for alpha chain variable domain of TCR clone 360837 (TRAV21, TRAJ27)
CAARHGNAGKSTF

SEQ ID NO: 721674 - protein, 15 aa, Homo sapiens
  CDR3 for beta chain variable domain of TCR clone 360837 (TRBV11-3, TRBJ2-7)
CASSPGPASSYEQYF

SEQ ID NO: 721675 - protein, 15 aa, Homo sapiens
  CDR3 for alpha chain variable domain of TCR clone 360838 (TRAV8-1, TRAJ6)
CAVNTPPGGSYIPTF

SEQ ID NO: 721676 - protein, 15 aa, Homo sapiens
  CDR3 for beta chain variable domain of TCR clone 360838 (TRBV11-2, TRBJ2-2)
CASSSDRGNAGELFF

SEQ ID NO: 721677 - protein, 17 aa, Homo sapiens
  CDR3 for alpha chain variable domain of TCR clone 360839 (TRAV2, TRAJ36)
CAVEDRVNWGKQPLLWD

SEQ ID NO: 721678 - protein, 14 aa, Homo sapiens
  CDR3 for beta chain variable domain of TCR clone 360839 (TRBV7-9, TRBJ2-5)
CASSLDTAQETQYF

SEQ ID NO: 721679 - protein, 16 aa, Homo sapiens
  CDR3 for alpha chain variable domain of TCR clone 360840 (TRAV3, TRAJ37)
CAVSGEGSGNTGKLIF

SEQ ID NO: 721680 - protein, 11 aa, Homo sapiens
  CDR3 for beta chain variable domain of TCR clone 360840 (TRBV19, TRBJ1-1)
CASSIGSEAFF

SEQ ID NO: 721681 - protein, 14 aa, Homo sapiens
  CDR3 for alpha chain variable domain of TCR clone 360841 (TRAV23/DV6, TRAJ37)
CAASTYSNTGKLIF

SEQ ID NO: 721682 - protein, 13 aa, Homo sapiens
  CDR3 for beta chain variable domain of TCR clone 360841 (TRBV7-7, TRBJ1-1)
CASSLGANTEAFF

SEQ ID NO: 721683 - protein, 21 aa, Homo sapiens
  CDR3 for alpha chain variable domain of TCR clone 360842 (TRAV1-1, TRAJ6)
CLLLLRCERLERTGGSFIPTF

SEQ ID NO: 721684 - protein, 12 aa, Homo sapiens
  CDR3 for beta chain variable domain of TCR clone 360842 (TRBV11-2, TRBJ2-2)
CASSLGGGELFF

SEQ ID NO: 721685 - protein, 15 aa, Homo sapiens
  CDR3 for alpha chain variable domain of TCR clone 360843 (TRAV8-2, TRAJ15)
CVVTMGNQAGTALFF

SEQ ID NO: 721686 - protein, 16 aa, Homo sapiens
  CDR3 for beta chain variable domain of TCR clone 360843 (TRBV12-4, TRBJ1-5)
CASSRPVGGSNQPQHF

SEQ ID NO: 721687 - protein, 12 aa, Homo sapiens
  CDR3 for alpha chain variable domain of TCR clone 360844 (TRAV38-1, TRAJ47)
CAFETYGNKLVF

SEQ ID NO: 721688 - protein, 15 aa, Homo sapiens
  CDR3 for beta chain variable domain of TCR clone 360844 (TRBV5-7, TRBJ2-7)
CTSSGGRPVPYEQYF

SEQ ID NO: 721689 - protein, 14 aa, Homo sapiens
  CDR3 for alpha chain variable domain of TCR clone 360845 (TRAV1-2, )
CSFNLFSYFHNLLF

SEQ ID NO: 721690 - protein, 15 aa, Homo sapiens
  CDR3 for beta chain variable domain of TCR clone 360845 (TRBV9, TRBJ1-6)
WASSGAGTGEAPLHG

SEQ ID NO: 721691 - protein, 12 aa, Homo sapiens
  CDR3 for alpha chain variable domain of TCR clone 360846 (TRAV12-3, TRAJ17)
CAMTLTGNKLTF

SEQ ID NO: 721692 - protein, 16 aa, Homo sapiens
  CDR3 for beta chain variable domain of TCR clone 360846 (TRBV19, TRBJ2-1)
CASSTAGPSSYNEQFF

SEQ ID NO: 721693 - protein, 11 aa, Homo sapiens
  CDR3 for alpha chain variable domain of TCR clone 360847 (TRAV3, TRAJ21)
CAVGNFNKFYF

SEQ ID NO: 721694 - protein, 13 aa, Homo sapiens
  CDR3 for beta chain variable domain of TCR clone 360847 (TRBV20-1, TRBJ1-1)
CSAGTVGNTEAFF

SEQ ID NO: 721695 - protein, 14 aa, Homo sapiens
  CDR3 for alpha chain variable domain of TCR clone 360848 (TRAV8-3, TRAJ37)
CAVGSSGNTGKLIF

SEQ ID NO: 721696 - protein, 16 aa, Homo sapiens
  CDR3 for beta chain variable domain of TCR clone 360848 (TRBV12-4, TRBJ2-5)
CASSFFVRGRQETQYF

SEQ ID NO: 721697 - protein, 11 aa, Homo sapiens
  CDR3 for alpha chain variable domain of TCR clone 360849 (TRAV12-2, TRAJ49)
CAVNTGNQFYF

SEQ ID NO: 721698 - protein, 11 aa, Homo sapiens
  CDR3 for beta chain variable domain of TCR clone 360849 (TRBV2, TRBJ2-3)
CASSAVRYAVF

SEQ ID NO: 721699 - protein, 11 aa, Homo sapiens
  CDR3 for alpha chain variable domain of TCR clone 360850 (TRAV3, TRAJ21)
CAVCNFNKFYF

SEQ ID NO: 721700 - protein, 15 aa, Homo sapiens
  CDR3 for beta chain variable domain of TCR clone 360850 (TRBV12-4, TRBJ2-5)
CASSPPTGLQETQYF

SEQ ID NO: 721701 - protein, 17 aa, Homo sapiens
  CDR3 for alpha chain variable domain of TCR clone 360851 (TRAV3, TRAJ6)
CAVRDGPRAGGSYIPTF

SEQ ID NO: 721702 - protein, 18 aa, Homo sapiens
  CDR3 for beta chain variable domain of TCR clone 360851 (TRBV7-9, TRBJ2-7)
CACSLTTSGSRTWYEQYF

SEQ ID NO: 721703 - protein, 16 aa, Homo sapiens
  CDR3 for alpha chain variable domain of TCR clone 360852 (TRAV3, TRAJ28)
CAVLPRSGAGSYQRTL

SEQ ID NO: 721704 - protein, 13 aa, Homo sapiens
  CDR3 for beta chain variable domain of TCR clone 360852 (TRBV12-4, TRBJ2-5)
CASRLAVQETQYF

SEQ ID NO: 721705 - protein, 16 aa, Homo sapiens
  CDR3 for alpha chain variable domain of TCR clone 360853 (TRAV12-2, TRAJ52)
CRLANAGGTSYGKLTF

SEQ ID NO: 721706 - protein, 14 aa, Homo sapiens
  CDR3 for beta chain variable domain of TCR clone 360853 (TRBV19, TRBJ2-2)
CASSGQGIAGELFF

SEQ ID NO: 721707 - protein, 18 aa, Homo sapiens
  CDR3 for alpha chain variable domain of TCR clone 360854 (TRAV13-1, TRAJ52)
CAASKRSAGGTSYGKLTF

SEQ ID NO: 721708 - protein, 16 aa, Homo sapiens
  CDR3 for beta chain variable domain of TCR clone 360854 (TRBV7-7, TRBJ2-1)
CASSLASGTSYNEQFF

SEQ ID NO: 721709 - protein, 21 aa, Homo sapiens
  CDR3 for alpha chain variable domain of TCR clone 360855 (TRAV1-1, TRAJ6)
CLLLLRCERLERTGESYITTF

SEQ ID NO: 721710 - protein, 13 aa, Homo sapiens
  CDR3 for beta chain variable domain of TCR clone 360855 (TRBV10-2, TRBJ2-7)
CASGASGGYEQYF

SEQ ID NO: 721711 - protein, 11 aa, Homo sapiens
  CDR3 for alpha chain variable domain of TCR clone 360856 (TRAV12-2, TRAJ29)
CAVTLRSPLVF

SEQ ID NO: 721712 - protein, 16 aa, Homo sapiens
  CDR3 for beta chain variable domain of TCR clone 360856 (TRBV19, TRBJ1-5)
CASSIDRGCPRQPQHF

SEQ ID NO: 721713 - protein, 15 aa, Homo sapiens
  CDR3 for alpha chain variable domain of TCR clone 360857 (TRAV17, TRAJ57)
CATGPSQGGSEKLVF

SEQ ID NO: 721714 - protein, 15 aa, Homo sapiens
  CDR3 for beta chain variable domain of TCR clone 360857 (TRBV28, TRBJ1-5)
CASSRTGGYVQPQHF

SEQ ID NO: 721715 - protein, 13 aa, Homo sapiens
  CDR3 for alpha chain variable domain of TCR clone 360858 (TRAV21, TRAJ17)
CTMSKAAGNKLTF

SEQ ID NO: 721716 - protein, 13 aa, Homo sapiens
  CDR3 for beta chain variable domain of TCR clone 360858 (TRBV19, TRBJ2-5)
CASTWAGGETQYF

SEQ ID NO: 721717 - protein, 16 aa, Homo sapiens
  CDR3 for alpha chain variable domain of TCR clone 360859 (TRAV12-1, TRAJ37)
CGAPREGPSNTGKLIF

SEQ ID NO: 721718 - protein, 13 aa, Homo sapiens
  CDR3 for beta chain variable domain of TCR clone 360859 (TRBV7-3, TRBJ1-1)
CASSQDWGAEAFF

SEQ ID NO: 721719 - protein, 11 aa, Homo sapiens
  CDR3 for alpha chain variable domain of TCR clone 360860 (TRAV26-1, TRAJ37)
CIVRVGRTLIF

SEQ ID NO: 721720 - protein, 14 aa, Homo sapiens
  CDR3 for beta chain variable domain of TCR clone 360860 (TRBV7-2, TRBJ2-7)
CASSLPPGQGPQYF

SEQ ID NO: 721721 - protein, 11 aa, Homo sapiens
  CDR3 for alpha chain variable domain of TCR clone 360861 (TRAV1-2, TRAJ20)
CAVSNDYKLSF

SEQ ID NO: 721722 - protein, 13 aa, Homo sapiens
  CDR3 for beta chain variable domain of TCR clone 360861 (TRBV7-8, TRBJ2-7)
CASSFAGLYEQYF

SEQ ID NO: 721723 - protein, 12 aa, Homo sapiens
  CDR3 for alpha chain variable domain of TCR clone 360862 (TRAV13-1, TRAJ42)
VNYGGSQGNLIF

SEQ ID NO: 721724 - protein, 15 aa, Homo sapiens
  CDR3 for beta chain variable domain of TCR clone 360862 (TRBV20-1, TRBJ2-1)
CNACSAGSSYNEQFF

SEQ ID NO: 721725 - protein, 13 aa, Homo sapiens
  CDR3 for alpha chain variable domain of TCR clone 360863 (TRAV27, TRAJ45)
CRSSGGGADGLTF

SEQ ID NO: 721726 - protein, 14 aa, Homo sapiens
  CDR3 for beta chain variable domain of TCR clone 360863 (TRBV7-9, TRBJ2-1)
CASSSRVGFGEQFF

SEQ ID NO: 721727 - protein, 13 aa, Homo sapiens
  CDR3 for alpha chain variable domain of TCR clone 360864 (TRAV1-2, TRAJ11)
CAVWREGYSTLTF

SEQ ID NO: 721728 - protein, 14 aa, Homo sapiens
  CDR3 for beta chain variable domain of TCR clone 360864 (TRBV25-1, TRBJ1-1)
CASTHLGGNTEAFF

SEQ ID NO: 721729 - protein, 13 aa, Homo sapiens
  CDR3 for alpha chain variable domain of TCR clone 360865 (TRAV2, TRAJ40)
CAVVTSGTYKYIF

SEQ ID NO: 721730 - protein, 16 aa, Homo sapiens
  CDR3 for beta chain variable domain of TCR clone 360865 (TRBV19, TRBJ2-1)
CASSKAGPSSYNEQSF

SEQ ID NO: 721731 - protein, 14 aa, Homo sapiens
  CDR3 for alpha chain variable domain of TCR clone 360866 (TRAV23/DV6, TRAJ17)
CAASVQAAGNKLTF

SEQ ID NO: 721732 - protein, 15 aa, Homo sapiens
  CDR3 for beta chain variable domain of TCR clone 360866 (TRBV9, TRBJ1-6)
CASSVAGTGDSPLHF

SEQ ID NO: 721733 - protein, 12 aa, Homo sapiens
  CDR3 for alpha chain variable domain of TCR clone 360867 (TRAV1-1, TRAJ8)
CAGGTGFQRLVF

SEQ ID NO: 721734 - protein, 15 aa, Homo sapiens
  CDR3 for beta chain variable domain of TCR clone 360867 (TRBV7-9, TRBJ1-4)
CASSRTGGFKEKLFF

SEQ ID NO: 721735 - protein, 17 aa, Homo sapiens
  CDR3 for alpha chain variable domain of TCR clone 360868 (TRAV3, TRAJ42)
CAVRDRDYGGSQGNRIF

SEQ ID NO: 721736 - protein, 13 aa, Homo sapiens
  CDR3 for beta chain variable domain of TCR clone 360868 (TRBV20-1, TRBJ2-5)
CSARRGTGATQYF

SEQ ID NO: 721737 - protein, 11 aa, Homo sapiens
  CDR3 for alpha chain variable domain of TCR clone 360869 (TRAV21, TRAJ34)
CAHYNTDKLIP

SEQ ID NO: 721738 - protein, 13 aa, Homo sapiens
  CDR3 for beta chain variable domain of TCR clone 360869 (TRBV7-6, TRBJ1-2)
CASSLVADYGYTF

SEQ ID NO: 721739 - protein, 14 aa, Homo sapiens
  CDR3 for alpha chain variable domain of TCR clone 360870 (TRAV12-3, TRAJ9)
CAMSPNTGGFKTIF

SEQ ID NO: 721740 - protein, 14 aa, Homo sapiens
  CDR3 for beta chain variable domain of TCR clone 360870 (TRBV27, TRBJ1-1)
CASSLLSGLSEAFF

SEQ ID NO: 721741 - protein, 17 aa, Homo sapiens
  CDR3 for alpha chain variable domain of TCR clone 360871 (TRAV3, TRAJ6)
CAVRDGPRAGGSYIPTF

SEQ ID NO: 721742 - protein, 16 aa, Homo sapiens
  CDR3 for beta chain variable domain of TCR clone 360871 (TRBV5-1, TRBJ2-7)
CASSFTTGTALVEQYF

SEQ ID NO: 721743 - protein, 14 aa, Homo sapiens
  CDR3 for alpha chain variable domain of TCR clone 360872 (TRAV1-2, TRAJ16)
CAVNRFSDGQKLLF

SEQ ID NO: 721744 - protein, 12 aa, Homo sapiens
  CDR3 for beta chain variable domain of TCR clone 360872 (TRBV5-1, TRBJ1-1)
CASSQGNTEAFF

SEQ ID NO: 721745 - protein, 16 aa, Homo sapiens
  CDR3 for alpha chain variable domain of TCR clone 360873 (TRAV12-3, TRAJ53)
CAMSPGSGGSNYKLTF

SEQ ID NO: 721746 - protein, 13 aa, Homo sapiens
  CDR3 for beta chain variable domain of TCR clone 360873 (TRBV7-3, TRBJ1-1)
CANSQDWGAEAFF

SEQ ID NO: 721747 - protein, 14 aa, Homo sapiens
  CDR3 for alpha chain variable domain of TCR clone 360874 (TRAV1-2, TRAJ16)
CAVNRFSDGQKLLF

SEQ ID NO: 721748 - protein, 15 aa, Homo sapiens
  CDR3 for beta chain variable domain of TCR clone 360874 (TRBV6-3, TRBJ2-7)
FASSSPGTVFYEQYF

SEQ ID NO: 721749 - protein, 13 aa, Homo sapiens
  CDR3 for alpha chain variable domain of TCR clone 360875 (TRAV8-4, TRAJ9)
CAVSATGGFKTIF

SEQ ID NO: 721750 - protein, 14 aa, Homo sapiens
  CDR3 for beta chain variable domain of TCR clone 360875 (TRBV13, TRBJ2-5)
CASSLERVGETQYF

SEQ ID NO: 721751 - protein, 14 aa, Homo sapiens
  CDR3 for alpha chain variable domain of TCR clone 360876 (TRAV1-2, TRAJ16)
CAVNRFSDGQKLLV

SEQ ID NO: 721752 - protein, 13 aa, Homo sapiens
  CDR3 for beta chain variable domain of TCR clone 360876 (TRBV6-1, TRBJ1-1)
CASSRQGNTEAFF

SEQ ID NO: 721753 - protein, 16 aa, Homo sapiens
  CDR3 for alpha chain variable domain of TCR clone 360877 (TRAV30, TRAJ24)
CGTEIVGADSWGKFQF

SEQ ID NO: 721754 - protein, 14 aa, Homo sapiens
  CDR3 for beta chain variable domain of TCR clone 360877 (TRBV19, TRBJ2-1)
CASPTFVLSGEQFF

SEQ ID NO: 721755 - protein, 17 aa, Homo sapiens
  CDR3 for alpha chain variable domain of TCR clone 360878 (TRAV3, TRAJ6)
CAVRDGPRAGGSYLPTF

SEQ ID NO: 721756 - protein, 15 aa, Homo sapiens
  CDR3 for beta chain variable domain of TCR clone 360878 (TRBV5-8, TRBJ2-2)
CACSLDRGATGELFF

SEQ ID NO: 721757 - protein, 11 aa, Homo sapiens
  CDR3 for alpha chain variable domain of TCR clone 360879 (TRAV35, TRAJ30)
CAGLRDDKIIF

SEQ ID NO: 721758 - protein, 13 aa, Homo sapiens
  CDR3 for beta chain variable domain of TCR clone 360879 (TRBV5-1, TRBJ1-2)
CASSIDRPEGYTF

SEQ ID NO: 721759 - protein, 11 aa, Homo sapiens
  CDR3 for alpha chain variable domain of TCR clone 360880 (TRAV12-2, TRAJ39)
CAVNNMLTFGG

SEQ ID NO: 721760 - protein, 16 aa, Homo sapiens
  CDR3 for beta chain variable domain of TCR clone 360880 (TRBV9, TRBJ2-7)
RASSAGPDRSPYEQYF

SEQ ID NO: 721761 - protein, 12 aa, Homo sapiens
  CDR3 for alpha chain variable domain of TCR clone 360881 (TRAV36/DV7, TRAJ40)
CAVGTGTYKYIF

SEQ ID NO: 721762 - protein, 15 aa, Homo sapiens
  CDR3 for beta chain variable domain of TCR clone 360881 (TRBV7-3, TRBJ2-1)
CASSLDGNSYNEQFF

SEQ ID NO: 721763 - protein, 14 aa, Homo sapiens
  CDR3 for alpha chain variable domain of TCR clone 360882 (TRAV12-3, TRAJ13)
CAIKNSGGYQKVTF

SEQ ID NO: 721764 - protein, 13 aa, Homo sapiens
  CDR3 for beta chain variable domain of TCR clone 360882 (TRBV29-1, TRBJ2-5)
CSARDRVEETQYF

SEQ ID NO: 721765 - protein, 14 aa, Homo sapiens
  CDR3 for alpha chain variable domain of TCR clone 360883 (TRAV12-2, TRAJ53)
CAVKGGGSNYKLTF

SEQ ID NO: 721766 - protein, 14 aa, Homo sapiens
  CDR3 for beta chain variable domain of TCR clone 360883 (TRBV20-1, TRBJ2-1)
CSAQRGGSANEQFF

SEQ ID NO: 721767 - protein, 11 aa, Homo sapiens
  CDR3 for alpha chain variable domain of TCR clone 360884 (TRAV17, TRAJ31)
CATSSNARLMF

SEQ ID NO: 721768 - protein, 14 aa, Homo sapiens
  CDR3 for beta chain variable domain of TCR clone 360884 (TRBV18, TRBJ2-7)
CASSPRGGAYEQYF

SEQ ID NO: 721769 - protein, 14 aa, Homo sapiens
  CDR3 for alpha chain variable domain of TCR clone 360885 (TRAV8-2, TRAJ4)
CVVSPSGGYNKLIF

SEQ ID NO: 721770 - protein, 13 aa, Homo sapiens
  CDR3 for beta chain variable domain of TCR clone 360885 (TRBV7-6, TRBJ1-2)
CASSLVADYGYTF

SEQ ID NO: 721771 - protein, 14 aa, Homo sapiens
  CDR3 for alpha chain variable domain of TCR clone 360886 (TRAV1-1, TRAJ23)
CAVKAYNQGGKLIF

SEQ ID NO: 721772 - protein, 15 aa, Homo sapiens
  CDR3 for beta chain variable domain of TCR clone 360886 (TRBV7-9, TRBJ1-6)
CASSSPGRGNSPLHF

SEQ ID NO: 721773 - protein, 14 aa, Homo sapiens
  CDR3 for alpha chain variable domain of TCR clone 360887 (TRAV8-3, TRAJ4)
CAVGAAGGYNKLIF

SEQ ID NO: 721774 - protein, 15 aa, Homo sapiens
  CDR3 for beta chain variable domain of TCR clone 360887 (TRBV6-5, TRBJ2-1)
CASSYHAGAGNEQFL

SEQ ID NO: 721775 - protein, 13 aa, Homo sapiens
  CDR3 for alpha chain variable domain of TCR clone 360888 (TRAV8-4, TRAJ4)
CAVSDIGYNKLIF

SEQ ID NO: 721776 - protein, 14 aa, Homo sapiens
  CDR3 for beta chain variable domain of TCR clone 360888 (TRBV25-1, TRBJ1-1)
CASTHLGGNTEAFF

SEQ ID NO: 721777 - protein, 18 aa, Homo sapiens
  CDR3 for alpha chain variable domain of TCR clone 360889 (TRAV13-1, TRAJ52)
CAASKRSAGGTSYGTRTF

SEQ ID NO: 721778 - protein, 13 aa, Homo sapiens
  CDR3 for beta chain variable domain of TCR clone 360889 (TRBV12-4, TRBJ1-2)
CASSLRQGKGYTF

SEQ ID NO: 721779 - protein, 13 aa, Homo sapiens
  CDR3 for alpha chain variable domain of TCR clone 360890 (TRAV26-1, TRAJ34)
CIVRPWMTDKLIF

SEQ ID NO: 721780 - protein, 14 aa, Homo sapiens
  CDR3 for beta chain variable domain of TCR clone 360890 (TRBV12-4, TRBJ1-4)
CASSRQGANEKLFF

SEQ ID NO: 721781 - protein, 14 aa, Homo sapiens
  CDR3 for alpha chain variable domain of TCR clone 360891 (TRAV26-1, TRAJ44)
CIVKSTGTASKLTF

SEQ ID NO: 721782 - protein, 17 aa, Homo sapiens
  CDR3 for beta chain variable domain of TCR clone 360891 (TRBV18, TRBJ2-3)
CASSAAGTSGSTDTQYF

SEQ ID NO: 721783 - protein, 12 aa, Homo sapiens
  CDR3 for alpha chain variable domain of TCR clone 360892 (TRAV35, TRAJ30)
CAGQLAADKIIF

SEQ ID NO: 721784 - protein, 17 aa, Homo sapiens
  CDR3 for beta chain variable domain of TCR clone 360892 (TRBV4-2, TRBJ2-5)
CASSPGRWRNFQETQYF

SEQ ID NO: 721785 - protein, 15 aa, Homo sapiens
  CDR3 for alpha chain variable domain of TCR clone 360893 (TRAV4, TRAJ31)
CLVGGFLNNNARLMF

SEQ ID NO: 721786 - protein, 14 aa, Homo sapiens
  CDR3 for beta chain variable domain of TCR clone 360893 (TRBV11-2, TRBJ2-5)
CASSRTGGIETQYF

SEQ ID NO: 721787 - protein, 11 aa, Homo sapiens
  CDR3 for alpha chain variable domain of TCR clone 360894 (TRAV2, TRAJ13)
CASGGYQKVTF

SEQ ID NO: 721788 - protein, 16 aa, Homo sapiens
  CDR3 for beta chain variable domain of TCR clone 360894 (TRBV2, TRBJ2-1)
CASSVGWSLSYNEQFF

SEQ ID NO: 721789 - protein, 13 aa, Homo sapiens
  CDR3 for alpha chain variable domain of TCR clone 360895 (TRAV21, TRAJ27)
CAARPGNAGKSTF

SEQ ID NO: 721790 - protein, 13 aa, Homo sapiens
  CDR3 for beta chain variable domain of TCR clone 360895 (TRBV7-3, TRBJ2-7)
CASSQAGGYQQYF

SEQ ID NO: 721791 - protein, 13 aa, Homo sapiens
  CDR3 for alpha chain variable domain of TCR clone 360896 (TRAV21, TRAJ57)
CAVTQGGSEKLVF

SEQ ID NO: 721792 - protein, 14 aa, Homo sapiens
  CDR3 for beta chain variable domain of TCR clone 360896 (TRBV7-3, TRBJ2-2)
CASSSGGYTGELFF

SEQ ID NO: 721793 - protein, 15 aa, Homo sapiens
  CDR3 for alpha chain variable domain of TCR clone 360897 (TRAV27, TRAJ38)
CAARRNAGNNRKLIW

SEQ ID NO: 721794 - protein, 16 aa, Homo sapiens
  CDR3 for beta chain variable domain of TCR clone 360897 (TRBV12-4, TRBJ2-1)
CASSPQERPSYNEQFF

SEQ ID NO: 721795 - protein, 12 aa, Homo sapiens
  CDR3 for alpha chain variable domain of TCR clone 360898 (TRAV12-2, TRAJ10)
WGVTGGGKKLTF

SEQ ID NO: 721796 - protein, 16 aa, Homo sapiens
  CDR3 for beta chain variable domain of TCR clone 360898 (TRBV6-4, TRBJ1-2)
CASSEAVGDPNYGHTF

SEQ ID NO: 721797 - protein, 15 aa, Homo sapiens
  CDR3 for alpha chain variable domain of TCR clone 360899 (TRAV21, TRAJ53)
CATLNSGGSNSKLPF

SEQ ID NO: 721798 - protein, 15 aa, Homo sapiens
  CDR3 for beta chain variable domain of TCR clone 360899 (TRBV20-1, TRBJ2-7)
CSARDRVSGMDEQYF

SEQ ID NO: 721799 - protein, 16 aa, Homo sapiens
  CDR3 for alpha chain variable domain of TCR clone 360900 (TRAV23/DV6, TRAJ30)
CAASMCADANRDDKII

SEQ ID NO: 721800 - protein, 12 aa, Homo sapiens
  CDR3 for beta chain variable domain of TCR clone 360900 (TRBV19, TRBJ2-3)
CATARGGDTQYF

SEQ ID NO: 721801 - protein, 15 aa, Homo sapiens
  CDR3 for alpha chain variable domain of TCR clone 360901 (TRAV35, TRAJ52)
CAGPRGGPSYGKLTF

SEQ ID NO: 721802 - protein, 14 aa, Homo sapiens
  CDR3 for beta chain variable domain of TCR clone 360901 (TRBV20-1, TRBJ2-7)
CSAWTALSSYEQYF

SEQ ID NO: 721803 - protein, 10 aa, Homo sapiens
  CDR3 for alpha chain variable domain of TCR clone 360902 (TRAV20, TRAJ22)
CAAPARQLTF

SEQ ID NO: 721804 - protein, 14 aa, Homo sapiens
  CDR3 for beta chain variable domain of TCR clone 360902 (TRBV4-1, TRBJ2-2)
CASSQAVNTGELFF

SEQ ID NO: 721805 - protein, 13 aa, Homo sapiens
  CDR3 for alpha chain variable domain of TCR clone 360903 (TRAV2, TRAJ36)
CAVDQNGANNLFF

SEQ ID NO: 721806 - protein, 12 aa, Homo sapiens
  CDR3 for beta chain variable domain of TCR clone 360903 (TRBV19, TRBJ1-1)
CASMNRYTEAFF

SEQ ID NO: 721807 - protein, 14 aa, Homo sapiens
  CDR3 for alpha chain variable domain of TCR clone 360904 (TRAV12-2, TRAJ40)
CAVKIPSGTSKYIF

SEQ ID NO: 721808 - protein, 14 aa, Homo sapiens
  CDR3 for beta chain variable domain of TCR clone 360904 (TRBV20-1, TRBJ1-1)
GSAQTRIGGTEAFF

SEQ ID NO: 721809 - protein, 18 aa, Homo sapiens
  CDR3 for alpha chain variable domain of TCR clone 360905 (TRAV17, TRAJ45)
CATSLDLYSGGGADGLTF

SEQ ID NO: 721810 - protein, 15 aa, Homo sapiens
  CDR3 for beta chain variable domain of TCR clone 360905 (TRBV11-2, TRBJ2-1)
GASSKNRGLIYEQFF

SEQ ID NO: 721811 - protein, 18 aa, Homo sapiens
  CDR3 for alpha chain variable domain of TCR clone 360906 (TRAV21, TRAJ52)
CAVRPSPAGGTSYGKLTF

SEQ ID NO: 721812 - protein, 12 aa, Homo sapiens
  CDR3 for beta chain variable domain of TCR clone 360906 (TRBV11-2, TRBJ2-2)
CAGSLGGGELFF

SEQ ID NO: 721813 - protein, 13 aa, Homo sapiens
  CDR3 for alpha chain variable domain of TCR clone 360907 (TRAV13-1, TRAJ21)
CAPSIYNFNKFYF

SEQ ID NO: 721814 - protein, 15 aa, Homo sapiens
  CDR3 for beta chain variable domain of TCR clone 360907 (TRBV5-5, TRBJ1-5)
CASSLKGGGEQPQHF

SEQ ID NO: 721815 - protein, 13 aa, Homo sapiens
  CDR3 for alpha chain variable domain of TCR clone 360908 (TRAV13-2, TRAJ20)
CAEKSWNAYKLSF

SEQ ID NO: 721816 - protein, 17 aa, Homo sapiens
  CDR3 for beta chain variable domain of TCR clone 360908 (TRBV5-1, TRBJ2-1)
CASSMGLAGEGYNEQFF

SEQ ID NO: 721817 - protein, 14 aa, Homo sapiens
  CDR3 for alpha chain variable domain of TCR clone 360909 (TRAV1-2, TRAJ16)
CAVNRFSDGQKLLF

SEQ ID NO: 721818 - protein, 16 aa, Homo sapiens
  CDR3 for beta chain variable domain of TCR clone 360909 (TRBV5-4, TRBJ2-7)
CASSQNEIAGAYEQYV

SEQ ID NO: 721819 - protein, 15 aa, Homo sapiens
  CDR3 for alpha chain variable domain of TCR clone 360910 (TRAV3, TRAJ29)
CAVRDLYSGNTPPVF

SEQ ID NO: 721820 - protein, 17 aa, Homo sapiens
  CDR3 for beta chain variable domain of TCR clone 360910 (TRBV20-1, TRBJ2-1)
CSARDPLAGVWDNEQFF

SEQ ID NO: 721821 - protein, 10 aa, Homo sapiens
  CDR3 for alpha chain variable domain of TCR clone 360911 (TRAV30, TRAJ48)
CGIGNEKLTF

SEQ ID NO: 721822 - protein, 15 aa, Homo sapiens
  CDR3 for beta chain variable domain of TCR clone 360911 (TRBV28, TRBJ2-5)
CASSPPCSYQETQYF

SEQ ID NO: 721823 - protein, 11 aa, Homo sapiens
  CDR3 for alpha chain variable domain of TCR clone 360912 (TRAV2, TRAJ33)
CAVESNYQLIW

SEQ ID NO: 721824 - protein, 15 aa, Homo sapiens
  CDR3 for beta chain variable domain of TCR clone 360912 (TRBV13, TRBJ1-2)
CASSLGRQPGYGYTF

SEQ ID NO: 721825 - protein, 14 aa, Homo sapiens
  CDR3 for alpha chain variable domain of TCR clone 360913 (TRAV12-2, TRAJ13)
CAVKKTGGYQKVAF

SEQ ID NO: 721826 - protein, 15 aa, Homo sapiens
  CDR3 for beta chain variable domain of TCR clone 360913 (TRBV28, TRBJ2-5)
CASSPPWSYQETQYF

SEQ ID NO: 721827 - protein, 16 aa, Homo sapiens
  CDR3 for alpha chain variable domain of TCR clone 360914 (TRAV8-3, TRAJ13)
CAVGAYPSGGYQNVTF

SEQ ID NO: 721828 - protein, 15 aa, Homo sapiens
  CDR3 for beta chain variable domain of TCR clone 360914 (TRBV19, TRBJ1-5)
CARSIVWADNQPQHF

SEQ ID NO: 721829 - protein, 14 aa, Homo sapiens
  CDR3 for alpha chain variable domain of TCR clone 360915 (TRAV30, TRAJ26)
CGTAIVSYGQNFVF

SEQ ID NO: 721830 - protein, 13 aa, Homo sapiens
  CDR3 for beta chain variable domain of TCR clone 360915 (TRBV19, TRBJ1-3)
CASRLSLGNTLYF

SEQ ID NO: 721831 - protein, 15 aa, Homo sapiens
  CDR3 for alpha chain variable domain of TCR clone 360916 (TRAV12-3, TRAJ6)
CAMSASTGGSYIPTF

SEQ ID NO: 721832 - protein, 15 aa, Homo sapiens
  CDR3 for beta chain variable domain of TCR clone 360916 (TRBV28, TRBJ1-3)
CASSMGWASGNTIYF

SEQ ID NO: 721833 - protein, 14 aa, Homo sapiens
  CDR3 for alpha chain variable domain of TCR clone 360917 (TRAV1-2, TRAJ6)
CAVRSSGGSYIPTF

SEQ ID NO: 721834 - protein, 15 aa, Homo sapiens
  CDR3 for beta chain variable domain of TCR clone 360917 (TRBV20-1, TRBJ2-7)
CSAREGRDSLYEQYF

SEQ ID NO: 721835 - protein, 14 aa, Homo sapiens
  CDR3 for alpha chain variable domain of TCR clone 360918 (TRAV12-2, TRAJ53)
CRERGGGSNYKLTS

SEQ ID NO: 721836 - protein, 13 aa, Homo sapiens
  CDR3 for beta chain variable domain of TCR clone 360918 (TRBV3-1, TRBJ1-1)
CASSPGVITGAFF

SEQ ID NO: 721837 - protein, 15 aa, Homo sapiens
  CDR3 for alpha chain variable domain of TCR clone 360919 (TRAV12-2, TRAJ53)
CAVNTGGGSNYKLTF

SEQ ID NO: 721838 - protein, 15 aa, Homo sapiens
  CDR3 for beta chain variable domain of TCR clone 360919 (TRBV5-1, TRBJ2-5)
CASSVGLGEKKTQYF

SEQ ID NO: 721839 - protein, 13 aa, Homo sapiens
  CDR3 for alpha chain variable domain of TCR clone 360920 (TRAV20, TRAJ34)
CAVSSYSTDKLIF

SEQ ID NO: 721840 - protein, 13 aa, Homo sapiens
  CDR3 for beta chain variable domain of TCR clone 360920 (TRBV7-9, TRBJ1-2)
CASSLKQNYGYTF

SEQ ID NO: 721841 - protein, 12 aa, Homo sapiens
  CDR3 for alpha chain variable domain of TCR clone 360921 (TRAV30, TRAJ43)
CGTEERGNDMRF

SEQ ID NO: 721842 - protein, 15 aa, Homo sapiens
  CDR3 for beta chain variable domain of TCR clone 360921 (TRBV29-1, TRBJ2-1)
CSGRDRKSSYNEQFF

SEQ ID NO: 721843 - protein, 15 aa, Homo sapiens
  CDR3 for alpha chain variable domain of TCR clone 360922 (TRAV23/DV6, TRAJ18)
CVASFRGSTLGRLYF

SEQ ID NO: 721844 - protein, 13 aa, Homo sapiens
  CDR3 for beta chain variable domain of TCR clone 360922 (TRBV28, TRBJ2-7)
CAILDRAGGEQYF

SEQ ID NO: 721845 - protein, 16 aa, Homo sapiens
  CDR3 for alpha chain variable domain of TCR clone 360923 (TRAV26-2, TRAJ57)
CILRDVGSGGSEKLVF

SEQ ID NO: 721846 - protein, 13 aa, Homo sapiens
  CDR3 for beta chain variable domain of TCR clone 360923 (TRBV18, TRBJ2-3)
CASSLGVTDTQYF

SEQ ID NO: 721847 - protein, 11 aa, Homo sapiens
  CDR3 for alpha chain variable domain of TCR clone 360924 (TRAV12-2, TRAJ30)
CAVGRDDKSIF

SEQ ID NO: 721848 - protein, 14 aa, Homo sapiens
  CDR3 for beta chain variable domain of TCR clone 360924 (TRBV6-1, TRBJ1-3)
CASVQGGGGNTIYF

SEQ ID NO: 721849 - protein, 12 aa, Homo sapiens
  CDR3 for alpha chain variable domain of TCR clone 360925 (TRAV13-2, TRAJ39)
CAESRPGNMLTF

SEQ ID NO: 721850 - protein, 13 aa, Homo sapiens
  CDR3 for beta chain variable domain of TCR clone 360925 (TRBV7-9, TRBJ1-2)
CASSLKQNYGYTF

SEQ ID NO: 721851 - protein, 14 aa, Homo sapiens
  CDR3 for alpha chain variable domain of TCR clone 360926 (TRAV13-1, TRAJ35)
CASSKGGFGNVLHC

SEQ ID NO: 721852 - protein, 15 aa, Homo sapiens
  CDR3 for beta chain variable domain of TCR clone 360926 (TRBV5-1, TRBJ2-7)
CASSLNGGPAREQYF

SEQ ID NO: 721853 - protein, 15 aa, Homo sapiens
  CDR3 for alpha chain variable domain of TCR clone 360927 (TRAV8-4, TRAJ53)
CAVSDGGGSNYKLTF

SEQ ID NO: 721854 - protein, 17 aa, Homo sapiens
  CDR3 for beta chain variable domain of TCR clone 360927 (TRBV11-2, TRBJ2-1)
CASSLYPPGVEYSEQFF

SEQ ID NO: 721855 - protein, 17 aa, Homo sapiens
  CDR3 for alpha chain variable domain of TCR clone 360928 (TRAV38-2/DV8, TRAJ38)
CAYRSARWAGNNRKLIW

SEQ ID NO: 721856 - protein, 13 aa, Homo sapiens
  CDR3 for beta chain variable domain of TCR clone 360928 (TRBV6-5, TRBJ2-1)
CASRGRVGNEQFF

SEQ ID NO: 721857 - protein, 17 aa, Homo sapiens
  CDR3 for alpha chain variable domain of TCR clone 360929 (TRAV24, TRAJ42)
CAFRIKNYGGSQGNLIF

SEQ ID NO: 721858 - protein, 15 aa, Homo sapiens
  CDR3 for beta chain variable domain of TCR clone 360929 (TRBV4-3, TRBJ2-7)
CASSQGDWGDYEQYF

SEQ ID NO: 721859 - protein, 11 aa, Homo sapiens
  CDR3 for alpha chain variable domain of TCR clone 360930 (TRAV12-1, TRAJ43)
YVVIRNNDMRF

SEQ ID NO: 721860 - protein, 16 aa, Homo sapiens
  CDR3 for beta chain variable domain of TCR clone 360930 (TRBV14, TRBJ2-1)
CASSPRLAGEGNEQFF

SEQ ID NO: 721861 - protein, 12 aa, Homo sapiens
  CDR3 for alpha chain variable domain of TCR clone 360931 (TRAV26-1, TRAJ36)
CIVRVRADNLFF

SEQ ID NO: 721862 - protein, 18 aa, Homo sapiens
  CDR3 for beta chain variable domain of TCR clone 360931 (TRBV27, TRBJ2-3)
CASSLSGTSGRGTDTQYF

SEQ ID NO: 721863 - protein, 13 aa, Homo sapiens
  CDR3 for alpha chain variable domain of TCR clone 360932 (TRAV29/DV5, TRAJ31)
CAASRNNKARLMF

SEQ ID NO: 721864 - protein, 12 aa, Homo sapiens
  CDR3 for beta chain variable domain of TCR clone 360932 (TRBV11-2, TRBJ2-2)
CASSLGGGELFF

SEQ ID NO: 721865 - protein, 14 aa, Homo sapiens
  CDR3 for alpha chain variable domain of TCR clone 360933 (TRAV8-1, TRAJ22)
CAAPSSGSARQLTF

SEQ ID NO: 721866 - protein, 14 aa, Homo sapiens
  CDR3 for beta chain variable domain of TCR clone 360933 (TRBV9, TRBJ2-2)
CASSGGQGAGELFF

SEQ ID NO: 721867 - protein, 16 aa, Homo sapiens
  CDR3 for alpha chain variable domain of TCR clone 360934 (TRAV3, TRAJ37)
CAVRPHCSCNTGKLIF

SEQ ID NO: 721868 - protein, 16 aa, Homo sapiens
  CDR3 for beta chain variable domain of TCR clone 360934 (TRBV9, TRBJ1-2)
CASSVEGKVSPYGYTF

SEQ ID NO: 721869 - protein, 13 aa, Homo sapiens
  CDR3 for alpha chain variable domain of TCR clone 360935 (TRAV12-1, TRAJ20)
CVGQRFNDYKLSF

SEQ ID NO: 721870 - protein, 14 aa, Homo sapiens
  CDR3 for beta chain variable domain of TCR clone 360935 (TRBV6-3, TRBJ1-5)
CASSDSRFAQPQHF

SEQ ID NO: 721871 - protein, 12 aa, Homo sapiens
  CDR3 for alpha chain variable domain of TCR clone 360936 (TRAV8-3, TRAJ26)
CAGDNYGQNFVF

SEQ ID NO: 721872 - protein, 18 aa, Homo sapiens
  CDR3 for beta chain variable domain of TCR clone 360936 (TRBV12-4, TRBJ2-2)
CASSVVAGTRGRTGELFF

SEQ ID NO: 721873 - protein, 14 aa, Homo sapiens
  CDR3 for alpha chain variable domain of TCR clone 360937 (TRAV2, TRAJ3)
CAVDRYSSASTIIF

SEQ ID NO: 721874 - protein, 16 aa, Homo sapiens
  CDR3 for beta chain variable domain of TCR clone 360937 (TRBV20-1, TRBJ1-5)
CSAELPGQQTNQPQHF

SEQ ID NO: 721875 - protein, 15 aa, Homo sapiens
  CDR3 for alpha chain variable domain of TCR clone 360938 (TRAV2, TRAJ15)
CAVEDRNQAGTALIF

SEQ ID NO: 721876 - protein, 16 aa, Homo sapiens
  CDR3 for beta chain variable domain of TCR clone 360938 (TRBV20-1, TRBJ2-1)
CSASASGYSSYNEQFF

SEQ ID NO: 721877 - protein, 14 aa, Homo sapiens
  CDR3 for alpha chain variable domain of TCR clone 360939 (TRAV8-2, TRAJ4)
CVVIPSGGHNKRIF

SEQ ID NO: 721878 - protein, 15 aa, Homo sapiens
  CDR3 for beta chain variable domain of TCR clone 360939 (TRBV4-1, TRBJ1-4)
CASSDTGGTNEKLFF

SEQ ID NO: 721879 - protein, 14 aa, Homo sapiens
  CDR3 for alpha chain variable domain of TCR clone 360940 (TRAV21, TRAJ23)
CAIMVYNQGGKLIF

SEQ ID NO: 721880 - protein, 18 aa, Homo sapiens
  CDR3 for beta chain variable domain of TCR clone 360940 (TRBV20-1, TRBJ2-6)
CSAETTPTHGSGANVLTF

SEQ ID NO: 721881 - protein, 16 aa, Homo sapiens
  CDR3 for alpha chain variable domain of TCR clone 360941 (TRAV26-1, TRAJ40)
CIVRGYPTSGTYNYIF

SEQ ID NO: 721882 - protein, 14 aa, Homo sapiens
  CDR3 for beta chain variable domain of TCR clone 360941 (TRBV5-1, TRBJ1-4)
CASSSGQGGEKLFF

SEQ ID NO: 721883 - protein, 15 aa, Homo sapiens
  CDR3 for alpha chain variable domain of TCR clone 360942 (TRAV27, TRAJ38)
CAALRNAGNNRKRIW

SEQ ID NO: 721884 - protein, 13 aa, Homo sapiens
  CDR3 for beta chain variable domain of TCR clone 360942 (TRBV12-5, TRBJ2-3)
CASGDRRSDTQYF

SEQ ID NO: 721885 - protein, 11 aa, Homo sapiens
  CDR3 for alpha chain variable domain of TCR clone 360943 (TRAV4, TRAJ28)
NSGAGSYQLTF

SEQ ID NO: 721886 - protein, 13 aa, Homo sapiens
  CDR3 for beta chain variable domain of TCR clone 360943 (TRBV12-4, TRBJ2-6)
CACSGTGANVLTF

SEQ ID NO: 721887 - protein, 13 aa, Homo sapiens
  CDR3 for alpha chain variable domain of TCR clone 360944 (TRAV12-1, TRAJ6)
CVVFPGGSYIPTF

SEQ ID NO: 721888 - protein, 12 aa, Homo sapiens
  CDR3 for beta chain variable domain of TCR clone 360944 (TRBV11-2, TRBJ2-2)
CASSLGGGELFL

SEQ ID NO: 721889 - protein, 10 aa, Homo sapiens
  CDR3 for alpha chain variable domain of TCR clone 360945 (TRAV2, TRAJ34)
CAVVNDKLIF

SEQ ID NO: 721890 - protein, 13 aa, Homo sapiens
  CDR3 for beta chain variable domain of TCR clone 360945 (TRBV7-3, TRBJ1-1)
CASSLTQGTEAFC

SEQ ID NO: 721891 - protein, 13 aa, Homo sapiens
  CDR3 for alpha chain variable domain of TCR clone 360946 (TRAV8-3, TRAJ36)
CAVGATGANNLFF

SEQ ID NO: 721892 - protein, 13 aa, Homo sapiens
  CDR3 for beta chain variable domain of TCR clone 360946 (TRBV7-3, TRBJ2-1)
CASSLDSYNEQFF

SEQ ID NO: 721893 - protein, 17 aa, Homo sapiens
  CDR3 for alpha chain variable domain of TCR clone 360947 (TRAV8-6, TRAJ58)
CAVSSWLGETSGSRLSF

SEQ ID NO: 721894 - protein, 14 aa, Homo sapiens
  CDR3 for beta chain variable domain of TCR clone 360947 (TRBV4-2, TRBJ2-1)
CASGLDRAYNEQFF

SEQ ID NO: 721895 - protein, 14 aa, Homo sapiens
  CDR3 for alpha chain variable domain of TCR clone 360948 (TRAV12-2, TRAJ13)
CAVQKTGGYRKVTF

SEQ ID NO: 721896 - protein, 15 aa, Homo sapiens
  CDR3 for beta chain variable domain of TCR clone 360948 (TRBV27, TRBJ2-1)
CASSNGGGSSNEQFF

SEQ ID NO: 721897 - protein, 13 aa, Homo sapiens
  CDR3 for alpha chain variable domain of TCR clone 360949 (TRAV13-1, TRAJ43)
CAASKNNNNDMRF

SEQ ID NO: 721898 - protein, 13 aa, Homo sapiens
  CDR3 for beta chain variable domain of TCR clone 360949 (TRBV20-1, TRBJ1-1)
CSARVGGNTEAFF

SEQ ID NO: 721899 - protein, 15 aa, Homo sapiens
  CDR3 for alpha chain variable domain of TCR clone 360950 (TRAV26-1, TRAJ24)
CIVREDTDSWGKLQF

SEQ ID NO: 721900 - protein, 14 aa, Homo sapiens
  CDR3 for beta chain variable domain of TCR clone 360950 (TRBV12-4, TRBJ1-1)
CASSFSQMNTEAFF

SEQ ID NO: 721901 - protein, 14 aa, Homo sapiens
  CDR3 for alpha chain variable domain of TCR clone 360951 (TRAV12-2, TRAJ29)
CAVRRNSGHTPLVF

SEQ ID NO: 721902 - protein, 13 aa, Homo sapiens
  CDR3 for beta chain variable domain of TCR clone 360951 (TRBV12-4, TRBJ2-1)
CASSHYTDNEQFF

SEQ ID NO: 721903 - protein, 12 aa, Homo sapiens
  CDR3 for alpha chain variable domain of TCR clone 360952 (TRAV13-2, TRAJ23)
CAERHRGGKLIF

SEQ ID NO: 721904 - protein, 12 aa, Homo sapiens
  CDR3 for beta chain variable domain of TCR clone 360952 (TRBV29-1, TRBJ2-3)
CSVTGGADTQYL

SEQ ID NO: 721905 - protein, 14 aa, Homo sapiens
  CDR3 for alpha chain variable domain of TCR clone 360953 (TRAV1-1, TRAJ27)
CAVIYNTTAGKSTF

SEQ ID NO: 721906 - protein, 13 aa, Homo sapiens
  CDR3 for beta chain variable domain of TCR clone 360953 (TRBV7-9, TRBJ1-2)
CASSLKQNYGYTF

SEQ ID NO: 721907 - protein, 15 aa, Homo sapiens
  CDR3 for alpha chain variable domain of TCR clone 360954 (TRAV27, TRAJ38)
CAARRNAGNNRKPIW

SEQ ID NO: 721908 - protein, 17 aa, Homo sapiens
  CDR3 for beta chain variable domain of TCR clone 360954 (TRBV20-1, TRBJ2-2)
CSASGSGQGGLTGELFF

SEQ ID NO: 721909 - protein, 14 aa, Homo sapiens
  CDR3 for alpha chain variable domain of TCR clone 360955 (TRAV20, TRAJ42)
CAVQAGGSQGNLIF

SEQ ID NO: 721910 - protein, 17 aa, Homo sapiens
  CDR3 for beta chain variable domain of TCR clone 360955 (TRBV7-8, TRBJ2-6)
CASSAGTGGAGANVLTF

SEQ ID NO: 721911 - protein, 16 aa, Homo sapiens
  CDR3 for alpha chain variable domain of TCR clone 360956 (TRAV13-1, TRAJ13)
CTAFFLGLTRKLPLEL

SEQ ID NO: 721912 - protein, 15 aa, Homo sapiens
  CDR3 for beta chain variable domain of TCR clone 360956 (TRBV7-8, TRBJ2-1)
CASSLADSLYNEQFF

SEQ ID NO: 721913 - protein, 16 aa, Homo sapiens
  CDR3 for alpha chain variable domain of TCR clone 360957 (TRAV19, TRAJ53)
CALIADSGGSKYKLTF

SEQ ID NO: 721914 - protein, 16 aa, Homo sapiens
  CDR3 for beta chain variable domain of TCR clone 360957 (TRBV20-1, TRBJ2-7)
CSARGSVVADIYEQYF

SEQ ID NO: 721915 - protein, 17 aa, Homo sapiens
  CDR3 for alpha chain variable domain of TCR clone 360958 (TRAV13-1, TRAJ31)
SAPRDRLMFGDGTQLVV

SEQ ID NO: 721916 - protein, 12 aa, Homo sapiens
  CDR3 for beta chain variable domain of TCR clone 360958 (TRBV7-9, TRBJ2-7)
CASSLEGYEQYF

SEQ ID NO: 721917 - protein, 13 aa, Homo sapiens
  CDR3 for alpha chain variable domain of TCR clone 360959 (TRAV16, TRAJ22)
CVFRKGSARQLTF

SEQ ID NO: 721918 - protein, 20 aa, Homo sapiens
  CDR3 for beta chain variable domain of TCR clone 360959 (TRBV28, TRBJ2-1)
CASTPIGRSPGLAGGNEQFF

SEQ ID NO: 721919 - protein, 16 aa, Homo sapiens
  CDR3 for alpha chain variable domain of TCR clone 360960 (TRAV26-1, TRAJ56)
CIVRVAETGANSKLTF

SEQ ID NO: 721920 - protein, 15 aa, Homo sapiens
  CDR3 for beta chain variable domain of TCR clone 360960 (TRBV7-8, TRBJ1-3)
CASSPRVKDGNTIYF

SEQ ID NO: 721921 - protein, 14 aa, Homo sapiens
  CDR3 for alpha chain variable domain of TCR clone 360961 (TRAV9-2, TRAJ39)
CALYIYNAGNMLTF

SEQ ID NO: 721922 - protein, 15 aa, Homo sapiens
  CDR3 for beta chain variable domain of TCR clone 360961 (TRBV7-3, TRBJ2-1)
CASSPTGGGEVGQFF

SEQ ID NO: 721923 - protein, 14 aa, Homo sapiens
  CDR3 for alpha chain variable domain of TCR clone 360962 (TRAV35, TRAJ22)
CAGLMPGSAGQLTF

SEQ ID NO: 721924 - protein, 15 aa, Homo sapiens
  CDR3 for beta chain variable domain of TCR clone 360962 (TRBV12-4, TRBJ2-5)
CASSPPTGLQETQYF

SEQ ID NO: 721925 - protein, 11 aa, Homo sapiens
  CDR3 for alpha chain variable domain of TCR clone 360963 (TRAV2, TRAJ13)
CASGGYQKVTF

SEQ ID NO: 721926 - protein, 19 aa, Homo sapiens
  CDR3 for beta chain variable domain of TCR clone 360963 (TRBV5-8, TRBJ2-3)
CASSFLGTSGSHRTDTQYF

SEQ ID NO: 721927 - protein, 11 aa, Homo sapiens
  CDR3 for alpha chain variable domain of TCR clone 360964 (TRAV2, TRAJ13)
CASGGYQKVTF

SEQ ID NO: 721928 - protein, 16 aa, Homo sapiens
  CDR3 for beta chain variable domain of TCR clone 360964 (TRBV4-1, TRBJ2-7)
CASSQEWTSGPLEQYF

SEQ ID NO: 721929 - protein, 14 aa, Homo sapiens
  CDR3 for alpha chain variable domain of TCR clone 360965 (TRAV13-1, TRAJ23)
CAASRLGRGGKLIF

SEQ ID NO: 721930 - protein, 13 aa, Homo sapiens
  CDR3 for beta chain variable domain of TCR clone 360965 (TRBV20-1, TRBJ1-1)
CSAPLGGGTEALF

SEQ ID NO: 721931 - protein, 16 aa, Homo sapiens
  CDR3 for alpha chain variable domain of TCR clone 360966 (TRAV30, TRAJ24)
CGTEMVDADSWGKFQF

SEQ ID NO: 721932 - protein, 11 aa, Homo sapiens
  CDR3 for beta chain variable domain of TCR clone 360966 (TRBV7-9, TRBJ2-3)
CASSGPDTQYF

SEQ ID NO: 721933 - protein, 15 aa, Homo sapiens
  CDR3 for alpha chain variable domain of TCR clone 360967 (TRAV8-6, TRAJ45)
CAVSGAGGGADGLTF

SEQ ID NO: 721934 - protein, 14 aa, Homo sapiens
  CDR3 for beta chain variable domain of TCR clone 360967 (TRBV12-5, TRBJ2-5)
CASGSRTHQETQYF

SEQ ID NO: 721935 - protein, 13 aa, Homo sapiens
  CDR3 for alpha chain variable domain of TCR clone 360968 (TRAV12-2, TRAJ24)
CAVSTDSWGKLQF

SEQ ID NO: 721936 - protein, 13 aa, Homo sapiens
  CDR3 for beta chain variable domain of TCR clone 360968 (TRBV7-7, TRBJ2-5)
CASSRSGQETQYF

SEQ ID NO: 721937 - protein, 13 aa, Homo sapiens
  CDR3 for alpha chain variable domain of TCR clone 360969 (TRAV8-4, TRAJ30)
CAVSVNRDDKIIF

SEQ ID NO: 721938 - protein, 13 aa, Homo sapiens
  CDR3 for beta chain variable domain of TCR clone 360969 (TRBV3-1, TRBJ2-2)
CASLDRGSGELFF

SEQ ID NO: 721939 - protein, 15 aa, Homo sapiens
  CDR3 for alpha chain variable domain of TCR clone 360970 (TRAV1-2, TRAJ28)
CAVQYSGAGSYQLTF

SEQ ID NO: 721940 - protein, 13 aa, Homo sapiens
  CDR3 for beta chain variable domain of TCR clone 360970 (TRBV20-1, TRBJ2-7)
CSATHTSGYDQYF

SEQ ID NO: 721941 - protein, 14 aa, Homo sapiens
  CDR3 for alpha chain variable domain of TCR clone 360971 (TRAV13-1, TRAJ10)
CAALFTGGGNKLAF

SEQ ID NO: 721942 - protein, 14 aa, Homo sapiens
  CDR3 for beta chain variable domain of TCR clone 360971 (TRBV18, TRBJ2-7)
CASSPGGGAYEQYF

SEQ ID NO: 721943 - protein, 14 aa, Homo sapiens
  CDR3 for alpha chain variable domain of TCR clone 360972 (TRAV4, TRAJ26)
CLVGPHNYGLNFVF

SEQ ID NO: 721944 - protein, 17 aa, Homo sapiens
  CDR3 for beta chain variable domain of TCR clone 360972 (TRBV24-1, TRBJ2-1)
CATSDISTSGTYNEQFF

SEQ ID NO: 721945 - protein, 15 aa, Homo sapiens
  CDR3 for alpha chain variable domain of TCR clone 360973 (TRAV17, TRAJ4)
CATGTWSGGYNKLIF

SEQ ID NO: 721946 - protein, 15 aa, Homo sapiens
  CDR3 for beta chain variable domain of TCR clone 360973 (TRBV7-2, TRBJ2-7)
CSSSWGQGAIYEQYF

SEQ ID NO: 721947 - protein, 13 aa, Homo sapiens
  CDR3 for alpha chain variable domain of TCR clone 360974 (TRAV13-1, TRAJ29)
CAASIGLNTPLVL

SEQ ID NO: 721948 - protein, 13 aa, Homo sapiens
  CDR3 for beta chain variable domain of TCR clone 360974 (TRBV9, TRBJ2-1)
CASSVGQGGEQFF

SEQ ID NO: 721949 - protein, 16 aa, Homo sapiens
  CDR3 for alpha chain variable domain of TCR clone 360975 (TRAV22, TRAJ45)
CAVERGKRGGADGLTF

SEQ ID NO: 721950 - protein, 13 aa, Homo sapiens
  CDR3 for beta chain variable domain of TCR clone 360975 (TRBV27, TRBJ1-1)
CASSLSIGAEAFL

SEQ ID NO: 721951 - protein, 13 aa, Homo sapiens
  CDR3 for alpha chain variable domain of TCR clone 360976 (TRAV8-6, TRAJ5)
CAVLDTGRRARTF

SEQ ID NO: 721952 - protein, 12 aa, Homo sapiens
  CDR3 for beta chain variable domain of TCR clone 360976 (TRBV7-9, TRBJ1-6)
CASSASESPLHF

SEQ ID NO: 721953 - protein, 14 aa, Homo sapiens
  CDR3 for alpha chain variable domain of TCR clone 360977 (TRAV22, TRAJ6)
CAVLSSGGSYIPKF

SEQ ID NO: 721954 - protein, 13 aa, Homo sapiens
  CDR3 for beta chain variable domain of TCR clone 360977 (TRBV7-2, TRBJ2-7)
CASSLGPNGEQYF

SEQ ID NO: 721955 - protein, 16 aa, Homo sapiens
  CDR3 for alpha chain variable domain of TCR clone 360978 (TRAV30, TRAJ24)
CGTEIVDAYSWGKFRF

SEQ ID NO: 721956 - protein, 14 aa, Homo sapiens
  CDR3 for beta chain variable domain of TCR clone 360978 (TRBV12-5, TRBJ2-5)
CASGSRTHQETQYF

SEQ ID NO: 721957 - protein, 14 aa, Homo sapiens
  CDR3 for alpha chain variable domain of TCR clone 360979 (TRAV36/DV7, TRAJ33)
CAVLPRDSNYQLIW

SEQ ID NO: 721958 - protein, 16 aa, Homo sapiens
  CDR3 for beta chain variable domain of TCR clone 360979 (TRBV20-1, TRBJ1-4)
CSAPGQGLLTNEKLFF

SEQ ID NO: 721959 - protein, 13 aa, Homo sapiens
  CDR3 for alpha chain variable domain of TCR clone 360980 (TRAV35, TRAJ42)
CAGFPGSQGNLIF

SEQ ID NO: 721960 - protein, 14 aa, Homo sapiens
  CDR3 for beta chain variable domain of TCR clone 360980 (TRBV7-3, TRBJ2-3)
CASSPSARTDTQYF

SEQ ID NO: 721961 - protein, 16 aa, Homo sapiens
  CDR3 for alpha chain variable domain of TCR clone 360981 (TRAV14/DV4, TRAJ53)
CAMREGGGGSNYKLTF

SEQ ID NO: 721962 - protein, 15 aa, Homo sapiens
  CDR3 for beta chain variable domain of TCR clone 360981 (TRBV7-9, TRBJ2-7)
CASSLPMGQANEQYF

SEQ ID NO: 721963 - protein, 15 aa, Homo sapiens
  CDR3 for alpha chain variable domain of TCR clone 360982 (TRAV12-1, TRAJ44)
CVADLPTGTASKLPF

SEQ ID NO: 721964 - protein, 16 aa, Homo sapiens
  CDR3 for beta chain variable domain of TCR clone 360982 (TRBV12-5, TRBJ2-5)
CASGPRTSGNQETQYF

SEQ ID NO: 721965 - protein, 12 aa, Homo sapiens
  CDR3 for alpha chain variable domain of TCR clone 360983 (TRAV9-2, TRAJ36)
CALKKGANNLFF

SEQ ID NO: 721966 - protein, 14 aa, Homo sapiens
  CDR3 for beta chain variable domain of TCR clone 360983 (TRBV6-1, TRBJ1-3)
CASVQGGGGNTMYF

SEQ ID NO: 721967 - protein, 16 aa, Homo sapiens
  CDR3 for alpha chain variable domain of TCR clone 360984 (TRAV1-2, TRAJ10)
CAVRGVLTGGGNKLTF

SEQ ID NO: 721968 - protein, 13 aa, Homo sapiens
  CDR3 for beta chain variable domain of TCR clone 360984 (TRBV11-2, TRBJ1-3)
CASSLEPVNTIYF

SEQ ID NO: 721969 - protein, 12 aa, Homo sapiens
  CDR3 for alpha chain variable domain of TCR clone 360985 (TRAV2, TRAJ31)
CAVEDNNARLMF

SEQ ID NO: 721970 - protein, 18 aa, Homo sapiens
  CDR3 for beta chain variable domain of TCR clone 360985 (TRBV7-3, TRBJ2-1)
CASSLTDPRVAAYNEQFF

SEQ ID NO: 721971 - protein, 18 aa, Homo sapiens
  CDR3 for alpha chain variable domain of TCR clone 360986 (TRAV12-1, TRAJ43)
SSVIQPPTSVWCNNDMRF

SEQ ID NO: 721972 - protein, 13 aa, Homo sapiens
  CDR3 for beta chain variable domain of TCR clone 360986 (TRBV12-4, TRBJ1-2)
CASSSGLTVISTF

SEQ ID NO: 721973 - protein, 15 aa, Homo sapiens
  CDR3 for alpha chain variable domain of TCR clone 360987 (TRAV21, TRAJ53)
CATLNSGGSNYKLTL

SEQ ID NO: 721974 - protein, 15 aa, Homo sapiens
  CDR3 for beta chain variable domain of TCR clone 360987 (TRBV6-3, TRBJ2-7)
CASSSPGTVFYEQYF

SEQ ID NO: 721975 - protein, 14 aa, Homo sapiens
  CDR3 for alpha chain variable domain of TCR clone 360988 (TRAV23/DV6, TRAJ42)
CAASYGGSQGNLIF

SEQ ID NO: 721976 - protein, 16 aa, Homo sapiens
  CDR3 for beta chain variable domain of TCR clone 360988 (TRBV6-1, TRBJ2-5)
CASSETLYRGAETQYF

SEQ ID NO: 721977 - protein, 17 aa, Homo sapiens
  CDR3 for alpha chain variable domain of TCR clone 360989 (TRAV3, TRAJ42)
CAVRDRDYVGSQGNLIF

SEQ ID NO: 721978 - protein, 16 aa, Homo sapiens
  CDR3 for beta chain variable domain of TCR clone 360989 (TRBV9, TRBJ2-1)
CASSVGGGGNYNEQFF

SEQ ID NO: 721979 - protein, 13 aa, Homo sapiens
  CDR3 for alpha chain variable domain of TCR clone 360990 (TRAV2, TRAJ24)
CAVTTDSRGKLQV

SEQ ID NO: 721980 - protein, 14 aa, Homo sapiens
  CDR3 for beta chain variable domain of TCR clone 360990 (TRBV13, TRBJ2-5)
CASSLGRGQETQYF

SEQ ID NO: 721981 - protein, 19 aa, Homo sapiens
  CDR3 for alpha chain variable domain of TCR clone 360991 (TRAV1-2, TRAJ26)
CLLPLCCERPDNYVQNFFF

SEQ ID NO: 721982 - protein, 15 aa, Homo sapiens
  CDR3 for beta chain variable domain of TCR clone 360991 (TRBV9, TRBJ1-6)
CASSVAGTGDSPLHF

SEQ ID NO: 721983 - protein, 13 aa, Homo sapiens
  CDR3 for alpha chain variable domain of TCR clone 360992 (TRAV17, TRAJ6)
CATGFGGSYMPTF

SEQ ID NO: 721984 - protein, 14 aa, Homo sapiens
  CDR3 for beta chain variable domain of TCR clone 360992 (TRBV5-1, TRBJ2-5)
CASSFGGSQETQYF

SEQ ID NO: 721985 - protein, 12 aa, Homo sapiens
  CDR3 for alpha chain variable domain of TCR clone 360993 (TRAV13-2, TRAJ8)
CAPWLGFQKLVF

SEQ ID NO: 721986 - protein, 16 aa, Homo sapiens
  CDR3 for beta chain variable domain of TCR clone 360993 (TRBV5-1, TRBJ2-7)
CASSLEGLAGLYKQYF

SEQ ID NO: 721987 - protein, 12 aa, Homo sapiens
  CDR3 for alpha chain variable domain of TCR clone 360994 (TRAV1-1, TRAJ39)
CAVPVVGNMLTF

SEQ ID NO: 721988 - protein, 13 aa, Homo sapiens
  CDR3 for beta chain variable domain of TCR clone 360994 (TRBV19, TRBJ1-2)
CASSQGQVYGYTF

SEQ ID NO: 721989 - protein, 11 aa, Homo sapiens
  CDR3 for alpha chain variable domain of TCR clone 360995 (TRAV8-3, TRAJ49)
YAVNTGNQFYF

SEQ ID NO: 721990 - protein, 12 aa, Homo sapiens
  CDR3 for beta chain variable domain of TCR clone 360995 (TRBV11-2, TRBJ2-7)
CASSPPADEQYF

SEQ ID NO: 721991 - protein, 13 aa, Homo sapiens
  CDR3 for alpha chain variable domain of TCR clone 360996 (TRAV8-3, TRAJ28)
CAVGAVGIYQLTF

SEQ ID NO: 721992 - protein, 14 aa, Homo sapiens
  CDR3 for beta chain variable domain of TCR clone 360996 (TRBV7-2, TRBJ2-7)
CASRSHGAAYEQYF

SEQ ID NO: 721993 - protein, 15 aa, Homo sapiens
  CDR3 for alpha chain variable domain of TCR clone 360997 (TRAV12-1, TRAJ44)
CVVFVNTGTASKLTF

SEQ ID NO: 721994 - protein, 13 aa, Homo sapiens
  CDR3 for beta chain variable domain of TCR clone 360997 (TRBV25-1, TRBJ2-5)
CASSPPARGEEYF

SEQ ID NO: 721995 - protein, 17 aa, Homo sapiens
  CDR3 for alpha chain variable domain of TCR clone 360998 (TRAV8-3, TRAJ34)
CAIPGKLIFGSGIRLQV

SEQ ID NO: 721996 - protein, 15 aa, Homo sapiens
  CDR3 for beta chain variable domain of TCR clone 360998 (TRBV5-7, TRBJ2-1)
CASSRRLAGDNEQFF

SEQ ID NO: 721997 - protein, 11 aa, Homo sapiens
  CDR3 for alpha chain variable domain of TCR clone 360999 (TRAV12-3, TRAJ49)
CAANTGNQFYF

SEQ ID NO: 721998 - protein, 16 aa, Homo sapiens
  CDR3 for beta chain variable domain of TCR clone 360999 (TRBV7-9, TRBJ2-3)
WSSSPWREVGTDTQYF

SEQ ID NO: 721999 - protein, 15 aa, Homo sapiens
  CDR3 for alpha chain variable domain of TCR clone 361000 (TRAV27, TRAJ38)
CAARRNAGNHRKLIW

SEQ ID NO: 722000 - protein, 14 aa, Homo sapiens
  CDR3 for beta chain variable domain of TCR clone 361000 (TRBV6-1, TRBJ1-3)
CASVQGGGGNTIYF

SEQ ID NO: 722001 - protein, 13 aa, Homo sapiens
  CDR3 for alpha chain variable domain of TCR clone 361001 (TRAV2, TRAJ40)
CAVVTSGTYKYIF

SEQ ID NO: 722002 - protein, 18 aa, Homo sapiens
  CDR3 for beta chain variable domain of TCR clone 361001 (TRBV19, TRBJ2-5)
TVTSAQKNPTVLQETQYF

SEQ ID NO: 722003 - protein, 13 aa, Homo sapiens
  CDR3 for alpha chain variable domain of TCR clone 361002 (TRAV17, TRAJ26)
CATVDNYGQNFVF

SEQ ID NO: 722004 - protein, 12 aa, Homo sapiens
  CDR3 for beta chain variable domain of TCR clone 361002 (TRBV11-3, TRBJ2-1)
CASCLRGNEQFF

SEQ ID NO: 722005 - protein, 16 aa, Homo sapiens
  CDR3 for alpha chain variable domain of TCR clone 361003 (TRAV3, TRAJ37)
CAVRGMGSGNTGKLIF

SEQ ID NO: 722006 - protein, 13 aa, Homo sapiens
  CDR3 for beta chain variable domain of TCR clone 361003 (TRBV14, TRBJ2-7)
CASSQDRRGEQYF

SEQ ID NO: 722007 - protein, 23 aa, Homo sapiens
  CDR3 for alpha chain variable domain of TCR clone 361004 (TRAV17, TRAJ9)
CGFTGGFKTILEQEQNYLLKQIS

SEQ ID NO: 722008 - protein, 14 aa, Homo sapiens
  CDR3 for beta chain variable domain of TCR clone 361004 (TRBV7-9, TRBJ2-2)
CASSLVQDTGELFF

SEQ ID NO: 722009 - protein, 14 aa, Homo sapiens
  CDR3 for alpha chain variable domain of TCR clone 361005 (TRAV2, TRAJ37)
CAVDFTSNTGKLIF

SEQ ID NO: 722010 - protein, 15 aa, Homo sapiens
  CDR3 for beta chain variable domain of TCR clone 361005 (TRBV6-5, TRBJ2-7)
CASSYSTSGNYEQYF

SEQ ID NO: 722011 - protein, 13 aa, Homo sapiens
  CDR3 for alpha chain variable domain of TCR clone 361006 (TRAV27, TRAJ41)
CAGAGNSGYALNF

SEQ ID NO: 722012 - protein, 14 aa, Homo sapiens
  CDR3 for beta chain variable domain of TCR clone 361006 (TRBV7-3, TRBJ1-1)
CASSLKGGNTEAFF

SEQ ID NO: 722013 - protein, 16 aa, Homo sapiens
  CDR3 for alpha chain variable domain of TCR clone 361007 (TRAV16, TRAJ4)
CALSRMFSGGYNKLIF

SEQ ID NO: 722014 - protein, 14 aa, Homo sapiens
  CDR3 for beta chain variable domain of TCR clone 361007 (TRBV4-1, TRBJ2-2)
CARSQAVNTGELFF

SEQ ID NO: 722015 - protein, 16 aa, Homo sapiens
  CDR3 for alpha chain variable domain of TCR clone 361008 (TRAV12-3, TRAJ53)
CAMSPGRGGSNYKLTF

SEQ ID NO: 722016 - protein, 15 aa, Homo sapiens
  CDR3 for beta chain variable domain of TCR clone 361008 (TRBV4-1, TRBJ1-4)
CASSDTGGTNEKLFF

SEQ ID NO: 722017 - protein, 17 aa, Homo sapiens
  CDR3 for alpha chain variable domain of TCR clone 361009 (TRAV3, TRAJ13)
CAVRDMRRTGGYQKGTF

SEQ ID NO: 722018 - protein, 14 aa, Homo sapiens
  CDR3 for beta chain variable domain of TCR clone 361009 (TRBV5-1, TRBJ2-7)
CASSLTGSGYEQYF

SEQ ID NO: 722019 - protein, 18 aa, Homo sapiens
  CDR3 for alpha chain variable domain of TCR clone 361010 (TRAV3, TRAJ38)
CAVRDCLNAGNNHIRTLT

SEQ ID NO: 722020 - protein, 14 aa, Homo sapiens
  CDR3 for beta chain variable domain of TCR clone 361010 (TRBV5-5, TRBJ1-5)
CASSGQGVDQPQHF

SEQ ID NO: 722021 - protein, 11 aa, Homo sapiens
  CDR3 for alpha chain variable domain of TCR clone 361011 (TRAV2, TRAJ13)
CASGGYQKVTF

SEQ ID NO: 722022 - protein, 17 aa, Homo sapiens
  CDR3 for beta chain variable domain of TCR clone 361011 (TRBV20-1, TRBJ2-2)
CSASGSGQGGLTGELFL

SEQ ID NO: 722023 - protein, 17 aa, Homo sapiens
  CDR3 for alpha chain variable domain of TCR clone 361012 (TRAV13-1, TRAJ52)
CAASSGAGGTSYGKLTF

SEQ ID NO: 722024 - protein, 15 aa, Homo sapiens
  CDR3 for beta chain variable domain of TCR clone 361012 (TRBV7-9, TRBJ2-5)
CASSFKAGREETQYF

SEQ ID NO: 722025 - protein, 12 aa, Homo sapiens
  CDR3 for alpha chain variable domain of TCR clone 361013 (TRAV26-1, TRAJ36)
FIVRVRADNLFF

SEQ ID NO: 722026 - protein, 13 aa, Homo sapiens
  CDR3 for beta chain variable domain of TCR clone 361013 (TRBV11-2, TRBJ2-5)
CASSRGLSETQYF

SEQ ID NO: 722027 - protein, 17 aa, Homo sapiens
  CDR3 for alpha chain variable domain of TCR clone 361014 (TRAV8-3, TRAJ42)
CAVGNPEERRSQGKLIF

SEQ ID NO: 722028 - protein, 16 aa, Homo sapiens
  CDR3 for beta chain variable domain of TCR clone 361014 (TRBV7-2, TRBJ2-7)
CASTSQAASGGYEQYF

SEQ ID NO: 722029 - protein, 11 aa, Homo sapiens
  CDR3 for alpha chain variable domain of TCR clone 361015 (TRAV12-2, TRAJ11)
CAVIGYSTLTF

SEQ ID NO: 722030 - protein, 16 aa, Homo sapiens
  CDR3 for beta chain variable domain of TCR clone 361015 (TRBV5-4, TRBJ2-3)
CASQQPGAGGADTQYF

SEQ ID NO: 722031 - protein, 14 aa, Homo sapiens
  CDR3 for alpha chain variable domain of TCR clone 361016 (TRAV8-4, TRAJ9)
CAVVGNTGGFKNIF

SEQ ID NO: 722032 - protein, 14 aa, Homo sapiens
  CDR3 for beta chain variable domain of TCR clone 361016 (TRBV7-9, TRBJ2-1)
CASSSMVGFGEQFF

SEQ ID NO: 722033 - protein, 15 aa, Homo sapiens
  CDR3 for alpha chain variable domain of TCR clone 361017 (TRAV21, TRAJ53)
CATLNSGGSNYKLTC

SEQ ID NO: 722034 - protein, 14 aa, Homo sapiens
  CDR3 for beta chain variable domain of TCR clone 361017 (TRBV7-2, TRBJ2-7)
CASRSQGAAYEQYF

SEQ ID NO: 722035 - protein, 14 aa, Homo sapiens
  CDR3 for alpha chain variable domain of TCR clone 361018 (TRAV1-2, TRAJ8)
CSVREDTGFHKLVF

SEQ ID NO: 722036 - protein, 11 aa, Homo sapiens
  CDR3 for beta chain variable domain of TCR clone 361018 (TRBV29-1, TRBJ2-5)
CSEDRTGTQYF

SEQ ID NO: 722037 - protein, 13 aa, Homo sapiens
  CDR3 for alpha chain variable domain of TCR clone 361019 (TRAV8-6, TRAJ50)
CAVIKTSYDKVIF

SEQ ID NO: 722038 - protein, 15 aa, Homo sapiens
  CDR3 for beta chain variable domain of TCR clone 361019 (TRBV7-2, TRBJ2-2)
CASRRPGQITGELFF

SEQ ID NO: 722039 - protein, 15 aa, Homo sapiens
  CDR3 for alpha chain variable domain of TCR clone 361020 (TRAV17, TRAJ57)
CATGPSQGGSEKLVF

SEQ ID NO: 722040 - protein, 15 aa, Homo sapiens
  CDR3 for beta chain variable domain of TCR clone 361020 (TRBV5-5, TRBJ1-5)
CASSLKGGGEQPQHF

SEQ ID NO: 722041 - protein, 10 aa, Homo sapiens
  CDR3 for alpha chain variable domain of TCR clone 361021 (TRAV8-4, TRAJ43)
CAVSADDMRF

SEQ ID NO: 722042 - protein, 11 aa, Homo sapiens
  CDR3 for beta chain variable domain of TCR clone 361021 (TRBV12-4, TRBJ2-3)
CSSTATDTQYF

SEQ ID NO: 722043 - protein, 16 aa, Homo sapiens
  CDR3 for alpha chain variable domain of TCR clone 361022 (TRAV14/DV4, TRAJ53)
CAMREGGGGSNNKLTF

SEQ ID NO: 722044 - protein, 17 aa, Homo sapiens
  CDR3 for beta chain variable domain of TCR clone 361022 (TRBV13, TRBJ2-3)
CASSLSRVAGGRNTQYF

SEQ ID NO: 722045 - protein, 13 aa, Homo sapiens
  CDR3 for alpha chain variable domain of TCR clone 361023 (TRAV12-1, TRAJ26)
CVVRRNYGQNFVF

SEQ ID NO: 722046 - protein, 12 aa, Homo sapiens
  CDR3 for beta chain variable domain of TCR clone 361023 (TRBV7-2, TRBJ2-1)
CASSLMGAEQFF

SEQ ID NO: 722047 - protein, 12 aa, Homo sapiens
  CDR3 for alpha chain variable domain of TCR clone 361024 (TRAV13-1, TRAJ21)
CAAKEGVNKFYF

SEQ ID NO: 722048 - protein, 15 aa, Homo sapiens
  CDR3 for beta chain variable domain of TCR clone 361024 (TRBV25-1, TRBJ1-4)
CASSPGDSTNEKLFF

SEQ ID NO: 722049 - protein, 13 aa, Homo sapiens
  CDR3 for alpha chain variable domain of TCR clone 361025 (TRAV13-1, TRAJ10)
CAALEGGGNKLTF

SEQ ID NO: 722050 - protein, 15 aa, Homo sapiens
  CDR3 for beta chain variable domain of TCR clone 361025 (TRBV13, TRBJ1-2)
CASSLGRQPGYGYTF

SEQ ID NO: 722051 - protein, 16 aa, Homo sapiens
  CDR3 for alpha chain variable domain of TCR clone 361026 (TRAV3, TRAJ37)
CAVRPHGSGNTGKLIF

SEQ ID NO: 722052 - protein, 14 aa, Homo sapiens
  CDR3 for beta chain variable domain of TCR clone 361026 (TRBV5-5, TRBJ1-5)
CASSGQGVDQPQHF

SEQ ID NO: 722053 - protein, 14 aa, Homo sapiens
  CDR3 for alpha chain variable domain of TCR clone 361027 (TRAV1-2, TRAJ16)
CAVNRFSDGQKLLF

SEQ ID NO: 722054 - protein, 17 aa, Homo sapiens
  CDR3 for beta chain variable domain of TCR clone 361027 (TRBV7-8, TRBJ2-6)
GASSAGTGGAGANVLTF

SEQ ID NO: 722055 - protein, 13 aa, Homo sapiens
  CDR3 for alpha chain variable domain of TCR clone 361028 (TRAV21, TRAJ27)
CAARPGNAGKSTF

SEQ ID NO: 722056 - protein, 15 aa, Homo sapiens
  CDR3 for beta chain variable domain of TCR clone 361028 (TRBV20-1, TRBJ1-1)
CSSSRGVTGNTEAFF

SEQ ID NO: 722057 - protein, 14 aa, Homo sapiens
  CDR3 for alpha chain variable domain of TCR clone 361029 (TRAV26-1, TRAJ38)
HIADNAGNNRKLIW

SEQ ID NO: 722058 - protein, 17 aa, Homo sapiens
  CDR3 for beta chain variable domain of TCR clone 361029 (TRBV7-9, TRBJ2-3)
CASSPTVAGDLTDTQYF

SEQ ID NO: 722059 - protein, 15 aa, Homo sapiens
  CDR3 for alpha chain variable domain of TCR clone 361030 (TRAV8-4, TRAJ37)
CAVTYGSSNTGKLIF

SEQ ID NO: 722060 - protein, 15 aa, Homo sapiens
  CDR3 for beta chain variable domain of TCR clone 361030 (TRBV4-1, TRBJ2-7)
CASSQQGQGFDEQYF

SEQ ID NO: 722061 - protein, 11 aa, Homo sapiens
  CDR3 for alpha chain variable domain of TCR clone 361031 (TRAV1-1, TRAJ3)
CAVRSASKIIF

SEQ ID NO: 722062 - protein, 17 aa, Homo sapiens
  CDR3 for beta chain variable domain of TCR clone 361031 (TRBV28, TRBJ2-5)
CASSRQGGLAGAETQYF

SEQ ID NO: 722063 - protein, 12 aa, Homo sapiens
  CDR3 for alpha chain variable domain of TCR clone 361032 (TRAV17, TRAJ57)
CATDGGSEKLVF

SEQ ID NO: 722064 - protein, 15 aa, Homo sapiens
  CDR3 for beta chain variable domain of TCR clone 361032 (TRBV7-9, TRBJ2-7)
CASSPGLAFDYEQYF

SEQ ID NO: 722065 - protein, 17 aa, Homo sapiens
  CDR3 for alpha chain variable domain of TCR clone 361033 (TRAV2, TRAJ22)
ILQVREADAAEQRQLTF

SEQ ID NO: 722066 - protein, 16 aa, Homo sapiens
  CDR3 for beta chain variable domain of TCR clone 361033 (TRBV2, TRBJ2-5)
CASSETQGVVEETQYF

SEQ ID NO: 722067 - protein, 13 aa, Homo sapiens
  CDR3 for alpha chain variable domain of TCR clone 361034 (TRAV12-3, TRAJ34)
CAMSAGNTDKLIF

SEQ ID NO: 722068 - protein, 14 aa, Homo sapiens
  CDR3 for beta chain variable domain of TCR clone 361034 (TRBV25-1, TRBJ1-1)
CASTHLGGNTEAFF

SEQ ID NO: 722069 - protein, 13 aa, Homo sapiens
  CDR3 for alpha chain variable domain of TCR clone 361035 (TRAV13-1, TRAJ17)
CAANKAAGNKLTF

SEQ ID NO: 722070 - protein, 15 aa, Homo sapiens
  CDR3 for beta chain variable domain of TCR clone 361035 (TRBV28, TRBJ1-3)
CASSMGWASGNTIYF

SEQ ID NO: 722071 - protein, 15 aa, Homo sapiens
  CDR3 for alpha chain variable domain of TCR clone 361036 (TRAV26-1, TRAJ40)
CIVRAVPSGTYKYIF

SEQ ID NO: 722072 - protein, 14 aa, Homo sapiens
  CDR3 for beta chain variable domain of TCR clone 361036 (TRBV19, TRBJ2-1)
CASRDPGLANEQFF

SEQ ID NO: 722073 - protein, 14 aa, Homo sapiens
  CDR3 for alpha chain variable domain of TCR clone 361037 (TRAV1-2, TRAJ16)
CAVNRVSDGQKLLF

SEQ ID NO: 722074 - protein, 16 aa, Homo sapiens
  CDR3 for beta chain variable domain of TCR clone 361037 (TRBV19, TRBJ2-3)
CASSPEWDRGTDTQYF

SEQ ID NO: 722075 - protein, 15 aa, Homo sapiens
  CDR3 for alpha chain variable domain of TCR clone 361038 (TRAV17, TRAJ57)
CATGPSQAGSDKLVF

SEQ ID NO: 722076 - protein, 13 aa, Homo sapiens
  CDR3 for beta chain variable domain of TCR clone 361038 (TRBV27, TRBJ1-4)
CASSLMGDEKLFF

SEQ ID NO: 722077 - protein, 11 aa, Homo sapiens
  CDR3 for alpha chain variable domain of TCR clone 361039 (TRAV12-3, TRAJ27)
CAMANAGKSTF

SEQ ID NO: 722078 - protein, 13 aa, Homo sapiens
  CDR3 for beta chain variable domain of TCR clone 361039 (TRBV20-1, TRBJ1-1)
CSARVVGNTEAFF

SEQ ID NO: 722079 - protein, 15 aa, Homo sapiens
  CDR3 for alpha chain variable domain of TCR clone 361040 (TRAV8-3, TRAJ27)
CAVGPSKTNAGKSTL

SEQ ID NO: 722080 - protein, 15 aa, Homo sapiens
  CDR3 for beta chain variable domain of TCR clone 361040 (TRBV7-2, TRBJ2-1)
CASSSGLAAGNEQFF

SEQ ID NO: 722081 - protein, 15 aa, Homo sapiens
  CDR3 for alpha chain variable domain of TCR clone 361041 (TRAV3, TRAJ22)
CAVRDRGGSARQLTF

SEQ ID NO: 722082 - protein, 17 aa, Homo sapiens
  CDR3 for beta chain variable domain of TCR clone 361041 (TRBV28, TRBJ2-3)
CASSPTPAGGRVDTQYF

SEQ ID NO: 722083 - protein, 14 aa, Homo sapiens
  CDR3 for alpha chain variable domain of TCR clone 361042 (TRAV8-3, TRAJ10)
CAVGNAGGGNKLNF

SEQ ID NO: 722084 - protein, 17 aa, Homo sapiens
  CDR3 for beta chain variable domain of TCR clone 361042 (TRBV27, TRBJ2-7)
CASSTKRPGTGPYEQYF

SEQ ID NO: 722085 - protein, 16 aa, Homo sapiens
  CDR3 for alpha chain variable domain of TCR clone 361043 (TRAV14/DV4, TRAJ20)
CAMREGRSRDDYKLSF

SEQ ID NO: 722086 - protein, 14 aa, Homo sapiens
  CDR3 for beta chain variable domain of TCR clone 361043 (TRBV2, TRBJ1-5)
CASSGTVSNQPQHF

SEQ ID NO: 722087 - protein, 13 aa, Homo sapiens
  CDR3 for alpha chain variable domain of TCR clone 361044 (TRAV21, TRAJ27)
CAALNTNAGKSTF

SEQ ID NO: 722088 - protein, 14 aa, Homo sapiens
  CDR3 for beta chain variable domain of TCR clone 361044 (TRBV12-4, TRBJ2-5)
CASSAGLVSETQYF

SEQ ID NO: 722089 - protein, 14 aa, Homo sapiens
  CDR3 for alpha chain variable domain of TCR clone 361045 (TRAV17, TRAJ39)
CATDPVRAGNMLTF

SEQ ID NO: 722090 - protein, 12 aa, Homo sapiens
  CDR3 for beta chain variable domain of TCR clone 361045 (TRBV27, TRBJ2-2)
CASKLFTGELFF

SEQ ID NO: 722091 - protein, 16 aa, Homo sapiens
  CDR3 for alpha chain variable domain of TCR clone 361046 (TRAV14/DV4, TRAJ21)
CAMREGPENNFNQFYF

SEQ ID NO: 722092 - protein, 12 aa, Homo sapiens
  CDR3 for beta chain variable domain of TCR clone 361046 (TRBV29-1, TRBJ2-2)
CSVDKYTGELFF

SEQ ID NO: 722093 - protein, 13 aa, Homo sapiens
  CDR3 for alpha chain variable domain of TCR clone 361047 (TRAV3, TRAJ30)
CAVRDRGDDKIIF

SEQ ID NO: 722094 - protein, 16 aa, Homo sapiens
  CDR3 for beta chain variable domain of TCR clone 361047 (TRBV7-3, TRBJ2-2)
CASSLKRGTLTGELFF

SEQ ID NO: 722095 - protein, 14 aa, Homo sapiens
  CDR3 for alpha chain variable domain of TCR clone 361048 (TRAV13-2, TRAJ17)
CAENSKAAGNKLTF

SEQ ID NO: 722096 - protein, 11 aa, Homo sapiens
  CDR3 for beta chain variable domain of TCR clone 361048 (TRBV6-3, TRBJ2-3)
CATVQADTQYF

SEQ ID NO: 722097 - protein, 13 aa, Homo sapiens
  CDR3 for alpha chain variable domain of TCR clone 361049 (TRAV2, TRAJ40)
CAVVTSGTYKYIF

SEQ ID NO: 722098 - protein, 14 aa, Homo sapiens
  CDR3 for beta chain variable domain of TCR clone 361049 (TRBV7-2, TRBJ2-7)
CASSPKTCFCEQYF

SEQ ID NO: 722099 - protein, 23 aa, Homo sapiens
  CDR3 for alpha chain variable domain of TCR clone 361050 (TRAV26-1, TRAJ38)
CIADNAGNNHIQNPDPAVYQLRD

SEQ ID NO: 722100 - protein, 13 aa, Homo sapiens
  CDR3 for beta chain variable domain of TCR clone 361050 (TRBV11-3, TRBJ1-1)
CATEEGLNTVAFF

SEQ ID NO: 722101 - protein, 16 aa, Homo sapiens
  CDR3 for alpha chain variable domain of TCR clone 361051 (TRAV8-2, TRAJ7)
CVVSEGPYYGNNRLAF

SEQ ID NO: 722102 - protein, 15 aa, Homo sapiens
  CDR3 for beta chain variable domain of TCR clone 361051 (TRBV28, TRBJ2-4)
CAAGSGTLLMGIQYF

SEQ ID NO: 722103 - protein, 14 aa, Homo sapiens
  CDR3 for alpha chain variable domain of TCR clone 361052 (TRAV9-2, TRAJ38)
CALSNAGNNRKRIW

SEQ ID NO: 722104 - protein, 15 aa, Homo sapiens
  CDR3 for beta chain variable domain of TCR clone 361052 (TRBV9, TRBJ2-1)
CASSLAGSSYNEQFF

SEQ ID NO: 722105 - protein, 15 aa, Homo sapiens
  CDR3 for alpha chain variable domain of TCR clone 361053 (TRAV3, TRAJ22)
CAVRDRGGSARQLTF

SEQ ID NO: 722106 - protein, 13 aa, Homo sapiens
  CDR3 for beta chain variable domain of TCR clone 361053 (TRBV7-2, TRBJ2-2)
CASSLAVTGELFF

SEQ ID NO: 722107 - protein, 13 aa, Homo sapiens
  CDR3 for alpha chain variable domain of TCR clone 361054 (TRAV29/DV5, TRAJ31)
CAASRNNNARRMF

SEQ ID NO: 722108 - protein, 12 aa, Homo sapiens
  CDR3 for beta chain variable domain of TCR clone 361054 (TRBV14, TRBJ2-7)
CASSSLKGEQYF

SEQ ID NO: 722109 - protein, 13 aa, Homo sapiens
  CDR3 for alpha chain variable domain of TCR clone 361055 (TRAV13-1, TRAJ39)
CSKNSNAGNMLTF

SEQ ID NO: 722110 - protein, 18 aa, Homo sapiens
  CDR3 for beta chain variable domain of TCR clone 361055 (TRBV10-2, TRBJ2-2)
CISAPAVHRQADAGELFF

SEQ ID NO: 722111 - protein, 15 aa, Homo sapiens
  CDR3 for alpha chain variable domain of TCR clone 361056 (TRAV25, TRAJ52)
CAGTSGDTSYGKLTL

SEQ ID NO: 722112 - protein, 16 aa, Homo sapiens
  CDR3 for beta chain variable domain of TCR clone 361056 (TRBV15, TRBJ1-2)
CATSRGPRTGGGGYTF

SEQ ID NO: 722113 - protein, 12 aa, Homo sapiens
  CDR3 for alpha chain variable domain of TCR clone 361057 (TRAV16, TRAJ56)
CAPTGANSKLTF

SEQ ID NO: 722114 - protein, 17 aa, Homo sapiens
  CDR3 for beta chain variable domain of TCR clone 361057 (TRBV27, TRBJ2-6)
CASSLTGFASGANDLSF

SEQ ID NO: 722115 - protein, 13 aa, Homo sapiens
  CDR3 for alpha chain variable domain of TCR clone 361058 (TRAV9-2, TRAJ53)
CALSGGSNYKLTF

SEQ ID NO: 722116 - protein, 17 aa, Homo sapiens
  CDR3 for beta chain variable domain of TCR clone 361058 (TRBV11-2, TRBJ2-1)
SASSLYPPGVEYNEQFF

SEQ ID NO: 722117 - protein, 12 aa, Homo sapiens
  CDR3 for alpha chain variable domain of TCR clone 361059 (TRAV8-3, TRAJ45)
IVLGGGADGLTF

SEQ ID NO: 722118 - protein, 17 aa, Homo sapiens
  CDR3 for beta chain variable domain of TCR clone 361059 (TRBV7-8, TRBJ1-2)
CASSLRPLQGHLYGYTF

SEQ ID NO: 722119 - protein, 16 aa, Homo sapiens
  CDR3 for alpha chain variable domain of TCR clone 361060 (TRAV23/DV6, TRAJ9)
CAASIGGNTGGFKTIF

SEQ ID NO: 722120 - protein, 16 aa, Homo sapiens
  CDR3 for beta chain variable domain of TCR clone 361060 (TRBV13, TRBJ2-2)
CASSPRTGEHTGELFF

SEQ ID NO: 722121 - protein, 12 aa, Homo sapiens
  CDR3 for alpha chain variable domain of TCR clone 361061 (TRAV16, TRAJ27)
CALNHQCRQITL

SEQ ID NO: 722122 - protein, 14 aa, Homo sapiens
  CDR3 for beta chain variable domain of TCR clone 361061 (TRBV11-2, TRBJ1-5)
CASSLDRGRQPQHF

SEQ ID NO: 722123 - protein, 15 aa, Homo sapiens
  CDR3 for alpha chain variable domain of TCR clone 361062 (TRAV12-1, TRAJ4)
CVVNPFSGGYNKLNF

SEQ ID NO: 722124 - protein, 16 aa, Homo sapiens
  CDR3 for beta chain variable domain of TCR clone 361062 (TRBV5-1, TRBJ1-1)
CASSKTGTEVGTEAFF

SEQ ID NO: 722125 - protein, 13 aa, Homo sapiens
  CDR3 for alpha chain variable domain of TCR clone 361063 (TRAV8-3, TRAJ44)
CAVVPGTASKLTF

SEQ ID NO: 722126 - protein, 13 aa, Homo sapiens
  CDR3 for beta chain variable domain of TCR clone 361063 (TRBV11-2, TRBJ1-3)
CASSPTGGNTIYF

SEQ ID NO: 722127 - protein, 12 aa, Homo sapiens
  CDR3 for alpha chain variable domain of TCR clone 361064 (TRAV12-3, TRAJ17)
CAMTLTGNKITF

SEQ ID NO: 722128 - protein, 14 aa, Homo sapiens
  CDR3 for beta chain variable domain of TCR clone 361064 (TRBV20-1, TRBJ1-3)
CSASPTGAGNTIYF

SEQ ID NO: 722129 - protein, 14 aa, Homo sapiens
  CDR3 for alpha chain variable domain of TCR clone 361065 (TRAV1-2, TRAJ16)
CAVNRFSDGQKLLF

SEQ ID NO: 722130 - protein, 12 aa, Homo sapiens
  CDR3 for beta chain variable domain of TCR clone 361065 (TRBV24-1, TRBJ1-1)
CANLYPDTEAFF

SEQ ID NO: 722131 - protein, 11 aa, Homo sapiens
  CDR3 for alpha chain variable domain of TCR clone 361066 (TRAV12-3, TRAJ27)
CAMANAGKSTF

SEQ ID NO: 722132 - protein, 12 aa, Homo sapiens
  CDR3 for beta chain variable domain of TCR clone 361066 (TRBV24-1, TRBJ1-4)
CATSDPNEKLFF

SEQ ID NO: 722133 - protein, 13 aa, Homo sapiens
  CDR3 for alpha chain variable domain of TCR clone 361067 (TRAV12-1, TRAJ16)
CVVNGPDGQKLLF

SEQ ID NO: 722134 - protein, 14 aa, Homo sapiens
  CDR3 for beta chain variable domain of TCR clone 361067 (TRBV10-3, TRBJ2-7)
CHQCGTSETYEQYF

SEQ ID NO: 722135 - protein, 13 aa, Homo sapiens
  CDR3 for alpha chain variable domain of TCR clone 361068 (TRAV1-2, TRAJ24)
CAVTGDSWGKWQF

SEQ ID NO: 722136 - protein, 15 aa, Homo sapiens
  CDR3 for beta chain variable domain of TCR clone 361068 (TRBV7-2, TRBJ2-7)
CASSLGGAKSGEQYF

SEQ ID NO: 722137 - protein, 16 aa, Homo sapiens
  CDR3 for alpha chain variable domain of TCR clone 361069 (TRAV3, TRAJ3)
CAVRDRAKSSASKIIL

SEQ ID NO: 722138 - protein, 16 aa, Homo sapiens
  CDR3 for beta chain variable domain of TCR clone 361069 (TRBV20-1, TRBJ2-4)
CSATSLAELAKNIQYF

SEQ ID NO: 722139 - protein, 18 aa, Homo sapiens
  CDR3 for alpha chain variable domain of TCR clone 361070 (TRAV21, TRAJ52)
SAVRPSPAGGTSYGKLTF

SEQ ID NO: 722140 - protein, 12 aa, Homo sapiens
  CDR3 for beta chain variable domain of TCR clone 361070 (TRBV11-2, TRBJ2-1)
CASGPGNNEQFF

SEQ ID NO: 722141 - protein, 15 aa, Homo sapiens
  CDR3 for alpha chain variable domain of TCR clone 361071 (TRAV20, TRAJ4)
CAVQVFSGGYNKLIF

SEQ ID NO: 722142 - protein, 14 aa, Homo sapiens
  CDR3 for beta chain variable domain of TCR clone 361071 (TRBV7-6, TRBJ2-3)
CASNSRGDANTQYF

SEQ ID NO: 722143 - protein, 14 aa, Homo sapiens
  CDR3 for alpha chain variable domain of TCR clone 361072 (TRAV17, TRAJ57)
CATDPQGVSEKLVF

SEQ ID NO: 722144 - protein, 18 aa, Homo sapiens
  CDR3 for beta chain variable domain of TCR clone 361072 (TRBV6-5, TRBJ2-6)
CASSYSGNMESGANVLTF

SEQ ID NO: 722145 - protein, 22 aa, Homo sapiens
  CDR3 for alpha chain variable domain of TCR clone 361073 (TRAV8-3, TRAJ32)
CAVEVVLQTSSSLELALCLLSS

SEQ ID NO: 722146 - protein, 13 aa, Homo sapiens
  CDR3 for beta chain variable domain of TCR clone 361073 (TRBV7-3, TRBJ1-1)
CASSQDWGAEAFF

SEQ ID NO: 722147 - protein, 14 aa, Homo sapiens
  CDR3 for alpha chain variable domain of TCR clone 361074 (TRAV1-2, TRAJ16)
CAVNRFSDGEKLLF

SEQ ID NO: 722148 - protein, 19 aa, Homo sapiens
  CDR3 for beta chain variable domain of TCR clone 361074 (TRBV28, TRBJ2-7)
CASSYSGTSRLGWVYEQYF

SEQ ID NO: 722149 - protein, 15 aa, Homo sapiens
  CDR3 for alpha chain variable domain of TCR clone 361075 (TRAV3, TRAJ5)
CSVRDLDTGRRELTF

SEQ ID NO: 722150 - protein, 15 aa, Homo sapiens
  CDR3 for beta chain variable domain of TCR clone 361075 (TRBV20-1, TRBJ2-1)
CSARSPGGPGNEQFF

SEQ ID NO: 722151 - protein, 12 aa, Homo sapiens
  CDR3 for alpha chain variable domain of TCR clone 361076 (TRAV21, TRAJ11)
CAVRGGNSTLTF

SEQ ID NO: 722152 - protein, 13 aa, Homo sapiens
  CDR3 for beta chain variable domain of TCR clone 361076 (TRBV7-9, TRBJ1-2)
CASSLKQIYGYTF

SEQ ID NO: 722153 - protein, 13 aa, Homo sapiens
  CDR3 for alpha chain variable domain of TCR clone 361077 (TRAV13-1, TRAJ10)
CAALAGGGNKITF

SEQ ID NO: 722154 - protein, 17 aa, Homo sapiens
  CDR3 for beta chain variable domain of TCR clone 361077 (TRBV7-3, TRBJ2-2)
CASSLSGTSGGTGELFF

SEQ ID NO: 722155 - protein, 23 aa, Homo sapiens
  CDR3 for alpha chain variable domain of TCR clone 361078 (TRAV26-1, TRAJ38)
CIADNAGNNHIQNPDPAVYQLRD

SEQ ID NO: 722156 - protein, 17 aa, Homo sapiens
  CDR3 for beta chain variable domain of TCR clone 361078 (TRBV11-2, TRBJ2-6)
CASSQRDIFSGANVLSF

SEQ ID NO: 722157 - protein, 16 aa, Homo sapiens
  CDR3 for alpha chain variable domain of TCR clone 361079 (TRAV30, TRAJ24)
CGTETVDADSWGKFQF

SEQ ID NO: 722158 - protein, 14 aa, Homo sapiens
  CDR3 for beta chain variable domain of TCR clone 361079 (TRBV25-1, TRBJ1-1)
CASIHLGGNTEAFF

SEQ ID NO: 722159 - protein, 12 aa, Homo sapiens
  CDR3 for alpha chain variable domain of TCR clone 361080 (TRAV16, TRAJ26)
CALRSYGQNFVF

SEQ ID NO: 722160 - protein, 13 aa, Homo sapiens
  CDR3 for beta chain variable domain of TCR clone 361080 (TRBV7-9, TRBJ1-2)
CASSLRQNYGYTF

SEQ ID NO: 722161 - protein, 14 aa, Homo sapiens
  CDR3 for alpha chain variable domain of TCR clone 361081 (TRAV1-2, TRAJ16)
CAVNRFSDGQKRLF

SEQ ID NO: 722162 - protein, 13 aa, Homo sapiens
  CDR3 for beta chain variable domain of TCR clone 361081 (TRBV10-3, TRBJ2-7)
CASKLAVNYEQYF

SEQ ID NO: 722163 - protein, 14 aa, Homo sapiens
  CDR3 for alpha chain variable domain of TCR clone 361082 (TRAV23/DV6, TRAJ27)
CAASRDTSAGKSNF

SEQ ID NO: 722164 - protein, 13 aa, Homo sapiens
  CDR3 for beta chain variable domain of TCR clone 361082 (TRBV20-1, TRBJ1-5)
CSASGRGNQPQHF

SEQ ID NO: 722165 - protein, 19 aa, Homo sapiens
  CDR3 for alpha chain variable domain of TCR clone 361083 (TRAV3, TRAJ6)
CAVRDRNPGRSGGSYIPTF

SEQ ID NO: 722166 - protein, 17 aa, Homo sapiens
  CDR3 for beta chain variable domain of TCR clone 361083 (TRBV18, TRBJ2-7)
CASSPTFMDSYEQYLGR

SEQ ID NO: 722167 - protein, 13 aa, Homo sapiens
  CDR3 for alpha chain variable domain of TCR clone 361084 (TRAV21, TRAJ27)
CAARPGNAGKSTF

SEQ ID NO: 722168 - protein, 16 aa, Homo sapiens
  CDR3 for beta chain variable domain of TCR clone 361084 (TRBV6-1, TRBJ2-1)
CASILRQGSSYNEQFF

SEQ ID NO: 722169 - protein, 11 aa, Homo sapiens
  CDR3 for alpha chain variable domain of TCR clone 361085 (TRAV1-1, TRAJ5)
CAVRVRRALTF

SEQ ID NO: 722170 - protein, 18 aa, Homo sapiens
  CDR3 for beta chain variable domain of TCR clone 361085 (TRBV12-4, TRBJ1-2)
CASSPSPGQAGPYYGYTF

SEQ ID NO: 722171 - protein, 16 aa, Homo sapiens
  CDR3 for alpha chain variable domain of TCR clone 361086 (TRAV30, TRAJ24)
CGTEIVDADSWGKFQF

SEQ ID NO: 722172 - protein, 13 aa, Homo sapiens
  CDR3 for beta chain variable domain of TCR clone 361086 (TRBV10-3, TRBJ2-7)
CASTLAVNYEQYF

SEQ ID NO: 722173 - protein, 14 aa, Homo sapiens
  CDR3 for alpha chain variable domain of TCR clone 361087 (TRAV1-2, TRAJ8)
CAVREDTGFQTLVF

SEQ ID NO: 722174 - protein, 15 aa, Homo sapiens
  CDR3 for beta chain variable domain of TCR clone 361087 (TRBV6-3, TRBJ2-7)
CASSSPGTVFYEQHF

SEQ ID NO: 722175 - protein, 10 aa, Homo sapiens
  CDR3 for alpha chain variable domain of TCR clone 361088 (TRAV21, TRAJ34)
CAADTDKLIL

SEQ ID NO: 722176 - protein, 16 aa, Homo sapiens
  CDR3 for beta chain variable domain of TCR clone 361088 (TRBV6-5, TRBJ2-2)
CASSHVSRAQPGELFF

SEQ ID NO: 722177 - protein, 14 aa, Homo sapiens
  CDR3 for alpha chain variable domain of TCR clone 361089 (TRAV2, TRAJ9)
CAVEDRRGGFKTIF

SEQ ID NO: 722178 - protein, 14 aa, Homo sapiens
  CDR3 for beta chain variable domain of TCR clone 361089 (TRBV7-8, TRBJ2-5)
CASSATGGQETQYF

SEQ ID NO: 722179 - protein, 12 aa, Homo sapiens
  CDR3 for alpha chain variable domain of TCR clone 361090 (TRAV21, TRAJ11)
CAATSGYSTLTF

SEQ ID NO: 722180 - protein, 14 aa, Homo sapiens
  CDR3 for beta chain variable domain of TCR clone 361090 (TRBV7-9, TRBJ2-5)
CASSLVGGEETQYF

SEQ ID NO: 722181 - protein, 14 aa, Homo sapiens
  CDR3 for alpha chain variable domain of TCR clone 361091 (TRAV27, TRAJ37)
CAGERSSNTSKLIF

SEQ ID NO: 722182 - protein, 15 aa, Homo sapiens
  CDR3 for beta chain variable domain of TCR clone 361091 (TRBV11-3, TRBJ1-6)
CASSLDWGANSPLHF

SEQ ID NO: 722183 - protein, 12 aa, Homo sapiens
  CDR3 for alpha chain variable domain of TCR clone 361092 (TRAV13-2, TRAJ23)
CAERHRGGELIF

SEQ ID NO: 722184 - protein, 13 aa, Homo sapiens
  CDR3 for beta chain variable domain of TCR clone 361092 (TRBV10-3, TRBJ2-7)
CASKLAVNYEQYF

SEQ ID NO: 722185 - protein, 15 aa, Homo sapiens
  CDR3 for alpha chain variable domain of TCR clone 361093 (TRAV8-4, TRAJ10)
CAVSDGPGGGNKLTF

SEQ ID NO: 722186 - protein, 14 aa, Homo sapiens
  CDR3 for beta chain variable domain of TCR clone 361093 (TRBV19, TRBJ2-1)
CASSKDRGQDEQFF

SEQ ID NO: 722187 - protein, 12 aa, Homo sapiens
  CDR3 for alpha chain variable domain of TCR clone 361094 (TRAV6, TRAJ22)
TIPSGSARQLTF

SEQ ID NO: 722188 - protein, 15 aa, Homo sapiens
  CDR3 for beta chain variable domain of TCR clone 361094 (TRBV20-1, TRBJ1-6)
CSARAGGTFNSHLHF

SEQ ID NO: 722189 - protein, 14 aa, Homo sapiens
  CDR3 for alpha chain variable domain of TCR clone 361095 (TRAV12-2, TRAJ29)
CAVRRSSGNTPLVF

SEQ ID NO: 722190 - protein, 13 aa, Homo sapiens
  CDR3 for beta chain variable domain of TCR clone 361095 (TRBV12-4, TRBJ2-1)
CASSHYTDNEQFF

SEQ ID NO: 722191 - protein, 14 aa, Homo sapiens
  CDR3 for alpha chain variable domain of TCR clone 361096 (TRAV8-3, TRAJ4)
CAVGAAGGYNKLIF

SEQ ID NO: 722192 - protein, 14 aa, Homo sapiens
  CDR3 for beta chain variable domain of TCR clone 361096 (TRBV5-1, TRBJ2-3)
CASRGRTSTDTQYF

SEQ ID NO: 722193 - protein, 12 aa, Homo sapiens
  CDR3 for alpha chain variable domain of TCR clone 361097 (TRAV13-1, TRAJ21)
CAAKEGFNKFYF

SEQ ID NO: 722194 - protein, 12 aa, Homo sapiens
  CDR3 for beta chain variable domain of TCR clone 361097 (TRBV7-9, TRBJ1-5)
CASSSDQAPQHF

SEQ ID NO: 722195 - protein, 13 aa, Homo sapiens
  CDR3 for alpha chain variable domain of TCR clone 361098 (TRAV16, TRAJ29)
CALSGRGNTPLVF

SEQ ID NO: 722196 - protein, 15 aa, Homo sapiens
  CDR3 for beta chain variable domain of TCR clone 361098 (TRBV4-1, TRBJ2-3)
CASSRGQGIPDTQYF

SEQ ID NO: 722197 - protein, 14 aa, Homo sapiens
  CDR3 for alpha chain variable domain of TCR clone 361099 (TRAV17, TRAJ16)
CATADFSDGQKLLF

SEQ ID NO: 722198 - protein, 12 aa, Homo sapiens
  CDR3 for beta chain variable domain of TCR clone 361099 (TRBV24-1, TRBJ1-1)
CATLYPDTEALF

SEQ ID NO: 722199 - protein, 15 aa, Homo sapiens
  CDR3 for alpha chain variable domain of TCR clone 361100 (TRAV17, TRAJ45)
TSVLRTGGCADGLTF

SEQ ID NO: 722200 - protein, 15 aa, Homo sapiens
  CDR3 for beta chain variable domain of TCR clone 361100 (TRBV5-7, TRBJ1-5)
CASSYGKLWDQPQHF

SEQ ID NO: 722201 - protein, 14 aa, Homo sapiens
  CDR3 for alpha chain variable domain of TCR clone 361101 (TRAV8-2, TRAJ4)
WVVSPSGGYNKLIF

SEQ ID NO: 722202 - protein, 15 aa, Homo sapiens
  CDR3 for beta chain variable domain of TCR clone 361101 (TRBV10-2, TRBJ2-5)
CASRGSGGPQETQYF

SEQ ID NO: 722203 - protein, 13 aa, Homo sapiens
  CDR3 for alpha chain variable domain of TCR clone 361102 (TRAV12-2, TRAJ20)
CAVYPSNDYKPSF

SEQ ID NO: 722204 - protein, 14 aa, Homo sapiens
  CDR3 for beta chain variable domain of TCR clone 361102 (TRBV18, TRBJ2-7)
CASSPRGGAYEQYF

SEQ ID NO: 722205 - protein, 14 aa, Homo sapiens
  CDR3 for alpha chain variable domain of TCR clone 361103 (TRAV1-2, TRAJ16)
CAVNRFSDCQKLPF

SEQ ID NO: 722206 - protein, 15 aa, Homo sapiens
  CDR3 for beta chain variable domain of TCR clone 361103 (TRBV9, TRBJ1-6)
CASSVAGTGDSPLHF

SEQ ID NO: 722207 - protein, 12 aa, Homo sapiens
  CDR3 for alpha chain variable domain of TCR clone 361104 (TRAV13-1, TRAJ17)
CAARTAGNKLTF

SEQ ID NO: 722208 - protein, 15 aa, Homo sapiens
  CDR3 for beta chain variable domain of TCR clone 361104 (TRBV7-6, TRBJ1-1)
CASSPQGGANTEASF

SEQ ID NO: 722209 - protein, 12 aa, Homo sapiens
  CDR3 for alpha chain variable domain of TCR clone 361105 (TRAV12-3, TRAJ17)
CAMTLTGNKLTF

SEQ ID NO: 722210 - protein, 14 aa, Homo sapiens
  CDR3 for beta chain variable domain of TCR clone 361105 (TRBV7-9, TRBJ2-5)
CASSLAFGQETQYF

SEQ ID NO: 722211 - protein, 13 aa, Homo sapiens
  CDR3 for alpha chain variable domain of TCR clone 361106 (TRAV30, TRAJ24)
CGTVTDSWGELQF

SEQ ID NO: 722212 - protein, 15 aa, Homo sapiens
  CDR3 for beta chain variable domain of TCR clone 361106 (TRBV4-1, TRBJ2-1)
CASSKDPGNYNEQFF

SEQ ID NO: 722213 - protein, 14 aa, Homo sapiens
  CDR3 for alpha chain variable domain of TCR clone 361107 (TRAV12-3, TRAJ10)
SHLPLTGGGNKLTF

SEQ ID NO: 722214 - protein, 16 aa, Homo sapiens
  CDR3 for beta chain variable domain of TCR clone 361107 (TRBV19, TRBJ1-1)
CASRFGGPVTGTEDFF

SEQ ID NO: 722215 - protein, 13 aa, Homo sapiens
  CDR3 for alpha chain variable domain of TCR clone 361108 (TRAV2, TRAJ24)
CAVTTDSWGKLHF

SEQ ID NO: 722216 - protein, 14 aa, Homo sapiens
  CDR3 for beta chain variable domain of TCR clone 361108 (TRBV13, TRBJ2-5)
CASSLGRGQETQYF

SEQ ID NO: 722217 - protein, 11 aa, Homo sapiens
  CDR3 for alpha chain variable domain of TCR clone 361109 (TRAV8-2, TRAJ26)
CVVTLLLGSEF

SEQ ID NO: 722218 - protein, 15 aa, Homo sapiens
  CDR3 for beta chain variable domain of TCR clone 361109 (TRBV11-2, TRBJ2-2)
CASSSDRVNAGELFL

SEQ ID NO: 722219 - protein, 13 aa, Homo sapiens
  CDR3 for alpha chain variable domain of TCR clone 361110 (TRAV21, TRAJ36)
CAVIKTGANNLSF

SEQ ID NO: 722220 - protein, 13 aa, Homo sapiens
  CDR3 for beta chain variable domain of TCR clone 361110 (TRBV29-1, TRBJ2-3)
CSATRGGRDTQYF

SEQ ID NO: 722221 - protein, 14 aa, Homo sapiens
  CDR3 for alpha chain variable domain of TCR clone 361111 (TRAV35, TRAJ13)
CAGSPSGGYQKVTF

SEQ ID NO: 722222 - protein, 14 aa, Homo sapiens
  CDR3 for beta chain variable domain of TCR clone 361111 (TRBV12-4, TRBJ2-7)
CASSLTGRAYEQYF

SEQ ID NO: 722223 - protein, 17 aa, Homo sapiens
  CDR3 for alpha chain variable domain of TCR clone 361112 (TRAV3, TRAJ6)
CAVRDGPRAGGSYIPTF

SEQ ID NO: 722224 - protein, 13 aa, Homo sapiens
  CDR3 for beta chain variable domain of TCR clone 361112 (TRBV18, TRBJ2-7)
CASSRSGSYEQYF

SEQ ID NO: 722225 - protein, 19 aa, Homo sapiens
  CDR3 for alpha chain variable domain of TCR clone 361113 (TRAV38-1, TRAJ37)
CDVFLCFHLGSGNTGKLIF

SEQ ID NO: 722226 - protein, 12 aa, Homo sapiens
  CDR3 for beta chain variable domain of TCR clone 361113 (TRBV7-9, TRBJ2-7)
CASSLEGYEQYF

SEQ ID NO: 722227 - protein, 14 aa, Homo sapiens
  CDR3 for alpha chain variable domain of TCR clone 361114 (TRAV8-4, TRAJ26)
CAVSEDNYGQNFFF

SEQ ID NO: 722228 - protein, 15 aa, Homo sapiens
  CDR3 for beta chain variable domain of TCR clone 361114 (TRBV6-6, TRBJ1-1)
CASSPRGDVETEAFF

SEQ ID NO: 722229 - protein, 13 aa, Homo sapiens
  CDR3 for alpha chain variable domain of TCR clone 361115 (TRAV4, TRAJ42)
CLVGGGSQGKLIF

SEQ ID NO: 722230 - protein, 15 aa, Homo sapiens
  CDR3 for beta chain variable domain of TCR clone 361115 (TRBV29-1, TRBJ2-7)
CSVEFFDRGSYEQYF

SEQ ID NO: 722231 - protein, 14 aa, Homo sapiens
  CDR3 for alpha chain variable domain of TCR clone 361116 (TRAV35, TRAJ22)
CAGPRPGSARQLTF

SEQ ID NO: 722232 - protein, 14 aa, Homo sapiens
  CDR3 for beta chain variable domain of TCR clone 361116 (TRBV11-3, TRBJ2-3)
CASSSGQGPDTQYF

SEQ ID NO: 722233 - protein, 11 aa, Homo sapiens
  CDR3 for alpha chain variable domain of TCR clone 361117 (TRAV29/DV5, TRAJ49)
CAAVPGNQFYF

SEQ ID NO: 722234 - protein, 12 aa, Homo sapiens
  CDR3 for beta chain variable domain of TCR clone 361117 (TRBV14, TRBJ2-5)
RASSQLKETQYF

SEQ ID NO: 722235 - protein, 18 aa, Homo sapiens
  CDR3 for alpha chain variable domain of TCR clone 361118 (TRAV13-1, TRAJ52)
CAASERSAGGTSYGKLTF

SEQ ID NO: 722236 - protein, 13 aa, Homo sapiens
  CDR3 for beta chain variable domain of TCR clone 361118 (TRBV12-4, TRBJ1-2)
CASSLRQGKGYSF

SEQ ID NO: 722237 - protein, 14 aa, Homo sapiens
  CDR3 for alpha chain variable domain of TCR clone 361119 (TRAV12-2, TRAJ40)
CAVKIPSGTYKYIF

SEQ ID NO: 722238 - protein, 17 aa, Homo sapiens
  CDR3 for beta chain variable domain of TCR clone 361119 (TRBV13, TRBJ2-3)
CASSLSRVVGGRNTQYF

SEQ ID NO: 722239 - protein, 13 aa, Homo sapiens
  CDR3 for alpha chain variable domain of TCR clone 361120 (TRAV13-2, TRAJ48)
CAEMDFGNKKLTF

SEQ ID NO: 722240 - protein, 14 aa, Homo sapiens
  CDR3 for beta chain variable domain of TCR clone 361120 (TRBV20-1, TRBJ2-7)
CSAKDRKGAYEQYF

SEQ ID NO: 722241 - protein, 14 aa, Homo sapiens
  CDR3 for alpha chain variable domain of TCR clone 361121 (TRAV10, TRAJ48)
CVGVFHLGNEKLTF

SEQ ID NO: 722242 - protein, 13 aa, Homo sapiens
  CDR3 for beta chain variable domain of TCR clone 361121 (TRBV4-1, TRBJ2-7)
CASSQGQAYEQYF

SEQ ID NO: 722243 - protein, 18 aa, Homo sapiens
  CDR3 for alpha chain variable domain of TCR clone 361122 (TRAV21, TRAJ52)
CAVRPSPAGGTSYGKLTC

SEQ ID NO: 722244 - protein, 13 aa, Homo sapiens
  CDR3 for beta chain variable domain of TCR clone 361122 (TRBV2, TRBJ1-5)
CATAGPGNQPQHF

SEQ ID NO: 722245 - protein, 10 aa, Homo sapiens
  CDR3 for alpha chain variable domain of TCR clone 361123 (TRAV21, TRAJ31)
CAVDNARLMF

SEQ ID NO: 722246 - protein, 13 aa, Homo sapiens
  CDR3 for beta chain variable domain of TCR clone 361123 (TRBV4-1, TRBJ1-1)
CASSRKTNTEAFF

SEQ ID NO: 722247 - protein, 14 aa, Homo sapiens
  CDR3 for alpha chain variable domain of TCR clone 361124 (TRAV1-2, TRAJ8)
CAVREETGFQKRVF

SEQ ID NO: 722248 - protein, 14 aa, Homo sapiens
  CDR3 for beta chain variable domain of TCR clone 361124 (TRBV29-1, TRBJ2-3)
CSAGAGVGADTQYF

SEQ ID NO: 722249 - protein, 17 aa, Homo sapiens
  CDR3 for alpha chain variable domain of TCR clone 361125 (TRAV23/DV6, TRAJ57)
CATSSTLSQGGSEKLVF

SEQ ID NO: 722250 - protein, 14 aa, Homo sapiens
  CDR3 for beta chain variable domain of TCR clone 361125 (TRBV25-1, TRBJ1-1)
CASTHLGGNTEAVF

SEQ ID NO: 722251 - protein, 15 aa, Homo sapiens
  CDR3 for alpha chain variable domain of TCR clone 361126 (TRAV20, TRAJ28)
CAVQYSGAGSYQLTF

SEQ ID NO: 722252 - protein, 14 aa, Homo sapiens
  CDR3 for beta chain variable domain of TCR clone 361126 (TRBV28, TRBJ1-2)
CASRIQGANYGYTF

SEQ ID NO: 722253 - protein, 12 aa, Homo sapiens
  CDR3 for alpha chain variable domain of TCR clone 361127 (TRAV16, TRAJ10)
CSRTGGGNKLTF

SEQ ID NO: 722254 - protein, 14 aa, Homo sapiens
  CDR3 for beta chain variable domain of TCR clone 361127 (TRBV4-2, TRBJ1-2)
CASSQDRREGGYTF

SEQ ID NO: 722255 - protein, 14 aa, Homo sapiens
  CDR3 for alpha chain variable domain of TCR clone 361128 (TRAV12-1, TRAJ38)
CVVHNAGNNRKLIW

SEQ ID NO: 722256 - protein, 13 aa, Homo sapiens
  CDR3 for beta chain variable domain of TCR clone 361128 (TRBV19, TRBJ2-1)
CATSRWVYNEQFF

SEQ ID NO: 722257 - protein, 16 aa, Homo sapiens
  CDR3 for alpha chain variable domain of TCR clone 361129 (TRAV12-2, TRAJ43)
CAGADMRFGAGTRLTV

SEQ ID NO: 722258 - protein, 16 aa, Homo sapiens
  CDR3 for beta chain variable domain of TCR clone 361129 (TRBV2, TRBJ2-4)
CASSEAPGGEQNKQYF

SEQ ID NO: 722259 - protein, 14 aa, Homo sapiens
  CDR3 for alpha chain variable domain of TCR clone 361130 (TRAV1-2, TRAJ16)
CAVNRFSDGRKLLF

SEQ ID NO: 722260 - protein, 17 aa, Homo sapiens
  CDR3 for beta chain variable domain of TCR clone 361130 (TRBV7-3, TRBJ2-5)
CASSLGSGRSGSETQYF

SEQ ID NO: 722261 - protein, 13 aa, Homo sapiens
  CDR3 for alpha chain variable domain of TCR clone 361131 (TRAV2, TRAJ21)
CAVEDLNFNKFYF

SEQ ID NO: 722262 - protein, 13 aa, Homo sapiens
  CDR3 for beta chain variable domain of TCR clone 361131 (TRBV7-2, TRBJ1-1)
CASNLKGAKVAFF

SEQ ID NO: 722263 - protein, 17 aa, Homo sapiens
  CDR3 for alpha chain variable domain of TCR clone 361132 (TRAV3, TRAJ42)
CAVRDRDYGGSQGNLIF

SEQ ID NO: 722264 - protein, 12 aa, Homo sapiens
  CDR3 for beta chain variable domain of TCR clone 361132 (TRBV11-2, TRBJ2-1)
CASSPGSNEQFF

SEQ ID NO: 722265 - protein, 13 aa, Homo sapiens
  CDR3 for alpha chain variable domain of TCR clone 361133 (TRAV12-2, TRAJ52)
CAVGGTSYGKLTF

SEQ ID NO: 722266 - protein, 15 aa, Homo sapiens
  CDR3 for beta chain variable domain of TCR clone 361133 (TRBV20-1, TRBJ2-7)
CSARDRVSGMDEQYF

SEQ ID NO: 722267 - protein, 14 aa, Homo sapiens
  CDR3 for alpha chain variable domain of TCR clone 361134 (TRAV4, TRAJ17)
CLVGDMAAGKKLTF

SEQ ID NO: 722268 - protein, 14 aa, Homo sapiens
  CDR3 for beta chain variable domain of TCR clone 361134 (TRBV4-1, TRBJ2-7)
CASSPVAGGDEQYF

SEQ ID NO: 722269 - protein, 12 aa, Homo sapiens
  CDR3 for alpha chain variable domain of TCR clone 361135 (TRAV1-2, TRAJ33)
CAALDINYQLIW

SEQ ID NO: 722270 - protein, 16 aa, Homo sapiens
  CDR3 for beta chain variable domain of TCR clone 361135 (TRBV6-4, TRBJ1-2)
CASSEAVGDPNYGYTF

SEQ ID NO: 722271 - protein, 15 aa, Homo sapiens
  CDR3 for alpha chain variable domain of TCR clone 361136 (TRAV12-3, TRAJ39)
SLFVRGSRAGNMLTF

SEQ ID NO: 722272 - protein, 15 aa, Homo sapiens
  CDR3 for beta chain variable domain of TCR clone 361136 (TRBV7-9, TRBJ1-5)
CASSQGHQPNQPQHF

SEQ ID NO: 722273 - protein, 10 aa, Homo sapiens
  CDR3 for alpha chain variable domain of TCR clone 361137 (TRAV12-1, TRAJ37)
ARGNTGKLIF

SEQ ID NO: 722274 - protein, 16 aa, Homo sapiens
  CDR3 for beta chain variable domain of TCR clone 361137 (TRBV7-3, TRBJ2-2)
CASSLKRGTLSGELFF

SEQ ID NO: 722275 - protein, 18 aa, Homo sapiens
  CDR3 for alpha chain variable domain of TCR clone 361138 (TRAV12-3, TRAJ52)
CAMSRTNAGGTSYGKLTF

SEQ ID NO: 722276 - protein, 15 aa, Homo sapiens
  CDR3 for beta chain variable domain of TCR clone 361138 (TRBV19, TRBJ1-2)
CASSVGQFLNYGYTF

SEQ ID NO: 722277 - protein, 14 aa, Homo sapiens
  CDR3 for alpha chain variable domain of TCR clone 361139 (TRAV13-1, TRAJ4)
CAASLSGGHNKLIF

SEQ ID NO: 722278 - protein, 12 aa, Homo sapiens
  CDR3 for beta chain variable domain of TCR clone 361139 (TRBV20-1, TRBJ2-5)
CRVAGAGETQYF

SEQ ID NO: 722279 - protein, 15 aa, Homo sapiens
  CDR3 for alpha chain variable domain of TCR clone 361140 (TRAV12-1, TRAJ44)
CVADLPTGTASKLTF

SEQ ID NO: 722280 - protein, 13 aa, Homo sapiens
  CDR3 for beta chain variable domain of TCR clone 361140 (TRBV6-5, TRBJ2-5)
CASSPQGGETQYY

SEQ ID NO: 722281 - protein, 12 aa, Homo sapiens
  CDR3 for alpha chain variable domain of TCR clone 361141 (TRAV17, TRAJ5)
CATDSGRRALTF

SEQ ID NO: 722282 - protein, 14 aa, Homo sapiens
  CDR3 for beta chain variable domain of TCR clone 361141 (TRBV7-2, TRBJ2-7)
CASSPKTSFYEQYF

SEQ ID NO: 722283 - protein, 10 aa, Homo sapiens
  CDR3 for alpha chain variable domain of TCR clone 361142 (TRAV8-6, TRAJ20)
CAALSPGLQA

SEQ ID NO: 722284 - protein, 16 aa, Homo sapiens
  CDR3 for beta chain variable domain of TCR clone 361142 (TRBV3-1, TRBJ2-5)
CASSQDWASGQETQYF

SEQ ID NO: 722285 - protein, 15 aa, Homo sapiens
  CDR3 for alpha chain variable domain of TCR clone 361143 (TRAV36/DV7, TRAJ53)
WEGENSGGSNYKLTF

SEQ ID NO: 722286 - protein, 14 aa, Homo sapiens
  CDR3 for beta chain variable domain of TCR clone 361143 (TRBV19, TRBJ2-1)
CASPTFVLSGEQFF

SEQ ID NO: 722287 - protein, 13 aa, Homo sapiens
  CDR3 for alpha chain variable domain of TCR clone 361144 (TRAV6, TRAJ16)
CALDDSDGQKLLF

SEQ ID NO: 722288 - protein, 13 aa, Homo sapiens
  CDR3 for beta chain variable domain of TCR clone 361144 (TRBV12-5, TRBJ2-3)
CASGDRQSDTQYF

SEQ ID NO: 722289 - protein, 13 aa, Homo sapiens
  CDR3 for alpha chain variable domain of TCR clone 361145 (TRAV38-2/DV8, TRAJ43)
CAYLGSYNNDMRF

SEQ ID NO: 722290 - protein, 15 aa, Homo sapiens
  CDR3 for beta chain variable domain of TCR clone 361145 (TRBV4-1, TRBJ2-5)
CASSQLAGGQETQYF

SEQ ID NO: 722291 - protein, 10 aa, Homo sapiens
  CDR3 for alpha chain variable domain of TCR clone 361146 (TRAV36/DV7, TRAJ48)
CAVGNEKLTF

SEQ ID NO: 722292 - protein, 12 aa, Homo sapiens
  CDR3 for beta chain variable domain of TCR clone 361146 (TRBV28, TRBJ2-7)
CASRLGGGEQYF

SEQ ID NO: 722293 - protein, 13 aa, Homo sapiens
  CDR3 for alpha chain variable domain of TCR clone 361147 (TRAV36/DV7, TRAJ29)
CAVEPSGNTPLVF

SEQ ID NO: 722294 - protein, 16 aa, Homo sapiens
  CDR3 for beta chain variable domain of TCR clone 361147 (TRBV19, TRBJ2-1)
CASSKAGPSSYNEQFF

SEQ ID NO: 722295 - protein, 14 aa, Homo sapiens
  CDR3 for alpha chain variable domain of TCR clone 361148 (TRAV26-1, TRAJ44)
CIARTTGTASKLTF

SEQ ID NO: 722296 - protein, 15 aa, Homo sapiens
  CDR3 for beta chain variable domain of TCR clone 361148 (TRBV27, TRBJ2-1)
CASSNGGGSSNEQFF

SEQ ID NO: 722297 - protein, 14 aa, Homo sapiens
  CDR3 for alpha chain variable domain of TCR clone 361149 (TRAV38-1, TRAJ45)
CAYYSGGGADGLTF

SEQ ID NO: 722298 - protein, 12 aa, Homo sapiens
  CDR3 for beta chain variable domain of TCR clone 361149 (TRBV29-1, TRBJ2-3)
CSGAPPADTQYF

SEQ ID NO: 722299 - protein, 13 aa, Homo sapiens
  CDR3 for alpha chain variable domain of TCR clone 361150 (TRAV20, TRAJ37)
CAGCSSNTGKLIF

SEQ ID NO: 722300 - protein, 15 aa, Homo sapiens
  CDR3 for beta chain variable domain of TCR clone 361150 (TRBV7-2, TRBJ2-1)
CASSFQADGYNEQFF

SEQ ID NO: 722301 - protein, 12 aa, Homo sapiens
  CDR3 for alpha chain variable domain of TCR clone 361151 (TRAV2, TRAJ31)
CAVEDNNARLMF

SEQ ID NO: 722302 - protein, 15 aa, Homo sapiens
  CDR3 for beta chain variable domain of TCR clone 361151 (TRBV29-1, TRBJ2-7)
CSVEFFDRGSYEQYF

SEQ ID NO: 722303 - protein, 14 aa, Homo sapiens
  CDR3 for alpha chain variable domain of TCR clone 361152 (TRAV13-1, TRAJ35)
CAASKGGFGNVLHC

SEQ ID NO: 722304 - protein, 13 aa, Homo sapiens
  CDR3 for beta chain variable domain of TCR clone 361152 (TRBV7-3, TRBJ1-1)
CANSQDWGAEAFF

SEQ ID NO: 722305 - protein, 17 aa, Homo sapiens
  CDR3 for alpha chain variable domain of TCR clone 361153 (TRAV35, TRAJ52)
CAGQLAAGGTSYGKLTF

SEQ ID NO: 722306 - protein, 12 aa, Homo sapiens
  CDR3 for beta chain variable domain of TCR clone 361153 (TRBV20-1, TRBJ2-7)
CSAGRRQREQYF

SEQ ID NO: 722307 - protein, 15 aa, Homo sapiens
  CDR3 for alpha chain variable domain of TCR clone 361154 (TRAV4, TRAJ39)
CLVGPNNNAGNMLTF

SEQ ID NO: 722308 - protein, 16 aa, Homo sapiens
  CDR3 for beta chain variable domain of TCR clone 361154 (TRBV13, TRBJ2-2)
CASSPRTGEHTGELFV

SEQ ID NO: 722309 - protein, 14 aa, Homo sapiens
  CDR3 for alpha chain variable domain of TCR clone 361155 (TRAV13-1, TRAJ13)
CEASRVGGYQKVTF

SEQ ID NO: 722310 - protein, 12 aa, Homo sapiens
  CDR3 for beta chain variable domain of TCR clone 361155 (TRBV12-4, TRBJ1-4)
CASSETNEKLFF

SEQ ID NO: 722311 - protein, 15 aa, Homo sapiens
  CDR3 for alpha chain variable domain of TCR clone 361156 (TRAV17, TRAJ4)
CATGTWSGGYNKLVF

SEQ ID NO: 722312 - protein, 15 aa, Homo sapiens
  CDR3 for beta chain variable domain of TCR clone 361156 (TRBV20-1, TRBJ2-7)
CSARDRVSGMDEQYF

SEQ ID NO: 722313 - protein, 16 aa, Homo sapiens
  CDR3 for alpha chain variable domain of TCR clone 361157 (TRAV14/DV4, TRAJ54)
CAMREGRIQGAQKLVF

SEQ ID NO: 722314 - protein, 15 aa, Homo sapiens
  CDR3 for beta chain variable domain of TCR clone 361157 (TRBV2, TRBJ2-7)
CASSEGLARSYEQYF

SEQ ID NO: 722315 - protein, 14 aa, Homo sapiens
  CDR3 for alpha chain variable domain of TCR clone 361158 (TRAV13-1, TRAJ40)
CAARSTSGTYKYIF

SEQ ID NO: 722316 - protein, 17 aa, Homo sapiens
  CDR3 for beta chain variable domain of TCR clone 361158 (TRBV6-5, TRBJ1-2)
CASSSPWEGAFDYGYTF

SEQ ID NO: 722317 - protein, 10 aa, Homo sapiens
  CDR3 for alpha chain variable domain of TCR clone 361159 (TRAV12-3, TRAJ49)
FAMNDDQFYF

SEQ ID NO: 722318 - protein, 13 aa, Homo sapiens
  CDR3 for beta chain variable domain of TCR clone 361159 (TRBV12-4, TRBJ1-1)
CASSPGTGFEAFF

SEQ ID NO: 722319 - protein, 16 aa, Homo sapiens
  CDR3 for alpha chain variable domain of TCR clone 361160 (TRAV8-3, TRAJ10)
CALGPILTGGGNKLTF

SEQ ID NO: 722320 - protein, 16 aa, Homo sapiens
  CDR3 for beta chain variable domain of TCR clone 361160 (TRBV7-2, TRBJ2-5)
CASSSKWLSGQETQYF

SEQ ID NO: 722321 - protein, 16 aa, Homo sapiens
  CDR3 for alpha chain variable domain of TCR clone 361161 (TRAV12-3, TRAJ53)
CAMSVGSGGSNYKLTF

SEQ ID NO: 722322 - protein, 11 aa, Homo sapiens
  CDR3 for beta chain variable domain of TCR clone 361161 (TRBV29-1, TRBJ2-5)
CSVASGETLYF

SEQ ID NO: 722323 - protein, 11 aa, Homo sapiens
  CDR3 for alpha chain variable domain of TCR clone 361162 (TRAV21, TRAJ33)
CAVLSNYQLIW

SEQ ID NO: 722324 - protein, 15 aa, Homo sapiens
  CDR3 for beta chain variable domain of TCR clone 361162 (TRBV11-2, TRBJ2-7)
CASSLMVGGSYEQYF

SEQ ID NO: 722325 - protein, 16 aa, Homo sapiens
  CDR3 for alpha chain variable domain of TCR clone 361163 (TRAV10, TRAJ13)
CVVSARNSGGYQTVTF

SEQ ID NO: 722326 - protein, 19 aa, Homo sapiens
  CDR3 for beta chain variable domain of TCR clone 361163 (TRBV12-4, TRBJ2-1)
CASTLAFDPRDKEANEQFF

SEQ ID NO: 722327 - protein, 14 aa, Homo sapiens
  CDR3 for alpha chain variable domain of TCR clone 361164 (TRAV26-1, TRAJ15)
CIVRANQAGTAMIF

SEQ ID NO: 722328 - protein, 16 aa, Homo sapiens
  CDR3 for beta chain variable domain of TCR clone 361164 (TRBV20-1, TRBJ1-4)
CSAIGGPRGANEKLFF

SEQ ID NO: 722329 - protein, 12 aa, Homo sapiens
  CDR3 for alpha chain variable domain of TCR clone 361165 (TRAV8-4, TRAJ31)
CAVSDSHARLMF

SEQ ID NO: 722330 - protein, 17 aa, Homo sapiens
  CDR3 for beta chain variable domain of TCR clone 361165 (TRBV27, TRBJ2-3)
CASSFFPPNTSTDTQYF

SEQ ID NO: 722331 - protein, 18 aa, Homo sapiens
  CDR3 for alpha chain variable domain of TCR clone 361166 (TRAV21, TRAJ52)
CAVRPSPAGGTSYGKLTF

SEQ ID NO: 722332 - protein, 13 aa, Homo sapiens
  CDR3 for beta chain variable domain of TCR clone 361166 (TRBV11-2, TRBJ1-1)
CATEEGLNTEAFF

SEQ ID NO: 722333 - protein, 13 aa, Homo sapiens
  CDR3 for alpha chain variable domain of TCR clone 361167 (TRAV12-2, TRAJ42)
CAVKRGSQGNLIF

SEQ ID NO: 722334 - protein, 13 aa, Homo sapiens
  CDR3 for beta chain variable domain of TCR clone 361167 (TRBV7-9, TRBJ2-3)
CASSHGSTDTQYF

SEQ ID NO: 722335 - protein, 12 aa, Homo sapiens
  CDR3 for alpha chain variable domain of TCR clone 361168 (TRAV13-1, TRAJ9)
CASHTGGFKTIF

SEQ ID NO: 722336 - protein, 13 aa, Homo sapiens
  CDR3 for beta chain variable domain of TCR clone 361168 (TRBV12-4, TRBJ1-2)
CASSSVSKDGYTF

SEQ ID NO: 722337 - protein, 15 aa, Homo sapiens
  CDR3 for alpha chain variable domain of TCR clone 361169 (TRAV3, TRAJ22)
CAVRDRGGSARQLTL

SEQ ID NO: 722338 - protein, 13 aa, Homo sapiens
  CDR3 for beta chain variable domain of TCR clone 361169 (TRBV7-3, TRBJ2-1)
CASSPVAYNEQFF

SEQ ID NO: 722339 - protein, 15 aa, Homo sapiens
  CDR3 for alpha chain variable domain of TCR clone 361170 (TRAV3, TRAJ17)
CAVRDTGAAGNKLSF

SEQ ID NO: 722340 - protein, 14 aa, Homo sapiens
  CDR3 for beta chain variable domain of TCR clone 361170 (TRBV6-3, TRBJ1-1)
CASSNLLPGAEAFF

SEQ ID NO: 722341 - protein, 14 aa, Homo sapiens
  CDR3 for alpha chain variable domain of TCR clone 361171 (TRAV12-1, TRAJ30)
CVVNIGGRDDKIIF

SEQ ID NO: 722342 - protein, 13 aa, Homo sapiens
  CDR3 for beta chain variable domain of TCR clone 361171 (TRBV12-5, TRBJ2-1)
CASGLGRGNEQFY

SEQ ID NO: 722343 - protein, 16 aa, Homo sapiens
  CDR3 for alpha chain variable domain of TCR clone 361172 (TRAV12-3, TRAJ53)
CAMSPGSGGSNYKLTL

SEQ ID NO: 722344 - protein, 18 aa, Homo sapiens
  CDR3 for beta chain variable domain of TCR clone 361172 (TRBV10-2, TRBJ2-2)
CISAPAVHRQADAGELFF

SEQ ID NO: 722345 - protein, 14 aa, Homo sapiens
  CDR3 for alpha chain variable domain of TCR clone 361173 (TRAV17, TRAJ15)
CATMGIQAGTALIF

SEQ ID NO: 722346 - protein, 12 aa, Homo sapiens
  CDR3 for beta chain variable domain of TCR clone 361173 (TRBV29-1, TRBJ2-3)
CSVTGGADTQYF

SEQ ID NO: 722347 - protein, 14 aa, Homo sapiens
  CDR3 for alpha chain variable domain of TCR clone 361174 (TRAV13-1, TRAJ9)
CAASALTGGFKTIF

SEQ ID NO: 722348 - protein, 13 aa, Homo sapiens
  CDR3 for beta chain variable domain of TCR clone 361174 (TRBV2, TRBJ1-1)
CASNLLRNTEAFF

SEQ ID NO: 722349 - protein, 14 aa, Homo sapiens
  CDR3 for alpha chain variable domain of TCR clone 361175 (TRAV8-3, TRAJ16)
CAVDRFSDGQKLLF

SEQ ID NO: 722350 - protein, 17 aa, Homo sapiens
  CDR3 for beta chain variable domain of TCR clone 361175 (TRBV4-1, TRBJ1-3)
CASSPQRGIRFGNTIYF

SEQ ID NO: 722351 - protein, 14 aa, Homo sapiens
  CDR3 for alpha chain variable domain of TCR clone 361176 (TRAV12-2, TRAJ11)
CAVNRESGYSTPSF

SEQ ID NO: 722352 - protein, 10 aa, Homo sapiens
  CDR3 for beta chain variable domain of TCR clone 361176 (TRBV20-1, TRBJ2-5)
CSARFETQYF

SEQ ID NO: 722353 - protein, 14 aa, Homo sapiens
  CDR3 for alpha chain variable domain of TCR clone 361177 (TRAV12-2, TRAJ17)
CAVNIKAAGNRLTF

SEQ ID NO: 722354 - protein, 16 aa, Homo sapiens
  CDR3 for beta chain variable domain of TCR clone 361177 (TRBV20-1, TRBJ2-6)
CSASSQGYDGANVLIF

SEQ ID NO: 722355 - protein, 14 aa, Homo sapiens
  CDR3 for alpha chain variable domain of TCR clone 361178 (TRAV26-1, TRAJ45)
CIEVTGGGADGRTF

SEQ ID NO: 722356 - protein, 12 aa, Homo sapiens
  CDR3 for beta chain variable domain of TCR clone 361178 (TRBV7-8, TRBJ2-7)
CASSLGDREQYF

SEQ ID NO: 722357 - protein, 14 aa, Homo sapiens
  CDR3 for alpha chain variable domain of TCR clone 361179 (TRAV17, TRAJ56)
CATVPAGANSKLTF

SEQ ID NO: 722358 - protein, 13 aa, Homo sapiens
  CDR3 for beta chain variable domain of TCR clone 361179 (TRBV19, TRBJ2-5)
CASSETAPETQYF

SEQ ID NO: 722359 - protein, 13 aa, Homo sapiens
  CDR3 for alpha chain variable domain of TCR clone 361180 (TRAV17, TRAJ13)
CATDSGGYQKVTF

SEQ ID NO: 722360 - protein, 13 aa, Homo sapiens
  CDR3 for beta chain variable domain of TCR clone 361180 (TRBV7-9, TRBJ2-7)
CASSFAGAYEQYF

SEQ ID NO: 722361 - protein, 15 aa, Homo sapiens
  CDR3 for alpha chain variable domain of TCR clone 361181 (TRAV26-1, TRAJ29)
CIVIVEGSGNTPLVF

SEQ ID NO: 722362 - protein, 14 aa, Homo sapiens
  CDR3 for beta chain variable domain of TCR clone 361181 (TRBV19, TRBJ2-1)
CARGARSFQWEQFF

SEQ ID NO: 722363 - protein, 12 aa, Homo sapiens
  CDR3 for alpha chain variable domain of TCR clone 361182 (TRAV12-3, TRAJ17)
RAMTLTGNKLTF

SEQ ID NO: 722364 - protein, 15 aa, Homo sapiens
  CDR3 for beta chain variable domain of TCR clone 361182 (TRBV20-1, TRBJ2-7)
RSARDRVSGMDEQYF

SEQ ID NO: 722365 - protein, 15 aa, Homo sapiens
  CDR3 for alpha chain variable domain of TCR clone 361183 (TRAV2, TRAJ11)
CAVGGRNSGYSTLTF

SEQ ID NO: 722366 - protein, 14 aa, Homo sapiens
  CDR3 for beta chain variable domain of TCR clone 361183 (TRBV4-1, TRBJ2-2)
CASSQAVNTGELCF

SEQ ID NO: 722367 - protein, 15 aa, Homo sapiens
  CDR3 for alpha chain variable domain of TCR clone 361184 (TRAV17, TRAJ57)
CATGPSQGGSENLVF

SEQ ID NO: 722368 - protein, 13 aa, Homo sapiens
  CDR3 for beta chain variable domain of TCR clone 361184 (TRBV27, TRBJ1-4)
CASSLMGDEKLFF

SEQ ID NO: 722369 - protein, 13 aa, Homo sapiens
  CDR3 for alpha chain variable domain of TCR clone 361185 (TRAV3, TRAJ21)
CAGREPDFNKFYF

SEQ ID NO: 722370 - protein, 14 aa, Homo sapiens
  CDR3 for beta chain variable domain of TCR clone 361185 (TRBV4-2, TRBJ2-1)
CASGLDRAYNEQFF

SEQ ID NO: 722371 - protein, 15 aa, Homo sapiens
  CDR3 for alpha chain variable domain of TCR clone 361186 (TRAV26-1, TRAJ56)
CIVRVDNGANSKLTF

SEQ ID NO: 722372 - protein, 16 aa, Homo sapiens
  CDR3 for beta chain variable domain of TCR clone 361186 (TRBV19, TRBJ2-1)
CASSKAGPSSYNEQFF

SEQ ID NO: 722373 - protein, 17 aa, Homo sapiens
  CDR3 for alpha chain variable domain of TCR clone 361187 (TRAV38-1, TRAJ45)
CAFMKHYMGGGADGLTF

SEQ ID NO: 722374 - protein, 16 aa, Homo sapiens
  CDR3 for beta chain variable domain of TCR clone 361187 (TRBV5-1, TRBJ2-5)
CASSFQGLADQETQYF

SEQ ID NO: 722375 - protein, 14 aa, Homo sapiens
  CDR3 for alpha chain variable domain of TCR clone 361188 (TRAV26-1, TRAJ38)
CIADNACNNRKLIW

SEQ ID NO: 722376 - protein, 13 aa, Homo sapiens
  CDR3 for beta chain variable domain of TCR clone 361188 (TRBV15, TRBJ1-6)
CATSGGLNSPLHF

SEQ ID NO: 722377 - protein, 13 aa, Homo sapiens
  CDR3 for alpha chain variable domain of TCR clone 361189 (TRAV21, TRAJ57)
CAVTQGGSEKLVF

SEQ ID NO: 722378 - protein, 16 aa, Homo sapiens
  CDR3 for beta chain variable domain of TCR clone 361189 (TRBV29-1, TRBJ2-7)
RRVEDAEDGTAYEQYF

SEQ ID NO: 722379 - protein, 11 aa, Homo sapiens
  CDR3 for alpha chain variable domain of TCR clone 361190 (TRAV2, TRAJ33)
CAVDSNYQLIW

SEQ ID NO: 722380 - protein, 16 aa, Homo sapiens
  CDR3 for beta chain variable domain of TCR clone 361190 (TRBV11-2, TRBJ1-2)
CASSLDTGGADYGYTF

SEQ ID NO: 722381 - protein, 17 aa, Homo sapiens
  CDR3 for alpha chain variable domain of TCR clone 361191 (TRAV12-1, TRAJ53)
CVAGALVGGGSNYKLTF

SEQ ID NO: 722382 - protein, 14 aa, Homo sapiens
  CDR3 for beta chain variable domain of TCR clone 361191 (TRBV5-1, TRBJ1-4)
CASSLDRTHEKLFF

SEQ ID NO: 722383 - protein, 12 aa, Homo sapiens
  CDR3 for alpha chain variable domain of TCR clone 361192 (TRAV35, TRAJ12)
CAGMDSSYKLIF

SEQ ID NO: 722384 - protein, 15 aa, Homo sapiens
  CDR3 for beta chain variable domain of TCR clone 361192 (TRBV7-9, TRBJ1-6)
CASSSPGRGNSPLHF

SEQ ID NO: 722385 - protein, 14 aa, Homo sapiens
  CDR3 for alpha chain variable domain of TCR clone 361193 (TRAV2, TRAJ9)
CAVEDRSGGFTTIF

SEQ ID NO: 722386 - protein, 15 aa, Homo sapiens
  CDR3 for beta chain variable domain of TCR clone 361193 (TRBV5-7, TRBJ1-5)
CASSYGKLWDQPQHF

SEQ ID NO: 722387 - protein, 11 aa, Homo sapiens
  CDR3 for alpha chain variable domain of TCR clone 361194 (TRAV2, TRAJ33)
CAVDSNYQLIW

SEQ ID NO: 722388 - protein, 13 aa, Homo sapiens
  CDR3 for beta chain variable domain of TCR clone 361194 (TRBV7-8, TRBJ2-1)
CASTRDAVDEQFF

SEQ ID NO: 722389 - protein, 14 aa, Homo sapiens
  CDR3 for alpha chain variable domain of TCR clone 361195 (TRAV13-1, TRAJ35)
CAASKGGFGNVLHC

SEQ ID NO: 722390 - protein, 14 aa, Homo sapiens
  CDR3 for beta chain variable domain of TCR clone 361195 (TRBV7-8, TRBJ2-3)
CASSFPDGQDAQYF

SEQ ID NO: 722391 - protein, 12 aa, Homo sapiens
  CDR3 for alpha chain variable domain of TCR clone 361196 (TRAV12-3, TRAJ17)
CATTLTGNKLTF

SEQ ID NO: 722392 - protein, 15 aa, Homo sapiens
  CDR3 for beta chain variable domain of TCR clone 361196 (TRBV12-4, TRBJ2-5)
CASSPPTGLQETQYF

SEQ ID NO: 722393 - protein, 11 aa, Homo sapiens
  CDR3 for alpha chain variable domain of TCR clone 361197 (TRAV8-3, TRAJ49)
CAVNTGNQFYF

SEQ ID NO: 722394 - protein, 16 aa, Homo sapiens
  CDR3 for beta chain variable domain of TCR clone 361197 (TRBV28, TRBJ2-1)
CASSSPEYPRDNEQFF

SEQ ID NO: 722395 - protein, 14 aa, Homo sapiens
  CDR3 for alpha chain variable domain of TCR clone 361198 (TRAV9-2, TRAJ39)
CALYIYNAGNMLTF

SEQ ID NO: 722396 - protein, 15 aa, Homo sapiens
  CDR3 for beta chain variable domain of TCR clone 361198 (TRBV28, TRBJ1-2)
CASSSHSIANYGYTF

SEQ ID NO: 722397 - protein, 13 aa, Homo sapiens
  CDR3 for alpha chain variable domain of TCR clone 361199 (TRAV29/DV5, TRAJ49)
CAAPPNTGNQFYF

SEQ ID NO: 722398 - protein, 12 aa, Homo sapiens
  CDR3 for beta chain variable domain of TCR clone 361199 (TRBV6-3, TRBJ2-7)
CASSRQGYEQYF

SEQ ID NO: 722399 - protein, 14 aa, Homo sapiens
  CDR3 for alpha chain variable domain of TCR clone 361200 (TRAV26-1, TRAJ26)
CIVRTTFLGQNFVF

SEQ ID NO: 722400 - protein, 16 aa, Homo sapiens
  CDR3 for beta chain variable domain of TCR clone 361200 (TRBV12-4, TRBJ2-7)
CASRSTGTGPSYEQYF

SEQ ID NO: 722401 - protein, 15 aa, Homo sapiens
  CDR3 for alpha chain variable domain of TCR clone 361201 (TRAV17, TRAJ13)
CATDAGSGGYQKVTF

SEQ ID NO: 722402 - protein, 17 aa, Homo sapiens
  CDR3 for beta chain variable domain of TCR clone 361201 (TRBV11-2, TRBJ2-1)
CASSLYPPGVEYNEQCF

SEQ ID NO: 722403 - protein, 12 aa, Homo sapiens
  CDR3 for alpha chain variable domain of TCR clone 361202 (TRAV13-1, TRAJ42)
VNYGGSQGNLIF

SEQ ID NO: 722404 - protein, 18 aa, Homo sapiens
  CDR3 for beta chain variable domain of TCR clone 361202 (TRBV7-2, TRBJ2-3)
CASSLKREGSGITDTQYF

SEQ ID NO: 722405 - protein, 13 aa, Homo sapiens
  CDR3 for alpha chain variable domain of TCR clone 361203 (TRAV3, TRAJ27)
CAVRPLGAGKSTF

SEQ ID NO: 722406 - protein, 13 aa, Homo sapiens
  CDR3 for beta chain variable domain of TCR clone 361203 (TRBV7-9, TRBJ1-2)
CASSLNQNYGYTF

SEQ ID NO: 722407 - protein, 11 aa, Homo sapiens
  CDR3 for alpha chain variable domain of TCR clone 361204 (TRAV2, TRAJ33)
CAVESNYQLIW

SEQ ID NO: 722408 - protein, 19 aa, Homo sapiens
  CDR3 for beta chain variable domain of TCR clone 361204 (TRBV25-1, TRBJ2-2)
CAILVYRVDRGRKTGKLFF

SEQ ID NO: 722409 - protein, 13 aa, Homo sapiens
  CDR3 for alpha chain variable domain of TCR clone 361205 (TRAV16, TRAJ9)
CALRATGGFKTIF

SEQ ID NO: 722410 - protein, 16 aa, Homo sapiens
  CDR3 for beta chain variable domain of TCR clone 361205 (TRBV5-1, TRBJ1-3)
CASSRSGEDSGNTIYS

SEQ ID NO: 722411 - protein, 14 aa, Homo sapiens
  CDR3 for alpha chain variable domain of TCR clone 361206 (TRAV1-2, TRAJ16)
CAVNRFSDGQKLLF

SEQ ID NO: 722412 - protein, 11 aa, Homo sapiens
  CDR3 for beta chain variable domain of TCR clone 361206 (TRBV29-1, TRBJ2-5)
CREDRTGTQYF

SEQ ID NO: 722413 - protein, 12 aa, Homo sapiens
  CDR3 for alpha chain variable domain of TCR clone 361207 (TRAV12-2, TRAJ36)
CAAPRGANNLFF

SEQ ID NO: 722414 - protein, 15 aa, Homo sapiens
  CDR3 for beta chain variable domain of TCR clone 361207 (TRBV11-2, TRBJ1-2)
CASSLEGVQRNGYTF

SEQ ID NO: 722415 - protein, 13 aa, Homo sapiens
  CDR3 for alpha chain variable domain of TCR clone 361208 (TRAV20, TRAJ40)
CAVRTSGTYKYIF

SEQ ID NO: 722416 - protein, 13 aa, Homo sapiens
  CDR3 for beta chain variable domain of TCR clone 361208 (TRBV11-2, TRBJ2-1)
CASSLRLTHEQFF

SEQ ID NO: 722417 - protein, 18 aa, Homo sapiens
  CDR3 for alpha chain variable domain of TCR clone 361209 (TRAV26-1, TRAJ23)
CIVRVGLEVWNQGGKLIF

SEQ ID NO: 722418 - protein, 15 aa, Homo sapiens
  CDR3 for beta chain variable domain of TCR clone 361209 (TRBV19, TRBJ1-1)
CASTSGQIQNTEAFF

SEQ ID NO: 722419 - protein, 14 aa, Homo sapiens
  CDR3 for alpha chain variable domain of TCR clone 361210 (TRAV16, TRAJ17)
CALSGRAAGNKLTF

SEQ ID NO: 722420 - protein, 13 aa, Homo sapiens
  CDR3 for beta chain variable domain of TCR clone 361210 (TRBV10-3, TRBJ2-7)
CASKLAVNYEQYF

SEQ ID NO: 722421 - protein, 17 aa, Homo sapiens
  CDR3 for alpha chain variable domain of TCR clone 361211 (TRAV3, TRAJ6)
CAVRDGPRAGGSYIPTF

SEQ ID NO: 722422 - protein, 15 aa, Homo sapiens
  CDR3 for beta chain variable domain of TCR clone 361211 (TRBV7-9, TRBJ1-6)
CASSSPERGNSPLHF

SEQ ID NO: 722423 - protein, 13 aa, Homo sapiens
  CDR3 for alpha chain variable domain of TCR clone 361212 (TRAV21, TRAJ27)
CAARPGNPGKSTF

SEQ ID NO: 722424 - protein, 14 aa, Homo sapiens
  CDR3 for beta chain variable domain of TCR clone 361212 (TRBV11-2, TRBJ2-7)
CASSLGAGAYEQYF

SEQ ID NO: 722425 - protein, 13 aa, Homo sapiens
  CDR3 for alpha chain variable domain of TCR clone 361213 (TRAV27, TRAJ42)
CAGARGSKGNLIF

SEQ ID NO: 722426 - protein, 15 aa, Homo sapiens
  CDR3 for beta chain variable domain of TCR clone 361213 (TRBV10-3, TRBJ2-2)
CAIRTDREDTGGLFF

SEQ ID NO: 722427 - protein, 17 aa, Homo sapiens
  CDR3 for alpha chain variable domain of TCR clone 361214 (TRAV12-3, TRAJ18)
CAMIRADRGSTLGRQYF

SEQ ID NO: 722428 - protein, 14 aa, Homo sapiens
  CDR3 for beta chain variable domain of TCR clone 361214 (TRBV5-7, TRBJ1-6)
CASTPWPADSPLHF

SEQ ID NO: 722429 - protein, 13 aa, Homo sapiens
  CDR3 for alpha chain variable domain of TCR clone 361215 (TRAV21, TRAJ45)
CAVMGRGADGLTF

SEQ ID NO: 722430 - protein, 14 aa, Homo sapiens
  CDR3 for beta chain variable domain of TCR clone 361215 (TRBV4-3, TRBJ1-4)
CASSPLQRNEKLFF

SEQ ID NO: 722431 - protein, 14 aa, Homo sapiens
  CDR3 for alpha chain variable domain of TCR clone 361216 (TRAV12-3, TRAJ22)
CAMSLFGSARQMTF

SEQ ID NO: 722432 - protein, 11 aa, Homo sapiens
  CDR3 for beta chain variable domain of TCR clone 361216 (TRBV12-4, TRBJ2-2)
CASSSAGELFF

SEQ ID NO: 722433 - protein, 10 aa, Homo sapiens
  CDR3 for alpha chain variable domain of TCR clone 361217 (TRAV23/DV6, TRAJ57)
CAAGSTLSQG

SEQ ID NO: 722434 - protein, 15 aa, Homo sapiens
  CDR3 for beta chain variable domain of TCR clone 361217 (TRBV6-5, TRBJ1-2)
CASSYSQAFNYGYTF

SEQ ID NO: 722435 - protein, 11 aa, Homo sapiens
  CDR3 for alpha chain variable domain of TCR clone 361218 (TRAV13-2, TRAJ23)
CAERPRGKLIF

SEQ ID NO: 722436 - protein, 18 aa, Homo sapiens
  CDR3 for beta chain variable domain of TCR clone 361218 (TRBV6-5, TRBJ1-1)
CASSYSAPGGTGGTEAFF

SEQ ID NO: 722437 - protein, 13 aa, Homo sapiens
  CDR3 for alpha chain variable domain of TCR clone 361219 (TRAV12-3, TRAJ9)
CAMSGGGGFKTIF

SEQ ID NO: 722438 - protein, 18 aa, Homo sapiens
  CDR3 for beta chain variable domain of TCR clone 361219 (TRBV7-3, TRBJ2-3)
CASSSTGTYPGSTDTQYF

SEQ ID NO: 722439 - protein, 15 aa, Homo sapiens
  CDR3 for alpha chain variable domain of TCR clone 361220 (TRAV21, TRAJ22)
CAVRLFFWFCKATDL

SEQ ID NO: 722440 - protein, 14 aa, Homo sapiens
  CDR3 for beta chain variable domain of TCR clone 361220 (TRBV19, TRBJ1-5)
CASRAPDSFVSQHF

SEQ ID NO: 722441 - protein, 17 aa, Homo sapiens
  CDR3 for alpha chain variable domain of TCR clone 361221 (TRAV3, TRAJ6)
CAVRDGPRAGGSCIPTF

SEQ ID NO: 722442 - protein, 20 aa, Homo sapiens
  CDR3 for beta chain variable domain of TCR clone 361221 (TRBV28, TRBJ2-1)
CASTPIGRSAGLAGGNEQFC

SEQ ID NO: 722443 - protein, 14 aa, Homo sapiens
  CDR3 for alpha chain variable domain of TCR clone 361222 (TRAV12-2, TRAJ17)
CAALFKAAGNKLTF

SEQ ID NO: 722444 - protein, 14 aa, Homo sapiens
  CDR3 for beta chain variable domain of TCR clone 361222 (TRBV20-1, TRBJ2-7)
CSAPELAGVGEQYF

SEQ ID NO: 722445 - protein, 13 aa, Homo sapiens
  CDR3 for alpha chain variable domain of TCR clone 361223 (TRAV29/DV5, TRAJ29)
CAASAAGNTPLVF

SEQ ID NO: 722446 - protein, 13 aa, Homo sapiens
  CDR3 for beta chain variable domain of TCR clone 361223 (TRBV18, TRBJ1-1)
CASSPETKPEAFF

SEQ ID NO: 722447 - protein, 13 aa, Homo sapiens
  CDR3 for alpha chain variable domain of TCR clone 361224 (TRAV8-2, TRAJ49)
CVVTPNTGNQFYF

SEQ ID NO: 722448 - protein, 18 aa, Homo sapiens
  CDR3 for beta chain variable domain of TCR clone 361224 (TRBV20-1, TRBJ2-5)
CSAKTGTTTNLYQETQYF

SEQ ID NO: 722449 - protein, 16 aa, Homo sapiens
  CDR3 for alpha chain variable domain of TCR clone 361225 (TRAV30, TRAJ24)
CGTEIVDADSWGKFQF

SEQ ID NO: 722450 - protein, 17 aa, Homo sapiens
  CDR3 for beta chain variable domain of TCR clone 361225 (TRBV13, TRBJ2-3)
CASSLSRVAGGRNTLYF

SEQ ID NO: 722451 - protein, 15 aa, Homo sapiens
  CDR3 for alpha chain variable domain of TCR clone 361226 (TRAV17, TRAJ35)
CATAFVVGFGNVLHC

SEQ ID NO: 722452 - protein, 16 aa, Homo sapiens
  CDR3 for beta chain variable domain of TCR clone 361226 (TRBV11-2, TRBJ2-7)
CASSPLAGGPRYEQYF

SEQ ID NO: 722453 - protein, 12 aa, Homo sapiens
  CDR3 for alpha chain variable domain of TCR clone 361227 (TRAV27, TRAJ33)
CAGDGSNYQVIW

SEQ ID NO: 722454 - protein, 15 aa, Homo sapiens
  CDR3 for beta chain variable domain of TCR clone 361227 (TRBV6-5, TRBJ2-7)
CASSYSTSGNYEQYF

SEQ ID NO: 722455 - protein, 13 aa, Homo sapiens
  CDR3 for alpha chain variable domain of TCR clone 361228 (TRAV25, TRAJ54)
CAGNIQGAQKLVF

SEQ ID NO: 722456 - protein, 15 aa, Homo sapiens
  CDR3 for beta chain variable domain of TCR clone 361228 (TRBV19, TRBJ1-5)
CASSILTGENQPQHF

SEQ ID NO: 722457 - protein, 15 aa, Homo sapiens
  CDR3 for alpha chain variable domain of TCR clone 361229 (TRAV3, TRAJ3)
CAVRDGQSSASKIIF

SEQ ID NO: 722458 - protein, 17 aa, Homo sapiens
  CDR3 for beta chain variable domain of TCR clone 361229 (TRBV25-1, TRBJ2-7)
CASSDARVVFSSYEQYF

SEQ ID NO: 722459 - protein, 14 aa, Homo sapiens
  CDR3 for alpha chain variable domain of TCR clone 361230 (TRAV4, TRAJ17)
CLVGDMAAGNKLTF

SEQ ID NO: 722460 - protein, 18 aa, Homo sapiens
  CDR3 for beta chain variable domain of TCR clone 361230 (TRBV12-4, TRBJ2-2)
CASSLVAGTRGRTGELFF

SEQ ID NO: 722461 - protein, 13 aa, Homo sapiens
  CDR3 for alpha chain variable domain of TCR clone 361231 (TRAV8-2, TRAJ21)
CVVSSYNFKKFYF

SEQ ID NO: 722462 - protein, 15 aa, Homo sapiens
  CDR3 for beta chain variable domain of TCR clone 361231 (TRBV18, TRBJ1-1)
CASSDRGTGDTEAFF

SEQ ID NO: 722463 - protein, 15 aa, Homo sapiens
  CDR3 for alpha chain variable domain of TCR clone 361232 (TRAV12-1, TRAJ41)
CAVNGASNSGYALNF

SEQ ID NO: 722464 - protein, 15 aa, Homo sapiens
  CDR3 for beta chain variable domain of TCR clone 361232 (TRBV7-2, TRBJ1-5)
CASSSTGVDNQPQHF

SEQ ID NO: 722465 - protein, 14 aa, Homo sapiens
  CDR3 for alpha chain variable domain of TCR clone 361233 (TRAV21, TRAJ39)
CAMRVNNAGNMLTF

SEQ ID NO: 722466 - protein, 15 aa, Homo sapiens
  CDR3 for beta chain variable domain of TCR clone 361233 (TRBV3-1, TRBJ1-3)
CASSPVGTDRNTIYF

SEQ ID NO: 722467 - protein, 12 aa, Homo sapiens
  CDR3 for alpha chain variable domain of TCR clone 361234 (TRAV12-3, TRAJ17)
CAMTLTGNKLTF

SEQ ID NO: 722468 - protein, 15 aa, Homo sapiens
  CDR3 for beta chain variable domain of TCR clone 361234 (TRBV10-3, TRBJ2-3)
CAISLTSGGTDTQYL

SEQ ID NO: 722469 - protein, 15 aa, Homo sapiens
  CDR3 for alpha chain variable domain of TCR clone 361235 (TRAV12-3, TRAJ23)
CAMSAIGNQGGKLIF

SEQ ID NO: 722470 - protein, 17 aa, Homo sapiens
  CDR3 for beta chain variable domain of TCR clone 361235 (TRBV13, TRBJ2-3)
CASSLSRVAGGRNTQYF

SEQ ID NO: 722471 - protein, 11 aa, Homo sapiens
  CDR3 for alpha chain variable domain of TCR clone 361236 (TRAV1-1, TRAJ23)
CAVRQGGKLIF

SEQ ID NO: 722472 - protein, 20 aa, Homo sapiens
  CDR3 for beta chain variable domain of TCR clone 361236 (TRBV7-8, TRBJ2-2)
CASSHVFPGPTVHITGELFF

SEQ ID NO: 722473 - protein, 16 aa, Homo sapiens
  CDR3 for alpha chain variable domain of TCR clone 361237 (TRAV3, TRAJ37)
CAVRGGGSGNTGKLIF

SEQ ID NO: 722474 - protein, 13 aa, Homo sapiens
  CDR3 for beta chain variable domain of TCR clone 361237 (TRBV14, TRBJ2-7)
CASSQDRRGEQYF

SEQ ID NO: 722475 - protein, 11 aa, Homo sapiens
  CDR3 for alpha chain variable domain of TCR clone 361238 (TRAV35, TRAJ30)
CAGPGDDKIIF

SEQ ID NO: 722476 - protein, 14 aa, Homo sapiens
  CDR3 for beta chain variable domain of TCR clone 361238 (TRBV7-6, TRBJ1-6)
RASSQAGGGSTLHF

SEQ ID NO: 722477 - protein, 14 aa, Homo sapiens
  CDR3 for alpha chain variable domain of TCR clone 361239 (TRAV35, TRAJ22)
CAGLRPGSARQLTF

SEQ ID NO: 722478 - protein, 17 aa, Homo sapiens
  CDR3 for beta chain variable domain of TCR clone 361239 (TRBV10-1, TRBJ2-3)
CASSATSGGLIRSILAQ

SEQ ID NO: 722479 - protein, 16 aa, Homo sapiens
  CDR3 for alpha chain variable domain of TCR clone 361240 (TRAV3, TRAJ3)
CAVRDRAKSSASKIIF

SEQ ID NO: 722480 - protein, 14 aa, Homo sapiens
  CDR3 for beta chain variable domain of TCR clone 361240 (TRBV9, TRBJ2-3)
CASSPLALPDTQYF

SEQ ID NO: 722481 - protein, 14 aa, Homo sapiens
  CDR3 for alpha chain variable domain of TCR clone 361241 (TRAV1-2, TRAJ16)
CAVNRFSDCQKLLF

SEQ ID NO: 722482 - protein, 16 aa, Homo sapiens
  CDR3 for beta chain variable domain of TCR clone 361241 (TRBV20-1, TRBJ2-3)
CSAVRDRGPIADTQYF

SEQ ID NO: 722483 - protein, 14 aa, Homo sapiens
  CDR3 for alpha chain variable domain of TCR clone 361242 (TRAV38-1, TRAJ29)
CAFITPSGNTPLVF

SEQ ID NO: 722484 - protein, 16 aa, Homo sapiens
  CDR3 for beta chain variable domain of TCR clone 361242 (TRBV19, TRBJ2-2)
CASRSPGTGATGELFF

SEQ ID NO: 722485 - protein, 13 aa, Homo sapiens
  CDR3 for alpha chain variable domain of TCR clone 361243 (TRAV6, TRAJ21)
CAGLDTTSTNFTF

SEQ ID NO: 722486 - protein, 19 aa, Homo sapiens
  CDR3 for beta chain variable domain of TCR clone 361243 (TRBV23-1, TRBJ2-3)
TVSLRQQSRLAGVPDTQYF

SEQ ID NO: 722487 - protein, 17 aa, Homo sapiens
  CDR3 for alpha chain variable domain of TCR clone 361244 (TRAV1-1, TRAJ4)
CALYNKLIFGAGTRLAV

SEQ ID NO: 722488 - protein, 16 aa, Homo sapiens
  CDR3 for beta chain variable domain of TCR clone 361244 (TRBV7-3, TRBJ2-2)
CASSLKRGTLSGEPFF

SEQ ID NO: 722489 - protein, 15 aa, Homo sapiens
  CDR3 for alpha chain variable domain of TCR clone 361245 (TRAV8-3, TRAJ15)
CAVGSPNQAGTALIF

SEQ ID NO: 722490 - protein, 14 aa, Homo sapiens
  CDR3 for beta chain variable domain of TCR clone 361245 (TRBV20-1, TRBJ2-1)
CSPDDEASYNEQFF

SEQ ID NO: 722491 - protein, 12 aa, Homo sapiens
  CDR3 for alpha chain variable domain of TCR clone 361246 (TRAV13-1, TRAJ42)
SVLRGSQGNLIF

SEQ ID NO: 722492 - protein, 13 aa, Homo sapiens
  CDR3 for beta chain variable domain of TCR clone 361246 (TRBV2, TRBJ1-4)
CASSELGVEELFF

SEQ ID NO: 722493 - protein, 14 aa, Homo sapiens
  CDR3 for alpha chain variable domain of TCR clone 361247 (TRAV4, TRAJ30)
CLLGDMNRDDKIIF

SEQ ID NO: 722494 - protein, 15 aa, Homo sapiens
  CDR3 for beta chain variable domain of TCR clone 361247 (TRBV7-2, TRBJ2-7)
CASSLSSGRTYEQYF

SEQ ID NO: 722495 - protein, 13 aa, Homo sapiens
  CDR3 for alpha chain variable domain of TCR clone 361248 (TRAV8-4, TRAJ10)
CAAYTGGGNKLTF

SEQ ID NO: 722496 - protein, 15 aa, Homo sapiens
  CDR3 for beta chain variable domain of TCR clone 361248 (TRBV2, TRBJ2-3)
CASSDFEKATDTQYF

SEQ ID NO: 722497 - protein, 13 aa, Homo sapiens
  CDR3 for alpha chain variable domain of TCR clone 361249 (TRAV3, TRAJ20)
CAVRDEPGYKLSF

SEQ ID NO: 722498 - protein, 11 aa, Homo sapiens
  CDR3 for beta chain variable domain of TCR clone 361249 (TRBV12-4, TRBJ2-3)
CASTATDTQYV

SEQ ID NO: 722499 - protein, 14 aa, Homo sapiens
  CDR3 for alpha chain variable domain of TCR clone 361250 (TRAV4, TRAJ23)
CLVGSYNQGGKLIF

SEQ ID NO: 722500 - protein, 19 aa, Homo sapiens
  CDR3 for beta chain variable domain of TCR clone 361250 (TRBV11-3, TRBJ2-2)
CASSTRPGAKTTNTGELFF

SEQ ID NO: 722501 - protein, 13 aa, Homo sapiens
  CDR3 for alpha chain variable domain of TCR clone 361251 (TRAV21, TRAJ15)
CAVANQAATALIF

SEQ ID NO: 722502 - protein, 13 aa, Homo sapiens
  CDR3 for beta chain variable domain of TCR clone 361251 (TRBV11-2, TRBJ2-5)
CASSSTGEETQYF

SEQ ID NO: 722503 - protein, 15 aa, Homo sapiens
  CDR3 for alpha chain variable domain of TCR clone 361252 (TRAV25, TRAJ52)
CAERPGGTSYGELTF

SEQ ID NO: 722504 - protein, 17 aa, Homo sapiens
  CDR3 for beta chain variable domain of TCR clone 361252 (TRBV7-8, TRBJ2-6)
CASSAGTGGAGANVLTL

SEQ ID NO: 722505 - protein, 12 aa, Homo sapiens
  CDR3 for alpha chain variable domain of TCR clone 361253 (TRAV21, TRAJ39)
CAADNAGNILTF

SEQ ID NO: 722506 - protein, 15 aa, Homo sapiens
  CDR3 for beta chain variable domain of TCR clone 361253 (TRBV27, TRBJ2-1)
CASSNGGGSSNEQFF

SEQ ID NO: 722507 - protein, 15 aa, Homo sapiens
  CDR3 for alpha chain variable domain of TCR clone 361254 (TRAV34, TRAJ38)
CGADFTPGNNRKLSC

SEQ ID NO: 722508 - protein, 16 aa, Homo sapiens
  CDR3 for beta chain variable domain of TCR clone 361254 (TRBV12-5, TRBJ2-5)
CASGPRTSGNQETQYF

SEQ ID NO: 722509 - protein, 10 aa, Homo sapiens
  CDR3 for alpha chain variable domain of TCR clone 361255 (TRAV8-1, TRAJ21)
CAVNGTKFYF

SEQ ID NO: 722510 - protein, 17 aa, Homo sapiens
  CDR3 for beta chain variable domain of TCR clone 361255 (TRBV7-8, TRBJ2-6)
CASSAGTGGAGANVLTF

SEQ ID NO: 722511 - protein, 12 aa, Homo sapiens
  CDR3 for alpha chain variable domain of TCR clone 361256 (TRAV13-2, TRAJ41)
CAKNKGRYALNF

SEQ ID NO: 722512 - protein, 12 aa, Homo sapiens
  CDR3 for beta chain variable domain of TCR clone 361256 (TRBV7-9, TRBJ1-1)
CASSLSGGVAFF

SEQ ID NO: 722513 - protein, 12 aa, Homo sapiens
  CDR3 for alpha chain variable domain of TCR clone 361257 (TRAV3, TRAJ26)
CAVRDYGQNFVF

SEQ ID NO: 722514 - protein, 15 aa, Homo sapiens
  CDR3 for beta chain variable domain of TCR clone 361257 (TRBV7-7, TRBJ2-5)
CASSQLERAEETQYF

SEQ ID NO: 722515 - protein, 13 aa, Homo sapiens
  CDR3 for alpha chain variable domain of TCR clone 361258 (TRAV36/DV7, TRAJ54)
CAVCTQGAQKLVF

SEQ ID NO: 722516 - protein, 15 aa, Homo sapiens
  CDR3 for beta chain variable domain of TCR clone 361258 (TRBV12-4, TRBJ2-1)
CASSPLSGRNNEQFF

SEQ ID NO: 722517 - protein, 14 aa, Homo sapiens
  CDR3 for alpha chain variable domain of TCR clone 361259 (TRAV4, TRAJ17)
CLEGDMAAGNKLTF

SEQ ID NO: 722518 - protein, 14 aa, Homo sapiens
  CDR3 for beta chain variable domain of TCR clone 361259 (TRBV4-1, TRBJ2-7)
CASSPVAGGDEQYF

SEQ ID NO: 722519 - protein, 15 aa, Homo sapiens
  CDR3 for alpha chain variable domain of TCR clone 361260 (TRAV36/DV7, )
CALTDIQNPDPAVYQ

SEQ ID NO: 722520 - protein, 13 aa, Homo sapiens
  CDR3 for beta chain variable domain of TCR clone 361260 (TRBV4-1, TRBJ2-7)
CASSQGQAYEQYF

SEQ ID NO: 722521 - protein, 14 aa, Homo sapiens
  CDR3 for alpha chain variable domain of TCR clone 361261 (TRAV1-2, TRAJ16)
CAVNRFSDGQKLLF

SEQ ID NO: 722522 - protein, 15 aa, Homo sapiens
  CDR3 for beta chain variable domain of TCR clone 361261 (TRBV11-3, TRBJ2-3)
CASLKDGREWDTQYF

SEQ ID NO: 722523 - protein, 13 aa, Homo sapiens
  CDR3 for alpha chain variable domain of TCR clone 361262 (TRAV38-1, TRAJ42)
CARWGGSQGNPIF

SEQ ID NO: 722524 - protein, 13 aa, Homo sapiens
  CDR3 for beta chain variable domain of TCR clone 361262 (TRBV12-4, TRBJ1-5)
CASSPDRAQPQHF

SEQ ID NO: 722525 - protein, 17 aa, Homo sapiens
  CDR3 for alpha chain variable domain of TCR clone 361263 (TRAV3, )
CAISRTLTLPCTSGETL

SEQ ID NO: 722526 - protein, 15 aa, Homo sapiens
  CDR3 for beta chain variable domain of TCR clone 361263 (TRBV19, TRBJ1-5)
CASSDSGPRNQPQHF

SEQ ID NO: 722527 - protein, 10 aa, Homo sapiens
  CDR3 for alpha chain variable domain of TCR clone 361264 (TRAV23/DV6, TRAJ57)
CAASSTLSQG

SEQ ID NO: 722528 - protein, 16 aa, Homo sapiens
  CDR3 for beta chain variable domain of TCR clone 361264 (TRBV25-1, TRBJ1-1)
CASTHLGGNTEASLDK

SEQ ID NO: 722529 - protein, 16 aa, Homo sapiens
  CDR3 for alpha chain variable domain of TCR clone 361265 (TRAV26-1, TRAJ38)
CIVRVELGGNNRKLIW

SEQ ID NO: 722530 - protein, 14 aa, Homo sapiens
  CDR3 for beta chain variable domain of TCR clone 361265 (TRBV5-1, TRBJ2-3)
CASSTGLAADTQYF

SEQ ID NO: 722531 - protein, 11 aa, Homo sapiens
  CDR3 for alpha chain variable domain of TCR clone 361266 (TRAV2, TRAJ23)
CAVETRGQLIF

SEQ ID NO: 722532 - protein, 14 aa, Homo sapiens
  CDR3 for beta chain variable domain of TCR clone 361266 (TRBV2, TRBJ2-3)
CASSEGQNTDTQYF

SEQ ID NO: 722533 - protein, 13 aa, Homo sapiens
  CDR3 for alpha chain variable domain of TCR clone 361267 (TRAV8-6, TRAJ49)
CAVITNAGNQFYF

SEQ ID NO: 722534 - protein, 13 aa, Homo sapiens
  CDR3 for beta chain variable domain of TCR clone 361267 (TRBV7-2, TRBJ2-2)
CASSLAVTGELFF

SEQ ID NO: 722535 - protein, 13 aa, Homo sapiens
  CDR3 for alpha chain variable domain of TCR clone 361268 (TRAV3, TRAJ15)
CAVRDQAGTALIF

SEQ ID NO: 722536 - protein, 14 aa, Homo sapiens
  CDR3 for beta chain variable domain of TCR clone 361268 (TRBV7-3, TRBJ1-1)
CASSLKGGNTEAFF

SEQ ID NO: 722537 - protein, 14 aa, Homo sapiens
  CDR3 for alpha chain variable domain of TCR clone 361269 (TRAV8-6, TRAJ54)
CAVTEGRGAQKLVF

SEQ ID NO: 722538 - protein, 14 aa, Homo sapiens
  CDR3 for beta chain variable domain of TCR clone 361269 (TRBV27, TRBJ2-7)
CASSIGQGAQRQYL

SEQ ID NO: 722539 - protein, 12 aa, Homo sapiens
  CDR3 for alpha chain variable domain of TCR clone 361270 (TRAV16, TRAJ9)
CALSSGGFKTIF

SEQ ID NO: 722540 - protein, 12 aa, Homo sapiens
  CDR3 for beta chain variable domain of TCR clone 361270 (TRBV7-3, TRBJ2-7)
CQQPSRGYEQYF

SEQ ID NO: 722541 - protein, 14 aa, Homo sapiens
  CDR3 for alpha chain variable domain of TCR clone 361271 (TRAV2, TRAJ9)
CAVEDRSGGFKTIF

SEQ ID NO: 722542 - protein, 13 aa, Homo sapiens
  CDR3 for beta chain variable domain of TCR clone 361271 (TRBV7-9, TRBJ1-2)
CASSLKQYYGYTF

SEQ ID NO: 722543 - protein, 15 aa, Homo sapiens
  CDR3 for alpha chain variable domain of TCR clone 361272 (TRAV8-3, TRAJ15)
CAVGAPNQAGTALIF

SEQ ID NO: 722544 - protein, 14 aa, Homo sapiens
  CDR3 for beta chain variable domain of TCR clone 361272 (TRBV20-1, TRBJ2-1)
CSPNDEASNNEQSF

SEQ ID NO: 722545 - protein, 13 aa, Homo sapiens
  CDR3 for alpha chain variable domain of TCR clone 361273 (TRAV23/DV6, TRAJ47)
CAASMTRGNKLVF

SEQ ID NO: 722546 - protein, 14 aa, Homo sapiens
  CDR3 for beta chain variable domain of TCR clone 361273 (TRBV7-3, TRBJ1-1)
CASILKGGNTEAFF

SEQ ID NO: 722547 - protein, 14 aa, Homo sapiens
  CDR3 for alpha chain variable domain of TCR clone 361274 (TRAV12-2, TRAJ40)
CAGKIPSGTYKYIF

SEQ ID NO: 722548 - protein, 14 aa, Homo sapiens
  CDR3 for beta chain variable domain of TCR clone 361274 (TRBV20-1, TRBJ1-1)
CSAQTRIWGTEAFF

SEQ ID NO: 722549 - protein, 12 aa, Homo sapiens
  CDR3 for alpha chain variable domain of TCR clone 361275 (TRAV21, TRAJ37)
CAVRGNTGKLIF

SEQ ID NO: 722550 - protein, 14 aa, Homo sapiens
  CDR3 for beta chain variable domain of TCR clone 361275 (TRBV19, TRBJ2-1)
CASEVTGARYEQFF

SEQ ID NO: 722551 - protein, 15 aa, Homo sapiens
  CDR3 for alpha chain variable domain of TCR clone 361276 (TRAV12-3, TRAJ6)
CAMSATTGGSYIPTF

SEQ ID NO: 722552 - protein, 15 aa, Homo sapiens
  CDR3 for beta chain variable domain of TCR clone 361276 (TRBV2, TRBJ2-3)
CASSDFEKATDTQYF

SEQ ID NO: 722553 - protein, 12 aa, Homo sapiens
  CDR3 for alpha chain variable domain of TCR clone 361277 (TRAV2, TRAJ10)
CASTGGGNKPTF

SEQ ID NO: 722554 - protein, 14 aa, Homo sapiens
  CDR3 for beta chain variable domain of TCR clone 361277 (TRBV7-2, TRBJ2-2)
CAGRGQGAAGELFF

SEQ ID NO: 722555 - protein, 10 aa, Homo sapiens
  CDR3 for alpha chain variable domain of TCR clone 361278 (TRAV17, TRAJ36)
CTTVAGNLFF

SEQ ID NO: 722556 - protein, 12 aa, Homo sapiens
  CDR3 for beta chain variable domain of TCR clone 361278 (TRBV11-2, TRBJ2-4)
CASSSASGSEYF

SEQ ID NO: 722557 - protein, 11 aa, Homo sapiens
  CDR3 for alpha chain variable domain of TCR clone 361279 (TRAV1-1, TRAJ23)
CAVRQGGKLIF

SEQ ID NO: 722558 - protein, 15 aa, Homo sapiens
  CDR3 for beta chain variable domain of TCR clone 361279 (TRBV20-1, TRBJ2-4)
CSVTTGLLAKNIQYF

SEQ ID NO: 722559 - protein, 13 aa, Homo sapiens
  CDR3 for alpha chain variable domain of TCR clone 361280 (TRAV38-1, TRAJ42)
CARCGGSQGNLIF

SEQ ID NO: 722560 - protein, 10 aa, Homo sapiens
  CDR3 for beta chain variable domain of TCR clone 361280 (TRBV2, TRBJ2-5)
CASSAATQYF

SEQ ID NO: 722561 - protein, 15 aa, Homo sapiens
  CDR3 for alpha chain variable domain of TCR clone 361281 (TRAV3, TRAJ29)
CAVRGLYSGNTPLVF

SEQ ID NO: 722562 - protein, 17 aa, Homo sapiens
  CDR3 for beta chain variable domain of TCR clone 361281 (TRBV20-1, TRBJ2-1)
CSARAPLAGVWDNEQFF

SEQ ID NO: 722563 - protein, 13 aa, Homo sapiens
  CDR3 for alpha chain variable domain of TCR clone 361282 (TRAV17, TRAJ26)
CATVDNYGQNFVF

SEQ ID NO: 722564 - protein, 16 aa, Homo sapiens
  CDR3 for beta chain variable domain of TCR clone 361282 (TRBV7-3, TRBJ2-1)
CASSLEGYRSYNEQFF

SEQ ID NO: 722565 - protein, 14 aa, Homo sapiens
  CDR3 for alpha chain variable domain of TCR clone 361283 (TRAV1-2, TRAJ16)
CAVNRFSDGQKLLF

SEQ ID NO: 722566 - protein, 13 aa, Homo sapiens
  CDR3 for beta chain variable domain of TCR clone 361283 (TRBV4-1, TRBJ2-1)
CTSSQAGGDEQFF

SEQ ID NO: 722567 - protein, 14 aa, Homo sapiens
  CDR3 for alpha chain variable domain of TCR clone 361284 (TRAV17, TRAJ16)
CATADFSDGQKLLF

SEQ ID NO: 722568 - protein, 15 aa, Homo sapiens
  CDR3 for beta chain variable domain of TCR clone 361284 (TRBV6-5, TRBJ2-1)
RASSYDAGAGNEQFF

SEQ ID NO: 722569 - protein, 14 aa, Homo sapiens
  CDR3 for alpha chain variable domain of TCR clone 361285 (TRAV12-2, TRAJ44)
CAVNPAGTAHKLTF

SEQ ID NO: 722570 - protein, 13 aa, Homo sapiens
  CDR3 for beta chain variable domain of TCR clone 361285 (TRBV20-1, TRBJ1-6)
CSAPLGVGSPLHF

SEQ ID NO: 722571 - protein, 17 aa, Homo sapiens
  CDR3 for alpha chain variable domain of TCR clone 361286 (TRAV17, TRAJ52)
CATDRNAGGTSYGKLTF

SEQ ID NO: 722572 - protein, 14 aa, Homo sapiens
  CDR3 for beta chain variable domain of TCR clone 361286 (TRBV25-1, TRBJ1-1)
CASTHLGGNTEAFF

SEQ ID NO: 722573 - protein, 14 aa, Homo sapiens
  CDR3 for alpha chain variable domain of TCR clone 361287 (TRAV12-2, TRAJ4)
CAEDLSGGNNKLIF

SEQ ID NO: 722574 - protein, 13 aa, Homo sapiens
  CDR3 for beta chain variable domain of TCR clone 361287 (TRBV7-9, TRBJ1-2)
CASSLKQNYGYTF

SEQ ID NO: 722575 - protein, 14 aa, Homo sapiens
  CDR3 for alpha chain variable domain of TCR clone 361288 (TRAV29/DV5, TRAJ45)
CAASEGGGAAGLTF

SEQ ID NO: 722576 - protein, 15 aa, Homo sapiens
  CDR3 for beta chain variable domain of TCR clone 361288 (TRBV12-4, TRBJ1-5)
CASTQGTGPLQPQHF

SEQ ID NO: 722577 - protein, 11 aa, Homo sapiens
  CDR3 for alpha chain variable domain of TCR clone 361289 (TRAV21, TRAJ23)
CAPQRRGKLIF

SEQ ID NO: 722578 - protein, 20 aa, Homo sapiens
  CDR3 for beta chain variable domain of TCR clone 361289 (TRBV28, TRBJ2-1)
CASTPIGRSPGLAGGNEQFF

SEQ ID NO: 722579 - protein, 13 aa, Homo sapiens
  CDR3 for alpha chain variable domain of TCR clone 361290 (TRAV1-1, TRAJ23)
CAVVANQQESLSS

SEQ ID NO: 722580 - protein, 16 aa, Homo sapiens
  CDR3 for beta chain variable domain of TCR clone 361290 (TRBV5-5, TRBJ1-2)
CASSPTWGRGLYGYTF

SEQ ID NO: 722581 - protein, 14 aa, Homo sapiens
  CDR3 for alpha chain variable domain of TCR clone 361291 (TRAV13-1, TRAJ40)
CAASMTSGTYHYIF

SEQ ID NO: 722582 - protein, 15 aa, Homo sapiens
  CDR3 for beta chain variable domain of TCR clone 361291 (TRBV7-3, TRBJ2-1)
CASSPTGGGEVEQFF

SEQ ID NO: 722583 - protein, 14 aa, Homo sapiens
  CDR3 for alpha chain variable domain of TCR clone 361292 (TRAV12-3, TRAJ10)
SHLPLTGGGNKLTF

SEQ ID NO: 722584 - protein, 14 aa, Homo sapiens
  CDR3 for beta chain variable domain of TCR clone 361292 (TRBV19, TRBJ2-7)
CASSMGQGASEQYF

SEQ ID NO: 722585 - protein, 13 aa, Homo sapiens
  CDR3 for alpha chain variable domain of TCR clone 361293 (TRAV21, TRAJ42)
CAVGGGSQGHLIF

SEQ ID NO: 722586 - protein, 15 aa, Homo sapiens
  CDR3 for beta chain variable domain of TCR clone 361293 (TRBV20-1, TRBJ2-7)
CSARDRVSGMDEQYF

SEQ ID NO: 722587 - protein, 17 aa, Homo sapiens
  CDR3 for alpha chain variable domain of TCR clone 361294 (TRAV23/DV6, TRAJ57)
CAASSTLSQGGSEKLVF

SEQ ID NO: 722588 - protein, 14 aa, Homo sapiens
  CDR3 for beta chain variable domain of TCR clone 361294 (TRBV25-1, TRBJ1-1)
CVSTHLAGNTEAFF

SEQ ID NO: 722589 - protein, 13 aa, Homo sapiens
  CDR3 for alpha chain variable domain of TCR clone 361295 (TRAV41, TRAJ48)
SVPVNFGNEKLTF

SEQ ID NO: 722590 - protein, 15 aa, Homo sapiens
  CDR3 for beta chain variable domain of TCR clone 361295 (TRBV3-1, TRBJ2-1)
CASSQDYTPRGEQFF

SEQ ID NO: 722591 - protein, 11 aa, Homo sapiens
  CDR3 for alpha chain variable domain of TCR clone 361296 (TRAV1-2, TRAJ11)
CAVRGSSTLTF

SEQ ID NO: 722592 - protein, 15 aa, Homo sapiens
  CDR3 for beta chain variable domain of TCR clone 361296 (TRBV3-1, TRBJ2-2)
CASSQDWTRAGELFF

SEQ ID NO: 722593 - protein, 15 aa, Homo sapiens
  CDR3 for alpha chain variable domain of TCR clone 361297 (TRAV12-2, TRAJ53)
CAVDGGGGSNYKLTF

SEQ ID NO: 722594 - protein, 15 aa, Homo sapiens
  CDR3 for beta chain variable domain of TCR clone 361297 (TRBV6-3, TRBJ2-7)
CASSSPGTVIYEQYF

SEQ ID NO: 722595 - protein, 17 aa, Homo sapiens
  CDR3 for alpha chain variable domain of TCR clone 361298 (TRAV16, TRAJ58)
CITVLSHGETSGSRLTF

SEQ ID NO: 722596 - protein, 17 aa, Homo sapiens
  CDR3 for beta chain variable domain of TCR clone 361298 (TRBV18, TRBJ2-1)
CASSKGLSGGADNKQFF

SEQ ID NO: 722597 - protein, 15 aa, Homo sapiens
  CDR3 for alpha chain variable domain of TCR clone 361299 (TRAV12-2, TRAJ13)
CRESLGSGGYQKVTF

SEQ ID NO: 722598 - protein, 15 aa, Homo sapiens
  CDR3 for beta chain variable domain of TCR clone 361299 (TRBV6-5, TRBJ2-1)
CASRRAQLSYNEQFV

SEQ ID NO: 722599 - protein, 13 aa, Homo sapiens
  CDR3 for alpha chain variable domain of TCR clone 361300 (TRAV21, TRAJ27)
CAASPGNAGKSTF

SEQ ID NO: 722600 - protein, 15 aa, Homo sapiens
  CDR3 for beta chain variable domain of TCR clone 361300 (TRBV11-3, TRBJ2-7)
CASSPGPASSYEQYF

SEQ ID NO: 722601 - protein, 16 aa, Homo sapiens
  CDR3 for alpha chain variable domain of TCR clone 361301 (TRAV30, TRAJ24)
CGTEIVDADSWGNSSL

SEQ ID NO: 722602 - protein, 13 aa, Homo sapiens
  CDR3 for beta chain variable domain of TCR clone 361301 (TRBV20-1, TRBJ1-1)
CSAPPGGHTEAFF

SEQ ID NO: 722603 - protein, 14 aa, Homo sapiens
  CDR3 for alpha chain variable domain of TCR clone 361302 (TRAV12-3, TRAJ22)
CAMSLFGSARQLTF

SEQ ID NO: 722604 - protein, 15 aa, Homo sapiens
  CDR3 for beta chain variable domain of TCR clone 361302 (TRBV11-1, TRBJ2-7)
CASSLNYGASYEQYF

SEQ ID NO: 722605 - protein, 14 aa, Homo sapiens
  CDR3 for alpha chain variable domain of TCR clone 361303 (TRAV38-1, TRAJ45)
CASHSGGGADGLTF

SEQ ID NO: 722606 - protein, 14 aa, Homo sapiens
  CDR3 for beta chain variable domain of TCR clone 361303 (TRBV25-1, TRBJ1-1)
CASTHLGGNTEAFF

SEQ ID NO: 722607 - protein, 14 aa, Homo sapiens
  CDR3 for alpha chain variable domain of TCR clone 361304 (TRAV8-3, TRAJ4)
CAVGATGGYNKLIF

SEQ ID NO: 722608 - protein, 12 aa, Homo sapiens
  CDR3 for beta chain variable domain of TCR clone 361304 (TRBV19, TRBJ2-1)
CASSQISNEQFF

SEQ ID NO: 722609 - protein, 11 aa, Homo sapiens
  CDR3 for alpha chain variable domain of TCR clone 361305 (TRAV12-3, TRAJ49)
CAANTGNQFYF

SEQ ID NO: 722610 - protein, 15 aa, Homo sapiens
  CDR3 for beta chain variable domain of TCR clone 361305 (TRBV11-2, TRBJ2-1)
CARSLGTSGLNEQFF

SEQ ID NO: 722611 - protein, 14 aa, Homo sapiens
  CDR3 for alpha chain variable domain of TCR clone 361306 (TRAV35, TRAJ50)
CAGHLKTSYDKVIF

SEQ ID NO: 722612 - protein, 13 aa, Homo sapiens
  CDR3 for beta chain variable domain of TCR clone 361306 (TRBV7-7, TRBJ2-3)
CASSLSRADTQDF

SEQ ID NO: 722613 - protein, 17 aa, Homo sapiens
  CDR3 for alpha chain variable domain of TCR clone 361307 (TRAV29/DV5, TRAJ52)
CAATSTADGTSYGKLTF

SEQ ID NO: 722614 - protein, 15 aa, Homo sapiens
  CDR3 for beta chain variable domain of TCR clone 361307 (TRBV6-1, TRBJ2-3)
CASSERGGITDTQYF

SEQ ID NO: 722615 - protein, 16 aa, Homo sapiens
  CDR3 for alpha chain variable domain of TCR clone 361308 (TRAV12-3, TRAJ53)
CAMGPGSGGSNYKLTF

SEQ ID NO: 722616 - protein, 16 aa, Homo sapiens
  CDR3 for beta chain variable domain of TCR clone 361308 (TRBV4-2, TRBJ1-1)
CASSQAGFGMNTEAFC

SEQ ID NO: 722617 - protein, 14 aa, Homo sapiens
  CDR3 for alpha chain variable domain of TCR clone 361309 (TRAV17, TRAJ40)
CATALTSGTYKYIF

SEQ ID NO: 722618 - protein, 15 aa, Homo sapiens
  CDR3 for beta chain variable domain of TCR clone 361309 (TRBV7-3, TRBJ2-1)
CASSLAGAGADEQFF

SEQ ID NO: 722619 - protein, 14 aa, Homo sapiens
  CDR3 for alpha chain variable domain of TCR clone 361310 (TRAV1-2, TRAJ16)
CAVNRFSDGQKLLF

SEQ ID NO: 722620 - protein, 14 aa, Homo sapiens
  CDR3 for beta chain variable domain of TCR clone 361310 (TRBV2, TRBJ1-5)
CASSENRGGQPQHF

SEQ ID NO: 722621 - protein, 12 aa, Homo sapiens
  CDR3 for alpha chain variable domain of TCR clone 361311 (TRAV8-3, TRAJ41)
CAVGAWGYALNF

SEQ ID NO: 722622 - protein, 16 aa, Homo sapiens
  CDR3 for beta chain variable domain of TCR clone 361311 (TRBV7-6, TRBJ2-3)
CASSDSRGEGTDTQYF

SEQ ID NO: 722623 - protein, 13 aa, Homo sapiens
  CDR3 for alpha chain variable domain of TCR clone 361312 (TRAV8-3, TRAJ37)
CAVPSSNTGQLIF

SEQ ID NO: 722624 - protein, 14 aa, Homo sapiens
  CDR3 for beta chain variable domain of TCR clone 361312 (TRBV19, TRBJ2-1)
CASPTFVLSGEQFF

SEQ ID NO: 722625 - protein, 10 aa, Homo sapiens
  CDR3 for alpha chain variable domain of TCR clone 361313 (TRAV21, TRAJ43)
CAVRIGDMRF

SEQ ID NO: 722626 - protein, 15 aa, Homo sapiens
  CDR3 for beta chain variable domain of TCR clone 361313 (TRBV7-2, TRBJ1-2)
CASSPRAGWNYGYTF

SEQ ID NO: 722627 - protein, 16 aa, Homo sapiens
  CDR3 for alpha chain variable domain of TCR clone 361314 (TRAV1-2, TRAJ10)
CAVGGVLTGGGNKPTF

SEQ ID NO: 722628 - protein, 12 aa, Homo sapiens
  CDR3 for beta chain variable domain of TCR clone 361314 (TRBV7-8, TRBJ2-7)
CASSLGDREQYF

SEQ ID NO: 722629 - protein, 12 aa, Homo sapiens
  CDR3 for alpha chain variable domain of TCR clone 361315 (TRAV23/DV6, TRAJ30)
CAASKGDDKIIF

SEQ ID NO: 722630 - protein, 14 aa, Homo sapiens
  CDR3 for beta chain variable domain of TCR clone 361315 (TRBV6-1, TRBJ1-3)
CASVQGGGGNTIYF

SEQ ID NO: 722631 - protein, 16 aa, Homo sapiens
  CDR3 for alpha chain variable domain of TCR clone 361316 (TRAV20, TRAJ10)
CAVRFFLTGGGNKLTF

SEQ ID NO: 722632 - protein, 15 aa, Homo sapiens
  CDR3 for beta chain variable domain of TCR clone 361316 (TRBV7-8, TRBJ1-1)
CASSLSSGFDTEAFF

SEQ ID NO: 722633 - protein, 13 aa, Homo sapiens
  CDR3 for alpha chain variable domain of TCR clone 361317 (TRAV2, TRAJ9)
CAVVETGGFKTIF

SEQ ID NO: 722634 - protein, 12 aa, Homo sapiens
  CDR3 for beta chain variable domain of TCR clone 361317 (TRBV11-2, TRBJ2-2)
CASSLGGGELFF

SEQ ID NO: 722635 - protein, 13 aa, Homo sapiens
  CDR3 for alpha chain variable domain of TCR clone 361318 (TRAV27, TRAJ16)
CAGACSDGQRLLF

SEQ ID NO: 722636 - protein, 14 aa, Homo sapiens
  CDR3 for beta chain variable domain of TCR clone 361318 (TRBV27, TRBJ1-1)
CASSLAGLNTEAFF

SEQ ID NO: 722637 - protein, 14 aa, Homo sapiens
  CDR3 for alpha chain variable domain of TCR clone 361319 (TRAV12-3, TRAJ10)
SHLPLTGGGNKLTF

SEQ ID NO: 722638 - protein, 15 aa, Homo sapiens
  CDR3 for beta chain variable domain of TCR clone 361319 (TRBV10-2, TRBJ2-6)
CASSEQGTGADVLTF

SEQ ID NO: 722639 - protein, 11 aa, Homo sapiens
  CDR3 for alpha chain variable domain of TCR clone 361320 (TRAV12-2, TRAJ49)
CAVDTGNQFYF

SEQ ID NO: 722640 - protein, 17 aa, Homo sapiens
  CDR3 for beta chain variable domain of TCR clone 361320 (TRBV7-8, TRBJ2-6)
CASSAGTGGAGANVLTF

SEQ ID NO: 722641 - protein, 12 aa, Homo sapiens
  CDR3 for alpha chain variable domain of TCR clone 361321 (TRAV12-3, TRAJ17)
CAMTLTGNKLTF

SEQ ID NO: 722642 - protein, 15 aa, Homo sapiens
  CDR3 for beta chain variable domain of TCR clone 361321 (TRBV20-1, TRBJ2-7)
CSARDRVTGMDEQYS

SEQ ID NO: 722643 - protein, 13 aa, Homo sapiens
  CDR3 for alpha chain variable domain of TCR clone 361322 (TRAV6, TRAJ4)
CAILRGGYNKLIF

SEQ ID NO: 722644 - protein, 16 aa, Homo sapiens
  CDR3 for beta chain variable domain of TCR clone 361322 (TRBV5-1, TRBJ2-1)
CASSIRSGGSYNEQFF

SEQ ID NO: 722645 - protein, 15 aa, Homo sapiens
  CDR3 for alpha chain variable domain of TCR clone 361323 (TRAV3, TRAJ5)
CAVRDLDTGRRALTF

SEQ ID NO: 722646 - protein, 17 aa, Homo sapiens
  CDR3 for beta chain variable domain of TCR clone 361323 (TRBV5-4, TRBJ2-1)
CASSSAGGRGPYNEQFF

SEQ ID NO: 722647 - protein, 13 aa, Homo sapiens
  CDR3 for alpha chain variable domain of TCR clone 361324 (TRAV1-1, TRAJ15)
CAVVDQAGTDLFF

SEQ ID NO: 722648 - protein, 14 aa, Homo sapiens
  CDR3 for beta chain variable domain of TCR clone 361324 (TRBV5-4, TRBJ1-6)
CASSLWSDNSPLHF

SEQ ID NO: 722649 - protein, 15 aa, Homo sapiens
  CDR3 for alpha chain variable domain of TCR clone 361325 (TRAV2, TRAJ20)
CAVDLRGSNDYKLSL

SEQ ID NO: 722650 - protein, 12 aa, Homo sapiens
  CDR3 for beta chain variable domain of TCR clone 361325 (TRBV19, TRBJ2-3)
CASSIGGQAPYF

SEQ ID NO: 722651 - protein, 16 aa, Homo sapiens
  CDR3 for alpha chain variable domain of TCR clone 361326 (TRAV23/DV6, TRAJ9)
CSASIGGNTGGFKTIF

SEQ ID NO: 722652 - protein, 15 aa, Homo sapiens
  CDR3 for beta chain variable domain of TCR clone 361326 (TRBV11-3, TRBJ2-2)
CASSYFSTGTGELFF

SEQ ID NO: 722653 - protein, 15 aa, Homo sapiens
  CDR3 for alpha chain variable domain of TCR clone 361327 (TRAV1-2, TRAJ45)
CAVRDSGGGADGRTF

SEQ ID NO: 722654 - protein, 13 aa, Homo sapiens
  CDR3 for beta chain variable domain of TCR clone 361327 (TRBV5-1, TRBJ2-1)
CASRPFGYNEQFF

SEQ ID NO: 722655 - protein, 14 aa, Homo sapiens
  CDR3 for alpha chain variable domain of TCR clone 361328 (TRAV1-2, TRAJ16)
CAVNRFSDGQKLLF

SEQ ID NO: 722656 - protein, 14 aa, Homo sapiens
  CDR3 for beta chain variable domain of TCR clone 361328 (TRBV4-1, TRBJ2-2)
CASSQAVNTGELVF

SEQ ID NO: 722657 - protein, 14 aa, Homo sapiens
  CDR3 for alpha chain variable domain of TCR clone 361329 (TRAV12-2, TRAJ40)
CAVKITSGTYKYIF

SEQ ID NO: 722658 - protein, 14 aa, Homo sapiens
  CDR3 for beta chain variable domain of TCR clone 361329 (TRBV20-1, TRBJ1-1)
CSAQARIGGTEAFF

SEQ ID NO: 722659 - protein, 14 aa, Homo sapiens
  CDR3 for alpha chain variable domain of TCR clone 361330 (TRAV35, TRAJ27)
CAGHSNTNVGKSTF

SEQ ID NO: 722660 - protein, 13 aa, Homo sapiens
  CDR3 for beta chain variable domain of TCR clone 361330 (TRBV13, TRBJ2-1)
CASILGGRGEQFF

SEQ ID NO: 722661 - protein, 13 aa, Homo sapiens
  CDR3 for alpha chain variable domain of TCR clone 361331 (TRAV29/DV5, TRAJ47)
CAASAEYGNKLAF

SEQ ID NO: 722662 - protein, 13 aa, Homo sapiens
  CDR3 for beta chain variable domain of TCR clone 361331 (TRBV27, TRBJ1-4)
CASSLMGDEKLFF

SEQ ID NO: 722663 - protein, 14 aa, Homo sapiens
  CDR3 for alpha chain variable domain of TCR clone 361332 (TRAV13-1, TRAJ52)
CAAAGGTSYGKLTF

SEQ ID NO: 722664 - protein, 17 aa, Homo sapiens
  CDR3 for beta chain variable domain of TCR clone 361332 (TRBV19, TRBJ1-1)
CASSKSVTGGPYTEAFF

SEQ ID NO: 722665 - protein, 17 aa, Homo sapiens
  CDR3 for alpha chain variable domain of TCR clone 361333 (TRAV3, TRAJ6)
CAVRDGTRAGGSYIPTF

SEQ ID NO: 722666 - protein, 20 aa, Homo sapiens
  CDR3 for beta chain variable domain of TCR clone 361333 (TRBV28, TRBJ2-1)
CASTPIGRSPGLAGGSEQFF

SEQ ID NO: 722667 - protein, 12 aa, Homo sapiens
  CDR3 for alpha chain variable domain of TCR clone 361334 (TRAV17, TRAJ49)
CATASTGNQFYF

SEQ ID NO: 722668 - protein, 14 aa, Homo sapiens
  CDR3 for beta chain variable domain of TCR clone 361334 (TRBV11-2, TRBJ1-5)
CASSLDRGRQPQHF

SEQ ID NO: 722669 - protein, 15 aa, Homo sapiens
  CDR3 for alpha chain variable domain of TCR clone 361335 (TRAV12-1, TRAJ44)
CVADLPTGTASKLPF

SEQ ID NO: 722670 - protein, 13 aa, Homo sapiens
  CDR3 for beta chain variable domain of TCR clone 361335 (TRBV6-5, TRBJ2-5)
CASRPQGGETQYF

SEQ ID NO: 722671 - protein, 16 aa, Homo sapiens
  CDR3 for alpha chain variable domain of TCR clone 361336 (TRAV25, TRAJ24)
CAQRRGTTDSWGKLQF

SEQ ID NO: 722672 - protein, 12 aa, Homo sapiens
  CDR3 for beta chain variable domain of TCR clone 361336 (TRBV6-3, TRBJ2-7)
CASSEPGFEQYF

SEQ ID NO: 722673 - protein, 12 aa, Homo sapiens
  CDR3 for alpha chain variable domain of TCR clone 361337 (TRAV17, TRAJ53)
CATEGSNYKLTF

SEQ ID NO: 722674 - protein, 13 aa, Homo sapiens
  CDR3 for beta chain variable domain of TCR clone 361337 (TRBV7-9, TRBJ1-2)
CASSLKQNYGYTF

SEQ ID NO: 722675 - protein, 18 aa, Homo sapiens
  CDR3 for alpha chain variable domain of TCR clone 361338 (TRAV26-2, TRAJ45)
CILRLWGYSGGGADGLTF

SEQ ID NO: 722676 - protein, 17 aa, Homo sapiens
  CDR3 for beta chain variable domain of TCR clone 361338 (TRBV28, TRBJ2-3)
CASSPTPAGGRVDTQYI

SEQ ID NO: 722677 - protein, 16 aa, Homo sapiens
  CDR3 for alpha chain variable domain of TCR clone 361339 (TRAV21, TRAJ37)
CAVRTAGSSNTVKLIF

SEQ ID NO: 722678 - protein, 16 aa, Homo sapiens
  CDR3 for beta chain variable domain of TCR clone 361339 (TRBV7-2, TRBJ2-5)
CASSSKWLSGQETQYF

SEQ ID NO: 722679 - protein, 11 aa, Homo sapiens
  CDR3 for alpha chain variable domain of TCR clone 361340 (TRAV13-2, TRAJ54)
RAVQGAQKLVF

SEQ ID NO: 722680 - protein, 16 aa, Homo sapiens
  CDR3 for beta chain variable domain of TCR clone 361340 (TRBV13, TRBJ2-2)
CASSPRTGEHTGELFF

SEQ ID NO: 722681 - protein, 10 aa, Homo sapiens
  CDR3 for alpha chain variable domain of TCR clone 361341 (TRAV5, TRAJ34)
CAEDTDKLIF

SEQ ID NO: 722682 - protein, 16 aa, Homo sapiens
  CDR3 for beta chain variable domain of TCR clone 361341 (TRBV4-3, TRBJ2-1)
CASSPALDRGVNEQFF

SEQ ID NO: 722683 - protein, 13 aa, Homo sapiens
  CDR3 for alpha chain variable domain of TCR clone 361342 (TRAV21, TRAJ20)
CAVGLRVDYKHSF

SEQ ID NO: 722684 - protein, 13 aa, Homo sapiens
  CDR3 for beta chain variable domain of TCR clone 361342 (TRBV29-1, TRBJ2-1)
CSVEGGRVNEQFF

SEQ ID NO: 722685 - protein, 11 aa, Homo sapiens
  CDR3 for alpha chain variable domain of TCR clone 361343 (TRAV12-3, TRAJ49)
CAANTGNQFYF

SEQ ID NO: 722686 - protein, 12 aa, Homo sapiens
  CDR3 for beta chain variable domain of TCR clone 361343 (TRBV6-3, TRBJ2-7)
YASSEPGFEQYF

SEQ ID NO: 722687 - protein, 15 aa, Homo sapiens
  CDR3 for alpha chain variable domain of TCR clone 361344 (TRAV38-1, TRAJ37)
CAFIFGSGNTGKLIF

SEQ ID NO: 722688 - protein, 16 aa, Homo sapiens
  CDR3 for beta chain variable domain of TCR clone 361344 (TRBV2, TRBJ2-1)
CASSANPRDWQAEQFF

SEQ ID NO: 722689 - protein, 13 aa, Homo sapiens
  CDR3 for alpha chain variable domain of TCR clone 361345 (TRAV30, TRAJ24)
CGTVTDSWGKLQF

SEQ ID NO: 722690 - protein, 15 aa, Homo sapiens
  CDR3 for beta chain variable domain of TCR clone 361345 (TRBV19, TRBJ1-1)
CASTSGQIQNTEAFF

SEQ ID NO: 722691 - protein, 19 aa, Homo sapiens
  CDR3 for alpha chain variable domain of TCR clone 361346 (TRAV3, TRAJ6)
CAVRDRNPSRSGGSYISTF

SEQ ID NO: 722692 - protein, 15 aa, Homo sapiens
  CDR3 for beta chain variable domain of TCR clone 361346 (TRBV18, TRBJ2-7)
CASSPTFMDSYEQYF

SEQ ID NO: 722693 - protein, 15 aa, Homo sapiens
  CDR3 for alpha chain variable domain of TCR clone 361347 (TRAV1-2, TRAJ9)
CAVRDDGTGGFKTIF

SEQ ID NO: 722694 - protein, 15 aa, Homo sapiens
  CDR3 for beta chain variable domain of TCR clone 361347 (TRBV5-1, TRBJ2-1)
CASSPPRAPYNEQFF

SEQ ID NO: 722695 - protein, 13 aa, Homo sapiens
  CDR3 for alpha chain variable domain of TCR clone 361348 (TRAV36/DV7, TRAJ53)
CALSGGSNYQLTF

SEQ ID NO: 722696 - protein, 13 aa, Homo sapiens
  CDR3 for beta chain variable domain of TCR clone 361348 (TRBV28, TRBJ2-7)
CASSLPSRYEQYF

SEQ ID NO: 722697 - protein, 14 aa, Homo sapiens
  CDR3 for alpha chain variable domain of TCR clone 361349 (TRAV1-2, TRAJ8)
CAVREDTGFQKLVF

SEQ ID NO: 722698 - protein, 16 aa, Homo sapiens
  CDR3 for beta chain variable domain of TCR clone 361349 (TRBV4-1, TRBJ2-3)
CASSQSISGAEDTQYF

SEQ ID NO: 722699 - protein, 14 aa, Homo sapiens
  CDR3 for alpha chain variable domain of TCR clone 361350 (TRAV38-1, TRAJ43)
CAFMKHNNNNDMRF

SEQ ID NO: 722700 - protein, 15 aa, Homo sapiens
  CDR3 for beta chain variable domain of TCR clone 361350 (TRBV7-2, TRBJ2-5)
CASSFLRGGEETQYF

SEQ ID NO: 722701 - protein, 15 aa, Homo sapiens
  CDR3 for alpha chain variable domain of TCR clone 361351 (TRAV26-1, TRAJ22)
CIVRVSLWLCKATDL

SEQ ID NO: 722702 - protein, 12 aa, Homo sapiens
  CDR3 for beta chain variable domain of TCR clone 361351 (TRBV11-2, TRBJ2-2)
CASSLGGGELFF

SEQ ID NO: 722703 - protein, 15 aa, Homo sapiens
  CDR3 for alpha chain variable domain of TCR clone 361352 (TRAV26-1, TRAJ29)
CIVRVEGSGNTPLVF

SEQ ID NO: 722704 - protein, 19 aa, Homo sapiens
  CDR3 for beta chain variable domain of TCR clone 361352 (TRBV19, TRBJ2-5)
CASSIGQVTDFFLGETQYF

SEQ ID NO: 722705 - protein, 12 aa, Homo sapiens
  CDR3 for alpha chain variable domain of TCR clone 361353 (TRAV21, TRAJ33)
CAKMDSNYQLIW

SEQ ID NO: 722706 - protein, 15 aa, Homo sapiens
  CDR3 for beta chain variable domain of TCR clone 361353 (TRBV2, TRBJ2-4)
CASSGTNLAKNIQYF

SEQ ID NO: 722707 - protein, 16 aa, Homo sapiens
  CDR3 for alpha chain variable domain of TCR clone 361354 (TRAV12-3, TRAJ53)
CAMSPGGVGSNYKLTF

SEQ ID NO: 722708 - protein, 11 aa, Homo sapiens
  CDR3 for beta chain variable domain of TCR clone 361354 (TRBV29-1, TRBJ2-5)
CSEDRTGTQYF

SEQ ID NO: 722709 - protein, 14 aa, Homo sapiens
  CDR3 for alpha chain variable domain of TCR clone 361355 (TRAV8-6, TRAJ10)
CAVTSTGGGNKLTF

SEQ ID NO: 722710 - protein, 13 aa, Homo sapiens
  CDR3 for beta chain variable domain of TCR clone 361355 (TRBV5-6, TRBJ2-5)
CASRSSGGGTQYF

SEQ ID NO: 722711 - protein, 13 aa, Homo sapiens
  CDR3 for alpha chain variable domain of TCR clone 361356 (TRAV35, TRAJ48)
CAGHEFGSEKLTF

SEQ ID NO: 722712 - protein, 14 aa, Homo sapiens
  CDR3 for beta chain variable domain of TCR clone 361356 (TRBV19, TRBJ2-1)
CASPTFVLSGEQFF

SEQ ID NO: 722713 - protein, 13 aa, Homo sapiens
  CDR3 for alpha chain variable domain of TCR clone 361357 (TRAV20, TRAJ56)
CAVQAGANSKLTF

SEQ ID NO: 722714 - protein, 11 aa, Homo sapiens
  CDR3 for beta chain variable domain of TCR clone 361357 (TRBV19, TRBJ1-1)
CASSIGSEAFF

SEQ ID NO: 722715 - protein, 11 aa, Homo sapiens
  CDR3 for alpha chain variable domain of TCR clone 361358 (TRAV29/DV5, TRAJ37)
CATSNTGTLIF

SEQ ID NO: 722716 - protein, 12 aa, Homo sapiens
  CDR3 for beta chain variable domain of TCR clone 361358 (TRBV11-2, TRBJ2-2)
CASSLPTGELFF

SEQ ID NO: 722717 - protein, 14 aa, Homo sapiens
  CDR3 for alpha chain variable domain of TCR clone 361359 (TRAV12-2, TRAJ36)
CAVKISTGANNLFF

SEQ ID NO: 722718 - protein, 14 aa, Homo sapiens
  CDR3 for beta chain variable domain of TCR clone 361359 (TRBV20-1, TRBJ2-3)
CSARGGTSTGTQYF

SEQ ID NO: 722719 - protein, 15 aa, Homo sapiens
  CDR3 for alpha chain variable domain of TCR clone 361360 (TRAV17, TRAJ4)
CATWTWSGGYNKLIF

SEQ ID NO: 722720 - protein, 13 aa, Homo sapiens
  CDR3 for beta chain variable domain of TCR clone 361360 (TRBV6-6, TRBJ2-7)
CASSPKHLAEQYF

SEQ ID NO: 722721 - protein, 14 aa, Homo sapiens
  CDR3 for alpha chain variable domain of TCR clone 361361 (TRAV26-1, TRAJ38)
CIADNAGNNRKLIW

SEQ ID NO: 722722 - protein, 16 aa, Homo sapiens
  CDR3 for beta chain variable domain of TCR clone 361361 (TRBV12-5, TRBJ2-5)
CASGPRTGGNQETQYF

SEQ ID NO: 722723 - protein, 13 aa, Homo sapiens
  CDR3 for alpha chain variable domain of TCR clone 361362 (TRAV2, TRAJ40)
CAVVTSGTYKYIF

SEQ ID NO: 722724 - protein, 16 aa, Homo sapiens
  CDR3 for beta chain variable domain of TCR clone 361362 (TRBV29-1, TRBJ1-2)
CSVEANRGIANYGYTF

SEQ ID NO: 722725 - protein, 13 aa, Homo sapiens
  CDR3 for alpha chain variable domain of TCR clone 361363 (TRAV20, TRAJ37)
CAGCSSNTGNLIF

SEQ ID NO: 722726 - protein, 13 aa, Homo sapiens
  CDR3 for beta chain variable domain of TCR clone 361363 (TRBV4-2, TRBJ1-1)
CASSQAGNTEAFF

SEQ ID NO: 722727 - protein, 13 aa, Homo sapiens
  CDR3 for alpha chain variable domain of TCR clone 361364 (TRAV12-3, TRAJ53)
CAMRGGSNYKLTF

SEQ ID NO: 722728 - protein, 13 aa, Homo sapiens
  CDR3 for beta chain variable domain of TCR clone 361364 (TRBV18, TRBJ2-5)
CVSSLQGQETQYF

SEQ ID NO: 722729 - protein, 18 aa, Homo sapiens
  CDR3 for alpha chain variable domain of TCR clone 361365 (TRAV21, TRAJ52)
CAVRPSPAGGTSYGKLTF

SEQ ID NO: 722730 - protein, 15 aa, Homo sapiens
  CDR3 for beta chain variable domain of TCR clone 361365 (TRBV19, TRBJ1-1)
CASTSRQIQNTEAFF

SEQ ID NO: 722731 - protein, 22 aa, Homo sapiens
  CDR3 for alpha chain variable domain of TCR clone 361366 (TRAV29/DV5, TRAJ47)
CPPSLETLQCTSVQLSGNKLVF

SEQ ID NO: 722732 - protein, 12 aa, Homo sapiens
  CDR3 for beta chain variable domain of TCR clone 361366 (TRBV11-2, TRBJ2-7)
CASSLPTYEQYF

SEQ ID NO: 722733 - protein, 16 aa, Homo sapiens
  CDR3 for alpha chain variable domain of TCR clone 361367 (TRAV3, TRAJ6)
CAVRDGMGRRRLHTYI

SEQ ID NO: 722734 - protein, 15 aa, Homo sapiens
  CDR3 for beta chain variable domain of TCR clone 361367 (TRBV9, TRBJ2-1)
CASSLAGSSYNEQFF

SEQ ID NO: 722735 - protein, 12 aa, Homo sapiens
  CDR3 for alpha chain variable domain of TCR clone 361368 (TRAV13-1, TRAJ9)
CASHTGGFKTIF

SEQ ID NO: 722736 - protein, 13 aa, Homo sapiens
  CDR3 for beta chain variable domain of TCR clone 361368 (TRBV4-1, TRBJ2-1)
CASSQEVQYEQFF

SEQ ID NO: 722737 - protein, 15 aa, Homo sapiens
  CDR3 for alpha chain variable domain of TCR clone 361369 (TRAV16, TRAJ20)
CALKGGLRADCKLSF

SEQ ID NO: 722738 - protein, 16 aa, Homo sapiens
  CDR3 for beta chain variable domain of TCR clone 361369 (TRBV11-3, TRBJ2-2)
CASSSRTSPGTGELFF

SEQ ID NO: 722739 - protein, 13 aa, Homo sapiens
  CDR3 for alpha chain variable domain of TCR clone 361370 (TRAV12-2, TRAJ7)
CVVSLYGNNRLAF

SEQ ID NO: 722740 - protein, 18 aa, Homo sapiens
  CDR3 for beta chain variable domain of TCR clone 361370 (TRBV4-2, TRBJ2-1)
CASSQQGLAASSYNEQFF

SEQ ID NO: 722741 - protein, 14 aa, Homo sapiens
  CDR3 for alpha chain variable domain of TCR clone 361371 (TRAV17, TRAJ57)
CATDPQGGSEKLVF

SEQ ID NO: 722742 - protein, 12 aa, Homo sapiens
  CDR3 for beta chain variable domain of TCR clone 361371 (TRBV3-1, TRBJ2-1)
CASSQGSSGQFF

SEQ ID NO: 722743 - protein, 14 aa, Homo sapiens
  CDR3 for alpha chain variable domain of TCR clone 361372 (TRAV12-2, TRAJ36)
CAVKISTGANNLFF

SEQ ID NO: 722744 - protein, 14 aa, Homo sapiens
  CDR3 for beta chain variable domain of TCR clone 361372 (TRBV25-1, TRBJ1-2)
CASSDSTGVVGYTF

SEQ ID NO: 722745 - protein, 14 aa, Homo sapiens
  CDR3 for alpha chain variable domain of TCR clone 361373 (TRAV12-3, TRAJ10)
SHLHLTGGGNKLTF

SEQ ID NO: 722746 - protein, 11 aa, Homo sapiens
  CDR3 for beta chain variable domain of TCR clone 361373 (TRBV19, TRBJ1-1)
CASSIGSEAFF

SEQ ID NO: 722747 - protein, 11 aa, Homo sapiens
  CDR3 for alpha chain variable domain of TCR clone 361374 (TRAV13-1, TRAJ39)
CASHAGNMLTF

SEQ ID NO: 722748 - protein, 17 aa, Homo sapiens
  CDR3 for beta chain variable domain of TCR clone 361374 (TRBV4-1, TRBJ2-7)
CASSRAPLGVRGGEQYF

SEQ ID NO: 722749 - protein, 11 aa, Homo sapiens
  CDR3 for alpha chain variable domain of TCR clone 361375 (TRAV17, TRAJ39)
CATNPYNMLTF

SEQ ID NO: 722750 - protein, 13 aa, Homo sapiens
  CDR3 for beta chain variable domain of TCR clone 361375 (TRBV7-8, TRBJ2-1)
CASTRDAVDVQFF

SEQ ID NO: 722751 - protein, 17 aa, Homo sapiens
  CDR3 for alpha chain variable domain of TCR clone 361376 (TRAV3, TRAJ28)
CAVREAYSGAGSYQLTF

SEQ ID NO: 722752 - protein, 18 aa, Homo sapiens
  CDR3 for beta chain variable domain of TCR clone 361376 (TRBV27, TRBJ2-1)
CACGNRAVGVGSKNEQFF

SEQ ID NO: 722753 - protein, 20 aa, Homo sapiens
  CDR3 for alpha chain variable domain of TCR clone 361377 (TRAV8-3, TRAJ44)
LSTSVPWVRLYTGTASKLTF

SEQ ID NO: 722754 - protein, 11 aa, Homo sapiens
  CDR3 for beta chain variable domain of TCR clone 361377 (TRBV11-2, TRBJ2-2)
CASSLPGELFF

SEQ ID NO: 722755 - protein, 13 aa, Homo sapiens
  CDR3 for alpha chain variable domain of TCR clone 361378 (TRAV8-6, TRAJ49)
CAVITNTGHQFYF

SEQ ID NO: 722756 - protein, 14 aa, Homo sapiens
  CDR3 for beta chain variable domain of TCR clone 361378 (TRBV5-1, TRBJ2-7)
CASSRGESLYEQYF

SEQ ID NO: 722757 - protein, 12 aa, Homo sapiens
  CDR3 for alpha chain variable domain of TCR clone 361379 (TRAV12-2, TRAJ31)
CAVNTPDARLMF

SEQ ID NO: 722758 - protein, 19 aa, Homo sapiens
  CDR3 for beta chain variable domain of TCR clone 361379 (TRBV11-3, TRBJ2-2)
CASSTRPGAKTTNTGELFF

SEQ ID NO: 722759 - protein, 16 aa, Homo sapiens
  CDR3 for alpha chain variable domain of TCR clone 361380 (TRAV22, TRAJ45)
CAVERGKRGGADGLTF

SEQ ID NO: 722760 - protein, 13 aa, Homo sapiens
  CDR3 for beta chain variable domain of TCR clone 361380 (TRBV10-3, TRBJ1-2)
CAISERDSYGYTF

SEQ ID NO: 722761 - protein, 16 aa, Homo sapiens
  CDR3 for alpha chain variable domain of TCR clone 361381 (TRAV20, TRAJ22)
CAVQASSSGSARQLTF

SEQ ID NO: 722762 - protein, 10 aa, Homo sapiens
  CDR3 for beta chain variable domain of TCR clone 361381 (TRBV2, TRBJ2-5)
CASSAATQYF

SEQ ID NO: 722763 - protein, 17 aa, Homo sapiens
  CDR3 for alpha chain variable domain of TCR clone 361382 (TRAV3, TRAJ38)
CAVRDCLNAGNNRKLFW

SEQ ID NO: 722764 - protein, 14 aa, Homo sapiens
  CDR3 for beta chain variable domain of TCR clone 361382 (TRBV5-5, TRBJ1-5)
CASSGQGVDQPQHF

SEQ ID NO: 722765 - protein, 12 aa, Homo sapiens
  CDR3 for alpha chain variable domain of TCR clone 361383 (TRAV1-1, TRAJ20)
CAVREDDYKLSF

SEQ ID NO: 722766 - protein, 16 aa, Homo sapiens
  CDR3 for beta chain variable domain of TCR clone 361383 (TRBV20-1, TRBJ1-4)
CSAPGQGLLTNEKLFF

SEQ ID NO: 722767 - protein, 14 aa, Homo sapiens
  CDR3 for alpha chain variable domain of TCR clone 361384 (TRAV1-2, TRAJ16)
CAVNRFSDGQKLLF

SEQ ID NO: 722768 - protein, 13 aa, Homo sapiens
  CDR3 for beta chain variable domain of TCR clone 361384 (TRBV20-1, TRBJ1-1)
CSAGLGQGTEAFF

SEQ ID NO: 722769 - protein, 14 aa, Homo sapiens
  CDR3 for alpha chain variable domain of TCR clone 361385 (TRAV23/DV6, TRAJ39)
CAASMRGAGNVLTF

SEQ ID NO: 722770 - protein, 14 aa, Homo sapiens
  CDR3 for beta chain variable domain of TCR clone 361385 (TRBV10-3, TRBJ2-3)
CAISVTRSRDTQYF

SEQ ID NO: 722771 - protein, 13 aa, Homo sapiens
  CDR3 for alpha chain variable domain of TCR clone 361386 (TRAV13-2, TRAJ10)
CAENTGGGNKLTF

SEQ ID NO: 722772 - protein, 21 aa, Homo sapiens
  CDR3 for beta chain variable domain of TCR clone 361386 (TRBV4-2, TRBJ2-3)
PCSQKTRPCISVPAAPDTQYF

SEQ ID NO: 722773 - protein, 13 aa, Homo sapiens
  CDR3 for alpha chain variable domain of TCR clone 361387 (TRAV17, TRAJ39)
CATDTNAGNMLTF

SEQ ID NO: 722774 - protein, 13 aa, Homo sapiens
  CDR3 for beta chain variable domain of TCR clone 361387 (TRBV19, TRBJ2-7)
CASSPRQSYEQYF

SEQ ID NO: 722775 - protein, 14 aa, Homo sapiens
  CDR3 for alpha chain variable domain of TCR clone 361388 (TRAV16, TRAJ35)
CALSAIGFGNVLHC

SEQ ID NO: 722776 - protein, 13 aa, Homo sapiens
  CDR3 for beta chain variable domain of TCR clone 361388 (TRBV12-4, TRBJ2-5)
CASRLAVQETQYF

SEQ ID NO: 722777 - protein, 13 aa, Homo sapiens
  CDR3 for alpha chain variable domain of TCR clone 361389 (TRAV2, TRAJ40)
CAVVTSGTYKYIF

SEQ ID NO: 722778 - protein, 15 aa, Homo sapiens
  CDR3 for beta chain variable domain of TCR clone 361389 (TRBV4-2, TRBJ1-2)
CASSQRTGGRDGDTF

SEQ ID NO: 722779 - protein, 12 aa, Homo sapiens
  CDR3 for alpha chain variable domain of TCR clone 361390 (TRAV13-1, TRAJ40)
CAASWAIYKYIF

SEQ ID NO: 722780 - protein, 15 aa, Homo sapiens
  CDR3 for beta chain variable domain of TCR clone 361390 (TRBV7-8, TRBJ2-1)
CASSSRLAAYNEQFF

SEQ ID NO: 722781 - protein, 13 aa, Homo sapiens
  CDR3 for alpha chain variable domain of TCR clone 361391 (TRAV21, TRAJ10)
CAVPTGGGNKLTF

SEQ ID NO: 722782 - protein, 15 aa, Homo sapiens
  CDR3 for beta chain variable domain of TCR clone 361391 (TRBV27, TRBJ2-1)
CASSNGGGSSNEQFF

SEQ ID NO: 722783 - protein, 10 aa, Homo sapiens
  CDR3 for alpha chain variable domain of TCR clone 361392 (TRAV27, TRAJ20)
ASTSADKLSF

SEQ ID NO: 722784 - protein, 13 aa, Homo sapiens
  CDR3 for beta chain variable domain of TCR clone 361392 (TRBV7-3, TRBJ1-1)
CASSQDWGAEAFF

SEQ ID NO: 722785 - protein, 14 aa, Homo sapiens
  CDR3 for alpha chain variable domain of TCR clone 361393 (TRAV12-2, TRAJ17)
CAVLFKAAGNKLTF

SEQ ID NO: 722786 - protein, 17 aa, Homo sapiens
  CDR3 for beta chain variable domain of TCR clone 361393 (TRBV20-1, TRBJ2-2)
CSASGSGQGALTGELFF

SEQ ID NO: 722787 - protein, 18 aa, Homo sapiens
  CDR3 for alpha chain variable domain of TCR clone 361394 (TRAV26-1, TRAJ52)
CIVRVEGAGGTSYGKLTF

SEQ ID NO: 722788 - protein, 19 aa, Homo sapiens
  CDR3 for beta chain variable domain of TCR clone 361394 (TRBV25-1, TRBJ2-2)
CAILVYRVDRGRKTGELFF

SEQ ID NO: 722789 - protein, 13 aa, Homo sapiens
  CDR3 for alpha chain variable domain of TCR clone 361395 (TRAV27, TRAJ29)
CAGAHSGNTPLVF

SEQ ID NO: 722790 - protein, 16 aa, Homo sapiens
  CDR3 for beta chain variable domain of TCR clone 361395 (TRBV12-5, TRBJ2-5)
CASGPRTSGNQETQYF

SEQ ID NO: 722791 - protein, 15 aa, Homo sapiens
  CDR3 for alpha chain variable domain of TCR clone 361396 (TRAV17, TRAJ16)
CATALRCSDGQKLLF

SEQ ID NO: 722792 - protein, 15 aa, Homo sapiens
  CDR3 for beta chain variable domain of TCR clone 361396 (TRBV5-4, TRBJ2-1)
CASSSGLAGVNEQFF

SEQ ID NO: 722793 - protein, 12 aa, Homo sapiens
  CDR3 for alpha chain variable domain of TCR clone 361397 (TRAV13-1, TRAJ49)
CAAPNTGNQFYF

SEQ ID NO: 722794 - protein, 12 aa, Homo sapiens
  CDR3 for beta chain variable domain of TCR clone 361397 (TRBV6-5, TRBJ2-5)
CASSEGSETQYF

SEQ ID NO: 722795 - protein, 14 aa, Homo sapiens
  CDR3 for alpha chain variable domain of TCR clone 361398 (TRAV29/DV5, TRAJ36)
CAARRKTGANNLFF

SEQ ID NO: 722796 - protein, 12 aa, Homo sapiens
  CDR3 for beta chain variable domain of TCR clone 361398 (TRBV7-3, TRBJ2-1)
CASSFINNEQFF

SEQ ID NO: 722797 - protein, 16 aa, Homo sapiens
  CDR3 for alpha chain variable domain of TCR clone 361399 (TRAV12-3, TRAJ53)
CAMSPGSGGSNYKLTF

SEQ ID NO: 722798 - protein, 17 aa, Homo sapiens
  CDR3 for beta chain variable domain of TCR clone 361399 (TRBV28, TRBJ2-5)
CASSTPEGYALQETQYF

SEQ ID NO: 722799 - protein, 11 aa, Homo sapiens
  CDR3 for alpha chain variable domain of TCR clone 361400 (TRAV2, TRAJ33)
CAVDSNYQLIR

SEQ ID NO: 722800 - protein, 14 aa, Homo sapiens
  CDR3 for beta chain variable domain of TCR clone 361400 (TRBV11-2, TRBJ2-3)
CASRRLARTDTQYF

SEQ ID NO: 722801 - protein, 17 aa, Homo sapiens
  CDR3 for alpha chain variable domain of TCR clone 361401 (TRAV3, TRAJ42)
CAVRDRDYVGSQGNLIF

SEQ ID NO: 722802 - protein, 15 aa, Homo sapiens
  CDR3 for beta chain variable domain of TCR clone 361401 (TRBV5-5, TRBJ1-6)
CASSLVIVGNSPLHF

SEQ ID NO: 722803 - protein, 12 aa, Homo sapiens
  CDR3 for alpha chain variable domain of TCR clone 361402 (TRAV17, TRAJ57)
CAMDGGSEKLVF

SEQ ID NO: 722804 - protein, 15 aa, Homo sapiens
  CDR3 for beta chain variable domain of TCR clone 361402 (TRBV6-3, TRBJ2-2)
CASSFLATLTGELFF

SEQ ID NO: 722805 - protein, 13 aa, Homo sapiens
  CDR3 for alpha chain variable domain of TCR clone 361403 (TRAV36/DV7, TRAJ37)
CAVFSSNTGKLIF

SEQ ID NO: 722806 - protein, 15 aa, Homo sapiens
  CDR3 for beta chain variable domain of TCR clone 361403 (TRBV12-4, TRBJ2-5)
CQQFFVMGRQETQYF

SEQ ID NO: 722807 - protein, 16 aa, Homo sapiens
  CDR3 for alpha chain variable domain of TCR clone 361404 (TRAV3, TRAJ37)
CAVRPHGSGHTGKLIF

SEQ ID NO: 722808 - protein, 13 aa, Homo sapiens
  CDR3 for beta chain variable domain of TCR clone 361404 (TRBV2, TRBJ1-5)
CASGTGGYQPQHF

SEQ ID NO: 722809 - protein, 15 aa, Homo sapiens
  CDR3 for alpha chain variable domain of TCR clone 361405 (TRAV25, TRAJ52)
CAGRPGGTSYGKLTF

SEQ ID NO: 722810 - protein, 15 aa, Homo sapiens
  CDR3 for beta chain variable domain of TCR clone 361405 (TRBV7-8, TRBJ2-1)
CASSSRLAAYNEQFF

SEQ ID NO: 722811 - protein, 17 aa, Homo sapiens
  CDR3 for alpha chain variable domain of TCR clone 361406 (TRAV12-2, TRAJ36)
CAVKDNLFFGIGTRLTV

SEQ ID NO: 722812 - protein, 15 aa, Homo sapiens
  CDR3 for beta chain variable domain of TCR clone 361406 (TRBV28, TRBJ2-2)
CASTVAGANTGELFF

SEQ ID NO: 722813 - protein, 12 aa, Homo sapiens
  CDR3 for alpha chain variable domain of TCR clone 361407 (TRAV12-3, TRAJ20)
CAMVRGDYKLSF

SEQ ID NO: 722814 - protein, 17 aa, Homo sapiens
  CDR3 for beta chain variable domain of TCR clone 361407 (TRBV28, TRBJ2-5)
WASSTPEGDALQETQYF

SEQ ID NO: 722815 - protein, 21 aa, Homo sapiens
  CDR3 for alpha chain variable domain of TCR clone 361408 (TRAV2, TRAJ10)
CCLPLCCGGSTVTGGGNKLTF

SEQ ID NO: 722816 - protein, 16 aa, Homo sapiens
  CDR3 for beta chain variable domain of TCR clone 361408 (TRBV18, TRBJ1-5)
CASSPSTGNSNQPQHF

SEQ ID NO: 722817 - protein, 15 aa, Homo sapiens
  CDR3 for alpha chain variable domain of TCR clone 361409 (TRAV26-1, TRAJ22)
CMVRVSFWFCKATDL

SEQ ID NO: 722818 - protein, 13 aa, Homo sapiens
  CDR3 for beta chain variable domain of TCR clone 361409 (TRBV7-9, TRBJ1-2)
CASSLKQNYGYTF

SEQ ID NO: 722819 - protein, 14 aa, Homo sapiens
  CDR3 for alpha chain variable domain of TCR clone 361410 (TRAV17, TRAJ39)
CATDPVRAGNMLTF

SEQ ID NO: 722820 - protein, 13 aa, Homo sapiens
  CDR3 for beta chain variable domain of TCR clone 361410 (TRBV12-5, TRBJ2-3)
CASGDRQSDTQYF

SEQ ID NO: 722821 - protein, 15 aa, Homo sapiens
  CDR3 for alpha chain variable domain of TCR clone 361411 (TRAV35, TRAJ50)
CAGQLRKTSYDKVIF

SEQ ID NO: 722822 - protein, 21 aa, Homo sapiens
  CDR3 for beta chain variable domain of TCR clone 361411 (TRBV5-1, TRBJ2-5)
GAGGLGPLSLRQQLGLETQYF

SEQ ID NO: 722823 - protein, 12 aa, Homo sapiens
  CDR3 for alpha chain variable domain of TCR clone 361412 (TRAV13-1, TRAJ15)
CAASQAGTALIF

SEQ ID NO: 722824 - protein, 15 aa, Homo sapiens
  CDR3 for beta chain variable domain of TCR clone 361412 (TRBV5-4, TRBJ1-4)
CASSSFGTGNEKLFF

SEQ ID NO: 722825 - protein, 11 aa, Homo sapiens
  CDR3 for alpha chain variable domain of TCR clone 361413 (TRAV12-3, TRAJ43)
CAMSVSNDMRF

SEQ ID NO: 722826 - protein, 12 aa, Homo sapiens
  CDR3 for beta chain variable domain of TCR clone 361413 (TRBV20-1, TRBJ1-1)
QCSTWGGTEAVF

SEQ ID NO: 722827 - protein, 15 aa, Homo sapiens
  CDR3 for alpha chain variable domain of TCR clone 361414 (TRAV8-3, TRAJ45)
CASSYSGGGADGLPF

SEQ ID NO: 722828 - protein, 15 aa, Homo sapiens
  CDR3 for beta chain variable domain of TCR clone 361414 (TRBV20-1, TRBJ2-7)
CSARDRVSGMDEQYF

SEQ ID NO: 722829 - protein, 14 aa, Homo sapiens
  CDR3 for alpha chain variable domain of TCR clone 361415 (TRAV1-2, TRAJ16)
CAVNRFSDGQKLLF

SEQ ID NO: 722830 - protein, 13 aa, Homo sapiens
  CDR3 for beta chain variable domain of TCR clone 361415 (TRBV20-1, TRBJ1-1)
CSARGGGKTEAFF

SEQ ID NO: 722831 - protein, 16 aa, Homo sapiens
  CDR3 for alpha chain variable domain of TCR clone 361416 (TRAV3, TRAJ42)
CCERQGYGGSQGNLIF

SEQ ID NO: 722832 - protein, 15 aa, Homo sapiens
  CDR3 for beta chain variable domain of TCR clone 361416 (TRBV6-6, TRBJ2-7)
CASSYSYGGSYEQYF

SEQ ID NO: 722833 - protein, 15 aa, Homo sapiens
  CDR3 for alpha chain variable domain of TCR clone 361417 (TRAV12-2, TRAJ53)
CAGNGGGGGNYKLTF

SEQ ID NO: 722834 - protein, 13 aa, Homo sapiens
  CDR3 for beta chain variable domain of TCR clone 361417 (TRBV3-1, TRBJ1-1)
CASSPGVITEALF

SEQ ID NO: 722835 - protein, 13 aa, Homo sapiens
  CDR3 for alpha chain variable domain of TCR clone 361418 (TRAV1-2, TRAJ9)
CAALNTGGFKTIF

SEQ ID NO: 722836 - protein, 14 aa, Homo sapiens
  CDR3 for beta chain variable domain of TCR clone 361418 (TRBV7-8, TRBJ1-2)
CASSPDSLSYGYTF

SEQ ID NO: 722837 - protein, 14 aa, Homo sapiens
  CDR3 for alpha chain variable domain of TCR clone 361419 (TRAV1-2, TRAJ16)
CAVNRFSDGQKLLF

SEQ ID NO: 722838 - protein, 16 aa, Homo sapiens
  CDR3 for beta chain variable domain of TCR clone 361419 (TRBV5-1, TRBJ2-5)
CASSCQGLADQETQYF

SEQ ID NO: 722839 - protein, 13 aa, Homo sapiens
  CDR3 for alpha chain variable domain of TCR clone 361420 (TRAV13-1, TRAJ43)
CAASKNNNNDMRF

SEQ ID NO: 722840 - protein, 15 aa, Homo sapiens
  CDR3 for beta chain variable domain of TCR clone 361420 (TRBV11-2, TRBJ2-1)
CASSSPSTRYNEQFF

SEQ ID NO: 722841 - protein, 18 aa, Homo sapiens
  CDR3 for alpha chain variable domain of TCR clone 361421 (TRAV3, TRAJ21)
CAVRDIKEETSTNFTLDL

SEQ ID NO: 722842 - protein, 13 aa, Homo sapiens
  CDR3 for beta chain variable domain of TCR clone 361421 (TRBV27, TRBJ2-7)
CASSLTTGYEQYF

SEQ ID NO: 722843 - protein, 16 aa, Homo sapiens
  CDR3 for alpha chain variable domain of TCR clone 361422 (TRAV27, TRAJ52)
CAGAGAGGTSYGKLTF

SEQ ID NO: 722844 - protein, 19 aa, Homo sapiens
  CDR3 for beta chain variable domain of TCR clone 361422 (TRBV19, TRBJ2-5)
CASSIGQVTDFFLGETQYF

SEQ ID NO: 722845 - protein, 16 aa, Homo sapiens
  CDR3 for alpha chain variable domain of TCR clone 361423 (TRAV26-1, TRAJ53)
CIVRVAMGGSNYKLTF

SEQ ID NO: 722846 - protein, 13 aa, Homo sapiens
  CDR3 for beta chain variable domain of TCR clone 361423 (TRBV10-3, TRBJ2-5)
CAMTSGAGETQYF

SEQ ID NO: 722847 - protein, 16 aa, Homo sapiens
  CDR3 for alpha chain variable domain of TCR clone 361424 (TRAV12-2, TRAJ28)
CAVITDSGAGSYQLTF

SEQ ID NO: 722848 - protein, 12 aa, Homo sapiens
  CDR3 for beta chain variable domain of TCR clone 361424 (TRBV9, TRBJ2-2)
CASGLVTGELFF

SEQ ID NO: 722849 - protein, 13 aa, Homo sapiens
  CDR3 for alpha chain variable domain of TCR clone 361425 (TRAV30, TRAJ20)
CGTEDRSDYKISF

SEQ ID NO: 722850 - protein, 15 aa, Homo sapiens
  CDR3 for beta chain variable domain of TCR clone 361425 (TRBV2, TRBJ1-2)
CASTQVQDSNYGYTF

SEQ ID NO: 722851 - protein, 14 aa, Homo sapiens
  CDR3 for alpha chain variable domain of TCR clone 361426 (TRAV12-1, TRAJ17)
CVVNYKAAGNKLTF

SEQ ID NO: 722852 - protein, 14 aa, Homo sapiens
  CDR3 for beta chain variable domain of TCR clone 361426 (TRBV19, TRBJ2-7)
CASSIEASSYEQYF

SEQ ID NO: 722853 - protein, 15 aa, Homo sapiens
  CDR3 for alpha chain variable domain of TCR clone 361427 (TRAV12-2, TRAJ26)
CAVNSHSNYGQNFVF

SEQ ID NO: 722854 - protein, 15 aa, Homo sapiens
  CDR3 for beta chain variable domain of TCR clone 361427 (TRBV5-1, TRBJ2-1)
CASRPPRAPYNEQFF

SEQ ID NO: 722855 - protein, 16 aa, Homo sapiens
  CDR3 for alpha chain variable domain of TCR clone 361428 (TRAV26-1, TRAJ58)
IASSESGETSGSRLTF

SEQ ID NO: 722856 - protein, 19 aa, Homo sapiens
  CDR3 for beta chain variable domain of TCR clone 361428 (TRBV11-3, TRBJ2-2)
CASSTRPGAKTTNTGELFF

SEQ ID NO: 722857 - protein, 11 aa, Homo sapiens
  CDR3 for alpha chain variable domain of TCR clone 361429 (TRAV21, TRAJ34)
CAVTNTDKLIF

SEQ ID NO: 722858 - protein, 15 aa, Homo sapiens
  CDR3 for beta chain variable domain of TCR clone 361429 (TRBV11-2, TRBJ2-2)
CASSSDRVNAGELFF

SEQ ID NO: 722859 - protein, 14 aa, Homo sapiens
  CDR3 for alpha chain variable domain of TCR clone 361430 (TRAV8-1, TRAJ5)
CAVSTDTGRRALTF

SEQ ID NO: 722860 - protein, 12 aa, Homo sapiens
  CDR3 for beta chain variable domain of TCR clone 361430 (TRBV11-2, TRBJ2-1)
CASSPGNNEQFF

SEQ ID NO: 722861 - protein, 14 aa, Homo sapiens
  CDR3 for alpha chain variable domain of TCR clone 361431 (TRAV21, TRAJ38)
CAVMGAGNNRKLIL

SEQ ID NO: 722862 - protein, 13 aa, Homo sapiens
  CDR3 for beta chain variable domain of TCR clone 361431 (TRBV7-3, TRBJ2-5)
CASSIGFFETQYF

SEQ ID NO: 722863 - protein, 16 aa, Homo sapiens
  CDR3 for alpha chain variable domain of TCR clone 361432 (TRAV3, TRAJ10)
FAVRDMRAGGGNKLTF

SEQ ID NO: 722864 - protein, 16 aa, Homo sapiens
  CDR3 for beta chain variable domain of TCR clone 361432 (TRBV20-1, TRBJ1-4)
CSAPGQGLLTNEKLFF

SEQ ID NO: 722865 - protein, 14 aa, Homo sapiens
  CDR3 for alpha chain variable domain of TCR clone 361433 (TRAV3, TRAJ36)
CAVRDGAGANNLFF

SEQ ID NO: 722866 - protein, 16 aa, Homo sapiens
  CDR3 for beta chain variable domain of TCR clone 361433 (TRBV20-1, TRBJ2-6)
GSAREGPGVGANVLTF

SEQ ID NO: 722867 - protein, 14 aa, Homo sapiens
  CDR3 for alpha chain variable domain of TCR clone 361434 (TRAV35, TRAJ22)
CAGLRPGSARQLTF

SEQ ID NO: 722868 - protein, 19 aa, Homo sapiens
  CDR3 for beta chain variable domain of TCR clone 361434 (TRBV12-4, TRBJ2-5)
CASSPPRPPRDPVLRARHA

SEQ ID NO: 722869 - protein, 15 aa, Homo sapiens
  CDR3 for alpha chain variable domain of TCR clone 361435 (TRAV12-1, TRAJ44)
CVVFVNTGTASKLTF

SEQ ID NO: 722870 - protein, 16 aa, Homo sapiens
  CDR3 for beta chain variable domain of TCR clone 361435 (TRBV27, TRBJ2-2)
CASSFRGLVRTGELFF

SEQ ID NO: 722871 - protein, 14 aa, Homo sapiens
  CDR3 for alpha chain variable domain of TCR clone 361436 (TRAV2, TRAJ12)
RAVDAMDSSYKLIF

SEQ ID NO: 722872 - protein, 13 aa, Homo sapiens
  CDR3 for beta chain variable domain of TCR clone 361436 (TRBV19, TRBJ2-1)
CASKVGAGGEQFF

SEQ ID NO: 722873 - protein, 11 aa, Homo sapiens
  CDR3 for alpha chain variable domain of TCR clone 361437 (TRAV3, TRAJ21)
CAVGNFNKFYF

SEQ ID NO: 722874 - protein, 11 aa, Homo sapiens
  CDR3 for beta chain variable domain of TCR clone 361437 (TRBV11-2, TRBJ2-2)
CAGSLPGELFF

SEQ ID NO: 722875 - protein, 16 aa, Homo sapiens
  CDR3 for alpha chain variable domain of TCR clone 361438 (TRAV12-3, TRAJ53)
CAMSPGSGGSNYKLTF

SEQ ID NO: 722876 - protein, 17 aa, Homo sapiens
  CDR3 for beta chain variable domain of TCR clone 361438 (TRBV28, TRBJ2-5)
CASSTPAVDALQETQYF

SEQ ID NO: 722877 - protein, 11 aa, Homo sapiens
  CDR3 for alpha chain variable domain of TCR clone 361439 (TRAV3, TRAJ21)
CVVGNFNKFCF

SEQ ID NO: 722878 - protein, 13 aa, Homo sapiens
  CDR3 for beta chain variable domain of TCR clone 361439 (TRBV20-1, TRBJ2-5)
CSARGDYQETQYF

SEQ ID NO: 722879 - protein, 15 aa, Homo sapiens
  CDR3 for alpha chain variable domain of TCR clone 361440 (TRAV26-1, TRAJ22)
CIVRVRDGSARQLTF

SEQ ID NO: 722880 - protein, 20 aa, Homo sapiens
  CDR3 for beta chain variable domain of TCR clone 361440 (TRBV2, TRBJ2-1)
CASSEPGLAGQASAYNEQFF

SEQ ID NO: 722881 - protein, 14 aa, Homo sapiens
  CDR3 for alpha chain variable domain of TCR clone 361441 (TRAV21, TRAJ21)
CAVKGFGNFNKFYF

SEQ ID NO: 722882 - protein, 13 aa, Homo sapiens
  CDR3 for beta chain variable domain of TCR clone 361441 (TRBV18, TRBJ1-1)
CASSPETMPEAFF

SEQ ID NO: 722883 - protein, 17 aa, Homo sapiens
  CDR3 for alpha chain variable domain of TCR clone 361442 (TRAV23/DV6, TRAJ9)
CAASLSPPNTGGFNTIF

SEQ ID NO: 722884 - protein, 18 aa, Homo sapiens
  CDR3 for beta chain variable domain of TCR clone 361442 (TRBV4-1, TRBJ2-7)
CASSQDTGAGSGLNEQYF

SEQ ID NO: 722885 - protein, 13 aa, Homo sapiens
  CDR3 for alpha chain variable domain of TCR clone 361443 (TRAV38-1, TRAJ42)
CAQWGGSQGNLSF

SEQ ID NO: 722886 - protein, 17 aa, Homo sapiens
  CDR3 for beta chain variable domain of TCR clone 361443 (TRBV20-1, TRBJ2-1)
CSARDPLAGVWDNEQFF

SEQ ID NO: 722887 - protein, 13 aa, Homo sapiens
  CDR3 for alpha chain variable domain of TCR clone 361444 (TRAV30, TRAJ49)
CGTESQPVTSSIL

SEQ ID NO: 722888 - protein, 11 aa, Homo sapiens
  CDR3 for beta chain variable domain of TCR clone 361444 (TRBV12-4, TRBJ2-3)
CASTATDTQYF

SEQ ID NO: 722889 - protein, 14 aa, Homo sapiens
  CDR3 for alpha chain variable domain of TCR clone 361445 (TRAV38-1, TRAJ45)
CAYYSGVGADGLTF

SEQ ID NO: 722890 - protein, 20 aa, Homo sapiens
  CDR3 for beta chain variable domain of TCR clone 361445 (TRBV28, TRBJ2-1)
YASTPIGRSPGLAGGNEQFF

SEQ ID NO: 722891 - protein, 13 aa, Homo sapiens
  CDR3 for alpha chain variable domain of TCR clone 361446 (TRAV8-3, TRAJ36)
CAVGATGANNLFF

SEQ ID NO: 722892 - protein, 16 aa, Homo sapiens
  CDR3 for beta chain variable domain of TCR clone 361446 (TRBV7-2, TRBJ2-5)
CASSPFPTGGEETQYF

SEQ ID NO: 722893 - protein, 16 aa, Homo sapiens
  CDR3 for alpha chain variable domain of TCR clone 361447 (TRAV26-1, TRAJ45)
CIVEKYSGGGADGLTF

SEQ ID NO: 722894 - protein, 13 aa, Homo sapiens
  CDR3 for beta chain variable domain of TCR clone 361447 (TRBV7-3, TRBJ1-1)
CASSQDWGAEAFF

SEQ ID NO: 722895 - protein, 13 aa, Homo sapiens
  CDR3 for alpha chain variable domain of TCR clone 361448 (TRAV12-2, TRAJ39)
CAVTDNAGNMLTF

SEQ ID NO: 722896 - protein, 13 aa, Homo sapiens
  CDR3 for beta chain variable domain of TCR clone 361448 (TRBV4-2, TRBJ1-1)
CASSQAGNTEAFF

SEQ ID NO: 722897 - protein, 11 aa, Homo sapiens
  CDR3 for alpha chain variable domain of TCR clone 361449 (TRAV3, TRAJ21)
CAVGNFNKFYF

SEQ ID NO: 722898 - protein, 16 aa, Homo sapiens
  CDR3 for beta chain variable domain of TCR clone 361449 (TRBV2, TRBJ2-3)
CQHRGAPRRWTDTQYF

SEQ ID NO: 722899 - protein, 11 aa, Homo sapiens
  CDR3 for alpha chain variable domain of TCR clone 361450 (TRAV3, TRAJ21)
CAVGNLNKFYF

SEQ ID NO: 722900 - protein, 20 aa, Homo sapiens
  CDR3 for beta chain variable domain of TCR clone 361450 (TRBV7-8, TRBJ2-2)
CASSHLFPGPTIHITGELFF

SEQ ID NO: 722901 - protein, 12 aa, Homo sapiens
  CDR3 for alpha chain variable domain of TCR clone 361451 (TRAV21, TRAJ27)
CAPPGNAGKSTF

SEQ ID NO: 722902 - protein, 13 aa, Homo sapiens
  CDR3 for beta chain variable domain of TCR clone 361451 (TRBV2, TRBJ1-1)
CARNPTGGCHGFF

SEQ ID NO: 722903 - protein, 12 aa, Homo sapiens
  CDR3 for alpha chain variable domain of TCR clone 361452 (TRAV13-1, TRAJ49)
CAASPMGNQFYF

SEQ ID NO: 722904 - protein, 16 aa, Homo sapiens
  CDR3 for beta chain variable domain of TCR clone 361452 (TRBV20-1, TRBJ2-1)
CGARDARTRGPNEQFF

SEQ ID NO: 722905 - protein, 11 aa, Homo sapiens
  CDR3 for alpha chain variable domain of TCR clone 361453 (TRAV2, TRAJ33)
CAVESNYQLIW

SEQ ID NO: 722906 - protein, 15 aa, Homo sapiens
  CDR3 for beta chain variable domain of TCR clone 361453 (TRBV5-5, TRBJ1-5)
CASSSTPGSNQPQHF

SEQ ID NO: 722907 - protein, 14 aa, Homo sapiens
  CDR3 for alpha chain variable domain of TCR clone 361454 (TRAV12-2, TRAJ13)
CAVKKTGGSQKVTF

SEQ ID NO: 722908 - protein, 15 aa, Homo sapiens
  CDR3 for beta chain variable domain of TCR clone 361454 (TRBV12-4, TRBJ2-5)
CASSPPTGLQETQYF

SEQ ID NO: 722909 - protein, 14 aa, Homo sapiens
  CDR3 for alpha chain variable domain of TCR clone 361455 (TRAV26-1, TRAJ38)
CIADNAGNNRKLIW

SEQ ID NO: 722910 - protein, 17 aa, Homo sapiens
  CDR3 for beta chain variable domain of TCR clone 361455 (TRBV7-9, TRBJ2-3)
CASSPTVAGDLTDTQYI

SEQ ID NO: 722911 - protein, 12 aa, Homo sapiens
  CDR3 for alpha chain variable domain of TCR clone 361456 (TRAV12-3, TRAJ17)
CAMTLTGNKLTF

SEQ ID NO: 722912 - protein, 17 aa, Homo sapiens
  CDR3 for beta chain variable domain of TCR clone 361456 (TRBV7-7, TRBJ1-4)
CASSLVGQGASNEKLFF

SEQ ID NO: 722913 - protein, 14 aa, Homo sapiens
  CDR3 for alpha chain variable domain of TCR clone 361457 (TRAV1-2, TRAJ8)
CAVREDTGFQKLAF

SEQ ID NO: 722914 - protein, 16 aa, Homo sapiens
  CDR3 for beta chain variable domain of TCR clone 361457 (TRBV5-1, TRBJ2-2)
CASSLWDTTNTGELFF

SEQ ID NO: 722915 - protein, 15 aa, Homo sapiens
  CDR3 for alpha chain variable domain of TCR clone 361458 (TRAV26-1, TRAJ40)
CIVRVTNSGTYKYIF

SEQ ID NO: 722916 - protein, 16 aa, Homo sapiens
  CDR3 for beta chain variable domain of TCR clone 361458 (TRBV12-5, TRBJ2-5)
CASGPRTSGNQETQYF

SEQ ID NO: 722917 - protein, 15 aa, Homo sapiens
  CDR3 for alpha chain variable domain of TCR clone 361459 (TRAV8-4, TRAJ3)
CAVTGENLVQQCFQD

SEQ ID NO: 722918 - protein, 16 aa, Homo sapiens
  CDR3 for beta chain variable domain of TCR clone 361459 (TRBV4-2, TRBJ1-1)
CASSQAGFGMNTKAFF

SEQ ID NO: 722919 - protein, 14 aa, Homo sapiens
  CDR3 for alpha chain variable domain of TCR clone 361460 (TRAV12-2, TRAJ13)
CAVKKTGGYQKVTF

SEQ ID NO: 722920 - protein, 17 aa, Homo sapiens
  CDR3 for beta chain variable domain of TCR clone 361460 (TRBV9, TRBJ1-6)
CASSVAGTGDSPPTLGT

SEQ ID NO: 722921 - protein, 14 aa, Homo sapiens
  CDR3 for alpha chain variable domain of TCR clone 361461 (TRAV12-2, TRAJ44)
CAVNIAGTASKLTF

SEQ ID NO: 722922 - protein, 17 aa, Homo sapiens
  CDR3 for beta chain variable domain of TCR clone 361461 (TRBV10-3, TRBJ1-2)
CAISESTTALANYGDTF

SEQ ID NO: 722923 - protein, 15 aa, Homo sapiens
  CDR3 for alpha chain variable domain of TCR clone 361462 (TRAV8-3, TRAJ45)
CASSYSGGGADGLTF

SEQ ID NO: 722924 - protein, 13 aa, Homo sapiens
  CDR3 for beta chain variable domain of TCR clone 361462 (TRBV10-3, TRBJ2-7)
CAAKRAVNDEQYF

SEQ ID NO: 722925 - protein, 14 aa, Homo sapiens
  CDR3 for alpha chain variable domain of TCR clone 361463 (TRAV12-3, TRAJ56)
CAMSVTGADSKLTF

SEQ ID NO: 722926 - protein, 17 aa, Homo sapiens
  CDR3 for beta chain variable domain of TCR clone 361463 (TRBV5-1, TRBJ2-5)
CASSLLGLAANQETQYF

SEQ ID NO: 722927 - protein, 13 aa, Homo sapiens
  CDR3 for alpha chain variable domain of TCR clone 361464 (TRAV12-1, TRAJ31)
CVVNDNNNDRLMF

SEQ ID NO: 722928 - protein, 14 aa, Homo sapiens
  CDR3 for beta chain variable domain of TCR clone 361464 (TRBV7-2, TRBJ2-1)
CASSFGTSYGEQFF

SEQ ID NO: 722929 - protein, 14 aa, Homo sapiens
  CDR3 for alpha chain variable domain of TCR clone 361465 (TRAV13-1, TRAJ44)
CAAKATGTASKLTF

SEQ ID NO: 722930 - protein, 13 aa, Homo sapiens
  CDR3 for beta chain variable domain of TCR clone 361465 (TRBV7-9, TRBJ2-5)
CASTPVGQETQYF

SEQ ID NO: 722931 - protein, 16 aa, Homo sapiens
  CDR3 for alpha chain variable domain of TCR clone 361466 (TRAV3, TRAJ37)
CDVRVRGSGNTGRLIF

SEQ ID NO: 722932 - protein, 11 aa, Homo sapiens
  CDR3 for beta chain variable domain of TCR clone 361466 (TRBV11-2, TRBJ2-2)
CASSLPGELFF

SEQ ID NO: 722933 - protein, 14 aa, Homo sapiens
  CDR3 for alpha chain variable domain of TCR clone 361467 (TRAV12-2, TRAJ24)
CAVTPADSWGKLQF

SEQ ID NO: 722934 - protein, 12 aa, Homo sapiens
  CDR3 for beta chain variable domain of TCR clone 361467 (TRBV3-1, TRBJ2-1)
CPSSQGSSGQFF

SEQ ID NO: 722935 - protein, 15 aa, Homo sapiens
  CDR3 for alpha chain variable domain of TCR clone 361468 (TRAV17, TRAJ54)
CATEKLGQGAQNLVF

SEQ ID NO: 722936 - protein, 14 aa, Homo sapiens
  CDR3 for beta chain variable domain of TCR clone 361468 (TRBV7-3, TRBJ1-1)
CQQLRGQMNTEAFF

SEQ ID NO: 722937 - protein, 18 aa, Homo sapiens
  CDR3 for alpha chain variable domain of TCR clone 361469 (TRAV1-2, TRAJ13)
CLLPLCCSEFWGYQKVTF

SEQ ID NO: 722938 - protein, 14 aa, Homo sapiens
  CDR3 for beta chain variable domain of TCR clone 361469 (TRBV12-4, TRBJ1-1)
CASSLNDMNTEAFF

SEQ ID NO: 722939 - protein, 16 aa, Homo sapiens
  CDR3 for alpha chain variable domain of TCR clone 361470 (TRAV30, TRAJ24)
CGSEIVDADSWGKFQF

SEQ ID NO: 722940 - protein, 13 aa, Homo sapiens
  CDR3 for beta chain variable domain of TCR clone 361470 (TRBV10-3, TRBJ2-7)
CASKLAVNYEQYF

SEQ ID NO: 722941 - protein, 13 aa, Homo sapiens
  CDR3 for alpha chain variable domain of TCR clone 361471 (TRAV35, TRAJ42)
CAGFPGSQGNLIF

SEQ ID NO: 722942 - protein, 13 aa, Homo sapiens
  CDR3 for beta chain variable domain of TCR clone 361471 (TRBV29-1, TRBJ2-1)
CSVEGGRVNEQFI

SEQ ID NO: 722943 - protein, 13 aa, Homo sapiens
  CDR3 for alpha chain variable domain of TCR clone 361472 (TRAV12-2, TRAJ50)
CAVIVTSYDKVIF

SEQ ID NO: 722944 - protein, 15 aa, Homo sapiens
  CDR3 for beta chain variable domain of TCR clone 361472 (TRBV7-2, TRBJ2-2)
CASSPTGANTGELFF

SEQ ID NO: 722945 - protein, 11 aa, Homo sapiens
  CDR3 for alpha chain variable domain of TCR clone 361473 (TRAV13-1, TRAJ49)
CACVGGNQFDF

SEQ ID NO: 722946 - protein, 16 aa, Homo sapiens
  CDR3 for beta chain variable domain of TCR clone 361473 (TRBV11-2, TRBJ2-2)
CASSLRTGNLIGELFF

SEQ ID NO: 722947 - protein, 13 aa, Homo sapiens
  CDR3 for alpha chain variable domain of TCR clone 361474 (TRAV12-1, TRAJ17)
CVVNKAAGNKLTF

SEQ ID NO: 722948 - protein, 16 aa, Homo sapiens
  CDR3 for beta chain variable domain of TCR clone 361474 (TRBV11-2, TRBJ2-2)
CASSLRTGNLIGELFV

SEQ ID NO: 722949 - protein, 15 aa, Homo sapiens
  CDR3 for alpha chain variable domain of TCR clone 361475 (TRAV3, TRAJ22)
CAVRDRGGSARQLHF

SEQ ID NO: 722950 - protein, 16 aa, Homo sapiens
  CDR3 for beta chain variable domain of TCR clone 361475 (TRBV5-4, TRBJ2-3)
CASQQPGAGGADTQYF

SEQ ID NO: 722951 - protein, 15 aa, Homo sapiens
  CDR3 for alpha chain variable domain of TCR clone 361476 (TRAV3, TRAJ5)
CAVRDLYTGRRALPF

SEQ ID NO: 722952 - protein, 16 aa, Homo sapiens
  CDR3 for beta chain variable domain of TCR clone 361476 (TRBV20-1, TRBJ1-4)
CSAPGQGLLTNEKLFF

SEQ ID NO: 722953 - protein, 12 aa, Homo sapiens
  CDR3 for alpha chain variable domain of TCR clone 361477 (TRAV21, TRAJ6)
CAVKGGSYIPTF

SEQ ID NO: 722954 - protein, 13 aa, Homo sapiens
  CDR3 for beta chain variable domain of TCR clone 361477 (TRBV11-2, TRBJ1-1)
CASRFTENTEAFF

SEQ ID NO: 722955 - protein, 12 aa, Homo sapiens
  CDR3 for alpha chain variable domain of TCR clone 361478 (TRAV12-2, TRAJ30)
CAVRNRDDKIIF

SEQ ID NO: 722956 - protein, 13 aa, Homo sapiens
  CDR3 for beta chain variable domain of TCR clone 361478 (TRBV11-2, TRBJ2-7)
CASSSYPSYEQYF

SEQ ID NO: 722957 - protein, 15 aa, Homo sapiens
  CDR3 for alpha chain variable domain of TCR clone 361479 (TRAV12-1, TRAJ44)
CVVFVNTGTASKLTF

SEQ ID NO: 722958 - protein, 17 aa, Homo sapiens
  CDR3 for beta chain variable domain of TCR clone 361479 (TRBV25-1, TRBJ2-1)
CASSAYGQGRGVYEQFF

SEQ ID NO: 722959 - protein, 15 aa, Homo sapiens
  CDR3 for alpha chain variable domain of TCR clone 361480 (TRAV3, TRAJ29)
CAVRAPLSGNTPLVF

SEQ ID NO: 722960 - protein, 15 aa, Homo sapiens
  CDR3 for beta chain variable domain of TCR clone 361480 (TRBV28, TRBJ1-1)
CASRIKGGLNTEALF

SEQ ID NO: 722961 - protein, 15 aa, Homo sapiens
  CDR3 for alpha chain variable domain of TCR clone 361481 (TRAV9-2, TRAJ56)
CALSDVDGANSKLTF

SEQ ID NO: 722962 - protein, 16 aa, Homo sapiens
  CDR3 for beta chain variable domain of TCR clone 361481 (TRBV27, TRBJ2-2)
CASSCRGLVRTGELFF

SEQ ID NO: 722963 - protein, 14 aa, Homo sapiens
  CDR3 for alpha chain variable domain of TCR clone 361482 (TRAV1-2, TRAJ16)
CAVNRFSDGQKLLF

SEQ ID NO: 722964 - protein, 16 aa, Homo sapiens
  CDR3 for beta chain variable domain of TCR clone 361482 (TRBV20-1, TRBJ1-4)
FSAPGQGLLANEKLFF

SEQ ID NO: 722965 - protein, 16 aa, Homo sapiens
  CDR3 for alpha chain variable domain of TCR clone 361483 (TRAV26-1, TRAJ45)
CIVAKYSGGGADGLTF

SEQ ID NO: 722966 - protein, 15 aa, Homo sapiens
  CDR3 for beta chain variable domain of TCR clone 361483 (TRBV15, TRBJ2-7)
CHQQRPIQQAYEQYF

SEQ ID NO: 722967 - protein, 16 aa, Homo sapiens
  CDR3 for alpha chain variable domain of TCR clone 361484 (TRAV14/DV4, TRAJ54)
CAMREGRIQGAQKLVF

SEQ ID NO: 722968 - protein, 18 aa, Homo sapiens
  CDR3 for beta chain variable domain of TCR clone 361484 (TRBV18, TRBJ1-3)
CASSPRGVAGPSGNTIYF

SEQ ID NO: 722969 - protein, 15 aa, Homo sapiens
  CDR3 for alpha chain variable domain of TCR clone 361485 (TRAV21, TRAJ53)
CATLTSGGSNYKLTF

SEQ ID NO: 722970 - protein, 11 aa, Homo sapiens
  CDR3 for beta chain variable domain of TCR clone 361485 (TRBV12-4, TRBJ2-3)
CASTATDTQYF

SEQ ID NO: 722971 - protein, 15 aa, Homo sapiens
  CDR3 for alpha chain variable domain of TCR clone 361486 (TRAV25, TRAJ53)
CAATGGGGSNYNLTF

SEQ ID NO: 722972 - protein, 11 aa, Homo sapiens
  CDR3 for beta chain variable domain of TCR clone 361486 (TRBV27, TRBJ2-7)
CASSLGYEQYF

SEQ ID NO: 722973 - protein, 13 aa, Homo sapiens
  CDR3 for alpha chain variable domain of TCR clone 361487 (TRAV2, TRAJ15)
CAVASQAGTALIF

SEQ ID NO: 722974 - protein, 15 aa, Homo sapiens
  CDR3 for beta chain variable domain of TCR clone 361487 (TRBV7-3, TRBJ2-2)
CASSETGQGAGELFF

SEQ ID NO: 722975 - protein, 14 aa, Homo sapiens
  CDR3 for alpha chain variable domain of TCR clone 361488 (TRAV16, TRAJ30)
CALSLMNRDDKIIF

SEQ ID NO: 722976 - protein, 14 aa, Homo sapiens
  CDR3 for beta chain variable domain of TCR clone 361488 (TRBV4-1, TRBJ2-2)
CASSQAVNTGELFF

SEQ ID NO: 722977 - protein, 14 aa, Homo sapiens
  CDR3 for alpha chain variable domain of TCR clone 361489 (TRAV8-3, TRAJ16)
CAVDRFSDGQKLLF

SEQ ID NO: 722978 - protein, 15 aa, Homo sapiens
  CDR3 for beta chain variable domain of TCR clone 361489 (TRBV7-6, TRBJ1-5)
CASSPNGHSNQPQHF

SEQ ID NO: 722979 - protein, 13 aa, Homo sapiens
  CDR3 for alpha chain variable domain of TCR clone 361490 (TRAV12-1, TRAJ11)
CVVTRGGYSTLTF

SEQ ID NO: 722980 - protein, 16 aa, Homo sapiens
  CDR3 for beta chain variable domain of TCR clone 361490 (TRBV7-9, TRBJ2-1)
CASSPRASSSYNEQFF

SEQ ID NO: 722981 - protein, 16 aa, Homo sapiens
  CDR3 for alpha chain variable domain of TCR clone 361491 (TRAV30, TRAJ24)
CGTEIVDDDSWGKFQV

SEQ ID NO: 722982 - protein, 14 aa, Homo sapiens
  CDR3 for beta chain variable domain of TCR clone 361491 (TRBV12-5, TRBJ2-5)
CASGSRTHQETQYF

SEQ ID NO: 722983 - protein, 12 aa, Homo sapiens
  CDR3 for alpha chain variable domain of TCR clone 361492 (TRAV12-3, TRAJ17)
CAMTLTGNKLTF

SEQ ID NO: 722984 - protein, 15 aa, Homo sapiens
  CDR3 for beta chain variable domain of TCR clone 361492 (TRBV20-1, TRBJ2-7)
CSARDRVAGMDEQYV

SEQ ID NO: 722985 - protein, 15 aa, Homo sapiens
  CDR3 for alpha chain variable domain of TCR clone 361493 (TRAV3, TRAJ17)
CAVRDTGAAGKKLTF

SEQ ID NO: 722986 - protein, 16 aa, Homo sapiens
  CDR3 for beta chain variable domain of TCR clone 361493 (TRBV4-1, TRBJ2-3)
CASSQSTSGAEDTQYF

SEQ ID NO: 722987 - protein, 14 aa, Homo sapiens
  CDR3 for alpha chain variable domain of TCR clone 361494 (TRAV12-2, TRAJ17)
CAALFKAAGNKLTF

SEQ ID NO: 722988 - protein, 16 aa, Homo sapiens
  CDR3 for beta chain variable domain of TCR clone 361494 (TRBV7-9, TRBJ2-1)
CASSDVAGGSYNEQFF

SEQ ID NO: 722989 - protein, 11 aa, Homo sapiens
  CDR3 for alpha chain variable domain of TCR clone 361495 (TRAV13-1, TRAJ39)
CASHAGNMLTF

SEQ ID NO: 722990 - protein, 14 aa, Homo sapiens
  CDR3 for beta chain variable domain of TCR clone 361495 (TRBV11-2, TRBJ1-5)
CASSLDRGRQPQRL

SEQ ID NO: 722991 - protein, 11 aa, Homo sapiens
  CDR3 for alpha chain variable domain of TCR clone 361496 (TRAV17, TRAJ43)
CATPRSHDMRF

SEQ ID NO: 722992 - protein, 15 aa, Homo sapiens
  CDR3 for beta chain variable domain of TCR clone 361496 (TRBV11-2, TRBJ2-1)
CASSLGTSGLNEQFF

SEQ ID NO: 722993 - protein, 13 aa, Homo sapiens
  CDR3 for alpha chain variable domain of TCR clone 361497 (TRAV9-2, TRAJ33)
CALRMDSNYQLIW

SEQ ID NO: 722994 - protein, 13 aa, Homo sapiens
  CDR3 for beta chain variable domain of TCR clone 361497 (TRBV12-4, TRBJ1-5)
CASSPDRAQPQHF

SEQ ID NO: 722995 - protein, 14 aa, Homo sapiens
  CDR3 for alpha chain variable domain of TCR clone 361498 (TRAV1-2, TRAJ8)
CAVRQDTGFQKLVF

SEQ ID NO: 722996 - protein, 15 aa, Homo sapiens
  CDR3 for beta chain variable domain of TCR clone 361498 (TRBV4-1, TRBJ2-7)
CASSQNTGRLYEQYF

SEQ ID NO: 722997 - protein, 13 aa, Homo sapiens
  CDR3 for alpha chain variable domain of TCR clone 361499 (TRAV2, TRAJ40)
CAVVTSGSYKYIF

SEQ ID NO: 722998 - protein, 14 aa, Homo sapiens
  CDR3 for beta chain variable domain of TCR clone 361499 (TRBV19, TRBJ2-1)
CASPTSVLSGEQFF

SEQ ID NO: 722999 - protein, 23 aa, Homo sapiens
  CDR3 for alpha chain variable domain of TCR clone 361500 (TRAV26-1, )
CIADSAGNNNIQNPDPAVYQLRD

SEQ ID NO: 723000 - protein, 13 aa, Homo sapiens
  CDR3 for beta chain variable domain of TCR clone 361500 (TRBV20-1, TRBJ2-1)
CSARSSPRDEQFF

SEQ ID NO: 723001 - protein, 21 aa, Homo sapiens
  CDR3 for alpha chain variable domain of TCR clone 361501 (TRAV12-1, TRAJ37)
CMVNGGLCQHRQTNLWARDNF

SEQ ID NO: 723002 - protein, 12 aa, Homo sapiens
  CDR3 for beta chain variable domain of TCR clone 361501 (TRBV20-1, TRBJ1-2)
CSAPGFNYGYTF

SEQ ID NO: 723003 - protein, 12 aa, Homo sapiens
  CDR3 for alpha chain variable domain of TCR clone 361502 (TRAV1-1, TRAJ39)
CAVPVVGNMLTF

SEQ ID NO: 723004 - protein, 16 aa, Homo sapiens
  CDR3 for beta chain variable domain of TCR clone 361502 (TRBV28, TRBJ2-7)
CASSPWVATGELSQYF

SEQ ID NO: 723005 - protein, 14 aa, Homo sapiens
  CDR3 for alpha chain variable domain of TCR clone 361503 (TRAV12-2, TRAJ13)
CAVKKTGGYKKVTF

SEQ ID NO: 723006 - protein, 16 aa, Homo sapiens
  CDR3 for beta chain variable domain of TCR clone 361503 (TRBV4-1, TRBJ2-3)
CASSQSTSGAEDTQYF

SEQ ID NO: 723007 - protein, 14 aa, Homo sapiens
  CDR3 for alpha chain variable domain of TCR clone 361504 (TRAV1-2, TRAJ8)
CAVREDTGFQKLVF

SEQ ID NO: 723008 - protein, 18 aa, Homo sapiens
  CDR3 for beta chain variable domain of TCR clone 361504 (TRBV11-2, TRBJ2-3)
CASSFGGASRGAPNTQYF

SEQ ID NO: 723009 - protein, 15 aa, Homo sapiens
  CDR3 for alpha chain variable domain of TCR clone 361505 (TRAV8-3, TRAJ11)
CGVGLLNSGYSTLTF

SEQ ID NO: 723010 - protein, 16 aa, Homo sapiens
  CDR3 for beta chain variable domain of TCR clone 361505 (TRBV7-9, TRBJ1-2)
CASSLGFSSGEDGYTF

SEQ ID NO: 723011 - protein, 16 aa, Homo sapiens
  CDR3 for alpha chain variable domain of TCR clone 361506 (TRAV16, TRAJ52)
CALSAAGGTSYGKLTF

SEQ ID NO: 723012 - protein, 15 aa, Homo sapiens
  CDR3 for beta chain variable domain of TCR clone 361506 (TRBV20-1, TRBJ2-7)
CSARGPLAGGREQYF

SEQ ID NO: 723013 - protein, 18 aa, Homo sapiens
  CDR3 for alpha chain variable domain of TCR clone 361507 (TRAV21, TRAJ52)
CAVRPSPAGGTSYGKLTF

SEQ ID NO: 723014 - protein, 15 aa, Homo sapiens
  CDR3 for beta chain variable domain of TCR clone 361507 (TRBV27, TRBJ2-1)
CASSNGGGYSNEQFF

SEQ ID NO: 723015 - protein, 12 aa, Homo sapiens
  CDR3 for alpha chain variable domain of TCR clone 361508 (TRAV35, TRAJ30)
CAWQLADDKIIY

SEQ ID NO: 723016 - protein, 17 aa, Homo sapiens
  CDR3 for beta chain variable domain of TCR clone 361508 (TRBV4-2, TRBJ2-5)
CASSPGRWRNFQETQYF

SEQ ID NO: 723017 - protein, 13 aa, Homo sapiens
  CDR3 for alpha chain variable domain of TCR clone 361509 (TRAV12-2, TRAJ30)
RAVNLNRDDKIIL

SEQ ID NO: 723018 - protein, 14 aa, Homo sapiens
  CDR3 for beta chain variable domain of TCR clone 361509 (TRBV7-2, TRBJ1-2)
CASSSQGAHYGYTF

SEQ ID NO: 723019 - protein, 13 aa, Homo sapiens
  CDR3 for alpha chain variable domain of TCR clone 361510 (TRAV21, TRAJ20)
CAVGLRVDYKLSF

SEQ ID NO: 723020 - protein, 15 aa, Homo sapiens
  CDR3 for beta chain variable domain of TCR clone 361510 (TRBV6-1, TRBJ1-1)
CLGGSSRQGNTEAFF

SEQ ID NO: 723021 - protein, 13 aa, Homo sapiens
  CDR3 for alpha chain variable domain of TCR clone 361511 (TRAV27, TRAJ24)
CAGDRDSWGKLQF

SEQ ID NO: 723022 - protein, 16 aa, Homo sapiens
  CDR3 for beta chain variable domain of TCR clone 361511 (TRBV6-1, TRBJ2-5)
CASSETLDRGAETQYF

SEQ ID NO: 723023 - protein, 15 aa, Homo sapiens
  CDR3 for alpha chain variable domain of TCR clone 361512 (TRAV17, TRAJ35)
CATAFVLGFGNVLHC

SEQ ID NO: 723024 - protein, 17 aa, Homo sapiens
  CDR3 for beta chain variable domain of TCR clone 361512 (TRBV7-3, TRBJ2-3)
CASSLMKRMRGADTQYF

SEQ ID NO: 723025 - protein, 13 aa, Homo sapiens
  CDR3 for alpha chain variable domain of TCR clone 361513 (TRAV12-3, TRAJ13)
CAMSSGGYQKVTF

SEQ ID NO: 723026 - protein, 13 aa, Homo sapiens
  CDR3 for beta chain variable domain of TCR clone 361513 (TRBV4-2, TRBJ1-1)
CASSQAGNTEAFF

SEQ ID NO: 723027 - protein, 16 aa, Homo sapiens
  CDR3 for alpha chain variable domain of TCR clone 361514 (TRAV38-2/DV8, TRAJ40)
CAYRTLGEPTNTSLEQ

SEQ ID NO: 723028 - protein, 16 aa, Homo sapiens
  CDR3 for beta chain variable domain of TCR clone 361514 (TRBV12-5, TRBJ2-5)
CASGPRTSGNQETQYF

SEQ ID NO: 723029 - protein, 11 aa, Homo sapiens
  CDR3 for alpha chain variable domain of TCR clone 361515 (TRAV2, TRAJ13)
CASGGYQKVIF

SEQ ID NO: 723030 - protein, 15 aa, Homo sapiens
  CDR3 for beta chain variable domain of TCR clone 361515 (TRBV19, TRBJ1-1)
CASTSGQIQNTEAFF

SEQ ID NO: 723031 - protein, 15 aa, Homo sapiens
  CDR3 for alpha chain variable domain of TCR clone 361516 (TRAV23/DV6, TRAJ32)
CAASKMGGATNKVIF

SEQ ID NO: 723032 - protein, 15 aa, Homo sapiens
  CDR3 for beta chain variable domain of TCR clone 361516 (TRBV4-3, TRBJ1-2)
CASSRGQGKNYGYTF

SEQ ID NO: 723033 - protein, 13 aa, Homo sapiens
  CDR3 for alpha chain variable domain of TCR clone 361517 (TRAV13-1, TRAJ23)
CAASGRGGGKLIF

SEQ ID NO: 723034 - protein, 15 aa, Homo sapiens
  CDR3 for beta chain variable domain of TCR clone 361517 (TRBV7-8, TRBJ1-5)
CASSLALGGQQPQHF

SEQ ID NO: 723035 - protein, 13 aa, Homo sapiens
  CDR3 for alpha chain variable domain of TCR clone 361518 (TRAV1-2, TRAJ9)
CAALNTGGFKTIF

SEQ ID NO: 723036 - protein, 16 aa, Homo sapiens
  CDR3 for beta chain variable domain of TCR clone 361518 (TRBV15, TRBJ1-2)
CATSRGPRTGGGGYTF

SEQ ID NO: 723037 - protein, 17 aa, Homo sapiens
  CDR3 for alpha chain variable domain of TCR clone 361519 (TRAV4, TRAJ18)
CLVGERSVGSTLGRLYF

SEQ ID NO: 723038 - protein, 16 aa, Homo sapiens
  CDR3 for beta chain variable domain of TCR clone 361519 (TRBV15, TRBJ1-4)
CATSRDSPQGREKLFF

SEQ ID NO: 723039 - protein, 15 aa, Homo sapiens
  CDR3 for alpha chain variable domain of TCR clone 361520 (TRAV34, TRAJ38)
CGADFTPGNNRKLIW

SEQ ID NO: 723040 - protein, 13 aa, Homo sapiens
  CDR3 for beta chain variable domain of TCR clone 361520 (TRBV20-1, TRBJ1-1)
CSARVGGNTEAFF

SEQ ID NO: 723041 - protein, 17 aa, Homo sapiens
  CDR3 for alpha chain variable domain of TCR clone 361521 (TRAV27, TRAJ26)
CAGARAPLDNNGQNFVF

SEQ ID NO: 723042 - protein, 15 aa, Homo sapiens
  CDR3 for beta chain variable domain of TCR clone 361521 (TRBV11-2, TRBJ2-5)
CASSPRSGGLETQYF

SEQ ID NO: 723043 - protein, 15 aa, Homo sapiens
  CDR3 for alpha chain variable domain of TCR clone 361522 (TRAV3, TRAJ36)
CAVRASQTGANNLFF

SEQ ID NO: 723044 - protein, 13 aa, Homo sapiens
  CDR3 for beta chain variable domain of TCR clone 361522 (TRBV10-3, TRBJ1-2)
CAISERDSYGYTF

SEQ ID NO: 723045 - protein, 12 aa, Homo sapiens
  CDR3 for alpha chain variable domain of TCR clone 361523 (TRAV25, TRAJ48)
CAGDFGNEKLTF

SEQ ID NO: 723046 - protein, 15 aa, Homo sapiens
  CDR3 for beta chain variable domain of TCR clone 361523 (TRBV28, TRBJ2-1)
CASSIIAGGRSEQFF

SEQ ID NO: 723047 - protein, 14 aa, Homo sapiens
  CDR3 for alpha chain variable domain of TCR clone 361524 (TRAV27, TRAJ36)
CAGPPKRGANNLFF

SEQ ID NO: 723048 - protein, 15 aa, Homo sapiens
  CDR3 for beta chain variable domain of TCR clone 361524 (TRBV18, TRBJ2-7)
CTSSPASTPNYEQYF

SEQ ID NO: 723049 - protein, 14 aa, Homo sapiens
  CDR3 for alpha chain variable domain of TCR clone 361525 (TRAV12-3, TRAJ12)
CAMSALDSSYKLIF

SEQ ID NO: 723050 - protein, 14 aa, Homo sapiens
  CDR3 for beta chain variable domain of TCR clone 361525 (TRBV7-9, TRBJ2-3)
CASSLGTVTDTQYF

SEQ ID NO: 723051 - protein, 17 aa, Homo sapiens
  CDR3 for alpha chain variable domain of TCR clone 361526 (TRAV38-1, TRAJ28)
CAFMKPTSWAGSYQLTF

SEQ ID NO: 723052 - protein, 15 aa, Homo sapiens
  CDR3 for beta chain variable domain of TCR clone 361526 (TRBV5-1, TRBJ2-4)
CASSLGGGGSYIQYF

SEQ ID NO: 723053 - protein, 16 aa, Homo sapiens
  CDR3 for alpha chain variable domain of TCR clone 361527 (TRAV30, TRAJ24)
CGTEIVDADSWGKFEF

SEQ ID NO: 723054 - protein, 16 aa, Homo sapiens
  CDR3 for beta chain variable domain of TCR clone 361527 (TRBV5-1, TRBJ2-1)
CASSLTIAGGRNEQFF

SEQ ID NO: 723055 - protein, 14 aa, Homo sapiens
  CDR3 for alpha chain variable domain of TCR clone 361528 (TRAV20, TRAJ36)
CAVQARTGANNLFF

SEQ ID NO: 723056 - protein, 15 aa, Homo sapiens
  CDR3 for beta chain variable domain of TCR clone 361528 (TRBV28, TRBJ2-7)
CACSLVLAGAREQYF

SEQ ID NO: 723057 - protein, 14 aa, Homo sapiens
  CDR3 for alpha chain variable domain of TCR clone 361529 (TRAV1-2, TRAJ16)
CAVNRFSDGQKLLF

SEQ ID NO: 723058 - protein, 14 aa, Homo sapiens
  CDR3 for beta chain variable domain of TCR clone 361529 (TRBV7-9, TRBJ2-7)
CASSIGQGAGERYF

SEQ ID NO: 723059 - protein, 12 aa, Homo sapiens
  CDR3 for alpha chain variable domain of TCR clone 361530 (TRAV4, TRAJ34)
CLVGEGTDKLIF

SEQ ID NO: 723060 - protein, 13 aa, Homo sapiens
  CDR3 for beta chain variable domain of TCR clone 361530 (TRBV2, TRBJ2-7)
CATSIGLVYEQYF

SEQ ID NO: 723061 - protein, 13 aa, Homo sapiens
  CDR3 for alpha chain variable domain of TCR clone 361531 (TRAV6, TRAJ16)
CALADSDGQKLLF

SEQ ID NO: 723062 - protein, 14 aa, Homo sapiens
  CDR3 for beta chain variable domain of TCR clone 361531 (TRBV12-4, TRBJ1-6)
CASNLRGKGSPLHF

SEQ ID NO: 723063 - protein, 14 aa, Homo sapiens
  CDR3 for alpha chain variable domain of TCR clone 361532 (TRAV10, TRAJ15)
CVVSASQAGTALIF

SEQ ID NO: 723064 - protein, 14 aa, Homo sapiens
  CDR3 for beta chain variable domain of TCR clone 361532 (TRBV7-8, TRBJ2-3)
CASSLEAGTDTQYF

SEQ ID NO: 723065 - protein, 22 aa, Homo sapiens
  CDR3 for alpha chain variable domain of TCR clone 361533 (TRAV8-2, TRAJ45)
HLTKPSAHMSDAAEYSADGLTF

SEQ ID NO: 723066 - protein, 17 aa, Homo sapiens
  CDR3 for beta chain variable domain of TCR clone 361533 (TRBV11-2, TRBJ2-1)
CASSLYPPGVEYNEQFF

SEQ ID NO: 723067 - protein, 19 aa, Homo sapiens
  CDR3 for alpha chain variable domain of TCR clone 361534 (TRAV26-1, TRAJ32)
CCVLLHRLGYGGATNKLIF

SEQ ID NO: 723068 - protein, 16 aa, Homo sapiens
  CDR3 for beta chain variable domain of TCR clone 361534 (TRBV10-3, TRBJ2-7)
CAISGPGTISIHEQYF

SEQ ID NO: 723069 - protein, 13 aa, Homo sapiens
  CDR3 for alpha chain variable domain of TCR clone 361535 (TRAV13-1, TRAJ13)
CAAFGGGYQKVTF

SEQ ID NO: 723070 - protein, 15 aa, Homo sapiens
  CDR3 for beta chain variable domain of TCR clone 361535 (TRBV10-2, TRBJ2-6)
CASSEQGTGANVLTF

SEQ ID NO: 723071 - protein, 11 aa, Homo sapiens
  CDR3 for alpha chain variable domain of TCR clone 361536 (TRAV8-3, TRAJ42)
NYVGSQGNLIF

SEQ ID NO: 723072 - protein, 17 aa, Homo sapiens
  CDR3 for beta chain variable domain of TCR clone 361536 (TRBV11-2, TRBJ2-1)
CASSLYPPGVEYNEQFF

SEQ ID NO: 723073 - protein, 14 aa, Homo sapiens
  CDR3 for alpha chain variable domain of TCR clone 361537 (TRAV12-2, TRAJ13)
CSVKKTGGYQKVTF

SEQ ID NO: 723074 - protein, 13 aa, Homo sapiens
  CDR3 for beta chain variable domain of TCR clone 361537 (TRBV20-1, TRBJ1-1)
CSARGGGNTEAFF

SEQ ID NO: 723075 - protein, 16 aa, Homo sapiens
  CDR3 for alpha chain variable domain of TCR clone 361538 (TRAV8-3, TRAJ52)
CAVQPAGGTSYGKLTF

SEQ ID NO: 723076 - protein, 15 aa, Homo sapiens
  CDR3 for beta chain variable domain of TCR clone 361538 (TRBV11-2, TRBJ2-7)
CASSLAGEVATEQYF

SEQ ID NO: 723077 - protein, 12 aa, Homo sapiens
  CDR3 for alpha chain variable domain of TCR clone 361539 (TRAV4, TRAJ6)
CLAPGGSYISTF

SEQ ID NO: 723078 - protein, 17 aa, Homo sapiens
  CDR3 for beta chain variable domain of TCR clone 361539 (TRBV20-1, TRBJ2-2)
CSASGSGQGGLTGELFF

SEQ ID NO: 723079 - protein, 11 aa, Homo sapiens
  CDR3 for alpha chain variable domain of TCR clone 361540 (TRAV21, TRAJ32)
CAVEIMVVLQT

SEQ ID NO: 723080 - protein, 13 aa, Homo sapiens
  CDR3 for beta chain variable domain of TCR clone 361540 (TRBV2, TRBJ1-6)
CASGRGGIPPLHF

SEQ ID NO: 723081 - protein, 14 aa, Homo sapiens
  CDR3 for alpha chain variable domain of TCR clone 361541 (TRAV12-1, TRAJ45)
CVVNIGGGADGLTF

SEQ ID NO: 723082 - protein, 15 aa, Homo sapiens
  CDR3 for beta chain variable domain of TCR clone 361541 (TRBV11-3, TRBJ2-3)
CASLKDGREGDTQYF

SEQ ID NO: 723083 - protein, 11 aa, Homo sapiens
  CDR3 for alpha chain variable domain of TCR clone 361542 (TRAV13-2, TRAJ20)
CADSNDYKLSF

SEQ ID NO: 723084 - protein, 13 aa, Homo sapiens
  CDR3 for beta chain variable domain of TCR clone 361542 (TRBV12-5, TRBJ2-3)
CASGDRQSDTQYF

SEQ ID NO: 723085 - protein, 12 aa, Homo sapiens
  CDR3 for alpha chain variable domain of TCR clone 361543 (TRAV27, TRAJ35)
CAGADFGNVLHC

SEQ ID NO: 723086 - protein, 12 aa, Homo sapiens
  CDR3 for beta chain variable domain of TCR clone 361543 (TRBV6-3, TRBJ2-7)
CASSEPGFEQYF

SEQ ID NO: 723087 - protein, 13 aa, Homo sapiens
  CDR3 for alpha chain variable domain of TCR clone 361544 (TRAV13-1, TRAJ10)
CAALEGGGNKLTF

SEQ ID NO: 723088 - protein, 13 aa, Homo sapiens
  CDR3 for beta chain variable domain of TCR clone 361544 (TRBV7-9, TRBJ1-2)
CASTLKQNYGYTF

SEQ ID NO: 723089 - protein, 16 aa, Homo sapiens
  CDR3 for alpha chain variable domain of TCR clone 361545 (TRAV8-3, TRAJ8)
CAVPRDGNTGFQKLVF

SEQ ID NO: 723090 - protein, 15 aa, Homo sapiens
  CDR3 for beta chain variable domain of TCR clone 361545 (TRBV6-1, TRBJ2-6)
CASSSRPSGANDLIF

SEQ ID NO: 723091 - protein, 14 aa, Homo sapiens
  CDR3 for alpha chain variable domain of TCR clone 361546 (TRAV1-2, TRAJ16)
CAVNRVSDGQKLLF

SEQ ID NO: 723092 - protein, 12 aa, Homo sapiens
  CDR3 for beta chain variable domain of TCR clone 361546 (TRBV14, TRBJ1-1)
CASSQLKGLAFF

SEQ ID NO: 723093 - protein, 23 aa, Homo sapiens
  CDR3 for alpha chain variable domain of TCR clone 361547 (TRAV21, TRAJ9)
CAVEAVALEASKLSLEQEQDYLF

SEQ ID NO: 723094 - protein, 13 aa, Homo sapiens
  CDR3 for beta chain variable domain of TCR clone 361547 (TRBV12-4, TRBJ1-2)
CASSSGLTVISTF

SEQ ID NO: 723095 - protein, 13 aa, Homo sapiens
  CDR3 for alpha chain variable domain of TCR clone 361548 (TRAV8-3, TRAJ43)
CAVGPDNNNDMRI

SEQ ID NO: 723096 - protein, 14 aa, Homo sapiens
  CDR3 for beta chain variable domain of TCR clone 361548 (TRBV19, TRBJ2-1)
CASPTFVLGGEQFF

SEQ ID NO: 723097 - protein, 12 aa, Homo sapiens
  CDR3 for alpha chain variable domain of TCR clone 361549 (TRAV21, TRAJ13)
PGPSGGYQKVTF

SEQ ID NO: 723098 - protein, 14 aa, Homo sapiens
  CDR3 for beta chain variable domain of TCR clone 361549 (TRBV5-4, TRBJ1-1)
CASSLDSRRDEAFF

SEQ ID NO: 723099 - protein, 14 aa, Homo sapiens
  CDR3 for alpha chain variable domain of TCR clone 361550 (TRAV1-2, TRAJ16)
CAVNRCSEGQKLLF

SEQ ID NO: 723100 - protein, 16 aa, Homo sapiens
  CDR3 for beta chain variable domain of TCR clone 361550 (TRBV27, TRBJ2-2)
CASSFRGLVRTGELFF

SEQ ID NO: 723101 - protein, 17 aa, Homo sapiens
  CDR3 for alpha chain variable domain of TCR clone 361551 (TRAV3, TRAJ12)
CAVRDGGRMDGSYKLIF

SEQ ID NO: 723102 - protein, 16 aa, Homo sapiens
  CDR3 for beta chain variable domain of TCR clone 361551 (TRBV12-5, TRBJ2-5)
CASGPRTSGNQETQYF

SEQ ID NO: 723103 - protein, 14 aa, Homo sapiens
  CDR3 for alpha chain variable domain of TCR clone 361552 (TRAV9-2, TRAJ39)
CALYIYNAGNMLNF

SEQ ID NO: 723104 - protein, 15 aa, Homo sapiens
  CDR3 for beta chain variable domain of TCR clone 361552 (TRBV28, TRBJ1-5)
CASSRTGGYVQPQHF

SEQ ID NO: 723105 - protein, 15 aa, Homo sapiens
  CDR3 for alpha chain variable domain of TCR clone 361553 (TRAV3, TRAJ5)
CAVRDRKTGSRALTF

SEQ ID NO: 723106 - protein, 15 aa, Homo sapiens
  CDR3 for beta chain variable domain of TCR clone 361553 (TRBV7-9, TRBJ2-2)
CASGPLDTFPGELFF

SEQ ID NO: 723107 - protein, 11 aa, Homo sapiens
  CDR3 for alpha chain variable domain of TCR clone 361554 (TRAV2, TRAJ13)
CASGGYQKVTF

SEQ ID NO: 723108 - protein, 17 aa, Homo sapiens
  CDR3 for beta chain variable domain of TCR clone 361554 (TRBV11-2, TRBJ2-1)
CASSLYPPGIEYNEQFF

SEQ ID NO: 723109 - protein, 15 aa, Homo sapiens
  CDR3 for alpha chain variable domain of TCR clone 361555 (TRAV38-1, TRAJ37)
CVFIFGSGNTGKLIF

SEQ ID NO: 723110 - protein, 13 aa, Homo sapiens
  CDR3 for beta chain variable domain of TCR clone 361555 (TRBV19, TRBJ1-2)
CASSVPGQDGNTF

SEQ ID NO: 723111 - protein, 13 aa, Homo sapiens
  CDR3 for alpha chain variable domain of TCR clone 361556 (TRAV29/DV5, TRAJ31)
CAASRNNNARLMF

SEQ ID NO: 723112 - protein, 13 aa, Homo sapiens
  CDR3 for beta chain variable domain of TCR clone 361556 (TRBV27, TRBJ1-4)
CASSLMGDEKLFF

SEQ ID NO: 723113 - protein, 16 aa, Homo sapiens
  CDR3 for alpha chain variable domain of TCR clone 361557 (TRAV30, TRAJ24)
CGTEIVDANSWGKFQF

SEQ ID NO: 723114 - protein, 13 aa, Homo sapiens
  CDR3 for beta chain variable domain of TCR clone 361557 (TRBV18, TRBJ1-2)
CASSASATEGYTF

SEQ ID NO: 723115 - protein, 15 aa, Homo sapiens
  CDR3 for alpha chain variable domain of TCR clone 361558 (TRAV13-1, TRAJ32)
CAASIYGGATNKLIF

SEQ ID NO: 723116 - protein, 15 aa, Homo sapiens
  CDR3 for beta chain variable domain of TCR clone 361558 (TRBV2, TRBJ2-4)
CASSLKTGSSNIQYF

SEQ ID NO: 723117 - protein, 15 aa, Homo sapiens
  CDR3 for alpha chain variable domain of TCR clone 361559 (TRAV3, TRAJ29)
CAVRDINSGNTPLVF

SEQ ID NO: 723118 - protein, 16 aa, Homo sapiens
  CDR3 for beta chain variable domain of TCR clone 361559 (TRBV4-1, TRBJ2-5)
WASSQTFYGDQETQYF

SEQ ID NO: 723119 - protein, 12 aa, Homo sapiens
  CDR3 for alpha chain variable domain of TCR clone 361560 (TRAV13-1, TRAJ21)
CAAKEGVTKFYF

SEQ ID NO: 723120 - protein, 20 aa, Homo sapiens
  CDR3 for beta chain variable domain of TCR clone 361560 (TRBV28, TRBJ2-1)
CASTPIGRSPGLAGGNEQFF

SEQ ID NO: 723121 - protein, 13 aa, Homo sapiens
  CDR3 for alpha chain variable domain of TCR clone 361561 (TRAV2, TRAJ40)
CAVVTSGTYKYIF

SEQ ID NO: 723122 - protein, 17 aa, Homo sapiens
  CDR3 for beta chain variable domain of TCR clone 361561 (TRBV24-1, TRBJ2-4)
CATSDAEARGVRNIQYF

SEQ ID NO: 723123 - protein, 13 aa, Homo sapiens
  CDR3 for alpha chain variable domain of TCR clone 361562 (TRAV21, TRAJ20)
CAVGLRVDYKLSF

SEQ ID NO: 723124 - protein, 13 aa, Homo sapiens
  CDR3 for beta chain variable domain of TCR clone 361562 (TRBV6-1, TRBJ1-1)
CASSRQGNTEAFF

SEQ ID NO: 723125 - protein, 13 aa, Homo sapiens
  CDR3 for alpha chain variable domain of TCR clone 361563 (TRAV8-6, TRAJ21)
CAVSPSSLNKFYF

SEQ ID NO: 723126 - protein, 14 aa, Homo sapiens
  CDR3 for beta chain variable domain of TCR clone 361563 (TRBV7-9, TRBJ2-5)
CASSLDKAQETQYF

SEQ ID NO: 723127 - protein, 15 aa, Homo sapiens
  CDR3 for alpha chain variable domain of TCR clone 361564 (TRAV26-2, TRAJ28)
CILVESGAGCYQLTF

SEQ ID NO: 723128 - protein, 11 aa, Homo sapiens
  CDR3 for beta chain variable domain of TCR clone 361564 (TRBV25-1, TRBJ2-7)
CASSTSYEQYF

SEQ ID NO: 723129 - protein, 16 aa, Homo sapiens
  CDR3 for alpha chain variable domain of TCR clone 361565 (TRAV21, TRAJ17)
CAVRPGEEAAGNKLTF

SEQ ID NO: 723130 - protein, 16 aa, Homo sapiens
  CDR3 for beta chain variable domain of TCR clone 361565 (TRBV2, TRBJ2-7)
CASSEPWTAPSYEQYF

SEQ ID NO: 723131 - protein, 14 aa, Homo sapiens
  CDR3 for alpha chain variable domain of TCR clone 361566 (TRAV29/DV5, TRAJ36)
CAARRKTGANNIFF

SEQ ID NO: 723132 - protein, 15 aa, Homo sapiens
  CDR3 for beta chain variable domain of TCR clone 361566 (TRBV29-1, TRBJ2-1)
CSGRDRKSSYNEQFF

SEQ ID NO: 723133 - protein, 10 aa, Homo sapiens
  CDR3 for alpha chain variable domain of TCR clone 361567 (TRAV39, TRAJ49)
CAVAGNQFYF

SEQ ID NO: 723134 - protein, 14 aa, Homo sapiens
  CDR3 for beta chain variable domain of TCR clone 361567 (TRBV7-8, TRBJ2-7)
CASSPRDRFYEQYF

SEQ ID NO: 723135 - protein, 15 aa, Homo sapiens
  CDR3 for alpha chain variable domain of TCR clone 361568 (TRAV38-2/DV8, TRAJ31)
CAYRTETRNNARLMF

SEQ ID NO: 723136 - protein, 15 aa, Homo sapiens
  CDR3 for beta chain variable domain of TCR clone 361568 (TRBV6-6, TRBJ2-7)
CASSYSYGGSYEQYF

SEQ ID NO: 723137 - protein, 13 aa, Homo sapiens
  CDR3 for alpha chain variable domain of TCR clone 361569 (TRAV8-3, TRAJ44)
CAVVPGTASKLTF

SEQ ID NO: 723138 - protein, 22 aa, Homo sapiens
  CDR3 for beta chain variable domain of TCR clone 361569 (TRBV29-1, TRBJ2-5)
TVSNMSPEDSSIYLCSAGTQYF

SEQ ID NO: 723139 - protein, 16 aa, Homo sapiens
  CDR3 for alpha chain variable domain of TCR clone 361570 (TRAV12-3, TRAJ53)
CAMSPGSGGSNYKLTF

SEQ ID NO: 723140 - protein, 12 aa, Homo sapiens
  CDR3 for beta chain variable domain of TCR clone 361570 (TRBV7-8, TRBJ2-7)
CASSLGDREHYF

SEQ ID NO: 723141 - protein, 15 aa, Homo sapiens
  CDR3 for alpha chain variable domain of TCR clone 361571 (TRAV12-1, TRAJ23)
CGERSRCNQGGKLIF

SEQ ID NO: 723142 - protein, 16 aa, Homo sapiens
  CDR3 for beta chain variable domain of TCR clone 361571 (TRBV7-9, TRBJ1-2)
CASSLGFSSGEDGYTF

SEQ ID NO: 723143 - protein, 14 aa, Homo sapiens
  CDR3 for alpha chain variable domain of TCR clone 361572 (TRAV35, TRAJ50)
CAGHRKTSYDKVIF

SEQ ID NO: 723144 - protein, 13 aa, Homo sapiens
  CDR3 for beta chain variable domain of TCR clone 361572 (TRBV7-9, TRBJ2-3)
CTSSPGSTGTQYF

SEQ ID NO: 723145 - protein, 14 aa, Homo sapiens
  CDR3 for alpha chain variable domain of TCR clone 361573 (TRAV1-2, TRAJ16)
CAVNRFSDGQKLLF

SEQ ID NO: 723146 - protein, 13 aa, Homo sapiens
  CDR3 for beta chain variable domain of TCR clone 361573 (TRBV24-1, TRBJ2-2)
CAASDWSTGELFF

SEQ ID NO: 723147 - protein, 14 aa, Homo sapiens
  CDR3 for alpha chain variable domain of TCR clone 361574 (TRAV12-2, TRAJ13)
CAVKKTGGYQKVTF

SEQ ID NO: 723148 - protein, 13 aa, Homo sapiens
  CDR3 for beta chain variable domain of TCR clone 361574 (TRBV3-1, TRBJ1-1)
CASSQGAGTEAFF

SEQ ID NO: 723149 - protein, 14 aa, Homo sapiens
  CDR3 for alpha chain variable domain of TCR clone 361575 (TRAV14/DV4, TRAJ15)
CAMRRDPAGTALIF

SEQ ID NO: 723150 - protein, 11 aa, Homo sapiens
  CDR3 for beta chain variable domain of TCR clone 361575 (TRBV7-2, TRBJ2-7)
CASSSGLWQYF

SEQ ID NO: 723151 - protein, 13 aa, Homo sapiens
  CDR3 for alpha chain variable domain of TCR clone 361576 (TRAV12-1, TRAJ6)
CVVYPGGSHIPTF

SEQ ID NO: 723152 - protein, 13 aa, Homo sapiens
  CDR3 for beta chain variable domain of TCR clone 361576 (TRBV4-2, TRBJ1-1)
CASSQAGNTEAFF

SEQ ID NO: 723153 - protein, 13 aa, Homo sapiens
  CDR3 for alpha chain variable domain of TCR clone 361577 (TRAV8-2, TRAJ43)
CVVSDQGDNDMRF

SEQ ID NO: 723154 - protein, 12 aa, Homo sapiens
  CDR3 for beta chain variable domain of TCR clone 361577 (TRBV7-9, TRBJ2-7)
CAGRTGFDEQYF

SEQ ID NO: 723155 - protein, 14 aa, Homo sapiens
  CDR3 for alpha chain variable domain of TCR clone 361578 (TRAV12-3, TRAJ20)
CAMSARRGAYKLSF

SEQ ID NO: 723156 - protein, 14 aa, Homo sapiens
  CDR3 for beta chain variable domain of TCR clone 361578 (TRBV7-3, TRBJ2-3)
CASSPSARTDTQYF

SEQ ID NO: 723157 - protein, 16 aa, Homo sapiens
  CDR3 for alpha chain variable domain of TCR clone 361579 (TRAV3, TRAJ10)
CAVRDMNAGGGNKLTF

SEQ ID NO: 723158 - protein, 16 aa, Homo sapiens
  CDR3 for beta chain variable domain of TCR clone 361579 (TRBV6-3, TRBJ1-2)
CARSYSRRASNYGYTF

SEQ ID NO: 723159 - protein, 14 aa, Homo sapiens
  CDR3 for alpha chain variable domain of TCR clone 361580 (TRAV12-2, TRAJ13)
CAVKKTEGYQKVTF

SEQ ID NO: 723160 - protein, 18 aa, Homo sapiens
  CDR3 for beta chain variable domain of TCR clone 361580 (TRBV4-3, TRBJ2-5)
CASSQGHVIGEVEETQYF

SEQ ID NO: 723161 - protein, 14 aa, Homo sapiens
  CDR3 for alpha chain variable domain of TCR clone 361581 (TRAV8-2, TRAJ4)
CVVSPSGGYTKLIF

SEQ ID NO: 723162 - protein, 15 aa, Homo sapiens
  CDR3 for beta chain variable domain of TCR clone 361581 (TRBV2, TRBJ2-1)
CASSELAGSYNEQFF

SEQ ID NO: 723163 - protein, 13 aa, Homo sapiens
  CDR3 for alpha chain variable domain of TCR clone 361582 (TRAV12-2, TRAJ4)
CAGFSGGYNKLIF

SEQ ID NO: 723164 - protein, 14 aa, Homo sapiens
  CDR3 for beta chain variable domain of TCR clone 361582 (TRBV19, TRBJ2-1)
CASPTFVLSGEQFF

SEQ ID NO: 723165 - protein, 14 aa, Homo sapiens
  CDR3 for alpha chain variable domain of TCR clone 361583 (TRAV29/DV5, TRAJ44)
CGAFLVGTASKLTF

SEQ ID NO: 723166 - protein, 15 aa, Homo sapiens
  CDR3 for beta chain variable domain of TCR clone 361583 (TRBV7-3, TRBJ2-2)
CASSETGQGTGELFF

SEQ ID NO: 723167 - protein, 15 aa, Homo sapiens
  CDR3 for alpha chain variable domain of TCR clone 361584 (TRAV17, TRAJ16)
CATALRFSDGQKLLF

SEQ ID NO: 723168 - protein, 12 aa, Homo sapiens
  CDR3 for beta chain variable domain of TCR clone 361584 (TRBV7-8, TRBJ2-7)
CASSLGDREKYF

SEQ ID NO: 723169 - protein, 16 aa, Homo sapiens
  CDR3 for alpha chain variable domain of TCR clone 361585 (TRAV26-1, TRAJ37)
CIVRGDGSGNTGKLIF

SEQ ID NO: 723170 - protein, 13 aa, Homo sapiens
  CDR3 for beta chain variable domain of TCR clone 361585 (TRBV7-2, TRBJ2-5)
CQQLVRGGETQYF

SEQ ID NO: 723171 - protein, 15 aa, Homo sapiens
  CDR3 for alpha chain variable domain of TCR clone 361586 (TRAV17, TRAJ56)
CATDANSGANSKLTF

SEQ ID NO: 723172 - protein, 12 aa, Homo sapiens
  CDR3 for beta chain variable domain of TCR clone 361586 (TRBV7-8, TRBJ2-7)
CASSLGDREQYF

SEQ ID NO: 723173 - protein, 13 aa, Homo sapiens
  CDR3 for alpha chain variable domain of TCR clone 361587 (TRAV13-1, TRAJ20)
CAARVSNDYKLSF

SEQ ID NO: 723174 - protein, 16 aa, Homo sapiens
  CDR3 for beta chain variable domain of TCR clone 361587 (TRBV4-3, TRBJ2-1)
CASSPALDRGVNEQFF

SEQ ID NO: 723175 - protein, 15 aa, Homo sapiens
  CDR3 for alpha chain variable domain of TCR clone 361588 (TRAV26-2, TRAJ39)
CSLRGNNNEGNMLTF

SEQ ID NO: 723176 - protein, 15 aa, Homo sapiens
  CDR3 for beta chain variable domain of TCR clone 361588 (TRBV5-4, TRBJ1-1)
CASSSLGWANTEAFF

SEQ ID NO: 723177 - protein, 17 aa, Homo sapiens
  CDR3 for alpha chain variable domain of TCR clone 361589 (TRAV13-1, TRAJ52)
CAAGRNAGGTSYGKLTY

SEQ ID NO: 723178 - protein, 12 aa, Homo sapiens
  CDR3 for beta chain variable domain of TCR clone 361589 (TRBV29-1, TRBJ1-3)
CSTRDSGNTIYF

SEQ ID NO: 723179 - protein, 11 aa, Homo sapiens
  CDR3 for alpha chain variable domain of TCR clone 361590 (TRAV35, TRAJ30)
YAGPGDDKIIF

SEQ ID NO: 723180 - protein, 14 aa, Homo sapiens
  CDR3 for beta chain variable domain of TCR clone 361590 (TRBV7-6, TRBJ1-6)
CASSQAGGGSPLHF

SEQ ID NO: 723181 - protein, 14 aa, Homo sapiens
  CDR3 for alpha chain variable domain of TCR clone 361591 (TRAV26-1, TRAJ30)
CIVRVRTEMTRTSL

SEQ ID NO: 723182 - protein, 18 aa, Homo sapiens
  CDR3 for beta chain variable domain of TCR clone 361591 (TRBV4-1, TRBJ1-5)
CASSQDPRGQGLNQPQHF

SEQ ID NO: 723183 - protein, 13 aa, Homo sapiens
  CDR3 for alpha chain variable domain of TCR clone 361592 (TRAV12-3, TRAJ6)
CANPSGGSYIPTF

SEQ ID NO: 723184 - protein, 16 aa, Homo sapiens
  CDR3 for beta chain variable domain of TCR clone 361592 (TRBV9, TRBJ2-1)
CASSVGGGGNYNEQFF

SEQ ID NO: 723185 - protein, 13 aa, Homo sapiens
  CDR3 for alpha chain variable domain of TCR clone 361593 (TRAV2, TRAJ40)
CAVVTSGTYKYIF

SEQ ID NO: 723186 - protein, 16 aa, Homo sapiens
  CDR3 for beta chain variable domain of TCR clone 361593 (TRBV2, TRBJ2-7)
CASSEPWTGPSYEQYF

SEQ ID NO: 723187 - protein, 17 aa, Homo sapiens
  CDR3 for alpha chain variable domain of TCR clone 361594 (TRAV12-2, TRAJ52)
CAVNPYAGGTSYGKLTL

SEQ ID NO: 723188 - protein, 16 aa, Homo sapiens
  CDR3 for beta chain variable domain of TCR clone 361594 (TRBV5-5, TRBJ2-2)
CASSGRREGATGELFF

SEQ ID NO: 723189 - protein, 15 aa, Homo sapiens
  CDR3 for alpha chain variable domain of TCR clone 361595 (TRAV3, TRAJ5)
CAVRDRKTGRRALTF

SEQ ID NO: 723190 - protein, 15 aa, Homo sapiens
  CDR3 for beta chain variable domain of TCR clone 361595 (TRBV7-8, TRBJ2-1)
CASSLADSLYIEQFF

SEQ ID NO: 723191 - protein, 12 aa, Homo sapiens
  CDR3 for alpha chain variable domain of TCR clone 361596 (TRAV12-2, TRAJ20)
SAVRPSDYKLSF

SEQ ID NO: 723192 - protein, 14 aa, Homo sapiens
  CDR3 for beta chain variable domain of TCR clone 361596 (TRBV6-1, TRBJ2-7)
CASNRARPDYEQYF

SEQ ID NO: 723193 - protein, 13 aa, Homo sapiens
  CDR3 for alpha chain variable domain of TCR clone 361597 (TRAV2, TRAJ21)
CAVEDLNFNKFYF

SEQ ID NO: 723194 - protein, 15 aa, Homo sapiens
  CDR3 for beta chain variable domain of TCR clone 361597 (TRBV28, TRBJ2-5)
CASSPGQGSIEQQYF

SEQ ID NO: 723195 - protein, 14 aa, Homo sapiens
  CDR3 for alpha chain variable domain of TCR clone 361598 (TRAV1-2, TRAJ8)
CAVREDTGFQKLVF

SEQ ID NO: 723196 - protein, 16 aa, Homo sapiens
  CDR3 for beta chain variable domain of TCR clone 361598 (TRBV27, TRBJ2-1)
CASSSRLAGNYNEQFF

SEQ ID NO: 723197 - protein, 15 aa, Homo sapiens
  CDR3 for alpha chain variable domain of TCR clone 361599 (TRAV21, TRAJ53)
CATLNSGGSNYELTF

SEQ ID NO: 723198 - protein, 16 aa, Homo sapiens
  CDR3 for beta chain variable domain of TCR clone 361599 (TRBV9, TRBJ2-1)
CASSVGGGGNYNEQFF

SEQ ID NO: 723199 - protein, 15 aa, Homo sapiens
  CDR3 for alpha chain variable domain of TCR clone 361600 (TRAV13-1, TRAJ44)
CAASRNTGTASKLTF

SEQ ID NO: 723200 - protein, 14 aa, Homo sapiens
  CDR3 for beta chain variable domain of TCR clone 361600 (TRBV2, TRBJ2-7)
CVSSLTSGGYEQYF

SEQ ID NO: 723201 - protein, 15 aa, Homo sapiens
  CDR3 for alpha chain variable domain of TCR clone 361601 (TRAV21, TRAJ53)
CATLNSGGSNYKLTF

SEQ ID NO: 723202 - protein, 17 aa, Homo sapiens
  CDR3 for beta chain variable domain of TCR clone 361601 (TRBV19, TRBJ2-1)
CASSIWSASLPTMSSSS

SEQ ID NO: 723203 - protein, 15 aa, Homo sapiens
  CDR3 for alpha chain variable domain of TCR clone 361602 (TRAV35, TRAJ42)
CAGQLRGGSQGNLIF

SEQ ID NO: 723204 - protein, 16 aa, Homo sapiens
  CDR3 for beta chain variable domain of TCR clone 361602 (TRBV7-8, TRBJ2-4)
CASSAERTLAKNIQYF

SEQ ID NO: 723205 - protein, 12 aa, Homo sapiens
  CDR3 for alpha chain variable domain of TCR clone 361603 (TRAV3, TRAJ31)
CAVRDGNARLMF

SEQ ID NO: 723206 - protein, 13 aa, Homo sapiens
  CDR3 for beta chain variable domain of TCR clone 361603 (TRBV18, TRBJ2-7)
CASQSGGGYEQYF

SEQ ID NO: 723207 - protein, 14 aa, Homo sapiens
  CDR3 for alpha chain variable domain of TCR clone 361604 (TRAV3, TRAJ36)
CAVRDGTGANNLFF

SEQ ID NO: 723208 - protein, 16 aa, Homo sapiens
  CDR3 for beta chain variable domain of TCR clone 361604 (TRBV20-1, TRBJ1-4)
CSAPGQGLLTNEKLFF

SEQ ID NO: 723209 - protein, 14 aa, Homo sapiens
  CDR3 for alpha chain variable domain of TCR clone 361605 (TRAV12-3, TRAJ57)
CARALEGGSEKLVF

SEQ ID NO: 723210 - protein, 16 aa, Homo sapiens
  CDR3 for beta chain variable domain of TCR clone 361605 (TRBV7-3, TRBJ2-2)
CASSLKRGTLSGELFF

SEQ ID NO: 723211 - protein, 13 aa, Homo sapiens
  CDR3 for alpha chain variable domain of TCR clone 361606 (TRAV13-1, TRAJ37)
CAARSGNIGKLIF

SEQ ID NO: 723212 - protein, 14 aa, Homo sapiens
  CDR3 for beta chain variable domain of TCR clone 361606 (TRBV12-4, TRBJ2-3)
CASSLGQGTDTQYF

SEQ ID NO: 723213 - protein, 14 aa, Homo sapiens
  CDR3 for alpha chain variable domain of TCR clone 361607 (TRAV29/DV5, TRAJ32)
CAAAYGGATNKHIF

SEQ ID NO: 723214 - protein, 15 aa, Homo sapiens
  CDR3 for beta chain variable domain of TCR clone 361607 (TRBV27, TRBJ2-7)
CASSTAGTGSYEQYF

SEQ ID NO: 723215 - protein, 14 aa, Homo sapiens
  CDR3 for alpha chain variable domain of TCR clone 361608 (TRAV12-2, TRAJ6)
CALPPSGGSYIPTF

SEQ ID NO: 723216 - protein, 15 aa, Homo sapiens
  CDR3 for beta chain variable domain of TCR clone 361608 (TRBV7-2, TRBJ1-2)
CASSPRAGWNYGYTF

SEQ ID NO: 723217 - protein, 13 aa, Homo sapiens
  CDR3 for alpha chain variable domain of TCR clone 361609 (TRAV26-1, TRAJ20)
CIVRVDSDYKLSF

SEQ ID NO: 723218 - protein, 12 aa, Homo sapiens
  CDR3 for beta chain variable domain of TCR clone 361609 (TRBV14, TRBJ2-5)
CASSQLKETQYF

SEQ ID NO: 723219 - protein, 14 aa, Homo sapiens
  CDR3 for alpha chain variable domain of TCR clone 361610 (TRAV12-3, TRAJ10)
SHLPLTGGGNKLTF

SEQ ID NO: 723220 - protein, 14 aa, Homo sapiens
  CDR3 for beta chain variable domain of TCR clone 361610 (TRBV7-9, TRBJ2-7)
CASSIKREEQYLGR

SEQ ID NO: 723221 - protein, 14 aa, Homo sapiens
  CDR3 for alpha chain variable domain of TCR clone 361611 (TRAV1-2, TRAJ16)
CAVNRFSDGQKLLF

SEQ ID NO: 723222 - protein, 14 aa, Homo sapiens
  CDR3 for beta chain variable domain of TCR clone 361611 (TRBV20-1, TRBJ1-1)
GSAQTRIGGTEAFF

SEQ ID NO: 723223 - protein, 14 aa, Homo sapiens
  CDR3 for alpha chain variable domain of TCR clone 361612 (TRAV1-2, TRAJ24)
CAVLTTDSWGKFQF

SEQ ID NO: 723224 - protein, 17 aa, Homo sapiens
  CDR3 for beta chain variable domain of TCR clone 361612 (TRBV20-1, TRBJ2-2)
CSASGSGQGGLTGELFF

SEQ ID NO: 723225 - protein, 15 aa, Homo sapiens
  CDR3 for alpha chain variable domain of TCR clone 361613 (TRAV17, TRAJ45)
CATAELGGVADGLTF

SEQ ID NO: 723226 - protein, 14 aa, Homo sapiens
  CDR3 for beta chain variable domain of TCR clone 361613 (TRBV3-1, TRBJ2-5)
CASSQAVRQETQYF

SEQ ID NO: 723227 - protein, 14 aa, Homo sapiens
  CDR3 for alpha chain variable domain of TCR clone 361614 (TRAV1-2, TRAJ29)
CDVRELTSATPLVF

SEQ ID NO: 723228 - protein, 14 aa, Homo sapiens
  CDR3 for beta chain variable domain of TCR clone 361614 (TRBV3-1, TRBJ2-5)
CASSQGPDQETQYF

SEQ ID NO: 723229 - protein, 15 aa, Homo sapiens
  CDR3 for alpha chain variable domain of TCR clone 361615 (TRAV17, TRAJ57)
CATGHSQGGSEKLVF

SEQ ID NO: 723230 - protein, 15 aa, Homo sapiens
  CDR3 for beta chain variable domain of TCR clone 361615 (TRBV25-1, TRBJ1-4)
CASSPGDSTNEKLFF

SEQ ID NO: 723231 - protein, 12 aa, Homo sapiens
  CDR3 for alpha chain variable domain of TCR clone 361616 (TRAV1-2, TRAJ42)
CVAGGSQGNLIF

SEQ ID NO: 723232 - protein, 17 aa, Homo sapiens
  CDR3 for beta chain variable domain of TCR clone 361616 (TRBV11-2, TRBJ2-1)
CASSLYPPGVEYNEQFF

SEQ ID NO: 723233 - protein, 15 aa, Homo sapiens
  CDR3 for alpha chain variable domain of TCR clone 361617 (TRAV8-3, TRAJ45)
CASSYSGGGADGLTF

SEQ ID NO: 723234 - protein, 16 aa, Homo sapiens
  CDR3 for beta chain variable domain of TCR clone 361617 (TRBV5-1, TRBJ2-7)
CASSWGTGGRAWEQYF

SEQ ID NO: 723235 - protein, 12 aa, Homo sapiens
  CDR3 for alpha chain variable domain of TCR clone 361618 (TRAV21, TRAJ34)
CAVRGNTDKLIF

SEQ ID NO: 723236 - protein, 13 aa, Homo sapiens
  CDR3 for beta chain variable domain of TCR clone 361618 (TRBV10-2, TRBJ2-7)
CASGASGGYEHDF

SEQ ID NO: 723237 - protein, 14 aa, Homo sapiens
  CDR3 for alpha chain variable domain of TCR clone 361619 (TRAV20, TRAJ56)
CAVQFGGANSKLTF

SEQ ID NO: 723238 - protein, 14 aa, Homo sapiens
  CDR3 for beta chain variable domain of TCR clone 361619 (TRBV20-1, TRBJ2-7)
CSAKRGRSSNEQYF

SEQ ID NO: 723239 - protein, 16 aa, Homo sapiens
  CDR3 for alpha chain variable domain of TCR clone 361620 (TRAV12-1, TRAJ22)
CVVNTISSGSARQLTF

SEQ ID NO: 723240 - protein, 13 aa, Homo sapiens
  CDR3 for beta chain variable domain of TCR clone 361620 (TRBV19, TRBJ2-1)
CASNGRVFSEQFF

SEQ ID NO: 723241 - protein, 13 aa, Homo sapiens
  CDR3 for alpha chain variable domain of TCR clone 361621 (TRAV12-3, TRAJ33)
CAMSVNSNYQLIW

SEQ ID NO: 723242 - protein, 14 aa, Homo sapiens
  CDR3 for beta chain variable domain of TCR clone 361621 (TRBV25-1, TRBJ1-1)
CASTRLGENTEAFF

SEQ ID NO: 723243 - protein, 12 aa, Homo sapiens
  CDR3 for alpha chain variable domain of TCR clone 361622 (TRAV12-1, TRAJ40)
CVVYSGTYKYIF

SEQ ID NO: 723244 - protein, 12 aa, Homo sapiens
  CDR3 for beta chain variable domain of TCR clone 361622 (TRBV7-9, TRBJ2-7)
CASSFGSYEQYF

SEQ ID NO: 723245 - protein, 12 aa, Homo sapiens
  CDR3 for alpha chain variable domain of TCR clone 361623 (TRAV12-3, TRAJ39)
CAMTQAGNMLTF

SEQ ID NO: 723246 - protein, 16 aa, Homo sapiens
  CDR3 for beta chain variable domain of TCR clone 361623 (TRBV2, TRBJ2-1)
CASSVGGSLSYNEQFV

SEQ ID NO: 723247 - protein, 18 aa, Homo sapiens
  CDR3 for alpha chain variable domain of TCR clone 361624 (TRAV12-2, )
CAVEDIQNLDHAVYQLRD

SEQ ID NO: 723248 - protein, 16 aa, Homo sapiens
  CDR3 for beta chain variable domain of TCR clone 361624 (TRBV6-1, TRBJ1-2)
CASSGAWQGRSHGYTF

SEQ ID NO: 723249 - protein, 15 aa, Homo sapiens
  CDR3 for alpha chain variable domain of TCR clone 361625 (TRAV12-3, TRAJ13)
CAMSARSGGYQKGTF

SEQ ID NO: 723250 - protein, 18 aa, Homo sapiens
  CDR3 for beta chain variable domain of TCR clone 361625 (TRBV3-1, TRBJ2-7)
CASSQEGGGRSWHYEQYF

SEQ ID NO: 723251 - protein, 12 aa, Homo sapiens
  CDR3 for alpha chain variable domain of TCR clone 361626 (TRAV16, TRAJ7)
CALSYGDNRLAF

SEQ ID NO: 723252 - protein, 19 aa, Homo sapiens
  CDR3 for beta chain variable domain of TCR clone 361626 (TRBV28, TRBJ2-7)
CASSYSGTSRLGWVYEQYF

SEQ ID NO: 723253 - protein, 16 aa, Homo sapiens
  CDR3 for alpha chain variable domain of TCR clone 361627 (TRAV16, TRAJ52)
CALSAAGGTSYEKLTF

SEQ ID NO: 723254 - protein, 17 aa, Homo sapiens
  CDR3 for beta chain variable domain of TCR clone 361627 (TRBV11-2, TRBJ2-1)
CASSLYPPGVEYNEQFF

SEQ ID NO: 723255 - protein, 10 aa, Homo sapiens
  CDR3 for alpha chain variable domain of TCR clone 361628 (TRAV5, TRAJ34)
CAEDADKLIF

SEQ ID NO: 723256 - protein, 12 aa, Homo sapiens
  CDR3 for beta chain variable domain of TCR clone 361628 (TRBV11-2, TRBJ2-2)
CASSLGGGELFF

SEQ ID NO: 723257 - protein, 11 aa, Homo sapiens
  CDR3 for alpha chain variable domain of TCR clone 361629 (TRAV3, TRAJ21)
CAVGNFNKFYF

SEQ ID NO: 723258 - protein, 16 aa, Homo sapiens
  CDR3 for beta chain variable domain of TCR clone 361629 (TRBV19, TRBJ2-1)
CASSTAGPSSYNEQFF

SEQ ID NO: 723259 - protein, 13 aa, Homo sapiens
  CDR3 for alpha chain variable domain of TCR clone 361630 (TRAV12-2, TRAJ53)
CAGVGGSNYKLTF

SEQ ID NO: 723260 - protein, 15 aa, Homo sapiens
  CDR3 for beta chain variable domain of TCR clone 361630 (TRBV19, TRBJ2-1)
CASSSPGVPLDEQFF

SEQ ID NO: 723261 - protein, 15 aa, Homo sapiens
  CDR3 for alpha chain variable domain of TCR clone 361631 (TRAV21, TRAJ45)
CAVRYSGGGADGLTF

SEQ ID NO: 723262 - protein, 13 aa, Homo sapiens
  CDR3 for beta chain variable domain of TCR clone 361631 (TRBV20-1, TRBJ2-5)
CSAATELRETQYF

SEQ ID NO: 723263 - protein, 15 aa, Homo sapiens
  CDR3 for alpha chain variable domain of TCR clone 361632 (TRAV3, TRAJ13)
CAVRDIGGGYQKVTF

SEQ ID NO: 723264 - protein, 13 aa, Homo sapiens
  CDR3 for beta chain variable domain of TCR clone 361632 (TRBV7-9, TRBJ1-2)
CASSLKQNYGYTF

SEQ ID NO: 723265 - protein, 11 aa, Homo sapiens
  CDR3 for alpha chain variable domain of TCR clone 361633 (TRAV12-2, TRAJ29)
CAVTLRSPVVF

SEQ ID NO: 723266 - protein, 16 aa, Homo sapiens
  CDR3 for beta chain variable domain of TCR clone 361633 (TRBV5-1, TRBJ2-2)
CASSLGGTGSTGELFF

SEQ ID NO: 723267 - protein, 12 aa, Homo sapiens
  CDR3 for alpha chain variable domain of TCR clone 361634 (TRAV26-1, TRAJ26)
CIVYNCGQNFVF

SEQ ID NO: 723268 - protein, 15 aa, Homo sapiens
  CDR3 for beta chain variable domain of TCR clone 361634 (TRBV7-2, TRBJ2-3)
CASSLRGGSTDTQYF

SEQ ID NO: 723269 - protein, 14 aa, Homo sapiens
  CDR3 for alpha chain variable domain of TCR clone 361635 (TRAV1-2, TRAJ16)
CAVNRFSDGQKLLF

SEQ ID NO: 723270 - protein, 16 aa, Homo sapiens
  CDR3 for beta chain variable domain of TCR clone 361635 (TRBV11-1, TRBJ1-1)
CASSPRGAHMNSEAFF

SEQ ID NO: 723271 - protein, 12 aa, Homo sapiens
  CDR3 for alpha chain variable domain of TCR clone 361636 (TRAV20, TRAJ36)
CAVLTGANNLFF

SEQ ID NO: 723272 - protein, 17 aa, Homo sapiens
  CDR3 for beta chain variable domain of TCR clone 361636 (TRBV11-2, TRBJ2-1)
CASSLYPLGVEYNEQFF

SEQ ID NO: 723273 - protein, 18 aa, Homo sapiens
  CDR3 for alpha chain variable domain of TCR clone 361637 (TRAV13-1, TRAJ52)
CAAKNPNAGGTSYGKLTF

SEQ ID NO: 723274 - protein, 15 aa, Homo sapiens
  CDR3 for beta chain variable domain of TCR clone 361637 (TRBV7-9, TRBJ1-2)
CASSLDREPNYGYTF

SEQ ID NO: 723275 - protein, 14 aa, Homo sapiens
  CDR3 for alpha chain variable domain of TCR clone 361638 (TRAV12-3, TRAJ10)
SHLPLTGGGTKLTF

SEQ ID NO: 723276 - protein, 15 aa, Homo sapiens
  CDR3 for beta chain variable domain of TCR clone 361638 (TRBV9, TRBJ1-6)
CASSVAGTGDSPLHF

SEQ ID NO: 723277 - protein, 16 aa, Homo sapiens
  CDR3 for alpha chain variable domain of TCR clone 361639 (TRAV20, TRAJ10)
CAVLRGLTGGGNKLTF

SEQ ID NO: 723278 - protein, 15 aa, Homo sapiens
  CDR3 for beta chain variable domain of TCR clone 361639 (TRBV15, TRBJ2-3)
CATSRDPRGTDTQYF

SEQ ID NO: 723279 - protein, 15 aa, Homo sapiens
  CDR3 for alpha chain variable domain of TCR clone 361640 (TRAV27, TRAJ38)
CAARRNAGNNRKLIW

SEQ ID NO: 723280 - protein, 12 aa, Homo sapiens
  CDR3 for beta chain variable domain of TCR clone 361640 (TRBV11-2, TRBJ2-2)
CASSLGGGELFL

SEQ ID NO: 723281 - protein, 14 aa, Homo sapiens
  CDR3 for alpha chain variable domain of TCR clone 361641 (TRAV26-1, TRAJ38)
CIADNAGNNRKLIW

SEQ ID NO: 723282 - protein, 16 aa, Homo sapiens
  CDR3 for beta chain variable domain of TCR clone 361641 (TRBV4-1, TRBJ1-5)
CASSQGGHTTNQPQHF

SEQ ID NO: 723283 - protein, 13 aa, Homo sapiens
  CDR3 for alpha chain variable domain of TCR clone 361642 (TRAV8-3, TRAJ36)
CAVGATGANNLFF

SEQ ID NO: 723284 - protein, 15 aa, Homo sapiens
  CDR3 for beta chain variable domain of TCR clone 361642 (TRBV7-2, TRBJ1-2)
CASSPKAGWNYGYAF

SEQ ID NO: 723285 - protein, 12 aa, Homo sapiens
  CDR3 for alpha chain variable domain of TCR clone 361643 (TRAV12-3, TRAJ40)
CALSSGTYKYIF

SEQ ID NO: 723286 - protein, 15 aa, Homo sapiens
  CDR3 for beta chain variable domain of TCR clone 361643 (TRBV7-3, TRBJ2-2)
CASSETGQGTGELFF

SEQ ID NO: 723287 - protein, 14 aa, Homo sapiens
  CDR3 for alpha chain variable domain of TCR clone 361644 (TRAV16, TRAJ48)
CALTPGFGNEKLTF

SEQ ID NO: 723288 - protein, 14 aa, Homo sapiens
  CDR3 for beta chain variable domain of TCR clone 361644 (TRBV7-2, TRBJ2-7)
CASSSISGFCEQYF

SEQ ID NO: 723289 - protein, 15 aa, Homo sapiens
  CDR3 for alpha chain variable domain of TCR clone 361645 (TRAV8-6, TRAJ6)
CAVSGESGGSYIHTF

SEQ ID NO: 723290 - protein, 14 aa, Homo sapiens
  CDR3 for beta chain variable domain of TCR clone 361645 (TRBV7-9, TRBJ2-1)
CASSSMVGFGEQFF

SEQ ID NO: 723291 - protein, 13 aa, Homo sapiens
  CDR3 for alpha chain variable domain of TCR clone 361646 (TRAV27, TRAJ56)
CAGKPGANSKLTF

SEQ ID NO: 723292 - protein, 12 aa, Homo sapiens
  CDR3 for beta chain variable domain of TCR clone 361646 (TRBV7-9, TRBJ2-7)
CASSIKREEQYF

SEQ ID NO: 723293 - protein, 14 aa, Homo sapiens
  CDR3 for alpha chain variable domain of TCR clone 361647 (TRAV24, TRAJ39)
CAFPSSQCRQHAHL

SEQ ID NO: 723294 - protein, 13 aa, Homo sapiens
  CDR3 for beta chain variable domain of TCR clone 361647 (TRBV6-5, TRBJ1-6)
CASSDERSTPLHF

SEQ ID NO: 723295 - protein, 12 aa, Homo sapiens
  CDR3 for alpha chain variable domain of TCR clone 361648 (TRAV21, TRAJ13)
PGPSGGYQKVTF

SEQ ID NO: 723296 - protein, 14 aa, Homo sapiens
  CDR3 for beta chain variable domain of TCR clone 361648 (TRBV20-1, TRBJ2-7)
CSTKDRKGAYEQYF

SEQ ID NO: 723297 - protein, 15 aa, Homo sapiens
  CDR3 for alpha chain variable domain of TCR clone 361649 (TRAV2, TRAJ9)
WAVEDRGTGGFKTIF

SEQ ID NO: 723298 - protein, 13 aa, Homo sapiens
  CDR3 for beta chain variable domain of TCR clone 361649 (TRBV20-1, TRBJ1-1)
CSARGGGNTEAFF

SEQ ID NO: 723299 - protein, 11 aa, Homo sapiens
  CDR3 for alpha chain variable domain of TCR clone 361650 (TRAV35, TRAJ30)
CAGPGDDKSIF

SEQ ID NO: 723300 - protein, 14 aa, Homo sapiens
  CDR3 for beta chain variable domain of TCR clone 361650 (TRBV7-6, TRBJ1-6)
CASSQAGGGSPLHF

SEQ ID NO: 723301 - protein, 13 aa, Homo sapiens
  CDR3 for alpha chain variable domain of TCR clone 361651 (TRAV13-1, TRAJ21)
CAASIYNFDKFYF

SEQ ID NO: 723302 - protein, 14 aa, Homo sapiens
  CDR3 for beta chain variable domain of TCR clone 361651 (TRBV20-1, TRBJ2-1)
CSALDRGTYNEQFF

SEQ ID NO: 723303 - protein, 14 aa, Homo sapiens
  CDR3 for alpha chain variable domain of TCR clone 361652 (TRAV1-2, TRAJ16)
CAVNWFSDGQKLLF

SEQ ID NO: 723304 - protein, 16 aa, Homo sapiens
  CDR3 for beta chain variable domain of TCR clone 361652 (TRBV12-5, TRBJ2-5)
CASGPRTSGNQETQYF

SEQ ID NO: 723305 - protein, 14 aa, Homo sapiens
  CDR3 for alpha chain variable domain of TCR clone 361653 (TRAV12-2, TRAJ33)
CAVKRARSNYQLIW

SEQ ID NO: 723306 - protein, 12 aa, Homo sapiens
  CDR3 for beta chain variable domain of TCR clone 361653 (TRBV7-9, TRBJ1-4)
CASSTDREKLFF

SEQ ID NO: 723307 - protein, 14 aa, Homo sapiens
  CDR3 for alpha chain variable domain of TCR clone 361654 (TRAV3, TRAJ9)
CAVRLNTGGFKTIL

SEQ ID NO: 723308 - protein, 16 aa, Homo sapiens
  CDR3 for beta chain variable domain of TCR clone 361654 (TRBV12-5, TRBJ2-5)
CASGPRTSGNQETQYF

SEQ ID NO: 723309 - protein, 14 aa, Homo sapiens
  CDR3 for alpha chain variable domain of TCR clone 361655 (TRAV17, TRAJ4)
CATAPLGGDNKLIF

SEQ ID NO: 723310 - protein, 13 aa, Homo sapiens
  CDR3 for beta chain variable domain of TCR clone 361655 (TRBV12-4, TRBJ1-3)
CASSLASGNTIYF

SEQ ID NO: 723311 - protein, 16 aa, Homo sapiens
  CDR3 for alpha chain variable domain of TCR clone 361656 (TRAV4, TRAJ22)
CLVGDLYSGSARQLTF

SEQ ID NO: 723312 - protein, 16 aa, Homo sapiens
  CDR3 for beta chain variable domain of TCR clone 361656 (TRBV7-3, TRBJ2-1)
CASSKPLAGGYNEQFF

SEQ ID NO: 723313 - protein, 16 aa, Homo sapiens
  CDR3 for alpha chain variable domain of TCR clone 361657 (TRAV12-3, TRAJ53)
CAMSVGSGGSNYKLTF

SEQ ID NO: 723314 - protein, 14 aa, Homo sapiens
  CDR3 for beta chain variable domain of TCR clone 361657 (TRBV10-3, TRBJ2-2)
CAASSRVNTGELFF

SEQ ID NO: 723315 - protein, 16 aa, Homo sapiens
  CDR3 for alpha chain variable domain of TCR clone 361658 (TRAV30, TRAJ24)
CGTEIVDADSWGKFRF

SEQ ID NO: 723316 - protein, 16 aa, Homo sapiens
  CDR3 for beta chain variable domain of TCR clone 361658 (TRBV7-3, TRBJ2-2)
CASSVKRGTLSGELFF

SEQ ID NO: 723317 - protein, 14 aa, Homo sapiens
  CDR3 for alpha chain variable domain of TCR clone 361659 (TRAV17, TRAJ45)
CATDARGGADGLTF

SEQ ID NO: 723318 - protein, 11 aa, Homo sapiens
  CDR3 for beta chain variable domain of TCR clone 361659 (TRBV28, TRBJ2-5)
CAAGNQETQYF

SEQ ID NO: 723319 - protein, 16 aa, Homo sapiens
  CDR3 for alpha chain variable domain of TCR clone 361660 (TRAV30, TRAJ24)
CGKEIVDADSWGKFQF

SEQ ID NO: 723320 - protein, 15 aa, Homo sapiens
  CDR3 for beta chain variable domain of TCR clone 361660 (TRBV20-1, TRBJ2-6)
CSARDRGPGANVLTF

SEQ ID NO: 723321 - protein, 13 aa, Homo sapiens
  CDR3 for alpha chain variable domain of TCR clone 361661 (TRAV21, TRAJ45)
CAVMGGGADGLTF

SEQ ID NO: 723322 - protein, 16 aa, Homo sapiens
  CDR3 for beta chain variable domain of TCR clone 361661 (TRBV20-1, TRBJ2-1)
CSARDHLAGGRGAQFF

SEQ ID NO: 723323 - protein, 14 aa, Homo sapiens
  CDR3 for alpha chain variable domain of TCR clone 361662 (TRAV1-2, TRAJ8)
CAVREDTGFQKLVF

SEQ ID NO: 723324 - protein, 16 aa, Homo sapiens
  CDR3 for beta chain variable domain of TCR clone 361662 (TRBV5-4, TRBJ2-1)
CASSLVGSGQDNEQFF

SEQ ID NO: 723325 - protein, 13 aa, Homo sapiens
  CDR3 for alpha chain variable domain of TCR clone 361663 (TRAV1-2, TRAJ31)
CAVRGYNNDRLMF

SEQ ID NO: 723326 - protein, 14 aa, Homo sapiens
  CDR3 for beta chain variable domain of TCR clone 361663 (TRBV12-4, TRBJ1-3)
CASTLTGAGNTIYF

SEQ ID NO: 723327 - protein, 12 aa, Homo sapiens
  CDR3 for alpha chain variable domain of TCR clone 361664 (TRAV21, TRAJ49)
CAVTNTGNQFYF

SEQ ID NO: 723328 - protein, 10 aa, Homo sapiens
  CDR3 for beta chain variable domain of TCR clone 361664 (TRBV2, TRBJ2-7)
CASSVYEQYF

SEQ ID NO: 723329 - protein, 16 aa, Homo sapiens
  CDR3 for alpha chain variable domain of TCR clone 361665 (TRAV12-1, TRAJ42)
CVVTPYYGGSQGNLIF

SEQ ID NO: 723330 - protein, 15 aa, Homo sapiens
  CDR3 for beta chain variable domain of TCR clone 361665 (TRBV19, TRBJ1-1)
CASTSGQIQNTEAFF

SEQ ID NO: 723331 - protein, 12 aa, Homo sapiens
  CDR3 for alpha chain variable domain of TCR clone 361666 (TRAV12-2, TRAJ31)
CAVNTPDARPMF

SEQ ID NO: 723332 - protein, 15 aa, Homo sapiens
  CDR3 for beta chain variable domain of TCR clone 361666 (TRBV4-2, TRBJ1-1)
CASSQDQWLNTEAFF

SEQ ID NO: 723333 - protein, 16 aa, Homo sapiens
  CDR3 for alpha chain variable domain of TCR clone 361667 (TRAV21, TRAJ33)
CAVSPASMDSNYQLIW

SEQ ID NO: 723334 - protein, 12 aa, Homo sapiens
  CDR3 for beta chain variable domain of TCR clone 361667 (TRBV2, TRBJ2-7)
CASSRVGYEQYF

SEQ ID NO: 723335 - protein, 12 aa, Homo sapiens
  CDR3 for alpha chain variable domain of TCR clone 361668 (TRAV12-3, TRAJ17)
CAMTLTGNKLTF

SEQ ID NO: 723336 - protein, 15 aa, Homo sapiens
  CDR3 for beta chain variable domain of TCR clone 361668 (TRBV20-1, TRBJ2-7)
CSARDWVSGMDEQYV

SEQ ID NO: 723337 - protein, 11 aa, Homo sapiens
  CDR3 for alpha chain variable domain of TCR clone 361669 (TRAV12-3, TRAJ43)
CAMSVSNDMSF

SEQ ID NO: 723338 - protein, 13 aa, Homo sapiens
  CDR3 for beta chain variable domain of TCR clone 361669 (TRBV20-1, TRBJ1-1)
CSAPLGGGTEAVF

SEQ ID NO: 723339 - protein, 11 aa, Homo sapiens
  CDR3 for alpha chain variable domain of TCR clone 361670 (TRAV1-2, TRAJ8)
CAVSSFQKLVF

SEQ ID NO: 723340 - protein, 16 aa, Homo sapiens
  CDR3 for beta chain variable domain of TCR clone 361670 (TRBV7-3, TRBJ2-2)
CDSSLKRGTLSGELFF

SEQ ID NO: 723341 - protein, 13 aa, Homo sapiens
  CDR3 for alpha chain variable domain of TCR clone 361671 (TRAV3, TRAJ30)
CAVRDRGDDKIIF

SEQ ID NO: 723342 - protein, 17 aa, Homo sapiens
  CDR3 for beta chain variable domain of TCR clone 361671 (TRBV11-3, TRBJ2-1)
CASSLALAEFGRNEQFF

SEQ ID NO: 723343 - protein, 12 aa, Homo sapiens
  CDR3 for alpha chain variable domain of TCR clone 361672 (TRAV27, TRAJ38)
CAARLMLATTIS

SEQ ID NO: 723344 - protein, 12 aa, Homo sapiens
  CDR3 for beta chain variable domain of TCR clone 361672 (TRBV29-1, TRBJ2-3)
CSVTGGADTQYF

SEQ ID NO: 723345 - protein, 18 aa, Homo sapiens
  CDR3 for alpha chain variable domain of TCR clone 361673 (TRAV12-3, TRAJ52)
CAMSRTNAGGTSYGKLTV

SEQ ID NO: 723346 - protein, 17 aa, Homo sapiens
  CDR3 for beta chain variable domain of TCR clone 361673 (TRBV7-3, TRBJ2-3)
CASSLMKRMRGADTQYF

SEQ ID NO: 723347 - protein, 14 aa, Homo sapiens
  CDR3 for alpha chain variable domain of TCR clone 361674 (TRAV26-1, TRAJ37)
CIVPSSSNTGKLIF

SEQ ID NO: 723348 - protein, 11 aa, Homo sapiens
  CDR3 for beta chain variable domain of TCR clone 361674 (TRBV18, TRBJ2-7)
CASSRSLEQYL

SEQ ID NO: 723349 - protein, 12 aa, Homo sapiens
  CDR3 for alpha chain variable domain of TCR clone 361675 (TRAV12-3, TRAJ17)
CAMTLTGNKLTF

SEQ ID NO: 723350 - protein, 15 aa, Homo sapiens
  CDR3 for beta chain variable domain of TCR clone 361675 (TRBV20-1, TRBJ2-7)
CSARDWVSGMDQQYF

SEQ ID NO: 723351 - protein, 14 aa, Homo sapiens
  CDR3 for alpha chain variable domain of TCR clone 361676 (TRAV12-2, TRAJ13)
CAVKKTGGYQKFTL

SEQ ID NO: 723352 - protein, 14 aa, Homo sapiens
  CDR3 for beta chain variable domain of TCR clone 361676 (TRBV4-1, TRBJ2-2)
CASSQAVNTGELFF

SEQ ID NO: 723353 - protein, 16 aa, Homo sapiens
  CDR3 for alpha chain variable domain of TCR clone 361677 (TRAV12-3, TRAJ53)
CAMSPGSGGSNYKLTF

SEQ ID NO: 723354 - protein, 17 aa, Homo sapiens
  CDR3 for beta chain variable domain of TCR clone 361677 (TRBV28, TRBJ2-5)
CASSTPEWDALQETQYF

SEQ ID NO: 723355 - protein, 14 aa, Homo sapiens
  CDR3 for alpha chain variable domain of TCR clone 361678 (TRAV26-1, TRAJ40)
CIVRLLSGTYKYIF

SEQ ID NO: 723356 - protein, 22 aa, Homo sapiens
  CDR3 for beta chain variable domain of TCR clone 361678 (TRBV15, TRBJ2-7)
AWGTQPCTCVPPAEAGGYEQYF

SEQ ID NO: 723357 - protein, 14 aa, Homo sapiens
  CDR3 for alpha chain variable domain of TCR clone 361679 (TRAV12-2, TRAJ9)
CAVNMEGGGFKTIF

SEQ ID NO: 723358 - protein, 14 aa, Homo sapiens
  CDR3 for beta chain variable domain of TCR clone 361679 (TRBV28, TRBJ1-4)
CASSFGTFDEKLFF

SEQ ID NO: 723359 - protein, 16 aa, Homo sapiens
  CDR3 for alpha chain variable domain of TCR clone 361680 (TRAV4, TRAJ22)
CLVGDLYSGSARQLTF

SEQ ID NO: 723360 - protein, 14 aa, Homo sapiens
  CDR3 for beta chain variable domain of TCR clone 361680 (TRBV7-8, TRBJ2-3)
CASSLEAGTDTQYF

SEQ ID NO: 723361 - protein, 13 aa, Homo sapiens
  CDR3 for alpha chain variable domain of TCR clone 361681 (TRAV29/DV5, TRAJ31)
CAASRNNNARRMF

SEQ ID NO: 723362 - protein, 12 aa, Homo sapiens
  CDR3 for beta chain variable domain of TCR clone 361681 (TRBV14, TRBJ1-1)
CASSQLKGLAFF

SEQ ID NO: 723363 - protein, 14 aa, Homo sapiens
  CDR3 for alpha chain variable domain of TCR clone 361682 (TRAV12-1, TRAJ17)
CVVNYKAAGNKLTF

SEQ ID NO: 723364 - protein, 15 aa, Homo sapiens
  CDR3 for beta chain variable domain of TCR clone 361682 (TRBV7-2, TRBJ2-5)
CASSFLRGGEETQYF

SEQ ID NO: 723365 - protein, 13 aa, Homo sapiens
  CDR3 for alpha chain variable domain of TCR clone 361683 (TRAV3, TRAJ27)
CAVRPLRAGKSTF

SEQ ID NO: 723366 - protein, 15 aa, Homo sapiens
  CDR3 for beta chain variable domain of TCR clone 361683 (TRBV6-1, TRBJ2-1)
CASSEAAYSYNEQFF

SEQ ID NO: 723367 - protein, 18 aa, Homo sapiens
  CDR3 for alpha chain variable domain of TCR clone 361684 (TRAV12-3, TRAJ52)
CAMSVGGAGGTSYGKLTF

SEQ ID NO: 723368 - protein, 16 aa, Homo sapiens
  CDR3 for beta chain variable domain of TCR clone 361684 (TRBV7-2, TRBJ1-3)
CASSSGRVLSGNTIYF

SEQ ID NO: 723369 - protein, 14 aa, Homo sapiens
  CDR3 for alpha chain variable domain of TCR clone 361685 (TRAV8-3, TRAJ9)
CAVVYNTGGVKPIF

SEQ ID NO: 723370 - protein, 14 aa, Homo sapiens
  CDR3 for beta chain variable domain of TCR clone 361685 (TRBV7-3, TRBJ2-2)
CASSSGGYTGELFF

SEQ ID NO: 723371 - protein, 11 aa, Homo sapiens
  CDR3 for alpha chain variable domain of TCR clone 361686 (TRAV12-3, TRAJ49)
CAANTGNQFYF

SEQ ID NO: 723372 - protein, 11 aa, Homo sapiens
  CDR3 for beta chain variable domain of TCR clone 361686 (TRBV2, TRBJ1-1)
CASREGTEAFF

SEQ ID NO: 723373 - protein, 14 aa, Homo sapiens
  CDR3 for alpha chain variable domain of TCR clone 361687 (TRAV27, TRAJ49)
CAGRPEGTGNQCYF

SEQ ID NO: 723374 - protein, 16 aa, Homo sapiens
  CDR3 for beta chain variable domain of TCR clone 361687 (TRBV12-5, TRBJ2-5)
CASGPRTSGNQETQYF

SEQ ID NO: 723375 - protein, 14 aa, Homo sapiens
  CDR3 for alpha chain variable domain of TCR clone 361688 (TRAV1-2, TRAJ16)
CVVNRFSDGQKLLF

SEQ ID NO: 723376 - protein, 13 aa, Homo sapiens
  CDR3 for beta chain variable domain of TCR clone 361688 (TRBV4-2, TRBJ1-1)
CASSQAGNTEAFF

SEQ ID NO: 723377 - protein, 10 aa, Homo sapiens
  CDR3 for alpha chain variable domain of TCR clone 361689 (TRAV12-3, TRAJ34)
CAISADTLIF

SEQ ID NO: 723378 - protein, 15 aa, Homo sapiens
  CDR3 for beta chain variable domain of TCR clone 361689 (TRBV27, TRBJ2-1)
CASSNGGGSSNEQFF

SEQ ID NO: 723379 - protein, 15 aa, Homo sapiens
  CDR3 for alpha chain variable domain of TCR clone 361690 (TRAV34, TRAJ38)
CGADFTTGNNRKLSW

SEQ ID NO: 723380 - protein, 16 aa, Homo sapiens
  CDR3 for beta chain variable domain of TCR clone 361690 (TRBV12-5, TRBJ2-5)
CASGPRTSGNQETQYF

SEQ ID NO: 723381 - protein, 15 aa, Homo sapiens
  CDR3 for alpha chain variable domain of TCR clone 361691 (TRAV27, TRAJ38)
CAARRNAGNKSKLIW

SEQ ID NO: 723382 - protein, 13 aa, Homo sapiens
  CDR3 for beta chain variable domain of TCR clone 361691 (TRBV12-5, TRBJ2-3)
CASGDRQSDTQYF

SEQ ID NO: 723383 - protein, 13 aa, Homo sapiens
  CDR3 for alpha chain variable domain of TCR clone 361692 (TRAV36/DV7, TRAJ53)
CALSGGSNYKLTL

SEQ ID NO: 723384 - protein, 13 aa, Homo sapiens
  CDR3 for beta chain variable domain of TCR clone 361692 (TRBV28, TRBJ2-7)
CASSLPSRYEQYF

SEQ ID NO: 723385 - protein, 14 aa, Homo sapiens
  CDR3 for alpha chain variable domain of TCR clone 361693 (TRAV8-4, TRAJ54)
CAVSEVLGAQKLVF

SEQ ID NO: 723386 - protein, 11 aa, Homo sapiens
  CDR3 for beta chain variable domain of TCR clone 361693 (TRBV12-4, TRBJ2-3)
CASSSVRGRYF

SEQ ID NO: 723387 - protein, 13 aa, Homo sapiens
  CDR3 for alpha chain variable domain of TCR clone 361694 (TRAV30, TRAJ39)
CGTEKNAGNMLTF

SEQ ID NO: 723388 - protein, 15 aa, Homo sapiens
  CDR3 for beta chain variable domain of TCR clone 361694 (TRBV12-4, TRBJ2-1)
CASSLSGGASNEQFF

SEQ ID NO: 723389 - protein, 13 aa, Homo sapiens
  CDR3 for alpha chain variable domain of TCR clone 361695 (TRAV8-3, TRAJ29)
CAVGAWGNTPLVF

SEQ ID NO: 723390 - protein, 14 aa, Homo sapiens
  CDR3 for beta chain variable domain of TCR clone 361695 (TRBV5-5, TRBJ1-5)
CASSGQGVDQPQHF

SEQ ID NO: 723391 - protein, 15 aa, Homo sapiens
  CDR3 for alpha chain variable domain of TCR clone 361696 (TRAV21, TRAJ53)
CATLNSGGSNYKLTF

SEQ ID NO: 723392 - protein, 13 aa, Homo sapiens
  CDR3 for beta chain variable domain of TCR clone 361696 (TRBV7-3, TRBJ2-1)
CASSPVAYNEQFF

SEQ ID NO: 723393 - protein, 13 aa, Homo sapiens
  CDR3 for alpha chain variable domain of TCR clone 361697 (TRAV1-2, TRAJ12)
CAVSMDSSYKLIF

SEQ ID NO: 723394 - protein, 13 aa, Homo sapiens
  CDR3 for beta chain variable domain of TCR clone 361697 (TRBV7-9, TRBJ1-2)
CASSLKQNYGDTF

SEQ ID NO: 723395 - protein, 13 aa, Homo sapiens
  CDR3 for alpha chain variable domain of TCR clone 361698 (TRAV21, TRAJ20)
CAVGVFADYKLSF

SEQ ID NO: 723396 - protein, 17 aa, Homo sapiens
  CDR3 for beta chain variable domain of TCR clone 361698 (TRBV13, TRBJ2-3)
CASSLSRVAGGRNTQYF

SEQ ID NO: 723397 - protein, 13 aa, Homo sapiens
  CDR3 for alpha chain variable domain of TCR clone 361699 (TRAV35, TRAJ57)
CAGSQGGSAKLVF

SEQ ID NO: 723398 - protein, 15 aa, Homo sapiens
  CDR3 for beta chain variable domain of TCR clone 361699 (TRBV20-1, TRBJ2-7)
CSARDRVSGMDEQYF

SEQ ID NO: 723399 - protein, 16 aa, Homo sapiens
  CDR3 for alpha chain variable domain of TCR clone 361700 (TRAV3, TRAJ3)
CAVRDRAKSSASKIIF

SEQ ID NO: 723400 - protein, 15 aa, Homo sapiens
  CDR3 for beta chain variable domain of TCR clone 361700 (TRBV6-1, TRBJ2-3)
CVSSERGGITDTQYF

SEQ ID NO: 723401 - protein, 14 aa, Homo sapiens
  CDR3 for alpha chain variable domain of TCR clone 361701 (TRAV12-2, TRAJ15)
CAPHTGQAGTALIF

SEQ ID NO: 723402 - protein, 14 aa, Homo sapiens
  CDR3 for beta chain variable domain of TCR clone 361701 (TRBV25-1, TRBJ1-1)
CASTRLGGNTEAFF

SEQ ID NO: 723403 - protein, 13 aa, Homo sapiens
  CDR3 for alpha chain variable domain of TCR clone 361702 (TRAV35, TRAJ48)
CAGHECGNEKLTF

SEQ ID NO: 723404 - protein, 13 aa, Homo sapiens
  CDR3 for beta chain variable domain of TCR clone 361702 (TRBV7-2, TRBJ1-6)
CASSLVGSSPLHF

SEQ ID NO: 723405 - protein, 12 aa, Homo sapiens
  CDR3 for alpha chain variable domain of TCR clone 361703 (TRAV23/DV6, TRAJ16)
CAARGRGQKLLF

SEQ ID NO: 723406 - protein, 14 aa, Homo sapiens
  CDR3 for beta chain variable domain of TCR clone 361703 (TRBV4-1, TRBJ1-1)
CASSRSGQSFESFF

SEQ ID NO: 723407 - protein, 11 aa, Homo sapiens
  CDR3 for alpha chain variable domain of TCR clone 361704 (TRAV4, TRAJ23)
CLVAPGGKLIF

SEQ ID NO: 723408 - protein, 15 aa, Homo sapiens
  CDR3 for beta chain variable domain of TCR clone 361704 (TRBV7-2, TRBJ2-1)
CASSFQADEYNEQSF

SEQ ID NO: 723409 - protein, 15 aa, Homo sapiens
  CDR3 for alpha chain variable domain of TCR clone 361705 (TRAV26-1, TRAJ44)
CIVRANTGTASKLTF

SEQ ID NO: 723410 - protein, 16 aa, Homo sapiens
  CDR3 for beta chain variable domain of TCR clone 361705 (TRBV13, TRBJ2-2)
CASSPRTGEHTGELFF

SEQ ID NO: 723411 - protein, 12 aa, Homo sapiens
  CDR3 for alpha chain variable domain of TCR clone 361706 (TRAV12-3, TRAJ20)
CAMVRGDYKLSF

SEQ ID NO: 723412 - protein, 14 aa, Homo sapiens
  CDR3 for beta chain variable domain of TCR clone 361706 (TRBV19, TRBJ2-1)
CASPTFVLSGEQSF

SEQ ID NO: 723413 - protein, 15 aa, Homo sapiens
  CDR3 for alpha chain variable domain of TCR clone 361707 (TRAV12-3, TRAJ49)
CAMAVTPNTGDQFYF

SEQ ID NO: 723414 - protein, 14 aa, Homo sapiens
  CDR3 for beta chain variable domain of TCR clone 361707 (TRBV7-8, TRBJ2-3)
CASSLEAGTDTQYF

SEQ ID NO: 723415 - protein, 16 aa, Homo sapiens
  CDR3 for alpha chain variable domain of TCR clone 361708 (TRAV38-1, TRAJ56)
CAFMKRQTGANSKLTF

SEQ ID NO: 723416 - protein, 13 aa, Homo sapiens
  CDR3 for beta chain variable domain of TCR clone 361708 (TRBV3-1, TRBJ1-1)
CASSQLQGAEAFF

SEQ ID NO: 723417 - protein, 11 aa, Homo sapiens
  CDR3 for alpha chain variable domain of TCR clone 361709 (TRAV1-2, TRAJ34)
CAGYNTDKLIF

SEQ ID NO: 723418 - protein, 19 aa, Homo sapiens
  CDR3 for beta chain variable domain of TCR clone 361709 (TRBV7-9, TRBJ2-6)
CASSLESATVLPGANVLTF

SEQ ID NO: 723419 - protein, 11 aa, Homo sapiens
  CDR3 for alpha chain variable domain of TCR clone 361710 (TRAV8-6, TRAJ42)
GGGGSQGNLIF

SEQ ID NO: 723420 - protein, 13 aa, Homo sapiens
  CDR3 for beta chain variable domain of TCR clone 361710 (TRBV7-3, TRBJ1-1)
CAGSQDWGAEAFF

SEQ ID NO: 723421 - protein, 12 aa, Homo sapiens
  CDR3 for alpha chain variable domain of TCR clone 361711 (TRAV16, TRAJ26)
CALRSYGQNFVF

SEQ ID NO: 723422 - protein, 12 aa, Homo sapiens
  CDR3 for beta chain variable domain of TCR clone 361711 (TRBV11-2, TRBJ2-2)
CASSLGGGELFF

SEQ ID NO: 723423 - protein, 16 aa, Homo sapiens
  CDR3 for alpha chain variable domain of TCR clone 361712 (TRAV12-2, TRAJ10)
CAVNRVLTGGGNKLTF

SEQ ID NO: 723424 - protein, 15 aa, Homo sapiens
  CDR3 for beta chain variable domain of TCR clone 361712 (TRBV7-3, TRBJ2-1)
CASSPTGGGEVEQFF

SEQ ID NO: 723425 - protein, 12 aa, Homo sapiens
  CDR3 for alpha chain variable domain of TCR clone 361713 (TRAV21, TRAJ31)
CAVWGNNARLMF

SEQ ID NO: 723426 - protein, 13 aa, Homo sapiens
  CDR3 for beta chain variable domain of TCR clone 361713 (TRBV28, TRBJ2-7)
CASKAGGVYEQYF

SEQ ID NO: 723427 - protein, 23 aa, Homo sapiens
  CDR3 for alpha chain variable domain of TCR clone 361714 (TRAV12-2, TRAJ32)
SPVIQPPTSVPTPESGATNKLIF

SEQ ID NO: 723428 - protein, 14 aa, Homo sapiens
  CDR3 for beta chain variable domain of TCR clone 361714 (TRBV4-2, TRBJ2-3)
CASRETRAPGMQYF

SEQ ID NO: 723429 - protein, 12 aa, Homo sapiens
  CDR3 for alpha chain variable domain of TCR clone 361715 (TRAV8-3, TRAJ27)
RAVGAEAGKSTF

SEQ ID NO: 723430 - protein, 14 aa, Homo sapiens
  CDR3 for beta chain variable domain of TCR clone 361715 (TRBV2, TRBJ2-1)
CASRLIVGHDEQFF

SEQ ID NO: 723431 - protein, 14 aa, Homo sapiens
  CDR3 for alpha chain variable domain of TCR clone 361716 (TRAV16, TRAJ44)
CALSTTGTASKLTF

SEQ ID NO: 723432 - protein, 13 aa, Homo sapiens
  CDR3 for beta chain variable domain of TCR clone 361716 (TRBV11-2, TRBJ1-4)
CASSLRPNEKLFF

SEQ ID NO: 723433 - protein, 17 aa, Homo sapiens
  CDR3 for alpha chain variable domain of TCR clone 361717 (TRAV3, TRAJ12)
CAVRAGGRMDSSYKLIF

SEQ ID NO: 723434 - protein, 15 aa, Homo sapiens
  CDR3 for beta chain variable domain of TCR clone 361717 (TRBV20-1, TRBJ2-5)
CSAEGTGGLQETQYF

SEQ ID NO: 723435 - protein, 16 aa, Homo sapiens
  CDR3 for alpha chain variable domain of TCR clone 361718 (TRAV16, TRAJ52)
CALCAAGGTSYGKLTF

SEQ ID NO: 723436 - protein, 17 aa, Homo sapiens
  CDR3 for beta chain variable domain of TCR clone 361718 (TRBV11-3, TRBJ2-1)
CASSLSPPGVEYNEQFF

SEQ ID NO: 723437 - protein, 16 aa, Homo sapiens
  CDR3 for alpha chain variable domain of TCR clone 361719 (TRAV23/DV6, TRAJ48)
CAASGVVNFGNEKLTF

SEQ ID NO: 723438 - protein, 15 aa, Homo sapiens
  CDR3 for beta chain variable domain of TCR clone 361719 (TRBV20-1, TRBJ2-5)
CSAGLARVSQETQYF

SEQ ID NO: 723439 - protein, 18 aa, Homo sapiens
  CDR3 for alpha chain variable domain of TCR clone 361720 (TRAV21, TRAJ52)
CAGRPSPAGGTSYGKLTF

SEQ ID NO: 723440 - protein, 12 aa, Homo sapiens
  CDR3 for beta chain variable domain of TCR clone 361720 (TRBV7-8, TRBJ2-7)
CASSLGDREQYF

SEQ ID NO: 723441 - protein, 14 aa, Homo sapiens
  CDR3 for alpha chain variable domain of TCR clone 361721 (TRAV3, TRAJ21)
CAAESKANFNKFYF

SEQ ID NO: 723442 - protein, 18 aa, Homo sapiens
  CDR3 for beta chain variable domain of TCR clone 361721 (TRBV7-9, TRBJ2-1)
CASSLAVSGTSGRNEQFF

SEQ ID NO: 723443 - protein, 11 aa, Homo sapiens
  CDR3 for alpha chain variable domain of TCR clone 361722 (TRAV16, TRAJ33)
CALHSNYQLIW

SEQ ID NO: 723444 - protein, 17 aa, Homo sapiens
  CDR3 for beta chain variable domain of TCR clone 361722 (TRBV11-2, TRBJ2-1)
CASSLYPPGVEYNEQFF

SEQ ID NO: 723445 - protein, 13 aa, Homo sapiens
  CDR3 for alpha chain variable domain of TCR clone 361723 (TRAV27, TRAJ41)
CAGEGNSGYALNF

SEQ ID NO: 723446 - protein, 14 aa, Homo sapiens
  CDR3 for beta chain variable domain of TCR clone 361723 (TRBV19, TRBJ1-2)
CASSIGAGSYGYTF

SEQ ID NO: 723447 - protein, 17 aa, Homo sapiens
  CDR3 for alpha chain variable domain of TCR clone 361724 (TRAV36/DV7, TRAJ52)
CAVAQRAGGTSYGKLTF

SEQ ID NO: 723448 - protein, 15 aa, Homo sapiens
  CDR3 for beta chain variable domain of TCR clone 361724 (TRBV9, TRBJ1-6)
CASSVDGTGDSPLHF

SEQ ID NO: 723449 - protein, 13 aa, Homo sapiens
  CDR3 for alpha chain variable domain of TCR clone 361725 (TRAV30, TRAJ18)
CGTEASTLGRLYF

SEQ ID NO: 723450 - protein, 15 aa, Homo sapiens
  CDR3 for beta chain variable domain of TCR clone 361725 (TRBV7-3, TRBJ2-1)
CASSRSGTGSSGQFF

SEQ ID NO: 723451 - protein, 12 aa, Homo sapiens
  CDR3 for alpha chain variable domain of TCR clone 361726 (TRAV2, TRAJ9)
CAVGAGGFQTIF

SEQ ID NO: 723452 - protein, 14 aa, Homo sapiens
  CDR3 for beta chain variable domain of TCR clone 361726 (TRBV6-1, TRBJ1-3)
CASVQGGGGNTIYF

SEQ ID NO: 723453 - protein, 14 aa, Homo sapiens
  CDR3 for alpha chain variable domain of TCR clone 361727 (TRAV26-1, TRAJ44)
CIARTTGTASKLTF

SEQ ID NO: 723454 - protein, 15 aa, Homo sapiens
  CDR3 for beta chain variable domain of TCR clone 361727 (TRBV29-1, TRBJ2-1)
CSVGRHALFYNEQFF

SEQ ID NO: 723455 - protein, 15 aa, Homo sapiens
  CDR3 for alpha chain variable domain of TCR clone 361728 (TRAV2, TRAJ15)
CAVEDREQAGTALIF

SEQ ID NO: 723456 - protein, 14 aa, Homo sapiens
  CDR3 for beta chain variable domain of TCR clone 361728 (TRBV7-6, TRBJ2-3)
CASSLGTVTDTQYF

SEQ ID NO: 723457 - protein, 14 aa, Homo sapiens
  CDR3 for alpha chain variable domain of TCR clone 361729 (TRAV13-1, TRAJ35)
CAASNGGFGNVLHF

SEQ ID NO: 723458 - protein, 13 aa, Homo sapiens
  CDR3 for beta chain variable domain of TCR clone 361729 (TRBV7-3, TRBJ1-1)
CASSQDWGAEAFF

SEQ ID NO: 723459 - protein, 13 aa, Homo sapiens
  CDR3 for alpha chain variable domain of TCR clone 361730 (TRAV39, TRAJ33)
CAANPDSNYQLIG

SEQ ID NO: 723460 - protein, 13 aa, Homo sapiens
  CDR3 for beta chain variable domain of TCR clone 361730 (TRBV18, TRBJ1-1)
CASSGGRNTEAFF

SEQ ID NO: 723461 - protein, 12 aa, Homo sapiens
  CDR3 for alpha chain variable domain of TCR clone 361731 (TRAV12-1, TRAJ40)
CVFYSGTYKYIF

SEQ ID NO: 723462 - protein, 18 aa, Homo sapiens
  CDR3 for beta chain variable domain of TCR clone 361731 (TRBV12-4, TRBJ2-2)
CASSLVAGTGGRTGELFF

SEQ ID NO: 723463 - protein, 10 aa, Homo sapiens
  CDR3 for alpha chain variable domain of TCR clone 361732 (TRAV8-6, TRAJ34)
CAVNTDKLIF

SEQ ID NO: 723464 - protein, 14 aa, Homo sapiens
  CDR3 for beta chain variable domain of TCR clone 361732 (TRBV7-2, TRBJ2-1)
CASSPKTSFYEQYF

SEQ ID NO: 723465 - protein, 13 aa, Homo sapiens
  CDR3 for alpha chain variable domain of TCR clone 361733 (TRAV2, TRAJ40)
CAVVTSGTYKYIF

SEQ ID NO: 723466 - protein, 16 aa, Homo sapiens
  CDR3 for beta chain variable domain of TCR clone 361733 (TRBV19, TRBJ2-1)
CASSKAGPSSCNEQFF

SEQ ID NO: 723467 - protein, 16 aa, Homo sapiens
  CDR3 for alpha chain variable domain of TCR clone 361734 (TRAV30, TRAJ24)
CGTEIVDADSWGKFKF

SEQ ID NO: 723468 - protein, 14 aa, Homo sapiens
  CDR3 for beta chain variable domain of TCR clone 361734 (TRBV12-5, TRBJ2-5)
CASGLRTHQETQYF

SEQ ID NO: 723469 - protein, 22 aa, Homo sapiens
  CDR3 for alpha chain variable domain of TCR clone 361735 (TRAV21, )
CAVRQDAGNNHIQNPDPAVYQL

SEQ ID NO: 723470 - protein, 16 aa, Homo sapiens
  CDR3 for beta chain variable domain of TCR clone 361735 (TRBV4-2, TRBJ1-1)
RASRPLDGGGDTEAVF

SEQ ID NO: 723471 - protein, 14 aa, Homo sapiens
  CDR3 for alpha chain variable domain of TCR clone 361736 (TRAV26-1, TRAJ45)
CIVREGGGADGLPF

SEQ ID NO: 723472 - protein, 14 aa, Homo sapiens
  CDR3 for beta chain variable domain of TCR clone 361736 (TRBV2, TRBJ1-2)
CASNEGTGPYGYTF

SEQ ID NO: 723473 - protein, 15 aa, Homo sapiens
  CDR3 for alpha chain variable domain of TCR clone 361737 (TRAV23/DV6, TRAJ18)
CAARYRGSTLGRLYL

SEQ ID NO: 723474 - protein, 14 aa, Homo sapiens
  CDR3 for beta chain variable domain of TCR clone 361737 (TRBV7-9, TRBJ1-2)
CASSLGPPQWPATF

SEQ ID NO: 723475 - protein, 13 aa, Homo sapiens
  CDR3 for alpha chain variable domain of TCR clone 361738 (TRAV3, TRAJ20)
CCEAFCNDYKLSF

SEQ ID NO: 723476 - protein, 20 aa, Homo sapiens
  CDR3 for beta chain variable domain of TCR clone 361738 (TRBV7-8, TRBJ2-2)
CASSHLFPGPTIHITGELFF

SEQ ID NO: 723477 - protein, 13 aa, Homo sapiens
  CDR3 for alpha chain variable domain of TCR clone 361739 (TRAV12-2, TRAJ20)
CAVYPSNDYKLSF

SEQ ID NO: 723478 - protein, 12 aa, Homo sapiens
  CDR3 for beta chain variable domain of TCR clone 361739 (TRBV14, TRBJ2-7)
CASSRLKGEQSF

SEQ ID NO: 723479 - protein, 15 aa, Homo sapiens
  CDR3 for alpha chain variable domain of TCR clone 361740 (TRAV12-3, TRAJ17)
CAMSPSLAAGNKLTF

SEQ ID NO: 723480 - protein, 13 aa, Homo sapiens
  CDR3 for beta chain variable domain of TCR clone 361740 (TRBV5-1, TRBJ2-1)
CASSLGSYNEQFF

SEQ ID NO: 723481 - protein, 15 aa, Homo sapiens
  CDR3 for alpha chain variable domain of TCR clone 361741 (TRAV17, TRAJ28)
CAMVDSGAGSYQLTF

SEQ ID NO: 723482 - protein, 12 aa, Homo sapiens
  CDR3 for beta chain variable domain of TCR clone 361741 (TRBV7-3, TRBJ2-4)
CASSLGGNIQYF

SEQ ID NO: 723483 - protein, 13 aa, Homo sapiens
  CDR3 for alpha chain variable domain of TCR clone 361742 (TRAV21, TRAJ57)
CAVTQGGSEKLVF

SEQ ID NO: 723484 - protein, 13 aa, Homo sapiens
  CDR3 for beta chain variable domain of TCR clone 361742 (TRBV12-5, TRBJ2-3)
CASGDRQSDTQYF

SEQ ID NO: 723485 - protein, 23 aa, Homo sapiens
  CDR3 for alpha chain variable domain of TCR clone 361743 (TRAV26-1, )
CIVRPLNACNNHIHNPYPAVYQL

SEQ ID NO: 723486 - protein, 13 aa, Homo sapiens
  CDR3 for beta chain variable domain of TCR clone 361743 (TRBV18, TRBJ1-1)
CASSPNGDTEAFF

SEQ ID NO: 723487 - protein, 16 aa, Homo sapiens
  CDR3 for alpha chain variable domain of TCR clone 361744 (TRAV12-3, TRAJ53)
CAMSPGCGGSNYKLTF

SEQ ID NO: 723488 - protein, 20 aa, Homo sapiens
  CDR3 for beta chain variable domain of TCR clone 361744 (TRBV7-8, TRBJ2-2)
CASSHLFPGPTIHITGELFF

SEQ ID NO: 723489 - protein, 10 aa, Homo sapiens
  CDR3 for alpha chain variable domain of TCR clone 361745 (TRAV12-2, TRAJ22)
CAVNETQLTF

SEQ ID NO: 723490 - protein, 14 aa, Homo sapiens
  CDR3 for beta chain variable domain of TCR clone 361745 (TRBV13, TRBJ2-5)
CASSLGPRGETQYF

SEQ ID NO: 723491 - protein, 13 aa, Homo sapiens
  CDR3 for alpha chain variable domain of TCR clone 361746 (TRAV13-2, TRAJ48)
CAEMDFGNEKLTC

SEQ ID NO: 723492 - protein, 15 aa, Homo sapiens
  CDR3 for beta chain variable domain of TCR clone 361746 (TRBV2, TRBJ2-1)
CASSELAGSYNEQFF

SEQ ID NO: 723493 - protein, 14 aa, Homo sapiens
  CDR3 for alpha chain variable domain of TCR clone 361747 (TRAV12-3, TRAJ42)
CAMNYGGSQGHLIF

SEQ ID NO: 723494 - protein, 15 aa, Homo sapiens
  CDR3 for beta chain variable domain of TCR clone 361747 (TRBV5-7, TRBJ1-5)
CASSYGKLWDQPQHF

SEQ ID NO: 723495 - protein, 14 aa, Homo sapiens
  CDR3 for alpha chain variable domain of TCR clone 361748 (TRAV12-2, TRAJ13)
CAVKKTGGYQNVTF

SEQ ID NO: 723496 - protein, 15 aa, Homo sapiens
  CDR3 for beta chain variable domain of TCR clone 361748 (TRBV20-1, TRBJ2-7)
CSARGRVSGMDEQYF

SEQ ID NO: 723497 - protein, 13 aa, Homo sapiens
  CDR3 for alpha chain variable domain of TCR clone 361749 (TRAV2, TRAJ40)
CAVVTSGTYKYIF

SEQ ID NO: 723498 - protein, 14 aa, Homo sapiens
  CDR3 for beta chain variable domain of TCR clone 361749 (TRBV19, TRBJ2-1)
CASRTVVLSGEQFF

SEQ ID NO: 723499 - protein, 14 aa, Homo sapiens
  CDR3 for alpha chain variable domain of TCR clone 361750 (TRAV12-2, TRAJ13)
CAVKKTGGYQKVTF

SEQ ID NO: 723500 - protein, 19 aa, Homo sapiens
  CDR3 for beta chain variable domain of TCR clone 361750 (TRBV25-1, TRBJ2-2)
CAILVYRVDRGHKTGELFF

SEQ ID NO: 723501 - protein, 14 aa, Homo sapiens
  CDR3 for alpha chain variable domain of TCR clone 361751 (TRAV30, TRAJ26)
CGTEIVSYGQHFVF

SEQ ID NO: 723502 - protein, 13 aa, Homo sapiens
  CDR3 for beta chain variable domain of TCR clone 361751 (TRBV7-3, TRBJ1-1)
CASSQDWGAEAFF

SEQ ID NO: 723503 - protein, 15 aa, Homo sapiens
  CDR3 for alpha chain variable domain of TCR clone 361752 (TRAV21, TRAJ53)
CATLNSGGTNYKLTF

SEQ ID NO: 723504 - protein, 15 aa, Homo sapiens
  CDR3 for beta chain variable domain of TCR clone 361752 (TRBV18, TRBJ2-1)
CASSPPSASYNEQFF

SEQ ID NO: 723505 - protein, 15 aa, Homo sapiens
  CDR3 for alpha chain variable domain of TCR clone 361753 (TRAV8-3, TRAJ45)
CASAYSGGGADGLTF

SEQ ID NO: 723506 - protein, 13 aa, Homo sapiens
  CDR3 for beta chain variable domain of TCR clone 361753 (TRBV10-3, TRBJ2-7)
CASKLAVNYAQYF

SEQ ID NO: 723507 - protein, 13 aa, Homo sapiens
  CDR3 for alpha chain variable domain of TCR clone 361754 (TRAV26-2, TRAJ43)
CILRAVNNNDMRF

SEQ ID NO: 723508 - protein, 14 aa, Homo sapiens
  CDR3 for beta chain variable domain of TCR clone 361754 (TRBV11-2, TRBJ2-7)
CASSSTGEGYEQYF

SEQ ID NO: 723509 - protein, 14 aa, Homo sapiens
  CDR3 for alpha chain variable domain of TCR clone 361755 (TRAV1-2, TRAJ8)
CAVREDTGFQKLVF

SEQ ID NO: 723510 - protein, 15 aa, Homo sapiens
  CDR3 for beta chain variable domain of TCR clone 361755 (TRBV9, TRBJ1-6)
CASSVAGTGDSPRHF

SEQ ID NO: 723511 - protein, 13 aa, Homo sapiens
  CDR3 for alpha chain variable domain of TCR clone 361756 (TRAV12-3, TRAJ13)
CAMSSGGYQKVTF

SEQ ID NO: 723512 - protein, 16 aa, Homo sapiens
  CDR3 for beta chain variable domain of TCR clone 361756 (TRBV4-1, TRBJ2-7)
CASSRGDILSSYEQYF

SEQ ID NO: 723513 - protein, 17 aa, Homo sapiens
  CDR3 for alpha chain variable domain of TCR clone 361757 (TRAV13-1, TRAJ52)
CAASSGAGGTSYGKLTF

SEQ ID NO: 723514 - protein, 15 aa, Homo sapiens
  CDR3 for beta chain variable domain of TCR clone 361757 (TRBV2, TRBJ2-1)
CASSQLAGSYNEQFF

SEQ ID NO: 723515 - protein, 11 aa, Homo sapiens
  CDR3 for alpha chain variable domain of TCR clone 361758 (TRAV3, TRAJ21)
CAVGNFNKFYF

SEQ ID NO: 723516 - protein, 18 aa, Homo sapiens
  CDR3 for beta chain variable domain of TCR clone 361758 (TRBV11-2, TRBJ2-3)
WASSLGGASRGAPNTQYF

SEQ ID NO: 723517 - protein, 15 aa, Homo sapiens
  CDR3 for alpha chain variable domain of TCR clone 361759 (TRAV1-2, TRAJ30)
CAVRPHGNRDDKIIF

SEQ ID NO: 723518 - protein, 12 aa, Homo sapiens
  CDR3 for beta chain variable domain of TCR clone 361759 (TRBV12-4, TRBJ2-7)
CASSVGGYEQYV

SEQ ID NO: 723519 - protein, 16 aa, Homo sapiens
  CDR3 for alpha chain variable domain of TCR clone 361760 (TRAV30, TRAJ24)
CGTEIVDADSWGKFQF

SEQ ID NO: 723520 - protein, 13 aa, Homo sapiens
  CDR3 for beta chain variable domain of TCR clone 361760 (TRBV18, TRBJ2-5)
CASSPAGKETQYF

SEQ ID NO: 723521 - protein, 15 aa, Homo sapiens
  CDR3 for alpha chain variable domain of TCR clone 361761 (TRAV3, TRAJ42)
CAVRRLEEAKEITSF

SEQ ID NO: 723522 - protein, 14 aa, Homo sapiens
  CDR3 for beta chain variable domain of TCR clone 361761 (TRBV19, TRBJ2-5)
CASSSSGIQETQYF

SEQ ID NO: 723523 - protein, 13 aa, Homo sapiens
  CDR3 for alpha chain variable domain of TCR clone 361762 (TRAV21, TRAJ58)
CAVKESSGSRFTF

SEQ ID NO: 723524 - protein, 17 aa, Homo sapiens
  CDR3 for beta chain variable domain of TCR clone 361762 (TRBV5-1, TRBJ2-3)
CASSLAGWGSVVDTQYF

SEQ ID NO: 723525 - protein, 15 aa, Homo sapiens
  CDR3 for alpha chain variable domain of TCR clone 361763 (TRAV4, TRAJ39)
CLVGPNNNAGNMLTF

SEQ ID NO: 723526 - protein, 14 aa, Homo sapiens
  CDR3 for beta chain variable domain of TCR clone 361763 (TRBV4-2, TRBJ2-1)
CASGLDRAYNEQFF

SEQ ID NO: 723527 - protein, 13 aa, Homo sapiens
  CDR3 for alpha chain variable domain of TCR clone 361764 (TRAV23/DV6, TRAJ58)
CAATGTSGSRLTF

SEQ ID NO: 723528 - protein, 13 aa, Homo sapiens
  CDR3 for beta chain variable domain of TCR clone 361764 (TRBV5-5, TRBJ1-2)
CASSFWRGEDYNF

SEQ ID NO: 723529 - protein, 15 aa, Homo sapiens
  CDR3 for alpha chain variable domain of TCR clone 361765 (TRAV13-1, TRAJ18)
CAASGGGSTLVRLYF

SEQ ID NO: 723530 - protein, 13 aa, Homo sapiens
  CDR3 for beta chain variable domain of TCR clone 361765 (TRBV18, TRBJ2-1)
CASGLASNNEQFF

SEQ ID NO: 723531 - protein, 13 aa, Homo sapiens
  CDR3 for alpha chain variable domain of TCR clone 361766 (TRAV1-2, TRAJ9)
CAALNTGGFKTIF

SEQ ID NO: 723532 - protein, 15 aa, Homo sapiens
  CDR3 for beta chain variable domain of TCR clone 361766 (TRBV10-3, TRBJ2-2)
CAISPGRTNTGELFF

SEQ ID NO: 723533 - protein, 11 aa, Homo sapiens
  CDR3 for alpha chain variable domain of TCR clone 361767 (TRAV27, TRAJ45)
CAGAQEEVLTD

SEQ ID NO: 723534 - protein, 17 aa, Homo sapiens
  CDR3 for beta chain variable domain of TCR clone 361767 (TRBV11-2, TRBJ2-1)
CASSLHPPGVEYNEQFF

SEQ ID NO: 723535 - protein, 14 aa, Homo sapiens
  CDR3 for alpha chain variable domain of TCR clone 361768 (TRAV26-1, TRAJ39)
CIVRANNAGNMLTF

SEQ ID NO: 723536 - protein, 13 aa, Homo sapiens
  CDR3 for beta chain variable domain of TCR clone 361768 (TRBV14, TRBJ1-1)
CASSQEAGTEAFF

SEQ ID NO: 723537 - protein, 13 aa, Homo sapiens
  CDR3 for alpha chain variable domain of TCR clone 361769 (TRAV21, TRAJ20)
CAVGLRVGYKLSF

SEQ ID NO: 723538 - protein, 13 aa, Homo sapiens
  CDR3 for beta chain variable domain of TCR clone 361769 (TRBV6-1, TRBJ1-1)
CASSRQGNTGAFF

SEQ ID NO: 723539 - protein, 11 aa, Homo sapiens
  CDR3 for alpha chain variable domain of TCR clone 361770 (TRAV1-2, TRAJ31)
CAVNNNARLMF

SEQ ID NO: 723540 - protein, 12 aa, Homo sapiens
  CDR3 for beta chain variable domain of TCR clone 361770 (TRBV11-2, TRBJ2-2)
CASSLGGEELFF

SEQ ID NO: 723541 - protein, 16 aa, Homo sapiens
  CDR3 for alpha chain variable domain of TCR clone 361771 (TRAV35, TRAJ28)
CAGQKYSGAGSYQLTL

SEQ ID NO: 723542 - protein, 16 aa, Homo sapiens
  CDR3 for beta chain variable domain of TCR clone 361771 (TRBV7-3, TRBJ2-2)
CASSLKRGTLSGELFF

SEQ ID NO: 723543 - protein, 14 aa, Homo sapiens
  CDR3 for alpha chain variable domain of TCR clone 361772 (TRAV12-2, TRAJ9)
CAVNMEGGGFKTIF

SEQ ID NO: 723544 - protein, 14 aa, Homo sapiens
  CDR3 for beta chain variable domain of TCR clone 361772 (TRBV27, TRBJ2-3)
CASRKGGRTGTQYF

SEQ ID NO: 723545 - protein, 12 aa, Homo sapiens
  CDR3 for alpha chain variable domain of TCR clone 361773 (TRAV12-1, TRAJ34)
CVVAGATDKLIF

SEQ ID NO: 723546 - protein, 13 aa, Homo sapiens
  CDR3 for beta chain variable domain of TCR clone 361773 (TRBV19, TRBJ1-2)
CASSVPGQDGYTF

SEQ ID NO: 723547 - protein, 11 aa, Homo sapiens
  CDR3 for alpha chain variable domain of TCR clone 361774 (TRAV3, TRAJ21)
CSVGNFNKFYF

SEQ ID NO: 723548 - protein, 16 aa, Homo sapiens
  CDR3 for beta chain variable domain of TCR clone 361774 (TRBV19, TRBJ2-1)
CASSKAGPSSYNKQFF

SEQ ID NO: 723549 - protein, 18 aa, Homo sapiens
  CDR3 for alpha chain variable domain of TCR clone 361775 (TRAV26-1, TRAJ23)
CIVRVGLEVWNQGGKVNF

SEQ ID NO: 723550 - protein, 16 aa, Homo sapiens
  CDR3 for beta chain variable domain of TCR clone 361775 (TRBV12-4, TRBJ2-5)
CASSFFVRGRQETQYF

SEQ ID NO: 723551 - protein, 14 aa, Homo sapiens
  CDR3 for alpha chain variable domain of TCR clone 361776 (TRAV6, TRAJ37)
CALGSQGNTGKLIF

SEQ ID NO: 723552 - protein, 15 aa, Homo sapiens
  CDR3 for beta chain variable domain of TCR clone 361776 (TRBV2, TRBJ2-1)
CASSEEREGDNERFF

SEQ ID NO: 723553 - protein, 15 aa, Homo sapiens
  CDR3 for alpha chain variable domain of TCR clone 361777 (TRAV13-2, TRAJ23)
CLVCAERHRGGKLIF

SEQ ID NO: 723554 - protein, 16 aa, Homo sapiens
  CDR3 for beta chain variable domain of TCR clone 361777 (TRBV20-1, TRBJ1-4)
CSAPGQGLLTNEKLFF

SEQ ID NO: 723555 - protein, 16 aa, Homo sapiens
  CDR3 for alpha chain variable domain of TCR clone 361778 (TRAV3, TRAJ37)
CAVRGEGSGNTGTLIF

SEQ ID NO: 723556 - protein, 13 aa, Homo sapiens
  CDR3 for beta chain variable domain of TCR clone 361778 (TRBV14, TRBJ2-7)
CASSQDRRYEQYF

SEQ ID NO: 723557 - protein, 13 aa, Homo sapiens
  CDR3 for alpha chain variable domain of TCR clone 361779 (TRAV21, TRAJ37)
CAVSSGNTGKLIF

SEQ ID NO: 723558 - protein, 15 aa, Homo sapiens
  CDR3 for beta chain variable domain of TCR clone 361779 (TRBV12-4, TRBJ1-2)
CASSFVDRGNHGYTF

SEQ ID NO: 723559 - protein, 12 aa, Homo sapiens
  CDR3 for alpha chain variable domain of TCR clone 361780 (TRAV12-3, TRAJ17)
CAMTLTGNKLTF

SEQ ID NO: 723560 - protein, 13 aa, Homo sapiens
  CDR3 for beta chain variable domain of TCR clone 361780 (TRBV7-9, TRBJ1-2)
CASSLNQNYGYTF

SEQ ID NO: 723561 - protein, 12 aa, Homo sapiens
  CDR3 for alpha chain variable domain of TCR clone 361781 (TRAV21, TRAJ31)
CAVSPAKGRLMF

SEQ ID NO: 723562 - protein, 14 aa, Homo sapiens
  CDR3 for beta chain variable domain of TCR clone 361781 (TRBV28, TRBJ2-7)
CASSLLRISYEQYF

SEQ ID NO: 723563 - protein, 12 aa, Homo sapiens
  CDR3 for alpha chain variable domain of TCR clone 361782 (TRAV12-3, TRAJ17)
CAMTLTGNKLTF

SEQ ID NO: 723564 - protein, 15 aa, Homo sapiens
  CDR3 for beta chain variable domain of TCR clone 361782 (TRBV20-1, TRBJ2-7)
CSARERVSGMDVQYF

SEQ ID NO: 723565 - protein, 14 aa, Homo sapiens
  CDR3 for alpha chain variable domain of TCR clone 361783 (TRAV14/DV4, TRAJ41)
CARGGPDSGYALNF

SEQ ID NO: 723566 - protein, 15 aa, Homo sapiens
  CDR3 for beta chain variable domain of TCR clone 361783 (TRBV19, TRBJ2-1)
CASSIQATSFNEQFF

SEQ ID NO: 723567 - protein, 10 aa, Homo sapiens
  CDR3 for alpha chain variable domain of TCR clone 361784 (TRAV1-2, TRAJ23)
CAAWAGKLIF

SEQ ID NO: 723568 - protein, 15 aa, Homo sapiens
  CDR3 for beta chain variable domain of TCR clone 361784 (TRBV7-9, TRBJ1-2)
CASSLDREPNYGYTF

SEQ ID NO: 723569 - protein, 13 aa, Homo sapiens
  CDR3 for alpha chain variable domain of TCR clone 361785 (TRAV21, TRAJ27)
CAALNTNAGKSTF

SEQ ID NO: 723570 - protein, 13 aa, Homo sapiens
  CDR3 for beta chain variable domain of TCR clone 361785 (TRBV4-1, TRBJ2-7)
CASSQGQAYEQYF

SEQ ID NO: 723571 - protein, 13 aa, Homo sapiens
  CDR3 for alpha chain variable domain of TCR clone 361786 (TRAV12-3, TRAJ33)
CVMSVNSNYQLIW

SEQ ID NO: 723572 - protein, 16 aa, Homo sapiens
  CDR3 for beta chain variable domain of TCR clone 361786 (TRBV7-3, TRBJ2-3)
CASSLSGYRPEDTQYF

SEQ ID NO: 723573 - protein, 14 aa, Homo sapiens
  CDR3 for alpha chain variable domain of TCR clone 361787 (TRAV20, TRAJ44)
CAVQDTCTASKLTF

SEQ ID NO: 723574 - protein, 13 aa, Homo sapiens
  CDR3 for beta chain variable domain of TCR clone 361787 (TRBV29-1, TRBJ1-3)
CSAGTGRGNTIYF

SEQ ID NO: 723575 - protein, 10 aa, Homo sapiens
  CDR3 for alpha chain variable domain of TCR clone 361788 (TRAV13-2, TRAJ34)
CAENTDKLIF

SEQ ID NO: 723576 - protein, 14 aa, Homo sapiens
  CDR3 for beta chain variable domain of TCR clone 361788 (TRBV19, TRBJ2-1)
CASPTFVLSGEQFF

SEQ ID NO: 723577 - protein, 14 aa, Homo sapiens
  CDR3 for alpha chain variable domain of TCR clone 361789 (TRAV12-2, TRAJ13)
CAVKKTGCYQKVTF

SEQ ID NO: 723578 - protein, 17 aa, Homo sapiens
  CDR3 for beta chain variable domain of TCR clone 361789 (TRBV20-1, TRBJ2-2)
CSASGSGQGGLTGELFF

SEQ ID NO: 723579 - protein, 16 aa, Homo sapiens
  CDR3 for alpha chain variable domain of TCR clone 361790 (TRAV3, TRAJ13)
CAVRDPNSGGYQKVTF

SEQ ID NO: 723580 - protein, 15 aa, Homo sapiens
  CDR3 for beta chain variable domain of TCR clone 361790 (TRBV27, TRBJ1-6)
CASSFDRGLGSPLHF

SEQ ID NO: 723581 - protein, 14 aa, Homo sapiens
  CDR3 for alpha chain variable domain of TCR clone 361791 (TRAV12-2, TRAJ13)
CAVKKTGGYQKVTF

SEQ ID NO: 723582 - protein, 12 aa, Homo sapiens
  CDR3 for beta chain variable domain of TCR clone 361791 (TRBV7-2, TRBJ2-1)
CASSLRQNEQFF

SEQ ID NO: 723583 - protein, 15 aa, Homo sapiens
  CDR3 for alpha chain variable domain of TCR clone 361792 (TRAV3, TRAJ22)
CAVRDRGGSARQLTF

SEQ ID NO: 723584 - protein, 15 aa, Homo sapiens
  CDR3 for beta chain variable domain of TCR clone 361792 (TRBV7-2, TRBJ2-5)
CASSLLSGAYETQYF

SEQ ID NO: 723585 - protein, 15 aa, Homo sapiens
  CDR3 for alpha chain variable domain of TCR clone 361793 (TRAV13-1, TRAJ57)
QVPPLSQGGSEKLVF

SEQ ID NO: 723586 - protein, 17 aa, Homo sapiens
  CDR3 for beta chain variable domain of TCR clone 361793 (TRBV6-1, TRBJ1-2)
CASSGTHSQRGNYGYTF

SEQ ID NO: 723587 - protein, 15 aa, Homo sapiens
  CDR3 for alpha chain variable domain of TCR clone 361794 (TRAV27, TRAJ24)
CAGGTSADSWGKLQF

SEQ ID NO: 723588 - protein, 16 aa, Homo sapiens
  CDR3 for beta chain variable domain of TCR clone 361794 (TRBV2, TRBJ2-1)
CASSVGGSLSYNEQFF

SEQ ID NO: 723589 - protein, 12 aa, Homo sapiens
  CDR3 for alpha chain variable domain of TCR clone 361795 (TRAV8-3, TRAJ20)
CAVGGGDYKLSF

SEQ ID NO: 723590 - protein, 14 aa, Homo sapiens
  CDR3 for beta chain variable domain of TCR clone 361795 (TRBV5-1, TRBJ2-7)
CASSRGESVYEQYF

SEQ ID NO: 723591 - protein, 13 aa, Homo sapiens
  CDR3 for alpha chain variable domain of TCR clone 361796 (TRAV12-1, TRAJ13)
YVVALLGYQKVTF

SEQ ID NO: 723592 - protein, 13 aa, Homo sapiens
  CDR3 for beta chain variable domain of TCR clone 361796 (TRBV20-1, TRBJ2-5)
CSAILTGQETQYF

SEQ ID NO: 723593 - protein, 13 aa, Homo sapiens
  CDR3 for alpha chain variable domain of TCR clone 361797 (TRAV12-3, TRAJ47)
CAMKKEYGNKLGF

SEQ ID NO: 723594 - protein, 15 aa, Homo sapiens
  CDR3 for beta chain variable domain of TCR clone 361797 (TRBV20-1, TRBJ2-7)
CSARDRVSGMDEQYF

SEQ ID NO: 723595 - protein, 11 aa, Homo sapiens
  CDR3 for alpha chain variable domain of TCR clone 361798 (TRAV12-2, TRAJ43)
CASPIWNDMRF

SEQ ID NO: 723596 - protein, 12 aa, Homo sapiens
  CDR3 for beta chain variable domain of TCR clone 361798 (TRBV20-1, TRBJ2-7)
CSAGLKMGEQYF

SEQ ID NO: 723597 - protein, 14 aa, Homo sapiens
  CDR3 for alpha chain variable domain of TCR clone 361799 (TRAV26-1, TRAJ48)
CIVRVPFGNEQLTF

SEQ ID NO: 723598 - protein, 16 aa, Homo sapiens
  CDR3 for beta chain variable domain of TCR clone 361799 (TRBV18, TRBJ2-1)
CASSPYLSIRGDEQFF

SEQ ID NO: 723599 - protein, 18 aa, Homo sapiens
  CDR3 for alpha chain variable domain of TCR clone 361800 (TRAV21, TRAJ52)
CAVRPSPSVGTSYGKLTF

SEQ ID NO: 723600 - protein, 17 aa, Homo sapiens
  CDR3 for beta chain variable domain of TCR clone 361800 (TRBV13, TRBJ2-3)
CASSLSRVAGGRNTQYF

SEQ ID NO: 723601 - protein, 13 aa, Homo sapiens
  CDR3 for alpha chain variable domain of TCR clone 361801 (TRAV3, TRAJ21)
CAVREPDVNKFYF

SEQ ID NO: 723602 - protein, 17 aa, Homo sapiens
  CDR3 for beta chain variable domain of TCR clone 361801 (TRBV7-8, TRBJ2-6)
CASSAGTGGAGANVLTF

SEQ ID NO: 723603 - protein, 15 aa, Homo sapiens
  CDR3 for alpha chain variable domain of TCR clone 361802 (TRAV8-3, TRAJ27)
CAVGPSKTNAGKSNF

SEQ ID NO: 723604 - protein, 12 aa, Homo sapiens
  CDR3 for beta chain variable domain of TCR clone 361802 (TRBV11-2, TRBJ2-2)
CASSLGGGELFF

SEQ ID NO: 723605 - protein, 15 aa, Homo sapiens
  CDR3 for alpha chain variable domain of TCR clone 361803 (TRAV3, TRAJ5)
CAVRDLDTGRIALTF

SEQ ID NO: 723606 - protein, 12 aa, Homo sapiens
  CDR3 for beta chain variable domain of TCR clone 361803 (TRBV2, TRBJ1-1)
CATPSRGTEAFF

SEQ ID NO: 723607 - protein, 14 aa, Homo sapiens
  CDR3 for alpha chain variable domain of TCR clone 361804 (TRAV1-2, TRAJ16)
CAVNRFSDGQKLLF

SEQ ID NO: 723608 - protein, 15 aa, Homo sapiens
  CDR3 for beta chain variable domain of TCR clone 361804 (TRBV4-1, TRBJ1-4)
CASRDTGGTNENLFF

SEQ ID NO: 723609 - protein, 11 aa, Homo sapiens
  CDR3 for alpha chain variable domain of TCR clone 361805 (TRAV12-3, TRAJ43)
CAMSVSNDMRF

SEQ ID NO: 723610 - protein, 14 aa, Homo sapiens
  CDR3 for beta chain variable domain of TCR clone 361805 (TRBV20-1, TRBJ2-5)
CSALVPGYQETQYF

SEQ ID NO: 723611 - protein, 13 aa, Homo sapiens
  CDR3 for alpha chain variable domain of TCR clone 361806 (TRAV21, TRAJ20)
CAVGLRVDYKLSF

SEQ ID NO: 723612 - protein, 17 aa, Homo sapiens
  CDR3 for beta chain variable domain of TCR clone 361806 (TRBV7-3, TRBJ2-3)
RASSLMKRMRGADTQYF

SEQ ID NO: 723613 - protein, 15 aa, Homo sapiens
  CDR3 for alpha chain variable domain of TCR clone 361807 (TRAV3, TRAJ5)
CAVRDLDTGRRALTF

SEQ ID NO: 723614 - protein, 13 aa, Homo sapiens
  CDR3 for beta chain variable domain of TCR clone 361807 (TRBV19, TRBJ1-5)
CASSEGSNQPQHF

SEQ ID NO: 723615 - protein, 14 aa, Homo sapiens
  CDR3 for alpha chain variable domain of TCR clone 361808 (TRAV20, TRAJ42)
CAVQARGSQGNLIF

SEQ ID NO: 723616 - protein, 14 aa, Homo sapiens
  CDR3 for beta chain variable domain of TCR clone 361808 (TRBV7-8, TRBJ2-7)
CASSPRDRVYEQYF

SEQ ID NO: 723617 - protein, 12 aa, Homo sapiens
  CDR3 for alpha chain variable domain of TCR clone 361809 (TRAV13-1, TRAJ48)
CAANFGNEKLTF

SEQ ID NO: 723618 - protein, 15 aa, Homo sapiens
  CDR3 for beta chain variable domain of TCR clone 361809 (TRBV5-8, TRBJ2-2)
CASSLDRGATGELFF

SEQ ID NO: 723619 - protein, 16 aa, Homo sapiens
  CDR3 for alpha chain variable domain of TCR clone 361810 (TRAV12-3, TRAJ53)
CAMSPGSGGSNYKLTF

SEQ ID NO: 723620 - protein, 11 aa, Homo sapiens
  CDR3 for beta chain variable domain of TCR clone 361810 (TRBV29-1, TRBJ2-5)
CSENRAGTQYF

SEQ ID NO: 723621 - protein, 13 aa, Homo sapiens
  CDR3 for alpha chain variable domain of TCR clone 361811 (TRAV13-1, TRAJ20)
CAARVSNDYKLSF

SEQ ID NO: 723622 - protein, 12 aa, Homo sapiens
  CDR3 for beta chain variable domain of TCR clone 361811 (TRBV20-1, TRBJ2-1)
CSARLGTNEQFF

SEQ ID NO: 723623 - protein, 12 aa, Homo sapiens
  CDR3 for alpha chain variable domain of TCR clone 361812 (TRAV26-1, TRAJ36)
CIVETVANNLFF

SEQ ID NO: 723624 - protein, 13 aa, Homo sapiens
  CDR3 for beta chain variable domain of TCR clone 361812 (TRBV7-9, TRBJ1-2)
CASSLKQNYGYTF

SEQ ID NO: 723625 - protein, 13 aa, Homo sapiens
  CDR3 for alpha chain variable domain of TCR clone 361813 (TRAV38-1, TRAJ42)
CARWGGSQGNITF

SEQ ID NO: 723626 - protein, 14 aa, Homo sapiens
  CDR3 for beta chain variable domain of TCR clone 361813 (TRBV12-4, TRBJ2-1)
CASSLGQGASEQFF

SEQ ID NO: 723627 - protein, 11 aa, Homo sapiens
  CDR3 for alpha chain variable domain of TCR clone 361814 (TRAV21, TRAJ41)
CAVRSGYALNF

SEQ ID NO: 723628 - protein, 13 aa, Homo sapiens
  CDR3 for beta chain variable domain of TCR clone 361814 (TRBV7-9, TRBJ1-2)
CASSLKQNYSYTF

SEQ ID NO: 723629 - protein, 14 aa, Homo sapiens
  CDR3 for alpha chain variable domain of TCR clone 361815 (TRAV12-3, TRAJ58)
CAMSTETIGSRLTF

SEQ ID NO: 723630 - protein, 15 aa, Homo sapiens
  CDR3 for beta chain variable domain of TCR clone 361815 (TRBV4-1, TRBJ1-4)
CASSDTGGTNEKLFF

SEQ ID NO: 723631 - protein, 13 aa, Homo sapiens
  CDR3 for alpha chain variable domain of TCR clone 361816 (TRAV35, TRAJ42)
CAGFPGSQGNLIF

SEQ ID NO: 723632 - protein, 14 aa, Homo sapiens
  CDR3 for beta chain variable domain of TCR clone 361816 (TRBV28, TRBJ1-2)
CASRIQGANYGYTF

SEQ ID NO: 723633 - protein, 12 aa, Homo sapiens
  CDR3 for alpha chain variable domain of TCR clone 361817 (TRAV12-3, TRAJ17)
CAMTLTGNKLTL

SEQ ID NO: 723634 - protein, 16 aa, Homo sapiens
  CDR3 for beta chain variable domain of TCR clone 361817 (TRBV24-1, TRBJ2-3)
CATSDPGTGATDTQYF

SEQ ID NO: 723635 - protein, 13 aa, Homo sapiens
  CDR3 for alpha chain variable domain of TCR clone 361818 (TRAV22, TRAJ26)
CSVEHNYGQNFVF

SEQ ID NO: 723636 - protein, 16 aa, Homo sapiens
  CDR3 for beta chain variable domain of TCR clone 361818 (TRBV7-2, TRBJ2-6)
CASSERRASGANVLTF

SEQ ID NO: 723637 - protein, 14 aa, Homo sapiens
  CDR3 for alpha chain variable domain of TCR clone 361819 (TRAV26-1, TRAJ39)
CIVRGSRAGNMPTF

SEQ ID NO: 723638 - protein, 15 aa, Homo sapiens
  CDR3 for beta chain variable domain of TCR clone 361819 (TRBV7-9, TRBJ1-5)
CASSQGHQPNQPRHF

SEQ ID NO: 723639 - protein, 15 aa, Homo sapiens
  CDR3 for alpha chain variable domain of TCR clone 361820 (TRAV8-4, TRAJ37)
CAVSTRSGNTGKLIF

SEQ ID NO: 723640 - protein, 20 aa, Homo sapiens
  CDR3 for beta chain variable domain of TCR clone 361820 (TRBV7-8, TRBJ2-2)
CASSHLFPGPTVHLTGELFF

SEQ ID NO: 723641 - protein, 16 aa, Homo sapiens
  CDR3 for alpha chain variable domain of TCR clone 361821 (TRAV26-1, TRAJ32)
CIVRTNYGGATNKLIF

SEQ ID NO: 723642 - protein, 16 aa, Homo sapiens
  CDR3 for beta chain variable domain of TCR clone 361821 (TRBV7-2, TRBJ2-6)
CASSLAGRSGANVLTF

SEQ ID NO: 723643 - protein, 13 aa, Homo sapiens
  CDR3 for alpha chain variable domain of TCR clone 361822 (TRAV8-3, TRAJ48)
CAVVPFGNEKLTF

SEQ ID NO: 723644 - protein, 15 aa, Homo sapiens
  CDR3 for beta chain variable domain of TCR clone 361822 (TRBV19, TRBJ1-1)
CASTSGQIQNTEAFF

SEQ ID NO: 723645 - protein, 14 aa, Homo sapiens
  CDR3 for alpha chain variable domain of TCR clone 361823 (TRAV29/DV5, TRAJ28)
CAARAGAGSYQLTF

SEQ ID NO: 723646 - protein, 19 aa, Homo sapiens
  CDR3 for beta chain variable domain of TCR clone 361823 (TRBV19, TRBJ2-5)
CASSIGQVTDFFLGETQYF

SEQ ID NO: 723647 - protein, 15 aa, Homo sapiens
  CDR3 for alpha chain variable domain of TCR clone 361824 (TRAV38-1, TRAJ58)
CAFMKQETSGSRLTF

SEQ ID NO: 723648 - protein, 14 aa, Homo sapiens
  CDR3 for beta chain variable domain of TCR clone 361824 (TRBV7-2, TRBJ2-1)
CASSLSGVYNEQFF

SEQ ID NO: 723649 - protein, 12 aa, Homo sapiens
  CDR3 for alpha chain variable domain of TCR clone 361825 (TRAV1-1, TRAJ39)
CAVTVVGNMLTF

SEQ ID NO: 723650 - protein, 14 aa, Homo sapiens
  CDR3 for beta chain variable domain of TCR clone 361825 (TRBV19, TRBJ2-7)
CASTVQGRPYEQYF

SEQ ID NO: 723651 - protein, 11 aa, Homo sapiens
  CDR3 for alpha chain variable domain of TCR clone 361826 (TRAV13-1, TRAJ39)
CASHAGNMLTF

SEQ ID NO: 723652 - protein, 11 aa, Homo sapiens
  CDR3 for beta chain variable domain of TCR clone 361826 (TRBV7-9, TRBJ2-3)
CASSGPDTQYF

SEQ ID NO: 723653 - protein, 12 aa, Homo sapiens
  CDR3 for alpha chain variable domain of TCR clone 361827 (TRAV12-3, TRAJ17)
CAMTPTGNKLTF

SEQ ID NO: 723654 - protein, 12 aa, Homo sapiens
  CDR3 for beta chain variable domain of TCR clone 361827 (TRBV11-2, TRBJ2-2)
CASSLGGGELFF

SEQ ID NO: 723655 - protein, 11 aa, Homo sapiens
  CDR3 for alpha chain variable domain of TCR clone 361828 (TRAV12-3, TRAJ27)
CAMANAGKSTF

SEQ ID NO: 723656 - protein, 14 aa, Homo sapiens
  CDR3 for beta chain variable domain of TCR clone 361828 (TRBV13, TRBJ2-5)
CASSLERVGETQYF

SEQ ID NO: 723657 - protein, 18 aa, Homo sapiens
  CDR3 for alpha chain variable domain of TCR clone 361829 (TRAV21, TRAJ52)
CAVRPSPAGGTSHGKLTF

SEQ ID NO: 723658 - protein, 17 aa, Homo sapiens
  CDR3 for beta chain variable domain of TCR clone 361829 (TRBV13, TRBJ2-3)
CASSLSRVAGGRNTQYL

SEQ ID NO: 723659 - protein, 10 aa, Homo sapiens
  CDR3 for alpha chain variable domain of TCR clone 361830 (TRAV12-3, TRAJ18)
CAMSAEAQPW

SEQ ID NO: 723660 - protein, 15 aa, Homo sapiens
  CDR3 for beta chain variable domain of TCR clone 361830 (TRBV6-3, TRBJ2-7)
CASSSPGTVFYEQYF

SEQ ID NO: 723661 - protein, 14 aa, Homo sapiens
  CDR3 for alpha chain variable domain of TCR clone 361831 (TRAV17, TRAJ22)
YATSPSGSARQLTF

SEQ ID NO: 723662 - protein, 13 aa, Homo sapiens
  CDR3 for beta chain variable domain of TCR clone 361831 (TRBV12-4, TRBJ1-2)
CASSLRQGKGYTF

SEQ ID NO: 723663 - protein, 12 aa, Homo sapiens
  CDR3 for alpha chain variable domain of TCR clone 361832 (TRAV1-1, TRAJ43)
CAPRVSSNDMRF

SEQ ID NO: 723664 - protein, 15 aa, Homo sapiens
  CDR3 for beta chain variable domain of TCR clone 361832 (TRBV5-1, TRBJ2-7)
CASSLGDSTTYEQYF

SEQ ID NO: 723665 - protein, 12 aa, Homo sapiens
  CDR3 for alpha chain variable domain of TCR clone 361833 (TRAV13-1, TRAJ27)
CAAHTNAGKSTF

SEQ ID NO: 723666 - protein, 14 aa, Homo sapiens
  CDR3 for beta chain variable domain of TCR clone 361833 (TRBV19, TRBJ2-2)
CASSGQGIAGGLFF

SEQ ID NO: 723667 - protein, 14 aa, Homo sapiens
  CDR3 for alpha chain variable domain of TCR clone 361834 (TRAV12-2, TRAJ44)
CAVNPAGTASKLTF

SEQ ID NO: 723668 - protein, 13 aa, Homo sapiens
  CDR3 for beta chain variable domain of TCR clone 361834 (TRBV20-1, TRBJ1-6)
CSAALGVGSRLHF

SEQ ID NO: 723669 - protein, 15 aa, Homo sapiens
  CDR3 for alpha chain variable domain of TCR clone 361835 (TRAV17, TRAJ35)
CATAFVIGFGNVLHC

SEQ ID NO: 723670 - protein, 13 aa, Homo sapiens
  CDR3 for beta chain variable domain of TCR clone 361835 (TRBV7-6, TRBJ2-3)
CASSLRSDNTQYF

SEQ ID NO: 723671 - protein, 17 aa, Homo sapiens
  CDR3 for alpha chain variable domain of TCR clone 361836 (TRAV3, TRAJ12)
CAVRDGGRMDSSYKLIF

SEQ ID NO: 723672 - protein, 14 aa, Homo sapiens
  CDR3 for beta chain variable domain of TCR clone 361836 (TRBV2, TRBJ1-5)
CASSGTVSNQPQHF

SEQ ID NO: 723673 - protein, 11 aa, Homo sapiens
  CDR3 for alpha chain variable domain of TCR clone 361837 (TRAV2, TRAJ23)
CAVETRGNLIF

SEQ ID NO: 723674 - protein, 17 aa, Homo sapiens
  CDR3 for beta chain variable domain of TCR clone 361837 (TRBV20-1, TRBJ2-1)
CSASSSGLAGSYNEQFF

SEQ ID NO: 723675 - protein, 14 aa, Homo sapiens
  CDR3 for alpha chain variable domain of TCR clone 361838 (TRAV12-2, TRAJ13)
CAVKKTGGYQKVTF

SEQ ID NO: 723676 - protein, 16 aa, Homo sapiens
  CDR3 for beta chain variable domain of TCR clone 361838 (TRBV28, TRBJ2-1)
CASSLGGSGSYNEQFF

SEQ ID NO: 723677 - protein, 12 aa, Homo sapiens
  CDR3 for alpha chain variable domain of TCR clone 361839 (TRAV30, TRAJ43)
CGTEERGNDMRF

SEQ ID NO: 723678 - protein, 18 aa, Homo sapiens
  CDR3 for beta chain variable domain of TCR clone 361839 (TRBV20-1, TRBJ2-6)
CSAETTSTHGSGANVLTF

SEQ ID NO: 723679 - protein, 14 aa, Homo sapiens
  CDR3 for alpha chain variable domain of TCR clone 361840 (TRAV13-1, TRAJ35)
CAASKGGFGNVLHC

SEQ ID NO: 723680 - protein, 14 aa, Homo sapiens
  CDR3 for beta chain variable domain of TCR clone 361840 (TRBV11-2, TRBJ2-1)
CASSLEVANNEQFF

SEQ ID NO: 723681 - protein, 13 aa, Homo sapiens
  CDR3 for alpha chain variable domain of TCR clone 361841 (TRAV3, TRAJ15)
CAMRDQAGTALIF

SEQ ID NO: 723682 - protein, 15 aa, Homo sapiens
  CDR3 for beta chain variable domain of TCR clone 361841 (TRBV11-1, TRBJ2-7)
CASSLNYGASYEQYF

SEQ ID NO: 723683 - protein, 12 aa, Homo sapiens
  CDR3 for alpha chain variable domain of TCR clone 361842 (TRAV12-3, TRAJ17)
CAMTLTGNKLTF

SEQ ID NO: 723684 - protein, 20 aa, Homo sapiens
  CDR3 for beta chain variable domain of TCR clone 361842 (TRBV19, TRBJ2-1)
CASSISRTVASTRLNNEQFF

SEQ ID NO: 723685 - protein, 15 aa, Homo sapiens
  CDR3 for alpha chain variable domain of TCR clone 361843 (TRAV14/DV4, TRAJ10)
CAMRELTGGGNKITF

SEQ ID NO: 723686 - protein, 12 aa, Homo sapiens
  CDR3 for beta chain variable domain of TCR clone 361843 (TRBV14, TRBJ2-5)
CASSQLKETQYL

SEQ ID NO: 723687 - protein, 13 aa, Homo sapiens
  CDR3 for alpha chain variable domain of TCR clone 361844 (TRAV8-3, TRAJ28)
CAVGAVGSYQLTF

SEQ ID NO: 723688 - protein, 14 aa, Homo sapiens
  CDR3 for beta chain variable domain of TCR clone 361844 (TRBV7-2, TRBJ2-7)
CASRSEGAAYEQYF

SEQ ID NO: 723689 - protein, 14 aa, Homo sapiens
  CDR3 for alpha chain variable domain of TCR clone 361845 (TRAV26-1, TRAJ21)
CIVRPPYNFNKFYF

SEQ ID NO: 723690 - protein, 14 aa, Homo sapiens
  CDR3 for beta chain variable domain of TCR clone 361845 (TRBV19, TRBJ2-1)
CASPTFVLRGEQFF

SEQ ID NO: 723691 - protein, 14 aa, Homo sapiens
  CDR3 for alpha chain variable domain of TCR clone 361846 (TRAV9-2, TRAJ39)
CALYIYNAGNMLTF

SEQ ID NO: 723692 - protein, 15 aa, Homo sapiens
  CDR3 for beta chain variable domain of TCR clone 361846 (TRBV4-1, TRBJ2-1)
CASSQGGELYNEQFF

SEQ ID NO: 723693 - protein, 12 aa, Homo sapiens
  CDR3 for alpha chain variable domain of TCR clone 361847 (TRAV8-1, TRAJ39)
CAGLNNEATCSP

SEQ ID NO: 723694 - protein, 17 aa, Homo sapiens
  CDR3 for beta chain variable domain of TCR clone 361847 (TRBV19, TRBJ2-3)
CASSIDPAGGGTDTQYF

SEQ ID NO: 723695 - protein, 12 aa, Homo sapiens
  CDR3 for alpha chain variable domain of TCR clone 361848 (TRAV26-2, TRAJ23)
CILRGQGGKLIF

SEQ ID NO: 723696 - protein, 17 aa, Homo sapiens
  CDR3 for beta chain variable domain of TCR clone 361848 (TRBV20-1, TRBJ1-5)
CSARVGGERQGNQPQHF

SEQ ID NO: 723697 - protein, 12 aa, Homo sapiens
  CDR3 for alpha chain variable domain of TCR clone 361849 (TRAV17, TRAJ57)
CATYGGSEKLFF

SEQ ID NO: 723698 - protein, 13 aa, Homo sapiens
  CDR3 for beta chain variable domain of TCR clone 361849 (TRBV7-9, TRBJ2-7)
CASSFAGAYEQYF

SEQ ID NO: 723699 - protein, 13 aa, Homo sapiens
  CDR3 for alpha chain variable domain of TCR clone 361850 (TRAV21, TRAJ20)
CAVGLRVDYKLSF

SEQ ID NO: 723700 - protein, 15 aa, Homo sapiens
  CDR3 for beta chain variable domain of TCR clone 361850 (TRBV7-2, TRBJ2-1)
CASSLGLAGGREQFF

SEQ ID NO: 723701 - protein, 13 aa, Homo sapiens
  CDR3 for alpha chain variable domain of TCR clone 361851 (TRAV20, TRAJ40)
CAVPFSGTYKYIF

SEQ ID NO: 723702 - protein, 13 aa, Homo sapiens
  CDR3 for beta chain variable domain of TCR clone 361851 (TRBV15, TRBJ2-5)
CATSQIAEETQYF

SEQ ID NO: 723703 - protein, 14 aa, Homo sapiens
  CDR3 for alpha chain variable domain of TCR clone 361852 (TRAV1-2, TRAJ8)
CAVREDTGFQKLVF

SEQ ID NO: 723704 - protein, 17 aa, Homo sapiens
  CDR3 for beta chain variable domain of TCR clone 361852 (TRBV6-5, TRBJ2-7)
CASSYSFWGQGSYEQYF

SEQ ID NO: 723705 - protein, 16 aa, Homo sapiens
  CDR3 for alpha chain variable domain of TCR clone 361853 (TRAV13-1, TRAJ48)
CAASIFGNFGNETLTF

SEQ ID NO: 723706 - protein, 16 aa, Homo sapiens
  CDR3 for beta chain variable domain of TCR clone 361853 (TRBV18, TRBJ1-5)
CASSPYRVEGNQPQHF

SEQ ID NO: 723707 - protein, 14 aa, Homo sapiens
  CDR3 for alpha chain variable domain of TCR clone 361854 (TRAV2, TRAJ9)
CAVVDRSGGFKTIF

SEQ ID NO: 723708 - protein, 13 aa, Homo sapiens
  CDR3 for beta chain variable domain of TCR clone 361854 (TRBV19, TRBJ1-2)
CASSVPGQDGYTF

SEQ ID NO: 723709 - protein, 11 aa, Homo sapiens
  CDR3 for alpha chain variable domain of TCR clone 361855 (TRAV12-3, TRAJ43)
CAMSVSNDMRF

SEQ ID NO: 723710 - protein, 13 aa, Homo sapiens
  CDR3 for beta chain variable domain of TCR clone 361855 (TRBV20-1, TRBJ2-7)
CSASPFSSYEQYF

SEQ ID NO: 723711 - protein, 14 aa, Homo sapiens
  CDR3 for alpha chain variable domain of TCR clone 361856 (TRAV35, TRAJ53)
CAGNSGGSNYKLTF

SEQ ID NO: 723712 - protein, 17 aa, Homo sapiens
  CDR3 for beta chain variable domain of TCR clone 361856 (TRBV7-8, TRBJ2-6)
CASSAGTGGAGANVLTF

SEQ ID NO: 723713 - protein, 12 aa, Homo sapiens
  CDR3 for alpha chain variable domain of TCR clone 361857 (TRAV23/DV6, TRAJ53)
CAASKLGSGGRN

SEQ ID NO: 723714 - protein, 14 aa, Homo sapiens
  CDR3 for beta chain variable domain of TCR clone 361857 (TRBV7-9, TRBJ2-3)
CASSLEQGTNTQYF

SEQ ID NO: 723715 - protein, 14 aa, Homo sapiens
  CDR3 for alpha chain variable domain of TCR clone 361858 (TRAV1-2, TRAJ16)
CAVNRFSDGQKLLF

SEQ ID NO: 723716 - protein, 15 aa, Homo sapiens
  CDR3 for beta chain variable domain of TCR clone 361858 (TRBV9, TRBJ1-6)
CATSVAGTGDSPLHF

SEQ ID NO: 723717 - protein, 11 aa, Homo sapiens
  CDR3 for alpha chain variable domain of TCR clone 361859 (TRAV35, TRAJ34)
CWARNTDKLIF

SEQ ID NO: 723718 - protein, 14 aa, Homo sapiens
  CDR3 for beta chain variable domain of TCR clone 361859 (TRBV7-8, TRBJ2-3)
CASSLEAGTDTQYF

SEQ ID NO: 723719 - protein, 13 aa, Homo sapiens
  CDR3 for alpha chain variable domain of TCR clone 361860 (TRAV9-2, TRAJ53)
CALSGGSNDKLTF

SEQ ID NO: 723720 - protein, 15 aa, Homo sapiens
  CDR3 for beta chain variable domain of TCR clone 361860 (TRBV10-3, TRBJ2-3)
CAISVLGQETDTQYF

SEQ ID NO: 723721 - protein, 13 aa, Homo sapiens
  CDR3 for alpha chain variable domain of TCR clone 361861 (TRAV38-2/DV8, TRAJ45)
CAYVGGGTDGLTF

SEQ ID NO: 723722 - protein, 13 aa, Homo sapiens
  CDR3 for beta chain variable domain of TCR clone 361861 (TRBV29-1, TRBJ2-1)
CSVEGGRVNEQFF

SEQ ID NO: 723723 - protein, 23 aa, Homo sapiens
  CDR3 for alpha chain variable domain of TCR clone 361862 (TRAV26-1, )
CIVRPLNAGNKHIQNPDPAVYQL

SEQ ID NO: 723724 - protein, 13 aa, Homo sapiens
  CDR3 for beta chain variable domain of TCR clone 361862 (TRBV18, TRBJ1-1)
CASSPNGDTEAFF

SEQ ID NO: 723725 - protein, 14 aa, Homo sapiens
  CDR3 for alpha chain variable domain of TCR clone 361863 (TRAV8-4, TRAJ13)
CAVTLSGGYQKVTF

SEQ ID NO: 723726 - protein, 15 aa, Homo sapiens
  CDR3 for beta chain variable domain of TCR clone 361863 (TRBV11-2, TRBJ2-3)
CASSPGGGATDTQYF

SEQ ID NO: 723727 - protein, 10 aa, Homo sapiens
  CDR3 for alpha chain variable domain of TCR clone 361864 (TRAV20, TRAJ22)
CAAPARQLTF

SEQ ID NO: 723728 - protein, 14 aa, Homo sapiens
  CDR3 for beta chain variable domain of TCR clone 361864 (TRBV19, TRBJ2-5)
CASSMGSGATEQFF

SEQ ID NO: 723729 - protein, 14 aa, Homo sapiens
  CDR3 for alpha chain variable domain of TCR clone 361865 (TRAV1-2, TRAJ8)
CAVREDTGFQKLVF

SEQ ID NO: 723730 - protein, 17 aa, Homo sapiens
  CDR3 for beta chain variable domain of TCR clone 361865 (TRBV6-5, TRBJ2-7)
CASRPSVGEVQHYKQYF

SEQ ID NO: 723731 - protein, 14 aa, Homo sapiens
  CDR3 for alpha chain variable domain of TCR clone 361866 (TRAV26-1, TRAJ38)
CIADNAGNNRKLIW

SEQ ID NO: 723732 - protein, 16 aa, Homo sapiens
  CDR3 for beta chain variable domain of TCR clone 361866 (TRBV19, TRBJ2-1)
CASSKAGASSYNEQFF

SEQ ID NO: 723733 - protein, 15 aa, Homo sapiens
  CDR3 for alpha chain variable domain of TCR clone 361867 (TRAV27, TRAJ38)
CAARRNAGNNRKLIW

SEQ ID NO: 723734 - protein, 13 aa, Homo sapiens
  CDR3 for beta chain variable domain of TCR clone 361867 (TRBV12-5, TRBJ2-3)
CASGDRQSCTQYF

SEQ ID NO: 723735 - protein, 15 aa, Homo sapiens
  CDR3 for alpha chain variable domain of TCR clone 361868 (TRAV3, TRAJ5)
CAVRDRKTGRRALTF

SEQ ID NO: 723736 - protein, 15 aa, Homo sapiens
  CDR3 for beta chain variable domain of TCR clone 361868 (TRBV7-9, TRBJ2-2)
CASGPLDTFPGELFF

SEQ ID NO: 723737 - protein, 13 aa, Homo sapiens
  CDR3 for alpha chain variable domain of TCR clone 361869 (TRAV12-2, TRAJ12)
CAVNWDSSYKLIF

SEQ ID NO: 723738 - protein, 16 aa, Homo sapiens
  CDR3 for beta chain variable domain of TCR clone 361869 (TRBV2, TRBJ2-1)
CASSVGGSLSYNEQFF

SEQ ID NO: 723739 - protein, 13 aa, Homo sapiens
  CDR3 for alpha chain variable domain of TCR clone 361870 (TRAV8-3, TRAJ48)
CALVPFGNEKLTF

SEQ ID NO: 723740 - protein, 14 aa, Homo sapiens
  CDR3 for beta chain variable domain of TCR clone 361870 (TRBV18, TRBJ2-7)
CASSLRGGAYEQYF

SEQ ID NO: 723741 - protein, 17 aa, Homo sapiens
  CDR3 for alpha chain variable domain of TCR clone 361871 (TRAV1-1, TRAJ28)
CAVDPAYAGAGSYQLTF

SEQ ID NO: 723742 - protein, 14 aa, Homo sapiens
  CDR3 for beta chain variable domain of TCR clone 361871 (TRBV19, TRBJ2-1)
CASPTFVLSGEQFF

SEQ ID NO: 723743 - protein, 11 aa, Homo sapiens
  CDR3 for alpha chain variable domain of TCR clone 361872 (TRAV17, TRAJ31)
CATDRTARLMF

SEQ ID NO: 723744 - protein, 13 aa, Homo sapiens
  CDR3 for beta chain variable domain of TCR clone 361872 (TRBV7-7, TRBJ2-2)
CASSLTSAGELFF

SEQ ID NO: 723745 - protein, 15 aa, Homo sapiens
  CDR3 for alpha chain variable domain of TCR clone 361873 (TRAV4, TRAJ10)
CLVGGEGGGGNKLTF

SEQ ID NO: 723746 - protein, 15 aa, Homo sapiens
  CDR3 for beta chain variable domain of TCR clone 361873 (TRBV7-2, TRBJ2-7)
CASSLTGQGTYEQYF

SEQ ID NO: 723747 - protein, 14 aa, Homo sapiens
  CDR3 for alpha chain variable domain of TCR clone 361874 (TRAV14/DV4, TRAJ15)
CAMRRDQAGTALIF

SEQ ID NO: 723748 - protein, 20 aa, Homo sapiens
  CDR3 for beta chain variable domain of TCR clone 361874 (TRBV28, TRBJ2-1)
CASTPIGRSPGLAGGNEQFF

SEQ ID NO: 723749 - protein, 12 aa, Homo sapiens
  CDR3 for alpha chain variable domain of TCR clone 361875 (TRAV8-3, TRAJ20)
CAVGANDYKLSF

SEQ ID NO: 723750 - protein, 12 aa, Homo sapiens
  CDR3 for beta chain variable domain of TCR clone 361875 (TRBV28, TRBJ2-3)
CASSVYRDTQYF

SEQ ID NO: 723751 - protein, 16 aa, Homo sapiens
  CDR3 for alpha chain variable domain of TCR clone 361876 (TRAV3, TRAJ37)
CAVRGKGSGNTGKLIF

SEQ ID NO: 723752 - protein, 16 aa, Homo sapiens
  CDR3 for beta chain variable domain of TCR clone 361876 (TRBV12-4, TRBJ1-5)
CASSRRVGGSNQPQHF

SEQ ID NO: 723753 - protein, 14 aa, Homo sapiens
  CDR3 for alpha chain variable domain of TCR clone 361877 (TRAV1-2, TRAJ8)
CAVREDTGFQKLVF

SEQ ID NO: 723754 - protein, 13 aa, Homo sapiens
  CDR3 for beta chain variable domain of TCR clone 361877 (TRBV7-3, TRBJ1-5)
CASSLDSNQPQHF

SEQ ID NO: 723755 - protein, 15 aa, Homo sapiens
  CDR3 for alpha chain variable domain of TCR clone 361878 (TRAV3, TRAJ3)
CAVRDRDSSASKIIF

SEQ ID NO: 723756 - protein, 18 aa, Homo sapiens
  CDR3 for beta chain variable domain of TCR clone 361878 (TRBV29-1, TRBJ2-7)
SAALNSSTGGPTSSTSGR

SEQ ID NO: 723757 - protein, 14 aa, Homo sapiens
  CDR3 for alpha chain variable domain of TCR clone 361879 (TRAV1-2, TRAJ16)
CAVRGFSDGQKLLF

SEQ ID NO: 723758 - protein, 15 aa, Homo sapiens
  CDR3 for beta chain variable domain of TCR clone 361879 (TRBV7-6, TRBJ1-5)
CASSQSSGINQPQHF

SEQ ID NO: 723759 - protein, 15 aa, Homo sapiens
  CDR3 for alpha chain variable domain of TCR clone 361880 (TRAV25, TRAJ52)
CAGRPGGTSYGKLTF

SEQ ID NO: 723760 - protein, 14 aa, Homo sapiens
  CDR3 for beta chain variable domain of TCR clone 361880 (TRBV7-2, TRBJ2-5)
CASSTGGELKTQYF

SEQ ID NO: 723761 - protein, 13 aa, Homo sapiens
  CDR3 for alpha chain variable domain of TCR clone 361881 (TRAV1-2, TRAJ9)
CAVLNTGGFKTNF

SEQ ID NO: 723762 - protein, 15 aa, Homo sapiens
  CDR3 for beta chain variable domain of TCR clone 361881 (TRBV7-3, TRBJ2-1)
CASSPTGGGEVEQFF

SEQ ID NO: 723763 - protein, 14 aa, Homo sapiens
  CDR3 for alpha chain variable domain of TCR clone 361882 (TRAV12-2, TRAJ17)
CSLLFKAAGNKLTF

SEQ ID NO: 723764 - protein, 17 aa, Homo sapiens
  CDR3 for beta chain variable domain of TCR clone 361882 (TRBV20-1, TRBJ2-2)
CSASGSGQGGLTGELFF

SEQ ID NO: 723765 - protein, 11 aa, Homo sapiens
  CDR3 for alpha chain variable domain of TCR clone 361883 (TRAV2, TRAJ13)
CASGGYQKVTF

SEQ ID NO: 723766 - protein, 12 aa, Homo sapiens
  CDR3 for beta chain variable domain of TCR clone 361883 (TRBV7-8, TRBJ2-7)
CASSRGDREQYF

SEQ ID NO: 723767 - protein, 14 aa, Homo sapiens
  CDR3 for alpha chain variable domain of TCR clone 361884 (TRAV12-2, TRAJ44)
CAVNPAGTASKLTF

SEQ ID NO: 723768 - protein, 13 aa, Homo sapiens
  CDR3 for beta chain variable domain of TCR clone 361884 (TRBV20-1, TRBJ1-6)
CSAPVGVGSTLHF

SEQ ID NO: 723769 - protein, 16 aa, Homo sapiens
  CDR3 for alpha chain variable domain of TCR clone 361885 (TRAV12-3, TRAJ53)
CAMSPGSGGSNDKLTF

SEQ ID NO: 723770 - protein, 13 aa, Homo sapiens
  CDR3 for beta chain variable domain of TCR clone 361885 (TRBV4-1, TRBJ2-5)
CASSQEVQETQYF

SEQ ID NO: 723771 - protein, 17 aa, Homo sapiens
  CDR3 for alpha chain variable domain of TCR clone 361886 (TRAV8-6, TRAJ58)
CAVSSWVAETSGSRLTF

SEQ ID NO: 723772 - protein, 14 aa, Homo sapiens
  CDR3 for beta chain variable domain of TCR clone 361886 (TRBV4-2, TRBJ2-1)
CASGLDRAYNEQFF

SEQ ID NO: 723773 - protein, 14 aa, Homo sapiens
  CDR3 for alpha chain variable domain of TCR clone 361887 (TRAV13-1, TRAJ35)
CAASKGGFGFVLHC

SEQ ID NO: 723774 - protein, 13 aa, Homo sapiens
  CDR3 for beta chain variable domain of TCR clone 361887 (TRBV7-3, TRBJ1-1)
CASSQDWGAEAFF

SEQ ID NO: 723775 - protein, 15 aa, Homo sapiens
  CDR3 for alpha chain variable domain of TCR clone 361888 (TRAV4, TRAJ39)
CPVGPNNNAGNMLTL

SEQ ID NO: 723776 - protein, 13 aa, Homo sapiens
  CDR3 for beta chain variable domain of TCR clone 361888 (TRBV11-2, TRBJ2-5)
CASSSTGEETQYF

SEQ ID NO: 723777 - protein, 17 aa, Homo sapiens
  CDR3 for alpha chain variable domain of TCR clone 361889 (TRAV13-1, TRAJ52)
CAASSGAGGTSYGKLRF

SEQ ID NO: 723778 - protein, 15 aa, Homo sapiens
  CDR3 for beta chain variable domain of TCR clone 361889 (TRBV2, TRBJ2-1)
CASSELAGSYNEQFF

SEQ ID NO: 723779 - protein, 15 aa, Homo sapiens
  CDR3 for alpha chain variable domain of TCR clone 361890 (TRAV12-2, TRAJ53)
CAVNGGEGSNYKLTF

SEQ ID NO: 723780 - protein, 14 aa, Homo sapiens
  CDR3 for beta chain variable domain of TCR clone 361890 (TRBV19, TRBJ2-2)
CASSTLHRSGELSF

SEQ ID NO: 723781 - protein, 19 aa, Homo sapiens
  CDR3 for alpha chain variable domain of TCR clone 361891 (TRAV1-2, TRAJ26)
CLLPLCCERPDNYGQKFVF

SEQ ID NO: 723782 - protein, 15 aa, Homo sapiens
  CDR3 for beta chain variable domain of TCR clone 361891 (TRBV9, TRBJ1-6)
CASSVAGTGDSPLHF

SEQ ID NO: 723783 - protein, 15 aa, Homo sapiens
  CDR3 for alpha chain variable domain of TCR clone 361892 (TRAV34, TRAJ38)
CGADFTPGNNRKLIW

SEQ ID NO: 723784 - protein, 11 aa, Homo sapiens
  CDR3 for beta chain variable domain of TCR clone 361892 (TRBV7-9, TRBJ2-1)
CASSLSYEQFF

SEQ ID NO: 723785 - protein, 12 aa, Homo sapiens
  CDR3 for alpha chain variable domain of TCR clone 361893 (TRAV16, TRAJ49)
CALNEGGNQFYF

SEQ ID NO: 723786 - protein, 15 aa, Homo sapiens
  CDR3 for beta chain variable domain of TCR clone 361893 (TRBV6-3, TRBJ2-7)
CASSSPGTVFYEQYF

SEQ ID NO: 723787 - protein, 12 aa, Homo sapiens
  CDR3 for alpha chain variable domain of TCR clone 361894 (TRAV12-2, TRAJ21)
CAVNRNFNKFYF

SEQ ID NO: 723788 - protein, 16 aa, Homo sapiens
  CDR3 for beta chain variable domain of TCR clone 361894 (TRBV12-4, TRBJ2-3)
CASSGTRGKDTDTQYF

SEQ ID NO: 723789 - protein, 15 aa, Homo sapiens
  CDR3 for alpha chain variable domain of TCR clone 361895 (TRAV13-1, TRAJ9)
CVASTLNTGGFKTIF

SEQ ID NO: 723790 - protein, 15 aa, Homo sapiens
  CDR3 for beta chain variable domain of TCR clone 361895 (TRBV6-5, TRBJ2-4)
CASSLRESPKNIQYF

SEQ ID NO: 723791 - protein, 11 aa, Homo sapiens
  CDR3 for alpha chain variable domain of TCR clone 361896 (TRAV12-3, TRAJ27)
CAMANAGKPTF

SEQ ID NO: 723792 - protein, 14 aa, Homo sapiens
  CDR3 for beta chain variable domain of TCR clone 361896 (TRBV12-5, TRBJ2-5)
CASGSRTHQETQYF

SEQ ID NO: 723793 - protein, 18 aa, Homo sapiens
  CDR3 for alpha chain variable domain of TCR clone 361897 (TRAV21, TRAJ52)
CAVRPSPAGGTSYGKLTF

SEQ ID NO: 723794 - protein, 13 aa, Homo sapiens
  CDR3 for beta chain variable domain of TCR clone 361897 (TRBV12-4, TRBJ1-2)
CASSSGPNYGYTF

SEQ ID NO: 723795 - protein, 17 aa, Homo sapiens
  CDR3 for alpha chain variable domain of TCR clone 361898 (TRAV3, TRAJ42)
CAVRDRDYGGSQGNLIF

SEQ ID NO: 723796 - protein, 17 aa, Homo sapiens
  CDR3 for beta chain variable domain of TCR clone 361898 (TRBV4-2, TRBJ1-1)
CASSQVATGGMNTEAFF

SEQ ID NO: 723797 - protein, 12 aa, Homo sapiens
  CDR3 for alpha chain variable domain of TCR clone 361899 (TRAV13-1, TRAJ5)
CAVDTGRSALTF

SEQ ID NO: 723798 - protein, 12 aa, Homo sapiens
  CDR3 for beta chain variable domain of TCR clone 361899 (TRBV28, TRBJ2-1)
CASSFYRHEQFF

SEQ ID NO: 723799 - protein, 11 aa, Homo sapiens
  CDR3 for alpha chain variable domain of TCR clone 361900 (TRAV1-1, TRAJ23)
CAVSQGGKLIF

SEQ ID NO: 723800 - protein, 20 aa, Homo sapiens
  CDR3 for beta chain variable domain of TCR clone 361900 (TRBV7-8, TRBJ2-2)
RASSHLFPGPTIHITGELFF

SEQ ID NO: 723801 - protein, 10 aa, Homo sapiens
  CDR3 for alpha chain variable domain of TCR clone 361901 (TRAV30, TRAJ24)
CGTEVWMLTA

SEQ ID NO: 723802 - protein, 14 aa, Homo sapiens
  CDR3 for beta chain variable domain of TCR clone 361901 (TRBV12-5, TRBJ2-5)
CASGSRTHQETQYF

SEQ ID NO: 723803 - protein, 11 aa, Homo sapiens
  CDR3 for alpha chain variable domain of TCR clone 361902 (TRAV16, TRAJ31)
CALFNNARLMF

SEQ ID NO: 723804 - protein, 15 aa, Homo sapiens
  CDR3 for beta chain variable domain of TCR clone 361902 (TRBV9, TRBJ2-1)
CASSLAGSSYNEQFF

SEQ ID NO: 723805 - protein, 15 aa, Homo sapiens
  CDR3 for alpha chain variable domain of TCR clone 361903 (TRAV8-3, TRAJ45)
CASSYLGGGADGLTF

SEQ ID NO: 723806 - protein, 17 aa, Homo sapiens
  CDR3 for beta chain variable domain of TCR clone 361903 (TRBV7-8, TRBJ1-2)
CASSLRPLQGHLYGYTF

SEQ ID NO: 723807 - protein, 22 aa, Homo sapiens
  CDR3 for alpha chain variable domain of TCR clone 361904 (TRAV3, )
CAVRDCLNAGNNNIQNPDPAVY

SEQ ID NO: 723808 - protein, 14 aa, Homo sapiens
  CDR3 for beta chain variable domain of TCR clone 361904 (TRBV9, TRBJ2-1)
CASSVVAAYNEQFF

SEQ ID NO: 723809 - protein, 14 aa, Homo sapiens
  CDR3 for alpha chain variable domain of TCR clone 361905 (TRAV1-2, TRAJ8)
CAVREDTGFQKLVF

SEQ ID NO: 723810 - protein, 16 aa, Homo sapiens
  CDR3 for beta chain variable domain of TCR clone 361905 (TRBV4-3, TRBJ2-7)
CASSPRTSGRSYEQYF

SEQ ID NO: 723811 - protein, 12 aa, Homo sapiens
  CDR3 for alpha chain variable domain of TCR clone 361906 (TRAV13-2, TRAJ23)
CAERHRGGKLIF

SEQ ID NO: 723812 - protein, 13 aa, Homo sapiens
  CDR3 for beta chain variable domain of TCR clone 361906 (TRBV15, TRBJ1-6)
CATSGGVNSPLHF

SEQ ID NO: 723813 - protein, 15 aa, Homo sapiens
  CDR3 for alpha chain variable domain of TCR clone 361907 (TRAV3, TRAJ17)
CAVRDTGAAGNKLTF

SEQ ID NO: 723814 - protein, 13 aa, Homo sapiens
  CDR3 for beta chain variable domain of TCR clone 361907 (TRBV7-3, TRBJ2-1)
CASSLDSYNEQFF

SEQ ID NO: 723815 - protein, 16 aa, Homo sapiens
  CDR3 for alpha chain variable domain of TCR clone 361908 (TRAV1-2, TRAJ40)
CAVRGSRTPGTYKYIF

SEQ ID NO: 723816 - protein, 14 aa, Homo sapiens
  CDR3 for beta chain variable domain of TCR clone 361908 (TRBV4-1, TRBJ2-3)
CASSQDSGTDTQYF

SEQ ID NO: 723817 - protein, 14 aa, Homo sapiens
  CDR3 for alpha chain variable domain of TCR clone 361909 (TRAV3, TRAJ33)
CAVRDMDSNYQLIW

SEQ ID NO: 723818 - protein, 19 aa, Homo sapiens
  CDR3 for beta chain variable domain of TCR clone 361909 (TRBV7-3, TRBJ1-2)
CASSFPQGNDCELWLHLRF

SEQ ID NO: 723819 - protein, 14 aa, Homo sapiens
  CDR3 for alpha chain variable domain of TCR clone 361910 (TRAV12-1, TRAJ17)
CVVNPKAAGNKRTF

SEQ ID NO: 723820 - protein, 16 aa, Homo sapiens
  CDR3 for beta chain variable domain of TCR clone 361910 (TRBV20-1, TRBJ2-1)
YSASASGYSSYNEQFF

SEQ ID NO: 723821 - protein, 17 aa, Homo sapiens
  CDR3 for alpha chain variable domain of TCR clone 361911 (TRAV26-1, TRAJ37)
CIVRVITVSSNTGKLIF

SEQ ID NO: 723822 - protein, 16 aa, Homo sapiens
  CDR3 for beta chain variable domain of TCR clone 361911 (TRBV11-3, TRBJ2-3)
CASSPGGLLGTDTQYF

SEQ ID NO: 723823 - protein, 13 aa, Homo sapiens
  CDR3 for alpha chain variable domain of TCR clone 361912 (TRAV3, TRAJ26)
CAVSRGYGQNFVF

SEQ ID NO: 723824 - protein, 12 aa, Homo sapiens
  CDR3 for beta chain variable domain of TCR clone 361912 (TRBV12-4, TRBJ2-7)
CASSLGGYEQYF

SEQ ID NO: 723825 - protein, 14 aa, Homo sapiens
  CDR3 for alpha chain variable domain of TCR clone 361913 (TRAV12-2, TRAJ49)
CAVTLGLYGNQFYF

SEQ ID NO: 723826 - protein, 14 aa, Homo sapiens
  CDR3 for beta chain variable domain of TCR clone 361913 (TRBV7-9, TRBJ2-1)
CASSPRDSLYEQFF

SEQ ID NO: 723827 - protein, 13 aa, Homo sapiens
  CDR3 for alpha chain variable domain of TCR clone 361914 (TRAV8-4, TRAJ48)
CAVSLFGNEKLTF

SEQ ID NO: 723828 - protein, 12 aa, Homo sapiens
  CDR3 for beta chain variable domain of TCR clone 361914 (TRBV11-2, TRBJ2-2)
CACSLGGGELFF

SEQ ID NO: 723829 - protein, 19 aa, Homo sapiens
  CDR3 for alpha chain variable domain of TCR clone 361915 (TRAV1-2, TRAJ32)
CLLPLCCETPCGATNKLIF

SEQ ID NO: 723830 - protein, 14 aa, Homo sapiens
  CDR3 for beta chain variable domain of TCR clone 361915 (TRBV7-8, TRBJ2-3)
CASSLEAGTDTQYF

SEQ ID NO: 723831 - protein, 15 aa, Homo sapiens
  CDR3 for alpha chain variable domain of TCR clone 361916 (TRAV25, TRAJ53)
CAATGGGGSNYKLTF

SEQ ID NO: 723832 - protein, 12 aa, Homo sapiens
  CDR3 for beta chain variable domain of TCR clone 361916 (TRBV12-4, TRBJ2-3)
CASSSTTDTQYF

SEQ ID NO: 723833 - protein, 14 aa, Homo sapiens
  CDR3 for alpha chain variable domain of TCR clone 361917 (TRAV17, TRAJ57)
CATDPQGGAEKLGF

SEQ ID NO: 723834 - protein, 14 aa, Homo sapiens
  CDR3 for beta chain variable domain of TCR clone 361917 (TRBV7-8, TRBJ2-7)
CASSPRDRVYEQYF

SEQ ID NO: 723835 - protein, 13 aa, Homo sapiens
  CDR3 for alpha chain variable domain of TCR clone 361918 (TRAV2, TRAJ12)
CAVGADSSYKLIF

SEQ ID NO: 723836 - protein, 16 aa, Homo sapiens
  CDR3 for beta chain variable domain of TCR clone 361918 (TRBV2, TRBJ2-1)
CASSVGGSLSYNEQFF

SEQ ID NO: 723837 - protein, 13 aa, Homo sapiens
  CDR3 for alpha chain variable domain of TCR clone 361919 (TRAV2, TRAJ40)
CAVVTSGTYKYIF

SEQ ID NO: 723838 - protein, 14 aa, Homo sapiens
  CDR3 for beta chain variable domain of TCR clone 361919 (TRBV19, TRBJ2-1)
CASPTCVLIGEQFF

SEQ ID NO: 723839 - protein, 15 aa, Homo sapiens
  CDR3 for alpha chain variable domain of TCR clone 361920 (TRAV17, TRAJ16)
CATALRSSDGQKLLF

SEQ ID NO: 723840 - protein, 12 aa, Homo sapiens
  CDR3 for beta chain variable domain of TCR clone 361920 (TRBV2, TRBJ2-7)
CASSDPDYEQYF

SEQ ID NO: 723841 - protein, 15 aa, Homo sapiens
  CDR3 for alpha chain variable domain of TCR clone 361921 (TRAV3, TRAJ22)
CAVRDRGGSARQLTF

SEQ ID NO: 723842 - protein, 14 aa, Homo sapiens
  CDR3 for beta chain variable domain of TCR clone 361921 (TRBV7-3, TRBJ2-7)
CASSLKADSYDQYF

SEQ ID NO: 723843 - protein, 16 aa, Homo sapiens
  CDR3 for alpha chain variable domain of TCR clone 361922 (TRAV12-2, TRAJ50)
CAVGTATKTSYDKVIF

SEQ ID NO: 723844 - protein, 12 aa, Homo sapiens
  CDR3 for beta chain variable domain of TCR clone 361922 (TRBV12-4, TRBJ1-5)
CASRLGRQAQHF

SEQ ID NO: 723845 - protein, 14 aa, Homo sapiens
  CDR3 for alpha chain variable domain of TCR clone 361923 (TRAV13-1, TRAJ44)
CAAKATGTASKLTF

SEQ ID NO: 723846 - protein, 15 aa, Homo sapiens
  CDR3 for beta chain variable domain of TCR clone 361923 (TRBV5-5, TRBJ1-5)
CASSLKGGGEQPQHF

SEQ ID NO: 723847 - protein, 14 aa, Homo sapiens
  CDR3 for alpha chain variable domain of TCR clone 361924 (TRAV12-3, TRAJ10)
SHLPLTGGGNKLTF

SEQ ID NO: 723848 - protein, 14 aa, Homo sapiens
  CDR3 for beta chain variable domain of TCR clone 361924 (TRBV28, TRBJ1-1)
CASSSEQGYTEAFF

SEQ ID NO: 723849 - protein, 17 aa, Homo sapiens
  CDR3 for alpha chain variable domain of TCR clone 361925 (TRAV2, TRAJ45)
CAVEDLFQEEVLTDSPF

SEQ ID NO: 723850 - protein, 16 aa, Homo sapiens
  CDR3 for beta chain variable domain of TCR clone 361925 (TRBV19, TRBJ2-2)
CASRSPGTGATGELFF

SEQ ID NO: 723851 - protein, 12 aa, Homo sapiens
  CDR3 for alpha chain variable domain of TCR clone 361926 (TRAV12-2, TRAJ21)
CAPSDNFNKFYF

SEQ ID NO: 723852 - protein, 14 aa, Homo sapiens
  CDR3 for beta chain variable domain of TCR clone 361926 (TRBV12-4, TRBJ1-1)
CASSLRASGTEAFF

SEQ ID NO: 723853 - protein, 19 aa, Homo sapiens
  CDR3 for alpha chain variable domain of TCR clone 361927 (TRAV2, TRAJ20)
ILQVREADAAVYRDCQLSF

SEQ ID NO: 723854 - protein, 11 aa, Homo sapiens
  CDR3 for beta chain variable domain of TCR clone 361927 (TRBV7-9, TRBJ2-6)
CASPRANVLTF

SEQ ID NO: 723855 - protein, 16 aa, Homo sapiens
  CDR3 for alpha chain variable domain of TCR clone 361928 (TRAV12-3, TRAJ53)
CAMSPGSGGSNYKMTF

SEQ ID NO: 723856 - protein, 15 aa, Homo sapiens
  CDR3 for beta chain variable domain of TCR clone 361928 (TRBV9, TRBJ1-6)
CASSVAGTGDSPLHF

SEQ ID NO: 723857 - protein, 18 aa, Homo sapiens
  CDR3 for alpha chain variable domain of TCR clone 361929 (TRAV26-1, TRAJ56)
CIVRVASRVTGANSKLTF

SEQ ID NO: 723858 - protein, 14 aa, Homo sapiens
  CDR3 for beta chain variable domain of TCR clone 361929 (TRBV7-9, TRBJ2-7)
CASSLTSGGYEQYF

SEQ ID NO: 723859 - protein, 10 aa, Homo sapiens
  CDR3 for alpha chain variable domain of TCR clone 361930 (TRAV23/DV6, TRAJ3)
CAATTFALGG

SEQ ID NO: 723860 - protein, 15 aa, Homo sapiens
  CDR3 for beta chain variable domain of TCR clone 361930 (TRBV19, TRBJ1-6)
CASSTQGAVGTPLHF

SEQ ID NO: 723861 - protein, 13 aa, Homo sapiens
  CDR3 for alpha chain variable domain of TCR clone 361931 (TRAV2, TRAJ9)
CAVESTGGFKTIF

SEQ ID NO: 723862 - protein, 15 aa, Homo sapiens
  CDR3 for beta chain variable domain of TCR clone 361931 (TRBV10-3, TRBJ2-1)
CAITFGGGTDNEQVF

SEQ ID NO: 723863 - protein, 13 aa, Homo sapiens
  CDR3 for alpha chain variable domain of TCR clone 361932 (TRAV27, TRAJ45)
CRSSGGGADGLTF

SEQ ID NO: 723864 - protein, 14 aa, Homo sapiens
  CDR3 for beta chain variable domain of TCR clone 361932 (TRBV9, TRBJ2-2)
CQQRLRRASGELFF

SEQ ID NO: 723865 - protein, 14 aa, Homo sapiens
  CDR3 for alpha chain variable domain of TCR clone 361933 (TRAV12-3, TRAJ9)
CAMSPNTGGFETIF

SEQ ID NO: 723866 - protein, 12 aa, Homo sapiens
  CDR3 for beta chain variable domain of TCR clone 361933 (TRBV19, TRBJ1-5)
CASSIAQQTQHF

SEQ ID NO: 723867 - protein, 17 aa, Homo sapiens
  CDR3 for alpha chain variable domain of TCR clone 361934 (TRAV13-1, TRAJ52)
CAASSGAGGTSYGKLTF

SEQ ID NO: 723868 - protein, 15 aa, Homo sapiens
  CDR3 for beta chain variable domain of TCR clone 361934 (TRBV7-2, TRBJ2-1)
CASSSGLEGGDEQFF

SEQ ID NO: 723869 - protein, 11 aa, Homo sapiens
  CDR3 for alpha chain variable domain of TCR clone 361935 (TRAV35, TRAJ30)
CAPGGDDKIIF

SEQ ID NO: 723870 - protein, 15 aa, Homo sapiens
  CDR3 for beta chain variable domain of TCR clone 361935 (TRBV9, TRBJ1-6)
CASSVPGTGDSPLHF

SEQ ID NO: 723871 - protein, 12 aa, Homo sapiens
  CDR3 for alpha chain variable domain of TCR clone 361936 (TRAV3, TRAJ20)
CAVRDPDYKLSF

SEQ ID NO: 723872 - protein, 16 aa, Homo sapiens
  CDR3 for beta chain variable domain of TCR clone 361936 (TRBV19, TRBJ1-1)
CASSPTRFWPGTEAFF

SEQ ID NO: 723873 - protein, 14 aa, Homo sapiens
  CDR3 for alpha chain variable domain of TCR clone 361937 (TRAV13-1, TRAJ35)
CAASKGGFGNVLHC

SEQ ID NO: 723874 - protein, 15 aa, Homo sapiens
  CDR3 for beta chain variable domain of TCR clone 361937 (TRBV6-1, TRBJ2-4)
CASSEAVWTINIQYF

SEQ ID NO: 723875 - protein, 11 aa, Homo sapiens
  CDR3 for alpha chain variable domain of TCR clone 361938 (TRAV12-3, TRAJ49)
CAANTGNQFYF

SEQ ID NO: 723876 - protein, 12 aa, Homo sapiens
  CDR3 for beta chain variable domain of TCR clone 361938 (TRBV6-3, TRBJ2-7)
CASSEPGFDQYF

SEQ ID NO: 723877 - protein, 16 aa, Homo sapiens
  CDR3 for alpha chain variable domain of TCR clone 361939 (TRAV12-2, TRAJ32)
CAVNMNYGGATNKLIF

SEQ ID NO: 723878 - protein, 14 aa, Homo sapiens
  CDR3 for beta chain variable domain of TCR clone 361939 (TRBV7-2, TRBJ2-7)
CASGSQGAAYEQYF

SEQ ID NO: 723879 - protein, 13 aa, Homo sapiens
  CDR3 for alpha chain variable domain of TCR clone 361940 (TRAV12-3, TRAJ54)
CNEGYSGAQKLVF

SEQ ID NO: 723880 - protein, 13 aa, Homo sapiens
  CDR3 for beta chain variable domain of TCR clone 361940 (TRBV19, TRBJ1-1)
CASSPSNGGEAFF

SEQ ID NO: 723881 - protein, 12 aa, Homo sapiens
  CDR3 for alpha chain variable domain of TCR clone 361941 (TRAV17, TRAJ57)
CATDGRSEKLVF

SEQ ID NO: 723882 - protein, 13 aa, Homo sapiens
  CDR3 for beta chain variable domain of TCR clone 361941 (TRBV7-9, TRBJ2-7)
CASSVAGAYEQYF

SEQ ID NO: 723883 - protein, 16 aa, Homo sapiens
  CDR3 for alpha chain variable domain of TCR clone 361942 (TRAV27, TRAJ53)
CAAPEGSGGSNYKLTL

SEQ ID NO: 723884 - protein, 15 aa, Homo sapiens
  CDR3 for beta chain variable domain of TCR clone 361942 (TRBV20-1, TRBJ1-1)
CSASRGVTGNTEAFF

SEQ ID NO: 723885 - protein, 13 aa, Homo sapiens
  CDR3 for alpha chain variable domain of TCR clone 361943 (TRAV1-2, TRAJ9)
CAALNTGGFKTIF

SEQ ID NO: 723886 - protein, 13 aa, Homo sapiens
  CDR3 for beta chain variable domain of TCR clone 361943 (TRBV2, TRBJ2-5)
CASGTPYQETQYF

SEQ ID NO: 723887 - protein, 15 aa, Homo sapiens
  CDR3 for alpha chain variable domain of TCR clone 361944 (TRAV21, TRAJ32)
CAVNSYGGATNKLIF

SEQ ID NO: 723888 - protein, 18 aa, Homo sapiens
  CDR3 for beta chain variable domain of TCR clone 361944 (TRBV7-9, TRBJ2-1)
CASSTGLSEGSSYNEQFF

SEQ ID NO: 723889 - protein, 18 aa, Homo sapiens
  CDR3 for alpha chain variable domain of TCR clone 361945 (TRAV13-1, TRAJ52)
CAAKNPNAGGTSYGKLTF

SEQ ID NO: 723890 - protein, 20 aa, Homo sapiens
  CDR3 for beta chain variable domain of TCR clone 361945 (TRBV4-1, TRBJ1-4)
CASSPRTGALGLMKNCFLAV

SEQ ID NO: 723891 - protein, 15 aa, Homo sapiens
  CDR3 for alpha chain variable domain of TCR clone 361946 (TRAV8-2, TRAJ16)
CVVSDGISDGQKLLF

SEQ ID NO: 723892 - protein, 14 aa, Homo sapiens
  CDR3 for beta chain variable domain of TCR clone 361946 (TRBV7-3, TRBJ1-1)
CASSLWTGYTEAFF

SEQ ID NO: 723893 - protein, 15 aa, Homo sapiens
  CDR3 for alpha chain variable domain of TCR clone 361947 (TRAV29/DV5, TRAJ57)
CAASLLRGGSEKLVF

SEQ ID NO: 723894 - protein, 15 aa, Homo sapiens
  CDR3 for beta chain variable domain of TCR clone 361947 (TRBV5-1, TRBJ1-3)
CASSLEVGSGNTMYF

SEQ ID NO: 723895 - protein, 12 aa, Homo sapiens
  CDR3 for alpha chain variable domain of TCR clone 361948 (TRAV12-1, TRAJ9)
CVVQWAGFKTIF

SEQ ID NO: 723896 - protein, 14 aa, Homo sapiens
  CDR3 for beta chain variable domain of TCR clone 361948 (TRBV6-6, TRBJ2-7)
CASSYGGSSYEQYF

SEQ ID NO: 723897 - protein, 14 aa, Homo sapiens
  CDR3 for alpha chain variable domain of TCR clone 361949 (TRAV1-2, TRAJ8)
CAMREDTGFQKLVF

SEQ ID NO: 723898 - protein, 15 aa, Homo sapiens
  CDR3 for beta chain variable domain of TCR clone 361949 (TRBV7-9, TRBJ1-6)
CASSSPGRGNSPLHF

SEQ ID NO: 723899 - protein, 11 aa, Homo sapiens
  CDR3 for alpha chain variable domain of TCR clone 361950 (TRAV1-2, TRAJ40)
CAVPGTYKYIF

SEQ ID NO: 723900 - protein, 15 aa, Homo sapiens
  CDR3 for beta chain variable domain of TCR clone 361950 (TRBV25-1, TRBJ1-4)
CTRSPGDSTNEKLFF

SEQ ID NO: 723901 - protein, 11 aa, Homo sapiens
  CDR3 for alpha chain variable domain of TCR clone 361951 (TRAV3, TRAJ21)
CAVGNFNKFYF

SEQ ID NO: 723902 - protein, 14 aa, Homo sapiens
  CDR3 for beta chain variable domain of TCR clone 361951 (TRBV10-3, TRBJ2-1)
CAISSDLAYNEQFF

SEQ ID NO: 723903 - protein, 15 aa, Homo sapiens
  CDR3 for alpha chain variable domain of TCR clone 361952 (TRAV12-3, TRAJ5)
CAMSGLGTGRRALTF

SEQ ID NO: 723904 - protein, 16 aa, Homo sapiens
  CDR3 for beta chain variable domain of TCR clone 361952 (TRBV20-1, TRBJ2-3)
CSARLHSAGVIDTQYF

SEQ ID NO: 723905 - protein, 18 aa, Homo sapiens
  CDR3 for alpha chain variable domain of TCR clone 361953 (TRAV21, TRAJ52)
CAVRPSPAGGTSYGKLTF

SEQ ID NO: 723906 - protein, 15 aa, Homo sapiens
  CDR3 for beta chain variable domain of TCR clone 361953 (TRBV18, TRBJ1-5)
CASSPSDRSNQPQHF

SEQ ID NO: 723907 - protein, 12 aa, Homo sapiens
  CDR3 for alpha chain variable domain of TCR clone 361954 (TRAV12-3, TRAJ17)
CAMTLTGNKLTF

SEQ ID NO: 723908 - protein, 15 aa, Homo sapiens
  CDR3 for beta chain variable domain of TCR clone 361954 (TRBV27, TRBJ2-1)
CASSSAGQGNNEQFF

SEQ ID NO: 723909 - protein, 20 aa, Homo sapiens
  CDR3 for alpha chain variable domain of TCR clone 361955 (TRAV12-2, TRAJ52)
SPVIQPPARAGGTSYGKLTF

SEQ ID NO: 723910 - protein, 14 aa, Homo sapiens
  CDR3 for beta chain variable domain of TCR clone 361955 (TRBV4-2, TRBJ2-1)
CASGLDRAYNEQFF

SEQ ID NO: 723911 - protein, 14 aa, Homo sapiens
  CDR3 for alpha chain variable domain of TCR clone 361956 (TRAV1-2, TRAJ8)
CAVREDTGFQKLVF

SEQ ID NO: 723912 - protein, 15 aa, Homo sapiens
  CDR3 for beta chain variable domain of TCR clone 361956 (TRBV7-3, TRBJ2-2)
CASSETGQGTGELFF

SEQ ID NO: 723913 - protein, 12 aa, Homo sapiens
  CDR3 for alpha chain variable domain of TCR clone 361957 (TRAV1-1, TRAJ39)
CAVPVVGNMLTF

SEQ ID NO: 723914 - protein, 17 aa, Homo sapiens
  CDR3 for beta chain variable domain of TCR clone 361957 (TRBV7-4, TRBJ2-3)
CASSFAKREVRTDTQYF

SEQ ID NO: 723915 - protein, 14 aa, Homo sapiens
  CDR3 for alpha chain variable domain of TCR clone 361958 (TRAV3, TRAJ9)
CAVRLNTGGFITIF

SEQ ID NO: 723916 - protein, 15 aa, Homo sapiens
  CDR3 for beta chain variable domain of TCR clone 361958 (TRBV7-2, TRBJ2-1)
CASSLASGRVNEQFF

SEQ ID NO: 723917 - protein, 13 aa, Homo sapiens
  CDR3 for alpha chain variable domain of TCR clone 361959 (TRAV16, TRAJ30)
CALAQNRDNKIIF

SEQ ID NO: 723918 - protein, 15 aa, Homo sapiens
  CDR3 for beta chain variable domain of TCR clone 361959 (TRBV2, TRBJ1-1)
CASTEPGQGASGAFF

SEQ ID NO: 723919 - protein, 18 aa, Homo sapiens
  CDR3 for alpha chain variable domain of TCR clone 361960 (TRAV13-1, TRAJ52)
CAASKRSAGGTSYGKLTF

SEQ ID NO: 723920 - protein, 14 aa, Homo sapiens
  CDR3 for beta chain variable domain of TCR clone 361960 (TRBV25-1, TRBJ2-1)
CASSPRGPYNEQFF

SEQ ID NO: 723921 - protein, 14 aa, Homo sapiens
  CDR3 for alpha chain variable domain of TCR clone 361961 (TRAV26-1, TRAJ22)
CIVRVYGSARQLTF

SEQ ID NO: 723922 - protein, 17 aa, Homo sapiens
  CDR3 for beta chain variable domain of TCR clone 361961 (TRBV7-3, TRBJ2-3)
CSSSPGGLAGFGDTQYF

SEQ ID NO: 723923 - protein, 13 aa, Homo sapiens
  CDR3 for alpha chain variable domain of TCR clone 361962 (TRAV4, TRAJ41)
CLVGENSGYALNF

SEQ ID NO: 723924 - protein, 15 aa, Homo sapiens
  CDR3 for beta chain variable domain of TCR clone 361962 (TRBV25-1, TRBJ1-4)
CASSPGDSTNEKLFF

SEQ ID NO: 723925 - protein, 14 aa, Homo sapiens
  CDR3 for alpha chain variable domain of TCR clone 361963 (TRAV8-1, TRAJ5)
CAVRTDTGRRALTF

SEQ ID NO: 723926 - protein, 13 aa, Homo sapiens
  CDR3 for beta chain variable domain of TCR clone 361963 (TRBV7-3, TRBJ1-1)
CQQLKGGNTEAFF

SEQ ID NO: 723927 - protein, 12 aa, Homo sapiens
  CDR3 for alpha chain variable domain of TCR clone 361964 (TRAV17, TRAJ57)
CSTDGGAEKLVF

SEQ ID NO: 723928 - protein, 13 aa, Homo sapiens
  CDR3 for beta chain variable domain of TCR clone 361964 (TRBV7-9, TRBJ2-7)
CASSFAGAYEQYF

SEQ ID NO: 723929 - protein, 11 aa, Homo sapiens
  CDR3 for alpha chain variable domain of TCR clone 361965 (TRAV8-3, TRAJ15)
CAVGPGTVLIF

SEQ ID NO: 723930 - protein, 15 aa, Homo sapiens
  CDR3 for beta chain variable domain of TCR clone 361965 (TRBV7-9, TRBJ2-7)
CASSLALAEAYEQYF

SEQ ID NO: 723931 - protein, 14 aa, Homo sapiens
  CDR3 for alpha chain variable domain of TCR clone 361966 (TRAV26-1, TRAJ34)
CIVRVAYNTDKLIF

SEQ ID NO: 723932 - protein, 14 aa, Homo sapiens
  CDR3 for beta chain variable domain of TCR clone 361966 (TRBV20-1, TRBJ2-7)
CIAWTALSSYEQYF

SEQ ID NO: 723933 - protein, 15 aa, Homo sapiens
  CDR3 for alpha chain variable domain of TCR clone 361967 (TRAV8-3, TRAJ45)
CASSYSGGGADGLTF

SEQ ID NO: 723934 - protein, 17 aa, Homo sapiens
  CDR3 for beta chain variable domain of TCR clone 361967 (TRBV6-1, TRBJ2-3)
CASSEFVTGGPTDTQYF

SEQ ID NO: 723935 - protein, 14 aa, Homo sapiens
  CDR3 for alpha chain variable domain of TCR clone 361968 (TRAV13-1, TRAJ47)
CAADPGEYGNKLVF

SEQ ID NO: 723936 - protein, 13 aa, Homo sapiens
  CDR3 for beta chain variable domain of TCR clone 361968 (TRBV7-9, TRBJ1-2)
CASSLKQNYGYTF

SEQ ID NO: 723937 - protein, 13 aa, Homo sapiens
  CDR3 for alpha chain variable domain of TCR clone 361969 (TRAV25, TRAJ10)
CAGRTGGGNKLTF

SEQ ID NO: 723938 - protein, 15 aa, Homo sapiens
  CDR3 for beta chain variable domain of TCR clone 361969 (TRBV19, TRBJ2-1)
CASSSPGVALDEQFF

SEQ ID NO: 723939 - protein, 14 aa, Homo sapiens
  CDR3 for alpha chain variable domain of TCR clone 361970 (TRAV38-1, TRAJ45)
CSSHSGGGADGLTF

SEQ ID NO: 723940 - protein, 16 aa, Homo sapiens
  CDR3 for beta chain variable domain of TCR clone 361970 (TRBV7-3, TRBJ2-2)
CASSLKRGTLSGELFF

SEQ ID NO: 723941 - protein, 14 aa, Homo sapiens
  CDR3 for alpha chain variable domain of TCR clone 361971 (TRAV12-2, TRAJ13)
CAVKKTGGYQKVTF

SEQ ID NO: 723942 - protein, 16 aa, Homo sapiens
  CDR3 for beta chain variable domain of TCR clone 361971 (TRBV7-9, TRBJ1-2)
CASSPGGGAINYGYTF

SEQ ID NO: 723943 - protein, 18 aa, Homo sapiens
  CDR3 for alpha chain variable domain of TCR clone 361972 (TRAV26-2, TRAJ45)
CILRVDKYSGGGADGLTF

SEQ ID NO: 723944 - protein, 11 aa, Homo sapiens
  CDR3 for beta chain variable domain of TCR clone 361972 (TRBV29-1, TRBJ2-5)
CSEDRTGTQYV

SEQ ID NO: 723945 - protein, 15 aa, Homo sapiens
  CDR3 for alpha chain variable domain of TCR clone 361973 (TRAV38-2/DV8, TRAJ45)
CAYWDSGGGADGLTF

SEQ ID NO: 723946 - protein, 16 aa, Homo sapiens
  CDR3 for beta chain variable domain of TCR clone 361973 (TRBV19, TRBJ1-1)
CASIPTRFWPGTEAFF

SEQ ID NO: 723947 - protein, 14 aa, Homo sapiens
  CDR3 for alpha chain variable domain of TCR clone 361974 (TRAV13-1, TRAJ39)
CSASPNNAGNMLTF

SEQ ID NO: 723948 - protein, 14 aa, Homo sapiens
  CDR3 for beta chain variable domain of TCR clone 361974 (TRBV12-4, TRBJ1-1)
CASNSGDLNTEAFF

SEQ ID NO: 723949 - protein, 14 aa, Homo sapiens
  CDR3 for alpha chain variable domain of TCR clone 361975 (TRAV38-2/DV8, TRAJ30)
CAYMDGLGGDKIIV

SEQ ID NO: 723950 - protein, 15 aa, Homo sapiens
  CDR3 for beta chain variable domain of TCR clone 361975 (TRBV7-9, TRBJ2-2)
CASRPADRDTGELFF

SEQ ID NO: 723951 - protein, 14 aa, Homo sapiens
  CDR3 for alpha chain variable domain of TCR clone 361976 (TRAV17, TRAJ54)
CATDANQGAQKLVF

SEQ ID NO: 723952 - protein, 16 aa, Homo sapiens
  CDR3 for beta chain variable domain of TCR clone 361976 (TRBV4-1, TRBJ2-3)
CASSQSTSGAEDTQYF

SEQ ID NO: 723953 - protein, 12 aa, Homo sapiens
  CDR3 for alpha chain variable domain of TCR clone 361977 (TRAV1-2, TRAJ11)
CAVRGGYSTLTF

SEQ ID NO: 723954 - protein, 11 aa, Homo sapiens
  CDR3 for beta chain variable domain of TCR clone 361977 (TRBV6-3, TRBJ2-3)
CATGQADAQYF

SEQ ID NO: 723955 - protein, 14 aa, Homo sapiens
  CDR3 for alpha chain variable domain of TCR clone 361978 (TRAV12-1, TRAJ13)
CVVIDSGGYQKVTL

SEQ ID NO: 723956 - protein, 17 aa, Homo sapiens
  CDR3 for beta chain variable domain of TCR clone 361978 (TRBV15, TRBJ1-5)
CATSRAPPGTRNQPQHF

SEQ ID NO: 723957 - protein, 14 aa, Homo sapiens
  CDR3 for alpha chain variable domain of TCR clone 361979 (TRAV12-3, TRAJ42)
CAMNYGGSQGNIIF

SEQ ID NO: 723958 - protein, 16 aa, Homo sapiens
  CDR3 for beta chain variable domain of TCR clone 361979 (TRBV12-4, TRBJ1-5)
CASSSGPRGSNQPQHF

SEQ ID NO: 723959 - protein, 11 aa, Homo sapiens
  CDR3 for alpha chain variable domain of TCR clone 361980 (TRAV23/DV6, TRAJ12)
CAAIDLGAMDS

SEQ ID NO: 723960 - protein, 12 aa, Homo sapiens
  CDR3 for beta chain variable domain of TCR clone 361980 (TRBV10-3, TRBJ2-2)
CAIRENTGELFF

SEQ ID NO: 723961 - protein, 16 aa, Homo sapiens
  CDR3 for alpha chain variable domain of TCR clone 361981 (TRAV3, TRAJ10)
CSVRDMRAGGGNKLTF

SEQ ID NO: 723962 - protein, 13 aa, Homo sapiens
  CDR3 for beta chain variable domain of TCR clone 361981 (TRBV6-1, TRBJ1-1)
CASSRQGNTEAFS

SEQ ID NO: 723963 - protein, 19 aa, Homo sapiens
  CDR3 for alpha chain variable domain of TCR clone 361982 (TRAV21, TRAJ45)
CAVEAPRGDQEEVLTDSPF

SEQ ID NO: 723964 - protein, 12 aa, Homo sapiens
  CDR3 for beta chain variable domain of TCR clone 361982 (TRBV29-1, TRBJ1-3)
CSTRDSGNTICF

SEQ ID NO: 723965 - protein, 16 aa, Homo sapiens
  CDR3 for alpha chain variable domain of TCR clone 361983 (TRAV27, TRAJ13)
CAGAKSDSGGYQKVTF

SEQ ID NO: 723966 - protein, 14 aa, Homo sapiens
  CDR3 for beta chain variable domain of TCR clone 361983 (TRBV25-1, TRBJ1-1)
CASTHLGGNTEAFS

SEQ ID NO: 723967 - protein, 14 aa, Homo sapiens
  CDR3 for alpha chain variable domain of TCR clone 361984 (TRAV26-1, TRAJ49)
CIVRPRNTGNQFYF

SEQ ID NO: 723968 - protein, 14 aa, Homo sapiens
  CDR3 for beta chain variable domain of TCR clone 361984 (TRBV12-4, TRBJ2-3)
CASSLVPSTDTQYF

SEQ ID NO: 723969 - protein, 11 aa, Homo sapiens
  CDR3 for alpha chain variable domain of TCR clone 361985 (TRAV1-1, TRAJ5)
CAVRVRRALTS

SEQ ID NO: 723970 - protein, 18 aa, Homo sapiens
  CDR3 for beta chain variable domain of TCR clone 361985 (TRBV12-4, TRBJ1-2)
CASSPNPGQAGPYYGYTF

SEQ ID NO: 723971 - protein, 11 aa, Homo sapiens
  CDR3 for alpha chain variable domain of TCR clone 361986 (TRAV21, TRAJ34)
CAHYNTDKLIF

SEQ ID NO: 723972 - protein, 14 aa, Homo sapiens
  CDR3 for beta chain variable domain of TCR clone 361986 (TRBV6-1, TRBJ1-3)
CASVRGGGGNTIYF

SEQ ID NO: 723973 - protein, 14 aa, Homo sapiens
  CDR3 for alpha chain variable domain of TCR clone 361987 (TRAV12-1, TRAJ10)
CVAILTGGGNKLTF

SEQ ID NO: 723974 - protein, 15 aa, Homo sapiens
  CDR3 for beta chain variable domain of TCR clone 361987 (TRBV20-1, TRBJ2-7)
CSARGVRPQTYEQYF

SEQ ID NO: 723975 - protein, 15 aa, Homo sapiens
  CDR3 for alpha chain variable domain of TCR clone 361988 (TRAV29/DV5, TRAJ28)
CAAGYSGAGSYQLTF

SEQ ID NO: 723976 - protein, 18 aa, Homo sapiens
  CDR3 for beta chain variable domain of TCR clone 361988 (TRBV3-1, TRBJ1-2)
CASSQDVIGWNGDYGYTF

SEQ ID NO: 723977 - protein, 13 aa, Homo sapiens
  CDR3 for alpha chain variable domain of TCR clone 361989 (TRAV2, TRAJ15)
CAVASQAGTALIF

SEQ ID NO: 723978 - protein, 15 aa, Homo sapiens
  CDR3 for beta chain variable domain of TCR clone 361989 (TRBV18, TRBJ2-5)
CASSPDPGLQETQYF

SEQ ID NO: 723979 - protein, 18 aa, Homo sapiens
  CDR3 for alpha chain variable domain of TCR clone 361990 (TRAV21, TRAJ52)
CAVRPSPAGGTSYGKLTF

SEQ ID NO: 723980 - protein, 14 aa, Homo sapiens
  CDR3 for beta chain variable domain of TCR clone 361990 (TRBV15, TRBJ2-5)
CATSIGGLGETQYF

SEQ ID NO: 723981 - protein, 12 aa, Homo sapiens
  CDR3 for alpha chain variable domain of TCR clone 361991 (TRAV24, TRAJ5)
CALDTGRRALTF

SEQ ID NO: 723982 - protein, 15 aa, Homo sapiens
  CDR3 for beta chain variable domain of TCR clone 361991 (TRBV29-1, TRBJ2-3)
CSVEVTTGDTETQYF

SEQ ID NO: 723983 - protein, 14 aa, Homo sapiens
  CDR3 for alpha chain variable domain of TCR clone 361992 (TRAV8-6, TRAJ34)
CAVSDQGNTYKLIF

SEQ ID NO: 723984 - protein, 13 aa, Homo sapiens
  CDR3 for beta chain variable domain of TCR clone 361992 (TRBV27, TRBJ1-1)
CASSLSIGAEAFF

SEQ ID NO: 723985 - protein, 14 aa, Homo sapiens
  CDR3 for alpha chain variable domain of TCR clone 361993 (TRAV1-1, TRAJ27)
CAVIYNTNAGKSTF

SEQ ID NO: 723986 - protein, 14 aa, Homo sapiens
  CDR3 for beta chain variable domain of TCR clone 361993 (TRBV7-9, TRBJ2-7)
CASSLSILVYEQYF

SEQ ID NO: 723987 - protein, 16 aa, Homo sapiens
  CDR3 for alpha chain variable domain of TCR clone 361994 (TRAV30, TRAJ24)
CGTEIVDADSCGKFQF

SEQ ID NO: 723988 - protein, 16 aa, Homo sapiens
  CDR3 for beta chain variable domain of TCR clone 361994 (TRBV12-5, TRBJ2-5)
CASGPRTSGNQETQYF

SEQ ID NO: 723989 - protein, 16 aa, Homo sapiens
  CDR3 for alpha chain variable domain of TCR clone 361995 (TRAV16, TRAJ21)
CACGWATTSTNFTLDL

SEQ ID NO: 723990 - protein, 15 aa, Homo sapiens
  CDR3 for beta chain variable domain of TCR clone 361995 (TRBV19, TRBJ2-1)
CASSIQAASYNEQFF

SEQ ID NO: 723991 - protein, 15 aa, Homo sapiens
  CDR3 for alpha chain variable domain of TCR clone 361996 (TRAV30, TRAJ57)
CGTAIPQGGSEKLVF

SEQ ID NO: 723992 - protein, 16 aa, Homo sapiens
  CDR3 for beta chain variable domain of TCR clone 361996 (TRBV27, TRBJ1-1)
CASSSRGRTGYTEAFF

SEQ ID NO: 723993 - protein, 12 aa, Homo sapiens
  CDR3 for alpha chain variable domain of TCR clone 361997 (TRAV17, TRAJ4)
CAPDGGYNKLIF

SEQ ID NO: 723994 - protein, 13 aa, Homo sapiens
  CDR3 for beta chain variable domain of TCR clone 361997 (TRBV29-1, TRBJ2-2)
CSTTGVNTGELFF

SEQ ID NO: 723995 - protein, 15 aa, Homo sapiens
  CDR3 for alpha chain variable domain of TCR clone 361998 (TRAV21, TRAJ53)
CATLNSGGSNYKLTF

SEQ ID NO: 723996 - protein, 13 aa, Homo sapiens
  CDR3 for beta chain variable domain of TCR clone 361998 (TRBV12-4, TRBJ2-7)
CASSFVPTAEQYV

SEQ ID NO: 723997 - protein, 14 aa, Homo sapiens
  CDR3 for alpha chain variable domain of TCR clone 361999 (TRAV17, TRAJ22)
CATSPSGAARQLTF

SEQ ID NO: 723998 - protein, 15 aa, Homo sapiens
  CDR3 for beta chain variable domain of TCR clone 361999 (TRBV4-1, TRBJ2-5)
CASSQGDLYQETQYF

SEQ ID NO: 723999 - protein, 15 aa, Homo sapiens
  CDR3 for alpha chain variable domain of TCR clone 362000 (TRAV21, TRAJ53)
CATLNSGGSNYKLTF

SEQ ID NO: 724000 - protein, 17 aa, Homo sapiens
  CDR3 for beta chain variable domain of TCR clone 362000 (TRBV7-8, TRBJ2-6)
CASSVGTGGAGANVLTS

SEQ ID NO: 724001 - protein, 15 aa, Homo sapiens
  CDR3 for alpha chain variable domain of TCR clone 362001 (TRAV12-1, TRAJ41)
CVVNSRTGSGYALNF

SEQ ID NO: 724002 - protein, 11 aa, Homo sapiens
  CDR3 for beta chain variable domain of TCR clone 362001 (TRBV6-4, TRBJ2-1)
CASSHSYAQFF

SEQ ID NO: 724003 - protein, 13 aa, Homo sapiens
  CDR3 for alpha chain variable domain of TCR clone 362002 (TRAV21, TRAJ57)
CAVTQGGSEKLVF

SEQ ID NO: 724004 - protein, 15 aa, Homo sapiens
  CDR3 for beta chain variable domain of TCR clone 362002 (TRBV5-1, TRBJ2-5)
CASSLGLAEQETQYF

SEQ ID NO: 724005 - protein, 15 aa, Homo sapiens
  CDR3 for alpha chain variable domain of TCR clone 362003 (TRAV3, TRAJ5)
CAVRDLDTGGRALTF

SEQ ID NO: 724006 - protein, 13 aa, Homo sapiens
  CDR3 for beta chain variable domain of TCR clone 362003 (TRBV12-4, TRBJ2-7)
CASSTTETYEQYF

SEQ ID NO: 724007 - protein, 16 aa, Homo sapiens
  CDR3 for alpha chain variable domain of TCR clone 362004 (TRAV36/DV7, TRAJ30)
CAVETYGLDRDDKIIF

SEQ ID NO: 724008 - protein, 13 aa, Homo sapiens
  CDR3 for beta chain variable domain of TCR clone 362004 (TRBV7-9, TRBJ2-3)
CASSPGSTDTQYF

SEQ ID NO: 724009 - protein, 14 aa, Homo sapiens
  CDR3 for alpha chain variable domain of TCR clone 362005 (TRAV17, TRAJ31)
CATVLRNNNARLMF

SEQ ID NO: 724010 - protein, 14 aa, Homo sapiens
  CDR3 for beta chain variable domain of TCR clone 362005 (TRBV12-4, TRBJ2-5)
CASSLRQNQETQYF

SEQ ID NO: 724011 - protein, 14 aa, Homo sapiens
  CDR3 for alpha chain variable domain of TCR clone 362006 (TRAV12-2, TRAJ41)
CAVTLGLSGDALNF

SEQ ID NO: 724012 - protein, 13 aa, Homo sapiens
  CDR3 for beta chain variable domain of TCR clone 362006 (TRBV27, TRBJ2-3)
CASSLSQGDTQYF

SEQ ID NO: 724013 - protein, 14 aa, Homo sapiens
  CDR3 for alpha chain variable domain of TCR clone 362007 (TRAV23/DV6, TRAJ4)
CADNLSGGYHKLIF

SEQ ID NO: 724014 - protein, 17 aa, Homo sapiens
  CDR3 for beta chain variable domain of TCR clone 362007 (TRBV4-1, TRBJ1-3)
CASSPQRGIRFGNTIYF

SEQ ID NO: 724015 - protein, 14 aa, Homo sapiens
  CDR3 for alpha chain variable domain of TCR clone 362008 (TRAV2, TRAJ9)
CAVADRSGGFKTIF

SEQ ID NO: 724016 - protein, 14 aa, Homo sapiens
  CDR3 for beta chain variable domain of TCR clone 362008 (TRBV6-1, TRBJ1-3)
CASVQGGGGNTIYF

SEQ ID NO: 724017 - protein, 13 aa, Homo sapiens
  CDR3 for alpha chain variable domain of TCR clone 362009 (TRAV1-2, TRAJ9)
CAALNTGGFKTIF

SEQ ID NO: 724018 - protein, 14 aa, Homo sapiens
  CDR3 for beta chain variable domain of TCR clone 362009 (TRBV13, TRBJ2-3)
CPSSSGSPTDTQYF

SEQ ID NO: 724019 - protein, 15 aa, Homo sapiens
  CDR3 for alpha chain variable domain of TCR clone 362010 (TRAV12-3, TRAJ10)
CASYILTGGGNKLTF

SEQ ID NO: 724020 - protein, 15 aa, Homo sapiens
  CDR3 for beta chain variable domain of TCR clone 362010 (TRBV7-2, TRBJ1-6)
CASSLGPDRGMTLDF

SEQ ID NO: 724021 - protein, 17 aa, Homo sapiens
  CDR3 for alpha chain variable domain of TCR clone 362011 (TRAV3, TRAJ6)
CAMRDGPRAGGSYIPTF

SEQ ID NO: 724022 - protein, 14 aa, Homo sapiens
  CDR3 for beta chain variable domain of TCR clone 362011 (TRBV7-2, TRBJ2-7)
RASSPKTSFYEQYF

SEQ ID NO: 724023 - protein, 14 aa, Homo sapiens
  CDR3 for alpha chain variable domain of TCR clone 362012 (TRAV17, TRAJ39)
CATVVNNAGNMLTF

SEQ ID NO: 724024 - protein, 13 aa, Homo sapiens
  CDR3 for beta chain variable domain of TCR clone 362012 (TRBV7-9, TRBJ1-2)
CASSLKQNYGYTF

SEQ ID NO: 724025 - protein, 17 aa, Homo sapiens
  CDR3 for alpha chain variable domain of TCR clone 362013 (TRAV8-6, TRAJ58)
CAVSSWVGETSGSRLTF

SEQ ID NO: 724026 - protein, 14 aa, Homo sapiens
  CDR3 for beta chain variable domain of TCR clone 362013 (TRBV4-2, TRBJ2-1)
CASGLDRAYNEPFF

SEQ ID NO: 724027 - protein, 12 aa, Homo sapiens
  CDR3 for alpha chain variable domain of TCR clone 362014 (TRAV13-1, TRAJ9)
CASHTGGFKTIF

SEQ ID NO: 724028 - protein, 17 aa, Homo sapiens
  CDR3 for beta chain variable domain of TCR clone 362014 (TRBV11-3, TRBJ2-3)
CQQLRGASRGAPNTQYF

SEQ ID NO: 724029 - protein, 15 aa, Homo sapiens
  CDR3 for alpha chain variable domain of TCR clone 362015 (TRAV27, TRAJ50)
CAGVVRGTSYDKLIF

SEQ ID NO: 724030 - protein, 14 aa, Homo sapiens
  CDR3 for beta chain variable domain of TCR clone 362015 (TRBV7-2, TRBJ1-1)
CASSFYDLNTEAFF

SEQ ID NO: 724031 - protein, 18 aa, Homo sapiens
  CDR3 for alpha chain variable domain of TCR clone 362016 (TRAV21, TRAJ52)
CAVRPSPACGTSYGKLTF

SEQ ID NO: 724032 - protein, 17 aa, Homo sapiens
  CDR3 for beta chain variable domain of TCR clone 362016 (TRBV25-1, TRBJ2-1)
CASSAYGQGRGVYEQFF

SEQ ID NO: 724033 - protein, 14 aa, Homo sapiens
  CDR3 for alpha chain variable domain of TCR clone 362017 (TRAV23/DV6, TRAJ11)
CAASLESGYSNLTF

SEQ ID NO: 724034 - protein, 15 aa, Homo sapiens
  CDR3 for beta chain variable domain of TCR clone 362017 (TRBV28, TRBJ2-7)
CASSSPGTEPFEQYF

SEQ ID NO: 724035 - protein, 14 aa, Homo sapiens
  CDR3 for alpha chain variable domain of TCR clone 362018 (TRAV12-2, TRAJ17)
CAALFKAAGKKLTF

SEQ ID NO: 724036 - protein, 16 aa, Homo sapiens
  CDR3 for beta chain variable domain of TCR clone 362018 (TRBV20-1, TRBJ2-2)
CSASASGIPGAGELFF

SEQ ID NO: 724037 - protein, 12 aa, Homo sapiens
  CDR3 for alpha chain variable domain of TCR clone 362019 (TRAV8-3, TRAJ20)
CAVGANDHKLSF

SEQ ID NO: 724038 - protein, 16 aa, Homo sapiens
  CDR3 for beta chain variable domain of TCR clone 362019 (TRBV19, TRBJ2-2)
CASRYPGTGATGELFF

SEQ ID NO: 724039 - protein, 13 aa, Homo sapiens
  CDR3 for alpha chain variable domain of TCR clone 362020 (TRAV1-1, TRAJ31)
CASYLNNNARLMF

SEQ ID NO: 724040 - protein, 15 aa, Homo sapiens
  CDR3 for beta chain variable domain of TCR clone 362020 (TRBV20-1, TRBJ2-7)
CSAESGTSGAYEQYF

SEQ ID NO: 724041 - protein, 15 aa, Homo sapiens
  CDR3 for alpha chain variable domain of TCR clone 362021 (TRAV21, TRAJ53)
CATLNSGGSNYKLTF

SEQ ID NO: 724042 - protein, 16 aa, Homo sapiens
  CDR3 for beta chain variable domain of TCR clone 362021 (TRBV9, TRBJ2-5)
CASSVGGGGNYNEQFF

SEQ ID NO: 724043 - protein, 15 aa, Homo sapiens
  CDR3 for alpha chain variable domain of TCR clone 362022 (TRAV21, TRAJ53)
CATLNSGGSNYKLTF

SEQ ID NO: 724044 - protein, 15 aa, Homo sapiens
  CDR3 for beta chain variable domain of TCR clone 362022 (TRBV7-6, TRBJ1-5)
CASSQSSGVNQPQHF

SEQ ID NO: 724045 - protein, 14 aa, Homo sapiens
  CDR3 for alpha chain variable domain of TCR clone 362023 (TRAV1-2, TRAJ8)
CAVIEDTGFQKLVF

SEQ ID NO: 724046 - protein, 15 aa, Homo sapiens
  CDR3 for beta chain variable domain of TCR clone 362023 (TRBV7-9, TRBJ1-1)
CASSHRGTVNTEAFF

SEQ ID NO: 724047 - protein, 12 aa, Homo sapiens
  CDR3 for alpha chain variable domain of TCR clone 362024 (TRAV13-1, TRAJ21)
CAAKEGFYKFYF

SEQ ID NO: 724048 - protein, 15 aa, Homo sapiens
  CDR3 for beta chain variable domain of TCR clone 362024 (TRBV2, TRBJ2-1)
CASSELAGSYNEQFF

SEQ ID NO: 724049 - protein, 13 aa, Homo sapiens
  CDR3 for alpha chain variable domain of TCR clone 362025 (TRAV14/DV4, TRAJ23)
CAMREVKGGKLIF

SEQ ID NO: 724050 - protein, 17 aa, Homo sapiens
  CDR3 for beta chain variable domain of TCR clone 362025 (TRBV2, TRBJ2-3)
CASSAGLAGYIGDTQYF

SEQ ID NO: 724051 - protein, 14 aa, Homo sapiens
  CDR3 for alpha chain variable domain of TCR clone 362026 (TRAV12-2, TRAJ13)
CAVKKTGGYQKVTF

SEQ ID NO: 724052 - protein, 14 aa, Homo sapiens
  CDR3 for beta chain variable domain of TCR clone 362026 (TRBV7-2, TRBJ2-7)
CASSPKTSFYEQYI

SEQ ID NO: 724053 - protein, 14 aa, Homo sapiens
  CDR3 for alpha chain variable domain of TCR clone 362027 (TRAV8-3, TRAJ33)
CAVGAVDSNYQLIW

SEQ ID NO: 724054 - protein, 17 aa, Homo sapiens
  CDR3 for beta chain variable domain of TCR clone 362027 (TRBV13, TRBJ2-3)
CASSLSRVAGGRNTQYF

SEQ ID NO: 724055 - protein, 14 aa, Homo sapiens
  CDR3 for alpha chain variable domain of TCR clone 362028 (TRAV13-1, TRAJ35)
CAASKGGFGNVLHC

SEQ ID NO: 724056 - protein, 14 aa, Homo sapiens
  CDR3 for beta chain variable domain of TCR clone 362028 (TRBV18, TRBJ2-7)
CASSPRGGSYEQYF

SEQ ID NO: 724057 - protein, 16 aa, Homo sapiens
  CDR3 for alpha chain variable domain of TCR clone 362029 (TRAV12-1, TRAJ53)
CVGTSVAGGSNYKLTF

SEQ ID NO: 724058 - protein, 17 aa, Homo sapiens
  CDR3 for beta chain variable domain of TCR clone 362029 (TRBV7-3, TRBJ2-3)
CASSPRGQGYGTDTQYF

SEQ ID NO: 724059 - protein, 12 aa, Homo sapiens
  CDR3 for alpha chain variable domain of TCR clone 362030 (TRAV17, TRAJ20)
CATDSNDYKLSF

SEQ ID NO: 724060 - protein, 17 aa, Homo sapiens
  CDR3 for beta chain variable domain of TCR clone 362030 (TRBV5-1, TRBJ2-2)
CDSSLAGLSGGTGELFS

SEQ ID NO: 724061 - protein, 13 aa, Homo sapiens
  CDR3 for alpha chain variable domain of TCR clone 362031 (TRAV20, TRAJ37)
CAGCSSNTGKLIF

SEQ ID NO: 724062 - protein, 14 aa, Homo sapiens
  CDR3 for beta chain variable domain of TCR clone 362031 (TRBV7-2, TRBJ2-2)
CASRGQGAAGELFF

SEQ ID NO: 724063 - protein, 16 aa, Homo sapiens
  CDR3 for alpha chain variable domain of TCR clone 362032 (TRAV21, TRAJ37)
YAVRTAGSSNTGKPIF

SEQ ID NO: 724064 - protein, 13 aa, Homo sapiens
  CDR3 for beta chain variable domain of TCR clone 362032 (TRBV7-9, TRBJ2-5)
CASLPSGRETQYF

SEQ ID NO: 724065 - protein, 12 aa, Homo sapiens
  CDR3 for alpha chain variable domain of TCR clone 362033 (TRAV1-2, TRAJ24)
CAVGGSWGKFQF

SEQ ID NO: 724066 - protein, 16 aa, Homo sapiens
  CDR3 for beta chain variable domain of TCR clone 362033 (TRBV13, TRBJ2-2)
CASSPRTGEHTGELFF

SEQ ID NO: 724067 - protein, 15 aa, Homo sapiens
  CDR3 for alpha chain variable domain of TCR clone 362034 (TRAV21, TRAJ53)
CATLNSGGSNYKLTF

SEQ ID NO: 724068 - protein, 13 aa, Homo sapiens
  CDR3 for beta chain variable domain of TCR clone 362034 (TRBV20-1, TRBJ1-1)
CSAWTVGNTEAFF

SEQ ID NO: 724069 - protein, 10 aa, Homo sapiens
  CDR3 for alpha chain variable domain of TCR clone 362035 (TRAV1-2, TRAJ31)
CAFFDARLMF

SEQ ID NO: 724070 - protein, 12 aa, Homo sapiens
  CDR3 for beta chain variable domain of TCR clone 362035 (TRBV28, TRBJ2-3)
CASSLYRDTQYF

SEQ ID NO: 724071 - protein, 10 aa, Homo sapiens
  CDR3 for alpha chain variable domain of TCR clone 362036 (TRAV4, TRAJ28)
CLVGDRALGL

SEQ ID NO: 724072 - protein, 11 aa, Homo sapiens
  CDR3 for beta chain variable domain of TCR clone 362036 (TRBV4-1, TRBJ2-7)
QPSCGGDEQYF

SEQ ID NO: 724073 - protein, 16 aa, Homo sapiens
  CDR3 for alpha chain variable domain of TCR clone 362037 (TRAV35, TRAJ37)
CWAFLRGSSNTGKLIF

SEQ ID NO: 724074 - protein, 13 aa, Homo sapiens
  CDR3 for beta chain variable domain of TCR clone 362037 (TRBV2, TRBJ1-2)
CASPVRGNYGYTF

SEQ ID NO: 724075 - protein, 13 aa, Homo sapiens
  CDR3 for alpha chain variable domain of TCR clone 362038 (TRAV12-3, TRAJ7)
CAMSASGNNRLAF

SEQ ID NO: 724076 - protein, 15 aa, Homo sapiens
  CDR3 for beta chain variable domain of TCR clone 362038 (TRBV7-2, TRBJ2-2)
CASRRPGQNTGELFF

SEQ ID NO: 724077 - protein, 14 aa, Homo sapiens
  CDR3 for alpha chain variable domain of TCR clone 362039 (TRAV13-1, TRAJ35)
CAARKGGFGNVLHC

SEQ ID NO: 724078 - protein, 13 aa, Homo sapiens
  CDR3 for beta chain variable domain of TCR clone 362039 (TRBV7-3, TRBJ1-1)
CASSQDLGAEAFF

SEQ ID NO: 724079 - protein, 12 aa, Homo sapiens
  CDR3 for alpha chain variable domain of TCR clone 362040 (TRAV12-1, TRAJ15)
CVVNQAGTALIF

SEQ ID NO: 724080 - protein, 16 aa, Homo sapiens
  CDR3 for beta chain variable domain of TCR clone 362040 (TRBV7-9, TRBJ2-3)
CASSPWREVGTDTQYF

SEQ ID NO: 724081 - protein, 21 aa, Homo sapiens
  CDR3 for alpha chain variable domain of TCR clone 362041 (TRAV26-1, TRAJ38)
CIADNAGNNHIQNPDPAVYQL

SEQ ID NO: 724082 - protein, 13 aa, Homo sapiens
  CDR3 for beta chain variable domain of TCR clone 362041 (TRBV20-1, TRBJ1-1)
CSARGGGNTEASF

SEQ ID NO: 724083 - protein, 14 aa, Homo sapiens
  CDR3 for alpha chain variable domain of TCR clone 362042 (TRAV17, TRAJ4)
CATAPLGGYNKLIF

SEQ ID NO: 724084 - protein, 15 aa, Homo sapiens
  CDR3 for beta chain variable domain of TCR clone 362042 (TRBV11-1, TRBJ2-1)
CASHTGLAGSNEQFF

SEQ ID NO: 724085 - protein, 12 aa, Homo sapiens
  CDR3 for alpha chain variable domain of TCR clone 362043 (TRAV8-3, TRAJ43)
CAAGAGNNDMRF

SEQ ID NO: 724086 - protein, 14 aa, Homo sapiens
  CDR3 for beta chain variable domain of TCR clone 362043 (TRBV4-2, TRBJ1-5)
CASSRDRGNQPQHF

SEQ ID NO: 724087 - protein, 16 aa, Homo sapiens
  CDR3 for alpha chain variable domain of TCR clone 362044 (TRAV1-1, TRAJ29)
CSVRSTRNSGNTPLVF

SEQ ID NO: 724088 - protein, 14 aa, Homo sapiens
  CDR3 for beta chain variable domain of TCR clone 362044 (TRBV7-2, TRBJ2-7)
CASSPKTSFYEQYF

SEQ ID NO: 724089 - protein, 16 aa, Homo sapiens
  CDR3 for alpha chain variable domain of TCR clone 362045 (TRAV16, TRAJ52)
CALSGVGGTSYGKLTF

SEQ ID NO: 724090 - protein, 16 aa, Homo sapiens
  CDR3 for beta chain variable domain of TCR clone 362045 (TRBV19, TRBJ2-2)
CASSFPGQGLAGELFF

SEQ ID NO: 724091 - protein, 11 aa, Homo sapiens
  CDR3 for alpha chain variable domain of TCR clone 362046 (TRAV2, TRAJ13)
CASEGYQKVTF

SEQ ID NO: 724092 - protein, 14 aa, Homo sapiens
  CDR3 for beta chain variable domain of TCR clone 362046 (TRBV19, TRBJ2-1)
CASSKDRGQDEQFF

SEQ ID NO: 724093 - protein, 16 aa, Homo sapiens
  CDR3 for alpha chain variable domain of TCR clone 362047 (TRAV12-3, TRAJ53)
CAMSPGSGGSNYKLTF

SEQ ID NO: 724094 - protein, 14 aa, Homo sapiens
  CDR3 for beta chain variable domain of TCR clone 362047 (TRBV4-1, TRBJ2-2)
CASSLAVNTGELFF

SEQ ID NO: 724095 - protein, 15 aa, Homo sapiens
  CDR3 for alpha chain variable domain of TCR clone 362048 (TRAV2, TRAJ44)
CAVEAYTGAASKLTF

SEQ ID NO: 724096 - protein, 14 aa, Homo sapiens
  CDR3 for beta chain variable domain of TCR clone 362048 (TRBV11-2, TRBJ2-1)
CASSPGSRDNEQFF

SEQ ID NO: 724097 - protein, 13 aa, Homo sapiens
  CDR3 for alpha chain variable domain of TCR clone 362049 (TRAV12-3, TRAJ33)
CAMSGNSNYQLIC

SEQ ID NO: 724098 - protein, 13 aa, Homo sapiens
  CDR3 for beta chain variable domain of TCR clone 362049 (TRBV7-2, TRBJ2-2)
CASSLAVTGELFF

SEQ ID NO: 724099 - protein, 12 aa, Homo sapiens
  CDR3 for alpha chain variable domain of TCR clone 362050 (TRAV9-2, TRAJ26)
CALRGYGQNFVF

SEQ ID NO: 724100 - protein, 14 aa, Homo sapiens
  CDR3 for beta chain variable domain of TCR clone 362050 (TRBV7-9, TRBJ2-1)
CASSPRDSLYEQFF

SEQ ID NO: 724101 - protein, 14 aa, Homo sapiens
  CDR3 for alpha chain variable domain of TCR clone 362051 (TRAV29/DV5, TRAJ44)
CAESATGTASKLTF

SEQ ID NO: 724102 - protein, 14 aa, Homo sapiens
  CDR3 for beta chain variable domain of TCR clone 362051 (TRBV7-2, TRBJ2-7)
CASSPKTSFYEQYF

SEQ ID NO: 724103 - protein, 14 aa, Homo sapiens
  CDR3 for alpha chain variable domain of TCR clone 362052 (TRAV14/DV4, TRAJ42)
CPRGSLRSQGILIF

SEQ ID NO: 724104 - protein, 18 aa, Homo sapiens
  CDR3 for beta chain variable domain of TCR clone 362052 (TRBV20-1, TRBJ2-3)
CSASGLAGGPGTTDTQYF

SEQ ID NO: 724105 - protein, 17 aa, Homo sapiens
  CDR3 for alpha chain variable domain of TCR clone 362053 (TRAV38-2/DV8, TRAJ40)
CAYRSARLTSGTYKYIF

SEQ ID NO: 724106 - protein, 13 aa, Homo sapiens
  CDR3 for beta chain variable domain of TCR clone 362053 (TRBV5-8, TRBJ1-2)
CASSLSPNYGYTF

SEQ ID NO: 724107 - protein, 14 aa, Homo sapiens
  CDR3 for alpha chain variable domain of TCR clone 362054 (TRAV14/DV4, TRAJ15)
CAMRRDQAGTALIF

SEQ ID NO: 724108 - protein, 23 aa, Homo sapiens
  CDR3 for beta chain variable domain of TCR clone 362054 (TRBV15, TRBJ2-3)
WGTQPCTCVPPADLGIVTDTQYF

SEQ ID NO: 724109 - protein, 14 aa, Homo sapiens
  CDR3 for alpha chain variable domain of TCR clone 362055 (TRAV1-2, TRAJ16)
CAINRFSDCQKLLF

SEQ ID NO: 724110 - protein, 15 aa, Homo sapiens
  CDR3 for beta chain variable domain of TCR clone 362055 (TRBV9, TRBJ1-6)
CASSVAGTGDSPLHF

SEQ ID NO: 724111 - protein, 16 aa, Homo sapiens
  CDR3 for alpha chain variable domain of TCR clone 362056 (TRAV35, TRAJ28)
CAGQRYSGAVSYQLTF

SEQ ID NO: 724112 - protein, 13 aa, Homo sapiens
  CDR3 for beta chain variable domain of TCR clone 362056 (TRBV19, TRBJ1-2)
FASSQGQVYGYTF

SEQ ID NO: 724113 - protein, 13 aa, Homo sapiens
  CDR3 for alpha chain variable domain of TCR clone 362057 (TRAV29/DV5, TRAJ47)
CAASSEYGNKLVF

SEQ ID NO: 724114 - protein, 15 aa, Homo sapiens
  CDR3 for beta chain variable domain of TCR clone 362057 (TRBV7-9, TRBJ1-4)
CASSARTGGNEKLCF

SEQ ID NO: 724115 - protein, 11 aa, Homo sapiens
  CDR3 for alpha chain variable domain of TCR clone 362058 (TRAV3, TRAJ21)
CAVGNVNKFYF

SEQ ID NO: 724116 - protein, 14 aa, Homo sapiens
  CDR3 for beta chain variable domain of TCR clone 362058 (TRBV25-1, TRBJ1-1)
CASTHLGGNTEAFF

SEQ ID NO: 724117 - protein, 14 aa, Homo sapiens
  CDR3 for alpha chain variable domain of TCR clone 362059 (TRAV23/DV6, TRAJ39)
CAASMIGAGNMLTF

SEQ ID NO: 724118 - protein, 14 aa, Homo sapiens
  CDR3 for beta chain variable domain of TCR clone 362059 (TRBV10-3, TRBJ2-3)
CAISVTRSRDTQYF

SEQ ID NO: 724119 - protein, 12 aa, Homo sapiens
  CDR3 for alpha chain variable domain of TCR clone 362060 (TRAV27, TRAJ35)
WAGADFGNVLHR

SEQ ID NO: 724120 - protein, 16 aa, Homo sapiens
  CDR3 for beta chain variable domain of TCR clone 362060 (TRBV6-1, TRBJ2-1)
CASILRQGSSYNEQFF

SEQ ID NO: 724121 - protein, 15 aa, Homo sapiens
  CDR3 for alpha chain variable domain of TCR clone 362061 (TRAV12-1, TRAJ23)
CGERSRCNQGGKLIF

SEQ ID NO: 724122 - protein, 13 aa, Homo sapiens
  CDR3 for beta chain variable domain of TCR clone 362061 (TRBV4-2, TRBJ1-1)
CASSQAGNTEAFF

SEQ ID NO: 724123 - protein, 14 aa, Homo sapiens
  CDR3 for alpha chain variable domain of TCR clone 362062 (TRAV36/DV7, TRAJ40)
CAVETTSGTYKYIF

SEQ ID NO: 724124 - protein, 17 aa, Homo sapiens
  CDR3 for beta chain variable domain of TCR clone 362062 (TRBV10-3, TRBJ2-5)
CAMTSGAGETSTSGQAR

SEQ ID NO: 724125 - protein, 17 aa, Homo sapiens
  CDR3 for alpha chain variable domain of TCR clone 362063 (TRAV3, TRAJ6)
CAVRDGPRAGGSYIPTF

SEQ ID NO: 724126 - protein, 16 aa, Homo sapiens
  CDR3 for beta chain variable domain of TCR clone 362063 (TRBV4-2, TRBJ1-1)
CASSQAGFGMSTEAFF

SEQ ID NO: 724127 - protein, 14 aa, Homo sapiens
  CDR3 for alpha chain variable domain of TCR clone 362064 (TRAV12-3, TRAJ10)
SHLPLTGGGNKLNF

SEQ ID NO: 724128 - protein, 15 aa, Homo sapiens
  CDR3 for beta chain variable domain of TCR clone 362064 (TRBV6-5, TRBJ2-1)
CASSYDAGAGNEQFF

SEQ ID NO: 724129 - protein, 14 aa, Homo sapiens
  CDR3 for alpha chain variable domain of TCR clone 362065 (TRAV8-1, TRAJ30)
CAVNGYQRDDKIIF

SEQ ID NO: 724130 - protein, 13 aa, Homo sapiens
  CDR3 for beta chain variable domain of TCR clone 362065 (TRBV25-1, TRBJ1-1)
CASSGQVRAEAFF

SEQ ID NO: 724131 - protein, 14 aa, Homo sapiens
  CDR3 for alpha chain variable domain of TCR clone 362066 (TRAV12-2, TRAJ40)
CAVKIPSVTYKYIF

SEQ ID NO: 724132 - protein, 14 aa, Homo sapiens
  CDR3 for beta chain variable domain of TCR clone 362066 (TRBV11-2, TRBJ1-5)
CASSLDRGRQPQHF

SEQ ID NO: 724133 - protein, 14 aa, Homo sapiens
  CDR3 for alpha chain variable domain of TCR clone 362067 (TRAV17, TRAJ4)
CATAPLGGYNKLIF

SEQ ID NO: 724134 - protein, 13 aa, Homo sapiens
  CDR3 for beta chain variable domain of TCR clone 362067 (TRBV6-1, TRBJ2-3)
CASTEIVSNTQYF

SEQ ID NO: 724135 - protein, 10 aa, Homo sapiens
  CDR3 for alpha chain variable domain of TCR clone 362068 (TRAV8-3, TRAJ43)
CAVALADMRF

SEQ ID NO: 724136 - protein, 12 aa, Homo sapiens
  CDR3 for beta chain variable domain of TCR clone 362068 (TRBV11-2, TRBJ2-2)
CASSLGGGELFF

SEQ ID NO: 724137 - protein, 20 aa, Homo sapiens
  CDR3 for alpha chain variable domain of TCR clone 362069 (TRAV13-1, TRAJ10)
CAAKGHGRRKQTHLWDRHSA

SEQ ID NO: 724138 - protein, 13 aa, Homo sapiens
  CDR3 for beta chain variable domain of TCR clone 362069 (TRBV7-9, TRBJ1-2)
CASSLKQNYGYTF

SEQ ID NO: 724139 - protein, 14 aa, Homo sapiens
  CDR3 for alpha chain variable domain of TCR clone 362070 (TRAV23/DV6, TRAJ23)
RAAGPYNQGGKLIF

SEQ ID NO: 724140 - protein, 17 aa, Homo sapiens
  CDR3 for beta chain variable domain of TCR clone 362070 (TRBV4-2, TRBJ1-1)
CASSQVATGGMNTEAFF

SEQ ID NO: 724141 - protein, 14 aa, Homo sapiens
  CDR3 for alpha chain variable domain of TCR clone 362071 (TRAV12-2, TRAJ13)
CSVKKTGGYPKVTL

SEQ ID NO: 724142 - protein, 15 aa, Homo sapiens
  CDR3 for beta chain variable domain of TCR clone 362071 (TRBV27, TRBJ2-1)
CASSNGGGSSNEQFF

SEQ ID NO: 724143 - protein, 14 aa, Homo sapiens
  CDR3 for alpha chain variable domain of TCR clone 362072 (TRAV27, TRAJ22)
CAGLPSGSARQLTF

SEQ ID NO: 724144 - protein, 15 aa, Homo sapiens
  CDR3 for beta chain variable domain of TCR clone 362072 (TRBV2, TRBJ2-1)
CASSELAGSYNEQFF

SEQ ID NO: 724145 - protein, 14 aa, Homo sapiens
  CDR3 for alpha chain variable domain of TCR clone 362073 (TRAV3, TRAJ22)
CCRDRGGSARQLTF

SEQ ID NO: 724146 - protein, 16 aa, Homo sapiens
  CDR3 for beta chain variable domain of TCR clone 362073 (TRBV5-4, TRBJ2-3)
CASQQPGAGGADTQYF

SEQ ID NO: 724147 - protein, 14 aa, Homo sapiens
  CDR3 for alpha chain variable domain of TCR clone 362074 (TRAV23/DV6, TRAJ28)
CAASSGAGSYQLTF

SEQ ID NO: 724148 - protein, 15 aa, Homo sapiens
  CDR3 for beta chain variable domain of TCR clone 362074 (TRBV5-4, TRBJ2-7)
CASSRFGTGSYEQYF

SEQ ID NO: 724149 - protein, 16 aa, Homo sapiens
  CDR3 for alpha chain variable domain of TCR clone 362075 (TRAV8-3, TRAJ8)
CAVPRDGNTGFQKLLS

SEQ ID NO: 724150 - protein, 14 aa, Homo sapiens
  CDR3 for beta chain variable domain of TCR clone 362075 (TRBV4-1, TRBJ2-2)
CASSQAVNTGELFF

SEQ ID NO: 724151 - protein, 11 aa, Homo sapiens
  CDR3 for alpha chain variable domain of TCR clone 362076 (TRAV36/DV7, TRAJ36)
CAVIARRQTTS

SEQ ID NO: 724152 - protein, 13 aa, Homo sapiens
  CDR3 for beta chain variable domain of TCR clone 362076 (TRBV18, TRBJ1-1)
CASSPETKPEAFF

SEQ ID NO: 724153 - protein, 17 aa, Homo sapiens
  CDR3 for alpha chain variable domain of TCR clone 362077 (TRAV17, TRAJ7)
CATLGRLAFGKGNQVVV

SEQ ID NO: 724154 - protein, 13 aa, Homo sapiens
  CDR3 for beta chain variable domain of TCR clone 362077 (TRBV12-4, TRBJ2-7)
CASSLERAGEQYF

SEQ ID NO: 724155 - protein, 14 aa, Homo sapiens
  CDR3 for alpha chain variable domain of TCR clone 362078 (TRAV8-4, TRAJ13)
CAVTLSGGYKKVTF

SEQ ID NO: 724156 - protein, 13 aa, Homo sapiens
  CDR3 for beta chain variable domain of TCR clone 362078 (TRBV19, TRBJ1-2)
CASSVPGQDGYTF

SEQ ID NO: 724157 - protein, 16 aa, Homo sapiens
  CDR3 for alpha chain variable domain of TCR clone 362079 (TRAV30, TRAJ24)
CGTEIVDADSWGKFQF

SEQ ID NO: 724158 - protein, 16 aa, Homo sapiens
  CDR3 for beta chain variable domain of TCR clone 362079 (TRBV18, TRBJ1-1)
CASSPGVGGRGGEAFF

SEQ ID NO: 724159 - protein, 15 aa, Homo sapiens
  CDR3 for alpha chain variable domain of TCR clone 362080 (TRAV21, TRAJ24)
CAARSSTDSWGKLQF

SEQ ID NO: 724160 - protein, 15 aa, Homo sapiens
  CDR3 for beta chain variable domain of TCR clone 362080 (TRBV7-9, TRBJ1-6)
CASSSPGRGNSPLHF

SEQ ID NO: 724161 - protein, 12 aa, Homo sapiens
  CDR3 for alpha chain variable domain of TCR clone 362081 (TRAV12-3, TRAJ17)
CAMTLTGNKLTF

SEQ ID NO: 724162 - protein, 17 aa, Homo sapiens
  CDR3 for beta chain variable domain of TCR clone 362081 (TRBV4-1, TRBJ2-3)
CASSQDPAGGPLDTQYF

SEQ ID NO: 724163 - protein, 12 aa, Homo sapiens
  CDR3 for alpha chain variable domain of TCR clone 362082 (TRAV21, TRAJ11)
CAATSGYSTLTF

SEQ ID NO: 724164 - protein, 13 aa, Homo sapiens
  CDR3 for beta chain variable domain of TCR clone 362082 (TRBV20-1, TRBJ1-1)
CSARGGGNTEAFF

SEQ ID NO: 724165 - protein, 14 aa, Homo sapiens
  CDR3 for alpha chain variable domain of TCR clone 362083 (TRAV26-1, TRAJ39)
CIVRGSRAGHMLTF

SEQ ID NO: 724166 - protein, 13 aa, Homo sapiens
  CDR3 for beta chain variable domain of TCR clone 362083 (TRBV27, TRBJ2-7)
CASSLRHRYEQYF

SEQ ID NO: 724167 - protein, 15 aa, Homo sapiens
  CDR3 for alpha chain variable domain of TCR clone 362084 (TRAV13-2, TRAJ10)
CAENRDTGGGNKLTF

SEQ ID NO: 724168 - protein, 16 aa, Homo sapiens
  CDR3 for beta chain variable domain of TCR clone 362084 (TRBV2, TRBJ1-3)
GASSRTGGSAGNTIYF

SEQ ID NO: 724169 - protein, 11 aa, Homo sapiens
  CDR3 for alpha chain variable domain of TCR clone 362085 (TRAV17, TRAJ49)
CATDTGNQVYF

SEQ ID NO: 724170 - protein, 16 aa, Homo sapiens
  CDR3 for beta chain variable domain of TCR clone 362085 (TRBV7-2, TRBJ1-2)
CASSPTSGTSLGGYTF

SEQ ID NO: 724171 - protein, 13 aa, Homo sapiens
  CDR3 for alpha chain variable domain of TCR clone 362086 (TRAV8-4, TRAJ4)
CAVISGGYNKLMF

SEQ ID NO: 724172 - protein, 11 aa, Homo sapiens
  CDR3 for beta chain variable domain of TCR clone 362086 (TRBV12-4, TRBJ1-1)
CASNQGSEAFF

SEQ ID NO: 724173 - protein, 16 aa, Homo sapiens
  CDR3 for alpha chain variable domain of TCR clone 362087 (TRAV30, TRAJ24)
CGTEIVDADSWGKFQF

SEQ ID NO: 724174 - protein, 15 aa, Homo sapiens
  CDR3 for beta chain variable domain of TCR clone 362087 (TRBV7-2, TRBJ2-7)
CASSLTGQGTYEQYF

SEQ ID NO: 724175 - protein, 13 aa, Homo sapiens
  CDR3 for alpha chain variable domain of TCR clone 362088 (TRAV20, TRAJ37)
CAGCSSNTGKLIF

SEQ ID NO: 724176 - protein, 15 aa, Homo sapiens
  CDR3 for beta chain variable domain of TCR clone 362088 (TRBV7-9, TRBJ2-7)
CASSLALAEAYEQYF

SEQ ID NO: 724177 - protein, 14 aa, Homo sapiens
  CDR3 for alpha chain variable domain of TCR clone 362089 (TRAV1-2, TRAJ16)
CAVNRVSDGQKLLF

SEQ ID NO: 724178 - protein, 15 aa, Homo sapiens
  CDR3 for beta chain variable domain of TCR clone 362089 (TRBV28, TRBJ2-5)
CASSPGQGSIETQYF

SEQ ID NO: 724179 - protein, 14 aa, Homo sapiens
  CDR3 for alpha chain variable domain of TCR clone 362090 (TRAV13-1, TRAJ9)
CAASINTGGFKTIF

SEQ ID NO: 724180 - protein, 14 aa, Homo sapiens
  CDR3 for beta chain variable domain of TCR clone 362090 (TRBV12-5, TRBJ2-5)
CASGSRTHQETQYF

SEQ ID NO: 724181 - protein, 13 aa, Homo sapiens
  CDR3 for alpha chain variable domain of TCR clone 362091 (TRAV12-3, TRAJ40)
CAMSDSGTYKYIF

SEQ ID NO: 724182 - protein, 16 aa, Homo sapiens
  CDR3 for beta chain variable domain of TCR clone 362091 (TRBV4-2, TRBJ2-5)
CASSQELVGSQETQYF

SEQ ID NO: 724183 - protein, 13 aa, Homo sapiens
  CDR3 for alpha chain variable domain of TCR clone 362092 (TRAV12-3, TRAJ47)
CAMKKEYGNKLVF

SEQ ID NO: 724184 - protein, 14 aa, Homo sapiens
  CDR3 for beta chain variable domain of TCR clone 362092 (TRBV7-6, TRBJ2-3)
CASSLGTVTDTQYF

SEQ ID NO: 724185 - protein, 14 aa, Homo sapiens
  CDR3 for alpha chain variable domain of TCR clone 362093 (TRAV13-2, TRAJ32)
CAESLGGATNKLIF

SEQ ID NO: 724186 - protein, 15 aa, Homo sapiens
  CDR3 for beta chain variable domain of TCR clone 362093 (TRBV7-8, TRBJ2-1)
CASSLADSLYNEQFF

SEQ ID NO: 724187 - protein, 12 aa, Homo sapiens
  CDR3 for alpha chain variable domain of TCR clone 362094 (TRAV21, TRAJ3)
CCFYSSASKIIF

SEQ ID NO: 724188 - protein, 16 aa, Homo sapiens
  CDR3 for beta chain variable domain of TCR clone 362094 (TRBV19, TRBJ2-1)
CASSKAGPAPTMSSSS

SEQ ID NO: 724189 - protein, 15 aa, Homo sapiens
  CDR3 for alpha chain variable domain of TCR clone 362095 (TRAV12-3, TRAJ6)
CAMSATTGGSCIPTF

SEQ ID NO: 724190 - protein, 13 aa, Homo sapiens
  CDR3 for beta chain variable domain of TCR clone 362095 (TRBV7-3, TRBJ1-1)
CASSQDWGAEAFF

SEQ ID NO: 724191 - protein, 15 aa, Homo sapiens
  CDR3 for alpha chain variable domain of TCR clone 362096 (TRAV2, TRAJ8)
CAVGLMNTGFQKLVF

SEQ ID NO: 724192 - protein, 14 aa, Homo sapiens
  CDR3 for beta chain variable domain of TCR clone 362096 (TRBV28, TRBJ2-5)
CASSRQGKGETQYF

SEQ ID NO: 724193 - protein, 15 aa, Homo sapiens
  CDR3 for alpha chain variable domain of TCR clone 362097 (TRAV8-3, TRAJ45)
CASSYSGGGADGLTF

SEQ ID NO: 724194 - protein, 15 aa, Homo sapiens
  CDR3 for beta chain variable domain of TCR clone 362097 (TRBV2, TRBJ2-1)
CASSEEREGDNEQFF

SEQ ID NO: 724195 - protein, 18 aa, Homo sapiens
  CDR3 for alpha chain variable domain of TCR clone 362098 (TRAV21, TRAJ52)
CAVRPSPAGGTSYGELTF

SEQ ID NO: 724196 - protein, 14 aa, Homo sapiens
  CDR3 for beta chain variable domain of TCR clone 362098 (TRBV6-3, TRBJ2-2)
CAGTYTPDTGELFF

SEQ ID NO: 724197 - protein, 14 aa, Homo sapiens
  CDR3 for alpha chain variable domain of TCR clone 362099 (TRAV13-1, TRAJ44)
CAAKATGTASKLTF

SEQ ID NO: 724198 - protein, 17 aa, Homo sapiens
  CDR3 for beta chain variable domain of TCR clone 362099 (TRBV18, TRBJ2-2)
CASSQRSSGQGPGELFF

SEQ ID NO: 724199 - protein, 12 aa, Homo sapiens
  CDR3 for alpha chain variable domain of TCR clone 362100 (TRAV13-1, TRAJ21)
CAAKEGFNKFYF

SEQ ID NO: 724200 - protein, 13 aa, Homo sapiens
  CDR3 for beta chain variable domain of TCR clone 362100 (TRBV7-9, TRBJ2-1)
RASSLDVGNEQFF

SEQ ID NO: 724201 - protein, 12 aa, Homo sapiens
  CDR3 for alpha chain variable domain of TCR clone 362101 (TRAV13-1, TRAJ21)
CAAKEGFNKFYF

SEQ ID NO: 724202 - protein, 14 aa, Homo sapiens
  CDR3 for beta chain variable domain of TCR clone 362101 (TRBV7-2, TRBJ2-2)
CASRGQGAAGELFF

SEQ ID NO: 724203 - protein, 16 aa, Homo sapiens
  CDR3 for alpha chain variable domain of TCR clone 362102 (TRAV20, TRAJ22)
CVVQASSSGSARQLTF

SEQ ID NO: 724204 - protein, 13 aa, Homo sapiens
  CDR3 for beta chain variable domain of TCR clone 362102 (TRBV7-2, TRBJ2-5)
CASSQTSVETQYF

SEQ ID NO: 724205 - protein, 11 aa, Homo sapiens
  CDR3 for alpha chain variable domain of TCR clone 362103 (TRAV16, TRAJ33)
CALHSNYQLIW

SEQ ID NO: 724206 - protein, 15 aa, Homo sapiens
  CDR3 for beta chain variable domain of TCR clone 362103 (TRBV4-1, TRBJ2-7)
CASSQQGQGFDEQYC

SEQ ID NO: 724207 - protein, 14 aa, Homo sapiens
  CDR3 for alpha chain variable domain of TCR clone 362104 (TRAV1-2, TRAJ16)
CAVNRFSDGQKLLF

SEQ ID NO: 724208 - protein, 13 aa, Homo sapiens
  CDR3 for beta chain variable domain of TCR clone 362104 (TRBV18, TRBJ2-5)
CAISPAGKETQYF

SEQ ID NO: 724209 - protein, 17 aa, Homo sapiens
  CDR3 for alpha chain variable domain of TCR clone 362105 (TRAV12-3, TRAJ6)
CAMSARGGAGGSYIPTF

SEQ ID NO: 724210 - protein, 17 aa, Homo sapiens
  CDR3 for beta chain variable domain of TCR clone 362105 (TRBV20-1, TRBJ2-1)
CSASSSGLAGSYNEQFF

SEQ ID NO: 724211 - protein, 14 aa, Homo sapiens
  CDR3 for alpha chain variable domain of TCR clone 362106 (TRAV26-1, TRAJ38)
CIADNAGNNRKLIW

SEQ ID NO: 724212 - protein, 13 aa, Homo sapiens
  CDR3 for beta chain variable domain of TCR clone 362106 (TRBV7-9, TRBJ2-3)
CASSPGSTHTQYF

SEQ ID NO: 724213 - protein, 15 aa, Homo sapiens
  CDR3 for alpha chain variable domain of TCR clone 362107 (TRAV8-3, TRAJ11)
CAVGLLNSGYSTLTF

SEQ ID NO: 724214 - protein, 13 aa, Homo sapiens
  CDR3 for beta chain variable domain of TCR clone 362107 (TRBV27, TRBJ2-7)
CASSLTTGYEQYF

SEQ ID NO: 724215 - protein, 14 aa, Homo sapiens
  CDR3 for alpha chain variable domain of TCR clone 362108 (TRAV12-1, TRAJ17)
CVVNYKAAGNKLTF

SEQ ID NO: 724216 - protein, 17 aa, Homo sapiens
  CDR3 for beta chain variable domain of TCR clone 362108 (TRBV20-1, TRBJ2-1)
CSARSPSGGPPTMSSSS

SEQ ID NO: 724217 - protein, 16 aa, Homo sapiens
  CDR3 for alpha chain variable domain of TCR clone 362109 (TRAV8-4, TRAJ5)
CAVSTFTDTGRRALTV

SEQ ID NO: 724218 - protein, 14 aa, Homo sapiens
  CDR3 for beta chain variable domain of TCR clone 362109 (TRBV19, TRBJ1-6)
CASSTDGWNSPLHF

SEQ ID NO: 724219 - protein, 15 aa, Homo sapiens
  CDR3 for alpha chain variable domain of TCR clone 362110 (TRAV13-1, TRAJ5)
CAASPRGHEQESTYF

SEQ ID NO: 724220 - protein, 15 aa, Homo sapiens
  CDR3 for beta chain variable domain of TCR clone 362110 (TRBV6-1, TRBJ2-3)
CASSERGGITDTQYF

SEQ ID NO: 724221 - protein, 15 aa, Homo sapiens
  CDR3 for alpha chain variable domain of TCR clone 362111 (TRAV25, TRAJ52)
CAGRPGGTSYGKLTF

SEQ ID NO: 724222 - protein, 18 aa, Homo sapiens
  CDR3 for beta chain variable domain of TCR clone 362111 (TRBV11-2, TRBJ2-3)
WASSVGGASRGAPNTQYF

SEQ ID NO: 724223 - protein, 14 aa, Homo sapiens
  CDR3 for alpha chain variable domain of TCR clone 362112 (TRAV13-1, TRAJ35)
CAASKGGFGNVLHC

SEQ ID NO: 724224 - protein, 16 aa, Homo sapiens
  CDR3 for beta chain variable domain of TCR clone 362112 (TRBV20-1, TRBJ2-5)
CSARPRTGGVQETQYF

SEQ ID NO: 724225 - protein, 14 aa, Homo sapiens
  CDR3 for alpha chain variable domain of TCR clone 362113 (TRAV21, TRAJ23)
CAPRLYNQGGKLIF

SEQ ID NO: 724226 - protein, 14 aa, Homo sapiens
  CDR3 for beta chain variable domain of TCR clone 362113 (TRBV18, TRBJ2-7)
CASSPRGGAYEQYF

SEQ ID NO: 724227 - protein, 13 aa, Homo sapiens
  CDR3 for alpha chain variable domain of TCR clone 362114 (TRAV13-1, TRAJ5)
CSASDTGRKALTF

SEQ ID NO: 724228 - protein, 12 aa, Homo sapiens
  CDR3 for beta chain variable domain of TCR clone 362114 (TRBV28, TRBJ2-3)
CASRLYRDTQYF

SEQ ID NO: 724229 - protein, 14 aa, Homo sapiens
  CDR3 for alpha chain variable domain of TCR clone 362115 (TRAV30, TRAJ26)
CGTEIVSYGQNFVF

SEQ ID NO: 724230 - protein, 21 aa, Homo sapiens
  CDR3 for beta chain variable domain of TCR clone 362115 (TRBV7-3, TRBJ1-1)
GGTQPCISVPAARIGGAEAFF

SEQ ID NO: 724231 - protein, 11 aa, Homo sapiens
  CDR3 for alpha chain variable domain of TCR clone 362116 (TRAV13-1, TRAJ20)
CSPHVLYKLSF

SEQ ID NO: 724232 - protein, 14 aa, Homo sapiens
  CDR3 for beta chain variable domain of TCR clone 362116 (TRBV28, TRBJ2-5)
CASTGAGGVETQYF

SEQ ID NO: 724233 - protein, 18 aa, Homo sapiens
  CDR3 for alpha chain variable domain of TCR clone 362117 (TRAV21, TRAJ52)
CAVRPSPAGGTSYGKLTF

SEQ ID NO: 724234 - protein, 15 aa, Homo sapiens
  CDR3 for beta chain variable domain of TCR clone 362117 (TRBV20-1, TRBJ1-5)
CSAFENGQRNQPQHF

SEQ ID NO: 724235 - protein, 16 aa, Homo sapiens
  CDR3 for alpha chain variable domain of TCR clone 362118 (TRAV3, TRAJ18)
CGVRDGRGSTLGRLYF

SEQ ID NO: 724236 - protein, 15 aa, Homo sapiens
  CDR3 for beta chain variable domain of TCR clone 362118 (TRBV7-9, TRBJ1-6)
CASSSPGRGNSPLHF

SEQ ID NO: 724237 - protein, 14 aa, Homo sapiens
  CDR3 for alpha chain variable domain of TCR clone 362119 (TRAV12-2, TRAJ17)
CAVLFKAAGNKLTF

SEQ ID NO: 724238 - protein, 15 aa, Homo sapiens
  CDR3 for beta chain variable domain of TCR clone 362119 (TRBV20-1, TRBJ2-7)
CSARGPLAGGREQYF

SEQ ID NO: 724239 - protein, 16 aa, Homo sapiens
  CDR3 for alpha chain variable domain of TCR clone 362120 (TRAV12-2, TRAJ18)
CAVTTDRGSTLGRLYF

SEQ ID NO: 724240 - protein, 14 aa, Homo sapiens
  CDR3 for beta chain variable domain of TCR clone 362120 (TRBV4-2, TRBJ1-5)
CVSSQDSINQPQHF

SEQ ID NO: 724241 - protein, 15 aa, Homo sapiens
  CDR3 for alpha chain variable domain of TCR clone 362121 (TRAV12-2, TRAJ43)
CAFDMRFGAGTRLTV

SEQ ID NO: 724242 - protein, 18 aa, Homo sapiens
  CDR3 for beta chain variable domain of TCR clone 362121 (TRBV12-4, TRBJ2-2)
CASSLVAGTRGRTGELFF

SEQ ID NO: 724243 - protein, 11 aa, Homo sapiens
  CDR3 for alpha chain variable domain of TCR clone 362122 (TRAV17, TRAJ9)
CGFTVGCKTIF

SEQ ID NO: 724244 - protein, 14 aa, Homo sapiens
  CDR3 for beta chain variable domain of TCR clone 362122 (TRBV7-9, TRBJ2-2)
CASSLVQDTGELFF

SEQ ID NO: 724245 - protein, 17 aa, Homo sapiens
  CDR3 for alpha chain variable domain of TCR clone 362123 (TRAV38-1, TRAJ45)
CAFMKHYMGGGADGLTF

SEQ ID NO: 724246 - protein, 17 aa, Homo sapiens
  CDR3 for beta chain variable domain of TCR clone 362123 (TRBV7-3, TRBJ2-3)
CASSPRGQGYGTDTQYF

SEQ ID NO: 724247 - protein, 12 aa, Homo sapiens
  CDR3 for alpha chain variable domain of TCR clone 362124 (TRAV20, TRAJ39)
CAVGNAGNMITF

SEQ ID NO: 724248 - protein, 15 aa, Homo sapiens
  CDR3 for beta chain variable domain of TCR clone 362124 (TRBV27, TRBJ2-1)
CASSNGGGSSNEQFF

SEQ ID NO: 724249 - protein, 15 aa, Homo sapiens
  CDR3 for alpha chain variable domain of TCR clone 362125 (TRAV3, TRAJ17)
CAVRDTGAAGKKLTF

SEQ ID NO: 724250 - protein, 15 aa, Homo sapiens
  CDR3 for beta chain variable domain of TCR clone 362125 (TRBV20-1, TRBJ2-7)
CSARDRVSGMDEQYF

SEQ ID NO: 724251 - protein, 11 aa, Homo sapiens
  CDR3 for alpha chain variable domain of TCR clone 362126 (TRAV21, TRAJ33)
CAVIRNYQLIW

SEQ ID NO: 724252 - protein, 15 aa, Homo sapiens
  CDR3 for beta chain variable domain of TCR clone 362126 (TRBV7-9, TRBJ1-4)
CASSRTGGFNETLFF

SEQ ID NO: 724253 - protein, 14 aa, Homo sapiens
  CDR3 for alpha chain variable domain of TCR clone 362127 (TRAV35, TRAJ40)
CAGSTTSGTDKYIF

SEQ ID NO: 724254 - protein, 13 aa, Homo sapiens
  CDR3 for beta chain variable domain of TCR clone 362127 (TRBV20-1, TRBJ1-6)
CSAPLGGGSPLHF

SEQ ID NO: 724255 - protein, 12 aa, Homo sapiens
  CDR3 for alpha chain variable domain of TCR clone 362128 (TRAV13-2, TRAJ39)
CAESRPGNMLTF

SEQ ID NO: 724256 - protein, 15 aa, Homo sapiens
  CDR3 for beta chain variable domain of TCR clone 362128 (TRBV9, TRBJ1-6)
CASSVAGTGDSHLHF

SEQ ID NO: 724257 - protein, 11 aa, Homo sapiens
  CDR3 for alpha chain variable domain of TCR clone 362129 (TRAV17, TRAJ36)
CAPTGANNLFF

SEQ ID NO: 724258 - protein, 12 aa, Homo sapiens
  CDR3 for beta chain variable domain of TCR clone 362129 (TRBV29-1, TRBJ2-3)
CSVVLGSDTQYF

SEQ ID NO: 724259 - protein, 23 aa, Homo sapiens
  CDR3 for alpha chain variable domain of TCR clone 362130 (TRAV8-3, )
CAVGASHAGNNHIQNPDPAVYQL

SEQ ID NO: 724260 - protein, 15 aa, Homo sapiens
  CDR3 for beta chain variable domain of TCR clone 362130 (TRBV11-3, TRBJ1-3)
CASSLFGPSGNTIYF

SEQ ID NO: 724261 - protein, 13 aa, Homo sapiens
  CDR3 for alpha chain variable domain of TCR clone 362131 (TRAV12-3, TRAJ33)
CAMSLNSNYQLIW

SEQ ID NO: 724262 - protein, 14 aa, Homo sapiens
  CDR3 for beta chain variable domain of TCR clone 362131 (TRBV4-1, TRBJ2-2)
CASSQAVNTGELFF

SEQ ID NO: 724263 - protein, 13 aa, Homo sapiens
  CDR3 for alpha chain variable domain of TCR clone 362132 (TRAV26-1, TRAJ12)
CIVRPDSSYKLIF

SEQ ID NO: 724264 - protein, 18 aa, Homo sapiens
  CDR3 for beta chain variable domain of TCR clone 362132 (TRBV19, TRBJ2-6)
CASSADRAGSSGANVLTF

SEQ ID NO: 724265 - protein, 14 aa, Homo sapiens
  CDR3 for alpha chain variable domain of TCR clone 362133 (TRAV13-1, TRAJ35)
CAASKGGFGNVLHC

SEQ ID NO: 724266 - protein, 12 aa, Homo sapiens
  CDR3 for beta chain variable domain of TCR clone 362133 (TRBV7-3, TRBJ1-1)
CQRPGLGAEAFF

SEQ ID NO: 724267 - protein, 11 aa, Homo sapiens
  CDR3 for alpha chain variable domain of TCR clone 362134 (TRAV1-2, TRAJ20)
CAVSNDYKLSF

SEQ ID NO: 724268 - protein, 13 aa, Homo sapiens
  CDR3 for beta chain variable domain of TCR clone 362134 (TRBV19, TRBJ1-2)
CASSQGQVYGYTF

SEQ ID NO: 724269 - protein, 12 aa, Homo sapiens
  CDR3 for alpha chain variable domain of TCR clone 362135 (TRAV20, TRAJ54)
CAVQEGAQKLEF

SEQ ID NO: 724270 - protein, 17 aa, Homo sapiens
  CDR3 for beta chain variable domain of TCR clone 362135 (TRBV13, TRBJ2-3)
CASSLSRVAGGRNTQYF

SEQ ID NO: 724271 - protein, 11 aa, Homo sapiens
  CDR3 for alpha chain variable domain of TCR clone 362136 (TRAV1-2, TRAJ40)
CAVPGTYKYIF

SEQ ID NO: 724272 - protein, 15 aa, Homo sapiens
  CDR3 for beta chain variable domain of TCR clone 362136 (TRBV7-9, TRBJ2-7)
GASSLALAEAYKQYF

SEQ ID NO: 724273 - protein, 13 aa, Homo sapiens
  CDR3 for alpha chain variable domain of TCR clone 362137 (TRAV35, TRAJ48)
CAGHEFGNEKLTF

SEQ ID NO: 724274 - protein, 14 aa, Homo sapiens
  CDR3 for beta chain variable domain of TCR clone 362137 (TRBV19, TRBJ2-1)
CASPTFVLRGEQFF

SEQ ID NO: 724275 - protein, 15 aa, Homo sapiens
  CDR3 for alpha chain variable domain of TCR clone 362138 (TRAV8-2, TRAJ40)
CVVLGTTSGTYKYIF

SEQ ID NO: 724276 - protein, 16 aa, Homo sapiens
  CDR3 for beta chain variable domain of TCR clone 362138 (TRBV7-3, TRBJ2-1)
CASSLEGDRSYNEQFV

SEQ ID NO: 724277 - protein, 15 aa, Homo sapiens
  CDR3 for alpha chain variable domain of TCR clone 362139 (TRAV29/DV5, TRAJ24)
CAASGATDSWGKFQF

SEQ ID NO: 724278 - protein, 14 aa, Homo sapiens
  CDR3 for beta chain variable domain of TCR clone 362139 (TRBV7-3, TRBJ1-1)
CASSLKGGDTEAFF

SEQ ID NO: 724279 - protein, 15 aa, Homo sapiens
  CDR3 for alpha chain variable domain of TCR clone 362140 (TRAV12-3, TRAJ49)
CAMTAPGNTGNQFYF

SEQ ID NO: 724280 - protein, 16 aa, Homo sapiens
  CDR3 for beta chain variable domain of TCR clone 362140 (TRBV4-3, TRBJ2-1)
CASSPALDRGVNEQFF

SEQ ID NO: 724281 - protein, 13 aa, Homo sapiens
  CDR3 for alpha chain variable domain of TCR clone 362141 (TRAV25, TRAJ26)
CAGMDNYGQNFVF

SEQ ID NO: 724282 - protein, 18 aa, Homo sapiens
  CDR3 for beta chain variable domain of TCR clone 362141 (TRBV7-7, TRBJ2-1)
CASGLALTSGRSYNEQFF

SEQ ID NO: 724283 - protein, 15 aa, Homo sapiens
  CDR3 for alpha chain variable domain of TCR clone 362142 (TRAV14/DV4, TRAJ10)
CAMRELTGGGNKLTF

SEQ ID NO: 724284 - protein, 14 aa, Homo sapiens
  CDR3 for beta chain variable domain of TCR clone 362142 (TRBV11-2, TRBJ2-3)
CASSRLARTDTQYF

SEQ ID NO: 724285 - protein, 14 aa, Homo sapiens
  CDR3 for alpha chain variable domain of TCR clone 362143 (TRAV12-2, TRAJ17)
CAVLFKAAGNKLTF

SEQ ID NO: 724286 - protein, 13 aa, Homo sapiens
  CDR3 for beta chain variable domain of TCR clone 362143 (TRBV19, TRBJ1-2)
CASSQGQVYGHTF

SEQ ID NO: 724287 - protein, 15 aa, Homo sapiens
  CDR3 for alpha chain variable domain of TCR clone 362144 (TRAV1-2, TRAJ18)
CAWEGRGSTLGRLYF

SEQ ID NO: 724288 - protein, 16 aa, Homo sapiens
  CDR3 for beta chain variable domain of TCR clone 362144 (TRBV13, TRBJ2-2)
CASSPRIGEHTGELFF

SEQ ID NO: 724289 - protein, 15 aa, Homo sapiens
  CDR3 for alpha chain variable domain of TCR clone 362145 (TRAV12-1, TRAJ9)
CVVSFGDTGGFKTIC

SEQ ID NO: 724290 - protein, 12 aa, Homo sapiens
  CDR3 for beta chain variable domain of TCR clone 362145 (TRBV14, TRBJ2-7)
CASSLYKDEQYF

SEQ ID NO: 724291 - protein, 16 aa, Homo sapiens
  CDR3 for alpha chain variable domain of TCR clone 362146 (TRAV16, TRAJ4)
CALSRMFSGGYNKLIF

SEQ ID NO: 724292 - protein, 17 aa, Homo sapiens
  CDR3 for beta chain variable domain of TCR clone 362146 (TRBV18, TRBJ2-2)
CASSQRSSGQGPGELSF

SEQ ID NO: 724293 - protein, 12 aa, Homo sapiens
  CDR3 for alpha chain variable domain of TCR clone 362147 (TRAV12-3, TRAJ17)
CAMTLTGNKLTF

SEQ ID NO: 724294 - protein, 11 aa, Homo sapiens
  CDR3 for beta chain variable domain of TCR clone 362147 (TRBV28, TRBJ2-1)
CASRRVNEQFV

SEQ ID NO: 724295 - protein, 14 aa, Homo sapiens
  CDR3 for alpha chain variable domain of TCR clone 362148 (TRAV20, TRAJ42)
CAVQAGGSQVILIF

SEQ ID NO: 724296 - protein, 14 aa, Homo sapiens
  CDR3 for beta chain variable domain of TCR clone 362148 (TRBV28, TRBJ1-2)
CASRIQGANYGYTF

SEQ ID NO: 724297 - protein, 12 aa, Homo sapiens
  CDR3 for alpha chain variable domain of TCR clone 362149 (TRAV16, TRAJ27)
CALNTDAGKSTF

SEQ ID NO: 724298 - protein, 14 aa, Homo sapiens
  CDR3 for beta chain variable domain of TCR clone 362149 (TRBV5-1, TRBJ2-7)
CASSLGVRAYEQYF

SEQ ID NO: 724299 - protein, 12 aa, Homo sapiens
  CDR3 for alpha chain variable domain of TCR clone 362150 (TRAV13-1, TRAJ48)
CAANFGNEKLAF

SEQ ID NO: 724300 - protein, 12 aa, Homo sapiens
  CDR3 for beta chain variable domain of TCR clone 362150 (TRBV7-8, TRBJ2-7)
CASSLGDREQYF

SEQ ID NO: 724301 - protein, 11 aa, Homo sapiens
  CDR3 for alpha chain variable domain of TCR clone 362151 (TRAV2, TRAJ13)
CASGGYQKVTF

SEQ ID NO: 724302 - protein, 14 aa, Homo sapiens
  CDR3 for beta chain variable domain of TCR clone 362151 (TRBV19, TRBJ2-1)
CASGKSTQYNEQFF

SEQ ID NO: 724303 - protein, 22 aa, Homo sapiens
  CDR3 for alpha chain variable domain of TCR clone 362152 (TRAV30, TRAJ48)
TASQLSYSGTYFCGIGNEKLTF

SEQ ID NO: 724304 - protein, 14 aa, Homo sapiens
  CDR3 for beta chain variable domain of TCR clone 362152 (TRBV7-6, TRBJ2-3)
CASSVAGGTDTQYF

SEQ ID NO: 724305 - protein, 12 aa, Homo sapiens
  CDR3 for alpha chain variable domain of TCR clone 362153 (TRAV35, TRAJ49)
CAGWNTGNQFIL

SEQ ID NO: 724306 - protein, 16 aa, Homo sapiens
  CDR3 for beta chain variable domain of TCR clone 362153 (TRBV5-1, TRBJ2-2)
CASSLWDTTNTGELFF

SEQ ID NO: 724307 - protein, 17 aa, Homo sapiens
  CDR3 for alpha chain variable domain of TCR clone 362154 (TRAV38-2/DV8, TRAJ23)
CALSRKLIFGQGTELSV

SEQ ID NO: 724308 - protein, 12 aa, Homo sapiens
  CDR3 for beta chain variable domain of TCR clone 362154 (TRBV5-1, TRBJ1-2)
CASSQDTYGYTF

SEQ ID NO: 724309 - protein, 16 aa, Homo sapiens
  CDR3 for alpha chain variable domain of TCR clone 362155 (TRAV26-2, TRAJ48)
CILRPPFNFGNEKLTF

SEQ ID NO: 724310 - protein, 15 aa, Homo sapiens
  CDR3 for beta chain variable domain of TCR clone 362155 (TRBV20-1, TRBJ2-3)
CSARVEGTDTDTQYF

SEQ ID NO: 724311 - protein, 16 aa, Homo sapiens
  CDR3 for alpha chain variable domain of TCR clone 362156 (TRAV21, TRAJ45)
CAVSWGSGGGADGLTF

SEQ ID NO: 724312 - protein, 16 aa, Homo sapiens
  CDR3 for beta chain variable domain of TCR clone 362156 (TRBV7-3, TRBJ2-2)
CASSLKRGTLSGELFF

SEQ ID NO: 724313 - protein, 13 aa, Homo sapiens
  CDR3 for alpha chain variable domain of TCR clone 362157 (TRAV23/DV6, TRAJ22)
CAPYSGSARQLTF

SEQ ID NO: 724314 - protein, 15 aa, Homo sapiens
  CDR3 for beta chain variable domain of TCR clone 362157 (TRBV5-1, TRBJ2-7)
CASSLGDFTTYEQYF

SEQ ID NO: 724315 - protein, 17 aa, Homo sapiens
  CDR3 for alpha chain variable domain of TCR clone 362158 (TRAV13-1, TRAJ28)
CAASPPYSGAGRYQLTF

SEQ ID NO: 724316 - protein, 19 aa, Homo sapiens
  CDR3 for beta chain variable domain of TCR clone 362158 (TRBV25-1, TRBJ2-2)
CATLVYRVDRGRKTGELFF

SEQ ID NO: 724317 - protein, 17 aa, Homo sapiens
  CDR3 for alpha chain variable domain of TCR clone 362159 (TRAV13-1, TRAJ53)
CAASWKNSGGSNYKLTF

SEQ ID NO: 724318 - protein, 19 aa, Homo sapiens
  CDR3 for beta chain variable domain of TCR clone 362159 (TRBV7-9, TRBJ2-1)
CASSHNRGALLRSYNEQFF

SEQ ID NO: 724319 - protein, 12 aa, Homo sapiens
  CDR3 for alpha chain variable domain of TCR clone 362160 (TRAV21, TRAJ31)
CAVWGNNARLMF

SEQ ID NO: 724320 - protein, 15 aa, Homo sapiens
  CDR3 for beta chain variable domain of TCR clone 362160 (TRBV4-1, TRBJ2-7)
CASSQEWGPSYEQYF

SEQ ID NO: 724321 - protein, 14 aa, Homo sapiens
  CDR3 for alpha chain variable domain of TCR clone 362161 (TRAV12-2, TRAJ45)
CAVNIGGGADGLTF

SEQ ID NO: 724322 - protein, 14 aa, Homo sapiens
  CDR3 for beta chain variable domain of TCR clone 362161 (TRBV28, TRBJ1-4)
CASSFGTFDEKLFF

SEQ ID NO: 724323 - protein, 15 aa, Homo sapiens
  CDR3 for alpha chain variable domain of TCR clone 362162 (TRAV21, TRAJ53)
CATLTSGGSNYKLTF

SEQ ID NO: 724324 - protein, 15 aa, Homo sapiens
  CDR3 for beta chain variable domain of TCR clone 362162 (TRBV11-3, TRBJ2-3)
CASSAGTVVTNTQYF

SEQ ID NO: 724325 - protein, 12 aa, Homo sapiens
  CDR3 for alpha chain variable domain of TCR clone 362163 (TRAV12-3, TRAJ5)
CALDTGRRALTF

SEQ ID NO: 724326 - protein, 13 aa, Homo sapiens
  CDR3 for beta chain variable domain of TCR clone 362163 (TRBV7-7, TRBJ2-2)
CASSLTSAGELFF

SEQ ID NO: 724327 - protein, 13 aa, Homo sapiens
  CDR3 for alpha chain variable domain of TCR clone 362164 (TRAV13-1, TRAJ39)
CSKYSNAGNMLTF

SEQ ID NO: 724328 - protein, 15 aa, Homo sapiens
  CDR3 for beta chain variable domain of TCR clone 362164 (TRBV5-1, TRBJ2-5)
CASSFKGGDQETQYF

SEQ ID NO: 724329 - protein, 17 aa, Homo sapiens
  CDR3 for alpha chain variable domain of TCR clone 362165 (TRAV14/DV4, TRAJ4)
CAMREASGRGGYNKLIF

SEQ ID NO: 724330 - protein, 13 aa, Homo sapiens
  CDR3 for beta chain variable domain of TCR clone 362165 (TRBV12-4, TRBJ1-1)
CASSPGTGFEAFF

SEQ ID NO: 724331 - protein, 20 aa, Homo sapiens
  CDR3 for alpha chain variable domain of TCR clone 362166 (TRAV1-2, TRAJ34)
LLKELQMKDSASPNTDKLIF

SEQ ID NO: 724332 - protein, 16 aa, Homo sapiens
  CDR3 for beta chain variable domain of TCR clone 362166 (TRBV2, TRBJ1-4)
CASNLLQGATNEKLFF

SEQ ID NO: 724333 - protein, 13 aa, Homo sapiens
  CDR3 for alpha chain variable domain of TCR clone 362167 (TRAV21, TRAJ27)
CAALNTNAGKSTF

SEQ ID NO: 724334 - protein, 16 aa, Homo sapiens
  CDR3 for beta chain variable domain of TCR clone 362167 (TRBV9, TRBJ2-2)
CASSAMGKGNTGELFF

SEQ ID NO: 724335 - protein, 13 aa, Homo sapiens
  CDR3 for alpha chain variable domain of TCR clone 362168 (TRAV23/DV6, TRAJ45)
CSARRGGADGLTF

SEQ ID NO: 724336 - protein, 14 aa, Homo sapiens
  CDR3 for beta chain variable domain of TCR clone 362168 (TRBV7-2, TRBJ2-3)
CASSLARGTDTQYF

SEQ ID NO: 724337 - protein, 14 aa, Homo sapiens
  CDR3 for alpha chain variable domain of TCR clone 362169 (TRAV27, TRAJ22)
CAGLPSGSAGQLTF

SEQ ID NO: 724338 - protein, 13 aa, Homo sapiens
  CDR3 for beta chain variable domain of TCR clone 362169 (TRBV7-3, TRBJ1-1)
CASSQDWGAEAFF

SEQ ID NO: 724339 - protein, 12 aa, Homo sapiens
  CDR3 for alpha chain variable domain of TCR clone 362170 (TRAV8-4, TRAJ20)
CAVSDDDSKLSF

SEQ ID NO: 724340 - protein, 17 aa, Homo sapiens
  CDR3 for beta chain variable domain of TCR clone 362170 (TRBV12-4, TRBJ1-5)
CASSRHQAGGVNQPQHF

SEQ ID NO: 724341 - protein, 14 aa, Homo sapiens
  CDR3 for alpha chain variable domain of TCR clone 362171 (TRAV1-2, TRAJ15)
CAGRDRQAGTALIF

SEQ ID NO: 724342 - protein, 17 aa, Homo sapiens
  CDR3 for beta chain variable domain of TCR clone 362171 (TRBV5-5, TRBJ1-2)
CASSLGSLDGQSGGYTF

SEQ ID NO: 724343 - protein, 13 aa, Homo sapiens
  CDR3 for alpha chain variable domain of TCR clone 362172 (TRAV29/DV5, TRAJ31)
FAASRNNNARLMF

SEQ ID NO: 724344 - protein, 12 aa, Homo sapiens
  CDR3 for beta chain variable domain of TCR clone 362172 (TRBV14, TRBJ2-5)
CSSSHLKETQYF

SEQ ID NO: 724345 - protein, 16 aa, Homo sapiens
  CDR3 for alpha chain variable domain of TCR clone 362173 (TRAV17, TRAJ52)
CATSNAGGTSYGKLTF

SEQ ID NO: 724346 - protein, 17 aa, Homo sapiens
  CDR3 for beta chain variable domain of TCR clone 362173 (TRBV11-2, TRBJ2-1)
CASSLYPPGVEYNEQFF

SEQ ID NO: 724347 - protein, 16 aa, Homo sapiens
  CDR3 for alpha chain variable domain of TCR clone 362174 (TRAV17, TRAJ22)
CATGPISSGSARQLTF

SEQ ID NO: 724348 - protein, 13 aa, Homo sapiens
  CDR3 for beta chain variable domain of TCR clone 362174 (TRBV11-2, TRBJ2-1)
CASSLGIAGGRFF

SEQ ID NO: 724349 - protein, 11 aa, Homo sapiens
  CDR3 for alpha chain variable domain of TCR clone 362175 (TRAV26-1, TRAJ27)
CIDPNTGKSTF

SEQ ID NO: 724350 - protein, 18 aa, Homo sapiens
  CDR3 for beta chain variable domain of TCR clone 362175 (TRBV7-9, TRBJ2-6)
CASSFPGAGISGANVLTF

SEQ ID NO: 724351 - protein, 13 aa, Homo sapiens
  CDR3 for alpha chain variable domain of TCR clone 362176 (TRAV1-1, TRAJ23)
CAVGANQGGKLIF

SEQ ID NO: 724352 - protein, 19 aa, Homo sapiens
  CDR3 for beta chain variable domain of TCR clone 362176 (TRBV11-3, TRBJ2-2)
CASSTRPGAKTTNTGELFF

SEQ ID NO: 724353 - protein, 12 aa, Homo sapiens
  CDR3 for alpha chain variable domain of TCR clone 362177 (TRAV3, TRAJ43)
CAVRDPNNDRRF

SEQ ID NO: 724354 - protein, 15 aa, Homo sapiens
  CDR3 for beta chain variable domain of TCR clone 362177 (TRBV4-3, TRBJ2-7)
CASSQGDWGDYEQYF

SEQ ID NO: 724355 - protein, 12 aa, Homo sapiens
  CDR3 for alpha chain variable domain of TCR clone 362178 (TRAV3, TRAJ26)
CAVRDYGQNFVF

SEQ ID NO: 724356 - protein, 14 aa, Homo sapiens
  CDR3 for beta chain variable domain of TCR clone 362178 (TRBV7-2, TRBJ1-1)
CASSFLTGTTEAFF

SEQ ID NO: 724357 - protein, 19 aa, Homo sapiens
  CDR3 for alpha chain variable domain of TCR clone 362179 (TRAV29/DV5, TRAJ49)
CSVLLCSKLTVDTGNQFYV

SEQ ID NO: 724358 - protein, 15 aa, Homo sapiens
  CDR3 for beta chain variable domain of TCR clone 362179 (TRBV4-3, TRBJ2-2)
CASSQGGTPTGELFF

SEQ ID NO: 724359 - protein, 11 aa, Homo sapiens
  CDR3 for alpha chain variable domain of TCR clone 362180 (TRAV12-2, TRAJ6)
CAVNVSRKLRT

SEQ ID NO: 724360 - protein, 12 aa, Homo sapiens
  CDR3 for beta chain variable domain of TCR clone 362180 (TRBV29-1, TRBJ2-3)
CSVTGGADTQYF

SEQ ID NO: 724361 - protein, 13 aa, Homo sapiens
  CDR3 for alpha chain variable domain of TCR clone 362181 (TRAV3, TRAJ21)
CAVREPDFNKFYF

SEQ ID NO: 724362 - protein, 15 aa, Homo sapiens
  CDR3 for beta chain variable domain of TCR clone 362181 (TRBV2, TRBJ2-1)
CASSVLAGGYNEQFF

SEQ ID NO: 724363 - protein, 12 aa, Homo sapiens
  CDR3 for alpha chain variable domain of TCR clone 362182 (TRAV1-1, TRAJ8)
CAGGTGFQKLVF

SEQ ID NO: 724364 - protein, 13 aa, Homo sapiens
  CDR3 for beta chain variable domain of TCR clone 362182 (TRBV7-9, TRBJ1-2)
CTSGLKQNYGYTF

SEQ ID NO: 724365 - protein, 15 aa, Homo sapiens
  CDR3 for alpha chain variable domain of TCR clone 362183 (TRAV12-1, TRAJ9)
CVVSLGDTGGFKTIF

SEQ ID NO: 724366 - protein, 19 aa, Homo sapiens
  CDR3 for beta chain variable domain of TCR clone 362183 (TRBV25-1, TRBJ2-2)
CAILVYRVDRGRKTGEQFF

SEQ ID NO: 724367 - protein, 17 aa, Homo sapiens
  CDR3 for alpha chain variable domain of TCR clone 362184 (TRAV3, TRAJ6)
CAMRDGPRAGGSYIPTF

SEQ ID NO: 724368 - protein, 18 aa, Homo sapiens
  CDR3 for beta chain variable domain of TCR clone 362184 (TRBV7-9, TRBJ2-7)
CASSLTTSGSRTWYEQYF

SEQ ID NO: 724369 - protein, 13 aa, Homo sapiens
  CDR3 for alpha chain variable domain of TCR clone 362185 (TRAV12-3, TRAJ33)
CAMSVNRNYQLIW

SEQ ID NO: 724370 - protein, 13 aa, Homo sapiens
  CDR3 for beta chain variable domain of TCR clone 362185 (TRBV4-1, TRBJ2-2)
CASSQENTGELFF

SEQ ID NO: 724371 - protein, 12 aa, Homo sapiens
  CDR3 for alpha chain variable domain of TCR clone 362186 (TRAV12-3, TRAJ17)
CAMTLTGNKLTF

SEQ ID NO: 724372 - protein, 15 aa, Homo sapiens
  CDR3 for beta chain variable domain of TCR clone 362186 (TRBV29-1, TRBJ2-6)
CSVTGGRSGANVLTF

SEQ ID NO: 724373 - protein, 13 aa, Homo sapiens
  CDR3 for alpha chain variable domain of TCR clone 362187 (TRAV3, TRAJ21)
CAVREPDFNKFYF

SEQ ID NO: 724374 - protein, 14 aa, Homo sapiens
  CDR3 for beta chain variable domain of TCR clone 362187 (TRBV2, TRBJ2-1)
CASSEALIYNEQFF

SEQ ID NO: 724375 - protein, 17 aa, Homo sapiens
  CDR3 for alpha chain variable domain of TCR clone 362188 (TRAV3, TRAJ6)
GAVRDGPRAGGSYIPTF

SEQ ID NO: 724376 - protein, 15 aa, Homo sapiens
  CDR3 for beta chain variable domain of TCR clone 362188 (TRBV20-1, TRBJ2-7)
CSARDRVSGMDEQYF

SEQ ID NO: 724377 - protein, 12 aa, Homo sapiens
  CDR3 for alpha chain variable domain of TCR clone 362189 (TRAV38-2/DV8, TRAJ48)
CALLSGNEKLTF

SEQ ID NO: 724378 - protein, 14 aa, Homo sapiens
  CDR3 for beta chain variable domain of TCR clone 362189 (TRBV7-2, TRBJ2-5)
CASSPRGSSETQYF

SEQ ID NO: 724379 - protein, 16 aa, Homo sapiens
  CDR3 for alpha chain variable domain of TCR clone 362190 (TRAV26-1, TRAJ23)
CIVRPAIYNQGGKLNF

SEQ ID NO: 724380 - protein, 15 aa, Homo sapiens
  CDR3 for beta chain variable domain of TCR clone 362190 (TRBV20-1, TRBJ2-3)
CSARPSGFYTDTQYF

SEQ ID NO: 724381 - protein, 12 aa, Homo sapiens
  CDR3 for alpha chain variable domain of TCR clone 362191 (TRAV12-3, TRAJ20)
CAMVRGDYKLSF

SEQ ID NO: 724382 - protein, 17 aa, Homo sapiens
  CDR3 for beta chain variable domain of TCR clone 362191 (TRBV28, TRBJ2-5)
CARSTPEGDALQETQYF

SEQ ID NO: 724383 - protein, 11 aa, Homo sapiens
  CDR3 for alpha chain variable domain of TCR clone 362192 (TRAV38-1, TRAJ53)
CAFMKHGLESV

SEQ ID NO: 724384 - protein, 13 aa, Homo sapiens
  CDR3 for beta chain variable domain of TCR clone 362192 (TRBV19, TRBJ2-7)
CASSPRQSYEQYF

SEQ ID NO: 724385 - protein, 14 aa, Homo sapiens
  CDR3 for alpha chain variable domain of TCR clone 362193 (TRAV1-2, TRAJ12)
CAVSGTDSSCKLIF

SEQ ID NO: 724386 - protein, 15 aa, Homo sapiens
  CDR3 for beta chain variable domain of TCR clone 362193 (TRBV2, TRBJ2-4)
CASSGTNLAKNMQYF

SEQ ID NO: 724387 - protein, 14 aa, Homo sapiens
  CDR3 for alpha chain variable domain of TCR clone 362194 (TRAV13-1, TRAJ17)
LSSRSKAAGNKLTF

SEQ ID NO: 724388 - protein, 17 aa, Homo sapiens
  CDR3 for beta chain variable domain of TCR clone 362194 (TRBV20-1, TRBJ2-4)
CSARDWASGGRENIQYF

SEQ ID NO: 724389 - protein, 15 aa, Homo sapiens
  CDR3 for alpha chain variable domain of TCR clone 362195 (TRAV1-2, TRAJ30)
CTVRPHGNRDDKIIF

SEQ ID NO: 724390 - protein, 13 aa, Homo sapiens
  CDR3 for beta chain variable domain of TCR clone 362195 (TRBV4-1, TRBJ2-7)
CASSQGQAYEQYF

SEQ ID NO: 724391 - protein, 13 aa, Homo sapiens
  CDR3 for alpha chain variable domain of TCR clone 362196 (TRAV21, TRAJ56)
CAGWVGANSKMTF

SEQ ID NO: 724392 - protein, 13 aa, Homo sapiens
  CDR3 for beta chain variable domain of TCR clone 362196 (TRBV11-2, TRBJ1-1)
CASSSTRNTEAFF

SEQ ID NO: 724393 - protein, 15 aa, Homo sapiens
  CDR3 for alpha chain variable domain of TCR clone 362197 (TRAV16, TRAJ39)
CALSPSSNAGNMLTF

SEQ ID NO: 724394 - protein, 14 aa, Homo sapiens
  CDR3 for beta chain variable domain of TCR clone 362197 (TRBV7-7, TRBJ2-7)
CASSPGGPTYEQYF

SEQ ID NO: 724395 - protein, 14 aa, Homo sapiens
  CDR3 for alpha chain variable domain of TCR clone 362198 (TRAV17, TRAJ57)
CATDPQGGSEKLVF

SEQ ID NO: 724396 - protein, 16 aa, Homo sapiens
  CDR3 for beta chain variable domain of TCR clone 362198 (TRBV13, TRBJ2-2)
CASSPRTGEHTGELVF

SEQ ID NO: 724397 - protein, 14 aa, Homo sapiens
  CDR3 for alpha chain variable domain of TCR clone 362199 (TRAV12-3, TRAJ37)
GVSEGSSNTVKLIF

SEQ ID NO: 724398 - protein, 14 aa, Homo sapiens
  CDR3 for beta chain variable domain of TCR clone 362199 (TRBV20-1, TRBJ1-1)
CSAQTRIGGTEAFF

SEQ ID NO: 724399 - protein, 15 aa, Homo sapiens
  CDR3 for alpha chain variable domain of TCR clone 362200 (TRAV25, TRAJ52)
CAGRPGGTSYGKLTF

SEQ ID NO: 724400 - protein, 16 aa, Homo sapiens
  CDR3 for beta chain variable domain of TCR clone 362200 (TRBV7-8, TRBJ2-1)
CASSKAGPSSYNEQFF

SEQ ID NO: 724401 - protein, 15 aa, Homo sapiens
  CDR3 for alpha chain variable domain of TCR clone 362201 (TRAV12-1, TRAJ13)
CVVNPNSGGYQKVTF

SEQ ID NO: 724402 - protein, 14 aa, Homo sapiens
  CDR3 for beta chain variable domain of TCR clone 362201 (TRBV7-2, TRBJ1-6)
CASSLQGANSPLHF

SEQ ID NO: 724403 - protein, 10 aa, Homo sapiens
  CDR3 for alpha chain variable domain of TCR clone 362202 (TRAV26-1, TRAJ22)
CIVSLNFFWF

SEQ ID NO: 724404 - protein, 14 aa, Homo sapiens
  CDR3 for beta chain variable domain of TCR clone 362202 (TRBV2, TRBJ2-7)
CASSLTSGGYEQYF

SEQ ID NO: 724405 - protein, 12 aa, Homo sapiens
  CDR3 for alpha chain variable domain of TCR clone 362203 (TRAV29/DV5, TRAJ49)
CAATDTGNQFYF

SEQ ID NO: 724406 - protein, 20 aa, Homo sapiens
  CDR3 for beta chain variable domain of TCR clone 362203 (TRBV4-1, TRBJ2-2)
CASSQASPPGLASNTGELFF

SEQ ID NO: 724407 - protein, 14 aa, Homo sapiens
  CDR3 for alpha chain variable domain of TCR clone 362204 (TRAV26-1, TRAJ49)
CIVRLTNTGNQFYF

SEQ ID NO: 724408 - protein, 13 aa, Homo sapiens
  CDR3 for beta chain variable domain of TCR clone 362204 (TRBV4-1, TRBJ2-7)
CASSQAQAYEQYF

SEQ ID NO: 724409 - protein, 12 aa, Homo sapiens
  CDR3 for alpha chain variable domain of TCR clone 362205 (TRAV12-3, TRAJ17)
CAMTLTGNKLTF

SEQ ID NO: 724410 - protein, 15 aa, Homo sapiens
  CDR3 for beta chain variable domain of TCR clone 362205 (TRBV6-6, TRBJ2-5)
CASSTGGGLEETQYF

SEQ ID NO: 724411 - protein, 13 aa, Homo sapiens
  CDR3 for alpha chain variable domain of TCR clone 362206 (TRAV3, TRAJ43)
CSVRDTRGGDMRF

SEQ ID NO: 724412 - protein, 15 aa, Homo sapiens
  CDR3 for beta chain variable domain of TCR clone 362206 (TRBV6-5, TRBJ1-5)
CASSYSRRSNQPQHF

SEQ ID NO: 724413 - protein, 13 aa, Homo sapiens
  CDR3 for alpha chain variable domain of TCR clone 362207 (TRAV8-3, TRAJ43)
CAVGIYNNNDMRF

SEQ ID NO: 724414 - protein, 15 aa, Homo sapiens
  CDR3 for beta chain variable domain of TCR clone 362207 (TRBV2, TRBJ2-1)
CASSELAGSYNEQFF

SEQ ID NO: 724415 - protein, 17 aa, Homo sapiens
  CDR3 for alpha chain variable domain of TCR clone 362208 (TRAV3, TRAJ38)
CAVRDCLNAGNNRKLLW

SEQ ID NO: 724416 - protein, 17 aa, Homo sapiens
  CDR3 for beta chain variable domain of TCR clone 362208 (TRBV13, TRBJ2-3)
CASSLSRVAGGRNTQYF

SEQ ID NO: 724417 - protein, 14 aa, Homo sapiens
  CDR3 for alpha chain variable domain of TCR clone 362209 (TRAV21, TRAJ58)
CAVRKGTSGSRLTF

SEQ ID NO: 724418 - protein, 13 aa, Homo sapiens
  CDR3 for beta chain variable domain of TCR clone 362209 (TRBV7-9, TRBJ1-2)
CASSLKQNYGYTF

SEQ ID NO: 724419 - protein, 11 aa, Homo sapiens
  CDR3 for alpha chain variable domain of TCR clone 362210 (TRAV21, TRAJ34)
CAVTNTDKLIF

SEQ ID NO: 724420 - protein, 12 aa, Homo sapiens
  CDR3 for beta chain variable domain of TCR clone 362210 (TRBV7-9, TRBJ1-1)
CASSSVRGEAFF

SEQ ID NO: 724421 - protein, 13 aa, Homo sapiens
  CDR3 for alpha chain variable domain of TCR clone 362211 (TRAV2, TRAJ40)
CAVVTSGTYKYIF

SEQ ID NO: 724422 - protein, 14 aa, Homo sapiens
  CDR3 for beta chain variable domain of TCR clone 362211 (TRBV18, TRBJ2-7)
CASSPRGGSYEQYF

SEQ ID NO: 724423 - protein, 16 aa, Homo sapiens
  CDR3 for alpha chain variable domain of TCR clone 362212 (TRAV38-1, TRAJ39)
CAFMKHYLGAGNMLTF

SEQ ID NO: 724424 - protein, 12 aa, Homo sapiens
  CDR3 for beta chain variable domain of TCR clone 362212 (TRBV11-2, TRBJ2-2)
CASSLPTGELFF

SEQ ID NO: 724425 - protein, 16 aa, Homo sapiens
  CDR3 for alpha chain variable domain of TCR clone 362213 (TRAV17, TRAJ17)
CATDLQEEAAGNKLTF

SEQ ID NO: 724426 - protein, 12 aa, Homo sapiens
  CDR3 for beta chain variable domain of TCR clone 362213 (TRBV4-2, TRBJ2-5)
CASGGAQETQYF

SEQ ID NO: 724427 - protein, 14 aa, Homo sapiens
  CDR3 for alpha chain variable domain of TCR clone 362214 (TRAV1-2, TRAJ8)
CAVREDTVFQKLVF

SEQ ID NO: 724428 - protein, 12 aa, Homo sapiens
  CDR3 for beta chain variable domain of TCR clone 362214 (TRBV11-2, TRBJ2-7)
CASSLPTYEQYF

SEQ ID NO: 724429 - protein, 13 aa, Homo sapiens
  CDR3 for alpha chain variable domain of TCR clone 362215 (TRAV12-2, TRAJ28)
CAPHGAGRYQLTF

SEQ ID NO: 724430 - protein, 15 aa, Homo sapiens
  CDR3 for beta chain variable domain of TCR clone 362215 (TRBV10-2, TRBJ2-5)
CASRGSGGPQETQYF

SEQ ID NO: 724431 - protein, 16 aa, Homo sapiens
  CDR3 for alpha chain variable domain of TCR clone 362216 (TRAV2, TRAJ4)
CAVEDRFYGGYNKLIF

SEQ ID NO: 724432 - protein, 13 aa, Homo sapiens
  CDR3 for beta chain variable domain of TCR clone 362216 (TRBV7-7, TRBJ2-5)
CASSRSGQETQYF

SEQ ID NO: 724433 - protein, 15 aa, Homo sapiens
  CDR3 for alpha chain variable domain of TCR clone 362217 (TRAV12-3, TRAJ54)
CAMSPPFQGAQKLVF

SEQ ID NO: 724434 - protein, 15 aa, Homo sapiens
  CDR3 for beta chain variable domain of TCR clone 362217 (TRBV20-1, TRBJ2-7)
CSARDRVSGMDAQYF

SEQ ID NO: 724435 - protein, 16 aa, Homo sapiens
  CDR3 for alpha chain variable domain of TCR clone 362218 (TRAV12-2, TRAJ45)
CAVNRGSGGGADGLTF

SEQ ID NO: 724436 - protein, 15 aa, Homo sapiens
  CDR3 for beta chain variable domain of TCR clone 362218 (TRBV11-3, TRBJ2-3)
CASLKDGREGDTQYF

SEQ ID NO: 724437 - protein, 15 aa, Homo sapiens
  CDR3 for alpha chain variable domain of TCR clone 362219 (TRAV17, TRAJ23)
CATDAEDNQGGKLIF

SEQ ID NO: 724438 - protein, 15 aa, Homo sapiens
  CDR3 for beta chain variable domain of TCR clone 362219 (TRBV7-9, TRBJ1-5)
CASSQGHQPNQPQHF

SEQ ID NO: 724439 - protein, 12 aa, Homo sapiens
  CDR3 for alpha chain variable domain of TCR clone 362220 (TRAV21, TRAJ33)
CAKMDSNYQLIW

SEQ ID NO: 724440 - protein, 13 aa, Homo sapiens
  CDR3 for beta chain variable domain of TCR clone 362220 (TRBV19, TRBJ2-7)
CASSPRQSYEQYF

SEQ ID NO: 724441 - protein, 14 aa, Homo sapiens
  CDR3 for alpha chain variable domain of TCR clone 362221 (TRAV1-2, TRAJ16)
CAVNRFSDGQKLLF

SEQ ID NO: 724442 - protein, 12 aa, Homo sapiens
  CDR3 for beta chain variable domain of TCR clone 362221 (TRBV6-3, TRBJ2-1)
CASSYSQGGPTF

SEQ ID NO: 724443 - protein, 14 aa, Homo sapiens
  CDR3 for alpha chain variable domain of TCR clone 362222 (TRAV30, TRAJ33)
CGTVAPRSNYQLIW

SEQ ID NO: 724444 - protein, 12 aa, Homo sapiens
  CDR3 for beta chain variable domain of TCR clone 362222 (TRBV11-2, TRBJ2-2)
CASSRPTGELFF

SEQ ID NO: 724445 - protein, 14 aa, Homo sapiens
  CDR3 for alpha chain variable domain of TCR clone 362223 (TRAV12-3, TRAJ54)
CAMRGIQGAQKLVF

SEQ ID NO: 724446 - protein, 13 aa, Homo sapiens
  CDR3 for beta chain variable domain of TCR clone 362223 (TRBV19, TRBJ1-1)
RASSPSNGGEAFF

SEQ ID NO: 724447 - protein, 17 aa, Homo sapiens
  CDR3 for alpha chain variable domain of TCR clone 362224 (TRAV38-1, TRAJ45)
CAFMKHYMGGGADGLTF

SEQ ID NO: 724448 - protein, 19 aa, Homo sapiens
  CDR3 for beta chain variable domain of TCR clone 362224 (TRBV6-1, TRBJ2-5)
CASSEQGPAGGLYQETQYF

SEQ ID NO: 724449 - protein, 14 aa, Homo sapiens
  CDR3 for alpha chain variable domain of TCR clone 362225 (TRAV3, TRAJ17)
CVVRDAAAGNKLTF

SEQ ID NO: 724450 - protein, 13 aa, Homo sapiens
  CDR3 for beta chain variable domain of TCR clone 362225 (TRBV2, TRBJ1-1)
CASSVSGYTEALF

SEQ ID NO: 724451 - protein, 16 aa, Homo sapiens
  CDR3 for alpha chain variable domain of TCR clone 362226 (TRAV21, TRAJ37)
CAVRTAGSSNTGKLIF

SEQ ID NO: 724452 - protein, 14 aa, Homo sapiens
  CDR3 for beta chain variable domain of TCR clone 362226 (TRBV7-3, TRBJ1-1)
CASSLGTGYTEAFF

SEQ ID NO: 724453 - protein, 18 aa, Homo sapiens
  CDR3 for alpha chain variable domain of TCR clone 362227 (TRAV4, TRAJ13)
PRVSLSDTKEGGYQKVTF

SEQ ID NO: 724454 - protein, 16 aa, Homo sapiens
  CDR3 for beta chain variable domain of TCR clone 362227 (TRBV7-9, TRBJ1-2)
CASSLGFSSGEDGYTF

SEQ ID NO: 724455 - protein, 15 aa, Homo sapiens
  CDR3 for alpha chain variable domain of TCR clone 362228 (TRAV20, TRAJ43)
FAVQAGKSSNNDMRF

SEQ ID NO: 724456 - protein, 13 aa, Homo sapiens
  CDR3 for beta chain variable domain of TCR clone 362228 (TRBV27, TRBJ1-1)
CASSLSIGAEAFF

SEQ ID NO: 724457 - protein, 12 aa, Homo sapiens
  CDR3 for alpha chain variable domain of TCR clone 362229 (TRAV12-1, TRAJ40)
CVVYSGTYKYIF

SEQ ID NO: 724458 - protein, 13 aa, Homo sapiens
  CDR3 for beta chain variable domain of TCR clone 362229 (TRBV7-3, TRBJ2-5)
CASSFRGGETQYF

SEQ ID NO: 724459 - protein, 12 aa, Homo sapiens
  CDR3 for alpha chain variable domain of TCR clone 362230 (TRAV3, TRAJ20)
CAVRDPDYKLSF

SEQ ID NO: 724460 - protein, 13 aa, Homo sapiens
  CDR3 for beta chain variable domain of TCR clone 362230 (TRBV24-1, TRBJ2-2)
CATSDWSTGELFF

SEQ ID NO: 724461 - protein, 14 aa, Homo sapiens
  CDR3 for alpha chain variable domain of TCR clone 362231 (TRAV1-1, TRAJ27)
CAVIYKPNAGKSTF

SEQ ID NO: 724462 - protein, 15 aa, Homo sapiens
  CDR3 for beta chain variable domain of TCR clone 362231 (TRBV7-2, TRBJ2-1)
CASSSGLAGGNEQFF

SEQ ID NO: 724463 - protein, 16 aa, Homo sapiens
  CDR3 for alpha chain variable domain of TCR clone 362232 (TRAV12-3, TRAJ20)
CAMDKLSFGSGTTVTV

SEQ ID NO: 724464 - protein, 14 aa, Homo sapiens
  CDR3 for beta chain variable domain of TCR clone 362232 (TRBV5-4, TRBJ2-2)
CASSLTSRTGELFF

SEQ ID NO: 724465 - protein, 16 aa, Homo sapiens
  CDR3 for alpha chain variable domain of TCR clone 362233 (TRAV17, TRAJ53)
CATDALSGGSNYKLTF

SEQ ID NO: 724466 - protein, 14 aa, Homo sapiens
  CDR3 for beta chain variable domain of TCR clone 362233 (TRBV5-1, TRBJ2-7)
CASSFEGTSSTSGR

SEQ ID NO: 724467 - protein, 12 aa, Homo sapiens
  CDR3 for alpha chain variable domain of TCR clone 362234 (TRAV13-2, TRAJ23)
CAERHRGGKLIF

SEQ ID NO: 724468 - protein, 16 aa, Homo sapiens
  CDR3 for beta chain variable domain of TCR clone 362234 (TRBV20-1, TRBJ1-4)
CSAPGQSLLTNEKLFF

SEQ ID NO: 724469 - protein, 16 aa, Homo sapiens
  CDR3 for alpha chain variable domain of TCR clone 362235 (TRAV30, TRAJ24)
CGTEIVDADSWGNSSL

SEQ ID NO: 724470 - protein, 19 aa, Homo sapiens
  CDR3 for beta chain variable domain of TCR clone 362235 (TRBV7-2, TRBJ2-3)
CASSFLSRNWGGGTDTQYF

SEQ ID NO: 724471 - protein, 16 aa, Homo sapiens
  CDR3 for alpha chain variable domain of TCR clone 362236 (TRAV1-2, TRAJ40)
CAVRGSRTSGTYKYIF

SEQ ID NO: 724472 - protein, 16 aa, Homo sapiens
  CDR3 for beta chain variable domain of TCR clone 362236 (TRBV4-1, TRBJ2-3)
CASSQDSEQIRSILAQ

SEQ ID NO: 724473 - protein, 14 aa, Homo sapiens
  CDR3 for alpha chain variable domain of TCR clone 362237 (TRAV17, TRAJ33)
CATYARRSNYQLIW

SEQ ID NO: 724474 - protein, 14 aa, Homo sapiens
  CDR3 for beta chain variable domain of TCR clone 362237 (TRBV25-1, TRBJ1-4)
CASSGGGQPEKLFF

SEQ ID NO: 724475 - protein, 12 aa, Homo sapiens
  CDR3 for alpha chain variable domain of TCR clone 362238 (TRAV13-1, TRAJ53)
CAAGGSNYKLTF

SEQ ID NO: 724476 - protein, 15 aa, Homo sapiens
  CDR3 for beta chain variable domain of TCR clone 362238 (TRBV7-2, TRBJ2-1)
CASRSGLAGGNEQFF

SEQ ID NO: 724477 - protein, 15 aa, Homo sapiens
  CDR3 for alpha chain variable domain of TCR clone 362239 (TRAV26-1, TRAJ52)
CIVGEGGTSYGKLTF

SEQ ID NO: 724478 - protein, 16 aa, Homo sapiens
  CDR3 for beta chain variable domain of TCR clone 362239 (TRBV6-5, TRBJ2-7)
CASSALAGTFSYEQYF

SEQ ID NO: 724479 - protein, 13 aa, Homo sapiens
  CDR3 for alpha chain variable domain of TCR clone 362240 (TRAV12-3, TRAJ9)
CAMRNTGGFKTIF

SEQ ID NO: 724480 - protein, 14 aa, Homo sapiens
  CDR3 for beta chain variable domain of TCR clone 362240 (TRBV11-2, TRBJ2-7)
CAGSSTGEGYEQYF

SEQ ID NO: 724481 - protein, 12 aa, Homo sapiens
  CDR3 for alpha chain variable domain of TCR clone 362241 (TRAV3, TRAJ39)
CAVIEWSNMLTF

SEQ ID NO: 724482 - protein, 18 aa, Homo sapiens
  CDR3 for beta chain variable domain of TCR clone 362241 (TRBV11-2, TRBJ2-3)
CASSLGGASRGAPNTQYF

SEQ ID NO: 724483 - protein, 14 aa, Homo sapiens
  CDR3 for alpha chain variable domain of TCR clone 362242 (TRAV35, TRAJ50)
CAGQRKTSYDKVIF

SEQ ID NO: 724484 - protein, 17 aa, Homo sapiens
  CDR3 for beta chain variable domain of TCR clone 362242 (TRBV19, TRBJ1-1)
CASSRGGQALLNTEAFF

SEQ ID NO: 724485 - protein, 11 aa, Homo sapiens
  CDR3 for alpha chain variable domain of TCR clone 362243 (TRAV21, TRAJ34)
CAVTNADKLIF

SEQ ID NO: 724486 - protein, 19 aa, Homo sapiens
  CDR3 for beta chain variable domain of TCR clone 362243 (TRBV25-1, TRBJ2-2)
CAILVDRVDRGRKTGELFF

SEQ ID NO: 724487 - protein, 14 aa, Homo sapiens
  CDR3 for alpha chain variable domain of TCR clone 362244 (TRAV3, TRAJ8)
CAALMNTGFQKLGF

SEQ ID NO: 724488 - protein, 15 aa, Homo sapiens
  CDR3 for beta chain variable domain of TCR clone 362244 (TRBV28, TRBJ2-5)
CASSLGLGNQETQYF

SEQ ID NO: 724489 - protein, 16 aa, Homo sapiens
  CDR3 for alpha chain variable domain of TCR clone 362245 (TRAV30, TRAJ24)
CGTEIVDADSWGKFRF

SEQ ID NO: 724490 - protein, 14 aa, Homo sapiens
  CDR3 for beta chain variable domain of TCR clone 362245 (TRBV9, TRBJ2-4)
CASSPSGTSGFQYF

SEQ ID NO: 724491 - protein, 23 aa, Homo sapiens
  CDR3 for alpha chain variable domain of TCR clone 362246 (TRAV26-1, )
CIADNAGNKHIQNPDPAVYQLRD

SEQ ID NO: 724492 - protein, 12 aa, Homo sapiens
  CDR3 for beta chain variable domain of TCR clone 362246 (TRBV7-8, TRBJ2-7)
CASSLGDREQYF

SEQ ID NO: 724493 - protein, 10 aa, Homo sapiens
  CDR3 for alpha chain variable domain of TCR clone 362247 (TRAV1-2, TRAJ23)
CAAWAGKLIF

SEQ ID NO: 724494 - protein, 14 aa, Homo sapiens
  CDR3 for beta chain variable domain of TCR clone 362247 (TRBV19, TRBJ1-2)
CASSLQGQAYGYTF

SEQ ID NO: 724495 - protein, 17 aa, Homo sapiens
  CDR3 for alpha chain variable domain of TCR clone 362248 (TRAV4, TRAJ18)
CLVGERSLGSTLGRLDF

SEQ ID NO: 724496 - protein, 14 aa, Homo sapiens
  CDR3 for beta chain variable domain of TCR clone 362248 (TRBV6-5, TRBJ1-2)
CASSYDGTGGGYTF

SEQ ID NO: 724497 - protein, 16 aa, Homo sapiens
  CDR3 for alpha chain variable domain of TCR clone 362249 (TRAV30, TRAJ24)
CGTEIVDADSWGKFQF

SEQ ID NO: 724498 - protein, 14 aa, Homo sapiens
  CDR3 for beta chain variable domain of TCR clone 362249 (TRBV20-1, TRBJ1-1)
CSAQTRIGGTQPFF

SEQ ID NO: 724499 - protein, 14 aa, Homo sapiens
  CDR3 for alpha chain variable domain of TCR clone 362250 (TRAV2, TRAJ9)
CAVEDRSGGFKTIL

SEQ ID NO: 724500 - protein, 14 aa, Homo sapiens
  CDR3 for beta chain variable domain of TCR clone 362250 (TRBV4-1, TRBJ2-2)
CASSQAVNTGELFF

SEQ ID NO: 724501 - protein, 15 aa, Homo sapiens
  CDR3 for alpha chain variable domain of TCR clone 362251 (TRAV13-1, TRAJ5)
CAASKADKGRRALTF

SEQ ID NO: 724502 - protein, 16 aa, Homo sapiens
  CDR3 for beta chain variable domain of TCR clone 362251 (TRBV7-2, TRBJ2-1)
CASSLGRTSGDNEQFF

SEQ ID NO: 724503 - protein, 13 aa, Homo sapiens
  CDR3 for alpha chain variable domain of TCR clone 362252 (TRAV21, TRAJ57)
CAVTQGGSEKLVF

SEQ ID NO: 724504 - protein, 16 aa, Homo sapiens
  CDR3 for beta chain variable domain of TCR clone 362252 (TRBV29-1, TRBJ2-7)
CSVGGAEDGTAYEQYF

SEQ ID NO: 724505 - protein, 16 aa, Homo sapiens
  CDR3 for alpha chain variable domain of TCR clone 362253 (TRAV20, TRAJ53)
CAVQGNSGGSNYKLTF

SEQ ID NO: 724506 - protein, 14 aa, Homo sapiens
  CDR3 for beta chain variable domain of TCR clone 362253 (TRBV5-1, TRBJ2-7)
CASSLGVRAYEQYF

SEQ ID NO: 724507 - protein, 14 aa, Homo sapiens
  CDR3 for alpha chain variable domain of TCR clone 362254 (TRAV13-2, TRAJ17)
CAENSKAADNKLTF

SEQ ID NO: 724508 - protein, 11 aa, Homo sapiens
  CDR3 for beta chain variable domain of TCR clone 362254 (TRBV6-3, TRBJ2-3)
CATGQADTQYF

SEQ ID NO: 724509 - protein, 14 aa, Homo sapiens
  CDR3 for alpha chain variable domain of TCR clone 362255 (TRAV3, TRAJ40)
CAVRYRRGTYKYIF

SEQ ID NO: 724510 - protein, 15 aa, Homo sapiens
  CDR3 for beta chain variable domain of TCR clone 362255 (TRBV28, TRBJ2-1)
CASSIIAGGRSEQFF

SEQ ID NO: 724511 - protein, 14 aa, Homo sapiens
  CDR3 for alpha chain variable domain of TCR clone 362256 (TRAV12-1, TRAJ12)
WVVTRIDSSYKLIF

SEQ ID NO: 724512 - protein, 13 aa, Homo sapiens
  CDR3 for beta chain variable domain of TCR clone 362256 (TRBV20-1, TRBJ1-1)
CSARGGGNTEAFF

SEQ ID NO: 724513 - protein, 14 aa, Homo sapiens
  CDR3 for alpha chain variable domain of TCR clone 362257 (TRAV2, TRAJ37)
YAVDFTSNTGKLIF

SEQ ID NO: 724514 - protein, 14 aa, Homo sapiens
  CDR3 for beta chain variable domain of TCR clone 362257 (TRBV25-1, TRBJ1-1)
CASTHLGGNTEAFF

SEQ ID NO: 724515 - protein, 12 aa, Homo sapiens
  CDR3 for alpha chain variable domain of TCR clone 362258 (TRAV12-3, TRAJ17)
CAMTLTGNKLTF

SEQ ID NO: 724516 - protein, 15 aa, Homo sapiens
  CDR3 for beta chain variable domain of TCR clone 362258 (TRBV20-1, TRBJ2-7)
CSARGRVSGMDEQCF

SEQ ID NO: 724517 - protein, 14 aa, Homo sapiens
  CDR3 for alpha chain variable domain of TCR clone 362259 (TRAV17, TRAJ34)
CATDSLEGTDKLIF

SEQ ID NO: 724518 - protein, 14 aa, Homo sapiens
  CDR3 for beta chain variable domain of TCR clone 362259 (TRBV19, TRBJ2-1)
RASPTFVLSGEQFF

SEQ ID NO: 724519 - protein, 16 aa, Homo sapiens
  CDR3 for alpha chain variable domain of TCR clone 362260 (TRAV35, TRAJ28)
CAGQKYSGAGSYQLTF

SEQ ID NO: 724520 - protein, 13 aa, Homo sapiens
  CDR3 for beta chain variable domain of TCR clone 362260 (TRBV19, TRBJ1-2)
CASSQGQVYGQTF

SEQ ID NO: 724521 - protein, 13 aa, Homo sapiens
  CDR3 for alpha chain variable domain of TCR clone 362261 (TRAV21, TRAJ36)
CAVIKTGANNLFF

SEQ ID NO: 724522 - protein, 13 aa, Homo sapiens
  CDR3 for beta chain variable domain of TCR clone 362261 (TRBV29-1, TRBJ2-3)
CSATRGGRDTQDF

SEQ ID NO: 724523 - protein, 13 aa, Homo sapiens
  CDR3 for alpha chain variable domain of TCR clone 362262 (TRAV8-3, TRAJ36)
CAVGATGANNLFF

SEQ ID NO: 724524 - protein, 15 aa, Homo sapiens
  CDR3 for beta chain variable domain of TCR clone 362262 (TRBV15, TRBJ1-1)
CATSLQRGRNTEASF

SEQ ID NO: 724525 - protein, 14 aa, Homo sapiens
  CDR3 for alpha chain variable domain of TCR clone 362263 (TRAV3, TRAJ21)
CAVESQANFNKFYF

SEQ ID NO: 724526 - protein, 15 aa, Homo sapiens
  CDR3 for beta chain variable domain of TCR clone 362263 (TRBV7-2, TRBJ2-1)
CASSSGLAGGNEQFF

SEQ ID NO: 724527 - protein, 13 aa, Homo sapiens
  CDR3 for alpha chain variable domain of TCR clone 362264 (TRAV13-1, TRAJ43)
CAASKNNNNDMRF

SEQ ID NO: 724528 - protein, 15 aa, Homo sapiens
  CDR3 for beta chain variable domain of TCR clone 362264 (TRBV19, TRBJ1-1)
CASTSGQIQNTEAFC

SEQ ID NO: 724529 - protein, 14 aa, Homo sapiens
  CDR3 for alpha chain variable domain of TCR clone 362265 (TRAV8-1, TRAJ34)
CAVNPSYNTDKLIF

SEQ ID NO: 724530 - protein, 16 aa, Homo sapiens
  CDR3 for beta chain variable domain of TCR clone 362265 (TRBV7-2, TRBJ2-6)
CASSLAGRSGANALTF

SEQ ID NO: 724531 - protein, 14 aa, Homo sapiens
  CDR3 for alpha chain variable domain of TCR clone 362266 (TRAV1-2, TRAJ16)
CAVNRFSDGQMLLF

SEQ ID NO: 724532 - protein, 15 aa, Homo sapiens
  CDR3 for beta chain variable domain of TCR clone 362266 (TRBV20-1, TRBJ2-7)
CSARDRVSGMDEQYF

SEQ ID NO: 724533 - protein, 16 aa, Homo sapiens
  CDR3 for alpha chain variable domain of TCR clone 362267 (TRAV30, TRAJ24)
CCTEIVDADSWGKFQF

SEQ ID NO: 724534 - protein, 12 aa, Homo sapiens
  CDR3 for beta chain variable domain of TCR clone 362267 (TRBV11-2, TRBJ2-1)
CASSPGNNEQFF

SEQ ID NO: 724535 - protein, 10 aa, Homo sapiens
  CDR3 for alpha chain variable domain of TCR clone 362268 (TRAV12-1, TRAJ37)
ARCNTGKLIF

SEQ ID NO: 724536 - protein, 15 aa, Homo sapiens
  CDR3 for beta chain variable domain of TCR clone 362268 (TRBV7-2, TRBJ2-3)
CASSLEQGGTDTQYF

SEQ ID NO: 724537 - protein, 12 aa, Homo sapiens
  CDR3 for alpha chain variable domain of TCR clone 362269 (TRAV12-3, TRAJ17)
CAITLTGNKLTF

SEQ ID NO: 724538 - protein, 14 aa, Homo sapiens
  CDR3 for beta chain variable domain of TCR clone 362269 (TRBV18, TRBJ2-7)
CASSPRGGAYEQYF

SEQ ID NO: 724539 - protein, 14 aa, Homo sapiens
  CDR3 for alpha chain variable domain of TCR clone 362270 (TRAV3, TRAJ34)
CAVRDIDNTAKLIF

SEQ ID NO: 724540 - protein, 14 aa, Homo sapiens
  CDR3 for beta chain variable domain of TCR clone 362270 (TRBV7-2, TRBJ2-2)
CASSLGQNTGELFL

SEQ ID NO: 724541 - protein, 13 aa, Homo sapiens
  CDR3 for alpha chain variable domain of TCR clone 362271 (TRAV17, TRAJ4)
CTTKAGGYNKLIF

SEQ ID NO: 724542 - protein, 14 aa, Homo sapiens
  CDR3 for beta chain variable domain of TCR clone 362271 (TRBV20-1, TRBJ1-5)
CSARDDRGNQPQHF

SEQ ID NO: 724543 - protein, 14 aa, Homo sapiens
  CDR3 for alpha chain variable domain of TCR clone 362272 (TRAV16, TRAJ33)
CALSAMDSKYQLIW

SEQ ID NO: 724544 - protein, 16 aa, Homo sapiens
  CDR3 for beta chain variable domain of TCR clone 362272 (TRBV25-1, TRBJ2-7)
CASSELTGGGIYEQYF

SEQ ID NO: 724545 - protein, 23 aa, Homo sapiens
  CDR3 for alpha chain variable domain of TCR clone 362273 (TRAV8-6, TRAJ36)
CAVSDWLGQTTSSLGLERDSPLF

SEQ ID NO: 724546 - protein, 13 aa, Homo sapiens
  CDR3 for beta chain variable domain of TCR clone 362273 (TRBV4-2, TRBJ1-1)
CASSQAGNTEAFF

SEQ ID NO: 724547 - protein, 15 aa, Homo sapiens
  CDR3 for alpha chain variable domain of TCR clone 362274 (TRAV27, TRAJ53)
CRAINSGGSNYKLTF

SEQ ID NO: 724548 - protein, 13 aa, Homo sapiens
  CDR3 for beta chain variable domain of TCR clone 362274 (TRBV7-9, TRBJ1-2)
CASSLKQNYGYTF

SEQ ID NO: 724549 - protein, 14 aa, Homo sapiens
  CDR3 for alpha chain variable domain of TCR clone 362275 (TRAV1-2, TRAJ8)
CAVREDTGFQKLVF

SEQ ID NO: 724550 - protein, 14 aa, Homo sapiens
  CDR3 for beta chain variable domain of TCR clone 362275 (TRBV7-2, TRBJ2-1)
CASSPGTFYNEQFF

SEQ ID NO: 724551 - protein, 14 aa, Homo sapiens
  CDR3 for alpha chain variable domain of TCR clone 362276 (TRAV2, TRAJ9)
CAVEDRSGGFKTIF

SEQ ID NO: 724552 - protein, 13 aa, Homo sapiens
  CDR3 for beta chain variable domain of TCR clone 362276 (TRBV7-3, TRBJ1-1)
CASSQDWGSEAFF

SEQ ID NO: 724553 - protein, 13 aa, Homo sapiens
  CDR3 for alpha chain variable domain of TCR clone 362277 (TRAV8-6, TRAJ49)
CAVITNTGNQFNF

SEQ ID NO: 724554 - protein, 14 aa, Homo sapiens
  CDR3 for beta chain variable domain of TCR clone 362277 (TRBV5-1, TRBJ2-7)
CASSRGESLYEQYF

SEQ ID NO: 724555 - protein, 16 aa, Homo sapiens
  CDR3 for alpha chain variable domain of TCR clone 362278 (TRAV3, TRAJ37)
CAVRGKGSGNTGKLIF

SEQ ID NO: 724556 - protein, 16 aa, Homo sapiens
  CDR3 for beta chain variable domain of TCR clone 362278 (TRBV4-2, TRBJ2-5)
CASSQELVGSQETQYF

SEQ ID NO: 724557 - protein, 11 aa, Homo sapiens
  CDR3 for alpha chain variable domain of TCR clone 362279 (TRAV1-1, TRAJ20)
CAVFDDYKLSF

SEQ ID NO: 724558 - protein, 16 aa, Homo sapiens
  CDR3 for beta chain variable domain of TCR clone 362279 (TRBV29-1, TRBJ2-2)
CSVEKTSEGNTGELFF

SEQ ID NO: 724559 - protein, 15 aa, Homo sapiens
  CDR3 for alpha chain variable domain of TCR clone 362280 (TRAV27, TRAJ53)
CRAINSGGSNYKLTF

SEQ ID NO: 724560 - protein, 14 aa, Homo sapiens
  CDR3 for beta chain variable domain of TCR clone 362280 (TRBV7-3, TRBJ2-1)
CASSLAGGTNEQFV

SEQ ID NO: 724561 - protein, 14 aa, Homo sapiens
  CDR3 for alpha chain variable domain of TCR clone 362281 (TRAV27, TRAJ22)
CAGLPSGSARQLTF

SEQ ID NO: 724562 - protein, 16 aa, Homo sapiens
  CDR3 for beta chain variable domain of TCR clone 362281 (TRBV7-3, TRBJ2-2)
CASSLKRGTLYGELFF

SEQ ID NO: 724563 - protein, 12 aa, Homo sapiens
  CDR3 for alpha chain variable domain of TCR clone 362282 (TRAV1-2, TRAJ24)
CAVGGSWGKFQF

SEQ ID NO: 724564 - protein, 13 aa, Homo sapiens
  CDR3 for beta chain variable domain of TCR clone 362282 (TRBV12-4, TRBJ1-2)
CASSLRQGKGDTF

SEQ ID NO: 724565 - protein, 11 aa, Homo sapiens
  CDR3 for alpha chain variable domain of TCR clone 362283 (TRAV12-1, TRAJ30)
CVVNGLDKIIF

SEQ ID NO: 724566 - protein, 12 aa, Homo sapiens
  CDR3 for beta chain variable domain of TCR clone 362283 (TRBV27, TRBJ2-2)
CASKLFTGELFF

SEQ ID NO: 724567 - protein, 14 aa, Homo sapiens
  CDR3 for alpha chain variable domain of TCR clone 362284 (TRAV16, TRAJ39)
CALSKNNAGNMLTF

SEQ ID NO: 724568 - protein, 13 aa, Homo sapiens
  CDR3 for beta chain variable domain of TCR clone 362284 (TRBV7-3, TRBJ2-1)
CASSLDSYNEQFF

SEQ ID NO: 724569 - protein, 14 aa, Homo sapiens
  CDR3 for alpha chain variable domain of TCR clone 362285 (TRAV12-2, TRAJ17)
CAVLFKAAGNKLTF

SEQ ID NO: 724570 - protein, 15 aa, Homo sapiens
  CDR3 for beta chain variable domain of TCR clone 362285 (TRBV4-1, TRBJ2-7)
CASSQNTGRLYEQYF

SEQ ID NO: 724571 - protein, 12 aa, Homo sapiens
  CDR3 for alpha chain variable domain of TCR clone 362286 (TRAV12-1, TRAJ20)
CVVNPDDYKLSF

SEQ ID NO: 724572 - protein, 15 aa, Homo sapiens
  CDR3 for beta chain variable domain of TCR clone 362286 (TRBV5-7, TRBJ1-2)
CASSLGVAANYGYTF

SEQ ID NO: 724573 - protein, 14 aa, Homo sapiens
  CDR3 for alpha chain variable domain of TCR clone 362287 (TRAV1-2, TRAJ16)
CAVNRFSDGQKLLF

SEQ ID NO: 724574 - protein, 15 aa, Homo sapiens
  CDR3 for beta chain variable domain of TCR clone 362287 (TRBV4-3, TRBJ2-3)
CASSPSLLSTDTQYF

SEQ ID NO: 724575 - protein, 15 aa, Homo sapiens
  CDR3 for alpha chain variable domain of TCR clone 362288 (TRAV26-1, TRAJ29)
CIVRVEGSVNTPLVF

SEQ ID NO: 724576 - protein, 14 aa, Homo sapiens
  CDR3 for beta chain variable domain of TCR clone 362288 (TRBV18, TRBJ2-5)
CASSPWVSQETQYF

SEQ ID NO: 724577 - protein, 14 aa, Homo sapiens
  CDR3 for alpha chain variable domain of TCR clone 362289 (TRAV17, TRAJ8)
CATQSGTGFQKLVF

SEQ ID NO: 724578 - protein, 12 aa, Homo sapiens
  CDR3 for beta chain variable domain of TCR clone 362289 (TRBV29-1, TRBJ2-3)
CSVTGGADTQYF

SEQ ID NO: 724579 - protein, 14 aa, Homo sapiens
  CDR3 for alpha chain variable domain of TCR clone 362290 (TRAV6, TRAJ40)
CALDATPGTYKYIF

SEQ ID NO: 724580 - protein, 16 aa, Homo sapiens
  CDR3 for beta chain variable domain of TCR clone 362290 (TRBV7-8, TRBJ2-5)
CASSPAGGRNQETQYF

SEQ ID NO: 724581 - protein, 13 aa, Homo sapiens
  CDR3 for alpha chain variable domain of TCR clone 362291 (TRAV16, TRAJ26)
CITVLCLGQNFVF

SEQ ID NO: 724582 - protein, 12 aa, Homo sapiens
  CDR3 for beta chain variable domain of TCR clone 362291 (TRBV11-2, TRBJ2-1)
CASRPGNNEQFF

SEQ ID NO: 724583 - protein, 13 aa, Homo sapiens
  CDR3 for alpha chain variable domain of TCR clone 362292 (TRAV12-1, TRAJ17)
CVVSKAAGNKLTF

SEQ ID NO: 724584 - protein, 17 aa, Homo sapiens
  CDR3 for beta chain variable domain of TCR clone 362292 (TRBV4-1, TRBJ2-5)
CASSQAPSGGPQDTQYF

SEQ ID NO: 724585 - protein, 14 aa, Homo sapiens
  CDR3 for alpha chain variable domain of TCR clone 362293 (TRAV1-2, TRAJ16)
CAVNRFSDGHKLLF

SEQ ID NO: 724586 - protein, 17 aa, Homo sapiens
  CDR3 for beta chain variable domain of TCR clone 362293 (TRBV13, TRBJ2-3)
CASSLSRVAGGRNTQYF

SEQ ID NO: 724587 - protein, 17 aa, Homo sapiens
  CDR3 for alpha chain variable domain of TCR clone 362294 (TRAV21, TRAJ37)
CAVRGNTGKLIWARDNF

SEQ ID NO: 724588 - protein, 14 aa, Homo sapiens
  CDR3 for beta chain variable domain of TCR clone 362294 (TRBV19, TRBJ2-1)
CASEVTGARNEQVF

SEQ ID NO: 724589 - protein, 14 aa, Homo sapiens
  CDR3 for alpha chain variable domain of TCR clone 362295 (TRAV23/DV6, TRAJ37)
CAASTSSNTDKLIF

SEQ ID NO: 724590 - protein, 12 aa, Homo sapiens
  CDR3 for beta chain variable domain of TCR clone 362295 (TRBV27, TRBJ2-2)
CASKLFTGELFF

SEQ ID NO: 724591 - protein, 16 aa, Homo sapiens
  CDR3 for alpha chain variable domain of TCR clone 362296 (TRAV3, TRAJ27)
CAVRDPQGTNAGKSTF

SEQ ID NO: 724592 - protein, 12 aa, Homo sapiens
  CDR3 for beta chain variable domain of TCR clone 362296 (TRBV7-6, TRBJ2-7)
CASSLADSEQYF

SEQ ID NO: 724593 - protein, 17 aa, Homo sapiens
  CDR3 for alpha chain variable domain of TCR clone 362297 (TRAV3, TRAJ6)
CAVRDGPRAGGSYLPTF

SEQ ID NO: 724594 - protein, 14 aa, Homo sapiens
  CDR3 for beta chain variable domain of TCR clone 362297 (TRBV7-2, TRBJ2-7)
CASSLKTSFYEQYF

SEQ ID NO: 724595 - protein, 16 aa, Homo sapiens
  CDR3 for alpha chain variable domain of TCR clone 362298 (TRAV16, TRAJ4)
YSLSRMFSGGYNKLIF

SEQ ID NO: 724596 - protein, 16 aa, Homo sapiens
  CDR3 for beta chain variable domain of TCR clone 362298 (TRBV24-1, TRBJ2-3)
CATSDPGTGATDTQYF

SEQ ID NO: 724597 - protein, 12 aa, Homo sapiens
  CDR3 for alpha chain variable domain of TCR clone 362299 (TRAV17, TRAJ11)
CATDKGYSTLTF

SEQ ID NO: 724598 - protein, 13 aa, Homo sapiens
  CDR3 for beta chain variable domain of TCR clone 362299 (TRBV19, TRBJ1-3)
CASRLSLGNTIYF

SEQ ID NO: 724599 - protein, 13 aa, Homo sapiens
  CDR3 for alpha chain variable domain of TCR clone 362300 (TRAV4, TRAJ42)
CLVGGGSQVNLIF

SEQ ID NO: 724600 - protein, 16 aa, Homo sapiens
  CDR3 for beta chain variable domain of TCR clone 362300 (TRBV5-1, TRBJ2-3)
CASSLQGRVGADTQYF

SEQ ID NO: 724601 - protein, 12 aa, Homo sapiens
  CDR3 for alpha chain variable domain of TCR clone 362301 (TRAV4, TRAJ26)
CLVGDYGQNFVF

SEQ ID NO: 724602 - protein, 16 aa, Homo sapiens
  CDR3 for beta chain variable domain of TCR clone 362301 (TRBV7-2, TRBJ1-2)
CAGSSNQDRRGHGYTF

SEQ ID NO: 724603 - protein, 12 aa, Homo sapiens
  CDR3 for alpha chain variable domain of TCR clone 362302 (TRAV13-1, TRAJ15)
CAASQAGTALIF

SEQ ID NO: 724604 - protein, 18 aa, Homo sapiens
  CDR3 for beta chain variable domain of TCR clone 362302 (TRBV7-9, TRBJ2-3)
CASSLPINGQISTDRQYF

SEQ ID NO: 724605 - protein, 17 aa, Homo sapiens
  CDR3 for alpha chain variable domain of TCR clone 362303 (TRAV35, TRAJ47)
GLLDCRTHTEYGNNLVF

SEQ ID NO: 724606 - protein, 11 aa, Homo sapiens
  CDR3 for beta chain variable domain of TCR clone 362303 (TRBV29-1, TRBJ1-1)
CSVEVGTRTFF

SEQ ID NO: 724607 - protein, 15 aa, Homo sapiens
  CDR3 for alpha chain variable domain of TCR clone 362304 (TRAV27, TRAJ38)
CAARRNAGNNRKLIW

SEQ ID NO: 724608 - protein, 14 aa, Homo sapiens
  CDR3 for beta chain variable domain of TCR clone 362304 (TRBV7-2, TRBJ2-7)
CASSPRDGAYERYF

SEQ ID NO: 724609 - protein, 13 aa, Homo sapiens
  CDR3 for alpha chain variable domain of TCR clone 362305 (TRAV20, TRAJ20)
CAVQAGSGYKLSF

SEQ ID NO: 724610 - protein, 15 aa, Homo sapiens
  CDR3 for beta chain variable domain of TCR clone 362305 (TRBV2, TRBJ2-7)
CASSEGLARSYEQYF

SEQ ID NO: 724611 - protein, 14 aa, Homo sapiens
  CDR3 for alpha chain variable domain of TCR clone 362306 (TRAV12-2, TRAJ13)
CAVKKTGGYQNVTF

SEQ ID NO: 724612 - protein, 15 aa, Homo sapiens
  CDR3 for beta chain variable domain of TCR clone 362306 (TRBV3-1, TRBJ2-7)
CASSQAPSGSYEQYF

SEQ ID NO: 724613 - protein, 12 aa, Homo sapiens
  CDR3 for alpha chain variable domain of TCR clone 362307 (TRAV13-1, TRAJ45)
CAATRGADGLTF

SEQ ID NO: 724614 - protein, 13 aa, Homo sapiens
  CDR3 for beta chain variable domain of TCR clone 362307 (TRBV5-1, TRBJ1-4)
CASSLNSGEKLFF

SEQ ID NO: 724615 - protein, 18 aa, Homo sapiens
  CDR3 for alpha chain variable domain of TCR clone 362308 (TRAV21, TRAJ53)
CAVKGGGNSGGSNYKLTF

SEQ ID NO: 724616 - protein, 14 aa, Homo sapiens
  CDR3 for beta chain variable domain of TCR clone 362308 (TRBV6-1, TRBJ1-5)
CASSAGAGSQPQHF

SEQ ID NO: 724617 - protein, 16 aa, Homo sapiens
  CDR3 for alpha chain variable domain of TCR clone 362309 (TRAV12-2, TRAJ18)
CAVTTDRGSTLGRLYF

SEQ ID NO: 724618 - protein, 13 aa, Homo sapiens
  CDR3 for beta chain variable domain of TCR clone 362309 (TRBV19, TRBJ2-3)
CATCDKITDTQYF

SEQ ID NO: 724619 - protein, 11 aa, Homo sapiens
  CDR3 for alpha chain variable domain of TCR clone 362310 (TRAV23/DV6, TRAJ42)
CAVPREEPMNY

SEQ ID NO: 724620 - protein, 15 aa, Homo sapiens
  CDR3 for beta chain variable domain of TCR clone 362310 (TRBV4-1, TRBJ2-1)
CASSQAGREYNEQFF

SEQ ID NO: 724621 - protein, 13 aa, Homo sapiens
  CDR3 for alpha chain variable domain of TCR clone 362311 (TRAV13-2, TRAJ13)
CAERPGGYQKVTF

SEQ ID NO: 724622 - protein, 15 aa, Homo sapiens
  CDR3 for beta chain variable domain of TCR clone 362311 (TRBV11-3, TRBJ2-7)
CASSPAPASSYEQYF

SEQ ID NO: 724623 - protein, 13 aa, Homo sapiens
  CDR3 for alpha chain variable domain of TCR clone 362312 (TRAV1-1, TRAJ31)
CASYLNNNARLMF

SEQ ID NO: 724624 - protein, 14 aa, Homo sapiens
  CDR3 for beta chain variable domain of TCR clone 362312 (TRBV19, TRBJ2-1)
CASPTFVLSGEQFF

SEQ ID NO: 724625 - protein, 11 aa, Homo sapiens
  CDR3 for alpha chain variable domain of TCR clone 362313 (TRAV35, TRAJ30)
CAPGGDDKIIF

SEQ ID NO: 724626 - protein, 13 aa, Homo sapiens
  CDR3 for beta chain variable domain of TCR clone 362313 (TRBV7-6, TRBJ2-1)
CQQLGVGADEQFF

SEQ ID NO: 724627 - protein, 11 aa, Homo sapiens
  CDR3 for alpha chain variable domain of TCR clone 362314 (TRAV3, TRAJ21)
CGVGNVNKFYF

SEQ ID NO: 724628 - protein, 13 aa, Homo sapiens
  CDR3 for beta chain variable domain of TCR clone 362314 (TRBV12-5, TRBJ2-3)
CASGDRQSDTQYF

SEQ ID NO: 724629 - protein, 18 aa, Homo sapiens
  CDR3 for alpha chain variable domain of TCR clone 362315 (TRAV21, TRAJ53)
CAVKGGENSGGSNYKLTF

SEQ ID NO: 724630 - protein, 16 aa, Homo sapiens
  CDR3 for beta chain variable domain of TCR clone 362315 (TRBV27, TRBJ1-1)
CASSSRGRTGYTEAFF

SEQ ID NO: 724631 - protein, 13 aa, Homo sapiens
  CDR3 for alpha chain variable domain of TCR clone 362316 (TRAV8-1, TRAJ41)
CAVNPGSGNALNF

SEQ ID NO: 724632 - protein, 17 aa, Homo sapiens
  CDR3 for beta chain variable domain of TCR clone 362316 (TRBV24-1, TRBJ2-7)
CATRKGLAGGHSYEQYF

SEQ ID NO: 724633 - protein, 12 aa, Homo sapiens
  CDR3 for alpha chain variable domain of TCR clone 362317 (TRAV27, TRAJ13)
CAGAGGYQKVTF

SEQ ID NO: 724634 - protein, 14 aa, Homo sapiens
  CDR3 for beta chain variable domain of TCR clone 362317 (TRBV7-9, TRBJ1-6)
CASRPGTVNSPLHF

SEQ ID NO: 724635 - protein, 16 aa, Homo sapiens
  CDR3 for alpha chain variable domain of TCR clone 362318 (TRAV3, TRAJ4)
CAVRPSPSGGYNKLIF

SEQ ID NO: 724636 - protein, 12 aa, Homo sapiens
  CDR3 for beta chain variable domain of TCR clone 362318 (TRBV7-9, TRBJ2-7)
CASSQGFYEQYF

SEQ ID NO: 724637 - protein, 14 aa, Homo sapiens
  CDR3 for alpha chain variable domain of TCR clone 362319 (TRAV17, TRAJ57)
CATDPQGGSEKLIF

SEQ ID NO: 724638 - protein, 13 aa, Homo sapiens
  CDR3 for beta chain variable domain of TCR clone 362319 (TRBV19, TRBJ2-7)
CASSPRQSYEQYF

SEQ ID NO: 724639 - protein, 11 aa, Homo sapiens
  CDR3 for alpha chain variable domain of TCR clone 362320 (TRAV16, TRAJ31)
CAIFNNARLMF

SEQ ID NO: 724640 - protein, 15 aa, Homo sapiens
  CDR3 for beta chain variable domain of TCR clone 362320 (TRBV18, TRBJ1-1)
CASSPRQGENTEAFF

SEQ ID NO: 724641 - protein, 13 aa, Homo sapiens
  CDR3 for alpha chain variable domain of TCR clone 362321 (TRAV12-2, TRAJ10)
CAVPTGGGNKLTF

SEQ ID NO: 724642 - protein, 12 aa, Homo sapiens
  CDR3 for beta chain variable domain of TCR clone 362321 (TRBV19, TRBJ2-1)
CASSRQGAEQFF

SEQ ID NO: 724643 - protein, 10 aa, Homo sapiens
  CDR3 for alpha chain variable domain of TCR clone 362322 (TRAV13-1, TRAJ15)
INQAGTALLF

SEQ ID NO: 724644 - protein, 14 aa, Homo sapiens
  CDR3 for beta chain variable domain of TCR clone 362322 (TRBV7-9, TRBJ2-1)
CASSDNSGYNEQFF

SEQ ID NO: 724645 - protein, 11 aa, Homo sapiens
  CDR3 for alpha chain variable domain of TCR clone 362323 (TRAV17, TRAJ43)
CATPRSNDMRF

SEQ ID NO: 724646 - protein, 16 aa, Homo sapiens
  CDR3 for beta chain variable domain of TCR clone 362323 (TRBV11-2, TRBJ2-7)
CASSLAPTGVNYEQYF

SEQ ID NO: 724647 - protein, 12 aa, Homo sapiens
  CDR3 for alpha chain variable domain of TCR clone 362324 (TRAV17, TRAJ12)
CATLRSSYKLIF

SEQ ID NO: 724648 - protein, 16 aa, Homo sapiens
  CDR3 for beta chain variable domain of TCR clone 362324 (TRBV11-2, TRBJ2-1)
CASSFGGSFVYNEQFF

SEQ ID NO: 724649 - protein, 13 aa, Homo sapiens
  CDR3 for alpha chain variable domain of TCR clone 362325 (TRAV38-2/DV8, TRAJ34)
CAYRNSNIDKLIF

SEQ ID NO: 724650 - protein, 15 aa, Homo sapiens
  CDR3 for beta chain variable domain of TCR clone 362325 (TRBV20-1, TRBJ2-5)
CSAEGTGGLQETQYF

SEQ ID NO: 724651 - protein, 14 aa, Homo sapiens
  CDR3 for alpha chain variable domain of TCR clone 362326 (TRAV3, TRAJ34)
CAVRDINNTDKLIF

SEQ ID NO: 724652 - protein, 13 aa, Homo sapiens
  CDR3 for beta chain variable domain of TCR clone 362326 (TRBV7-2, TRBJ2-2)
CASSLTSAGELFF

SEQ ID NO: 724653 - protein, 12 aa, Homo sapiens
  CDR3 for alpha chain variable domain of TCR clone 362327 (TRAV8-3, TRAJ20)
CAVGGGGYKLSF

SEQ ID NO: 724654 - protein, 14 aa, Homo sapiens
  CDR3 for beta chain variable domain of TCR clone 362327 (TRBV5-1, TRBJ2-7)
CASSRGESLYEQYF

SEQ ID NO: 724655 - protein, 16 aa, Homo sapiens
  CDR3 for alpha chain variable domain of TCR clone 362328 (TRAV30, TRAJ24)
CGTEIVEADSWGKFQF

SEQ ID NO: 724656 - protein, 14 aa, Homo sapiens
  CDR3 for beta chain variable domain of TCR clone 362328 (TRBV5-5, TRBJ1-2)
CASSLDPYNYGYTF

SEQ ID NO: 724657 - protein, 13 aa, Homo sapiens
  CDR3 for alpha chain variable domain of TCR clone 362329 (TRAV12-3, TRAJ7)
CAMSASGNNRLAF

SEQ ID NO: 724658 - protein, 14 aa, Homo sapiens
  CDR3 for beta chain variable domain of TCR clone 362329 (TRBV7-3, TRBJ1-1)
CASSLKGGNTEAFF

SEQ ID NO: 724659 - protein, 14 aa, Homo sapiens
  CDR3 for alpha chain variable domain of TCR clone 362330 (TRAV17, TRAJ16)
CATADFSDGQKLPF

SEQ ID NO: 724660 - protein, 15 aa, Homo sapiens
  CDR3 for beta chain variable domain of TCR clone 362330 (TRBV18, TRBJ2-1)
CASSPPSASHNEQFF

SEQ ID NO: 724661 - protein, 19 aa, Homo sapiens
  CDR3 for alpha chain variable domain of TCR clone 362331 (TRAV38-1, TRAJ37)
CDVFLCFHTWLWQHRQLIF

SEQ ID NO: 724662 - protein, 16 aa, Homo sapiens
  CDR3 for beta chain variable domain of TCR clone 362331 (TRBV12-5, TRBJ2-5)
CASGPRTSGNQETQYF

SEQ ID NO: 724663 - protein, 13 aa, Homo sapiens
  CDR3 for alpha chain variable domain of TCR clone 362332 (TRAV13-1, TRAJ12)
RAASPDSSYKLIF

SEQ ID NO: 724664 - protein, 16 aa, Homo sapiens
  CDR3 for beta chain variable domain of TCR clone 362332 (TRBV15, TRBJ2-1)
CATSRERLAGAYEQFF

SEQ ID NO: 724665 - protein, 14 aa, Homo sapiens
  CDR3 for alpha chain variable domain of TCR clone 362333 (TRAV12-3, TRAJ57)
CAMSALGGSEKLVF

SEQ ID NO: 724666 - protein, 14 aa, Homo sapiens
  CDR3 for beta chain variable domain of TCR clone 362333 (TRBV7-2, TRBJ2-7)
CASSPKTSFYEQYF

SEQ ID NO: 724667 - protein, 16 aa, Homo sapiens
  CDR3 for alpha chain variable domain of TCR clone 362334 (TRAV26-1, TRAJ38)
CIVRAYSAGNNRKLIW

SEQ ID NO: 724668 - protein, 13 aa, Homo sapiens
  CDR3 for beta chain variable domain of TCR clone 362334 (TRBV4-2, TRBJ2-7)
CASSRDPHDEQYF

SEQ ID NO: 724669 - protein, 12 aa, Homo sapiens
  CDR3 for alpha chain variable domain of TCR clone 362335 (TRAV12-3, TRAJ20)
CALVRGDYKLSF

SEQ ID NO: 724670 - protein, 13 aa, Homo sapiens
  CDR3 for beta chain variable domain of TCR clone 362335 (TRBV23-1, TRBJ1-4)
CASRGKFNEKLFF

SEQ ID NO: 724671 - protein, 10 aa, Homo sapiens
  CDR3 for alpha chain variable domain of TCR clone 362336 (TRAV1-2, TRAJ18)
CAVRGEAQPW

SEQ ID NO: 724672 - protein, 13 aa, Homo sapiens
  CDR3 for beta chain variable domain of TCR clone 362336 (TRBV2, TRBJ2-5)
CASSGQGEQTQYF

SEQ ID NO: 724673 - protein, 14 aa, Homo sapiens
  CDR3 for alpha chain variable domain of TCR clone 362337 (TRAV1-2, TRAJ15)
CAVRDRQAGTALIL

SEQ ID NO: 724674 - protein, 16 aa, Homo sapiens
  CDR3 for beta chain variable domain of TCR clone 362337 (TRBV5-4, TRBJ2-3)
CASQQPGAGGADTQYF

SEQ ID NO: 724675 - protein, 14 aa, Homo sapiens
  CDR3 for alpha chain variable domain of TCR clone 362338 (TRAV12-2, TRAJ17)
CAVNIKAAGNKLTF

SEQ ID NO: 724676 - protein, 16 aa, Homo sapiens
  CDR3 for beta chain variable domain of TCR clone 362338 (TRBV19, TRBJ2-2)
CASRSPGTGATGELFF

SEQ ID NO: 724677 - protein, 15 aa, Homo sapiens
  CDR3 for alpha chain variable domain of TCR clone 362339 (TRAV8-4, TRAJ11)
CGVSRALSGYSTLTF

SEQ ID NO: 724678 - protein, 13 aa, Homo sapiens
  CDR3 for beta chain variable domain of TCR clone 362339 (TRBV10-3, TRBJ2-7)
CASKLAVNYEQYF

SEQ ID NO: 724679 - protein, 15 aa, Homo sapiens
  CDR3 for alpha chain variable domain of TCR clone 362340 (TRAV3, TRAJ9)
CAVRARNTGGFKTIF

SEQ ID NO: 724680 - protein, 18 aa, Homo sapiens
  CDR3 for beta chain variable domain of TCR clone 362340 (TRBV7-9, TRBJ2-7)
CASSLTTSGSRTWYEQYF

SEQ ID NO: 724681 - protein, 18 aa, Homo sapiens
  CDR3 for alpha chain variable domain of TCR clone 362341 (TRAV26-2, TRAJ45)
CILRVDRYSGGGADGLTF

SEQ ID NO: 724682 - protein, 17 aa, Homo sapiens
  CDR3 for beta chain variable domain of TCR clone 362341 (TRBV25-1, TRBJ2-1)
CASSAYGQGRGVYEQFF

SEQ ID NO: 724683 - protein, 13 aa, Homo sapiens
  CDR3 for alpha chain variable domain of TCR clone 362342 (TRAV1-2, TRAJ9)
CAVLNTGGFKTIF

SEQ ID NO: 724684 - protein, 20 aa, Homo sapiens
  CDR3 for beta chain variable domain of TCR clone 362342 (TRBV7-8, TRBJ2-2)
CASSHLFPGPTIHITGELFF

SEQ ID NO: 724685 - protein, 11 aa, Homo sapiens
  CDR3 for alpha chain variable domain of TCR clone 362343 (TRAV12-1, TRAJ21)
CVVYNFNKSYF

SEQ ID NO: 724686 - protein, 16 aa, Homo sapiens
  CDR3 for beta chain variable domain of TCR clone 362343 (TRBV6-5, TRBJ2-7)
CASSYFRVGISDEQYF

SEQ ID NO: 724687 - protein, 11 aa, Homo sapiens
  CDR3 for alpha chain variable domain of TCR clone 362344 (TRAV21, TRAJ11)
CAVNGYSTLTF

SEQ ID NO: 724688 - protein, 11 aa, Homo sapiens
  CDR3 for beta chain variable domain of TCR clone 362344 (TRBV19, TRBJ1-1)
CASSIGSQPFF

SEQ ID NO: 724689 - protein, 14 aa, Homo sapiens
  CDR3 for alpha chain variable domain of TCR clone 362345 (TRAV2, TRAJ9)
CAVEDRSGGFKTIF

SEQ ID NO: 724690 - protein, 13 aa, Homo sapiens
  CDR3 for beta chain variable domain of TCR clone 362345 (TRBV5-7, TRBJ2-1)
CASSLVESVEQFF

SEQ ID NO: 724691 - protein, 12 aa, Homo sapiens
  CDR3 for alpha chain variable domain of TCR clone 362346 (TRAV2, TRAJ9)
CAVGAGGFKTIF

SEQ ID NO: 724692 - protein, 14 aa, Homo sapiens
  CDR3 for beta chain variable domain of TCR clone 362346 (TRBV7-6, TRBJ2-1)
CASSLGGGADEQFF

SEQ ID NO: 724693 - protein, 14 aa, Homo sapiens
  CDR3 for alpha chain variable domain of TCR clone 362347 (TRAV1-2, TRAJ8)
CAVRGDTGCQKLVF

SEQ ID NO: 724694 - protein, 15 aa, Homo sapiens
  CDR3 for beta chain variable domain of TCR clone 362347 (TRBV6-3, TRBJ2-7)
CASSSPGTVFYEQYF

SEQ ID NO: 724695 - protein, 12 aa, Homo sapiens
  CDR3 for alpha chain variable domain of TCR clone 362348 (TRAV12-1, TRAJ40)
CVVYSGTYKYIF

SEQ ID NO: 724696 - protein, 14 aa, Homo sapiens
  CDR3 for beta chain variable domain of TCR clone 362348 (TRBV7-9, TRBJ2-5)
CASGLDTAQGTQYF

SEQ ID NO: 724697 - protein, 14 aa, Homo sapiens
  CDR3 for alpha chain variable domain of TCR clone 362349 (TRAV20, TRAJ29)
CAVQAWVGNTPLVL

SEQ ID NO: 724698 - protein, 14 aa, Homo sapiens
  CDR3 for beta chain variable domain of TCR clone 362349 (TRBV11-2, TRBJ2-3)
CASSRLARTDTQYF

SEQ ID NO: 724699 - protein, 13 aa, Homo sapiens
  CDR3 for alpha chain variable domain of TCR clone 362350 (TRAV21, TRAJ20)
CAVGLRVDYKPSF

SEQ ID NO: 724700 - protein, 15 aa, Homo sapiens
  CDR3 for beta chain variable domain of TCR clone 362350 (TRBV7-8, TRBJ2-1)
CASSLADSLYNEQFF

SEQ ID NO: 724701 - protein, 12 aa, Homo sapiens
  CDR3 for alpha chain variable domain of TCR clone 362351 (TRAV12-3, TRAJ17)
CAMTLTANKLTF

SEQ ID NO: 724702 - protein, 11 aa, Homo sapiens
  CDR3 for beta chain variable domain of TCR clone 362351 (TRBV11-2, TRBJ1-1)
CASSINTEAFF

SEQ ID NO: 724703 - protein, 15 aa, Homo sapiens
  CDR3 for alpha chain variable domain of TCR clone 362352 (TRAV4, TRAJ10)
CLVGDGSGGGNKRTF

SEQ ID NO: 724704 - protein, 11 aa, Homo sapiens
  CDR3 for beta chain variable domain of TCR clone 362352 (TRBV5-1, TRBJ2-2)
CASSPSRCEHR

SEQ ID NO: 724705 - protein, 17 aa, Homo sapiens
  CDR3 for alpha chain variable domain of TCR clone 362353 (TRAV3, TRAJ42)
CAVRDRDYGGSQGNIIF

SEQ ID NO: 724706 - protein, 13 aa, Homo sapiens
  CDR3 for beta chain variable domain of TCR clone 362353 (TRBV10-3, TRBJ2-7)
CASKLAVNYEQYF

SEQ ID NO: 724707 - protein, 15 aa, Homo sapiens
  CDR3 for alpha chain variable domain of TCR clone 362354 (TRAV4, TRAJ10)
CLVGDEGGGGNKLTF

SEQ ID NO: 724708 - protein, 17 aa, Homo sapiens
  CDR3 for beta chain variable domain of TCR clone 362354 (TRBV19, TRBJ2-6)
CASSTGQVFSGANVLTF

SEQ ID NO: 724709 - protein, 13 aa, Homo sapiens
  CDR3 for alpha chain variable domain of TCR clone 362355 (TRAV13-1, TRAJ21)
CAASIYNFNKFYF

SEQ ID NO: 724710 - protein, 15 aa, Homo sapiens
  CDR3 for beta chain variable domain of TCR clone 362355 (TRBV28, TRBJ2-1)
CASSLDTSSYNEQFF

SEQ ID NO: 724711 - protein, 13 aa, Homo sapiens
  CDR3 for alpha chain variable domain of TCR clone 362356 (TRAV1-2, TRAJ8)
CAVGSTGFQKLVF

SEQ ID NO: 724712 - protein, 17 aa, Homo sapiens
  CDR3 for beta chain variable domain of TCR clone 362356 (TRBV29-1, TRBJ2-3)
CSVNAFRASGGVDTQYF

SEQ ID NO: 724713 - protein, 15 aa, Homo sapiens
  CDR3 for alpha chain variable domain of TCR clone 362357 (TRAV12-3, TRAJ54)
CAMSPPFQGAQKLVF

SEQ ID NO: 724714 - protein, 15 aa, Homo sapiens
  CDR3 for beta chain variable domain of TCR clone 362357 (TRBV28, TRBJ2-1)
CASSGLAEVDNEQFF

SEQ ID NO: 724715 - protein, 11 aa, Homo sapiens
  CDR3 for alpha chain variable domain of TCR clone 362358 (TRAV2, TRAJ40)
CAVEGTYKYIF

SEQ ID NO: 724716 - protein, 13 aa, Homo sapiens
  CDR3 for beta chain variable domain of TCR clone 362358 (TRBV7-9, TRBJ1-2)
CASSLKQNYGYTF

SEQ ID NO: 724717 - protein, 17 aa, Homo sapiens
  CDR3 for alpha chain variable domain of TCR clone 362359 (TRAV17, TRAJ28)
CATDPRRGGAGSYQLTF

SEQ ID NO: 724718 - protein, 16 aa, Homo sapiens
  CDR3 for beta chain variable domain of TCR clone 362359 (TRBV25-1, TRBJ1-1)
CASSWDRDRGRIEAFF

SEQ ID NO: 724719 - protein, 15 aa, Homo sapiens
  CDR3 for alpha chain variable domain of TCR clone 362360 (TRAV23/DV6, TRAJ4)
CAASPLRGGYNKLIF

SEQ ID NO: 724720 - protein, 14 aa, Homo sapiens
  CDR3 for beta chain variable domain of TCR clone 362360 (TRBV19, TRBJ2-7)
CASTVQGRPYEQYF

SEQ ID NO: 724721 - protein, 14 aa, Homo sapiens
  CDR3 for alpha chain variable domain of TCR clone 362361 (TRAV12-2, TRAJ13)
CAVKKTGGYQKVTF

SEQ ID NO: 724722 - protein, 14 aa, Homo sapiens
  CDR3 for beta chain variable domain of TCR clone 362361 (TRBV29-1, TRBJ2-7)
CSAGGGQGAYEQYF

SEQ ID NO: 724723 - protein, 13 aa, Homo sapiens
  CDR3 for alpha chain variable domain of TCR clone 362362 (TRAV12-3, TRAJ5)
CAMIYTGRRALTF

SEQ ID NO: 724724 - protein, 16 aa, Homo sapiens
  CDR3 for beta chain variable domain of TCR clone 362362 (TRBV7-7, TRBJ2-1)
CASSLASGTSYNEQFF

SEQ ID NO: 724725 - protein, 17 aa, Homo sapiens
  CDR3 for alpha chain variable domain of TCR clone 362363 (TRAV26-1, TRAJ47)
CIVPSLLYMEYGSKLVF

SEQ ID NO: 724726 - protein, 14 aa, Homo sapiens
  CDR3 for beta chain variable domain of TCR clone 362363 (TRBV7-3, TRBJ1-5)
RASSFSGCNQPQHF

SEQ ID NO: 724727 - protein, 14 aa, Homo sapiens
  CDR3 for alpha chain variable domain of TCR clone 362364 (TRAV12-3, TRAJ10)
SHLPLTGGGNKLTF

SEQ ID NO: 724728 - protein, 16 aa, Homo sapiens
  CDR3 for beta chain variable domain of TCR clone 362364 (TRBV5-1, TRBJ2-7)
CASSWGTGGRAWEQYF

SEQ ID NO: 724729 - protein, 16 aa, Homo sapiens
  CDR3 for alpha chain variable domain of TCR clone 362365 (TRAV12-3, TRAJ28)
CAMRANSGAGSYQLTF

SEQ ID NO: 724730 - protein, 15 aa, Homo sapiens
  CDR3 for beta chain variable domain of TCR clone 362365 (TRBV6-3, TRBJ2-7)
CASSAPGTVFYEQYF

SEQ ID NO: 724731 - protein, 14 aa, Homo sapiens
  CDR3 for alpha chain variable domain of TCR clone 362366 (TRAV8-6, TRAJ5)
CAVSVDTGRRALTF

SEQ ID NO: 724732 - protein, 15 aa, Homo sapiens
  CDR3 for beta chain variable domain of TCR clone 362366 (TRBV11-2, TRBJ2-1)
CASSLGTSGLNEQFF

SEQ ID NO: 724733 - protein, 14 aa, Homo sapiens
  CDR3 for alpha chain variable domain of TCR clone 362367 (TRAV12-2, TRAJ6)
CASQWGGGSYIPTF

SEQ ID NO: 724734 - protein, 13 aa, Homo sapiens
  CDR3 for beta chain variable domain of TCR clone 362367 (TRBV2, TRBJ1-1)
CASSEGVNTEAFF

SEQ ID NO: 724735 - protein, 14 aa, Homo sapiens
  CDR3 for alpha chain variable domain of TCR clone 362368 (TRAV17, TRAJ34)
CATDSLEGTDKLIF

SEQ ID NO: 724736 - protein, 13 aa, Homo sapiens
  CDR3 for beta chain variable domain of TCR clone 362368 (TRBV11-2, TRBJ2-7)
CASSGTRPCEQYF

SEQ ID NO: 724737 - protein, 16 aa, Homo sapiens
  CDR3 for alpha chain variable domain of TCR clone 362369 (TRAV12-2, TRAJ50)
CAVGTATKTSYDKVIF

SEQ ID NO: 724738 - protein, 12 aa, Homo sapiens
  CDR3 for beta chain variable domain of TCR clone 362369 (TRBV12-4, TRBJ1-5)
CASRLGRQPQHF

SEQ ID NO: 724739 - protein, 14 aa, Homo sapiens
  CDR3 for alpha chain variable domain of TCR clone 362370 (TRAV16, TRAJ26)
CALSSANYGQNFVF

SEQ ID NO: 724740 - protein, 16 aa, Homo sapiens
  CDR3 for beta chain variable domain of TCR clone 362370 (TRBV20-1, TRBJ1-4)
CSAPGQGLLTNEKLCF

SEQ ID NO: 724741 - protein, 15 aa, Homo sapiens
  CDR3 for alpha chain variable domain of TCR clone 362371 (TRAV8-3, TRAJ11)
CAVGLLNSGYSTLTF

SEQ ID NO: 724742 - protein, 18 aa, Homo sapiens
  CDR3 for beta chain variable domain of TCR clone 362371 (TRBV25-1, TRBJ1-2)
CASSGIQNGQGLIFGYTF

SEQ ID NO: 724743 - protein, 14 aa, Homo sapiens
  CDR3 for alpha chain variable domain of TCR clone 362372 (TRAV1-2, TRAJ16)
CAVNRFPDGQKLLF

SEQ ID NO: 724744 - protein, 14 aa, Homo sapiens
  CDR3 for beta chain variable domain of TCR clone 362372 (TRBV20-1, TRBJ1-1)
CSAQTRIGGTEAFF

SEQ ID NO: 724745 - protein, 14 aa, Homo sapiens
  CDR3 for alpha chain variable domain of TCR clone 362373 (TRAV1-2, TRAJ16)
CAVNRFPDGQKLLF

SEQ ID NO: 724746 - protein, 16 aa, Homo sapiens
  CDR3 for beta chain variable domain of TCR clone 362373 (TRBV19, TRBJ2-1)
CASSKAGPSSYNEQYF

SEQ ID NO: 724747 - protein, 17 aa, Homo sapiens
  CDR3 for alpha chain variable domain of TCR clone 362374 (TRAV4, TRAJ18)
CLVGERFVGPTLGRLYF

SEQ ID NO: 724748 - protein, 14 aa, Homo sapiens
  CDR3 for beta chain variable domain of TCR clone 362374 (TRBV6-5, TRBJ1-2)
CASSYDGTGGGYTF

SEQ ID NO: 724749 - protein, 14 aa, Homo sapiens
  CDR3 for alpha chain variable domain of TCR clone 362375 (TRAV1-2, TRAJ8)
CAVRADTGFQKLVF

SEQ ID NO: 724750 - protein, 15 aa, Homo sapiens
  CDR3 for beta chain variable domain of TCR clone 362375 (TRBV5-5, TRBJ1-5)
CASSSTPGSNQPQHF

SEQ ID NO: 724751 - protein, 17 aa, Homo sapiens
  CDR3 for alpha chain variable domain of TCR clone 362376 (TRAV2, TRAJ22)
ILQVREADAAGQRQLSF

SEQ ID NO: 724752 - protein, 16 aa, Homo sapiens
  CDR3 for beta chain variable domain of TCR clone 362376 (TRBV2, TRBJ2-5)
CASSETQGVGEETQYF

SEQ ID NO: 724753 - protein, 14 aa, Homo sapiens
  CDR3 for alpha chain variable domain of TCR clone 362377 (TRAV13-1, TRAJ44)
CAAKATGTASKLTF

SEQ ID NO: 724754 - protein, 14 aa, Homo sapiens
  CDR3 for beta chain variable domain of TCR clone 362377 (TRBV19, TRBJ2-2)
CASSTLHSSGELFF

SEQ ID NO: 724755 - protein, 12 aa, Homo sapiens
  CDR3 for alpha chain variable domain of TCR clone 362378 (TRAV21, TRAJ31)
CAVWGNTARLMF

SEQ ID NO: 724756 - protein, 14 aa, Homo sapiens
  CDR3 for beta chain variable domain of TCR clone 362378 (TRBV6-1, TRBJ1-3)
CASVQGGGGNTIYF

SEQ ID NO: 724757 - protein, 15 aa, Homo sapiens
  CDR3 for alpha chain variable domain of TCR clone 362379 (TRAV13-1, TRAJ45)
CAASGSGGGADGLTF

SEQ ID NO: 724758 - protein, 12 aa, Homo sapiens
  CDR3 for beta chain variable domain of TCR clone 362379 (TRBV19, TRBJ1-5)
CASSIAQQPQHF

SEQ ID NO: 724759 - protein, 15 aa, Homo sapiens
  CDR3 for alpha chain variable domain of TCR clone 362380 (TRAV21, TRAJ53)
CATLNSGGSNYKLTF

SEQ ID NO: 724760 - protein, 11 aa, Homo sapiens
  CDR3 for beta chain variable domain of TCR clone 362380 (TRBV23-1, TRBJ2-7)
SSSGTGLEQYF

SEQ ID NO: 724761 - protein, 13 aa, Homo sapiens
  CDR3 for alpha chain variable domain of TCR clone 362381 (TRAV17, TRAJ9)
CATDYTGGIKAIF

SEQ ID NO: 724762 - protein, 14 aa, Homo sapiens
  CDR3 for beta chain variable domain of TCR clone 362381 (TRBV19, TRBJ2-5)
CASSMTGQQETQYF

SEQ ID NO: 724763 - protein, 14 aa, Homo sapiens
  CDR3 for alpha chain variable domain of TCR clone 362382 (TRAV12-3, TRAJ22)
CAMSLFGSARQLTF

SEQ ID NO: 724764 - protein, 17 aa, Homo sapiens
  CDR3 for beta chain variable domain of TCR clone 362382 (TRBV6-1, TRBJ2-3)
CASSEALRLISTDTQYF

SEQ ID NO: 724765 - protein, 16 aa, Homo sapiens
  CDR3 for alpha chain variable domain of TCR clone 362383 (TRAV16, TRAJ52)
CALSAAGGTSYGKLTF

SEQ ID NO: 724766 - protein, 19 aa, Homo sapiens
  CDR3 for beta chain variable domain of TCR clone 362383 (TRBV19, TRBJ2-5)
CASSIEQVTDFFLGETQYF

SEQ ID NO: 724767 - protein, 13 aa, Homo sapiens
  CDR3 for alpha chain variable domain of TCR clone 362384 (TRAV8-6, TRAJ34)
CAVSVQGTDKLIF

SEQ ID NO: 724768 - protein, 14 aa, Homo sapiens
  CDR3 for beta chain variable domain of TCR clone 362384 (TRBV12-4, TRBJ1-1)
CASTWTGHDTEAFF

SEQ ID NO: 724769 - protein, 10 aa, Homo sapiens
  CDR3 for alpha chain variable domain of TCR clone 362385 (TRAV1-2, TRAJ18)
CAVRGEAQPW

SEQ ID NO: 724770 - protein, 15 aa, Homo sapiens
  CDR3 for beta chain variable domain of TCR clone 362385 (TRBV20-1, TRBJ2-1)
CSAEGGMLAGDEQFF

SEQ ID NO: 724771 - protein, 13 aa, Homo sapiens
  CDR3 for alpha chain variable domain of TCR clone 362386 (TRAV22, TRAJ29)
CAVGGSGNTPLVF

SEQ ID NO: 724772 - protein, 13 aa, Homo sapiens
  CDR3 for beta chain variable domain of TCR clone 362386 (TRBV6-6, TRBJ2-7)
CASSPKHLAEQYF

SEQ ID NO: 724773 - protein, 17 aa, Homo sapiens
  CDR3 for alpha chain variable domain of TCR clone 362387 (TRAV3, TRAJ6)
CAVRDGPRAGGSYIPKF

SEQ ID NO: 724774 - protein, 15 aa, Homo sapiens
  CDR3 for beta chain variable domain of TCR clone 362387 (TRBV27, TRBJ2-1)
CASSNGGGSSNEQFF

SEQ ID NO: 724775 - protein, 13 aa, Homo sapiens
  CDR3 for alpha chain variable domain of TCR clone 362388 (TRAV12-2, TRAJ6)
CAVDVSRKLHTYI

SEQ ID NO: 724776 - protein, 12 aa, Homo sapiens
  CDR3 for beta chain variable domain of TCR clone 362388 (TRBV11-2, TRBJ2-2)
CASSLPTGELFF

SEQ ID NO: 724777 - protein, 11 aa, Homo sapiens
  CDR3 for alpha chain variable domain of TCR clone 362389 (TRAV13-2, TRAJ23)
CAESPRGKLIF

SEQ ID NO: 724778 - protein, 17 aa, Homo sapiens
  CDR3 for beta chain variable domain of TCR clone 362389 (TRBV13, TRBJ2-3)
CASSLSRVAGGRNTQYF

SEQ ID NO: 724779 - protein, 13 aa, Homo sapiens
  CDR3 for alpha chain variable domain of TCR clone 362390 (TRAV2, TRAJ15)
CAVASQAGTALIF

SEQ ID NO: 724780 - protein, 15 aa, Homo sapiens
  CDR3 for beta chain variable domain of TCR clone 362390 (TRBV15, TRBJ2-3)
CATSRDPRGTDTQYF

SEQ ID NO: 724781 - protein, 12 aa, Homo sapiens
  CDR3 for alpha chain variable domain of TCR clone 362391 (TRAV21, TRAJ6)
CAVKGGSYIPPF

SEQ ID NO: 724782 - protein, 13 aa, Homo sapiens
  CDR3 for beta chain variable domain of TCR clone 362391 (TRBV11-2, TRBJ1-1)
CASSFTENTEAFF

SEQ ID NO: 724783 - protein, 11 aa, Homo sapiens
  CDR3 for alpha chain variable domain of TCR clone 362392 (TRAV2, TRAJ33)
CAVDSNYQLIW

SEQ ID NO: 724784 - protein, 16 aa, Homo sapiens
  CDR3 for beta chain variable domain of TCR clone 362392 (TRBV12-4, TRBJ2-3)
CASSFIGGSGTDTQYF

SEQ ID NO: 724785 - protein, 14 aa, Homo sapiens
  CDR3 for alpha chain variable domain of TCR clone 362393 (TRAV8-4, TRAJ35)
CAVSEPGFGNVLHC

SEQ ID NO: 724786 - protein, 13 aa, Homo sapiens
  CDR3 for beta chain variable domain of TCR clone 362393 (TRBV7-7, TRBJ2-2)
CASSLTSAGELFF

SEQ ID NO: 724787 - protein, 13 aa, Homo sapiens
  CDR3 for alpha chain variable domain of TCR clone 362394 (TRAV13-1, TRAJ11)
CAAVLAGYSTLTF

SEQ ID NO: 724788 - protein, 16 aa, Homo sapiens
  CDR3 for beta chain variable domain of TCR clone 362394 (TRBV5-1, TRBJ2-1)
CASSLTLAGGRNEQFF

SEQ ID NO: 724789 - protein, 13 aa, Homo sapiens
  CDR3 for alpha chain variable domain of TCR clone 362395 (TRAV13-1, TRAJ6)
CAASKGGSYIPKF

SEQ ID NO: 724790 - protein, 13 aa, Homo sapiens
  CDR3 for beta chain variable domain of TCR clone 362395 (TRBV7-9, TRBJ2-5)
CASLPSGRETQYF

SEQ ID NO: 724791 - protein, 13 aa, Homo sapiens
  CDR3 for alpha chain variable domain of TCR clone 362396 (TRAV12-1, TRAJ6)
CVVFPGGSYIPTF

SEQ ID NO: 724792 - protein, 12 aa, Homo sapiens
  CDR3 for beta chain variable domain of TCR clone 362396 (TRBV7-2, TRBJ2-1)
CASSLRQNEQFF

SEQ ID NO: 724793 - protein, 12 aa, Homo sapiens
  CDR3 for alpha chain variable domain of TCR clone 362397 (TRAV27, TRAJ9)
CAGESGGFKTIF

SEQ ID NO: 724794 - protein, 16 aa, Homo sapiens
  CDR3 for beta chain variable domain of TCR clone 362397 (TRBV4-3, TRBJ2-1)
CASSPALDRGVNEQFF

SEQ ID NO: 724795 - protein, 15 aa, Homo sapiens
  CDR3 for alpha chain variable domain of TCR clone 362398 (TRAV21, TRAJ53)
CATLNSGGSNYKLTF

SEQ ID NO: 724796 - protein, 15 aa, Homo sapiens
  CDR3 for beta chain variable domain of TCR clone 362398 (TRBV18, TRBJ2-1)
CSSSPPSASYNEQFF

SEQ ID NO: 724797 - protein, 14 aa, Homo sapiens
  CDR3 for alpha chain variable domain of TCR clone 362399 (TRAV26-1, TRAJ38)
CIADNAGNNRKLIW

SEQ ID NO: 724798 - protein, 15 aa, Homo sapiens
  CDR3 for beta chain variable domain of TCR clone 362399 (TRBV7-9, TRBJ1-5)
CASSQGHQPTQPQHF

SEQ ID NO: 724799 - protein, 16 aa, Homo sapiens
  CDR3 for alpha chain variable domain of TCR clone 362400 (TRAV3, TRAJ21)
CAVRDIERGNFNKFCF

SEQ ID NO: 724800 - protein, 17 aa, Homo sapiens
  CDR3 for beta chain variable domain of TCR clone 362400 (TRBV4-2, TRBJ2-7)
CGSSQERARGVPYEQYF

SEQ ID NO: 724801 - protein, 15 aa, Homo sapiens
  CDR3 for alpha chain variable domain of TCR clone 362401 (TRAV27, TRAJ45)
CAPVDSGGGADGLTF

SEQ ID NO: 724802 - protein, 15 aa, Homo sapiens
  CDR3 for beta chain variable domain of TCR clone 362401 (TRBV19, TRBJ2-1)
CASSINREPSHEQFF

SEQ ID NO: 724803 - protein, 14 aa, Homo sapiens
  CDR3 for alpha chain variable domain of TCR clone 362402 (TRAV14/DV4, TRAJ34)
CAMREGRPHRQAHL

SEQ ID NO: 724804 - protein, 14 aa, Homo sapiens
  CDR3 for beta chain variable domain of TCR clone 362402 (TRBV19, TRBJ2-1)
CASPTFVLSGEQLF

SEQ ID NO: 724805 - protein, 15 aa, Homo sapiens
  CDR3 for alpha chain variable domain of TCR clone 362403 (TRAV23/DV6, TRAJ18)
CAARYRGPTLGWLYF

SEQ ID NO: 724806 - protein, 13 aa, Homo sapiens
  CDR3 for beta chain variable domain of TCR clone 362403 (TRBV7-2, TRBJ2-7)
CASSSPSGSEQYF

SEQ ID NO: 724807 - protein, 11 aa, Homo sapiens
  CDR3 for alpha chain variable domain of TCR clone 362404 (TRAV17, TRAJ36)
CAPTGANNVFF

SEQ ID NO: 724808 - protein, 14 aa, Homo sapiens
  CDR3 for beta chain variable domain of TCR clone 362404 (TRBV5-1, TRBJ2-1)
CASSLVTEYNEQFF

SEQ ID NO: 724809 - protein, 12 aa, Homo sapiens
  CDR3 for alpha chain variable domain of TCR clone 362405 (TRAV20, TRAJ20)
CAARFNGYKLSF

SEQ ID NO: 724810 - protein, 14 aa, Homo sapiens
  CDR3 for beta chain variable domain of TCR clone 362405 (TRBV20-1, TRBJ2-1)
CSAQIGGSANEQFF

SEQ ID NO: 724811 - protein, 15 aa, Homo sapiens
  CDR3 for alpha chain variable domain of TCR clone 362406 (TRAV3, TRAJ4)
CAVRDGSGGYNKLIF

SEQ ID NO: 724812 - protein, 14 aa, Homo sapiens
  CDR3 for beta chain variable domain of TCR clone 362406 (TRBV19, TRBJ2-7)
CASTVQGRPYEQYF

SEQ ID NO: 724813 - protein, 16 aa, Homo sapiens
  CDR3 for alpha chain variable domain of TCR clone 362407 (TRAV3, TRAJ37)
CAVRPHGSGNTGKLIL

SEQ ID NO: 724814 - protein, 13 aa, Homo sapiens
  CDR3 for beta chain variable domain of TCR clone 362407 (TRBV11-2, TRBJ1-6)
CASSLAGVSPLHF

SEQ ID NO: 724815 - protein, 15 aa, Homo sapiens
  CDR3 for alpha chain variable domain of TCR clone 362408 (TRAV25, TRAJ52)
CAGTSGGTSYGKLTF

SEQ ID NO: 724816 - protein, 13 aa, Homo sapiens
  CDR3 for beta chain variable domain of TCR clone 362408 (TRBV14, TRBJ1-1)
CASSREFGTEAFF

SEQ ID NO: 724817 - protein, 12 aa, Homo sapiens
  CDR3 for alpha chain variable domain of TCR clone 362409 (TRAV22, TRAJ36)
CAVGTGANNLFF

SEQ ID NO: 724818 - protein, 14 aa, Homo sapiens
  CDR3 for beta chain variable domain of TCR clone 362409 (TRBV18, TRBJ2-5)
CASSPRASSETQYF

SEQ ID NO: 724819 - protein, 15 aa, Homo sapiens
  CDR3 for alpha chain variable domain of TCR clone 362410 (TRAV3, TRAJ13)
CAVRVYSGGHQKVTF

SEQ ID NO: 724820 - protein, 15 aa, Homo sapiens
  CDR3 for beta chain variable domain of TCR clone 362410 (TRBV5-7, TRBJ1-2)
CASSLGVAANYGYTF

SEQ ID NO: 724821 - protein, 15 aa, Homo sapiens
  CDR3 for alpha chain variable domain of TCR clone 362411 (TRAV27, TRAJ38)
CAARRNAGNNRKPSW

SEQ ID NO: 724822 - protein, 13 aa, Homo sapiens
  CDR3 for beta chain variable domain of TCR clone 362411 (TRBV12-5, TRBJ2-3)
CASGDRQSDTQYF

SEQ ID NO: 724823 - protein, 14 aa, Homo sapiens
  CDR3 for alpha chain variable domain of TCR clone 362412 (TRAV1-2, TRAJ16)
CAVNRFSDGQKLLF

SEQ ID NO: 724824 - protein, 15 aa, Homo sapiens
  CDR3 for beta chain variable domain of TCR clone 362412 (TRBV4-2, TRBJ1-1)
CASSQQGAGDTEAVF

SEQ ID NO: 724825 - protein, 13 aa, Homo sapiens
  CDR3 for alpha chain variable domain of TCR clone 362413 (TRAV12-3, TRAJ13)
CAMGTGGYQEVTF

SEQ ID NO: 724826 - protein, 14 aa, Homo sapiens
  CDR3 for beta chain variable domain of TCR clone 362413 (TRBV7-2, TRBJ2-5)
CASSTGGELKTQYF

SEQ ID NO: 724827 - protein, 18 aa, Homo sapiens
  CDR3 for alpha chain variable domain of TCR clone 362414 (TRAV29/DV5, TRAJ52)
CAAGFRGAGGTSYGKLTF

SEQ ID NO: 724828 - protein, 13 aa, Homo sapiens
  CDR3 for beta chain variable domain of TCR clone 362414 (TRBV28, TRBJ2-7)
CASTPGLAGEQYF

SEQ ID NO: 724829 - protein, 16 aa, Homo sapiens
  CDR3 for alpha chain variable domain of TCR clone 362415 (TRAV20, TRAJ10)
CAVLRGLTGGGNKLTF

SEQ ID NO: 724830 - protein, 13 aa, Homo sapiens
  CDR3 for beta chain variable domain of TCR clone 362415 (TRBV19, TRBJ1-2)
CAWSVPGQDGYTF

SEQ ID NO: 724831 - protein, 15 aa, Homo sapiens
  CDR3 for alpha chain variable domain of TCR clone 362416 (TRAV17, TRAJ57)
CATGPSQGGSEKRVF

SEQ ID NO: 724832 - protein, 15 aa, Homo sapiens
  CDR3 for beta chain variable domain of TCR clone 362416 (TRBV7-9, TRBJ1-6)
CASSSPGRGNSPLHF

SEQ ID NO: 724833 - protein, 13 aa, Homo sapiens
  CDR3 for alpha chain variable domain of TCR clone 362417 (TRAV12-3, TRAJ46)
CAVKKSSGDKLTF

SEQ ID NO: 724834 - protein, 13 aa, Homo sapiens
  CDR3 for beta chain variable domain of TCR clone 362417 (TRBV6-1, TRBJ2-1)
CASTHDRNNEQFF

SEQ ID NO: 724835 - protein, 16 aa, Homo sapiens
  CDR3 for alpha chain variable domain of TCR clone 362418 (TRAV12-2, TRAJ58)
CAVRGDRGTSGSRLTF

SEQ ID NO: 724836 - protein, 12 aa, Homo sapiens
  CDR3 for beta chain variable domain of TCR clone 362418 (TRBV19, TRBJ2-3)
CASAGGADTQYF

SEQ ID NO: 724837 - protein, 11 aa, Homo sapiens
  CDR3 for alpha chain variable domain of TCR clone 362419 (TRAV13-1, TRAJ43)
YAAHNNNDMRF

SEQ ID NO: 724838 - protein, 15 aa, Homo sapiens
  CDR3 for beta chain variable domain of TCR clone 362419 (TRBV6-1, TRBJ2-2)
CASSRLRGDTGELFF

SEQ ID NO: 724839 - protein, 13 aa, Homo sapiens
  CDR3 for alpha chain variable domain of TCR clone 362420 (TRAV22, TRAJ26)
CAVEHNYGQNFVF

SEQ ID NO: 724840 - protein, 15 aa, Homo sapiens
  CDR3 for beta chain variable domain of TCR clone 362420 (TRBV7-2, TRBJ2-6)
CQQGATGLWANVLTF

SEQ ID NO: 724841 - protein, 12 aa, Homo sapiens
  CDR3 for alpha chain variable domain of TCR clone 362421 (TRAV1-1, TRAJ39)
CAVPVVGNMLTF

SEQ ID NO: 724842 - protein, 15 aa, Homo sapiens
  CDR3 for beta chain variable domain of TCR clone 362421 (TRBV19, TRBJ1-6)
CTSSTQGAVGSPLHF

SEQ ID NO: 724843 - protein, 13 aa, Homo sapiens
  CDR3 for alpha chain variable domain of TCR clone 362422 (TRAV13-1, TRAJ39)
CAASIWAGNMLTF

SEQ ID NO: 724844 - protein, 12 aa, Homo sapiens
  CDR3 for beta chain variable domain of TCR clone 362422 (TRBV29-1, TRBJ2-3)
CSVTGGADTQYF

SEQ ID NO: 724845 - protein, 12 aa, Homo sapiens
  CDR3 for alpha chain variable domain of TCR clone 362423 (TRAV13-1, TRAJ49)
CAASIRSNQFYF

SEQ ID NO: 724846 - protein, 14 aa, Homo sapiens
  CDR3 for beta chain variable domain of TCR clone 362423 (TRBV7-2, TRBJ2-1)
CASSPGLASNEQFF

SEQ ID NO: 724847 - protein, 14 aa, Homo sapiens
  CDR3 for alpha chain variable domain of TCR clone 362424 (TRAV12-2, TRAJ24)
CAVTPADSWGKVQF

SEQ ID NO: 724848 - protein, 14 aa, Homo sapiens
  CDR3 for beta chain variable domain of TCR clone 362424 (TRBV10-3, TRBJ2-2)
CAISEVSHSGELFF

SEQ ID NO: 724849 - protein, 13 aa, Homo sapiens
  CDR3 for alpha chain variable domain of TCR clone 362425 (TRAV8-3, TRAJ43)
CAVGPDNNNDMRF

SEQ ID NO: 724850 - protein, 14 aa, Homo sapiens
  CDR3 for beta chain variable domain of TCR clone 362425 (TRBV5-7, TRBJ2-7)
CASSSGQVTYEQYF

SEQ ID NO: 724851 - protein, 12 aa, Homo sapiens
  CDR3 for alpha chain variable domain of TCR clone 362426 (TRAV12-3, TRAJ17)
CAMTLTGNKLTF

SEQ ID NO: 724852 - protein, 15 aa, Homo sapiens
  CDR3 for beta chain variable domain of TCR clone 362426 (TRBV18, TRBJ1-1)
CASSDRGTGDTEAFF

SEQ ID NO: 724853 - protein, 15 aa, Homo sapiens
  CDR3 for alpha chain variable domain of TCR clone 362427 (TRAV13-2, TRAJ35)
CAESPNIGFGNVLHC

SEQ ID NO: 724854 - protein, 13 aa, Homo sapiens
  CDR3 for beta chain variable domain of TCR clone 362427 (TRBV10-2, TRBJ2-5)
CASSALARETQYF

SEQ ID NO: 724855 - protein, 16 aa, Homo sapiens
  CDR3 for alpha chain variable domain of TCR clone 362428 (TRAV30, TRAJ24)
CGTEIVDADSWGKFQF

SEQ ID NO: 724856 - protein, 13 aa, Homo sapiens
  CDR3 for beta chain variable domain of TCR clone 362428 (TRBV4-2, TRBJ1-1)
CASSQAGNAEAFF

SEQ ID NO: 724857 - protein, 13 aa, Homo sapiens
  CDR3 for alpha chain variable domain of TCR clone 362429 (TRAV2, TRAJ40)
CAVVTSGTYKYIF

SEQ ID NO: 724858 - protein, 15 aa, Homo sapiens
  CDR3 for beta chain variable domain of TCR clone 362429 (TRBV7-2, TRBJ2-3)
CASSLAGAFIDTQYF

SEQ ID NO: 724859 - protein, 15 aa, Homo sapiens
  CDR3 for alpha chain variable domain of TCR clone 362430 (TRAV3, TRAJ23)
CAVRDRGNQGGKIIF

SEQ ID NO: 724860 - protein, 13 aa, Homo sapiens
  CDR3 for beta chain variable domain of TCR clone 362430 (TRBV7-2, TRBJ2-7)
CASSSPSGSEQYF

SEQ ID NO: 724861 - protein, 13 aa, Homo sapiens
  CDR3 for alpha chain variable domain of TCR clone 362431 (TRAV38-1, TRAJ42)
CARWGGSQGNLIF

SEQ ID NO: 724862 - protein, 14 aa, Homo sapiens
  CDR3 for beta chain variable domain of TCR clone 362431 (TRBV20-1, TRBJ1-1)
CSAQTRIGGTEAFF

SEQ ID NO: 724863 - protein, 14 aa, Homo sapiens
  CDR3 for alpha chain variable domain of TCR clone 362432 (TRAV8-4, TRAJ9)
CAVILNTGGFKTIF

SEQ ID NO: 724864 - protein, 11 aa, Homo sapiens
  CDR3 for beta chain variable domain of TCR clone 362432 (TRBV7-9, TRBJ2-6)
CASPRANGLTF

SEQ ID NO: 724865 - protein, 15 aa, Homo sapiens
  CDR3 for alpha chain variable domain of TCR clone 362433 (TRAV12-2, TRAJ53)
CATLNSGGSNYKLTF

SEQ ID NO: 724866 - protein, 18 aa, Homo sapiens
  CDR3 for beta chain variable domain of TCR clone 362433 (TRBV18, TRBJ1-3)
CASSPRGGAGPSGNTIYF

SEQ ID NO: 724867 - protein, 13 aa, Homo sapiens
  CDR3 for alpha chain variable domain of TCR clone 362434 (TRAV29/DV5, TRAJ31)
CAASRNNNARPMF

SEQ ID NO: 724868 - protein, 13 aa, Homo sapiens
  CDR3 for beta chain variable domain of TCR clone 362434 (TRBV7-2, TRBJ2-4)
CASSREHANMQYF

SEQ ID NO: 724869 - protein, 13 aa, Homo sapiens
  CDR3 for alpha chain variable domain of TCR clone 362435 (TRAV2, TRAJ13)
CASGVTRKLPLEL

SEQ ID NO: 724870 - protein, 16 aa, Homo sapiens
  CDR3 for beta chain variable domain of TCR clone 362435 (TRBV6-1, TRBJ2-5)
CASSETLDRGAETQYF

SEQ ID NO: 724871 - protein, 12 aa, Homo sapiens
  CDR3 for alpha chain variable domain of TCR clone 362436 (TRAV26-1, TRAJ36)
CIVRVWADNLFF

SEQ ID NO: 724872 - protein, 13 aa, Homo sapiens
  CDR3 for beta chain variable domain of TCR clone 362436 (TRBV11-2, TRBJ2-5)
CASSRGPSETQYF

SEQ ID NO: 724873 - protein, 14 aa, Homo sapiens
  CDR3 for alpha chain variable domain of TCR clone 362437 (TRAV16, TRAJ17)
CALSGRAAGNKLTF

SEQ ID NO: 724874 - protein, 13 aa, Homo sapiens
  CDR3 for beta chain variable domain of TCR clone 362437 (TRBV5-5, TRBJ1-2)
CASSFWRGEDYTF

SEQ ID NO: 724875 - protein, 15 aa, Homo sapiens
  CDR3 for alpha chain variable domain of TCR clone 362438 (TRAV2, TRAJ37)
CAVEDGSSNTGKIIF

SEQ ID NO: 724876 - protein, 13 aa, Homo sapiens
  CDR3 for beta chain variable domain of TCR clone 362438 (TRBV20-1, TRBJ1-6)
CSTFREGNSPLHF

SEQ ID NO: 724877 - protein, 13 aa, Homo sapiens
  CDR3 for alpha chain variable domain of TCR clone 362439 (TRAV35, TRAJ48)
CAGHEFGNEKLTL

SEQ ID NO: 724878 - protein, 14 aa, Homo sapiens
  CDR3 for beta chain variable domain of TCR clone 362439 (TRBV19, TRBJ2-1)
CASPTFVLSGEQFF

SEQ ID NO: 724879 - protein, 13 aa, Homo sapiens
  CDR3 for alpha chain variable domain of TCR clone 362440 (TRAV21, TRAJ20)
CAVGLRVDYKLSF

SEQ ID NO: 724880 - protein, 13 aa, Homo sapiens
  CDR3 for beta chain variable domain of TCR clone 362440 (TRBV20-1, TRBJ1-1)
CSAPLGGGTEAFF

SEQ ID NO: 724881 - protein, 12 aa, Homo sapiens
  CDR3 for alpha chain variable domain of TCR clone 362441 (TRAV8-3, TRAJ26)
CAVDNYGQNFVF

SEQ ID NO: 724882 - protein, 13 aa, Homo sapiens
  CDR3 for beta chain variable domain of TCR clone 362441 (TRBV27, TRBJ1-1)
CASSLSIGAEAFF

SEQ ID NO: 724883 - protein, 16 aa, Homo sapiens
  CDR3 for alpha chain variable domain of TCR clone 362442 (TRAV26-1, TRAJ36)
CIVRVPDQTGANNLFF

SEQ ID NO: 724884 - protein, 21 aa, Homo sapiens
  CDR3 for beta chain variable domain of TCR clone 362442 (TRBV6-1, TRBJ1-1)
CASSGVGNFKGISGFDTEAFF

SEQ ID NO: 724885 - protein, 14 aa, Homo sapiens
  CDR3 for alpha chain variable domain of TCR clone 362443 (TRAV12-2, TRAJ9)
CAVNALEAGFKTIF

SEQ ID NO: 724886 - protein, 16 aa, Homo sapiens
  CDR3 for beta chain variable domain of TCR clone 362443 (TRBV7-2, TRBJ2-5)
CASSPFPTGGEETQYF

SEQ ID NO: 724887 - protein, 14 aa, Homo sapiens
  CDR3 for alpha chain variable domain of TCR clone 362444 (TRAV13-1, TRAJ12)
CAASYMDSSYKLIF

SEQ ID NO: 724888 - protein, 13 aa, Homo sapiens
  CDR3 for beta chain variable domain of TCR clone 362444 (TRBV2, TRBJ2-5)
CASSDGIQETEYF

SEQ ID NO: 724889 - protein, 13 aa, Homo sapiens
  CDR3 for alpha chain variable domain of TCR clone 362445 (TRAV17, TRAJ9)
CATDYTGGFKTIL

SEQ ID NO: 724890 - protein, 20 aa, Homo sapiens
  CDR3 for beta chain variable domain of TCR clone 362445 (TRBV28, TRBJ2-1)
CASTPIGRSPGLAGGNEQFF

SEQ ID NO: 724891 - protein, 12 aa, Homo sapiens
  CDR3 for alpha chain variable domain of TCR clone 362446 (TRAV21, TRAJ33)
CAVQDSDYQLIW

SEQ ID NO: 724892 - protein, 14 aa, Homo sapiens
  CDR3 for beta chain variable domain of TCR clone 362446 (TRBV19, TRBJ2-1)
CASPTFVLSGEQFF

SEQ ID NO: 724893 - protein, 13 aa, Homo sapiens
  CDR3 for alpha chain variable domain of TCR clone 362447 (TRAV14/DV4, TRAJ4)
CAMKAGGYNKLIF

SEQ ID NO: 724894 - protein, 14 aa, Homo sapiens
  CDR3 for beta chain variable domain of TCR clone 362447 (TRBV25-1, TRBJ1-1)
CASTHLGGNTEAFF

SEQ ID NO: 724895 - protein, 14 aa, Homo sapiens
  CDR3 for alpha chain variable domain of TCR clone 362448 (TRAV8-3, TRAJ4)
CAVGAAGGYNTLIF

SEQ ID NO: 724896 - protein, 17 aa, Homo sapiens
  CDR3 for beta chain variable domain of TCR clone 362448 (TRBV11-2, TRBJ2-1)
CASSLYPPGVEYNEQFF

SEQ ID NO: 724897 - protein, 14 aa, Homo sapiens
  CDR3 for alpha chain variable domain of TCR clone 362449 (TRAV26-1, TRAJ38)
CIADNAGNNRKLIW

SEQ ID NO: 724898 - protein, 16 aa, Homo sapiens
  CDR3 for beta chain variable domain of TCR clone 362449 (TRBV7-3, TRBJ2-2)
CASSLKRGTLTGELFF

SEQ ID NO: 724899 - protein, 13 aa, Homo sapiens
  CDR3 for alpha chain variable domain of TCR clone 362450 (TRAV13-1, TRAJ40)
CAARTSGTYKYIF

SEQ ID NO: 724900 - protein, 17 aa, Homo sapiens
  CDR3 for beta chain variable domain of TCR clone 362450 (TRBV4-1, TRBJ2-3)
GASIRGYVSGGTDTQYF

SEQ ID NO: 724901 - protein, 18 aa, Homo sapiens
  CDR3 for alpha chain variable domain of TCR clone 362451 (TRAV12-2, )
CAVEDIQNPDPAVYQLRD

SEQ ID NO: 724902 - protein, 17 aa, Homo sapiens
  CDR3 for beta chain variable domain of TCR clone 362451 (TRBV28, TRBJ2-5)
CASSTPEGDALQETQYF

SEQ ID NO: 724903 - protein, 16 aa, Homo sapiens
  CDR3 for alpha chain variable domain of TCR clone 362452 (TRAV12-1, TRAJ53)
CVVTSVAGGSNHKLTF

SEQ ID NO: 724904 - protein, 16 aa, Homo sapiens
  CDR3 for beta chain variable domain of TCR clone 362452 (TRBV6-6, TRBJ2-3)
CASSYSHAGSTDTQYF

SEQ ID NO: 724905 - protein, 15 aa, Homo sapiens
  CDR3 for alpha chain variable domain of TCR clone 362453 (TRAV13-1, TRAJ44)
CAASRNTGTASTLTF

SEQ ID NO: 724906 - protein, 14 aa, Homo sapiens
  CDR3 for beta chain variable domain of TCR clone 362453 (TRBV11-2, TRBJ1-2)
CASSLYRGNYGYTF

SEQ ID NO: 724907 - protein, 13 aa, Homo sapiens
  CDR3 for alpha chain variable domain of TCR clone 362454 (TRAV8-3, TRAJ28)
CAVGAVGSYQLTF

SEQ ID NO: 724908 - protein, 15 aa, Homo sapiens
  CDR3 for beta chain variable domain of TCR clone 362454 (TRBV7-2, TRBJ2-7)
CASSLALAEAYEQYF

SEQ ID NO: 724909 - protein, 11 aa, Homo sapiens
  CDR3 for alpha chain variable domain of TCR clone 362455 (TRAV35, TRAJ34)
CWARNTDKLIF

SEQ ID NO: 724910 - protein, 13 aa, Homo sapiens
  CDR3 for beta chain variable domain of TCR clone 362455 (TRBV19, TRBJ2-7)
CASQSYGAGEQYF

SEQ ID NO: 724911 - protein, 13 aa, Homo sapiens
  CDR3 for alpha chain variable domain of TCR clone 362456 (TRAV36/DV7, TRAJ49)
CAGDSNTGNQFYF

SEQ ID NO: 724912 - protein, 12 aa, Homo sapiens
  CDR3 for beta chain variable domain of TCR clone 362456 (TRBV11-2, TRBJ2-2)
CASGLGGGELFF

SEQ ID NO: 724913 - protein, 14 aa, Homo sapiens
  CDR3 for alpha chain variable domain of TCR clone 362457 (TRAV38-2/DV8, TRAJ18)
CALRRGSTLGRLYF

SEQ ID NO: 724914 - protein, 16 aa, Homo sapiens
  CDR3 for beta chain variable domain of TCR clone 362457 (TRBV7-3, TRBJ2-2)
CASSLKRGTLSGELFF

SEQ ID NO: 724915 - protein, 14 aa, Homo sapiens
  CDR3 for alpha chain variable domain of TCR clone 362458 (TRAV35, TRAJ33)
CAGSSQDSNYQLIW

SEQ ID NO: 724916 - protein, 15 aa, Homo sapiens
  CDR3 for beta chain variable domain of TCR clone 362458 (TRBV7-3, TRBJ2-1)
CASSLSSGSFDEQFF

SEQ ID NO: 724917 - protein, 16 aa, Homo sapiens
  CDR3 for alpha chain variable domain of TCR clone 362459 (TRAV22, TRAJ45)
CAVERGKRGGADGLTF

SEQ ID NO: 724918 - protein, 13 aa, Homo sapiens
  CDR3 for beta chain variable domain of TCR clone 362459 (TRBV27, TRBJ1-1)
CASSLSIGAEAVF

SEQ ID NO: 724919 - protein, 16 aa, Homo sapiens
  CDR3 for alpha chain variable domain of TCR clone 362460 (TRAV30, TRAJ44)
CGTEDKRTGTASKLTF

SEQ ID NO: 724920 - protein, 16 aa, Homo sapiens
  CDR3 for beta chain variable domain of TCR clone 362460 (TRBV10-2, TRBJ2-7)
CASSESPVSSGFEQYF

SEQ ID NO: 724921 - protein, 12 aa, Homo sapiens
  CDR3 for alpha chain variable domain of TCR clone 362461 (TRAV12-1, TRAJ34)
CVVAGATDKLLF

SEQ ID NO: 724922 - protein, 16 aa, Homo sapiens
  CDR3 for beta chain variable domain of TCR clone 362461 (TRBV7-2, TRBJ1-2)
CASSSNQDRRGHGYTF

SEQ ID NO: 724923 - protein, 15 aa, Homo sapiens
  CDR3 for alpha chain variable domain of TCR clone 362462 (TRAV26-2, TRAJ57)
SILRDIRGGSEKLVF

SEQ ID NO: 724924 - protein, 15 aa, Homo sapiens
  CDR3 for beta chain variable domain of TCR clone 362462 (TRBV2, TRBJ2-1)
CASDIGLAGEGEQFF

SEQ ID NO: 724925 - protein, 14 aa, Homo sapiens
  CDR3 for alpha chain variable domain of TCR clone 362463 (TRAV12-2, TRAJ17)
CAVLFKAAGNKLTF

SEQ ID NO: 724926 - protein, 14 aa, Homo sapiens
  CDR3 for beta chain variable domain of TCR clone 362463 (TRBV4-1, TRBJ2-2)
CASSQAVNTGELFC

SEQ ID NO: 724927 - protein, 13 aa, Homo sapiens
  CDR3 for alpha chain variable domain of TCR clone 362464 (TRAV1-2, TRAJ9)
CAALNTGGFKTIF

SEQ ID NO: 724928 - protein, 16 aa, Homo sapiens
  CDR3 for beta chain variable domain of TCR clone 362464 (TRBV6-5, TRBJ2-1)
CASSYSLSGGYNEQFF

SEQ ID NO: 724929 - protein, 15 aa, Homo sapiens
  CDR3 for alpha chain variable domain of TCR clone 362465 (TRAV3, TRAJ4)
CAVRDGTGGYNHLIF

SEQ ID NO: 724930 - protein, 15 aa, Homo sapiens
  CDR3 for beta chain variable domain of TCR clone 362465 (TRBV6-1, TRBJ2-3)
CASSERGGITDTQYF

SEQ ID NO: 724931 - protein, 11 aa, Homo sapiens
  CDR3 for alpha chain variable domain of TCR clone 362466 (TRAV8-6, TRAJ23)
CVLISGGKLIF

SEQ ID NO: 724932 - protein, 14 aa, Homo sapiens
  CDR3 for beta chain variable domain of TCR clone 362466 (TRBV12-5, TRBJ2-5)
CASGSRTHQETQYF

SEQ ID NO: 724933 - protein, 11 aa, Homo sapiens
  CDR3 for alpha chain variable domain of TCR clone 362467 (TRAV8-6, TRAJ34)
CAVWNTDKLIF

SEQ ID NO: 724934 - protein, 13 aa, Homo sapiens
  CDR3 for beta chain variable domain of TCR clone 362467 (TRBV7-9, TRBJ1-2)
CASSLKQNYVYTF

SEQ ID NO: 724935 - protein, 17 aa, Homo sapiens
  CDR3 for alpha chain variable domain of TCR clone 362468 (TRAV12-2, TRAJ52)
CAVNPYAGGTSYGKLTF

SEQ ID NO: 724936 - protein, 14 aa, Homo sapiens
  CDR3 for beta chain variable domain of TCR clone 362468 (TRBV7-2, TRBJ1-4)
CASSHSKTNEKLFF

SEQ ID NO: 724937 - protein, 10 aa, Homo sapiens
  CDR3 for alpha chain variable domain of TCR clone 362469 (TRAV8-2, TRAJ29)
CTGGNTPLFF

SEQ ID NO: 724938 - protein, 17 aa, Homo sapiens
  CDR3 for beta chain variable domain of TCR clone 362469 (TRBV2, TRBJ2-7)
CASSQALTGWDSYEQYF

SEQ ID NO: 724939 - protein, 13 aa, Homo sapiens
  CDR3 for alpha chain variable domain of TCR clone 362470 (TRAV3, TRAJ15)
CAVRDQAGTALIF

SEQ ID NO: 724940 - protein, 17 aa, Homo sapiens
  CDR3 for beta chain variable domain of TCR clone 362470 (TRBV25-1, TRBJ2-1)
CASSAYGQGRGVHEQFF

SEQ ID NO: 724941 - protein, 16 aa, Homo sapiens
  CDR3 for alpha chain variable domain of TCR clone 362471 (TRAV30, TRAJ24)
CGTQIVDADSWGKFQF

SEQ ID NO: 724942 - protein, 18 aa, Homo sapiens
  CDR3 for beta chain variable domain of TCR clone 362471 (TRBV7-9, TRBJ2-7)
CASSLTTSGSRTWYEQYF

SEQ ID NO: 724943 - protein, 13 aa, Homo sapiens
  CDR3 for alpha chain variable domain of TCR clone 362472 (TRAV3, TRAJ26)
CAVSRGYGLNFVF

SEQ ID NO: 724944 - protein, 15 aa, Homo sapiens
  CDR3 for beta chain variable domain of TCR clone 362472 (TRBV27, TRBJ2-1)
CASSLARGAYNEQFF

SEQ ID NO: 724945 - protein, 13 aa, Homo sapiens
  CDR3 for alpha chain variable domain of TCR clone 362473 (TRAV14/DV4, TRAJ34)
CAMRDYNTDKLIF

SEQ ID NO: 724946 - protein, 13 aa, Homo sapiens
  CDR3 for beta chain variable domain of TCR clone 362473 (TRBV19, TRBJ2-2)
CAGKVSAAGELFF

SEQ ID NO: 724947 - protein, 15 aa, Homo sapiens
  CDR3 for alpha chain variable domain of TCR clone 362474 (TRAV8-3, TRAJ27)
CAVGPSKTNAGKSTF

SEQ ID NO: 724948 - protein, 13 aa, Homo sapiens
  CDR3 for beta chain variable domain of TCR clone 362474 (TRBV20-1, TRBJ1-1)
FSAPLGGGTEAFF

SEQ ID NO: 724949 - protein, 14 aa, Homo sapiens
  CDR3 for alpha chain variable domain of TCR clone 362475 (TRAV12-2, TRAJ40)
CAVKIPSGTYKYIF

SEQ ID NO: 724950 - protein, 12 aa, Homo sapiens
  CDR3 for beta chain variable domain of TCR clone 362475 (TRBV11-2, TRBJ2-7)
CASSLPTYEQYF

SEQ ID NO: 724951 - protein, 12 aa, Homo sapiens
  CDR3 for alpha chain variable domain of TCR clone 362476 (TRAV16, TRAJ9)
CALSSGGFKTIF

SEQ ID NO: 724952 - protein, 14 aa, Homo sapiens
  CDR3 for beta chain variable domain of TCR clone 362476 (TRBV7-9, TRBJ2-1)
CASSLAGPYNEQVF

SEQ ID NO: 724953 - protein, 10 aa, Homo sapiens
  CDR3 for alpha chain variable domain of TCR clone 362477 (TRAV21, TRAJ30)
NSNRDDKIIF

SEQ ID NO: 724954 - protein, 13 aa, Homo sapiens
  CDR3 for beta chain variable domain of TCR clone 362477 (TRBV2, TRBJ2-1)
CASVTSGGLEQFF

SEQ ID NO: 724955 - protein, 13 aa, Homo sapiens
  CDR3 for alpha chain variable domain of TCR clone 362478 (TRAV8-1, TRAJ9)
CAVNSVGGFKTIF

SEQ ID NO: 724956 - protein, 15 aa, Homo sapiens
  CDR3 for beta chain variable domain of TCR clone 362478 (TRBV4-1, TRBJ1-4)
CASSGTGGTNEKLFF

SEQ ID NO: 724957 - protein, 14 aa, Homo sapiens
  CDR3 for alpha chain variable domain of TCR clone 362479 (TRAV1-2, TRAJ16)
CAVNRFSDGQKRLF

SEQ ID NO: 724958 - protein, 16 aa, Homo sapiens
  CDR3 for beta chain variable domain of TCR clone 362479 (TRBV7-3, TRBJ2-2)
CASSLKRGTLSGELFF

SEQ ID NO: 724959 - protein, 15 aa, Homo sapiens
  CDR3 for alpha chain variable domain of TCR clone 362480 (TRAV25, TRAJ53)
CPTSNSGGSNYKLTF

SEQ ID NO: 724960 - protein, 15 aa, Homo sapiens
  CDR3 for beta chain variable domain of TCR clone 362480 (TRBV27, TRBJ2-1)
CASSNGGGSSNEQFF

SEQ ID NO: 724961 - protein, 13 aa, Homo sapiens
  CDR3 for alpha chain variable domain of TCR clone 362481 (TRAV3, TRAJ29)
CAVRDIIDTPLVF

SEQ ID NO: 724962 - protein, 14 aa, Homo sapiens
  CDR3 for beta chain variable domain of TCR clone 362481 (TRBV27, TRBJ2-1)
CASSATRGYNEQLF

SEQ ID NO: 724963 - protein, 11 aa, Homo sapiens
  CDR3 for alpha chain variable domain of TCR clone 362482 (TRAV12-1, TRAJ21)
CVVNNFNKFYF

SEQ ID NO: 724964 - protein, 17 aa, Homo sapiens
  CDR3 for beta chain variable domain of TCR clone 362482 (TRBV7-8, TRBJ2-1)
CASSPPTGTLAYNEQFV

SEQ ID NO: 724965 - protein, 15 aa, Homo sapiens
  CDR3 for alpha chain variable domain of TCR clone 362483 (TRAV8-3, TRAJ27)
CAVGPSKTNAGKSTF

SEQ ID NO: 724966 - protein, 15 aa, Homo sapiens
  CDR3 for beta chain variable domain of TCR clone 362483 (TRBV7-2, TRBJ2-1)
CASSSGLEEGNEQFF

SEQ ID NO: 724967 - protein, 13 aa, Homo sapiens
  CDR3 for alpha chain variable domain of TCR clone 362484 (TRAV27, TRAJ41)
CAGEGNSGYALNF

SEQ ID NO: 724968 - protein, 12 aa, Homo sapiens
  CDR3 for beta chain variable domain of TCR clone 362484 (TRBV5-7, TRBJ1-1)
CASSLGRGKAFF

SEQ ID NO: 724969 - protein, 21 aa, Homo sapiens
  CDR3 for alpha chain variable domain of TCR clone 362485 (TRAV4, TRAJ30)
PRVSLSDTAVYYCLRDDKIIF

SEQ ID NO: 724970 - protein, 11 aa, Homo sapiens
  CDR3 for beta chain variable domain of TCR clone 362485 (TRBV29-1, TRBJ2-5)
CSEDRTGTQYF

SEQ ID NO: 724971 - protein, 13 aa, Homo sapiens
  CDR3 for alpha chain variable domain of TCR clone 362486 (TRAV8-3, TRAJ28)
CAVGAVGSYQLTF

SEQ ID NO: 724972 - protein, 15 aa, Homo sapiens
  CDR3 for beta chain variable domain of TCR clone 362486 (TRBV7-9, TRBJ1-5)
CASSQGRQPNQHQHF

SEQ ID NO: 724973 - protein, 17 aa, Homo sapiens
  CDR3 for alpha chain variable domain of TCR clone 362487 (TRAV3, TRAJ6)
CAVRDGPRAGGSYIPTF

SEQ ID NO: 724974 - protein, 12 aa, Homo sapiens
  CDR3 for beta chain variable domain of TCR clone 362487 (TRBV7-2, TRBJ1-5)
CASSLWSQPQHF

SEQ ID NO: 724975 - protein, 12 aa, Homo sapiens
  CDR3 for alpha chain variable domain of TCR clone 362488 (TRAV13-1, TRAJ21)
CAAKEGFNKFYF

SEQ ID NO: 724976 - protein, 17 aa, Homo sapiens
  CDR3 for beta chain variable domain of TCR clone 362488 (TRBV19, TRBJ2-7)
CASSISFYDSYPYEQYS

SEQ ID NO: 724977 - protein, 14 aa, Homo sapiens
  CDR3 for alpha chain variable domain of TCR clone 362489 (TRAV20, TRAJ20)
CAVRRGYNDYKLSI

SEQ ID NO: 724978 - protein, 13 aa, Homo sapiens
  CDR3 for beta chain variable domain of TCR clone 362489 (TRBV19, TRBJ2-5)
CASSETAPETQYF

SEQ ID NO: 724979 - protein, 14 aa, Homo sapiens
  CDR3 for alpha chain variable domain of TCR clone 362490 (TRAV8-4, TRAJ48)
CSVSETFGNEKLTF

SEQ ID NO: 724980 - protein, 14 aa, Homo sapiens
  CDR3 for beta chain variable domain of TCR clone 362490 (TRBV13, TRBJ2-7)
CASSLKGASYEKYF

SEQ ID NO: 724981 - protein, 17 aa, Homo sapiens
  CDR3 for alpha chain variable domain of TCR clone 362491 (TRAV36/DV7, TRAJ52)
CAVAQRAGGTSYGKLTF

SEQ ID NO: 724982 - protein, 14 aa, Homo sapiens
  CDR3 for beta chain variable domain of TCR clone 362491 (TRBV6-1, TRBJ1-3)
CASVQGGGGNTIYF

SEQ ID NO: 724983 - protein, 15 aa, Homo sapiens
  CDR3 for alpha chain variable domain of TCR clone 362492 (TRAV13-1, TRAJ42)
CAASIAGGSQGNLIF

SEQ ID NO: 724984 - protein, 13 aa, Homo sapiens
  CDR3 for beta chain variable domain of TCR clone 362492 (TRBV10-3, TRBJ2-7)
CASKLAVNYEQYF

SEQ ID NO: 724985 - protein, 23 aa, Homo sapiens
  CDR3 for alpha chain variable domain of TCR clone 362493 (TRAV26-1, )
CIADNAGKNHIQNPDPAVYPLRD

SEQ ID NO: 724986 - protein, 13 aa, Homo sapiens
  CDR3 for beta chain variable domain of TCR clone 362493 (TRBV20-1, TRBJ1-1)
CSARGGGNTEAFF

SEQ ID NO: 724987 - protein, 16 aa, Homo sapiens
  CDR3 for alpha chain variable domain of TCR clone 362494 (TRAV38-2/DV8, TRAJ47)
CAYRSAIMEYGNKLVL

SEQ ID NO: 724988 - protein, 14 aa, Homo sapiens
  CDR3 for beta chain variable domain of TCR clone 362494 (TRBV19, TRBJ2-7)
RASSIFAGTYEQYF

SEQ ID NO: 724989 - protein, 14 aa, Homo sapiens
  CDR3 for alpha chain variable domain of TCR clone 362495 (TRAV10, TRAJ15)
CVVSASQAGTALFF

SEQ ID NO: 724990 - protein, 12 aa, Homo sapiens
  CDR3 for beta chain variable domain of TCR clone 362495 (TRBV29-1, TRBJ2-3)
CSVTGGADTQYF

SEQ ID NO: 724991 - protein, 14 aa, Homo sapiens
  CDR3 for alpha chain variable domain of TCR clone 362496 (TRAV8-4, TRAJ9)
CAVRINTGGFKTIF

SEQ ID NO: 724992 - protein, 13 aa, Homo sapiens
  CDR3 for beta chain variable domain of TCR clone 362496 (TRBV2, TRBJ1-1)
CASSEGGNTETFF

SEQ ID NO: 724993 - protein, 12 aa, Homo sapiens
  CDR3 for alpha chain variable domain of TCR clone 362497 (TRAV13-1, TRAJ49)
CAASIWGNQFYF

SEQ ID NO: 724994 - protein, 12 aa, Homo sapiens
  CDR3 for beta chain variable domain of TCR clone 362497 (TRBV6-3, TRBJ2-7)
CASSRQGYEQYF

SEQ ID NO: 724995 - protein, 11 aa, Homo sapiens
  CDR3 for alpha chain variable domain of TCR clone 362498 (TRAV17, TRAJ9)
YATTVGFKTIF

SEQ ID NO: 724996 - protein, 14 aa, Homo sapiens
  CDR3 for beta chain variable domain of TCR clone 362498 (TRBV7-9, TRBJ2-2)
CASSGLADTGELFF

SEQ ID NO: 724997 - protein, 12 aa, Homo sapiens
  CDR3 for alpha chain variable domain of TCR clone 362499 (TRAV8-3, TRAJ20)
CAVGANYYKLSF

SEQ ID NO: 724998 - protein, 17 aa, Homo sapiens
  CDR3 for beta chain variable domain of TCR clone 362499 (TRBV7-8, TRBJ2-6)
CASSAGTGGAGANVLTF

SEQ ID NO: 724999 - protein, 22 aa, Homo sapiens
  CDR3 for alpha chain variable domain of TCR clone 362500 (TRAV27, TRAJ41)
CAVRTQIPDIQNPDPAVYQLRD

SEQ ID NO: 725000 - protein, 11 aa, Homo sapiens
  CDR3 for beta chain variable domain of TCR clone 362500 (TRBV10-3, TRBJ2-7)
CAISEGLEQYF

SEQ ID NO: 725001 - protein, 14 aa, Homo sapiens
  CDR3 for alpha chain variable domain of TCR clone 362501 (TRAV8-4, TRAJ54)
CAVSEVLGAQKLVL

SEQ ID NO: 725002 - protein, 15 aa, Homo sapiens
  CDR3 for beta chain variable domain of TCR clone 362501 (TRBV6-1, TRBJ2-6)
CASSSRPSGANVLTF

SEQ ID NO: 725003 - protein, 11 aa, Homo sapiens
  CDR3 for alpha chain variable domain of TCR clone 362502 (TRAV21, TRAJ41)
CAVRSGYALNF

SEQ ID NO: 725004 - protein, 13 aa, Homo sapiens
  CDR3 for beta chain variable domain of TCR clone 362502 (TRBV7-9, TRBJ1-2)
CASSVKQNYGYTV

SEQ ID NO: 725005 - protein, 17 aa, Homo sapiens
  CDR3 for alpha chain variable domain of TCR clone 362503 (TRAV23/DV6, TRAJ58)
CAARLLRGETSGSRLTF

SEQ ID NO: 725006 - protein, 14 aa, Homo sapiens
  CDR3 for beta chain variable domain of TCR clone 362503 (TRBV2, TRBJ2-7)
CGSSLTSGGYEQYF

SEQ ID NO: 725007 - protein, 17 aa, Homo sapiens
  CDR3 for alpha chain variable domain of TCR clone 362504 (TRAV3, TRAJ6)
CAVRDGPRAGGSYIHTF

SEQ ID NO: 725008 - protein, 16 aa, Homo sapiens
  CDR3 for beta chain variable domain of TCR clone 362504 (TRBV4-1, TRBJ2-7)
CASSLTAGQATYEQYF

SEQ ID NO: 725009 - protein, 15 aa, Homo sapiens
  CDR3 for alpha chain variable domain of TCR clone 362505 (TRAV29/DV5, TRAJ29)
CAASERSSENTPLVF

SEQ ID NO: 725010 - protein, 17 aa, Homo sapiens
  CDR3 for beta chain variable domain of TCR clone 362505 (TRBV4-1, TRBJ1-4)
CASSQEGPRGVEEKLFF

SEQ ID NO: 725011 - protein, 15 aa, Homo sapiens
  CDR3 for alpha chain variable domain of TCR clone 362506 (TRAV3, TRAJ5)
CAVRDRKTGRRALNF

SEQ ID NO: 725012 - protein, 15 aa, Homo sapiens
  CDR3 for beta chain variable domain of TCR clone 362506 (TRBV7-9, TRBJ2-2)
CASGPLDTFPGELFF

SEQ ID NO: 725013 - protein, 13 aa, Homo sapiens
  CDR3 for alpha chain variable domain of TCR clone 362507 (TRAV3, TRAJ43)
CAVKARNNNDMRF

SEQ ID NO: 725014 - protein, 16 aa, Homo sapiens
  CDR3 for beta chain variable domain of TCR clone 362507 (TRBV7-9, TRBJ2-3)
CASSFSVAGGTYTQYF

SEQ ID NO: 725015 - protein, 14 aa, Homo sapiens
  CDR3 for alpha chain variable domain of TCR clone 362508 (TRAV8-3, TRAJ15)
CAVGLNQAGTALIF

SEQ ID NO: 725016 - protein, 17 aa, Homo sapiens
  CDR3 for beta chain variable domain of TCR clone 362508 (TRBV11-2, TRBJ2-1)
CASSLYPPGVEYNEQFF

SEQ ID NO: 725017 - protein, 13 aa, Homo sapiens
  CDR3 for alpha chain variable domain of TCR clone 362509 (TRAV3, TRAJ27)
CAVRPLGAGKSTF

SEQ ID NO: 725018 - protein, 16 aa, Homo sapiens
  CDR3 for beta chain variable domain of TCR clone 362509 (TRBV20-1, TRBJ2-1)
CSARDLKQGMNNEQFF

SEQ ID NO: 725019 - protein, 15 aa, Homo sapiens
  CDR3 for alpha chain variable domain of TCR clone 362510 (TRAV3, TRAJ22)
CAVRDRGGSARQLTF

SEQ ID NO: 725020 - protein, 17 aa, Homo sapiens
  CDR3 for beta chain variable domain of TCR clone 362510 (TRBV13, TRBJ2-3)
CASSLSRVAGGRNMQYF

SEQ ID NO: 725021 - protein, 16 aa, Homo sapiens
  CDR3 for alpha chain variable domain of TCR clone 362511 (TRAV3, TRAJ37)
CAVRGKGSGTTGTLIF

SEQ ID NO: 725022 - protein, 15 aa, Homo sapiens
  CDR3 for beta chain variable domain of TCR clone 362511 (TRBV5-1, TRBJ2-7)
CASSLNGGPAREQYF

SEQ ID NO: 725023 - protein, 18 aa, Homo sapiens
  CDR3 for alpha chain variable domain of TCR clone 362512 (TRAV16, TRAJ45)
CAQASYPSSGGGADGLSF

SEQ ID NO: 725024 - protein, 12 aa, Homo sapiens
  CDR3 for beta chain variable domain of TCR clone 362512 (TRBV11-3, TRBJ2-4)
CASSAGRVIQYF

SEQ ID NO: 725025 - protein, 11 aa, Homo sapiens
  CDR3 for alpha chain variable domain of TCR clone 362513 (TRAV1-1, TRAJ23)
CAVRQGGKLIF

SEQ ID NO: 725026 - protein, 14 aa, Homo sapiens
  CDR3 for beta chain variable domain of TCR clone 362513 (TRBV11-2, TRBJ2-3)
CASSLYAGRDTQYF

SEQ ID NO: 725027 - protein, 13 aa, Homo sapiens
  CDR3 for alpha chain variable domain of TCR clone 362514 (TRAV13-1, TRAJ35)
CAASLGFGNVLHC

SEQ ID NO: 725028 - protein, 15 aa, Homo sapiens
  CDR3 for beta chain variable domain of TCR clone 362514 (TRBV20-1, TRBJ2-7)
CSARERVSGMDEQYF

SEQ ID NO: 725029 - protein, 13 aa, Homo sapiens
  CDR3 for alpha chain variable domain of TCR clone 362515 (TRAV23/DV6, TRAJ12)
CAPRVDSSCKLIF

SEQ ID NO: 725030 - protein, 12 aa, Homo sapiens
  CDR3 for beta chain variable domain of TCR clone 362515 (TRBV7-6, TRBJ2-5)
CASSLSQETQYF

SEQ ID NO: 725031 - protein, 14 aa, Homo sapiens
  CDR3 for alpha chain variable domain of TCR clone 362516 (TRAV17, TRAJ22)
CATSPSGSARQLTF

SEQ ID NO: 725032 - protein, 16 aa, Homo sapiens
  CDR3 for beta chain variable domain of TCR clone 362516 (TRBV7-3, TRBJ2-2)
CASSLKRGTLSGELFF

SEQ ID NO: 725033 - protein, 12 aa, Homo sapiens
  CDR3 for alpha chain variable domain of TCR clone 362517 (TRAV25, TRAJ5)
CAGGGGRRALTF

SEQ ID NO: 725034 - protein, 20 aa, Homo sapiens
  CDR3 for beta chain variable domain of TCR clone 362517 (TRBV7-8, TRBJ2-2)
CASSHLFPGPTIHITGELFF

SEQ ID NO: 725035 - protein, 14 aa, Homo sapiens
  CDR3 for alpha chain variable domain of TCR clone 362518 (TRAV1-2, TRAJ16)
CAVNRLSDGQKLLF

SEQ ID NO: 725036 - protein, 12 aa, Homo sapiens
  CDR3 for beta chain variable domain of TCR clone 362518 (TRBV14, TRBJ2-5)
CASSQLKETQYF

SEQ ID NO: 725037 - protein, 17 aa, Homo sapiens
  CDR3 for alpha chain variable domain of TCR clone 362519 (TRAV13-1, TRAJ52)
CAAGRNAGGTSYGKLTF

SEQ ID NO: 725038 - protein, 15 aa, Homo sapiens
  CDR3 for beta chain variable domain of TCR clone 362519 (TRBV10-3, TRBJ2-1)
CAIRNGTSGHNEQFF

SEQ ID NO: 725039 - protein, 12 aa, Homo sapiens
  CDR3 for alpha chain variable domain of TCR clone 362520 (TRAV16, TRAJ27)
CALNTNAGKSTF

SEQ ID NO: 725040 - protein, 13 aa, Homo sapiens
  CDR3 for beta chain variable domain of TCR clone 362520 (TRBV7-9, TRBJ1-2)
CASSLKQNYGYTF

SEQ ID NO: 725041 - protein, 10 aa, Homo sapiens
  CDR3 for alpha chain variable domain of TCR clone 362521 (TRAV12-3, TRAJ49)
RAMNDDQFYF

SEQ ID NO: 725042 - protein, 15 aa, Homo sapiens
  CDR3 for beta chain variable domain of TCR clone 362521 (TRBV7-2, TRBJ1-2)
CASSPRAGWNYGYTF

SEQ ID NO: 725043 - protein, 15 aa, Homo sapiens
  CDR3 for alpha chain variable domain of TCR clone 362522 (TRAV26-1, TRAJ29)
CIVRVEGSGNTPLVF

SEQ ID NO: 725044 - protein, 18 aa, Homo sapiens
  CDR3 for beta chain variable domain of TCR clone 362522 (TRBV18, TRBJ2-5)
CASSPGVSQETQYFARHA

SEQ ID NO: 725045 - protein, 14 aa, Homo sapiens
  CDR3 for alpha chain variable domain of TCR clone 362523 (TRAV13-1, TRAJ35)
CAASKGGFGNVLHC

SEQ ID NO: 725046 - protein, 15 aa, Homo sapiens
  CDR3 for beta chain variable domain of TCR clone 362523 (TRBV7-9, TRBJ1-6)
CASSSPGRGNSPLHV

SEQ ID NO: 725047 - protein, 13 aa, Homo sapiens
  CDR3 for alpha chain variable domain of TCR clone 362524 (TRAV2, TRAJ15)
CAVASQAGTALIF

SEQ ID NO: 725048 - protein, 15 aa, Homo sapiens
  CDR3 for beta chain variable domain of TCR clone 362524 (TRBV7-2, TRBJ2-1)
CASSSGLAGGNEQCF

SEQ ID NO: 725049 - protein, 13 aa, Homo sapiens
  CDR3 for alpha chain variable domain of TCR clone 362525 (TRAV3, TRAJ20)
CAVRSLNDYKLIF

SEQ ID NO: 725050 - protein, 13 aa, Homo sapiens
  CDR3 for beta chain variable domain of TCR clone 362525 (TRBV7-3, TRBJ1-1)
CASSQDWGAEAFF

SEQ ID NO: 725051 - protein, 12 aa, Homo sapiens
  CDR3 for alpha chain variable domain of TCR clone 362526 (TRAV8-3, TRAJ22)
FGVQSSARELTF

SEQ ID NO: 725052 - protein, 15 aa, Homo sapiens
  CDR3 for beta chain variable domain of TCR clone 362526 (TRBV20-1, TRBJ1-1)
CSASRGVTGNTEAFF

SEQ ID NO: 725053 - protein, 12 aa, Homo sapiens
  CDR3 for alpha chain variable domain of TCR clone 362527 (TRAV8-6, TRAJ36)
CAVSDWLGQTTS

SEQ ID NO: 725054 - protein, 15 aa, Homo sapiens
  CDR3 for beta chain variable domain of TCR clone 362527 (TRBV11-2, TRBJ2-1)
CASSLGTSGLNEQFF

SEQ ID NO: 725055 - protein, 15 aa, Homo sapiens
  CDR3 for alpha chain variable domain of TCR clone 362528 (TRAV23/DV6, TRAJ18)
CAARYRGSALGRLDF

SEQ ID NO: 725056 - protein, 13 aa, Homo sapiens
  CDR3 for beta chain variable domain of TCR clone 362528 (TRBV7-2, TRBJ2-7)
CASSSPSGSEQYF

SEQ ID NO: 725057 - protein, 18 aa, Homo sapiens
  CDR3 for alpha chain variable domain of TCR clone 362529 (TRAV21, TRAJ52)
CAVRPSPAGGTSYGKLPF

SEQ ID NO: 725058 - protein, 17 aa, Homo sapiens
  CDR3 for beta chain variable domain of TCR clone 362529 (TRBV13, TRBJ2-3)
CASSLPRVAGGRNTQYF

SEQ ID NO: 725059 - protein, 15 aa, Homo sapiens
  CDR3 for alpha chain variable domain of TCR clone 362530 (TRAV1-2, TRAJ13)
CAVRGSSGGYKKVTF

SEQ ID NO: 725060 - protein, 15 aa, Homo sapiens
  CDR3 for beta chain variable domain of TCR clone 362530 (TRBV11-2, TRBJ1-3)
CASSLDGTVGNTIYF

SEQ ID NO: 725061 - protein, 13 aa, Homo sapiens
  CDR3 for alpha chain variable domain of TCR clone 362531 (TRAV23/DV6, TRAJ47)
CAASMTRGNKLAF

SEQ ID NO: 725062 - protein, 14 aa, Homo sapiens
  CDR3 for beta chain variable domain of TCR clone 362531 (TRBV7-3, TRBJ1-1)
YASSLKGGNTEAFF

SEQ ID NO: 725063 - protein, 14 aa, Homo sapiens
  CDR3 for alpha chain variable domain of TCR clone 362532 (TRAV8-3, TRAJ4)
CAVGAAGGYNKLIF

SEQ ID NO: 725064 - protein, 10 aa, Homo sapiens
  CDR3 for beta chain variable domain of TCR clone 362532 (TRBV7-3, TRBJ2-1)
ASSSYNEQFF

SEQ ID NO: 725065 - protein, 12 aa, Homo sapiens
  CDR3 for alpha chain variable domain of TCR clone 362533 (TRAV21, TRAJ33)
CAVQDSDYQLIL

SEQ ID NO: 725066 - protein, 14 aa, Homo sapiens
  CDR3 for beta chain variable domain of TCR clone 362533 (TRBV28, TRBJ2-1)
CASSPGEGGNEQFF

SEQ ID NO: 725067 - protein, 14 aa, Homo sapiens
  CDR3 for alpha chain variable domain of TCR clone 362534 (TRAV8-6, TRAJ5)
CAVSVDTGRRALTF

SEQ ID NO: 725068 - protein, 12 aa, Homo sapiens
  CDR3 for beta chain variable domain of TCR clone 362534 (TRBV3-1, TRBJ2-1)
CASGGLGNEQFF

SEQ ID NO: 725069 - protein, 12 aa, Homo sapiens
  CDR3 for alpha chain variable domain of TCR clone 362535 (TRAV13-1, TRAJ3)
CAATRVQQCFQD

SEQ ID NO: 725070 - protein, 16 aa, Homo sapiens
  CDR3 for beta chain variable domain of TCR clone 362535 (TRBV7-3, TRBJ2-2)
CASSLKRGTLSGELFF

SEQ ID NO: 725071 - protein, 12 aa, Homo sapiens
  CDR3 for alpha chain variable domain of TCR clone 362536 (TRAV21, TRAJ37)
CAVRGNTGKLIF

SEQ ID NO: 725072 - protein, 12 aa, Homo sapiens
  CDR3 for beta chain variable domain of TCR clone 362536 (TRBV28, TRBJ2-7)
CASRSGGYEQYF

SEQ ID NO: 725073 - protein, 15 aa, Homo sapiens
  CDR3 for alpha chain variable domain of TCR clone 362537 (TRAV3, TRAJ5)
CAVRDLDTGRRELLL

SEQ ID NO: 725074 - protein, 15 aa, Homo sapiens
  CDR3 for beta chain variable domain of TCR clone 362537 (TRBV20-1, TRBJ2-1)
CSARSPGGPGNEQFF

SEQ ID NO: 725075 - protein, 13 aa, Homo sapiens
  CDR3 for alpha chain variable domain of TCR clone 362538 (TRAV13-2, TRAJ40)
CAETLSGTYTYIF

SEQ ID NO: 725076 - protein, 16 aa, Homo sapiens
  CDR3 for beta chain variable domain of TCR clone 362538 (TRBV20-1, TRBJ2-1)
CSARDFSGRIGDEQFF

SEQ ID NO: 725077 - protein, 17 aa, Homo sapiens
  CDR3 for alpha chain variable domain of TCR clone 362539 (TRAV12-1, TRAJ42)
CVVMRRNDGGSQGNLIF

SEQ ID NO: 725078 - protein, 13 aa, Homo sapiens
  CDR3 for beta chain variable domain of TCR clone 362539 (TRBV7-2, TRBJ1-1)
CASSLARPDDAFF

SEQ ID NO: 725079 - protein, 17 aa, Homo sapiens
  CDR3 for alpha chain variable domain of TCR clone 362540 (TRAV13-1, TRAJ52)
CAASSGAGGTSYGKLTF

SEQ ID NO: 725080 - protein, 17 aa, Homo sapiens
  CDR3 for beta chain variable domain of TCR clone 362540 (TRBV11-2, TRBJ2-1)
CDSSLYPPGVEYNEQFF

SEQ ID NO: 725081 - protein, 12 aa, Homo sapiens
  CDR3 for alpha chain variable domain of TCR clone 362541 (TRAV25, TRAJ20)
CAGRSNDYKLSF

SEQ ID NO: 725082 - protein, 15 aa, Homo sapiens
  CDR3 for beta chain variable domain of TCR clone 362541 (TRBV7-6, TRBJ2-7)
CASSGRRRTFGEQYF

SEQ ID NO: 725083 - protein, 14 aa, Homo sapiens
  CDR3 for alpha chain variable domain of TCR clone 362542 (TRAV13-1, TRAJ26)
CAASRGNYGQNFVF

SEQ ID NO: 725084 - protein, 13 aa, Homo sapiens
  CDR3 for beta chain variable domain of TCR clone 362542 (TRBV7-9, TRBJ1-2)
CASSLKQNYGYTF

SEQ ID NO: 725085 - protein, 13 aa, Homo sapiens
  CDR3 for alpha chain variable domain of TCR clone 362543 (TRAV20, TRAJ37)
CAGCSSNTGKLIF

SEQ ID NO: 725086 - protein, 13 aa, Homo sapiens
  CDR3 for beta chain variable domain of TCR clone 362543 (TRBV18, TRBJ1-1)
CASSPGRNTEAFF

SEQ ID NO: 725087 - protein, 14 aa, Homo sapiens
  CDR3 for alpha chain variable domain of TCR clone 362544 (TRAV2, TRAJ8)
CAGRGNTGFQKLVF

SEQ ID NO: 725088 - protein, 20 aa, Homo sapiens
  CDR3 for beta chain variable domain of TCR clone 362544 (TRBV7-8, TRBJ2-2)
CASSHLFPGPTIHITGELFF

SEQ ID NO: 725089 - protein, 15 aa, Homo sapiens
  CDR3 for alpha chain variable domain of TCR clone 362545 (TRAV8-3, TRAJ27)
CAVGPSKTNAGESTF

SEQ ID NO: 725090 - protein, 13 aa, Homo sapiens
  CDR3 for beta chain variable domain of TCR clone 362545 (TRBV20-1, TRBJ1-1)
CSAPLGGGTEAFF

SEQ ID NO: 725091 - protein, 16 aa, Homo sapiens
  CDR3 for alpha chain variable domain of TCR clone 362546 (TRAV3, TRAJ21)
CAVRDIERGNFNKFYF

SEQ ID NO: 725092 - protein, 14 aa, Homo sapiens
  CDR3 for beta chain variable domain of TCR clone 362546 (TRBV4-3, TRBJ1-5)
CASSQGGQGWPQHF

SEQ ID NO: 725093 - protein, 17 aa, Homo sapiens
  CDR3 for alpha chain variable domain of TCR clone 362547 (TRAV3, TRAJ6)
CAVRHGPRAGGSSIPPF

SEQ ID NO: 725094 - protein, 14 aa, Homo sapiens
  CDR3 for beta chain variable domain of TCR clone 362547 (TRBV7-2, TRBJ2-7)
CASSPKTSFYEQYF

SEQ ID NO: 725095 - protein, 12 aa, Homo sapiens
  CDR3 for alpha chain variable domain of TCR clone 362548 (TRAV36/DV7, TRAJ54)
CAVVRGAQKPVF

SEQ ID NO: 725096 - protein, 15 aa, Homo sapiens
  CDR3 for beta chain variable domain of TCR clone 362548 (TRBV6-1, TRBJ2-1)
CASSELRGQYNEQFF

SEQ ID NO: 725097 - protein, 11 aa, Homo sapiens
  CDR3 for alpha chain variable domain of TCR clone 362549 (TRAV12-3, TRAJ27)
CAIANAGKSTF

SEQ ID NO: 725098 - protein, 13 aa, Homo sapiens
  CDR3 for beta chain variable domain of TCR clone 362549 (TRBV20-1, TRBJ1-1)
CSARAGGNTEAFF

SEQ ID NO: 725099 - protein, 12 aa, Homo sapiens
  CDR3 for alpha chain variable domain of TCR clone 362550 (TRAV12-1, TRAJ40)
CVVHSGTYKYTF

SEQ ID NO: 725100 - protein, 18 aa, Homo sapiens
  CDR3 for beta chain variable domain of TCR clone 362550 (TRBV11-2, TRBJ2-3)
CASSLGGASRGAPNTQYF

SEQ ID NO: 725101 - protein, 11 aa, Homo sapiens
  CDR3 for alpha chain variable domain of TCR clone 362551 (TRAV17, TRAJ9)
CATTGGFKTIF

SEQ ID NO: 725102 - protein, 14 aa, Homo sapiens
  CDR3 for beta chain variable domain of TCR clone 362551 (TRBV7-9, TRBJ2-2)
CASSGRADTGELFL

SEQ ID NO: 725103 - protein, 14 aa, Homo sapiens
  CDR3 for alpha chain variable domain of TCR clone 362552 (TRAV20, TRAJ42)
CAVQAGGSQGNHIF

SEQ ID NO: 725104 - protein, 14 aa, Homo sapiens
  CDR3 for beta chain variable domain of TCR clone 362552 (TRBV28, TRBJ1-2)
CASRIQGANYGYSF

SEQ ID NO: 725105 - protein, 12 aa, Homo sapiens
  CDR3 for alpha chain variable domain of TCR clone 362553 (TRAV29/DV5, TRAJ49)
CAATDTGNQFYF

SEQ ID NO: 725106 - protein, 15 aa, Homo sapiens
  CDR3 for beta chain variable domain of TCR clone 362553 (TRBV11-3, TRBJ2-3)
CASLKDGREGDTQYF

SEQ ID NO: 725107 - protein, 13 aa, Homo sapiens
  CDR3 for alpha chain variable domain of TCR clone 362554 (TRAV21, TRAJ20)
CAVGLRVDYKLSF

SEQ ID NO: 725108 - protein, 10 aa, Homo sapiens
  CDR3 for beta chain variable domain of TCR clone 362554 (TRBV28, TRBJ2-7)
RASGVYEQYF

SEQ ID NO: 725109 - protein, 13 aa, Homo sapiens
  CDR3 for alpha chain variable domain of TCR clone 362555 (TRAV29/DV5, TRAJ37)
CAAVPGNTGKLIF

SEQ ID NO: 725110 - protein, 13 aa, Homo sapiens
  CDR3 for beta chain variable domain of TCR clone 362555 (TRBV28, TRBJ2-7)
CASSPTVKREQYF

SEQ ID NO: 725111 - protein, 13 aa, Homo sapiens
  CDR3 for alpha chain variable domain of TCR clone 362556 (TRAV30, TRAJ31)
CGTEITNNARLMF

SEQ ID NO: 725112 - protein, 13 aa, Homo sapiens
  CDR3 for beta chain variable domain of TCR clone 362556 (TRBV12-5, TRBJ2-3)
CASGDRQSDTRYF

SEQ ID NO: 725113 - protein, 19 aa, Homo sapiens
  CDR3 for alpha chain variable domain of TCR clone 362557 (TRAV16, TRAJ40)
CITVLSMRPTTSGTYTYIF

SEQ ID NO: 725114 - protein, 12 aa, Homo sapiens
  CDR3 for beta chain variable domain of TCR clone 362557 (TRBV7-3, TRBJ2-3)
CASSSLTDTQYF

SEQ ID NO: 725115 - protein, 13 aa, Homo sapiens
  CDR3 for alpha chain variable domain of TCR clone 362558 (TRAV22, TRAJ29)
CAVGGSGNTPLVF

SEQ ID NO: 725116 - protein, 15 aa, Homo sapiens
  CDR3 for beta chain variable domain of TCR clone 362558 (TRBV7-2, TRBJ2-7)
CASSLALGSAYEQYF

SEQ ID NO: 725117 - protein, 17 aa, Homo sapiens
  CDR3 for alpha chain variable domain of TCR clone 362559 (TRAV8-3, TRAJ52)
CAVGAEAGGTSYGKLTF

SEQ ID NO: 725118 - protein, 17 aa, Homo sapiens
  CDR3 for beta chain variable domain of TCR clone 362559 (TRBV7-9, TRBJ2-1)
CASSLVASYPSYNEQFF

SEQ ID NO: 725119 - protein, 13 aa, Homo sapiens
  CDR3 for alpha chain variable domain of TCR clone 362560 (TRAV6, TRAJ4)
CALLRGGYNKLIL

SEQ ID NO: 725120 - protein, 16 aa, Homo sapiens
  CDR3 for beta chain variable domain of TCR clone 362560 (TRBV5-1, TRBJ2-1)
CASSIRSGGSYNEQFF

SEQ ID NO: 725121 - protein, 13 aa, Homo sapiens
  CDR3 for alpha chain variable domain of TCR clone 362561 (TRAV20, TRAJ37)
CAGCSSNTGKLIL

SEQ ID NO: 725122 - protein, 14 aa, Homo sapiens
  CDR3 for beta chain variable domain of TCR clone 362561 (TRBV20-1, TRBJ2-5)
CSARDGRAGETQYF

SEQ ID NO: 725123 - protein, 13 aa, Homo sapiens
  CDR3 for alpha chain variable domain of TCR clone 362562 (TRAV2, TRAJ40)
CAVVTSGTYKYIF

SEQ ID NO: 725124 - protein, 16 aa, Homo sapiens
  CDR3 for beta chain variable domain of TCR clone 362562 (TRBV7-2, TRBJ2-6)
CAILSGVSSGANVLTF

SEQ ID NO: 725125 - protein, 12 aa, Homo sapiens
  CDR3 for alpha chain variable domain of TCR clone 362563 (TRAV9-2, TRAJ20)
CALSEGDYKLSF

SEQ ID NO: 725126 - protein, 14 aa, Homo sapiens
  CDR3 for beta chain variable domain of TCR clone 362563 (TRBV19, TRBJ1-2)
CASSLQGQAYGYTF

SEQ ID NO: 725127 - protein, 14 aa, Homo sapiens
  CDR3 for alpha chain variable domain of TCR clone 362564 (TRAV1-2, TRAJ16)
CAVNRFSDGQKLLF

SEQ ID NO: 725128 - protein, 14 aa, Homo sapiens
  CDR3 for beta chain variable domain of TCR clone 362564 (TRBV15, TRBJ2-3)
CATRSGTSTDTLYF

SEQ ID NO: 725129 - protein, 14 aa, Homo sapiens
  CDR3 for alpha chain variable domain of TCR clone 362565 (TRAV2, TRAJ9)
CAVEDRSGGFKTIL

SEQ ID NO: 725130 - protein, 14 aa, Homo sapiens
  CDR3 for beta chain variable domain of TCR clone 362565 (TRBV18, TRBJ1-5)
CASSRQQRNQPQHF

SEQ ID NO: 725131 - protein, 16 aa, Homo sapiens
  CDR3 for alpha chain variable domain of TCR clone 362566 (TRAV30, TRAJ24)
CGTEIVDADSWGKFKF

SEQ ID NO: 725132 - protein, 13 aa, Homo sapiens
  CDR3 for beta chain variable domain of TCR clone 362566 (TRBV24-1, TRBJ2-2)
CATSDWSTGELFF

SEQ ID NO: 725133 - protein, 12 aa, Homo sapiens
  CDR3 for alpha chain variable domain of TCR clone 362567 (TRAV3, TRAJ43)
CAVRDPYNDMRF

SEQ ID NO: 725134 - protein, 15 aa, Homo sapiens
  CDR3 for beta chain variable domain of TCR clone 362567 (TRBV4-3, TRBJ2-7)
CASSQGDWGDYEQYF

SEQ ID NO: 725135 - protein, 15 aa, Homo sapiens
  CDR3 for alpha chain variable domain of TCR clone 362568 (TRAV26-1, TRAJ27)
CIVRVLTPMQANRPL

SEQ ID NO: 725136 - protein, 13 aa, Homo sapiens
  CDR3 for beta chain variable domain of TCR clone 362568 (TRBV20-1, TRBJ2-7)
CSATHTSGYEQYF

SEQ ID NO: 725137 - protein, 14 aa, Homo sapiens
  CDR3 for alpha chain variable domain of TCR clone 362569 (TRAV36/DV7, TRAJ44)
CCGANTGTASKLTF

SEQ ID NO: 725138 - protein, 13 aa, Homo sapiens
  CDR3 for beta chain variable domain of TCR clone 362569 (TRBV4-1, TRBJ2-1)
CASSQAGGDEQFF

SEQ ID NO: 725139 - protein, 14 aa, Homo sapiens
  CDR3 for alpha chain variable domain of TCR clone 362570 (TRAV17, TRAJ22)
CATSPSGSARQLTF

SEQ ID NO: 725140 - protein, 16 aa, Homo sapiens
  CDR3 for beta chain variable domain of TCR clone 362570 (TRBV10-3, TRBJ2-1)
CAISGVGDGGGGEQFF

SEQ ID NO: 725141 - protein, 14 aa, Homo sapiens
  CDR3 for alpha chain variable domain of TCR clone 362571 (TRAV12-3, TRAJ13)
CAPYPSGGYQKVTF

SEQ ID NO: 725142 - protein, 14 aa, Homo sapiens
  CDR3 for beta chain variable domain of TCR clone 362571 (TRBV7-2, TRBJ2-7)
CASRSQGAAYEQYF

SEQ ID NO: 725143 - protein, 16 aa, Homo sapiens
  CDR3 for alpha chain variable domain of TCR clone 362572 (TRAV35, TRAJ54)
SDVGIYPLQGAQKLVF

SEQ ID NO: 725144 - protein, 13 aa, Homo sapiens
  CDR3 for beta chain variable domain of TCR clone 362572 (TRBV4-1, TRBJ2-1)
CASSQEVQYEQFF

SEQ ID NO: 725145 - protein, 14 aa, Homo sapiens
  CDR3 for alpha chain variable domain of TCR clone 362573 (TRAV12-1, TRAJ12)
RVVNGRDSSYKLIF

SEQ ID NO: 725146 - protein, 13 aa, Homo sapiens
  CDR3 for beta chain variable domain of TCR clone 362573 (TRBV28, TRBJ2-2)
CASIRESTGELFF

SEQ ID NO: 725147 - protein, 17 aa, Homo sapiens
  CDR3 for alpha chain variable domain of TCR clone 362574 (TRAV17, TRAJ7)
CATLGRLAFGNGNQVVV

SEQ ID NO: 725148 - protein, 13 aa, Homo sapiens
  CDR3 for beta chain variable domain of TCR clone 362574 (TRBV12-4, TRBJ2-7)
CASSLERVREQYF

SEQ ID NO: 725149 - protein, 16 aa, Homo sapiens
  CDR3 for alpha chain variable domain of TCR clone 362575 (TRAV30, TRAJ24)
CGTEFGDADSWGKFQF

SEQ ID NO: 725150 - protein, 15 aa, Homo sapiens
  CDR3 for beta chain variable domain of TCR clone 362575 (TRBV9, TRBJ1-6)
CASSVAGTGDSPLHF

SEQ ID NO: 725151 - protein, 15 aa, Homo sapiens
  CDR3 for alpha chain variable domain of TCR clone 362576 (TRAV3, TRAJ5)
CAVRDRKTGRRALTF

SEQ ID NO: 725152 - protein, 15 aa, Homo sapiens
  CDR3 for beta chain variable domain of TCR clone 362576 (TRBV7-8, TRBJ2-1)
CASSLADSLNNEQFF

SEQ ID NO: 725153 - protein, 12 aa, Homo sapiens
  CDR3 for alpha chain variable domain of TCR clone 362577 (TRAV2, TRAJ37)
SAVTMNTGKLIF

SEQ ID NO: 725154 - protein, 15 aa, Homo sapiens
  CDR3 for beta chain variable domain of TCR clone 362577 (TRBV5-1, TRBJ2-5)
CASSFGGPPQETQYF

SEQ ID NO: 725155 - protein, 16 aa, Homo sapiens
  CDR3 for alpha chain variable domain of TCR clone 362578 (TRAV21, TRAJ3)
SLVTQPPTPGASKIIF

SEQ ID NO: 725156 - protein, 16 aa, Homo sapiens
  CDR3 for beta chain variable domain of TCR clone 362578 (TRBV20-1, TRBJ2-5)
CSPGGTSGGYMETQYF

SEQ ID NO: 725157 - protein, 18 aa, Homo sapiens
  CDR3 for alpha chain variable domain of TCR clone 362579 (TRAV21, TRAJ52)
CAVRPSPAGGTGYGKLTF

SEQ ID NO: 725158 - protein, 16 aa, Homo sapiens
  CDR3 for beta chain variable domain of TCR clone 362579 (TRBV20-1, TRBJ2-7)
CSARGSVVADIYEQYF

SEQ ID NO: 725159 - protein, 10 aa, Homo sapiens
  CDR3 for alpha chain variable domain of TCR clone 362580 (TRAV23/DV6, TRAJ57)
CAASSTLSQG

SEQ ID NO: 725160 - protein, 12 aa, Homo sapiens
  CDR3 for beta chain variable domain of TCR clone 362580 (TRBV12-4, TRBJ1-3)
CASSFSGNTIYF

SEQ ID NO: 725161 - protein, 12 aa, Homo sapiens
  CDR3 for alpha chain variable domain of TCR clone 362581 (TRAV13-1, TRAJ21)
CAAKEGFNKFYF

SEQ ID NO: 725162 - protein, 17 aa, Homo sapiens
  CDR3 for beta chain variable domain of TCR clone 362581 (TRBV19, TRBJ2-7)
CAGSISFYDSYPYEQYF

SEQ ID NO: 725163 - protein, 14 aa, Homo sapiens
  CDR3 for alpha chain variable domain of TCR clone 362582 (TRAV27, TRAJ15)
CAGFDNQAGTALIF

SEQ ID NO: 725164 - protein, 15 aa, Homo sapiens
  CDR3 for beta chain variable domain of TCR clone 362582 (TRBV9, TRBJ1-6)
CASSVAGTGDSPLHF

SEQ ID NO: 725165 - protein, 12 aa, Homo sapiens
  CDR3 for alpha chain variable domain of TCR clone 362583 (TRAV21, TRAJ11)
CAATPGYSTLTF

SEQ ID NO: 725166 - protein, 14 aa, Homo sapiens
  CDR3 for beta chain variable domain of TCR clone 362583 (TRBV20-1, TRBJ2-7)
CSAPGLAGVGEQYL

SEQ ID NO: 725167 - protein, 14 aa, Homo sapiens
  CDR3 for alpha chain variable domain of TCR clone 362584 (TRAV12-3, TRAJ33)
CAMSVPGSNYQLIW

SEQ ID NO: 725168 - protein, 15 aa, Homo sapiens
  CDR3 for beta chain variable domain of TCR clone 362584 (TRBV7-9, TRBJ2-1)
CASSLGWGRANEQFF

SEQ ID NO: 725169 - protein, 12 aa, Homo sapiens
  CDR3 for alpha chain variable domain of TCR clone 362585 (TRAV1-1, TRAJ29)
CAVISGNTPLVF

SEQ ID NO: 725170 - protein, 15 aa, Homo sapiens
  CDR3 for beta chain variable domain of TCR clone 362585 (TRBV20-1, TRBJ2-7)
CSARDRVSGMDERYF

SEQ ID NO: 725171 - protein, 15 aa, Homo sapiens
  CDR3 for alpha chain variable domain of TCR clone 362586 (TRAV3, TRAJ13)
CAVRVYSGGYQRVTF

SEQ ID NO: 725172 - protein, 15 aa, Homo sapiens
  CDR3 for beta chain variable domain of TCR clone 362586 (TRBV5-7, TRBJ1-2)
CASSLGVAANYGDTL

SEQ ID NO: 725173 - protein, 12 aa, Homo sapiens
  CDR3 for alpha chain variable domain of TCR clone 362587 (TRAV35, TRAJ39)
LAPNNAGNMLTF

SEQ ID NO: 725174 - protein, 16 aa, Homo sapiens
  CDR3 for beta chain variable domain of TCR clone 362587 (TRBV2, TRBJ2-3)
CASSTWGEGVTDTQYF

SEQ ID NO: 725175 - protein, 11 aa, Homo sapiens
  CDR3 for alpha chain variable domain of TCR clone 362588 (TRAV17, TRAJ9)
CATTGGFKTIF

SEQ ID NO: 725176 - protein, 14 aa, Homo sapiens
  CDR3 for beta chain variable domain of TCR clone 362588 (TRBV7-6, TRBJ2-7)
CASSLFQDSYEQYF

SEQ ID NO: 725177 - protein, 13 aa, Homo sapiens
  CDR3 for alpha chain variable domain of TCR clone 362589 (TRAV8-3, TRAJ48)
CAVVPFGNGKLTF

SEQ ID NO: 725178 - protein, 14 aa, Homo sapiens
  CDR3 for beta chain variable domain of TCR clone 362589 (TRBV12-5, TRBJ2-5)
CASGSRTHQETQYF

SEQ ID NO: 725179 - protein, 15 aa, Homo sapiens
  CDR3 for alpha chain variable domain of TCR clone 362590 (TRAV27, TRAJ50)
CAGRERGTTYDKVIF

SEQ ID NO: 725180 - protein, 16 aa, Homo sapiens
  CDR3 for beta chain variable domain of TCR clone 362590 (TRBV10-3, TRBJ1-5)
CAISDQVGAPNQPQHF

SEQ ID NO: 725181 - protein, 14 aa, Homo sapiens
  CDR3 for alpha chain variable domain of TCR clone 362591 (TRAV20, TRAJ56)
CAVQFGGANSKLTF

SEQ ID NO: 725182 - protein, 15 aa, Homo sapiens
  CDR3 for beta chain variable domain of TCR clone 362591 (TRBV9, TRBJ2-1)
CASSLAGSSYNEQFF

SEQ ID NO: 725183 - protein, 12 aa, Homo sapiens
  CDR3 for alpha chain variable domain of TCR clone 362592 (TRAV1-1, TRAJ20)
CAVREDDYKLSF

SEQ ID NO: 725184 - protein, 14 aa, Homo sapiens
  CDR3 for beta chain variable domain of TCR clone 362592 (TRBV7-9, TRBJ2-5)
CASSLDTAQETQYF

SEQ ID NO: 725185 - protein, 16 aa, Homo sapiens
  CDR3 for alpha chain variable domain of TCR clone 362593 (TRAV20, TRAJ38)
CAVQASNAGNNRKPSW

SEQ ID NO: 725186 - protein, 16 aa, Homo sapiens
  CDR3 for beta chain variable domain of TCR clone 362593 (TRBV7-8, TRBJ2-6)
CASRVGDSSGANVLTF

SEQ ID NO: 725187 - protein, 15 aa, Homo sapiens
  CDR3 for alpha chain variable domain of TCR clone 362594 (TRAV12-1, TRAJ4)
CVVTPWMGGYNKLIF

SEQ ID NO: 725188 - protein, 14 aa, Homo sapiens
  CDR3 for beta chain variable domain of TCR clone 362594 (TRBV7-2, TRBJ2-7)
CASRSQGAAYEQYF

SEQ ID NO: 725189 - protein, 13 aa, Homo sapiens
  CDR3 for alpha chain variable domain of TCR clone 362595 (TRAV12-3, TRAJ40)
CAMSDSGTYKYIF

SEQ ID NO: 725190 - protein, 17 aa, Homo sapiens
  CDR3 for beta chain variable domain of TCR clone 362595 (TRBV13, TRBJ2-3)
CASSLSRVAGGRNTQYF

SEQ ID NO: 725191 - protein, 16 aa, Homo sapiens
  CDR3 for alpha chain variable domain of TCR clone 362596 (TRAV30, TRAJ24)
CGTEIVDADSWGKFQF

SEQ ID NO: 725192 - protein, 14 aa, Homo sapiens
  CDR3 for beta chain variable domain of TCR clone 362596 (TRBV9, TRBJ2-2)
CASSSRPYTGELFF

SEQ ID NO: 725193 - protein, 20 aa, Homo sapiens
  CDR3 for alpha chain variable domain of TCR clone 362597 (TRAV12-2, TRAJ52)
SPVIQPPARAGGTSYGKLTF

SEQ ID NO: 725194 - protein, 16 aa, Homo sapiens
  CDR3 for beta chain variable domain of TCR clone 362597 (TRBV15, TRBJ1-2)
CATSRGPRTGGGGFTF

SEQ ID NO: 725195 - protein, 14 aa, Homo sapiens
  CDR3 for alpha chain variable domain of TCR clone 362598 (TRAV1-2, TRAJ8)
CAVREDTGFQKLVF

SEQ ID NO: 725196 - protein, 12 aa, Homo sapiens
  CDR3 for beta chain variable domain of TCR clone 362598 (TRBV29-1, TRBJ2-3)
CSVTGGADMQYF

SEQ ID NO: 725197 - protein, 10 aa, Homo sapiens
  CDR3 for alpha chain variable domain of TCR clone 362599 (TRAV21, TRAJ31)
CAVDNARRMF

SEQ ID NO: 725198 - protein, 13 aa, Homo sapiens
  CDR3 for beta chain variable domain of TCR clone 362599 (TRBV4-1, TRBJ1-1)
CASSRKMNTEALF

SEQ ID NO: 725199 - protein, 12 aa, Homo sapiens
  CDR3 for alpha chain variable domain of TCR clone 362600 (TRAV23/DV6, TRAJ31)
CAARRIGARLMF

SEQ ID NO: 725200 - protein, 13 aa, Homo sapiens
  CDR3 for beta chain variable domain of TCR clone 362600 (TRBV28, TRBJ2-7)
CASKAGGVYKQYF

SEQ ID NO: 725201 - protein, 16 aa, Homo sapiens
  CDR3 for alpha chain variable domain of TCR clone 362601 (TRAV3, TRAJ10)
FAVRDMRAGGGNKLTF

SEQ ID NO: 725202 - protein, 17 aa, Homo sapiens
  CDR3 for beta chain variable domain of TCR clone 362601 (TRBV20-1, TRBJ2-2)
CSASGSGQGGLTGELFF

SEQ ID NO: 725203 - protein, 17 aa, Homo sapiens
  CDR3 for alpha chain variable domain of TCR clone 362602 (TRAV12-3, TRAJ4)
CAMTGAGTRLAVQQYIQ

SEQ ID NO: 725204 - protein, 14 aa, Homo sapiens
  CDR3 for beta chain variable domain of TCR clone 362602 (TRBV10-3, TRBJ1-1)
CAISDTDRGVEAFF

SEQ ID NO: 725205 - protein, 12 aa, Homo sapiens
  CDR3 for alpha chain variable domain of TCR clone 362603 (TRAV3, TRAJ26)
CSVRDYGQNFVF

SEQ ID NO: 725206 - protein, 16 aa, Homo sapiens
  CDR3 for beta chain variable domain of TCR clone 362603 (TRBV11-2, TRBJ1-2)
CASSPSGREANYGYTF

SEQ ID NO: 725207 - protein, 14 aa, Homo sapiens
  CDR3 for alpha chain variable domain of TCR clone 362604 (TRAV1-2, TRAJ8)
CAVREDTGFQKLVF

SEQ ID NO: 725208 - protein, 15 aa, Homo sapiens
  CDR3 for beta chain variable domain of TCR clone 362604 (TRBV12-4, TRBJ2-1)
CASSPLSGRNSEQFF

SEQ ID NO: 725209 - protein, 17 aa, Homo sapiens
  CDR3 for alpha chain variable domain of TCR clone 362605 (TRAV4, TRAJ42)
CLVGVLNYGGSHGNLIF

SEQ ID NO: 725210 - protein, 12 aa, Homo sapiens
  CDR3 for beta chain variable domain of TCR clone 362605 (TRBV20-1, TRBJ2-1)
CSAQYPYNEQFF

SEQ ID NO: 725211 - protein, 14 aa, Homo sapiens
  CDR3 for alpha chain variable domain of TCR clone 362606 (TRAV8-3, TRAJ9)
CAVVYNTGGFKTIF

SEQ ID NO: 725212 - protein, 18 aa, Homo sapiens
  CDR3 for beta chain variable domain of TCR clone 362606 (TRBV20-1, TRBJ2-3)
CSASGLAGGPGTTDTQYF

SEQ ID NO: 725213 - protein, 16 aa, Homo sapiens
  CDR3 for alpha chain variable domain of TCR clone 362607 (TRAV13-2, TRAJ32)
CAENMNYGGATNKLIF

SEQ ID NO: 725214 - protein, 14 aa, Homo sapiens
  CDR3 for beta chain variable domain of TCR clone 362607 (TRBV15, TRBJ2-5)
CATSSTEYQETQYF

SEQ ID NO: 725215 - protein, 12 aa, Homo sapiens
  CDR3 for alpha chain variable domain of TCR clone 362608 (TRAV13-1, TRAJ21)
CAAKEGFNKLYF

SEQ ID NO: 725216 - protein, 20 aa, Homo sapiens
  CDR3 for beta chain variable domain of TCR clone 362608 (TRBV28, TRBJ2-1)
CASTPIGRSPGLAGGNEQFF

SEQ ID NO: 725217 - protein, 13 aa, Homo sapiens
  CDR3 for alpha chain variable domain of TCR clone 362609 (TRAV20, TRAJ37)
CAGCSSNTGKQIF

SEQ ID NO: 725218 - protein, 14 aa, Homo sapiens
  CDR3 for beta chain variable domain of TCR clone 362609 (TRBV7-2, TRBJ2-7)
CASSPKTSFYEQYF

SEQ ID NO: 725219 - protein, 11 aa, Homo sapiens
  CDR3 for alpha chain variable domain of TCR clone 362610 (TRAV12-1, TRAJ30)
CVVNGQDKIIF

SEQ ID NO: 725220 - protein, 14 aa, Homo sapiens
  CDR3 for beta chain variable domain of TCR clone 362610 (TRBV24-1, TRBJ2-7)
VTTPWDQLYYEQYF

SEQ ID NO: 725221 - protein, 13 aa, Homo sapiens
  CDR3 for alpha chain variable domain of TCR clone 362611 (TRAV8-6, TRAJ40)
CAVRVTGTYKYIF

SEQ ID NO: 725222 - protein, 15 aa, Homo sapiens
  CDR3 for beta chain variable domain of TCR clone 362611 (TRBV4-1, TRBJ2-3)
CASGRGQGIPDTQYF

SEQ ID NO: 725223 - protein, 11 aa, Homo sapiens
  CDR3 for alpha chain variable domain of TCR clone 362612 (TRAV1-2, TRAJ20)
CAVSNDYKLSF

SEQ ID NO: 725224 - protein, 14 aa, Homo sapiens
  CDR3 for beta chain variable domain of TCR clone 362612 (TRBV7-9, TRBJ1-2)
CASSRQGANYGYTF

SEQ ID NO: 725225 - protein, 15 aa, Homo sapiens
  CDR3 for alpha chain variable domain of TCR clone 362613 (TRAV26-1, TRAJ37)
CIVKTGSSKTGKLIF

SEQ ID NO: 725226 - protein, 12 aa, Homo sapiens
  CDR3 for beta chain variable domain of TCR clone 362613 (TRBV7-8, TRBJ2-7)
CASSLGDREQYF

SEQ ID NO: 725227 - protein, 12 aa, Homo sapiens
  CDR3 for alpha chain variable domain of TCR clone 362614 (TRAV1-1, TRAJ12)
CAVGDSSYKLIF

SEQ ID NO: 725228 - protein, 14 aa, Homo sapiens
  CDR3 for beta chain variable domain of TCR clone 362614 (TRBV20-1, TRBJ2-7)
CSAPELAGVGEQFF

SEQ ID NO: 725229 - protein, 16 aa, Homo sapiens
  CDR3 for alpha chain variable domain of TCR clone 362615 (TRAV4, TRAJ22)
CLVGDLYSGSARQLTF

SEQ ID NO: 725230 - protein, 13 aa, Homo sapiens
  CDR3 for beta chain variable domain of TCR clone 362615 (TRBV12-4, TRBJ2-5)
CASRLAVQETQYF

SEQ ID NO: 725231 - protein, 16 aa, Homo sapiens
  CDR3 for alpha chain variable domain of TCR clone 362616 (TRAV1-2, TRAJ10)
CAVRGVLTGGGNKLTF

SEQ ID NO: 725232 - protein, 16 aa, Homo sapiens
  CDR3 for beta chain variable domain of TCR clone 362616 (TRBV24-1, TRBJ2-3)
CATSEAISGITDTQYF

SEQ ID NO: 725233 - protein, 14 aa, Homo sapiens
  CDR3 for alpha chain variable domain of TCR clone 362617 (TRAV12-1, TRAJ30)
CVPTGTNRDDKIIF

SEQ ID NO: 725234 - protein, 11 aa, Homo sapiens
  CDR3 for beta chain variable domain of TCR clone 362617 (TRBV4-1, TRBJ2-2)
CASGHTGELFF

SEQ ID NO: 725235 - protein, 14 aa, Homo sapiens
  CDR3 for alpha chain variable domain of TCR clone 362618 (TRAV9-2, TRAJ39)
CALYIYNAGNMLTF

SEQ ID NO: 725236 - protein, 13 aa, Homo sapiens
  CDR3 for beta chain variable domain of TCR clone 362618 (TRBV5-5, TRBJ1-5)
CASSLGIGGDQHF

SEQ ID NO: 725237 - protein, 13 aa, Homo sapiens
  CDR3 for alpha chain variable domain of TCR clone 362619 (TRAV3, TRAJ21)
CAVREPDFNKFYF

SEQ ID NO: 725238 - protein, 15 aa, Homo sapiens
  CDR3 for beta chain variable domain of TCR clone 362619 (TRBV27, TRBJ2-5)
CASSLIPSGGETQYF

SEQ ID NO: 725239 - protein, 12 aa, Homo sapiens
  CDR3 for alpha chain variable domain of TCR clone 362620 (TRAV12-3, TRAJ17)
CAMTLTGNTLTF

SEQ ID NO: 725240 - protein, 15 aa, Homo sapiens
  CDR3 for beta chain variable domain of TCR clone 362620 (TRBV6-4, TRBJ2-7)
CASSDQGPPNYEQYF

SEQ ID NO: 725241 - protein, 15 aa, Homo sapiens
  CDR3 for alpha chain variable domain of TCR clone 362621 (TRAV26-1, TRAJ39)
CIVRVARNAGNMLTF

SEQ ID NO: 725242 - protein, 16 aa, Homo sapiens
  CDR3 for beta chain variable domain of TCR clone 362621 (TRBV5-1, TRBJ2-1)
CASSLTLAGGRNEQFF

SEQ ID NO: 725243 - protein, 15 aa, Homo sapiens
  CDR3 for alpha chain variable domain of TCR clone 362622 (TRAV8-3, TRAJ21)
CAVGALPPRGYKFYF

SEQ ID NO: 725244 - protein, 18 aa, Homo sapiens
  CDR3 for beta chain variable domain of TCR clone 362622 (TRBV25-1, TRBJ1-2)
CASSGPQNGQGLIFGYTF

SEQ ID NO: 725245 - protein, 10 aa, Homo sapiens
  CDR3 for alpha chain variable domain of TCR clone 362623 (TRAV12-1, TRAJ43)
CVVHNNDMRF

SEQ ID NO: 725246 - protein, 18 aa, Homo sapiens
  CDR3 for beta chain variable domain of TCR clone 362623 (TRBV11-3, TRBJ2-2)
CASTLRRGEAGNTGELFF

SEQ ID NO: 725247 - protein, 16 aa, Homo sapiens
  CDR3 for alpha chain variable domain of TCR clone 362624 (TRAV12-3, TRAJ28)
RAMRANSGAGSYQLTF

SEQ ID NO: 725248 - protein, 14 aa, Homo sapiens
  CDR3 for beta chain variable domain of TCR clone 362624 (TRBV7-9, TRBJ2-1)
CASSPRDSLYEQFF

SEQ ID NO: 725249 - protein, 15 aa, Homo sapiens
  CDR3 for alpha chain variable domain of TCR clone 362625 (TRAV3, TRAJ3)
CAVRDGHSSASKIIF

SEQ ID NO: 725250 - protein, 14 aa, Homo sapiens
  CDR3 for beta chain variable domain of TCR clone 362625 (TRBV12-4, TRBJ2-1)
CASSLRQGASEQFF

SEQ ID NO: 725251 - protein, 14 aa, Homo sapiens
  CDR3 for alpha chain variable domain of TCR clone 362626 (TRAV12-3, TRAJ10)
SHLPLTGGGNKLIF

SEQ ID NO: 725252 - protein, 22 aa, Homo sapiens
  CDR3 for beta chain variable domain of TCR clone 362626 (TRBV6-1, TRBJ1-3)
CASVQGGGWKHHIFWRGKLAHC

SEQ ID NO: 725253 - protein, 15 aa, Homo sapiens
  CDR3 for alpha chain variable domain of TCR clone 362627 (TRAV12-2, TRAJ8)
CAVREENAGFQKLVF

SEQ ID NO: 725254 - protein, 15 aa, Homo sapiens
  CDR3 for beta chain variable domain of TCR clone 362627 (TRBV28, TRBJ2-4)
CAAGSGTLLMGMQYF

SEQ ID NO: 725255 - protein, 16 aa, Homo sapiens
  CDR3 for alpha chain variable domain of TCR clone 362628 (TRAV3, TRAJ3)
CAVRERAKSSASKIIF

SEQ ID NO: 725256 - protein, 13 aa, Homo sapiens
  CDR3 for beta chain variable domain of TCR clone 362628 (TRBV10-3, TRBJ2-7)
CASKLAVNYEQYF

SEQ ID NO: 725257 - protein, 13 aa, Homo sapiens
  CDR3 for alpha chain variable domain of TCR clone 362629 (TRAV20, TRAJ35)
CAVQEGFGNVLHC

SEQ ID NO: 725258 - protein, 14 aa, Homo sapiens
  CDR3 for beta chain variable domain of TCR clone 362629 (TRBV7-8, TRBJ2-3)
CASSLEAGTDTQYF

SEQ ID NO: 725259 - protein, 12 aa, Homo sapiens
  CDR3 for alpha chain variable domain of TCR clone 362630 (TRAV21, TRAJ11)
CAATSGYITLTF

SEQ ID NO: 725260 - protein, 16 aa, Homo sapiens
  CDR3 for beta chain variable domain of TCR clone 362630 (TRBV28, TRBJ2-2)
CASSLEGGSNTGELFF

SEQ ID NO: 725261 - protein, 12 aa, Homo sapiens
  CDR3 for alpha chain variable domain of TCR clone 362631 (TRAV12-3, TRAJ17)
CAMTLTGNKLTF

SEQ ID NO: 725262 - protein, 17 aa, Homo sapiens
  CDR3 for beta chain variable domain of TCR clone 362631 (TRBV27, TRBJ2-5)
CASRLRPGQGVQETQYF

SEQ ID NO: 725263 - protein, 11 aa, Homo sapiens
  CDR3 for alpha chain variable domain of TCR clone 362632 (TRAV12-1, TRAJ30)
CVVNGQDKIIF

SEQ ID NO: 725264 - protein, 15 aa, Homo sapiens
  CDR3 for beta chain variable domain of TCR clone 362632 (TRBV7-8, TRBJ2-1)
CASSLAGGLYNEQFF

SEQ ID NO: 725265 - protein, 13 aa, Homo sapiens
  CDR3 for alpha chain variable domain of TCR clone 362633 (TRAV21, TRAJ27)
CAALNTNAGKSTF

SEQ ID NO: 725266 - protein, 14 aa, Homo sapiens
  CDR3 for beta chain variable domain of TCR clone 362633 (TRBV27, TRBJ1-1)
CASSLFSGLSEAFF

SEQ ID NO: 725267 - protein, 13 aa, Homo sapiens
  CDR3 for alpha chain variable domain of TCR clone 362634 (TRAV12-2, TRAJ50)
CAVIVTSYDKVIF

SEQ ID NO: 725268 - protein, 14 aa, Homo sapiens
  CDR3 for beta chain variable domain of TCR clone 362634 (TRBV7-9, TRBJ2-1)
CASSPRDSLYEQFF

SEQ ID NO: 725269 - protein, 13 aa, Homo sapiens
  CDR3 for alpha chain variable domain of TCR clone 362635 (TRAV21, TRAJ57)
CAATQGGSEKLVF

SEQ ID NO: 725270 - protein, 12 aa, Homo sapiens
  CDR3 for beta chain variable domain of TCR clone 362635 (TRBV5-1, TRBJ1-1)
QLTTGTNTEAFF

SEQ ID NO: 725271 - protein, 15 aa, Homo sapiens
  CDR3 for alpha chain variable domain of TCR clone 362636 (TRAV8-3, TRAJ40)
CAAPSLGSGTYKYIF

SEQ ID NO: 725272 - protein, 13 aa, Homo sapiens
  CDR3 for beta chain variable domain of TCR clone 362636 (TRBV10-3, TRBJ2-7)
CASKRAVNYEQYF

SEQ ID NO: 725273 - protein, 14 aa, Homo sapiens
  CDR3 for alpha chain variable domain of TCR clone 362637 (TRAV8-3, TRAJ11)
CAVGSNSGYSNLTF

SEQ ID NO: 725274 - protein, 14 aa, Homo sapiens
  CDR3 for beta chain variable domain of TCR clone 362637 (TRBV5-1, TRBJ2-7)
CASSLTSGGYEQYF

SEQ ID NO: 725275 - protein, 17 aa, Homo sapiens
  CDR3 for alpha chain variable domain of TCR clone 362638 (TRAV3, TRAJ6)
CAVRDGPRAGGSYIPHF

SEQ ID NO: 725276 - protein, 13 aa, Homo sapiens
  CDR3 for beta chain variable domain of TCR clone 362638 (TRBV19, TRBJ2-7)
CASSIDRTYEQYF

SEQ ID NO: 725277 - protein, 14 aa, Homo sapiens
  CDR3 for alpha chain variable domain of TCR clone 362639 (TRAV21, TRAJ9)
CCGGGGTGGFKTIF

SEQ ID NO: 725278 - protein, 13 aa, Homo sapiens
  CDR3 for beta chain variable domain of TCR clone 362639 (TRBV12-4, TRBJ1-2)
CASSSGPTVISTF

SEQ ID NO: 725279 - protein, 12 aa, Homo sapiens
  CDR3 for alpha chain variable domain of TCR clone 362640 (TRAV26-1, TRAJ43)
CIVRGNNNDMHF

SEQ ID NO: 725280 - protein, 13 aa, Homo sapiens
  CDR3 for beta chain variable domain of TCR clone 362640 (TRBV20-1, TRBJ2-3)
CSAIYPGADTQYF

SEQ ID NO: 725281 - protein, 14 aa, Homo sapiens
  CDR3 for alpha chain variable domain of TCR clone 362641 (TRAV8-3, TRAJ9)
CAVVYNTGGFKTIF

SEQ ID NO: 725282 - protein, 14 aa, Homo sapiens
  CDR3 for beta chain variable domain of TCR clone 362641 (TRBV2, TRBJ1-5)
CASSENRTPSILVM

SEQ ID NO: 725283 - protein, 16 aa, Homo sapiens
  CDR3 for alpha chain variable domain of TCR clone 362642 (TRAV2, TRAJ20)
TTVLWSFRSNDYKLSF

SEQ ID NO: 725284 - protein, 12 aa, Homo sapiens
  CDR3 for beta chain variable domain of TCR clone 362642 (TRBV7-6, TRBJ2-3)
CASSTGADTQYF

SEQ ID NO: 725285 - protein, 16 aa, Homo sapiens
  CDR3 for alpha chain variable domain of TCR clone 362643 (TRAV35, TRAJ28)
CAGQKYSGAGGYQLTF

SEQ ID NO: 725286 - protein, 16 aa, Homo sapiens
  CDR3 for beta chain variable domain of TCR clone 362643 (TRBV7-3, TRBJ2-2)
CASSLKRGTLSGELFF

SEQ ID NO: 725287 - protein, 13 aa, Homo sapiens
  CDR3 for alpha chain variable domain of TCR clone 362644 (TRAV30, TRAJ6)
CGTEAGGSYIPTF

SEQ ID NO: 725288 - protein, 16 aa, Homo sapiens
  CDR3 for beta chain variable domain of TCR clone 362644 (TRBV4-3, TRBJ2-3)
CASSLGLAGAGDTQYF

SEQ ID NO: 725289 - protein, 11 aa, Homo sapiens
  CDR3 for alpha chain variable domain of TCR clone 362645 (TRAV12-3, TRAJ43)
CAMSVSNDMRF

SEQ ID NO: 725290 - protein, 19 aa, Homo sapiens
  CDR3 for beta chain variable domain of TCR clone 362645 (TRBV28, TRBJ2-7)
RASSYSGTSRLGWVYEQYF

SEQ ID NO: 725291 - protein, 13 aa, Homo sapiens
  CDR3 for alpha chain variable domain of TCR clone 362646 (TRAV2, TRAJ29)
CAVYSSGNTPLVF

SEQ ID NO: 725292 - protein, 14 aa, Homo sapiens
  CDR3 for beta chain variable domain of TCR clone 362646 (TRBV7-9, TRBJ1-1)
CASSLGGLKTEAFC

SEQ ID NO: 725293 - protein, 13 aa, Homo sapiens
  CDR3 for alpha chain variable domain of TCR clone 362647 (TRAV12-1, TRAJ33)
CGDAPVSNYQLIW

SEQ ID NO: 725294 - protein, 13 aa, Homo sapiens
  CDR3 for beta chain variable domain of TCR clone 362647 (TRBV7-2, TRBJ2-5)
CASSQTSVETQYF

SEQ ID NO: 725295 - protein, 11 aa, Homo sapiens
  CDR3 for alpha chain variable domain of TCR clone 362648 (TRAV21, TRAJ41)
CAVGSGYALNF

SEQ ID NO: 725296 - protein, 13 aa, Homo sapiens
  CDR3 for beta chain variable domain of TCR clone 362648 (TRBV7-2, TRBJ2-5)
CASSQTSVETQYF

SEQ ID NO: 725297 - protein, 18 aa, Homo sapiens
  CDR3 for alpha chain variable domain of TCR clone 362649 (TRAV1-2, TRAJ18)
CAVRDMGDRGPTLGRLYF

SEQ ID NO: 725298 - protein, 16 aa, Homo sapiens
  CDR3 for beta chain variable domain of TCR clone 362649 (TRBV29-1, TRBJ1-2)
CSVEANRDIANYGYTF

SEQ ID NO: 725299 - protein, 14 aa, Homo sapiens
  CDR3 for alpha chain variable domain of TCR clone 362650 (TRAV2, TRAJ37)
CAVDFTSNTGKLIF

SEQ ID NO: 725300 - protein, 15 aa, Homo sapiens
  CDR3 for beta chain variable domain of TCR clone 362650 (TRBV20-1, TRBJ1-1)
CSDSRGVKGNTEAFF

SEQ ID NO: 725301 - protein, 15 aa, Homo sapiens
  CDR3 for alpha chain variable domain of TCR clone 362651 (TRAV17, TRAJ23)
CATDVEDNQGGKLIF

SEQ ID NO: 725302 - protein, 12 aa, Homo sapiens
  CDR3 for beta chain variable domain of TCR clone 362651 (TRBV2, TRBJ2-1)
CAKREGYNEQFF

SEQ ID NO: 725303 - protein, 12 aa, Homo sapiens
  CDR3 for alpha chain variable domain of TCR clone 362652 (TRAV29/DV5, TRAJ49)
WAATDTGNQFYF

SEQ ID NO: 725304 - protein, 19 aa, Homo sapiens
  CDR3 for beta chain variable domain of TCR clone 362652 (TRBV25-1, TRBJ2-2)
CAILVYRVDRGRKTGELFF

SEQ ID NO: 725305 - protein, 12 aa, Homo sapiens
  CDR3 for alpha chain variable domain of TCR clone 362653 (TRAV21, TRAJ11)
CAATSGYSTLTF

SEQ ID NO: 725306 - protein, 14 aa, Homo sapiens
  CDR3 for beta chain variable domain of TCR clone 362653 (TRBV20-1, TRBJ2-5)
CSAPELAGVGEQYF

SEQ ID NO: 725307 - protein, 13 aa, Homo sapiens
  CDR3 for alpha chain variable domain of TCR clone 362654 (TRAV29/DV5, TRAJ31)
CAASRNNNARLMF

SEQ ID NO: 725308 - protein, 13 aa, Homo sapiens
  CDR3 for beta chain variable domain of TCR clone 362654 (TRBV2, TRBJ2-7)
CASSGAAAYEQYF

SEQ ID NO: 725309 - protein, 18 aa, Homo sapiens
  CDR3 for alpha chain variable domain of TCR clone 362655 (TRAV17, TRAJ45)
CATSLDLYSGGGADGLTF

SEQ ID NO: 725310 - protein, 15 aa, Homo sapiens
  CDR3 for beta chain variable domain of TCR clone 362655 (TRBV5-1, TRBJ2-2)
CASSSQGGNTGELFF

SEQ ID NO: 725311 - protein, 14 aa, Homo sapiens
  CDR3 for alpha chain variable domain of TCR clone 362656 (TRAV26-1, TRAJ45)
CIEVTGGGADGLTF

SEQ ID NO: 725312 - protein, 17 aa, Homo sapiens
  CDR3 for beta chain variable domain of TCR clone 362656 (TRBV24-1, TRBJ2-4)
CATSDAEARGVRNIQYF

SEQ ID NO: 725313 - protein, 12 aa, Homo sapiens
  CDR3 for alpha chain variable domain of TCR clone 362657 (TRAV1-1, TRAJ39)
CAVPVVCNMLTF

SEQ ID NO: 725314 - protein, 16 aa, Homo sapiens
  CDR3 for beta chain variable domain of TCR clone 362657 (TRBV28, TRBJ2-7)
CASSPWVATGDLSQYF

SEQ ID NO: 725315 - protein, 12 aa, Homo sapiens
  CDR3 for alpha chain variable domain of TCR clone 362658 (TRAV12-3, TRAJ17)
CAMTLTGNKLTF

SEQ ID NO: 725316 - protein, 13 aa, Homo sapiens
  CDR3 for beta chain variable domain of TCR clone 362658 (TRBV19, TRBJ2-2)
CAASGRNTGELFF

SEQ ID NO: 725317 - protein, 18 aa, Homo sapiens
  CDR3 for alpha chain variable domain of TCR clone 362659 (TRAV26-2, TRAJ45)
CILSVDKYSGGGADGLTF

SEQ ID NO: 725318 - protein, 14 aa, Homo sapiens
  CDR3 for beta chain variable domain of TCR clone 362659 (TRBV7-2, TRBJ2-7)
CASRSQGAAYEQYF

SEQ ID NO: 725319 - protein, 11 aa, Homo sapiens
  CDR3 for alpha chain variable domain of TCR clone 362660 (TRAV17, TRAJ39)
CATGAGNMLTF

SEQ ID NO: 725320 - protein, 16 aa, Homo sapiens
  CDR3 for beta chain variable domain of TCR clone 362660 (TRBV5-1, TRBJ2-1)
CASSFGVSGAYNEQFF

SEQ ID NO: 725321 - protein, 15 aa, Homo sapiens
  CDR3 for alpha chain variable domain of TCR clone 362661 (TRAV4, TRAJ8)
CLVGEQHTGFQKLVF

SEQ ID NO: 725322 - protein, 15 aa, Homo sapiens
  CDR3 for beta chain variable domain of TCR clone 362661 (TRBV7-9, TRBJ2-5)
CARSNRDYLQETQYF

SEQ ID NO: 725323 - protein, 14 aa, Homo sapiens
  CDR3 for alpha chain variable domain of TCR clone 362662 (TRAV9-2, TRAJ39)
CALYIYNAGNMLTF

SEQ ID NO: 725324 - protein, 13 aa, Homo sapiens
  CDR3 for beta chain variable domain of TCR clone 362662 (TRBV11-3, TRBJ2-7)
CASSLDKLYEQYF

SEQ ID NO: 725325 - protein, 15 aa, Homo sapiens
  CDR3 for alpha chain variable domain of TCR clone 362663 (TRAV12-1, TRAJ42)
CVVTRDGGSQGNLIF

SEQ ID NO: 725326 - protein, 15 aa, Homo sapiens
  CDR3 for beta chain variable domain of TCR clone 362663 (TRBV27, TRBJ1-5)
CASSLGTGFDQPQHF

SEQ ID NO: 725327 - protein, 14 aa, Homo sapiens
  CDR3 for alpha chain variable domain of TCR clone 362664 (TRAV27, TRAJ22)
CAGLPSGSARQLTF

SEQ ID NO: 725328 - protein, 14 aa, Homo sapiens
  CDR3 for beta chain variable domain of TCR clone 362664 (TRBV11-2, TRBJ2-3)
CASSRLARTDTQYF

SEQ ID NO: 725329 - protein, 13 aa, Homo sapiens
  CDR3 for alpha chain variable domain of TCR clone 362665 (TRAV1-1, TRAJ7)
CAVRDHGNNRLAF

SEQ ID NO: 725330 - protein, 15 aa, Homo sapiens
  CDR3 for beta chain variable domain of TCR clone 362665 (TRBV29-1, TRBJ2-6)
CSVGDRGSGANVLTF

SEQ ID NO: 725331 - protein, 11 aa, Homo sapiens
  CDR3 for alpha chain variable domain of TCR clone 362666 (TRAV17, TRAJ31)
CATARTARLMF

SEQ ID NO: 725332 - protein, 14 aa, Homo sapiens
  CDR3 for beta chain variable domain of TCR clone 362666 (TRBV4-1, TRBJ2-7)
CASSQGTTSYEQYF

SEQ ID NO: 725333 - protein, 14 aa, Homo sapiens
  CDR3 for alpha chain variable domain of TCR clone 362667 (TRAV1-2, TRAJ16)
CAVRSASDGQKLLF

SEQ ID NO: 725334 - protein, 15 aa, Homo sapiens
  CDR3 for beta chain variable domain of TCR clone 362667 (TRBV13, TRBJ2-7)
CASSLRPDRGHEQYF

SEQ ID NO: 725335 - protein, 12 aa, Homo sapiens
  CDR3 for alpha chain variable domain of TCR clone 362668 (TRAV27, TRAJ9)
CAGESGGFKTIF

SEQ ID NO: 725336 - protein, 14 aa, Homo sapiens
  CDR3 for beta chain variable domain of TCR clone 362668 (TRBV25-1, TRBJ1-1)
CASTNLGGNTEAFF

SEQ ID NO: 725337 - protein, 15 aa, Homo sapiens
  CDR3 for alpha chain variable domain of TCR clone 362669 (TRAV3, TRAJ20)
CAVRDIKLSDYKLSF

SEQ ID NO: 725338 - protein, 14 aa, Homo sapiens
  CDR3 for beta chain variable domain of TCR clone 362669 (TRBV7-8, TRBJ2-3)
CASSLEAGTDTQYF

SEQ ID NO: 725339 - protein, 14 aa, Homo sapiens
  CDR3 for alpha chain variable domain of TCR clone 362670 (TRAV12-2, TRAJ17)
CAVLFKAAGNKLTF

SEQ ID NO: 725340 - protein, 17 aa, Homo sapiens
  CDR3 for beta chain variable domain of TCR clone 362670 (TRBV20-1, TRBJ2-3)
CSARGTGGPTGTDTQYF

SEQ ID NO: 725341 - protein, 14 aa, Homo sapiens
  CDR3 for alpha chain variable domain of TCR clone 362671 (TRAV21, TRAJ9)
CCGGGGTGAFKTIF

SEQ ID NO: 725342 - protein, 15 aa, Homo sapiens
  CDR3 for beta chain variable domain of TCR clone 362671 (TRBV5-5, TRBJ1-1)
CASSLVGKDNTEAFF

SEQ ID NO: 725343 - protein, 14 aa, Homo sapiens
  CDR3 for alpha chain variable domain of TCR clone 362672 (TRAV13-1, TRAJ35)
CAASKGGFGNVLHC

SEQ ID NO: 725344 - protein, 14 aa, Homo sapiens
  CDR3 for beta chain variable domain of TCR clone 362672 (TRBV12-4, TRBJ1-3)
CASVQGGGGNTIYF

SEQ ID NO: 725345 - protein, 12 aa, Homo sapiens
  CDR3 for alpha chain variable domain of TCR clone 362673 (TRAV12-3, TRAJ17)
CAMTLTGNKLTF

SEQ ID NO: 725346 - protein, 12 aa, Homo sapiens
  CDR3 for beta chain variable domain of TCR clone 362673 (TRBV2, TRBJ2-1)
CAYGPPGNEQVF

SEQ ID NO: 725347 - protein, 16 aa, Homo sapiens
  CDR3 for alpha chain variable domain of TCR clone 362674 (TRAV1-2, TRAJ10)
CAVRGVLTGGGNKLTF

SEQ ID NO: 725348 - protein, 15 aa, Homo sapiens
  CDR3 for beta chain variable domain of TCR clone 362674 (TRBV7-2, TRBJ2-1)
CASTHGTGIYNKQFF

SEQ ID NO: 725349 - protein, 14 aa, Homo sapiens
  CDR3 for alpha chain variable domain of TCR clone 362675 (TRAV21, TRAJ3)
CAVTGYSSSSKIIF

SEQ ID NO: 725350 - protein, 17 aa, Homo sapiens
  CDR3 for beta chain variable domain of TCR clone 362675 (TRBV28, TRBJ2-5)
CASSRQGGLAGAETQYF

SEQ ID NO: 725351 - protein, 11 aa, Homo sapiens
  CDR3 for alpha chain variable domain of TCR clone 362676 (TRAV13-1, TRAJ39)
CASHAGNMLTF

SEQ ID NO: 725352 - protein, 15 aa, Homo sapiens
  CDR3 for beta chain variable domain of TCR clone 362676 (TRBV7-2, TRBJ2-7)
CASSTPGLTRGEQYF

SEQ ID NO: 725353 - protein, 17 aa, Homo sapiens
  CDR3 for alpha chain variable domain of TCR clone 362677 (TRAV3, TRAJ6)
CAVRDGPRAGGSYIPTC

SEQ ID NO: 725354 - protein, 13 aa, Homo sapiens
  CDR3 for beta chain variable domain of TCR clone 362677 (TRBV7-2, TRBJ1-1)
CASNLKGAKVAFF

SEQ ID NO: 725355 - protein, 16 aa, Homo sapiens
  CDR3 for alpha chain variable domain of TCR clone 362678 (TRAV26-1, )
CIDIQNPDPAVYQLRD

SEQ ID NO: 725356 - protein, 19 aa, Homo sapiens
  CDR3 for beta chain variable domain of TCR clone 362678 (TRBV19, TRBJ2-5)
CASSIGQVTDVFLGETQYF

SEQ ID NO: 725357 - protein, 15 aa, Homo sapiens
  CDR3 for alpha chain variable domain of TCR clone 362679 (TRAV8-3, TRAJ15)
CAVGAPNQAGTALIF

SEQ ID NO: 725358 - protein, 13 aa, Homo sapiens
  CDR3 for beta chain variable domain of TCR clone 362679 (TRBV20-1, TRBJ2-1)
CSASTGTSNEQFF

SEQ ID NO: 725359 - protein, 12 aa, Homo sapiens
  CDR3 for alpha chain variable domain of TCR clone 362680 (TRAV17, TRAJ57)
CATDGGSEKMVL

SEQ ID NO: 725360 - protein, 13 aa, Homo sapiens
  CDR3 for beta chain variable domain of TCR clone 362680 (TRBV7-9, TRBJ2-7)
CASSFAGAYEQYF

SEQ ID NO: 725361 - protein, 14 aa, Homo sapiens
  CDR3 for alpha chain variable domain of TCR clone 362681 (TRAV12-3, TRAJ30)
CAMSLLNRDDKIIF

SEQ ID NO: 725362 - protein, 12 aa, Homo sapiens
  CDR3 for beta chain variable domain of TCR clone 362681 (TRBV12-4, TRBJ2-7)
CASSLGGYEQYF

SEQ ID NO: 725363 - protein, 15 aa, Homo sapiens
  CDR3 for alpha chain variable domain of TCR clone 362682 (TRAV8-3, TRAJ45)
CASSYSGGGADGLTF

SEQ ID NO: 725364 - protein, 13 aa, Homo sapiens
  CDR3 for beta chain variable domain of TCR clone 362682 (TRBV7-9, TRBJ2-5)
CASLSPGQETQYF

SEQ ID NO: 725365 - protein, 12 aa, Homo sapiens
  CDR3 for alpha chain variable domain of TCR clone 362683 (TRAV12-2, TRAJ16)
CAVAPDGQKLLF

SEQ ID NO: 725366 - protein, 13 aa, Homo sapiens
  CDR3 for beta chain variable domain of TCR clone 362683 (TRBV7-9, TRBJ1-2)
CASSLKQNYGYTF

SEQ ID NO: 725367 - protein, 15 aa, Homo sapiens
  CDR3 for alpha chain variable domain of TCR clone 362684 (TRAV12-2, TRAJ53)
CAVNGGGGSNYKLTF

SEQ ID NO: 725368 - protein, 15 aa, Homo sapiens
  CDR3 for beta chain variable domain of TCR clone 362684 (TRBV20-1, TRBJ2-7)
CSARDRVSGMDEQYL

SEQ ID NO: 725369 - protein, 12 aa, Homo sapiens
  CDR3 for alpha chain variable domain of TCR clone 362685 (TRAV12-3, TRAJ20)
CAMVRGDYKLSF

SEQ ID NO: 725370 - protein, 15 aa, Homo sapiens
  CDR3 for beta chain variable domain of TCR clone 362685 (TRBV10-3, TRBJ1-2)
CAITVTGGWDYGYTF

SEQ ID NO: 725371 - protein, 14 aa, Homo sapiens
  CDR3 for alpha chain variable domain of TCR clone 362686 (TRAV12-2, TRAJ13)
CALKKTGGHQKVTF

SEQ ID NO: 725372 - protein, 13 aa, Homo sapiens
  CDR3 for beta chain variable domain of TCR clone 362686 (TRBV20-1, TRBJ1-1)
CSARGGGNTEAFF

SEQ ID NO: 725373 - protein, 16 aa, Homo sapiens
  CDR3 for alpha chain variable domain of TCR clone 362687 (TRAV12-2, TRAJ40)
CAVIRGGTSGTYKYIF

SEQ ID NO: 725374 - protein, 16 aa, Homo sapiens
  CDR3 for beta chain variable domain of TCR clone 362687 (TRBV7-9, TRBJ2-1)
GASSDVAGGSYNEQFF

SEQ ID NO: 725375 - protein, 13 aa, Homo sapiens
  CDR3 for alpha chain variable domain of TCR clone 362688 (TRAV20, TRAJ37)
CAGCSSNTGKLIF

SEQ ID NO: 725376 - protein, 21 aa, Homo sapiens
  CDR3 for beta chain variable domain of TCR clone 362688 (TRBV4-2, TRBJ2-3)
PCSQKTRHCISVPAAPDTQYF

SEQ ID NO: 725377 - protein, 15 aa, Homo sapiens
  CDR3 for alpha chain variable domain of TCR clone 362689 (TRAV3, TRAJ29)
CAVRDLYSGNTPLVF

SEQ ID NO: 725378 - protein, 17 aa, Homo sapiens
  CDR3 for beta chain variable domain of TCR clone 362689 (TRBV20-1, TRBJ2-1)
CSASDPLAGVWDNEQFF

SEQ ID NO: 725379 - protein, 11 aa, Homo sapiens
  CDR3 for alpha chain variable domain of TCR clone 362690 (TRAV1-1, TRAJ23)
CAVRQGGKLIF

SEQ ID NO: 725380 - protein, 14 aa, Homo sapiens
  CDR3 for beta chain variable domain of TCR clone 362690 (TRBV7-8, TRBJ2-3)
CASRLEAGTDTQYF

SEQ ID NO: 725381 - protein, 18 aa, Homo sapiens
  CDR3 for alpha chain variable domain of TCR clone 362691 (TRAV21, TRAJ52)
CAVRPSPAGGTSYGKLTF

SEQ ID NO: 725382 - protein, 15 aa, Homo sapiens
  CDR3 for beta chain variable domain of TCR clone 362691 (TRBV18, TRBJ1-1)
CASSPVTGSGTEAFF

SEQ ID NO: 725383 - protein, 16 aa, Homo sapiens
  CDR3 for alpha chain variable domain of TCR clone 362692 (TRAV35, TRAJ28)
CAGQKYSGAGSYQLTF

SEQ ID NO: 725384 - protein, 15 aa, Homo sapiens
  CDR3 for beta chain variable domain of TCR clone 362692 (TRBV6-3, TRBJ2-7)
CASSSPGTVFYEQYF

SEQ ID NO: 725385 - protein, 12 aa, Homo sapiens
  CDR3 for alpha chain variable domain of TCR clone 362693 (TRAV38-2/DV8, TRAJ49)
CAYRSSGNQFYF

SEQ ID NO: 725386 - protein, 14 aa, Homo sapiens
  CDR3 for beta chain variable domain of TCR clone 362693 (TRBV7-2, TRBJ2-7)
CASSLRWEVNEQYF

SEQ ID NO: 725387 - protein, 15 aa, Homo sapiens
  CDR3 for alpha chain variable domain of TCR clone 362694 (TRAV3, TRAJ27)
CAVRDPLTNSGKSTF

SEQ ID NO: 725388 - protein, 15 aa, Homo sapiens
  CDR3 for beta chain variable domain of TCR clone 362694 (TRBV28, TRBJ2-1)
CASSIIAGGRSEQFF

SEQ ID NO: 725389 - protein, 14 aa, Homo sapiens
  CDR3 for alpha chain variable domain of TCR clone 362695 (TRAV12-3, TRAJ10)
SHLPLTGVGNKLTF

SEQ ID NO: 725390 - protein, 14 aa, Homo sapiens
  CDR3 for beta chain variable domain of TCR clone 362695 (TRBV25-1, TRBJ1-1)
CASTHLGGNTEAFF

SEQ ID NO: 725391 - protein, 12 aa, Homo sapiens
  CDR3 for alpha chain variable domain of TCR clone 362696 (TRAV27, TRAJ21)
CAGVRQLQQILL

SEQ ID NO: 725392 - protein, 14 aa, Homo sapiens
  CDR3 for beta chain variable domain of TCR clone 362696 (TRBV7-9, TRBJ1-4)
CASSLEGQSEKLFC

SEQ ID NO: 725393 - protein, 14 aa, Homo sapiens
  CDR3 for alpha chain variable domain of TCR clone 362697 (TRAV9-2, TRAJ39)
CALYIYNAGNMLTF

SEQ ID NO: 725394 - protein, 14 aa, Homo sapiens
  CDR3 for beta chain variable domain of TCR clone 362697 (TRBV10-3, TRBJ2-1)
CAISSDLAYNEQFF

SEQ ID NO: 725395 - protein, 15 aa, Homo sapiens
  CDR3 for alpha chain variable domain of TCR clone 362698 (TRAV27, TRAJ38)
CADRRNAGNNRKLSW

SEQ ID NO: 725396 - protein, 13 aa, Homo sapiens
  CDR3 for beta chain variable domain of TCR clone 362698 (TRBV12-5, TRBJ2-3)
CASGDRQSDTQYF

SEQ ID NO: 725397 - protein, 23 aa, Homo sapiens
  CDR3 for alpha chain variable domain of TCR clone 362699 (TRAV13-1, TRAJ18)
CAASGGGSTLGRLYFGRVNQLTV

SEQ ID NO: 725398 - protein, 13 aa, Homo sapiens
  CDR3 for beta chain variable domain of TCR clone 362699 (TRBV18, TRBJ2-1)
CASGLASNNEQFF

SEQ ID NO: 725399 - protein, 14 aa, Homo sapiens
  CDR3 for alpha chain variable domain of TCR clone 362700 (TRAV12-2, TRAJ13)
CAVKKTGGYQKVTF

SEQ ID NO: 725400 - protein, 13 aa, Homo sapiens
  CDR3 for beta chain variable domain of TCR clone 362700 (TRBV29-1, TRBJ2-5)
CSARDRVEETQYF

SEQ ID NO: 725401 - protein, 17 aa, Homo sapiens
  CDR3 for alpha chain variable domain of TCR clone 362701 (TRAV3, TRAJ6)
CAVRDGPRAGGSYIPTF

SEQ ID NO: 725402 - protein, 14 aa, Homo sapiens
  CDR3 for beta chain variable domain of TCR clone 362701 (TRBV7-2, TRBJ1-2)
CASSRGGTNYGYTF

SEQ ID NO: 725403 - protein, 13 aa, Homo sapiens
  CDR3 for alpha chain variable domain of TCR clone 362702 (TRAV21, TRAJ20)
CAVGLRVDYKLSF

SEQ ID NO: 725404 - protein, 13 aa, Homo sapiens
  CDR3 for beta chain variable domain of TCR clone 362702 (TRBV5-1, TRBJ2-7)
CASSATGGNEQYF

SEQ ID NO: 725405 - protein, 14 aa, Homo sapiens
  CDR3 for alpha chain variable domain of TCR clone 362703 (TRAV1-2, TRAJ16)
CAVNRFSDGQKLLF

SEQ ID NO: 725406 - protein, 16 aa, Homo sapiens
  CDR3 for beta chain variable domain of TCR clone 362703 (TRBV12-5, TRBJ2-5)
CASGPRASGNQETQCF

SEQ ID NO: 725407 - protein, 16 aa, Homo sapiens
  CDR3 for alpha chain variable domain of TCR clone 362704 (TRAV3, TRAJ37)
CSVRGKGSGNTGKLIF

SEQ ID NO: 725408 - protein, 16 aa, Homo sapiens
  CDR3 for beta chain variable domain of TCR clone 362704 (TRBV28, TRBJ1-5)
CASSFRGGYSNQPQHF

SEQ ID NO: 725409 - protein, 16 aa, Homo sapiens
  CDR3 for alpha chain variable domain of TCR clone 362705 (TRAV14/DV4, TRAJ45)
YAMREGERGGADGLTF

SEQ ID NO: 725410 - protein, 16 aa, Homo sapiens
  CDR3 for beta chain variable domain of TCR clone 362705 (TRBV6-6, TRBJ2-4)
CASSNAGQGAKNIQYF

SEQ ID NO: 725411 - protein, 16 aa, Homo sapiens
  CDR3 for alpha chain variable domain of TCR clone 362706 (TRAV12-2, TRAJ28)
CAVITDSGSGSYHLTF

SEQ ID NO: 725412 - protein, 14 aa, Homo sapiens
  CDR3 for beta chain variable domain of TCR clone 362706 (TRBV25-1, TRBJ1-1)
CASTHLGGNTEAFF

SEQ ID NO: 725413 - protein, 12 aa, Homo sapiens
  CDR3 for alpha chain variable domain of TCR clone 362707 (TRAV21, TRAJ30)
CAALNRDDKIIF

SEQ ID NO: 725414 - protein, 15 aa, Homo sapiens
  CDR3 for beta chain variable domain of TCR clone 362707 (TRBV6-3, TRBJ2-7)
CASSSPGTVFYEQYF

SEQ ID NO: 725415 - protein, 14 aa, Homo sapiens
  CDR3 for alpha chain variable domain of TCR clone 362708 (TRAV2, TRAJ9)
CAVEDRSGGFKTIF

SEQ ID NO: 725416 - protein, 18 aa, Homo sapiens
  CDR3 for beta chain variable domain of TCR clone 362708 (TRBV5-4, TRBJ2-3)
CASSPTAGFLPSTDTQYF

SEQ ID NO: 725417 - protein, 12 aa, Homo sapiens
  CDR3 for alpha chain variable domain of TCR clone 362709 (TRAV16, TRAJ56)
CAPTGANSKLTF

SEQ ID NO: 725418 - protein, 14 aa, Homo sapiens
  CDR3 for beta chain variable domain of TCR clone 362709 (TRBV15, TRBJ2-5)
CATSIGGLGETQYF

SEQ ID NO: 725419 - protein, 15 aa, Homo sapiens
  CDR3 for alpha chain variable domain of TCR clone 362710 (TRAV12-3, TRAJ47)
CVMSALVEYGNKLVF

SEQ ID NO: 725420 - protein, 14 aa, Homo sapiens
  CDR3 for beta chain variable domain of TCR clone 362710 (TRBV4-1, TRBJ2-2)
CASSQAVNTGELFF

SEQ ID NO: 725421 - protein, 12 aa, Homo sapiens
  CDR3 for alpha chain variable domain of TCR clone 362711 (TRAV36/DV7, TRAJ54)
CAVVRGAKKLVF

SEQ ID NO: 725422 - protein, 13 aa, Homo sapiens
  CDR3 for beta chain variable domain of TCR clone 362711 (TRBV7-9, TRBJ1-2)
CASSLKQNYGYTF

SEQ ID NO: 725423 - protein, 12 aa, Homo sapiens
  CDR3 for alpha chain variable domain of TCR clone 362712 (TRAV1-2, TRAJ33)
CAALDSNYQLIW

SEQ ID NO: 725424 - protein, 13 aa, Homo sapiens
  CDR3 for beta chain variable domain of TCR clone 362712 (TRBV19, TRBJ2-7)
CASRKAGGSEQYY

SEQ ID NO: 725425 - protein, 14 aa, Homo sapiens
  CDR3 for alpha chain variable domain of TCR clone 362713 (TRAV21, TRAJ35)
CAVMPIGFGNVLHC

SEQ ID NO: 725426 - protein, 12 aa, Homo sapiens
  CDR3 for beta chain variable domain of TCR clone 362713 (TRBV7-9, TRBJ2-7)
CARSIEREEQYF

SEQ ID NO: 725427 - protein, 11 aa, Homo sapiens
  CDR3 for alpha chain variable domain of TCR clone 362714 (TRAV1-2, TRAJ31)
CASHNNARLMF

SEQ ID NO: 725428 - protein, 13 aa, Homo sapiens
  CDR3 for beta chain variable domain of TCR clone 362714 (TRBV7-9, TRBJ2-7)
CASRPFDHYEQYF

SEQ ID NO: 725429 - protein, 16 aa, Homo sapiens
  CDR3 for alpha chain variable domain of TCR clone 362715 (TRAV4, TRAJ42)
CLVGPIYGGSPGNLIF

SEQ ID NO: 725430 - protein, 13 aa, Homo sapiens
  CDR3 for beta chain variable domain of TCR clone 362715 (TRBV11-2, TRBJ2-7)
CASSPLGSYEQYF

SEQ ID NO: 725431 - protein, 13 aa, Homo sapiens
  CDR3 for alpha chain variable domain of TCR clone 362716 (TRAV1-2, TRAJ9)
CAALNTGGFKTIF

SEQ ID NO: 725432 - protein, 13 aa, Homo sapiens
  CDR3 for beta chain variable domain of TCR clone 362716 (TRBV19, TRBJ1-2)
CASSVQGQDGYTF

SEQ ID NO: 725433 - protein, 16 aa, Homo sapiens
  CDR3 for alpha chain variable domain of TCR clone 362717 (TRAV16, TRAJ52)
YALSASGGTSYGKLTF

SEQ ID NO: 725434 - protein, 12 aa, Homo sapiens
  CDR3 for beta chain variable domain of TCR clone 362717 (TRBV12-4, TRBJ1-3)
CASSFSGNTIYF

SEQ ID NO: 725435 - protein, 15 aa, Homo sapiens
  CDR3 for alpha chain variable domain of TCR clone 362718 (TRAV8-3, TRAJ40)
CAVGPYTSGTYTYIF

SEQ ID NO: 725436 - protein, 18 aa, Homo sapiens
  CDR3 for beta chain variable domain of TCR clone 362718 (TRBV7-2, TRBJ2-7)
CASRLDPGVDRASSTSGR

SEQ ID NO: 725437 - protein, 14 aa, Homo sapiens
  CDR3 for alpha chain variable domain of TCR clone 362719 (TRAV25, TRAJ21)
CADYTASTNFTLDL

SEQ ID NO: 725438 - protein, 13 aa, Homo sapiens
  CDR3 for beta chain variable domain of TCR clone 362719 (TRBV27, TRBJ1-1)
CASSLSIGAEAFF

SEQ ID NO: 725439 - protein, 14 aa, Homo sapiens
  CDR3 for alpha chain variable domain of TCR clone 362720 (TRAV12-1, TRAJ22)
GVAFSSGSARQLTF

SEQ ID NO: 725440 - protein, 21 aa, Homo sapiens
  CDR3 for beta chain variable domain of TCR clone 362720 (TRBV15, TRBJ2-1)
AWGTQPCTCVPPAEVDTARFF

SEQ ID NO: 725441 - protein, 15 aa, Homo sapiens
  CDR3 for alpha chain variable domain of TCR clone 362721 (TRAV21, TRAJ45)
CAVSYSGGGADGLTF

SEQ ID NO: 725442 - protein, 19 aa, Homo sapiens
  CDR3 for beta chain variable domain of TCR clone 362721 (TRBV25-1, TRBJ2-2)
CAILVYRVDRGRKTGELFF

SEQ ID NO: 725443 - protein, 14 aa, Homo sapiens
  CDR3 for alpha chain variable domain of TCR clone 362722 (TRAV21, TRAJ21)
CAVKGFGNFNKFYF

SEQ ID NO: 725444 - protein, 13 aa, Homo sapiens
  CDR3 for beta chain variable domain of TCR clone 362722 (TRBV18, TRBJ1-1)
CASAPETKPEAFF

SEQ ID NO: 725445 - protein, 14 aa, Homo sapiens
  CDR3 for alpha chain variable domain of TCR clone 362723 (TRAV12-2, TRAJ13)
CAVKKTGGDQKVTF

SEQ ID NO: 725446 - protein, 13 aa, Homo sapiens
  CDR3 for beta chain variable domain of TCR clone 362723 (TRBV19, TRBJ1-2)
CASSVPGQDGYTF

SEQ ID NO: 725447 - protein, 15 aa, Homo sapiens
  CDR3 for alpha chain variable domain of TCR clone 362724 (TRAV12-2, TRAJ53)
CAVNGGGGSNYKLTF

SEQ ID NO: 725448 - protein, 17 aa, Homo sapiens
  CDR3 for beta chain variable domain of TCR clone 362724 (TRBV7-3, TRBJ2-3)
RSSSLMKRMRGADTQYF

SEQ ID NO: 725449 - protein, 12 aa, Homo sapiens
  CDR3 for alpha chain variable domain of TCR clone 362725 (TRAV1-2, TRAJ26)
CAVSPYGQNFVF

SEQ ID NO: 725450 - protein, 14 aa, Homo sapiens
  CDR3 for beta chain variable domain of TCR clone 362725 (TRBV25-1, TRBJ1-1)
CASTHLGGNTEAFF

SEQ ID NO: 725451 - protein, 14 aa, Homo sapiens
  CDR3 for alpha chain variable domain of TCR clone 362726 (TRAV26-1, TRAJ38)
CIADNAGNNRKPIW

SEQ ID NO: 725452 - protein, 15 aa, Homo sapiens
  CDR3 for beta chain variable domain of TCR clone 362726 (TRBV27, TRBJ2-7)
CASSTAGTGSYEQYF

SEQ ID NO: 725453 - protein, 15 aa, Homo sapiens
  CDR3 for alpha chain variable domain of TCR clone 362727 (TRAV27, TRAJ38)
CAARRNASNNRKLIW

SEQ ID NO: 725454 - protein, 13 aa, Homo sapiens
  CDR3 for beta chain variable domain of TCR clone 362727 (TRBV12-5, TRBJ2-3)
CASGDRLSDTQYF

SEQ ID NO: 725455 - protein, 13 aa, Homo sapiens
  CDR3 for alpha chain variable domain of TCR clone 362728 (TRAV27, TRAJ41)
CAGEGNSGYALNF

SEQ ID NO: 725456 - protein, 15 aa, Homo sapiens
  CDR3 for beta chain variable domain of TCR clone 362728 (TRBV6-3, TRBJ2-7)
CASSSPGTVFFEQYF

SEQ ID NO: 725457 - protein, 16 aa, Homo sapiens
  CDR3 for alpha chain variable domain of TCR clone 362729 (TRAV38-1, TRAJ56)
CAFMKRQTGANSKLTF

SEQ ID NO: 725458 - protein, 14 aa, Homo sapiens
  CDR3 for beta chain variable domain of TCR clone 362729 (TRBV7-6, TRBJ2-3)
CASSLGTVTDTQYF

SEQ ID NO: 725459 - protein, 14 aa, Homo sapiens
  CDR3 for alpha chain variable domain of TCR clone 362730 (TRAV12-3, TRAJ10)
SHLPLTGGGNKLSF

SEQ ID NO: 725460 - protein, 16 aa, Homo sapiens
  CDR3 for beta chain variable domain of TCR clone 362730 (TRBV18, TRBJ1-5)
CASSPYRVEGNQPQHF

SEQ ID NO: 725461 - protein, 15 aa, Homo sapiens
  CDR3 for alpha chain variable domain of TCR clone 362731 (TRAV21, TRAJ24)
CAARSSTDSWGKLQF

SEQ ID NO: 725462 - protein, 15 aa, Homo sapiens
  CDR3 for beta chain variable domain of TCR clone 362731 (TRBV28, TRBJ1-3)
CASSMGWASGNTIYF

SEQ ID NO: 725463 - protein, 13 aa, Homo sapiens
  CDR3 for alpha chain variable domain of TCR clone 362732 (TRAV30, TRAJ49)
CGTESQPVTSSIL

SEQ ID NO: 725464 - protein, 16 aa, Homo sapiens
  CDR3 for beta chain variable domain of TCR clone 362732 (TRBV7-3, TRBJ2-2)
CASSLKRGTLSGELFF

SEQ ID NO: 725465 - protein, 13 aa, Homo sapiens
  CDR3 for alpha chain variable domain of TCR clone 362733 (TRAV8-3, TRAJ36)
CAVGATGANNLFF

SEQ ID NO: 725466 - protein, 15 aa, Homo sapiens
  CDR3 for beta chain variable domain of TCR clone 362733 (TRBV6-1, TRBJ2-3)
CASSERGGITDTQYF

SEQ ID NO: 725467 - protein, 22 aa, Homo sapiens
  CDR3 for alpha chain variable domain of TCR clone 362734 (TRAV8-3, TRAJ32)
CAVEVVLQTSSSLELALCLLSS

SEQ ID NO: 725468 - protein, 14 aa, Homo sapiens
  CDR3 for beta chain variable domain of TCR clone 362734 (TRBV25-1, TRBJ1-1)
CASTHLGGNTEAFF

SEQ ID NO: 725469 - protein, 13 aa, Homo sapiens
  CDR3 for alpha chain variable domain of TCR clone 362735 (TRAV13-1, TRAJ21)
CAASKYNFNKFYF

SEQ ID NO: 725470 - protein, 15 aa, Homo sapiens
  CDR3 for beta chain variable domain of TCR clone 362735 (TRBV27, TRBJ2-1)
CASSNGGGSSNEQFF

SEQ ID NO: 725471 - protein, 15 aa, Homo sapiens
  CDR3 for alpha chain variable domain of TCR clone 362736 (TRAV9-2, TRAJ49)
CALSPPDHTGNQLSF

SEQ ID NO: 725472 - protein, 14 aa, Homo sapiens
  CDR3 for beta chain variable domain of TCR clone 362736 (TRBV12-4, TRBJ1-1)
CASSLGTGGTEAFF

SEQ ID NO: 725473 - protein, 13 aa, Homo sapiens
  CDR3 for alpha chain variable domain of TCR clone 362737 (TRAV21, TRAJ27)
CAARPGNAGKSTF

SEQ ID NO: 725474 - protein, 10 aa, Homo sapiens
  CDR3 for beta chain variable domain of TCR clone 362737 (TRBV6-3, TRBJ2-7)
CASSSPGQFS

SEQ ID NO: 725475 - protein, 16 aa, Homo sapiens
  CDR3 for alpha chain variable domain of TCR clone 362738 (TRAV26-1, TRAJ37)
WIVRGDGSGNTGKLIF

SEQ ID NO: 725476 - protein, 17 aa, Homo sapiens
  CDR3 for beta chain variable domain of TCR clone 362738 (TRBV4-1, TRBJ2-7)
CASSRDPLGVRGGEQYF

SEQ ID NO: 725477 - protein, 12 aa, Homo sapiens
  CDR3 for alpha chain variable domain of TCR clone 362739 (TRAV12-3, TRAJ17)
CAMTLTGNKLTF

SEQ ID NO: 725478 - protein, 15 aa, Homo sapiens
  CDR3 for beta chain variable domain of TCR clone 362739 (TRBV7-9, TRBJ1-1)
CASSLLEQGGTEAFF

SEQ ID NO: 725479 - protein, 14 aa, Homo sapiens
  CDR3 for alpha chain variable domain of TCR clone 362740 (TRAV23/DV6, TRAJ40)
CAATRPSGTYKYIF

SEQ ID NO: 725480 - protein, 16 aa, Homo sapiens
  CDR3 for beta chain variable domain of TCR clone 362740 (TRBV7-3, TRBJ2-3)
CQQLFTTSLNTDTQYF

SEQ ID NO: 725481 - protein, 11 aa, Homo sapiens
  CDR3 for alpha chain variable domain of TCR clone 362741 (TRAV8-6, TRAJ34)
CAVWNTDKLIF

SEQ ID NO: 725482 - protein, 16 aa, Homo sapiens
  CDR3 for beta chain variable domain of TCR clone 362741 (TRBV5-1, TRBJ2-7)
CASRYASTSSGGEQYF

SEQ ID NO: 725483 - protein, 14 aa, Homo sapiens
  CDR3 for alpha chain variable domain of TCR clone 362742 (TRAV2, TRAJ37)
CAVDFTSNTGKLIF

SEQ ID NO: 725484 - protein, 15 aa, Homo sapiens
  CDR3 for beta chain variable domain of TCR clone 362742 (TRBV27, TRBJ1-5)
CASSLGTGFDQPQHF

SEQ ID NO: 725485 - protein, 17 aa, Homo sapiens
  CDR3 for alpha chain variable domain of TCR clone 362743 (TRAV26-1, TRAJ46)
IASSESEKKSSGDKLTF

SEQ ID NO: 725486 - protein, 15 aa, Homo sapiens
  CDR3 for beta chain variable domain of TCR clone 362743 (TRBV27, TRBJ2-2)
CSSFRGLVRTGELFF

SEQ ID NO: 725487 - protein, 18 aa, Homo sapiens
  CDR3 for alpha chain variable domain of TCR clone 362744 (TRAV17, TRAJ28)
CATDPPRGSGAGSYQLTF

SEQ ID NO: 725488 - protein, 14 aa, Homo sapiens
  CDR3 for beta chain variable domain of TCR clone 362744 (TRBV13, TRBJ2-5)
CASSLDYPQESQYF

SEQ ID NO: 725489 - protein, 12 aa, Homo sapiens
  CDR3 for alpha chain variable domain of TCR clone 362745 (TRAV1-1, TRAJ29)
CAVEFRKHTSCL

SEQ ID NO: 725490 - protein, 14 aa, Homo sapiens
  CDR3 for beta chain variable domain of TCR clone 362745 (TRBV7-2, TRBJ1-2)
CASSQTGSTYGYTF

SEQ ID NO: 725491 - protein, 14 aa, Homo sapiens
  CDR3 for alpha chain variable domain of TCR clone 362746 (TRAV13-1, TRAJ35)
CAASKGGFGNVLHC

SEQ ID NO: 725492 - protein, 16 aa, Homo sapiens
  CDR3 for beta chain variable domain of TCR clone 362746 (TRBV7-3, TRBJ1-1)
CSSVPAARIGGAEAFF

SEQ ID NO: 725493 - protein, 16 aa, Homo sapiens
  CDR3 for alpha chain variable domain of TCR clone 362747 (TRAV8-4, TRAJ52)
CAVSDPGGASYGKVTF

SEQ ID NO: 725494 - protein, 15 aa, Homo sapiens
  CDR3 for beta chain variable domain of TCR clone 362747 (TRBV12-4, TRBJ2-7)
CASSQRTSGNYEQYF

SEQ ID NO: 725495 - protein, 15 aa, Homo sapiens
  CDR3 for alpha chain variable domain of TCR clone 362748 (TRAV8-4, TRAJ48)
CAVSAAYFGNEKLTF

SEQ ID NO: 725496 - protein, 15 aa, Homo sapiens
  CDR3 for beta chain variable domain of TCR clone 362748 (TRBV6-3, TRBJ2-7)
CASSSPGTVFYEQYF

SEQ ID NO: 725497 - protein, 17 aa, Homo sapiens
  CDR3 for alpha chain variable domain of TCR clone 362749 (TRAV26-1, TRAJ47)
CIVASLLYMEYGNKLVF

SEQ ID NO: 725498 - protein, 14 aa, Homo sapiens
  CDR3 for beta chain variable domain of TCR clone 362749 (TRBV7-3, TRBJ1-5)
RASSFSGCNQPQHF

SEQ ID NO: 725499 - protein, 16 aa, Homo sapiens
  CDR3 for alpha chain variable domain of TCR clone 362750 (TRAV35, TRAJ28)
CAGQRYSGDGSDQLTF

SEQ ID NO: 725500 - protein, 13 aa, Homo sapiens
  CDR3 for beta chain variable domain of TCR clone 362750 (TRBV19, TRBJ1-2)
CASSQGQVYGYTF

SEQ ID NO: 725501 - protein, 15 aa, Homo sapiens
  CDR3 for alpha chain variable domain of TCR clone 362751 (TRAV17, TRAJ57)
CATGPSQGGSEKLVF

SEQ ID NO: 725502 - protein, 13 aa, Homo sapiens
  CDR3 for beta chain variable domain of TCR clone 362751 (TRBV11-2, TRBJ2-5)
CASSSTCEETQYF

SEQ ID NO: 725503 - protein, 11 aa, Homo sapiens
  CDR3 for alpha chain variable domain of TCR clone 362752 (TRAV1-2, TRAJ20)
CAVANDYKLSF

SEQ ID NO: 725504 - protein, 15 aa, Homo sapiens
  CDR3 for beta chain variable domain of TCR clone 362752 (TRBV2, TRBJ2-1)
CASSELAGAIMSSSS

SEQ ID NO: 725505 - protein, 11 aa, Homo sapiens
  CDR3 for alpha chain variable domain of TCR clone 362753 (TRAV2, TRAJ13)
CASGGYQKVTF

SEQ ID NO: 725506 - protein, 13 aa, Homo sapiens
  CDR3 for beta chain variable domain of TCR clone 362753 (TRBV7-9, TRBJ1-2)
CDSSLKQNYGYTF

SEQ ID NO: 725507 - protein, 14 aa, Homo sapiens
  CDR3 for alpha chain variable domain of TCR clone 362754 (TRAV29/DV5, TRAJ28)
CAATEGAGSYQLTF

SEQ ID NO: 725508 - protein, 15 aa, Homo sapiens
  CDR3 for beta chain variable domain of TCR clone 362754 (TRBV7-8, TRBJ2-1)
CASSLRGGPYNEQFF

SEQ ID NO: 725509 - protein, 13 aa, Homo sapiens
  CDR3 for alpha chain variable domain of TCR clone 362755 (TRAV21, TRAJ27)
CAARLGNAGKSTL

SEQ ID NO: 725510 - protein, 14 aa, Homo sapiens
  CDR3 for beta chain variable domain of TCR clone 362755 (TRBV7-6, TRBJ2-3)
CASSLGTVTDTQYF

SEQ ID NO: 725511 - protein, 13 aa, Homo sapiens
  CDR3 for alpha chain variable domain of TCR clone 362756 (TRAV12-2, TRAJ31)
CAVKADNNASLMF

SEQ ID NO: 725512 - protein, 14 aa, Homo sapiens
  CDR3 for beta chain variable domain of TCR clone 362756 (TRBV12-5, TRBJ2-5)
CASGSRTHQETQYF

SEQ ID NO: 725513 - protein, 10 aa, Homo sapiens
  CDR3 for alpha chain variable domain of TCR clone 362757 (TRAV8-1, TRAJ21)
CAVNGSKFYF

SEQ ID NO: 725514 - protein, 16 aa, Homo sapiens
  CDR3 for beta chain variable domain of TCR clone 362757 (TRBV7-2, TRBJ1-5)
CASSPWGPEGNQPQHF

SEQ ID NO: 725515 - protein, 14 aa, Homo sapiens
  CDR3 for alpha chain variable domain of TCR clone 362758 (TRAV13-1, TRAJ26)
CAASRGNYGQNFVF

SEQ ID NO: 725516 - protein, 15 aa, Homo sapiens
  CDR3 for beta chain variable domain of TCR clone 362758 (TRBV20-1, TRBJ2-7)
CSARDRVSGMDEQYF

SEQ ID NO: 725517 - protein, 14 aa, Homo sapiens
  CDR3 for alpha chain variable domain of TCR clone 362759 (TRAV1-2, TRAJ16)
CAVNRFSDGQKLLF

SEQ ID NO: 725518 - protein, 16 aa, Homo sapiens
  CDR3 for beta chain variable domain of TCR clone 362759 (TRBV4-1, TRBJ2-3)
CASSQSTGGAEDTQYF

SEQ ID NO: 725519 - protein, 13 aa, Homo sapiens
  CDR3 for alpha chain variable domain of TCR clone 362760 (TRAV8-3, TRAJ43)
CAVVPYNNNDMRF

SEQ ID NO: 725520 - protein, 17 aa, Homo sapiens
  CDR3 for beta chain variable domain of TCR clone 362760 (TRBV18, TRBJ2-1)
CASSKGLSGGADNEQFF

SEQ ID NO: 725521 - protein, 14 aa, Homo sapiens
  CDR3 for alpha chain variable domain of TCR clone 362761 (TRAV12-2, TRAJ24)
CAVTPADSWGKLQF

SEQ ID NO: 725522 - protein, 18 aa, Homo sapiens
  CDR3 for beta chain variable domain of TCR clone 362761 (TRBV28, TRBJ2-1)
CASSSPSGLAGAIYEQFF

SEQ ID NO: 725523 - protein, 16 aa, Homo sapiens
  CDR3 for alpha chain variable domain of TCR clone 362762 (TRAV30, TRAJ26)
CGTESVGDNYGQTFVF

SEQ ID NO: 725524 - protein, 13 aa, Homo sapiens
  CDR3 for beta chain variable domain of TCR clone 362762 (TRBV19, TRBJ1-2)
CASSIAEDYGYTF

SEQ ID NO: 725525 - protein, 15 aa, Homo sapiens
  CDR3 for alpha chain variable domain of TCR clone 362763 (TRAV3, TRAJ36)
CAVRASQTGENNLFF

SEQ ID NO: 725526 - protein, 13 aa, Homo sapiens
  CDR3 for beta chain variable domain of TCR clone 362763 (TRBV10-3, TRBJ1-2)
CAISERDSYGYTF

SEQ ID NO: 725527 - protein, 14 aa, Homo sapiens
  CDR3 for alpha chain variable domain of TCR clone 362764 (TRAV3, TRAJ21)
CAVESQANFNKFYF

SEQ ID NO: 725528 - protein, 18 aa, Homo sapiens
  CDR3 for beta chain variable domain of TCR clone 362764 (TRBV7-9, TRBJ2-1)
CASSLAVSGTSGRNEQFY

SEQ ID NO: 725529 - protein, 12 aa, Homo sapiens
  CDR3 for alpha chain variable domain of TCR clone 362765 (TRAV29/DV5, TRAJ34)
CAARHNTDKLIF

SEQ ID NO: 725530 - protein, 15 aa, Homo sapiens
  CDR3 for beta chain variable domain of TCR clone 362765 (TRBV19, TRBJ2-7)
CASSPAGSGEATKYF

SEQ ID NO: 725531 - protein, 13 aa, Homo sapiens
  CDR3 for alpha chain variable domain of TCR clone 362766 (TRAV1-2, TRAJ31)
CAVRPNNNARLMF

SEQ ID NO: 725532 - protein, 14 aa, Homo sapiens
  CDR3 for beta chain variable domain of TCR clone 362766 (TRBV11-2, TRBJ2-1)
CASSFSGPYNEQFF

SEQ ID NO: 725533 - protein, 13 aa, Homo sapiens
  CDR3 for alpha chain variable domain of TCR clone 362767 (TRAV2, TRAJ43)
TTVLQRGNNDMRF

SEQ ID NO: 725534 - protein, 16 aa, Homo sapiens
  CDR3 for beta chain variable domain of TCR clone 362767 (TRBV4-1, TRBJ2-7)
CASSQEWTSGPLEQYF

SEQ ID NO: 725535 - protein, 14 aa, Homo sapiens
  CDR3 for alpha chain variable domain of TCR clone 362768 (TRAV26-1, TRAJ38)
CIADNAGNNRKLIW

SEQ ID NO: 725536 - protein, 15 aa, Homo sapiens
  CDR3 for beta chain variable domain of TCR clone 362768 (TRBV9, TRBJ2-1)
CASSPAGSSYNEQFF

SEQ ID NO: 725537 - protein, 14 aa, Homo sapiens
  CDR3 for alpha chain variable domain of TCR clone 362769 (TRAV38-2/DV8, TRAJ30)
CAYRSADRDDKIIF

SEQ ID NO: 725538 - protein, 16 aa, Homo sapiens
  CDR3 for beta chain variable domain of TCR clone 362769 (TRBV15, TRBJ1-3)
CATSSPIGLSGNTIYF

SEQ ID NO: 725539 - protein, 14 aa, Homo sapiens
  CDR3 for alpha chain variable domain of TCR clone 362770 (TRAV26-1, TRAJ45)
CIEVTGGGADGLTF

SEQ ID NO: 725540 - protein, 14 aa, Homo sapiens
  CDR3 for beta chain variable domain of TCR clone 362770 (TRBV19, TRBJ2-3)
CASSAPRGTDTQYF

SEQ ID NO: 725541 - protein, 13 aa, Homo sapiens
  CDR3 for alpha chain variable domain of TCR clone 362771 (TRAV29/DV5, TRAJ40)
CSASEAGTYKYIF

SEQ ID NO: 725542 - protein, 18 aa, Homo sapiens
  CDR3 for beta chain variable domain of TCR clone 362771 (TRBV14, TRBJ2-1)
CASSQEYGGAYLRGEQFF

SEQ ID NO: 725543 - protein, 15 aa, Homo sapiens
  CDR3 for alpha chain variable domain of TCR clone 362772 (TRAV35, TRAJ23)
CAGPLGNIQGGKLIF

SEQ ID NO: 725544 - protein, 14 aa, Homo sapiens
  CDR3 for beta chain variable domain of TCR clone 362772 (TRBV7-9, TRBJ1-1)
CASTPLQSYTEAFF

SEQ ID NO: 725545 - protein, 16 aa, Homo sapiens
  CDR3 for alpha chain variable domain of TCR clone 362773 (TRAV3, TRAJ37)
CAVRVRGSGNTGKLIF

SEQ ID NO: 725546 - protein, 14 aa, Homo sapiens
  CDR3 for beta chain variable domain of TCR clone 362773 (TRBV7-9, TRBJ1-2)
CASSRQGANYGYTF

SEQ ID NO: 725547 - protein, 13 aa, Homo sapiens
  CDR3 for alpha chain variable domain of TCR clone 362774 (TRAV38-2/DV8, TRAJ34)
CAYRTWNTDKLIF

SEQ ID NO: 725548 - protein, 18 aa, Homo sapiens
  CDR3 for beta chain variable domain of TCR clone 362774 (TRBV6-6, TRBJ1-3)
CASSYSKWDSIAGNTIYF

SEQ ID NO: 725549 - protein, 14 aa, Homo sapiens
  CDR3 for alpha chain variable domain of TCR clone 362775 (TRAV2, TRAJ9)
CAVEDRSGGFKTIF

SEQ ID NO: 725550 - protein, 15 aa, Homo sapiens
  CDR3 for beta chain variable domain of TCR clone 362775 (TRBV10-1, TRBJ2-3)
CASSATSGGFDTQYF

SEQ ID NO: 725551 - protein, 15 aa, Homo sapiens
  CDR3 for alpha chain variable domain of TCR clone 362776 (TRAV21, TRAJ38)
CAVRQDAGNNRTLIW

SEQ ID NO: 725552 - protein, 16 aa, Homo sapiens
  CDR3 for beta chain variable domain of TCR clone 362776 (TRBV4-2, TRBJ1-1)
CASRPLDGGGDTEAFF

SEQ ID NO: 725553 - protein, 10 aa, Homo sapiens
  CDR3 for alpha chain variable domain of TCR clone 362777 (TRAV8-3, TRAJ43)
CAVALADMRF

SEQ ID NO: 725554 - protein, 13 aa, Homo sapiens
  CDR3 for beta chain variable domain of TCR clone 362777 (TRBV27, TRBJ1-4)
CASSLMGDEKLFF

SEQ ID NO: 725555 - protein, 11 aa, Homo sapiens
  CDR3 for alpha chain variable domain of TCR clone 362778 (TRAV13-1, TRAJ30)
CSASRDDKIIF

SEQ ID NO: 725556 - protein, 15 aa, Homo sapiens
  CDR3 for beta chain variable domain of TCR clone 362778 (TRBV18, TRBJ1-1)
CASSPSSWVNTEAFF

SEQ ID NO: 725557 - protein, 16 aa, Homo sapiens
  CDR3 for alpha chain variable domain of TCR clone 362779 (TRAV20, TRAJ38)
CAVQASNAGNNRKLIW

SEQ ID NO: 725558 - protein, 16 aa, Homo sapiens
  CDR3 for beta chain variable domain of TCR clone 362779 (TRBV7-8, TRBJ2-6)
CASRVGDSSGANVLTV

SEQ ID NO: 725559 - protein, 14 aa, Homo sapiens
  CDR3 for alpha chain variable domain of TCR clone 362780 (TRAV17, TRAJ16)
CATADFSDGQKLLF

SEQ ID NO: 725560 - protein, 12 aa, Homo sapiens
  CDR3 for beta chain variable domain of TCR clone 362780 (TRBV24-1, TRBJ1-1)
CANLYPDTEAFF

SEQ ID NO: 725561 - protein, 20 aa, Homo sapiens
  CDR3 for alpha chain variable domain of TCR clone 362781 (TRAV26-2, TRAJ39)
CCVLLHPESAFYNAGNMLTF

SEQ ID NO: 725562 - protein, 14 aa, Homo sapiens
  CDR3 for beta chain variable domain of TCR clone 362781 (TRBV20-1, TRBJ1-5)
CSATDRGSNQPQHF

SEQ ID NO: 725563 - protein, 14 aa, Homo sapiens
  CDR3 for alpha chain variable domain of TCR clone 362782 (TRAV26-1, TRAJ38)
CIADNAGNNRKLIW

SEQ ID NO: 725564 - protein, 15 aa, Homo sapiens
  CDR3 for beta chain variable domain of TCR clone 362782 (TRBV9, TRBJ1-6)
CASSVAGTGDSPLHS

SEQ ID NO: 725565 - protein, 15 aa, Homo sapiens
  CDR3 for alpha chain variable domain of TCR clone 362783 (TRAV3, TRAJ16)
CAVRDGFSDGQKLLF

SEQ ID NO: 725566 - protein, 15 aa, Homo sapiens
  CDR3 for beta chain variable domain of TCR clone 362783 (TRBV5-1, TRBJ2-1)
CASSPPRAPYNEQFF

SEQ ID NO: 725567 - protein, 12 aa, Homo sapiens
  CDR3 for alpha chain variable domain of TCR clone 362784 (TRAV36/DV7, TRAJ54)
CAVVRGAQKLVF

SEQ ID NO: 725568 - protein, 18 aa, Homo sapiens
  CDR3 for beta chain variable domain of TCR clone 362784 (TRBV20-1, TRBJ2-3)
CSASGLAGGPATTDTQYF

SEQ ID NO: 725569 - protein, 13 aa, Homo sapiens
  CDR3 for alpha chain variable domain of TCR clone 362785 (TRAV8-6, TRAJ47)
CAVSDKVWSMETN

SEQ ID NO: 725570 - protein, 13 aa, Homo sapiens
  CDR3 for beta chain variable domain of TCR clone 362785 (TRBV7-9, TRBJ1-2)
CASSLKQNYGYTF

SEQ ID NO: 725571 - protein, 13 aa, Homo sapiens
  CDR3 for alpha chain variable domain of TCR clone 362786 (TRAV12-2, TRAJ4)
CAVRTGGYNKLIF

SEQ ID NO: 725572 - protein, 15 aa, Homo sapiens
  CDR3 for beta chain variable domain of TCR clone 362786 (TRBV10-3, TRBJ2-1)
CAISDVQDRAYEQFF

SEQ ID NO: 725573 - protein, 16 aa, Homo sapiens
  CDR3 for alpha chain variable domain of TCR clone 362787 (TRAV16, TRAJ4)
CALSRMFSGGYNKLIF

SEQ ID NO: 725574 - protein, 18 aa, Homo sapiens
  CDR3 for beta chain variable domain of TCR clone 362787 (TRBV12-4, TRBJ2-2)
CASSLVAGTRGRTGELFF

SEQ ID NO: 725575 - protein, 13 aa, Homo sapiens
  CDR3 for alpha chain variable domain of TCR clone 362788 (TRAV20, TRAJ21)
CAVEGYNFNKFYF

SEQ ID NO: 725576 - protein, 15 aa, Homo sapiens
  CDR3 for beta chain variable domain of TCR clone 362788 (TRBV27, TRBJ2-5)
CASSLIPSGGETQYF

SEQ ID NO: 725577 - protein, 14 aa, Homo sapiens
  CDR3 for alpha chain variable domain of TCR clone 362789 (TRAV9-2, TRAJ39)
CALYIYNAGNMLTF

SEQ ID NO: 725578 - protein, 18 aa, Homo sapiens
  CDR3 for beta chain variable domain of TCR clone 362789 (TRBV23-1, TRBJ2-3)
CISAPAVNRPASTDTQYF

SEQ ID NO: 725579 - protein, 13 aa, Homo sapiens
  CDR3 for alpha chain variable domain of TCR clone 362790 (TRAV26-1, TRAJ48)
CIVRGVGDEKLTF

SEQ ID NO: 725580 - protein, 19 aa, Homo sapiens
  CDR3 for beta chain variable domain of TCR clone 362790 (TRBV11-3, TRBJ2-2)
CASSTRPGAKTTNTGELFF

SEQ ID NO: 725581 - protein, 18 aa, Homo sapiens
  CDR3 for alpha chain variable domain of TCR clone 362791 (TRAV21, TRAJ52)
CAVRPSPAGGTSYGKLTF

SEQ ID NO: 725582 - protein, 16 aa, Homo sapiens
  CDR3 for beta chain variable domain of TCR clone 362791 (TRBV13, TRBJ2-3)
CQRPLQGSGGKNTQYF

SEQ ID NO: 725583 - protein, 12 aa, Homo sapiens
  CDR3 for alpha chain variable domain of TCR clone 362792 (TRAV1-1, TRAJ8)
CAGGTGFQKLVF

SEQ ID NO: 725584 - protein, 13 aa, Homo sapiens
  CDR3 for beta chain variable domain of TCR clone 362792 (TRBV7-9, TRBJ1-2)
CASSLKLNYGYTF

SEQ ID NO: 725585 - protein, 16 aa, Homo sapiens
  CDR3 for alpha chain variable domain of TCR clone 362793 (TRAV12-1, TRAJ42)
CVVTPYYGGSQGNLIF

SEQ ID NO: 725586 - protein, 15 aa, Homo sapiens
  CDR3 for beta chain variable domain of TCR clone 362793 (TRBV28, TRBJ2-5)
CASSSGRTIQETQYF

SEQ ID NO: 725587 - protein, 12 aa, Homo sapiens
  CDR3 for alpha chain variable domain of TCR clone 362794 (TRAV8-6, TRAJ4)
CAVSDHPNKLIF

SEQ ID NO: 725588 - protein, 16 aa, Homo sapiens
  CDR3 for beta chain variable domain of TCR clone 362794 (TRBV12-5, TRBJ2-5)
CASGPRTSGNQETQYF

SEQ ID NO: 725589 - protein, 12 aa, Homo sapiens
  CDR3 for alpha chain variable domain of TCR clone 362795 (TRAV8-3, TRAJ43)
CAVGAGNNDMRF

SEQ ID NO: 725590 - protein, 16 aa, Homo sapiens
  CDR3 for beta chain variable domain of TCR clone 362795 (TRBV4-2, TRBJ2-1)
CASSQGEGRTVNEQFF

SEQ ID NO: 725591 - protein, 14 aa, Homo sapiens
  CDR3 for alpha chain variable domain of TCR clone 362796 (TRAV26-1, TRAJ34)
CIVRVAYNTDKLIF

SEQ ID NO: 725592 - protein, 12 aa, Homo sapiens
  CDR3 for beta chain variable domain of TCR clone 362796 (TRBV18, TRBJ1-1)
CASSPGGTEAFF

SEQ ID NO: 725593 - protein, 12 aa, Homo sapiens
  CDR3 for alpha chain variable domain of TCR clone 362797 (TRAV21, TRAJ13)
PGLSGGYQKVTF

SEQ ID NO: 725594 - protein, 16 aa, Homo sapiens
  CDR3 for beta chain variable domain of TCR clone 362797 (TRBV4-1, TRBJ1-5)
CASSQGGHTTNQPQHF

SEQ ID NO: 725595 - protein, 11 aa, Homo sapiens
  CDR3 for alpha chain variable domain of TCR clone 362798 (TRAV12-2, TRAJ29)
CAVTLRSPLVF

SEQ ID NO: 725596 - protein, 15 aa, Homo sapiens
  CDR3 for beta chain variable domain of TCR clone 362798 (TRBV5-5, TRBJ1-5)
CASSSTPGSNQPQHF

SEQ ID NO: 725597 - protein, 17 aa, Homo sapiens
  CDR3 for alpha chain variable domain of TCR clone 362799 (TRAV3, TRAJ6)
CAVRDGPRAGGSYNPTF

SEQ ID NO: 725598 - protein, 14 aa, Homo sapiens
  CDR3 for beta chain variable domain of TCR clone 362799 (TRBV7-2, TRBJ2-7)
CASSPKTSFYEQYF

SEQ ID NO: 725599 - protein, 15 aa, Homo sapiens
  CDR3 for alpha chain variable domain of TCR clone 362800 (TRAV12-1, TRAJ42)
PATSVKGGSQGNLIF

SEQ ID NO: 725600 - protein, 18 aa, Homo sapiens
  CDR3 for beta chain variable domain of TCR clone 362800 (TRBV11-2, TRBJ2-3)
CASSLGGASRGAPNTQYF

SEQ ID NO: 725601 - protein, 13 aa, Homo sapiens
  CDR3 for alpha chain variable domain of TCR clone 362801 (TRAV12-2, TRAJ52)
CAVGGTSYGKLTF

SEQ ID NO: 725602 - protein, 14 aa, Homo sapiens
  CDR3 for beta chain variable domain of TCR clone 362801 (TRBV19, TRBJ2-1)
CASPTFVLSGEQFL

SEQ ID NO: 725603 - protein, 13 aa, Homo sapiens
  CDR3 for alpha chain variable domain of TCR clone 362802 (TRAV12-3, TRAJ30)
CAMSAKCDDKIIF

SEQ ID NO: 725604 - protein, 16 aa, Homo sapiens
  CDR3 for beta chain variable domain of TCR clone 362802 (TRBV12-5, TRBJ2-5)
CASGPRTSGNQETQYF

SEQ ID NO: 725605 - protein, 14 aa, Homo sapiens
  CDR3 for alpha chain variable domain of TCR clone 362803 (TRAV2, TRAJ29)
CAVEDRVGNTPLVS

SEQ ID NO: 725606 - protein, 15 aa, Homo sapiens
  CDR3 for beta chain variable domain of TCR clone 362803 (TRBV10-3, TRBJ2-1)
CAISDVQDRAYERFF

SEQ ID NO: 725607 - protein, 12 aa, Homo sapiens
  CDR3 for alpha chain variable domain of TCR clone 362804 (TRAV13-1, TRAJ15)
CAASQAGTALIF

SEQ ID NO: 725608 - protein, 14 aa, Homo sapiens
  CDR3 for beta chain variable domain of TCR clone 362804 (TRBV19, TRBJ2-2)
CASSTLHRSGALFF

SEQ ID NO: 725609 - protein, 14 aa, Homo sapiens
  CDR3 for alpha chain variable domain of TCR clone 362805 (TRAV8-3, TRAJ4)
CAVGAAGGYNKLIF

SEQ ID NO: 725610 - protein, 15 aa, Homo sapiens
  CDR3 for beta chain variable domain of TCR clone 362805 (TRBV5-1, TRBJ2-1)
CASSPPRAPYDEQFC

SEQ ID NO: 725611 - protein, 14 aa, Homo sapiens
  CDR3 for alpha chain variable domain of TCR clone 362806 (TRAV12-3, TRAJ10)
SHLPLTGGGNKLTF

SEQ ID NO: 725612 - protein, 17 aa, Homo sapiens
  CDR3 for beta chain variable domain of TCR clone 362806 (TRBV28, TRBJ2-5)
CASSTTEGDALQETQYF

SEQ ID NO: 725613 - protein, 14 aa, Homo sapiens
  CDR3 for alpha chain variable domain of TCR clone 362807 (TRAV17, TRAJ37)
CATDGTSNTGKLIF

SEQ ID NO: 725614 - protein, 13 aa, Homo sapiens
  CDR3 for beta chain variable domain of TCR clone 362807 (TRBV11-2, TRBJ2-1)
CASSLDLVNEQFF

SEQ ID NO: 725615 - protein, 16 aa, Homo sapiens
  CDR3 for alpha chain variable domain of TCR clone 362808 (TRAV8-3, TRAJ44)
CAVGPLNTGTASKLTF

SEQ ID NO: 725616 - protein, 15 aa, Homo sapiens
  CDR3 for beta chain variable domain of TCR clone 362808 (TRBV10-3, TRBJ2-3)
CAISLTSGGTDTQYF

SEQ ID NO: 725617 - protein, 12 aa, Homo sapiens
  CDR3 for alpha chain variable domain of TCR clone 362809 (TRAV1-1, TRAJ39)
CAVLVVGNMLTF

SEQ ID NO: 725618 - protein, 15 aa, Homo sapiens
  CDR3 for beta chain variable domain of TCR clone 362809 (TRBV19, TRBJ1-6)
CASSTQGAVGSPLHF

SEQ ID NO: 725619 - protein, 14 aa, Homo sapiens
  CDR3 for alpha chain variable domain of TCR clone 362810 (TRAV25, TRAJ6)
CAGRVTGGSYIPTF

SEQ ID NO: 725620 - protein, 13 aa, Homo sapiens
  CDR3 for beta chain variable domain of TCR clone 362810 (TRBV12-4, TRBJ2-7)
CASSFVPTAEQYF

SEQ ID NO: 725621 - protein, 13 aa, Homo sapiens
  CDR3 for alpha chain variable domain of TCR clone 362811 (TRAV8-6, TRAJ13)
CAVRDGGYQKVTF

SEQ ID NO: 725622 - protein, 15 aa, Homo sapiens
  CDR3 for beta chain variable domain of TCR clone 362811 (TRBV7-9, TRBJ2-2)
YASRPEGTSTGELFF

SEQ ID NO: 725623 - protein, 12 aa, Homo sapiens
  CDR3 for alpha chain variable domain of TCR clone 362812 (TRAV12-1, TRAJ20)
CVANPDDYNLSF

SEQ ID NO: 725624 - protein, 12 aa, Homo sapiens
  CDR3 for beta chain variable domain of TCR clone 362812 (TRBV11-2, TRBJ2-2)
CASSLGGGELFF

SEQ ID NO: 725625 - protein, 17 aa, Homo sapiens
  CDR3 for alpha chain variable domain of TCR clone 362813 (TRAV8-4, TRAJ45)
CAVSEGGSGGGADGLTF

SEQ ID NO: 725626 - protein, 14 aa, Homo sapiens
  CDR3 for beta chain variable domain of TCR clone 362813 (TRBV7-3, TRBJ2-1)
CASSLAGGTNEQFF

SEQ ID NO: 725627 - protein, 14 aa, Homo sapiens
  CDR3 for alpha chain variable domain of TCR clone 362814 (TRAV3, TRAJ34)
CAVRDINNSDKLIF

SEQ ID NO: 725628 - protein, 15 aa, Homo sapiens
  CDR3 for beta chain variable domain of TCR clone 362814 (TRBV20-1, TRBJ2-7)
CSARDRVSGMDEQYF

SEQ ID NO: 725629 - protein, 11 aa, Homo sapiens
  CDR3 for alpha chain variable domain of TCR clone 362815 (TRAV23/DV6, TRAJ58)
CAARLLRGETS

SEQ ID NO: 725630 - protein, 13 aa, Homo sapiens
  CDR3 for beta chain variable domain of TCR clone 362815 (TRBV12-4, TRBJ1-2)
CASSLRQGKGYTF

SEQ ID NO: 725631 - protein, 11 aa, Homo sapiens
  CDR3 for alpha chain variable domain of TCR clone 362816 (TRAV2, TRAJ33)
CAVESNYQLIW

SEQ ID NO: 725632 - protein, 12 aa, Homo sapiens
  CDR3 for beta chain variable domain of TCR clone 362816 (TRBV14, TRBJ2-5)
CASSQLKETQYF

SEQ ID NO: 725633 - protein, 16 aa, Homo sapiens
  CDR3 for alpha chain variable domain of TCR clone 362817 (TRAV12-2, TRAJ40)
CAVIRGGTSGTYKYIF

SEQ ID NO: 725634 - protein, 15 aa, Homo sapiens
  CDR3 for beta chain variable domain of TCR clone 362817 (TRBV20-1, TRBJ2-7)
CSARDRVSGMDEQYF

SEQ ID NO: 725635 - protein, 14 aa, Homo sapiens
  CDR3 for alpha chain variable domain of TCR clone 362818 (TRAV3, TRAJ21)
CAVESQANFNKFYF

SEQ ID NO: 725636 - protein, 14 aa, Homo sapiens
  CDR3 for beta chain variable domain of TCR clone 362818 (TRBV11-2, TRBJ2-1)
CASSVGGSFNEQFF

SEQ ID NO: 725637 - protein, 12 aa, Homo sapiens
  CDR3 for alpha chain variable domain of TCR clone 362819 (TRAV35, TRAJ30)
CDGLNRDDKIIF

SEQ ID NO: 725638 - protein, 15 aa, Homo sapiens
  CDR3 for beta chain variable domain of TCR clone 362819 (TRBV9, TRBJ1-6)
CASSVAGTGDSPLHF

SEQ ID NO: 725639 - protein, 14 aa, Homo sapiens
  CDR3 for alpha chain variable domain of TCR clone 362820 (TRAV13-2, TRAJ9)
CAENLETGGFKTIF

SEQ ID NO: 725640 - protein, 16 aa, Homo sapiens
  CDR3 for beta chain variable domain of TCR clone 362820 (TRBV11-2, TRBJ2-5)
CASSGQGYSPQETQYF

SEQ ID NO: 725641 - protein, 18 aa, Homo sapiens
  CDR3 for alpha chain variable domain of TCR clone 362821 (TRAV21, TRAJ52)
CAVRPSPAGGTSYGKLTF

SEQ ID NO: 725642 - protein, 13 aa, Homo sapiens
  CDR3 for beta chain variable domain of TCR clone 362821 (TRBV5-4, TRBJ1-1)
CASSVDLGAEAFF

SEQ ID NO: 725643 - protein, 13 aa, Homo sapiens
  CDR3 for alpha chain variable domain of TCR clone 362822 (TRAV17, TRAJ5)
CATGDTGRRAITF

SEQ ID NO: 725644 - protein, 13 aa, Homo sapiens
  CDR3 for beta chain variable domain of TCR clone 362822 (TRBV19, TRBJ1-5)
CASSIEPVQPQHF

SEQ ID NO: 725645 - protein, 13 aa, Homo sapiens
  CDR3 for alpha chain variable domain of TCR clone 362823 (TRAV12-3, TRAJ33)
CAMSVESNYQLIW

SEQ ID NO: 725646 - protein, 18 aa, Homo sapiens
  CDR3 for beta chain variable domain of TCR clone 362823 (TRBV7-6, TRBJ2-1)
CASSPRTSGMSSYNEQFF

SEQ ID NO: 725647 - protein, 16 aa, Homo sapiens
  CDR3 for alpha chain variable domain of TCR clone 362824 (TRAV38-1, TRAJ56)
WAFMKRQTGSNSKLTF

SEQ ID NO: 725648 - protein, 16 aa, Homo sapiens
  CDR3 for beta chain variable domain of TCR clone 362824 (TRBV20-1, TRBJ1-4)
CSAPGQGLLTNEKLFF

SEQ ID NO: 725649 - protein, 14 aa, Homo sapiens
  CDR3 for alpha chain variable domain of TCR clone 362825 (TRAV20, TRAJ22)
CAVALGGSARQLTF

SEQ ID NO: 725650 - protein, 15 aa, Homo sapiens
  CDR3 for beta chain variable domain of TCR clone 362825 (TRBV7-2, TRBJ1-1)
CARSFAGDRDTEAFF

SEQ ID NO: 725651 - protein, 12 aa, Homo sapiens
  CDR3 for alpha chain variable domain of TCR clone 362826 (TRAV27, TRAJ36)
ASTPAGANNLFF

SEQ ID NO: 725652 - protein, 13 aa, Homo sapiens
  CDR3 for beta chain variable domain of TCR clone 362826 (TRBV7-3, TRBJ1-1)
CASSQDWGAEAFF

SEQ ID NO: 725653 - protein, 17 aa, Homo sapiens
  CDR3 for alpha chain variable domain of TCR clone 362827 (TRAV3, TRAJ6)
CAVRDGPRAGGSYIHTF

SEQ ID NO: 725654 - protein, 13 aa, Homo sapiens
  CDR3 for beta chain variable domain of TCR clone 362827 (TRBV19, TRBJ1-1)
CASSITGESEAFF

SEQ ID NO: 725655 - protein, 13 aa, Homo sapiens
  CDR3 for alpha chain variable domain of TCR clone 362828 (TRAV2, TRAJ15)
CAVASQAGTALIF

SEQ ID NO: 725656 - protein, 14 aa, Homo sapiens
  CDR3 for beta chain variable domain of TCR clone 362828 (TRBV5-7, TRBJ2-4)
CASTLSGVKNIQYF

SEQ ID NO: 725657 - protein, 17 aa, Homo sapiens
  CDR3 for alpha chain variable domain of TCR clone 362829 (TRAV3, TRAJ12)
CSVRDGGRMDSSYKLIF

SEQ ID NO: 725658 - protein, 13 aa, Homo sapiens
  CDR3 for beta chain variable domain of TCR clone 362829 (TRBV20-1, TRBJ1-1)
CSAPLGGGTEAFF

SEQ ID NO: 725659 - protein, 18 aa, Homo sapiens
  CDR3 for alpha chain variable domain of TCR clone 362830 (TRAV12-2, )
CAVEDIQNPDPAVYQLTD

SEQ ID NO: 725660 - protein, 15 aa, Homo sapiens
  CDR3 for beta chain variable domain of TCR clone 362830 (TRBV11-1, TRBJ2-7)
CAGSLNYGASYEQYF

SEQ ID NO: 725661 - protein, 13 aa, Homo sapiens
  CDR3 for alpha chain variable domain of TCR clone 362831 (TRAV12-2, TRAJ7)
CAVNLYGKNRLAF

SEQ ID NO: 725662 - protein, 14 aa, Homo sapiens
  CDR3 for beta chain variable domain of TCR clone 362831 (TRBV25-1, TRBJ1-2)
CASSEATGPYGYTF

SEQ ID NO: 725663 - protein, 16 aa, Homo sapiens
  CDR3 for alpha chain variable domain of TCR clone 362832 (TRAV26-1, TRAJ23)
CIVRVHPYNQGGKLIF

SEQ ID NO: 725664 - protein, 15 aa, Homo sapiens
  CDR3 for beta chain variable domain of TCR clone 362832 (TRBV5-7, TRBJ2-7)
CASSPYFAGSYEQYF

SEQ ID NO: 725665 - protein, 16 aa, Homo sapiens
  CDR3 for alpha chain variable domain of TCR clone 362833 (TRAV30, TRAJ24)
RGTEIVDANSWGKFQF

SEQ ID NO: 725666 - protein, 14 aa, Homo sapiens
  CDR3 for beta chain variable domain of TCR clone 362833 (TRBV12-5, TRBJ2-5)
CASGSRTHQETQYF

SEQ ID NO: 725667 - protein, 13 aa, Homo sapiens
  CDR3 for alpha chain variable domain of TCR clone 362834 (TRAV1-2, TRAJ33)
CAVSEDNNYQLIW

SEQ ID NO: 725668 - protein, 16 aa, Homo sapiens
  CDR3 for beta chain variable domain of TCR clone 362834 (TRBV4-2, TRBJ2-7)
CASSQDGVERGYEQCF

SEQ ID NO: 725669 - protein, 11 aa, Homo sapiens
  CDR3 for alpha chain variable domain of TCR clone 362835 (TRAV12-3, TRAJ49)
CAANTGNQFYF

SEQ ID NO: 725670 - protein, 13 aa, Homo sapiens
  CDR3 for beta chain variable domain of TCR clone 362835 (TRBV7-9, TRBJ1-2)
CASSLKQNYGYAF

SEQ ID NO: 725671 - protein, 14 aa, Homo sapiens
  CDR3 for alpha chain variable domain of TCR clone 362836 (TRAV30, TRAJ26)
CGTEIVSYGQNFVF

SEQ ID NO: 725672 - protein, 13 aa, Homo sapiens
  CDR3 for beta chain variable domain of TCR clone 362836 (TRBV7-3, TRBJ1-1)
CASSQDWGAESFF

SEQ ID NO: 725673 - protein, 13 aa, Homo sapiens
  CDR3 for alpha chain variable domain of TCR clone 362837 (TRAV21, TRAJ37)
CAVSSGNTGKLIF

SEQ ID NO: 725674 - protein, 17 aa, Homo sapiens
  CDR3 for beta chain variable domain of TCR clone 362837 (TRBV5-1, TRBJ2-5)
CASRLLGLAANQETQYF

SEQ ID NO: 725675 - protein, 12 aa, Homo sapiens
  CDR3 for alpha chain variable domain of TCR clone 362838 (TRAV21, TRAJ45)
CAAGGGADGLTF

SEQ ID NO: 725676 - protein, 13 aa, Homo sapiens
  CDR3 for beta chain variable domain of TCR clone 362838 (TRBV12-4, TRBJ2-2)
CASSITGSGELFF

SEQ ID NO: 725677 - protein, 15 aa, Homo sapiens
  CDR3 for alpha chain variable domain of TCR clone 362839 (TRAV8-3, TRAJ27)
CAVGPSKTNAGKFTF

SEQ ID NO: 725678 - protein, 15 aa, Homo sapiens
  CDR3 for beta chain variable domain of TCR clone 362839 (TRBV7-2, TRBJ2-1)
CASSSGLAGGNEQFF

SEQ ID NO: 725679 - protein, 13 aa, Homo sapiens
  CDR3 for alpha chain variable domain of TCR clone 362840 (TRAV8-6, TRAJ8)
CAVSNTGFQKLVF

SEQ ID NO: 725680 - protein, 16 aa, Homo sapiens
  CDR3 for beta chain variable domain of TCR clone 362840 (TRBV2, TRBJ1-1)
CASSPTLGGASTEAFF

SEQ ID NO: 725681 - protein, 15 aa, Homo sapiens
  CDR3 for alpha chain variable domain of TCR clone 362841 (TRAV8-3, TRAJ27)
CDVGPSKTNAGKSTF

SEQ ID NO: 725682 - protein, 14 aa, Homo sapiens
  CDR3 for beta chain variable domain of TCR clone 362841 (TRBV11-2, TRBJ2-7)
CASSLGAGAYEQYF

SEQ ID NO: 725683 - protein, 17 aa, Homo sapiens
  CDR3 for alpha chain variable domain of TCR clone 362842 (TRAV3, TRAJ6)
CAVRDGPRAGGSYIPKF

SEQ ID NO: 725684 - protein, 13 aa, Homo sapiens
  CDR3 for beta chain variable domain of TCR clone 362842 (TRBV27, TRBJ2-1)
CASRTLGVGEQFF

SEQ ID NO: 725685 - protein, 16 aa, Homo sapiens
  CDR3 for alpha chain variable domain of TCR clone 362843 (TRAV8-3, TRAJ52)
CAVQPAGGTSFGKLTF

SEQ ID NO: 725686 - protein, 15 aa, Homo sapiens
  CDR3 for beta chain variable domain of TCR clone 362843 (TRBV11-2, TRBJ2-7)
CASSLAGGVATEQYF

SEQ ID NO: 725687 - protein, 14 aa, Homo sapiens
  CDR3 for alpha chain variable domain of TCR clone 362844 (TRAV4, TRAJ26)
CLVGPHNYGQNFVF

SEQ ID NO: 725688 - protein, 14 aa, Homo sapiens
  CDR3 for beta chain variable domain of TCR clone 362844 (TRBV7-2, TRBJ1-1)
CASSFLTGTTEALF

SEQ ID NO: 725689 - protein, 13 aa, Homo sapiens
  CDR3 for alpha chain variable domain of TCR clone 362845 (TRAV26-1, TRAJ40)
CIVRVEGTYKYIF

SEQ ID NO: 725690 - protein, 14 aa, Homo sapiens
  CDR3 for beta chain variable domain of TCR clone 362845 (TRBV7-2, TRBJ2-7)
CASSPKTSFYEQYF

SEQ ID NO: 725691 - protein, 17 aa, Homo sapiens
  CDR3 for alpha chain variable domain of TCR clone 362846 (TRAV23/DV6, TRAJ57)
CSASSTLSPGGSEKLVF

SEQ ID NO: 725692 - protein, 14 aa, Homo sapiens
  CDR3 for beta chain variable domain of TCR clone 362846 (TRBV25-1, TRBJ1-1)
CASTHLGGNTEAFF

SEQ ID NO: 725693 - protein, 20 aa, Homo sapiens
  CDR3 for alpha chain variable domain of TCR clone 362847 (TRAV12-1, TRAJ42)
SSVIQPPTSVKGGSQGNLIF

SEQ ID NO: 725694 - protein, 15 aa, Homo sapiens
  CDR3 for beta chain variable domain of TCR clone 362847 (TRBV4-1, TRBJ2-7)
CASSQETGRLYEQYF

SEQ ID NO: 725695 - protein, 14 aa, Homo sapiens
  CDR3 for alpha chain variable domain of TCR clone 362848 (TRAV12-2, TRAJ17)
FAVLFKAAGNKLTF

SEQ ID NO: 725696 - protein, 14 aa, Homo sapiens
  CDR3 for beta chain variable domain of TCR clone 362848 (TRBV4-1, TRBJ2-2)
CASSPAVNTGELFF

SEQ ID NO: 725697 - protein, 12 aa, Homo sapiens
  CDR3 for alpha chain variable domain of TCR clone 362849 (TRAV12-1, TRAJ40)
CVVYSGTYKYIL

SEQ ID NO: 725698 - protein, 21 aa, Homo sapiens
  CDR3 for beta chain variable domain of TCR clone 362849 (TRBV7-6, TRBJ2-1)
SRTRPCIAAPAAWGGADEQFF

SEQ ID NO: 725699 - protein, 14 aa, Homo sapiens
  CDR3 for alpha chain variable domain of TCR clone 362850 (TRAV38-1, TRAJ43)
CAFMKHNNNNDMRF

SEQ ID NO: 725700 - protein, 14 aa, Homo sapiens
  CDR3 for beta chain variable domain of TCR clone 362850 (TRBV5-1, TRBJ2-7)
CASSRGESLYEQYF

SEQ ID NO: 725701 - protein, 16 aa, Homo sapiens
  CDR3 for alpha chain variable domain of TCR clone 362851 (TRAV30, TRAJ24)
CGTEIVDADSRGKFQF

SEQ ID NO: 725702 - protein, 13 aa, Homo sapiens
  CDR3 for beta chain variable domain of TCR clone 362851 (TRBV7-3, TRBJ1-1)
CASSQDWGAEAFF

SEQ ID NO: 725703 - protein, 14 aa, Homo sapiens
  CDR3 for alpha chain variable domain of TCR clone 362852 (TRAV8-6, TRAJ22)
CAVRFSGSARQLTF

SEQ ID NO: 725704 - protein, 13 aa, Homo sapiens
  CDR3 for beta chain variable domain of TCR clone 362852 (TRBV11-2, TRBJ2-5)
CASSFSSQETQYF

SEQ ID NO: 725705 - protein, 14 aa, Homo sapiens
  CDR3 for alpha chain variable domain of TCR clone 362853 (TRAV12-3, TRAJ10)
SHLPLTGGGNKLTF

SEQ ID NO: 725706 - protein, 19 aa, Homo sapiens
  CDR3 for beta chain variable domain of TCR clone 362853 (TRBV19, TRBJ2-2)
CASTRPGLAGGRVIGELFF

SEQ ID NO: 725707 - protein, 19 aa, Homo sapiens
  CDR3 for alpha chain variable domain of TCR clone 362854 (TRAV26-1, TRAJ52)
CIVRAHRNTGGTSYGKLTF

SEQ ID NO: 725708 - protein, 14 aa, Homo sapiens
  CDR3 for beta chain variable domain of TCR clone 362854 (TRBV4-1, TRBJ2-2)
CASSQAVNTGELFF

SEQ ID NO: 725709 - protein, 15 aa, Homo sapiens
  CDR3 for alpha chain variable domain of TCR clone 362855 (TRAV13-1, TRAJ10)
CAATILTGGGNKLTF

SEQ ID NO: 725710 - protein, 13 aa, Homo sapiens
  CDR3 for beta chain variable domain of TCR clone 362855 (TRBV11-2, TRBJ2-5)
CASSFSSQETQYF

SEQ ID NO: 725711 - protein, 14 aa, Homo sapiens
  CDR3 for alpha chain variable domain of TCR clone 362856 (TRAV1-2, TRAJ16)
CAVNRFSDVQKLLF

SEQ ID NO: 725712 - protein, 15 aa, Homo sapiens
  CDR3 for beta chain variable domain of TCR clone 362856 (TRBV9, TRBJ2-1)
CASSLAGSSYNEQFF

SEQ ID NO: 725713 - protein, 15 aa, Homo sapiens
  CDR3 for alpha chain variable domain of TCR clone 362857 (TRAV13-1, TRAJ17)
CAASIERAAGNKLTF

SEQ ID NO: 725714 - protein, 19 aa, Homo sapiens
  CDR3 for beta chain variable domain of TCR clone 362857 (TRBV25-1, TRBJ2-2)
CAILVYRVDRGRKTGELFF

SEQ ID NO: 725715 - protein, 18 aa, Homo sapiens
  CDR3 for alpha chain variable domain of TCR clone 362858 (TRAV21, TRAJ53)
CAVKGGENSGGSNYKLTF

SEQ ID NO: 725716 - protein, 17 aa, Homo sapiens
  CDR3 for beta chain variable domain of TCR clone 362858 (TRBV11-2, TRBJ2-1)
CASSLYPPGVEYNEQLF

SEQ ID NO: 725717 - protein, 14 aa, Homo sapiens
  CDR3 for alpha chain variable domain of TCR clone 362859 (TRAV12-3, TRAJ9)
CAMSPNTGGFKTIF

SEQ ID NO: 725718 - protein, 13 aa, Homo sapiens
  CDR3 for beta chain variable domain of TCR clone 362859 (TRBV20-1, TRBJ2-5)
CSAATELQETQYF

SEQ ID NO: 725719 - protein, 12 aa, Homo sapiens
  CDR3 for alpha chain variable domain of TCR clone 362860 (TRAV12-1, TRAJ40)
CLVPSGTYKYIF

SEQ ID NO: 725720 - protein, 15 aa, Homo sapiens
  CDR3 for beta chain variable domain of TCR clone 362860 (TRBV12-4, TRBJ2-1)
CASSPLSGRNSEQFF

SEQ ID NO: 725721 - protein, 13 aa, Homo sapiens
  CDR3 for alpha chain variable domain of TCR clone 362861 (TRAV12-1, TRAJ29)
CVVNGPGNTPLVF

SEQ ID NO: 725722 - protein, 12 aa, Homo sapiens
  CDR3 for beta chain variable domain of TCR clone 362861 (TRBV20-1, TRBJ2-7)
CSAITPTKEQYF

SEQ ID NO: 725723 - protein, 16 aa, Homo sapiens
  CDR3 for alpha chain variable domain of TCR clone 362862 (TRAV30, TRAJ24)
CGTEIVDADCWGKFQF

SEQ ID NO: 725724 - protein, 13 aa, Homo sapiens
  CDR3 for beta chain variable domain of TCR clone 362862 (TRBV18, TRBJ1-2)
CASSASATEGYTF

SEQ ID NO: 725725 - protein, 17 aa, Homo sapiens
  CDR3 for alpha chain variable domain of TCR clone 362863 (TRAV13-1, TRAJ10)
CAASIWRGTGGGNKLTF

SEQ ID NO: 725726 - protein, 12 aa, Homo sapiens
  CDR3 for beta chain variable domain of TCR clone 362863 (TRBV20-1, TRBJ1-1)
QCWGGGNTEAFF

SEQ ID NO: 725727 - protein, 18 aa, Homo sapiens
  CDR3 for alpha chain variable domain of TCR clone 362864 (TRAV3, TRAJ17)
CAVSARRGGRSCRQHANF

SEQ ID NO: 725728 - protein, 14 aa, Homo sapiens
  CDR3 for beta chain variable domain of TCR clone 362864 (TRBV4-1, TRBJ2-2)
CASSQAVNTGELFF

SEQ ID NO: 725729 - protein, 13 aa, Homo sapiens
  CDR3 for alpha chain variable domain of TCR clone 362865 (TRAV16, TRAJ28)
CALTGAGSYQLTF

SEQ ID NO: 725730 - protein, 15 aa, Homo sapiens
  CDR3 for beta chain variable domain of TCR clone 362865 (TRBV20-1, TRBJ2-7)
CSARDRVSGMDEQYF

SEQ ID NO: 725731 - protein, 14 aa, Homo sapiens
  CDR3 for alpha chain variable domain of TCR clone 362866 (TRAV3, TRAJ40)
CAVRDRRGTYKYLF

SEQ ID NO: 725732 - protein, 15 aa, Homo sapiens
  CDR3 for beta chain variable domain of TCR clone 362866 (TRBV28, TRBJ2-1)
CASSIIAGGRSEQFF

SEQ ID NO: 725733 - protein, 14 aa, Homo sapiens
  CDR3 for alpha chain variable domain of TCR clone 362867 (TRAV35, TRAJ33)
CAGSSQDSNYQLIW

SEQ ID NO: 725734 - protein, 17 aa, Homo sapiens
  CDR3 for beta chain variable domain of TCR clone 362867 (TRBV29-1, TRBJ2-7)
CSVEFFDRGSYEQYLGR

SEQ ID NO: 725735 - protein, 14 aa, Homo sapiens
  CDR3 for alpha chain variable domain of TCR clone 362868 (TRAV13-2, TRAJ17)
CAENSKAAGSKLTF

SEQ ID NO: 725736 - protein, 17 aa, Homo sapiens
  CDR3 for beta chain variable domain of TCR clone 362868 (TRBV28, TRBJ2-5)
CASSTPEGDALQETQYF

SEQ ID NO: 725737 - protein, 15 aa, Homo sapiens
  CDR3 for alpha chain variable domain of TCR clone 362869 (TRAV26-1, TRAJ29)
CIVRVEGSGNTLLVF

SEQ ID NO: 725738 - protein, 15 aa, Homo sapiens
  CDR3 for beta chain variable domain of TCR clone 362869 (TRBV7-9, TRBJ1-5)
CASSQGHQPKQPQHF

SEQ ID NO: 725739 - protein, 16 aa, Homo sapiens
  CDR3 for alpha chain variable domain of TCR clone 362870 (TRAV8-1, TRAJ42)
CAVISRYGGSQGNLIF

SEQ ID NO: 725740 - protein, 12 aa, Homo sapiens
  CDR3 for beta chain variable domain of TCR clone 362870 (TRBV6-3, TRBJ2-7)
CASSLGRRGLYF

SEQ ID NO: 725741 - protein, 13 aa, Homo sapiens
  CDR3 for alpha chain variable domain of TCR clone 362871 (TRAV8-6, TRAJ21)
CAVSPSSLNKFYF

SEQ ID NO: 725742 - protein, 15 aa, Homo sapiens
  CDR3 for beta chain variable domain of TCR clone 362871 (TRBV28, TRBJ2-3)
CASSPDRQGANTQYF

SEQ ID NO: 725743 - protein, 11 aa, Homo sapiens
  CDR3 for alpha chain variable domain of TCR clone 362872 (TRAV23/DV6, TRAJ9)
CAASLSPPHTG

SEQ ID NO: 725744 - protein, 15 aa, Homo sapiens
  CDR3 for beta chain variable domain of TCR clone 362872 (TRBV2, TRBJ2-7)
CASSEGLARSYEQYF

SEQ ID NO: 725745 - protein, 14 aa, Homo sapiens
  CDR3 for alpha chain variable domain of TCR clone 362873 (TRAV35, TRAJ22)
CAGLRPGSARQLPF

SEQ ID NO: 725746 - protein, 14 aa, Homo sapiens
  CDR3 for beta chain variable domain of TCR clone 362873 (TRBV4-1, TRBJ2-7)
CASSPVAGGDEQYF

SEQ ID NO: 725747 - protein, 14 aa, Homo sapiens
  CDR3 for alpha chain variable domain of TCR clone 362874 (TRAV1-2, TRAJ16)
CAVNRFSDCQKLLF

SEQ ID NO: 725748 - protein, 16 aa, Homo sapiens
  CDR3 for beta chain variable domain of TCR clone 362874 (TRBV12-4, TRBJ1-5)
CASSRPVGGSNQPQHF

SEQ ID NO: 725749 - protein, 11 aa, Homo sapiens
  CDR3 for alpha chain variable domain of TCR clone 362875 (TRAV27, TRAJ47)
CAGAYGNKLVF

SEQ ID NO: 725750 - protein, 13 aa, Homo sapiens
  CDR3 for beta chain variable domain of TCR clone 362875 (TRBV6-4, TRBJ2-1)
CASSASVNNEQFF

SEQ ID NO: 725751 - protein, 15 aa, Homo sapiens
  CDR3 for alpha chain variable domain of TCR clone 362876 (TRAV13-1, TRAJ45)
CAASGSGGGAYGLTF

SEQ ID NO: 725752 - protein, 14 aa, Homo sapiens
  CDR3 for beta chain variable domain of TCR clone 362876 (TRBV12-4, TRBJ1-2)
CASSFVGTAYGYTF

SEQ ID NO: 725753 - protein, 14 aa, Homo sapiens
  CDR3 for alpha chain variable domain of TCR clone 362877 (TRAV26-1, TRAJ21)
CIVRVVYNFNKFYF

SEQ ID NO: 725754 - protein, 15 aa, Homo sapiens
  CDR3 for beta chain variable domain of TCR clone 362877 (TRBV5-5, TRBJ2-2)
CASSRQASGAGELFF

SEQ ID NO: 725755 - protein, 13 aa, Homo sapiens
  CDR3 for alpha chain variable domain of TCR clone 362878 (TRAV2, TRAJ40)
CAVVTSGTYKYIF

SEQ ID NO: 725756 - protein, 16 aa, Homo sapiens
  CDR3 for beta chain variable domain of TCR clone 362878 (TRBV19, TRBJ2-2)
CASRYPGTGATGELFF

SEQ ID NO: 725757 - protein, 13 aa, Homo sapiens
  CDR3 for alpha chain variable domain of TCR clone 362879 (TRAV1-2, TRAJ9)
CAALNTGGFKTIF

SEQ ID NO: 725758 - protein, 13 aa, Homo sapiens
  CDR3 for beta chain variable domain of TCR clone 362879 (TRBV20-1, TRBJ1-2)
CSATGIQGSGYTF

SEQ ID NO: 725759 - protein, 15 aa, Homo sapiens
  CDR3 for alpha chain variable domain of TCR clone 362880 (TRAV26-1, TRAJ29)
CIVRVEGPGNTPLVF

SEQ ID NO: 725760 - protein, 18 aa, Homo sapiens
  CDR3 for beta chain variable domain of TCR clone 362880 (TRBV5-5, TRBJ1-5)
CASSLRQVKGSSNQPQHF

SEQ ID NO: 725761 - protein, 15 aa, Homo sapiens
  CDR3 for alpha chain variable domain of TCR clone 362881 (TRAV21, TRAJ24)
CAARSSTDRWGKLQF

SEQ ID NO: 725762 - protein, 14 aa, Homo sapiens
  CDR3 for beta chain variable domain of TCR clone 362881 (TRBV25-1, TRBJ1-1)
CASTHLGGNTEAFF

SEQ ID NO: 725763 - protein, 13 aa, Homo sapiens
  CDR3 for alpha chain variable domain of TCR clone 362882 (TRAV12-1, TRAJ39)
CVARSGAGNMLTF

SEQ ID NO: 725764 - protein, 13 aa, Homo sapiens
  CDR3 for beta chain variable domain of TCR clone 362882 (TRBV6-5, TRBJ1-2)
CASSYWENYGYTF

SEQ ID NO: 725765 - protein, 15 aa, Homo sapiens
  CDR3 for alpha chain variable domain of TCR clone 362883 (TRAV20, TRAJ6)
CAVRLQPGGSYIPTF

SEQ ID NO: 725766 - protein, 14 aa, Homo sapiens
  CDR3 for beta chain variable domain of TCR clone 362883 (TRBV12-4, TRBJ2-7)
CASSASGGWYEQYF

SEQ ID NO: 725767 - protein, 13 aa, Homo sapiens
  CDR3 for alpha chain variable domain of TCR clone 362884 (TRAV2, TRAJ15)
CAVASQAVTALIF

SEQ ID NO: 725768 - protein, 17 aa, Homo sapiens
  CDR3 for beta chain variable domain of TCR clone 362884 (TRBV20-1, TRBJ2-2)
CSASGSGQGGLTGELFF

SEQ ID NO: 725769 - protein, 22 aa, Homo sapiens
  CDR3 for alpha chain variable domain of TCR clone 362885 (TRAV40, )
CLLGDGIPDIQNPDPAVYQLRD

SEQ ID NO: 725770 - protein, 15 aa, Homo sapiens
  CDR3 for beta chain variable domain of TCR clone 362885 (TRBV9, TRBJ1-6)
CASSVAGTGDSPLHF

SEQ ID NO: 725771 - protein, 14 aa, Homo sapiens
  CDR3 for alpha chain variable domain of TCR clone 362886 (TRAV1-2, TRAJ16)
CAVNRFSDGQKLLF

SEQ ID NO: 725772 - protein, 13 aa, Homo sapiens
  CDR3 for beta chain variable domain of TCR clone 362886 (TRBV20-1, TRBJ1-1)
CSARGGGNTEAYF

SEQ ID NO: 725773 - protein, 17 aa, Homo sapiens
  CDR3 for alpha chain variable domain of TCR clone 362887 (TRAV3, TRAJ38)
CAVRDCLNAGNNRKLIW

SEQ ID NO: 725774 - protein, 15 aa, Homo sapiens
  CDR3 for beta chain variable domain of TCR clone 362887 (TRBV27, TRBJ2-1)
CASSNGGGSSNEQFC

SEQ ID NO: 725775 - protein, 12 aa, Homo sapiens
  CDR3 for alpha chain variable domain of TCR clone 362888 (TRAV1-2, TRAJ33)
RAALDSNYQLIW

SEQ ID NO: 725776 - protein, 14 aa, Homo sapiens
  CDR3 for beta chain variable domain of TCR clone 362888 (TRBV20-1, TRBJ2-1)
CSAQIGGSANEQFF

SEQ ID NO: 725777 - protein, 22 aa, Homo sapiens
  CDR3 for alpha chain variable domain of TCR clone 362889 (TRAV2, TRAJ10)
IHQVREADAAVYYTGGGNKLTF

SEQ ID NO: 725778 - protein, 16 aa, Homo sapiens
  CDR3 for beta chain variable domain of TCR clone 362889 (TRBV29-1, TRBJ2-5)
CSVEGLAGDYQETQYF

SEQ ID NO: 725779 - protein, 14 aa, Homo sapiens
  CDR3 for alpha chain variable domain of TCR clone 362890 (TRAV29/DV5, TRAJ36)
CAALRKTGAYNLFF

SEQ ID NO: 725780 - protein, 17 aa, Homo sapiens
  CDR3 for beta chain variable domain of TCR clone 362890 (TRBV7-6, TRBJ2-5)
CASSPGLADPWGETQYF

SEQ ID NO: 725781 - protein, 15 aa, Homo sapiens
  CDR3 for alpha chain variable domain of TCR clone 362891 (TRAV3, TRAJ4)
CAVRDGTGGYNKLIL

SEQ ID NO: 725782 - protein, 14 aa, Homo sapiens
  CDR3 for beta chain variable domain of TCR clone 362891 (TRBV7-2, TRBJ1-2)
CASSQTGSTYGYTF

SEQ ID NO: 725783 - protein, 13 aa, Homo sapiens
  CDR3 for alpha chain variable domain of TCR clone 362892 (TRAV23/DV6, TRAJ12)
CAPRVYSSYKLIF

SEQ ID NO: 725784 - protein, 12 aa, Homo sapiens
  CDR3 for beta chain variable domain of TCR clone 362892 (TRBV7-6, TRBJ2-5)
CASSLSQETQYF

SEQ ID NO: 725785 - protein, 15 aa, Homo sapiens
  CDR3 for alpha chain variable domain of TCR clone 362893 (TRAV12-3, TRAJ6)
CAMSATTGGSYIPTF

SEQ ID NO: 725786 - protein, 14 aa, Homo sapiens
  CDR3 for beta chain variable domain of TCR clone 362893 (TRBV11-2, TRBJ1-6)
CASSLRQGNSPLHF

SEQ ID NO: 725787 - protein, 14 aa, Homo sapiens
  CDR3 for alpha chain variable domain of TCR clone 362894 (TRAV38-1, TRAJ45)
CASHSGGVADGPTF

SEQ ID NO: 725788 - protein, 13 aa, Homo sapiens
  CDR3 for beta chain variable domain of TCR clone 362894 (TRBV10-3, TRBJ1-2)
CAISERDSYGYTF

SEQ ID NO: 725789 - protein, 13 aa, Homo sapiens
  CDR3 for alpha chain variable domain of TCR clone 362895 (TRAV1-2, TRAJ9)
CAALNTGGFKTIF

SEQ ID NO: 725790 - protein, 15 aa, Homo sapiens
  CDR3 for beta chain variable domain of TCR clone 362895 (TRBV11-2, TRBJ2-5)
CASSLGAGGVETQYF

SEQ ID NO: 725791 - protein, 15 aa, Homo sapiens
  CDR3 for alpha chain variable domain of TCR clone 362896 (TRAV8-6, TRAJ10)
CAVSDQAGGGNKLTF

SEQ ID NO: 725792 - protein, 12 aa, Homo sapiens
  CDR3 for beta chain variable domain of TCR clone 362896 (TRBV29-1, TRBJ1-3)
CSTRDSGNTIYF

SEQ ID NO: 725793 - protein, 15 aa, Homo sapiens
  CDR3 for alpha chain variable domain of TCR clone 362897 (TRAV12-3, TRAJ54)
CTMSPPFQGAQKLVF

SEQ ID NO: 725794 - protein, 15 aa, Homo sapiens
  CDR3 for beta chain variable domain of TCR clone 362897 (TRBV20-1, TRBJ2-7)
CSARDRVSGMDEQYF

SEQ ID NO: 725795 - protein, 15 aa, Homo sapiens
  CDR3 for alpha chain variable domain of TCR clone 362898 (TRAV8-6, TRAJ10)
CSVSDQAGGGNKLTL

SEQ ID NO: 725796 - protein, 14 aa, Homo sapiens
  CDR3 for beta chain variable domain of TCR clone 362898 (TRBV4-1, TRBJ2-2)
CASSQAVNTGELFF

SEQ ID NO: 725797 - protein, 16 aa, Homo sapiens
  CDR3 for alpha chain variable domain of TCR clone 362899 (TRAV1-2, TRAJ16)
CAVNRFQMARSCSLQG

SEQ ID NO: 725798 - protein, 11 aa, Homo sapiens
  CDR3 for beta chain variable domain of TCR clone 362899 (TRBV12-4, TRBJ2-3)
CASTATDTQYF

SEQ ID NO: 725799 - protein, 16 aa, Homo sapiens
  CDR3 for alpha chain variable domain of TCR clone 362900 (TRAV1-1, TRAJ24)
CAVRGNQLGEIPVWSR

SEQ ID NO: 725800 - protein, 11 aa, Homo sapiens
  CDR3 for beta chain variable domain of TCR clone 362900 (TRBV19, TRBJ1-1)
CASSIGSEAFF

SEQ ID NO: 725801 - protein, 17 aa, Homo sapiens
  CDR3 for alpha chain variable domain of TCR clone 362901 (TRAV3, TRAJ38)
CAVRDSLNAGNNRKLIW

SEQ ID NO: 725802 - protein, 15 aa, Homo sapiens
  CDR3 for beta chain variable domain of TCR clone 362901 (TRBV27, TRBJ2-1)
CASSNGGGSSNEQFF

SEQ ID NO: 725803 - protein, 14 aa, Homo sapiens
  CDR3 for alpha chain variable domain of TCR clone 362902 (TRAV17, TRAJ23)
CATALGGQGGKLIF

SEQ ID NO: 725804 - protein, 13 aa, Homo sapiens
  CDR3 for beta chain variable domain of TCR clone 362902 (TRBV4-2, TRBJ1-1)
CASSQAGNTEAFF

SEQ ID NO: 725805 - protein, 11 aa, Homo sapiens
  CDR3 for alpha chain variable domain of TCR clone 362903 (TRAV35, TRAJ30)
CAPGGDDKIIF

SEQ ID NO: 725806 - protein, 18 aa, Homo sapiens
  CDR3 for beta chain variable domain of TCR clone 362903 (TRBV7-6, TRBJ2-1)
GHVSLFQQLGGGADEQFF

SEQ ID NO: 725807 - protein, 15 aa, Homo sapiens
  CDR3 for alpha chain variable domain of TCR clone 362904 (TRAV3, TRAJ22)
CAVRDRGGSARQLTF

SEQ ID NO: 725808 - protein, 16 aa, Homo sapiens
  CDR3 for beta chain variable domain of TCR clone 362904 (TRBV5-4, TRBJ2-3)
CASQQPGAGGADTQYL

SEQ ID NO: 725809 - protein, 10 aa, Homo sapiens
  CDR3 for alpha chain variable domain of TCR clone 362905 (TRAV5, TRAJ34)
CAEDTEKLIF

SEQ ID NO: 725810 - protein, 20 aa, Homo sapiens
  CDR3 for beta chain variable domain of TCR clone 362905 (TRBV11-2, TRBJ2-2)
LRTRPCISVPAALEAGSCFF

SEQ ID NO: 725811 - protein, 13 aa, Homo sapiens
  CDR3 for alpha chain variable domain of TCR clone 362906 (TRAV13-2, TRAJ15)
CAESNQAGTALIF

SEQ ID NO: 725812 - protein, 15 aa, Homo sapiens
  CDR3 for beta chain variable domain of TCR clone 362906 (TRBV11-3, TRBJ2-3)
CASLKDGREGDTQYF

SEQ ID NO: 725813 - protein, 13 aa, Homo sapiens
  CDR3 for alpha chain variable domain of TCR clone 362907 (TRAV21, TRAJ27)
CAARPGNAGKSTF

SEQ ID NO: 725814 - protein, 14 aa, Homo sapiens
  CDR3 for beta chain variable domain of TCR clone 362907 (TRBV19, TRBJ2-5)
CASSIEHSQETQYF

SEQ ID NO: 725815 - protein, 14 aa, Homo sapiens
  CDR3 for alpha chain variable domain of TCR clone 362908 (TRAV12-2, TRAJ40)
CAGKIPSGTYKYIF

SEQ ID NO: 725816 - protein, 15 aa, Homo sapiens
  CDR3 for beta chain variable domain of TCR clone 362908 (TRBV27, TRBJ2-1)
CASSNGGGSSNEQFF

SEQ ID NO: 725817 - protein, 12 aa, Homo sapiens
  CDR3 for alpha chain variable domain of TCR clone 362909 (TRAV12-3, TRAJ17)
CAMTLTGKKLTF

SEQ ID NO: 725818 - protein, 15 aa, Homo sapiens
  CDR3 for beta chain variable domain of TCR clone 362909 (TRBV20-1, TRBJ2-7)
CSARDRVSGMDEQFF

SEQ ID NO: 725819 - protein, 12 aa, Homo sapiens
  CDR3 for alpha chain variable domain of TCR clone 362910 (TRAV30, TRAJ43)
CGTEERGNDMRF

SEQ ID NO: 725820 - protein, 17 aa, Homo sapiens
  CDR3 for beta chain variable domain of TCR clone 362910 (TRBV11-3, TRBJ2-6)
CASKWGQGLSGANVLTF

SEQ ID NO: 725821 - protein, 15 aa, Homo sapiens
  CDR3 for alpha chain variable domain of TCR clone 362911 (TRAV21, TRAJ52)
CAVRGGGTSYGKLTF

SEQ ID NO: 725822 - protein, 17 aa, Homo sapiens
  CDR3 for beta chain variable domain of TCR clone 362911 (TRBV7-8, TRBJ2-6)
CASSAGTGGAGANVLTF

SEQ ID NO: 725823 - protein, 14 aa, Homo sapiens
  CDR3 for alpha chain variable domain of TCR clone 362912 (TRAV8-1, TRAJ5)
CAVRTETGRRALTF

SEQ ID NO: 725824 - protein, 15 aa, Homo sapiens
  CDR3 for beta chain variable domain of TCR clone 362912 (TRBV7-3, TRBJ2-1)
CASSPTGGGEVEQFF

SEQ ID NO: 725825 - protein, 11 aa, Homo sapiens
  CDR3 for alpha chain variable domain of TCR clone 362913 (TRAV2, TRAJ33)
CAVESNYQLIW

SEQ ID NO: 725826 - protein, 12 aa, Homo sapiens
  CDR3 for beta chain variable domain of TCR clone 362913 (TRBV18, TRBJ2-1)
CASSPGTSEGFF

SEQ ID NO: 725827 - protein, 14 aa, Homo sapiens
  CDR3 for alpha chain variable domain of TCR clone 362914 (TRAV35, TRAJ13)
CAGSPSGGYQKVTF

SEQ ID NO: 725828 - protein, 17 aa, Homo sapiens
  CDR3 for beta chain variable domain of TCR clone 362914 (TRBV18, TRBJ1-5)
CQLTTCRVRQNNHPQHF

SEQ ID NO: 725829 - protein, 13 aa, Homo sapiens
  CDR3 for alpha chain variable domain of TCR clone 362915 (TRAV8-3, TRAJ40)
CAVDPSGTYKYIF

SEQ ID NO: 725830 - protein, 13 aa, Homo sapiens
  CDR3 for beta chain variable domain of TCR clone 362915 (TRBV6-5, TRBJ2-7)
FASSGGSFYEQYF

SEQ ID NO: 725831 - protein, 12 aa, Homo sapiens
  CDR3 for alpha chain variable domain of TCR clone 362916 (TRAV12-2, TRAJ52)
IGGGTSYGKLTF

SEQ ID NO: 725832 - protein, 13 aa, Homo sapiens
  CDR3 for beta chain variable domain of TCR clone 362916 (TRBV15, TRBJ2-7)
CATRTTGHYEQYF

SEQ ID NO: 725833 - protein, 17 aa, Homo sapiens
  CDR3 for alpha chain variable domain of TCR clone 362917 (TRAV36/DV7, TRAJ52)
CAVAQRAGGTSYGKLTF

SEQ ID NO: 725834 - protein, 15 aa, Homo sapiens
  CDR3 for beta chain variable domain of TCR clone 362917 (TRBV6-5, TRBJ1-2)
CASSYSQAFSYGYTF

SEQ ID NO: 725835 - protein, 13 aa, Homo sapiens
  CDR3 for alpha chain variable domain of TCR clone 362918 (TRAV13-1, TRAJ33)
CAASRAGNYQLIW

SEQ ID NO: 725836 - protein, 12 aa, Homo sapiens
  CDR3 for beta chain variable domain of TCR clone 362918 (TRBV11-2, TRBJ1-2)
CASSREGDSYTF

SEQ ID NO: 725837 - protein, 13 aa, Homo sapiens
  CDR3 for alpha chain variable domain of TCR clone 362919 (TRAV3, TRAJ21)
CAVATSTNFTLDL

SEQ ID NO: 725838 - protein, 15 aa, Homo sapiens
  CDR3 for beta chain variable domain of TCR clone 362919 (TRBV4-2, TRBJ1-1)
CASSQQGAGDTEAFF

SEQ ID NO: 725839 - protein, 15 aa, Homo sapiens
  CDR3 for alpha chain variable domain of TCR clone 362920 (TRAV41, TRAJ45)
CAASYSGGGADGLTV

SEQ ID NO: 725840 - protein, 14 aa, Homo sapiens
  CDR3 for beta chain variable domain of TCR clone 362920 (TRBV12-5, TRBJ2-5)
CASGSRTHQETQYF

SEQ ID NO: 725841 - protein, 13 aa, Homo sapiens
  CDR3 for alpha chain variable domain of TCR clone 362921 (TRAV16, TRAJ58)
CSQTGKPVARLTF

SEQ ID NO: 725842 - protein, 17 aa, Homo sapiens
  CDR3 for beta chain variable domain of TCR clone 362921 (TRBV18, TRBJ2-1)
CASSKGLSGGADNEQFF

SEQ ID NO: 725843 - protein, 13 aa, Homo sapiens
  CDR3 for alpha chain variable domain of TCR clone 362922 (TRAV16, TRAJ27)
CALRRTNAGKSTF

SEQ ID NO: 725844 - protein, 15 aa, Homo sapiens
  CDR3 for beta chain variable domain of TCR clone 362922 (TRBV18, TRBJ2-1)
CSSSPPSASYNEQFF

SEQ ID NO: 725845 - protein, 11 aa, Homo sapiens
  CDR3 for alpha chain variable domain of TCR clone 362923 (TRAV16, TRAJ49)
CALGTGNQFYF

SEQ ID NO: 725846 - protein, 14 aa, Homo sapiens
  CDR3 for beta chain variable domain of TCR clone 362923 (TRBV18, TRBJ1-5)
CASSRQQRNQPQHF

SEQ ID NO: 725847 - protein, 13 aa, Homo sapiens
  CDR3 for alpha chain variable domain of TCR clone 362924 (TRAV3, TRAJ21)
CAVREWEFNKFYF

SEQ ID NO: 725848 - protein, 13 aa, Homo sapiens
  CDR3 for beta chain variable domain of TCR clone 362924 (TRBV9, TRBJ2-1)
CASSPSGGNEQFF

SEQ ID NO: 725849 - protein, 18 aa, Homo sapiens
  CDR3 for alpha chain variable domain of TCR clone 362925 (TRAV13-1, TRAJ52)
CEAKNPNAGGTSYGKLTF

SEQ ID NO: 725850 - protein, 15 aa, Homo sapiens
  CDR3 for beta chain variable domain of TCR clone 362925 (TRBV28, TRBJ2-1)
CASSIRAGGRSEQFF

SEQ ID NO: 725851 - protein, 10 aa, Homo sapiens
  CDR3 for alpha chain variable domain of TCR clone 362926 (TRAV1-2, TRAJ31)
CAFFRCQTHV

SEQ ID NO: 725852 - protein, 13 aa, Homo sapiens
  CDR3 for beta chain variable domain of TCR clone 362926 (TRBV7-9, TRBJ1-2)
CASSLKQNYAYTF

SEQ ID NO: 725853 - protein, 13 aa, Homo sapiens
  CDR3 for alpha chain variable domain of TCR clone 362927 (TRAV27, TRAJ49)
CAPRPYTGNQFYF

SEQ ID NO: 725854 - protein, 13 aa, Homo sapiens
  CDR3 for beta chain variable domain of TCR clone 362927 (TRBV7-2, TRBJ1-1)
CASNLKGAKVAFF

SEQ ID NO: 725855 - protein, 11 aa, Homo sapiens
  CDR3 for alpha chain variable domain of TCR clone 362928 (TRAV2, TRAJ33)
CAVESNYQLIW

SEQ ID NO: 725856 - protein, 15 aa, Homo sapiens
  CDR3 for beta chain variable domain of TCR clone 362928 (TRBV7-9, TRBJ2-2)
CASGPLDTFPGELFF

SEQ ID NO: 725857 - protein, 16 aa, Homo sapiens
  CDR3 for alpha chain variable domain of TCR clone 362929 (TRAV3, TRAJ37)
CAVRGKGSGNTGKLIF

SEQ ID NO: 725858 - protein, 15 aa, Homo sapiens
  CDR3 for beta chain variable domain of TCR clone 362929 (TRBV7-9, TRBJ2-2)
CASGPLDTCPGELFF

SEQ ID NO: 725859 - protein, 14 aa, Homo sapiens
  CDR3 for alpha chain variable domain of TCR clone 362930 (TRAV30, TRAJ33)
CGTVAPRSNYLLIW

SEQ ID NO: 725860 - protein, 14 aa, Homo sapiens
  CDR3 for beta chain variable domain of TCR clone 362930 (TRBV19, TRBJ2-1)
CASPTFVLSGEQFF

SEQ ID NO: 725861 - protein, 13 aa, Homo sapiens
  CDR3 for alpha chain variable domain of TCR clone 362931 (TRAV14/DV4, TRAJ4)
CAMKAGGYNKLIF

SEQ ID NO: 725862 - protein, 15 aa, Homo sapiens
  CDR3 for beta chain variable domain of TCR clone 362931 (TRBV11-3, TRBJ1-1)
CASSLGGPGDTEALF

SEQ ID NO: 725863 - protein, 16 aa, Homo sapiens
  CDR3 for alpha chain variable domain of TCR clone 362932 (TRAV26-2, TRAJ45)
CTTASPIGGGADGLTF

SEQ ID NO: 725864 - protein, 20 aa, Homo sapiens
  CDR3 for beta chain variable domain of TCR clone 362932 (TRBV28, TRBJ2-1)
CASTPIGRSPGLAGGNVQFF

SEQ ID NO: 725865 - protein, 14 aa, Homo sapiens
  CDR3 for alpha chain variable domain of TCR clone 362933 (TRAV14/DV4, TRAJ26)
CAMREGTYGQNFVF

SEQ ID NO: 725866 - protein, 14 aa, Homo sapiens
  CDR3 for beta chain variable domain of TCR clone 362933 (TRBV20-1, TRBJ1-2)
CSARDYQGNYGYTF

SEQ ID NO: 725867 - protein, 14 aa, Homo sapiens
  CDR3 for alpha chain variable domain of TCR clone 362934 (TRAV12-2, TRAJ45)
CAVNIQGKADGLTF

SEQ ID NO: 725868 - protein, 15 aa, Homo sapiens
  CDR3 for beta chain variable domain of TCR clone 362934 (TRBV11-3, TRBJ2-3)
CASLKDGREGDTQYF

SEQ ID NO: 725869 - protein, 13 aa, Homo sapiens
  CDR3 for alpha chain variable domain of TCR clone 362935 (TRAV12-3, TRAJ13)
CAMSSGGYQKVTF

SEQ ID NO: 725870 - protein, 13 aa, Homo sapiens
  CDR3 for beta chain variable domain of TCR clone 362935 (TRBV20-1, TRBJ1-1)
CSAPQGGHTEAFF

SEQ ID NO: 725871 - protein, 14 aa, Homo sapiens
  CDR3 for alpha chain variable domain of TCR clone 362936 (TRAV13-1, TRAJ44)
CAAKATGTASKLTF

SEQ ID NO: 725872 - protein, 17 aa, Homo sapiens
  CDR3 for beta chain variable domain of TCR clone 362936 (TRBV20-1, TRBJ2-7)
CSATRAGGVAGVEEQYF

SEQ ID NO: 725873 - protein, 12 aa, Homo sapiens
  CDR3 for alpha chain variable domain of TCR clone 362937 (TRAV3, TRAJ7)
CADLLWEQQTSF

SEQ ID NO: 725874 - protein, 18 aa, Homo sapiens
  CDR3 for beta chain variable domain of TCR clone 362937 (TRBV7-3, TRBJ2-5)
CASSFRGGGDPVLRARHA

SEQ ID NO: 725875 - protein, 16 aa, Homo sapiens
  CDR3 for alpha chain variable domain of TCR clone 362938 (TRAV13-1, TRAJ45)
CAASWESGGGSDGLTF

SEQ ID NO: 725876 - protein, 14 aa, Homo sapiens
  CDR3 for beta chain variable domain of TCR clone 362938 (TRBV12-4, TRBJ1-3)
CASGQTVSGNTIYF

SEQ ID NO: 725877 - protein, 15 aa, Homo sapiens
  CDR3 for alpha chain variable domain of TCR clone 362939 (TRAV26-1, TRAJ48)
CIVRVRDFGNEKLTF

SEQ ID NO: 725878 - protein, 16 aa, Homo sapiens
  CDR3 for beta chain variable domain of TCR clone 362939 (TRBV4-1, TRBJ2-3)
CASSHRAGGLTDTQYF

SEQ ID NO: 725879 - protein, 13 aa, Homo sapiens
  CDR3 for alpha chain variable domain of TCR clone 362940 (TRAV21, TRAJ20)
CAVGLRFDYKLSF

SEQ ID NO: 725880 - protein, 11 aa, Homo sapiens
  CDR3 for beta chain variable domain of TCR clone 362940 (TRBV25-1, TRBJ2-1)
CATTRITEQFF

SEQ ID NO: 725881 - protein, 12 aa, Homo sapiens
  CDR3 for alpha chain variable domain of TCR clone 362941 (TRAV21, TRAJ49)
CAVNAGGNQFYF

SEQ ID NO: 725882 - protein, 13 aa, Homo sapiens
  CDR3 for beta chain variable domain of TCR clone 362941 (TRBV18, TRBJ2-7)
CQLTPGGSYEQYF

SEQ ID NO: 725883 - protein, 15 aa, Homo sapiens
  CDR3 for alpha chain variable domain of TCR clone 362942 (TRAV17, TRAJ57)
CATGPSQGGSEKPGF

SEQ ID NO: 725884 - protein, 16 aa, Homo sapiens
  CDR3 for beta chain variable domain of TCR clone 362942 (TRBV12-4, TRBJ1-5)
CASSRPVGGSNQPQHF

SEQ ID NO: 725885 - protein, 11 aa, Homo sapiens
  CDR3 for alpha chain variable domain of TCR clone 362943 (TRAV1-2, TRAJ11)
CAVRGYSTLTF

SEQ ID NO: 725886 - protein, 11 aa, Homo sapiens
  CDR3 for beta chain variable domain of TCR clone 362943 (TRBV29-1, TRBJ2-5)
CSEDRTGTQYF

SEQ ID NO: 725887 - protein, 12 aa, Homo sapiens
  CDR3 for alpha chain variable domain of TCR clone 362944 (TRAV17, TRAJ4)
CATDGGYNKLIF

SEQ ID NO: 725888 - protein, 17 aa, Homo sapiens
  CDR3 for beta chain variable domain of TCR clone 362944 (TRBV7-9, TRBJ2-3)
CASSLEEAGAYPDTQYF

SEQ ID NO: 725889 - protein, 12 aa, Homo sapiens
  CDR3 for alpha chain variable domain of TCR clone 362945 (TRAV2, TRAJ9)
CAVGAGGFKTIF

SEQ ID NO: 725890 - protein, 14 aa, Homo sapiens
  CDR3 for beta chain variable domain of TCR clone 362945 (TRBV19, TRBJ2-7)
CASNFRDTFTGMYF

SEQ ID NO: 725891 - protein, 12 aa, Homo sapiens
  CDR3 for alpha chain variable domain of TCR clone 362946 (TRAV12-3, TRAJ17)
CAMTLTGNKLTF

SEQ ID NO: 725892 - protein, 17 aa, Homo sapiens
  CDR3 for beta chain variable domain of TCR clone 362946 (TRBV7-3, TRBJ2-3)
CASSVMKRMRGADTQYF

SEQ ID NO: 725893 - protein, 15 aa, Homo sapiens
  CDR3 for alpha chain variable domain of TCR clone 362947 (TRAV21, TRAJ38)
CAVRQDAANNRKLIW

SEQ ID NO: 725894 - protein, 16 aa, Homo sapiens
  CDR3 for beta chain variable domain of TCR clone 362947 (TRBV4-2, TRBJ1-1)
CASRPLDGGGDTEALF

SEQ ID NO: 725895 - protein, 11 aa, Homo sapiens
  CDR3 for alpha chain variable domain of TCR clone 362948 (TRAV2, TRAJ13)
CASGGYQKVTF

SEQ ID NO: 725896 - protein, 16 aa, Homo sapiens
  CDR3 for beta chain variable domain of TCR clone 362948 (TRBV12-5, TRBJ2-5)
CANGPRTSGNQETQYF

SEQ ID NO: 725897 - protein, 17 aa, Homo sapiens
  CDR3 for alpha chain variable domain of TCR clone 362949 (TRAV8-1, TRAJ43)
CAVTNDMRFGAGTRLTV

SEQ ID NO: 725898 - protein, 17 aa, Homo sapiens
  CDR3 for beta chain variable domain of TCR clone 362949 (TRBV5-4, TRBJ2-1)
CASSSAGERGPYNEQFF

SEQ ID NO: 725899 - protein, 13 aa, Homo sapiens
  CDR3 for alpha chain variable domain of TCR clone 362950 (TRAV20, TRAJ20)
CAVQALNDYKLSF

SEQ ID NO: 725900 - protein, 13 aa, Homo sapiens
  CDR3 for beta chain variable domain of TCR clone 362950 (TRBV7-9, TRBJ1-4)
CASSLPGIENLFF

SEQ ID NO: 725901 - protein, 16 aa, Homo sapiens
  CDR3 for alpha chain variable domain of TCR clone 362951 (TRAV13-1, TRAJ48)
CAASIFGDLGNEKLTF

SEQ ID NO: 725902 - protein, 14 aa, Homo sapiens
  CDR3 for beta chain variable domain of TCR clone 362951 (TRBV7-3, TRBJ1-1)
CASSLKGGNTEAFF

SEQ ID NO: 725903 - protein, 16 aa, Homo sapiens
  CDR3 for alpha chain variable domain of TCR clone 362952 (TRAV8-3, TRAJ13)
CAVGAYPSGGYQKVTF

SEQ ID NO: 725904 - protein, 16 aa, Homo sapiens
  CDR3 for beta chain variable domain of TCR clone 362952 (TRBV28, TRBJ2-7)
CASSLFFETGGPEQYF

SEQ ID NO: 725905 - protein, 14 aa, Homo sapiens
  CDR3 for alpha chain variable domain of TCR clone 362953 (TRAV29/DV5, TRAJ36)
CAARRKTGANNLFF

SEQ ID NO: 725906 - protein, 17 aa, Homo sapiens
  CDR3 for beta chain variable domain of TCR clone 362953 (TRBV5-1, TRBJ2-5)
CASSFNPERGDQETQYF

SEQ ID NO: 725907 - protein, 15 aa, Homo sapiens
  CDR3 for alpha chain variable domain of TCR clone 362954 (TRAV2, TRAJ9)
CAVEDRGTGGFKTIF

SEQ ID NO: 725908 - protein, 14 aa, Homo sapiens
  CDR3 for beta chain variable domain of TCR clone 362954 (TRBV20-1, TRBJ2-1)
CSAHPGLPYNEQFF

SEQ ID NO: 725909 - protein, 11 aa, Homo sapiens
  CDR3 for alpha chain variable domain of TCR clone 362955 (TRAV13-1, TRAJ39)
CASHAGNMLTF

SEQ ID NO: 725910 - protein, 15 aa, Homo sapiens
  CDR3 for beta chain variable domain of TCR clone 362955 (TRBV20-1, TRBJ2-7)
CSARKGLAESYEQYF

SEQ ID NO: 725911 - protein, 13 aa, Homo sapiens
  CDR3 for alpha chain variable domain of TCR clone 362956 (TRAV13-1, TRAJ43)
CAASKNNNNDMRF

SEQ ID NO: 725912 - protein, 13 aa, Homo sapiens
  CDR3 for beta chain variable domain of TCR clone 362956 (TRBV20-1, TRBJ2-2)
CSALSGGAGELFF

SEQ ID NO: 725913 - protein, 14 aa, Homo sapiens
  CDR3 for alpha chain variable domain of TCR clone 362957 (TRAV12-2, TRAJ40)
CAVKIPSGTYKYIF

SEQ ID NO: 725914 - protein, 14 aa, Homo sapiens
  CDR3 for beta chain variable domain of TCR clone 362957 (TRBV7-8, TRBJ2-7)
CASSARDRVYEQYF

SEQ ID NO: 725915 - protein, 11 aa, Homo sapiens
  CDR3 for alpha chain variable domain of TCR clone 362958 (TRAV2, TRAJ13)
CASGGYQKVTF

SEQ ID NO: 725916 - protein, 15 aa, Homo sapiens
  CDR3 for beta chain variable domain of TCR clone 362958 (TRBV25-1, TRBJ1-6)
CASSGDRGLNSPLHF

SEQ ID NO: 725917 - protein, 15 aa, Homo sapiens
  CDR3 for alpha chain variable domain of TCR clone 362959 (TRAV3, TRAJ5)
CAVRDLATGRRALTF

SEQ ID NO: 725918 - protein, 15 aa, Homo sapiens
  CDR3 for beta chain variable domain of TCR clone 362959 (TRBV20-1, TRBJ2-1)
CSARSPGRPGNEHFF

SEQ ID NO: 725919 - protein, 15 aa, Homo sapiens
  CDR3 for alpha chain variable domain of TCR clone 362960 (TRAV8-2, TRAJ16)
CGVSDGFLDGQKLLF

SEQ ID NO: 725920 - protein, 13 aa, Homo sapiens
  CDR3 for beta chain variable domain of TCR clone 362960 (TRBV20-1, TRBJ1-1)
CSAPPGGHTEAFF

SEQ ID NO: 725921 - protein, 18 aa, Homo sapiens
  CDR3 for alpha chain variable domain of TCR clone 362961 (TRAV21, TRAJ52)
CAVRPSPAGGTSYGKLKF

SEQ ID NO: 725922 - protein, 14 aa, Homo sapiens
  CDR3 for beta chain variable domain of TCR clone 362961 (TRBV28, TRBJ1-1)
CASSPRTRWAEAFF

SEQ ID NO: 725923 - protein, 14 aa, Homo sapiens
  CDR3 for alpha chain variable domain of TCR clone 362962 (TRAV12-1, TRAJ17)
CVVNPKAAGNKLTF

SEQ ID NO: 725924 - protein, 14 aa, Homo sapiens
  CDR3 for beta chain variable domain of TCR clone 362962 (TRBV19, TRBJ2-5)
CASSMTGQQETQYF

SEQ ID NO: 725925 - protein, 18 aa, Homo sapiens
  CDR3 for alpha chain variable domain of TCR clone 362963 (TRAV12-3, TRAJ52)
CAMSVGGAGGTSYGKLTF

SEQ ID NO: 725926 - protein, 12 aa, Homo sapiens
  CDR3 for beta chain variable domain of TCR clone 362963 (TRBV19, TRBJ1-1)
CASLTGNTEAFF

SEQ ID NO: 725927 - protein, 12 aa, Homo sapiens
  CDR3 for alpha chain variable domain of TCR clone 362964 (TRAV3, TRAJ20)
CAVRDPYYKLSF

SEQ ID NO: 725928 - protein, 15 aa, Homo sapiens
  CDR3 for beta chain variable domain of TCR clone 362964 (TRBV2, TRBJ2-2)
CASSRETVGTGELFF

SEQ ID NO: 725929 - protein, 14 aa, Homo sapiens
  CDR3 for alpha chain variable domain of TCR clone 362965 (TRAV26-1, TRAJ38)
CIADNAGNDRKLIW

SEQ ID NO: 725930 - protein, 15 aa, Homo sapiens
  CDR3 for beta chain variable domain of TCR clone 362965 (TRBV27, TRBJ2-1)
CASSNGGGSSNEQFF

SEQ ID NO: 725931 - protein, 11 aa, Homo sapiens
  CDR3 for alpha chain variable domain of TCR clone 362966 (TRAV12-3, TRAJ41)
CAMNAREALNF

SEQ ID NO: 725932 - protein, 16 aa, Homo sapiens
  CDR3 for beta chain variable domain of TCR clone 362966 (TRBV7-8, TRBJ2-3)
SASSTEGQRETDTQYF

SEQ ID NO: 725933 - protein, 15 aa, Homo sapiens
  CDR3 for alpha chain variable domain of TCR clone 362967 (TRAV12-3, TRAJ49)
CAMAVTPNTGNQFYF

SEQ ID NO: 725934 - protein, 18 aa, Homo sapiens
  CDR3 for beta chain variable domain of TCR clone 362967 (TRBV4-1, TRBJ1-5)
GASSQDPRGQGLNQPQHF

SEQ ID NO: 725935 - protein, 13 aa, Homo sapiens
  CDR3 for alpha chain variable domain of TCR clone 362968 (TRAV16, TRAJ48)
CSPLNFGNEKLTF

SEQ ID NO: 725936 - protein, 11 aa, Homo sapiens
  CDR3 for beta chain variable domain of TCR clone 362968 (TRBV7-9, TRBJ2-3)
CASSPTDTQHF

SEQ ID NO: 725937 - protein, 10 aa, Homo sapiens
  CDR3 for alpha chain variable domain of TCR clone 362969 (TRAV1-2, TRAJ20)
CALNDYKLSF

SEQ ID NO: 725938 - protein, 14 aa, Homo sapiens
  CDR3 for beta chain variable domain of TCR clone 362969 (TRBV19, TRBJ2-1)
CASPTVVLSGERFF

SEQ ID NO: 725939 - protein, 12 aa, Homo sapiens
  CDR3 for alpha chain variable domain of TCR clone 362970 (TRAV1-2, TRAJ34)
CAVRAGHRQAHL

SEQ ID NO: 725940 - protein, 14 aa, Homo sapiens
  CDR3 for beta chain variable domain of TCR clone 362970 (TRBV6-5, TRBJ2-2)
CASTEGQETGELFF

SEQ ID NO: 725941 - protein, 11 aa, Homo sapiens
  CDR3 for alpha chain variable domain of TCR clone 362971 (TRAV2, TRAJ13)
CASVGYQKVTF

SEQ ID NO: 725942 - protein, 16 aa, Homo sapiens
  CDR3 for beta chain variable domain of TCR clone 362971 (TRBV2, TRBJ2-1)
CASSVGGALSYNEQFF

SEQ ID NO: 725943 - protein, 12 aa, Homo sapiens
  CDR3 for alpha chain variable domain of TCR clone 362972 (TRAV12-3, TRAJ32)
CAGGGATNKLIF

SEQ ID NO: 725944 - protein, 14 aa, Homo sapiens
  CDR3 for beta chain variable domain of TCR clone 362972 (TRBV7-3, TRBJ2-1)
CASSLAGGTNEQFF

SEQ ID NO: 725945 - protein, 15 aa, Homo sapiens
  CDR3 for alpha chain variable domain of TCR clone 362973 (TRAV2, TRAJ15)
CAVEDRGQAGTALIV

SEQ ID NO: 725946 - protein, 15 aa, Homo sapiens
  CDR3 for beta chain variable domain of TCR clone 362973 (TRBV20-1, TRBJ1-5)
CSATSDRGLGQPQHF

SEQ ID NO: 725947 - protein, 13 aa, Homo sapiens
  CDR3 for alpha chain variable domain of TCR clone 362974 (TRAV2, TRAJ15)
CAVDSQAGTALIF

SEQ ID NO: 725948 - protein, 16 aa, Homo sapiens
  CDR3 for beta chain variable domain of TCR clone 362974 (TRBV18, TRBJ1-5)
CASSPYRVEGNQPQHF

SEQ ID NO: 725949 - protein, 11 aa, Homo sapiens
  CDR3 for alpha chain variable domain of TCR clone 362975 (TRAV13-1, TRAJ43)
CAASMRNDIRF

SEQ ID NO: 725950 - protein, 12 aa, Homo sapiens
  CDR3 for beta chain variable domain of TCR clone 362975 (TRBV29-1, TRBJ2-3)
CSVTGGADTQYF

SEQ ID NO: 725951 - protein, 14 aa, Homo sapiens
  CDR3 for alpha chain variable domain of TCR clone 362976 (TRAV12-2, TRAJ40)
CAVKNPSGTYKYIF

SEQ ID NO: 725952 - protein, 17 aa, Homo sapiens
  CDR3 for beta chain variable domain of TCR clone 362976 (TRBV20-1, TRBJ2-1)
CSAFSGTSGSLYNEQFF

SEQ ID NO: 725953 - protein, 15 aa, Homo sapiens
  CDR3 for alpha chain variable domain of TCR clone 362977 (TRAV12-1, TRAJ41)
CVVNSRTGSGYALNF

SEQ ID NO: 725954 - protein, 13 aa, Homo sapiens
  CDR3 for beta chain variable domain of TCR clone 362977 (TRBV6-4, TRBJ2-1)
CTSASSDSYAQFF

SEQ ID NO: 725955 - protein, 15 aa, Homo sapiens
  CDR3 for alpha chain variable domain of TCR clone 362978 (TRAV2, TRAJ37)
CAVEDGSSNTGTLIF

SEQ ID NO: 725956 - protein, 14 aa, Homo sapiens
  CDR3 for beta chain variable domain of TCR clone 362978 (TRBV7-2, TRBJ2-1)
CASSVSGVYNEQFF

SEQ ID NO: 725957 - protein, 15 aa, Homo sapiens
  CDR3 for alpha chain variable domain of TCR clone 362979 (TRAV2, TRAJ28)
CAVPYSGAGSYQRTF

SEQ ID NO: 725958 - protein, 17 aa, Homo sapiens
  CDR3 for beta chain variable domain of TCR clone 362979 (TRBV20-1, TRBJ2-4)
CSARDWASGGRENMQYF

SEQ ID NO: 725959 - protein, 15 aa, Homo sapiens
  CDR3 for alpha chain variable domain of TCR clone 362980 (TRAV19, TRAJ8)
CALSGPNTGFQKLVF

SEQ ID NO: 725960 - protein, 16 aa, Homo sapiens
  CDR3 for beta chain variable domain of TCR clone 362980 (TRBV20-1, TRBJ1-4)
CSARPYGGELNEKLFF

SEQ ID NO: 725961 - protein, 16 aa, Homo sapiens
  CDR3 for alpha chain variable domain of TCR clone 362981 (TRAV26-1, TRAJ58)
IASSESGETSGSRLTF

SEQ ID NO: 725962 - protein, 13 aa, Homo sapiens
  CDR3 for beta chain variable domain of TCR clone 362981 (TRBV7-2, TRBJ2-4)
CASSREHANIQYF

SEQ ID NO: 725963 - protein, 15 aa, Homo sapiens
  CDR3 for alpha chain variable domain of TCR clone 362982 (TRAV26-1, TRAJ48)
CIVRVGDFGNVKLTF

SEQ ID NO: 725964 - protein, 16 aa, Homo sapiens
  CDR3 for beta chain variable domain of TCR clone 362982 (TRBV4-1, TRBJ2-3)
CASSQRAGGLTDTQYF

SEQ ID NO: 725965 - protein, 13 aa, Homo sapiens
  CDR3 for alpha chain variable domain of TCR clone 362983 (TRAV16, TRAJ22)
SAMLAGSARQLTF

SEQ ID NO: 725966 - protein, 18 aa, Homo sapiens
  CDR3 for beta chain variable domain of TCR clone 362983 (TRBV7-2, TRBJ2-3)
CASSLETRRGRKADTQYF

SEQ ID NO: 725967 - protein, 12 aa, Homo sapiens
  CDR3 for alpha chain variable domain of TCR clone 362984 (TRAV13-2, TRAJ23)
CAERHRGGKLIF

SEQ ID NO: 725968 - protein, 14 aa, Homo sapiens
  CDR3 for beta chain variable domain of TCR clone 362984 (TRBV20-1, TRBJ2-7)
CSAKRGRSSYEQYF

SEQ ID NO: 725969 - protein, 12 aa, Homo sapiens
  CDR3 for alpha chain variable domain of TCR clone 362985 (TRAV26-1, TRAJ26)
CIVYNYGQYFVF

SEQ ID NO: 725970 - protein, 15 aa, Homo sapiens
  CDR3 for beta chain variable domain of TCR clone 362985 (TRBV7-2, TRBJ2-3)
CASSLRGGSTDTQYF

SEQ ID NO: 725971 - protein, 12 aa, Homo sapiens
  CDR3 for alpha chain variable domain of TCR clone 362986 (TRAV25, TRAJ33)
CAGMNSNYQLIW

SEQ ID NO: 725972 - protein, 15 aa, Homo sapiens
  CDR3 for beta chain variable domain of TCR clone 362986 (TRBV5-1, TRBJ2-7)
CASSLNPAGSYEQYF

SEQ ID NO: 725973 - protein, 15 aa, Homo sapiens
  CDR3 for alpha chain variable domain of TCR clone 362987 (TRAV8-1, TRAJ37)
CAVKKGSGNTGKLIS

SEQ ID NO: 725974 - protein, 17 aa, Homo sapiens
  CDR3 for beta chain variable domain of TCR clone 362987 (TRBV12-4, TRBJ1-1)
CASSLSGFRTMNTEAFF

SEQ ID NO: 725975 - protein, 14 aa, Homo sapiens
  CDR3 for alpha chain variable domain of TCR clone 362988 (TRAV1-2, TRAJ8)
CAVREDTGFQKLVF

SEQ ID NO: 725976 - protein, 15 aa, Homo sapiens
  CDR3 for beta chain variable domain of TCR clone 362988 (TRBV5-4, TRBJ1-3)
CASSSGGRSGNTIYF

SEQ ID NO: 725977 - protein, 12 aa, Homo sapiens
  CDR3 for alpha chain variable domain of TCR clone 362989 (TRAV12-2, TRAJ10)
WCVTGGGNKLTF

SEQ ID NO: 725978 - protein, 16 aa, Homo sapiens
  CDR3 for beta chain variable domain of TCR clone 362989 (TRBV6-4, TRBJ1-2)
CASSEAVGDPNYGYTF

SEQ ID NO: 725979 - protein, 14 aa, Homo sapiens
  CDR3 for alpha chain variable domain of TCR clone 362990 (TRAV1-2, TRAJ16)
CAVNRFSDGQKLLF

SEQ ID NO: 725980 - protein, 13 aa, Homo sapiens
  CDR3 for beta chain variable domain of TCR clone 362990 (TRBV10-3, TRBJ2-7)
CASKLAVNYEQHF

SEQ ID NO: 725981 - protein, 16 aa, Homo sapiens
  CDR3 for alpha chain variable domain of TCR clone 362991 (TRAV3, TRAJ37)
CAVRGTGSGNTCKLIF

SEQ ID NO: 725982 - protein, 16 aa, Homo sapiens
  CDR3 for beta chain variable domain of TCR clone 362991 (TRBV12-5, TRBJ2-5)
CASGPRTSGNQETQYF

SEQ ID NO: 725983 - protein, 14 aa, Homo sapiens
  CDR3 for alpha chain variable domain of TCR clone 362992 (TRAV12-2, TRAJ13)
CAVKKTGGNQQVTF

SEQ ID NO: 725984 - protein, 13 aa, Homo sapiens
  CDR3 for beta chain variable domain of TCR clone 362992 (TRBV19, TRBJ1-2)
CASSVPGQDGYTF

SEQ ID NO: 725985 - protein, 13 aa, Homo sapiens
  CDR3 for alpha chain variable domain of TCR clone 362993 (TRAV36/DV7, TRAJ37)
CAVFSSNTGKLIF

SEQ ID NO: 725986 - protein, 17 aa, Homo sapiens
  CDR3 for beta chain variable domain of TCR clone 362993 (TRBV20-1, TRBJ2-1)
CSARDRRRASSYNEQFF

SEQ ID NO: 725987 - protein, 13 aa, Homo sapiens
  CDR3 for alpha chain variable domain of TCR clone 362994 (TRAV30, TRAJ49)
CGTEPNHGNQFYF

SEQ ID NO: 725988 - protein, 14 aa, Homo sapiens
  CDR3 for beta chain variable domain of TCR clone 362994 (TRBV29-1, TRBJ2-1)
CSVEFRGIPFEQFF

SEQ ID NO: 725989 - protein, 14 aa, Homo sapiens
  CDR3 for alpha chain variable domain of TCR clone 362995 (TRAV20, TRAJ47)
CAVTFGEYGNKLVF

SEQ ID NO: 725990 - protein, 16 aa, Homo sapiens
  CDR3 for beta chain variable domain of TCR clone 362995 (TRBV20-1, TRBJ2-1)
CSARDLKQGMNNEQFF

SEQ ID NO: 725991 - protein, 14 aa, Homo sapiens
  CDR3 for alpha chain variable domain of TCR clone 362996 (TRAV17, TRAJ12)
CAILPMDSSYKLIF

SEQ ID NO: 725992 - protein, 11 aa, Homo sapiens
  CDR3 for beta chain variable domain of TCR clone 362996 (TRBV19, TRBJ1-1)
CASSIGSEAVF

SEQ ID NO: 725993 - protein, 15 aa, Homo sapiens
  CDR3 for alpha chain variable domain of TCR clone 362997 (TRAV8-4, TRAJ6)
CAVSAPSGGSYIPTF

SEQ ID NO: 725994 - protein, 15 aa, Homo sapiens
  CDR3 for beta chain variable domain of TCR clone 362997 (TRBV2, TRBJ2-1)
CASSEAPSAHNEQFF

SEQ ID NO: 725995 - protein, 13 aa, Homo sapiens
  CDR3 for alpha chain variable domain of TCR clone 362998 (TRAV12-3, TRAJ29)
CAMTLSGNTPLVF

SEQ ID NO: 725996 - protein, 14 aa, Homo sapiens
  CDR3 for beta chain variable domain of TCR clone 362998 (TRBV7-2, TRBJ2-2)
CASRGQGAAGELFF

SEQ ID NO: 725997 - protein, 14 aa, Homo sapiens
  CDR3 for alpha chain variable domain of TCR clone 362999 (TRAV8-3, TRAJ35)
CAVVPQGSGNVLHC

SEQ ID NO: 725998 - protein, 15 aa, Homo sapiens
  CDR3 for beta chain variable domain of TCR clone 362999 (TRBV6-1, TRBJ2-2)
CASSAGQGYTGELFF

SEQ ID NO: 725999 - protein, 11 aa, Homo sapiens
  CDR3 for alpha chain variable domain of TCR clone 363000 (TRAV2, TRAJ13)
CASGGYQKVTF

SEQ ID NO: 726000 - protein, 13 aa, Homo sapiens
  CDR3 for beta chain variable domain of TCR clone 363000 (TRBV12-4, TRBJ2-7)
CASSFQGRYEQYF

SEQ ID NO: 726001 - protein, 15 aa, Homo sapiens
  CDR3 for alpha chain variable domain of TCR clone 363001 (TRAV27, TRAJ38)
CAGRVNAGNNRTLIW

SEQ ID NO: 726002 - protein, 13 aa, Homo sapiens
  CDR3 for beta chain variable domain of TCR clone 363001 (TRBV12-5, TRBJ2-3)
CASQNRGTDTQYF

SEQ ID NO: 726003 - protein, 13 aa, Homo sapiens
  CDR3 for alpha chain variable domain of TCR clone 363002 (TRAV2, TRAJ40)
CAVVTSGTYKYIL

SEQ ID NO: 726004 - protein, 12 aa, Homo sapiens
  CDR3 for beta chain variable domain of TCR clone 363002 (TRBV11-2, TRBJ2-2)
CASSLPTGELFS

SEQ ID NO: 726005 - protein, 16 aa, Homo sapiens
  CDR3 for alpha chain variable domain of TCR clone 363003 (TRAV21, TRAJ37)
CAVRTAGSSTTGKLIF

SEQ ID NO: 726006 - protein, 13 aa, Homo sapiens
  CDR3 for beta chain variable domain of TCR clone 363003 (TRBV7-9, TRBJ2-5)
CASLPSGREAQYF

SEQ ID NO: 726007 - protein, 17 aa, Homo sapiens
  CDR3 for alpha chain variable domain of TCR clone 363004 (TRAV8-1, TRAJ43)
CAVTNDMRFGAGTRLTV

SEQ ID NO: 726008 - protein, 15 aa, Homo sapiens
  CDR3 for beta chain variable domain of TCR clone 363004 (TRBV11-2, TRBJ2-1)
CASSKNRGLIYEQFF

SEQ ID NO: 726009 - protein, 16 aa, Homo sapiens
  CDR3 for alpha chain variable domain of TCR clone 363005 (TRAV8-4, TRAJ20)
CAVTNVLTPTSSALEP

SEQ ID NO: 726010 - protein, 16 aa, Homo sapiens
  CDR3 for beta chain variable domain of TCR clone 363005 (TRBV6-1, TRBJ1-2)
CASSGAWQGRSHGYTF

SEQ ID NO: 726011 - protein, 12 aa, Homo sapiens
  CDR3 for alpha chain variable domain of TCR clone 363006 (TRAV1-2, TRAJ33)
CAALDSNYRLIC

SEQ ID NO: 726012 - protein, 15 aa, Homo sapiens
  CDR3 for beta chain variable domain of TCR clone 363006 (TRBV27, TRBJ2-1)
CASSNGGGSSNEQFF

SEQ ID NO: 726013 - protein, 15 aa, Homo sapiens
  CDR3 for alpha chain variable domain of TCR clone 363007 (TRAV16, TRAJ34)
CSKIIWELNTDKLIF

SEQ ID NO: 726014 - protein, 13 aa, Homo sapiens
  CDR3 for beta chain variable domain of TCR clone 363007 (TRBV18, TRBJ2-3)
CASSTGRTDTQYF

SEQ ID NO: 726015 - protein, 14 aa, Homo sapiens
  CDR3 for alpha chain variable domain of TCR clone 363008 (TRAV12-1, TRAJ34)
CVVNLDYNTDKLIF

SEQ ID NO: 726016 - protein, 12 aa, Homo sapiens
  CDR3 for beta chain variable domain of TCR clone 363008 (TRBV7-8, TRBJ2-1)
CASSLGHNEQFF

SEQ ID NO: 726017 - protein, 12 aa, Homo sapiens
  CDR3 for alpha chain variable domain of TCR clone 363009 (TRAV38-2/DV8, TRAJ48)
CALLSGKEKLTF

SEQ ID NO: 726018 - protein, 15 aa, Homo sapiens
  CDR3 for beta chain variable domain of TCR clone 363009 (TRBV6-1, TRBJ2-1)
CASSELRGQYNAQFF

SEQ ID NO: 726019 - protein, 15 aa, Homo sapiens
  CDR3 for alpha chain variable domain of TCR clone 363010 (TRAV2, TRAJ9)
CAVEDRGTGGFKTIF

SEQ ID NO: 726020 - protein, 18 aa, Homo sapiens
  CDR3 for beta chain variable domain of TCR clone 363010 (TRBV18, TRBJ1-3)
CASSPRGGAGPSGNTIYF

SEQ ID NO: 726021 - protein, 16 aa, Homo sapiens
  CDR3 for alpha chain variable domain of TCR clone 363011 (TRAV8-3, TRAJ43)
LSTSVLWVHNNNDMRF

SEQ ID NO: 726022 - protein, 12 aa, Homo sapiens
  CDR3 for beta chain variable domain of TCR clone 363011 (TRBV7-2, TRBJ1-6)
CASSLSSSPLHF

SEQ ID NO: 726023 - protein, 13 aa, Homo sapiens
  CDR3 for alpha chain variable domain of TCR clone 363012 (TRAV16, TRAJ58)
CALRWASGSRLTF

SEQ ID NO: 726024 - protein, 17 aa, Homo sapiens
  CDR3 for beta chain variable domain of TCR clone 363012 (TRBV20-1, TRBJ2-1)
CSASSSGLAGSYNEQFF

SEQ ID NO: 726025 - protein, 18 aa, Homo sapiens
  CDR3 for alpha chain variable domain of TCR clone 363013 (TRAV13-1, TRAJ52)
CAAKNPNAGGTSYGKLTS

SEQ ID NO: 726026 - protein, 15 aa, Homo sapiens
  CDR3 for beta chain variable domain of TCR clone 363013 (TRBV6-1, TRBJ2-3)
CASSERGGSTDTQYF

SEQ ID NO: 726027 - protein, 22 aa, Homo sapiens
  CDR3 for alpha chain variable domain of TCR clone 363014 (TRAV3, TRAJ38)
CAVRDCLNAGNNHIQNPDPAVY

SEQ ID NO: 726028 - protein, 19 aa, Homo sapiens
  CDR3 for beta chain variable domain of TCR clone 363014 (TRBV7-2, TRBJ2-3)
CASSCLSRNWGGGTDTQYF

SEQ ID NO: 726029 - protein, 15 aa, Homo sapiens
  CDR3 for alpha chain variable domain of TCR clone 363015 (TRAV17, TRAJ56)
TSVLRTPGANSKLTF

SEQ ID NO: 726030 - protein, 15 aa, Homo sapiens
  CDR3 for beta chain variable domain of TCR clone 363015 (TRBV27, TRBJ2-7)
CARSLFGTGLDEQYF

SEQ ID NO: 726031 - protein, 16 aa, Homo sapiens
  CDR3 for alpha chain variable domain of TCR clone 363016 (TRAV12-2, TRAJ32)
CAVNLGQGGVTNKLIF

SEQ ID NO: 726032 - protein, 12 aa, Homo sapiens
  CDR3 for beta chain variable domain of TCR clone 363016 (TRBV29-1, TRBJ2-3)
CSVTGGADTQYF

SEQ ID NO: 726033 - protein, 11 aa, Homo sapiens
  CDR3 for alpha chain variable domain of TCR clone 363017 (TRAV4, TRAJ31)
CLVGDNARLMF

SEQ ID NO: 726034 - protein, 16 aa, Homo sapiens
  CDR3 for beta chain variable domain of TCR clone 363017 (TRBV4-1, TRBJ2-7)
CASRPSGGGADNEQYF

SEQ ID NO: 726035 - protein, 15 aa, Homo sapiens
  CDR3 for alpha chain variable domain of TCR clone 363018 (TRAV3, TRAJ4)
CAQNMFSGGYIKLIF

SEQ ID NO: 726036 - protein, 11 aa, Homo sapiens
  CDR3 for beta chain variable domain of TCR clone 363018 (TRBV6-3, TRBJ2-3)
CATGQADTQYF

SEQ ID NO: 726037 - protein, 13 aa, Homo sapiens
  CDR3 for alpha chain variable domain of TCR clone 363019 (TRAV8-4, TRAJ47)
FAVIALYGNKLVF

SEQ ID NO: 726038 - protein, 14 aa, Homo sapiens
  CDR3 for beta chain variable domain of TCR clone 363019 (TRBV19, TRBJ2-7)
CASSIGGAVAEQYF

SEQ ID NO: 726039 - protein, 12 aa, Homo sapiens
  CDR3 for alpha chain variable domain of TCR clone 363020 (TRAV12-3, TRAJ20)
CAMVRGDYKLSF

SEQ ID NO: 726040 - protein, 13 aa, Homo sapiens
  CDR3 for beta chain variable domain of TCR clone 363020 (TRBV10-3, TRBJ2-7)
CASKLAVNYEQYF

SEQ ID NO: 726041 - protein, 10 aa, Homo sapiens
  CDR3 for alpha chain variable domain of TCR clone 363021 (TRAV1-2, TRAJ23)
CAGQGGKLIF

SEQ ID NO: 726042 - protein, 15 aa, Homo sapiens
  CDR3 for beta chain variable domain of TCR clone 363021 (TRBV4-2, TRBJ2-5)
CASSLTGQGEETQYF

SEQ ID NO: 726043 - protein, 13 aa, Homo sapiens
  CDR3 for alpha chain variable domain of TCR clone 363022 (TRAV36/DV7, TRAJ49)
CAGDSNTGNQFYF

SEQ ID NO: 726044 - protein, 14 aa, Homo sapiens
  CDR3 for beta chain variable domain of TCR clone 363022 (TRBV12-5, TRBJ2-5)
CASGSRTHQETQYF

SEQ ID NO: 726045 - protein, 16 aa, Homo sapiens
  CDR3 for alpha chain variable domain of TCR clone 363023 (TRAV38-1, TRAJ42)
CAFMKLGGGSQGNLIF

SEQ ID NO: 726046 - protein, 14 aa, Homo sapiens
  CDR3 for beta chain variable domain of TCR clone 363023 (TRBV12-5, TRBJ2-5)
CASGSRTHQETQYF

SEQ ID NO: 726047 - protein, 18 aa, Homo sapiens
  CDR3 for alpha chain variable domain of TCR clone 363024 (TRAV26-2, TRAJ33)
CCVLLHPEEPASNYQLIW

SEQ ID NO: 726048 - protein, 17 aa, Homo sapiens
  CDR3 for beta chain variable domain of TCR clone 363024 (TRBV24-1, TRBJ2-1)
CATSDVSTSGTYNEQFF

SEQ ID NO: 726049 - protein, 16 aa, Homo sapiens
  CDR3 for alpha chain variable domain of TCR clone 363025 (TRAV30, TRAJ24)
CGTEIVDADSWGKFQF

SEQ ID NO: 726050 - protein, 14 aa, Homo sapiens
  CDR3 for beta chain variable domain of TCR clone 363025 (TRBV12-5, TRBJ2-5)
CASGARTQQGTQYF

SEQ ID NO: 726051 - protein, 14 aa, Homo sapiens
  CDR3 for alpha chain variable domain of TCR clone 363026 (TRAV2, TRAJ37)
CAVEDLGNTGKLIF

SEQ ID NO: 726052 - protein, 14 aa, Homo sapiens
  CDR3 for beta chain variable domain of TCR clone 363026 (TRBV19, TRBJ1-2)
CASSLQGQAYGYTF

SEQ ID NO: 726053 - protein, 16 aa, Homo sapiens
  CDR3 for alpha chain variable domain of TCR clone 363027 (TRAV3, TRAJ37)
CAVSPHGSGNTGKLIF

SEQ ID NO: 726054 - protein, 16 aa, Homo sapiens
  CDR3 for beta chain variable domain of TCR clone 363027 (TRBV7-9, TRBJ2-3)
CASSPWREVGTDTQYF

SEQ ID NO: 726055 - protein, 13 aa, Homo sapiens
  CDR3 for alpha chain variable domain of TCR clone 363028 (TRAV13-1, TRAJ10)
FAALEGGGNKLTF

SEQ ID NO: 726056 - protein, 17 aa, Homo sapiens
  CDR3 for beta chain variable domain of TCR clone 363028 (TRBV7-3, TRBJ2-2)
CASSLSGTSGGTGELFF

SEQ ID NO: 726057 - protein, 15 aa, Homo sapiens
  CDR3 for alpha chain variable domain of TCR clone 363029 (TRAV17, TRAJ16)
CATALRFSDGQKLPF

SEQ ID NO: 726058 - protein, 15 aa, Homo sapiens
  CDR3 for beta chain variable domain of TCR clone 363029 (TRBV20-1, TRBJ1-1)
CSASRGVTGNTEAFS

SEQ ID NO: 726059 - protein, 11 aa, Homo sapiens
  CDR3 for alpha chain variable domain of TCR clone 363030 (TRAV17, TRAJ9)
CGTTGGFKTIF

SEQ ID NO: 726060 - protein, 13 aa, Homo sapiens
  CDR3 for beta chain variable domain of TCR clone 363030 (TRBV20-1, TRBJ1-1)
CSAPLGGGTEAFF

SEQ ID NO: 726061 - protein, 11 aa, Homo sapiens
  CDR3 for alpha chain variable domain of TCR clone 363031 (TRAV12-3, TRAJ41)
CAMNAREALNF

SEQ ID NO: 726062 - protein, 12 aa, Homo sapiens
  CDR3 for beta chain variable domain of TCR clone 363031 (TRBV7-8, TRBJ2-7)
CASSLGDREQYF

SEQ ID NO: 726063 - protein, 12 aa, Homo sapiens
  CDR3 for alpha chain variable domain of TCR clone 363032 (TRAV16, TRAJ56)
CAPTGANSKLTF

SEQ ID NO: 726064 - protein, 17 aa, Homo sapiens
  CDR3 for beta chain variable domain of TCR clone 363032 (TRBV27, TRBJ2-6)
CASSLTGFASGANGLTF

SEQ ID NO: 726065 - protein, 16 aa, Homo sapiens
  CDR3 for alpha chain variable domain of TCR clone 363033 (TRAV30, TRAJ26)
CGTESVGDNYGQNFVF

SEQ ID NO: 726066 - protein, 13 aa, Homo sapiens
  CDR3 for beta chain variable domain of TCR clone 363033 (TRBV11-3, TRBJ2-7)
CASSLDKLYEQYF

SEQ ID NO: 726067 - protein, 14 aa, Homo sapiens
  CDR3 for alpha chain variable domain of TCR clone 363034 (TRAV17, TRAJ22)
CATVLSGSARQLTF

SEQ ID NO: 726068 - protein, 13 aa, Homo sapiens
  CDR3 for beta chain variable domain of TCR clone 363034 (TRBV15, TRBJ1-6)
CAPSGGLNSPLHF

SEQ ID NO: 726069 - protein, 12 aa, Homo sapiens
  CDR3 for alpha chain variable domain of TCR clone 363035 (TRAV1-1, TRAJ30)
CAVRGRDDKIIF

SEQ ID NO: 726070 - protein, 14 aa, Homo sapiens
  CDR3 for beta chain variable domain of TCR clone 363035 (TRBV7-2, TRBJ1-4)
CASSHSKTNEKLFF

SEQ ID NO: 726071 - protein, 10 aa, Homo sapiens
  CDR3 for alpha chain variable domain of TCR clone 363036 (TRAV30, TRAJ48)
CGIGNEKLTF

SEQ ID NO: 726072 - protein, 11 aa, Homo sapiens
  CDR3 for beta chain variable domain of TCR clone 363036 (TRBV7-9, TRBJ2-1)
CASSLLTEQFF

SEQ ID NO: 726073 - protein, 14 aa, Homo sapiens
  CDR3 for alpha chain variable domain of TCR clone 363037 (TRAV13-2, TRAJ32)
CAESLGGASNKLIF

SEQ ID NO: 726074 - protein, 14 aa, Homo sapiens
  CDR3 for beta chain variable domain of TCR clone 363037 (TRBV25-1, TRBJ1-1)
CASTHLGGNTEAFF

SEQ ID NO: 726075 - protein, 13 aa, Homo sapiens
  CDR3 for alpha chain variable domain of TCR clone 363038 (TRAV35, TRAJ48)
CAGHEFGNEKLTF

SEQ ID NO: 726076 - protein, 14 aa, Homo sapiens
  CDR3 for beta chain variable domain of TCR clone 363038 (TRBV19, TRBJ2-1)
CASPTFVLSGEQFV

SEQ ID NO: 726077 - protein, 14 aa, Homo sapiens
  CDR3 for alpha chain variable domain of TCR clone 363039 (TRAV21, TRAJ22)
CAVFFSGSARQLTS

SEQ ID NO: 726078 - protein, 12 aa, Homo sapiens
  CDR3 for beta chain variable domain of TCR clone 363039 (TRBV7-8, TRBJ2-7)
CASSLGDREQYF

SEQ ID NO: 726079 - protein, 12 aa, Homo sapiens
  CDR3 for alpha chain variable domain of TCR clone 363040 (TRAV12-2, TRAJ31)
CAVNTRDARLMF

SEQ ID NO: 726080 - protein, 15 aa, Homo sapiens
  CDR3 for beta chain variable domain of TCR clone 363040 (TRBV20-1, TRBJ2-7)
CSAESGTSGAYEQYF

SEQ ID NO: 726081 - protein, 18 aa, Homo sapiens
  CDR3 for alpha chain variable domain of TCR clone 363041 (TRAV12-3, TRAJ52)
CAMSRTNAGGTSYGKLTF

SEQ ID NO: 726082 - protein, 15 aa, Homo sapiens
  CDR3 for beta chain variable domain of TCR clone 363041 (TRBV7-2, TRBJ2-1)
CASRKTGCSYNEQFF

SEQ ID NO: 726083 - protein, 17 aa, Homo sapiens
  CDR3 for alpha chain variable domain of TCR clone 363042 (TRAV16, TRAJ10)
CHVLLCSRTGGGNKLTF

SEQ ID NO: 726084 - protein, 13 aa, Homo sapiens
  CDR3 for beta chain variable domain of TCR clone 363042 (TRBV5-4, TRBJ1-1)
CASSFQVNTEAFF

SEQ ID NO: 726085 - protein, 20 aa, Homo sapiens
  CDR3 for alpha chain variable domain of TCR clone 363043 (TRAV12-3, TRAJ52)
CAMTQSYQNAGGTSYGKLTF

SEQ ID NO: 726086 - protein, 16 aa, Homo sapiens
  CDR3 for beta chain variable domain of TCR clone 363043 (TRBV18, TRBJ1-2)
CASSPPDRVTIYGYTF

SEQ ID NO: 726087 - protein, 15 aa, Homo sapiens
  CDR3 for alpha chain variable domain of TCR clone 363044 (TRAV12-3, TRAJ49)
CAMAVTPNTGNQFYF

SEQ ID NO: 726088 - protein, 13 aa, Homo sapiens
  CDR3 for beta chain variable domain of TCR clone 363044 (TRBV20-1, TRBJ1-1)
CSARGGGNTEAFF

SEQ ID NO: 726089 - protein, 12 aa, Homo sapiens
  CDR3 for alpha chain variable domain of TCR clone 363045 (TRAV12-1, TRAJ40)
CVVSSGTYKYIF

SEQ ID NO: 726090 - protein, 17 aa, Homo sapiens
  CDR3 for beta chain variable domain of TCR clone 363045 (TRBV20-1, TRBJ1-1)
CSARGTGGSYGNTGAFF

SEQ ID NO: 726091 - protein, 16 aa, Homo sapiens
  CDR3 for alpha chain variable domain of TCR clone 363046 (TRAV35, TRAJ28)
CAGQKYSGAGSYQLTF

SEQ ID NO: 726092 - protein, 15 aa, Homo sapiens
  CDR3 for beta chain variable domain of TCR clone 363046 (TRBV6-5, TRBJ2-1)
CASSYDAGAGNEQFF

SEQ ID NO: 726093 - protein, 14 aa, Homo sapiens
  CDR3 for alpha chain variable domain of TCR clone 363047 (TRAV20, TRAJ56)
CAVQFGGANSKLTF

SEQ ID NO: 726094 - protein, 14 aa, Homo sapiens
  CDR3 for beta chain variable domain of TCR clone 363047 (TRBV20-1, TRBJ2-7)
CSAKRGRSSYDQYF

SEQ ID NO: 726095 - protein, 14 aa, Homo sapiens
  CDR3 for alpha chain variable domain of TCR clone 363048 (TRAV1-2, TRAJ16)
CAVNRFSDGQKLLF

SEQ ID NO: 726096 - protein, 13 aa, Homo sapiens
  CDR3 for beta chain variable domain of TCR clone 363048 (TRBV4-1, TRBJ2-1)
CASSQSGGDEQFF

SEQ ID NO: 726097 - protein, 15 aa, Homo sapiens
  CDR3 for alpha chain variable domain of TCR clone 363049 (TRAV17, TRAJ4)
CATGTWSGGYNKLIF

SEQ ID NO: 726098 - protein, 16 aa, Homo sapiens
  CDR3 for beta chain variable domain of TCR clone 363049 (TRBV7-9, TRBJ1-3)
CASSLGAGSSGNTIYF

SEQ ID NO: 726099 - protein, 12 aa, Homo sapiens
  CDR3 for alpha chain variable domain of TCR clone 363050 (TRAV13-2, TRAJ8)
CAPWLGFQKLVF

SEQ ID NO: 726100 - protein, 15 aa, Homo sapiens
  CDR3 for beta chain variable domain of TCR clone 363050 (TRBV5-1, TRBJ2-1)
CASSPPRAPYNEQFF

SEQ ID NO: 726101 - protein, 11 aa, Homo sapiens
  CDR3 for alpha chain variable domain of TCR clone 363051 (TRAV21, TRAJ34)
CAVTNTDKLIC

SEQ ID NO: 726102 - protein, 17 aa, Homo sapiens
  CDR3 for beta chain variable domain of TCR clone 363051 (TRBV20-1, TRBJ2-1)
CSARSPRGGPPTLSSSS

SEQ ID NO: 726103 - protein, 12 aa, Homo sapiens
  CDR3 for alpha chain variable domain of TCR clone 363052 (TRAV1-2, TRAJ26)
CAVRYYGQNFVF

SEQ ID NO: 726104 - protein, 15 aa, Homo sapiens
  CDR3 for beta chain variable domain of TCR clone 363052 (TRBV7-9, TRBJ1-6)
CASSSPGRGNSPLHF

SEQ ID NO: 726105 - protein, 10 aa, Homo sapiens
  CDR3 for alpha chain variable domain of TCR clone 363053 (TRAV29/DV5, TRAJ52)
CAAGFRVLVV

SEQ ID NO: 726106 - protein, 16 aa, Homo sapiens
  CDR3 for beta chain variable domain of TCR clone 363053 (TRBV7-3, TRBJ2-2)
CASSLKRGTLSGELFF

SEQ ID NO: 726107 - protein, 19 aa, Homo sapiens
  CDR3 for alpha chain variable domain of TCR clone 363054 (TRAV1-2, TRAJ26)
CLLPLCCERPDNYGQNFVF

SEQ ID NO: 726108 - protein, 14 aa, Homo sapiens
  CDR3 for beta chain variable domain of TCR clone 363054 (TRBV7-9, TRBJ1-4)
CAITEGEANEKLFF

SEQ ID NO: 726109 - protein, 16 aa, Homo sapiens
  CDR3 for alpha chain variable domain of TCR clone 363055 (TRAV30, TRAJ24)
CGTEIVDADSWGKFQF

SEQ ID NO: 726110 - protein, 16 aa, Homo sapiens
  CDR3 for beta chain variable domain of TCR clone 363055 (TRBV6-6, TRBJ1-6)
CASSLHGPGRGSPLHV

SEQ ID NO: 726111 - protein, 13 aa, Homo sapiens
  CDR3 for alpha chain variable domain of TCR clone 363056 (TRAV12-1, TRAJ11)
CVVNRAGYSTLTF

SEQ ID NO: 726112 - protein, 16 aa, Homo sapiens
  CDR3 for beta chain variable domain of TCR clone 363056 (TRBV27, TRBJ2-2)
CASSLRPGGAHGELFF

SEQ ID NO: 726113 - protein, 14 aa, Homo sapiens
  CDR3 for alpha chain variable domain of TCR clone 363057 (TRAV13-1, TRAJ44)
CAAKATGTASKLTF

SEQ ID NO: 726114 - protein, 13 aa, Homo sapiens
  CDR3 for beta chain variable domain of TCR clone 363057 (TRBV2, TRBJ2-5)
CASGTPYQETQYF

SEQ ID NO: 726115 - protein, 14 aa, Homo sapiens
  CDR3 for alpha chain variable domain of TCR clone 363058 (TRAV23/DV6, TRAJ11)
CAASLESGYSTLSF

SEQ ID NO: 726116 - protein, 13 aa, Homo sapiens
  CDR3 for beta chain variable domain of TCR clone 363058 (TRBV4-1, TRBJ2-5)
CASSLTRGETQYF

SEQ ID NO: 726117 - protein, 13 aa, Homo sapiens
  CDR3 for alpha chain variable domain of TCR clone 363059 (TRAV35, TRAJ43)
CAGYPYNNNDMRF

SEQ ID NO: 726118 - protein, 13 aa, Homo sapiens
  CDR3 for beta chain variable domain of TCR clone 363059 (TRBV7-3, TRBJ1-1)
CASSQDWGAEAFF

SEQ ID NO: 726119 - protein, 14 aa, Homo sapiens
  CDR3 for alpha chain variable domain of TCR clone 363060 (TRAV4, TRAJ17)
CLVGDMAAGNKLTF

SEQ ID NO: 726120 - protein, 14 aa, Homo sapiens
  CDR3 for beta chain variable domain of TCR clone 363060 (TRBV10-2, TRBJ1-5)
CASSSTGRNQPQHF

SEQ ID NO: 726121 - protein, 11 aa, Homo sapiens
  CDR3 for alpha chain variable domain of TCR clone 363061 (TRAV3, TRAJ21)
FSLGNFNNFYF

SEQ ID NO: 726122 - protein, 16 aa, Homo sapiens
  CDR3 for beta chain variable domain of TCR clone 363061 (TRBV19, TRBJ2-1)
CASSKAGPSSYNEQFF

SEQ ID NO: 726123 - protein, 14 aa, Homo sapiens
  CDR3 for alpha chain variable domain of TCR clone 363062 (TRAV29/DV5, TRAJ44)
CAASALGTASKLTF

SEQ ID NO: 726124 - protein, 11 aa, Homo sapiens
  CDR3 for beta chain variable domain of TCR clone 363062 (TRBV29-1, TRBJ1-3)
CSVAIGNTIHF

SEQ ID NO: 726125 - protein, 14 aa, Homo sapiens
  CDR3 for alpha chain variable domain of TCR clone 363063 (TRAV1-2, TRAJ16)
CAVNRFPDGQKLLF

SEQ ID NO: 726126 - protein, 17 aa, Homo sapiens
  CDR3 for beta chain variable domain of TCR clone 363063 (TRBV11-2, TRBJ2-1)
CASSLYPPGVEYNEQFF

SEQ ID NO: 726127 - protein, 14 aa, Homo sapiens
  CDR3 for alpha chain variable domain of TCR clone 363064 (TRAV29/DV5, TRAJ36)
CAARRKTGANNLFF

SEQ ID NO: 726128 - protein, 22 aa, Homo sapiens
  CDR3 for beta chain variable domain of TCR clone 363064 (TRBV29-1, TRBJ2-5)
TVSNMSPEDSSIYLCSAGTQYF

SEQ ID NO: 726129 - protein, 14 aa, Homo sapiens
  CDR3 for alpha chain variable domain of TCR clone 363065 (TRAV1-2, TRAJ8)
CSVREDTGFQKLVF

SEQ ID NO: 726130 - protein, 15 aa, Homo sapiens
  CDR3 for beta chain variable domain of TCR clone 363065 (TRBV6-6, TRBJ1-1)
CASSPRGDVETEAFF

SEQ ID NO: 726131 - protein, 13 aa, Homo sapiens
  CDR3 for alpha chain variable domain of TCR clone 363066 (TRAV29/DV5, TRAJ31)
CAASRNNNARLMF

SEQ ID NO: 726132 - protein, 14 aa, Homo sapiens
  CDR3 for beta chain variable domain of TCR clone 363066 (TRBV4-1, TRBJ1-5)
CASSPKGDNQPQHF

SEQ ID NO: 726133 - protein, 17 aa, Homo sapiens
  CDR3 for alpha chain variable domain of TCR clone 363067 (TRAV3, TRAJ42)
CAVRDRDYGGSQGNLIF

SEQ ID NO: 726134 - protein, 12 aa, Homo sapiens
  CDR3 for beta chain variable domain of TCR clone 363067 (TRBV6-1, TRBJ2-5)
CASSEGRETQYF

SEQ ID NO: 726135 - protein, 12 aa, Homo sapiens
  CDR3 for alpha chain variable domain of TCR clone 363068 (TRAV12-2, TRAJ20)
CAVRPSDYELSF

SEQ ID NO: 726136 - protein, 14 aa, Homo sapiens
  CDR3 for beta chain variable domain of TCR clone 363068 (TRBV6-1, TRBJ2-7)
CASNRARPDYEQYF

SEQ ID NO: 726137 - protein, 17 aa, Homo sapiens
  CDR3 for alpha chain variable domain of TCR clone 363069 (TRAV13-1, TRAJ28)
CAASPPYSGAGSYQLTF

SEQ ID NO: 726138 - protein, 14 aa, Homo sapiens
  CDR3 for beta chain variable domain of TCR clone 363069 (TRBV7-9, TRBJ2-1)
CASSDNSGYNEQFF

SEQ ID NO: 726139 - protein, 17 aa, Homo sapiens
  CDR3 for alpha chain variable domain of TCR clone 363070 (TRAV36/DV7, TRAJ52)
CAVAQRAGGTSYGKLTF

SEQ ID NO: 726140 - protein, 15 aa, Homo sapiens
  CDR3 for beta chain variable domain of TCR clone 363070 (TRBV25-1, TRBJ1-4)
CASSPGDSTNEKLFF

SEQ ID NO: 726141 - protein, 12 aa, Homo sapiens
  CDR3 for alpha chain variable domain of TCR clone 363071 (TRAV13-2, TRAJ39)
CAENNAGNTLTF

SEQ ID NO: 726142 - protein, 13 aa, Homo sapiens
  CDR3 for beta chain variable domain of TCR clone 363071 (TRBV7-6, TRBJ1-1)
CASSLKLGTEAFF

SEQ ID NO: 726143 - protein, 16 aa, Homo sapiens
  CDR3 for alpha chain variable domain of TCR clone 363072 (TRAV12-3, TRAJ53)
CAMSPGSGGSNYKLTF

SEQ ID NO: 726144 - protein, 20 aa, Homo sapiens
  CDR3 for beta chain variable domain of TCR clone 363072 (TRBV7-8, TRBJ2-2)
CASSHLFPGPTIHITGELCF

SEQ ID NO: 726145 - protein, 15 aa, Homo sapiens
  CDR3 for alpha chain variable domain of TCR clone 363073 (TRAV21, TRAJ38)
CAVRQDAGNNRKLIW

SEQ ID NO: 726146 - protein, 14 aa, Homo sapiens
  CDR3 for beta chain variable domain of TCR clone 363073 (TRBV4-2, TRBJ2-1)
CASGLDRAYNEQFF

SEQ ID NO: 726147 - protein, 11 aa, Homo sapiens
  CDR3 for alpha chain variable domain of TCR clone 363074 (TRAV12-3, TRAJ27)
CAMANAGKSTF

SEQ ID NO: 726148 - protein, 13 aa, Homo sapiens
  CDR3 for beta chain variable domain of TCR clone 363074 (TRBV20-1, TRBJ1-1)
CSARVGGNTEAVV

SEQ ID NO: 726149 - protein, 15 aa, Homo sapiens
  CDR3 for alpha chain variable domain of TCR clone 363075 (TRAV3, TRAJ3)
CAVRDRDSSASKINF

SEQ ID NO: 726150 - protein, 18 aa, Homo sapiens
  CDR3 for beta chain variable domain of TCR clone 363075 (TRBV25-1, TRBJ1-2)
CASSGLQNGQGLIFGYTF

SEQ ID NO: 726151 - protein, 12 aa, Homo sapiens
  CDR3 for alpha chain variable domain of TCR clone 363076 (TRAV12-3, TRAJ17)
CAMTLTGNKLTF

SEQ ID NO: 726152 - protein, 15 aa, Homo sapiens
  CDR3 for beta chain variable domain of TCR clone 363076 (TRBV5-1, TRBJ1-1)
CASSSTTGTNTEAFF

SEQ ID NO: 726153 - protein, 15 aa, Homo sapiens
  CDR3 for alpha chain variable domain of TCR clone 363077 (TRAV14/DV4, TRAJ12)
CAMREERDSSYQLIF

SEQ ID NO: 726154 - protein, 16 aa, Homo sapiens
  CDR3 for beta chain variable domain of TCR clone 363077 (TRBV11-2, TRBJ1-2)
CASSLDTGGADYGYTF

SEQ ID NO: 726155 - protein, 13 aa, Homo sapiens
  CDR3 for alpha chain variable domain of TCR clone 363078 (TRAV20, TRAJ3)
CARRYSSASKVIF

SEQ ID NO: 726156 - protein, 12 aa, Homo sapiens
  CDR3 for beta chain variable domain of TCR clone 363078 (TRBV28, TRBJ2-1)
CASSFRGNEQFF

SEQ ID NO: 726157 - protein, 12 aa, Homo sapiens
  CDR3 for alpha chain variable domain of TCR clone 363079 (TRAV3, TRAJ27)
CAVRDGAGKSTF

SEQ ID NO: 726158 - protein, 16 aa, Homo sapiens
  CDR3 for beta chain variable domain of TCR clone 363079 (TRBV18, TRBJ2-3)
CASPPGGLASTDTQYF

SEQ ID NO: 726159 - protein, 17 aa, Homo sapiens
  CDR3 for alpha chain variable domain of TCR clone 363080 (TRAV8-3, TRAJ42)
CAVGNPEERRSQGNLIF

SEQ ID NO: 726160 - protein, 16 aa, Homo sapiens
  CDR3 for beta chain variable domain of TCR clone 363080 (TRBV11-2, TRBJ1-2)
CASSLDTGGADYGYTF

SEQ ID NO: 726161 - protein, 17 aa, Homo sapiens
  CDR3 for alpha chain variable domain of TCR clone 363081 (TRAV3, TRAJ6)
CAVRDGPRAGGSYIPTF

SEQ ID NO: 726162 - protein, 18 aa, Homo sapiens
  CDR3 for beta chain variable domain of TCR clone 363081 (TRBV7-9, TRBJ2-7)
CASSLTTSGSSTWYEQYF

SEQ ID NO: 726163 - protein, 15 aa, Homo sapiens
  CDR3 for alpha chain variable domain of TCR clone 363082 (TRAV26-1, TRAJ29)
CIVRAEGSGNTPPVF

SEQ ID NO: 726164 - protein, 14 aa, Homo sapiens
  CDR3 for beta chain variable domain of TCR clone 363082 (TRBV18, TRBJ2-5)
CASSPGVSQETQYF

SEQ ID NO: 726165 - protein, 13 aa, Homo sapiens
  CDR3 for alpha chain variable domain of TCR clone 363083 (TRAV8-3, TRAJ37)
CAVPSSSTGKLIF

SEQ ID NO: 726166 - protein, 12 aa, Homo sapiens
  CDR3 for beta chain variable domain of TCR clone 363083 (TRBV11-2, TRBJ2-1)
CASSPGNNEQFF

SEQ ID NO: 726167 - protein, 13 aa, Homo sapiens
  CDR3 for alpha chain variable domain of TCR clone 363084 (TRAV25, TRAJ40)
CAGSASGTYKYIF

SEQ ID NO: 726168 - protein, 18 aa, Homo sapiens
  CDR3 for beta chain variable domain of TCR clone 363084 (TRBV11-2, TRBJ2-3)
CASSLGGASRGAPNTQYF

SEQ ID NO: 726169 - protein, 14 aa, Homo sapiens
  CDR3 for alpha chain variable domain of TCR clone 363085 (TRAV12-3, TRAJ9)
CAMSVETGGFKTNF

SEQ ID NO: 726170 - protein, 14 aa, Homo sapiens
  CDR3 for beta chain variable domain of TCR clone 363085 (TRBV7-2, TRBJ2-7)
CASRSQGAAYEQYF

SEQ ID NO: 726171 - protein, 13 aa, Homo sapiens
  CDR3 for alpha chain variable domain of TCR clone 363086 (TRAV3, TRAJ3)
CAVADSSASKIIF

SEQ ID NO: 726172 - protein, 15 aa, Homo sapiens
  CDR3 for beta chain variable domain of TCR clone 363086 (TRBV2, TRBJ2-1)
CASSELAGSYNEQFF

SEQ ID NO: 726173 - protein, 14 aa, Homo sapiens
  CDR3 for alpha chain variable domain of TCR clone 363087 (TRAV12-2, TRAJ40)
CAVKIPSGTYKYIF

SEQ ID NO: 726174 - protein, 13 aa, Homo sapiens
  CDR3 for beta chain variable domain of TCR clone 363087 (TRBV7-9, TRBJ1-2)
CASSLKQNYGDTF

SEQ ID NO: 726175 - protein, 12 aa, Homo sapiens
  CDR3 for alpha chain variable domain of TCR clone 363088 (TRAV35, TRAJ30)
CAGQLADYKIIF

SEQ ID NO: 726176 - protein, 17 aa, Homo sapiens
  CDR3 for beta chain variable domain of TCR clone 363088 (TRBV4-2, TRBJ2-5)
CASSPGRWRNFQETQYF

SEQ ID NO: 726177 - protein, 15 aa, Homo sapiens
  CDR3 for alpha chain variable domain of TCR clone 363089 (TRAV38-1, TRAJ37)
CAFIFGAGNTGKLIF

SEQ ID NO: 726178 - protein, 16 aa, Homo sapiens
  CDR3 for beta chain variable domain of TCR clone 363089 (TRBV6-1, TRBJ2-3)
CASSEVIGQGTDTQYF

SEQ ID NO: 726179 - protein, 14 aa, Homo sapiens
  CDR3 for alpha chain variable domain of TCR clone 363090 (TRAV2, TRAJ37)
CAVDFTSNTGKLIF

SEQ ID NO: 726180 - protein, 16 aa, Homo sapiens
  CDR3 for beta chain variable domain of TCR clone 363090 (TRBV7-6, TRBJ2-1)
CASSAPGPSSYNEQFF

SEQ ID NO: 726181 - protein, 11 aa, Homo sapiens
  CDR3 for alpha chain variable domain of TCR clone 363091 (TRAV2, TRAJ13)
CAPGGYQKVTF

SEQ ID NO: 726182 - protein, 16 aa, Homo sapiens
  CDR3 for beta chain variable domain of TCR clone 363091 (TRBV6-1, TRBJ2-5)
CASSETMDRGAETQYF

SEQ ID NO: 726183 - protein, 14 aa, Homo sapiens
  CDR3 for alpha chain variable domain of TCR clone 363092 (TRAV12-1, TRAJ38)
CGELKAGNNRKLIW

SEQ ID NO: 726184 - protein, 13 aa, Homo sapiens
  CDR3 for beta chain variable domain of TCR clone 363092 (TRBV4-2, TRBJ1-1)
CAGSQAGNTEAFF

SEQ ID NO: 726185 - protein, 12 aa, Homo sapiens
  CDR3 for alpha chain variable domain of TCR clone 363093 (TRAV13-2, TRAJ23)
CAERHRGGKLIL

SEQ ID NO: 726186 - protein, 12 aa, Homo sapiens
  CDR3 for beta chain variable domain of TCR clone 363093 (TRBV5-5, TRBJ2-5)
CASSYFGETQYF

SEQ ID NO: 726187 - protein, 11 aa, Homo sapiens
  CDR3 for alpha chain variable domain of TCR clone 363094 (TRAV12-1, TRAJ43)
CVEYNNNDMRF

SEQ ID NO: 726188 - protein, 17 aa, Homo sapiens
  CDR3 for beta chain variable domain of TCR clone 363094 (TRBV20-1, TRBJ2-1)
CSARDPLAGVWDNEQFF

SEQ ID NO: 726189 - protein, 13 aa, Homo sapiens
  CDR3 for alpha chain variable domain of TCR clone 363095 (TRAV16, TRAJ27)
CALRRTNAGKATF

SEQ ID NO: 726190 - protein, 15 aa, Homo sapiens
  CDR3 for beta chain variable domain of TCR clone 363095 (TRBV18, TRBJ2-1)
CASSPPRASYNEQFF

SEQ ID NO: 726191 - protein, 14 aa, Homo sapiens
  CDR3 for alpha chain variable domain of TCR clone 363096 (TRAV20, TRAJ42)
CCAADGGSQGNLIF

SEQ ID NO: 726192 - protein, 15 aa, Homo sapiens
  CDR3 for beta chain variable domain of TCR clone 363096 (TRBV12-4, TRBJ1-3)
CASTPGRRFGNTIYF

SEQ ID NO: 726193 - protein, 14 aa, Homo sapiens
  CDR3 for alpha chain variable domain of TCR clone 363097 (TRAV12-3, TRAJ10)
SHLPLTGGGNKLTF

SEQ ID NO: 726194 - protein, 13 aa, Homo sapiens
  CDR3 for beta chain variable domain of TCR clone 363097 (TRBV9, TRBJ1-4)
CASSVPGNEKLFF

SEQ ID NO: 726195 - protein, 16 aa, Homo sapiens
  CDR3 for alpha chain variable domain of TCR clone 363098 (TRAV3, TRAJ37)
CAVRGKGPGNTGKLIF

SEQ ID NO: 726196 - protein, 16 aa, Homo sapiens
  CDR3 for beta chain variable domain of TCR clone 363098 (TRBV20-1, TRBJ1-4)
CSAPGQGLLTNEKLFF

SEQ ID NO: 726197 - protein, 11 aa, Homo sapiens
  CDR3 for alpha chain variable domain of TCR clone 363099 (TRAV12-2, TRAJ54)
CAVEGAQKLVF

SEQ ID NO: 726198 - protein, 17 aa, Homo sapiens
  CDR3 for beta chain variable domain of TCR clone 363099 (TRBV18, TRBJ1-3)
SASSPYPTGPSGNTIYF

SEQ ID NO: 726199 - protein, 15 aa, Homo sapiens
  CDR3 for alpha chain variable domain of TCR clone 363100 (TRAV3, TRAJ22)
CAVRDRGGFARPLTF

SEQ ID NO: 726200 - protein, 16 aa, Homo sapiens
  CDR3 for beta chain variable domain of TCR clone 363100 (TRBV13, TRBJ2-2)
CASSPRTGEHTGELFF

SEQ ID NO: 726201 - protein, 11 aa, Homo sapiens
  CDR3 for alpha chain variable domain of TCR clone 363101 (TRAV17, TRAJ31)
CATSNNSRLMF

SEQ ID NO: 726202 - protein, 16 aa, Homo sapiens
  CDR3 for beta chain variable domain of TCR clone 363101 (TRBV4-2, TRBJ2-3)
CASSQELAGDTDTQYF

SEQ ID NO: 726203 - protein, 11 aa, Homo sapiens
  CDR3 for alpha chain variable domain of TCR clone 363102 (TRAV4, TRAJ31)
CLVGLTARLMF

SEQ ID NO: 726204 - protein, 16 aa, Homo sapiens
  CDR3 for beta chain variable domain of TCR clone 363102 (TRBV15, TRBJ2-6)
CATSVNGGFLANVLTF

SEQ ID NO: 726205 - protein, 13 aa, Homo sapiens
  CDR3 for alpha chain variable domain of TCR clone 363103 (TRAV22, TRAJ26)
CAVEHNYGQNFVF

SEQ ID NO: 726206 - protein, 16 aa, Homo sapiens
  CDR3 for beta chain variable domain of TCR clone 363103 (TRBV7-2, TRBJ2-6)
CASSERRASGASVLTF

SEQ ID NO: 726207 - protein, 15 aa, Homo sapiens
  CDR3 for alpha chain variable domain of TCR clone 363104 (TRAV4, TRAJ4)
CLVGPLSGGYNKLIF

SEQ ID NO: 726208 - protein, 13 aa, Homo sapiens
  CDR3 for beta chain variable domain of TCR clone 363104 (TRBV25-1, TRBJ2-5)
CASSESGRETQYF

SEQ ID NO: 726209 - protein, 18 aa, Homo sapiens
  CDR3 for alpha chain variable domain of TCR clone 363105 (TRAV21, TRAJ52)
CAVRPSPAGGTSYGKLTF

SEQ ID NO: 726210 - protein, 16 aa, Homo sapiens
  CDR3 for beta chain variable domain of TCR clone 363105 (TRBV5-1, TRBJ1-1)
CASSSGGNSLNTEAFF

SEQ ID NO: 726211 - protein, 13 aa, Homo sapiens
  CDR3 for alpha chain variable domain of TCR clone 363106 (TRAV1-1, TRAJ9)
CAAKNTVCFKTIF

SEQ ID NO: 726212 - protein, 14 aa, Homo sapiens
  CDR3 for beta chain variable domain of TCR clone 363106 (TRBV20-1, TRBJ2-1)
CSAQIGGSANEQFF

SEQ ID NO: 726213 - protein, 13 aa, Homo sapiens
  CDR3 for alpha chain variable domain of TCR clone 363107 (TRAV12-3, TRAJ33)
CAMSVNSNYQLIW

SEQ ID NO: 726214 - protein, 16 aa, Homo sapiens
  CDR3 for beta chain variable domain of TCR clone 363107 (TRBV7-9, TRBJ1-2)
CASSLGFSSGEDGYTF

SEQ ID NO: 726215 - protein, 15 aa, Homo sapiens
  CDR3 for alpha chain variable domain of TCR clone 363108 (TRAV26-2, TRAJ13)
CILRDLSGGYQKVTF

SEQ ID NO: 726216 - protein, 14 aa, Homo sapiens
  CDR3 for beta chain variable domain of TCR clone 363108 (TRBV4-1, TRBJ2-3)
SASSQEGSTDTQYF

SEQ ID NO: 726217 - protein, 14 aa, Homo sapiens
  CDR3 for alpha chain variable domain of TCR clone 363109 (TRAV12-3, TRAJ9)
CAMSPNTGGFKTIF

SEQ ID NO: 726218 - protein, 17 aa, Homo sapiens
  CDR3 for beta chain variable domain of TCR clone 363109 (TRBV5-4, TRBJ2-3)
CISVPAVLTASTDTQYF

SEQ ID NO: 726219 - protein, 11 aa, Homo sapiens
  CDR3 for alpha chain variable domain of TCR clone 363110 (TRAV26-1, TRAJ20)
CIVRVDYKLSF

SEQ ID NO: 726220 - protein, 22 aa, Homo sapiens
  CDR3 for beta chain variable domain of TCR clone 363110 (TRBV14, TRBJ1-5)
CASSQDGVTPYLPPIGNQPQHF

SEQ ID NO: 726221 - protein, 11 aa, Homo sapiens
  CDR3 for alpha chain variable domain of TCR clone 363111 (TRAV35, TRAJ30)
CAGPGDDKIIF

SEQ ID NO: 726222 - protein, 18 aa, Homo sapiens
  CDR3 for beta chain variable domain of TCR clone 363111 (TRBV7-6, TRBJ2-1)
CASSPRTSGMSSYSEQFF

SEQ ID NO: 726223 - protein, 18 aa, Homo sapiens
  CDR3 for alpha chain variable domain of TCR clone 363112 (TRAV21, TRAJ52)
CAVRPSPAGGTSYGKLTF

SEQ ID NO: 726224 - protein, 14 aa, Homo sapiens
  CDR3 for beta chain variable domain of TCR clone 363112 (TRBV11-2, TRBJ1-2)
CASSLYRGNYGYTF

SEQ ID NO: 726225 - protein, 13 aa, Homo sapiens
  CDR3 for alpha chain variable domain of TCR clone 363113 (TRAV21, TRAJ15)
CAVANQAGTALIF

SEQ ID NO: 726226 - protein, 17 aa, Homo sapiens
  CDR3 for beta chain variable domain of TCR clone 363113 (TRBV12-4, TRBJ2-7)
CASSLYGTSGGAYEQYF

SEQ ID NO: 726227 - protein, 16 aa, Homo sapiens
  CDR3 for alpha chain variable domain of TCR clone 363114 (TRAV12-1, TRAJ12)
CVVNTLLMDSSYKLIF

SEQ ID NO: 726228 - protein, 13 aa, Homo sapiens
  CDR3 for beta chain variable domain of TCR clone 363114 (TRBV11-2, TRBJ2-1)
CASSSEAHNEQFF

SEQ ID NO: 726229 - protein, 15 aa, Homo sapiens
  CDR3 for alpha chain variable domain of TCR clone 363115 (TRAV21, TRAJ32)
CAVNSYGGATNKLIF

SEQ ID NO: 726230 - protein, 16 aa, Homo sapiens
  CDR3 for beta chain variable domain of TCR clone 363115 (TRBV7-9, TRBJ1-2)
CASSLGFSSGEDGYTF

SEQ ID NO: 726231 - protein, 12 aa, Homo sapiens
  CDR3 for alpha chain variable domain of TCR clone 363116 (TRAV2, TRAJ5)
CASDTGRRALTF

SEQ ID NO: 726232 - protein, 15 aa, Homo sapiens
  CDR3 for beta chain variable domain of TCR clone 363116 (TRBV11-3, TRBJ2-7)
CASSLGDRGSYEQYF

SEQ ID NO: 726233 - protein, 11 aa, Homo sapiens
  CDR3 for alpha chain variable domain of TCR clone 363117 (TRAV6, TRAJ4)
PISGGYNKLIF

SEQ ID NO: 726234 - protein, 15 aa, Homo sapiens
  CDR3 for beta chain variable domain of TCR clone 363117 (TRBV4-1, TRBJ1-4)
CASSDTGGTNEKLFF

SEQ ID NO: 726235 - protein, 14 aa, Homo sapiens
  CDR3 for alpha chain variable domain of TCR clone 363118 (TRAV12-2, TRAJ24)
CAVTPADSWGRLQF

SEQ ID NO: 726236 - protein, 12 aa, Homo sapiens
  CDR3 for beta chain variable domain of TCR clone 363118 (TRBV3-1, TRBJ2-1)
CANSQGSSGQFF

SEQ ID NO: 726237 - protein, 14 aa, Homo sapiens
  CDR3 for alpha chain variable domain of TCR clone 363119 (TRAV17, TRAJ57)
CATDPKGGSEKLVF

SEQ ID NO: 726238 - protein, 16 aa, Homo sapiens
  CDR3 for beta chain variable domain of TCR clone 363119 (TRBV13, TRBJ2-2)
CASSPRTGEHTGELFF

SEQ ID NO: 726239 - protein, 15 aa, Homo sapiens
  CDR3 for alpha chain variable domain of TCR clone 363120 (TRAV8-3, TRAJ23)
CAVGDRYNQGGKLIF

SEQ ID NO: 726240 - protein, 22 aa, Homo sapiens
  CDR3 for beta chain variable domain of TCR clone 363120 (TRBV29-1, TRBJ2-5)
TVSNMSPEDSSIYLCSAGTPYV

SEQ ID NO: 726241 - protein, 12 aa, Homo sapiens
  CDR3 for alpha chain variable domain of TCR clone 363121 (TRAV12-3, TRAJ17)
CAMTLTGNKLNF

SEQ ID NO: 726242 - protein, 12 aa, Homo sapiens
  CDR3 for beta chain variable domain of TCR clone 363121 (TRBV11-2, TRBJ2-2)
CASSLPTGELFF

SEQ ID NO: 726243 - protein, 16 aa, Homo sapiens
  CDR3 for alpha chain variable domain of TCR clone 363122 (TRAV30, TRAJ24)
CGTEIVDADSWGKFQF

SEQ ID NO: 726244 - protein, 15 aa, Homo sapiens
  CDR3 for beta chain variable domain of TCR clone 363122 (TRBV6-6, TRBJ1-2)
CASSYADRGNYGYTF

SEQ ID NO: 726245 - protein, 16 aa, Homo sapiens
  CDR3 for alpha chain variable domain of TCR clone 363123 (TRAV16, TRAJ52)
CALSGVGGTGYGKLIF

SEQ ID NO: 726246 - protein, 14 aa, Homo sapiens
  CDR3 for beta chain variable domain of TCR clone 363123 (TRBV19, TRBJ1-2)
CASSLQGQAYGYTF

SEQ ID NO: 726247 - protein, 15 aa, Homo sapiens
  CDR3 for alpha chain variable domain of TCR clone 363124 (TRAV26-2, TRAJ26)
CILRDFDNYGQNFVF

SEQ ID NO: 726248 - protein, 14 aa, Homo sapiens
  CDR3 for beta chain variable domain of TCR clone 363124 (TRBV25-1, TRBJ1-1)
CASTHLGGNTEAFF

SEQ ID NO: 726249 - protein, 12 aa, Homo sapiens
  CDR3 for alpha chain variable domain of TCR clone 363125 (TRAV35, TRAJ39)
LAPNNAGNMLTF

SEQ ID NO: 726250 - protein, 14 aa, Homo sapiens
  CDR3 for beta chain variable domain of TCR clone 363125 (TRBV19, TRBJ2-3)
CASSAPRGTDTQYF

SEQ ID NO: 726251 - protein, 13 aa, Homo sapiens
  CDR3 for alpha chain variable domain of TCR clone 363126 (TRAV3, TRAJ36)
CAVRDTGANNLFF

SEQ ID NO: 726252 - protein, 16 aa, Homo sapiens
  CDR3 for beta chain variable domain of TCR clone 363126 (TRBV7-3, TRBJ2-2)
CASSLKRGTLSGELFF

SEQ ID NO: 726253 - protein, 14 aa, Homo sapiens
  CDR3 for alpha chain variable domain of TCR clone 363127 (TRAV29/DV5, TRAJ36)
CAARRKTGANNLFF

SEQ ID NO: 726254 - protein, 13 aa, Homo sapiens
  CDR3 for beta chain variable domain of TCR clone 363127 (TRBV27, TRBJ2-5)
CASSRDRKSEQYF

SEQ ID NO: 726255 - protein, 14 aa, Homo sapiens
  CDR3 for alpha chain variable domain of TCR clone 363128 (TRAV16, TRAJ32)
CALKSGGATNKLIF

SEQ ID NO: 726256 - protein, 13 aa, Homo sapiens
  CDR3 for beta chain variable domain of TCR clone 363128 (TRBV15, TRBJ1-6)
CATSGGLNSPLHF

SEQ ID NO: 726257 - protein, 15 aa, Homo sapiens
  CDR3 for alpha chain variable domain of TCR clone 363129 (TRAV35, TRAJ38)
CAGFSNAGNNRKRIW

SEQ ID NO: 726258 - protein, 18 aa, Homo sapiens
  CDR3 for beta chain variable domain of TCR clone 363129 (TRBV3-1, TRBJ1-2)
CASSQDVIGWNGDYGYTF

SEQ ID NO: 726259 - protein, 11 aa, Homo sapiens
  CDR3 for alpha chain variable domain of TCR clone 363130 (TRAV29/DV5, TRAJ37)
CATSNTVKLIF

SEQ ID NO: 726260 - protein, 12 aa, Homo sapiens
  CDR3 for beta chain variable domain of TCR clone 363130 (TRBV29-1, TRBJ2-3)
CSVTGGADTQYF

SEQ ID NO: 726261 - protein, 19 aa, Homo sapiens
  CDR3 for alpha chain variable domain of TCR clone 363131 (TRAV26-1, TRAJ28)
CIVRVAHAYSGAGSYQLTF

SEQ ID NO: 726262 - protein, 14 aa, Homo sapiens
  CDR3 for beta chain variable domain of TCR clone 363131 (TRBV5-4, TRBJ1-1)
CASSLDSRRDEAFF

SEQ ID NO: 726263 - protein, 11 aa, Homo sapiens
  CDR3 for alpha chain variable domain of TCR clone 363132 (TRAV2, TRAJ4)
YAAGGYNKLIF

SEQ ID NO: 726264 - protein, 13 aa, Homo sapiens
  CDR3 for beta chain variable domain of TCR clone 363132 (TRBV20-1, TRBJ1-1)
CSARVGGNTEAFF

SEQ ID NO: 726265 - protein, 20 aa, Homo sapiens
  CDR3 for alpha chain variable domain of TCR clone 363133 (TRAV12-1, TRAJ42)
SSVIQPPTSVKGGSQGDLIF

SEQ ID NO: 726266 - protein, 18 aa, Homo sapiens
  CDR3 for beta chain variable domain of TCR clone 363133 (TRBV11-2, TRBJ2-3)
CAGSLGGASRGGPNTQYF

SEQ ID NO: 726267 - protein, 12 aa, Homo sapiens
  CDR3 for alpha chain variable domain of TCR clone 363134 (TRAV8-6, TRAJ36)
CAVSDWLGQTTS

SEQ ID NO: 726268 - protein, 14 aa, Homo sapiens
  CDR3 for beta chain variable domain of TCR clone 363134 (TRBV4-1, TRBJ2-2)
CASRRGRASGELFF

SEQ ID NO: 726269 - protein, 14 aa, Homo sapiens
  CDR3 for alpha chain variable domain of TCR clone 363135 (TRAV12-2, TRAJ17)
CAALFKAAGNKLTF

SEQ ID NO: 726270 - protein, 12 aa, Homo sapiens
  CDR3 for beta chain variable domain of TCR clone 363135 (TRBV5-1, TRBJ1-1)
CASSLTGAEAFF

SEQ ID NO: 726271 - protein, 17 aa, Homo sapiens
  CDR3 for alpha chain variable domain of TCR clone 363136 (TRAV8-6, TRAJ42)
CAVSDRVHGGSQGNLIF

SEQ ID NO: 726272 - protein, 15 aa, Homo sapiens
  CDR3 for beta chain variable domain of TCR clone 363136 (TRBV18, TRBJ1-5)
CASSETGGNNQPQHF

SEQ ID NO: 726273 - protein, 14 aa, Homo sapiens
  CDR3 for alpha chain variable domain of TCR clone 363137 (TRAV3, TRAJ28)
CAVRRGAGSYQLTF

SEQ ID NO: 726274 - protein, 16 aa, Homo sapiens
  CDR3 for beta chain variable domain of TCR clone 363137 (TRBV4-1, TRBJ2-7)
CSSSQEWTSGPREQYF

SEQ ID NO: 726275 - protein, 13 aa, Homo sapiens
  CDR3 for alpha chain variable domain of TCR clone 363138 (TRAV3, TRAJ27)
CAVRPLGAGKSTF

SEQ ID NO: 726276 - protein, 15 aa, Homo sapiens
  CDR3 for beta chain variable domain of TCR clone 363138 (TRBV20-1, TRBJ2-7)
CSARDRVSGMDEQYF

SEQ ID NO: 726277 - protein, 14 aa, Homo sapiens
  CDR3 for alpha chain variable domain of TCR clone 363139 (TRAV1-2, TRAJ8)
CAVREDTGFQKLVF

SEQ ID NO: 726278 - protein, 13 aa, Homo sapiens
  CDR3 for beta chain variable domain of TCR clone 363139 (TRBV7-3, TRBJ2-2)
CASSLNVLGELFF

SEQ ID NO: 726279 - protein, 15 aa, Homo sapiens
  CDR3 for alpha chain variable domain of TCR clone 363140 (TRAV8-4, TRAJ9)
CAVSDPRAGGFKTIF

SEQ ID NO: 726280 - protein, 16 aa, Homo sapiens
  CDR3 for beta chain variable domain of TCR clone 363140 (TRBV28, TRBJ1-5)
CASSLTGQGWNQPQHF

SEQ ID NO: 726281 - protein, 13 aa, Homo sapiens
  CDR3 for alpha chain variable domain of TCR clone 363141 (TRAV2, TRAJ24)
CAVSTDSWGKLQF

SEQ ID NO: 726282 - protein, 18 aa, Homo sapiens
  CDR3 for beta chain variable domain of TCR clone 363141 (TRBV20-1, TRBJ2-6)
CSAETTPTHGSGANVLTF

SEQ ID NO: 726283 - protein, 11 aa, Homo sapiens
  CDR3 for alpha chain variable domain of TCR clone 363142 (TRAV2, TRAJ13)
CASGGYQKVTF

SEQ ID NO: 726284 - protein, 14 aa, Homo sapiens
  CDR3 for beta chain variable domain of TCR clone 363142 (TRBV20-1, TRBJ2-7)
CSAKRGRSSYEQYF

SEQ ID NO: 726285 - protein, 12 aa, Homo sapiens
  CDR3 for alpha chain variable domain of TCR clone 363143 (TRAV12-3, TRAJ17)
CAMTLPGNKLTF

SEQ ID NO: 726286 - protein, 15 aa, Homo sapiens
  CDR3 for beta chain variable domain of TCR clone 363143 (TRBV20-1, TRBJ2-7)
CSARDRVSWMDEQYF

SEQ ID NO: 726287 - protein, 13 aa, Homo sapiens
  CDR3 for alpha chain variable domain of TCR clone 363144 (TRAV8-3, TRAJ28)
CAVGAVGSYQLTF

SEQ ID NO: 726288 - protein, 15 aa, Homo sapiens
  CDR3 for beta chain variable domain of TCR clone 363144 (TRBV7-9, TRBJ1-5)
CASSQGHQPNPPQHF

SEQ ID NO: 726289 - protein, 14 aa, Homo sapiens
  CDR3 for alpha chain variable domain of TCR clone 363145 (TRAV12-2, TRAJ40)
CAVKIPSGTYKYTF

SEQ ID NO: 726290 - protein, 14 aa, Homo sapiens
  CDR3 for beta chain variable domain of TCR clone 363145 (TRBV11-2, TRBJ1-5)
CASSLDRGRQPQHF

SEQ ID NO: 726291 - protein, 12 aa, Homo sapiens
  CDR3 for alpha chain variable domain of TCR clone 363146 (TRAV1-2, TRAJ26)
CAVSPYGQTFVF

SEQ ID NO: 726292 - protein, 14 aa, Homo sapiens
  CDR3 for beta chain variable domain of TCR clone 363146 (TRBV5-1, TRBJ2-7)
CASSFASGVNEQYF

SEQ ID NO: 726293 - protein, 16 aa, Homo sapiens
  CDR3 for alpha chain variable domain of TCR clone 363147 (TRAV13-2, TRAJ37)
CAENIRGSSNTGKLIL

SEQ ID NO: 726294 - protein, 15 aa, Homo sapiens
  CDR3 for beta chain variable domain of TCR clone 363147 (TRBV5-1, TRBJ2-7)
CASSPQGRPLDEQYF

SEQ ID NO: 726295 - protein, 14 aa, Homo sapiens
  CDR3 for alpha chain variable domain of TCR clone 363148 (TRAV16, TRAJ33)
CALSAMDSNYQLIW

SEQ ID NO: 726296 - protein, 16 aa, Homo sapiens
  CDR3 for beta chain variable domain of TCR clone 363148 (TRBV25-1, TRBJ2-7)
CASSELTGGGIYEQNF

SEQ ID NO: 726297 - protein, 15 aa, Homo sapiens
  CDR3 for alpha chain variable domain of TCR clone 363149 (TRAV26-1, TRAJ22)
CIVRVSFWFCKANDL

SEQ ID NO: 726298 - protein, 13 aa, Homo sapiens
  CDR3 for beta chain variable domain of TCR clone 363149 (TRBV7-9, TRBJ1-2)
CASSLKQNYGYAF

SEQ ID NO: 726299 - protein, 13 aa, Homo sapiens
  CDR3 for alpha chain variable domain of TCR clone 363150 (TRAV21, TRAJ49)
CAVRQSTGNQFYL

SEQ ID NO: 726300 - protein, 13 aa, Homo sapiens
  CDR3 for beta chain variable domain of TCR clone 363150 (TRBV6-6, TRBJ1-5)
CASRAYQDQPQHF

SEQ ID NO: 726301 - protein, 14 aa, Homo sapiens
  CDR3 for alpha chain variable domain of TCR clone 363151 (TRAV1-2, TRAJ8)
CAVREDTGFQKLVF

SEQ ID NO: 726302 - protein, 16 aa, Homo sapiens
  CDR3 for beta chain variable domain of TCR clone 363151 (TRBV7-3, TRBJ2-2)
FASSLKRGTLSGELFF

SEQ ID NO: 726303 - protein, 17 aa, Homo sapiens
  CDR3 for alpha chain variable domain of TCR clone 363152 (TRAV3, TRAJ6)
FAVRDGPRAGGSYIPTF

SEQ ID NO: 726304 - protein, 14 aa, Homo sapiens
  CDR3 for beta chain variable domain of TCR clone 363152 (TRBV7-2, TRBJ2-7)
CASSTKTSFYEQYF

SEQ ID NO: 726305 - protein, 15 aa, Homo sapiens
  CDR3 for alpha chain variable domain of TCR clone 363153 (TRAV27, TRAJ38)
CAARRNAGNNRELIW

SEQ ID NO: 726306 - protein, 13 aa, Homo sapiens
  CDR3 for beta chain variable domain of TCR clone 363153 (TRBV20-1, TRBJ1-1)
CSARAGGNTEEFF

SEQ ID NO: 726307 - protein, 20 aa, Homo sapiens
  CDR3 for alpha chain variable domain of TCR clone 363154 (TRAV12-3, TRAJ17)
SPVIQPPTFAMTLTGNKLTF

SEQ ID NO: 726308 - protein, 17 aa, Homo sapiens
  CDR3 for beta chain variable domain of TCR clone 363154 (TRBV11-2, TRBJ2-1)
CASSLYPPGVEYNEQFF

SEQ ID NO: 726309 - protein, 14 aa, Homo sapiens
  CDR3 for alpha chain variable domain of TCR clone 363155 (TRAV1-1, TRAJ27)
CAVIYNTNAGTSTF

SEQ ID NO: 726310 - protein, 14 aa, Homo sapiens
  CDR3 for beta chain variable domain of TCR clone 363155 (TRBV6-5, TRBJ1-2)
CASSYDGTGGGYTF

SEQ ID NO: 726311 - protein, 16 aa, Homo sapiens
  CDR3 for alpha chain variable domain of TCR clone 363156 (TRAV14/DV4, TRAJ20)
CAMREGRSRDDYKLRF

SEQ ID NO: 726312 - protein, 17 aa, Homo sapiens
  CDR3 for beta chain variable domain of TCR clone 363156 (TRBV15, TRBJ1-1)
CATSRVGGADGDTEAFF

SEQ ID NO: 726313 - protein, 17 aa, Homo sapiens
  CDR3 for alpha chain variable domain of TCR clone 363157 (TRAV8-6, TRAJ58)
CALSSWVGETSGSRLTF

SEQ ID NO: 726314 - protein, 14 aa, Homo sapiens
  CDR3 for beta chain variable domain of TCR clone 363157 (TRBV4-2, TRBJ2-1)
CASGLERAYNEQFF

SEQ ID NO: 726315 - protein, 23 aa, Homo sapiens
  CDR3 for alpha chain variable domain of TCR clone 363158 (TRAV26-1, TRAJ38)
CTADNAGNNHIQNPDPAVYQLID

SEQ ID NO: 726316 - protein, 13 aa, Homo sapiens
  CDR3 for beta chain variable domain of TCR clone 363158 (TRBV20-1, TRBJ1-1)
CSARGGGNTEAFF

SEQ ID NO: 726317 - protein, 14 aa, Homo sapiens
  CDR3 for alpha chain variable domain of TCR clone 363159 (TRAV17, TRAJ9)
CATVTLGGGFKTIF

SEQ ID NO: 726318 - protein, 11 aa, Homo sapiens
  CDR3 for beta chain variable domain of TCR clone 363159 (TRBV6-3, TRBJ2-3)
CATGQADTQYF

SEQ ID NO: 726319 - protein, 11 aa, Homo sapiens
  CDR3 for alpha chain variable domain of TCR clone 363160 (TRAV12-3, TRAJ27)
CAMANAGKSTF

SEQ ID NO: 726320 - protein, 15 aa, Homo sapiens
  CDR3 for beta chain variable domain of TCR clone 363160 (TRBV2, TRBJ2-2)
CASSRETVGTGELFF

SEQ ID NO: 726321 - protein, 15 aa, Homo sapiens
  CDR3 for alpha chain variable domain of TCR clone 363161 (TRAV12-3, TRAJ8)
CAMSLLNTGFQKLVF

SEQ ID NO: 726322 - protein, 14 aa, Homo sapiens
  CDR3 for beta chain variable domain of TCR clone 363161 (TRBV19, TRBJ2-3)
CASSAPRGTDTQYF

SEQ ID NO: 726323 - protein, 11 aa, Homo sapiens
  CDR3 for alpha chain variable domain of TCR clone 363162 (TRAV17, TRAJ43)
CATPRSNDMRF

SEQ ID NO: 726324 - protein, 15 aa, Homo sapiens
  CDR3 for beta chain variable domain of TCR clone 363162 (TRBV27, TRBJ2-1)
CASSLARGAYNEQFF

SEQ ID NO: 726325 - protein, 15 aa, Homo sapiens
  CDR3 for alpha chain variable domain of TCR clone 363163 (TRAV4, TRAJ39)
CLVGPNNNAGNTLTF

SEQ ID NO: 726326 - protein, 13 aa, Homo sapiens
  CDR3 for beta chain variable domain of TCR clone 363163 (TRBV11-3, TRBJ2-5)
CASSSTGEETQYF

SEQ ID NO: 726327 - protein, 11 aa, Homo sapiens
  CDR3 for alpha chain variable domain of TCR clone 363164 (TRAV16, TRAJ33)
CALHSNYQLIW

SEQ ID NO: 726328 - protein, 11 aa, Homo sapiens
  CDR3 for beta chain variable domain of TCR clone 363164 (TRBV11-2, TRBJ1-1)
CASSINTEAFF

SEQ ID NO: 726329 - protein, 11 aa, Homo sapiens
  CDR3 for alpha chain variable domain of TCR clone 363165 (TRAV12-1, TRAJ3)
CVVSSASKIIF

SEQ ID NO: 726330 - protein, 13 aa, Homo sapiens
  CDR3 for beta chain variable domain of TCR clone 363165 (TRBV3-1, TRBJ2-7)
CASSHLNAREQYF

SEQ ID NO: 726331 - protein, 14 aa, Homo sapiens
  CDR3 for alpha chain variable domain of TCR clone 363166 (TRAV29/DV5, TRAJ36)
CAPRRKTGAKNLFF

SEQ ID NO: 726332 - protein, 14 aa, Homo sapiens
  CDR3 for beta chain variable domain of TCR clone 363166 (TRBV12-5, TRBJ2-5)
CASGSRTHQETQYF

SEQ ID NO: 726333 - protein, 14 aa, Homo sapiens
  CDR3 for alpha chain variable domain of TCR clone 363167 (TRAV17, TRAJ40)
CATAPMGGTYKYIF

SEQ ID NO: 726334 - protein, 15 aa, Homo sapiens
  CDR3 for beta chain variable domain of TCR clone 363167 (TRBV7-8, TRBJ2-3)
CASSPRTGSTDTQYF

SEQ ID NO: 726335 - protein, 18 aa, Homo sapiens
  CDR3 for alpha chain variable domain of TCR clone 363168 (TRAV1-2, TRAJ18)
CAVRDMGDRGSNLGRLYF

SEQ ID NO: 726336 - protein, 16 aa, Homo sapiens
  CDR3 for beta chain variable domain of TCR clone 363168 (TRBV29-1, TRBJ1-2)
CSVEANRDIANYGYTF

SEQ ID NO: 726337 - protein, 16 aa, Homo sapiens
  CDR3 for alpha chain variable domain of TCR clone 363169 (TRAV3, TRAJ10)
CAVRDMRAGGGNKLNF

SEQ ID NO: 726338 - protein, 16 aa, Homo sapiens
  CDR3 for beta chain variable domain of TCR clone 363169 (TRBV12-5, TRBJ2-5)
CASGPRTSGNQETQYF

SEQ ID NO: 726339 - protein, 18 aa, Homo sapiens
  CDR3 for alpha chain variable domain of TCR clone 363170 (TRAV29/DV5, TRAJ52)
CAAGFRGAGGTSYGKLTF

SEQ ID NO: 726340 - protein, 15 aa, Homo sapiens
  CDR3 for beta chain variable domain of TCR clone 363170 (TRBV7-9, TRBJ1-6)
CASSSPGRGNSPLHF

SEQ ID NO: 726341 - protein, 13 aa, Homo sapiens
  CDR3 for alpha chain variable domain of TCR clone 363171 (TRAV13-1, TRAJ53)
QAASGGSNYKLTF

SEQ ID NO: 726342 - protein, 15 aa, Homo sapiens
  CDR3 for beta chain variable domain of TCR clone 363171 (TRBV5-1, TRBJ2-1)
CASSPPRAPYNEQSF

SEQ ID NO: 726343 - protein, 11 aa, Homo sapiens
  CDR3 for alpha chain variable domain of TCR clone 363172 (TRAV3, TRAJ21)
CAVGNFNKFYF

SEQ ID NO: 726344 - protein, 14 aa, Homo sapiens
  CDR3 for beta chain variable domain of TCR clone 363172 (TRBV19, TRBJ1-5)
CASSLSGGSQPQHF

SEQ ID NO: 726345 - protein, 14 aa, Homo sapiens
  CDR3 for alpha chain variable domain of TCR clone 363173 (TRAV13-1, TRAJ5)
CAASPGSRRRALTF

SEQ ID NO: 726346 - protein, 16 aa, Homo sapiens
  CDR3 for beta chain variable domain of TCR clone 363173 (TRBV7-3, TRBJ2-2)
CASSLKRGTLSGELFF

SEQ ID NO: 726347 - protein, 14 aa, Homo sapiens
  CDR3 for alpha chain variable domain of TCR clone 363174 (TRAV12-2, TRAJ24)
CAVTPADSWGKLQF

SEQ ID NO: 726348 - protein, 12 aa, Homo sapiens
  CDR3 for beta chain variable domain of TCR clone 363174 (TRBV3-1, TRBJ2-1)
CASSQGASGQFF

SEQ ID NO: 726349 - protein, 16 aa, Homo sapiens
  CDR3 for alpha chain variable domain of TCR clone 363175 (TRAV12-3, TRAJ53)
CAMSPGSGGSNYKLTF

SEQ ID NO: 726350 - protein, 15 aa, Homo sapiens
  CDR3 for beta chain variable domain of TCR clone 363175 (TRBV28, TRBJ2-4)
CAAGSGTLLMGIQYF

SEQ ID NO: 726351 - protein, 17 aa, Homo sapiens
  CDR3 for alpha chain variable domain of TCR clone 363176 (TRAV3, TRAJ6)
CAVIDGPRAGGRYIPTF

SEQ ID NO: 726352 - protein, 16 aa, Homo sapiens
  CDR3 for beta chain variable domain of TCR clone 363176 (TRBV4-1, TRBJ2-7)
CASSLTAGQATYEQYF

SEQ ID NO: 726353 - protein, 11 aa, Homo sapiens
  CDR3 for alpha chain variable domain of TCR clone 363177 (TRAV27, TRAJ47)
CRSNQGNNLVF

SEQ ID NO: 726354 - protein, 16 aa, Homo sapiens
  CDR3 for beta chain variable domain of TCR clone 363177 (TRBV7-9, TRBJ2-1)
CASSDVAGGSYNEQLF

SEQ ID NO: 726355 - protein, 17 aa, Homo sapiens
  CDR3 for alpha chain variable domain of TCR clone 363178 (TRAV8-6, TRAJ4)
CAVSEKMVFGAGTRLAV

SEQ ID NO: 726356 - protein, 14 aa, Homo sapiens
  CDR3 for beta chain variable domain of TCR clone 363178 (TRBV9, TRBJ2-7)
CASSVGVGSYEQYF

SEQ ID NO: 726357 - protein, 13 aa, Homo sapiens
  CDR3 for alpha chain variable domain of TCR clone 363179 (TRAV12-2, TRAJ42)
CAVKRGSQGNLIF

SEQ ID NO: 726358 - protein, 16 aa, Homo sapiens
  CDR3 for beta chain variable domain of TCR clone 363179 (TRBV9, TRBJ2-2)
CASSAMGKGNTGDLFF

SEQ ID NO: 726359 - protein, 14 aa, Homo sapiens
  CDR3 for alpha chain variable domain of TCR clone 363180 (TRAV38-2/DV8, TRAJ54)
AATYQIQGAQKLVF

SEQ ID NO: 726360 - protein, 17 aa, Homo sapiens
  CDR3 for beta chain variable domain of TCR clone 363180 (TRBV6-1, TRBJ2-3)
CASSEALRLISTDTQYF

SEQ ID NO: 726361 - protein, 14 aa, Homo sapiens
  CDR3 for alpha chain variable domain of TCR clone 363181 (TRAV12-3, TRAJ10)
SHLPLTGGGNKLTF

SEQ ID NO: 726362 - protein, 14 aa, Homo sapiens
  CDR3 for beta chain variable domain of TCR clone 363181 (TRBV7-9, TRBJ2-3)
CASSLEDGTDTQYF

SEQ ID NO: 726363 - protein, 14 aa, Homo sapiens
  CDR3 for alpha chain variable domain of TCR clone 363182 (TRAV12-3, TRAJ9)
CAMSPNTGGFKTIF

SEQ ID NO: 726364 - protein, 15 aa, Homo sapiens
  CDR3 for beta chain variable domain of TCR clone 363182 (TRBV10-3, TRBJ2-3)
CTISLTSGGTDTQYF

SEQ ID NO: 726365 - protein, 14 aa, Homo sapiens
  CDR3 for alpha chain variable domain of TCR clone 363183 (TRAV12-2, TRAJ33)
CAMKRARSNYQLIW

SEQ ID NO: 726366 - protein, 12 aa, Homo sapiens
  CDR3 for beta chain variable domain of TCR clone 363183 (TRBV24-1, TRBJ2-3)
CATSDSTDTQYF

SEQ ID NO: 726367 - protein, 15 aa, Homo sapiens
  CDR3 for alpha chain variable domain of TCR clone 363184 (TRAV21, TRAJ53)
CATLNSGGSNYKLTF

SEQ ID NO: 726368 - protein, 14 aa, Homo sapiens
  CDR3 for beta chain variable domain of TCR clone 363184 (TRBV9, TRBJ2-4)
CASSPSGTSGFQYF

SEQ ID NO: 726369 - protein, 14 aa, Homo sapiens
  CDR3 for alpha chain variable domain of TCR clone 363185 (TRAV12-1, TRAJ23)
CVVIVYNQGGKLNF

SEQ ID NO: 726370 - protein, 15 aa, Homo sapiens
  CDR3 for beta chain variable domain of TCR clone 363185 (TRBV20-1, TRBJ1-5)
CSAKPPGQGPQPQHF

SEQ ID NO: 726371 - protein, 14 aa, Homo sapiens
  CDR3 for alpha chain variable domain of TCR clone 363186 (TRAV20, TRAJ22)
CAVALGGSARQLTF

SEQ ID NO: 726372 - protein, 14 aa, Homo sapiens
  CDR3 for beta chain variable domain of TCR clone 363186 (TRBV25-1, TRBJ1-1)
CASTHLGGNTEAFF

SEQ ID NO: 726373 - protein, 14 aa, Homo sapiens
  CDR3 for alpha chain variable domain of TCR clone 363187 (TRAV12-1, TRAJ17)
CVVNYKAAGNKLTF

SEQ ID NO: 726374 - protein, 16 aa, Homo sapiens
  CDR3 for beta chain variable domain of TCR clone 363187 (TRBV12-4, TRBJ1-5)
CASSRPVWGSNQPQHF

SEQ ID NO: 726375 - protein, 14 aa, Homo sapiens
  CDR3 for alpha chain variable domain of TCR clone 363188 (TRAV12-2, TRAJ40)
CAVKIPPGTYKYIF

SEQ ID NO: 726376 - protein, 18 aa, Homo sapiens
  CDR3 for beta chain variable domain of TCR clone 363188 (TRBV7-9, TRBJ2-7)
CASSLTTSGSRTWYEQYF

SEQ ID NO: 726377 - protein, 15 aa, Homo sapiens
  CDR3 for alpha chain variable domain of TCR clone 363189 (TRAV3, TRAJ4)
CAVRDGTGGYNKLIF

SEQ ID NO: 726378 - protein, 16 aa, Homo sapiens
  CDR3 for beta chain variable domain of TCR clone 363189 (TRBV27, TRBJ2-2)
CASSSSGVSKTGELFF

SEQ ID NO: 726379 - protein, 13 aa, Homo sapiens
  CDR3 for alpha chain variable domain of TCR clone 363190 (TRAV12-1, TRAJ49)
CVVNTNTGNQSYF

SEQ ID NO: 726380 - protein, 17 aa, Homo sapiens
  CDR3 for beta chain variable domain of TCR clone 363190 (TRBV7-3, TRBJ2-3)
CASSLMKRMRGADTQYF

SEQ ID NO: 726381 - protein, 16 aa, Homo sapiens
  CDR3 for alpha chain variable domain of TCR clone 363191 (TRAV12-3, TRAJ52)
CAVSNAGGTSYGKLTF

SEQ ID NO: 726382 - protein, 16 aa, Homo sapiens
  CDR3 for beta chain variable domain of TCR clone 363191 (TRBV6-6, TRBJ2-1)
CASSYSVSGSYNEQFF

SEQ ID NO: 726383 - protein, 17 aa, Homo sapiens
  CDR3 for alpha chain variable domain of TCR clone 363192 (TRAV4, TRAJ42)
CLVGVLNYGGSQGNLIF

SEQ ID NO: 726384 - protein, 12 aa, Homo sapiens
  CDR3 for beta chain variable domain of TCR clone 363192 (TRBV20-1, TRBJ2-1)
CSAQHTYNEHFF

SEQ ID NO: 726385 - protein, 13 aa, Homo sapiens
  CDR3 for alpha chain variable domain of TCR clone 363193 (TRAV2, TRAJ40)
CPVVTSGTYKYIF

SEQ ID NO: 726386 - protein, 16 aa, Homo sapiens
  CDR3 for beta chain variable domain of TCR clone 363193 (TRBV19, TRBJ2-2)
CASRSPGTGATGELFF

SEQ ID NO: 726387 - protein, 15 aa, Homo sapiens
  CDR3 for alpha chain variable domain of TCR clone 363194 (TRAV8-2, TRAJ15)
CVVTMGNQAGTALIF

SEQ ID NO: 726388 - protein, 12 aa, Homo sapiens
  CDR3 for beta chain variable domain of TCR clone 363194 (TRBV6-1, TRBJ2-7)
CASCDYSYEQYF

SEQ ID NO: 726389 - protein, 14 aa, Homo sapiens
  CDR3 for alpha chain variable domain of TCR clone 363195 (TRAV4, TRAJ17)
CLVGPQAAGNKLTF

SEQ ID NO: 726390 - protein, 11 aa, Homo sapiens
  CDR3 for beta chain variable domain of TCR clone 363195 (TRBV29-1, TRBJ2-5)
CSEDRTGTQYF

SEQ ID NO: 726391 - protein, 16 aa, Homo sapiens
  CDR3 for alpha chain variable domain of TCR clone 363196 (TRAV8-1, TRAJ39)
CAVNVPSYNAGNMLTF

SEQ ID NO: 726392 - protein, 15 aa, Homo sapiens
  CDR3 for beta chain variable domain of TCR clone 363196 (TRBV6-3, TRBJ2-7)
CASSSPGTVFYEQYF

SEQ ID NO: 726393 - protein, 22 aa, Homo sapiens
  CDR3 for alpha chain variable domain of TCR clone 363197 (TRAV2, TRAJ10)
ILQVREADAAVYYTGGGNKLTF

SEQ ID NO: 726394 - protein, 15 aa, Homo sapiens
  CDR3 for beta chain variable domain of TCR clone 363197 (TRBV19, TRBJ1-1)
CASTSGQIQNTEAFF

SEQ ID NO: 726395 - protein, 12 aa, Homo sapiens
  CDR3 for alpha chain variable domain of TCR clone 363198 (TRAV21, TRAJ39)
CAAANAGNMLTF

SEQ ID NO: 726396 - protein, 12 aa, Homo sapiens
  CDR3 for beta chain variable domain of TCR clone 363198 (TRBV5-4, TRBJ2-7)
CASSWAGQGENF

SEQ ID NO: 726397 - protein, 12 aa, Homo sapiens
  CDR3 for alpha chain variable domain of TCR clone 363199 (TRAV12-1, TRAJ40)
CVFYSGTYKYIF

SEQ ID NO: 726398 - protein, 11 aa, Homo sapiens
  CDR3 for beta chain variable domain of TCR clone 363199 (TRBV12-4, TRBJ2-2)
CASSSDGELFF

SEQ ID NO: 726399 - protein, 12 aa, Homo sapiens
  CDR3 for alpha chain variable domain of TCR clone 363200 (TRAV23/DV6, TRAJ16)
CAATGTGQKLLF

SEQ ID NO: 726400 - protein, 20 aa, Homo sapiens
  CDR3 for beta chain variable domain of TCR clone 363200 (TRBV6-7, TRBJ1-2)
CASSYLAGQGNPLRVYGYTF

SEQ ID NO: 726401 - protein, 15 aa, Homo sapiens
  CDR3 for alpha chain variable domain of TCR clone 363201 (TRAV8-4, TRAJ13)
CAVSDWGGGYQKVTF

SEQ ID NO: 726402 - protein, 13 aa, Homo sapiens
  CDR3 for beta chain variable domain of TCR clone 363201 (TRBV20-1, TRBJ1-1)
CSARGGGNTEAFF

SEQ ID NO: 726403 - protein, 16 aa, Homo sapiens
  CDR3 for alpha chain variable domain of TCR clone 363202 (TRAV3, TRAJ4)
CAVRAFFSGGYNKLIF

SEQ ID NO: 726404 - protein, 14 aa, Homo sapiens
  CDR3 for beta chain variable domain of TCR clone 363202 (TRBV2, TRBJ2-5)
CASTWGRAQETQYF

SEQ ID NO: 726405 - protein, 14 aa, Homo sapiens
  CDR3 for alpha chain variable domain of TCR clone 363203 (TRAV1-2, TRAJ16)
CAANRFSDGQKLLF

SEQ ID NO: 726406 - protein, 17 aa, Homo sapiens
  CDR3 for beta chain variable domain of TCR clone 363203 (TRBV5-1, TRBJ2-2)
CASSLAGLSGGTGELFF

SEQ ID NO: 726407 - protein, 12 aa, Homo sapiens
  CDR3 for alpha chain variable domain of TCR clone 363204 (TRAV29/DV5, TRAJ15)
CASNQAGTALIF

SEQ ID NO: 726408 - protein, 17 aa, Homo sapiens
  CDR3 for beta chain variable domain of TCR clone 363204 (TRBV20-1, TRBJ2-3)
CSARSAGLAGVTDTQYF

SEQ ID NO: 726409 - protein, 11 aa, Homo sapiens
  CDR3 for alpha chain variable domain of TCR clone 363205 (TRAV21, TRAJ20)
CAGRDDYKLSF

SEQ ID NO: 726410 - protein, 14 aa, Homo sapiens
  CDR3 for beta chain variable domain of TCR clone 363205 (TRBV7-2, TRBJ2-7)
CASSPKTSFYEQYF

SEQ ID NO: 726411 - protein, 13 aa, Homo sapiens
  CDR3 for alpha chain variable domain of TCR clone 363206 (TRAV13-1, TRAJ36)
CAASNSGANNLFF

SEQ ID NO: 726412 - protein, 20 aa, Homo sapiens
  CDR3 for beta chain variable domain of TCR clone 363206 (TRBV7-8, TRBJ2-2)
CASSHLFPGPTIHITGELFF

SEQ ID NO: 726413 - protein, 12 aa, Homo sapiens
  CDR3 for alpha chain variable domain of TCR clone 363207 (TRAV12-3, TRAJ40)
CAMSSGTYKYIF

SEQ ID NO: 726414 - protein, 14 aa, Homo sapiens
  CDR3 for beta chain variable domain of TCR clone 363207 (TRBV19, TRBJ2-2)
CASSGQGIAGELFF

SEQ ID NO: 726415 - protein, 15 aa, Homo sapiens
  CDR3 for alpha chain variable domain of TCR clone 363208 (TRAV3, TRAJ3)
CAVRDGHSSASKIIF

SEQ ID NO: 726416 - protein, 14 aa, Homo sapiens
  CDR3 for beta chain variable domain of TCR clone 363208 (TRBV28, TRBJ1-4)
CASSFGTFDEKLFV

SEQ ID NO: 726417 - protein, 14 aa, Homo sapiens
  CDR3 for alpha chain variable domain of TCR clone 363209 (TRAV27, TRAJ22)
CAGLPSGSARQLTF

SEQ ID NO: 726418 - protein, 16 aa, Homo sapiens
  CDR3 for beta chain variable domain of TCR clone 363209 (TRBV7-3, TRBJ2-2)
CASSLKRWTLSGELFF

SEQ ID NO: 726419 - protein, 13 aa, Homo sapiens
  CDR3 for alpha chain variable domain of TCR clone 363210 (TRAV8-3, TRAJ36)
CAVGATGSDNLFF

SEQ ID NO: 726420 - protein, 15 aa, Homo sapiens
  CDR3 for beta chain variable domain of TCR clone 363210 (TRBV7-2, TRBJ1-2)
CASSPRAGWNYGYTF

SEQ ID NO: 726421 - protein, 14 aa, Homo sapiens
  CDR3 for alpha chain variable domain of TCR clone 363211 (TRAV3, TRAJ17)
CAVRERSCRQQANF

SEQ ID NO: 726422 - protein, 17 aa, Homo sapiens
  CDR3 for beta chain variable domain of TCR clone 363211 (TRBV13, TRBJ2-3)
CTSSLPRVAGGRNTQYF

SEQ ID NO: 726423 - protein, 13 aa, Homo sapiens
  CDR3 for alpha chain variable domain of TCR clone 363212 (TRAV1-1, TRAJ9)
CAATNTGGFKTIF

SEQ ID NO: 726424 - protein, 14 aa, Homo sapiens
  CDR3 for beta chain variable domain of TCR clone 363212 (TRBV25-1, TRBJ1-1)
CASTHLGGNTEAFF

SEQ ID NO: 726425 - protein, 13 aa, Homo sapiens
  CDR3 for alpha chain variable domain of TCR clone 363213 (TRAV3, TRAJ21)
CAVREPDFNKFYF

SEQ ID NO: 726426 - protein, 14 aa, Homo sapiens
  CDR3 for beta chain variable domain of TCR clone 363213 (TRBV28, TRBJ2-7)
CASKPGPDLYEQYF

SEQ ID NO: 726427 - protein, 13 aa, Homo sapiens
  CDR3 for alpha chain variable domain of TCR clone 363214 (TRAV12-1, TRAJ9)
CVVLNTGGFKTIF

SEQ ID NO: 726428 - protein, 13 aa, Homo sapiens
  CDR3 for beta chain variable domain of TCR clone 363214 (TRBV20-1, TRBJ1-1)
CSARGGGNAEEFF

SEQ ID NO: 726429 - protein, 13 aa, Homo sapiens
  CDR3 for alpha chain variable domain of TCR clone 363215 (TRAV12-2, TRAJ12)
CAVNGDSSNKLIF

SEQ ID NO: 726430 - protein, 13 aa, Homo sapiens
  CDR3 for beta chain variable domain of TCR clone 363215 (TRBV20-1, TRBJ2-2)
CSALSGGAGELFF

SEQ ID NO: 726431 - protein, 13 aa, Homo sapiens
  CDR3 for alpha chain variable domain of TCR clone 363216 (TRAV21, TRAJ21)
CAVRTSTNFTLDL

SEQ ID NO: 726432 - protein, 17 aa, Homo sapiens
  CDR3 for beta chain variable domain of TCR clone 363216 (TRBV7-6, TRBJ2-5)
CASSSPQAGDPSETQYF

SEQ ID NO: 726433 - protein, 15 aa, Homo sapiens
  CDR3 for alpha chain variable domain of TCR clone 363217 (TRAV12-3, TRAJ6)
CAMSATTGGSYIPTF

SEQ ID NO: 726434 - protein, 16 aa, Homo sapiens
  CDR3 for beta chain variable domain of TCR clone 363217 (TRBV20-1, TRBJ1-2)
CSASMGQGVANYGDSF

SEQ ID NO: 726435 - protein, 13 aa, Homo sapiens
  CDR3 for alpha chain variable domain of TCR clone 363218 (TRAV16, TRAJ48)
CSPLTFGNEKLTF

SEQ ID NO: 726436 - protein, 11 aa, Homo sapiens
  CDR3 for beta chain variable domain of TCR clone 363218 (TRBV7-9, TRBJ2-3)
CASSPTDTQYF

SEQ ID NO: 726437 - protein, 14 aa, Homo sapiens
  CDR3 for alpha chain variable domain of TCR clone 363219 (TRAV23/DV6, TRAJ6)
CAASRSGGSYIPTF

SEQ ID NO: 726438 - protein, 17 aa, Homo sapiens
  CDR3 for beta chain variable domain of TCR clone 363219 (TRBV7-8, TRBJ2-6)
CARSAGTGGAGANVLTF

SEQ ID NO: 726439 - protein, 12 aa, Homo sapiens
  CDR3 for alpha chain variable domain of TCR clone 363220 (TRAV30, TRAJ43)
CGTEERGNDMRF

SEQ ID NO: 726440 - protein, 17 aa, Homo sapiens
  CDR3 for beta chain variable domain of TCR clone 363220 (TRBV11-2, TRBJ2-1)
CASSLYPPGVEYNEQSF

SEQ ID NO: 726441 - protein, 14 aa, Homo sapiens
  CDR3 for alpha chain variable domain of TCR clone 363221 (TRAV12-2, TRAJ45)
CAVYSGGGADGLTF

SEQ ID NO: 726442 - protein, 14 aa, Homo sapiens
  CDR3 for beta chain variable domain of TCR clone 363221 (TRBV6-5, TRBJ1-2)
CASTRWGGSDGYTF

SEQ ID NO: 726443 - protein, 15 aa, Homo sapiens
  CDR3 for alpha chain variable domain of TCR clone 363222 (TRAV8-1, TRAJ6)
CAVNAGAGGSYIPTF

SEQ ID NO: 726444 - protein, 14 aa, Homo sapiens
  CDR3 for beta chain variable domain of TCR clone 363222 (TRBV25-1, TRBJ1-6)
CASSISADISPLHF

SEQ ID NO: 726445 - protein, 12 aa, Homo sapiens
  CDR3 for alpha chain variable domain of TCR clone 363223 (TRAV13-1, TRAJ21)
CAAKEGFNKFYF

SEQ ID NO: 726446 - protein, 14 aa, Homo sapiens
  CDR3 for beta chain variable domain of TCR clone 363223 (TRBV5-4, TRBJ2-3)
CASSTTLGGDTQYF

SEQ ID NO: 726447 - protein, 12 aa, Homo sapiens
  CDR3 for alpha chain variable domain of TCR clone 363224 (TRAV12-3, TRAJ17)
CAMTLTGNKLTF

SEQ ID NO: 726448 - protein, 16 aa, Homo sapiens
  CDR3 for beta chain variable domain of TCR clone 363224 (TRBV12-4, TRBJ1-5)
CASSRPVGGSNQPQHF

SEQ ID NO: 726449 - protein, 14 aa, Homo sapiens
  CDR3 for alpha chain variable domain of TCR clone 363225 (TRAV9-2, TRAJ39)
CALYIYNAGNMRTF

SEQ ID NO: 726450 - protein, 15 aa, Homo sapiens
  CDR3 for beta chain variable domain of TCR clone 363225 (TRBV20-1, TRBJ1-5)
CSAREGGYSNQPQHF

SEQ ID NO: 726451 - protein, 13 aa, Homo sapiens
  CDR3 for alpha chain variable domain of TCR clone 363226 (TRAV21, TRAJ27)
CAARPGNAGKSTF

SEQ ID NO: 726452 - protein, 13 aa, Homo sapiens
  CDR3 for beta chain variable domain of TCR clone 363226 (TRBV20-1, TRBJ1-2)
CSARDRVYGGYTF

SEQ ID NO: 726453 - protein, 23 aa, Homo sapiens
  CDR3 for alpha chain variable domain of TCR clone 363227 (TRAV12-1, TRAJ23)
SSVIQPPTSVWWYGDNQGGKLIF

SEQ ID NO: 726454 - protein, 13 aa, Homo sapiens
  CDR3 for beta chain variable domain of TCR clone 363227 (TRBV2, TRBJ2-3)
CASGRGRTDTQYF

SEQ ID NO: 726455 - protein, 14 aa, Homo sapiens
  CDR3 for alpha chain variable domain of TCR clone 363228 (TRAV1-2, TRAJ8)
CAVREDTGFKKLVF

SEQ ID NO: 726456 - protein, 15 aa, Homo sapiens
  CDR3 for beta chain variable domain of TCR clone 363228 (TRBV7-2, TRBJ1-2)
CASSLVSGGDYGYTF

SEQ ID NO: 726457 - protein, 15 aa, Homo sapiens
  CDR3 for alpha chain variable domain of TCR clone 363229 (TRAV13-1, TRAJ45)
CAASGSGGGADGLTF

SEQ ID NO: 726458 - protein, 12 aa, Homo sapiens
  CDR3 for beta chain variable domain of TCR clone 363229 (TRBV11-2, TRBJ2-2)
CARSLGGGELFF

SEQ ID NO: 726459 - protein, 15 aa, Homo sapiens
  CDR3 for alpha chain variable domain of TCR clone 363230 (TRAV3, TRAJ5)
CAVRDMKTGRRAITF

SEQ ID NO: 726460 - protein, 15 aa, Homo sapiens
  CDR3 for beta chain variable domain of TCR clone 363230 (TRBV7-8, TRBJ2-1)
CASSLADSLYNEQFF

SEQ ID NO: 726461 - protein, 14 aa, Homo sapiens
  CDR3 for alpha chain variable domain of TCR clone 363231 (TRAV12-2, TRAJ13)
CAVKKTGGYRTVTF

SEQ ID NO: 726462 - protein, 15 aa, Homo sapiens
  CDR3 for beta chain variable domain of TCR clone 363231 (TRBV27, TRBJ2-1)
CASSNGGGSSNEQFF

SEQ ID NO: 726463 - protein, 14 aa, Homo sapiens
  CDR3 for alpha chain variable domain of TCR clone 363232 (TRAV1-2, TRAJ8)
CAVREATGFQKLVF

SEQ ID NO: 726464 - protein, 17 aa, Homo sapiens
  CDR3 for beta chain variable domain of TCR clone 363232 (TRBV11-2, TRBJ2-1)
CASSLYPPGVEYNEQFF

SEQ ID NO: 726465 - protein, 13 aa, Homo sapiens
  CDR3 for alpha chain variable domain of TCR clone 363233 (TRAV12-3, TRAJ54)
CAMTPQGAQKLVF

SEQ ID NO: 726466 - protein, 14 aa, Homo sapiens
  CDR3 for beta chain variable domain of TCR clone 363233 (TRBV4-1, TRBJ2-2)
CASSQAVNTGELFF

SEQ ID NO: 726467 - protein, 13 aa, Homo sapiens
  CDR3 for alpha chain variable domain of TCR clone 363234 (TRAV13-1, TRAJ12)
CSKYMGSSYKLIF

SEQ ID NO: 726468 - protein, 17 aa, Homo sapiens
  CDR3 for beta chain variable domain of TCR clone 363234 (TRBV13, TRBJ2-3)
CASSLSRVAGGRNTQYF

SEQ ID NO: 726469 - protein, 15 aa, Homo sapiens
  CDR3 for alpha chain variable domain of TCR clone 363235 (TRAV12-1, TRAJ45)
CVVLSGGGGADGLPF

SEQ ID NO: 726470 - protein, 15 aa, Homo sapiens
  CDR3 for beta chain variable domain of TCR clone 363235 (TRBV7-2, TRBJ2-1)
CASTHGTGIYNEQFF

SEQ ID NO: 726471 - protein, 15 aa, Homo sapiens
  CDR3 for alpha chain variable domain of TCR clone 363236 (TRAV26-1, TRAJ29)
CIVKVEGSGNTPLVF

SEQ ID NO: 726472 - protein, 13 aa, Homo sapiens
  CDR3 for beta chain variable domain of TCR clone 363236 (TRBV18, TRBJ2-5)
CQLTWVSQETQYF

SEQ ID NO: 726473 - protein, 12 aa, Homo sapiens
  CDR3 for alpha chain variable domain of TCR clone 363237 (TRAV16, TRAJ26)
CALRSYGQTFVF

SEQ ID NO: 726474 - protein, 14 aa, Homo sapiens
  CDR3 for beta chain variable domain of TCR clone 363237 (TRBV10-3, TRBJ2-1)
CAISSDLAYNEQFF

SEQ ID NO: 726475 - protein, 15 aa, Homo sapiens
  CDR3 for alpha chain variable domain of TCR clone 363238 (TRAV8-3, TRAJ23)
CAVGDRYNQVGKLIF

SEQ ID NO: 726476 - protein, 17 aa, Homo sapiens
  CDR3 for beta chain variable domain of TCR clone 363238 (TRBV4-1, TRBJ1-4)
CASSQEGPRGVEEKLFF

SEQ ID NO: 726477 - protein, 14 aa, Homo sapiens
  CDR3 for alpha chain variable domain of TCR clone 363239 (TRAV12-2, TRAJ24)
CAVTPADSWGKLQF

SEQ ID NO: 726478 - protein, 15 aa, Homo sapiens
  CDR3 for beta chain variable domain of TCR clone 363239 (TRBV29-1, TRBJ2-6)
CSVGDRGSGANVLTF

SEQ ID NO: 726479 - protein, 11 aa, Homo sapiens
  CDR3 for alpha chain variable domain of TCR clone 363240 (TRAV17, TRAJ9)
CATTGGFKTIF

SEQ ID NO: 726480 - protein, 14 aa, Homo sapiens
  CDR3 for beta chain variable domain of TCR clone 363240 (TRBV5-1, TRBJ1-6)
CASRPGTSNSHLHF

SEQ ID NO: 726481 - protein, 11 aa, Homo sapiens
  CDR3 for alpha chain variable domain of TCR clone 363241 (TRAV12-3, TRAJ26)
CAMSHGQNFVF

SEQ ID NO: 726482 - protein, 13 aa, Homo sapiens
  CDR3 for beta chain variable domain of TCR clone 363241 (TRBV28, TRBJ2-5)
CASSFAGGETQYF

SEQ ID NO: 726483 - protein, 14 aa, Homo sapiens
  CDR3 for alpha chain variable domain of TCR clone 363242 (TRAV35, TRAJ33)
CAGSFQDSNYQLIW

SEQ ID NO: 726484 - protein, 16 aa, Homo sapiens
  CDR3 for beta chain variable domain of TCR clone 363242 (TRBV29-1, TRBJ2-6)
CSVEDITYSGANVLTF

SEQ ID NO: 726485 - protein, 13 aa, Homo sapiens
  CDR3 for alpha chain variable domain of TCR clone 363243 (TRAV3, TRAJ21)
CAVREPDFNKFYF

SEQ ID NO: 726486 - protein, 17 aa, Homo sapiens
  CDR3 for beta chain variable domain of TCR clone 363243 (TRBV7-8, TRBJ2-6)
CASSAETGGAGANVLTF

SEQ ID NO: 726487 - protein, 15 aa, Homo sapiens
  CDR3 for alpha chain variable domain of TCR clone 363244 (TRAV41, TRAJ45)
CAASYSGGGADGLTF

SEQ ID NO: 726488 - protein, 16 aa, Homo sapiens
  CDR3 for beta chain variable domain of TCR clone 363244 (TRBV7-3, TRBJ2-3)
CASSLSGYRPEDTQYF

SEQ ID NO: 726489 - protein, 22 aa, Homo sapiens
  CDR3 for alpha chain variable domain of TCR clone 363245 (TRAV12-2, TRAJ32)
CSSETPSPVIQPPKSATNKLIF

SEQ ID NO: 726490 - protein, 17 aa, Homo sapiens
  CDR3 for beta chain variable domain of TCR clone 363245 (TRBV28, TRBJ2-5)
CASSRQGGLAGAETQYF

SEQ ID NO: 726491 - protein, 13 aa, Homo sapiens
  CDR3 for alpha chain variable domain of TCR clone 363246 (TRAV17, TRAJ34)
CATVPYNTDKLIF

SEQ ID NO: 726492 - protein, 14 aa, Homo sapiens
  CDR3 for beta chain variable domain of TCR clone 363246 (TRBV9, TRBJ2-3)
CASSAGGGPGTQYF

SEQ ID NO: 726493 - protein, 15 aa, Homo sapiens
  CDR3 for alpha chain variable domain of TCR clone 363247 (TRAV8-3, TRAJ11)
CAVGLLNSGYSTLTF

SEQ ID NO: 726494 - protein, 15 aa, Homo sapiens
  CDR3 for beta chain variable domain of TCR clone 363247 (TRBV19, TRBJ1-6)
CASSTQGAVGSPLHF

SEQ ID NO: 726495 - protein, 14 aa, Homo sapiens
  CDR3 for alpha chain variable domain of TCR clone 363248 (TRAV12-2, TRAJ13)
CAVKKTGGYQKVTF

SEQ ID NO: 726496 - protein, 14 aa, Homo sapiens
  CDR3 for beta chain variable domain of TCR clone 363248 (TRBV19, TRBJ2-1)
CASPTFGLSGEQFF

SEQ ID NO: 726497 - protein, 14 aa, Homo sapiens
  CDR3 for alpha chain variable domain of TCR clone 363249 (TRAV12-1, TRAJ9)
CVVNRRTGGFKTIF

SEQ ID NO: 726498 - protein, 15 aa, Homo sapiens
  CDR3 for beta chain variable domain of TCR clone 363249 (TRBV7-2, TRBJ2-7)
CASSLKGALTYEQYF

SEQ ID NO: 726499 - protein, 18 aa, Homo sapiens
  CDR3 for alpha chain variable domain of TCR clone 363250 (TRAV1-2, TRAJ10)
CAVRALTPVTVGGNKLTF

SEQ ID NO: 726500 - protein, 14 aa, Homo sapiens
  CDR3 for beta chain variable domain of TCR clone 363250 (TRBV4-1, TRBJ1-1)
CASSQQGNGNEAFF

SEQ ID NO: 726501 - protein, 14 aa, Homo sapiens
  CDR3 for alpha chain variable domain of TCR clone 363251 (TRAV12-3, TRAJ58)
GAMSTETSGSRLTF

SEQ ID NO: 726502 - protein, 13 aa, Homo sapiens
  CDR3 for beta chain variable domain of TCR clone 363251 (TRBV27, TRBJ2-3)
CASSWGRTDTQYF

SEQ ID NO: 726503 - protein, 11 aa, Homo sapiens
  CDR3 for alpha chain variable domain of TCR clone 363252 (TRAV17, TRAJ39)
CAMNPYNMLTF

SEQ ID NO: 726504 - protein, 13 aa, Homo sapiens
  CDR3 for beta chain variable domain of TCR clone 363252 (TRBV7-8, TRBJ2-1)
CASTRDAVDEQFF

SEQ ID NO: 726505 - protein, 13 aa, Homo sapiens
  CDR3 for alpha chain variable domain of TCR clone 363253 (TRAV2, TRAJ40)
CAVVTSGTYKYTF

SEQ ID NO: 726506 - protein, 15 aa, Homo sapiens
  CDR3 for beta chain variable domain of TCR clone 363253 (TRBV6-3, TRBJ2-2)
CASSFLATLTGELFF

SEQ ID NO: 726507 - protein, 14 aa, Homo sapiens
  CDR3 for alpha chain variable domain of TCR clone 363254 (TRAV8-2, TRAJ4)
CVVSPSGGYNKLIF

SEQ ID NO: 726508 - protein, 15 aa, Homo sapiens
  CDR3 for beta chain variable domain of TCR clone 363254 (TRBV4-1, TRBJ1-4)
CASSVTGGTNEKLFF

SEQ ID NO: 726509 - protein, 13 aa, Homo sapiens
  CDR3 for alpha chain variable domain of TCR clone 363255 (TRAV27, TRAJ3)
ASLRGSSASKIIF

SEQ ID NO: 726510 - protein, 14 aa, Homo sapiens
  CDR3 for beta chain variable domain of TCR clone 363255 (TRBV7-2, TRBJ2-7)
CASSPKTSFYEQYF

SEQ ID NO: 726511 - protein, 12 aa, Homo sapiens
  CDR3 for alpha chain variable domain of TCR clone 363256 (TRAV29/DV5, TRAJ34)
CVARHNTDKLIF

SEQ ID NO: 726512 - protein, 14 aa, Homo sapiens
  CDR3 for beta chain variable domain of TCR clone 363256 (TRBV7-9, TRBJ2-1)
CASSPRDSLYEQFF

SEQ ID NO: 726513 - protein, 17 aa, Homo sapiens
  CDR3 for alpha chain variable domain of TCR clone 363257 (TRAV26-2, TRAJ42)
CILRDVGYGGSQGNLIF

SEQ ID NO: 726514 - protein, 15 aa, Homo sapiens
  CDR3 for beta chain variable domain of TCR clone 363257 (TRBV12-5, TRBJ2-2)
CASGRLGGNTGELFF

SEQ ID NO: 726515 - protein, 11 aa, Homo sapiens
  CDR3 for alpha chain variable domain of TCR clone 363258 (TRAV2, TRAJ13)
CAPVGYQKVTF

SEQ ID NO: 726516 - protein, 15 aa, Homo sapiens
  CDR3 for beta chain variable domain of TCR clone 363258 (TRBV6-1, TRBJ2-2)
CASSRLRGDTGELFF

SEQ ID NO: 726517 - protein, 13 aa, Homo sapiens
  CDR3 for alpha chain variable domain of TCR clone 363259 (TRAV1-2, TRAJ9)
CAALNTGGFKTIF

SEQ ID NO: 726518 - protein, 15 aa, Homo sapiens
  CDR3 for beta chain variable domain of TCR clone 363259 (TRBV20-1, TRBJ1-1)
CSASRGVTGNTEAFF

SEQ ID NO: 726519 - protein, 14 aa, Homo sapiens
  CDR3 for alpha chain variable domain of TCR clone 363260 (TRAV27, TRAJ58)
CAGDGETSGSRLTF

SEQ ID NO: 726520 - protein, 11 aa, Homo sapiens
  CDR3 for beta chain variable domain of TCR clone 363260 (TRBV29-1, TRBJ2-5)
CSEDRTGTQYF

SEQ ID NO: 726521 - protein, 15 aa, Homo sapiens
  CDR3 for alpha chain variable domain of TCR clone 363261 (TRAV21, TRAJ40)
CAVRPQTSGTYKYIF

SEQ ID NO: 726522 - protein, 14 aa, Homo sapiens
  CDR3 for beta chain variable domain of TCR clone 363261 (TRBV9, TRBJ2-3)
CASSVGLSTDTQYF

SEQ ID NO: 726523 - protein, 17 aa, Homo sapiens
  CDR3 for alpha chain variable domain of TCR clone 363262 (TRAV3, TRAJ42)
CAVRDRDYGGSQGNLIF

SEQ ID NO: 726524 - protein, 14 aa, Homo sapiens
  CDR3 for beta chain variable domain of TCR clone 363262 (TRBV7-2, TRBJ2-5)
CASSPRGSSETKYF

SEQ ID NO: 726525 - protein, 11 aa, Homo sapiens
  CDR3 for alpha chain variable domain of TCR clone 363263 (TRAV12-2, TRAJ49)
CAPQGGNQFYF

SEQ ID NO: 726526 - protein, 14 aa, Homo sapiens
  CDR3 for beta chain variable domain of TCR clone 363263 (TRBV7-2, TRBJ2-7)
CASSPKTSFYEQYF

SEQ ID NO: 726527 - protein, 16 aa, Homo sapiens
  CDR3 for alpha chain variable domain of TCR clone 363264 (TRAV8-3, TRAJ13)
CAVGAYPSGGYQKVTF

SEQ ID NO: 726528 - protein, 14 aa, Homo sapiens
  CDR3 for beta chain variable domain of TCR clone 363264 (TRBV18, TRBJ2-5)
CASSPLASSETQYF

SEQ ID NO: 726529 - protein, 15 aa, Homo sapiens
  CDR3 for alpha chain variable domain of TCR clone 363265 (TRAV8-6, TRAJ9)
CAVSDRDTGGFKAIF

SEQ ID NO: 726530 - protein, 16 aa, Homo sapiens
  CDR3 for beta chain variable domain of TCR clone 363265 (TRBV19, TRBJ2-3)
CASSPEWDRGTNTQYF

SEQ ID NO: 726531 - protein, 15 aa, Homo sapiens
  CDR3 for alpha chain variable domain of TCR clone 363266 (TRAV21, TRAJ37)
CAVRPTLSNTGKLIF

SEQ ID NO: 726532 - protein, 16 aa, Homo sapiens
  CDR3 for beta chain variable domain of TCR clone 363266 (TRBV24-1, TRBJ2-3)
CATSDRRQDLADTQHF

SEQ ID NO: 726533 - protein, 15 aa, Homo sapiens
  CDR3 for alpha chain variable domain of TCR clone 363267 (TRAV13-1, TRAJ27)
CAASGGNTNAGNSTF

SEQ ID NO: 726534 - protein, 14 aa, Homo sapiens
  CDR3 for beta chain variable domain of TCR clone 363267 (TRBV19, TRBJ2-1)
CASPTFVLSGEQFF

SEQ ID NO: 726535 - protein, 15 aa, Homo sapiens
  CDR3 for alpha chain variable domain of TCR clone 363268 (TRAV17, TRAJ57)
CATGPSQGCSEKLVF

SEQ ID NO: 726536 - protein, 14 aa, Homo sapiens
  CDR3 for beta chain variable domain of TCR clone 363268 (TRBV12-5, TRBJ2-5)
CASGSRTHQETQYF

SEQ ID NO: 726537 - protein, 12 aa, Homo sapiens
  CDR3 for alpha chain variable domain of TCR clone 363269 (TRAV2, TRAJ31)
CAVEDNNATLMF

SEQ ID NO: 726538 - protein, 16 aa, Homo sapiens
  CDR3 for beta chain variable domain of TCR clone 363269 (TRBV10-3, TRBJ2-1)
CAISGVGDGGGGEQFF

SEQ ID NO: 726539 - protein, 13 aa, Homo sapiens
  CDR3 for alpha chain variable domain of TCR clone 363270 (TRAV21, TRAJ15)
CAVANQAGTALIF

SEQ ID NO: 726540 - protein, 17 aa, Homo sapiens
  CDR3 for beta chain variable domain of TCR clone 363270 (TRBV27, TRBJ2-2)
CTSVPAALGRPPGSCFF

SEQ ID NO: 726541 - protein, 11 aa, Homo sapiens
  CDR3 for alpha chain variable domain of TCR clone 363271 (TRAV12-2, TRAJ33)
CAVTSNYQLIW

SEQ ID NO: 726542 - protein, 14 aa, Homo sapiens
  CDR3 for beta chain variable domain of TCR clone 363271 (TRBV12-4, TRBJ2-2)
CASKQGANTGELFF

SEQ ID NO: 726543 - protein, 11 aa, Homo sapiens
  CDR3 for alpha chain variable domain of TCR clone 363272 (TRAV12-1, TRAJ34)
CMVNKGRELIF

SEQ ID NO: 726544 - protein, 12 aa, Homo sapiens
  CDR3 for beta chain variable domain of TCR clone 363272 (TRBV2, TRBJ2-1)
CAYGPPGNEQFF

SEQ ID NO: 726545 - protein, 15 aa, Homo sapiens
  CDR3 for alpha chain variable domain of TCR clone 363273 (TRAV3, TRAJ3)
CAARDGHSSASKILF

SEQ ID NO: 726546 - protein, 14 aa, Homo sapiens
  CDR3 for beta chain variable domain of TCR clone 363273 (TRBV28, TRBJ1-4)
CASSFGTFDEKLFF

SEQ ID NO: 726547 - protein, 11 aa, Homo sapiens
  CDR3 for alpha chain variable domain of TCR clone 363274 (TRAV12-3, TRAJ43)
CAMSVSNDMRF

SEQ ID NO: 726548 - protein, 16 aa, Homo sapiens
  CDR3 for beta chain variable domain of TCR clone 363274 (TRBV2, TRBJ2-1)
CASRPRSGGPYGEQFF

SEQ ID NO: 726549 - protein, 14 aa, Homo sapiens
  CDR3 for alpha chain variable domain of TCR clone 363275 (TRAV38-1, TRAJ45)
CAYYSGGGADGLTF

SEQ ID NO: 726550 - protein, 20 aa, Homo sapiens
  CDR3 for beta chain variable domain of TCR clone 363275 (TRBV28, TRBJ2-1)
CASAPIGRSPGLAGGNGQFF

SEQ ID NO: 726551 - protein, 13 aa, Homo sapiens
  CDR3 for alpha chain variable domain of TCR clone 363276 (TRAV12-1, TRAJ9)
CVVLNTGGFKTIF

SEQ ID NO: 726552 - protein, 17 aa, Homo sapiens
  CDR3 for beta chain variable domain of TCR clone 363276 (TRBV20-1, TRBJ2-1)
CSASSSGLAGSYNELFF

SEQ ID NO: 726553 - protein, 11 aa, Homo sapiens
  CDR3 for alpha chain variable domain of TCR clone 363277 (TRAV12-1, TRAJ43)
CVEYDNNDMRF

SEQ ID NO: 726554 - protein, 17 aa, Homo sapiens
  CDR3 for beta chain variable domain of TCR clone 363277 (TRBV20-1, TRBJ2-1)
CSARDPLAGVWDNEQFV

SEQ ID NO: 726555 - protein, 13 aa, Homo sapiens
  CDR3 for alpha chain variable domain of TCR clone 363278 (TRAV16, TRAJ26)
CITVLCLGQNLVF

SEQ ID NO: 726556 - protein, 12 aa, Homo sapiens
  CDR3 for beta chain variable domain of TCR clone 363278 (TRBV11-2, TRBJ2-1)
CASSPGNNEQFF

SEQ ID NO: 726557 - protein, 11 aa, Homo sapiens
  CDR3 for alpha chain variable domain of TCR clone 363279 (TRAV2, TRAJ33)
CAVESNYQLTW

SEQ ID NO: 726558 - protein, 15 aa, Homo sapiens
  CDR3 for beta chain variable domain of TCR clone 363279 (TRBV20-1, TRBJ2-7)
CSARDRVSGMDEQYF

SEQ ID NO: 726559 - protein, 13 aa, Homo sapiens
  CDR3 for alpha chain variable domain of TCR clone 363280 (TRAV17, TRAJ15)
CATDARAGTALIF

SEQ ID NO: 726560 - protein, 14 aa, Homo sapiens
  CDR3 for beta chain variable domain of TCR clone 363280 (TRBV19, TRBJ2-1)
CASPTFVLSGEQFF

SEQ ID NO: 726561 - protein, 15 aa, Homo sapiens
  CDR3 for alpha chain variable domain of TCR clone 363281 (TRAV4, TRAJ39)
CLVGPNNNAGNMLTF

SEQ ID NO: 726562 - protein, 14 aa, Homo sapiens
  CDR3 for beta chain variable domain of TCR clone 363281 (TRBV19, TRBJ2-7)
CDSNFRDTFTGMYF

SEQ ID NO: 726563 - protein, 13 aa, Homo sapiens
  CDR3 for alpha chain variable domain of TCR clone 363282 (TRAV13-1, TRAJ5)
CAARVTGRRALTF

SEQ ID NO: 726564 - protein, 15 aa, Homo sapiens
  CDR3 for beta chain variable domain of TCR clone 363282 (TRBV7-9, TRBJ2-7)
CASSPGGGLTYEQDF

SEQ ID NO: 726565 - protein, 12 aa, Homo sapiens
  CDR3 for alpha chain variable domain of TCR clone 363283 (TRAV12-3, TRAJ17)
CAMTLTGNKLTF

SEQ ID NO: 726566 - protein, 15 aa, Homo sapiens
  CDR3 for beta chain variable domain of TCR clone 363283 (TRBV20-1, TRBJ2-7)
FSARDWVSGMDEQYF

SEQ ID NO: 726567 - protein, 14 aa, Homo sapiens
  CDR3 for alpha chain variable domain of TCR clone 363284 (TRAV1-2, TRAJ8)
CAVREDTGFQKLVF

SEQ ID NO: 726568 - protein, 13 aa, Homo sapiens
  CDR3 for beta chain variable domain of TCR clone 363284 (TRBV12-4, TRBJ2-3)
CASSSPLGGTQYF

SEQ ID NO: 726569 - protein, 16 aa, Homo sapiens
  CDR3 for alpha chain variable domain of TCR clone 363285 (TRAV3, TRAJ10)
CAVRDMRAGGGNKLTF

SEQ ID NO: 726570 - protein, 16 aa, Homo sapiens
  CDR3 for beta chain variable domain of TCR clone 363285 (TRBV19, TRBJ2-1)
CASSEAGPSSYNEQFF

SEQ ID NO: 726571 - protein, 14 aa, Homo sapiens
  CDR3 for alpha chain variable domain of TCR clone 363286 (TRAV1-2, TRAJ16)
CAVNRFSDVQKLLF

SEQ ID NO: 726572 - protein, 12 aa, Homo sapiens
  CDR3 for beta chain variable domain of TCR clone 363286 (TRBV11-2, TRBJ1-1)
CQQLSLQPAAFF

SEQ ID NO: 726573 - protein, 14 aa, Homo sapiens
  CDR3 for alpha chain variable domain of TCR clone 363287 (TRAV35, TRAJ50)
CAGNRKTSYDKVIF

SEQ ID NO: 726574 - protein, 13 aa, Homo sapiens
  CDR3 for beta chain variable domain of TCR clone 363287 (TRBV7-7, TRBJ2-3)
CASSLSRADTQDF

SEQ ID NO: 726575 - protein, 15 aa, Homo sapiens
  CDR3 for alpha chain variable domain of TCR clone 363288 (TRAV34, TRAJ38)
CGADFTPGNNRKLIW

SEQ ID NO: 726576 - protein, 16 aa, Homo sapiens
  CDR3 for beta chain variable domain of TCR clone 363288 (TRBV12-5, TRBJ2-5)
CTSGPRTSGNQETQYF

SEQ ID NO: 726577 - protein, 13 aa, Homo sapiens
  CDR3 for alpha chain variable domain of TCR clone 363289 (TRAV3, TRAJ21)
CAVREPDFNKFYF

SEQ ID NO: 726578 - protein, 10 aa, Homo sapiens
  CDR3 for beta chain variable domain of TCR clone 363289 (TRBV12-4, TRBJ2-5)
CASSRETQYF

SEQ ID NO: 726579 - protein, 14 aa, Homo sapiens
  CDR3 for alpha chain variable domain of TCR clone 363290 (TRAV3, TRAJ34)
CAVRDINNTDKLIF

SEQ ID NO: 726580 - protein, 15 aa, Homo sapiens
  CDR3 for beta chain variable domain of TCR clone 363290 (TRBV20-1, TRBJ2-7)
CSARDRVSRMDEQYF

SEQ ID NO: 726581 - protein, 17 aa, Homo sapiens
  CDR3 for alpha chain variable domain of TCR clone 363291 (TRAV16, TRAJ58)
CITVLSNGETSGSRLTF

SEQ ID NO: 726582 - protein, 13 aa, Homo sapiens
  CDR3 for beta chain variable domain of TCR clone 363291 (TRBV19, TRBJ1-2)
CAWSVPGQDGYTF

SEQ ID NO: 726583 - protein, 10 aa, Homo sapiens
  CDR3 for alpha chain variable domain of TCR clone 363292 (TRAV23/DV6, TRAJ57)
CAASSTLSQG

SEQ ID NO: 726584 - protein, 15 aa, Homo sapiens
  CDR3 for beta chain variable domain of TCR clone 363292 (TRBV2, TRBJ2-5)
CASSSSVAGGETQYF

SEQ ID NO: 726585 - protein, 15 aa, Homo sapiens
  CDR3 for alpha chain variable domain of TCR clone 363293 (TRAV17, TRAJ57)
CATGPSQGGSEKLVF

SEQ ID NO: 726586 - protein, 15 aa, Homo sapiens
  CDR3 for beta chain variable domain of TCR clone 363293 (TRBV6-5, TRBJ2-1)
CASSYDAGAGNEQFF

SEQ ID NO: 726587 - protein, 13 aa, Homo sapiens
  CDR3 for alpha chain variable domain of TCR clone 363294 (TRAV2, TRAJ40)
CAVVTSGTYKYIF

SEQ ID NO: 726588 - protein, 14 aa, Homo sapiens
  CDR3 for beta chain variable domain of TCR clone 363294 (TRBV12-4, TRBJ2-5)
CASSYSGYFETQYL

SEQ ID NO: 726589 - protein, 15 aa, Homo sapiens
  CDR3 for alpha chain variable domain of TCR clone 363295 (TRAV23/DV6, TRAJ10)
CAAGGLTGGGNKLPF

SEQ ID NO: 726590 - protein, 13 aa, Homo sapiens
  CDR3 for beta chain variable domain of TCR clone 363295 (TRBV4-2, TRBJ1-1)
CASSQAGNTEAFF

SEQ ID NO: 726591 - protein, 11 aa, Homo sapiens
  CDR3 for alpha chain variable domain of TCR clone 363296 (TRAV12-2, TRAJ33)
CAVGSNYQLIW

SEQ ID NO: 726592 - protein, 19 aa, Homo sapiens
  CDR3 for beta chain variable domain of TCR clone 363296 (TRBV12-4, TRBJ2-1)
CASTLAFDPRDKEANEQFF

SEQ ID NO: 726593 - protein, 21 aa, Homo sapiens
  CDR3 for alpha chain variable domain of TCR clone 363297 (TRAV1-1, TRAJ6)
CLLLLRCERLERTGGSYIPTF

SEQ ID NO: 726594 - protein, 15 aa, Homo sapiens
  CDR3 for beta chain variable domain of TCR clone 363297 (TRBV4-1, TRBJ2-5)
CASSQWDLYQETQYF

SEQ ID NO: 726595 - protein, 16 aa, Homo sapiens
  CDR3 for alpha chain variable domain of TCR clone 363298 (TRAV3, TRAJ10)
CAVRDMRAGGGNKLTF

SEQ ID NO: 726596 - protein, 16 aa, Homo sapiens
  CDR3 for beta chain variable domain of TCR clone 363298 (TRBV5-1, TRBJ2-7)
CASSLEGLAGLYEQYF

SEQ ID NO: 726597 - protein, 11 aa, Homo sapiens
  CDR3 for alpha chain variable domain of TCR clone 363299 (TRAV2, TRAJ13)
CVSGGYQKVTF

SEQ ID NO: 726598 - protein, 12 aa, Homo sapiens
  CDR3 for beta chain variable domain of TCR clone 363299 (TRBV19, TRBJ1-4)
CASKDWPGGLFF

SEQ ID NO: 726599 - protein, 14 aa, Homo sapiens
  CDR3 for alpha chain variable domain of TCR clone 363300 (TRAV12-2, TRAJ17)
CAALFKAAGNKLTF

SEQ ID NO: 726600 - protein, 16 aa, Homo sapiens
  CDR3 for beta chain variable domain of TCR clone 363300 (TRBV12-4, TRBJ1-5)
CASSRPVGGSNQPQHF

SEQ ID NO: 726601 - protein, 17 aa, Homo sapiens
  CDR3 for alpha chain variable domain of TCR clone 363301 (TRAV4, TRAJ42)
CLVGVLNYGGSQGNLIF

SEQ ID NO: 726602 - protein, 15 aa, Homo sapiens
  CDR3 for beta chain variable domain of TCR clone 363301 (TRBV20-1, TRBJ1-1)
CSARSAATSNTEAFF

SEQ ID NO: 726603 - protein, 14 aa, Homo sapiens
  CDR3 for alpha chain variable domain of TCR clone 363302 (TRAV17, TRAJ33)
CATDARRSNYQLIW

SEQ ID NO: 726604 - protein, 14 aa, Homo sapiens
  CDR3 for beta chain variable domain of TCR clone 363302 (TRBV25-1, TRBJ1-4)
CASSWGGQPEKLFF

SEQ ID NO: 726605 - protein, 14 aa, Homo sapiens
  CDR3 for alpha chain variable domain of TCR clone 363303 (TRAV1-2, TRAJ16)
CAVNRVSDGQKLLF

SEQ ID NO: 726606 - protein, 15 aa, Homo sapiens
  CDR3 for beta chain variable domain of TCR clone 363303 (TRBV7-9, TRBJ2-2)
CASGPLDTFPGELFF

SEQ ID NO: 726607 - protein, 15 aa, Homo sapiens
  CDR3 for alpha chain variable domain of TCR clone 363304 (TRAV21, TRAJ13)
CAVSPTSGGYQKVTF

SEQ ID NO: 726608 - protein, 18 aa, Homo sapiens
  CDR3 for beta chain variable domain of TCR clone 363304 (TRBV11-3, TRBJ2-1)
CASSSCPGGRDSYNEQFF

SEQ ID NO: 726609 - protein, 13 aa, Homo sapiens
  CDR3 for alpha chain variable domain of TCR clone 363305 (TRAV17, TRAJ22)
CAHHSGSARQLTF

SEQ ID NO: 726610 - protein, 14 aa, Homo sapiens
  CDR3 for beta chain variable domain of TCR clone 363305 (TRBV16, TRBJ1-1)
CASSQAGTNTEAFF

SEQ ID NO: 726611 - protein, 10 aa, Homo sapiens
  CDR3 for alpha chain variable domain of TCR clone 363306 (TRAV1-2, TRAJ31)
CAFFDARLMF

SEQ ID NO: 726612 - protein, 15 aa, Homo sapiens
  CDR3 for beta chain variable domain of TCR clone 363306 (TRBV4-1, TRBJ1-4)
CASSDTGGTKEKLFF

SEQ ID NO: 726613 - protein, 16 aa, Homo sapiens
  CDR3 for alpha chain variable domain of TCR clone 363307 (TRAV20, TRAJ52)
CAVLPDGGTSYGKLTL

SEQ ID NO: 726614 - protein, 12 aa, Homo sapiens
  CDR3 for beta chain variable domain of TCR clone 363307 (TRBV19, TRBJ2-1)
CASSQISNEQFF

SEQ ID NO: 726615 - protein, 16 aa, Homo sapiens
  CDR3 for alpha chain variable domain of TCR clone 363308 (TRAV16, TRAJ4)
CALCRMSSGGYNKLIF

SEQ ID NO: 726616 - protein, 16 aa, Homo sapiens
  CDR3 for beta chain variable domain of TCR clone 363308 (TRBV24-1, TRBJ2-3)
CATSDPGTGATDTQYF

SEQ ID NO: 726617 - protein, 13 aa, Homo sapiens
  CDR3 for alpha chain variable domain of TCR clone 363309 (TRAV13-1, TRAJ9)
CAASGTGGFKTIF

SEQ ID NO: 726618 - protein, 13 aa, Homo sapiens
  CDR3 for beta chain variable domain of TCR clone 363309 (TRBV12-4, TRBJ2-7)
CTSSLERVREQYF

SEQ ID NO: 726619 - protein, 15 aa, Homo sapiens
  CDR3 for alpha chain variable domain of TCR clone 363310 (TRAV26-1, TRAJ44)
CIVRIGTGTASKLTF

SEQ ID NO: 726620 - protein, 17 aa, Homo sapiens
  CDR3 for beta chain variable domain of TCR clone 363310 (TRBV13, TRBJ2-3)
CASSRSRVAGGRNTQYF

SEQ ID NO: 726621 - protein, 12 aa, Homo sapiens
  CDR3 for alpha chain variable domain of TCR clone 363311 (TRAV12-2, TRAJ16)
CAVNLDGQKQLF

SEQ ID NO: 726622 - protein, 12 aa, Homo sapiens
  CDR3 for beta chain variable domain of TCR clone 363311 (TRBV5-7, TRBJ2-7)
CASSIQGGEQYF

SEQ ID NO: 726623 - protein, 12 aa, Homo sapiens
  CDR3 for alpha chain variable domain of TCR clone 363312 (TRAV2, TRAJ31)
CAVEDNNARLMF

SEQ ID NO: 726624 - protein, 14 aa, Homo sapiens
  CDR3 for beta chain variable domain of TCR clone 363312 (TRBV10-3, TRBJ2-1)
CAISSDLAYNEQFS

SEQ ID NO: 726625 - protein, 13 aa, Homo sapiens
  CDR3 for alpha chain variable domain of TCR clone 363313 (TRAV8-6, TRAJ34)
CAVSYQGTDKLIF

SEQ ID NO: 726626 - protein, 14 aa, Homo sapiens
  CDR3 for beta chain variable domain of TCR clone 363313 (TRBV12-4, TRBJ1-1)
CASTWTGHDTEAFF

SEQ ID NO: 726627 - protein, 16 aa, Homo sapiens
  CDR3 for alpha chain variable domain of TCR clone 363314 (TRAV12-1, TRAJ42)
CVVTPYYGGSQGNLIF

SEQ ID NO: 726628 - protein, 16 aa, Homo sapiens
  CDR3 for beta chain variable domain of TCR clone 363314 (TRBV4-2, TRBJ1-1)
CASSQAGFGMNTEAFF

SEQ ID NO: 726629 - protein, 12 aa, Homo sapiens
  CDR3 for alpha chain variable domain of TCR clone 363315 (TRAV8-3, TRAJ20)
CAMGANDYELSF

SEQ ID NO: 726630 - protein, 16 aa, Homo sapiens
  CDR3 for beta chain variable domain of TCR clone 363315 (TRBV19, TRBJ2-2)
CASRSPGTGATGELFF

SEQ ID NO: 726631 - protein, 16 aa, Homo sapiens
  CDR3 for alpha chain variable domain of TCR clone 363316 (TRAV4, TRAJ22)
CLVGDLYSGSARQLTF

SEQ ID NO: 726632 - protein, 16 aa, Homo sapiens
  CDR3 for beta chain variable domain of TCR clone 363316 (TRBV7-9, TRBJ2-1)
CASSDVAGGYYNEQVF

SEQ ID NO: 726633 - protein, 12 aa, Homo sapiens
  CDR3 for alpha chain variable domain of TCR clone 363317 (TRAV1-2, TRAJ29)
CALPSGNTPLVF

SEQ ID NO: 726634 - protein, 12 aa, Homo sapiens
  CDR3 for beta chain variable domain of TCR clone 363317 (TRBV12-4, TRBJ2-7)
CASSLGGYEQYF

SEQ ID NO: 726635 - protein, 11 aa, Homo sapiens
  CDR3 for alpha chain variable domain of TCR clone 363318 (TRAV3, TRAJ13)
CAVTSYQKVTF

SEQ ID NO: 726636 - protein, 15 aa, Homo sapiens
  CDR3 for beta chain variable domain of TCR clone 363318 (TRBV7-9, TRBJ2-7)
CASSSSGLAVYEQHF

SEQ ID NO: 726637 - protein, 14 aa, Homo sapiens
  CDR3 for alpha chain variable domain of TCR clone 363319 (TRAV36/DV7, TRAJ16)
CAVEADSDGQKLLF

SEQ ID NO: 726638 - protein, 15 aa, Homo sapiens
  CDR3 for beta chain variable domain of TCR clone 363319 (TRBV5-4, TRBJ2-3)
CATKSSGGALDKQYF

SEQ ID NO: 726639 - protein, 13 aa, Homo sapiens
  CDR3 for alpha chain variable domain of TCR clone 363320 (TRAV8-6, TRAJ8)
CAVSNTGFQKLVF

SEQ ID NO: 726640 - protein, 15 aa, Homo sapiens
  CDR3 for beta chain variable domain of TCR clone 363320 (TRBV28, TRBJ2-5)
CASSSGRMIQETQYF

SEQ ID NO: 726641 - protein, 13 aa, Homo sapiens
  CDR3 for alpha chain variable domain of TCR clone 363321 (TRAV13-1, TRAJ5)
CAALGTGRRALTF

SEQ ID NO: 726642 - protein, 14 aa, Homo sapiens
  CDR3 for beta chain variable domain of TCR clone 363321 (TRBV7-2, TRBJ2-7)
CASSPKTSFYEQYF

SEQ ID NO: 726643 - protein, 12 aa, Homo sapiens
  CDR3 for alpha chain variable domain of TCR clone 363322 (TRAV21, TRAJ24)
CAVADSWGKFQF

SEQ ID NO: 726644 - protein, 13 aa, Homo sapiens
  CDR3 for beta chain variable domain of TCR clone 363322 (TRBV29-1, TRBJ2-2)
CSVKAEGHGELFF

SEQ ID NO: 726645 - protein, 15 aa, Homo sapiens
  CDR3 for alpha chain variable domain of TCR clone 363323 (TRAV8-3, TRAJ11)
CAVGLLNSGYSTSPL

SEQ ID NO: 726646 - protein, 16 aa, Homo sapiens
  CDR3 for beta chain variable domain of TCR clone 363323 (TRBV7-9, TRBJ1-2)
CASSLGFSSGEDGYTF

SEQ ID NO: 726647 - protein, 14 aa, Homo sapiens
  CDR3 for alpha chain variable domain of TCR clone 363324 (TRAV23/DV6, TRAJ6)
CAASRSGGSYIPTF

SEQ ID NO: 726648 - protein, 17 aa, Homo sapiens
  CDR3 for beta chain variable domain of TCR clone 363324 (TRBV20-1, TRBJ2-1)
CSASASGLAGSYNEQFC

SEQ ID NO: 726649 - protein, 14 aa, Homo sapiens
  CDR3 for alpha chain variable domain of TCR clone 363325 (TRAV9-2, TRAJ20)
CALRDPLNDYKLSF

SEQ ID NO: 726650 - protein, 16 aa, Homo sapiens
  CDR3 for beta chain variable domain of TCR clone 363325 (TRBV7-2, TRBJ2-3)
CVSSLVALYSTDTQYF

SEQ ID NO: 726651 - protein, 14 aa, Homo sapiens
  CDR3 for alpha chain variable domain of TCR clone 363326 (TRAV17, TRAJ6)
CATDASGGSYIPTF

SEQ ID NO: 726652 - protein, 12 aa, Homo sapiens
  CDR3 for beta chain variable domain of TCR clone 363326 (TRBV7-8, TRBJ2-5)
CASSPRVETQYF

SEQ ID NO: 726653 - protein, 11 aa, Homo sapiens
  CDR3 for alpha chain variable domain of TCR clone 363327 (TRAV13-1, TRAJ39)
CASHAGNMLTF

SEQ ID NO: 726654 - protein, 14 aa, Homo sapiens
  CDR3 for beta chain variable domain of TCR clone 363327 (TRBV15, TRBJ2-5)
CATSGGTRTETQYF

SEQ ID NO: 726655 - protein, 16 aa, Homo sapiens
  CDR3 for alpha chain variable domain of TCR clone 363328 (TRAV3, TRAJ37)
CAVRPHGSGNTGKLIF

SEQ ID NO: 726656 - protein, 16 aa, Homo sapiens
  CDR3 for beta chain variable domain of TCR clone 363328 (TRBV9, TRBJ1-2)
CANSVEEKVSPYGYTF

SEQ ID NO: 726657 - protein, 13 aa, Homo sapiens
  CDR3 for alpha chain variable domain of TCR clone 363329 (TRAV1-2, TRAJ9)
CAALNTGGFKTIF

SEQ ID NO: 726658 - protein, 15 aa, Homo sapiens
  CDR3 for beta chain variable domain of TCR clone 363329 (TRBV6-5, TRBJ1-2)
CASSYSQAFNYGYTF

SEQ ID NO: 726659 - protein, 14 aa, Homo sapiens
  CDR3 for alpha chain variable domain of TCR clone 363330 (TRAV35, TRAJ13)
CAGRSPGGYQKVTF

SEQ ID NO: 726660 - protein, 14 aa, Homo sapiens
  CDR3 for beta chain variable domain of TCR clone 363330 (TRBV19, TRBJ2-2)
CASSMVGLSGELLF

SEQ ID NO: 726661 - protein, 17 aa, Homo sapiens
  CDR3 for alpha chain variable domain of TCR clone 363331 (TRAV8-6, TRAJ58)
CSVSSWVGETSGSRLTF

SEQ ID NO: 726662 - protein, 14 aa, Homo sapiens
  CDR3 for beta chain variable domain of TCR clone 363331 (TRBV12-4, TRBJ1-1)
CASSLGTGGTEAFF

SEQ ID NO: 726663 - protein, 14 aa, Homo sapiens
  CDR3 for alpha chain variable domain of TCR clone 363332 (TRAV26-1, TRAJ21)
CIVRVVYNFNKFYF

SEQ ID NO: 726664 - protein, 11 aa, Homo sapiens
  CDR3 for beta chain variable domain of TCR clone 363332 (TRBV5-6, TRBJ2-5)
CASSRERTQYF

SEQ ID NO: 726665 - protein, 12 aa, Homo sapiens
  CDR3 for alpha chain variable domain of TCR clone 363333 (TRAV12-2, TRAJ10)
WVVTGGGNKLTF

SEQ ID NO: 726666 - protein, 13 aa, Homo sapiens
  CDR3 for beta chain variable domain of TCR clone 363333 (TRBV5-7, TRBJ1-1)
CASSLFQNTEAFF

SEQ ID NO: 726667 - protein, 15 aa, Homo sapiens
  CDR3 for alpha chain variable domain of TCR clone 363334 (TRAV8-3, TRAJ11)
CAVGLLNSVYSTLTF

SEQ ID NO: 726668 - protein, 12 aa, Homo sapiens
  CDR3 for beta chain variable domain of TCR clone 363334 (TRBV5-5, TRBJ2-5)
CASSYFGETQYF

SEQ ID NO: 726669 - protein, 13 aa, Homo sapiens
  CDR3 for alpha chain variable domain of TCR clone 363335 (TRAV2, TRAJ15)
CAVASQAGTALIF

SEQ ID NO: 726670 - protein, 14 aa, Homo sapiens
  CDR3 for beta chain variable domain of TCR clone 363335 (TRBV27, TRBJ2-2)
CASSLSVVDGRMFF

SEQ ID NO: 726671 - protein, 12 aa, Homo sapiens
  CDR3 for alpha chain variable domain of TCR clone 363336 (TRAV17, TRAJ45)
CAAGGGADGLTC

SEQ ID NO: 726672 - protein, 13 aa, Homo sapiens
  CDR3 for beta chain variable domain of TCR clone 363336 (TRBV20-1, TRBJ2-7)
CSARGTVSYEQYF

SEQ ID NO: 726673 - protein, 14 aa, Homo sapiens
  CDR3 for alpha chain variable domain of TCR clone 363337 (TRAV1-2, TRAJ8)
CAVREDTGFQKLVF

SEQ ID NO: 726674 - protein, 17 aa, Homo sapiens
  CDR3 for beta chain variable domain of TCR clone 363337 (TRBV6-3, TRBJ2-7)
CASSSPGTVFYESTSGR

SEQ ID NO: 726675 - protein, 13 aa, Homo sapiens
  CDR3 for alpha chain variable domain of TCR clone 363338 (TRAV9-2, TRAJ53)
CALSGGSNYKLTF

SEQ ID NO: 726676 - protein, 16 aa, Homo sapiens
  CDR3 for beta chain variable domain of TCR clone 363338 (TRBV7-2, TRBJ2-3)
CASSLARASGISTQYF

SEQ ID NO: 726677 - protein, 16 aa, Homo sapiens
  CDR3 for alpha chain variable domain of TCR clone 363339 (TRAV12-3, TRAJ53)
CAMSPGSGGSNYKLTF

SEQ ID NO: 726678 - protein, 12 aa, Homo sapiens
  CDR3 for beta chain variable domain of TCR clone 363339 (TRBV28, TRBJ1-6)
CASSLLRGGIAF

SEQ ID NO: 726679 - protein, 13 aa, Homo sapiens
  CDR3 for alpha chain variable domain of TCR clone 363340 (TRAV20, TRAJ3)
CARRYSSASKIIF

SEQ ID NO: 726680 - protein, 12 aa, Homo sapiens
  CDR3 for beta chain variable domain of TCR clone 363340 (TRBV28, TRBJ2-1)
CASSFRGNEQVF

SEQ ID NO: 726681 - protein, 14 aa, Homo sapiens
  CDR3 for alpha chain variable domain of TCR clone 363341 (TRAV12-2, TRAJ41)
CAVNRANCGYALNF

SEQ ID NO: 726682 - protein, 14 aa, Homo sapiens
  CDR3 for beta chain variable domain of TCR clone 363341 (TRBV7-9, TRBJ2-2)
CASSLVQDTGELFF

SEQ ID NO: 726683 - protein, 11 aa, Homo sapiens
  CDR3 for alpha chain variable domain of TCR clone 363342 (TRAV26-1, TRAJ37)
CIVRVGRKLIL

SEQ ID NO: 726684 - protein, 14 aa, Homo sapiens
  CDR3 for beta chain variable domain of TCR clone 363342 (TRBV7-3, TRBJ1-1)
CASSLKGGNTEAFF

SEQ ID NO: 726685 - protein, 12 aa, Homo sapiens
  CDR3 for alpha chain variable domain of TCR clone 363343 (TRAV13-1, TRAJ49)
CAAPNTGNQFYF

SEQ ID NO: 726686 - protein, 17 aa, Homo sapiens
  CDR3 for beta chain variable domain of TCR clone 363343 (TRBV25-1, TRBJ2-7)
CASSDARVVFSSYEQCF

SEQ ID NO: 726687 - protein, 12 aa, Homo sapiens
  CDR3 for alpha chain variable domain of TCR clone 363344 (TRAV8-3, TRAJ20)
CAVGANDYKLSF

SEQ ID NO: 726688 - protein, 11 aa, Homo sapiens
  CDR3 for beta chain variable domain of TCR clone 363344 (TRBV19, TRBJ2-2)
CASRSPDRGHR

SEQ ID NO: 726689 - protein, 16 aa, Homo sapiens
  CDR3 for alpha chain variable domain of TCR clone 363345 (TRAV26-1, TRAJ45)
GIVEKYSGGGADGLTF

SEQ ID NO: 726690 - protein, 16 aa, Homo sapiens
  CDR3 for beta chain variable domain of TCR clone 363345 (TRBV10-3, TRBJ1-6)
CAISERRGQGNSPLHF

SEQ ID NO: 726691 - protein, 14 aa, Homo sapiens
  CDR3 for alpha chain variable domain of TCR clone 363346 (TRAV12-2, TRAJ11)
CAVNRESGYSTLTS

SEQ ID NO: 726692 - protein, 14 aa, Homo sapiens
  CDR3 for beta chain variable domain of TCR clone 363346 (TRBV7-9, TRBJ2-3)
CASSLEDGTDTQYF

SEQ ID NO: 726693 - protein, 14 aa, Homo sapiens
  CDR3 for alpha chain variable domain of TCR clone 363347 (TRAV26-1, TRAJ39)
CIVRGSRAGNMLTF

SEQ ID NO: 726694 - protein, 15 aa, Homo sapiens
  CDR3 for beta chain variable domain of TCR clone 363347 (TRBV7-9, TRBJ1-5)
CASSQGHQPNQAQHV

SEQ ID NO: 726695 - protein, 15 aa, Homo sapiens
  CDR3 for alpha chain variable domain of TCR clone 363348 (TRAV35, TRAJ58)
CSGRRQETSGSRLTF

SEQ ID NO: 726696 - protein, 11 aa, Homo sapiens
  CDR3 for beta chain variable domain of TCR clone 363348 (TRBV11-2, TRBJ1-1)
CASSINTEAFF

SEQ ID NO: 726697 - protein, 14 aa, Homo sapiens
  CDR3 for alpha chain variable domain of TCR clone 363349 (TRAV16, TRAJ33)
CALSAMDSNYQLIW

SEQ ID NO: 726698 - protein, 15 aa, Homo sapiens
  CDR3 for beta chain variable domain of TCR clone 363349 (TRBV2, TRBJ2-7)
CASSEVLARSYEQYF

SEQ ID NO: 726699 - protein, 14 aa, Homo sapiens
  CDR3 for alpha chain variable domain of TCR clone 363350 (TRAV8-3, TRAJ15)
CAVGRHQAGTALIF

SEQ ID NO: 726700 - protein, 13 aa, Homo sapiens
  CDR3 for beta chain variable domain of TCR clone 363350 (TRBV7-7, TRBJ2-3)
CASSLSRADTQYF

SEQ ID NO: 726701 - protein, 13 aa, Homo sapiens
  CDR3 for alpha chain variable domain of TCR clone 363351 (TRAV12-1, TRAJ38)
CVVNAGNNRKLIW

SEQ ID NO: 726702 - protein, 15 aa, Homo sapiens
  CDR3 for beta chain variable domain of TCR clone 363351 (TRBV7-9, TRBJ1-5)
CASSQGHQPNQPQHF

SEQ ID NO: 726703 - protein, 15 aa, Homo sapiens
  CDR3 for alpha chain variable domain of TCR clone 363352 (TRAV12-2, TRAJ43)
CAFDMRFGAGTRLTV

SEQ ID NO: 726704 - protein, 18 aa, Homo sapiens
  CDR3 for beta chain variable domain of TCR clone 363352 (TRBV20-1, TRBJ2-3)
CSASGLAAGPGTTDTQYF

SEQ ID NO: 726705 - protein, 12 aa, Homo sapiens
  CDR3 for alpha chain variable domain of TCR clone 363353 (TRAV5, TRAJ41)
CAENNSGYALNF

SEQ ID NO: 726706 - protein, 12 aa, Homo sapiens
  CDR3 for beta chain variable domain of TCR clone 363353 (TRBV11-3, TRBJ2-2)
CASSLGGGELFF

SEQ ID NO: 726707 - protein, 12 aa, Homo sapiens
  CDR3 for alpha chain variable domain of TCR clone 363354 (TRAV1-1, TRAJ8)
CAGGTGFQKLVF

SEQ ID NO: 726708 - protein, 12 aa, Homo sapiens
  CDR3 for beta chain variable domain of TCR clone 363354 (TRBV5-7, TRBJ1-2)
CASSDGPYGYTF

SEQ ID NO: 726709 - protein, 13 aa, Homo sapiens
  CDR3 for alpha chain variable domain of TCR clone 363355 (TRAV29/DV5, TRAJ31)
CAASRINNARLMF

SEQ ID NO: 726710 - protein, 12 aa, Homo sapiens
  CDR3 for beta chain variable domain of TCR clone 363355 (TRBV14, TRBJ2-5)
CASSQLKETQYF

SEQ ID NO: 726711 - protein, 13 aa, Homo sapiens
  CDR3 for alpha chain variable domain of TCR clone 363356 (TRAV2, TRAJ10)
CAVETGGGNKLTF

SEQ ID NO: 726712 - protein, 12 aa, Homo sapiens
  CDR3 for beta chain variable domain of TCR clone 363356 (TRBV12-4, TRBJ2-7)
CASSLGGYEQYF

SEQ ID NO: 726713 - protein, 12 aa, Homo sapiens
  CDR3 for alpha chain variable domain of TCR clone 363357 (TRAV13-1, TRAJ42)
SVLRGSHGNLIF

SEQ ID NO: 726714 - protein, 13 aa, Homo sapiens
  CDR3 for beta chain variable domain of TCR clone 363357 (TRBV2, TRBJ1-4)
CASSELGVEKLFF

SEQ ID NO: 726715 - protein, 16 aa, Homo sapiens
  CDR3 for alpha chain variable domain of TCR clone 363358 (TRAV30, TRAJ44)
CGTEDKRTGTASKLTF

SEQ ID NO: 726716 - protein, 18 aa, Homo sapiens
  CDR3 for beta chain variable domain of TCR clone 363358 (TRBV20-1, TRBJ2-6)
CSAETTPTHGSGASVLTF

SEQ ID NO: 726717 - protein, 14 aa, Homo sapiens
  CDR3 for alpha chain variable domain of TCR clone 363359 (TRAV2, TRAJ37)
CAVDFTSNTGKLII

SEQ ID NO: 726718 - protein, 15 aa, Homo sapiens
  CDR3 for beta chain variable domain of TCR clone 363359 (TRBV20-1, TRBJ1-1)
CSASRGVTENTEAFF

SEQ ID NO: 726719 - protein, 16 aa, Homo sapiens
  CDR3 for alpha chain variable domain of TCR clone 363360 (TRAV35, TRAJ28)
CAGQRYSGAGSYQLTF

SEQ ID NO: 726720 - protein, 14 aa, Homo sapiens
  CDR3 for beta chain variable domain of TCR clone 363360 (TRBV7-6, TRBJ2-3)
CASSLGTVTDTQYF

SEQ ID NO: 726721 - protein, 12 aa, Homo sapiens
  CDR3 for alpha chain variable domain of TCR clone 363361 (TRAV10, TRAJ6)
CVVSEGSYIPTF

SEQ ID NO: 726722 - protein, 15 aa, Homo sapiens
  CDR3 for beta chain variable domain of TCR clone 363361 (TRBV4-3, TRBJ2-3)
CASSLGTRSSDTQYF

SEQ ID NO: 726723 - protein, 16 aa, Homo sapiens
  CDR3 for alpha chain variable domain of TCR clone 363362 (TRAV1-2, TRAJ10)
CAVRGVLTGGGNKLTF

SEQ ID NO: 726724 - protein, 12 aa, Homo sapiens
  CDR3 for beta chain variable domain of TCR clone 363362 (TRBV7-8, TRBJ2-7)
CASSRGYREQYF

SEQ ID NO: 726725 - protein, 14 aa, Homo sapiens
  CDR3 for alpha chain variable domain of TCR clone 363363 (TRAV2, TRAJ20)
CAVEDGTNDYKLSF

SEQ ID NO: 726726 - protein, 15 aa, Homo sapiens
  CDR3 for beta chain variable domain of TCR clone 363363 (TRBV20-1, TRBJ2-7)
CSARDRVSGMGEQYF

SEQ ID NO: 726727 - protein, 14 aa, Homo sapiens
  CDR3 for alpha chain variable domain of TCR clone 363364 (TRAV12-2, TRAJ13)
CAVKKTGGYQKVTF

SEQ ID NO: 726728 - protein, 15 aa, Homo sapiens
  CDR3 for beta chain variable domain of TCR clone 363364 (TRBV2, TRBJ2-1)
CASSELAGSYNKQFF

SEQ ID NO: 726729 - protein, 14 aa, Homo sapiens
  CDR3 for alpha chain variable domain of TCR clone 363365 (TRAV1-1, TRAJ27)
CAVIYNTNAGKSTF

SEQ ID NO: 726730 - protein, 16 aa, Homo sapiens
  CDR3 for beta chain variable domain of TCR clone 363365 (TRBV7-3, TRBJ2-1)
CASSLVSGSSNNEQFF

SEQ ID NO: 726731 - protein, 12 aa, Homo sapiens
  CDR3 for alpha chain variable domain of TCR clone 363366 (TRAV27, TRAJ35)
CAGADFGNVLHC

SEQ ID NO: 726732 - protein, 16 aa, Homo sapiens
  CDR3 for beta chain variable domain of TCR clone 363366 (TRBV6-1, TRBJ2-1)
CATILRQGSSYNEQFF

SEQ ID NO: 726733 - protein, 15 aa, Homo sapiens
  CDR3 for alpha chain variable domain of TCR clone 363367 (TRAV26-1, TRAJ22)
CIVRVSFWFCKATYL

SEQ ID NO: 726734 - protein, 13 aa, Homo sapiens
  CDR3 for beta chain variable domain of TCR clone 363367 (TRBV7-9, TRBJ1-2)
RASSLKQNYGYTF

SEQ ID NO: 726735 - protein, 16 aa, Homo sapiens
  CDR3 for alpha chain variable domain of TCR clone 363368 (TRAV3, TRAJ10)
CAVRDMRAGGGNKRTF

SEQ ID NO: 726736 - protein, 17 aa, Homo sapiens
  CDR3 for beta chain variable domain of TCR clone 363368 (TRBV28, TRBJ2-5)
CASSTPEGDALQETQYF

SEQ ID NO: 726737 - protein, 13 aa, Homo sapiens
  CDR3 for alpha chain variable domain of TCR clone 363369 (TRAV13-1, TRAJ43)
CAASLRNNNDMRF

SEQ ID NO: 726738 - protein, 14 aa, Homo sapiens
  CDR3 for beta chain variable domain of TCR clone 363369 (TRBV4-1, TRBJ2-5)
CASSQDLALETQYF

SEQ ID NO: 726739 - protein, 12 aa, Homo sapiens
  CDR3 for alpha chain variable domain of TCR clone 363370 (TRAV2, TRAJ31)
CAVEDNNARLMF

SEQ ID NO: 726740 - protein, 16 aa, Homo sapiens
  CDR3 for beta chain variable domain of TCR clone 363370 (TRBV10-3, TRBJ2-1)
CANSGVGDGGGGEQFF

SEQ ID NO: 726741 - protein, 11 aa, Homo sapiens
  CDR3 for alpha chain variable domain of TCR clone 363371 (TRAV2, TRAJ33)
CAVDSNYQLIW

SEQ ID NO: 726742 - protein, 13 aa, Homo sapiens
  CDR3 for beta chain variable domain of TCR clone 363371 (TRBV25-1, TRBJ2-7)
CASSEDGDYEQYF

SEQ ID NO: 726743 - protein, 15 aa, Homo sapiens
  CDR3 for alpha chain variable domain of TCR clone 363372 (TRAV17, TRAJ57)
CATGPSPGGSEKLVF

SEQ ID NO: 726744 - protein, 16 aa, Homo sapiens
  CDR3 for beta chain variable domain of TCR clone 363372 (TRBV12-4, TRBJ1-5)
CASSRPVGGSNQHQHF

SEQ ID NO: 726745 - protein, 18 aa, Homo sapiens
  CDR3 for alpha chain variable domain of TCR clone 363373 (TRAV21, TRAJ52)
CAVRPSPAGGPSNGKLTF

SEQ ID NO: 726746 - protein, 15 aa, Homo sapiens
  CDR3 for beta chain variable domain of TCR clone 363373 (TRBV7-9, TRBJ2-7)
CASSSSGLAVYEQYF

SEQ ID NO: 726747 - protein, 21 aa, Homo sapiens
  CDR3 for alpha chain variable domain of TCR clone 363374 (TRAV12-1, TRAJ32)
SSVIQPPTSMNYGGATNKLIF

SEQ ID NO: 726748 - protein, 15 aa, Homo sapiens
  CDR3 for beta chain variable domain of TCR clone 363374 (TRBV7-9, TRBJ2-2)
CASGPLDTFPGELFC

SEQ ID NO: 726749 - protein, 14 aa, Homo sapiens
  CDR3 for alpha chain variable domain of TCR clone 363375 (TRAV12-3, TRAJ29)
CAMSPYSGNTPLVF

SEQ ID NO: 726750 - protein, 12 aa, Homo sapiens
  CDR3 for beta chain variable domain of TCR clone 363375 (TRBV9, TRBJ2-1)
CASSVGGTDIFF

SEQ ID NO: 726751 - protein, 13 aa, Homo sapiens
  CDR3 for alpha chain variable domain of TCR clone 363376 (TRAV21, TRAJ20)
FAVGLRVDYKLSF

SEQ ID NO: 726752 - protein, 16 aa, Homo sapiens
  CDR3 for beta chain variable domain of TCR clone 363376 (TRBV6-1, TRBJ2-5)
CASSEALDRGAETQYF

SEQ ID NO: 726753 - protein, 11 aa, Homo sapiens
  CDR3 for alpha chain variable domain of TCR clone 363377 (TRAV3, TRAJ17)
CAEAAGNKLTF

SEQ ID NO: 726754 - protein, 15 aa, Homo sapiens
  CDR3 for beta chain variable domain of TCR clone 363377 (TRBV12-4, TRBJ2-7)
CASSVGSGGPYEQYF

SEQ ID NO: 726755 - protein, 12 aa, Homo sapiens
  CDR3 for alpha chain variable domain of TCR clone 363378 (TRAV12-1, TRAJ40)
CVVYSGTYKYIF

SEQ ID NO: 726756 - protein, 17 aa, Homo sapiens
  CDR3 for beta chain variable domain of TCR clone 363378 (TRBV7-2, TRBJ1-5)
CANSLSAGGYSNQPQHF

SEQ ID NO: 726757 - protein, 15 aa, Homo sapiens
  CDR3 for alpha chain variable domain of TCR clone 363379 (TRAV12-3, TRAJ10)
CASYILTGGGNKITF

SEQ ID NO: 726758 - protein, 15 aa, Homo sapiens
  CDR3 for beta chain variable domain of TCR clone 363379 (TRBV7-2, TRBJ1-6)
CASSLGPDRGMPLHF

SEQ ID NO: 726759 - protein, 15 aa, Homo sapiens
  CDR3 for alpha chain variable domain of TCR clone 363380 (TRAV8-4, TRAJ7)
CAVSGGNYGNNGLAF

SEQ ID NO: 726760 - protein, 11 aa, Homo sapiens
  CDR3 for beta chain variable domain of TCR clone 363380 (TRBV20-1, TRBJ2-1)
CSLSSGSEQFF

SEQ ID NO: 726761 - protein, 17 aa, Homo sapiens
  CDR3 for alpha chain variable domain of TCR clone 363381 (TRAV3, TRAJ42)
CAVRERDYGGSQGNLIF

SEQ ID NO: 726762 - protein, 16 aa, Homo sapiens
  CDR3 for beta chain variable domain of TCR clone 363381 (TRBV7-3, TRBJ2-2)
CASSLKRGTLSGELFF

SEQ ID NO: 726763 - protein, 14 aa, Homo sapiens
  CDR3 for alpha chain variable domain of TCR clone 363382 (TRAV2, TRAJ37)
CAVDFTSNTGKIIF

SEQ ID NO: 726764 - protein, 17 aa, Homo sapiens
  CDR3 for beta chain variable domain of TCR clone 363382 (TRBV24-1, TRBJ2-1)
CATSDVSTSGTYNEQFF

SEQ ID NO: 726765 - protein, 13 aa, Homo sapiens
  CDR3 for alpha chain variable domain of TCR clone 363383 (TRAV17, TRAJ26)
CATVESYGHNFVF

SEQ ID NO: 726766 - protein, 16 aa, Homo sapiens
  CDR3 for beta chain variable domain of TCR clone 363383 (TRBV2, TRBJ2-1)
CASSVGGSLSYNEQFF

SEQ ID NO: 726767 - protein, 14 aa, Homo sapiens
  CDR3 for alpha chain variable domain of TCR clone 363384 (TRAV1-1, TRAJ35)
CAVRSIGFGNVLHC

SEQ ID NO: 726768 - protein, 14 aa, Homo sapiens
  CDR3 for beta chain variable domain of TCR clone 363384 (TRBV5-1, TRBJ2-1)
CASSLDDRSDEQFF

SEQ ID NO: 726769 - protein, 15 aa, Homo sapiens
  CDR3 for alpha chain variable domain of TCR clone 363385 (TRAV8-2, TRAJ27)
CVVSDRGTNAGKSTF

SEQ ID NO: 726770 - protein, 14 aa, Homo sapiens
  CDR3 for beta chain variable domain of TCR clone 363385 (TRBV18, TRBJ2-7)
CASSPRGGAYGQYF

SEQ ID NO: 726771 - protein, 15 aa, Homo sapiens
  CDR3 for alpha chain variable domain of TCR clone 363386 (TRAV17, TRAJ57)
CATGPSQGGPEKLVF

SEQ ID NO: 726772 - protein, 15 aa, Homo sapiens
  CDR3 for beta chain variable domain of TCR clone 363386 (TRBV7-2, TRBJ1-2)
CASSPRAGWNYGYTF

SEQ ID NO: 726773 - protein, 13 aa, Homo sapiens
  CDR3 for alpha chain variable domain of TCR clone 363387 (TRAV12-2, TRAJ12)
CAGPEDSSYKLIF

SEQ ID NO: 726774 - protein, 13 aa, Homo sapiens
  CDR3 for beta chain variable domain of TCR clone 363387 (TRBV28, TRBJ2-1)
CASSLIGRDEQFL

SEQ ID NO: 726775 - protein, 14 aa, Homo sapiens
  CDR3 for alpha chain variable domain of TCR clone 363388 (TRAV35, TRAJ22)
CAVLRPGSAMQLTF

SEQ ID NO: 726776 - protein, 15 aa, Homo sapiens
  CDR3 for beta chain variable domain of TCR clone 363388 (TRBV12-4, TRBJ2-5)
CASSPPTGLQETQYF

SEQ ID NO: 726777 - protein, 13 aa, Homo sapiens
  CDR3 for alpha chain variable domain of TCR clone 363389 (TRAV1-1, TRAJ15)
CAVVDQAGTALIF

SEQ ID NO: 726778 - protein, 14 aa, Homo sapiens
  CDR3 for beta chain variable domain of TCR clone 363389 (TRBV5-4, TRBJ1-6)
CASSLWSDNSPLLF

SEQ ID NO: 726779 - protein, 13 aa, Homo sapiens
  CDR3 for alpha chain variable domain of TCR clone 363390 (TRAV2, TRAJ40)
CAVVTSGTYKYIV

SEQ ID NO: 726780 - protein, 14 aa, Homo sapiens
  CDR3 for beta chain variable domain of TCR clone 363390 (TRBV19, TRBJ2-1)
CASPTLVLSGEQFF

SEQ ID NO: 726781 - protein, 14 aa, Homo sapiens
  CDR3 for alpha chain variable domain of TCR clone 363391 (TRAV1-2, TRAJ8)
CAVREDTGFQEVVF

SEQ ID NO: 726782 - protein, 15 aa, Homo sapiens
  CDR3 for beta chain variable domain of TCR clone 363391 (TRBV6-3, TRBJ2-7)
CASSSPGTVFYEQYF

SEQ ID NO: 726783 - protein, 16 aa, Homo sapiens
  CDR3 for alpha chain variable domain of TCR clone 363392 (TRAV12-2, TRAJ52)
CRLANAGGTSYGKLTF

SEQ ID NO: 726784 - protein, 13 aa, Homo sapiens
  CDR3 for beta chain variable domain of TCR clone 363392 (TRBV20-1, TRBJ1-2)
CSASTERIYGYTF

SEQ ID NO: 726785 - protein, 15 aa, Homo sapiens
  CDR3 for alpha chain variable domain of TCR clone 363393 (TRAV3, TRAJ22)
CAVRDRGGSARQLTF

SEQ ID NO: 726786 - protein, 16 aa, Homo sapiens
  CDR3 for beta chain variable domain of TCR clone 363393 (TRBV20-1, TRBJ2-1)
CSARDLKQGMNNEQFF

SEQ ID NO: 726787 - protein, 11 aa, Homo sapiens
  CDR3 for alpha chain variable domain of TCR clone 363394 (TRAV35, TRAJ30)
CAPGGDDKIIF

SEQ ID NO: 726788 - protein, 16 aa, Homo sapiens
  CDR3 for beta chain variable domain of TCR clone 363394 (TRBV7-6, TRBJ2-1)
CIAGPAAWGGADEQFF

SEQ ID NO: 726789 - protein, 14 aa, Homo sapiens
  CDR3 for alpha chain variable domain of TCR clone 363395 (TRAV26-1, TRAJ38)
CIADNAGNNRKLIW

SEQ ID NO: 726790 - protein, 14 aa, Homo sapiens
  CDR3 for beta chain variable domain of TCR clone 363395 (TRBV7-2, TRBJ2-5)
CASSPRGSSETQYF

SEQ ID NO: 726791 - protein, 14 aa, Homo sapiens
  CDR3 for alpha chain variable domain of TCR clone 363396 (TRAV13-1, TRAJ44)
CAAKATGTASKLTF

SEQ ID NO: 726792 - protein, 13 aa, Homo sapiens
  CDR3 for beta chain variable domain of TCR clone 363396 (TRBV7-3, TRBJ1-2)
CASSRDRNYGYTF

SEQ ID NO: 726793 - protein, 11 aa, Homo sapiens
  CDR3 for alpha chain variable domain of TCR clone 363397 (TRAV2, TRAJ33)
CAVESNYQLIW

SEQ ID NO: 726794 - protein, 15 aa, Homo sapiens
  CDR3 for beta chain variable domain of TCR clone 363397 (TRBV19, TRBJ1-1)
CASTSGLIQNTEAFF

SEQ ID NO: 726795 - protein, 12 aa, Homo sapiens
  CDR3 for alpha chain variable domain of TCR clone 363398 (TRAV13-1, TRAJ21)
CAAKEGFNKIYF

SEQ ID NO: 726796 - protein, 18 aa, Homo sapiens
  CDR3 for beta chain variable domain of TCR clone 363398 (TRBV20-1, TRBJ2-6)
CSAETTPTHGSGANVLTF

SEQ ID NO: 726797 - protein, 13 aa, Homo sapiens
  CDR3 for alpha chain variable domain of TCR clone 363399 (TRAV16, TRAJ31)
CALSAHNNARLMF

SEQ ID NO: 726798 - protein, 17 aa, Homo sapiens
  CDR3 for beta chain variable domain of TCR clone 363399 (TRBV12-4, TRBJ2-1)
GASSPGLAGGRINEQFF

SEQ ID NO: 726799 - protein, 11 aa, Homo sapiens
  CDR3 for alpha chain variable domain of TCR clone 363400 (TRAV12-3, TRAJ43)
CAMSVSNDMRF

SEQ ID NO: 726800 - protein, 10 aa, Homo sapiens
  CDR3 for beta chain variable domain of TCR clone 363400 (TRBV5-4, TRBJ2-3)
CASSPTAGFL

SEQ ID NO: 726801 - protein, 12 aa, Homo sapiens
  CDR3 for alpha chain variable domain of TCR clone 363401 (TRAV27, TRAJ54)
CRSRSGSQKLVF

SEQ ID NO: 726802 - protein, 15 aa, Homo sapiens
  CDR3 for beta chain variable domain of TCR clone 363401 (TRBV18, TRBJ2-6)
CASSPSYAGANVLTF

SEQ ID NO: 726803 - protein, 13 aa, Homo sapiens
  CDR3 for alpha chain variable domain of TCR clone 363402 (TRAV12-2, TRAJ9)
CAVKWAGGFETIF

SEQ ID NO: 726804 - protein, 15 aa, Homo sapiens
  CDR3 for beta chain variable domain of TCR clone 363402 (TRBV5-1, TRBJ1-4)
CASSLTADSDEKLFF

SEQ ID NO: 726805 - protein, 16 aa, Homo sapiens
  CDR3 for alpha chain variable domain of TCR clone 363403 (TRAV20, TRAJ22)
CAVQASSSGSARQLTF

SEQ ID NO: 726806 - protein, 13 aa, Homo sapiens
  CDR3 for beta chain variable domain of TCR clone 363403 (TRBV12-5, TRBJ2-3)
CASGDRQSDTQYF

SEQ ID NO: 726807 - protein, 14 aa, Homo sapiens
  CDR3 for alpha chain variable domain of TCR clone 363404 (TRAV8-4, TRAJ9)
CAVRINTGGFKTIF

SEQ ID NO: 726808 - protein, 16 aa, Homo sapiens
  CDR3 for beta chain variable domain of TCR clone 363404 (TRBV7-2, TRBJ2-3)
CASSLVALYSTDTQYF

SEQ ID NO: 726809 - protein, 13 aa, Homo sapiens
  CDR3 for alpha chain variable domain of TCR clone 363405 (TRAV38-2/DV8, TRAJ34)
CAYRTWNTDKLIF

SEQ ID NO: 726810 - protein, 15 aa, Homo sapiens
  CDR3 for beta chain variable domain of TCR clone 363405 (TRBV6-1, TRBJ2-1)
CASSELRRQYNEHFF

SEQ ID NO: 726811 - protein, 12 aa, Homo sapiens
  CDR3 for alpha chain variable domain of TCR clone 363406 (TRAV8-6, TRAJ33)
CAVTASNYQLIW

SEQ ID NO: 726812 - protein, 15 aa, Homo sapiens
  CDR3 for beta chain variable domain of TCR clone 363406 (TRBV4-3, TRBJ1-2)
CASSRGQGRNYGYTF

SEQ ID NO: 726813 - protein, 14 aa, Homo sapiens
  CDR3 for alpha chain variable domain of TCR clone 363407 (TRAV17, TRAJ54)
CATDANQGAQKLVF

SEQ ID NO: 726814 - protein, 12 aa, Homo sapiens
  CDR3 for beta chain variable domain of TCR clone 363407 (TRBV6-3, TRBJ2-1)
CASSGSYNEQVF

SEQ ID NO: 726815 - protein, 12 aa, Homo sapiens
  CDR3 for alpha chain variable domain of TCR clone 363408 (TRAV10, TRAJ6)
CVVSEGSYIPTF

SEQ ID NO: 726816 - protein, 14 aa, Homo sapiens
  CDR3 for beta chain variable domain of TCR clone 363408 (TRBV19, TRBJ2-3)
CASSIDLGGDTQYF

SEQ ID NO: 726817 - protein, 17 aa, Homo sapiens
  CDR3 for alpha chain variable domain of TCR clone 363409 (TRAV20, TRAJ45)
CAVQGMYSGGGADGLTF

SEQ ID NO: 726818 - protein, 12 aa, Homo sapiens
  CDR3 for beta chain variable domain of TCR clone 363409 (TRBV12-4, TRBJ2-7)
CASSLGGYEQYS

SEQ ID NO: 726819 - protein, 15 aa, Homo sapiens
  CDR3 for alpha chain variable domain of TCR clone 363410 (TRAV4, TRAJ10)
CLVGDEEGGGNKLTF

SEQ ID NO: 726820 - protein, 13 aa, Homo sapiens
  CDR3 for beta chain variable domain of TCR clone 363410 (TRBV4-1, TRBJ1-1)
CASSRKMNTEAFF

SEQ ID NO: 726821 - protein, 13 aa, Homo sapiens
  CDR3 for alpha chain variable domain of TCR clone 363411 (TRAV13-1, TRAJ21)
CAASIYNFNKFYF

SEQ ID NO: 726822 - protein, 13 aa, Homo sapiens
  CDR3 for beta chain variable domain of TCR clone 363411 (TRBV27, TRBJ1-4)
CASSWMGDEKLFF

SEQ ID NO: 726823 - protein, 17 aa, Homo sapiens
  CDR3 for alpha chain variable domain of TCR clone 363412 (TRAV26-1, TRAJ58)
CIVRVGAEENSGSRLTF

SEQ ID NO: 726824 - protein, 18 aa, Homo sapiens
  CDR3 for beta chain variable domain of TCR clone 363412 (TRBV7-9, TRBJ2-7)
CDSSLTTSGSRTWYEQYF

SEQ ID NO: 726825 - protein, 14 aa, Homo sapiens
  CDR3 for alpha chain variable domain of TCR clone 363413 (TRAV12-1, TRAJ30)
CVVNIGGRDDKIIF

SEQ ID NO: 726826 - protein, 13 aa, Homo sapiens
  CDR3 for beta chain variable domain of TCR clone 363413 (TRBV10-3, TRBJ2-7)
CASKRAVNYEQYF

SEQ ID NO: 726827 - protein, 13 aa, Homo sapiens
  CDR3 for alpha chain variable domain of TCR clone 363414 (TRAV1-2, TRAJ9)
CAALHTGGFKTIF

SEQ ID NO: 726828 - protein, 14 aa, Homo sapiens
  CDR3 for beta chain variable domain of TCR clone 363414 (TRBV19, TRBJ1-4)
CASSMGRHNEKLFF

SEQ ID NO: 726829 - protein, 14 aa, Homo sapiens
  CDR3 for alpha chain variable domain of TCR clone 363415 (TRAV38-1, TRAJ40)
CALRPTSGTYKYIF

SEQ ID NO: 726830 - protein, 14 aa, Homo sapiens
  CDR3 for beta chain variable domain of TCR clone 363415 (TRBV7-3, TRBJ1-1)
CASSLKGGNTEAFF

SEQ ID NO: 726831 - protein, 14 aa, Homo sapiens
  CDR3 for alpha chain variable domain of TCR clone 363416 (TRAV12-2, TRAJ33)
CAVKRARSNYQLIW

SEQ ID NO: 726832 - protein, 12 aa, Homo sapiens
  CDR3 for beta chain variable domain of TCR clone 363416 (TRBV24-1, TRBJ2-3)
CATSDSTDAQYF

SEQ ID NO: 726833 - protein, 14 aa, Homo sapiens
  CDR3 for alpha chain variable domain of TCR clone 363417 (TRAV3, TRAJ28)
CAVRRGAGGTNSTF

SEQ ID NO: 726834 - protein, 16 aa, Homo sapiens
  CDR3 for beta chain variable domain of TCR clone 363417 (TRBV4-1, TRBJ2-7)
CASSQEWTSGPLEQYF

SEQ ID NO: 726835 - protein, 15 aa, Homo sapiens
  CDR3 for alpha chain variable domain of TCR clone 363418 (TRAV8-3, TRAJ37)
CAVCAPSSNTGKLIF

SEQ ID NO: 726836 - protein, 15 aa, Homo sapiens
  CDR3 for beta chain variable domain of TCR clone 363418 (TRBV11-2, TRBJ1-2)
CASSQMRGLNYGYTF

SEQ ID NO: 726837 - protein, 11 aa, Homo sapiens
  CDR3 for alpha chain variable domain of TCR clone 363419 (TRAV29/DV5, TRAJ49)
CAAVPGNQFYF

SEQ ID NO: 726838 - protein, 14 aa, Homo sapiens
  CDR3 for beta chain variable domain of TCR clone 363419 (TRBV27, TRBJ2-2)
CASRPGVNTGELFF

SEQ ID NO: 726839 - protein, 11 aa, Homo sapiens
  CDR3 for alpha chain variable domain of TCR clone 363420 (TRAV2, TRAJ13)
CASGGYQKVTF

SEQ ID NO: 726840 - protein, 11 aa, Homo sapiens
  CDR3 for beta chain variable domain of TCR clone 363420 (TRBV19, TRBJ1-1)
CASSIGSEAFF

SEQ ID NO: 726841 - protein, 16 aa, Homo sapiens
  CDR3 for alpha chain variable domain of TCR clone 363421 (TRAV3, TRAJ37)
CAVRGKGSGNTGKLIF

SEQ ID NO: 726842 - protein, 15 aa, Homo sapiens
  CDR3 for beta chain variable domain of TCR clone 363421 (TRBV7-3, TRBJ2-1)
CASSPTGGSRNEQFF

SEQ ID NO: 726843 - protein, 13 aa, Homo sapiens
  CDR3 for alpha chain variable domain of TCR clone 363422 (TRAV2, TRAJ34)
CAVEEDNTDKLIF

SEQ ID NO: 726844 - protein, 16 aa, Homo sapiens
  CDR3 for beta chain variable domain of TCR clone 363422 (TRBV2, TRBJ2-3)
CASSTSVEGVTDTQYF

SEQ ID NO: 726845 - protein, 14 aa, Homo sapiens
  CDR3 for alpha chain variable domain of TCR clone 363423 (TRAV8-1, TRAJ4)
FAVPFSGGYNKLIF

SEQ ID NO: 726846 - protein, 16 aa, Homo sapiens
  CDR3 for beta chain variable domain of TCR clone 363423 (TRBV6-1, TRBJ1-2)
CASSGAWQGRSHGYTF

SEQ ID NO: 726847 - protein, 12 aa, Homo sapiens
  CDR3 for alpha chain variable domain of TCR clone 363424 (TRAV17, TRAJ20)
CATDGDDYKLSS

SEQ ID NO: 726848 - protein, 18 aa, Homo sapiens
  CDR3 for beta chain variable domain of TCR clone 363424 (TRBV6-5, TRBJ2-5)
CASSYSQAGGSYQETQYF

SEQ ID NO: 726849 - protein, 14 aa, Homo sapiens
  CDR3 for alpha chain variable domain of TCR clone 363425 (TRAV26-1, TRAJ21)
CIAHTTSTNFTLDL

SEQ ID NO: 726850 - protein, 15 aa, Homo sapiens
  CDR3 for beta chain variable domain of TCR clone 363425 (TRBV20-1, TRBJ2-7)
CSARDRVSGIDEQYF

SEQ ID NO: 726851 - protein, 13 aa, Homo sapiens
  CDR3 for alpha chain variable domain of TCR clone 363426 (TRAV17, TRAJ22)
CAHHSGSARQLTF

SEQ ID NO: 726852 - protein, 16 aa, Homo sapiens
  CDR3 for beta chain variable domain of TCR clone 363426 (TRBV4-1, TRBJ1-2)
CASSQDAGQVIYGYTF

SEQ ID NO: 726853 - protein, 12 aa, Homo sapiens
  CDR3 for alpha chain variable domain of TCR clone 363427 (TRAV12-2, TRAJ7)
CAPEDGNNRLAF

SEQ ID NO: 726854 - protein, 15 aa, Homo sapiens
  CDR3 for beta chain variable domain of TCR clone 363427 (TRBV7-3, TRBJ2-1)
CASSPTGGGEVEQFF

SEQ ID NO: 726855 - protein, 11 aa, Homo sapiens
  CDR3 for alpha chain variable domain of TCR clone 363428 (TRAV12-2, TRAJ13)
CAVKKTGGYQK

SEQ ID NO: 726856 - protein, 15 aa, Homo sapiens
  CDR3 for beta chain variable domain of TCR clone 363428 (TRBV27, TRBJ2-1)
CASSNGGGSSNEQFF

SEQ ID NO: 726857 - protein, 15 aa, Homo sapiens
  CDR3 for alpha chain variable domain of TCR clone 363429 (TRAV29/DV5, TRAJ40)
CAASAQGSGTYKYIF

SEQ ID NO: 726858 - protein, 14 aa, Homo sapiens
  CDR3 for beta chain variable domain of TCR clone 363429 (TRBV18, TRBJ2-5)
CASSPGVSQETQYF

SEQ ID NO: 726859 - protein, 17 aa, Homo sapiens
  CDR3 for alpha chain variable domain of TCR clone 363430 (TRAV26-1, TRAJ37)
CIVRVITVSSNTGKLIF

SEQ ID NO: 726860 - protein, 17 aa, Homo sapiens
  CDR3 for beta chain variable domain of TCR clone 363430 (TRBV13, TRBJ2-3)
CASSISRVAGGRNTQYF

SEQ ID NO: 726861 - protein, 15 aa, Homo sapiens
  CDR3 for alpha chain variable domain of TCR clone 363431 (TRAV17, TRAJ6)
CATDLPSGGSYIPTF

SEQ ID NO: 726862 - protein, 16 aa, Homo sapiens
  CDR3 for beta chain variable domain of TCR clone 363431 (TRBV4-1, TRBJ2-7)
CARSQDPTGYSYEQYF

SEQ ID NO: 726863 - protein, 14 aa, Homo sapiens
  CDR3 for alpha chain variable domain of TCR clone 363432 (TRAV26-1, TRAJ48)
CIVRVGFGNEKLTF

SEQ ID NO: 726864 - protein, 13 aa, Homo sapiens
  CDR3 for beta chain variable domain of TCR clone 363432 (TRBV11-3, TRBJ2-3)
CASSHDTKDTQYV

SEQ ID NO: 726865 - protein, 14 aa, Homo sapiens
  CDR3 for alpha chain variable domain of TCR clone 363433 (TRAV1-2, TRAJ15)
CAVRDRQAGTALIF

SEQ ID NO: 726866 - protein, 14 aa, Homo sapiens
  CDR3 for beta chain variable domain of TCR clone 363433 (TRBV2, TRBJ2-1)
CASSEALIYNEQFF

SEQ ID NO: 726867 - protein, 18 aa, Homo sapiens
  CDR3 for alpha chain variable domain of TCR clone 363434 (TRAV13-1, TRAJ52)
CAAKNPNAGGTSYGKLTF

SEQ ID NO: 726868 - protein, 15 aa, Homo sapiens
  CDR3 for beta chain variable domain of TCR clone 363434 (TRBV7-2, TRBJ2-1)
CASRKTGSSYNEQFF

SEQ ID NO: 726869 - protein, 16 aa, Homo sapiens
  CDR3 for alpha chain variable domain of TCR clone 363435 (TRAV23/DV6, TRAJ9)
CAASIGGNTGGFKTIF

SEQ ID NO: 726870 - protein, 13 aa, Homo sapiens
  CDR3 for beta chain variable domain of TCR clone 363435 (TRBV10-2, TRBJ2-7)
CASAASGGYEQYF

SEQ ID NO: 726871 - protein, 13 aa, Homo sapiens
  CDR3 for alpha chain variable domain of TCR clone 363436 (TRAV26-2, TRAJ43)
CILRAVNKNDIRF

SEQ ID NO: 726872 - protein, 15 aa, Homo sapiens
  CDR3 for beta chain variable domain of TCR clone 363436 (TRBV7-2, TRBJ2-1)
CASTHGTGIYNEQFF

SEQ ID NO: 726873 - protein, 16 aa, Homo sapiens
  CDR3 for alpha chain variable domain of TCR clone 363437 (TRAV35, TRAJ28)
CAGYLYSGAGSYQLTF

SEQ ID NO: 726874 - protein, 15 aa, Homo sapiens
  CDR3 for beta chain variable domain of TCR clone 363437 (TRBV10-2, TRBJ2-6)
CASSEQGTGANVLTF

SEQ ID NO: 726875 - protein, 14 aa, Homo sapiens
  CDR3 for alpha chain variable domain of TCR clone 363438 (TRAV8-4, TRAJ9)
CAVRINTVGFKTIF

SEQ ID NO: 726876 - protein, 15 aa, Homo sapiens
  CDR3 for beta chain variable domain of TCR clone 363438 (TRBV10-2, TRBJ2-6)
CASSEQGTGANDLTF

SEQ ID NO: 726877 - protein, 12 aa, Homo sapiens
  CDR3 for alpha chain variable domain of TCR clone 363439 (TRAV2, TRAJ10)
CASTGGGNKLTF

SEQ ID NO: 726878 - protein, 14 aa, Homo sapiens
  CDR3 for beta chain variable domain of TCR clone 363439 (TRBV7-2, TRBJ2-2)
CASRGHGAAGELFF

SEQ ID NO: 726879 - protein, 11 aa, Homo sapiens
  CDR3 for alpha chain variable domain of TCR clone 363440 (TRAV1-2, TRAJ20)
CAVANDFKLSF

SEQ ID NO: 726880 - protein, 16 aa, Homo sapiens
  CDR3 for beta chain variable domain of TCR clone 363440 (TRBV28, TRBJ2-7)
CASSSGTSGRGYEQYF

SEQ ID NO: 726881 - protein, 13 aa, Homo sapiens
  CDR3 for alpha chain variable domain of TCR clone 363441 (TRAV5, TRAJ30)
CAEIANRDDKIIF

SEQ ID NO: 726882 - protein, 12 aa, Homo sapiens
  CDR3 for beta chain variable domain of TCR clone 363441 (TRBV24-1, TRBJ1-1)
CATSDSDRGAFF

SEQ ID NO: 726883 - protein, 14 aa, Homo sapiens
  CDR3 for alpha chain variable domain of TCR clone 363442 (TRAV12-3, TRAJ47)
CAMSVREYGNTLVC

SEQ ID NO: 726884 - protein, 15 aa, Homo sapiens
  CDR3 for beta chain variable domain of TCR clone 363442 (TRBV20-1, TRBJ2-2)
CSARDTRLNTGELFF

SEQ ID NO: 726885 - protein, 11 aa, Homo sapiens
  CDR3 for alpha chain variable domain of TCR clone 363443 (TRAV21, TRAJ11)
CAVNGYSTLTF

SEQ ID NO: 726886 - protein, 16 aa, Homo sapiens
  CDR3 for beta chain variable domain of TCR clone 363443 (TRBV4-3, TRBJ2-2)
CASSRLQGSGTGELFF

SEQ ID NO: 726887 - protein, 14 aa, Homo sapiens
  CDR3 for alpha chain variable domain of TCR clone 363444 (TRAV13-1, TRAJ44)
CAAKATGTASKLTF

SEQ ID NO: 726888 - protein, 10 aa, Homo sapiens
  CDR3 for beta chain variable domain of TCR clone 363444 (TRBV2, TRBJ2-5)
CASSAATQYF

SEQ ID NO: 726889 - protein, 14 aa, Homo sapiens
  CDR3 for alpha chain variable domain of TCR clone 363445 (TRAV12-2, TRAJ10)
CAVTPTGGGNKLTF

SEQ ID NO: 726890 - protein, 16 aa, Homo sapiens
  CDR3 for beta chain variable domain of TCR clone 363445 (TRBV4-2, TRBJ2-3)
CASSQELAGDTDTQYF

SEQ ID NO: 726891 - protein, 14 aa, Homo sapiens
  CDR3 for alpha chain variable domain of TCR clone 363446 (TRAV12-2, TRAJ13)
CAVKKTGGNQKVTF

SEQ ID NO: 726892 - protein, 15 aa, Homo sapiens
  CDR3 for beta chain variable domain of TCR clone 363446 (TRBV20-1, TRBJ2-7)
CSARDRVSGMDEQYF

SEQ ID NO: 726893 - protein, 13 aa, Homo sapiens
  CDR3 for alpha chain variable domain of TCR clone 363447 (TRAV35, TRAJ42)
CAGFPGSQGNLIF

SEQ ID NO: 726894 - protein, 12 aa, Homo sapiens
  CDR3 for beta chain variable domain of TCR clone 363447 (TRBV7-2, TRBJ1-6)
CASSLSSSSLHF

SEQ ID NO: 726895 - protein, 14 aa, Homo sapiens
  CDR3 for alpha chain variable domain of TCR clone 363448 (TRAV12-3, TRAJ6)
SAMSATGGSYIPTF

SEQ ID NO: 726896 - protein, 16 aa, Homo sapiens
  CDR3 for beta chain variable domain of TCR clone 363448 (TRBV4-2, TRBJ2-1)
CASSPRAGQGANEQFF

SEQ ID NO: 726897 - protein, 14 aa, Homo sapiens
  CDR3 for alpha chain variable domain of TCR clone 363449 (TRAV34, TRAJ44)
CGADGTGTASKLTF

SEQ ID NO: 726898 - protein, 17 aa, Homo sapiens
  CDR3 for beta chain variable domain of TCR clone 363449 (TRBV5-1, TRBJ2-5)
CASSLLGLAANQETQYF

SEQ ID NO: 726899 - protein, 18 aa, Homo sapiens
  CDR3 for alpha chain variable domain of TCR clone 363450 (TRAV26-1, TRAJ23)
CIVRVGLEVGNQGGKLIF

SEQ ID NO: 726900 - protein, 16 aa, Homo sapiens
  CDR3 for beta chain variable domain of TCR clone 363450 (TRBV12-4, TRBJ2-5)
CASSFFVRGRQETQSF

SEQ ID NO: 726901 - protein, 14 aa, Homo sapiens
  CDR3 for alpha chain variable domain of TCR clone 363451 (TRAV17, TRAJ15)
CATDRGQAGTALIF

SEQ ID NO: 726902 - protein, 13 aa, Homo sapiens
  CDR3 for beta chain variable domain of TCR clone 363451 (TRBV12-4, TRBJ1-5)
CASSPDRAQPQHF

SEQ ID NO: 726903 - protein, 14 aa, Homo sapiens
  CDR3 for alpha chain variable domain of TCR clone 363452 (TRAV12-3, TRAJ42)
CAMNYGGSQGNLIF

SEQ ID NO: 726904 - protein, 15 aa, Homo sapiens
  CDR3 for beta chain variable domain of TCR clone 363452 (TRBV5-7, TRBJ1-5)
CASSYGRLWDQTRHF

SEQ ID NO: 726905 - protein, 18 aa, Homo sapiens
  CDR3 for alpha chain variable domain of TCR clone 363453 (TRAV13-1, TRAJ52)
CAAKNPNAGGTSYGKMTF

SEQ ID NO: 726906 - protein, 14 aa, Homo sapiens
  CDR3 for beta chain variable domain of TCR clone 363453 (TRBV6-5, TRBJ1-1)
CASSFGQGLTEAFF

SEQ ID NO: 726907 - protein, 12 aa, Homo sapiens
  CDR3 for alpha chain variable domain of TCR clone 363454 (TRAV12-1, TRAJ40)
CVVYSGTYKYIF

SEQ ID NO: 726908 - protein, 19 aa, Homo sapiens
  CDR3 for beta chain variable domain of TCR clone 363454 (TRBV2, TRBJ2-7)
CASSDDETSGRANDYEQYF

SEQ ID NO: 726909 - protein, 14 aa, Homo sapiens
  CDR3 for alpha chain variable domain of TCR clone 363455 (TRAV20, TRAJ22)
CAVQVSGSARQLTF

SEQ ID NO: 726910 - protein, 14 aa, Homo sapiens
  CDR3 for beta chain variable domain of TCR clone 363455 (TRBV7-9, TRBJ2-5)
CASSLDTAQETQYF

SEQ ID NO: 726911 - protein, 11 aa, Homo sapiens
  CDR3 for alpha chain variable domain of TCR clone 363456 (TRAV12-2, TRAJ33)
CAVNMDYQLIW

SEQ ID NO: 726912 - protein, 14 aa, Homo sapiens
  CDR3 for beta chain variable domain of TCR clone 363456 (TRBV7-3, TRBJ1-1)
CASSLKGGNTEAFF

SEQ ID NO: 726913 - protein, 15 aa, Homo sapiens
  CDR3 for alpha chain variable domain of TCR clone 363457 (TRAV12-3, TRAJ17)
CAMSPSLAAGNKLTF

SEQ ID NO: 726914 - protein, 15 aa, Homo sapiens
  CDR3 for beta chain variable domain of TCR clone 363457 (TRBV28, TRBJ2-5)
CASSSGRTIQETQYF

SEQ ID NO: 726915 - protein, 14 aa, Homo sapiens
  CDR3 for alpha chain variable domain of TCR clone 363458 (TRAV1-2, TRAJ8)
CAVREDTGFQKLVF

SEQ ID NO: 726916 - protein, 16 aa, Homo sapiens
  CDR3 for beta chain variable domain of TCR clone 363458 (TRBV3-1, TRBJ2-7)
CASSQGATGVAYEQYF

SEQ ID NO: 726917 - protein, 11 aa, Homo sapiens
  CDR3 for alpha chain variable domain of TCR clone 363459 (TRAV12-2, TRAJ29)
CAVTLRSPLVF

SEQ ID NO: 726918 - protein, 16 aa, Homo sapiens
  CDR3 for beta chain variable domain of TCR clone 363459 (TRBV19, TRBJ1-5)
CASSIDQGGPRQPQHF

SEQ ID NO: 726919 - protein, 12 aa, Homo sapiens
  CDR3 for alpha chain variable domain of TCR clone 363460 (TRAV12-3, TRAJ17)
CAMTPTGNKLTF

SEQ ID NO: 726920 - protein, 12 aa, Homo sapiens
  CDR3 for beta chain variable domain of TCR clone 363460 (TRBV7-8, TRBJ2-7)
CASSLGDREQYF

SEQ ID NO: 726921 - protein, 14 aa, Homo sapiens
  CDR3 for alpha chain variable domain of TCR clone 363461 (TRAV23/DV6, TRAJ45)
CAASWGGGADGLTF

SEQ ID NO: 726922 - protein, 15 aa, Homo sapiens
  CDR3 for beta chain variable domain of TCR clone 363461 (TRBV4-2, TRBJ1-2)
CASSRNTGEGYGYTF

SEQ ID NO: 726923 - protein, 14 aa, Homo sapiens
  CDR3 for alpha chain variable domain of TCR clone 363462 (TRAV4, TRAJ43)
RLVGPMYNNNDMRF

SEQ ID NO: 726924 - protein, 21 aa, Homo sapiens
  CDR3 for beta chain variable domain of TCR clone 363462 (TRBV11-1, TRBJ2-1)
CASSARERLRPEGPSYNEQFF

SEQ ID NO: 726925 - protein, 14 aa, Homo sapiens
  CDR3 for alpha chain variable domain of TCR clone 363463 (TRAV13-1, TRAJ20)
CAARPGSNDYKLSF

SEQ ID NO: 726926 - protein, 15 aa, Homo sapiens
  CDR3 for beta chain variable domain of TCR clone 363463 (TRBV29-1, TRBJ2-6)
CSFTGGRSGANVLTF

SEQ ID NO: 726927 - protein, 14 aa, Homo sapiens
  CDR3 for alpha chain variable domain of TCR clone 363464 (TRAV9-2, TRAJ39)
CALYIYNEGNMLTF

SEQ ID NO: 726928 - protein, 15 aa, Homo sapiens
  CDR3 for beta chain variable domain of TCR clone 363464 (TRBV19, TRBJ2-4)
CASRGPRRGENMQYF

SEQ ID NO: 726929 - protein, 15 aa, Homo sapiens
  CDR3 for alpha chain variable domain of TCR clone 363465 (TRAV3, TRAJ47)
CAVRDIGEYGNQLVF

SEQ ID NO: 726930 - protein, 14 aa, Homo sapiens
  CDR3 for beta chain variable domain of TCR clone 363465 (TRBV13, TRBJ2-5)
CASSLERVGETQYF

SEQ ID NO: 726931 - protein, 14 aa, Homo sapiens
  CDR3 for alpha chain variable domain of TCR clone 363466 (TRAV35, TRAJ38)
YAGSNAGNNRKLIW

SEQ ID NO: 726932 - protein, 12 aa, Homo sapiens
  CDR3 for beta chain variable domain of TCR clone 363466 (TRBV19, TRBJ2-7)
CASTDRGYEQYF

SEQ ID NO: 726933 - protein, 14 aa, Homo sapiens
  CDR3 for alpha chain variable domain of TCR clone 363467 (TRAV26-1, TRAJ21)
CIVRVVYNFNKFYF

SEQ ID NO: 726934 - protein, 20 aa, Homo sapiens
  CDR3 for beta chain variable domain of TCR clone 363467 (TRBV28, TRBJ2-1)
CASTPIGRSPGLAGGNEQFF

SEQ ID NO: 726935 - protein, 13 aa, Homo sapiens
  CDR3 for alpha chain variable domain of TCR clone 363468 (TRAV12-3, TRAJ48)
CAMSLVGHEKLTF

SEQ ID NO: 726936 - protein, 11 aa, Homo sapiens
  CDR3 for beta chain variable domain of TCR clone 363468 (TRBV7-2, TRBJ2-7)
CASSSGLWQYF

SEQ ID NO: 726937 - protein, 16 aa, Homo sapiens
  CDR3 for alpha chain variable domain of TCR clone 363469 (TRAV3, TRAJ10)
CAVRDMRAGAGNKLTF

SEQ ID NO: 726938 - protein, 15 aa, Homo sapiens
  CDR3 for beta chain variable domain of TCR clone 363469 (TRBV11-2, TRBJ1-6)
CASTGFGTAVSPLHF

SEQ ID NO: 726939 - protein, 15 aa, Homo sapiens
  CDR3 for alpha chain variable domain of TCR clone 363470 (TRAV26-1, TRAJ29)
CIVRVEGSGNTPLVF

SEQ ID NO: 726940 - protein, 14 aa, Homo sapiens
  CDR3 for beta chain variable domain of TCR clone 363470 (TRBV7-9, TRBJ1-6)
CASSVMTDYSPLHF

SEQ ID NO: 726941 - protein, 12 aa, Homo sapiens
  CDR3 for alpha chain variable domain of TCR clone 363471 (TRAV17, TRAJ28)
WDSGAGSYQLTF

SEQ ID NO: 726942 - protein, 17 aa, Homo sapiens
  CDR3 for beta chain variable domain of TCR clone 363471 (TRBV11-2, TRBJ2-1)
CASSLYPPGVEYNEQFF

SEQ ID NO: 726943 - protein, 13 aa, Homo sapiens
  CDR3 for alpha chain variable domain of TCR clone 363472 (TRAV21, TRAJ20)
CAVGLRVDYKLSF

SEQ ID NO: 726944 - protein, 16 aa, Homo sapiens
  CDR3 for beta chain variable domain of TCR clone 363472 (TRBV5-4, TRBJ2-3)
CASQQPGAGGADTQYF

SEQ ID NO: 726945 - protein, 13 aa, Homo sapiens
  CDR3 for alpha chain variable domain of TCR clone 363473 (TRAV13-1, TRAJ34)
CAASKGNTDKLIF

SEQ ID NO: 726946 - protein, 15 aa, Homo sapiens
  CDR3 for beta chain variable domain of TCR clone 363473 (TRBV3-1, TRBJ2-5)
CASSANLGGPETQYF

SEQ ID NO: 726947 - protein, 14 aa, Homo sapiens
  CDR3 for alpha chain variable domain of TCR clone 363474 (TRAV26-2, TRAJ32)
CWVGYGGATTKLIF

SEQ ID NO: 726948 - protein, 14 aa, Homo sapiens
  CDR3 for beta chain variable domain of TCR clone 363474 (TRBV4-2, TRBJ2-1)
CASGLDRAYNEQFF

SEQ ID NO: 726949 - protein, 12 aa, Homo sapiens
  CDR3 for alpha chain variable domain of TCR clone 363475 (TRAV2, TRAJ10)
CASTGGGNKLTF

SEQ ID NO: 726950 - protein, 16 aa, Homo sapiens
  CDR3 for beta chain variable domain of TCR clone 363475 (TRBV12-5, TRBJ2-5)
CASGPRTSGNQETQYF

SEQ ID NO: 726951 - protein, 14 aa, Homo sapiens
  CDR3 for alpha chain variable domain of TCR clone 363476 (TRAV12-2, TRAJ45)
CAGNIGGGADGLTF

SEQ ID NO: 726952 - protein, 17 aa, Homo sapiens
  CDR3 for beta chain variable domain of TCR clone 363476 (TRBV20-1, TRBJ2-2)
CSASGSGQGGLTGELFF

SEQ ID NO: 726953 - protein, 15 aa, Homo sapiens
  CDR3 for alpha chain variable domain of TCR clone 363477 (TRAV21, TRAJ53)
CATLNSGGSNYKLTI

SEQ ID NO: 726954 - protein, 15 aa, Homo sapiens
  CDR3 for beta chain variable domain of TCR clone 363477 (TRBV9, TRBJ2-1)
CASVGGGGNYNEQFF

SEQ ID NO: 726955 - protein, 13 aa, Homo sapiens
  CDR3 for alpha chain variable domain of TCR clone 363478 (TRAV27, TRAJ57)
CAGFQGGSEKLAF

SEQ ID NO: 726956 - protein, 14 aa, Homo sapiens
  CDR3 for beta chain variable domain of TCR clone 363478 (TRBV20-1, TRBJ1-2)
CSGRKDGRAYGYTF

SEQ ID NO: 726957 - protein, 10 aa, Homo sapiens
  CDR3 for alpha chain variable domain of TCR clone 363479 (TRAV17, TRAJ21)
CAYNFNKFYF

SEQ ID NO: 726958 - protein, 11 aa, Homo sapiens
  CDR3 for beta chain variable domain of TCR clone 363479 (TRBV2, TRBJ1-1)
CASREGTEAFF

SEQ ID NO: 726959 - protein, 17 aa, Homo sapiens
  CDR3 for alpha chain variable domain of TCR clone 363480 (TRAV3, TRAJ6)
CAVRDGPRAGRSYIPTL

SEQ ID NO: 726960 - protein, 13 aa, Homo sapiens
  CDR3 for beta chain variable domain of TCR clone 363480 (TRBV20-1, TRBJ1-6)
CSAPLGVGSPLHF

SEQ ID NO: 726961 - protein, 15 aa, Homo sapiens
  CDR3 for alpha chain variable domain of TCR clone 363481 (TRAV8-2, TRAJ23)
CVVSPLITREESLSS

SEQ ID NO: 726962 - protein, 13 aa, Homo sapiens
  CDR3 for beta chain variable domain of TCR clone 363481 (TRBV12-4, TRBJ1-1)
CASSPGTGFEAFF

SEQ ID NO: 726963 - protein, 17 aa, Homo sapiens
  CDR3 for alpha chain variable domain of TCR clone 363482 (TRAV21, TRAJ24)
CAGIRLRSTESWGKLQF

SEQ ID NO: 726964 - protein, 15 aa, Homo sapiens
  CDR3 for beta chain variable domain of TCR clone 363482 (TRBV7-2, TRBJ2-3)
CASSPRGLSTDTQYF

SEQ ID NO: 726965 - protein, 15 aa, Homo sapiens
  CDR3 for alpha chain variable domain of TCR clone 363483 (TRAV4, TRAJ42)
CLVGGYGGSQGNLIS

SEQ ID NO: 726966 - protein, 16 aa, Homo sapiens
  CDR3 for beta chain variable domain of TCR clone 363483 (TRBV27, TRBJ1-1)
CASSTRTGGVGTEAFF

SEQ ID NO: 726967 - protein, 13 aa, Homo sapiens
  CDR3 for alpha chain variable domain of TCR clone 363484 (TRAV35, TRAJ44)
CAGLSGTASKLTF

SEQ ID NO: 726968 - protein, 17 aa, Homo sapiens
  CDR3 for beta chain variable domain of TCR clone 363484 (TRBV7-8, TRBJ1-2)
CASSLRPLQGHLYSYSF

SEQ ID NO: 726969 - protein, 11 aa, Homo sapiens
  CDR3 for alpha chain variable domain of TCR clone 363485 (TRAV12-1, TRAJ40)
CVLLGTYKYIF

SEQ ID NO: 726970 - protein, 18 aa, Homo sapiens
  CDR3 for beta chain variable domain of TCR clone 363485 (TRBV12-4, TRBJ2-2)
CASSLVAGTRGRTGELFF

SEQ ID NO: 726971 - protein, 14 aa, Homo sapiens
  CDR3 for alpha chain variable domain of TCR clone 363486 (TRAV27, TRAJ22)
FAGVVPGSARQLTF

SEQ ID NO: 726972 - protein, 16 aa, Homo sapiens
  CDR3 for beta chain variable domain of TCR clone 363486 (TRBV9, TRBJ2-7)
CASSVGLGGGTYEQYF

SEQ ID NO: 726973 - protein, 14 aa, Homo sapiens
  CDR3 for alpha chain variable domain of TCR clone 363487 (TRAV12-3, TRAJ54)
CAMSALQGAQKLVF

SEQ ID NO: 726974 - protein, 16 aa, Homo sapiens
  CDR3 for beta chain variable domain of TCR clone 363487 (TRBV7-9, TRBJ2-1)
CASSDVAGGSYSEQFF

SEQ ID NO: 726975 - protein, 15 aa, Homo sapiens
  CDR3 for alpha chain variable domain of TCR clone 363488 (TRAV4, TRAJ39)
CHVGPNNNAGNMLTF

SEQ ID NO: 726976 - protein, 13 aa, Homo sapiens
  CDR3 for beta chain variable domain of TCR clone 363488 (TRBV11-2, TRBJ2-5)
CASSSPGEETQYF

SEQ ID NO: 726977 - protein, 13 aa, Homo sapiens
  CDR3 for alpha chain variable domain of TCR clone 363489 (TRAV36/DV7, TRAJ7)
CAGTRYGNHRLAF

SEQ ID NO: 726978 - protein, 14 aa, Homo sapiens
  CDR3 for beta chain variable domain of TCR clone 363489 (TRBV19, TRBJ2-1)
CASPTFVVSGEQFF

SEQ ID NO: 726979 - protein, 13 aa, Homo sapiens
  CDR3 for alpha chain variable domain of TCR clone 363490 (TRAV12-2, TRAJ18)
CAVRGSTLGRLYF

SEQ ID NO: 726980 - protein, 20 aa, Homo sapiens
  CDR3 for beta chain variable domain of TCR clone 363490 (TRBV7-8, TRBJ2-2)
CASSHLVPGPTIHITGELFF

SEQ ID NO: 726981 - protein, 10 aa, Homo sapiens
  CDR3 for alpha chain variable domain of TCR clone 363491 (TRAV8-4, TRAJ43)
CAVSADDIRF

SEQ ID NO: 726982 - protein, 15 aa, Homo sapiens
  CDR3 for beta chain variable domain of TCR clone 363491 (TRBV5-1, TRBJ2-3)
CASSVTSGSTETQYF

SEQ ID NO: 726983 - protein, 16 aa, Homo sapiens
  CDR3 for alpha chain variable domain of TCR clone 363492 (TRAV12-3, TRAJ53)
CAMSPGSGGSNNKLTF

SEQ ID NO: 726984 - protein, 11 aa, Homo sapiens
  CDR3 for beta chain variable domain of TCR clone 363492 (TRBV29-1, TRBJ2-5)
YSEDRTGTQYF

SEQ ID NO: 726985 - protein, 17 aa, Homo sapiens
  CDR3 for alpha chain variable domain of TCR clone 363493 (TRAV21, TRAJ52)
CAVGVNAGGTSYVKLTC

SEQ ID NO: 726986 - protein, 13 aa, Homo sapiens
  CDR3 for beta chain variable domain of TCR clone 363493 (TRBV5-1, TRBJ1-2)
CASSFQGNYGYTF

SEQ ID NO: 726987 - protein, 16 aa, Homo sapiens
  CDR3 for alpha chain variable domain of TCR clone 363494 (TRAV38-1, TRAJ37)
CAFKGDGSSNTGKLIF

SEQ ID NO: 726988 - protein, 14 aa, Homo sapiens
  CDR3 for beta chain variable domain of TCR clone 363494 (TRBV7-2, TRBJ2-7)
CASSPKTSFYEQYF

SEQ ID NO: 726989 - protein, 14 aa, Homo sapiens
  CDR3 for alpha chain variable domain of TCR clone 363495 (TRAV8-4, TRAJ13)
CAVTLSGGYQKVTF

SEQ ID NO: 726990 - protein, 15 aa, Homo sapiens
  CDR3 for beta chain variable domain of TCR clone 363495 (TRBV19, TRBJ2-1)
CASSLETSGYNEQFF

SEQ ID NO: 726991 - protein, 15 aa, Homo sapiens
  CDR3 for alpha chain variable domain of TCR clone 363496 (TRAV35, TRAJ50)
CAGQLRKTSYDKGIF

SEQ ID NO: 726992 - protein, 12 aa, Homo sapiens
  CDR3 for beta chain variable domain of TCR clone 363496 (TRBV5-1, TRBJ2-5)
CASSLGLGTQYF

SEQ ID NO: 726993 - protein, 16 aa, Homo sapiens
  CDR3 for alpha chain variable domain of TCR clone 363497 (TRAV14/DV4, TRAJ53)
CAMREGGGGSNYKLTF

SEQ ID NO: 726994 - protein, 13 aa, Homo sapiens
  CDR3 for beta chain variable domain of TCR clone 363497 (TRBV7-9, TRBJ1-2)
CASSLKQDYGYTF

SEQ ID NO: 726995 - protein, 13 aa, Homo sapiens
  CDR3 for alpha chain variable domain of TCR clone 363498 (TRAV12-3, TRAJ7)
CAMTPYGNNRLAF

SEQ ID NO: 726996 - protein, 15 aa, Homo sapiens
  CDR3 for beta chain variable domain of TCR clone 363498 (TRBV7-9, TRBJ2-7)
CASSLDLDRGYEQYF

SEQ ID NO: 726997 - protein, 16 aa, Homo sapiens
  CDR3 for alpha chain variable domain of TCR clone 363499 (TRAV4, TRAJ22)
CLVGYLYSGSARQLTF

SEQ ID NO: 726998 - protein, 16 aa, Homo sapiens
  CDR3 for beta chain variable domain of TCR clone 363499 (TRBV7-9, TRBJ2-3)
CASSPWREVGTDTQYF

SEQ ID NO: 726999 - protein, 15 aa, Homo sapiens
  CDR3 for alpha chain variable domain of TCR clone 363500 (TRAV27, TRAJ38)
CAARLNAGNNRKLIW

SEQ ID NO: 727000 - protein, 14 aa, Homo sapiens
  CDR3 for beta chain variable domain of TCR clone 363500 (TRBV7-2, TRBJ2-7)
CASGPRDGAYEQYF

SEQ ID NO: 727001 - protein, 12 aa, Homo sapiens
  CDR3 for alpha chain variable domain of TCR clone 363501 (TRAV2, TRAJ31)
CAVEDNNARLMF

SEQ ID NO: 727002 - protein, 15 aa, Homo sapiens
  CDR3 for beta chain variable domain of TCR clone 363501 (TRBV7-9, TRBJ1-5)
CASSQGHQPNQPQHF

SEQ ID NO: 727003 - protein, 13 aa, Homo sapiens
  CDR3 for alpha chain variable domain of TCR clone 363502 (TRAV13-1, TRAJ6)
CARGSGGSYIPTL

SEQ ID NO: 727004 - protein, 17 aa, Homo sapiens
  CDR3 for beta chain variable domain of TCR clone 363502 (TRBV7-8, TRBJ2-1)
CASSPPTGTLAYNEQFF

SEQ ID NO: 727005 - protein, 17 aa, Homo sapiens
  CDR3 for alpha chain variable domain of TCR clone 363503 (TRAV38-2/DV8, TRAJ28)
CAFLTLYSGAGSYQLTF

SEQ ID NO: 727006 - protein, 14 aa, Homo sapiens
  CDR3 for beta chain variable domain of TCR clone 363503 (TRBV7-2, TRBJ2-5)
CASGLSGGGETQYF

SEQ ID NO: 727007 - protein, 16 aa, Homo sapiens
  CDR3 for alpha chain variable domain of TCR clone 363504 (TRAV8-2, TRAJ45)
CVVSEGTGGGADGLTF

SEQ ID NO: 727008 - protein, 14 aa, Homo sapiens
  CDR3 for beta chain variable domain of TCR clone 363504 (TRBV18, TRBJ1-1)
CASSPPTGRTEAFF

SEQ ID NO: 727009 - protein, 16 aa, Homo sapiens
  CDR3 for alpha chain variable domain of TCR clone 363505 (TRAV30, TRAJ24)
CDTEIVDADSWGKFQF

SEQ ID NO: 727010 - protein, 16 aa, Homo sapiens
  CDR3 for beta chain variable domain of TCR clone 363505 (TRBV2, TRBJ1-3)
CASSGGAGRSGNTIYF

SEQ ID NO: 727011 - protein, 11 aa, Homo sapiens
  CDR3 for alpha chain variable domain of TCR clone 363506 (TRAV3, TRAJ32)
CAVSPKGMVVL

SEQ ID NO: 727012 - protein, 15 aa, Homo sapiens
  CDR3 for beta chain variable domain of TCR clone 363506 (TRBV6-4, TRBJ2-2)
CASSPGGGWTGELFF

SEQ ID NO: 727013 - protein, 13 aa, Homo sapiens
  CDR3 for alpha chain variable domain of TCR clone 363507 (TRAV27, TRAJ42)
CAGSRGSQGNLIF

SEQ ID NO: 727014 - protein, 14 aa, Homo sapiens
  CDR3 for beta chain variable domain of TCR clone 363507 (TRBV20-1, TRBJ1-1)
CSAQTRIGGTEAFF

SEQ ID NO: 727015 - protein, 15 aa, Homo sapiens
  CDR3 for alpha chain variable domain of TCR clone 363508 (TRAV12-3, TRAJ6)
CAMSPASGGSYIPTF

SEQ ID NO: 727016 - protein, 13 aa, Homo sapiens
  CDR3 for beta chain variable domain of TCR clone 363508 (TRBV10-3, TRBJ1-2)
CAISERDSYGYTF

SEQ ID NO: 727017 - protein, 14 aa, Homo sapiens
  CDR3 for alpha chain variable domain of TCR clone 363509 (TRAV14/DV4, TRAJ57)
CAMREEGGSEKLVF

SEQ ID NO: 727018 - protein, 14 aa, Homo sapiens
  CDR3 for beta chain variable domain of TCR clone 363509 (TRBV7-9, TRBJ2-1)
CASSSMVGFGEQFF

SEQ ID NO: 727019 - protein, 16 aa, Homo sapiens
  CDR3 for alpha chain variable domain of TCR clone 363510 (TRAV26-1, TRAJ45)
CIVEKYSGGGADGLTF

SEQ ID NO: 727020 - protein, 16 aa, Homo sapiens
  CDR3 for beta chain variable domain of TCR clone 363510 (TRBV10-3, TRBJ1-6)
CAISERRGQGHSPLHF

SEQ ID NO: 727021 - protein, 11 aa, Homo sapiens
  CDR3 for alpha chain variable domain of TCR clone 363511 (TRAV21, TRAJ41)
CAVRSGYALNF

SEQ ID NO: 727022 - protein, 13 aa, Homo sapiens
  CDR3 for beta chain variable domain of TCR clone 363511 (TRBV7-9, TRBJ1-2)
CASSLKQNYSYTV

SEQ ID NO: 727023 - protein, 16 aa, Homo sapiens
  CDR3 for alpha chain variable domain of TCR clone 363512 (TRAV1-2, TRAJ10)
CAVRGVLTGGGNKLTF

SEQ ID NO: 727024 - protein, 16 aa, Homo sapiens
  CDR3 for beta chain variable domain of TCR clone 363512 (TRBV12-5, TRBJ2-5)
CASGLRTSGNQETQYF

SEQ ID NO: 727025 - protein, 14 aa, Homo sapiens
  CDR3 for alpha chain variable domain of TCR clone 363513 (TRAV12-3, TRAJ10)
SHLPLTGGGNKLTF

SEQ ID NO: 727026 - protein, 16 aa, Homo sapiens
  CDR3 for beta chain variable domain of TCR clone 363513 (TRBV10-3, TRBJ2-1)
CAISGVEDGGGGEQFF

SEQ ID NO: 727027 - protein, 13 aa, Homo sapiens
  CDR3 for alpha chain variable domain of TCR clone 363514 (TRAV26-1, TRAJ48)
CIVRVVGDEKLTF

SEQ ID NO: 727028 - protein, 19 aa, Homo sapiens
  CDR3 for beta chain variable domain of TCR clone 363514 (TRBV11-3, TRBJ2-2)
CASSTRPGAKTTSTGELFF

SEQ ID NO: 727029 - protein, 17 aa, Homo sapiens
  CDR3 for alpha chain variable domain of TCR clone 363515 (TRAV26-1, TRAJ53)
CIVRVDVSGGSNYKLTF

SEQ ID NO: 727030 - protein, 15 aa, Homo sapiens
  CDR3 for beta chain variable domain of TCR clone 363515 (TRBV20-1, TRBJ2-7)
CSARVPAAYFYEQYF

SEQ ID NO: 727031 - protein, 16 aa, Homo sapiens
  CDR3 for alpha chain variable domain of TCR clone 363516 (TRAV3, TRAJ21)
FAVRDIERGNFNKFYF

SEQ ID NO: 727032 - protein, 16 aa, Homo sapiens
  CDR3 for beta chain variable domain of TCR clone 363516 (TRBV12-4, TRBJ1-5)
CASSRPVGGSNQPQHF

SEQ ID NO: 727033 - protein, 16 aa, Homo sapiens
  CDR3 for alpha chain variable domain of TCR clone 363517 (TRAV21, TRAJ37)
CAVRTASSSNPGKLIF

SEQ ID NO: 727034 - protein, 13 aa, Homo sapiens
  CDR3 for beta chain variable domain of TCR clone 363517 (TRBV7-9, TRBJ2-5)
CASLPSGRETQYF

SEQ ID NO: 727035 - protein, 14 aa, Homo sapiens
  CDR3 for alpha chain variable domain of TCR clone 363518 (TRAV4, TRAJ9)
CLVGSGTGGVKTIF

SEQ ID NO: 727036 - protein, 14 aa, Homo sapiens
  CDR3 for beta chain variable domain of TCR clone 363518 (TRBV7-8, TRBJ2-3)
CASGLEAGTDTQYF

SEQ ID NO: 727037 - protein, 15 aa, Homo sapiens
  CDR3 for alpha chain variable domain of TCR clone 363519 (TRAV30, TRAJ57)
CGTAIPQGGSETLVF

SEQ ID NO: 727038 - protein, 13 aa, Homo sapiens
  CDR3 for beta chain variable domain of TCR clone 363519 (TRBV7-9, TRBJ1-2)
CASSPSNFWGYTF

SEQ ID NO: 727039 - protein, 10 aa, Homo sapiens
  CDR3 for alpha chain variable domain of TCR clone 363520 (TRAV12-2, TRAJ10)
CAAWTGVETH

SEQ ID NO: 727040 - protein, 13 aa, Homo sapiens
  CDR3 for beta chain variable domain of TCR clone 363520 (TRBV12-4, TRBJ1-2)
CASSLRQGKGYTF

SEQ ID NO: 727041 - protein, 12 aa, Homo sapiens
  CDR3 for alpha chain variable domain of TCR clone 363521 (TRAV29/DV5, TRAJ34)
CAASGNTDKRIF

SEQ ID NO: 727042 - protein, 16 aa, Homo sapiens
  CDR3 for beta chain variable domain of TCR clone 363521 (TRBV12-4, TRBJ1-5)
CASRQPVEGSNQPQHF

SEQ ID NO: 727043 - protein, 16 aa, Homo sapiens
  CDR3 for alpha chain variable domain of TCR clone 363522 (TRAV17, TRAJ35)
CATAEGGIGFGNVLHC

SEQ ID NO: 727044 - protein, 12 aa, Homo sapiens
  CDR3 for beta chain variable domain of TCR clone 363522 (TRBV16, TRBJ1-2)
CASSNLGGGYTF

SEQ ID NO: 727045 - protein, 14 aa, Homo sapiens
  CDR3 for alpha chain variable domain of TCR clone 363523 (TRAV1-2, TRAJ16)
CAVNRFSDGQKLLF

SEQ ID NO: 727046 - protein, 12 aa, Homo sapiens
  CDR3 for beta chain variable domain of TCR clone 363523 (TRBV7-9, TRBJ2-1)
VASYPSYNEQFF

SEQ ID NO: 727047 - protein, 14 aa, Homo sapiens
  CDR3 for alpha chain variable domain of TCR clone 363524 (TRAV25, TRAJ22)
CAVRPSGSARQLTF

SEQ ID NO: 727048 - protein, 16 aa, Homo sapiens
  CDR3 for beta chain variable domain of TCR clone 363524 (TRBV4-2, TRBJ1-1)
CASSPSPGRAAPEAFF

SEQ ID NO: 727049 - protein, 11 aa, Homo sapiens
  CDR3 for alpha chain variable domain of TCR clone 363525 (TRAV1-1, TRAJ23)
CAVRPGGKLIF

SEQ ID NO: 727050 - protein, 12 aa, Homo sapiens
  CDR3 for beta chain variable domain of TCR clone 363525 (TRBV20-1, TRBJ2-7)
CSAGLKMGEQYF

SEQ ID NO: 727051 - protein, 14 aa, Homo sapiens
  CDR3 for alpha chain variable domain of TCR clone 363526 (TRAV12-3, TRAJ10)
SHLPLTGGGNKLTF

SEQ ID NO: 727052 - protein, 16 aa, Homo sapiens
  CDR3 for beta chain variable domain of TCR clone 363526 (TRBV29-1, TRBJ2-7)
CSVDVVGTSGSYEQYF

SEQ ID NO: 727053 - protein, 15 aa, Homo sapiens
  CDR3 for alpha chain variable domain of TCR clone 363527 (TRAV8-3, TRAJ11)
CAVGLLNSGYSTLTF

SEQ ID NO: 727054 - protein, 15 aa, Homo sapiens
  CDR3 for beta chain variable domain of TCR clone 363527 (TRBV28, TRBJ2-5)
CASSPGQGSIETQYF

SEQ ID NO: 727055 - protein, 16 aa, Homo sapiens
  CDR3 for alpha chain variable domain of TCR clone 363528 (TRAV3, TRAJ23)
CAVKIGIYNQGGKLIF

SEQ ID NO: 727056 - protein, 14 aa, Homo sapiens
  CDR3 for beta chain variable domain of TCR clone 363528 (TRBV7-6, TRBJ2-3)
CASSLGTVTDTQYV

SEQ ID NO: 727057 - protein, 14 aa, Homo sapiens
  CDR3 for alpha chain variable domain of TCR clone 363529 (TRAV35, TRAJ22)
CAGLRPGSARPLTF

SEQ ID NO: 727058 - protein, 14 aa, Homo sapiens
  CDR3 for beta chain variable domain of TCR clone 363529 (TRBV11-3, TRBJ2-3)
CASSSGQGPDTQYF

SEQ ID NO: 727059 - protein, 15 aa, Homo sapiens
  CDR3 for alpha chain variable domain of TCR clone 363530 (TRAV26-1, TRAJ29)
CMVRVTNSGNTPLVF

SEQ ID NO: 727060 - protein, 12 aa, Homo sapiens
  CDR3 for beta chain variable domain of TCR clone 363530 (TRBV20-1, TRBJ1-2)
CSASWQGYGYTF

SEQ ID NO: 727061 - protein, 17 aa, Homo sapiens
  CDR3 for alpha chain variable domain of TCR clone 363531 (TRAV3, TRAJ6)
CAVRDGPRAGGSYIPTF

SEQ ID NO: 727062 - protein, 14 aa, Homo sapiens
  CDR3 for beta chain variable domain of TCR clone 363531 (TRBV7-2, TRBJ2-7)
CASSPKTSFYEQYS

SEQ ID NO: 727063 - protein, 12 aa, Homo sapiens
  CDR3 for alpha chain variable domain of TCR clone 363532 (TRAV12-2, TRAJ40)
CAGASGTYKYIF

SEQ ID NO: 727064 - protein, 14 aa, Homo sapiens
  CDR3 for beta chain variable domain of TCR clone 363532 (TRBV6-6, TRBJ2-7)
CASQGQGLVVEQYF

SEQ ID NO: 727065 - protein, 11 aa, Homo sapiens
  CDR3 for alpha chain variable domain of TCR clone 363533 (TRAV4, TRAJ31)
CLVGDNARLMF

SEQ ID NO: 727066 - protein, 14 aa, Homo sapiens
  CDR3 for beta chain variable domain of TCR clone 363533 (TRBV2, TRBJ2-7)
CASSLTSGGYEQYF

SEQ ID NO: 727067 - protein, 15 aa, Homo sapiens
  CDR3 for alpha chain variable domain of TCR clone 363534 (TRAV26-1, TRAJ29)
CIVRVEGSGNTPLVF

SEQ ID NO: 727068 - protein, 14 aa, Homo sapiens
  CDR3 for beta chain variable domain of TCR clone 363534 (TRBV23-1, TRBJ2-5)
CAGSFLRSQETQYF

SEQ ID NO: 727069 - protein, 11 aa, Homo sapiens
  CDR3 for alpha chain variable domain of TCR clone 363535 (TRAV2, TRAJ33)
CAVDSNYQLIW

SEQ ID NO: 727070 - protein, 17 aa, Homo sapiens
  CDR3 for beta chain variable domain of TCR clone 363535 (TRBV5-4, TRBJ2-3)
CISVPAVLTASTDTQYF

SEQ ID NO: 727071 - protein, 15 aa, Homo sapiens
  CDR3 for alpha chain variable domain of TCR clone 363536 (TRAV25, TRAJ52)
CAGTSGGTSYGKLTF

SEQ ID NO: 727072 - protein, 14 aa, Homo sapiens
  CDR3 for beta chain variable domain of TCR clone 363536 (TRBV4-2, TRBJ2-1)
CASGLDRAYNEQFF

SEQ ID NO: 727073 - protein, 13 aa, Homo sapiens
  CDR3 for alpha chain variable domain of TCR clone 363537 (TRAV8-6, TRAJ7)
CAVSEYGNNRLAF

SEQ ID NO: 727074 - protein, 15 aa, Homo sapiens
  CDR3 for beta chain variable domain of TCR clone 363537 (TRBV2, TRBJ2-1)
CASSELAGSYNEQFF

SEQ ID NO: 727075 - protein, 16 aa, Homo sapiens
  CDR3 for alpha chain variable domain of TCR clone 363538 (TRAV21, TRAJ45)
CAVTMYSGGGADGLTF

SEQ ID NO: 727076 - protein, 16 aa, Homo sapiens
  CDR3 for beta chain variable domain of TCR clone 363538 (TRBV24-1, TRBJ2-3)
CATSDAISGSTDTQYF

SEQ ID NO: 727077 - protein, 14 aa, Homo sapiens
  CDR3 for alpha chain variable domain of TCR clone 363539 (TRAV9-2, TRAJ39)
CALYIYIAGNMLTF

SEQ ID NO: 727078 - protein, 15 aa, Homo sapiens
  CDR3 for beta chain variable domain of TCR clone 363539 (TRBV28, TRBJ1-3)
CASSMGWASGNTIYF

SEQ ID NO: 727079 - protein, 16 aa, Homo sapiens
  CDR3 for alpha chain variable domain of TCR clone 363540 (TRAV17, TRAJ9)
CATGEWGGTGGFQTIF

SEQ ID NO: 727080 - protein, 12 aa, Homo sapiens
  CDR3 for beta chain variable domain of TCR clone 363540 (TRBV11-2, TRBJ2-1)
CASSPGNNEQFF

SEQ ID NO: 727081 - protein, 14 aa, Homo sapiens
  CDR3 for alpha chain variable domain of TCR clone 363541 (TRAV12-2, TRAJ13)
CAVKKTGGYQKVTF

SEQ ID NO: 727082 - protein, 13 aa, Homo sapiens
  CDR3 for beta chain variable domain of TCR clone 363541 (TRBV19, TRBJ1-3)
CASRLSLGNTIYF

SEQ ID NO: 727083 - protein, 13 aa, Homo sapiens
  CDR3 for alpha chain variable domain of TCR clone 363542 (TRAV20, TRAJ48)
CAVQGVGHEKLTF

SEQ ID NO: 727084 - protein, 14 aa, Homo sapiens
  CDR3 for beta chain variable domain of TCR clone 363542 (TRBV27, TRBJ2-7)
CASSIRDGPYEQYF

SEQ ID NO: 727085 - protein, 17 aa, Homo sapiens
  CDR3 for alpha chain variable domain of TCR clone 363543 (TRAV26-1, TRAJ28)
CIVRALYSGAGSYQLTF

SEQ ID NO: 727086 - protein, 12 aa, Homo sapiens
  CDR3 for beta chain variable domain of TCR clone 363543 (TRBV12-4, TRBJ2-1)
CASRQMENEQFF

SEQ ID NO: 727087 - protein, 14 aa, Homo sapiens
  CDR3 for alpha chain variable domain of TCR clone 363544 (TRAV35, TRAJ22)
CAGLRPGSARQLTF

SEQ ID NO: 727088 - protein, 14 aa, Homo sapiens
  CDR3 for beta chain variable domain of TCR clone 363544 (TRBV7-2, TRBJ2-3)
CASSQTGSSYTQYF

SEQ ID NO: 727089 - protein, 12 aa, Homo sapiens
  CDR3 for alpha chain variable domain of TCR clone 363545 (TRAV4, TRAJ26)
CLVGDYGQNFVF

SEQ ID NO: 727090 - protein, 14 aa, Homo sapiens
  CDR3 for beta chain variable domain of TCR clone 363545 (TRBV27, TRBJ1-2)
CASSLGRTNYGYTF

SEQ ID NO: 727091 - protein, 12 aa, Homo sapiens
  CDR3 for alpha chain variable domain of TCR clone 363546 (TRAV13-1, TRAJ9)
CASHTGGFKTIF

SEQ ID NO: 727092 - protein, 18 aa, Homo sapiens
  CDR3 for beta chain variable domain of TCR clone 363546 (TRBV11-2, TRBJ2-3)
CSSSLGGASRGAPNTQYF

SEQ ID NO: 727093 - protein, 14 aa, Homo sapiens
  CDR3 for alpha chain variable domain of TCR clone 363547 (TRAV2, TRAJ9)
CAVEDRSGGFKTIF

SEQ ID NO: 727094 - protein, 15 aa, Homo sapiens
  CDR3 for beta chain variable domain of TCR clone 363547 (TRBV12-4, TRBJ2-7)
CASSQRTSGNYEQYF

SEQ ID NO: 727095 - protein, 19 aa, Homo sapiens
  CDR3 for alpha chain variable domain of TCR clone 363548 (TRAV12-3, TRAJ27)
CAMANAGKSTCGDRTTLTV

SEQ ID NO: 727096 - protein, 13 aa, Homo sapiens
  CDR3 for beta chain variable domain of TCR clone 363548 (TRBV20-1, TRBJ1-1)
CSARVGGNTEAFF

SEQ ID NO: 727097 - protein, 13 aa, Homo sapiens
  CDR3 for alpha chain variable domain of TCR clone 363549 (TRAV1-2, TRAJ9)
CAALNTGGFKTIF

SEQ ID NO: 727098 - protein, 12 aa, Homo sapiens
  CDR3 for beta chain variable domain of TCR clone 363549 (TRBV12-4, TRBJ2-1)
CASSPGRNEQFF

SEQ ID NO: 727099 - protein, 11 aa, Homo sapiens
  CDR3 for alpha chain variable domain of TCR clone 363550 (TRAV35, TRAJ30)
CAPGGDDKVIF

SEQ ID NO: 727100 - protein, 16 aa, Homo sapiens
  CDR3 for beta chain variable domain of TCR clone 363550 (TRBV7-6, TRBJ2-1)
CIAVPAAWGGADEQFF

SEQ ID NO: 727101 - protein, 13 aa, Homo sapiens
  CDR3 for alpha chain variable domain of TCR clone 363551 (TRAV21, TRAJ37)
CAVGEINTGKLIF

SEQ ID NO: 727102 - protein, 15 aa, Homo sapiens
  CDR3 for beta chain variable domain of TCR clone 363551 (TRBV27, TRBJ2-1)
CASSNGGGSSNEQFF

SEQ ID NO: 727103 - protein, 13 aa, Homo sapiens
  CDR3 for alpha chain variable domain of TCR clone 363552 (TRAV27, TRAJ17)
CAGAATAGNKLTF

SEQ ID NO: 727104 - protein, 15 aa, Homo sapiens
  CDR3 for beta chain variable domain of TCR clone 363552 (TRBV5-1, TRBJ2-3)
CASRNQARSTDTQYF

SEQ ID NO: 727105 - protein, 14 aa, Homo sapiens
  CDR3 for alpha chain variable domain of TCR clone 363553 (TRAV1-2, TRAJ16)
CAVNRFSDGQKLLF

SEQ ID NO: 727106 - protein, 17 aa, Homo sapiens
  CDR3 for beta chain variable domain of TCR clone 363553 (TRBV7-8, TRBJ2-6)
CASSAGTGGAGDNVLTF

SEQ ID NO: 727107 - protein, 16 aa, Homo sapiens
  CDR3 for alpha chain variable domain of TCR clone 363554 (TRAV3, TRAJ42)
CAVRDIEGGSQGNLIF

SEQ ID NO: 727108 - protein, 17 aa, Homo sapiens
  CDR3 for beta chain variable domain of TCR clone 363554 (TRBV7-8, TRBJ2-6)
CASSAGTGGAGANVLTF

SEQ ID NO: 727109 - protein, 13 aa, Homo sapiens
  CDR3 for alpha chain variable domain of TCR clone 363555 (TRAV8-3, TRAJ47)
CDVSMEYGNRLVF

SEQ ID NO: 727110 - protein, 14 aa, Homo sapiens
  CDR3 for beta chain variable domain of TCR clone 363555 (TRBV2, TRBJ1-5)
CASSGTGFNQPQHF

SEQ ID NO: 727111 - protein, 14 aa, Homo sapiens
  CDR3 for alpha chain variable domain of TCR clone 363556 (TRAV17, TRAJ32)
CATDPGGATNKLSF

SEQ ID NO: 727112 - protein, 14 aa, Homo sapiens
  CDR3 for beta chain variable domain of TCR clone 363556 (TRBV2, TRBJ1-5)
CASSENRGGQPQHF

SEQ ID NO: 727113 - protein, 13 aa, Homo sapiens
  CDR3 for alpha chain variable domain of TCR clone 363557 (TRAV1-2, TRAJ31)
CAVRGYSNARLMF

SEQ ID NO: 727114 - protein, 15 aa, Homo sapiens
  CDR3 for beta chain variable domain of TCR clone 363557 (TRBV5-7, TRBJ2-7)
CASSLGPGRGHEQYF

SEQ ID NO: 727115 - protein, 14 aa, Homo sapiens
  CDR3 for alpha chain variable domain of TCR clone 363558 (TRAV8-3, TRAJ39)
CAVGANNSGNMLTF

SEQ ID NO: 727116 - protein, 15 aa, Homo sapiens
  CDR3 for beta chain variable domain of TCR clone 363558 (TRBV4-3, TRBJ1-1)
CASSQELGRGTEAFF

SEQ ID NO: 727117 - protein, 15 aa, Homo sapiens
  CDR3 for alpha chain variable domain of TCR clone 363559 (TRAV3, TRAJ4)
CAQNMFSGGYNKLIF

SEQ ID NO: 727118 - protein, 16 aa, Homo sapiens
  CDR3 for beta chain variable domain of TCR clone 363559 (TRBV3-1, TRBJ1-6)
CARSQEFQGSYSPLHF

SEQ ID NO: 727119 - protein, 14 aa, Homo sapiens
  CDR3 for alpha chain variable domain of TCR clone 363560 (TRAV26-1, TRAJ38)
CIADNAGNNRKLLW

SEQ ID NO: 727120 - protein, 13 aa, Homo sapiens
  CDR3 for beta chain variable domain of TCR clone 363560 (TRBV7-9, TRBJ1-2)
CASSLKQNYGDSF

SEQ ID NO: 727121 - protein, 14 aa, Homo sapiens
  CDR3 for alpha chain variable domain of TCR clone 363561 (TRAV35, TRAJ24)
CAGPRRDSWGKLQF

SEQ ID NO: 727122 - protein, 12 aa, Homo sapiens
  CDR3 for beta chain variable domain of TCR clone 363561 (TRBV12-4, TRBJ2-3)
CVSSLGQDTQYF

SEQ ID NO: 727123 - protein, 14 aa, Homo sapiens
  CDR3 for alpha chain variable domain of TCR clone 363562 (TRAV20, TRAJ42)
CAVQAGGKQGNLIF

SEQ ID NO: 727124 - protein, 14 aa, Homo sapiens
  CDR3 for beta chain variable domain of TCR clone 363562 (TRBV28, TRBJ1-2)
CASRIQGANYGYTF

SEQ ID NO: 727125 - protein, 17 aa, Homo sapiens
  CDR3 for alpha chain variable domain of TCR clone 363563 (TRAV3, TRAJ42)
CAVIDRDYGGSQGNLIF

SEQ ID NO: 727126 - protein, 14 aa, Homo sapiens
  CDR3 for beta chain variable domain of TCR clone 363563 (TRBV2, TRBJ1-6)
CALSPSDPRSPLHF

SEQ ID NO: 727127 - protein, 14 aa, Homo sapiens
  CDR3 for alpha chain variable domain of TCR clone 363564 (TRAV9-2, TRAJ39)
CALYIYNSGNMLTF

SEQ ID NO: 727128 - protein, 15 aa, Homo sapiens
  CDR3 for beta chain variable domain of TCR clone 363564 (TRBV2, TRBJ2-4)
CASSGTNLAKNIQYF

SEQ ID NO: 727129 - protein, 15 aa, Homo sapiens
  CDR3 for alpha chain variable domain of TCR clone 363565 (TRAV8-3, TRAJ32)
CAVGPYGGATNKLIF

SEQ ID NO: 727130 - protein, 14 aa, Homo sapiens
  CDR3 for beta chain variable domain of TCR clone 363565 (TRBV29-1, TRBJ2-2)
CSVLAETNTGEMFF

SEQ ID NO: 727131 - protein, 14 aa, Homo sapiens
  CDR3 for alpha chain variable domain of TCR clone 363566 (TRAV36/DV7, TRAJ44)
CCGANTGTASKLPF

SEQ ID NO: 727132 - protein, 16 aa, Homo sapiens
  CDR3 for beta chain variable domain of TCR clone 363566 (TRBV7-9, TRBJ1-2)
CASSLGFSSGEDGYTF

SEQ ID NO: 727133 - protein, 15 aa, Homo sapiens
  CDR3 for alpha chain variable domain of TCR clone 363567 (TRAV26-1, TRAJ17)
CIVSSFKAAGNKLTF

SEQ ID NO: 727134 - protein, 14 aa, Homo sapiens
  CDR3 for beta chain variable domain of TCR clone 363567 (TRBV6-1, TRBJ2-2)
CASTWHGNTGELFF

SEQ ID NO: 727135 - protein, 15 aa, Homo sapiens
  CDR3 for alpha chain variable domain of TCR clone 363568 (TRAV3, TRAJ9)
CAVRARNTGGFKTIF

SEQ ID NO: 727136 - protein, 12 aa, Homo sapiens
  CDR3 for beta chain variable domain of TCR clone 363568 (TRBV11-2, TRBJ2-7)
CASSLPTYEQSF

SEQ ID NO: 727137 - protein, 13 aa, Homo sapiens
  CDR3 for alpha chain variable domain of TCR clone 363569 (TRAV12-3, TRAJ9)
CAMRNTGGFKTIF

SEQ ID NO: 727138 - protein, 16 aa, Homo sapiens
  CDR3 for beta chain variable domain of TCR clone 363569 (TRBV19, TRBJ2-1)
CASSIDGSFAYNEQFS

SEQ ID NO: 727139 - protein, 14 aa, Homo sapiens
  CDR3 for alpha chain variable domain of TCR clone 363570 (TRAV12-3, TRAJ43)
CAMSLGGAGTRLTV

SEQ ID NO: 727140 - protein, 20 aa, Homo sapiens
  CDR3 for beta chain variable domain of TCR clone 363570 (TRBV7-8, TRBJ2-1)
CASSLAHRLAGVRSYNEQFF

SEQ ID NO: 727141 - protein, 14 aa, Homo sapiens
  CDR3 for alpha chain variable domain of TCR clone 363571 (TRAV12-3, TRAJ10)
SHLPLTGGGIKLTF

SEQ ID NO: 727142 - protein, 13 aa, Homo sapiens
  CDR3 for beta chain variable domain of TCR clone 363571 (TRBV7-9, TRBJ2-3)
CASSPGSTDTQYF

SEQ ID NO: 727143 - protein, 13 aa, Homo sapiens
  CDR3 for alpha chain variable domain of TCR clone 363572 (TRAV12-3, TRAJ13)
CAMSSGGYQKVTF

SEQ ID NO: 727144 - protein, 18 aa, Homo sapiens
  CDR3 for beta chain variable domain of TCR clone 363572 (TRBV5-1, TRBJ1-6)
CASSLVETGVGGNSPLHF

SEQ ID NO: 727145 - protein, 12 aa, Homo sapiens
  CDR3 for alpha chain variable domain of TCR clone 363573 (TRAV26-1, TRAJ13)
CIVSRGYQKVTF

SEQ ID NO: 727146 - protein, 15 aa, Homo sapiens
  CDR3 for beta chain variable domain of TCR clone 363573 (TRBV2, TRBJ2-7)
CASSENRQGKGEQYF

SEQ ID NO: 727147 - protein, 11 aa, Homo sapiens
  CDR3 for alpha chain variable domain of TCR clone 363574 (TRAV2, TRAJ13)
CASGGYQKVTF

SEQ ID NO: 727148 - protein, 14 aa, Homo sapiens
  CDR3 for beta chain variable domain of TCR clone 363574 (TRBV7-2, TRBJ1-2)
CASSQTGSTYGYSF

SEQ ID NO: 727149 - protein, 15 aa, Homo sapiens
  CDR3 for alpha chain variable domain of TCR clone 363575 (TRAV3, TRAJ23)
CAVRDRGNQGGKPIF

SEQ ID NO: 727150 - protein, 15 aa, Homo sapiens
  CDR3 for beta chain variable domain of TCR clone 363575 (TRBV7-3, TRBJ2-1)
CQQLAPSGSYNEQFF

SEQ ID NO: 727151 - protein, 15 aa, Homo sapiens
  CDR3 for alpha chain variable domain of TCR clone 363576 (TRAV3, TRAJ27)
CAVRDPLTNASKSTF

SEQ ID NO: 727152 - protein, 15 aa, Homo sapiens
  CDR3 for beta chain variable domain of TCR clone 363576 (TRBV28, TRBJ2-1)
CASSIIAGGRSEQFF

SEQ ID NO: 727153 - protein, 17 aa, Homo sapiens
  CDR3 for alpha chain variable domain of TCR clone 363577 (TRAV23/DV6, TRAJ57)
CAASSTLSQGGSEKLVF

SEQ ID NO: 727154 - protein, 11 aa, Homo sapiens
  CDR3 for beta chain variable domain of TCR clone 363577 (TRBV25-1, TRBJ2-3)
CASTATDTQYF

SEQ ID NO: 727155 - protein, 14 aa, Homo sapiens
  CDR3 for alpha chain variable domain of TCR clone 363578 (TRAV1-2, TRAJ16)
CAVNRFSDGQKLLF

SEQ ID NO: 727156 - protein, 14 aa, Homo sapiens
  CDR3 for beta chain variable domain of TCR clone 363578 (TRBV19, TRBJ1-1)
CASSRDRDATEAFF

SEQ ID NO: 727157 - protein, 11 aa, Homo sapiens
  CDR3 for alpha chain variable domain of TCR clone 363579 (TRAV8-3, TRAJ49)
CAVNTGNQFYF

SEQ ID NO: 727158 - protein, 16 aa, Homo sapiens
  CDR3 for beta chain variable domain of TCR clone 363579 (TRBV5-1, TRBJ2-3)
CASSLGLAVYTDTQYF

SEQ ID NO: 727159 - protein, 16 aa, Homo sapiens
  CDR3 for alpha chain variable domain of TCR clone 363580 (TRAV8-3, TRAJ13)
CAVGVYPSGGYQKVTF

SEQ ID NO: 727160 - protein, 15 aa, Homo sapiens
  CDR3 for beta chain variable domain of TCR clone 363580 (TRBV5-1, TRBJ2-3)
CASSVTSGSTDTQYF

SEQ ID NO: 727161 - protein, 14 aa, Homo sapiens
  CDR3 for alpha chain variable domain of TCR clone 363581 (TRAV1-2, TRAJ29)
CAVRELTSAKPLVF

SEQ ID NO: 727162 - protein, 14 aa, Homo sapiens
  CDR3 for beta chain variable domain of TCR clone 363581 (TRBV3-1, TRBJ2-5)
CASSQGPDQETQYF

SEQ ID NO: 727163 - protein, 11 aa, Homo sapiens
  CDR3 for alpha chain variable domain of TCR clone 363582 (TRAV12-2, TRAJ49)
CALQGGNQFYF

SEQ ID NO: 727164 - protein, 15 aa, Homo sapiens
  CDR3 for beta chain variable domain of TCR clone 363582 (TRBV6-6, TRBJ2-7)
CASSYSYGGSYEQYF

SEQ ID NO: 727165 - protein, 15 aa, Homo sapiens
  CDR3 for alpha chain variable domain of TCR clone 363583 (TRAV35, TRAJ53)
CAGQDSGGSNYKLTF

SEQ ID NO: 727166 - protein, 17 aa, Homo sapiens
  CDR3 for beta chain variable domain of TCR clone 363583 (TRBV28, TRBJ2-7)
CASSPLHRASGVYEQYF

SEQ ID NO: 727167 - protein, 14 aa, Homo sapiens
  CDR3 for alpha chain variable domain of TCR clone 363584 (TRAV1-2, TRAJ29)
CAVRELTSATPLVF

SEQ ID NO: 727168 - protein, 14 aa, Homo sapiens
  CDR3 for beta chain variable domain of TCR clone 363584 (TRBV7-9, TRBJ2-2)
CASSGLADTGELFF

SEQ ID NO: 727169 - protein, 12 aa, Homo sapiens
  CDR3 for alpha chain variable domain of TCR clone 363585 (TRAV12-3, TRAJ17)
CAMTLTGNKQTF

SEQ ID NO: 727170 - protein, 15 aa, Homo sapiens
  CDR3 for beta chain variable domain of TCR clone 363585 (TRBV20-1, TRBJ2-7)
CSARDRVSGMDAQYF

SEQ ID NO: 727171 - protein, 17 aa, Homo sapiens
  CDR3 for alpha chain variable domain of TCR clone 363586 (TRAV13-1, TRAJ52)
CAAGRNAGGTSYGKLTF

SEQ ID NO: 727172 - protein, 12 aa, Homo sapiens
  CDR3 for beta chain variable domain of TCR clone 363586 (TRBV29-1, TRBJ1-3)
RSTRDSGNTIYF

SEQ ID NO: 727173 - protein, 14 aa, Homo sapiens
  CDR3 for alpha chain variable domain of TCR clone 363587 (TRAV1-1, TRAJ35)
CAVRSIGFGNVLHC

SEQ ID NO: 727174 - protein, 16 aa, Homo sapiens
  CDR3 for beta chain variable domain of TCR clone 363587 (TRBV4-2, TRBJ1-5)
CASSQGQGASNQPQHF

SEQ ID NO: 727175 - protein, 19 aa, Homo sapiens
  CDR3 for alpha chain variable domain of TCR clone 363588 (TRAV8-3, TRAJ8)
LSTSVLWDPMNTGFQKLVF

SEQ ID NO: 727176 - protein, 15 aa, Homo sapiens
  CDR3 for beta chain variable domain of TCR clone 363588 (TRBV3-1, TRBJ2-5)
CASSAKLGGPETQYF

SEQ ID NO: 727177 - protein, 14 aa, Homo sapiens
  CDR3 for alpha chain variable domain of TCR clone 363589 (TRAV17, TRAJ22)
CATSPSGSARQLTF

SEQ ID NO: 727178 - protein, 13 aa, Homo sapiens
  CDR3 for beta chain variable domain of TCR clone 363589 (TRBV10-3, TRBJ2-7)
CASKLAVNYEQYF

SEQ ID NO: 727179 - protein, 13 aa, Homo sapiens
  CDR3 for alpha chain variable domain of TCR clone 363590 (TRAV27, TRAJ41)
CAGEGNSGYALNS

SEQ ID NO: 727180 - protein, 14 aa, Homo sapiens
  CDR3 for beta chain variable domain of TCR clone 363590 (TRBV7-2, TRBJ1-1)
CASSVLTGTTEAFF

SEQ ID NO: 727181 - protein, 13 aa, Homo sapiens
  CDR3 for alpha chain variable domain of TCR clone 363591 (TRAV8-6, TRAJ49)
CAVITNTGNQFYF

SEQ ID NO: 727182 - protein, 14 aa, Homo sapiens
  CDR3 for beta chain variable domain of TCR clone 363591 (TRBV5-1, TRBJ2-7)
CASSRGESLYGQYF

SEQ ID NO: 727183 - protein, 15 aa, Homo sapiens
  CDR3 for alpha chain variable domain of TCR clone 363592 (TRAV8-3, TRAJ40)
CAAPSLGSRTYKHIF

SEQ ID NO: 727184 - protein, 16 aa, Homo sapiens
  CDR3 for beta chain variable domain of TCR clone 363592 (TRBV7-3, TRBJ2-3)
CASSLSGYRPEDTQYF

SEQ ID NO: 727185 - protein, 12 aa, Homo sapiens
  CDR3 for alpha chain variable domain of TCR clone 363593 (TRAV27, TRAJ9)
CAGESGGFKTIF

SEQ ID NO: 727186 - protein, 14 aa, Homo sapiens
  CDR3 for beta chain variable domain of TCR clone 363593 (TRBV11-2, TRBJ2-3)
CASSRLARTDTQYF

SEQ ID NO: 727187 - protein, 13 aa, Homo sapiens
  CDR3 for alpha chain variable domain of TCR clone 363594 (TRAV13-2, TRAJ53)
CAETMASNYKLTF

SEQ ID NO: 727188 - protein, 13 aa, Homo sapiens
  CDR3 for beta chain variable domain of TCR clone 363594 (TRBV4-1, TRBJ2-2)
CASSQENTGELFF

SEQ ID NO: 727189 - protein, 13 aa, Homo sapiens
  CDR3 for alpha chain variable domain of TCR clone 363595 (TRAV23/DV6, TRAJ20)
CAAGGFHDYKLSF

SEQ ID NO: 727190 - protein, 12 aa, Homo sapiens
  CDR3 for beta chain variable domain of TCR clone 363595 (TRBV7-9, TRBJ1-2)
CASSLGHYGYTF

SEQ ID NO: 727191 - protein, 14 aa, Homo sapiens
  CDR3 for alpha chain variable domain of TCR clone 363596 (TRAV2, TRAJ22)
CAVEDSGSARQLTF

SEQ ID NO: 727192 - protein, 15 aa, Homo sapiens
  CDR3 for beta chain variable domain of TCR clone 363596 (TRBV28, TRBJ1-2)
CASSLPVGHGDGYTL

SEQ ID NO: 727193 - protein, 14 aa, Homo sapiens
  CDR3 for alpha chain variable domain of TCR clone 363597 (TRAV12-2, TRAJ9)
CAVNMEGGGFKTIF

SEQ ID NO: 727194 - protein, 15 aa, Homo sapiens
  CDR3 for beta chain variable domain of TCR clone 363597 (TRBV11-1, TRBJ2-7)
CASSLNYGASYEQYF

SEQ ID NO: 727195 - protein, 15 aa, Homo sapiens
  CDR3 for alpha chain variable domain of TCR clone 363598 (TRAV8-3, TRAJ7)
CAVGSISYGNNRLAF

SEQ ID NO: 727196 - protein, 15 aa, Homo sapiens
  CDR3 for beta chain variable domain of TCR clone 363598 (TRBV9, TRBJ1-6)
YASSVAGTGDSPLHF

SEQ ID NO: 727197 - protein, 17 aa, Homo sapiens
  CDR3 for alpha chain variable domain of TCR clone 363599 (TRAV3, TRAJ6)
CAVRDGPRAGGSYIPPF

SEQ ID NO: 727198 - protein, 12 aa, Homo sapiens
  CDR3 for beta chain variable domain of TCR clone 363599 (TRBV4-3, TRBJ2-1)
CASSLSGYEQFF

SEQ ID NO: 727199 - protein, 13 aa, Homo sapiens
  CDR3 for alpha chain variable domain of TCR clone 363600 (TRAV21, TRAJ57)
CAVTQGGSEKLVF

SEQ ID NO: 727200 - protein, 16 aa, Homo sapiens
  CDR3 for beta chain variable domain of TCR clone 363600 (TRBV11-2, TRBJ2-1)
CASSVTADFSYNEQFF

SEQ ID NO: 727201 - protein, 13 aa, Homo sapiens
  CDR3 for alpha chain variable domain of TCR clone 363601 (TRAV21, TRAJ27)
CPARPGNAGKSTF

SEQ ID NO: 727202 - protein, 14 aa, Homo sapiens
  CDR3 for beta chain variable domain of TCR clone 363601 (TRBV7-6, TRBJ2-3)
CASSLGTVTDTQYF

SEQ ID NO: 727203 - protein, 13 aa, Homo sapiens
  CDR3 for alpha chain variable domain of TCR clone 363602 (TRAV2, TRAJ29)
CPAGNSGNTPLVF

SEQ ID NO: 727204 - protein, 16 aa, Homo sapiens
  CDR3 for beta chain variable domain of TCR clone 363602 (TRBV7-9, TRBJ1-2)
CASSPGGGAINYGYTF

SEQ ID NO: 727205 - protein, 15 aa, Homo sapiens
  CDR3 for alpha chain variable domain of TCR clone 363603 (TRAV14/DV4, TRAJ10)
CAMRELTGGGNKLNF

SEQ ID NO: 727206 - protein, 15 aa, Homo sapiens
  CDR3 for beta chain variable domain of TCR clone 363603 (TRBV7-9, TRBJ1-4)
CASSRTGGFNEKLFF

SEQ ID NO: 727207 - protein, 16 aa, Homo sapiens
  CDR3 for alpha chain variable domain of TCR clone 363604 (TRAV23/DV6, TRAJ9)
CAASIGGNTGGFKTIF

SEQ ID NO: 727208 - protein, 16 aa, Homo sapiens
  CDR3 for beta chain variable domain of TCR clone 363604 (TRBV19, TRBJ2-2)
CASSFPGQGLAGELFF

SEQ ID NO: 727209 - protein, 15 aa, Homo sapiens
  CDR3 for alpha chain variable domain of TCR clone 363605 (TRAV13-1, TRAJ50)
CAAKGSETSYDKVIF

SEQ ID NO: 727210 - protein, 18 aa, Homo sapiens
  CDR3 for beta chain variable domain of TCR clone 363605 (TRBV6-6, TRBJ1-5)
CASNRGWDPTGSNQPQHF

SEQ ID NO: 727211 - protein, 14 aa, Homo sapiens
  CDR3 for alpha chain variable domain of TCR clone 363606 (TRAV1-1, TRAJ27)
CAVIYNTNAGKSTF

SEQ ID NO: 727212 - protein, 16 aa, Homo sapiens
  CDR3 for beta chain variable domain of TCR clone 363606 (TRBV27, TRBJ2-7)
CASSSERRDSAYEQYF

SEQ ID NO: 727213 - protein, 20 aa, Homo sapiens
  CDR3 for alpha chain variable domain of TCR clone 363607 (TRAV13-1, )
CAASPMDIQNPDPAVYQLRD

SEQ ID NO: 727214 - protein, 13 aa, Homo sapiens
  CDR3 for beta chain variable domain of TCR clone 363607 (TRBV20-1, TRBJ2-2)
CSASAAGIGELFF

SEQ ID NO: 727215 - protein, 13 aa, Homo sapiens
  CDR3 for alpha chain variable domain of TCR clone 363608 (TRAV13-2, TRAJ48)
CAEMDFGNEKLTF

SEQ ID NO: 727216 - protein, 17 aa, Homo sapiens
  CDR3 for beta chain variable domain of TCR clone 363608 (TRBV2, TRBJ2-1)
CASSRNSLLAGGDEQFF

SEQ ID NO: 727217 - protein, 15 aa, Homo sapiens
  CDR3 for alpha chain variable domain of TCR clone 363609 (TRAV12-3, TRAJ27)
CAMRAYNTNAAKSNF

SEQ ID NO: 727218 - protein, 13 aa, Homo sapiens
  CDR3 for beta chain variable domain of TCR clone 363609 (TRBV11-2, TRBJ2-5)
CASSRGPSETQYF

SEQ ID NO: 727219 - protein, 14 aa, Homo sapiens
  CDR3 for alpha chain variable domain of TCR clone 363610 (TRAV12-2, TRAJ53)
CAVKGGGSNYKLTF

SEQ ID NO: 727220 - protein, 14 aa, Homo sapiens
  CDR3 for beta chain variable domain of TCR clone 363610 (TRBV12-5, TRBJ2-5)
CASGSRTHQETQYF

SEQ ID NO: 727221 - protein, 15 aa, Homo sapiens
  CDR3 for alpha chain variable domain of TCR clone 363611 (TRAV17, TRAJ56)
CATDANTGANSKLTF

SEQ ID NO: 727222 - protein, 14 aa, Homo sapiens
  CDR3 for beta chain variable domain of TCR clone 363611 (TRBV19, TRBJ1-5)
CASSRGTGGQPQHF

SEQ ID NO: 727223 - protein, 15 aa, Homo sapiens
  CDR3 for alpha chain variable domain of TCR clone 363612 (TRAV12-3, TRAJ6)
CAMSATSGGSYIPTF

SEQ ID NO: 727224 - protein, 18 aa, Homo sapiens
  CDR3 for beta chain variable domain of TCR clone 363612 (TRBV4-2, TRBJ2-1)
CASSQQGLAASSYNEQFF

SEQ ID NO: 727225 - protein, 13 aa, Homo sapiens
  CDR3 for alpha chain variable domain of TCR clone 363613 (TRAV26-2, TRAJ43)
CILRAVNNNDMRF

SEQ ID NO: 727226 - protein, 15 aa, Homo sapiens
  CDR3 for beta chain variable domain of TCR clone 363613 (TRBV7-2, TRBJ2-1)
CASTHCTGIYNEQFF

SEQ ID NO: 727227 - protein, 14 aa, Homo sapiens
  CDR3 for alpha chain variable domain of TCR clone 363614 (TRAV12-2, TRAJ17)
CAVLFKAAGNKLTF

SEQ ID NO: 727228 - protein, 15 aa, Homo sapiens
  CDR3 for beta chain variable domain of TCR clone 363614 (TRBV4-1, TRBJ2-7)
CASVPDAGGIYEQYF

SEQ ID NO: 727229 - protein, 15 aa, Homo sapiens
  CDR3 for alpha chain variable domain of TCR clone 363615 (TRAV3, TRAJ22)
CAVRDRGGSARQLPF

SEQ ID NO: 727230 - protein, 16 aa, Homo sapiens
  CDR3 for beta chain variable domain of TCR clone 363615 (TRBV25-1, TRBJ1-1)
CASSGDRDRGRIEAFF

SEQ ID NO: 727231 - protein, 14 aa, Homo sapiens
  CDR3 for alpha chain variable domain of TCR clone 363616 (TRAV8-3, TRAJ39)
CAVGANNEGNMLTF

SEQ ID NO: 727232 - protein, 12 aa, Homo sapiens
  CDR3 for beta chain variable domain of TCR clone 363616 (TRBV28, TRBJ1-3)
CASVSSGNTIYF

SEQ ID NO: 727233 - protein, 15 aa, Homo sapiens
  CDR3 for alpha chain variable domain of TCR clone 363617 (TRAV25, TRAJ53)
CPTSNSGGSNYKLTF

SEQ ID NO: 727234 - protein, 12 aa, Homo sapiens
  CDR3 for beta chain variable domain of TCR clone 363617 (TRBV18, TRBJ2-1)
CASSSDEDEQFF

SEQ ID NO: 727235 - protein, 10 aa, Homo sapiens
  CDR3 for alpha chain variable domain of TCR clone 363618 (TRAV12-2, TRAJ20)
CAVYLYKLSF

SEQ ID NO: 727236 - protein, 16 aa, Homo sapiens
  CDR3 for beta chain variable domain of TCR clone 363618 (TRBV4-3, TRBJ1-6)
CASSAQPGGEGSPLLF

SEQ ID NO: 727237 - protein, 14 aa, Homo sapiens
  CDR3 for alpha chain variable domain of TCR clone 363619 (TRAV17, TRAJ22)
HATSPSGSARQLTF

SEQ ID NO: 727238 - protein, 15 aa, Homo sapiens
  CDR3 for beta chain variable domain of TCR clone 363619 (TRBV4-1, TRBJ2-5)
CASSQWDLYQETQYF

SEQ ID NO: 727239 - protein, 15 aa, Homo sapiens
  CDR3 for alpha chain variable domain of TCR clone 363620 (TRAV25, TRAJ52)
CAGRPGGTRYGKLTF

SEQ ID NO: 727240 - protein, 15 aa, Homo sapiens
  CDR3 for beta chain variable domain of TCR clone 363620 (TRBV7-3, TRBJ2-3)
CASSLGLTLGDTQYF

SEQ ID NO: 727241 - protein, 13 aa, Homo sapiens
  CDR3 for alpha chain variable domain of TCR clone 363621 (TRAV1-1, TRAJ13)
CAVNSGGYQKVTF

SEQ ID NO: 727242 - protein, 12 aa, Homo sapiens
  CDR3 for beta chain variable domain of TCR clone 363621 (TRBV28, TRBJ2-7)
CASSVQINEQFF

SEQ ID NO: 727243 - protein, 14 aa, Homo sapiens
  CDR3 for alpha chain variable domain of TCR clone 363622 (TRAV26-1, TRAJ54)
CIDPSQGGAQKLVF

SEQ ID NO: 727244 - protein, 15 aa, Homo sapiens
  CDR3 for beta chain variable domain of TCR clone 363622 (TRBV5-1, TRBJ2-3)
CASSVTSGSTDTQYF

SEQ ID NO: 727245 - protein, 13 aa, Homo sapiens
  CDR3 for alpha chain variable domain of TCR clone 363623 (TRAV1-1, TRAJ13)
CAVNSGGYQKVTF

SEQ ID NO: 727246 - protein, 12 aa, Homo sapiens
  CDR3 for beta chain variable domain of TCR clone 363623 (TRBV28, TRBJ2-3)
CASSVQINEQFF

SEQ ID NO: 727247 - protein, 13 aa, Homo sapiens
  CDR3 for alpha chain variable domain of TCR clone 363624 (TRAV12-1, TRAJ39)
CVVPQRAGNMLTF

SEQ ID NO: 727248 - protein, 13 aa, Homo sapiens
  CDR3 for beta chain variable domain of TCR clone 363624 (TRBV27, TRBJ2-1)
CASRTLGVGEQFL

SEQ ID NO: 727249 - protein, 18 aa, Homo sapiens
  CDR3 for alpha chain variable domain of TCR clone 363625 (TRAV8-4, TRAJ52)
CAVSDLRAGGTSYGKLTF

SEQ ID NO: 727250 - protein, 15 aa, Homo sapiens
  CDR3 for beta chain variable domain of TCR clone 363625 (TRBV12-5, TRBJ2-1)
CASGPGMRGLGEQFF

SEQ ID NO: 727251 - protein, 17 aa, Homo sapiens
  CDR3 for alpha chain variable domain of TCR clone 363626 (TRAV8-6, TRAJ58)
CAVSSWVGETRGSRLTF

SEQ ID NO: 727252 - protein, 18 aa, Homo sapiens
  CDR3 for beta chain variable domain of TCR clone 363626 (TRBV20-1, TRBJ2-6)
CSAETTTTHGSGANVLTF

SEQ ID NO: 727253 - protein, 15 aa, Homo sapiens
  CDR3 for alpha chain variable domain of TCR clone 363627 (TRAV12-3, TRAJ6)
CAMSATKGGSYLPTF

SEQ ID NO: 727254 - protein, 16 aa, Homo sapiens
  CDR3 for beta chain variable domain of TCR clone 363627 (TRBV5-1, TRBJ2-2)
CASSSYREGDTGELFF

SEQ ID NO: 727255 - protein, 12 aa, Homo sapiens
  CDR3 for alpha chain variable domain of TCR clone 363628 (TRAV12-3, TRAJ17)
CAMTLTGNKLTF

SEQ ID NO: 727256 - protein, 12 aa, Homo sapiens
  CDR3 for beta chain variable domain of TCR clone 363628 (TRBV11-2, TRBJ2-2)
CASCLPTGELFF

SEQ ID NO: 727257 - protein, 13 aa, Homo sapiens
  CDR3 for alpha chain variable domain of TCR clone 363629 (TRAV27, TRAJ16)
CAGACSDGQKLLF

SEQ ID NO: 727258 - protein, 14 aa, Homo sapiens
  CDR3 for beta chain variable domain of TCR clone 363629 (TRBV7-9, TRBJ2-2)
CASSGLADTGELFF

SEQ ID NO: 727259 - protein, 12 aa, Homo sapiens
  CDR3 for alpha chain variable domain of TCR clone 363630 (TRAV1-1, TRAJ8)
CAGGTGFQKLVF

SEQ ID NO: 727260 - protein, 15 aa, Homo sapiens
  CDR3 for beta chain variable domain of TCR clone 363630 (TRBV7-9, TRBJ1-4)
CASSRTGGFNEILFF

SEQ ID NO: 727261 - protein, 14 aa, Homo sapiens
  CDR3 for alpha chain variable domain of TCR clone 363631 (TRAV21, TRAJ45)
CAVSLGGGADGLTF

SEQ ID NO: 727262 - protein, 15 aa, Homo sapiens
  CDR3 for beta chain variable domain of TCR clone 363631 (TRBV6-1, TRBJ2-4)
CASSEAVWTINIQYF

SEQ ID NO: 727263 - protein, 11 aa, Homo sapiens
  CDR3 for alpha chain variable domain of TCR clone 363632 (TRAV16, TRAJ31)
CALFNNARLMF

SEQ ID NO: 727264 - protein, 16 aa, Homo sapiens
  CDR3 for beta chain variable domain of TCR clone 363632 (TRBV5-1, TRBJ2-2)
CASSLWDTTNTGELFF

SEQ ID NO: 727265 - protein, 13 aa, Homo sapiens
  CDR3 for alpha chain variable domain of TCR clone 363633 (TRAV26-1, TRAJ35)
CTVSRRVGEMLHC

SEQ ID NO: 727266 - protein, 17 aa, Homo sapiens
  CDR3 for beta chain variable domain of TCR clone 363633 (TRBV7-9, TRBJ2-7)
CASSFDGSRGGAYEQYF

SEQ ID NO: 727267 - protein, 16 aa, Homo sapiens
  CDR3 for alpha chain variable domain of TCR clone 363634 (TRAV14/DV4, TRAJ57)
CAMREGLDGLRADLKS

SEQ ID NO: 727268 - protein, 13 aa, Homo sapiens
  CDR3 for beta chain variable domain of TCR clone 363634 (TRBV29-1, TRBJ2-1)
CSVEGGRVNEQFF

SEQ ID NO: 727269 - protein, 16 aa, Homo sapiens
  CDR3 for alpha chain variable domain of TCR clone 363635 (TRAV1-2, TRAJ10)
CAVCGVLTGGGNKLTF

SEQ ID NO: 727270 - protein, 13 aa, Homo sapiens
  CDR3 for beta chain variable domain of TCR clone 363635 (TRBV27, TRBJ1-1)
CASSLSIGAEAFF

SEQ ID NO: 727271 - protein, 14 aa, Homo sapiens
  CDR3 for alpha chain variable domain of TCR clone 363636 (TRAV12-3, TRAJ29)
CARSPYSGNTPLVF

SEQ ID NO: 727272 - protein, 15 aa, Homo sapiens
  CDR3 for beta chain variable domain of TCR clone 363636 (TRBV27, TRBJ2-1)
CASSNGGGSSNEQFF

SEQ ID NO: 727273 - protein, 12 aa, Homo sapiens
  CDR3 for alpha chain variable domain of TCR clone 363637 (TRAV26-1, TRAJ13)
CIVSRGYQKVTF

SEQ ID NO: 727274 - protein, 14 aa, Homo sapiens
  CDR3 for beta chain variable domain of TCR clone 363637 (TRBV7-2, TRBJ2-7)
CASSPKTRFYEQYF

SEQ ID NO: 727275 - protein, 15 aa, Homo sapiens
  CDR3 for alpha chain variable domain of TCR clone 363638 (TRAV26-1, TRAJ56)
CIVRVDTGANSKLTF

SEQ ID NO: 727276 - protein, 14 aa, Homo sapiens
  CDR3 for beta chain variable domain of TCR clone 363638 (TRBV5-1, TRBJ2-7)
CASSRGESLYEQYF

SEQ ID NO: 727277 - protein, 18 aa, Homo sapiens
  CDR3 for alpha chain variable domain of TCR clone 363639 (TRAV17, TRAJ45)
CATSLDLYSGGGADGLTC

SEQ ID NO: 727278 - protein, 15 aa, Homo sapiens
  CDR3 for beta chain variable domain of TCR clone 363639 (TRBV11-2, TRBJ2-1)
CASSKNRGLIYEQFF

SEQ ID NO: 727279 - protein, 12 aa, Homo sapiens
  CDR3 for alpha chain variable domain of TCR clone 363640 (TRAV8-3, TRAJ4)
GVGSGGYNKLIF

SEQ ID NO: 727280 - protein, 14 aa, Homo sapiens
  CDR3 for beta chain variable domain of TCR clone 363640 (TRBV24-1, TRBJ1-1)
CATSIPRGDTEAFF

SEQ ID NO: 727281 - protein, 18 aa, Homo sapiens
  CDR3 for alpha chain variable domain of TCR clone 363641 (TRAV26-1, TRAJ30)
CCVLLNRQSTNRDDKIIF

SEQ ID NO: 727282 - protein, 18 aa, Homo sapiens
  CDR3 for beta chain variable domain of TCR clone 363641 (TRBV4-1, TRBJ1-5)
CASSQDPRGQGLNQPQHF

SEQ ID NO: 727283 - protein, 21 aa, Homo sapiens
  CDR3 for alpha chain variable domain of TCR clone 363642 (TRAV25, TRAJ47)
TATQTTDVGTYFWEYGNKLVF

SEQ ID NO: 727284 - protein, 12 aa, Homo sapiens
  CDR3 for beta chain variable domain of TCR clone 363642 (TRBV19, TRBJ1-4)
CASKDWPGGLFF

SEQ ID NO: 727285 - protein, 14 aa, Homo sapiens
  CDR3 for alpha chain variable domain of TCR clone 363643 (TRAV3, TRAJ48)
CAVKSNFGNEKLTF

SEQ ID NO: 727286 - protein, 16 aa, Homo sapiens
  CDR3 for beta chain variable domain of TCR clone 363643 (TRBV12-5, TRBJ2-5)
CASGPRTSGNQETQYF

SEQ ID NO: 727287 - protein, 15 aa, Homo sapiens
  CDR3 for alpha chain variable domain of TCR clone 363644 (TRAV26-1, TRAJ29)
CIVRVEGSGNTPRVF

SEQ ID NO: 727288 - protein, 13 aa, Homo sapiens
  CDR3 for beta chain variable domain of TCR clone 363644 (TRBV2, TRBJ2-7)
CASSGGIAYEQYF

SEQ ID NO: 727289 - protein, 18 aa, Homo sapiens
  CDR3 for alpha chain variable domain of TCR clone 363645 (TRAV12-2, )
CAVEDIQNPDPAVYQLRD

SEQ ID NO: 727290 - protein, 12 aa, Homo sapiens
  CDR3 for beta chain variable domain of TCR clone 363645 (TRBV12-4, TRBJ2-7)
CASSLGGYEQYF

SEQ ID NO: 727291 - protein, 13 aa, Homo sapiens
  CDR3 for alpha chain variable domain of TCR clone 363646 (TRAV12-1, TRAJ40)
CVVPTSGTYKYIF

SEQ ID NO: 727292 - protein, 16 aa, Homo sapiens
  CDR3 for beta chain variable domain of TCR clone 363646 (TRBV9, TRBJ2-1)
CASSVGGGGNYNEQFF

SEQ ID NO: 727293 - protein, 19 aa, Homo sapiens
  CDR3 for alpha chain variable domain of TCR clone 363647 (TRAV2, TRAJ20)
ILQVREADAAVYRDCKLSF

SEQ ID NO: 727294 - protein, 13 aa, Homo sapiens
  CDR3 for beta chain variable domain of TCR clone 363647 (TRBV20-1, TRBJ2-5)
CSAATELQETQYF

SEQ ID NO: 727295 - protein, 14 aa, Homo sapiens
  CDR3 for alpha chain variable domain of TCR clone 363648 (TRAV17, TRAJ13)
CATVYSGGYQKVTF

SEQ ID NO: 727296 - protein, 16 aa, Homo sapiens
  CDR3 for beta chain variable domain of TCR clone 363648 (TRBV7-8, TRBJ1-5)
CASSARRRTGTQPQHF

SEQ ID NO: 727297 - protein, 14 aa, Homo sapiens
  CDR3 for alpha chain variable domain of TCR clone 363649 (TRAV13-1, TRAJ22)
CAASYSGSARQLTF

SEQ ID NO: 727298 - protein, 18 aa, Homo sapiens
  CDR3 for beta chain variable domain of TCR clone 363649 (TRBV4-1, TRBJ1-5)
CASSQDPRGQGLNQHQHF

SEQ ID NO: 727299 - protein, 14 aa, Homo sapiens
  CDR3 for alpha chain variable domain of TCR clone 363650 (TRAV17, TRAJ35)
CATDRPGFGNGLHC

SEQ ID NO: 727300 - protein, 15 aa, Homo sapiens
  CDR3 for beta chain variable domain of TCR clone 363650 (TRBV28, TRBJ2-5)
CASSSGRVIQETQYF

SEQ ID NO: 727301 - protein, 13 aa, Homo sapiens
  CDR3 for alpha chain variable domain of TCR clone 363651 (TRAV8-6, TRAJ5)
CAVLDTGRRALTF

SEQ ID NO: 727302 - protein, 12 aa, Homo sapiens
  CDR3 for beta chain variable domain of TCR clone 363651 (TRBV7-9, TRBJ1-6)
CASRASESPLHF

SEQ ID NO: 727303 - protein, 17 aa, Homo sapiens
  CDR3 for alpha chain variable domain of TCR clone 363652 (TRAV12-2, TRAJ48)
CASNEKLTFGTGTRLTI

SEQ ID NO: 727304 - protein, 13 aa, Homo sapiens
  CDR3 for beta chain variable domain of TCR clone 363652 (TRBV7-9, TRBJ1-2)
CASSLKQNYGYTF

SEQ ID NO: 727305 - protein, 13 aa, Homo sapiens
  CDR3 for alpha chain variable domain of TCR clone 363653 (TRAV8-3, TRAJ40)
CAVVVSGTYNYIF

SEQ ID NO: 727306 - protein, 15 aa, Homo sapiens
  CDR3 for beta chain variable domain of TCR clone 363653 (TRBV7-2, TRBJ2-1)
CASRKTGSSYNEQFF

SEQ ID NO: 727307 - protein, 15 aa, Homo sapiens
  CDR3 for alpha chain variable domain of TCR clone 363654 (TRAV8-3, TRAJ27)
CGVGPSKTNAGKSTF

SEQ ID NO: 727308 - protein, 15 aa, Homo sapiens
  CDR3 for beta chain variable domain of TCR clone 363654 (TRBV7-2, TRBJ2-1)
CASSSGLAGGNEQFF

SEQ ID NO: 727309 - protein, 15 aa, Homo sapiens
  CDR3 for alpha chain variable domain of TCR clone 363655 (TRAV38-1, TRAJ37)
CPFIHGSGNTGKLIF

SEQ ID NO: 727310 - protein, 12 aa, Homo sapiens
  CDR3 for beta chain variable domain of TCR clone 363655 (TRBV7-9, TRBJ2-7)
CASSFGSYEQYF

SEQ ID NO: 727311 - protein, 10 aa, Homo sapiens
  CDR3 for alpha chain variable domain of TCR clone 363656 (TRAV12-1, TRAJ43)
CVVHNNDMRF

SEQ ID NO: 727312 - protein, 13 aa, Homo sapiens
  CDR3 for beta chain variable domain of TCR clone 363656 (TRBV12-4, TRBJ1-2)
CASSSGPTVISTF

SEQ ID NO: 727313 - protein, 13 aa, Homo sapiens
  CDR3 for alpha chain variable domain of TCR clone 363657 (TRAV23/DV6, TRAJ34)
CAAIGNNTDKLIF

SEQ ID NO: 727314 - protein, 13 aa, Homo sapiens
  CDR3 for beta chain variable domain of TCR clone 363657 (TRBV19, TRBJ2-7)
CASSIDRTYEQYF

SEQ ID NO: 727315 - protein, 18 aa, Homo sapiens
  CDR3 for alpha chain variable domain of TCR clone 363658 (TRAV21, TRAJ52)
CAVRPSPAGGTSYGNLTF

SEQ ID NO: 727316 - protein, 14 aa, Homo sapiens
  CDR3 for beta chain variable domain of TCR clone 363658 (TRBV7-8, TRBJ2-3)
CASSFKSSTDTQYF

SEQ ID NO: 727317 - protein, 20 aa, Homo sapiens
  CDR3 for alpha chain variable domain of TCR clone 363659 (TRAV4, TRAJ9)
CCVLLPRGDPNRPGGFKTIF

SEQ ID NO: 727318 - protein, 14 aa, Homo sapiens
  CDR3 for beta chain variable domain of TCR clone 363659 (TRBV20-1, TRBJ1-1)
CSAQTRIGGTEAFF

SEQ ID NO: 727319 - protein, 14 aa, Homo sapiens
  CDR3 for alpha chain variable domain of TCR clone 363660 (TRAV13-1, TRAJ44)
CAAKATGTASKLTF

SEQ ID NO: 727320 - protein, 11 aa, Homo sapiens
  CDR3 for beta chain variable domain of TCR clone 363660 (TRBV5-4, TRBJ2-3)
CASSPTDTQYF

SEQ ID NO: 727321 - protein, 10 aa, Homo sapiens
  CDR3 for alpha chain variable domain of TCR clone 363661 (TRAV8-1, TRAJ21)
CAVNGTKFYF

SEQ ID NO: 727322 - protein, 14 aa, Homo sapiens
  CDR3 for beta chain variable domain of TCR clone 363661 (TRBV7-2, TRBJ2-7)
CASSPKTSFYEQYF

SEQ ID NO: 727323 - protein, 15 aa, Homo sapiens
  CDR3 for alpha chain variable domain of TCR clone 363662 (TRAV3, TRAJ45)
CAVRTPWGGADGLTF

SEQ ID NO: 727324 - protein, 16 aa, Homo sapiens
  CDR3 for beta chain variable domain of TCR clone 363662 (TRBV6-1, TRBJ2-2)
CASIFGQGANTGELFF

SEQ ID NO: 727325 - protein, 12 aa, Homo sapiens
  CDR3 for alpha chain variable domain of TCR clone 363663 (TRAV12-3, TRAJ48)
CAIRIGNEKLTF

SEQ ID NO: 727326 - protein, 12 aa, Homo sapiens
  CDR3 for beta chain variable domain of TCR clone 363663 (TRBV13, TRBJ2-7)
CASSLQAYEQYF

SEQ ID NO: 727327 - protein, 15 aa, Homo sapiens
  CDR3 for alpha chain variable domain of TCR clone 363664 (TRAV3, TRAJ20)
CAVRDIKLSDYKLSF

SEQ ID NO: 727328 - protein, 16 aa, Homo sapiens
  CDR3 for beta chain variable domain of TCR clone 363664 (TRBV20-1, TRBJ1-4)
CSAPGQGLVTNEKLFF

SEQ ID NO: 727329 - protein, 14 aa, Homo sapiens
  CDR3 for alpha chain variable domain of TCR clone 363665 (TRAV8-3, TRAJ13)
CAVGAQEGYQKVTF

SEQ ID NO: 727330 - protein, 15 aa, Homo sapiens
  CDR3 for beta chain variable domain of TCR clone 363665 (TRBV5-1, TRBJ1-5)
CASSLAQGADQPQHF

SEQ ID NO: 727331 - protein, 13 aa, Homo sapiens
  CDR3 for alpha chain variable domain of TCR clone 363666 (TRAV8-3, TRAJ36)
CAVGATGANNLFF

SEQ ID NO: 727332 - protein, 17 aa, Homo sapiens
  CDR3 for beta chain variable domain of TCR clone 363666 (TRBV7-3, TRBJ2-3)
CASSLMKRMRGADTQYF

SEQ ID NO: 727333 - protein, 13 aa, Homo sapiens
  CDR3 for alpha chain variable domain of TCR clone 363667 (TRAV39, TRAJ49)
CAVDRNTGNQFYF

SEQ ID NO: 727334 - protein, 14 aa, Homo sapiens
  CDR3 for beta chain variable domain of TCR clone 363667 (TRBV4-1, TRBJ1-1)
CASSRSGQSCEAFF

SEQ ID NO: 727335 - protein, 15 aa, Homo sapiens
  CDR3 for alpha chain variable domain of TCR clone 363668 (TRAV17, TRAJ57)
CATGPSQGGTEKLVF

SEQ ID NO: 727336 - protein, 14 aa, Homo sapiens
  CDR3 for beta chain variable domain of TCR clone 363668 (TRBV28, TRBJ1-1)
CASSSEQGYTEAFF

SEQ ID NO: 727337 - protein, 15 aa, Homo sapiens
  CDR3 for alpha chain variable domain of TCR clone 363669 (TRAV8-4, TRAJ56)
CAVRGGTGANSKLTF

SEQ ID NO: 727338 - protein, 14 aa, Homo sapiens
  CDR3 for beta chain variable domain of TCR clone 363669 (TRBV7-9, TRBJ2-1)
CASSPKGGADEQFF

SEQ ID NO: 727339 - protein, 15 aa, Homo sapiens
  CDR3 for alpha chain variable domain of TCR clone 363670 (TRAV23/DV6, TRAJ13)
CAAWPGGGGYQKVTF

SEQ ID NO: 727340 - protein, 15 aa, Homo sapiens
  CDR3 for beta chain variable domain of TCR clone 363670 (TRBV4-1, TRBJ1-4)
CASSDTGGTNEKLFF

SEQ ID NO: 727341 - protein, 18 aa, Homo sapiens
  CDR3 for alpha chain variable domain of TCR clone 363671 (TRAV21, TRAJ52)
CAVRPSPAGGTSYGKLTF

SEQ ID NO: 727342 - protein, 13 aa, Homo sapiens
  CDR3 for beta chain variable domain of TCR clone 363671 (TRBV29-1, TRBJ2-2)
CSVYREDAGELFF

SEQ ID NO: 727343 - protein, 12 aa, Homo sapiens
  CDR3 for alpha chain variable domain of TCR clone 363672 (TRAV2, TRAJ10)
CASTGGGNKLTF

SEQ ID NO: 727344 - protein, 15 aa, Homo sapiens
  CDR3 for beta chain variable domain of TCR clone 363672 (TRBV19, TRBJ1-2)
CASSVGQVLNYGYTF

SEQ ID NO: 727345 - protein, 14 aa, Homo sapiens
  CDR3 for alpha chain variable domain of TCR clone 363673 (TRAV1-1, TRAJ28)
CAVPSGAGSYQLTF

SEQ ID NO: 727346 - protein, 12 aa, Homo sapiens
  CDR3 for beta chain variable domain of TCR clone 363673 (TRBV7-3, TRBJ2-1)
CASSFINNEQFF

SEQ ID NO: 727347 - protein, 14 aa, Homo sapiens
  CDR3 for alpha chain variable domain of TCR clone 363674 (TRAV9-2, TRAJ39)
WALYIYNAGNMLTF

SEQ ID NO: 727348 - protein, 14 aa, Homo sapiens
  CDR3 for beta chain variable domain of TCR clone 363674 (TRBV6-1, TRBJ1-3)
CASVQGGGGNTIYF

SEQ ID NO: 727349 - protein, 17 aa, Homo sapiens
  CDR3 for alpha chain variable domain of TCR clone 363675 (TRAV3, TRAJ42)
CAVRDRDYGGSRGNLIF

SEQ ID NO: 727350 - protein, 11 aa, Homo sapiens
  CDR3 for beta chain variable domain of TCR clone 363675 (TRBV12-4, TRBJ2-3)
CASTATDTQYF

SEQ ID NO: 727351 - protein, 12 aa, Homo sapiens
  CDR3 for alpha chain variable domain of TCR clone 363676 (TRAV21, TRAJ33)
CAKMDSNYQLIW

SEQ ID NO: 727352 - protein, 16 aa, Homo sapiens
  CDR3 for beta chain variable domain of TCR clone 363676 (TRBV20-1, TRBJ1-5)
CSASRGTGYSNQPQHF

SEQ ID NO: 727353 - protein, 13 aa, Homo sapiens
  CDR3 for alpha chain variable domain of TCR clone 363677 (TRAV2, TRAJ5)
CAVPDTGRRALTF

SEQ ID NO: 727354 - protein, 13 aa, Homo sapiens
  CDR3 for beta chain variable domain of TCR clone 363677 (TRBV10-2, TRBJ2-7)
CASGASGGYEQYF

SEQ ID NO: 727355 - protein, 14 aa, Homo sapiens
  CDR3 for alpha chain variable domain of TCR clone 363678 (TRAV21, TRAJ21)
CAVGVEDNFNKFYF

SEQ ID NO: 727356 - protein, 15 aa, Homo sapiens
  CDR3 for beta chain variable domain of TCR clone 363678 (TRBV2, TRBJ2-1)
CASSELAGSYNDQFF

SEQ ID NO: 727357 - protein, 11 aa, Homo sapiens
  CDR3 for alpha chain variable domain of TCR clone 363679 (TRAV2, TRAJ13)
CASGCYQKVTF

SEQ ID NO: 727358 - protein, 15 aa, Homo sapiens
  CDR3 for beta chain variable domain of TCR clone 363679 (TRBV20-1, TRBJ2-7)
CSARDRVSGMDEQYF

SEQ ID NO: 727359 - protein, 14 aa, Homo sapiens
  CDR3 for alpha chain variable domain of TCR clone 363680 (TRAV8-6, TRAJ8)
CAVNENTGFQKLVF

SEQ ID NO: 727360 - protein, 20 aa, Homo sapiens
  CDR3 for beta chain variable domain of TCR clone 363680 (TRBV7-8, TRBJ2-2)
CASSHLFPGPTIHITGELFF

SEQ ID NO: 727361 - protein, 16 aa, Homo sapiens
  CDR3 for alpha chain variable domain of TCR clone 363681 (TRAV4, TRAJ18)
CCVLLIGGSTLGRLYF

SEQ ID NO: 727362 - protein, 13 aa, Homo sapiens
  CDR3 for beta chain variable domain of TCR clone 363681 (TRBV10-3, TRBJ2-1)
CATRTGSVNEQFF

SEQ ID NO: 727363 - protein, 13 aa, Homo sapiens
  CDR3 for alpha chain variable domain of TCR clone 363682 (TRAV22, TRAJ26)
CAVERNYGQNFVF

SEQ ID NO: 727364 - protein, 16 aa, Homo sapiens
  CDR3 for beta chain variable domain of TCR clone 363682 (TRBV7-2, TRBJ2-6)
CASSERRASGANVLTF

SEQ ID NO: 727365 - protein, 17 aa, Homo sapiens
  CDR3 for alpha chain variable domain of TCR clone 363683 (TRAV39, TRAJ32)
CAVDIKWVGGATTKLIF

SEQ ID NO: 727366 - protein, 11 aa, Homo sapiens
  CDR3 for beta chain variable domain of TCR clone 363683 (TRBV18, TRBJ1-2)
CASSPLNGYTF

SEQ ID NO: 727367 - protein, 13 aa, Homo sapiens
  CDR3 for alpha chain variable domain of TCR clone 363684 (TRAV8-3, TRAJ13)
WVPIPLGVTKVTF

SEQ ID NO: 727368 - protein, 15 aa, Homo sapiens
  CDR3 for beta chain variable domain of TCR clone 363684 (TRBV19, TRBJ1-5)
CASSIVWADNQPQHF

SEQ ID NO: 727369 - protein, 14 aa, Homo sapiens
  CDR3 for alpha chain variable domain of TCR clone 363685 (TRAV1-2, TRAJ8)
CAVREDTGFQKLVF

SEQ ID NO: 727370 - protein, 11 aa, Homo sapiens
  CDR3 for beta chain variable domain of TCR clone 363685 (TRBV11-3, TRBJ2-7)
CASSRIYEQYF

SEQ ID NO: 727371 - protein, 16 aa, Homo sapiens
  CDR3 for alpha chain variable domain of TCR clone 363686 (TRAV38-1, TRAJ45)
CAFMKGSGGGADGLTF

SEQ ID NO: 727372 - protein, 12 aa, Homo sapiens
  CDR3 for beta chain variable domain of TCR clone 363686 (TRBV11-2, TRBJ2-3)
CASSPPEDTQYF

SEQ ID NO: 727373 - protein, 16 aa, Homo sapiens
  CDR3 for alpha chain variable domain of TCR clone 363687 (TRAV8-3, TRAJ10)
CAVGPILTGGGNKLTF

SEQ ID NO: 727374 - protein, 14 aa, Homo sapiens
  CDR3 for beta chain variable domain of TCR clone 363687 (TRBV9, TRBJ2-1)
CASSVALAVNEQFF

SEQ ID NO: 727375 - protein, 13 aa, Homo sapiens
  CDR3 for alpha chain variable domain of TCR clone 363688 (TRAV21, TRAJ27)
CAAHPGNAGKSTF

SEQ ID NO: 727376 - protein, 20 aa, Homo sapiens
  CDR3 for beta chain variable domain of TCR clone 363688 (TRBV4-2, TRBJ2-7)
CASSQASGGNLRAVLRAGHQ

SEQ ID NO: 727377 - protein, 14 aa, Homo sapiens
  CDR3 for alpha chain variable domain of TCR clone 363689 (TRAV1-2, TRAJ16)
CAVNRFSDGQKLLF

SEQ ID NO: 727378 - protein, 15 aa, Homo sapiens
  CDR3 for beta chain variable domain of TCR clone 363689 (TRBV15, TRBJ1-1)
CATSRDAGENTEAFF

SEQ ID NO: 727379 - protein, 15 aa, Homo sapiens
  CDR3 for alpha chain variable domain of TCR clone 363690 (TRAV38-2/DV8, TRAJ47)
CASRSAKGYGNKLVF

SEQ ID NO: 727380 - protein, 15 aa, Homo sapiens
  CDR3 for beta chain variable domain of TCR clone 363690 (TRBV6-6, TRBJ2-7)
CASSYSYGGSYEQYF

SEQ ID NO: 727381 - protein, 13 aa, Homo sapiens
  CDR3 for alpha chain variable domain of TCR clone 363691 (TRAV3, TRAJ15)
CAVRDQAGTALIL

SEQ ID NO: 727382 - protein, 15 aa, Homo sapiens
  CDR3 for beta chain variable domain of TCR clone 363691 (TRBV11-1, TRBJ2-7)
CASSLNDGASYEQYF

SEQ ID NO: 727383 - protein, 14 aa, Homo sapiens
  CDR3 for alpha chain variable domain of TCR clone 363692 (TRAV12-2, TRAJ44)
CAVNPAGTASKLTF

SEQ ID NO: 727384 - protein, 14 aa, Homo sapiens
  CDR3 for beta chain variable domain of TCR clone 363692 (TRBV7-2, TRBJ1-3)
CASSRLSSGNTIYF

SEQ ID NO: 727385 - protein, 16 aa, Homo sapiens
  CDR3 for alpha chain variable domain of TCR clone 363693 (TRAV27, TRAJ13)
CAGAKSDSGGYQKVTF

SEQ ID NO: 727386 - protein, 18 aa, Homo sapiens
  CDR3 for beta chain variable domain of TCR clone 363693 (TRBV25-1, TRBJ1-2)
CASSGLQNGQGLIFGYTF

SEQ ID NO: 727387 - protein, 11 aa, Homo sapiens
  CDR3 for alpha chain variable domain of TCR clone 363694 (TRAV2, TRAJ33)
CAVEGNYQLIW

SEQ ID NO: 727388 - protein, 16 aa, Homo sapiens
  CDR3 for beta chain variable domain of TCR clone 363694 (TRBV7-3, TRBJ2-2)
CASSVKRGTLSGELFF

SEQ ID NO: 727389 - protein, 11 aa, Homo sapiens
  CDR3 for alpha chain variable domain of TCR clone 363695 (TRAV1-2, TRAJ20)
CAVSNDYKLSF

SEQ ID NO: 727390 - protein, 13 aa, Homo sapiens
  CDR3 for beta chain variable domain of TCR clone 363695 (TRBV7-9, TRBJ1-2)
CASSLKQNYGYIF

SEQ ID NO: 727391 - protein, 16 aa, Homo sapiens
  CDR3 for alpha chain variable domain of TCR clone 363696 (TRAV26-1, TRAJ37)
CIYARHGSSNTGKLIF

SEQ ID NO: 727392 - protein, 13 aa, Homo sapiens
  CDR3 for beta chain variable domain of TCR clone 363696 (TRBV7-9, TRBJ2-7)
CASSFAGAYEQYF

SEQ ID NO: 727393 - protein, 13 aa, Homo sapiens
  CDR3 for alpha chain variable domain of TCR clone 363697 (TRAV8-3, TRAJ36)
CAVGATGANHLFF

SEQ ID NO: 727394 - protein, 16 aa, Homo sapiens
  CDR3 for beta chain variable domain of TCR clone 363697 (TRBV20-1, TRBJ1-4)
CSAPGQGLLTNEKLFF

SEQ ID NO: 727395 - protein, 18 aa, Homo sapiens
  CDR3 for alpha chain variable domain of TCR clone 363698 (TRAV29/DV5, TRAJ52)
CAAGFRGAGGTSYGKLTF

SEQ ID NO: 727396 - protein, 15 aa, Homo sapiens
  CDR3 for beta chain variable domain of TCR clone 363698 (TRBV20-1, TRBJ2-7)
CSARERVSGMDEQYF

SEQ ID NO: 727397 - protein, 13 aa, Homo sapiens
  CDR3 for alpha chain variable domain of TCR clone 363699 (TRAV12-2, TRAJ23)
CAVMGNQGGKLIF

SEQ ID NO: 727398 - protein, 16 aa, Homo sapiens
  CDR3 for beta chain variable domain of TCR clone 363699 (TRBV11-3, TRBJ2-7)
CASSPHGAGGPYEQYF

SEQ ID NO: 727399 - protein, 14 aa, Homo sapiens
  CDR3 for alpha chain variable domain of TCR clone 363700 (TRAV9-2, TRAJ39)
CALYIYNAGNMLTF

SEQ ID NO: 727400 - protein, 15 aa, Homo sapiens
  CDR3 for beta chain variable domain of TCR clone 363700 (TRBV20-1, TRBJ2-5)
CSATRTSGSLETQYF

SEQ ID NO: 727401 - protein, 14 aa, Homo sapiens
  CDR3 for alpha chain variable domain of TCR clone 363701 (TRAV8-1, TRAJ24)
CAVNAADSGGKLQF

SEQ ID NO: 727402 - protein, 16 aa, Homo sapiens
  CDR3 for beta chain variable domain of TCR clone 363701 (TRBV4-3, TRBJ2-1)
CASSPALDRGVNEQFF

SEQ ID NO: 727403 - protein, 12 aa, Homo sapiens
  CDR3 for alpha chain variable domain of TCR clone 363702 (TRAV26-1, TRAJ36)
CIVRVRADNLFF

SEQ ID NO: 727404 - protein, 16 aa, Homo sapiens
  CDR3 for beta chain variable domain of TCR clone 363702 (TRBV5-1, TRBJ2-3)
CASSSIGAGSTDTQYF

SEQ ID NO: 727405 - protein, 15 aa, Homo sapiens
  CDR3 for alpha chain variable domain of TCR clone 363703 (TRAV3, TRAJ22)
CAVRDRGGSARQLTF

SEQ ID NO: 727406 - protein, 12 aa, Homo sapiens
  CDR3 for beta chain variable domain of TCR clone 363703 (TRBV7-2, TRBJ1-6)
CASSLSSSPLHF

SEQ ID NO: 727407 - protein, 14 aa, Homo sapiens
  CDR3 for alpha chain variable domain of TCR clone 363704 (TRAV17, TRAJ17)
CATDDAAAGNKLTF

SEQ ID NO: 727408 - protein, 16 aa, Homo sapiens
  CDR3 for beta chain variable domain of TCR clone 363704 (TRBV19, TRBJ1-5)
CASSTWTGGGNQPQHF

SEQ ID NO: 727409 - protein, 14 aa, Homo sapiens
  CDR3 for alpha chain variable domain of TCR clone 363705 (TRAV2, TRAJ9)
CAVEDRSGGVKTIF

SEQ ID NO: 727410 - protein, 15 aa, Homo sapiens
  CDR3 for beta chain variable domain of TCR clone 363705 (TRBV11-3, TRBJ2-3)
CASSAGTVVTNTQYF

SEQ ID NO: 727411 - protein, 20 aa, Homo sapiens
  CDR3 for alpha chain variable domain of TCR clone 363706 (TRAV12-3, TRAJ41)
SLFIRDSQPSDSATPEALNF

SEQ ID NO: 727412 - protein, 15 aa, Homo sapiens
  CDR3 for beta chain variable domain of TCR clone 363706 (TRBV5-1, TRBJ2-7)
CASSLDLTSSDEQYF

SEQ ID NO: 727413 - protein, 11 aa, Homo sapiens
  CDR3 for alpha chain variable domain of TCR clone 363707 (TRAV8-3, TRAJ15)
CAVGPGIALIF

SEQ ID NO: 727414 - protein, 18 aa, Homo sapiens
  CDR3 for beta chain variable domain of TCR clone 363707 (TRBV18, TRBJ2-3)
CASSCTSGAAGGTETQYF

SEQ ID NO: 727415 - protein, 11 aa, Homo sapiens
  CDR3 for alpha chain variable domain of TCR clone 363708 (TRAV2, TRAJ13)
CASGGYQKVTF

SEQ ID NO: 727416 - protein, 16 aa, Homo sapiens
  CDR3 for beta chain variable domain of TCR clone 363708 (TRBV19, TRBJ2-1)
CASSKAGPSSYNEQIF

SEQ ID NO: 727417 - protein, 10 aa, Homo sapiens
  CDR3 for alpha chain variable domain of TCR clone 363709 (TRAV30, TRAJ48)
CGIGNEKLTF

SEQ ID NO: 727418 - protein, 14 aa, Homo sapiens
  CDR3 for beta chain variable domain of TCR clone 363709 (TRBV7-6, TRBJ2-3)
CASSVAGGTYTQYF

SEQ ID NO: 727419 - protein, 17 aa, Homo sapiens
  CDR3 for alpha chain variable domain of TCR clone 363710 (TRAV3, TRAJ12)
CAVRDGGRMDSSYKLIF

SEQ ID NO: 727420 - protein, 11 aa, Homo sapiens
  CDR3 for beta chain variable domain of TCR clone 363710 (TRBV7-9, TRBJ2-1)
CASSLSYEQFF

SEQ ID NO: 727421 - protein, 14 aa, Homo sapiens
  CDR3 for alpha chain variable domain of TCR clone 363711 (TRAV12-3, TRAJ10)
SHLPLTGGGNKLTF

SEQ ID NO: 727422 - protein, 11 aa, Homo sapiens
  CDR3 for beta chain variable domain of TCR clone 363711 (TRBV7-9, TRBJ2-5)
CASSLGETQYF

SEQ ID NO: 727423 - protein, 13 aa, Homo sapiens
  CDR3 for alpha chain variable domain of TCR clone 363712 (TRAV1-1, TRAJ9)
CAAKNTGGFKTIF

SEQ ID NO: 727424 - protein, 15 aa, Homo sapiens
  CDR3 for beta chain variable domain of TCR clone 363712 (TRBV5-1, TRBJ2-1)
CASTGSGGTYNEQFF

SEQ ID NO: 727425 - protein, 16 aa, Homo sapiens
  CDR3 for alpha chain variable domain of TCR clone 363713 (TRAV30, TRAJ24)
CGTEIVDADSWGKFKF

SEQ ID NO: 727426 - protein, 16 aa, Homo sapiens
  CDR3 for beta chain variable domain of TCR clone 363713 (TRBV7-8, TRBJ2-4)
CASSAERTLAKNIQYF

SEQ ID NO: 727427 - protein, 14 aa, Homo sapiens
  CDR3 for alpha chain variable domain of TCR clone 363714 (TRAV12-1, TRAJ13)
CVVNKAGGYQKVTF

SEQ ID NO: 727428 - protein, 14 aa, Homo sapiens
  CDR3 for beta chain variable domain of TCR clone 363714 (TRBV20-1, TRBJ2-7)
CSANRGRSSYEQYF

SEQ ID NO: 727429 - protein, 11 aa, Homo sapiens
  CDR3 for alpha chain variable domain of TCR clone 363715 (TRAV1-1, TRAJ23)
CAVRQGGKLIF

SEQ ID NO: 727430 - protein, 20 aa, Homo sapiens
  CDR3 for beta chain variable domain of TCR clone 363715 (TRBV7-8, TRBJ2-2)
CASSHLFPGPTIHITMELFC

SEQ ID NO: 727431 - protein, 14 aa, Homo sapiens
  CDR3 for alpha chain variable domain of TCR clone 363716 (TRAV2, TRAJ37)
CAVDFTSNTGKLIF

SEQ ID NO: 727432 - protein, 13 aa, Homo sapiens
  CDR3 for beta chain variable domain of TCR clone 363716 (TRBV4-2, TRBJ1-1)
CASSQAWNTEAFF

SEQ ID NO: 727433 - protein, 15 aa, Homo sapiens
  CDR3 for alpha chain variable domain of TCR clone 363717 (TRAV21, TRAJ24)
CAARSSTDSWGKLQF

SEQ ID NO: 727434 - protein, 14 aa, Homo sapiens
  CDR3 for beta chain variable domain of TCR clone 363717 (TRBV11-2, TRBJ2-5)
CASSRTGGIETQFF

SEQ ID NO: 727435 - protein, 14 aa, Homo sapiens
  CDR3 for alpha chain variable domain of TCR clone 363718 (TRAV12-1, TRAJ12)
CVVTRMDSSYKLIF

SEQ ID NO: 727436 - protein, 13 aa, Homo sapiens
  CDR3 for beta chain variable domain of TCR clone 363718 (TRBV2, TRBJ2-7)
CASSVGGSGEQYF

SEQ ID NO: 727437 - protein, 16 aa, Homo sapiens
  CDR3 for alpha chain variable domain of TCR clone 363719 (TRAV30, TRAJ24)
CGTEIVDADSWGKVQF

SEQ ID NO: 727438 - protein, 14 aa, Homo sapiens
  CDR3 for beta chain variable domain of TCR clone 363719 (TRBV7-9, TRBJ2-4)
CASSLAMGGNIQYF

SEQ ID NO: 727439 - protein, 14 aa, Homo sapiens
  CDR3 for alpha chain variable domain of TCR clone 363720 (TRAV3, TRAJ9)
CAVRDDPGGFKTIF

SEQ ID NO: 727440 - protein, 18 aa, Homo sapiens
  CDR3 for beta chain variable domain of TCR clone 363720 (TRBV20-1, TRBJ2-6)
CSAETTPTHGSGANVLTF

SEQ ID NO: 727441 - protein, 14 aa, Homo sapiens
  CDR3 for alpha chain variable domain of TCR clone 363721 (TRAV9-2, TRAJ39)
CALYIYNAGNMLTF

SEQ ID NO: 727442 - protein, 16 aa, Homo sapiens
  CDR3 for beta chain variable domain of TCR clone 363721 (TRBV4-1, TRBJ1-3)
CASSQDELLAGNTIYF

SEQ ID NO: 727443 - protein, 12 aa, Homo sapiens
  CDR3 for alpha chain variable domain of TCR clone 363722 (TRAV12-1, TRAJ31)
CVVNRNNARLMF

SEQ ID NO: 727444 - protein, 15 aa, Homo sapiens
  CDR3 for beta chain variable domain of TCR clone 363722 (TRBV10-3, TRBJ2-3)
CAISEAPSSTDTQYF

SEQ ID NO: 727445 - protein, 12 aa, Homo sapiens
  CDR3 for alpha chain variable domain of TCR clone 363723 (TRAV2, TRAJ33)
CAFMDSNYQLIW

SEQ ID NO: 727446 - protein, 16 aa, Homo sapiens
  CDR3 for beta chain variable domain of TCR clone 363723 (TRBV2, TRBJ2-7)
CTSSEPWTGPSYEQYF

SEQ ID NO: 727447 - protein, 13 aa, Homo sapiens
  CDR3 for alpha chain variable domain of TCR clone 363724 (TRAV17, TRAJ30)
CATGGNRDDKIIF

SEQ ID NO: 727448 - protein, 13 aa, Homo sapiens
  CDR3 for beta chain variable domain of TCR clone 363724 (TRBV10-3, TRBJ2-7)
CASKLAVNYEQYF

SEQ ID NO: 727449 - protein, 12 aa, Homo sapiens
  CDR3 for alpha chain variable domain of TCR clone 363725 (TRAV3, TRAJ34)
CAVLGNTDKLIL

SEQ ID NO: 727450 - protein, 13 aa, Homo sapiens
  CDR3 for beta chain variable domain of TCR clone 363725 (TRBV19, TRBJ2-1)
CASIIGTGNEQFF

SEQ ID NO: 727451 - protein, 14 aa, Homo sapiens
  CDR3 for alpha chain variable domain of TCR clone 363726 (TRAV35, TRAJ22)
CAGLRPGSARQQNF

SEQ ID NO: 727452 - protein, 15 aa, Homo sapiens
  CDR3 for beta chain variable domain of TCR clone 363726 (TRBV12-4, TRBJ2-5)
CASSPPTGLQETQYF

SEQ ID NO: 727453 - protein, 12 aa, Homo sapiens
  CDR3 for alpha chain variable domain of TCR clone 363727 (TRAV12-3, TRAJ40)
CAMSSGTYKYIF

SEQ ID NO: 727454 - protein, 13 aa, Homo sapiens
  CDR3 for beta chain variable domain of TCR clone 363727 (TRBV12-4, TRBJ1-1)
CASSFGEDTEAFF

SEQ ID NO: 727455 - protein, 15 aa, Homo sapiens
  CDR3 for alpha chain variable domain of TCR clone 363728 (TRAV38-1, TRAJ57)
CAFMDSQGGSEKLVF

SEQ ID NO: 727456 - protein, 16 aa, Homo sapiens
  CDR3 for beta chain variable domain of TCR clone 363728 (TRBV10-3, TRBJ2-1)
CAIRGGGRGEYNEQFF

SEQ ID NO: 727457 - protein, 17 aa, Homo sapiens
  CDR3 for alpha chain variable domain of TCR clone 363729 (TRAV12-2, TRAJ52)
CAVYPYAGGTSYGKLTF

SEQ ID NO: 727458 - protein, 16 aa, Homo sapiens
  CDR3 for beta chain variable domain of TCR clone 363729 (TRBV5-5, TRBJ2-2)
CASSGRREGATGELFF

SEQ ID NO: 727459 - protein, 14 aa, Homo sapiens
  CDR3 for alpha chain variable domain of TCR clone 363730 (TRAV17, TRAJ22)
CAASPSGSARQLTL

SEQ ID NO: 727460 - protein, 15 aa, Homo sapiens
  CDR3 for beta chain variable domain of TCR clone 363730 (TRBV4-1, TRBJ2-5)
CASSQWDLYQETQYF

SEQ ID NO: 727461 - protein, 12 aa, Homo sapiens
  CDR3 for alpha chain variable domain of TCR clone 363731 (TRAV20, TRAJ39)
CAVGNAGNMLTF

SEQ ID NO: 727462 - protein, 16 aa, Homo sapiens
  CDR3 for beta chain variable domain of TCR clone 363731 (TRBV11-2, TRBJ2-3)
CASSSRTSGGAGTQYF

SEQ ID NO: 727463 - protein, 12 aa, Homo sapiens
  CDR3 for alpha chain variable domain of TCR clone 363732 (TRAV12-3, TRAJ17)
CAMTLTGNKLTF

SEQ ID NO: 727464 - protein, 15 aa, Homo sapiens
  CDR3 for beta chain variable domain of TCR clone 363732 (TRBV20-1, TRBJ2-7)
CSARYRVAGMDEQYF

SEQ ID NO: 727465 - protein, 12 aa, Homo sapiens
  CDR3 for alpha chain variable domain of TCR clone 363733 (TRAV12-1, TRAJ23)
CVVNNQGGKLIF

SEQ ID NO: 727466 - protein, 16 aa, Homo sapiens
  CDR3 for beta chain variable domain of TCR clone 363733 (TRBV11-1, TRBJ2-7)
CASSAQTGTLSYEQCF

SEQ ID NO: 727467 - protein, 14 aa, Homo sapiens
  CDR3 for alpha chain variable domain of TCR clone 363734 (TRAV16, TRAJ33)
CALSAMDSNYQLIW

SEQ ID NO: 727468 - protein, 16 aa, Homo sapiens
  CDR3 for beta chain variable domain of TCR clone 363734 (TRBV7-2, TRBJ2-3)
CASSLVALYSTDTQYF

SEQ ID NO: 727469 - protein, 15 aa, Homo sapiens
  CDR3 for alpha chain variable domain of TCR clone 363735 (TRAV3, TRAJ29)
CAVREFNSGNTPLVF

SEQ ID NO: 727470 - protein, 15 aa, Homo sapiens
  CDR3 for beta chain variable domain of TCR clone 363735 (TRBV28, TRBJ1-4)
CASSVSGSGLEKLFF

SEQ ID NO: 727471 - protein, 13 aa, Homo sapiens
  CDR3 for alpha chain variable domain of TCR clone 363736 (TRAV3, TRAJ21)
CAVREPDFNKFYF

SEQ ID NO: 727472 - protein, 15 aa, Homo sapiens
  CDR3 for beta chain variable domain of TCR clone 363736 (TRBV5-1, TRBJ1-4)
FAPAAWKDGNEKLFF

SEQ ID NO: 727473 - protein, 13 aa, Homo sapiens
  CDR3 for alpha chain variable domain of TCR clone 363737 (TRAV13-1, TRAJ48)
CAAASFGNEKLIF

SEQ ID NO: 727474 - protein, 14 aa, Homo sapiens
  CDR3 for beta chain variable domain of TCR clone 363737 (TRBV18, TRBJ2-1)
CASSPGTSETEQFF

SEQ ID NO: 727475 - protein, 11 aa, Homo sapiens
  CDR3 for alpha chain variable domain of TCR clone 363738 (TRAV1-1, TRAJ23)
CAVRQGGKLIF

SEQ ID NO: 727476 - protein, 15 aa, Homo sapiens
  CDR3 for beta chain variable domain of TCR clone 363738 (TRBV7-2, TRBJ2-3)
CASSSTGLETDTQYF

SEQ ID NO: 727477 - protein, 11 aa, Homo sapiens
  CDR3 for alpha chain variable domain of TCR clone 363739 (TRAV12-1, TRAJ15)
CVVNAGTALIF

SEQ ID NO: 727478 - protein, 16 aa, Homo sapiens
  CDR3 for beta chain variable domain of TCR clone 363739 (TRBV28, TRBJ2-1)
CASISRVRDSYNEQFF

SEQ ID NO: 727479 - protein, 12 aa, Homo sapiens
  CDR3 for alpha chain variable domain of TCR clone 363740 (TRAV27, TRAJ17)
CRSCNCRQQATF

SEQ ID NO: 727480 - protein, 15 aa, Homo sapiens
  CDR3 for beta chain variable domain of TCR clone 363740 (TRBV5-1, TRBJ2-3)
CASRNQAGSTDTQYF

SEQ ID NO: 727481 - protein, 11 aa, Homo sapiens
  CDR3 for alpha chain variable domain of TCR clone 363741 (TRAV35, TRAJ30)
CAGERDDKIVF

SEQ ID NO: 727482 - protein, 14 aa, Homo sapiens
  CDR3 for beta chain variable domain of TCR clone 363741 (TRBV15, TRBJ2-5)
CATSGDRGQETQYF

SEQ ID NO: 727483 - protein, 14 aa, Homo sapiens
  CDR3 for alpha chain variable domain of TCR clone 363742 (TRAV1-2, TRAJ8)
TSVREDTGFQKLVF

SEQ ID NO: 727484 - protein, 15 aa, Homo sapiens
  CDR3 for beta chain variable domain of TCR clone 363742 (TRBV6-3, TRBJ2-7)
CASSSPGTVFYEQYF

SEQ ID NO: 727485 - protein, 14 aa, Homo sapiens
  CDR3 for alpha chain variable domain of TCR clone 363743 (TRAV12-2, TRAJ5)
CAVNRSTGRRALTF

SEQ ID NO: 727486 - protein, 15 aa, Homo sapiens
  CDR3 for beta chain variable domain of TCR clone 363743 (TRBV20-1, TRBJ2-5)
CSAPPRTGFGETQYF

SEQ ID NO: 727487 - protein, 18 aa, Homo sapiens
  CDR3 for alpha chain variable domain of TCR clone 363744 (TRAV12-3, TRAJ10)
SPVIQPPTPDGRRKQLTF

SEQ ID NO: 727488 - protein, 13 aa, Homo sapiens
  CDR3 for beta chain variable domain of TCR clone 363744 (TRBV27, TRBJ1-1)
CASSLSIGAEAFF

SEQ ID NO: 727489 - protein, 13 aa, Homo sapiens
  CDR3 for alpha chain variable domain of TCR clone 363745 (TRAV12-1, TRAJ13)
CVVGTGGYQKVTF

SEQ ID NO: 727490 - protein, 14 aa, Homo sapiens
  CDR3 for beta chain variable domain of TCR clone 363745 (TRBV10-1, TRBJ2-2)
CASTSGQNTGELFF

SEQ ID NO: 727491 - protein, 10 aa, Homo sapiens
  CDR3 for alpha chain variable domain of TCR clone 363746 (TRAV30, TRAJ24)
CAQRLWMLTA

SEQ ID NO: 727492 - protein, 14 aa, Homo sapiens
  CDR3 for beta chain variable domain of TCR clone 363746 (TRBV12-5, TRBJ2-5)
CASGSRTHQGTQYF

SEQ ID NO: 727493 - protein, 14 aa, Homo sapiens
  CDR3 for alpha chain variable domain of TCR clone 363747 (TRAV1-2, TRAJ8)
CAVREDTGFQKLVF

SEQ ID NO: 727494 - protein, 15 aa, Homo sapiens
  CDR3 for beta chain variable domain of TCR clone 363747 (TRBV3-1, TRBJ2-7)
CASSQVGQGAYEQYF

SEQ ID NO: 727495 - protein, 14 aa, Homo sapiens
  CDR3 for alpha chain variable domain of TCR clone 363748 (TRAV26-1, TRAJ36)
CIVRVGTGANNLFF

SEQ ID NO: 727496 - protein, 11 aa, Homo sapiens
  CDR3 for beta chain variable domain of TCR clone 363748 (TRBV9, TRBJ2-2)
CASSVAGELFF

SEQ ID NO: 727497 - protein, 16 aa, Homo sapiens
  CDR3 for alpha chain variable domain of TCR clone 363749 (TRAV16, TRAJ57)
CAPYLITQGGSEKLVF

SEQ ID NO: 727498 - protein, 17 aa, Homo sapiens
  CDR3 for beta chain variable domain of TCR clone 363749 (TRBV24-1, TRBJ2-4)
CATCDAEARGVRNIQYF

SEQ ID NO: 727499 - protein, 15 aa, Homo sapiens
  CDR3 for alpha chain variable domain of TCR clone 363750 (TRAV13-1, TRAJ45)
CAASGSGGGADGLTF

SEQ ID NO: 727500 - protein, 14 aa, Homo sapiens
  CDR3 for beta chain variable domain of TCR clone 363750 (TRBV12-4, TRBJ1-2)
CASSFVGTAYSYTF

SEQ ID NO: 727501 - protein, 14 aa, Homo sapiens
  CDR3 for alpha chain variable domain of TCR clone 363751 (TRAV9-2, TRAJ39)
CALYIYNAGNMLTF

SEQ ID NO: 727502 - protein, 14 aa, Homo sapiens
  CDR3 for beta chain variable domain of TCR clone 363751 (TRBV19, TRBJ2-1)
CASPTFVVSGEQFF

SEQ ID NO: 727503 - protein, 13 aa, Homo sapiens
  CDR3 for alpha chain variable domain of TCR clone 363752 (TRAV3, TRAJ8)
CAVRFTGSQKLVF

SEQ ID NO: 727504 - protein, 15 aa, Homo sapiens
  CDR3 for beta chain variable domain of TCR clone 363752 (TRBV20-1, TRBJ2-7)
CSARDRVSGMDEQYF

SEQ ID NO: 727505 - protein, 11 aa, Homo sapiens
  CDR3 for alpha chain variable domain of TCR clone 363753 (TRAV12-3, TRAJ43)
CAMSVSNDMRF

SEQ ID NO: 727506 - protein, 18 aa, Homo sapiens
  CDR3 for beta chain variable domain of TCR clone 363753 (TRBV20-1, TRBJ2-3)
CSASGLAGGPGTTDTQYY

SEQ ID NO: 727507 - protein, 14 aa, Homo sapiens
  CDR3 for alpha chain variable domain of TCR clone 363754 (TRAV17, TRAJ57)
CATDPQGGSEKLVF

SEQ ID NO: 727508 - protein, 13 aa, Homo sapiens
  CDR3 for beta chain variable domain of TCR clone 363754 (TRBV6-4, TRBJ1-2)
CASSEAVGTPTMA

SEQ ID NO: 727509 - protein, 14 aa, Homo sapiens
  CDR3 for alpha chain variable domain of TCR clone 363755 (TRAV12-2, TRAJ13)
CAVKKTGGYQKVTF

SEQ ID NO: 727510 - protein, 14 aa, Homo sapiens
  CDR3 for beta chain variable domain of TCR clone 363755 (TRBV7-2, TRBJ2-7)
CASSPKTSFYEQDF

SEQ ID NO: 727511 - protein, 15 aa, Homo sapiens
  CDR3 for alpha chain variable domain of TCR clone 363756 (TRAV17, TRAJ35)
CATAFVIGFGNVLHG

SEQ ID NO: 727512 - protein, 16 aa, Homo sapiens
  CDR3 for beta chain variable domain of TCR clone 363756 (TRBV11-2, TRBJ2-7)
CASSPLAGGPRYEQYF

SEQ ID NO: 727513 - protein, 12 aa, Homo sapiens
  CDR3 for alpha chain variable domain of TCR clone 363757 (TRAV13-1, TRAJ53)
AASGGSNYKRTF

SEQ ID NO: 727514 - protein, 14 aa, Homo sapiens
  CDR3 for beta chain variable domain of TCR clone 363757 (TRBV12-5, TRBJ2-5)
CASGSRTHQETQYF

SEQ ID NO: 727515 - protein, 17 aa, Homo sapiens
  CDR3 for alpha chain variable domain of TCR clone 363758 (TRAV3, TRAJ42)
CAVRDRDYGGSQGNLIF

SEQ ID NO: 727516 - protein, 17 aa, Homo sapiens
  CDR3 for beta chain variable domain of TCR clone 363758 (TRBV20-1, TRBJ2-2)
GSASGSGQGGLTGELFF

SEQ ID NO: 727517 - protein, 14 aa, Homo sapiens
  CDR3 for alpha chain variable domain of TCR clone 363759 (TRAV12-3, TRAJ42)
CAMIYGGSQGNLIF

SEQ ID NO: 727518 - protein, 14 aa, Homo sapiens
  CDR3 for beta chain variable domain of TCR clone 363759 (TRBV7-2, TRBJ2-7)
CASRSQGAAYEQYF

SEQ ID NO: 727519 - protein, 15 aa, Homo sapiens
  CDR3 for alpha chain variable domain of TCR clone 363760 (TRAV4, TRAJ39)
CLVGPNNNAGNMLTF

SEQ ID NO: 727520 - protein, 14 aa, Homo sapiens
  CDR3 for beta chain variable domain of TCR clone 363760 (TRBV19, TRBJ2-7)
CASNFRDAFTEMYF

SEQ ID NO: 727521 - protein, 13 aa, Homo sapiens
  CDR3 for alpha chain variable domain of TCR clone 363761 (TRAV30, TRAJ6)
CGTEAGGSYIPTF

SEQ ID NO: 727522 - protein, 11 aa, Homo sapiens
  CDR3 for beta chain variable domain of TCR clone 363761 (TRBV29-1, TRBJ1-1)
CSVEVGTRTFF

SEQ ID NO: 727523 - protein, 16 aa, Homo sapiens
  CDR3 for alpha chain variable domain of TCR clone 363762 (TRAV1-2, TRAJ10)
CAVRGVLTGGGNKLTF

SEQ ID NO: 727524 - protein, 15 aa, Homo sapiens
  CDR3 for beta chain variable domain of TCR clone 363762 (TRBV27, TRBJ2-7)
CAGSPIVTGAYEQYF

SEQ ID NO: 727525 - protein, 16 aa, Homo sapiens
  CDR3 for alpha chain variable domain of TCR clone 363763 (TRAV3, TRAJ10)
CAVRDMRAGGGNKLTF

SEQ ID NO: 727526 - protein, 16 aa, Homo sapiens
  CDR3 for beta chain variable domain of TCR clone 363763 (TRBV28, TRBJ1-5)
CAGSFRGGYSNQPQHF

SEQ ID NO: 727527 - protein, 15 aa, Homo sapiens
  CDR3 for alpha chain variable domain of TCR clone 363764 (TRAV23/DV6, TRAJ47)
CAASIRNGIWKPTGL

SEQ ID NO: 727528 - protein, 13 aa, Homo sapiens
  CDR3 for beta chain variable domain of TCR clone 363764 (TRBV19, TRBJ1-2)
CASSQGQVYGYTF

SEQ ID NO: 727529 - protein, 11 aa, Homo sapiens
  CDR3 for alpha chain variable domain of TCR clone 363765 (TRAV12-2, TRAJ31)
CAVTRWARLMF

SEQ ID NO: 727530 - protein, 15 aa, Homo sapiens
  CDR3 for beta chain variable domain of TCR clone 363765 (TRBV20-1, TRBJ2-7)
CSARDRVSGMDEQYF

SEQ ID NO: 727531 - protein, 10 aa, Homo sapiens
  CDR3 for alpha chain variable domain of TCR clone 363766 (TRAV12-1, TRAJ33)
CVASNYQLIW

SEQ ID NO: 727532 - protein, 15 aa, Homo sapiens
  CDR3 for beta chain variable domain of TCR clone 363766 (TRBV5-4, TRBJ1-4)
CASSHRDGENEKLFF

SEQ ID NO: 727533 - protein, 13 aa, Homo sapiens
  CDR3 for alpha chain variable domain of TCR clone 363767 (TRAV13-1, TRAJ6)
CAASRGGSSIPTF

SEQ ID NO: 727534 - protein, 15 aa, Homo sapiens
  CDR3 for beta chain variable domain of TCR clone 363767 (TRBV25-1, TRBJ2-5)
CASSDTGTHQDTQYF

SEQ ID NO: 727535 - protein, 15 aa, Homo sapiens
  CDR3 for alpha chain variable domain of TCR clone 363768 (TRAV3, TRAJ3)
CTVRDRDSRASKIIF

SEQ ID NO: 727536 - protein, 15 aa, Homo sapiens
  CDR3 for beta chain variable domain of TCR clone 363768 (TRBV7-2, TRBJ1-1)
CASRSATGWNTEAFF

SEQ ID NO: 727537 - protein, 11 aa, Homo sapiens
  CDR3 for alpha chain variable domain of TCR clone 363769 (TRAV26-1, TRAJ37)
CIVRVGRKLIF

SEQ ID NO: 727538 - protein, 17 aa, Homo sapiens
  CDR3 for beta chain variable domain of TCR clone 363769 (TRBV19, TRBJ2-6)
CASSTGQVFSGANVLTF

SEQ ID NO: 727539 - protein, 14 aa, Homo sapiens
  CDR3 for alpha chain variable domain of TCR clone 363770 (TRAV12-2, TRAJ44)
CAVNKAGTASKLTF

SEQ ID NO: 727540 - protein, 15 aa, Homo sapiens
  CDR3 for beta chain variable domain of TCR clone 363770 (TRBV7-9, TRBJ2-7)
CASSLALAEAYEQYF

SEQ ID NO: 727541 - protein, 14 aa, Homo sapiens
  CDR3 for alpha chain variable domain of TCR clone 363771 (TRAV12-1, TRAJ26)
CVVKGSNYGQNFVF

SEQ ID NO: 727542 - protein, 17 aa, Homo sapiens
  CDR3 for beta chain variable domain of TCR clone 363771 (TRBV11-2, TRBJ2-6)
CASSERDIFSGANVLTF

SEQ ID NO: 727543 - protein, 10 aa, Homo sapiens
  CDR3 for alpha chain variable domain of TCR clone 363772 (TRAV12-1, TRAJ20)
CVANPRKLSF

SEQ ID NO: 727544 - protein, 15 aa, Homo sapiens
  CDR3 for beta chain variable domain of TCR clone 363772 (TRBV5-1, TRBJ2-1)
CASSPPRAPYNEQFF

SEQ ID NO: 727545 - protein, 15 aa, Homo sapiens
  CDR3 for alpha chain variable domain of TCR clone 363773 (TRAV35, TRAJ58)
CAGRRQETSGSRLTF

SEQ ID NO: 727546 - protein, 14 aa, Homo sapiens
  CDR3 for beta chain variable domain of TCR clone 363773 (TRBV11-2, TRBJ2-5)
CASRPLAGRETQYF

SEQ ID NO: 727547 - protein, 12 aa, Homo sapiens
  CDR3 for alpha chain variable domain of TCR clone 363774 (TRAV21, TRAJ3)
CCFYSSASKIIF

SEQ ID NO: 727548 - protein, 16 aa, Homo sapiens
  CDR3 for beta chain variable domain of TCR clone 363774 (TRBV19, TRBJ2-1)
CASSKAGPSSYNEKFF

SEQ ID NO: 727549 - protein, 12 aa, Homo sapiens
  CDR3 for alpha chain variable domain of TCR clone 363775 (TRAV25, TRAJ11)
CAGASGYSTLTF

SEQ ID NO: 727550 - protein, 12 aa, Homo sapiens
  CDR3 for beta chain variable domain of TCR clone 363775 (TRBV28, TRBJ2-5)
CASSGGPETQYF

SEQ ID NO: 727551 - protein, 15 aa, Homo sapiens
  CDR3 for alpha chain variable domain of TCR clone 363776 (TRAV3, TRAJ4)
CAVSDGPGGYNKLIF

SEQ ID NO: 727552 - protein, 15 aa, Homo sapiens
  CDR3 for beta chain variable domain of TCR clone 363776 (TRBV27, TRBJ2-7)
CASSPDQGRLYEQYF

SEQ ID NO: 727553 - protein, 16 aa, Homo sapiens
  CDR3 for alpha chain variable domain of TCR clone 363777 (TRAV3, TRAJ10)
CAVRDMRAGGGNKLTF

SEQ ID NO: 727554 - protein, 15 aa, Homo sapiens
  CDR3 for beta chain variable domain of TCR clone 363777 (TRBV15, TRBJ1-5)
CATSRDPVSNQPQHF

SEQ ID NO: 727555 - protein, 16 aa, Homo sapiens
  CDR3 for alpha chain variable domain of TCR clone 363778 (TRAV2, TRAJ10)
CCGGSTVTGGGNKLTF

SEQ ID NO: 727556 - protein, 18 aa, Homo sapiens
  CDR3 for beta chain variable domain of TCR clone 363778 (TRBV18, TRBJ1-5)
CASSPSTGNSNQPSILVM

SEQ ID NO: 727557 - protein, 12 aa, Homo sapiens
  CDR3 for alpha chain variable domain of TCR clone 363779 (TRAV8-3, TRAJ20)
CAVDCNDYKLSF

SEQ ID NO: 727558 - protein, 13 aa, Homo sapiens
  CDR3 for beta chain variable domain of TCR clone 363779 (TRBV5-7, TRBJ2-3)
CASSLGRTDTQYF

SEQ ID NO: 727559 - protein, 14 aa, Homo sapiens
  CDR3 for alpha chain variable domain of TCR clone 363780 (TRAV6, TRAJ10)
CALDLTGGGSKLTF

SEQ ID NO: 727560 - protein, 14 aa, Homo sapiens
  CDR3 for beta chain variable domain of TCR clone 363780 (TRBV18, TRBJ2-7)
CASSPAGGPGEQYF

SEQ ID NO: 727561 - protein, 14 aa, Homo sapiens
  CDR3 for alpha chain variable domain of TCR clone 363781 (TRAV1-2, TRAJ16)
CAVNRVSDGQKLLF

SEQ ID NO: 727562 - protein, 14 aa, Homo sapiens
  CDR3 for beta chain variable domain of TCR clone 363781 (TRBV6-1, TRBJ2-2)
CASTWQGNTGELFF

SEQ ID NO: 727563 - protein, 15 aa, Homo sapiens
  CDR3 for alpha chain variable domain of TCR clone 363782 (TRAV12-1, TRAJ41)
CVVNSRTGSGYALNF

SEQ ID NO: 727564 - protein, 11 aa, Homo sapiens
  CDR3 for beta chain variable domain of TCR clone 363782 (TRBV6-4, TRBJ2-1)
CASSDSYVQFF

SEQ ID NO: 727565 - protein, 12 aa, Homo sapiens
  CDR3 for alpha chain variable domain of TCR clone 363783 (TRAV12-3, TRAJ17)
CAMTLTGNKLTF

SEQ ID NO: 727566 - protein, 17 aa, Homo sapiens
  CDR3 for beta chain variable domain of TCR clone 363783 (TRBV12-4, TRBJ1-5)
CTSVPAPEGPASGSQHF

SEQ ID NO: 727567 - protein, 13 aa, Homo sapiens
  CDR3 for alpha chain variable domain of TCR clone 363784 (TRAV3, TRAJ41)
CAVSSNSGYSLNF

SEQ ID NO: 727568 - protein, 14 aa, Homo sapiens
  CDR3 for beta chain variable domain of TCR clone 363784 (TRBV7-2, TRBJ2-7)
CASSPKTSFYEQYF

SEQ ID NO: 727569 - protein, 12 aa, Homo sapiens
  CDR3 for alpha chain variable domain of TCR clone 363785 (TRAV27, TRAJ35)
CAGADFGNVLHC

SEQ ID NO: 727570 - protein, 16 aa, Homo sapiens
  CDR3 for beta chain variable domain of TCR clone 363785 (TRBV6-1, TRBJ2-1)
CASILIQGSSYNEQFF

SEQ ID NO: 727571 - protein, 21 aa, Homo sapiens
  CDR3 for alpha chain variable domain of TCR clone 363786 (TRAV1-1, TRAJ6)
CLLLLRCETLERTGGSYIPTF

SEQ ID NO: 727572 - protein, 13 aa, Homo sapiens
  CDR3 for beta chain variable domain of TCR clone 363786 (TRBV10-2, TRBJ2-7)
CASGASGGYEQYF

SEQ ID NO: 727573 - protein, 13 aa, Homo sapiens
  CDR3 for alpha chain variable domain of TCR clone 363787 (TRAV8-3, TRAJ48)
CAVVPFGNEQLTF

SEQ ID NO: 727574 - protein, 15 aa, Homo sapiens
  CDR3 for beta chain variable domain of TCR clone 363787 (TRBV11-2, TRBJ2-1)
CASSSPSARYNEQFF

SEQ ID NO: 727575 - protein, 18 aa, Homo sapiens
  CDR3 for alpha chain variable domain of TCR clone 363788 (TRAV13-1, TRAJ52)
CAAKNPNAGGTSYGKLTF

SEQ ID NO: 727576 - protein, 13 aa, Homo sapiens
  CDR3 for beta chain variable domain of TCR clone 363788 (TRBV14, TRBJ2-7)
CASGQDRRYEQYF

SEQ ID NO: 727577 - protein, 13 aa, Homo sapiens
  CDR3 for alpha chain variable domain of TCR clone 363789 (TRAV12-1, TRAJ6)
CVVFPRGSYIPTF

SEQ ID NO: 727578 - protein, 14 aa, Homo sapiens
  CDR3 for beta chain variable domain of TCR clone 363789 (TRBV20-1, TRBJ1-3)
CSASPTGAGNTIHF

SEQ ID NO: 727579 - protein, 12 aa, Homo sapiens
  CDR3 for alpha chain variable domain of TCR clone 363790 (TRAV8-3, TRAJ27)
CAVGAEAGKSTF

SEQ ID NO: 727580 - protein, 14 aa, Homo sapiens
  CDR3 for beta chain variable domain of TCR clone 363790 (TRBV2, TRBJ2-1)
CASRLIVGHYEQFF

SEQ ID NO: 727581 - protein, 14 aa, Homo sapiens
  CDR3 for alpha chain variable domain of TCR clone 363791 (TRAV1-2, TRAJ28)
CVARSGAGSYHLTF

SEQ ID NO: 727582 - protein, 13 aa, Homo sapiens
  CDR3 for beta chain variable domain of TCR clone 363791 (TRBV7-2, TRBJ2-1)
CASSLGQSGEQFF

SEQ ID NO: 727583 - protein, 14 aa, Homo sapiens
  CDR3 for alpha chain variable domain of TCR clone 363792 (TRAV12-3, TRAJ22)
CAMSLFGSARQLTF

SEQ ID NO: 727584 - protein, 16 aa, Homo sapiens
  CDR3 for beta chain variable domain of TCR clone 363792 (TRBV7-2, TRBJ1-4)
CASSPVDRFDREKLFF

SEQ ID NO: 727585 - protein, 14 aa, Homo sapiens
  CDR3 for alpha chain variable domain of TCR clone 363793 (TRAV12-2, TRAJ40)
CAVKIPSGAYKFIF

SEQ ID NO: 727586 - protein, 14 aa, Homo sapiens
  CDR3 for beta chain variable domain of TCR clone 363793 (TRBV20-1, TRBJ1-1)
CSAQTRIGGTEAFF

SEQ ID NO: 727587 - protein, 13 aa, Homo sapiens
  CDR3 for alpha chain variable domain of TCR clone 363794 (TRAV13-2, TRAJ48)
CAEMDFGNEKLTF

SEQ ID NO: 727588 - protein, 13 aa, Homo sapiens
  CDR3 for beta chain variable domain of TCR clone 363794 (TRBV7-2, TRBJ2-2)
CASSSVRAGELFF

SEQ ID NO: 727589 - protein, 17 aa, Homo sapiens
  CDR3 for alpha chain variable domain of TCR clone 363795 (TRAV3, TRAJ6)
CAVRDGPRAGGSYIHTF

SEQ ID NO: 727590 - protein, 13 aa, Homo sapiens
  CDR3 for beta chain variable domain of TCR clone 363795 (TRBV12-5, TRBJ2-3)
CASGDRQSDTQYF

SEQ ID NO: 727591 - protein, 17 aa, Homo sapiens
  CDR3 for alpha chain variable domain of TCR clone 363796 (TRAV23/DV6, TRAJ58)
CAASLLRGETSGSRLTF

SEQ ID NO: 727592 - protein, 14 aa, Homo sapiens
  CDR3 for beta chain variable domain of TCR clone 363796 (TRBV2, TRBJ2-7)
CASSLTSGGYEQYF

SEQ ID NO: 727593 - protein, 18 aa, Homo sapiens
  CDR3 for alpha chain variable domain of TCR clone 363797 (TRAV21, TRAJ52)
CALRPSPAGGTSYGKLTF

SEQ ID NO: 727594 - protein, 13 aa, Homo sapiens
  CDR3 for beta chain variable domain of TCR clone 363797 (TRBV19, TRBJ1-2)
CASSVPGQDGYTF

SEQ ID NO: 727595 - protein, 14 aa, Homo sapiens
  CDR3 for alpha chain variable domain of TCR clone 363798 (TRAV16, TRAJ32)
CALKSGGATNKLIF

SEQ ID NO: 727596 - protein, 13 aa, Homo sapiens
  CDR3 for beta chain variable domain of TCR clone 363798 (TRBV15, TRBJ1-6)
CATSGGVNSPLHF

SEQ ID NO: 727597 - protein, 14 aa, Homo sapiens
  CDR3 for alpha chain variable domain of TCR clone 363799 (TRAV26-1, TRAJ45)
CIEVTGGGADGLTF

SEQ ID NO: 727598 - protein, 15 aa, Homo sapiens
  CDR3 for beta chain variable domain of TCR clone 363799 (TRBV7-8, TRBJ2-1)
CASSLHGGPYNEQFF

SEQ ID NO: 727599 - protein, 15 aa, Homo sapiens
  CDR3 for alpha chain variable domain of TCR clone 363800 (TRAV21, TRAJ53)
CATLNSGGSNYKLTF

SEQ ID NO: 727600 - protein, 18 aa, Homo sapiens
  CDR3 for beta chain variable domain of TCR clone 363800 (TRBV11-2, TRBJ2-3)
CASSLGGAPRGAPNTQYF

SEQ ID NO: 727601 - protein, 17 aa, Homo sapiens
  CDR3 for alpha chain variable domain of TCR clone 363801 (TRAV3, TRAJ38)
CAVRVCLNAGNNRKLIW

SEQ ID NO: 727602 - protein, 13 aa, Homo sapiens
  CDR3 for beta chain variable domain of TCR clone 363801 (TRBV23-1, TRBJ1-4)
CASRGKFNEKLFF

SEQ ID NO: 727603 - protein, 16 aa, Homo sapiens
  CDR3 for alpha chain variable domain of TCR clone 363802 (TRAV16, TRAJ4)
CALRRMFSGGYNKLIF

SEQ ID NO: 727604 - protein, 16 aa, Homo sapiens
  CDR3 for beta chain variable domain of TCR clone 363802 (TRBV12-4, TRBJ1-5)
CASSRPVGGSNKPQHF

SEQ ID NO: 727605 - protein, 15 aa, Homo sapiens
  CDR3 for alpha chain variable domain of TCR clone 363803 (TRAV3, TRAJ3)
CAVRDRRSSASKIIF

SEQ ID NO: 727606 - protein, 14 aa, Homo sapiens
  CDR3 for beta chain variable domain of TCR clone 363803 (TRBV6-1, TRBJ2-5)
CASSPRTAQGTQYF

SEQ ID NO: 727607 - protein, 15 aa, Homo sapiens
  CDR3 for alpha chain variable domain of TCR clone 363804 (TRAV2, TRAJ15)
CAVEYRNQAGTALIF

SEQ ID NO: 727608 - protein, 13 aa, Homo sapiens
  CDR3 for beta chain variable domain of TCR clone 363804 (TRBV10-2, TRBJ2-7)
CASSESGVYEQYF

SEQ ID NO: 727609 - protein, 12 aa, Homo sapiens
  CDR3 for alpha chain variable domain of TCR clone 363805 (TRAV38-1, TRAJ47)
CAFETYGNKLVF

SEQ ID NO: 727610 - protein, 13 aa, Homo sapiens
  CDR3 for beta chain variable domain of TCR clone 363805 (TRBV10-2, TRBJ2-7)
CASGASGGYEQYF

SEQ ID NO: 727611 - protein, 11 aa, Homo sapiens
  CDR3 for alpha chain variable domain of TCR clone 363806 (TRAV2, TRAJ33)
CAVESNYQLIW

SEQ ID NO: 727612 - protein, 13 aa, Homo sapiens
  CDR3 for beta chain variable domain of TCR clone 363806 (TRBV20-1, TRBJ2-3)
CSARAGGRDTQYF

SEQ ID NO: 727613 - protein, 16 aa, Homo sapiens
  CDR3 for alpha chain variable domain of TCR clone 363807 (TRAV3, TRAJ37)
CAVRGKGSGNTGKIIF

SEQ ID NO: 727614 - protein, 15 aa, Homo sapiens
  CDR3 for beta chain variable domain of TCR clone 363807 (TRBV7-3, TRBJ2-2)
CASSETGQGTGELFF

SEQ ID NO: 727615 - protein, 15 aa, Homo sapiens
  CDR3 for alpha chain variable domain of TCR clone 363808 (TRAV27, TRAJ38)
CAGRFNAGNNRKLIW

SEQ ID NO: 727616 - protein, 15 aa, Homo sapiens
  CDR3 for beta chain variable domain of TCR clone 363808 (TRBV19, TRBJ1-6)
CASSTQGAVGSPLHF

SEQ ID NO: 727617 - protein, 14 aa, Homo sapiens
  CDR3 for alpha chain variable domain of TCR clone 363809 (TRAV36/DV7, TRAJ44)
CCGANTCTASKLTF

SEQ ID NO: 727618 - protein, 13 aa, Homo sapiens
  CDR3 for beta chain variable domain of TCR clone 363809 (TRBV5-1, TRBJ1-2)
CASSIDRPEGYTF

SEQ ID NO: 727619 - protein, 16 aa, Homo sapiens
  CDR3 for alpha chain variable domain of TCR clone 363810 (TRAV30, TRAJ24)
CGTEIVDADSWGKFQF

SEQ ID NO: 727620 - protein, 12 aa, Homo sapiens
  CDR3 for beta chain variable domain of TCR clone 363810 (TRBV11-2, TRBJ2-2)
CASSLPTGELLF

SEQ ID NO: 727621 - protein, 13 aa, Homo sapiens
  CDR3 for alpha chain variable domain of TCR clone 363811 (TRAV12-3, TRAJ8)
CAMEKTGFTKLVF

SEQ ID NO: 727622 - protein, 15 aa, Homo sapiens
  CDR3 for beta chain variable domain of TCR clone 363811 (TRBV11-3, TRBJ2-7)
CASSPGPASSYEQYF

SEQ ID NO: 727623 - protein, 11 aa, Homo sapiens
  CDR3 for alpha chain variable domain of TCR clone 363812 (TRAV2, TRAJ21)
CAVFNFNKFYF

SEQ ID NO: 727624 - protein, 14 aa, Homo sapiens
  CDR3 for beta chain variable domain of TCR clone 363812 (TRBV15, TRBJ2-3)
CATRSGTSTDTQCF

SEQ ID NO: 727625 - protein, 12 aa, Homo sapiens
  CDR3 for alpha chain variable domain of TCR clone 363813 (TRAV20, TRAJ20)
CAVASNDYKLSF

SEQ ID NO: 727626 - protein, 13 aa, Homo sapiens
  CDR3 for beta chain variable domain of TCR clone 363813 (TRBV4-2, TRBJ1-1)
CASSQAGNTEAFF

SEQ ID NO: 727627 - protein, 15 aa, Homo sapiens
  CDR3 for alpha chain variable domain of TCR clone 363814 (TRAV3, TRAJ10)
CAVRDGTGEGNKLTF

SEQ ID NO: 727628 - protein, 15 aa, Homo sapiens
  CDR3 for beta chain variable domain of TCR clone 363814 (TRBV4-2, TRBJ1-4)
CASSLVQREVEKLFF

SEQ ID NO: 727629 - protein, 14 aa, Homo sapiens
  CDR3 for alpha chain variable domain of TCR clone 363815 (TRAV16, TRAJ15)
CALRPTQAGTALIF

SEQ ID NO: 727630 - protein, 15 aa, Homo sapiens
  CDR3 for beta chain variable domain of TCR clone 363815 (TRBV10-3, TRBJ2-3)
CAISLTSGGTDTQYF

SEQ ID NO: 727631 - protein, 13 aa, Homo sapiens
  CDR3 for alpha chain variable domain of TCR clone 363816 (TRAV8-3, TRAJ48)
CAVVRFGNEKLTF

SEQ ID NO: 727632 - protein, 15 aa, Homo sapiens
  CDR3 for beta chain variable domain of TCR clone 363816 (TRBV3-1, TRBJ1-2)
CASSPTRLPEGGYTF

SEQ ID NO: 727633 - protein, 13 aa, Homo sapiens
  CDR3 for alpha chain variable domain of TCR clone 363817 (TRAV27, TRAJ56)
CAGKPGANSKLTF

SEQ ID NO: 727634 - protein, 15 aa, Homo sapiens
  CDR3 for beta chain variable domain of TCR clone 363817 (TRBV6-1, TRBJ2-3)
CASSDRWDSTDTQYF

SEQ ID NO: 727635 - protein, 14 aa, Homo sapiens
  CDR3 for alpha chain variable domain of TCR clone 363818 (TRAV12-1, TRAJ22)
CVAFSSGSARQLTF

SEQ ID NO: 727636 - protein, 21 aa, Homo sapiens
  CDR3 for beta chain variable domain of TCR clone 363818 (TRBV15, TRBJ2-1)
VWGTQPCTCVPPAEVDTARFF

SEQ ID NO: 727637 - protein, 13 aa, Homo sapiens
  CDR3 for alpha chain variable domain of TCR clone 363819 (TRAV8-6, TRAJ21)
CAVSPSSLNKFYF

SEQ ID NO: 727638 - protein, 14 aa, Homo sapiens
  CDR3 for beta chain variable domain of TCR clone 363819 (TRBV7-9, TRBJ2-5)
CASSLDTAQEDQYF

SEQ ID NO: 727639 - protein, 12 aa, Homo sapiens
  CDR3 for alpha chain variable domain of TCR clone 363820 (TRAV10, TRAJ33)
CLSGDSNYQLIW

SEQ ID NO: 727640 - protein, 15 aa, Homo sapiens
  CDR3 for beta chain variable domain of TCR clone 363820 (TRBV6-3, TRBJ2-7)
CASSSPGTVFYEQYF

SEQ ID NO: 727641 - protein, 14 aa, Homo sapiens
  CDR3 for alpha chain variable domain of TCR clone 363821 (TRAV12-3, TRAJ10)
SHLPLTGGGNKLTF

SEQ ID NO: 727642 - protein, 14 aa, Homo sapiens
  CDR3 for beta chain variable domain of TCR clone 363821 (TRBV12-4, TRBJ1-1)
CASSLGTGGTEAFL

SEQ ID NO: 727643 - protein, 14 aa, Homo sapiens
  CDR3 for alpha chain variable domain of TCR clone 363822 (TRAV26-1, TRAJ45)
CIEVTGGGADGLTF

SEQ ID NO: 727644 - protein, 14 aa, Homo sapiens
  CDR3 for beta chain variable domain of TCR clone 363822 (TRBV13, TRBJ2-7)
CASSLKGASYEQYF

SEQ ID NO: 727645 - protein, 16 aa, Homo sapiens
  CDR3 for alpha chain variable domain of TCR clone 363823 (TRAV16, TRAJ37)
CSKWPDGSSNTGKLIF

SEQ ID NO: 727646 - protein, 13 aa, Homo sapiens
  CDR3 for beta chain variable domain of TCR clone 363823 (TRBV7-2, TRBJ2-7)
CASSSPSGSEQYF

SEQ ID NO: 727647 - protein, 11 aa, Homo sapiens
  CDR3 for alpha chain variable domain of TCR clone 363824 (TRAV17, TRAJ21)
CATGNFNKFYF

SEQ ID NO: 727648 - protein, 16 aa, Homo sapiens
  CDR3 for beta chain variable domain of TCR clone 363824 (TRBV2, TRBJ2-1)
CASSANPRDWQAEQCF

SEQ ID NO: 727649 - protein, 13 aa, Homo sapiens
  CDR3 for alpha chain variable domain of TCR clone 363825 (TRAV8-3, TRAJ43)
CAMGPDNNNDMCF

SEQ ID NO: 727650 - protein, 12 aa, Homo sapiens
  CDR3 for beta chain variable domain of TCR clone 363825 (TRBV7-2, TRBJ1-6)
CASSVSSSPLHF

SEQ ID NO: 727651 - protein, 15 aa, Homo sapiens
  CDR3 for alpha chain variable domain of TCR clone 363826 (TRAV20, TRAJ43)
CAVQAGKSSNNEIRF

SEQ ID NO: 727652 - protein, 14 aa, Homo sapiens
  CDR3 for beta chain variable domain of TCR clone 363826 (TRBV27, TRBJ2-1)
CASRHLGGGKEQFF

SEQ ID NO: 727653 - protein, 10 aa, Homo sapiens
  CDR3 for alpha chain variable domain of TCR clone 363827 (TRAV21, TRAJ35)
CAVFGNVLHC

SEQ ID NO: 727654 - protein, 15 aa, Homo sapiens
  CDR3 for beta chain variable domain of TCR clone 363827 (TRBV7-3, TRBJ2-1)
CASSPTGGGEVEQFF

SEQ ID NO: 727655 - protein, 18 aa, Homo sapiens
  CDR3 for alpha chain variable domain of TCR clone 363828 (TRAV26-1, TRAJ57)
CIVRVALRFQGGSEKLVF

SEQ ID NO: 727656 - protein, 15 aa, Homo sapiens
  CDR3 for beta chain variable domain of TCR clone 363828 (TRBV27, TRBJ2-1)
CASSNGGGSANEQFF

SEQ ID NO: 727657 - protein, 12 aa, Homo sapiens
  CDR3 for alpha chain variable domain of TCR clone 363829 (TRAV1-1, TRAJ8)
CAGGTGFQKLVF

SEQ ID NO: 727658 - protein, 13 aa, Homo sapiens
  CDR3 for beta chain variable domain of TCR clone 363829 (TRBV5-1, TRBJ1-2)
CASSLQGNYGYTF

SEQ ID NO: 727659 - protein, 14 aa, Homo sapiens
  CDR3 for alpha chain variable domain of TCR clone 363830 (TRAV1-2, TRAJ16)
CAGNRFSDGQKLLF

SEQ ID NO: 727660 - protein, 12 aa, Homo sapiens
  CDR3 for beta chain variable domain of TCR clone 363830 (TRBV14, TRBJ2-7)
CASSRLKGEQYF

SEQ ID NO: 727661 - protein, 12 aa, Homo sapiens
  CDR3 for alpha chain variable domain of TCR clone 363831 (TRAV9-2, TRAJ36)
CALKKGANNLFF

SEQ ID NO: 727662 - protein, 15 aa, Homo sapiens
  CDR3 for beta chain variable domain of TCR clone 363831 (TRBV20-1, TRBJ2-7)
CSARDRVSGMDEQYF

SEQ ID NO: 727663 - protein, 16 aa, Homo sapiens
  CDR3 for alpha chain variable domain of TCR clone 363832 (TRAV8-3, TRAJ18)
CAVGARRGSTLGRRYF

SEQ ID NO: 727664 - protein, 14 aa, Homo sapiens
  CDR3 for beta chain variable domain of TCR clone 363832 (TRBV5-4, TRBJ1-3)
CASSSQSAGNTIYF

SEQ ID NO: 727665 - protein, 12 aa, Homo sapiens
  CDR3 for alpha chain variable domain of TCR clone 363833 (TRAV21, TRAJ49)
CAVRNTGNQFYF

SEQ ID NO: 727666 - protein, 17 aa, Homo sapiens
  CDR3 for beta chain variable domain of TCR clone 363833 (TRBV4-1, TRBJ1-3)
CASSPQRGIRFGNTIYF

SEQ ID NO: 727667 - protein, 14 aa, Homo sapiens
  CDR3 for alpha chain variable domain of TCR clone 363834 (TRAV29/DV5, TRAJ36)
CAARRKTGANNLFF

SEQ ID NO: 727668 - protein, 19 aa, Homo sapiens
  CDR3 for beta chain variable domain of TCR clone 363834 (TRBV7-2, TRBJ2-3)
CASSFLSRTWGGGTATQYF

SEQ ID NO: 727669 - protein, 15 aa, Homo sapiens
  CDR3 for alpha chain variable domain of TCR clone 363835 (TRAV13-2, TRAJ40)
CAERRSRQGTYKYTF

SEQ ID NO: 727670 - protein, 15 aa, Homo sapiens
  CDR3 for beta chain variable domain of TCR clone 363835 (TRBV19, TRBJ2-1)
CASSMGWNSNNEQFF

SEQ ID NO: 727671 - protein, 14 aa, Homo sapiens
  CDR3 for alpha chain variable domain of TCR clone 363836 (TRAV20, TRAJ56)
CAVQFGGANSKLTF

SEQ ID NO: 727672 - protein, 16 aa, Homo sapiens
  CDR3 for beta chain variable domain of TCR clone 363836 (TRBV6-1, TRBJ2-3)
CASSEVIGQGTDTQYF

SEQ ID NO: 727673 - protein, 10 aa, Homo sapiens
  CDR3 for alpha chain variable domain of TCR clone 363837 (TRAV38-1, TRAJ34)
CAFMDDKLIF

SEQ ID NO: 727674 - protein, 14 aa, Homo sapiens
  CDR3 for beta chain variable domain of TCR clone 363837 (TRBV11-1, TRBJ2-7)
CASSFRQGSYEQYF

SEQ ID NO: 727675 - protein, 14 aa, Homo sapiens
  CDR3 for alpha chain variable domain of TCR clone 363838 (TRAV20, TRAJ56)
CAVQFGGANSKLTF

SEQ ID NO: 727676 - protein, 16 aa, Homo sapiens
  CDR3 for beta chain variable domain of TCR clone 363838 (TRBV12-5, TRBJ2-5)
CASGPRTSGNQETQYF

SEQ ID NO: 727677 - protein, 13 aa, Homo sapiens
  CDR3 for alpha chain variable domain of TCR clone 363839 (TRAV17, TRAJ31)
CATDENNNARLLF

SEQ ID NO: 727678 - protein, 14 aa, Homo sapiens
  CDR3 for beta chain variable domain of TCR clone 363839 (TRBV11-2, TRBJ2-1)
CASSPSRQGGGQFF

SEQ ID NO: 727679 - protein, 11 aa, Homo sapiens
  CDR3 for alpha chain variable domain of TCR clone 363840 (TRAV2, TRAJ13)
CASGGYQKVNF

SEQ ID NO: 727680 - protein, 16 aa, Homo sapiens
  CDR3 for beta chain variable domain of TCR clone 363840 (TRBV12-5, TRBJ2-5)
CASGPRTSGNQETQYF

SEQ ID NO: 727681 - protein, 16 aa, Homo sapiens
  CDR3 for alpha chain variable domain of TCR clone 363841 (TRAV12-3, TRAJ53)
CAMSVGSGGSNYKLTF

SEQ ID NO: 727682 - protein, 15 aa, Homo sapiens
  CDR3 for beta chain variable domain of TCR clone 363841 (TRBV4-1, TRBJ1-4)
CASSDTGGTNEKLFF

SEQ ID NO: 727683 - protein, 12 aa, Homo sapiens
  CDR3 for alpha chain variable domain of TCR clone 363842 (TRAV38-1, TRAJ34)
GAFMKETDKLIF

SEQ ID NO: 727684 - protein, 17 aa, Homo sapiens
  CDR3 for beta chain variable domain of TCR clone 363842 (TRBV7-8, TRBJ2-6)
CASSAGTGGAGADVLTF

SEQ ID NO: 727685 - protein, 17 aa, Homo sapiens
  CDR3 for alpha chain variable domain of TCR clone 363843 (TRAV3, TRAJ42)
CALRDMDYGGSQGNLIF

SEQ ID NO: 727686 - protein, 13 aa, Homo sapiens
  CDR3 for beta chain variable domain of TCR clone 363843 (TRBV10-3, TRBJ2-7)
CASKLAVNYEQYF

SEQ ID NO: 727687 - protein, 16 aa, Homo sapiens
  CDR3 for alpha chain variable domain of TCR clone 363844 (TRAV26-2, TRAJ23)
CILRAMIYNQGGKLIF

SEQ ID NO: 727688 - protein, 16 aa, Homo sapiens
  CDR3 for beta chain variable domain of TCR clone 363844 (TRBV2, TRBJ2-3)
CASSTSVEGVTDTQYF

SEQ ID NO: 727689 - protein, 14 aa, Homo sapiens
  CDR3 for alpha chain variable domain of TCR clone 363845 (TRAV2, TRAJ9)
CAVEDRRGGFKTIF

SEQ ID NO: 727690 - protein, 12 aa, Homo sapiens
  CDR3 for beta chain variable domain of TCR clone 363845 (TRBV11-2, TRBJ2-1)
CASSPGNNGQFF

SEQ ID NO: 727691 - protein, 12 aa, Homo sapiens
  CDR3 for alpha chain variable domain of TCR clone 363846 (TRAV3, TRAJ31)
CAVRPRGPILMF

SEQ ID NO: 727692 - protein, 17 aa, Homo sapiens
  CDR3 for beta chain variable domain of TCR clone 363846 (TRBV7-9, TRBJ1-5)
CASSASQGGYSNQAQHF

SEQ ID NO: 727693 - protein, 12 aa, Homo sapiens
  CDR3 for alpha chain variable domain of TCR clone 363847 (TRAV6, TRAJ40)
CARTSGTYKYIF

SEQ ID NO: 727694 - protein, 14 aa, Homo sapiens
  CDR3 for beta chain variable domain of TCR clone 363847 (TRBV7-2, TRBJ2-7)
CASSPKTSFYEQYF

SEQ ID NO: 727695 - protein, 14 aa, Homo sapiens
  CDR3 for alpha chain variable domain of TCR clone 363848 (TRAV13-1, TRAJ44)
CAAKATGTASKLTF

SEQ ID NO: 727696 - protein, 14 aa, Homo sapiens
  CDR3 for beta chain variable domain of TCR clone 363848 (TRBV19, TRBJ2-2)
CASSTLHRSGELFF

SEQ ID NO: 727697 - protein, 18 aa, Homo sapiens
  CDR3 for alpha chain variable domain of TCR clone 363849 (TRAV14/DV4, TRAJ15)
CAMREFPPTGQAGTARIF

SEQ ID NO: 727698 - protein, 17 aa, Homo sapiens
  CDR3 for beta chain variable domain of TCR clone 363849 (TRBV7-3, TRBJ2-3)
CASSLMKRMRGADTQYF

SEQ ID NO: 727699 - protein, 12 aa, Homo sapiens
  CDR3 for alpha chain variable domain of TCR clone 363850 (TRAV22, TRAJ29)
CAPPSGNTPLVF

SEQ ID NO: 727700 - protein, 14 aa, Homo sapiens
  CDR3 for beta chain variable domain of TCR clone 363850 (TRBV11-2, TRBJ2-7)
CASSLGAGAYAQYF

SEQ ID NO: 727701 - protein, 14 aa, Homo sapiens
  CDR3 for alpha chain variable domain of TCR clone 363851 (TRAV2, TRAJ9)
CAVEDRCGGFKTIF

SEQ ID NO: 727702 - protein, 12 aa, Homo sapiens
  CDR3 for beta chain variable domain of TCR clone 363851 (TRBV7-9, TRBJ2-7)
CASSLEGYEQYF

SEQ ID NO: 727703 - protein, 14 aa, Homo sapiens
  CDR3 for alpha chain variable domain of TCR clone 363852 (TRAV3, TRAJ9)
CAVRLNTGGFKTIF

SEQ ID NO: 727704 - protein, 17 aa, Homo sapiens
  CDR3 for beta chain variable domain of TCR clone 363852 (TRBV20-1, TRBJ2-2)
CSASGSGQGGLTGELFF

SEQ ID NO: 727705 - protein, 12 aa, Homo sapiens
  CDR3 for alpha chain variable domain of TCR clone 363853 (TRAV2, TRAJ9)
CAVGAGGFKTIF

SEQ ID NO: 727706 - protein, 13 aa, Homo sapiens
  CDR3 for beta chain variable domain of TCR clone 363853 (TRBV10-3, TRBJ1-2)
CAISERDSYGYTF

SEQ ID NO: 727707 - protein, 12 aa, Homo sapiens
  CDR3 for alpha chain variable domain of TCR clone 363854 (TRAV13-1, TRAJ21)
CAAKEGFDKFYF

SEQ ID NO: 727708 - protein, 15 aa, Homo sapiens
  CDR3 for beta chain variable domain of TCR clone 363854 (TRBV12-4, TRBJ2-5)
CASSPPTGLQETQYF

SEQ ID NO: 727709 - protein, 16 aa, Homo sapiens
  CDR3 for alpha chain variable domain of TCR clone 363855 (TRAV12-3, TRAJ53)
CAMSPGSGGSNYKLTF

SEQ ID NO: 727710 - protein, 11 aa, Homo sapiens
  CDR3 for beta chain variable domain of TCR clone 363855 (TRBV29-1, TRBJ2-5)
CGQDRTGTQYF

SEQ ID NO: 727711 - protein, 15 aa, Homo sapiens
  CDR3 for alpha chain variable domain of TCR clone 363856 (TRAV27, TRAJ38)
CAARRNAGNNRKLIW

SEQ ID NO: 727712 - protein, 17 aa, Homo sapiens
  CDR3 for beta chain variable domain of TCR clone 363856 (TRBV13, TRBJ2-3)
CASSLSRVAGGRNTQYL

SEQ ID NO: 727713 - protein, 15 aa, Homo sapiens
  CDR3 for alpha chain variable domain of TCR clone 363857 (TRAV13-2, TRAJ5)
CAENPHWTGRRALTF

SEQ ID NO: 727714 - protein, 14 aa, Homo sapiens
  CDR3 for beta chain variable domain of TCR clone 363857 (TRBV5-7, TRBJ2-7)
CASSFKGATGERYF

SEQ ID NO: 727715 - protein, 11 aa, Homo sapiens
  CDR3 for alpha chain variable domain of TCR clone 363858 (TRAV4, TRAJ28)
NYGAGSYQLTF

SEQ ID NO: 727716 - protein, 13 aa, Homo sapiens
  CDR3 for beta chain variable domain of TCR clone 363858 (TRBV12-4, TRBJ2-6)
CASSGTGANVLTF

SEQ ID NO: 727717 - protein, 12 aa, Homo sapiens
  CDR3 for alpha chain variable domain of TCR clone 363859 (TRAV12-3, TRAJ17)
CAMTLTGNKLTL

SEQ ID NO: 727718 - protein, 16 aa, Homo sapiens
  CDR3 for beta chain variable domain of TCR clone 363859 (TRBV20-1, TRBJ1-4)
CSAPGQGLLTNEKLFF

SEQ ID NO: 727719 - protein, 11 aa, Homo sapiens
  CDR3 for alpha chain variable domain of TCR clone 363860 (TRAV2, TRAJ13)
CASGGYQKVTF

SEQ ID NO: 727720 - protein, 16 aa, Homo sapiens
  CDR3 for beta chain variable domain of TCR clone 363860 (TRBV6-1, TRBJ2-5)
CASSETLDRGAETQTS

SEQ ID NO: 727721 - protein, 13 aa, Homo sapiens
  CDR3 for alpha chain variable domain of TCR clone 363861 (TRAV26-1, TRAJ48)
CIVRVVGDEKLTF

SEQ ID NO: 727722 - protein, 16 aa, Homo sapiens
  CDR3 for beta chain variable domain of TCR clone 363861 (TRBV12-5, TRBJ2-5)
CASGPRTSGDQETQYF

SEQ ID NO: 727723 - protein, 10 aa, Homo sapiens
  CDR3 for alpha chain variable domain of TCR clone 363862 (TRAV21, TRAJ31)
CAVDNARLMF

SEQ ID NO: 727724 - protein, 13 aa, Homo sapiens
  CDR3 for beta chain variable domain of TCR clone 363862 (TRBV4-1, TRBJ1-1)
CAISRKMNTEAFF

SEQ ID NO: 727725 - protein, 14 aa, Homo sapiens
  CDR3 for alpha chain variable domain of TCR clone 363863 (TRAV12-2, TRAJ13)
CAVKKTGGYQKVTF

SEQ ID NO: 727726 - protein, 15 aa, Homo sapiens
  CDR3 for beta chain variable domain of TCR clone 363863 (TRBV7-9, TRBJ1-1)
CASSLLEQGGTEAFF

SEQ ID NO: 727727 - protein, 18 aa, Homo sapiens
  CDR3 for alpha chain variable domain of TCR clone 363864 (TRAV26-1, TRAJ42)
CIVRPIMDEAKEISSLEK

SEQ ID NO: 727728 - protein, 15 aa, Homo sapiens
  CDR3 for beta chain variable domain of TCR clone 363864 (TRBV7-3, TRBJ2-2)
CQQLKAGTLSGELLF

SEQ ID NO: 727729 - protein, 16 aa, Homo sapiens
  CDR3 for alpha chain variable domain of TCR clone 363865 (TRAV13-1, TRAJ18)
CAASRMRGSTLGRLYF

SEQ ID NO: 727730 - protein, 14 aa, Homo sapiens
  CDR3 for beta chain variable domain of TCR clone 363865 (TRBV25-1, TRBJ1-1)
CASTHLGGNTEAFF

SEQ ID NO: 727731 - protein, 17 aa, Homo sapiens
  CDR3 for alpha chain variable domain of TCR clone 363866 (TRAV3, TRAJ6)
CAVRDGPRAGGRYIPTF

SEQ ID NO: 727732 - protein, 14 aa, Homo sapiens
  CDR3 for beta chain variable domain of TCR clone 363866 (TRBV7-2, TRBJ2-7)
CASSPKTSCYEQYF

SEQ ID NO: 727733 - protein, 14 aa, Homo sapiens
  CDR3 for alpha chain variable domain of TCR clone 363867 (TRAV1-2, TRAJ8)
CAVREDTGFQKLVF

SEQ ID NO: 727734 - protein, 22 aa, Homo sapiens
  CDR3 for beta chain variable domain of TCR clone 363867 (TRBV7-3, TRBJ2-2)
GGTQPCISVPAAQEDTPGSWFF

SEQ ID NO: 727735 - protein, 14 aa, Homo sapiens
  CDR3 for alpha chain variable domain of TCR clone 363868 (TRAV16, TRAJ37)
CALDISVNTGKLIF

SEQ ID NO: 727736 - protein, 13 aa, Homo sapiens
  CDR3 for beta chain variable domain of TCR clone 363868 (TRBV27, TRBJ1-1)
CASSLSIGAEAFF

SEQ ID NO: 727737 - protein, 13 aa, Homo sapiens
  CDR3 for alpha chain variable domain of TCR clone 363869 (TRAV20, TRAJ32)
CGRYGGATNKLIF

SEQ ID NO: 727738 - protein, 16 aa, Homo sapiens
  CDR3 for beta chain variable domain of TCR clone 363869 (TRBV19, TRBJ2-2)
CASRSPGTGATGELFF

SEQ ID NO: 727739 - protein, 15 aa, Homo sapiens
  CDR3 for alpha chain variable domain of TCR clone 363870 (TRAV13-2, TRAJ10)
CAENKIGGGGNKRTF

SEQ ID NO: 727740 - protein, 15 aa, Homo sapiens
  CDR3 for beta chain variable domain of TCR clone 363870 (TRBV5-1, TRBJ1-2)
CASSPGDRGSYGYTF

SEQ ID NO: 727741 - protein, 13 aa, Homo sapiens
  CDR3 for alpha chain variable domain of TCR clone 363871 (TRAV38-1, TRAJ42)
CARWGGSQGNLIF

SEQ ID NO: 727742 - protein, 15 aa, Homo sapiens
  CDR3 for beta chain variable domain of TCR clone 363871 (TRBV11-1, TRBJ2-3)
CASSLLAGRTDTQYF

SEQ ID NO: 727743 - protein, 15 aa, Homo sapiens
  CDR3 for alpha chain variable domain of TCR clone 363872 (TRAV3, TRAJ20)
CAVRDIKLSDYKLSF

SEQ ID NO: 727744 - protein, 18 aa, Homo sapiens
  CDR3 for beta chain variable domain of TCR clone 363872 (TRBV20-1, TRBJ2-5)
CSQTGASGRLGGKETQYF

SEQ ID NO: 727745 - protein, 15 aa, Homo sapiens
  CDR3 for alpha chain variable domain of TCR clone 363873 (TRAV21, TRAJ18)
CAVRDRGSTLGRLYF

SEQ ID NO: 727746 - protein, 15 aa, Homo sapiens
  CDR3 for beta chain variable domain of TCR clone 363873 (TRBV7-9, TRBJ2-7)
CASSSSGLAVYEQYF

SEQ ID NO: 727747 - protein, 14 aa, Homo sapiens
  CDR3 for alpha chain variable domain of TCR clone 363874 (TRAV26-1, TRAJ34)
CIVRVAYNTDKLIF

SEQ ID NO: 727748 - protein, 15 aa, Homo sapiens
  CDR3 for beta chain variable domain of TCR clone 363874 (TRBV5-1, TRBJ2-7)
CASSPQGRPLDEQYF

SEQ ID NO: 727749 - protein, 11 aa, Homo sapiens
  CDR3 for alpha chain variable domain of TCR clone 363875 (TRAV12-1, TRAJ43)
CVEYDNNDMRF

SEQ ID NO: 727750 - protein, 16 aa, Homo sapiens
  CDR3 for beta chain variable domain of TCR clone 363875 (TRBV5-4, TRBJ2-1)
CSSSLVGSGQDNEQFF

SEQ ID NO: 727751 - protein, 14 aa, Homo sapiens
  CDR3 for alpha chain variable domain of TCR clone 363876 (TRAV26-1, TRAJ49)
CIVRLTNTGNQFYF

SEQ ID NO: 727752 - protein, 11 aa, Homo sapiens
  CDR3 for beta chain variable domain of TCR clone 363876 (TRBV29-1, TRBJ2-5)
CCEDRTGTQYF

SEQ ID NO: 727753 - protein, 17 aa, Homo sapiens
  CDR3 for alpha chain variable domain of TCR clone 363877 (TRAV12-3, TRAJ4)
CAMTGAGTRLAVHPYIQ

SEQ ID NO: 727754 - protein, 14 aa, Homo sapiens
  CDR3 for beta chain variable domain of TCR clone 363877 (TRBV10-3, TRBJ1-1)
CAISDADRGVEAFF

SEQ ID NO: 727755 - protein, 12 aa, Homo sapiens
  CDR3 for alpha chain variable domain of TCR clone 363878 (TRAV13-1, TRAJ53)
AASGGSNYKLTF

SEQ ID NO: 727756 - protein, 13 aa, Homo sapiens
  CDR3 for beta chain variable domain of TCR clone 363878 (TRBV5-4, TRBJ2-5)
CASSPVSQETQYF

SEQ ID NO: 727757 - protein, 14 aa, Homo sapiens
  CDR3 for alpha chain variable domain of TCR clone 363879 (TRAV12-2, TRAJ13)
CAVKKTGGYPKVTF

SEQ ID NO: 727758 - protein, 12 aa, Homo sapiens
  CDR3 for beta chain variable domain of TCR clone 363879 (TRBV6-3, TRBJ2-7)
CASSLTPYEQYF

SEQ ID NO: 727759 - protein, 10 aa, Homo sapiens
  CDR3 for alpha chain variable domain of TCR clone 363880 (TRAV1-2, TRAJ31)
CAFFDARLMF

SEQ ID NO: 727760 - protein, 14 aa, Homo sapiens
  CDR3 for beta chain variable domain of TCR clone 363880 (TRBV4-1, TRBJ2-3)
CASSQGGFTDTQYF

SEQ ID NO: 727761 - protein, 10 aa, Homo sapiens
  CDR3 for alpha chain variable domain of TCR clone 363881 (TRAV21, TRAJ31)
CAVDNARLMF

SEQ ID NO: 727762 - protein, 14 aa, Homo sapiens
  CDR3 for beta chain variable domain of TCR clone 363881 (TRBV5-5, TRBJ2-2)
CASRLLGDTGELFF

SEQ ID NO: 727763 - protein, 13 aa, Homo sapiens
  CDR3 for alpha chain variable domain of TCR clone 363882 (TRAV17, TRAJ9)
CATGSTGCFKTIF

SEQ ID NO: 727764 - protein, 14 aa, Homo sapiens
  CDR3 for beta chain variable domain of TCR clone 363882 (TRBV7-8, TRBJ2-7)
CASTFRGGPNEQYF

SEQ ID NO: 727765 - protein, 17 aa, Homo sapiens
  CDR3 for alpha chain variable domain of TCR clone 363883 (TRAV4, TRAJ18)
CLVGERSVGSTLGRLYF

SEQ ID NO: 727766 - protein, 18 aa, Homo sapiens
  CDR3 for beta chain variable domain of TCR clone 363883 (TRBV11-2, TRBJ2-3)
CASSLGGASRGAPNMQYF

SEQ ID NO: 727767 - protein, 17 aa, Homo sapiens
  CDR3 for alpha chain variable domain of TCR clone 363884 (TRAV13-1, TRAJ52)
CAASSGSGGTSYGKLTF

SEQ ID NO: 727768 - protein, 15 aa, Homo sapiens
  CDR3 for beta chain variable domain of TCR clone 363884 (TRBV2, TRBJ2-1)
CASSKLAGSYNEQFF

SEQ ID NO: 727769 - protein, 13 aa, Homo sapiens
  CDR3 for alpha chain variable domain of TCR clone 363885 (TRAV3, TRAJ15)
CAVRDQAGTALIF

SEQ ID NO: 727770 - protein, 15 aa, Homo sapiens
  CDR3 for beta chain variable domain of TCR clone 363885 (TRBV27, TRBJ2-1)
CASSNGGGSSNEQFF

SEQ ID NO: 727771 - protein, 16 aa, Homo sapiens
  CDR3 for alpha chain variable domain of TCR clone 363886 (TRAV13-2, TRAJ32)
CAENMNYGGATNKLIF

SEQ ID NO: 727772 - protein, 14 aa, Homo sapiens
  CDR3 for beta chain variable domain of TCR clone 363886 (TRBV15, TRBJ2-5)
CATSSTGYQETHYF

SEQ ID NO: 727773 - protein, 14 aa, Homo sapiens
  CDR3 for alpha chain variable domain of TCR clone 363887 (TRAV2, TRAJ9)
CAVEDRSGGFKTIF

SEQ ID NO: 727774 - protein, 14 aa, Homo sapiens
  CDR3 for beta chain variable domain of TCR clone 363887 (TRBV7-7, TRBJ2-2)
CATRQDSDTGELFF

SEQ ID NO: 727775 - protein, 11 aa, Homo sapiens
  CDR3 for alpha chain variable domain of TCR clone 363888 (TRAV21, TRAJ34)
CAHYNTDKLIF

SEQ ID NO: 727776 - protein, 15 aa, Homo sapiens
  CDR3 for beta chain variable domain of TCR clone 363888 (TRBV7-9, TRBJ1-4)
CASSARTGGNEKLFF

SEQ ID NO: 727777 - protein, 14 aa, Homo sapiens
  CDR3 for alpha chain variable domain of TCR clone 363889 (TRAV3, TRAJ9)
CAVRSNTGGFKTIF

SEQ ID NO: 727778 - protein, 14 aa, Homo sapiens
  CDR3 for beta chain variable domain of TCR clone 363889 (TRBV15, TRBJ2-1)
CATSGVEDYNEQFF

SEQ ID NO: 727779 - protein, 14 aa, Homo sapiens
  CDR3 for alpha chain variable domain of TCR clone 363890 (TRAV1-1, TRAJ28)
CAAPSGAGSYQLTF

SEQ ID NO: 727780 - protein, 15 aa, Homo sapiens
  CDR3 for beta chain variable domain of TCR clone 363890 (TRBV7-2, TRBJ1-2)
RASSLVSGGDYGYTF

SEQ ID NO: 727781 - protein, 13 aa, Homo sapiens
  CDR3 for alpha chain variable domain of TCR clone 363891 (TRAV3, TRAJ8)
CAVRFTGFQKLVF

SEQ ID NO: 727782 - protein, 12 aa, Homo sapiens
  CDR3 for beta chain variable domain of TCR clone 363891 (TRBV2, TRBJ1-2)
CACSGQTYGYTF

SEQ ID NO: 727783 - protein, 18 aa, Homo sapiens
  CDR3 for alpha chain variable domain of TCR clone 363892 (TRAV29/DV5, TRAJ52)
CAAGFRGAGGTSYGKLTF

SEQ ID NO: 727784 - protein, 13 aa, Homo sapiens
  CDR3 for beta chain variable domain of TCR clone 363892 (TRBV20-1, TRBJ2-1)
CSARMGGMNEQFF

SEQ ID NO: 727785 - protein, 15 aa, Homo sapiens
  CDR3 for alpha chain variable domain of TCR clone 363893 (TRAV8-3, TRAJ45)
CASSYSGGGAGGPTF

SEQ ID NO: 727786 - protein, 13 aa, Homo sapiens
  CDR3 for beta chain variable domain of TCR clone 363893 (TRBV10-3, TRBJ2-7)
CASKLAVNYEQYF

SEQ ID NO: 727787 - protein, 12 aa, Homo sapiens
  CDR3 for alpha chain variable domain of TCR clone 363894 (TRAV20, TRAJ10)
CAVLPGGNKLTF

SEQ ID NO: 727788 - protein, 17 aa, Homo sapiens
  CDR3 for beta chain variable domain of TCR clone 363894 (TRBV7-8, TRBJ2-6)
CASSAGTGGAGANVLTF

SEQ ID NO: 727789 - protein, 11 aa, Homo sapiens
  CDR3 for alpha chain variable domain of TCR clone 363895 (TRAV1-2, TRAJ20)
CAVANDYKLSF

SEQ ID NO: 727790 - protein, 18 aa, Homo sapiens
  CDR3 for beta chain variable domain of TCR clone 363895 (TRBV20-1, TRBJ2-6)
CSAETTPSHGSGANDLTF

SEQ ID NO: 727791 - protein, 14 aa, Homo sapiens
  CDR3 for alpha chain variable domain of TCR clone 363896 (TRAV16, TRAJ33)
CALSAMDSNYQLIW

SEQ ID NO: 727792 - protein, 15 aa, Homo sapiens
  CDR3 for beta chain variable domain of TCR clone 363896 (TRBV4-2, TRBJ1-4)
CASSLVQREVEKLFF

SEQ ID NO: 727793 - protein, 14 aa, Homo sapiens
  CDR3 for alpha chain variable domain of TCR clone 363897 (TRAV38-1, TRAJ45)
CAYYSGGGADGLTF

SEQ ID NO: 727794 - protein, 15 aa, Homo sapiens
  CDR3 for beta chain variable domain of TCR clone 363897 (TRBV11-2, TRBJ2-2)
CASSSDRVNAGELFF

SEQ ID NO: 727795 - protein, 13 aa, Homo sapiens
  CDR3 for alpha chain variable domain of TCR clone 363898 (TRAV35, TRAJ33)
CAGQRDSNYQLIW

SEQ ID NO: 727796 - protein, 16 aa, Homo sapiens
  CDR3 for beta chain variable domain of TCR clone 363898 (TRBV7-3, TRBJ2-2)
CASSLKRGTLSGELFF

SEQ ID NO: 727797 - protein, 14 aa, Homo sapiens
  CDR3 for alpha chain variable domain of TCR clone 363899 (TRAV20, TRAJ49)
CAVQAVVAGNQFYF

SEQ ID NO: 727798 - protein, 13 aa, Homo sapiens
  CDR3 for beta chain variable domain of TCR clone 363899 (TRBV7-3, TRBJ1-1)
CASSQDWGAEAFF

SEQ ID NO: 727799 - protein, 14 aa, Homo sapiens
  CDR3 for alpha chain variable domain of TCR clone 363900 (TRAV25, TRAJ44)
CAVFPTGTASKLAF

SEQ ID NO: 727800 - protein, 14 aa, Homo sapiens
  CDR3 for beta chain variable domain of TCR clone 363900 (TRBV7-2, TRBJ2-7)
CASRSQGAAYEQYF

SEQ ID NO: 727801 - protein, 13 aa, Homo sapiens
  CDR3 for alpha chain variable domain of TCR clone 363901 (TRAV30, TRAJ6)
CGTEAGGSYIPTL

SEQ ID NO: 727802 - protein, 16 aa, Homo sapiens
  CDR3 for beta chain variable domain of TCR clone 363901 (TRBV4-3, TRBJ2-3)
CASSLGLAGEGDTQYF

SEQ ID NO: 727803 - protein, 15 aa, Homo sapiens
  CDR3 for alpha chain variable domain of TCR clone 363902 (TRAV21, TRAJ53)
CATLSSGGSNYKLTF

SEQ ID NO: 727804 - protein, 14 aa, Homo sapiens
  CDR3 for beta chain variable domain of TCR clone 363902 (TRBV19, TRBJ2-1)
CASPTFVLSGEQFF

SEQ ID NO: 727805 - protein, 16 aa, Homo sapiens
  CDR3 for alpha chain variable domain of TCR clone 363903 (TRAV23/DV6, TRAJ48)
CAASGVINFGNEKLTF

SEQ ID NO: 727806 - protein, 15 aa, Homo sapiens
  CDR3 for beta chain variable domain of TCR clone 363903 (TRBV20-1, TRBJ2-5)
CSAGLAGVSQETQYF

SEQ ID NO: 727807 - protein, 15 aa, Homo sapiens
  CDR3 for alpha chain variable domain of TCR clone 363904 (TRAV3, TRAJ13)
CAVRDIAGGYQKVTF

SEQ ID NO: 727808 - protein, 13 aa, Homo sapiens
  CDR3 for beta chain variable domain of TCR clone 363904 (TRBV2, TRBJ2-2)
CASRKKNTGELFF

SEQ ID NO: 727809 - protein, 11 aa, Homo sapiens
  CDR3 for alpha chain variable domain of TCR clone 363905 (TRAV12-1, TRAJ8)
CVVTGFQKLVF

SEQ ID NO: 727810 - protein, 15 aa, Homo sapiens
  CDR3 for beta chain variable domain of TCR clone 363905 (TRBV19, TRBJ1-1)
CASTSGQIQNTEAFF

SEQ ID NO: 727811 - protein, 12 aa, Homo sapiens
  CDR3 for alpha chain variable domain of TCR clone 363906 (TRAV8-3, TRAJ20)
CAVGANDYKLSF

SEQ ID NO: 727812 - protein, 13 aa, Homo sapiens
  CDR3 for beta chain variable domain of TCR clone 363906 (TRBV19, TRBJ2-1)
CASSMYRVNEQFF

SEQ ID NO: 727813 - protein, 11 aa, Homo sapiens
  CDR3 for alpha chain variable domain of TCR clone 363907 (TRAV13-1, TRAJ15)
CGKPGRNCSDL

SEQ ID NO: 727814 - protein, 14 aa, Homo sapiens
  CDR3 for beta chain variable domain of TCR clone 363907 (TRBV19, TRBJ2-2)
CASSTLHRSGELFF

SEQ ID NO: 727815 - protein, 13 aa, Homo sapiens
  CDR3 for alpha chain variable domain of TCR clone 363908 (TRAV21, TRAJ57)
CAVTQGGSEKLVL

SEQ ID NO: 727816 - protein, 16 aa, Homo sapiens
  CDR3 for beta chain variable domain of TCR clone 363908 (TRBV29-1, TRBJ2-7)
GSVEDAGDGTAYEQYF

SEQ ID NO: 727817 - protein, 12 aa, Homo sapiens
  CDR3 for alpha chain variable domain of TCR clone 363909 (TRAV21, TRAJ23)
CAVMLQGGKLIF

SEQ ID NO: 727818 - protein, 13 aa, Homo sapiens
  CDR3 for beta chain variable domain of TCR clone 363909 (TRBV28, TRBJ2-5)
CASSFAGGETQYF

SEQ ID NO: 727819 - protein, 14 aa, Homo sapiens
  CDR3 for alpha chain variable domain of TCR clone 363910 (TRAV1-1, TRAJ27)
CAVIYNTNAGKSTF

SEQ ID NO: 727820 - protein, 18 aa, Homo sapiens
  CDR3 for beta chain variable domain of TCR clone 363910 (TRBV4-1, TRBJ1-5)
CASRQDPRGQGLNQPQHF

SEQ ID NO: 727821 - protein, 13 aa, Homo sapiens
  CDR3 for alpha chain variable domain of TCR clone 363911 (TRAV26-1, TRAJ40)
FIVRVEGTYKYIF

SEQ ID NO: 727822 - protein, 15 aa, Homo sapiens
  CDR3 for beta chain variable domain of TCR clone 363911 (TRBV12-4, TRBJ1-2)
CASSLAHRDGQAYTF

SEQ ID NO: 727823 - protein, 14 aa, Homo sapiens
  CDR3 for alpha chain variable domain of TCR clone 363912 (TRAV8-4, TRAJ9)
CAVRINTGGFKTIF

SEQ ID NO: 727824 - protein, 14 aa, Homo sapiens
  CDR3 for beta chain variable domain of TCR clone 363912 (TRBV18, TRBJ2-3)
CASSRDRGTDTQYF

SEQ ID NO: 727825 - protein, 14 aa, Homo sapiens
  CDR3 for alpha chain variable domain of TCR clone 363913 (TRAV1-2, TRAJ16)
CAVNRFSDGQKLLF

SEQ ID NO: 727826 - protein, 14 aa, Homo sapiens
  CDR3 for beta chain variable domain of TCR clone 363913 (TRBV14, TRBJ2-1)
CASSQVQGRGEQCF

SEQ ID NO: 727827 - protein, 12 aa, Homo sapiens
  CDR3 for alpha chain variable domain of TCR clone 363914 (TRAV2, TRAJ33)
CAFMDSNYQLIW

SEQ ID NO: 727828 - protein, 16 aa, Homo sapiens
  CDR3 for beta chain variable domain of TCR clone 363914 (TRBV2, TRBJ2-7)
CASSEPWTGPSYEQDF

SEQ ID NO: 727829 - protein, 14 aa, Homo sapiens
  CDR3 for alpha chain variable domain of TCR clone 363915 (TRAV12-2, TRAJ36)
CAVKISTGANNLFF

SEQ ID NO: 727830 - protein, 14 aa, Homo sapiens
  CDR3 for beta chain variable domain of TCR clone 363915 (TRBV25-1, TRBJ1-2)
CASSDTTGVDGYTF

SEQ ID NO: 727831 - protein, 16 aa, Homo sapiens
  CDR3 for alpha chain variable domain of TCR clone 363916 (TRAV23/DV6, TRAJ9)
CAASLGGNTGGFNTIF

SEQ ID NO: 727832 - protein, 13 aa, Homo sapiens
  CDR3 for beta chain variable domain of TCR clone 363916 (TRBV7-9, TRBJ1-2)
CASSLKQNYGYTF

SEQ ID NO: 727833 - protein, 14 aa, Homo sapiens
  CDR3 for alpha chain variable domain of TCR clone 363917 (TRAV38-1, TRAJ29)
CAFITPSGNTPLVF

SEQ ID NO: 727834 - protein, 14 aa, Homo sapiens
  CDR3 for beta chain variable domain of TCR clone 363917 (TRBV18, TRBJ2-7)
CASSPRGGPYEQYF

SEQ ID NO: 727835 - protein, 16 aa, Homo sapiens
  CDR3 for alpha chain variable domain of TCR clone 363918 (TRAV13-1, TRAJ3)
CAATGVQQCFQDNLCI

SEQ ID NO: 727836 - protein, 16 aa, Homo sapiens
  CDR3 for beta chain variable domain of TCR clone 363918 (TRBV7-3, TRBJ2-2)
CASSLKRGTLSGELFF

SEQ ID NO: 727837 - protein, 18 aa, Homo sapiens
  CDR3 for alpha chain variable domain of TCR clone 363919 (TRAV38-1, TRAJ45)
CDVFLASHSGGGADGLTF

SEQ ID NO: 727838 - protein, 13 aa, Homo sapiens
  CDR3 for beta chain variable domain of TCR clone 363919 (TRBV7-9, TRBJ2-2)
CASSSAGTGELFF

SEQ ID NO: 727839 - protein, 12 aa, Homo sapiens
  CDR3 for alpha chain variable domain of TCR clone 363920 (TRAV12-3, TRAJ17)
CAMTLTCNNLTF

SEQ ID NO: 727840 - protein, 15 aa, Homo sapiens
  CDR3 for beta chain variable domain of TCR clone 363920 (TRBV11-3, TRBJ2-3)
CASLKDGREGDTQYF

SEQ ID NO: 727841 - protein, 11 aa, Homo sapiens
  CDR3 for alpha chain variable domain of TCR clone 363921 (TRAV12-3, TRAJ27)
CAMANAGKSTF

SEQ ID NO: 727842 - protein, 13 aa, Homo sapiens
  CDR3 for beta chain variable domain of TCR clone 363921 (TRBV7-2, TRBJ2-2)
CASSSVRAGELFF

SEQ ID NO: 727843 - protein, 12 aa, Homo sapiens
  CDR3 for alpha chain variable domain of TCR clone 363922 (TRAV12-1, TRAJ40)
CVVNGETYKYIF

SEQ ID NO: 727844 - protein, 14 aa, Homo sapiens
  CDR3 for beta chain variable domain of TCR clone 363922 (TRBV7-9, TRBJ1-1)
CARSSTKGNTEAFF

SEQ ID NO: 727845 - protein, 13 aa, Homo sapiens
  CDR3 for alpha chain variable domain of TCR clone 363923 (TRAV21, TRAJ57)
RAVTQGGSEKLVF

SEQ ID NO: 727846 - protein, 15 aa, Homo sapiens
  CDR3 for beta chain variable domain of TCR clone 363923 (TRBV5-1, TRBJ1-1)
CASSSTTGTNTEAFF

SEQ ID NO: 727847 - protein, 13 aa, Homo sapiens
  CDR3 for alpha chain variable domain of TCR clone 363924 (TRAV3, TRAJ20)
CCEAFCNDYMLSF

SEQ ID NO: 727848 - protein, 15 aa, Homo sapiens
  CDR3 for beta chain variable domain of TCR clone 363924 (TRBV19, TRBJ2-6)
CASVRRDSGANVLTF

SEQ ID NO: 727849 - protein, 12 aa, Homo sapiens
  CDR3 for alpha chain variable domain of TCR clone 363925 (TRAV12-3, TRAJ40)
CAMSSGTYKYIF

SEQ ID NO: 727850 - protein, 12 aa, Homo sapiens
  CDR3 for beta chain variable domain of TCR clone 363925 (TRBV9, TRBJ2-2)
CASSLVTGELFF

SEQ ID NO: 727851 - protein, 12 aa, Homo sapiens
  CDR3 for alpha chain variable domain of TCR clone 363926 (TRAV21, TRAJ49)
CAVNDGGNQFYF

SEQ ID NO: 727852 - protein, 11 aa, Homo sapiens
  CDR3 for beta chain variable domain of TCR clone 363926 (TRBV7-8, TRBJ2-7)
CASSLSLEQYF

SEQ ID NO: 727853 - protein, 23 aa, Homo sapiens
  CDR3 for alpha chain variable domain of TCR clone 363927 (TRAV26-1, TRAJ38)
CIADNAGNNHIQNPDPAVYQLRD

SEQ ID NO: 727854 - protein, 15 aa, Homo sapiens
  CDR3 for beta chain variable domain of TCR clone 363927 (TRBV7-9, TRBJ1-6)
CASSSPGRGNSPLHF

SEQ ID NO: 727855 - protein, 15 aa, Homo sapiens
  CDR3 for alpha chain variable domain of TCR clone 363928 (TRAV8-3, TRAJ45)
CASSYSGGGADGLTF

SEQ ID NO: 727856 - protein, 13 aa, Homo sapiens
  CDR3 for beta chain variable domain of TCR clone 363928 (TRBV19, TRBJ1-2)
CASSVPGQDGDTF

SEQ ID NO: 727857 - protein, 15 aa, Homo sapiens
  CDR3 for alpha chain variable domain of TCR clone 363929 (TRAV26-1, TRAJ56)
CIVRVDNGSNSKLTF

SEQ ID NO: 727858 - protein, 14 aa, Homo sapiens
  CDR3 for beta chain variable domain of TCR clone 363929 (TRBV5-1, TRBJ2-7)
CASSRGESLYEQYF

SEQ ID NO: 727859 - protein, 17 aa, Homo sapiens
  CDR3 for alpha chain variable domain of TCR clone 363930 (TRAV38-2/DV8, TRAJ45)
CAYRSRYSGGGADGLTF

SEQ ID NO: 727860 - protein, 15 aa, Homo sapiens
  CDR3 for beta chain variable domain of TCR clone 363930 (TRBV19, TRBJ2-1)
CASIKGRGPYNAQFF

SEQ ID NO: 727861 - protein, 14 aa, Homo sapiens
  CDR3 for alpha chain variable domain of TCR clone 363931 (TRAV9-2, TRAJ39)
CALYIYNAGNMLTF

SEQ ID NO: 727862 - protein, 16 aa, Homo sapiens
  CDR3 for beta chain variable domain of TCR clone 363931 (TRBV11-2, TRBJ1-2)
SASSPSGREANYGYTF

SEQ ID NO: 727863 - protein, 14 aa, Homo sapiens
  CDR3 for alpha chain variable domain of TCR clone 363932 (TRAV17, TRAJ57)
CATDPQGGSEKLLF

SEQ ID NO: 727864 - protein, 14 aa, Homo sapiens
  CDR3 for beta chain variable domain of TCR clone 363932 (TRBV7-8, TRBJ2-7)
CASSPRDRVYEQYF

SEQ ID NO: 727865 - protein, 16 aa, Homo sapiens
  CDR3 for alpha chain variable domain of TCR clone 363933 (TRAV13-1, TRAJ10)
CAAGYIFTGGGNKLTF

SEQ ID NO: 727866 - protein, 15 aa, Homo sapiens
  CDR3 for beta chain variable domain of TCR clone 363933 (TRBV12-4, TRBJ2-7)
CASSQTGAISYEQYF

SEQ ID NO: 727867 - protein, 13 aa, Homo sapiens
  CDR3 for alpha chain variable domain of TCR clone 363934 (TRAV16, TRAJ11)
CALTQSGYSTLTF

SEQ ID NO: 727868 - protein, 17 aa, Homo sapiens
  CDR3 for beta chain variable domain of TCR clone 363934 (TRBV5-1, TRBJ1-5)
CSSSLAFLTRGNQPQHF

SEQ ID NO: 727869 - protein, 14 aa, Homo sapiens
  CDR3 for alpha chain variable domain of TCR clone 363935 (TRAV16, TRAJ17)
CALSGRAAGNKLIF

SEQ ID NO: 727870 - protein, 17 aa, Homo sapiens
  CDR3 for beta chain variable domain of TCR clone 363935 (TRBV18, TRBJ2-6)
CASSPRQGAVGANGLTF

SEQ ID NO: 727871 - protein, 12 aa, Homo sapiens
  CDR3 for alpha chain variable domain of TCR clone 363936 (TRAV20, TRAJ54)
CAVQEGAQKLVF

SEQ ID NO: 727872 - protein, 16 aa, Homo sapiens
  CDR3 for beta chain variable domain of TCR clone 363936 (TRBV13, TRBJ2-3)
GQQPLQGSGGRNTQYF

SEQ ID NO: 727873 - protein, 15 aa, Homo sapiens
  CDR3 for alpha chain variable domain of TCR clone 363937 (TRAV13-2, TRAJ4)
CADPQERGGYNKLIF

SEQ ID NO: 727874 - protein, 13 aa, Homo sapiens
  CDR3 for beta chain variable domain of TCR clone 363937 (TRBV19, TRBJ2-7)
CASSIDRTYEQYF

SEQ ID NO: 727875 - protein, 15 aa, Homo sapiens
  CDR3 for alpha chain variable domain of TCR clone 363938 (TRAV38-1, TRAJ37)
CAFIFGSGNTGTLLF

SEQ ID NO: 727876 - protein, 12 aa, Homo sapiens
  CDR3 for beta chain variable domain of TCR clone 363938 (TRBV7-9, TRBJ2-7)
CASSLEGYEQYF

SEQ ID NO: 727877 - protein, 14 aa, Homo sapiens
  CDR3 for alpha chain variable domain of TCR clone 363939 (TRAV8-4, TRAJ13)
CAVTLSGGYQKVTF

SEQ ID NO: 727878 - protein, 15 aa, Homo sapiens
  CDR3 for beta chain variable domain of TCR clone 363939 (TRBV7-2, TRBJ2-1)
CASTHGTGTYNEQFF

SEQ ID NO: 727879 - protein, 12 aa, Homo sapiens
  CDR3 for alpha chain variable domain of TCR clone 363940 (TRAV12-3, TRAJ20)
WAMVRGDYKLSF

SEQ ID NO: 727880 - protein, 13 aa, Homo sapiens
  CDR3 for beta chain variable domain of TCR clone 363940 (TRBV23-1, TRBJ1-4)
CASRGKFNEKLFF

SEQ ID NO: 727881 - protein, 12 aa, Homo sapiens
  CDR3 for alpha chain variable domain of TCR clone 363941 (TRAV12-3, TRAJ17)
CAMTLAGNKLTF

SEQ ID NO: 727882 - protein, 17 aa, Homo sapiens
  CDR3 for beta chain variable domain of TCR clone 363941 (TRBV5-1, TRBJ2-5)
CASSLLGLAANQETQYF

SEQ ID NO: 727883 - protein, 15 aa, Homo sapiens
  CDR3 for alpha chain variable domain of TCR clone 363942 (TRAV12-1, TRAJ44)
CVVFVNTGTASKLTF

SEQ ID NO: 727884 - protein, 17 aa, Homo sapiens
  CDR3 for beta chain variable domain of TCR clone 363942 (TRBV7-8, TRBJ2-6)
GASSAGTGGAGANDLTF

SEQ ID NO: 727885 - protein, 15 aa, Homo sapiens
  CDR3 for alpha chain variable domain of TCR clone 363943 (TRAV1-2, TRAJ9)
CAVRDDGTGGFKTIF

SEQ ID NO: 727886 - protein, 12 aa, Homo sapiens
  CDR3 for beta chain variable domain of TCR clone 363943 (TRBV12-4, TRBJ2-3)
CASSSTTDTQYF

SEQ ID NO: 727887 - protein, 13 aa, Homo sapiens
  CDR3 for alpha chain variable domain of TCR clone 363944 (TRAV12-2, TRAJ20)
CAVNRFDDYKLSF

SEQ ID NO: 727888 - protein, 12 aa, Homo sapiens
  CDR3 for beta chain variable domain of TCR clone 363944 (TRBV19, TRBJ2-1)
CASSQINNEQFF

SEQ ID NO: 727889 - protein, 16 aa, Homo sapiens
  CDR3 for alpha chain variable domain of TCR clone 363945 (TRAV8-4, TRAJ52)
CAVRLEGGTSYGKLTF

SEQ ID NO: 727890 - protein, 17 aa, Homo sapiens
  CDR3 for beta chain variable domain of TCR clone 363945 (TRBV7-2, TRBJ2-3)
CASSLEARGTSTDTQYF

SEQ ID NO: 727891 - protein, 14 aa, Homo sapiens
  CDR3 for alpha chain variable domain of TCR clone 363946 (TRAV12-2, TRAJ13)
CAVKKTGGYQTVTF

SEQ ID NO: 727892 - protein, 15 aa, Homo sapiens
  CDR3 for beta chain variable domain of TCR clone 363946 (TRBV27, TRBJ2-1)
CASSNGGGSANEQFF

SEQ ID NO: 727893 - protein, 12 aa, Homo sapiens
  CDR3 for alpha chain variable domain of TCR clone 363947 (TRAV21, TRAJ49)
CAVTNTGNQFYF

SEQ ID NO: 727894 - protein, 17 aa, Homo sapiens
  CDR3 for beta chain variable domain of TCR clone 363947 (TRBV13, TRBJ2-3)
CANSLSRVAGGRNTQYF

SEQ ID NO: 727895 - protein, 13 aa, Homo sapiens
  CDR3 for alpha chain variable domain of TCR clone 363948 (TRAV24, TRAJ42)
CAFSTGSQGNLIF

SEQ ID NO: 727896 - protein, 20 aa, Homo sapiens
  CDR3 for beta chain variable domain of TCR clone 363948 (TRBV28, TRBJ2-1)
CASTPIGRSPGLAGGNEQFF

SEQ ID NO: 727897 - protein, 15 aa, Homo sapiens
  CDR3 for alpha chain variable domain of TCR clone 363949 (TRAV21, TRAJ24)
CAARSSTDSWGKLKF

SEQ ID NO: 727898 - protein, 15 aa, Homo sapiens
  CDR3 for beta chain variable domain of TCR clone 363949 (TRBV4-1, TRBJ2-7)
CASSQNTGRLYEQYF

SEQ ID NO: 727899 - protein, 12 aa, Homo sapiens
  CDR3 for alpha chain variable domain of TCR clone 363950 (TRAV2, TRAJ33)
CAVEDSNYQLIW

SEQ ID NO: 727900 - protein, 12 aa, Homo sapiens
  CDR3 for beta chain variable domain of TCR clone 363950 (TRBV7-8, TRBJ2-7)
CASSLGDREQYF

SEQ ID NO: 727901 - protein, 14 aa, Homo sapiens
  CDR3 for alpha chain variable domain of TCR clone 363951 (TRAV12-3, TRAJ9)
CAMSVETGGFKPIF

SEQ ID NO: 727902 - protein, 14 aa, Homo sapiens
  CDR3 for beta chain variable domain of TCR clone 363951 (TRBV7-2, TRBJ2-7)
CASRSQGAAYEQYF

SEQ ID NO: 727903 - protein, 17 aa, Homo sapiens
  CDR3 for alpha chain variable domain of TCR clone 363952 (TRAV2, TRAJ36)
CAVEDRGNCGKQPLLWD

SEQ ID NO: 727904 - protein, 14 aa, Homo sapiens
  CDR3 for beta chain variable domain of TCR clone 363952 (TRBV7-9, TRBJ2-5)
CASSLATAQETQYF

SEQ ID NO: 727905 - protein, 10 aa, Homo sapiens
  CDR3 for alpha chain variable domain of TCR clone 363953 (TRAV8-4, TRAJ43)
CAVSADDMRF

SEQ ID NO: 727906 - protein, 15 aa, Homo sapiens
  CDR3 for beta chain variable domain of TCR clone 363953 (TRBV7-2, TRBJ1-2)
CASSLVSGGYYGYTF

SEQ ID NO: 727907 - protein, 11 aa, Homo sapiens
  CDR3 for alpha chain variable domain of TCR clone 363954 (TRAV3, TRAJ17)
PRGAAGNKLTF

SEQ ID NO: 727908 - protein, 15 aa, Homo sapiens
  CDR3 for beta chain variable domain of TCR clone 363954 (TRBV20-1, TRBJ2-2)
CSAIPGHSNTGELFF

SEQ ID NO: 727909 - protein, 17 aa, Homo sapiens
  CDR3 for alpha chain variable domain of TCR clone 363955 (TRAV3, TRAJ6)
CAVGDGPRAGGSNIPTF

SEQ ID NO: 727910 - protein, 13 aa, Homo sapiens
  CDR3 for beta chain variable domain of TCR clone 363955 (TRBV19, TRBJ2-7)
CASSIDRTYEQYF

SEQ ID NO: 727911 - protein, 14 aa, Homo sapiens
  CDR3 for alpha chain variable domain of TCR clone 363956 (TRAV1-1, TRAJ15)
CAVMANQAGTALIF

SEQ ID NO: 727912 - protein, 16 aa, Homo sapiens
  CDR3 for beta chain variable domain of TCR clone 363956 (TRBV2, TRBJ2-1)
CASGVGGSLSYNEQFF

SEQ ID NO: 727913 - protein, 14 aa, Homo sapiens
  CDR3 for alpha chain variable domain of TCR clone 363957 (TRAV8-3, TRAJ39)
CAVGAWGAGNMLTF

SEQ ID NO: 727914 - protein, 16 aa, Homo sapiens
  CDR3 for beta chain variable domain of TCR clone 363957 (TRBV7-2, TRBJ1-3)
CASSSGRVLSGNTIDF

SEQ ID NO: 727915 - protein, 15 aa, Homo sapiens
  CDR3 for alpha chain variable domain of TCR clone 363958 (TRAV26-1, TRAJ22)
CIVRVSFWFCRATDL

SEQ ID NO: 727916 - protein, 13 aa, Homo sapiens
  CDR3 for beta chain variable domain of TCR clone 363958 (TRBV7-9, TRBJ1-2)
CASSLKQNYGYTV

SEQ ID NO: 727917 - protein, 12 aa, Homo sapiens
  CDR3 for alpha chain variable domain of TCR clone 363959 (TRAV13-1, TRAJ27)
CAATPMQANQPL

SEQ ID NO: 727918 - protein, 11 aa, Homo sapiens
  CDR3 for beta chain variable domain of TCR clone 363959 (TRBV28, TRBJ2-7)
CASSWDYEEYF

SEQ ID NO: 727919 - protein, 14 aa, Homo sapiens
  CDR3 for alpha chain variable domain of TCR clone 363960 (TRAV12-1, TRAJ27)
CGEHIRTNAGKSTF

SEQ ID NO: 727920 - protein, 15 aa, Homo sapiens
  CDR3 for beta chain variable domain of TCR clone 363960 (TRBV19, TRBJ1-1)
CASTSGHIQNTEAFF

SEQ ID NO: 727921 - protein, 12 aa, Homo sapiens
  CDR3 for alpha chain variable domain of TCR clone 363961 (TRAV12-2, TRAJ9)
CAVYNGGFKTIF

SEQ ID NO: 727922 - protein, 15 aa, Homo sapiens
  CDR3 for beta chain variable domain of TCR clone 363961 (TRBV7-3, TRBJ2-1)
CASSPTGGGEVEQFF

SEQ ID NO: 727923 - protein, 12 aa, Homo sapiens
  CDR3 for alpha chain variable domain of TCR clone 363962 (TRAV8-3, TRAJ26)
CAGDNYGQNFVF

SEQ ID NO: 727924 - protein, 11 aa, Homo sapiens
  CDR3 for beta chain variable domain of TCR clone 363962 (TRBV19, TRBJ1-2)
CASSISSGYTF

SEQ ID NO: 727925 - protein, 12 aa, Homo sapiens
  CDR3 for alpha chain variable domain of TCR clone 363963 (TRAV12-3, TRAJ5)
CAMDTGRRALTF

SEQ ID NO: 727926 - protein, 19 aa, Homo sapiens
  CDR3 for beta chain variable domain of TCR clone 363963 (TRBV28, TRBJ2-7)
CASSYSGTSRLGWVYEQYF

SEQ ID NO: 727927 - protein, 15 aa, Homo sapiens
  CDR3 for alpha chain variable domain of TCR clone 363964 (TRAV25, TRAJ52)
CAGRPGGTSYGKLTF

SEQ ID NO: 727928 - protein, 12 aa, Homo sapiens
  CDR3 for beta chain variable domain of TCR clone 363964 (TRBV12-5, TRBJ2-5)
CASGQGVETQYF

SEQ ID NO: 727929 - protein, 15 aa, Homo sapiens
  CDR3 for alpha chain variable domain of TCR clone 363965 (TRAV12-3, TRAJ11)
CAMSEENSGYSTLTF

SEQ ID NO: 727930 - protein, 16 aa, Homo sapiens
  CDR3 for beta chain variable domain of TCR clone 363965 (TRBV5-1, TRBJ2-7)
CASSLEGLAGLFEQYF

SEQ ID NO: 727931 - protein, 14 aa, Homo sapiens
  CDR3 for alpha chain variable domain of TCR clone 363966 (TRAV4, TRAJ41)
CLVGDGDSGYALNF

SEQ ID NO: 727932 - protein, 13 aa, Homo sapiens
  CDR3 for beta chain variable domain of TCR clone 363966 (TRBV7-9, TRBJ2-5)
CASTPVGQETQYF

SEQ ID NO: 727933 - protein, 14 aa, Homo sapiens
  CDR3 for alpha chain variable domain of TCR clone 363967 (TRAV26-1, TRAJ38)
CIAANAGNNRKLIW

SEQ ID NO: 727934 - protein, 13 aa, Homo sapiens
  CDR3 for beta chain variable domain of TCR clone 363967 (TRBV20-1, TRBJ1-1)
CSARGGGNTEAFF

SEQ ID NO: 727935 - protein, 13 aa, Homo sapiens
  CDR3 for alpha chain variable domain of TCR clone 363968 (TRAV8-6, TRAJ49)
GAVITNTGNQFYF

SEQ ID NO: 727936 - protein, 13 aa, Homo sapiens
  CDR3 for beta chain variable domain of TCR clone 363968 (TRBV20-1, TRBJ1-1)
CSARGGGNTEAFF

SEQ ID NO: 727937 - protein, 16 aa, Homo sapiens
  CDR3 for alpha chain variable domain of TCR clone 363969 (TRAV30, TRAJ24)
CGTEMVDADSWGNFKF

SEQ ID NO: 727938 - protein, 14 aa, Homo sapiens
  CDR3 for beta chain variable domain of TCR clone 363969 (TRBV12-5, TRBJ2-5)
CASGSRTHQETQYF

SEQ ID NO: 727939 - protein, 13 aa, Homo sapiens
  CDR3 for alpha chain variable domain of TCR clone 363970 (TRAV3, TRAJ26)
CAVWGGYGQNFVF

SEQ ID NO: 727940 - protein, 15 aa, Homo sapiens
  CDR3 for beta chain variable domain of TCR clone 363970 (TRBV27, TRBJ2-1)
CASSLARGAYNEQFF

SEQ ID NO: 727941 - protein, 11 aa, Homo sapiens
  CDR3 for alpha chain variable domain of TCR clone 363971 (TRAV2, TRAJ13)
CASGGYQKVTF

SEQ ID NO: 727942 - protein, 16 aa, Homo sapiens
  CDR3 for beta chain variable domain of TCR clone 363971 (TRBV6-6, TRBJ2-7)
CASRASGRARSYEQYF

SEQ ID NO: 727943 - protein, 14 aa, Homo sapiens
  CDR3 for alpha chain variable domain of TCR clone 363972 (TRAV1-2, TRAJ8)
CAVGEDTGLQKLVF

SEQ ID NO: 727944 - protein, 14 aa, Homo sapiens
  CDR3 for beta chain variable domain of TCR clone 363972 (TRBV7-9, TRBJ1-1)
CASSLGGANTEAFF

SEQ ID NO: 727945 - protein, 12 aa, Homo sapiens
  CDR3 for alpha chain variable domain of TCR clone 363973 (TRAV1-2, TRAJ42)
CVAGGSQGNLIF

SEQ ID NO: 727946 - protein, 12 aa, Homo sapiens
  CDR3 for beta chain variable domain of TCR clone 363973 (TRBV24-1, TRBJ1-1)
CATSDSDRGASF

SEQ ID NO: 727947 - protein, 11 aa, Homo sapiens
  CDR3 for alpha chain variable domain of TCR clone 363974 (TRAV21, TRAJ34)
CSVTNTDKLIF

SEQ ID NO: 727948 - protein, 16 aa, Homo sapiens
  CDR3 for beta chain variable domain of TCR clone 363974 (TRBV20-1, TRBJ1-4)
CSAPGQGLLTNEKLFF

SEQ ID NO: 727949 - protein, 13 aa, Homo sapiens
  CDR3 for alpha chain variable domain of TCR clone 363975 (TRAV2, TRAJ40)
CAVVTSGTYKYIF

SEQ ID NO: 727950 - protein, 11 aa, Homo sapiens
  CDR3 for beta chain variable domain of TCR clone 363975 (TRBV23-1, TRBJ2-7)
SSSGTGLEQYF

SEQ ID NO: 727951 - protein, 14 aa, Homo sapiens
  CDR3 for alpha chain variable domain of TCR clone 363976 (TRAV25, TRAJ6)
CAGRESGGSYIPTF

SEQ ID NO: 727952 - protein, 12 aa, Homo sapiens
  CDR3 for beta chain variable domain of TCR clone 363976 (TRBV7-8, TRBJ2-7)
CASSLAGYEQYF

SEQ ID NO: 727953 - protein, 12 aa, Homo sapiens
  CDR3 for alpha chain variable domain of TCR clone 363977 (TRAV8-3, TRAJ34)
WASGYNTDKLIF

SEQ ID NO: 727954 - protein, 13 aa, Homo sapiens
  CDR3 for beta chain variable domain of TCR clone 363977 (TRBV6-4, TRBJ2-3)
CASSASWADTQYF

SEQ ID NO: 727955 - protein, 16 aa, Homo sapiens
  CDR3 for alpha chain variable domain of TCR clone 363978 (TRAV14/DV4, TRAJ20)
CAMREGRSRDDYKISF

SEQ ID NO: 727956 - protein, 17 aa, Homo sapiens
  CDR3 for beta chain variable domain of TCR clone 363978 (TRBV15, TRBJ1-1)
CATSRVGGADGDTEAFF

SEQ ID NO: 727957 - protein, 13 aa, Homo sapiens
  CDR3 for alpha chain variable domain of TCR clone 363979 (TRAV8-3, TRAJ43)
CAVGPDNNNDMRF

SEQ ID NO: 727958 - protein, 13 aa, Homo sapiens
  CDR3 for beta chain variable domain of TCR clone 363979 (TRBV29-1, TRBJ2-1)
CSVEGGGSMSSSS

SEQ ID NO: 727959 - protein, 16 aa, Homo sapiens
  CDR3 for alpha chain variable domain of TCR clone 363980 (TRAV3, TRAJ37)
CAVRGKGSGNTGKLIF

SEQ ID NO: 727960 - protein, 15 aa, Homo sapiens
  CDR3 for beta chain variable domain of TCR clone 363980 (TRBV20-1, TRBJ2-1)
CSARHGTSEHNEQFF

SEQ ID NO: 727961 - protein, 16 aa, Homo sapiens
  CDR3 for alpha chain variable domain of TCR clone 363981 (TRAV12-2, TRAJ56)
CAVRRFDTGANSKLTF

SEQ ID NO: 727962 - protein, 11 aa, Homo sapiens
  CDR3 for beta chain variable domain of TCR clone 363981 (TRBV3-1, TRBJ2-7)
CASSQVREQYF

SEQ ID NO: 727963 - protein, 13 aa, Homo sapiens
  CDR3 for alpha chain variable domain of TCR clone 363982 (TRAV20, TRAJ31)
CAVQALNNARLMF

SEQ ID NO: 727964 - protein, 13 aa, Homo sapiens
  CDR3 for beta chain variable domain of TCR clone 363982 (TRBV12-4, TRBJ1-2)
CASSLRQGKGYTF

SEQ ID NO: 727965 - protein, 13 aa, Homo sapiens
  CDR3 for alpha chain variable domain of TCR clone 363983 (TRAV26-2, TRAJ39)
CILRDNAGNMLTF

SEQ ID NO: 727966 - protein, 11 aa, Homo sapiens
  CDR3 for beta chain variable domain of TCR clone 363983 (TRBV29-1, TRBJ2-5)
CSEDRTGTQYF

SEQ ID NO: 727967 - protein, 12 aa, Homo sapiens
  CDR3 for alpha chain variable domain of TCR clone 363984 (TRAV2, TRAJ36)
CAELTGVNNLFF

SEQ ID NO: 727968 - protein, 14 aa, Homo sapiens
  CDR3 for beta chain variable domain of TCR clone 363984 (TRBV18, TRBJ2-7)
CASSPRGGAYEQYF

SEQ ID NO: 727969 - protein, 16 aa, Homo sapiens
  CDR3 for alpha chain variable domain of TCR clone 363985 (TRAV8-3, TRAJ13)
CAVGAYPSGGYQTVTF

SEQ ID NO: 727970 - protein, 16 aa, Homo sapiens
  CDR3 for beta chain variable domain of TCR clone 363985 (TRBV12-5, TRBJ2-5)
CASGPRTSGNQETQYF

SEQ ID NO: 727971 - protein, 15 aa, Homo sapiens
  CDR3 for alpha chain variable domain of TCR clone 363986 (TRAV21, TRAJ43)
CAVRPSKAVFDDMRF

SEQ ID NO: 727972 - protein, 16 aa, Homo sapiens
  CDR3 for beta chain variable domain of TCR clone 363986 (TRBV19, TRBJ2-2)
CASRSPGTGATGELFF

SEQ ID NO: 727973 - protein, 16 aa, Homo sapiens
  CDR3 for alpha chain variable domain of TCR clone 363987 (TRAV20, TRAJ10)
CAVRFFLTGGGNKLTF

SEQ ID NO: 727974 - protein, 17 aa, Homo sapiens
  CDR3 for beta chain variable domain of TCR clone 363987 (TRBV25-1, TRBJ2-1)
CASSAYGQGRGVYEQFF

SEQ ID NO: 727975 - protein, 15 aa, Homo sapiens
  CDR3 for alpha chain variable domain of TCR clone 363988 (TRAV2, TRAJ9)
CAVADRGTGGFKTIF

SEQ ID NO: 727976 - protein, 18 aa, Homo sapiens
  CDR3 for beta chain variable domain of TCR clone 363988 (TRBV6-6, TRBJ2-3)
CASSYSVADRGPTDTQYF

SEQ ID NO: 727977 - protein, 14 aa, Homo sapiens
  CDR3 for alpha chain variable domain of TCR clone 363989 (TRAV12-2, TRAJ40)
CAVKIPSGTYKYIF

SEQ ID NO: 727978 - protein, 17 aa, Homo sapiens
  CDR3 for beta chain variable domain of TCR clone 363989 (TRBV13, TRBJ2-3)
CASGLSRVAGGRNTQYF

SEQ ID NO: 727979 - protein, 15 aa, Homo sapiens
  CDR3 for alpha chain variable domain of TCR clone 363990 (TRAV4, TRAJ29)
CLVGAYSSQETHLLS

SEQ ID NO: 727980 - protein, 17 aa, Homo sapiens
  CDR3 for beta chain variable domain of TCR clone 363990 (TRBV25-1, TRBJ2-7)
CASSDARVVFSSYEQYF

SEQ ID NO: 727981 - protein, 13 aa, Homo sapiens
  CDR3 for alpha chain variable domain of TCR clone 363991 (TRAV3, TRAJ29)
CAVRDIIDTPLVF

SEQ ID NO: 727982 - protein, 16 aa, Homo sapiens
  CDR3 for beta chain variable domain of TCR clone 363991 (TRBV12-4, TRBJ2-5)
CASSFFVRGRQETQYF

SEQ ID NO: 727983 - protein, 15 aa, Homo sapiens
  CDR3 for alpha chain variable domain of TCR clone 363992 (TRAV26-1, TRAJ56)
CIVRVDNGANSKLTF

SEQ ID NO: 727984 - protein, 14 aa, Homo sapiens
  CDR3 for beta chain variable domain of TCR clone 363992 (TRBV5-1, TRBJ2-7)
CASSRGKSLYEQYF

SEQ ID NO: 727985 - protein, 14 aa, Homo sapiens
  CDR3 for alpha chain variable domain of TCR clone 363993 (TRAV26-1, TRAJ45)
CIEVTGGGADGLTF

SEQ ID NO: 727986 - protein, 12 aa, Homo sapiens
  CDR3 for beta chain variable domain of TCR clone 363993 (TRBV12-4, TRBJ2-7)
CASSLGGYKQYF

SEQ ID NO: 727987 - protein, 11 aa, Homo sapiens
  CDR3 for alpha chain variable domain of TCR clone 363994 (TRAV29/DV5, TRAJ47)
CAAQRGNKLVF

SEQ ID NO: 727988 - protein, 12 aa, Homo sapiens
  CDR3 for beta chain variable domain of TCR clone 363994 (TRBV11-2, TRBJ2-7)
CAISLPTYEQYF

SEQ ID NO: 727989 - protein, 12 aa, Homo sapiens
  CDR3 for alpha chain variable domain of TCR clone 363995 (TRAV2, TRAJ33)
CAVPDSNYQLIW

SEQ ID NO: 727990 - protein, 16 aa, Homo sapiens
  CDR3 for beta chain variable domain of TCR clone 363995 (TRBV7-3, TRBJ2-1)
CASSLEGYRSYNEQFF

SEQ ID NO: 727991 - protein, 11 aa, Homo sapiens
  CDR3 for alpha chain variable domain of TCR clone 363996 (TRAV21, TRAJ20)
CAVRDDYKLSF

SEQ ID NO: 727992 - protein, 14 aa, Homo sapiens
  CDR3 for beta chain variable domain of TCR clone 363996 (TRBV7-2, TRBJ2-7)
CASSPKTSLYEQYF

SEQ ID NO: 727993 - protein, 14 aa, Homo sapiens
  CDR3 for alpha chain variable domain of TCR clone 363997 (TRAV23/DV6, TRAJ22)
CADISSGSARQLTF

SEQ ID NO: 727994 - protein, 16 aa, Homo sapiens
  CDR3 for beta chain variable domain of TCR clone 363997 (TRBV5-7, TRBJ2-5)
CANIRGQTGYQETQYF

SEQ ID NO: 727995 - protein, 14 aa, Homo sapiens
  CDR3 for alpha chain variable domain of TCR clone 363998 (TRAV8-1, TRAJ4)
CAVTPSGGYNKLIF

SEQ ID NO: 727996 - protein, 15 aa, Homo sapiens
  CDR3 for beta chain variable domain of TCR clone 363998 (TRBV7-9, TRBJ1-5)
CASSQGHQPNQPQHF

SEQ ID NO: 727997 - protein, 14 aa, Homo sapiens
  CDR3 for alpha chain variable domain of TCR clone 363999 (TRAV1-1, TRAJ30)
CAVRSLNRDDKIIF

SEQ ID NO: 727998 - protein, 13 aa, Homo sapiens
  CDR3 for beta chain variable domain of TCR clone 363999 (TRBV11-2, TRBJ2-5)
CASSSTGEETQDF

SEQ ID NO: 727999 - protein, 16 aa, Homo sapiens
  CDR3 for alpha chain variable domain of TCR clone 364000 (TRAV35, TRAJ28)
CAGYLYSGAGSYQLTF

SEQ ID NO: 728000 - protein, 13 aa, Homo sapiens
  CDR3 for beta chain variable domain of TCR clone 364000 (TRBV27, TRBJ2-7)
CASSFVSSYEQYF

SEQ ID NO: 728001 - protein, 12 aa, Homo sapiens
  CDR3 for alpha chain variable domain of TCR clone 364001 (TRAV17, TRAJ20)
CATDGDDYNLSF

SEQ ID NO: 728002 - protein, 13 aa, Homo sapiens
  CDR3 for beta chain variable domain of TCR clone 364001 (TRBV7-3, TRBJ1-1)
CASSQDWGAEAFF

SEQ ID NO: 728003 - protein, 12 aa, Homo sapiens
  CDR3 for alpha chain variable domain of TCR clone 364002 (TRAV13-1, TRAJ53)
AASGGSNYKLTF

SEQ ID NO: 728004 - protein, 14 aa, Homo sapiens
  CDR3 for beta chain variable domain of TCR clone 364002 (TRBV7-2, TRBJ1-1)
CASSFLTGTTEAFF

SEQ ID NO: 728005 - protein, 14 aa, Homo sapiens
  CDR3 for alpha chain variable domain of TCR clone 364003 (TRAV12-3, TRAJ42)
CAMNYGGSQGNLIF

SEQ ID NO: 728006 - protein, 10 aa, Homo sapiens
  CDR3 for beta chain variable domain of TCR clone 364003 (TRBV28, TRBJ2-5)
CQQSSWTQYF

SEQ ID NO: 728007 - protein, 14 aa, Homo sapiens
  CDR3 for alpha chain variable domain of TCR clone 364004 (TRAV1-2, TRAJ8)
CAVREDTGFQKLVF

SEQ ID NO: 728008 - protein, 16 aa, Homo sapiens
  CDR3 for beta chain variable domain of TCR clone 364004 (TRBV5-7, TRBJ2-5)
CASTLVPAGGRETQYF

SEQ ID NO: 728009 - protein, 13 aa, Homo sapiens
  CDR3 for alpha chain variable domain of TCR clone 364005 (TRAV3, TRAJ27)
CAVRPLGAGKSTF

SEQ ID NO: 728010 - protein, 14 aa, Homo sapiens
  CDR3 for beta chain variable domain of TCR clone 364005 (TRBV18, TRBJ2-5)
CASSPGVSQETQYF

SEQ ID NO: 728011 - protein, 11 aa, Homo sapiens
  CDR3 for alpha chain variable domain of TCR clone 364006 (TRAV2, TRAJ13)
CASGGYQKVTF

SEQ ID NO: 728012 - protein, 15 aa, Homo sapiens
  CDR3 for beta chain variable domain of TCR clone 364006 (TRBV9, TRBJ2-1)
CASSLAGSSYNEQFF

SEQ ID NO: 728013 - protein, 13 aa, Homo sapiens
  CDR3 for alpha chain variable domain of TCR clone 364007 (TRAV8-3, TRAJ42)
CARYGGIQGNLIF

SEQ ID NO: 728014 - protein, 14 aa, Homo sapiens
  CDR3 for beta chain variable domain of TCR clone 364007 (TRBV20-1, TRBJ2-1)
CSALDRGTYNEQFF

SEQ ID NO: 728015 - protein, 10 aa, Homo sapiens
  CDR3 for alpha chain variable domain of TCR clone 364008 (TRAV30, TRAJ26)
RLLAMVNFVF

SEQ ID NO: 728016 - protein, 13 aa, Homo sapiens
  CDR3 for beta chain variable domain of TCR clone 364008 (TRBV19, TRBJ1-3)
CASRLSLGNTIYF

SEQ ID NO: 728017 - protein, 15 aa, Homo sapiens
  CDR3 for alpha chain variable domain of TCR clone 364009 (TRAV17, TRAJ57)
CATGPSQGGSEKLVF

SEQ ID NO: 728018 - protein, 15 aa, Homo sapiens
  CDR3 for beta chain variable domain of TCR clone 364009 (TRBV11-2, TRBJ2-1)
CASSLGTSGLNEQFF

SEQ ID NO: 728019 - protein, 14 aa, Homo sapiens
  CDR3 for alpha chain variable domain of TCR clone 364010 (TRAV2, TRAJ9)
CAVEDRSGGFKTIF

SEQ ID NO: 728020 - protein, 15 aa, Homo sapiens
  CDR3 for beta chain variable domain of TCR clone 364010 (TRBV11-2, TRBJ2-7)
CASSLVGGRGYEQYF

SEQ ID NO: 728021 - protein, 15 aa, Homo sapiens
  CDR3 for alpha chain variable domain of TCR clone 364011 (TRAV17, TRAJ10)
CATDASGGGGHKLTF

SEQ ID NO: 728022 - protein, 14 aa, Homo sapiens
  CDR3 for beta chain variable domain of TCR clone 364011 (TRBV20-1, TRBJ2-5)
CSVPYRGRAETQYF

SEQ ID NO: 728023 - protein, 16 aa, Homo sapiens
  CDR3 for alpha chain variable domain of TCR clone 364012 (TRAV3, TRAJ10)
CAVRDMREGGGNKLTF

SEQ ID NO: 728024 - protein, 19 aa, Homo sapiens
  CDR3 for beta chain variable domain of TCR clone 364012 (TRBV6-3, TRBJ1-2)
CASSYSKGRTGPPNYGYTF

SEQ ID NO: 728025 - protein, 14 aa, Homo sapiens
  CDR3 for alpha chain variable domain of TCR clone 364013 (TRAV12-2, TRAJ45)
CALPERGGADGITF

SEQ ID NO: 728026 - protein, 14 aa, Homo sapiens
  CDR3 for beta chain variable domain of TCR clone 364013 (TRBV18, TRBJ1-5)
CASSPGNSNQPQHF

SEQ ID NO: 728027 - protein, 18 aa, Homo sapiens
  CDR3 for alpha chain variable domain of TCR clone 364014 (TRAV20, TRAJ4)
CAVQPYYMFFGGYNKLIF

SEQ ID NO: 728028 - protein, 13 aa, Homo sapiens
  CDR3 for beta chain variable domain of TCR clone 364014 (TRBV19, TRBJ2-3)
CATWDKITDTQYF

SEQ ID NO: 728029 - protein, 14 aa, Homo sapiens
  CDR3 for alpha chain variable domain of TCR clone 364015 (TRAV8-4, TRAJ34)
CAVSDSKNTDKLIF

SEQ ID NO: 728030 - protein, 13 aa, Homo sapiens
  CDR3 for beta chain variable domain of TCR clone 364015 (TRBV19, TRBJ1-2)
CASSVPGQDGYTF

SEQ ID NO: 728031 - protein, 10 aa, Homo sapiens
  CDR3 for alpha chain variable domain of TCR clone 364016 (TRAV12-1, TRAJ37)
ARGNTGKLIF

SEQ ID NO: 728032 - protein, 15 aa, Homo sapiens
  CDR3 for beta chain variable domain of TCR clone 364016 (TRBV7-2, TRBJ2-3)
CASSFEQGGTDTQYF

SEQ ID NO: 728033 - protein, 17 aa, Homo sapiens
  CDR3 for alpha chain variable domain of TCR clone 364017 (TRAV23/DV6, TRAJ12)
CAAIDLGAMDSSYKLIF

SEQ ID NO: 728034 - protein, 12 aa, Homo sapiens
  CDR3 for beta chain variable domain of TCR clone 364017 (TRBV10-3, TRBJ2-2)
CAIRENTGEPFF

SEQ ID NO: 728035 - protein, 16 aa, Homo sapiens
  CDR3 for alpha chain variable domain of TCR clone 364018 (TRAV12-3, TRAJ53)
CAMSPGSGGSNYKLTF

SEQ ID NO: 728036 - protein, 12 aa, Homo sapiens
  CDR3 for beta chain variable domain of TCR clone 364018 (TRBV14, TRBJ2-4)
CASSNLKSIQYF

SEQ ID NO: 728037 - protein, 14 aa, Homo sapiens
  CDR3 for alpha chain variable domain of TCR clone 364019 (TRAV1-2, TRAJ16)
CAVNRLSDGQKLLF

SEQ ID NO: 728038 - protein, 16 aa, Homo sapiens
  CDR3 for beta chain variable domain of TCR clone 364019 (TRBV11-2, TRBJ2-1)
CASSPRLAGVYNEQFF

SEQ ID NO: 728039 - protein, 14 aa, Homo sapiens
  CDR3 for alpha chain variable domain of TCR clone 364020 (TRAV12-3, TRAJ29)
CAMILLSGNTPLVF

SEQ ID NO: 728040 - protein, 15 aa, Homo sapiens
  CDR3 for beta chain variable domain of TCR clone 364020 (TRBV12-4, TRBJ2-2)
CASSPGDSKTGELFF

SEQ ID NO: 728041 - protein, 14 aa, Homo sapiens
  CDR3 for alpha chain variable domain of TCR clone 364021 (TRAV12-2, TRAJ13)
CAVKKTGGYQKVTF

SEQ ID NO: 728042 - protein, 12 aa, Homo sapiens
  CDR3 for beta chain variable domain of TCR clone 364021 (TRBV11-2, TRBJ2-2)
CASSLVGGELFF

SEQ ID NO: 728043 - protein, 13 aa, Homo sapiens
  CDR3 for alpha chain variable domain of TCR clone 364022 (TRAV8-3, TRAJ48)
CCGCNFGNEKLTF

SEQ ID NO: 728044 - protein, 13 aa, Homo sapiens
  CDR3 for beta chain variable domain of TCR clone 364022 (TRBV7-3, TRBJ1-1)
CASSQDWGAEAFF

SEQ ID NO: 728045 - protein, 13 aa, Homo sapiens
  CDR3 for alpha chain variable domain of TCR clone 364023 (TRAV2, TRAJ15)
CALASQAGTALIF

SEQ ID NO: 728046 - protein, 16 aa, Homo sapiens
  CDR3 for beta chain variable domain of TCR clone 364023 (TRBV5-1, TRBJ1-1)
CASSSGGNALNTEAFL

SEQ ID NO: 728047 - protein, 18 aa, Homo sapiens
  CDR3 for alpha chain variable domain of TCR clone 364024 (TRAV21, TRAJ52)
CAVRPSPAGGTSFGKLTF

SEQ ID NO: 728048 - protein, 16 aa, Homo sapiens
  CDR3 for beta chain variable domain of TCR clone 364024 (TRBV7-3, TRBJ2-1)
CASSLEGYRSYNEQFF

SEQ ID NO: 728049 - protein, 11 aa, Homo sapiens
  CDR3 for alpha chain variable domain of TCR clone 364025 (TRAV1-1, TRAJ23)
CAVRPGGKLIF

SEQ ID NO: 728050 - protein, 20 aa, Homo sapiens
  CDR3 for beta chain variable domain of TCR clone 364025 (TRBV7-8, TRBJ2-2)
CASSHLFLGPTIHITGELFF

SEQ ID NO: 728051 - protein, 11 aa, Homo sapiens
  CDR3 for alpha chain variable domain of TCR clone 364026 (TRAV25, TRAJ5)
CAGGGQESTYF

SEQ ID NO: 728052 - protein, 15 aa, Homo sapiens
  CDR3 for beta chain variable domain of TCR clone 364026 (TRBV9, TRBJ1-2)
CASSVVGQANYGDTF

SEQ ID NO: 728053 - protein, 17 aa, Homo sapiens
  CDR3 for alpha chain variable domain of TCR clone 364027 (TRAV12-2, TRAJ52)
CAVNPYAGGTSYGKLTF

SEQ ID NO: 728054 - protein, 15 aa, Homo sapiens
  CDR3 for beta chain variable domain of TCR clone 364027 (TRBV28, TRBJ1-4)
CASSLGTGTKEKLFF

SEQ ID NO: 728055 - protein, 13 aa, Homo sapiens
  CDR3 for alpha chain variable domain of TCR clone 364028 (TRAV1-1, TRAJ23)
CAVVANQGGKLIF

SEQ ID NO: 728056 - protein, 16 aa, Homo sapiens
  CDR3 for beta chain variable domain of TCR clone 364028 (TRBV13, TRBJ2-2)
CASSPRTGEHTGELFF

SEQ ID NO: 728057 - protein, 15 aa, Homo sapiens
  CDR3 for alpha chain variable domain of TCR clone 364029 (TRAV8-3, TRAJ45)
CASSYSGGGAGGLTF

SEQ ID NO: 728058 - protein, 13 aa, Homo sapiens
  CDR3 for beta chain variable domain of TCR clone 364029 (TRBV10-3, TRBJ2-7)
CSSKLAVNYEQYF

SEQ ID NO: 728059 - protein, 14 aa, Homo sapiens
  CDR3 for alpha chain variable domain of TCR clone 364030 (TRAV3, TRAJ20)
CAVPPAPNDYKLSF

SEQ ID NO: 728060 - protein, 14 aa, Homo sapiens
  CDR3 for beta chain variable domain of TCR clone 364030 (TRBV11-2, TRBJ2-5)
CASSRTGGIETQYF

SEQ ID NO: 728061 - protein, 15 aa, Homo sapiens
  CDR3 for alpha chain variable domain of TCR clone 364031 (TRAV27, TRAJ38)
CAGRFDAGNNRKLIW

SEQ ID NO: 728062 - protein, 13 aa, Homo sapiens
  CDR3 for beta chain variable domain of TCR clone 364031 (TRBV20-1, TRBJ2-1)
TSGALPPGNEQFL

SEQ ID NO: 728063 - protein, 12 aa, Homo sapiens
  CDR3 for alpha chain variable domain of TCR clone 364032 (TRAV12-3, TRAJ20)
CAMVRGDYKLSF

SEQ ID NO: 728064 - protein, 15 aa, Homo sapiens
  CDR3 for beta chain variable domain of TCR clone 364032 (TRBV28, TRBJ2-7)
CASSLISGGSYEQYF

SEQ ID NO: 728065 - protein, 16 aa, Homo sapiens
  CDR3 for alpha chain variable domain of TCR clone 364033 (TRAV16, TRAJ54)
CALSPPLIQGAQKLVF

SEQ ID NO: 728066 - protein, 12 aa, Homo sapiens
  CDR3 for beta chain variable domain of TCR clone 364033 (TRBV3-1, TRBJ2-2)
CASSLFPGELFF

SEQ ID NO: 728067 - protein, 13 aa, Homo sapiens
  CDR3 for alpha chain variable domain of TCR clone 364034 (TRAV27, TRAJ57)
CRSAQGGSEKLVF

SEQ ID NO: 728068 - protein, 11 aa, Homo sapiens
  CDR3 for beta chain variable domain of TCR clone 364034 (TRBV11-2, TRBJ1-1)
CASSISTEAFF

SEQ ID NO: 728069 - protein, 14 aa, Homo sapiens
  CDR3 for alpha chain variable domain of TCR clone 364035 (TRAV13-2, TRAJ40)
CAELPTSGTYKYIF

SEQ ID NO: 728070 - protein, 14 aa, Homo sapiens
  CDR3 for beta chain variable domain of TCR clone 364035 (TRBV12-5, TRBJ2-5)
CASGSRTHQETQYF

SEQ ID NO: 728071 - protein, 14 aa, Homo sapiens
  CDR3 for alpha chain variable domain of TCR clone 364036 (TRAV2, TRAJ37)
CAVDFTSNTGKLIF

SEQ ID NO: 728072 - protein, 15 aa, Homo sapiens
  CDR3 for beta chain variable domain of TCR clone 364036 (TRBV19, TRBJ2-4)
CASRGPRRGENIQYF

SEQ ID NO: 728073 - protein, 14 aa, Homo sapiens
  CDR3 for alpha chain variable domain of TCR clone 364037 (TRAV12-2, TRAJ17)
CAVLFNAAGNKLPF

SEQ ID NO: 728074 - protein, 17 aa, Homo sapiens
  CDR3 for beta chain variable domain of TCR clone 364037 (TRBV20-1, TRBJ2-2)
CSASGSGQGGLTGELFF

SEQ ID NO: 728075 - protein, 10 aa, Homo sapiens
  CDR3 for alpha chain variable domain of TCR clone 364038 (TRAV12-2, TRAJ52)
RSTSYGKLTF

SEQ ID NO: 728076 - protein, 16 aa, Homo sapiens
  CDR3 for beta chain variable domain of TCR clone 364038 (TRBV27, TRBJ1-1)
CASSSRGRTGYTEAFF

SEQ ID NO: 728077 - protein, 14 aa, Homo sapiens
  CDR3 for alpha chain variable domain of TCR clone 364039 (TRAV8-2, TRAJ37)
CVVSISCNTGKLIF

SEQ ID NO: 728078 - protein, 11 aa, Homo sapiens
  CDR3 for beta chain variable domain of TCR clone 364039 (TRBV18, TRBJ2-5)
CASSPRETQYF

SEQ ID NO: 728079 - protein, 14 aa, Homo sapiens
  CDR3 for alpha chain variable domain of TCR clone 364040 (TRAV2, TRAJ9)
CAVEDRSGGFKTIF

SEQ ID NO: 728080 - protein, 14 aa, Homo sapiens
  CDR3 for beta chain variable domain of TCR clone 364040 (TRBV7-3, TRBJ1-1)
CASSLGTGYTEAFF

SEQ ID NO: 728081 - protein, 17 aa, Homo sapiens
  CDR3 for alpha chain variable domain of TCR clone 364041 (TRAV4, TRAJ28)
CLVGDRALGLGVTNSLS

SEQ ID NO: 728082 - protein, 14 aa, Homo sapiens
  CDR3 for beta chain variable domain of TCR clone 364041 (TRBV7-2, TRBJ2-7)
CASSPKTSFYEQYF

SEQ ID NO: 728083 - protein, 10 aa, Homo sapiens
  CDR3 for alpha chain variable domain of TCR clone 364042 (TRAV17, TRAJ36)
CATVAGNLFF

SEQ ID NO: 728084 - protein, 15 aa, Homo sapiens
  CDR3 for beta chain variable domain of TCR clone 364042 (TRBV11-3, TRBJ2-1)
CASSLAGQTYNEQFF

SEQ ID NO: 728085 - protein, 11 aa, Homo sapiens
  CDR3 for alpha chain variable domain of TCR clone 364043 (TRAV21, TRAJ11)
WAVNGYSTLTF

SEQ ID NO: 728086 - protein, 15 aa, Homo sapiens
  CDR3 for beta chain variable domain of TCR clone 364043 (TRBV19, TRBJ1-5)
CASSIVWADNQPQHF

SEQ ID NO: 728087 - protein, 15 aa, Homo sapiens
  CDR3 for alpha chain variable domain of TCR clone 364044 (TRAV35, TRAJ40)
CAGQLWDSRTYKYIF

SEQ ID NO: 728088 - protein, 12 aa, Homo sapiens
  CDR3 for beta chain variable domain of TCR clone 364044 (TRBV7-8, TRBJ2-7)
CASSLAGYEQYF

SEQ ID NO: 728089 - protein, 13 aa, Homo sapiens
  CDR3 for alpha chain variable domain of TCR clone 364045 (TRAV3, TRAJ36)
CAVKRTGANNLFF

SEQ ID NO: 728090 - protein, 11 aa, Homo sapiens
  CDR3 for beta chain variable domain of TCR clone 364045 (TRBV7-8, TRBJ2-7)
CASSLSLEQYF

SEQ ID NO: 728091 - protein, 15 aa, Homo sapiens
  CDR3 for alpha chain variable domain of TCR clone 364046 (TRAV2, TRAJ27)
CVVDSITPMQANQPL

SEQ ID NO: 728092 - protein, 18 aa, Homo sapiens
  CDR3 for beta chain variable domain of TCR clone 364046 (TRBV7-9, TRBJ2-7)
CASSLTTSGSRTWYEQYF

SEQ ID NO: 728093 - protein, 12 aa, Homo sapiens
  CDR3 for alpha chain variable domain of TCR clone 364047 (TRAV8-3, TRAJ41)
CAVALSGDALNF

SEQ ID NO: 728094 - protein, 18 aa, Homo sapiens
  CDR3 for beta chain variable domain of TCR clone 364047 (TRBV20-1, TRBJ2-6)
CSAETTPTHCSGANVLTF

SEQ ID NO: 728095 - protein, 15 aa, Homo sapiens
  CDR3 for alpha chain variable domain of TCR clone 364048 (TRAV16, TRAJ16)
CALQGGGPDGQKLLF

SEQ ID NO: 728096 - protein, 13 aa, Homo sapiens
  CDR3 for beta chain variable domain of TCR clone 364048 (TRBV12-5, TRBJ2-3)
CASGDRQLDTQYF

SEQ ID NO: 728097 - protein, 16 aa, Homo sapiens
  CDR3 for alpha chain variable domain of TCR clone 364049 (TRAV16, TRAJ4)
CITVLPFSGGYNKLIC

SEQ ID NO: 728098 - protein, 14 aa, Homo sapiens
  CDR3 for beta chain variable domain of TCR clone 364049 (TRBV19, TRBJ2-7)
CASSMGQGAIEQYF

SEQ ID NO: 728099 - protein, 15 aa, Homo sapiens
  CDR3 for alpha chain variable domain of TCR clone 364050 (TRAV21, TRAJ45)
CAVSYSGGGADGLTF

SEQ ID NO: 728100 - protein, 13 aa, Homo sapiens
  CDR3 for beta chain variable domain of TCR clone 364050 (TRBV20-1, TRBJ2-5)
YSAATELQETQYF

SEQ ID NO: 728101 - protein, 11 aa, Homo sapiens
  CDR3 for alpha chain variable domain of TCR clone 364051 (TRAV12-2, TRAJ29)
CAVTLRSPLVF

SEQ ID NO: 728102 - protein, 15 aa, Homo sapiens
  CDR3 for beta chain variable domain of TCR clone 364051 (TRBV29-1, TRBJ2-1)
CSGRDRKSSYNEQFF

SEQ ID NO: 728103 - protein, 13 aa, Homo sapiens
  CDR3 for alpha chain variable domain of TCR clone 364052 (TRAV2, TRAJ40)
CAVVSSGTYKYIF

SEQ ID NO: 728104 - protein, 14 aa, Homo sapiens
  CDR3 for beta chain variable domain of TCR clone 364052 (TRBV4-2, TRBJ2-1)
CASGLDRAYNEQFF

SEQ ID NO: 728105 - protein, 16 aa, Homo sapiens
  CDR3 for alpha chain variable domain of TCR clone 364053 (TRAV3, TRAJ10)
CAVRDMRAGGGNKLTF

SEQ ID NO: 728106 - protein, 18 aa, Homo sapiens
  CDR3 for beta chain variable domain of TCR clone 364053 (TRBV10-3, TRBJ2-3)
CAISESRVGPMRGDTQYF

SEQ ID NO: 728107 - protein, 14 aa, Homo sapiens
  CDR3 for alpha chain variable domain of TCR clone 364054 (TRAV23/DV6, TRAJ23)
CAAGPYNQGGKLIF

SEQ ID NO: 728108 - protein, 12 aa, Homo sapiens
  CDR3 for beta chain variable domain of TCR clone 364054 (TRBV7-9, TRBJ2-7)
CATGTDAYEQYF

SEQ ID NO: 728109 - protein, 14 aa, Homo sapiens
  CDR3 for alpha chain variable domain of TCR clone 364055 (TRAV1-2, TRAJ16)
CAVNRFSDGQKLLF

SEQ ID NO: 728110 - protein, 17 aa, Homo sapiens
  CDR3 for beta chain variable domain of TCR clone 364055 (TRBV11-2, TRBJ2-1)
CASSQDVFLAGNNEQFF

SEQ ID NO: 728111 - protein, 14 aa, Homo sapiens
  CDR3 for alpha chain variable domain of TCR clone 364056 (TRAV12-1, TRAJ17)
CVVNYKAAGNKLTF

SEQ ID NO: 728112 - protein, 17 aa, Homo sapiens
  CDR3 for beta chain variable domain of TCR clone 364056 (TRBV20-1, TRBJ2-1)
CSAPPRLAGTRYNEQFF

SEQ ID NO: 728113 - protein, 13 aa, Homo sapiens
  CDR3 for alpha chain variable domain of TCR clone 364057 (TRAV21, TRAJ27)
CAALNTNAGKSTF

SEQ ID NO: 728114 - protein, 16 aa, Homo sapiens
  CDR3 for beta chain variable domain of TCR clone 364057 (TRBV12-4, TRBJ1-4)
CASSLATGPRNEKLFF

SEQ ID NO: 728115 - protein, 18 aa, Homo sapiens
  CDR3 for alpha chain variable domain of TCR clone 364058 (TRAV8-6, TRAJ36)
CAVRDGLRDWGKQPLLWV

SEQ ID NO: 728116 - protein, 16 aa, Homo sapiens
  CDR3 for beta chain variable domain of TCR clone 364058 (TRBV28, TRBJ2-1)
CASSSPEYPRDNEQFF

SEQ ID NO: 728117 - protein, 14 aa, Homo sapiens
  CDR3 for alpha chain variable domain of TCR clone 364059 (TRAV8-3, TRAJ9)
CAVVYNTGGFKTIF

SEQ ID NO: 728118 - protein, 14 aa, Homo sapiens
  CDR3 for beta chain variable domain of TCR clone 364059 (TRBV7-3, TRBJ2-2)
CASSSGGYTGQLFF

SEQ ID NO: 728119 - protein, 14 aa, Homo sapiens
  CDR3 for alpha chain variable domain of TCR clone 364060 (TRAV17, TRAJ15)
CATDRGQAGTALIF

SEQ ID NO: 728120 - protein, 17 aa, Homo sapiens
  CDR3 for beta chain variable domain of TCR clone 364060 (TRBV29-1, TRBJ2-1)
CSVGGLAGAYSYNEQFF

SEQ ID NO: 728121 - protein, 15 aa, Homo sapiens
  CDR3 for alpha chain variable domain of TCR clone 364061 (TRAV30, TRAJ57)
CGTAIPQGGSEKLVF

SEQ ID NO: 728122 - protein, 13 aa, Homo sapiens
  CDR3 for beta chain variable domain of TCR clone 364061 (TRBV7-9, TRBJ1-2)
CASSPSNFWGNTF

SEQ ID NO: 728123 - protein, 11 aa, Homo sapiens
  CDR3 for alpha chain variable domain of TCR clone 364062 (TRAV2, TRAJ13)
CASGGYQKVTF

SEQ ID NO: 728124 - protein, 13 aa, Homo sapiens
  CDR3 for beta chain variable domain of TCR clone 364062 (TRBV19, TRBJ1-3)
CASRLSLGKTIYF

SEQ ID NO: 728125 - protein, 15 aa, Homo sapiens
  CDR3 for alpha chain variable domain of TCR clone 364063 (TRAV12-3, TRAJ6)
CAMSAATGGSYIPTF

SEQ ID NO: 728126 - protein, 13 aa, Homo sapiens
  CDR3 for beta chain variable domain of TCR clone 364063 (TRBV20-1, TRBJ1-2)
CSASPEFNYGYTF

SEQ ID NO: 728127 - protein, 15 aa, Homo sapiens
  CDR3 for alpha chain variable domain of TCR clone 364064 (TRAV25, TRAJ10)
CAGPLLTGGGNKLTF

SEQ ID NO: 728128 - protein, 14 aa, Homo sapiens
  CDR3 for beta chain variable domain of TCR clone 364064 (TRBV7-9, TRBJ2-1)
CASSPRNSLYEQFF

SEQ ID NO: 728129 - protein, 13 aa, Homo sapiens
  CDR3 for alpha chain variable domain of TCR clone 364065 (TRAV3, TRAJ21)
CAVREPDFNKFYF

SEQ ID NO: 728130 - protein, 15 aa, Homo sapiens
  CDR3 for beta chain variable domain of TCR clone 364065 (TRBV20-1, TRBJ2-7)
CSARVPAAYFYEQYF

SEQ ID NO: 728131 - protein, 17 aa, Homo sapiens
  CDR3 for alpha chain variable domain of TCR clone 364066 (TRAV8-6, TRAJ58)
CAVSSWVGETSGPRLTF

SEQ ID NO: 728132 - protein, 14 aa, Homo sapiens
  CDR3 for beta chain variable domain of TCR clone 364066 (TRBV4-1, TRBJ2-2)
CASSQAVNTGELFF

SEQ ID NO: 728133 - protein, 11 aa, Homo sapiens
  CDR3 for alpha chain variable domain of TCR clone 364067 (TRAV3, TRAJ21)
CAVGNFNKCYF

SEQ ID NO: 728134 - protein, 16 aa, Homo sapiens
  CDR3 for beta chain variable domain of TCR clone 364067 (TRBV19, TRBJ2-1)
CASSKAGPSSYKEQFF

SEQ ID NO: 728135 - protein, 13 aa, Homo sapiens
  CDR3 for alpha chain variable domain of TCR clone 364068 (TRAV2, TRAJ15)
CAVASQAGTALIF

SEQ ID NO: 728136 - protein, 14 aa, Homo sapiens
  CDR3 for beta chain variable domain of TCR clone 364068 (TRBV4-2, TRBJ1-2)
CASSPGGSNYGYTF

SEQ ID NO: 728137 - protein, 14 aa, Homo sapiens
  CDR3 for alpha chain variable domain of TCR clone 364069 (TRAV4, TRAJ30)
CLVGGMNRDDKIIF

SEQ ID NO: 728138 - protein, 15 aa, Homo sapiens
  CDR3 for beta chain variable domain of TCR clone 364069 (TRBV28, TRBJ2-3)
CASSLVFRTGDTQYF

SEQ ID NO: 728139 - protein, 16 aa, Homo sapiens
  CDR3 for alpha chain variable domain of TCR clone 364070 (TRAV16, TRAJ52)
CALSAAGGTSYGKLTF

SEQ ID NO: 728140 - protein, 13 aa, Homo sapiens
  CDR3 for beta chain variable domain of TCR clone 364070 (TRBV4-1, TRBJ2-2)
CASSQENTGELFF

SEQ ID NO: 728141 - protein, 14 aa, Homo sapiens
  CDR3 for alpha chain variable domain of TCR clone 364071 (TRAV9-2, TRAJ39)
CALYIYNAGNMLTF

SEQ ID NO: 728142 - protein, 15 aa, Homo sapiens
  CDR3 for beta chain variable domain of TCR clone 364071 (TRBV11-3, TRBJ1-2)
CASSLEGVQRNGYTF

SEQ ID NO: 728143 - protein, 12 aa, Homo sapiens
  CDR3 for alpha chain variable domain of TCR clone 364072 (TRAV3, TRAJ31)
CAVRDGNARPMF

SEQ ID NO: 728144 - protein, 18 aa, Homo sapiens
  CDR3 for beta chain variable domain of TCR clone 364072 (TRBV7-2, TRBJ2-3)
CASSLKREGSGIADTQYF

SEQ ID NO: 728145 - protein, 14 aa, Homo sapiens
  CDR3 for alpha chain variable domain of TCR clone 364073 (TRAV35, TRAJ22)
CAGLRPGSARQLTF

SEQ ID NO: 728146 - protein, 20 aa, Homo sapiens
  CDR3 for beta chain variable domain of TCR clone 364073 (TRBV28, TRBJ2-1)
CASTPIGRSPGLAGGNEQFF

SEQ ID NO: 728147 - protein, 14 aa, Homo sapiens
  CDR3 for alpha chain variable domain of TCR clone 364074 (TRAV38-1, TRAJ45)
CASHSGGGADGLTF

SEQ ID NO: 728148 - protein, 13 aa, Homo sapiens
  CDR3 for beta chain variable domain of TCR clone 364074 (TRBV10-3, TRBJ1-2)
CAISVRDSYGYTF

SEQ ID NO: 728149 - protein, 11 aa, Homo sapiens
  CDR3 for alpha chain variable domain of TCR clone 364075 (TRAV17, TRAJ9)
CGFTGGFKTIF

SEQ ID NO: 728150 - protein, 14 aa, Homo sapiens
  CDR3 for beta chain variable domain of TCR clone 364075 (TRBV7-8, TRBJ2-7)
CASSPRDRVYEQYF

SEQ ID NO: 728151 - protein, 15 aa, Homo sapiens
  CDR3 for alpha chain variable domain of TCR clone 364076 (TRAV2, TRAJ9)
CAVAALNTGGFKTIF

SEQ ID NO: 728152 - protein, 14 aa, Homo sapiens
  CDR3 for beta chain variable domain of TCR clone 364076 (TRBV9, TRBJ2-5)
CASSVVGAKETQYF

SEQ ID NO: 728153 - protein, 14 aa, Homo sapiens
  CDR3 for alpha chain variable domain of TCR clone 364077 (TRAV12-1, TRAJ42)
CVVTYGGSQGNLIF

SEQ ID NO: 728154 - protein, 13 aa, Homo sapiens
  CDR3 for beta chain variable domain of TCR clone 364077 (TRBV18, TRBJ2-5)
CASSPPGKETQYF

SEQ ID NO: 728155 - protein, 14 aa, Homo sapiens
  CDR3 for alpha chain variable domain of TCR clone 364078 (TRAV41, TRAJ48)
CAVRPHFGNEKLTF

SEQ ID NO: 728156 - protein, 15 aa, Homo sapiens
  CDR3 for beta chain variable domain of TCR clone 364078 (TRBV6-3, TRBJ2-7)
CASSSPGTVFYEQYF

SEQ ID NO: 728157 - protein, 12 aa, Homo sapiens
  CDR3 for alpha chain variable domain of TCR clone 364079 (TRAV12-3, TRAJ34)
CAMGYNTDKLIF

SEQ ID NO: 728158 - protein, 13 aa, Homo sapiens
  CDR3 for beta chain variable domain of TCR clone 364079 (TRBV7-3, TRBJ1-1)
CASSLTQGTEAFF

SEQ ID NO: 728159 - protein, 13 aa, Homo sapiens
  CDR3 for alpha chain variable domain of TCR clone 364080 (TRAV17, TRAJ7)
CATDNYGNNRLAF

SEQ ID NO: 728160 - protein, 16 aa, Homo sapiens
  CDR3 for beta chain variable domain of TCR clone 364080 (TRBV4-1, TRBJ2-5)
CASSQAIAASSATQYL

SEQ ID NO: 728161 - protein, 12 aa, Homo sapiens
  CDR3 for alpha chain variable domain of TCR clone 364081 (TRAV1-1, TRAJ8)
CAGGTGFQKLLF

SEQ ID NO: 728162 - protein, 16 aa, Homo sapiens
  CDR3 for beta chain variable domain of TCR clone 364081 (TRBV12-5, TRBJ2-5)
CVSGPRTSGNQETQYF

SEQ ID NO: 728163 - protein, 15 aa, Homo sapiens
  CDR3 for alpha chain variable domain of TCR clone 364082 (TRAV2, TRAJ24)
CAVEVLTDSLWKFHF

SEQ ID NO: 728164 - protein, 13 aa, Homo sapiens
  CDR3 for beta chain variable domain of TCR clone 364082 (TRBV10-2, TRBJ2-7)
CASGTSGGYGQYF

SEQ ID NO: 728165 - protein, 12 aa, Homo sapiens
  CDR3 for alpha chain variable domain of TCR clone 364083 (TRAV35, TRAJ49)
CAGWNTCNHFYF

SEQ ID NO: 728166 - protein, 16 aa, Homo sapiens
  CDR3 for beta chain variable domain of TCR clone 364083 (TRBV5-1, TRBJ2-2)
CASSLWDTTNTGELFF

SEQ ID NO: 728167 - protein, 12 aa, Homo sapiens
  CDR3 for alpha chain variable domain of TCR clone 364084 (TRAV2, TRAJ33)
CAVEDSNYQFIW

SEQ ID NO: 728168 - protein, 14 aa, Homo sapiens
  CDR3 for beta chain variable domain of TCR clone 364084 (TRBV19, TRBJ1-4)
CASSINRGGEKLFF

SEQ ID NO: 728169 - protein, 14 aa, Homo sapiens
  CDR3 for alpha chain variable domain of TCR clone 364085 (TRAV1-2, TRAJ16)
CAVNRFSDGQKLPF

SEQ ID NO: 728170 - protein, 13 aa, Homo sapiens
  CDR3 for beta chain variable domain of TCR clone 364085 (TRBV20-1, TRBJ2-2)
CSASAAGTGELFF

SEQ ID NO: 728171 - protein, 16 aa, Homo sapiens
  CDR3 for alpha chain variable domain of TCR clone 364086 (TRAV27, TRAJ52)
CAGAPAGGTSYGKLTF

SEQ ID NO: 728172 - protein, 15 aa, Homo sapiens
  CDR3 for beta chain variable domain of TCR clone 364086 (TRBV6-3, TRBJ2-7)
CASSSPGTVFYEQYF

SEQ ID NO: 728173 - protein, 13 aa, Homo sapiens
  CDR3 for alpha chain variable domain of TCR clone 364087 (TRAV12-3, TRAJ43)
CAMIRPNNNDMRF

SEQ ID NO: 728174 - protein, 12 aa, Homo sapiens
  CDR3 for beta chain variable domain of TCR clone 364087 (TRBV11-2, TRBJ2-5)
CASSLGQQTQYF

SEQ ID NO: 728175 - protein, 15 aa, Homo sapiens
  CDR3 for alpha chain variable domain of TCR clone 364088 (TRAV3, TRAJ22)
CDVRDRGGSARQLTF

SEQ ID NO: 728176 - protein, 15 aa, Homo sapiens
  CDR3 for beta chain variable domain of TCR clone 364088 (TRBV5-1, TRBJ2-5)
CASSFKGGDQETQYF

SEQ ID NO: 728177 - protein, 13 aa, Homo sapiens
  CDR3 for alpha chain variable domain of TCR clone 364089 (TRAV23/DV6, TRAJ27)
CAASKPMQANQPL

SEQ ID NO: 728178 - protein, 14 aa, Homo sapiens
  CDR3 for beta chain variable domain of TCR clone 364089 (TRBV5-4, TRBJ1-1)
CANSLDSRRDEAFF

SEQ ID NO: 728179 - protein, 13 aa, Homo sapiens
  CDR3 for alpha chain variable domain of TCR clone 364090 (TRAV1-1, TRAJ9)
CAATNTGGFKTIF

SEQ ID NO: 728180 - protein, 14 aa, Homo sapiens
  CDR3 for beta chain variable domain of TCR clone 364090 (TRBV20-1, TRBJ2-1)
CSAQRGGSANEQFF

SEQ ID NO: 728181 - protein, 11 aa, Homo sapiens
  CDR3 for alpha chain variable domain of TCR clone 364091 (TRAV2, TRAJ33)
CAVDSNYQLIW

SEQ ID NO: 728182 - protein, 15 aa, Homo sapiens
  CDR3 for beta chain variable domain of TCR clone 364091 (TRBV2, TRBJ2-1)
CASSELAGSYNEQFF

SEQ ID NO: 728183 - protein, 15 aa, Homo sapiens
  CDR3 for alpha chain variable domain of TCR clone 364092 (TRAV4, TRAJ39)
CLVGPNNNAGNMLTF

SEQ ID NO: 728184 - protein, 13 aa, Homo sapiens
  CDR3 for beta chain variable domain of TCR clone 364092 (TRBV29-1, TRBJ2-5)
CSAGLAGEETQYF

SEQ ID NO: 728185 - protein, 13 aa, Homo sapiens
  CDR3 for alpha chain variable domain of TCR clone 364093 (TRAV35, TRAJ57)
CAGSQGGSEKLVF

SEQ ID NO: 728186 - protein, 15 aa, Homo sapiens
  CDR3 for beta chain variable domain of TCR clone 364093 (TRBV10-3, TRBJ2-3)
CTISLTSGGTDTQYF

SEQ ID NO: 728187 - protein, 15 aa, Homo sapiens
  CDR3 for alpha chain variable domain of TCR clone 364094 (TRAV27, TRAJ38)
CAARRNAGNNRKRIW

SEQ ID NO: 728188 - protein, 15 aa, Homo sapiens
  CDR3 for beta chain variable domain of TCR clone 364094 (TRBV2, TRBJ2-1)
CASSELAGSYNEQFF

SEQ ID NO: 728189 - protein, 16 aa, Homo sapiens
  CDR3 for alpha chain variable domain of TCR clone 364095 (TRAV3, TRAJ37)
CAVRGKGSGNTRKLIF

SEQ ID NO: 728190 - protein, 13 aa, Homo sapiens
  CDR3 for beta chain variable domain of TCR clone 364095 (TRBV7-3, TRBJ1-1)
CASSQDWGAEAFF

SEQ ID NO: 728191 - protein, 13 aa, Homo sapiens
  CDR3 for alpha chain variable domain of TCR clone 364096 (TRAV12-2, TRAJ24)
CAVSTDSWGKLQF

SEQ ID NO: 728192 - protein, 15 aa, Homo sapiens
  CDR3 for beta chain variable domain of TCR clone 364096 (TRBV20-1, TRBJ2-7)
CSARDRVSGMDEQYF

SEQ ID NO: 728193 - protein, 18 aa, Homo sapiens
  CDR3 for alpha chain variable domain of TCR clone 364097 (TRAV29/DV5, TRAJ52)
CAAGFRGAGGTSYGKLTF

SEQ ID NO: 728194 - protein, 15 aa, Homo sapiens
  CDR3 for beta chain variable domain of TCR clone 364097 (TRBV6-1, TRBJ2-2)
CASSAGQGYTGELFF

SEQ ID NO: 728195 - protein, 15 aa, Homo sapiens
  CDR3 for alpha chain variable domain of TCR clone 364098 (TRAV3, TRAJ5)
CAVRDLDTGRRAITF

SEQ ID NO: 728196 - protein, 15 aa, Homo sapiens
  CDR3 for beta chain variable domain of TCR clone 364098 (TRBV20-1, TRBJ2-1)
CSARSPGGPGNEQFF

SEQ ID NO: 728197 - protein, 11 aa, Homo sapiens
  CDR3 for alpha chain variable domain of TCR clone 364099 (TRAV8-4, TRAJ20)
CAVTNVLTTTS

SEQ ID NO: 728198 - protein, 13 aa, Homo sapiens
  CDR3 for beta chain variable domain of TCR clone 364099 (TRBV19, TRBJ2-3)
CATWDNITDTQYF

SEQ ID NO: 728199 - protein, 11 aa, Homo sapiens
  CDR3 for alpha chain variable domain of TCR clone 364100 (TRAV3, TRAJ21)
RAVGNFDKFYF

SEQ ID NO: 728200 - protein, 16 aa, Homo sapiens
  CDR3 for beta chain variable domain of TCR clone 364100 (TRBV19, TRBJ2-1)
CASSKAGPSSYNEQFF

SEQ ID NO: 728201 - protein, 14 aa, Homo sapiens
  CDR3 for alpha chain variable domain of TCR clone 364101 (TRAV20, TRAJ29)
CAVQAWVGNTPLVF

SEQ ID NO: 728202 - protein, 14 aa, Homo sapiens
  CDR3 for beta chain variable domain of TCR clone 364101 (TRBV5-1, TRBJ1-5)
CASSLGQGAQPQHF

SEQ ID NO: 728203 - protein, 12 aa, Homo sapiens
  CDR3 for alpha chain variable domain of TCR clone 364102 (TRAV12-3, TRAJ17)
CAMTLTGNKLTF

SEQ ID NO: 728204 - protein, 15 aa, Homo sapiens
  CDR3 for beta chain variable domain of TCR clone 364102 (TRBV20-1, TRBJ2-7)
CSARDRVSWMDEQYF

SEQ ID NO: 728205 - protein, 14 aa, Homo sapiens
  CDR3 for alpha chain variable domain of TCR clone 364103 (TRAV16, TRAJ17)
CALSGRAAGNKLTF

SEQ ID NO: 728206 - protein, 15 aa, Homo sapiens
  CDR3 for beta chain variable domain of TCR clone 364103 (TRBV3-1, TRBJ1-2)
CASSPARLPEGGYTF

SEQ ID NO: 728207 - protein, 15 aa, Homo sapiens
  CDR3 for alpha chain variable domain of TCR clone 364104 (TRAV26-1, TRAJ22)
CFVRVSLWFCKATDL

SEQ ID NO: 728208 - protein, 13 aa, Homo sapiens
  CDR3 for beta chain variable domain of TCR clone 364104 (TRBV7-9, TRBJ1-2)
CASSLKQNYGYTF

SEQ ID NO: 728209 - protein, 13 aa, Homo sapiens
  CDR3 for alpha chain variable domain of TCR clone 364105 (TRAV12-3, TRAJ33)
CAMSVNSNYHLIW

SEQ ID NO: 728210 - protein, 16 aa, Homo sapiens
  CDR3 for beta chain variable domain of TCR clone 364105 (TRBV7-3, TRBJ2-3)
CASSLSGYRPEDTQYF

SEQ ID NO: 728211 - protein, 16 aa, Homo sapiens
  CDR3 for alpha chain variable domain of TCR clone 364106 (TRAV27, TRAJ52)
CAGAPAGGTSYGKLTF

SEQ ID NO: 728212 - protein, 20 aa, Homo sapiens
  CDR3 for beta chain variable domain of TCR clone 364106 (TRBV28, TRBJ2-1)
CASTPIGRSPGLAGGNEQFF

SEQ ID NO: 728213 - protein, 12 aa, Homo sapiens
  CDR3 for alpha chain variable domain of TCR clone 364107 (TRAV2, TRAJ31)
CAVEDNNARPMF

SEQ ID NO: 728214 - protein, 18 aa, Homo sapiens
  CDR3 for beta chain variable domain of TCR clone 364107 (TRBV11-2, TRBJ2-3)
CASSLGGASRGAPNTQYF

SEQ ID NO: 728215 - protein, 13 aa, Homo sapiens
  CDR3 for alpha chain variable domain of TCR clone 364108 (TRAV35, TRAJ27)
CAGQEGDAGKSTF

SEQ ID NO: 728216 - protein, 16 aa, Homo sapiens
  CDR3 for beta chain variable domain of TCR clone 364108 (TRBV7-2, TRBJ2-5)
CASSCKTGISLETQYF

SEQ ID NO: 728217 - protein, 15 aa, Homo sapiens
  CDR3 for alpha chain variable domain of TCR clone 364109 (TRAV21, TRAJ24)
CAARSSTASWGKFQF

SEQ ID NO: 728218 - protein, 13 aa, Homo sapiens
  CDR3 for beta chain variable domain of TCR clone 364109 (TRBV11-2, TRBJ2-5)
CASSSTGEETQYF

SEQ ID NO: 728219 - protein, 14 aa, Homo sapiens
  CDR3 for alpha chain variable domain of TCR clone 364110 (TRAV12-2, TRAJ15)
CAPHTGQAGTALIF

SEQ ID NO: 728220 - protein, 16 aa, Homo sapiens
  CDR3 for beta chain variable domain of TCR clone 364110 (TRBV7-9, TRBJ2-7)
CASSLGFSSGEDGYTF

SEQ ID NO: 728221 - protein, 15 aa, Homo sapiens
  CDR3 for alpha chain variable domain of TCR clone 364111 (TRAV3, TRAJ4)
CAVRDGTGGYNKPIF

SEQ ID NO: 728222 - protein, 16 aa, Homo sapiens
  CDR3 for beta chain variable domain of TCR clone 364111 (TRBV27, TRBJ2-2)
CAGSSSGVSNTGELFF

SEQ ID NO: 728223 - protein, 13 aa, Homo sapiens
  CDR3 for alpha chain variable domain of TCR clone 364112 (TRAV29/DV5, TRAJ21)
CAASGDNFKKFYF

SEQ ID NO: 728224 - protein, 14 aa, Homo sapiens
  CDR3 for beta chain variable domain of TCR clone 364112 (TRBV7-2, TRBJ2-7)
CASSPRDGAYEQYF

SEQ ID NO: 728225 - protein, 13 aa, Homo sapiens
  CDR3 for alpha chain variable domain of TCR clone 364113 (TRAV13-1, TRAJ6)
CAASSGGSYIPTF

SEQ ID NO: 728226 - protein, 15 aa, Homo sapiens
  CDR3 for beta chain variable domain of TCR clone 364113 (TRBV7-8, TRBJ2-7)
CASSLTGAASSTSGR

SEQ ID NO: 728227 - protein, 14 aa, Homo sapiens
  CDR3 for alpha chain variable domain of TCR clone 364114 (TRAV12-2, TRAJ44)
CAMNPAGTASKLTF

SEQ ID NO: 728228 - protein, 15 aa, Homo sapiens
  CDR3 for beta chain variable domain of TCR clone 364114 (TRBV28, TRBJ2-7)
CASSVRQVSSYEQYF

SEQ ID NO: 728229 - protein, 15 aa, Homo sapiens
  CDR3 for alpha chain variable domain of TCR clone 364115 (TRAV21, TRAJ10)
CAVPLLTGGGNKLTF

SEQ ID NO: 728230 - protein, 14 aa, Homo sapiens
  CDR3 for beta chain variable domain of TCR clone 364115 (TRBV12-4, TRBJ1-1)
CASSLGTGGTEAFC

SEQ ID NO: 728231 - protein, 12 aa, Homo sapiens
  CDR3 for alpha chain variable domain of TCR clone 364116 (TRAV20, TRAJ56)
CAVTGSNSKLTF

SEQ ID NO: 728232 - protein, 14 aa, Homo sapiens
  CDR3 for beta chain variable domain of TCR clone 364116 (TRBV20-1, TRBJ2-5)
CSALVPGYQETQYF

SEQ ID NO: 728233 - protein, 15 aa, Homo sapiens
  CDR3 for alpha chain variable domain of TCR clone 364117 (TRAV26-1, TRAJ47)
CIVRVGWGYGNKMVF

SEQ ID NO: 728234 - protein, 13 aa, Homo sapiens
  CDR3 for beta chain variable domain of TCR clone 364117 (TRBV20-1, TRBJ2-7)
CSARGDTQDEQYF

SEQ ID NO: 728235 - protein, 14 aa, Homo sapiens
  CDR3 for alpha chain variable domain of TCR clone 364118 (TRAV1-1, TRAJ28)
CAAPSGAGSYQLTF

SEQ ID NO: 728236 - protein, 15 aa, Homo sapiens
  CDR3 for beta chain variable domain of TCR clone 364118 (TRBV7-2, TRBJ1-2)
CSSSLVSGGDYGYTF

SEQ ID NO: 728237 - protein, 12 aa, Homo sapiens
  CDR3 for alpha chain variable domain of TCR clone 364119 (TRAV12-3, TRAJ17)
CAMTLTGNKLTF

SEQ ID NO: 728238 - protein, 13 aa, Homo sapiens
  CDR3 for beta chain variable domain of TCR clone 364119 (TRBV2, TRBJ2-3)
CASILAGGQGQYF

SEQ ID NO: 728239 - protein, 14 aa, Homo sapiens
  CDR3 for alpha chain variable domain of TCR clone 364120 (TRAV1-2, TRAJ16)
CAVNRFSDGQKLLF

SEQ ID NO: 728240 - protein, 13 aa, Homo sapiens
  CDR3 for beta chain variable domain of TCR clone 364120 (TRBV20-1, TRBJ2-1)
CSAHGISYNEQFF

SEQ ID NO: 728241 - protein, 15 aa, Homo sapiens
  CDR3 for alpha chain variable domain of TCR clone 364121 (TRAV40, TRAJ45)
RLLGDLGGGADGLTF

SEQ ID NO: 728242 - protein, 13 aa, Homo sapiens
  CDR3 for beta chain variable domain of TCR clone 364121 (TRBV7-9, TRBJ1-2)
CASSLKQNYGYTF

SEQ ID NO: 728243 - protein, 14 aa, Homo sapiens
  CDR3 for alpha chain variable domain of TCR clone 364122 (TRAV14/DV4, TRAJ58)
CAMRARTRGSRWTF

SEQ ID NO: 728244 - protein, 18 aa, Homo sapiens
  CDR3 for beta chain variable domain of TCR clone 364122 (TRBV12-4, TRBJ1-5)
CASSLFLVGVGAYQPQHF

SEQ ID NO: 728245 - protein, 13 aa, Homo sapiens
  CDR3 for alpha chain variable domain of TCR clone 364123 (TRAV16, TRAJ34)
CALTGYNTDKLIF

SEQ ID NO: 728246 - protein, 16 aa, Homo sapiens
  CDR3 for beta chain variable domain of TCR clone 364123 (TRBV6-1, TRBJ2-7)
CASRAPRRSPSYEQYF

SEQ ID NO: 728247 - protein, 15 aa, Homo sapiens
  CDR3 for alpha chain variable domain of TCR clone 364124 (TRAV21, TRAJ40)
CAVRPQTSGTYKYIF

SEQ ID NO: 728248 - protein, 13 aa, Homo sapiens
  CDR3 for beta chain variable domain of TCR clone 364124 (TRBV7-2, TRBJ2-2)
CASSPVRAGELFF

SEQ ID NO: 728249 - protein, 16 aa, Homo sapiens
  CDR3 for alpha chain variable domain of TCR clone 364125 (TRAV30, TRAJ24)
CGTEIVDADSWGEFQV

SEQ ID NO: 728250 - protein, 14 aa, Homo sapiens
  CDR3 for beta chain variable domain of TCR clone 364125 (TRBV12-5, TRBJ2-5)
CASGSRTHQETQYF

SEQ ID NO: 728251 - protein, 15 aa, Homo sapiens
  CDR3 for alpha chain variable domain of TCR clone 364126 (TRAV1-2, TRAJ30)
CAVRPHGNRDDKIIF

SEQ ID NO: 728252 - protein, 15 aa, Homo sapiens
  CDR3 for beta chain variable domain of TCR clone 364126 (TRBV6-1, TRBJ2-6)
CASSSRPSGANVLTF

SEQ ID NO: 728253 - protein, 12 aa, Homo sapiens
  CDR3 for alpha chain variable domain of TCR clone 364127 (TRAV21, TRAJ33)
CAKMDSNYQLIW

SEQ ID NO: 728254 - protein, 15 aa, Homo sapiens
  CDR3 for beta chain variable domain of TCR clone 364127 (TRBV19, TRBJ2-1)
CASSSPGVPLDEQFF

SEQ ID NO: 728255 - protein, 17 aa, Homo sapiens
  CDR3 for alpha chain variable domain of TCR clone 364128 (TRAV3, TRAJ6)
CAVGDGPRAGGSYIPTF

SEQ ID NO: 728256 - protein, 14 aa, Homo sapiens
  CDR3 for beta chain variable domain of TCR clone 364128 (TRBV27, TRBJ2-2)
CASRPGVNTGELFF

SEQ ID NO: 728257 - protein, 16 aa, Homo sapiens
  CDR3 for alpha chain variable domain of TCR clone 364129 (TRAV30, TRAJ24)
CGTEIVDADSWGKFQF

SEQ ID NO: 728258 - protein, 14 aa, Homo sapiens
  CDR3 for beta chain variable domain of TCR clone 364129 (TRBV12-4, TRBJ2-3)
CASSLSGATDTQYF

SEQ ID NO: 728259 - protein, 13 aa, Homo sapiens
  CDR3 for alpha chain variable domain of TCR clone 364130 (TRAV38-1, TRAJ42)
CARWGGIQGNPIL

SEQ ID NO: 728260 - protein, 10 aa, Homo sapiens
  CDR3 for beta chain variable domain of TCR clone 364130 (TRBV2, TRBJ2-5)
CASSAATQYF

SEQ ID NO: 728261 - protein, 15 aa, Homo sapiens
  CDR3 for alpha chain variable domain of TCR clone 364131 (TRAV12-2, TRAJ6)
CAMSATTGGSNIPTF

SEQ ID NO: 728262 - protein, 16 aa, Homo sapiens
  CDR3 for beta chain variable domain of TCR clone 364131 (TRBV20-1, TRBJ1-2)
CSASMGQGVANYGYTF

SEQ ID NO: 728263 - protein, 15 aa, Homo sapiens
  CDR3 for alpha chain variable domain of TCR clone 364132 (TRAV3, TRAJ22)
CAVRDRGGYARQLTF

SEQ ID NO: 728264 - protein, 21 aa, Homo sapiens
  CDR3 for beta chain variable domain of TCR clone 364132 (TRBV7-3, TRBJ2-5)
GGTQPCISGPAASGGGETQYF

SEQ ID NO: 728265 - protein, 11 aa, Homo sapiens
  CDR3 for alpha chain variable domain of TCR clone 364133 (TRAV12-3, TRAJ27)
CAMANAGKSTF

SEQ ID NO: 728266 - protein, 14 aa, Homo sapiens
  CDR3 for beta chain variable domain of TCR clone 364133 (TRBV19, TRBJ2-1)
CASPTVVLSGEQFF

SEQ ID NO: 728267 - protein, 14 aa, Homo sapiens
  CDR3 for alpha chain variable domain of TCR clone 364134 (TRAV2, TRAJ9)
CAVEDRSGGFKTIF

SEQ ID NO: 728268 - protein, 14 aa, Homo sapiens
  CDR3 for beta chain variable domain of TCR clone 364134 (TRBV11-3, TRBJ2-2)
CASSRGGGVGELFF

SEQ ID NO: 728269 - protein, 16 aa, Homo sapiens
  CDR3 for alpha chain variable domain of TCR clone 364135 (TRAV14/DV4, TRAJ20)
CAMREGRSRDDYKLSF

SEQ ID NO: 728270 - protein, 17 aa, Homo sapiens
  CDR3 for beta chain variable domain of TCR clone 364135 (TRBV7-9, TRBJ2-5)
FASSPGLAGGGREPQYF

SEQ ID NO: 728271 - protein, 11 aa, Homo sapiens
  CDR3 for alpha chain variable domain of TCR clone 364136 (TRAV2, TRAJ13)
CASGGYQKVTF

SEQ ID NO: 728272 - protein, 16 aa, Homo sapiens
  CDR3 for beta chain variable domain of TCR clone 364136 (TRBV19, TRBJ2-1)
CAGSMGGGSSYNEQFF

SEQ ID NO: 728273 - protein, 17 aa, Homo sapiens
  CDR3 for alpha chain variable domain of TCR clone 364137 (TRAV38-1, TRAJ28)
CAFMRPTSGAGSYQFTF

SEQ ID NO: 728274 - protein, 14 aa, Homo sapiens
  CDR3 for beta chain variable domain of TCR clone 364137 (TRBV18, TRBJ2-7)
CASSPRGGAYEQYF

SEQ ID NO: 728275 - protein, 19 aa, Homo sapiens
  CDR3 for alpha chain variable domain of TCR clone 364138 (TRAV26-1, TRAJ52)
CIFRAHRNAGGTSYGKLTF

SEQ ID NO: 728276 - protein, 15 aa, Homo sapiens
  CDR3 for beta chain variable domain of TCR clone 364138 (TRBV12-4, TRBJ2-5)
CASSPPTGLQETQYF

SEQ ID NO: 728277 - protein, 12 aa, Homo sapiens
  CDR3 for alpha chain variable domain of TCR clone 364139 (TRAV36/DV7, TRAJ54)
CAVVRGAQKLVF

SEQ ID NO: 728278 - protein, 18 aa, Homo sapiens
  CDR3 for beta chain variable domain of TCR clone 364139 (TRBV20-1, TRBJ2-3)
CSASGLAGGAGTTDTQYF

SEQ ID NO: 728279 - protein, 14 aa, Homo sapiens
  CDR3 for alpha chain variable domain of TCR clone 364140 (TRAV14/DV4, TRAJ57)
CAMSEEGGSEKLVF

SEQ ID NO: 728280 - protein, 13 aa, Homo sapiens
  CDR3 for beta chain variable domain of TCR clone 364140 (TRBV15, TRBJ1-6)
CATSGGLNSPLHF

SEQ ID NO: 728281 - protein, 13 aa, Homo sapiens
  CDR3 for alpha chain variable domain of TCR clone 364141 (TRAV13-1, TRAJ6)
CAASSGGSYIPTF

SEQ ID NO: 728282 - protein, 15 aa, Homo sapiens
  CDR3 for beta chain variable domain of TCR clone 364141 (TRBV12-4, TRBJ2-5)
CASSPSTGLQETQYF

SEQ ID NO: 728283 - protein, 14 aa, Homo sapiens
  CDR3 for alpha chain variable domain of TCR clone 364142 (TRAV17, TRAJ57)
CATAPQAGSEKLVF

SEQ ID NO: 728284 - protein, 18 aa, Homo sapiens
  CDR3 for beta chain variable domain of TCR clone 364142 (TRBV25-1, TRBJ2-1)
CASSESRAGGPGYNEQFF

SEQ ID NO: 728285 - protein, 14 aa, Homo sapiens
  CDR3 for alpha chain variable domain of TCR clone 364143 (TRAV26-1, TRAJ49)
CIVRPTNTGNQFYF

SEQ ID NO: 728286 - protein, 13 aa, Homo sapiens
  CDR3 for beta chain variable domain of TCR clone 364143 (TRBV10-1, TRBJ1-1)
CASQGQTNTEAFF

SEQ ID NO: 728287 - protein, 15 aa, Homo sapiens
  CDR3 for alpha chain variable domain of TCR clone 364144 (TRAV5, TRAJ33)
CAEAPAMDSNYQLIW

SEQ ID NO: 728288 - protein, 15 aa, Homo sapiens
  CDR3 for beta chain variable domain of TCR clone 364144 (TRBV7-9, TRBJ2-2)
CASSPETGAGGELFF

SEQ ID NO: 728289 - protein, 14 aa, Homo sapiens
  CDR3 for alpha chain variable domain of TCR clone 364145 (TRAV8-6, TRAJ57)
CAVSSKGGSEKLVF

SEQ ID NO: 728290 - protein, 15 aa, Homo sapiens
  CDR3 for beta chain variable domain of TCR clone 364145 (TRBV20-1, TRBJ2-5)
CSAPPRTGFGETQYF

SEQ ID NO: 728291 - protein, 13 aa, Homo sapiens
  CDR3 for alpha chain variable domain of TCR clone 364146 (TRAV13-1, TRAJ20)
YAARVSNDYKLIF

SEQ ID NO: 728292 - protein, 16 aa, Homo sapiens
  CDR3 for beta chain variable domain of TCR clone 364146 (TRBV11-1, TRBJ1-1)
CATNPRDRAFNTEAFF

SEQ ID NO: 728293 - protein, 13 aa, Homo sapiens
  CDR3 for alpha chain variable domain of TCR clone 364147 (TRAV35, TRAJ36)
CAGPRIGANNLFF

SEQ ID NO: 728294 - protein, 15 aa, Homo sapiens
  CDR3 for beta chain variable domain of TCR clone 364147 (TRBV20-1, TRBJ2-7)
CRARDRVSGMDEQYF

SEQ ID NO: 728295 - protein, 12 aa, Homo sapiens
  CDR3 for alpha chain variable domain of TCR clone 364148 (TRAV3, TRAJ21)
CGERTGLQQILL

SEQ ID NO: 728296 - protein, 13 aa, Homo sapiens
  CDR3 for beta chain variable domain of TCR clone 364148 (TRBV9, TRBJ2-1)
CASSPSGGNEQFF

SEQ ID NO: 728297 - protein, 17 aa, Homo sapiens
  CDR3 for alpha chain variable domain of TCR clone 364149 (TRAV8-6, TRAJ58)
CAVSSWVGETSGSRLTF

SEQ ID NO: 728298 - protein, 13 aa, Homo sapiens
  CDR3 for beta chain variable domain of TCR clone 364149 (TRBV6-5, TRBJ2-5)
CASSPQGGETQYF

SEQ ID NO: 728299 - protein, 14 aa, Homo sapiens
  CDR3 for alpha chain variable domain of TCR clone 364150 (TRAV2, TRAJ9)
CAVEDRSGGFKIIF

SEQ ID NO: 728300 - protein, 15 aa, Homo sapiens
  CDR3 for beta chain variable domain of TCR clone 364150 (TRBV28, TRBJ2-5)
CASSSGRVIQETQYF

SEQ ID NO: 728301 - protein, 13 aa, Homo sapiens
  CDR3 for alpha chain variable domain of TCR clone 364151 (TRAV12-1, TRAJ21)
CVVTLYNFNKFYF

SEQ ID NO: 728302 - protein, 20 aa, Homo sapiens
  CDR3 for beta chain variable domain of TCR clone 364151 (TRBV7-8, TRBJ2-1)
WASSLAHRRAGVRSYNEQFF

SEQ ID NO: 728303 - protein, 14 aa, Homo sapiens
  CDR3 for alpha chain variable domain of TCR clone 364152 (TRAV12-2, TRAJ40)
CAVKIPSGTYKYII

SEQ ID NO: 728304 - protein, 15 aa, Homo sapiens
  CDR3 for beta chain variable domain of TCR clone 364152 (TRBV2, TRBJ2-7)
CASSEGLARSYEQYF

SEQ ID NO: 728305 - protein, 12 aa, Homo sapiens
  CDR3 for alpha chain variable domain of TCR clone 364153 (TRAV13-2, TRAJ23)
CAERHRGGKLIF

SEQ ID NO: 728306 - protein, 19 aa, Homo sapiens
  CDR3 for beta chain variable domain of TCR clone 364153 (TRBV19, TRBJ2-5)
CASSIGQVTDCFLGETQYF

SEQ ID NO: 728307 - protein, 14 aa, Homo sapiens
  CDR3 for alpha chain variable domain of TCR clone 364154 (TRAV12-1, TRAJ42)
CVVIYGASQGNLIF

SEQ ID NO: 728308 - protein, 13 aa, Homo sapiens
  CDR3 for beta chain variable domain of TCR clone 364154 (TRBV18, TRBJ2-5)
CASSPPGKETQYF

SEQ ID NO: 728309 - protein, 19 aa, Homo sapiens
  CDR3 for alpha chain variable domain of TCR clone 364155 (TRAV26-1, TRAJ29)
CCVLLHRQSRGIRKHTLVF

SEQ ID NO: 728310 - protein, 18 aa, Homo sapiens
  CDR3 for beta chain variable domain of TCR clone 364155 (TRBV5-5, TRBJ1-5)
CASSLRQVKGSSNQPQHF

SEQ ID NO: 728311 - protein, 11 aa, Homo sapiens
  CDR3 for alpha chain variable domain of TCR clone 364156 (TRAV2, TRAJ13)
CASGGYQKVTF

SEQ ID NO: 728312 - protein, 14 aa, Homo sapiens
  CDR3 for beta chain variable domain of TCR clone 364156 (TRBV11-2, TRBJ1-2)
CASSLYRGNYGYTF

SEQ ID NO: 728313 - protein, 11 aa, Homo sapiens
  CDR3 for alpha chain variable domain of TCR clone 364157 (TRAV2, TRAJ13)
CASGGYQKVPF

SEQ ID NO: 728314 - protein, 13 aa, Homo sapiens
  CDR3 for beta chain variable domain of TCR clone 364157 (TRBV6-1, TRBJ1-1)
CASSRQGNTEAFF

SEQ ID NO: 728315 - protein, 17 aa, Homo sapiens
  CDR3 for alpha chain variable domain of TCR clone 364158 (TRAV26-1, TRAJ37)
CIVRVITVSSNTGKLIF

SEQ ID NO: 728316 - protein, 14 aa, Homo sapiens
  CDR3 for beta chain variable domain of TCR clone 364158 (TRBV18, TRBJ2-7)
CASSPRGGAYEQYF

SEQ ID NO: 728317 - protein, 12 aa, Homo sapiens
  CDR3 for alpha chain variable domain of TCR clone 364159 (TRAV6, TRAJ27)
CSRIRGAGKSTF

SEQ ID NO: 728318 - protein, 17 aa, Homo sapiens
  CDR3 for beta chain variable domain of TCR clone 364159 (TRBV7-3, TRBJ2-3)
CASSLMKRMRGADTQYF

SEQ ID NO: 728319 - protein, 14 aa, Homo sapiens
  CDR3 for alpha chain variable domain of TCR clone 364160 (TRAV1-2, TRAJ16)
CAVNRFSDGQKLLF

SEQ ID NO: 728320 - protein, 13 aa, Homo sapiens
  CDR3 for beta chain variable domain of TCR clone 364160 (TRBV10-3, TRBJ2-7)
CASKLAVNFEQYF

SEQ ID NO: 728321 - protein, 12 aa, Homo sapiens
  CDR3 for alpha chain variable domain of TCR clone 364161 (TRAV36/DV7, TRAJ54)
CAVVRGAQKLLF

SEQ ID NO: 728322 - protein, 18 aa, Homo sapiens
  CDR3 for beta chain variable domain of TCR clone 364161 (TRBV20-1, TRBJ2-3)
CSASGLAGGPGTTDTQYF

SEQ ID NO: 728323 - protein, 16 aa, Homo sapiens
  CDR3 for alpha chain variable domain of TCR clone 364162 (TRAV9-2, TRAJ18)
SALTSDRGSTLGRLYF

SEQ ID NO: 728324 - protein, 14 aa, Homo sapiens
  CDR3 for beta chain variable domain of TCR clone 364162 (TRBV29-1, TRBJ2-1)
CSVLGTGVWNEQFF

SEQ ID NO: 728325 - protein, 14 aa, Homo sapiens
  CDR3 for alpha chain variable domain of TCR clone 364163 (TRAV25, TRAJ45)
CAGNSGGGADGLTF

SEQ ID NO: 728326 - protein, 12 aa, Homo sapiens
  CDR3 for beta chain variable domain of TCR clone 364163 (TRBV11-2, TRBJ2-2)
CASSLGGGELFF

SEQ ID NO: 728327 - protein, 14 aa, Homo sapiens
  CDR3 for alpha chain variable domain of TCR clone 364164 (TRAV8-3, TRAJ4)
CAVGASGGYNKLIF

SEQ ID NO: 728328 - protein, 13 aa, Homo sapiens
  CDR3 for beta chain variable domain of TCR clone 364164 (TRBV27, TRBJ2-7)
CARGRGGAYEQYF

SEQ ID NO: 728329 - protein, 14 aa, Homo sapiens
  CDR3 for alpha chain variable domain of TCR clone 364165 (TRAV12-3, TRAJ30)
CAMSLLNRDDKIIF

SEQ ID NO: 728330 - protein, 12 aa, Homo sapiens
  CDR3 for beta chain variable domain of TCR clone 364165 (TRBV11-3, TRBJ2-2)
CASSLGGGELFF

SEQ ID NO: 728331 - protein, 13 aa, Homo sapiens
  CDR3 for alpha chain variable domain of TCR clone 364166 (TRAV2, TRAJ40)
CAVVTSGTYKYIF

SEQ ID NO: 728332 - protein, 14 aa, Homo sapiens
  CDR3 for beta chain variable domain of TCR clone 364166 (TRBV24-1, TRBJ1-5)
CATSDGQLGQPQHF

SEQ ID NO: 728333 - protein, 16 aa, Homo sapiens
  CDR3 for alpha chain variable domain of TCR clone 364167 (TRAV13-2, TRAJ28)
CAEKSYSGAGSYQLTV

SEQ ID NO: 728334 - protein, 16 aa, Homo sapiens
  CDR3 for beta chain variable domain of TCR clone 364167 (TRBV19, TRBJ2-1)
CASSKAGPSSYNEQFF

SEQ ID NO: 728335 - protein, 15 aa, Homo sapiens
  CDR3 for alpha chain variable domain of TCR clone 364168 (TRAV38-2/DV8, TRAJ26)
CAYRTRDNYGQNFVF

SEQ ID NO: 728336 - protein, 14 aa, Homo sapiens
  CDR3 for beta chain variable domain of TCR clone 364168 (TRBV29-1, TRBJ1-3)
CSVADRVVGNTIYF

SEQ ID NO: 728337 - protein, 14 aa, Homo sapiens
  CDR3 for alpha chain variable domain of TCR clone 364169 (TRAV14/DV4, TRAJ23)
CAMRYYNQGGKLIF

SEQ ID NO: 728338 - protein, 17 aa, Homo sapiens
  CDR3 for beta chain variable domain of TCR clone 364169 (TRBV7-2, TRBJ2-2)
CASSPGGAGEGTGELFL

SEQ ID NO: 728339 - protein, 14 aa, Homo sapiens
  CDR3 for alpha chain variable domain of TCR clone 364170 (TRAV17, TRAJ57)
CATDAAGGSEKLVF

SEQ ID NO: 728340 - protein, 14 aa, Homo sapiens
  CDR3 for beta chain variable domain of TCR clone 364170 (TRBV4-2, TRBJ2-1)
CASGLDRAYNEQFF

SEQ ID NO: 728341 - protein, 16 aa, Homo sapiens
  CDR3 for alpha chain variable domain of TCR clone 364171 (TRAV3, TRAJ3)
CAVRDRAKSSASKIIV

SEQ ID NO: 728342 - protein, 13 aa, Homo sapiens
  CDR3 for beta chain variable domain of TCR clone 364171 (TRBV10-3, TRBJ2-7)
CASKLAVNYEQYF

SEQ ID NO: 728343 - protein, 21 aa, Homo sapiens
  CDR3 for alpha chain variable domain of TCR clone 364172 (TRAV2, TRAJ27)
ILQVREADAAVYSANAGKSTF

SEQ ID NO: 728344 - protein, 15 aa, Homo sapiens
  CDR3 for beta chain variable domain of TCR clone 364172 (TRBV7-7, TRBJ1-3)
CASSQGEHSGNTIYC

SEQ ID NO: 728345 - protein, 13 aa, Homo sapiens
  CDR3 for alpha chain variable domain of TCR clone 364173 (TRAV29/DV5, TRAJ31)
CAASRNNNARLMF

SEQ ID NO: 728346 - protein, 15 aa, Homo sapiens
  CDR3 for beta chain variable domain of TCR clone 364173 (TRBV20-1, TRBJ1-4)
CGARREWGVNEKLFF

SEQ ID NO: 728347 - protein, 14 aa, Homo sapiens
  CDR3 for alpha chain variable domain of TCR clone 364174 (TRAV4, TRAJ26)
CLVGPHNYGQNFVF

SEQ ID NO: 728348 - protein, 17 aa, Homo sapiens
  CDR3 for beta chain variable domain of TCR clone 364174 (TRBV20-1, TRBJ2-1)
CSGSSSGLAGSYNEQFF

SEQ ID NO: 728349 - protein, 14 aa, Homo sapiens
  CDR3 for alpha chain variable domain of TCR clone 364175 (TRAV26-1, TRAJ38)
CIVVGAGNNRKLIW

SEQ ID NO: 728350 - protein, 12 aa, Homo sapiens
  CDR3 for beta chain variable domain of TCR clone 364175 (TRBV5-1, TRBJ2-5)
CASSWNQETQYF

SEQ ID NO: 728351 - protein, 14 aa, Homo sapiens
  CDR3 for alpha chain variable domain of TCR clone 364176 (TRAV1-2, TRAJ33)
CAVRAPDSNYQLIW

SEQ ID NO: 728352 - protein, 12 aa, Homo sapiens
  CDR3 for beta chain variable domain of TCR clone 364176 (TRBV14, TRBJ2-7)
CASSSLKGEQYF

SEQ ID NO: 728353 - protein, 14 aa, Homo sapiens
  CDR3 for alpha chain variable domain of TCR clone 364177 (TRAV13-1, TRAJ35)
CTASKGGFGNVLHC

SEQ ID NO: 728354 - protein, 16 aa, Homo sapiens
  CDR3 for beta chain variable domain of TCR clone 364177 (TRBV2, TRBJ1-4)
CASNLLQGATNEKLFF

SEQ ID NO: 728355 - protein, 13 aa, Homo sapiens
  CDR3 for alpha chain variable domain of TCR clone 364178 (TRAV1-1, TRAJ9)
CAAKNTGGFKTIF

SEQ ID NO: 728356 - protein, 12 aa, Homo sapiens
  CDR3 for beta chain variable domain of TCR clone 364178 (TRBV11-2, TRBJ2-5)
CASSPPAETQYF

SEQ ID NO: 728357 - protein, 12 aa, Homo sapiens
  CDR3 for alpha chain variable domain of TCR clone 364179 (TRAV12-3, TRAJ17)
CAMTLTGNKLTF

SEQ ID NO: 728358 - protein, 15 aa, Homo sapiens
  CDR3 for beta chain variable domain of TCR clone 364179 (TRBV20-1, TRBJ2-4)
CSVTTGLLAKNIQYF

SEQ ID NO: 728359 - protein, 16 aa, Homo sapiens
  CDR3 for alpha chain variable domain of TCR clone 364180 (TRAV4, TRAJ22)
CPVGDLYSGSARQLTF

SEQ ID NO: 728360 - protein, 16 aa, Homo sapiens
  CDR3 for beta chain variable domain of TCR clone 364180 (TRBV7-9, TRBJ2-3)
CASSPWREVGTDTQYF

SEQ ID NO: 728361 - protein, 12 aa, Homo sapiens
  CDR3 for alpha chain variable domain of TCR clone 364181 (TRAV13-1, TRAJ21)
CAAKDGFNKFYF

SEQ ID NO: 728362 - protein, 15 aa, Homo sapiens
  CDR3 for beta chain variable domain of TCR clone 364181 (TRBV25-1, TRBJ1-4)
CASSPGDSTNDKLFF

SEQ ID NO: 728363 - protein, 13 aa, Homo sapiens
  CDR3 for alpha chain variable domain of TCR clone 364182 (TRAV30, TRAJ6)
CGTEAGGSYIPTF

SEQ ID NO: 728364 - protein, 17 aa, Homo sapiens
  CDR3 for beta chain variable domain of TCR clone 364182 (TRBV7-8, TRBJ2-6)
CASSAGTGGAGANVLTF

SEQ ID NO: 728365 - protein, 14 aa, Homo sapiens
  CDR3 for alpha chain variable domain of TCR clone 364183 (TRAV13-1, TRAJ44)
CAAKATGTASKLTF

SEQ ID NO: 728366 - protein, 15 aa, Homo sapiens
  CDR3 for beta chain variable domain of TCR clone 364183 (TRBV19, TRBJ2-1)
YASIKGRGPYNEQFF

SEQ ID NO: 728367 - protein, 12 aa, Homo sapiens
  CDR3 for alpha chain variable domain of TCR clone 364184 (TRAV12-3, TRAJ17)
CAMTLTGTKLTF

SEQ ID NO: 728368 - protein, 14 aa, Homo sapiens
  CDR3 for beta chain variable domain of TCR clone 364184 (TRBV20-1, TRBJ2-1)
CSAQIGGSANEQFF

SEQ ID NO: 728369 - protein, 12 aa, Homo sapiens
  CDR3 for alpha chain variable domain of TCR clone 364185 (TRAV8-3, TRAJ43)
CAVGAGNNDMRF

SEQ ID NO: 728370 - protein, 16 aa, Homo sapiens
  CDR3 for beta chain variable domain of TCR clone 364185 (TRBV20-1, TRBJ1-4)
CSAPGQGLLTNEKLFF

SEQ ID NO: 728371 - protein, 15 aa, Homo sapiens
  CDR3 for alpha chain variable domain of TCR clone 364186 (TRAV29/DV5, TRAJ53)
CAVPSSGGSNYKLTF

SEQ ID NO: 728372 - protein, 14 aa, Homo sapiens
  CDR3 for beta chain variable domain of TCR clone 364186 (TRBV12-5, TRBJ2-5)
CASGSRTHQETQYF

SEQ ID NO: 728373 - protein, 11 aa, Homo sapiens
  CDR3 for alpha chain variable domain of TCR clone 364187 (TRAV12-3, TRAJ41)
CAMNAREALNF

SEQ ID NO: 728374 - protein, 16 aa, Homo sapiens
  CDR3 for beta chain variable domain of TCR clone 364187 (TRBV7-8, TRBJ2-3)
CASSTEGQRETDMQYF

SEQ ID NO: 728375 - protein, 16 aa, Homo sapiens
  CDR3 for alpha chain variable domain of TCR clone 364188 (TRAV16, TRAJ57)
CAPYLITQGGSEKLVF

SEQ ID NO: 728376 - protein, 14 aa, Homo sapiens
  CDR3 for beta chain variable domain of TCR clone 364188 (TRBV5-1, TRBJ2-7)
CASSRGESLYEQYF

SEQ ID NO: 728377 - protein, 15 aa, Homo sapiens
  CDR3 for alpha chain variable domain of TCR clone 364189 (TRAV21, TRAJ53)
CAPLNSGGSNYKLTF

SEQ ID NO: 728378 - protein, 13 aa, Homo sapiens
  CDR3 for beta chain variable domain of TCR clone 364189 (TRBV7-7, TRBJ1-1)
CASSLGANTEAFF

SEQ ID NO: 728379 - protein, 16 aa, Homo sapiens
  CDR3 for alpha chain variable domain of TCR clone 364190 (TRAV16, TRAJ18)
CAVRDGRGSTLGRLYF

SEQ ID NO: 728380 - protein, 15 aa, Homo sapiens
  CDR3 for beta chain variable domain of TCR clone 364190 (TRBV7-9, TRBJ1-6)
CASSSPGRGKSPLHF

SEQ ID NO: 728381 - protein, 18 aa, Homo sapiens
  CDR3 for alpha chain variable domain of TCR clone 364191 (TRAV12-1, TRAJ52)
YVVKLINAGGTSYGKLTF

SEQ ID NO: 728382 - protein, 16 aa, Homo sapiens
  CDR3 for beta chain variable domain of TCR clone 364191 (TRBV7-6, TRBJ2-7)
CASSGGTGALSYEQYF

SEQ ID NO: 728383 - protein, 11 aa, Homo sapiens
  CDR3 for alpha chain variable domain of TCR clone 364192 (TRAV21, TRAJ11)
CAVNGYSTLTF

SEQ ID NO: 728384 - protein, 14 aa, Homo sapiens
  CDR3 for beta chain variable domain of TCR clone 364192 (TRBV19, TRBJ2-7)
CASSSDRVGREQYF

SEQ ID NO: 728385 - protein, 15 aa, Homo sapiens
  CDR3 for alpha chain variable domain of TCR clone 364193 (TRAV26-1, TRAJ40)
CIVRVTTSGTYKYIF

SEQ ID NO: 728386 - protein, 12 aa, Homo sapiens
  CDR3 for beta chain variable domain of TCR clone 364193 (TRBV7-9, TRBJ1-4)
CAISTDREKLFF

SEQ ID NO: 728387 - protein, 15 aa, Homo sapiens
  CDR3 for alpha chain variable domain of TCR clone 364194 (TRAV2, TRAJ22)
CAVPSRGGSARQLTF

SEQ ID NO: 728388 - protein, 14 aa, Homo sapiens
  CDR3 for beta chain variable domain of TCR clone 364194 (TRBV7-6, TRBJ2-3)
CASSLGTVTDTQYF

SEQ ID NO: 728389 - protein, 12 aa, Homo sapiens
  CDR3 for alpha chain variable domain of TCR clone 364195 (TRAV23/DV6, TRAJ17)
CAAKAAGNKLTF

SEQ ID NO: 728390 - protein, 13 aa, Homo sapiens
  CDR3 for beta chain variable domain of TCR clone 364195 (TRBV12-4, TRBJ1-1)
CASSPGTGFEAFF

SEQ ID NO: 728391 - protein, 10 aa, Homo sapiens
  CDR3 for alpha chain variable domain of TCR clone 364196 (TRAV3, TRAJ30)
CAVRGIEIIF

SEQ ID NO: 728392 - protein, 14 aa, Homo sapiens
  CDR3 for beta chain variable domain of TCR clone 364196 (TRBV15, TRBJ2-3)
CATRSGTSTDTQYF

SEQ ID NO: 728393 - protein, 15 aa, Homo sapiens
  CDR3 for alpha chain variable domain of TCR clone 364197 (TRAV26-1, TRAJ56)
CIVRVATGANSKLTF

SEQ ID NO: 728394 - protein, 15 aa, Homo sapiens
  CDR3 for beta chain variable domain of TCR clone 364197 (TRBV28, TRBJ2-3)
CASSQELGGTDTQYF

SEQ ID NO: 728395 - protein, 12 aa, Homo sapiens
  CDR3 for alpha chain variable domain of TCR clone 364198 (TRAV12-3, TRAJ17)
CAMTLTGNKLTI

SEQ ID NO: 728396 - protein, 15 aa, Homo sapiens
  CDR3 for beta chain variable domain of TCR clone 364198 (TRBV20-1, TRBJ2-7)
CSASDRVSGMDEQYF

SEQ ID NO: 728397 - protein, 16 aa, Homo sapiens
  CDR3 for alpha chain variable domain of TCR clone 364199 (TRAV3, TRAJ10)
CAVRDMRAGGGNKLTF

SEQ ID NO: 728398 - protein, 14 aa, Homo sapiens
  CDR3 for beta chain variable domain of TCR clone 364199 (TRBV25-1, TRBJ1-1)
CAITHLGGNTEAFF

SEQ ID NO: 728399 - protein, 15 aa, Homo sapiens
  CDR3 for alpha chain variable domain of TCR clone 364200 (TRAV4, TRAJ10)
CLVGDEEGGGNKLTF

SEQ ID NO: 728400 - protein, 12 aa, Homo sapiens
  CDR3 for beta chain variable domain of TCR clone 364200 (TRBV11-2, TRBJ2-1)
CASSPGNNEQFF

SEQ ID NO: 728401 - protein, 14 aa, Homo sapiens
  CDR3 for alpha chain variable domain of TCR clone 364201 (TRAV23/DV6, TRAJ17)
CAARGRAAGNKLTF

SEQ ID NO: 728402 - protein, 12 aa, Homo sapiens
  CDR3 for beta chain variable domain of TCR clone 364201 (TRBV7-9, TRBJ1-4)
CASSTDREKLFF

SEQ ID NO: 728403 - protein, 14 aa, Homo sapiens
  CDR3 for alpha chain variable domain of TCR clone 364202 (TRAV12-3, TRAJ10)
SHLPLTGGGNKLTF

SEQ ID NO: 728404 - protein, 15 aa, Homo sapiens
  CDR3 for beta chain variable domain of TCR clone 364202 (TRBV29-1, TRBJ2-7)
CSVVFFDRGSYEQYF

SEQ ID NO: 728405 - protein, 13 aa, Homo sapiens
  CDR3 for alpha chain variable domain of TCR clone 364203 (TRAV4, TRAJ31)
CLVYRNNNARLMF

SEQ ID NO: 728406 - protein, 15 aa, Homo sapiens
  CDR3 for beta chain variable domain of TCR clone 364203 (TRBV3-1, TRBJ2-5)
CASSANLGGPETQYF

SEQ ID NO: 728407 - protein, 14 aa, Homo sapiens
  CDR3 for alpha chain variable domain of TCR clone 364204 (TRAV13-2, TRAJ11)
CAETGNSGYSTLTF

SEQ ID NO: 728408 - protein, 19 aa, Homo sapiens
  CDR3 for beta chain variable domain of TCR clone 364204 (TRBV6-1, TRBJ2-5)
CASSEQGLAGGLYQETQYL

SEQ ID NO: 728409 - protein, 14 aa, Homo sapiens
  CDR3 for alpha chain variable domain of TCR clone 364205 (TRAV12-3, TRAJ10)
RYLPLTGGGHTLTF

SEQ ID NO: 728410 - protein, 14 aa, Homo sapiens
  CDR3 for beta chain variable domain of TCR clone 364205 (TRBV6-1, TRBJ1-3)
CASVQGGGGNTIYF

SEQ ID NO: 728411 - protein, 16 aa, Homo sapiens
  CDR3 for alpha chain variable domain of TCR clone 364206 (TRAV26-1, TRAJ53)
CIVRVAMGGSYYKLTF

SEQ ID NO: 728412 - protein, 12 aa, Homo sapiens
  CDR3 for beta chain variable domain of TCR clone 364206 (TRBV7-9, TRBJ1-5)
CASSPQGQPQHF

SEQ ID NO: 728413 - protein, 17 aa, Homo sapiens
  CDR3 for alpha chain variable domain of TCR clone 364207 (TRAV26-1, TRAJ37)
CIVRVITVSSNTGKLIF

SEQ ID NO: 728414 - protein, 11 aa, Homo sapiens
  CDR3 for beta chain variable domain of TCR clone 364207 (TRBV29-1, TRBJ2-5)
CSEDRTGTQCF

SEQ ID NO: 728415 - protein, 14 aa, Homo sapiens
  CDR3 for alpha chain variable domain of TCR clone 364208 (TRAV9-2, TRAJ39)
CALYIYNAGNMLTF

SEQ ID NO: 728416 - protein, 14 aa, Homo sapiens
  CDR3 for beta chain variable domain of TCR clone 364208 (TRBV25-1, TRBJ1-1)
CASTPLGGNTEAFF

SEQ ID NO: 728417 - protein, 13 aa, Homo sapiens
  CDR3 for alpha chain variable domain of TCR clone 364209 (TRAV12-3, TRAJ43)
CAMSVNSNYQLIW

SEQ ID NO: 728418 - protein, 15 aa, Homo sapiens
  CDR3 for beta chain variable domain of TCR clone 364209 (TRBV11-3, TRBJ2-7)
CASSPGPASSYEQYF

SEQ ID NO: 728419 - protein, 12 aa, Homo sapiens
  CDR3 for alpha chain variable domain of TCR clone 364210 (TRAV23/DV6, TRAJ37)
CAASINTGKLIF

SEQ ID NO: 728420 - protein, 11 aa, Homo sapiens
  CDR3 for beta chain variable domain of TCR clone 364210 (TRBV29-1, TRBJ2-5)
CSEDRTGTQYF

SEQ ID NO: 728421 - protein, 10 aa, Homo sapiens
  CDR3 for alpha chain variable domain of TCR clone 364211 (TRAV12-2, TRAJ43)
CAVKVLSMRF

SEQ ID NO: 728422 - protein, 17 aa, Homo sapiens
  CDR3 for beta chain variable domain of TCR clone 364211 (TRBV4-1, TRBJ1-4)
CASSQEGPRGVEEKLFF

SEQ ID NO: 728423 - protein, 13 aa, Homo sapiens
  CDR3 for alpha chain variable domain of TCR clone 364212 (TRAV13-2, TRAJ48)
YAEMDFGNEKLTF

SEQ ID NO: 728424 - protein, 14 aa, Homo sapiens
  CDR3 for beta chain variable domain of TCR clone 364212 (TRBV19, TRBJ2-7)
CASSMGQGAIEQYF

SEQ ID NO: 728425 - protein, 11 aa, Homo sapiens
  CDR3 for alpha chain variable domain of TCR clone 364213 (TRAV12-3, TRAJ43)
CAMSVSNDMRF

SEQ ID NO: 728426 - protein, 16 aa, Homo sapiens
  CDR3 for beta chain variable domain of TCR clone 364213 (TRBV19, TRBJ2-1)
CASSKAGPSAYNEQFF

SEQ ID NO: 728427 - protein, 17 aa, Homo sapiens
  CDR3 for alpha chain variable domain of TCR clone 364214 (TRAV3, TRAJ6)
CAVRDGPRAGGSYITTF

SEQ ID NO: 728428 - protein, 17 aa, Homo sapiens
  CDR3 for beta chain variable domain of TCR clone 364214 (TRBV20-1, TRBJ2-1)
CSASSSGLAGSYNEQFF

SEQ ID NO: 728429 - protein, 12 aa, Homo sapiens
  CDR3 for alpha chain variable domain of TCR clone 364215 (TRAV8-3, TRAJ26)
CAGDNYGQNFVF

SEQ ID NO: 728430 - protein, 14 aa, Homo sapiens
  CDR3 for beta chain variable domain of TCR clone 364215 (TRBV3-1, TRBJ2-5)
CASSQGPDQETQYF

SEQ ID NO: 728431 - protein, 13 aa, Homo sapiens
  CDR3 for alpha chain variable domain of TCR clone 364216 (TRAV12-2, TRAJ5)
CREQVTGGRALTF

SEQ ID NO: 728432 - protein, 12 aa, Homo sapiens
  CDR3 for beta chain variable domain of TCR clone 364216 (TRBV19, TRBJ1-5)
CASSIAQQPQHF

SEQ ID NO: 728433 - protein, 16 aa, Homo sapiens
  CDR3 for alpha chain variable domain of TCR clone 364217 (TRAV3, TRAJ10)
CAVRDMRAGGGNKLTY

SEQ ID NO: 728434 - protein, 13 aa, Homo sapiens
  CDR3 for beta chain variable domain of TCR clone 364217 (TRBV6-1, TRBJ1-1)
CASSRQGNTEAFF

SEQ ID NO: 728435 - protein, 15 aa, Homo sapiens
  CDR3 for alpha chain variable domain of TCR clone 364218 (TRAV17, TRAJ57)
CATGPSQGGSEKLVF

SEQ ID NO: 728436 - protein, 12 aa, Homo sapiens
  CDR3 for beta chain variable domain of TCR clone 364218 (TRBV20-1, TRBJ2-7)
CSAGLKMGEQYF

SEQ ID NO: 728437 - protein, 12 aa, Homo sapiens
  CDR3 for alpha chain variable domain of TCR clone 364219 (TRAV12-2, TRAJ10)
WGVTGGGNKLTF

SEQ ID NO: 728438 - protein, 14 aa, Homo sapiens
  CDR3 for beta chain variable domain of TCR clone 364219 (TRBV27, TRBJ2-7)
CSSATGTERREQYF

SEQ ID NO: 728439 - protein, 15 aa, Homo sapiens
  CDR3 for alpha chain variable domain of TCR clone 364220 (TRAV17, TRAJ57)
CATGPSQGGSEKLVF

SEQ ID NO: 728440 - protein, 16 aa, Homo sapiens
  CDR3 for beta chain variable domain of TCR clone 364220 (TRBV20-1, TRBJ2-1)
CSARDFSGRIGDEQFF

SEQ ID NO: 728441 - protein, 17 aa, Homo sapiens
  CDR3 for alpha chain variable domain of TCR clone 364221 (TRAV13-1, TRAJ31)
CAPRDRLMFGDGTQLGV

SEQ ID NO: 728442 - protein, 15 aa, Homo sapiens
  CDR3 for beta chain variable domain of TCR clone 364221 (TRBV12-4, TRBJ1-1)
CASSLAVSRGAEAFF

SEQ ID NO: 728443 - protein, 11 aa, Homo sapiens
  CDR3 for alpha chain variable domain of TCR clone 364222 (TRAV3, TRAJ21)
CAVGNFNKFYF

SEQ ID NO: 728444 - protein, 15 aa, Homo sapiens
  CDR3 for beta chain variable domain of TCR clone 364222 (TRBV7-7, TRBJ2-5)
CASSQLERAEETQYF

SEQ ID NO: 728445 - protein, 15 aa, Homo sapiens
  CDR3 for alpha chain variable domain of TCR clone 364223 (TRAV12-3, TRAJ6)
CAMSATTGGSYIPTF

SEQ ID NO: 728446 - protein, 14 aa, Homo sapiens
  CDR3 for beta chain variable domain of TCR clone 364223 (TRBV6-1, TRBJ1-3)
CATVQGGGGNTIYF

SEQ ID NO: 728447 - protein, 12 aa, Homo sapiens
  CDR3 for alpha chain variable domain of TCR clone 364224 (TRAV13-2, TRAJ23)
CAERHRGGKLIF

SEQ ID NO: 728448 - protein, 16 aa, Homo sapiens
  CDR3 for beta chain variable domain of TCR clone 364224 (TRBV2, TRBJ2-3)
CASSTLVEGVTDTQYF

SEQ ID NO: 728449 - protein, 12 aa, Homo sapiens
  CDR3 for alpha chain variable domain of TCR clone 364225 (TRAV2, TRAJ10)
CASTGGGNKLTF

SEQ ID NO: 728450 - protein, 17 aa, Homo sapiens
  CDR3 for beta chain variable domain of TCR clone 364225 (TRBV7-2, TRBJ2-3)
CASSSYSGTRRADTQYF

SEQ ID NO: 728451 - protein, 14 aa, Homo sapiens
  CDR3 for alpha chain variable domain of TCR clone 364226 (TRAV1-2, TRAJ8)
CAVREDTGFQKLVY

SEQ ID NO: 728452 - protein, 11 aa, Homo sapiens
  CDR3 for beta chain variable domain of TCR clone 364226 (TRBV20-1, TRBJ2-5)
CSADRAETQYF

SEQ ID NO: 728453 - protein, 10 aa, Homo sapiens
  CDR3 for alpha chain variable domain of TCR clone 364227 (TRAV8-4, TRAJ43)
CAVSADDQRF

SEQ ID NO: 728454 - protein, 15 aa, Homo sapiens
  CDR3 for beta chain variable domain of TCR clone 364227 (TRBV5-1, TRBJ2-3)
CASSVTSGSTDTQYF

SEQ ID NO: 728455 - protein, 21 aa, Homo sapiens
  CDR3 for alpha chain variable domain of TCR clone 364228 (TRAV12-1, TRAJ32)
SSVIQPPTSMNSGGATNKLIF

SEQ ID NO: 728456 - protein, 15 aa, Homo sapiens
  CDR3 for beta chain variable domain of TCR clone 364228 (TRBV7-9, TRBJ2-2)
CASGPLDTFPGELFF

SEQ ID NO: 728457 - protein, 14 aa, Homo sapiens
  CDR3 for alpha chain variable domain of TCR clone 364229 (TRAV12-1, TRAJ26)
SVVKGSNYGQNFVF

SEQ ID NO: 728458 - protein, 15 aa, Homo sapiens
  CDR3 for beta chain variable domain of TCR clone 364229 (TRBV10-2, TRBJ2-6)
CASSEQGTGANVLTF

SEQ ID NO: 728459 - protein, 20 aa, Homo sapiens
  CDR3 for alpha chain variable domain of TCR clone 364230 (TRAV25, TRAJ21)
TATQTTDVGTYPLSFNKFYF

SEQ ID NO: 728460 - protein, 14 aa, Homo sapiens
  CDR3 for beta chain variable domain of TCR clone 364230 (TRBV6-1, TRBJ2-1)
CASAKDGYYNEQFF

SEQ ID NO: 728461 - protein, 15 aa, Homo sapiens
  CDR3 for alpha chain variable domain of TCR clone 364231 (TRAV1-2, TRAJ15)
CAVDVMGSAGTALIF

SEQ ID NO: 728462 - protein, 12 aa, Homo sapiens
  CDR3 for beta chain variable domain of TCR clone 364231 (TRBV12-4, TRBJ2-7)
CASSLGGYEQYF

SEQ ID NO: 728463 - protein, 16 aa, Homo sapiens
  CDR3 for alpha chain variable domain of TCR clone 364232 (TRAV12-1, TRAJ42)
CVVTPYYGGSQGDLIF

SEQ ID NO: 728464 - protein, 13 aa, Homo sapiens
  CDR3 for beta chain variable domain of TCR clone 364232 (TRBV7-6, TRBJ2-3)
CASSLGSDNTQYF

SEQ ID NO: 728465 - protein, 12 aa, Homo sapiens
  CDR3 for alpha chain variable domain of TCR clone 364233 (TRAV8-4, TRAJ37)
CAVRSNTGKLIF

SEQ ID NO: 728466 - protein, 16 aa, Homo sapiens
  CDR3 for beta chain variable domain of TCR clone 364233 (TRBV7-2, TRBJ2-3)
CDSSLVGDASTDTQYF

SEQ ID NO: 728467 - protein, 12 aa, Homo sapiens
  CDR3 for alpha chain variable domain of TCR clone 364234 (TRAV21, TRAJ37)
CAVRGNTGKLIF

SEQ ID NO: 728468 - protein, 14 aa, Homo sapiens
  CDR3 for beta chain variable domain of TCR clone 364234 (TRBV19, TRBJ2-1)
CASEGTGARNEQFC

SEQ ID NO: 728469 - protein, 14 aa, Homo sapiens
  CDR3 for alpha chain variable domain of TCR clone 364235 (TRAV21, TRAJ38)
CAVANVGNTRKLIW

SEQ ID NO: 728470 - protein, 16 aa, Homo sapiens
  CDR3 for beta chain variable domain of TCR clone 364235 (TRBV5-4, TRBJ2-1)
CASSLALAGAYNEQFF

SEQ ID NO: 728471 - protein, 15 aa, Homo sapiens
  CDR3 for alpha chain variable domain of TCR clone 364236 (TRAV26-1, TRAJ39)
CIVRVVGDAGNMLTF

SEQ ID NO: 728472 - protein, 12 aa, Homo sapiens
  CDR3 for beta chain variable domain of TCR clone 364236 (TRBV7-9, TRBJ2-7)
CASSIKREEQYF

SEQ ID NO: 728473 - protein, 14 aa, Homo sapiens
  CDR3 for alpha chain variable domain of TCR clone 364237 (TRAV1-2, TRAJ16)
CAVNRFSDGQKLLF

SEQ ID NO: 728474 - protein, 16 aa, Homo sapiens
  CDR3 for beta chain variable domain of TCR clone 364237 (TRBV12-5, TRBJ2-5)
CASGPRTSGNLETQYF

SEQ ID NO: 728475 - protein, 12 aa, Homo sapiens
  CDR3 for alpha chain variable domain of TCR clone 364238 (TRAV12-3, TRAJ17)
CAMTLTGNKLTF

SEQ ID NO: 728476 - protein, 14 aa, Homo sapiens
  CDR3 for beta chain variable domain of TCR clone 364238 (TRBV4-1, TRBJ2-7)
CASSLDREHVEQYF

SEQ ID NO: 728477 - protein, 14 aa, Homo sapiens
  CDR3 for alpha chain variable domain of TCR clone 364239 (TRAV13-1, TRAJ3)
CAAEGYSSASKIIF

SEQ ID NO: 728478 - protein, 14 aa, Homo sapiens
  CDR3 for beta chain variable domain of TCR clone 364239 (TRBV19, TRBJ2-5)
CASSSSGIQETRYF

SEQ ID NO: 728479 - protein, 15 aa, Homo sapiens
  CDR3 for alpha chain variable domain of TCR clone 364240 (TRAV21, TRAJ40)
CAVRPQTSGTYKYIF

SEQ ID NO: 728480 - protein, 13 aa, Homo sapiens
  CDR3 for beta chain variable domain of TCR clone 364240 (TRBV7-2, TRBJ2-2)
CASSSVRAAELFF

SEQ ID NO: 728481 - protein, 11 aa, Homo sapiens
  CDR3 for alpha chain variable domain of TCR clone 364241 (TRAV1-1, TRAJ23)
CAVRQGGKLIF

SEQ ID NO: 728482 - protein, 16 aa, Homo sapiens
  CDR3 for beta chain variable domain of TCR clone 364241 (TRBV11-3, TRBJ2-3)
CASSSGSGGGTDTQYF

SEQ ID NO: 728483 - protein, 15 aa, Homo sapiens
  CDR3 for alpha chain variable domain of TCR clone 364242 (TRAV20, TRAJ16)
CAVQIRFSDGQKLLF

SEQ ID NO: 728484 - protein, 16 aa, Homo sapiens
  CDR3 for beta chain variable domain of TCR clone 364242 (TRBV7-9, TRBJ1-2)
CASSLGFSSGEDGYTF

SEQ ID NO: 728485 - protein, 12 aa, Homo sapiens
  CDR3 for alpha chain variable domain of TCR clone 364243 (TRAV13-1, TRAJ11)
CAGPSGYSTLTF

SEQ ID NO: 728486 - protein, 14 aa, Homo sapiens
  CDR3 for beta chain variable domain of TCR clone 364243 (TRBV18, TRBJ2-7)
CASSPRGGAYEQYF

SEQ ID NO: 728487 - protein, 16 aa, Homo sapiens
  CDR3 for alpha chain variable domain of TCR clone 364244 (TRAV8-3, TRAJ42)
CAVGEGNGGSQGNLIF

SEQ ID NO: 728488 - protein, 14 aa, Homo sapiens
  CDR3 for beta chain variable domain of TCR clone 364244 (TRBV7-2, TRBJ2-1)
CASSSGGARNEQFF

SEQ ID NO: 728489 - protein, 15 aa, Homo sapiens
  CDR3 for alpha chain variable domain of TCR clone 364245 (TRAV17, TRAJ57)
CATGPSQGGSEKLVF

SEQ ID NO: 728490 - protein, 16 aa, Homo sapiens
  CDR3 for beta chain variable domain of TCR clone 364245 (TRBV18, TRBJ1-1)
CASSPGVGGRGGEAFF

SEQ ID NO: 728491 - protein, 13 aa, Homo sapiens
  CDR3 for alpha chain variable domain of TCR clone 364246 (TRAV17, TRAJ5)
CAPMDTGRRALTF

SEQ ID NO: 728492 - protein, 11 aa, Homo sapiens
  CDR3 for beta chain variable domain of TCR clone 364246 (TRBV19, TRBJ1-1)
CASSIGREAFF

SEQ ID NO: 728493 - protein, 18 aa, Homo sapiens
  CDR3 for alpha chain variable domain of TCR clone 364247 (TRAV21, TRAJ52)
CAVRPSPAGGTSYGKLTF

SEQ ID NO: 728494 - protein, 19 aa, Homo sapiens
  CDR3 for beta chain variable domain of TCR clone 364247 (TRBV7-9, TRBJ2-7)
CASSSSGLAVYAVLRAGHQ

SEQ ID NO: 728495 - protein, 14 aa, Homo sapiens
  CDR3 for alpha chain variable domain of TCR clone 364248 (TRAV12-2, TRAJ13)
CAVKKTGGYQTVTF

SEQ ID NO: 728496 - protein, 13 aa, Homo sapiens
  CDR3 for beta chain variable domain of TCR clone 364248 (TRBV10-3, TRBJ2-7)
CASKLAVNYEQYF

SEQ ID NO: 728497 - protein, 16 aa, Homo sapiens
  CDR3 for alpha chain variable domain of TCR clone 364249 (TRAV21, TRAJ52)
CAVTNAGGTSYGKLTF

SEQ ID NO: 728498 - protein, 13 aa, Homo sapiens
  CDR3 for beta chain variable domain of TCR clone 364249 (TRBV7-2, TRBJ2-7)
CASSSPSGSEQYF

SEQ ID NO: 728499 - protein, 14 aa, Homo sapiens
  CDR3 for alpha chain variable domain of TCR clone 364250 (TRAV12-2, TRAJ13)
CAVKKTGGYQKVTF

SEQ ID NO: 728500 - protein, 15 aa, Homo sapiens
  CDR3 for beta chain variable domain of TCR clone 364250 (TRBV27, TRBJ2-1)
CAIINGGGSSNEQFF

SEQ ID NO: 728501 - protein, 15 aa, Homo sapiens
  CDR3 for alpha chain variable domain of TCR clone 364251 (TRAV21, TRAJ53)
CATLNRGGSNYKLTF

SEQ ID NO: 728502 - protein, 16 aa, Homo sapiens
  CDR3 for beta chain variable domain of TCR clone 364251 (TRBV29-1, TRBJ1-2)
CSVEANRDIANYGYTF

SEQ ID NO: 728503 - protein, 13 aa, Homo sapiens
  CDR3 for alpha chain variable domain of TCR clone 364252 (TRAV13-1, TRAJ5)
CAASDTGRRAITF

SEQ ID NO: 728504 - protein, 14 aa, Homo sapiens
  CDR3 for beta chain variable domain of TCR clone 364252 (TRBV4-2, TRBJ2-1)
CASGLDRAYNEQFF

SEQ ID NO: 728505 - protein, 17 aa, Homo sapiens
  CDR3 for alpha chain variable domain of TCR clone 364253 (TRAV3, TRAJ6)
CAVRDGPRAGGSYIPTF

SEQ ID NO: 728506 - protein, 14 aa, Homo sapiens
  CDR3 for beta chain variable domain of TCR clone 364253 (TRBV7-9, TRBJ2-1)
CASSIRQGWDEQFF

SEQ ID NO: 728507 - protein, 13 aa, Homo sapiens
  CDR3 for alpha chain variable domain of TCR clone 364254 (TRAV20, TRAJ48)
CAVHLFGNEKLTF

SEQ ID NO: 728508 - protein, 15 aa, Homo sapiens
  CDR3 for beta chain variable domain of TCR clone 364254 (TRBV6-5, TRBJ2-6)
CASSQWEAGANDLSF

SEQ ID NO: 728509 - protein, 12 aa, Homo sapiens
  CDR3 for alpha chain variable domain of TCR clone 364255 (TRAV13-1, TRAJ21)
CAAKEGFNKFYF

SEQ ID NO: 728510 - protein, 15 aa, Homo sapiens
  CDR3 for beta chain variable domain of TCR clone 364255 (TRBV19, TRBJ2-1)
CASSSPGVPLDEQFF

SEQ ID NO: 728511 - protein, 12 aa, Homo sapiens
  CDR3 for alpha chain variable domain of TCR clone 364256 (TRAV8-3, TRAJ26)
CAGDNYGQNFVF

SEQ ID NO: 728512 - protein, 17 aa, Homo sapiens
  CDR3 for beta chain variable domain of TCR clone 364256 (TRBV7-3, TRBJ1-3)
CASSPLGRGTPGNTIYF

SEQ ID NO: 728513 - protein, 15 aa, Homo sapiens
  CDR3 for alpha chain variable domain of TCR clone 364257 (TRAV21, TRAJ40)
CAVRPQTSGTYKYIF

SEQ ID NO: 728514 - protein, 15 aa, Homo sapiens
  CDR3 for beta chain variable domain of TCR clone 364257 (TRBV5-1, TRBJ2-1)
CASSPPRASYNEQFF

SEQ ID NO: 728515 - protein, 16 aa, Homo sapiens
  CDR3 for alpha chain variable domain of TCR clone 364258 (TRAV1-2, TRAJ10)
CAVRGVLTGGGNKLTF

SEQ ID NO: 728516 - protein, 14 aa, Homo sapiens
  CDR3 for beta chain variable domain of TCR clone 364258 (TRBV12-5, TRBJ2-5)
CASGSRTHQGTQYF

SEQ ID NO: 728517 - protein, 12 aa, Homo sapiens
  CDR3 for alpha chain variable domain of TCR clone 364259 (TRAV8-3, TRAJ26)
CAGDNYGQNSVF

SEQ ID NO: 728518 - protein, 16 aa, Homo sapiens
  CDR3 for beta chain variable domain of TCR clone 364259 (TRBV27, TRBJ2-2)
CASSFRGLVRTGELFF

SEQ ID NO: 728519 - protein, 11 aa, Homo sapiens
  CDR3 for alpha chain variable domain of TCR clone 364260 (TRAV1-2, TRAJ20)
CAVANDYKLSF

SEQ ID NO: 728520 - protein, 15 aa, Homo sapiens
  CDR3 for beta chain variable domain of TCR clone 364260 (TRBV28, TRBJ2-5)
CASSPPWSYQETQYF

SEQ ID NO: 728521 - protein, 12 aa, Homo sapiens
  CDR3 for alpha chain variable domain of TCR clone 364261 (TRAV1-1, TRAJ39)
CAVPVVGNMLTF

SEQ ID NO: 728522 - protein, 15 aa, Homo sapiens
  CDR3 for beta chain variable domain of TCR clone 364261 (TRBV7-3, TRBJ2-1)
CASSPQGGAYNEQFF

SEQ ID NO: 728523 - protein, 18 aa, Homo sapiens
  CDR3 for alpha chain variable domain of TCR clone 364262 (TRAV12-3, TRAJ52)
CAMSVGGAGGTSYGKLTF

SEQ ID NO: 728524 - protein, 19 aa, Homo sapiens
  CDR3 for beta chain variable domain of TCR clone 364262 (TRBV6-3, TRBJ1-2)
CASSYSKGRTGPPNYGYTL

SEQ ID NO: 728525 - protein, 10 aa, Homo sapiens
  CDR3 for alpha chain variable domain of TCR clone 364263 (TRAV8-1, TRAJ43)
CAVNVDYMRF

SEQ ID NO: 728526 - protein, 15 aa, Homo sapiens
  CDR3 for beta chain variable domain of TCR clone 364263 (TRBV11-3, TRBJ2-7)
CASSPGPASSYEQYF

SEQ ID NO: 728527 - protein, 12 aa, Homo sapiens
  CDR3 for alpha chain variable domain of TCR clone 364264 (TRAV12-3, TRAJ17)
CAMTLTGNKLTF

SEQ ID NO: 728528 - protein, 18 aa, Homo sapiens
  CDR3 for beta chain variable domain of TCR clone 364264 (TRBV24-1, TRBJ2-2)
CATSDSGQGTANTGELFF

SEQ ID NO: 728529 - protein, 19 aa, Homo sapiens
  CDR3 for alpha chain variable domain of TCR clone 364265 (TRAV12-1, TRAJ45)
CVVTMGALRSGGGADGLTF

SEQ ID NO: 728530 - protein, 13 aa, Homo sapiens
  CDR3 for beta chain variable domain of TCR clone 364265 (TRBV24-1, TRBJ2-2)
CATSDWSTGELFF

SEQ ID NO: 728531 - protein, 14 aa, Homo sapiens
  CDR3 for alpha chain variable domain of TCR clone 364266 (TRAV29/DV5, TRAJ36)
CAARRETGANNLFF

SEQ ID NO: 728532 - protein, 12 aa, Homo sapiens
  CDR3 for beta chain variable domain of TCR clone 364266 (TRBV12-5, TRBJ2-5)
CASGQGVETQYF

SEQ ID NO: 728533 - protein, 15 aa, Homo sapiens
  CDR3 for alpha chain variable domain of TCR clone 364267 (TRAV13-1, TRAJ44)
CAASRNTGTASKLTF

SEQ ID NO: 728534 - protein, 14 aa, Homo sapiens
  CDR3 for beta chain variable domain of TCR clone 364267 (TRBV11-2, TRBJ1-2)
CASSLYMGNYGYTF

SEQ ID NO: 728535 - protein, 12 aa, Homo sapiens
  CDR3 for alpha chain variable domain of TCR clone 364268 (TRAV12-3, TRAJ17)
CAMTLTGNKLTF

SEQ ID NO: 728536 - protein, 14 aa, Homo sapiens
  CDR3 for beta chain variable domain of TCR clone 364268 (TRBV20-1, TRBJ1-3)
CSASPTGAGNTIYC

SEQ ID NO: 728537 - protein, 14 aa, Homo sapiens
  CDR3 for alpha chain variable domain of TCR clone 364269 (TRAV3, TRAJ37)
CAVKESGNTGKLIF

SEQ ID NO: 728538 - protein, 13 aa, Homo sapiens
  CDR3 for beta chain variable domain of TCR clone 364269 (TRBV19, TRBJ1-2)
CASSQGQVYGYTF

SEQ ID NO: 728539 - protein, 10 aa, Homo sapiens
  CDR3 for alpha chain variable domain of TCR clone 364270 (TRAV29/DV5, TRAJ48)
CAAGGEKLTF

SEQ ID NO: 728540 - protein, 14 aa, Homo sapiens
  CDR3 for beta chain variable domain of TCR clone 364270 (TRBV19, TRBJ2-1)
CASPTFVLSGEQFF

SEQ ID NO: 728541 - protein, 14 aa, Homo sapiens
  CDR3 for alpha chain variable domain of TCR clone 364271 (TRAV23/DV6, TRAJ11)
CAASLESGNSTLTF

SEQ ID NO: 728542 - protein, 13 aa, Homo sapiens
  CDR3 for beta chain variable domain of TCR clone 364271 (TRBV4-1, TRBJ2-5)
CASSLTRGETQYF

SEQ ID NO: 728543 - protein, 17 aa, Homo sapiens
  CDR3 for alpha chain variable domain of TCR clone 364272 (TRAV13-1, TRAJ31)
CAPRDRLMFGDGTQLVV

SEQ ID NO: 728544 - protein, 15 aa, Homo sapiens
  CDR3 for beta chain variable domain of TCR clone 364272 (TRBV10-3, TRBJ2-6)
CATPAAASGANVLTF

SEQ ID NO: 728545 - protein, 15 aa, Homo sapiens
  CDR3 for alpha chain variable domain of TCR clone 364273 (TRAV12-3, TRAJ6)
CAMSAASGGSYIPTF

SEQ ID NO: 728546 - protein, 16 aa, Homo sapiens
  CDR3 for beta chain variable domain of TCR clone 364273 (TRBV11-2, TRBJ2-7)
CASSTVTAPKPYEQYF

SEQ ID NO: 728547 - protein, 13 aa, Homo sapiens
  CDR3 for alpha chain variable domain of TCR clone 364274 (TRAV16, TRAJ26)
CITVLCLGQNFDF

SEQ ID NO: 728548 - protein, 12 aa, Homo sapiens
  CDR3 for beta chain variable domain of TCR clone 364274 (TRBV11-2, TRBJ2-1)
CASSPGNNEQFF

SEQ ID NO: 728549 - protein, 12 aa, Homo sapiens
  CDR3 for alpha chain variable domain of TCR clone 364275 (TRAV21, TRAJ49)
CAVNDGGNQFYF

SEQ ID NO: 728550 - protein, 14 aa, Homo sapiens
  CDR3 for beta chain variable domain of TCR clone 364275 (TRBV12-5, TRBJ2-5)
SASGSRTHQETQYF

SEQ ID NO: 728551 - protein, 13 aa, Homo sapiens
  CDR3 for alpha chain variable domain of TCR clone 364276 (TRAV3, TRAJ20)
CAVRSLNDYKLSF

SEQ ID NO: 728552 - protein, 13 aa, Homo sapiens
  CDR3 for beta chain variable domain of TCR clone 364276 (TRBV6-1, TRBJ2-1)
CAGMDPTSNEQFF

SEQ ID NO: 728553 - protein, 15 aa, Homo sapiens
  CDR3 for alpha chain variable domain of TCR clone 364277 (TRAV2, TRAJ22)
CAVPSRGGSARQLTF

SEQ ID NO: 728554 - protein, 15 aa, Homo sapiens
  CDR3 for beta chain variable domain of TCR clone 364277 (TRBV2, TRBJ2-5)
CASTRDGGPQETQYF

SEQ ID NO: 728555 - protein, 13 aa, Homo sapiens
  CDR3 for alpha chain variable domain of TCR clone 364278 (TRAV35, TRAJ37)
CAGSSGNTGKLIF

SEQ ID NO: 728556 - protein, 16 aa, Homo sapiens
  CDR3 for beta chain variable domain of TCR clone 364278 (TRBV10-3, TRBJ2-1)
CAISLTSGNSYNDQFF

SEQ ID NO: 728557 - protein, 13 aa, Homo sapiens
  CDR3 for alpha chain variable domain of TCR clone 364279 (TRAV12-3, TRAJ13)
CAMRSGGYQKVTF

SEQ ID NO: 728558 - protein, 15 aa, Homo sapiens
  CDR3 for beta chain variable domain of TCR clone 364279 (TRBV18, TRBJ2-1)
CASSPPSASYDEQFF

SEQ ID NO: 728559 - protein, 14 aa, Homo sapiens
  CDR3 for alpha chain variable domain of TCR clone 364280 (TRAV24, TRAJ42)
CAQNYGGSQVNLIF

SEQ ID NO: 728560 - protein, 15 aa, Homo sapiens
  CDR3 for beta chain variable domain of TCR clone 364280 (TRBV19, TRBJ1-5)
CASSIPGGAGQPQHF

SEQ ID NO: 728561 - protein, 10 aa, Homo sapiens
  CDR3 for alpha chain variable domain of TCR clone 364281 (TRAV23/DV6, TRAJ57)
CAASSTLSQG

SEQ ID NO: 728562 - protein, 12 aa, Homo sapiens
  CDR3 for beta chain variable domain of TCR clone 364281 (TRBV7-9, TRBJ2-7)
CASSFGSYEQYF

SEQ ID NO: 728563 - protein, 13 aa, Homo sapiens
  CDR3 for alpha chain variable domain of TCR clone 364282 (TRAV16, TRAJ26)
CITVLYLGQNFVF

SEQ ID NO: 728564 - protein, 12 aa, Homo sapiens
  CDR3 for beta chain variable domain of TCR clone 364282 (TRBV11-3, TRBJ2-1)
CASSPGNNEQFF

SEQ ID NO: 728565 - protein, 16 aa, Homo sapiens
  CDR3 for alpha chain variable domain of TCR clone 364283 (TRAV12-3, TRAJ53)
CAMSPGSGGSNYKLTF

SEQ ID NO: 728566 - protein, 11 aa, Homo sapiens
  CDR3 for beta chain variable domain of TCR clone 364283 (TRBV29-1, TRBJ2-5)
CRVGGGGTQLF

SEQ ID NO: 728567 - protein, 18 aa, Homo sapiens
  CDR3 for alpha chain variable domain of TCR clone 364284 (TRAV1-2, TRAJ10)
CAVRAITPVTGGGNKLTS

SEQ ID NO: 728568 - protein, 14 aa, Homo sapiens
  CDR3 for beta chain variable domain of TCR clone 364284 (TRBV4-1, TRBJ1-1)
CASSQQGNGNEAFF

SEQ ID NO: 728569 - protein, 13 aa, Homo sapiens
  CDR3 for alpha chain variable domain of TCR clone 364285 (TRAV21, TRAJ20)
CAVGLRVDYKLSF

SEQ ID NO: 728570 - protein, 16 aa, Homo sapiens
  CDR3 for beta chain variable domain of TCR clone 364285 (TRBV27, TRBJ2-1)
CASSSRLAGNYNEQFF

SEQ ID NO: 728571 - protein, 14 aa, Homo sapiens
  CDR3 for alpha chain variable domain of TCR clone 364286 (TRAV26-2, TRAJ32)
CCVVYGGATNKLIF

SEQ ID NO: 728572 - protein, 13 aa, Homo sapiens
  CDR3 for beta chain variable domain of TCR clone 364286 (TRBV12-5, TRBJ2-3)
CASGDRQSDTQYF

SEQ ID NO: 728573 - protein, 15 aa, Homo sapiens
  CDR3 for alpha chain variable domain of TCR clone 364287 (TRAV12-2, TRAJ8)
CAVREENTGFQKLVF

SEQ ID NO: 728574 - protein, 15 aa, Homo sapiens
  CDR3 for beta chain variable domain of TCR clone 364287 (TRBV28, TRBJ2-4)
CAAGSGKLLMGIQYF

SEQ ID NO: 728575 - protein, 15 aa, Homo sapiens
  CDR3 for alpha chain variable domain of TCR clone 364288 (TRAV12-3, TRAJ6)
CAMRATSGGRYIPTF

SEQ ID NO: 728576 - protein, 11 aa, Homo sapiens
  CDR3 for beta chain variable domain of TCR clone 364288 (TRBV20-1, TRBJ1-5)
CSAQGDQPQHF

SEQ ID NO: 728577 - protein, 13 aa, Homo sapiens
  CDR3 for alpha chain variable domain of TCR clone 364289 (TRAV8-6, TRAJ49)
CDVITNTGNQFYF

SEQ ID NO: 728578 - protein, 14 aa, Homo sapiens
  CDR3 for beta chain variable domain of TCR clone 364289 (TRBV19, TRBJ2-1)
CASPTFVLSGEQFF

SEQ ID NO: 728579 - protein, 13 aa, Homo sapiens
  CDR3 for alpha chain variable domain of TCR clone 364290 (TRAV8-2, TRAJ43)
CVVSDQGDNDMRF

SEQ ID NO: 728580 - protein, 12 aa, Homo sapiens
  CDR3 for beta chain variable domain of TCR clone 364290 (TRBV7-9, TRBJ2-7)
CASRTGYDEQYF

SEQ ID NO: 728581 - protein, 15 aa, Homo sapiens
  CDR3 for alpha chain variable domain of TCR clone 364291 (TRAV12-3, TRAJ42)
CAMSWHGGSQGNLIF

SEQ ID NO: 728582 - protein, 13 aa, Homo sapiens
  CDR3 for beta chain variable domain of TCR clone 364291 (TRBV19, TRBJ2-5)
CASSGRAGETQYF

SEQ ID NO: 728583 - protein, 12 aa, Homo sapiens
  CDR3 for alpha chain variable domain of TCR clone 364292 (TRAV12-3, TRAJ17)
CAMTLTGNKLTF

SEQ ID NO: 728584 - protein, 15 aa, Homo sapiens
  CDR3 for beta chain variable domain of TCR clone 364292 (TRBV18, TRBJ1-1)
CANSPRQGENTEAFF

SEQ ID NO: 728585 - protein, 16 aa, Homo sapiens
  CDR3 for alpha chain variable domain of TCR clone 364293 (TRAV26-1, TRAJ36)
CIVRVPAQTGANNLFF

SEQ ID NO: 728586 - protein, 15 aa, Homo sapiens
  CDR3 for beta chain variable domain of TCR clone 364293 (TRBV19, TRBJ2-4)
CASRGPRRGENIQYF

SEQ ID NO: 728587 - protein, 13 aa, Homo sapiens
  CDR3 for alpha chain variable domain of TCR clone 364294 (TRAV3, TRAJ21)
CAVREPDFNKFYF

SEQ ID NO: 728588 - protein, 14 aa, Homo sapiens
  CDR3 for beta chain variable domain of TCR clone 364294 (TRBV7-3, TRBJ1-1)
CASSLGTGYTEAFF

SEQ ID NO: 728589 - protein, 17 aa, Homo sapiens
  CDR3 for alpha chain variable domain of TCR clone 364295 (TRAV36/DV7, TRAJ52)
CAVARRAGGTSYGKLTF

SEQ ID NO: 728590 - protein, 14 aa, Homo sapiens
  CDR3 for beta chain variable domain of TCR clone 364295 (TRBV20-1, TRBJ2-3)
CSARGGTSTDTQCF

SEQ ID NO: 728591 - protein, 16 aa, Homo sapiens
  CDR3 for alpha chain variable domain of TCR clone 364296 (TRAV20, TRAJ53)
CAVQGNSGGSNYKLTF

SEQ ID NO: 728592 - protein, 15 aa, Homo sapiens
  CDR3 for beta chain variable domain of TCR clone 364296 (TRBV6-1, TRBJ2-1)
CASSEAAYSYNEQFF

SEQ ID NO: 728593 - protein, 14 aa, Homo sapiens
  CDR3 for alpha chain variable domain of TCR clone 364297 (TRAV21, TRAJ35)
CAVMPIGFGNVVHC

SEQ ID NO: 728594 - protein, 12 aa, Homo sapiens
  CDR3 for beta chain variable domain of TCR clone 364297 (TRBV7-9, TRBJ2-7)
SASSIKREEQYF

SEQ ID NO: 728595 - protein, 12 aa, Homo sapiens
  CDR3 for alpha chain variable domain of TCR clone 364298 (TRAV20, TRAJ34)
CAVRDNTDKLIF

SEQ ID NO: 728596 - protein, 14 aa, Homo sapiens
  CDR3 for beta chain variable domain of TCR clone 364298 (TRBV7-9, TRBJ2-7)
CASSRPGGPYEQYF

SEQ ID NO: 728597 - protein, 15 aa, Homo sapiens
  CDR3 for alpha chain variable domain of TCR clone 364299 (TRAV20, TRAJ43)
CAVQAGKSSNNDMRF

SEQ ID NO: 728598 - protein, 14 aa, Homo sapiens
  CDR3 for beta chain variable domain of TCR clone 364299 (TRBV27, TRBJ2-1)
CASRHLGEGKEQFF

SEQ ID NO: 728599 - protein, 15 aa, Homo sapiens
  CDR3 for alpha chain variable domain of TCR clone 364300 (TRAV3, TRAJ20)
CAVRDIKLSDYKLSF

SEQ ID NO: 728600 - protein, 16 aa, Homo sapiens
  CDR3 for beta chain variable domain of TCR clone 364300 (TRBV27, TRBJ2-7)
CASSSERRDSAYEQYF

SEQ ID NO: 728601 - protein, 17 aa, Homo sapiens
  CDR3 for alpha chain variable domain of TCR clone 364301 (TRAV13-1, TRAJ10)
CAASSCRGTGGGNKLTF

SEQ ID NO: 728602 - protein, 13 aa, Homo sapiens
  CDR3 for beta chain variable domain of TCR clone 364301 (TRBV20-1, TRBJ1-1)
CSARGGGNTEAFF

SEQ ID NO: 728603 - protein, 14 aa, Homo sapiens
  CDR3 for alpha chain variable domain of TCR clone 364302 (TRAV1-2, TRAJ8)
CAVREDTGFQKLVF

SEQ ID NO: 728604 - protein, 15 aa, Homo sapiens
  CDR3 for beta chain variable domain of TCR clone 364302 (TRBV5-5, TRBJ1-5)
CASGSTPGSNQPQHF

SEQ ID NO: 728605 - protein, 14 aa, Homo sapiens
  CDR3 for alpha chain variable domain of TCR clone 364303 (TRAV12-2, TRAJ40)
CAVKIPSGTYKYIF

SEQ ID NO: 728606 - protein, 12 aa, Homo sapiens
  CDR3 for beta chain variable domain of TCR clone 364303 (TRBV5-7, TRBJ1-2)
CASSDGPYGYTF

SEQ ID NO: 728607 - protein, 14 aa, Homo sapiens
  CDR3 for alpha chain variable domain of TCR clone 364304 (TRAV13-1, TRAJ10)
CAAKEPGGGNKLTF

SEQ ID NO: 728608 - protein, 16 aa, Homo sapiens
  CDR3 for beta chain variable domain of TCR clone 364304 (TRBV5-1, TRBJ2-3)
RASSLGLAVYTDTQYF

SEQ ID NO: 728609 - protein, 15 aa, Homo sapiens
  CDR3 for alpha chain variable domain of TCR clone 364305 (TRAV8-2, TRAJ16)
CVVSDGFSDGQKLPF

SEQ ID NO: 728610 - protein, 12 aa, Homo sapiens
  CDR3 for beta chain variable domain of TCR clone 364305 (TRBV12-4, TRBJ2-7)
CASSLGGYEQYF

SEQ ID NO: 728611 - protein, 12 aa, Homo sapiens
  CDR3 for alpha chain variable domain of TCR clone 364306 (TRAV21, TRAJ42)
CALGGSQGNLIF

SEQ ID NO: 728612 - protein, 14 aa, Homo sapiens
  CDR3 for beta chain variable domain of TCR clone 364306 (TRBV12-4, TRBJ1-1)
CASSLGTGGTEAFF

SEQ ID NO: 728613 - protein, 14 aa, Homo sapiens
  CDR3 for alpha chain variable domain of TCR clone 364307 (TRAV17, TRAJ54)
CATDANQGAQKLVF

SEQ ID NO: 728614 - protein, 16 aa, Homo sapiens
  CDR3 for beta chain variable domain of TCR clone 364307 (TRBV9, TRBJ2-1)
CASSVPSGSSYNEQFF

SEQ ID NO: 728615 - protein, 13 aa, Homo sapiens
  CDR3 for alpha chain variable domain of TCR clone 364308 (TRAV8-3, TRAJ12)
WVLRMDSSYKLIF

SEQ ID NO: 728616 - protein, 16 aa, Homo sapiens
  CDR3 for beta chain variable domain of TCR clone 364308 (TRBV10-3, TRBJ2-7)
CAISADFADRPYEQYF

SEQ ID NO: 728617 - protein, 12 aa, Homo sapiens
  CDR3 for alpha chain variable domain of TCR clone 364309 (TRAV13-1, TRAJ21)
CEAKEGLNKFYF

SEQ ID NO: 728618 - protein, 14 aa, Homo sapiens
  CDR3 for beta chain variable domain of TCR clone 364309 (TRBV5-4, TRBJ1-1)
CASSLDSRRDEAFF

SEQ ID NO: 728619 - protein, 14 aa, Homo sapiens
  CDR3 for alpha chain variable domain of TCR clone 364310 (TRAV20, TRAJ29)
CAVQAWVGNTPLVF

SEQ ID NO: 728620 - protein, 15 aa, Homo sapiens
  CDR3 for beta chain variable domain of TCR clone 364310 (TRBV29-1, TRBJ2-7)
CSVEFFDRGSYEQHF

SEQ ID NO: 728621 - protein, 14 aa, Homo sapiens
  CDR3 for alpha chain variable domain of TCR clone 364311 (TRAV12-2, TRAJ5)
CAVRRSTGRRALTF

SEQ ID NO: 728622 - protein, 12 aa, Homo sapiens
  CDR3 for beta chain variable domain of TCR clone 364311 (TRBV19, TRBJ1-5)
CASSIAQQPQHF

SEQ ID NO: 728623 - protein, 13 aa, Homo sapiens
  CDR3 for alpha chain variable domain of TCR clone 364312 (TRAV13-1, TRAJ37)
CAAVSGNTGKLIF

SEQ ID NO: 728624 - protein, 13 aa, Homo sapiens
  CDR3 for beta chain variable domain of TCR clone 364312 (TRBV6-1, TRBJ1-1)
CASSRQGNTEAFF

SEQ ID NO: 728625 - protein, 14 aa, Homo sapiens
  CDR3 for alpha chain variable domain of TCR clone 364313 (TRAV4, TRAJ6)
CLVGEAGGSYIPTF

SEQ ID NO: 728626 - protein, 11 aa, Homo sapiens
  CDR3 for beta chain variable domain of TCR clone 364313 (TRBV12-4, TRBJ2-3)
CASTATDTQYF

SEQ ID NO: 728627 - protein, 15 aa, Homo sapiens
  CDR3 for alpha chain variable domain of TCR clone 364314 (TRAV35, TRAJ23)
CAGQRGYNQGGKLIF

SEQ ID NO: 728628 - protein, 14 aa, Homo sapiens
  CDR3 for beta chain variable domain of TCR clone 364314 (TRBV5-1, TRBJ2-7)
CASSRGESLYEQYF

SEQ ID NO: 728629 - protein, 17 aa, Homo sapiens
  CDR3 for alpha chain variable domain of TCR clone 364315 (TRAV2, TRAJ36)
CAVEDRGNWGEQPLLWD

SEQ ID NO: 728630 - protein, 14 aa, Homo sapiens
  CDR3 for beta chain variable domain of TCR clone 364315 (TRBV7-9, TRBJ2-5)
CASSLDTAQETQYF

SEQ ID NO: 728631 - protein, 12 aa, Homo sapiens
  CDR3 for alpha chain variable domain of TCR clone 364316 (TRAV3, TRAJ43)
CAVRDPNNDIRF

SEQ ID NO: 728632 - protein, 15 aa, Homo sapiens
  CDR3 for beta chain variable domain of TCR clone 364316 (TRBV2, TRBJ2-1)
CASSELAGSYNEQFF

SEQ ID NO: 728633 - protein, 14 aa, Homo sapiens
  CDR3 for alpha chain variable domain of TCR clone 364317 (TRAV26-1, TRAJ34)
CIVRESYNTDKLIF

SEQ ID NO: 728634 - protein, 13 aa, Homo sapiens
  CDR3 for beta chain variable domain of TCR clone 364317 (TRBV5-4, TRBJ1-1)
CASSFQVNTEAFF

SEQ ID NO: 728635 - protein, 15 aa, Homo sapiens
  CDR3 for alpha chain variable domain of TCR clone 364318 (TRAV13-1, TRAJ18)
CAVRGGGSTLGRLYF

SEQ ID NO: 728636 - protein, 13 aa, Homo sapiens
  CDR3 for beta chain variable domain of TCR clone 364318 (TRBV18, TRBJ2-1)
CASGLASNNEQFF

SEQ ID NO: 728637 - protein, 15 aa, Homo sapiens
  CDR3 for alpha chain variable domain of TCR clone 364319 (TRAV3, TRAJ5)
CAVRDRKTGRRALTF

SEQ ID NO: 728638 - protein, 16 aa, Homo sapiens
  CDR3 for beta chain variable domain of TCR clone 364319 (TRBV19, TRBJ1-5)
CASSTWTGGGNQPQHF

SEQ ID NO: 728639 - protein, 13 aa, Homo sapiens
  CDR3 for alpha chain variable domain of TCR clone 364320 (TRAV35, TRAJ32)
CAGVGGATNKLIF

SEQ ID NO: 728640 - protein, 17 aa, Homo sapiens
  CDR3 for beta chain variable domain of TCR clone 364320 (TRBV4-3, TRBJ2-1)
CARSQFSSGRASGEQFF

SEQ ID NO: 728641 - protein, 12 aa, Homo sapiens
  CDR3 for alpha chain variable domain of TCR clone 364321 (TRAV2, TRAJ10)
CASTGGGNKLTF

SEQ ID NO: 728642 - protein, 14 aa, Homo sapiens
  CDR3 for beta chain variable domain of TCR clone 364321 (TRBV24-1, TRBJ1-1)
CATSIPRGDTEAFF

SEQ ID NO: 728643 - protein, 14 aa, Homo sapiens
  CDR3 for alpha chain variable domain of TCR clone 364322 (TRAV8-1, TRAJ5)
CAVRKDKGRRALTF

SEQ ID NO: 728644 - protein, 14 aa, Homo sapiens
  CDR3 for beta chain variable domain of TCR clone 364322 (TRBV7-8, TRBJ2-3)
CASSFPDGQDTQYF

SEQ ID NO: 728645 - protein, 14 aa, Homo sapiens
  CDR3 for alpha chain variable domain of TCR clone 364323 (TRAV1-1, TRAJ27)
CAVIYNTNAGKSTF

SEQ ID NO: 728646 - protein, 20 aa, Homo sapiens
  CDR3 for beta chain variable domain of TCR clone 364323 (TRBV19, TRBJ2-1)
CASSISRTVTSTRLNNEQFF

SEQ ID NO: 728647 - protein, 13 aa, Homo sapiens
  CDR3 for alpha chain variable domain of TCR clone 364324 (TRAV27, TRAJ11)
WAGGGSGYSTLTF

SEQ ID NO: 728648 - protein, 13 aa, Homo sapiens
  CDR3 for beta chain variable domain of TCR clone 364324 (TRBV12-4, TRBJ1-1)
CASSPGTGFEAFF

SEQ ID NO: 728649 - protein, 14 aa, Homo sapiens
  CDR3 for alpha chain variable domain of TCR clone 364325 (TRAV38-1, TRAJ45)
CASHSGGGADGLTF

SEQ ID NO: 728650 - protein, 13 aa, Homo sapiens
  CDR3 for beta chain variable domain of TCR clone 364325 (TRBV10-3, TRBJ1-2)
CAISERDSYGETF

SEQ ID NO: 728651 - protein, 16 aa, Homo sapiens
  CDR3 for alpha chain variable domain of TCR clone 364326 (TRAV3, TRAJ3)
CAVRDRAKSSASTIIF

SEQ ID NO: 728652 - protein, 13 aa, Homo sapiens
  CDR3 for beta chain variable domain of TCR clone 364326 (TRBV12-5, TRBJ2-3)
CASGDRQSDTQYF

SEQ ID NO: 728653 - protein, 16 aa, Homo sapiens
  CDR3 for alpha chain variable domain of TCR clone 364327 (TRAV1-1, TRAJ8)
CLLLLRGGHRLSETLF

SEQ ID NO: 728654 - protein, 16 aa, Homo sapiens
  CDR3 for beta chain variable domain of TCR clone 364327 (TRBV12-5, TRBJ2-5)
CASGPRTSGNQETQYF

SEQ ID NO: 728655 - protein, 14 aa, Homo sapiens
  CDR3 for alpha chain variable domain of TCR clone 364328 (TRAV12-2, TRAJ13)
CAVKKTGGYQKVTF

SEQ ID NO: 728656 - protein, 13 aa, Homo sapiens
  CDR3 for beta chain variable domain of TCR clone 364328 (TRBV11-2, TRBJ2-1)
CASSLDLVNEQFF

SEQ ID NO: 728657 - protein, 17 aa, Homo sapiens
  CDR3 for alpha chain variable domain of TCR clone 364329 (TRAV8-6, TRAJ58)
CAVSSWVGETSGARLTF

SEQ ID NO: 728658 - protein, 13 aa, Homo sapiens
  CDR3 for beta chain variable domain of TCR clone 364329 (TRBV10-3, TRBJ2-7)
CASKLAVNYEQYF

SEQ ID NO: 728659 - protein, 17 aa, Homo sapiens
  CDR3 for alpha chain variable domain of TCR clone 364330 (TRAV26-1, TRAJ53)
CIVRVDDSGGINYKLTF

SEQ ID NO: 728660 - protein, 15 aa, Homo sapiens
  CDR3 for beta chain variable domain of TCR clone 364330 (TRBV20-1, TRBJ2-7)
CSARVPAAYLYEQYF

SEQ ID NO: 728661 - protein, 12 aa, Homo sapiens
  CDR3 for alpha chain variable domain of TCR clone 364331 (TRAV8-3, TRAJ20)
CAVDFYDYKLSF

SEQ ID NO: 728662 - protein, 12 aa, Homo sapiens
  CDR3 for beta chain variable domain of TCR clone 364331 (TRBV29-1, TRBJ2-3)
CSVTGGADTQYF

SEQ ID NO: 728663 - protein, 14 aa, Homo sapiens
  CDR3 for alpha chain variable domain of TCR clone 364332 (TRAV8-3, TRAJ4)
CAVGAAGGYNKLIF

SEQ ID NO: 728664 - protein, 15 aa, Homo sapiens
  CDR3 for beta chain variable domain of TCR clone 364332 (TRBV20-1, TRBJ2-5)
CSAPPRTGFGETQYL

SEQ ID NO: 728665 - protein, 14 aa, Homo sapiens
  CDR3 for alpha chain variable domain of TCR clone 364333 (TRAV12-2, TRAJ40)
CAVKIPSGAYKYIF

SEQ ID NO: 728666 - protein, 14 aa, Homo sapiens
  CDR3 for beta chain variable domain of TCR clone 364333 (TRBV20-1, TRBJ1-1)
CSTQTRIGGTEAFF

SEQ ID NO: 728667 - protein, 13 aa, Homo sapiens
  CDR3 for alpha chain variable domain of TCR clone 364334 (TRAV12-2, TRAJ49)
CAVNMRTGNQFYF

SEQ ID NO: 728668 - protein, 13 aa, Homo sapiens
  CDR3 for beta chain variable domain of TCR clone 364334 (TRBV19, TRBJ1-2)
CASSQGQVYGYTF

SEQ ID NO: 728669 - protein, 13 aa, Homo sapiens
  CDR3 for alpha chain variable domain of TCR clone 364335 (TRAV21, TRAJ15)
CAVANQAGTALIF

SEQ ID NO: 728670 - protein, 15 aa, Homo sapiens
  CDR3 for beta chain variable domain of TCR clone 364335 (TRBV27, TRBJ2-7)
CASSSGSSVSPEQYF

SEQ ID NO: 728671 - protein, 11 aa, Homo sapiens
  CDR3 for alpha chain variable domain of TCR clone 364336 (TRAV12-2, TRAJ44)
CGYGTASKLTF

SEQ ID NO: 728672 - protein, 17 aa, Homo sapiens
  CDR3 for beta chain variable domain of TCR clone 364336 (TRBV20-1, TRBJ1-1)
CSARGTGGSYGNTGAFF

SEQ ID NO: 728673 - protein, 14 aa, Homo sapiens
  CDR3 for alpha chain variable domain of TCR clone 364337 (TRAV16, TRAJ32)
CALKSGGATNKLIF

SEQ ID NO: 728674 - protein, 16 aa, Homo sapiens
  CDR3 for beta chain variable domain of TCR clone 364337 (TRBV19, TRBJ1-6)
CASSVAPVAGNSPLHF

SEQ ID NO: 728675 - protein, 12 aa, Homo sapiens
  CDR3 for alpha chain variable domain of TCR clone 364338 (TRAV12-1, TRAJ20)
CVVNPDDYKLSF

SEQ ID NO: 728676 - protein, 15 aa, Homo sapiens
  CDR3 for beta chain variable domain of TCR clone 364338 (TRBV11-3, TRBJ2-2)
CARSLVGTGAGELFS

SEQ ID NO: 728677 - protein, 16 aa, Homo sapiens
  CDR3 for alpha chain variable domain of TCR clone 364339 (TRAV3, TRAJ4)
CAVRPSPSGGYNKLIF

SEQ ID NO: 728678 - protein, 12 aa, Homo sapiens
  CDR3 for beta chain variable domain of TCR clone 364339 (TRBV7-9, TRBJ2-7)
CDSSQGVYEQYF

SEQ ID NO: 728679 - protein, 14 aa, Homo sapiens
  CDR3 for alpha chain variable domain of TCR clone 364340 (TRAV17, TRAJ16)
CATADFSDGQKLLF

SEQ ID NO: 728680 - protein, 14 aa, Homo sapiens
  CDR3 for beta chain variable domain of TCR clone 364340 (TRBV7-6, TRBJ2-3)
CASSVAGGTDTQYF

SEQ ID NO: 728681 - protein, 15 aa, Homo sapiens
  CDR3 for alpha chain variable domain of TCR clone 364341 (TRAV27, TRAJ50)
CAGVGRGTSYDKVIF

SEQ ID NO: 728682 - protein, 15 aa, Homo sapiens
  CDR3 for beta chain variable domain of TCR clone 364341 (TRBV27, TRBJ2-5)
CASSLIPSGGETQYF

SEQ ID NO: 728683 - protein, 14 aa, Homo sapiens
  CDR3 for alpha chain variable domain of TCR clone 364342 (TRAV12-2, TRAJ13)
CAVKKTGGYQKVTF

SEQ ID NO: 728684 - protein, 17 aa, Homo sapiens
  CDR3 for beta chain variable domain of TCR clone 364342 (TRBV13, TRBJ2-3)
FASSLSRVAGGRNTQYF

SEQ ID NO: 728685 - protein, 11 aa, Homo sapiens
  CDR3 for alpha chain variable domain of TCR clone 364343 (TRAV1-1, TRAJ9)
CAVAGGFKTIF

SEQ ID NO: 728686 - protein, 14 aa, Homo sapiens
  CDR3 for beta chain variable domain of TCR clone 364343 (TRBV7-6, TRBJ2-3)
CASSLGTVTDTQYF

SEQ ID NO: 728687 - protein, 12 aa, Homo sapiens
  CDR3 for alpha chain variable domain of TCR clone 364344 (TRAV17, TRAJ20)
CASQANDYKLSF

SEQ ID NO: 728688 - protein, 12 aa, Homo sapiens
  CDR3 for beta chain variable domain of TCR clone 364344 (TRBV6-1, TRBJ1-1)
CASNSPTAEAFF

SEQ ID NO: 728689 - protein, 11 aa, Homo sapiens
  CDR3 for alpha chain variable domain of TCR clone 364345 (TRAV21, TRAJ48)
CAVDGNEKLTF

SEQ ID NO: 728690 - protein, 15 aa, Homo sapiens
  CDR3 for beta chain variable domain of TCR clone 364345 (TRBV3-1, TRBJ2-7)
CASSQEWTGSYEQYF

SEQ ID NO: 728691 - protein, 13 aa, Homo sapiens
  CDR3 for alpha chain variable domain of TCR clone 364346 (TRAV2, TRAJ20)
CAVEDPSAYKLSF

SEQ ID NO: 728692 - protein, 16 aa, Homo sapiens
  CDR3 for beta chain variable domain of TCR clone 364346 (TRBV25-1, TRBJ2-7)
CASSELTGGGIYEQYV

SEQ ID NO: 728693 - protein, 13 aa, Homo sapiens
  CDR3 for alpha chain variable domain of TCR clone 364347 (TRAV21, TRAJ26)
CAVLDNYCQNFVF

SEQ ID NO: 728694 - protein, 16 aa, Homo sapiens
  CDR3 for beta chain variable domain of TCR clone 364347 (TRBV29-1, TRBJ2-2)
CSVETRASGNTGELFF

SEQ ID NO: 728695 - protein, 13 aa, Homo sapiens
  CDR3 for alpha chain variable domain of TCR clone 364348 (TRAV2, TRAJ40)
CAVVTSGTYKYIF

SEQ ID NO: 728696 - protein, 15 aa, Homo sapiens
  CDR3 for beta chain variable domain of TCR clone 364348 (TRBV6-3, TRBJ2-7)
CASISPGTVFYEQYF

SEQ ID NO: 728697 - protein, 14 aa, Homo sapiens
  CDR3 for alpha chain variable domain of TCR clone 364349 (TRAV27, TRAJ13)
CRSSNSGGHQKVTF

SEQ ID NO: 728698 - protein, 12 aa, Homo sapiens
  CDR3 for beta chain variable domain of TCR clone 364349 (TRBV14, TRBJ2-5)
CASSQLKETQYF

SEQ ID NO: 728699 - protein, 15 aa, Homo sapiens
  CDR3 for alpha chain variable domain of TCR clone 364350 (TRAV26-2, TRAJ39)
CSLRGNNNAGNMLTF

SEQ ID NO: 728700 - protein, 14 aa, Homo sapiens
  CDR3 for beta chain variable domain of TCR clone 364350 (TRBV7-8, TRBJ2-3)
CASSLEAETDTQYF

SEQ ID NO: 728701 - protein, 17 aa, Homo sapiens
  CDR3 for alpha chain variable domain of TCR clone 364351 (TRAV3, TRAJ28)
CAVREAYSGAGTYQLTF

SEQ ID NO: 728702 - protein, 18 aa, Homo sapiens
  CDR3 for beta chain variable domain of TCR clone 364351 (TRBV27, TRBJ2-1)
CASGNRAVGVGSKNEQFF

SEQ ID NO: 728703 - protein, 13 aa, Homo sapiens
  CDR3 for alpha chain variable domain of TCR clone 364352 (TRAV29/DV5, TRAJ31)
CAASRNNNARLMF

SEQ ID NO: 728704 - protein, 11 aa, Homo sapiens
  CDR3 for beta chain variable domain of TCR clone 364352 (TRBV14, TRBJ2-5)
CQQPAQRDQYF

SEQ ID NO: 728705 - protein, 16 aa, Homo sapiens
  CDR3 for alpha chain variable domain of TCR clone 364353 (TRAV30, TRAJ24)
CGTEIVDADSWGKFQF

SEQ ID NO: 728706 - protein, 16 aa, Homo sapiens
  CDR3 for beta chain variable domain of TCR clone 364353 (TRBV12-5, TRBJ2-1)
CASSLEGYRSYNEQFF

SEQ ID NO: 728707 - protein, 11 aa, Homo sapiens
  CDR3 for alpha chain variable domain of TCR clone 364354 (TRAV1-2, TRAJ40)
CAVPGTYKYIF

SEQ ID NO: 728708 - protein, 16 aa, Homo sapiens
  CDR3 for beta chain variable domain of TCR clone 364354 (TRBV7-3, TRBJ2-2)
CASSLKRGTLCGELFF

SEQ ID NO: 728709 - protein, 14 aa, Homo sapiens
  CDR3 for alpha chain variable domain of TCR clone 364355 (TRAV3, TRAJ6)
CAVRDWGGSYIPTF

SEQ ID NO: 728710 - protein, 17 aa, Homo sapiens
  CDR3 for beta chain variable domain of TCR clone 364355 (TRBV28, TRBJ2-5)
CASSRQGGLAGAETQYF

SEQ ID NO: 728711 - protein, 14 aa, Homo sapiens
  CDR3 for alpha chain variable domain of TCR clone 364356 (TRAV12-1, TRAJ17)
CVVNYKAAGNKLTF

SEQ ID NO: 728712 - protein, 15 aa, Homo sapiens
  CDR3 for beta chain variable domain of TCR clone 364356 (TRBV7-2, TRBJ2-1)
CASTNGTGIYNEQFF

SEQ ID NO: 728713 - protein, 21 aa, Homo sapiens
  CDR3 for alpha chain variable domain of TCR clone 364357 (TRAV17, TRAJ9)
CATTGGLKLSLEQEQDYLLQQ

SEQ ID NO: 728714 - protein, 14 aa, Homo sapiens
  CDR3 for beta chain variable domain of TCR clone 364357 (TRBV12-5, TRBJ2-5)
CASGSRTHQETQYF

SEQ ID NO: 728715 - protein, 12 aa, Homo sapiens
  CDR3 for alpha chain variable domain of TCR clone 364358 (TRAV8-3, TRAJ43)
CAVGAGNNDMRV

SEQ ID NO: 728716 - protein, 14 aa, Homo sapiens
  CDR3 for beta chain variable domain of TCR clone 364358 (TRBV4-2, TRBJ1-5)
CASSRDRGNQPQHF

SEQ ID NO: 728717 - protein, 16 aa, Homo sapiens
  CDR3 for alpha chain variable domain of TCR clone 364359 (TRAV13-2, TRAJ32)
CAENMNYGGATNKLIF

SEQ ID NO: 728718 - protein, 14 aa, Homo sapiens
  CDR3 for beta chain variable domain of TCR clone 364359 (TRBV15, TRBJ2-5)
CATSSTGYQETQHF

SEQ ID NO: 728719 - protein, 12 aa, Homo sapiens
  CDR3 for alpha chain variable domain of TCR clone 364360 (TRAV3, TRAJ20)
CAVRDPDYKLSF

SEQ ID NO: 728720 - protein, 14 aa, Homo sapiens
  CDR3 for beta chain variable domain of TCR clone 364360 (TRBV4-2, TRBJ2-1)
CASGLDRAYIEQFF

SEQ ID NO: 728721 - protein, 15 aa, Homo sapiens
  CDR3 for alpha chain variable domain of TCR clone 364361 (TRAV8-1, TRAJ23)
CAVNSHYNQGGKLIF

SEQ ID NO: 728722 - protein, 15 aa, Homo sapiens
  CDR3 for beta chain variable domain of TCR clone 364361 (TRBV11-2, TRBJ1-6)
CASTRRGTGNSPLHF

SEQ ID NO: 728723 - protein, 15 aa, Homo sapiens
  CDR3 for alpha chain variable domain of TCR clone 364362 (TRAV3, TRAJ45)
CVVRTPWGGADGLTF

SEQ ID NO: 728724 - protein, 16 aa, Homo sapiens
  CDR3 for beta chain variable domain of TCR clone 364362 (TRBV6-1, TRBJ2-2)
CASSFGQGANTGELFF

SEQ ID NO: 728725 - protein, 16 aa, Homo sapiens
  CDR3 for alpha chain variable domain of TCR clone 364363 (TRAV3, TRAJ37)
CAVRPHGSGNTGKLIF

SEQ ID NO: 728726 - protein, 15 aa, Homo sapiens
  CDR3 for beta chain variable domain of TCR clone 364363 (TRBV7-2, TRBJ1-2)
CASSPRAGWNYGYTF

SEQ ID NO: 728727 - protein, 11 aa, Homo sapiens
  CDR3 for alpha chain variable domain of TCR clone 364364 (TRAV12-1, TRAJ43)
CVEYDNNDMRF

SEQ ID NO: 728728 - protein, 16 aa, Homo sapiens
  CDR3 for beta chain variable domain of TCR clone 364364 (TRBV18, TRBJ1-3)
CASSLGILDGENTIYF

SEQ ID NO: 728729 - protein, 13 aa, Homo sapiens
  CDR3 for alpha chain variable domain of TCR clone 364365 (TRAV21, TRAJ27)
CAARPGNAGKSTF

SEQ ID NO: 728730 - protein, 15 aa, Homo sapiens
  CDR3 for beta chain variable domain of TCR clone 364365 (TRBV7-8, TRBJ1-1)
CASSLGDSRNTEAFF

SEQ ID NO: 728731 - protein, 15 aa, Homo sapiens
  CDR3 for alpha chain variable domain of TCR clone 364366 (TRAV8-3, TRAJ11)
CAVGLLNSGYSTLTF

SEQ ID NO: 728732 - protein, 14 aa, Homo sapiens
  CDR3 for beta chain variable domain of TCR clone 364366 (TRBV4-1, TRBJ2-5)
CASSRSGSGETQFF

SEQ ID NO: 728733 - protein, 15 aa, Homo sapiens
  CDR3 for alpha chain variable domain of TCR clone 364367 (TRAV25, TRAJ52)
CAGTSGGTSYGKLTF

SEQ ID NO: 728734 - protein, 14 aa, Homo sapiens
  CDR3 for beta chain variable domain of TCR clone 364367 (TRBV20-1, TRBJ2-1)
CSAQIGGSANEQFF

SEQ ID NO: 728735 - protein, 13 aa, Homo sapiens
  CDR3 for alpha chain variable domain of TCR clone 364368 (TRAV26-1, TRAJ38)
CIADNAGNNRKLI

SEQ ID NO: 728736 - protein, 14 aa, Homo sapiens
  CDR3 for beta chain variable domain of TCR clone 364368 (TRBV4-1, TRBJ1-1)
RSSQEWGHYTEAFF

SEQ ID NO: 728737 - protein, 12 aa, Homo sapiens
  CDR3 for alpha chain variable domain of TCR clone 364369 (TRAV3, TRAJ20)
CAVRDPDYKLSF

SEQ ID NO: 728738 - protein, 15 aa, Homo sapiens
  CDR3 for beta chain variable domain of TCR clone 364369 (TRBV20-1, TRBJ2-7)
CSARKGLAESYEQYF

SEQ ID NO: 728739 - protein, 14 aa, Homo sapiens
  CDR3 for alpha chain variable domain of TCR clone 364370 (TRAV2, TRAJ37)
CAVDFTSNTGKLIF

SEQ ID NO: 728740 - protein, 14 aa, Homo sapiens
  CDR3 for beta chain variable domain of TCR clone 364370 (TRBV20-1, TRBJ1-1)
QCWPRGDGNTEAFF

SEQ ID NO: 728741 - protein, 14 aa, Homo sapiens
  CDR3 for alpha chain variable domain of TCR clone 364371 (TRAV35, TRAJ42)
CCVPYGGSQGNLIF

SEQ ID NO: 728742 - protein, 18 aa, Homo sapiens
  CDR3 for beta chain variable domain of TCR clone 364371 (TRBV13, TRBJ2-6)
CASSPMTSGGAGANDLTF

SEQ ID NO: 728743 - protein, 16 aa, Homo sapiens
  CDR3 for alpha chain variable domain of TCR clone 364372 (TRAV26-1, TRAJ53)
CIVRGAMGGSNYKLAF

SEQ ID NO: 728744 - protein, 12 aa, Homo sapiens
  CDR3 for beta chain variable domain of TCR clone 364372 (TRBV7-9, TRBJ1-5)
CASSPQGQPQHF

SEQ ID NO: 728745 - protein, 19 aa, Homo sapiens
  CDR3 for alpha chain variable domain of TCR clone 364373 (TRAV26-1, TRAJ22)
CCVLLHPWVFSGSARQLTF

SEQ ID NO: 728746 - protein, 19 aa, Homo sapiens
  CDR3 for beta chain variable domain of TCR clone 364373 (TRBV19, TRBJ2-5)
CASSIGQVTDLFLGETQYF

SEQ ID NO: 728747 - protein, 16 aa, Homo sapiens
  CDR3 for alpha chain variable domain of TCR clone 364374 (TRAV1-2, TRAJ10)
CAVRGVLTGGGNKLTF

SEQ ID NO: 728748 - protein, 14 aa, Homo sapiens
  CDR3 for beta chain variable domain of TCR clone 364374 (TRBV25-1, TRBJ1-1)
CASTPLGGNTEAFF

SEQ ID NO: 728749 - protein, 15 aa, Homo sapiens
  CDR3 for alpha chain variable domain of TCR clone 364375 (TRAV21, TRAJ24)
CAARSSTDSWGKLQF

SEQ ID NO: 728750 - protein, 15 aa, Homo sapiens
  CDR3 for beta chain variable domain of TCR clone 364375 (TRBV20-1, TRBJ1-1)
CSASRGVTGNTEALF

SEQ ID NO: 728751 - protein, 14 aa, Homo sapiens
  CDR3 for alpha chain variable domain of TCR clone 364376 (TRAV1-2, TRAJ16)
CAVNRFSDGEKLLF

SEQ ID NO: 728752 - protein, 15 aa, Homo sapiens
  CDR3 for beta chain variable domain of TCR clone 364376 (TRBV4-2, TRBJ1-1)
CASSQQGAGDTEAFF

SEQ ID NO: 728753 - protein, 16 aa, Homo sapiens
  CDR3 for alpha chain variable domain of TCR clone 364377 (TRAV21, TRAJ33)
CAVSPASMYSNYLLIW

SEQ ID NO: 728754 - protein, 17 aa, Homo sapiens
  CDR3 for beta chain variable domain of TCR clone 364377 (TRBV2, TRBJ1-4)
CASSKRELTQGEEKLFF

SEQ ID NO: 728755 - protein, 18 aa, Homo sapiens
  CDR3 for alpha chain variable domain of TCR clone 364378 (TRAV13-1, TRAJ52)
CAAKNPNAGGISYGKLTF

SEQ ID NO: 728756 - protein, 18 aa, Homo sapiens
  CDR3 for beta chain variable domain of TCR clone 364378 (TRBV4-1, TRBJ1-4)
CASSPRTGGAWTNEKLFF

SEQ ID NO: 728757 - protein, 17 aa, Homo sapiens
  CDR3 for alpha chain variable domain of TCR clone 364379 (TRAV8-2, )
CVVNIQNPDPAGYQLRD

SEQ ID NO: 728758 - protein, 14 aa, Homo sapiens
  CDR3 for beta chain variable domain of TCR clone 364379 (TRBV7-9, TRBJ2-5)
CASSLVGGEETQYF

SEQ ID NO: 728759 - protein, 12 aa, Homo sapiens
  CDR3 for alpha chain variable domain of TCR clone 364380 (TRAV12-3, TRAJ17)
CAMTLTGNKLTF

SEQ ID NO: 728760 - protein, 13 aa, Homo sapiens
  CDR3 for beta chain variable domain of TCR clone 364380 (TRBV7-6, TRBJ1-5)
CASSQGPNRPQHF

SEQ ID NO: 728761 - protein, 12 aa, Homo sapiens
  CDR3 for alpha chain variable domain of TCR clone 364381 (TRAV8-3, TRAJ26)
CAGDNYGQNFVF

SEQ ID NO: 728762 - protein, 13 aa, Homo sapiens
  CDR3 for beta chain variable domain of TCR clone 364381 (TRBV10-3, TRBJ2-7)
CASQRAVNYEQYF

SEQ ID NO: 728763 - protein, 15 aa, Homo sapiens
  CDR3 for alpha chain variable domain of TCR clone 364382 (TRAV17, TRAJ13)
CASDAWSGGYQKVTF

SEQ ID NO: 728764 - protein, 17 aa, Homo sapiens
  CDR3 for beta chain variable domain of TCR clone 364382 (TRBV11-2, TRBJ2-1)
CASSLYPPGVEYNEQFF

SEQ ID NO: 728765 - protein, 12 aa, Homo sapiens
  CDR3 for alpha chain variable domain of TCR clone 364383 (TRAV29/DV5, TRAJ49)
CAATDTGNQFYF

SEQ ID NO: 728766 - protein, 15 aa, Homo sapiens
  CDR3 for beta chain variable domain of TCR clone 364383 (TRBV6-3, TRBJ2-1)
CASSYASDSYNEQFF

SEQ ID NO: 728767 - protein, 16 aa, Homo sapiens
  CDR3 for alpha chain variable domain of TCR clone 364384 (TRAV3, TRAJ21)
CAVRDIERGNFNKFYF

SEQ ID NO: 728768 - protein, 13 aa, Homo sapiens
  CDR3 for beta chain variable domain of TCR clone 364384 (TRBV19, TRBJ2-7)
CASRKAGGSEQYF

SEQ ID NO: 728769 - protein, 14 aa, Homo sapiens
  CDR3 for alpha chain variable domain of TCR clone 364385 (TRAV13-1, TRAJ40)
CAARSTSGTYKYIF

SEQ ID NO: 728770 - protein, 14 aa, Homo sapiens
  CDR3 for beta chain variable domain of TCR clone 364385 (TRBV18, TRBJ1-5)
CQLRTGGNNQPQHF

SEQ ID NO: 728771 - protein, 18 aa, Homo sapiens
  CDR3 for alpha chain variable domain of TCR clone 364386 (TRAV12-3, TRAJ52)
CAMSVGGAGGTSYGKLTF

SEQ ID NO: 728772 - protein, 15 aa, Homo sapiens
  CDR3 for beta chain variable domain of TCR clone 364386 (TRBV12-4, TRBJ1-5)
CASTRGSGFGQPQHF

SEQ ID NO: 728773 - protein, 13 aa, Homo sapiens
  CDR3 for alpha chain variable domain of TCR clone 364387 (TRAV2, TRAJ40)
CAVVTSGTFKYIF

SEQ ID NO: 728774 - protein, 14 aa, Homo sapiens
  CDR3 for beta chain variable domain of TCR clone 364387 (TRBV19, TRBJ2-1)
CASPTFVLMGEQFF

SEQ ID NO: 728775 - protein, 14 aa, Homo sapiens
  CDR3 for alpha chain variable domain of TCR clone 364388 (TRAV1-2, TRAJ16)
CAVNRFSDGQKLVF

SEQ ID NO: 728776 - protein, 14 aa, Homo sapiens
  CDR3 for beta chain variable domain of TCR clone 364388 (TRBV7-9, TRBJ2-3)
CASSLEDGTDTQYF

SEQ ID NO: 728777 - protein, 14 aa, Homo sapiens
  CDR3 for alpha chain variable domain of TCR clone 364389 (TRAV12-2, TRAJ5)
CAVNRSTGRRALTF

SEQ ID NO: 728778 - protein, 16 aa, Homo sapiens
  CDR3 for beta chain variable domain of TCR clone 364389 (TRBV11-2, TRBJ2-7)
CASSLAPTGVNYEQYF

SEQ ID NO: 728779 - protein, 11 aa, Homo sapiens
  CDR3 for alpha chain variable domain of TCR clone 364390 (TRAV21, TRAJ34)
CAHYNTDKLIF

SEQ ID NO: 728780 - protein, 14 aa, Homo sapiens
  CDR3 for beta chain variable domain of TCR clone 364390 (TRBV13, TRBJ1-1)
CASTVITVNTEAFF

SEQ ID NO: 728781 - protein, 15 aa, Homo sapiens
  CDR3 for alpha chain variable domain of TCR clone 364391 (TRAV38-1, TRAJ37)
CAFIHGSCNTGKLIF

SEQ ID NO: 728782 - protein, 14 aa, Homo sapiens
  CDR3 for beta chain variable domain of TCR clone 364391 (TRBV29-1, TRBJ2-5)
CSVETSGSGETQYF

SEQ ID NO: 728783 - protein, 13 aa, Homo sapiens
  CDR3 for alpha chain variable domain of TCR clone 364392 (TRAV12-3, TRAJ7)
CAMSASGNNRLAF

SEQ ID NO: 728784 - protein, 17 aa, Homo sapiens
  CDR3 for beta chain variable domain of TCR clone 364392 (TRBV7-7, TRBJ1-4)
CASSLVGQGASNEKLFF

SEQ ID NO: 728785 - protein, 11 aa, Homo sapiens
  CDR3 for alpha chain variable domain of TCR clone 364393 (TRAV17, TRAJ9)
CGFTGGFKTIF

SEQ ID NO: 728786 - protein, 16 aa, Homo sapiens
  CDR3 for beta chain variable domain of TCR clone 364393 (TRBV12-4, TRBJ2-3)
CASSPETGGFSDTQYF

SEQ ID NO: 728787 - protein, 12 aa, Homo sapiens
  CDR3 for alpha chain variable domain of TCR clone 364394 (TRAV13-1, TRAJ21)
CAAKKGFNKFYF

SEQ ID NO: 728788 - protein, 11 aa, Homo sapiens
  CDR3 for beta chain variable domain of TCR clone 364394 (TRBV6-1, TRBJ2-1)
CASISSNEQFF

SEQ ID NO: 728789 - protein, 14 aa, Homo sapiens
  CDR3 for alpha chain variable domain of TCR clone 364395 (TRAV17, TRAJ34)
CATDSLEGPDKLIF

SEQ ID NO: 728790 - protein, 14 aa, Homo sapiens
  CDR3 for beta chain variable domain of TCR clone 364395 (TRBV12-4, TRBJ1-3)
CASGQTVSGNTIYF

SEQ ID NO: 728791 - protein, 12 aa, Homo sapiens
  CDR3 for alpha chain variable domain of TCR clone 364396 (TRAV26-1, TRAJ35)
CMGLSFGNVLHC

SEQ ID NO: 728792 - protein, 17 aa, Homo sapiens
  CDR3 for beta chain variable domain of TCR clone 364396 (TRBV11-3, TRBJ2-5)
CASSLPGVRGGKETQYF

SEQ ID NO: 728793 - protein, 12 aa, Homo sapiens
  CDR3 for alpha chain variable domain of TCR clone 364397 (TRAV26-1, TRAJ43)
CIVRPRGDDMRF

SEQ ID NO: 728794 - protein, 16 aa, Homo sapiens
  CDR3 for beta chain variable domain of TCR clone 364397 (TRBV3-1, TRBJ2-1)
GASSQGGRRSFDEQFF

SEQ ID NO: 728795 - protein, 18 aa, Homo sapiens
  CDR3 for alpha chain variable domain of TCR clone 364398 (TRAV26-2, TRAJ54)
CILRDVEVGIQGAQKLVF

SEQ ID NO: 728796 - protein, 14 aa, Homo sapiens
  CDR3 for beta chain variable domain of TCR clone 364398 (TRBV19, TRBJ1-4)
CASAIEAEGEKLFF

SEQ ID NO: 728797 - protein, 11 aa, Homo sapiens
  CDR3 for alpha chain variable domain of TCR clone 364399 (TRAV23/DV6, TRAJ58)
CAARSLRGETS

SEQ ID NO: 728798 - protein, 14 aa, Homo sapiens
  CDR3 for beta chain variable domain of TCR clone 364399 (TRBV7-3, TRBJ2-1)
CASSLAGGTNEQFF

SEQ ID NO: 728799 - protein, 15 aa, Homo sapiens
  CDR3 for alpha chain variable domain of TCR clone 364400 (TRAV12-3, TRAJ11)
CAMSEENSGYSTLTF

SEQ ID NO: 728800 - protein, 15 aa, Homo sapiens
  CDR3 for beta chain variable domain of TCR clone 364400 (TRBV6-5, TRBJ2-1)
CASSYDAGAGNEQFF

SEQ ID NO: 728801 - protein, 18 aa, Homo sapiens
  CDR3 for alpha chain variable domain of TCR clone 364401 (TRAV26-1, TRAJ38)
CCVLLHRHNAGNNLKLIW

SEQ ID NO: 728802 - protein, 13 aa, Homo sapiens
  CDR3 for beta chain variable domain of TCR clone 364401 (TRBV7-9, TRBJ1-2)
CASSLKQNYGYTF

SEQ ID NO: 728803 - protein, 11 aa, Homo sapiens
  CDR3 for alpha chain variable domain of TCR clone 364402 (TRAV21, TRAJ34)
CAVTNTDKLIF

SEQ ID NO: 728804 - protein, 12 aa, Homo sapiens
  CDR3 for beta chain variable domain of TCR clone 364402 (TRBV7-9, TRBJ1-1)
WASSLVRGEAFF

SEQ ID NO: 728805 - protein, 11 aa, Homo sapiens
  CDR3 for alpha chain variable domain of TCR clone 364403 (TRAV4, TRAJ31)
CLLGDNARLMF

SEQ ID NO: 728806 - protein, 16 aa, Homo sapiens
  CDR3 for beta chain variable domain of TCR clone 364403 (TRBV7-2, TRBJ2-5)
CASSSKWLSGRETQYF

SEQ ID NO: 728807 - protein, 15 aa, Homo sapiens
  CDR3 for alpha chain variable domain of TCR clone 364404 (TRAV2, TRAJ9)
CAVEDRGTGGFKTIF

SEQ ID NO: 728808 - protein, 12 aa, Homo sapiens
  CDR3 for beta chain variable domain of TCR clone 364404 (TRBV2, TRBJ2-1)
CAYGPPGNEQFF

SEQ ID NO: 728809 - protein, 14 aa, Homo sapiens
  CDR3 for alpha chain variable domain of TCR clone 364405 (TRAV8-2, TRAJ4)
CAVSPSGGYNKLIF

SEQ ID NO: 728810 - protein, 15 aa, Homo sapiens
  CDR3 for beta chain variable domain of TCR clone 364405 (TRBV10-2, TRBJ2-5)
CASRGSGGPQETQYF

SEQ ID NO: 728811 - protein, 17 aa, Homo sapiens
  CDR3 for alpha chain variable domain of TCR clone 364406 (TRAV13-1, TRAJ52)
CAASSRAGGTSYGKLTF

SEQ ID NO: 728812 - protein, 12 aa, Homo sapiens
  CDR3 for beta chain variable domain of TCR clone 364406 (TRBV11-2, TRBJ2-2)
CASSLGGGELFF

SEQ ID NO: 728813 - protein, 17 aa, Homo sapiens
  CDR3 for alpha chain variable domain of TCR clone 364407 (TRAV36/DV7, TRAJ52)
CAVAQRAGGTSYGKLPF

SEQ ID NO: 728814 - protein, 15 aa, Homo sapiens
  CDR3 for beta chain variable domain of TCR clone 364407 (TRBV20-1, TRBJ2-7)
CSAESGTSGAYEQYF

SEQ ID NO: 728815 - protein, 13 aa, Homo sapiens
  CDR3 for alpha chain variable domain of TCR clone 364408 (TRAV12-2, TRAJ9)
CAVKWAGGFKTIF

SEQ ID NO: 728816 - protein, 15 aa, Homo sapiens
  CDR3 for beta chain variable domain of TCR clone 364408 (TRBV5-1, TRBJ1-4)
CASSLTAESDEKLFF

SEQ ID NO: 728817 - protein, 14 aa, Homo sapiens
  CDR3 for alpha chain variable domain of TCR clone 364409 (TRAV12-2, TRAJ45)
CALPERGGAVGLTF

SEQ ID NO: 728818 - protein, 14 aa, Homo sapiens
  CDR3 for beta chain variable domain of TCR clone 364409 (TRBV18, TRBJ1-5)
CASSPGNSNQPQHF

SEQ ID NO: 728819 - protein, 15 aa, Homo sapiens
  CDR3 for alpha chain variable domain of TCR clone 364410 (TRAV27, TRAJ50)
CAGVGRGTSYDKVIF

SEQ ID NO: 728820 - protein, 13 aa, Homo sapiens
  CDR3 for beta chain variable domain of TCR clone 364410 (TRBV2, TRBJ2-7)
CANGLAGDYEQYF

SEQ ID NO: 728821 - protein, 16 aa, Homo sapiens
  CDR3 for alpha chain variable domain of TCR clone 364411 (TRAV23/DV6, TRAJ9)
CAASIGGNTVGLKTIF

SEQ ID NO: 728822 - protein, 12 aa, Homo sapiens
  CDR3 for beta chain variable domain of TCR clone 364411 (TRBV6-3, TRBJ2-7)
CASSEPGFEQYF

SEQ ID NO: 728823 - protein, 14 aa, Homo sapiens
  CDR3 for alpha chain variable domain of TCR clone 364412 (TRAV12-1, TRAJ17)
CVVNYKAAGNKLTF

SEQ ID NO: 728824 - protein, 18 aa, Homo sapiens
  CDR3 for beta chain variable domain of TCR clone 364412 (TRBV7-9, TRBJ2-1)
CASSLAVSGTSGRNEQFF

SEQ ID NO: 728825 - protein, 13 aa, Homo sapiens
  CDR3 for alpha chain variable domain of TCR clone 364413 (TRAV12-3, TRAJ13)
CAMSSGGYQKVTF

SEQ ID NO: 728826 - protein, 13 aa, Homo sapiens
  CDR3 for beta chain variable domain of TCR clone 364413 (TRBV20-1, TRBJ1-1)
CSAPPGGHTDAFF

SEQ ID NO: 728827 - protein, 13 aa, Homo sapiens
  CDR3 for alpha chain variable domain of TCR clone 364414 (TRAV21, TRAJ27)
CAARPGNAGKSTF

SEQ ID NO: 728828 - protein, 16 aa, Homo sapiens
  CDR3 for beta chain variable domain of TCR clone 364414 (TRBV27, TRBJ2-2)
CASSSSGVSNTGELFF

SEQ ID NO: 728829 - protein, 14 aa, Homo sapiens
  CDR3 for alpha chain variable domain of TCR clone 364415 (TRAV21, TRAJ21)
CAVKGFGDFNKFYF

SEQ ID NO: 728830 - protein, 13 aa, Homo sapiens
  CDR3 for beta chain variable domain of TCR clone 364415 (TRBV18, TRBJ1-1)
CASSPETKPEAFF

SEQ ID NO: 728831 - protein, 19 aa, Homo sapiens
  CDR3 for alpha chain variable domain of TCR clone 364416 (TRAV3, TRAJ6)
CAVRDRNPSRSGGSYIPTF

SEQ ID NO: 728832 - protein, 14 aa, Homo sapiens
  CDR3 for beta chain variable domain of TCR clone 364416 (TRBV18, TRBJ2-7)
CQLSTFMDSYEQYF

SEQ ID NO: 728833 - protein, 13 aa, Homo sapiens
  CDR3 for alpha chain variable domain of TCR clone 364417 (TRAV8-6, TRAJ8)
CAVINTGFQKLVF

SEQ ID NO: 728834 - protein, 15 aa, Homo sapiens
  CDR3 for beta chain variable domain of TCR clone 364417 (TRBV28, TRBJ2-5)
CASSSGRTIQETQYF

SEQ ID NO: 728835 - protein, 13 aa, Homo sapiens
  CDR3 for alpha chain variable domain of TCR clone 364418 (TRAV12-3, TRAJ43)
CAMIRPNNNDMRF

SEQ ID NO: 728836 - protein, 13 aa, Homo sapiens
  CDR3 for beta chain variable domain of TCR clone 364418 (TRBV10-2, TRBJ2-7)
CASGASGGYEQYF

SEQ ID NO: 728837 - protein, 14 aa, Homo sapiens
  CDR3 for alpha chain variable domain of TCR clone 364419 (TRAV35, TRAJ34)
CAGRGTPTSSSLGL

SEQ ID NO: 728838 - protein, 14 aa, Homo sapiens
  CDR3 for beta chain variable domain of TCR clone 364419 (TRBV19, TRBJ2-1)
CASPTFVLSGEQFF

SEQ ID NO: 728839 - protein, 15 aa, Homo sapiens
  CDR3 for alpha chain variable domain of TCR clone 364420 (TRAV3, TRAJ4)
CAQNMFSGGYNKLIF

SEQ ID NO: 728840 - protein, 15 aa, Homo sapiens
  CDR3 for beta chain variable domain of TCR clone 364420 (TRBV27, TRBJ2-1)
CASSNGGGSSNEQFF

SEQ ID NO: 728841 - protein, 13 aa, Homo sapiens
  CDR3 for alpha chain variable domain of TCR clone 364421 (TRAV8-3, TRAJ44)
CAVVPGTASKLTF

SEQ ID NO: 728842 - protein, 14 aa, Homo sapiens
  CDR3 for beta chain variable domain of TCR clone 364421 (TRBV11-2, TRBJ2-3)
CASGRLARTDTQHF

SEQ ID NO: 728843 - protein, 13 aa, Homo sapiens
  CDR3 for alpha chain variable domain of TCR clone 364422 (TRAV27, TRAJ6)
CAGGTSGSYIPTF

SEQ ID NO: 728844 - protein, 15 aa, Homo sapiens
  CDR3 for beta chain variable domain of TCR clone 364422 (TRBV5-5, TRBJ2-7)
CASSLAAPLSYEQYF

SEQ ID NO: 728845 - protein, 11 aa, Homo sapiens
  CDR3 for alpha chain variable domain of TCR clone 364423 (TRAV1-1, TRAJ23)
CAVRQGGKLIF

SEQ ID NO: 728846 - protein, 20 aa, Homo sapiens
  CDR3 for beta chain variable domain of TCR clone 364423 (TRBV7-8, TRBJ2-2)
CASSHLFPGPTIHIAGEPFF

SEQ ID NO: 728847 - protein, 13 aa, Homo sapiens
  CDR3 for alpha chain variable domain of TCR clone 364424 (TRAV8-2, TRAJ10)
CVVSSYPGNKLTF

SEQ ID NO: 728848 - protein, 15 aa, Homo sapiens
  CDR3 for beta chain variable domain of TCR clone 364424 (TRBV7-9, TRBJ2-2)
CASSETGQGTGELFF

SEQ ID NO: 728849 - protein, 13 aa, Homo sapiens
  CDR3 for alpha chain variable domain of TCR clone 364425 (TRAV12-1, TRAJ29)
CEVRNSGNTPLVF

SEQ ID NO: 728850 - protein, 14 aa, Homo sapiens
  CDR3 for beta chain variable domain of TCR clone 364425 (TRBV7-2, TRBJ2-7)
CASRSQGAAYEQYF

SEQ ID NO: 728851 - protein, 15 aa, Homo sapiens
  CDR3 for alpha chain variable domain of TCR clone 364426 (TRAV17, TRAJ16)
CATALRFSDGQKMLF

SEQ ID NO: 728852 - protein, 14 aa, Homo sapiens
  CDR3 for beta chain variable domain of TCR clone 364426 (TRBV12-4, TRBJ1-1)
CASSLGTGGTEAFF

SEQ ID NO: 728853 - protein, 16 aa, Homo sapiens
  CDR3 for alpha chain variable domain of TCR clone 364427 (TRAV30, TRAJ24)
CGTEIVDADSWGKFQF

SEQ ID NO: 728854 - protein, 16 aa, Homo sapiens
  CDR3 for beta chain variable domain of TCR clone 364427 (TRBV13, TRBJ2-7)
CASSSRESGRTYEQYF

SEQ ID NO: 728855 - protein, 14 aa, Homo sapiens
  CDR3 for alpha chain variable domain of TCR clone 364428 (TRAV1-2, TRAJ8)
CAVREDTGFQKLVF

SEQ ID NO: 728856 - protein, 15 aa, Homo sapiens
  CDR3 for beta chain variable domain of TCR clone 364428 (TRBV12-4, TRBJ2-5)
CACSPATGLQETQYF

SEQ ID NO: 728857 - protein, 10 aa, Homo sapiens
  CDR3 for alpha chain variable domain of TCR clone 364429 (TRAV8-4, TRAJ43)
CAVSADDMRF

SEQ ID NO: 728858 - protein, 15 aa, Homo sapiens
  CDR3 for beta chain variable domain of TCR clone 364429 (TRBV7-2, TRBJ2-3)
CASSLNLRDTDTQYF

SEQ ID NO: 728859 - protein, 12 aa, Homo sapiens
  CDR3 for alpha chain variable domain of TCR clone 364430 (TRAV13-1, TRAJ42)
VHYGGSQGNLIF

SEQ ID NO: 728860 - protein, 15 aa, Homo sapiens
  CDR3 for beta chain variable domain of TCR clone 364430 (TRBV20-1, TRBJ2-1)
CSASSAGSSYNEQFF

SEQ ID NO: 728861 - protein, 12 aa, Homo sapiens
  CDR3 for alpha chain variable domain of TCR clone 364431 (TRAV3, TRAJ20)
CAVRDPDYKLTF

SEQ ID NO: 728862 - protein, 15 aa, Homo sapiens
  CDR3 for beta chain variable domain of TCR clone 364431 (TRBV2, TRBJ2-2)
CASSRETVGTGELFF

SEQ ID NO: 728863 - protein, 12 aa, Homo sapiens
  CDR3 for alpha chain variable domain of TCR clone 364432 (TRAV1-1, TRAJ9)
CAVDTGGFKTSF

SEQ ID NO: 728864 - protein, 14 aa, Homo sapiens
  CDR3 for beta chain variable domain of TCR clone 364432 (TRBV7-8, TRBJ2-5)
CASSATGGQETQYF

SEQ ID NO: 728865 - protein, 17 aa, Homo sapiens
  CDR3 for alpha chain variable domain of TCR clone 364433 (TRAV3, TRAJ38)
CAVRDCLNAGNNRKLIW

SEQ ID NO: 728866 - protein, 14 aa, Homo sapiens
  CDR3 for beta chain variable domain of TCR clone 364433 (TRBV25-1, TRBJ1-4)
CASSGGGQPEKLFC

SEQ ID NO: 728867 - protein, 15 aa, Homo sapiens
  CDR3 for alpha chain variable domain of TCR clone 364434 (TRAV12-2, TRAJ53)
CAVNGGGGSKYKLTF

SEQ ID NO: 728868 - protein, 14 aa, Homo sapiens
  CDR3 for beta chain variable domain of TCR clone 364434 (TRBV6-1, TRBJ1-3)
CASVQGGGGNTIYF

SEQ ID NO: 728869 - protein, 16 aa, Homo sapiens
  CDR3 for alpha chain variable domain of TCR clone 364435 (TRAV3, TRAJ10)
CAVRDMRAVGGNKLTF

SEQ ID NO: 728870 - protein, 14 aa, Homo sapiens
  CDR3 for beta chain variable domain of TCR clone 364435 (TRBV28, TRBJ2-2)
CASTRRSGDGELFF

SEQ ID NO: 728871 - protein, 17 aa, Homo sapiens
  CDR3 for alpha chain variable domain of TCR clone 364436 (TRAV20, TRAJ28)
CAVQGGYSWAGSYQLTF

SEQ ID NO: 728872 - protein, 15 aa, Homo sapiens
  CDR3 for beta chain variable domain of TCR clone 364436 (TRBV7-2, TRBJ2-7)
CASSLSSGRTYEQYF

SEQ ID NO: 728873 - protein, 16 aa, Homo sapiens
  CDR3 for alpha chain variable domain of TCR clone 364437 (TRAV23/DV6, TRAJ52)
CAARPSGGTSYGKLTF

SEQ ID NO: 728874 - protein, 13 aa, Homo sapiens
  CDR3 for beta chain variable domain of TCR clone 364437 (TRBV7-9, TRBJ1-1)
CASSLSGETESFF

SEQ ID NO: 728875 - protein, 14 aa, Homo sapiens
  CDR3 for alpha chain variable domain of TCR clone 364438 (TRAV12-2, TRAJ17)
CAVLFKAACNKLTF

SEQ ID NO: 728876 - protein, 14 aa, Homo sapiens
  CDR3 for beta chain variable domain of TCR clone 364438 (TRBV15, TRBJ1-2)
CATSRDFDRVGYTF

SEQ ID NO: 728877 - protein, 15 aa, Homo sapiens
  CDR3 for alpha chain variable domain of TCR clone 364439 (TRAV29/DV5, TRAJ24)
CAASGATDSWGKFQV

SEQ ID NO: 728878 - protein, 16 aa, Homo sapiens
  CDR3 for beta chain variable domain of TCR clone 364439 (TRBV7-3, TRBJ2-2)
CASSLKRGTLSGELFF

SEQ ID NO: 728879 - protein, 14 aa, Homo sapiens
  CDR3 for alpha chain variable domain of TCR clone 364440 (TRAV1-2, TRAJ8)
CAVREATGFPKLVF

SEQ ID NO: 728880 - protein, 15 aa, Homo sapiens
  CDR3 for beta chain variable domain of TCR clone 364440 (TRBV6-3, TRBJ2-7)
CASSSPGTVFYEQYF

SEQ ID NO: 728881 - protein, 13 aa, Homo sapiens
  CDR3 for alpha chain variable domain of TCR clone 364441 (TRAV3, TRAJ3)
CAVADSSASKIIF

SEQ ID NO: 728882 - protein, 12 aa, Homo sapiens
  CDR3 for beta chain variable domain of TCR clone 364441 (TRBV7-8, TRBJ2-7)
CASEGGPHEQYF

SEQ ID NO: 728883 - protein, 13 aa, Homo sapiens
  CDR3 for alpha chain variable domain of TCR clone 364442 (TRAV38-1, TRAJ42)
CARWGGSQGNLIF

SEQ ID NO: 728884 - protein, 14 aa, Homo sapiens
  CDR3 for beta chain variable domain of TCR clone 364442 (TRBV4-1, TRBJ2-2)
CASSQAVNTGELFF

SEQ ID NO: 728885 - protein, 14 aa, Homo sapiens
  CDR3 for alpha chain variable domain of TCR clone 364443 (TRAV21, TRAJ35)
CAVMPMGFGNVLHC

SEQ ID NO: 728886 - protein, 14 aa, Homo sapiens
  CDR3 for beta chain variable domain of TCR clone 364443 (TRBV19, TRBJ2-1)
CASPTFVLSGEQFF

SEQ ID NO: 728887 - protein, 14 aa, Homo sapiens
  CDR3 for alpha chain variable domain of TCR clone 364444 (TRAV17, TRAJ45)
CSTASGGGADGLTF

SEQ ID NO: 728888 - protein, 13 aa, Homo sapiens
  CDR3 for beta chain variable domain of TCR clone 364444 (TRBV15, TRBJ2-7)
CATSTTGHYEQYF

SEQ ID NO: 728889 - protein, 12 aa, Homo sapiens
  CDR3 for alpha chain variable domain of TCR clone 364445 (TRAV13-1, TRAJ27)
CAAHTNAGKSTF

SEQ ID NO: 728890 - protein, 12 aa, Homo sapiens
  CDR3 for beta chain variable domain of TCR clone 364445 (TRBV11-2, TRBJ2-3)
CASRPGTDTQYF

SEQ ID NO: 728891 - protein, 13 aa, Homo sapiens
  CDR3 for alpha chain variable domain of TCR clone 364446 (TRAV12-3, TRAJ54)
CAMKVPGAQKLVF

SEQ ID NO: 728892 - protein, 15 aa, Homo sapiens
  CDR3 for beta chain variable domain of TCR clone 364446 (TRBV28, TRBJ2-7)
CASSPTGTGSYEQYF

SEQ ID NO: 728893 - protein, 13 aa, Homo sapiens
  CDR3 for alpha chain variable domain of TCR clone 364447 (TRAV12-2, TRAJ47)
CAAFMEYGNKLVF

SEQ ID NO: 728894 - protein, 14 aa, Homo sapiens
  CDR3 for beta chain variable domain of TCR clone 364447 (TRBV4-1, TRBJ1-5)
CASSQGPTNQPQHF

SEQ ID NO: 728895 - protein, 13 aa, Homo sapiens
  CDR3 for alpha chain variable domain of TCR clone 364448 (TRAV12-2, TRAJ52)
CNAGGTSYGKLTF

SEQ ID NO: 728896 - protein, 16 aa, Homo sapiens
  CDR3 for beta chain variable domain of TCR clone 364448 (TRBV7-9, TRBJ1-2)
CASSLGFSAGEDGYTF

SEQ ID NO: 728897 - protein, 16 aa, Homo sapiens
  CDR3 for alpha chain variable domain of TCR clone 364449 (TRAV30, TRAJ24)
CGTESVDADSWGKFQF

SEQ ID NO: 728898 - protein, 14 aa, Homo sapiens
  CDR3 for beta chain variable domain of TCR clone 364449 (TRBV12-5, TRBJ2-5)
CASGSRTHQGTQYF

SEQ ID NO: 728899 - protein, 11 aa, Homo sapiens
  CDR3 for alpha chain variable domain of TCR clone 364450 (TRAV2, TRAJ13)
CASGGYQKVTF

SEQ ID NO: 728900 - protein, 22 aa, Homo sapiens
  CDR3 for beta chain variable domain of TCR clone 364450 (TRBV28, TRBJ1-3)
CASSMGWAWKHHIFWRGKLAHC

SEQ ID NO: 728901 - protein, 12 aa, Homo sapiens
  CDR3 for alpha chain variable domain of TCR clone 364451 (TRAV27, TRAJ42)
CSGGGSQGNLIF

SEQ ID NO: 728902 - protein, 13 aa, Homo sapiens
  CDR3 for beta chain variable domain of TCR clone 364451 (TRBV19, TRBJ2-7)
CASSIRSSYEQYF

SEQ ID NO: 728903 - protein, 14 aa, Homo sapiens
  CDR3 for alpha chain variable domain of TCR clone 364452 (TRAV27, TRAJ50)
CAGGRKTSYDKVIF

SEQ ID NO: 728904 - protein, 14 aa, Homo sapiens
  CDR3 for beta chain variable domain of TCR clone 364452 (TRBV25-1, TRBJ1-1)
CASTHLGGNTEAFF

SEQ ID NO: 728905 - protein, 14 aa, Homo sapiens
  CDR3 for alpha chain variable domain of TCR clone 364453 (TRAV35, TRAJ34)
CAGRGTPTSASLGL

SEQ ID NO: 728906 - protein, 18 aa, Homo sapiens
  CDR3 for beta chain variable domain of TCR clone 364453 (TRBV11-2, TRBJ2-3)
CASSLGGASRGAPNTQYF

SEQ ID NO: 728907 - protein, 15 aa, Homo sapiens
  CDR3 for alpha chain variable domain of TCR clone 364454 (TRAV12-2, TRAJ53)
CAVNGGGGSNYKLTF

SEQ ID NO: 728908 - protein, 15 aa, Homo sapiens
  CDR3 for beta chain variable domain of TCR clone 364454 (TRBV28, TRBJ2-7)
CASSFLGPSIHEQYF

SEQ ID NO: 728909 - protein, 12 aa, Homo sapiens
  CDR3 for alpha chain variable domain of TCR clone 364455 (TRAV27, TRAJ9)
CAGESGGFKTIF

SEQ ID NO: 728910 - protein, 20 aa, Homo sapiens
  CDR3 for beta chain variable domain of TCR clone 364455 (TRBV28, TRBJ2-1)
CASTPIGRSPGLAGGNEQFF

SEQ ID NO: 728911 - protein, 16 aa, Homo sapiens
  CDR3 for alpha chain variable domain of TCR clone 364456 (TRAV27, TRAJ52)
CAGAGAGGTSYGKLTF

SEQ ID NO: 728912 - protein, 17 aa, Homo sapiens
  CDR3 for beta chain variable domain of TCR clone 364456 (TRBV24-1, TRBJ2-3)
CATSDLPSGEHTDTQYF

SEQ ID NO: 728913 - protein, 16 aa, Homo sapiens
  CDR3 for alpha chain variable domain of TCR clone 364457 (TRAV4, TRAJ9)
CLVGDPNRPGGFKTIF

SEQ ID NO: 728914 - protein, 14 aa, Homo sapiens
  CDR3 for beta chain variable domain of TCR clone 364457 (TRBV7-2, TRBJ2-7)
CASRSQGAAYEQYF

SEQ ID NO: 728915 - protein, 13 aa, Homo sapiens
  CDR3 for alpha chain variable domain of TCR clone 364458 (TRAV12-3, TRAJ7)
CAMSASGNNRLAF

SEQ ID NO: 728916 - protein, 15 aa, Homo sapiens
  CDR3 for beta chain variable domain of TCR clone 364458 (TRBV6-6, TRBJ2-7)
CASSYSYGGSYEQYF

SEQ ID NO: 728917 - protein, 15 aa, Homo sapiens
  CDR3 for alpha chain variable domain of TCR clone 364459 (TRAV2, TRAJ9)
CAVEDRGTGGFKTIF

SEQ ID NO: 728918 - protein, 16 aa, Homo sapiens
  CDR3 for beta chain variable domain of TCR clone 364459 (TRBV7-2, TRBJ2-5)
CASSYKTGISLETQYF

SEQ ID NO: 728919 - protein, 11 aa, Homo sapiens
  CDR3 for alpha chain variable domain of TCR clone 364460 (TRAV3, TRAJ17)
PRGAAGNKLTF

SEQ ID NO: 728920 - protein, 12 aa, Homo sapiens
  CDR3 for beta chain variable domain of TCR clone 364460 (TRBV11-2, TRBJ2-2)
CASSLGGGELFF

SEQ ID NO: 728921 - protein, 11 aa, Homo sapiens
  CDR3 for alpha chain variable domain of TCR clone 364461 (TRAV3, TRAJ21)
CAVGNFNKFYF

SEQ ID NO: 728922 - protein, 16 aa, Homo sapiens
  CDR3 for beta chain variable domain of TCR clone 364461 (TRBV19, TRBJ2-1)
CASSKAGPSAYSEQFF

SEQ ID NO: 728923 - protein, 13 aa, Homo sapiens
  CDR3 for alpha chain variable domain of TCR clone 364462 (TRAV21, TRAJ27)
CAARPGNAGQSTF

SEQ ID NO: 728924 - protein, 16 aa, Homo sapiens
  CDR3 for beta chain variable domain of TCR clone 364462 (TRBV20-1, TRBJ1-2)
CSASMGQGVANYGYTF

SEQ ID NO: 728925 - protein, 17 aa, Homo sapiens
  CDR3 for alpha chain variable domain of TCR clone 364463 (TRAV12-2, TRAJ4)
CAVNVRPVSGGYNKLIF

SEQ ID NO: 728926 - protein, 17 aa, Homo sapiens
  CDR3 for beta chain variable domain of TCR clone 364463 (TRBV6-3, TRBJ2-1)
CASSYSSGTRGLDEQYF

SEQ ID NO: 728927 - protein, 14 aa, Homo sapiens
  CDR3 for alpha chain variable domain of TCR clone 364464 (TRAV12-2, TRAJ13)
CAVKKTGGYQKVNF

SEQ ID NO: 728928 - protein, 13 aa, Homo sapiens
  CDR3 for beta chain variable domain of TCR clone 364464 (TRBV20-1, TRBJ1-1)
CSARGGGNTEAFF

SEQ ID NO: 728929 - protein, 13 aa, Homo sapiens
  CDR3 for alpha chain variable domain of TCR clone 364465 (TRAV12-3, TRAJ13)
CAMTSGGYQIVTF

SEQ ID NO: 728930 - protein, 13 aa, Homo sapiens
  CDR3 for beta chain variable domain of TCR clone 364465 (TRBV7-9, TRBJ1-2)
CASSLKQNYGYTF

SEQ ID NO: 728931 - protein, 18 aa, Homo sapiens
  CDR3 for alpha chain variable domain of TCR clone 364466 (TRAV21, TRAJ13)
CAVPRSFWGLPESYLWIW

SEQ ID NO: 728932 - protein, 15 aa, Homo sapiens
  CDR3 for beta chain variable domain of TCR clone 364466 (TRBV7-9, TRBJ1-6)
CASGSPGRGNSPLHF

SEQ ID NO: 728933 - protein, 16 aa, Homo sapiens
  CDR3 for alpha chain variable domain of TCR clone 364467 (TRAV25, TRAJ24)
CAQRRGTTDSGGKLQF

SEQ ID NO: 728934 - protein, 14 aa, Homo sapiens
  CDR3 for beta chain variable domain of TCR clone 364467 (TRBV6-6, TRBJ1-5)
CASSYGPANQPQHF

SEQ ID NO: 728935 - protein, 13 aa, Homo sapiens
  CDR3 for alpha chain variable domain of TCR clone 364468 (TRAV22, TRAJ58)
CAVTETSGSRLTF

SEQ ID NO: 728936 - protein, 15 aa, Homo sapiens
  CDR3 for beta chain variable domain of TCR clone 364468 (TRBV27, TRBJ2-1)
CASSNGGGSSNEQFF

SEQ ID NO: 728937 - protein, 13 aa, Homo sapiens
  CDR3 for alpha chain variable domain of TCR clone 364469 (TRAV3, TRAJ3)
CAVADSSASQIIF

SEQ ID NO: 728938 - protein, 16 aa, Homo sapiens
  CDR3 for beta chain variable domain of TCR clone 364469 (TRBV5-1, TRBJ2-3)
CASSLGLAVYTDTQYF

SEQ ID NO: 728939 - protein, 17 aa, Homo sapiens
  CDR3 for alpha chain variable domain of TCR clone 364470 (TRAV22, TRAJ53)
CAVEFSNSGGSNYKLTF

SEQ ID NO: 728940 - protein, 12 aa, Homo sapiens
  CDR3 for beta chain variable domain of TCR clone 364470 (TRBV11-2, TRBJ2-2)
CASSLGGGELFF

SEQ ID NO: 728941 - protein, 14 aa, Homo sapiens
  CDR3 for alpha chain variable domain of TCR clone 364471 (TRAV4, TRAJ17)
CLVGDMAAGNKLTF

SEQ ID NO: 728942 - protein, 15 aa, Homo sapiens
  CDR3 for beta chain variable domain of TCR clone 364471 (TRBV5-1, TRBJ2-1)
CASSPPRAPYNEQFF

SEQ ID NO: 728943 - protein, 12 aa, Homo sapiens
  CDR3 for alpha chain variable domain of TCR clone 364472 (TRAV21, TRAJ15)
CAVNQAGTALIF

SEQ ID NO: 728944 - protein, 13 aa, Homo sapiens
  CDR3 for beta chain variable domain of TCR clone 364472 (TRBV11-2, TRBJ2-5)
CASSSTGEETQYF

SEQ ID NO: 728945 - protein, 14 aa, Homo sapiens
  CDR3 for alpha chain variable domain of TCR clone 364473 (TRAV16, TRAJ15)
CALSFNQAGTALIF

SEQ ID NO: 728946 - protein, 15 aa, Homo sapiens
  CDR3 for beta chain variable domain of TCR clone 364473 (TRBV9, TRBJ2-7)
CPQRRTYRSPYEQYF

SEQ ID NO: 728947 - protein, 13 aa, Homo sapiens
  CDR3 for alpha chain variable domain of TCR clone 364474 (TRAV35, TRAJ33)
CAGLMDSNYQLIW

SEQ ID NO: 728948 - protein, 14 aa, Homo sapiens
  CDR3 for beta chain variable domain of TCR clone 364474 (TRBV20-1, TRBJ1-2)
CSASEQGAVYGYTF

SEQ ID NO: 728949 - protein, 14 aa, Homo sapiens
  CDR3 for alpha chain variable domain of TCR clone 364475 (TRAV12-2, TRAJ53)
CAVKGGGSNYKLTF

SEQ ID NO: 728950 - protein, 13 aa, Homo sapiens
  CDR3 for beta chain variable domain of TCR clone 364475 (TRBV19, TRBJ2-7)
CASSPRQPYEQYF

SEQ ID NO: 728951 - protein, 11 aa, Homo sapiens
  CDR3 for alpha chain variable domain of TCR clone 364476 (TRAV23/DV6, TRAJ58)
CAARLLRGETS

SEQ ID NO: 728952 - protein, 13 aa, Homo sapiens
  CDR3 for beta chain variable domain of TCR clone 364476 (TRBV6-4, TRBJ1-5)
CARSADLNQPQHF

SEQ ID NO: 728953 - protein, 11 aa, Homo sapiens
  CDR3 for alpha chain variable domain of TCR clone 364477 (TRAV3, TRAJ21)
CAVCNFNKFYF

SEQ ID NO: 728954 - protein, 14 aa, Homo sapiens
  CDR3 for beta chain variable domain of TCR clone 364477 (TRBV12-5, TRBJ2-5)
CASGSRTHQETQYF

SEQ ID NO: 728955 - protein, 11 aa, Homo sapiens
  CDR3 for alpha chain variable domain of TCR clone 364478 (TRAV1-1, TRAJ23)
CALRQGGKLIF

SEQ ID NO: 728956 - protein, 20 aa, Homo sapiens
  CDR3 for beta chain variable domain of TCR clone 364478 (TRBV7-8, TRBJ2-2)
CASGHLFPGPTIHITGELFF

SEQ ID NO: 728957 - protein, 12 aa, Homo sapiens
  CDR3 for alpha chain variable domain of TCR clone 364479 (TRAV16, TRAJ39)
CSPGNAGNMLTF

SEQ ID NO: 728958 - protein, 15 aa, Homo sapiens
  CDR3 for beta chain variable domain of TCR clone 364479 (TRBV20-1, TRBJ2-7)
CSARDRVSGMDEQYF

SEQ ID NO: 728959 - protein, 15 aa, Homo sapiens
  CDR3 for alpha chain variable domain of TCR clone 364480 (TRAV12-3, TRAJ6)
CAKSATSGGSYIPTF

SEQ ID NO: 728960 - protein, 13 aa, Homo sapiens
  CDR3 for beta chain variable domain of TCR clone 364480 (TRBV7-9, TRBJ1-2)
CASSLKQNYGYTF

SEQ ID NO: 728961 - protein, 13 aa, Homo sapiens
  CDR3 for alpha chain variable domain of TCR clone 364481 (TRAV27, TRAJ3)
ASLRGSSASKIIF

SEQ ID NO: 728962 - protein, 17 aa, Homo sapiens
  CDR3 for beta chain variable domain of TCR clone 364481 (TRBV11-2, TRBJ2-6)
CASSQRDIFSGANVLTF

SEQ ID NO: 728963 - protein, 17 aa, Homo sapiens
  CDR3 for alpha chain variable domain of TCR clone 364482 (TRAV3, TRAJ6)
CAVRDGPRAGGSYIPTF

SEQ ID NO: 728964 - protein, 13 aa, Homo sapiens
  CDR3 for beta chain variable domain of TCR clone 364482 (TRBV7-2, TRBJ2-7)
CASSLDKLYEQYF

SEQ ID NO: 728965 - protein, 15 aa, Homo sapiens
  CDR3 for alpha chain variable domain of TCR clone 364483 (TRAV35, TRAJ50)
CAGQLRKTSYDKVLF

SEQ ID NO: 728966 - protein, 12 aa, Homo sapiens
  CDR3 for beta chain variable domain of TCR clone 364483 (TRBV5-1, TRBJ2-5)
CAGSLGLETQYF

SEQ ID NO: 728967 - protein, 15 aa, Homo sapiens
  CDR3 for alpha chain variable domain of TCR clone 364484 (TRAV12-3, TRAJ6)
CAMSATTGGSYIPTF

SEQ ID NO: 728968 - protein, 13 aa, Homo sapiens
  CDR3 for beta chain variable domain of TCR clone 364484 (TRBV6-3, TRBJ2-7)
CASRFSGGYEQYF

SEQ ID NO: 728969 - protein, 14 aa, Homo sapiens
  CDR3 for alpha chain variable domain of TCR clone 364485 (TRAV38-1, TRAJ40)
CALRPTSGTYKYIF

SEQ ID NO: 728970 - protein, 13 aa, Homo sapiens
  CDR3 for beta chain variable domain of TCR clone 364485 (TRBV19, TRBJ1-3)
CASRLSLGNTIYF

SEQ ID NO: 728971 - protein, 14 aa, Homo sapiens
  CDR3 for alpha chain variable domain of TCR clone 364486 (TRAV1-2, TRAJ16)
CAVNRFSYGQKLLF

SEQ ID NO: 728972 - protein, 13 aa, Homo sapiens
  CDR3 for beta chain variable domain of TCR clone 364486 (TRBV20-1, TRBJ2-1)
CSAHGSSYNEQFF

SEQ ID NO: 728973 - protein, 15 aa, Homo sapiens
  CDR3 for alpha chain variable domain of TCR clone 364487 (TRAV26-1, TRAJ42)
FIVRVKGGSQGNLIF

SEQ ID NO: 728974 - protein, 14 aa, Homo sapiens
  CDR3 for beta chain variable domain of TCR clone 364487 (TRBV19, TRBJ2-2)
CATTGHANTGELLF

SEQ ID NO: 728975 - protein, 18 aa, Homo sapiens
  CDR3 for alpha chain variable domain of TCR clone 364488 (TRAV16, TRAJ26)
CALSGPEFCLWSRNQIVR

SEQ ID NO: 728976 - protein, 12 aa, Homo sapiens
  CDR3 for beta chain variable domain of TCR clone 364488 (TRBV11-2, TRBJ2-1)
CASSPGNNEQFF

SEQ ID NO: 728977 - protein, 14 aa, Homo sapiens
  CDR3 for alpha chain variable domain of TCR clone 364489 (TRAV8-4, TRAJ9)
CAVRINTGGFKTIF

SEQ ID NO: 728978 - protein, 13 aa, Homo sapiens
  CDR3 for beta chain variable domain of TCR clone 364489 (TRBV4-2, TRBJ1-1)
CASSQAGNTEAFF

SEQ ID NO: 728979 - protein, 13 aa, Homo sapiens
  CDR3 for alpha chain variable domain of TCR clone 364490 (TRAV8-3, TRAJ28)
CAVGGLGVTNSLS

SEQ ID NO: 728980 - protein, 14 aa, Homo sapiens
  CDR3 for beta chain variable domain of TCR clone 364490 (TRBV7-2, TRBJ2-7)
CASRSQGAAYEQYF

SEQ ID NO: 728981 - protein, 13 aa, Homo sapiens
  CDR3 for alpha chain variable domain of TCR clone 364491 (TRAV29/DV5, TRAJ31)
CAASRNKNARLLF

SEQ ID NO: 728982 - protein, 12 aa, Homo sapiens
  CDR3 for beta chain variable domain of TCR clone 364491 (TRBV14, TRBJ2-7)
CASSLYKDEQYF

SEQ ID NO: 728983 - protein, 11 aa, Homo sapiens
  CDR3 for alpha chain variable domain of TCR clone 364492 (TRAV1-2, TRAJ20)
CAVANDYKLSL

SEQ ID NO: 728984 - protein, 18 aa, Homo sapiens
  CDR3 for beta chain variable domain of TCR clone 364492 (TRBV20-1, TRBJ2-6)
CSAETTPTHVSGANVLTF

SEQ ID NO: 728985 - protein, 16 aa, Homo sapiens
  CDR3 for alpha chain variable domain of TCR clone 364493 (TRAV8-3, TRAJ10)
CAVGPILTGGGNELTF

SEQ ID NO: 728986 - protein, 16 aa, Homo sapiens
  CDR3 for beta chain variable domain of TCR clone 364493 (TRBV7-2, TRBJ2-5)
CASSSKWLSGQETQYF

SEQ ID NO: 728987 - protein, 10 aa, Homo sapiens
  CDR3 for alpha chain variable domain of TCR clone 364494 (TRAV26-2, TRAJ49)
CILLGHQFYF

SEQ ID NO: 728988 - protein, 13 aa, Homo sapiens
  CDR3 for beta chain variable domain of TCR clone 364494 (TRBV20-1, TRBJ2-7)
CSSDPGATYEQYF

SEQ ID NO: 728989 - protein, 13 aa, Homo sapiens
  CDR3 for alpha chain variable domain of TCR clone 364495 (TRAV12-2, TRAJ20)
CAVYPSNDYKLSF

SEQ ID NO: 728990 - protein, 15 aa, Homo sapiens
  CDR3 for beta chain variable domain of TCR clone 364495 (TRBV28, TRBJ2-5)
CASSPGQGSIETQYF

SEQ ID NO: 728991 - protein, 14 aa, Homo sapiens
  CDR3 for alpha chain variable domain of TCR clone 364496 (TRAV12-2, TRAJ13)
CAVKKTGGYQKVTF

SEQ ID NO: 728992 - protein, 14 aa, Homo sapiens
  CDR3 for beta chain variable domain of TCR clone 364496 (TRBV15, TRBJ2-5)
CATSRVSVRETQYF

SEQ ID NO: 728993 - protein, 16 aa, Homo sapiens
  CDR3 for alpha chain variable domain of TCR clone 364497 (TRAV30, TRAJ24)
CGTEILDADSWGKFQF

SEQ ID NO: 728994 - protein, 17 aa, Homo sapiens
  CDR3 for beta chain variable domain of TCR clone 364497 (TRBV7-2, TRBJ2-7)
CASSPFGSSGPSPEQYF

SEQ ID NO: 728995 - protein, 11 aa, Homo sapiens
  CDR3 for alpha chain variable domain of TCR clone 364498 (TRAV2, TRAJ33)
CAVDSNYQLIW

SEQ ID NO: 728996 - protein, 17 aa, Homo sapiens
  CDR3 for beta chain variable domain of TCR clone 364498 (TRBV28, TRBJ2-1)
CASSFPLTSGKANEQFF

SEQ ID NO: 728997 - protein, 16 aa, Homo sapiens
  CDR3 for alpha chain variable domain of TCR clone 364499 (TRAV8-3, TRAJ44)
CAVGPFIYGTASKLTF

SEQ ID NO: 728998 - protein, 19 aa, Homo sapiens
  CDR3 for beta chain variable domain of TCR clone 364499 (TRBV11-2, TRBJ2-2)
LRTRPCISVPAAYPGSCFF

SEQ ID NO: 728999 - protein, 14 aa, Homo sapiens
  CDR3 for alpha chain variable domain of TCR clone 364500 (TRAV13-1, TRAJ44)
CAAKATGTASKLPF

SEQ ID NO: 729000 - protein, 14 aa, Homo sapiens
  CDR3 for beta chain variable domain of TCR clone 364500 (TRBV19, TRBJ2-2)
CASSTLHRSGELFF

SEQ ID NO: 729001 - protein, 13 aa, Homo sapiens
  CDR3 for alpha chain variable domain of TCR clone 364501 (TRAV12-2, TRAJ47)
CSVFMEYGNKLVF

SEQ ID NO: 729002 - protein, 14 aa, Homo sapiens
  CDR3 for beta chain variable domain of TCR clone 364501 (TRBV4-1, TRBJ1-5)
CASSQGPTNQPQHF

SEQ ID NO: 729003 - protein, 12 aa, Homo sapiens
  CDR3 for alpha chain variable domain of TCR clone 364502 (TRAV16, TRAJ13)
CITLRGYQKVTF

SEQ ID NO: 729004 - protein, 17 aa, Homo sapiens
  CDR3 for beta chain variable domain of TCR clone 364502 (TRBV11-2, TRBJ2-1)
CASSLYPPGVEYNEQFF

SEQ ID NO: 729005 - protein, 16 aa, Homo sapiens
  CDR3 for alpha chain variable domain of TCR clone 364503 (TRAV8-1, TRAJ42)
CAVTSRYGGSQGNLIF

SEQ ID NO: 729006 - protein, 14 aa, Homo sapiens
  CDR3 for beta chain variable domain of TCR clone 364503 (TRBV5-7, TRBJ1-1)
CASSLAGDWTEAFF

SEQ ID NO: 729007 - protein, 12 aa, Homo sapiens
  CDR3 for alpha chain variable domain of TCR clone 364504 (TRAV26-1, TRAJ26)
CIVFIYGQNFVF

SEQ ID NO: 729008 - protein, 13 aa, Homo sapiens
  CDR3 for beta chain variable domain of TCR clone 364504 (TRBV27, TRBJ1-1)
CASSLSMGAEAFF

SEQ ID NO: 729009 - protein, 18 aa, Homo sapiens
  CDR3 for alpha chain variable domain of TCR clone 364505 (TRAV13-1, TRAJ52)
CSAKNPNAGGTSYGKLTF

SEQ ID NO: 729010 - protein, 15 aa, Homo sapiens
  CDR3 for beta chain variable domain of TCR clone 364505 (TRBV9, TRBJ1-6)
CASSVAGTGDSPLHF

SEQ ID NO: 729011 - protein, 12 aa, Homo sapiens
  CDR3 for alpha chain variable domain of TCR clone 364506 (TRAV12-3, TRAJ40)
YAMSSGTYKYIF

SEQ ID NO: 729012 - protein, 16 aa, Homo sapiens
  CDR3 for beta chain variable domain of TCR clone 364506 (TRBV7-3, TRBJ2-2)
CASSLKRGTLSGELFF

SEQ ID NO: 729013 - protein, 16 aa, Homo sapiens
  CDR3 for alpha chain variable domain of TCR clone 364507 (TRAV1-2, TRAJ10)
CAVRGVLTGGGNKPTF

SEQ ID NO: 729014 - protein, 15 aa, Homo sapiens
  CDR3 for beta chain variable domain of TCR clone 364507 (TRBV7-9, TRBJ1-6)
CASSSPGRGNSPLHF

SEQ ID NO: 729015 - protein, 14 aa, Homo sapiens
  CDR3 for alpha chain variable domain of TCR clone 364508 (TRAV1-2, TRAJ16)
CAVNRFSDGQKLLF

SEQ ID NO: 729016 - protein, 15 aa, Homo sapiens
  CDR3 for beta chain variable domain of TCR clone 364508 (TRBV11-3, TRBJ2-3)
CASLKDGQEGDTQYF

SEQ ID NO: 729017 - protein, 12 aa, Homo sapiens
  CDR3 for alpha chain variable domain of TCR clone 364509 (TRAV21, TRAJ31)
CVLAGDNARLMF

SEQ ID NO: 729018 - protein, 17 aa, Homo sapiens
  CDR3 for beta chain variable domain of TCR clone 364509 (TRBV7-8, TRBJ2-6)
CASSAGTGGAGANVLTF

SEQ ID NO: 729019 - protein, 15 aa, Homo sapiens
  CDR3 for alpha chain variable domain of TCR clone 364510 (TRAV2, TRAJ15)
CAVEDRNQAGTALIF

SEQ ID NO: 729020 - protein, 13 aa, Homo sapiens
  CDR3 for beta chain variable domain of TCR clone 364510 (TRBV10-2, TRBJ2-1)
CASGAGGDAKQFF

SEQ ID NO: 729021 - protein, 15 aa, Homo sapiens
  CDR3 for alpha chain variable domain of TCR clone 364511 (TRAV13-1, TRAJ57)
CAASTTQGGSEKLVF

SEQ ID NO: 729022 - protein, 16 aa, Homo sapiens
  CDR3 for beta chain variable domain of TCR clone 364511 (TRBV19, TRBJ2-1)
CASSKAGPSSHNEQFF

SEQ ID NO: 729023 - protein, 15 aa, Homo sapiens
  CDR3 for alpha chain variable domain of TCR clone 364512 (TRAV2, TRAJ9)
CAVAALNTGVFKTTF

SEQ ID NO: 729024 - protein, 15 aa, Homo sapiens
  CDR3 for beta chain variable domain of TCR clone 364512 (TRBV7-8, TRBJ2-1)
CASSLAGGLYNEQFF

SEQ ID NO: 729025 - protein, 17 aa, Homo sapiens
  CDR3 for alpha chain variable domain of TCR clone 364513 (TRAV26-1, TRAJ22)
CIVRVPSHSGSAMQLTF

SEQ ID NO: 729026 - protein, 16 aa, Homo sapiens
  CDR3 for beta chain variable domain of TCR clone 364513 (TRBV28, TRBJ2-1)
CASRRSGRVVGNEQFF

SEQ ID NO: 729027 - protein, 21 aa, Homo sapiens
  CDR3 for alpha chain variable domain of TCR clone 364514 (TRAV25, TRAJ47)
TATQTTEVGTYFWEYGNKLVF

SEQ ID NO: 729028 - protein, 16 aa, Homo sapiens
  CDR3 for beta chain variable domain of TCR clone 364514 (TRBV6-6, TRBJ2-1)
CASSWGGQGPYNEQFF

SEQ ID NO: 729029 - protein, 13 aa, Homo sapiens
  CDR3 for alpha chain variable domain of TCR clone 364515 (TRAV12-2, TRAJ20)
CAVYPSNDYKLSF

SEQ ID NO: 729030 - protein, 15 aa, Homo sapiens
  CDR3 for beta chain variable domain of TCR clone 364515 (TRBV27, TRBJ2-5)
CASSLYPRGCETQYF

SEQ ID NO: 729031 - protein, 10 aa, Homo sapiens
  CDR3 for alpha chain variable domain of TCR clone 364516 (TRAV12-1, TRAJ37)
ARGNTGKLLF

SEQ ID NO: 729032 - protein, 15 aa, Homo sapiens
  CDR3 for beta chain variable domain of TCR clone 364516 (TRBV7-2, TRBJ2-3)
CASSLEQGGTDTQYF

SEQ ID NO: 729033 - protein, 13 aa, Homo sapiens
  CDR3 for alpha chain variable domain of TCR clone 364517 (TRAV8-3, TRAJ28)
CAVGAVGSYQLTF

SEQ ID NO: 729034 - protein, 12 aa, Homo sapiens
  CDR3 for beta chain variable domain of TCR clone 364517 (TRBV12-4, TRBJ2-1)
CASSPGRNEQFF

SEQ ID NO: 729035 - protein, 15 aa, Homo sapiens
  CDR3 for alpha chain variable domain of TCR clone 364518 (TRAV23/DV6, TRAJ12)
CAAIDLGAMDSSYKL

SEQ ID NO: 729036 - protein, 12 aa, Homo sapiens
  CDR3 for beta chain variable domain of TCR clone 364518 (TRBV10-3, TRBJ2-2)
CAIRENTGELFL

SEQ ID NO: 729037 - protein, 10 aa, Homo sapiens
  CDR3 for alpha chain variable domain of TCR clone 364519 (TRAV27, TRAJ49)
CVVPVTSSSL

SEQ ID NO: 729038 - protein, 14 aa, Homo sapiens
  CDR3 for beta chain variable domain of TCR clone 364519 (TRBV7-2, TRBJ2-2)
CASSSDGHTGELFF

SEQ ID NO: 729039 - protein, 15 aa, Homo sapiens
  CDR3 for alpha chain variable domain of TCR clone 364520 (TRAV17, TRAJ57)
CATGPSQGGSEKLVF

SEQ ID NO: 729040 - protein, 16 aa, Homo sapiens
  CDR3 for beta chain variable domain of TCR clone 364520 (TRBV12-4, TRBJ1-5)
CASSRPVGVANQPQHF

SEQ ID NO: 729041 - protein, 17 aa, Homo sapiens
  CDR3 for alpha chain variable domain of TCR clone 364521 (TRAV23/DV6, TRAJ58)
CAARLLRGETSGSRMTF

SEQ ID NO: 729042 - protein, 14 aa, Homo sapiens
  CDR3 for beta chain variable domain of TCR clone 364521 (TRBV7-3, TRBJ2-1)
CASSLAGGTNEQFF

SEQ ID NO: 729043 - protein, 14 aa, Homo sapiens
  CDR3 for alpha chain variable domain of TCR clone 364522 (TRAV29/DV5, TRAJ36)
CAARRKTGANNLFF

SEQ ID NO: 729044 - protein, 15 aa, Homo sapiens
  CDR3 for beta chain variable domain of TCR clone 364522 (TRBV19, TRBJ1-6)
CARSTQGAVGSPLHF

SEQ ID NO: 729045 - protein, 14 aa, Homo sapiens
  CDR3 for alpha chain variable domain of TCR clone 364523 (TRAV26-1, TRAJ34)
CIVRVAYKTDTLIF

SEQ ID NO: 729046 - protein, 15 aa, Homo sapiens
  CDR3 for beta chain variable domain of TCR clone 364523 (TRBV7-2, TRBJ2-1)
CASSSGLAGGNEQFF

SEQ ID NO: 729047 - protein, 13 aa, Homo sapiens
  CDR3 for alpha chain variable domain of TCR clone 364524 (TRAV12-3, TRAJ7)
CAMTPYGNNRLAF

SEQ ID NO: 729048 - protein, 19 aa, Homo sapiens
  CDR3 for beta chain variable domain of TCR clone 364524 (TRBV7-8, TRBJ2-1)
CASSLTSGRARGSYNEQSF

SEQ ID NO: 729049 - protein, 14 aa, Homo sapiens
  CDR3 for alpha chain variable domain of TCR clone 364525 (TRAV1-2, TRAJ16)
CAVNRFSDGQKLLF

SEQ ID NO: 729050 - protein, 14 aa, Homo sapiens
  CDR3 for beta chain variable domain of TCR clone 364525 (TRBV5-1, TRBJ1-5)
CASSLGQGAQPQHC

SEQ ID NO: 729051 - protein, 14 aa, Homo sapiens
  CDR3 for alpha chain variable domain of TCR clone 364526 (TRAV16, TRAJ17)
CAPRIKAAGNKLTF

SEQ ID NO: 729052 - protein, 11 aa, Homo sapiens
  CDR3 for beta chain variable domain of TCR clone 364526 (TRBV4-1, TRBJ2-2)
CASEHTGELFF

SEQ ID NO: 729053 - protein, 12 aa, Homo sapiens
  CDR3 for alpha chain variable domain of TCR clone 364527 (TRAV13-1, TRAJ9)
CASHTGGFKTIF

SEQ ID NO: 729054 - protein, 18 aa, Homo sapiens
  CDR3 for beta chain variable domain of TCR clone 364527 (TRBV11-2, TRBJ2-3)
CASSVGGVSRGAPNTQYF

SEQ ID NO: 729055 - protein, 12 aa, Homo sapiens
  CDR3 for alpha chain variable domain of TCR clone 364528 (TRAV20, TRAJ39)
CAVGNAGNMLTF

SEQ ID NO: 729056 - protein, 16 aa, Homo sapiens
  CDR3 for beta chain variable domain of TCR clone 364528 (TRBV15, TRBJ1-2)
CATSRGPRTGGGGYTL

SEQ ID NO: 729057 - protein, 15 aa, Homo sapiens
  CDR3 for alpha chain variable domain of TCR clone 364529 (TRAV21, TRAJ45)
CAVSYSGGGADGLTF

SEQ ID NO: 729058 - protein, 17 aa, Homo sapiens
  CDR3 for beta chain variable domain of TCR clone 364529 (TRBV13, TRBJ2-3)
CASSLSRVAGGRNTQYF

SEQ ID NO: 729059 - protein, 16 aa, Homo sapiens
  CDR3 for alpha chain variable domain of TCR clone 364530 (TRAV30, TRAJ24)
CGTEIVDADSWGKFQF

SEQ ID NO: 729060 - protein, 15 aa, Homo sapiens
  CDR3 for beta chain variable domain of TCR clone 364530 (TRBV5-1, TRBJ2-1)
GASSPPRALYNEQFF

SEQ ID NO: 729061 - protein, 18 aa, Homo sapiens
  CDR3 for alpha chain variable domain of TCR clone 364531 (TRAV21, TRAJ52)
YAVRPSPAGGTSYGKLTF

SEQ ID NO: 729062 - protein, 14 aa, Homo sapiens
  CDR3 for beta chain variable domain of TCR clone 364531 (TRBV4-1, TRBJ2-2)
CASSQAVNTGELFF

SEQ ID NO: 729063 - protein, 16 aa, Homo sapiens
  CDR3 for alpha chain variable domain of TCR clone 364532 (TRAV27, TRAJ13)
CAGAKIDSGGYQKVTF

SEQ ID NO: 729064 - protein, 15 aa, Homo sapiens
  CDR3 for beta chain variable domain of TCR clone 364532 (TRBV29-1, TRBJ2-1)
CSVGRHALFYNEQFF

SEQ ID NO: 729065 - protein, 14 aa, Homo sapiens
  CDR3 for alpha chain variable domain of TCR clone 364533 (TRAV12-2, TRAJ9)
CAVNLNTGGFNTIF

SEQ ID NO: 729066 - protein, 17 aa, Homo sapiens
  CDR3 for beta chain variable domain of TCR clone 364533 (TRBV20-1, TRBJ2-2)
CSASRQVGQGYTGELFS

SEQ ID NO: 729067 - protein, 12 aa, Homo sapiens
  CDR3 for alpha chain variable domain of TCR clone 364534 (TRAV29/DV5, TRAJ15)
CASNQAGTALIF

SEQ ID NO: 729068 - protein, 15 aa, Homo sapiens
  CDR3 for beta chain variable domain of TCR clone 364534 (TRBV18, TRBJ2-2)
CASSPTDDSSGELFF

SEQ ID NO: 729069 - protein, 11 aa, Homo sapiens
  CDR3 for alpha chain variable domain of TCR clone 364535 (TRAV12-3, TRAJ43)
CPMSVSNDMRF

SEQ ID NO: 729070 - protein, 13 aa, Homo sapiens
  CDR3 for beta chain variable domain of TCR clone 364535 (TRBV20-1, TRBJ1-1)
CSAPLGGGTEAFF

SEQ ID NO: 729071 - protein, 15 aa, Homo sapiens
  CDR3 for alpha chain variable domain of TCR clone 364536 (TRAV12-2, TRAJ43)
CAFDMRFGAGTRLTV

SEQ ID NO: 729072 - protein, 14 aa, Homo sapiens
  CDR3 for beta chain variable domain of TCR clone 364536 (TRBV7-2, TRBJ1-2)
CASSQTGSTYGYTF

SEQ ID NO: 729073 - protein, 17 aa, Homo sapiens
  CDR3 for alpha chain variable domain of TCR clone 364537 (TRAV26-1, TRAJ28)
CIVRALYSGAGSYQLSF

SEQ ID NO: 729074 - protein, 12 aa, Homo sapiens
  CDR3 for beta chain variable domain of TCR clone 364537 (TRBV12-4, TRBJ2-1)
CASRQTENEQFF

SEQ ID NO: 729075 - protein, 16 aa, Homo sapiens
  CDR3 for alpha chain variable domain of TCR clone 364538 (TRAV26-1, TRAJ37)
CIVRGDGSGNTGKLIF

SEQ ID NO: 729076 - protein, 16 aa, Homo sapiens
  CDR3 for beta chain variable domain of TCR clone 364538 (TRBV12-5, TRBJ2-5)
CASGPRTSGNQETQYF

SEQ ID NO: 729077 - protein, 14 aa, Homo sapiens
  CDR3 for alpha chain variable domain of TCR clone 364539 (TRAV4, TRAJ6)
CLVGEAGGSYVPTF

SEQ ID NO: 729078 - protein, 17 aa, Homo sapiens
  CDR3 for beta chain variable domain of TCR clone 364539 (TRBV7-2, TRBJ2-3)
CASSLAGGLAGTAGQYF

SEQ ID NO: 729079 - protein, 13 aa, Homo sapiens
  CDR3 for alpha chain variable domain of TCR clone 364540 (TRAV27, TRAJ11)
CAGARSGYSTLTF

SEQ ID NO: 729080 - protein, 17 aa, Homo sapiens
  CDR3 for beta chain variable domain of TCR clone 364540 (TRBV4-3, TRBJ2-2)
CASSQDTSARSPGELFF

SEQ ID NO: 729081 - protein, 17 aa, Homo sapiens
  CDR3 for alpha chain variable domain of TCR clone 364541 (TRAV13-1, TRAJ52)
CAASSGAGGTSYGKLTF

SEQ ID NO: 729082 - protein, 15 aa, Homo sapiens
  CDR3 for beta chain variable domain of TCR clone 364541 (TRBV2, TRBJ2-1)
CARGELAGSYNEQFF

SEQ ID NO: 729083 - protein, 14 aa, Homo sapiens
  CDR3 for alpha chain variable domain of TCR clone 364542 (TRAV26-2, TRAJ38)
CIVYNAGNNRKLIW

SEQ ID NO: 729084 - protein, 14 aa, Homo sapiens
  CDR3 for beta chain variable domain of TCR clone 364542 (TRBV19, TRBJ2-1)
CASPTFVLSGEQFF

SEQ ID NO: 729085 - protein, 15 aa, Homo sapiens
  CDR3 for alpha chain variable domain of TCR clone 364543 (TRAV26-1, TRAJ38)
CIVRAEGGNNRKLIW

SEQ ID NO: 729086 - protein, 14 aa, Homo sapiens
  CDR3 for beta chain variable domain of TCR clone 364543 (TRBV7-6, TRBJ2-5)
CASSSPSGSETQYV

SEQ ID NO: 729087 - protein, 15 aa, Homo sapiens
  CDR3 for alpha chain variable domain of TCR clone 364544 (TRAV3, TRAJ4)
CAVRDGTGGYNKLIF

SEQ ID NO: 729088 - protein, 16 aa, Homo sapiens
  CDR3 for beta chain variable domain of TCR clone 364544 (TRBV27, TRBJ2-2)
WASSSSGVSNTGELVF

SEQ ID NO: 729089 - protein, 16 aa, Homo sapiens
  CDR3 for alpha chain variable domain of TCR clone 364545 (TRAV3, TRAJ28)
CAVLPRSGAGSYQLTF

SEQ ID NO: 729090 - protein, 13 aa, Homo sapiens
  CDR3 for beta chain variable domain of TCR clone 364545 (TRBV12-4, TRBJ2-5)
CASRLAVQETQYV

SEQ ID NO: 729091 - protein, 14 aa, Homo sapiens
  CDR3 for alpha chain variable domain of TCR clone 364546 (TRAV23/DV6, TRAJ36)
CAASRRTGANNLVF

SEQ ID NO: 729092 - protein, 14 aa, Homo sapiens
  CDR3 for beta chain variable domain of TCR clone 364546 (TRBV6-1, TRBJ1-2)
CASSDTGASYGYTF

SEQ ID NO: 729093 - protein, 16 aa, Homo sapiens
  CDR3 for alpha chain variable domain of TCR clone 364547 (TRAV38-2/DV8, TRAJ47)
CAYRSAIMEYGNKLVF

SEQ ID NO: 729094 - protein, 17 aa, Homo sapiens
  CDR3 for beta chain variable domain of TCR clone 364547 (TRBV11-2, TRBJ2-1)
CASSLYPPGVEYNEQFF

SEQ ID NO: 729095 - protein, 14 aa, Homo sapiens
  CDR3 for alpha chain variable domain of TCR clone 364548 (TRAV26-1, TRAJ39)
CIVFTNNAGNMLTF

SEQ ID NO: 729096 - protein, 15 aa, Homo sapiens
  CDR3 for beta chain variable domain of TCR clone 364548 (TRBV19, TRBJ2-4)
CASSLTGLTTNIQYF

SEQ ID NO: 729097 - protein, 15 aa, Homo sapiens
  CDR3 for alpha chain variable domain of TCR clone 364549 (TRAV10, TRAJ36)
CVVSALGEGANNLFF

SEQ ID NO: 729098 - protein, 17 aa, Homo sapiens
  CDR3 for beta chain variable domain of TCR clone 364549 (TRBV6-5, TRBJ2-7)
CASSLLPQDMGPYEQYF

SEQ ID NO: 729099 - protein, 11 aa, Homo sapiens
  CDR3 for alpha chain variable domain of TCR clone 364550 (TRAV12-2, TRAJ49)
CAVHTGNQFYF

SEQ ID NO: 729100 - protein, 15 aa, Homo sapiens
  CDR3 for beta chain variable domain of TCR clone 364550 (TRBV4-2, TRBJ1-1)
CASSQQGAGDTDAFF

SEQ ID NO: 729101 - protein, 11 aa, Homo sapiens
  CDR3 for alpha chain variable domain of TCR clone 364551 (TRAV1-2, TRAJ40)
CAVPGTYKYIF

SEQ ID NO: 729102 - protein, 15 aa, Homo sapiens
  CDR3 for beta chain variable domain of TCR clone 364551 (TRBV20-1, TRBJ1-5)
CSAFKNGQRNQPQHF

SEQ ID NO: 729103 - protein, 14 aa, Homo sapiens
  CDR3 for alpha chain variable domain of TCR clone 364552 (TRAV1-2, TRAJ8)
CAVREDTGFQKLVF

SEQ ID NO: 729104 - protein, 13 aa, Homo sapiens
  CDR3 for beta chain variable domain of TCR clone 364552 (TRBV4-1, TRBJ1-1)
CAGSRKMNTEAFF

SEQ ID NO: 729105 - protein, 16 aa, Homo sapiens
  CDR3 for alpha chain variable domain of TCR clone 364553 (TRAV3, TRAJ21)
CAVRDIERGNFSKFYF

SEQ ID NO: 729106 - protein, 18 aa, Homo sapiens
  CDR3 for beta chain variable domain of TCR clone 364553 (TRBV27, TRBJ2-1)
CASGNRAVGVGSKNEQFF

SEQ ID NO: 729107 - protein, 16 aa, Homo sapiens
  CDR3 for alpha chain variable domain of TCR clone 364554 (TRAV12-1, TRAJ18)
CVVNPRGGSTLGRLSF

SEQ ID NO: 729108 - protein, 14 aa, Homo sapiens
  CDR3 for beta chain variable domain of TCR clone 364554 (TRBV27, TRBJ2-1)
CASRPMGQGVEQFF

SEQ ID NO: 729109 - protein, 16 aa, Homo sapiens
  CDR3 for alpha chain variable domain of TCR clone 364555 (TRAV4, TRAJ5)
CLVGPDHGHGPESPYF

SEQ ID NO: 729110 - protein, 15 aa, Homo sapiens
  CDR3 for beta chain variable domain of TCR clone 364555 (TRBV27, TRBJ2-5)
CASSLIPSGGETQYF

SEQ ID NO: 729111 - protein, 18 aa, Homo sapiens
  CDR3 for alpha chain variable domain of TCR clone 364556 (TRAV13-1, TRAJ52)
CAASKRSAGGTSYGKLTF

SEQ ID NO: 729112 - protein, 12 aa, Homo sapiens
  CDR3 for beta chain variable domain of TCR clone 364556 (TRBV20-1, TRBJ2-7)
CSAITPTKEQYF

SEQ ID NO: 729113 - protein, 11 aa, Homo sapiens
  CDR3 for alpha chain variable domain of TCR clone 364557 (TRAV2, TRAJ21)
CAVFNFNKFYF

SEQ ID NO: 729114 - protein, 14 aa, Homo sapiens
  CDR3 for beta chain variable domain of TCR clone 364557 (TRBV6-1, TRBJ1-3)
CASVQWGGGNTIYF

SEQ ID NO: 729115 - protein, 13 aa, Homo sapiens
  CDR3 for alpha chain variable domain of TCR clone 364558 (TRAV16, TRAJ31)
CALSAHNNARLMF

SEQ ID NO: 729116 - protein, 18 aa, Homo sapiens
  CDR3 for beta chain variable domain of TCR clone 364558 (TRBV7-9, TRBJ2-7)
CASSLTTSGSRTWYEQYF

SEQ ID NO: 729117 - protein, 19 aa, Homo sapiens
  CDR3 for alpha chain variable domain of TCR clone 364559 (TRAV1-1, TRAJ13)
CLLLLRCEGESGGCQKVTF

SEQ ID NO: 729118 - protein, 19 aa, Homo sapiens
  CDR3 for beta chain variable domain of TCR clone 364559 (TRBV14, TRBJ2-1)
CASSQDQLWEAPEYNEQFF

SEQ ID NO: 729119 - protein, 15 aa, Homo sapiens
  CDR3 for alpha chain variable domain of TCR clone 364560 (TRAV17, TRAJ22)
CATVAPSGSARQLTF

SEQ ID NO: 729120 - protein, 16 aa, Homo sapiens
  CDR3 for beta chain variable domain of TCR clone 364560 (TRBV10-3, TRBJ2-7)
CGISADFADRPYEQYF

SEQ ID NO: 729121 - protein, 16 aa, Homo sapiens
  CDR3 for alpha chain variable domain of TCR clone 364561 (TRAV13-2, TRAJ37)
CAENIRGFSNTGKLIF

SEQ ID NO: 729122 - protein, 15 aa, Homo sapiens
  CDR3 for beta chain variable domain of TCR clone 364561 (TRBV5-1, TRBJ2-7)
CASSPQGRPLDEQYF

SEQ ID NO: 729123 - protein, 14 aa, Homo sapiens
  CDR3 for alpha chain variable domain of TCR clone 364562 (TRAV12-2, TRAJ48)
CAVNEDFGNEKLTF

SEQ ID NO: 729124 - protein, 15 aa, Homo sapiens
  CDR3 for beta chain variable domain of TCR clone 364562 (TRBV9, TRBJ1-6)
CASSVAGTGDSPLHF

SEQ ID NO: 729125 - protein, 14 aa, Homo sapiens
  CDR3 for alpha chain variable domain of TCR clone 364563 (TRAV8-2, TRAJ45)
CVVSAGGGADGFTF

SEQ ID NO: 729126 - protein, 12 aa, Homo sapiens
  CDR3 for beta chain variable domain of TCR clone 364563 (TRBV12-4, TRBJ2-1)
CASSLVRVEQFF

SEQ ID NO: 729127 - protein, 12 aa, Homo sapiens
  CDR3 for alpha chain variable domain of TCR clone 364564 (TRAV25, TRAJ11)
CAGDSGYSTLTF

SEQ ID NO: 729128 - protein, 14 aa, Homo sapiens
  CDR3 for beta chain variable domain of TCR clone 364564 (TRBV5-8, TRBJ2-3)
CASSLGQGTDTQYF

SEQ ID NO: 729129 - protein, 14 aa, Homo sapiens
  CDR3 for alpha chain variable domain of TCR clone 364565 (TRAV16, TRAJ17)
CALSGRAAGNNLTF

SEQ ID NO: 729130 - protein, 15 aa, Homo sapiens
  CDR3 for beta chain variable domain of TCR clone 364565 (TRBV3-1, TRBJ1-2)
CASSPTRLPEGGYTF

SEQ ID NO: 729131 - protein, 18 aa, Homo sapiens
  CDR3 for alpha chain variable domain of TCR clone 364566 (TRAV1-1, TRAJ31)
CAVRLTMPDSCLEMELSW

SEQ ID NO: 729132 - protein, 13 aa, Homo sapiens
  CDR3 for beta chain variable domain of TCR clone 364566 (TRBV19, TRBJ1-5)
CASSGGRNQPQHF

SEQ ID NO: 729133 - protein, 14 aa, Homo sapiens
  CDR3 for alpha chain variable domain of TCR clone 364567 (TRAV8-4, TRAJ9)
CAVRINTGGFKTIF

SEQ ID NO: 729134 - protein, 16 aa, Homo sapiens
  CDR3 for beta chain variable domain of TCR clone 364567 (TRBV4-1, TRBJ1-3)
CASSQDELLAGNTIYF

SEQ ID NO: 729135 - protein, 14 aa, Homo sapiens
  CDR3 for alpha chain variable domain of TCR clone 364568 (TRAV12-2, TRAJ13)
CAVKKTGGYQKVTF

SEQ ID NO: 729136 - protein, 14 aa, Homo sapiens
  CDR3 for beta chain variable domain of TCR clone 364568 (TRBV5-4, TRBJ2-3)
CASSLRAGTDTQYF

SEQ ID NO: 729137 - protein, 15 aa, Homo sapiens
  CDR3 for alpha chain variable domain of TCR clone 364569 (TRAV29/DV5, TRAJ24)
CAASGATDSWGKFQV

SEQ ID NO: 729138 - protein, 13 aa, Homo sapiens
  CDR3 for beta chain variable domain of TCR clone 364569 (TRBV18, TRBJ2-7)
CASSPGRNYEQYF

SEQ ID NO: 729139 - protein, 16 aa, Homo sapiens
  CDR3 for alpha chain variable domain of TCR clone 364570 (TRAV3, TRAJ37)
CAVRGKGSGNTGKLIV

SEQ ID NO: 729140 - protein, 14 aa, Homo sapiens
  CDR3 for beta chain variable domain of TCR clone 364570 (TRBV7-2, TRBJ2-7)
CASSPKTSFYEQYF

SEQ ID NO: 729141 - protein, 17 aa, Homo sapiens
  CDR3 for alpha chain variable domain of TCR clone 364571 (TRAV26-1, TRAJ37)
CIVRAITVSSNTGKLIF

SEQ ID NO: 729142 - protein, 13 aa, Homo sapiens
  CDR3 for beta chain variable domain of TCR clone 364571 (TRBV7-9, TRBJ1-2)
CASSLKQNYGYTF

SEQ ID NO: 729143 - protein, 13 aa, Homo sapiens
  CDR3 for alpha chain variable domain of TCR clone 364572 (TRAV17, TRAJ9)
CATDYTGGFKTIF

SEQ ID NO: 729144 - protein, 14 aa, Homo sapiens
  CDR3 for beta chain variable domain of TCR clone 364572 (TRBV2, TRBJ2-7)
CASSLPSGGYEQYF

SEQ ID NO: 729145 - protein, 17 aa, Homo sapiens
  CDR3 for alpha chain variable domain of TCR clone 364573 (TRAV26-1, TRAJ28)
CIVRVPDSGPGSYQLTF

SEQ ID NO: 729146 - protein, 17 aa, Homo sapiens
  CDR3 for beta chain variable domain of TCR clone 364573 (TRBV28, TRBJ2-7)
CASSPLPAGGKSYEQYF

SEQ ID NO: 729147 - protein, 16 aa, Homo sapiens
  CDR3 for alpha chain variable domain of TCR clone 364574 (TRAV4, TRAJ18)
CCVLLIGGSTLGRLYF

SEQ ID NO: 729148 - protein, 14 aa, Homo sapiens
  CDR3 for beta chain variable domain of TCR clone 364574 (TRBV5-7, TRBJ2-1)
CASSSVAYYNEQFF

SEQ ID NO: 729149 - protein, 14 aa, Homo sapiens
  CDR3 for alpha chain variable domain of TCR clone 364575 (TRAV14/DV4, TRAJ54)
CAMREAPGAQKLVF

SEQ ID NO: 729150 - protein, 15 aa, Homo sapiens
  CDR3 for beta chain variable domain of TCR clone 364575 (TRBV10-3, TRBJ2-3)
CAISLTSGGTDTQYF

SEQ ID NO: 729151 - protein, 12 aa, Homo sapiens
  CDR3 for alpha chain variable domain of TCR clone 364576 (TRAV30, TRAJ39)
CGRGNAGNMLTF

SEQ ID NO: 729152 - protein, 16 aa, Homo sapiens
  CDR3 for beta chain variable domain of TCR clone 364576 (TRBV4-2, TRBJ2-2)
CASSQDPSGRKGELFF

SEQ ID NO: 729153 - protein, 12 aa, Homo sapiens
  CDR3 for alpha chain variable domain of TCR clone 364577 (TRAV12-1, TRAJ40)
CVFYSGTYKYIF

SEQ ID NO: 729154 - protein, 15 aa, Homo sapiens
  CDR3 for beta chain variable domain of TCR clone 364577 (TRBV11-3, TRBJ2-3)
CASLKDGRGGDTQYF

SEQ ID NO: 729155 - protein, 14 aa, Homo sapiens
  CDR3 for alpha chain variable domain of TCR clone 364578 (TRAV1-2, TRAJ8)
CAVREDTGFQKLVF

SEQ ID NO: 729156 - protein, 15 aa, Homo sapiens
  CDR3 for beta chain variable domain of TCR clone 364578 (TRBV6-3, TRBJ2-7)
CASSAPGTVFYEQDF

SEQ ID NO: 729157 - protein, 13 aa, Homo sapiens
  CDR3 for alpha chain variable domain of TCR clone 364579 (TRAV3, TRAJ21)
CAVREPDFNKFYF

SEQ ID NO: 729158 - protein, 15 aa, Homo sapiens
  CDR3 for beta chain variable domain of TCR clone 364579 (TRBV18, TRBJ1-1)
CASSPRQGENTEAFF

SEQ ID NO: 729159 - protein, 16 aa, Homo sapiens
  CDR3 for alpha chain variable domain of TCR clone 364580 (TRAV3, TRAJ32)
CCEGRNYGGATNKLIF

SEQ ID NO: 729160 - protein, 13 aa, Homo sapiens
  CDR3 for beta chain variable domain of TCR clone 364580 (TRBV2, TRBJ1-1)
CASSEGGNTEAFF

SEQ ID NO: 729161 - protein, 15 aa, Homo sapiens
  CDR3 for alpha chain variable domain of TCR clone 364581 (TRAV12-1, TRAJ44)
CVADLPTGTASKLNF

SEQ ID NO: 729162 - protein, 16 aa, Homo sapiens
  CDR3 for beta chain variable domain of TCR clone 364581 (TRBV12-5, TRBJ2-5)
CASGPRTSGNQETQYF

SEQ ID NO: 729163 - protein, 14 aa, Homo sapiens
  CDR3 for alpha chain variable domain of TCR clone 364582 (TRAV3, TRAJ7)
CAVREEAREQQTRF

SEQ ID NO: 729164 - protein, 12 aa, Homo sapiens
  CDR3 for beta chain variable domain of TCR clone 364582 (TRBV6-3, TRBJ2-7)
CASSLTPYEQYF

SEQ ID NO: 729165 - protein, 16 aa, Homo sapiens
  CDR3 for alpha chain variable domain of TCR clone 364583 (TRAV12-1, TRAJ12)
CVVDTLLMDSSCKLIF

SEQ ID NO: 729166 - protein, 13 aa, Homo sapiens
  CDR3 for beta chain variable domain of TCR clone 364583 (TRBV11-2, TRBJ2-1)
CASSSEAYNEQFF

SEQ ID NO: 729167 - protein, 13 aa, Homo sapiens
  CDR3 for alpha chain variable domain of TCR clone 364584 (TRAV36/DV7, TRAJ7)
CAVTRYGNNRLAF

SEQ ID NO: 729168 - protein, 15 aa, Homo sapiens
  CDR3 for beta chain variable domain of TCR clone 364584 (TRBV11-3, TRBJ2-7)
CASSPGPASSYEQYF

SEQ ID NO: 729169 - protein, 13 aa, Homo sapiens
  CDR3 for alpha chain variable domain of TCR clone 364585 (TRAV8-6, TRAJ49)
CAVITNTGNKFYF

SEQ ID NO: 729170 - protein, 15 aa, Homo sapiens
  CDR3 for beta chain variable domain of TCR clone 364585 (TRBV11-3, TRBJ2-3)
CASLKDGREGDTQYF

SEQ ID NO: 729171 - protein, 15 aa, Homo sapiens
  CDR3 for alpha chain variable domain of TCR clone 364586 (TRAV12-1, TRAJ44)
CVADLPTGTASKLTF

SEQ ID NO: 729172 - protein, 16 aa, Homo sapiens
  CDR3 for beta chain variable domain of TCR clone 364586 (TRBV12-5, TRBJ2-5)
CASGTRTSGNQETQYF

SEQ ID NO: 729173 - protein, 16 aa, Homo sapiens
  CDR3 for alpha chain variable domain of TCR clone 364587 (TRAV1-2, TRAJ16)
CAVNRFSDGRSCSLQG

SEQ ID NO: 729174 - protein, 14 aa, Homo sapiens
  CDR3 for beta chain variable domain of TCR clone 364587 (TRBV7-9, TRBJ2-3)
CASSLEDGTDTQYF

SEQ ID NO: 729175 - protein, 14 aa, Homo sapiens
  CDR3 for alpha chain variable domain of TCR clone 364588 (TRAV3, TRAJ9)
CAVRGNTGGFKTIF

SEQ ID NO: 729176 - protein, 14 aa, Homo sapiens
  CDR3 for beta chain variable domain of TCR clone 364588 (TRBV6-1, TRBJ1-3)
CASVHGGGGNTIYF

SEQ ID NO: 729177 - protein, 13 aa, Homo sapiens
  CDR3 for alpha chain variable domain of TCR clone 364589 (TRAV27, TRAJ6)
CAGGTRGSYIPKF

SEQ ID NO: 729178 - protein, 15 aa, Homo sapiens
  CDR3 for beta chain variable domain of TCR clone 364589 (TRBV11-2, TRBJ1-3)
CASSLSPLVRDTIYF

SEQ ID NO: 729179 - protein, 15 aa, Homo sapiens
  CDR3 for alpha chain variable domain of TCR clone 364590 (TRAV12-3, TRAJ6)
CAMSATTGGSYIPTF

SEQ ID NO: 729180 - protein, 15 aa, Homo sapiens
  CDR3 for beta chain variable domain of TCR clone 364590 (TRBV20-1, TRBJ2-7)
CSAESGTSGAYEQYF

SEQ ID NO: 729181 - protein, 13 aa, Homo sapiens
  CDR3 for alpha chain variable domain of TCR clone 364591 (TRAV21, TRAJ57)
CAVTQGGSEKLVF

SEQ ID NO: 729182 - protein, 14 aa, Homo sapiens
  CDR3 for beta chain variable domain of TCR clone 364591 (TRBV18, TRBJ2-5)
CASSPGVSQETRYF

SEQ ID NO: 729183 - protein, 11 aa, Homo sapiens
  CDR3 for alpha chain variable domain of TCR clone 364592 (TRAV21, TRAJ20)
CAVSNDYKLSF

SEQ ID NO: 729184 - protein, 14 aa, Homo sapiens
  CDR3 for beta chain variable domain of TCR clone 364592 (TRBV7-2, TRBJ1-2)
CASSLVPVGYGYTF

SEQ ID NO: 729185 - protein, 14 aa, Homo sapiens
  CDR3 for alpha chain variable domain of TCR clone 364593 (TRAV26-1, TRAJ8)
CIVRVDTGFQKLVF

SEQ ID NO: 729186 - protein, 13 aa, Homo sapiens
  CDR3 for beta chain variable domain of TCR clone 364593 (TRBV10-3, TRBJ2-7)
CASKLAVNYEQYF

SEQ ID NO: 729187 - protein, 14 aa, Homo sapiens
  CDR3 for alpha chain variable domain of TCR clone 364594 (TRAV12-2, TRAJ17)
CAVLFKAAGNKLTF

SEQ ID NO: 729188 - protein, 16 aa, Homo sapiens
  CDR3 for beta chain variable domain of TCR clone 364594 (TRBV24-1, TRBJ2-3)
CATSDAISGITDTQYF

SEQ ID NO: 729189 - protein, 15 aa, Homo sapiens
  CDR3 for alpha chain variable domain of TCR clone 364595 (TRAV3, TRAJ20)
CAVRDIKLSDSKLSF

SEQ ID NO: 729190 - protein, 15 aa, Homo sapiens
  CDR3 for beta chain variable domain of TCR clone 364595 (TRBV7-9, TRBJ1-6)
CASSSPGRGNSPLLF

SEQ ID NO: 729191 - protein, 13 aa, Homo sapiens
  CDR3 for alpha chain variable domain of TCR clone 364596 (TRAV8-3, TRAJ48)
CAVVRFGNQKLTF

SEQ ID NO: 729192 - protein, 16 aa, Homo sapiens
  CDR3 for beta chain variable domain of TCR clone 364596 (TRBV20-1, TRBJ2-5)
CSARDFASGIQETQYF

SEQ ID NO: 729193 - protein, 13 aa, Homo sapiens
  CDR3 for alpha chain variable domain of TCR clone 364597 (TRAV35, TRAJ44)
CAGLSGTASKLTF

SEQ ID NO: 729194 - protein, 14 aa, Homo sapiens
  CDR3 for beta chain variable domain of TCR clone 364597 (TRBV7-8, TRBJ1-2)
CASSPDSLSYGYTF

SEQ ID NO: 729195 - protein, 13 aa, Homo sapiens
  CDR3 for alpha chain variable domain of TCR clone 364598 (TRAV12-1, TRAJ39)
CVVPQRAGNMLTF

SEQ ID NO: 729196 - protein, 20 aa, Homo sapiens
  CDR3 for beta chain variable domain of TCR clone 364598 (TRBV28, TRBJ2-1)
CASTPIGRSPGLAGGNEQFF

SEQ ID NO: 729197 - protein, 11 aa, Homo sapiens
  CDR3 for alpha chain variable domain of TCR clone 364599 (TRAV13-2, TRAJ23)
CAESPRGKLIF

SEQ ID NO: 729198 - protein, 15 aa, Homo sapiens
  CDR3 for beta chain variable domain of TCR clone 364599 (TRBV28, TRBJ2-1)
CASSGLAEVDNEQYF

SEQ ID NO: 729199 - protein, 12 aa, Homo sapiens
  CDR3 for alpha chain variable domain of TCR clone 364600 (TRAV35, TRAJ54)
CADLQGAQKLVF

SEQ ID NO: 729200 - protein, 14 aa, Homo sapiens
  CDR3 for beta chain variable domain of TCR clone 364600 (TRBV7-7, TRBJ2-2)
CASSRDRSTGELFF

SEQ ID NO: 729201 - protein, 14 aa, Homo sapiens
  CDR3 for alpha chain variable domain of TCR clone 364601 (TRAV14/DV4, TRAJ26)
CAMREGTYDQNFVF

SEQ ID NO: 729202 - protein, 16 aa, Homo sapiens
  CDR3 for beta chain variable domain of TCR clone 364601 (TRBV9, TRBJ1-2)
CASSVEEKVSPYGYTF

SEQ ID NO: 729203 - protein, 17 aa, Homo sapiens
  CDR3 for alpha chain variable domain of TCR clone 364602 (TRAV38-2/DV8, TRAJ45)
CAYRSRYSGGGADGLTF

SEQ ID NO: 729204 - protein, 15 aa, Homo sapiens
  CDR3 for beta chain variable domain of TCR clone 364602 (TRBV19, TRBJ2-1)
CASIEGRGPYNEQFF

SEQ ID NO: 729205 - protein, 13 aa, Homo sapiens
  CDR3 for alpha chain variable domain of TCR clone 364603 (TRAV29/DV5, TRAJ31)
CAASRNNNARLMF

SEQ ID NO: 729206 - protein, 15 aa, Homo sapiens
  CDR3 for beta chain variable domain of TCR clone 364603 (TRBV7-6, TRBJ2-7)
CASSLGTISSYEQYF

SEQ ID NO: 729207 - protein, 15 aa, Homo sapiens
  CDR3 for alpha chain variable domain of TCR clone 364604 (TRAV3, TRAJ22)
CAVRDRGGSARQLTF

SEQ ID NO: 729208 - protein, 14 aa, Homo sapiens
  CDR3 for beta chain variable domain of TCR clone 364604 (TRBV29-1, TRBJ2-5)
CSVETSGSGETQYF

SEQ ID NO: 729209 - protein, 13 aa, Homo sapiens
  CDR3 for alpha chain variable domain of TCR clone 364605 (TRAV21, TRAJ27)
CAARPGNAGKSPF

SEQ ID NO: 729210 - protein, 14 aa, Homo sapiens
  CDR3 for beta chain variable domain of TCR clone 364605 (TRBV7-6, TRBJ2-3)
CASSLRTVTDTQYF

SEQ ID NO: 729211 - protein, 15 aa, Homo sapiens
  CDR3 for alpha chain variable domain of TCR clone 364606 (TRAV2, TRAJ37)
CAVGAGSSNTGKLIF

SEQ ID NO: 729212 - protein, 13 aa, Homo sapiens
  CDR3 for beta chain variable domain of TCR clone 364606 (TRBV20-1, TRBJ2-7)
CSAQTGLSYEQYF

SEQ ID NO: 729213 - protein, 17 aa, Homo sapiens
  CDR3 for alpha chain variable domain of TCR clone 364607 (TRAV3, TRAJ6)
CAVRDGPRAGGSYIHTF

SEQ ID NO: 729214 - protein, 13 aa, Homo sapiens
  CDR3 for beta chain variable domain of TCR clone 364607 (TRBV27, TRBJ2-1)
CASRTLGVGEQFF

SEQ ID NO: 729215 - protein, 16 aa, Homo sapiens
  CDR3 for alpha chain variable domain of TCR clone 364608 (TRAV1-2, TRAJ42)
CAVRGNYGGSQGNLIF

SEQ ID NO: 729216 - protein, 14 aa, Homo sapiens
  CDR3 for beta chain variable domain of TCR clone 364608 (TRBV29-1, TRBJ1-4)
CSVSGRQGGEKLFF

SEQ ID NO: 729217 - protein, 10 aa, Homo sapiens
  CDR3 for alpha chain variable domain of TCR clone 364609 (TRAV23/DV6, TRAJ57)
CAASSTLSQG

SEQ ID NO: 729218 - protein, 14 aa, Homo sapiens
  CDR3 for beta chain variable domain of TCR clone 364609 (TRBV19, TRBJ2-7)
CASTVQGRPYEQYF

SEQ ID NO: 729219 - protein, 18 aa, Homo sapiens
  CDR3 for alpha chain variable domain of TCR clone 364610 (TRAV14/DV4, TRAJ26)
CAMRGPSEFCLWSRNQIF

SEQ ID NO: 729220 - protein, 14 aa, Homo sapiens
  CDR3 for beta chain variable domain of TCR clone 364610 (TRBV12-4, TRBJ1-3)
CASTLTGAGNTIYF

SEQ ID NO: 729221 - protein, 14 aa, Homo sapiens
  CDR3 for alpha chain variable domain of TCR clone 364611 (TRAV13-2, TRAJ6)
CAESTSGGSYIPTF

SEQ ID NO: 729222 - protein, 14 aa, Homo sapiens
  CDR3 for beta chain variable domain of TCR clone 364611 (TRBV25-1, TRBJ1-1)
CASTHLGGNTEAFF

SEQ ID NO: 729223 - protein, 13 aa, Homo sapiens
  CDR3 for alpha chain variable domain of TCR clone 364612 (TRAV12-2, TRAJ11)
CAVPNSGYSTLTF

SEQ ID NO: 729224 - protein, 16 aa, Homo sapiens
  CDR3 for beta chain variable domain of TCR clone 364612 (TRBV28, TRBJ2-7)
CASSSGTSGRGYEQYF

SEQ ID NO: 729225 - protein, 11 aa, Homo sapiens
  CDR3 for alpha chain variable domain of TCR clone 364613 (TRAV24, TRAJ43)
CAFSNNNDMRF

SEQ ID NO: 729226 - protein, 15 aa, Homo sapiens
  CDR3 for beta chain variable domain of TCR clone 364613 (TRBV6-5, TRBJ2-1)
CASSYDAGAGNEQFF

SEQ ID NO: 729227 - protein, 16 aa, Homo sapiens
  CDR3 for alpha chain variable domain of TCR clone 364614 (TRAV26-2, TRAJ57)
CILGDVGSGGSEKLVV

SEQ ID NO: 729228 - protein, 13 aa, Homo sapiens
  CDR3 for beta chain variable domain of TCR clone 364614 (TRBV18, TRBJ2-3)
CASSPGVTDTQYF

SEQ ID NO: 729229 - protein, 16 aa, Homo sapiens
  CDR3 for alpha chain variable domain of TCR clone 364615 (TRAV39, TRAJ53)
CAVDAGSGGSNYKLTL

SEQ ID NO: 729230 - protein, 16 aa, Homo sapiens
  CDR3 for beta chain variable domain of TCR clone 364615 (TRBV12-4, TRBJ2-2)
CASSFWIVGNTGELFF

SEQ ID NO: 729231 - protein, 14 aa, Homo sapiens
  CDR3 for alpha chain variable domain of TCR clone 364616 (TRAV13-1, TRAJ44)
CAAKATGTASKRTF

SEQ ID NO: 729232 - protein, 22 aa, Homo sapiens
  CDR3 for beta chain variable domain of TCR clone 364616 (TRBV19, TRBJ2-1)
CASSVRDRVTGTSGRIYNEQFF

SEQ ID NO: 729233 - protein, 16 aa, Homo sapiens
  CDR3 for alpha chain variable domain of TCR clone 364617 (TRAV13-2, TRAJ28)
CAEKSYSGAVSYQLTF

SEQ ID NO: 729234 - protein, 16 aa, Homo sapiens
  CDR3 for beta chain variable domain of TCR clone 364617 (TRBV19, TRBJ2-1)
CASSKAGPSSYNEQFF

SEQ ID NO: 729235 - protein, 12 aa, Homo sapiens
  CDR3 for alpha chain variable domain of TCR clone 364618 (TRAV12-3, TRAJ17)
CAMTLTGNKLTF

SEQ ID NO: 729236 - protein, 13 aa, Homo sapiens
  CDR3 for beta chain variable domain of TCR clone 364618 (TRBV11-2, TRBJ2-2)
CASGRDREEELFF

SEQ ID NO: 729237 - protein, 16 aa, Homo sapiens
  CDR3 for alpha chain variable domain of TCR clone 364619 (TRAV3, TRAJ37)
CAVRQHGSANTGKLIL

SEQ ID NO: 729238 - protein, 14 aa, Homo sapiens
  CDR3 for beta chain variable domain of TCR clone 364619 (TRBV25-1, TRBJ1-1)
CASTHLGGNTEAFF

SEQ ID NO: 729239 - protein, 13 aa, Homo sapiens
  CDR3 for alpha chain variable domain of TCR clone 364620 (TRAV26-1, TRAJ34)
CIVRPWITDKLIL

SEQ ID NO: 729240 - protein, 14 aa, Homo sapiens
  CDR3 for beta chain variable domain of TCR clone 364620 (TRBV12-4, TRBJ1-4)
CASSRQGANEKLFF

SEQ ID NO: 729241 - protein, 14 aa, Homo sapiens
  CDR3 for alpha chain variable domain of TCR clone 364621 (TRAV38-2/DV8, TRAJ30)
CAYRSAYRDDKIIF

SEQ ID NO: 729242 - protein, 16 aa, Homo sapiens
  CDR3 for beta chain variable domain of TCR clone 364621 (TRBV15, TRBJ1-3)
CATSSPIGFSGNTIYF

SEQ ID NO: 729243 - protein, 14 aa, Homo sapiens
  CDR3 for alpha chain variable domain of TCR clone 364622 (TRAV16, TRAJ57)
CALPTQGGSEKLVV

SEQ ID NO: 729244 - protein, 15 aa, Homo sapiens
  CDR3 for beta chain variable domain of TCR clone 364622 (TRBV28, TRBJ1-3)
CASWGGHLSGNTIYF

SEQ ID NO: 729245 - protein, 14 aa, Homo sapiens
  CDR3 for alpha chain variable domain of TCR clone 364623 (TRAV8-6, TRAJ53)
CAALVLGSNYKLTF

SEQ ID NO: 729246 - protein, 15 aa, Homo sapiens
  CDR3 for beta chain variable domain of TCR clone 364623 (TRBV20-1, TRBJ2-3)
CSAEPLAVHGDTQYF

SEQ ID NO: 729247 - protein, 13 aa, Homo sapiens
  CDR3 for alpha chain variable domain of TCR clone 364624 (TRAV2, TRAJ40)
CALVVSGTYKYIF

SEQ ID NO: 729248 - protein, 14 aa, Homo sapiens
  CDR3 for beta chain variable domain of TCR clone 364624 (TRBV19, TRBJ2-1)
CASPTFVLSGEQFF

SEQ ID NO: 729249 - protein, 12 aa, Homo sapiens
  CDR3 for alpha chain variable domain of TCR clone 364625 (TRAV27, TRAJ22)
CAGDGAGVEIWF

SEQ ID NO: 729250 - protein, 16 aa, Homo sapiens
  CDR3 for beta chain variable domain of TCR clone 364625 (TRBV19, TRBJ2-1)
CASSKAGPSSYNEQFF

SEQ ID NO: 729251 - protein, 11 aa, Homo sapiens
  CDR3 for alpha chain variable domain of TCR clone 364626 (TRAV21, TRAJ48)
CAVDGNEKLTF

SEQ ID NO: 729252 - protein, 14 aa, Homo sapiens
  CDR3 for beta chain variable domain of TCR clone 364626 (TRBV6-1, TRBJ1-3)
CASVQGGGGNTIYF

SEQ ID NO: 729253 - protein, 14 aa, Homo sapiens
  CDR3 for alpha chain variable domain of TCR clone 364627 (TRAV1-2, TRAJ15)
CAVRYRQAGTALIF

SEQ ID NO: 729254 - protein, 14 aa, Homo sapiens
  CDR3 for beta chain variable domain of TCR clone 364627 (TRBV7-2, TRBJ2-7)
CASSPKTSFYEQYF

SEQ ID NO: 729255 - protein, 20 aa, Homo sapiens
  CDR3 for alpha chain variable domain of TCR clone 364628 (TRAV27, TRAJ49)
TAAQPGDTGLYLCTGNQFYF

SEQ ID NO: 729256 - protein, 16 aa, Homo sapiens
  CDR3 for beta chain variable domain of TCR clone 364628 (TRBV7-2, TRBJ2-6)
CASSERRASGANVLTF

SEQ ID NO: 729257 - protein, 13 aa, Homo sapiens
  CDR3 for alpha chain variable domain of TCR clone 364629 (TRAV12-2, TRAJ20)
CAVYPSNDYKLSF

SEQ ID NO: 729258 - protein, 15 aa, Homo sapiens
  CDR3 for beta chain variable domain of TCR clone 364629 (TRBV27, TRBJ2-7)
CASSLYPRGGETQYF

SEQ ID NO: 729259 - protein, 16 aa, Homo sapiens
  CDR3 for alpha chain variable domain of TCR clone 364630 (TRAV27, TRAJ48)
TAAQPGDTGLYLPLTF

SEQ ID NO: 729260 - protein, 16 aa, Homo sapiens
  CDR3 for beta chain variable domain of TCR clone 364630 (TRBV27, TRBJ2-2)
RASSFRGLVRTGELFF

SEQ ID NO: 729261 - protein, 12 aa, Homo sapiens
  CDR3 for alpha chain variable domain of TCR clone 364631 (TRAV12-2, TRAJ9)
CAVNTGGFKTIF

SEQ ID NO: 729262 - protein, 15 aa, Homo sapiens
  CDR3 for beta chain variable domain of TCR clone 364631 (TRBV5-1, TRBJ1-2)
CASSYPGTGSSGYTF

SEQ ID NO: 729263 - protein, 15 aa, Homo sapiens
  CDR3 for alpha chain variable domain of TCR clone 364632 (TRAV3, TRAJ17)
CAVSPKEAAGNKLTF

SEQ ID NO: 729264 - protein, 16 aa, Homo sapiens
  CDR3 for beta chain variable domain of TCR clone 364632 (TRBV7-9, TRBJ2-1)
CASSSIAGPPGNEQFF

SEQ ID NO: 729265 - protein, 13 aa, Homo sapiens
  CDR3 for alpha chain variable domain of TCR clone 364633 (TRAV27, TRAJ49)
CAPRSYTGNQFYF

SEQ ID NO: 729266 - protein, 16 aa, Homo sapiens
  CDR3 for beta chain variable domain of TCR clone 364633 (TRBV4-1, TRBJ1-2)
CASSQDAGQVLYGYTF

SEQ ID NO: 729267 - protein, 15 aa, Homo sapiens
  CDR3 for alpha chain variable domain of TCR clone 364634 (TRAV16, TRAJ4)
CALPSLSGGYNKLIF

SEQ ID NO: 729268 - protein, 15 aa, Homo sapiens
  CDR3 for beta chain variable domain of TCR clone 364634 (TRBV19, TRBJ2-4)
CASSIGLAGANIQYF

SEQ ID NO: 729269 - protein, 21 aa, Homo sapiens
  CDR3 for alpha chain variable domain of TCR clone 364635 (TRAV17, TRAJ9)
CATDYTGGFKTILEQEQDYLL

SEQ ID NO: 729270 - protein, 16 aa, Homo sapiens
  CDR3 for beta chain variable domain of TCR clone 364635 (TRBV7-7, TRBJ2-1)
CASSLASGTSYNEHFF

SEQ ID NO: 729271 - protein, 15 aa, Homo sapiens
  CDR3 for alpha chain variable domain of TCR clone 364636 (TRAV8-3, TRAJ45)
CASSYSGGGADGLTF

SEQ ID NO: 729272 - protein, 13 aa, Homo sapiens
  CDR3 for beta chain variable domain of TCR clone 364636 (TRBV10-3, TRBJ2-7)
CASKLPVNYEQYF

SEQ ID NO: 729273 - protein, 12 aa, Homo sapiens
  CDR3 for alpha chain variable domain of TCR clone 364637 (TRAV26-1, TRAJ13)
CIVSRGYQKVTF

SEQ ID NO: 729274 - protein, 17 aa, Homo sapiens
  CDR3 for beta chain variable domain of TCR clone 364637 (TRBV28, TRBJ2-5)
CASSTPEGDALQETQYF

SEQ ID NO: 729275 - protein, 18 aa, Homo sapiens
  CDR3 for alpha chain variable domain of TCR clone 364638 (TRAV12-3, TRAJ52)
CAMSVGGAGGTSYGKLTF

SEQ ID NO: 729276 - protein, 13 aa, Homo sapiens
  CDR3 for beta chain variable domain of TCR clone 364638 (TRBV24-1, TRBJ2-2)
CATSDWSTGELFF

SEQ ID NO: 729277 - protein, 17 aa, Homo sapiens
  CDR3 for alpha chain variable domain of TCR clone 364639 (TRAV23/DV6, TRAJ57)
FAASSTLSQGGSEKLVF

SEQ ID NO: 729278 - protein, 14 aa, Homo sapiens
  CDR3 for beta chain variable domain of TCR clone 364639 (TRBV25-1, TRBJ1-1)
CASTHLGGSTEAFF

SEQ ID NO: 729279 - protein, 18 aa, Homo sapiens
  CDR3 for alpha chain variable domain of TCR clone 364640 (TRAV21, TRAJ52)
CDVRPSPAGGTSYGKLTF

SEQ ID NO: 729280 - protein, 17 aa, Homo sapiens
  CDR3 for beta chain variable domain of TCR clone 364640 (TRBV20-1, TRBJ2-2)
CSASGSGQGGLTGELFF

SEQ ID NO: 729281 - protein, 14 aa, Homo sapiens
  CDR3 for alpha chain variable domain of TCR clone 364641 (TRAV29/DV5, TRAJ44)
CAAFLVGTASKLTF

SEQ ID NO: 729282 - protein, 15 aa, Homo sapiens
  CDR3 for beta chain variable domain of TCR clone 364641 (TRBV7-3, TRBJ2-2)
CASSETGQGTGALFF

SEQ ID NO: 729283 - protein, 15 aa, Homo sapiens
  CDR3 for alpha chain variable domain of TCR clone 364642 (TRAV3, TRAJ5)
CAVRDLDTGRRALTF

SEQ ID NO: 729284 - protein, 13 aa, Homo sapiens
  CDR3 for beta chain variable domain of TCR clone 364642 (TRBV12-4, TRBJ2-7)
CASSPTEAYEQYV

SEQ ID NO: 729285 - protein, 14 aa, Homo sapiens
  CDR3 for alpha chain variable domain of TCR clone 364643 (TRAV12-3, TRAJ10)
SHLPLTGGGNKLTF

SEQ ID NO: 729286 - protein, 20 aa, Homo sapiens
  CDR3 for beta chain variable domain of TCR clone 364643 (TRBV28, TRBJ2-1)
CASTPIGRSPGLGGGNEQFF

SEQ ID NO: 729287 - protein, 13 aa, Homo sapiens
  CDR3 for alpha chain variable domain of TCR clone 364644 (TRAV29/DV5, TRAJ31)
CAASRNNNARPLF

SEQ ID NO: 729288 - protein, 12 aa, Homo sapiens
  CDR3 for beta chain variable domain of TCR clone 364644 (TRBV14, TRBJ2-5)
CASSHLKETQYF

SEQ ID NO: 729289 - protein, 16 aa, Homo sapiens
  CDR3 for alpha chain variable domain of TCR clone 364645 (TRAV30, TRAJ24)
CGTEIVDADSWGKFQL

SEQ ID NO: 729290 - protein, 15 aa, Homo sapiens
  CDR3 for beta chain variable domain of TCR clone 364645 (TRBV4-1, TRBJ1-3)
CASSQDLRVGNTIYF

SEQ ID NO: 729291 - protein, 12 aa, Homo sapiens
  CDR3 for alpha chain variable domain of TCR clone 364646 (TRAV8-3, TRAJ20)
CAVGANDYKLSF

SEQ ID NO: 729292 - protein, 13 aa, Homo sapiens
  CDR3 for beta chain variable domain of TCR clone 364646 (TRBV27, TRBJ2-7)
CASSSGDSYEQYF

SEQ ID NO: 729293 - protein, 12 aa, Homo sapiens
  CDR3 for alpha chain variable domain of TCR clone 364647 (TRAV12-3, TRAJ34)
CAMGYNNDKLIF

SEQ ID NO: 729294 - protein, 14 aa, Homo sapiens
  CDR3 for beta chain variable domain of TCR clone 364647 (TRBV5-7, TRBJ1-5)
CASSRTGGGQPQHF

SEQ ID NO: 729295 - protein, 15 aa, Homo sapiens
  CDR3 for alpha chain variable domain of TCR clone 364648 (TRAV3, TRAJ11)
CAVRDRGSGYSTLPF

SEQ ID NO: 729296 - protein, 13 aa, Homo sapiens
  CDR3 for beta chain variable domain of TCR clone 364648 (TRBV7-9, TRBJ1-2)
CASSLKQNYGYTF

SEQ ID NO: 729297 - protein, 13 aa, Homo sapiens
  CDR3 for alpha chain variable domain of TCR clone 364649 (TRAV9-2, TRAJ53)
CALSGGSNYKLTF

SEQ ID NO: 729298 - protein, 12 aa, Homo sapiens
  CDR3 for beta chain variable domain of TCR clone 364649 (TRBV11-2, TRBJ2-2)
CASSLPTGELFF

SEQ ID NO: 729299 - protein, 16 aa, Homo sapiens
  CDR3 for alpha chain variable domain of TCR clone 364650 (TRAV3, TRAJ10)
CAVRDMNAGGGNKLTF

SEQ ID NO: 729300 - protein, 12 aa, Homo sapiens
  CDR3 for beta chain variable domain of TCR clone 364650 (TRBV7-3, TRBJ2-1)
CASSFINNEQFF

SEQ ID NO: 729301 - protein, 14 aa, Homo sapiens
  CDR3 for alpha chain variable domain of TCR clone 364651 (TRAV1-2, TRAJ8)
CAVREDTGFQKLVF

SEQ ID NO: 729302 - protein, 15 aa, Homo sapiens
  CDR3 for beta chain variable domain of TCR clone 364651 (TRBV4-2, TRBJ1-1)
CASSQEDLPRTEAFF

SEQ ID NO: 729303 - protein, 16 aa, Homo sapiens
  CDR3 for alpha chain variable domain of TCR clone 364652 (TRAV26-2, TRAJ57)
CILRDVGSGGSEKLVF

SEQ ID NO: 729304 - protein, 12 aa, Homo sapiens
  CDR3 for beta chain variable domain of TCR clone 364652 (TRBV18, TRBJ2-3)
CASSPGVRYAVF

SEQ ID NO: 729305 - protein, 14 aa, Homo sapiens
  CDR3 for alpha chain variable domain of TCR clone 364653 (TRAV13-1, TRAJ44)
CSAKATGTASKLTF

SEQ ID NO: 729306 - protein, 15 aa, Homo sapiens
  CDR3 for beta chain variable domain of TCR clone 364653 (TRBV7-2, TRBJ2-7)
CASSFTGQGAQEQYF

SEQ ID NO: 729307 - protein, 13 aa, Homo sapiens
  CDR3 for alpha chain variable domain of TCR clone 364654 (TRAV13-1, TRAJ33)
CAASRAGNYQLIL

SEQ ID NO: 729308 - protein, 12 aa, Homo sapiens
  CDR3 for beta chain variable domain of TCR clone 364654 (TRBV11-2, TRBJ1-2)
CASSREGDGYTF

SEQ ID NO: 729309 - protein, 12 aa, Homo sapiens
  CDR3 for alpha chain variable domain of TCR clone 364655 (TRAV1-2, TRAJ8)
CAVRTGFQKLVF

SEQ ID NO: 729310 - protein, 15 aa, Homo sapiens
  CDR3 for beta chain variable domain of TCR clone 364655 (TRBV7-2, TRBJ1-2)
CASSPRAGWNYGYTF

SEQ ID NO: 729311 - protein, 13 aa, Homo sapiens
  CDR3 for alpha chain variable domain of TCR clone 364656 (TRAV34, TRAJ22)
CGAGADSARQLTF

SEQ ID NO: 729312 - protein, 16 aa, Homo sapiens
  CDR3 for beta chain variable domain of TCR clone 364656 (TRBV7-3, TRBJ2-1)
CASSKPLAGGYNEQFF

SEQ ID NO: 729313 - protein, 12 aa, Homo sapiens
  CDR3 for alpha chain variable domain of TCR clone 364657 (TRAV13-1, TRAJ21)
CAAKEGFNKFYF

SEQ ID NO: 729314 - protein, 17 aa, Homo sapiens
  CDR3 for beta chain variable domain of TCR clone 364657 (TRBV7-2, TRBJ2-3)
CASSLEARGTSTDTQYF

SEQ ID NO: 729315 - protein, 12 aa, Homo sapiens
  CDR3 for alpha chain variable domain of TCR clone 364658 (TRAV12-3, TRAJ42)
CATGGSQGNLIF

SEQ ID NO: 729316 - protein, 14 aa, Homo sapiens
  CDR3 for beta chain variable domain of TCR clone 364658 (TRBV5-4, TRBJ1-1)
CASSLDSRRDEAFF

SEQ ID NO: 729317 - protein, 13 aa, Homo sapiens
  CDR3 for alpha chain variable domain of TCR clone 364659 (TRAV17, TRAJ9)
CATFLTGGFKTIF

SEQ ID NO: 729318 - protein, 13 aa, Homo sapiens
  CDR3 for beta chain variable domain of TCR clone 364659 (TRBV18, TRBJ1-1)
CASSPNGDTEAFF

SEQ ID NO: 729319 - protein, 14 aa, Homo sapiens
  CDR3 for alpha chain variable domain of TCR clone 364660 (TRAV26-1, TRAJ45)
CIEVTGGGAAGLTF

SEQ ID NO: 729320 - protein, 19 aa, Homo sapiens
  CDR3 for beta chain variable domain of TCR clone 364660 (TRBV19, TRBJ2-2)
CASTRPGLAGGRVTGELFF

SEQ ID NO: 729321 - protein, 12 aa, Homo sapiens
  CDR3 for alpha chain variable domain of TCR clone 364661 (TRAV2, TRAJ33)
CAFMDSNYQLIW

SEQ ID NO: 729322 - protein, 17 aa, Homo sapiens
  CDR3 for beta chain variable domain of TCR clone 364661 (TRBV2, TRBJ2-7)
CASSEPWTGPSYEQYFG

SEQ ID NO: 729323 - protein, 17 aa, Homo sapiens
  CDR3 for alpha chain variable domain of TCR clone 364662 (TRAV3, TRAJ6)
CAVRDGPRAGGSDIPTF

SEQ ID NO: 729324 - protein, 14 aa, Homo sapiens
  CDR3 for beta chain variable domain of TCR clone 364662 (TRBV7-2, TRBJ2-7)
CASSPKTSFYEQHF

SEQ ID NO: 729325 - protein, 15 aa, Homo sapiens
  CDR3 for alpha chain variable domain of TCR clone 364663 (TRAV35, TRAJ40)
CAGQLGTSGTYKYIF

SEQ ID NO: 729326 - protein, 10 aa, Homo sapiens
  CDR3 for beta chain variable domain of TCR clone 364663 (TRBV23-1, TRBJ2-7)
SAGTGREQYF

SEQ ID NO: 729327 - protein, 15 aa, Homo sapiens
  CDR3 for alpha chain variable domain of TCR clone 364664 (TRAV27, TRAJ38)
CAGRFDAGNNRKLIW

SEQ ID NO: 729328 - protein, 12 aa, Homo sapiens
  CDR3 for beta chain variable domain of TCR clone 364664 (TRBV29-1, TRBJ2-3)
CSVTGGADTQYF

SEQ ID NO: 729329 - protein, 17 aa, Homo sapiens
  CDR3 for alpha chain variable domain of TCR clone 364665 (TRAV12-2, TRAJ4)
CAVNVRPVSGGYNKLIF

SEQ ID NO: 729330 - protein, 14 aa, Homo sapiens
  CDR3 for beta chain variable domain of TCR clone 364665 (TRBV2, TRBJ2-1)
CASRTGSSYNEQFF

SEQ ID NO: 729331 - protein, 13 aa, Homo sapiens
  CDR3 for alpha chain variable domain of TCR clone 364666 (TRAV12-1, TRAJ6)
CVVNRGGSYIPTF

SEQ ID NO: 729332 - protein, 15 aa, Homo sapiens
  CDR3 for beta chain variable domain of TCR clone 364666 (TRBV7-9, TRBJ1-6)
CASSSPGRGNSPLHF

SEQ ID NO: 729333 - protein, 17 aa, Homo sapiens
  CDR3 for alpha chain variable domain of TCR clone 364667 (TRAV3, TRAJ6)
CAVRDGPRAGGSYIPTF

SEQ ID NO: 729334 - protein, 20 aa, Homo sapiens
  CDR3 for beta chain variable domain of TCR clone 364667 (TRBV7-8, TRBJ2-2)
CASSHLFPGTTIHITGELFF

SEQ ID NO: 729335 - protein, 11 aa, Homo sapiens
  CDR3 for alpha chain variable domain of TCR clone 364668 (TRAV17, TRAJ43)
CATPRSNDMRF

SEQ ID NO: 729336 - protein, 14 aa, Homo sapiens
  CDR3 for beta chain variable domain of TCR clone 364668 (TRBV20-1, TRBJ2-4)
CSASGRVGENKQYF

SEQ ID NO: 729337 - protein, 17 aa, Homo sapiens
  CDR3 for alpha chain variable domain of TCR clone 364669 (TRAV3, TRAJ6)
CAVRDGPRAGGSYIPTF

SEQ ID NO: 729338 - protein, 12 aa, Homo sapiens
  CDR3 for beta chain variable domain of TCR clone 364669 (TRBV11-2, TRBJ2-1)
CASSPVNNEQFF

SEQ ID NO: 729339 - protein, 10 aa, Homo sapiens
  CDR3 for alpha chain variable domain of TCR clone 364670 (TRAV16, TRAJ22)
SAMYLRQLTF

SEQ ID NO: 729340 - protein, 16 aa, Homo sapiens
  CDR3 for beta chain variable domain of TCR clone 364670 (TRBV7-9, TRBJ2-2)
CASSLKRGTLSGELFF

SEQ ID NO: 729341 - protein, 12 aa, Homo sapiens
  CDR3 for alpha chain variable domain of TCR clone 364671 (TRAV36/DV7, TRAJ50)
CAVEPENLLRQG

SEQ ID NO: 729342 - protein, 14 aa, Homo sapiens
  CDR3 for beta chain variable domain of TCR clone 364671 (TRBV7-2, TRBJ2-7)
CASSPKTSFYEQYF

SEQ ID NO: 729343 - protein, 14 aa, Homo sapiens
  CDR3 for alpha chain variable domain of TCR clone 364672 (TRAV12-2, TRAJ17)
CAVLFKSAGNKLTF

SEQ ID NO: 729344 - protein, 16 aa, Homo sapiens
  CDR3 for beta chain variable domain of TCR clone 364672 (TRBV19, TRBJ2-1)
CASSKAGPSSYNEQFF

SEQ ID NO: 729345 - protein, 12 aa, Homo sapiens
  CDR3 for alpha chain variable domain of TCR clone 364673 (TRAV35, TRAJ30)
CAGLNRDDKIIF

SEQ ID NO: 729346 - protein, 15 aa, Homo sapiens
  CDR3 for beta chain variable domain of TCR clone 364673 (TRBV9, TRBJ1-6)
CASSIAGTGDSPLHF

SEQ ID NO: 729347 - protein, 14 aa, Homo sapiens
  CDR3 for alpha chain variable domain of TCR clone 364674 (TRAV8-3, TRAJ15)
CAVGRHQAGTALIF

SEQ ID NO: 729348 - protein, 14 aa, Homo sapiens
  CDR3 for beta chain variable domain of TCR clone 364674 (TRBV27, TRBJ2-1)
CASPTFVLSGEQFF

SEQ ID NO: 729349 - protein, 14 aa, Homo sapiens
  CDR3 for alpha chain variable domain of TCR clone 364675 (TRAV38-1, TRAJ29)
CAFITPSGNTPLVF

SEQ ID NO: 729350 - protein, 14 aa, Homo sapiens
  CDR3 for beta chain variable domain of TCR clone 364675 (TRBV18, TRBJ2-7)
CASLPRGGAYEQYF

SEQ ID NO: 729351 - protein, 13 aa, Homo sapiens
  CDR3 for alpha chain variable domain of TCR clone 364676 (TRAV2, TRAJ40)
RAVVTSGTYKYIF

SEQ ID NO: 729352 - protein, 14 aa, Homo sapiens
  CDR3 for beta chain variable domain of TCR clone 364676 (TRBV19, TRBJ2-1)
CASPIFVLSGEQFF

SEQ ID NO: 729353 - protein, 14 aa, Homo sapiens
  CDR3 for alpha chain variable domain of TCR clone 364677 (TRAV1-2, TRAJ6)
CSVSLSGGRYIPTF

SEQ ID NO: 729354 - protein, 15 aa, Homo sapiens
  CDR3 for beta chain variable domain of TCR clone 364677 (TRBV28, TRBJ2-7)
CASSPGGRGFYEQYF

SEQ ID NO: 729355 - protein, 14 aa, Homo sapiens
  CDR3 for alpha chain variable domain of TCR clone 364678 (TRAV12-1, TRAJ23)
CVVIVYNQGGKLIF

SEQ ID NO: 729356 - protein, 15 aa, Homo sapiens
  CDR3 for beta chain variable domain of TCR clone 364678 (TRBV20-1, TRBJ1-5)
CSAKPPGRGPQPQHF

SEQ ID NO: 729357 - protein, 12 aa, Homo sapiens
  CDR3 for alpha chain variable domain of TCR clone 364679 (TRAV8-6, TRAJ8)
CAVTPGFQKLVF

SEQ ID NO: 729358 - protein, 16 aa, Homo sapiens
  CDR3 for beta chain variable domain of TCR clone 364679 (TRBV7-3, TRBJ2-2)
CASSLKRGTVSGELLF

SEQ ID NO: 729359 - protein, 14 aa, Homo sapiens
  CDR3 for alpha chain variable domain of TCR clone 364680 (TRAV35, TRAJ33)
CAGSSQDSNYQLIW

SEQ ID NO: 729360 - protein, 15 aa, Homo sapiens
  CDR3 for beta chain variable domain of TCR clone 364680 (TRBV20-1, TRBJ1-1)
CSASRGVAGNTEAFF

SEQ ID NO: 729361 - protein, 11 aa, Homo sapiens
  CDR3 for alpha chain variable domain of TCR clone 364681 (TRAV1-1, TRAJ23)
CAVRQGGKLIF

SEQ ID NO: 729362 - protein, 18 aa, Homo sapiens
  CDR3 for beta chain variable domain of TCR clone 364681 (TRBV20-1, TRBJ2-6)
CSAETTPTHGSGANVLTF

SEQ ID NO: 729363 - protein, 11 aa, Homo sapiens
  CDR3 for alpha chain variable domain of TCR clone 364682 (TRAV1-1, TRAJ23)
CAVRQGGKLIF

SEQ ID NO: 729364 - protein, 13 aa, Homo sapiens
  CDR3 for beta chain variable domain of TCR clone 364682 (TRBV7-9, TRBJ2-2)
CASSLDPTGELFF

SEQ ID NO: 729365 - protein, 13 aa, Homo sapiens
  CDR3 for alpha chain variable domain of TCR clone 364683 (TRAV2, TRAJ40)
CDVVTSGTYKYIF

SEQ ID NO: 729366 - protein, 17 aa, Homo sapiens
  CDR3 for beta chain variable domain of TCR clone 364683 (TRBV11-2, TRBJ2-1)
CASSLYPPGVEYNEQFF

SEQ ID NO: 729367 - protein, 13 aa, Homo sapiens
  CDR3 for alpha chain variable domain of TCR clone 364684 (TRAV2, TRAJ40)
CAVVTSGTYKYIF

SEQ ID NO: 729368 - protein, 13 aa, Homo sapiens
  CDR3 for beta chain variable domain of TCR clone 364684 (TRBV7-9, TRBJ1-2)
CASSLKQNYGYAF

SEQ ID NO: 729369 - protein, 19 aa, Homo sapiens
  CDR3 for alpha chain variable domain of TCR clone 364685 (TRAV1-2, TRAJ26)
CLLPLCCERPDNYGQNFVF

SEQ ID NO: 729370 - protein, 15 aa, Homo sapiens
  CDR3 for beta chain variable domain of TCR clone 364685 (TRBV7-2, TRBJ2-3)
CASSLRGGSTDTQYF

SEQ ID NO: 729371 - protein, 14 aa, Homo sapiens
  CDR3 for alpha chain variable domain of TCR clone 364686 (TRAV13-2, TRAJ9)
CAENSFTGGFKTIF

SEQ ID NO: 729372 - protein, 17 aa, Homo sapiens
  CDR3 for beta chain variable domain of TCR clone 364686 (TRBV7-9, TRBJ2-6)
CASSFGAGYSGANVLTF

SEQ ID NO: 729373 - protein, 15 aa, Homo sapiens
  CDR3 for alpha chain variable domain of TCR clone 364687 (TRAV12-1, TRAJ44)
CVVFVNIGTASKLTF

SEQ ID NO: 729374 - protein, 17 aa, Homo sapiens
  CDR3 for beta chain variable domain of TCR clone 364687 (TRBV7-8, TRBJ2-6)
CASSAGTGGAGANVLTF

SEQ ID NO: 729375 - protein, 15 aa, Homo sapiens
  CDR3 for alpha chain variable domain of TCR clone 364688 (TRAV8-2, TRAJ28)
CVVSESGAGSYHLTF

SEQ ID NO: 729376 - protein, 14 aa, Homo sapiens
  CDR3 for beta chain variable domain of TCR clone 364688 (TRBV7-9, TRBJ2-5)
CASSLVGGEETQYF

SEQ ID NO: 729377 - protein, 15 aa, Homo sapiens
  CDR3 for alpha chain variable domain of TCR clone 364689 (TRAV3, TRAJ30)
CAVRDEYGRDDKIIF

SEQ ID NO: 729378 - protein, 15 aa, Homo sapiens
  CDR3 for beta chain variable domain of TCR clone 364689 (TRBV11-3, TRBJ2-7)
CASSPGPASSYEQYF

SEQ ID NO: 729379 - protein, 13 aa, Homo sapiens
  CDR3 for alpha chain variable domain of TCR clone 364690 (TRAV20, TRAJ42)
CAVQGGSQGNLIF

SEQ ID NO: 729380 - protein, 16 aa, Homo sapiens
  CDR3 for beta chain variable domain of TCR clone 364690 (TRBV7-9, TRBJ1-2)
CASSLGFSSGEDGYTF

SEQ ID NO: 729381 - protein, 13 aa, Homo sapiens
  CDR3 for alpha chain variable domain of TCR clone 364691 (TRAV8-6, TRAJ54)
CAVSDQGAQKPVF

SEQ ID NO: 729382 - protein, 17 aa, Homo sapiens
  CDR3 for beta chain variable domain of TCR clone 364691 (TRBV19, TRBJ1-1)
CASSIAGRGLMNTEAFF

SEQ ID NO: 729383 - protein, 11 aa, Homo sapiens
  CDR3 for alpha chain variable domain of TCR clone 364692 (TRAV21, TRAJ11)
CAVNGYSALTF

SEQ ID NO: 729384 - protein, 11 aa, Homo sapiens
  CDR3 for beta chain variable domain of TCR clone 364692 (TRBV11-2, TRBJ2-7)
CASSSDYEQYF

SEQ ID NO: 729385 - protein, 16 aa, Homo sapiens
  CDR3 for alpha chain variable domain of TCR clone 364693 (TRAV30, TRAJ24)
CGTEIVDADSWGKFQF

SEQ ID NO: 729386 - protein, 14 aa, Homo sapiens
  CDR3 for beta chain variable domain of TCR clone 364693 (TRBV7-9, TRBJ2-4)
CASSLAMGGDIQYF

SEQ ID NO: 729387 - protein, 14 aa, Homo sapiens
  CDR3 for alpha chain variable domain of TCR clone 364694 (TRAV13-1, TRAJ53)
CAASISGSNYKLTV

SEQ ID NO: 729388 - protein, 15 aa, Homo sapiens
  CDR3 for beta chain variable domain of TCR clone 364694 (TRBV4-1, TRBJ1-4)
CASSDTGGTNEKLFF

SEQ ID NO: 729389 - protein, 15 aa, Homo sapiens
  CDR3 for alpha chain variable domain of TCR clone 364695 (TRAV13-1, TRAJ8)
CAASIPNTGFQKLVF

SEQ ID NO: 729390 - protein, 13 aa, Homo sapiens
  CDR3 for beta chain variable domain of TCR clone 364695 (TRBV7-3, TRBJ1-1)
CASSQDWGAEAFF

SEQ ID NO: 729391 - protein, 14 aa, Homo sapiens
  CDR3 for alpha chain variable domain of TCR clone 364696 (TRAV1-2, TRAJ16)
CAVNRFSDGQKLLF

SEQ ID NO: 729392 - protein, 13 aa, Homo sapiens
  CDR3 for beta chain variable domain of TCR clone 364696 (TRBV10-1, TRBJ2-1)
CASSAGPDNEQFF

SEQ ID NO: 729393 - protein, 14 aa, Homo sapiens
  CDR3 for alpha chain variable domain of TCR clone 364697 (TRAV1-2, TRAJ8)
CAVGEDTGFQKLVF

SEQ ID NO: 729394 - protein, 12 aa, Homo sapiens
  CDR3 for beta chain variable domain of TCR clone 364697 (TRBV25-1, TRBJ2-2)
VHRGTNTGELFF

SEQ ID NO: 729395 - protein, 14 aa, Homo sapiens
  CDR3 for alpha chain variable domain of TCR clone 364698 (TRAV3, TRAJ6)
CAVRDSRRKLHTYI

SEQ ID NO: 729396 - protein, 15 aa, Homo sapiens
  CDR3 for beta chain variable domain of TCR clone 364698 (TRBV18, TRBJ2-7)
CASSPLQERTYEQYF

SEQ ID NO: 729397 - protein, 14 aa, Homo sapiens
  CDR3 for alpha chain variable domain of TCR clone 364699 (TRAV26-1, TRAJ22)
CIVRVYGSARQLTF

SEQ ID NO: 729398 - protein, 17 aa, Homo sapiens
  CDR3 for beta chain variable domain of TCR clone 364699 (TRBV7-3, TRBJ2-3)
CASSPGGLAGFGDTQYC

SEQ ID NO: 729399 - protein, 14 aa, Homo sapiens
  CDR3 for alpha chain variable domain of TCR clone 364700 (TRAV27, TRAJ13)
CRSSNSGGYQKVTF

SEQ ID NO: 729400 - protein, 13 aa, Homo sapiens
  CDR3 for beta chain variable domain of TCR clone 364700 (TRBV7-3, TRBJ1-1)
CASSQDWGAEAFF

SEQ ID NO: 729401 - protein, 14 aa, Homo sapiens
  CDR3 for alpha chain variable domain of TCR clone 364701 (TRAV8-3, TRAJ39)
CAVGANNAGNMLTF

SEQ ID NO: 729402 - protein, 15 aa, Homo sapiens
  CDR3 for beta chain variable domain of TCR clone 364701 (TRBV4-3, TRBJ1-1)
CACSQELGRGTEAFF

SEQ ID NO: 729403 - protein, 12 aa, Homo sapiens
  CDR3 for alpha chain variable domain of TCR clone 364702 (TRAV21, TRAJ39)
CAADNAGNMLTF

SEQ ID NO: 729404 - protein, 15 aa, Homo sapiens
  CDR3 for beta chain variable domain of TCR clone 364702 (TRBV10-2, TRBJ2-7)
CASWNRGQATYEQYF

SEQ ID NO: 729405 - protein, 13 aa, Homo sapiens
  CDR3 for alpha chain variable domain of TCR clone 364703 (TRAV1-2, TRAJ9)
CAALNTGGFKTIF

SEQ ID NO: 729406 - protein, 16 aa, Homo sapiens
  CDR3 for beta chain variable domain of TCR clone 364703 (TRBV11-2, TRBJ2-1)
CASSPRLAGAYNEQFF

SEQ ID NO: 729407 - protein, 14 aa, Homo sapiens
  CDR3 for alpha chain variable domain of TCR clone 364704 (TRAV12-2, TRAJ13)
CALKKTGGYQKVTF

SEQ ID NO: 729408 - protein, 15 aa, Homo sapiens
  CDR3 for beta chain variable domain of TCR clone 364704 (TRBV27, TRBJ2-1)
CSSSNGGGSSNEQFF

SEQ ID NO: 729409 - protein, 17 aa, Homo sapiens
  CDR3 for alpha chain variable domain of TCR clone 364705 (TRAV8-2, TRAJ17)
CVVSDRRFKAAGNKLTF

SEQ ID NO: 729410 - protein, 18 aa, Homo sapiens
  CDR3 for beta chain variable domain of TCR clone 364705 (TRBV7-9, TRBJ2-7)
CASSLTTSGSRTWHEQYF

SEQ ID NO: 729411 - protein, 14 aa, Homo sapiens
  CDR3 for alpha chain variable domain of TCR clone 364706 (TRAV13-1, TRAJ32)
CAARGSGATNKLIF

SEQ ID NO: 729412 - protein, 16 aa, Homo sapiens
  CDR3 for beta chain variable domain of TCR clone 364706 (TRBV12-5, TRBJ2-5)
CASGPRTSGNQETQYF

SEQ ID NO: 729413 - protein, 13 aa, Homo sapiens
  CDR3 for alpha chain variable domain of TCR clone 364707 (TRAV3, TRAJ21)
CAVREPDFNTFYF

SEQ ID NO: 729414 - protein, 16 aa, Homo sapiens
  CDR3 for beta chain variable domain of TCR clone 364707 (TRBV5-1, TRBJ2-3)
CASSLGLAVYTDTQYF

SEQ ID NO: 729415 - protein, 15 aa, Homo sapiens
  CDR3 for alpha chain variable domain of TCR clone 364708 (TRAV21, TRAJ13)
CAVRPTSGGYQKVTF

SEQ ID NO: 729416 - protein, 15 aa, Homo sapiens
  CDR3 for beta chain variable domain of TCR clone 364708 (TRBV28, TRBJ2-7)
CSSSPGGRGFYEQYF

SEQ ID NO: 729417 - protein, 18 aa, Homo sapiens
  CDR3 for alpha chain variable domain of TCR clone 364709 (TRAV13-1, TRAJ52)
CAASKRSAGGTSYGKLTF

SEQ ID NO: 729418 - protein, 18 aa, Homo sapiens
  CDR3 for beta chain variable domain of TCR clone 364709 (TRBV24-1, TRBJ2-2)
CATSDSGQGTANTGELFF

SEQ ID NO: 729419 - protein, 11 aa, Homo sapiens
  CDR3 for alpha chain variable domain of TCR clone 364710 (TRAV13-2, TRAJ8)
CSLARLSETLF

SEQ ID NO: 729420 - protein, 13 aa, Homo sapiens
  CDR3 for beta chain variable domain of TCR clone 364710 (TRBV24-1, TRBJ1-4)
CATNNGRSEKLFF

SEQ ID NO: 729421 - protein, 23 aa, Homo sapiens
  CDR3 for alpha chain variable domain of TCR clone 364711 (TRAV26-1, )
CIADSAGNNHIQNPAPAVYQLRD

SEQ ID NO: 729422 - protein, 13 aa, Homo sapiens
  CDR3 for beta chain variable domain of TCR clone 364711 (TRBV20-1, TRBJ2-1)
CSARSSPRDEQFF

SEQ ID NO: 729423 - protein, 15 aa, Homo sapiens
  CDR3 for alpha chain variable domain of TCR clone 364712 (TRAV1-2, TRAJ35)
CAVRDPGGFGIVLHC

SEQ ID NO: 729424 - protein, 14 aa, Homo sapiens
  CDR3 for beta chain variable domain of TCR clone 364712 (TRBV5-1, TRBJ2-1)
CASSLDDRFDEQFF

SEQ ID NO: 729425 - protein, 14 aa, Homo sapiens
  CDR3 for alpha chain variable domain of TCR clone 364713 (TRAV12-2, TRAJ5)
CAVNRSTGRRALTF

SEQ ID NO: 729426 - protein, 14 aa, Homo sapiens
  CDR3 for beta chain variable domain of TCR clone 364713 (TRBV6-1, TRBJ1-3)
CASVQGGGRNTIYF

SEQ ID NO: 729427 - protein, 15 aa, Homo sapiens
  CDR3 for alpha chain variable domain of TCR clone 364714 (TRAV13-1, TRAJ32)
CSASIYGGATNKLIF

SEQ ID NO: 729428 - protein, 12 aa, Homo sapiens
  CDR3 for beta chain variable domain of TCR clone 364714 (TRBV7-6, TRBJ2-3)
CASSTGTDTQYF

SEQ ID NO: 729429 - protein, 12 aa, Homo sapiens
  CDR3 for alpha chain variable domain of TCR clone 364715 (TRAV16, TRAJ10)
CSCTGGGNKLTF

SEQ ID NO: 729430 - protein, 14 aa, Homo sapiens
  CDR3 for beta chain variable domain of TCR clone 364715 (TRBV25-1, TRBJ1-1)
CASTHLGGNTEAFF

SEQ ID NO: 729431 - protein, 16 aa, Homo sapiens
  CDR3 for alpha chain variable domain of TCR clone 364716 (TRAV12-2, TRAJ10)
CAVNRVLTGGGNKLTF

SEQ ID NO: 729432 - protein, 12 aa, Homo sapiens
  CDR3 for beta chain variable domain of TCR clone 364716 (TRBV28, TRBJ2-7)
CASSFSSYEQSF

SEQ ID NO: 729433 - protein, 12 aa, Homo sapiens
  CDR3 for alpha chain variable domain of TCR clone 364717 (TRAV8-4, TRAJ31)
CAVSDSNARLMF

SEQ ID NO: 729434 - protein, 13 aa, Homo sapiens
  CDR3 for beta chain variable domain of TCR clone 364717 (TRBV25-1, TRBJ2-5)
CASSESGRETQYF

SEQ ID NO: 729435 - protein, 18 aa, Homo sapiens
  CDR3 for alpha chain variable domain of TCR clone 364718 (TRAV29/DV5, TRAJ52)
CAAGFRGAGGTSYGKLQF

SEQ ID NO: 729436 - protein, 16 aa, Homo sapiens
  CDR3 for beta chain variable domain of TCR clone 364718 (TRBV7-3, TRBJ2-2)
CASSLKRGTLSGELFF

SEQ ID NO: 729437 - protein, 15 aa, Homo sapiens
  CDR3 for alpha chain variable domain of TCR clone 364719 (TRAV26-1, TRAJ29)
CIVRVAGSGNTPLVF

SEQ ID NO: 729438 - protein, 15 aa, Homo sapiens
  CDR3 for beta chain variable domain of TCR clone 364719 (TRBV28, TRBJ2-5)
CASSPGQGSIETQYF

SEQ ID NO: 729439 - protein, 18 aa, Homo sapiens
  CDR3 for alpha chain variable domain of TCR clone 364720 (TRAV21, TRAJ52)
CAVRPSPAGGTSYGKLTY

SEQ ID NO: 729440 - protein, 13 aa, Homo sapiens
  CDR3 for beta chain variable domain of TCR clone 364720 (TRBV7-3, TRBJ1-1)
CASSQDWGAEAFF

SEQ ID NO: 729441 - protein, 16 aa, Homo sapiens
  CDR3 for alpha chain variable domain of TCR clone 364721 (TRAV26-1, TRAJ22)
CIVSLNFFWFCKATDF

SEQ ID NO: 729442 - protein, 16 aa, Homo sapiens
  CDR3 for beta chain variable domain of TCR clone 364721 (TRBV5-1, TRBJ2-3)
CASSLGLAVYTDTQYF

SEQ ID NO: 729443 - protein, 11 aa, Homo sapiens
  CDR3 for alpha chain variable domain of TCR clone 364722 (TRAV1-2, TRAJ20)
CAVSNDYKLSF

SEQ ID NO: 729444 - protein, 15 aa, Homo sapiens
  CDR3 for beta chain variable domain of TCR clone 364722 (TRBV7-3, TRBJ2-1)
CASSPTGGGEVEQFF

SEQ ID NO: 729445 - protein, 14 aa, Homo sapiens
  CDR3 for alpha chain variable domain of TCR clone 364723 (TRAV2, TRAJ9)
CAVEDRRGGFKTIF

SEQ ID NO: 729446 - protein, 17 aa, Homo sapiens
  CDR3 for beta chain variable domain of TCR clone 364723 (TRBV4-1, TRBJ2-7)
CASSRDPLGVRGGEQYF

SEQ ID NO: 729447 - protein, 12 aa, Homo sapiens
  CDR3 for alpha chain variable domain of TCR clone 364724 (TRAV3, TRAJ31)
CAAQRANARFMF

SEQ ID NO: 729448 - protein, 16 aa, Homo sapiens
  CDR3 for beta chain variable domain of TCR clone 364724 (TRBV4-2, TRBJ1-1)
CASSPSPGRAAPEDFF

SEQ ID NO: 729449 - protein, 17 aa, Homo sapiens
  CDR3 for alpha chain variable domain of TCR clone 364725 (TRAV3, TRAJ6)
CAVRDVPRAGGSYIPTF

SEQ ID NO: 729450 - protein, 14 aa, Homo sapiens
  CDR3 for beta chain variable domain of TCR clone 364725 (TRBV7-2, TRBJ2-7)
CASSPKTSFYEHYF

SEQ ID NO: 729451 - protein, 14 aa, Homo sapiens
  CDR3 for alpha chain variable domain of TCR clone 364726 (TRAV13-1, TRAJ15)
CAASKTQAGTALIF

SEQ ID NO: 729452 - protein, 15 aa, Homo sapiens
  CDR3 for beta chain variable domain of TCR clone 364726 (TRBV2, TRBJ2-5)
CASTRDGGPQETQYF

SEQ ID NO: 729453 - protein, 15 aa, Homo sapiens
  CDR3 for alpha chain variable domain of TCR clone 364727 (TRAV35, TRAJ40)
CAGQLGTSGTYKYIF

SEQ ID NO: 729454 - protein, 17 aa, Homo sapiens
  CDR3 for beta chain variable domain of TCR clone 364727 (TRBV7-2, TRBJ2-2)
CASSPRGAGEGTGELFF

SEQ ID NO: 729455 - protein, 15 aa, Homo sapiens
  CDR3 for alpha chain variable domain of TCR clone 364728 (TRAV21, TRAJ53)
CATLNSGGSNYKLTF

SEQ ID NO: 729456 - protein, 15 aa, Homo sapiens
  CDR3 for beta chain variable domain of TCR clone 364728 (TRBV6-3, TRBJ2-7)
CASSSPGTVFYEQYV

SEQ ID NO: 729457 - protein, 11 aa, Homo sapiens
  CDR3 for alpha chain variable domain of TCR clone 364729 (TRAV12-3, TRAJ43)
CAMSVSNDMRF

SEQ ID NO: 729458 - protein, 20 aa, Homo sapiens
  CDR3 for beta chain variable domain of TCR clone 364729 (TRBV28, TRBJ2-1)
CASTPSGRSPGLAGGNEQFF

SEQ ID NO: 729459 - protein, 14 aa, Homo sapiens
  CDR3 for alpha chain variable domain of TCR clone 364730 (TRAV12-2, TRAJ17)
CAVLFKAAGNKLIF

SEQ ID NO: 729460 - protein, 20 aa, Homo sapiens
  CDR3 for beta chain variable domain of TCR clone 364730 (TRBV19, TRBJ2-1)
CASSISRTVTSTRLNNEQFF

SEQ ID NO: 729461 - protein, 15 aa, Homo sapiens
  CDR3 for alpha chain variable domain of TCR clone 364731 (TRAV3, TRAJ3)
CAVRDRDSSASKIIL

SEQ ID NO: 729462 - protein, 18 aa, Homo sapiens
  CDR3 for beta chain variable domain of TCR clone 364731 (TRBV11-2, TRBJ2-3)
CASSLGGASRGAPNTQYF

SEQ ID NO: 729463 - protein, 10 aa, Homo sapiens
  CDR3 for alpha chain variable domain of TCR clone 364732 (TRAV1-2, TRAJ31)
CVSEDARLMF

SEQ ID NO: 729464 - protein, 11 aa, Homo sapiens
  CDR3 for beta chain variable domain of TCR clone 364732 (TRBV7-8, TRBJ2-7)
CASSLSLEQYF

SEQ ID NO: 729465 - protein, 14 aa, Homo sapiens
  CDR3 for alpha chain variable domain of TCR clone 364733 (TRAV2, TRAJ9)
CAVEDRSGGFKTIF

SEQ ID NO: 729466 - protein, 15 aa, Homo sapiens
  CDR3 for beta chain variable domain of TCR clone 364733 (TRBV4-2, TRBJ1-2)
CASSQRTGGRDGYTF

SEQ ID NO: 729467 - protein, 12 aa, Homo sapiens
  CDR3 for alpha chain variable domain of TCR clone 364734 (TRAV12-3, TRAJ17)
CAMTLTGNKLTV

SEQ ID NO: 729468 - protein, 15 aa, Homo sapiens
  CDR3 for beta chain variable domain of TCR clone 364734 (TRBV10-3, TRBJ2-3)
CAISLTSGGTDTQYF

SEQ ID NO: 729469 - protein, 13 aa, Homo sapiens
  CDR3 for alpha chain variable domain of TCR clone 364735 (TRAV1-1, TRAJ16)
CAVMFSDGQKLLF

SEQ ID NO: 729470 - protein, 13 aa, Homo sapiens
  CDR3 for beta chain variable domain of TCR clone 364735 (TRBV13, TRBJ2-5)
CASSPEVGETQYF

SEQ ID NO: 729471 - protein, 12 aa, Homo sapiens
  CDR3 for alpha chain variable domain of TCR clone 364736 (TRAV1-1, TRAJ39)
CAVPVVGNMLTF

SEQ ID NO: 729472 - protein, 15 aa, Homo sapiens
  CDR3 for beta chain variable domain of TCR clone 364736 (TRBV19, TRBJ1-6)
CASSTQGAVGSTLDF

SEQ ID NO: 729473 - protein, 15 aa, Homo sapiens
  CDR3 for alpha chain variable domain of TCR clone 364737 (TRAV17, TRAJ23)
CATDAEDNQGGKLSF

SEQ ID NO: 729474 - protein, 12 aa, Homo sapiens
  CDR3 for beta chain variable domain of TCR clone 364737 (TRBV2, TRBJ2-1)
CAKREGYNGQFF

SEQ ID NO: 729475 - protein, 14 aa, Homo sapiens
  CDR3 for alpha chain variable domain of TCR clone 364738 (TRAV23/DV6, TRAJ40)
CAARKNSGTYKYIF

SEQ ID NO: 729476 - protein, 14 aa, Homo sapiens
  CDR3 for beta chain variable domain of TCR clone 364738 (TRBV10-3, TRBJ2-5)
CAISERDDQETQYF

SEQ ID NO: 729477 - protein, 13 aa, Homo sapiens
  CDR3 for alpha chain variable domain of TCR clone 364739 (TRAV1-2, TRAJ12)
CAVSMDSSYKLIF

SEQ ID NO: 729478 - protein, 14 aa, Homo sapiens
  CDR3 for beta chain variable domain of TCR clone 364739 (TRBV27, TRBJ2-5)
CQQFNTFWGGDQYF

SEQ ID NO: 729479 - protein, 15 aa, Homo sapiens
  CDR3 for alpha chain variable domain of TCR clone 364740 (TRAV3, TRAJ22)
CAVRDRGGSARQLTF

SEQ ID NO: 729480 - protein, 15 aa, Homo sapiens
  CDR3 for beta chain variable domain of TCR clone 364740 (TRBV7-9, TRBJ1-5)
CASSRGHQPNQPQHF

SEQ ID NO: 729481 - protein, 12 aa, Homo sapiens
  CDR3 for alpha chain variable domain of TCR clone 364741 (TRAV8-3, TRAJ10)
CAPTGGGNKLTF

SEQ ID NO: 729482 - protein, 15 aa, Homo sapiens
  CDR3 for beta chain variable domain of TCR clone 364741 (TRBV11-3, TRBJ2-3)
CASLKDGREGDTQYF

SEQ ID NO: 729483 - protein, 15 aa, Homo sapiens
  CDR3 for alpha chain variable domain of TCR clone 364742 (TRAV17, TRAJ57)
CATGPSQGGSEKLVF

SEQ ID NO: 729484 - protein, 16 aa, Homo sapiens
  CDR3 for beta chain variable domain of TCR clone 364742 (TRBV20-1, TRBJ1-4)
CSAPGQGLLTNEKLFF

SEQ ID NO: 729485 - protein, 14 aa, Homo sapiens
  CDR3 for alpha chain variable domain of TCR clone 364743 (TRAV12-2, TRAJ9)
CAVNMEGGGFKTIF

SEQ ID NO: 729486 - protein, 18 aa, Homo sapiens
  CDR3 for beta chain variable domain of TCR clone 364743 (TRBV2, TRBJ2-5)
CASSEVQHKRPSTSGQAR

SEQ ID NO: 729487 - protein, 13 aa, Homo sapiens
  CDR3 for alpha chain variable domain of TCR clone 364744 (TRAV12-1, TRAJ21)
CVVNEYNFNKFYF

SEQ ID NO: 729488 - protein, 14 aa, Homo sapiens
  CDR3 for beta chain variable domain of TCR clone 364744 (TRBV28, TRBJ2-7)
CASTNRGRAYEQYF

SEQ ID NO: 729489 - protein, 17 aa, Homo sapiens
  CDR3 for alpha chain variable domain of TCR clone 364745 (TRAV17, TRAJ7)
CATLGRLAFGKGNQVVV

SEQ ID NO: 729490 - protein, 14 aa, Homo sapiens
  CDR3 for beta chain variable domain of TCR clone 364745 (TRBV2, TRBJ1-5)
CASSGTGFNQPQHF

SEQ ID NO: 729491 - protein, 13 aa, Homo sapiens
  CDR3 for alpha chain variable domain of TCR clone 364746 (TRAV12-2, TRAJ20)
CAVYPSNDYKLSF

SEQ ID NO: 729492 - protein, 14 aa, Homo sapiens
  CDR3 for beta chain variable domain of TCR clone 364746 (TRBV11-2, TRBJ2-7)
CASSSTGEGYEQYF

SEQ ID NO: 729493 - protein, 15 aa, Homo sapiens
  CDR3 for alpha chain variable domain of TCR clone 364747 (TRAV21, TRAJ53)
CATLNSGGSNYKLTF

SEQ ID NO: 729494 - protein, 16 aa, Homo sapiens
  CDR3 for beta chain variable domain of TCR clone 364747 (TRBV7-9, TRBJ1-2)
CASSISLDRGGYGYTF

SEQ ID NO: 729495 - protein, 13 aa, Homo sapiens
  CDR3 for alpha chain variable domain of TCR clone 364748 (TRAV2, TRAJ5)
CAVPDTGRRALTF

SEQ ID NO: 729496 - protein, 13 aa, Homo sapiens
  CDR3 for beta chain variable domain of TCR clone 364748 (TRBV7-3, TRBJ1-1)
CASSQDWGAEAFF

SEQ ID NO: 729497 - protein, 17 aa, Homo sapiens
  CDR3 for alpha chain variable domain of TCR clone 364749 (TRAV8-6, TRAJ58)
CAVSSWVGETSGSRLTF

SEQ ID NO: 729498 - protein, 15 aa, Homo sapiens
  CDR3 for beta chain variable domain of TCR clone 364749 (TRBV20-1, TRBJ2-7)
CSARDRVSVMDEQYF

SEQ ID NO: 729499 - protein, 14 aa, Homo sapiens
  CDR3 for alpha chain variable domain of TCR clone 364750 (TRAV1-2, TRAJ27)
CAPAEYTNAGKSTF

SEQ ID NO: 729500 - protein, 14 aa, Homo sapiens
  CDR3 for beta chain variable domain of TCR clone 364750 (TRBV19, TRBJ2-1)
CASPTFVLSGEQFF

SEQ ID NO: 729501 - protein, 12 aa, Homo sapiens
  CDR3 for alpha chain variable domain of TCR clone 364751 (TRAV17, TRAJ20)
CATALNDYRLSF

SEQ ID NO: 729502 - protein, 12 aa, Homo sapiens
  CDR3 for beta chain variable domain of TCR clone 364751 (TRBV10-3, TRBJ2-7)
CARGADSGEQYF

SEQ ID NO: 729503 - protein, 14 aa, Homo sapiens
  CDR3 for alpha chain variable domain of TCR clone 364752 (TRAV26-1, TRAJ52)
CIAAGGTSYGKLTF

SEQ ID NO: 729504 - protein, 15 aa, Homo sapiens
  CDR3 for beta chain variable domain of TCR clone 364752 (TRBV4-1, TRBJ2-5)
CASSQWDLYQETQYF

SEQ ID NO: 729505 - protein, 14 aa, Homo sapiens
  CDR3 for alpha chain variable domain of TCR clone 364753 (TRAV12-2, TRAJ13)
CAVKKTGGNKKVTF

SEQ ID NO: 729506 - protein, 15 aa, Homo sapiens
  CDR3 for beta chain variable domain of TCR clone 364753 (TRBV27, TRBJ2-1)
CASSNGGGSSNEQFF

SEQ ID NO: 729507 - protein, 14 aa, Homo sapiens
  CDR3 for alpha chain variable domain of TCR clone 364754 (TRAV1-2, TRAJ16)
CAVNRFSDGQKLLF

SEQ ID NO: 729508 - protein, 14 aa, Homo sapiens
  CDR3 for beta chain variable domain of TCR clone 364754 (TRBV20-1, TRBJ1-1)
CSARAVNGYTEAFF

SEQ ID NO: 729509 - protein, 11 aa, Homo sapiens
  CDR3 for alpha chain variable domain of TCR clone 364755 (TRAV17, TRAJ43)
CATPRSNDMRF

SEQ ID NO: 729510 - protein, 15 aa, Homo sapiens
  CDR3 for beta chain variable domain of TCR clone 364755 (TRBV5-1, TRBJ2-6)
CASQQDSSGANVLTF

SEQ ID NO: 729511 - protein, 11 aa, Homo sapiens
  CDR3 for alpha chain variable domain of TCR clone 364756 (TRAV2, TRAJ13)
CASGGYQKVTF

SEQ ID NO: 729512 - protein, 16 aa, Homo sapiens
  CDR3 for beta chain variable domain of TCR clone 364756 (TRBV7-2, TRBJ2-1)
CASSLVRASGGNEQFF

SEQ ID NO: 729513 - protein, 13 aa, Homo sapiens
  CDR3 for alpha chain variable domain of TCR clone 364757 (TRAV3, TRAJ21)
CAVREPDFNKFYF

SEQ ID NO: 729514 - protein, 16 aa, Homo sapiens
  CDR3 for beta chain variable domain of TCR clone 364757 (TRBV7-3, TRBJ2-1)
CASSFTGRRSYNEQFF

SEQ ID NO: 729515 - protein, 18 aa, Homo sapiens
  CDR3 for alpha chain variable domain of TCR clone 364758 (TRAV26-1, TRAJ52)
CIVDPVGAGGTSYGKLTF

SEQ ID NO: 729516 - protein, 14 aa, Homo sapiens
  CDR3 for beta chain variable domain of TCR clone 364758 (TRBV5-4, TRBJ1-1)
CASSLDSRRDEAFF

SEQ ID NO: 729517 - protein, 17 aa, Homo sapiens
  CDR3 for alpha chain variable domain of TCR clone 364759 (TRAV16, TRAJ37)
RAFWPKNGSSNTGKLIF

SEQ ID NO: 729518 - protein, 16 aa, Homo sapiens
  CDR3 for beta chain variable domain of TCR clone 364759 (TRBV15, TRBJ1-2)
CATSRGPRTGGGGYTF

SEQ ID NO: 729519 - protein, 12 aa, Homo sapiens
  CDR3 for alpha chain variable domain of TCR clone 364760 (TRAV27, TRAJ35)
CAGADFGNVLHC

SEQ ID NO: 729520 - protein, 14 aa, Homo sapiens
  CDR3 for beta chain variable domain of TCR clone 364760 (TRBV7-8, TRBJ2-5)
CASSATGGQETQYF

SEQ ID NO: 729521 - protein, 12 aa, Homo sapiens
  CDR3 for alpha chain variable domain of TCR clone 364761 (TRAV2, TRAJ31)
CAVEANIARLMF

SEQ ID NO: 729522 - protein, 14 aa, Homo sapiens
  CDR3 for beta chain variable domain of TCR clone 364761 (TRBV28, TRBJ1-5)
CASSRTGLNQPQHF

SEQ ID NO: 729523 - protein, 13 aa, Homo sapiens
  CDR3 for alpha chain variable domain of TCR clone 364762 (TRAV14/DV4, TRAJ40)
CAMSGSGTYKYIF

SEQ ID NO: 729524 - protein, 15 aa, Homo sapiens
  CDR3 for beta chain variable domain of TCR clone 364762 (TRBV20-1, TRBJ2-7)
CSARERVSGMDEQYF

SEQ ID NO: 729525 - protein, 15 aa, Homo sapiens
  CDR3 for alpha chain variable domain of TCR clone 364763 (TRAV21, TRAJ53)
CATLNSGGSNYKLTF

SEQ ID NO: 729526 - protein, 16 aa, Homo sapiens
  CDR3 for beta chain variable domain of TCR clone 364763 (TRBV4-3, TRBJ2-2)
CASSRLQGSGTGELFF

SEQ ID NO: 729527 - protein, 15 aa, Homo sapiens
  CDR3 for alpha chain variable domain of TCR clone 364764 (TRAV17, TRAJ40)
CASKYICGTGTRLKG

SEQ ID NO: 729528 - protein, 17 aa, Homo sapiens
  CDR3 for beta chain variable domain of TCR clone 364764 (TRBV11-2, TRBJ2-4)
CASSFLALGGAGDIQYF

SEQ ID NO: 729529 - protein, 13 aa, Homo sapiens
  CDR3 for alpha chain variable domain of TCR clone 364765 (TRAV1-2, TRAJ9)
CAAVNTGGFKTIF

SEQ ID NO: 729530 - protein, 14 aa, Homo sapiens
  CDR3 for beta chain variable domain of TCR clone 364765 (TRBV13, TRBJ2-3)
CASSSGSPTDTQYF

SEQ ID NO: 729531 - protein, 13 aa, Homo sapiens
  CDR3 for alpha chain variable domain of TCR clone 364766 (TRAV3, TRAJ21)
CAVREQDFNKFYF

SEQ ID NO: 729532 - protein, 16 aa, Homo sapiens
  CDR3 for beta chain variable domain of TCR clone 364766 (TRBV7-2, TRBJ2-5)
CASSSKWLSGQETQYF

SEQ ID NO: 729533 - protein, 13 aa, Homo sapiens
  CDR3 for alpha chain variable domain of TCR clone 364767 (TRAV21, TRAJ45)
CAVMGGGADGLTF

SEQ ID NO: 729534 - protein, 16 aa, Homo sapiens
  CDR3 for beta chain variable domain of TCR clone 364767 (TRBV4-2, TRBJ2-3)
CASSQELAGDTDTQYF

SEQ ID NO: 729535 - protein, 14 aa, Homo sapiens
  CDR3 for alpha chain variable domain of TCR clone 364768 (TRAV12-2, TRAJ5)
CAVNRSTGRRALTF

SEQ ID NO: 729536 - protein, 15 aa, Homo sapiens
  CDR3 for beta chain variable domain of TCR clone 364768 (TRBV10-2, TRBJ2-5)
CASKPEDRRQETQYF

SEQ ID NO: 729537 - protein, 12 aa, Homo sapiens
  CDR3 for alpha chain variable domain of TCR clone 364769 (TRAV12-3, TRAJ17)
CAMTLTGNKLTF

SEQ ID NO: 729538 - protein, 13 aa, Homo sapiens
  CDR3 for beta chain variable domain of TCR clone 364769 (TRBV10-3, TRBJ1-2)
CAISERDSYGYSF

SEQ ID NO: 729539 - protein, 17 aa, Homo sapiens
  CDR3 for alpha chain variable domain of TCR clone 364770 (TRAV22, TRAJ53)
CAVEFSNSGGSNYKLTF

SEQ ID NO: 729540 - protein, 11 aa, Homo sapiens
  CDR3 for beta chain variable domain of TCR clone 364770 (TRBV27, TRBJ2-3)
CASSLGDTQYF

SEQ ID NO: 729541 - protein, 11 aa, Homo sapiens
  CDR3 for alpha chain variable domain of TCR clone 364771 (TRAV27, TRAJ43)
CAGANNNDMRF

SEQ ID NO: 729542 - protein, 13 aa, Homo sapiens
  CDR3 for beta chain variable domain of TCR clone 364771 (TRBV7-9, TRBJ1-2)
CASSLKQNYGYTF

SEQ ID NO: 729543 - protein, 14 aa, Homo sapiens
  CDR3 for alpha chain variable domain of TCR clone 364772 (TRAV12-3, TRAJ10)
SHLPLTGGGNKLTF

SEQ ID NO: 729544 - protein, 12 aa, Homo sapiens
  CDR3 for beta chain variable domain of TCR clone 364772 (TRBV5-4, TRBJ2-7)
CASSLEAYEQYF

SEQ ID NO: 729545 - protein, 16 aa, Homo sapiens
  CDR3 for alpha chain variable domain of TCR clone 364773 (TRAV30, TRAJ24)
CGTEIVDAGSWGKVQF

SEQ ID NO: 729546 - protein, 14 aa, Homo sapiens
  CDR3 for beta chain variable domain of TCR clone 364773 (TRBV12-5, TRBJ2-5)
CASGSRTHQETQYF

SEQ ID NO: 729547 - protein, 14 aa, Homo sapiens
  CDR3 for alpha chain variable domain of TCR clone 364774 (TRAV17, TRAJ39)
CATDSARAGNMLTF

SEQ ID NO: 729548 - protein, 15 aa, Homo sapiens
  CDR3 for beta chain variable domain of TCR clone 364774 (TRBV13, TRBJ1-5)
CASSFGQGGVQPQHF

SEQ ID NO: 729549 - protein, 15 aa, Homo sapiens
  CDR3 for alpha chain variable domain of TCR clone 364775 (TRAV23/DV6, TRAJ44)
CAATIRYGTASKLTF

SEQ ID NO: 729550 - protein, 12 aa, Homo sapiens
  CDR3 for beta chain variable domain of TCR clone 364775 (TRBV3-1, TRBJ2-1)
CASSQGSSGQFF

SEQ ID NO: 729551 - protein, 15 aa, Homo sapiens
  CDR3 for alpha chain variable domain of TCR clone 364776 (TRAV2, TRAJ24)
CAVEVLTDSWGKFQF

SEQ ID NO: 729552 - protein, 17 aa, Homo sapiens
  CDR3 for beta chain variable domain of TCR clone 364776 (TRBV7-8, TRBJ2-6)
CASSAGTGGAGANDLTF

SEQ ID NO: 729553 - protein, 12 aa, Homo sapiens
  CDR3 for alpha chain variable domain of TCR clone 364777 (TRAV21, TRAJ33)
CAKMDSNYQLIR

SEQ ID NO: 729554 - protein, 14 aa, Homo sapiens
  CDR3 for beta chain variable domain of TCR clone 364777 (TRBV12-4, TRBJ2-3)
CASTIAGWGDTQYF

SEQ ID NO: 729555 - protein, 17 aa, Homo sapiens
  CDR3 for alpha chain variable domain of TCR clone 364778 (TRAV3, TRAJ6)
CAVRDGPRAGGSYIPTF

SEQ ID NO: 729556 - protein, 18 aa, Homo sapiens
  CDR3 for beta chain variable domain of TCR clone 364778 (TRBV7-9, TRBJ2-7)
CASSLTTSGGRTWYEQYF

SEQ ID NO: 729557 - protein, 12 aa, Homo sapiens
  CDR3 for alpha chain variable domain of TCR clone 364779 (TRAV38-1, TRAJ32)
CAPLGATNKLIF

SEQ ID NO: 729558 - protein, 14 aa, Homo sapiens
  CDR3 for beta chain variable domain of TCR clone 364779 (TRBV29-1, TRBJ2-5)
CSVETSGSGETQYY

SEQ ID NO: 729559 - protein, 18 aa, Homo sapiens
  CDR3 for alpha chain variable domain of TCR clone 364780 (TRAV8-4, TRAJ52)
CAVASFNAGGTSYGKLTF

SEQ ID NO: 729560 - protein, 12 aa, Homo sapiens
  CDR3 for beta chain variable domain of TCR clone 364780 (TRBV11-2, TRBJ2-2)
CASSLGGGELFF

SEQ ID NO: 729561 - protein, 11 aa, Homo sapiens
  CDR3 for alpha chain variable domain of TCR clone 364781 (TRAV23/DV6, TRAJ48)
CAPRWGEKLTF

SEQ ID NO: 729562 - protein, 17 aa, Homo sapiens
  CDR3 for beta chain variable domain of TCR clone 364781 (TRBV11-2, TRBJ2-1)
CASSLYPPGVEYNEQFF

SEQ ID NO: 729563 - protein, 14 aa, Homo sapiens
  CDR3 for alpha chain variable domain of TCR clone 364782 (TRAV1-2, TRAJ8)
CAVREDTGFQKLVF

SEQ ID NO: 729564 - protein, 15 aa, Homo sapiens
  CDR3 for beta chain variable domain of TCR clone 364782 (TRBV7-3, TRBJ2-1)
CASIPTGGSRNEQFF

SEQ ID NO: 729565 - protein, 16 aa, Homo sapiens
  CDR3 for alpha chain variable domain of TCR clone 364783 (TRAV20, TRAJ10)
CAVLRGLTGGGNKLTF

SEQ ID NO: 729566 - protein, 14 aa, Homo sapiens
  CDR3 for beta chain variable domain of TCR clone 364783 (TRBV7-3, TRBJ2-7)
CASSLKADSYEQYF

SEQ ID NO: 729567 - protein, 13 aa, Homo sapiens
  CDR3 for alpha chain variable domain of TCR clone 364784 (TRAV12-3, TRAJ40)
CAMSARGTYKYIF

SEQ ID NO: 729568 - protein, 11 aa, Homo sapiens
  CDR3 for beta chain variable domain of TCR clone 364784 (TRBV12-4, TRBJ2-3)
CASTATDTQYF

SEQ ID NO: 729569 - protein, 14 aa, Homo sapiens
  CDR3 for alpha chain variable domain of TCR clone 364785 (TRAV38-2/DV8, TRAJ23)
CAYRSQNQGGKLIF

SEQ ID NO: 729570 - protein, 13 aa, Homo sapiens
  CDR3 for beta chain variable domain of TCR clone 364785 (TRBV7-3, TRBJ1-1)
CASSQDWGAEAFF

SEQ ID NO: 729571 - protein, 12 aa, Homo sapiens
  CDR3 for alpha chain variable domain of TCR clone 364786 (TRAV21, TRAJ33)
CANMDSNYQLIW

SEQ ID NO: 729572 - protein, 15 aa, Homo sapiens
  CDR3 for beta chain variable domain of TCR clone 364786 (TRBV27, TRBJ2-1)
CASSLRAGIPGEQFF

SEQ ID NO: 729573 - protein, 15 aa, Homo sapiens
  CDR3 for alpha chain variable domain of TCR clone 364787 (TRAV13-2, TRAJ53)
CAERGSRGSNYKLTF

SEQ ID NO: 729574 - protein, 14 aa, Homo sapiens
  CDR3 for beta chain variable domain of TCR clone 364787 (TRBV4-1, TRBJ2-2)
CASSEYPDTGELFF

SEQ ID NO: 729575 - protein, 15 aa, Homo sapiens
  CDR3 for alpha chain variable domain of TCR clone 364788 (TRAV2, TRAJ9)
CAVAALNTGGFKTNF

SEQ ID NO: 729576 - protein, 14 aa, Homo sapiens
  CDR3 for beta chain variable domain of TCR clone 364788 (TRBV7-8, TRBJ2-5)
CASSATGGQETQYF

SEQ ID NO: 729577 - protein, 10 aa, Homo sapiens
  CDR3 for alpha chain variable domain of TCR clone 364789 (TRAV13-1, TRAJ26)
CAPYGQNFVF

SEQ ID NO: 729578 - protein, 15 aa, Homo sapiens
  CDR3 for beta chain variable domain of TCR clone 364789 (TRBV28, TRBJ2-3)
CASSQELGVTDTQYF

SEQ ID NO: 729579 - protein, 16 aa, Homo sapiens
  CDR3 for alpha chain variable domain of TCR clone 364790 (TRAV30, TRAJ24)
CGTEIVDADSWGKFQF

SEQ ID NO: 729580 - protein, 19 aa, Homo sapiens
  CDR3 for beta chain variable domain of TCR clone 364790 (TRBV7-2, TRBJ1-5)
CASSLGHGTRSYSNQPQHF

SEQ ID NO: 729581 - protein, 12 aa, Homo sapiens
  CDR3 for alpha chain variable domain of TCR clone 364791 (TRAV13-1, TRAJ48)
CAANFGNEKLTF

SEQ ID NO: 729582 - protein, 12 aa, Homo sapiens
  CDR3 for beta chain variable domain of TCR clone 364791 (TRBV11-2, TRBJ2-1)
CASSPGNNEQSF

SEQ ID NO: 729583 - protein, 16 aa, Homo sapiens
  CDR3 for alpha chain variable domain of TCR clone 364792 (TRAV3, TRAJ18)
CAVRDGRGPTLGGLYF

SEQ ID NO: 729584 - protein, 15 aa, Homo sapiens
  CDR3 for beta chain variable domain of TCR clone 364792 (TRBV7-9, TRBJ1-6)
CASSSPGRGNSPLHF

SEQ ID NO: 729585 - protein, 16 aa, Homo sapiens
  CDR3 for alpha chain variable domain of TCR clone 364793 (TRAV3, TRAJ27)
CAVRDPQGTNAGKSTF

SEQ ID NO: 729586 - protein, 17 aa, Homo sapiens
  CDR3 for beta chain variable domain of TCR clone 364793 (TRBV4-1, TRBJ2-7)
CASSQGRGLHTSYEQYF

SEQ ID NO: 729587 - protein, 14 aa, Homo sapiens
  CDR3 for alpha chain variable domain of TCR clone 364794 (TRAV12-2, TRAJ53)
CAVKGGGSNYKLTC

SEQ ID NO: 729588 - protein, 15 aa, Homo sapiens
  CDR3 for beta chain variable domain of TCR clone 364794 (TRBV11-2, TRBJ2-2)
CASSLDTGNTGELFF

SEQ ID NO: 729589 - protein, 15 aa, Homo sapiens
  CDR3 for alpha chain variable domain of TCR clone 364795 (TRAV3, TRAJ22)
CAVRDRGGSARQLTF

SEQ ID NO: 729590 - protein, 14 aa, Homo sapiens
  CDR3 for beta chain variable domain of TCR clone 364795 (TRBV20-1, TRBJ1-1)
CSAQTRIGGTEASF

SEQ ID NO: 729591 - protein, 16 aa, Homo sapiens
  CDR3 for alpha chain variable domain of TCR clone 364796 (TRAV3, TRAJ5)
CAVRNLMDTVRRALTF

SEQ ID NO: 729592 - protein, 16 aa, Homo sapiens
  CDR3 for beta chain variable domain of TCR clone 364796 (TRBV4-2, TRBJ2-7)
CASSQEGLAKSYEQYF

SEQ ID NO: 729593 - protein, 15 aa, Homo sapiens
  CDR3 for alpha chain variable domain of TCR clone 364797 (TRAV26-1, TRAJ44)
CIVRANTGTASNLTF

SEQ ID NO: 729594 - protein, 16 aa, Homo sapiens
  CDR3 for beta chain variable domain of TCR clone 364797 (TRBV7-7, TRBJ2-1)
CASSLACGTSYNEQFF

SEQ ID NO: 729595 - protein, 14 aa, Homo sapiens
  CDR3 for alpha chain variable domain of TCR clone 364798 (TRAV13-1, TRAJ35)
CAASKGGFGNVLHC

SEQ ID NO: 729596 - protein, 13 aa, Homo sapiens
  CDR3 for beta chain variable domain of TCR clone 364798 (TRBV7-3, TRBJ1-1)
GASRQEWGAEAFF

SEQ ID NO: 729597 - protein, 15 aa, Homo sapiens
  CDR3 for alpha chain variable domain of TCR clone 364799 (TRAV13-2, TRAJ45)
CAENNLGGGADGLTF

SEQ ID NO: 729598 - protein, 13 aa, Homo sapiens
  CDR3 for beta chain variable domain of TCR clone 364799 (TRBV25-1, TRBJ2-6)
CASRGPGANVLTF

SEQ ID NO: 729599 - protein, 15 aa, Homo sapiens
  CDR3 for alpha chain variable domain of TCR clone 364800 (TRAV2, TRAJ11)
CAVGGRNSGYRTLTF

SEQ ID NO: 729600 - protein, 14 aa, Homo sapiens
  CDR3 for beta chain variable domain of TCR clone 364800 (TRBV4-1, TRBJ2-2)
CASSQAVNTGELFF

SEQ ID NO: 729601 - protein, 13 aa, Homo sapiens
  CDR3 for alpha chain variable domain of TCR clone 364801 (TRAV8-4, TRAJ10)
CAAFTGGGNKLIF

SEQ ID NO: 729602 - protein, 15 aa, Homo sapiens
  CDR3 for beta chain variable domain of TCR clone 364801 (TRBV2, TRBJ2-3)
CASSDFEKATDTQYF

SEQ ID NO: 729603 - protein, 12 aa, Homo sapiens
  CDR3 for alpha chain variable domain of TCR clone 364802 (TRAV3, TRAJ20)
CAVRDPDYKLSF

SEQ ID NO: 729604 - protein, 13 aa, Homo sapiens
  CDR3 for beta chain variable domain of TCR clone 364802 (TRBV5-5, TRBJ1-2)
CASSFWRGEDYTF

SEQ ID NO: 729605 - protein, 12 aa, Homo sapiens
  CDR3 for alpha chain variable domain of TCR clone 364803 (TRAV13-1, TRAJ49)
CAASPMGNQFYF

SEQ ID NO: 729606 - protein, 15 aa, Homo sapiens
  CDR3 for beta chain variable domain of TCR clone 364803 (TRBV5-1, TRBJ2-7)
CASSLMTSGSNEQYF

SEQ ID NO: 729607 - protein, 15 aa, Homo sapiens
  CDR3 for alpha chain variable domain of TCR clone 364804 (TRAV1-1, TRAJ24)
CALSGGTDSWGKFQF

SEQ ID NO: 729608 - protein, 16 aa, Homo sapiens
  CDR3 for beta chain variable domain of TCR clone 364804 (TRBV2, TRBJ2-7)
CASSEPWKGPSYEQYF

SEQ ID NO: 729609 - protein, 12 aa, Homo sapiens
  CDR3 for alpha chain variable domain of TCR clone 364805 (TRAV8-3, TRAJ20)
CAVDFNDYKLSF

SEQ ID NO: 729610 - protein, 12 aa, Homo sapiens
  CDR3 for beta chain variable domain of TCR clone 364805 (TRBV29-1, TRBJ2-3)
CSVTGGAYTQYF

SEQ ID NO: 729611 - protein, 13 aa, Homo sapiens
  CDR3 for alpha chain variable domain of TCR clone 364806 (TRAV8-3, TRAJ44)
CAVVPGTDSKLTF

SEQ ID NO: 729612 - protein, 14 aa, Homo sapiens
  CDR3 for beta chain variable domain of TCR clone 364806 (TRBV11-2, TRBJ2-3)
CASSRLARTDTQHF

SEQ ID NO: 729613 - protein, 13 aa, Homo sapiens
  CDR3 for alpha chain variable domain of TCR clone 364807 (TRAV8-1, TRAJ28)
CAVSGAGSYQLTF

SEQ ID NO: 729614 - protein, 15 aa, Homo sapiens
  CDR3 for beta chain variable domain of TCR clone 364807 (TRBV7-9, TRBJ1-1)
CASSLLEQGGTEAFF

SEQ ID NO: 729615 - protein, 17 aa, Homo sapiens
  CDR3 for alpha chain variable domain of TCR clone 364808 (TRAV3, TRAJ6)
CAVSDGPRAGGSYIPTF

SEQ ID NO: 729616 - protein, 13 aa, Homo sapiens
  CDR3 for beta chain variable domain of TCR clone 364808 (TRBV4-1, TRBJ2-2)
CASSQENIGELFF

SEQ ID NO: 729617 - protein, 11 aa, Homo sapiens
  CDR3 for alpha chain variable domain of TCR clone 364809 (TRAV1-2, TRAJ20)
CAVANDYKLSF

SEQ ID NO: 729618 - protein, 18 aa, Homo sapiens
  CDR3 for beta chain variable domain of TCR clone 364809 (TRBV20-1, TRBJ2-6)
CSAEATPTHGSGANDLTF

SEQ ID NO: 729619 - protein, 14 aa, Homo sapiens
  CDR3 for alpha chain variable domain of TCR clone 364810 (TRAV30, TRAJ26)
CGTEIVSYGQNFVF

SEQ ID NO: 729620 - protein, 13 aa, Homo sapiens
  CDR3 for beta chain variable domain of TCR clone 364810 (TRBV7-3, TRBJ1-1)
CASSQDWGAEAFF

SEQ ID NO: 729621 - protein, 15 aa, Homo sapiens
  CDR3 for alpha chain variable domain of TCR clone 364811 (TRAV21, TRAJ40)
CAVRPQTSGTYKYIF

SEQ ID NO: 729622 - protein, 20 aa, Homo sapiens
  CDR3 for beta chain variable domain of TCR clone 364811 (TRBV28, TRBJ2-1)
CASTPIGRSPGLAGGNEQFF

SEQ ID NO: 729623 - protein, 14 aa, Homo sapiens
  CDR3 for alpha chain variable domain of TCR clone 364812 (TRAV27, TRAJ45)
CAGAQEEVLTDVPL

SEQ ID NO: 729624 - protein, 17 aa, Homo sapiens
  CDR3 for beta chain variable domain of TCR clone 364812 (TRBV11-2, TRBJ2-1)
CASSLYPPGVEYNEQLF

SEQ ID NO: 729625 - protein, 14 aa, Homo sapiens
  CDR3 for alpha chain variable domain of TCR clone 364813 (TRAV17, TRAJ43)
CATDHPYNNNDMRF

SEQ ID NO: 729626 - protein, 14 aa, Homo sapiens
  CDR3 for beta chain variable domain of TCR clone 364813 (TRBV7-9, TRBJ2-7)
CASSPSGGQNEQYF

SEQ ID NO: 729627 - protein, 12 aa, Homo sapiens
  CDR3 for alpha chain variable domain of TCR clone 364814 (TRAV26-1, TRAJ40)
CSTTPGTYKYIF

SEQ ID NO: 729628 - protein, 14 aa, Homo sapiens
  CDR3 for beta chain variable domain of TCR clone 364814 (TRBV24-1, TRBJ1-1)
CATRPTQGATEAFF

SEQ ID NO: 729629 - protein, 16 aa, Homo sapiens
  CDR3 for alpha chain variable domain of TCR clone 364815 (TRAV3, TRAJ4)
CAVRPSPSGGYNKLIF

SEQ ID NO: 729630 - protein, 18 aa, Homo sapiens
  CDR3 for beta chain variable domain of TCR clone 364815 (TRBV23-1, TRBJ2-3)
CASSQFHTGGISTDTQYF

SEQ ID NO: 729631 - protein, 12 aa, Homo sapiens
  CDR3 for alpha chain variable domain of TCR clone 364816 (TRAV23/DV6, TRAJ30)
CAASKGDDTIIF

SEQ ID NO: 729632 - protein, 14 aa, Homo sapiens
  CDR3 for beta chain variable domain of TCR clone 364816 (TRBV4-2, TRBJ2-1)
CASGLDRAYNEQFF

SEQ ID NO: 729633 - protein, 14 aa, Homo sapiens
  CDR3 for alpha chain variable domain of TCR clone 364817 (TRAV2, TRAJ20)
CAVEDVANDYKLSF

SEQ ID NO: 729634 - protein, 15 aa, Homo sapiens
  CDR3 for beta chain variable domain of TCR clone 364817 (TRBV6-1, TRBJ2-3)
CASSEIAHSTDTQYF

SEQ ID NO: 729635 - protein, 11 aa, Homo sapiens
  CDR3 for alpha chain variable domain of TCR clone 364818 (TRAV26-1, TRAJ37)
CIVRVGRKLIF

SEQ ID NO: 729636 - protein, 16 aa, Homo sapiens
  CDR3 for beta chain variable domain of TCR clone 364818 (TRBV6-6, TRBJ2-3)
CASSYSHAGATDTQYF

SEQ ID NO: 729637 - protein, 14 aa, Homo sapiens
  CDR3 for alpha chain variable domain of TCR clone 364819 (TRAV2, TRAJ20)
CAVEDRTNDYKLSF

SEQ ID NO: 729638 - protein, 13 aa, Homo sapiens
  CDR3 for beta chain variable domain of TCR clone 364819 (TRBV7-2, TRBJ1-1)
CASSRNTNTEAFF

SEQ ID NO: 729639 - protein, 17 aa, Homo sapiens
  CDR3 for alpha chain variable domain of TCR clone 364820 (TRAV17, TRAJ52)
CATERPSGGPSYGKLTF

SEQ ID NO: 729640 - protein, 15 aa, Homo sapiens
  CDR3 for beta chain variable domain of TCR clone 364820 (TRBV5-1, TRBJ2-1)
CASSLVANSYNEQFF

SEQ ID NO: 729641 - protein, 15 aa, Homo sapiens
  CDR3 for alpha chain variable domain of TCR clone 364821 (TRAV2, TRAJ24)
YAVEVLTDSWGKFQF

SEQ ID NO: 729642 - protein, 13 aa, Homo sapiens
  CDR3 for beta chain variable domain of TCR clone 364821 (TRBV10-2, TRBJ2-7)
CASGTSGGYEQYF

SEQ ID NO: 729643 - protein, 11 aa, Homo sapiens
  CDR3 for alpha chain variable domain of TCR clone 364822 (TRAV21, TRAJ34)
CAHYNTDKPIF

SEQ ID NO: 729644 - protein, 17 aa, Homo sapiens
  CDR3 for beta chain variable domain of TCR clone 364822 (TRBV20-1, TRBJ2-1)
CSARDPLAGVWDNEQFF

SEQ ID NO: 729645 - protein, 17 aa, Homo sapiens
  CDR3 for alpha chain variable domain of TCR clone 364823 (TRAV3, TRAJ6)
CAVRDGPRAGGSYIPTF

SEQ ID NO: 729646 - protein, 12 aa, Homo sapiens
  CDR3 for beta chain variable domain of TCR clone 364823 (TRBV7-9, TRBJ2-7)
CASSLEGYEQFF

SEQ ID NO: 729647 - protein, 17 aa, Homo sapiens
  CDR3 for alpha chain variable domain of TCR clone 364824 (TRAV3, TRAJ42)
CAVRDRDYGGSQGNLIF

SEQ ID NO: 729648 - protein, 13 aa, Homo sapiens
  CDR3 for beta chain variable domain of TCR clone 364824 (TRBV27, TRBJ1-4)
CASSLMGDEKLFF

SEQ ID NO: 729649 - protein, 16 aa, Homo sapiens
  CDR3 for alpha chain variable domain of TCR clone 364825 (TRAV3, TRAJ3)
CAVRDRSKSRASKIIF

SEQ ID NO: 729650 - protein, 16 aa, Homo sapiens
  CDR3 for beta chain variable domain of TCR clone 364825 (TRBV20-1, TRBJ2-4)
CSATSLAELAKNIQYF

SEQ ID NO: 729651 - protein, 15 aa, Homo sapiens
  CDR3 for alpha chain variable domain of TCR clone 364826 (TRAV12-1, TRAJ44)
CVVDEYTGTASKLTF

SEQ ID NO: 729652 - protein, 14 aa, Homo sapiens
  CDR3 for beta chain variable domain of TCR clone 364826 (TRBV5-1, TRBJ1-2)
SASSLEPVNYGYTF

SEQ ID NO: 729653 - protein, 14 aa, Homo sapiens
  CDR3 for alpha chain variable domain of TCR clone 364827 (TRAV1-2, TRAJ24)
CAVLTTDSWGKFQF

SEQ ID NO: 729654 - protein, 15 aa, Homo sapiens
  CDR3 for beta chain variable domain of TCR clone 364827 (TRBV7-2, TRBJ2-1)
CASSLVGSSYNEQFF

SEQ ID NO: 729655 - protein, 13 aa, Homo sapiens
  CDR3 for alpha chain variable domain of TCR clone 364828 (TRAV12-1, TRAJ33)
CGDAPESNYQLIW

SEQ ID NO: 729656 - protein, 12 aa, Homo sapiens
  CDR3 for beta chain variable domain of TCR clone 364828 (TRBV11-2, TRBJ2-2)
CASSLGGGELFF

SEQ ID NO: 729657 - protein, 17 aa, Homo sapiens
  CDR3 for alpha chain variable domain of TCR clone 364829 (TRAV12-3, TRAJ6)
CAMSARGGAGGSYIPTF

SEQ ID NO: 729658 - protein, 12 aa, Homo sapiens
  CDR3 for beta chain variable domain of TCR clone 364829 (TRBV12-4, TRBJ2-3)
CASITLPDTQYF

SEQ ID NO: 729659 - protein, 14 aa, Homo sapiens
  CDR3 for alpha chain variable domain of TCR clone 364830 (TRAV8-1, TRAJ15)
CAVNGQQAGTALIF

SEQ ID NO: 729660 - protein, 16 aa, Homo sapiens
  CDR3 for beta chain variable domain of TCR clone 364830 (TRBV4-1, TRBJ2-3)
CASSQSTSGAEDTQYF

SEQ ID NO: 729661 - protein, 14 aa, Homo sapiens
  CDR3 for alpha chain variable domain of TCR clone 364831 (TRAV27, TRAJ44)
CAGEGSGTASKLTF

SEQ ID NO: 729662 - protein, 13 aa, Homo sapiens
  CDR3 for beta chain variable domain of TCR clone 364831 (TRBV27, TRBJ1-4)
CASSLMGDEKLFF

SEQ ID NO: 729663 - protein, 15 aa, Homo sapiens
  CDR3 for alpha chain variable domain of TCR clone 364832 (TRAV23/DV6, TRAJ37)
CAAGEGSSNTAKLIF

SEQ ID NO: 729664 - protein, 17 aa, Homo sapiens
  CDR3 for beta chain variable domain of TCR clone 364832 (TRBV20-1, TRBJ2-7)
CSATRAGGVAGVEEQYF

SEQ ID NO: 729665 - protein, 17 aa, Homo sapiens
  CDR3 for alpha chain variable domain of TCR clone 364833 (TRAV26-1, TRAJ37)
CIVRVITVSSNTGKLIF

SEQ ID NO: 729666 - protein, 14 aa, Homo sapiens
  CDR3 for beta chain variable domain of TCR clone 364833 (TRBV13, TRBJ2-7)
CASSLKGASYEQYF

SEQ ID NO: 729667 - protein, 12 aa, Homo sapiens
  CDR3 for alpha chain variable domain of TCR clone 364834 (TRAV12-3, TRAJ17)
CAMTLTGNKLTF

SEQ ID NO: 729668 - protein, 14 aa, Homo sapiens
  CDR3 for beta chain variable domain of TCR clone 364834 (TRBV10-3, TRBJ2-5)
CATSRDRDRETQYF

SEQ ID NO: 729669 - protein, 13 aa, Homo sapiens
  CDR3 for alpha chain variable domain of TCR clone 364835 (TRAV8-3, TRAJ43)
CAVGPDNNNDMRF

SEQ ID NO: 729670 - protein, 14 aa, Homo sapiens
  CDR3 for beta chain variable domain of TCR clone 364835 (TRBV19, TRBJ2-1)
CASPTFVWSGEQFF

SEQ ID NO: 729671 - protein, 16 aa, Homo sapiens
  CDR3 for alpha chain variable domain of TCR clone 364836 (TRAV30, TRAJ24)
CGTEIVDADSWGKFQF

SEQ ID NO: 729672 - protein, 15 aa, Homo sapiens
  CDR3 for beta chain variable domain of TCR clone 364836 (TRBV27, TRBJ2-1)
CASSHGGGSSNEQFF

SEQ ID NO: 729673 - protein, 13 aa, Homo sapiens
  CDR3 for alpha chain variable domain of TCR clone 364837 (TRAV30, TRAJ39)
CGTENNAGNMLTF

SEQ ID NO: 729674 - protein, 13 aa, Homo sapiens
  CDR3 for beta chain variable domain of TCR clone 364837 (TRBV5-4, TRBJ1-2)
CASSSRENYGYTF

SEQ ID NO: 729675 - protein, 16 aa, Homo sapiens
  CDR3 for alpha chain variable domain of TCR clone 364838 (TRAV16, TRAJ42)
CARKMNYGGSQGNLIF

SEQ ID NO: 729676 - protein, 17 aa, Homo sapiens
  CDR3 for beta chain variable domain of TCR clone 364838 (TRBV13, TRBJ2-3)
CASSLSRVAGGRNTQYF

SEQ ID NO: 729677 - protein, 15 aa, Homo sapiens
  CDR3 for alpha chain variable domain of TCR clone 364839 (TRAV26-1, TRAJ29)
CIVRVEGSGNTPLGF

SEQ ID NO: 729678 - protein, 14 aa, Homo sapiens
  CDR3 for beta chain variable domain of TCR clone 364839 (TRBV25-1, TRBJ1-1)
CASTHLGGNTEAFF

SEQ ID NO: 729679 - protein, 16 aa, Homo sapiens
  CDR3 for alpha chain variable domain of TCR clone 364840 (TRAV27, TRAJ48)
TEAQPGDTGLYLPLTF

SEQ ID NO: 729680 - protein, 13 aa, Homo sapiens
  CDR3 for beta chain variable domain of TCR clone 364840 (TRBV7-2, TRBJ2-5)
CASSQTSVETQYF

SEQ ID NO: 729681 - protein, 11 aa, Homo sapiens
  CDR3 for alpha chain variable domain of TCR clone 364841 (TRAV2, TRAJ33)
CAVDSNYQLIW

SEQ ID NO: 729682 - protein, 16 aa, Homo sapiens
  CDR3 for beta chain variable domain of TCR clone 364841 (TRBV10-3, TRBJ2-1)
CSISGVGDGGGGEQFF

SEQ ID NO: 729683 - protein, 18 aa, Homo sapiens
  CDR3 for alpha chain variable domain of TCR clone 364842 (TRAV26-1, TRAJ23)
CIVRVGLEVWNQGGKLIF

SEQ ID NO: 729684 - protein, 16 aa, Homo sapiens
  CDR3 for beta chain variable domain of TCR clone 364842 (TRBV7-3, TRBJ2-2)
CASSLKRGTLSGELLF

SEQ ID NO: 729685 - protein, 14 aa, Homo sapiens
  CDR3 for alpha chain variable domain of TCR clone 364843 (TRAV23/DV6, TRAJ13)
CAASETGGYQKVTF

SEQ ID NO: 729686 - protein, 12 aa, Homo sapiens
  CDR3 for beta chain variable domain of TCR clone 364843 (TRBV19, TRBJ2-1)
CASSMQDTEQFF

SEQ ID NO: 729687 - protein, 15 aa, Homo sapiens
  CDR3 for alpha chain variable domain of TCR clone 364844 (TRAV12-1, TRAJ44)
CVVFVNTGTASKLTF

SEQ ID NO: 729688 - protein, 12 aa, Homo sapiens
  CDR3 for beta chain variable domain of TCR clone 364844 (TRBV7-8, TRBJ2-1)
CASSLGHNEQFF

SEQ ID NO: 729689 - protein, 14 aa, Homo sapiens
  CDR3 for alpha chain variable domain of TCR clone 364845 (TRAV1-2, TRAJ8)
CAVREGTGFQKLVF

SEQ ID NO: 729690 - protein, 15 aa, Homo sapiens
  CDR3 for beta chain variable domain of TCR clone 364845 (TRBV11-3, TRBJ2-3)
CASVKDGREGDTQYF

SEQ ID NO: 729691 - protein, 14 aa, Homo sapiens
  CDR3 for alpha chain variable domain of TCR clone 364846 (TRAV23/DV6, TRAJ29)
CAASTFSGNTPLVF

SEQ ID NO: 729692 - protein, 12 aa, Homo sapiens
  CDR3 for beta chain variable domain of TCR clone 364846 (TRBV28, TRBJ2-3)
CASSLYRDTQYF

SEQ ID NO: 729693 - protein, 17 aa, Homo sapiens
  CDR3 for alpha chain variable domain of TCR clone 364847 (TRAV26-2, TRAJ42)
CILRDVGYGGSQGNLIF

SEQ ID NO: 729694 - protein, 13 aa, Homo sapiens
  CDR3 for beta chain variable domain of TCR clone 364847 (TRBV13, TRBJ2-5)
CASSPEVGETQYF

SEQ ID NO: 729695 - protein, 15 aa, Homo sapiens
  CDR3 for alpha chain variable domain of TCR clone 364848 (TRAV35, TRAJ58)
CAGRRQETSGSRVTF

SEQ ID NO: 729696 - protein, 11 aa, Homo sapiens
  CDR3 for beta chain variable domain of TCR clone 364848 (TRBV11-2, TRBJ1-1)
CASSINPEAFF

SEQ ID NO: 729697 - protein, 15 aa, Homo sapiens
  CDR3 for alpha chain variable domain of TCR clone 364849 (TRAV12-1, TRAJ44)
CVVDEYTGTASKLTS

SEQ ID NO: 729698 - protein, 15 aa, Homo sapiens
  CDR3 for beta chain variable domain of TCR clone 364849 (TRBV20-1, TRBJ2-7)
CSARDRVSGMDEQYF

SEQ ID NO: 729699 - protein, 13 aa, Homo sapiens
  CDR3 for alpha chain variable domain of TCR clone 364850 (TRAV2, TRAJ20)
CAVEAPSEYKLSF

SEQ ID NO: 729700 - protein, 16 aa, Homo sapiens
  CDR3 for beta chain variable domain of TCR clone 364850 (TRBV25-1, TRBJ2-7)
CASSELTGGGIYEQYF

SEQ ID NO: 729701 - protein, 11 aa, Homo sapiens
  CDR3 for alpha chain variable domain of TCR clone 364851 (TRAV12-2, TRAJ36)
CSVDGANNLFF

SEQ ID NO: 729702 - protein, 13 aa, Homo sapiens
  CDR3 for beta chain variable domain of TCR clone 364851 (TRBV7-2, TRBJ2-7)
CASSSPSGSEQYF

SEQ ID NO: 729703 - protein, 14 aa, Homo sapiens
  CDR3 for alpha chain variable domain of TCR clone 364852 (TRAV38-1, TRAJ29)
CAFITPSGNTPLVF

SEQ ID NO: 729704 - protein, 15 aa, Homo sapiens
  CDR3 for beta chain variable domain of TCR clone 364852 (TRBV5-1, TRBJ2-1)
CASSPPRAPHNEQFF

SEQ ID NO: 729705 - protein, 14 aa, Homo sapiens
  CDR3 for alpha chain variable domain of TCR clone 364853 (TRAV1-2, TRAJ16)
CAVNRFSDSQKLLF

SEQ ID NO: 729706 - protein, 15 aa, Homo sapiens
  CDR3 for beta chain variable domain of TCR clone 364853 (TRBV20-1, TRBJ2-7)
CSARDRVSGMDEQYF

SEQ ID NO: 729707 - protein, 11 aa, Homo sapiens
  CDR3 for alpha chain variable domain of TCR clone 364854 (TRAV38-2/DV8, TRAJ29)
CAYRGNTPLVF

SEQ ID NO: 729708 - protein, 17 aa, Homo sapiens
  CDR3 for beta chain variable domain of TCR clone 364854 (TRBV13, TRBJ2-3)
CASSLSRVAGGRNTQYF

SEQ ID NO: 729709 - protein, 12 aa, Homo sapiens
  CDR3 for alpha chain variable domain of TCR clone 364855 (TRAV12-3, TRAJ17)
CAMTLTGNKLAF

SEQ ID NO: 729710 - protein, 15 aa, Homo sapiens
  CDR3 for beta chain variable domain of TCR clone 364855 (TRBV19, TRBJ2-1)
CASSILWEGRNEQFF

SEQ ID NO: 729711 - protein, 14 aa, Homo sapiens
  CDR3 for alpha chain variable domain of TCR clone 364856 (TRAV25, TRAJ35)
CARRMDGFGNVLHC

SEQ ID NO: 729712 - protein, 13 aa, Homo sapiens
  CDR3 for beta chain variable domain of TCR clone 364856 (TRBV7-2, TRBJ1-4)
CASSLAGLEKLFF

SEQ ID NO: 729713 - protein, 18 aa, Homo sapiens
  CDR3 for alpha chain variable domain of TCR clone 364857 (TRAV12-3, TRAJ52)
CAMSVGGAGGTSYGKLPF

SEQ ID NO: 729714 - protein, 14 aa, Homo sapiens
  CDR3 for beta chain variable domain of TCR clone 364857 (TRBV7-2, TRBJ2-7)
CASRSQGAAYEQYF

SEQ ID NO: 729715 - protein, 12 aa, Homo sapiens
  CDR3 for alpha chain variable domain of TCR clone 364858 (TRAV21, TRAJ31)
CAVSPARGRLMF

SEQ ID NO: 729716 - protein, 14 aa, Homo sapiens
  CDR3 for beta chain variable domain of TCR clone 364858 (TRBV28, TRBJ2-7)
CASGLLRIFYEQYF

SEQ ID NO: 729717 - protein, 15 aa, Homo sapiens
  CDR3 for alpha chain variable domain of TCR clone 364859 (TRAV35, TRAJ41)
CAGQLFSNSGYALNF

SEQ ID NO: 729718 - protein, 13 aa, Homo sapiens
  CDR3 for beta chain variable domain of TCR clone 364859 (TRBV4-2, TRBJ1-1)
CASSQAGNTEAFF

SEQ ID NO: 729719 - protein, 20 aa, Homo sapiens
  CDR3 for alpha chain variable domain of TCR clone 364860 (TRAV1-2, TRAJ8)
CAVRGHRLSETCIWNWHPTS

SEQ ID NO: 729720 - protein, 15 aa, Homo sapiens
  CDR3 for beta chain variable domain of TCR clone 364860 (TRBV11-3, TRBJ2-3)
CASLKDGREGDTQYF

SEQ ID NO: 729721 - protein, 14 aa, Homo sapiens
  CDR3 for alpha chain variable domain of TCR clone 364861 (TRAV12-2, TRAJ40)
CAVKIPSGTYKYIF

SEQ ID NO: 729722 - protein, 16 aa, Homo sapiens
  CDR3 for beta chain variable domain of TCR clone 364861 (TRBV18, TRBJ1-5)
CASSPYRVEGNQPQHF

SEQ ID NO: 729723 - protein, 10 aa, Homo sapiens
  CDR3 for alpha chain variable domain of TCR clone 364862 (TRAV12-3, TRAJ34)
CAMSADKLIF

SEQ ID NO: 729724 - protein, 14 aa, Homo sapiens
  CDR3 for beta chain variable domain of TCR clone 364862 (TRBV19, TRBJ1-5)
CASSQGYSNQPQHF

SEQ ID NO: 729725 - protein, 11 aa, Homo sapiens
  CDR3 for alpha chain variable domain of TCR clone 364863 (TRAV2, TRAJ13)
CASGGYQKVTF

SEQ ID NO: 729726 - protein, 16 aa, Homo sapiens
  CDR3 for beta chain variable domain of TCR clone 364863 (TRBV11-2, TRBJ2-1)
CQQLIPPGVEYNEQFF

SEQ ID NO: 729727 - protein, 12 aa, Homo sapiens
  CDR3 for alpha chain variable domain of TCR clone 364864 (TRAV29/DV5, TRAJ49)
CAASAIGNQFYF

SEQ ID NO: 729728 - protein, 17 aa, Homo sapiens
  CDR3 for beta chain variable domain of TCR clone 364864 (TRBV5-1, TRBJ2-2)
CASSRASGRFSTGELFF

SEQ ID NO: 729729 - protein, 16 aa, Homo sapiens
  CDR3 for alpha chain variable domain of TCR clone 364865 (TRAV26-1, TRAJ37)
CIVRGDGSGNTGKLIF

SEQ ID NO: 729730 - protein, 17 aa, Homo sapiens
  CDR3 for beta chain variable domain of TCR clone 364865 (TRBV4-1, TRBJ2-7)
GASSRGPLGVRGGEQYF

SEQ ID NO: 729731 - protein, 12 aa, Homo sapiens
  CDR3 for alpha chain variable domain of TCR clone 364866 (TRAV23/DV6, TRAJ30)
CAASKGDDKIIF

SEQ ID NO: 729732 - protein, 13 aa, Homo sapiens
  CDR3 for beta chain variable domain of TCR clone 364866 (TRBV19, TRBJ1-2)
RASSVPGQDGYTF

SEQ ID NO: 729733 - protein, 18 aa, Homo sapiens
  CDR3 for alpha chain variable domain of TCR clone 364867 (TRAV26-1, TRAJ34)
CCVLLHRQSTNRDDKLIF

SEQ ID NO: 729734 - protein, 14 aa, Homo sapiens
  CDR3 for beta chain variable domain of TCR clone 364867 (TRBV7-9, TRBJ2-1)
CASSDNSGYNEQFF

SEQ ID NO: 729735 - protein, 13 aa, Homo sapiens
  CDR3 for alpha chain variable domain of TCR clone 364868 (TRAV8-3, TRAJ43)
CAVGPDNNNDMRF

SEQ ID NO: 729736 - protein, 17 aa, Homo sapiens
  CDR3 for beta chain variable domain of TCR clone 364868 (TRBV11-2, TRBJ2-1)
CASSLSPPGVEYNEQFF

SEQ ID NO: 729737 - protein, 16 aa, Homo sapiens
  CDR3 for alpha chain variable domain of TCR clone 364869 (TRAV3, TRAJ3)
CAVRDRAKSSDSKIVF

SEQ ID NO: 729738 - protein, 13 aa, Homo sapiens
  CDR3 for beta chain variable domain of TCR clone 364869 (TRBV10-3, TRBJ2-7)
CASKLAVNYEQYF

SEQ ID NO: 729739 - protein, 12 aa, Homo sapiens
  CDR3 for alpha chain variable domain of TCR clone 364870 (TRAV20, TRAJ37)
CWCSSNTGKLIF

SEQ ID NO: 729740 - protein, 11 aa, Homo sapiens
  CDR3 for beta chain variable domain of TCR clone 364870 (TRBV12-4, TRBJ2-3)
CAITATDTQYF

SEQ ID NO: 729741 - protein, 15 aa, Homo sapiens
  CDR3 for alpha chain variable domain of TCR clone 364871 (TRAV8-3, TRAJ45)
CASSYSSGGADGLTF

SEQ ID NO: 729742 - protein, 13 aa, Homo sapiens
  CDR3 for beta chain variable domain of TCR clone 364871 (TRBV10-3, TRBJ2-7)
CASKLAVNYEQYF

SEQ ID NO: 729743 - protein, 12 aa, Homo sapiens
  CDR3 for alpha chain variable domain of TCR clone 364872 (TRAV12-3, TRAJ3)
CAIDSSASKIIF

SEQ ID NO: 729744 - protein, 16 aa, Homo sapiens
  CDR3 for beta chain variable domain of TCR clone 364872 (TRBV7-9, TRBJ1-2)
CASSLGSSSGEDGYTF

SEQ ID NO: 729745 - protein, 13 aa, Homo sapiens
  CDR3 for alpha chain variable domain of TCR clone 364873 (TRAV29/DV5, TRAJ49)
CAARTTTGNQFYF

SEQ ID NO: 729746 - protein, 12 aa, Homo sapiens
  CDR3 for beta chain variable domain of TCR clone 364873 (TRBV11-2, TRBJ2-2)
CASSLGGGELFF

SEQ ID NO: 729747 - protein, 14 aa, Homo sapiens
  CDR3 for alpha chain variable domain of TCR clone 364874 (TRAV12-3, TRAJ10)
SHLHLTGGGNKLTF

SEQ ID NO: 729748 - protein, 14 aa, Homo sapiens
  CDR3 for beta chain variable domain of TCR clone 364874 (TRBV19, TRBJ2-1)
CASPTFVLSGEQFF

SEQ ID NO: 729749 - protein, 12 aa, Homo sapiens
  CDR3 for alpha chain variable domain of TCR clone 364875 (TRAV3, TRAJ31)
CAAQRANARLMF

SEQ ID NO: 729750 - protein, 14 aa, Homo sapiens
  CDR3 for beta chain variable domain of TCR clone 364875 (TRBV25-1, TRBJ1-1)
CASTHLGGNTEAFF

SEQ ID NO: 729751 - protein, 15 aa, Homo sapiens
  CDR3 for alpha chain variable domain of TCR clone 364876 (TRAV26-1, TRAJ22)
CIVRVSFWFCKATDL

SEQ ID NO: 729752 - protein, 13 aa, Homo sapiens
  CDR3 for beta chain variable domain of TCR clone 364876 (TRBV7-9, TRBJ1-2)
CASSVKQNYGYAF

SEQ ID NO: 729753 - protein, 15 aa, Homo sapiens
  CDR3 for alpha chain variable domain of TCR clone 364877 (TRAV27, TRAJ38)
CAARRNASNNRKLIW

SEQ ID NO: 729754 - protein, 11 aa, Homo sapiens
  CDR3 for beta chain variable domain of TCR clone 364877 (TRBV29-1, TRBJ2-5)
CSEDRTGTQYF

SEQ ID NO: 729755 - protein, 14 aa, Homo sapiens
  CDR3 for alpha chain variable domain of TCR clone 364878 (TRAV12-3, TRAJ42)
CAMNYGGSQGNLIF

SEQ ID NO: 729756 - protein, 13 aa, Homo sapiens
  CDR3 for beta chain variable domain of TCR clone 364878 (TRBV9, TRBJ2-7)
CASSVGTAYEQYL

SEQ ID NO: 729757 - protein, 13 aa, Homo sapiens
  CDR3 for alpha chain variable domain of TCR clone 364879 (TRAV8-3, TRAJ37)
CAVPSSNTGKLIF

SEQ ID NO: 729758 - protein, 13 aa, Homo sapiens
  CDR3 for beta chain variable domain of TCR clone 364879 (TRBV4-2, TRBJ1-1)
CASSQAGNTEAFF

SEQ ID NO: 729759 - protein, 15 aa, Homo sapiens
  CDR3 for alpha chain variable domain of TCR clone 364880 (TRAV8-3, TRAJ41)
CAVGSNSNSGYALNF

SEQ ID NO: 729760 - protein, 17 aa, Homo sapiens
  CDR3 for beta chain variable domain of TCR clone 364880 (TRBV25-1, TRBJ2-1)
CASSAYGQGLGVYEQFF

SEQ ID NO: 729761 - protein, 14 aa, Homo sapiens
  CDR3 for alpha chain variable domain of TCR clone 364881 (TRAV12-1, TRAJ17)
CVVNYKDEGKKLTF

SEQ ID NO: 729762 - protein, 17 aa, Homo sapiens
  CDR3 for beta chain variable domain of TCR clone 364881 (TRBV20-1, TRBJ2-1)
CSASSSGLAGSYNEQFF

SEQ ID NO: 729763 - protein, 14 aa, Homo sapiens
  CDR3 for alpha chain variable domain of TCR clone 364882 (TRAV1-2, TRAJ8)
CAVREDTGFQKLVF

SEQ ID NO: 729764 - protein, 16 aa, Homo sapiens
  CDR3 for beta chain variable domain of TCR clone 364882 (TRBV7-6, TRBJ2-6)
CASSLPGRSGASVLTF

SEQ ID NO: 729765 - protein, 13 aa, Homo sapiens
  CDR3 for alpha chain variable domain of TCR clone 364883 (TRAV2, TRAJ40)
CAVVTSGTYKYIF

SEQ ID NO: 729766 - protein, 14 aa, Homo sapiens
  CDR3 for beta chain variable domain of TCR clone 364883 (TRBV19, TRBJ2-1)
CARPTFVLSGEQLF

SEQ ID NO: 729767 - protein, 12 aa, Homo sapiens
  CDR3 for alpha chain variable domain of TCR clone 364884 (TRAV3, TRAJ20)
CAARDGDYKLSF

SEQ ID NO: 729768 - protein, 17 aa, Homo sapiens
  CDR3 for beta chain variable domain of TCR clone 364884 (TRBV11-2, TRBJ2-4)
CASSFLALGGAGDIQYF

SEQ ID NO: 729769 - protein, 13 aa, Homo sapiens
  CDR3 for alpha chain variable domain of TCR clone 364885 (TRAV12-2, TRAJ10)
CAVPTGGGNKLTF

SEQ ID NO: 729770 - protein, 14 aa, Homo sapiens
  CDR3 for beta chain variable domain of TCR clone 364885 (TRBV10-3, TRBJ2-7)
CAISAPRGAYEQYF

SEQ ID NO: 729771 - protein, 12 aa, Homo sapiens
  CDR3 for alpha chain variable domain of TCR clone 364886 (TRAV1-1, TRAJ39)
CAVPVVGNMLTF

SEQ ID NO: 729772 - protein, 17 aa, Homo sapiens
  CDR3 for beta chain variable domain of TCR clone 364886 (TRBV7-9, TRBJ2-1)
CASSLVASYPSYNEQFF

SEQ ID NO: 729773 - protein, 11 aa, Homo sapiens
  CDR3 for alpha chain variable domain of TCR clone 364887 (TRAV1-2, TRAJ40)
CAVPGTYKSIF

SEQ ID NO: 729774 - protein, 16 aa, Homo sapiens
  CDR3 for beta chain variable domain of TCR clone 364887 (TRBV29-1, TRBJ2-7)
CSVEGVGTSGSYEQYF

SEQ ID NO: 729775 - protein, 15 aa, Homo sapiens
  CDR3 for alpha chain variable domain of TCR clone 364888 (TRAV26-1, TRAJ56)
CIVRVDNGANSKLTF

SEQ ID NO: 729776 - protein, 23 aa, Homo sapiens
  CDR3 for beta chain variable domain of TCR clone 364888 (TRBV4-2, TRBJ2-3)
CASSQDPPRASSISGGRGDTQYF

SEQ ID NO: 729777 - protein, 14 aa, Homo sapiens
  CDR3 for alpha chain variable domain of TCR clone 364889 (TRAV2, TRAJ9)
CAVEDRSGGFKTIF

SEQ ID NO: 729778 - protein, 12 aa, Homo sapiens
  CDR3 for beta chain variable domain of TCR clone 364889 (TRBV7-9, TRBJ2-7)
CASSLEGYEQYL

SEQ ID NO: 729779 - protein, 14 aa, Homo sapiens
  CDR3 for alpha chain variable domain of TCR clone 364890 (TRAV13-2, TRAJ54)
CAENMIKGAQKLVF

SEQ ID NO: 729780 - protein, 16 aa, Homo sapiens
  CDR3 for beta chain variable domain of TCR clone 364890 (TRBV5-7, TRBJ2-7)
CASSSPGGRTPYEQYF

SEQ ID NO: 729781 - protein, 11 aa, Homo sapiens
  CDR3 for alpha chain variable domain of TCR clone 364891 (TRAV12-3, TRAJ43)
CAMSISNDMRF

SEQ ID NO: 729782 - protein, 16 aa, Homo sapiens
  CDR3 for beta chain variable domain of TCR clone 364891 (TRBV2, TRBJ2-3)
CASSTSVEGVTDTQYF

SEQ ID NO: 729783 - protein, 14 aa, Homo sapiens
  CDR3 for alpha chain variable domain of TCR clone 364892 (TRAV12-1, TRAJ30)
CVVNMGGRDDKIIF

SEQ ID NO: 729784 - protein, 14 aa, Homo sapiens
  CDR3 for beta chain variable domain of TCR clone 364892 (TRBV20-1, TRBJ2-1)
CSAQIGGSANEQFF

SEQ ID NO: 729785 - protein, 20 aa, Homo sapiens
  CDR3 for alpha chain variable domain of TCR clone 364893 (TRAV21, TRAJ22)
SLVTQPPTLKSSGSARQLTF

SEQ ID NO: 729786 - protein, 16 aa, Homo sapiens
  CDR3 for beta chain variable domain of TCR clone 364893 (TRBV7-3, TRBJ2-2)
CVSSLKRGTLSGELFF

SEQ ID NO: 729787 - protein, 15 aa, Homo sapiens
  CDR3 for alpha chain variable domain of TCR clone 364894 (TRAV27, TRAJ38)
CAARRNAGNNRKLIW

SEQ ID NO: 729788 - protein, 18 aa, Homo sapiens
  CDR3 for beta chain variable domain of TCR clone 364894 (TRBV5-4, TRBJ2-3)
CASSPTAGFLPSTDTQYF

SEQ ID NO: 729789 - protein, 14 aa, Homo sapiens
  CDR3 for alpha chain variable domain of TCR clone 364895 (TRAV25, TRAJ6)
CAGRESGGSYIPTF

SEQ ID NO: 729790 - protein, 17 aa, Homo sapiens
  CDR3 for beta chain variable domain of TCR clone 364895 (TRBV5-4, TRBJ2-1)
CASSSAGGRGPYNEQFF

SEQ ID NO: 729791 - protein, 17 aa, Homo sapiens
  CDR3 for alpha chain variable domain of TCR clone 364896 (TRAV29/DV5, TRAJ44)
QCTSVQPFTGTASKLTF

SEQ ID NO: 729792 - protein, 13 aa, Homo sapiens
  CDR3 for beta chain variable domain of TCR clone 364896 (TRBV10-2, TRBJ2-7)
CASGASGGYEQYF

SEQ ID NO: 729793 - protein, 14 aa, Homo sapiens
  CDR3 for alpha chain variable domain of TCR clone 364897 (TRAV8-3, TRAJ9)
CAVVYNTGGFKTIF

SEQ ID NO: 729794 - protein, 12 aa, Homo sapiens
  CDR3 for beta chain variable domain of TCR clone 364897 (TRBV6-1, TRBJ2-1)
CATQKGGGHLFF

SEQ ID NO: 729795 - protein, 15 aa, Homo sapiens
  CDR3 for alpha chain variable domain of TCR clone 364898 (TRAV3, TRAJ17)
CAVRDTGAAGNKLTF

SEQ ID NO: 729796 - protein, 14 aa, Homo sapiens
  CDR3 for beta chain variable domain of TCR clone 364898 (TRBV7-2, TRBJ2-3)
CASSRTSGADTQYF

SEQ ID NO: 729797 - protein, 12 aa, Homo sapiens
  CDR3 for alpha chain variable domain of TCR clone 364899 (TRAV21, TRAJ33)
CAKMDSNYQLIW

SEQ ID NO: 729798 - protein, 15 aa, Homo sapiens
  CDR3 for beta chain variable domain of TCR clone 364899 (TRBV29-1, TRBJ2-1)
CSVGRHALFYNEQFF

SEQ ID NO: 729799 - protein, 13 aa, Homo sapiens
  CDR3 for alpha chain variable domain of TCR clone 364900 (TRAV12-2, TRAJ39)
CAVNNNAGNMLNF

SEQ ID NO: 729800 - protein, 13 aa, Homo sapiens
  CDR3 for beta chain variable domain of TCR clone 364900 (TRBV12-4, TRBJ2-7)
CASSFVPTAEQYF

SEQ ID NO: 729801 - protein, 11 aa, Homo sapiens
  CDR3 for alpha chain variable domain of TCR clone 364901 (TRAV12-3, TRAJ6)
CAMSGSYIPTF

SEQ ID NO: 729802 - protein, 16 aa, Homo sapiens
  CDR3 for beta chain variable domain of TCR clone 364901 (TRBV7-2, TRBJ2-3)
CASSSGKAQIRSILAQ

SEQ ID NO: 729803 - protein, 14 aa, Homo sapiens
  CDR3 for alpha chain variable domain of TCR clone 364902 (TRAV29/DV5, TRAJ32)
CAAAYGGATNKLIF

SEQ ID NO: 729804 - protein, 15 aa, Homo sapiens
  CDR3 for beta chain variable domain of TCR clone 364902 (TRBV27, TRBJ2-7)
CASSTAGTGSDEQYF

SEQ ID NO: 729805 - protein, 11 aa, Homo sapiens
  CDR3 for alpha chain variable domain of TCR clone 364903 (TRAV21, TRAJ34)
CAMTNTDKLIF

SEQ ID NO: 729806 - protein, 12 aa, Homo sapiens
  CDR3 for beta chain variable domain of TCR clone 364903 (TRBV7-9, TRBJ1-1)
CASSLVRGEAFF

SEQ ID NO: 729807 - protein, 18 aa, Homo sapiens
  CDR3 for alpha chain variable domain of TCR clone 364904 (TRAV12-3, TRAJ52)
CAMSRTNAGGTSYGKLTF

SEQ ID NO: 729808 - protein, 17 aa, Homo sapiens
  CDR3 for beta chain variable domain of TCR clone 364904 (TRBV7-3, TRBJ2-3)
CASSLKKRMRGADTQYF

SEQ ID NO: 729809 - protein, 16 aa, Homo sapiens
  CDR3 for alpha chain variable domain of TCR clone 364905 (TRAV3, TRAJ5)
CAVRNLMDTGRRALTF

SEQ ID NO: 729810 - protein, 15 aa, Homo sapiens
  CDR3 for beta chain variable domain of TCR clone 364905 (TRBV18, TRBJ2-1)
CASSPPSASYNEQFF

SEQ ID NO: 729811 - protein, 12 aa, Homo sapiens
  CDR3 for alpha chain variable domain of TCR clone 364906 (TRAV13-2, TRAJ23)
CAERHRGGKLIF

SEQ ID NO: 729812 - protein, 15 aa, Homo sapiens
  CDR3 for beta chain variable domain of TCR clone 364906 (TRBV27, TRBJ2-1)
CARSNGGGSSNEQFF

SEQ ID NO: 729813 - protein, 15 aa, Homo sapiens
  CDR3 for alpha chain variable domain of TCR clone 364907 (TRAV8-3, TRAJ15)
CAVGAPNQAGTALIF

SEQ ID NO: 729814 - protein, 14 aa, Homo sapiens
  CDR3 for beta chain variable domain of TCR clone 364907 (TRBV7-6, TRBJ2-3)
CASSLGTVTDTQYF

SEQ ID NO: 729815 - protein, 12 aa, Homo sapiens
  CDR3 for alpha chain variable domain of TCR clone 364908 (TRAV2, TRAJ32)
CAVCGATNKLIF

SEQ ID NO: 729816 - protein, 15 aa, Homo sapiens
  CDR3 for beta chain variable domain of TCR clone 364908 (TRBV7-2, TRBJ2-1)
CASSSRTSREDEQFF

SEQ ID NO: 729817 - protein, 18 aa, Homo sapiens
  CDR3 for alpha chain variable domain of TCR clone 364909 (TRAV26-2, TRAJ54)
CILRDVEVGIQGAQKLVF

SEQ ID NO: 729818 - protein, 17 aa, Homo sapiens
  CDR3 for beta chain variable domain of TCR clone 364909 (TRBV20-1, TRBJ1-5)
CSASLSPGQGGNQPQRF

SEQ ID NO: 729819 - protein, 14 aa, Homo sapiens
  CDR3 for alpha chain variable domain of TCR clone 364910 (TRAV8-3, TRAJ44)
CAVGNTGTASKLTF

SEQ ID NO: 729820 - protein, 15 aa, Homo sapiens
  CDR3 for beta chain variable domain of TCR clone 364910 (TRBV28, TRBJ2-7)
CASSFRGQGRDEQYF

SEQ ID NO: 729821 - protein, 14 aa, Homo sapiens
  CDR3 for alpha chain variable domain of TCR clone 364911 (TRAV13-1, TRAJ20)
CAARPGSNDYKLSF

SEQ ID NO: 729822 - protein, 17 aa, Homo sapiens
  CDR3 for beta chain variable domain of TCR clone 364911 (TRBV24-1, TRBJ2-1)
CATSDVSTSGTYNEQFF

SEQ ID NO: 729823 - protein, 14 aa, Homo sapiens
  CDR3 for alpha chain variable domain of TCR clone 364912 (TRAV2, TRAJ9)
CAVEDRSGGFKTIF

SEQ ID NO: 729824 - protein, 16 aa, Homo sapiens
  CDR3 for beta chain variable domain of TCR clone 364912 (TRBV7-3, TRBJ2-2)
CASSLKRGTFSGELFF

SEQ ID NO: 729825 - protein, 13 aa, Homo sapiens
  CDR3 for alpha chain variable domain of TCR clone 364913 (TRAV3, TRAJ20)
CCEAFCNYYKLSF

SEQ ID NO: 729826 - protein, 15 aa, Homo sapiens
  CDR3 for beta chain variable domain of TCR clone 364913 (TRBV19, TRBJ2-6)
CASVRRDSGANVLTF

SEQ ID NO: 729827 - protein, 14 aa, Homo sapiens
  CDR3 for alpha chain variable domain of TCR clone 364914 (TRAV12-3, TRAJ10)
SHLPLTGGGNKLTF

SEQ ID NO: 729828 - protein, 14 aa, Homo sapiens
  CDR3 for beta chain variable domain of TCR clone 364914 (TRBV6-1, TRBJ1-3)
CRRARGGGGNTIYF

SEQ ID NO: 729829 - protein, 14 aa, Homo sapiens
  CDR3 for alpha chain variable domain of TCR clone 364915 (TRAV12-3, TRAJ10)
SHLPLTGGGNKLTF

SEQ ID NO: 729830 - protein, 15 aa, Homo sapiens
  CDR3 for beta chain variable domain of TCR clone 364915 (TRBV4-1, TRBJ1-4)
CASSDTGGTNEKLFC

SEQ ID NO: 729831 - protein, 13 aa, Homo sapiens
  CDR3 for alpha chain variable domain of TCR clone 364916 (TRAV13-2, TRAJ15)
CAERPQAGTALIF

SEQ ID NO: 729832 - protein, 15 aa, Homo sapiens
  CDR3 for beta chain variable domain of TCR clone 364916 (TRBV5-1, TRBJ1-1)
CASSSTTGTNTEAFF

SEQ ID NO: 729833 - protein, 12 aa, Homo sapiens
  CDR3 for alpha chain variable domain of TCR clone 364917 (TRAV3, TRAJ43)
CAVRDLSNDMRF

SEQ ID NO: 729834 - protein, 15 aa, Homo sapiens
  CDR3 for beta chain variable domain of TCR clone 364917 (TRBV27, TRBJ1-5)
CASSLGTGFDQPQHF

SEQ ID NO: 729835 - protein, 14 aa, Homo sapiens
  CDR3 for alpha chain variable domain of TCR clone 364918 (TRAV26-1, TRAJ45)
CIVRVVGGDDRLTF

SEQ ID NO: 729836 - protein, 16 aa, Homo sapiens
  CDR3 for beta chain variable domain of TCR clone 364918 (TRBV7-9, TRBJ1-1)
CASSLTQVRSNTEAFF

SEQ ID NO: 729837 - protein, 12 aa, Homo sapiens
  CDR3 for alpha chain variable domain of TCR clone 364919 (TRAV1-1, TRAJ24)
CAVRGSWGKLQF

SEQ ID NO: 729838 - protein, 16 aa, Homo sapiens
  CDR3 for beta chain variable domain of TCR clone 364919 (TRBV27, TRBJ2-5)
CASSSQTSGFQETQYF

SEQ ID NO: 729839 - protein, 11 aa, Homo sapiens
  CDR3 for alpha chain variable domain of TCR clone 364920 (TRAV21, TRAJ11)
CAVNGYSTLTF

SEQ ID NO: 729840 - protein, 11 aa, Homo sapiens
  CDR3 for beta chain variable domain of TCR clone 364920 (TRBV11-2, TRBJ2-7)
CAGSSDYEQYF

SEQ ID NO: 729841 - protein, 13 aa, Homo sapiens
  CDR3 for alpha chain variable domain of TCR clone 364921 (TRAV38-2/DV8, TRAJ49)
CAYRRRTGNQFYF

SEQ ID NO: 729842 - protein, 15 aa, Homo sapiens
  CDR3 for beta chain variable domain of TCR clone 364921 (TRBV24-1, TRBJ1-1)
CATSDSNTVNTEAFF

SEQ ID NO: 729843 - protein, 14 aa, Homo sapiens
  CDR3 for alpha chain variable domain of TCR clone 364922 (TRAV3, TRAJ9)
CAVRLNNGGFKTIF

SEQ ID NO: 729844 - protein, 15 aa, Homo sapiens
  CDR3 for beta chain variable domain of TCR clone 364922 (TRBV7-2, TRBJ2-1)
CASSLAIGRVNEQFF

SEQ ID NO: 729845 - protein, 15 aa, Homo sapiens
  CDR3 for alpha chain variable domain of TCR clone 364923 (TRAV17, TRAJ56)
CATEPFTGANCKLTF

SEQ ID NO: 729846 - protein, 15 aa, Homo sapiens
  CDR3 for beta chain variable domain of TCR clone 364923 (TRBV28, TRBJ1-5)
CASSRTGGYVQPQHF

SEQ ID NO: 729847 - protein, 10 aa, Homo sapiens
  CDR3 for alpha chain variable domain of TCR clone 364924 (TRAV12-2, TRAJ52)
RSTSYEKLTF

SEQ ID NO: 729848 - protein, 11 aa, Homo sapiens
  CDR3 for beta chain variable domain of TCR clone 364924 (TRBV11-2, TRBJ2-2)
CASSLPGELFF

SEQ ID NO: 729849 - protein, 13 aa, Homo sapiens
  CDR3 for alpha chain variable domain of TCR clone 364925 (TRAV8-3, TRAJ48)
CAVVPFGNEKLTF

SEQ ID NO: 729850 - protein, 15 aa, Homo sapiens
  CDR3 for beta chain variable domain of TCR clone 364925 (TRBV11-2, TRBJ2-1)
CASSSPSTRYNDQFF

SEQ ID NO: 729851 - protein, 17 aa, Homo sapiens
  CDR3 for alpha chain variable domain of TCR clone 364926 (TRAV26-1, TRAJ53)
CIVRVDDSGGSNYKLTF

SEQ ID NO: 729852 - protein, 15 aa, Homo sapiens
  CDR3 for beta chain variable domain of TCR clone 364926 (TRBV20-1, TRBJ2-7)
CSARVPAAYFYEQYF

SEQ ID NO: 729853 - protein, 18 aa, Homo sapiens
  CDR3 for alpha chain variable domain of TCR clone 364927 (TRAV13-1, TRAJ52)
CAASKRSAGGTSYGKLTF

SEQ ID NO: 729854 - protein, 13 aa, Homo sapiens
  CDR3 for beta chain variable domain of TCR clone 364927 (TRBV12-4, TRBJ1-2)
CAISLRQGKDYTF

SEQ ID NO: 729855 - protein, 14 aa, Homo sapiens
  CDR3 for alpha chain variable domain of TCR clone 364928 (TRAV13-1, TRAJ35)
CAASKGSFGNVLHC

SEQ ID NO: 729856 - protein, 14 aa, Homo sapiens
  CDR3 for beta chain variable domain of TCR clone 364928 (TRBV7-2, TRBJ2-7)
CASSPKTSFYEQYF

SEQ ID NO: 729857 - protein, 16 aa, Homo sapiens
  CDR3 for alpha chain variable domain of TCR clone 364929 (TRAV3, TRAJ10)
CAVRDMRAGGGNRPTF

SEQ ID NO: 729858 - protein, 15 aa, Homo sapiens
  CDR3 for beta chain variable domain of TCR clone 364929 (TRBV20-1, TRBJ2-7)
CSARVPAAYFYEQYF

SEQ ID NO: 729859 - protein, 14 aa, Homo sapiens
  CDR3 for alpha chain variable domain of TCR clone 364930 (TRAV26-1, TRAJ21)
CIVRPPYNFNKFYF

SEQ ID NO: 729860 - protein, 15 aa, Homo sapiens
  CDR3 for beta chain variable domain of TCR clone 364930 (TRBV7-2, TRBJ2-7)
CASSLKGALTYEQYF

SEQ ID NO: 729861 - protein, 13 aa, Homo sapiens
  CDR3 for alpha chain variable domain of TCR clone 364931 (TRAV38-1, TRAJ42)
CARWGGSQGNLIF

SEQ ID NO: 729862 - protein, 17 aa, Homo sapiens
  CDR3 for beta chain variable domain of TCR clone 364931 (TRBV7-3, TRBJ2-3)
CASSLMKRMRGADTQYF

SEQ ID NO: 729863 - protein, 11 aa, Homo sapiens
  CDR3 for alpha chain variable domain of TCR clone 364932 (TRAV1-2, TRAJ20)
CAVADDYKLSF

SEQ ID NO: 729864 - protein, 11 aa, Homo sapiens
  CDR3 for beta chain variable domain of TCR clone 364932 (TRBV29-1, TRBJ2-5)
CSEDRTGTQYF

SEQ ID NO: 729865 - protein, 15 aa, Homo sapiens
  CDR3 for alpha chain variable domain of TCR clone 364933 (TRAV3, TRAJ4)
CAVRDGTGGYNKLIF

SEQ ID NO: 729866 - protein, 15 aa, Homo sapiens
  CDR3 for beta chain variable domain of TCR clone 364933 (TRBV27, TRBJ2-7)
CASSPEQGRLYEQYF

SEQ ID NO: 729867 - protein, 12 aa, Homo sapiens
  CDR3 for alpha chain variable domain of TCR clone 364934 (TRAV12-1, TRAJ40)
CVFYSGTYKYIF

SEQ ID NO: 729868 - protein, 15 aa, Homo sapiens
  CDR3 for beta chain variable domain of TCR clone 364934 (TRBV25-1, TRBJ1-4)
CASSPGDSTNEKLFF

SEQ ID NO: 729869 - protein, 12 aa, Homo sapiens
  CDR3 for alpha chain variable domain of TCR clone 364935 (TRAV1-1, TRAJ8)
CAGGTGCQKLVF

SEQ ID NO: 729870 - protein, 15 aa, Homo sapiens
  CDR3 for beta chain variable domain of TCR clone 364935 (TRBV7-9, TRBJ1-4)
CASSRTGGFNEKLFF

SEQ ID NO: 729871 - protein, 13 aa, Homo sapiens
  CDR3 for alpha chain variable domain of TCR clone 364936 (TRAV27, TRAJ49)
CAPRPYTGNQFYF

SEQ ID NO: 729872 - protein, 18 aa, Homo sapiens
  CDR3 for beta chain variable domain of TCR clone 364936 (TRBV7-3, TRBJ2-5)
WASSLGGAAQGTWETQYF

SEQ ID NO: 729873 - protein, 18 aa, Homo sapiens
  CDR3 for alpha chain variable domain of TCR clone 364937 (TRAV29/DV5, TRAJ52)
CAAGFRGSGGTSYGKLTF

SEQ ID NO: 729874 - protein, 18 aa, Homo sapiens
  CDR3 for beta chain variable domain of TCR clone 364937 (TRBV4-1, TRBJ1-5)
CASSQDPRGQGLNQPQHF

SEQ ID NO: 729875 - protein, 15 aa, Homo sapiens
  CDR3 for alpha chain variable domain of TCR clone 364938 (TRAV8-6, TRAJ10)
CAVSDQAGGGNKLTF

SEQ ID NO: 729876 - protein, 15 aa, Homo sapiens
  CDR3 for beta chain variable domain of TCR clone 364938 (TRBV3-1, TRBJ2-5)
CASSANLGGPENQYF

SEQ ID NO: 729877 - protein, 13 aa, Homo sapiens
  CDR3 for alpha chain variable domain of TCR clone 364939 (TRAV27, TRAJ8)
CAGGPTGFQKLVF

SEQ ID NO: 729878 - protein, 15 aa, Homo sapiens
  CDR3 for beta chain variable domain of TCR clone 364939 (TRBV6-1, TRBJ2-7)
CASSEIMGDFYEQYF

SEQ ID NO: 729879 - protein, 13 aa, Homo sapiens
  CDR3 for alpha chain variable domain of TCR clone 364940 (TRAV17, TRAJ9)
CATDYTGGFKTIF

SEQ ID NO: 729880 - protein, 15 aa, Homo sapiens
  CDR3 for beta chain variable domain of TCR clone 364940 (TRBV18, TRBJ2-7)
CASSPTFMDSYEQYF

SEQ ID NO: 729881 - protein, 13 aa, Homo sapiens
  CDR3 for alpha chain variable domain of TCR clone 364941 (TRAV38-1, TRAJ42)
CARWGGSQENLIF

SEQ ID NO: 729882 - protein, 16 aa, Homo sapiens
  CDR3 for beta chain variable domain of TCR clone 364941 (TRBV4-2, TRBJ2-3)
CASSQELAGDTDTQYF

SEQ ID NO: 729883 - protein, 14 aa, Homo sapiens
  CDR3 for alpha chain variable domain of TCR clone 364942 (TRAV13-1, TRAJ35)
CAASKGGFGNVLHC

SEQ ID NO: 729884 - protein, 13 aa, Homo sapiens
  CDR3 for beta chain variable domain of TCR clone 364942 (TRBV9, TRBJ2-1)
CASSVGQGGEQFF

SEQ ID NO: 729885 - protein, 14 aa, Homo sapiens
  CDR3 for alpha chain variable domain of TCR clone 364943 (TRAV26-1, TRAJ38)
SIADNAGNNRKLIW

SEQ ID NO: 729886 - protein, 19 aa, Homo sapiens
  CDR3 for beta chain variable domain of TCR clone 364943 (TRBV6-1, TRBJ1-3)
CASVQGGGWKHHIFWRGKL

SEQ ID NO: 729887 - protein, 14 aa, Homo sapiens
  CDR3 for alpha chain variable domain of TCR clone 364944 (TRAV2, TRAJ20)
CAVEDGTNDYKLSF

SEQ ID NO: 729888 - protein, 17 aa, Homo sapiens
  CDR3 for beta chain variable domain of TCR clone 364944 (TRBV20-1, TRBJ2-2)
CSASGSGQGGLTGELFF

SEQ ID NO: 729889 - protein, 12 aa, Homo sapiens
  CDR3 for alpha chain variable domain of TCR clone 364945 (TRAV12-2, TRAJ21)
CAVRYNFNKFYF

SEQ ID NO: 729890 - protein, 13 aa, Homo sapiens
  CDR3 for beta chain variable domain of TCR clone 364945 (TRBV11-2, TRBJ1-5)
CSSSSGGNQPQHF

SEQ ID NO: 729891 - protein, 14 aa, Homo sapiens
  CDR3 for alpha chain variable domain of TCR clone 364946 (TRAV12-2, TRAJ13)
CAVKKTGGYQKVTF

SEQ ID NO: 729892 - protein, 15 aa, Homo sapiens
  CDR3 for beta chain variable domain of TCR clone 364946 (TRBV5-1, TRBJ2-7)
FASSLNGGPAREQYF

SEQ ID NO: 729893 - protein, 13 aa, Homo sapiens
  CDR3 for alpha chain variable domain of TCR clone 364947 (TRAV21, TRAJ15)
CAVANQAGTALIF

SEQ ID NO: 729894 - protein, 15 aa, Homo sapiens
  CDR3 for beta chain variable domain of TCR clone 364947 (TRBV19, TRBJ2-1)
CASSMGWNSNNEQFF

SEQ ID NO: 729895 - protein, 12 aa, Homo sapiens
  CDR3 for alpha chain variable domain of TCR clone 364948 (TRAV13-1, TRAJ48)
CAANFGNEKLTF

SEQ ID NO: 729896 - protein, 13 aa, Homo sapiens
  CDR3 for beta chain variable domain of TCR clone 364948 (TRBV7-3, TRBJ1-1)
CASSQDWWAEAFF

SEQ ID NO: 729897 - protein, 12 aa, Homo sapiens
  CDR3 for alpha chain variable domain of TCR clone 364949 (TRAV24, TRAJ22)
CAPGGSARQLTF

SEQ ID NO: 729898 - protein, 15 aa, Homo sapiens
  CDR3 for beta chain variable domain of TCR clone 364949 (TRBV11-3, TRBJ2-3)
CASLKDGREGDTQYF

SEQ ID NO: 729899 - protein, 13 aa, Homo sapiens
  CDR3 for alpha chain variable domain of TCR clone 364950 (TRAV20, TRAJ49)
CAVQAITGNQFYF

SEQ ID NO: 729900 - protein, 14 aa, Homo sapiens
  CDR3 for beta chain variable domain of TCR clone 364950 (TRBV5-1, TRBJ1-1)
CASSLQGASTEAFF

SEQ ID NO: 729901 - protein, 15 aa, Homo sapiens
  CDR3 for alpha chain variable domain of TCR clone 364951 (TRAV8-3, TRAJ11)
CAVGLLNSVYSNLTF

SEQ ID NO: 729902 - protein, 16 aa, Homo sapiens
  CDR3 for beta chain variable domain of TCR clone 364951 (TRBV7-9, TRBJ1-2)
CASSLGFSSGEDGYTF

SEQ ID NO: 729903 - protein, 19 aa, Homo sapiens
  CDR3 for alpha chain variable domain of TCR clone 364952 (TRAV8-4, TRAJ3)
CAVTGENLVQQCFQDNLWI

SEQ ID NO: 729904 - protein, 16 aa, Homo sapiens
  CDR3 for beta chain variable domain of TCR clone 364952 (TRBV4-2, TRBJ1-1)
CASSQAGFGMKTEAFF

SEQ ID NO: 729905 - protein, 14 aa, Homo sapiens
  CDR3 for alpha chain variable domain of TCR clone 364953 (TRAV12-3, TRAJ42)
CAMNYGGSQGKLIF

SEQ ID NO: 729906 - protein, 12 aa, Homo sapiens
  CDR3 for beta chain variable domain of TCR clone 364953 (TRBV11-2, TRBJ2-2)
CASSLGGGELFF

SEQ ID NO: 729907 - protein, 16 aa, Homo sapiens
  CDR3 for alpha chain variable domain of TCR clone 364954 (TRAV21, TRAJ58)
CAVRGDRQTSGSRLTF

SEQ ID NO: 729908 - protein, 12 aa, Homo sapiens
  CDR3 for beta chain variable domain of TCR clone 364954 (TRBV19, TRBJ2-3)
CASAGGADTQYF

SEQ ID NO: 729909 - protein, 17 aa, Homo sapiens
  CDR3 for alpha chain variable domain of TCR clone 364955 (TRAV26-1, TRAJ53)
CIVRVDDSGCSNYKLQF

SEQ ID NO: 729910 - protein, 15 aa, Homo sapiens
  CDR3 for beta chain variable domain of TCR clone 364955 (TRBV20-1, TRBJ2-7)
CSARVPAAYFYEQYF

SEQ ID NO: 729911 - protein, 14 aa, Homo sapiens
  CDR3 for alpha chain variable domain of TCR clone 364956 (TRAV3, TRAJ34)
CAVRDINNTDKLIF

SEQ ID NO: 729912 - protein, 14 aa, Homo sapiens
  CDR3 for beta chain variable domain of TCR clone 364956 (TRBV7-2, TRBJ2-7)
CASRSQGAAYEQYF

SEQ ID NO: 729913 - protein, 16 aa, Homo sapiens
  CDR3 for alpha chain variable domain of TCR clone 364957 (TRAV17, TRAJ36)
CATVSLNWGKQPLLWD

SEQ ID NO: 729914 - protein, 14 aa, Homo sapiens
  CDR3 for beta chain variable domain of TCR clone 364957 (TRBV2, TRBJ1-5)
CASSENRGGQPQHF

SEQ ID NO: 729915 - protein, 12 aa, Homo sapiens
  CDR3 for alpha chain variable domain of TCR clone 364958 (TRAV13-1, TRAJ21)
CAAKEGFNKFSF

SEQ ID NO: 729916 - protein, 14 aa, Homo sapiens
  CDR3 for beta chain variable domain of TCR clone 364958 (TRBV18, TRBJ2-7)
CASSPRGGAYEQYF

SEQ ID NO: 729917 - protein, 13 aa, Homo sapiens
  CDR3 for alpha chain variable domain of TCR clone 364959 (TRAV29/DV5, TRAJ31)
CAASRNNNARLMF

SEQ ID NO: 729918 - protein, 15 aa, Homo sapiens
  CDR3 for beta chain variable domain of TCR clone 364959 (TRBV2, TRBJ2-3)
CASSDFEKATDTQYF

SEQ ID NO: 729919 - protein, 15 aa, Homo sapiens
  CDR3 for alpha chain variable domain of TCR clone 364960 (TRAV3, TRAJ10)
CAVRDGTGGGTKLTF

SEQ ID NO: 729920 - protein, 15 aa, Homo sapiens
  CDR3 for beta chain variable domain of TCR clone 364960 (TRBV4-2, TRBJ1-4)
CASSLVQREVEKLFF

SEQ ID NO: 729921 - protein, 13 aa, Homo sapiens
  CDR3 for alpha chain variable domain of TCR clone 364961 (TRAV22, TRAJ29)
FAVWGSGNTPLVF

SEQ ID NO: 729922 - protein, 13 aa, Homo sapiens
  CDR3 for beta chain variable domain of TCR clone 364961 (TRBV4-2, TRBJ1-1)
CASSQAGNTEAFF

SEQ ID NO: 729923 - protein, 17 aa, Homo sapiens
  CDR3 for alpha chain variable domain of TCR clone 364962 (TRAV16, TRAJ58)
CITVLSNGETSGSRLTF

SEQ ID NO: 729924 - protein, 17 aa, Homo sapiens
  CDR3 for beta chain variable domain of TCR clone 364962 (TRBV18, TRBJ2-1)
GASSKGLSGGADNEQFF

SEQ ID NO: 729925 - protein, 17 aa, Homo sapiens
  CDR3 for alpha chain variable domain of TCR clone 364963 (TRAV3, TRAJ42)
CAVRDRDYGGSQGNLIF

SEQ ID NO: 729926 - protein, 15 aa, Homo sapiens
  CDR3 for beta chain variable domain of TCR clone 364963 (TRBV28, TRBJ2-7)
CASSVRQVSSYEQYF

SEQ ID NO: 729927 - protein, 14 aa, Homo sapiens
  CDR3 for alpha chain variable domain of TCR clone 364964 (TRAV23/DV6, TRAJ4)
CAAPSSGGYNKLIF

SEQ ID NO: 729928 - protein, 16 aa, Homo sapiens
  CDR3 for beta chain variable domain of TCR clone 364964 (TRBV19, TRBJ1-1)
CASRFGCPVTGTDAFF

SEQ ID NO: 729929 - protein, 17 aa, Homo sapiens
  CDR3 for alpha chain variable domain of TCR clone 364965 (TRAV26-1, TRAJ53)
CIVRVDDSGGSIYKLTF

SEQ ID NO: 729930 - protein, 15 aa, Homo sapiens
  CDR3 for beta chain variable domain of TCR clone 364965 (TRBV20-1, TRBJ2-7)
CSARVPAAYFYEQYF

SEQ ID NO: 729931 - protein, 20 aa, Homo sapiens
  CDR3 for alpha chain variable domain of TCR clone 364966 (TRAV4, TRAJ3)
CVLLPRGCPPGYSSASKIIF

SEQ ID NO: 729932 - protein, 14 aa, Homo sapiens
  CDR3 for beta chain variable domain of TCR clone 364966 (TRBV2, TRBJ1-6)
CALSPSDPRSPLHF

SEQ ID NO: 729933 - protein, 15 aa, Homo sapiens
  CDR3 for alpha chain variable domain of TCR clone 364967 (TRAV21, TRAJ53)
CATLNSGGSNYKLTF

SEQ ID NO: 729934 - protein, 16 aa, Homo sapiens
  CDR3 for beta chain variable domain of TCR clone 364967 (TRBV29-1, TRBJ1-2)
CSVEANRDIANCGYTF

SEQ ID NO: 729935 - protein, 17 aa, Homo sapiens
  CDR3 for alpha chain variable domain of TCR clone 364968 (TRAV3, TRAJ6)
CAVRDGPRAGGSYIPTF

SEQ ID NO: 729936 - protein, 21 aa, Homo sapiens
  CDR3 for beta chain variable domain of TCR clone 364968 (TRBV7-2, TRBJ2-7)
RRTRPCISVPSPKTSSYEQYF

SEQ ID NO: 729937 - protein, 14 aa, Homo sapiens
  CDR3 for alpha chain variable domain of TCR clone 364969 (TRAV12-2, TRAJ17)
CTVNIKAAGNKLTF

SEQ ID NO: 729938 - protein, 16 aa, Homo sapiens
  CDR3 for beta chain variable domain of TCR clone 364969 (TRBV20-1, TRBJ2-6)
CSASSQGYDGANVLTF

SEQ ID NO: 729939 - protein, 12 aa, Homo sapiens
  CDR3 for alpha chain variable domain of TCR clone 364970 (TRAV1-1, TRAJ39)
CAVPVVGNMLTF

SEQ ID NO: 729940 - protein, 17 aa, Homo sapiens
  CDR3 for beta chain variable domain of TCR clone 364970 (TRBV28, TRBJ2-5)
CASSTSEGDALQETQYF

SEQ ID NO: 729941 - protein, 18 aa, Homo sapiens
  CDR3 for alpha chain variable domain of TCR clone 364971 (TRAV21, TRAJ52)
CAVRPSPAGGTSYGQLTF

SEQ ID NO: 729942 - protein, 11 aa, Homo sapiens
  CDR3 for beta chain variable domain of TCR clone 364971 (TRBV11-2, TRBJ2-2)
CASSLPGELFF

SEQ ID NO: 729943 - protein, 11 aa, Homo sapiens
  CDR3 for alpha chain variable domain of TCR clone 364972 (TRAV21, TRAJ41)
CAVRSGYALNF

SEQ ID NO: 729944 - protein, 13 aa, Homo sapiens
  CDR3 for beta chain variable domain of TCR clone 364972 (TRBV7-9, TRBJ1-2)
CTSSLKQNYGYAF

SEQ ID NO: 729945 - protein, 14 aa, Homo sapiens
  CDR3 for alpha chain variable domain of TCR clone 364973 (TRAV12-2, TRAJ40)
CAVKIPSGTYKYIF

SEQ ID NO: 729946 - protein, 15 aa, Homo sapiens
  CDR3 for beta chain variable domain of TCR clone 364973 (TRBV12-4, TRBJ2-5)
CASSLGGQGRETQYF

SEQ ID NO: 729947 - protein, 14 aa, Homo sapiens
  CDR3 for alpha chain variable domain of TCR clone 364974 (TRAV2, TRAJ8)
CAGRGNTGFQKLVF

SEQ ID NO: 729948 - protein, 13 aa, Homo sapiens
  CDR3 for beta chain variable domain of TCR clone 364974 (TRBV10-2, TRBJ2-7)
CASGTSGGYEQYF

SEQ ID NO: 729949 - protein, 13 aa, Homo sapiens
  CDR3 for alpha chain variable domain of TCR clone 364975 (TRAV27, TRAJ56)
CAGEPGANSKLTF

SEQ ID NO: 729950 - protein, 15 aa, Homo sapiens
  CDR3 for beta chain variable domain of TCR clone 364975 (TRBV28, TRBJ2-7)
CASSLISGGSYEQYF

SEQ ID NO: 729951 - protein, 16 aa, Homo sapiens
  CDR3 for alpha chain variable domain of TCR clone 364976 (TRAV3, TRAJ21)
CAVSDIERGNFNKFSF

SEQ ID NO: 729952 - protein, 13 aa, Homo sapiens
  CDR3 for beta chain variable domain of TCR clone 364976 (TRBV27, TRBJ2-7)
CASSLTTGYEQYF

SEQ ID NO: 729953 - protein, 13 aa, Homo sapiens
  CDR3 for alpha chain variable domain of TCR clone 364977 (TRAV1-1, TRAJ23)
CAVVANQGGRLIF

SEQ ID NO: 729954 - protein, 16 aa, Homo sapiens
  CDR3 for beta chain variable domain of TCR clone 364977 (TRBV5-5, TRBJ1-2)
CASIPTWGRGLYGYTF

SEQ ID NO: 729955 - protein, 14 aa, Homo sapiens
  CDR3 for alpha chain variable domain of TCR clone 364978 (TRAV9-2, TRAJ36)
CALPWRTGANNLFF

SEQ ID NO: 729956 - protein, 14 aa, Homo sapiens
  CDR3 for beta chain variable domain of TCR clone 364978 (TRBV2, TRBJ1-2)
CASSELQVNCGYTF

SEQ ID NO: 729957 - protein, 13 aa, Homo sapiens
  CDR3 for alpha chain variable domain of TCR clone 364979 (TRAV2, TRAJ21)
CTVEDLNFNKFYF

SEQ ID NO: 729958 - protein, 15 aa, Homo sapiens
  CDR3 for beta chain variable domain of TCR clone 364979 (TRBV28, TRBJ2-1)
CASSPGQGSIETQYF

SEQ ID NO: 729959 - protein, 18 aa, Homo sapiens
  CDR3 for alpha chain variable domain of TCR clone 364980 (TRAV26-1, TRAJ22)
CIVRVSFWFCKSNDLLIW

SEQ ID NO: 729960 - protein, 13 aa, Homo sapiens
  CDR3 for beta chain variable domain of TCR clone 364980 (TRBV7-9, TRBJ1-2)
CASSLKQNYGYTF

SEQ ID NO: 729961 - protein, 14 aa, Homo sapiens
  CDR3 for alpha chain variable domain of TCR clone 364981 (TRAV34, TRAJ22)
CGADTSGSARQLTF

SEQ ID NO: 729962 - protein, 20 aa, Homo sapiens
  CDR3 for beta chain variable domain of TCR clone 364981 (TRBV28, TRBJ2-1)
CASTPIGRSPGLAGGNEQFF

SEQ ID NO: 729963 - protein, 18 aa, Homo sapiens
  CDR3 for alpha chain variable domain of TCR clone 364982 (TRAV21, TRAJ52)
CAVRPSPAGGTSYGKLTF

SEQ ID NO: 729964 - protein, 14 aa, Homo sapiens
  CDR3 for beta chain variable domain of TCR clone 364982 (TRBV7-7, TRBJ2-2)
CATRQDADTGELFF

SEQ ID NO: 729965 - protein, 16 aa, Homo sapiens
  CDR3 for alpha chain variable domain of TCR clone 364983 (TRAV1-2, TRAJ10)
CAVRGVLTGGGNKLTF

SEQ ID NO: 729966 - protein, 13 aa, Homo sapiens
  CDR3 for beta chain variable domain of TCR clone 364983 (TRBV7-8, TRBJ2-2)
CASSLDPTGELFF

SEQ ID NO: 729967 - protein, 12 aa, Homo sapiens
  CDR3 for alpha chain variable domain of TCR clone 364984 (TRAV12-3, TRAJ48)
CALRIGNEKLTF

SEQ ID NO: 729968 - protein, 12 aa, Homo sapiens
  CDR3 for beta chain variable domain of TCR clone 364984 (TRBV13, TRBJ2-7)
CASSLQAYEQYF

SEQ ID NO: 729969 - protein, 12 aa, Homo sapiens
  CDR3 for alpha chain variable domain of TCR clone 364985 (TRAV23/DV6, TRAJ24)
CAANDSWGQLQF

SEQ ID NO: 729970 - protein, 16 aa, Homo sapiens
  CDR3 for beta chain variable domain of TCR clone 364985 (TRBV12-4, TRBJ2-5)
CASSLSTSGGKETQYF

SEQ ID NO: 729971 - protein, 12 aa, Homo sapiens
  CDR3 for alpha chain variable domain of TCR clone 364986 (TRAV3, TRAJ26)
CAVRDYGQNFVF

SEQ ID NO: 729972 - protein, 14 aa, Homo sapiens
  CDR3 for beta chain variable domain of TCR clone 364986 (TRBV25-1, TRBJ1-1)
CASTHLGGNTEAFF

SEQ ID NO: 729973 - protein, 13 aa, Homo sapiens
  CDR3 for alpha chain variable domain of TCR clone 364987 (TRAV23/DV6, TRAJ58)
CAASEIGGSRLTF

SEQ ID NO: 729974 - protein, 15 aa, Homo sapiens
  CDR3 for beta chain variable domain of TCR clone 364987 (TRBV19, TRBJ1-1)
CASTSGQIQNTEAFL

SEQ ID NO: 729975 - protein, 14 aa, Homo sapiens
  CDR3 for alpha chain variable domain of TCR clone 364988 (TRAV13-1, TRAJ3)
CAAEGYSRAPKIIF

SEQ ID NO: 729976 - protein, 14 aa, Homo sapiens
  CDR3 for beta chain variable domain of TCR clone 364988 (TRBV19, TRBJ2-5)
RASSSSGIQETQYF

SEQ ID NO: 729977 - protein, 12 aa, Homo sapiens
  CDR3 for alpha chain variable domain of TCR clone 364989 (TRAV12-3, TRAJ17)
CAMTLTGNKLTF

SEQ ID NO: 729978 - protein, 12 aa, Homo sapiens
  CDR3 for beta chain variable domain of TCR clone 364989 (TRBV2, TRBJ2-1)
CAYVPPGNEQFF

SEQ ID NO: 729979 - protein, 13 aa, Homo sapiens
  CDR3 for alpha chain variable domain of TCR clone 364990 (TRAV3, TRAJ33)
CAVRDRSNYQLIW

SEQ ID NO: 729980 - protein, 16 aa, Homo sapiens
  CDR3 for beta chain variable domain of TCR clone 364990 (TRBV4-2, TRBJ2-7)
CASSPDRGTSSYEQYF

SEQ ID NO: 729981 - protein, 15 aa, Homo sapiens
  CDR3 for alpha chain variable domain of TCR clone 364991 (TRAV35, TRAJ38)
CAGFSNAGNNRTLIW

SEQ ID NO: 729982 - protein, 15 aa, Homo sapiens
  CDR3 for beta chain variable domain of TCR clone 364991 (TRBV7-8, TRBJ2-1)
CASSLAGGLYNEQFF

SEQ ID NO: 729983 - protein, 13 aa, Homo sapiens
  CDR3 for alpha chain variable domain of TCR clone 364992 (TRAV12-3, TRAJ54)
CALVPQGAQKLAF

SEQ ID NO: 729984 - protein, 15 aa, Homo sapiens
  CDR3 for beta chain variable domain of TCR clone 364992 (TRBV4-1, TRBJ2-2)
GASSQDSRGTGELFF

SEQ ID NO: 729985 - protein, 13 aa, Homo sapiens
  CDR3 for alpha chain variable domain of TCR clone 364993 (TRAV8-3, TRAJ44)
CAVVPGTASKLTF

SEQ ID NO: 729986 - protein, 15 aa, Homo sapiens
  CDR3 for beta chain variable domain of TCR clone 364993 (TRBV9, TRBJ2-1)
CASSLAGSSYNEQFF

SEQ ID NO: 729987 - protein, 15 aa, Homo sapiens
  CDR3 for alpha chain variable domain of TCR clone 364994 (TRAV21, TRAJ56)
CAVTKYTGANSKLTF

SEQ ID NO: 729988 - protein, 17 aa, Homo sapiens
  CDR3 for beta chain variable domain of TCR clone 364994 (TRBV7-3, TRBJ2-3)
CASSLMKRMRGADTQYF

SEQ ID NO: 729989 - protein, 18 aa, Homo sapiens
  CDR3 for alpha chain variable domain of TCR clone 364995 (TRAV1-1, TRAJ12)
CLLLLRCERGDSSYKLIF

SEQ ID NO: 729990 - protein, 15 aa, Homo sapiens
  CDR3 for beta chain variable domain of TCR clone 364995 (TRBV18, TRBJ2-5)
CASTDRGPRQETQYF

SEQ ID NO: 729991 - protein, 13 aa, Homo sapiens
  CDR3 for alpha chain variable domain of TCR clone 364996 (TRAV17, TRAJ9)
CATAITGGFKTIF

SEQ ID NO: 729992 - protein, 16 aa, Homo sapiens
  CDR3 for beta chain variable domain of TCR clone 364996 (TRBV15, TRBJ2-1)
CAPSRNLAGGYNEQFF

SEQ ID NO: 729993 - protein, 16 aa, Homo sapiens
  CDR3 for alpha chain variable domain of TCR clone 364997 (TRAV3, TRAJ37)
CAVRPRGSGNTVKLIF

SEQ ID NO: 729994 - protein, 16 aa, Homo sapiens
  CDR3 for beta chain variable domain of TCR clone 364997 (TRBV9, TRBJ1-2)
CASSVEEKVSPYGYTF

SEQ ID NO: 729995 - protein, 17 aa, Homo sapiens
  CDR3 for alpha chain variable domain of TCR clone 364998 (TRAV13-1, TRAJ28)
CAASPPYSGAGSYQLTF

SEQ ID NO: 729996 - protein, 16 aa, Homo sapiens
  CDR3 for beta chain variable domain of TCR clone 364998 (TRBV19, TRBJ2-3)
CASSFYTTGIGDTQYF

SEQ ID NO: 729997 - protein, 19 aa, Homo sapiens
  CDR3 for alpha chain variable domain of TCR clone 364999 (TRAV26-1, TRAJ52)
CIVRAHRNAGGTSYGKLTF

SEQ ID NO: 729998 - protein, 14 aa, Homo sapiens
  CDR3 for beta chain variable domain of TCR clone 364999 (TRBV4-1, TRBJ2-2)
CASSHAVNTGELFF

SEQ ID NO: 729999 - protein, 20 aa, Homo sapiens
  CDR3 for alpha chain variable domain of TCR clone 365000 (TRAV1-1, TRAJ4)
CLLLLRCEGFLSGGYNKLIF

SEQ ID NO: 730000 - protein, 13 aa, Homo sapiens
  CDR3 for beta chain variable domain of TCR clone 365000 (TRBV5-5, TRBJ1-2)
CASSFRRGEDYTF

SEQ ID NO: 730001 - protein, 14 aa, Homo sapiens
  CDR3 for alpha chain variable domain of TCR clone 365001 (TRAV1-2, TRAJ8)
CAVREDAGFQKLVF

SEQ ID NO: 730002 - protein, 16 aa, Homo sapiens
  CDR3 for beta chain variable domain of TCR clone 365001 (TRBV6-6, TRBJ2-6)
CASNPGAGNGANVLTF

SEQ ID NO: 730003 - protein, 11 aa, Homo sapiens
  CDR3 for alpha chain variable domain of TCR clone 365002 (TRAV20, TRAJ26)
WWDNYGQNFVF

SEQ ID NO: 730004 - protein, 15 aa, Homo sapiens
  CDR3 for beta chain variable domain of TCR clone 365002 (TRBV20-1, TRBJ2-7)
CSARDRVSGMDEQYF

SEQ ID NO: 730005 - protein, 10 aa, Homo sapiens
  CDR3 for alpha chain variable domain of TCR clone 365003 (TRAV20, TRAJ22)
CAAPARQLTC

SEQ ID NO: 730006 - protein, 14 aa, Homo sapiens
  CDR3 for beta chain variable domain of TCR clone 365003 (TRBV19, TRBJ2-1)
CASSMGSGATEQFF

SEQ ID NO: 730007 - protein, 15 aa, Homo sapiens
  CDR3 for alpha chain variable domain of TCR clone 365004 (TRAV8-3, TRAJ45)
CASSYSGGGADGLTF

SEQ ID NO: 730008 - protein, 15 aa, Homo sapiens
  CDR3 for beta chain variable domain of TCR clone 365004 (TRBV10-3, TRBJ2-7)
CTSVPKLAVNYEQYF

SEQ ID NO: 730009 - protein, 15 aa, Homo sapiens
  CDR3 for alpha chain variable domain of TCR clone 365005 (TRAV41, TRAJ45)
CAASYSGGGADGLTF

SEQ ID NO: 730010 - protein, 12 aa, Homo sapiens
  CDR3 for beta chain variable domain of TCR clone 365005 (TRBV12-4, TRBJ2-3)
CASSTLPDTQYF

SEQ ID NO: 730011 - protein, 17 aa, Homo sapiens
  CDR3 for alpha chain variable domain of TCR clone 365006 (TRAV3, TRAJ42)
CAVRDRDYGGSQGNLIF

SEQ ID NO: 730012 - protein, 14 aa, Homo sapiens
  CDR3 for beta chain variable domain of TCR clone 365006 (TRBV4-1, TRBJ2-2)
CAGSQAVNTGELFF

SEQ ID NO: 730013 - protein, 11 aa, Homo sapiens
  CDR3 for alpha chain variable domain of TCR clone 365007 (TRAV3, TRAJ21)
CAVGNFNKFYF

SEQ ID NO: 730014 - protein, 12 aa, Homo sapiens
  CDR3 for beta chain variable domain of TCR clone 365007 (TRBV2, TRBJ2-1)
GRGLPSYNEQFF

SEQ ID NO: 730015 - protein, 12 aa, Homo sapiens
  CDR3 for alpha chain variable domain of TCR clone 365008 (TRAV29/DV5, TRAJ34)
CAASGKTDKLIF

SEQ ID NO: 730016 - protein, 16 aa, Homo sapiens
  CDR3 for beta chain variable domain of TCR clone 365008 (TRBV12-4, TRBJ1-5)
CASRQPVEGSNQPQHF

SEQ ID NO: 730017 - protein, 17 aa, Homo sapiens
  CDR3 for alpha chain variable domain of TCR clone 365009 (TRAV8-4, TRAJ11)
CAVSDRGEHSGYSTLTF

SEQ ID NO: 730018 - protein, 14 aa, Homo sapiens
  CDR3 for beta chain variable domain of TCR clone 365009 (TRBV20-1, TRBJ2-1)
CSPNDEASYNEQFF

SEQ ID NO: 730019 - protein, 13 aa, Homo sapiens
  CDR3 for alpha chain variable domain of TCR clone 365010 (TRAV8-2, TRAJ43)
CVVRDQGDNDTRF

SEQ ID NO: 730020 - protein, 12 aa, Homo sapiens
  CDR3 for beta chain variable domain of TCR clone 365010 (TRBV7-9, TRBJ2-7)
CASRTGFDEQYF

SEQ ID NO: 730021 - protein, 14 aa, Homo sapiens
  CDR3 for alpha chain variable domain of TCR clone 365011 (TRAV8-2, TRAJ23)
CVGSDDNQGGKLIF

SEQ ID NO: 730022 - protein, 16 aa, Homo sapiens
  CDR3 for beta chain variable domain of TCR clone 365011 (TRBV4-2, TRBJ2-5)
CASSQELVGSQETQYF

SEQ ID NO: 730023 - protein, 13 aa, Homo sapiens
  CDR3 for alpha chain variable domain of TCR clone 365012 (TRAV8-3, TRAJ43)
CAVGPDNNNDMRF

SEQ ID NO: 730024 - protein, 16 aa, Homo sapiens
  CDR3 for beta chain variable domain of TCR clone 365012 (TRBV12-4, TRBJ2-5)
CASSFFVRGRQETQYF

SEQ ID NO: 730025 - protein, 14 aa, Homo sapiens
  CDR3 for alpha chain variable domain of TCR clone 365013 (TRAV12-1, TRAJ30)
CVVNIGGRDGKIIF

SEQ ID NO: 730026 - protein, 14 aa, Homo sapiens
  CDR3 for beta chain variable domain of TCR clone 365013 (TRBV7-6, TRBJ2-3)
CASSLGTVTNTQYF

SEQ ID NO: 730027 - protein, 21 aa, Homo sapiens
  CDR3 for alpha chain variable domain of TCR clone 365014 (TRAV9-2, )
CALIQIGDIQNPDPAVYKLRD

SEQ ID NO: 730028 - protein, 18 aa, Homo sapiens
  CDR3 for beta chain variable domain of TCR clone 365014 (TRBV5-1, TRBJ1-6)
CASSVGGGYGERNSPLHF

SEQ ID NO: 730029 - protein, 15 aa, Homo sapiens
  CDR3 for alpha chain variable domain of TCR clone 365015 (TRAV17, TRAJ57)
CATGPSQVGSKKLVF

SEQ ID NO: 730030 - protein, 16 aa, Homo sapiens
  CDR3 for beta chain variable domain of TCR clone 365015 (TRBV12-4, TRBJ1-5)
CASSRPVGGSNQPQHF

SEQ ID NO: 730031 - protein, 14 aa, Homo sapiens
  CDR3 for alpha chain variable domain of TCR clone 365016 (TRAV12-3, TRAJ10)
SHLPLTGGGNKLTF

SEQ ID NO: 730032 - protein, 19 aa, Homo sapiens
  CDR3 for beta chain variable domain of TCR clone 365016 (TRBV19, TRBJ2-2)
CASTRPGLAGGRVTGELFF

SEQ ID NO: 730033 - protein, 13 aa, Homo sapiens
  CDR3 for alpha chain variable domain of TCR clone 365017 (TRAV39, TRAJ49)
CAVDRNNGNQYYF

SEQ ID NO: 730034 - protein, 14 aa, Homo sapiens
  CDR3 for beta chain variable domain of TCR clone 365017 (TRBV4-1, TRBJ1-1)
CASSRSGQSFEAFF

SEQ ID NO: 730035 - protein, 12 aa, Homo sapiens
  CDR3 for alpha chain variable domain of TCR clone 365018 (TRAV4, TRAJ26)
CLVGDYGQNFVF

SEQ ID NO: 730036 - protein, 11 aa, Homo sapiens
  CDR3 for beta chain variable domain of TCR clone 365018 (TRBV19, TRBJ2-5)
CASSIKETQYF

SEQ ID NO: 730037 - protein, 11 aa, Homo sapiens
  CDR3 for alpha chain variable domain of TCR clone 365019 (TRAV2, TRAJ20)
CAVLNDYKLSF

SEQ ID NO: 730038 - protein, 15 aa, Homo sapiens
  CDR3 for beta chain variable domain of TCR clone 365019 (TRBV11-3, TRBJ2-3)
CASSLSGQGPNTQYF

SEQ ID NO: 730039 - protein, 11 aa, Homo sapiens
  CDR3 for alpha chain variable domain of TCR clone 365020 (TRAV17, TRAJ31)
CATDRTARLMF

SEQ ID NO: 730040 - protein, 13 aa, Homo sapiens
  CDR3 for beta chain variable domain of TCR clone 365020 (TRBV4-2, TRBJ1-1)
CASSQAGNTEAFF

SEQ ID NO: 730041 - protein, 16 aa, Homo sapiens
  CDR3 for alpha chain variable domain of TCR clone 365021 (TRAV1-1, TRAJ29)
CALRSTRNSGNTPLVF

SEQ ID NO: 730042 - protein, 16 aa, Homo sapiens
  CDR3 for beta chain variable domain of TCR clone 365021 (TRBV27, TRBJ1-1)
CASSSRGRTGYTEAFF

SEQ ID NO: 730043 - protein, 14 aa, Homo sapiens
  CDR3 for alpha chain variable domain of TCR clone 365022 (TRAV12-2, TRAJ17)
CAVLFKAAGNKLTF

SEQ ID NO: 730044 - protein, 16 aa, Homo sapiens
  CDR3 for beta chain variable domain of TCR clone 365022 (TRBV7-3, TRBJ2-1)
CASSLSSGGGAKEQFF

SEQ ID NO: 730045 - protein, 11 aa, Homo sapiens
  CDR3 for alpha chain variable domain of TCR clone 365023 (TRAV12-2, TRAJ42)
CAPGSQGNLIF

SEQ ID NO: 730046 - protein, 15 aa, Homo sapiens
  CDR3 for beta chain variable domain of TCR clone 365023 (TRBV11-2, TRBJ2-1)
CASSKNRGLIYEQFF

SEQ ID NO: 730047 - protein, 17 aa, Homo sapiens
  CDR3 for alpha chain variable domain of TCR clone 365024 (TRAV20, TRAJ4)
CAVQLVLFSGGYNKLIF

SEQ ID NO: 730048 - protein, 15 aa, Homo sapiens
  CDR3 for beta chain variable domain of TCR clone 365024 (TRBV19, TRBJ1-2)
CASGRDGGGGYGYTF

SEQ ID NO: 730049 - protein, 14 aa, Homo sapiens
  CDR3 for alpha chain variable domain of TCR clone 365025 (TRAV35, TRAJ53)
CAGNSGGSNYKLTF

SEQ ID NO: 730050 - protein, 11 aa, Homo sapiens
  CDR3 for beta chain variable domain of TCR clone 365025 (TRBV4-1, TRBJ1-4)
CSSKENEKLFF

SEQ ID NO: 730051 - protein, 17 aa, Homo sapiens
  CDR3 for alpha chain variable domain of TCR clone 365026 (TRAV26-1, TRAJ58)
CIVRVGAEETRGSRMTF

SEQ ID NO: 730052 - protein, 18 aa, Homo sapiens
  CDR3 for beta chain variable domain of TCR clone 365026 (TRBV7-9, TRBJ2-7)
CASSLTTSGSRTWYEQYF

SEQ ID NO: 730053 - protein, 11 aa, Homo sapiens
  CDR3 for alpha chain variable domain of TCR clone 365027 (TRAV12-1, TRAJ39)
CVVSAGNMLTF

SEQ ID NO: 730054 - protein, 15 aa, Homo sapiens
  CDR3 for beta chain variable domain of TCR clone 365027 (TRBV11-2, TRBJ2-2)
CASSSDRVNAGELFF

SEQ ID NO: 730055 - protein, 14 aa, Homo sapiens
  CDR3 for alpha chain variable domain of TCR clone 365028 (TRAV2, TRAJ9)
CAVEDRSGGFKTIF

SEQ ID NO: 730056 - protein, 18 aa, Homo sapiens
  CDR3 for beta chain variable domain of TCR clone 365028 (TRBV6-5, TRBJ2-1)
CASSYSSRRAGVYNEQFF

SEQ ID NO: 730057 - protein, 12 aa, Homo sapiens
  CDR3 for alpha chain variable domain of TCR clone 365029 (TRAV2, TRAJ31)
CAVEDNNARLMF

SEQ ID NO: 730058 - protein, 16 aa, Homo sapiens
  CDR3 for beta chain variable domain of TCR clone 365029 (TRBV7-8, TRBJ2-4)
CASSAERTLAKNIQYF

SEQ ID NO: 730059 - protein, 13 aa, Homo sapiens
  CDR3 for alpha chain variable domain of TCR clone 365030 (TRAV12-3, TRAJ53)
CAMRGGSNYKLTF

SEQ ID NO: 730060 - protein, 14 aa, Homo sapiens
  CDR3 for beta chain variable domain of TCR clone 365030 (TRBV7-8, TRBJ2-1)
CASSSQGTYNEQFF

SEQ ID NO: 730061 - protein, 14 aa, Homo sapiens
  CDR3 for alpha chain variable domain of TCR clone 365031 (TRAV26-1, TRAJ33)
CIVRNMDSNYQLIW

SEQ ID NO: 730062 - protein, 15 aa, Homo sapiens
  CDR3 for beta chain variable domain of TCR clone 365031 (TRBV6-3, TRBJ2-7)
CASSSPGTVFYEQYF

SEQ ID NO: 730063 - protein, 15 aa, Homo sapiens
  CDR3 for alpha chain variable domain of TCR clone 365032 (TRAV23/DV6, TRAJ33)
CAASNSGGGNYQLIW

SEQ ID NO: 730064 - protein, 19 aa, Homo sapiens
  CDR3 for beta chain variable domain of TCR clone 365032 (TRBV6-3, TRBJ2-1)
CASSYSWTSGRATYNEQFF

SEQ ID NO: 730065 - protein, 15 aa, Homo sapiens
  CDR3 for alpha chain variable domain of TCR clone 365033 (TRAV25, TRAJ53)
CAATGGGGSNYKLTF

SEQ ID NO: 730066 - protein, 11 aa, Homo sapiens
  CDR3 for beta chain variable domain of TCR clone 365033 (TRBV11-3, TRBJ2-2)
CASSSGVELFF

SEQ ID NO: 730067 - protein, 15 aa, Homo sapiens
  CDR3 for alpha chain variable domain of TCR clone 365034 (TRAV3, TRAJ17)
CAVRDTGAAGNKLTF

SEQ ID NO: 730068 - protein, 16 aa, Homo sapiens
  CDR3 for beta chain variable domain of TCR clone 365034 (TRBV29-1, TRBJ2-7)
CSVEDAEDGTAYEQYF

SEQ ID NO: 730069 - protein, 12 aa, Homo sapiens
  CDR3 for alpha chain variable domain of TCR clone 365035 (TRAV29/DV5, TRAJ49)
CAATDTGHQFYF

SEQ ID NO: 730070 - protein, 19 aa, Homo sapiens
  CDR3 for beta chain variable domain of TCR clone 365035 (TRBV25-1, TRBJ2-2)
CAILVYRVDRGRKTGELFF

SEQ ID NO: 730071 - protein, 13 aa, Homo sapiens
  CDR3 for alpha chain variable domain of TCR clone 365036 (TRAV2, TRAJ40)
CAVVTSGTYKYIF

SEQ ID NO: 730072 - protein, 16 aa, Homo sapiens
  CDR3 for beta chain variable domain of TCR clone 365036 (TRBV2, TRBJ2-1)
CASRLNTASAYNEQFF

SEQ ID NO: 730073 - protein, 12 aa, Homo sapiens
  CDR3 for alpha chain variable domain of TCR clone 365037 (TRAV2, TRAJ9)
CAVGAGGFKTIF

SEQ ID NO: 730074 - protein, 13 aa, Homo sapiens
  CDR3 for beta chain variable domain of TCR clone 365037 (TRBV3-1, TRBJ1-1)
CASSPGVITEAFF

SEQ ID NO: 730075 - protein, 11 aa, Homo sapiens
  CDR3 for alpha chain variable domain of TCR clone 365038 (TRAV21, TRAJ48)
CAVDGNEKLTF

SEQ ID NO: 730076 - protein, 16 aa, Homo sapiens
  CDR3 for beta chain variable domain of TCR clone 365038 (TRBV12-4, TRBJ1-5)
CASSSSPRGSNQPQHF

SEQ ID NO: 730077 - protein, 12 aa, Homo sapiens
  CDR3 for alpha chain variable domain of TCR clone 365039 (TRAV12-3, TRAJ17)
CAKTLTGNKLTF

SEQ ID NO: 730078 - protein, 13 aa, Homo sapiens
  CDR3 for beta chain variable domain of TCR clone 365039 (TRBV7-3, TRBJ1-1)
CASSQDWGAEAFF

SEQ ID NO: 730079 - protein, 14 aa, Homo sapiens
  CDR3 for alpha chain variable domain of TCR clone 365040 (TRAV16, TRAJ44)
CALSTTGTASKLTF

SEQ ID NO: 730080 - protein, 17 aa, Homo sapiens
  CDR3 for beta chain variable domain of TCR clone 365040 (TRBV14, TRBJ2-3)
CASSQEPSGLSTDTQYF

SEQ ID NO: 730081 - protein, 16 aa, Homo sapiens
  CDR3 for alpha chain variable domain of TCR clone 365041 (TRAV29/DV5, TRAJ22)
CAASASTSGSARQLTF

SEQ ID NO: 730082 - protein, 15 aa, Homo sapiens
  CDR3 for beta chain variable domain of TCR clone 365041 (TRBV28, TRBJ2-5)
CASSPPWSYQETQYF

SEQ ID NO: 730083 - protein, 15 aa, Homo sapiens
  CDR3 for alpha chain variable domain of TCR clone 365042 (TRAV21, TRAJ24)
CAARSSTDSWGKLQF

SEQ ID NO: 730084 - protein, 16 aa, Homo sapiens
  CDR3 for beta chain variable domain of TCR clone 365042 (TRBV19, TRBJ1-1)
CASRFGGPVTGTEAFF

SEQ ID NO: 730085 - protein, 14 aa, Homo sapiens
  CDR3 for alpha chain variable domain of TCR clone 365043 (TRAV1-2, TRAJ8)
CAVREDTCFQKLGF

SEQ ID NO: 730086 - protein, 15 aa, Homo sapiens
  CDR3 for beta chain variable domain of TCR clone 365043 (TRBV6-3, TRBJ2-7)
CASSSPGTVFYEQYF

SEQ ID NO: 730087 - protein, 14 aa, Homo sapiens
  CDR3 for alpha chain variable domain of TCR clone 365044 (TRAV12-2, TRAJ40)
CAVKIPSGTYKYIF

SEQ ID NO: 730088 - protein, 13 aa, Homo sapiens
  CDR3 for beta chain variable domain of TCR clone 365044 (TRBV5-4, TRBJ2-5)
CASSPVAQETQYF

SEQ ID NO: 730089 - protein, 11 aa, Homo sapiens
  CDR3 for alpha chain variable domain of TCR clone 365045 (TRAV2, TRAJ21)
CAVFNFNKFYF

SEQ ID NO: 730090 - protein, 17 aa, Homo sapiens
  CDR3 for beta chain variable domain of TCR clone 365045 (TRBV4-2, TRBJ1-1)
CASTQFGGGSGNTEAFF

SEQ ID NO: 730091 - protein, 12 aa, Homo sapiens
  CDR3 for alpha chain variable domain of TCR clone 365046 (TRAV3, TRAJ31)
CAVRPRGPRLMF

SEQ ID NO: 730092 - protein, 14 aa, Homo sapiens
  CDR3 for beta chain variable domain of TCR clone 365046 (TRBV7-9, TRBJ2-2)
CASSQAVNTGELFF

SEQ ID NO: 730093 - protein, 11 aa, Homo sapiens
  CDR3 for alpha chain variable domain of TCR clone 365047 (TRAV2, TRAJ13)
CASGGYQKVTF

SEQ ID NO: 730094 - protein, 14 aa, Homo sapiens
  CDR3 for beta chain variable domain of TCR clone 365047 (TRBV7-9, TRBJ2-7)
CASSLSQGSYEQYF

SEQ ID NO: 730095 - protein, 13 aa, Homo sapiens
  CDR3 for alpha chain variable domain of TCR clone 365048 (TRAV13-2, TRAJ13)
CAERPGGYQKVTF

SEQ ID NO: 730096 - protein, 14 aa, Homo sapiens
  CDR3 for beta chain variable domain of TCR clone 365048 (TRBV11-2, TRBJ1-2)
CASSLGTANYGYTF

SEQ ID NO: 730097 - protein, 14 aa, Homo sapiens
  CDR3 for alpha chain variable domain of TCR clone 365049 (TRAV20, TRDJ1)
CAVQAGGSQRKLIF

SEQ ID NO: 730098 - protein, 14 aa, Homo sapiens
  CDR3 for beta chain variable domain of TCR clone 365049 (TRBV28, TRBJ1-2)
CASRIQGANYGYTF

SEQ ID NO: 730099 - protein, 12 aa, Homo sapiens
  CDR3 for alpha chain variable domain of TCR clone 365050 (TRAV13-2, TRAJ23)
CAERHRGGKLIF

SEQ ID NO: 730100 - protein, 13 aa, Homo sapiens
  CDR3 for beta chain variable domain of TCR clone 365050 (TRBV7-9, TRBJ2-3)
CASSPGSTDMQYF

SEQ ID NO: 730101 - protein, 11 aa, Homo sapiens
  CDR3 for alpha chain variable domain of TCR clone 365051 (TRAV12-2, TRAJ3)
CAVKRASKIIF

SEQ ID NO: 730102 - protein, 16 aa, Homo sapiens
  CDR3 for beta chain variable domain of TCR clone 365051 (TRBV5-1, TRBJ2-7)
CASRPSFSNNPYEQYF

SEQ ID NO: 730103 - protein, 17 aa, Homo sapiens
  CDR3 for alpha chain variable domain of TCR clone 365052 (TRAV26-1, TRAJ53)
SIVRVDYSGGSNYKLTF

SEQ ID NO: 730104 - protein, 15 aa, Homo sapiens
  CDR3 for beta chain variable domain of TCR clone 365052 (TRBV7-9, TRBJ1-4)
CASSRTGGFNEKLFF

SEQ ID NO: 730105 - protein, 12 aa, Homo sapiens
  CDR3 for alpha chain variable domain of TCR clone 365053 (TRAV3, TRAJ20)
CAVRDPDYKPSF

SEQ ID NO: 730106 - protein, 14 aa, Homo sapiens
  CDR3 for beta chain variable domain of TCR clone 365053 (TRBV11-2, TRBJ2-7)
CASSSTGEGYEQYF

SEQ ID NO: 730107 - protein, 17 aa, Homo sapiens
  CDR3 for alpha chain variable domain of TCR clone 365054 (TRAV1-1, TRAJ11)
CAGYGTLPFGKGTMLLV

SEQ ID NO: 730108 - protein, 15 aa, Homo sapiens
  CDR3 for beta chain variable domain of TCR clone 365054 (TRBV6-5, TRBJ2-1)
CASRGDFDSYNEQFF

SEQ ID NO: 730109 - protein, 16 aa, Homo sapiens
  CDR3 for alpha chain variable domain of TCR clone 365055 (TRAV12-3, TRAJ53)
CAMSPGSGGSNYKLTF

SEQ ID NO: 730110 - protein, 13 aa, Homo sapiens
  CDR3 for beta chain variable domain of TCR clone 365055 (TRBV7-2, TRBJ2-5)
CASGQTSVETQYF

SEQ ID NO: 730111 - protein, 15 aa, Homo sapiens
  CDR3 for alpha chain variable domain of TCR clone 365056 (TRAV12-3, TRAJ6)
CAMSATTGGSYIPTF

SEQ ID NO: 730112 - protein, 17 aa, Homo sapiens
  CDR3 for beta chain variable domain of TCR clone 365056 (TRBV11-2, TRBJ2-1)
CASSLYSPGVEYNEQFF

SEQ ID NO: 730113 - protein, 14 aa, Homo sapiens
  CDR3 for alpha chain variable domain of TCR clone 365057 (TRAV25, TRAJ22)
CAVRSSGSARQLTF

SEQ ID NO: 730114 - protein, 16 aa, Homo sapiens
  CDR3 for beta chain variable domain of TCR clone 365057 (TRBV4-2, TRBJ1-1)
CASSPSPGRAAPESFF

SEQ ID NO: 730115 - protein, 13 aa, Homo sapiens
  CDR3 for alpha chain variable domain of TCR clone 365058 (TRAV27, TRAJ6)
CAGGTRGSYIPTF

SEQ ID NO: 730116 - protein, 16 aa, Homo sapiens
  CDR3 for beta chain variable domain of TCR clone 365058 (TRBV7-2, TRBJ1-6)
CASSSFESSYNSPLHS

SEQ ID NO: 730117 - protein, 16 aa, Homo sapiens
  CDR3 for alpha chain variable domain of TCR clone 365059 (TRAV12-2, TRAJ10)
CAVNRVLTGGGNKLTF

SEQ ID NO: 730118 - protein, 14 aa, Homo sapiens
  CDR3 for beta chain variable domain of TCR clone 365059 (TRBV9, TRBJ2-1)
GASSVALAVNEQFF

SEQ ID NO: 730119 - protein, 14 aa, Homo sapiens
  CDR3 for alpha chain variable domain of TCR clone 365060 (TRAV36/DV7, TRAJ44)
CCGANTGTASKLTF

SEQ ID NO: 730120 - protein, 17 aa, Homo sapiens
  CDR3 for beta chain variable domain of TCR clone 365060 (TRBV7-3, TRBJ2-3)
CASSPRGQGYGTDTQYF

SEQ ID NO: 730121 - protein, 13 aa, Homo sapiens
  CDR3 for alpha chain variable domain of TCR clone 365061 (TRAV8-6, TRAJ21)
CAVSPSSLNKFYL

SEQ ID NO: 730122 - protein, 14 aa, Homo sapiens
  CDR3 for beta chain variable domain of TCR clone 365061 (TRBV7-9, TRBJ2-5)
CASSLDTAQETQYF

SEQ ID NO: 730123 - protein, 15 aa, Homo sapiens
  CDR3 for alpha chain variable domain of TCR clone 365062 (TRAV17, TRAJ28)
CATVDSGAGSYQLTF

SEQ ID NO: 730124 - protein, 13 aa, Homo sapiens
  CDR3 for beta chain variable domain of TCR clone 365062 (TRBV5-4, TRBJ2-5)
CASSGQEGETQYF

SEQ ID NO: 730125 - protein, 20 aa, Homo sapiens
  CDR3 for alpha chain variable domain of TCR clone 365063 (TRAV1-2, TRAJ10)
CLLPLCCERGTQGGGNKLTF

SEQ ID NO: 730126 - protein, 12 aa, Homo sapiens
  CDR3 for beta chain variable domain of TCR clone 365063 (TRBV7-8, TRBJ2-7)
CASSLGDREQYF

SEQ ID NO: 730127 - protein, 12 aa, Homo sapiens
  CDR3 for alpha chain variable domain of TCR clone 365064 (TRAV23/DV6, TRAJ3)
CAARAPQQGFQD

SEQ ID NO: 730128 - protein, 17 aa, Homo sapiens
  CDR3 for beta chain variable domain of TCR clone 365064 (TRBV7-9, TRBJ2-3)
CASSPTVAGDLTDTQYF

SEQ ID NO: 730129 - protein, 12 aa, Homo sapiens
  CDR3 for alpha chain variable domain of TCR clone 365065 (TRAV13-1, TRAJ53)
CAAGGSNYKLTF

SEQ ID NO: 730130 - protein, 13 aa, Homo sapiens
  CDR3 for beta chain variable domain of TCR clone 365065 (TRBV28, TRBJ1-2)
CASRQQGDYGYTF

SEQ ID NO: 730131 - protein, 12 aa, Homo sapiens
  CDR3 for alpha chain variable domain of TCR clone 365066 (TRAV1-2, TRAJ26)
CAVRYYGQNFVF

SEQ ID NO: 730132 - protein, 13 aa, Homo sapiens
  CDR3 for beta chain variable domain of TCR clone 365066 (TRBV7-2, TRBJ2-2)
CASSLAVTGELFF

SEQ ID NO: 730133 - protein, 14 aa, Homo sapiens
  CDR3 for alpha chain variable domain of TCR clone 365067 (TRAV12-2, TRAJ5)
CAVNRSTGRRALTF

SEQ ID NO: 730134 - protein, 14 aa, Homo sapiens
  CDR3 for beta chain variable domain of TCR clone 365067 (TRBV19, TRBJ1-6)
CASSTDGWNSPLHF

SEQ ID NO: 730135 - protein, 14 aa, Homo sapiens
  CDR3 for alpha chain variable domain of TCR clone 365068 (TRAV12-2, TRAJ17)
CAVLFKAAGNKLPF

SEQ ID NO: 730136 - protein, 14 aa, Homo sapiens
  CDR3 for beta chain variable domain of TCR clone 365068 (TRBV7-8, TRBJ2-5)
CASSATGGQETQYF

SEQ ID NO: 730137 - protein, 12 aa, Homo sapiens
  CDR3 for alpha chain variable domain of TCR clone 365069 (TRAV2, TRAJ26)
CAGSPGRLWSEF

SEQ ID NO: 730138 - protein, 17 aa, Homo sapiens
  CDR3 for beta chain variable domain of TCR clone 365069 (TRBV11-2, TRBJ2-1)
CASSLSPPGVEYNEQFF

SEQ ID NO: 730139 - protein, 14 aa, Homo sapiens
  CDR3 for alpha chain variable domain of TCR clone 365070 (TRAV2, TRAJ37)
CAVDFTSNTGKLIF

SEQ ID NO: 730140 - protein, 14 aa, Homo sapiens
  CDR3 for beta chain variable domain of TCR clone 365070 (TRBV6-1, TRBJ1-3)
CASVQGGGGNNIYF

SEQ ID NO: 730141 - protein, 16 aa, Homo sapiens
  CDR3 for alpha chain variable domain of TCR clone 365071 (TRAV8-3, TRAJ44)
CSVGASNTGTASKLTF

SEQ ID NO: 730142 - protein, 15 aa, Homo sapiens
  CDR3 for beta chain variable domain of TCR clone 365071 (TRBV27, TRBJ1-5)
CASTFNRGSNQPQHF

SEQ ID NO: 730143 - protein, 10 aa, Homo sapiens
  CDR3 for alpha chain variable domain of TCR clone 365072 (TRAV16, TRAJ16)
CPGQKLLFAR

SEQ ID NO: 730144 - protein, 14 aa, Homo sapiens
  CDR3 for beta chain variable domain of TCR clone 365072 (TRBV18, TRBJ2-7)
CASSPRGGSYEQYF

SEQ ID NO: 730145 - protein, 14 aa, Homo sapiens
  CDR3 for alpha chain variable domain of TCR clone 365073 (TRAV26-2, TRAJ32)
CRVGYGGATNKLIF

SEQ ID NO: 730146 - protein, 14 aa, Homo sapiens
  CDR3 for beta chain variable domain of TCR clone 365073 (TRBV4-2, TRBJ2-1)
CASGLDRAYNEQFF

SEQ ID NO: 730147 - protein, 18 aa, Homo sapiens
  CDR3 for alpha chain variable domain of TCR clone 365074 (TRAV26-1, TRAJ23)
CIVRVGLEVWNQGGKLIF

SEQ ID NO: 730148 - protein, 14 aa, Homo sapiens
  CDR3 for beta chain variable domain of TCR clone 365074 (TRBV27, TRBJ2-2)
CASSLGAATGELFF

SEQ ID NO: 730149 - protein, 17 aa, Homo sapiens
  CDR3 for alpha chain variable domain of TCR clone 365075 (TRAV13-1, TRAJ31)
CAPRDRLMFGDGTQLVV

SEQ ID NO: 730150 - protein, 14 aa, Homo sapiens
  CDR3 for beta chain variable domain of TCR clone 365075 (TRBV12-4, TRBJ2-6)
CASSLGGSTNVLTF

SEQ ID NO: 730151 - protein, 17 aa, Homo sapiens
  CDR3 for alpha chain variable domain of TCR clone 365076 (TRAV3, TRAJ6)
CAVRDGPRAGGSYIPTF

SEQ ID NO: 730152 - protein, 14 aa, Homo sapiens
  CDR3 for beta chain variable domain of TCR clone 365076 (TRBV7-2, TRBJ2-7)
CASSPKTSLYGQYF

SEQ ID NO: 730153 - protein, 15 aa, Homo sapiens
  CDR3 for alpha chain variable domain of TCR clone 365077 (TRAV26-1, TRAJ44)
CIVRIGTGTASKLTF

SEQ ID NO: 730154 - protein, 14 aa, Homo sapiens
  CDR3 for beta chain variable domain of TCR clone 365077 (TRBV4-2, TRBJ2-1)
CASGLDRAYNEQFF

SEQ ID NO: 730155 - protein, 13 aa, Homo sapiens
  CDR3 for alpha chain variable domain of TCR clone 365078 (TRAV13-1, TRAJ44)
CSKATGTASKLTF

SEQ ID NO: 730156 - protein, 12 aa, Homo sapiens
  CDR3 for beta chain variable domain of TCR clone 365078 (TRBV6-3, TRBJ2-1)
CASSGSYNEQFF

SEQ ID NO: 730157 - protein, 11 aa, Homo sapiens
  CDR3 for alpha chain variable domain of TCR clone 365079 (TRAV13-1, TRAJ39)
CASHAGKMLTF

SEQ ID NO: 730158 - protein, 14 aa, Homo sapiens
  CDR3 for beta chain variable domain of TCR clone 365079 (TRBV11-2, TRBJ1-5)
CASSLDRGRQPQHF

SEQ ID NO: 730159 - protein, 11 aa, Homo sapiens
  CDR3 for alpha chain variable domain of TCR clone 365080 (TRAV21, TRAJ34)
CAHYNTDKLIF

SEQ ID NO: 730160 - protein, 13 aa, Homo sapiens
  CDR3 for beta chain variable domain of TCR clone 365080 (TRBV20-1, TRBJ1-1)
CSARGGGNTEAFF

SEQ ID NO: 730161 - protein, 13 aa, Homo sapiens
  CDR3 for alpha chain variable domain of TCR clone 365081 (TRAV12-2, TRAJ12)
CAVNWDSSYKLIF

SEQ ID NO: 730162 - protein, 14 aa, Homo sapiens
  CDR3 for beta chain variable domain of TCR clone 365081 (TRBV6-1, TRBJ1-3)
CASVQGGGGNTIYF

SEQ ID NO: 730163 - protein, 13 aa, Homo sapiens
  CDR3 for alpha chain variable domain of TCR clone 365082 (TRAV2, TRAJ40)
CAVVTSGTYKYIF

SEQ ID NO: 730164 - protein, 14 aa, Homo sapiens
  CDR3 for beta chain variable domain of TCR clone 365082 (TRBV28, TRBJ2-3)
CASSLTDLLDTQYF

SEQ ID NO: 730165 - protein, 11 aa, Homo sapiens
  CDR3 for alpha chain variable domain of TCR clone 365083 (TRAV16, TRAJ52)
CGGTSYGKLTF

SEQ ID NO: 730166 - protein, 13 aa, Homo sapiens
  CDR3 for beta chain variable domain of TCR clone 365083 (TRBV5-4, TRBJ1-1)
CASSLGGMTEAFF

SEQ ID NO: 730167 - protein, 17 aa, Homo sapiens
  CDR3 for alpha chain variable domain of TCR clone 365084 (TRAV3, TRAJ38)
CAVRDCLNAGNNRKLIW

SEQ ID NO: 730168 - protein, 17 aa, Homo sapiens
  CDR3 for beta chain variable domain of TCR clone 365084 (TRBV5-1, TRBJ2-5)
CASSPVALGQNQETQYF

SEQ ID NO: 730169 - protein, 18 aa, Homo sapiens
  CDR3 for alpha chain variable domain of TCR clone 365085 (TRAV21, TRAJ52)
CAVRPSPAGGTSYGNLIF

SEQ ID NO: 730170 - protein, 17 aa, Homo sapiens
  CDR3 for beta chain variable domain of TCR clone 365085 (TRBV13, TRBJ2-3)
CASSLSRVAGGRNTQYF

SEQ ID NO: 730171 - protein, 13 aa, Homo sapiens
  CDR3 for alpha chain variable domain of TCR clone 365086 (TRAV29/DV5, TRAJ31)
CAAGRNNNARLMF

SEQ ID NO: 730172 - protein, 12 aa, Homo sapiens
  CDR3 for beta chain variable domain of TCR clone 365086 (TRBV14, TRBJ1-1)
CASSQLKGLAFF

SEQ ID NO: 730173 - protein, 13 aa, Homo sapiens
  CDR3 for alpha chain variable domain of TCR clone 365087 (TRAV1-1, TRAJ9)
CAAKNTGGFKTIV

SEQ ID NO: 730174 - protein, 14 aa, Homo sapiens
  CDR3 for beta chain variable domain of TCR clone 365087 (TRBV20-1, TRBJ2-1)
CSAQIGGSANAQFF

SEQ ID NO: 730175 - protein, 15 aa, Homo sapiens
  CDR3 for alpha chain variable domain of TCR clone 365088 (TRAV25, TRAJ53)
CPTSNSGGSNYKLTF

SEQ ID NO: 730176 - protein, 13 aa, Homo sapiens
  CDR3 for beta chain variable domain of TCR clone 365088 (TRBV28, TRBJ2-1)
CASRSGGLNEQFF

SEQ ID NO: 730177 - protein, 12 aa, Homo sapiens
  CDR3 for alpha chain variable domain of TCR clone 365089 (TRAV2, TRAJ36)
CAELTGANNPFF

SEQ ID NO: 730178 - protein, 18 aa, Homo sapiens
  CDR3 for beta chain variable domain of TCR clone 365089 (TRBV19, TRBJ1-1)
CASSIDGGDYTGNTEAFF

SEQ ID NO: 730179 - protein, 14 aa, Homo sapiens
  CDR3 for alpha chain variable domain of TCR clone 365090 (TRAV1-2, TRAJ17)
CALRRGAAGNKLTF

SEQ ID NO: 730180 - protein, 15 aa, Homo sapiens
  CDR3 for beta chain variable domain of TCR clone 365090 (TRBV6-1, TRBJ2-2)
CASSRLRGDTGELFF

SEQ ID NO: 730181 - protein, 14 aa, Homo sapiens
  CDR3 for alpha chain variable domain of TCR clone 365091 (TRAV9-2, TRAJ39)
CALYIYNAGNMLTF

SEQ ID NO: 730182 - protein, 14 aa, Homo sapiens
  CDR3 for beta chain variable domain of TCR clone 365091 (TRBV7-2, TRBJ2-7)
CASRSQGAAYEQDF

SEQ ID NO: 730183 - protein, 14 aa, Homo sapiens
  CDR3 for alpha chain variable domain of TCR clone 365092 (TRAV1-2, TRAJ16)
CAVNRFSDGQKLLF

SEQ ID NO: 730184 - protein, 13 aa, Homo sapiens
  CDR3 for beta chain variable domain of TCR clone 365092 (TRBV10-3, TRBJ1-2)
CATGGTGNYGYTF

SEQ ID NO: 730185 - protein, 12 aa, Homo sapiens
  CDR3 for alpha chain variable domain of TCR clone 365093 (TRAV3, TRAJ43)
CAVRDPNNDMRF

SEQ ID NO: 730186 - protein, 13 aa, Homo sapiens
  CDR3 for beta chain variable domain of TCR clone 365093 (TRBV14, TRBJ1-1)
CASSQEAGTEAFF

SEQ ID NO: 730187 - protein, 18 aa, Homo sapiens
  CDR3 for alpha chain variable domain of TCR clone 365094 (TRAV26-2, TRAJ54)
CILRDVEVGIQGAQKLVF

SEQ ID NO: 730188 - protein, 17 aa, Homo sapiens
  CDR3 for beta chain variable domain of TCR clone 365094 (TRBV11-2, TRBJ2-6)
CASSQRDIFSGANVLTF

SEQ ID NO: 730189 - protein, 17 aa, Homo sapiens
  CDR3 for alpha chain variable domain of TCR clone 365095 (TRAV1-1, TRAJ32)
CAVRVDELWWCYKQAHL

SEQ ID NO: 730190 - protein, 15 aa, Homo sapiens
  CDR3 for beta chain variable domain of TCR clone 365095 (TRBV5-1, TRBJ2-3)
CASSVTSGSTDTQYF

SEQ ID NO: 730191 - protein, 14 aa, Homo sapiens
  CDR3 for alpha chain variable domain of TCR clone 365096 (TRAV27, TRAJ49)
CAGRPEGTGNQFYF

SEQ ID NO: 730192 - protein, 15 aa, Homo sapiens
  CDR3 for beta chain variable domain of TCR clone 365096 (TRBV19, TRBJ2-1)
CASSIQATSDNEQFF

SEQ ID NO: 730193 - protein, 13 aa, Homo sapiens
  CDR3 for alpha chain variable domain of TCR clone 365097 (TRAV17, TRAJ54)
CAMKIQGAQKLVF

SEQ ID NO: 730194 - protein, 11 aa, Homo sapiens
  CDR3 for beta chain variable domain of TCR clone 365097 (TRBV29-1, TRBJ2-5)
FSEDRTGTQYF

SEQ ID NO: 730195 - protein, 12 aa, Homo sapiens
  CDR3 for alpha chain variable domain of TCR clone 365098 (TRAV27, TRAJ33)
CAGDGSNYQLIW

SEQ ID NO: 730196 - protein, 15 aa, Homo sapiens
  CDR3 for beta chain variable domain of TCR clone 365098 (TRBV6-5, TRBJ2-7)
CASSSSTSGNYEQYF

SEQ ID NO: 730197 - protein, 18 aa, Homo sapiens
  CDR3 for alpha chain variable domain of TCR clone 365099 (TRAV25, TRAJ37)
CRNLLLSPRGSNTGKLIF

SEQ ID NO: 730198 - protein, 12 aa, Homo sapiens
  CDR3 for beta chain variable domain of TCR clone 365099 (TRBV11-2, TRBJ2-2)
CASSLGGGELFF

SEQ ID NO: 730199 - protein, 14 aa, Homo sapiens
  CDR3 for alpha chain variable domain of TCR clone 365100 (TRAV12-2, TRAJ13)
CAVKKTGGYQKVTF

SEQ ID NO: 730200 - protein, 13 aa, Homo sapiens
  CDR3 for beta chain variable domain of TCR clone 365100 (TRBV27, TRBJ2-7)
CASKLAVNYEQYF

SEQ ID NO: 730201 - protein, 15 aa, Homo sapiens
  CDR3 for alpha chain variable domain of TCR clone 365101 (TRAV3, TRAJ13)
CAVRVSSGGYQKVTF

SEQ ID NO: 730202 - protein, 17 aa, Homo sapiens
  CDR3 for beta chain variable domain of TCR clone 365101 (TRBV7-3, TRBJ2-3)
CASSLMKRMRGADTQYF

SEQ ID NO: 730203 - protein, 13 aa, Homo sapiens
  CDR3 for alpha chain variable domain of TCR clone 365102 (TRAV16, TRAJ34)
CALISYNTDKLIF

SEQ ID NO: 730204 - protein, 14 aa, Homo sapiens
  CDR3 for beta chain variable domain of TCR clone 365102 (TRBV4-2, TRBJ1-5)
CASSRDRGNQPQHF

SEQ ID NO: 730205 - protein, 14 aa, Homo sapiens
  CDR3 for alpha chain variable domain of TCR clone 365103 (TRAV12-3, TRAJ33)
CAMSVPGSNYQLIW

SEQ ID NO: 730206 - protein, 14 aa, Homo sapiens
  CDR3 for beta chain variable domain of TCR clone 365103 (TRBV6-3, TRBJ1-1)
CASSYQRRDTEAFF

SEQ ID NO: 730207 - protein, 15 aa, Homo sapiens
  CDR3 for alpha chain variable domain of TCR clone 365104 (TRAV29/DV5, TRAJ24)
CAASGATDSWGKFQF

SEQ ID NO: 730208 - protein, 15 aa, Homo sapiens
  CDR3 for beta chain variable domain of TCR clone 365104 (TRBV7-2, TRBJ2-1)
CASSFQADEYNEQFF

SEQ ID NO: 730209 - protein, 16 aa, Homo sapiens
  CDR3 for alpha chain variable domain of TCR clone 365105 (TRAV30, TRAJ24)
CGTEIVDADSWGNFQF

SEQ ID NO: 730210 - protein, 14 aa, Homo sapiens
  CDR3 for beta chain variable domain of TCR clone 365105 (TRBV12-5, TRBJ2-5)
CASGSRTHQETQYL

SEQ ID NO: 730211 - protein, 14 aa, Homo sapiens
  CDR3 for alpha chain variable domain of TCR clone 365106 (TRAV12-2, TRAJ17)
CAVLFNAAGNKLTF

SEQ ID NO: 730212 - protein, 11 aa, Homo sapiens
  CDR3 for beta chain variable domain of TCR clone 365106 (TRBV29-1, TRBJ2-5)
CSEDRTGTQYF

SEQ ID NO: 730213 - protein, 15 aa, Homo sapiens
  CDR3 for alpha chain variable domain of TCR clone 365107 (TRAV17, TRAJ37)
CATDHGSRNTGKLIF

SEQ ID NO: 730214 - protein, 14 aa, Homo sapiens
  CDR3 for beta chain variable domain of TCR clone 365107 (TRBV7-2, TRBJ2-3)
CASSRTSGADTQYF

SEQ ID NO: 730215 - protein, 14 aa, Homo sapiens
  CDR3 for alpha chain variable domain of TCR clone 365108 (TRAV17, TRAJ57)
CATDPKGGSEKLVF

SEQ ID NO: 730216 - protein, 13 aa, Homo sapiens
  CDR3 for beta chain variable domain of TCR clone 365108 (TRBV19, TRBJ2-7)
CASSPRQSYEQYF

SEQ ID NO: 730217 - protein, 17 aa, Homo sapiens
  CDR3 for alpha chain variable domain of TCR clone 365109 (TRAV23/DV6, TRAJ57)
CAASSTLSQGGSEKLGF

SEQ ID NO: 730218 - protein, 13 aa, Homo sapiens
  CDR3 for beta chain variable domain of TCR clone 365109 (TRBV25-1, TRBJ1-1)
CASTHLGGNTEAF

SEQ ID NO: 730219 - protein, 13 aa, Homo sapiens
  CDR3 for alpha chain variable domain of TCR clone 365110 (TRAV8-3, TRAJ6)
CAVGSGGSYIPTF

SEQ ID NO: 730220 - protein, 14 aa, Homo sapiens
  CDR3 for beta chain variable domain of TCR clone 365110 (TRBV11-2, TRBJ1-1)
CASSTQRGRTEGFF

SEQ ID NO: 730221 - protein, 17 aa, Homo sapiens
  CDR3 for alpha chain variable domain of TCR clone 365111 (TRAV12-1, TRAJ13)
CVVNKRGEFWGLPESYL

SEQ ID NO: 730222 - protein, 15 aa, Homo sapiens
  CDR3 for beta chain variable domain of TCR clone 365111 (TRBV7-8, TRBJ2-1)
CASSLAGGLYNEQFF

SEQ ID NO: 730223 - protein, 13 aa, Homo sapiens
  CDR3 for alpha chain variable domain of TCR clone 365112 (TRAV1-2, TRAJ9)
CAALNTGGFKTIF

SEQ ID NO: 730224 - protein, 13 aa, Homo sapiens
  CDR3 for beta chain variable domain of TCR clone 365112 (TRBV19, TRBJ1-2)
CASSVHGQDGYNF

SEQ ID NO: 730225 - protein, 15 aa, Homo sapiens
  CDR3 for alpha chain variable domain of TCR clone 365113 (TRAV3, TRAJ5)
CAVRDTKTGRRALTF

SEQ ID NO: 730226 - protein, 15 aa, Homo sapiens
  CDR3 for beta chain variable domain of TCR clone 365113 (TRBV7-8, TRBJ2-1)
CASSLADSLYNEQFF

SEQ ID NO: 730227 - protein, 16 aa, Homo sapiens
  CDR3 for alpha chain variable domain of TCR clone 365114 (TRAV8-6, TRAJ10)
CAVSDEITGGGNKLTF

SEQ ID NO: 730228 - protein, 16 aa, Homo sapiens
  CDR3 for beta chain variable domain of TCR clone 365114 (TRBV7-3, TRBJ2-2)
CASSLKRGTLSGELFF

SEQ ID NO: 730229 - protein, 14 aa, Homo sapiens
  CDR3 for alpha chain variable domain of TCR clone 365115 (TRAV20, TRAJ42)
CAVQGWRSQGNLIF

SEQ ID NO: 730230 - protein, 13 aa, Homo sapiens
  CDR3 for beta chain variable domain of TCR clone 365115 (TRBV20-1, TRBJ2-7)
CSATHTSGYEQYF

SEQ ID NO: 730231 - protein, 16 aa, Homo sapiens
  CDR3 for alpha chain variable domain of TCR clone 365116 (TRAV23/DV6, TRAJ9)
CAASIGGNTGGFKTIF

SEQ ID NO: 730232 - protein, 14 aa, Homo sapiens
  CDR3 for beta chain variable domain of TCR clone 365116 (TRBV9, TRBJ2-7)
CVSSVGVGSYEQYF

SEQ ID NO: 730233 - protein, 21 aa, Homo sapiens
  CDR3 for alpha chain variable domain of TCR clone 365117 (TRAV3, TRAJ17)
CAVRARRGGRSCRQQANCWRR

SEQ ID NO: 730234 - protein, 14 aa, Homo sapiens
  CDR3 for beta chain variable domain of TCR clone 365117 (TRBV7-9, TRBJ2-5)
CASSLDAAQETQYF

SEQ ID NO: 730235 - protein, 10 aa, Homo sapiens
  CDR3 for alpha chain variable domain of TCR clone 365118 (TRAV2, TRAJ15)
RGQAGTALIF

SEQ ID NO: 730236 - protein, 12 aa, Homo sapiens
  CDR3 for beta chain variable domain of TCR clone 365118 (TRBV11-2, TRBJ2-2)
CASSLGGGGLFF

SEQ ID NO: 730237 - protein, 15 aa, Homo sapiens
  CDR3 for alpha chain variable domain of TCR clone 365119 (TRAV8-3, TRAJ23)
CAVGDRYNQGGKLIF

SEQ ID NO: 730238 - protein, 16 aa, Homo sapiens
  CDR3 for beta chain variable domain of TCR clone 365119 (TRBV19, TRBJ2-1)
CASSKAGPSSYNEQFF

SEQ ID NO: 730239 - protein, 13 aa, Homo sapiens
  CDR3 for alpha chain variable domain of TCR clone 365120 (TRAV12-1, TRAJ13)
CVVTSGGYQKVIF

SEQ ID NO: 730240 - protein, 14 aa, Homo sapiens
  CDR3 for beta chain variable domain of TCR clone 365120 (TRBV27, TRBJ2-1)
CASSATGGYNEQFF

SEQ ID NO: 730241 - protein, 12 aa, Homo sapiens
  CDR3 for alpha chain variable domain of TCR clone 365121 (TRAV8-4, TRAJ43)
CAVSVNNNDMRF

SEQ ID NO: 730242 - protein, 14 aa, Homo sapiens
  CDR3 for beta chain variable domain of TCR clone 365121 (TRBV11-2, TRBJ1-2)
CASRLGTANYGYTF

SEQ ID NO: 730243 - protein, 14 aa, Homo sapiens
  CDR3 for alpha chain variable domain of TCR clone 365122 (TRAV21, TRAJ37)
CAVKGSSNTGKLIF

SEQ ID NO: 730244 - protein, 14 aa, Homo sapiens
  CDR3 for beta chain variable domain of TCR clone 365122 (TRBV7-2, TRBJ2-7)
CASRSQGAAYEQYF

SEQ ID NO: 730245 - protein, 18 aa, Homo sapiens
  CDR3 for alpha chain variable domain of TCR clone 365123 (TRAV21, TRAJ52)
CAVRPSPAGGTSYGKLTF

SEQ ID NO: 730246 - protein, 16 aa, Homo sapiens
  CDR3 for beta chain variable domain of TCR clone 365123 (TRBV13, TRBJ2-3)
CQQPLQGSGGRNTQSF

SEQ ID NO: 730247 - protein, 14 aa, Homo sapiens
  CDR3 for alpha chain variable domain of TCR clone 365124 (TRAV2, TRAJ9)
CAVEDRSGGFKTIF

SEQ ID NO: 730248 - protein, 15 aa, Homo sapiens
  CDR3 for beta chain variable domain of TCR clone 365124 (TRBV19, TRBJ2-1)
CASSLETSGYNEQFF

SEQ ID NO: 730249 - protein, 12 aa, Homo sapiens
  CDR3 for alpha chain variable domain of TCR clone 365125 (TRAV36/DV7, TRAJ53)
CAVRGSNYKLTF

SEQ ID NO: 730250 - protein, 13 aa, Homo sapiens
  CDR3 for beta chain variable domain of TCR clone 365125 (TRBV19, TRBJ2-7)
CASRKAGGSEQYF

SEQ ID NO: 730251 - protein, 12 aa, Homo sapiens
  CDR3 for alpha chain variable domain of TCR clone 365126 (TRAV12-2, TRAJ16)
CAVNLDGQQLLF

SEQ ID NO: 730252 - protein, 12 aa, Homo sapiens
  CDR3 for beta chain variable domain of TCR clone 365126 (TRBV5-7, TRBJ2-7)
CASSVQGGEQYF

SEQ ID NO: 730253 - protein, 12 aa, Homo sapiens
  CDR3 for alpha chain variable domain of TCR clone 365127 (TRAV8-4, TRAJ37)
CAVSGNTGKLIF

SEQ ID NO: 730254 - protein, 14 aa, Homo sapiens
  CDR3 for beta chain variable domain of TCR clone 365127 (TRBV4-1, TRBJ2-2)
CASSQAVNTGELFF

SEQ ID NO: 730255 - protein, 15 aa, Homo sapiens
  CDR3 for alpha chain variable domain of TCR clone 365128 (TRAV35, TRAJ40)
CAGQLGTAGTYKYIF

SEQ ID NO: 730256 - protein, 13 aa, Homo sapiens
  CDR3 for beta chain variable domain of TCR clone 365128 (TRBV7-3, TRBJ1-1)
CASSQDWGAKAFF

SEQ ID NO: 730257 - protein, 11 aa, Homo sapiens
  CDR3 for alpha chain variable domain of TCR clone 365129 (TRAV12-3, TRAJ43)
CAMSVYNDMRF

SEQ ID NO: 730258 - protein, 12 aa, Homo sapiens
  CDR3 for beta chain variable domain of TCR clone 365129 (TRBV20-1, TRBJ1-1)
QCSTWGGTEAFF

SEQ ID NO: 730259 - protein, 13 aa, Homo sapiens
  CDR3 for alpha chain variable domain of TCR clone 365130 (TRAV12-1, TRAJ29)
CVVVVSGNTPLVF

SEQ ID NO: 730260 - protein, 13 aa, Homo sapiens
  CDR3 for beta chain variable domain of TCR clone 365130 (TRBV18, TRBJ2-1)
CASSPPSSNEQFF

SEQ ID NO: 730261 - protein, 13 aa, Homo sapiens
  CDR3 for alpha chain variable domain of TCR clone 365131 (TRAV21, TRAJ20)
CAVSRLGDYKLSF

SEQ ID NO: 730262 - protein, 13 aa, Homo sapiens
  CDR3 for beta chain variable domain of TCR clone 365131 (TRBV7-3, TRBJ1-1)
CASSPTGGLEAFF

SEQ ID NO: 730263 - protein, 13 aa, Homo sapiens
  CDR3 for alpha chain variable domain of TCR clone 365132 (TRAV12-2, TRAJ7)
CAVSLYGNNRLAF

SEQ ID NO: 730264 - protein, 18 aa, Homo sapiens
  CDR3 for beta chain variable domain of TCR clone 365132 (TRBV4-2, TRBJ2-1)
CASSHQGLAASSYNEQFF

SEQ ID NO: 730265 - protein, 13 aa, Homo sapiens
  CDR3 for alpha chain variable domain of TCR clone 365133 (TRAV27, TRAJ3)
ASLRGSSASKIIF

SEQ ID NO: 730266 - protein, 17 aa, Homo sapiens
  CDR3 for beta chain variable domain of TCR clone 365133 (TRBV20-1, TRBJ2-1)
CSAPPRLAGTRYNEQFF

SEQ ID NO: 730267 - protein, 22 aa, Homo sapiens
  CDR3 for alpha chain variable domain of TCR clone 365134 (TRAV12-2, TRAJ53)
SPVIQPPTSVPPILSSNYKLTF

SEQ ID NO: 730268 - protein, 15 aa, Homo sapiens
  CDR3 for beta chain variable domain of TCR clone 365134 (TRBV2, TRBJ2-5)
CASTRDGGPQETQYF

SEQ ID NO: 730269 - protein, 15 aa, Homo sapiens
  CDR3 for alpha chain variable domain of TCR clone 365135 (TRAV12-3, TRAJ49)
CAMAVTPNTGNQFYF

SEQ ID NO: 730270 - protein, 17 aa, Homo sapiens
  CDR3 for beta chain variable domain of TCR clone 365135 (TRBV7-9, TRBJ2-1)
CASSLVASYPSYNEQFF

SEQ ID NO: 730271 - protein, 15 aa, Homo sapiens
  CDR3 for alpha chain variable domain of TCR clone 365136 (TRAV8-3, TRAJ45)
CASSYSGGGADGLTF

SEQ ID NO: 730272 - protein, 13 aa, Homo sapiens
  CDR3 for beta chain variable domain of TCR clone 365136 (TRBV10-3, TRBJ2-7)
CASKLAVNYEQCV

SEQ ID NO: 730273 - protein, 10 aa, Homo sapiens
  CDR3 for alpha chain variable domain of TCR clone 365137 (TRAV8-4, TRAJ48)
FNFGNEKLTL

SEQ ID NO: 730274 - protein, 12 aa, Homo sapiens
  CDR3 for beta chain variable domain of TCR clone 365137 (TRBV7-3, TRBJ1-2)
CASSKKGVPVTF

SEQ ID NO: 730275 - protein, 12 aa, Homo sapiens
  CDR3 for alpha chain variable domain of TCR clone 365138 (TRAV29/DV5, TRAJ15)
CASNQAATALIF

SEQ ID NO: 730276 - protein, 15 aa, Homo sapiens
  CDR3 for beta chain variable domain of TCR clone 365138 (TRBV11-2, TRBJ2-2)
CASSSDRVNAGELFF

SEQ ID NO: 730277 - protein, 14 aa, Homo sapiens
  CDR3 for alpha chain variable domain of TCR clone 365139 (TRAV12-2, TRAJ13)
CAVKKTGGYQKVTF

SEQ ID NO: 730278 - protein, 15 aa, Homo sapiens
  CDR3 for beta chain variable domain of TCR clone 365139 (TRBV27, TRBJ2-1)
CASSNGQGPPMSSSS

SEQ ID NO: 730279 - protein, 15 aa, Homo sapiens
  CDR3 for alpha chain variable domain of TCR clone 365140 (TRAV23/DV6, TRAJ37)
CAAGEGSSHTGKLIF

SEQ ID NO: 730280 - protein, 17 aa, Homo sapiens
  CDR3 for beta chain variable domain of TCR clone 365140 (TRBV20-1, TRBJ2-7)
CSATRAGGVAGVEEQYF

SEQ ID NO: 730281 - protein, 15 aa, Homo sapiens
  CDR3 for alpha chain variable domain of TCR clone 365141 (TRAV26-1, TRAJ29)
CIVRVEGSGYTPLVF

SEQ ID NO: 730282 - protein, 14 aa, Homo sapiens
  CDR3 for beta chain variable domain of TCR clone 365141 (TRBV18, TRBJ2-5)
CASSPGVSRETQYF

SEQ ID NO: 730283 - protein, 21 aa, Homo sapiens
  CDR3 for alpha chain variable domain of TCR clone 365142 (TRAV29/DV5, TRAJ52)
CSVLLSSKREAGGTSYGKLTF

SEQ ID NO: 730284 - protein, 15 aa, Homo sapiens
  CDR3 for beta chain variable domain of TCR clone 365142 (TRBV6-1, TRBJ2-1)
CASSELRGQYNEQFF

SEQ ID NO: 730285 - protein, 15 aa, Homo sapiens
  CDR3 for alpha chain variable domain of TCR clone 365143 (TRAV3, TRAJ5)
CAVRDLYTGRRALTF

SEQ ID NO: 730286 - protein, 17 aa, Homo sapiens
  CDR3 for beta chain variable domain of TCR clone 365143 (TRBV13, TRBJ2-3)
CASSLSRVAGGRNTQYF

SEQ ID NO: 730287 - protein, 15 aa, Homo sapiens
  CDR3 for alpha chain variable domain of TCR clone 365144 (TRAV26-1, TRAJ40)
CIVRVTTSGTYKYIF

SEQ ID NO: 730288 - protein, 13 aa, Homo sapiens
  CDR3 for beta chain variable domain of TCR clone 365144 (TRBV12-4, TRBJ1-1)
CASSPGTGFEAFF

SEQ ID NO: 730289 - protein, 12 aa, Homo sapiens
  CDR3 for alpha chain variable domain of TCR clone 365145 (TRAV1-1, TRAJ39)
CAVPVVGNMLTF

SEQ ID NO: 730290 - protein, 18 aa, Homo sapiens
  CDR3 for beta chain variable domain of TCR clone 365145 (TRBV11-2, TRBJ2-3)
CASSLGGASRGAPNTQYF

SEQ ID NO: 730291 - protein, 15 aa, Homo sapiens
  CDR3 for alpha chain variable domain of TCR clone 365146 (TRAV20, TRAJ41)
CAVQANSNSGYALNF

SEQ ID NO: 730292 - protein, 18 aa, Homo sapiens
  CDR3 for beta chain variable domain of TCR clone 365146 (TRBV7-9, TRBJ2-7)
CASSITTSGSRTWYEQYL

SEQ ID NO: 730293 - protein, 14 aa, Homo sapiens
  CDR3 for alpha chain variable domain of TCR clone 365147 (TRAV12-2, TRAJ53)
CAVKGGGSNYKLTF

SEQ ID NO: 730294 - protein, 13 aa, Homo sapiens
  CDR3 for beta chain variable domain of TCR clone 365147 (TRBV28, TRBJ2-5)
CASSFAGGETQYF

SEQ ID NO: 730295 - protein, 13 aa, Homo sapiens
  CDR3 for alpha chain variable domain of TCR clone 365148 (TRAV12-2, TRAJ10)
CAVPTAGGNKLTF

SEQ ID NO: 730296 - protein, 11 aa, Homo sapiens
  CDR3 for beta chain variable domain of TCR clone 365148 (TRBV6-1, TRBJ2-1)
CASISSNEQFF

SEQ ID NO: 730297 - protein, 12 aa, Homo sapiens
  CDR3 for alpha chain variable domain of TCR clone 365149 (TRAV2, TRAJ33)
CDFVDSNYQLIW

SEQ ID NO: 730298 - protein, 16 aa, Homo sapiens
  CDR3 for beta chain variable domain of TCR clone 365149 (TRBV2, TRBJ2-7)
CASSEPWTGPSYEQYF

SEQ ID NO: 730299 - protein, 13 aa, Homo sapiens
  CDR3 for alpha chain variable domain of TCR clone 365150 (TRAV13-2, TRAJ13)
CAERPGGSQKVTF

SEQ ID NO: 730300 - protein, 15 aa, Homo sapiens
  CDR3 for beta chain variable domain of TCR clone 365150 (TRBV11-3, TRBJ2-7)
CASSPGPASSYEQYF

SEQ ID NO: 730301 - protein, 12 aa, Homo sapiens
  CDR3 for alpha chain variable domain of TCR clone 365151 (TRAV12-1, TRAJ40)
CVVYSGTYQYIF

SEQ ID NO: 730302 - protein, 15 aa, Homo sapiens
  CDR3 for beta chain variable domain of TCR clone 365151 (TRBV20-1, TRBJ2-7)
CSARDRVSGMDEQYF

SEQ ID NO: 730303 - protein, 12 aa, Homo sapiens
  CDR3 for alpha chain variable domain of TCR clone 365152 (TRAV8-3, TRAJ5)
CAVGGGLRALTF

SEQ ID NO: 730304 - protein, 14 aa, Homo sapiens
  CDR3 for beta chain variable domain of TCR clone 365152 (TRBV12-5, TRBJ2-5)
CASGSRTHQETQYF

SEQ ID NO: 730305 - protein, 16 aa, Homo sapiens
  CDR3 for alpha chain variable domain of TCR clone 365153 (TRAV3, TRAJ32)
CAVRENYGGATNKLIF

SEQ ID NO: 730306 - protein, 12 aa, Homo sapiens
  CDR3 for beta chain variable domain of TCR clone 365153 (TRBV20-1, TRBJ1-2)
CSVTPEGYGYNF

SEQ ID NO: 730307 - protein, 14 aa, Homo sapiens
  CDR3 for alpha chain variable domain of TCR clone 365154 (TRAV17, TRAJ16)
CATADFSDGKKLLF

SEQ ID NO: 730308 - protein, 14 aa, Homo sapiens
  CDR3 for beta chain variable domain of TCR clone 365154 (TRBV4-2, TRBJ2-1)
CASGLDRAYNEQFF

SEQ ID NO: 730309 - protein, 13 aa, Homo sapiens
  CDR3 for alpha chain variable domain of TCR clone 365155 (TRAV21, TRAJ3)
CAVRGSSASKIIF

SEQ ID NO: 730310 - protein, 19 aa, Homo sapiens
  CDR3 for beta chain variable domain of TCR clone 365155 (TRBV25-1, TRBJ2-2)
CAILVYRVDRGRKTGELFF

SEQ ID NO: 730311 - protein, 13 aa, Homo sapiens
  CDR3 for alpha chain variable domain of TCR clone 365156 (TRAV13-1, TRAJ39)
CAESIVMQATCSP

SEQ ID NO: 730312 - protein, 16 aa, Homo sapiens
  CDR3 for beta chain variable domain of TCR clone 365156 (TRBV20-1, TRBJ1-4)
CSAPGQGLLTNEKLFF

SEQ ID NO: 730313 - protein, 14 aa, Homo sapiens
  CDR3 for alpha chain variable domain of TCR clone 365157 (TRAV9-2, TRAJ39)
CALYIYNAGNMLTF

SEQ ID NO: 730314 - protein, 15 aa, Homo sapiens
  CDR3 for beta chain variable domain of TCR clone 365157 (TRBV6-1, TRBJ2-3)
CASSERWDSTDTQYF

SEQ ID NO: 730315 - protein, 11 aa, Homo sapiens
  CDR3 for alpha chain variable domain of TCR clone 365158 (TRAV21, TRAJ4)
HVSGGYNKLIF

SEQ ID NO: 730316 - protein, 13 aa, Homo sapiens
  CDR3 for beta chain variable domain of TCR clone 365158 (TRBV7-3, TRBJ2-5)
CASSLTAGETQFF

SEQ ID NO: 730317 - protein, 12 aa, Homo sapiens
  CDR3 for alpha chain variable domain of TCR clone 365159 (TRAV3, TRAJ43)
CAVRGPNNDMRF

SEQ ID NO: 730318 - protein, 15 aa, Homo sapiens
  CDR3 for beta chain variable domain of TCR clone 365159 (TRBV27, TRBJ1-5)
CASSLGTGFDKPQHF

SEQ ID NO: 730319 - protein, 13 aa, Homo sapiens
  CDR3 for alpha chain variable domain of TCR clone 365160 (TRAV12-1, TRAJ33)
CGDAPDSNYQLIW

SEQ ID NO: 730320 - protein, 15 aa, Homo sapiens
  CDR3 for beta chain variable domain of TCR clone 365160 (TRBV7-2, TRBJ2-2)
CASRRPGQNTGEQFF

SEQ ID NO: 730321 - protein, 16 aa, Homo sapiens
  CDR3 for alpha chain variable domain of TCR clone 365161 (TRAV12-3, TRAJ53)
CAMSPGSGGSNYKLTF

SEQ ID NO: 730322 - protein, 19 aa, Homo sapiens
  CDR3 for beta chain variable domain of TCR clone 365161 (TRBV25-1, TRBJ2-2)
CAILVYRVDRGRKTGELCF

SEQ ID NO: 730323 - protein, 10 aa, Homo sapiens
  CDR3 for alpha chain variable domain of TCR clone 365162 (TRAV1-2, TRAJ20)
CALNDYKLSF

SEQ ID NO: 730324 - protein, 12 aa, Homo sapiens
  CDR3 for beta chain variable domain of TCR clone 365162 (TRBV11-2, TRBJ2-2)
CASSLPTGELFF

SEQ ID NO: 730325 - protein, 15 aa, Homo sapiens
  CDR3 for alpha chain variable domain of TCR clone 365163 (TRAV2, TRAJ15)
CAVEDREQVGTALIF

SEQ ID NO: 730326 - protein, 13 aa, Homo sapiens
  CDR3 for beta chain variable domain of TCR clone 365163 (TRBV10-2, TRBJ2-7)
CASGTSGGYEQYF

SEQ ID NO: 730327 - protein, 14 aa, Homo sapiens
  CDR3 for alpha chain variable domain of TCR clone 365164 (TRAV12-2, TRAJ5)
CAVNRSTGRRALTF

SEQ ID NO: 730328 - protein, 14 aa, Homo sapiens
  CDR3 for beta chain variable domain of TCR clone 365164 (TRBV19, TRBJ1-1)
CASRRFAGVTEAFF

SEQ ID NO: 730329 - protein, 15 aa, Homo sapiens
  CDR3 for alpha chain variable domain of TCR clone 365165 (TRAV8-3, TRAJ27)
CAVGPSKTNAGKSTF

SEQ ID NO: 730330 - protein, 15 aa, Homo sapiens
  CDR3 for beta chain variable domain of TCR clone 365165 (TRBV18, TRBJ2-7)
CASSPSSTGNYEQYF

SEQ ID NO: 730331 - protein, 12 aa, Homo sapiens
  CDR3 for alpha chain variable domain of TCR clone 365166 (TRAV20, TRAJ56)
CAVTGANSKLTF

SEQ ID NO: 730332 - protein, 20 aa, Homo sapiens
  CDR3 for beta chain variable domain of TCR clone 365166 (TRBV7-8, TRBJ2-2)
CASSHLFPGPTIHITGELFF

SEQ ID NO: 730333 - protein, 15 aa, Homo sapiens
  CDR3 for alpha chain variable domain of TCR clone 365167 (TRAV8-6, TRAJ10)
CAVSDQAGGGNKLTF

SEQ ID NO: 730334 - protein, 15 aa, Homo sapiens
  CDR3 for beta chain variable domain of TCR clone 365167 (TRBV3-1, TRBJ2-5)
CVSSANLGGPETQYF

SEQ ID NO: 730335 - protein, 14 aa, Homo sapiens
  CDR3 for alpha chain variable domain of TCR clone 365168 (TRAV12-3, TRAJ10)
SHLPLTGGGNKLTF

SEQ ID NO: 730336 - protein, 14 aa, Homo sapiens
  CDR3 for beta chain variable domain of TCR clone 365168 (TRBV6-1, TRBJ1-3)
CASVQGGGGNAIDF

SEQ ID NO: 730337 - protein, 14 aa, Homo sapiens
  CDR3 for alpha chain variable domain of TCR clone 365169 (TRAV8-3, TRAJ4)
CAVGAAGGYNKLIF

SEQ ID NO: 730338 - protein, 15 aa, Homo sapiens
  CDR3 for beta chain variable domain of TCR clone 365169 (TRBV6-5, TRBJ2-1)
CAVSYDAGAGNEQFF

SEQ ID NO: 730339 - protein, 15 aa, Homo sapiens
  CDR3 for alpha chain variable domain of TCR clone 365170 (TRAV26-1, TRAJ44)
CIVRIGTGTASKLTF

SEQ ID NO: 730340 - protein, 15 aa, Homo sapiens
  CDR3 for beta chain variable domain of TCR clone 365170 (TRBV12-4, TRBJ2-5)
CASSPPTGLQETQYF

SEQ ID NO: 730341 - protein, 15 aa, Homo sapiens
  CDR3 for alpha chain variable domain of TCR clone 365171 (TRAV3, TRAJ29)
CAVRDLYSGNTPLVF

SEQ ID NO: 730342 - protein, 16 aa, Homo sapiens
  CDR3 for beta chain variable domain of TCR clone 365171 (TRBV9, TRBJ2-7)
CASSAGPDRSPYEQYF

SEQ ID NO: 730343 - protein, 12 aa, Homo sapiens
  CDR3 for alpha chain variable domain of TCR clone 365172 (TRAV8-3, TRAJ26)
CAGDNYGQNFVF

SEQ ID NO: 730344 - protein, 15 aa, Homo sapiens
  CDR3 for beta chain variable domain of TCR clone 365172 (TRBV18, TRBJ1-1)
CASSPRQGENTEAFF

SEQ ID NO: 730345 - protein, 12 aa, Homo sapiens
  CDR3 for alpha chain variable domain of TCR clone 365173 (TRAV2, TRAJ31)
CAVEEGNARLMF

SEQ ID NO: 730346 - protein, 18 aa, Homo sapiens
  CDR3 for beta chain variable domain of TCR clone 365173 (TRBV7-9, TRBJ2-3)
SASSLDLAGLATPDTQYF

SEQ ID NO: 730347 - protein, 17 aa, Homo sapiens
  CDR3 for alpha chain variable domain of TCR clone 365174 (TRAV3, TRAJ42)
CAVRDRDYGGSQGNLIF

SEQ ID NO: 730348 - protein, 13 aa, Homo sapiens
  CDR3 for beta chain variable domain of TCR clone 365174 (TRBV4-1, TRBJ2-3)
CASSQPPTDTQYC

SEQ ID NO: 730349 - protein, 16 aa, Homo sapiens
  CDR3 for alpha chain variable domain of TCR clone 365175 (TRAV8-3, TRAJ8)
CAVPRDGNTGFQKLVF

SEQ ID NO: 730350 - protein, 15 aa, Homo sapiens
  CDR3 for beta chain variable domain of TCR clone 365175 (TRBV6-1, TRBJ2-6)
CASSSRPSGANVLTC

SEQ ID NO: 730351 - protein, 13 aa, Homo sapiens
  CDR3 for alpha chain variable domain of TCR clone 365176 (TRAV1-2, TRAJ20)
CAVRDGNDYKLSF

SEQ ID NO: 730352 - protein, 15 aa, Homo sapiens
  CDR3 for beta chain variable domain of TCR clone 365176 (TRBV28, TRBJ2-5)
CASSSGRTIQETQYF

SEQ ID NO: 730353 - protein, 15 aa, Homo sapiens
  CDR3 for alpha chain variable domain of TCR clone 365177 (TRAV35, TRAJ40)
CAGQLGTSGTYKYIF

SEQ ID NO: 730354 - protein, 15 aa, Homo sapiens
  CDR3 for beta chain variable domain of TCR clone 365177 (TRBV2, TRBJ2-1)
CASDIGLAGEGEQFF

SEQ ID NO: 730355 - protein, 13 aa, Homo sapiens
  CDR3 for alpha chain variable domain of TCR clone 365178 (TRAV12-2, TRAJ20)
CAVYPSNDYKLSF

SEQ ID NO: 730356 - protein, 14 aa, Homo sapiens
  CDR3 for beta chain variable domain of TCR clone 365178 (TRBV10-3, TRBJ2-1)
CAISAVSSYNEQFF

SEQ ID NO: 730357 - protein, 14 aa, Homo sapiens
  CDR3 for alpha chain variable domain of TCR clone 365179 (TRAV16, TRAJ33)
CALSAMDSNYQLIC

SEQ ID NO: 730358 - protein, 16 aa, Homo sapiens
  CDR3 for beta chain variable domain of TCR clone 365179 (TRBV7-3, TRBJ2-2)
CASSLKRGTLSGELFF

SEQ ID NO: 730359 - protein, 19 aa, Homo sapiens
  CDR3 for alpha chain variable domain of TCR clone 365180 (TRAV36/DV7, TRAJ13)
CAVEAGPFLGVTRKLPLEM

SEQ ID NO: 730360 - protein, 15 aa, Homo sapiens
  CDR3 for beta chain variable domain of TCR clone 365180 (TRBV5-1, TRBJ2-1)
CASSLVANSYNEQFF

SEQ ID NO: 730361 - protein, 15 aa, Homo sapiens
  CDR3 for alpha chain variable domain of TCR clone 365181 (TRAV21, TRAJ57)
CAVIITQGGSEKLVF

SEQ ID NO: 730362 - protein, 14 aa, Homo sapiens
  CDR3 for beta chain variable domain of TCR clone 365181 (TRBV5-1, TRBJ2-2)
CASSLTWIPGELFF

SEQ ID NO: 730363 - protein, 15 aa, Homo sapiens
  CDR3 for alpha chain variable domain of TCR clone 365182 (TRAV3, TRAJ5)
CSVRDLDTGRRALTF

SEQ ID NO: 730364 - protein, 13 aa, Homo sapiens
  CDR3 for beta chain variable domain of TCR clone 365182 (TRBV12-4, TRBJ2-7)
CASSTTETYEQYF

SEQ ID NO: 730365 - protein, 13 aa, Homo sapiens
  CDR3 for alpha chain variable domain of TCR clone 365183 (TRAV2, TRAJ11)
CAVEEIGYSTLTF

SEQ ID NO: 730366 - protein, 17 aa, Homo sapiens
  CDR3 for beta chain variable domain of TCR clone 365183 (TRBV7-2, TRBJ2-1)
CASSRGTSGAVGWGQFF

SEQ ID NO: 730367 - protein, 19 aa, Homo sapiens
  CDR3 for alpha chain variable domain of TCR clone 365184 (TRAV26-1, TRAJ42)
CVLLRRQTYYGGSQGNLIF

SEQ ID NO: 730368 - protein, 16 aa, Homo sapiens
  CDR3 for beta chain variable domain of TCR clone 365184 (TRBV7-3, TRBJ2-2)
CASSLKRATLSGELFF

SEQ ID NO: 730369 - protein, 23 aa, Homo sapiens
  CDR3 for alpha chain variable domain of TCR clone 365185 (TRAV8-3, )
CAVGASNAGNDHIQNPDPAVYQL

SEQ ID NO: 730370 - protein, 15 aa, Homo sapiens
  CDR3 for beta chain variable domain of TCR clone 365185 (TRBV11-3, TRBJ1-3)
CASSLFGPSGNTIYF

SEQ ID NO: 730371 - protein, 12 aa, Homo sapiens
  CDR3 for alpha chain variable domain of TCR clone 365186 (TRAV4, TRAJ26)
CPVGDFGQNFVF

SEQ ID NO: 730372 - protein, 16 aa, Homo sapiens
  CDR3 for beta chain variable domain of TCR clone 365186 (TRBV7-2, TRBJ1-2)
CASSSNQDRRGHGYTF

SEQ ID NO: 730373 - protein, 16 aa, Homo sapiens
  CDR3 for alpha chain variable domain of TCR clone 365187 (TRAV12-3, TRAJ53)
CAMSPGSGGSNYKLTF

SEQ ID NO: 730374 - protein, 14 aa, Homo sapiens
  CDR3 for beta chain variable domain of TCR clone 365187 (TRBV9, TRBJ2-3)
CASSVGLSTDTQYF

SEQ ID NO: 730375 - protein, 14 aa, Homo sapiens
  CDR3 for alpha chain variable domain of TCR clone 365188 (TRAV12-2, TRAJ13)
CAVKKTGGYQKVTF

SEQ ID NO: 730376 - protein, 15 aa, Homo sapiens
  CDR3 for beta chain variable domain of TCR clone 365188 (TRBV5-4, TRBJ1-4)
CASSHGDGENEKLFF

SEQ ID NO: 730377 - protein, 19 aa, Homo sapiens
  CDR3 for alpha chain variable domain of TCR clone 365189 (TRAV40, )
CLPIPDIRNPDPAVYQLRD

SEQ ID NO: 730378 - protein, 15 aa, Homo sapiens
  CDR3 for beta chain variable domain of TCR clone 365189 (TRBV2, TRBJ1-2)
CASSEIGGANYGYTF

SEQ ID NO: 730379 - protein, 14 aa, Homo sapiens
  CDR3 for alpha chain variable domain of TCR clone 365190 (TRAV1-2, TRAJ16)
CAVNRFSDGQKLLF

SEQ ID NO: 730380 - protein, 14 aa, Homo sapiens
  CDR3 for beta chain variable domain of TCR clone 365190 (TRBV25-1, TRBJ1-1)
CASTHLGGYTEAFF

SEQ ID NO: 730381 - protein, 16 aa, Homo sapiens
  CDR3 for alpha chain variable domain of TCR clone 365191 (TRAV30, TRAJ24)
CGTEIVDADSWGKSSL

SEQ ID NO: 730382 - protein, 13 aa, Homo sapiens
  CDR3 for beta chain variable domain of TCR clone 365191 (TRBV4-2, TRBJ1-1)
CASSQAGNTEAFF

SEQ ID NO: 730383 - protein, 12 aa, Homo sapiens
  CDR3 for alpha chain variable domain of TCR clone 365192 (TRAV8-6, TRAJ43)
CAVSNNNNDMRF

SEQ ID NO: 730384 - protein, 16 aa, Homo sapiens
  CDR3 for beta chain variable domain of TCR clone 365192 (TRBV27, TRBJ2-2)
CASSFRGLVRTGELFF

SEQ ID NO: 730385 - protein, 14 aa, Homo sapiens
  CDR3 for alpha chain variable domain of TCR clone 365193 (TRAV26-1, TRAJ34)
CIVRVAYNTHKLIF

SEQ ID NO: 730386 - protein, 15 aa, Homo sapiens
  CDR3 for beta chain variable domain of TCR clone 365193 (TRBV20-1, TRBJ2-7)
CSARVPAAYFYEQYF

SEQ ID NO: 730387 - protein, 15 aa, Homo sapiens
  CDR3 for alpha chain variable domain of TCR clone 365194 (TRAV38-1, TRAJ32)
CAFMRGGGATNKLIF

SEQ ID NO: 730388 - protein, 11 aa, Homo sapiens
  CDR3 for beta chain variable domain of TCR clone 365194 (TRBV11-2, TRBJ2-2)
CASSLPGELFF

SEQ ID NO: 730389 - protein, 13 aa, Homo sapiens
  CDR3 for alpha chain variable domain of TCR clone 365195 (TRAV21, TRAJ27)
CAALNTNAGKSTF

SEQ ID NO: 730390 - protein, 14 aa, Homo sapiens
  CDR3 for beta chain variable domain of TCR clone 365195 (TRBV27, TRBJ1-1)
CASSLISGLSEAFF

SEQ ID NO: 730391 - protein, 11 aa, Homo sapiens
  CDR3 for alpha chain variable domain of TCR clone 365196 (TRAV3, TRAJ21)
CAVGNFNKFYF

SEQ ID NO: 730392 - protein, 13 aa, Homo sapiens
  CDR3 for beta chain variable domain of TCR clone 365196 (TRBV5-1, TRBJ1-2)
CASSSTGVYGYTF

SEQ ID NO: 730393 - protein, 14 aa, Homo sapiens
  CDR3 for alpha chain variable domain of TCR clone 365197 (TRAV2, TRAJ29)
CAGPFQYGNTPLVF

SEQ ID NO: 730394 - protein, 11 aa, Homo sapiens
  CDR3 for beta chain variable domain of TCR clone 365197 (TRBV29-1, TRBJ2-5)
CSEDRTGTQYL

SEQ ID NO: 730395 - protein, 15 aa, Homo sapiens
  CDR3 for alpha chain variable domain of TCR clone 365198 (TRAV2, TRAJ15)
CAVEDRGQAGTALIF

SEQ ID NO: 730396 - protein, 13 aa, Homo sapiens
  CDR3 for beta chain variable domain of TCR clone 365198 (TRBV6-5, TRBJ2-7)
CASRTSGIHEQYF

SEQ ID NO: 730397 - protein, 15 aa, Homo sapiens
  CDR3 for alpha chain variable domain of TCR clone 365199 (TRAV8-1, TRAJ6)
CAVNANPGGGYITTF

SEQ ID NO: 730398 - protein, 12 aa, Homo sapiens
  CDR3 for beta chain variable domain of TCR clone 365199 (TRBV5-7, TRBJ2-7)
CASSVQGGEQYF

SEQ ID NO: 730399 - protein, 15 aa, Homo sapiens
  CDR3 for alpha chain variable domain of TCR clone 365200 (TRAV12-1, TRAJ9)
CVVSFGDTGGFKTIL

SEQ ID NO: 730400 - protein, 15 aa, Homo sapiens
  CDR3 for beta chain variable domain of TCR clone 365200 (TRBV20-1, TRBJ2-7)
CSARDRVSGMDEQYF

SEQ ID NO: 730401 - protein, 12 aa, Homo sapiens
  CDR3 for alpha chain variable domain of TCR clone 365201 (TRAV21, TRAJ3)
CCFYSSASKIIF

SEQ ID NO: 730402 - protein, 16 aa, Homo sapiens
  CDR3 for beta chain variable domain of TCR clone 365201 (TRBV19, TRBJ2-1)
SASSKAGPSSYNEQFF

SEQ ID NO: 730403 - protein, 13 aa, Homo sapiens
  CDR3 for alpha chain variable domain of TCR clone 365202 (TRAV21, TRAJ15)
CAVANQAGTALIF

SEQ ID NO: 730404 - protein, 17 aa, Homo sapiens
  CDR3 for beta chain variable domain of TCR clone 365202 (TRBV3-1, TRBJ2-5)
CASSNWGGTSGQETQYF

SEQ ID NO: 730405 - protein, 15 aa, Homo sapiens
  CDR3 for alpha chain variable domain of TCR clone 365203 (TRAV29/DV5, TRAJ29)
CAASAFNSGNTPLVF

SEQ ID NO: 730406 - protein, 13 aa, Homo sapiens
  CDR3 for beta chain variable domain of TCR clone 365203 (TRBV12-5, TRBJ2-3)
CASGDRQSDTQYF

SEQ ID NO: 730407 - protein, 16 aa, Homo sapiens
  CDR3 for alpha chain variable domain of TCR clone 365204 (TRAV1-2, TRAJ10)
CAVRGVLTGGGNKLTF

SEQ ID NO: 730408 - protein, 16 aa, Homo sapiens
  CDR3 for beta chain variable domain of TCR clone 365204 (TRBV6-1, TRBJ1-2)
CASSGAWQGRSHGYTF

SEQ ID NO: 730409 - protein, 14 aa, Homo sapiens
  CDR3 for alpha chain variable domain of TCR clone 365205 (TRAV2, TRAJ23)
CAVGLRNQGGKLIF

SEQ ID NO: 730410 - protein, 12 aa, Homo sapiens
  CDR3 for beta chain variable domain of TCR clone 365205 (TRBV28, TRBJ2-3)
CASSLYRDTQYF

SEQ ID NO: 730411 - protein, 14 aa, Homo sapiens
  CDR3 for alpha chain variable domain of TCR clone 365206 (TRAV13-1, TRAJ44)
CAAKATGTASKLTF

SEQ ID NO: 730412 - protein, 15 aa, Homo sapiens
  CDR3 for beta chain variable domain of TCR clone 365206 (TRBV4-3, TRBJ1-1)
CASSLELGRGTEAFF

SEQ ID NO: 730413 - protein, 13 aa, Homo sapiens
  CDR3 for alpha chain variable domain of TCR clone 365207 (TRAV17, TRAJ9)
CATDYTGGFKTIF

SEQ ID NO: 730414 - protein, 14 aa, Homo sapiens
  CDR3 for beta chain variable domain of TCR clone 365207 (TRBV19, TRBJ2-5)
CASSMTGQQETQYY

SEQ ID NO: 730415 - protein, 14 aa, Homo sapiens
  CDR3 for alpha chain variable domain of TCR clone 365208 (TRAV23/DV6, TRAJ22)
CAASASGSARQLTF

SEQ ID NO: 730416 - protein, 13 aa, Homo sapiens
  CDR3 for beta chain variable domain of TCR clone 365208 (TRBV11-2, TRBJ2-5)
CASSRGPSETQYF

SEQ ID NO: 730417 - protein, 15 aa, Homo sapiens
  CDR3 for alpha chain variable domain of TCR clone 365209 (TRAV4, TRAJ17)
CLVGDIGAAGNKLTF

SEQ ID NO: 730418 - protein, 14 aa, Homo sapiens
  CDR3 for beta chain variable domain of TCR clone 365209 (TRBV6-3, TRBJ2-7)
CASSYSVRAYEQYF

SEQ ID NO: 730419 - protein, 13 aa, Homo sapiens
  CDR3 for alpha chain variable domain of TCR clone 365210 (TRAV17, TRAJ7)
CATDNYGNNRLAF

SEQ ID NO: 730420 - protein, 16 aa, Homo sapiens
  CDR3 for beta chain variable domain of TCR clone 365210 (TRBV4-1, TRBJ2-5)
CASSQAIAASSTTQYF

SEQ ID NO: 730421 - protein, 13 aa, Homo sapiens
  CDR3 for alpha chain variable domain of TCR clone 365211 (TRAV12-3, TRAJ13)
CAMGTGGYQKVTF

SEQ ID NO: 730422 - protein, 13 aa, Homo sapiens
  CDR3 for beta chain variable domain of TCR clone 365211 (TRBV27, TRBJ1-1)
CASSLSIGAEAFF

SEQ ID NO: 730423 - protein, 20 aa, Homo sapiens
  CDR3 for alpha chain variable domain of TCR clone 365212 (TRAV8-3, TRAJ44)
LSTSVLWVRLYTGTASKLTF

SEQ ID NO: 730424 - protein, 12 aa, Homo sapiens
  CDR3 for beta chain variable domain of TCR clone 365212 (TRBV2, TRBJ2-3)
CASSGRFDTQYF

SEQ ID NO: 730425 - protein, 14 aa, Homo sapiens
  CDR3 for alpha chain variable domain of TCR clone 365213 (TRAV13-1, TRAJ23)
CAASRLGRGGKLIF

SEQ ID NO: 730426 - protein, 16 aa, Homo sapiens
  CDR3 for beta chain variable domain of TCR clone 365213 (TRBV20-1, TRBJ1-4)
CSAPGQGLLTNEKLFF

SEQ ID NO: 730427 - protein, 15 aa, Homo sapiens
  CDR3 for alpha chain variable domain of TCR clone 365214 (TRAV26-1, TRAJ17)
GIVRVVKAAGNKLTF

SEQ ID NO: 730428 - protein, 16 aa, Homo sapiens
  CDR3 for beta chain variable domain of TCR clone 365214 (TRBV7-9, TRBJ2-1)
CASSLVSGPSYNEQFF

SEQ ID NO: 730429 - protein, 15 aa, Homo sapiens
  CDR3 for alpha chain variable domain of TCR clone 365215 (TRAV35, TRAJ34)
CAGTSIVRNTDKLIF

SEQ ID NO: 730430 - protein, 15 aa, Homo sapiens
  CDR3 for beta chain variable domain of TCR clone 365215 (TRBV9, TRBJ1-6)
CASSVAGTGDSPLHF

SEQ ID NO: 730431 - protein, 16 aa, Homo sapiens
  CDR3 for alpha chain variable domain of TCR clone 365216 (TRAV30, TRAJ24)
CGTEIVDADSWGKFQF

SEQ ID NO: 730432 - protein, 12 aa, Homo sapiens
  CDR3 for beta chain variable domain of TCR clone 365216 (TRBV7-8, TRBJ2-7)
CASSLGDRGQYF

SEQ ID NO: 730433 - protein, 17 aa, Homo sapiens
  CDR3 for alpha chain variable domain of TCR clone 365217 (TRAV3, TRAJ6)
CAVRDGPRAGGSYIPTF

SEQ ID NO: 730434 - protein, 14 aa, Homo sapiens
  CDR3 for beta chain variable domain of TCR clone 365217 (TRBV19, TRBJ2-3)
CASSIRQGADTQYF

SEQ ID NO: 730435 - protein, 16 aa, Homo sapiens
  CDR3 for alpha chain variable domain of TCR clone 365218 (TRAV1-2, TRAJ35)
CAVRVLTIGFGNVLHC

SEQ ID NO: 730436 - protein, 13 aa, Homo sapiens
  CDR3 for beta chain variable domain of TCR clone 365218 (TRBV6-6, TRBJ2-1)
CASSLHQGDEQFF

SEQ ID NO: 730437 - protein, 13 aa, Homo sapiens
  CDR3 for alpha chain variable domain of TCR clone 365219 (TRAV12-3, TRAJ13)
CAMTFGGYQKVTF

SEQ ID NO: 730438 - protein, 13 aa, Homo sapiens
  CDR3 for beta chain variable domain of TCR clone 365219 (TRBV20-1, TRBJ2-2)
CSALSGGAGELFF

SEQ ID NO: 730439 - protein, 12 aa, Homo sapiens
  CDR3 for alpha chain variable domain of TCR clone 365220 (TRAV13-1, TRAJ49)
CAASPMGNQFYF

SEQ ID NO: 730440 - protein, 12 aa, Homo sapiens
  CDR3 for beta chain variable domain of TCR clone 365220 (TRBV5-5, TRBJ2-5)
CASSYFGETQYF

SEQ ID NO: 730441 - protein, 13 aa, Homo sapiens
  CDR3 for alpha chain variable domain of TCR clone 365221 (TRAV12-2, TRAJ9)
CAVKWAGGFTTIF

SEQ ID NO: 730442 - protein, 15 aa, Homo sapiens
  CDR3 for beta chain variable domain of TCR clone 365221 (TRBV5-1, TRBJ1-4)
CASSLTADSDEKLFF

SEQ ID NO: 730443 - protein, 16 aa, Homo sapiens
  CDR3 for alpha chain variable domain of TCR clone 365222 (TRAV14/DV4, TRAJ54)
CAMREGRIQGAQKLVF

SEQ ID NO: 730444 - protein, 16 aa, Homo sapiens
  CDR3 for beta chain variable domain of TCR clone 365222 (TRBV12-4, TRBJ1-5)
CASRQPVEGSNQPQHF

SEQ ID NO: 730445 - protein, 13 aa, Homo sapiens
  CDR3 for alpha chain variable domain of TCR clone 365223 (TRAV2, TRAJ24)
CAVSTDSWGKLQF

SEQ ID NO: 730446 - protein, 14 aa, Homo sapiens
  CDR3 for beta chain variable domain of TCR clone 365223 (TRBV13, TRBJ2-5)
CASSWGTAQETQYF

SEQ ID NO: 730447 - protein, 12 aa, Homo sapiens
  CDR3 for alpha chain variable domain of TCR clone 365224 (TRAV17, TRAJ39)
CATGAAGNMLTF

SEQ ID NO: 730448 - protein, 17 aa, Homo sapiens
  CDR3 for beta chain variable domain of TCR clone 365224 (TRBV5-4, TRBJ2-1)
CASSSAGGRGPYNEQFF

SEQ ID NO: 730449 - protein, 15 aa, Homo sapiens
  CDR3 for alpha chain variable domain of TCR clone 365225 (TRAV4, TRAJ36)
CLVGDRQTGANNLFF

SEQ ID NO: 730450 - protein, 19 aa, Homo sapiens
  CDR3 for beta chain variable domain of TCR clone 365225 (TRBV25-1, TRBJ2-2)
CAILVYRVDRGRKTGELFF

SEQ ID NO: 730451 - protein, 15 aa, Homo sapiens
  CDR3 for alpha chain variable domain of TCR clone 365226 (TRAV8-6, TRAJ11)
CAVNFMNSGYSTLTF

SEQ ID NO: 730452 - protein, 15 aa, Homo sapiens
  CDR3 for beta chain variable domain of TCR clone 365226 (TRBV29-1, TRBJ2-7)
CSVEFFDRGSYEQYF

SEQ ID NO: 730453 - protein, 17 aa, Homo sapiens
  CDR3 for alpha chain variable domain of TCR clone 365227 (TRAV3, TRAJ6)
CAVRDGPRAGGSYITTF

SEQ ID NO: 730454 - protein, 13 aa, Homo sapiens
  CDR3 for beta chain variable domain of TCR clone 365227 (TRBV4-1, TRBJ2-2)
CASSQENTGELFF

SEQ ID NO: 730455 - protein, 13 aa, Homo sapiens
  CDR3 for alpha chain variable domain of TCR clone 365228 (TRAV29/DV5, TRAJ54)
FAAHLQGAQKLVF

SEQ ID NO: 730456 - protein, 16 aa, Homo sapiens
  CDR3 for beta chain variable domain of TCR clone 365228 (TRBV7-2, TRBJ2-7)
CASSFPLAGGPLEQYF

SEQ ID NO: 730457 - protein, 15 aa, Homo sapiens
  CDR3 for alpha chain variable domain of TCR clone 365229 (TRAV13-1, TRAJ45)
CAAPYSGGGADGLTF

SEQ ID NO: 730458 - protein, 13 aa, Homo sapiens
  CDR3 for beta chain variable domain of TCR clone 365229 (TRBV28, TRBJ2-7)
CASRFGQVYEQYF

SEQ ID NO: 730459 - protein, 12 aa, Homo sapiens
  CDR3 for alpha chain variable domain of TCR clone 365230 (TRAV16, TRAJ49)
CALNEGGNQFYF

SEQ ID NO: 730460 - protein, 18 aa, Homo sapiens
  CDR3 for beta chain variable domain of TCR clone 365230 (TRBV12-4, TRBJ2-4)
CASSRTGAVDVAKNIQYF

SEQ ID NO: 730461 - protein, 14 aa, Homo sapiens
  CDR3 for alpha chain variable domain of TCR clone 365231 (TRAV1-2, TRAJ16)
CAVNRFSDGQKLLF

SEQ ID NO: 730462 - protein, 16 aa, Homo sapiens
  CDR3 for beta chain variable domain of TCR clone 365231 (TRBV19, TRBJ2-2)
CVSRSPGTGATGELFF

SEQ ID NO: 730463 - protein, 13 aa, Homo sapiens
  CDR3 for alpha chain variable domain of TCR clone 365232 (TRAV21, TRAJ15)
CAVANQAGTALLF

SEQ ID NO: 730464 - protein, 15 aa, Homo sapiens
  CDR3 for beta chain variable domain of TCR clone 365232 (TRBV20-1, TRBJ2-7)
CSARDRVSGMDEQYF

SEQ ID NO: 730465 - protein, 12 aa, Homo sapiens
  CDR3 for alpha chain variable domain of TCR clone 365233 (TRAV12-3, TRAJ17)
CAMTLTGNKLNF

SEQ ID NO: 730466 - protein, 15 aa, Homo sapiens
  CDR3 for beta chain variable domain of TCR clone 365233 (TRBV20-1, TRBJ2-7)
CSARDRVSGMDGQYF

SEQ ID NO: 730467 - protein, 13 aa, Homo sapiens
  CDR3 for alpha chain variable domain of TCR clone 365234 (TRAV2, TRAJ40)
CAVVTSGTYKYIF

SEQ ID NO: 730468 - protein, 16 aa, Homo sapiens
  CDR3 for beta chain variable domain of TCR clone 365234 (TRBV5-1, TRBJ2-5)
CASSLALLRAGETQYF

SEQ ID NO: 730469 - protein, 15 aa, Homo sapiens
  CDR3 for alpha chain variable domain of TCR clone 365235 (TRAV21, TRAJ53)
CAVRQSGGSNYKLTF

SEQ ID NO: 730470 - protein, 16 aa, Homo sapiens
  CDR3 for beta chain variable domain of TCR clone 365235 (TRBV5-4, TRBJ2-3)
CASQQPGAGGADTQYF

SEQ ID NO: 730471 - protein, 14 aa, Homo sapiens
  CDR3 for alpha chain variable domain of TCR clone 365236 (TRAV26-1, TRAJ45)
CIEVTGGGADGLTF

SEQ ID NO: 730472 - protein, 14 aa, Homo sapiens
  CDR3 for beta chain variable domain of TCR clone 365236 (TRBV27, TRBJ2-2)
CASRPGVNTGELFF

SEQ ID NO: 730473 - protein, 14 aa, Homo sapiens
  CDR3 for alpha chain variable domain of TCR clone 365237 (TRAV12-2, TRAJ5)
CAVNRSTGRRALTF

SEQ ID NO: 730474 - protein, 11 aa, Homo sapiens
  CDR3 for beta chain variable domain of TCR clone 365237 (TRBV19, TRBJ1-1)
CASSIGSEAFF

SEQ ID NO: 730475 - protein, 13 aa, Homo sapiens
  CDR3 for alpha chain variable domain of TCR clone 365238 (TRAV8-3, TRAJ31)
CAVGARNNDRLMF

SEQ ID NO: 730476 - protein, 14 aa, Homo sapiens
  CDR3 for beta chain variable domain of TCR clone 365238 (TRBV12-5, TRBJ2-5)
CASGSRTHQETQYF

SEQ ID NO: 730477 - protein, 14 aa, Homo sapiens
  CDR3 for alpha chain variable domain of TCR clone 365239 (TRAV8-4, TRAJ9)
CAVRINTGGFKTIF

SEQ ID NO: 730478 - protein, 15 aa, Homo sapiens
  CDR3 for beta chain variable domain of TCR clone 365239 (TRBV20-1, TRBJ2-7)
CSARDRVSMMDEQYF

SEQ ID NO: 730479 - protein, 15 aa, Homo sapiens
  CDR3 for alpha chain variable domain of TCR clone 365240 (TRAV8-1, TRAJ42)
CAVTNYGGSQGNLIF

SEQ ID NO: 730480 - protein, 14 aa, Homo sapiens
  CDR3 for beta chain variable domain of TCR clone 365240 (TRBV2, TRBJ2-7)
CASSLTSGGYEQYF

SEQ ID NO: 730481 - protein, 13 aa, Homo sapiens
  CDR3 for alpha chain variable domain of TCR clone 365241 (TRAV20, TRAJ40)
CAVPFSGTYKYIF

SEQ ID NO: 730482 - protein, 13 aa, Homo sapiens
  CDR3 for beta chain variable domain of TCR clone 365241 (TRBV7-3, TRBJ2-1)
CASSLDSYNEQFF

SEQ ID NO: 730483 - protein, 14 aa, Homo sapiens
  CDR3 for alpha chain variable domain of TCR clone 365242 (TRAV20, TRAJ42)
CAVQAGGSQGNPIF

SEQ ID NO: 730484 - protein, 16 aa, Homo sapiens
  CDR3 for beta chain variable domain of TCR clone 365242 (TRBV15, TRBJ1-2)
CATSRGPRTGGGGYTF

SEQ ID NO: 730485 - protein, 10 aa, Homo sapiens
  CDR3 for alpha chain variable domain of TCR clone 365243 (TRAV30, TRAJ48)
CGIGNEKVTF

SEQ ID NO: 730486 - protein, 15 aa, Homo sapiens
  CDR3 for beta chain variable domain of TCR clone 365243 (TRBV28, TRBJ2-1)
CASRKTGTAYNEQFF

SEQ ID NO: 730487 - protein, 14 aa, Homo sapiens
  CDR3 for alpha chain variable domain of TCR clone 365244 (TRAV12-3, TRAJ29)
CAMSPYSGNTPLVF

SEQ ID NO: 730488 - protein, 15 aa, Homo sapiens
  CDR3 for beta chain variable domain of TCR clone 365244 (TRBV27, TRBJ2-1)
CASSNRGGSSNEQFF

SEQ ID NO: 730489 - protein, 17 aa, Homo sapiens
  CDR3 for alpha chain variable domain of TCR clone 365245 (TRAV29/DV5, TRAJ52)
CAASARAGGTSYGKLTF

SEQ ID NO: 730490 - protein, 13 aa, Homo sapiens
  CDR3 for beta chain variable domain of TCR clone 365245 (TRBV19, TRBJ1-5)
CASSMRGYQPQHF

SEQ ID NO: 730491 - protein, 13 aa, Homo sapiens
  CDR3 for alpha chain variable domain of TCR clone 365246 (TRAV8-1, TRAJ34)
CAVGPYNTDKLIF

SEQ ID NO: 730492 - protein, 15 aa, Homo sapiens
  CDR3 for beta chain variable domain of TCR clone 365246 (TRBV7-9, TRBJ1-3)
CASSLRSGSGNTIYF

SEQ ID NO: 730493 - protein, 13 aa, Homo sapiens
  CDR3 for alpha chain variable domain of TCR clone 365247 (TRAV27, TRAJ53)
CAGQGGSNYKLTF

SEQ ID NO: 730494 - protein, 13 aa, Homo sapiens
  CDR3 for beta chain variable domain of TCR clone 365247 (TRBV29-1, TRBJ1-1)
CSVEWGFGTEAFF

SEQ ID NO: 730495 - protein, 12 aa, Homo sapiens
  CDR3 for alpha chain variable domain of TCR clone 365248 (TRAV8-3, TRAJ26)
CAGDNYGQNFVF

SEQ ID NO: 730496 - protein, 14 aa, Homo sapiens
  CDR3 for beta chain variable domain of TCR clone 365248 (TRBV11-2, TRBJ2-3)
CASSRLDRTDTQYF

SEQ ID NO: 730497 - protein, 17 aa, Homo sapiens
  CDR3 for alpha chain variable domain of TCR clone 365249 (TRAV26-2, TRAJ42)
CILRDVGDGGSQGNLIF

SEQ ID NO: 730498 - protein, 16 aa, Homo sapiens
  CDR3 for beta chain variable domain of TCR clone 365249 (TRBV12-4, TRBJ2-7)
CASSLIGGTGTHEQYF

SEQ ID NO: 730499 - protein, 13 aa, Homo sapiens
  CDR3 for alpha chain variable domain of TCR clone 365250 (TRAV12-3, TRAJ13)
CAMSSGGYQKVTF

SEQ ID NO: 730500 - protein, 14 aa, Homo sapiens
  CDR3 for beta chain variable domain of TCR clone 365250 (TRBV19, TRBJ2-7)
CASSMGQGAIEQYF

SEQ ID NO: 730501 - protein, 16 aa, Homo sapiens
  CDR3 for alpha chain variable domain of TCR clone 365251 (TRAV12-3, TRAJ53)
CAMSPGSGGSNYKLTF

SEQ ID NO: 730502 - protein, 16 aa, Homo sapiens
  CDR3 for beta chain variable domain of TCR clone 365251 (TRBV4-2, TRBJ1-1)
CASRPLDGGGNTEAFF

SEQ ID NO: 730503 - protein, 12 aa, Homo sapiens
  CDR3 for alpha chain variable domain of TCR clone 365252 (TRAV26-1, TRAJ13)
CIVSRGYQKVTF

SEQ ID NO: 730504 - protein, 16 aa, Homo sapiens
  CDR3 for beta chain variable domain of TCR clone 365252 (TRBV28, TRBJ1-4)
CASSPPYRGRSEKLFF

SEQ ID NO: 730505 - protein, 17 aa, Homo sapiens
  CDR3 for alpha chain variable domain of TCR clone 365253 (TRAV35, TRAJ38)
CAGQLQRNAGNNRKLIW

SEQ ID NO: 730506 - protein, 15 aa, Homo sapiens
  CDR3 for beta chain variable domain of TCR clone 365253 (TRBV7-9, TRBJ2-1)
CASSLGLAGGTEQFF

SEQ ID NO: 730507 - protein, 16 aa, Homo sapiens
  CDR3 for alpha chain variable domain of TCR clone 365254 (TRAV21, TRAJ17)
CAVRPGEEAAGNKLTF

SEQ ID NO: 730508 - protein, 16 aa, Homo sapiens
  CDR3 for beta chain variable domain of TCR clone 365254 (TRBV2, TRBJ2-7)
YASSEPWTGPSYEQYF

SEQ ID NO: 730509 - protein, 23 aa, Homo sapiens
  CDR3 for alpha chain variable domain of TCR clone 365255 (TRAV26-1, )
CIADNAGNNHIQNPDPAVHQLRD

SEQ ID NO: 730510 - protein, 13 aa, Homo sapiens
  CDR3 for beta chain variable domain of TCR clone 365255 (TRBV20-1, TRBJ1-1)
CSARGGGNTEAFF

SEQ ID NO: 730511 - protein, 15 aa, Homo sapiens
  CDR3 for alpha chain variable domain of TCR clone 365256 (TRAV3, TRAJ22)
CAVRDRGGSARQLTF

SEQ ID NO: 730512 - protein, 12 aa, Homo sapiens
  CDR3 for beta chain variable domain of TCR clone 365256 (TRBV9, TRBJ2-3)
CASSLRAGTQYF

SEQ ID NO: 730513 - protein, 14 aa, Homo sapiens
  CDR3 for alpha chain variable domain of TCR clone 365257 (TRAV2, TRAJ9)
CAVEDRSGGFKTIF

SEQ ID NO: 730514 - protein, 15 aa, Homo sapiens
  CDR3 for beta chain variable domain of TCR clone 365257 (TRBV5-7, TRBJ1-5)
CASSYGKLRDQPQHF

SEQ ID NO: 730515 - protein, 11 aa, Homo sapiens
  CDR3 for alpha chain variable domain of TCR clone 365258 (TRAV2, TRAJ13)
CASGGYQKVTF

SEQ ID NO: 730516 - protein, 14 aa, Homo sapiens
  CDR3 for beta chain variable domain of TCR clone 365258 (TRBV12-4, TRBJ1-1)
CASSLGTGGTEAVF

SEQ ID NO: 730517 - protein, 13 aa, Homo sapiens
  CDR3 for alpha chain variable domain of TCR clone 365259 (TRAV12-1, TRAJ20)
CVVNRETDYKLSF

SEQ ID NO: 730518 - protein, 15 aa, Homo sapiens
  CDR3 for beta chain variable domain of TCR clone 365259 (TRBV7-2, TRBJ2-3)
CASSSTGLETDTQYF

SEQ ID NO: 730519 - protein, 13 aa, Homo sapiens
  CDR3 for alpha chain variable domain of TCR clone 365260 (TRAV13-1, TRAJ21)
CAASIYNFNKFYF

SEQ ID NO: 730520 - protein, 16 aa, Homo sapiens
  CDR3 for beta chain variable domain of TCR clone 365260 (TRBV5-1, TRBJ2-3)
CASSVGLAVYTDTQYF

SEQ ID NO: 730521 - protein, 17 aa, Homo sapiens
  CDR3 for alpha chain variable domain of TCR clone 365261 (TRAV12-2, TRAJ52)
CAVNPYAGGTSYGKLTC

SEQ ID NO: 730522 - protein, 16 aa, Homo sapiens
  CDR3 for beta chain variable domain of TCR clone 365261 (TRBV5-5, TRBJ2-2)
CASSGRREGATGELFF

SEQ ID NO: 730523 - protein, 15 aa, Homo sapiens
  CDR3 for alpha chain variable domain of TCR clone 365262 (TRAV3, TRAJ5)
CAVRDLDTGRRALTF

SEQ ID NO: 730524 - protein, 16 aa, Homo sapiens
  CDR3 for beta chain variable domain of TCR clone 365262 (TRBV20-1, TRBJ1-2)
CSASMGQGVANYGYTV

SEQ ID NO: 730525 - protein, 12 aa, Homo sapiens
  CDR3 for alpha chain variable domain of TCR clone 365263 (TRAV12-3, TRAJ17)
CAMTLTGNKLTV

SEQ ID NO: 730526 - protein, 12 aa, Homo sapiens
  CDR3 for beta chain variable domain of TCR clone 365263 (TRBV2, TRBJ2-1)
CAYGPPGNEQFF

SEQ ID NO: 730527 - protein, 15 aa, Homo sapiens
  CDR3 for alpha chain variable domain of TCR clone 365264 (TRAV26-1, TRAJ53)
CIVRVEGGSDYKLTF

SEQ ID NO: 730528 - protein, 14 aa, Homo sapiens
  CDR3 for beta chain variable domain of TCR clone 365264 (TRBV4-3, TRBJ2-1)
CASSQDRWRGEQFF

SEQ ID NO: 730529 - protein, 13 aa, Homo sapiens
  CDR3 for alpha chain variable domain of TCR clone 365265 (TRAV30, TRAJ24)
CGTVTDSWGKLQF

SEQ ID NO: 730530 - protein, 17 aa, Homo sapiens
  CDR3 for beta chain variable domain of TCR clone 365265 (TRBV28, TRBJ1-1)
CASSLSGTGYENTEAFF

SEQ ID NO: 730531 - protein, 17 aa, Homo sapiens
  CDR3 for alpha chain variable domain of TCR clone 365266 (TRAV4, TRAJ13)
CLVGVQGSSGGYPKVTF

SEQ ID NO: 730532 - protein, 13 aa, Homo sapiens
  CDR3 for beta chain variable domain of TCR clone 365266 (TRBV10-3, TRBJ2-7)
CASKLAVNYEQYF

SEQ ID NO: 730533 - protein, 15 aa, Homo sapiens
  CDR3 for alpha chain variable domain of TCR clone 365267 (TRAV12-3, TRAJ6)
CAMSATTGGNYIPTF

SEQ ID NO: 730534 - protein, 16 aa, Homo sapiens
  CDR3 for beta chain variable domain of TCR clone 365267 (TRBV20-1, TRBJ1-2)
CSASMGQGVANYGYTF

SEQ ID NO: 730535 - protein, 12 aa, Homo sapiens
  CDR3 for alpha chain variable domain of TCR clone 365268 (TRAV1-1, TRAJ23)
CAVTNQGGKLIF

SEQ ID NO: 730536 - protein, 20 aa, Homo sapiens
  CDR3 for beta chain variable domain of TCR clone 365268 (TRBV7-8, TRBJ2-2)
CASSHLFRGPTIHITGELFF

SEQ ID NO: 730537 - protein, 15 aa, Homo sapiens
  CDR3 for alpha chain variable domain of TCR clone 365269 (TRAV12-1, TRAJ44)
CVADLPTGTASKLTF

SEQ ID NO: 730538 - protein, 13 aa, Homo sapiens
  CDR3 for beta chain variable domain of TCR clone 365269 (TRBV6-5, TRBJ2-5)
CASSPQGGESQYF

SEQ ID NO: 730539 - protein, 15 aa, Homo sapiens
  CDR3 for alpha chain variable domain of TCR clone 365270 (TRAV3, TRAJ9)
CAVRDSNTGGFKTIF

SEQ ID NO: 730540 - protein, 14 aa, Homo sapiens
  CDR3 for beta chain variable domain of TCR clone 365270 (TRBV7-8, TRBJ2-3)
CASSSRDSTDTQYF

SEQ ID NO: 730541 - protein, 13 aa, Homo sapiens
  CDR3 for alpha chain variable domain of TCR clone 365271 (TRAV12-3, TRAJ5)
CAMRPTGRRALTF

SEQ ID NO: 730542 - protein, 15 aa, Homo sapiens
  CDR3 for beta chain variable domain of TCR clone 365271 (TRBV2, TRBJ2-1)
CASSELAGSYNEQFF

SEQ ID NO: 730543 - protein, 12 aa, Homo sapiens
  CDR3 for alpha chain variable domain of TCR clone 365272 (TRAV2, TRAJ9)
CAVGAGGFKTIF

SEQ ID NO: 730544 - protein, 13 aa, Homo sapiens
  CDR3 for beta chain variable domain of TCR clone 365272 (TRBV15, TRBJ2-7)
CATSTTGHYEQYF

SEQ ID NO: 730545 - protein, 14 aa, Homo sapiens
  CDR3 for alpha chain variable domain of TCR clone 365273 (TRAV1-2, TRAJ8)
CAVREDTGFQKIVF

SEQ ID NO: 730546 - protein, 14 aa, Homo sapiens
  CDR3 for beta chain variable domain of TCR clone 365273 (TRBV6-1, TRBJ2-5)
CASSPRTAQGTQYF

SEQ ID NO: 730547 - protein, 14 aa, Homo sapiens
  CDR3 for alpha chain variable domain of TCR clone 365274 (TRAV1-2, TRAJ8)
CAVREDTGFQKLVF

SEQ ID NO: 730548 - protein, 14 aa, Homo sapiens
  CDR3 for beta chain variable domain of TCR clone 365274 (TRBV5-1, TRBJ2-3)
CASSLEASANTQYF

SEQ ID NO: 730549 - protein, 13 aa, Homo sapiens
  CDR3 for alpha chain variable domain of TCR clone 365275 (TRAV8-3, TRAJ28)
CAVGAVGSYQLTF

SEQ ID NO: 730550 - protein, 12 aa, Homo sapiens
  CDR3 for beta chain variable domain of TCR clone 365275 (TRBV2, TRBJ2-1)
CSYGPPGNEQFF

SEQ ID NO: 730551 - protein, 13 aa, Homo sapiens
  CDR3 for alpha chain variable domain of TCR clone 365276 (TRAV12-1, TRAJ31)
CVVNDNNNARLMF

SEQ ID NO: 730552 - protein, 14 aa, Homo sapiens
  CDR3 for beta chain variable domain of TCR clone 365276 (TRBV7-2, TRBJ2-1)
CASSFGASYGEQFF

SEQ ID NO: 730553 - protein, 15 aa, Homo sapiens
  CDR3 for alpha chain variable domain of TCR clone 365277 (TRAV23/DV6, TRAJ18)
FAARYRGSTLGRLSF

SEQ ID NO: 730554 - protein, 13 aa, Homo sapiens
  CDR3 for beta chain variable domain of TCR clone 365277 (TRBV7-2, TRBJ2-7)
CASSSPSGSEQYF

SEQ ID NO: 730555 - protein, 14 aa, Homo sapiens
  CDR3 for alpha chain variable domain of TCR clone 365278 (TRAV26-1, TRAJ34)
CIVRVAYNTDKLIF

SEQ ID NO: 730556 - protein, 15 aa, Homo sapiens
  CDR3 for beta chain variable domain of TCR clone 365278 (TRBV7-9, TRBJ1-4)
CASSREGGFNEKLFF

SEQ ID NO: 730557 - protein, 18 aa, Homo sapiens
  CDR3 for alpha chain variable domain of TCR clone 365279 (TRAV13-1, TRAJ52)
CAASKRSAGGTSYGKLTF

SEQ ID NO: 730558 - protein, 15 aa, Homo sapiens
  CDR3 for beta chain variable domain of TCR clone 365279 (TRBV20-1, TRBJ2-7)
CSARTPGTITYEQYC

SEQ ID NO: 730559 - protein, 16 aa, Homo sapiens
  CDR3 for alpha chain variable domain of TCR clone 365280 (TRAV17, TRAJ4)
CATAAHSSGGYNKLIF

SEQ ID NO: 730560 - protein, 14 aa, Homo sapiens
  CDR3 for beta chain variable domain of TCR clone 365280 (TRBV6-1, TRBJ1-3)
CAGVQGGGGNTIYF

SEQ ID NO: 730561 - protein, 17 aa, Homo sapiens
  CDR3 for alpha chain variable domain of TCR clone 365281 (TRAV3, TRAJ42)
CAVRDRDYGGSQGNLIF

SEQ ID NO: 730562 - protein, 14 aa, Homo sapiens
  CDR3 for beta chain variable domain of TCR clone 365281 (TRBV5-1, TRBJ1-1)
CASSLTRRSTEAFF

SEQ ID NO: 730563 - protein, 16 aa, Homo sapiens
  CDR3 for alpha chain variable domain of TCR clone 365282 (TRAV17, TRAJ17)
CATALQEEAAGNKLTC

SEQ ID NO: 730564 - protein, 12 aa, Homo sapiens
  CDR3 for beta chain variable domain of TCR clone 365282 (TRBV4-2, TRBJ2-5)
CASGGAQETQYF

SEQ ID NO: 730565 - protein, 18 aa, Homo sapiens
  CDR3 for alpha chain variable domain of TCR clone 365283 (TRAV12-3, TRAJ52)
CAMSVGGAGGTSYGKLTF

SEQ ID NO: 730566 - protein, 12 aa, Homo sapiens
  CDR3 for beta chain variable domain of TCR clone 365283 (TRBV7-2, TRBJ1-6)
CASSLSSSPLHF

SEQ ID NO: 730567 - protein, 14 aa, Homo sapiens
  CDR3 for alpha chain variable domain of TCR clone 365284 (TRAV3, TRAJ6)
CAVRDWGGSYIPTF

SEQ ID NO: 730568 - protein, 17 aa, Homo sapiens
  CDR3 for beta chain variable domain of TCR clone 365284 (TRBV6-5, TRBJ2-1)
CASRLSERFESYNEQFF

SEQ ID NO: 730569 - protein, 14 aa, Homo sapiens
  CDR3 for alpha chain variable domain of TCR clone 365285 (TRAV13-2, TRAJ11)
CAETGHSGYSTLTF

SEQ ID NO: 730570 - protein, 16 aa, Homo sapiens
  CDR3 for beta chain variable domain of TCR clone 365285 (TRBV10-3, TRBJ2-1)
CAISGVGDGGGGEQFF

SEQ ID NO: 730571 - protein, 12 aa, Homo sapiens
  CDR3 for alpha chain variable domain of TCR clone 365286 (TRAV12-3, TRAJ42)
CAPGGSQGNLIF

SEQ ID NO: 730572 - protein, 13 aa, Homo sapiens
  CDR3 for beta chain variable domain of TCR clone 365286 (TRBV5-6, TRBJ2-6)
RASTSSGANVLTF

SEQ ID NO: 730573 - protein, 18 aa, Homo sapiens
  CDR3 for alpha chain variable domain of TCR clone 365287 (TRAV21, TRAJ52)
CAVRPSPAGGTSYGKLTF

SEQ ID NO: 730574 - protein, 17 aa, Homo sapiens
  CDR3 for beta chain variable domain of TCR clone 365287 (TRBV25-1, TRBJ2-1)
CASSAYGQVRGVYEHFF

SEQ ID NO: 730575 - protein, 14 aa, Homo sapiens
  CDR3 for alpha chain variable domain of TCR clone 365288 (TRAV13-1, TRAJ5)
CAASGGTGRRALTF

SEQ ID NO: 730576 - protein, 16 aa, Homo sapiens
  CDR3 for beta chain variable domain of TCR clone 365288 (TRBV19, TRBJ2-1)
CASSKAGPSSYNEQFF

SEQ ID NO: 730577 - protein, 15 aa, Homo sapiens
  CDR3 for alpha chain variable domain of TCR clone 365289 (TRAV3, TRAJ22)
CAVRDRGGSARQLTF

SEQ ID NO: 730578 - protein, 16 aa, Homo sapiens
  CDR3 for beta chain variable domain of TCR clone 365289 (TRBV5-4, TRBJ2-3)
CASQQPGAGGSDTQHC

SEQ ID NO: 730579 - protein, 12 aa, Homo sapiens
  CDR3 for alpha chain variable domain of TCR clone 365290 (TRAV12-3, TRAJ17)
CAMTLTGKKLTF

SEQ ID NO: 730580 - protein, 20 aa, Homo sapiens
  CDR3 for beta chain variable domain of TCR clone 365290 (TRBV7-8, TRBJ2-2)
CASSHLFPGPTIHITGELFF

SEQ ID NO: 730581 - protein, 11 aa, Homo sapiens
  CDR3 for alpha chain variable domain of TCR clone 365291 (TRAV21, TRAJ34)
CAVTNTDKLIF

SEQ ID NO: 730582 - protein, 12 aa, Homo sapiens
  CDR3 for beta chain variable domain of TCR clone 365291 (TRBV7-3, TRBJ1-1)
CQQPGLGAEAFF

SEQ ID NO: 730583 - protein, 13 aa, Homo sapiens
  CDR3 for alpha chain variable domain of TCR clone 365292 (TRAV20, TRAJ42)
CAVQEGSQGNLIF

SEQ ID NO: 730584 - protein, 15 aa, Homo sapiens
  CDR3 for beta chain variable domain of TCR clone 365292 (TRBV10-1, TRBJ2-1)
CASSEWRGTYNEQFF

SEQ ID NO: 730585 - protein, 14 aa, Homo sapiens
  CDR3 for alpha chain variable domain of TCR clone 365293 (TRAV13-2, TRAJ11)
CAETGNSGYSTITF

SEQ ID NO: 730586 - protein, 11 aa, Homo sapiens
  CDR3 for beta chain variable domain of TCR clone 365293 (TRBV10-3, TRBJ2-7)
CAISEGLEQYF

SEQ ID NO: 730587 - protein, 11 aa, Homo sapiens
  CDR3 for alpha chain variable domain of TCR clone 365294 (TRAV35, TRAJ34)
CWARNTDKLIF

SEQ ID NO: 730588 - protein, 14 aa, Homo sapiens
  CDR3 for beta chain variable domain of TCR clone 365294 (TRBV7-9, TRBJ2-1)
CASSDNSGYNEQFF

SEQ ID NO: 730589 - protein, 13 aa, Homo sapiens
  CDR3 for alpha chain variable domain of TCR clone 365295 (TRAV8-6, TRAJ49)
CAVITNTGNKFYV

SEQ ID NO: 730590 - protein, 14 aa, Homo sapiens
  CDR3 for beta chain variable domain of TCR clone 365295 (TRBV5-1, TRBJ2-7)
CASSRGESLYEQYF

SEQ ID NO: 730591 - protein, 18 aa, Homo sapiens
  CDR3 for alpha chain variable domain of TCR clone 365296 (TRAV12-3, TRAJ52)
CAMSVGGAGGTSYGKLTF

SEQ ID NO: 730592 - protein, 14 aa, Homo sapiens
  CDR3 for beta chain variable domain of TCR clone 365296 (TRBV5-4, TRBJ2-2)
CASRLDGGTGELFF

SEQ ID NO: 730593 - protein, 12 aa, Homo sapiens
  CDR3 for alpha chain variable domain of TCR clone 365297 (TRAV8-4, TRAJ43)
CAVSVNNDDMRF

SEQ ID NO: 730594 - protein, 15 aa, Homo sapiens
  CDR3 for beta chain variable domain of TCR clone 365297 (TRBV20-1, TRBJ2-7)
CSARDPVKGEGEQYF

SEQ ID NO: 730595 - protein, 15 aa, Homo sapiens
  CDR3 for alpha chain variable domain of TCR clone 365298 (TRAV8-3, TRAJ11)
CSVGLLNSVYSTLTF

SEQ ID NO: 730596 - protein, 16 aa, Homo sapiens
  CDR3 for beta chain variable domain of TCR clone 365298 (TRBV7-9, TRBJ1-2)
CASSLGFSSGEDGYTF

SEQ ID NO: 730597 - protein, 12 aa, Homo sapiens
  CDR3 for alpha chain variable domain of TCR clone 365299 (TRAV12-3, TRAJ20)
CAMVRGDYKLSF

SEQ ID NO: 730598 - protein, 14 aa, Homo sapiens
  CDR3 for beta chain variable domain of TCR clone 365299 (TRBV5-5, TRBJ1-5)
CASSGQLVDQPQHF

SEQ ID NO: 730599 - protein, 20 aa, Homo sapiens
  CDR3 for alpha chain variable domain of TCR clone 365300 (TRAV21, TRAJ30)
CAVRRRMTRSSLEKGHDFKF

SEQ ID NO: 730600 - protein, 15 aa, Homo sapiens
  CDR3 for beta chain variable domain of TCR clone 365300 (TRBV6-6, TRBJ2-7)
CASSYSYGGSYEQYF

SEQ ID NO: 730601 - protein, 14 aa, Homo sapiens
  CDR3 for alpha chain variable domain of TCR clone 365301 (TRAV12-2, TRAJ6)
CASKWGGGSYIPTF

SEQ ID NO: 730602 - protein, 13 aa, Homo sapiens
  CDR3 for beta chain variable domain of TCR clone 365301 (TRBV2, TRBJ1-1)
CASSEGGSTEAFF

SEQ ID NO: 730603 - protein, 16 aa, Homo sapiens
  CDR3 for alpha chain variable domain of TCR clone 365302 (TRAV12-3, TRAJ58)
CAMTDTAETSGSRLTF

SEQ ID NO: 730604 - protein, 22 aa, Homo sapiens
  CDR3 for beta chain variable domain of TCR clone 365302 (TRBV23-1, TRBJ2-7)
CASSRRLDSGQGYVGGGYEQYF

SEQ ID NO: 730605 - protein, 12 aa, Homo sapiens
  CDR3 for alpha chain variable domain of TCR clone 365303 (TRAV12-1, TRAJ40)
CVVYSGTYKYIF

SEQ ID NO: 730606 - protein, 15 aa, Homo sapiens
  CDR3 for beta chain variable domain of TCR clone 365303 (TRBV7-8, TRBJ2-1)
CASSLADSLYNEQFF

SEQ ID NO: 730607 - protein, 15 aa, Homo sapiens
  CDR3 for alpha chain variable domain of TCR clone 365304 (TRAV3, TRAJ47)
CAVRDIGEYGNKLGF

SEQ ID NO: 730608 - protein, 14 aa, Homo sapiens
  CDR3 for beta chain variable domain of TCR clone 365304 (TRBV13, TRBJ2-5)
CASSLERVGETRYF

SEQ ID NO: 730609 - protein, 14 aa, Homo sapiens
  CDR3 for alpha chain variable domain of TCR clone 365305 (TRAV1-2, TRAJ16)
CAVNRFSDGQKLLF

SEQ ID NO: 730610 - protein, 16 aa, Homo sapiens
  CDR3 for beta chain variable domain of TCR clone 365305 (TRBV7-3, TRBJ2-2)
CASSLKRGTLSGELCF

SEQ ID NO: 730611 - protein, 12 aa, Homo sapiens
  CDR3 for alpha chain variable domain of TCR clone 365306 (TRAV2, TRAJ37)
CAVAGNTGKLIF

SEQ ID NO: 730612 - protein, 17 aa, Homo sapiens
  CDR3 for beta chain variable domain of TCR clone 365306 (TRBV28, TRBJ2-5)
CASSTPEGDAPQETQYF

SEQ ID NO: 730613 - protein, 14 aa, Homo sapiens
  CDR3 for alpha chain variable domain of TCR clone 365307 (TRAV12-2, TRAJ9)
CAVNMEGGGFKTIF

SEQ ID NO: 730614 - protein, 14 aa, Homo sapiens
  CDR3 for beta chain variable domain of TCR clone 365307 (TRBV27, TRBJ2-3)
CASRKGGRTDTQCF

SEQ ID NO: 730615 - protein, 16 aa, Homo sapiens
  CDR3 for alpha chain variable domain of TCR clone 365308 (TRAV27, TRAJ53)
CAAPEGSGGSNYKLTF

SEQ ID NO: 730616 - protein, 14 aa, Homo sapiens
  CDR3 for beta chain variable domain of TCR clone 365308 (TRBV4-3, TRBJ1-5)
CASSQRGQGWPQHF

SEQ ID NO: 730617 - protein, 16 aa, Homo sapiens
  CDR3 for alpha chain variable domain of TCR clone 365309 (TRAV14/DV4, TRAJ21)
CAMREGPENNFNKFYF

SEQ ID NO: 730618 - protein, 12 aa, Homo sapiens
  CDR3 for beta chain variable domain of TCR clone 365309 (TRBV29-1, TRBJ2-2)
CSVDKYTGELFV

SEQ ID NO: 730619 - protein, 16 aa, Homo sapiens
  CDR3 for alpha chain variable domain of TCR clone 365310 (TRAV26-1, TRAJ48)
CIVREPPNFGNEKLTF

SEQ ID NO: 730620 - protein, 15 aa, Homo sapiens
  CDR3 for beta chain variable domain of TCR clone 365310 (TRBV7-2, TRBJ2-6)
CASSLQEAGANVLSF

SEQ ID NO: 730621 - protein, 14 aa, Homo sapiens
  CDR3 for alpha chain variable domain of TCR clone 365311 (TRAV12-2, TRAJ17)
CAVLFKAAGNKLTF

SEQ ID NO: 730622 - protein, 12 aa, Homo sapiens
  CDR3 for beta chain variable domain of TCR clone 365311 (TRBV29-1, TRBJ2-3)
CIVTGGADTQYF

SEQ ID NO: 730623 - protein, 11 aa, Homo sapiens
  CDR3 for alpha chain variable domain of TCR clone 365312 (TRAV12-1, TRAJ16)
CGDPDGQKLLF

SEQ ID NO: 730624 - protein, 11 aa, Homo sapiens
  CDR3 for beta chain variable domain of TCR clone 365312 (TRBV29-1, TRBJ2-5)
CSEDRAGTQYF

SEQ ID NO: 730625 - protein, 14 aa, Homo sapiens
  CDR3 for alpha chain variable domain of TCR clone 365313 (TRAV12-2, TRAJ13)
CAVKKTGGYQKVTF

SEQ ID NO: 730626 - protein, 15 aa, Homo sapiens
  CDR3 for beta chain variable domain of TCR clone 365313 (TRBV12-4, TRBJ1-2)
CASSLAHRDGQAYTF

SEQ ID NO: 730627 - protein, 14 aa, Homo sapiens
  CDR3 for alpha chain variable domain of TCR clone 365314 (TRAV17, TRAJ45)
CATASGGGADGLTF

SEQ ID NO: 730628 - protein, 14 aa, Homo sapiens
  CDR3 for beta chain variable domain of TCR clone 365314 (TRBV12-4, TRBJ1-1)
CASSLGTGGTEAFF

SEQ ID NO: 730629 - protein, 13 aa, Homo sapiens
  CDR3 for alpha chain variable domain of TCR clone 365315 (TRAV12-1, TRAJ7)
CVVNMRGNNRLAF

SEQ ID NO: 730630 - protein, 13 aa, Homo sapiens
  CDR3 for beta chain variable domain of TCR clone 365315 (TRBV7-3, TRBJ1-1)
CASSQDWGAEAFF

SEQ ID NO: 730631 - protein, 11 aa, Homo sapiens
  CDR3 for alpha chain variable domain of TCR clone 365316 (TRAV2, TRAJ33)
CAVDSNYQLIW

SEQ ID NO: 730632 - protein, 13 aa, Homo sapiens
  CDR3 for beta chain variable domain of TCR clone 365316 (TRBV12-4, TRBJ1-1)
CASSFGEDTEAFF

SEQ ID NO: 730633 - protein, 14 aa, Homo sapiens
  CDR3 for alpha chain variable domain of TCR clone 365317 (TRAV8-3, TRAJ31)
CAVGRGLNNARHMF

SEQ ID NO: 730634 - protein, 15 aa, Homo sapiens
  CDR3 for beta chain variable domain of TCR clone 365317 (TRBV7-2, TRBJ2-2)
CASSLAGGLTGELFF

SEQ ID NO: 730635 - protein, 14 aa, Homo sapiens
  CDR3 for alpha chain variable domain of TCR clone 365318 (TRAV8-3, TRAJ21)
CAVDARYNFNKFYF

SEQ ID NO: 730636 - protein, 16 aa, Homo sapiens
  CDR3 for beta chain variable domain of TCR clone 365318 (TRBV20-1, TRBJ2-1)
CSARDLAGHSYNEQFF

SEQ ID NO: 730637 - protein, 14 aa, Homo sapiens
  CDR3 for alpha chain variable domain of TCR clone 365319 (TRAV12-1, TRAJ23)
CGVMVCNQGGKLIF

SEQ ID NO: 730638 - protein, 15 aa, Homo sapiens
  CDR3 for beta chain variable domain of TCR clone 365319 (TRBV20-1, TRBJ1-5)
CSAKPPGQGPQPQHF

SEQ ID NO: 730639 - protein, 17 aa, Homo sapiens
  CDR3 for alpha chain variable domain of TCR clone 365320 (TRAV3, TRAJ6)
CAVRDGPRAGGSYIPTF

SEQ ID NO: 730640 - protein, 13 aa, Homo sapiens
  CDR3 for beta chain variable domain of TCR clone 365320 (TRBV20-1, TRBJ1-1)
CSARGGGSTEAFF

SEQ ID NO: 730641 - protein, 14 aa, Homo sapiens
  CDR3 for alpha chain variable domain of TCR clone 365321 (TRAV17, TRAJ57)
CATDPHGGSEKLVF

SEQ ID NO: 730642 - protein, 13 aa, Homo sapiens
  CDR3 for beta chain variable domain of TCR clone 365321 (TRBV19, TRBJ2-7)
CASSPRQSYEQYF

SEQ ID NO: 730643 - protein, 15 aa, Homo sapiens
  CDR3 for alpha chain variable domain of TCR clone 365322 (TRAV38-2/DV8, TRAJ28)
CADRSRGAGSYQLTF

SEQ ID NO: 730644 - protein, 14 aa, Homo sapiens
  CDR3 for beta chain variable domain of TCR clone 365322 (TRBV7-9, TRBJ2-7)
CASSLSQGSYEQYF

SEQ ID NO: 730645 - protein, 16 aa, Homo sapiens
  CDR3 for alpha chain variable domain of TCR clone 365323 (TRAV3, TRAJ37)
CAVRVRGSGNTGKLIF

SEQ ID NO: 730646 - protein, 13 aa, Homo sapiens
  CDR3 for beta chain variable domain of TCR clone 365323 (TRBV7-9, TRBJ1-2)
CASSLKQNYCYTF

SEQ ID NO: 730647 - protein, 13 aa, Homo sapiens
  CDR3 for alpha chain variable domain of TCR clone 365324 (TRAV8-4, TRAJ10)
WAAFTGGGNKLTF

SEQ ID NO: 730648 - protein, 15 aa, Homo sapiens
  CDR3 for beta chain variable domain of TCR clone 365324 (TRBV2, TRBJ2-3)
CSSSDFEKATDTQYF

SEQ ID NO: 730649 - protein, 14 aa, Homo sapiens
  CDR3 for alpha chain variable domain of TCR clone 365325 (TRAV8-3, TRAJ39)
CAVGANNAGNMLTF

SEQ ID NO: 730650 - protein, 15 aa, Homo sapiens
  CDR3 for beta chain variable domain of TCR clone 365325 (TRBV7-2, TRBJ2-3)
CASSLEQGGTDTQYF

SEQ ID NO: 730651 - protein, 14 aa, Homo sapiens
  CDR3 for alpha chain variable domain of TCR clone 365326 (TRAV12-2, TRAJ17)
CAVLFKAAGNKLTV

SEQ ID NO: 730652 - protein, 17 aa, Homo sapiens
  CDR3 for beta chain variable domain of TCR clone 365326 (TRBV20-1, TRBJ2-2)
YSASGSGQGGLTGELFF

SEQ ID NO: 730653 - protein, 18 aa, Homo sapiens
  CDR3 for alpha chain variable domain of TCR clone 365327 (TRAV12-3, TRAJ52)
CAMSRTNAGGTSYGKLTF

SEQ ID NO: 730654 - protein, 17 aa, Homo sapiens
  CDR3 for beta chain variable domain of TCR clone 365327 (TRBV13, TRBJ2-3)
CGSSLSRVAGGRNTQYF

SEQ ID NO: 730655 - protein, 16 aa, Homo sapiens
  CDR3 for alpha chain variable domain of TCR clone 365328 (TRAV35, TRAJ37)
CWAFLRGSSNTGNLIF

SEQ ID NO: 730656 - protein, 13 aa, Homo sapiens
  CDR3 for beta chain variable domain of TCR clone 365328 (TRBV2, TRBJ1-2)
CASSVRGNYGYTF

SEQ ID NO: 730657 - protein, 16 aa, Homo sapiens
  CDR3 for alpha chain variable domain of TCR clone 365329 (TRAV3, TRAJ10)
CAVRDMRAGGGNKLTF

SEQ ID NO: 730658 - protein, 14 aa, Homo sapiens
  CDR3 for beta chain variable domain of TCR clone 365329 (TRBV6-1, TRBJ2-2)
CASVEHIESGELFF

SEQ ID NO: 730659 - protein, 19 aa, Homo sapiens
  CDR3 for alpha chain variable domain of TCR clone 365330 (TRAV3, TRAJ37)
CAVRDIVGGYPSNTGKLIF

SEQ ID NO: 730660 - protein, 14 aa, Homo sapiens
  CDR3 for beta chain variable domain of TCR clone 365330 (TRBV7-8, TRBJ2-3)
CAGSLEAGTDTQYF

SEQ ID NO: 730661 - protein, 16 aa, Homo sapiens
  CDR3 for alpha chain variable domain of TCR clone 365331 (TRAV12-1, TRAJ45)
CVVIRYSGGGDDGLTF

SEQ ID NO: 730662 - protein, 15 aa, Homo sapiens
  CDR3 for beta chain variable domain of TCR clone 365331 (TRBV5-1, TRBJ2-5)
CASSFKGGDQETQYF

SEQ ID NO: 730663 - protein, 13 aa, Homo sapiens
  CDR3 for alpha chain variable domain of TCR clone 365332 (TRAV27, TRAJ29)
CAGAHSVNTPLVF

SEQ ID NO: 730664 - protein, 14 aa, Homo sapiens
  CDR3 for beta chain variable domain of TCR clone 365332 (TRBV7-9, TRBJ2-7)
CASSIGQGAGEQYF

SEQ ID NO: 730665 - protein, 13 aa, Homo sapiens
  CDR3 for alpha chain variable domain of TCR clone 365333 (TRAV12-3, TRAJ33)
CAMSVDSNYQLIW

SEQ ID NO: 730666 - protein, 13 aa, Homo sapiens
  CDR3 for beta chain variable domain of TCR clone 365333 (TRBV7-2, TRBJ2-2)
CASSVAVTGELFF

SEQ ID NO: 730667 - protein, 18 aa, Homo sapiens
  CDR3 for alpha chain variable domain of TCR clone 365334 (TRAV21, TRAJ52)
CAVRPSPAGGTSCGNLTF

SEQ ID NO: 730668 - protein, 17 aa, Homo sapiens
  CDR3 for beta chain variable domain of TCR clone 365334 (TRBV13, TRBJ2-3)
CASSLSRVAGGRNTQYF

SEQ ID NO: 730669 - protein, 17 aa, Homo sapiens
  CDR3 for alpha chain variable domain of TCR clone 365335 (TRAV38-2/DV8, TRAJ45)
CAYRSRYSGGGADGLTF

SEQ ID NO: 730670 - protein, 14 aa, Homo sapiens
  CDR3 for beta chain variable domain of TCR clone 365335 (TRBV4-3, TRBJ1-4)
CASSPLQRNEKLFF

SEQ ID NO: 730671 - protein, 12 aa, Homo sapiens
  CDR3 for alpha chain variable domain of TCR clone 365336 (TRAV25, TRAJ7)
CAGSYGNNRLAF

SEQ ID NO: 730672 - protein, 14 aa, Homo sapiens
  CDR3 for beta chain variable domain of TCR clone 365336 (TRBV5-5, TRBJ1-2)
CASSLDPYNYGYTF

SEQ ID NO: 730673 - protein, 15 aa, Homo sapiens
  CDR3 for alpha chain variable domain of TCR clone 365337 (TRAV17, TRAJ57)
CATGPSQGGSDKLVF

SEQ ID NO: 730674 - protein, 15 aa, Homo sapiens
  CDR3 for beta chain variable domain of TCR clone 365337 (TRBV28, TRBJ2-3)
CAPTFRDWSTDTQYF

SEQ ID NO: 730675 - protein, 14 aa, Homo sapiens
  CDR3 for alpha chain variable domain of TCR clone 365338 (TRAV12-2, TRAJ17)
CAVLFKAAGNKLTF

SEQ ID NO: 730676 - protein, 12 aa, Homo sapiens
  CDR3 for beta chain variable domain of TCR clone 365338 (TRBV20-1, TRBJ2-1)
CSARLGTDEQFF

SEQ ID NO: 730677 - protein, 13 aa, Homo sapiens
  CDR3 for alpha chain variable domain of TCR clone 365339 (TRAV20, TRAJ37)
CAGCSSNTGKLIF

SEQ ID NO: 730678 - protein, 11 aa, Homo sapiens
  CDR3 for beta chain variable domain of TCR clone 365339 (TRBV12-4, TRBJ2-3)
CASTATDTQNF

SEQ ID NO: 730679 - protein, 14 aa, Homo sapiens
  CDR3 for alpha chain variable domain of TCR clone 365340 (TRAV8-3, TRAJ16)
CAVDRFSDGQKLLF

SEQ ID NO: 730680 - protein, 15 aa, Homo sapiens
  CDR3 for beta chain variable domain of TCR clone 365340 (TRBV7-6, TRBJ2-1)
CASSPGQGAYNEQFF

SEQ ID NO: 730681 - protein, 14 aa, Homo sapiens
  CDR3 for alpha chain variable domain of TCR clone 365341 (TRAV4, TRAJ30)
CLVGDMNRDYKIIF

SEQ ID NO: 730682 - protein, 15 aa, Homo sapiens
  CDR3 for beta chain variable domain of TCR clone 365341 (TRBV7-2, TRBJ2-7)
CASSLSSGRTYEQYF

SEQ ID NO: 730683 - protein, 15 aa, Homo sapiens
  CDR3 for alpha chain variable domain of TCR clone 365342 (TRAV25, TRAJ53)
CPTSNSGGSNYKLTF

SEQ ID NO: 730684 - protein, 14 aa, Homo sapiens
  CDR3 for beta chain variable domain of TCR clone 365342 (TRBV11-2, TRBJ2-3)
CASSRLGRTDTQYF

SEQ ID NO: 730685 - protein, 14 aa, Homo sapiens
  CDR3 for alpha chain variable domain of TCR clone 365343 (TRAV35, TRAJ33)
CAGSSQDSNYQLIW

SEQ ID NO: 730686 - protein, 15 aa, Homo sapiens
  CDR3 for beta chain variable domain of TCR clone 365343 (TRBV20-1, TRBJ2-7)
CSAESGTSGAYEQYI

SEQ ID NO: 730687 - protein, 14 aa, Homo sapiens
  CDR3 for alpha chain variable domain of TCR clone 365344 (TRAV8-2, TRAJ4)
CVFSPSVGYNKLIF

SEQ ID NO: 730688 - protein, 15 aa, Homo sapiens
  CDR3 for beta chain variable domain of TCR clone 365344 (TRBV4-1, TRBJ1-4)
CASSDTGGTNEKLFF

SEQ ID NO: 730689 - protein, 15 aa, Homo sapiens
  CDR3 for alpha chain variable domain of TCR clone 365345 (TRAV3, TRAJ22)
CAVRDRGGSARQLTF

SEQ ID NO: 730690 - protein, 16 aa, Homo sapiens
  CDR3 for beta chain variable domain of TCR clone 365345 (TRBV15, TRBJ1-2)
CATSRGPTTGGGGYTF

SEQ ID NO: 730691 - protein, 18 aa, Homo sapiens
  CDR3 for alpha chain variable domain of TCR clone 365346 (TRAV26-1, TRAJ5)
CIVRVVPPRDTGRRALTF

SEQ ID NO: 730692 - protein, 15 aa, Homo sapiens
  CDR3 for beta chain variable domain of TCR clone 365346 (TRBV7-9, TRBJ2-7)
CSSSLPMGQANEQHF

SEQ ID NO: 730693 - protein, 12 aa, Homo sapiens
  CDR3 for alpha chain variable domain of TCR clone 365347 (TRAV12-1, TRAJ40)
CVVPSGTSKYIF

SEQ ID NO: 730694 - protein, 15 aa, Homo sapiens
  CDR3 for beta chain variable domain of TCR clone 365347 (TRBV12-4, TRBJ2-1)
CAGSPLSGRNSEQFF

SEQ ID NO: 730695 - protein, 14 aa, Homo sapiens
  CDR3 for alpha chain variable domain of TCR clone 365348 (TRAV29/DV5, TRAJ36)
CAARRKTGANNLFF

SEQ ID NO: 730696 - protein, 13 aa, Homo sapiens
  CDR3 for beta chain variable domain of TCR clone 365348 (TRBV20-1, TRBJ1-3)
CSAGAYSGNTIYF

SEQ ID NO: 730697 - protein, 13 aa, Homo sapiens
  CDR3 for alpha chain variable domain of TCR clone 365349 (TRAV8-3, TRAJ36)
CAVGATGANNLFF

SEQ ID NO: 730698 - protein, 15 aa, Homo sapiens
  CDR3 for beta chain variable domain of TCR clone 365349 (TRBV7-2, TRBJ1-2)
YASSPRAGWNYSYTF

SEQ ID NO: 730699 - protein, 14 aa, Homo sapiens
  CDR3 for alpha chain variable domain of TCR clone 365350 (TRAV8-4, TRAJ15)
CAVTIREAGTALIF

SEQ ID NO: 730700 - protein, 16 aa, Homo sapiens
  CDR3 for beta chain variable domain of TCR clone 365350 (TRBV29-1, TRBJ2-6)
CSVADITYSGANVLTF

SEQ ID NO: 730701 - protein, 12 aa, Homo sapiens
  CDR3 for alpha chain variable domain of TCR clone 365351 (TRAV16, TRAJ26)
CALRSYGQNFVF

SEQ ID NO: 730702 - protein, 18 aa, Homo sapiens
  CDR3 for beta chain variable domain of TCR clone 365351 (TRBV7-3, TRBJ2-5)
CASSFRGGGDPVLRARHA

SEQ ID NO: 730703 - protein, 12 aa, Homo sapiens
  CDR3 for alpha chain variable domain of TCR clone 365352 (TRAV6, TRAJ41)
CSSPLGRYALNF

SEQ ID NO: 730704 - protein, 12 aa, Homo sapiens
  CDR3 for beta chain variable domain of TCR clone 365352 (TRBV29-1, TRBJ2-2)
CSVDKHTGELFF

SEQ ID NO: 730705 - protein, 12 aa, Homo sapiens
  CDR3 for alpha chain variable domain of TCR clone 365353 (TRAV12-3, TRAJ17)
CAMTLTGNKLTF

SEQ ID NO: 730706 - protein, 14 aa, Homo sapiens
  CDR3 for beta chain variable domain of TCR clone 365353 (TRBV13, TRBJ2-3)
CASSSGSPTDTQYC

SEQ ID NO: 730707 - protein, 14 aa, Homo sapiens
  CDR3 for alpha chain variable domain of TCR clone 365354 (TRAV12-2, TRAJ13)
CAVKKTGGYQKVTF

SEQ ID NO: 730708 - protein, 15 aa, Homo sapiens
  CDR3 for beta chain variable domain of TCR clone 365354 (TRBV27, TRBJ2-1)
CAGSNGEGPPMSSSS

SEQ ID NO: 730709 - protein, 14 aa, Homo sapiens
  CDR3 for alpha chain variable domain of TCR clone 365355 (TRAV12-2, TRAJ17)
CAVLFKATGNKLTF

SEQ ID NO: 730710 - protein, 14 aa, Homo sapiens
  CDR3 for beta chain variable domain of TCR clone 365355 (TRBV4-1, TRBJ2-2)
CASSQAVNTGELFF

SEQ ID NO: 730711 - protein, 13 aa, Homo sapiens
  CDR3 for alpha chain variable domain of TCR clone 365356 (TRAV29/DV5, TRAJ31)
CAASRNNNARLMF

SEQ ID NO: 730712 - protein, 16 aa, Homo sapiens
  CDR3 for beta chain variable domain of TCR clone 365356 (TRBV9, TRBJ2-2)
CASSAMGKGNTGELFF

SEQ ID NO: 730713 - protein, 14 aa, Homo sapiens
  CDR3 for alpha chain variable domain of TCR clone 365357 (TRAV12-2, TRAJ13)
CAVKKTGGYQKCTF

SEQ ID NO: 730714 - protein, 12 aa, Homo sapiens
  CDR3 for beta chain variable domain of TCR clone 365357 (TRBV11-2, TRBJ2-2)
CASSLGGGELFF

SEQ ID NO: 730715 - protein, 12 aa, Homo sapiens
  CDR3 for alpha chain variable domain of TCR clone 365358 (TRAV12-3, TRAJ17)
CSMTLTGNKLTF

SEQ ID NO: 730716 - protein, 13 aa, Homo sapiens
  CDR3 for beta chain variable domain of TCR clone 365358 (TRBV27, TRBJ2-1)
CASRTLGVGEQFF

SEQ ID NO: 730717 - protein, 14 aa, Homo sapiens
  CDR3 for alpha chain variable domain of TCR clone 365359 (TRAV21, TRAJ35)
CAVMTLGFGNVLHF

SEQ ID NO: 730718 - protein, 12 aa, Homo sapiens
  CDR3 for beta chain variable domain of TCR clone 365359 (TRBV7-9, TRBJ2-7)
CASSIKREEQYF

SEQ ID NO: 730719 - protein, 15 aa, Homo sapiens
  CDR3 for alpha chain variable domain of TCR clone 365360 (TRAV25, TRAJ43)
CAVFMRFGAGIRLTV

SEQ ID NO: 730720 - protein, 13 aa, Homo sapiens
  CDR3 for beta chain variable domain of TCR clone 365360 (TRBV20-1, TRBJ1-1)
CSARVGGNTEAFF

SEQ ID NO: 730721 - protein, 11 aa, Homo sapiens
  CDR3 for alpha chain variable domain of TCR clone 365361 (TRAV2, TRAJ13)
CASGGYQKVTF

SEQ ID NO: 730722 - protein, 14 aa, Homo sapiens
  CDR3 for beta chain variable domain of TCR clone 365361 (TRBV29-1, TRBJ2-7)
CSAGGGQGAYEQYF

SEQ ID NO: 730723 - protein, 13 aa, Homo sapiens
  CDR3 for alpha chain variable domain of TCR clone 365362 (TRAV14/DV4, TRAJ23)
CAMREVTGGKLIF

SEQ ID NO: 730724 - protein, 18 aa, Homo sapiens
  CDR3 for beta chain variable domain of TCR clone 365362 (TRBV11-2, TRBJ2-3)
CASSLGGASRGAPNTQYF

SEQ ID NO: 730725 - protein, 18 aa, Homo sapiens
  CDR3 for alpha chain variable domain of TCR clone 365363 (TRAV26-1, TRAJ5)
CIVRVVPPRDTGRRALTF

SEQ ID NO: 730726 - protein, 15 aa, Homo sapiens
  CDR3 for beta chain variable domain of TCR clone 365363 (TRBV7-9, TRBJ2-7)
CASSLPMGQANEQYF

SEQ ID NO: 730727 - protein, 12 aa, Homo sapiens
  CDR3 for alpha chain variable domain of TCR clone 365364 (TRAV12-1, TRAJ35)
CPAGALGMCCIA

SEQ ID NO: 730728 - protein, 15 aa, Homo sapiens
  CDR3 for beta chain variable domain of TCR clone 365364 (TRBV9, TRBJ1-6)
CASSVAGTGDSPLHF

SEQ ID NO: 730729 - protein, 13 aa, Homo sapiens
  CDR3 for alpha chain variable domain of TCR clone 365365 (TRAV8-3, TRAJ28)
CAVGAVGRYQLTF

SEQ ID NO: 730730 - protein, 13 aa, Homo sapiens
  CDR3 for beta chain variable domain of TCR clone 365365 (TRBV19, TRBJ1-2)
CASSVPGQDGYTF

SEQ ID NO: 730731 - protein, 15 aa, Homo sapiens
  CDR3 for alpha chain variable domain of TCR clone 365366 (TRAV30, TRAJ32)
CGTEILGGATNKLIF

SEQ ID NO: 730732 - protein, 13 aa, Homo sapiens
  CDR3 for beta chain variable domain of TCR clone 365366 (TRBV12-5, TRBJ2-3)
CASGDRQSDTQYF

SEQ ID NO: 730733 - protein, 23 aa, Homo sapiens
  CDR3 for alpha chain variable domain of TCR clone 365367 (TRAV9-2, TRAJ38)
CIADNAGNNHIQNPDPAVYQLRD

SEQ ID NO: 730734 - protein, 12 aa, Homo sapiens
  CDR3 for beta chain variable domain of TCR clone 365367 (TRBV11-2, TRBJ2-2)
CASSLGGGELFF

SEQ ID NO: 730735 - protein, 13 aa, Homo sapiens
  CDR3 for alpha chain variable domain of TCR clone 365368 (TRAV2, TRAJ3)
CAVDGSSASKIIF

SEQ ID NO: 730736 - protein, 14 aa, Homo sapiens
  CDR3 for beta chain variable domain of TCR clone 365368 (TRBV7-2, TRBJ2-7)
CASSPKTSFYEQYF

SEQ ID NO: 730737 - protein, 15 aa, Homo sapiens
  CDR3 for alpha chain variable domain of TCR clone 365369 (TRAV13-1, TRAJ11)
CAASNRNSGYSTLTF

SEQ ID NO: 730738 - protein, 11 aa, Homo sapiens
  CDR3 for beta chain variable domain of TCR clone 365369 (TRBV20-1, TRBJ2-7)
CGARLSYEQYF

SEQ ID NO: 730739 - protein, 13 aa, Homo sapiens
  CDR3 for alpha chain variable domain of TCR clone 365370 (TRAV21, TRAJ20)
CAVGLRVDYKPSF

SEQ ID NO: 730740 - protein, 13 aa, Homo sapiens
  CDR3 for beta chain variable domain of TCR clone 365370 (TRBV3-1, TRBJ2-2)
CASLARGSGELFF

SEQ ID NO: 730741 - protein, 13 aa, Homo sapiens
  CDR3 for alpha chain variable domain of TCR clone 365371 (TRAV8-4, TRAJ30)
CAVSVNRDDKIIF

SEQ ID NO: 730742 - protein, 15 aa, Homo sapiens
  CDR3 for beta chain variable domain of TCR clone 365371 (TRBV7-6, TRBJ1-5)
CASSQSSGINQPQHF

SEQ ID NO: 730743 - protein, 16 aa, Homo sapiens
  CDR3 for alpha chain variable domain of TCR clone 365372 (TRAV30, TRAJ24)
CGTELVDADSWGNSSL

SEQ ID NO: 730744 - protein, 15 aa, Homo sapiens
  CDR3 for beta chain variable domain of TCR clone 365372 (TRBV20-1, TRBJ2-7)
CSARDRVSGMDEQYF

SEQ ID NO: 730745 - protein, 14 aa, Homo sapiens
  CDR3 for alpha chain variable domain of TCR clone 365373 (TRAV12-3, TRAJ10)
SHLPLTGGGSKLTF

SEQ ID NO: 730746 - protein, 16 aa, Homo sapiens
  CDR3 for beta chain variable domain of TCR clone 365373 (TRBV19, TRBJ1-1)
CASRFGGPVTGTEAFF

SEQ ID NO: 730747 - protein, 14 aa, Homo sapiens
  CDR3 for alpha chain variable domain of TCR clone 365374 (TRAV2, TRAJ9)
CAVEDRSGGFKTIF

SEQ ID NO: 730748 - protein, 11 aa, Homo sapiens
  CDR3 for beta chain variable domain of TCR clone 365374 (TRBV7-9, TRBJ2-5)
CASSLGETQYF

SEQ ID NO: 730749 - protein, 14 aa, Homo sapiens
  CDR3 for alpha chain variable domain of TCR clone 365375 (TRAV8-4, TRAJ13)
CAVTLSGGYQKVTF

SEQ ID NO: 730750 - protein, 13 aa, Homo sapiens
  CDR3 for beta chain variable domain of TCR clone 365375 (TRBV7-9, TRBJ1-2)
CASSLGGLRGYTF

SEQ ID NO: 730751 - protein, 21 aa, Homo sapiens
  CDR3 for alpha chain variable domain of TCR clone 365376 (TRAV12-1, TRAJ32)
SSVIQPHTSMNYGGATNKLIF

SEQ ID NO: 730752 - protein, 15 aa, Homo sapiens
  CDR3 for beta chain variable domain of TCR clone 365376 (TRBV7-9, TRBJ2-2)
CASGPLDSFPGELFF

SEQ ID NO: 730753 - protein, 13 aa, Homo sapiens
  CDR3 for alpha chain variable domain of TCR clone 365377 (TRAV8-3, TRAJ28)
CAVGAVGSCQLTF

SEQ ID NO: 730754 - protein, 12 aa, Homo sapiens
  CDR3 for beta chain variable domain of TCR clone 365377 (TRBV12-4, TRBJ2-7)
CASSLGGYEQYF

SEQ ID NO: 730755 - protein, 15 aa, Homo sapiens
  CDR3 for alpha chain variable domain of TCR clone 365378 (TRAV23/DV6, TRAJ18)
CAARYRGSTLGRQHF

SEQ ID NO: 730756 - protein, 13 aa, Homo sapiens
  CDR3 for beta chain variable domain of TCR clone 365378 (TRBV7-2, TRBJ2-7)
CASSSPSGSEQYF

SEQ ID NO: 730757 - protein, 15 aa, Homo sapiens
  CDR3 for alpha chain variable domain of TCR clone 365379 (TRAV23/DV6, TRAJ38)
CAARSNAGNNRKMIW

SEQ ID NO: 730758 - protein, 16 aa, Homo sapiens
  CDR3 for beta chain variable domain of TCR clone 365379 (TRBV10-2, TRBJ1-5)
CASSRDRDYSNQPQHF

SEQ ID NO: 730759 - protein, 17 aa, Homo sapiens
  CDR3 for alpha chain variable domain of TCR clone 365380 (TRAV13-1, TRAJ52)
CAASSGAGGTSYGKLTF

SEQ ID NO: 730760 - protein, 12 aa, Homo sapiens
  CDR3 for beta chain variable domain of TCR clone 365380 (TRBV11-2, TRBJ2-2)
CASSLGGGELFF

SEQ ID NO: 730761 - protein, 15 aa, Homo sapiens
  CDR3 for alpha chain variable domain of TCR clone 365381 (TRAV16, TRAJ17)
CSLSGQEAAGNKLTF

SEQ ID NO: 730762 - protein, 15 aa, Homo sapiens
  CDR3 for beta chain variable domain of TCR clone 365381 (TRBV12-4, TRBJ1-5)
CASTQGTGPLQPQHF

SEQ ID NO: 730763 - protein, 11 aa, Homo sapiens
  CDR3 for alpha chain variable domain of TCR clone 365382 (TRAV16, TRAJ20)
CALSEGFKAAL

SEQ ID NO: 730764 - protein, 13 aa, Homo sapiens
  CDR3 for beta chain variable domain of TCR clone 365382 (TRBV7-3, TRBJ2-1)
CASGLDSYNEQFF

SEQ ID NO: 730765 - protein, 11 aa, Homo sapiens
  CDR3 for alpha chain variable domain of TCR clone 365383 (TRAV2, TRAJ13)
CASGGYQTVTF

SEQ ID NO: 730766 - protein, 15 aa, Homo sapiens
  CDR3 for beta chain variable domain of TCR clone 365383 (TRBV20-1, TRBJ2-7)
CSARDRVSGMDEQYF

SEQ ID NO: 730767 - protein, 14 aa, Homo sapiens
  CDR3 for alpha chain variable domain of TCR clone 365384 (TRAV1-2, TRAJ8)
CAVREDTGFQKLIF

SEQ ID NO: 730768 - protein, 15 aa, Homo sapiens
  CDR3 for beta chain variable domain of TCR clone 365384 (TRBV4-1, TRBJ1-2)
CASSQERGEGYGYTF

SEQ ID NO: 730769 - protein, 14 aa, Homo sapiens
  CDR3 for alpha chain variable domain of TCR clone 365385 (TRAV20, TRAJ22)
CAVQVSGSARQLTF

SEQ ID NO: 730770 - protein, 14 aa, Homo sapiens
  CDR3 for beta chain variable domain of TCR clone 365385 (TRBV10-2, TRBJ1-5)
CASSSTGRNQPQHF

SEQ ID NO: 730771 - protein, 13 aa, Homo sapiens
  CDR3 for alpha chain variable domain of TCR clone 365386 (TRAV30, TRAJ6)
CGFIEGGSYIPTF

SEQ ID NO: 730772 - protein, 13 aa, Homo sapiens
  CDR3 for beta chain variable domain of TCR clone 365386 (TRBV5-4, TRBJ2-5)
CASSPVSQETLYF

SEQ ID NO: 730773 - protein, 14 aa, Homo sapiens
  CDR3 for alpha chain variable domain of TCR clone 365387 (TRAV20, TRAJ26)
CAVQAAIYGQNFVF

SEQ ID NO: 730774 - protein, 14 aa, Homo sapiens
  CDR3 for beta chain variable domain of TCR clone 365387 (TRBV27, TRBJ2-2)
CASSLGDNTGELFF

SEQ ID NO: 730775 - protein, 14 aa, Homo sapiens
  CDR3 for alpha chain variable domain of TCR clone 365388 (TRAV13-1, TRAJ10)
CAAKEPGGGNKLTF

SEQ ID NO: 730776 - protein, 14 aa, Homo sapiens
  CDR3 for beta chain variable domain of TCR clone 365388 (TRBV7-3, TRBJ1-1)
CASSLKGGNTEAFF

SEQ ID NO: 730777 - protein, 14 aa, Homo sapiens
  CDR3 for alpha chain variable domain of TCR clone 365389 (TRAV13-2, TRAJ17)
CAENSKAAGNNLTF

SEQ ID NO: 730778 - protein, 14 aa, Homo sapiens
  CDR3 for beta chain variable domain of TCR clone 365389 (TRBV7-2, TRBJ2-5)
CASSPGGNQETQYF

SEQ ID NO: 730779 - protein, 14 aa, Homo sapiens
  CDR3 for alpha chain variable domain of TCR clone 365390 (TRAV12-1, TRAJ17)
CVVNNPAAGNKLTF

SEQ ID NO: 730780 - protein, 15 aa, Homo sapiens
  CDR3 for beta chain variable domain of TCR clone 365390 (TRBV29-1, TRBJ2-7)
CSVDGGTGGFYEQYF

SEQ ID NO: 730781 - protein, 13 aa, Homo sapiens
  CDR3 for alpha chain variable domain of TCR clone 365391 (TRAV2, TRAJ40)
CAVVTSGSYKYIF

SEQ ID NO: 730782 - protein, 15 aa, Homo sapiens
  CDR3 for beta chain variable domain of TCR clone 365391 (TRBV11-3, TRBJ2-3)
CASLKDWREGDTQYF

SEQ ID NO: 730783 - protein, 15 aa, Homo sapiens
  CDR3 for alpha chain variable domain of TCR clone 365392 (TRAV21, TRAJ53)
CATLNSGRSNYKLTF

SEQ ID NO: 730784 - protein, 14 aa, Homo sapiens
  CDR3 for beta chain variable domain of TCR clone 365392 (TRBV20-1, TRBJ1-1)
CSAQTRIGGTEAFF

SEQ ID NO: 730785 - protein, 15 aa, Homo sapiens
  CDR3 for alpha chain variable domain of TCR clone 365393 (TRAV13-2, TRAJ8)
CAPGGRNTGFQKLVF

SEQ ID NO: 730786 - protein, 20 aa, Homo sapiens
  CDR3 for beta chain variable domain of TCR clone 365393 (TRBV7-8, TRBJ2-2)
CASSHLFPGPTIHITGELFF

SEQ ID NO: 730787 - protein, 21 aa, Homo sapiens
  CDR3 for alpha chain variable domain of TCR clone 365394 (TRAV21, TRAJ32)
CAVEIMVVLQTSSSLELALCF

SEQ ID NO: 730788 - protein, 13 aa, Homo sapiens
  CDR3 for beta chain variable domain of TCR clone 365394 (TRBV2, TRBJ1-6)
CASGRGGISPLHF

SEQ ID NO: 730789 - protein, 14 aa, Homo sapiens
  CDR3 for alpha chain variable domain of TCR clone 365395 (TRAV26-1, TRAJ38)
CISDNADNNRKLIW

SEQ ID NO: 730790 - protein, 13 aa, Homo sapiens
  CDR3 for beta chain variable domain of TCR clone 365395 (TRBV20-1, TRBJ1-1)
CSARGGGNTEAFF

SEQ ID NO: 730791 - protein, 15 aa, Homo sapiens
  CDR3 for alpha chain variable domain of TCR clone 365396 (TRAV34, TRAJ38)
CGADFTSGNNRKLIW

SEQ ID NO: 730792 - protein, 16 aa, Homo sapiens
  CDR3 for beta chain variable domain of TCR clone 365396 (TRBV12-5, TRBJ2-5)
CASGPRTSGNQETQYF

SEQ ID NO: 730793 - protein, 11 aa, Homo sapiens
  CDR3 for alpha chain variable domain of TCR clone 365397 (TRAV35, TRAJ34)
CWARNTDKLIF

SEQ ID NO: 730794 - protein, 13 aa, Homo sapiens
  CDR3 for beta chain variable domain of TCR clone 365397 (TRBV19, TRBJ2-7)
CASSIDRTYEQYY

SEQ ID NO: 730795 - protein, 11 aa, Homo sapiens
  CDR3 for alpha chain variable domain of TCR clone 365398 (TRAV13-1, TRAJ30)
CAASRDDKIIF

SEQ ID NO: 730796 - protein, 15 aa, Homo sapiens
  CDR3 for beta chain variable domain of TCR clone 365398 (TRBV18, TRBJ1-1)
CASSPSSWVNAEAFF

SEQ ID NO: 730797 - protein, 12 aa, Homo sapiens
  CDR3 for alpha chain variable domain of TCR clone 365399 (TRAV13-1, TRAJ48)
CAANFGNEKLTF

SEQ ID NO: 730798 - protein, 14 aa, Homo sapiens
  CDR3 for beta chain variable domain of TCR clone 365399 (TRBV24-1, TRBJ1-1)
CATSIPRGDTEAFF

SEQ ID NO: 730799 - protein, 16 aa, Homo sapiens
  CDR3 for alpha chain variable domain of TCR clone 365400 (TRAV4, TRAJ22)
CLVGDLYSGSARQLTF

SEQ ID NO: 730800 - protein, 16 aa, Homo sapiens
  CDR3 for beta chain variable domain of TCR clone 365400 (TRBV7-9, TRBJ2-3)
CASNPWREVGTDTQYF

SEQ ID NO: 730801 - protein, 13 aa, Homo sapiens
  CDR3 for alpha chain variable domain of TCR clone 365401 (TRAV35, TRAJ48)
CAGHEFGNVKLTF

SEQ ID NO: 730802 - protein, 14 aa, Homo sapiens
  CDR3 for beta chain variable domain of TCR clone 365401 (TRBV19, TRBJ2-1)
CASPTFVLSGEQFF

SEQ ID NO: 730803 - protein, 12 aa, Homo sapiens
  CDR3 for alpha chain variable domain of TCR clone 365402 (TRAV8-4, TRAJ37)
CAVRSNTGKLIF

SEQ ID NO: 730804 - protein, 16 aa, Homo sapiens
  CDR3 for beta chain variable domain of TCR clone 365402 (TRBV7-2, TRBJ2-3)
CASSLVWDASTDTQYF

SEQ ID NO: 730805 - protein, 15 aa, Homo sapiens
  CDR3 for alpha chain variable domain of TCR clone 365403 (TRAV21, TRAJ40)
CAVRPQTSGTYKYIF

SEQ ID NO: 730806 - protein, 15 aa, Homo sapiens
  CDR3 for beta chain variable domain of TCR clone 365403 (TRBV5-1, TRBJ2-1)
CGSSPPRAPYNEQFF

SEQ ID NO: 730807 - protein, 15 aa, Homo sapiens
  CDR3 for alpha chain variable domain of TCR clone 365404 (TRAV27, TRAJ38)
CAARRNAGNNRKLLW

SEQ ID NO: 730808 - protein, 18 aa, Homo sapiens
  CDR3 for beta chain variable domain of TCR clone 365404 (TRBV28, TRBJ2-1)
CASSSPSGLAGAIYEQFF

SEQ ID NO: 730809 - protein, 15 aa, Homo sapiens
  CDR3 for alpha chain variable domain of TCR clone 365405 (TRAV38-2/DV8, TRAJ31)
CAYRTETRNNASLMF

SEQ ID NO: 730810 - protein, 13 aa, Homo sapiens
  CDR3 for beta chain variable domain of TCR clone 365405 (TRBV28, TRBJ2-1)
CASSPLPSSEQFF

SEQ ID NO: 730811 - protein, 13 aa, Homo sapiens
  CDR3 for alpha chain variable domain of TCR clone 365406 (TRAV17, TRAJ40)
CATAPGVTYKYIF

SEQ ID NO: 730812 - protein, 12 aa, Homo sapiens
  CDR3 for beta chain variable domain of TCR clone 365406 (TRBV2, TRBJ1-5)
CASSENRTPQHF

SEQ ID NO: 730813 - protein, 12 aa, Homo sapiens
  CDR3 for alpha chain variable domain of TCR clone 365407 (TRAV12-3, TRAJ17)
CAMTLTGNKLTF

SEQ ID NO: 730814 - protein, 15 aa, Homo sapiens
  CDR3 for beta chain variable domain of TCR clone 365407 (TRBV20-1, TRBJ2-7)
CSARERVSGMDEQYI

SEQ ID NO: 730815 - protein, 13 aa, Homo sapiens
  CDR3 for alpha chain variable domain of TCR clone 365408 (TRAV12-1, TRAJ21)
CVVNEYNFNKFYF

SEQ ID NO: 730816 - protein, 18 aa, Homo sapiens
  CDR3 for beta chain variable domain of TCR clone 365408 (TRBV11-2, TRBJ2-3)
CASSLGGASRGAPNTQYF

SEQ ID NO: 730817 - protein, 13 aa, Homo sapiens
  CDR3 for alpha chain variable domain of TCR clone 365409 (TRAV35, TRAJ48)
CAGHEFGNEKLTF

SEQ ID NO: 730818 - protein, 15 aa, Homo sapiens
  CDR3 for beta chain variable domain of TCR clone 365409 (TRBV27, TRBJ2-7)
CPSSPQREGQREQYF

SEQ ID NO: 730819 - protein, 13 aa, Homo sapiens
  CDR3 for alpha chain variable domain of TCR clone 365410 (TRAV21, TRAJ20)
CAVGLRVDYELSF

SEQ ID NO: 730820 - protein, 11 aa, Homo sapiens
  CDR3 for beta chain variable domain of TCR clone 365410 (TRBV12-4, TRBJ2-3)
CASTATDTQYF

SEQ ID NO: 730821 - protein, 12 aa, Homo sapiens
  CDR3 for alpha chain variable domain of TCR clone 365411 (TRAV21, TRAJ13)
PVPSGGYQKVTF

SEQ ID NO: 730822 - protein, 15 aa, Homo sapiens
  CDR3 for beta chain variable domain of TCR clone 365411 (TRBV27, TRBJ2-5)
CASSLYPRGGETQYF

SEQ ID NO: 730823 - protein, 13 aa, Homo sapiens
  CDR3 for alpha chain variable domain of TCR clone 365412 (TRAV26-1, TRAJ29)
CIVGRSGNTPLVF

SEQ ID NO: 730824 - protein, 16 aa, Homo sapiens
  CDR3 for beta chain variable domain of TCR clone 365412 (TRBV11-2, TRBJ2-7)
CASSLAPTGVNYEQYF

SEQ ID NO: 730825 - protein, 23 aa, Homo sapiens
  CDR3 for alpha chain variable domain of TCR clone 365413 (TRAV26-1, TRAJ38)
CIADNAGNNHIQNPDPAVYQLSD

SEQ ID NO: 730826 - protein, 17 aa, Homo sapiens
  CDR3 for beta chain variable domain of TCR clone 365413 (TRBV11-2, TRBJ2-6)
CASSHRDIFSGANVLTF

SEQ ID NO: 730827 - protein, 15 aa, Homo sapiens
  CDR3 for alpha chain variable domain of TCR clone 365414 (TRAV12-2, TRAJ53)
CAVNGGGGSNYKLTF

SEQ ID NO: 730828 - protein, 14 aa, Homo sapiens
  CDR3 for beta chain variable domain of TCR clone 365414 (TRBV12-5, TRBJ2-5)
CASGSRTHQETQHF

SEQ ID NO: 730829 - protein, 17 aa, Homo sapiens
  CDR3 for alpha chain variable domain of TCR clone 365415 (TRAV3, TRAJ28)
CAVREAYSGAGSYQLTF

SEQ ID NO: 730830 - protein, 16 aa, Homo sapiens
  CDR3 for beta chain variable domain of TCR clone 365415 (TRBV13, TRBJ2-2)
CASSPRTGEHTGELFF

SEQ ID NO: 730831 - protein, 18 aa, Homo sapiens
  CDR3 for alpha chain variable domain of TCR clone 365416 (TRAV12-3, TRAJ52)
CAMSVGGAGGTSYGKLTF

SEQ ID NO: 730832 - protein, 17 aa, Homo sapiens
  CDR3 for beta chain variable domain of TCR clone 365416 (TRBV27, TRBJ1-6)
CASSFDRGLGSPSTLGT

SEQ ID NO: 730833 - protein, 15 aa, Homo sapiens
  CDR3 for alpha chain variable domain of TCR clone 365417 (TRAV17, TRAJ57)
CATGPSQGGSEKLVC

SEQ ID NO: 730834 - protein, 14 aa, Homo sapiens
  CDR3 for beta chain variable domain of TCR clone 365417 (TRBV12-5, TRBJ2-5)
GASGSRTHQETQYF

SEQ ID NO: 730835 - protein, 13 aa, Homo sapiens
  CDR3 for alpha chain variable domain of TCR clone 365418 (TRAV29/DV5, TRAJ48)
CAASSFGNEKLTF

SEQ ID NO: 730836 - protein, 14 aa, Homo sapiens
  CDR3 for beta chain variable domain of TCR clone 365418 (TRBV19, TRBJ2-1)
CASPTFVLSGEQFF

SEQ ID NO: 730837 - protein, 14 aa, Homo sapiens
  CDR3 for alpha chain variable domain of TCR clone 365419 (TRAV8-1, TRAJ22)
CAAPSSGSARQLAF

SEQ ID NO: 730838 - protein, 14 aa, Homo sapiens
  CDR3 for beta chain variable domain of TCR clone 365419 (TRBV9, TRBJ2-2)
CASSVGQGAWELFF

SEQ ID NO: 730839 - protein, 14 aa, Homo sapiens
  CDR3 for alpha chain variable domain of TCR clone 365420 (TRAV2, TRAJ37)
CAVDFTSNTGKLIF

SEQ ID NO: 730840 - protein, 13 aa, Homo sapiens
  CDR3 for beta chain variable domain of TCR clone 365420 (TRBV20-1, TRBJ1-1)
CSAPLGGGTEAFV

SEQ ID NO: 730841 - protein, 13 aa, Homo sapiens
  CDR3 for alpha chain variable domain of TCR clone 365421 (TRAV8-6, TRAJ49)
CAVITNTGNQIYF

SEQ ID NO: 730842 - protein, 13 aa, Homo sapiens
  CDR3 for beta chain variable domain of TCR clone 365421 (TRBV7-9, TRBJ1-2)
CASSLKQNYGYTF

SEQ ID NO: 730843 - protein, 14 aa, Homo sapiens
  CDR3 for alpha chain variable domain of TCR clone 365422 (TRAV12-3, TRAJ30)
CAMSLLNRDDKIIF

SEQ ID NO: 730844 - protein, 12 aa, Homo sapiens
  CDR3 for beta chain variable domain of TCR clone 365422 (TRBV11-2, TRBJ2-2)
CASSIGGGELFF

SEQ ID NO: 730845 - protein, 16 aa, Homo sapiens
  CDR3 for alpha chain variable domain of TCR clone 365423 (TRAV23/DV6, TRAJ9)
CAASIGGNTGGFKTLF

SEQ ID NO: 730846 - protein, 18 aa, Homo sapiens
  CDR3 for beta chain variable domain of TCR clone 365423 (TRBV7-9, TRBJ2-7)
CASSLTTSGSRAWYEQYF

SEQ ID NO: 730847 - protein, 15 aa, Homo sapiens
  CDR3 for alpha chain variable domain of TCR clone 365424 (TRAV8-2, TRAJ16)
CVVSDGVSDGQNLLF

SEQ ID NO: 730848 - protein, 15 aa, Homo sapiens
  CDR3 for beta chain variable domain of TCR clone 365424 (TRBV12-4, TRBJ2-5)
CASSPPTGLQETQYF

SEQ ID NO: 730849 - protein, 13 aa, Homo sapiens
  CDR3 for alpha chain variable domain of TCR clone 365425 (TRAV35, TRAJ42)
CAGFPGSQGNLIF

SEQ ID NO: 730850 - protein, 13 aa, Homo sapiens
  CDR3 for beta chain variable domain of TCR clone 365425 (TRBV19, TRBJ2-1)
CQSDFRLSGEQFF

SEQ ID NO: 730851 - protein, 16 aa, Homo sapiens
  CDR3 for alpha chain variable domain of TCR clone 365426 (TRAV30, TRAJ24)
CGTEIVDADSWGKFQF

SEQ ID NO: 730852 - protein, 14 aa, Homo sapiens
  CDR3 for beta chain variable domain of TCR clone 365426 (TRBV5-8, TRBJ1-1)
CASSPRTGFSEAFF

SEQ ID NO: 730853 - protein, 11 aa, Homo sapiens
  CDR3 for alpha chain variable domain of TCR clone 365427 (TRAV1-1, TRAJ23)
CAVRQVGKLIF

SEQ ID NO: 730854 - protein, 15 aa, Homo sapiens
  CDR3 for beta chain variable domain of TCR clone 365427 (TRBV27, TRBJ2-7)
CASSTAGTGSYEQYF

SEQ ID NO: 730855 - protein, 13 aa, Homo sapiens
  CDR3 for alpha chain variable domain of TCR clone 365428 (TRAV21, TRAJ27)
CAARPGNAGKSTF

SEQ ID NO: 730856 - protein, 14 aa, Homo sapiens
  CDR3 for beta chain variable domain of TCR clone 365428 (TRBV4-2, TRBJ1-2)
CASSPGGSNYGYTF

SEQ ID NO: 730857 - protein, 11 aa, Homo sapiens
  CDR3 for alpha chain variable domain of TCR clone 365429 (TRAV1-1, TRAJ23)
CAVRQEGKLIF

SEQ ID NO: 730858 - protein, 20 aa, Homo sapiens
  CDR3 for beta chain variable domain of TCR clone 365429 (TRBV7-8, TRBJ2-2)
CASSHLFPGPTVHITGELFF

SEQ ID NO: 730859 - protein, 12 aa, Homo sapiens
  CDR3 for alpha chain variable domain of TCR clone 365430 (TRAV26-2, TRAJ21)
CILKGNFNKFYF

SEQ ID NO: 730860 - protein, 14 aa, Homo sapiens
  CDR3 for beta chain variable domain of TCR clone 365430 (TRBV7-9, TRBJ1-1)
CASTPLQSYTEASS

SEQ ID NO: 730861 - protein, 13 aa, Homo sapiens
  CDR3 for alpha chain variable domain of TCR clone 365431 (TRAV21, TRAJ57)
CAVTQGGSEKLVF

SEQ ID NO: 730862 - protein, 16 aa, Homo sapiens
  CDR3 for beta chain variable domain of TCR clone 365431 (TRBV29-1, TRBJ2-7)
CSVDDAEDGTAYEQYS

SEQ ID NO: 730863 - protein, 15 aa, Homo sapiens
  CDR3 for alpha chain variable domain of TCR clone 365432 (TRAV12-3, TRAJ13)
CAMSARSGGDQKVTF

SEQ ID NO: 730864 - protein, 18 aa, Homo sapiens
  CDR3 for beta chain variable domain of TCR clone 365432 (TRBV3-1, TRBJ2-7)
CASSQEGGGRSWHYEQYF

SEQ ID NO: 730865 - protein, 14 aa, Homo sapiens
  CDR3 for alpha chain variable domain of TCR clone 365433 (TRAV12-3, TRAJ10)
SHLPLTGGGNKLTF

SEQ ID NO: 730866 - protein, 13 aa, Homo sapiens
  CDR3 for beta chain variable domain of TCR clone 365433 (TRBV7-2, TRBJ1-4)
CASSLAGLEKLFF

SEQ ID NO: 730867 - protein, 14 aa, Homo sapiens
  CDR3 for alpha chain variable domain of TCR clone 365434 (TRAV16, TRAJ33)
CALSAMDSNYQLIW

SEQ ID NO: 730868 - protein, 14 aa, Homo sapiens
  CDR3 for beta chain variable domain of TCR clone 365434 (TRBV12-4, TRBJ2-2)
CASNQGANTGELFF

SEQ ID NO: 730869 - protein, 14 aa, Homo sapiens
  CDR3 for alpha chain variable domain of TCR clone 365435 (TRAV17, TRAJ57)
CATDPQGGSERLVF

SEQ ID NO: 730870 - protein, 13 aa, Homo sapiens
  CDR3 for beta chain variable domain of TCR clone 365435 (TRBV19, TRBJ2-7)
CASSPRQSYEQYF

SEQ ID NO: 730871 - protein, 15 aa, Homo sapiens
  CDR3 for alpha chain variable domain of TCR clone 365436 (TRAV17, TRAJ56)
CATEPFTGAHSKLTF

SEQ ID NO: 730872 - protein, 15 aa, Homo sapiens
  CDR3 for beta chain variable domain of TCR clone 365436 (TRBV28, TRBJ1-5)
CASSRTGGYVQPQHF

SEQ ID NO: 730873 - protein, 15 aa, Homo sapiens
  CDR3 for alpha chain variable domain of TCR clone 365437 (TRAV12-1, TRAJ44)
CVVFVNTGTASKLTF

SEQ ID NO: 730874 - protein, 14 aa, Homo sapiens
  CDR3 for beta chain variable domain of TCR clone 365437 (TRBV13, TRBJ2-1)
CASSPRPRYDEQFF

SEQ ID NO: 730875 - protein, 13 aa, Homo sapiens
  CDR3 for alpha chain variable domain of TCR clone 365438 (TRAV3, TRAJ27)
CAVRPLGAGKSTF

SEQ ID NO: 730876 - protein, 15 aa, Homo sapiens
  CDR3 for beta chain variable domain of TCR clone 365438 (TRBV28, TRBJ2-1)
CASSIIAGGGSEQFF

SEQ ID NO: 730877 - protein, 14 aa, Homo sapiens
  CDR3 for alpha chain variable domain of TCR clone 365439 (TRAV8-4, TRAJ9)
CAVRINNGGFKTIF

SEQ ID NO: 730878 - protein, 21 aa, Homo sapiens
  CDR3 for beta chain variable domain of TCR clone 365439 (TRBV10-2, TRBJ2-6)
CASSEQGTGQRPDFRGRQQAD

SEQ ID NO: 730879 - protein, 15 aa, Homo sapiens
  CDR3 for alpha chain variable domain of TCR clone 365440 (TRAV12-2, TRAJ53)
FAVNGGGGSNYKLTF

SEQ ID NO: 730880 - protein, 14 aa, Homo sapiens
  CDR3 for beta chain variable domain of TCR clone 365440 (TRBV6-1, TRBJ1-3)
CASVQGGGGNTIYF

SEQ ID NO: 730881 - protein, 15 aa, Homo sapiens
  CDR3 for alpha chain variable domain of TCR clone 365441 (TRAV12-3, TRAJ49)
CAMAVTPNPGNQFYF

SEQ ID NO: 730882 - protein, 14 aa, Homo sapiens
  CDR3 for beta chain variable domain of TCR clone 365441 (TRBV7-8, TRBJ2-3)
CASSLEAGTDTQYF

SEQ ID NO: 730883 - protein, 15 aa, Homo sapiens
  CDR3 for alpha chain variable domain of TCR clone 365442 (TRAV27, TRAJ38)
CAARRNAGNNRKLLW

SEQ ID NO: 730884 - protein, 12 aa, Homo sapiens
  CDR3 for beta chain variable domain of TCR clone 365442 (TRBV14, TRBJ2-7)
CASSLYKDEQYF

SEQ ID NO: 730885 - protein, 15 aa, Homo sapiens
  CDR3 for alpha chain variable domain of TCR clone 365443 (TRAV8-3, TRAJ45)
CASSYSGGGADGLTF

SEQ ID NO: 730886 - protein, 13 aa, Homo sapiens
  CDR3 for beta chain variable domain of TCR clone 365443 (TRBV27, TRBJ1-6)
CASSLVLVSPLHF

SEQ ID NO: 730887 - protein, 13 aa, Homo sapiens
  CDR3 for alpha chain variable domain of TCR clone 365444 (TRAV9-2, TRAJ39)
CSLYLYAGNMLTF

SEQ ID NO: 730888 - protein, 14 aa, Homo sapiens
  CDR3 for beta chain variable domain of TCR clone 365444 (TRBV6-1, TRBJ1-3)
CASVQGGGGNTIYF

SEQ ID NO: 730889 - protein, 14 aa, Homo sapiens
  CDR3 for alpha chain variable domain of TCR clone 365445 (TRAV35, TRAJ22)
CAGLRPGSARQLTF

SEQ ID NO: 730890 - protein, 18 aa, Homo sapiens
  CDR3 for beta chain variable domain of TCR clone 365445 (TRBV7-6, TRBJ2-1)
CASSPRTSGMSSYNEQFF

SEQ ID NO: 730891 - protein, 13 aa, Homo sapiens
  CDR3 for alpha chain variable domain of TCR clone 365446 (TRAV17, TRAJ5)
CAAMDTGRRALTF

SEQ ID NO: 730892 - protein, 15 aa, Homo sapiens
  CDR3 for beta chain variable domain of TCR clone 365446 (TRBV6-6, TRBJ2-5)
CASSPGGGLEETQYF

SEQ ID NO: 730893 - protein, 12 aa, Homo sapiens
  CDR3 for alpha chain variable domain of TCR clone 365447 (TRAV12-3, TRAJ20)
CAMVRGDYKLSF

SEQ ID NO: 730894 - protein, 14 aa, Homo sapiens
  CDR3 for beta chain variable domain of TCR clone 365447 (TRBV27, TRBJ1-3)
CASRPRGLGDTIYF

SEQ ID NO: 730895 - protein, 14 aa, Homo sapiens
  CDR3 for alpha chain variable domain of TCR clone 365448 (TRAV12-2, TRAJ40)
CAVKIPSGTYKYIF

SEQ ID NO: 730896 - protein, 14 aa, Homo sapiens
  CDR3 for beta chain variable domain of TCR clone 365448 (TRBV4-3, TRBJ1-4)
CASSPLQRNEKLFF

SEQ ID NO: 730897 - protein, 10 aa, Homo sapiens
  CDR3 for alpha chain variable domain of TCR clone 365449 (TRAV1-2, TRAJ31)
CVSEDARLMF

SEQ ID NO: 730898 - protein, 13 aa, Homo sapiens
  CDR3 for beta chain variable domain of TCR clone 365449 (TRBV10-3, TRBJ2-7)
CASKLAVNYEQYF

SEQ ID NO: 730899 - protein, 14 aa, Homo sapiens
  CDR3 for alpha chain variable domain of TCR clone 365450 (TRAV12-2, TRAJ17)
CAVLFKAAGNKLTF

SEQ ID NO: 730900 - protein, 13 aa, Homo sapiens
  CDR3 for beta chain variable domain of TCR clone 365450 (TRBV20-1, TRBJ1-1)
CSAGTVGNTEAFF

SEQ ID NO: 730901 - protein, 15 aa, Homo sapiens
  CDR3 for alpha chain variable domain of TCR clone 365451 (TRAV35, TRAJ58)
CAGRRQETSGSRLTF

SEQ ID NO: 730902 - protein, 16 aa, Homo sapiens
  CDR3 for beta chain variable domain of TCR clone 365451 (TRBV2, TRBJ2-1)
CASSVGGSLSYNAQFF

SEQ ID NO: 730903 - protein, 14 aa, Homo sapiens
  CDR3 for alpha chain variable domain of TCR clone 365452 (TRAV16, TRAJ15)
CALSGPQAGTALIF

SEQ ID NO: 730904 - protein, 12 aa, Homo sapiens
  CDR3 for beta chain variable domain of TCR clone 365452 (TRBV18, TRBJ2-5)
CASSPSKKTQYF

SEQ ID NO: 730905 - protein, 13 aa, Homo sapiens
  CDR3 for alpha chain variable domain of TCR clone 365453 (TRAV22, TRAJ48)
CAVARFGNEKLTF

SEQ ID NO: 730906 - protein, 13 aa, Homo sapiens
  CDR3 for beta chain variable domain of TCR clone 365453 (TRBV20-1, TRBJ2-5)
CSARGDYQETQYF

SEQ ID NO: 730907 - protein, 14 aa, Homo sapiens
  CDR3 for alpha chain variable domain of TCR clone 365454 (TRAV21, TRAJ11)
CAVRRNSGYSTLTF

SEQ ID NO: 730908 - protein, 14 aa, Homo sapiens
  CDR3 for beta chain variable domain of TCR clone 365454 (TRBV7-2, TRBJ2-5)
CASSLSGGGETQYF

SEQ ID NO: 730909 - protein, 16 aa, Homo sapiens
  CDR3 for alpha chain variable domain of TCR clone 365455 (TRAV8-6, TRAJ58)
CCSSWVGETSGSRLTF

SEQ ID NO: 730910 - protein, 14 aa, Homo sapiens
  CDR3 for beta chain variable domain of TCR clone 365455 (TRBV4-2, TRBJ2-1)
CASGLDRAYNEQFF

SEQ ID NO: 730911 - protein, 15 aa, Homo sapiens
  CDR3 for alpha chain variable domain of TCR clone 365456 (TRAV8-3, TRAJ45)
CASSYSGGGADGLTL

SEQ ID NO: 730912 - protein, 13 aa, Homo sapiens
  CDR3 for beta chain variable domain of TCR clone 365456 (TRBV10-3, TRBJ2-7)
CASKLVVNYEQYF

SEQ ID NO: 730913 - protein, 15 aa, Homo sapiens
  CDR3 for alpha chain variable domain of TCR clone 365457 (TRAV26-1, TRAJ29)
CIVRVEGSGNTPLVF

SEQ ID NO: 730914 - protein, 15 aa, Homo sapiens
  CDR3 for beta chain variable domain of TCR clone 365457 (TRBV7-9, TRBJ1-5)
CASSHGPPPNQPQPF

SEQ ID NO: 730915 - protein, 14 aa, Homo sapiens
  CDR3 for alpha chain variable domain of TCR clone 365458 (TRAV20, TRAJ26)
CAVQAAIYGQNFVF

SEQ ID NO: 730916 - protein, 16 aa, Homo sapiens
  CDR3 for beta chain variable domain of TCR clone 365458 (TRBV19, TRBJ2-1)
CASSKAGPSSYNEQFF

SEQ ID NO: 730917 - protein, 11 aa, Homo sapiens
  CDR3 for alpha chain variable domain of TCR clone 365459 (TRAV17, TRAJ43)
CATPRSNDMRF

SEQ ID NO: 730918 - protein, 15 aa, Homo sapiens
  CDR3 for beta chain variable domain of TCR clone 365459 (TRBV9, TRBJ2-1)
CASSLAGSSYNEQFF

SEQ ID NO: 730919 - protein, 16 aa, Homo sapiens
  CDR3 for alpha chain variable domain of TCR clone 365460 (TRAV17, TRAJ36)
CATVSLNWGKQPLLWD

SEQ ID NO: 730920 - protein, 13 aa, Homo sapiens
  CDR3 for beta chain variable domain of TCR clone 365460 (TRBV4-1, TRBJ1-1)
SASSQLGTGEAFF

SEQ ID NO: 730921 - protein, 14 aa, Homo sapiens
  CDR3 for alpha chain variable domain of TCR clone 365461 (TRAV21, TRAJ23)
CAIMIYNQGGKLIF

SEQ ID NO: 730922 - protein, 18 aa, Homo sapiens
  CDR3 for beta chain variable domain of TCR clone 365461 (TRBV20-1, TRBJ2-6)
CSAGTTPTHGSGANVLTF

SEQ ID NO: 730923 - protein, 17 aa, Homo sapiens
  CDR3 for alpha chain variable domain of TCR clone 365462 (TRAV4, TRAJ22)
CCVLLPRGGGFARQLTF

SEQ ID NO: 730924 - protein, 14 aa, Homo sapiens
  CDR3 for beta chain variable domain of TCR clone 365462 (TRBV20-1, TRBJ1-1)
CSARAVNGYTEAFF

SEQ ID NO: 730925 - protein, 14 aa, Homo sapiens
  CDR3 for alpha chain variable domain of TCR clone 365463 (TRAV1-2, TRAJ16)
CAVNRFSDGQNLLF

SEQ ID NO: 730926 - protein, 13 aa, Homo sapiens
  CDR3 for beta chain variable domain of TCR clone 365463 (TRBV6-5, TRBJ1-1)
QTSVYFCALRAFF

SEQ ID NO: 730927 - protein, 12 aa, Homo sapiens
  CDR3 for alpha chain variable domain of TCR clone 365464 (TRAV3, TRAJ20)
CAVRNPDCKLSF

SEQ ID NO: 730928 - protein, 13 aa, Homo sapiens
  CDR3 for beta chain variable domain of TCR clone 365464 (TRBV9, TRBJ2-1)
CASSVGQGGEQFF

SEQ ID NO: 730929 - protein, 12 aa, Homo sapiens
  CDR3 for alpha chain variable domain of TCR clone 365465 (TRAV3, TRAJ43)
CAVRDPNNDMRF

SEQ ID NO: 730930 - protein, 15 aa, Homo sapiens
  CDR3 for beta chain variable domain of TCR clone 365465 (TRBV27, TRBJ1-5)
CASSLGTGSDQTQHF

SEQ ID NO: 730931 - protein, 17 aa, Homo sapiens
  CDR3 for alpha chain variable domain of TCR clone 365466 (TRAV13-2, TRAJ5)
CAESVVIVGHGQESTYF

SEQ ID NO: 730932 - protein, 18 aa, Homo sapiens
  CDR3 for beta chain variable domain of TCR clone 365466 (TRBV4-1, TRBJ2-3)
CASSHQLAGGHSTDTQYF

SEQ ID NO: 730933 - protein, 14 aa, Homo sapiens
  CDR3 for alpha chain variable domain of TCR clone 365467 (TRAV8-2, TRAJ11)
CVVSEKSGYSILTF

SEQ ID NO: 730934 - protein, 16 aa, Homo sapiens
  CDR3 for beta chain variable domain of TCR clone 365467 (TRBV28, TRBJ2-1)
CASSSPEYPRDNEQFF

SEQ ID NO: 730935 - protein, 17 aa, Homo sapiens
  CDR3 for alpha chain variable domain of TCR clone 365468 (TRAV16, TRAJ58)
CITVLSNGETSGSRLTF

SEQ ID NO: 730936 - protein, 17 aa, Homo sapiens
  CDR3 for beta chain variable domain of TCR clone 365468 (TRBV18, TRBJ2-1)
CASSKRLSGGADNEQFF

SEQ ID NO: 730937 - protein, 14 aa, Homo sapiens
  CDR3 for alpha chain variable domain of TCR clone 365469 (TRAV17, TRAJ35)
CATDRPGFGNVLHC

SEQ ID NO: 730938 - protein, 19 aa, Homo sapiens
  CDR3 for beta chain variable domain of TCR clone 365469 (TRBV11-3, TRBJ2-2)
CASSTRPGAKPTNTGELFF

SEQ ID NO: 730939 - protein, 16 aa, Homo sapiens
  CDR3 for alpha chain variable domain of TCR clone 365470 (TRAV3, TRAJ10)
CAVRDMRAGGGSKLTF

SEQ ID NO: 730940 - protein, 16 aa, Homo sapiens
  CDR3 for beta chain variable domain of TCR clone 365470 (TRBV12-4, TRBJ1-5)
CASSRPVGGSNQPQHF

SEQ ID NO: 730941 - protein, 12 aa, Homo sapiens
  CDR3 for alpha chain variable domain of TCR clone 365471 (TRAV12-3, TRAJ17)
CAMTLTGNKLTF

SEQ ID NO: 730942 - protein, 15 aa, Homo sapiens
  CDR3 for beta chain variable domain of TCR clone 365471 (TRBV20-1, TRBJ2-7)
CSARGRVSGMDEQYL

SEQ ID NO: 730943 - protein, 14 aa, Homo sapiens
  CDR3 for alpha chain variable domain of TCR clone 365472 (TRAV21, TRAJ28)
CAVGSGAGSYQLTF

SEQ ID NO: 730944 - protein, 14 aa, Homo sapiens
  CDR3 for beta chain variable domain of TCR clone 365472 (TRBV18, TRBJ1-4)
CASSPGPNGGKLFF

SEQ ID NO: 730945 - protein, 12 aa, Homo sapiens
  CDR3 for alpha chain variable domain of TCR clone 365473 (TRAV35, TRAJ30)
CAGLNRDDKIIF

SEQ ID NO: 730946 - protein, 15 aa, Homo sapiens
  CDR3 for beta chain variable domain of TCR clone 365473 (TRBV9, TRBJ1-6)
CASRVAGTGDSPLHF

SEQ ID NO: 730947 - protein, 17 aa, Homo sapiens
  CDR3 for alpha chain variable domain of TCR clone 365474 (TRAV13-1, TRAJ41)
CAASTRRAQIPGMHSTS

SEQ ID NO: 730948 - protein, 19 aa, Homo sapiens
  CDR3 for beta chain variable domain of TCR clone 365474 (TRBV7-2, TRBJ2-3)
CASSFLSRNWGGGTDTQYF

SEQ ID NO: 730949 - protein, 11 aa, Homo sapiens
  CDR3 for alpha chain variable domain of TCR clone 365475 (TRAV1-1, TRAJ23)
CAVRQGGKLIF

SEQ ID NO: 730950 - protein, 14 aa, Homo sapiens
  CDR3 for beta chain variable domain of TCR clone 365475 (TRBV5-1, TRBJ1-1)
CASSLTRRSTEAFF

SEQ ID NO: 730951 - protein, 14 aa, Homo sapiens
  CDR3 for alpha chain variable domain of TCR clone 365476 (TRAV26-1, TRAJ48)
CIVRVDFGNEKLTF

SEQ ID NO: 730952 - protein, 13 aa, Homo sapiens
  CDR3 for beta chain variable domain of TCR clone 365476 (TRBV11-3, TRBJ2-3)
CASSHDTKDTQYF

SEQ ID NO: 730953 - protein, 13 aa, Homo sapiens
  CDR3 for alpha chain variable domain of TCR clone 365477 (TRAV2, TRAJ40)
CAVVTSGTYKYIF

SEQ ID NO: 730954 - protein, 15 aa, Homo sapiens
  CDR3 for beta chain variable domain of TCR clone 365477 (TRBV11-3, TRBJ2-2)
CASSLGGRPTGELFF

SEQ ID NO: 730955 - protein, 14 aa, Homo sapiens
  CDR3 for alpha chain variable domain of TCR clone 365478 (TRAV17, TRAJ40)
CATALTSGTYKYIF

SEQ ID NO: 730956 - protein, 13 aa, Homo sapiens
  CDR3 for beta chain variable domain of TCR clone 365478 (TRBV19, TRBJ2-7)
CASSIDRTYEQYF

SEQ ID NO: 730957 - protein, 15 aa, Homo sapiens
  CDR3 for alpha chain variable domain of TCR clone 365479 (TRAV16, TRAJ12)
CSKWPLRDSSDKLIF

SEQ ID NO: 730958 - protein, 13 aa, Homo sapiens
  CDR3 for beta chain variable domain of TCR clone 365479 (TRBV4-2, TRBJ1-1)
CASSQAGNTEAFF

SEQ ID NO: 730959 - protein, 12 aa, Homo sapiens
  CDR3 for alpha chain variable domain of TCR clone 365480 (TRAV17, TRAJ48)
CALNFGNEKLTF

SEQ ID NO: 730960 - protein, 14 aa, Homo sapiens
  CDR3 for beta chain variable domain of TCR clone 365480 (TRBV27, TRBJ2-1)
CAGSIAETYNEQFF

SEQ ID NO: 730961 - protein, 13 aa, Homo sapiens
  CDR3 for alpha chain variable domain of TCR clone 365481 (TRAV12-2, TRAJ6)
CAARGGGSYIPTF

SEQ ID NO: 730962 - protein, 13 aa, Homo sapiens
  CDR3 for beta chain variable domain of TCR clone 365481 (TRBV6-1, TRBJ1-1)
CASSVTGRLEAFF

SEQ ID NO: 730963 - protein, 22 aa, Homo sapiens
  CDR3 for alpha chain variable domain of TCR clone 365482 (TRAV21, )
CAAILQIPDIQNPDPAVYQLRD

SEQ ID NO: 730964 - protein, 14 aa, Homo sapiens
  CDR3 for beta chain variable domain of TCR clone 365482 (TRBV19, TRBJ2-1)
CASPTFVLSGEQFF

SEQ ID NO: 730965 - protein, 10 aa, Homo sapiens
  CDR3 for alpha chain variable domain of TCR clone 365483 (TRAV23/DV6, TRAJ57)
CAASSTLSQG

SEQ ID NO: 730966 - protein, 16 aa, Homo sapiens
  CDR3 for beta chain variable domain of TCR clone 365483 (TRBV7-3, TRBJ2-1)
CASSKPLAGGYNEQFF

SEQ ID NO: 730967 - protein, 14 aa, Homo sapiens
  CDR3 for alpha chain variable domain of TCR clone 365484 (TRAV13-1, TRAJ44)
CAAKATGTASKLAF

SEQ ID NO: 730968 - protein, 17 aa, Homo sapiens
  CDR3 for beta chain variable domain of TCR clone 365484 (TRBV7-3, TRBJ2-3)
CASSLMKRMRGSDTQYF

SEQ ID NO: 730969 - protein, 14 aa, Homo sapiens
  CDR3 for alpha chain variable domain of TCR clone 365485 (TRAV23/DV6, TRAJ8)
CEASKATGFQKLVF

SEQ ID NO: 730970 - protein, 15 aa, Homo sapiens
  CDR3 for beta chain variable domain of TCR clone 365485 (TRBV28, TRBJ2-3)
CASSPDRQGANTQYF

SEQ ID NO: 730971 - protein, 12 aa, Homo sapiens
  CDR3 for alpha chain variable domain of TCR clone 365486 (TRAV12-3, TRAJ17)
CAMTFTGNKRTF

SEQ ID NO: 730972 - protein, 15 aa, Homo sapiens
  CDR3 for beta chain variable domain of TCR clone 365486 (TRBV20-1, TRBJ2-7)
CSARDRVSGMDEQYF

SEQ ID NO: 730973 - protein, 16 aa, Homo sapiens
  CDR3 for alpha chain variable domain of TCR clone 365487 (TRAV30, TRAJ24)
CGTEFGDADSWGKFQF

SEQ ID NO: 730974 - protein, 14 aa, Homo sapiens
  CDR3 for beta chain variable domain of TCR clone 365487 (TRBV12-5, TRBJ2-5)
CASGSRTHQETQYF

SEQ ID NO: 730975 - protein, 15 aa, Homo sapiens
  CDR3 for alpha chain variable domain of TCR clone 365488 (TRAV17, TRAJ6)
CATDLPSGGSYIPTV

SEQ ID NO: 730976 - protein, 16 aa, Homo sapiens
  CDR3 for beta chain variable domain of TCR clone 365488 (TRBV4-1, TRBJ2-7)
CASSQDPTGYSYEQYF

SEQ ID NO: 730977 - protein, 14 aa, Homo sapiens
  CDR3 for alpha chain variable domain of TCR clone 365489 (TRAV22, TRAJ40)
CAVAPTSGTYKYIF

SEQ ID NO: 730978 - protein, 16 aa, Homo sapiens
  CDR3 for beta chain variable domain of TCR clone 365489 (TRBV5-1, TRBJ2-7)
CASSFATGTALVEQYF

SEQ ID NO: 730979 - protein, 13 aa, Homo sapiens
  CDR3 for alpha chain variable domain of TCR clone 365490 (TRAV1-2, TRAJ12)
CAVSMDSSYKLLF

SEQ ID NO: 730980 - protein, 14 aa, Homo sapiens
  CDR3 for beta chain variable domain of TCR clone 365490 (TRBV19, TRBJ2-1)
CASSSGRDYNEQFF

SEQ ID NO: 730981 - protein, 13 aa, Homo sapiens
  CDR3 for alpha chain variable domain of TCR clone 365491 (TRAV21, TRAJ57)
CAVKEGGSEKLVF

SEQ ID NO: 730982 - protein, 14 aa, Homo sapiens
  CDR3 for beta chain variable domain of TCR clone 365491 (TRBV12-5, TRBJ2-5)
CASGSRTHQETQYF

SEQ ID NO: 730983 - protein, 10 aa, Homo sapiens
  CDR3 for alpha chain variable domain of TCR clone 365492 (TRAV16, TRAJ22)
SAMYLRQLTF

SEQ ID NO: 730984 - protein, 13 aa, Homo sapiens
  CDR3 for beta chain variable domain of TCR clone 365492 (TRBV12-4, TRBJ1-2)
CASSLRQGKGYTF

SEQ ID NO: 730985 - protein, 18 aa, Homo sapiens
  CDR3 for alpha chain variable domain of TCR clone 365493 (TRAV13-1, TRAJ52)
CAAKNPNAGGTSYGKMTF

SEQ ID NO: 730986 - protein, 15 aa, Homo sapiens
  CDR3 for beta chain variable domain of TCR clone 365493 (TRBV2, TRBJ2-2)
CASSRETVGTGELFF

SEQ ID NO: 730987 - protein, 11 aa, Homo sapiens
  CDR3 for alpha chain variable domain of TCR clone 365494 (TRAV16, TRAJ26)
CALTRRSEFCL

SEQ ID NO: 730988 - protein, 16 aa, Homo sapiens
  CDR3 for beta chain variable domain of TCR clone 365494 (TRBV9, TRBJ2-1)
CASSVGGGGNYNEQFF

SEQ ID NO: 730989 - protein, 14 aa, Homo sapiens
  CDR3 for alpha chain variable domain of TCR clone 365495 (TRAV1-2, TRAJ16)
CAVNRFSDGQKLLF

SEQ ID NO: 730990 - protein, 12 aa, Homo sapiens
  CDR3 for beta chain variable domain of TCR clone 365495 (TRBV7-9, TRBJ2-7)
CASSLEGYAQYF

SEQ ID NO: 730991 - protein, 14 aa, Homo sapiens
  CDR3 for alpha chain variable domain of TCR clone 365496 (TRAV9-2, TRAJ39)
CALYIYNAGNMLTF

SEQ ID NO: 730992 - protein, 15 aa, Homo sapiens
  CDR3 for beta chain variable domain of TCR clone 365496 (TRBV3-1, TRBJ2-7)
CASSQAPSGSYEQYF

SEQ ID NO: 730993 - protein, 15 aa, Homo sapiens
  CDR3 for alpha chain variable domain of TCR clone 365497 (TRAV8-3, TRAJ32)
CAVGPYGSATNKLIF

SEQ ID NO: 730994 - protein, 14 aa, Homo sapiens
  CDR3 for beta chain variable domain of TCR clone 365497 (TRBV12-4, TRBJ1-1)
CASSLGTGGTEAFF

SEQ ID NO: 730995 - protein, 14 aa, Homo sapiens
  CDR3 for alpha chain variable domain of TCR clone 365498 (TRAV35, TRAJ33)
CAGSSQDSNYQLIW

SEQ ID NO: 730996 - protein, 12 aa, Homo sapiens
  CDR3 for beta chain variable domain of TCR clone 365498 (TRBV5-5, TRBJ2-5)
CASSYFGETQYF

SEQ ID NO: 730997 - protein, 13 aa, Homo sapiens
  CDR3 for alpha chain variable domain of TCR clone 365499 (TRAV12-2, TRAJ52)
CAVSGTSYGKLRF

SEQ ID NO: 730998 - protein, 16 aa, Homo sapiens
  CDR3 for beta chain variable domain of TCR clone 365499 (TRBV5-7, TRBJ2-7)
CASSPTSGRELDEQYF

SEQ ID NO: 730999 - protein, 12 aa, Homo sapiens
  CDR3 for alpha chain variable domain of TCR clone 365500 (TRAV3, TRAJ43)
CAVRDPNNDMRF

SEQ ID NO: 731000 - protein, 13 aa, Homo sapiens
  CDR3 for beta chain variable domain of TCR clone 365500 (TRBV7-2, TRBJ2-2)
CASSLAVTGELFF

SEQ ID NO: 731001 - protein, 17 aa, Homo sapiens
  CDR3 for alpha chain variable domain of TCR clone 365501 (TRAV17, TRAJ28)
CATDPRRGGAGSYQLIF

SEQ ID NO: 731002 - protein, 16 aa, Homo sapiens
  CDR3 for beta chain variable domain of TCR clone 365501 (TRBV25-1, TRBJ1-1)
CASSGDRDRGRIEAFF

SEQ ID NO: 731003 - protein, 15 aa, Homo sapiens
  CDR3 for alpha chain variable domain of TCR clone 365502 (TRAV12-1, TRAJ44)
CVSDLPTGTASKLTF

SEQ ID NO: 731004 - protein, 16 aa, Homo sapiens
  CDR3 for beta chain variable domain of TCR clone 365502 (TRBV12-5, TRBJ2-5)
CASGPRTSGNQETQYF

SEQ ID NO: 731005 - protein, 14 aa, Homo sapiens
  CDR3 for alpha chain variable domain of TCR clone 365503 (TRAV3, TRAJ40)
CAVRDRRGTYKYIF

SEQ ID NO: 731006 - protein, 15 aa, Homo sapiens
  CDR3 for beta chain variable domain of TCR clone 365503 (TRBV11-1, TRBJ1-3)
CASADPRAFGNTIYF

SEQ ID NO: 731007 - protein, 16 aa, Homo sapiens
  CDR3 for alpha chain variable domain of TCR clone 365504 (TRAV8-3, TRAJ42)
CAVGEGNGGSEGNLIF

SEQ ID NO: 731008 - protein, 14 aa, Homo sapiens
  CDR3 for beta chain variable domain of TCR clone 365504 (TRBV7-2, TRBJ2-1)
CASSRGGARNEQFF

SEQ ID NO: 731009 - protein, 13 aa, Homo sapiens
  CDR3 for alpha chain variable domain of TCR clone 365505 (TRAV12-1, TRAJ38)
CVVPAGNNRKLIW

SEQ ID NO: 731010 - protein, 17 aa, Homo sapiens
  CDR3 for beta chain variable domain of TCR clone 365505 (TRBV4-1, TRBJ2-3)
CTSSQSATGGPVDTQYF

SEQ ID NO: 731011 - protein, 13 aa, Homo sapiens
  CDR3 for alpha chain variable domain of TCR clone 365506 (TRAV12-3, TRAJ13)
CAMSSGGYQKVTF

SEQ ID NO: 731012 - protein, 13 aa, Homo sapiens
  CDR3 for beta chain variable domain of TCR clone 365506 (TRBV20-1, TRBJ1-1)
CSASPGGHTEAVF

SEQ ID NO: 731013 - protein, 14 aa, Homo sapiens
  CDR3 for alpha chain variable domain of TCR clone 365507 (TRAV17, TRAJ12)
CAILPMDSSYKLIF

SEQ ID NO: 731014 - protein, 15 aa, Homo sapiens
  CDR3 for beta chain variable domain of TCR clone 365507 (TRBV5-1, TRBJ1-1)
CARSLGEGENTEAFF

SEQ ID NO: 731015 - protein, 13 aa, Homo sapiens
  CDR3 for alpha chain variable domain of TCR clone 365508 (TRAV13-1, TRAJ39)
CSKYSNAGNMLTF

SEQ ID NO: 731016 - protein, 14 aa, Homo sapiens
  CDR3 for beta chain variable domain of TCR clone 365508 (TRBV2, TRBJ1-6)
CALSPSDPRSPLHF

SEQ ID NO: 731017 - protein, 13 aa, Homo sapiens
  CDR3 for alpha chain variable domain of TCR clone 365509 (TRAV1-2, TRAJ9)
CAALNTGGFKTIF

SEQ ID NO: 731018 - protein, 15 aa, Homo sapiens
  CDR3 for beta chain variable domain of TCR clone 365509 (TRBV28, TRBJ2-7)
CASKKPSGRAYEQYF

SEQ ID NO: 731019 - protein, 11 aa, Homo sapiens
  CDR3 for alpha chain variable domain of TCR clone 365510 (TRAV12-2, TRAJ36)
CAVDGANNLFF

SEQ ID NO: 731020 - protein, 13 aa, Homo sapiens
  CDR3 for beta chain variable domain of TCR clone 365510 (TRBV28, TRBJ2-5)
CAGVNRGEETQYF

SEQ ID NO: 731021 - protein, 14 aa, Homo sapiens
  CDR3 for alpha chain variable domain of TCR clone 365511 (TRAV12-2, TRAJ40)
CAVKIPSGVYKYIF

SEQ ID NO: 731022 - protein, 14 aa, Homo sapiens
  CDR3 for beta chain variable domain of TCR clone 365511 (TRBV20-1, TRBJ1-1)
CSAQTWIGGTEAFF

SEQ ID NO: 731023 - protein, 16 aa, Homo sapiens
  CDR3 for alpha chain variable domain of TCR clone 365512 (TRAV30, TRAJ24)
CGTEIVDPASWGKFQF

SEQ ID NO: 731024 - protein, 19 aa, Homo sapiens
  CDR3 for beta chain variable domain of TCR clone 365512 (TRBV25-1, TRBJ2-2)
CAILVYRVDRGRKTGELFF

SEQ ID NO: 731025 - protein, 13 aa, Homo sapiens
  CDR3 for alpha chain variable domain of TCR clone 365513 (TRAV13-1, TRAJ39)
CSKYSNAGNMLTF

SEQ ID NO: 731026 - protein, 15 aa, Homo sapiens
  CDR3 for beta chain variable domain of TCR clone 365513 (TRBV7-9, TRBJ1-5)
CASSQGHQPNQPQHF

SEQ ID NO: 731027 - protein, 12 aa, Homo sapiens
  CDR3 for alpha chain variable domain of TCR clone 365514 (TRAV17, TRAJ20)
CATQSNDYKLSF

SEQ ID NO: 731028 - protein, 13 aa, Homo sapiens
  CDR3 for beta chain variable domain of TCR clone 365514 (TRBV10-3, TRBJ1-1)
CAIIPEGGTEDFF

SEQ ID NO: 731029 - protein, 14 aa, Homo sapiens
  CDR3 for alpha chain variable domain of TCR clone 365515 (TRAV35, TRAJ22)
CAGLRPGSARQLTF

SEQ ID NO: 731030 - protein, 16 aa, Homo sapiens
  CDR3 for beta chain variable domain of TCR clone 365515 (TRBV4-2, TRBJ2-7)
CASSQDGVERGYEQYF

SEQ ID NO: 731031 - protein, 12 aa, Homo sapiens
  CDR3 for alpha chain variable domain of TCR clone 365516 (TRAV12-3, TRAJ40)
CAMSSGTYKYIF

SEQ ID NO: 731032 - protein, 15 aa, Homo sapiens
  CDR3 for beta chain variable domain of TCR clone 365516 (TRBV18, TRBJ1-1)
CASSPRQGENTEAFF

SEQ ID NO: 731033 - protein, 15 aa, Homo sapiens
  CDR3 for alpha chain variable domain of TCR clone 365517 (TRAV10, TRAJ6)
CVVRPRTAGSYIPTF

SEQ ID NO: 731034 - protein, 15 aa, Homo sapiens
  CDR3 for beta chain variable domain of TCR clone 365517 (TRBV20-1, TRBJ2-7)
CSARDRVSGMDEQYF

SEQ ID NO: 731035 - protein, 13 aa, Homo sapiens
  CDR3 for alpha chain variable domain of TCR clone 365518 (TRAV12-1, TRAJ10)
CVVSTGGGNKLTF

SEQ ID NO: 731036 - protein, 16 aa, Homo sapiens
  CDR3 for beta chain variable domain of TCR clone 365518 (TRBV12-4, TRBJ1-5)
RASSRPVGGSNQPQHF

SEQ ID NO: 731037 - protein, 14 aa, Homo sapiens
  CDR3 for alpha chain variable domain of TCR clone 365519 (TRAV2, TRAJ29)
CAGPFQYGNTPLVF

SEQ ID NO: 731038 - protein, 11 aa, Homo sapiens
  CDR3 for beta chain variable domain of TCR clone 365519 (TRBV29-1, TRBJ2-5)
CSEDRAGTQYF

SEQ ID NO: 731039 - protein, 11 aa, Homo sapiens
  CDR3 for alpha chain variable domain of TCR clone 365520 (TRAV17, TRAJ9)
CATTGGFKTIF

SEQ ID NO: 731040 - protein, 16 aa, Homo sapiens
  CDR3 for beta chain variable domain of TCR clone 365520 (TRBV4-2, TRBJ1-1)
CASSQAGFGMNTEAFF

SEQ ID NO: 731041 - protein, 16 aa, Homo sapiens
  CDR3 for alpha chain variable domain of TCR clone 365521 (TRAV30, TRAJ24)
CGTEIVDADSWGKFQF

SEQ ID NO: 731042 - protein, 14 aa, Homo sapiens
  CDR3 for beta chain variable domain of TCR clone 365521 (TRBV19, TRBJ1-1)
CASRRGQGNTEAFF

SEQ ID NO: 731043 - protein, 16 aa, Homo sapiens
  CDR3 for alpha chain variable domain of TCR clone 365522 (TRAV2, TRAJ13)
CAARILGVTRKLPLEL

SEQ ID NO: 731044 - protein, 14 aa, Homo sapiens
  CDR3 for beta chain variable domain of TCR clone 365522 (TRBV12-4, TRBJ2-7)
CASSILGVAYEQYF

SEQ ID NO: 731045 - protein, 15 aa, Homo sapiens
  CDR3 for alpha chain variable domain of TCR clone 365523 (TRAV3, TRAJ22)
CAVRDRGGFARQLTF

SEQ ID NO: 731046 - protein, 15 aa, Homo sapiens
  CDR3 for beta chain variable domain of TCR clone 365523 (TRBV19, TRBJ2-5)
CASSIVRASQETQYF

SEQ ID NO: 731047 - protein, 15 aa, Homo sapiens
  CDR3 for alpha chain variable domain of TCR clone 365524 (TRAV8-4, TRAJ9)
CAASDLEGGGFKTIF

SEQ ID NO: 731048 - protein, 14 aa, Homo sapiens
  CDR3 for beta chain variable domain of TCR clone 365524 (TRBV12-5, TRBJ2-5)
CASGSRTHQETQYF

SEQ ID NO: 731049 - protein, 13 aa, Homo sapiens
  CDR3 for alpha chain variable domain of TCR clone 365525 (TRAV22, TRAJ29)
CAVGGSGNTPLVF

SEQ ID NO: 731050 - protein, 13 aa, Homo sapiens
  CDR3 for beta chain variable domain of TCR clone 365525 (TRBV4-2, TRBJ1-1)
CASSQARNTEAFF

SEQ ID NO: 731051 - protein, 11 aa, Homo sapiens
  CDR3 for alpha chain variable domain of TCR clone 365526 (TRAV27, TRAJ40)
SLTSGTYKYIF

SEQ ID NO: 731052 - protein, 12 aa, Homo sapiens
  CDR3 for beta chain variable domain of TCR clone 365526 (TRBV18, TRBJ2-3)
CQVNQNTDTQYF

SEQ ID NO: 731053 - protein, 12 aa, Homo sapiens
  CDR3 for alpha chain variable domain of TCR clone 365527 (TRAV8-3, TRAJ20)
CAVGANDYKLSF

SEQ ID NO: 731054 - protein, 16 aa, Homo sapiens
  CDR3 for beta chain variable domain of TCR clone 365527 (TRBV19, TRBJ2-2)
CDRRSPGTGATGELFF

SEQ ID NO: 731055 - protein, 16 aa, Homo sapiens
  CDR3 for alpha chain variable domain of TCR clone 365528 (TRAV20, TRAJ22)
CAVQASSSGSARQLTF

SEQ ID NO: 731056 - protein, 16 aa, Homo sapiens
  CDR3 for beta chain variable domain of TCR clone 365528 (TRBV20-1, TRBJ1-5)
CSASRGTGYSNQPQHV

SEQ ID NO: 731057 - protein, 15 aa, Homo sapiens
  CDR3 for alpha chain variable domain of TCR clone 365529 (TRAV1-2, TRAJ16)
CAVRARFSDGQKLLF

SEQ ID NO: 731058 - protein, 19 aa, Homo sapiens
  CDR3 for beta chain variable domain of TCR clone 365529 (TRBV11-3, TRBJ2-3)
CASGFGISGGPRGGGTQYF

SEQ ID NO: 731059 - protein, 14 aa, Homo sapiens
  CDR3 for alpha chain variable domain of TCR clone 365530 (TRAV12-3, TRAJ42)
CAMNYGGSQGNLIF

SEQ ID NO: 731060 - protein, 13 aa, Homo sapiens
  CDR3 for beta chain variable domain of TCR clone 365530 (TRBV19, TRBJ2-2)
CASQEGIHGELFF

SEQ ID NO: 731061 - protein, 17 aa, Homo sapiens
  CDR3 for alpha chain variable domain of TCR clone 365531 (TRAV12-2, TRAJ36)
CAVKENLFFGTGTSLTV

SEQ ID NO: 731062 - protein, 15 aa, Homo sapiens
  CDR3 for beta chain variable domain of TCR clone 365531 (TRBV28, TRBJ2-2)
CASTVAGANTGELFF

SEQ ID NO: 731063 - protein, 17 aa, Homo sapiens
  CDR3 for alpha chain variable domain of TCR clone 365532 (TRAV3, TRAJ6)
CAVRDGPRAGGSYIPTC

SEQ ID NO: 731064 - protein, 16 aa, Homo sapiens
  CDR3 for beta chain variable domain of TCR clone 365532 (TRBV28, TRBJ1-4)
CASSPPYRGRSEKLFF

SEQ ID NO: 731065 - protein, 12 aa, Homo sapiens
  CDR3 for alpha chain variable domain of TCR clone 365533 (TRAV16, TRAJ27)
CALNTNAGKSTF

SEQ ID NO: 731066 - protein, 15 aa, Homo sapiens
  CDR3 for beta chain variable domain of TCR clone 365533 (TRBV13, TRBJ1-2)
CASSLGRQPGYGYTF

SEQ ID NO: 731067 - protein, 14 aa, Homo sapiens
  CDR3 for alpha chain variable domain of TCR clone 365534 (TRAV3, TRAJ40)
CAVIDRRGTYKYIF

SEQ ID NO: 731068 - protein, 15 aa, Homo sapiens
  CDR3 for beta chain variable domain of TCR clone 365534 (TRBV28, TRBJ2-1)
CASSIIAGGRSEQFF

SEQ ID NO: 731069 - protein, 14 aa, Homo sapiens
  CDR3 for alpha chain variable domain of TCR clone 365535 (TRAV1-2, TRAJ16)
CAVNRFSDGQKLLF

SEQ ID NO: 731070 - protein, 13 aa, Homo sapiens
  CDR3 for beta chain variable domain of TCR clone 365535 (TRBV7-3, TRBJ2-3)
CASSDQIGETQYF

SEQ ID NO: 731071 - protein, 14 aa, Homo sapiens
  CDR3 for alpha chain variable domain of TCR clone 365536 (TRAV1-1, TRAJ11)
CDRIMNSGYSTLTF

SEQ ID NO: 731072 - protein, 16 aa, Homo sapiens
  CDR3 for beta chain variable domain of TCR clone 365536 (TRBV6-5, TRBJ1-6)
CASSYSGESYNSPLLF

SEQ ID NO: 731073 - protein, 18 aa, Homo sapiens
  CDR3 for alpha chain variable domain of TCR clone 365537 (TRAV21, TRAJ52)
CAVRPSPAGGTNYGKLTF

SEQ ID NO: 731074 - protein, 13 aa, Homo sapiens
  CDR3 for beta chain variable domain of TCR clone 365537 (TRBV20-1, TRBJ1-1)
CSARVGGNTEAFF

SEQ ID NO: 731075 - protein, 13 aa, Homo sapiens
  CDR3 for alpha chain variable domain of TCR clone 365538 (TRAV2, TRAJ29)
CAVYSSGNIPLVF

SEQ ID NO: 731076 - protein, 14 aa, Homo sapiens
  CDR3 for beta chain variable domain of TCR clone 365538 (TRBV7-9, TRBJ1-1)
CASSLGGLKTEAFF

SEQ ID NO: 731077 - protein, 13 aa, Homo sapiens
  CDR3 for alpha chain variable domain of TCR clone 365539 (TRAV12-1, TRAJ29)
CVVDTSGNTPLVF

SEQ ID NO: 731078 - protein, 14 aa, Homo sapiens
  CDR3 for beta chain variable domain of TCR clone 365539 (TRBV12-4, TRBJ2-3)
CASSLVPSTDTQYV

SEQ ID NO: 731079 - protein, 11 aa, Homo sapiens
  CDR3 for alpha chain variable domain of TCR clone 365540 (TRAV2, TRAJ13)
CASGGYQKVTF

SEQ ID NO: 731080 - protein, 14 aa, Homo sapiens
  CDR3 for beta chain variable domain of TCR clone 365540 (TRBV2, TRBJ1-5)
CASSGTVSNQPQHF

SEQ ID NO: 731081 - protein, 14 aa, Homo sapiens
  CDR3 for alpha chain variable domain of TCR clone 365541 (TRAV16, TRAJ33)
CALAAMDSNYQLIW

SEQ ID NO: 731082 - protein, 12 aa, Homo sapiens
  CDR3 for beta chain variable domain of TCR clone 365541 (TRBV5-1, TRBJ1-2)
CASSQDTYGYTF

SEQ ID NO: 731083 - protein, 15 aa, Homo sapiens
  CDR3 for alpha chain variable domain of TCR clone 365542 (TRAV17, TRAJ22)
CATVAPSGSARQLTF

SEQ ID NO: 731084 - protein, 16 aa, Homo sapiens
  CDR3 for beta chain variable domain of TCR clone 365542 (TRBV10-3, TRBJ2-7)
CAISAGFADRPYEQYF

SEQ ID NO: 731085 - protein, 15 aa, Homo sapiens
  CDR3 for alpha chain variable domain of TCR clone 365543 (TRAV17, TRAJ52)
CATEAGGTSYGTLTF

SEQ ID NO: 731086 - protein, 14 aa, Homo sapiens
  CDR3 for beta chain variable domain of TCR clone 365543 (TRBV28, TRBJ1-5)
CASSLWVLVKPQHF

SEQ ID NO: 731087 - protein, 11 aa, Homo sapiens
  CDR3 for alpha chain variable domain of TCR clone 365544 (TRAV12-1, TRAJ34)
CVVNKGRELIS

SEQ ID NO: 731088 - protein, 15 aa, Homo sapiens
  CDR3 for beta chain variable domain of TCR clone 365544 (TRBV10-3, TRBJ2-1)
CAIRNGTSGHNEQFF

SEQ ID NO: 731089 - protein, 13 aa, Homo sapiens
  CDR3 for alpha chain variable domain of TCR clone 365545 (TRAV20, TRAJ21)
CAVQSMEFNKFYF

SEQ ID NO: 731090 - protein, 13 aa, Homo sapiens
  CDR3 for beta chain variable domain of TCR clone 365545 (TRBV7-9, TRBJ1-2)
CASSLKQNYGYTF

SEQ ID NO: 731091 - protein, 13 aa, Homo sapiens
  CDR3 for alpha chain variable domain of TCR clone 365546 (TRAV35, TRAJ36)
CAGPRIAANNLFF

SEQ ID NO: 731092 - protein, 15 aa, Homo sapiens
  CDR3 for beta chain variable domain of TCR clone 365546 (TRBV28, TRBJ2-5)
CASSPPWSYQETQYF

SEQ ID NO: 731093 - protein, 15 aa, Homo sapiens
  CDR3 for alpha chain variable domain of TCR clone 365547 (TRAV3, TRAJ3)
CAVRGRDSSASKIIF

SEQ ID NO: 731094 - protein, 15 aa, Homo sapiens
  CDR3 for beta chain variable domain of TCR clone 365547 (TRBV19, TRBJ2-1)
CASSSPGVPLDEQFF

SEQ ID NO: 731095 - protein, 12 aa, Homo sapiens
  CDR3 for alpha chain variable domain of TCR clone 365548 (TRAV12-3, TRAJ17)
CAMTLTGNKITF

SEQ ID NO: 731096 - protein, 11 aa, Homo sapiens
  CDR3 for beta chain variable domain of TCR clone 365548 (TRBV29-1, TRBJ2-5)
CSEDRTGTQYF

SEQ ID NO: 731097 - protein, 16 aa, Homo sapiens
  CDR3 for alpha chain variable domain of TCR clone 365549 (TRAV30, TRAJ24)
CGTEIVDADSWGQFQF

SEQ ID NO: 731098 - protein, 16 aa, Homo sapiens
  CDR3 for beta chain variable domain of TCR clone 365549 (TRBV6-3, TRBJ1-1)
CASTDLGTVPNTEAFF

SEQ ID NO: 731099 - protein, 14 aa, Homo sapiens
  CDR3 for alpha chain variable domain of TCR clone 365550 (TRAV12-2, TRAJ13)
CAVKKTGGDQKVTF

SEQ ID NO: 731100 - protein, 13 aa, Homo sapiens
  CDR3 for beta chain variable domain of TCR clone 365550 (TRBV20-1, TRBJ1-1)
CSARGGGNTEAFF

SEQ ID NO: 731101 - protein, 11 aa, Homo sapiens
  CDR3 for alpha chain variable domain of TCR clone 365551 (TRAV3, TRAJ21)
CAVGNFNKFSF

SEQ ID NO: 731102 - protein, 14 aa, Homo sapiens
  CDR3 for beta chain variable domain of TCR clone 365551 (TRBV29-1, TRBJ2-2)
CSGRGSGNTGELFF

SEQ ID NO: 731103 - protein, 15 aa, Homo sapiens
  CDR3 for alpha chain variable domain of TCR clone 365552 (TRAV3, TRAJ13)
CAVRDIAGGYQKVTF

SEQ ID NO: 731104 - protein, 12 aa, Homo sapiens
  CDR3 for beta chain variable domain of TCR clone 365552 (TRBV11-2, TRBJ2-2)
CASSLGGGELFF

SEQ ID NO: 731105 - protein, 15 aa, Homo sapiens
  CDR3 for alpha chain variable domain of TCR clone 365553 (TRAV3, TRAJ20)
CAVKDSRSNDYKLSF

SEQ ID NO: 731106 - protein, 14 aa, Homo sapiens
  CDR3 for beta chain variable domain of TCR clone 365553 (TRBV20-1, TRBJ2-7)
CSARRVNGIYEQYF

SEQ ID NO: 731107 - protein, 13 aa, Homo sapiens
  CDR3 for alpha chain variable domain of TCR clone 365554 (TRAV21, TRAJ27)
CAARPGTAGRSTF

SEQ ID NO: 731108 - protein, 14 aa, Homo sapiens
  CDR3 for beta chain variable domain of TCR clone 365554 (TRBV7-6, TRBJ2-3)
CASSLGTVTDTQYF

SEQ ID NO: 731109 - protein, 18 aa, Homo sapiens
  CDR3 for alpha chain variable domain of TCR clone 365555 (TRAV21, TRAJ52)
CAVRPSPAGGTSYGQLTF

SEQ ID NO: 731110 - protein, 17 aa, Homo sapiens
  CDR3 for beta chain variable domain of TCR clone 365555 (TRBV13, TRBJ2-3)
CASSRSRVAGGRNTQYF

SEQ ID NO: 731111 - protein, 13 aa, Homo sapiens
  CDR3 for alpha chain variable domain of TCR clone 365556 (TRAV20, TRAJ29)
CAVQAVGNTPLVF

SEQ ID NO: 731112 - protein, 15 aa, Homo sapiens
  CDR3 for beta chain variable domain of TCR clone 365556 (TRBV10-2, TRBJ2-5)
CASRGRGGPQETQYF

SEQ ID NO: 731113 - protein, 13 aa, Homo sapiens
  CDR3 for alpha chain variable domain of TCR clone 365557 (TRAV29/DV5, TRAJ31)
CAASRNNNARLMF

SEQ ID NO: 731114 - protein, 13 aa, Homo sapiens
  CDR3 for beta chain variable domain of TCR clone 365557 (TRBV7-2, TRBJ2-4)
CASSWEHANMQYF

SEQ ID NO: 731115 - protein, 15 aa, Homo sapiens
  CDR3 for alpha chain variable domain of TCR clone 365558 (TRAV26-1, TRAJ17)
CIVRVVKAAGNKLTF

SEQ ID NO: 731116 - protein, 14 aa, Homo sapiens
  CDR3 for beta chain variable domain of TCR clone 365558 (TRBV19, TRBJ2-1)
CASPTFVLSGEQFF

SEQ ID NO: 731117 - protein, 14 aa, Homo sapiens
  CDR3 for alpha chain variable domain of TCR clone 365559 (TRAV2, TRAJ37)
CAVDFTSNTGKLIF

SEQ ID NO: 731118 - protein, 15 aa, Homo sapiens
  CDR3 for beta chain variable domain of TCR clone 365559 (TRBV20-1, TRBJ1-1)
CSASRGVTGNIEAFF

SEQ ID NO: 731119 - protein, 12 aa, Homo sapiens
  CDR3 for alpha chain variable domain of TCR clone 365560 (TRAV1-1, TRAJ9)
CAVDTGGFKAIF

SEQ ID NO: 731120 - protein, 15 aa, Homo sapiens
  CDR3 for beta chain variable domain of TCR clone 365560 (TRBV6-3, TRBJ2-7)
CASSSPGTVFYEQYF

SEQ ID NO: 731121 - protein, 17 aa, Homo sapiens
  CDR3 for alpha chain variable domain of TCR clone 365561 (TRAV38-1, TRAJ45)
CAFMKHYMGGGADGRTF

SEQ ID NO: 731122 - protein, 13 aa, Homo sapiens
  CDR3 for beta chain variable domain of TCR clone 365561 (TRBV2, TRBJ1-4)
CASSERAGEKLFF

SEQ ID NO: 731123 - protein, 15 aa, Homo sapiens
  CDR3 for alpha chain variable domain of TCR clone 365562 (TRAV4, TRAJ18)
CVLLIGGSTLGRLYF

SEQ ID NO: 731124 - protein, 15 aa, Homo sapiens
  CDR3 for beta chain variable domain of TCR clone 365562 (TRBV5-1, TRBJ2-7)
CASSLGDFTTYEQYF

SEQ ID NO: 731125 - protein, 12 aa, Homo sapiens
  CDR3 for alpha chain variable domain of TCR clone 365563 (TRAV13-1, TRAJ15)
CAANQAGTALIF

SEQ ID NO: 731126 - protein, 13 aa, Homo sapiens
  CDR3 for beta chain variable domain of TCR clone 365563 (TRBV11-3, TRBJ1-1)
CASSLGGNTEAFF

SEQ ID NO: 731127 - protein, 11 aa, Homo sapiens
  CDR3 for alpha chain variable domain of TCR clone 365564 (TRAV2, TRAJ33)
CAVDSNYQLIW

SEQ ID NO: 731128 - protein, 15 aa, Homo sapiens
  CDR3 for beta chain variable domain of TCR clone 365564 (TRBV19, TRBJ1-2)
CASSAGQVLNYGYTS

SEQ ID NO: 731129 - protein, 15 aa, Homo sapiens
  CDR3 for alpha chain variable domain of TCR clone 365565 (TRAV26-1, TRAJ29)
CIVRVEGSGNTPLVF

SEQ ID NO: 731130 - protein, 14 aa, Homo sapiens
  CDR3 for beta chain variable domain of TCR clone 365565 (TRBV11-2, TRBJ2-5)
CASKPLAGRETQYF

SEQ ID NO: 731131 - protein, 13 aa, Homo sapiens
  CDR3 for alpha chain variable domain of TCR clone 365566 (TRAV8-6, TRAJ16)
CAVSSPDGQKLLF

SEQ ID NO: 731132 - protein, 16 aa, Homo sapiens
  CDR3 for beta chain variable domain of TCR clone 365566 (TRBV5-7, TRBJ2-3)
CASSSLGCAITDTQYF

SEQ ID NO: 731133 - protein, 14 aa, Homo sapiens
  CDR3 for alpha chain variable domain of TCR clone 365567 (TRAV8-3, TRAJ20)
CAVGTRGNDYKLSF

SEQ ID NO: 731134 - protein, 11 aa, Homo sapiens
  CDR3 for beta chain variable domain of TCR clone 365567 (TRBV10-3, TRBJ2-2)
CATKGTGELFF

SEQ ID NO: 731135 - protein, 13 aa, Homo sapiens
  CDR3 for alpha chain variable domain of TCR clone 365568 (TRAV13-1, TRAJ43)
CAASKNNNNDMRF

SEQ ID NO: 731136 - protein, 16 aa, Homo sapiens
  CDR3 for beta chain variable domain of TCR clone 365568 (TRBV10-3, TRBJ2-7)
CAISADFADRPYEQYF

SEQ ID NO: 731137 - protein, 15 aa, Homo sapiens
  CDR3 for alpha chain variable domain of TCR clone 365569 (TRAV30, TRAJ32)
CGTEILGGATNKLIF

SEQ ID NO: 731138 - protein, 13 aa, Homo sapiens
  CDR3 for beta chain variable domain of TCR clone 365569 (TRBV24-1, TRBJ2-1)
CATSAGPYNEQFF

SEQ ID NO: 731139 - protein, 15 aa, Homo sapiens
  CDR3 for alpha chain variable domain of TCR clone 365570 (TRAV8-3, TRAJ11)
CAVGLLNSGYSTLPF

SEQ ID NO: 731140 - protein, 16 aa, Homo sapiens
  CDR3 for beta chain variable domain of TCR clone 365570 (TRBV7-9, TRBJ1-2)
CASSLGFSSGEDGYTL

SEQ ID NO: 731141 - protein, 11 aa, Homo sapiens
  CDR3 for alpha chain variable domain of TCR clone 365571 (TRAV22, TRAJ20)
CCGGNDYKLSF

SEQ ID NO: 731142 - protein, 13 aa, Homo sapiens
  CDR3 for beta chain variable domain of TCR clone 365571 (TRBV9, TRBJ1-1)
CASSVGTGTEAFF

SEQ ID NO: 731143 - protein, 14 aa, Homo sapiens
  CDR3 for alpha chain variable domain of TCR clone 365572 (TRAV29/DV5, TRAJ34)
CAASASRETDELIF

SEQ ID NO: 731144 - protein, 15 aa, Homo sapiens
  CDR3 for beta chain variable domain of TCR clone 365572 (TRBV7-8, TRBJ2-7)
CASSLERAGSYEQYF

SEQ ID NO: 731145 - protein, 13 aa, Homo sapiens
  CDR3 for alpha chain variable domain of TCR clone 365573 (TRAV12-3, TRAJ33)
CAMSVNSNYQLIW

SEQ ID NO: 731146 - protein, 11 aa, Homo sapiens
  CDR3 for beta chain variable domain of TCR clone 365573 (TRBV7-3, TRBJ2-5)
CVSSLSETQYF

SEQ ID NO: 731147 - protein, 15 aa, Homo sapiens
  CDR3 for alpha chain variable domain of TCR clone 365574 (TRAV25, TRAJ53)
CAATGGGGSNYKLTF

SEQ ID NO: 731148 - protein, 16 aa, Homo sapiens
  CDR3 for beta chain variable domain of TCR clone 365574 (TRBV2, TRBJ2-3)
CASSTSVEGVTDTQYF

SEQ ID NO: 731149 - protein, 18 aa, Homo sapiens
  CDR3 for alpha chain variable domain of TCR clone 365575 (TRAV26-1, TRAJ52)
CIVRVEGAGGTSYGKLTF

SEQ ID NO: 731150 - protein, 12 aa, Homo sapiens
  CDR3 for beta chain variable domain of TCR clone 365575 (TRBV7-3, TRBJ1-2)
CQQLKGGYGYTF

SEQ ID NO: 731151 - protein, 11 aa, Homo sapiens
  CDR3 for alpha chain variable domain of TCR clone 365576 (TRAV3, TRAJ21)
CAVGNFNKFYF

SEQ ID NO: 731152 - protein, 15 aa, Homo sapiens
  CDR3 for beta chain variable domain of TCR clone 365576 (TRBV5-1, TRBJ2-1)
CASSLVANSYNEHFF

SEQ ID NO: 731153 - protein, 15 aa, Homo sapiens
  CDR3 for alpha chain variable domain of TCR clone 365577 (TRAV12-1, TRAJ44)
CVVFVNTGTASKLTF

SEQ ID NO: 731154 - protein, 17 aa, Homo sapiens
  CDR3 for beta chain variable domain of TCR clone 365577 (TRBV7-8, TRBJ2-6)
CARSAGTGGAGASVLTF

SEQ ID NO: 731155 - protein, 21 aa, Homo sapiens
  CDR3 for alpha chain variable domain of TCR clone 365578 (TRAV1-2, TRAJ37)
CLLPLCCERFHGSGHTGKLIF

SEQ ID NO: 731156 - protein, 14 aa, Homo sapiens
  CDR3 for beta chain variable domain of TCR clone 365578 (TRBV2, TRBJ2-5)
CASSEVLAQETQYF

SEQ ID NO: 731157 - protein, 15 aa, Homo sapiens
  CDR3 for alpha chain variable domain of TCR clone 365579 (TRAV12-2, TRAJ43)
CAFDMRFGAGARLTV

SEQ ID NO: 731158 - protein, 13 aa, Homo sapiens
  CDR3 for beta chain variable domain of TCR clone 365579 (TRBV24-1, TRBJ2-2)
CATSDWSTGELFF

SEQ ID NO: 731159 - protein, 14 aa, Homo sapiens
  CDR3 for alpha chain variable domain of TCR clone 365580 (TRAV17, TRAJ29)
CATDSNSGNTPLVF

SEQ ID NO: 731160 - protein, 16 aa, Homo sapiens
  CDR3 for beta chain variable domain of TCR clone 365580 (TRBV13, TRBJ2-2)
CASSPRTGEHTGELFF

SEQ ID NO: 731161 - protein, 16 aa, Homo sapiens
  CDR3 for alpha chain variable domain of TCR clone 365581 (TRAV26-1, TRAJ53)
CIVRVALGGSNYKLTF

SEQ ID NO: 731162 - protein, 14 aa, Homo sapiens
  CDR3 for beta chain variable domain of TCR clone 365581 (TRBV7-3, TRBJ2-7)
CASSLSGVSYEQYF

SEQ ID NO: 731163 - protein, 13 aa, Homo sapiens
  CDR3 for alpha chain variable domain of TCR clone 365582 (TRAV8-1, TRAJ30)
CAVIMNRDDKIIF

SEQ ID NO: 731164 - protein, 17 aa, Homo sapiens
  CDR3 for beta chain variable domain of TCR clone 365582 (TRBV11-2, TRBJ2-1)
CASSLYPPGVEYNEQVF

SEQ ID NO: 731165 - protein, 12 aa, Homo sapiens
  CDR3 for alpha chain variable domain of TCR clone 365583 (TRAV17, TRAJ53)
CATEGSNYKLTL

SEQ ID NO: 731166 - protein, 19 aa, Homo sapiens
  CDR3 for beta chain variable domain of TCR clone 365583 (TRBV5-1, TRBJ2-3)
CASSLWTSGGITTPDTQYF

SEQ ID NO: 731167 - protein, 15 aa, Homo sapiens
  CDR3 for alpha chain variable domain of TCR clone 365584 (TRAV20, TRAJ41)
CAVQANSNSGYALNF

SEQ ID NO: 731168 - protein, 15 aa, Homo sapiens
  CDR3 for beta chain variable domain of TCR clone 365584 (TRBV18, TRBJ2-1)
CASSPPSASYNEQFF

SEQ ID NO: 731169 - protein, 16 aa, Homo sapiens
  CDR3 for alpha chain variable domain of TCR clone 365585 (TRAV12-2, TRAJ43)
CAGDDMRFGAGTRLTV

SEQ ID NO: 731170 - protein, 18 aa, Homo sapiens
  CDR3 for beta chain variable domain of TCR clone 365585 (TRBV2, TRBJ2-4)
CASSEAPGGDKTFSTSAP

SEQ ID NO: 731171 - protein, 10 aa, Homo sapiens
  CDR3 for alpha chain variable domain of TCR clone 365586 (TRAV30, TRAJ48)
CGIGNEKLTF

SEQ ID NO: 731172 - protein, 14 aa, Homo sapiens
  CDR3 for beta chain variable domain of TCR clone 365586 (TRBV7-6, TRBJ2-3)
GASSVAGGTDTQYF

SEQ ID NO: 731173 - protein, 13 aa, Homo sapiens
  CDR3 for alpha chain variable domain of TCR clone 365587 (TRAV35, TRAJ44)
CAGLSGTASKLTF

SEQ ID NO: 731174 - protein, 14 aa, Homo sapiens
  CDR3 for beta chain variable domain of TCR clone 365587 (TRBV5-1, TRBJ2-7)
CASSRGESLYEQYF

SEQ ID NO: 731175 - protein, 11 aa, Homo sapiens
  CDR3 for alpha chain variable domain of TCR clone 365588 (TRAV21, TRAJ48)
CAVDGNEKLTF

SEQ ID NO: 731176 - protein, 14 aa, Homo sapiens
  CDR3 for beta chain variable domain of TCR clone 365588 (TRBV12-5, TRBJ2-5)
CASGSRTHQETQYF

SEQ ID NO: 731177 - protein, 13 aa, Homo sapiens
  CDR3 for alpha chain variable domain of TCR clone 365589 (TRAV12-3, TRAJ13)
CAMTSGGYQKVTF

SEQ ID NO: 731178 - protein, 13 aa, Homo sapiens
  CDR3 for beta chain variable domain of TCR clone 365589 (TRBV20-1, TRBJ2-2)
FSALSGGAGELFF

SEQ ID NO: 731179 - protein, 17 aa, Homo sapiens
  CDR3 for alpha chain variable domain of TCR clone 365590 (TRAV3, TRAJ6)
CAVRDGPRAGGSYILTF

SEQ ID NO: 731180 - protein, 16 aa, Homo sapiens
  CDR3 for beta chain variable domain of TCR clone 365590 (TRBV5-1, TRBJ2-2)
CASSSYREGDTGELFF

SEQ ID NO: 731181 - protein, 13 aa, Homo sapiens
  CDR3 for alpha chain variable domain of TCR clone 365591 (TRAV12-1, TRAJ31)
CVVIPNNNARLMF

SEQ ID NO: 731182 - protein, 13 aa, Homo sapiens
  CDR3 for beta chain variable domain of TCR clone 365591 (TRBV11-2, TRBJ2-5)
CASSSTGEETQYF

SEQ ID NO: 731183 - protein, 14 aa, Homo sapiens
  CDR3 for alpha chain variable domain of TCR clone 365592 (TRAV16, TRAJ3)
CALSQYSSASKIIF

SEQ ID NO: 731184 - protein, 13 aa, Homo sapiens
  CDR3 for beta chain variable domain of TCR clone 365592 (TRBV10-3, TRBJ2-7)
CAISEKGGYEQYF

SEQ ID NO: 731185 - protein, 13 aa, Homo sapiens
  CDR3 for alpha chain variable domain of TCR clone 365593 (TRAV35, TRAJ35)
CAGTNALGMCCIA

SEQ ID NO: 731186 - protein, 13 aa, Homo sapiens
  CDR3 for beta chain variable domain of TCR clone 365593 (TRBV19, TRBJ2-7)
CAGSAGHGYEQYF

SEQ ID NO: 731187 - protein, 15 aa, Homo sapiens
  CDR3 for alpha chain variable domain of TCR clone 365594 (TRAV12-1, TRAJ45)
CVVLSGGGGADGLTF

SEQ ID NO: 731188 - protein, 16 aa, Homo sapiens
  CDR3 for beta chain variable domain of TCR clone 365594 (TRBV29-1, TRBJ2-7)
CSVEVVGTSGIYEQYF

SEQ ID NO: 731189 - protein, 15 aa, Homo sapiens
  CDR3 for alpha chain variable domain of TCR clone 365595 (TRAV3, TRAJ22)
CAVRDRGGSARQLTF

SEQ ID NO: 731190 - protein, 18 aa, Homo sapiens
  CDR3 for beta chain variable domain of TCR clone 365595 (TRBV11-2, TRBJ1-6)
CASSLVFATGGSVHPCTL

SEQ ID NO: 731191 - protein, 13 aa, Homo sapiens
  CDR3 for alpha chain variable domain of TCR clone 365596 (TRAV12-2, TRAJ20)
CAVYPSNDHKLSL

SEQ ID NO: 731192 - protein, 15 aa, Homo sapiens
  CDR3 for beta chain variable domain of TCR clone 365596 (TRBV27, TRBJ2-5)
CASSLYPRGGETQYF

SEQ ID NO: 731193 - protein, 11 aa, Homo sapiens
  CDR3 for alpha chain variable domain of TCR clone 365597 (TRAV38-2/DV8, TRAJ24)
CALDSWGKFHF

SEQ ID NO: 731194 - protein, 14 aa, Homo sapiens
  CDR3 for beta chain variable domain of TCR clone 365597 (TRBV25-1, TRBJ2-1)
CASSPRGPYNEQFF

SEQ ID NO: 731195 - protein, 15 aa, Homo sapiens
  CDR3 for alpha chain variable domain of TCR clone 365598 (TRAV8-4, TRAJ8)
CAVSDLNTGFQKLVF

SEQ ID NO: 731196 - protein, 14 aa, Homo sapiens
  CDR3 for beta chain variable domain of TCR clone 365598 (TRBV7-2, TRBJ2-3)
CASSQTGSSYTQCF

SEQ ID NO: 731197 - protein, 16 aa, Homo sapiens
  CDR3 for alpha chain variable domain of TCR clone 365599 (TRAV35, TRAJ28)
CAGQKYSGAGSYKLTF

SEQ ID NO: 731198 - protein, 14 aa, Homo sapiens
  CDR3 for beta chain variable domain of TCR clone 365599 (TRBV7-2, TRBJ1-1)
CASSFLTGTTEAFF

SEQ ID NO: 731199 - protein, 15 aa, Homo sapiens
  CDR3 for alpha chain variable domain of TCR clone 365600 (TRAV3, TRAJ4)
CAVRDGTGGYNKLIL

SEQ ID NO: 731200 - protein, 15 aa, Homo sapiens
  CDR3 for beta chain variable domain of TCR clone 365600 (TRBV27, TRBJ2-1)
CASSNGGGSSNEQFF

SEQ ID NO: 731201 - protein, 21 aa, Homo sapiens
  CDR3 for alpha chain variable domain of TCR clone 365601 (TRAV8-3, TRAJ10)
CAVGHTHGRRNQTHLWDRHSA

SEQ ID NO: 731202 - protein, 10 aa, Homo sapiens
  CDR3 for beta chain variable domain of TCR clone 365601 (TRBV20-1, TRBJ2-5)
CSARFETQYF

SEQ ID NO: 731203 - protein, 15 aa, Homo sapiens
  CDR3 for alpha chain variable domain of TCR clone 365602 (TRAV21, TRAJ53)
CATLNSGGSNYKLTF

SEQ ID NO: 731204 - protein, 14 aa, Homo sapiens
  CDR3 for beta chain variable domain of TCR clone 365602 (TRBV28, TRBJ1-2)
CASRIQGANYGYTF

SEQ ID NO: 731205 - protein, 14 aa, Homo sapiens
  CDR3 for alpha chain variable domain of TCR clone 365603 (TRAV12-2, TRAJ17)
CAVLFKAAGNKLTF

SEQ ID NO: 731206 - protein, 20 aa, Homo sapiens
  CDR3 for beta chain variable domain of TCR clone 365603 (TRBV19, TRBJ2-1)
CASSISRTVTSTRLNDEQFF

SEQ ID NO: 731207 - protein, 14 aa, Homo sapiens
  CDR3 for alpha chain variable domain of TCR clone 365604 (TRAV1-1, TRAJ21)
CAVRTSRNSNKFYF

SEQ ID NO: 731208 - protein, 14 aa, Homo sapiens
  CDR3 for beta chain variable domain of TCR clone 365604 (TRBV18, TRBJ2-7)
CASSPRGGAYEQYF

SEQ ID NO: 731209 - protein, 12 aa, Homo sapiens
  CDR3 for alpha chain variable domain of TCR clone 365605 (TRAV12-1, TRAJ40)
CVVYSGTYKYIF

SEQ ID NO: 731210 - protein, 17 aa, Homo sapiens
  CDR3 for beta chain variable domain of TCR clone 365605 (TRBV11-3, TRBJ1-5)
CDSSPLTGLRGNQPQHF

SEQ ID NO: 731211 - protein, 16 aa, Homo sapiens
  CDR3 for alpha chain variable domain of TCR clone 365606 (TRAV26-1, TRAJ38)
CIVRPLNAGNNRKLIW

SEQ ID NO: 731212 - protein, 17 aa, Homo sapiens
  CDR3 for beta chain variable domain of TCR clone 365606 (TRBV11-2, TRBJ2-1)
CASSLYPPGVEYNEQFF

SEQ ID NO: 731213 - protein, 15 aa, Homo sapiens
  CDR3 for alpha chain variable domain of TCR clone 365607 (TRAV5, TRAJ33)
CAEAPAMDSNYQLIW

SEQ ID NO: 731214 - protein, 14 aa, Homo sapiens
  CDR3 for beta chain variable domain of TCR clone 365607 (TRBV7-6, TRBJ2-3)
CASSLGTVTDTQYF

SEQ ID NO: 731215 - protein, 10 aa, Homo sapiens
  CDR3 for alpha chain variable domain of TCR clone 365608 (TRAV1-2, TRAJ31)
CVSGDARLMF

SEQ ID NO: 731216 - protein, 14 aa, Homo sapiens
  CDR3 for beta chain variable domain of TCR clone 365608 (TRBV19, TRBJ2-2)
CASSGQGIAGELFF

SEQ ID NO: 731217 - protein, 13 aa, Homo sapiens
  CDR3 for alpha chain variable domain of TCR clone 365609 (TRAV12-3, TRAJ13)
CAMSSGGYQKVTF

SEQ ID NO: 731218 - protein, 12 aa, Homo sapiens
  CDR3 for beta chain variable domain of TCR clone 365609 (TRBV11-2, TRBJ2-2)
CASSLPTGELFF

SEQ ID NO: 731219 - protein, 13 aa, Homo sapiens
  CDR3 for alpha chain variable domain of TCR clone 365610 (TRAV29/DV5, TRAJ31)
CAASRNNDARLMF

SEQ ID NO: 731220 - protein, 12 aa, Homo sapiens
  CDR3 for beta chain variable domain of TCR clone 365610 (TRBV14, TRBJ1-1)
CASSQLKGLAFF

SEQ ID NO: 731221 - protein, 15 aa, Homo sapiens
  CDR3 for alpha chain variable domain of TCR clone 365611 (TRAV2, TRAJ15)
CAVEDREQAGTALIF

SEQ ID NO: 731222 - protein, 12 aa, Homo sapiens
  CDR3 for beta chain variable domain of TCR clone 365611 (TRBV7-8, TRBJ2-7)
CASSLGDREQYF

SEQ ID NO: 731223 - protein, 17 aa, Homo sapiens
  CDR3 for alpha chain variable domain of TCR clone 365612 (TRAV13-1, TRAJ44)
CAASRGAALPVNSPLGL

SEQ ID NO: 731224 - protein, 13 aa, Homo sapiens
  CDR3 for beta chain variable domain of TCR clone 365612 (TRBV11-2, TRBJ2-7)
CASSGTRPYEQYF

SEQ ID NO: 731225 - protein, 16 aa, Homo sapiens
  CDR3 for alpha chain variable domain of TCR clone 365613 (TRAV13-1, TRAJ48)
CAASIFGNFGNEKLTF

SEQ ID NO: 731226 - protein, 15 aa, Homo sapiens
  CDR3 for beta chain variable domain of TCR clone 365613 (TRBV7-2, TRBJ2-1)
CASSLVLAGGNEQFF

SEQ ID NO: 731227 - protein, 15 aa, Homo sapiens
  CDR3 for alpha chain variable domain of TCR clone 365614 (TRAV38-1, TRAJ37)
CAFIFGSGNTGKLIF

SEQ ID NO: 731228 - protein, 14 aa, Homo sapiens
  CDR3 for beta chain variable domain of TCR clone 365614 (TRBV7-9, TRBJ2-1)
CASSPRDSLYEQFF

SEQ ID NO: 731229 - protein, 16 aa, Homo sapiens
  CDR3 for alpha chain variable domain of TCR clone 365615 (TRAV3, TRAJ6)
CAVRDGMGRRKLHTYI

SEQ ID NO: 731230 - protein, 15 aa, Homo sapiens
  CDR3 for beta chain variable domain of TCR clone 365615 (TRBV9, TRBJ2-1)
CASSLAGISYNEQFF

SEQ ID NO: 731231 - protein, 18 aa, Homo sapiens
  CDR3 for alpha chain variable domain of TCR clone 365616 (TRAV26-1, TRAJ37)
CIVRVDMHGSSNTGKLIF

SEQ ID NO: 731232 - protein, 17 aa, Homo sapiens
  CDR3 for beta chain variable domain of TCR clone 365616 (TRBV4-1, TRBJ2-7)
CASSRDPLGVRGGEQYF

SEQ ID NO: 731233 - protein, 14 aa, Homo sapiens
  CDR3 for alpha chain variable domain of TCR clone 365617 (TRAV1-2, TRAJ16)
CAVNRVSDGQKLLF

SEQ ID NO: 731234 - protein, 15 aa, Homo sapiens
  CDR3 for beta chain variable domain of TCR clone 365617 (TRBV6-3, TRBJ2-7)
CASSSPGTVFYEQYF

SEQ ID NO: 731235 - protein, 13 aa, Homo sapiens
  CDR3 for alpha chain variable domain of TCR clone 365618 (TRAV36/DV7, TRAJ7)
CAGTRYGDNRLAF

SEQ ID NO: 731236 - protein, 14 aa, Homo sapiens
  CDR3 for beta chain variable domain of TCR clone 365618 (TRBV19, TRBJ2-1)
CASPTFVLSGEQFF

SEQ ID NO: 731237 - protein, 14 aa, Homo sapiens
  CDR3 for alpha chain variable domain of TCR clone 365619 (TRAV16, TRAJ33)
CALSAMDSNYQLIW

SEQ ID NO: 731238 - protein, 14 aa, Homo sapiens
  CDR3 for beta chain variable domain of TCR clone 365619 (TRBV19, TRBJ2-1)
CASSDNQGANEQFF

SEQ ID NO: 731239 - protein, 14 aa, Homo sapiens
  CDR3 for alpha chain variable domain of TCR clone 365620 (TRAV8-4, TRAJ13)
CDVTLSGGYQKVTF

SEQ ID NO: 731240 - protein, 18 aa, Homo sapiens
  CDR3 for beta chain variable domain of TCR clone 365620 (TRBV12-4, TRBJ2-2)
CASSLVAGTRGRTGELFF

SEQ ID NO: 731241 - protein, 13 aa, Homo sapiens
  CDR3 for alpha chain variable domain of TCR clone 365621 (TRAV13-1, TRAJ21)
CAASIYNFNKFYF

SEQ ID NO: 731242 - protein, 15 aa, Homo sapiens
  CDR3 for beta chain variable domain of TCR clone 365621 (TRBV10-1, TRBJ2-3)
CASSRAGTLGDTQYF

SEQ ID NO: 731243 - protein, 16 aa, Homo sapiens
  CDR3 for alpha chain variable domain of TCR clone 365622 (TRAV8-6, TRAJ37)
CAVSGLGSSNTGKLIL

SEQ ID NO: 731244 - protein, 15 aa, Homo sapiens
  CDR3 for beta chain variable domain of TCR clone 365622 (TRBV20-1, TRBJ1-5)
CSARSGPSMNQPQHF

SEQ ID NO: 731245 - protein, 15 aa, Homo sapiens
  CDR3 for alpha chain variable domain of TCR clone 365623 (TRAV26-1, TRAJ15)
CIVRAANQAGTALIF

SEQ ID NO: 731246 - protein, 16 aa, Homo sapiens
  CDR3 for beta chain variable domain of TCR clone 365623 (TRBV7-8, TRBJ2-4)
CASSAERTLAKNIQYF

SEQ ID NO: 731247 - protein, 14 aa, Homo sapiens
  CDR3 for alpha chain variable domain of TCR clone 365624 (TRAV8-3, TRAJ39)
CAVGANNAGNMLTF

SEQ ID NO: 731248 - protein, 15 aa, Homo sapiens
  CDR3 for beta chain variable domain of TCR clone 365624 (TRBV4-3, TRBJ1-1)
CASSQELGQGTEAFF

SEQ ID NO: 731249 - protein, 13 aa, Homo sapiens
  CDR3 for alpha chain variable domain of TCR clone 365625 (TRAV13-2, TRAJ13)
CAERPGGYQKVTF

SEQ ID NO: 731250 - protein, 15 aa, Homo sapiens
  CDR3 for beta chain variable domain of TCR clone 365625 (TRBV11-3, TRBJ2-7)
CASRPGPASSYEQYF

SEQ ID NO: 731251 - protein, 16 aa, Homo sapiens
  CDR3 for alpha chain variable domain of TCR clone 365626 (TRAV30, TRAJ24)
CGTEIVDADSWGKFQF

SEQ ID NO: 731252 - protein, 15 aa, Homo sapiens
  CDR3 for beta chain variable domain of TCR clone 365626 (TRBV15, TRBJ2-2)
CATSRGLADTGGLFF

SEQ ID NO: 731253 - protein, 10 aa, Homo sapiens
  CDR3 for alpha chain variable domain of TCR clone 365627 (TRAV1-2, TRAJ31)
CAFFDARLMV

SEQ ID NO: 731254 - protein, 15 aa, Homo sapiens
  CDR3 for beta chain variable domain of TCR clone 365627 (TRBV4-1, TRBJ1-4)
CASSDTGGTNEKLFF

SEQ ID NO: 731255 - protein, 14 aa, Homo sapiens
  CDR3 for alpha chain variable domain of TCR clone 365628 (TRAV8-2, TRAJ4)
CVVSPSGGYNKLIF

SEQ ID NO: 731256 - protein, 15 aa, Homo sapiens
  CDR3 for beta chain variable domain of TCR clone 365628 (TRBV4-1, TRBJ1-4)
CASSDTGGTNEKVFF

SEQ ID NO: 731257 - protein, 14 aa, Homo sapiens
  CDR3 for alpha chain variable domain of TCR clone 365629 (TRAV12-3, TRAJ10)
SHLPLTGGGNKLTF

SEQ ID NO: 731258 - protein, 12 aa, Homo sapiens
  CDR3 for beta chain variable domain of TCR clone 365629 (TRBV29-1, TRBJ1-1)
CSVAAPGVEAFF

SEQ ID NO: 731259 - protein, 16 aa, Homo sapiens
  CDR3 for alpha chain variable domain of TCR clone 365630 (TRAV1-2, TRAJ10)
CAVRGVLTGGGNKHTF

SEQ ID NO: 731260 - protein, 19 aa, Homo sapiens
  CDR3 for beta chain variable domain of TCR clone 365630 (TRBV4-3, TRBJ2-7)
CISAPAAKQPSGTPYEQYF

SEQ ID NO: 731261 - protein, 14 aa, Homo sapiens
  CDR3 for alpha chain variable domain of TCR clone 365631 (TRAV26-1, TRAJ34)
CIVRVAYNTDKLIF

SEQ ID NO: 731262 - protein, 15 aa, Homo sapiens
  CDR3 for beta chain variable domain of TCR clone 365631 (TRBV20-1, TRBJ2-7)
CSARVTAAYFYEQYL

SEQ ID NO: 731263 - protein, 13 aa, Homo sapiens
  CDR3 for alpha chain variable domain of TCR clone 365632 (TRAV26-1, TRAJ48)
CIVRVVGDEKLTF

SEQ ID NO: 731264 - protein, 15 aa, Homo sapiens
  CDR3 for beta chain variable domain of TCR clone 365632 (TRBV7-9, TRBJ2-1)
CASSLGLAGGTEQFF

SEQ ID NO: 731265 - protein, 13 aa, Homo sapiens
  CDR3 for alpha chain variable domain of TCR clone 365633 (TRAV27, TRAJ17)
CAGAATAGNKLTF

SEQ ID NO: 731266 - protein, 19 aa, Homo sapiens
  CDR3 for beta chain variable domain of TCR clone 365633 (TRBV18, TRBJ1-3)
CASSPLSRTGMSSGNTIYF

SEQ ID NO: 731267 - protein, 13 aa, Homo sapiens
  CDR3 for alpha chain variable domain of TCR clone 365634 (TRAV3, TRAJ27)
CAVRPLGAGKSTF

SEQ ID NO: 731268 - protein, 17 aa, Homo sapiens
  CDR3 for beta chain variable domain of TCR clone 365634 (TRBV11-2, TRBJ2-1)
CASSLYPPGVEYNEQFF

SEQ ID NO: 731269 - protein, 14 aa, Homo sapiens
  CDR3 for alpha chain variable domain of TCR clone 365635 (TRAV21, TRAJ37)
CAVKGSSNTGKLIF

SEQ ID NO: 731270 - protein, 20 aa, Homo sapiens
  CDR3 for beta chain variable domain of TCR clone 365635 (TRBV7-8, TRBJ2-1)
CASSLAHRLAGVRSYNEQFF

SEQ ID NO: 731271 - protein, 19 aa, Homo sapiens
  CDR3 for alpha chain variable domain of TCR clone 365636 (TRAV25, TRAJ43)
TATQTTDVGTYFCAVFMRF

SEQ ID NO: 731272 - protein, 14 aa, Homo sapiens
  CDR3 for beta chain variable domain of TCR clone 365636 (TRBV27, TRBJ2-1)
CAGSIAETYNEQFF

SEQ ID NO: 731273 - protein, 14 aa, Homo sapiens
  CDR3 for alpha chain variable domain of TCR clone 365637 (TRAV16, TRAJ37)
CALDISGNTGKLIF

SEQ ID NO: 731274 - protein, 15 aa, Homo sapiens
  CDR3 for beta chain variable domain of TCR clone 365637 (TRBV2, TRBJ2-1)
CASSELAGGYNEQFF

SEQ ID NO: 731275 - protein, 18 aa, Homo sapiens
  CDR3 for alpha chain variable domain of TCR clone 365638 (TRAV21, TRAJ52)
CAVRPSPAGGTSYGKLTF

SEQ ID NO: 731276 - protein, 13 aa, Homo sapiens
  CDR3 for beta chain variable domain of TCR clone 365638 (TRBV7-3, TRBJ1-1)
CASIQDWGAEAFF

SEQ ID NO: 731277 - protein, 13 aa, Homo sapiens
  CDR3 for alpha chain variable domain of TCR clone 365639 (TRAV35, TRAJ42)
CAGFPGTQGNLIF

SEQ ID NO: 731278 - protein, 13 aa, Homo sapiens
  CDR3 for beta chain variable domain of TCR clone 365639 (TRBV29-1, TRBJ2-1)
CSVEGGGVNEQFF

SEQ ID NO: 731279 - protein, 12 aa, Homo sapiens
  CDR3 for alpha chain variable domain of TCR clone 365640 (TRAV21, TRAJ49)
CAVNDGGIQFYF

SEQ ID NO: 731280 - protein, 14 aa, Homo sapiens
  CDR3 for beta chain variable domain of TCR clone 365640 (TRBV12-5, TRBJ2-5)
CASGSRTHQETQYF

SEQ ID NO: 731281 - protein, 11 aa, Homo sapiens
  CDR3 for alpha chain variable domain of TCR clone 365641 (TRAV12-3, TRAJ27)
CAMANAGKSTF

SEQ ID NO: 731282 - protein, 13 aa, Homo sapiens
  CDR3 for beta chain variable domain of TCR clone 365641 (TRBV20-1, TRBJ2-2)
CSASAAGTGELFF

SEQ ID NO: 731283 - protein, 13 aa, Homo sapiens
  CDR3 for alpha chain variable domain of TCR clone 365642 (TRAV26-1, TRAJ36)
CIVVGTGANNLFF

SEQ ID NO: 731284 - protein, 15 aa, Homo sapiens
  CDR3 for beta chain variable domain of TCR clone 365642 (TRBV19, TRBJ1-6)
CASSTQGAVGSPLHF

SEQ ID NO: 731285 - protein, 12 aa, Homo sapiens
  CDR3 for alpha chain variable domain of TCR clone 365643 (TRAV12-2, TRAJ4)
GWPEGDYNKLIF

SEQ ID NO: 731286 - protein, 16 aa, Homo sapiens
  CDR3 for beta chain variable domain of TCR clone 365643 (TRBV6-1, TRBJ2-5)
CASSETLDRGAETQYF

SEQ ID NO: 731287 - protein, 12 aa, Homo sapiens
  CDR3 for alpha chain variable domain of TCR clone 365644 (TRAV12-3, TRAJ17)
CAMTLTGNKLTF

SEQ ID NO: 731288 - protein, 13 aa, Homo sapiens
  CDR3 for beta chain variable domain of TCR clone 365644 (TRBV27, TRBJ2-1)
CASRTLGVGEHFF

SEQ ID NO: 731289 - protein, 12 aa, Homo sapiens
  CDR3 for alpha chain variable domain of TCR clone 365645 (TRAV8-3, TRAJ26)
CAGDNYGQNFVF

SEQ ID NO: 731290 - protein, 13 aa, Homo sapiens
  CDR3 for beta chain variable domain of TCR clone 365645 (TRBV5-1, TRBJ2-5)
CASSWEGEETQYF

SEQ ID NO: 731291 - protein, 11 aa, Homo sapiens
  CDR3 for alpha chain variable domain of TCR clone 365646 (TRAV12-3, TRAJ27)
CAMANAGKSTF

SEQ ID NO: 731292 - protein, 13 aa, Homo sapiens
  CDR3 for beta chain variable domain of TCR clone 365646 (TRBV12-4, TRBJ1-5)
CASSPDRAQPQHF

SEQ ID NO: 731293 - protein, 17 aa, Homo sapiens
  CDR3 for alpha chain variable domain of TCR clone 365647 (TRAV3, TRAJ38)
CAVRCCLNAGNNRKLIL

SEQ ID NO: 731294 - protein, 16 aa, Homo sapiens
  CDR3 for beta chain variable domain of TCR clone 365647 (TRBV20-1, TRBJ1-4)
CSAPGQGLLTNEKLFF

SEQ ID NO: 731295 - protein, 14 aa, Homo sapiens
  CDR3 for alpha chain variable domain of TCR clone 365648 (TRAV8-1, TRAJ15)
CAVNGQQAGTALIF

SEQ ID NO: 731296 - protein, 17 aa, Homo sapiens
  CDR3 for beta chain variable domain of TCR clone 365648 (TRBV7-8, TRBJ2-6)
CASSAGTGGAGANVLTF

SEQ ID NO: 731297 - protein, 12 aa, Homo sapiens
  CDR3 for alpha chain variable domain of TCR clone 365649 (TRAV26-1, TRAJ35)
CIGLSFGNVLHC

SEQ ID NO: 731298 - protein, 17 aa, Homo sapiens
  CDR3 for beta chain variable domain of TCR clone 365649 (TRBV11-3, TRBJ2-5)
CASSRPGVRGGKETQYF

SEQ ID NO: 731299 - protein, 14 aa, Homo sapiens
  CDR3 for alpha chain variable domain of TCR clone 365650 (TRAV35, TRAJ50)
WAGHRKTSYDKVIF

SEQ ID NO: 731300 - protein, 13 aa, Homo sapiens
  CDR3 for beta chain variable domain of TCR clone 365650 (TRBV7-7, TRBJ2-3)
CASSLSRADTQYF

SEQ ID NO: 731301 - protein, 11 aa, Homo sapiens
  CDR3 for alpha chain variable domain of TCR clone 365651 (TRAV20, TRAJ34)
CAHYNTDKLIF

SEQ ID NO: 731302 - protein, 13 aa, Homo sapiens
  CDR3 for beta chain variable domain of TCR clone 365651 (TRBV7-6, TRBJ1-2)
CASSLVADYGYTF

SEQ ID NO: 731303 - protein, 12 aa, Homo sapiens
  CDR3 for alpha chain variable domain of TCR clone 365652 (TRAV20, TRAJ20)
CAVRFNDYKLSF

SEQ ID NO: 731304 - protein, 14 aa, Homo sapiens
  CDR3 for beta chain variable domain of TCR clone 365652 (TRBV20-1, TRBJ2-1)
CRAQIGGSANEQFF

SEQ ID NO: 731305 - protein, 13 aa, Homo sapiens
  CDR3 for alpha chain variable domain of TCR clone 365653 (TRAV13-1, TRAJ21)
CAASIYNFNKFYF

SEQ ID NO: 731306 - protein, 16 aa, Homo sapiens
  CDR3 for beta chain variable domain of TCR clone 365653 (TRBV27, TRBJ2-2)
CASSFRGLVRIGELFF

SEQ ID NO: 731307 - protein, 15 aa, Homo sapiens
  CDR3 for alpha chain variable domain of TCR clone 365654 (TRAV3, TRAJ45)
CAVRTPWGGADGLTF

SEQ ID NO: 731308 - protein, 16 aa, Homo sapiens
  CDR3 for beta chain variable domain of TCR clone 365654 (TRBV6-1, TRBJ2-2)
CASSFGQGANTGELFV

SEQ ID NO: 731309 - protein, 14 aa, Homo sapiens
  CDR3 for alpha chain variable domain of TCR clone 365655 (TRAV26-1, TRAJ38)
CIADNAGNNRKLIW

SEQ ID NO: 731310 - protein, 13 aa, Homo sapiens
  CDR3 for beta chain variable domain of TCR clone 365655 (TRBV4-1, TRBJ2-1)
CASSQEVQYEQFF

SEQ ID NO: 731311 - protein, 12 aa, Homo sapiens
  CDR3 for alpha chain variable domain of TCR clone 365656 (TRAV1-2, TRAJ33)
CAALDSNYQLIW

SEQ ID NO: 731312 - protein, 14 aa, Homo sapiens
  CDR3 for beta chain variable domain of TCR clone 365656 (TRBV4-2, TRBJ2-3)
CASSQERGTDTQYF

SEQ ID NO: 731313 - protein, 13 aa, Homo sapiens
  CDR3 for alpha chain variable domain of TCR clone 365657 (TRAV12-1, TRAJ40)
CVMPTSGTYKYIF

SEQ ID NO: 731314 - protein, 18 aa, Homo sapiens
  CDR3 for beta chain variable domain of TCR clone 365657 (TRBV7-6, TRBJ2-1)
CASSPRTSGMSSYNEQFF

SEQ ID NO: 731315 - protein, 16 aa, Homo sapiens
  CDR3 for alpha chain variable domain of TCR clone 365658 (TRAV1-2, TRAJ10)
CAVRGVLTGGGNKITF

SEQ ID NO: 731316 - protein, 12 aa, Homo sapiens
  CDR3 for beta chain variable domain of TCR clone 365658 (TRBV7-8, TRBJ2-7)
CASSPGDREQYF

SEQ ID NO: 731317 - protein, 10 aa, Homo sapiens
  CDR3 for alpha chain variable domain of TCR clone 365659 (TRAV13-1, TRAJ24)
CASGWGKLQF

SEQ ID NO: 731318 - protein, 15 aa, Homo sapiens
  CDR3 for beta chain variable domain of TCR clone 365659 (TRBV11-2, TRBJ2-2)
CASSLDTGNTGELFF

SEQ ID NO: 731319 - protein, 13 aa, Homo sapiens
  CDR3 for alpha chain variable domain of TCR clone 365660 (TRAV13-1, TRAJ11)
CAASIRGYSTLTF

SEQ ID NO: 731320 - protein, 14 aa, Homo sapiens
  CDR3 for beta chain variable domain of TCR clone 365660 (TRBV7-2, TRBJ2-7)
CASSPKTSFYEQYF

SEQ ID NO: 731321 - protein, 12 aa, Homo sapiens
  CDR3 for alpha chain variable domain of TCR clone 365661 (TRAV2, TRAJ9)
CAVGAGGFKTIF

SEQ ID NO: 731322 - protein, 14 aa, Homo sapiens
  CDR3 for beta chain variable domain of TCR clone 365661 (TRBV6-1, TRBJ1-3)
CASVQGGGVNTIYF

SEQ ID NO: 731323 - protein, 11 aa, Homo sapiens
  CDR3 for alpha chain variable domain of TCR clone 365662 (TRAV2, TRAJ33)
CAVESNYQLIW

SEQ ID NO: 731324 - protein, 15 aa, Homo sapiens
  CDR3 for beta chain variable domain of TCR clone 365662 (TRBV5-1, TRBJ1-4)
FAPAAWKDGNEKLFF

SEQ ID NO: 731325 - protein, 14 aa, Homo sapiens
  CDR3 for alpha chain variable domain of TCR clone 365663 (TRAV29/DV5, TRAJ36)
CAARRTPGANNLFF

SEQ ID NO: 731326 - protein, 14 aa, Homo sapiens
  CDR3 for beta chain variable domain of TCR clone 365663 (TRBV12-5, TRBJ2-5)
CASGSRTHQETQYF

SEQ ID NO: 731327 - protein, 15 aa, Homo sapiens
  CDR3 for alpha chain variable domain of TCR clone 365664 (TRAV3, TRAJ22)
CAVRDRGGSARQLTF

SEQ ID NO: 731328 - protein, 16 aa, Homo sapiens
  CDR3 for beta chain variable domain of TCR clone 365664 (TRBV25-1, TRBJ1-1)
CASSGDRDRGRIEALF

SEQ ID NO: 731329 - protein, 14 aa, Homo sapiens
  CDR3 for alpha chain variable domain of TCR clone 365665 (TRAV26-1, TRAJ38)
CIADNAGDNRKLIW

SEQ ID NO: 731330 - protein, 13 aa, Homo sapiens
  CDR3 for beta chain variable domain of TCR clone 365665 (TRBV20-1, TRBJ1-1)
CSARGGGNTEALF

SEQ ID NO: 731331 - protein, 16 aa, Homo sapiens
  CDR3 for alpha chain variable domain of TCR clone 365666 (TRAV26-1, TRAJ22)
CIVRVPSSGSARRLTF

SEQ ID NO: 731332 - protein, 14 aa, Homo sapiens
  CDR3 for beta chain variable domain of TCR clone 365666 (TRBV7-9, TRBJ2-7)
CASSPSGGQNEQYF

SEQ ID NO: 731333 - protein, 14 aa, Homo sapiens
  CDR3 for alpha chain variable domain of TCR clone 365667 (TRAV26-1, TRAJ38)
CIADNAGNNRTLIW

SEQ ID NO: 731334 - protein, 16 aa, Homo sapiens
  CDR3 for beta chain variable domain of TCR clone 365667 (TRBV20-1, TRBJ2-7)
CSASTSGRLSSYEQYF

SEQ ID NO: 731335 - protein, 10 aa, Homo sapiens
  CDR3 for alpha chain variable domain of TCR clone 365668 (TRAV12-2, TRAJ52)
RSTSYGKLTF

SEQ ID NO: 731336 - protein, 11 aa, Homo sapiens
  CDR3 for beta chain variable domain of TCR clone 365668 (TRBV11-2, TRBJ2-2)
CASSSPGELFF

SEQ ID NO: 731337 - protein, 13 aa, Homo sapiens
  CDR3 for alpha chain variable domain of TCR clone 365669 (TRAV12-1, TRAJ9)
CVVLNTGGFKTIF

SEQ ID NO: 731338 - protein, 13 aa, Homo sapiens
  CDR3 for beta chain variable domain of TCR clone 365669 (TRBV20-1, TRBJ1-1)
CSAGGGGNTEAFF

SEQ ID NO: 731339 - protein, 13 aa, Homo sapiens
  CDR3 for alpha chain variable domain of TCR clone 365670 (TRAV12-2, TRAJ20)
CAVYPSNDCKLSF

SEQ ID NO: 731340 - protein, 15 aa, Homo sapiens
  CDR3 for beta chain variable domain of TCR clone 365670 (TRBV27, TRBJ2-5)
CASSLYPRGGDTQYF

SEQ ID NO: 731341 - protein, 14 aa, Homo sapiens
  CDR3 for alpha chain variable domain of TCR clone 365671 (TRAV1-2, TRAJ8)
CAVREHTGFQKLVF

SEQ ID NO: 731342 - protein, 13 aa, Homo sapiens
  CDR3 for beta chain variable domain of TCR clone 365671 (TRBV7-9, TRBJ1-2)
CASSLKQNYGYTF

SEQ ID NO: 731343 - protein, 14 aa, Homo sapiens
  CDR3 for alpha chain variable domain of TCR clone 365672 (TRAV26-1, TRAJ22)
CIVTLSGSARQLTF

SEQ ID NO: 731344 - protein, 13 aa, Homo sapiens
  CDR3 for beta chain variable domain of TCR clone 365672 (TRBV7-3, TRBJ1-1)
CASSQDWGAEAFF

SEQ ID NO: 731345 - protein, 14 aa, Homo sapiens
  CDR3 for alpha chain variable domain of TCR clone 365673 (TRAV12-1, TRAJ40)
CVVPSGTYKYILEQ

SEQ ID NO: 731346 - protein, 15 aa, Homo sapiens
  CDR3 for beta chain variable domain of TCR clone 365673 (TRBV12-4, TRBJ2-1)
CASSPLSGRNNEQFF

SEQ ID NO: 731347 - protein, 14 aa, Homo sapiens
  CDR3 for alpha chain variable domain of TCR clone 365674 (TRAV12-2, TRAJ45)
RAVNIGGGADGLTF

SEQ ID NO: 731348 - protein, 13 aa, Homo sapiens
  CDR3 for beta chain variable domain of TCR clone 365674 (TRBV11-2, TRBJ2-5)
CASSFSSQETQYF

SEQ ID NO: 731349 - protein, 15 aa, Homo sapiens
  CDR3 for alpha chain variable domain of TCR clone 365675 (TRAV14/DV4, TRAJ10)
CAMRELTGGGNKLTF

SEQ ID NO: 731350 - protein, 18 aa, Homo sapiens
  CDR3 for beta chain variable domain of TCR clone 365675 (TRBV7-9, TRBJ2-7)
CTSSLTTSGSRTWYEQYF

SEQ ID NO: 731351 - protein, 12 aa, Homo sapiens
  CDR3 for alpha chain variable domain of TCR clone 365676 (TRAV25, TRAJ30)
CAGKNRDDKIIF

SEQ ID NO: 731352 - protein, 16 aa, Homo sapiens
  CDR3 for beta chain variable domain of TCR clone 365676 (TRBV7-3, TRBJ2-2)
CASSLKRGTLSGELFF

SEQ ID NO: 731353 - protein, 11 aa, Homo sapiens
  CDR3 for alpha chain variable domain of TCR clone 365677 (TRAV23/DV6, TRAJ43)
CAASSGNDMRF

SEQ ID NO: 731354 - protein, 18 aa, Homo sapiens
  CDR3 for beta chain variable domain of TCR clone 365677 (TRBV11-2, TRBJ2-3)
CASSLGGASRGAPDTQYF

SEQ ID NO: 731355 - protein, 14 aa, Homo sapiens
  CDR3 for alpha chain variable domain of TCR clone 365678 (TRAV9-2, TRAJ39)
CALYIYNAGNMLTF

SEQ ID NO: 731356 - protein, 14 aa, Homo sapiens
  CDR3 for beta chain variable domain of TCR clone 365678 (TRBV27, TRBJ1-1)
CASSLLSGLSEAFF

SEQ ID NO: 731357 - protein, 16 aa, Homo sapiens
  CDR3 for alpha chain variable domain of TCR clone 365679 (TRAV1-2, TRAJ10)
CAVRGVLTRGGNKLTF

SEQ ID NO: 731358 - protein, 13 aa, Homo sapiens
  CDR3 for beta chain variable domain of TCR clone 365679 (TRBV10-3, TRBJ2-7)
CASKLAVNYEQYF

SEQ ID NO: 731359 - protein, 17 aa, Homo sapiens
  CDR3 for alpha chain variable domain of TCR clone 365680 (TRAV13-1, TRAJ31)
CAPRDRLMFGDGTQLVV

SEQ ID NO: 731360 - protein, 15 aa, Homo sapiens
  CDR3 for beta chain variable domain of TCR clone 365680 (TRBV7-2, TRBJ2-5)
CASSFLRGGEETQYF

SEQ ID NO: 731361 - protein, 13 aa, Homo sapiens
  CDR3 for alpha chain variable domain of TCR clone 365681 (TRAV26-1, TRAJ34)
CIVRPWITDKLIF

SEQ ID NO: 731362 - protein, 13 aa, Homo sapiens
  CDR3 for beta chain variable domain of TCR clone 365681 (TRBV24-1, TRBJ1-2)
CATSGTALDGYTF

SEQ ID NO: 731363 - protein, 14 aa, Homo sapiens
  CDR3 for alpha chain variable domain of TCR clone 365682 (TRAV12-3, TRAJ10)
SHLPLTGGGNKLTF

SEQ ID NO: 731364 - protein, 15 aa, Homo sapiens
  CDR3 for beta chain variable domain of TCR clone 365682 (TRBV27, TRBJ1-5)
CVSSLGTGFDQPQHF

SEQ ID NO: 731365 - protein, 15 aa, Homo sapiens
  CDR3 for alpha chain variable domain of TCR clone 365683 (TRAV35, TRAJ20)
CAGQLVGSNDYKLSF

SEQ ID NO: 731366 - protein, 13 aa, Homo sapiens
  CDR3 for beta chain variable domain of TCR clone 365683 (TRBV19, TRBJ2-7)
CASSKTGTDEQYF

SEQ ID NO: 731367 - protein, 10 aa, Homo sapiens
  CDR3 for alpha chain variable domain of TCR clone 365684 (TRAV22, TRAJ21)
CAVGAGKFYF

SEQ ID NO: 731368 - protein, 13 aa, Homo sapiens
  CDR3 for beta chain variable domain of TCR clone 365684 (TRBV18, TRBJ2-7)
CASSPGQDYEQYY

SEQ ID NO: 731369 - protein, 16 aa, Homo sapiens
  CDR3 for alpha chain variable domain of TCR clone 365685 (TRAV13-1, TRAJ37)
SAASSLGSSNTGKLIF

SEQ ID NO: 731370 - protein, 12 aa, Homo sapiens
  CDR3 for beta chain variable domain of TCR clone 365685 (TRBV6-1, TRBJ2-5)
CASSEGRETQYF

SEQ ID NO: 731371 - protein, 11 aa, Homo sapiens
  CDR3 for alpha chain variable domain of TCR clone 365686 (TRAV12-3, TRAJ43)
CAMSVSNDMRL

SEQ ID NO: 731372 - protein, 20 aa, Homo sapiens
  CDR3 for beta chain variable domain of TCR clone 365686 (TRBV28, TRBJ2-1)
CASTPIGRSPGLAGGNEQFF

SEQ ID NO: 731373 - protein, 13 aa, Homo sapiens
  CDR3 for alpha chain variable domain of TCR clone 365687 (TRAV21, TRAJ11)
CAVPNSGYSTLTF

SEQ ID NO: 731374 - protein, 13 aa, Homo sapiens
  CDR3 for beta chain variable domain of TCR clone 365687 (TRBV7-8, TRBJ2-7)
CASSLTGGREQYF

SEQ ID NO: 731375 - protein, 15 aa, Homo sapiens
  CDR3 for alpha chain variable domain of TCR clone 365688 (TRAV3, TRAJ4)
CAVRDGTGGYNKLIF

SEQ ID NO: 731376 - protein, 16 aa, Homo sapiens
  CDR3 for beta chain variable domain of TCR clone 365688 (TRBV7-9, TRBJ2-2)
CASSGFGGANTGELFF

SEQ ID NO: 731377 - protein, 15 aa, Homo sapiens
  CDR3 for alpha chain variable domain of TCR clone 365689 (TRAV8-2, TRAJ16)
WVVSDGFSDGQKLLF

SEQ ID NO: 731378 - protein, 16 aa, Homo sapiens
  CDR3 for beta chain variable domain of TCR clone 365689 (TRBV19, TRBJ2-1)
CASSKAGPSSYNEQLF

SEQ ID NO: 731379 - protein, 15 aa, Homo sapiens
  CDR3 for alpha chain variable domain of TCR clone 365690 (TRAV26-1, TRAJ42)
CIVRVKGGSQGNLIF

SEQ ID NO: 731380 - protein, 15 aa, Homo sapiens
  CDR3 for beta chain variable domain of TCR clone 365690 (TRBV19, TRBJ2-4)
CASRGPRRGENIQYF

SEQ ID NO: 731381 - protein, 14 aa, Homo sapiens
  CDR3 for alpha chain variable domain of TCR clone 365691 (TRAV26-1, TRAJ34)
CIVRLRYNTDKLIF

SEQ ID NO: 731382 - protein, 12 aa, Homo sapiens
  CDR3 for beta chain variable domain of TCR clone 365691 (TRBV11-2, TRBJ2-2)
CASSLGGGELFF

SEQ ID NO: 731383 - protein, 14 aa, Homo sapiens
  CDR3 for alpha chain variable domain of TCR clone 365692 (TRAV12-3, TRAJ10)
SHLPLTGGGDKLTF

SEQ ID NO: 731384 - protein, 15 aa, Homo sapiens
  CDR3 for beta chain variable domain of TCR clone 365692 (TRBV28, TRBJ1-2)
CASSSHSIANYGYTF

SEQ ID NO: 731385 - protein, 11 aa, Homo sapiens
  CDR3 for alpha chain variable domain of TCR clone 365693 (TRAV2, TRAJ40)
CAVEDPGNLQI

SEQ ID NO: 731386 - protein, 14 aa, Homo sapiens
  CDR3 for beta chain variable domain of TCR clone 365693 (TRBV19, TRBJ2-2)
CASSTLHRSGELFF

SEQ ID NO: 731387 - protein, 16 aa, Homo sapiens
  CDR3 for alpha chain variable domain of TCR clone 365694 (TRAV26-1, TRAJ32)
CIVRTNHGGATNKLIF

SEQ ID NO: 731388 - protein, 14 aa, Homo sapiens
  CDR3 for beta chain variable domain of TCR clone 365694 (TRBV27, TRBJ1-1)
CASSLLSGLSEAFF

SEQ ID NO: 731389 - protein, 12 aa, Homo sapiens
  CDR3 for alpha chain variable domain of TCR clone 365695 (TRAV1-1, TRAJ39)
CAVPVVGNMLTF

SEQ ID NO: 731390 - protein, 15 aa, Homo sapiens
  CDR3 for beta chain variable domain of TCR clone 365695 (TRBV19, TRBJ1-6)
CASSTQGAVGSPLHF

SEQ ID NO: 731391 - protein, 14 aa, Homo sapiens
  CDR3 for alpha chain variable domain of TCR clone 365696 (TRAV12-1, TRAJ17)
CVVNYKAAGNKLTF

SEQ ID NO: 731392 - protein, 13 aa, Homo sapiens
  CDR3 for beta chain variable domain of TCR clone 365696 (TRBV6-4, TRBJ1-1)
CASSLDREGIAFF

SEQ ID NO: 731393 - protein, 13 aa, Homo sapiens
  CDR3 for alpha chain variable domain of TCR clone 365697 (TRAV1-2, TRAJ9)
CAVLNTGGFKTIF

SEQ ID NO: 731394 - protein, 15 aa, Homo sapiens
  CDR3 for beta chain variable domain of TCR clone 365697 (TRBV7-3, TRBJ2-1)
CASSPTGGGGVEQFF

SEQ ID NO: 731395 - protein, 11 aa, Homo sapiens
  CDR3 for alpha chain variable domain of TCR clone 365698 (TRAV1-1, TRAJ23)
CAVRQGGKLIF

SEQ ID NO: 731396 - protein, 15 aa, Homo sapiens
  CDR3 for beta chain variable domain of TCR clone 365698 (TRBV11-3, TRBJ2-5)
CASSDTSGGIETQYF

SEQ ID NO: 731397 - protein, 13 aa, Homo sapiens
  CDR3 for alpha chain variable domain of TCR clone 365699 (TRAV1-2, TRAJ12)
CAVSMDSSYKLIF

SEQ ID NO: 731398 - protein, 19 aa, Homo sapiens
  CDR3 for beta chain variable domain of TCR clone 365699 (TRBV2, TRBJ2-2)
CASSQPGLAGGGNTGELFF

SEQ ID NO: 731399 - protein, 14 aa, Homo sapiens
  CDR3 for alpha chain variable domain of TCR clone 365700 (TRAV21, TRAJ35)
CAVMPIGFGKVLHF

SEQ ID NO: 731400 - protein, 12 aa, Homo sapiens
  CDR3 for beta chain variable domain of TCR clone 365700 (TRBV7-9, TRBJ2-7)
CASSIKREEQYF

SEQ ID NO: 731401 - protein, 12 aa, Homo sapiens
  CDR3 for alpha chain variable domain of TCR clone 365701 (TRAV21, TRAJ31)
CVLAGNNARLMF

SEQ ID NO: 731402 - protein, 17 aa, Homo sapiens
  CDR3 for beta chain variable domain of TCR clone 365701 (TRBV13, TRBJ2-3)
CASSLSRVAGGRNTQYF

SEQ ID NO: 731403 - protein, 13 aa, Homo sapiens
  CDR3 for alpha chain variable domain of TCR clone 365702 (TRAV12-2, TRAJ30)
CAVNLNRDDKNIF

SEQ ID NO: 731404 - protein, 14 aa, Homo sapiens
  CDR3 for beta chain variable domain of TCR clone 365702 (TRBV20-1, TRBJ2-3)
CSASSGGSTDTQYF

SEQ ID NO: 731405 - protein, 15 aa, Homo sapiens
  CDR3 for alpha chain variable domain of TCR clone 365703 (TRAV3, TRAJ45)
CAVRTPWGGADGLTF

SEQ ID NO: 731406 - protein, 17 aa, Homo sapiens
  CDR3 for beta chain variable domain of TCR clone 365703 (TRBV13, TRBJ2-3)
CASSLSRIAGGRNTQYF

SEQ ID NO: 731407 - protein, 17 aa, Homo sapiens
  CDR3 for alpha chain variable domain of TCR clone 365704 (TRAV3, TRAJ42)
CAVRDRDYGGSQGNLIF

SEQ ID NO: 731408 - protein, 14 aa, Homo sapiens
  CDR3 for beta chain variable domain of TCR clone 365704 (TRBV4-2, TRBJ2-3)
CASSQERGTDTQYF

SEQ ID NO: 731409 - protein, 15 aa, Homo sapiens
  CDR3 for alpha chain variable domain of TCR clone 365705 (TRAV17, TRAJ57)
CATGPSQGGSEKLIF

SEQ ID NO: 731410 - protein, 16 aa, Homo sapiens
  CDR3 for beta chain variable domain of TCR clone 365705 (TRBV12-4, TRBJ1-5)
CASSPPVGGSNQPQHF

SEQ ID NO: 731411 - protein, 15 aa, Homo sapiens
  CDR3 for alpha chain variable domain of TCR clone 365706 (TRAV3, TRAJ22)
CAVRDRGGSARQLTF

SEQ ID NO: 731412 - protein, 18 aa, Homo sapiens
  CDR3 for beta chain variable domain of TCR clone 365706 (TRBV28, TRBJ2-1)
CASSSTSGRANSYNAQFF

SEQ ID NO: 731413 - protein, 15 aa, Homo sapiens
  CDR3 for alpha chain variable domain of TCR clone 365707 (TRAV2, TRAJ15)
CAVEDRGQAGTARIF

SEQ ID NO: 731414 - protein, 14 aa, Homo sapiens
  CDR3 for beta chain variable domain of TCR clone 365707 (TRBV25-1, TRBJ1-1)
CASTHLGGNTEAFF

SEQ ID NO: 731415 - protein, 11 aa, Homo sapiens
  CDR3 for alpha chain variable domain of TCR clone 365708 (TRAV4, TRAJ31)
CLVGLNARLMS

SEQ ID NO: 731416 - protein, 16 aa, Homo sapiens
  CDR3 for beta chain variable domain of TCR clone 365708 (TRBV15, TRBJ2-6)
CATSVNGGFLANVLTF

SEQ ID NO: 731417 - protein, 15 aa, Homo sapiens
  CDR3 for alpha chain variable domain of TCR clone 365709 (TRAV26-1, TRAJ29)
CIVRVVPGRKTPLVF

SEQ ID NO: 731418 - protein, 14 aa, Homo sapiens
  CDR3 for beta chain variable domain of TCR clone 365709 (TRBV7-2, TRBJ2-5)
CASSPRGSSETQYF

SEQ ID NO: 731419 - protein, 16 aa, Homo sapiens
  CDR3 for alpha chain variable domain of TCR clone 365710 (TRAV30, TRAJ24)
CGTEIVDADSWGKFQF

SEQ ID NO: 731420 - protein, 15 aa, Homo sapiens
  CDR3 for beta chain variable domain of TCR clone 365710 (TRBV15, TRBJ1-6)
CATSGALIHPSTLGT

SEQ ID NO: 731421 - protein, 15 aa, Homo sapiens
  CDR3 for alpha chain variable domain of TCR clone 365711 (TRAV26-1, TRAJ44)
CIVRANTGTASKLTF

SEQ ID NO: 731422 - protein, 15 aa, Homo sapiens
  CDR3 for beta chain variable domain of TCR clone 365711 (TRBV9, TRBJ1-6)
CASSVAGTGDSPLHF

SEQ ID NO: 731423 - protein, 14 aa, Homo sapiens
  CDR3 for alpha chain variable domain of TCR clone 365712 (TRAV26-1, TRAJ11)
CIVPLYSGYGTLTF

SEQ ID NO: 731424 - protein, 14 aa, Homo sapiens
  CDR3 for beta chain variable domain of TCR clone 365712 (TRBV7-9, TRBJ2-5)
CASSLVGGEETQYF

SEQ ID NO: 731425 - protein, 14 aa, Homo sapiens
  CDR3 for alpha chain variable domain of TCR clone 365713 (TRAV2, TRAJ23)
CAVGLRNQGGKRIF

SEQ ID NO: 731426 - protein, 15 aa, Homo sapiens
  CDR3 for beta chain variable domain of TCR clone 365713 (TRBV10-3, TRBJ2-1)
CAIRNGTSGHNEQFF

SEQ ID NO: 731427 - protein, 12 aa, Homo sapiens
  CDR3 for alpha chain variable domain of TCR clone 365714 (TRAV26-1, TRAJ31)
CIVRNNNARLMF

SEQ ID NO: 731428 - protein, 15 aa, Homo sapiens
  CDR3 for beta chain variable domain of TCR clone 365714 (TRBV20-1, TRBJ2-4)
CSARDLTGGPNIHYF

SEQ ID NO: 731429 - protein, 13 aa, Homo sapiens
  CDR3 for alpha chain variable domain of TCR clone 365715 (TRAV27, TRAJ21)
CAGATHNFYKFYF

SEQ ID NO: 731430 - protein, 14 aa, Homo sapiens
  CDR3 for beta chain variable domain of TCR clone 365715 (TRBV2, TRBJ2-2)
CASKVVRETGELFF

SEQ ID NO: 731431 - protein, 14 aa, Homo sapiens
  CDR3 for alpha chain variable domain of TCR clone 365716 (TRAV1-2, TRAJ16)
CAVNRFSDGQKLLF

SEQ ID NO: 731432 - protein, 20 aa, Homo sapiens
  CDR3 for beta chain variable domain of TCR clone 365716 (TRBV7-8, TRBJ2-2)
CASSHLFPGPTIHITGELFC

SEQ ID NO: 731433 - protein, 14 aa, Homo sapiens
  CDR3 for alpha chain variable domain of TCR clone 365717 (TRAV8-2, TRAJ4)
CVVSPSGGYNKLIF

SEQ ID NO: 731434 - protein, 15 aa, Homo sapiens
  CDR3 for beta chain variable domain of TCR clone 365717 (TRBV2, TRBJ2-1)
CASSELAGATMSSSS

SEQ ID NO: 731435 - protein, 21 aa, Homo sapiens
  CDR3 for alpha chain variable domain of TCR clone 365718 (TRAV4, TRAJ42)
CCVLLPRGCHNYGGSQGNLTF

SEQ ID NO: 731436 - protein, 12 aa, Homo sapiens
  CDR3 for beta chain variable domain of TCR clone 365718 (TRBV20-1, TRBJ2-1)
CSAQYTYNEQFF

SEQ ID NO: 731437 - protein, 13 aa, Homo sapiens
  CDR3 for alpha chain variable domain of TCR clone 365719 (TRAV9-2, TRAJ49)
CALIQIGGNQFYF

SEQ ID NO: 731438 - protein, 16 aa, Homo sapiens
  CDR3 for beta chain variable domain of TCR clone 365719 (TRBV12-5, TRBJ2-5)
CASGPRTSGNQETQYF

SEQ ID NO: 731439 - protein, 18 aa, Homo sapiens
  CDR3 for alpha chain variable domain of TCR clone 365720 (TRAV13-1, TRAJ52)
GAAKNPDAGGTSYGKLTF

SEQ ID NO: 731440 - protein, 15 aa, Homo sapiens
  CDR3 for beta chain variable domain of TCR clone 365720 (TRBV6-1, TRBJ2-3)
CASSERGGITDTQYF

SEQ ID NO: 731441 - protein, 13 aa, Homo sapiens
  CDR3 for alpha chain variable domain of TCR clone 365721 (TRAV21, TRAJ20)
CAVGLRVDYKLSF

SEQ ID NO: 731442 - protein, 17 aa, Homo sapiens
  CDR3 for beta chain variable domain of TCR clone 365721 (TRBV4-2, TRBJ1-1)
CASTQFGGGSGNTEAFF

SEQ ID NO: 731443 - protein, 15 aa, Homo sapiens
  CDR3 for alpha chain variable domain of TCR clone 365722 (TRAV27, TRAJ38)
CAARRNAGNNRKLIW

SEQ ID NO: 731444 - protein, 16 aa, Homo sapiens
  CDR3 for beta chain variable domain of TCR clone 365722 (TRBV19, TRBJ2-2)
CASRSPGTGATGELFF

SEQ ID NO: 731445 - protein, 12 aa, Homo sapiens
  CDR3 for alpha chain variable domain of TCR clone 365723 (TRAV13-1, TRAJ11)
CAGPSGYSTLTF

SEQ ID NO: 731446 - protein, 15 aa, Homo sapiens
  CDR3 for beta chain variable domain of TCR clone 365723 (TRBV19, TRBJ1-2)
CASSVGQVLNYGYTF

SEQ ID NO: 731447 - protein, 16 aa, Homo sapiens
  CDR3 for alpha chain variable domain of TCR clone 365724 (TRAV26-1, TRAJ32)
CIVRTNYGGAPNKLIF

SEQ ID NO: 731448 - protein, 14 aa, Homo sapiens
  CDR3 for beta chain variable domain of TCR clone 365724 (TRBV27, TRBJ1-1)
CASSLLSGLSEAFS

SEQ ID NO: 731449 - protein, 19 aa, Homo sapiens
  CDR3 for alpha chain variable domain of TCR clone 365725 (TRAV2, TRAJ20)
ILQVRGADAAVYRDCKLSF

SEQ ID NO: 731450 - protein, 17 aa, Homo sapiens
  CDR3 for beta chain variable domain of TCR clone 365725 (TRBV7-8, TRBJ2-6)
CASSAGTGGAGANVLTF

SEQ ID NO: 731451 - protein, 14 aa, Homo sapiens
  CDR3 for alpha chain variable domain of TCR clone 365726 (TRAV30, TRAJ33)
CGTVAPRSNYQLIW

SEQ ID NO: 731452 - protein, 18 aa, Homo sapiens
  CDR3 for beta chain variable domain of TCR clone 365726 (TRBV11-2, TRBJ2-3)
CASSLGGASREAPNTQYF

SEQ ID NO: 731453 - protein, 13 aa, Homo sapiens
  CDR3 for alpha chain variable domain of TCR clone 365727 (TRAV23/DV6, TRAJ34)
WAAIENNTDKLIF

SEQ ID NO: 731454 - protein, 13 aa, Homo sapiens
  CDR3 for beta chain variable domain of TCR clone 365727 (TRBV29-1, TRBJ2-7)
CSVGPSGGYEQYF

SEQ ID NO: 731455 - protein, 17 aa, Homo sapiens
  CDR3 for alpha chain variable domain of TCR clone 365728 (TRAV17, TRAJ7)
CATLGRLAFGKGNQVVV

SEQ ID NO: 731456 - protein, 13 aa, Homo sapiens
  CDR3 for beta chain variable domain of TCR clone 365728 (TRBV12-4, TRBJ2-7)
CASSLVRVREQYF

SEQ ID NO: 731457 - protein, 13 aa, Homo sapiens
  CDR3 for alpha chain variable domain of TCR clone 365729 (TRAV8-1, TRAJ32)
CAADGGATNKLIF

SEQ ID NO: 731458 - protein, 18 aa, Homo sapiens
  CDR3 for beta chain variable domain of TCR clone 365729 (TRBV18, TRBJ2-3)
FASSYTSGAAGGTDTQYF

SEQ ID NO: 731459 - protein, 14 aa, Homo sapiens
  CDR3 for alpha chain variable domain of TCR clone 365730 (TRAV12-2, TRAJ17)
CAVLFKAAGNKLTF

SEQ ID NO: 731460 - protein, 11 aa, Homo sapiens
  CDR3 for beta chain variable domain of TCR clone 365730 (TRBV7-2, TRBJ2-3)
CASSSSDTQYF

SEQ ID NO: 731461 - protein, 16 aa, Homo sapiens
  CDR3 for alpha chain variable domain of TCR clone 365731 (TRAV3, TRAJ38)
CAVRDMDAGNNRKLIW

SEQ ID NO: 731462 - protein, 17 aa, Homo sapiens
  CDR3 for beta chain variable domain of TCR clone 365731 (TRBV7-3, TRBJ2-3)
CASSLMKRMRGADTQYF

SEQ ID NO: 731463 - protein, 12 aa, Homo sapiens
  CDR3 for alpha chain variable domain of TCR clone 365732 (TRAV12-1, TRAJ40)
CVVYSGTYKYIF

SEQ ID NO: 731464 - protein, 18 aa, Homo sapiens
  CDR3 for beta chain variable domain of TCR clone 365732 (TRBV11-2, TRBJ2-3)
CASSLGGAARGAPNTQYL

SEQ ID NO: 731465 - protein, 16 aa, Homo sapiens
  CDR3 for alpha chain variable domain of TCR clone 365733 (TRAV30, TRAJ24)
CGTEIVDADSWGRFQF

SEQ ID NO: 731466 - protein, 14 aa, Homo sapiens
  CDR3 for beta chain variable domain of TCR clone 365733 (TRBV12-5, TRBJ2-5)
CASGSRTHRETQYF

SEQ ID NO: 731467 - protein, 14 aa, Homo sapiens
  CDR3 for alpha chain variable domain of TCR clone 365734 (TRAV12-3, TRAJ13)
SHLPLTGGGNKLTF

SEQ ID NO: 731468 - protein, 14 aa, Homo sapiens
  CDR3 for beta chain variable domain of TCR clone 365734 (TRBV7-3, TRBJ2-1)
CASSLAGGTNEQFF

SEQ ID NO: 731469 - protein, 11 aa, Homo sapiens
  CDR3 for alpha chain variable domain of TCR clone 365735 (TRAV2, TRAJ13)
CASVGYQKVTF

SEQ ID NO: 731470 - protein, 15 aa, Homo sapiens
  CDR3 for beta chain variable domain of TCR clone 365735 (TRBV27, TRBJ2-1)
CASSNGGGSSNEQFF

SEQ ID NO: 731471 - protein, 16 aa, Homo sapiens
  CDR3 for alpha chain variable domain of TCR clone 365736 (TRAV14/DV4, TRAJ54)
CAMREGRIQRAQKLVF

SEQ ID NO: 731472 - protein, 18 aa, Homo sapiens
  CDR3 for beta chain variable domain of TCR clone 365736 (TRBV18, TRBJ1-3)
CASSPRGGAGPSGNTIYF

SEQ ID NO: 731473 - protein, 15 aa, Homo sapiens
  CDR3 for alpha chain variable domain of TCR clone 365737 (TRAV27, TRAJ38)
CAGRFNAGNNRKLIW

SEQ ID NO: 731474 - protein, 13 aa, Homo sapiens
  CDR3 for beta chain variable domain of TCR clone 365737 (TRBV12-5, TRBJ2-3)
CASQNRGTGTQYF

SEQ ID NO: 731475 - protein, 14 aa, Homo sapiens
  CDR3 for alpha chain variable domain of TCR clone 365738 (TRAV2, TRAJ37)
CAVDFTSNTVKLIF

SEQ ID NO: 731476 - protein, 16 aa, Homo sapiens
  CDR3 for beta chain variable domain of TCR clone 365738 (TRBV12-4, TRBJ1-5)
CASSRPVGGSNQPQHF

SEQ ID NO: 731477 - protein, 15 aa, Homo sapiens
  CDR3 for alpha chain variable domain of TCR clone 365739 (TRAV25, TRAJ53)
CPTSNSGGRNYKLTF

SEQ ID NO: 731478 - protein, 14 aa, Homo sapiens
  CDR3 for beta chain variable domain of TCR clone 365739 (TRBV11-2, TRBJ2-3)
CASSSLARTDTQYF

SEQ ID NO: 731479 - protein, 13 aa, Homo sapiens
  CDR3 for alpha chain variable domain of TCR clone 365740 (TRAV36/DV7, TRAJ49)
CAVEANTGNQFYF

SEQ ID NO: 731480 - protein, 14 aa, Homo sapiens
  CDR3 for beta chain variable domain of TCR clone 365740 (TRBV7-2, TRBJ2-7)
CASRSQGAAYEQYF

SEQ ID NO: 731481 - protein, 14 aa, Homo sapiens
  CDR3 for alpha chain variable domain of TCR clone 365741 (TRAV1-2, TRAJ16)
CAVNRFSEGQKLLF

SEQ ID NO: 731482 - protein, 14 aa, Homo sapiens
  CDR3 for beta chain variable domain of TCR clone 365741 (TRBV7-2, TRBJ2-7)
CASSPKTSFYEQYF

SEQ ID NO: 731483 - protein, 12 aa, Homo sapiens
  CDR3 for alpha chain variable domain of TCR clone 365742 (TRAV38-1, TRAJ32)
CAPLGATNKLIF

SEQ ID NO: 731484 - protein, 14 aa, Homo sapiens
  CDR3 for beta chain variable domain of TCR clone 365742 (TRBV29-1, TRBJ2-5)
CSVETSGSGETQYV

SEQ ID NO: 731485 - protein, 14 aa, Homo sapiens
  CDR3 for alpha chain variable domain of TCR clone 365743 (TRAV12-2, TRAJ5)
CAVNRSTGRRALTF

SEQ ID NO: 731486 - protein, 15 aa, Homo sapiens
  CDR3 for beta chain variable domain of TCR clone 365743 (TRBV28, TRBJ2-5)
CASSPGQGSTETQYF

SEQ ID NO: 731487 - protein, 14 aa, Homo sapiens
  CDR3 for alpha chain variable domain of TCR clone 365744 (TRAV13-1, TRAJ44)
CAAKATGNASKLTF

SEQ ID NO: 731488 - protein, 17 aa, Homo sapiens
  CDR3 for beta chain variable domain of TCR clone 365744 (TRBV7-3, TRBJ2-3)
RASSLMKRMRGADTQYF

SEQ ID NO: 731489 - protein, 17 aa, Homo sapiens
  CDR3 for alpha chain variable domain of TCR clone 365745 (TRAV3, TRAJ38)
CAVRDCLNAGNNRKLIW

SEQ ID NO: 731490 - protein, 14 aa, Homo sapiens
  CDR3 for beta chain variable domain of TCR clone 365745 (TRBV12-4, TRBJ1-1)
CASTWTGHDTEAFF

SEQ ID NO: 731491 - protein, 14 aa, Homo sapiens
  CDR3 for alpha chain variable domain of TCR clone 365746 (TRAV12-3, TRAJ42)
CAMNYGGSQGTLIF

SEQ ID NO: 731492 - protein, 15 aa, Homo sapiens
  CDR3 for beta chain variable domain of TCR clone 365746 (TRBV5-7, TRBJ1-5)
CASSYGKLWDQPQHF

SEQ ID NO: 731493 - protein, 13 aa, Homo sapiens
  CDR3 for alpha chain variable domain of TCR clone 365747 (TRAV12-2, TRAJ39)
CAVNNNVGNLLTF

SEQ ID NO: 731494 - protein, 13 aa, Homo sapiens
  CDR3 for beta chain variable domain of TCR clone 365747 (TRBV2, TRBJ1-5)
CATAGPGNQPQHF

SEQ ID NO: 731495 - protein, 14 aa, Homo sapiens
  CDR3 for alpha chain variable domain of TCR clone 365748 (TRAV12-2, TRAJ13)
CAVKKTGGYQKVTF

SEQ ID NO: 731496 - protein, 16 aa, Homo sapiens
  CDR3 for beta chain variable domain of TCR clone 365748 (TRBV12-5, TRBJ2-5)
CASGPRTSGNQETQFF

SEQ ID NO: 731497 - protein, 17 aa, Homo sapiens
  CDR3 for alpha chain variable domain of TCR clone 365749 (TRAV4, TRAJ13)
CIVGVQGSSGVYQKVTF

SEQ ID NO: 731498 - protein, 18 aa, Homo sapiens
  CDR3 for beta chain variable domain of TCR clone 365749 (TRBV15, TRBJ2-3)
CATSRDGARSWDTDTQYF

SEQ ID NO: 731499 - protein, 12 aa, Homo sapiens
  CDR3 for alpha chain variable domain of TCR clone 365750 (TRAV21, TRAJ13)
PGPSGGYQIVTF

SEQ ID NO: 731500 - protein, 15 aa, Homo sapiens
  CDR3 for beta chain variable domain of TCR clone 365750 (TRBV7-9, TRBJ1-6)
CASSSPGRGNSPLHF

SEQ ID NO: 731501 - protein, 14 aa, Homo sapiens
  CDR3 for alpha chain variable domain of TCR clone 365751 (TRAV35, TRAJ24)
CVGPRRDSWGKLQF

SEQ ID NO: 731502 - protein, 12 aa, Homo sapiens
  CDR3 for beta chain variable domain of TCR clone 365751 (TRBV12-4, TRBJ2-3)
CASSLGQDTQYF

SEQ ID NO: 731503 - protein, 14 aa, Homo sapiens
  CDR3 for alpha chain variable domain of TCR clone 365752 (TRAV1-2, TRAJ16)
CAVNRFSDGQKLLF

SEQ ID NO: 731504 - protein, 12 aa, Homo sapiens
  CDR3 for beta chain variable domain of TCR clone 365752 (TRBV7-6, TRBJ2-7)
CASSLADSEQNF

SEQ ID NO: 731505 - protein, 14 aa, Homo sapiens
  CDR3 for alpha chain variable domain of TCR clone 365753 (TRAV27, TRAJ42)
CAGGEGGSQGNLIF

SEQ ID NO: 731506 - protein, 15 aa, Homo sapiens
  CDR3 for beta chain variable domain of TCR clone 365753 (TRBV7-2, TRBJ2-1)
CASSSGLAGGNEQFF

SEQ ID NO: 731507 - protein, 13 aa, Homo sapiens
  CDR3 for alpha chain variable domain of TCR clone 365754 (TRAV21, TRAJ27)
CAARPGNAGKSTF

SEQ ID NO: 731508 - protein, 14 aa, Homo sapiens
  CDR3 for beta chain variable domain of TCR clone 365754 (TRBV15, TRBJ2-7)
CATSRVARGYEQYF

SEQ ID NO: 731509 - protein, 13 aa, Homo sapiens
  CDR3 for alpha chain variable domain of TCR clone 365755 (TRAV12-1, TRAJ40)
CVVPTSGTYKYIF

SEQ ID NO: 731510 - protein, 18 aa, Homo sapiens
  CDR3 for beta chain variable domain of TCR clone 365755 (TRBV7-6, TRBJ2-1)
CASSPRTSGMSSSNQQFF

SEQ ID NO: 731511 - protein, 16 aa, Homo sapiens
  CDR3 for alpha chain variable domain of TCR clone 365756 (TRAV20, TRAJ28)
CAVRAPSGAGSYQLTF

SEQ ID NO: 731512 - protein, 16 aa, Homo sapiens
  CDR3 for beta chain variable domain of TCR clone 365756 (TRBV19, TRBJ1-5)
CASSTRGTRSNQPQHF

SEQ ID NO: 731513 - protein, 12 aa, Homo sapiens
  CDR3 for alpha chain variable domain of TCR clone 365757 (TRAV13-1, TRAJ21)
CAAKEGLNKFYF

SEQ ID NO: 731514 - protein, 12 aa, Homo sapiens
  CDR3 for beta chain variable domain of TCR clone 365757 (TRBV11-2, TRBJ2-2)
CASSLGGGELFF

SEQ ID NO: 731515 - protein, 13 aa, Homo sapiens
  CDR3 for alpha chain variable domain of TCR clone 365758 (TRAV3, TRAJ20)
CCESFCNDYKLSF

SEQ ID NO: 731516 - protein, 15 aa, Homo sapiens
  CDR3 for beta chain variable domain of TCR clone 365758 (TRBV7-8, TRBJ1-1)
CASSLGDSRNTEAFF

SEQ ID NO: 731517 - protein, 18 aa, Homo sapiens
  CDR3 for alpha chain variable domain of TCR clone 365759 (TRAV2, )
CAVGTSNSGYPEPRPCRV

SEQ ID NO: 731518 - protein, 13 aa, Homo sapiens
  CDR3 for beta chain variable domain of TCR clone 365759 (TRBV4-1, TRBJ2-1)
CASSQEVQYEQFF

SEQ ID NO: 731519 - protein, 13 aa, Homo sapiens
  CDR3 for alpha chain variable domain of TCR clone 365760 (TRAV12-2, TRAJ20)
CAVYPSNDYKLSY

SEQ ID NO: 731520 - protein, 15 aa, Homo sapiens
  CDR3 for beta chain variable domain of TCR clone 365760 (TRBV27, TRBJ2-5)
CASSLYPRGGETQYF

SEQ ID NO: 731521 - protein, 16 aa, Homo sapiens
  CDR3 for alpha chain variable domain of TCR clone 365761 (TRAV4, TRAJ22)
CLVGDLYSGSARQLTF

SEQ ID NO: 731522 - protein, 16 aa, Homo sapiens
  CDR3 for beta chain variable domain of TCR clone 365761 (TRBV7-9, TRBJ2-3)
CSSSPWREVGTDTQYF

SEQ ID NO: 731523 - protein, 17 aa, Homo sapiens
  CDR3 for alpha chain variable domain of TCR clone 365762 (TRAV3, TRAJ42)
FAVRDRDYGGSQGNLIF

SEQ ID NO: 731524 - protein, 15 aa, Homo sapiens
  CDR3 for beta chain variable domain of TCR clone 365762 (TRBV2, TRBJ2-7)
CASSEGLARSYEQYF

SEQ ID NO: 731525 - protein, 16 aa, Homo sapiens
  CDR3 for alpha chain variable domain of TCR clone 365763 (TRAV27, TRAJ13)
CAGAKSDPGGYQTVTF

SEQ ID NO: 731526 - protein, 15 aa, Homo sapiens
  CDR3 for beta chain variable domain of TCR clone 365763 (TRBV29-1, TRBJ2-1)
CSVGRHALFYNEQFF

SEQ ID NO: 731527 - protein, 12 aa, Homo sapiens
  CDR3 for alpha chain variable domain of TCR clone 365764 (TRAV17, TRAJ49)
CATVTTGNQFYF

SEQ ID NO: 731528 - protein, 18 aa, Homo sapiens
  CDR3 for beta chain variable domain of TCR clone 365764 (TRBV11-2, TRBJ2-3)
CASSLGGASRGAPNTQYF

SEQ ID NO: 731529 - protein, 14 aa, Homo sapiens
  CDR3 for alpha chain variable domain of TCR clone 365765 (TRAV12-2, TRAJ5)
CAVNSSTGSRALTF

SEQ ID NO: 731530 - protein, 12 aa, Homo sapiens
  CDR3 for beta chain variable domain of TCR clone 365765 (TRBV19, TRBJ1-5)
CASSIAQQPQYF

SEQ ID NO: 731531 - protein, 15 aa, Homo sapiens
  CDR3 for alpha chain variable domain of TCR clone 365766 (TRAV26-1, TRAJ44)
CIVRANTGTASKLTF

SEQ ID NO: 731532 - protein, 16 aa, Homo sapiens
  CDR3 for beta chain variable domain of TCR clone 365766 (TRBV7-7, TRBJ2-1)
YAGSLASGTSYNEQFF

SEQ ID NO: 731533 - protein, 14 aa, Homo sapiens
  CDR3 for alpha chain variable domain of TCR clone 365767 (TRAV12-1, TRAJ6)
CVVNEAGGSYIPTF

SEQ ID NO: 731534 - protein, 12 aa, Homo sapiens
  CDR3 for beta chain variable domain of TCR clone 365767 (TRBV29-1, TRBJ2-5)
CSVFRVGETQYF

SEQ ID NO: 731535 - protein, 18 aa, Homo sapiens
  CDR3 for alpha chain variable domain of TCR clone 365768 (TRAV21, TRAJ52)
WAVRPSPAGGTSYGKLTF

SEQ ID NO: 731536 - protein, 14 aa, Homo sapiens
  CDR3 for beta chain variable domain of TCR clone 365768 (TRBV4-1, TRBJ2-2)
CASSQAVNTGELFF

SEQ ID NO: 731537 - protein, 18 aa, Homo sapiens
  CDR3 for alpha chain variable domain of TCR clone 365769 (TRAV21, TRAJ52)
CAVWPSPAGGTSYGKLTF

SEQ ID NO: 731538 - protein, 13 aa, Homo sapiens
  CDR3 for beta chain variable domain of TCR clone 365769 (TRBV2, TRBJ1-5)
CATAGPGNQPQHF

SEQ ID NO: 731539 - protein, 12 aa, Homo sapiens
  CDR3 for alpha chain variable domain of TCR clone 365770 (TRAV13-2, TRAJ8)
CAPWLGSQKLVF

SEQ ID NO: 731540 - protein, 16 aa, Homo sapiens
  CDR3 for beta chain variable domain of TCR clone 365770 (TRBV24-1, TRBJ2-3)
CATSDPGTGATDTQYF

SEQ ID NO: 731541 - protein, 14 aa, Homo sapiens
  CDR3 for alpha chain variable domain of TCR clone 365771 (TRAV2, TRAJ29)
CAVTPPSGDTPLVF

SEQ ID NO: 731542 - protein, 14 aa, Homo sapiens
  CDR3 for beta chain variable domain of TCR clone 365771 (TRBV12-5, TRBJ2-5)
CASGSRTHQETQYF

SEQ ID NO: 731543 - protein, 16 aa, Homo sapiens
  CDR3 for alpha chain variable domain of TCR clone 365772 (TRAV14/DV4, TRAJ53)
CAMREGGGGSNYKLTF

SEQ ID NO: 731544 - protein, 15 aa, Homo sapiens
  CDR3 for beta chain variable domain of TCR clone 365772 (TRBV5-1, TRBJ2-3)
CASSYTSGSTDTQYF

SEQ ID NO: 731545 - protein, 16 aa, Homo sapiens
  CDR3 for alpha chain variable domain of TCR clone 365773 (TRAV35, TRAJ28)
CAGYLYSGAGSYQLTF

SEQ ID NO: 731546 - protein, 16 aa, Homo sapiens
  CDR3 for beta chain variable domain of TCR clone 365773 (TRBV5-1, TRBJ2-1)
CASSHGLAGPENEQFF

SEQ ID NO: 731547 - protein, 14 aa, Homo sapiens
  CDR3 for alpha chain variable domain of TCR clone 365774 (TRAV2, TRAJ22)
CAVGRGGSARQLTF

SEQ ID NO: 731548 - protein, 14 aa, Homo sapiens
  CDR3 for beta chain variable domain of TCR clone 365774 (TRBV7-6, TRBJ2-1)
CASSLGGGADEQFF

SEQ ID NO: 731549 - protein, 15 aa, Homo sapiens
  CDR3 for alpha chain variable domain of TCR clone 365775 (TRAV8-3, TRAJ40)
CAAPSLGSGTYKYIL

SEQ ID NO: 731550 - protein, 16 aa, Homo sapiens
  CDR3 for beta chain variable domain of TCR clone 365775 (TRBV7-3, TRBJ2-3)
CASSLSGYRPEDTQYL

SEQ ID NO: 731551 - protein, 15 aa, Homo sapiens
  CDR3 for alpha chain variable domain of TCR clone 365776 (TRAV8-3, TRAJ45)
CVSSYSGGGADGLAF

SEQ ID NO: 731552 - protein, 13 aa, Homo sapiens
  CDR3 for beta chain variable domain of TCR clone 365776 (TRBV10-3, TRBJ2-7)
CASKLAVNYEQYF

SEQ ID NO: 731553 - protein, 15 aa, Homo sapiens
  CDR3 for alpha chain variable domain of TCR clone 365777 (TRAV8-3, TRAJ11)
CAVGLLNSGYSTLTF

SEQ ID NO: 731554 - protein, 14 aa, Homo sapiens
  CDR3 for beta chain variable domain of TCR clone 365777 (TRBV4-1, TRBJ2-1)
CASSRSGSGETQYF

SEQ ID NO: 731555 - protein, 13 aa, Homo sapiens
  CDR3 for alpha chain variable domain of TCR clone 365778 (TRAV13-2, TRAJ48)
CAEMDFGDEKLTF

SEQ ID NO: 731556 - protein, 16 aa, Homo sapiens
  CDR3 for beta chain variable domain of TCR clone 365778 (TRBV7-9, TRBJ2-1)
CASSDVAGGSYNEQFF

SEQ ID NO: 731557 - protein, 13 aa, Homo sapiens
  CDR3 for alpha chain variable domain of TCR clone 365779 (TRAV39, TRAJ33)
CAVEFSSNYQLIW

SEQ ID NO: 731558 - protein, 19 aa, Homo sapiens
  CDR3 for beta chain variable domain of TCR clone 365779 (TRBV2, TRBJ2-2)
CASIQPGLAGGGNTGELFF

SEQ ID NO: 731559 - protein, 14 aa, Homo sapiens
  CDR3 for alpha chain variable domain of TCR clone 365780 (TRAV13-1, TRAJ13)
CAASRVGSYQKVTF

SEQ ID NO: 731560 - protein, 17 aa, Homo sapiens
  CDR3 for beta chain variable domain of TCR clone 365780 (TRBV15, TRBJ1-5)
CATSRAPPGTRNQAQHF

SEQ ID NO: 731561 - protein, 14 aa, Homo sapiens
  CDR3 for alpha chain variable domain of TCR clone 365781 (TRAV12-3, TRAJ10)
SHLPPTGGGNKLTF

SEQ ID NO: 731562 - protein, 14 aa, Homo sapiens
  CDR3 for beta chain variable domain of TCR clone 365781 (TRBV7-2, TRBJ2-2)
CASSLNSNTGELFF

SEQ ID NO: 731563 - protein, 15 aa, Homo sapiens
  CDR3 for alpha chain variable domain of TCR clone 365782 (TRAV3, TRAJ32)
CAVSSYGGATNKLIF

SEQ ID NO: 731564 - protein, 18 aa, Homo sapiens
  CDR3 for beta chain variable domain of TCR clone 365782 (TRBV4-1, TRBJ2-7)
CASSQAPGTGTLGDEQYF

SEQ ID NO: 731565 - protein, 16 aa, Homo sapiens
  CDR3 for alpha chain variable domain of TCR clone 365783 (TRAV1-2, TRAJ10)
CAVRGVLTGGGNKLTC

SEQ ID NO: 731566 - protein, 22 aa, Homo sapiens
  CDR3 for beta chain variable domain of TCR clone 365783 (TRBV4-2, TRBJ2-2)
CASSQEGATSGRVGAGTGELFF

SEQ ID NO: 731567 - protein, 15 aa, Homo sapiens
  CDR3 for alpha chain variable domain of TCR clone 365784 (TRAV26-1, TRAJ15)
CIVRAANQAGTALIF

SEQ ID NO: 731568 - protein, 16 aa, Homo sapiens
  CDR3 for beta chain variable domain of TCR clone 365784 (TRBV7-3, TRBJ2-2)
CASSLKRGTLSGELFF

SEQ ID NO: 731569 - protein, 16 aa, Homo sapiens
  CDR3 for alpha chain variable domain of TCR clone 365785 (TRAV23/DV6, TRAJ52)
CAASLNGGTSYGKLTF

SEQ ID NO: 731570 - protein, 16 aa, Homo sapiens
  CDR3 for beta chain variable domain of TCR clone 365785 (TRBV27, TRBJ2-2)
CASSFRGLVRTGELFF

SEQ ID NO: 731571 - protein, 10 aa, Homo sapiens
  CDR3 for alpha chain variable domain of TCR clone 365786 (TRAV1-2, TRAJ20)
CALNDYKLSF

SEQ ID NO: 731572 - protein, 16 aa, Homo sapiens
  CDR3 for beta chain variable domain of TCR clone 365786 (TRBV20-1, TRBJ1-1)
GSARALTQGMNTEAFF

SEQ ID NO: 731573 - protein, 14 aa, Homo sapiens
  CDR3 for alpha chain variable domain of TCR clone 365787 (TRAV12-2, TRAJ33)
CAVKRARSNYQLIW

SEQ ID NO: 731574 - protein, 16 aa, Homo sapiens
  CDR3 for beta chain variable domain of TCR clone 365787 (TRBV19, TRBJ2-1)
CASSKAGPSSYNEQFF

SEQ ID NO: 731575 - protein, 14 aa, Homo sapiens
  CDR3 for alpha chain variable domain of TCR clone 365788 (TRAV13-2, TRAJ29)
CAENIEPGNTPLVF

SEQ ID NO: 731576 - protein, 14 aa, Homo sapiens
  CDR3 for beta chain variable domain of TCR clone 365788 (TRBV19, TRBJ2-2)
CAATGHADTGELFF

SEQ ID NO: 731577 - protein, 17 aa, Homo sapiens
  CDR3 for alpha chain variable domain of TCR clone 365789 (TRAV2, TRAJ22)
ILQVREADAAEQRQLTF

SEQ ID NO: 731578 - protein, 13 aa, Homo sapiens
  CDR3 for beta chain variable domain of TCR clone 365789 (TRBV19, TRBJ1-5)
CASSIGGNQPQHF

SEQ ID NO: 731579 - protein, 14 aa, Homo sapiens
  CDR3 for alpha chain variable domain of TCR clone 365790 (TRAV1-2, TRAJ16)
CAVNRFSDGQKLLF

SEQ ID NO: 731580 - protein, 16 aa, Homo sapiens
  CDR3 for beta chain variable domain of TCR clone 365790 (TRBV6-1, TRBJ1-1)
CASRDSGRGMNTEAFF

SEQ ID NO: 731581 - protein, 13 aa, Homo sapiens
  CDR3 for alpha chain variable domain of TCR clone 365791 (TRAV25, TRAJ16)
CAGRTARSCSLQG

SEQ ID NO: 731582 - protein, 14 aa, Homo sapiens
  CDR3 for beta chain variable domain of TCR clone 365791 (TRBV7-9, TRBJ2-1)
CASSPRDSLYEQFF

SEQ ID NO: 731583 - protein, 13 aa, Homo sapiens
  CDR3 for alpha chain variable domain of TCR clone 365792 (TRAV13-1, TRAJ5)
CAASDTGRRGLTS

SEQ ID NO: 731584 - protein, 12 aa, Homo sapiens
  CDR3 for beta chain variable domain of TCR clone 365792 (TRBV28, TRBJ2-3)
CASSLYRDTQYF

SEQ ID NO: 731585 - protein, 16 aa, Homo sapiens
  CDR3 for alpha chain variable domain of TCR clone 365793 (TRAV25, TRAJ53)
CAGPKGSGGSNYKLTI

SEQ ID NO: 731586 - protein, 13 aa, Homo sapiens
  CDR3 for beta chain variable domain of TCR clone 365793 (TRBV10-2, TRBJ2-3)
CASSESGDHTQYF

SEQ ID NO: 731587 - protein, 16 aa, Homo sapiens
  CDR3 for alpha chain variable domain of TCR clone 365794 (TRAV14/DV4, TRAJ53)
CAMREGGGGSNYKLTF

SEQ ID NO: 731588 - protein, 16 aa, Homo sapiens
  CDR3 for beta chain variable domain of TCR clone 365794 (TRBV19, TRBJ2-2)
CASRSPGTGATGELFF

SEQ ID NO: 731589 - protein, 16 aa, Homo sapiens
  CDR3 for alpha chain variable domain of TCR clone 365795 (TRAV3, TRAJ10)
CAVRDMRAGGGNKLTW

SEQ ID NO: 731590 - protein, 16 aa, Homo sapiens
  CDR3 for beta chain variable domain of TCR clone 365795 (TRBV28, TRBJ2-7)
CASSCPDRRLTYEQYF

SEQ ID NO: 731591 - protein, 14 aa, Homo sapiens
  CDR3 for alpha chain variable domain of TCR clone 365796 (TRAV1-2, TRAJ16)
CAVNRFSDGQKLLF

SEQ ID NO: 731592 - protein, 17 aa, Homo sapiens
  CDR3 for beta chain variable domain of TCR clone 365796 (TRBV7-2, TRBJ2-7)
CASSFETSESTSSTSGR

SEQ ID NO: 731593 - protein, 16 aa, Homo sapiens
  CDR3 for alpha chain variable domain of TCR clone 365797 (TRAV12-3, TRAJ53)
CAMGPWSGGSNHKLTF

SEQ ID NO: 731594 - protein, 11 aa, Homo sapiens
  CDR3 for beta chain variable domain of TCR clone 365797 (TRBV29-1, TRBJ2-5)
CSEDRTGTQYF

SEQ ID NO: 731595 - protein, 13 aa, Homo sapiens
  CDR3 for alpha chain variable domain of TCR clone 365798 (TRAV27, TRAJ41)
CAGEGNSGYALNF

SEQ ID NO: 731596 - protein, 15 aa, Homo sapiens
  CDR3 for beta chain variable domain of TCR clone 365798 (TRBV7-3, TRBJ2-7)
CASALNAQGAYEQYF

SEQ ID NO: 731597 - protein, 17 aa, Homo sapiens
  CDR3 for alpha chain variable domain of TCR clone 365799 (TRAV8-6, TRAJ58)
CAVSSWVGETSGSRLTF

SEQ ID NO: 731598 - protein, 13 aa, Homo sapiens
  CDR3 for beta chain variable domain of TCR clone 365799 (TRBV4-2, TRBJ2-1)
CQRLDRAYNEQFF

SEQ ID NO: 731599 - protein, 17 aa, Homo sapiens
  CDR3 for alpha chain variable domain of TCR clone 365800 (TRAV3, TRAJ6)
CAVRDGPRAGGNYIPTF

SEQ ID NO: 731600 - protein, 14 aa, Homo sapiens
  CDR3 for beta chain variable domain of TCR clone 365800 (TRBV7-2, TRBJ2-7)
CASSTKTSFYEQYF

SEQ ID NO: 731601 - protein, 12 aa, Homo sapiens
  CDR3 for alpha chain variable domain of TCR clone 365801 (TRAV26-1, TRAJ35)
CIGLSFGNVLHC

SEQ ID NO: 731602 - protein, 16 aa, Homo sapiens
  CDR3 for beta chain variable domain of TCR clone 365801 (TRBV19, TRBJ2-3)
CASGTGPNDGTDTQYF

SEQ ID NO: 731603 - protein, 13 aa, Homo sapiens
  CDR3 for alpha chain variable domain of TCR clone 365802 (TRAV1-2, TRAJ24)
CAVTTDSWGTLQF

SEQ ID NO: 731604 - protein, 13 aa, Homo sapiens
  CDR3 for beta chain variable domain of TCR clone 365802 (TRBV20-1, TRBJ1-1)
CSARGGGNTEAFF

SEQ ID NO: 731605 - protein, 13 aa, Homo sapiens
  CDR3 for alpha chain variable domain of TCR clone 365803 (TRAV27, TRAJ17)
CAGAATAGNKLTF

SEQ ID NO: 731606 - protein, 12 aa, Homo sapiens
  CDR3 for beta chain variable domain of TCR clone 365803 (TRBV28, TRBJ2-3)
CASSLYRDTQYF

SEQ ID NO: 731607 - protein, 11 aa, Homo sapiens
  CDR3 for alpha chain variable domain of TCR clone 365804 (TRAV3, TRAJ21)
CAVGNFNKLYF

SEQ ID NO: 731608 - protein, 17 aa, Homo sapiens
  CDR3 for beta chain variable domain of TCR clone 365804 (TRBV24-1, TRBJ2-1)
CATSDVSTSGTYNERFF

SEQ ID NO: 731609 - protein, 15 aa, Homo sapiens
  CDR3 for alpha chain variable domain of TCR clone 365805 (TRAV12-2, TRAJ53)
CAVNGGGGSSYKLKF

SEQ ID NO: 731610 - protein, 13 aa, Homo sapiens
  CDR3 for beta chain variable domain of TCR clone 365805 (TRBV3-1, TRBJ1-1)
CASSPGVITEAFF

SEQ ID NO: 731611 - protein, 15 aa, Homo sapiens
  CDR3 for alpha chain variable domain of TCR clone 365806 (TRAV23/DV6, TRAJ38)
CAASGGAGNNRKLIW

SEQ ID NO: 731612 - protein, 13 aa, Homo sapiens
  CDR3 for beta chain variable domain of TCR clone 365806 (TRBV7-2, TRBJ1-2)
CASSSPGLYGYTF

SEQ ID NO: 731613 - protein, 15 aa, Homo sapiens
  CDR3 for alpha chain variable domain of TCR clone 365807 (TRAV1-2, TRAJ24)
CAVRDPGDSWGKLQF

SEQ ID NO: 731614 - protein, 19 aa, Homo sapiens
  CDR3 for beta chain variable domain of TCR clone 365807 (TRBV28, TRBJ2-1)
CASSFSIRGSGRTRYEQFF

SEQ ID NO: 731615 - protein, 11 aa, Homo sapiens
  CDR3 for alpha chain variable domain of TCR clone 365808 (TRAV2, TRAJ31)
RAAGPPARLMF

SEQ ID NO: 731616 - protein, 12 aa, Homo sapiens
  CDR3 for beta chain variable domain of TCR clone 365808 (TRBV7-8, TRBJ2-7)
CASSLGDREQYF

SEQ ID NO: 731617 - protein, 15 aa, Homo sapiens
  CDR3 for alpha chain variable domain of TCR clone 365809 (TRAV8-3, TRAJ45)
CASSYSGEGADGLNF

SEQ ID NO: 731618 - protein, 13 aa, Homo sapiens
  CDR3 for beta chain variable domain of TCR clone 365809 (TRBV10-3, TRBJ2-7)
CASKLAVNYEQYF

SEQ ID NO: 731619 - protein, 13 aa, Homo sapiens
  CDR3 for alpha chain variable domain of TCR clone 365810 (TRAV2, TRAJ40)
CAVVTSGTYKYIF

SEQ ID NO: 731620 - protein, 13 aa, Homo sapiens
  CDR3 for beta chain variable domain of TCR clone 365810 (TRBV11-2, TRBJ2-1)
CASSLRLTHEQFF

SEQ ID NO: 731621 - protein, 13 aa, Homo sapiens
  CDR3 for alpha chain variable domain of TCR clone 365811 (TRAV30, TRAJ34)
CGTVGYNTAKLIF

SEQ ID NO: 731622 - protein, 16 aa, Homo sapiens
  CDR3 for beta chain variable domain of TCR clone 365811 (TRBV7-9, TRBJ1-2)
CASSLGFSSGEDGYTF

SEQ ID NO: 731623 - protein, 15 aa, Homo sapiens
  CDR3 for alpha chain variable domain of TCR clone 365812 (TRAV41, TRAJ22)
CASDLSWGSARQLTF

SEQ ID NO: 731624 - protein, 15 aa, Homo sapiens
  CDR3 for beta chain variable domain of TCR clone 365812 (TRBV27, TRBJ1-6)
CASSFDRGLGSPLHF

SEQ ID NO: 731625 - protein, 15 aa, Homo sapiens
  CDR3 for alpha chain variable domain of TCR clone 365813 (TRAV26-1, TRAJ44)
CIVRIGTGTASKLTF

SEQ ID NO: 731626 - protein, 12 aa, Homo sapiens
  CDR3 for beta chain variable domain of TCR clone 365813 (TRBV16, TRBJ2-2)
CASSQSVGELFF

SEQ ID NO: 731627 - protein, 15 aa, Homo sapiens
  CDR3 for alpha chain variable domain of TCR clone 365814 (TRAV17, TRAJ57)
CATGPSEGGSEKLVF

SEQ ID NO: 731628 - protein, 16 aa, Homo sapiens
  CDR3 for beta chain variable domain of TCR clone 365814 (TRBV12-4, TRBJ1-5)
CASSRPVGGSNQPQHF

SEQ ID NO: 731629 - protein, 11 aa, Homo sapiens
  CDR3 for alpha chain variable domain of TCR clone 365815 (TRAV2, TRAJ33)
CAVDSNYQLIW

SEQ ID NO: 731630 - protein, 14 aa, Homo sapiens
  CDR3 for beta chain variable domain of TCR clone 365815 (TRBV19, TRBJ1-5)
CASSQGYSNQPQHF

SEQ ID NO: 731631 - protein, 13 aa, Homo sapiens
  CDR3 for alpha chain variable domain of TCR clone 365816 (TRAV3, TRAJ27)
CAVRPLGAGKSTC

SEQ ID NO: 731632 - protein, 12 aa, Homo sapiens
  CDR3 for beta chain variable domain of TCR clone 365816 (TRBV7-9, TRBJ2-7)
CATRTDAYEQYF

SEQ ID NO: 731633 - protein, 15 aa, Homo sapiens
  CDR3 for alpha chain variable domain of TCR clone 365817 (TRAV17, TRAJ13)
CATDAGSGGYQKVTF

SEQ ID NO: 731634 - protein, 17 aa, Homo sapiens
  CDR3 for beta chain variable domain of TCR clone 365817 (TRBV11-2, TRBJ2-1)
CASSLYPPGVENNEQFF

SEQ ID NO: 731635 - protein, 12 aa, Homo sapiens
  CDR3 for alpha chain variable domain of TCR clone 365818 (TRAV17, TRAJ4)
CATDGGYNKLIF

SEQ ID NO: 731636 - protein, 13 aa, Homo sapiens
  CDR3 for beta chain variable domain of TCR clone 365818 (TRBV29-1, TRBJ2-2)
CSTTGINTGELFF

SEQ ID NO: 731637 - protein, 13 aa, Homo sapiens
  CDR3 for alpha chain variable domain of TCR clone 365819 (TRAV27, TRAJ37)
CAGGPSNTGKLIF

SEQ ID NO: 731638 - protein, 14 aa, Homo sapiens
  CDR3 for beta chain variable domain of TCR clone 365819 (TRBV7-8, TRBJ1-5)
CASSLGALNQPQHF

SEQ ID NO: 731639 - protein, 11 aa, Homo sapiens
  CDR3 for alpha chain variable domain of TCR clone 365820 (TRAV21, TRAJ34)
CAHYHTDKLIF

SEQ ID NO: 731640 - protein, 13 aa, Homo sapiens
  CDR3 for beta chain variable domain of TCR clone 365820 (TRBV7-6, TRBJ1-2)
CASSLVADYGYTF

SEQ ID NO: 731641 - protein, 14 aa, Homo sapiens
  CDR3 for alpha chain variable domain of TCR clone 365821 (TRAV20, TRAJ29)
CAVQAWVGNTPLVF

SEQ ID NO: 731642 - protein, 15 aa, Homo sapiens
  CDR3 for beta chain variable domain of TCR clone 365821 (TRBV29-1, TRBJ2-7)
CSVDFFDRGSYEQYF

SEQ ID NO: 731643 - protein, 18 aa, Homo sapiens
  CDR3 for alpha chain variable domain of TCR clone 365822 (TRAV21, TRAJ52)
CAVRPSPAGGTIYGELTF

SEQ ID NO: 731644 - protein, 15 aa, Homo sapiens
  CDR3 for beta chain variable domain of TCR clone 365822 (TRBV18, TRBJ1-5)
CASSPSDRSNQPQHF

SEQ ID NO: 731645 - protein, 10 aa, Homo sapiens
  CDR3 for alpha chain variable domain of TCR clone 365823 (TRAV21, TRAJ43)
CAVRIGDRRF

SEQ ID NO: 731646 - protein, 13 aa, Homo sapiens
  CDR3 for beta chain variable domain of TCR clone 365823 (TRBV20-1, TRBJ2-7)
CSAPGLADYEQYF

SEQ ID NO: 731647 - protein, 14 aa, Homo sapiens
  CDR3 for alpha chain variable domain of TCR clone 365824 (TRAV12-2, TRAJ13)
CAVKKTGGYQKVTF

SEQ ID NO: 731648 - protein, 15 aa, Homo sapiens
  CDR3 for beta chain variable domain of TCR clone 365824 (TRBV5-1, TRBJ2-1)
CASSPPRAPYNEQFL

SEQ ID NO: 731649 - protein, 12 aa, Homo sapiens
  CDR3 for alpha chain variable domain of TCR clone 365825 (TRAV8-6, TRAJ36)
CAVSDWLGQTTS

SEQ ID NO: 731650 - protein, 13 aa, Homo sapiens
  CDR3 for beta chain variable domain of TCR clone 365825 (TRBV4-2, TRBJ1-1)
CASSQAGNTEAFF

SEQ ID NO: 731651 - protein, 12 aa, Homo sapiens
  CDR3 for alpha chain variable domain of TCR clone 365826 (TRAV16, TRAJ10)
CSRTGGGNKLTF

SEQ ID NO: 731652 - protein, 16 aa, Homo sapiens
  CDR3 for beta chain variable domain of TCR clone 365826 (TRBV7-3, TRBJ2-2)
CASILKRGTLSGELFF

SEQ ID NO: 731653 - protein, 13 aa, Homo sapiens
  CDR3 for alpha chain variable domain of TCR clone 365827 (TRAV20, TRAJ42)
CAVQGGSQGNLIF

SEQ ID NO: 731654 - protein, 16 aa, Homo sapiens
  CDR3 for beta chain variable domain of TCR clone 365827 (TRBV5-1, TRBJ2-5)
CASSVRRTSGQETQYF

SEQ ID NO: 731655 - protein, 11 aa, Homo sapiens
  CDR3 for alpha chain variable domain of TCR clone 365828 (TRAV21, TRAJ9)
CAVPGGFKTIF

SEQ ID NO: 731656 - protein, 12 aa, Homo sapiens
  CDR3 for beta chain variable domain of TCR clone 365828 (TRBV20-1, TRBJ2-3)
CSARVGTETQYF

SEQ ID NO: 731657 - protein, 14 aa, Homo sapiens
  CDR3 for alpha chain variable domain of TCR clone 365829 (TRAV8-6, TRAJ13)
CAVFSSGGYQKVTF

SEQ ID NO: 731658 - protein, 15 aa, Homo sapiens
  CDR3 for beta chain variable domain of TCR clone 365829 (TRBV11-3, TRBJ2-3)
CASLKDGREGDTQYF

SEQ ID NO: 731659 - protein, 17 aa, Homo sapiens
  CDR3 for alpha chain variable domain of TCR clone 365830 (TRAV3, TRAJ38)
CAVRDCLNADNNRKLIW

SEQ ID NO: 731660 - protein, 17 aa, Homo sapiens
  CDR3 for beta chain variable domain of TCR clone 365830 (TRBV2, TRBJ2-1)
CASSEEGVRGQIDEQFF

SEQ ID NO: 731661 - protein, 17 aa, Homo sapiens
  CDR3 for alpha chain variable domain of TCR clone 365831 (TRAV3, TRAJ42)
CAVRDRDYGGIQGNPIF

SEQ ID NO: 731662 - protein, 14 aa, Homo sapiens
  CDR3 for beta chain variable domain of TCR clone 365831 (TRBV19, TRBJ2-2)
CASSTLHRSGELFF

SEQ ID NO: 731663 - protein, 13 aa, Homo sapiens
  CDR3 for alpha chain variable domain of TCR clone 365832 (TRAV8-3, TRAJ28)
CAVGAVGSYQLTF

SEQ ID NO: 731664 - protein, 14 aa, Homo sapiens
  CDR3 for beta chain variable domain of TCR clone 365832 (TRBV7-2, TRBJ2-7)
CANRSQGAAYEQYF

SEQ ID NO: 731665 - protein, 17 aa, Homo sapiens
  CDR3 for alpha chain variable domain of TCR clone 365833 (TRAV3, TRAJ6)
CAVRDGHRAGGSYIPTF

SEQ ID NO: 731666 - protein, 17 aa, Homo sapiens
  CDR3 for beta chain variable domain of TCR clone 365833 (TRBV7-9, TRBJ2-7)
CQSLTTSGSRTWYEQYF

SEQ ID NO: 731667 - protein, 15 aa, Homo sapiens
  CDR3 for alpha chain variable domain of TCR clone 365834 (TRAV4, TRAJ28)
CLVEGPGAGSYQLTF

SEQ ID NO: 731668 - protein, 15 aa, Homo sapiens
  CDR3 for beta chain variable domain of TCR clone 365834 (TRBV9, TRBJ2-3)
CASSVRGLAVDTQYF

SEQ ID NO: 731669 - protein, 16 aa, Homo sapiens
  CDR3 for alpha chain variable domain of TCR clone 365835 (TRAV12-3, TRAJ3)
CASRGPLYSSASKIIF

SEQ ID NO: 731670 - protein, 19 aa, Homo sapiens
  CDR3 for beta chain variable domain of TCR clone 365835 (TRBV19, TRBJ2-5)
CASSIGQVTDFFLGETQYF

SEQ ID NO: 731671 - protein, 13 aa, Homo sapiens
  CDR3 for alpha chain variable domain of TCR clone 365836 (TRAV26-1, TRAJ48)
CIVRVVGDEKLTF

SEQ ID NO: 731672 - protein, 20 aa, Homo sapiens
  CDR3 for beta chain variable domain of TCR clone 365836 (TRBV7-8, TRBJ2-2)
CASSHLFPGPTIHITGELFF

SEQ ID NO: 731673 - protein, 17 aa, Homo sapiens
  CDR3 for alpha chain variable domain of TCR clone 365837 (TRAV3, TRAJ42)
CAVRDRDYGGSQGNLIF

SEQ ID NO: 731674 - protein, 20 aa, Homo sapiens
  CDR3 for beta chain variable domain of TCR clone 365837 (TRBV28, TRBJ2-1)
CASAPIGRSPGLAGGNEQFF

SEQ ID NO: 731675 - protein, 13 aa, Homo sapiens
  CDR3 for alpha chain variable domain of TCR clone 365838 (TRAV21, TRAJ8)
CAAPNTGFQKLVF

SEQ ID NO: 731676 - protein, 15 aa, Homo sapiens
  CDR3 for beta chain variable domain of TCR clone 365838 (TRBV3-1, TRBJ2-5)
CASSRGQASWKTQYF

SEQ ID NO: 731677 - protein, 15 aa, Homo sapiens
  CDR3 for alpha chain variable domain of TCR clone 365839 (TRAV8-4, TRAJ29)
CAVSEDFRGNTPLVF

SEQ ID NO: 731678 - protein, 14 aa, Homo sapiens
  CDR3 for beta chain variable domain of TCR clone 365839 (TRBV13, TRBJ2-5)
CASSLDYPQETQYF

SEQ ID NO: 731679 - protein, 16 aa, Homo sapiens
  CDR3 for alpha chain variable domain of TCR clone 365840 (TRAV3, TRAJ37)
CAVRGKGSGNTGQLIF

SEQ ID NO: 731680 - protein, 15 aa, Homo sapiens
  CDR3 for beta chain variable domain of TCR clone 365840 (TRBV9, TRBJ1-4)
CASSVGGSTNEKLFF

SEQ ID NO: 731681 - protein, 14 aa, Homo sapiens
  CDR3 for alpha chain variable domain of TCR clone 365841 (TRAV20, TRAJ42)
CAVQAGGSQGNLIF

SEQ ID NO: 731682 - protein, 13 aa, Homo sapiens
  CDR3 for beta chain variable domain of TCR clone 365841 (TRBV13, TRBJ2-7)
CASSSGLTHEQYF

SEQ ID NO: 731683 - protein, 15 aa, Homo sapiens
  CDR3 for alpha chain variable domain of TCR clone 365842 (TRAV35, TRAJ58)
CAGRRQETSGSRLTF

SEQ ID NO: 731684 - protein, 11 aa, Homo sapiens
  CDR3 for beta chain variable domain of TCR clone 365842 (TRBV11-2, TRBJ1-1)
CASSINTVAFF

SEQ ID NO: 731685 - protein, 14 aa, Homo sapiens
  CDR3 for alpha chain variable domain of TCR clone 365843 (TRAV2, TRAJ23)
CAVMEDNQGGKLIF

SEQ ID NO: 731686 - protein, 17 aa, Homo sapiens
  CDR3 for beta chain variable domain of TCR clone 365843 (TRBV11-2, TRBJ2-1)
CASSLYPPGVEYNEQFF

SEQ ID NO: 731687 - protein, 13 aa, Homo sapiens
  CDR3 for alpha chain variable domain of TCR clone 365844 (TRAV14/DV4, TRAJ49)
CAMVENTGTQFYF

SEQ ID NO: 731688 - protein, 13 aa, Homo sapiens
  CDR3 for beta chain variable domain of TCR clone 365844 (TRBV11-3, TRBJ2-1)
CASSSRRVDEQFF

SEQ ID NO: 731689 - protein, 14 aa, Homo sapiens
  CDR3 for alpha chain variable domain of TCR clone 365845 (TRAV26-2, TRAJ32)
CCVGYGGATNKIIF

SEQ ID NO: 731690 - protein, 14 aa, Homo sapiens
  CDR3 for beta chain variable domain of TCR clone 365845 (TRBV7-6, TRBJ2-3)
CASSLGTVTDTQYF

SEQ ID NO: 731691 - protein, 11 aa, Homo sapiens
  CDR3 for alpha chain variable domain of TCR clone 365846 (TRAV1-2, TRAJ40)
CAVPGTYKYIF

SEQ ID NO: 731692 - protein, 14 aa, Homo sapiens
  CDR3 for beta chain variable domain of TCR clone 365846 (TRBV7-2, TRBJ2-7)
CASSLPPGQGPQYF

SEQ ID NO: 731693 - protein, 11 aa, Homo sapiens
  CDR3 for alpha chain variable domain of TCR clone 365847 (TRAV2, TRAJ33)
CAVESNYQLIW

SEQ ID NO: 731694 - protein, 18 aa, Homo sapiens
  CDR3 for beta chain variable domain of TCR clone 365847 (TRBV11-2, TRBJ2-6)
CASSLNPFLGTGANVLTF

SEQ ID NO: 731695 - protein, 14 aa, Homo sapiens
  CDR3 for alpha chain variable domain of TCR clone 365848 (TRAV16, TRAJ33)
CALSAMDSNYQLIW

SEQ ID NO: 731696 - protein, 16 aa, Homo sapiens
  CDR3 for beta chain variable domain of TCR clone 365848 (TRBV12-4, TRBJ2-3)
CASSCPSKTNTDTQYF

SEQ ID NO: 731697 - protein, 11 aa, Homo sapiens
  CDR3 for alpha chain variable domain of TCR clone 365849 (TRAV12-1, TRAJ40)
CGELGTYKYIF

SEQ ID NO: 731698 - protein, 14 aa, Homo sapiens
  CDR3 for beta chain variable domain of TCR clone 365849 (TRBV20-1, TRBJ2-2)
CSAPDTANTGELFF

SEQ ID NO: 731699 - protein, 13 aa, Homo sapiens
  CDR3 for alpha chain variable domain of TCR clone 365850 (TRAV13-1, TRAJ39)
CSKDSNAGNMLTF

SEQ ID NO: 731700 - protein, 15 aa, Homo sapiens
  CDR3 for beta chain variable domain of TCR clone 365850 (TRBV19, TRBJ1-1)
CASTSGQIQNTEAFF

SEQ ID NO: 731701 - protein, 16 aa, Homo sapiens
  CDR3 for alpha chain variable domain of TCR clone 365851 (TRAV30, TRAJ24)
CGTKIVDADSWGIFQF

SEQ ID NO: 731702 - protein, 14 aa, Homo sapiens
  CDR3 for beta chain variable domain of TCR clone 365851 (TRBV12-5, TRBJ2-5)
CASGSRTHQETQYF

SEQ ID NO: 731703 - protein, 13 aa, Homo sapiens
  CDR3 for alpha chain variable domain of TCR clone 365852 (TRAV17, TRAJ9)
CATDYTGGFKTIF

SEQ ID NO: 731704 - protein, 16 aa, Homo sapiens
  CDR3 for beta chain variable domain of TCR clone 365852 (TRBV27, TRBJ2-7)
CASSFQGGRGSYEQYF

SEQ ID NO: 731705 - protein, 12 aa, Homo sapiens
  CDR3 for alpha chain variable domain of TCR clone 365853 (TRAV38-2/DV8, TRAJ57)
CAWKVGSEKLVF

SEQ ID NO: 731706 - protein, 13 aa, Homo sapiens
  CDR3 for beta chain variable domain of TCR clone 365853 (TRBV5-1, TRBJ1-5)
CASSLAQDQHQHF

SEQ ID NO: 731707 - protein, 15 aa, Homo sapiens
  CDR3 for alpha chain variable domain of TCR clone 365854 (TRAV1-2, TRAJ38)
CAVSENAGNNRKLIW

SEQ ID NO: 731708 - protein, 16 aa, Homo sapiens
  CDR3 for beta chain variable domain of TCR clone 365854 (TRBV4-1, TRBJ2-7)
CASSFTAGQATYEQYF

SEQ ID NO: 731709 - protein, 13 aa, Homo sapiens
  CDR3 for alpha chain variable domain of TCR clone 365855 (TRAV14/DV4, TRAJ49)
CAMVEHTGNQFYF

SEQ ID NO: 731710 - protein, 13 aa, Homo sapiens
  CDR3 for beta chain variable domain of TCR clone 365855 (TRBV11-3, TRBJ2-1)
CASSSRRVDEQFF

SEQ ID NO: 731711 - protein, 15 aa, Homo sapiens
  CDR3 for alpha chain variable domain of TCR clone 365856 (TRAV17, TRAJ35)
CATAFVIGFGNVLYC

SEQ ID NO: 731712 - protein, 15 aa, Homo sapiens
  CDR3 for beta chain variable domain of TCR clone 365856 (TRBV7-9, TRBJ2-7)
CASSLALAEAYEQYF

SEQ ID NO: 731713 - protein, 13 aa, Homo sapiens
  CDR3 for alpha chain variable domain of TCR clone 365857 (TRAV2, TRAJ40)
CAVVTSGTYKYIF

SEQ ID NO: 731714 - protein, 14 aa, Homo sapiens
  CDR3 for beta chain variable domain of TCR clone 365857 (TRBV28, TRBJ2-1)
CASSYYTAYNEQLF

SEQ ID NO: 731715 - protein, 16 aa, Homo sapiens
  CDR3 for alpha chain variable domain of TCR clone 365858 (TRAV30, TRAJ24)
CGTEIVDADSWGKFQF

SEQ ID NO: 731716 - protein, 14 aa, Homo sapiens
  CDR3 for beta chain variable domain of TCR clone 365858 (TRBV28, TRBJ2-1)
CASSYSTAYNEQFF

SEQ ID NO: 731717 - protein, 16 aa, Homo sapiens
  CDR3 for alpha chain variable domain of TCR clone 365859 (TRAV3, TRAJ40)
CAVRDRIASGTYKYIF

SEQ ID NO: 731718 - protein, 11 aa, Homo sapiens
  CDR3 for beta chain variable domain of TCR clone 365859 (TRBV2, TRBJ1-1)
CASREGTEAFF

SEQ ID NO: 731719 - protein, 15 aa, Homo sapiens
  CDR3 for alpha chain variable domain of TCR clone 365860 (TRAV8-3, TRAJ27)
CAVGPSKTNAGKSTF

SEQ ID NO: 731720 - protein, 15 aa, Homo sapiens
  CDR3 for beta chain variable domain of TCR clone 365860 (TRBV7-2, TRBJ2-1)
CASSSGLAGANEQFF

SEQ ID NO: 731721 - protein, 14 aa, Homo sapiens
  CDR3 for alpha chain variable domain of TCR clone 365861 (TRAV12-3, TRAJ43)
CTMSLGGAGTRLTV

SEQ ID NO: 731722 - protein, 13 aa, Homo sapiens
  CDR3 for beta chain variable domain of TCR clone 365861 (TRBV7-9, TRBJ1-2)
CASSLKQNYGYTF

SEQ ID NO: 731723 - protein, 14 aa, Homo sapiens
  CDR3 for alpha chain variable domain of TCR clone 365862 (TRAV3, TRAJ28)
CAVRRGAGSYQLTC

SEQ ID NO: 731724 - protein, 16 aa, Homo sapiens
  CDR3 for beta chain variable domain of TCR clone 365862 (TRBV4-1, TRBJ2-7)
CASSQEWTSGPLEQYF

SEQ ID NO: 731725 - protein, 13 aa, Homo sapiens
  CDR3 for alpha chain variable domain of TCR clone 365863 (TRAV12-2, TRAJ50)
CAVIVTSYDKVLF

SEQ ID NO: 731726 - protein, 13 aa, Homo sapiens
  CDR3 for beta chain variable domain of TCR clone 365863 (TRBV7-9, TRBJ2-3)
CASSPGSTDTQYF

SEQ ID NO: 731727 - protein, 11 aa, Homo sapiens
  CDR3 for alpha chain variable domain of TCR clone 365864 (TRAV35, TRAJ34)
CWARNTDKLIF

SEQ ID NO: 731728 - protein, 14 aa, Homo sapiens
  CDR3 for beta chain variable domain of TCR clone 365864 (TRBV5-1, TRBJ2-7)
CASSRGESLYEQYV

SEQ ID NO: 731729 - protein, 18 aa, Homo sapiens
  CDR3 for alpha chain variable domain of TCR clone 365865 (TRAV13-1, TRAJ52)
CAASKRSAGGTSYGKLIF

SEQ ID NO: 731730 - protein, 15 aa, Homo sapiens
  CDR3 for beta chain variable domain of TCR clone 365865 (TRBV20-1, TRBJ1-1)
CSASRGVTGNTEAFF

SEQ ID NO: 731731 - protein, 16 aa, Homo sapiens
  CDR3 for alpha chain variable domain of TCR clone 365866 (TRAV20, TRAJ52)
CAVLPDGGTSYGKLTF

SEQ ID NO: 731732 - protein, 13 aa, Homo sapiens
  CDR3 for beta chain variable domain of TCR clone 365866 (TRBV7-3, TRBJ1-2)
CASSLKRGYGYTF

SEQ ID NO: 731733 - protein, 16 aa, Homo sapiens
  CDR3 for alpha chain variable domain of TCR clone 365867 (TRAV30, TRAJ24)
CGTEIVDADSWGKFQF

SEQ ID NO: 731734 - protein, 15 aa, Homo sapiens
  CDR3 for beta chain variable domain of TCR clone 365867 (TRBV20-1, TRBJ2-7)
CSARDRVYGMDEQYF

SEQ ID NO: 731735 - protein, 13 aa, Homo sapiens
  CDR3 for alpha chain variable domain of TCR clone 365868 (TRAV1-2, TRAJ11)
CAVRDSGYSTLTF

SEQ ID NO: 731736 - protein, 17 aa, Homo sapiens
  CDR3 for beta chain variable domain of TCR clone 365868 (TRBV13, TRBJ2-7)
CASSLKPGASGTYEQYF

SEQ ID NO: 731737 - protein, 15 aa, Homo sapiens
  CDR3 for alpha chain variable domain of TCR clone 365869 (TRAV3, TRAJ22)
CAVRDQGGSARQLTF

SEQ ID NO: 731738 - protein, 14 aa, Homo sapiens
  CDR3 for beta chain variable domain of TCR clone 365869 (TRBV7-2, TRBJ2-7)
CASSPKTSFYEQYF

SEQ ID NO: 731739 - protein, 15 aa, Homo sapiens
  CDR3 for alpha chain variable domain of TCR clone 365870 (TRAV3, TRAJ20)
CAVRDIKLSYYNLSF

SEQ ID NO: 731740 - protein, 15 aa, Homo sapiens
  CDR3 for beta chain variable domain of TCR clone 365870 (TRBV7-9, TRBJ1-6)
CASSSPGRGNSPLHF

SEQ ID NO: 731741 - protein, 20 aa, Homo sapiens
  CDR3 for alpha chain variable domain of TCR clone 365871 (TRAV26-1, TRAJ42)
CCVLLHRQTYHGGRQGNLIF

SEQ ID NO: 731742 - protein, 16 aa, Homo sapiens
  CDR3 for beta chain variable domain of TCR clone 365871 (TRBV7-3, TRBJ2-2)
CASSLKRGTLSGELFF

SEQ ID NO: 731743 - protein, 11 aa, Homo sapiens
  CDR3 for alpha chain variable domain of TCR clone 365872 (TRAV1-2, TRAJ40)
CAVPGTDKYIF

SEQ ID NO: 731744 - protein, 15 aa, Homo sapiens
  CDR3 for beta chain variable domain of TCR clone 365872 (TRBV25-1, TRBJ1-4)
CTSSPGDSTNEKLFF

SEQ ID NO: 731745 - protein, 11 aa, Homo sapiens
  CDR3 for alpha chain variable domain of TCR clone 365873 (TRAV13-1, TRAJ43)
CAAHNNNDMRF

SEQ ID NO: 731746 - protein, 15 aa, Homo sapiens
  CDR3 for beta chain variable domain of TCR clone 365873 (TRBV6-1, TRBJ2-2)
CASSRLRGDTGELLF

SEQ ID NO: 731747 - protein, 15 aa, Homo sapiens
  CDR3 for alpha chain variable domain of TCR clone 365874 (TRAV8-3, TRAJ11)
CAVGLLNSGSSTLPF

SEQ ID NO: 731748 - protein, 16 aa, Homo sapiens
  CDR3 for beta chain variable domain of TCR clone 365874 (TRBV7-9, TRBJ1-2)
CASSLGFSSGEDGYTF

SEQ ID NO: 731749 - protein, 16 aa, Homo sapiens
  CDR3 for alpha chain variable domain of TCR clone 365875 (TRAV4, TRAJ22)
CLVGDLYSGSARQLTF

SEQ ID NO: 731750 - protein, 16 aa, Homo sapiens
  CDR3 for beta chain variable domain of TCR clone 365875 (TRBV7-9, TRBJ2-1)
CASSDVAGGSNNEQFF

SEQ ID NO: 731751 - protein, 14 aa, Homo sapiens
  CDR3 for alpha chain variable domain of TCR clone 365876 (TRAV12-2, TRAJ13)
CAVKQTGGYQKVTF

SEQ ID NO: 731752 - protein, 15 aa, Homo sapiens
  CDR3 for beta chain variable domain of TCR clone 365876 (TRBV9, TRBJ1-6)
CASSVAGTGDSPLHF

SEQ ID NO: 731753 - protein, 11 aa, Homo sapiens
  CDR3 for alpha chain variable domain of TCR clone 365877 (TRAV2, TRAJ13)
CASGGYQKVTF

SEQ ID NO: 731754 - protein, 17 aa, Homo sapiens
  CDR3 for beta chain variable domain of TCR clone 365877 (TRBV28, TRBJ2-7)
CASSPLRGRRWKGGQYF

SEQ ID NO: 731755 - protein, 12 aa, Homo sapiens
  CDR3 for alpha chain variable domain of TCR clone 365878 (TRAV8-3, TRAJ26)
CAGDNYGQNFVF

SEQ ID NO: 731756 - protein, 15 aa, Homo sapiens
  CDR3 for beta chain variable domain of TCR clone 365878 (TRBV20-1, TRBJ1-1)
CSASRGVTGNTEAFF

SEQ ID NO: 731757 - protein, 17 aa, Homo sapiens
  CDR3 for alpha chain variable domain of TCR clone 365879 (TRAV13-1, TRAJ3)
CAASKAGRGSSASKIIF

SEQ ID NO: 731758 - protein, 15 aa, Homo sapiens
  CDR3 for beta chain variable domain of TCR clone 365879 (TRBV20-1, TRBJ1-5)
CSAREGVHSNQPQHF

SEQ ID NO: 731759 - protein, 18 aa, Homo sapiens
  CDR3 for alpha chain variable domain of TCR clone 365880 (TRAV26-1, TRAJ23)
CIVRVGLEVWNQGGKLIF

SEQ ID NO: 731760 - protein, 15 aa, Homo sapiens
  CDR3 for beta chain variable domain of TCR clone 365880 (TRBV9, TRBJ1-6)
CASRVAGTGDSPLHF

SEQ ID NO: 731761 - protein, 14 aa, Homo sapiens
  CDR3 for alpha chain variable domain of TCR clone 365881 (TRAV16, TRAJ39)
CALGKNNAGNMLTF

SEQ ID NO: 731762 - protein, 15 aa, Homo sapiens
  CDR3 for beta chain variable domain of TCR clone 365881 (TRBV9, TRBJ1-6)
CASSVAGTGDSPLHF

SEQ ID NO: 731763 - protein, 12 aa, Homo sapiens
  CDR3 for alpha chain variable domain of TCR clone 365882 (TRAV27, TRAJ36)
CAGMTGANNNFF

SEQ ID NO: 731764 - protein, 14 aa, Homo sapiens
  CDR3 for beta chain variable domain of TCR clone 365882 (TRBV12-4, TRBJ2-3)
CASSLVPSTDTQYF

SEQ ID NO: 731765 - protein, 16 aa, Homo sapiens
  CDR3 for alpha chain variable domain of TCR clone 365883 (TRAV3, TRAJ37)
CAVRPHGSGNTGKLIF

SEQ ID NO: 731766 - protein, 15 aa, Homo sapiens
  CDR3 for beta chain variable domain of TCR clone 365883 (TRBV7-9, TRBJ2-2)
CASRPEGTSTGELFF

SEQ ID NO: 731767 - protein, 17 aa, Homo sapiens
  CDR3 for alpha chain variable domain of TCR clone 365884 (TRAV13-2, TRAJ5)
CAESVDIVGHGQESTYF

SEQ ID NO: 731768 - protein, 18 aa, Homo sapiens
  CDR3 for beta chain variable domain of TCR clone 365884 (TRBV4-1, TRBJ2-3)
CASSHHLAGGRSTDTQYF

SEQ ID NO: 731769 - protein, 13 aa, Homo sapiens
  CDR3 for alpha chain variable domain of TCR clone 365885 (TRAV23/DV6, TRAJ12)
CAPRVASSYKLIF

SEQ ID NO: 731770 - protein, 12 aa, Homo sapiens
  CDR3 for beta chain variable domain of TCR clone 365885 (TRBV7-8, TRBJ2-7)
CASSLGDREQYF

SEQ ID NO: 731771 - protein, 12 aa, Homo sapiens
  CDR3 for alpha chain variable domain of TCR clone 365886 (TRAV12-2, TRAJ52)
IGGGTSYGKLTF

SEQ ID NO: 731772 - protein, 15 aa, Homo sapiens
  CDR3 for beta chain variable domain of TCR clone 365886 (TRBV11-3, TRBJ2-3)
CASLKDGREGDTQYF

SEQ ID NO: 731773 - protein, 14 aa, Homo sapiens
  CDR3 for alpha chain variable domain of TCR clone 365887 (TRAV8-3, TRAJ4)
FAVGAAGGYNKLIF

SEQ ID NO: 731774 - protein, 15 aa, Homo sapiens
  CDR3 for beta chain variable domain of TCR clone 365887 (TRBV20-1, TRBJ2-5)
SAVLRLGQGSGRQYF

SEQ ID NO: 731775 - protein, 14 aa, Homo sapiens
  CDR3 for alpha chain variable domain of TCR clone 365888 (TRAV29/DV5, TRAJ36)
CAARRKTGANNLFF

SEQ ID NO: 731776 - protein, 13 aa, Homo sapiens
  CDR3 for beta chain variable domain of TCR clone 365888 (TRBV10-3, TRBJ1-1)
YAIIPEGGTEAFF

SEQ ID NO: 731777 - protein, 15 aa, Homo sapiens
  CDR3 for alpha chain variable domain of TCR clone 365889 (TRAV3, TRAJ5)
CAVRDLDTGRRALTF

SEQ ID NO: 731778 - protein, 14 aa, Homo sapiens
  CDR3 for beta chain variable domain of TCR clone 365889 (TRBV25-1, TRBJ1-4)
CASSGGGEPEKLFF

SEQ ID NO: 731779 - protein, 11 aa, Homo sapiens
  CDR3 for alpha chain variable domain of TCR clone 365890 (TRAV3, TRAJ21)
CAVGTFNKFYF

SEQ ID NO: 731780 - protein, 16 aa, Homo sapiens
  CDR3 for beta chain variable domain of TCR clone 365890 (TRBV19, TRBJ2-1)
CASSRAGPSSYNEQFF

SEQ ID NO: 731781 - protein, 14 aa, Homo sapiens
  CDR3 for alpha chain variable domain of TCR clone 365891 (TRAV13-1, TRAJ35)
CASSKGGFGNVLHC

SEQ ID NO: 731782 - protein, 15 aa, Homo sapiens
  CDR3 for beta chain variable domain of TCR clone 365891 (TRBV28, TRBJ2-1)
CASSGLAEVDNEQFF

SEQ ID NO: 731783 - protein, 15 aa, Homo sapiens
  CDR3 for alpha chain variable domain of TCR clone 365892 (TRAV21, TRAJ53)
CATLNSGGSNYKLTF

SEQ ID NO: 731784 - protein, 14 aa, Homo sapiens
  CDR3 for beta chain variable domain of TCR clone 365892 (TRBV19, TRBJ2-7)
CASNFRDTFTGMYF

SEQ ID NO: 731785 - protein, 11 aa, Homo sapiens
  CDR3 for alpha chain variable domain of TCR clone 365893 (TRAV1-2, TRAJ20)
CAVANDYKLSF

SEQ ID NO: 731786 - protein, 14 aa, Homo sapiens
  CDR3 for beta chain variable domain of TCR clone 365893 (TRBV20-1, TRBJ2-4)
CSASGRVGENIQYF

SEQ ID NO: 731787 - protein, 15 aa, Homo sapiens
  CDR3 for alpha chain variable domain of TCR clone 365894 (TRAV17, TRAJ56)
CATEPFTGANSKLTF

SEQ ID NO: 731788 - protein, 15 aa, Homo sapiens
  CDR3 for beta chain variable domain of TCR clone 365894 (TRBV4-1, TRBJ1-4)
CASSDTGGTNEKLFF

SEQ ID NO: 731789 - protein, 14 aa, Homo sapiens
  CDR3 for alpha chain variable domain of TCR clone 365895 (TRAV12-3, TRAJ13)
CAMKNSRGYQKVTF

SEQ ID NO: 731790 - protein, 14 aa, Homo sapiens
  CDR3 for beta chain variable domain of TCR clone 365895 (TRBV11-2, TRBJ2-5)
CASSRTGGIETQYF

SEQ ID NO: 731791 - protein, 13 aa, Homo sapiens
  CDR3 for alpha chain variable domain of TCR clone 365896 (TRAV13-2, TRAJ48)
CAAMDFGNEKLTF

SEQ ID NO: 731792 - protein, 14 aa, Homo sapiens
  CDR3 for beta chain variable domain of TCR clone 365896 (TRBV19, TRBJ1-5)
CASGTEVYNQPQHF

SEQ ID NO: 731793 - protein, 13 aa, Homo sapiens
  CDR3 for alpha chain variable domain of TCR clone 365897 (TRAV23/DV6, TRAJ34)
CAVIENNTDKLIF

SEQ ID NO: 731794 - protein, 13 aa, Homo sapiens
  CDR3 for beta chain variable domain of TCR clone 365897 (TRBV29-1, TRBJ2-7)
CSVGPSGGYEQYF

SEQ ID NO: 731795 - protein, 16 aa, Homo sapiens
  CDR3 for alpha chain variable domain of TCR clone 365898 (TRAV12-1, TRAJ42)
CVVTPYYGGSQGNLIF

SEQ ID NO: 731796 - protein, 15 aa, Homo sapiens
  CDR3 for beta chain variable domain of TCR clone 365898 (TRBV4-3, TRBJ2-7)
CPSSQGGRGIYEQYF

SEQ ID NO: 731797 - protein, 14 aa, Homo sapiens
  CDR3 for alpha chain variable domain of TCR clone 365899 (TRAV12-1, TRAJ6)
CVVARIRRKVHTYI

SEQ ID NO: 731798 - protein, 15 aa, Homo sapiens
  CDR3 for beta chain variable domain of TCR clone 365899 (TRBV7-3, TRBJ2-1)
CASSLKASEYNERFF

SEQ ID NO: 731799 - protein, 12 aa, Homo sapiens
  CDR3 for alpha chain variable domain of TCR clone 365900 (TRAV17, TRAJ30)
CATDARADKIIF

SEQ ID NO: 731800 - protein, 16 aa, Homo sapiens
  CDR3 for beta chain variable domain of TCR clone 365900 (TRBV5-7, TRBJ2-7)
CASSPTSGRELDEQYF

SEQ ID NO: 731801 - protein, 13 aa, Homo sapiens
  CDR3 for alpha chain variable domain of TCR clone 365901 (TRAV13-1, TRAJ5)
CAASDTGRRALTF

SEQ ID NO: 731802 - protein, 12 aa, Homo sapiens
  CDR3 for beta chain variable domain of TCR clone 365901 (TRBV28, TRBJ2-3)
CASSVYRDTQYC

SEQ ID NO: 731803 - protein, 14 aa, Homo sapiens
  CDR3 for alpha chain variable domain of TCR clone 365902 (TRAV21, TRAJ35)
CAVMPIGFGNVLHC

SEQ ID NO: 731804 - protein, 13 aa, Homo sapiens
  CDR3 for beta chain variable domain of TCR clone 365902 (TRBV23-1, TRBJ1-4)
CASRGKFNEELFF

SEQ ID NO: 731805 - protein, 21 aa, Homo sapiens
  CDR3 for alpha chain variable domain of TCR clone 365903 (TRAV2, TRAJ20)
AAHPPGAGGRCCCLRDCKLSF

SEQ ID NO: 731806 - protein, 12 aa, Homo sapiens
  CDR3 for beta chain variable domain of TCR clone 365903 (TRBV11-2, TRBJ2-2)
CASSLGGGELFF

SEQ ID NO: 731807 - protein, 18 aa, Homo sapiens
  CDR3 for alpha chain variable domain of TCR clone 365904 (TRAV12-3, TRAJ52)
CAMSRTNVGGTSYGKLTF

SEQ ID NO: 731808 - protein, 15 aa, Homo sapiens
  CDR3 for beta chain variable domain of TCR clone 365904 (TRBV19, TRBJ1-2)
CASSVGQVLNYGYTF

SEQ ID NO: 731809 - protein, 14 aa, Homo sapiens
  CDR3 for alpha chain variable domain of TCR clone 365905 (TRAV24, TRAJ42)
CAQNYGGSQGNLIF

SEQ ID NO: 731810 - protein, 15 aa, Homo sapiens
  CDR3 for beta chain variable domain of TCR clone 365905 (TRBV19, TRBJ1-5)
CASSIPGGAGQPQYF

SEQ ID NO: 731811 - protein, 14 aa, Homo sapiens
  CDR3 for alpha chain variable domain of TCR clone 365906 (TRAV35, TRAJ13)
CAGSPSGGYQKFTF

SEQ ID NO: 731812 - protein, 17 aa, Homo sapiens
  CDR3 for beta chain variable domain of TCR clone 365906 (TRBV7-6, TRBJ2-5)
CASSPGLADPWGETQYF

SEQ ID NO: 731813 - protein, 10 aa, Homo sapiens
  CDR3 for alpha chain variable domain of TCR clone 365907 (TRAV20, TRAJ22)
CAAPARQLTF

SEQ ID NO: 731814 - protein, 14 aa, Homo sapiens
  CDR3 for beta chain variable domain of TCR clone 365907 (TRBV19, TRBJ2-1)
CACSMGSGATEQFF

SEQ ID NO: 731815 - protein, 14 aa, Homo sapiens
  CDR3 for alpha chain variable domain of TCR clone 365908 (TRAV1-2, TRAJ15)
CAVRDRQAGTALIS

SEQ ID NO: 731816 - protein, 14 aa, Homo sapiens
  CDR3 for beta chain variable domain of TCR clone 365908 (TRBV7-8, TRBJ2-7)
CASSPRDRVYEQYF

SEQ ID NO: 731817 - protein, 15 aa, Homo sapiens
  CDR3 for alpha chain variable domain of TCR clone 365909 (TRAV12-1, TRAJ23)
CGERSRCNQGGKLIF

SEQ ID NO: 731818 - protein, 14 aa, Homo sapiens
  CDR3 for beta chain variable domain of TCR clone 365909 (TRBV19, TRBJ2-1)
CASPTFVLSGEQFF

SEQ ID NO: 731819 - protein, 14 aa, Homo sapiens
  CDR3 for alpha chain variable domain of TCR clone 365910 (TRAV23/DV6, TRAJ21)
CAAYKSGPRDKFYF

SEQ ID NO: 731820 - protein, 15 aa, Homo sapiens
  CDR3 for beta chain variable domain of TCR clone 365910 (TRBV5-4, TRBJ2-2)
CAISLTSRGTGELFF

SEQ ID NO: 731821 - protein, 17 aa, Homo sapiens
  CDR3 for alpha chain variable domain of TCR clone 365911 (TRAV3, TRAJ38)
CAVRDCLNAGNNRKLIW

SEQ ID NO: 731822 - protein, 15 aa, Homo sapiens
  CDR3 for beta chain variable domain of TCR clone 365911 (TRBV20-1, TRBJ2-7)
CSARDRVSGMDEKYF

SEQ ID NO: 731823 - protein, 15 aa, Homo sapiens
  CDR3 for alpha chain variable domain of TCR clone 365912 (TRAV4, TRAJ39)
CLVGPNNNAGNMLTF

SEQ ID NO: 731824 - protein, 15 aa, Homo sapiens
  CDR3 for beta chain variable domain of TCR clone 365912 (TRBV2, TRBJ2-1)
CASSELAGSYNEQFF

SEQ ID NO: 731825 - protein, 13 aa, Homo sapiens
  CDR3 for alpha chain variable domain of TCR clone 365913 (TRAV20, TRAJ49)
CAVQARTGHQFYF

SEQ ID NO: 731826 - protein, 14 aa, Homo sapiens
  CDR3 for beta chain variable domain of TCR clone 365913 (TRBV5-1, TRBJ1-1)
CASSLQGASTEAFF

SEQ ID NO: 731827 - protein, 19 aa, Homo sapiens
  CDR3 for alpha chain variable domain of TCR clone 365914 (TRAV26-1, TRAJ28)
CIVRVAHAYSGAGSYQLTF

SEQ ID NO: 731828 - protein, 14 aa, Homo sapiens
  CDR3 for beta chain variable domain of TCR clone 365914 (TRBV11-2, TRBJ2-1)
CASSPGSRDNEQFF

SEQ ID NO: 731829 - protein, 14 aa, Homo sapiens
  CDR3 for alpha chain variable domain of TCR clone 365915 (TRAV20, TRAJ22)
CAVQVSGSARQLTF

SEQ ID NO: 731830 - protein, 15 aa, Homo sapiens
  CDR3 for beta chain variable domain of TCR clone 365915 (TRBV7-2, TRBJ2-1)
CASTHGTGIYNEQFF

SEQ ID NO: 731831 - protein, 13 aa, Homo sapiens
  CDR3 for alpha chain variable domain of TCR clone 365916 (TRAV12-3, TRAJ54)
CAMSVQGAQKLVF

SEQ ID NO: 731832 - protein, 13 aa, Homo sapiens
  CDR3 for beta chain variable domain of TCR clone 365916 (TRBV7-8, TRBJ2-7)
CQQPRDRVYEQYF

SEQ ID NO: 731833 - protein, 11 aa, Homo sapiens
  CDR3 for alpha chain variable domain of TCR clone 365917 (TRAV25, TRAJ47)
CAVEYGNKLVF

SEQ ID NO: 731834 - protein, 15 aa, Homo sapiens
  CDR3 for beta chain variable domain of TCR clone 365917 (TRBV12-4, TRBJ2-5)
CASSPPTGLQETQYF

SEQ ID NO: 731835 - protein, 10 aa, Homo sapiens
  CDR3 for alpha chain variable domain of TCR clone 365918 (TRAV23/DV6, TRAJ57)
CAASSTLSQG

SEQ ID NO: 731836 - protein, 15 aa, Homo sapiens
  CDR3 for beta chain variable domain of TCR clone 365918 (TRBV18, TRBJ2-1)
CASLPDRGRDNEQFF

SEQ ID NO: 731837 - protein, 13 aa, Homo sapiens
  CDR3 for alpha chain variable domain of TCR clone 365919 (TRAV3, TRAJ8)
CAVRFTGFQKLVF

SEQ ID NO: 731838 - protein, 12 aa, Homo sapiens
  CDR3 for beta chain variable domain of TCR clone 365919 (TRBV2, TRBJ1-2)
CASSWQTYGYTF

SEQ ID NO: 731839 - protein, 15 aa, Homo sapiens
  CDR3 for alpha chain variable domain of TCR clone 365920 (TRAV17, TRAJ48)
CATDEANFGNEKLTF

SEQ ID NO: 731840 - protein, 14 aa, Homo sapiens
  CDR3 for beta chain variable domain of TCR clone 365920 (TRBV10-3, TRBJ1-3)
FAIRGQGAGNTMYF

SEQ ID NO: 731841 - protein, 15 aa, Homo sapiens
  CDR3 for alpha chain variable domain of TCR clone 365921 (TRAV1-2, TRAJ30)
CAVRPHGHRDDKIIF

SEQ ID NO: 731842 - protein, 16 aa, Homo sapiens
  CDR3 for beta chain variable domain of TCR clone 365921 (TRBV24-1, TRBJ2-3)
CATSDSRQDLTDTQYF

SEQ ID NO: 731843 - protein, 14 aa, Homo sapiens
  CDR3 for alpha chain variable domain of TCR clone 365922 (TRAV17, TRAJ11)
CASDTSRGYSTLTF

SEQ ID NO: 731844 - protein, 13 aa, Homo sapiens
  CDR3 for beta chain variable domain of TCR clone 365922 (TRBV19, TRBJ2-5)
CASRDSRRETQYF

SEQ ID NO: 731845 - protein, 15 aa, Homo sapiens
  CDR3 for alpha chain variable domain of TCR clone 365923 (TRAV8-3, TRAJ45)
CASSYSGGGADGLTF

SEQ ID NO: 731846 - protein, 15 aa, Homo sapiens
  CDR3 for beta chain variable domain of TCR clone 365923 (TRBV29-1, TRBJ2-7)
CSVEFFDRGSYEQYF

SEQ ID NO: 731847 - protein, 13 aa, Homo sapiens
  CDR3 for alpha chain variable domain of TCR clone 365924 (TRAV12-3, TRAJ7)
CAMSASGNNRLAF

SEQ ID NO: 731848 - protein, 14 aa, Homo sapiens
  CDR3 for beta chain variable domain of TCR clone 365924 (TRBV13, TRBJ2-5)
CAGSLGPRGETKYF

SEQ ID NO: 731849 - protein, 12 aa, Homo sapiens
  CDR3 for alpha chain variable domain of TCR clone 365925 (TRAV8-3, TRAJ26)
CAGDNFGQNFVF

SEQ ID NO: 731850 - protein, 18 aa, Homo sapiens
  CDR3 for beta chain variable domain of TCR clone 365925 (TRBV12-4, TRBJ2-2)
CASSLVAGTRGRTGELFF

SEQ ID NO: 731851 - protein, 11 aa, Homo sapiens
  CDR3 for alpha chain variable domain of TCR clone 365926 (TRAV2, TRAJ13)
CASVGYQIVTF

SEQ ID NO: 731852 - protein, 20 aa, Homo sapiens
  CDR3 for beta chain variable domain of TCR clone 365926 (TRBV28, TRBJ2-1)
CASTPIGRSPGLAGGNEQFF

SEQ ID NO: 731853 - protein, 15 aa, Homo sapiens
  CDR3 for alpha chain variable domain of TCR clone 365927 (TRAV26-1, TRAJ29)
CIVRVEGSGNTPLVF

SEQ ID NO: 731854 - protein, 15 aa, Homo sapiens
  CDR3 for beta chain variable domain of TCR clone 365927 (TRBV7-9, TRBJ1-5)
CASSQGHQRTQPQHL

SEQ ID NO: 731855 - protein, 15 aa, Homo sapiens
  CDR3 for alpha chain variable domain of TCR clone 365928 (TRAV29/DV5, TRAJ24)
CAASGATDSWGKFQF

SEQ ID NO: 731856 - protein, 13 aa, Homo sapiens
  CDR3 for beta chain variable domain of TCR clone 365928 (TRBV19, TRBJ1-2)
CASSVPGQDGDTF

SEQ ID NO: 731857 - protein, 22 aa, Homo sapiens
  CDR3 for alpha chain variable domain of TCR clone 365929 (TRAV27, TRAJ41)
CAVRTQIPDIQNPDPAVYQLRD

SEQ ID NO: 731858 - protein, 16 aa, Homo sapiens
  CDR3 for beta chain variable domain of TCR clone 365929 (TRBV5-1, TRBJ2-3)
FASSLGLAVYTDTQYF

SEQ ID NO: 731859 - protein, 21 aa, Homo sapiens
  CDR3 for alpha chain variable domain of TCR clone 365930 (TRAV12-1, TRAJ32)
SSVIQPPTSMNYGGATNKLIF

SEQ ID NO: 731860 - protein, 15 aa, Homo sapiens
  CDR3 for beta chain variable domain of TCR clone 365930 (TRBV7-9, TRBJ1-4)
CASSRTGGFNDKLFF

SEQ ID NO: 731861 - protein, 13 aa, Homo sapiens
  CDR3 for alpha chain variable domain of TCR clone 365931 (TRAV35, TRAJ20)
CAGPSFNDYKLSF

SEQ ID NO: 731862 - protein, 12 aa, Homo sapiens
  CDR3 for beta chain variable domain of TCR clone 365931 (TRBV20-1, TRBJ1-1)
CSARHSGTEAFF

SEQ ID NO: 731863 - protein, 16 aa, Homo sapiens
  CDR3 for alpha chain variable domain of TCR clone 365932 (TRAV21, TRAJ52)
CAVTDAGGTSYGKLTF

SEQ ID NO: 731864 - protein, 13 aa, Homo sapiens
  CDR3 for beta chain variable domain of TCR clone 365932 (TRBV20-1, TRBJ2-3)
CSARLAGTDTQYF

SEQ ID NO: 731865 - protein, 16 aa, Homo sapiens
  CDR3 for alpha chain variable domain of TCR clone 365933 (TRAV13-1, TRAJ45)
CAARGSRKGGADGLTF

SEQ ID NO: 731866 - protein, 16 aa, Homo sapiens
  CDR3 for beta chain variable domain of TCR clone 365933 (TRBV12-4, TRBJ1-5)
CASSRPVGGSNQPQHF

SEQ ID NO: 731867 - protein, 14 aa, Homo sapiens
  CDR3 for alpha chain variable domain of TCR clone 365934 (TRAV13-1, TRAJ44)
CAAKATGTASKLTF

SEQ ID NO: 731868 - protein, 17 aa, Homo sapiens
  CDR3 for beta chain variable domain of TCR clone 365934 (TRBV11-3, TRBJ2-1)
CASSLYPPGVEYNEQFF

SEQ ID NO: 731869 - protein, 13 aa, Homo sapiens
  CDR3 for alpha chain variable domain of TCR clone 365935 (TRAV13-1, TRAJ6)
CAASKGGRYIPTF

SEQ ID NO: 731870 - protein, 13 aa, Homo sapiens
  CDR3 for beta chain variable domain of TCR clone 365935 (TRBV7-9, TRBJ2-5)
CASLPSGRETQYF

SEQ ID NO: 731871 - protein, 14 aa, Homo sapiens
  CDR3 for alpha chain variable domain of TCR clone 365936 (TRAV12-3, TRAJ10)
SHLPLTGGGNKLTF

SEQ ID NO: 731872 - protein, 15 aa, Homo sapiens
  CDR3 for beta chain variable domain of TCR clone 365936 (TRBV11-1, TRBJ2-7)
CASSLNYGASYEQYF

SEQ ID NO: 731873 - protein, 18 aa, Homo sapiens
  CDR3 for alpha chain variable domain of TCR clone 365937 (TRAV36/DV7, )
CALTDIQNPDPAVYQLRD

SEQ ID NO: 731874 - protein, 13 aa, Homo sapiens
  CDR3 for beta chain variable domain of TCR clone 365937 (TRBV4-1, TRBJ2-7)
CASSQGRAYEQYF

SEQ ID NO: 731875 - protein, 12 aa, Homo sapiens
  CDR3 for alpha chain variable domain of TCR clone 365938 (TRAV17, TRAJ47)
CAPTVRGNKLVF

SEQ ID NO: 731876 - protein, 14 aa, Homo sapiens
  CDR3 for beta chain variable domain of TCR clone 365938 (TRBV25-1, TRBJ1-1)
CASTHLGGNTEAFF

SEQ ID NO: 731877 - protein, 14 aa, Homo sapiens
  CDR3 for alpha chain variable domain of TCR clone 365939 (TRAV12-3, TRAJ10)
SHLPLTGGGNKLTF

SEQ ID NO: 731878 - protein, 13 aa, Homo sapiens
  CDR3 for beta chain variable domain of TCR clone 365939 (TRBV7-3, TRBJ2-5)
CASSSDREETQYF

SEQ ID NO: 731879 - protein, 14 aa, Homo sapiens
  CDR3 for alpha chain variable domain of TCR clone 365940 (TRAV14/DV4, TRAJ41)
CAGGGPDSGYALNF

SEQ ID NO: 731880 - protein, 12 aa, Homo sapiens
  CDR3 for beta chain variable domain of TCR clone 365940 (TRBV20-1, TRBJ2-7)
CSAITPTKEQYF

SEQ ID NO: 731881 - protein, 14 aa, Homo sapiens
  CDR3 for alpha chain variable domain of TCR clone 365941 (TRAV8-4, TRAJ38)
CAVSYAGNNRKLIW

SEQ ID NO: 731882 - protein, 15 aa, Homo sapiens
  CDR3 for beta chain variable domain of TCR clone 365941 (TRBV12-4, TRBJ2-1)
CASSLLATGNNEQFF

SEQ ID NO: 731883 - protein, 15 aa, Homo sapiens
  CDR3 for alpha chain variable domain of TCR clone 365942 (TRAV30, TRAJ32)
CGTEILGGAPNKLIF

SEQ ID NO: 731884 - protein, 17 aa, Homo sapiens
  CDR3 for beta chain variable domain of TCR clone 365942 (TRBV5-4, TRBJ2-1)
CASSSAGGRGPYNEQFF

SEQ ID NO: 731885 - protein, 13 aa, Homo sapiens
  CDR3 for alpha chain variable domain of TCR clone 365943 (TRAV25, TRAJ30)
CAGRVDRDDKLIF

SEQ ID NO: 731886 - protein, 17 aa, Homo sapiens
  CDR3 for beta chain variable domain of TCR clone 365943 (TRBV7-9, TRBJ2-6)
CASSFGAGYSGANVLTF

SEQ ID NO: 731887 - protein, 16 aa, Homo sapiens
  CDR3 for alpha chain variable domain of TCR clone 365944 (TRAV26-1, )
CIDIQNPDPAVYQLRD

SEQ ID NO: 731888 - protein, 13 aa, Homo sapiens
  CDR3 for beta chain variable domain of TCR clone 365944 (TRBV24-1, TRBJ2-2)
CATSETNTGELFF

SEQ ID NO: 731889 - protein, 14 aa, Homo sapiens
  CDR3 for alpha chain variable domain of TCR clone 365945 (TRAV38-1, TRAJ45)
CAYYSGGSADGRTF

SEQ ID NO: 731890 - protein, 20 aa, Homo sapiens
  CDR3 for beta chain variable domain of TCR clone 365945 (TRBV28, TRBJ2-1)
CASTPIGRSPGLAGGNEQFF

SEQ ID NO: 731891 - protein, 16 aa, Homo sapiens
  CDR3 for alpha chain variable domain of TCR clone 365946 (TRAV35, TRAJ20)
CWADPSSGFNDYKLSF

SEQ ID NO: 731892 - protein, 16 aa, Homo sapiens
  CDR3 for beta chain variable domain of TCR clone 365946 (TRBV4-3, TRBJ1-6)
CASSAQPGGGGSPLHF

SEQ ID NO: 731893 - protein, 12 aa, Homo sapiens
  CDR3 for alpha chain variable domain of TCR clone 365947 (TRAV2, TRAJ10)
CASTGVGNKLTF

SEQ ID NO: 731894 - protein, 13 aa, Homo sapiens
  CDR3 for beta chain variable domain of TCR clone 365947 (TRBV19, TRBJ1-5)
CASSMRGYQPQHF

SEQ ID NO: 731895 - protein, 12 aa, Homo sapiens
  CDR3 for alpha chain variable domain of TCR clone 365948 (TRAV30, TRAJ43)
CGTEERGNDMRF

SEQ ID NO: 731896 - protein, 15 aa, Homo sapiens
  CDR3 for beta chain variable domain of TCR clone 365948 (TRBV5-1, TRBJ2-5)
CASSSGREMVETQYL

SEQ ID NO: 731897 - protein, 13 aa, Homo sapiens
  CDR3 for alpha chain variable domain of TCR clone 365949 (TRAV3, TRAJ21)
CAVREPDFNKFYF

SEQ ID NO: 731898 - protein, 15 aa, Homo sapiens
  CDR3 for beta chain variable domain of TCR clone 365949 (TRBV2, TRBJ2-1)
CASSELAGVYNEQFF

SEQ ID NO: 731899 - protein, 14 aa, Homo sapiens
  CDR3 for alpha chain variable domain of TCR clone 365950 (TRAV17, TRAJ16)
CATADFSDGQKLLF

SEQ ID NO: 731900 - protein, 13 aa, Homo sapiens
  CDR3 for beta chain variable domain of TCR clone 365950 (TRBV7-7, TRBJ2-2)
CASSLTSAGELFF

SEQ ID NO: 731901 - protein, 14 aa, Homo sapiens
  CDR3 for alpha chain variable domain of TCR clone 365951 (TRAV38-2/DV8, TRAJ23)
CAYRKANQGGKLIF

SEQ ID NO: 731902 - protein, 11 aa, Homo sapiens
  CDR3 for beta chain variable domain of TCR clone 365951 (TRBV19, TRBJ1-1)
CASSIGSEAFF

SEQ ID NO: 731903 - protein, 12 aa, Homo sapiens
  CDR3 for alpha chain variable domain of TCR clone 365952 (TRAV27, TRAJ34)
CAGAKNTDKLIF

SEQ ID NO: 731904 - protein, 14 aa, Homo sapiens
  CDR3 for beta chain variable domain of TCR clone 365952 (TRBV25-1, TRBJ1-1)
CASTHLGGNTEAFF

SEQ ID NO: 731905 - protein, 13 aa, Homo sapiens
  CDR3 for alpha chain variable domain of TCR clone 365953 (TRAV1-2, TRAJ9)
CDVLNTGGFKTIF

SEQ ID NO: 731906 - protein, 14 aa, Homo sapiens
  CDR3 for beta chain variable domain of TCR clone 365953 (TRBV20-1, TRBJ2-3)
CSARGGTSTDTQYF

SEQ ID NO: 731907 - protein, 11 aa, Homo sapiens
  CDR3 for alpha chain variable domain of TCR clone 365954 (TRAV21, TRAJ31)
CAVRNNARLMF

SEQ ID NO: 731908 - protein, 16 aa, Homo sapiens
  CDR3 for beta chain variable domain of TCR clone 365954 (TRBV2, TRBJ2-2)
CASRRPSGTNTGELFS

SEQ ID NO: 731909 - protein, 14 aa, Homo sapiens
  CDR3 for alpha chain variable domain of TCR clone 365955 (TRAV3, TRAJ22)
CAVRDYGSARQLTF

SEQ ID NO: 731910 - protein, 13 aa, Homo sapiens
  CDR3 for beta chain variable domain of TCR clone 365955 (TRBV7-9, TRBJ1-2)
CASSLKQNYGYTF

SEQ ID NO: 731911 - protein, 13 aa, Homo sapiens
  CDR3 for alpha chain variable domain of TCR clone 365956 (TRAV35, TRAJ44)
CGGLSGTASKLTF

SEQ ID NO: 731912 - protein, 17 aa, Homo sapiens
  CDR3 for beta chain variable domain of TCR clone 365956 (TRBV7-8, TRBJ1-2)
CASSLRPLQGHLYGYTF

SEQ ID NO: 731913 - protein, 13 aa, Homo sapiens
  CDR3 for alpha chain variable domain of TCR clone 365957 (TRAV12-1, TRAJ26)
CVVRRNYGLNFVF

SEQ ID NO: 731914 - protein, 14 aa, Homo sapiens
  CDR3 for beta chain variable domain of TCR clone 365957 (TRBV4-2, TRBJ2-1)
CASGLDRAYNEQFF

SEQ ID NO: 731915 - protein, 15 aa, Homo sapiens
  CDR3 for alpha chain variable domain of TCR clone 365958 (TRAV2, TRAJ15)
CAVEDRGQAGTALIF

SEQ ID NO: 731916 - protein, 12 aa, Homo sapiens
  CDR3 for beta chain variable domain of TCR clone 365958 (TRBV11-2, TRBJ2-1)
CASSPGSNEQFF

SEQ ID NO: 731917 - protein, 20 aa, Homo sapiens
  CDR3 for alpha chain variable domain of TCR clone 365959 (TRAV12-1, TRAJ42)
SSVIQPPTSVKGGSQGNLIF

SEQ ID NO: 731918 - protein, 18 aa, Homo sapiens
  CDR3 for beta chain variable domain of TCR clone 365959 (TRBV11-2, TRBJ2-3)
CAGSLGGASRGAPNTKYF

SEQ ID NO: 731919 - protein, 15 aa, Homo sapiens
  CDR3 for alpha chain variable domain of TCR clone 365960 (TRAV27, TRAJ38)
CAARRNAGNNRKVTW

SEQ ID NO: 731920 - protein, 13 aa, Homo sapiens
  CDR3 for beta chain variable domain of TCR clone 365960 (TRBV12-5, TRBJ2-3)
CASGDRQSDTQYF

SEQ ID NO: 731921 - protein, 14 aa, Homo sapiens
  CDR3 for alpha chain variable domain of TCR clone 365961 (TRAV9-2, TRAJ39)
CALYIYNAGNMLTF

SEQ ID NO: 731922 - protein, 13 aa, Homo sapiens
  CDR3 for beta chain variable domain of TCR clone 365961 (TRBV15, TRBJ1-1)
CATSRGIQARAFF

SEQ ID NO: 731923 - protein, 13 aa, Homo sapiens
  CDR3 for alpha chain variable domain of TCR clone 365962 (TRAV13-1, TRAJ48)
CAAASFGNEKLTF

SEQ ID NO: 731924 - protein, 14 aa, Homo sapiens
  CDR3 for beta chain variable domain of TCR clone 365962 (TRBV18, TRBJ2-1)
CASAPGTSETEQFF

SEQ ID NO: 731925 - protein, 14 aa, Homo sapiens
  CDR3 for alpha chain variable domain of TCR clone 365963 (TRAV1-2, TRAJ8)
CAVREDTVFQKLVF

SEQ ID NO: 731926 - protein, 15 aa, Homo sapiens
  CDR3 for beta chain variable domain of TCR clone 365963 (TRBV4-1, TRBJ2-7)
CASSQNTGRLYEQYF

SEQ ID NO: 731927 - protein, 23 aa, Homo sapiens
  CDR3 for alpha chain variable domain of TCR clone 365964 (TRAV26-1, TRAJ38)
CIADNAGNNHIQNPDPAVYQLRD

SEQ ID NO: 731928 - protein, 16 aa, Homo sapiens
  CDR3 for beta chain variable domain of TCR clone 365964 (TRBV10-3, TRBJ1-5)
CAISDQVGAPNQPQHF

SEQ ID NO: 731929 - protein, 14 aa, Homo sapiens
  CDR3 for alpha chain variable domain of TCR clone 365965 (TRAV26-1, TRAJ40)
CIVRLLSGTYKYIF

SEQ ID NO: 731930 - protein, 16 aa, Homo sapiens
  CDR3 for beta chain variable domain of TCR clone 365965 (TRBV28, TRBJ2-3)
CASSLSGQTSTDTQYF

SEQ ID NO: 731931 - protein, 17 aa, Homo sapiens
  CDR3 for alpha chain variable domain of TCR clone 365966 (TRAV3, TRAJ6)
CAVRDGPRAGGSYIPTF

SEQ ID NO: 731932 - protein, 13 aa, Homo sapiens
  CDR3 for beta chain variable domain of TCR clone 365966 (TRBV19, TRBJ1-1)
CASSITAESEAFF

SEQ ID NO: 731933 - protein, 12 aa, Homo sapiens
  CDR3 for alpha chain variable domain of TCR clone 365967 (TRAV12-1, TRAJ23)
CVVNNQGGKLIL

SEQ ID NO: 731934 - protein, 16 aa, Homo sapiens
  CDR3 for beta chain variable domain of TCR clone 365967 (TRBV11-1, TRBJ2-7)
CASSAQTGTLSYEQYF

SEQ ID NO: 731935 - protein, 14 aa, Homo sapiens
  CDR3 for alpha chain variable domain of TCR clone 365968 (TRAV12-2, TRAJ33)
CAVKRARSNYQVIW

SEQ ID NO: 731936 - protein, 12 aa, Homo sapiens
  CDR3 for beta chain variable domain of TCR clone 365968 (TRBV24-1, TRBJ2-3)
CATSDSTDTQYF

SEQ ID NO: 731937 - protein, 14 aa, Homo sapiens
  CDR3 for alpha chain variable domain of TCR clone 365969 (TRAV23/DV6, TRAJ4)
CAANLSGGYNKLIF

SEQ ID NO: 731938 - protein, 11 aa, Homo sapiens
  CDR3 for beta chain variable domain of TCR clone 365969 (TRBV7-9, TRBJ2-3)
CASSPTDTHYF

SEQ ID NO: 731939 - protein, 13 aa, Homo sapiens
  CDR3 for alpha chain variable domain of TCR clone 365970 (TRAV1-2, TRAJ9)
CAVLNTGGFKTIF

SEQ ID NO: 731940 - protein, 14 aa, Homo sapiens
  CDR3 for beta chain variable domain of TCR clone 365970 (TRBV20-1, TRBJ2-3)
CSGRGGTSTDTQYF

SEQ ID NO: 731941 - protein, 16 aa, Homo sapiens
  CDR3 for alpha chain variable domain of TCR clone 365971 (TRAV30, TRAJ24)
CGTEIVDADSWGKFQF

SEQ ID NO: 731942 - protein, 15 aa, Homo sapiens
  CDR3 for beta chain variable domain of TCR clone 365971 (TRBV7-6, TRBJ1-5)
CASSQSSGINQPQHF

SEQ ID NO: 731943 - protein, 15 aa, Homo sapiens
  CDR3 for alpha chain variable domain of TCR clone 365972 (TRAV1-2, TRAJ10)
CAVRGFTGGGNKLTF

SEQ ID NO: 731944 - protein, 13 aa, Homo sapiens
  CDR3 for beta chain variable domain of TCR clone 365972 (TRBV7-3, TRBJ1-1)
CASSQDWGAEAFF

SEQ ID NO: 731945 - protein, 14 aa, Homo sapiens
  CDR3 for alpha chain variable domain of TCR clone 365973 (TRAV29/DV5, TRAJ32)
CAAAYGGAPNNLIF

SEQ ID NO: 731946 - protein, 15 aa, Homo sapiens
  CDR3 for beta chain variable domain of TCR clone 365973 (TRBV27, TRBJ2-7)
CASSTAGTGSYEQYF

SEQ ID NO: 731947 - protein, 14 aa, Homo sapiens
  CDR3 for alpha chain variable domain of TCR clone 365974 (TRAV17, TRAJ57)
CATDPQGGSEKLDF

SEQ ID NO: 731948 - protein, 16 aa, Homo sapiens
  CDR3 for beta chain variable domain of TCR clone 365974 (TRBV20-1, TRBJ1-4)
CSAPGQGLLTNEKLFF

SEQ ID NO: 731949 - protein, 12 aa, Homo sapiens
  CDR3 for alpha chain variable domain of TCR clone 365975 (TRAV23/DV6, TRAJ16)
CAATGTGQKPLF

SEQ ID NO: 731950 - protein, 15 aa, Homo sapiens
  CDR3 for beta chain variable domain of TCR clone 365975 (TRBV28, TRBJ1-2)
CASSSYRGLVYGYTF

SEQ ID NO: 731951 - protein, 13 aa, Homo sapiens
  CDR3 for alpha chain variable domain of TCR clone 365976 (TRAV12-3, TRAJ35)
CAMAIGCGNVLHC

SEQ ID NO: 731952 - protein, 15 aa, Homo sapiens
  CDR3 for beta chain variable domain of TCR clone 365976 (TRBV20-1, TRBJ2-1)
CSARGSGTYYNEQFF

SEQ ID NO: 731953 - protein, 13 aa, Homo sapiens
  CDR3 for alpha chain variable domain of TCR clone 365977 (TRAV8-3, TRAJ36)
CAVGATGANNLFF

SEQ ID NO: 731954 - protein, 18 aa, Homo sapiens
  CDR3 for beta chain variable domain of TCR clone 365977 (TRBV7-9, TRBJ2-7)
CASRLTTSGSRTWYEQYF

SEQ ID NO: 731955 - protein, 13 aa, Homo sapiens
  CDR3 for alpha chain variable domain of TCR clone 365978 (TRAV12-2, TRAJ34)
CAVSGYNTDKLIF

SEQ ID NO: 731956 - protein, 18 aa, Homo sapiens
  CDR3 for beta chain variable domain of TCR clone 365978 (TRBV11-2, TRBJ2-3)
CASSLGGASRGAPNTQYF

SEQ ID NO: 731957 - protein, 12 aa, Homo sapiens
  CDR3 for alpha chain variable domain of TCR clone 365979 (TRAV25, TRAJ11)
CAGASGYSSLTF

SEQ ID NO: 731958 - protein, 14 aa, Homo sapiens
  CDR3 for beta chain variable domain of TCR clone 365979 (TRBV5-8, TRBJ2-3)
CASSLGQGTDTQYF

SEQ ID NO: 731959 - protein, 14 aa, Homo sapiens
  CDR3 for alpha chain variable domain of TCR clone 365980 (TRAV35, TRAJ53)
CAGNSGGSNYKLTF

SEQ ID NO: 731960 - protein, 15 aa, Homo sapiens
  CDR3 for beta chain variable domain of TCR clone 365980 (TRBV7-9, TRBJ2-1)
CASSLGWGRDNEQFF

SEQ ID NO: 731961 - protein, 16 aa, Homo sapiens
  CDR3 for alpha chain variable domain of TCR clone 365981 (TRAV14/DV4, TRAJ53)
CAMREGGGGSNYKLTF

SEQ ID NO: 731962 - protein, 12 aa, Homo sapiens
  CDR3 for beta chain variable domain of TCR clone 365981 (TRBV11-2, TRBJ2-5)
CASSLVGETQYF

SEQ ID NO: 731963 - protein, 18 aa, Homo sapiens
  CDR3 for alpha chain variable domain of TCR clone 365982 (TRAV3, TRAJ17)
CAVRARRGGRSCRQQANF

SEQ ID NO: 731964 - protein, 14 aa, Homo sapiens
  CDR3 for beta chain variable domain of TCR clone 365982 (TRBV4-1, TRBJ2-2)
CASSQAVNTGELVF

SEQ ID NO: 731965 - protein, 16 aa, Homo sapiens
  CDR3 for alpha chain variable domain of TCR clone 365983 (TRAV12-2, TRAJ18)
CAVTTDRGSTLGRLYF

SEQ ID NO: 731966 - protein, 15 aa, Homo sapiens
  CDR3 for beta chain variable domain of TCR clone 365983 (TRBV19, TRBJ2-1)
CASSTGTSSYNEQFF

SEQ ID NO: 731967 - protein, 15 aa, Homo sapiens
  CDR3 for alpha chain variable domain of TCR clone 365984 (TRAV12-3, TRAJ10)
CASYILTGGGNKLTF

SEQ ID NO: 731968 - protein, 12 aa, Homo sapiens
  CDR3 for beta chain variable domain of TCR clone 365984 (TRBV11-2, TRBJ2-2)
CASSLGGGELFF

SEQ ID NO: 731969 - protein, 13 aa, Homo sapiens
  CDR3 for alpha chain variable domain of TCR clone 365985 (TRAV26-1, TRAJ34)
CIVRPWITDKLIF

SEQ ID NO: 731970 - protein, 17 aa, Homo sapiens
  CDR3 for beta chain variable domain of TCR clone 365985 (TRBV11-2, TRBJ2-1)
CASSLYPPGVEYNEQFF

SEQ ID NO: 731971 - protein, 16 aa, Homo sapiens
  CDR3 for alpha chain variable domain of TCR clone 365986 (TRAV14/DV4, TRAJ54)
CAMREGRIQGAQKLVF

SEQ ID NO: 731972 - protein, 16 aa, Homo sapiens
  CDR3 for beta chain variable domain of TCR clone 365986 (TRBV2, TRBJ2-3)
CASSTSVEGVTDTQYF

SEQ ID NO: 731973 - protein, 14 aa, Homo sapiens
  CDR3 for alpha chain variable domain of TCR clone 365987 (TRAV13-1, TRAJ35)
CAASKGGFGNVLHC

SEQ ID NO: 731974 - protein, 13 aa, Homo sapiens
  CDR3 for beta chain variable domain of TCR clone 365987 (TRBV7-3, TRBJ1-1)
CASSRQGNTEAFF

SEQ ID NO: 731975 - protein, 13 aa, Homo sapiens
  CDR3 for alpha chain variable domain of TCR clone 365988 (TRAV12-3, TRAJ21)
CAPGPHNFNKFYF

SEQ ID NO: 731976 - protein, 12 aa, Homo sapiens
  CDR3 for beta chain variable domain of TCR clone 365988 (TRBV4-2, TRBJ1-1)
CQSQAGNTEAFF

SEQ ID NO: 731977 - protein, 13 aa, Homo sapiens
  CDR3 for alpha chain variable domain of TCR clone 365989 (TRAV13-1, TRAJ21)
CAASIYNFNKFYF

SEQ ID NO: 731978 - protein, 14 aa, Homo sapiens
  CDR3 for beta chain variable domain of TCR clone 365989 (TRBV4-2, TRBJ2-3)
CASSQERGTDTQYF

SEQ ID NO: 731979 - protein, 17 aa, Homo sapiens
  CDR3 for alpha chain variable domain of TCR clone 365990 (TRAV4, TRAJ13)
CLVGVQGSSGGYQKVTF

SEQ ID NO: 731980 - protein, 15 aa, Homo sapiens
  CDR3 for beta chain variable domain of TCR clone 365990 (TRBV6-3, TRBJ2-7)
CASSSPVTVFYEQYF

SEQ ID NO: 731981 - protein, 15 aa, Homo sapiens
  CDR3 for alpha chain variable domain of TCR clone 365991 (TRAV26-1, TRAJ42)
CIVRVKGGSQGNLIF

SEQ ID NO: 731982 - protein, 14 aa, Homo sapiens
  CDR3 for beta chain variable domain of TCR clone 365991 (TRBV19, TRBJ2-2)
CATTGHANTGELVF

SEQ ID NO: 731983 - protein, 15 aa, Homo sapiens
  CDR3 for alpha chain variable domain of TCR clone 365992 (TRAV3, TRAJ47)
CAVRDIGEYGNKLVF

SEQ ID NO: 731984 - protein, 12 aa, Homo sapiens
  CDR3 for beta chain variable domain of TCR clone 365992 (TRBV12-4, TRBJ2-7)
CASSLGGYEQYF

SEQ ID NO: 731985 - protein, 16 aa, Homo sapiens
  CDR3 for alpha chain variable domain of TCR clone 365993 (TRAV16, TRAJ52)
CALNAAGVTSYGKLTF

SEQ ID NO: 731986 - protein, 12 aa, Homo sapiens
  CDR3 for beta chain variable domain of TCR clone 365993 (TRBV12-4, TRBJ1-3)
CASSFSGNTIYF

SEQ ID NO: 731987 - protein, 15 aa, Homo sapiens
  CDR3 for alpha chain variable domain of TCR clone 365994 (TRAV35, TRAJ40)
CAGQLGTSGTYKYIF

SEQ ID NO: 731988 - protein, 15 aa, Homo sapiens
  CDR3 for beta chain variable domain of TCR clone 365994 (TRBV13, TRBJ1-5)
CASSFGQGGVQPQHF

SEQ ID NO: 731989 - protein, 15 aa, Homo sapiens
  CDR3 for alpha chain variable domain of TCR clone 365995 (TRAV8-3, TRAJ45)
CASSYSGGGADGLTF

SEQ ID NO: 731990 - protein, 17 aa, Homo sapiens
  CDR3 for beta chain variable domain of TCR clone 365995 (TRBV23-1, TRBJ2-1)
CASSQYTAAGVVMSSSS

SEQ ID NO: 731991 - protein, 17 aa, Homo sapiens
  CDR3 for alpha chain variable domain of TCR clone 365996 (TRAV13-1, TRAJ52)
CAASSGAGGTSNGKLTF

SEQ ID NO: 731992 - protein, 15 aa, Homo sapiens
  CDR3 for beta chain variable domain of TCR clone 365996 (TRBV2, TRBJ2-1)
CASSELAGSYNEQFF

SEQ ID NO: 731993 - protein, 12 aa, Homo sapiens
  CDR3 for alpha chain variable domain of TCR clone 365997 (TRAV13-1, TRAJ21)
CAAKEGFNKFYF

SEQ ID NO: 731994 - protein, 15 aa, Homo sapiens
  CDR3 for beta chain variable domain of TCR clone 365997 (TRBV19, TRBJ1-2)
CASSVGQVLNYGYTF

SEQ ID NO: 731995 - protein, 12 aa, Homo sapiens
  CDR3 for alpha chain variable domain of TCR clone 365998 (TRAV35, TRAJ36)
CWPRIGADNLFF

SEQ ID NO: 731996 - protein, 15 aa, Homo sapiens
  CDR3 for beta chain variable domain of TCR clone 365998 (TRBV28, TRBJ2-5)
CASSPPWSYQETQYF

SEQ ID NO: 731997 - protein, 13 aa, Homo sapiens
  CDR3 for alpha chain variable domain of TCR clone 365999 (TRAV20, TRAJ20)
CAVQALSDYKLSF

SEQ ID NO: 731998 - protein, 13 aa, Homo sapiens
  CDR3 for beta chain variable domain of TCR clone 365999 (TRBV7-9, TRBJ1-4)
CASSLPGIEKLFF

SEQ ID NO: 731999 - protein, 22 aa, Homo sapiens
  CDR3 for alpha chain variable domain of TCR clone 366000 (TRAV36/DV7, TRAJ38)
CVANAGNNHIQNPDPAVYQLRD

SEQ ID NO: 732000 - protein, 14 aa, Homo sapiens
  CDR3 for beta chain variable domain of TCR clone 366000 (TRBV18, TRBJ2-7)
CASSSRTLAYEQYF

SEQ ID NO: 732001 - protein, 17 aa, Homo sapiens
  CDR3 for alpha chain variable domain of TCR clone 366001 (TRAV3, TRAJ6)
FAVRDGPRAGGSYIPKL

SEQ ID NO: 732002 - protein, 14 aa, Homo sapiens
  CDR3 for beta chain variable domain of TCR clone 366001 (TRBV7-2, TRBJ2-7)
CASSPKTSFYEQYF

SEQ ID NO: 732003 - protein, 13 aa, Homo sapiens
  CDR3 for alpha chain variable domain of TCR clone 366002 (TRAV36/DV7, TRAJ37)
CAVFSSNTGKLSF

SEQ ID NO: 732004 - protein, 15 aa, Homo sapiens
  CDR3 for beta chain variable domain of TCR clone 366002 (TRBV5-1, TRBJ2-2)
CASSSQGGNTGELFF

SEQ ID NO: 732005 - protein, 14 aa, Homo sapiens
  CDR3 for alpha chain variable domain of TCR clone 366003 (TRAV23/DV6, TRAJ17)
CAAIIGAAGNKLTF

SEQ ID NO: 732006 - protein, 12 aa, Homo sapiens
  CDR3 for beta chain variable domain of TCR clone 366003 (TRBV20-1, TRBJ2-5)
CSAGGAGETQYF

SEQ ID NO: 732007 - protein, 10 aa, Homo sapiens
  CDR3 for alpha chain variable domain of TCR clone 366004 (TRAV1-2, TRAJ31)
CAFFDARLMF

SEQ ID NO: 732008 - protein, 18 aa, Homo sapiens
  CDR3 for beta chain variable domain of TCR clone 366004 (TRBV6-3, TRBJ2-7)
CTSVPAVPPGTVFYEQYF

SEQ ID NO: 732009 - protein, 13 aa, Homo sapiens
  CDR3 for alpha chain variable domain of TCR clone 366005 (TRAV1-1, TRAJ7)
CAVRDHGNDRLAL

SEQ ID NO: 732010 - protein, 20 aa, Homo sapiens
  CDR3 for beta chain variable domain of TCR clone 366005 (TRBV28, TRBJ2-3)
CASSLGVRSTSGRSTDTQYF

SEQ ID NO: 732011 - protein, 16 aa, Homo sapiens
  CDR3 for alpha chain variable domain of TCR clone 366006 (TRAV23/DV6, TRAJ9)
CAASIGGNTGGFKTIF

SEQ ID NO: 732012 - protein, 13 aa, Homo sapiens
  CDR3 for beta chain variable domain of TCR clone 366006 (TRBV9, TRBJ2-7)
CQQRRRGSYEQYF

SEQ ID NO: 732013 - protein, 14 aa, Homo sapiens
  CDR3 for alpha chain variable domain of TCR clone 366007 (TRAV38-1, TRAJ43)
CAFMKHDNNNDMRF

SEQ ID NO: 732014 - protein, 15 aa, Homo sapiens
  CDR3 for beta chain variable domain of TCR clone 366007 (TRBV9, TRBJ1-6)
CASSVAGTGDSPLHF

SEQ ID NO: 732015 - protein, 17 aa, Homo sapiens
  CDR3 for alpha chain variable domain of TCR clone 366008 (TRAV3, TRAJ38)
CAVRDCLNAGNNSKLIW

SEQ ID NO: 732016 - protein, 12 aa, Homo sapiens
  CDR3 for beta chain variable domain of TCR clone 366008 (TRBV11-3, TRBJ1-1)
CASSLRDSEAFF

SEQ ID NO: 732017 - protein, 14 aa, Homo sapiens
  CDR3 for alpha chain variable domain of TCR clone 366009 (TRAV12-3, TRAJ10)
SHLPLTGGGNKLTF

SEQ ID NO: 732018 - protein, 15 aa, Homo sapiens
  CDR3 for beta chain variable domain of TCR clone 366009 (TRBV12-4, TRBJ1-1)
CASSLGGLADTEAFF

SEQ ID NO: 732019 - protein, 13 aa, Homo sapiens
  CDR3 for alpha chain variable domain of TCR clone 366010 (TRAV27, TRAJ6)
CAGGTRGSYIPTF

SEQ ID NO: 732020 - protein, 13 aa, Homo sapiens
  CDR3 for beta chain variable domain of TCR clone 366010 (TRBV20-1, TRBJ2-2)
CSASAAGTGELFF

SEQ ID NO: 732021 - protein, 15 aa, Homo sapiens
  CDR3 for alpha chain variable domain of TCR clone 366011 (TRAV12-1, TRAJ44)
CVVFVNTGTASKLTF

SEQ ID NO: 732022 - protein, 12 aa, Homo sapiens
  CDR3 for beta chain variable domain of TCR clone 366011 (TRBV7-9, TRBJ2-7)
CASSFGSYEQYF

SEQ ID NO: 732023 - protein, 18 aa, Homo sapiens
  CDR3 for alpha chain variable domain of TCR clone 366012 (TRAV21, TRAJ52)
CAVRPSPAGGTSYGKLTF

SEQ ID NO: 732024 - protein, 13 aa, Homo sapiens
  CDR3 for beta chain variable domain of TCR clone 366012 (TRBV20-1, TRBJ2-5)
CSAREAFQETKYF

SEQ ID NO: 732025 - protein, 19 aa, Homo sapiens
  CDR3 for alpha chain variable domain of TCR clone 366013 (TRAV25, TRAJ20)
TATQTTDVGILPHDYKLIF

SEQ ID NO: 732026 - protein, 16 aa, Homo sapiens
  CDR3 for beta chain variable domain of TCR clone 366013 (TRBV7-3, TRBJ2-2)
CASSLKRGTLSGELFF

SEQ ID NO: 732027 - protein, 12 aa, Homo sapiens
  CDR3 for alpha chain variable domain of TCR clone 366014 (TRAV12-1, TRAJ31)
CVVNKDNARLMF

SEQ ID NO: 732028 - protein, 14 aa, Homo sapiens
  CDR3 for beta chain variable domain of TCR clone 366014 (TRBV18, TRBJ1-3)
CASSPANSGNTIYF

SEQ ID NO: 732029 - protein, 13 aa, Homo sapiens
  CDR3 for alpha chain variable domain of TCR clone 366015 (TRAV20, TRAJ48)
CAVHLFGHEKLTF

SEQ ID NO: 732030 - protein, 15 aa, Homo sapiens
  CDR3 for beta chain variable domain of TCR clone 366015 (TRBV6-5, TRBJ2-6)
CASSQWEAGANVLTF

SEQ ID NO: 732031 - protein, 15 aa, Homo sapiens
  CDR3 for alpha chain variable domain of TCR clone 366016 (TRAV25, TRAJ53)
CPTSNSGGSNYKLTF

SEQ ID NO: 732032 - protein, 13 aa, Homo sapiens
  CDR3 for beta chain variable domain of TCR clone 366016 (TRBV2, TRBJ2-7)
CASSGAAAYEQYF

SEQ ID NO: 732033 - protein, 17 aa, Homo sapiens
  CDR3 for alpha chain variable domain of TCR clone 366017 (TRAV13-1, TRAJ52)
CAAGRNAGGTNYGKLTF

SEQ ID NO: 732034 - protein, 13 aa, Homo sapiens
  CDR3 for beta chain variable domain of TCR clone 366017 (TRBV7-2, TRBJ1-1)
CASNLKGAKVASF

SEQ ID NO: 732035 - protein, 13 aa, Homo sapiens
  CDR3 for alpha chain variable domain of TCR clone 366018 (TRAV13-2, TRAJ5)
FAESDTGRRALTF

SEQ ID NO: 732036 - protein, 14 aa, Homo sapiens
  CDR3 for beta chain variable domain of TCR clone 366018 (TRBV2, TRBJ1-1)
CASTQVGENTEAFF

SEQ ID NO: 732037 - protein, 14 aa, Homo sapiens
  CDR3 for alpha chain variable domain of TCR clone 366019 (TRAV12-2, TRAJ13)
CAVTKTGGYQKVTF

SEQ ID NO: 732038 - protein, 15 aa, Homo sapiens
  CDR3 for beta chain variable domain of TCR clone 366019 (TRBV9, TRBJ1-6)
CASSVAGTGDSPLHF

SEQ ID NO: 732039 - protein, 14 aa, Homo sapiens
  CDR3 for alpha chain variable domain of TCR clone 366020 (TRAV14/DV4, TRAJ22)
CAMSPSGSARQLTF

SEQ ID NO: 732040 - protein, 15 aa, Homo sapiens
  CDR3 for beta chain variable domain of TCR clone 366020 (TRBV2, TRBJ2-3)
CASSERSGHTDTRYF

SEQ ID NO: 732041 - protein, 12 aa, Homo sapiens
  CDR3 for alpha chain variable domain of TCR clone 366021 (TRAV1-2, TRAJ42)
CVAGGSQGNLIF

SEQ ID NO: 732042 - protein, 14 aa, Homo sapiens
  CDR3 for beta chain variable domain of TCR clone 366021 (TRBV11-2, TRBJ2-7)
CASSSTGEGYEQYF

SEQ ID NO: 732043 - protein, 14 aa, Homo sapiens
  CDR3 for alpha chain variable domain of TCR clone 366022 (TRAV25, TRAJ44)
CAVFPTGTASKLTF

SEQ ID NO: 732044 - protein, 14 aa, Homo sapiens
  CDR3 for beta chain variable domain of TCR clone 366022 (TRBV19, TRBJ1-1)
CASTGHRLNIEAFF

SEQ ID NO: 732045 - protein, 12 aa, Homo sapiens
  CDR3 for alpha chain variable domain of TCR clone 366023 (TRAV25, TRAJ11)
CAGYSGYSTLTF

SEQ ID NO: 732046 - protein, 13 aa, Homo sapiens
  CDR3 for beta chain variable domain of TCR clone 366023 (TRBV7-9, TRBJ1-2)
CASSLKQNYGDTV

SEQ ID NO: 732047 - protein, 14 aa, Homo sapiens
  CDR3 for alpha chain variable domain of TCR clone 366024 (TRAV3, TRAJ7)
CAVREEEREQQTRF

SEQ ID NO: 732048 - protein, 12 aa, Homo sapiens
  CDR3 for beta chain variable domain of TCR clone 366024 (TRBV7-8, TRBJ2-7)
CASSLGDTGQYF

SEQ ID NO: 732049 - protein, 14 aa, Homo sapiens
  CDR3 for alpha chain variable domain of TCR clone 366025 (TRAV1-2, TRAJ16)
CAVNRFSDGQKLLF

SEQ ID NO: 732050 - protein, 13 aa, Homo sapiens
  CDR3 for beta chain variable domain of TCR clone 366025 (TRBV20-1, TRBJ2-3)
CSADQGVSDTQYF

SEQ ID NO: 732051 - protein, 16 aa, Homo sapiens
  CDR3 for alpha chain variable domain of TCR clone 366026 (TRAV35, TRAJ28)
CAGQRYSGAGSYQLTF

SEQ ID NO: 732052 - protein, 16 aa, Homo sapiens
  CDR3 for beta chain variable domain of TCR clone 366026 (TRBV7-3, TRBJ2-3)
CASSPGGGAVTDTQYF

SEQ ID NO: 732053 - protein, 13 aa, Homo sapiens
  CDR3 for alpha chain variable domain of TCR clone 366027 (TRAV2, TRAJ40)
CAVVTSGTYKYIF

SEQ ID NO: 732054 - protein, 14 aa, Homo sapiens
  CDR3 for beta chain variable domain of TCR clone 366027 (TRBV28, TRBJ2-5)
CASSLYRGTETQYF

SEQ ID NO: 732055 - protein, 15 aa, Homo sapiens
  CDR3 for alpha chain variable domain of TCR clone 366028 (TRAV12-2, TRAJ9)
CAVNNERTGGFKTIF

SEQ ID NO: 732056 - protein, 14 aa, Homo sapiens
  CDR3 for beta chain variable domain of TCR clone 366028 (TRBV4-1, TRBJ1-4)
CASSQERKSEKLFF

SEQ ID NO: 732057 - protein, 14 aa, Homo sapiens
  CDR3 for alpha chain variable domain of TCR clone 366029 (TRAV1-2, TRAJ16)
CAVNRFSDGQKLLF

SEQ ID NO: 732058 - protein, 12 aa, Homo sapiens
  CDR3 for beta chain variable domain of TCR clone 366029 (TRBV19, TRBJ1-5)
CASKDGDQPQHF

SEQ ID NO: 732059 - protein, 14 aa, Homo sapiens
  CDR3 for alpha chain variable domain of TCR clone 366030 (TRAV38-1, TRAJ40)
CALRPTSGTYKYIF

SEQ ID NO: 732060 - protein, 14 aa, Homo sapiens
  CDR3 for beta chain variable domain of TCR clone 366030 (TRBV19, TRBJ2-1)
CASTTFVLSGEQFF

SEQ ID NO: 732061 - protein, 12 aa, Homo sapiens
  CDR3 for alpha chain variable domain of TCR clone 366031 (TRAV38-2/DV8, TRAJ34)
CAYRDNTDKLIF

SEQ ID NO: 732062 - protein, 13 aa, Homo sapiens
  CDR3 for beta chain variable domain of TCR clone 366031 (TRBV7-3, TRBJ1-5)
CASSLDSNQPQHF

SEQ ID NO: 732063 - protein, 14 aa, Homo sapiens
  CDR3 for alpha chain variable domain of TCR clone 366032 (TRAV17, TRAJ56)
CATLPAGANSKLTF

SEQ ID NO: 732064 - protein, 13 aa, Homo sapiens
  CDR3 for beta chain variable domain of TCR clone 366032 (TRBV12-4, TRBJ2-2)
CASSITGSGELFF

SEQ ID NO: 732065 - protein, 12 aa, Homo sapiens
  CDR3 for alpha chain variable domain of TCR clone 366033 (TRAV12-3, TRAJ17)
CAMTLTGNKLTF

SEQ ID NO: 732066 - protein, 15 aa, Homo sapiens
  CDR3 for beta chain variable domain of TCR clone 366033 (TRBV7-9, TRBJ1-5)
CASSQGHQPNHPQHF

SEQ ID NO: 732067 - protein, 13 aa, Homo sapiens
  CDR3 for alpha chain variable domain of TCR clone 366034 (TRAV29/DV5, TRAJ31)
CAASRNHNARLMF

SEQ ID NO: 732068 - protein, 12 aa, Homo sapiens
  CDR3 for beta chain variable domain of TCR clone 366034 (TRBV14, TRBJ2-7)
CASSLYKDEQYF

SEQ ID NO: 732069 - protein, 13 aa, Homo sapiens
  CDR3 for alpha chain variable domain of TCR clone 366035 (TRAV27, TRAJ57)
CRSAQGGSEKLVF

SEQ ID NO: 732070 - protein, 11 aa, Homo sapiens
  CDR3 for beta chain variable domain of TCR clone 366035 (TRBV11-2, TRBJ1-1)
CASSINTDAFF

SEQ ID NO: 732071 - protein, 11 aa, Homo sapiens
  CDR3 for alpha chain variable domain of TCR clone 366036 (TRAV23/DV6, TRAJ58)
CAARLLRGETS

SEQ ID NO: 732072 - protein, 15 aa, Homo sapiens
  CDR3 for beta chain variable domain of TCR clone 366036 (TRBV4-1, TRBJ1-4)
CASSDTGGTNEKLFF

SEQ ID NO: 732073 - protein, 14 aa, Homo sapiens
  CDR3 for alpha chain variable domain of TCR clone 366037 (TRAV12-2, TRAJ17)
CAVLFKAAGNKLTF

SEQ ID NO: 732074 - protein, 12 aa, Homo sapiens
  CDR3 for beta chain variable domain of TCR clone 366037 (TRBV5-1, TRBJ2-7)
CASSFRGYEQYF

SEQ ID NO: 732075 - protein, 17 aa, Homo sapiens
  CDR3 for alpha chain variable domain of TCR clone 366038 (TRAV3, TRAJ6)
CAVRDGPRAGGRYIPTF

SEQ ID NO: 732076 - protein, 14 aa, Homo sapiens
  CDR3 for beta chain variable domain of TCR clone 366038 (TRBV7-2, TRBJ2-7)
CAGSPKTSFYEQYF

SEQ ID NO: 732077 - protein, 13 aa, Homo sapiens
  CDR3 for alpha chain variable domain of TCR clone 366039 (TRAV12-1, TRAJ11)
CVVNRAGYSTLTF

SEQ ID NO: 732078 - protein, 15 aa, Homo sapiens
  CDR3 for beta chain variable domain of TCR clone 366039 (TRBV27, TRBJ2-1)
CASSNGGGSSNEQFF

SEQ ID NO: 732079 - protein, 14 aa, Homo sapiens
  CDR3 for alpha chain variable domain of TCR clone 366040 (TRAV27, TRAJ37)
CAGERSSNTGKLIF

SEQ ID NO: 732080 - protein, 15 aa, Homo sapiens
  CDR3 for beta chain variable domain of TCR clone 366040 (TRBV7-2, TRBJ2-1)
CASSFSGGIYNEQFF

SEQ ID NO: 732081 - protein, 15 aa, Homo sapiens
  CDR3 for alpha chain variable domain of TCR clone 366041 (TRAV4, TRAJ31)
CLVGGFLNNNARLMF

SEQ ID NO: 732082 - protein, 14 aa, Homo sapiens
  CDR3 for beta chain variable domain of TCR clone 366041 (TRBV7-3, TRBJ1-1)
CASSLGTGYTEAFF

SEQ ID NO: 732083 - protein, 11 aa, Homo sapiens
  CDR3 for alpha chain variable domain of TCR clone 366042 (TRAV13-2, TRAJ54)
RAVQGALKLVF

SEQ ID NO: 732084 - protein, 15 aa, Homo sapiens
  CDR3 for beta chain variable domain of TCR clone 366042 (TRBV20-1, TRBJ2-7)
CSAESGTSGAYEQYF

SEQ ID NO: 732085 - protein, 13 aa, Homo sapiens
  CDR3 for alpha chain variable domain of TCR clone 366043 (TRAV27, TRAJ3)
ASLRGSSASMIIF

SEQ ID NO: 732086 - protein, 15 aa, Homo sapiens
  CDR3 for beta chain variable domain of TCR clone 366043 (TRBV28, TRBJ1-3)
CASSVGWASGNTIYF

SEQ ID NO: 732087 - protein, 14 aa, Homo sapiens
  CDR3 for alpha chain variable domain of TCR clone 366044 (TRAV1-2, TRAJ13)
CAVLNSGGYQKVTF

SEQ ID NO: 732088 - protein, 15 aa, Homo sapiens
  CDR3 for beta chain variable domain of TCR clone 366044 (TRBV27, TRBJ2-1)
CASSNGGGSSNEQFF

SEQ ID NO: 732089 - protein, 14 aa, Homo sapiens
  CDR3 for alpha chain variable domain of TCR clone 366045 (TRAV13-1, TRAJ32)
CAARGSGATTKLIF

SEQ ID NO: 732090 - protein, 15 aa, Homo sapiens
  CDR3 for beta chain variable domain of TCR clone 366045 (TRBV5-5, TRBJ1-1)
CASSLVGKDNTEAFF

SEQ ID NO: 732091 - protein, 16 aa, Homo sapiens
  CDR3 for alpha chain variable domain of TCR clone 366046 (TRAV30, TRAJ24)
CGTEIVDADSWGKFQV

SEQ ID NO: 732092 - protein, 13 aa, Homo sapiens
  CDR3 for beta chain variable domain of TCR clone 366046 (TRBV12-4, TRBJ2-2)
CASSITGSGELFF

SEQ ID NO: 732093 - protein, 14 aa, Homo sapiens
  CDR3 for alpha chain variable domain of TCR clone 366047 (TRAV23/DV6, TRAJ8)
CAASKNTGFQKLVS

SEQ ID NO: 732094 - protein, 16 aa, Homo sapiens
  CDR3 for beta chain variable domain of TCR clone 366047 (TRBV4-1, TRBJ2-6)
CASSQVGDPGANVLTF

SEQ ID NO: 732095 - protein, 15 aa, Homo sapiens
  CDR3 for alpha chain variable domain of TCR clone 366048 (TRAV35, TRAJ42)
CAGQRSGGSQGNLIF

SEQ ID NO: 732096 - protein, 15 aa, Homo sapiens
  CDR3 for beta chain variable domain of TCR clone 366048 (TRBV9, TRBJ2-6)
CASSVVGSGANVLTF

SEQ ID NO: 732097 - protein, 13 aa, Homo sapiens
  CDR3 for alpha chain variable domain of TCR clone 366049 (TRAV26-1, TRAJ48)
CIVRVVGDEKLTF

SEQ ID NO: 732098 - protein, 18 aa, Homo sapiens
  CDR3 for beta chain variable domain of TCR clone 366049 (TRBV4-3, TRBJ1-6)
CASSQDTPASSYNSPLHF

SEQ ID NO: 732099 - protein, 14 aa, Homo sapiens
  CDR3 for alpha chain variable domain of TCR clone 366050 (TRAV8-6, TRAJ13)
CAVFSSGGYQKVTF

SEQ ID NO: 732100 - protein, 14 aa, Homo sapiens
  CDR3 for beta chain variable domain of TCR clone 366050 (TRBV7-2, TRBJ1-5)
SASSLTGNNQPQHF

SEQ ID NO: 732101 - protein, 14 aa, Homo sapiens
  CDR3 for alpha chain variable domain of TCR clone 366051 (TRAV3, TRAJ36)
CAVRDGTGANNLFF

SEQ ID NO: 732102 - protein, 16 aa, Homo sapiens
  CDR3 for beta chain variable domain of TCR clone 366051 (TRBV7-3, TRBJ2-5)
CASIRPGGSVEETQYF

SEQ ID NO: 732103 - protein, 15 aa, Homo sapiens
  CDR3 for alpha chain variable domain of TCR clone 366052 (TRAV2, TRAJ11)
CAVEDPNSGYSTLTF

SEQ ID NO: 732104 - protein, 16 aa, Homo sapiens
  CDR3 for beta chain variable domain of TCR clone 366052 (TRBV7-9, TRBJ1-2)
CSSSLGFSSGEDGYTF

SEQ ID NO: 732105 - protein, 14 aa, Homo sapiens
  CDR3 for alpha chain variable domain of TCR clone 366053 (TRAV21, TRAJ45)
CAVVSEGGADGLTF

SEQ ID NO: 732106 - protein, 14 aa, Homo sapiens
  CDR3 for beta chain variable domain of TCR clone 366053 (TRBV20-1, TRBJ2-3)
CSALGLEGADTQYF

SEQ ID NO: 732107 - protein, 14 aa, Homo sapiens
  CDR3 for alpha chain variable domain of TCR clone 366054 (TRAV12-2, TRAJ44)
CAVNPAGTASKLTF

SEQ ID NO: 732108 - protein, 13 aa, Homo sapiens
  CDR3 for beta chain variable domain of TCR clone 366054 (TRBV15, TRBJ1-6)
CATSGGLNSPLLF

SEQ ID NO: 732109 - protein, 12 aa, Homo sapiens
  CDR3 for alpha chain variable domain of TCR clone 366055 (TRAV38-2/DV8, TRAJ48)
CALLSGNEKLTF

SEQ ID NO: 732110 - protein, 15 aa, Homo sapiens
  CDR3 for beta chain variable domain of TCR clone 366055 (TRBV6-1, TRBJ2-1)
CASSELRGQYNEQLF

SEQ ID NO: 732111 - protein, 12 aa, Homo sapiens
  CDR3 for alpha chain variable domain of TCR clone 366056 (TRAV12-2, TRAJ4)
GWPEGGYNKLIF

SEQ ID NO: 732112 - protein, 14 aa, Homo sapiens
  CDR3 for beta chain variable domain of TCR clone 366056 (TRBV25-1, TRBJ1-1)
CASTHLGGNTEAFF

SEQ ID NO: 732113 - protein, 15 aa, Homo sapiens
  CDR3 for alpha chain variable domain of TCR clone 366057 (TRAV12-3, TRAJ6)
CAMSATTGGSYIPPF

SEQ ID NO: 732114 - protein, 16 aa, Homo sapiens
  CDR3 for beta chain variable domain of TCR clone 366057 (TRBV20-1, TRBJ1-2)
CSASMGQGVANYGYTF

SEQ ID NO: 732115 - protein, 14 aa, Homo sapiens
  CDR3 for alpha chain variable domain of TCR clone 366058 (TRAV29/DV5, TRAJ36)
CAARRKTGANNLFF

SEQ ID NO: 732116 - protein, 14 aa, Homo sapiens
  CDR3 for beta chain variable domain of TCR clone 366058 (TRBV4-2, TRBJ2-3)
CASSQERGTDTQYF

SEQ ID NO: 732117 - protein, 11 aa, Homo sapiens
  CDR3 for alpha chain variable domain of TCR clone 366059 (TRAV12-3, TRAJ27)
CAMANAGKSTF

SEQ ID NO: 732118 - protein, 14 aa, Homo sapiens
  CDR3 for beta chain variable domain of TCR clone 366059 (TRBV7-6, TRBJ2-1)
CASSLGGGADEQFF

SEQ ID NO: 732119 - protein, 13 aa, Homo sapiens
  CDR3 for alpha chain variable domain of TCR clone 366060 (TRAV29/DV5, TRAJ49)
CAASTNTGNQFYF

SEQ ID NO: 732120 - protein, 13 aa, Homo sapiens
  CDR3 for beta chain variable domain of TCR clone 366060 (TRBV7-2, TRBJ1-4)
CASSLAGLDKLFF

SEQ ID NO: 732121 - protein, 12 aa, Homo sapiens
  CDR3 for alpha chain variable domain of TCR clone 366061 (TRAV25, TRAJ11)
CAAASGYSTLTF

SEQ ID NO: 732122 - protein, 15 aa, Homo sapiens
  CDR3 for beta chain variable domain of TCR clone 366061 (TRBV9, TRBJ1-6)
CASSVAGTGDSPLHF

SEQ ID NO: 732123 - protein, 16 aa, Homo sapiens
  CDR3 for alpha chain variable domain of TCR clone 366062 (TRAV30, TRAJ24)
CGTEIVDADSWGKFHF

SEQ ID NO: 732124 - protein, 15 aa, Homo sapiens
  CDR3 for beta chain variable domain of TCR clone 366062 (TRBV11-2, TRBJ2-1)
CASCTGTSGYNEQFF

SEQ ID NO: 732125 - protein, 14 aa, Homo sapiens
  CDR3 for alpha chain variable domain of TCR clone 366063 (TRAV23/DV6, TRAJ18)
CSKVQRLTLGRLYF

SEQ ID NO: 732126 - protein, 13 aa, Homo sapiens
  CDR3 for beta chain variable domain of TCR clone 366063 (TRBV7-2, TRBJ2-7)
CASSSPSGSEQYF

SEQ ID NO: 732127 - protein, 12 aa, Homo sapiens
  CDR3 for alpha chain variable domain of TCR clone 366064 (TRAV13-1, TRAJ27)
CAAHTNAGKSTF

SEQ ID NO: 732128 - protein, 14 aa, Homo sapiens
  CDR3 for beta chain variable domain of TCR clone 366064 (TRBV19, TRBJ2-2)
CASSKLGTTGELFF

SEQ ID NO: 732129 - protein, 12 aa, Homo sapiens
  CDR3 for alpha chain variable domain of TCR clone 366065 (TRAV17, TRAJ20)
CATDSNDYKLSF

SEQ ID NO: 732130 - protein, 16 aa, Homo sapiens
  CDR3 for beta chain variable domain of TCR clone 366065 (TRBV5-1, TRBJ2-1)
CASSLSSLRESNEQFF

SEQ ID NO: 732131 - protein, 18 aa, Homo sapiens
  CDR3 for alpha chain variable domain of TCR clone 366066 (TRAV21, TRAJ52)
CAVRPSPPGGTSYGKLTF

SEQ ID NO: 732132 - protein, 15 aa, Homo sapiens
  CDR3 for beta chain variable domain of TCR clone 366066 (TRBV20-1, TRBJ2-7)
CSARDRVSGMDEQYF

SEQ ID NO: 732133 - protein, 13 aa, Homo sapiens
  CDR3 for alpha chain variable domain of TCR clone 366067 (TRAV12-3, TRAJ20)
CAMRRSNDDKLSF

SEQ ID NO: 732134 - protein, 15 aa, Homo sapiens
  CDR3 for beta chain variable domain of TCR clone 366067 (TRBV9, TRBJ2-3)
CASSVAGGRSDTQYF

SEQ ID NO: 732135 - protein, 11 aa, Homo sapiens
  CDR3 for alpha chain variable domain of TCR clone 366068 (TRAV35, TRAJ30)
CAGPGDVKIIF

SEQ ID NO: 732136 - protein, 14 aa, Homo sapiens
  CDR3 for beta chain variable domain of TCR clone 366068 (TRBV7-6, TRBJ1-6)
CASSQAGGGSPLHF

SEQ ID NO: 732137 - protein, 12 aa, Homo sapiens
  CDR3 for alpha chain variable domain of TCR clone 366069 (TRAV12-3, TRAJ17)
CAMTLTGNKLTF

SEQ ID NO: 732138 - protein, 13 aa, Homo sapiens
  CDR3 for beta chain variable domain of TCR clone 366069 (TRBV11-3, TRBJ2-1)
CASSPPAGNKQFF

SEQ ID NO: 732139 - protein, 12 aa, Homo sapiens
  CDR3 for alpha chain variable domain of TCR clone 366070 (TRAV8-3, TRAJ20)
CAVDFNDYKLSF

SEQ ID NO: 732140 - protein, 17 aa, Homo sapiens
  CDR3 for beta chain variable domain of TCR clone 366070 (TRBV25-1, TRBJ2-5)
CASSRRGGRGGQETQYF

SEQ ID NO: 732141 - protein, 16 aa, Homo sapiens
  CDR3 for alpha chain variable domain of TCR clone 366071 (TRAV26-1, TRAJ38)
CIVRPLNAGNNRTLIW

SEQ ID NO: 732142 - protein, 13 aa, Homo sapiens
  CDR3 for beta chain variable domain of TCR clone 366071 (TRBV18, TRBJ1-1)
CASSPNGDTEAFF

SEQ ID NO: 732143 - protein, 11 aa, Homo sapiens
  CDR3 for alpha chain variable domain of TCR clone 366072 (TRAV2, TRAJ33)
CAVESNYQLIW

SEQ ID NO: 732144 - protein, 12 aa, Homo sapiens
  CDR3 for beta chain variable domain of TCR clone 366072 (TRBV12-4, TRBJ2-3)
CASSTLPDTQYF

SEQ ID NO: 732145 - protein, 15 aa, Homo sapiens
  CDR3 for alpha chain variable domain of TCR clone 366073 (TRAV2, TRAJ24)
CAVEVLTDSWGKFQF

SEQ ID NO: 732146 - protein, 14 aa, Homo sapiens
  CDR3 for beta chain variable domain of TCR clone 366073 (TRBV19, TRBJ2-1)
CASNMGSGRRSSSS

SEQ ID NO: 732147 - protein, 12 aa, Homo sapiens
  CDR3 for alpha chain variable domain of TCR clone 366074 (TRAV8-6, TRAJ31)
CAVSPNNARLMF

SEQ ID NO: 732148 - protein, 15 aa, Homo sapiens
  CDR3 for beta chain variable domain of TCR clone 366074 (TRBV19, TRBJ1-2)
CASNDGTGKDYGHTF

SEQ ID NO: 732149 - protein, 14 aa, Homo sapiens
  CDR3 for alpha chain variable domain of TCR clone 366075 (TRAV17, TRAJ57)
CATDPQGGSEKLVF

SEQ ID NO: 732150 - protein, 15 aa, Homo sapiens
  CDR3 for beta chain variable domain of TCR clone 366075 (TRBV7-2, TRBJ1-5)
CASSRGQGDNQPQHF

SEQ ID NO: 732151 - protein, 14 aa, Homo sapiens
  CDR3 for alpha chain variable domain of TCR clone 366076 (TRAV12-2, TRAJ5)
CAVNRSTCRRALTF

SEQ ID NO: 732152 - protein, 12 aa, Homo sapiens
  CDR3 for beta chain variable domain of TCR clone 366076 (TRBV19, TRBJ1-5)
CASSIAQQPQHV

SEQ ID NO: 732153 - protein, 15 aa, Homo sapiens
  CDR3 for alpha chain variable domain of TCR clone 366077 (TRAV12-2, TRAJ43)
CAFDMRFGAGTRLTV

SEQ ID NO: 732154 - protein, 18 aa, Homo sapiens
  CDR3 for beta chain variable domain of TCR clone 366077 (TRBV15, TRBJ2-3)
CATSRDGARSWDTDTQYF

SEQ ID NO: 732155 - protein, 14 aa, Homo sapiens
  CDR3 for alpha chain variable domain of TCR clone 366078 (TRAV12-3, TRAJ10)
SHLPLTGGGNKLTF

SEQ ID NO: 732156 - protein, 16 aa, Homo sapiens
  CDR3 for beta chain variable domain of TCR clone 366078 (TRBV19, TRBJ1-1)
CASRFGGHVTGTEAFF

SEQ ID NO: 732157 - protein, 17 aa, Homo sapiens
  CDR3 for alpha chain variable domain of TCR clone 366079 (TRAV13-1, TRAJ28)
CAASPPYSGAGSYQLTF

SEQ ID NO: 732158 - protein, 15 aa, Homo sapiens
  CDR3 for beta chain variable domain of TCR clone 366079 (TRBV6-3, TRBJ2-2)
CASSFLATLTGELFC

SEQ ID NO: 732159 - protein, 15 aa, Homo sapiens
  CDR3 for alpha chain variable domain of TCR clone 366080 (TRAV12-1, TRAJ45)
CVVLSGGGGADRLTF

SEQ ID NO: 732160 - protein, 12 aa, Homo sapiens
  CDR3 for beta chain variable domain of TCR clone 366080 (TRBV12-5, TRBJ2-5)
CASGQGVETQYF

SEQ ID NO: 732161 - protein, 15 aa, Homo sapiens
  CDR3 for alpha chain variable domain of TCR clone 366081 (TRAV3, TRAJ22)
CAVRDRGGSARQLTF

SEQ ID NO: 732162 - protein, 13 aa, Homo sapiens
  CDR3 for beta chain variable domain of TCR clone 366081 (TRBV2, TRBJ1-5)
CATAGPGNQPLHF

SEQ ID NO: 732163 - protein, 15 aa, Homo sapiens
  CDR3 for alpha chain variable domain of TCR clone 366082 (TRAV13-1, TRAJ53)
CAAHSPGGSNYKMTF

SEQ ID NO: 732164 - protein, 13 aa, Homo sapiens
  CDR3 for beta chain variable domain of TCR clone 366082 (TRBV28, TRBJ1-5)
CASSLRGNQPQHF

SEQ ID NO: 732165 - protein, 13 aa, Homo sapiens
  CDR3 for alpha chain variable domain of TCR clone 366083 (TRAV36/DV7, TRAJ57)
CAVVLGGSEKLVF

SEQ ID NO: 732166 - protein, 14 aa, Homo sapiens
  CDR3 for beta chain variable domain of TCR clone 366083 (TRBV4-1, TRBJ1-2)
CASSQDGQVRSYTF

SEQ ID NO: 732167 - protein, 13 aa, Homo sapiens
  CDR3 for alpha chain variable domain of TCR clone 366084 (TRAV2, TRAJ40)
CAVVTSGTYKDIC

SEQ ID NO: 732168 - protein, 14 aa, Homo sapiens
  CDR3 for beta chain variable domain of TCR clone 366084 (TRBV19, TRBJ2-1)
CASPTFVLSGEQFF

SEQ ID NO: 732169 - protein, 14 aa, Homo sapiens
  CDR3 for alpha chain variable domain of TCR clone 366085 (TRAV1-2, TRAJ16)
YAVNRFSDGQKLLF

SEQ ID NO: 732170 - protein, 14 aa, Homo sapiens
  CDR3 for beta chain variable domain of TCR clone 366085 (TRBV19, TRBJ2-1)
CASPTCVLSGEQFF

SEQ ID NO: 732171 - protein, 12 aa, Homo sapiens
  CDR3 for alpha chain variable domain of TCR clone 366086 (TRAV17, TRAJ36)
CATLTGANNLFF

SEQ ID NO: 732172 - protein, 13 aa, Homo sapiens
  CDR3 for beta chain variable domain of TCR clone 366086 (TRBV7-9, TRBJ2-3)
CASSPGSTDTQYF

SEQ ID NO: 732173 - protein, 19 aa, Homo sapiens
  CDR3 for alpha chain variable domain of TCR clone 366087 (TRAV21, TRAJ45)
CAVEAPRGDQEEVLTDSPF

SEQ ID NO: 732174 - protein, 13 aa, Homo sapiens
  CDR3 for beta chain variable domain of TCR clone 366087 (TRBV7-9, TRBJ1-2)
CASSLKQNYGYTF

SEQ ID NO: 732175 - protein, 14 aa, Homo sapiens
  CDR3 for alpha chain variable domain of TCR clone 366088 (TRAV17, TRAJ4)
CATAPLGGYNKRIF

SEQ ID NO: 732176 - protein, 13 aa, Homo sapiens
  CDR3 for beta chain variable domain of TCR clone 366088 (TRBV12-4, TRBJ1-3)
CASSLASGNTIYF

SEQ ID NO: 732177 - protein, 11 aa, Homo sapiens
  CDR3 for alpha chain variable domain of TCR clone 366089 (TRAV1-1, TRAJ23)
CAVRQGGKLIF

SEQ ID NO: 732178 - protein, 13 aa, Homo sapiens
  CDR3 for beta chain variable domain of TCR clone 366089 (TRBV7-3, TRBJ1-1)
CASSQGWGAEAFF

SEQ ID NO: 732179 - protein, 12 aa, Homo sapiens
  CDR3 for alpha chain variable domain of TCR clone 366090 (TRAV17, TRAJ20)
CATFANDYKLSF

SEQ ID NO: 732180 - protein, 14 aa, Homo sapiens
  CDR3 for beta chain variable domain of TCR clone 366090 (TRBV10-3, TRBJ1-2)
CAISEDTPYYGYTF

SEQ ID NO: 732181 - protein, 16 aa, Homo sapiens
  CDR3 for alpha chain variable domain of TCR clone 366091 (TRAV16, TRAJ57)
CAPYLITQGGSEKLVF

SEQ ID NO: 732182 - protein, 17 aa, Homo sapiens
  CDR3 for beta chain variable domain of TCR clone 366091 (TRBV24-1, TRBJ2-4)
WATSDAEARGVRNIQYF

SEQ ID NO: 732183 - protein, 12 aa, Homo sapiens
  CDR3 for alpha chain variable domain of TCR clone 366092 (TRAV21, TRAJ13)
PGPSGGYQKVTF

SEQ ID NO: 732184 - protein, 17 aa, Homo sapiens
  CDR3 for beta chain variable domain of TCR clone 366092 (TRBV5-5, TRBJ1-2)
CASSLGSLDGQSEGYTF

SEQ ID NO: 732185 - protein, 16 aa, Homo sapiens
  CDR3 for alpha chain variable domain of TCR clone 366093 (TRAV21, TRAJ37)
CAVRPRGSSNTGKLIF

SEQ ID NO: 732186 - protein, 13 aa, Homo sapiens
  CDR3 for beta chain variable domain of TCR clone 366093 (TRBV19, TRBJ1-2)
CASRLPGQGGYTF

SEQ ID NO: 732187 - protein, 14 aa, Homo sapiens
  CDR3 for alpha chain variable domain of TCR clone 366094 (TRAV35, TRAJ50)
CAGHRKTSYDKVIF

SEQ ID NO: 732188 - protein, 13 aa, Homo sapiens
  CDR3 for beta chain variable domain of TCR clone 366094 (TRBV7-7, TRBJ2-3)
CASSLSRADTQSF

SEQ ID NO: 732189 - protein, 13 aa, Homo sapiens
  CDR3 for alpha chain variable domain of TCR clone 366095 (TRAV20, TRAJ40)
CAVPFSGTYKYIF

SEQ ID NO: 732190 - protein, 13 aa, Homo sapiens
  CDR3 for beta chain variable domain of TCR clone 366095 (TRBV15, TRBJ2-5)
CATSQIGDETQYF

SEQ ID NO: 732191 - protein, 12 aa, Homo sapiens
  CDR3 for alpha chain variable domain of TCR clone 366096 (TRAV17, TRAJ4)
CATDGGYNKVIF

SEQ ID NO: 732192 - protein, 13 aa, Homo sapiens
  CDR3 for beta chain variable domain of TCR clone 366096 (TRBV29-1, TRBJ2-2)
CSTTGVNTGELFF

SEQ ID NO: 732193 - protein, 15 aa, Homo sapiens
  CDR3 for alpha chain variable domain of TCR clone 366097 (TRAV1-2, TRAJ16)
CAVGARFSDGQKLLF

SEQ ID NO: 732194 - protein, 19 aa, Homo sapiens
  CDR3 for beta chain variable domain of TCR clone 366097 (TRBV11-3, TRBJ2-3)
CASGFGTSGGPRGGGTQYF

SEQ ID NO: 732195 - protein, 15 aa, Homo sapiens
  CDR3 for alpha chain variable domain of TCR clone 366098 (TRAV12-3, TRAJ27)
CAMRAYNTNAGKSTF

SEQ ID NO: 732196 - protein, 15 aa, Homo sapiens
  CDR3 for beta chain variable domain of TCR clone 366098 (TRBV7-9, TRBJ1-4)
CASSARTGGNEKLFF

SEQ ID NO: 732197 - protein, 15 aa, Homo sapiens
  CDR3 for alpha chain variable domain of TCR clone 366099 (TRAV8-3, TRAJ45)
CASSYSGGGADGLTF

SEQ ID NO: 732198 - protein, 11 aa, Homo sapiens
  CDR3 for beta chain variable domain of TCR clone 366099 (TRBV29-1, TRBJ2-5)
CSEDRTGTQFF

SEQ ID NO: 732199 - protein, 15 aa, Homo sapiens
  CDR3 for alpha chain variable domain of TCR clone 366100 (TRAV35, TRAJ40)
CAGQLGQSGTYKYIF

SEQ ID NO: 732200 - protein, 14 aa, Homo sapiens
  CDR3 for beta chain variable domain of TCR clone 366100 (TRBV7-3, TRBJ2-1)
CASSLTGGANEQFF

SEQ ID NO: 732201 - protein, 14 aa, Homo sapiens
  CDR3 for alpha chain variable domain of TCR clone 366101 (TRAV1-2, TRAJ16)
CAVNRFSDGQKLLF

SEQ ID NO: 732202 - protein, 14 aa, Homo sapiens
  CDR3 for beta chain variable domain of TCR clone 366101 (TRBV7-9, TRBJ2-2)
CASSLGHRNGELFF

SEQ ID NO: 732203 - protein, 17 aa, Homo sapiens
  CDR3 for alpha chain variable domain of TCR clone 366102 (TRAV16, TRAJ16)
CALQGGGQMARSCSLQG

SEQ ID NO: 732204 - protein, 15 aa, Homo sapiens
  CDR3 for beta chain variable domain of TCR clone 366102 (TRBV20-1, TRBJ2-7)
CSARDRVSGMDEQYF

SEQ ID NO: 732205 - protein, 15 aa, Homo sapiens
  CDR3 for alpha chain variable domain of TCR clone 366103 (TRAV8-1, TRAJ42)
CAVRSYGGSQGNLIF

SEQ ID NO: 732206 - protein, 15 aa, Homo sapiens
  CDR3 for beta chain variable domain of TCR clone 366103 (TRBV19, TRBJ1-2)
CASSVGQVLNYGYTF

SEQ ID NO: 732207 - protein, 13 aa, Homo sapiens
  CDR3 for alpha chain variable domain of TCR clone 366104 (TRAV12-1, TRAJ13)
CEVALLGYQKVTF

SEQ ID NO: 732208 - protein, 13 aa, Homo sapiens
  CDR3 for beta chain variable domain of TCR clone 366104 (TRBV20-1, TRBJ2-5)
CGAILTGQETQYF

SEQ ID NO: 732209 - protein, 14 aa, Homo sapiens
  CDR3 for alpha chain variable domain of TCR clone 366105 (TRAV1-2, TRAJ16)
CAVNRFSDGEKLLF

SEQ ID NO: 732210 - protein, 12 aa, Homo sapiens
  CDR3 for beta chain variable domain of TCR clone 366105 (TRBV11-2, TRBJ2-2)
CASSLGGGELFF

SEQ ID NO: 732211 - protein, 16 aa, Homo sapiens
  CDR3 for alpha chain variable domain of TCR clone 366106 (TRAV30, TRAJ24)
CGTEIVDADSWGKFQF

SEQ ID NO: 732212 - protein, 14 aa, Homo sapiens
  CDR3 for beta chain variable domain of TCR clone 366106 (TRBV28, TRBJ2-4)
CASTQVTGVNIQYF

SEQ ID NO: 732213 - protein, 15 aa, Homo sapiens
  CDR3 for alpha chain variable domain of TCR clone 366107 (TRAV21, TRAJ53)
CATLNSAGSNYKLTF

SEQ ID NO: 732214 - protein, 13 aa, Homo sapiens
  CDR3 for beta chain variable domain of TCR clone 366107 (TRBV7-2, TRBJ2-2)
CASSLAVTGELFF

SEQ ID NO: 732215 - protein, 15 aa, Homo sapiens
  CDR3 for alpha chain variable domain of TCR clone 366108 (TRAV26-1, TRAJ40)
CIVRVTTSGTYKYIF

SEQ ID NO: 732216 - protein, 15 aa, Homo sapiens
  CDR3 for beta chain variable domain of TCR clone 366108 (TRBV11-3, TRBJ2-1)
CASSSGGTVADEQFF

SEQ ID NO: 732217 - protein, 17 aa, Homo sapiens
  CDR3 for alpha chain variable domain of TCR clone 366109 (TRAV38-2/DV8, TRAJ23)
CALSRKLIFGQGTELSV

SEQ ID NO: 732218 - protein, 17 aa, Homo sapiens
  CDR3 for beta chain variable domain of TCR clone 366109 (TRBV5-4, TRBJ2-1)
CASSSAGGRGPYNAQFF

SEQ ID NO: 732219 - protein, 11 aa, Homo sapiens
  CDR3 for alpha chain variable domain of TCR clone 366110 (TRAV2, TRAJ13)
CASGGYQKDTF

SEQ ID NO: 732220 - protein, 14 aa, Homo sapiens
  CDR3 for beta chain variable domain of TCR clone 366110 (TRBV7-2, TRBJ2-7)
CASSPKTSFYEQYF

SEQ ID NO: 732221 - protein, 10 aa, Homo sapiens
  CDR3 for alpha chain variable domain of TCR clone 366111 (TRAV23/DV6, TRAJ57)
CAASSTLSQG

SEQ ID NO: 732222 - protein, 14 aa, Homo sapiens
  CDR3 for beta chain variable domain of TCR clone 366111 (TRBV3-1, TRBJ2-5)
CASSQGPDQETQYF

SEQ ID NO: 732223 - protein, 13 aa, Homo sapiens
  CDR3 for alpha chain variable domain of TCR clone 366112 (TRAV26-1, TRAJ33)
CIVRVEGNYQLIW

SEQ ID NO: 732224 - protein, 16 aa, Homo sapiens
  CDR3 for beta chain variable domain of TCR clone 366112 (TRBV15, TRBJ2-7)
CATSRDRGRRKGEQYF

SEQ ID NO: 732225 - protein, 13 aa, Homo sapiens
  CDR3 for alpha chain variable domain of TCR clone 366113 (TRAV26-1, TRAJ41)
CIVRINSGYALNF

SEQ ID NO: 732226 - protein, 14 aa, Homo sapiens
  CDR3 for beta chain variable domain of TCR clone 366113 (TRBV20-1, TRBJ2-5)
CSAHRQGLWETQYF

SEQ ID NO: 732227 - protein, 12 aa, Homo sapiens
  CDR3 for alpha chain variable domain of TCR clone 366114 (TRAV21, TRAJ27)
CAARPGNAQINL

SEQ ID NO: 732228 - protein, 14 aa, Homo sapiens
  CDR3 for beta chain variable domain of TCR clone 366114 (TRBV7-6, TRBJ2-3)
CASSLGTVTDTQYF

SEQ ID NO: 732229 - protein, 12 aa, Homo sapiens
  CDR3 for alpha chain variable domain of TCR clone 366115 (TRAV36/DV7, TRAJ54)
CAVVRGAQKLVF

SEQ ID NO: 732230 - protein, 15 aa, Homo sapiens
  CDR3 for beta chain variable domain of TCR clone 366115 (TRBV28, TRBJ2-5)
CASSSPLGGGETQYF

SEQ ID NO: 732231 - protein, 12 aa, Homo sapiens
  CDR3 for alpha chain variable domain of TCR clone 366116 (TRAV21, TRAJ13)
PGPSGGYQKVTF

SEQ ID NO: 732232 - protein, 16 aa, Homo sapiens
  CDR3 for beta chain variable domain of TCR clone 366116 (TRBV20-1, TRBJ2-5)
CSPGGTSGGYMETQYF

SEQ ID NO: 732233 - protein, 13 aa, Homo sapiens
  CDR3 for alpha chain variable domain of TCR clone 366117 (TRAV1-2, TRAJ9)
YAALNTGGFKPIF

SEQ ID NO: 732234 - protein, 13 aa, Homo sapiens
  CDR3 for beta chain variable domain of TCR clone 366117 (TRBV19, TRBJ1-2)
CASSVPGQDGYTF

SEQ ID NO: 732235 - protein, 16 aa, Homo sapiens
  CDR3 for alpha chain variable domain of TCR clone 366118 (TRAV3, TRAJ10)
CAVRDMRAGGGKKLTF

SEQ ID NO: 732236 - protein, 14 aa, Homo sapiens
  CDR3 for beta chain variable domain of TCR clone 366118 (TRBV7-2, TRBJ1-1)
CASSFLTGTTEAFF

SEQ ID NO: 732237 - protein, 12 aa, Homo sapiens
  CDR3 for alpha chain variable domain of TCR clone 366119 (TRAV13-2, TRAJ23)
CAERHRGGKPIF

SEQ ID NO: 732238 - protein, 16 aa, Homo sapiens
  CDR3 for beta chain variable domain of TCR clone 366119 (TRBV20-1, TRBJ1-4)
CSAPGQGLLTNEKLFF

SEQ ID NO: 732239 - protein, 12 aa, Homo sapiens
  CDR3 for alpha chain variable domain of TCR clone 366120 (TRAV12-3, TRAJ17)
CAMTLTGNKLTF

SEQ ID NO: 732240 - protein, 15 aa, Homo sapiens
  CDR3 for beta chain variable domain of TCR clone 366120 (TRBV20-1, TRBJ2-7)
WSARDCVSGMDEQYF

SEQ ID NO: 732241 - protein, 15 aa, Homo sapiens
  CDR3 for alpha chain variable domain of TCR clone 366121 (TRAV17, TRAJ22)
CATVAPSGSARQLTF

SEQ ID NO: 732242 - protein, 14 aa, Homo sapiens
  CDR3 for beta chain variable domain of TCR clone 366121 (TRBV4-1, TRBJ2-2)
CAGSQAVNTGELVF

SEQ ID NO: 732243 - protein, 12 aa, Homo sapiens
  CDR3 for alpha chain variable domain of TCR clone 366122 (TRAV3, TRAJ31)
CAVRDGNARLMF

SEQ ID NO: 732244 - protein, 19 aa, Homo sapiens
  CDR3 for beta chain variable domain of TCR clone 366122 (TRBV19, TRBJ2-5)
CASSIGQVTDFFLGETQYF

SEQ ID NO: 732245 - protein, 16 aa, Homo sapiens
  CDR3 for alpha chain variable domain of TCR clone 366123 (TRAV8-1, TRAJ48)
CAVTLISTFGNEKLTF

SEQ ID NO: 732246 - protein, 12 aa, Homo sapiens
  CDR3 for beta chain variable domain of TCR clone 366123 (TRBV20-1, TRBJ1-2)
CSAPGFNYGYTF

SEQ ID NO: 732247 - protein, 15 aa, Homo sapiens
  CDR3 for alpha chain variable domain of TCR clone 366124 (TRAV13-1, TRAJ17)
CAASIERAAGNKLTF

SEQ ID NO: 732248 - protein, 15 aa, Homo sapiens
  CDR3 for beta chain variable domain of TCR clone 366124 (TRBV6-1, TRBJ2-3)
CASSERGGVTDTHYF

SEQ ID NO: 732249 - protein, 14 aa, Homo sapiens
  CDR3 for alpha chain variable domain of TCR clone 366125 (TRAV14/DV4, TRAJ15)
CAMRRDQAGTARIF

SEQ ID NO: 732250 - protein, 14 aa, Homo sapiens
  CDR3 for beta chain variable domain of TCR clone 366125 (TRBV28, TRBJ2-7)
CASRAAGLGYEQYF

SEQ ID NO: 732251 - protein, 13 aa, Homo sapiens
  CDR3 for alpha chain variable domain of TCR clone 366126 (TRAV20, TRAJ21)
CAVEGYNSNKFYF

SEQ ID NO: 732252 - protein, 14 aa, Homo sapiens
  CDR3 for beta chain variable domain of TCR clone 366126 (TRBV12-5, TRBJ2-5)
CASGSRTHQETQYF

SEQ ID NO: 732253 - protein, 14 aa, Homo sapiens
  CDR3 for alpha chain variable domain of TCR clone 366127 (TRAV20, TRAJ29)
CAVQAWVGNTPLVF

SEQ ID NO: 732254 - protein, 17 aa, Homo sapiens
  CDR3 for beta chain variable domain of TCR clone 366127 (TRBV29-1, TRBJ2-7)
CSVEFFDRGSTSSTSGR

SEQ ID NO: 732255 - protein, 14 aa, Homo sapiens
  CDR3 for alpha chain variable domain of TCR clone 366128 (TRAV29/DV5, TRAJ36)
CAARRKTGANNLFF

SEQ ID NO: 732256 - protein, 11 aa, Homo sapiens
  CDR3 for beta chain variable domain of TCR clone 366128 (TRBV7-8, TRBJ2-7)
CASSLSLEQYF

SEQ ID NO: 732257 - protein, 13 aa, Homo sapiens
  CDR3 for alpha chain variable domain of TCR clone 366129 (TRAV8-3, TRAJ44)
CAVVPGTASKLPF

SEQ ID NO: 732258 - protein, 14 aa, Homo sapiens
  CDR3 for beta chain variable domain of TCR clone 366129 (TRBV11-2, TRBJ1-5)
CASSLDRGRQPQHF

SEQ ID NO: 732259 - protein, 11 aa, Homo sapiens
  CDR3 for alpha chain variable domain of TCR clone 366130 (TRAV12-3, TRAJ27)
CAMANAGKSTF

SEQ ID NO: 732260 - protein, 13 aa, Homo sapiens
  CDR3 for beta chain variable domain of TCR clone 366130 (TRBV5-5, TRBJ1-2)
CASSFWRGEDYAF

SEQ ID NO: 732261 - protein, 12 aa, Homo sapiens
  CDR3 for alpha chain variable domain of TCR clone 366131 (TRAV13-1, TRAJ9)
CASDTGGFKTIF

SEQ ID NO: 732262 - protein, 18 aa, Homo sapiens
  CDR3 for beta chain variable domain of TCR clone 366131 (TRBV11-2, TRBJ2-3)
CASSLGGASRGATNTQYF

SEQ ID NO: 732263 - protein, 15 aa, Homo sapiens
  CDR3 for alpha chain variable domain of TCR clone 366132 (TRAV8-3, TRAJ11)
CAVGLLNSGYSTLTF

SEQ ID NO: 732264 - protein, 16 aa, Homo sapiens
  CDR3 for beta chain variable domain of TCR clone 366132 (TRBV7-9, TRBJ2-3)
CASSPWREVGTDTQYL

SEQ ID NO: 732265 - protein, 18 aa, Homo sapiens
  CDR3 for alpha chain variable domain of TCR clone 366133 (TRAV8-2, TRAJ36)
CAVSDGLRDWGKQPLLWD

SEQ ID NO: 732266 - protein, 16 aa, Homo sapiens
  CDR3 for beta chain variable domain of TCR clone 366133 (TRBV28, TRBJ2-1)
CASSSPEYPRDNEQFF

SEQ ID NO: 732267 - protein, 15 aa, Homo sapiens
  CDR3 for alpha chain variable domain of TCR clone 366134 (TRAV17, TRAJ54)
CAKEKLGQGAQKLVF

SEQ ID NO: 732268 - protein, 13 aa, Homo sapiens
  CDR3 for beta chain variable domain of TCR clone 366134 (TRBV12-5, TRBJ2-3)
CASGDRQSDTQYF

SEQ ID NO: 732269 - protein, 14 aa, Homo sapiens
  CDR3 for alpha chain variable domain of TCR clone 366135 (TRAV1-2, TRAJ8)
CAVREDTDFQKLVF

SEQ ID NO: 732270 - protein, 15 aa, Homo sapiens
  CDR3 for beta chain variable domain of TCR clone 366135 (TRBV9, TRBJ1-6)
CASSVAGTGDSPLHF

SEQ ID NO: 732271 - protein, 18 aa, Homo sapiens
  CDR3 for alpha chain variable domain of TCR clone 366136 (TRAV16, TRAJ26)
CALSRSEFCLWSRNQLVR

SEQ ID NO: 732272 - protein, 12 aa, Homo sapiens
  CDR3 for beta chain variable domain of TCR clone 366136 (TRBV11-2, TRBJ2-1)
CASSPGNNEQFF

SEQ ID NO: 732273 - protein, 18 aa, Homo sapiens
  CDR3 for alpha chain variable domain of TCR clone 366137 (TRAV26-1, TRAJ22)
CIGRVALISSGSARQLTF

SEQ ID NO: 732274 - protein, 13 aa, Homo sapiens
  CDR3 for beta chain variable domain of TCR clone 366137 (TRBV13, TRBJ2-5)
CASSPEVGETQYF

SEQ ID NO: 732275 - protein, 16 aa, Homo sapiens
  CDR3 for alpha chain variable domain of TCR clone 366138 (TRAV20, TRAJ53)
CAVQAESGGSNYKLTF

SEQ ID NO: 732276 - protein, 15 aa, Homo sapiens
  CDR3 for beta chain variable domain of TCR clone 366138 (TRBV19, TRBJ2-1)
CASSSPGVPLDEQFF

SEQ ID NO: 732277 - protein, 10 aa, Homo sapiens
  CDR3 for alpha chain variable domain of TCR clone 366139 (TRAV8-3, TRAJ49)
CAMNDDQFYF

SEQ ID NO: 732278 - protein, 13 aa, Homo sapiens
  CDR3 for beta chain variable domain of TCR clone 366139 (TRBV12-4, TRBJ1-1)
CASSPGTGFEAFF

SEQ ID NO: 732279 - protein, 13 aa, Homo sapiens
  CDR3 for alpha chain variable domain of TCR clone 366140 (TRAV1-2, TRAJ17)
CAVCKAAGNKLTF

SEQ ID NO: 732280 - protein, 15 aa, Homo sapiens
  CDR3 for beta chain variable domain of TCR clone 366140 (TRBV7-9, TRBJ2-1)
CASSGTGGDYNEQFF

SEQ ID NO: 732281 - protein, 23 aa, Homo sapiens
  CDR3 for alpha chain variable domain of TCR clone 366141 (TRAV21, TRAJ39)
AASQPGDSATHPLLVNAGNMLTF

SEQ ID NO: 732282 - protein, 15 aa, Homo sapiens
  CDR3 for beta chain variable domain of TCR clone 366141 (TRBV29-1, TRBJ2-1)
CSGRDRKSSYNEQFF

SEQ ID NO: 732283 - protein, 10 aa, Homo sapiens
  CDR3 for alpha chain variable domain of TCR clone 366142 (TRAV1-2, TRAJ20)
CACNDYKLSF

SEQ ID NO: 732284 - protein, 16 aa, Homo sapiens
  CDR3 for beta chain variable domain of TCR clone 366142 (TRBV20-1, TRBJ2-1)
SAVLDLKQGMNNEQFF

SEQ ID NO: 732285 - protein, 15 aa, Homo sapiens
  CDR3 for alpha chain variable domain of TCR clone 366143 (TRAV36/DV7, TRAJ54)
CAVEKPVQGAQKLVF

SEQ ID NO: 732286 - protein, 17 aa, Homo sapiens
  CDR3 for beta chain variable domain of TCR clone 366143 (TRBV6-5, TRBJ1-2)
CASSSPREGAFDYGYTF

SEQ ID NO: 732287 - protein, 15 aa, Homo sapiens
  CDR3 for alpha chain variable domain of TCR clone 366144 (TRAV12-1, TRAJ44)
CVADLPTGTASKLTF

SEQ ID NO: 732288 - protein, 13 aa, Homo sapiens
  CDR3 for beta chain variable domain of TCR clone 366144 (TRBV20-1, TRBJ2-5)
CSARGDYEETQYF

SEQ ID NO: 732289 - protein, 10 aa, Homo sapiens
  CDR3 for alpha chain variable domain of TCR clone 366145 (TRAV12-3, TRAJ18)
CAMSAEAQPW

SEQ ID NO: 732290 - protein, 15 aa, Homo sapiens
  CDR3 for beta chain variable domain of TCR clone 366145 (TRBV6-3, TRBJ2-2)
CASSFLATLTGELFF

SEQ ID NO: 732291 - protein, 15 aa, Homo sapiens
  CDR3 for alpha chain variable domain of TCR clone 366146 (TRAV3, TRAJ22)
CAVGDRGGSSRQPTF

SEQ ID NO: 732292 - protein, 15 aa, Homo sapiens
  CDR3 for beta chain variable domain of TCR clone 366146 (TRBV10-3, TRBJ2-3)
CAISLTSGGTDTQYF

SEQ ID NO: 732293 - protein, 12 aa, Homo sapiens
  CDR3 for alpha chain variable domain of TCR clone 366147 (TRAV12-3, TRAJ17)
CAMTLTGKKLTL

SEQ ID NO: 732294 - protein, 15 aa, Homo sapiens
  CDR3 for beta chain variable domain of TCR clone 366147 (TRBV20-1, TRBJ2-7)
CSARDRVSGMDEQYF

SEQ ID NO: 732295 - protein, 12 aa, Homo sapiens
  CDR3 for alpha chain variable domain of TCR clone 366148 (TRAV8-6, TRAJ36)
CAVSDWLGQTTS

SEQ ID NO: 732296 - protein, 14 aa, Homo sapiens
  CDR3 for beta chain variable domain of TCR clone 366148 (TRBV7-8, TRBJ1-2)
CASSPDSLSYGYTF

SEQ ID NO: 732297 - protein, 16 aa, Homo sapiens
  CDR3 for alpha chain variable domain of TCR clone 366149 (TRAV12-3, TRAJ53)
CAMSPGSGGSNYKLAF

SEQ ID NO: 732298 - protein, 13 aa, Homo sapiens
  CDR3 for beta chain variable domain of TCR clone 366149 (TRBV7-9, TRBJ2-5)
CASLPSGRETQYF

SEQ ID NO: 732299 - protein, 14 aa, Homo sapiens
  CDR3 for alpha chain variable domain of TCR clone 366150 (TRAV16, TRAJ39)
CDLSKNNAGNMLTF

SEQ ID NO: 732300 - protein, 16 aa, Homo sapiens
  CDR3 for beta chain variable domain of TCR clone 366150 (TRBV6-6, TRBJ2-1)
CASSYSFSGSYNEQFF

SEQ ID NO: 732301 - protein, 16 aa, Homo sapiens
  CDR3 for alpha chain variable domain of TCR clone 366151 (TRAV30, TRAJ24)
CGTEIVDAYSWGKFQF

SEQ ID NO: 732302 - protein, 14 aa, Homo sapiens
  CDR3 for beta chain variable domain of TCR clone 366151 (TRBV7-7, TRBJ2-2)
CASSTRASGGELFF

SEQ ID NO: 732303 - protein, 12 aa, Homo sapiens
  CDR3 for alpha chain variable domain of TCR clone 366152 (TRAV35, TRAJ49)
CAGWNTGNQFYF

SEQ ID NO: 732304 - protein, 12 aa, Homo sapiens
  CDR3 for beta chain variable domain of TCR clone 366152 (TRBV11-2, TRBJ2-2)
CASSLGGGELFF

SEQ ID NO: 732305 - protein, 16 aa, Homo sapiens
  CDR3 for alpha chain variable domain of TCR clone 366153 (TRAV39, TRAJ32)
CAVDMAYGGATNKLIF

SEQ ID NO: 732306 - protein, 14 aa, Homo sapiens
  CDR3 for beta chain variable domain of TCR clone 366153 (TRBV9, TRBJ2-4)
CASSPSGTSGFQYF

SEQ ID NO: 732307 - protein, 13 aa, Homo sapiens
  CDR3 for alpha chain variable domain of TCR clone 366154 (TRAV12-2, TRAJ30)
CAVNLNRDDKIIF

SEQ ID NO: 732308 - protein, 15 aa, Homo sapiens
  CDR3 for beta chain variable domain of TCR clone 366154 (TRBV7-9, TRBJ2-5)
CASSRRTGGGETQYF

SEQ ID NO: 732309 - protein, 21 aa, Homo sapiens
  CDR3 for alpha chain variable domain of TCR clone 366155 (TRAV12-1, TRAJ32)
SSVIQPPTSMNHGGATNKLIF

SEQ ID NO: 732310 - protein, 18 aa, Homo sapiens
  CDR3 for beta chain variable domain of TCR clone 366155 (TRBV20-1, TRBJ2-3)
CSASGLAGGPGTTDTQYF

SEQ ID NO: 732311 - protein, 16 aa, Homo sapiens
  CDR3 for alpha chain variable domain of TCR clone 366156 (TRAV13-1, TRAJ48)
CAASIFGNFGNEKLAF

SEQ ID NO: 732312 - protein, 16 aa, Homo sapiens
  CDR3 for beta chain variable domain of TCR clone 366156 (TRBV18, TRBJ1-5)
CASSPYRVEGNQPQHF

SEQ ID NO: 732313 - protein, 12 aa, Homo sapiens
  CDR3 for alpha chain variable domain of TCR clone 366157 (TRAV1-1, TRAJ39)
CAVPVVGNMLTF

SEQ ID NO: 732314 - protein, 14 aa, Homo sapiens
  CDR3 for beta chain variable domain of TCR clone 366157 (TRBV4-2, TRBJ1-5)
CASSQDSINQPQHF

SEQ ID NO: 732315 - protein, 16 aa, Homo sapiens
  CDR3 for alpha chain variable domain of TCR clone 366158 (TRAV30, TRAJ24)
CGTAIVDADSGGKFQF

SEQ ID NO: 732316 - protein, 14 aa, Homo sapiens
  CDR3 for beta chain variable domain of TCR clone 366158 (TRBV12-5, TRBJ2-5)
CASGSRTHQETQYF

SEQ ID NO: 732317 - protein, 18 aa, Homo sapiens
  CDR3 for alpha chain variable domain of TCR clone 366159 (TRAV9-2, TRAJ52)
CALSRHNAGGTSYGKLTF

SEQ ID NO: 732318 - protein, 14 aa, Homo sapiens
  CDR3 for beta chain variable domain of TCR clone 366159 (TRBV19, TRBJ1-2)
CASSIGTEAAGYTF

SEQ ID NO: 732319 - protein, 16 aa, Homo sapiens
  CDR3 for alpha chain variable domain of TCR clone 366160 (TRAV12-3, TRAJ53)
CAISVGSGGSNYKLTF

SEQ ID NO: 732320 - protein, 11 aa, Homo sapiens
  CDR3 for beta chain variable domain of TCR clone 366160 (TRBV29-1, TRBJ2-5)
CSVASGETQYF

SEQ ID NO: 732321 - protein, 14 aa, Homo sapiens
  CDR3 for alpha chain variable domain of TCR clone 366161 (TRAV12-2, TRAJ24)
CAVTPADSWGKLQF

SEQ ID NO: 732322 - protein, 17 aa, Homo sapiens
  CDR3 for beta chain variable domain of TCR clone 366161 (TRBV28, TRBJ2-3)
CASSPTPAGGRVDTQYF

SEQ ID NO: 732323 - protein, 14 aa, Homo sapiens
  CDR3 for alpha chain variable domain of TCR clone 366162 (TRAV20, TRAJ32)
CCGRYGGATNKLIF

SEQ ID NO: 732324 - protein, 12 aa, Homo sapiens
  CDR3 for beta chain variable domain of TCR clone 366162 (TRBV11-2, TRBJ2-2)
CASSLPTGELFF

SEQ ID NO: 732325 - protein, 17 aa, Homo sapiens
  CDR3 for alpha chain variable domain of TCR clone 366163 (TRAV26-2, TRAJ42)
CILRDFGYGGGQGNLIF

SEQ ID NO: 732326 - protein, 16 aa, Homo sapiens
  CDR3 for beta chain variable domain of TCR clone 366163 (TRBV12-4, TRBJ2-7)
CASSLIGGTGTYEQYF

SEQ ID NO: 732327 - protein, 14 aa, Homo sapiens
  CDR3 for alpha chain variable domain of TCR clone 366164 (TRAV12-2, TRAJ40)
CAVKIPSGTYKYIF

SEQ ID NO: 732328 - protein, 16 aa, Homo sapiens
  CDR3 for beta chain variable domain of TCR clone 366164 (TRBV20-1, TRBJ1-1)
CSAQTRIGGTEAFLDK

SEQ ID NO: 732329 - protein, 16 aa, Homo sapiens
  CDR3 for alpha chain variable domain of TCR clone 366165 (TRAV26-1, TRAJ28)
RIVRPYSGAGSYQLTF

SEQ ID NO: 732330 - protein, 18 aa, Homo sapiens
  CDR3 for beta chain variable domain of TCR clone 366165 (TRBV20-1, TRBJ2-2)
CSARDLTSGSMDTGELFF

SEQ ID NO: 732331 - protein, 14 aa, Homo sapiens
  CDR3 for alpha chain variable domain of TCR clone 366166 (TRAV29/DV5, TRAJ36)
CAARRKTGANNLFF

SEQ ID NO: 732332 - protein, 16 aa, Homo sapiens
  CDR3 for beta chain variable domain of TCR clone 366166 (TRBV7-6, TRBJ1-6)
CASSLSSRIGDSPLHF

SEQ ID NO: 732333 - protein, 14 aa, Homo sapiens
  CDR3 for alpha chain variable domain of TCR clone 366167 (TRAV12-2, TRAJ13)
CAVKKTGGYQKGTF

SEQ ID NO: 732334 - protein, 15 aa, Homo sapiens
  CDR3 for beta chain variable domain of TCR clone 366167 (TRBV27, TRBJ2-1)
YASSNGGGSSNEQFF

SEQ ID NO: 732335 - protein, 14 aa, Homo sapiens
  CDR3 for alpha chain variable domain of TCR clone 366168 (TRAV1-1, TRAJ33)
CAVRPEDSNYQLIW

SEQ ID NO: 732336 - protein, 13 aa, Homo sapiens
  CDR3 for beta chain variable domain of TCR clone 366168 (TRBV7-8, TRBJ2-7)
CASSFAGLYEQYF

SEQ ID NO: 732337 - protein, 13 aa, Homo sapiens
  CDR3 for alpha chain variable domain of TCR clone 366169 (TRAV36/DV7, TRAJ38)
CVANAGNNRKLIW

SEQ ID NO: 732338 - protein, 14 aa, Homo sapiens
  CDR3 for beta chain variable domain of TCR clone 366169 (TRBV11-3, TRBJ1-6)
CASSFSGGDSPLLF

SEQ ID NO: 732339 - protein, 15 aa, Homo sapiens
  CDR3 for alpha chain variable domain of TCR clone 366170 (TRAV13-1, TRAJ44)
CAASRGGGTASKLTF

SEQ ID NO: 732340 - protein, 14 aa, Homo sapiens
  CDR3 for beta chain variable domain of TCR clone 366170 (TRBV19, TRBJ2-1)
CARGARSFQWEQFF

SEQ ID NO: 732341 - protein, 14 aa, Homo sapiens
  CDR3 for alpha chain variable domain of TCR clone 366171 (TRAV8-4, TRAJ9)
CAVRINTGGFKTIF

SEQ ID NO: 732342 - protein, 12 aa, Homo sapiens
  CDR3 for beta chain variable domain of TCR clone 366171 (TRBV7-2, TRBJ1-6)
CASSLSSSPLHF

SEQ ID NO: 732343 - protein, 20 aa, Homo sapiens
  CDR3 for alpha chain variable domain of TCR clone 366172 (TRAV12-3, TRAJ41)
SLFIRDSQPSDSATPAALNF

SEQ ID NO: 732344 - protein, 13 aa, Homo sapiens
  CDR3 for beta chain variable domain of TCR clone 366172 (TRBV10-3, TRBJ2-3)
CAIRDTGADTQYF

SEQ ID NO: 732345 - protein, 17 aa, Homo sapiens
  CDR3 for alpha chain variable domain of TCR clone 366173 (TRAV12-3, TRAJ31)
CAMKDRPMFGDGTQLVV

SEQ ID NO: 732346 - protein, 17 aa, Homo sapiens
  CDR3 for beta chain variable domain of TCR clone 366173 (TRBV28, TRBJ1-1)
CASSLSGTGYENTEAFF

SEQ ID NO: 732347 - protein, 15 aa, Homo sapiens
  CDR3 for alpha chain variable domain of TCR clone 366174 (TRAV17, TRAJ56)
CATDANTGANSKLTF

SEQ ID NO: 732348 - protein, 15 aa, Homo sapiens
  CDR3 for beta chain variable domain of TCR clone 366174 (TRBV20-1, TRBJ2-7)
CSARDRVSGMDEQYF

SEQ ID NO: 732349 - protein, 13 aa, Homo sapiens
  CDR3 for alpha chain variable domain of TCR clone 366175 (TRAV35, TRAJ20)
CAGPLSNDYKLSF

SEQ ID NO: 732350 - protein, 16 aa, Homo sapiens
  CDR3 for beta chain variable domain of TCR clone 366175 (TRBV29-1, TRBJ2-7)
CSVEVVGTSGCYEQYF

SEQ ID NO: 732351 - protein, 14 aa, Homo sapiens
  CDR3 for alpha chain variable domain of TCR clone 366176 (TRAV23/DV6, TRAJ40)
CAASLTSGTYKYIF

SEQ ID NO: 732352 - protein, 14 aa, Homo sapiens
  CDR3 for beta chain variable domain of TCR clone 366176 (TRBV5-1, TRBJ2-3)
CAGSRGQGGGTQYF

SEQ ID NO: 732353 - protein, 19 aa, Homo sapiens
  CDR3 for alpha chain variable domain of TCR clone 366177 (TRAV1-2, TRAJ26)
CLLPLCCERPDNYGQNFFF

SEQ ID NO: 732354 - protein, 11 aa, Homo sapiens
  CDR3 for beta chain variable domain of TCR clone 366177 (TRBV12-4, TRBJ2-3)
CASTATDTQYF

SEQ ID NO: 732355 - protein, 14 aa, Homo sapiens
  CDR3 for alpha chain variable domain of TCR clone 366178 (TRAV29/DV5, TRAJ45)
CAASFRGGADGLTF

SEQ ID NO: 732356 - protein, 13 aa, Homo sapiens
  CDR3 for beta chain variable domain of TCR clone 366178 (TRBV19, TRBJ1-2)
CASSVPGQDGYTF

SEQ ID NO: 732357 - protein, 14 aa, Homo sapiens
  CDR3 for alpha chain variable domain of TCR clone 366179 (TRAV35, TRAJ22)
CTGLRPGSARQLTF

SEQ ID NO: 732358 - protein, 13 aa, Homo sapiens
  CDR3 for beta chain variable domain of TCR clone 366179 (TRBV19, TRBJ1-2)
CASSVPGQDGYTF

SEQ ID NO: 732359 - protein, 14 aa, Homo sapiens
  CDR3 for alpha chain variable domain of TCR clone 366180 (TRAV30, TRAJ33)
CGTVAPRSNYQLIW

SEQ ID NO: 732360 - protein, 13 aa, Homo sapiens
  CDR3 for beta chain variable domain of TCR clone 366180 (TRBV7-2, TRBJ2-5)
CASSQTSVETQYF

SEQ ID NO: 732361 - protein, 13 aa, Homo sapiens
  CDR3 for alpha chain variable domain of TCR clone 366181 (TRAV13-2, TRAJ13)
CAERPGGYQKGTF

SEQ ID NO: 732362 - protein, 14 aa, Homo sapiens
  CDR3 for beta chain variable domain of TCR clone 366181 (TRBV23-1, TRBJ2-5)
CASSFLRSQETQYF

SEQ ID NO: 732363 - protein, 11 aa, Homo sapiens
  CDR3 for alpha chain variable domain of TCR clone 366182 (TRAV8-3, TRAJ3)
CAVGARPDFKR

SEQ ID NO: 732364 - protein, 13 aa, Homo sapiens
  CDR3 for beta chain variable domain of TCR clone 366182 (TRBV20-1, TRBJ1-2)
CSATGIQGSGCTF

SEQ ID NO: 732365 - protein, 14 aa, Homo sapiens
  CDR3 for alpha chain variable domain of TCR clone 366183 (TRAV26-1, TRAJ54)
CIVRRTQGAQKLVF

SEQ ID NO: 732366 - protein, 17 aa, Homo sapiens
  CDR3 for beta chain variable domain of TCR clone 366183 (TRBV7-8, TRBJ2-6)
CASSAGTGGAGANGLTF

SEQ ID NO: 732367 - protein, 14 aa, Homo sapiens
  CDR3 for alpha chain variable domain of TCR clone 366184 (TRAV27, TRAJ33)
CRSGSRDSNYQLIW

SEQ ID NO: 732368 - protein, 22 aa, Homo sapiens
  CDR3 for beta chain variable domain of TCR clone 366184 (TRBV29-1, TRBJ2-5)
TVSNMSPEDSSIYLCSAGTQYF

SEQ ID NO: 732369 - protein, 18 aa, Homo sapiens
  CDR3 for alpha chain variable domain of TCR clone 366185 (TRAV26-2, TRAJ54)
CILRDVEVGIQGAPKLVF

SEQ ID NO: 732370 - protein, 17 aa, Homo sapiens
  CDR3 for beta chain variable domain of TCR clone 366185 (TRBV20-1, TRBJ1-5)
CSASLSPGQGGNQPQHF

SEQ ID NO: 732371 - protein, 11 aa, Homo sapiens
  CDR3 for alpha chain variable domain of TCR clone 366186 (TRAV13-1, TRAJ8)
CAARGFQKLVF

SEQ ID NO: 732372 - protein, 16 aa, Homo sapiens
  CDR3 for beta chain variable domain of TCR clone 366186 (TRBV19, TRBJ1-5)
CASSTRGTRSNEPQHF

SEQ ID NO: 732373 - protein, 11 aa, Homo sapiens
  CDR3 for alpha chain variable domain of TCR clone 366187 (TRAV13-1, TRAJ43)
CAASNLLTCAL

SEQ ID NO: 732374 - protein, 14 aa, Homo sapiens
  CDR3 for beta chain variable domain of TCR clone 366187 (TRBV7-6, TRBJ2-3)
CASSLGTVTDTQYF

SEQ ID NO: 732375 - protein, 10 aa, Homo sapiens
  CDR3 for alpha chain variable domain of TCR clone 366188 (TRAV12-3, TRAJ49)
CAMNDDQFYF

SEQ ID NO: 732376 - protein, 15 aa, Homo sapiens
  CDR3 for beta chain variable domain of TCR clone 366188 (TRBV5-1, TRBJ2-7)
CASSLNGGPAREQYF

SEQ ID NO: 732377 - protein, 17 aa, Homo sapiens
  CDR3 for alpha chain variable domain of TCR clone 366189 (TRAV23/DV6, )
CAADIQNPDPAVYHLRD

SEQ ID NO: 732378 - protein, 13 aa, Homo sapiens
  CDR3 for beta chain variable domain of TCR clone 366189 (TRBV20-1, TRBJ1-1)
CSARVGGNTEAFF

SEQ ID NO: 732379 - protein, 13 aa, Homo sapiens
  CDR3 for alpha chain variable domain of TCR clone 366190 (TRAV12-3, TRAJ40)
CAMSDSGTYKYIF

SEQ ID NO: 732380 - protein, 22 aa, Homo sapiens
  CDR3 for beta chain variable domain of TCR clone 366190 (TRBV14, TRBJ1-5)
CASSQDGVTPYLPPIGKQPQHF

SEQ ID NO: 732381 - protein, 11 aa, Homo sapiens
  CDR3 for alpha chain variable domain of TCR clone 366191 (TRAV13-2, TRAJ54)
RAVQGAQKLVF

SEQ ID NO: 732382 - protein, 15 aa, Homo sapiens
  CDR3 for beta chain variable domain of TCR clone 366191 (TRBV20-1, TRBJ2-7)
CSADSGTSGAYEQYF

SEQ ID NO: 732383 - protein, 14 aa, Homo sapiens
  CDR3 for alpha chain variable domain of TCR clone 366192 (TRAV1-1, TRAJ23)
CAVSIYNQGGKLIF

SEQ ID NO: 732384 - protein, 17 aa, Homo sapiens
  CDR3 for beta chain variable domain of TCR clone 366192 (TRBV28, TRBJ2-5)
CASSTPEGDALQETQYF

SEQ ID NO: 732385 - protein, 14 aa, Homo sapiens
  CDR3 for alpha chain variable domain of TCR clone 366193 (TRAV29/DV5, TRAJ53)
CAASIGGSNYKLTF

SEQ ID NO: 732386 - protein, 16 aa, Homo sapiens
  CDR3 for beta chain variable domain of TCR clone 366193 (TRBV5-5, TRBJ2-2)
CASSGRREGATGELFF

SEQ ID NO: 732387 - protein, 14 aa, Homo sapiens
  CDR3 for alpha chain variable domain of TCR clone 366194 (TRAV23/DV6, TRAJ13)
CAASETGGYQKVTF

SEQ ID NO: 732388 - protein, 13 aa, Homo sapiens
  CDR3 for beta chain variable domain of TCR clone 366194 (TRBV29-1, TRBJ2-1)
RSVEGGRVNEQFF

SEQ ID NO: 732389 - protein, 15 aa, Homo sapiens
  CDR3 for alpha chain variable domain of TCR clone 366195 (TRAV27, TRAJ38)
CAARRNAGNNRKLSW

SEQ ID NO: 732390 - protein, 13 aa, Homo sapiens
  CDR3 for beta chain variable domain of TCR clone 366195 (TRBV12-5, TRBJ2-3)
CASGDRRSDTQYF

SEQ ID NO: 732391 - protein, 13 aa, Homo sapiens
  CDR3 for alpha chain variable domain of TCR clone 366196 (TRAV35, TRAJ42)
CAGFPGSQGNLIF

SEQ ID NO: 732392 - protein, 14 aa, Homo sapiens
  CDR3 for beta chain variable domain of TCR clone 366196 (TRBV19, TRBJ2-1)
CPSPTFVLSGEQFF

SEQ ID NO: 732393 - protein, 12 aa, Homo sapiens
  CDR3 for alpha chain variable domain of TCR clone 366197 (TRAV8-3, TRAJ27)
CAVGAEAGKSTF

SEQ ID NO: 732394 - protein, 15 aa, Homo sapiens
  CDR3 for beta chain variable domain of TCR clone 366197 (TRBV7-9, TRBJ1-4)
CASSRTGGFNEKLFF

SEQ ID NO: 732395 - protein, 14 aa, Homo sapiens
  CDR3 for alpha chain variable domain of TCR clone 366198 (TRAV12-2, TRAJ13)
CAVKKTGGYQKVTF

SEQ ID NO: 732396 - protein, 15 aa, Homo sapiens
  CDR3 for beta chain variable domain of TCR clone 366198 (TRBV7-9, TRBJ1-5)
CASSLAGGGRRPQHF

SEQ ID NO: 732397 - protein, 15 aa, Homo sapiens
  CDR3 for alpha chain variable domain of TCR clone 366199 (TRAV12-3, TRAJ49)
CAMAVTPNTGNQFYF

SEQ ID NO: 732398 - protein, 17 aa, Homo sapiens
  CDR3 for beta chain variable domain of TCR clone 366199 (TRBV4-1, TRBJ1-5)
RSSQDPRGQGLNQPQHF

SEQ ID NO: 732399 - protein, 11 aa, Homo sapiens
  CDR3 for alpha chain variable domain of TCR clone 366200 (TRAV2, TRAJ33)
CAVESNYQLIW

SEQ ID NO: 732400 - protein, 16 aa, Homo sapiens
  CDR3 for beta chain variable domain of TCR clone 366200 (TRBV28, TRBJ2-7)
CASSSGTSGRGYEQYF

SEQ ID NO: 732401 - protein, 14 aa, Homo sapiens
  CDR3 for alpha chain variable domain of TCR clone 366201 (TRAV1-2, TRAJ8)
CAVREDTGFQTLVF

SEQ ID NO: 732402 - protein, 15 aa, Homo sapiens
  CDR3 for beta chain variable domain of TCR clone 366201 (TRBV9, TRBJ1-6)
CASSVAGTGDSPLHF

SEQ ID NO: 732403 - protein, 13 aa, Homo sapiens
  CDR3 for alpha chain variable domain of TCR clone 366202 (TRAV21, TRAJ36)
CAVIKTGANNPFF

SEQ ID NO: 732404 - protein, 10 aa, Homo sapiens
  CDR3 for beta chain variable domain of TCR clone 366202 (TRBV29-1, TRBJ2-3)
NAGGRDTQYF

SEQ ID NO: 732405 - protein, 16 aa, Homo sapiens
  CDR3 for alpha chain variable domain of TCR clone 366203 (TRAV20, TRAJ38)
CSVQASNAGNNRKLIW

SEQ ID NO: 732406 - protein, 16 aa, Homo sapiens
  CDR3 for beta chain variable domain of TCR clone 366203 (TRBV7-8, TRBJ2-6)
CASRVGDSSGANVLTF

SEQ ID NO: 732407 - protein, 12 aa, Homo sapiens
  CDR3 for alpha chain variable domain of TCR clone 366204 (TRAV27, TRAJ34)
CAEPYNTDKLIF

SEQ ID NO: 732408 - protein, 12 aa, Homo sapiens
  CDR3 for beta chain variable domain of TCR clone 366204 (TRBV12-4, TRBJ2-7)
CASSLGGYEQYF

SEQ ID NO: 732409 - protein, 14 aa, Homo sapiens
  CDR3 for alpha chain variable domain of TCR clone 366205 (TRAV38-1, TRAJ40)
CALRPTSGTYKYIF

SEQ ID NO: 732410 - protein, 13 aa, Homo sapiens
  CDR3 for beta chain variable domain of TCR clone 366205 (TRBV25-1, TRBJ1-1)
CRHPPGGNTEAFF

SEQ ID NO: 732411 - protein, 10 aa, Homo sapiens
  CDR3 for alpha chain variable domain of TCR clone 366206 (TRAV8-4, TRAJ43)
CAVSADDMRF

SEQ ID NO: 732412 - protein, 14 aa, Homo sapiens
  CDR3 for beta chain variable domain of TCR clone 366206 (TRBV2, TRBJ2-3)
CASSEGQNTDTQYF

SEQ ID NO: 732413 - protein, 19 aa, Homo sapiens
  CDR3 for alpha chain variable domain of TCR clone 366207 (TRAV13-1, TRAJ52)
CAASPYQNPGGTSYGKLTF

SEQ ID NO: 732414 - protein, 13 aa, Homo sapiens
  CDR3 for beta chain variable domain of TCR clone 366207 (TRBV15, TRBJ2-7)
CATSTTGHYEQYF

SEQ ID NO: 732415 - protein, 11 aa, Homo sapiens
  CDR3 for alpha chain variable domain of TCR clone 366208 (TRAV12-2, TRAJ23)
CARGRGGKLIF

SEQ ID NO: 732416 - protein, 14 aa, Homo sapiens
  CDR3 for beta chain variable domain of TCR clone 366208 (TRBV28, TRBJ2-5)
CASSLGDRAETRYF

SEQ ID NO: 732417 - protein, 14 aa, Homo sapiens
  CDR3 for alpha chain variable domain of TCR clone 366209 (TRAV12-2, TRAJ17)
CAVNIKAAGNKLTF

SEQ ID NO: 732418 - protein, 18 aa, Homo sapiens
  CDR3 for beta chain variable domain of TCR clone 366209 (TRBV11-2, TRBJ2-3)
CASSLGGASRGAPNTKYF

SEQ ID NO: 732419 - protein, 14 aa, Homo sapiens
  CDR3 for alpha chain variable domain of TCR clone 366210 (TRAV12-2, TRAJ13)
CAVKKTGGYQKGTF

SEQ ID NO: 732420 - protein, 12 aa, Homo sapiens
  CDR3 for beta chain variable domain of TCR clone 366210 (TRBV7-8, TRBJ2-7)
CASSLGDREQYF

SEQ ID NO: 732421 - protein, 16 aa, Homo sapiens
  CDR3 for alpha chain variable domain of TCR clone 366211 (TRAV30, TRAJ24)
CGTEIVDSDSWGKFQF

SEQ ID NO: 732422 - protein, 11 aa, Homo sapiens
  CDR3 for beta chain variable domain of TCR clone 366211 (TRBV19, TRBJ2-5)
CASSIKETQYF

SEQ ID NO: 732423 - protein, 17 aa, Homo sapiens
  CDR3 for alpha chain variable domain of TCR clone 366212 (TRAV13-1, TRAJ31)
CAPRDRLMFGDGTQLVV

SEQ ID NO: 732424 - protein, 12 aa, Homo sapiens
  CDR3 for beta chain variable domain of TCR clone 366212 (TRBV14, TRBJ2-4)
CASSNLKSIQYF

SEQ ID NO: 732425 - protein, 14 aa, Homo sapiens
  CDR3 for alpha chain variable domain of TCR clone 366213 (TRAV2, TRAJ9)
CAVEDRRGGFKTIF

SEQ ID NO: 732426 - protein, 15 aa, Homo sapiens
  CDR3 for beta chain variable domain of TCR clone 366213 (TRBV6-6, TRBJ2-7)
CACSYSYGGSYEQYF

SEQ ID NO: 732427 - protein, 16 aa, Homo sapiens
  CDR3 for alpha chain variable domain of TCR clone 366214 (TRAV23/DV6, TRAJ3)
CSKHAVSYSIASKIIF

SEQ ID NO: 732428 - protein, 15 aa, Homo sapiens
  CDR3 for beta chain variable domain of TCR clone 366214 (TRBV27, TRBJ2-1)
CASSNGGGSSNEQFF

SEQ ID NO: 732429 - protein, 17 aa, Homo sapiens
  CDR3 for alpha chain variable domain of TCR clone 366215 (TRAV3, TRAJ6)
CAVRYGPRAGGSYIPTI

SEQ ID NO: 732430 - protein, 18 aa, Homo sapiens
  CDR3 for beta chain variable domain of TCR clone 366215 (TRBV7-9, TRBJ2-7)
CASSLTTSGSRTWYEQYF

SEQ ID NO: 732431 - protein, 13 aa, Homo sapiens
  CDR3 for alpha chain variable domain of TCR clone 366216 (TRAV12-2, TRAJ39)
CAVNNNAGNMLTF

SEQ ID NO: 732432 - protein, 13 aa, Homo sapiens
  CDR3 for beta chain variable domain of TCR clone 366216 (TRBV2, TRBJ1-5)
CATAGPGNQPQRF

SEQ ID NO: 732433 - protein, 15 aa, Homo sapiens
  CDR3 for alpha chain variable domain of TCR clone 366217 (TRAV10, TRAJ42)
SLLHLWGGSQGNLIF

SEQ ID NO: 732434 - protein, 13 aa, Homo sapiens
  CDR3 for beta chain variable domain of TCR clone 366217 (TRBV7-7, TRBJ2-3)
CASSLSRADTQYF

SEQ ID NO: 732435 - protein, 13 aa, Homo sapiens
  CDR3 for alpha chain variable domain of TCR clone 366218 (TRAV35, TRAJ33)
CAGQLCGVYQLIW

SEQ ID NO: 732436 - protein, 14 aa, Homo sapiens
  CDR3 for beta chain variable domain of TCR clone 366218 (TRBV7-2, TRBJ1-1)
CASSLGGAGTEAFF

SEQ ID NO: 732437 - protein, 11 aa, Homo sapiens
  CDR3 for alpha chain variable domain of TCR clone 366219 (TRAV1-1, TRAJ9)
CAVAGGFKTIF

SEQ ID NO: 732438 - protein, 14 aa, Homo sapiens
  CDR3 for beta chain variable domain of TCR clone 366219 (TRBV25-1, TRBJ1-1)
CASTHLGGNTEAFF

SEQ ID NO: 732439 - protein, 15 aa, Homo sapiens
  CDR3 for alpha chain variable domain of TCR clone 366220 (TRAV17, TRAJ28)
CATDPSGAGSYQLTF

SEQ ID NO: 732440 - protein, 12 aa, Homo sapiens
  CDR3 for beta chain variable domain of TCR clone 366220 (TRBV5-1, TRBJ1-2)
CASSQDTYGYTF

SEQ ID NO: 732441 - protein, 11 aa, Homo sapiens
  CDR3 for alpha chain variable domain of TCR clone 366221 (TRAV29/DV5, TRAJ31)
CAAMNNARLMF

SEQ ID NO: 732442 - protein, 16 aa, Homo sapiens
  CDR3 for beta chain variable domain of TCR clone 366221 (TRBV10-3, TRBJ1-5)
CAISDQVGAPNQPQHF

SEQ ID NO: 732443 - protein, 14 aa, Homo sapiens
  CDR3 for alpha chain variable domain of TCR clone 366222 (TRAV17, TRAJ56)
CATVPAAANSKLTF

SEQ ID NO: 732444 - protein, 13 aa, Homo sapiens
  CDR3 for beta chain variable domain of TCR clone 366222 (TRBV12-4, TRBJ2-2)
CASSITGSGELFF

SEQ ID NO: 732445 - protein, 14 aa, Homo sapiens
  CDR3 for alpha chain variable domain of TCR clone 366223 (TRAV12-2, TRAJ15)
CAPHTGQAGTAMIF

SEQ ID NO: 732446 - protein, 17 aa, Homo sapiens
  CDR3 for beta chain variable domain of TCR clone 366223 (TRBV5-5, TRBJ1-2)
CASSLGSLDGQSEGYTF

SEQ ID NO: 732447 - protein, 14 aa, Homo sapiens
  CDR3 for alpha chain variable domain of TCR clone 366224 (TRAV1-2, TRAJ8)
CAVREVTGFQKLVF

SEQ ID NO: 732448 - protein, 14 aa, Homo sapiens
  CDR3 for beta chain variable domain of TCR clone 366224 (TRBV28, TRBJ2-1)
CASSPSTGYNEQFF

SEQ ID NO: 732449 - protein, 14 aa, Homo sapiens
  CDR3 for alpha chain variable domain of TCR clone 366225 (TRAV29/DV5, TRAJ57)
CAARSQGGSAKLVF

SEQ ID NO: 732450 - protein, 15 aa, Homo sapiens
  CDR3 for beta chain variable domain of TCR clone 366225 (TRBV28, TRBJ2-4)
CAAGSGTLLMGIQYF

SEQ ID NO: 732451 - protein, 13 aa, Homo sapiens
  CDR3 for alpha chain variable domain of TCR clone 366226 (TRAV3, TRAJ21)
CAVREPDFNKFYF

SEQ ID NO: 732452 - protein, 16 aa, Homo sapiens
  CDR3 for beta chain variable domain of TCR clone 366226 (TRBV19, TRBJ1-1)
CASRVDVTGAAWGAFF

SEQ ID NO: 732453 - protein, 19 aa, Homo sapiens
  CDR3 for alpha chain variable domain of TCR clone 366227 (TRAV1-2, TRAJ26)
CLLPLCCERPDNYGQNFVF

SEQ ID NO: 732454 - protein, 17 aa, Homo sapiens
  CDR3 for beta chain variable domain of TCR clone 366227 (TRBV6-5, TRBJ2-7)
CASSYSFWGQGSYEQYF

SEQ ID NO: 732455 - protein, 18 aa, Homo sapiens
  CDR3 for alpha chain variable domain of TCR clone 366228 (TRAV8-4, TRAJ52)
CAGTRANAGGTSYGKLTF

SEQ ID NO: 732456 - protein, 20 aa, Homo sapiens
  CDR3 for beta chain variable domain of TCR clone 366228 (TRBV19, TRBJ2-1)
CASSISRTVTSTRLNNEQFF

SEQ ID NO: 732457 - protein, 11 aa, Homo sapiens
  CDR3 for alpha chain variable domain of TCR clone 366229 (TRAV2, TRAJ13)
CASGGYQKVTF

SEQ ID NO: 732458 - protein, 12 aa, Homo sapiens
  CDR3 for beta chain variable domain of TCR clone 366229 (TRBV5-7, TRBJ1-1)
CASSLGRGKAFF

SEQ ID NO: 732459 - protein, 14 aa, Homo sapiens
  CDR3 for alpha chain variable domain of TCR clone 366230 (TRAV1-2, TRAJ16)
CAVNRFSDGQKLLF

SEQ ID NO: 732460 - protein, 17 aa, Homo sapiens
  CDR3 for beta chain variable domain of TCR clone 366230 (TRBV28, TRBJ2-7)
CASSPGLAGGDSSEQYF

SEQ ID NO: 732461 - protein, 12 aa, Homo sapiens
  CDR3 for alpha chain variable domain of TCR clone 366231 (TRAV12-3, TRAJ17)
CAMTLTGNKLTF

SEQ ID NO: 732462 - protein, 14 aa, Homo sapiens
  CDR3 for beta chain variable domain of TCR clone 366231 (TRBV19, TRBJ2-1)
FASPTFVLSGEQFF

SEQ ID NO: 732463 - protein, 14 aa, Homo sapiens
  CDR3 for alpha chain variable domain of TCR clone 366232 (TRAV23/DV6, TRAJ6)
CAASRSGGSYIPTS

SEQ ID NO: 732464 - protein, 17 aa, Homo sapiens
  CDR3 for beta chain variable domain of TCR clone 366232 (TRBV20-1, TRBJ2-1)
CSASASGLAGSYNERFF

SEQ ID NO: 732465 - protein, 12 aa, Homo sapiens
  CDR3 for alpha chain variable domain of TCR clone 366233 (TRAV12-1, TRAJ40)
YVVYSGTYKYIF

SEQ ID NO: 732466 - protein, 18 aa, Homo sapiens
  CDR3 for beta chain variable domain of TCR clone 366233 (TRBV11-2, TRBJ2-3)
CASSFGGASRGAPNTQYF

SEQ ID NO: 732467 - protein, 18 aa, Homo sapiens
  CDR3 for alpha chain variable domain of TCR clone 366234 (TRAV26-1, TRAJ39)
CIVRPPDLYNNAGNMLTF

SEQ ID NO: 732468 - protein, 14 aa, Homo sapiens
  CDR3 for beta chain variable domain of TCR clone 366234 (TRBV7-2, TRBJ2-7)
CASSPKTSLYEQYF

SEQ ID NO: 732469 - protein, 23 aa, Homo sapiens
  CDR3 for alpha chain variable domain of TCR clone 366235 (TRAV8-4, )
CARLNAGNNHFQNPDPAVYQLRD

SEQ ID NO: 732470 - protein, 14 aa, Homo sapiens
  CDR3 for beta chain variable domain of TCR clone 366235 (TRBV7-8, TRBJ2-3)
CASSLEAGTDTQYF

SEQ ID NO: 732471 - protein, 13 aa, Homo sapiens
  CDR3 for alpha chain variable domain of TCR clone 366236 (TRAV4, TRAJ42)
CLVGGGSQGSLIF

SEQ ID NO: 732472 - protein, 16 aa, Homo sapiens
  CDR3 for beta chain variable domain of TCR clone 366236 (TRBV5-1, TRBJ2-3)
CASSLQGRVGADTQYF

SEQ ID NO: 732473 - protein, 19 aa, Homo sapiens
  CDR3 for alpha chain variable domain of TCR clone 366237 (TRAV29/DV5, TRAJ49)
CSVLLCSKLTVDTGNQIYF

SEQ ID NO: 732474 - protein, 17 aa, Homo sapiens
  CDR3 for beta chain variable domain of TCR clone 366237 (TRBV13, TRBJ2-3)
CASSLSRVAGGRNTQYF

SEQ ID NO: 732475 - protein, 17 aa, Homo sapiens
  CDR3 for alpha chain variable domain of TCR clone 366238 (TRAV1-1, TRAJ32)
CAVRVDELWWCYKQARL

SEQ ID NO: 732476 - protein, 12 aa, Homo sapiens
  CDR3 for beta chain variable domain of TCR clone 366238 (TRBV19, TRBJ2-1)
CASSRQGAEQFF

SEQ ID NO: 732477 - protein, 20 aa, Homo sapiens
  CDR3 for alpha chain variable domain of TCR clone 366239 (TRAV25, TRAJ21)
TATQTTDVGTYPLSFNKFYF

SEQ ID NO: 732478 - protein, 16 aa, Homo sapiens
  CDR3 for beta chain variable domain of TCR clone 366239 (TRBV7-3, TRBJ2-1)
CASSKPLAGGYNEQFF

SEQ ID NO: 732479 - protein, 15 aa, Homo sapiens
  CDR3 for alpha chain variable domain of TCR clone 366240 (TRAV26-1, TRAJ23)
CIVRVAGYQGGKLIF

SEQ ID NO: 732480 - protein, 13 aa, Homo sapiens
  CDR3 for beta chain variable domain of TCR clone 366240 (TRBV28, TRBJ2-7)
CASKAGGVYEQYF

SEQ ID NO: 732481 - protein, 17 aa, Homo sapiens
  CDR3 for alpha chain variable domain of TCR clone 366241 (TRAV3, TRAJ13)
CAVRDMRRTGGYLKVTF

SEQ ID NO: 732482 - protein, 14 aa, Homo sapiens
  CDR3 for beta chain variable domain of TCR clone 366241 (TRBV5-1, TRBJ2-7)
CASSLTGSGYEQYF

SEQ ID NO: 732483 - protein, 23 aa, Homo sapiens
  CDR3 for alpha chain variable domain of TCR clone 366242 (TRAV1-1, TRAJ4)
STMELQMKDSASYFCAPYNKLIF

SEQ ID NO: 732484 - protein, 16 aa, Homo sapiens
  CDR3 for beta chain variable domain of TCR clone 366242 (TRBV7-3, TRBJ2-2)
CASSLKRGTLSGELFF

SEQ ID NO: 732485 - protein, 14 aa, Homo sapiens
  CDR3 for alpha chain variable domain of TCR clone 366243 (TRAV13-1, TRAJ48)
CAASTDFGNEKLTF

SEQ ID NO: 732486 - protein, 14 aa, Homo sapiens
  CDR3 for beta chain variable domain of TCR clone 366243 (TRBV10-3, TRBJ2-5)
CATKGGNNQETQCF

SEQ ID NO: 732487 - protein, 11 aa, Homo sapiens
  CDR3 for alpha chain variable domain of TCR clone 366244 (TRAV12-3, TRAJ27)
CAMANAGKSTF

SEQ ID NO: 732488 - protein, 17 aa, Homo sapiens
  CDR3 for beta chain variable domain of TCR clone 366244 (TRBV13, TRBJ2-3)
CASSLPRVAGGRNTQYF

SEQ ID NO: 732489 - protein, 14 aa, Homo sapiens
  CDR3 for alpha chain variable domain of TCR clone 366245 (TRAV12-2, TRAJ9)
CAVNALEGCFKTIF

SEQ ID NO: 732490 - protein, 16 aa, Homo sapiens
  CDR3 for beta chain variable domain of TCR clone 366245 (TRBV19, TRBJ1-6)
CASSVAPVAGNSPLHF

SEQ ID NO: 732491 - protein, 14 aa, Homo sapiens
  CDR3 for alpha chain variable domain of TCR clone 366246 (TRAV20, TRAJ42)
CAVQARGSQGNLIF

SEQ ID NO: 732492 - protein, 17 aa, Homo sapiens
  CDR3 for beta chain variable domain of TCR clone 366246 (TRBV18, TRBJ1-5)
CASSPTMGQGTNQPQHF

SEQ ID NO: 732493 - protein, 14 aa, Homo sapiens
  CDR3 for alpha chain variable domain of TCR clone 366247 (TRAV13-1, TRAJ20)
CAACPGSNDYKLSF

SEQ ID NO: 732494 - protein, 13 aa, Homo sapiens
  CDR3 for beta chain variable domain of TCR clone 366247 (TRBV20-1, TRBJ1-1)
CSAPPGGHTEAVF

SEQ ID NO: 732495 - protein, 17 aa, Homo sapiens
  CDR3 for alpha chain variable domain of TCR clone 366248 (TRAV12-3, TRAJ6)
CAMSARGGAGGSNVPTF

SEQ ID NO: 732496 - protein, 12 aa, Homo sapiens
  CDR3 for beta chain variable domain of TCR clone 366248 (TRBV12-4, TRBJ2-3)
CASSTLPDTQYF

SEQ ID NO: 732497 - protein, 15 aa, Homo sapiens
  CDR3 for alpha chain variable domain of TCR clone 366249 (TRAV2, TRAJ9)
CAVEDRGTGGFKTIF

SEQ ID NO: 732498 - protein, 13 aa, Homo sapiens
  CDR3 for beta chain variable domain of TCR clone 366249 (TRBV20-1, TRBJ1-1)
CSARGGGNTEASF

SEQ ID NO: 732499 - protein, 12 aa, Homo sapiens
  CDR3 for alpha chain variable domain of TCR clone 366250 (TRAV17, TRAJ20)
CATQANDYKLSF

SEQ ID NO: 732500 - protein, 14 aa, Homo sapiens
  CDR3 for beta chain variable domain of TCR clone 366250 (TRBV25-1, TRBJ1-1)
CASNHLGGNTEAFF

SEQ ID NO: 732501 - protein, 16 aa, Homo sapiens
  CDR3 for alpha chain variable domain of TCR clone 366251 (TRAV26-1, TRAJ53)
CIVRVAMGGSNYKLTF

SEQ ID NO: 732502 - protein, 15 aa, Homo sapiens
  CDR3 for beta chain variable domain of TCR clone 366251 (TRBV10-1, TRBJ2-3)
CASSATSGGFDTQYF

SEQ ID NO: 732503 - protein, 12 aa, Homo sapiens
  CDR3 for alpha chain variable domain of TCR clone 366252 (TRAV12-1, TRAJ32)
CVVKGATNKLIF

SEQ ID NO: 732504 - protein, 15 aa, Homo sapiens
  CDR3 for beta chain variable domain of TCR clone 366252 (TRBV20-1, TRBJ2-3)
CSASETSGDTDTQYF

SEQ ID NO: 732505 - protein, 14 aa, Homo sapiens
  CDR3 for alpha chain variable domain of TCR clone 366253 (TRAV8-3, TRAJ21)
CAVGLNPRSDKFYF

SEQ ID NO: 732506 - protein, 15 aa, Homo sapiens
  CDR3 for beta chain variable domain of TCR clone 366253 (TRBV20-1, TRBJ2-7)
CSAESGTSGAYEQYF

SEQ ID NO: 732507 - protein, 12 aa, Homo sapiens
  CDR3 for alpha chain variable domain of TCR clone 366254 (TRAV17, TRAJ20)
CATDSNDYKLSF

SEQ ID NO: 732508 - protein, 18 aa, Homo sapiens
  CDR3 for beta chain variable domain of TCR clone 366254 (TRBV11-2, TRBJ2-6)
CASSLNPFLGTGANVLAF

SEQ ID NO: 732509 - protein, 23 aa, Homo sapiens
  CDR3 for alpha chain variable domain of TCR clone 366255 (TRAV8-6, TRAJ38)
CAVRNAGNNHIQNPDPAVYQLRD

SEQ ID NO: 732510 - protein, 15 aa, Homo sapiens
  CDR3 for beta chain variable domain of TCR clone 366255 (TRBV4-1, TRBJ2-2)
SASSEGQGITGELFF

SEQ ID NO: 732511 - protein, 15 aa, Homo sapiens
  CDR3 for alpha chain variable domain of TCR clone 366256 (TRAV8-2, TRAJ16)
CVVSDGLSDGQKLLF

SEQ ID NO: 732512 - protein, 13 aa, Homo sapiens
  CDR3 for beta chain variable domain of TCR clone 366256 (TRBV20-1, TRBJ1-1)
CSAPPGGHTEAFF

SEQ ID NO: 732513 - protein, 14 aa, Homo sapiens
  CDR3 for alpha chain variable domain of TCR clone 366257 (TRAV12-2, TRAJ13)
CAVKKTGGYQKVTF

SEQ ID NO: 732514 - protein, 18 aa, Homo sapiens
  CDR3 for beta chain variable domain of TCR clone 366257 (TRBV24-1, TRBJ2-2)
CAASDSGQGTANTGELFF

SEQ ID NO: 732515 - protein, 14 aa, Homo sapiens
  CDR3 for alpha chain variable domain of TCR clone 366258 (TRAV12-2, TRAJ17)
CAVLFKAAGNKLTF

SEQ ID NO: 732516 - protein, 16 aa, Homo sapiens
  CDR3 for beta chain variable domain of TCR clone 366258 (TRBV2, TRBJ2-5)
CASSTLRDRERETQYF

SEQ ID NO: 732517 - protein, 15 aa, Homo sapiens
  CDR3 for alpha chain variable domain of TCR clone 366259 (TRAV12-3, TRAJ6)
CAMSATSGGSYIPTF

SEQ ID NO: 732518 - protein, 17 aa, Homo sapiens
  CDR3 for beta chain variable domain of TCR clone 366259 (TRBV28, TRBJ2-1)
CASTGPGLAVSEDEQFF

SEQ ID NO: 732519 - protein, 16 aa, Homo sapiens
  CDR3 for alpha chain variable domain of TCR clone 366260 (TRAV35, TRAJ20)
CWSDPSSGFNDYKLSF

SEQ ID NO: 732520 - protein, 16 aa, Homo sapiens
  CDR3 for beta chain variable domain of TCR clone 366260 (TRBV4-3, TRBJ1-6)
CASSAQPGGEGSPLHF

SEQ ID NO: 732521 - protein, 16 aa, Homo sapiens
  CDR3 for alpha chain variable domain of TCR clone 366261 (TRAV1-2, TRAJ10)
CAVRGVLTGGGNKLTF

SEQ ID NO: 732522 - protein, 13 aa, Homo sapiens
  CDR3 for beta chain variable domain of TCR clone 366261 (TRBV7-9, TRBJ1-1)
CASSLSGETEAFF

SEQ ID NO: 732523 - protein, 14 aa, Homo sapiens
  CDR3 for alpha chain variable domain of TCR clone 366262 (TRAV1-2, TRAJ16)
CAVNRFSDGQKLLF

SEQ ID NO: 732524 - protein, 15 aa, Homo sapiens
  CDR3 for beta chain variable domain of TCR clone 366262 (TRBV5-4, TRBJ2-3)
CASSLDQRATDTQYF

SEQ ID NO: 732525 - protein, 14 aa, Homo sapiens
  CDR3 for alpha chain variable domain of TCR clone 366263 (TRAV26-2, TRAJ31)
CILIPGNNNARLML

SEQ ID NO: 732526 - protein, 16 aa, Homo sapiens
  CDR3 for beta chain variable domain of TCR clone 366263 (TRBV7-3, TRBJ2-1)
CASSLVSGSSNNEQFF

SEQ ID NO: 732527 - protein, 13 aa, Homo sapiens
  CDR3 for alpha chain variable domain of TCR clone 366264 (TRAV36/DV7, TRAJ37)
CAVFSSNTGKLIL

SEQ ID NO: 732528 - protein, 15 aa, Homo sapiens
  CDR3 for beta chain variable domain of TCR clone 366264 (TRBV5-1, TRBJ2-2)
CASSSQGGNTGELFF

SEQ ID NO: 732529 - protein, 15 aa, Homo sapiens
  CDR3 for alpha chain variable domain of TCR clone 366265 (TRAV12-1, TRAJ48)
CVVNPLGFGNEKLTF

SEQ ID NO: 732530 - protein, 13 aa, Homo sapiens
  CDR3 for beta chain variable domain of TCR clone 366265 (TRBV25-1, TRBJ2-5)
CASSPGGVETQYF

SEQ ID NO: 732531 - protein, 14 aa, Homo sapiens
  CDR3 for alpha chain variable domain of TCR clone 366266 (TRAV29/DV5, TRAJ32)
CEAAYGGATNKLIF

SEQ ID NO: 732532 - protein, 11 aa, Homo sapiens
  CDR3 for beta chain variable domain of TCR clone 366266 (TRBV11-2, TRBJ2-2)
CASSLPGELFF

SEQ ID NO: 732533 - protein, 15 aa, Homo sapiens
  CDR3 for alpha chain variable domain of TCR clone 366267 (TRAV35, TRAJ41)
CAGQLFSNSAYALNF

SEQ ID NO: 732534 - protein, 14 aa, Homo sapiens
  CDR3 for beta chain variable domain of TCR clone 366267 (TRBV7-2, TRBJ1-2)
CASSRGGTNYGYTF

SEQ ID NO: 732535 - protein, 11 aa, Homo sapiens
  CDR3 for alpha chain variable domain of TCR clone 366268 (TRAV17, TRAJ9)
CATTGGLKTIF

SEQ ID NO: 732536 - protein, 11 aa, Homo sapiens
  CDR3 for beta chain variable domain of TCR clone 366268 (TRBV29-1, TRBJ2-5)
CSEDRTGTQYF

SEQ ID NO: 732537 - protein, 14 aa, Homo sapiens
  CDR3 for alpha chain variable domain of TCR clone 366269 (TRAV12-2, TRAJ40)
CAVKIPSGTYKYIF

SEQ ID NO: 732538 - protein, 14 aa, Homo sapiens
  CDR3 for beta chain variable domain of TCR clone 366269 (TRBV23-1, TRBJ2-5)
CASSFLRSQETQYF

SEQ ID NO: 732539 - protein, 10 aa, Homo sapiens
  CDR3 for alpha chain variable domain of TCR clone 366270 (TRAV30, TRAJ48)
CGIGNEKLTF

SEQ ID NO: 732540 - protein, 15 aa, Homo sapiens
  CDR3 for beta chain variable domain of TCR clone 366270 (TRBV7-7, TRBJ2-2)
CATSKLAKNTGELFF

SEQ ID NO: 732541 - protein, 14 aa, Homo sapiens
  CDR3 for alpha chain variable domain of TCR clone 366271 (TRAV12-2, TRAJ3)
CAVKGYSSASKIFF

SEQ ID NO: 732542 - protein, 14 aa, Homo sapiens
  CDR3 for beta chain variable domain of TCR clone 366271 (TRBV4-2, TRBJ2-1)
CASGLDRAYNEQFF

SEQ ID NO: 732543 - protein, 13 aa, Homo sapiens
  CDR3 for alpha chain variable domain of TCR clone 366272 (TRAV21, TRAJ20)
CAVTILNDYKLSF

SEQ ID NO: 732544 - protein, 12 aa, Homo sapiens
  CDR3 for beta chain variable domain of TCR clone 366272 (TRBV12-4, TRBJ2-2)
CASSEYTGELFF

SEQ ID NO: 732545 - protein, 15 aa, Homo sapiens
  CDR3 for alpha chain variable domain of TCR clone 366273 (TRAV13-2, TRAJ10)
CAENRDTGGGNKFTF

SEQ ID NO: 732546 - protein, 16 aa, Homo sapiens
  CDR3 for beta chain variable domain of TCR clone 366273 (TRBV2, TRBJ1-3)
CASSRTGGSTGNTIYF

SEQ ID NO: 732547 - protein, 14 aa, Homo sapiens
  CDR3 for alpha chain variable domain of TCR clone 366274 (TRAV12-2, TRAJ44)
CAVNKAGTASKLTF

SEQ ID NO: 732548 - protein, 18 aa, Homo sapiens
  CDR3 for beta chain variable domain of TCR clone 366274 (TRBV11-2, TRBJ2-3)
CASSLGGASRGAPNTQYF

SEQ ID NO: 732549 - protein, 14 aa, Homo sapiens
  CDR3 for alpha chain variable domain of TCR clone 366275 (TRAV2, TRAJ20)
CAVELTPNEYELSF

SEQ ID NO: 732550 - protein, 14 aa, Homo sapiens
  CDR3 for beta chain variable domain of TCR clone 366275 (TRBV4-2, TRBJ1-2)
CASSQVGQNYGYTF

SEQ ID NO: 732551 - protein, 14 aa, Homo sapiens
  CDR3 for alpha chain variable domain of TCR clone 366276 (TRAV1-2, TRAJ8)
CAVREDTGFQKLVF

SEQ ID NO: 732552 - protein, 15 aa, Homo sapiens
  CDR3 for beta chain variable domain of TCR clone 366276 (TRBV19, TRBJ2-6)
CASVRRDSGANVLTF

SEQ ID NO: 732553 - protein, 12 aa, Homo sapiens
  CDR3 for alpha chain variable domain of TCR clone 366277 (TRAV12-2, TRAJ10)
WGVTGGGNKLTF

SEQ ID NO: 732554 - protein, 13 aa, Homo sapiens
  CDR3 for beta chain variable domain of TCR clone 366277 (TRBV20-1, TRBJ1-2)
CSARGTADYGYTF

SEQ ID NO: 732555 - protein, 11 aa, Homo sapiens
  CDR3 for alpha chain variable domain of TCR clone 366278 (TRAV12-3, TRAJ27)
CAMANAGKSTF

SEQ ID NO: 732556 - protein, 14 aa, Homo sapiens
  CDR3 for beta chain variable domain of TCR clone 366278 (TRBV7-3, TRBJ2-7)
CASSLKADSYEQYF

SEQ ID NO: 732557 - protein, 16 aa, Homo sapiens
  CDR3 for alpha chain variable domain of TCR clone 366279 (TRAV23/DV6, TRAJ21)
CAASSGGGTTPTNFTL

SEQ ID NO: 732558 - protein, 11 aa, Homo sapiens
  CDR3 for beta chain variable domain of TCR clone 366279 (TRBV7-8, TRBJ2-7)
CASSLSLEQYF

SEQ ID NO: 732559 - protein, 15 aa, Homo sapiens
  CDR3 for alpha chain variable domain of TCR clone 366280 (TRAV25, TRAJ52)
CAGRPGGTSYGKLTF

SEQ ID NO: 732560 - protein, 13 aa, Homo sapiens
  CDR3 for beta chain variable domain of TCR clone 366280 (TRBV10-2, TRBJ1-1)
CASNDQMNTEAFF

SEQ ID NO: 732561 - protein, 12 aa, Homo sapiens
  CDR3 for alpha chain variable domain of TCR clone 366281 (TRAV17, TRAJ20)
CATDRYDYTLSF

SEQ ID NO: 732562 - protein, 14 aa, Homo sapiens
  CDR3 for beta chain variable domain of TCR clone 366281 (TRBV19, TRBJ2-1)
CASPTFVLSGEQFF

SEQ ID NO: 732563 - protein, 18 aa, Homo sapiens
  CDR3 for alpha chain variable domain of TCR clone 366282 (TRAV21, TRAJ52)
CAVRPSPAGGTSYGKLTF

SEQ ID NO: 732564 - protein, 13 aa, Homo sapiens
  CDR3 for beta chain variable domain of TCR clone 366282 (TRBV10-3, TRBJ2-7)
CASKLEVNYEQYF

SEQ ID NO: 732565 - protein, 15 aa, Homo sapiens
  CDR3 for alpha chain variable domain of TCR clone 366283 (TRAV21, TRAJ52)
CAVRGGGTSYGKLTF

SEQ ID NO: 732566 - protein, 14 aa, Homo sapiens
  CDR3 for beta chain variable domain of TCR clone 366283 (TRBV19, TRBJ2-3)
CASSAPRGTDTQYF

SEQ ID NO: 732567 - protein, 15 aa, Homo sapiens
  CDR3 for alpha chain variable domain of TCR clone 366284 (TRAV21, TRAJ53)
CATLNSGGSNYKLTF

SEQ ID NO: 732568 - protein, 13 aa, Homo sapiens
  CDR3 for beta chain variable domain of TCR clone 366284 (TRBV11-2, TRBJ2-5)
CASSFSSQETQYF

SEQ ID NO: 732569 - protein, 13 aa, Homo sapiens
  CDR3 for alpha chain variable domain of TCR clone 366285 (TRAV12-1, TRAJ7)
CVVNMRGNNRLAF

SEQ ID NO: 732570 - protein, 14 aa, Homo sapiens
  CDR3 for beta chain variable domain of TCR clone 366285 (TRBV12-5, TRBJ2-5)
CASGSRTHQETQYF

SEQ ID NO: 732571 - protein, 12 aa, Homo sapiens
  CDR3 for alpha chain variable domain of TCR clone 366286 (TRAV12-3, TRAJ48)
CAMRIGNEKLTF

SEQ ID NO: 732572 - protein, 12 aa, Homo sapiens
  CDR3 for beta chain variable domain of TCR clone 366286 (TRBV13, TRBJ2-7)
CASSLQDYEQYF

SEQ ID NO: 732573 - protein, 16 aa, Homo sapiens
  CDR3 for alpha chain variable domain of TCR clone 366287 (TRAV30, TRAJ24)
CGTEVVDADSWGKFQF

SEQ ID NO: 732574 - protein, 17 aa, Homo sapiens
  CDR3 for beta chain variable domain of TCR clone 366287 (TRBV20-1, TRBJ2-1)
CSARDPLAGVWDNEQFF

SEQ ID NO: 732575 - protein, 12 aa, Homo sapiens
  CDR3 for alpha chain variable domain of TCR clone 366288 (TRAV12-3, TRAJ17)
CAMTLTGNKLTF

SEQ ID NO: 732576 - protein, 13 aa, Homo sapiens
  CDR3 for beta chain variable domain of TCR clone 366288 (TRBV24-1, TRBJ2-2)
CATSEWSTGELFF

SEQ ID NO: 732577 - protein, 12 aa, Homo sapiens
  CDR3 for alpha chain variable domain of TCR clone 366289 (TRAV27, TRAJ48)
CAGARGNEKLTF

SEQ ID NO: 732578 - protein, 14 aa, Homo sapiens
  CDR3 for beta chain variable domain of TCR clone 366289 (TRBV12-5, TRBJ2-5)
CANGSRTHQETQYF

SEQ ID NO: 732579 - protein, 12 aa, Homo sapiens
  CDR3 for alpha chain variable domain of TCR clone 366290 (TRAV8-3, TRAJ26)
CAGDNYGQSFVF

SEQ ID NO: 732580 - protein, 15 aa, Homo sapiens
  CDR3 for beta chain variable domain of TCR clone 366290 (TRBV9, TRBJ2-1)
CASSLAGSAYNEQFF

SEQ ID NO: 732581 - protein, 15 aa, Homo sapiens
  CDR3 for alpha chain variable domain of TCR clone 366291 (TRAV13-1, TRAJ48)
CAASTGGFGNEKLTF

SEQ ID NO: 732582 - protein, 14 aa, Homo sapiens
  CDR3 for beta chain variable domain of TCR clone 366291 (TRBV24-1, TRBJ2-2)
CATGGLGHTGELFF

SEQ ID NO: 732583 - protein, 12 aa, Homo sapiens
  CDR3 for alpha chain variable domain of TCR clone 366292 (TRAV38-2/DV8, TRAJ43)
CAYRSEMGDMRF

SEQ ID NO: 732584 - protein, 15 aa, Homo sapiens
  CDR3 for beta chain variable domain of TCR clone 366292 (TRBV7-3, TRBJ2-1)
CASSPTGGGEVEQFF

SEQ ID NO: 732585 - protein, 13 aa, Homo sapiens
  CDR3 for alpha chain variable domain of TCR clone 366293 (TRAV2, TRAJ40)
FAVVTSGTYKYIF

SEQ ID NO: 732586 - protein, 15 aa, Homo sapiens
  CDR3 for beta chain variable domain of TCR clone 366293 (TRBV11-3, TRBJ2-3)
CASLEDGREGDTQYF

SEQ ID NO: 732587 - protein, 15 aa, Homo sapiens
  CDR3 for alpha chain variable domain of TCR clone 366294 (TRAV40, TRAJ53)
CLLANSGGSNYKLTL

SEQ ID NO: 732588 - protein, 15 aa, Homo sapiens
  CDR3 for beta chain variable domain of TCR clone 366294 (TRBV7-6, TRBJ2-2)
CASRRTSGNTGELFF

SEQ ID NO: 732589 - protein, 15 aa, Homo sapiens
  CDR3 for alpha chain variable domain of TCR clone 366295 (TRAV26-1, TRAJ22)
CIVRVSFWSCKATDL

SEQ ID NO: 732590 - protein, 13 aa, Homo sapiens
  CDR3 for beta chain variable domain of TCR clone 366295 (TRBV7-9, TRBJ1-2)
CASSLKQNYGYTC

SEQ ID NO: 732591 - protein, 15 aa, Homo sapiens
  CDR3 for alpha chain variable domain of TCR clone 366296 (TRAV12-3, TRAJ6)
CAMSAASGGSYIPTF

SEQ ID NO: 732592 - protein, 13 aa, Homo sapiens
  CDR3 for beta chain variable domain of TCR clone 366296 (TRBV20-1, TRBJ1-2)
CSASPEFNYGYTL

SEQ ID NO: 732593 - protein, 10 aa, Homo sapiens
  CDR3 for alpha chain variable domain of TCR clone 366297 (TRAV30, TRAJ48)
CGIGNEKLTF

SEQ ID NO: 732594 - protein, 16 aa, Homo sapiens
  CDR3 for beta chain variable domain of TCR clone 366297 (TRBV7-3, TRBJ2-3)
CASSPRTFPSTDTQYF

SEQ ID NO: 732595 - protein, 11 aa, Homo sapiens
  CDR3 for alpha chain variable domain of TCR clone 366298 (TRAV12-3, TRAJ43)
CAMSVSNDMRF

SEQ ID NO: 732596 - protein, 13 aa, Homo sapiens
  CDR3 for beta chain variable domain of TCR clone 366298 (TRBV20-1, TRBJ1-1)
WSAPLGGGTEAFF

SEQ ID NO: 732597 - protein, 14 aa, Homo sapiens
  CDR3 for alpha chain variable domain of TCR clone 366299 (TRAV12-2, TRAJ17)
CAVLFKAAGNKLTF

SEQ ID NO: 732598 - protein, 17 aa, Homo sapiens
  CDR3 for beta chain variable domain of TCR clone 366299 (TRBV11-2, TRBJ2-1)
CASSLYPPGGEYNEQFF

SEQ ID NO: 732599 - protein, 10 aa, Homo sapiens
  CDR3 for alpha chain variable domain of TCR clone 366300 (TRAV26-1, TRAJ40)
CIAGTYKYIF

SEQ ID NO: 732600 - protein, 15 aa, Homo sapiens
  CDR3 for beta chain variable domain of TCR clone 366300 (TRBV19, TRBJ2-1)
CASSSPGMPLDEQFF

SEQ ID NO: 732601 - protein, 15 aa, Homo sapiens
  CDR3 for alpha chain variable domain of TCR clone 366301 (TRAV17, TRAJ22)
CATVAPFGSARQLTF

SEQ ID NO: 732602 - protein, 14 aa, Homo sapiens
  CDR3 for beta chain variable domain of TCR clone 366301 (TRBV4-1, TRBJ2-2)
CASSQAVNTGELFF

SEQ ID NO: 732603 - protein, 16 aa, Homo sapiens
  CDR3 for alpha chain variable domain of TCR clone 366302 (TRAV17, TRAJ28)
CASYAYSGAGSYQFTF

SEQ ID NO: 732604 - protein, 15 aa, Homo sapiens
  CDR3 for beta chain variable domain of TCR clone 366302 (TRBV4-2, TRBJ2-1)
CASSPSGGLYNEQFF

SEQ ID NO: 732605 - protein, 14 aa, Homo sapiens
  CDR3 for alpha chain variable domain of TCR clone 366303 (TRAV17, TRAJ57)
CATDPQGVYEKLVF

SEQ ID NO: 732606 - protein, 18 aa, Homo sapiens
  CDR3 for beta chain variable domain of TCR clone 366303 (TRBV6-6, TRBJ1-3)
CASSYSKWDSISGNTVYF

SEQ ID NO: 732607 - protein, 12 aa, Homo sapiens
  CDR3 for alpha chain variable domain of TCR clone 366304 (TRAV1-1, TRAJ39)
CAVPVVGNMLTF

SEQ ID NO: 732608 - protein, 15 aa, Homo sapiens
  CDR3 for beta chain variable domain of TCR clone 366304 (TRBV2, TRBJ2-1)
CVSSELAGSYNEQFF

SEQ ID NO: 732609 - protein, 14 aa, Homo sapiens
  CDR3 for alpha chain variable domain of TCR clone 366305 (TRAV1-2, TRAJ37)
CAVRSKSNTGKLIF

SEQ ID NO: 732610 - protein, 15 aa, Homo sapiens
  CDR3 for beta chain variable domain of TCR clone 366305 (TRBV9, TRBJ1-6)
CASSVAGTGDSPLHF

SEQ ID NO: 732611 - protein, 12 aa, Homo sapiens
  CDR3 for alpha chain variable domain of TCR clone 366306 (TRAV2, TRAJ9)
CAVGAGGFKTIF

SEQ ID NO: 732612 - protein, 12 aa, Homo sapiens
  CDR3 for beta chain variable domain of TCR clone 366306 (TRBV24-1, TRBJ1-1)
CATLYPDTEAFF

SEQ ID NO: 732613 - protein, 18 aa, Homo sapiens
  CDR3 for alpha chain variable domain of TCR clone 366307 (TRAV23/DV6, )
CAEPDIHNPDPAVYQLRD

SEQ ID NO: 732614 - protein, 15 aa, Homo sapiens
  CDR3 for beta chain variable domain of TCR clone 366307 (TRBV12-4, TRBJ2-5)
CASTLNSGRGETQYF

SEQ ID NO: 732615 - protein, 17 aa, Homo sapiens
  CDR3 for alpha chain variable domain of TCR clone 366308 (TRAV8-6, TRAJ58)
CAVSSWVGETSGSRLTF

SEQ ID NO: 732616 - protein, 14 aa, Homo sapiens
  CDR3 for beta chain variable domain of TCR clone 366308 (TRBV28, TRBJ2-1)
CASSYYTAYNEQFF

SEQ ID NO: 732617 - protein, 12 aa, Homo sapiens
  CDR3 for alpha chain variable domain of TCR clone 366309 (TRAV13-2, TRAJ23)
CAERHRGGKLIF

SEQ ID NO: 732618 - protein, 14 aa, Homo sapiens
  CDR3 for beta chain variable domain of TCR clone 366309 (TRBV7-9, TRBJ1-1)
CASTPLQSYTEAFF

SEQ ID NO: 732619 - protein, 14 aa, Homo sapiens
  CDR3 for alpha chain variable domain of TCR clone 366310 (TRAV1-2, TRAJ8)
CAVREDTGFQKLVF

SEQ ID NO: 732620 - protein, 17 aa, Homo sapiens
  CDR3 for beta chain variable domain of TCR clone 366310 (TRBV20-1, TRBJ2-1)
CSASSSGLAGSYSEQFF

SEQ ID NO: 732621 - protein, 19 aa, Homo sapiens
  CDR3 for alpha chain variable domain of TCR clone 366311 (TRAV8-3, TRAJ32)
CAVEVVLQTSSSLELALCL

SEQ ID NO: 732622 - protein, 12 aa, Homo sapiens
  CDR3 for beta chain variable domain of TCR clone 366311 (TRBV7-8, TRBJ2-7)
CASSLGDREQYF

SEQ ID NO: 732623 - protein, 16 aa, Homo sapiens
  CDR3 for alpha chain variable domain of TCR clone 366312 (TRAV12-3, TRAJ53)
CAMSPGSGGSNYKLTF

SEQ ID NO: 732624 - protein, 12 aa, Homo sapiens
  CDR3 for beta chain variable domain of TCR clone 366312 (TRBV6-5, TRBJ2-2)
CASSTYTGELFF

SEQ ID NO: 732625 - protein, 15 aa, Homo sapiens
  CDR3 for alpha chain variable domain of TCR clone 366313 (TRAV2, TRAJ9)
CAVEDRGTGGFKTIF

SEQ ID NO: 732626 - protein, 15 aa, Homo sapiens
  CDR3 for beta chain variable domain of TCR clone 366313 (TRBV5-7, TRBJ2-7)
CASSLPGGGSYEQYF

SEQ ID NO: 732627 - protein, 14 aa, Homo sapiens
  CDR3 for alpha chain variable domain of TCR clone 366314 (TRAV13-1, TRAJ5)
CAASMPTGRRALTF

SEQ ID NO: 732628 - protein, 15 aa, Homo sapiens
  CDR3 for beta chain variable domain of TCR clone 366314 (TRBV7-9, TRBJ1-4)
CASSARTGGNEKLFF

SEQ ID NO: 732629 - protein, 13 aa, Homo sapiens
  CDR3 for alpha chain variable domain of TCR clone 366315 (TRAV35, TRAJ42)
CAGFPGSQGNLIF

SEQ ID NO: 732630 - protein, 15 aa, Homo sapiens
  CDR3 for beta chain variable domain of TCR clone 366315 (TRBV12-4, TRBJ2-5)
CASSPPTGLQETQYF

SEQ ID NO: 732631 - protein, 15 aa, Homo sapiens
  CDR3 for alpha chain variable domain of TCR clone 366316 (TRAV3, TRAJ20)
CAVRDIKLSYYKLSF

SEQ ID NO: 732632 - protein, 15 aa, Homo sapiens
  CDR3 for beta chain variable domain of TCR clone 366316 (TRBV7-9, TRBJ1-6)
CASSSPGRGNSPLHV

SEQ ID NO: 732633 - protein, 15 aa, Homo sapiens
  CDR3 for alpha chain variable domain of TCR clone 366317 (TRAV12-2, TRAJ57)
CAVSRRQGGSEKLVF

SEQ ID NO: 732634 - protein, 14 aa, Homo sapiens
  CDR3 for beta chain variable domain of TCR clone 366317 (TRBV20-1, TRBJ2-1)
CSAHPGLPYNEQFF

SEQ ID NO: 732635 - protein, 13 aa, Homo sapiens
  CDR3 for alpha chain variable domain of TCR clone 366318 (TRAV2, TRAJ40)
CAVVTSGTYKYIF

SEQ ID NO: 732636 - protein, 13 aa, Homo sapiens
  CDR3 for beta chain variable domain of TCR clone 366318 (TRBV20-1, TRBJ2-1)
CSARSSPRDEQFF

SEQ ID NO: 732637 - protein, 12 aa, Homo sapiens
  CDR3 for alpha chain variable domain of TCR clone 366319 (TRAV13-1, TRAJ21)
CAAKEGFNKFYF

SEQ ID NO: 732638 - protein, 14 aa, Homo sapiens
  CDR3 for beta chain variable domain of TCR clone 366319 (TRBV19, TRBJ2-2)
CANSTLHRSGELFF

SEQ ID NO: 732639 - protein, 14 aa, Homo sapiens
  CDR3 for alpha chain variable domain of TCR clone 366320 (TRAV12-3, TRAJ10)
SHLPLTGGGNKLIF

SEQ ID NO: 732640 - protein, 15 aa, Homo sapiens
  CDR3 for beta chain variable domain of TCR clone 366320 (TRBV11-2, TRBJ2-1)
CASSLGTSELNEQFF

SEQ ID NO: 732641 - protein, 15 aa, Homo sapiens
  CDR3 for alpha chain variable domain of TCR clone 366321 (TRAV13-1, TRAJ44)
CAASRNTGTASKLTF

SEQ ID NO: 732642 - protein, 15 aa, Homo sapiens
  CDR3 for beta chain variable domain of TCR clone 366321 (TRBV4-3, TRBJ1-1)
CASSQELGRGTEAFF

SEQ ID NO: 732643 - protein, 17 aa, Homo sapiens
  CDR3 for alpha chain variable domain of TCR clone 366322 (TRAV27, TRAJ18)
CAGLHRGRGSTLGRLYF

SEQ ID NO: 732644 - protein, 14 aa, Homo sapiens
  CDR3 for beta chain variable domain of TCR clone 366322 (TRBV20-1, TRBJ1-5)
CSARGRGSSQPQHF

SEQ ID NO: 732645 - protein, 13 aa, Homo sapiens
  CDR3 for alpha chain variable domain of TCR clone 366323 (TRAV1-2, TRAJ9)
CAVLNTGGFKTIF

SEQ ID NO: 732646 - protein, 15 aa, Homo sapiens
  CDR3 for beta chain variable domain of TCR clone 366323 (TRBV25-1, TRBJ1-4)
CASSPGDSTNEKLFF

SEQ ID NO: 732647 - protein, 13 aa, Homo sapiens
  CDR3 for alpha chain variable domain of TCR clone 366324 (TRAV13-2, TRAJ13)
CAERPGGYQKVSF

SEQ ID NO: 732648 - protein, 15 aa, Homo sapiens
  CDR3 for beta chain variable domain of TCR clone 366324 (TRBV11-3, TRBJ2-7)
CASSPGPASSYEQYF

SEQ ID NO: 732649 - protein, 14 aa, Homo sapiens
  CDR3 for alpha chain variable domain of TCR clone 366325 (TRAV26-1, TRAJ38)
CIADNGGNNRKLLW

SEQ ID NO: 732650 - protein, 14 aa, Homo sapiens
  CDR3 for beta chain variable domain of TCR clone 366325 (TRBV4-1, TRBJ2-2)
CASSQAVNTGELFF

SEQ ID NO: 732651 - protein, 14 aa, Homo sapiens
  CDR3 for alpha chain variable domain of TCR clone 366326 (TRAV8-4, TRAJ9)
CAVRINTGGFKTIF

SEQ ID NO: 732652 - protein, 15 aa, Homo sapiens
  CDR3 for beta chain variable domain of TCR clone 366326 (TRBV10-2, TRBJ2-6)
CAGSEQGTGANVLTV

SEQ ID NO: 732653 - protein, 14 aa, Homo sapiens
  CDR3 for alpha chain variable domain of TCR clone 366327 (TRAV36/DV7, TRAJ13)
WGSGENGGYQTVTF

SEQ ID NO: 732654 - protein, 15 aa, Homo sapiens
  CDR3 for beta chain variable domain of TCR clone 366327 (TRBV19, TRBJ2-1)
CASSTGTSSYNEQFF

SEQ ID NO: 732655 - protein, 13 aa, Homo sapiens
  CDR3 for alpha chain variable domain of TCR clone 366328 (TRAV2, TRAJ29)
CAAQNSGNTPLVF

SEQ ID NO: 732656 - protein, 15 aa, Homo sapiens
  CDR3 for beta chain variable domain of TCR clone 366328 (TRBV19, TRBJ1-2)
CASSVGQVLNYGYTF

SEQ ID NO: 732657 - protein, 14 aa, Homo sapiens
  CDR3 for alpha chain variable domain of TCR clone 366329 (TRAV12-3, TRAJ10)
SDLPLTGGGNKLTF

SEQ ID NO: 732658 - protein, 13 aa, Homo sapiens
  CDR3 for beta chain variable domain of TCR clone 366329 (TRBV7-9, TRBJ2-3)
CASSPGSTDTQYF

SEQ ID NO: 732659 - protein, 14 aa, Homo sapiens
  CDR3 for alpha chain variable domain of TCR clone 366330 (TRAV1-2, TRAJ16)
CAVNRYSDGQKLLF

SEQ ID NO: 732660 - protein, 12 aa, Homo sapiens
  CDR3 for beta chain variable domain of TCR clone 366330 (TRBV7-9, TRBJ2-7)
CASSLEGYEQYF

SEQ ID NO: 732661 - protein, 15 aa, Homo sapiens
  CDR3 for alpha chain variable domain of TCR clone 366331 (TRAV2, TRAJ24)
CAVEVLTDSWGKFQF

SEQ ID NO: 732662 - protein, 18 aa, Homo sapiens
  CDR3 for beta chain variable domain of TCR clone 366331 (TRBV7-9, TRBJ2-7)
CASSLTTSGSRTWYEQYF

SEQ ID NO: 732663 - protein, 14 aa, Homo sapiens
  CDR3 for alpha chain variable domain of TCR clone 366332 (TRAV27, TRAJ23)
CAGAFDNQGGKLIF

SEQ ID NO: 732664 - protein, 13 aa, Homo sapiens
  CDR3 for beta chain variable domain of TCR clone 366332 (TRBV10-3, TRBJ2-7)
CASKLAVNYEQYF

SEQ ID NO: 732665 - protein, 14 aa, Homo sapiens
  CDR3 for alpha chain variable domain of TCR clone 366333 (TRAV17, TRAJ54)
CATDANQGAQKLVF

SEQ ID NO: 732666 - protein, 17 aa, Homo sapiens
  CDR3 for beta chain variable domain of TCR clone 366333 (TRBV20-1, TRBJ2-2)
CSASGSGQGGLTGELFF

SEQ ID NO: 732667 - protein, 15 aa, Homo sapiens
  CDR3 for alpha chain variable domain of TCR clone 366334 (TRAV26-1, TRAJ44)
CIVRANTGTASKLTF

SEQ ID NO: 732668 - protein, 14 aa, Homo sapiens
  CDR3 for beta chain variable domain of TCR clone 366334 (TRBV7-2, TRBJ1-1)
CASSFLTGTTEAFF

SEQ ID NO: 732669 - protein, 12 aa, Homo sapiens
  CDR3 for alpha chain variable domain of TCR clone 366335 (TRAV29/DV5, TRAJ49)
CAATDTGNQFYF

SEQ ID NO: 732670 - protein, 12 aa, Homo sapiens
  CDR3 for beta chain variable domain of TCR clone 366335 (TRBV12-4, TRBJ2-7)
CASSLGGYDQYF

SEQ ID NO: 732671 - protein, 14 aa, Homo sapiens
  CDR3 for alpha chain variable domain of TCR clone 366336 (TRAV21, TRAJ35)
CAVMPIGFGNVLHC

SEQ ID NO: 732672 - protein, 12 aa, Homo sapiens
  CDR3 for beta chain variable domain of TCR clone 366336 (TRBV7-9, TRBJ1-5)
CASSPQGQPQHF

SEQ ID NO: 732673 - protein, 12 aa, Homo sapiens
  CDR3 for alpha chain variable domain of TCR clone 366337 (TRAV12-3, TRAJ17)
CALTLTGNKLPF

SEQ ID NO: 732674 - protein, 15 aa, Homo sapiens
  CDR3 for beta chain variable domain of TCR clone 366337 (TRBV20-1, TRBJ2-7)
CSARDRVSGMHEQYF

SEQ ID NO: 732675 - protein, 14 aa, Homo sapiens
  CDR3 for alpha chain variable domain of TCR clone 366338 (TRAV23/DV6, TRAJ4)
CAANLSGGYNKLIF

SEQ ID NO: 732676 - protein, 17 aa, Homo sapiens
  CDR3 for beta chain variable domain of TCR clone 366338 (TRBV4-1, TRBJ1-3)
CASGPQRGIRFGNAIYF

SEQ ID NO: 732677 - protein, 13 aa, Homo sapiens
  CDR3 for alpha chain variable domain of TCR clone 366339 (TRAV3, TRAJ36)
CAVSLGGANNLFF

SEQ ID NO: 732678 - protein, 14 aa, Homo sapiens
  CDR3 for beta chain variable domain of TCR clone 366339 (TRBV19, TRBJ2-1)
CASPTFVWSGEQFF

SEQ ID NO: 732679 - protein, 18 aa, Homo sapiens
  CDR3 for alpha chain variable domain of TCR clone 366340 (TRAV26-1, TRAJ23)
YIVRVGLEVWNQGGKRIF

SEQ ID NO: 732680 - protein, 16 aa, Homo sapiens
  CDR3 for beta chain variable domain of TCR clone 366340 (TRBV12-4, TRBJ2-5)
CASSFFVRGRQETQYF

SEQ ID NO: 732681 - protein, 18 aa, Homo sapiens
  CDR3 for alpha chain variable domain of TCR clone 366341 (TRAV26-2, TRAJ54)
CILRDVEVGMQGAQKLVF

SEQ ID NO: 732682 - protein, 14 aa, Homo sapiens
  CDR3 for beta chain variable domain of TCR clone 366341 (TRBV11-2, TRBJ1-5)
CASSLDRGRQPQHF

SEQ ID NO: 732683 - protein, 14 aa, Homo sapiens
  CDR3 for alpha chain variable domain of TCR clone 366342 (TRAV13-1, TRAJ44)
CSAKATGTASKLTF

SEQ ID NO: 732684 - protein, 15 aa, Homo sapiens
  CDR3 for beta chain variable domain of TCR clone 366342 (TRBV4-3, TRBJ1-1)
CASSQELGRGTEAFF

SEQ ID NO: 732685 - protein, 14 aa, Homo sapiens
  CDR3 for alpha chain variable domain of TCR clone 366343 (TRAV12-2, TRAJ29)
CAVRRNSGNTPLVC

SEQ ID NO: 732686 - protein, 13 aa, Homo sapiens
  CDR3 for beta chain variable domain of TCR clone 366343 (TRBV12-4, TRBJ2-1)
CASSHYTDNEQFF

SEQ ID NO: 732687 - protein, 11 aa, Homo sapiens
  CDR3 for alpha chain variable domain of TCR clone 366344 (TRAV21, TRAJ39)
LLVNAGNMLTF

SEQ ID NO: 732688 - protein, 12 aa, Homo sapiens
  CDR3 for beta chain variable domain of TCR clone 366344 (TRBV7-9, TRBJ2-7)
CASSIKREEQYF

SEQ ID NO: 732689 - protein, 12 aa, Homo sapiens
  CDR3 for alpha chain variable domain of TCR clone 366345 (TRAV12-3, TRAJ17)
CAMTLTCNKLTF

SEQ ID NO: 732690 - protein, 15 aa, Homo sapiens
  CDR3 for beta chain variable domain of TCR clone 366345 (TRBV10-2, TRBJ2-6)
CASSEQGTGANVLTF

SEQ ID NO: 732691 - protein, 11 aa, Homo sapiens
  CDR3 for alpha chain variable domain of TCR clone 366346 (TRAV3, TRAJ21)
CAVGNFNKFYF

SEQ ID NO: 732692 - protein, 13 aa, Homo sapiens
  CDR3 for beta chain variable domain of TCR clone 366346 (TRBV7-3, TRBJ1-1)
CASSQDCGAEAFF

SEQ ID NO: 732693 - protein, 14 aa, Homo sapiens
  CDR3 for alpha chain variable domain of TCR clone 366347 (TRAV13-1, TRAJ35)
CAASKGRFWNVLHC

SEQ ID NO: 732694 - protein, 13 aa, Homo sapiens
  CDR3 for beta chain variable domain of TCR clone 366347 (TRBV7-3, TRBJ1-1)
CASSQDWGAEAFF

SEQ ID NO: 732695 - protein, 15 aa, Homo sapiens
  CDR3 for alpha chain variable domain of TCR clone 366348 (TRAV9-2, TRAJ56)
CALSDVDGANSKLTF

SEQ ID NO: 732696 - protein, 15 aa, Homo sapiens
  CDR3 for beta chain variable domain of TCR clone 366348 (TRBV20-1, TRBJ2-7)
CSARDRVSRMDEQYF

SEQ ID NO: 732697 - protein, 13 aa, Homo sapiens
  CDR3 for alpha chain variable domain of TCR clone 366349 (TRAV8-3, TRAJ36)
CAVGATGANNLFF

SEQ ID NO: 732698 - protein, 12 aa, Homo sapiens
  CDR3 for beta chain variable domain of TCR clone 366349 (TRBV11-2, TRBJ2-2)
CASSLGGGELCF

SEQ ID NO: 732699 - protein, 14 aa, Homo sapiens
  CDR3 for alpha chain variable domain of TCR clone 366350 (TRAV12-1, TRAJ54)
CVVNIYQGAQKLVF

SEQ ID NO: 732700 - protein, 15 aa, Homo sapiens
  CDR3 for beta chain variable domain of TCR clone 366350 (TRBV9, TRBJ1-6)
CASSVAGTGDSPLHF

SEQ ID NO: 732701 - protein, 13 aa, Homo sapiens
  CDR3 for alpha chain variable domain of TCR clone 366351 (TRAV30, TRAJ6)
CGFIEGGSYIPTF

SEQ ID NO: 732702 - protein, 13 aa, Homo sapiens
  CDR3 for beta chain variable domain of TCR clone 366351 (TRBV7-9, TRBJ1-2)
CASSLKQNYGYTF

SEQ ID NO: 732703 - protein, 14 aa, Homo sapiens
  CDR3 for alpha chain variable domain of TCR clone 366352 (TRAV3, TRAJ9)
CAVRGNTGCFKTIF

SEQ ID NO: 732704 - protein, 14 aa, Homo sapiens
  CDR3 for beta chain variable domain of TCR clone 366352 (TRBV15, TRBJ2-1)
CATSGVEDYNEQFF

SEQ ID NO: 732705 - protein, 14 aa, Homo sapiens
  CDR3 for alpha chain variable domain of TCR clone 366353 (TRAV8-3, TRAJ39)
CAGGAWGAGNMLTF

SEQ ID NO: 732706 - protein, 16 aa, Homo sapiens
  CDR3 for beta chain variable domain of TCR clone 366353 (TRBV7-2, TRBJ1-3)
CASSSGRVLSGNTIYF

SEQ ID NO: 732707 - protein, 14 aa, Homo sapiens
  CDR3 for alpha chain variable domain of TCR clone 366354 (TRAV1-1, TRAJ9)
CAVRGGNVGFKTIF

SEQ ID NO: 732708 - protein, 14 aa, Homo sapiens
  CDR3 for beta chain variable domain of TCR clone 366354 (TRBV7-2, TRBJ2-7)
CASSPKTSFYEQYF

SEQ ID NO: 732709 - protein, 14 aa, Homo sapiens
  CDR3 for alpha chain variable domain of TCR clone 366355 (TRAV8-6, TRAJ8)
CAVNDNTGFQKLVF

SEQ ID NO: 732710 - protein, 15 aa, Homo sapiens
  CDR3 for beta chain variable domain of TCR clone 366355 (TRBV27, TRBJ2-3)
CASSSLAGVIDTQYF

SEQ ID NO: 732711 - protein, 14 aa, Homo sapiens
  CDR3 for alpha chain variable domain of TCR clone 366356 (TRAV26-1, TRAJ38)
CIADNAGNNRKLIW

SEQ ID NO: 732712 - protein, 15 aa, Homo sapiens
  CDR3 for beta chain variable domain of TCR clone 366356 (TRBV7-6, TRBJ1-4)
CASSLGGGAGEKLFF

SEQ ID NO: 732713 - protein, 12 aa, Homo sapiens
  CDR3 for alpha chain variable domain of TCR clone 366357 (TRAV12-2, TRAJ10)
WGVTGGGNKLTF

SEQ ID NO: 732714 - protein, 19 aa, Homo sapiens
  CDR3 for beta chain variable domain of TCR clone 366357 (TRBV7-2, TRBJ2-3)
CASSFLPRNWGGGTDTQYF

SEQ ID NO: 732715 - protein, 16 aa, Homo sapiens
  CDR3 for alpha chain variable domain of TCR clone 366358 (TRAV21, TRAJ52)
CAVTNAGGTSYGKLTF

SEQ ID NO: 732716 - protein, 13 aa, Homo sapiens
  CDR3 for beta chain variable domain of TCR clone 366358 (TRBV7-3, TRBJ1-1)
CASSQDWGAEAFF

SEQ ID NO: 732717 - protein, 17 aa, Homo sapiens
  CDR3 for alpha chain variable domain of TCR clone 366359 (TRAV17, TRAJ28)
CATDPRRGGAGSYQLTF

SEQ ID NO: 732718 - protein, 16 aa, Homo sapiens
  CDR3 for beta chain variable domain of TCR clone 366359 (TRBV18, TRBJ1-5)
CASSPSTGNSNQPQHF

SEQ ID NO: 732719 - protein, 14 aa, Homo sapiens
  CDR3 for alpha chain variable domain of TCR clone 366360 (TRAV12-3, TRAJ9)
CAMSPNTGGFKTIF

SEQ ID NO: 732720 - protein, 11 aa, Homo sapiens
  CDR3 for beta chain variable domain of TCR clone 366360 (TRBV19, TRBJ1-1)
CASSIGSEAFF

SEQ ID NO: 732721 - protein, 12 aa, Homo sapiens
  CDR3 for alpha chain variable domain of TCR clone 366361 (TRAV12-2, TRAJ8)
CAVNTGFQKLVF

SEQ ID NO: 732722 - protein, 12 aa, Homo sapiens
  CDR3 for beta chain variable domain of TCR clone 366361 (TRBV11-2, TRBJ2-2)
CASSLGGGELFF

SEQ ID NO: 732723 - protein, 14 aa, Homo sapiens
  CDR3 for alpha chain variable domain of TCR clone 366362 (TRAV1-2, TRAJ16)
CAVNRFSDGQKLLF

SEQ ID NO: 732724 - protein, 13 aa, Homo sapiens
  CDR3 for beta chain variable domain of TCR clone 366362 (TRBV15, TRBJ1-6)
CATSGGLNSPRHF

SEQ ID NO: 732725 - protein, 13 aa, Homo sapiens
  CDR3 for alpha chain variable domain of TCR clone 366363 (TRAV12-1, TRAJ5)
CGFTDTGRRALTF

SEQ ID NO: 732726 - protein, 15 aa, Homo sapiens
  CDR3 for beta chain variable domain of TCR clone 366363 (TRBV5-7, TRBJ1-2)
CASSVGVAANYGYTF

SEQ ID NO: 732727 - protein, 14 aa, Homo sapiens
  CDR3 for alpha chain variable domain of TCR clone 366364 (TRAV12-1, TRAJ3)
CVVILYSSASKIIF

SEQ ID NO: 732728 - protein, 16 aa, Homo sapiens
  CDR3 for beta chain variable domain of TCR clone 366364 (TRBV5-1, TRBJ2-5)
CASSWSLAGAQETQYF

SEQ ID NO: 732729 - protein, 14 aa, Homo sapiens
  CDR3 for alpha chain variable domain of TCR clone 366365 (TRAV8-2, TRAJ37)
CVVSISGNTGKLIF

SEQ ID NO: 732730 - protein, 13 aa, Homo sapiens
  CDR3 for beta chain variable domain of TCR clone 366365 (TRBV7-8, TRBJ2-7)
RRVRLTEMGELYF

SEQ ID NO: 732731 - protein, 12 aa, Homo sapiens
  CDR3 for alpha chain variable domain of TCR clone 366366 (TRAV12-3, TRAJ17)
CAMTLTGNKLTF

SEQ ID NO: 732732 - protein, 17 aa, Homo sapiens
  CDR3 for beta chain variable domain of TCR clone 366366 (TRBV7-3, TRBJ2-3)
CASSLMNRMRGADTQYF

SEQ ID NO: 732733 - protein, 12 aa, Homo sapiens
  CDR3 for alpha chain variable domain of TCR clone 366367 (TRAV21, TRAJ13)
PGPSGGYQKVTF

SEQ ID NO: 732734 - protein, 13 aa, Homo sapiens
  CDR3 for beta chain variable domain of TCR clone 366367 (TRBV7-9, TRBJ1-2)
CASGLKQNYGYTF

SEQ ID NO: 732735 - protein, 13 aa, Homo sapiens
  CDR3 for alpha chain variable domain of TCR clone 366368 (TRAV12-2, TRAJ53)
CAGVGGSNYKLTF

SEQ ID NO: 732736 - protein, 14 aa, Homo sapiens
  CDR3 for beta chain variable domain of TCR clone 366368 (TRBV7-3, TRBJ2-1)
CASSLAGGTNEQFF

SEQ ID NO: 732737 - protein, 13 aa, Homo sapiens
  CDR3 for alpha chain variable domain of TCR clone 366369 (TRAV8-3, TRAJ28)
CAVGAVGSYQLTF

SEQ ID NO: 732738 - protein, 13 aa, Homo sapiens
  CDR3 for beta chain variable domain of TCR clone 366369 (TRBV7-2, TRBJ2-7)
CQRSQGAAYEQYF

SEQ ID NO: 732739 - protein, 14 aa, Homo sapiens
  CDR3 for alpha chain variable domain of TCR clone 366370 (TRAV13-1, TRAJ44)
CAAKATGTASKLTL

SEQ ID NO: 732740 - protein, 14 aa, Homo sapiens
  CDR3 for beta chain variable domain of TCR clone 366370 (TRBV19, TRBJ2-2)
CASSTLHRSGELFF

SEQ ID NO: 732741 - protein, 14 aa, Homo sapiens
  CDR3 for alpha chain variable domain of TCR clone 366371 (TRAV1-2, TRAJ16)
CAVNRFSDGQKLLC

SEQ ID NO: 732742 - protein, 15 aa, Homo sapiens
  CDR3 for beta chain variable domain of TCR clone 366371 (TRBV20-1, TRBJ2-7)
CSARDRVSGMDEQYF

SEQ ID NO: 732743 - protein, 14 aa, Homo sapiens
  CDR3 for alpha chain variable domain of TCR clone 366372 (TRAV26-2, TRAJ32)
CILFRGGATNKLIF

SEQ ID NO: 732744 - protein, 15 aa, Homo sapiens
  CDR3 for beta chain variable domain of TCR clone 366372 (TRBV19, TRBJ1-1)
CASSIRRQMNTEAFF

SEQ ID NO: 732745 - protein, 16 aa, Homo sapiens
  CDR3 for alpha chain variable domain of TCR clone 366373 (TRAV14/DV4, TRAJ54)
CAMREGRIQGAQKLVF

SEQ ID NO: 732746 - protein, 15 aa, Homo sapiens
  CDR3 for beta chain variable domain of TCR clone 366373 (TRBV15, TRBJ1-5)
CATSRDPVSNQPQHF

SEQ ID NO: 732747 - protein, 13 aa, Homo sapiens
  CDR3 for alpha chain variable domain of TCR clone 366374 (TRAV38-2/DV8, TRAJ53)
CASGGGSNYKLTF

SEQ ID NO: 732748 - protein, 16 aa, Homo sapiens
  CDR3 for beta chain variable domain of TCR clone 366374 (TRBV28, TRBJ1-5)
CASRFRGAVQNKPQHF

SEQ ID NO: 732749 - protein, 10 aa, Homo sapiens
  CDR3 for alpha chain variable domain of TCR clone 366375 (TRAV13-1, TRAJ27)
CAPLARQINL

SEQ ID NO: 732750 - protein, 13 aa, Homo sapiens
  CDR3 for beta chain variable domain of TCR clone 366375 (TRBV28, TRBJ1-1)
CASSRQGWTEAFF

SEQ ID NO: 732751 - protein, 15 aa, Homo sapiens
  CDR3 for alpha chain variable domain of TCR clone 366376 (TRAV3, TRAJ22)
CAVRDRGGSARKLTF

SEQ ID NO: 732752 - protein, 12 aa, Homo sapiens
  CDR3 for beta chain variable domain of TCR clone 366376 (TRBV4-1, TRBJ2-7)
PAGGGADNEQYF

SEQ ID NO: 732753 - protein, 14 aa, Homo sapiens
  CDR3 for alpha chain variable domain of TCR clone 366377 (TRAV26-1, TRAJ38)
CIADNAGNKRKLIW

SEQ ID NO: 732754 - protein, 16 aa, Homo sapiens
  CDR3 for beta chain variable domain of TCR clone 366377 (TRBV20-1, TRBJ2-7)
CSASTSGRLSSYEQYF

SEQ ID NO: 732755 - protein, 13 aa, Homo sapiens
  CDR3 for alpha chain variable domain of TCR clone 366378 (TRAV3, TRAJ21)
CAVREPDFNKFYF

SEQ ID NO: 732756 - protein, 13 aa, Homo sapiens
  CDR3 for beta chain variable domain of TCR clone 366378 (TRBV27, TRBJ2-7)
CASSSGDSYEQYF

SEQ ID NO: 732757 - protein, 16 aa, Homo sapiens
  CDR3 for alpha chain variable domain of TCR clone 366379 (TRAV26-1, TRAJ37)
CIVRGDGSGNTGKLIF

SEQ ID NO: 732758 - protein, 17 aa, Homo sapiens
  CDR3 for beta chain variable domain of TCR clone 366379 (TRBV4-1, TRBJ2-7)
CASSRDPLGVRGGEQNF

SEQ ID NO: 732759 - protein, 16 aa, Homo sapiens
  CDR3 for alpha chain variable domain of TCR clone 366380 (TRAV16, TRAJ42)
CARKMNYGGSQGNLIF

SEQ ID NO: 732760 - protein, 13 aa, Homo sapiens
  CDR3 for beta chain variable domain of TCR clone 366380 (TRBV20-1, TRBJ2-7)
CSASPPSSDEQYC

SEQ ID NO: 732761 - protein, 14 aa, Homo sapiens
  CDR3 for alpha chain variable domain of TCR clone 366381 (TRAV3, TRAJ21)
CAVRDAYNFNKFYF

SEQ ID NO: 732762 - protein, 12 aa, Homo sapiens
  CDR3 for beta chain variable domain of TCR clone 366381 (TRBV7-9, TRBJ2-7)
CASSIKREEQYF

SEQ ID NO: 732763 - protein, 15 aa, Homo sapiens
  CDR3 for alpha chain variable domain of TCR clone 366382 (TRAV35, TRAJ40)
CAGQLGTSGTYKYIF

SEQ ID NO: 732764 - protein, 14 aa, Homo sapiens
  CDR3 for beta chain variable domain of TCR clone 366382 (TRBV7-3, TRBJ2-1)
CASSLAGGTNEQIF

SEQ ID NO: 732765 - protein, 16 aa, Homo sapiens
  CDR3 for alpha chain variable domain of TCR clone 366383 (TRAV30, TRAJ24)
CGTAIVDADSWGKFQF

SEQ ID NO: 732766 - protein, 18 aa, Homo sapiens
  CDR3 for beta chain variable domain of TCR clone 366383 (TRBV11-2, TRBJ2-6)
CASSLNPFLGTGANVLTF

SEQ ID NO: 732767 - protein, 16 aa, Homo sapiens
  CDR3 for alpha chain variable domain of TCR clone 366384 (TRAV30, TRAJ24)
CGTEIVDADSWGKFQF

SEQ ID NO: 732768 - protein, 15 aa, Homo sapiens
  CDR3 for beta chain variable domain of TCR clone 366384 (TRBV20-1, TRBJ2-7)
CSARNRVSGIDEQYF

SEQ ID NO: 732769 - protein, 17 aa, Homo sapiens
  CDR3 for alpha chain variable domain of TCR clone 366385 (TRAV38-1, TRAJ28)
CAFMKSYSGAGSYQLTF

SEQ ID NO: 732770 - protein, 17 aa, Homo sapiens
  CDR3 for beta chain variable domain of TCR clone 366385 (TRBV7-8, TRBJ2-6)
CASSAGTGGAGANVLTF

SEQ ID NO: 732771 - protein, 15 aa, Homo sapiens
  CDR3 for alpha chain variable domain of TCR clone 366386 (TRAV3, TRAJ4)
CAQNMFSGGYNKLIF

SEQ ID NO: 732772 - protein, 16 aa, Homo sapiens
  CDR3 for beta chain variable domain of TCR clone 366386 (TRBV3-1, TRBJ1-6)
CASSQEFQGSYSPPHF

SEQ ID NO: 732773 - protein, 18 aa, Homo sapiens
  CDR3 for alpha chain variable domain of TCR clone 366387 (TRAV21, TRAJ52)
CAVRPSPAGGTSYGKLTS

SEQ ID NO: 732774 - protein, 14 aa, Homo sapiens
  CDR3 for beta chain variable domain of TCR clone 366387 (TRBV4-1, TRBJ2-2)
CASSQAVNTGELFF

SEQ ID NO: 732775 - protein, 14 aa, Homo sapiens
  CDR3 for alpha chain variable domain of TCR clone 366388 (TRAV12-2, TRAJ17)
CAVRFKAAGNQLTF

SEQ ID NO: 732776 - protein, 16 aa, Homo sapiens
  CDR3 for beta chain variable domain of TCR clone 366388 (TRBV7-9, TRBJ2-3)
CASSPWREVGTDTQYF

SEQ ID NO: 732777 - protein, 14 aa, Homo sapiens
  CDR3 for alpha chain variable domain of TCR clone 366389 (TRAV1-1, TRAJ27)
CAVIYNTNAGKSTF

SEQ ID NO: 732778 - protein, 15 aa, Homo sapiens
  CDR3 for beta chain variable domain of TCR clone 366389 (TRBV19, TRBJ1-2)
CASSVGQVLSYGYTF

SEQ ID NO: 732779 - protein, 11 aa, Homo sapiens
  CDR3 for alpha chain variable domain of TCR clone 366390 (TRAV2, TRAJ33)
CAVDSNYQLIW

SEQ ID NO: 732780 - protein, 18 aa, Homo sapiens
  CDR3 for beta chain variable domain of TCR clone 366390 (TRBV7-9, TRBJ2-7)
CASSLTTSGSRTWYEQYF

SEQ ID NO: 732781 - protein, 16 aa, Homo sapiens
  CDR3 for alpha chain variable domain of TCR clone 366391 (TRAV26-1, TRAJ32)
CIVRTNYGGAINKLIF

SEQ ID NO: 732782 - protein, 14 aa, Homo sapiens
  CDR3 for beta chain variable domain of TCR clone 366391 (TRBV27, TRBJ1-1)
CASSLLSGLSEAFF

SEQ ID NO: 732783 - protein, 15 aa, Homo sapiens
  CDR3 for alpha chain variable domain of TCR clone 366392 (TRAV12-2, TRAJ53)
CATLNSGGSNYKLTF

SEQ ID NO: 732784 - protein, 12 aa, Homo sapiens
  CDR3 for beta chain variable domain of TCR clone 366392 (TRBV7-3, TRBJ2-1)
CASSFINNEQFF

SEQ ID NO: 732785 - protein, 13 aa, Homo sapiens
  CDR3 for alpha chain variable domain of TCR clone 366393 (TRAV21, TRAJ29)
CAAPLSGNTPLVF

SEQ ID NO: 732786 - protein, 18 aa, Homo sapiens
  CDR3 for beta chain variable domain of TCR clone 366393 (TRBV4-1, TRBJ1-5)
CASSQDPRGQGLNQPQHF

SEQ ID NO: 732787 - protein, 15 aa, Homo sapiens
  CDR3 for alpha chain variable domain of TCR clone 366394 (TRAV3, TRAJ3)
CAVRDRDSSASKIIF

SEQ ID NO: 732788 - protein, 16 aa, Homo sapiens
  CDR3 for beta chain variable domain of TCR clone 366394 (TRBV28, TRBJ1-5)
CASSFRGGYSNQPQHF

SEQ ID NO: 732789 - protein, 13 aa, Homo sapiens
  CDR3 for alpha chain variable domain of TCR clone 366395 (TRAV21, TRAJ27)
CAARPGNAGKSTL

SEQ ID NO: 732790 - protein, 14 aa, Homo sapiens
  CDR3 for beta chain variable domain of TCR clone 366395 (TRBV7-7, TRBJ2-3)
CASSLGTVTDTQYF

SEQ ID NO: 732791 - protein, 16 aa, Homo sapiens
  CDR3 for alpha chain variable domain of TCR clone 366396 (TRAV8-3, TRAJ18)
CAVALDRGSTLGRLYF

SEQ ID NO: 732792 - protein, 13 aa, Homo sapiens
  CDR3 for beta chain variable domain of TCR clone 366396 (TRBV29-1, TRBJ2-1)
CSVEGGRVNEQFF

SEQ ID NO: 732793 - protein, 12 aa, Homo sapiens
  CDR3 for alpha chain variable domain of TCR clone 366397 (TRAV26-1, TRAJ26)
CIVYNYGQDFVF

SEQ ID NO: 732794 - protein, 15 aa, Homo sapiens
  CDR3 for beta chain variable domain of TCR clone 366397 (TRBV7-2, TRBJ2-3)
CASSLRGGSTDTQYF

SEQ ID NO: 732795 - protein, 14 aa, Homo sapiens
  CDR3 for alpha chain variable domain of TCR clone 366398 (TRAV26-1, TRAJ48)
CIVRVPYGNEKLTF

SEQ ID NO: 732796 - protein, 16 aa, Homo sapiens
  CDR3 for beta chain variable domain of TCR clone 366398 (TRBV18, TRBJ2-1)
CASSPYLSIRGDEQFF

SEQ ID NO: 732797 - protein, 17 aa, Homo sapiens
  CDR3 for alpha chain variable domain of TCR clone 366399 (TRAV3, TRAJ6)
CAVRDGPRAGGRYIPTF

SEQ ID NO: 732798 - protein, 14 aa, Homo sapiens
  CDR3 for beta chain variable domain of TCR clone 366399 (TRBV7-2, TRBJ2-7)
CASSPKTSFDEQYF

SEQ ID NO: 732799 - protein, 15 aa, Homo sapiens
  CDR3 for alpha chain variable domain of TCR clone 366400 (TRAV3, TRAJ22)
CAVRDRGCSARQLTF

SEQ ID NO: 732800 - protein, 16 aa, Homo sapiens
  CDR3 for beta chain variable domain of TCR clone 366400 (TRBV5-4, TRBJ2-3)
CASQQPGAGGADTQYL

SEQ ID NO: 732801 - protein, 17 aa, Homo sapiens
  CDR3 for alpha chain variable domain of TCR clone 366401 (TRAV13-1, TRAJ31)
CAPRDRLMFGDGTQLVV

SEQ ID NO: 732802 - protein, 17 aa, Homo sapiens
  CDR3 for beta chain variable domain of TCR clone 366401 (TRBV13, TRBJ2-3)
CASSLSRVAGGRNTQYF

SEQ ID NO: 732803 - protein, 13 aa, Homo sapiens
  CDR3 for alpha chain variable domain of TCR clone 366402 (TRAV13-1, TRAJ17)
CAADGAACNKLTF

SEQ ID NO: 732804 - protein, 14 aa, Homo sapiens
  CDR3 for beta chain variable domain of TCR clone 366402 (TRBV11-2, TRBJ1-3)
CASSLTQGRNTIYF

SEQ ID NO: 732805 - protein, 14 aa, Homo sapiens
  CDR3 for alpha chain variable domain of TCR clone 366403 (TRAV21, TRAJ45)
CAVSSGGGADGLTF

SEQ ID NO: 732806 - protein, 14 aa, Homo sapiens
  CDR3 for beta chain variable domain of TCR clone 366403 (TRBV19, TRBJ2-7)
CASSMGQGAIEQYF

SEQ ID NO: 732807 - protein, 14 aa, Homo sapiens
  CDR3 for alpha chain variable domain of TCR clone 366404 (TRAV36/DV7, TRAJ57)
CAVGFPGGSEKLVF

SEQ ID NO: 732808 - protein, 13 aa, Homo sapiens
  CDR3 for beta chain variable domain of TCR clone 366404 (TRBV10-3, TRBJ2-7)
CASKLAVNYEQYF

SEQ ID NO: 732809 - protein, 14 aa, Homo sapiens
  CDR3 for alpha chain variable domain of TCR clone 366405 (TRAV38-1, TRAJ27)
CAFIHNTNAGKSTF

SEQ ID NO: 732810 - protein, 16 aa, Homo sapiens
  CDR3 for beta chain variable domain of TCR clone 366405 (TRBV2, TRBJ2-1)
CASSVGGSLSYNEQFF

SEQ ID NO: 732811 - protein, 12 aa, Homo sapiens
  CDR3 for alpha chain variable domain of TCR clone 366406 (TRAV27, TRAJ9)
CAGESGGFKTIF

SEQ ID NO: 732812 - protein, 14 aa, Homo sapiens
  CDR3 for beta chain variable domain of TCR clone 366406 (TRBV6-1, TRBJ2-1)
CASAKDGCYNEQSF

SEQ ID NO: 732813 - protein, 17 aa, Homo sapiens
  CDR3 for alpha chain variable domain of TCR clone 366407 (TRAV3, TRAJ12)
CAVRDGGRMDSSYKLIF

SEQ ID NO: 732814 - protein, 13 aa, Homo sapiens
  CDR3 for beta chain variable domain of TCR clone 366407 (TRBV15, TRBJ1-6)
CTTSGGLNSPLHF

SEQ ID NO: 732815 - protein, 12 aa, Homo sapiens
  CDR3 for alpha chain variable domain of TCR clone 366408 (TRAV21, TRAJ11)
CAATSGYTTLTF

SEQ ID NO: 732816 - protein, 13 aa, Homo sapiens
  CDR3 for beta chain variable domain of TCR clone 366408 (TRBV20-1, TRBJ2-7)
QCPELAGVGEQYF

SEQ ID NO: 732817 - protein, 11 aa, Homo sapiens
  CDR3 for alpha chain variable domain of TCR clone 366409 (TRAV35, TRAJ30)
CAGPGDDKIIF

SEQ ID NO: 732818 - protein, 12 aa, Homo sapiens
  CDR3 for beta chain variable domain of TCR clone 366409 (TRBV27, TRBJ2-1)
CASRGVYNEQFF

SEQ ID NO: 732819 - protein, 13 aa, Homo sapiens
  CDR3 for alpha chain variable domain of TCR clone 366410 (TRAV12-3, TRAJ5)
CAMIYTGRRALTV

SEQ ID NO: 732820 - protein, 12 aa, Homo sapiens
  CDR3 for beta chain variable domain of TCR clone 366410 (TRBV18, TRBJ1-4)
CASSPSREKLFF

SEQ ID NO: 732821 - protein, 12 aa, Homo sapiens
  CDR3 for alpha chain variable domain of TCR clone 366411 (TRAV13-1, TRAJ21)
CAAKEGFNKFYF

SEQ ID NO: 732822 - protein, 17 aa, Homo sapiens
  CDR3 for beta chain variable domain of TCR clone 366411 (TRBV6-3, TRBJ2-1)
CASSYSSGTRGLDEQFF

SEQ ID NO: 732823 - protein, 15 aa, Homo sapiens
  CDR3 for alpha chain variable domain of TCR clone 366412 (TRAV13-1, TRAJ5)
CAASSSDTGRRALTF

SEQ ID NO: 732824 - protein, 17 aa, Homo sapiens
  CDR3 for beta chain variable domain of TCR clone 366412 (TRBV4-1, TRBJ1-4)
CASSQEGPRGVEEKLFF

SEQ ID NO: 732825 - protein, 11 aa, Homo sapiens
  CDR3 for alpha chain variable domain of TCR clone 366413 (TRAV26-1, TRAJ27)
CIDPNAGKSTF

SEQ ID NO: 732826 - protein, 15 aa, Homo sapiens
  CDR3 for beta chain variable domain of TCR clone 366413 (TRBV5-1, TRBJ2-1)
CASSPPRPPTMSSSS

SEQ ID NO: 732827 - protein, 10 aa, Homo sapiens
  CDR3 for alpha chain variable domain of TCR clone 366414 (TRAV16, TRAJ22)
SAMYLRHLTF

SEQ ID NO: 732828 - protein, 11 aa, Homo sapiens
  CDR3 for beta chain variable domain of TCR clone 366414 (TRBV7-2, TRBJ2-2)
CASSIRGELFF

SEQ ID NO: 732829 - protein, 14 aa, Homo sapiens
  CDR3 for alpha chain variable domain of TCR clone 366415 (TRAV8-3, TRAJ4)
CAVGASGGYNKLIF

SEQ ID NO: 732830 - protein, 13 aa, Homo sapiens
  CDR3 for beta chain variable domain of TCR clone 366415 (TRBV2, TRBJ1-5)
CASVEDSNQPQHF

SEQ ID NO: 732831 - protein, 17 aa, Homo sapiens
  CDR3 for alpha chain variable domain of TCR clone 366416 (TRAV3, TRAJ6)
CAVRDGPRAGGSYIPTF

SEQ ID NO: 732832 - protein, 16 aa, Homo sapiens
  CDR3 for beta chain variable domain of TCR clone 366416 (TRBV7-2, TRBJ1-3)
CASSRLEASSGNTIYF

SEQ ID NO: 732833 - protein, 19 aa, Homo sapiens
  CDR3 for alpha chain variable domain of TCR clone 366417 (TRAV30, TRAJ52)
CGTEANPNAGGTSYGKLTF

SEQ ID NO: 732834 - protein, 12 aa, Homo sapiens
  CDR3 for beta chain variable domain of TCR clone 366417 (TRBV28, TRBJ2-3)
CASSLYRDTQYF

SEQ ID NO: 732835 - protein, 13 aa, Homo sapiens
  CDR3 for alpha chain variable domain of TCR clone 366418 (TRAV12-2, TRAJ39)
CAVHNNAGNMLTF

SEQ ID NO: 732836 - protein, 12 aa, Homo sapiens
  CDR3 for beta chain variable domain of TCR clone 366418 (TRBV5-1, TRBJ2-7)
CASSFRGYEQYF

SEQ ID NO: 732837 - protein, 15 aa, Homo sapiens
  CDR3 for alpha chain variable domain of TCR clone 366419 (TRAV8-6, TRAJ42)
CAVRGRKPRKSHLWK

SEQ ID NO: 732838 - protein, 15 aa, Homo sapiens
  CDR3 for beta chain variable domain of TCR clone 366419 (TRBV4-2, TRBJ2-1)
CASSPSGGLYNEQFF

SEQ ID NO: 732839 - protein, 11 aa, Homo sapiens
  CDR3 for alpha chain variable domain of TCR clone 366420 (TRAV2, TRAJ13)
CASGGYQKVTF

SEQ ID NO: 732840 - protein, 16 aa, Homo sapiens
  CDR3 for beta chain variable domain of TCR clone 366420 (TRBV11-2, TRBJ2-5)
CASSLEGSTGTGTQYF

SEQ ID NO: 732841 - protein, 14 aa, Homo sapiens
  CDR3 for alpha chain variable domain of TCR clone 366421 (TRAV12-2, TRAJ45)
CALPERGGADGLTF

SEQ ID NO: 732842 - protein, 17 aa, Homo sapiens
  CDR3 for beta chain variable domain of TCR clone 366421 (TRBV15, TRBJ1-5)
CATSRAPPGTRNQPQHF

SEQ ID NO: 732843 - protein, 14 aa, Homo sapiens
  CDR3 for alpha chain variable domain of TCR clone 366422 (TRAV1-2, TRAJ16)
CAVNRFSYGQKLLF

SEQ ID NO: 732844 - protein, 17 aa, Homo sapiens
  CDR3 for beta chain variable domain of TCR clone 366422 (TRBV15, TRBJ1-2)
CATSGREIDVVNYGYTF

SEQ ID NO: 732845 - protein, 13 aa, Homo sapiens
  CDR3 for alpha chain variable domain of TCR clone 366423 (TRAV27, TRAJ29)
CAGAHSGNTPPVF

SEQ ID NO: 732846 - protein, 14 aa, Homo sapiens
  CDR3 for beta chain variable domain of TCR clone 366423 (TRBV7-9, TRBJ2-7)
CASSIGQGAGEQYF

SEQ ID NO: 732847 - protein, 15 aa, Homo sapiens
  CDR3 for alpha chain variable domain of TCR clone 366424 (TRAV27, TRAJ38)
CAARRNAGNNRKLIW

SEQ ID NO: 732848 - protein, 13 aa, Homo sapiens
  CDR3 for beta chain variable domain of TCR clone 366424 (TRBV4-3, TRBJ2-3)
CASSQGYTDTQYF

SEQ ID NO: 732849 - protein, 21 aa, Homo sapiens
  CDR3 for alpha chain variable domain of TCR clone 366425 (TRAV8-3, TRAJ6)
CAVGGEEATYQHLEEEPALLF

SEQ ID NO: 732850 - protein, 17 aa, Homo sapiens
  CDR3 for beta chain variable domain of TCR clone 366425 (TRBV7-2, TRBJ2-3)
CASSLAGGLAGTAGQYF

SEQ ID NO: 732851 - protein, 12 aa, Homo sapiens
  CDR3 for alpha chain variable domain of TCR clone 366426 (TRAV38-1, TRAJ47)
CAFETYGNKLVF

SEQ ID NO: 732852 - protein, 17 aa, Homo sapiens
  CDR3 for beta chain variable domain of TCR clone 366426 (TRBV5-7, TRBJ2-7)
CASSGGRRSPTSSTSGR

SEQ ID NO: 732853 - protein, 18 aa, Homo sapiens
  CDR3 for alpha chain variable domain of TCR clone 366427 (TRAV21, TRAJ52)
CAVRPSPAGGTSYGKLTF

SEQ ID NO: 732854 - protein, 13 aa, Homo sapiens
  CDR3 for beta chain variable domain of TCR clone 366427 (TRBV7-9, TRBJ1-2)
CASSLKQNYSYTF

SEQ ID NO: 732855 - protein, 13 aa, Homo sapiens
  CDR3 for alpha chain variable domain of TCR clone 366428 (TRAV13-1, TRAJ12)
CAASPDSSYKLIF

SEQ ID NO: 732856 - protein, 14 aa, Homo sapiens
  CDR3 for beta chain variable domain of TCR clone 366428 (TRBV6-1, TRBJ2-6)
CASQQGAGANVLTF

SEQ ID NO: 732857 - protein, 13 aa, Homo sapiens
  CDR3 for alpha chain variable domain of TCR clone 366429 (TRAV8-2, TRAJ45)
CVVSLVQEEVLTD

SEQ ID NO: 732858 - protein, 15 aa, Homo sapiens
  CDR3 for beta chain variable domain of TCR clone 366429 (TRBV6-3, TRBJ2-7)
CASSSPGTVFYEQYF

SEQ ID NO: 732859 - protein, 16 aa, Homo sapiens
  CDR3 for alpha chain variable domain of TCR clone 366430 (TRAV26-2, TRAJ57)
CILRDVGSGVSEKLVF

SEQ ID NO: 732860 - protein, 13 aa, Homo sapiens
  CDR3 for beta chain variable domain of TCR clone 366430 (TRBV18, TRBJ2-3)
CASSPGVTDTQYF

SEQ ID NO: 732861 - protein, 14 aa, Homo sapiens
  CDR3 for alpha chain variable domain of TCR clone 366431 (TRAV12-2, TRAJ11)
CAVEGGSGYSTLTF

SEQ ID NO: 732862 - protein, 14 aa, Homo sapiens
  CDR3 for beta chain variable domain of TCR clone 366431 (TRBV7-8, TRBJ2-3)
CASSSRDSTDTQYF

SEQ ID NO: 732863 - protein, 14 aa, Homo sapiens
  CDR3 for alpha chain variable domain of TCR clone 366432 (TRAV1-2, TRAJ8)
CAVREDTGFQKLVF

SEQ ID NO: 732864 - protein, 12 aa, Homo sapiens
  CDR3 for beta chain variable domain of TCR clone 366432 (TRBV5-7, TRBJ1-2)
CASSDRIHGYTF

SEQ ID NO: 732865 - protein, 14 aa, Homo sapiens
  CDR3 for alpha chain variable domain of TCR clone 366433 (TRAV1-2, TRAJ16)
CAVNRFSDGQKLLF

SEQ ID NO: 732866 - protein, 16 aa, Homo sapiens
  CDR3 for beta chain variable domain of TCR clone 366433 (TRBV10-3, TRBJ2-2)
CAISGTGAAGTGELFF

SEQ ID NO: 732867 - protein, 17 aa, Homo sapiens
  CDR3 for alpha chain variable domain of TCR clone 366434 (TRAV35, TRAJ52)
CAGQLAAGGTSYGTLTF

SEQ ID NO: 732868 - protein, 12 aa, Homo sapiens
  CDR3 for beta chain variable domain of TCR clone 366434 (TRBV20-1, TRBJ2-7)
CSAGRRQSEQYF

SEQ ID NO: 732869 - protein, 14 aa, Homo sapiens
  CDR3 for alpha chain variable domain of TCR clone 366435 (TRAV12-2, TRAJ17)
CAVLFKAAGNKLTF

SEQ ID NO: 732870 - protein, 20 aa, Homo sapiens
  CDR3 for beta chain variable domain of TCR clone 366435 (TRBV7-8, TRBJ2-2)
CASSHLFPRPTIHITGELFF

SEQ ID NO: 732871 - protein, 13 aa, Homo sapiens
  CDR3 for alpha chain variable domain of TCR clone 366436 (TRAV12-2, TRAJ39)
CAVNNNAGNMLTF

SEQ ID NO: 732872 - protein, 14 aa, Homo sapiens
  CDR3 for beta chain variable domain of TCR clone 366436 (TRBV7-3, TRBJ2-1)
CQQPGGGGGNEQFF

SEQ ID NO: 732873 - protein, 12 aa, Homo sapiens
  CDR3 for alpha chain variable domain of TCR clone 366437 (TRAV12-3, TRAJ17)
CAMTLTDNKLTF

SEQ ID NO: 732874 - protein, 15 aa, Homo sapiens
  CDR3 for beta chain variable domain of TCR clone 366437 (TRBV20-1, TRBJ2-7)
CSARDRVAGMDEQYF

SEQ ID NO: 732875 - protein, 14 aa, Homo sapiens
  CDR3 for alpha chain variable domain of TCR clone 366438 (TRAV3, TRAJ21)
CAVVPLYNFNKFYF

SEQ ID NO: 732876 - protein, 14 aa, Homo sapiens
  CDR3 for beta chain variable domain of TCR clone 366438 (TRBV4-2, TRBJ2-3)
CASSQERGTDTQYF

SEQ ID NO: 732877 - protein, 14 aa, Homo sapiens
  CDR3 for alpha chain variable domain of TCR clone 366439 (TRAV3, TRAJ9)
CAVRLNTGGFKTIF

SEQ ID NO: 732878 - protein, 15 aa, Homo sapiens
  CDR3 for beta chain variable domain of TCR clone 366439 (TRBV5-1, TRBJ2-1)
CASTGSGRTYNEQFF

SEQ ID NO: 732879 - protein, 14 aa, Homo sapiens
  CDR3 for alpha chain variable domain of TCR clone 366440 (TRAV26-1, TRAJ34)
CIVRVAYNTDKLIF

SEQ ID NO: 732880 - protein, 14 aa, Homo sapiens
  CDR3 for beta chain variable domain of TCR clone 366440 (TRBV20-1, TRBJ2-7)
CSAWTALSSHEQYF

SEQ ID NO: 732881 - protein, 15 aa, Homo sapiens
  CDR3 for alpha chain variable domain of TCR clone 366441 (TRAV25, TRAJ53)
CPTSNSGGSNYKLTF

SEQ ID NO: 732882 - protein, 14 aa, Homo sapiens
  CDR3 for beta chain variable domain of TCR clone 366441 (TRBV11-2, TRBJ2-3)
CASSILARTDTQYF

SEQ ID NO: 732883 - protein, 16 aa, Homo sapiens
  CDR3 for alpha chain variable domain of TCR clone 366442 (TRAV26-1, TRAJ23)
CIVRVHPYNQGGKLLF

SEQ ID NO: 732884 - protein, 15 aa, Homo sapiens
  CDR3 for beta chain variable domain of TCR clone 366442 (TRBV5-7, TRBJ2-7)
CASSPYLEGSYEQYF

SEQ ID NO: 732885 - protein, 14 aa, Homo sapiens
  CDR3 for alpha chain variable domain of TCR clone 366443 (TRAV12-1, TRAJ9)
CVVTGYTGGFKTIF

SEQ ID NO: 732886 - protein, 13 aa, Homo sapiens
  CDR3 for beta chain variable domain of TCR clone 366443 (TRBV20-1, TRBJ1-1)
SSARAGGNTEAFF

SEQ ID NO: 732887 - protein, 11 aa, Homo sapiens
  CDR3 for alpha chain variable domain of TCR clone 366444 (TRAV8-4, TRAJ34)
CAVSWTDKLIF

SEQ ID NO: 732888 - protein, 14 aa, Homo sapiens
  CDR3 for beta chain variable domain of TCR clone 366444 (TRBV6-1, TRBJ1-3)
CASVQGGGGNTIYY

SEQ ID NO: 732889 - protein, 14 aa, Homo sapiens
  CDR3 for alpha chain variable domain of TCR clone 366445 (TRAV8-4, TRAJ54)
CAVSEVLGAQKLVF

SEQ ID NO: 732890 - protein, 15 aa, Homo sapiens
  CDR3 for beta chain variable domain of TCR clone 366445 (TRBV4-1, TRBJ2-7)
CASSQNTGRLYEQYF

SEQ ID NO: 732891 - protein, 14 aa, Homo sapiens
  CDR3 for alpha chain variable domain of TCR clone 366446 (TRAV16, TRAJ48)
CALTPGFGNEKVTF

SEQ ID NO: 732892 - protein, 14 aa, Homo sapiens
  CDR3 for beta chain variable domain of TCR clone 366446 (TRBV7-2, TRBJ2-7)
CASSSISGFSEQYF

SEQ ID NO: 732893 - protein, 15 aa, Homo sapiens
  CDR3 for alpha chain variable domain of TCR clone 366447 (TRAV21, TRAJ24)
CAARSSTDSWGKLQF

SEQ ID NO: 732894 - protein, 12 aa, Homo sapiens
  CDR3 for beta chain variable domain of TCR clone 366447 (TRBV2, TRBJ2-1)
CAYGPPGNEQFF

SEQ ID NO: 732895 - protein, 13 aa, Homo sapiens
  CDR3 for alpha chain variable domain of TCR clone 366448 (TRAV8-3, TRAJ4)
WVFYSGGYNMLIF

SEQ ID NO: 732896 - protein, 14 aa, Homo sapiens
  CDR3 for beta chain variable domain of TCR clone 366448 (TRBV7-9, TRBJ2-3)
CASSLEDGTDTQYF

SEQ ID NO: 732897 - protein, 13 aa, Homo sapiens
  CDR3 for alpha chain variable domain of TCR clone 366449 (TRAV12-1, TRAJ37)
CVVNAGNTGKLIF

SEQ ID NO: 732898 - protein, 15 aa, Homo sapiens
  CDR3 for beta chain variable domain of TCR clone 366449 (TRBV10-2, TRBJ2-6)
CASSEQGTGANVLTF

SEQ ID NO: 732899 - protein, 13 aa, Homo sapiens
  CDR3 for alpha chain variable domain of TCR clone 366450 (TRAV20, TRAJ48)
CAVHLFGNEKLTF

SEQ ID NO: 732900 - protein, 15 aa, Homo sapiens
  CDR3 for beta chain variable domain of TCR clone 366450 (TRBV6-5, TRBJ2-6)
CASTQWEAGANVLTF

SEQ ID NO: 732901 - protein, 15 aa, Homo sapiens
  CDR3 for alpha chain variable domain of TCR clone 366451 (TRAV8-3, TRAJ32)
CAVGPYGGATNKLIC

SEQ ID NO: 732902 - protein, 14 aa, Homo sapiens
  CDR3 for beta chain variable domain of TCR clone 366451 (TRBV29-1, TRBJ2-2)
CSVLAETNTGELFF

SEQ ID NO: 732903 - protein, 11 aa, Homo sapiens
  CDR3 for alpha chain variable domain of TCR clone 366452 (TRAV23/DV6, TRAJ34)
CAAEGTDKLIF

SEQ ID NO: 732904 - protein, 16 aa, Homo sapiens
  CDR3 for beta chain variable domain of TCR clone 366452 (TRBV20-1, TRBJ1-4)
CSAPGQGLLTNEKLFF

SEQ ID NO: 732905 - protein, 16 aa, Homo sapiens
  CDR3 for alpha chain variable domain of TCR clone 366453 (TRAV12-2, TRAJ28)
CAVITDSGAGSYQLTF

SEQ ID NO: 732906 - protein, 14 aa, Homo sapiens
  CDR3 for beta chain variable domain of TCR clone 366453 (TRBV6-1, TRBJ2-1)
CASAKDGFYNEQFF

SEQ ID NO: 732907 - protein, 10 aa, Homo sapiens
  CDR3 for alpha chain variable domain of TCR clone 366454 (TRAV23/DV6, TRAJ57)
CAASSTLSQG

SEQ ID NO: 732908 - protein, 14 aa, Homo sapiens
  CDR3 for beta chain variable domain of TCR clone 366454 (TRBV19, TRBJ2-1)
CASSKDRGQDEQFC

SEQ ID NO: 732909 - protein, 13 aa, Homo sapiens
  CDR3 for alpha chain variable domain of TCR clone 366455 (TRAV8-6, TRAJ24)
CAVSSDSWGKLQF

SEQ ID NO: 732910 - protein, 14 aa, Homo sapiens
  CDR3 for beta chain variable domain of TCR clone 366455 (TRBV5-1, TRBJ2-2)
CASSLGGGSGELFF

SEQ ID NO: 732911 - protein, 12 aa, Homo sapiens
  CDR3 for alpha chain variable domain of TCR clone 366456 (TRAV17, TRAJ57)
CATDGESEKLVF

SEQ ID NO: 732912 - protein, 13 aa, Homo sapiens
  CDR3 for beta chain variable domain of TCR clone 366456 (TRBV7-9, TRBJ2-7)
CASSFAGAYEQYF

SEQ ID NO: 732913 - protein, 15 aa, Homo sapiens
  CDR3 for alpha chain variable domain of TCR clone 366457 (TRAV21, TRAJ53)
CATLNSGGSNYKLTF

SEQ ID NO: 732914 - protein, 15 aa, Homo sapiens
  CDR3 for beta chain variable domain of TCR clone 366457 (TRBV6-3, TRBJ2-7)
CASSFPGTVFYEQYF

SEQ ID NO: 732915 - protein, 16 aa, Homo sapiens
  CDR3 for alpha chain variable domain of TCR clone 366458 (TRAV4, TRAJ9)
CLVGDPNRPGGFKTIF

SEQ ID NO: 732916 - protein, 16 aa, Homo sapiens
  CDR3 for beta chain variable domain of TCR clone 366458 (TRBV28, TRBJ1-4)
CASSPPYRGRSEKLFY

SEQ ID NO: 732917 - protein, 15 aa, Homo sapiens
  CDR3 for alpha chain variable domain of TCR clone 366459 (TRAV8-4, TRAJ47)
GAVSDPEEYGNKLVF

SEQ ID NO: 732918 - protein, 15 aa, Homo sapiens
  CDR3 for beta chain variable domain of TCR clone 366459 (TRBV11-2, TRBJ2-1)
CASSLGPDSYNEQFF

SEQ ID NO: 732919 - protein, 16 aa, Homo sapiens
  CDR3 for alpha chain variable domain of TCR clone 366460 (TRAV20, TRAJ54)
CAVQRVLIQGAQKLVF

SEQ ID NO: 732920 - protein, 15 aa, Homo sapiens
  CDR3 for beta chain variable domain of TCR clone 366460 (TRBV19, TRBJ2-3)
CAAGDTNAPNDTQYF

SEQ ID NO: 732921 - protein, 15 aa, Homo sapiens
  CDR3 for alpha chain variable domain of TCR clone 366461 (TRAV8-3, TRAJ45)
CASSYSGGGADGLTF

SEQ ID NO: 732922 - protein, 14 aa, Homo sapiens
  CDR3 for beta chain variable domain of TCR clone 366461 (TRBV19, TRBJ2-1)
CASGKSTQYNEKFF

SEQ ID NO: 732923 - protein, 13 aa, Homo sapiens
  CDR3 for alpha chain variable domain of TCR clone 366462 (TRAV12-1, TRAJ26)
CVVRRNYGQNFVF

SEQ ID NO: 732924 - protein, 15 aa, Homo sapiens
  CDR3 for beta chain variable domain of TCR clone 366462 (TRBV7-9, TRBJ1-5)
CASSQGHQPNQTQHF

SEQ ID NO: 732925 - protein, 12 aa, Homo sapiens
  CDR3 for alpha chain variable domain of TCR clone 366463 (TRAV16, TRAJ10)
CSRTGGGNKLTF

SEQ ID NO: 732926 - protein, 15 aa, Homo sapiens
  CDR3 for beta chain variable domain of TCR clone 366463 (TRBV5-1, TRBJ2-2)
CASSRTGQVPGELFF

SEQ ID NO: 732927 - protein, 14 aa, Homo sapiens
  CDR3 for alpha chain variable domain of TCR clone 366464 (TRAV8-6, TRAJ12)
CAVKAADSSYKLIF

SEQ ID NO: 732928 - protein, 15 aa, Homo sapiens
  CDR3 for beta chain variable domain of TCR clone 366464 (TRBV5-1, TRBJ2-5)
CASRLGLAEQETQYF

SEQ ID NO: 732929 - protein, 14 aa, Homo sapiens
  CDR3 for alpha chain variable domain of TCR clone 366465 (TRAV12-2, TRAJ6)
CASKWGGGSYIPTF

SEQ ID NO: 732930 - protein, 14 aa, Homo sapiens
  CDR3 for beta chain variable domain of TCR clone 366465 (TRBV7-2, TRBJ2-7)
CASRSQGAAYEQYF

SEQ ID NO: 732931 - protein, 13 aa, Homo sapiens
  CDR3 for alpha chain variable domain of TCR clone 366466 (TRAV2, TRAJ15)
CAVASQAGTALSL

SEQ ID NO: 732932 - protein, 15 aa, Homo sapiens
  CDR3 for beta chain variable domain of TCR clone 366466 (TRBV20-1, TRBJ2-7)
CSARDRVSGMDEQYF

SEQ ID NO: 732933 - protein, 14 aa, Homo sapiens
  CDR3 for alpha chain variable domain of TCR clone 366467 (TRAV26-1, TRAJ38)
CIADNAGNNRKLIW

SEQ ID NO: 732934 - protein, 17 aa, Homo sapiens
  CDR3 for beta chain variable domain of TCR clone 366467 (TRBV7-9, TRBJ2-3)
CASSPTVAGDLTNTQYF

SEQ ID NO: 732935 - protein, 16 aa, Homo sapiens
  CDR3 for alpha chain variable domain of TCR clone 366468 (TRAV12-3, TRAJ50)
CAMRDPMKTSYDKVIF

SEQ ID NO: 732936 - protein, 13 aa, Homo sapiens
  CDR3 for beta chain variable domain of TCR clone 366468 (TRBV4-1, TRBJ2-3)
CASSLDVTDTQYF

SEQ ID NO: 732937 - protein, 12 aa, Homo sapiens
  CDR3 for alpha chain variable domain of TCR clone 366469 (TRAV9-2, TRAJ26)
CALRGYGQNFVF

SEQ ID NO: 732938 - protein, 15 aa, Homo sapiens
  CDR3 for beta chain variable domain of TCR clone 366469 (TRBV7-9, TRBJ1-5)
CASSQGHQPNQPQHF

SEQ ID NO: 732939 - protein, 17 aa, Homo sapiens
  CDR3 for alpha chain variable domain of TCR clone 366470 (TRAV3, TRAJ38)
CAVRGCLNAGNNRKLIW

SEQ ID NO: 732940 - protein, 14 aa, Homo sapiens
  CDR3 for beta chain variable domain of TCR clone 366470 (TRBV5-5, TRBJ1-5)
CASSGQGVDQQQHF

SEQ ID NO: 732941 - protein, 14 aa, Homo sapiens
  CDR3 for alpha chain variable domain of TCR clone 366471 (TRAV9-2, TRAJ39)
CALYIYNAGNMLTF

SEQ ID NO: 732942 - protein, 18 aa, Homo sapiens
  CDR3 for beta chain variable domain of TCR clone 366471 (TRBV7-9, TRBJ2-7)
CTSSLTTSGSRTWYEQYF

SEQ ID NO: 732943 - protein, 16 aa, Homo sapiens
  CDR3 for alpha chain variable domain of TCR clone 366472 (TRAV26-1, TRAJ38)
CIVRVSGAGNNRKLIW

SEQ ID NO: 732944 - protein, 13 aa, Homo sapiens
  CDR3 for beta chain variable domain of TCR clone 366472 (TRBV14, TRBJ1-2)
CASSQDRRRGYTF

SEQ ID NO: 732945 - protein, 11 aa, Homo sapiens
  CDR3 for alpha chain variable domain of TCR clone 366473 (TRAV12-2, TRAJ49)
CALQRGNQFYF

SEQ ID NO: 732946 - protein, 13 aa, Homo sapiens
  CDR3 for beta chain variable domain of TCR clone 366473 (TRBV4-1, TRBJ1-1)
CASSQLGTGEAFF

SEQ ID NO: 732947 - protein, 13 aa, Homo sapiens
  CDR3 for alpha chain variable domain of TCR clone 366474 (TRAV8-4, TRAJ30)
CAVSVNRDDKIIF

SEQ ID NO: 732948 - protein, 16 aa, Homo sapiens
  CDR3 for beta chain variable domain of TCR clone 366474 (TRBV11-3, TRBJ2-5)
CASSSVVAGSTETQYF

SEQ ID NO: 732949 - protein, 13 aa, Homo sapiens
  CDR3 for alpha chain variable domain of TCR clone 366475 (TRAV3, TRAJ21)
CAVREPDFNKFFF

SEQ ID NO: 732950 - protein, 12 aa, Homo sapiens
  CDR3 for beta chain variable domain of TCR clone 366475 (TRBV5-1, TRBJ2-4)
LAGEWTKNTQYF

SEQ ID NO: 732951 - protein, 12 aa, Homo sapiens
  CDR3 for alpha chain variable domain of TCR clone 366476 (TRAV12-3, TRAJ40)
CAVSSGTYKYIF

SEQ ID NO: 732952 - protein, 14 aa, Homo sapiens
  CDR3 for beta chain variable domain of TCR clone 366476 (TRBV19, TRBJ2-1)
CASPTFVLSGEQSF

SEQ ID NO: 732953 - protein, 10 aa, Homo sapiens
  CDR3 for alpha chain variable domain of TCR clone 366477 (TRAV8-3, TRAJ20)
CAVGYYKLSF

SEQ ID NO: 732954 - protein, 13 aa, Homo sapiens
  CDR3 for beta chain variable domain of TCR clone 366477 (TRBV4-2, TRBJ1-1)
CASSQAGNTEAFF

SEQ ID NO: 732955 - protein, 22 aa, Homo sapiens
  CDR3 for alpha chain variable domain of TCR clone 366478 (TRAV16, )
CALRTQIPDIQNPDPAVYQLSD

SEQ ID NO: 732956 - protein, 16 aa, Homo sapiens
  CDR3 for beta chain variable domain of TCR clone 366478 (TRBV7-2, TRBJ1-2)
CASSSNQDRRGHGYTF

SEQ ID NO: 732957 - protein, 14 aa, Homo sapiens
  CDR3 for alpha chain variable domain of TCR clone 366479 (TRAV1-2, TRAJ16)
CAVNRFSDGQKLLF

SEQ ID NO: 732958 - protein, 15 aa, Homo sapiens
  CDR3 for beta chain variable domain of TCR clone 366479 (TRBV10-2, TRBJ2-7)
CASGASGATSSTSGR

SEQ ID NO: 732959 - protein, 12 aa, Homo sapiens
  CDR3 for alpha chain variable domain of TCR clone 366480 (TRAV35, TRAJ49)
CAGWNTGNQFYF

SEQ ID NO: 732960 - protein, 17 aa, Homo sapiens
  CDR3 for beta chain variable domain of TCR clone 366480 (TRBV7-3, TRBJ2-3)
CASSLMKRMRGADTQYF

SEQ ID NO: 732961 - protein, 14 aa, Homo sapiens
  CDR3 for alpha chain variable domain of TCR clone 366481 (TRAV12-3, TRAJ29)
CAMILLSGNTPLVF

SEQ ID NO: 732962 - protein, 16 aa, Homo sapiens
  CDR3 for beta chain variable domain of TCR clone 366481 (TRBV4-1, TRBJ2-6)
CASSQVGDPGANVLTF

SEQ ID NO: 732963 - protein, 15 aa, Homo sapiens
  CDR3 for alpha chain variable domain of TCR clone 366482 (TRAV21, TRAJ53)
CATLNSGRSNYKLTF

SEQ ID NO: 732964 - protein, 15 aa, Homo sapiens
  CDR3 for beta chain variable domain of TCR clone 366482 (TRBV7-6, TRBJ1-5)
CASSQSSGINQPQHF

SEQ ID NO: 732965 - protein, 15 aa, Homo sapiens
  CDR3 for alpha chain variable domain of TCR clone 366483 (TRAV29/DV5, TRAJ42)
CAAKTDGGSQGNLIF

SEQ ID NO: 732966 - protein, 15 aa, Homo sapiens
  CDR3 for beta chain variable domain of TCR clone 366483 (TRBV5-1, TRBJ2-2)
CASSSQGGNTGELFL

SEQ ID NO: 732967 - protein, 15 aa, Homo sapiens
  CDR3 for alpha chain variable domain of TCR clone 366484 (TRAV26-1, TRAJ29)
CIVRVEGSGNTPLVF

SEQ ID NO: 732968 - protein, 12 aa, Homo sapiens
  CDR3 for beta chain variable domain of TCR clone 366484 (TRBV7-9, TRBJ1-5)
CASSPQGQTQHF

SEQ ID NO: 732969 - protein, 11 aa, Homo sapiens
  CDR3 for alpha chain variable domain of TCR clone 366485 (TRAV35, TRAJ30)
CAGPGDDKIIF

SEQ ID NO: 732970 - protein, 12 aa, Homo sapiens
  CDR3 for beta chain variable domain of TCR clone 366485 (TRBV27, TRBJ2-1)
CASRGFYKEQFF

SEQ ID NO: 732971 - protein, 21 aa, Homo sapiens
  CDR3 for alpha chain variable domain of TCR clone 366486 (TRAV27, TRAJ41)
CAVRTQIPDIQNPDPAVYQLR

SEQ ID NO: 732972 - protein, 16 aa, Homo sapiens
  CDR3 for beta chain variable domain of TCR clone 366486 (TRBV5-1, TRBJ2-3)
CASSLGLAVYTDTQYF

SEQ ID NO: 732973 - protein, 16 aa, Homo sapiens
  CDR3 for alpha chain variable domain of TCR clone 366487 (TRAV30, TRAJ24)
CGTEIVDAASWGKFQF

SEQ ID NO: 732974 - protein, 14 aa, Homo sapiens
  CDR3 for beta chain variable domain of TCR clone 366487 (TRBV12-5, TRBJ2-5)
CAGGSRTHQETQYF

SEQ ID NO: 732975 - protein, 15 aa, Homo sapiens
  CDR3 for alpha chain variable domain of TCR clone 366488 (TRAV27, TRAJ38)
CAARRNAGNNRKLIW

SEQ ID NO: 732976 - protein, 13 aa, Homo sapiens
  CDR3 for beta chain variable domain of TCR clone 366488 (TRBV12-5, TRBJ2-3)
CASGDLQSDTQYF

SEQ ID NO: 732977 - protein, 14 aa, Homo sapiens
  CDR3 for alpha chain variable domain of TCR clone 366489 (TRAV17, TRAJ56)
CATVPAGANSKLTF

SEQ ID NO: 732978 - protein, 15 aa, Homo sapiens
  CDR3 for beta chain variable domain of TCR clone 366489 (TRBV6-6, TRBJ2-1)
CASSYLSGPRNEQFF

SEQ ID NO: 732979 - protein, 13 aa, Homo sapiens
  CDR3 for alpha chain variable domain of TCR clone 366490 (TRAV21, TRAJ27)
CAARPGNAGKSTF

SEQ ID NO: 732980 - protein, 16 aa, Homo sapiens
  CDR3 for beta chain variable domain of TCR clone 366490 (TRBV7-6, TRBJ2-2)
CASSLKRGTLSGELFF

SEQ ID NO: 732981 - protein, 11 aa, Homo sapiens
  CDR3 for alpha chain variable domain of TCR clone 366491 (TRAV1-2, TRAJ8)
CAVSSFQNLVF

SEQ ID NO: 732982 - protein, 17 aa, Homo sapiens
  CDR3 for beta chain variable domain of TCR clone 366491 (TRBV18, TRBJ2-1)
CASSKGLSGGADNEQFF

SEQ ID NO: 732983 - protein, 15 aa, Homo sapiens
  CDR3 for alpha chain variable domain of TCR clone 366492 (TRAV12-2, TRAJ8)
CAVREENTGFQKLVF

SEQ ID NO: 732984 - protein, 15 aa, Homo sapiens
  CDR3 for beta chain variable domain of TCR clone 366492 (TRBV28, TRBJ2-4)
CAAGSGTLLMGTQYF

SEQ ID NO: 732985 - protein, 11 aa, Homo sapiens
  CDR3 for alpha chain variable domain of TCR clone 366493 (TRAV17, TRAJ9)
CGFTGGFKTIF

SEQ ID NO: 732986 - protein, 16 aa, Homo sapiens
  CDR3 for beta chain variable domain of TCR clone 366493 (TRBV15, TRBJ2-3)
CATSRDLGIVTDTQYF

SEQ ID NO: 732987 - protein, 15 aa, Homo sapiens
  CDR3 for alpha chain variable domain of TCR clone 366494 (TRAV35, TRAJ40)
CAGQVGTSGTYKYIF

SEQ ID NO: 732988 - protein, 14 aa, Homo sapiens
  CDR3 for beta chain variable domain of TCR clone 366494 (TRBV7-3, TRBJ2-1)
CASSLAGGTNEQFF

SEQ ID NO: 732989 - protein, 12 aa, Homo sapiens
  CDR3 for alpha chain variable domain of TCR clone 366495 (TRAV25, TRAJ35)
CAGIGFGNVLHC

SEQ ID NO: 732990 - protein, 14 aa, Homo sapiens
  CDR3 for beta chain variable domain of TCR clone 366495 (TRBV7-2, TRBJ2-5)
CASSPRGSSETQYF

SEQ ID NO: 732991 - protein, 15 aa, Homo sapiens
  CDR3 for alpha chain variable domain of TCR clone 366496 (TRAV3, TRAJ22)
CAVRDRGGSARHLTF

SEQ ID NO: 732992 - protein, 15 aa, Homo sapiens
  CDR3 for beta chain variable domain of TCR clone 366496 (TRBV10-3, TRBJ2-3)
CAISLTSGGTDTQYF

SEQ ID NO: 732993 - protein, 12 aa, Homo sapiens
  CDR3 for alpha chain variable domain of TCR clone 366497 (TRAV17, TRAJ12)
CATLRSSYKLIC

SEQ ID NO: 732994 - protein, 16 aa, Homo sapiens
  CDR3 for beta chain variable domain of TCR clone 366497 (TRBV28, TRBJ2-7)
CASSLFFETGGTEQYF

SEQ ID NO: 732995 - protein, 14 aa, Homo sapiens
  CDR3 for alpha chain variable domain of TCR clone 366498 (TRAV8-3, TRAJ45)
CALNSGGGADGLTF

SEQ ID NO: 732996 - protein, 12 aa, Homo sapiens
  CDR3 for beta chain variable domain of TCR clone 366498 (TRBV7-3, TRBJ2-1)
CASSFINNEQFF

SEQ ID NO: 732997 - protein, 18 aa, Homo sapiens
  CDR3 for alpha chain variable domain of TCR clone 366499 (TRAV8-2, TRAJ41)
CVVSELRRTQIPGMHSTS

SEQ ID NO: 732998 - protein, 17 aa, Homo sapiens
  CDR3 for beta chain variable domain of TCR clone 366499 (TRBV7-3, TRBJ2-3)
CASSLMKRMRGAGTQYF

SEQ ID NO: 732999 - protein, 12 aa, Homo sapiens
  CDR3 for alpha chain variable domain of TCR clone 366500 (TRAV23/DV6, TRAJ3)
CAVRARQQCFQD

SEQ ID NO: 733000 - protein, 17 aa, Homo sapiens
  CDR3 for beta chain variable domain of TCR clone 366500 (TRBV7-9, TRBJ2-3)
CASSPTVAGDLTDTQYF

SEQ ID NO: 733001 - protein, 15 aa, Homo sapiens
  CDR3 for alpha chain variable domain of TCR clone 366501 (TRAV27, TRAJ38)
CAARRNAGNNRQLIW

SEQ ID NO: 733002 - protein, 14 aa, Homo sapiens
  CDR3 for beta chain variable domain of TCR clone 366501 (TRBV7-8, TRBJ2-3)
CASSLEAGTDTQYF

SEQ ID NO: 733003 - protein, 17 aa, Homo sapiens
  CDR3 for alpha chain variable domain of TCR clone 366502 (TRAV3, TRAJ28)
CAVRPLYSGAGSYQLTF

SEQ ID NO: 733004 - protein, 13 aa, Homo sapiens
  CDR3 for beta chain variable domain of TCR clone 366502 (TRBV7-2, TRBJ1-1)
CASSLTENTEAFF

SEQ ID NO: 733005 - protein, 13 aa, Homo sapiens
  CDR3 for alpha chain variable domain of TCR clone 366503 (TRAV12-1, TRAJ26)
CVVRRNYGQNFIF

SEQ ID NO: 733006 - protein, 14 aa, Homo sapiens
  CDR3 for beta chain variable domain of TCR clone 366503 (TRBV4-2, TRBJ2-1)
CASGLDRAYNEQFF

SEQ ID NO: 733007 - protein, 14 aa, Homo sapiens
  CDR3 for alpha chain variable domain of TCR clone 366504 (TRAV12-3, TRAJ29)
CAMILLSVNTPLVF

SEQ ID NO: 733008 - protein, 16 aa, Homo sapiens
  CDR3 for beta chain variable domain of TCR clone 366504 (TRBV28, TRBJ2-7)
CASSSGTSGRGYEQYF

SEQ ID NO: 733009 - protein, 15 aa, Homo sapiens
  CDR3 for alpha chain variable domain of TCR clone 366505 (TRAV27, TRAJ24)
CAGSMTTDSWGKLQF

SEQ ID NO: 733010 - protein, 15 aa, Homo sapiens
  CDR3 for beta chain variable domain of TCR clone 366505 (TRBV6-6, TRBJ1-5)
CASSSPRGQGQPQQF

SEQ ID NO: 733011 - protein, 14 aa, Homo sapiens
  CDR3 for alpha chain variable domain of TCR clone 366506 (TRAV20, TRAJ56)
CAVQFGGANSKLTF

SEQ ID NO: 733012 - protein, 16 aa, Homo sapiens
  CDR3 for beta chain variable domain of TCR clone 366506 (TRBV5-1, TRBJ2-1)
CASSIRSGGSYNEQFF

SEQ ID NO: 733013 - protein, 17 aa, Homo sapiens
  CDR3 for alpha chain variable domain of TCR clone 366507 (TRAV3, TRAJ6)
FAVSDGPRAGGSYIPTF

SEQ ID NO: 733014 - protein, 14 aa, Homo sapiens
  CDR3 for beta chain variable domain of TCR clone 366507 (TRBV7-2, TRBJ2-7)
CASSPKTSFYEQYF

SEQ ID NO: 733015 - protein, 13 aa, Homo sapiens
  CDR3 for alpha chain variable domain of TCR clone 366508 (TRAV17, TRAJ9)
CATDYTGGFKTIF

SEQ ID NO: 733016 - protein, 14 aa, Homo sapiens
  CDR3 for beta chain variable domain of TCR clone 366508 (TRBV19, TRBJ2-2)
PRSPGTGATGELFF

SEQ ID NO: 733017 - protein, 13 aa, Homo sapiens
  CDR3 for alpha chain variable domain of TCR clone 366509 (TRAV8-2, TRAJ15)
CVVSGPGRNCSDL

SEQ ID NO: 733018 - protein, 14 aa, Homo sapiens
  CDR3 for beta chain variable domain of TCR clone 366509 (TRBV11-2, TRBJ2-7)
CASSLGAGAYEQYF

SEQ ID NO: 733019 - protein, 15 aa, Homo sapiens
  CDR3 for alpha chain variable domain of TCR clone 366510 (TRAV2, TRAJ15)
CAVEDRGQAGTALIF

SEQ ID NO: 733020 - protein, 13 aa, Homo sapiens
  CDR3 for beta chain variable domain of TCR clone 366510 (TRBV10-2, TRBJ2-1)
RASGASGGYEQYF

SEQ ID NO: 733021 - protein, 13 aa, Homo sapiens
  CDR3 for alpha chain variable domain of TCR clone 366511 (TRAV13-1, TRAJ42)
CAASELWRKPRKS

SEQ ID NO: 733022 - protein, 15 aa, Homo sapiens
  CDR3 for beta chain variable domain of TCR clone 366511 (TRBV20-1, TRBJ2-1)
CGASSAGSSYNEQFF

SEQ ID NO: 733023 - protein, 14 aa, Homo sapiens
  CDR3 for alpha chain variable domain of TCR clone 366512 (TRAV12-1, TRAJ17)
CVVNYKAAGNQLTF

SEQ ID NO: 733024 - protein, 15 aa, Homo sapiens
  CDR3 for beta chain variable domain of TCR clone 366512 (TRBV20-1, TRBJ2-7)
CSARDRVSGMDEQYF

SEQ ID NO: 733025 - protein, 15 aa, Homo sapiens
  CDR3 for alpha chain variable domain of TCR clone 366513 (TRAV21, TRAJ40)
CAVRRQTSGTYKYIF

SEQ ID NO: 733026 - protein, 15 aa, Homo sapiens
  CDR3 for beta chain variable domain of TCR clone 366513 (TRBV5-1, TRBJ2-1)
CASSPPRAPYNEQFF

SEQ ID NO: 733027 - protein, 14 aa, Homo sapiens
  CDR3 for alpha chain variable domain of TCR clone 366514 (TRAV8-2, TRAJ4)
CVVSPSGGYNKLIF

SEQ ID NO: 733028 - protein, 14 aa, Homo sapiens
  CDR3 for beta chain variable domain of TCR clone 366514 (TRBV10-3, TRBJ2-7)
CAISDSGGDYEQYF

SEQ ID NO: 733029 - protein, 16 aa, Homo sapiens
  CDR3 for alpha chain variable domain of TCR clone 366515 (TRAV3, TRAJ10)
CAVRDMNAGGGNKLTF

SEQ ID NO: 733030 - protein, 16 aa, Homo sapiens
  CDR3 for beta chain variable domain of TCR clone 366515 (TRBV7-8, TRBJ2-6)
CQQRRDRGAGANVLTF

SEQ ID NO: 733031 - protein, 15 aa, Homo sapiens
  CDR3 for alpha chain variable domain of TCR clone 366516 (TRAV8-3, TRAJ45)
CASSYSGGGADGLTF

SEQ ID NO: 733032 - protein, 14 aa, Homo sapiens
  CDR3 for beta chain variable domain of TCR clone 366516 (TRBV12-4, TRBJ1-3)
CASTLTGAGNTIYF

SEQ ID NO: 733033 - protein, 16 aa, Homo sapiens
  CDR3 for alpha chain variable domain of TCR clone 366517 (TRAV3, TRAJ10)
CAVRDMRVGGGNKLTF

SEQ ID NO: 733034 - protein, 14 aa, Homo sapiens
  CDR3 for beta chain variable domain of TCR clone 366517 (TRBV7-2, TRBJ1-4)
CASSVVEGGEKLFF

SEQ ID NO: 733035 - protein, 13 aa, Homo sapiens
  CDR3 for alpha chain variable domain of TCR clone 366518 (TRAV12-1, TRAJ26)
SATYLYYGQNFVF

SEQ ID NO: 733036 - protein, 15 aa, Homo sapiens
  CDR3 for beta chain variable domain of TCR clone 366518 (TRBV5-1, TRBJ2-6)
CAISLDPSGANVLTF

SEQ ID NO: 733037 - protein, 11 aa, Homo sapiens
  CDR3 for alpha chain variable domain of TCR clone 366519 (TRAV17, TRAJ36)
CAPTGANNLFF

SEQ ID NO: 733038 - protein, 12 aa, Homo sapiens
  CDR3 for beta chain variable domain of TCR clone 366519 (TRBV29-1, TRBJ2-3)
CSVTGGADTQYL

SEQ ID NO: 733039 - protein, 11 aa, Homo sapiens
  CDR3 for alpha chain variable domain of TCR clone 366520 (TRAV1-1, TRAJ23)
CAVHQGRKLIF

SEQ ID NO: 733040 - protein, 20 aa, Homo sapiens
  CDR3 for beta chain variable domain of TCR clone 366520 (TRBV7-8, TRBJ2-2)
CASSHLFPGPTIHITGELFF

SEQ ID NO: 733041 - protein, 15 aa, Homo sapiens
  CDR3 for alpha chain variable domain of TCR clone 366521 (TRAV12-1, TRAJ44)
CVADLPTGPASKLTF

SEQ ID NO: 733042 - protein, 13 aa, Homo sapiens
  CDR3 for beta chain variable domain of TCR clone 366521 (TRBV6-5, TRBJ2-5)
CASSPQGGETRYF

SEQ ID NO: 733043 - protein, 14 aa, Homo sapiens
  CDR3 for alpha chain variable domain of TCR clone 366522 (TRAV12-2, TRAJ13)
CAVKKTGSYQKVTF

SEQ ID NO: 733044 - protein, 15 aa, Homo sapiens
  CDR3 for beta chain variable domain of TCR clone 366522 (TRBV6-1, TRBJ2-3)
CASSERGGITDTQYF

SEQ ID NO: 733045 - protein, 10 aa, Homo sapiens
  CDR3 for alpha chain variable domain of TCR clone 366523 (TRAV1-2, TRAJ20)
CSCNDYKLSF

SEQ ID NO: 733046 - protein, 16 aa, Homo sapiens
  CDR3 for beta chain variable domain of TCR clone 366523 (TRBV20-1, TRBJ2-1)
CSARDLKQGMNNEQFF

SEQ ID NO: 733047 - protein, 23 aa, Homo sapiens
  CDR3 for alpha chain variable domain of TCR clone 366524 (TRAV26-1, TRAJ38)
CIADNAGNNHIQNPDPAVYQLRD

SEQ ID NO: 733048 - protein, 17 aa, Homo sapiens
  CDR3 for beta chain variable domain of TCR clone 366524 (TRBV20-1, TRBJ2-1)
CSASSSGLAGSYNEQFF

SEQ ID NO: 733049 - protein, 16 aa, Homo sapiens
  CDR3 for alpha chain variable domain of TCR clone 366525 (TRAV3, TRAJ37)
CAVRPHGSGNTGKLIF

SEQ ID NO: 733050 - protein, 12 aa, Homo sapiens
  CDR3 for beta chain variable domain of TCR clone 366525 (TRBV14, TRBJ2-5)
CASSQLKETQYF

SEQ ID NO: 733051 - protein, 13 aa, Homo sapiens
  CDR3 for alpha chain variable domain of TCR clone 366526 (TRAV1-2, TRAJ9)
CAALNTGGFKTIF

SEQ ID NO: 733052 - protein, 13 aa, Homo sapiens
  CDR3 for beta chain variable domain of TCR clone 366526 (TRBV19, TRBJ1-2)
CASSVPGQDGNTV

SEQ ID NO: 733053 - protein, 12 aa, Homo sapiens
  CDR3 for alpha chain variable domain of TCR clone 366527 (TRAV3, TRAJ43)
CAVRDPNNDIRF

SEQ ID NO: 733054 - protein, 15 aa, Homo sapiens
  CDR3 for beta chain variable domain of TCR clone 366527 (TRBV20-1, TRBJ2-7)
CSARDRVSGMDEQYF

SEQ ID NO: 733055 - protein, 12 aa, Homo sapiens
  CDR3 for alpha chain variable domain of TCR clone 366528 (TRAV8-4, TRAJ43)
CAVSVNNNAMRF

SEQ ID NO: 733056 - protein, 14 aa, Homo sapiens
  CDR3 for beta chain variable domain of TCR clone 366528 (TRBV11-2, TRBJ1-2)
CASSLGTANYGYTF

SEQ ID NO: 733057 - protein, 13 aa, Homo sapiens
  CDR3 for alpha chain variable domain of TCR clone 366529 (TRAV16, TRAJ9)
CALSNTGGFKTIF

SEQ ID NO: 733058 - protein, 14 aa, Homo sapiens
  CDR3 for beta chain variable domain of TCR clone 366529 (TRBV5-1, TRBJ2-1)
CASSLEEPVYEQFF

SEQ ID NO: 733059 - protein, 10 aa, Homo sapiens
  CDR3 for alpha chain variable domain of TCR clone 366530 (TRAV8-6, TRAJ34)
CAVNTDKLVF

SEQ ID NO: 733060 - protein, 14 aa, Homo sapiens
  CDR3 for beta chain variable domain of TCR clone 366530 (TRBV3-1, TRBJ2-5)
CASSQGPDQETQYF

SEQ ID NO: 733061 - protein, 12 aa, Homo sapiens
  CDR3 for alpha chain variable domain of TCR clone 366531 (TRAV3, TRAJ27)
CAVRDKAGKSTF

SEQ ID NO: 733062 - protein, 14 aa, Homo sapiens
  CDR3 for beta chain variable domain of TCR clone 366531 (TRBV5-1, TRBJ1-2)
CASSVDSNNYGYTF

SEQ ID NO: 733063 - protein, 13 aa, Homo sapiens
  CDR3 for alpha chain variable domain of TCR clone 366532 (TRAV26-1, TRAJ34)
CIVRPCITDKLIF

SEQ ID NO: 733064 - protein, 14 aa, Homo sapiens
  CDR3 for beta chain variable domain of TCR clone 366532 (TRBV12-4, TRBJ1-4)
CASSRQGANEKPFF

SEQ ID NO: 733065 - protein, 11 aa, Homo sapiens
  CDR3 for alpha chain variable domain of TCR clone 366533 (TRAV9-2, TRAJ26)
CALRRPQNFVF

SEQ ID NO: 733066 - protein, 17 aa, Homo sapiens
  CDR3 for beta chain variable domain of TCR clone 366533 (TRBV28, TRBJ2-5)
CASSTPEGDALQETQYF

SEQ ID NO: 733067 - protein, 14 aa, Homo sapiens
  CDR3 for alpha chain variable domain of TCR clone 366534 (TRAV8-3, TRAJ4)
CAVGAAGGYNKLIF

SEQ ID NO: 733068 - protein, 14 aa, Homo sapiens
  CDR3 for beta chain variable domain of TCR clone 366534 (TRBV20-1, TRBJ1-1)
CSAQTQIGGTEAFF

SEQ ID NO: 733069 - protein, 12 aa, Homo sapiens
  CDR3 for alpha chain variable domain of TCR clone 366535 (TRAV12-2, TRAJ3)
CAVYSSASKIIF

SEQ ID NO: 733070 - protein, 15 aa, Homo sapiens
  CDR3 for beta chain variable domain of TCR clone 366535 (TRBV9, TRBJ1-6)
CASSVAGTGDSPLHF

SEQ ID NO: 733071 - protein, 14 aa, Homo sapiens
  CDR3 for alpha chain variable domain of TCR clone 366536 (TRAV26-1, TRAJ15)
CIEAGNQAGTALIF

SEQ ID NO: 733072 - protein, 14 aa, Homo sapiens
  CDR3 for beta chain variable domain of TCR clone 366536 (TRBV20-1, TRBJ1-1)
CSAQTRIGGTEAFF

SEQ ID NO: 733073 - protein, 14 aa, Homo sapiens
  CDR3 for alpha chain variable domain of TCR clone 366537 (TRAV13-1, TRAJ40)
CAARSTSGTYKYIF

SEQ ID NO: 733074 - protein, 14 aa, Homo sapiens
  CDR3 for beta chain variable domain of TCR clone 366537 (TRBV12-4, TRBJ1-1)
CASSLGTGGTEAFF

SEQ ID NO: 733075 - protein, 12 aa, Homo sapiens
  CDR3 for alpha chain variable domain of TCR clone 366538 (TRAV12-2, TRAJ7)
CAVMRGNNRLAF

SEQ ID NO: 733076 - protein, 17 aa, Homo sapiens
  CDR3 for beta chain variable domain of TCR clone 366538 (TRBV7-9, TRBJ2-3)
CASSPTLAGDLTDTQYF

SEQ ID NO: 733077 - protein, 12 aa, Homo sapiens
  CDR3 for alpha chain variable domain of TCR clone 366539 (TRAV12-1, TRAJ23)
CVVRNQGGKLIF

SEQ ID NO: 733078 - protein, 14 aa, Homo sapiens
  CDR3 for beta chain variable domain of TCR clone 366539 (TRBV11-2, TRBJ1-5)
CASSLDRGRQPQHF

SEQ ID NO: 733079 - protein, 14 aa, Homo sapiens
  CDR3 for alpha chain variable domain of TCR clone 366540 (TRAV17, TRAJ57)
CATDPQGGSGKLVF

SEQ ID NO: 733080 - protein, 18 aa, Homo sapiens
  CDR3 for beta chain variable domain of TCR clone 366540 (TRBV25-1, TRBJ2-1)
CASSESRAGGPGYKEQFF

SEQ ID NO: 733081 - protein, 10 aa, Homo sapiens
  CDR3 for alpha chain variable domain of TCR clone 366541 (TRAV23/DV6, TRAJ57)
CAASSTLSQG

SEQ ID NO: 733082 - protein, 14 aa, Homo sapiens
  CDR3 for beta chain variable domain of TCR clone 366541 (TRBV25-1, TRBJ1-1)
CASTHMGGNTEAFV

SEQ ID NO: 733083 - protein, 10 aa, Homo sapiens
  CDR3 for alpha chain variable domain of TCR clone 366542 (TRAV8-6, TRAJ34)
CAVNTDKLIF

SEQ ID NO: 733084 - protein, 16 aa, Homo sapiens
  CDR3 for beta chain variable domain of TCR clone 366542 (TRBV7-9, TRBJ1-2)
CASSPGGGAMNYGYTF

SEQ ID NO: 733085 - protein, 15 aa, Homo sapiens
  CDR3 for alpha chain variable domain of TCR clone 366543 (TRAV3, TRAJ11)
CAVRDRGSGYSTLTF

SEQ ID NO: 733086 - protein, 13 aa, Homo sapiens
  CDR3 for beta chain variable domain of TCR clone 366543 (TRBV7-9, TRBJ1-2)
CASSLKQNYGDTF

SEQ ID NO: 733087 - protein, 13 aa, Homo sapiens
  CDR3 for alpha chain variable domain of TCR clone 366544 (TRAV12-1, TRAJ26)
CVVRRNYGQNFVF

SEQ ID NO: 733088 - protein, 14 aa, Homo sapiens
  CDR3 for beta chain variable domain of TCR clone 366544 (TRBV7-8, TRBJ2-5)
CASSATGGQETQYF

SEQ ID NO: 733089 - protein, 14 aa, Homo sapiens
  CDR3 for alpha chain variable domain of TCR clone 366545 (TRAV14/DV4, TRAJ49)
CAMREGVNGNQFYF

SEQ ID NO: 733090 - protein, 14 aa, Homo sapiens
  CDR3 for beta chain variable domain of TCR clone 366545 (TRBV5-5, TRBJ2-7)
CASSLRLAVYEQYF

SEQ ID NO: 733091 - protein, 14 aa, Homo sapiens
  CDR3 for alpha chain variable domain of TCR clone 366546 (TRAV12-2, TRAJ17)
CAVLFKAAGNKLTF

SEQ ID NO: 733092 - protein, 13 aa, Homo sapiens
  CDR3 for beta chain variable domain of TCR clone 366546 (TRBV7-7, TRBJ2-2)
CASSLTSAGELFF

SEQ ID NO: 733093 - protein, 15 aa, Homo sapiens
  CDR3 for alpha chain variable domain of TCR clone 366547 (TRAV3, TRAJ4)
CAVRAGTGGYNKLLF

SEQ ID NO: 733094 - protein, 16 aa, Homo sapiens
  CDR3 for beta chain variable domain of TCR clone 366547 (TRBV27, TRBJ2-2)
CASSSSGVSNTGELFF

SEQ ID NO: 733095 - protein, 11 aa, Homo sapiens
  CDR3 for alpha chain variable domain of TCR clone 366548 (TRAV12-1, TRAJ43)
CVEYDNNDMRF

SEQ ID NO: 733096 - protein, 15 aa, Homo sapiens
  CDR3 for beta chain variable domain of TCR clone 366548 (TRBV24-1, TRBJ2-1)
CATSGSGGFYNEQFF

SEQ ID NO: 733097 - protein, 14 aa, Homo sapiens
  CDR3 for alpha chain variable domain of TCR clone 366549 (TRAV13-1, TRAJ45)
CAAIGRGGADGLTF

SEQ ID NO: 733098 - protein, 16 aa, Homo sapiens
  CDR3 for beta chain variable domain of TCR clone 366549 (TRBV7-2, TRBJ1-1)
CASSLGAGWTNTEAFY

SEQ ID NO: 733099 - protein, 12 aa, Homo sapiens
  CDR3 for alpha chain variable domain of TCR clone 366550 (TRAV17, TRAJ30)
CATDASDDKIIF

SEQ ID NO: 733100 - protein, 15 aa, Homo sapiens
  CDR3 for beta chain variable domain of TCR clone 366550 (TRBV4-1, TRBJ2-1)
CASSQGGELYNEQFF

SEQ ID NO: 733101 - protein, 14 aa, Homo sapiens
  CDR3 for alpha chain variable domain of TCR clone 366551 (TRAV17, TRAJ54)
CATDANQGAQKLVF

SEQ ID NO: 733102 - protein, 12 aa, Homo sapiens
  CDR3 for beta chain variable domain of TCR clone 366551 (TRBV6-3, TRBJ2-1)
CGSSGSYNEQFF

SEQ ID NO: 733103 - protein, 18 aa, Homo sapiens
  CDR3 for alpha chain variable domain of TCR clone 366552 (TRAV21, TRAJ52)
CAVRPSPAGGTSYGKLTF

SEQ ID NO: 733104 - protein, 17 aa, Homo sapiens
  CDR3 for beta chain variable domain of TCR clone 366552 (TRBV13, TRBJ2-3)
CASSLSRVAGGSNAQYF

SEQ ID NO: 733105 - protein, 15 aa, Homo sapiens
  CDR3 for alpha chain variable domain of TCR clone 366553 (TRAV38-1, TRAJ53)
CAFKNSGGSNYKLTF

SEQ ID NO: 733106 - protein, 14 aa, Homo sapiens
  CDR3 for beta chain variable domain of TCR clone 366553 (TRBV7-2, TRBJ2-7)
CASSPKTSFYEQYF

SEQ ID NO: 733107 - protein, 18 aa, Homo sapiens
  CDR3 for alpha chain variable domain of TCR clone 366554 (TRAV16, TRAJ52)
CALSGVDAGVTSYGKLTF

SEQ ID NO: 733108 - protein, 15 aa, Homo sapiens
  CDR3 for beta chain variable domain of TCR clone 366554 (TRBV11-3, TRBJ2-3)
CASSAGTVVTNTQYF

SEQ ID NO: 733109 - protein, 14 aa, Homo sapiens
  CDR3 for alpha chain variable domain of TCR clone 366555 (TRAV12-1, TRAJ17)
CVVNYKAAGNKLTF

SEQ ID NO: 733110 - protein, 13 aa, Homo sapiens
  CDR3 for beta chain variable domain of TCR clone 366555 (TRBV19, TRBJ2-2)
CASSIWSTGELFF

SEQ ID NO: 733111 - protein, 14 aa, Homo sapiens
  CDR3 for alpha chain variable domain of TCR clone 366556 (TRAV12-2, TRAJ15)
CAPHTGQAGTALIF

SEQ ID NO: 733112 - protein, 17 aa, Homo sapiens
  CDR3 for beta chain variable domain of TCR clone 366556 (TRBV5-5, TRBJ1-2)
CASSLGSLDGQSESYTF

SEQ ID NO: 733113 - protein, 13 aa, Homo sapiens
  CDR3 for alpha chain variable domain of TCR clone 366557 (TRAV12-3, TRAJ13)
CAMGTGGYQKVTF

SEQ ID NO: 733114 - protein, 14 aa, Homo sapiens
  CDR3 for beta chain variable domain of TCR clone 366557 (TRBV18, TRBJ2-7)
CASSPRGGAYEQYF

SEQ ID NO: 733115 - protein, 11 aa, Homo sapiens
  CDR3 for alpha chain variable domain of TCR clone 366558 (TRAV2, TRAJ13)
CASGGYQKVTF

SEQ ID NO: 733116 - protein, 13 aa, Homo sapiens
  CDR3 for beta chain variable domain of TCR clone 366558 (TRBV12-4, TRBJ1-2)
CASSLRQGKAYTF

SEQ ID NO: 733117 - protein, 14 aa, Homo sapiens
  CDR3 for alpha chain variable domain of TCR clone 366559 (TRAV26-2, TRAJ27)
CILRDLSDAGKSTF

SEQ ID NO: 733118 - protein, 15 aa, Homo sapiens
  CDR3 for beta chain variable domain of TCR clone 366559 (TRBV10-3, TRBJ2-7)
CATREQGLRSYEQYF

SEQ ID NO: 733119 - protein, 12 aa, Homo sapiens
  CDR3 for alpha chain variable domain of TCR clone 366560 (TRAV1-1, TRAJ39)
CAVPVVGNMLTF

SEQ ID NO: 733120 - protein, 13 aa, Homo sapiens
  CDR3 for beta chain variable domain of TCR clone 366560 (TRBV7-9, TRBJ1-2)
CASSLKQNYGYTF

SEQ ID NO: 733121 - protein, 15 aa, Homo sapiens
  CDR3 for alpha chain variable domain of TCR clone 366561 (TRAV2, TRAJ9)
CAVEDRGTGGFKTIF

SEQ ID NO: 733122 - protein, 16 aa, Homo sapiens
  CDR3 for beta chain variable domain of TCR clone 366561 (TRBV24-1, TRBJ2-3)
CATSEAGTGATDTQYF

SEQ ID NO: 733123 - protein, 15 aa, Homo sapiens
  CDR3 for alpha chain variable domain of TCR clone 366562 (TRAV8-3, TRAJ11)
CAVGLLNSGYSTLTF

SEQ ID NO: 733124 - protein, 13 aa, Homo sapiens
  CDR3 for beta chain variable domain of TCR clone 366562 (TRBV5-5, TRBJ1-2)
CASSFWRGEDYTF

SEQ ID NO: 733125 - protein, 13 aa, Homo sapiens
  CDR3 for alpha chain variable domain of TCR clone 366563 (TRAV8-6, TRAJ50)
CAVIKTSYDKGIF

SEQ ID NO: 733126 - protein, 15 aa, Homo sapiens
  CDR3 for beta chain variable domain of TCR clone 366563 (TRBV7-2, TRBJ2-2)
CASRRPGQNPGELFF

SEQ ID NO: 733127 - protein, 15 aa, Homo sapiens
  CDR3 for alpha chain variable domain of TCR clone 366564 (TRAV29/DV5, TRAJ24)
CAASGATASWGKFQF

SEQ ID NO: 733128 - protein, 12 aa, Homo sapiens
  CDR3 for beta chain variable domain of TCR clone 366564 (TRBV11-2, TRBJ2-2)
CASSLPTGELLF

SEQ ID NO: 733129 - protein, 14 aa, Homo sapiens
  CDR3 for alpha chain variable domain of TCR clone 366565 (TRAV1-2, TRAJ8)
CAVREDTGFQKLVF

SEQ ID NO: 733130 - protein, 13 aa, Homo sapiens
  CDR3 for beta chain variable domain of TCR clone 366565 (TRBV6-5, TRBJ2-6)
CASSTSGPLHLDF

SEQ ID NO: 733131 - protein, 15 aa, Homo sapiens
  CDR3 for alpha chain variable domain of TCR clone 366566 (TRAV26-1, TRAJ20)
CIVRVAGSNDYKLSF

SEQ ID NO: 733132 - protein, 16 aa, Homo sapiens
  CDR3 for beta chain variable domain of TCR clone 366566 (TRBV7-9, TRBJ2-3)
CASSLPRTSSTDTQYC

SEQ ID NO: 733133 - protein, 16 aa, Homo sapiens
  CDR3 for alpha chain variable domain of TCR clone 366567 (TRAV14/DV4, TRAJ54)
CAMREGRIQGAQKLVI

SEQ ID NO: 733134 - protein, 15 aa, Homo sapiens
  CDR3 for beta chain variable domain of TCR clone 366567 (TRBV3-1, TRBJ2-7)
CASSQEWTGSYEQYF

SEQ ID NO: 733135 - protein, 14 aa, Homo sapiens
  CDR3 for alpha chain variable domain of TCR clone 366568 (TRAV9-2, TRAJ39)
CALYIYNAGNMLTF

SEQ ID NO: 733136 - protein, 12 aa, Homo sapiens
  CDR3 for beta chain variable domain of TCR clone 366568 (TRBV3-1, TRBJ2-2)
CASSLFPGELFF

SEQ ID NO: 733137 - protein, 17 aa, Homo sapiens
  CDR3 for alpha chain variable domain of TCR clone 366569 (TRAV4, TRAJ42)
CLVGVLNYGGSLGNLIF

SEQ ID NO: 733138 - protein, 12 aa, Homo sapiens
  CDR3 for beta chain variable domain of TCR clone 366569 (TRBV20-1, TRBJ2-1)
CSAQYTYNEQFF

SEQ ID NO: 733139 - protein, 14 aa, Homo sapiens
  CDR3 for alpha chain variable domain of TCR clone 366570 (TRAV23/DV6, TRAJ13)
CSLAGGGGYRKVTF

SEQ ID NO: 733140 - protein, 17 aa, Homo sapiens
  CDR3 for beta chain variable domain of TCR clone 366570 (TRBV19, TRBJ2-7)
CASSISFYDSYPYEQYF

SEQ ID NO: 733141 - protein, 12 aa, Homo sapiens
  CDR3 for alpha chain variable domain of TCR clone 366571 (TRAV13-2, TRAJ13)
CRDGGGLPEVTF

SEQ ID NO: 733142 - protein, 13 aa, Homo sapiens
  CDR3 for beta chain variable domain of TCR clone 366571 (TRBV20-1, TRBJ2-2)
CSASAAGTGELFF

SEQ ID NO: 733143 - protein, 17 aa, Homo sapiens
  CDR3 for alpha chain variable domain of TCR clone 366572 (TRAV8-6, TRAJ58)
CAVSSWVGETSGSRLTF

SEQ ID NO: 733144 - protein, 15 aa, Homo sapiens
  CDR3 for beta chain variable domain of TCR clone 366572 (TRBV20-1, TRBJ2-7)
CSARDRVSGMDEQYL

SEQ ID NO: 733145 - protein, 12 aa, Homo sapiens
  CDR3 for alpha chain variable domain of TCR clone 366573 (TRAV13-2, TRAJ23)
CSERHRGGKLIF

SEQ ID NO: 733146 - protein, 16 aa, Homo sapiens
  CDR3 for beta chain variable domain of TCR clone 366573 (TRBV7-2, TRBJ2-6)
CAILGGVSSGANVLTF

SEQ ID NO: 733147 - protein, 15 aa, Homo sapiens
  CDR3 for alpha chain variable domain of TCR clone 366574 (TRAV14/DV4, TRAJ10)
CAMRELTGGGNKLTF

SEQ ID NO: 733148 - protein, 17 aa, Homo sapiens
  CDR3 for beta chain variable domain of TCR clone 366574 (TRBV15, TRBJ1-2)
CATSGREIDVVNYGYIF

SEQ ID NO: 733149 - protein, 18 aa, Homo sapiens
  CDR3 for alpha chain variable domain of TCR clone 366575 (TRAV21, TRAJ52)
CAVRPSPAGGTIYGKLTF

SEQ ID NO: 733150 - protein, 14 aa, Homo sapiens
  CDR3 for beta chain variable domain of TCR clone 366575 (TRBV12-4, TRBJ2-3)
CASSGQGSTDTQYF

SEQ ID NO: 733151 - protein, 14 aa, Homo sapiens
  CDR3 for alpha chain variable domain of TCR clone 366576 (TRAV2, TRAJ9)
CAVEDRSGGFKTIF

SEQ ID NO: 733152 - protein, 18 aa, Homo sapiens
  CDR3 for beta chain variable domain of TCR clone 366576 (TRBV7-3, TRBJ2-5)
CASSCRGGGDPVLRARHA

SEQ ID NO: 733153 - protein, 16 aa, Homo sapiens
  CDR3 for alpha chain variable domain of TCR clone 366577 (TRAV17, TRAJ52)
CATSIAGGTSYGKLTF

SEQ ID NO: 733154 - protein, 13 aa, Homo sapiens
  CDR3 for beta chain variable domain of TCR clone 366577 (TRBV27, TRBJ1-6)
CASSLVLVSPLHF

SEQ ID NO: 733155 - protein, 14 aa, Homo sapiens
  CDR3 for alpha chain variable domain of TCR clone 366578 (TRAV38-1, TRAJ40)
CALRPTSRTYKYIF

SEQ ID NO: 733156 - protein, 14 aa, Homo sapiens
  CDR3 for beta chain variable domain of TCR clone 366578 (TRBV19, TRBJ2-1)
CASPTFVLSGEQFF

SEQ ID NO: 733157 - protein, 14 aa, Homo sapiens
  CDR3 for alpha chain variable domain of TCR clone 366579 (TRAV12-2, TRAJ13)
CAVKKTGGYQKVTF

SEQ ID NO: 733158 - protein, 17 aa, Homo sapiens
  CDR3 for beta chain variable domain of TCR clone 366579 (TRBV4-1, TRBJ2-3)
CASSRGYVSGGTDTQYF

SEQ ID NO: 733159 - protein, 14 aa, Homo sapiens
  CDR3 for alpha chain variable domain of TCR clone 366580 (TRAV29/DV5, TRAJ56)
CAATFTGANSKLPF

SEQ ID NO: 733160 - protein, 14 aa, Homo sapiens
  CDR3 for beta chain variable domain of TCR clone 366580 (TRBV28, TRBJ1-1)
CASSFLRENTEAFF

SEQ ID NO: 733161 - protein, 16 aa, Homo sapiens
  CDR3 for alpha chain variable domain of TCR clone 366581 (TRAV23/DV6, TRAJ9)
CAASIGGNTGGFKTIF

SEQ ID NO: 733162 - protein, 14 aa, Homo sapiens
  CDR3 for beta chain variable domain of TCR clone 366581 (TRBV12-4, TRBJ2-3)
CASSGQGSTDTQYF

SEQ ID NO: 733163 - protein, 15 aa, Homo sapiens
  CDR3 for alpha chain variable domain of TCR clone 366582 (TRAV27, TRAJ38)
CAARRNAGNNRKLIW

SEQ ID NO: 733164 - protein, 17 aa, Homo sapiens
  CDR3 for beta chain variable domain of TCR clone 366582 (TRBV18, TRBJ2-6)
CASSPDRGVGGANVLTF

SEQ ID NO: 733165 - protein, 13 aa, Homo sapiens
  CDR3 for alpha chain variable domain of TCR clone 366583 (TRAV12-2, TRAJ20)
CAVNRFDDYKLSF

SEQ ID NO: 733166 - protein, 13 aa, Homo sapiens
  CDR3 for beta chain variable domain of TCR clone 366583 (TRBV5-5, TRBJ1-2)
CASSFWRGEDYTF

SEQ ID NO: 733167 - protein, 13 aa, Homo sapiens
  CDR3 for alpha chain variable domain of TCR clone 366584 (TRAV12-2, TRAJ52)
CAVSGTSHGKLTF

SEQ ID NO: 733168 - protein, 17 aa, Homo sapiens
  CDR3 for beta chain variable domain of TCR clone 366584 (TRBV11-2, TRBJ2-1)
CASSLYPPGVEYNEQFF

SEQ ID NO: 733169 - protein, 13 aa, Homo sapiens
  CDR3 for alpha chain variable domain of TCR clone 366585 (TRAV26-2, TRAJ43)
CILRAVNNNDMRF

SEQ ID NO: 733170 - protein, 22 aa, Homo sapiens
  CDR3 for beta chain variable domain of TCR clone 366585 (TRBV7-2, TRBJ2-1)
RRTRPCISVPAPTGQGSNEQFF

SEQ ID NO: 733171 - protein, 14 aa, Homo sapiens
  CDR3 for alpha chain variable domain of TCR clone 366586 (TRAV12-2, TRAJ13)
CAVKETGGYQKVTF

SEQ ID NO: 733172 - protein, 13 aa, Homo sapiens
  CDR3 for beta chain variable domain of TCR clone 366586 (TRBV4-2, TRBJ1-1)
CASSQAGNTEAFF

SEQ ID NO: 733173 - protein, 11 aa, Homo sapiens
  CDR3 for alpha chain variable domain of TCR clone 366587 (TRAV26-1, TRAJ37)
CIVRVGRKLIF

SEQ ID NO: 733174 - protein, 13 aa, Homo sapiens
  CDR3 for beta chain variable domain of TCR clone 366587 (TRBV14, TRBJ1-2)
CASSEDRRDGYTF

SEQ ID NO: 733175 - protein, 18 aa, Homo sapiens
  CDR3 for alpha chain variable domain of TCR clone 366588 (TRAV21, TRAJ52)
CAVRPSPAGGTSYGKLTF

SEQ ID NO: 733176 - protein, 13 aa, Homo sapiens
  CDR3 for beta chain variable domain of TCR clone 366588 (TRBV19, TRBJ2-3)
CATWDKITDTQYF

SEQ ID NO: 733177 - protein, 14 aa, Homo sapiens
  CDR3 for alpha chain variable domain of TCR clone 366589 (TRAV2, TRAJ37)
CAVDFTSNTGKLIF

SEQ ID NO: 733178 - protein, 12 aa, Homo sapiens
  CDR3 for beta chain variable domain of TCR clone 366589 (TRBV7-6, TRBJ2-7)
CASSLADSEQYF

SEQ ID NO: 733179 - protein, 16 aa, Homo sapiens
  CDR3 for alpha chain variable domain of TCR clone 366590 (TRAV12-1, TRAJ45)
CVVIRYSGGGADGLTF

SEQ ID NO: 733180 - protein, 12 aa, Homo sapiens
  CDR3 for beta chain variable domain of TCR clone 366590 (TRBV6-5, TRBJ2-2)
CASRQITEELFF

SEQ ID NO: 733181 - protein, 16 aa, Homo sapiens
  CDR3 for alpha chain variable domain of TCR clone 366591 (TRAV38-1, TRAJ32)
CAFMPFLGGATTKLIF

SEQ ID NO: 733182 - protein, 13 aa, Homo sapiens
  CDR3 for beta chain variable domain of TCR clone 366591 (TRBV7-9, TRBJ2-7)
CASSFAGAYEQYF

SEQ ID NO: 733183 - protein, 12 aa, Homo sapiens
  CDR3 for alpha chain variable domain of TCR clone 366592 (TRAV27, TRAJ9)
CAGESGGFKIIF

SEQ ID NO: 733184 - protein, 18 aa, Homo sapiens
  CDR3 for beta chain variable domain of TCR clone 366592 (TRBV10-2, TRBJ2-2)
CISAPAVHRQADAGELFF

SEQ ID NO: 733185 - protein, 13 aa, Homo sapiens
  CDR3 for alpha chain variable domain of TCR clone 366593 (TRAV26-1, TRAJ48)
CIVRVVGDEKLTF

SEQ ID NO: 733186 - protein, 16 aa, Homo sapiens
  CDR3 for beta chain variable domain of TCR clone 366593 (TRBV2, TRBJ2-1)
CASSVGGSLSYNEQFF

SEQ ID NO: 733187 - protein, 14 aa, Homo sapiens
  CDR3 for alpha chain variable domain of TCR clone 366594 (TRAV26-1, TRAJ38)
CIADNAGNNRKLIW

SEQ ID NO: 733188 - protein, 17 aa, Homo sapiens
  CDR3 for beta chain variable domain of TCR clone 366594 (TRBV7-6, TRBJ2-5)
CASSSPQAGDPSETQYF

SEQ ID NO: 733189 - protein, 16 aa, Homo sapiens
  CDR3 for alpha chain variable domain of TCR clone 366595 (TRAV16, TRAJ57)
CAPYLITQGGSEELVF

SEQ ID NO: 733190 - protein, 17 aa, Homo sapiens
  CDR3 for beta chain variable domain of TCR clone 366595 (TRBV28, TRBJ2-5)
CASSTPEGDALQETQYF

SEQ ID NO: 733191 - protein, 11 aa, Homo sapiens
  CDR3 for alpha chain variable domain of TCR clone 366596 (TRAV1-2, TRAJ20)
CAVANDYKLSF

SEQ ID NO: 733192 - protein, 14 aa, Homo sapiens
  CDR3 for beta chain variable domain of TCR clone 366596 (TRBV20-1, TRBJ1-1)
CSAMGGTANTEAFF

SEQ ID NO: 733193 - protein, 14 aa, Homo sapiens
  CDR3 for alpha chain variable domain of TCR clone 366597 (TRAV8-3, TRAJ9)
CAVVYNTGGFKTIF

SEQ ID NO: 733194 - protein, 14 aa, Homo sapiens
  CDR3 for beta chain variable domain of TCR clone 366597 (TRBV7-3, TRBJ2-2)
CGSSSGGYTGELFF

SEQ ID NO: 733195 - protein, 15 aa, Homo sapiens
  CDR3 for alpha chain variable domain of TCR clone 366598 (TRAV8-2, TRAJ40)
CVVLGTTSGTYKYIF

SEQ ID NO: 733196 - protein, 16 aa, Homo sapiens
  CDR3 for beta chain variable domain of TCR clone 366598 (TRBV7-3, TRBJ2-1)
CASSLEGYHSYNEQFF

SEQ ID NO: 733197 - protein, 23 aa, Homo sapiens
  CDR3 for alpha chain variable domain of TCR clone 366599 (TRAV26-1, TRAJ38)
CIADNAGNNHIQNPDPAVYQLRD

SEQ ID NO: 733198 - protein, 15 aa, Homo sapiens
  CDR3 for beta chain variable domain of TCR clone 366599 (TRBV6-5, TRBJ1-6)
CASSLGQGFRSPLHF

SEQ ID NO: 733199 - protein, 14 aa, Homo sapiens
  CDR3 for alpha chain variable domain of TCR clone 366600 (TRAV2, TRAJ9)
CAVEDRSGGFKTIF

SEQ ID NO: 733200 - protein, 15 aa, Homo sapiens
  CDR3 for beta chain variable domain of TCR clone 366600 (TRBV2, TRBJ1-2)
CASSESRTVNYGYTF

SEQ ID NO: 733201 - protein, 17 aa, Homo sapiens
  CDR3 for alpha chain variable domain of TCR clone 366601 (TRAV3, TRAJ42)
CAVRDRDYGGSRGNLIF

SEQ ID NO: 733202 - protein, 15 aa, Homo sapiens
  CDR3 for beta chain variable domain of TCR clone 366601 (TRBV5-1, TRBJ2-1)
CASSPPRAPYNEQFF

SEQ ID NO: 733203 - protein, 13 aa, Homo sapiens
  CDR3 for alpha chain variable domain of TCR clone 366602 (TRAV17, TRAJ4)
CATKSGGYNKLIF

SEQ ID NO: 733204 - protein, 17 aa, Homo sapiens
  CDR3 for beta chain variable domain of TCR clone 366602 (TRBV13, TRBJ2-7)
CASSLKPGASGTYEQYF

SEQ ID NO: 733205 - protein, 11 aa, Homo sapiens
  CDR3 for alpha chain variable domain of TCR clone 366603 (TRAV38-2/DV8, TRAJ24)
CALDSRGKFQF

SEQ ID NO: 733206 - protein, 14 aa, Homo sapiens
  CDR3 for beta chain variable domain of TCR clone 366603 (TRBV25-1, TRBJ2-1)
CASSPRGPYNEQFF

SEQ ID NO: 733207 - protein, 14 aa, Homo sapiens
  CDR3 for alpha chain variable domain of TCR clone 366604 (TRAV21, TRAJ58)
CAVRRGRSGSRVTF

SEQ ID NO: 733208 - protein, 13 aa, Homo sapiens
  CDR3 for beta chain variable domain of TCR clone 366604 (TRBV7-2, TRBJ1-6)
CASSLKFDSPLHF

SEQ ID NO: 733209 - protein, 14 aa, Homo sapiens
  CDR3 for alpha chain variable domain of TCR clone 366605 (TRAV12-2, TRAJ13)
CAVKKTGGYQKVTF

SEQ ID NO: 733210 - protein, 13 aa, Homo sapiens
  CDR3 for beta chain variable domain of TCR clone 366605 (TRBV11-2, TRBJ2-5)
CASSLSSQETQYF

SEQ ID NO: 733211 - protein, 14 aa, Homo sapiens
  CDR3 for alpha chain variable domain of TCR clone 366606 (TRAV26-1, TRAJ39)
CIVRVARNAGNMLT

SEQ ID NO: 733212 - protein, 16 aa, Homo sapiens
  CDR3 for beta chain variable domain of TCR clone 366606 (TRBV5-1, TRBJ2-1)
CASSLTLAGGRNEQFF

SEQ ID NO: 733213 - protein, 12 aa, Homo sapiens
  CDR3 for alpha chain variable domain of TCR clone 366607 (TRAV30, TRAJ43)
CGTEERGNDMRS

SEQ ID NO: 733214 - protein, 12 aa, Homo sapiens
  CDR3 for beta chain variable domain of TCR clone 366607 (TRBV11-2, TRBJ2-2)
CASSVPTGELFF

SEQ ID NO: 733215 - protein, 13 aa, Homo sapiens
  CDR3 for alpha chain variable domain of TCR clone 366608 (TRAV26-2, TRAJ43)
CILRAGNNNDMRF

SEQ ID NO: 733216 - protein, 14 aa, Homo sapiens
  CDR3 for beta chain variable domain of TCR clone 366608 (TRBV7-2, TRBJ2-1)
CQHHGTGIYNEQFF

SEQ ID NO: 733217 - protein, 13 aa, Homo sapiens
  CDR3 for alpha chain variable domain of TCR clone 366609 (TRAV23/DV6, TRAJ34)
CAAIEINTDKLIF

SEQ ID NO: 733218 - protein, 13 aa, Homo sapiens
  CDR3 for beta chain variable domain of TCR clone 366609 (TRBV29-1, TRBJ2-7)
CSVGPSGGYEQYF

SEQ ID NO: 733219 - protein, 16 aa, Homo sapiens
  CDR3 for alpha chain variable domain of TCR clone 366610 (TRAV35, TRAJ28)
CAGQEYSEAGSYQLTF

SEQ ID NO: 733220 - protein, 16 aa, Homo sapiens
  CDR3 for beta chain variable domain of TCR clone 366610 (TRBV7-3, TRBJ2-2)
CASSLKRGTLSGELFF

SEQ ID NO: 733221 - protein, 13 aa, Homo sapiens
  CDR3 for alpha chain variable domain of TCR clone 366611 (TRAV2, TRAJ40)
CALVTSGTYKYIF

SEQ ID NO: 733222 - protein, 16 aa, Homo sapiens
  CDR3 for beta chain variable domain of TCR clone 366611 (TRBV7-3, TRBJ2-1)
CASSLEGYRSYNEQFF

SEQ ID NO: 733223 - protein, 13 aa, Homo sapiens
  CDR3 for alpha chain variable domain of TCR clone 366612 (TRAV21, TRAJ27)
CAARPGNVGKSTF

SEQ ID NO: 733224 - protein, 15 aa, Homo sapiens
  CDR3 for beta chain variable domain of TCR clone 366612 (TRBV20-1, TRBJ2-7)
CSARDRVSGMDEQYF

SEQ ID NO: 733225 - protein, 14 aa, Homo sapiens
  CDR3 for alpha chain variable domain of TCR clone 366613 (TRAV13-1, TRAJ40)
CAASMTSGTYKYIF

SEQ ID NO: 733226 - protein, 15 aa, Homo sapiens
  CDR3 for beta chain variable domain of TCR clone 366613 (TRBV7-3, TRBJ2-1)
CTSSPTGGGEVEQFF

SEQ ID NO: 733227 - protein, 14 aa, Homo sapiens
  CDR3 for alpha chain variable domain of TCR clone 366614 (TRAV8-3, TRAJ4)
CAVGASGGYNKLIF

SEQ ID NO: 733228 - protein, 13 aa, Homo sapiens
  CDR3 for beta chain variable domain of TCR clone 366614 (TRBV18, TRBJ2-5)
CASLLQGQETQYF

SEQ ID NO: 733229 - protein, 14 aa, Homo sapiens
  CDR3 for alpha chain variable domain of TCR clone 366615 (TRAV12-2, TRAJ13)
CAVKMTGGYQKVTF

SEQ ID NO: 733230 - protein, 15 aa, Homo sapiens
  CDR3 for beta chain variable domain of TCR clone 366615 (TRBV27, TRBJ2-1)
CASSNGGGSSNEQFF

SEQ ID NO: 733231 - protein, 13 aa, Homo sapiens
  CDR3 for alpha chain variable domain of TCR clone 366616 (TRAV13-1, TRAJ39)
CSKYSNAGNMLTF

SEQ ID NO: 733232 - protein, 16 aa, Homo sapiens
  CDR3 for beta chain variable domain of TCR clone 366616 (TRBV20-1, TRBJ1-4)
CSAPGQCLLTNEKLFF

SEQ ID NO: 733233 - protein, 12 aa, Homo sapiens
  CDR3 for alpha chain variable domain of TCR clone 366617 (TRAV12-2, TRAJ31)
CAVNTPDARLLF

SEQ ID NO: 733234 - protein, 15 aa, Homo sapiens
  CDR3 for beta chain variable domain of TCR clone 366617 (TRBV4-2, TRBJ1-1)
CASSQDQGLNTEAFF

SEQ ID NO: 733235 - protein, 16 aa, Homo sapiens
  CDR3 for alpha chain variable domain of TCR clone 366618 (TRAV29/DV5, TRAJ30)
QCTSVQQANRDDKNIF

SEQ ID NO: 733236 - protein, 13 aa, Homo sapiens
  CDR3 for beta chain variable domain of TCR clone 366618 (TRBV12-5, TRBJ2-3)
CASQNRGTDTQYF

SEQ ID NO: 733237 - protein, 11 aa, Homo sapiens
  CDR3 for alpha chain variable domain of TCR clone 366619 (TRAV12-2, TRAJ49)
CAVTGGNQFYF

SEQ ID NO: 733238 - protein, 16 aa, Homo sapiens
  CDR3 for beta chain variable domain of TCR clone 366619 (TRBV19, TRBJ1-2)
CASSIGSNREGYGYTF

SEQ ID NO: 733239 - protein, 14 aa, Homo sapiens
  CDR3 for alpha chain variable domain of TCR clone 366620 (TRAV8-6, TRAJ35)
CAVSDPGFGNVLHC

SEQ ID NO: 733240 - protein, 15 aa, Homo sapiens
  CDR3 for beta chain variable domain of TCR clone 366620 (TRBV7-9, TRBJ1-6)
CASSSPGRGNSPLHF

SEQ ID NO: 733241 - protein, 13 aa, Homo sapiens
  CDR3 for alpha chain variable domain of TCR clone 366621 (TRAV13-1, TRAJ5)
CAARVTGRRALTF

SEQ ID NO: 733242 - protein, 15 aa, Homo sapiens
  CDR3 for beta chain variable domain of TCR clone 366621 (TRBV28, TRBJ2-5)
CASSPGGRGFYEQYF

SEQ ID NO: 733243 - protein, 15 aa, Homo sapiens
  CDR3 for alpha chain variable domain of TCR clone 366622 (TRAV8-3, TRAJ15)
CAVGAPKQAGTALIF

SEQ ID NO: 733244 - protein, 14 aa, Homo sapiens
  CDR3 for beta chain variable domain of TCR clone 366622 (TRBV20-1, TRBJ2-1)
CSPNDEASYNEQFF

SEQ ID NO: 733245 - protein, 16 aa, Homo sapiens
  CDR3 for alpha chain variable domain of TCR clone 366623 (TRAV8-3, TRAJ44)
CAVGTLMTGTASKPTF

SEQ ID NO: 733246 - protein, 13 aa, Homo sapiens
  CDR3 for beta chain variable domain of TCR clone 366623 (TRBV11-2, TRBJ2-1)
CASSLRLTHEQFF

SEQ ID NO: 733247 - protein, 10 aa, Homo sapiens
  CDR3 for alpha chain variable domain of TCR clone 366624 (TRAV8-4, TRAJ43)
CAGRADDMRF

SEQ ID NO: 733248 - protein, 15 aa, Homo sapiens
  CDR3 for beta chain variable domain of TCR clone 366624 (TRBV5-1, TRBJ2-3)
CASSVTSGSTDTQYF

SEQ ID NO: 733249 - protein, 12 aa, Homo sapiens
  CDR3 for alpha chain variable domain of TCR clone 366625 (TRAV3, TRAJ31)
CAVRPRGPRLTF

SEQ ID NO: 733250 - protein, 17 aa, Homo sapiens
  CDR3 for beta chain variable domain of TCR clone 366625 (TRBV7-9, TRBJ1-5)
CASSASQGGYSNQPQHF

SEQ ID NO: 733251 - protein, 21 aa, Homo sapiens
  CDR3 for alpha chain variable domain of TCR clone 366626 (TRAV17, TRAJ30)
CAARRTEMTRSSLEKGHDFIF

SEQ ID NO: 733252 - protein, 14 aa, Homo sapiens
  CDR3 for beta chain variable domain of TCR clone 366626 (TRBV25-1, TRBJ1-1)
CASTHLGGNTEAFF

SEQ ID NO: 733253 - protein, 14 aa, Homo sapiens
  CDR3 for alpha chain variable domain of TCR clone 366627 (TRAV26-2, TRAJ31)
CILIPGNNNARLMF

SEQ ID NO: 733254 - protein, 16 aa, Homo sapiens
  CDR3 for beta chain variable domain of TCR clone 366627 (TRBV7-3, TRBJ2-1)
CASSLVRGSSNNEQFF

SEQ ID NO: 733255 - protein, 14 aa, Homo sapiens
  CDR3 for alpha chain variable domain of TCR clone 366628 (TRAV12-3, TRAJ12)
CAMSEVDSSYKLIF

SEQ ID NO: 733256 - protein, 12 aa, Homo sapiens
  CDR3 for beta chain variable domain of TCR clone 366628 (TRBV18, TRBJ1-4)
RASSPSRENLFF

SEQ ID NO: 733257 - protein, 15 aa, Homo sapiens
  CDR3 for alpha chain variable domain of TCR clone 366629 (TRAV1-1, TRAJ4)
CAVRAFSGGYNKLIF

SEQ ID NO: 733258 - protein, 16 aa, Homo sapiens
  CDR3 for beta chain variable domain of TCR clone 366629 (TRBV7-2, TRBJ2-6)
CAILSVVSSGANVLTF

SEQ ID NO: 733259 - protein, 14 aa, Homo sapiens
  CDR3 for alpha chain variable domain of TCR clone 366630 (TRAV12-2, TRAJ13)
CAVKKTGGYQKVNF

SEQ ID NO: 733260 - protein, 15 aa, Homo sapiens
  CDR3 for beta chain variable domain of TCR clone 366630 (TRBV27, TRBJ2-1)
YASSNGGGSSNEQFF

SEQ ID NO: 733261 - protein, 15 aa, Homo sapiens
  CDR3 for alpha chain variable domain of TCR clone 366631 (TRAV8-3, TRAJ23)
CAVGDRYNQGGKLVF

SEQ ID NO: 733262 - protein, 22 aa, Homo sapiens
  CDR3 for beta chain variable domain of TCR clone 366631 (TRBV29-1, TRBJ2-5)
TVSNMSPEDSSIYLCSAGTQYF

SEQ ID NO: 733263 - protein, 11 aa, Homo sapiens
  CDR3 for alpha chain variable domain of TCR clone 366632 (TRAV12-3, TRAJ27)
CAMANAGKSTV

SEQ ID NO: 733264 - protein, 12 aa, Homo sapiens
  CDR3 for beta chain variable domain of TCR clone 366632 (TRBV12-4, TRBJ2-7)
CASSLGGYEQYF

SEQ ID NO: 733265 - protein, 18 aa, Homo sapiens
  CDR3 for alpha chain variable domain of TCR clone 366633 (TRAV26-1, TRAJ52)
CIVRVAGADGTSYGKLTF

SEQ ID NO: 733266 - protein, 13 aa, Homo sapiens
  CDR3 for beta chain variable domain of TCR clone 366633 (TRBV7-8, TRBJ1-2)
CASSAQSYYGYTF

SEQ ID NO: 733267 - protein, 16 aa, Homo sapiens
  CDR3 for alpha chain variable domain of TCR clone 366634 (TRAV12-1, TRAJ48)
CVVNMVSNFGNEKLTF

SEQ ID NO: 733268 - protein, 18 aa, Homo sapiens
  CDR3 for beta chain variable domain of TCR clone 366634 (TRBV11-2, TRBJ2-6)
CASSLSPFLGSGANVLTF

SEQ ID NO: 733269 - protein, 16 aa, Homo sapiens
  CDR3 for alpha chain variable domain of TCR clone 366635 (TRAV35, TRAJ37)
CWAFLRGSSNTGKLIF

SEQ ID NO: 733270 - protein, 13 aa, Homo sapiens
  CDR3 for beta chain variable domain of TCR clone 366635 (TRBV2, TRBJ1-2)
CASSLKQNYGYTF

SEQ ID NO: 733271 - protein, 14 aa, Homo sapiens
  CDR3 for alpha chain variable domain of TCR clone 366636 (TRAV12-2, TRAJ17)
CAVLFKAAGHKLTF

SEQ ID NO: 733272 - protein, 17 aa, Homo sapiens
  CDR3 for beta chain variable domain of TCR clone 366636 (TRBV20-1, TRBJ2-2)
RSASGSGQGGLTGELFF

SEQ ID NO: 733273 - protein, 13 aa, Homo sapiens
  CDR3 for alpha chain variable domain of TCR clone 366637 (TRAV23/DV6, TRAJ24)
CAASTDSWGKFQF

SEQ ID NO: 733274 - protein, 16 aa, Homo sapiens
  CDR3 for beta chain variable domain of TCR clone 366637 (TRBV29-1, TRBJ2-7)
CSVEVVGTSGSYEQYF

SEQ ID NO: 733275 - protein, 15 aa, Homo sapiens
  CDR3 for alpha chain variable domain of TCR clone 366638 (TRAV8-1, TRAJ6)
CAVNTAPRRKLHTYI

SEQ ID NO: 733276 - protein, 14 aa, Homo sapiens
  CDR3 for beta chain variable domain of TCR clone 366638 (TRBV12-4, TRBJ2-1)
CASSLGQGASEQFF

SEQ ID NO: 733277 - protein, 13 aa, Homo sapiens
  CDR3 for alpha chain variable domain of TCR clone 366639 (TRAV8-4, TRAJ48)
CAVSLFGNEKLTF

SEQ ID NO: 733278 - protein, 15 aa, Homo sapiens
  CDR3 for beta chain variable domain of TCR clone 366639 (TRBV20-1, TRBJ2-7)
CSARKRLAESYEQYF

SEQ ID NO: 733279 - protein, 15 aa, Homo sapiens
  CDR3 for alpha chain variable domain of TCR clone 366640 (TRAV12-1, TRAJ44)
CVADLPTGTASKLTF

SEQ ID NO: 733280 - protein, 14 aa, Homo sapiens
  CDR3 for beta chain variable domain of TCR clone 366640 (TRBV5-1, TRBJ2-1)
CASSLDDRFDEQFF

SEQ ID NO: 733281 - protein, 14 aa, Homo sapiens
  CDR3 for alpha chain variable domain of TCR clone 366641 (TRAV1-2, TRAJ16)
CAVNRFSDGQKPLF

SEQ ID NO: 733282 - protein, 15 aa, Homo sapiens
  CDR3 for beta chain variable domain of TCR clone 366641 (TRBV12-4, TRBJ2-5)
CASSPPTGLQETQYF

SEQ ID NO: 733283 - protein, 13 aa, Homo sapiens
  CDR3 for alpha chain variable domain of TCR clone 366642 (TRAV13-2, TRAJ11)
CAENYSGYSNLTF

SEQ ID NO: 733284 - protein, 13 aa, Homo sapiens
  CDR3 for beta chain variable domain of TCR clone 366642 (TRBV12-4, TRBJ1-4)
CASAMGHNEKLFF

SEQ ID NO: 733285 - protein, 14 aa, Homo sapiens
  CDR3 for alpha chain variable domain of TCR clone 366643 (TRAV12-3, TRAJ10)
SHLPLTGGGNKLTF

SEQ ID NO: 733286 - protein, 14 aa, Homo sapiens
  CDR3 for beta chain variable domain of TCR clone 366643 (TRBV3-1, TRBJ2-5)
CASSQGPDQETQYF

SEQ ID NO: 733287 - protein, 12 aa, Homo sapiens
  CDR3 for alpha chain variable domain of TCR clone 366644 (TRAV12-1, TRAJ40)
CVVYSGTYKYIF

SEQ ID NO: 733288 - protein, 18 aa, Homo sapiens
  CDR3 for beta chain variable domain of TCR clone 366644 (TRBV11-2, TRBJ2-3)
CASSFGGASRGAPDTQYF

SEQ ID NO: 733289 - protein, 12 aa, Homo sapiens
  CDR3 for alpha chain variable domain of TCR clone 366645 (TRAV12-1, TRAJ40)
CVVYSGTYKYIF

SEQ ID NO: 733290 - protein, 14 aa, Homo sapiens
  CDR3 for beta chain variable domain of TCR clone 366645 (TRBV7-9, TRBJ2-5)
CASSLDTAQETQYI

SEQ ID NO: 733291 - protein, 18 aa, Homo sapiens
  CDR3 for alpha chain variable domain of TCR clone 366646 (TRAV13-2, TRAJ52)
CAETPLNAGGTSYGKLTF

SEQ ID NO: 733292 - protein, 15 aa, Homo sapiens
  CDR3 for beta chain variable domain of TCR clone 366646 (TRBV7-2, TRBJ2-7)
CASNLKGALTYEQYF

SEQ ID NO: 733293 - protein, 13 aa, Homo sapiens
  CDR3 for alpha chain variable domain of TCR clone 366647 (TRAV2, TRAJ16)
CAVEFGVGQKLLF

SEQ ID NO: 733294 - protein, 14 aa, Homo sapiens
  CDR3 for beta chain variable domain of TCR clone 366647 (TRBV6-3, TRBJ2-5)
CASSYSLREKTQYF

SEQ ID NO: 733295 - protein, 14 aa, Homo sapiens
  CDR3 for alpha chain variable domain of TCR clone 366648 (TRAV2, TRAJ37)
CAVDFTSNTGKLIF

SEQ ID NO: 733296 - protein, 19 aa, Homo sapiens
  CDR3 for beta chain variable domain of TCR clone 366648 (TRBV28, TRBJ2-7)
CASSYSGTSRLGWVYEQYF

SEQ ID NO: 733297 - protein, 13 aa, Homo sapiens
  CDR3 for alpha chain variable domain of TCR clone 366649 (TRAV3, TRAJ21)
CAVREPDFNKFYF

SEQ ID NO: 733298 - protein, 12 aa, Homo sapiens
  CDR3 for beta chain variable domain of TCR clone 366649 (TRBV28, TRBJ2-6)
CAIQAGANDLTF

SEQ ID NO: 733299 - protein, 14 aa, Homo sapiens
  CDR3 for alpha chain variable domain of TCR clone 366650 (TRAV17, TRAJ57)
CAKDPQGGSEKLVF

SEQ ID NO: 733300 - protein, 14 aa, Homo sapiens
  CDR3 for beta chain variable domain of TCR clone 366650 (TRBV7-9, TRBJ2-1)
CASSPRDSLYEQFF

SEQ ID NO: 733301 - protein, 19 aa, Homo sapiens
  CDR3 for alpha chain variable domain of TCR clone 366651 (TRAV26-1, TRAJ22)
CCVLFHRWVFSGSARQLTF

SEQ ID NO: 733302 - protein, 19 aa, Homo sapiens
  CDR3 for beta chain variable domain of TCR clone 366651 (TRBV19, TRBJ2-5)
CASSIGQVTDFFLGETQYF

SEQ ID NO: 733303 - protein, 18 aa, Homo sapiens
  CDR3 for alpha chain variable domain of TCR clone 366652 (TRAV13-1, TRAJ52)
CAAKNPNAGGTSYGKLTF

SEQ ID NO: 733304 - protein, 18 aa, Homo sapiens
  CDR3 for beta chain variable domain of TCR clone 366652 (TRBV4-1, TRBJ1-4)
CASSLRTGGAWTNEKLFF

SEQ ID NO: 733305 - protein, 13 aa, Homo sapiens
  CDR3 for alpha chain variable domain of TCR clone 366653 (TRAV20, TRAJ37)
CAGCPSNTGKLIF

SEQ ID NO: 733306 - protein, 11 aa, Homo sapiens
  CDR3 for beta chain variable domain of TCR clone 366653 (TRBV12-4, TRBJ2-3)
GASTATDTQYF

SEQ ID NO: 733307 - protein, 14 aa, Homo sapiens
  CDR3 for alpha chain variable domain of TCR clone 366654 (TRAV12-2, TRAJ15)
CAPHTGQAGTALIF

SEQ ID NO: 733308 - protein, 14 aa, Homo sapiens
  CDR3 for beta chain variable domain of TCR clone 366654 (TRBV12-5, TRBJ2-5)
CASGSRTHQETQYF

SEQ ID NO: 733309 - protein, 14 aa, Homo sapiens
  CDR3 for alpha chain variable domain of TCR clone 366655 (TRAV21, TRAJ35)
CAVMPIGFGSVLHC

SEQ ID NO: 733310 - protein, 12 aa, Homo sapiens
  CDR3 for beta chain variable domain of TCR clone 366655 (TRBV7-9, TRBJ2-7)
CASSIKREEQYF

SEQ ID NO: 733311 - protein, 14 aa, Homo sapiens
  CDR3 for alpha chain variable domain of TCR clone 366656 (TRAV29/DV5, TRAJ36)
CAARRKTGANSLFF

SEQ ID NO: 733312 - protein, 17 aa, Homo sapiens
  CDR3 for beta chain variable domain of TCR clone 366656 (TRBV7-8, TRBJ2-6)
CASSAGTGGAGANVLTF

SEQ ID NO: 733313 - protein, 13 aa, Homo sapiens
  CDR3 for alpha chain variable domain of TCR clone 366657 (TRAV8-3, TRAJ36)
CAVGATGANNLFF

SEQ ID NO: 733314 - protein, 15 aa, Homo sapiens
  CDR3 for beta chain variable domain of TCR clone 366657 (TRBV7-3, TRBJ2-1)
CASSQRGGALIEQFF

SEQ ID NO: 733315 - protein, 14 aa, Homo sapiens
  CDR3 for alpha chain variable domain of TCR clone 366658 (TRAV9-2, TRAJ39)
CALYIYNSGNMLTF

SEQ ID NO: 733316 - protein, 16 aa, Homo sapiens
  CDR3 for beta chain variable domain of TCR clone 366658 (TRBV12-5, TRBJ2-5)
CASGPRTSGNQETQYF

SEQ ID NO: 733317 - protein, 15 aa, Homo sapiens
  CDR3 for alpha chain variable domain of TCR clone 366659 (TRAV12-1, TRAJ42)
SVVTRDGGSQGNLIF

SEQ ID NO: 733318 - protein, 14 aa, Homo sapiens
  CDR3 for beta chain variable domain of TCR clone 366659 (TRBV12-4, TRBJ1-1)
CASSFDRVNTEAFF

SEQ ID NO: 733319 - protein, 12 aa, Homo sapiens
  CDR3 for alpha chain variable domain of TCR clone 366660 (TRAV21, TRAJ13)
PGPSGGYQKVTF

SEQ ID NO: 733320 - protein, 14 aa, Homo sapiens
  CDR3 for beta chain variable domain of TCR clone 366660 (TRBV12-4, TRBJ1-1)
CASSLGTGGTEAFF

SEQ ID NO: 733321 - protein, 14 aa, Homo sapiens
  CDR3 for alpha chain variable domain of TCR clone 366661 (TRAV12-3, TRAJ9)
CAMSPNTGGCKTIF

SEQ ID NO: 733322 - protein, 15 aa, Homo sapiens
  CDR3 for beta chain variable domain of TCR clone 366661 (TRBV6-5, TRBJ2-1)
CASSYDAGAGNEQFF

SEQ ID NO: 733323 - protein, 15 aa, Homo sapiens
  CDR3 for alpha chain variable domain of TCR clone 366662 (TRAV26-2, TRAJ28)
CILVESGAGSYQLTF

SEQ ID NO: 733324 - protein, 12 aa, Homo sapiens
  CDR3 for beta chain variable domain of TCR clone 366662 (TRBV7-6, TRBJ2-5)
CASSLSQETQYF

SEQ ID NO: 733325 - protein, 13 aa, Homo sapiens
  CDR3 for alpha chain variable domain of TCR clone 366663 (TRAV16, TRAJ10)
CAPAREEETNTPL

SEQ ID NO: 733326 - protein, 12 aa, Homo sapiens
  CDR3 for beta chain variable domain of TCR clone 366663 (TRBV11-2, TRBJ2-2)
CASSLGGGELFF

SEQ ID NO: 733327 - protein, 14 aa, Homo sapiens
  CDR3 for alpha chain variable domain of TCR clone 366664 (TRAV12-2, TRAJ9)
CAVNMEGGGFKTIF

SEQ ID NO: 733328 - protein, 14 aa, Homo sapiens
  CDR3 for beta chain variable domain of TCR clone 366664 (TRBV28, TRBJ1-2)
CASRIQGANYGYTF

SEQ ID NO: 733329 - protein, 15 aa, Homo sapiens
  CDR3 for alpha chain variable domain of TCR clone 366665 (TRAV17, TRAJ16)
CATALRFSDGQKLLF

SEQ ID NO: 733330 - protein, 15 aa, Homo sapiens
  CDR3 for beta chain variable domain of TCR clone 366665 (TRBV20-1, TRBJ1-1)
CSASRVVTGNTEAFF

SEQ ID NO: 733331 - protein, 16 aa, Homo sapiens
  CDR3 for alpha chain variable domain of TCR clone 366666 (TRAV2, TRAJ20)
TTVLWSFRSNDYKLSF

SEQ ID NO: 733332 - protein, 16 aa, Homo sapiens
  CDR3 for beta chain variable domain of TCR clone 366666 (TRBV13, TRBJ2-7)
CASSSRESGRTYEQYF

SEQ ID NO: 733333 - protein, 15 aa, Homo sapiens
  CDR3 for alpha chain variable domain of TCR clone 366667 (TRAV2, TRAJ9)
CAVEDRGTGGFNTIF

SEQ ID NO: 733334 - protein, 14 aa, Homo sapiens
  CDR3 for beta chain variable domain of TCR clone 366667 (TRBV4-1, TRBJ2-2)
CASSQAVNTGELFF

SEQ ID NO: 733335 - protein, 15 aa, Homo sapiens
  CDR3 for alpha chain variable domain of TCR clone 366668 (TRAV8-3, TRAJ32)
CAVGPYGGATNKLIF

SEQ ID NO: 733336 - protein, 14 aa, Homo sapiens
  CDR3 for beta chain variable domain of TCR clone 366668 (TRBV29-1, TRBJ2-2)
CSVLAETNTGELFF

SEQ ID NO: 733337 - protein, 11 aa, Homo sapiens
  CDR3 for alpha chain variable domain of TCR clone 366669 (TRAV17, TRAJ36)
CAPTGANNLFF

SEQ ID NO: 733338 - protein, 13 aa, Homo sapiens
  CDR3 for beta chain variable domain of TCR clone 366669 (TRBV12-4, TRBJ2-7)
CASRPTETYEQYF

SEQ ID NO: 733339 - protein, 12 aa, Homo sapiens
  CDR3 for alpha chain variable domain of TCR clone 366670 (TRAV16, TRAJ13)
CITLRGYQKVTF

SEQ ID NO: 733340 - protein, 15 aa, Homo sapiens
  CDR3 for beta chain variable domain of TCR clone 366670 (TRBV28, TRBJ2-5)
CASSPPTGLQETQYF

SEQ ID NO: 733341 - protein, 15 aa, Homo sapiens
  CDR3 for alpha chain variable domain of TCR clone 366671 (TRAV3, TRAJ36)
CAVRASQTGANNLFF

SEQ ID NO: 733342 - protein, 15 aa, Homo sapiens
  CDR3 for beta chain variable domain of TCR clone 366671 (TRBV4-1, TRBJ1-4)
CASSDTGGTNEKLFF

SEQ ID NO: 733343 - protein, 14 aa, Homo sapiens
  CDR3 for alpha chain variable domain of TCR clone 366672 (TRAV20, TRAJ20)
CAVRRGYNDYKLGF

SEQ ID NO: 733344 - protein, 13 aa, Homo sapiens
  CDR3 for beta chain variable domain of TCR clone 366672 (TRBV19, TRBJ2-5)
CASSETAPETQYF

SEQ ID NO: 733345 - protein, 14 aa, Homo sapiens
  CDR3 for alpha chain variable domain of TCR clone 366673 (TRAV8-3, TRAJ9)
CAVVYNTRGFTTIF

SEQ ID NO: 733346 - protein, 14 aa, Homo sapiens
  CDR3 for beta chain variable domain of TCR clone 366673 (TRBV7-3, TRBJ2-2)
CASSSGGYTGELFF

SEQ ID NO: 733347 - protein, 14 aa, Homo sapiens
  CDR3 for alpha chain variable domain of TCR clone 366674 (TRAV16, TRAJ17)
CALSGRAAGNKLTF

SEQ ID NO: 733348 - protein, 15 aa, Homo sapiens
  CDR3 for beta chain variable domain of TCR clone 366674 (TRBV2, TRBJ2-1)
CASSELAGSYNDQFF

SEQ ID NO: 733349 - protein, 16 aa, Homo sapiens
  CDR3 for alpha chain variable domain of TCR clone 366675 (TRAV1-2, TRAJ10)
CAVRGVLTGGENKLTF

SEQ ID NO: 733350 - protein, 13 aa, Homo sapiens
  CDR3 for beta chain variable domain of TCR clone 366675 (TRBV24-1, TRBJ2-2)
CATTATRTGELFF

SEQ ID NO: 733351 - protein, 15 aa, Homo sapiens
  CDR3 for alpha chain variable domain of TCR clone 366676 (TRAV26-1, TRAJ29)
CIVRAEGSGNTPLVF

SEQ ID NO: 733352 - protein, 15 aa, Homo sapiens
  CDR3 for beta chain variable domain of TCR clone 366676 (TRBV7-9, TRBJ1-5)
CASSQGRQPNQPQHF

SEQ ID NO: 733353 - protein, 12 aa, Homo sapiens
  CDR3 for alpha chain variable domain of TCR clone 366677 (TRAV21, TRAJ49)
CAVTNTGNHFYF

SEQ ID NO: 733354 - protein, 17 aa, Homo sapiens
  CDR3 for beta chain variable domain of TCR clone 366677 (TRBV13, TRBJ2-3)
CASSLSRVAGGRNTQYF

SEQ ID NO: 733355 - protein, 23 aa, Homo sapiens
  CDR3 for alpha chain variable domain of TCR clone 366678 (TRAV30, TRAJ29)
PAQLLRNLLLWHRAFSGNIPLVF

SEQ ID NO: 733356 - protein, 15 aa, Homo sapiens
  CDR3 for beta chain variable domain of TCR clone 366678 (TRBV5-1, TRBJ2-2)
CASSLFGQNTGELFF

SEQ ID NO: 733357 - protein, 19 aa, Homo sapiens
  CDR3 for alpha chain variable domain of TCR clone 366679 (TRAV2, TRAJ20)
ILQVREADAAVYRDCKLSF

SEQ ID NO: 733358 - protein, 14 aa, Homo sapiens
  CDR3 for beta chain variable domain of TCR clone 366679 (TRBV7-2, TRBJ2-3)
CASRRGLAADTQYF

SEQ ID NO: 733359 - protein, 10 aa, Homo sapiens
  CDR3 for alpha chain variable domain of TCR clone 366680 (TRAV26-2, TRAJ43)
RAVNNNDMRF

SEQ ID NO: 733360 - protein, 15 aa, Homo sapiens
  CDR3 for beta chain variable domain of TCR clone 366680 (TRBV7-2, TRBJ2-1)
CASTHGTGIYNEQFF

SEQ ID NO: 733361 - protein, 15 aa, Homo sapiens
  CDR3 for alpha chain variable domain of TCR clone 366681 (TRAV12-2, TRAJ50)
CAVNGLEPSYDKVIF

SEQ ID NO: 733362 - protein, 16 aa, Homo sapiens
  CDR3 for beta chain variable domain of TCR clone 366681 (TRBV5-4, TRBJ2-3)
CASQQPGAGGADTQYF

SEQ ID NO: 733363 - protein, 14 aa, Homo sapiens
  CDR3 for alpha chain variable domain of TCR clone 366682 (TRAV12-1, TRAJ15)
CLPPANQAGPALIF

SEQ ID NO: 733364 - protein, 13 aa, Homo sapiens
  CDR3 for beta chain variable domain of TCR clone 366682 (TRBV7-2, TRBJ2-4)
CASSREHANMQYF

SEQ ID NO: 733365 - protein, 14 aa, Homo sapiens
  CDR3 for alpha chain variable domain of TCR clone 366683 (TRAV12-3, TRAJ10)
SHLPMTGGGNKLTF

SEQ ID NO: 733366 - protein, 14 aa, Homo sapiens
  CDR3 for beta chain variable domain of TCR clone 366683 (TRBV11-3, TRBJ2-7)
CASSPDRNTYEQYF

SEQ ID NO: 733367 - protein, 12 aa, Homo sapiens
  CDR3 for alpha chain variable domain of TCR clone 366684 (TRAV12-3, TRAJ17)
CAMTLTGNKLTS

SEQ ID NO: 733368 - protein, 12 aa, Homo sapiens
  CDR3 for beta chain variable domain of TCR clone 366684 (TRBV11-2, TRBJ2-5)
CASSLGQETQYF

SEQ ID NO: 733369 - protein, 16 aa, Homo sapiens
  CDR3 for alpha chain variable domain of TCR clone 366685 (TRAV14/DV4, TRAJ53)
CATREGGGGSNYKLTF

SEQ ID NO: 733370 - protein, 14 aa, Homo sapiens
  CDR3 for beta chain variable domain of TCR clone 366685 (TRBV7-6, TRBJ2-3)
CASSLGTVTDTQYF

SEQ ID NO: 733371 - protein, 18 aa, Homo sapiens
  CDR3 for alpha chain variable domain of TCR clone 366686 (TRAV13-1, TRAJ52)
CAASKRSAGGTSYGKLTF

SEQ ID NO: 733372 - protein, 12 aa, Homo sapiens
  CDR3 for beta chain variable domain of TCR clone 366686 (TRBV28, TRBJ2-3)
CASSLYRDTQYF

SEQ ID NO: 733373 - protein, 14 aa, Homo sapiens
  CDR3 for alpha chain variable domain of TCR clone 366687 (TRAV29/DV5, TRAJ20)
CAATIRSNDYKLSF

SEQ ID NO: 733374 - protein, 14 aa, Homo sapiens
  CDR3 for beta chain variable domain of TCR clone 366687 (TRBV7-9, TRBJ1-1)
CASTPLQSYTEAFF

SEQ ID NO: 733375 - protein, 16 aa, Homo sapiens
  CDR3 for alpha chain variable domain of TCR clone 366688 (TRAV16, TRAJ4)
CARSRMFSGGYNKLIF

SEQ ID NO: 733376 - protein, 16 aa, Homo sapiens
  CDR3 for beta chain variable domain of TCR clone 366688 (TRBV24-1, TRBJ2-3)
CATSDPGTGATDTQNF

SEQ ID NO: 733377 - protein, 14 aa, Homo sapiens
  CDR3 for alpha chain variable domain of TCR clone 366689 (TRAV12-2, TRAJ45)
CAVYSGGGADGLTF

SEQ ID NO: 733378 - protein, 13 aa, Homo sapiens
  CDR3 for beta chain variable domain of TCR clone 366689 (TRBV10-2, TRBJ2-7)
CASGASGGYEQYF

SEQ ID NO: 733379 - protein, 11 aa, Homo sapiens
  CDR3 for alpha chain variable domain of TCR clone 366690 (TRAV17, TRAJ36)
CAPTGANNLFF

SEQ ID NO: 733380 - protein, 13 aa, Homo sapiens
  CDR3 for beta chain variable domain of TCR clone 366690 (TRBV7-9, TRBJ2-5)
CPSLPSGRETQYF

SEQ ID NO: 733381 - protein, 21 aa, Homo sapiens
  CDR3 for alpha chain variable domain of TCR clone 366691 (TRAV1-2, TRAJ37)
CLLHLCCERFHGSGNTGKLIF

SEQ ID NO: 733382 - protein, 14 aa, Homo sapiens
  CDR3 for beta chain variable domain of TCR clone 366691 (TRBV2, TRBJ2-5)
CASSEVLAQETQYF

SEQ ID NO: 733383 - protein, 15 aa, Homo sapiens
  CDR3 for alpha chain variable domain of TCR clone 366692 (TRAV21, TRAJ32)
CAAAPYGGATNKLIF

SEQ ID NO: 733384 - protein, 15 aa, Homo sapiens
  CDR3 for beta chain variable domain of TCR clone 366692 (TRBV27, TRBJ1-6)
CASSFDRGLGSPLHF

SEQ ID NO: 733385 - protein, 16 aa, Homo sapiens
  CDR3 for alpha chain variable domain of TCR clone 366693 (TRAV30, TRAJ24)
CGTEIVDADSWGKFQF

SEQ ID NO: 733386 - protein, 12 aa, Homo sapiens
  CDR3 for beta chain variable domain of TCR clone 366693 (TRBV14, TRBJ2-5)
CASRQLKETQYF

SEQ ID NO: 733387 - protein, 10 aa, Homo sapiens
  CDR3 for alpha chain variable domain of TCR clone 366694 (TRAV23/DV6, TRAJ57)
CAASSTLSQG

SEQ ID NO: 733388 - protein, 15 aa, Homo sapiens
  CDR3 for beta chain variable domain of TCR clone 366694 (TRBV6-6, TRBJ2-7)
CASSYSYGGSYEQYF

SEQ ID NO: 733389 - protein, 11 aa, Homo sapiens
  CDR3 for alpha chain variable domain of TCR clone 366695 (TRAV12-1, TRAJ33)
CVVNMNYQLIW

SEQ ID NO: 733390 - protein, 11 aa, Homo sapiens
  CDR3 for beta chain variable domain of TCR clone 366695 (TRBV10-1, TRBJ2-3)
CASSESDTQYF

SEQ ID NO: 733391 - protein, 13 aa, Homo sapiens
  CDR3 for alpha chain variable domain of TCR clone 366696 (TRAV30, TRAJ6)
CGFIEGGSYVPTL

SEQ ID NO: 733392 - protein, 13 aa, Homo sapiens
  CDR3 for beta chain variable domain of TCR clone 366696 (TRBV5-4, TRBJ2-5)
CASSPVSQETQYF

SEQ ID NO: 733393 - protein, 13 aa, Homo sapiens
  CDR3 for alpha chain variable domain of TCR clone 366697 (TRAV8-3, TRAJ28)
CAVGAVGSYQLTF

SEQ ID NO: 733394 - protein, 18 aa, Homo sapiens
  CDR3 for beta chain variable domain of TCR clone 366697 (TRBV27, TRBJ2-1)
CASGNRAVGVGSKNEQFF

SEQ ID NO: 733395 - protein, 12 aa, Homo sapiens
  CDR3 for alpha chain variable domain of TCR clone 366698 (TRAV3, TRAJ39)
CAVIEWSNMLTF

SEQ ID NO: 733396 - protein, 15 aa, Homo sapiens
  CDR3 for beta chain variable domain of TCR clone 366698 (TRBV11-3, TRBJ2-3)
CASLKDGREGDTQYF

SEQ ID NO: 733397 - protein, 15 aa, Homo sapiens
  CDR3 for alpha chain variable domain of TCR clone 366699 (TRAV35, TRAJ50)
CAGQLRKTSYDKVIF

SEQ ID NO: 733398 - protein, 15 aa, Homo sapiens
  CDR3 for beta chain variable domain of TCR clone 366699 (TRBV11-3, TRBJ2-3)
CASLKDGREGDTQYF

SEQ ID NO: 733399 - protein, 11 aa, Homo sapiens
  CDR3 for alpha chain variable domain of TCR clone 366700 (TRAV21, TRAJ41)
CAGRSGYALNF

SEQ ID NO: 733400 - protein, 13 aa, Homo sapiens
  CDR3 for beta chain variable domain of TCR clone 366700 (TRBV7-2, TRBJ2-5)
CASSQTSVETQYF

SEQ ID NO: 733401 - protein, 14 aa, Homo sapiens
  CDR3 for alpha chain variable domain of TCR clone 366701 (TRAV8-3, TRAJ7)
CAAIELDGNNRLAF

SEQ ID NO: 733402 - protein, 15 aa, Homo sapiens
  CDR3 for beta chain variable domain of TCR clone 366701 (TRBV3-1, TRBJ2-1)
CANSTGDTNYNEQFF

SEQ ID NO: 733403 - protein, 14 aa, Homo sapiens
  CDR3 for alpha chain variable domain of TCR clone 366702 (TRAV35, TRAJ56)
CAGQLTGANSKLTF

SEQ ID NO: 733404 - protein, 13 aa, Homo sapiens
  CDR3 for beta chain variable domain of TCR clone 366702 (TRBV7-3, TRBJ2-5)
GASSFRGGETQYF

SEQ ID NO: 733405 - protein, 14 aa, Homo sapiens
  CDR3 for alpha chain variable domain of TCR clone 366703 (TRAV17, TRAJ12)
CATDGVDSSYKLIF

SEQ ID NO: 733406 - protein, 12 aa, Homo sapiens
  CDR3 for beta chain variable domain of TCR clone 366703 (TRBV27, TRBJ2-5)
CASSPTGETQYF

SEQ ID NO: 733407 - protein, 14 aa, Homo sapiens
  CDR3 for alpha chain variable domain of TCR clone 366704 (TRAV1-2, TRAJ16)
CAVRSASDGQKLLF

SEQ ID NO: 733408 - protein, 14 aa, Homo sapiens
  CDR3 for beta chain variable domain of TCR clone 366704 (TRBV7-2, TRBJ2-7)
CASRSQGAAYEQYF

SEQ ID NO: 733409 - protein, 15 aa, Homo sapiens
  CDR3 for alpha chain variable domain of TCR clone 366705 (TRAV12-2, TRAJ53)
CAVNGGGGSNYKMTF

SEQ ID NO: 733410 - protein, 12 aa, Homo sapiens
  CDR3 for beta chain variable domain of TCR clone 366705 (TRBV7-6, TRBJ2-5)
CASSLSQETQYF

SEQ ID NO: 733411 - protein, 14 aa, Homo sapiens
  CDR3 for alpha chain variable domain of TCR clone 366706 (TRAV8-2, TRAJ37)
CVVSISGNTGKLIF

SEQ ID NO: 733412 - protein, 15 aa, Homo sapiens
  CDR3 for beta chain variable domain of TCR clone 366706 (TRBV7-2, TRBJ1-1)
CASSFAGDRDTEAFF

SEQ ID NO: 733413 - protein, 16 aa, Homo sapiens
  CDR3 for alpha chain variable domain of TCR clone 366707 (TRAV12-2, TRAJ50)
CAVGTATKTSYDKVIF

SEQ ID NO: 733414 - protein, 13 aa, Homo sapiens
  CDR3 for beta chain variable domain of TCR clone 366707 (TRBV7-3, TRBJ1-2)
CASSLKRGYGYTF

SEQ ID NO: 733415 - protein, 15 aa, Homo sapiens
  CDR3 for alpha chain variable domain of TCR clone 366708 (TRAV13-1, TRAJ17)
CAASIERAEGNKLTF

SEQ ID NO: 733416 - protein, 12 aa, Homo sapiens
  CDR3 for beta chain variable domain of TCR clone 366708 (TRBV5-7, TRBJ1-1)
CASSLGRGKAFF

SEQ ID NO: 733417 - protein, 16 aa, Homo sapiens
  CDR3 for alpha chain variable domain of TCR clone 366709 (TRAV14/DV4, TRAJ54)
CAMREGRIQGAQKLVF

SEQ ID NO: 733418 - protein, 16 aa, Homo sapiens
  CDR3 for beta chain variable domain of TCR clone 366709 (TRBV10-3, TRBJ2-7)
CAISADFADRPYEQYF

SEQ ID NO: 733419 - protein, 20 aa, Homo sapiens
  CDR3 for alpha chain variable domain of TCR clone 366710 (TRAV27, TRAJ35)
CAGADFGTVLHCVSCTQVIV

SEQ ID NO: 733420 - protein, 16 aa, Homo sapiens
  CDR3 for beta chain variable domain of TCR clone 366710 (TRBV6-1, TRBJ2-1)
CASISRQGSSYNEQFF

SEQ ID NO: 733421 - protein, 18 aa, Homo sapiens
  CDR3 for alpha chain variable domain of TCR clone 366711 (TRAV13-1, TRAJ52)
CAAKNPNAGGTSYGKLTF

SEQ ID NO: 733422 - protein, 16 aa, Homo sapiens
  CDR3 for beta chain variable domain of TCR clone 366711 (TRBV7-3, TRBJ2-1)
CASSKPLAGGYNEQFF

SEQ ID NO: 733423 - protein, 13 aa, Homo sapiens
  CDR3 for alpha chain variable domain of TCR clone 366712 (TRAV21, TRAJ27)
CAARPGNAGKSTF

SEQ ID NO: 733424 - protein, 14 aa, Homo sapiens
  CDR3 for beta chain variable domain of TCR clone 366712 (TRBV18, TRBJ2-3)
CASSRDRGTDTQYF

SEQ ID NO: 733425 - protein, 15 aa, Homo sapiens
  CDR3 for alpha chain variable domain of TCR clone 366713 (TRAV17, TRAJ57)
CATGPSQGGSEKLVF

SEQ ID NO: 733426 - protein, 15 aa, Homo sapiens
  CDR3 for beta chain variable domain of TCR clone 366713 (TRBV28, TRBJ2-5)
CASSSGRTIQETQYF

SEQ ID NO: 733427 - protein, 14 aa, Homo sapiens
  CDR3 for alpha chain variable domain of TCR clone 366714 (TRAV29/DV5, TRAJ56)
CAARPTGANSKLTF

SEQ ID NO: 733428 - protein, 15 aa, Homo sapiens
  CDR3 for beta chain variable domain of TCR clone 366714 (TRBV5-5, TRBJ1-6)
CASSLVIVGNTPLHF

SEQ ID NO: 733429 - protein, 18 aa, Homo sapiens
  CDR3 for alpha chain variable domain of TCR clone 366715 (TRAV3, TRAJ17)
CAVRARRGGRSCRQQANF

SEQ ID NO: 733430 - protein, 13 aa, Homo sapiens
  CDR3 for beta chain variable domain of TCR clone 366715 (TRBV4-2, TRBJ1-1)
CASSQAGNTEAFF

SEQ ID NO: 733431 - protein, 14 aa, Homo sapiens
  CDR3 for alpha chain variable domain of TCR clone 366716 (TRAV27, )
CADIQSPDPAVYQL

SEQ ID NO: 733432 - protein, 13 aa, Homo sapiens
  CDR3 for beta chain variable domain of TCR clone 366716 (TRBV28, TRBJ2-5)
CASSSRNQETQYF

SEQ ID NO: 733433 - protein, 12 aa, Homo sapiens
  CDR3 for alpha chain variable domain of TCR clone 366717 (TRAV21, TRAJ49)
CAVNEGGNQFYF

SEQ ID NO: 733434 - protein, 14 aa, Homo sapiens
  CDR3 for beta chain variable domain of TCR clone 366717 (TRBV18, TRBJ2-7)
CASSPRGGSYEQYF

SEQ ID NO: 733435 - protein, 13 aa, Homo sapiens
  CDR3 for alpha chain variable domain of TCR clone 366718 (TRAV13-1, TRAJ39)
CSKYSNAGNMLTF

SEQ ID NO: 733436 - protein, 16 aa, Homo sapiens
  CDR3 for beta chain variable domain of TCR clone 366718 (TRBV20-1, TRBJ1-4)
CSAPGQGLLTNEKLLC

SEQ ID NO: 733437 - protein, 14 aa, Homo sapiens
  CDR3 for alpha chain variable domain of TCR clone 366719 (TRAV13-1, TRAJ9)
CAASALTGGFKTIF

SEQ ID NO: 733438 - protein, 19 aa, Homo sapiens
  CDR3 for beta chain variable domain of TCR clone 366719 (TRBV7-2, TRBJ2-3)
CASSPGLAGGGLTTDTQYF

SEQ ID NO: 733439 - protein, 17 aa, Homo sapiens
  CDR3 for alpha chain variable domain of TCR clone 366720 (TRAV8-6, TRAJ8)
CAAEEGIEKTGFQKLVF

SEQ ID NO: 733440 - protein, 12 aa, Homo sapiens
  CDR3 for beta chain variable domain of TCR clone 366720 (TRBV19, TRBJ1-4)
CASKDWPGGLFF

SEQ ID NO: 733441 - protein, 12 aa, Homo sapiens
  CDR3 for alpha chain variable domain of TCR clone 366721 (TRAV17, TRAJ39)
CATGAAGNMLTF

SEQ ID NO: 733442 - protein, 13 aa, Homo sapiens
  CDR3 for beta chain variable domain of TCR clone 366721 (TRBV10-3, TRBJ2-7)
CASKLAVNYEQYF

SEQ ID NO: 733443 - protein, 13 aa, Homo sapiens
  CDR3 for alpha chain variable domain of TCR clone 366722 (TRAV3, TRAJ21)
CAVREPDFNKFYF

SEQ ID NO: 733444 - protein, 13 aa, Homo sapiens
  CDR3 for beta chain variable domain of TCR clone 366722 (TRBV7-6, TRBJ2-7)
CASSLDHTHEQYF

SEQ ID NO: 733445 - protein, 14 aa, Homo sapiens
  CDR3 for alpha chain variable domain of TCR clone 366723 (TRAV1-2, TRAJ8)
CAVREDTGFQKLVF

SEQ ID NO: 733446 - protein, 15 aa, Homo sapiens
  CDR3 for beta chain variable domain of TCR clone 366723 (TRBV2, TRBJ2-7)
CVSSEGLARSYEQYF

SEQ ID NO: 733447 - protein, 14 aa, Homo sapiens
  CDR3 for alpha chain variable domain of TCR clone 366724 (TRAV17, TRAJ31)
CATVLRNNNARLMF

SEQ ID NO: 733448 - protein, 14 aa, Homo sapiens
  CDR3 for beta chain variable domain of TCR clone 366724 (TRBV12-4, TRBJ2-5)
CASSLWHKQETQYF

SEQ ID NO: 733449 - protein, 14 aa, Homo sapiens
  CDR3 for alpha chain variable domain of TCR clone 366725 (TRAV1-2, TRAJ8)
CAVREDTGFQKLVF

SEQ ID NO: 733450 - protein, 14 aa, Homo sapiens
  CDR3 for beta chain variable domain of TCR clone 366725 (TRBV7-8, TRBJ2-3)
CASSLEAGTDAQYF

SEQ ID NO: 733451 - protein, 13 aa, Homo sapiens
  CDR3 for alpha chain variable domain of TCR clone 366726 (TRAV1-2, TRAJ12)
CAVSMDSSYKLIF

SEQ ID NO: 733452 - protein, 16 aa, Homo sapiens
  CDR3 for beta chain variable domain of TCR clone 366726 (TRBV12-4, TRBJ1-5)
CASSRPVGGSNQPQHF

SEQ ID NO: 733453 - protein, 14 aa, Homo sapiens
  CDR3 for alpha chain variable domain of TCR clone 366727 (TRAV17, TRAJ31)
CATVLRNNNARLMF

SEQ ID NO: 733454 - protein, 14 aa, Homo sapiens
  CDR3 for beta chain variable domain of TCR clone 366727 (TRBV12-4, TRBJ2-5)
CASSLWEKQETQYF

SEQ ID NO: 733455 - protein, 13 aa, Homo sapiens
  CDR3 for alpha chain variable domain of TCR clone 366728 (TRAV12-2, TRAJ47)
CAVFMESGNKLVF

SEQ ID NO: 733456 - protein, 14 aa, Homo sapiens
  CDR3 for beta chain variable domain of TCR clone 366728 (TRBV4-1, TRBJ1-5)
CASSQGPTNQPQHF

SEQ ID NO: 733457 - protein, 13 aa, Homo sapiens
  CDR3 for alpha chain variable domain of TCR clone 366729 (TRAV12-3, TRAJ43)
CAMIRPNNNDMRF

SEQ ID NO: 733458 - protein, 12 aa, Homo sapiens
  CDR3 for beta chain variable domain of TCR clone 366729 (TRBV11-2, TRBJ2-5)
CASSFGQETQYF

SEQ ID NO: 733459 - protein, 13 aa, Homo sapiens
  CDR3 for alpha chain variable domain of TCR clone 366730 (TRAV30, TRAJ32)
CCIFGGATNKLIF

SEQ ID NO: 733460 - protein, 13 aa, Homo sapiens
  CDR3 for beta chain variable domain of TCR clone 366730 (TRBV7-2, TRBJ1-1)
CASSVQGYTEAFF

SEQ ID NO: 733461 - protein, 14 aa, Homo sapiens
  CDR3 for alpha chain variable domain of TCR clone 366731 (TRAV16, TRAJ8)
CALLMNTGFQKLVF

SEQ ID NO: 733462 - protein, 14 aa, Homo sapiens
  CDR3 for beta chain variable domain of TCR clone 366731 (TRBV7-2, TRBJ2-7)
CASRSQGAAYEQYL

SEQ ID NO: 733463 - protein, 14 aa, Homo sapiens
  CDR3 for alpha chain variable domain of TCR clone 366732 (TRAV26-1, TRAJ38)
CIADNAGNNRKLMW

SEQ ID NO: 733464 - protein, 13 aa, Homo sapiens
  CDR3 for beta chain variable domain of TCR clone 366732 (TRBV20-1, TRBJ1-1)
WSARGGGNTEAFF

SEQ ID NO: 733465 - protein, 15 aa, Homo sapiens
  CDR3 for alpha chain variable domain of TCR clone 366733 (TRAV21, TRAJ37)
CAVRPTLSNTGKLIF

SEQ ID NO: 733466 - protein, 15 aa, Homo sapiens
  CDR3 for beta chain variable domain of TCR clone 366733 (TRBV11-2, TRBJ2-1)
CASSRNRGLMYEQFF

SEQ ID NO: 733467 - protein, 12 aa, Homo sapiens
  CDR3 for alpha chain variable domain of TCR clone 366734 (TRAV12-2, TRAJ4)
GWPEGGYNKLIF

SEQ ID NO: 733468 - protein, 16 aa, Homo sapiens
  CDR3 for beta chain variable domain of TCR clone 366734 (TRBV6-1, TRBJ2-5)
CASSGTLDRGAETQYF

SEQ ID NO: 733469 - protein, 16 aa, Homo sapiens
  CDR3 for alpha chain variable domain of TCR clone 366735 (TRAV26-1, TRAJ53)
CTVRVAMGGSNNKLTF

SEQ ID NO: 733470 - protein, 12 aa, Homo sapiens
  CDR3 for beta chain variable domain of TCR clone 366735 (TRBV7-9, TRBJ1-5)
CASSPQGQPQHS

SEQ ID NO: 733471 - protein, 15 aa, Homo sapiens
  CDR3 for alpha chain variable domain of TCR clone 366736 (TRAV38-2/DV8, TRAJ57)
CASARAQGGSERLVF

SEQ ID NO: 733472 - protein, 17 aa, Homo sapiens
  CDR3 for beta chain variable domain of TCR clone 366736 (TRBV18, TRBJ1-5)
CASSPTMGQGTNQPQHF

SEQ ID NO: 733473 - protein, 12 aa, Homo sapiens
  CDR3 for alpha chain variable domain of TCR clone 366737 (TRAV25, TRAJ17)
CAGEAAGNELTF

SEQ ID NO: 733474 - protein, 12 aa, Homo sapiens
  CDR3 for beta chain variable domain of TCR clone 366737 (TRBV7-2, TRBJ2-5)
CASSLYGETQYF

SEQ ID NO: 733475 - protein, 15 aa, Homo sapiens
  CDR3 for alpha chain variable domain of TCR clone 366738 (TRAV4, TRAJ26)
FLVGDMNNYGQNFVF

SEQ ID NO: 733476 - protein, 16 aa, Homo sapiens
  CDR3 for beta chain variable domain of TCR clone 366738 (TRBV28, TRBJ1-4)
CASSSRTGAANEKLFF

SEQ ID NO: 733477 - protein, 15 aa, Homo sapiens
  CDR3 for alpha chain variable domain of TCR clone 366739 (TRAV8-6, TRAJ11)
CAVSDRRSGYSTLTF

SEQ ID NO: 733478 - protein, 14 aa, Homo sapiens
  CDR3 for beta chain variable domain of TCR clone 366739 (TRBV7-3, TRBJ2-1)
CASSLAGGTNEQFF

SEQ ID NO: 733479 - protein, 16 aa, Homo sapiens
  CDR3 for alpha chain variable domain of TCR clone 366740 (TRAV26-2, TRAJ45)
CTTASPIGGGADGLTF

SEQ ID NO: 733480 - protein, 20 aa, Homo sapiens
  CDR3 for beta chain variable domain of TCR clone 366740 (TRBV28, TRBJ2-1)
CASTPIGRSPGLAGGNQQFF

SEQ ID NO: 733481 - protein, 13 aa, Homo sapiens
  CDR3 for alpha chain variable domain of TCR clone 366741 (TRAV8-4, TRAJ30)
CAVSINRDDKIIF

SEQ ID NO: 733482 - protein, 13 aa, Homo sapiens
  CDR3 for beta chain variable domain of TCR clone 366741 (TRBV3-1, TRBJ2-2)
CASLARGSGELFF

SEQ ID NO: 733483 - protein, 13 aa, Homo sapiens
  CDR3 for alpha chain variable domain of TCR clone 366742 (TRAV21, TRAJ27)
CAARPGNAGKSTF

SEQ ID NO: 733484 - protein, 17 aa, Homo sapiens
  CDR3 for beta chain variable domain of TCR clone 366742 (TRBV28, TRBJ2-5)
CASSTTEGDALQETQYF

SEQ ID NO: 733485 - protein, 14 aa, Homo sapiens
  CDR3 for alpha chain variable domain of TCR clone 366743 (TRAV20, TRAJ18)
CAMGRGSTLGRLYF

SEQ ID NO: 733486 - protein, 14 aa, Homo sapiens
  CDR3 for beta chain variable domain of TCR clone 366743 (TRBV28, TRBJ2-4)
CASTQVTGVNIQYF

SEQ ID NO: 733487 - protein, 14 aa, Homo sapiens
  CDR3 for alpha chain variable domain of TCR clone 366744 (TRAV4, TRAJ32)
CLVNYGGATNKLIF

SEQ ID NO: 733488 - protein, 14 aa, Homo sapiens
  CDR3 for beta chain variable domain of TCR clone 366744 (TRBV15, TRBJ2-5)
CATSGGTRTETQYY

SEQ ID NO: 733489 - protein, 14 aa, Homo sapiens
  CDR3 for alpha chain variable domain of TCR clone 366745 (TRAV12-3, TRAJ28)
CAMWSGAGSYQLTF

SEQ ID NO: 733490 - protein, 14 aa, Homo sapiens
  CDR3 for beta chain variable domain of TCR clone 366745 (TRBV7-2, TRBJ2-7)
CASSFKGQDHEQYF

SEQ ID NO: 733491 - protein, 16 aa, Homo sapiens
  CDR3 for alpha chain variable domain of TCR clone 366746 (TRAV30, TRAJ24)
CGTEIVDADSWGKSQL

SEQ ID NO: 733492 - protein, 14 aa, Homo sapiens
  CDR3 for beta chain variable domain of TCR clone 366746 (TRBV12-5, TRBJ2-5)
CASGSRTHQETQYF

SEQ ID NO: 733493 - protein, 14 aa, Homo sapiens
  CDR3 for alpha chain variable domain of TCR clone 366747 (TRAV8-3, TRAJ4)
CAVGAAGGSTKLIF

SEQ ID NO: 733494 - protein, 15 aa, Homo sapiens
  CDR3 for beta chain variable domain of TCR clone 366747 (TRBV20-1, TRBJ2-5)
CSAPPRTGFGETQYF

SEQ ID NO: 733495 - protein, 16 aa, Homo sapiens
  CDR3 for alpha chain variable domain of TCR clone 366748 (TRAV3, TRAJ10)
CAVRDMRAGGGNKLTF

SEQ ID NO: 733496 - protein, 19 aa, Homo sapiens
  CDR3 for beta chain variable domain of TCR clone 366748 (TRBV28, TRBJ2-1)
CASSFSIRGSGRTRYEQFF

SEQ ID NO: 733497 - protein, 14 aa, Homo sapiens
  CDR3 for alpha chain variable domain of TCR clone 366749 (TRAV16, TRAJ54)
CALSLIQGAQKLVF

SEQ ID NO: 733498 - protein, 15 aa, Homo sapiens
  CDR3 for beta chain variable domain of TCR clone 366749 (TRBV7-3, TRBJ2-1)
CASSLSSGSFDEQFF

SEQ ID NO: 733499 - protein, 14 aa, Homo sapiens
  CDR3 for alpha chain variable domain of TCR clone 366750 (TRAV8-4, TRAJ9)
CAVRINTGGFKTIF

SEQ ID NO: 733500 - protein, 14 aa, Homo sapiens
  CDR3 for beta chain variable domain of TCR clone 366750 (TRBV12-5, TRBJ2-5)
CASGSRTHQGTQYF

SEQ ID NO: 733501 - protein, 14 aa, Homo sapiens
  CDR3 for alpha chain variable domain of TCR clone 366751 (TRAV12-2, TRAJ45)
CAVYSGGGADGLTF

SEQ ID NO: 733502 - protein, 13 aa, Homo sapiens
  CDR3 for beta chain variable domain of TCR clone 366751 (TRBV4-2, TRBJ1-1)
CASSQAGNTEAFF

SEQ ID NO: 733503 - protein, 16 aa, Homo sapiens
  CDR3 for alpha chain variable domain of TCR clone 366752 (TRAV30, TRAJ24)
CGTEIVYADSWGKFQF

SEQ ID NO: 733504 - protein, 14 aa, Homo sapiens
  CDR3 for beta chain variable domain of TCR clone 366752 (TRBV12-5, TRBJ2-5)
CAGGSRTHQETQYF

SEQ ID NO: 733505 - protein, 15 aa, Homo sapiens
  CDR3 for alpha chain variable domain of TCR clone 366753 (TRAV21, TRAJ32)
CAVNSYGGATNKLIF

SEQ ID NO: 733506 - protein, 18 aa, Homo sapiens
  CDR3 for beta chain variable domain of TCR clone 366753 (TRBV7-9, TRBJ2-1)
CASSTGLAEGSSSNEQFF

SEQ ID NO: 733507 - protein, 15 aa, Homo sapiens
  CDR3 for alpha chain variable domain of TCR clone 366754 (TRAV12-3, TRAJ10)
CASYILTGGGNELTF

SEQ ID NO: 733508 - protein, 15 aa, Homo sapiens
  CDR3 for beta chain variable domain of TCR clone 366754 (TRBV7-2, TRBJ1-6)
CASSLGPDRGMPLHF

SEQ ID NO: 733509 - protein, 12 aa, Homo sapiens
  CDR3 for alpha chain variable domain of TCR clone 366755 (TRAV12-3, TRAJ40)
CAMTSGTYKYIF

SEQ ID NO: 733510 - protein, 15 aa, Homo sapiens
  CDR3 for beta chain variable domain of TCR clone 366755 (TRBV7-3, TRBJ2-2)
CASNLTGQGTGELFF

SEQ ID NO: 733511 - protein, 15 aa, Homo sapiens
  CDR3 for alpha chain variable domain of TCR clone 366756 (TRAV3, TRAJ47)
CDVRDIGKYGNKLVF

SEQ ID NO: 733512 - protein, 14 aa, Homo sapiens
  CDR3 for beta chain variable domain of TCR clone 366756 (TRBV13, TRBJ2-5)
CASSLERVGETQYF

SEQ ID NO: 733513 - protein, 13 aa, Homo sapiens
  CDR3 for alpha chain variable domain of TCR clone 366757 (TRAV8-6, TRAJ24)
CAVSSDSWGKLQF

SEQ ID NO: 733514 - protein, 14 aa, Homo sapiens
  CDR3 for beta chain variable domain of TCR clone 366757 (TRBV7-9, TRBJ2-1)
CASSPRDSLYEQFF

SEQ ID NO: 733515 - protein, 13 aa, Homo sapiens
  CDR3 for alpha chain variable domain of TCR clone 366758 (TRAV2, TRAJ41)
CAVEQYSGYALNF

SEQ ID NO: 733516 - protein, 15 aa, Homo sapiens
  CDR3 for beta chain variable domain of TCR clone 366758 (TRBV12-4, TRBJ1-6)
CASSLLGGSNSPLHF

SEQ ID NO: 733517 - protein, 12 aa, Homo sapiens
  CDR3 for alpha chain variable domain of TCR clone 366759 (TRAV13-1, TRAJ42)
SVLRGSQGNLIF

SEQ ID NO: 733518 - protein, 13 aa, Homo sapiens
  CDR3 for beta chain variable domain of TCR clone 366759 (TRBV2, TRBJ1-4)
CASGELGVEKLFF

SEQ ID NO: 733519 - protein, 11 aa, Homo sapiens
  CDR3 for alpha chain variable domain of TCR clone 366760 (TRAV13-1, TRAJ39)
CASHAGNMLTF

SEQ ID NO: 733520 - protein, 15 aa, Homo sapiens
  CDR3 for beta chain variable domain of TCR clone 366760 (TRBV6-3, TRBJ2-7)
CASSSPGTVFYKQYF

SEQ ID NO: 733521 - protein, 10 aa, Homo sapiens
  CDR3 for alpha chain variable domain of TCR clone 366761 (TRAV36/DV7, TRAJ48)
CAVGNEKLTF

SEQ ID NO: 733522 - protein, 16 aa, Homo sapiens
  CDR3 for beta chain variable domain of TCR clone 366761 (TRBV6-6, TRBJ2-6)
CASNPGAGNGANVLTF

SEQ ID NO: 733523 - protein, 15 aa, Homo sapiens
  CDR3 for alpha chain variable domain of TCR clone 366762 (TRAV3, TRAJ5)
CAVRDLDTGRRALTF

SEQ ID NO: 733524 - protein, 15 aa, Homo sapiens
  CDR3 for beta chain variable domain of TCR clone 366762 (TRBV20-1, TRBJ2-1)
CSARSPGGAGNEQFF

SEQ ID NO: 733525 - protein, 23 aa, Homo sapiens
  CDR3 for alpha chain variable domain of TCR clone 366763 (TRAV8-6, TRAJ36)
CAVSDWLGQPTSSLGLERDSPLF

SEQ ID NO: 733526 - protein, 15 aa, Homo sapiens
  CDR3 for beta chain variable domain of TCR clone 366763 (TRBV10-3, TRBJ2-2)
CAISVATSNTGELFF

SEQ ID NO: 733527 - protein, 12 aa, Homo sapiens
  CDR3 for alpha chain variable domain of TCR clone 366764 (TRAV21, TRAJ41)
CAVREFRVCTQL

SEQ ID NO: 733528 - protein, 15 aa, Homo sapiens
  CDR3 for beta chain variable domain of TCR clone 366764 (TRBV18, TRBJ1-5)
CASSPQARSNQAQHF

SEQ ID NO: 733529 - protein, 14 aa, Homo sapiens
  CDR3 for alpha chain variable domain of TCR clone 366765 (TRAV38-1, TRAJ35)
CAFLPIGFGNVLHC

SEQ ID NO: 733530 - protein, 17 aa, Homo sapiens
  CDR3 for beta chain variable domain of TCR clone 366765 (TRBV28, TRBJ1-1)
CASSGDLRTESNTEAFF

SEQ ID NO: 733531 - protein, 13 aa, Homo sapiens
  CDR3 for alpha chain variable domain of TCR clone 366766 (TRAV8-3, TRAJ28)
CAVGAVGSYQLTF

SEQ ID NO: 733532 - protein, 13 aa, Homo sapiens
  CDR3 for beta chain variable domain of TCR clone 366766 (TRBV11-3, TRBJ2-3)
CASSHDTKDTQYF

SEQ ID NO: 733533 - protein, 16 aa, Homo sapiens
  CDR3 for alpha chain variable domain of TCR clone 366767 (TRAV12-3, TRAJ58)
CAMTDTEETRGSRLNF

SEQ ID NO: 733534 - protein, 22 aa, Homo sapiens
  CDR3 for beta chain variable domain of TCR clone 366767 (TRBV23-1, TRBJ2-7)
CASSRRLDSGQGYVGGGYEQYF

SEQ ID NO: 733535 - protein, 19 aa, Homo sapiens
  CDR3 for alpha chain variable domain of TCR clone 366768 (TRAV38-1, TRAJ43)
CAFMKHNSGRHALWSRDQT

SEQ ID NO: 733536 - protein, 11 aa, Homo sapiens
  CDR3 for beta chain variable domain of TCR clone 366768 (TRBV7-9, TRBJ2-3)
CASGYTDTQYF

SEQ ID NO: 733537 - protein, 14 aa, Homo sapiens
  CDR3 for alpha chain variable domain of TCR clone 366769 (TRAV13-1, TRAJ44)
CAAKATGTASKLTF

SEQ ID NO: 733538 - protein, 16 aa, Homo sapiens
  CDR3 for beta chain variable domain of TCR clone 366769 (TRBV15, TRBJ1-2)
CATSRGPRTGGDGYTF

SEQ ID NO: 733539 - protein, 11 aa, Homo sapiens
  CDR3 for alpha chain variable domain of TCR clone 366770 (TRAV1-2, TRAJ31)
CAVNNNARLMF

SEQ ID NO: 733540 - protein, 12 aa, Homo sapiens
  CDR3 for beta chain variable domain of TCR clone 366770 (TRBV6-5, TRBJ2-3)
CASMGRGDTQYF

SEQ ID NO: 733541 - protein, 12 aa, Homo sapiens
  CDR3 for alpha chain variable domain of TCR clone 366771 (TRAV12-3, TRAJ17)
CAMTLTGNKLTF

SEQ ID NO: 733542 - protein, 13 aa, Homo sapiens
  CDR3 for beta chain variable domain of TCR clone 366771 (TRBV7-3, TRBJ1-1)
CASSQDWGAEVFF

SEQ ID NO: 733543 - protein, 15 aa, Homo sapiens
  CDR3 for alpha chain variable domain of TCR clone 366772 (TRAV4, TRAJ39)
CLVGPNNNAGNMLPF

SEQ ID NO: 733544 - protein, 15 aa, Homo sapiens
  CDR3 for beta chain variable domain of TCR clone 366772 (TRBV7-9, TRBJ1-6)
CASSSPGRGNSPLHF

SEQ ID NO: 733545 - protein, 11 aa, Homo sapiens
  CDR3 for alpha chain variable domain of TCR clone 366773 (TRAV12-1, TRAJ9)
CVVKNGFKTIF

SEQ ID NO: 733546 - protein, 14 aa, Homo sapiens
  CDR3 for beta chain variable domain of TCR clone 366773 (TRBV19, TRBJ2-1)
CASPTFVLSREQFF

SEQ ID NO: 733547 - protein, 11 aa, Homo sapiens
  CDR3 for alpha chain variable domain of TCR clone 366774 (TRAV23/DV6, TRAJ49)
CAVAPVTSSIL

SEQ ID NO: 733548 - protein, 13 aa, Homo sapiens
  CDR3 for beta chain variable domain of TCR clone 366774 (TRBV7-9, TRBJ2-7)
CASSFAGAYEQYF

SEQ ID NO: 733549 - protein, 14 aa, Homo sapiens
  CDR3 for alpha chain variable domain of TCR clone 366775 (TRAV20, TRAJ21)
CAAGGIYNFNKFYF

SEQ ID NO: 733550 - protein, 12 aa, Homo sapiens
  CDR3 for beta chain variable domain of TCR clone 366775 (TRBV12-4, TRBJ2-1)
CASSVVRVEQFF

SEQ ID NO: 733551 - protein, 14 aa, Homo sapiens
  CDR3 for alpha chain variable domain of TCR clone 366776 (TRAV12-1, TRAJ3)
CVVNPGSSSSKIIF

SEQ ID NO: 733552 - protein, 15 aa, Homo sapiens
  CDR3 for beta chain variable domain of TCR clone 366776 (TRBV5-7, TRBJ1-2)
CAGSSPGQGNYGYTF

SEQ ID NO: 733553 - protein, 14 aa, Homo sapiens
  CDR3 for alpha chain variable domain of TCR clone 366777 (TRAV8-2, TRAJ4)
CVVSPSGGYNKLIF

SEQ ID NO: 733554 - protein, 15 aa, Homo sapiens
  CDR3 for beta chain variable domain of TCR clone 366777 (TRBV25-1, TRBJ1-4)
CASSKRIATNEKLFF

SEQ ID NO: 733555 - protein, 14 aa, Homo sapiens
  CDR3 for alpha chain variable domain of TCR clone 366778 (TRAV3, TRAJ6)
CAVRDWGGSYIPTF

SEQ ID NO: 733556 - protein, 17 aa, Homo sapiens
  CDR3 for beta chain variable domain of TCR clone 366778 (TRBV6-5, TRBJ2-1)
CAIRLSGRFESYNEQFF

SEQ ID NO: 733557 - protein, 18 aa, Homo sapiens
  CDR3 for alpha chain variable domain of TCR clone 366779 (TRAV12-2, )
CAVEDIQNPDPAVYQLRD

SEQ ID NO: 733558 - protein, 16 aa, Homo sapiens
  CDR3 for beta chain variable domain of TCR clone 366779 (TRBV19, TRBJ2-2)
CASRSPGTGATGELFF

SEQ ID NO: 733559 - protein, 14 aa, Homo sapiens
  CDR3 for alpha chain variable domain of TCR clone 366780 (TRAV17, TRAJ34)
CATDSLEGTDKLIF

SEQ ID NO: 733560 - protein, 15 aa, Homo sapiens
  CDR3 for beta chain variable domain of TCR clone 366780 (TRBV11-2, TRBJ2-7)
CASSGTRPYEQSSGR

SEQ ID NO: 733561 - protein, 13 aa, Homo sapiens
  CDR3 for alpha chain variable domain of TCR clone 366781 (TRAV8-3, TRAJ21)
GAVGAYNFNKFYF

SEQ ID NO: 733562 - protein, 16 aa, Homo sapiens
  CDR3 for beta chain variable domain of TCR clone 366781 (TRBV19, TRBJ2-1)
CASSMGGGSSYNEQFF

SEQ ID NO: 733563 - protein, 17 aa, Homo sapiens
  CDR3 for alpha chain variable domain of TCR clone 366782 (TRAV23/DV6, TRAJ57)
CAASSTLSQGGSEKLVF

SEQ ID NO: 733564 - protein, 14 aa, Homo sapiens
  CDR3 for beta chain variable domain of TCR clone 366782 (TRBV25-1, TRBJ1-1)
CASTRVGGNTEAFF

SEQ ID NO: 733565 - protein, 13 aa, Homo sapiens
  CDR3 for alpha chain variable domain of TCR clone 366783 (TRAV3, TRAJ30)
CAVRDRGDDKIIF

SEQ ID NO: 733566 - protein, 14 aa, Homo sapiens
  CDR3 for beta chain variable domain of TCR clone 366783 (TRBV5-1, TRBJ1-1)
CASSRTTGDTETFF

SEQ ID NO: 733567 - protein, 17 aa, Homo sapiens
  CDR3 for alpha chain variable domain of TCR clone 366784 (TRAV26-1, TRAJ53)
CIVRVDDSGGSNYKLTF

SEQ ID NO: 733568 - protein, 15 aa, Homo sapiens
  CDR3 for beta chain variable domain of TCR clone 366784 (TRBV7-3, TRBJ2-3)
CASSLGLTLGDTQYF

SEQ ID NO: 733569 - protein, 13 aa, Homo sapiens
  CDR3 for alpha chain variable domain of TCR clone 366785 (TRAV26-1, TRAJ54)
CIVRVKGAQKLVF

SEQ ID NO: 733570 - protein, 15 aa, Homo sapiens
  CDR3 for beta chain variable domain of TCR clone 366785 (TRBV20-1, TRBJ2-7)
CSARDRVSGMDEQYF

SEQ ID NO: 733571 - protein, 17 aa, Homo sapiens
  CDR3 for alpha chain variable domain of TCR clone 366786 (TRAV13-1, TRAJ52)
CAASSGAGGTSYGKLTF

SEQ ID NO: 733572 - protein, 12 aa, Homo sapiens
  CDR3 for beta chain variable domain of TCR clone 366786 (TRBV29-1, TRBJ2-3)
CSVTGGADTKYF

SEQ ID NO: 733573 - protein, 13 aa, Homo sapiens
  CDR3 for alpha chain variable domain of TCR clone 366787 (TRAV2, TRAJ29)
CAVYSSGNTPLVF

SEQ ID NO: 733574 - protein, 16 aa, Homo sapiens
  CDR3 for beta chain variable domain of TCR clone 366787 (TRBV12-4, TRBJ2-2)
CASSFWIVGNTGELFF

SEQ ID NO: 733575 - protein, 13 aa, Homo sapiens
  CDR3 for alpha chain variable domain of TCR clone 366788 (TRAV39, TRAJ48)
CAAVHFGNEKLTF

SEQ ID NO: 733576 - protein, 12 aa, Homo sapiens
  CDR3 for beta chain variable domain of TCR clone 366788 (TRBV5-5, TRBJ2-5)
CASSYFGETQYF

SEQ ID NO: 733577 - protein, 14 aa, Homo sapiens
  CDR3 for alpha chain variable domain of TCR clone 366789 (TRAV25, TRAJ22)
GAVRSSGSARQLTF

SEQ ID NO: 733578 - protein, 16 aa, Homo sapiens
  CDR3 for beta chain variable domain of TCR clone 366789 (TRBV4-2, TRBJ1-1)
CASSPSPGRAAPEAFF

SEQ ID NO: 733579 - protein, 14 aa, Homo sapiens
  CDR3 for alpha chain variable domain of TCR clone 366790 (TRAV13-2, TRAJ11)
CAETGNSGCSTLTF

SEQ ID NO: 733580 - protein, 11 aa, Homo sapiens
  CDR3 for beta chain variable domain of TCR clone 366790 (TRBV10-3, TRBJ2-7)
CAISEGLEQYF

SEQ ID NO: 733581 - protein, 16 aa, Homo sapiens
  CDR3 for alpha chain variable domain of TCR clone 366791 (TRAV12-3, TRAJ53)
CAMSPGSGGSNYKLTF

SEQ ID NO: 733582 - protein, 16 aa, Homo sapiens
  CDR3 for beta chain variable domain of TCR clone 366791 (TRBV15, TRBJ2-7)
CATSRDGGIPSYEQYF

SEQ ID NO: 733583 - protein, 13 aa, Homo sapiens
  CDR3 for alpha chain variable domain of TCR clone 366792 (TRAV12-3, TRAJ50)
CARGGTSYDKVIF

SEQ ID NO: 733584 - protein, 19 aa, Homo sapiens
  CDR3 for beta chain variable domain of TCR clone 366792 (TRBV19, TRBJ2-5)
CASSIGQVTDFFLGETQYF

SEQ ID NO: 733585 - protein, 11 aa, Homo sapiens
  CDR3 for alpha chain variable domain of TCR clone 366793 (TRAV17, TRAJ49)
CATNTGNQFYF

SEQ ID NO: 733586 - protein, 12 aa, Homo sapiens
  CDR3 for beta chain variable domain of TCR clone 366793 (TRBV2, TRBJ2-7)
CASSDGSRIPYF

SEQ ID NO: 733587 - protein, 12 aa, Homo sapiens
  CDR3 for alpha chain variable domain of TCR clone 366794 (TRAV17, TRAJ4)
CATRGGYNKLIF

SEQ ID NO: 733588 - protein, 14 aa, Homo sapiens
  CDR3 for beta chain variable domain of TCR clone 366794 (TRBV19, TRBJ1-1)
CASRRGQGNTEAFF

SEQ ID NO: 733589 - protein, 12 aa, Homo sapiens
  CDR3 for alpha chain variable domain of TCR clone 366795 (TRAV21, TRAJ33)
CAKMGSNYQSIW

SEQ ID NO: 733590 - protein, 14 aa, Homo sapiens
  CDR3 for beta chain variable domain of TCR clone 366795 (TRBV2, TRBJ2-7)
CASSLTSGGYEQYF

SEQ ID NO: 733591 - protein, 14 aa, Homo sapiens
  CDR3 for alpha chain variable domain of TCR clone 366796 (TRAV26-1, TRAJ38)
CIADNAGNNLKLIC

SEQ ID NO: 733592 - protein, 13 aa, Homo sapiens
  CDR3 for beta chain variable domain of TCR clone 366796 (TRBV20-1, TRBJ1-1)
CSARGGGNTEAFF

SEQ ID NO: 733593 - protein, 14 aa, Homo sapiens
  CDR3 for alpha chain variable domain of TCR clone 366797 (TRAV26-1, TRAJ48)
CIVRVPFGNEKLTF

SEQ ID NO: 733594 - protein, 16 aa, Homo sapiens
  CDR3 for beta chain variable domain of TCR clone 366797 (TRBV18, TRBJ2-1)
CASSPYLSIRGDKQFF

SEQ ID NO: 733595 - protein, 14 aa, Homo sapiens
  CDR3 for alpha chain variable domain of TCR clone 366798 (TRAV9-2, TRAJ39)
CALYIYNAGNMLTF

SEQ ID NO: 733596 - protein, 16 aa, Homo sapiens
  CDR3 for beta chain variable domain of TCR clone 366798 (TRBV20-1, TRBJ1-2)
CSASMGQGVANHGYTF

SEQ ID NO: 733597 - protein, 16 aa, Homo sapiens
  CDR3 for alpha chain variable domain of TCR clone 366799 (TRAV1-2, TRAJ6)
CAVRDQGTGGSYIPTF

SEQ ID NO: 733598 - protein, 13 aa, Homo sapiens
  CDR3 for beta chain variable domain of TCR clone 366799 (TRBV28, TRBJ2-7)
CASTPGPAGEQYF

SEQ ID NO: 733599 - protein, 15 aa, Homo sapiens
  CDR3 for alpha chain variable domain of TCR clone 366800 (TRAV5, TRAJ33)
CAEAPAMDSNYQLIW

SEQ ID NO: 733600 - protein, 15 aa, Homo sapiens
  CDR3 for beta chain variable domain of TCR clone 366800 (TRBV20-1, TRBJ1-1)
CSASRGVTGNTEAFF

SEQ ID NO: 733601 - protein, 14 aa, Homo sapiens
  CDR3 for alpha chain variable domain of TCR clone 366801 (TRAV38-1, TRAJ40)
CALRPTSGTFKYIF

SEQ ID NO: 733602 - protein, 14 aa, Homo sapiens
  CDR3 for beta chain variable domain of TCR clone 366801 (TRBV25-1, TRBJ1-1)
CASTHLGGNTESFF

SEQ ID NO: 733603 - protein, 12 aa, Homo sapiens
  CDR3 for alpha chain variable domain of TCR clone 366802 (TRAV17, TRAJ36)
CATLTGANNLFF

SEQ ID NO: 733604 - protein, 15 aa, Homo sapiens
  CDR3 for beta chain variable domain of TCR clone 366802 (TRBV19, TRBJ1-2)
CASSTKADTNYGYTF

SEQ ID NO: 733605 - protein, 17 aa, Homo sapiens
  CDR3 for alpha chain variable domain of TCR clone 366803 (TRAV3, TRAJ12)
CAVRDGGRMDSSFKLIF

SEQ ID NO: 733606 - protein, 12 aa, Homo sapiens
  CDR3 for beta chain variable domain of TCR clone 366803 (TRBV11-2, TRBJ2-2)
CASSLGGGELFF

SEQ ID NO: 733607 - protein, 13 aa, Homo sapiens
  CDR3 for alpha chain variable domain of TCR clone 366804 (TRAV21, TRAJ27)
CAARPGNAGKSTF

SEQ ID NO: 733608 - protein, 13 aa, Homo sapiens
  CDR3 for beta chain variable domain of TCR clone 366804 (TRBV2, TRBJ2-5)
CASGTPYQETQYF

SEQ ID NO: 733609 - protein, 14 aa, Homo sapiens
  CDR3 for alpha chain variable domain of TCR clone 366805 (TRAV12-2, TRAJ17)
CAVLFKAAGNKLTF

SEQ ID NO: 733610 - protein, 14 aa, Homo sapiens
  CDR3 for beta chain variable domain of TCR clone 366805 (TRBV15, TRBJ1-2)
CATSSDFDRVGYTF

SEQ ID NO: 733611 - protein, 13 aa, Homo sapiens
  CDR3 for alpha chain variable domain of TCR clone 366806 (TRAV2, TRAJ15)
CAVASQAGTALIF

SEQ ID NO: 733612 - protein, 15 aa, Homo sapiens
  CDR3 for beta chain variable domain of TCR clone 366806 (TRBV7-2, TRBJ2-7)
CASSLKGALTYEQYF

SEQ ID NO: 733613 - protein, 20 aa, Homo sapiens
  CDR3 for alpha chain variable domain of TCR clone 366807 (TRAV12-1, TRAJ42)
SPVIQPPTSVKGGSQGNLIF

SEQ ID NO: 733614 - protein, 16 aa, Homo sapiens
  CDR3 for beta chain variable domain of TCR clone 366807 (TRBV19, TRBJ2-2)
CASRSPGTGATGELFF

SEQ ID NO: 733615 - protein, 17 aa, Homo sapiens
  CDR3 for alpha chain variable domain of TCR clone 366808 (TRAV4, TRAJ13)
CPVGVQGSSGGYQKVTF

SEQ ID NO: 733616 - protein, 18 aa, Homo sapiens
  CDR3 for beta chain variable domain of TCR clone 366808 (TRBV15, TRBJ2-3)
CATSRDGARSWDTYTQYF

SEQ ID NO: 733617 - protein, 13 aa, Homo sapiens
  CDR3 for alpha chain variable domain of TCR clone 366809 (TRAV23/DV6, TRAJ15)
CAAPPAGRNCSDL

SEQ ID NO: 733618 - protein, 14 aa, Homo sapiens
  CDR3 for beta chain variable domain of TCR clone 366809 (TRBV7-9, TRBJ1-2)
CASSRQGANYGYTF

SEQ ID NO: 733619 - protein, 14 aa, Homo sapiens
  CDR3 for alpha chain variable domain of TCR clone 366810 (TRAV1-2, TRAJ8)
CAVREDTGFQKLVF

SEQ ID NO: 733620 - protein, 17 aa, Homo sapiens
  CDR3 for beta chain variable domain of TCR clone 366810 (TRBV7-2, TRBJ2-3)
CASSFEARGTSTDTQYF

SEQ ID NO: 733621 - protein, 12 aa, Homo sapiens
  CDR3 for alpha chain variable domain of TCR clone 366811 (TRAV12-3, TRAJ17)
CAMALTVNKLTF

SEQ ID NO: 733622 - protein, 15 aa, Homo sapiens
  CDR3 for beta chain variable domain of TCR clone 366811 (TRBV6-3, TRBJ2-7)
CASSSPGTVFYEQYF

SEQ ID NO: 733623 - protein, 15 aa, Homo sapiens
  CDR3 for alpha chain variable domain of TCR clone 366812 (TRAV12-3, TRAJ6)
CAMSPASGGSYIPKF

SEQ ID NO: 733624 - protein, 15 aa, Homo sapiens
  CDR3 for beta chain variable domain of TCR clone 366812 (TRBV2, TRBJ1-2)
CASSESRTVNYGYTF

SEQ ID NO: 733625 - protein, 23 aa, Homo sapiens
  CDR3 for alpha chain variable domain of TCR clone 366813 (TRAV26-1, TRAJ38)
CIVRPLNAGNNHIQHPDPAVYQL

SEQ ID NO: 733626 - protein, 13 aa, Homo sapiens
  CDR3 for beta chain variable domain of TCR clone 366813 (TRBV18, TRBJ1-1)
CASSPNGDTEAFF

SEQ ID NO: 733627 - protein, 13 aa, Homo sapiens
  CDR3 for alpha chain variable domain of TCR clone 366814 (TRAV13-2, TRAJ15)
CAESNQAGTALIF

SEQ ID NO: 733628 - protein, 12 aa, Homo sapiens
  CDR3 for beta chain variable domain of TCR clone 366814 (TRBV12-4, TRBJ2-7)
CASSLGGYEQYF

SEQ ID NO: 733629 - protein, 15 aa, Homo sapiens
  CDR3 for alpha chain variable domain of TCR clone 366815 (TRAV17, TRAJ57)
CATGPSQGGSEKLVL

SEQ ID NO: 733630 - protein, 18 aa, Homo sapiens
  CDR3 for beta chain variable domain of TCR clone 366815 (TRBV7-9, TRBJ2-7)
CASSLTTSGSRTWYEQYF

SEQ ID NO: 733631 - protein, 13 aa, Homo sapiens
  CDR3 for alpha chain variable domain of TCR clone 366816 (TRAV1-2, TRAJ11)
CAGRREGYSTLTF

SEQ ID NO: 733632 - protein, 14 aa, Homo sapiens
  CDR3 for beta chain variable domain of TCR clone 366816 (TRBV14, TRBJ2-7)
CASRHRDKPYEQYF

SEQ ID NO: 733633 - protein, 12 aa, Homo sapiens
  CDR3 for alpha chain variable domain of TCR clone 366817 (TRAV16, TRAJ26)
CAPEELWSEFCL

SEQ ID NO: 733634 - protein, 15 aa, Homo sapiens
  CDR3 for beta chain variable domain of TCR clone 366817 (TRBV7-2, TRBJ2-3)
CASSLTGTSTDTKYF

SEQ ID NO: 733635 - protein, 11 aa, Homo sapiens
  CDR3 for alpha chain variable domain of TCR clone 366818 (TRAV13-1, TRAJ43)
CAARNNNDMRF

SEQ ID NO: 733636 - protein, 15 aa, Homo sapiens
  CDR3 for beta chain variable domain of TCR clone 366818 (TRBV6-1, TRBJ2-2)
CASSRLRGDTGELFF

SEQ ID NO: 733637 - protein, 12 aa, Homo sapiens
  CDR3 for alpha chain variable domain of TCR clone 366819 (TRAV12-3, TRAJ5)
CAMDTGRRALTF

SEQ ID NO: 733638 - protein, 13 aa, Homo sapiens
  CDR3 for beta chain variable domain of TCR clone 366819 (TRBV20-1, TRBJ2-7)
CSATHTSGYEQYF

SEQ ID NO: 733639 - protein, 12 aa, Homo sapiens
  CDR3 for alpha chain variable domain of TCR clone 366820 (TRAV13-2, TRAJ23)
CAERPRGGKLIF

SEQ ID NO: 733640 - protein, 15 aa, Homo sapiens
  CDR3 for beta chain variable domain of TCR clone 366820 (TRBV20-1, TRBJ2-7)
CSARDRVSGMDEQYF

SEQ ID NO: 733641 - protein, 15 aa, Homo sapiens
  CDR3 for alpha chain variable domain of TCR clone 366821 (TRAV8-6, TRAJ26)
CAVSDQSPGGQNFVF

SEQ ID NO: 733642 - protein, 15 aa, Homo sapiens
  CDR3 for beta chain variable domain of TCR clone 366821 (TRBV20-1, TRBJ2-7)
CSARVPAAYFYEQYF

SEQ ID NO: 733643 - protein, 14 aa, Homo sapiens
  CDR3 for alpha chain variable domain of TCR clone 366822 (TRAV21, TRAJ35)
CAVMPIGFGNVLHF

SEQ ID NO: 733644 - protein, 12 aa, Homo sapiens
  CDR3 for beta chain variable domain of TCR clone 366822 (TRBV7-9, TRBJ2-7)
CASSIKLEEQYF

SEQ ID NO: 733645 - protein, 18 aa, Homo sapiens
  CDR3 for alpha chain variable domain of TCR clone 366823 (TRAV21, TRAJ52)
CAVRPSPAGGTSYGKLTF

SEQ ID NO: 733646 - protein, 17 aa, Homo sapiens
  CDR3 for beta chain variable domain of TCR clone 366823 (TRBV13, TRBJ2-3)
CASGLSRVAGGMNTQYF

SEQ ID NO: 733647 - protein, 15 aa, Homo sapiens
  CDR3 for alpha chain variable domain of TCR clone 366824 (TRAV13-1, TRAJ5)
CAVSPIDTGRRALTF

SEQ ID NO: 733648 - protein, 18 aa, Homo sapiens
  CDR3 for beta chain variable domain of TCR clone 366824 (TRBV4-1, TRBJ2-2)
CASRFRTSGGGGPGELFF

SEQ ID NO: 733649 - protein, 14 aa, Homo sapiens
  CDR3 for alpha chain variable domain of TCR clone 366825 (TRAV23/DV6, TRAJ21)
CAAYKSGPRDKFYF

SEQ ID NO: 733650 - protein, 15 aa, Homo sapiens
  CDR3 for beta chain variable domain of TCR clone 366825 (TRBV5-4, TRBJ2-2)
CASSLASRGTGELFF

SEQ ID NO: 733651 - protein, 17 aa, Homo sapiens
  CDR3 for alpha chain variable domain of TCR clone 366826 (TRAV3, TRAJ6)
CAVRDGPRAGGSYIPTF

SEQ ID NO: 733652 - protein, 15 aa, Homo sapiens
  CDR3 for beta chain variable domain of TCR clone 366826 (TRBV5-8, TRBJ2-2)
CASSLDRGATGELFF

SEQ ID NO: 733653 - protein, 18 aa, Homo sapiens
  CDR3 for alpha chain variable domain of TCR clone 366827 (TRAV26-2, TRAJ33)
CCVLLHPEEPASNYQLIW

SEQ ID NO: 733654 - protein, 14 aa, Homo sapiens
  CDR3 for beta chain variable domain of TCR clone 366827 (TRBV20-1, TRBJ1-1)
CSAQTRIGGTEAFF

SEQ ID NO: 733655 - protein, 14 aa, Homo sapiens
  CDR3 for alpha chain variable domain of TCR clone 366828 (TRAV3, TRAJ16)
CCERLKSDGQKLLF

SEQ ID NO: 733656 - protein, 14 aa, Homo sapiens
  CDR3 for beta chain variable domain of TCR clone 366828 (TRBV12-5, TRBJ2-5)
CASGSRTHQETQYF

SEQ ID NO: 733657 - protein, 12 aa, Homo sapiens
  CDR3 for alpha chain variable domain of TCR clone 366829 (TRAV1-1, TRAJ8)
CAGGTGFQKLVF

SEQ ID NO: 733658 - protein, 16 aa, Homo sapiens
  CDR3 for beta chain variable domain of TCR clone 366829 (TRBV13, TRBJ2-5)
CASSRGAGIRQETQYF

SEQ ID NO: 733659 - protein, 14 aa, Homo sapiens
  CDR3 for alpha chain variable domain of TCR clone 366830 (TRAV8-3, TRAJ13)
CAAGARGGYQKVTF

SEQ ID NO: 733660 - protein, 16 aa, Homo sapiens
  CDR3 for beta chain variable domain of TCR clone 366830 (TRBV27, TRBJ2-7)
CASSLGSGTGPYEQYF

SEQ ID NO: 733661 - protein, 14 aa, Homo sapiens
  CDR3 for alpha chain variable domain of TCR clone 366831 (TRAV8-4, TRAJ39)
CAVSEGNAGNMLTF

SEQ ID NO: 733662 - protein, 14 aa, Homo sapiens
  CDR3 for beta chain variable domain of TCR clone 366831 (TRBV11-2, TRBJ2-5)
CASSRTGGIETQYF

SEQ ID NO: 733663 - protein, 17 aa, Homo sapiens
  CDR3 for alpha chain variable domain of TCR clone 366832 (TRAV8-1, TRAJ43)
CAVTNDMRFGAGTRLTV

SEQ ID NO: 733664 - protein, 15 aa, Homo sapiens
  CDR3 for beta chain variable domain of TCR clone 366832 (TRBV10-2, TRBJ2-6)
CASSEQGTGANVLTF

SEQ ID NO: 733665 - protein, 14 aa, Homo sapiens
  CDR3 for alpha chain variable domain of TCR clone 366833 (TRAV30, TRAJ33)
CGTVAPRSNYQLIW

SEQ ID NO: 733666 - protein, 14 aa, Homo sapiens
  CDR3 for beta chain variable domain of TCR clone 366833 (TRBV25-1, TRBJ2-2)
CASSELGLPGELFF

SEQ ID NO: 733667 - protein, 11 aa, Homo sapiens
  CDR3 for alpha chain variable domain of TCR clone 366834 (TRAV1-1, TRAJ23)
CAVRQGGKLIF

SEQ ID NO: 733668 - protein, 14 aa, Homo sapiens
  CDR3 for beta chain variable domain of TCR clone 366834 (TRBV28, TRBJ2-5)
CASSLYRGTETQYF

SEQ ID NO: 733669 - protein, 16 aa, Homo sapiens
  CDR3 for alpha chain variable domain of TCR clone 366835 (TRAV3, TRAJ37)
CAVRGKGSGNTGKQIF

SEQ ID NO: 733670 - protein, 14 aa, Homo sapiens
  CDR3 for beta chain variable domain of TCR clone 366835 (TRBV7-7, TRBJ2-2)
CASSRDRSTGELFF

SEQ ID NO: 733671 - protein, 13 aa, Homo sapiens
  CDR3 for alpha chain variable domain of TCR clone 366836 (TRAV17, TRAJ26)
CATVDNYVQNFVF

SEQ ID NO: 733672 - protein, 16 aa, Homo sapiens
  CDR3 for beta chain variable domain of TCR clone 366836 (TRBV2, TRBJ2-1)
FASSVGGSLSYNEQFF

SEQ ID NO: 733673 - protein, 13 aa, Homo sapiens
  CDR3 for alpha chain variable domain of TCR clone 366837 (TRAV21, TRAJ27)
CAARPGNAGKSTF

SEQ ID NO: 733674 - protein, 15 aa, Homo sapiens
  CDR3 for beta chain variable domain of TCR clone 366837 (TRBV19, TRBJ2-7)
CASSFNSGGVWEQYF

SEQ ID NO: 733675 - protein, 13 aa, Homo sapiens
  CDR3 for alpha chain variable domain of TCR clone 366838 (TRAV21, TRAJ56)
CAVRTGANSKLTF

SEQ ID NO: 733676 - protein, 15 aa, Homo sapiens
  CDR3 for beta chain variable domain of TCR clone 366838 (TRBV7-9, TRBJ1-1)
CASNHRGTVNTEAFF

SEQ ID NO: 733677 - protein, 15 aa, Homo sapiens
  CDR3 for alpha chain variable domain of TCR clone 366839 (TRAV13-2, TRAJ5)
CAENPHWTGRRALTF

SEQ ID NO: 733678 - protein, 16 aa, Homo sapiens
  CDR3 for beta chain variable domain of TCR clone 366839 (TRBV7-9, TRBJ1-3)
CASSKTSGLRMGTIYF

SEQ ID NO: 733679 - protein, 13 aa, Homo sapiens
  CDR3 for alpha chain variable domain of TCR clone 366840 (TRAV8-3, TRAJ6)
CAVEKGVSYIPTF

SEQ ID NO: 733680 - protein, 15 aa, Homo sapiens
  CDR3 for beta chain variable domain of TCR clone 366840 (TRBV28, TRBJ2-5)
CASSADRGRGETQYF

SEQ ID NO: 733681 - protein, 12 aa, Homo sapiens
  CDR3 for alpha chain variable domain of TCR clone 366841 (TRAV12-2, TRAJ30)
CAVRNRDDKIIF

SEQ ID NO: 733682 - protein, 13 aa, Homo sapiens
  CDR3 for beta chain variable domain of TCR clone 366841 (TRBV11-2, TRBJ2-5)
CASSLSSQETQYF

SEQ ID NO: 733683 - protein, 14 aa, Homo sapiens
  CDR3 for alpha chain variable domain of TCR clone 366842 (TRAV12-2, TRAJ13)
CAVKKTGGYQKVTF

SEQ ID NO: 733684 - protein, 11 aa, Homo sapiens
  CDR3 for beta chain variable domain of TCR clone 366842 (TRBV29-1, TRBJ2-5)
CSEDKTGTQYF

SEQ ID NO: 733685 - protein, 15 aa, Homo sapiens
  CDR3 for alpha chain variable domain of TCR clone 366843 (TRAV38-1, TRAJ57)
CALMDSQGGSERLVF

SEQ ID NO: 733686 - protein, 16 aa, Homo sapiens
  CDR3 for beta chain variable domain of TCR clone 366843 (TRBV10-3, TRBJ2-1)
CAIRGGGRGDYNEQFF

SEQ ID NO: 733687 - protein, 17 aa, Homo sapiens
  CDR3 for alpha chain variable domain of TCR clone 366844 (TRAV8-6, TRAJ58)
CAVSSWVGETSGPRLTF

SEQ ID NO: 733688 - protein, 11 aa, Homo sapiens
  CDR3 for beta chain variable domain of TCR clone 366844 (TRBV12-4, TRBJ2-2)
CASSSAGELFF

SEQ ID NO: 733689 - protein, 14 aa, Homo sapiens
  CDR3 for alpha chain variable domain of TCR clone 366845 (TRAV12-2, TRAJ45)
CAVNIGGGADGLTF

SEQ ID NO: 733690 - protein, 17 aa, Homo sapiens
  CDR3 for beta chain variable domain of TCR clone 366845 (TRBV7-8, TRBJ2-6)
CASSAGTGGAGANVLPF

SEQ ID NO: 733691 - protein, 11 aa, Homo sapiens
  CDR3 for alpha chain variable domain of TCR clone 366846 (TRAV3, TRAJ21)
CAVCNLNNFYF

SEQ ID NO: 733692 - protein, 16 aa, Homo sapiens
  CDR3 for beta chain variable domain of TCR clone 366846 (TRBV19, TRBJ2-1)
CASSKAGPSSYNEQFF

SEQ ID NO: 733693 - protein, 13 aa, Homo sapiens
  CDR3 for alpha chain variable domain of TCR clone 366847 (TRAV27, TRAJ3)
ASLRGSSASKIIF

SEQ ID NO: 733694 - protein, 15 aa, Homo sapiens
  CDR3 for beta chain variable domain of TCR clone 366847 (TRBV29-1, TRBJ2-1)
CSGRDRKSSYNEQFF

SEQ ID NO: 733695 - protein, 14 aa, Homo sapiens
  CDR3 for alpha chain variable domain of TCR clone 366848 (TRAV27, TRAJ41)
CAVRTQIPGMHSTS

SEQ ID NO: 733696 - protein, 17 aa, Homo sapiens
  CDR3 for beta chain variable domain of TCR clone 366848 (TRBV20-1, TRBJ2-2)
CSASGSGQGGLTGELFF

SEQ ID NO: 733697 - protein, 12 aa, Homo sapiens
  CDR3 for alpha chain variable domain of TCR clone 366849 (TRAV27, TRAJ9)
CAAESGGFKTIF

SEQ ID NO: 733698 - protein, 18 aa, Homo sapiens
  CDR3 for beta chain variable domain of TCR clone 366849 (TRBV10-2, TRBJ2-2)
CISAPAVHRQADAGELFF

SEQ ID NO: 733699 - protein, 13 aa, Homo sapiens
  CDR3 for alpha chain variable domain of TCR clone 366850 (TRAV3, TRAJ27)
CAVRPLGAGKSTF

SEQ ID NO: 733700 - protein, 16 aa, Homo sapiens
  CDR3 for beta chain variable domain of TCR clone 366850 (TRBV7-9, TRBJ2-1)
CASSLASGTSYNEQFF

SEQ ID NO: 733701 - protein, 16 aa, Homo sapiens
  CDR3 for alpha chain variable domain of TCR clone 366851 (TRAV20, TRAJ22)
CAVQASSSGSARQLTF

SEQ ID NO: 733702 - protein, 15 aa, Homo sapiens
  CDR3 for beta chain variable domain of TCR clone 366851 (TRBV27, TRBJ2-1)
CASSNGGGSSNEQFF

SEQ ID NO: 733703 - protein, 11 aa, Homo sapiens
  CDR3 for alpha chain variable domain of TCR clone 366852 (TRAV1-1, TRAJ23)
CTVRQGGKLIF

SEQ ID NO: 733704 - protein, 14 aa, Homo sapiens
  CDR3 for beta chain variable domain of TCR clone 366852 (TRBV19, TRBJ2-1)
CASPTFVLSGEQFS

SEQ ID NO: 733705 - protein, 13 aa, Homo sapiens
  CDR3 for alpha chain variable domain of TCR clone 366853 (TRAV26-1, TRAJ48)
CIVRVVGDEKLTF

SEQ ID NO: 733706 - protein, 13 aa, Homo sapiens
  CDR3 for beta chain variable domain of TCR clone 366853 (TRBV4-2, TRBJ1-1)
CASSQAGNTEAFF

SEQ ID NO: 733707 - protein, 13 aa, Homo sapiens
  CDR3 for alpha chain variable domain of TCR clone 366854 (TRAV13-1, TRAJ20)
CAARVSNYYKLSF

SEQ ID NO: 733708 - protein, 16 aa, Homo sapiens
  CDR3 for beta chain variable domain of TCR clone 366854 (TRBV11-1, TRBJ1-1)
CATNPRDRAFNTEAFF

SEQ ID NO: 733709 - protein, 17 aa, Homo sapiens
  CDR3 for alpha chain variable domain of TCR clone 366855 (TRAV13-1, TRAJ31)
CAPRDRLMFGDGTQLVV

SEQ ID NO: 733710 - protein, 13 aa, Homo sapiens
  CDR3 for beta chain variable domain of TCR clone 366855 (TRBV7-6, TRBJ1-2)
CASSLGQGRGYTF

SEQ ID NO: 733711 - protein, 19 aa, Homo sapiens
  CDR3 for alpha chain variable domain of TCR clone 366856 (TRAV1-2, TRAJ26)
CLLPLCCERPDNYGQNFVF

SEQ ID NO: 733712 - protein, 14 aa, Homo sapiens
  CDR3 for beta chain variable domain of TCR clone 366856 (TRBV7-3, TRBJ2-3)
CASSSTGVADTQYF

SEQ ID NO: 733713 - protein, 16 aa, Homo sapiens
  CDR3 for alpha chain variable domain of TCR clone 366857 (TRAV22, TRAJ45)
CAVERGKRGGADGLTF

SEQ ID NO: 733714 - protein, 15 aa, Homo sapiens
  CDR3 for beta chain variable domain of TCR clone 366857 (TRBV4-1, TRBJ2-5)
CASSQWDLYQETQYF

SEQ ID NO: 733715 - protein, 13 aa, Homo sapiens
  CDR3 for alpha chain variable domain of TCR clone 366858 (TRAV2, TRAJ15)
CAVASQAGTALIF

SEQ ID NO: 733716 - protein, 16 aa, Homo sapiens
  CDR3 for beta chain variable domain of TCR clone 366858 (TRBV12-4, TRBJ1-5)
CASSSGPRGSNQPQHF

SEQ ID NO: 733717 - protein, 15 aa, Homo sapiens
  CDR3 for alpha chain variable domain of TCR clone 366859 (TRAV8-4, TRAJ11)
RAVSRALSGYSTLTF

SEQ ID NO: 733718 - protein, 13 aa, Homo sapiens
  CDR3 for beta chain variable domain of TCR clone 366859 (TRBV10-3, TRBJ2-7)
CASKLAVNYEQYF

SEQ ID NO: 733719 - protein, 13 aa, Homo sapiens
  CDR3 for alpha chain variable domain of TCR clone 366860 (TRAV27, TRAJ45)
CRSSGGGADGLTF

SEQ ID NO: 733720 - protein, 15 aa, Homo sapiens
  CDR3 for beta chain variable domain of TCR clone 366860 (TRBV20-1, TRBJ2-7)
WSARDRVSGMDEQYF

SEQ ID NO: 733721 - protein, 14 aa, Homo sapiens
  CDR3 for alpha chain variable domain of TCR clone 366861 (TRAV35, TRAJ33)
CAGSSQDSNYQLIW

SEQ ID NO: 733722 - protein, 15 aa, Homo sapiens
  CDR3 for beta chain variable domain of TCR clone 366861 (TRBV28, TRBJ2-5)
CACSPGQGSIETQYF

SEQ ID NO: 733723 - protein, 16 aa, Homo sapiens
  CDR3 for alpha chain variable domain of TCR clone 366862 (TRAV12-3, TRAJ53)
CAMSPGSGGSNYKLTF

SEQ ID NO: 733724 - protein, 20 aa, Homo sapiens
  CDR3 for beta chain variable domain of TCR clone 366862 (TRBV7-8, TRBJ2-2)
CASSHLFPGPTIHIPGELFF

SEQ ID NO: 733725 - protein, 14 aa, Homo sapiens
  CDR3 for alpha chain variable domain of TCR clone 366863 (TRAV4, TRAJ20)
CLVGRRSNDYKLSF

SEQ ID NO: 733726 - protein, 18 aa, Homo sapiens
  CDR3 for beta chain variable domain of TCR clone 366863 (TRBV2, TRBJ2-5)
CASSGDPQGRGAQENQDF

SEQ ID NO: 733727 - protein, 18 aa, Homo sapiens
  CDR3 for alpha chain variable domain of TCR clone 366864 (TRAV21, TRAJ52)
CAVRPSPAGGTSYGKLTF

SEQ ID NO: 733728 - protein, 16 aa, Homo sapiens
  CDR3 for beta chain variable domain of TCR clone 366864 (TRBV20-1, TRBJ1-4)
CSARPYGGELNEKLFF

SEQ ID NO: 733729 - protein, 11 aa, Homo sapiens
  CDR3 for alpha chain variable domain of TCR clone 366865 (TRAV3, TRAJ21)
FAVGNFNKFYF

SEQ ID NO: 733730 - protein, 15 aa, Homo sapiens
  CDR3 for beta chain variable domain of TCR clone 366865 (TRBV29-1, TRBJ2-1)
CSVEGGPASYNEQFF

SEQ ID NO: 733731 - protein, 13 aa, Homo sapiens
  CDR3 for alpha chain variable domain of TCR clone 366866 (TRAV2, TRAJ21)
CAVEDLNFNKFYF

SEQ ID NO: 733732 - protein, 13 aa, Homo sapiens
  CDR3 for beta chain variable domain of TCR clone 366866 (TRBV23-1, TRBJ1-4)
CASRGKFNEKLFF

SEQ ID NO: 733733 - protein, 16 aa, Homo sapiens
  CDR3 for alpha chain variable domain of TCR clone 366867 (TRAV27, TRAJ48)
TAAQPGDTCLYLPLTF

SEQ ID NO: 733734 - protein, 13 aa, Homo sapiens
  CDR3 for beta chain variable domain of TCR clone 366867 (TRBV7-2, TRBJ2-5)
CASSQTSVETQYF

SEQ ID NO: 733735 - protein, 16 aa, Homo sapiens
  CDR3 for alpha chain variable domain of TCR clone 366868 (TRAV12-2, TRAJ6)
CAAPLAGTGGSNIPTF

SEQ ID NO: 733736 - protein, 10 aa, Homo sapiens
  CDR3 for beta chain variable domain of TCR clone 366868 (TRBV28, TRBJ1-2)
CASSSDRAVF

SEQ ID NO: 733737 - protein, 12 aa, Homo sapiens
  CDR3 for alpha chain variable domain of TCR clone 366869 (TRAV36/DV7, TRAJ54)
CAVVRGAQKLVF

SEQ ID NO: 733738 - protein, 14 aa, Homo sapiens
  CDR3 for beta chain variable domain of TCR clone 366869 (TRBV7-2, TRBJ1-1)
CASSFLTGTTEAFF

SEQ ID NO: 733739 - protein, 15 aa, Homo sapiens
  CDR3 for alpha chain variable domain of TCR clone 366870 (TRAV14/DV4, TRAJ26)
CAMREGQNYVQNFVF

SEQ ID NO: 733740 - protein, 13 aa, Homo sapiens
  CDR3 for beta chain variable domain of TCR clone 366870 (TRBV24-1, TRBJ2-2)
CATSDWSTGELFF

SEQ ID NO: 733741 - protein, 12 aa, Homo sapiens
  CDR3 for alpha chain variable domain of TCR clone 366871 (TRAV13-1, TRAJ11)
CAADSGYSTLTF

SEQ ID NO: 733742 - protein, 15 aa, Homo sapiens
  CDR3 for beta chain variable domain of TCR clone 366871 (TRBV7-2, TRBJ2-7)
CASSLKGALTYEQYF

SEQ ID NO: 733743 - protein, 11 aa, Homo sapiens
  CDR3 for alpha chain variable domain of TCR clone 366872 (TRAV12-2, TRAJ29)
CAVTLRSPLVF

SEQ ID NO: 733744 - protein, 16 aa, Homo sapiens
  CDR3 for beta chain variable domain of TCR clone 366872 (TRBV12-4, TRBJ1-5)
CASSRPVGGSNQPQHF

SEQ ID NO: 733745 - protein, 12 aa, Homo sapiens
  CDR3 for alpha chain variable domain of TCR clone 366873 (TRAV35, TRAJ39)
LAPNNAGNMLTF

SEQ ID NO: 733746 - protein, 16 aa, Homo sapiens
  CDR3 for beta chain variable domain of TCR clone 366873 (TRBV2, TRBJ2-3)
CASSTSVEGVTDTQYY

SEQ ID NO: 733747 - protein, 15 aa, Homo sapiens
  CDR3 for alpha chain variable domain of TCR clone 366874 (TRAV23/DV6, TRAJ37)
CAAGEGSSNTCKLIF

SEQ ID NO: 733748 - protein, 17 aa, Homo sapiens
  CDR3 for beta chain variable domain of TCR clone 366874 (TRBV20-1, TRBJ2-7)
CSATRAGGVAGVEEQYF

SEQ ID NO: 733749 - protein, 12 aa, Homo sapiens
  CDR3 for alpha chain variable domain of TCR clone 366875 (TRAV1-1, TRAJ9)
CAVDTGGFKTIF

SEQ ID NO: 733750 - protein, 16 aa, Homo sapiens
  CDR3 for beta chain variable domain of TCR clone 366875 (TRBV11-2, TRBJ1-2)
CASSLDTGGADYGYTF

SEQ ID NO: 733751 - protein, 12 aa, Homo sapiens
  CDR3 for alpha chain variable domain of TCR clone 366876 (TRAV39, TRAJ31)
CAVDENNARLMF

SEQ ID NO: 733752 - protein, 14 aa, Homo sapiens
  CDR3 for beta chain variable domain of TCR clone 366876 (TRBV12-5, TRBJ2-5)
CASGSRTHRETQYF

SEQ ID NO: 733753 - protein, 15 aa, Homo sapiens
  CDR3 for alpha chain variable domain of TCR clone 366877 (TRAV17, TRAJ57)
CATGPSQGGSEKLVF

SEQ ID NO: 733754 - protein, 11 aa, Homo sapiens
  CDR3 for beta chain variable domain of TCR clone 366877 (TRBV29-1, TRBJ2-5)
CSEGRTGTQYF

SEQ ID NO: 733755 - protein, 11 aa, Homo sapiens
  CDR3 for alpha chain variable domain of TCR clone 366878 (TRAV21, TRAJ11)
CAVNGYSTLTF

SEQ ID NO: 733756 - protein, 12 aa, Homo sapiens
  CDR3 for beta chain variable domain of TCR clone 366878 (TRBV11-3, TRBJ1-1)
CASSHRQGEAFF

SEQ ID NO: 733757 - protein, 14 aa, Homo sapiens
  CDR3 for alpha chain variable domain of TCR clone 366879 (TRAV17, TRAJ4)
CATAPLGGYNKLIV

SEQ ID NO: 733758 - protein, 13 aa, Homo sapiens
  CDR3 for beta chain variable domain of TCR clone 366879 (TRBV12-4, TRBJ1-3)
CASSLASGNTIYF

SEQ ID NO: 733759 - protein, 22 aa, Homo sapiens
  CDR3 for alpha chain variable domain of TCR clone 366880 (TRAV12-2, TRAJ32)
CSSETPSPVIQPPKSATNKLIF

SEQ ID NO: 733760 - protein, 14 aa, Homo sapiens
  CDR3 for beta chain variable domain of TCR clone 366880 (TRBV28, TRBJ1-1)
CASSSEQGYTEAFF

SEQ ID NO: 733761 - protein, 15 aa, Homo sapiens
  CDR3 for alpha chain variable domain of TCR clone 366881 (TRAV12-3, TRAJ6)
CAMSATSEGSYVPTF

SEQ ID NO: 733762 - protein, 11 aa, Homo sapiens
  CDR3 for beta chain variable domain of TCR clone 366881 (TRBV20-1, TRBJ1-5)
CSAQGDQPQHF

SEQ ID NO: 733763 - protein, 14 aa, Homo sapiens
  CDR3 for alpha chain variable domain of TCR clone 366882 (TRAV16, TRAJ33)
CALSAMYSNYQLIW

SEQ ID NO: 733764 - protein, 15 aa, Homo sapiens
  CDR3 for beta chain variable domain of TCR clone 366882 (TRBV28, TRBJ2-7)
CASSLEAYPIYEQYF

SEQ ID NO: 733765 - protein, 15 aa, Homo sapiens
  CDR3 for alpha chain variable domain of TCR clone 366883 (TRAV3, TRAJ9)
CAVRDSTTGGFKTIF

SEQ ID NO: 733766 - protein, 16 aa, Homo sapiens
  CDR3 for beta chain variable domain of TCR clone 366883 (TRBV15, TRBJ2-5)
CATSPTTGQGMETQYF

SEQ ID NO: 733767 - protein, 14 aa, Homo sapiens
  CDR3 for alpha chain variable domain of TCR clone 366884 (TRAV1-2, TRAJ16)
CAVNRFSDGQKLLF

SEQ ID NO: 733768 - protein, 18 aa, Homo sapiens
  CDR3 for beta chain variable domain of TCR clone 366884 (TRBV20-1, TRBJ2-6)
CSAETTPTHGSGANVLIF

SEQ ID NO: 733769 - protein, 13 aa, Homo sapiens
  CDR3 for alpha chain variable domain of TCR clone 366885 (TRAV12-2, TRAJ12)
CAVNWDSSYKLIF

SEQ ID NO: 733770 - protein, 15 aa, Homo sapiens
  CDR3 for beta chain variable domain of TCR clone 366885 (TRBV7-8, TRBJ2-3)
CASSLMSGNTDTQYF

SEQ ID NO: 733771 - protein, 14 aa, Homo sapiens
  CDR3 for alpha chain variable domain of TCR clone 366886 (TRAV1-2, TRAJ16)
CAVNRFSDGQKLLF

SEQ ID NO: 733772 - protein, 17 aa, Homo sapiens
  CDR3 for beta chain variable domain of TCR clone 366886 (TRBV6-5, TRBJ1-4)
CASRETGGLATNEKLFF

SEQ ID NO: 733773 - protein, 15 aa, Homo sapiens
  CDR3 for alpha chain variable domain of TCR clone 366887 (TRAV12-3, TRAJ52)
CDGGAGGTSYGKLTF

SEQ ID NO: 733774 - protein, 13 aa, Homo sapiens
  CDR3 for beta chain variable domain of TCR clone 366887 (TRBV20-1, TRBJ2-5)
CSASGDYQETQYF

SEQ ID NO: 733775 - protein, 12 aa, Homo sapiens
  CDR3 for alpha chain variable domain of TCR clone 366888 (TRAV29/DV5, TRAJ34)
CAASGNTDKLIF

SEQ ID NO: 733776 - protein, 13 aa, Homo sapiens
  CDR3 for beta chain variable domain of TCR clone 366888 (TRBV20-1, TRBJ2-7)
CSAQTGLSYEQYF

SEQ ID NO: 733777 - protein, 13 aa, Homo sapiens
  CDR3 for alpha chain variable domain of TCR clone 366889 (TRAV2, TRAJ23)
CAVMGNQGGKLIF

SEQ ID NO: 733778 - protein, 14 aa, Homo sapiens
  CDR3 for beta chain variable domain of TCR clone 366889 (TRBV11-2, TRBJ2-1)
CASRRATSYNEQFF

SEQ ID NO: 733779 - protein, 14 aa, Homo sapiens
  CDR3 for alpha chain variable domain of TCR clone 366890 (TRAV12-3, TRAJ9)
CAMSVETGGFKTIV

SEQ ID NO: 733780 - protein, 14 aa, Homo sapiens
  CDR3 for beta chain variable domain of TCR clone 366890 (TRBV7-2, TRBJ2-7)
CASRSQGAAYEQYF

SEQ ID NO: 733781 - protein, 19 aa, Homo sapiens
  CDR3 for alpha chain variable domain of TCR clone 366891 (TRAV8-3, TRAJ8)
LSTSVLWDPMTTGFQKLVF

SEQ ID NO: 733782 - protein, 13 aa, Homo sapiens
  CDR3 for beta chain variable domain of TCR clone 366891 (TRBV10-2, TRBJ2-3)
CASSESGDHTQYF

SEQ ID NO: 733783 - protein, 16 aa, Homo sapiens
  CDR3 for alpha chain variable domain of TCR clone 366892 (TRAV12-2, TRAJ18)
CAVTTDRGSTLGRLYF

SEQ ID NO: 733784 - protein, 15 aa, Homo sapiens
  CDR3 for beta chain variable domain of TCR clone 366892 (TRBV20-1, TRBJ1-1)
CSARSAATSNTEAFF

SEQ ID NO: 733785 - protein, 14 aa, Homo sapiens
  CDR3 for alpha chain variable domain of TCR clone 366893 (TRAV8-1, TRAJ24)
CAVNAADSWGKLQF

SEQ ID NO: 733786 - protein, 15 aa, Homo sapiens
  CDR3 for beta chain variable domain of TCR clone 366893 (TRBV20-1, TRBJ2-7)
CSARVPAAYFYGQYF

SEQ ID NO: 733787 - protein, 18 aa, Homo sapiens
  CDR3 for alpha chain variable domain of TCR clone 366894 (TRAV1-2, TRAJ10)
CAVRALTPVTEGGNKLTF

SEQ ID NO: 733788 - protein, 14 aa, Homo sapiens
  CDR3 for beta chain variable domain of TCR clone 366894 (TRBV4-1, TRBJ1-1)
CASSQQGNGNEAFF

SEQ ID NO: 733789 - protein, 15 aa, Homo sapiens
  CDR3 for alpha chain variable domain of TCR clone 366895 (TRAV3, TRAJ3)
CAVRDRRSSASKIFF

SEQ ID NO: 733790 - protein, 13 aa, Homo sapiens
  CDR3 for beta chain variable domain of TCR clone 366895 (TRBV9, TRBJ2-5)
CASSPAGLGTQYF

SEQ ID NO: 733791 - protein, 16 aa, Homo sapiens
  CDR3 for alpha chain variable domain of TCR clone 366896 (TRAV3, TRAJ3)
CAVRDRAKSSASKIIF

SEQ ID NO: 733792 - protein, 13 aa, Homo sapiens
  CDR3 for beta chain variable domain of TCR clone 366896 (TRBV10-3, TRBJ2-7)
CASKLAVNYEQYV

SEQ ID NO: 733793 - protein, 13 aa, Homo sapiens
  CDR3 for alpha chain variable domain of TCR clone 366897 (TRAV17, TRAJ29)
CATDAFRKHTSCL

SEQ ID NO: 733794 - protein, 13 aa, Homo sapiens
  CDR3 for beta chain variable domain of TCR clone 366897 (TRBV5-6, TRBJ2-6)
CASTSSGANDLTF

SEQ ID NO: 733795 - protein, 15 aa, Homo sapiens
  CDR3 for alpha chain variable domain of TCR clone 366898 (TRAV26-1, TRAJ24)
CIVPVTTDSWGKFKF

SEQ ID NO: 733796 - protein, 14 aa, Homo sapiens
  CDR3 for beta chain variable domain of TCR clone 366898 (TRBV10-3, TRBJ2-3)
CAISEKGLGDTQYF

SEQ ID NO: 733797 - protein, 13 aa, Homo sapiens
  CDR3 for alpha chain variable domain of TCR clone 366899 (TRAV12-1, TRAJ26)
PATYLYYGQNFVF

SEQ ID NO: 733798 - protein, 15 aa, Homo sapiens
  CDR3 for beta chain variable domain of TCR clone 366899 (TRBV5-1, TRBJ2-6)
CASSLDPSGANVLTF

SEQ ID NO: 733799 - protein, 14 aa, Homo sapiens
  CDR3 for alpha chain variable domain of TCR clone 366900 (TRAV38-1, TRAJ54)
CSFMSPSGAQKLVF

SEQ ID NO: 733800 - protein, 16 aa, Homo sapiens
  CDR3 for beta chain variable domain of TCR clone 366900 (TRBV28, TRBJ2-1)
CASSLGGSGSYNEQFF

SEQ ID NO: 733801 - protein, 14 aa, Homo sapiens
  CDR3 for alpha chain variable domain of TCR clone 366901 (TRAV12-3, TRAJ29)
CAMSPYSGNTPLVF

SEQ ID NO: 733802 - protein, 15 aa, Homo sapiens
  CDR3 for beta chain variable domain of TCR clone 366901 (TRBV7-2, TRBJ2-1)
CASSPGFISGNEQFF

SEQ ID NO: 733803 - protein, 14 aa, Homo sapiens
  CDR3 for alpha chain variable domain of TCR clone 366902 (TRAV12-2, TRAJ11)
CAVEGGSGYSALTF

SEQ ID NO: 733804 - protein, 16 aa, Homo sapiens
  CDR3 for beta chain variable domain of TCR clone 366902 (TRBV6-1, TRBJ1-2)
CASSGAWQGRSHGYTF

SEQ ID NO: 733805 - protein, 13 aa, Homo sapiens
  CDR3 for alpha chain variable domain of TCR clone 366903 (TRAV17, TRAJ9)
CATAITGGFKTIF

SEQ ID NO: 733806 - protein, 11 aa, Homo sapiens
  CDR3 for beta chain variable domain of TCR clone 366903 (TRBV11-2, TRBJ2-2)
CASSLPGELFF

SEQ ID NO: 733807 - protein, 14 aa, Homo sapiens
  CDR3 for alpha chain variable domain of TCR clone 366904 (TRAV13-1, TRAJ44)
CAAKATGTASKLTF

SEQ ID NO: 733808 - protein, 18 aa, Homo sapiens
  CDR3 for beta chain variable domain of TCR clone 366904 (TRBV11-2, TRBJ2-6)
CASSLNPFLGTGANVLTF

SEQ ID NO: 733809 - protein, 13 aa, Homo sapiens
  CDR3 for alpha chain variable domain of TCR clone 366905 (TRAV20, TRAJ37)
CAGCSSNTGKLIF

SEQ ID NO: 733810 - protein, 16 aa, Homo sapiens
  CDR3 for beta chain variable domain of TCR clone 366905 (TRBV9, TRBJ2-1)
CASSVGGGGNYNEQFF

SEQ ID NO: 733811 - protein, 13 aa, Homo sapiens
  CDR3 for alpha chain variable domain of TCR clone 366906 (TRAV16, TRAJ22)
SAMLAGSARQLTF

SEQ ID NO: 733812 - protein, 18 aa, Homo sapiens
  CDR3 for beta chain variable domain of TCR clone 366906 (TRBV7-2, TRBJ2-3)
CASSLETSRGRKEDTQYF

SEQ ID NO: 733813 - protein, 21 aa, Homo sapiens
  CDR3 for alpha chain variable domain of TCR clone 366907 (TRAV8-3, TRAJ6)
CAVGGEEATYLHLVEEAALLF

SEQ ID NO: 733814 - protein, 14 aa, Homo sapiens
  CDR3 for beta chain variable domain of TCR clone 366907 (TRBV5-1, TRBJ2-7)
CASSRGESLYEQYF

SEQ ID NO: 733815 - protein, 14 aa, Homo sapiens
  CDR3 for alpha chain variable domain of TCR clone 366908 (TRAV2, TRAJ29)
CAVESYSGNTPLVF

SEQ ID NO: 733816 - protein, 14 aa, Homo sapiens
  CDR3 for beta chain variable domain of TCR clone 366908 (TRBV19, TRBJ2-1)
CASPTSVLSGEQFF

SEQ ID NO: 733817 - protein, 12 aa, Homo sapiens
  CDR3 for alpha chain variable domain of TCR clone 366909 (TRAV1-2, TRAJ17)
CAVRDAGNKLTF

SEQ ID NO: 733818 - protein, 16 aa, Homo sapiens
  CDR3 for beta chain variable domain of TCR clone 366909 (TRBV20-1, TRBJ2-1)
CSAPGLAGSYSDEQFF

SEQ ID NO: 733819 - protein, 15 aa, Homo sapiens
  CDR3 for alpha chain variable domain of TCR clone 366910 (TRAV12-3, TRAJ10)
CASYILTGGGNKLTF

SEQ ID NO: 733820 - protein, 18 aa, Homo sapiens
  CDR3 for beta chain variable domain of TCR clone 366910 (TRBV5-7, TRBJ2-1)
CASSLDFRRLTGGNEQFF

SEQ ID NO: 733821 - protein, 16 aa, Homo sapiens
  CDR3 for alpha chain variable domain of TCR clone 366911 (TRAV23/DV6, TRAJ9)
CAASIGGNTGGFKTIF

SEQ ID NO: 733822 - protein, 18 aa, Homo sapiens
  CDR3 for beta chain variable domain of TCR clone 366911 (TRBV7-9, TRBJ2-7)
CASSLTTRGSRTWYEQYF

SEQ ID NO: 733823 - protein, 13 aa, Homo sapiens
  CDR3 for alpha chain variable domain of TCR clone 366912 (TRAV17, TRAJ5)
CALRGTGRIALTF

SEQ ID NO: 733824 - protein, 14 aa, Homo sapiens
  CDR3 for beta chain variable domain of TCR clone 366912 (TRBV10-3, TRBJ1-2)
CAISDGGRNYGYTF

SEQ ID NO: 733825 - protein, 14 aa, Homo sapiens
  CDR3 for alpha chain variable domain of TCR clone 366913 (TRAV1-2, TRAJ16)
CDVNRFSDGQKLLF

SEQ ID NO: 733826 - protein, 16 aa, Homo sapiens
  CDR3 for beta chain variable domain of TCR clone 366913 (TRBV28, TRBJ2-1)
CASSSSYSGSLNEQFF

SEQ ID NO: 733827 - protein, 14 aa, Homo sapiens
  CDR3 for alpha chain variable domain of TCR clone 366914 (TRAV12-3, TRAJ10)
SHLPLTGGGNKLTF

SEQ ID NO: 733828 - protein, 16 aa, Homo sapiens
  CDR3 for beta chain variable domain of TCR clone 366914 (TRBV20-1, TRBJ1-2)
SAVPRWDRASNYGYTF

SEQ ID NO: 733829 - protein, 13 aa, Homo sapiens
  CDR3 for alpha chain variable domain of TCR clone 366915 (TRAV3, TRAJ20)
CAVRSLNDYKLSF

SEQ ID NO: 733830 - protein, 13 aa, Homo sapiens
  CDR3 for beta chain variable domain of TCR clone 366915 (TRBV7-3, TRBJ1-1)
CASSQDWVAEAFF

SEQ ID NO: 733831 - protein, 18 aa, Homo sapiens
  CDR3 for alpha chain variable domain of TCR clone 366916 (TRAV21, TRAJ52)
CALRPSPAGGTSYGKLTF

SEQ ID NO: 733832 - protein, 16 aa, Homo sapiens
  CDR3 for beta chain variable domain of TCR clone 366916 (TRBV7-3, TRBJ2-1)
CASSLEGYRSYNEQFF

SEQ ID NO: 733833 - protein, 13 aa, Homo sapiens
  CDR3 for alpha chain variable domain of TCR clone 366917 (TRAV12-2, TRAJ52)
CAVSGTSYGNLTF

SEQ ID NO: 733834 - protein, 16 aa, Homo sapiens
  CDR3 for beta chain variable domain of TCR clone 366917 (TRBV5-7, TRBJ2-7)
CASSPTSGRELDEQYF

SEQ ID NO: 733835 - protein, 14 aa, Homo sapiens
  CDR3 for alpha chain variable domain of TCR clone 366918 (TRAV16, TRAJ17)
FALSGRAAGNKLTF

SEQ ID NO: 733836 - protein, 17 aa, Homo sapiens
  CDR3 for beta chain variable domain of TCR clone 366918 (TRBV18, TRBJ2-6)
CASSPRQGAVGANDLTF

SEQ ID NO: 733837 - protein, 12 aa, Homo sapiens
  CDR3 for alpha chain variable domain of TCR clone 366919 (TRAV20, TRAJ34)
CAVKDNTDKLIF

SEQ ID NO: 733838 - protein, 14 aa, Homo sapiens
  CDR3 for beta chain variable domain of TCR clone 366919 (TRBV7-9, TRBJ2-7)
YASSRPGGPYEQYF

SEQ ID NO: 733839 - protein, 12 aa, Homo sapiens
  CDR3 for alpha chain variable domain of TCR clone 366920 (TRAV12-2, TRAJ9)
CAVNTGGFKTIF

SEQ ID NO: 733840 - protein, 12 aa, Homo sapiens
  CDR3 for beta chain variable domain of TCR clone 366920 (TRBV9, TRBJ2-2)
CASSARTGELFF

SEQ ID NO: 733841 - protein, 14 aa, Homo sapiens
  CDR3 for alpha chain variable domain of TCR clone 366921 (TRAV3, TRAJ5)
CAVRDRKTGRALTF

SEQ ID NO: 733842 - protein, 15 aa, Homo sapiens
  CDR3 for beta chain variable domain of TCR clone 366921 (TRBV7-8, TRBJ2-1)
CASSLADSLYNEQFF

SEQ ID NO: 733843 - protein, 14 aa, Homo sapiens
  CDR3 for alpha chain variable domain of TCR clone 366922 (TRAV12-2, TRAJ3)
CAVSLYSSASKIIF

SEQ ID NO: 733844 - protein, 17 aa, Homo sapiens
  CDR3 for beta chain variable domain of TCR clone 366922 (TRBV13, TRBJ2-3)
CASSLSRVAGGRNTQYF

SEQ ID NO: 733845 - protein, 13 aa, Homo sapiens
  CDR3 for alpha chain variable domain of TCR clone 366923 (TRAV8-1, TRAJ41)
CAVNPGSGYALNF

SEQ ID NO: 733846 - protein, 20 aa, Homo sapiens
  CDR3 for beta chain variable domain of TCR clone 366923 (TRBV4-3, TRBJ1-4)
CASSQDIGVLVFLSNEKLFF

SEQ ID NO: 733847 - protein, 12 aa, Homo sapiens
  CDR3 for alpha chain variable domain of TCR clone 366924 (TRAV21, TRAJ39)
CAADNAGNMPTF

SEQ ID NO: 733848 - protein, 15 aa, Homo sapiens
  CDR3 for beta chain variable domain of TCR clone 366924 (TRBV27, TRBJ2-1)
CASSNGGGSSNEQFF

SEQ ID NO: 733849 - protein, 16 aa, Homo sapiens
  CDR3 for alpha chain variable domain of TCR clone 366925 (TRAV8-3, )
CADIQNPDPAVYQLRD

SEQ ID NO: 733850 - protein, 14 aa, Homo sapiens
  CDR3 for beta chain variable domain of TCR clone 366925 (TRBV19, TRBJ2-1)
CASPTFVLSGEQFF

SEQ ID NO: 733851 - protein, 13 aa, Homo sapiens
  CDR3 for alpha chain variable domain of TCR clone 366926 (TRAV8-4, TRAJ30)
CAVSVNRDDKIIS

SEQ ID NO: 733852 - protein, 13 aa, Homo sapiens
  CDR3 for beta chain variable domain of TCR clone 366926 (TRBV28, TRBJ2-5)
CAGVSRGEETQYF

SEQ ID NO: 733853 - protein, 15 aa, Homo sapiens
  CDR3 for alpha chain variable domain of TCR clone 366927 (TRAV12-1, TRAJ44)
CVADLPTSTASKLTF

SEQ ID NO: 733854 - protein, 13 aa, Homo sapiens
  CDR3 for beta chain variable domain of TCR clone 366927 (TRBV20-1, TRBJ2-5)
CRARGDYQETQYF

SEQ ID NO: 733855 - protein, 13 aa, Homo sapiens
  CDR3 for alpha chain variable domain of TCR clone 366928 (TRAV27, TRAJ6)
RAGGTRGSYIPTF

SEQ ID NO: 733856 - protein, 14 aa, Homo sapiens
  CDR3 for beta chain variable domain of TCR clone 366928 (TRBV6-3, TRBJ1-1)
CASSYQRRDTEAFF

SEQ ID NO: 733857 - protein, 17 aa, Homo sapiens
  CDR3 for alpha chain variable domain of TCR clone 366929 (TRAV3, TRAJ6)
CAVRDGPMAGGSYIHTF

SEQ ID NO: 733858 - protein, 14 aa, Homo sapiens
  CDR3 for beta chain variable domain of TCR clone 366929 (TRBV7-2, TRBJ2-7)
CASSPKTSFYEQYF

SEQ ID NO: 733859 - protein, 13 aa, Homo sapiens
  CDR3 for alpha chain variable domain of TCR clone 366930 (TRAV38-1, TRAJ42)
CARWGGSQGNLIF

SEQ ID NO: 733860 - protein, 14 aa, Homo sapiens
  CDR3 for beta chain variable domain of TCR clone 366930 (TRBV12-4, TRBJ2-1)
CASSLGQGPSEQFF

SEQ ID NO: 733861 - protein, 16 aa, Homo sapiens
  CDR3 for alpha chain variable domain of TCR clone 366931 (TRAV12-1, TRAJ48)
CVVNMVPNFGNEKLTF

SEQ ID NO: 733862 - protein, 18 aa, Homo sapiens
  CDR3 for beta chain variable domain of TCR clone 366931 (TRBV11-2, TRBJ2-6)
CASSLNPFLGTGANDLTF

SEQ ID NO: 733863 - protein, 12 aa, Homo sapiens
  CDR3 for alpha chain variable domain of TCR clone 366932 (TRAV12-2, TRAJ9)
CAVTGGGFKTIF

SEQ ID NO: 733864 - protein, 15 aa, Homo sapiens
  CDR3 for beta chain variable domain of TCR clone 366932 (TRBV18, TRBJ1-5)
CASSPSDRSNQPQHF

SEQ ID NO: 733865 - protein, 17 aa, Homo sapiens
  CDR3 for alpha chain variable domain of TCR clone 366933 (TRAV4, TRAJ18)
CLVGERSVASTLGRLYF

SEQ ID NO: 733866 - protein, 14 aa, Homo sapiens
  CDR3 for beta chain variable domain of TCR clone 366933 (TRBV6-5, TRBJ1-2)
CASSYDGTGGGYTF

SEQ ID NO: 733867 - protein, 12 aa, Homo sapiens
  CDR3 for alpha chain variable domain of TCR clone 366934 (TRAV21, TRAJ58)
CAAETSGSRLTF

SEQ ID NO: 733868 - protein, 15 aa, Homo sapiens
  CDR3 for beta chain variable domain of TCR clone 366934 (TRBV20-1, TRBJ2-7)
CTARDPVKGESEQYF

SEQ ID NO: 733869 - protein, 14 aa, Homo sapiens
  CDR3 for alpha chain variable domain of TCR clone 366935 (TRAV12-3, TRAJ42)
CAMNYGGSQGNLIV

SEQ ID NO: 733870 - protein, 12 aa, Homo sapiens
  CDR3 for beta chain variable domain of TCR clone 366935 (TRBV11-2, TRBJ2-2)
CASSLGGGELFF

SEQ ID NO: 733871 - protein, 17 aa, Homo sapiens
  CDR3 for alpha chain variable domain of TCR clone 366936 (TRAV14/DV4, TRAJ32)
CAMRERSFGCATNKLIF

SEQ ID NO: 733872 - protein, 14 aa, Homo sapiens
  CDR3 for beta chain variable domain of TCR clone 366936 (TRBV20-1, TRBJ2-3)
CSARGGTSTDTQYF

SEQ ID NO: 733873 - protein, 14 aa, Homo sapiens
  CDR3 for alpha chain variable domain of TCR clone 366937 (TRAV2, TRAJ23)
CAVDLRNQGGKLIF

SEQ ID NO: 733874 - protein, 13 aa, Homo sapiens
  CDR3 for beta chain variable domain of TCR clone 366937 (TRBV12-4, TRBJ2-5)
CASSPGTEETQYF

SEQ ID NO: 733875 - protein, 19 aa, Homo sapiens
  CDR3 for alpha chain variable domain of TCR clone 366938 (TRAV26-1, TRAJ28)
CIVRVAHAYSGAGSYQLTS

SEQ ID NO: 733876 - protein, 17 aa, Homo sapiens
  CDR3 for beta chain variable domain of TCR clone 366938 (TRBV9, TRBJ2-2)
CASSVGGQGTDTGELFF

SEQ ID NO: 733877 - protein, 12 aa, Homo sapiens
  CDR3 for alpha chain variable domain of TCR clone 366939 (TRAV26-1, TRAJ31)
CIVRNNNARLMF

SEQ ID NO: 733878 - protein, 15 aa, Homo sapiens
  CDR3 for beta chain variable domain of TCR clone 366939 (TRBV20-1, TRBJ2-4)
CSARDLTVGPNMQYF

SEQ ID NO: 733879 - protein, 15 aa, Homo sapiens
  CDR3 for alpha chain variable domain of TCR clone 366940 (TRAV26-2, TRAJ13)
CILRDLSGGYQKVTF

SEQ ID NO: 733880 - protein, 13 aa, Homo sapiens
  CDR3 for beta chain variable domain of TCR clone 366940 (TRBV11-2, TRBJ2-5)
CASSFSSQETQYF

SEQ ID NO: 733881 - protein, 15 aa, Homo sapiens
  CDR3 for alpha chain variable domain of TCR clone 366941 (TRAV17, TRAJ16)
CATALRFSDGQKLLF

SEQ ID NO: 733882 - protein, 15 aa, Homo sapiens
  CDR3 for beta chain variable domain of TCR clone 366941 (TRBV25-1, TRBJ1-4)
CASSPGDSTNEKLFF

SEQ ID NO: 733883 - protein, 13 aa, Homo sapiens
  CDR3 for alpha chain variable domain of TCR clone 366942 (TRAV8-6, TRAJ49)
CAVITNTGNQFYF

SEQ ID NO: 733884 - protein, 12 aa, Homo sapiens
  CDR3 for beta chain variable domain of TCR clone 366942 (TRBV7-9, TRBJ1-4)
CASSTDREKLFF

SEQ ID NO: 733885 - protein, 14 aa, Homo sapiens
  CDR3 for alpha chain variable domain of TCR clone 366943 (TRAV38-1, TRAJ39)
CAFAYNNAGTMLTF

SEQ ID NO: 733886 - protein, 15 aa, Homo sapiens
  CDR3 for beta chain variable domain of TCR clone 366943 (TRBV19, TRBJ2-6)
CASSIGPSGANVLTF

SEQ ID NO: 733887 - protein, 15 aa, Homo sapiens
  CDR3 for alpha chain variable domain of TCR clone 366944 (TRAV26-1, TRAJ29)
CIVRVEGSGNTPLVF

SEQ ID NO: 733888 - protein, 15 aa, Homo sapiens
  CDR3 for beta chain variable domain of TCR clone 366944 (TRBV11-2, TRBJ2-1)
CASSLGTSGLNEQFF

SEQ ID NO: 733889 - protein, 14 aa, Homo sapiens
  CDR3 for alpha chain variable domain of TCR clone 366945 (TRAV27, TRAJ50)
CAGGRKTSYDKVIF

SEQ ID NO: 733890 - protein, 11 aa, Homo sapiens
  CDR3 for beta chain variable domain of TCR clone 366945 (TRBV12-4, TRBJ2-3)
CASSSVWGRYF

SEQ ID NO: 733891 - protein, 14 aa, Homo sapiens
  CDR3 for alpha chain variable domain of TCR clone 366946 (TRAV29/DV5, TRAJ36)
CAARRKTGANSLFF

SEQ ID NO: 733892 - protein, 12 aa, Homo sapiens
  CDR3 for beta chain variable domain of TCR clone 366946 (TRBV12-5, TRBJ2-5)
CASGQGVETQYF

SEQ ID NO: 733893 - protein, 17 aa, Homo sapiens
  CDR3 for alpha chain variable domain of TCR clone 366947 (TRAV3, TRAJ12)
CAVRDGGRMDSSYKLIF

SEQ ID NO: 733894 - protein, 13 aa, Homo sapiens
  CDR3 for beta chain variable domain of TCR clone 366947 (TRBV15, TRBJ1-6)
CATSGRLNSPLHF

SEQ ID NO: 733895 - protein, 10 aa, Homo sapiens
  CDR3 for alpha chain variable domain of TCR clone 366948 (TRAV12-2, TRAJ20)
CAVYLYKLSF

SEQ ID NO: 733896 - protein, 14 aa, Homo sapiens
  CDR3 for beta chain variable domain of TCR clone 366948 (TRBV10-3, TRBJ2-2)
CASSEVSHAGELFF

SEQ ID NO: 733897 - protein, 16 aa, Homo sapiens
  CDR3 for alpha chain variable domain of TCR clone 366949 (TRAV3, TRAJ5)
CAVRNPMDTGRRALTF

SEQ ID NO: 733898 - protein, 16 aa, Homo sapiens
  CDR3 for beta chain variable domain of TCR clone 366949 (TRBV4-2, TRBJ2-7)
CASSQEGLANSYEQYF

SEQ ID NO: 733899 - protein, 13 aa, Homo sapiens
  CDR3 for alpha chain variable domain of TCR clone 366950 (TRAV13-1, TRAJ6)
CARGSGGSYIPTF

SEQ ID NO: 733900 - protein, 17 aa, Homo sapiens
  CDR3 for beta chain variable domain of TCR clone 366950 (TRBV7-8, TRBJ2-1)
CASSPATGTLAYNEQFF

SEQ ID NO: 733901 - protein, 14 aa, Homo sapiens
  CDR3 for alpha chain variable domain of TCR clone 366951 (TRAV12-2, TRAJ17)
CAVLFKAAGNKLTF

SEQ ID NO: 733902 - protein, 14 aa, Homo sapiens
  CDR3 for beta chain variable domain of TCR clone 366951 (TRBV2, TRBJ2-7)
CASSLTSGGYEQYF

SEQ ID NO: 733903 - protein, 12 aa, Homo sapiens
  CDR3 for alpha chain variable domain of TCR clone 366952 (TRAV12-3, TRAJ17)
CAMTLTGNKLTF

SEQ ID NO: 733904 - protein, 14 aa, Homo sapiens
  CDR3 for beta chain variable domain of TCR clone 366952 (TRBV7-9, TRBJ1-4)
CAITEGEANEKLFF

SEQ ID NO: 733905 - protein, 16 aa, Homo sapiens
  CDR3 for alpha chain variable domain of TCR clone 366953 (TRAV30, TRAJ24)
CGTEIVDADSWGKFQF

SEQ ID NO: 733906 - protein, 16 aa, Homo sapiens
  CDR3 for beta chain variable domain of TCR clone 366953 (TRBV2, TRBJ1-3)
CASSGGAGQSGNTMYF

SEQ ID NO: 733907 - protein, 15 aa, Homo sapiens
  CDR3 for alpha chain variable domain of TCR clone 366954 (TRAV8-6, TRAJ11)
CAVNFMNSGYSTLTF

SEQ ID NO: 733908 - protein, 17 aa, Homo sapiens
  CDR3 for beta chain variable domain of TCR clone 366954 (TRBV3-1, TRBJ2-5)
CASSNWGGTSVQETQYF

SEQ ID NO: 733909 - protein, 15 aa, Homo sapiens
  CDR3 for alpha chain variable domain of TCR clone 366955 (TRAV1-2, TRAJ35)
CAVRDREGFGNVLHC

SEQ ID NO: 733910 - protein, 13 aa, Homo sapiens
  CDR3 for beta chain variable domain of TCR clone 366955 (TRBV19, TRBJ1-2)
CASSVPGQDGYTF

SEQ ID NO: 733911 - protein, 13 aa, Homo sapiens
  CDR3 for alpha chain variable domain of TCR clone 366956 (TRAV12-3, TRAJ13)
CAMTSGGYQKVTF

SEQ ID NO: 733912 - protein, 16 aa, Homo sapiens
  CDR3 for beta chain variable domain of TCR clone 366956 (TRBV4-3, TRBJ2-2)
CASSHLQGSGTGELFF

SEQ ID NO: 733913 - protein, 14 aa, Homo sapiens
  CDR3 for alpha chain variable domain of TCR clone 366957 (TRAV12-1, TRAJ3)
CGAARYSSSSKIIF

SEQ ID NO: 733914 - protein, 16 aa, Homo sapiens
  CDR3 for beta chain variable domain of TCR clone 366957 (TRBV4-3, TRBJ2-2)
CASSHLQGSGTGELFF

SEQ ID NO: 733915 - protein, 17 aa, Homo sapiens
  CDR3 for alpha chain variable domain of TCR clone 366958 (TRAV3, TRAJ37)
CAVRDMRTPGNTGNLIF

SEQ ID NO: 733916 - protein, 14 aa, Homo sapiens
  CDR3 for beta chain variable domain of TCR clone 366958 (TRBV7-2, TRBJ2-7)
CASSPKTSFYEQYF

SEQ ID NO: 733917 - protein, 16 aa, Homo sapiens
  CDR3 for alpha chain variable domain of TCR clone 366959 (TRAV17, TRAJ28)
CATDEYSGAGSYRLTF

SEQ ID NO: 733918 - protein, 13 aa, Homo sapiens
  CDR3 for beta chain variable domain of TCR clone 366959 (TRBV7-9, TRBJ1-2)
CASRTGPNYGYTF

SEQ ID NO: 733919 - protein, 12 aa, Homo sapiens
  CDR3 for alpha chain variable domain of TCR clone 366960 (TRAV1-1, TRAJ30)
CAVRGRGDKIIF

SEQ ID NO: 733920 - protein, 13 aa, Homo sapiens
  CDR3 for beta chain variable domain of TCR clone 366960 (TRBV11-3, TRBJ2-7)
CASSLDKLYEQYF

SEQ ID NO: 733921 - protein, 14 aa, Homo sapiens
  CDR3 for alpha chain variable domain of TCR clone 366961 (TRAV8-3, TRAJ44)
CAVGLTGTASKLTF

SEQ ID NO: 733922 - protein, 12 aa, Homo sapiens
  CDR3 for beta chain variable domain of TCR clone 366961 (TRBV7-3, TRBJ2-1)
CAGSLGFNEQFF

SEQ ID NO: 733923 - protein, 13 aa, Homo sapiens
  CDR3 for alpha chain variable domain of TCR clone 366962 (TRAV8-3, TRAJ48)
CCGCNFGNEKLTF

SEQ ID NO: 733924 - protein, 12 aa, Homo sapiens
  CDR3 for beta chain variable domain of TCR clone 366962 (TRBV7-2, TRBJ2-5)
CASNQYQETQYF

SEQ ID NO: 733925 - protein, 16 aa, Homo sapiens
  CDR3 for alpha chain variable domain of TCR clone 366963 (TRAV1-2, TRAJ10)
GAVRGVLTGGGNKLTF

SEQ ID NO: 733926 - protein, 13 aa, Homo sapiens
  CDR3 for beta chain variable domain of TCR clone 366963 (TRBV20-1, TRBJ1-6)
CSAPLGVGSPLHF

SEQ ID NO: 733927 - protein, 14 aa, Homo sapiens
  CDR3 for alpha chain variable domain of TCR clone 366964 (TRAV21, TRAJ15)
CAVGLNQAGTALTF

SEQ ID NO: 733928 - protein, 11 aa, Homo sapiens
  CDR3 for beta chain variable domain of TCR clone 366964 (TRBV20-1, TRBJ2-7)
CSARTSYEQYF

SEQ ID NO: 733929 - protein, 12 aa, Homo sapiens
  CDR3 for alpha chain variable domain of TCR clone 366965 (TRAV3, TRAJ31)
CAAQRANARLMF

SEQ ID NO: 733930 - protein, 16 aa, Homo sapiens
  CDR3 for beta chain variable domain of TCR clone 366965 (TRBV4-2, TRBJ1-1)
CASSPPPGRAAPEAFF

SEQ ID NO: 733931 - protein, 18 aa, Homo sapiens
  CDR3 for alpha chain variable domain of TCR clone 366966 (TRAV21, TRAJ52)
CAVRPSPAGGTSYGKLTF

SEQ ID NO: 733932 - protein, 17 aa, Homo sapiens
  CDR3 for beta chain variable domain of TCR clone 366966 (TRBV7-8, TRBJ2-6)
CASSAGTGGAGANDLTF

SEQ ID NO: 733933 - protein, 17 aa, Homo sapiens
  CDR3 for alpha chain variable domain of TCR clone 366967 (TRAV3, TRAJ42)
CAVRDRDYGGSQGNLIF

SEQ ID NO: 733934 - protein, 14 aa, Homo sapiens
  CDR3 for beta chain variable domain of TCR clone 366967 (TRBV20-1, TRBJ2-1)
CSPNDEASYNEQFF

SEQ ID NO: 733935 - protein, 14 aa, Homo sapiens
  CDR3 for alpha chain variable domain of TCR clone 366968 (TRAV12-1, TRAJ17)
CVVNPKAAGHKLAF

SEQ ID NO: 733936 - protein, 16 aa, Homo sapiens
  CDR3 for beta chain variable domain of TCR clone 366968 (TRBV20-1, TRBJ2-1)
CSASASGYSSYNEQFF

SEQ ID NO: 733937 - protein, 14 aa, Homo sapiens
  CDR3 for alpha chain variable domain of TCR clone 366969 (TRAV26-1, TRAJ39)
CIVRGSRAGNMLTF

SEQ ID NO: 733938 - protein, 14 aa, Homo sapiens
  CDR3 for beta chain variable domain of TCR clone 366969 (TRBV28, TRBJ2-4)
CASTQVTGVNIQYF

SEQ ID NO: 733939 - protein, 14 aa, Homo sapiens
  CDR3 for alpha chain variable domain of TCR clone 366970 (TRAV3, TRAJ9)
CAVRLNTGGFKTIF

SEQ ID NO: 733940 - protein, 15 aa, Homo sapiens
  CDR3 for beta chain variable domain of TCR clone 366970 (TRBV5-1, TRBJ2-3)
CASSVTSGSTDTQYF

SEQ ID NO: 733941 - protein, 13 aa, Homo sapiens
  CDR3 for alpha chain variable domain of TCR clone 366971 (TRAV13-1, TRAJ12)
CAASPDSSYKLIY

SEQ ID NO: 733942 - protein, 16 aa, Homo sapiens
  CDR3 for beta chain variable domain of TCR clone 366971 (TRBV15, TRBJ2-1)
CATSRERLAGAYEQFF

SEQ ID NO: 733943 - protein, 14 aa, Homo sapiens
  CDR3 for alpha chain variable domain of TCR clone 366972 (TRAV1-2, TRAJ16)
CAVNRFLYGQKLLF

SEQ ID NO: 733944 - protein, 11 aa, Homo sapiens
  CDR3 for beta chain variable domain of TCR clone 366972 (TRBV11-2, TRBJ2-2)
CASSLPGELFF

SEQ ID NO: 733945 - protein, 14 aa, Homo sapiens
  CDR3 for alpha chain variable domain of TCR clone 366973 (TRAV1-2, TRAJ16)
FAVNRFSDGQKLLF

SEQ ID NO: 733946 - protein, 13 aa, Homo sapiens
  CDR3 for beta chain variable domain of TCR clone 366973 (TRBV4-1, TRBJ1-1)
CASSREMNTEAFF

SEQ ID NO: 733947 - protein, 14 aa, Homo sapiens
  CDR3 for alpha chain variable domain of TCR clone 366974 (TRAV12-3, TRAJ42)
CAMNYGGSQGNRIF

SEQ ID NO: 733948 - protein, 14 aa, Homo sapiens
  CDR3 for beta chain variable domain of TCR clone 366974 (TRBV7-2, TRBJ1-1)
CAGSFLTGTTEDFF

SEQ ID NO: 733949 - protein, 14 aa, Homo sapiens
  CDR3 for alpha chain variable domain of TCR clone 366975 (TRAV12-2, TRAJ13)
CAVKKTGGYQKVTF

SEQ ID NO: 733950 - protein, 16 aa, Homo sapiens
  CDR3 for beta chain variable domain of TCR clone 366975 (TRBV6-1, TRBJ2-5)
CASSGTLDRGAETQYF

SEQ ID NO: 733951 - protein, 15 aa, Homo sapiens
  CDR3 for alpha chain variable domain of TCR clone 366976 (TRAV27, TRAJ38)
CAARRNAGNNRKLIW

SEQ ID NO: 733952 - protein, 14 aa, Homo sapiens
  CDR3 for beta chain variable domain of TCR clone 366976 (TRBV7-2, TRBJ2-7)
CASRSQVAAYEQYF

SEQ ID NO: 733953 - protein, 11 aa, Homo sapiens
  CDR3 for alpha chain variable domain of TCR clone 366977 (TRAV35, TRAJ30)
CAGPGDDKIIF

SEQ ID NO: 733954 - protein, 14 aa, Homo sapiens
  CDR3 for beta chain variable domain of TCR clone 366977 (TRBV7-6, TRBJ1-6)
CASSQARGGSPLHF

SEQ ID NO: 733955 - protein, 13 aa, Homo sapiens
  CDR3 for alpha chain variable domain of TCR clone 366978 (TRAV30, TRAJ24)
CGTVTASWGKLQF

SEQ ID NO: 733956 - protein, 15 aa, Homo sapiens
  CDR3 for beta chain variable domain of TCR clone 366978 (TRBV25-1, TRBJ1-4)
CASSPGDSTNEKLFF

SEQ ID NO: 733957 - protein, 15 aa, Homo sapiens
  CDR3 for alpha chain variable domain of TCR clone 366979 (TRAV29/DV5, TRAJ41)
CAASSNSNSGYALNF

SEQ ID NO: 733958 - protein, 12 aa, Homo sapiens
  CDR3 for beta chain variable domain of TCR clone 366979 (TRBV5-1, TRBJ2-5)
CASSLGLETQYF

SEQ ID NO: 733959 - protein, 14 aa, Homo sapiens
  CDR3 for alpha chain variable domain of TCR clone 366980 (TRAV12-2, TRAJ13)
CAVKKTGGYQKVTF

SEQ ID NO: 733960 - protein, 18 aa, Homo sapiens
  CDR3 for beta chain variable domain of TCR clone 366980 (TRBV20-1, TRBJ2-3)
CSASGLAGGPGITDTQYF

SEQ ID NO: 733961 - protein, 11 aa, Homo sapiens
  CDR3 for alpha chain variable domain of TCR clone 366981 (TRAV27, TRAJ20)
CAGADDYKLSF

SEQ ID NO: 733962 - protein, 14 aa, Homo sapiens
  CDR3 for beta chain variable domain of TCR clone 366981 (TRBV7-9, TRBJ1-1)
CASTPLQSYTEAFF

SEQ ID NO: 733963 - protein, 16 aa, Homo sapiens
  CDR3 for alpha chain variable domain of TCR clone 366982 (TRAV27, TRAJ56)
CAGVSRKDGANSKLQF

SEQ ID NO: 733964 - protein, 15 aa, Homo sapiens
  CDR3 for beta chain variable domain of TCR clone 366982 (TRBV4-1, TRBJ2-5)
CASSQLAGGQETQYI

SEQ ID NO: 733965 - protein, 13 aa, Homo sapiens
  CDR3 for alpha chain variable domain of TCR clone 366983 (TRAV20, TRAJ54)
CGVQAGGAQKLVF

SEQ ID NO: 733966 - protein, 14 aa, Homo sapiens
  CDR3 for beta chain variable domain of TCR clone 366983 (TRBV20-1, TRBJ2-7)
CSAKTGTGGYEQYF

SEQ ID NO: 733967 - protein, 12 aa, Homo sapiens
  CDR3 for alpha chain variable domain of TCR clone 366984 (TRAV12-3, TRAJ17)
CAMTLTGNKLTF

SEQ ID NO: 733968 - protein, 15 aa, Homo sapiens
  CDR3 for beta chain variable domain of TCR clone 366984 (TRBV12-4, TRBJ2-5)
CASSHPTGLQETQYF

SEQ ID NO: 733969 - protein, 14 aa, Homo sapiens
  CDR3 for alpha chain variable domain of TCR clone 366985 (TRAV23/DV6, TRAJ6)
CAARRSGGSYIPTF

SEQ ID NO: 733970 - protein, 17 aa, Homo sapiens
  CDR3 for beta chain variable domain of TCR clone 366985 (TRBV20-1, TRBJ2-1)
CSASASGLAGSYNEQFF

SEQ ID NO: 733971 - protein, 14 aa, Homo sapiens
  CDR3 for alpha chain variable domain of TCR clone 366986 (TRAV17, TRAJ39)
CATDPVRPGNMLTF

SEQ ID NO: 733972 - protein, 13 aa, Homo sapiens
  CDR3 for beta chain variable domain of TCR clone 366986 (TRBV19, TRBJ1-2)
CASSVPGQDGYTF

SEQ ID NO: 733973 - protein, 14 aa, Homo sapiens
  CDR3 for alpha chain variable domain of TCR clone 366987 (TRAV17, TRAJ16)
CATADFSDGQKLPF

SEQ ID NO: 733974 - protein, 14 aa, Homo sapiens
  CDR3 for beta chain variable domain of TCR clone 366987 (TRBV7-9, TRBJ2-7)
CASSLDRPTDEQYF

SEQ ID NO: 733975 - protein, 11 aa, Homo sapiens
  CDR3 for alpha chain variable domain of TCR clone 366988 (TRAV2, TRAJ21)
CAVFYYNKFYF

SEQ ID NO: 733976 - protein, 14 aa, Homo sapiens
  CDR3 for beta chain variable domain of TCR clone 366988 (TRBV15, TRBJ2-3)
CATRSGTSTDTQYF

SEQ ID NO: 733977 - protein, 13 aa, Homo sapiens
  CDR3 for alpha chain variable domain of TCR clone 366989 (TRAV9-2, TRAJ52)
CALSRHNAGGTSY

SEQ ID NO: 733978 - protein, 13 aa, Homo sapiens
  CDR3 for beta chain variable domain of TCR clone 366989 (TRBV7-9, TRBJ1-2)
CASSLKQNYGYTF

SEQ ID NO: 733979 - protein, 13 aa, Homo sapiens
  CDR3 for alpha chain variable domain of TCR clone 366990 (TRAV17, TRAJ20)
CAPLGVDDYKLSF

SEQ ID NO: 733980 - protein, 12 aa, Homo sapiens
  CDR3 for beta chain variable domain of TCR clone 366990 (TRBV29-1, TRBJ2-3)
CSFTGGADTQYF

SEQ ID NO: 733981 - protein, 17 aa, Homo sapiens
  CDR3 for alpha chain variable domain of TCR clone 366991 (TRAV12-2, TRAJ6)
CAPQGPPRAGGSYIPTF

SEQ ID NO: 733982 - protein, 16 aa, Homo sapiens
  CDR3 for beta chain variable domain of TCR clone 366991 (TRBV19, TRBJ2-2)
CAISTARASNTGELFF

SEQ ID NO: 733983 - protein, 16 aa, Homo sapiens
  CDR3 for alpha chain variable domain of TCR clone 366992 (TRAV21, TRAJ52)
CAVTNAGGTSYGKLTV

SEQ ID NO: 733984 - protein, 14 aa, Homo sapiens
  CDR3 for beta chain variable domain of TCR clone 366992 (TRBV7-2, TRBJ2-7)
CASRSQGAAYEQYF

SEQ ID NO: 733985 - protein, 15 aa, Homo sapiens
  CDR3 for alpha chain variable domain of TCR clone 366993 (TRAV17, TRAJ57)
CATGPSQGGSEKLVF

SEQ ID NO: 733986 - protein, 14 aa, Homo sapiens
  CDR3 for beta chain variable domain of TCR clone 366993 (TRBV6-1, TRBJ2-7)
CASSRDRVGYEQYF

SEQ ID NO: 733987 - protein, 14 aa, Homo sapiens
  CDR3 for alpha chain variable domain of TCR clone 366994 (TRAV8-4, TRAJ29)
CAVSAVEGNTPLVL

SEQ ID NO: 733988 - protein, 13 aa, Homo sapiens
  CDR3 for beta chain variable domain of TCR clone 366994 (TRBV12-4, TRBJ2-7)
CASSFQGRYEQYF

SEQ ID NO: 733989 - protein, 13 aa, Homo sapiens
  CDR3 for alpha chain variable domain of TCR clone 366995 (TRAV27, TRAJ45)
CRSSGGGADGLTF

SEQ ID NO: 733990 - protein, 16 aa, Homo sapiens
  CDR3 for beta chain variable domain of TCR clone 366995 (TRBV5-1, TRBJ2-1)
CASSLTSGGAYNEQFF

SEQ ID NO: 733991 - protein, 14 aa, Homo sapiens
  CDR3 for alpha chain variable domain of TCR clone 366996 (TRAV1-2, TRAJ16)
CAVNRFSDGQKMLF

SEQ ID NO: 733992 - protein, 12 aa, Homo sapiens
  CDR3 for beta chain variable domain of TCR clone 366996 (TRBV7-9, TRBJ2-7)
CASSLEGYEQYF

SEQ ID NO: 733993 - protein, 14 aa, Homo sapiens
  CDR3 for alpha chain variable domain of TCR clone 366997 (TRAV2, TRAJ23)
CAVGLRNQGGKLIF

SEQ ID NO: 733994 - protein, 13 aa, Homo sapiens
  CDR3 for beta chain variable domain of TCR clone 366997 (TRBV12-4, TRBJ2-5)
CAGSPGTEETQYF

SEQ ID NO: 733995 - protein, 16 aa, Homo sapiens
  CDR3 for alpha chain variable domain of TCR clone 366998 (TRAV12-1, TRAJ53)
CVVTSVAGGSNYKLTF

SEQ ID NO: 733996 - protein, 16 aa, Homo sapiens
  CDR3 for beta chain variable domain of TCR clone 366998 (TRBV12-4, TRBJ2-7)
CASSLIGGTGTYEQYF

SEQ ID NO: 733997 - protein, 14 aa, Homo sapiens
  CDR3 for alpha chain variable domain of TCR clone 366999 (TRAV3, TRAJ9)
CAVRGNTGGFKTIF

SEQ ID NO: 733998 - protein, 16 aa, Homo sapiens
  CDR3 for beta chain variable domain of TCR clone 366999 (TRBV4-1, TRBJ2-7)
CASSQEWTSGPLEQYF

SEQ ID NO: 733999 - protein, 18 aa, Homo sapiens
  CDR3 for alpha chain variable domain of TCR clone 367000 (TRAV9-2, TRAJ52)
CALSRHNAGGTIYGKMTF

SEQ ID NO: 734000 - protein, 13 aa, Homo sapiens
  CDR3 for beta chain variable domain of TCR clone 367000 (TRBV7-9, TRBJ1-2)
CASSLKQNYGYTF

SEQ ID NO: 734001 - protein, 15 aa, Homo sapiens
  CDR3 for alpha chain variable domain of TCR clone 367001 (TRAV27, TRAJ52)
CAGPAGGTSYGKLTF

SEQ ID NO: 734002 - protein, 16 aa, Homo sapiens
  CDR3 for beta chain variable domain of TCR clone 367001 (TRBV6-1, TRBJ1-2)
CASSGAWQGRSHGYTF

SEQ ID NO: 734003 - protein, 17 aa, Homo sapiens
  CDR3 for alpha chain variable domain of TCR clone 367002 (TRAV27, TRAJ42)
CAERVIYYGGSQGNLIF

SEQ ID NO: 734004 - protein, 17 aa, Homo sapiens
  CDR3 for beta chain variable domain of TCR clone 367002 (TRBV13, TRBJ2-3)
CASSLSRVAGGRNTQYF

SEQ ID NO: 734005 - protein, 16 aa, Homo sapiens
  CDR3 for alpha chain variable domain of TCR clone 367003 (TRAV12-3, TRAJ53)
CAMSPGSGGSNYKLTF

SEQ ID NO: 734006 - protein, 14 aa, Homo sapiens
  CDR3 for beta chain variable domain of TCR clone 367003 (TRBV4-2, TRBJ2-1)
SASGLDRAYNEQFF

SEQ ID NO: 734007 - protein, 16 aa, Homo sapiens
  CDR3 for alpha chain variable domain of TCR clone 367004 (TRAV3, TRAJ37)
CAVRPHGSGNTGKLIF

SEQ ID NO: 734008 - protein, 14 aa, Homo sapiens
  CDR3 for beta chain variable domain of TCR clone 367004 (TRBV7-6, TRBJ2-3)
CASSLGSVTDTQYF

SEQ ID NO: 734009 - protein, 14 aa, Homo sapiens
  CDR3 for alpha chain variable domain of TCR clone 367005 (TRAV27, TRAJ45)
CAGAQEEVLADSPL

SEQ ID NO: 734010 - protein, 17 aa, Homo sapiens
  CDR3 for beta chain variable domain of TCR clone 367005 (TRBV11-2, TRBJ2-1)
CASSLYPPGVEYNEQFF

SEQ ID NO: 734011 - protein, 12 aa, Homo sapiens
  CDR3 for alpha chain variable domain of TCR clone 367006 (TRAV30, TRAJ15)
CGTNQAGTALLF

SEQ ID NO: 734012 - protein, 13 aa, Homo sapiens
  CDR3 for beta chain variable domain of TCR clone 367006 (TRBV24-1, TRBJ2-7)
CATSDLGPYEQYF

SEQ ID NO: 734013 - protein, 14 aa, Homo sapiens
  CDR3 for alpha chain variable domain of TCR clone 367007 (TRAV3, TRAJ27)
CAVRDDTNAGKSTF

SEQ ID NO: 734014 - protein, 14 aa, Homo sapiens
  CDR3 for beta chain variable domain of TCR clone 367007 (TRBV19, TRBJ2-2)
CASSGQGIAGELFF

SEQ ID NO: 734015 - protein, 13 aa, Homo sapiens
  CDR3 for alpha chain variable domain of TCR clone 367008 (TRAV8-3, TRAJ28)
CAVGAVGSYQLPF

SEQ ID NO: 734016 - protein, 16 aa, Homo sapiens
  CDR3 for beta chain variable domain of TCR clone 367008 (TRBV19, TRBJ2-1)
CASSKAGPSSYNEQFF

SEQ ID NO: 734017 - protein, 16 aa, Homo sapiens
  CDR3 for alpha chain variable domain of TCR clone 367009 (TRAV17, TRAJ53)
CATDALSGGSNYKLTF

SEQ ID NO: 734018 - protein, 15 aa, Homo sapiens
  CDR3 for beta chain variable domain of TCR clone 367009 (TRBV7-2, TRBJ2-7)
CASSTPGLTRGEQYF

SEQ ID NO: 734019 - protein, 15 aa, Homo sapiens
  CDR3 for alpha chain variable domain of TCR clone 367010 (TRAV12-2, TRAJ50)
CAVNGLETSYDKVIF

SEQ ID NO: 734020 - protein, 16 aa, Homo sapiens
  CDR3 for beta chain variable domain of TCR clone 367010 (TRBV5-4, TRBJ2-3)
CASQQPGAVGADTQYF

SEQ ID NO: 734021 - protein, 14 aa, Homo sapiens
  CDR3 for alpha chain variable domain of TCR clone 367011 (TRAV35, TRAJ50)
CAGHRKTSDDKVIF

SEQ ID NO: 734022 - protein, 17 aa, Homo sapiens
  CDR3 for beta chain variable domain of TCR clone 367011 (TRBV7-8, TRBJ2-6)
CANSAGTGGAGANVLTF

SEQ ID NO: 734023 - protein, 14 aa, Homo sapiens
  CDR3 for alpha chain variable domain of TCR clone 367012 (TRAV26-1, TRAJ38)
CIADNAGNNRKLIR

SEQ ID NO: 734024 - protein, 13 aa, Homo sapiens
  CDR3 for beta chain variable domain of TCR clone 367012 (TRBV20-1, TRBJ1-1)
CSARGGGNTEAFF

SEQ ID NO: 734025 - protein, 16 aa, Homo sapiens
  CDR3 for alpha chain variable domain of TCR clone 367013 (TRAV12-2, TRAJ43)
CAGDDMRFGAGTRLTV

SEQ ID NO: 734026 - protein, 13 aa, Homo sapiens
  CDR3 for beta chain variable domain of TCR clone 367013 (TRBV2, TRBJ1-4)
CASSERAGEKPFF

SEQ ID NO: 734027 - protein, 14 aa, Homo sapiens
  CDR3 for alpha chain variable domain of TCR clone 367014 (TRAV1-1, TRAJ28)
CAAPSGAGSHQLTF

SEQ ID NO: 734028 - protein, 15 aa, Homo sapiens
  CDR3 for beta chain variable domain of TCR clone 367014 (TRBV7-2, TRBJ1-2)
CASSLVSGGDYGYTC

SEQ ID NO: 734029 - protein, 14 aa, Homo sapiens
  CDR3 for alpha chain variable domain of TCR clone 367015 (TRAV36/DV7, TRAJ44)
CCGANTGTASKLTF

SEQ ID NO: 734030 - protein, 17 aa, Homo sapiens
  CDR3 for beta chain variable domain of TCR clone 367015 (TRBV7-8, TRBJ2-6)
CASSAGTGGAGANVLTF

SEQ ID NO: 734031 - protein, 14 aa, Homo sapiens
  CDR3 for alpha chain variable domain of TCR clone 367016 (TRAV23/DV6, TRAJ6)
CAASRSGGSYIPTF

SEQ ID NO: 734032 - protein, 17 aa, Homo sapiens
  CDR3 for beta chain variable domain of TCR clone 367016 (TRBV20-1, TRBJ2-1)
CSASAYGLAGSYNEQFF

SEQ ID NO: 734033 - protein, 14 aa, Homo sapiens
  CDR3 for alpha chain variable domain of TCR clone 367017 (TRAV23/DV6, TRAJ8)
CAASKATGFQKLVF

SEQ ID NO: 734034 - protein, 16 aa, Homo sapiens
  CDR3 for beta chain variable domain of TCR clone 367017 (TRBV28, TRBJ2-7)
CASSPWVATGDLSQYF

SEQ ID NO: 734035 - protein, 11 aa, Homo sapiens
  CDR3 for alpha chain variable domain of TCR clone 367018 (TRAV21, TRAJ34)
CAVTNTDKLIF

SEQ ID NO: 734036 - protein, 15 aa, Homo sapiens
  CDR3 for beta chain variable domain of TCR clone 367018 (TRBV7-9, TRBJ1-1)
CASSLLEQGGTEAFF

SEQ ID NO: 734037 - protein, 14 aa, Homo sapiens
  CDR3 for alpha chain variable domain of TCR clone 367019 (TRAV26-1, TRAJ48)
CIVRLGFGNEKLTF

SEQ ID NO: 734038 - protein, 13 aa, Homo sapiens
  CDR3 for beta chain variable domain of TCR clone 367019 (TRBV11-3, TRBJ2-3)
CASSHDTKDTQYF

SEQ ID NO: 734039 - protein, 12 aa, Homo sapiens
  CDR3 for alpha chain variable domain of TCR clone 367020 (TRAV13-1, TRAJ26)
QVQDNYSQNFVF

SEQ ID NO: 734040 - protein, 13 aa, Homo sapiens
  CDR3 for beta chain variable domain of TCR clone 367020 (TRBV7-9, TRBJ2-7)
CASSAGLQYEQYF

SEQ ID NO: 734041 - protein, 16 aa, Homo sapiens
  CDR3 for alpha chain variable domain of TCR clone 367021 (TRAV3, TRAJ10)
CAVRDMRAGGGNKLTF

SEQ ID NO: 734042 - protein, 14 aa, Homo sapiens
  CDR3 for beta chain variable domain of TCR clone 367021 (TRBV12-4, TRBJ1-1)
CASSLGTGGTEAFF

SEQ ID NO: 734043 - protein, 13 aa, Homo sapiens
  CDR3 for alpha chain variable domain of TCR clone 367022 (TRAV12-2, TRAJ20)
CAVYPSNDYKLSF

SEQ ID NO: 734044 - protein, 14 aa, Homo sapiens
  CDR3 for beta chain variable domain of TCR clone 367022 (TRBV2, TRBJ2-7)
CASSLTSGGYEQYF

SEQ ID NO: 734045 - protein, 13 aa, Homo sapiens
  CDR3 for alpha chain variable domain of TCR clone 367023 (TRAV8-6, TRAJ50)
CAVIKTSYDKVIS

SEQ ID NO: 734046 - protein, 13 aa, Homo sapiens
  CDR3 for beta chain variable domain of TCR clone 367023 (TRBV4-2, TRBJ1-1)
CASSQAGNTEAFF

SEQ ID NO: 734047 - protein, 14 aa, Homo sapiens
  CDR3 for alpha chain variable domain of TCR clone 367024 (TRAV17, TRAJ40)
CATALTSGTYKYIF

SEQ ID NO: 734048 - protein, 14 aa, Homo sapiens
  CDR3 for beta chain variable domain of TCR clone 367024 (TRBV19, TRBJ2-5)
CASSSSGIQETQYF

SEQ ID NO: 734049 - protein, 17 aa, Homo sapiens
  CDR3 for alpha chain variable domain of TCR clone 367025 (TRAV3, TRAJ6)
CAVRDGPRAGGSYIPTF

SEQ ID NO: 734050 - protein, 16 aa, Homo sapiens
  CDR3 for beta chain variable domain of TCR clone 367025 (TRBV4-1, TRBJ2-7)
CASSRTAGQATYEQYF

SEQ ID NO: 734051 - protein, 16 aa, Homo sapiens
  CDR3 for alpha chain variable domain of TCR clone 367026 (TRAV3, TRAJ38)
CAVRDCLNAATTVSGF

SEQ ID NO: 734052 - protein, 14 aa, Homo sapiens
  CDR3 for beta chain variable domain of TCR clone 367026 (TRBV5-5, TRBJ1-5)
CASSGQGVDQPQHF

SEQ ID NO: 734053 - protein, 13 aa, Homo sapiens
  CDR3 for alpha chain variable domain of TCR clone 367027 (TRAV16, TRAJ5)
CALTNTGRRALTF

SEQ ID NO: 734054 - protein, 15 aa, Homo sapiens
  CDR3 for beta chain variable domain of TCR clone 367027 (TRBV11-2, TRBJ2-4)
CASGRPGTAINIQYF

SEQ ID NO: 734055 - protein, 23 aa, Homo sapiens
  CDR3 for alpha chain variable domain of TCR clone 367028 (TRAV8-6, TRAJ32)
CAVSALWWCYKQAHLWHWHSACF

SEQ ID NO: 734056 - protein, 13 aa, Homo sapiens
  CDR3 for beta chain variable domain of TCR clone 367028 (TRBV11-2, TRBJ2-5)
CASGHGAKETQYF

SEQ ID NO: 734057 - protein, 14 aa, Homo sapiens
  CDR3 for alpha chain variable domain of TCR clone 367029 (TRAV26-1, TRAJ44)
CIVRPTGTASKLTF

SEQ ID NO: 734058 - protein, 16 aa, Homo sapiens
  CDR3 for beta chain variable domain of TCR clone 367029 (TRBV11-2, TRBJ1-2)
CASSLDTGGADYGYTF

SEQ ID NO: 734059 - protein, 17 aa, Homo sapiens
  CDR3 for alpha chain variable domain of TCR clone 367030 (TRAV27, TRAJ18)
CAGLHRGRGSTLGRLHF

SEQ ID NO: 734060 - protein, 14 aa, Homo sapiens
  CDR3 for beta chain variable domain of TCR clone 367030 (TRBV20-1, TRBJ1-5)
CSARGRGSNQPQHF

SEQ ID NO: 734061 - protein, 11 aa, Homo sapiens
  CDR3 for alpha chain variable domain of TCR clone 367031 (TRAV1-2, TRAJ11)
CAVRGYSTLTF

SEQ ID NO: 734062 - protein, 19 aa, Homo sapiens
  CDR3 for beta chain variable domain of TCR clone 367031 (TRBV25-1, TRBJ2-2)
CAILVYRVDRGRKTGELFF

SEQ ID NO: 734063 - protein, 12 aa, Homo sapiens
  CDR3 for alpha chain variable domain of TCR clone 367032 (TRAV35, TRAJ30)
CAGLNRDYKIIF

SEQ ID NO: 734064 - protein, 15 aa, Homo sapiens
  CDR3 for beta chain variable domain of TCR clone 367032 (TRBV18, TRBJ2-3)
CASSPLAGETDTQYF

SEQ ID NO: 734065 - protein, 13 aa, Homo sapiens
  CDR3 for alpha chain variable domain of TCR clone 367033 (TRAV36/DV7, TRAJ49)
CAGDSNTGNQFYF

SEQ ID NO: 734066 - protein, 15 aa, Homo sapiens
  CDR3 for beta chain variable domain of TCR clone 367033 (TRBV5-1, TRBJ2-3)
CASSVTSGSTDTQYF

SEQ ID NO: 734067 - protein, 16 aa, Homo sapiens
  CDR3 for alpha chain variable domain of TCR clone 367034 (TRAV1-2, TRAJ10)
CAVRGVLTGGGNKRTF

SEQ ID NO: 734068 - protein, 13 aa, Homo sapiens
  CDR3 for beta chain variable domain of TCR clone 367034 (TRBV20-1, TRBJ1-1)
CSAGTVGNTEAFF

SEQ ID NO: 734069 - protein, 14 aa, Homo sapiens
  CDR3 for alpha chain variable domain of TCR clone 367035 (TRAV12-1, TRAJ36)
CVVNYWGKQPLLWD

SEQ ID NO: 734070 - protein, 13 aa, Homo sapiens
  CDR3 for beta chain variable domain of TCR clone 367035 (TRBV10-3, TRBJ2-1)
CAISEFSGREQFF

SEQ ID NO: 734071 - protein, 11 aa, Homo sapiens
  CDR3 for alpha chain variable domain of TCR clone 367036 (TRAV1-2, TRAJ20)
CAVSNDYKLSF

SEQ ID NO: 734072 - protein, 17 aa, Homo sapiens
  CDR3 for beta chain variable domain of TCR clone 367036 (TRBV15, TRBJ1-1)
CANSRVGGADGDTEAFF

SEQ ID NO: 734073 - protein, 12 aa, Homo sapiens
  CDR3 for alpha chain variable domain of TCR clone 367037 (TRAV20, TRAJ54)
CAVQEGAQKPVF

SEQ ID NO: 734074 - protein, 17 aa, Homo sapiens
  CDR3 for beta chain variable domain of TCR clone 367037 (TRBV13, TRBJ2-3)
CASSLSRVAGGWNTQYF

SEQ ID NO: 734075 - protein, 15 aa, Homo sapiens
  CDR3 for alpha chain variable domain of TCR clone 367038 (TRAV3, TRAJ17)
CAVSPKEAAGNKPTF

SEQ ID NO: 734076 - protein, 14 aa, Homo sapiens
  CDR3 for beta chain variable domain of TCR clone 367038 (TRBV5-1, TRBJ2-3)
CASSLFGPTDTQYF

SEQ ID NO: 734077 - protein, 14 aa, Homo sapiens
  CDR3 for alpha chain variable domain of TCR clone 367039 (TRAV16, TRAJ15)
CALSFNQAGTALIF

SEQ ID NO: 734078 - protein, 16 aa, Homo sapiens
  CDR3 for beta chain variable domain of TCR clone 367039 (TRBV9, TRBJ2-7)
CASSAGPDRSPYEQHF

SEQ ID NO: 734079 - protein, 17 aa, Homo sapiens
  CDR3 for alpha chain variable domain of TCR clone 367040 (TRAV13-1, )
CAANFQNPDPAVYQLRD

SEQ ID NO: 734080 - protein, 14 aa, Homo sapiens
  CDR3 for beta chain variable domain of TCR clone 367040 (TRBV19, TRBJ2-7)
CASSIGPNSYEQYF

SEQ ID NO: 734081 - protein, 15 aa, Homo sapiens
  CDR3 for alpha chain variable domain of TCR clone 367041 (TRAV3, TRAJ5)
CAVRDLDTGRRALTF

SEQ ID NO: 734082 - protein, 12 aa, Homo sapiens
  CDR3 for beta chain variable domain of TCR clone 367041 (TRBV5-5, TRBJ2-5)
CASSYFGETQYF

SEQ ID NO: 734083 - protein, 13 aa, Homo sapiens
  CDR3 for alpha chain variable domain of TCR clone 367042 (TRAV21, TRAJ45)
CAVMGGGADGLTL

SEQ ID NO: 734084 - protein, 14 aa, Homo sapiens
  CDR3 for beta chain variable domain of TCR clone 367042 (TRBV20-1, TRBJ2-1)
CSAQIGGSANEQFF

SEQ ID NO: 734085 - protein, 15 aa, Homo sapiens
  CDR3 for alpha chain variable domain of TCR clone 367043 (TRAV2, TRAJ37)
CAVGDGSSNTGKLLF

SEQ ID NO: 734086 - protein, 13 aa, Homo sapiens
  CDR3 for beta chain variable domain of TCR clone 367043 (TRBV20-1, TRBJ2-7)
CSAQTGLSYEQYF

SEQ ID NO: 734087 - protein, 16 aa, Homo sapiens
  CDR3 for alpha chain variable domain of TCR clone 367044 (TRAV30, TRAJ24)
CGSEIVDADSWGKFQF

SEQ ID NO: 734088 - protein, 15 aa, Homo sapiens
  CDR3 for beta chain variable domain of TCR clone 367044 (TRBV20-1, TRBJ2-7)
CSARDRFSGMDEQYF

SEQ ID NO: 734089 - protein, 13 aa, Homo sapiens
  CDR3 for alpha chain variable domain of TCR clone 367045 (TRAV21, TRAJ27)
CAALNTNAGKSTF

SEQ ID NO: 734090 - protein, 15 aa, Homo sapiens
  CDR3 for beta chain variable domain of TCR clone 367045 (TRBV9, TRBJ1-6)
CASSVAGTGDSPLHF

SEQ ID NO: 734091 - protein, 14 aa, Homo sapiens
  CDR3 for alpha chain variable domain of TCR clone 367046 (TRAV12-3, TRAJ42)
CAMNYGGSQGNLIF

SEQ ID NO: 734092 - protein, 13 aa, Homo sapiens
  CDR3 for beta chain variable domain of TCR clone 367046 (TRBV18, TRBJ1-1)
CASSPETKPEAFF

SEQ ID NO: 734093 - protein, 11 aa, Homo sapiens
  CDR3 for alpha chain variable domain of TCR clone 367047 (TRAV13-1, TRAJ6)
CATLGSYIPTF

SEQ ID NO: 734094 - protein, 12 aa, Homo sapiens
  CDR3 for beta chain variable domain of TCR clone 367047 (TRBV6-6, TRBJ2-1)
CQQLHQGDEQFF

SEQ ID NO: 734095 - protein, 13 aa, Homo sapiens
  CDR3 for alpha chain variable domain of TCR clone 367048 (TRAV23/DV6, TRAJ12)
CAPRVGSSYKLIF

SEQ ID NO: 734096 - protein, 12 aa, Homo sapiens
  CDR3 for beta chain variable domain of TCR clone 367048 (TRBV7-6, TRBJ2-5)
CASSLSQETQYF

SEQ ID NO: 734097 - protein, 12 aa, Homo sapiens
  CDR3 for alpha chain variable domain of TCR clone 367049 (TRAV23/DV6, TRAJ16)
CAARGRGQKLLF

SEQ ID NO: 734098 - protein, 14 aa, Homo sapiens
  CDR3 for beta chain variable domain of TCR clone 367049 (TRBV15, TRBJ2-1)
CHQQTGQGLHEQFF

SEQ ID NO: 734099 - protein, 15 aa, Homo sapiens
  CDR3 for alpha chain variable domain of TCR clone 367050 (TRAV21, TRAJ40)
CAVRPQTLGTYKYIF

SEQ ID NO: 734100 - protein, 13 aa, Homo sapiens
  CDR3 for beta chain variable domain of TCR clone 367050 (TRBV7-2, TRBJ2-2)
CASSSVRAGELFF

SEQ ID NO: 734101 - protein, 11 aa, Homo sapiens
  CDR3 for alpha chain variable domain of TCR clone 367051 (TRAV1-1, TRAJ23)
CAVRQGGKLIF

SEQ ID NO: 734102 - protein, 16 aa, Homo sapiens
  CDR3 for beta chain variable domain of TCR clone 367051 (TRBV7-9, TRBJ2-6)
CASSLKGPLRANVLTF

SEQ ID NO: 734103 - protein, 15 aa, Homo sapiens
  CDR3 for alpha chain variable domain of TCR clone 367052 (TRAV3, TRAJ5)
CAVRDRKTGRRALTF

SEQ ID NO: 734104 - protein, 15 aa, Homo sapiens
  CDR3 for beta chain variable domain of TCR clone 367052 (TRBV7-8, TRBJ2-1)
CASSLADSLDNEQFF

SEQ ID NO: 734105 - protein, 11 aa, Homo sapiens
  CDR3 for alpha chain variable domain of TCR clone 367053 (TRAV2, TRAJ13)
CASGGYQKVTF

SEQ ID NO: 734106 - protein, 13 aa, Homo sapiens
  CDR3 for beta chain variable domain of TCR clone 367053 (TRBV13, TRBJ2-5)
CASSLGGEETQYF

SEQ ID NO: 734107 - protein, 14 aa, Homo sapiens
  CDR3 for alpha chain variable domain of TCR clone 367054 (TRAV38-1, TRAJ29)
CAFITPSGNTPLVF

SEQ ID NO: 734108 - protein, 15 aa, Homo sapiens
  CDR3 for beta chain variable domain of TCR clone 367054 (TRBV10-1, TRBJ2-3)
CASSATSGGFETQYF

SEQ ID NO: 734109 - protein, 11 aa, Homo sapiens
  CDR3 for alpha chain variable domain of TCR clone 367055 (TRAV29/DV5, TRAJ43)
CASKTNNDMRF

SEQ ID NO: 734110 - protein, 14 aa, Homo sapiens
  CDR3 for beta chain variable domain of TCR clone 367055 (TRBV11-2, TRBJ2-7)
CASSPSTTSYEQYF

SEQ ID NO: 734111 - protein, 14 aa, Homo sapiens
  CDR3 for alpha chain variable domain of TCR clone 367056 (TRAV1-2, TRAJ8)
CAVREDTGFQKLVF

SEQ ID NO: 734112 - protein, 13 aa, Homo sapiens
  CDR3 for beta chain variable domain of TCR clone 367056 (TRBV15, TRBJ2-3)
CATSGTGTDTQYF

SEQ ID NO: 734113 - protein, 14 aa, Homo sapiens
  CDR3 for alpha chain variable domain of TCR clone 367057 (TRAV1-2, TRAJ16)
CAVNRFSDGQKRLF

SEQ ID NO: 734114 - protein, 16 aa, Homo sapiens
  CDR3 for beta chain variable domain of TCR clone 367057 (TRBV9, TRBJ2-1)
CASSVGGGGNYNEQFF

SEQ ID NO: 734115 - protein, 14 aa, Homo sapiens
  CDR3 for alpha chain variable domain of TCR clone 367058 (TRAV17, TRAJ11)
CATEGESGYRTLTF

SEQ ID NO: 734116 - protein, 11 aa, Homo sapiens
  CDR3 for beta chain variable domain of TCR clone 367058 (TRBV19, TRBJ1-1)
CASSIGSEAFF

SEQ ID NO: 734117 - protein, 13 aa, Homo sapiens
  CDR3 for alpha chain variable domain of TCR clone 367059 (TRAV1-1, TRAJ9)
CAAQNTVGFKTIF

SEQ ID NO: 734118 - protein, 16 aa, Homo sapiens
  CDR3 for beta chain variable domain of TCR clone 367059 (TRBV12-4, TRBJ2-7)
CASRSTGTGPSYEQYF

SEQ ID NO: 734119 - protein, 12 aa, Homo sapiens
  CDR3 for alpha chain variable domain of TCR clone 367060 (TRAV26-1, TRAJ17)
CIVRSAGNKLTF

SEQ ID NO: 734120 - protein, 13 aa, Homo sapiens
  CDR3 for beta chain variable domain of TCR clone 367060 (TRBV5-5, TRBJ2-7)
CASSAQTRQRQYF

SEQ ID NO: 734121 - protein, 17 aa, Homo sapiens
  CDR3 for alpha chain variable domain of TCR clone 367061 (TRAV3, TRAJ6)
CAVRDGPRAGGSYITTS

SEQ ID NO: 734122 - protein, 20 aa, Homo sapiens
  CDR3 for beta chain variable domain of TCR clone 367061 (TRBV28, TRBJ2-1)
CASTPTGRSPGLAGGNEQFF

SEQ ID NO: 734123 - protein, 14 aa, Homo sapiens
  CDR3 for alpha chain variable domain of TCR clone 367062 (TRAV12-2, TRAJ13)
CAVNPSGGYQKVTF

SEQ ID NO: 734124 - protein, 14 aa, Homo sapiens
  CDR3 for beta chain variable domain of TCR clone 367062 (TRBV4-2, TRBJ2-1)
CASGLDRAYNEQFF

SEQ ID NO: 734125 - protein, 17 aa, Homo sapiens
  CDR3 for alpha chain variable domain of TCR clone 367063 (TRAV4, TRAJ22)
CYVLLPRGGGSARQLTF

SEQ ID NO: 734126 - protein, 14 aa, Homo sapiens
  CDR3 for beta chain variable domain of TCR clone 367063 (TRBV20-1, TRBJ1-1)
CSARAVNGYTEAFF

SEQ ID NO: 734127 - protein, 14 aa, Homo sapiens
  CDR3 for alpha chain variable domain of TCR clone 367064 (TRAV8-4, TRAJ38)
CAVSYAGNNRKPIW

SEQ ID NO: 734128 - protein, 15 aa, Homo sapiens
  CDR3 for beta chain variable domain of TCR clone 367064 (TRBV12-4, TRBJ2-1)
CASSLLATGNNEQFF

SEQ ID NO: 734129 - protein, 14 aa, Homo sapiens
  CDR3 for alpha chain variable domain of TCR clone 367065 (TRAV14/DV4, TRAJ54)
CAMREAPGAQKLVF

SEQ ID NO: 734130 - protein, 16 aa, Homo sapiens
  CDR3 for beta chain variable domain of TCR clone 367065 (TRBV19, TRBJ2-1)
CASSSKGARSYNEQFF

SEQ ID NO: 734131 - protein, 15 aa, Homo sapiens
  CDR3 for alpha chain variable domain of TCR clone 367066 (TRAV8-4, TRAJ29)
CAVSEDFRGNTPLVF

SEQ ID NO: 734132 - protein, 11 aa, Homo sapiens
  CDR3 for beta chain variable domain of TCR clone 367066 (TRBV12-4, TRBJ2-3)
CASTATDTQYF

SEQ ID NO: 734133 - protein, 23 aa, Homo sapiens
  CDR3 for alpha chain variable domain of TCR clone 367067 (TRAV26-1, TRAJ38)
CIVDNAGNNHIQNPDPAGYQLRD

SEQ ID NO: 734134 - protein, 13 aa, Homo sapiens
  CDR3 for beta chain variable domain of TCR clone 367067 (TRBV20-1, TRBJ1-1)
CSARGGGNTEAFF

SEQ ID NO: 734135 - protein, 17 aa, Homo sapiens
  CDR3 for alpha chain variable domain of TCR clone 367068 (TRAV8-6, TRAJ58)
CAVSSWLGETSGARLTF

SEQ ID NO: 734136 - protein, 15 aa, Homo sapiens
  CDR3 for beta chain variable domain of TCR clone 367068 (TRBV6-5, TRBJ2-1)
CASSYDAGAGNEQFF

SEQ ID NO: 734137 - protein, 14 aa, Homo sapiens
  CDR3 for alpha chain variable domain of TCR clone 367069 (TRAV8-4, TRAJ48)
CAVSVTFGNEKLTF

SEQ ID NO: 734138 - protein, 14 aa, Homo sapiens
  CDR3 for beta chain variable domain of TCR clone 367069 (TRBV13, TRBJ2-7)
CASSLKGASYEQYF

SEQ ID NO: 734139 - protein, 15 aa, Homo sapiens
  CDR3 for alpha chain variable domain of TCR clone 367070 (TRAV21, TRAJ53)
CATLNSGGSNYKLTF

SEQ ID NO: 734140 - protein, 17 aa, Homo sapiens
  CDR3 for beta chain variable domain of TCR clone 367070 (TRBV7-3, TRBJ2-5)
CASSLGSGRSGSETQYF

SEQ ID NO: 734141 - protein, 16 aa, Homo sapiens
  CDR3 for alpha chain variable domain of TCR clone 367071 (TRAV30, TRAJ24)
CGTEIVDADSWGKFQF

SEQ ID NO: 734142 - protein, 14 aa, Homo sapiens
  CDR3 for beta chain variable domain of TCR clone 367071 (TRBV13, TRBJ2-3)
CASSSGSPTDTQYF

SEQ ID NO: 734143 - protein, 14 aa, Homo sapiens
  CDR3 for alpha chain variable domain of TCR clone 367072 (TRAV1-2, TRAJ16)
CAVNWFSDGQKLLF

SEQ ID NO: 734144 - protein, 13 aa, Homo sapiens
  CDR3 for beta chain variable domain of TCR clone 367072 (TRBV10-3, TRBJ2-7)
CASKLAVNYEQYF

SEQ ID NO: 734145 - protein, 14 aa, Homo sapiens
  CDR3 for alpha chain variable domain of TCR clone 367073 (TRAV26-1, TRAJ34)
CIVRVAYNTYKLIF

SEQ ID NO: 734146 - protein, 15 aa, Homo sapiens
  CDR3 for beta chain variable domain of TCR clone 367073 (TRBV20-1, TRBJ2-7)
CSAGVPAAYFYEQYF

SEQ ID NO: 734147 - protein, 14 aa, Homo sapiens
  CDR3 for alpha chain variable domain of TCR clone 367074 (TRAV20, TRAJ20)
CAVRRGYHDYKLSF

SEQ ID NO: 734148 - protein, 13 aa, Homo sapiens
  CDR3 for beta chain variable domain of TCR clone 367074 (TRBV19, TRBJ2-5)
CASSETAPETQYF

SEQ ID NO: 734149 - protein, 17 aa, Homo sapiens
  CDR3 for alpha chain variable domain of TCR clone 367075 (TRAV4, )
CLVDIQNPDPAVYQLRD

SEQ ID NO: 734150 - protein, 15 aa, Homo sapiens
  CDR3 for beta chain variable domain of TCR clone 367075 (TRBV20-1, TRBJ1-5)
CSARVGRLVSQPHHF

SEQ ID NO: 734151 - protein, 13 aa, Homo sapiens
  CDR3 for alpha chain variable domain of TCR clone 367076 (TRAV12-2, TRAJ6)
CAVNVSRKLHTYI

SEQ ID NO: 734152 - protein, 14 aa, Homo sapiens
  CDR3 for beta chain variable domain of TCR clone 367076 (TRBV20-1, TRBJ1-1)
CSAQTRIGGTEAFF

SEQ ID NO: 734153 - protein, 12 aa, Homo sapiens
  CDR3 for alpha chain variable domain of TCR clone 367077 (TRAV3, TRAJ31)
CAVRLRGPRLMF

SEQ ID NO: 734154 - protein, 17 aa, Homo sapiens
  CDR3 for beta chain variable domain of TCR clone 367077 (TRBV7-9, TRBJ1-5)
CASSASQGGYSNQPQHF

SEQ ID NO: 734155 - protein, 12 aa, Homo sapiens
  CDR3 for alpha chain variable domain of TCR clone 367078 (TRAV21, TRAJ31)
CAVWGNNARLMF

SEQ ID NO: 734156 - protein, 16 aa, Homo sapiens
  CDR3 for beta chain variable domain of TCR clone 367078 (TRBV6-1, TRBJ2-5)
CASSETLDRGAETQYF

SEQ ID NO: 734157 - protein, 14 aa, Homo sapiens
  CDR3 for alpha chain variable domain of TCR clone 367079 (TRAV16, TRAJ40)
CALFRASGTYKYIF

SEQ ID NO: 734158 - protein, 12 aa, Homo sapiens
  CDR3 for beta chain variable domain of TCR clone 367079 (TRBV6-3, TRBJ2-5)
CASEGLQETQYF

SEQ ID NO: 734159 - protein, 14 aa, Homo sapiens
  CDR3 for alpha chain variable domain of TCR clone 367080 (TRAV13-1, TRAJ44)
CAAKVTGTASKLTF

SEQ ID NO: 734160 - protein, 14 aa, Homo sapiens
  CDR3 for beta chain variable domain of TCR clone 367080 (TRBV19, TRBJ2-2)
CASSTLHRSGELFF

SEQ ID NO: 734161 - protein, 12 aa, Homo sapiens
  CDR3 for alpha chain variable domain of TCR clone 367081 (TRAV29/DV5, TRAJ34)
CAASGNTDKLIF

SEQ ID NO: 734162 - protein, 18 aa, Homo sapiens
  CDR3 for beta chain variable domain of TCR clone 367081 (TRBV19, TRBJ2-7)
SISVPVPKWLRRVYEQYF

SEQ ID NO: 734163 - protein, 13 aa, Homo sapiens
  CDR3 for alpha chain variable domain of TCR clone 367082 (TRAV13-2, TRAJ48)
CAEMDFGNEKLTF

SEQ ID NO: 734164 - protein, 15 aa, Homo sapiens
  CDR3 for beta chain variable domain of TCR clone 367082 (TRBV7-9, TRBJ1-6)
CASSSPGRGNCPLHF

SEQ ID NO: 734165 - protein, 11 aa, Homo sapiens
  CDR3 for alpha chain variable domain of TCR clone 367083 (TRAV12-3, TRAJ27)
CAMANAGKSTF

SEQ ID NO: 734166 - protein, 14 aa, Homo sapiens
  CDR3 for beta chain variable domain of TCR clone 367083 (TRBV15, TRBJ2-7)
CATSRVARGYEQYF

SEQ ID NO: 734167 - protein, 11 aa, Homo sapiens
  CDR3 for alpha chain variable domain of TCR clone 367084 (TRAV1-2, TRAJ40)
CAVPGTYKYIF

SEQ ID NO: 734168 - protein, 13 aa, Homo sapiens
  CDR3 for beta chain variable domain of TCR clone 367084 (TRBV4-1, TRBJ2-1)
CASSQAGGDEQFF

SEQ ID NO: 734169 - protein, 16 aa, Homo sapiens
  CDR3 for alpha chain variable domain of TCR clone 367085 (TRAV30, TRAJ24)
CGTEIVDADSWGKFQF

SEQ ID NO: 734170 - protein, 13 aa, Homo sapiens
  CDR3 for beta chain variable domain of TCR clone 367085 (TRBV14, TRBJ2-5)
CASSQTSVETQYF

SEQ ID NO: 734171 - protein, 18 aa, Homo sapiens
  CDR3 for alpha chain variable domain of TCR clone 367086 (TRAV12-3, TRAJ52)
CAMSVGGAGGTSYGKLTF

SEQ ID NO: 734172 - protein, 15 aa, Homo sapiens
  CDR3 for beta chain variable domain of TCR clone 367086 (TRBV10-2, TRBJ1-4)
CASTPIDRGNEKLFF

SEQ ID NO: 734173 - protein, 14 aa, Homo sapiens
  CDR3 for alpha chain variable domain of TCR clone 367087 (TRAV26-1, TRAJ21)
CIVRPPYNFNKFYF

SEQ ID NO: 734174 - protein, 13 aa, Homo sapiens
  CDR3 for beta chain variable domain of TCR clone 367087 (TRBV7-2, TRBJ1-1)
CASNLKGAKVAFF

SEQ ID NO: 734175 - protein, 14 aa, Homo sapiens
  CDR3 for alpha chain variable domain of TCR clone 367088 (TRAV23/DV6, TRAJ39)
CAASIGKAGNMLTF

SEQ ID NO: 734176 - protein, 12 aa, Homo sapiens
  CDR3 for beta chain variable domain of TCR clone 367088 (TRBV20-1, TRBJ2-5)
CSVGTGSETQYF

SEQ ID NO: 734177 - protein, 11 aa, Homo sapiens
  CDR3 for alpha chain variable domain of TCR clone 367089 (TRAV12-1, TRAJ30)
CVVNGQDKIIF

SEQ ID NO: 734178 - protein, 15 aa, Homo sapiens
  CDR3 for beta chain variable domain of TCR clone 367089 (TRBV5-1, TRBJ2-1)
CASSPPRAPYNEQFF

SEQ ID NO: 734179 - protein, 14 aa, Homo sapiens
  CDR3 for alpha chain variable domain of TCR clone 367090 (TRAV23/DV6, )
CAATALIPDIQNTD

SEQ ID NO: 734180 - protein, 16 aa, Homo sapiens
  CDR3 for beta chain variable domain of TCR clone 367090 (TRBV10-3, TRBJ2-7)
CAISPRGQEQTYEQYF

SEQ ID NO: 734181 - protein, 11 aa, Homo sapiens
  CDR3 for alpha chain variable domain of TCR clone 367091 (TRAV12-3, TRAJ43)
CAMSVSNDMRF

SEQ ID NO: 734182 - protein, 17 aa, Homo sapiens
  CDR3 for beta chain variable domain of TCR clone 367091 (TRBV11-2, TRBJ2-1)
CASSLYPPEVEYNEQFF

SEQ ID NO: 734183 - protein, 14 aa, Homo sapiens
  CDR3 for alpha chain variable domain of TCR clone 367092 (TRAV13-1, TRAJ35)
CAASKGGFGNVLHL

SEQ ID NO: 734184 - protein, 14 aa, Homo sapiens
  CDR3 for beta chain variable domain of TCR clone 367092 (TRBV20-1, TRBJ2-2)
CSAPDTANTGELFF

SEQ ID NO: 734185 - protein, 14 aa, Homo sapiens
  CDR3 for alpha chain variable domain of TCR clone 367093 (TRAV3, TRAJ28)
CCPRSGAGSYQLTF

SEQ ID NO: 734186 - protein, 13 aa, Homo sapiens
  CDR3 for beta chain variable domain of TCR clone 367093 (TRBV12-4, TRBJ2-5)
CASRLAVQETQYF

SEQ ID NO: 734187 - protein, 17 aa, Homo sapiens
  CDR3 for alpha chain variable domain of TCR clone 367094 (TRAV3, TRAJ6)
CAVRDGPRAGGSYIPTF

SEQ ID NO: 734188 - protein, 14 aa, Homo sapiens
  CDR3 for beta chain variable domain of TCR clone 367094 (TRBV7-2, TRBJ2-7)
CASSPKTRFCEQYF

SEQ ID NO: 734189 - protein, 19 aa, Homo sapiens
  CDR3 for alpha chain variable domain of TCR clone 367095 (TRAV3, TRAJ6)
CAVRDRNPSRSGGTYIPTF

SEQ ID NO: 734190 - protein, 15 aa, Homo sapiens
  CDR3 for beta chain variable domain of TCR clone 367095 (TRBV18, TRBJ2-7)
CASSPTFMDSYEQYF

SEQ ID NO: 734191 - protein, 13 aa, Homo sapiens
  CDR3 for alpha chain variable domain of TCR clone 367096 (TRAV12-2, TRAJ48)
CAAPNFGNEKLTF

SEQ ID NO: 734192 - protein, 12 aa, Homo sapiens
  CDR3 for beta chain variable domain of TCR clone 367096 (TRBV2, TRBJ2-3)
CASSGRFDTQYF

SEQ ID NO: 734193 - protein, 15 aa, Homo sapiens
  CDR3 for alpha chain variable domain of TCR clone 367097 (TRAV2, TRAJ9)
CAVEDRGTGGFKTIF

SEQ ID NO: 734194 - protein, 18 aa, Homo sapiens
  CDR3 for beta chain variable domain of TCR clone 367097 (TRBV11-2, TRBJ2-3)
CASSLGGAPRGAPNTQYF

SEQ ID NO: 734195 - protein, 14 aa, Homo sapiens
  CDR3 for alpha chain variable domain of TCR clone 367098 (TRAV8-3, TRAJ13)
CAVGARGGYQKDTF

SEQ ID NO: 734196 - protein, 16 aa, Homo sapiens
  CDR3 for beta chain variable domain of TCR clone 367098 (TRBV27, TRBJ2-7)
CASSLGSGTGPYEQYF

SEQ ID NO: 734197 - protein, 14 aa, Homo sapiens
  CDR3 for alpha chain variable domain of TCR clone 367099 (TRAV12-2, TRAJ13)
CAVKKTGGYQKVTF

SEQ ID NO: 734198 - protein, 15 aa, Homo sapiens
  CDR3 for beta chain variable domain of TCR clone 367099 (TRBV5-8, TRBJ1-1)
CASSFSGTSLKGAFF

SEQ ID NO: 734199 - protein, 13 aa, Homo sapiens
  CDR3 for alpha chain variable domain of TCR clone 367100 (TRAV35, TRAJ42)
CAGFPGSQGNLIF

SEQ ID NO: 734200 - protein, 13 aa, Homo sapiens
  CDR3 for beta chain variable domain of TCR clone 367100 (TRBV27, TRBJ2-1)
CASRTLGVGEQFF

SEQ ID NO: 734201 - protein, 12 aa, Homo sapiens
  CDR3 for alpha chain variable domain of TCR clone 367101 (TRAV8-4, TRAJ40)
CAVSERTYKYIF

SEQ ID NO: 734202 - protein, 16 aa, Homo sapiens
  CDR3 for beta chain variable domain of TCR clone 367101 (TRBV28, TRBJ2-7)
CASSLFFETGGPEQYF

SEQ ID NO: 734203 - protein, 16 aa, Homo sapiens
  CDR3 for alpha chain variable domain of TCR clone 367102 (TRAV8-3, TRAJ18)
CAVGARRGSTLGRLYF

SEQ ID NO: 734204 - protein, 13 aa, Homo sapiens
  CDR3 for beta chain variable domain of TCR clone 367102 (TRBV5-4, TRBJ1-3)
CQSSQSAGNTIYF

SEQ ID NO: 734205 - protein, 13 aa, Homo sapiens
  CDR3 for alpha chain variable domain of TCR clone 367103 (TRAV13-1, TRAJ11)
CAAVLAGYSTLTF

SEQ ID NO: 734206 - protein, 17 aa, Homo sapiens
  CDR3 for beta chain variable domain of TCR clone 367103 (TRBV25-1, TRBJ2-7)
CASSDARVVFSSYEQDF

SEQ ID NO: 734207 - protein, 16 aa, Homo sapiens
  CDR3 for alpha chain variable domain of TCR clone 367104 (TRAV26-2, TRAJ45)
CTTASPIGGGADGLTF

SEQ ID NO: 734208 - protein, 20 aa, Homo sapiens
  CDR3 for beta chain variable domain of TCR clone 367104 (TRBV28, TRBJ2-1)
CASTPIGLSPGLAGGNEQFF

SEQ ID NO: 734209 - protein, 14 aa, Homo sapiens
  CDR3 for alpha chain variable domain of TCR clone 367105 (TRAV1-1, TRAJ28)
CAAPSGAGSYQLTF

SEQ ID NO: 734210 - protein, 14 aa, Homo sapiens
  CDR3 for beta chain variable domain of TCR clone 367105 (TRBV6-1, TRBJ1-3)
CASVQGGGGNTIYF

SEQ ID NO: 734211 - protein, 14 aa, Homo sapiens
  CDR3 for alpha chain variable domain of TCR clone 367106 (TRAV12-2, TRAJ24)
CAVTPADSWGKLQL

SEQ ID NO: 734212 - protein, 13 aa, Homo sapiens
  CDR3 for beta chain variable domain of TCR clone 367106 (TRBV6-4, TRBJ1-5)
CASSADLNQPQHF

SEQ ID NO: 734213 - protein, 12 aa, Homo sapiens
  CDR3 for alpha chain variable domain of TCR clone 367107 (TRAV12-2, TRAJ10)
WGVTGGGNKLTF

SEQ ID NO: 734214 - protein, 13 aa, Homo sapiens
  CDR3 for beta chain variable domain of TCR clone 367107 (TRBV7-2, TRBJ2-1)
CASSLGVYNEQFF

SEQ ID NO: 734215 - protein, 13 aa, Homo sapiens
  CDR3 for alpha chain variable domain of TCR clone 367108 (TRAV2, TRAJ40)
CAVVPSGTYKYIF

SEQ ID NO: 734216 - protein, 14 aa, Homo sapiens
  CDR3 for beta chain variable domain of TCR clone 367108 (TRBV4-2, TRBJ2-1)
CASGLDRAYNEQFF

SEQ ID NO: 734217 - protein, 14 aa, Homo sapiens
  CDR3 for alpha chain variable domain of TCR clone 367109 (TRAV8-6, TRAJ57)
CAVSSKGGSEKLVF

SEQ ID NO: 734218 - protein, 13 aa, Homo sapiens
  CDR3 for beta chain variable domain of TCR clone 367109 (TRBV27, TRBJ1-4)
CASSLMGDEKLFF

SEQ ID NO: 734219 - protein, 17 aa, Homo sapiens
  CDR3 for alpha chain variable domain of TCR clone 367110 (TRAV3, TRAJ6)
CAVRDGPRAGGSYIPTF

SEQ ID NO: 734220 - protein, 17 aa, Homo sapiens
  CDR3 for beta chain variable domain of TCR clone 367110 (TRBV28, TRBJ2-5)
CASSAPEGDALQETQYF

SEQ ID NO: 734221 - protein, 17 aa, Homo sapiens
  CDR3 for alpha chain variable domain of TCR clone 367111 (TRAV26-2, TRAJ42)
CILRDVGHGGSQGNLIF

SEQ ID NO: 734222 - protein, 16 aa, Homo sapiens
  CDR3 for beta chain variable domain of TCR clone 367111 (TRBV12-4, TRBJ2-7)
FASSLIGGTGTYEQYF

SEQ ID NO: 734223 - protein, 18 aa, Homo sapiens
  CDR3 for alpha chain variable domain of TCR clone 367112 (TRAV21, TRAJ52)
CAVRPSPAGGTSYGKLTF

SEQ ID NO: 734224 - protein, 15 aa, Homo sapiens
  CDR3 for beta chain variable domain of TCR clone 367112 (TRBV20-1, TRBJ1-5)
CSAIKNGQRNQPQHF

SEQ ID NO: 734225 - protein, 15 aa, Homo sapiens
  CDR3 for alpha chain variable domain of TCR clone 367113 (TRAV3, TRAJ22)
CAVRDRGGSARQLTF

SEQ ID NO: 734226 - protein, 15 aa, Homo sapiens
  CDR3 for beta chain variable domain of TCR clone 367113 (TRBV7-8, TRBJ2-1)
CASSLHGGPYNEQFF

SEQ ID NO: 734227 - protein, 16 aa, Homo sapiens
  CDR3 for alpha chain variable domain of TCR clone 367114 (TRAV23/DV6, TRAJ9)
CAASIGGNTGGFKTIF

SEQ ID NO: 734228 - protein, 13 aa, Homo sapiens
  CDR3 for beta chain variable domain of TCR clone 367114 (TRBV19, TRBJ1-2)
CASSVPGQDGYTF

SEQ ID NO: 734229 - protein, 15 aa, Homo sapiens
  CDR3 for alpha chain variable domain of TCR clone 367115 (TRAV2, TRAJ11)
CAVGGRNSGYSTLTF

SEQ ID NO: 734230 - protein, 14 aa, Homo sapiens
  CDR3 for beta chain variable domain of TCR clone 367115 (TRBV4-1, TRBJ2-2)
CASSQAVNTGELFF

SEQ ID NO: 734231 - protein, 12 aa, Homo sapiens
  CDR3 for alpha chain variable domain of TCR clone 367116 (TRAV17, TRAJ49)
CATVTTGNQFYF

SEQ ID NO: 734232 - protein, 13 aa, Homo sapiens
  CDR3 for beta chain variable domain of TCR clone 367116 (TRBV28, TRBJ2-5)
CASSFAGGETQYF

SEQ ID NO: 734233 - protein, 13 aa, Homo sapiens
  CDR3 for alpha chain variable domain of TCR clone 367117 (TRAV26-2, TRAJ54)
CIPRVGGAQKLVF

SEQ ID NO: 734234 - protein, 16 aa, Homo sapiens
  CDR3 for beta chain variable domain of TCR clone 367117 (TRBV4-1, TRBJ1-1)
CASSSMSERPNTEDFF

SEQ ID NO: 734235 - protein, 23 aa, Homo sapiens
  CDR3 for alpha chain variable domain of TCR clone 367118 (TRAV26-1, TRAJ38)
CIADNAGNNHIQNPDPAVYQLRD

SEQ ID NO: 734236 - protein, 13 aa, Homo sapiens
  CDR3 for beta chain variable domain of TCR clone 367118 (TRBV7-2, TRBJ2-7)
CASSSPSGSEQYF

SEQ ID NO: 734237 - protein, 23 aa, Homo sapiens
  CDR3 for alpha chain variable domain of TCR clone 367119 (TRAV12-2, TRAJ36)
SLLIRDAQPSDSATLERVNNLFF

SEQ ID NO: 734238 - protein, 17 aa, Homo sapiens
  CDR3 for beta chain variable domain of TCR clone 367119 (TRBV3-1, TRBJ2-3)
CASSQLLDRGHTDTQYF

SEQ ID NO: 734239 - protein, 13 aa, Homo sapiens
  CDR3 for alpha chain variable domain of TCR clone 367120 (TRAV17, TRAJ34)
CATDLHNTDKLIF

SEQ ID NO: 734240 - protein, 15 aa, Homo sapiens
  CDR3 for beta chain variable domain of TCR clone 367120 (TRBV20-1, TRBJ2-3)
CGATGTSGFTDTQYF

SEQ ID NO: 734241 - protein, 14 aa, Homo sapiens
  CDR3 for alpha chain variable domain of TCR clone 367121 (TRAV13-1, TRAJ4)
CAASFSGGYNNPIF

SEQ ID NO: 734242 - protein, 14 aa, Homo sapiens
  CDR3 for beta chain variable domain of TCR clone 367121 (TRBV6-1, TRBJ1-3)
CASVQGGGRNTIYF

SEQ ID NO: 734243 - protein, 15 aa, Homo sapiens
  CDR3 for alpha chain variable domain of TCR clone 367122 (TRAV12-1, TRAJ44)
CVVDEYTGTASKLTF

SEQ ID NO: 734244 - protein, 15 aa, Homo sapiens
  CDR3 for beta chain variable domain of TCR clone 367122 (TRBV7-9, TRBJ1-4)
CASSRTGGFNEKLFF

SEQ ID NO: 734245 - protein, 14 aa, Homo sapiens
  CDR3 for alpha chain variable domain of TCR clone 367123 (TRAV12-2, TRAJ13)
CAVKKTGGYQKVTF

SEQ ID NO: 734246 - protein, 16 aa, Homo sapiens
  CDR3 for beta chain variable domain of TCR clone 367123 (TRBV10-3, TRBJ2-1)
CALRGVGDGGGGEQFF

SEQ ID NO: 734247 - protein, 18 aa, Homo sapiens
  CDR3 for alpha chain variable domain of TCR clone 367124 (TRAV21, TRAJ13)
CAVPRSFWGLPESYLWNS

SEQ ID NO: 734248 - protein, 13 aa, Homo sapiens
  CDR3 for beta chain variable domain of TCR clone 367124 (TRBV7-9, TRBJ1-2)
CASSLKQNYGYTF

SEQ ID NO: 734249 - protein, 17 aa, Homo sapiens
  CDR3 for alpha chain variable domain of TCR clone 367125 (TRAV3, TRAJ6)
CSVRDGPRAGESYIPTF

SEQ ID NO: 734250 - protein, 14 aa, Homo sapiens
  CDR3 for beta chain variable domain of TCR clone 367125 (TRBV7-2, TRBJ2-7)
CASSPKTSFYEQYF

SEQ ID NO: 734251 - protein, 11 aa, Homo sapiens
  CDR3 for alpha chain variable domain of TCR clone 367126 (TRAV12-1, TRAJ20)
CVVNRDYKLSF

SEQ ID NO: 734252 - protein, 12 aa, Homo sapiens
  CDR3 for beta chain variable domain of TCR clone 367126 (TRBV19, TRBJ1-5)
CASSIAQQPQHF

SEQ ID NO: 734253 - protein, 11 aa, Homo sapiens
  CDR3 for alpha chain variable domain of TCR clone 367127 (TRAV27, TRAJ49)
CAGEPVTSSIL

SEQ ID NO: 734254 - protein, 15 aa, Homo sapiens
  CDR3 for beta chain variable domain of TCR clone 367127 (TRBV20-1, TRBJ2-7)
CSARKGLAESYEQYF

SEQ ID NO: 734255 - protein, 16 aa, Homo sapiens
  CDR3 for alpha chain variable domain of TCR clone 367128 (TRAV1-2, TRAJ10)
CAVRGVLTGGGNKLTF

SEQ ID NO: 734256 - protein, 13 aa, Homo sapiens
  CDR3 for beta chain variable domain of TCR clone 367128 (TRBV20-1, TRBJ1-6)
CSAPLGVGSPLQF

SEQ ID NO: 734257 - protein, 16 aa, Homo sapiens
  CDR3 for alpha chain variable domain of TCR clone 367129 (TRAV8-3, TRAJ13)
CAVGAYPSGGYQKVTF

SEQ ID NO: 734258 - protein, 12 aa, Homo sapiens
  CDR3 for beta chain variable domain of TCR clone 367129 (TRBV11-2, TRBJ2-1)
CASSPGNNEQFF

SEQ ID NO: 734259 - protein, 15 aa, Homo sapiens
  CDR3 for alpha chain variable domain of TCR clone 367130 (TRAV23/DV6, TRAJ33)
CAASNSGGGNYQLIW

SEQ ID NO: 734260 - protein, 20 aa, Homo sapiens
  CDR3 for beta chain variable domain of TCR clone 367130 (TRBV28, TRBJ2-1)
CASTPIGRSPGLAGGNEQFF

SEQ ID NO: 734261 - protein, 11 aa, Homo sapiens
  CDR3 for alpha chain variable domain of TCR clone 367131 (TRAV22, TRAJ27)
CAVLNAGKSTF

SEQ ID NO: 734262 - protein, 16 aa, Homo sapiens
  CDR3 for beta chain variable domain of TCR clone 367131 (TRBV19, TRBJ2-1)
CASSKAGPSSYNEQFF

SEQ ID NO: 734263 - protein, 16 aa, Homo sapiens
  CDR3 for alpha chain variable domain of TCR clone 367132 (TRAV3, TRAJ18)
CAVRDGRGSTLGRLYF

SEQ ID NO: 734264 - protein, 15 aa, Homo sapiens
  CDR3 for beta chain variable domain of TCR clone 367132 (TRBV7-9, TRBJ1-6)
GASSSPGRGNSPLHF

SEQ ID NO: 734265 - protein, 15 aa, Homo sapiens
  CDR3 for alpha chain variable domain of TCR clone 367133 (TRAV3, TRAJ22)
CAVRDRGGSARQLTF

SEQ ID NO: 734266 - protein, 16 aa, Homo sapiens
  CDR3 for beta chain variable domain of TCR clone 367133 (TRBV29-1, TRBJ1-2)
CSVEANRDIANYGYTF

SEQ ID NO: 734267 - protein, 14 aa, Homo sapiens
  CDR3 for alpha chain variable domain of TCR clone 367134 (TRAV12-1, TRAJ22)
CVVTNSGSARQLTF

SEQ ID NO: 734268 - protein, 16 aa, Homo sapiens
  CDR3 for beta chain variable domain of TCR clone 367134 (TRBV9, TRBJ1-2)
CASSVEEKVSPYGYTF

SEQ ID NO: 734269 - protein, 17 aa, Homo sapiens
  CDR3 for alpha chain variable domain of TCR clone 367135 (TRAV3, TRAJ6)
CAVRDGPSAGGSYIPTF

SEQ ID NO: 734270 - protein, 14 aa, Homo sapiens
  CDR3 for beta chain variable domain of TCR clone 367135 (TRBV7-2, TRBJ2-7)
CSSSPKTSFYEQYF

SEQ ID NO: 734271 - protein, 17 aa, Homo sapiens
  CDR3 for alpha chain variable domain of TCR clone 367136 (TRAV26-1, TRAJ22)
CIVRVPSHSGSARQLTS

SEQ ID NO: 734272 - protein, 16 aa, Homo sapiens
  CDR3 for beta chain variable domain of TCR clone 367136 (TRBV28, TRBJ2-1)
CASRRSGRVVGNEQFF

SEQ ID NO: 734273 - protein, 23 aa, Homo sapiens
  CDR3 for alpha chain variable domain of TCR clone 367137 (TRAV12-2, TRAJ36)
SLLIRDSQPSDSATLERANNLFF

SEQ ID NO: 734274 - protein, 12 aa, Homo sapiens
  CDR3 for beta chain variable domain of TCR clone 367137 (TRBV11-3, TRBJ1-1)
CASSHRQGEAFF

SEQ ID NO: 734275 - protein, 13 aa, Homo sapiens
  CDR3 for alpha chain variable domain of TCR clone 367138 (TRAV21, TRAJ27)
CAARPGNAGKSTF

SEQ ID NO: 734276 - protein, 13 aa, Homo sapiens
  CDR3 for beta chain variable domain of TCR clone 367138 (TRBV2, TRBJ2-7)
CASTGGSSYEQYF

SEQ ID NO: 734277 - protein, 16 aa, Homo sapiens
  CDR3 for alpha chain variable domain of TCR clone 367139 (TRAV35, TRAJ28)
CAGRSNSGAGSYQLTF

SEQ ID NO: 734278 - protein, 13 aa, Homo sapiens
  CDR3 for beta chain variable domain of TCR clone 367139 (TRBV6-5, TRBJ1-5)
CASSWTGRQPQHF

SEQ ID NO: 734279 - protein, 13 aa, Homo sapiens
  CDR3 for alpha chain variable domain of TCR clone 367140 (TRAV13-1, TRAJ6)
CAGGSGGSYIPTF

SEQ ID NO: 734280 - protein, 17 aa, Homo sapiens
  CDR3 for beta chain variable domain of TCR clone 367140 (TRBV7-8, TRBJ2-1)
CASSPPTGTLAYNEQFF

SEQ ID NO: 734281 - protein, 15 aa, Homo sapiens
  CDR3 for alpha chain variable domain of TCR clone 367141 (TRAV27, TRAJ38)
CAGRFNAGNNRKLIW

SEQ ID NO: 734282 - protein, 14 aa, Homo sapiens
  CDR3 for beta chain variable domain of TCR clone 367141 (TRBV28, TRBJ2-1)
CASSLVAPYNEQFF

SEQ ID NO: 734283 - protein, 12 aa, Homo sapiens
  CDR3 for alpha chain variable domain of TCR clone 367142 (TRAV21, TRAJ42)
CAAGGSQGNLIF

SEQ ID NO: 734284 - protein, 14 aa, Homo sapiens
  CDR3 for beta chain variable domain of TCR clone 367142 (TRBV12-4, TRBJ1-1)
CASSLGTGGTEAFF

SEQ ID NO: 734285 - protein, 18 aa, Homo sapiens
  CDR3 for alpha chain variable domain of TCR clone 367143 (TRAV21, TRAJ52)
CAVRPSPPGGTSYGKLTI

SEQ ID NO: 734286 - protein, 17 aa, Homo sapiens
  CDR3 for beta chain variable domain of TCR clone 367143 (TRBV13, TRBJ2-3)
CASSLSRVAGGRNTQYF

SEQ ID NO: 734287 - protein, 15 aa, Homo sapiens
  CDR3 for alpha chain variable domain of TCR clone 367144 (TRAV13-1, TRAJ52)
CAATSPRTSYGKLTF

SEQ ID NO: 734288 - protein, 21 aa, Homo sapiens
  CDR3 for beta chain variable domain of TCR clone 367144 (TRBV7-2, TRBJ2-5)
CASSPGGGPKRRDPVLRARHA

SEQ ID NO: 734289 - protein, 15 aa, Homo sapiens
  CDR3 for alpha chain variable domain of TCR clone 367145 (TRAV21, TRAJ32)
CTAAPYGGATNKLIF

SEQ ID NO: 734290 - protein, 17 aa, Homo sapiens
  CDR3 for beta chain variable domain of TCR clone 367145 (TRBV18, TRBJ2-3)
CASSPFGDGGFTDTQYF

SEQ ID NO: 734291 - protein, 14 aa, Homo sapiens
  CDR3 for alpha chain variable domain of TCR clone 367146 (TRAV13-1, TRAJ44)
CAAKATGTASKLTF

SEQ ID NO: 734292 - protein, 13 aa, Homo sapiens
  CDR3 for beta chain variable domain of TCR clone 367146 (TRBV7-8, TRBJ2-7)
CASSFAGLYEQYF

SEQ ID NO: 734293 - protein, 16 aa, Homo sapiens
  CDR3 for alpha chain variable domain of TCR clone 367147 (TRAV3, TRAJ10)
CAVRDMRAGGGNKRTF

SEQ ID NO: 734294 - protein, 13 aa, Homo sapiens
  CDR3 for beta chain variable domain of TCR clone 367147 (TRBV20-1, TRBJ2-7)
CSARWGYNYEQYF

SEQ ID NO: 734295 - protein, 22 aa, Homo sapiens
  CDR3 for alpha chain variable domain of TCR clone 367148 (TRAV12-2, TRAJ32)
CSSETPSPVIQPPKSATNKLIF

SEQ ID NO: 734296 - protein, 15 aa, Homo sapiens
  CDR3 for beta chain variable domain of TCR clone 367148 (TRBV11-1, TRBJ2-7)
CASSLSYGASYEQYF

SEQ ID NO: 734297 - protein, 14 aa, Homo sapiens
  CDR3 for alpha chain variable domain of TCR clone 367149 (TRAV26-2, TRAJ27)
CILRDISDACTSTF

SEQ ID NO: 734298 - protein, 15 aa, Homo sapiens
  CDR3 for beta chain variable domain of TCR clone 367149 (TRBV10-3, TRBJ2-7)
CATREQGLRSYEQYF

SEQ ID NO: 734299 - protein, 15 aa, Homo sapiens
  CDR3 for alpha chain variable domain of TCR clone 367150 (TRAV3, TRAJ5)
CAVRDRKTGRRALTF

SEQ ID NO: 734300 - protein, 14 aa, Homo sapiens
  CDR3 for beta chain variable domain of TCR clone 367150 (TRBV12-4, TRBJ1-1)
CASSLGTGGTEAFF

SEQ ID NO: 734301 - protein, 14 aa, Homo sapiens
  CDR3 for alpha chain variable domain of TCR clone 367151 (TRAV3, TRAJ21)
CAVRDKYNFNKFYF

SEQ ID NO: 734302 - protein, 16 aa, Homo sapiens
  CDR3 for beta chain variable domain of TCR clone 367151 (TRBV27, TRBJ2-2)
CASSFRGLVRTGELSF

SEQ ID NO: 734303 - protein, 10 aa, Homo sapiens
  CDR3 for alpha chain variable domain of TCR clone 367152 (TRAV36/DV7, TRAJ31)
CAVGEARLMF

SEQ ID NO: 734304 - protein, 16 aa, Homo sapiens
  CDR3 for beta chain variable domain of TCR clone 367152 (TRBV4-2, TRBJ2-3)
CASSQDGARGGVKQYF

SEQ ID NO: 734305 - protein, 14 aa, Homo sapiens
  CDR3 for alpha chain variable domain of TCR clone 367153 (TRAV3, TRAJ9)
CAVRLNTGGFKTIF

SEQ ID NO: 734306 - protein, 13 aa, Homo sapiens
  CDR3 for beta chain variable domain of TCR clone 367153 (TRBV12-4, TRBJ2-7)
CASSPTETYEQYF

SEQ ID NO: 734307 - protein, 14 aa, Homo sapiens
  CDR3 for alpha chain variable domain of TCR clone 367154 (TRAV1-1, TRAJ27)
CAVIYNTNAGKSNF

SEQ ID NO: 734308 - protein, 14 aa, Homo sapiens
  CDR3 for beta chain variable domain of TCR clone 367154 (TRBV25-1, TRBJ1-1)
CASTHLGGNTEAFF

SEQ ID NO: 734309 - protein, 14 aa, Homo sapiens
  CDR3 for alpha chain variable domain of TCR clone 367155 (TRAV12-2, TRAJ17)
CAVLFKAAGNKLTF

SEQ ID NO: 734310 - protein, 14 aa, Homo sapiens
  CDR3 for beta chain variable domain of TCR clone 367155 (TRBV12-4, TRBJ1-1)
CASSPIRRTGEAFF

SEQ ID NO: 734311 - protein, 12 aa, Homo sapiens
  CDR3 for alpha chain variable domain of TCR clone 367156 (TRAV21, TRAJ23)
CAVMLQGGKLIF

SEQ ID NO: 734312 - protein, 15 aa, Homo sapiens
  CDR3 for beta chain variable domain of TCR clone 367156 (TRBV2, TRBJ2-5)
CASTRDGGPQETQYF

SEQ ID NO: 734313 - protein, 14 aa, Homo sapiens
  CDR3 for alpha chain variable domain of TCR clone 367157 (TRAV3, TRAJ34)
CAVRDINNTDKLIF

SEQ ID NO: 734314 - protein, 15 aa, Homo sapiens
  CDR3 for beta chain variable domain of TCR clone 367157 (TRBV20-1, TRBJ2-7)
CSARDRVSGMGEQYF

SEQ ID NO: 734315 - protein, 14 aa, Homo sapiens
  CDR3 for alpha chain variable domain of TCR clone 367158 (TRAV12-2, TRAJ45)
CAVNIGGGADGLTF

SEQ ID NO: 734316 - protein, 14 aa, Homo sapiens
  CDR3 for beta chain variable domain of TCR clone 367158 (TRBV6-3, TRBJ2-2)
CASTYTPDTGELFF

SEQ ID NO: 734317 - protein, 15 aa, Homo sapiens
  CDR3 for alpha chain variable domain of TCR clone 367159 (TRAV12-2, TRAJ53)
CAVDGGGGSNYKLTF

SEQ ID NO: 734318 - protein, 17 aa, Homo sapiens
  CDR3 for beta chain variable domain of TCR clone 367159 (TRBV7-3, TRBJ2-3)
RASSLMKRMRGADTQYF

SEQ ID NO: 734319 - protein, 13 aa, Homo sapiens
  CDR3 for alpha chain variable domain of TCR clone 367160 (TRAV3, TRAJ20)
CCEAFCNDYKLSF

SEQ ID NO: 734320 - protein, 14 aa, Homo sapiens
  CDR3 for beta chain variable domain of TCR clone 367160 (TRBV6-5, TRBJ2-1)
CASSLGLAGLWEFF

SEQ ID NO: 734321 - protein, 12 aa, Homo sapiens
  CDR3 for alpha chain variable domain of TCR clone 367161 (TRAV21, TRAJ30)
CAVINRDDKIIF

SEQ ID NO: 734322 - protein, 17 aa, Homo sapiens
  CDR3 for beta chain variable domain of TCR clone 367161 (TRBV5-1, TRBJ1-1)
CASRPIRTGGVNTEAFF

SEQ ID NO: 734323 - protein, 17 aa, Homo sapiens
  CDR3 for alpha chain variable domain of TCR clone 367162 (TRAV3, TRAJ6)
CAVRDGPRSGGSYIPTF

SEQ ID NO: 734324 - protein, 14 aa, Homo sapiens
  CDR3 for beta chain variable domain of TCR clone 367162 (TRBV6-1, TRBJ1-3)
CASVQGGGGNTIYF

SEQ ID NO: 734325 - protein, 13 aa, Homo sapiens
  CDR3 for alpha chain variable domain of TCR clone 367163 (TRAV3, TRAJ21)
CAVREPDFNKFYC

SEQ ID NO: 734326 - protein, 15 aa, Homo sapiens
  CDR3 for beta chain variable domain of TCR clone 367163 (TRBV9, TRBJ1-6)
CASSVAGTGDSPLHF

SEQ ID NO: 734327 - protein, 15 aa, Homo sapiens
  CDR3 for alpha chain variable domain of TCR clone 367164 (TRAV12-2, TRAJ57)
CAVSRGQSGSEKLVF

SEQ ID NO: 734328 - protein, 14 aa, Homo sapiens
  CDR3 for beta chain variable domain of TCR clone 367164 (TRBV20-1, TRBJ2-1)
CSAHPGLPYNEQFF

SEQ ID NO: 734329 - protein, 16 aa, Homo sapiens
  CDR3 for alpha chain variable domain of TCR clone 367165 (TRAV13-1, TRAJ48)
CAAGIFGNFGNEKLTF

SEQ ID NO: 734330 - protein, 17 aa, Homo sapiens
  CDR3 for beta chain variable domain of TCR clone 367165 (TRBV7-3, TRBJ2-3)
CASSLMKRMWGADTQYF

SEQ ID NO: 734331 - protein, 13 aa, Homo sapiens
  CDR3 for alpha chain variable domain of TCR clone 367166 (TRAV2, TRAJ10)
CAVETGGGNTLTF

SEQ ID NO: 734332 - protein, 14 aa, Homo sapiens
  CDR3 for beta chain variable domain of TCR clone 367166 (TRBV20-1, TRBJ2-3)
CSAGGRRGTDTQYF

SEQ ID NO: 734333 - protein, 15 aa, Homo sapiens
  CDR3 for alpha chain variable domain of TCR clone 367167 (TRAV3, TRAJ5)
CAVRDLDTGRRALTF

SEQ ID NO: 734334 - protein, 11 aa, Homo sapiens
  CDR3 for beta chain variable domain of TCR clone 367167 (TRBV25-1, TRBJ1-4)
VGGGQPEKLFF

SEQ ID NO: 734335 - protein, 15 aa, Homo sapiens
  CDR3 for alpha chain variable domain of TCR clone 367168 (TRAV35, TRAJ40)
CAGQLGTSGTYKYIF

SEQ ID NO: 734336 - protein, 17 aa, Homo sapiens
  CDR3 for beta chain variable domain of TCR clone 367168 (TRBV28, TRBJ2-5)
CASSTPEGDALQETQYF

SEQ ID NO: 734337 - protein, 10 aa, Homo sapiens
  CDR3 for alpha chain variable domain of TCR clone 367169 (TRAV23/DV6, TRAJ57)
CAASPTLSQG

SEQ ID NO: 734338 - protein, 13 aa, Homo sapiens
  CDR3 for beta chain variable domain of TCR clone 367169 (TRBV11-2, TRBJ2-5)
CASSSTGEETQYF

SEQ ID NO: 734339 - protein, 18 aa, Homo sapiens
  CDR3 for alpha chain variable domain of TCR clone 367170 (TRAV13-1, TRAJ52)
CAASKRSAGGTCYGKLTF

SEQ ID NO: 734340 - protein, 14 aa, Homo sapiens
  CDR3 for beta chain variable domain of TCR clone 367170 (TRBV7-2, TRBJ2-7)
CASSHKTSFYEQYF

SEQ ID NO: 734341 - protein, 20 aa, Homo sapiens
  CDR3 for alpha chain variable domain of TCR clone 367171 (TRAV26-1, TRAJ38)
CIADNAGNNHIQHPDPAVYQ

SEQ ID NO: 734342 - protein, 13 aa, Homo sapiens
  CDR3 for beta chain variable domain of TCR clone 367171 (TRBV20-1, TRBJ1-1)
CRARGGGNTEAFF

SEQ ID NO: 734343 - protein, 10 aa, Homo sapiens
  CDR3 for alpha chain variable domain of TCR clone 367172 (TRAV2, TRAJ34)
CAVVNDKLIF

SEQ ID NO: 734344 - protein, 15 aa, Homo sapiens
  CDR3 for beta chain variable domain of TCR clone 367172 (TRBV4-1, TRBJ1-4)
CASSDTGGTNEKLFF

SEQ ID NO: 734345 - protein, 13 aa, Homo sapiens
  CDR3 for alpha chain variable domain of TCR clone 367173 (TRAV35, TRAJ53)
CAGQESSNYKLPF

SEQ ID NO: 734346 - protein, 11 aa, Homo sapiens
  CDR3 for beta chain variable domain of TCR clone 367173 (TRBV29-1, TRBJ2-5)
CSEDRTGTQYF

SEQ ID NO: 734347 - protein, 16 aa, Homo sapiens
  CDR3 for alpha chain variable domain of TCR clone 367174 (TRAV21, TRAJ32)
CAVSAPGGGATNKLIF

SEQ ID NO: 734348 - protein, 15 aa, Homo sapiens
  CDR3 for beta chain variable domain of TCR clone 367174 (TRBV18, TRBJ2-7)
CASSDIPYPQLEQYF

SEQ ID NO: 734349 - protein, 13 aa, Homo sapiens
  CDR3 for alpha chain variable domain of TCR clone 367175 (TRAV3, TRAJ29)
CAVRDIIDTPLVF

SEQ ID NO: 734350 - protein, 12 aa, Homo sapiens
  CDR3 for beta chain variable domain of TCR clone 367175 (TRBV11-2, TRBJ2-2)
CASSLPTGELFF

SEQ ID NO: 734351 - protein, 12 aa, Homo sapiens
  CDR3 for alpha chain variable domain of TCR clone 367176 (TRAV9-2, TRAJ35)
CALRGFGNVLHC

SEQ ID NO: 734352 - protein, 12 aa, Homo sapiens
  CDR3 for beta chain variable domain of TCR clone 367176 (TRBV16, TRBJ2-2)
CASSQSVGELFF

SEQ ID NO: 734353 - protein, 13 aa, Homo sapiens
  CDR3 for alpha chain variable domain of TCR clone 367177 (TRAV24, TRAJ13)
CASDSGGYQKVTF

SEQ ID NO: 734354 - protein, 14 aa, Homo sapiens
  CDR3 for beta chain variable domain of TCR clone 367177 (TRBV5-4, TRBJ2-1)
CASSLDQGLNEQFF

SEQ ID NO: 734355 - protein, 12 aa, Homo sapiens
  CDR3 for alpha chain variable domain of TCR clone 367178 (TRAV1-2, TRAJ29)
CAVPSGHTPLVF

SEQ ID NO: 734356 - protein, 13 aa, Homo sapiens
  CDR3 for beta chain variable domain of TCR clone 367178 (TRBV5-4, TRBJ1-1)
CASSVDLGTEAFF

SEQ ID NO: 734357 - protein, 15 aa, Homo sapiens
  CDR3 for alpha chain variable domain of TCR clone 367179 (TRAV26-1, TRAJ15)
CIVRMANQSGTALIF

SEQ ID NO: 734358 - protein, 15 aa, Homo sapiens
  CDR3 for beta chain variable domain of TCR clone 367179 (TRBV20-1, TRBJ1-1)
CSARKAETSNTEALF

SEQ ID NO: 734359 - protein, 13 aa, Homo sapiens
  CDR3 for alpha chain variable domain of TCR clone 367180 (TRAV3, TRAJ21)
CAVREPDFNKFYF

SEQ ID NO: 734360 - protein, 13 aa, Homo sapiens
  CDR3 for beta chain variable domain of TCR clone 367180 (TRBV9, TRBJ2-1)
CDSSPSGGNEQFF

SEQ ID NO: 734361 - protein, 12 aa, Homo sapiens
  CDR3 for alpha chain variable domain of TCR clone 367181 (TRAV12-1, TRAJ34)
WVVAGATDKLIF

SEQ ID NO: 734362 - protein, 12 aa, Homo sapiens
  CDR3 for beta chain variable domain of TCR clone 367181 (TRBV7-9, TRBJ1-1)
CASGLVRGEAFF

SEQ ID NO: 734363 - protein, 12 aa, Homo sapiens
  CDR3 for alpha chain variable domain of TCR clone 367182 (TRAV12-3, TRAJ20)
CAMVRGDYKLSF

SEQ ID NO: 734364 - protein, 17 aa, Homo sapiens
  CDR3 for beta chain variable domain of TCR clone 367182 (TRBV4-1, TRBJ1-4)
CASSQEGPRGVEEKLFF

SEQ ID NO: 734365 - protein, 14 aa, Homo sapiens
  CDR3 for alpha chain variable domain of TCR clone 367183 (TRAV12-1, TRAJ15)
CLPPANQAGTALIF

SEQ ID NO: 734366 - protein, 13 aa, Homo sapiens
  CDR3 for beta chain variable domain of TCR clone 367183 (TRBV7-2, TRBJ2-4)
CASSREHENIQYF

SEQ ID NO: 734367 - protein, 11 aa, Homo sapiens
  CDR3 for alpha chain variable domain of TCR clone 367184 (TRAV12-2, TRAJ33)
CAVGSNYQLIW

SEQ ID NO: 734368 - protein, 14 aa, Homo sapiens
  CDR3 for beta chain variable domain of TCR clone 367184 (TRBV6-1, TRBJ2-2)
CASVEHLESGELFF

SEQ ID NO: 734369 - protein, 14 aa, Homo sapiens
  CDR3 for alpha chain variable domain of TCR clone 367185 (TRAV12-1, TRAJ4)
CVVPLKSGYNKLIF

SEQ ID NO: 734370 - protein, 11 aa, Homo sapiens
  CDR3 for beta chain variable domain of TCR clone 367185 (TRBV7-9, TRBJ2-1)
CASSSQNEQFF

SEQ ID NO: 734371 - protein, 14 aa, Homo sapiens
  CDR3 for alpha chain variable domain of TCR clone 367186 (TRAV38-1, TRAJ35)
CAFLTKGFGNVPHC

SEQ ID NO: 734372 - protein, 17 aa, Homo sapiens
  CDR3 for beta chain variable domain of TCR clone 367186 (TRBV28, TRBJ1-1)
CASSGDLRTESNTEAFF

SEQ ID NO: 734373 - protein, 13 aa, Homo sapiens
  CDR3 for alpha chain variable domain of TCR clone 367187 (TRAV26-1, TRAJ31)
CIVRVDGNARLMF

SEQ ID NO: 734374 - protein, 17 aa, Homo sapiens
  CDR3 for beta chain variable domain of TCR clone 367187 (TRBV11-2, TRBJ2-1)
CASSLYPPGVEYNERFF

SEQ ID NO: 734375 - protein, 14 aa, Homo sapiens
  CDR3 for alpha chain variable domain of TCR clone 367188 (TRAV2, TRAJ29)
CAGPFQYGNTPLVS

SEQ ID NO: 734376 - protein, 14 aa, Homo sapiens
  CDR3 for beta chain variable domain of TCR clone 367188 (TRBV7-2, TRBJ2-5)
CRQLKEQGRETHYF

SEQ ID NO: 734377 - protein, 14 aa, Homo sapiens
  CDR3 for alpha chain variable domain of TCR clone 367189 (TRAV12-2, TRAJ13)
CAVKKTGGYQKVTF

SEQ ID NO: 734378 - protein, 15 aa, Homo sapiens
  CDR3 for beta chain variable domain of TCR clone 367189 (TRBV19, TRBJ1-6)
CASSTQGAVGSHLHF

SEQ ID NO: 734379 - protein, 17 aa, Homo sapiens
  CDR3 for alpha chain variable domain of TCR clone 367190 (TRAV8-6, TRAJ58)
CAVSSWVGETSGSRLTF

SEQ ID NO: 734380 - protein, 14 aa, Homo sapiens
  CDR3 for beta chain variable domain of TCR clone 367190 (TRBV7-3, TRBJ1-1)
CASSLGTGYTEAFF

SEQ ID NO: 734381 - protein, 14 aa, Homo sapiens
  CDR3 for alpha chain variable domain of TCR clone 367191 (TRAV29/DV5, TRAJ52)
CAATDGTSYGKLTF

SEQ ID NO: 734382 - protein, 17 aa, Homo sapiens
  CDR3 for beta chain variable domain of TCR clone 367191 (TRBV7-8, TRBJ2-6)
CASSAGTGGAGANVLTF

SEQ ID NO: 734383 - protein, 17 aa, Homo sapiens
  CDR3 for alpha chain variable domain of TCR clone 367192 (TRAV3, TRAJ6)
CAVRDGPRAGGSYIHTF

SEQ ID NO: 734384 - protein, 15 aa, Homo sapiens
  CDR3 for beta chain variable domain of TCR clone 367192 (TRBV6-4, TRBJ2-4)
CASPGTELAKNIQYF

SEQ ID NO: 734385 - protein, 14 aa, Homo sapiens
  CDR3 for alpha chain variable domain of TCR clone 367193 (TRAV17, TRAJ54)
CATDANQGAQKLVF

SEQ ID NO: 734386 - protein, 14 aa, Homo sapiens
  CDR3 for beta chain variable domain of TCR clone 367193 (TRBV25-1, TRBJ1-1)
CDSTHLGGNTEAFF

SEQ ID NO: 734387 - protein, 12 aa, Homo sapiens
  CDR3 for alpha chain variable domain of TCR clone 367194 (TRAV17, TRAJ57)
CATDGGSEKLVF

SEQ ID NO: 734388 - protein, 14 aa, Homo sapiens
  CDR3 for beta chain variable domain of TCR clone 367194 (TRBV10-3, TRBJ1-2)
CAIRAGTGDYGYTF

SEQ ID NO: 734389 - protein, 13 aa, Homo sapiens
  CDR3 for alpha chain variable domain of TCR clone 367195 (TRAV27, TRAJ39)
CAGDTPAGNMLTF

SEQ ID NO: 734390 - protein, 13 aa, Homo sapiens
  CDR3 for beta chain variable domain of TCR clone 367195 (TRBV4-1, TRBJ2-4)
CASSQVGIDIQYV

SEQ ID NO: 734391 - protein, 16 aa, Homo sapiens
  CDR3 for alpha chain variable domain of TCR clone 367196 (TRAV12-3, TRAJ53)
CAMGPGSGGSNYKLTF

SEQ ID NO: 734392 - protein, 12 aa, Homo sapiens
  CDR3 for beta chain variable domain of TCR clone 367196 (TRBV7-9, TRBJ2-7)
CASSIKREEQYF

SEQ ID NO: 734393 - protein, 13 aa, Homo sapiens
  CDR3 for alpha chain variable domain of TCR clone 367197 (TRAV27, TRAJ40)
CAGPPSGTYKYIF

SEQ ID NO: 734394 - protein, 14 aa, Homo sapiens
  CDR3 for beta chain variable domain of TCR clone 367197 (TRBV12-4, TRBJ1-1)
CASSLGTGGTEAFF

SEQ ID NO: 734395 - protein, 16 aa, Homo sapiens
  CDR3 for alpha chain variable domain of TCR clone 367198 (TRAV12-2, TRAJ40)
CAVIGGGTSGTYKYIF

SEQ ID NO: 734396 - protein, 13 aa, Homo sapiens
  CDR3 for beta chain variable domain of TCR clone 367198 (TRBV7-9, TRBJ1-2)
CASSLKQNYGYTF

SEQ ID NO: 734397 - protein, 17 aa, Homo sapiens
  CDR3 for alpha chain variable domain of TCR clone 367199 (TRAV12-2, TRAJ26)
CAIPGKYRDNYGQNFVF

SEQ ID NO: 734398 - protein, 20 aa, Homo sapiens
  CDR3 for beta chain variable domain of TCR clone 367199 (TRBV3-1, TRBJ2-6)
CASSPRPGLEGGAGANVLTF

SEQ ID NO: 734399 - protein, 15 aa, Homo sapiens
  CDR3 for alpha chain variable domain of TCR clone 367200 (TRAV12-1, TRAJ42)
CVVTRDGGSQGNLIF

SEQ ID NO: 734400 - protein, 14 aa, Homo sapiens
  CDR3 for beta chain variable domain of TCR clone 367200 (TRBV11-2, TRBJ2-3)
CTSSLGGGANTQYF

SEQ ID NO: 734401 - protein, 23 aa, Homo sapiens
  CDR3 for alpha chain variable domain of TCR clone 367201 (TRAV8-6, TRAJ8)
CAVTQAFRNLYLELAPDFWSVQI

SEQ ID NO: 734402 - protein, 16 aa, Homo sapiens
  CDR3 for beta chain variable domain of TCR clone 367201 (TRBV7-3, TRBJ2-2)
CASSLKRGTLSGELFF

SEQ ID NO: 734403 - protein, 11 aa, Homo sapiens
  CDR3 for alpha chain variable domain of TCR clone 367202 (TRAV17, TRAJ9)
CGFTGGFKTIF

SEQ ID NO: 734404 - protein, 13 aa, Homo sapiens
  CDR3 for beta chain variable domain of TCR clone 367202 (TRBV7-9, TRBJ1-2)
CASSLKQNYGYAF

SEQ ID NO: 734405 - protein, 12 aa, Homo sapiens
  CDR3 for alpha chain variable domain of TCR clone 367203 (TRAV8-6, TRAJ50)
CDVETSYDKVIF

SEQ ID NO: 734406 - protein, 15 aa, Homo sapiens
  CDR3 for beta chain variable domain of TCR clone 367203 (TRBV9, TRBJ2-3)
CASSKSGNRADTQYF

SEQ ID NO: 734407 - protein, 14 aa, Homo sapiens
  CDR3 for alpha chain variable domain of TCR clone 367204 (TRAV38-1, TRAJ45)
CAYYSGGGADGLTF

SEQ ID NO: 734408 - protein, 14 aa, Homo sapiens
  CDR3 for beta chain variable domain of TCR clone 367204 (TRBV9, TRBJ2-7)
CASSVGVGSYEQYF

SEQ ID NO: 734409 - protein, 14 aa, Homo sapiens
  CDR3 for alpha chain variable domain of TCR clone 367205 (TRAV34, TRAJ44)
CGADGTGTTSKLTF

SEQ ID NO: 734410 - protein, 12 aa, Homo sapiens
  CDR3 for beta chain variable domain of TCR clone 367205 (TRBV11-2, TRBJ2-2)
CASSLGGGELFF

SEQ ID NO: 734411 - protein, 12 aa, Homo sapiens
  CDR3 for alpha chain variable domain of TCR clone 367206 (TRAV8-4, TRAJ43)
CAGSVNNNDMRF

SEQ ID NO: 734412 - protein, 14 aa, Homo sapiens
  CDR3 for beta chain variable domain of TCR clone 367206 (TRBV19, TRBJ2-1)
CASPTFVLSGEQFF

SEQ ID NO: 734413 - protein, 12 aa, Homo sapiens
  CDR3 for alpha chain variable domain of TCR clone 367207 (TRAV9-2, TRAJ26)
CALRGYGTNFVF

SEQ ID NO: 734414 - protein, 12 aa, Homo sapiens
  CDR3 for beta chain variable domain of TCR clone 367207 (TRBV29-1, TRBJ2-3)
CSVTGGADTQYF

SEQ ID NO: 734415 - protein, 15 aa, Homo sapiens
  CDR3 for alpha chain variable domain of TCR clone 367208 (TRAV13-2, TRAJ5)
CAENPPWTGRRALTF

SEQ ID NO: 734416 - protein, 14 aa, Homo sapiens
  CDR3 for beta chain variable domain of TCR clone 367208 (TRBV5-7, TRBJ2-7)
CASSFKGATGEQYF

SEQ ID NO: 734417 - protein, 11 aa, Homo sapiens
  CDR3 for alpha chain variable domain of TCR clone 367209 (TRAV2, TRAJ13)
CASGGYQKVTF

SEQ ID NO: 734418 - protein, 15 aa, Homo sapiens
  CDR3 for beta chain variable domain of TCR clone 367209 (TRBV7-3, TRBJ2-1)
CASSLKASEYNERFF

SEQ ID NO: 734419 - protein, 13 aa, Homo sapiens
  CDR3 for alpha chain variable domain of TCR clone 367210 (TRAV1-1, TRAJ9)
CAAKNTGGFKTIF

SEQ ID NO: 734420 - protein, 13 aa, Homo sapiens
  CDR3 for beta chain variable domain of TCR clone 367210 (TRBV20-1, TRBJ2-1)
QCSNRRVRNEQFF

SEQ ID NO: 734421 - protein, 14 aa, Homo sapiens
  CDR3 for alpha chain variable domain of TCR clone 367211 (TRAV8-4, TRAJ44)
CAVRINTGGFKTIF

SEQ ID NO: 734422 - protein, 15 aa, Homo sapiens
  CDR3 for beta chain variable domain of TCR clone 367211 (TRBV10-2, TRBJ2-6)
CASSEQGTGANDLTF

SEQ ID NO: 734423 - protein, 14 aa, Homo sapiens
  CDR3 for alpha chain variable domain of TCR clone 367212 (TRAV8-1, TRAJ5)
CAVRTDTGRRALTF

SEQ ID NO: 734424 - protein, 14 aa, Homo sapiens
  CDR3 for beta chain variable domain of TCR clone 367212 (TRBV18, TRBJ2-5)
CASSPGVSQETQYF

SEQ ID NO: 734425 - protein, 17 aa, Homo sapiens
  CDR3 for alpha chain variable domain of TCR clone 367213 (TRAV3, TRAJ6)
CAVRDGPRAGGSYIPTF

SEQ ID NO: 734426 - protein, 16 aa, Homo sapiens
  CDR3 for beta chain variable domain of TCR clone 367213 (TRBV5-1, TRBJ2-2)
CASSLWDTTNTGELFF

SEQ ID NO: 734427 - protein, 17 aa, Homo sapiens
  CDR3 for alpha chain variable domain of TCR clone 367214 (TRAV3, TRAJ6)
CAVRDGPRAGGSYILTF

SEQ ID NO: 734428 - protein, 14 aa, Homo sapiens
  CDR3 for beta chain variable domain of TCR clone 367214 (TRBV7-2, TRBJ2-7)
CASSPKTSIYEQYF

SEQ ID NO: 734429 - protein, 10 aa, Homo sapiens
  CDR3 for alpha chain variable domain of TCR clone 367215 (TRAV23/DV6, TRAJ57)
CAASSTLSQG

SEQ ID NO: 734430 - protein, 14 aa, Homo sapiens
  CDR3 for beta chain variable domain of TCR clone 367215 (TRBV12-4, TRBJ1-4)
CASSGDRGSEKLFF

SEQ ID NO: 734431 - protein, 12 aa, Homo sapiens
  CDR3 for alpha chain variable domain of TCR clone 367216 (TRAV21, TRAJ39)
CAADNAGNMLTF

SEQ ID NO: 734432 - protein, 13 aa, Homo sapiens
  CDR3 for beta chain variable domain of TCR clone 367216 (TRBV2, TRBJ1-5)
CASSVGWDQPQHF

SEQ ID NO: 734433 - protein, 15 aa, Homo sapiens
  CDR3 for alpha chain variable domain of TCR clone 367217 (TRAV3, TRAJ22)
CAVRDRGGSARQLTF

SEQ ID NO: 734434 - protein, 16 aa, Homo sapiens
  CDR3 for beta chain variable domain of TCR clone 367217 (TRBV25-1, TRBJ1-1)
CASSGDRDRGRIEPFF

SEQ ID NO: 734435 - protein, 14 aa, Homo sapiens
  CDR3 for alpha chain variable domain of TCR clone 367218 (TRAV20, TRAJ42)
CAVQARGSQGNLIF

SEQ ID NO: 734436 - protein, 13 aa, Homo sapiens
  CDR3 for beta chain variable domain of TCR clone 367218 (TRBV7-3, TRBJ1-1)
CASSQDWGAEAFF

SEQ ID NO: 734437 - protein, 15 aa, Homo sapiens
  CDR3 for alpha chain variable domain of TCR clone 367219 (TRAV17, TRAJ52)
CATEAGGTSYGKLTF

SEQ ID NO: 734438 - protein, 14 aa, Homo sapiens
  CDR3 for beta chain variable domain of TCR clone 367219 (TRBV28, TRBJ1-5)
CASSWGVLVKPQHF

SEQ ID NO: 734439 - protein, 11 aa, Homo sapiens
  CDR3 for alpha chain variable domain of TCR clone 367220 (TRAV30, TRAJ39)
CGTEAGNMLTF

SEQ ID NO: 734440 - protein, 17 aa, Homo sapiens
  CDR3 for beta chain variable domain of TCR clone 367220 (TRBV27, TRBJ2-1)
CASSLGSIDRLYNEQFF

SEQ ID NO: 734441 - protein, 15 aa, Homo sapiens
  CDR3 for alpha chain variable domain of TCR clone 367221 (TRAV12-3, TRAJ49)
CAMAVTPNTGNQFYF

SEQ ID NO: 734442 - protein, 18 aa, Homo sapiens
  CDR3 for beta chain variable domain of TCR clone 367221 (TRBV4-1, TRBJ1-5)
CASSRDPRGQGLNQHQHF

SEQ ID NO: 734443 - protein, 15 aa, Homo sapiens
  CDR3 for alpha chain variable domain of TCR clone 367222 (TRAV12-2, TRAJ53)
CAVNGGGGSNYKLTF

SEQ ID NO: 734444 - protein, 13 aa, Homo sapiens
  CDR3 for beta chain variable domain of TCR clone 367222 (TRBV27, TRBJ1-1)
CASSLSIGAEDFF

SEQ ID NO: 734445 - protein, 19 aa, Homo sapiens
  CDR3 for alpha chain variable domain of TCR clone 367223 (TRAV3, TRAJ37)
CAVRDIVGGYPSNKGKLIF

SEQ ID NO: 734446 - protein, 14 aa, Homo sapiens
  CDR3 for beta chain variable domain of TCR clone 367223 (TRBV7-8, TRBJ2-3)
CASSLEAGTDTQYF

SEQ ID NO: 734447 - protein, 17 aa, Homo sapiens
  CDR3 for alpha chain variable domain of TCR clone 367224 (TRAV3, TRAJ6)
CSVRDGPRAGGNYIPTF

SEQ ID NO: 734448 - protein, 14 aa, Homo sapiens
  CDR3 for beta chain variable domain of TCR clone 367224 (TRBV7-2, TRBJ2-7)
CASSPKTSFYEQYF

SEQ ID NO: 734449 - protein, 14 aa, Homo sapiens
  CDR3 for alpha chain variable domain of TCR clone 367225 (TRAV12-2, TRAJ40)
CAVKIPSGTYKDIF

SEQ ID NO: 734450 - protein, 12 aa, Homo sapiens
  CDR3 for beta chain variable domain of TCR clone 367225 (TRBV11-2, TRBJ2-1)
CASSPGNNEQFF

SEQ ID NO: 734451 - protein, 15 aa, Homo sapiens
  CDR3 for alpha chain variable domain of TCR clone 367226 (TRAV2, TRAJ36)
CAVEDRGNWGKQTLL

SEQ ID NO: 734452 - protein, 14 aa, Homo sapiens
  CDR3 for beta chain variable domain of TCR clone 367226 (TRBV7-9, TRBJ2-5)
CASSLDTAQETQYF

SEQ ID NO: 734453 - protein, 13 aa, Homo sapiens
  CDR3 for alpha chain variable domain of TCR clone 367227 (TRAV8-3, TRAJ44)
CAAVPGTASKLTF

SEQ ID NO: 734454 - protein, 14 aa, Homo sapiens
  CDR3 for beta chain variable domain of TCR clone 367227 (TRBV11-2, TRBJ2-3)
CASSRLARTDTQYF

SEQ ID NO: 734455 - protein, 17 aa, Homo sapiens
  CDR3 for alpha chain variable domain of TCR clone 367228 (TRAV35, TRAJ52)
CAGQLGVGGTSYGKLTF

SEQ ID NO: 734456 - protein, 12 aa, Homo sapiens
  CDR3 for beta chain variable domain of TCR clone 367228 (TRBV20-1, TRBJ2-7)
CSAGRRQSEQYF

SEQ ID NO: 734457 - protein, 14 aa, Homo sapiens
  CDR3 for alpha chain variable domain of TCR clone 367229 (TRAV1-2, TRAJ8)
CAVREVTGFQKLVF

SEQ ID NO: 734458 - protein, 15 aa, Homo sapiens
  CDR3 for beta chain variable domain of TCR clone 367229 (TRBV6-3, TRBJ2-7)
CASSSPGTVLYVQYF

SEQ ID NO: 734459 - protein, 15 aa, Homo sapiens
  CDR3 for alpha chain variable domain of TCR clone 367230 (TRAV3, TRAJ22)
CSVRDRGGSASQLTF

SEQ ID NO: 734460 - protein, 15 aa, Homo sapiens
  CDR3 for beta chain variable domain of TCR clone 367230 (TRBV10-3, TRBJ2-3)
CAISLTSGGTDTQYF

SEQ ID NO: 734461 - protein, 17 aa, Homo sapiens
  CDR3 for alpha chain variable domain of TCR clone 367231 (TRAV2, TRAJ22)
ILQVREADAAEQRQLTF

SEQ ID NO: 734462 - protein, 16 aa, Homo sapiens
  CDR3 for beta chain variable domain of TCR clone 367231 (TRBV2, TRBJ2-5)
CASSETLGVGEETQYF

SEQ ID NO: 734463 - protein, 15 aa, Homo sapiens
  CDR3 for alpha chain variable domain of TCR clone 367232 (TRAV2, TRAJ11)
CAVGGRNSGYSTLTF

SEQ ID NO: 734464 - protein, 14 aa, Homo sapiens
  CDR3 for beta chain variable domain of TCR clone 367232 (TRBV4-1, TRBJ2-2)
CASSQEVNTGELFF

SEQ ID NO: 734465 - protein, 16 aa, Homo sapiens
  CDR3 for alpha chain variable domain of TCR clone 367233 (TRAV25, TRAJ47)
TDVGTYFWEYGNKLVF

SEQ ID NO: 734466 - protein, 13 aa, Homo sapiens
  CDR3 for beta chain variable domain of TCR clone 367233 (TRBV20-1, TRBJ2-5)
CSAREAFQETQSF

SEQ ID NO: 734467 - protein, 15 aa, Homo sapiens
  CDR3 for alpha chain variable domain of TCR clone 367234 (TRAV21, TRAJ53)
CATLNSGGSNYKLTL

SEQ ID NO: 734468 - protein, 17 aa, Homo sapiens
  CDR3 for beta chain variable domain of TCR clone 367234 (TRBV7-8, TRBJ2-6)
CASSAGTGGAGANVLTF

SEQ ID NO: 734469 - protein, 13 aa, Homo sapiens
  CDR3 for alpha chain variable domain of TCR clone 367235 (TRAV3, TRAJ29)
CAVRDIIDTPLVF

SEQ ID NO: 734470 - protein, 15 aa, Homo sapiens
  CDR3 for beta chain variable domain of TCR clone 367235 (TRBV27, TRBJ2-5)
CASSLIPSGGETQYF

SEQ ID NO: 734471 - protein, 14 aa, Homo sapiens
  CDR3 for alpha chain variable domain of TCR clone 367236 (TRAV3, TRAJ40)
CAVRDRRGTYKYIF

SEQ ID NO: 734472 - protein, 15 aa, Homo sapiens
  CDR3 for beta chain variable domain of TCR clone 367236 (TRBV11-1, TRBJ1-3)
CASADPRAFGNTMYF

SEQ ID NO: 734473 - protein, 10 aa, Homo sapiens
  CDR3 for alpha chain variable domain of TCR clone 367237 (TRAV23/DV6, TRAJ57)
CAATSTLSQA

SEQ ID NO: 734474 - protein, 14 aa, Homo sapiens
  CDR3 for beta chain variable domain of TCR clone 367237 (TRBV25-1, TRBJ1-1)
CASTHLGGNTEAFF

SEQ ID NO: 734475 - protein, 14 aa, Homo sapiens
  CDR3 for alpha chain variable domain of TCR clone 367238 (TRAV12-2, TRAJ9)
CAVNLNTGGFKTIF

SEQ ID NO: 734476 - protein, 18 aa, Homo sapiens
  CDR3 for beta chain variable domain of TCR clone 367238 (TRBV4-1, TRBJ2-7)
CASSQAPGTGTLGDEQYF

SEQ ID NO: 734477 - protein, 13 aa, Homo sapiens
  CDR3 for alpha chain variable domain of TCR clone 367239 (TRAV21, TRAJ27)
CAARPGNAGKSTF

SEQ ID NO: 734478 - protein, 16 aa, Homo sapiens
  CDR3 for beta chain variable domain of TCR clone 367239 (TRBV7-2, TRBJ2-6)
CAILSGVSSGANVLTF

SEQ ID NO: 734479 - protein, 16 aa, Homo sapiens
  CDR3 for alpha chain variable domain of TCR clone 367240 (TRAV26-2, TRAJ23)
CILRAMIYNQGGKLIS

SEQ ID NO: 734480 - protein, 14 aa, Homo sapiens
  CDR3 for beta chain variable domain of TCR clone 367240 (TRBV12-5, TRBJ2-5)
CASGSRTHQETQYF

SEQ ID NO: 734481 - protein, 13 aa, Homo sapiens
  CDR3 for alpha chain variable domain of TCR clone 367241 (TRAV35, TRAJ27)
CAGQEGDAGKSNF

SEQ ID NO: 734482 - protein, 16 aa, Homo sapiens
  CDR3 for beta chain variable domain of TCR clone 367241 (TRBV7-2, TRBJ2-5)
CASSYKTGISLETQYF

SEQ ID NO: 734483 - protein, 13 aa, Homo sapiens
  CDR3 for alpha chain variable domain of TCR clone 367242 (TRAV2, TRAJ15)
CAVASQAGTALIF

SEQ ID NO: 734484 - protein, 15 aa, Homo sapiens
  CDR3 for beta chain variable domain of TCR clone 367242 (TRBV28, TRBJ2-5)
CASSPPWSYQETQYF

SEQ ID NO: 734485 - protein, 13 aa, Homo sapiens
  CDR3 for alpha chain variable domain of TCR clone 367243 (TRAV12-2, TRAJ12)
CAVNWDSSYKLIF

SEQ ID NO: 734486 - protein, 15 aa, Homo sapiens
  CDR3 for beta chain variable domain of TCR clone 367243 (TRBV10-3, TRBJ2-1)
CATNGGPGQGDEQFF

SEQ ID NO: 734487 - protein, 13 aa, Homo sapiens
  CDR3 for alpha chain variable domain of TCR clone 367244 (TRAV27, TRAJ29)
CAGAHSGNTPLFF

SEQ ID NO: 734488 - protein, 15 aa, Homo sapiens
  CDR3 for beta chain variable domain of TCR clone 367244 (TRBV7-9, TRBJ1-4)
CASSRTGGFNEKLFF

SEQ ID NO: 734489 - protein, 15 aa, Homo sapiens
  CDR3 for alpha chain variable domain of TCR clone 367245 (TRAV26-1, TRAJ44)
CIVRANTGTASKLTF

SEQ ID NO: 734490 - protein, 14 aa, Homo sapiens
  CDR3 for beta chain variable domain of TCR clone 367245 (TRBV6-1, TRBJ1-3)
CASVQGGGGNTIYF

SEQ ID NO: 734491 - protein, 13 aa, Homo sapiens
  CDR3 for alpha chain variable domain of TCR clone 367246 (TRAV3, TRAJ27)
CAVRPLCAGKSTF

SEQ ID NO: 734492 - protein, 17 aa, Homo sapiens
  CDR3 for beta chain variable domain of TCR clone 367246 (TRBV20-1, TRBJ2-1)
CSASSSGLAGSYNEQFF

SEQ ID NO: 734493 - protein, 17 aa, Homo sapiens
  CDR3 for alpha chain variable domain of TCR clone 367247 (TRAV12-2, TRAJ42)
CAVNILNYGGSQGNLIF

SEQ ID NO: 734494 - protein, 13 aa, Homo sapiens
  CDR3 for beta chain variable domain of TCR clone 367247 (TRBV3-1, TRBJ1-5)
CASSQDLEQPQHF

SEQ ID NO: 734495 - protein, 12 aa, Homo sapiens
  CDR3 for alpha chain variable domain of TCR clone 367248 (TRAV21, TRAJ31)
CAVWGNNARRMF

SEQ ID NO: 734496 - protein, 16 aa, Homo sapiens
  CDR3 for beta chain variable domain of TCR clone 367248 (TRBV27, TRBJ2-5)
CARSYGPGGQKETQYF

SEQ ID NO: 734497 - protein, 14 aa, Homo sapiens
  CDR3 for alpha chain variable domain of TCR clone 367249 (TRAV12-2, TRAJ5)
CAVNRYTGRRALNF

SEQ ID NO: 734498 - protein, 12 aa, Homo sapiens
  CDR3 for beta chain variable domain of TCR clone 367249 (TRBV19, TRBJ1-5)
CASSIAQQPQHF

SEQ ID NO: 734499 - protein, 12 aa, Homo sapiens
  CDR3 for alpha chain variable domain of TCR clone 367250 (TRAV8-1, TRAJ3)
CAVNARQQCFQD

SEQ ID NO: 734500 - protein, 12 aa, Homo sapiens
  CDR3 for beta chain variable domain of TCR clone 367250 (TRBV11-2, TRBJ2-2)
CASSLGGGELFF

SEQ ID NO: 734501 - protein, 11 aa, Homo sapiens
  CDR3 for alpha chain variable domain of TCR clone 367251 (TRAV1-1, TRAJ23)
CAVRQGGKLIF

SEQ ID NO: 734502 - protein, 13 aa, Homo sapiens
  CDR3 for beta chain variable domain of TCR clone 367251 (TRBV7-2, TRBJ2-7)
CASSSHSGSEQYF

SEQ ID NO: 734503 - protein, 13 aa, Homo sapiens
  CDR3 for alpha chain variable domain of TCR clone 367252 (TRAV21, TRAJ17)
FAPVKAAGNKLTF

SEQ ID NO: 734504 - protein, 13 aa, Homo sapiens
  CDR3 for beta chain variable domain of TCR clone 367252 (TRBV20-1, TRBJ1-1)
CSAVDGTLNEAFF

SEQ ID NO: 734505 - protein, 14 aa, Homo sapiens
  CDR3 for alpha chain variable domain of TCR clone 367253 (TRAV17, TRAJ35)
CATDRPGFGNVMHC

SEQ ID NO: 734506 - protein, 19 aa, Homo sapiens
  CDR3 for beta chain variable domain of TCR clone 367253 (TRBV11-3, TRBJ2-2)
CASSTRPGAKTTNTGELFF

SEQ ID NO: 734507 - protein, 14 aa, Homo sapiens
  CDR3 for alpha chain variable domain of TCR clone 367254 (TRAV12-3, TRAJ10)
SHLPLTGGGNKLTF

SEQ ID NO: 734508 - protein, 12 aa, Homo sapiens
  CDR3 for beta chain variable domain of TCR clone 367254 (TRBV7-3, TRBJ2-5)
CASSSPGGTPYF

SEQ ID NO: 734509 - protein, 12 aa, Homo sapiens
  CDR3 for alpha chain variable domain of TCR clone 367255 (TRAV29/DV5, TRAJ49)
CAATDTGNQFYF

SEQ ID NO: 734510 - protein, 14 aa, Homo sapiens
  CDR3 for beta chain variable domain of TCR clone 367255 (TRBV11-2, TRBJ2-5)
CASRPLAGRETQYF

SEQ ID NO: 734511 - protein, 14 aa, Homo sapiens
  CDR3 for alpha chain variable domain of TCR clone 367256 (TRAV12-1, TRAJ28)
CVSHSGAGSYQLTF

SEQ ID NO: 734512 - protein, 15 aa, Homo sapiens
  CDR3 for beta chain variable domain of TCR clone 367256 (TRBV11-3, TRBJ2-3)
CASLKDGREGDTQYF

SEQ ID NO: 734513 - protein, 14 aa, Homo sapiens
  CDR3 for alpha chain variable domain of TCR clone 367257 (TRAV12-3, TRAJ42)
CAMNSGGSQGNLIF

SEQ ID NO: 734514 - protein, 16 aa, Homo sapiens
  CDR3 for beta chain variable domain of TCR clone 367257 (TRBV12-4, TRBJ1-5)
CASSSGPRGSNQPQHF

SEQ ID NO: 734515 - protein, 14 aa, Homo sapiens
  CDR3 for alpha chain variable domain of TCR clone 367258 (TRAV8-3, TRAJ33)
CAVGPLGGNYPLIW

SEQ ID NO: 734516 - protein, 12 aa, Homo sapiens
  CDR3 for beta chain variable domain of TCR clone 367258 (TRBV19, TRBJ2-3)
CATTSSTDTQYF

SEQ ID NO: 734517 - protein, 14 aa, Homo sapiens
  CDR3 for alpha chain variable domain of TCR clone 367259 (TRAV23/DV6, TRAJ53)
CAACSGGSNYKLTF

SEQ ID NO: 734518 - protein, 14 aa, Homo sapiens
  CDR3 for beta chain variable domain of TCR clone 367259 (TRBV27, TRBJ1-1)
CASSPQGKRAEAFF

SEQ ID NO: 734519 - protein, 20 aa, Homo sapiens
  CDR3 for alpha chain variable domain of TCR clone 367260 (TRAV1-2, TRAJ8)
CSVREDRLSETCIWNWHPTS

SEQ ID NO: 734520 - protein, 14 aa, Homo sapiens
  CDR3 for beta chain variable domain of TCR clone 367260 (TRBV7-9, TRBJ1-1)
CASTPLQSYTEAFF

SEQ ID NO: 734521 - protein, 12 aa, Homo sapiens
  CDR3 for alpha chain variable domain of TCR clone 367261 (TRAV12-3, TRAJ17)
CAMTLTGNKLTF

SEQ ID NO: 734522 - protein, 15 aa, Homo sapiens
  CDR3 for beta chain variable domain of TCR clone 367261 (TRBV5-1, TRBJ2-1)
CASSFSGTGYNEQFF

SEQ ID NO: 734523 - protein, 16 aa, Homo sapiens
  CDR3 for alpha chain variable domain of TCR clone 367262 (TRAV23/DV6, TRAJ52)
CAASMHGGTSYGKLTF

SEQ ID NO: 734524 - protein, 16 aa, Homo sapiens
  CDR3 for beta chain variable domain of TCR clone 367262 (TRBV27, TRBJ2-2)
CASSFRGLVRTGELFF

SEQ ID NO: 734525 - protein, 12 aa, Homo sapiens
  CDR3 for alpha chain variable domain of TCR clone 367263 (TRAV12-3, TRAJ17)
CAMTLTGNKLTF

SEQ ID NO: 734526 - protein, 13 aa, Homo sapiens
  CDR3 for beta chain variable domain of TCR clone 367263 (TRBV12-4, TRBJ1-1)
YASSPGTGFEAFF

SEQ ID NO: 734527 - protein, 14 aa, Homo sapiens
  CDR3 for alpha chain variable domain of TCR clone 367264 (TRAV27, TRAJ23)
CAGLSYNQGGKLIF

SEQ ID NO: 734528 - protein, 16 aa, Homo sapiens
  CDR3 for beta chain variable domain of TCR clone 367264 (TRBV7-7, TRBJ2-1)
CASSLASGTSYNEQFF

SEQ ID NO: 734529 - protein, 14 aa, Homo sapiens
  CDR3 for alpha chain variable domain of TCR clone 367265 (TRAV3, TRAJ17)
CALRDAAAGNKLTF

SEQ ID NO: 734530 - protein, 13 aa, Homo sapiens
  CDR3 for beta chain variable domain of TCR clone 367265 (TRBV2, TRBJ1-1)
CASSVSGYTEAFF

SEQ ID NO: 734531 - protein, 10 aa, Homo sapiens
  CDR3 for alpha chain variable domain of TCR clone 367266 (TRAV13-1, TRAJ30)
CAARDDKIIF

SEQ ID NO: 734532 - protein, 14 aa, Homo sapiens
  CDR3 for beta chain variable domain of TCR clone 367266 (TRBV7-3, TRBJ2-1)
CASSLAGGTNEQFF

SEQ ID NO: 734533 - protein, 14 aa, Homo sapiens
  CDR3 for alpha chain variable domain of TCR clone 367267 (TRAV1-2, TRAJ16)
CAVNRFLDGQKLLF

SEQ ID NO: 734534 - protein, 14 aa, Homo sapiens
  CDR3 for beta chain variable domain of TCR clone 367267 (TRBV4-1, TRBJ2-2)
CASSQAVNTGELFF

SEQ ID NO: 734535 - protein, 14 aa, Homo sapiens
  CDR3 for alpha chain variable domain of TCR clone 367268 (TRAV29/DV5, TRAJ22)
CAASATGSARQLTF

SEQ ID NO: 734536 - protein, 13 aa, Homo sapiens
  CDR3 for beta chain variable domain of TCR clone 367268 (TRBV4-1, TRBJ2-2)
CASSQENTGELFF

SEQ ID NO: 734537 - protein, 16 aa, Homo sapiens
  CDR3 for alpha chain variable domain of TCR clone 367269 (TRAV3, TRAJ10)
CAVRDVRAGGGNKLTF

SEQ ID NO: 734538 - protein, 15 aa, Homo sapiens
  CDR3 for beta chain variable domain of TCR clone 367269 (TRBV3-1, TRBJ2-5)
CASSRGLALRETQYF

SEQ ID NO: 734539 - protein, 14 aa, Homo sapiens
  CDR3 for alpha chain variable domain of TCR clone 367270 (TRAV21, TRAJ38)
CAVANAGNNRKLIW

SEQ ID NO: 734540 - protein, 17 aa, Homo sapiens
  CDR3 for beta chain variable domain of TCR clone 367270 (TRBV7-9, TRBJ2-1)
CASSLVASYPSYNEQFF

SEQ ID NO: 734541 - protein, 11 aa, Homo sapiens
  CDR3 for alpha chain variable domain of TCR clone 367271 (TRAV3, TRAJ21)
CAVVNFNKFYF

SEQ ID NO: 734542 - protein, 14 aa, Homo sapiens
  CDR3 for beta chain variable domain of TCR clone 367271 (TRBV11-1, TRBJ2-7)
CASSWTGTAYEQYF

SEQ ID NO: 734543 - protein, 14 aa, Homo sapiens
  CDR3 for alpha chain variable domain of TCR clone 367272 (TRAV12-1, TRAJ39)
CVVSLNNAGKMLTF

SEQ ID NO: 734544 - protein, 13 aa, Homo sapiens
  CDR3 for beta chain variable domain of TCR clone 367272 (TRBV9, TRBJ2-7)
CASSVLQAGEQYF

SEQ ID NO: 734545 - protein, 15 aa, Homo sapiens
  CDR3 for alpha chain variable domain of TCR clone 367273 (TRAV3, TRAJ3)
CCERLRYSSASKIIF

SEQ ID NO: 734546 - protein, 16 aa, Homo sapiens
  CDR3 for beta chain variable domain of TCR clone 367273 (TRBV19, TRBJ1-5)
CASSIDRGGPRQPQHF

SEQ ID NO: 734547 - protein, 14 aa, Homo sapiens
  CDR3 for alpha chain variable domain of TCR clone 367274 (TRAV29/DV5, TRAJ34)
RAASASGNTDKLIF

SEQ ID NO: 734548 - protein, 14 aa, Homo sapiens
  CDR3 for beta chain variable domain of TCR clone 367274 (TRBV12-5, TRBJ2-5)
CASGSRTHQETQYF

SEQ ID NO: 734549 - protein, 13 aa, Homo sapiens
  CDR3 for alpha chain variable domain of TCR clone 367275 (TRAV12-2, TRAJ15)
CAVFNQAGTALIF

SEQ ID NO: 734550 - protein, 23 aa, Homo sapiens
  CDR3 for beta chain variable domain of TCR clone 367275 (TRBV7-8, TRBJ1-5)
RRTPPGISGPAAGGGGADQPQHF

SEQ ID NO: 734551 - protein, 14 aa, Homo sapiens
  CDR3 for alpha chain variable domain of TCR clone 367276 (TRAV9-2, TRAJ39)
CALYIYNAGNMLTF

SEQ ID NO: 734552 - protein, 16 aa, Homo sapiens
  CDR3 for beta chain variable domain of TCR clone 367276 (TRBV11-2, TRBJ2-7)
CASSLAPTGVNYEQYF

SEQ ID NO: 734553 - protein, 11 aa, Homo sapiens
  CDR3 for alpha chain variable domain of TCR clone 367277 (TRAV1-1, TRAJ23)
CAVRQGGKLIF

SEQ ID NO: 734554 - protein, 12 aa, Homo sapiens
  CDR3 for beta chain variable domain of TCR clone 367277 (TRBV18, TRBJ1-4)
CASSPSREKLFF

SEQ ID NO: 734555 - protein, 13 aa, Homo sapiens
  CDR3 for alpha chain variable domain of TCR clone 367278 (TRAV21, TRAJ13)
CAVGLRVDYKLSF

SEQ ID NO: 734556 - protein, 16 aa, Homo sapiens
  CDR3 for beta chain variable domain of TCR clone 367278 (TRBV6-1, TRBJ2-5)
CASSETLDRGAETQYF

SEQ ID NO: 734557 - protein, 13 aa, Homo sapiens
  CDR3 for alpha chain variable domain of TCR clone 367279 (TRAV12-3, TRAJ33)
CAMSVNSNYLLIW

SEQ ID NO: 734558 - protein, 11 aa, Homo sapiens
  CDR3 for beta chain variable domain of TCR clone 367279 (TRBV7-3, TRBJ2-5)
CASSLSETQYF

SEQ ID NO: 734559 - protein, 12 aa, Homo sapiens
  CDR3 for alpha chain variable domain of TCR clone 367280 (TRAV17, TRAJ4)
CATDGGYNKLIC

SEQ ID NO: 734560 - protein, 13 aa, Homo sapiens
  CDR3 for beta chain variable domain of TCR clone 367280 (TRBV29-1, TRBJ2-2)
CSTTGVNTGELFF

SEQ ID NO: 734561 - protein, 14 aa, Homo sapiens
  CDR3 for alpha chain variable domain of TCR clone 367281 (TRAV12-1, TRAJ3)
CVVNPGSSASQIIF

SEQ ID NO: 734562 - protein, 14 aa, Homo sapiens
  CDR3 for beta chain variable domain of TCR clone 367281 (TRBV20-1, TRBJ2-3)
CSARGGTSTDTQYF

SEQ ID NO: 734563 - protein, 13 aa, Homo sapiens
  CDR3 for alpha chain variable domain of TCR clone 367282 (TRAV12-3, TRAJ40)
CAMSARVTYKYIF

SEQ ID NO: 734564 - protein, 16 aa, Homo sapiens
  CDR3 for beta chain variable domain of TCR clone 367282 (TRBV20-1, TRBJ2-3)
CSGEAGLAGGQDTQYF

SEQ ID NO: 734565 - protein, 14 aa, Homo sapiens
  CDR3 for alpha chain variable domain of TCR clone 367283 (TRAV8-2, TRAJ4)
CVVSPSGGYNKLII

SEQ ID NO: 734566 - protein, 19 aa, Homo sapiens
  CDR3 for beta chain variable domain of TCR clone 367283 (TRBV11-2, TRBJ2-2)
LRTRPCISVPAAYPGSCFF

SEQ ID NO: 734567 - protein, 18 aa, Homo sapiens
  CDR3 for alpha chain variable domain of TCR clone 367284 (TRAV23/DV6, )
CAEPDIQNPDPAVYQLRD

SEQ ID NO: 734568 - protein, 15 aa, Homo sapiens
  CDR3 for beta chain variable domain of TCR clone 367284 (TRBV12-4, TRBJ2-5)
RASTLNSGRGETQYF

SEQ ID NO: 734569 - protein, 16 aa, Homo sapiens
  CDR3 for alpha chain variable domain of TCR clone 367285 (TRAV26-1, TRAJ37)
CIVRGDGSGYTGKLIF

SEQ ID NO: 734570 - protein, 11 aa, Homo sapiens
  CDR3 for beta chain variable domain of TCR clone 367285 (TRBV11-2, TRBJ1-1)
CASSINTEAFF

SEQ ID NO: 734571 - protein, 18 aa, Homo sapiens
  CDR3 for alpha chain variable domain of TCR clone 367286 (TRAV13-1, TRAJ52)
CAAKNPNAGGTSYGKLTF

SEQ ID NO: 734572 - protein, 16 aa, Homo sapiens
  CDR3 for beta chain variable domain of TCR clone 367286 (TRBV5-1, TRBJ2-5)
CASSLANHRGRETQYF

SEQ ID NO: 734573 - protein, 14 aa, Homo sapiens
  CDR3 for alpha chain variable domain of TCR clone 367287 (TRAV35, TRAJ10)
CAGILTGGGNKLTF

SEQ ID NO: 734574 - protein, 14 aa, Homo sapiens
  CDR3 for beta chain variable domain of TCR clone 367287 (TRBV12-5, TRBJ2-5)
CASGSRTHQETQYF

SEQ ID NO: 734575 - protein, 17 aa, Homo sapiens
  CDR3 for alpha chain variable domain of TCR clone 367288 (TRAV29/DV5, TRAJ49)
CAASALDLSNTGNQFYF

SEQ ID NO: 734576 - protein, 15 aa, Homo sapiens
  CDR3 for beta chain variable domain of TCR clone 367288 (TRBV4-1, TRBJ1-1)
CASSPGQGPNTEAFF

SEQ ID NO: 734577 - protein, 16 aa, Homo sapiens
  CDR3 for alpha chain variable domain of TCR clone 367289 (TRAV8-6, TRAJ4)
CAVTKILSGGYNKRIF

SEQ ID NO: 734578 - protein, 17 aa, Homo sapiens
  CDR3 for beta chain variable domain of TCR clone 367289 (TRBV20-1, TRBJ2-1)
CSASSSGLAGSYNEQFF

SEQ ID NO: 734579 - protein, 13 aa, Homo sapiens
  CDR3 for alpha chain variable domain of TCR clone 367290 (TRAV17, TRAJ21)
CATDGGNFNKFYF

SEQ ID NO: 734580 - protein, 18 aa, Homo sapiens
  CDR3 for beta chain variable domain of TCR clone 367290 (TRBV6-5, TRBJ1-1)
CASSYSAPGGTGGTEAFF

SEQ ID NO: 734581 - protein, 14 aa, Homo sapiens
  CDR3 for alpha chain variable domain of TCR clone 367291 (TRAV12-2, TRAJ40)
CAVKIPSGPYKYIF

SEQ ID NO: 734582 - protein, 14 aa, Homo sapiens
  CDR3 for beta chain variable domain of TCR clone 367291 (TRBV7-6, TRBJ2-3)
CASSVAGGTDTQYF

SEQ ID NO: 734583 - protein, 18 aa, Homo sapiens
  CDR3 for alpha chain variable domain of TCR clone 367292 (TRAV21, TRAJ52)
CAVRPSPAGGTSYGKLTF

SEQ ID NO: 734584 - protein, 14 aa, Homo sapiens
  CDR3 for beta chain variable domain of TCR clone 367292 (TRBV7-2, TRBJ2-7)
CASSFLGRVYEQYF

SEQ ID NO: 734585 - protein, 12 aa, Homo sapiens
  CDR3 for alpha chain variable domain of TCR clone 367293 (TRAV1-1, TRAJ24)
CAVRGSWGKFQF

SEQ ID NO: 734586 - protein, 14 aa, Homo sapiens
  CDR3 for beta chain variable domain of TCR clone 367293 (TRBV7-6, TRBJ2-3)
CASSLGTVTDTQYF

SEQ ID NO: 734587 - protein, 15 aa, Homo sapiens
  CDR3 for alpha chain variable domain of TCR clone 367294 (TRAV8-3, TRAJ7)
CAVGSISYGNNRLAF

SEQ ID NO: 734588 - protein, 16 aa, Homo sapiens
  CDR3 for beta chain variable domain of TCR clone 367294 (TRBV28, TRBJ1-2)
CASSHGQGVYKDGYTF

SEQ ID NO: 734589 - protein, 14 aa, Homo sapiens
  CDR3 for alpha chain variable domain of TCR clone 367295 (TRAV16, TRAJ15)
CALSFNQAGTALNF

SEQ ID NO: 734590 - protein, 16 aa, Homo sapiens
  CDR3 for beta chain variable domain of TCR clone 367295 (TRBV9, TRBJ2-7)
CASSAGPDRSPYEQYF

SEQ ID NO: 734591 - protein, 12 aa, Homo sapiens
  CDR3 for alpha chain variable domain of TCR clone 367296 (TRAV13-1, TRAJ21)
YAAKEGFNKFYF

SEQ ID NO: 734592 - protein, 15 aa, Homo sapiens
  CDR3 for beta chain variable domain of TCR clone 367296 (TRBV25-1, TRBJ1-4)
CASSPGDSTNEKLFF

SEQ ID NO: 734593 - protein, 11 aa, Homo sapiens
  CDR3 for alpha chain variable domain of TCR clone 367297 (TRAV12-3, TRAJ43)
CAMSVSNDMRF

SEQ ID NO: 734594 - protein, 13 aa, Homo sapiens
  CDR3 for beta chain variable domain of TCR clone 367297 (TRBV20-1, TRBJ1-1)
CSAPLGGSTETFF

SEQ ID NO: 734595 - protein, 14 aa, Homo sapiens
  CDR3 for alpha chain variable domain of TCR clone 367298 (TRAV8-3, TRAJ17)
CAVGAHTAGNKLTF

SEQ ID NO: 734596 - protein, 11 aa, Homo sapiens
  CDR3 for beta chain variable domain of TCR clone 367298 (TRBV29-1, TRBJ1-4)
CSVSSGEKLFF

SEQ ID NO: 734597 - protein, 13 aa, Homo sapiens
  CDR3 for alpha chain variable domain of TCR clone 367299 (TRAV26-2, TRAJ43)
CILRAVNNNDMRF

SEQ ID NO: 734598 - protein, 14 aa, Homo sapiens
  CDR3 for beta chain variable domain of TCR clone 367299 (TRBV25-1, TRBJ2-7)
CASSEYGRGYEQYF

SEQ ID NO: 734599 - protein, 13 aa, Homo sapiens
  CDR3 for alpha chain variable domain of TCR clone 367300 (TRAV27, TRAJ29)
CAGAHSGNTPLVF

SEQ ID NO: 734600 - protein, 17 aa, Homo sapiens
  CDR3 for beta chain variable domain of TCR clone 367300 (TRBV11-2, TRBJ2-1)
CASSLYPPGVEYNEQFF

SEQ ID NO: 734601 - protein, 13 aa, Homo sapiens
  CDR3 for alpha chain variable domain of TCR clone 367301 (TRAV13-1, TRAJ43)
CAASLSNNNDMRF

SEQ ID NO: 734602 - protein, 14 aa, Homo sapiens
  CDR3 for beta chain variable domain of TCR clone 367301 (TRBV7-2, TRBJ2-7)
CASRSQGAAYEQYF

SEQ ID NO: 734603 - protein, 14 aa, Homo sapiens
  CDR3 for alpha chain variable domain of TCR clone 367302 (TRAV12-2, TRAJ13)
CAVKKTGGYQKVTF

SEQ ID NO: 734604 - protein, 15 aa, Homo sapiens
  CDR3 for beta chain variable domain of TCR clone 367302 (TRBV11-3, TRBJ2-2)
CASSLGGRPTGELFF

SEQ ID NO: 734605 - protein, 17 aa, Homo sapiens
  CDR3 for alpha chain variable domain of TCR clone 367303 (TRAV14/DV4, TRAJ12)
CAMRELPGMDSSYKLIF

SEQ ID NO: 734606 - protein, 14 aa, Homo sapiens
  CDR3 for beta chain variable domain of TCR clone 367303 (TRBV20-1, TRBJ2-7)
CSARRSGSSYEQYF

SEQ ID NO: 734607 - protein, 20 aa, Homo sapiens
  CDR3 for alpha chain variable domain of TCR clone 367304 (TRAV12-3, TRAJ41)
SLFIRDSQPSDSATPEALNF

SEQ ID NO: 734608 - protein, 13 aa, Homo sapiens
  CDR3 for beta chain variable domain of TCR clone 367304 (TRBV7-2, TRBJ2-2)
CASSLAVTGELFF

SEQ ID NO: 734609 - protein, 14 aa, Homo sapiens
  CDR3 for alpha chain variable domain of TCR clone 367305 (TRAV12-1, TRAJ10)
CVVNSAGGGSKLTF

SEQ ID NO: 734610 - protein, 14 aa, Homo sapiens
  CDR3 for beta chain variable domain of TCR clone 367305 (TRBV12-4, TRBJ1-1)
CASSLGTGGTEAFF

SEQ ID NO: 734611 - protein, 10 aa, Homo sapiens
  CDR3 for alpha chain variable domain of TCR clone 367306 (TRAV21, TRAJ31)
CAVDNARLMF

SEQ ID NO: 734612 - protein, 11 aa, Homo sapiens
  CDR3 for beta chain variable domain of TCR clone 367306 (TRBV12-4, TRBJ2-3)
CASTATDTQYF

SEQ ID NO: 734613 - protein, 13 aa, Homo sapiens
  CDR3 for alpha chain variable domain of TCR clone 367307 (TRAV8-3, TRAJ43)
CAVVPYNNNDMRF

SEQ ID NO: 734614 - protein, 20 aa, Homo sapiens
  CDR3 for beta chain variable domain of TCR clone 367307 (TRBV28, TRBJ2-3)
CASSLGVRSTSGRSTDTQYF

SEQ ID NO: 734615 - protein, 15 aa, Homo sapiens
  CDR3 for alpha chain variable domain of TCR clone 367308 (TRAV17, TRAJ45)
CATAELGGGADGLTF

SEQ ID NO: 734616 - protein, 15 aa, Homo sapiens
  CDR3 for beta chain variable domain of TCR clone 367308 (TRBV5-1, TRBJ2-1)
CASSPPRAPYNEQFF

SEQ ID NO: 734617 - protein, 17 aa, Homo sapiens
  CDR3 for alpha chain variable domain of TCR clone 367309 (TRAV26-1, TRAJ27)
CIVSTPWINTNAGKSTF

SEQ ID NO: 734618 - protein, 16 aa, Homo sapiens
  CDR3 for beta chain variable domain of TCR clone 367309 (TRBV7-9, TRBJ2-1)
CASSLDPGLAIEEQFF

SEQ ID NO: 734619 - protein, 17 aa, Homo sapiens
  CDR3 for alpha chain variable domain of TCR clone 367310 (TRAV3, TRAJ37)
CAVRDMRTPGNTGKLIF

SEQ ID NO: 734620 - protein, 12 aa, Homo sapiens
  CDR3 for beta chain variable domain of TCR clone 367310 (TRBV11-2, TRBJ2-4)
CASSSASGSEYF

SEQ ID NO: 734621 - protein, 13 aa, Homo sapiens
  CDR3 for alpha chain variable domain of TCR clone 367311 (TRAV35, TRAJ42)
CAGFPGSQGNLIF

SEQ ID NO: 734622 - protein, 14 aa, Homo sapiens
  CDR3 for beta chain variable domain of TCR clone 367311 (TRBV29-1, TRBJ2-2)
CSLLAETNTGELFF

SEQ ID NO: 734623 - protein, 13 aa, Homo sapiens
  CDR3 for alpha chain variable domain of TCR clone 367312 (TRAV3, TRAJ16)
CAVRDRNGQKLLF

SEQ ID NO: 734624 - protein, 14 aa, Homo sapiens
  CDR3 for beta chain variable domain of TCR clone 367312 (TRBV19, TRBJ2-7)
CASSMGQGAIEQYF

SEQ ID NO: 734625 - protein, 16 aa, Homo sapiens
  CDR3 for alpha chain variable domain of TCR clone 367313 (TRAV12-2, TRAJ28)
CAVITDSGAGSYQLTF

SEQ ID NO: 734626 - protein, 12 aa, Homo sapiens
  CDR3 for beta chain variable domain of TCR clone 367313 (TRBV9, TRBJ2-2)
CASSIVTGELFF

SEQ ID NO: 734627 - protein, 14 aa, Homo sapiens
  CDR3 for alpha chain variable domain of TCR clone 367314 (TRAV2, TRAJ9)
CAVEDRSGGFKTIF

SEQ ID NO: 734628 - protein, 15 aa, Homo sapiens
  CDR3 for beta chain variable domain of TCR clone 367314 (TRBV5-1, TRBJ2-1)
CASSPPRAPYKEQFF

SEQ ID NO: 734629 - protein, 14 aa, Homo sapiens
  CDR3 for alpha chain variable domain of TCR clone 367315 (TRAV12-2, TRAJ6)
CSSKWRGGSYIPTF

SEQ ID NO: 734630 - protein, 13 aa, Homo sapiens
  CDR3 for beta chain variable domain of TCR clone 367315 (TRBV2, TRBJ1-1)
CASSEGGNTEAFF

SEQ ID NO: 734631 - protein, 14 aa, Homo sapiens
  CDR3 for alpha chain variable domain of TCR clone 367316 (TRAV12-2, TRAJ13)
CAVTKIGGYQKVTF

SEQ ID NO: 734632 - protein, 15 aa, Homo sapiens
  CDR3 for beta chain variable domain of TCR clone 367316 (TRBV27, TRBJ2-1)
CASSNGGGSSNEQFF

SEQ ID NO: 734633 - protein, 12 aa, Homo sapiens
  CDR3 for alpha chain variable domain of TCR clone 367317 (TRAV12-3, TRAJ17)
CAMTLTGNKLTF

SEQ ID NO: 734634 - protein, 15 aa, Homo sapiens
  CDR3 for beta chain variable domain of TCR clone 367317 (TRBV20-1, TRBJ2-7)
CSARDRVSGIDGQYF

SEQ ID NO: 734635 - protein, 12 aa, Homo sapiens
  CDR3 for alpha chain variable domain of TCR clone 367318 (TRAV8-6, TRAJ36)
CAVSDWLGQTTS

SEQ ID NO: 734636 - protein, 14 aa, Homo sapiens
  CDR3 for beta chain variable domain of TCR clone 367318 (TRBV7-2, TRBJ2-7)
CASSPKTSFYEQYF

SEQ ID NO: 734637 - protein, 10 aa, Homo sapiens
  CDR3 for alpha chain variable domain of TCR clone 367319 (TRAV30, TRAJ16)
CGTGGQKLLF

SEQ ID NO: 734638 - protein, 13 aa, Homo sapiens
  CDR3 for beta chain variable domain of TCR clone 367319 (TRBV7-9, TRBJ1-2)
CASSLKQNYGYAF

SEQ ID NO: 734639 - protein, 14 aa, Homo sapiens
  CDR3 for alpha chain variable domain of TCR clone 367320 (TRAV2, TRAJ22)
CAVGRGGSARQLTF

SEQ ID NO: 734640 - protein, 12 aa, Homo sapiens
  CDR3 for beta chain variable domain of TCR clone 367320 (TRBV19, TRBJ2-1)
CASSMQDAEQFF

SEQ ID NO: 734641 - protein, 15 aa, Homo sapiens
  CDR3 for alpha chain variable domain of TCR clone 367321 (TRAV35, TRAJ50)
CAGQLRKTSYDKVIF

SEQ ID NO: 734642 - protein, 12 aa, Homo sapiens
  CDR3 for beta chain variable domain of TCR clone 367321 (TRBV5-1, TRBJ2-5)
CAGSLGFETQYF

SEQ ID NO: 734643 - protein, 13 aa, Homo sapiens
  CDR3 for alpha chain variable domain of TCR clone 367322 (TRAV8-6, TRAJ49)
CAVITNTGNQFYF

SEQ ID NO: 734644 - protein, 16 aa, Homo sapiens
  CDR3 for beta chain variable domain of TCR clone 367322 (TRBV7-9, TRBJ2-1)
CASSLGTGWDYNEQFF

SEQ ID NO: 734645 - protein, 12 aa, Homo sapiens
  CDR3 for alpha chain variable domain of TCR clone 367323 (TRAV38-1, TRAJ30)
CAFESEDDKIIF

SEQ ID NO: 734646 - protein, 16 aa, Homo sapiens
  CDR3 for beta chain variable domain of TCR clone 367323 (TRBV4-2, TRBJ2-1)
CASSQGEGRTVNEQFF

SEQ ID NO: 734647 - protein, 14 aa, Homo sapiens
  CDR3 for alpha chain variable domain of TCR clone 367324 (TRAV1-2, TRAJ16)
CAVTRFSDGQKLLF

SEQ ID NO: 734648 - protein, 13 aa, Homo sapiens
  CDR3 for beta chain variable domain of TCR clone 367324 (TRBV20-1, TRBJ1-1)
CSARGGGNTEAFF

SEQ ID NO: 734649 - protein, 13 aa, Homo sapiens
  CDR3 for alpha chain variable domain of TCR clone 367325 (TRAV17, TRAJ34)
CATDLYNTDKLLF

SEQ ID NO: 734650 - protein, 15 aa, Homo sapiens
  CDR3 for beta chain variable domain of TCR clone 367325 (TRBV20-1, TRBJ2-3)
CSATGTSGFTDTQYF

SEQ ID NO: 734651 - protein, 23 aa, Homo sapiens
  CDR3 for alpha chain variable domain of TCR clone 367326 (TRAV26-1, TRAJ38)
CIADNAGNNHIQNPDPAMYQLRD

SEQ ID NO: 734652 - protein, 16 aa, Homo sapiens
  CDR3 for beta chain variable domain of TCR clone 367326 (TRBV7-9, TRBJ1-2)
CASSLGFSSGEDGYTF

SEQ ID NO: 734653 - protein, 13 aa, Homo sapiens
  CDR3 for alpha chain variable domain of TCR clone 367327 (TRAV35, TRAJ42)
CAGFPGSQGNLIL

SEQ ID NO: 734654 - protein, 15 aa, Homo sapiens
  CDR3 for beta chain variable domain of TCR clone 367327 (TRBV6-6, TRBJ2-5)
CASSPGGGLEETQYF

SEQ ID NO: 734655 - protein, 16 aa, Homo sapiens
  CDR3 for alpha chain variable domain of TCR clone 367328 (TRAV12-3, TRAJ53)
CAMSPGSGGSNYKLKL

SEQ ID NO: 734656 - protein, 12 aa, Homo sapiens
  CDR3 for beta chain variable domain of TCR clone 367328 (TRBV7-9, TRBJ2-1)
CASSLAVYTQFF

SEQ ID NO: 734657 - protein, 18 aa, Homo sapiens
  CDR3 for alpha chain variable domain of TCR clone 367329 (TRAV13-1, TRAJ52)
CAASKRSAGGTSYGKLTF

SEQ ID NO: 734658 - protein, 13 aa, Homo sapiens
  CDR3 for beta chain variable domain of TCR clone 367329 (TRBV19, TRBJ2-7)
CASRKAGGSEQYF

SEQ ID NO: 734659 - protein, 16 aa, Homo sapiens
  CDR3 for alpha chain variable domain of TCR clone 367330 (TRAV21, TRAJ37)
CAVRTAGSSNTGTLIL

SEQ ID NO: 734660 - protein, 13 aa, Homo sapiens
  CDR3 for beta chain variable domain of TCR clone 367330 (TRBV7-9, TRBJ2-5)
CASLPSGRETQYF

SEQ ID NO: 734661 - protein, 13 aa, Homo sapiens
  CDR3 for alpha chain variable domain of TCR clone 367331 (TRAV35, TRAJ48)
CAGHEFGNEKLTF

SEQ ID NO: 734662 - protein, 17 aa, Homo sapiens
  CDR3 for beta chain variable domain of TCR clone 367331 (TRBV19, TRBJ2-2)
CASSITSGRMGTGELFF

SEQ ID NO: 734663 - protein, 13 aa, Homo sapiens
  CDR3 for alpha chain variable domain of TCR clone 367332 (TRAV17, TRAJ4)
CATKSGGYNKLIF

SEQ ID NO: 734664 - protein, 15 aa, Homo sapiens
  CDR3 for beta chain variable domain of TCR clone 367332 (TRBV10-2, TRBJ2-6)
CASSEQGTGANVLTF

SEQ ID NO: 734665 - protein, 13 aa, Homo sapiens
  CDR3 for alpha chain variable domain of TCR clone 367333 (TRAV8-6, TRAJ49)
CDVITNTGNQFYF

SEQ ID NO: 734666 - protein, 15 aa, Homo sapiens
  CDR3 for beta chain variable domain of TCR clone 367333 (TRBV20-1, TRBJ2-7)
CSARDRVSGMDEQYF

SEQ ID NO: 734667 - protein, 14 aa, Homo sapiens
  CDR3 for alpha chain variable domain of TCR clone 367334 (TRAV26-1, TRAJ45)
CIEVTGGGADGLTF

SEQ ID NO: 734668 - protein, 14 aa, Homo sapiens
  CDR3 for beta chain variable domain of TCR clone 367334 (TRBV6-1, TRBJ1-3)
CASVQGGGGNTIDV

SEQ ID NO: 734669 - protein, 15 aa, Homo sapiens
  CDR3 for alpha chain variable domain of TCR clone 367335 (TRAV23/DV6, TRAJ44)
CAARTLTGTSSKLTF

SEQ ID NO: 734670 - protein, 17 aa, Homo sapiens
  CDR3 for beta chain variable domain of TCR clone 367335 (TRBV24-1, TRBJ2-1)
CATSDVSTSGTYNEQFF

SEQ ID NO: 734671 - protein, 12 aa, Homo sapiens
  CDR3 for alpha chain variable domain of TCR clone 367336 (TRAV17, TRAJ20)
CATQANDYKLSF

SEQ ID NO: 734672 - protein, 17 aa, Homo sapiens
  CDR3 for beta chain variable domain of TCR clone 367336 (TRBV7-7, TRBJ2-2)
CASSSVPAGGEIGELFF

SEQ ID NO: 734673 - protein, 10 aa, Homo sapiens
  CDR3 for alpha chain variable domain of TCR clone 367337 (TRAV12-2, TRAJ43)
CAVKVLSMRF

SEQ ID NO: 734674 - protein, 14 aa, Homo sapiens
  CDR3 for beta chain variable domain of TCR clone 367337 (TRBV11-2, TRBJ2-7)
CASSLGNSLDEQYF

SEQ ID NO: 734675 - protein, 12 aa, Homo sapiens
  CDR3 for alpha chain variable domain of TCR clone 367338 (TRAV25, TRAJ11)
CAGASGYSTLTF

SEQ ID NO: 734676 - protein, 15 aa, Homo sapiens
  CDR3 for beta chain variable domain of TCR clone 367338 (TRBV28, TRBJ1-3)
CASSMGWASGNTIYF

SEQ ID NO: 734677 - protein, 17 aa, Homo sapiens
  CDR3 for alpha chain variable domain of TCR clone 367339 (TRAV3, TRAJ42)
CAVRDRDYGGSQGNLIF

SEQ ID NO: 734678 - protein, 14 aa, Homo sapiens
  CDR3 for beta chain variable domain of TCR clone 367339 (TRBV4-1, TRBJ2-2)
CASNQAVNTGELFF

SEQ ID NO: 734679 - protein, 17 aa, Homo sapiens
  CDR3 for alpha chain variable domain of TCR clone 367340 (TRAV23/DV6, TRAJ9)
CAASLSPPNTGSFKTIF

SEQ ID NO: 734680 - protein, 14 aa, Homo sapiens
  CDR3 for beta chain variable domain of TCR clone 367340 (TRBV11-2, TRBJ2-5)
CASSRTGGIETQYF

SEQ ID NO: 734681 - protein, 13 aa, Homo sapiens
  CDR3 for alpha chain variable domain of TCR clone 367341 (TRAV13-1, TRAJ21)
CAASIYNFNKFYF

SEQ ID NO: 734682 - protein, 13 aa, Homo sapiens
  CDR3 for beta chain variable domain of TCR clone 367341 (TRBV27, TRBJ1-4)
CANSLMGDEKLFF

SEQ ID NO: 734683 - protein, 12 aa, Homo sapiens
  CDR3 for alpha chain variable domain of TCR clone 367342 (TRAV3, TRAJ31)
CSVRPRGPRLMF

SEQ ID NO: 734684 - protein, 17 aa, Homo sapiens
  CDR3 for beta chain variable domain of TCR clone 367342 (TRBV7-9, TRBJ1-5)
CASSASQGGYSNQPQHF

SEQ ID NO: 734685 - protein, 12 aa, Homo sapiens
  CDR3 for alpha chain variable domain of TCR clone 367343 (TRAV1-1, TRAJ30)
CAVRGRDDKIIF

SEQ ID NO: 734686 - protein, 13 aa, Homo sapiens
  CDR3 for beta chain variable domain of TCR clone 367343 (TRBV11-3, TRBJ2-7)
CASSLDKLYAQYF

SEQ ID NO: 734687 - protein, 12 aa, Homo sapiens
  CDR3 for alpha chain variable domain of TCR clone 367344 (TRAV13-1, TRAJ49)
CGASPMGNQFYF

SEQ ID NO: 734688 - protein, 13 aa, Homo sapiens
  CDR3 for beta chain variable domain of TCR clone 367344 (TRBV20-1, TRBJ2-2)
CSASAAGTGELFF

SEQ ID NO: 734689 - protein, 16 aa, Homo sapiens
  CDR3 for alpha chain variable domain of TCR clone 367345 (TRAV16, TRAJ52)
CAPSGVGGTSYGKLTF

SEQ ID NO: 734690 - protein, 14 aa, Homo sapiens
  CDR3 for beta chain variable domain of TCR clone 367345 (TRBV11-2, TRBJ2-1)
CASSPSRQGGGQFF

SEQ ID NO: 734691 - protein, 17 aa, Homo sapiens
  CDR3 for alpha chain variable domain of TCR clone 367346 (TRAV13-1, TRAJ31)
CAPRDRLMFGDGTQLVV

SEQ ID NO: 734692 - protein, 13 aa, Homo sapiens
  CDR3 for beta chain variable domain of TCR clone 367346 (TRBV7-2, TRBJ1-1)
CASNLKGAKVAFF

SEQ ID NO: 734693 - protein, 13 aa, Homo sapiens
  CDR3 for alpha chain variable domain of TCR clone 367347 (TRAV29/DV5, TRAJ31)
CAASRNNNARLMF

SEQ ID NO: 734694 - protein, 14 aa, Homo sapiens
  CDR3 for beta chain variable domain of TCR clone 367347 (TRBV5-1, TRBJ2-7)
CASSRGESLYEQYF

SEQ ID NO: 734695 - protein, 12 aa, Homo sapiens
  CDR3 for alpha chain variable domain of TCR clone 367348 (TRAV12-2, TRAJ20)
CAVRPSDYKLSF

SEQ ID NO: 734696 - protein, 16 aa, Homo sapiens
  CDR3 for beta chain variable domain of TCR clone 367348 (TRBV3-1, TRBJ2-5)
CASSPGQFNGFGTQYF

SEQ ID NO: 734697 - protein, 14 aa, Homo sapiens
  CDR3 for alpha chain variable domain of TCR clone 367349 (TRAV13-1, TRAJ35)
CAASKGGFGNVLQC

SEQ ID NO: 734698 - protein, 13 aa, Homo sapiens
  CDR3 for beta chain variable domain of TCR clone 367349 (TRBV7-3, TRBJ1-1)
CVSSQDWGAEAFF

SEQ ID NO: 734699 - protein, 13 aa, Homo sapiens
  CDR3 for alpha chain variable domain of TCR clone 367350 (TRAV8-6, TRAJ34)
CAVSDQGTDKLIL

SEQ ID NO: 734700 - protein, 14 aa, Homo sapiens
  CDR3 for beta chain variable domain of TCR clone 367350 (TRBV12-4, TRBJ1-1)
CASTWTGHDTEAFF

SEQ ID NO: 734701 - protein, 12 aa, Homo sapiens
  CDR3 for alpha chain variable domain of TCR clone 367351 (TRAV3, TRAJ43)
CAVRDPNNDMPF

SEQ ID NO: 734702 - protein, 15 aa, Homo sapiens
  CDR3 for beta chain variable domain of TCR clone 367351 (TRBV4-1, TRBJ1-4)
CASSDTGGTNEKLFF

SEQ ID NO: 734703 - protein, 13 aa, Homo sapiens
  CDR3 for alpha chain variable domain of TCR clone 367352 (TRAV12-2, TRAJ13)
CREEDWGLPEVTF

SEQ ID NO: 734704 - protein, 15 aa, Homo sapiens
  CDR3 for beta chain variable domain of TCR clone 367352 (TRBV27, TRBJ2-1)
CASSNGGGSSNEQFF

SEQ ID NO: 734705 - protein, 13 aa, Homo sapiens
  CDR3 for alpha chain variable domain of TCR clone 367353 (TRAV21, TRAJ27)
CAARPGNAGKSTF

SEQ ID NO: 734706 - protein, 16 aa, Homo sapiens
  CDR3 for beta chain variable domain of TCR clone 367353 (TRBV11-2, TRBJ2-7)
CASSLGAGPTSSTSGR

SEQ ID NO: 734707 - protein, 14 aa, Homo sapiens
  CDR3 for alpha chain variable domain of TCR clone 367354 (TRAV9-2, TRAJ39)
CALHIYNADNMLTF

SEQ ID NO: 734708 - protein, 14 aa, Homo sapiens
  CDR3 for beta chain variable domain of TCR clone 367354 (TRBV12-5, TRBJ2-5)
CASGSRTHQETQYF

SEQ ID NO: 734709 - protein, 11 aa, Homo sapiens
  CDR3 for alpha chain variable domain of TCR clone 367355 (TRAV2, TRAJ13)
CASGGYQKVTF

SEQ ID NO: 734710 - protein, 13 aa, Homo sapiens
  CDR3 for beta chain variable domain of TCR clone 367355 (TRBV20-1, TRBJ2-1)
CSASTGTSNEQFF

SEQ ID NO: 734711 - protein, 13 aa, Homo sapiens
  CDR3 for alpha chain variable domain of TCR clone 367356 (TRAV17, TRAJ4)
CATKSGGYNKLIF

SEQ ID NO: 734712 - protein, 14 aa, Homo sapiens
  CDR3 for beta chain variable domain of TCR clone 367356 (TRBV20-1, TRBJ1-5)
CSARDDRGNQTQHV

SEQ ID NO: 734713 - protein, 15 aa, Homo sapiens
  CDR3 for alpha chain variable domain of TCR clone 367357 (TRAV26-1, TRAJ44)
CIVRANTGTASKLTF

SEQ ID NO: 734714 - protein, 16 aa, Homo sapiens
  CDR3 for beta chain variable domain of TCR clone 367357 (TRBV7-7, TRBJ2-1)
CASSLASGTTYNEQFF

SEQ ID NO: 734715 - protein, 13 aa, Homo sapiens
  CDR3 for alpha chain variable domain of TCR clone 367358 (TRAV16, TRAJ28)
CAPTGAGSYQLTF

SEQ ID NO: 734716 - protein, 16 aa, Homo sapiens
  CDR3 for beta chain variable domain of TCR clone 367358 (TRBV28, TRBJ1-5)
CASSLTGQGWNQDQHF

SEQ ID NO: 734717 - protein, 14 aa, Homo sapiens
  CDR3 for alpha chain variable domain of TCR clone 367359 (TRAV8-6, TRAJ12)
CAAKAADSSYKLIF

SEQ ID NO: 734718 - protein, 15 aa, Homo sapiens
  CDR3 for beta chain variable domain of TCR clone 367359 (TRBV5-1, TRBJ2-5)
CASSLGLAEQENQYC

SEQ ID NO: 734719 - protein, 14 aa, Homo sapiens
  CDR3 for alpha chain variable domain of TCR clone 367360 (TRAV1-2, TRAJ16)
CAVNRFSDGQKLLF

SEQ ID NO: 734720 - protein, 14 aa, Homo sapiens
  CDR3 for beta chain variable domain of TCR clone 367360 (TRBV7-9, TRBJ2-7)
CASSFRQGSYEQYF

SEQ ID NO: 734721 - protein, 13 aa, Homo sapiens
  CDR3 for alpha chain variable domain of TCR clone 367361 (TRAV13-1, TRAJ21)
CAASIYNFNKFYF

SEQ ID NO: 734722 - protein, 15 aa, Homo sapiens
  CDR3 for beta chain variable domain of TCR clone 367361 (TRBV20-1, TRBJ2-7)
CSARVPAAYFYEQYF

SEQ ID NO: 734723 - protein, 14 aa, Homo sapiens
  CDR3 for alpha chain variable domain of TCR clone 367362 (TRAV21, TRAJ35)
CAVMPIGFGNVLHC

SEQ ID NO: 734724 - protein, 13 aa, Homo sapiens
  CDR3 for beta chain variable domain of TCR clone 367362 (TRBV7-2, TRBJ2-2)
CASSLAVTGELFF

SEQ ID NO: 734725 - protein, 14 aa, Homo sapiens
  CDR3 for alpha chain variable domain of TCR clone 367363 (TRAV13-2, TRAJ6)
CAERGPGGSYIPTF

SEQ ID NO: 734726 - protein, 13 aa, Homo sapiens
  CDR3 for beta chain variable domain of TCR clone 367363 (TRBV19, TRBJ1-2)
CASSQGQVYGYTF

SEQ ID NO: 734727 - protein, 14 aa, Homo sapiens
  CDR3 for alpha chain variable domain of TCR clone 367364 (TRAV30, TRAJ26)
CGTEIVSYGQNFVF

SEQ ID NO: 734728 - protein, 16 aa, Homo sapiens
  CDR3 for beta chain variable domain of TCR clone 367364 (TRBV3-1, TRBJ2-7)
CASSQGATGVAYEQYF

SEQ ID NO: 734729 - protein, 13 aa, Homo sapiens
  CDR3 for alpha chain variable domain of TCR clone 367365 (TRAV2, TRAJ40)
CAVVTSGTYKYIF

SEQ ID NO: 734730 - protein, 16 aa, Homo sapiens
  CDR3 for beta chain variable domain of TCR clone 367365 (TRBV6-6, TRBJ2-1)
CASSLLSDSSYNEQFF

SEQ ID NO: 734731 - protein, 13 aa, Homo sapiens
  CDR3 for alpha chain variable domain of TCR clone 367366 (TRAV8-3, TRAJ43)
CAVGPDNNNDMRF

SEQ ID NO: 734732 - protein, 16 aa, Homo sapiens
  CDR3 for beta chain variable domain of TCR clone 367366 (TRBV25-1, TRBJ1-1)
CANSGDRDRGRIEAFF

SEQ ID NO: 734733 - protein, 13 aa, Homo sapiens
  CDR3 for alpha chain variable domain of TCR clone 367367 (TRAV14/DV4, TRAJ23)
CAMREVKGGKLIY

SEQ ID NO: 734734 - protein, 15 aa, Homo sapiens
  CDR3 for beta chain variable domain of TCR clone 367367 (TRBV6-3, TRBJ2-1)
CASSYASDSYSEQFF

SEQ ID NO: 734735 - protein, 15 aa, Homo sapiens
  CDR3 for alpha chain variable domain of TCR clone 367368 (TRAV12-3, TRAJ6)
CAMSAASGGSYIPTF

SEQ ID NO: 734736 - protein, 13 aa, Homo sapiens
  CDR3 for beta chain variable domain of TCR clone 367368 (TRBV12-4, TRBJ2-5)
CASSPGTEETQYF

SEQ ID NO: 734737 - protein, 16 aa, Homo sapiens
  CDR3 for alpha chain variable domain of TCR clone 367369 (TRAV8-4, TRAJ5)
CAVSPLSDTGRRALTF

SEQ ID NO: 734738 - protein, 14 aa, Homo sapiens
  CDR3 for beta chain variable domain of TCR clone 367369 (TRBV19, TRBJ1-6)
CASSTDGWNSPLHF

SEQ ID NO: 734739 - protein, 14 aa, Homo sapiens
  CDR3 for alpha chain variable domain of TCR clone 367370 (TRAV1-2, TRAJ8)
CAVREDTGFQKLVF

SEQ ID NO: 734740 - protein, 15 aa, Homo sapiens
  CDR3 for beta chain variable domain of TCR clone 367370 (TRBV5-5, TRBJ1-5)
CAISSTPGSNQPQHF

SEQ ID NO: 734741 - protein, 16 aa, Homo sapiens
  CDR3 for alpha chain variable domain of TCR clone 367371 (TRAV26-2, TRAJ57)
CILRDVGSSGSEKLVF

SEQ ID NO: 734742 - protein, 13 aa, Homo sapiens
  CDR3 for beta chain variable domain of TCR clone 367371 (TRBV18, TRBJ2-3)
CASSPGVTDTQYF

SEQ ID NO: 734743 - protein, 12 aa, Homo sapiens
  CDR3 for alpha chain variable domain of TCR clone 367372 (TRAV12-3, TRAJ17)
CAMTLTGNKLTF

SEQ ID NO: 734744 - protein, 15 aa, Homo sapiens
  CDR3 for beta chain variable domain of TCR clone 367372 (TRBV20-1, TRBJ2-7)
FSARDRVSGMNEQYF

SEQ ID NO: 734745 - protein, 15 aa, Homo sapiens
  CDR3 for alpha chain variable domain of TCR clone 367373 (TRAV12-1, TRAJ36)
CVVNEHQTGANNLFF

SEQ ID NO: 734746 - protein, 14 aa, Homo sapiens
  CDR3 for beta chain variable domain of TCR clone 367373 (TRBV4-2, TRBJ2-1)
CASGLDRAYNEQFF

SEQ ID NO: 734747 - protein, 11 aa, Homo sapiens
  CDR3 for alpha chain variable domain of TCR clone 367374 (TRAV21, TRAJ9)
CALPGGFKTIF

SEQ ID NO: 734748 - protein, 12 aa, Homo sapiens
  CDR3 for beta chain variable domain of TCR clone 367374 (TRBV20-1, TRBJ2-3)
CSARVGTDTQYF

SEQ ID NO: 734749 - protein, 12 aa, Homo sapiens
  CDR3 for alpha chain variable domain of TCR clone 367375 (TRAV20, TRAJ33)
CAMRGSNYQLIW

SEQ ID NO: 734750 - protein, 15 aa, Homo sapiens
  CDR3 for beta chain variable domain of TCR clone 367375 (TRBV11-3, TRBJ2-3)
CASLKDGREGDTQYF

SEQ ID NO: 734751 - protein, 15 aa, Homo sapiens
  CDR3 for alpha chain variable domain of TCR clone 367376 (TRAV12-3, TRAJ49)
CAMAVTPKPGNQFYF

SEQ ID NO: 734752 - protein, 18 aa, Homo sapiens
  CDR3 for beta chain variable domain of TCR clone 367376 (TRBV4-1, TRBJ1-5)
CASSQDPRGQGLNQPQHF

SEQ ID NO: 734753 - protein, 15 aa, Homo sapiens
  CDR3 for alpha chain variable domain of TCR clone 367377 (TRAV8-2, TRAJ16)
CVVSDGFSDGQKLLF

SEQ ID NO: 734754 - protein, 15 aa, Homo sapiens
  CDR3 for beta chain variable domain of TCR clone 367377 (TRBV5-1, TRBJ2-4)
CASSLGGGGSYMQYF

SEQ ID NO: 734755 - protein, 13 aa, Homo sapiens
  CDR3 for alpha chain variable domain of TCR clone 367378 (TRAV3, TRAJ4)
CAVRDGAYNKLIF

SEQ ID NO: 734756 - protein, 14 aa, Homo sapiens
  CDR3 for beta chain variable domain of TCR clone 367378 (TRBV12-4, TRBJ1-2)
CASSSSAAGSSYTF

SEQ ID NO: 734757 - protein, 10 aa, Homo sapiens
  CDR3 for alpha chain variable domain of TCR clone 367379 (TRAV36/DV7, TRAJ48)
CAVGNEKLTF

SEQ ID NO: 734758 - protein, 17 aa, Homo sapiens
  CDR3 for beta chain variable domain of TCR clone 367379 (TRBV7-2, TRBJ2-3)
CASSLAGGLAGTAGQYF

SEQ ID NO: 734759 - protein, 18 aa, Homo sapiens
  CDR3 for alpha chain variable domain of TCR clone 367380 (TRAV26-1, TRAJ42)
CIVRPIIEEAKEISSLVK

SEQ ID NO: 734760 - protein, 16 aa, Homo sapiens
  CDR3 for beta chain variable domain of TCR clone 367380 (TRBV7-3, TRBJ2-2)
CASSLKRGTLSGELFF

SEQ ID NO: 734761 - protein, 12 aa, Homo sapiens
  CDR3 for alpha chain variable domain of TCR clone 367381 (TRAV13-1, TRAJ53)
CAAGGSNYKLTF

SEQ ID NO: 734762 - protein, 15 aa, Homo sapiens
  CDR3 for beta chain variable domain of TCR clone 367381 (TRBV7-2, TRBJ2-1)
CASSSALAGGNEQFF

SEQ ID NO: 734763 - protein, 15 aa, Homo sapiens
  CDR3 for alpha chain variable domain of TCR clone 367382 (TRAV12-2, TRAJ43)
CAFDMRFGAGTRLTV

SEQ ID NO: 734764 - protein, 16 aa, Homo sapiens
  CDR3 for beta chain variable domain of TCR clone 367382 (TRBV12-5, TRBJ2-5)
CASGPRTSGNQETQYC

SEQ ID NO: 734765 - protein, 14 aa, Homo sapiens
  CDR3 for alpha chain variable domain of TCR clone 367383 (TRAV26-1, TRAJ6)
CIVSPVGGSYIPTF

SEQ ID NO: 734766 - protein, 16 aa, Homo sapiens
  CDR3 for beta chain variable domain of TCR clone 367383 (TRBV4-1, TRBJ2-5)
CASSSGLAEVLGTQYF

SEQ ID NO: 734767 - protein, 17 aa, Homo sapiens
  CDR3 for alpha chain variable domain of TCR clone 367384 (TRAV26-1, TRAJ58)
CIVRVGAAETSGSRLTF

SEQ ID NO: 734768 - protein, 13 aa, Homo sapiens
  CDR3 for beta chain variable domain of TCR clone 367384 (TRBV12-5, TRBJ1-2)
CASGVRTGNGYTF

SEQ ID NO: 734769 - protein, 17 aa, Homo sapiens
  CDR3 for alpha chain variable domain of TCR clone 367385 (TRAV3, TRAJ6)
CAVRDGPRAGGSYITTF

SEQ ID NO: 734770 - protein, 14 aa, Homo sapiens
  CDR3 for beta chain variable domain of TCR clone 367385 (TRBV7-2, TRBJ2-7)
CASSPKTSVYEQYF

SEQ ID NO: 734771 - protein, 15 aa, Homo sapiens
  CDR3 for alpha chain variable domain of TCR clone 367386 (TRAV3, TRAJ36)
CAVRASQTGANNLFF

SEQ ID NO: 734772 - protein, 15 aa, Homo sapiens
  CDR3 for beta chain variable domain of TCR clone 367386 (TRBV7-9, TRBJ1-2)
CASSLDREPNYGYTF

SEQ ID NO: 734773 - protein, 13 aa, Homo sapiens
  CDR3 for alpha chain variable domain of TCR clone 367387 (TRAV23/DV6, TRAJ16)
CAASISDGQKLLF

SEQ ID NO: 734774 - protein, 15 aa, Homo sapiens
  CDR3 for beta chain variable domain of TCR clone 367387 (TRBV2, TRBJ2-2)
CASRRETVGTGELFF

SEQ ID NO: 734775 - protein, 12 aa, Homo sapiens
  CDR3 for alpha chain variable domain of TCR clone 367388 (TRAV12-1, TRAJ34)
CVVAGATDKLIF

SEQ ID NO: 734776 - protein, 14 aa, Homo sapiens
  CDR3 for beta chain variable domain of TCR clone 367388 (TRBV6-1, TRBJ1-3)
CASVQGGGGNTIYF

SEQ ID NO: 734777 - protein, 14 aa, Homo sapiens
  CDR3 for alpha chain variable domain of TCR clone 367389 (TRAV1-2, TRAJ29)
CAVRELTSAPPLVF

SEQ ID NO: 734778 - protein, 13 aa, Homo sapiens
  CDR3 for beta chain variable domain of TCR clone 367389 (TRBV18, TRBJ1-2)
CASSASATEGYTF

SEQ ID NO: 734779 - protein, 13 aa, Homo sapiens
  CDR3 for alpha chain variable domain of TCR clone 367390 (TRAV8-4, TRAJ9)
CAVSETGGVKTIF

SEQ ID NO: 734780 - protein, 14 aa, Homo sapiens
  CDR3 for beta chain variable domain of TCR clone 367390 (TRBV18, TRBJ2-3)
CASSGLADTDTQYF

SEQ ID NO: 734781 - protein, 13 aa, Homo sapiens
  CDR3 for alpha chain variable domain of TCR clone 367391 (TRAV3, TRAJ21)
CAVREPDFNKFYF

SEQ ID NO: 734782 - protein, 13 aa, Homo sapiens
  CDR3 for beta chain variable domain of TCR clone 367391 (TRBV9, TRBJ2-1)
CASSRAGGNEQFF

SEQ ID NO: 734783 - protein, 16 aa, Homo sapiens
  CDR3 for alpha chain variable domain of TCR clone 367392 (TRAV3, TRAJ37)
CAVRPHGSGNTGKLIF

SEQ ID NO: 734784 - protein, 17 aa, Homo sapiens
  CDR3 for beta chain variable domain of TCR clone 367392 (TRBV5-1, TRBJ2-5)
CASSPVALGQNQETKYF

SEQ ID NO: 734785 - protein, 16 aa, Homo sapiens
  CDR3 for alpha chain variable domain of TCR clone 367393 (TRAV12-1, TRAJ48)
CVVNMRDNFGNEKLTF

SEQ ID NO: 734786 - protein, 16 aa, Homo sapiens
  CDR3 for beta chain variable domain of TCR clone 367393 (TRBV7-6, TRBJ2-1)
CASSSVVARTYNEQFF

SEQ ID NO: 734787 - protein, 12 aa, Homo sapiens
  CDR3 for alpha chain variable domain of TCR clone 367394 (TRAV3, TRAJ43)
YAVRDPNNDMRF

SEQ ID NO: 734788 - protein, 15 aa, Homo sapiens
  CDR3 for beta chain variable domain of TCR clone 367394 (TRBV27, TRBJ1-5)
CASSLGTGFDQPQHF

SEQ ID NO: 734789 - protein, 13 aa, Homo sapiens
  CDR3 for alpha chain variable domain of TCR clone 367395 (TRAV26-2, TRAJ43)
CILRAVNNNDMRF

SEQ ID NO: 734790 - protein, 17 aa, Homo sapiens
  CDR3 for beta chain variable domain of TCR clone 367395 (TRBV28, TRBJ2-7)
CASSPLHRASGVYEQYF

SEQ ID NO: 734791 - protein, 13 aa, Homo sapiens
  CDR3 for alpha chain variable domain of TCR clone 367396 (TRAV20, TRAJ37)
CAGCSSNTGKLIF

SEQ ID NO: 734792 - protein, 15 aa, Homo sapiens
  CDR3 for beta chain variable domain of TCR clone 367396 (TRBV7-2, TRBJ2-1)
GASSFQADEYNEQFF

SEQ ID NO: 734793 - protein, 12 aa, Homo sapiens
  CDR3 for alpha chain variable domain of TCR clone 367397 (TRAV1-1, TRAJ39)
GAVPVVGNMLTF

SEQ ID NO: 734794 - protein, 15 aa, Homo sapiens
  CDR3 for beta chain variable domain of TCR clone 367397 (TRBV19, TRBJ1-6)
CASSTQGAVGSPLHF

SEQ ID NO: 734795 - protein, 13 aa, Homo sapiens
  CDR3 for alpha chain variable domain of TCR clone 367398 (TRAV12-1, TRAJ11)
CVVNRAGYSTLTF

SEQ ID NO: 734796 - protein, 15 aa, Homo sapiens
  CDR3 for beta chain variable domain of TCR clone 367398 (TRBV7-3, TRBJ2-2)
CASSETGQGTGALFF

SEQ ID NO: 734797 - protein, 17 aa, Homo sapiens
  CDR3 for alpha chain variable domain of TCR clone 367399 (TRAV36/DV7, TRAJ52)
CAVAQRAGGTSYGKLTF

SEQ ID NO: 734798 - protein, 15 aa, Homo sapiens
  CDR3 for beta chain variable domain of TCR clone 367399 (TRBV6-5, TRBJ1-2)
CASSYSQACNYGYTF

SEQ ID NO: 734799 - protein, 15 aa, Homo sapiens
  CDR3 for alpha chain variable domain of TCR clone 367400 (TRAV27, TRAJ38)
CAARRNAGNNRKLIW

SEQ ID NO: 734800 - protein, 14 aa, Homo sapiens
  CDR3 for beta chain variable domain of TCR clone 367400 (TRBV7-6, TRBJ2-7)
CASSFRQGADEQYF

SEQ ID NO: 734801 - protein, 12 aa, Homo sapiens
  CDR3 for alpha chain variable domain of TCR clone 367401 (TRAV3, TRAJ20)
FAVRDGAYKLSF

SEQ ID NO: 734802 - protein, 13 aa, Homo sapiens
  CDR3 for beta chain variable domain of TCR clone 367401 (TRBV9, TRBJ2-1)
CASSVGQGGEQFF

SEQ ID NO: 734803 - protein, 14 aa, Homo sapiens
  CDR3 for alpha chain variable domain of TCR clone 367402 (TRAV13-1, TRAJ35)
CAASKGGFGNVLHC

SEQ ID NO: 734804 - protein, 14 aa, Homo sapiens
  CDR3 for beta chain variable domain of TCR clone 367402 (TRBV7-3, TRBJ2-3)
CASSLGTVTDTQYF

SEQ ID NO: 734805 - protein, 15 aa, Homo sapiens
  CDR3 for alpha chain variable domain of TCR clone 367403 (TRAV26-1, TRAJ29)
CIVRVEGSGNKPIVF

SEQ ID NO: 734806 - protein, 14 aa, Homo sapiens
  CDR3 for beta chain variable domain of TCR clone 367403 (TRBV18, TRBJ2-5)
CASSPGVSQETQYF

SEQ ID NO: 734807 - protein, 16 aa, Homo sapiens
  CDR3 for alpha chain variable domain of TCR clone 367404 (TRAV3, TRAJ4)
CAVRPSPSGGYHKLIF

SEQ ID NO: 734808 - protein, 12 aa, Homo sapiens
  CDR3 for beta chain variable domain of TCR clone 367404 (TRBV7-9, TRBJ2-7)
CASSQGVYEQYF

SEQ ID NO: 734809 - protein, 12 aa, Homo sapiens
  CDR3 for alpha chain variable domain of TCR clone 367405 (TRAV8-3, TRAJ26)
CAGDNHGQNFVF

SEQ ID NO: 734810 - protein, 12 aa, Homo sapiens
  CDR3 for beta chain variable domain of TCR clone 367405 (TRBV11-2, TRBJ2-1)
CASSPGNNEQFF

SEQ ID NO: 734811 - protein, 18 aa, Homo sapiens
  CDR3 for alpha chain variable domain of TCR clone 367406 (TRAV26-1, TRAJ23)
CIVRVGLEVWNQGGKLIF

SEQ ID NO: 734812 - protein, 14 aa, Homo sapiens
  CDR3 for beta chain variable domain of TCR clone 367406 (TRBV10-3, TRBJ2-5)
CAISERDYQETQYF

SEQ ID NO: 734813 - protein, 12 aa, Homo sapiens
  CDR3 for alpha chain variable domain of TCR clone 367407 (TRAV1-1, TRAJ9)
CALNTGGFKTIF

SEQ ID NO: 734814 - protein, 14 aa, Homo sapiens
  CDR3 for beta chain variable domain of TCR clone 367407 (TRBV25-1, TRBJ1-1)
CASTHLGGNTEAFF

SEQ ID NO: 734815 - protein, 14 aa, Homo sapiens
  CDR3 for alpha chain variable domain of TCR clone 367408 (TRAV12-2, TRAJ17)
CAVNIKAAGNKLTF

SEQ ID NO: 734816 - protein, 17 aa, Homo sapiens
  CDR3 for beta chain variable domain of TCR clone 367408 (TRBV4-1, TRBJ2-3)
CASSQGYVSGGTDTQYF

SEQ ID NO: 734817 - protein, 15 aa, Homo sapiens
  CDR3 for alpha chain variable domain of TCR clone 367409 (TRAV14/DV4, TRAJ28)
CAMSPLRAGSYQLTF

SEQ ID NO: 734818 - protein, 15 aa, Homo sapiens
  CDR3 for beta chain variable domain of TCR clone 367409 (TRBV19, TRBJ1-5)
CASSILTGENQPQHF

SEQ ID NO: 734819 - protein, 17 aa, Homo sapiens
  CDR3 for alpha chain variable domain of TCR clone 367410 (TRAV3, TRAJ6)
CAVRDGPRAGGSYIPTF

SEQ ID NO: 734820 - protein, 14 aa, Homo sapiens
  CDR3 for beta chain variable domain of TCR clone 367410 (TRBV18, TRBJ2-3)
CASSGLADTDTQYF

SEQ ID NO: 734821 - protein, 13 aa, Homo sapiens
  CDR3 for alpha chain variable domain of TCR clone 367411 (TRAV8-6, TRAJ13)
CAVSSGGYQKVTF

SEQ ID NO: 734822 - protein, 15 aa, Homo sapiens
  CDR3 for beta chain variable domain of TCR clone 367411 (TRBV7-9, TRBJ2-7)
CATSLPMGQANEQYF

SEQ ID NO: 734823 - protein, 14 aa, Homo sapiens
  CDR3 for alpha chain variable domain of TCR clone 367412 (TRAV26-1, TRAJ39)
CIVRGSRAGNMLTF

SEQ ID NO: 734824 - protein, 16 aa, Homo sapiens
  CDR3 for beta chain variable domain of TCR clone 367412 (TRBV12-5, TRBJ2-5)
CASGPRTSGNQETQYF

SEQ ID NO: 734825 - protein, 16 aa, Homo sapiens
  CDR3 for alpha chain variable domain of TCR clone 367413 (TRAV1-2, TRAJ10)
CAVRGVLTGEETNSPL

SEQ ID NO: 734826 - protein, 12 aa, Homo sapiens
  CDR3 for beta chain variable domain of TCR clone 367413 (TRBV7-8, TRBJ2-7)
CASSLGDREQYF

SEQ ID NO: 734827 - protein, 12 aa, Homo sapiens
  CDR3 for alpha chain variable domain of TCR clone 367414 (TRAV8-3, TRAJ43)
CAVGRTDNDMRF

SEQ ID NO: 734828 - protein, 11 aa, Homo sapiens
  CDR3 for beta chain variable domain of TCR clone 367414 (TRBV11-2, TRBJ2-1)
PPGVEYNEQFF

SEQ ID NO: 734829 - protein, 13 aa, Homo sapiens
  CDR3 for alpha chain variable domain of TCR clone 367415 (TRAV25, TRAJ30)
CAGRVDRDDKIIF

SEQ ID NO: 734830 - protein, 17 aa, Homo sapiens
  CDR3 for beta chain variable domain of TCR clone 367415 (TRBV7-9, TRBJ2-6)
CASSFGAGYSGANVLTL

SEQ ID NO: 734831 - protein, 16 aa, Homo sapiens
  CDR3 for alpha chain variable domain of TCR clone 367416 (TRAV17, TRAJ35)
CATAEGGIGFGNVCIA

SEQ ID NO: 734832 - protein, 16 aa, Homo sapiens
  CDR3 for beta chain variable domain of TCR clone 367416 (TRBV6-5, TRBJ2-7)
CASSSDPTSGFYEQYF

SEQ ID NO: 734833 - protein, 18 aa, Homo sapiens
  CDR3 for alpha chain variable domain of TCR clone 367417 (TRAV17, TRAJ45)
CATSLNLYSGGGADGLTF

SEQ ID NO: 734834 - protein, 15 aa, Homo sapiens
  CDR3 for beta chain variable domain of TCR clone 367417 (TRBV11-2, TRBJ2-1)
CASSKNRGLIYEQIF

SEQ ID NO: 734835 - protein, 18 aa, Homo sapiens
  CDR3 for alpha chain variable domain of TCR clone 367418 (TRAV21, TRAJ52)
CAVMPSPAGGTSYGKLTF

SEQ ID NO: 734836 - protein, 13 aa, Homo sapiens
  CDR3 for beta chain variable domain of TCR clone 367418 (TRBV7-3, TRBJ1-1)
CASSQDWGAEAFF

SEQ ID NO: 734837 - protein, 16 aa, Homo sapiens
  CDR3 for alpha chain variable domain of TCR clone 367419 (TRAV12-3, TRAJ53)
CAMSPGGGGSNYKLTF

SEQ ID NO: 734838 - protein, 17 aa, Homo sapiens
  CDR3 for beta chain variable domain of TCR clone 367419 (TRBV7-8, TRBJ2-6)
CASSAGTGGAGANVLTF

SEQ ID NO: 734839 - protein, 23 aa, Homo sapiens
  CDR3 for alpha chain variable domain of TCR clone 367420 (TRAV8-4, TRAJ38)
CARLNAGNNHIQNPNPPVYQLRD

SEQ ID NO: 734840 - protein, 14 aa, Homo sapiens
  CDR3 for beta chain variable domain of TCR clone 367420 (TRBV7-8, TRBJ2-3)
CASSLEAGTDTQYF

SEQ ID NO: 734841 - protein, 13 aa, Homo sapiens
  CDR3 for alpha chain variable domain of TCR clone 367421 (TRAV3, TRAJ8)
CAVSFTGFQKLVF

SEQ ID NO: 734842 - protein, 15 aa, Homo sapiens
  CDR3 for beta chain variable domain of TCR clone 367421 (TRBV20-1, TRBJ2-7)
CSARNRVSGMDEQYF

SEQ ID NO: 734843 - protein, 14 aa, Homo sapiens
  CDR3 for alpha chain variable domain of TCR clone 367422 (TRAV12-2, TRAJ13)
CAVKKTGGYQKVNF

SEQ ID NO: 734844 - protein, 15 aa, Homo sapiens
  CDR3 for beta chain variable domain of TCR clone 367422 (TRBV27, TRBJ2-1)
CASSNWGGSSNEQFF

SEQ ID NO: 734845 - protein, 14 aa, Homo sapiens
  CDR3 for alpha chain variable domain of TCR clone 367423 (TRAV21, TRAJ38)
CAVMGAGNKRKLIW

SEQ ID NO: 734846 - protein, 13 aa, Homo sapiens
  CDR3 for beta chain variable domain of TCR clone 367423 (TRBV7-3, TRBJ2-5)
CASSIGFFETQYF

SEQ ID NO: 734847 - protein, 17 aa, Homo sapiens
  CDR3 for alpha chain variable domain of TCR clone 367424 (TRAV20, TRAJ4)
CAVQLVLFSGGYNKLIF

SEQ ID NO: 734848 - protein, 18 aa, Homo sapiens
  CDR3 for beta chain variable domain of TCR clone 367424 (TRBV4-2, TRBJ1-5)
CASSQGDRVEWGNQPQHF

SEQ ID NO: 734849 - protein, 14 aa, Homo sapiens
  CDR3 for alpha chain variable domain of TCR clone 367425 (TRAV1-2, TRAJ8)
CAVREDTGFQNPVF

SEQ ID NO: 734850 - protein, 15 aa, Homo sapiens
  CDR3 for beta chain variable domain of TCR clone 367425 (TRBV6-3, TRBJ2-7)
CASSSPGTVFYEQYF

SEQ ID NO: 734851 - protein, 15 aa, Homo sapiens
  CDR3 for alpha chain variable domain of TCR clone 367426 (TRAV21, TRAJ53)
CATLNSGGSNYQLTF

SEQ ID NO: 734852 - protein, 13 aa, Homo sapiens
  CDR3 for beta chain variable domain of TCR clone 367426 (TRBV12-5, TRBJ2-1)
CASGLGRGNEQFF

SEQ ID NO: 734853 - protein, 14 aa, Homo sapiens
  CDR3 for alpha chain variable domain of TCR clone 367427 (TRAV8-4, TRAJ34)
CAVSDPGDTDKLIF

SEQ ID NO: 734854 - protein, 15 aa, Homo sapiens
  CDR3 for beta chain variable domain of TCR clone 367427 (TRBV7-9, TRBJ1-6)
CASSSPGRGNSPLHF

SEQ ID NO: 734855 - protein, 14 aa, Homo sapiens
  CDR3 for alpha chain variable domain of TCR clone 367428 (TRAV17, TRAJ57)
CATDTQGGSEKLVF

SEQ ID NO: 734856 - protein, 14 aa, Homo sapiens
  CDR3 for beta chain variable domain of TCR clone 367428 (TRBV27, TRBJ2-5)
CASSSLKGWETQYF

SEQ ID NO: 734857 - protein, 13 aa, Homo sapiens
  CDR3 for alpha chain variable domain of TCR clone 367429 (TRAV12-2, TRAJ20)
CAVYPSNDYKLSF

SEQ ID NO: 734858 - protein, 15 aa, Homo sapiens
  CDR3 for beta chain variable domain of TCR clone 367429 (TRBV28, TRBJ2-3)
CASSPDRQGANTQYF

SEQ ID NO: 734859 - protein, 15 aa, Homo sapiens
  CDR3 for alpha chain variable domain of TCR clone 367430 (TRAV3, TRAJ15)
CAVRPANQAGTGLLF

SEQ ID NO: 734860 - protein, 14 aa, Homo sapiens
  CDR3 for beta chain variable domain of TCR clone 367430 (TRBV4-1, TRBJ2-2)
CASSQAVNTGELFF

SEQ ID NO: 734861 - protein, 14 aa, Homo sapiens
  CDR3 for alpha chain variable domain of TCR clone 367431 (TRAV16, TRAJ33)
CALSAMDSNYQLIW

SEQ ID NO: 734862 - protein, 19 aa, Homo sapiens
  CDR3 for beta chain variable domain of TCR clone 367431 (TRBV25-1, TRBJ2-7)
CASSDARVVFSSYEQYLGR

SEQ ID NO: 734863 - protein, 14 aa, Homo sapiens
  CDR3 for alpha chain variable domain of TCR clone 367432 (TRAV20, TRAJ29)
CAVQAWVGNTPLVF

SEQ ID NO: 734864 - protein, 15 aa, Homo sapiens
  CDR3 for beta chain variable domain of TCR clone 367432 (TRBV20-1, TRBJ1-1)
CSASRGVTGNTEAFF

SEQ ID NO: 734865 - protein, 14 aa, Homo sapiens
  CDR3 for alpha chain variable domain of TCR clone 367433 (TRAV26-1, TRAJ39)
CSVRGSRAGNMLTF

SEQ ID NO: 734866 - protein, 15 aa, Homo sapiens
  CDR3 for beta chain variable domain of TCR clone 367433 (TRBV7-9, TRBJ1-5)
CASSQGHQPNQTQHF

SEQ ID NO: 734867 - protein, 13 aa, Homo sapiens
  CDR3 for alpha chain variable domain of TCR clone 367434 (TRAV8-3, TRAJ36)
CAVGATGANNLFL

SEQ ID NO: 734868 - protein, 13 aa, Homo sapiens
  CDR3 for beta chain variable domain of TCR clone 367434 (TRBV6-1, TRBJ1-1)
CASSRQGNTEAFF

SEQ ID NO: 734869 - protein, 12 aa, Homo sapiens
  CDR3 for alpha chain variable domain of TCR clone 367435 (TRAV12-3, TRAJ17)
CEMTLTGNKLTF

SEQ ID NO: 734870 - protein, 11 aa, Homo sapiens
  CDR3 for beta chain variable domain of TCR clone 367435 (TRBV12-4, TRBJ2-2)
CASSSAGELFF

SEQ ID NO: 734871 - protein, 14 aa, Homo sapiens
  CDR3 for alpha chain variable domain of TCR clone 367436 (TRAV17, TRAJ57)
CATDTQGGSEKLVF

SEQ ID NO: 734872 - protein, 16 aa, Homo sapiens
  CDR3 for beta chain variable domain of TCR clone 367436 (TRBV20-1, TRBJ1-4)
CSAPGQGLLTNEKLFF

SEQ ID NO: 734873 - protein, 11 aa, Homo sapiens
  CDR3 for alpha chain variable domain of TCR clone 367437 (TRAV3, TRAJ21)
CAVGNFNKFYF

SEQ ID NO: 734874 - protein, 16 aa, Homo sapiens
  CDR3 for beta chain variable domain of TCR clone 367437 (TRBV7-3, TRBJ2-2)
CASSVKRGTLSGELFF

SEQ ID NO: 734875 - protein, 13 aa, Homo sapiens
  CDR3 for alpha chain variable domain of TCR clone 367438 (TRAV8-3, TRAJ28)
CAVGAVGSYQPTF

SEQ ID NO: 734876 - protein, 14 aa, Homo sapiens
  CDR3 for beta chain variable domain of TCR clone 367438 (TRBV19, TRBJ1-5)
CASSFTGSNQPQHF

SEQ ID NO: 734877 - protein, 16 aa, Homo sapiens
  CDR3 for alpha chain variable domain of TCR clone 367439 (TRAV3, TRAJ37)
CAVRAKGSGNTGKLIF

SEQ ID NO: 734878 - protein, 13 aa, Homo sapiens
  CDR3 for beta chain variable domain of TCR clone 367439 (TRBV14, TRBJ2-7)
CAISQDRRYEQYF

SEQ ID NO: 734879 - protein, 14 aa, Homo sapiens
  CDR3 for alpha chain variable domain of TCR clone 367440 (TRAV17, TRAJ34)
CAKDSLEGTDKLIF

SEQ ID NO: 734880 - protein, 13 aa, Homo sapiens
  CDR3 for beta chain variable domain of TCR clone 367440 (TRBV11-2, TRBJ2-7)
CASSGTRPYEQYF

SEQ ID NO: 734881 - protein, 15 aa, Homo sapiens
  CDR3 for alpha chain variable domain of TCR clone 367441 (TRAV13-1, TRAJ45)
CAASRSGGGADGLTF

SEQ ID NO: 734882 - protein, 12 aa, Homo sapiens
  CDR3 for beta chain variable domain of TCR clone 367441 (TRBV11-2, TRBJ2-2)
CASSLGGGELFF

SEQ ID NO: 734883 - protein, 15 aa, Homo sapiens
  CDR3 for alpha chain variable domain of TCR clone 367442 (TRAV21, TRAJ24)
CAARSSTDSWGKLQF

SEQ ID NO: 734884 - protein, 12 aa, Homo sapiens
  CDR3 for beta chain variable domain of TCR clone 367442 (TRBV6-3, TRBJ2-7)
CASSLTPYEQYF

SEQ ID NO: 734885 - protein, 12 aa, Homo sapiens
  CDR3 for alpha chain variable domain of TCR clone 367443 (TRAV3, TRAJ20)
CAVRDGDYKLSF

SEQ ID NO: 734886 - protein, 13 aa, Homo sapiens
  CDR3 for beta chain variable domain of TCR clone 367443 (TRBV19, TRBJ2-7)
CASSIRSSYEQYF

SEQ ID NO: 734887 - protein, 12 aa, Homo sapiens
  CDR3 for alpha chain variable domain of TCR clone 367444 (TRAV25, TRAJ11)
CAGASGYSTLTF

SEQ ID NO: 734888 - protein, 14 aa, Homo sapiens
  CDR3 for beta chain variable domain of TCR clone 367444 (TRBV13, TRBJ2-3)
CASSLGGPQRPQYF

SEQ ID NO: 734889 - protein, 14 aa, Homo sapiens
  CDR3 for alpha chain variable domain of TCR clone 367445 (TRAV1-2, TRAJ8)
CAVREDTGSQKLVF

SEQ ID NO: 734890 - protein, 17 aa, Homo sapiens
  CDR3 for beta chain variable domain of TCR clone 367445 (TRBV13, TRBJ2-3)
CASSLSRVAGGRNTQYF

SEQ ID NO: 734891 - protein, 11 aa, Homo sapiens
  CDR3 for alpha chain variable domain of TCR clone 367446 (TRAV3, TRAJ21)
CAVGNFHKFYF

SEQ ID NO: 734892 - protein, 17 aa, Homo sapiens
  CDR3 for beta chain variable domain of TCR clone 367446 (TRBV24-1, TRBJ2-1)
CATSDVSTSGTYNEQFF

SEQ ID NO: 734893 - protein, 12 aa, Homo sapiens
  CDR3 for alpha chain variable domain of TCR clone 367447 (TRAV20, TRAJ54)
CAVQEGAQKLVF

SEQ ID NO: 734894 - protein, 17 aa, Homo sapiens
  CDR3 for beta chain variable domain of TCR clone 367447 (TRBV13, TRBJ2-3)
CASSLYRVAGGRNTQYF

SEQ ID NO: 734895 - protein, 14 aa, Homo sapiens
  CDR3 for alpha chain variable domain of TCR clone 367448 (TRAV30, TRAJ33)
CGTVAPRSNYQLIW

SEQ ID NO: 734896 - protein, 16 aa, Homo sapiens
  CDR3 for beta chain variable domain of TCR clone 367448 (TRBV5-1, TRBJ1-1)
CASSSGGNSLNTEAFF

SEQ ID NO: 734897 - protein, 12 aa, Homo sapiens
  CDR3 for alpha chain variable domain of TCR clone 367449 (TRAV41, TRAJ58)
CAVETSGSRLTF

SEQ ID NO: 734898 - protein, 15 aa, Homo sapiens
  CDR3 for beta chain variable domain of TCR clone 367449 (TRBV29-1, TRBJ2-6)
CSVGDRVSGANVLTF

SEQ ID NO: 734899 - protein, 12 aa, Homo sapiens
  CDR3 for alpha chain variable domain of TCR clone 367450 (TRAV21, TRAJ37)
CAVKGNTGKLIF

SEQ ID NO: 734900 - protein, 13 aa, Homo sapiens
  CDR3 for beta chain variable domain of TCR clone 367450 (TRBV12-4, TRBJ1-1)
CASSPGTGFEAFF

SEQ ID NO: 734901 - protein, 15 aa, Homo sapiens
  CDR3 for alpha chain variable domain of TCR clone 367451 (TRAV38-2/DV8, TRAJ47)
CAYRSAKGYGNKLVF

SEQ ID NO: 734902 - protein, 15 aa, Homo sapiens
  CDR3 for beta chain variable domain of TCR clone 367451 (TRBV6-6, TRBJ2-7)
CASSYSYGGSYEQFF

SEQ ID NO: 734903 - protein, 15 aa, Homo sapiens
  CDR3 for alpha chain variable domain of TCR clone 367452 (TRAV21, TRAJ53)
CATLNSGGSNYKLTF

SEQ ID NO: 734904 - protein, 14 aa, Homo sapiens
  CDR3 for beta chain variable domain of TCR clone 367452 (TRBV18, TRBJ1-5)
CASSPGNSNQPQHF

SEQ ID NO: 734905 - protein, 12 aa, Homo sapiens
  CDR3 for alpha chain variable domain of TCR clone 367453 (TRAV29/DV5, TRAJ49)
CAATDIGNQFYF

SEQ ID NO: 734906 - protein, 19 aa, Homo sapiens
  CDR3 for beta chain variable domain of TCR clone 367453 (TRBV25-1, TRBJ2-2)
CAILVYRVDRGRKTGELFF

SEQ ID NO: 734907 - protein, 11 aa, Homo sapiens
  CDR3 for alpha chain variable domain of TCR clone 367454 (TRAV2, TRAJ33)
CAVESNYQLIW

SEQ ID NO: 734908 - protein, 11 aa, Homo sapiens
  CDR3 for beta chain variable domain of TCR clone 367454 (TRBV11-2, TRBJ1-1)
CASSINTEAFF

SEQ ID NO: 734909 - protein, 14 aa, Homo sapiens
  CDR3 for alpha chain variable domain of TCR clone 367455 (TRAV8-3, TRAJ15)
CAVGRHQAGTALIF

SEQ ID NO: 734910 - protein, 13 aa, Homo sapiens
  CDR3 for beta chain variable domain of TCR clone 367455 (TRBV9, TRBJ2-7)
CGSSASDSYEQYF

SEQ ID NO: 734911 - protein, 14 aa, Homo sapiens
  CDR3 for alpha chain variable domain of TCR clone 367456 (TRAV35, TRAJ56)
CAGQLTGANSKLTF

SEQ ID NO: 734912 - protein, 12 aa, Homo sapiens
  CDR3 for beta chain variable domain of TCR clone 367456 (TRBV11-2, TRBJ2-7)
CASSPPADERYF

SEQ ID NO: 734913 - protein, 13 aa, Homo sapiens
  CDR3 for alpha chain variable domain of TCR clone 367457 (TRAV8-3, TRAJ43)
CAVGPDNNNDMRF

SEQ ID NO: 734914 - protein, 16 aa, Homo sapiens
  CDR3 for beta chain variable domain of TCR clone 367457 (TRBV3-1, TRBJ2-5)
CASSQDWASGQETQYF

SEQ ID NO: 734915 - protein, 17 aa, Homo sapiens
  CDR3 for alpha chain variable domain of TCR clone 367458 (TRAV3, TRAJ38)
CAVRDCLNVGNNRKLIW

SEQ ID NO: 734916 - protein, 15 aa, Homo sapiens
  CDR3 for beta chain variable domain of TCR clone 367458 (TRBV27, TRBJ2-1)
CASSNGGGSSNEQFF

SEQ ID NO: 734917 - protein, 14 aa, Homo sapiens
  CDR3 for alpha chain variable domain of TCR clone 367459 (TRAV3, TRAJ6)
CAVRDSRRKLHTNI

SEQ ID NO: 734918 - protein, 15 aa, Homo sapiens
  CDR3 for beta chain variable domain of TCR clone 367459 (TRBV18, TRBJ2-7)
CASSPLQGRTYEQYF

SEQ ID NO: 734919 - protein, 16 aa, Homo sapiens
  CDR3 for alpha chain variable domain of TCR clone 367460 (TRAV3, TRAJ10)
CAVRDMRAGGGNKLTF

SEQ ID NO: 734920 - protein, 15 aa, Homo sapiens
  CDR3 for beta chain variable domain of TCR clone 367460 (TRBV15, TRBJ1-5)
CATSTTGVVNQPQHF

SEQ ID NO: 734921 - protein, 10 aa, Homo sapiens
  CDR3 for alpha chain variable domain of TCR clone 367461 (TRAV36/DV7, TRAJ56)
CAGPAVELKF

SEQ ID NO: 734922 - protein, 13 aa, Homo sapiens
  CDR3 for beta chain variable domain of TCR clone 367461 (TRBV7-9, TRBJ2-7)
CASSFWSSYEQYF

SEQ ID NO: 734923 - protein, 16 aa, Homo sapiens
  CDR3 for alpha chain variable domain of TCR clone 367462 (TRAV35, TRAJ28)
CSGQRYSGAGRYQLTF

SEQ ID NO: 734924 - protein, 13 aa, Homo sapiens
  CDR3 for beta chain variable domain of TCR clone 367462 (TRBV19, TRBJ1-2)
CASSQGQVYGYTF

SEQ ID NO: 734925 - protein, 17 aa, Homo sapiens
  CDR3 for alpha chain variable domain of TCR clone 367463 (TRAV3, TRAJ42)
CAVRDRDYGGSQGNLIF

SEQ ID NO: 734926 - protein, 15 aa, Homo sapiens
  CDR3 for beta chain variable domain of TCR clone 367463 (TRBV9, TRBJ1-6)
CASSEAGTGDSPLHF

SEQ ID NO: 734927 - protein, 14 aa, Homo sapiens
  CDR3 for alpha chain variable domain of TCR clone 367464 (TRAV27, TRAJ22)
CAGLPSGSARQLPF

SEQ ID NO: 734928 - protein, 16 aa, Homo sapiens
  CDR3 for beta chain variable domain of TCR clone 367464 (TRBV7-3, TRBJ2-2)
CASSLKRGTLSGELFF

SEQ ID NO: 734929 - protein, 15 aa, Homo sapiens
  CDR3 for alpha chain variable domain of TCR clone 367465 (TRAV35, TRAJ40)
CAGQLGTSGTYKYIF

SEQ ID NO: 734930 - protein, 13 aa, Homo sapiens
  CDR3 for beta chain variable domain of TCR clone 367465 (TRBV12-4, TRBJ2-5)
CASRKRGKETQYF

SEQ ID NO: 734931 - protein, 13 aa, Homo sapiens
  CDR3 for alpha chain variable domain of TCR clone 367466 (TRAV17, TRAJ26)
CATVHNYGQNFVF

SEQ ID NO: 734932 - protein, 14 aa, Homo sapiens
  CDR3 for beta chain variable domain of TCR clone 367466 (TRBV7-2, TRBJ1-1)
CASSFLTGTTEAFF

SEQ ID NO: 734933 - protein, 15 aa, Homo sapiens
  CDR3 for alpha chain variable domain of TCR clone 367467 (TRAV13-2, TRAJ5)
CAENPHWTGRRGLTF

SEQ ID NO: 734934 - protein, 16 aa, Homo sapiens
  CDR3 for beta chain variable domain of TCR clone 367467 (TRBV7-9, TRBJ1-3)
CASSQTSGLRLGTIYF

SEQ ID NO: 734935 - protein, 15 aa, Homo sapiens
  CDR3 for alpha chain variable domain of TCR clone 367468 (TRAV29/DV5, TRAJ42)
CAAKTDGGSQGNLIF

SEQ ID NO: 734936 - protein, 15 aa, Homo sapiens
  CDR3 for beta chain variable domain of TCR clone 367468 (TRBV14, TRBJ1-1)
CASSQDGMGRREAFF

SEQ ID NO: 734937 - protein, 16 aa, Homo sapiens
  CDR3 for alpha chain variable domain of TCR clone 367469 (TRAV3, TRAJ21)
CAVRDIERGKFNKFYF

SEQ ID NO: 734938 - protein, 13 aa, Homo sapiens
  CDR3 for beta chain variable domain of TCR clone 367469 (TRBV4-2, TRBJ1-1)
CASSQAGNTEAFF

SEQ ID NO: 734939 - protein, 14 aa, Homo sapiens
  CDR3 for alpha chain variable domain of TCR clone 367470 (TRAV9-2, TRAJ39)
CALYIHNAGNMLTF

SEQ ID NO: 734940 - protein, 19 aa, Homo sapiens
  CDR3 for beta chain variable domain of TCR clone 367470 (TRBV28, TRBJ2-7)
CASSYSGTSRLGWVYEQYF

SEQ ID NO: 734941 - protein, 14 aa, Homo sapiens
  CDR3 for alpha chain variable domain of TCR clone 367471 (TRAV21, TRAJ12)
CAVRNGDSSYKLII

SEQ ID NO: 734942 - protein, 14 aa, Homo sapiens
  CDR3 for beta chain variable domain of TCR clone 367471 (TRBV7-6, TRBJ2-7)
CASSLTGTGNEQYF

SEQ ID NO: 734943 - protein, 18 aa, Homo sapiens
  CDR3 for alpha chain variable domain of TCR clone 367472 (TRAV8-3, TRAJ34)
LGTSVLRASGYNTDKLIF

SEQ ID NO: 734944 - protein, 13 aa, Homo sapiens
  CDR3 for beta chain variable domain of TCR clone 367472 (TRBV6-4, TRBJ2-3)
CASSVSWADTQYF

SEQ ID NO: 734945 - protein, 17 aa, Homo sapiens
  CDR3 for alpha chain variable domain of TCR clone 367473 (TRAV8-6, TRAJ58)
CAVSSWVGETSGSRLTF

SEQ ID NO: 734946 - protein, 18 aa, Homo sapiens
  CDR3 for beta chain variable domain of TCR clone 367473 (TRBV13, TRBJ2-6)
CASSPMTSGGSGANVLTF

SEQ ID NO: 734947 - protein, 15 aa, Homo sapiens
  CDR3 for alpha chain variable domain of TCR clone 367474 (TRAV8-4, TRAJ40)
CAVSSITSGTSKYIF

SEQ ID NO: 734948 - protein, 13 aa, Homo sapiens
  CDR3 for beta chain variable domain of TCR clone 367474 (TRBV2, TRBJ2-1)
CATSRGTDNEQFF

SEQ ID NO: 734949 - protein, 14 aa, Homo sapiens
  CDR3 for alpha chain variable domain of TCR clone 367475 (TRAV8-4, TRAJ8)
CAVSEDKGFQKLVF

SEQ ID NO: 734950 - protein, 12 aa, Homo sapiens
  CDR3 for beta chain variable domain of TCR clone 367475 (TRBV14, TRBJ1-1)
CASRPYETEAFF

SEQ ID NO: 734951 - protein, 13 aa, Homo sapiens
  CDR3 for alpha chain variable domain of TCR clone 367476 (TRAV8-6, TRAJ49)
CAVITHTGNQFYF

SEQ ID NO: 734952 - protein, 12 aa, Homo sapiens
  CDR3 for beta chain variable domain of TCR clone 367476 (TRBV11-2, TRBJ2-2)
CASSLGGGELFF

SEQ ID NO: 734953 - protein, 14 aa, Homo sapiens
  CDR3 for alpha chain variable domain of TCR clone 367477 (TRAV29/DV5, TRAJ32)
CAAAYGGATNKLIF

SEQ ID NO: 734954 - protein, 15 aa, Homo sapiens
  CDR3 for beta chain variable domain of TCR clone 367477 (TRBV27, TRBJ2-7)
CASSTAGTGSYEQYL

SEQ ID NO: 734955 - protein, 14 aa, Homo sapiens
  CDR3 for alpha chain variable domain of TCR clone 367478 (TRAV12-2, TRAJ6)
CASKWGGGSYIPTF

SEQ ID NO: 734956 - protein, 13 aa, Homo sapiens
  CDR3 for beta chain variable domain of TCR clone 367478 (TRBV2, TRBJ1-1)
CASSEGGYTEAFF

SEQ ID NO: 734957 - protein, 12 aa, Homo sapiens
  CDR3 for alpha chain variable domain of TCR clone 367479 (TRAV2, TRAJ9)
CAVGAGGFKTIF

SEQ ID NO: 734958 - protein, 13 aa, Homo sapiens
  CDR3 for beta chain variable domain of TCR clone 367479 (TRBV4-1, TRBJ2-7)
CARSQGQAYEQYF

SEQ ID NO: 734959 - protein, 18 aa, Homo sapiens
  CDR3 for alpha chain variable domain of TCR clone 367480 (TRAV13-1, TRAJ52)
CAAKNPNAGGTSYGKLTF

SEQ ID NO: 734960 - protein, 12 aa, Homo sapiens
  CDR3 for beta chain variable domain of TCR clone 367480 (TRBV9, TRBJ2-2)
CASSVVNGELFF

SEQ ID NO: 734961 - protein, 11 aa, Homo sapiens
  CDR3 for alpha chain variable domain of TCR clone 367481 (TRAV21, TRAJ11)
CAVNGYSTITF

SEQ ID NO: 734962 - protein, 16 aa, Homo sapiens
  CDR3 for beta chain variable domain of TCR clone 367481 (TRBV4-3, TRBJ2-2)
CASSHLQGSGTGELFF

SEQ ID NO: 734963 - protein, 14 aa, Homo sapiens
  CDR3 for alpha chain variable domain of TCR clone 367482 (TRAV1-2, TRAJ16)
CAVNRFSDGQKLLF

SEQ ID NO: 734964 - protein, 13 aa, Homo sapiens
  CDR3 for beta chain variable domain of TCR clone 367482 (TRBV19, TRBJ2-1)
CATPRGVYNEQFF

SEQ ID NO: 734965 - protein, 11 aa, Homo sapiens
  CDR3 for alpha chain variable domain of TCR clone 367483 (TRAV23/DV6, TRAJ17)
CKWAAGNKLTI

SEQ ID NO: 734966 - protein, 14 aa, Homo sapiens
  CDR3 for beta chain variable domain of TCR clone 367483 (TRBV6-1, TRBJ2-7)
CASSGGSYLYEQYF

SEQ ID NO: 734967 - protein, 13 aa, Homo sapiens
  CDR3 for alpha chain variable domain of TCR clone 367484 (TRAV12-1, TRAJ29)
CVVRNSGNTPLVF

SEQ ID NO: 734968 - protein, 14 aa, Homo sapiens
  CDR3 for beta chain variable domain of TCR clone 367484 (TRBV7-2, TRBJ2-7)
CASRSQGEAYEQYF

SEQ ID NO: 734969 - protein, 12 aa, Homo sapiens
  CDR3 for alpha chain variable domain of TCR clone 367485 (TRAV8-3, TRAJ20)
CAVGANDYKLSF

SEQ ID NO: 734970 - protein, 15 aa, Homo sapiens
  CDR3 for beta chain variable domain of TCR clone 367485 (TRBV19, TRBJ2-2)
CQPISRERATGELFF

SEQ ID NO: 734971 - protein, 11 aa, Homo sapiens
  CDR3 for alpha chain variable domain of TCR clone 367486 (TRAV36/DV7, TRAJ36)
CAVIARRQTTS

SEQ ID NO: 734972 - protein, 13 aa, Homo sapiens
  CDR3 for beta chain variable domain of TCR clone 367486 (TRBV27, TRBJ2-7)
CASSFSQGYEQYF

SEQ ID NO: 734973 - protein, 15 aa, Homo sapiens
  CDR3 for alpha chain variable domain of TCR clone 367487 (TRAV8-3, TRAJ45)
CASSYSGGGADGLTF

SEQ ID NO: 734974 - protein, 14 aa, Homo sapiens
  CDR3 for beta chain variable domain of TCR clone 367487 (TRBV13, TRBJ2-5)
CASSLGRGQETQYF

SEQ ID NO: 734975 - protein, 14 aa, Homo sapiens
  CDR3 for alpha chain variable domain of TCR clone 367488 (TRAV2, TRAJ9)
CAVEDRRGGFKTIF

SEQ ID NO: 734976 - protein, 15 aa, Homo sapiens
  CDR3 for beta chain variable domain of TCR clone 367488 (TRBV11-3, TRBJ2-3)
CASLKDGREGDTQYF

SEQ ID NO: 734977 - protein, 13 aa, Homo sapiens
  CDR3 for alpha chain variable domain of TCR clone 367489 (TRAV20, TRAJ29)
CAVQTVGNTPLVF

SEQ ID NO: 734978 - protein, 15 aa, Homo sapiens
  CDR3 for beta chain variable domain of TCR clone 367489 (TRBV10-2, TRBJ2-5)
CASRGSGGPQETQYF

SEQ ID NO: 734979 - protein, 14 aa, Homo sapiens
  CDR3 for alpha chain variable domain of TCR clone 367490 (TRAV8-6, TRAJ49)
CAVSVRYTGNQFYF

SEQ ID NO: 734980 - protein, 19 aa, Homo sapiens
  CDR3 for beta chain variable domain of TCR clone 367490 (TRBV28, TRBJ2-1)
CASSFSIRGSGRTRYEKFF

SEQ ID NO: 734981 - protein, 13 aa, Homo sapiens
  CDR3 for alpha chain variable domain of TCR clone 367491 (TRAV20, TRAJ34)
YAVRSYNTDKLIF

SEQ ID NO: 734982 - protein, 12 aa, Homo sapiens
  CDR3 for beta chain variable domain of TCR clone 367491 (TRBV11-2, TRBJ2-1)
CASSPGNNEQFF

SEQ ID NO: 734983 - protein, 13 aa, Homo sapiens
  CDR3 for alpha chain variable domain of TCR clone 367492 (TRAV17, TRAJ5)
CALRGTGRRALTF

SEQ ID NO: 734984 - protein, 15 aa, Homo sapiens
  CDR3 for beta chain variable domain of TCR clone 367492 (TRBV7-9, TRBJ2-3)
CASSPGAGTADTQYF

SEQ ID NO: 734985 - protein, 14 aa, Homo sapiens
  CDR3 for alpha chain variable domain of TCR clone 367493 (TRAV8-1, TRAJ23)
CAVQAYNQGGELIF

SEQ ID NO: 734986 - protein, 13 aa, Homo sapiens
  CDR3 for beta chain variable domain of TCR clone 367493 (TRBV5-1, TRBJ2-7)
CASSLEDNQEQYF

SEQ ID NO: 734987 - protein, 13 aa, Homo sapiens
  CDR3 for alpha chain variable domain of TCR clone 367494 (TRAV21, TRAJ20)
CAVGLRVDYKLSF

SEQ ID NO: 734988 - protein, 16 aa, Homo sapiens
  CDR3 for beta chain variable domain of TCR clone 367494 (TRBV18, TRBJ1-5)
CASSPYRVEGNQPQHF

SEQ ID NO: 734989 - protein, 12 aa, Homo sapiens
  CDR3 for alpha chain variable domain of TCR clone 367495 (TRAV13-1, TRAJ21)
CAAKEGFNKFYC

SEQ ID NO: 734990 - protein, 14 aa, Homo sapiens
  CDR3 for beta chain variable domain of TCR clone 367495 (TRBV5-4, TRBJ1-1)
CASSLDSRRDEAFF

SEQ ID NO: 734991 - protein, 15 aa, Homo sapiens
  CDR3 for alpha chain variable domain of TCR clone 367496 (TRAV8-3, TRAJ40)
CAAPSLGSGTYKYIF

SEQ ID NO: 734992 - protein, 16 aa, Homo sapiens
  CDR3 for beta chain variable domain of TCR clone 367496 (TRBV7-3, TRBJ2-3)
CASSLSGYRPEDTQYC

SEQ ID NO: 734993 - protein, 17 aa, Homo sapiens
  CDR3 for alpha chain variable domain of TCR clone 367497 (TRAV3, TRAJ12)
CAVRDGGRMDSSYKLIF

SEQ ID NO: 734994 - protein, 14 aa, Homo sapiens
  CDR3 for beta chain variable domain of TCR clone 367497 (TRBV7-9, TRBJ1-2)
CAGSRQGANYGYTF

SEQ ID NO: 734995 - protein, 15 aa, Homo sapiens
  CDR3 for alpha chain variable domain of TCR clone 367498 (TRAV12-2, TRAJ50)
CAVNGLGTSYDKVIF

SEQ ID NO: 734996 - protein, 16 aa, Homo sapiens
  CDR3 for beta chain variable domain of TCR clone 367498 (TRBV5-4, TRBJ2-3)
CASQQPGAGGADTQYF

SEQ ID NO: 734997 - protein, 14 aa, Homo sapiens
  CDR3 for alpha chain variable domain of TCR clone 367499 (TRAV12-3, TRAJ10)
SHLPLTGGGNKLTF

SEQ ID NO: 734998 - protein, 16 aa, Homo sapiens
  CDR3 for beta chain variable domain of TCR clone 367499 (TRBV7-8, TRBJ2-6)
CASRVGDSSGANVLTF

SEQ ID NO: 734999 - protein, 10 aa, Homo sapiens
  CDR3 for alpha chain variable domain of TCR clone 367500 (TRAV13-1, TRAJ7)
LIGGDNRLAF

SEQ ID NO: 735000 - protein, 14 aa, Homo sapiens
  CDR3 for beta chain variable domain of TCR clone 367500 (TRBV16, TRBJ1-1)
CASSQAGPNTEAFF

SEQ ID NO: 735001 - protein, 12 aa, Homo sapiens
  CDR3 for alpha chain variable domain of TCR clone 367501 (TRAV8-1, TRAJ26)
CAVNNYGQNFVF

SEQ ID NO: 735002 - protein, 12 aa, Homo sapiens
  CDR3 for beta chain variable domain of TCR clone 367501 (TRBV25-1, TRBJ1-1)
CASSQARTEAFF

SEQ ID NO: 735003 - protein, 13 aa, Homo sapiens
  CDR3 for alpha chain variable domain of TCR clone 367502 (TRAV27, TRAJ41)
CAGEGNSGYALNF

SEQ ID NO: 735004 - protein, 14 aa, Homo sapiens
  CDR3 for beta chain variable domain of TCR clone 367502 (TRBV18, TRBJ2-7)
GASSPRGGAYEQYF

SEQ ID NO: 735005 - protein, 14 aa, Homo sapiens
  CDR3 for alpha chain variable domain of TCR clone 367503 (TRAV16, TRAJ33)
CALSAMDSNYQLIW

SEQ ID NO: 735006 - protein, 16 aa, Homo sapiens
  CDR3 for beta chain variable domain of TCR clone 367503 (TRBV5-1, TRBJ2-2)
CASSSRTGGRTGELFF

SEQ ID NO: 735007 - protein, 13 aa, Homo sapiens
  CDR3 for alpha chain variable domain of TCR clone 367504 (TRAV16, TRAJ29)
CALSSRGNTPLVF

SEQ ID NO: 735008 - protein, 15 aa, Homo sapiens
  CDR3 for beta chain variable domain of TCR clone 367504 (TRBV4-1, TRBJ2-3)
CASSRGQGVPDTQYF

SEQ ID NO: 735009 - protein, 14 aa, Homo sapiens
  CDR3 for alpha chain variable domain of TCR clone 367505 (TRAV1-2, TRAJ8)
CAVREDTGFQKLVF

SEQ ID NO: 735010 - protein, 15 aa, Homo sapiens
  CDR3 for beta chain variable domain of TCR clone 367505 (TRBV6-3, TRBJ2-7)
CASSSPGTVFYEEHF

SEQ ID NO: 735011 - protein, 18 aa, Homo sapiens
  CDR3 for alpha chain variable domain of TCR clone 367506 (TRAV27, TRAJ17)
PLPLCRSTIRAAGNKLTF

SEQ ID NO: 735012 - protein, 16 aa, Homo sapiens
  CDR3 for beta chain variable domain of TCR clone 367506 (TRBV5-7, TRBJ2-5)
CASTLAPAGGRETQYF

SEQ ID NO: 735013 - protein, 11 aa, Homo sapiens
  CDR3 for alpha chain variable domain of TCR clone 367507 (TRAV3, TRAJ21)
CAVGNFNKFYF

SEQ ID NO: 735014 - protein, 16 aa, Homo sapiens
  CDR3 for beta chain variable domain of TCR clone 367507 (TRBV19, TRBJ2-1)
CASSKAGSSSYIEQFF

SEQ ID NO: 735015 - protein, 16 aa, Homo sapiens
  CDR3 for alpha chain variable domain of TCR clone 367508 (TRAV30, TRAJ24)
CGTEIVDADSWGKFHF

SEQ ID NO: 735016 - protein, 16 aa, Homo sapiens
  CDR3 for beta chain variable domain of TCR clone 367508 (TRBV2, TRBJ1-3)
CASSGGAGRSGNTIYF

SEQ ID NO: 735017 - protein, 20 aa, Homo sapiens
  CDR3 for alpha chain variable domain of TCR clone 367509 (TRAV14/DV4, TRAJ22)
CAMREVITLISSGSARQLTF

SEQ ID NO: 735018 - protein, 15 aa, Homo sapiens
  CDR3 for beta chain variable domain of TCR clone 367509 (TRBV9, TRBJ1-5)
CASSVEGGANQPQHF

SEQ ID NO: 735019 - protein, 15 aa, Homo sapiens
  CDR3 for alpha chain variable domain of TCR clone 367510 (TRAV17, TRAJ22)
CATVAPSGSARQLTF

SEQ ID NO: 735020 - protein, 16 aa, Homo sapiens
  CDR3 for beta chain variable domain of TCR clone 367510 (TRBV19, TRBJ2-1)
CASSKAGPSSYNEQFF

SEQ ID NO: 735021 - protein, 14 aa, Homo sapiens
  CDR3 for alpha chain variable domain of TCR clone 367511 (TRAV39, TRAJ33)
CAVDIKNSNYQLIW

SEQ ID NO: 735022 - protein, 13 aa, Homo sapiens
  CDR3 for beta chain variable domain of TCR clone 367511 (TRBV4-2, TRBJ2-1)
CASSPGTYNEQLF

SEQ ID NO: 735023 - protein, 19 aa, Homo sapiens
  CDR3 for alpha chain variable domain of TCR clone 367512 (TRAV29/DV5, TRAJ49)
CSVLLCSKVTVDTGNQFYF

SEQ ID NO: 735024 - protein, 15 aa, Homo sapiens
  CDR3 for beta chain variable domain of TCR clone 367512 (TRBV4-3, TRBJ2-2)
CASSQGGTPTGELFF

SEQ ID NO: 735025 - protein, 18 aa, Homo sapiens
  CDR3 for alpha chain variable domain of TCR clone 367513 (TRAV6, TRAJ37)
PLFSLAFHGSGNTGKLIF

SEQ ID NO: 735026 - protein, 18 aa, Homo sapiens
  CDR3 for beta chain variable domain of TCR clone 367513 (TRBV4-3, TRBJ1-2)
CASSQDGQSAPADYGYTV

SEQ ID NO: 735027 - protein, 13 aa, Homo sapiens
  CDR3 for alpha chain variable domain of TCR clone 367514 (TRAV20, TRAJ31)
CAVQAIGGARLMF

SEQ ID NO: 735028 - protein, 13 aa, Homo sapiens
  CDR3 for beta chain variable domain of TCR clone 367514 (TRBV7-9, TRBJ1-2)
CASSLKQNYGYTF

SEQ ID NO: 735029 - protein, 10 aa, Homo sapiens
  CDR3 for alpha chain variable domain of TCR clone 367515 (TRAV36/DV7, TRAJ31)
CAVGEARLMF

SEQ ID NO: 735030 - protein, 13 aa, Homo sapiens
  CDR3 for beta chain variable domain of TCR clone 367515 (TRBV20-1, TRBJ1-1)
CSARGGGNTEAFF

SEQ ID NO: 735031 - protein, 12 aa, Homo sapiens
  CDR3 for alpha chain variable domain of TCR clone 367516 (TRAV21, TRAJ3)
CCFYSSASKITF

SEQ ID NO: 735032 - protein, 16 aa, Homo sapiens
  CDR3 for beta chain variable domain of TCR clone 367516 (TRBV19, TRBJ2-1)
CASSKAGPSPYNEQFF

SEQ ID NO: 735033 - protein, 16 aa, Homo sapiens
  CDR3 for alpha chain variable domain of TCR clone 367517 (TRAV12-1, TRAJ53)
CVVTSIAGGSNYKLTF

SEQ ID NO: 735034 - protein, 17 aa, Homo sapiens
  CDR3 for beta chain variable domain of TCR clone 367517 (TRBV7-3, TRBJ2-3)
CASSPRGQGYGTDTQYF

SEQ ID NO: 735035 - protein, 13 aa, Homo sapiens
  CDR3 for alpha chain variable domain of TCR clone 367518 (TRAV17, TRAJ9)
CATDYTGGFKTIF

SEQ ID NO: 735036 - protein, 11 aa, Homo sapiens
  CDR3 for beta chain variable domain of TCR clone 367518 (TRBV23-1, TRBJ2-7)
SSSGTGLEQYF

SEQ ID NO: 735037 - protein, 15 aa, Homo sapiens
  CDR3 for alpha chain variable domain of TCR clone 367519 (TRAV8-2, TRAJ40)
CVVMGTTSGTYKYIF

SEQ ID NO: 735038 - protein, 16 aa, Homo sapiens
  CDR3 for beta chain variable domain of TCR clone 367519 (TRBV7-3, TRBJ2-1)
CASSLEGYRSYNEQFF

SEQ ID NO: 735039 - protein, 11 aa, Homo sapiens
  CDR3 for alpha chain variable domain of TCR clone 367520 (TRAV2, TRAJ13)
CASGGYQKVTF

SEQ ID NO: 735040 - protein, 15 aa, Homo sapiens
  CDR3 for beta chain variable domain of TCR clone 367520 (TRBV9, TRBJ1-6)
RASSVAGTGDSPLHF

SEQ ID NO: 735041 - protein, 14 aa, Homo sapiens
  CDR3 for alpha chain variable domain of TCR clone 367521 (TRAV30, TRAJ33)
CGTVAPRSSSQLIW

SEQ ID NO: 735042 - protein, 14 aa, Homo sapiens
  CDR3 for beta chain variable domain of TCR clone 367521 (TRBV19, TRBJ2-1)
CASPTFVLSGEQFF

SEQ ID NO: 735043 - protein, 12 aa, Homo sapiens
  CDR3 for alpha chain variable domain of TCR clone 367522 (TRAV2, TRAJ9)
CAVGAGGFKTIF

SEQ ID NO: 735044 - protein, 11 aa, Homo sapiens
  CDR3 for beta chain variable domain of TCR clone 367522 (TRBV13, TRBJ2-2)
CASSPRTGEHR

SEQ ID NO: 735045 - protein, 19 aa, Homo sapiens
  CDR3 for alpha chain variable domain of TCR clone 367523 (TRAV1-2, TRAJ26)
CLLPLCCERPDNYGLNFVF

SEQ ID NO: 735046 - protein, 15 aa, Homo sapiens
  CDR3 for beta chain variable domain of TCR clone 367523 (TRBV27, TRBJ2-1)
CASSNGGGSSNEQFF

SEQ ID NO: 735047 - protein, 14 aa, Homo sapiens
  CDR3 for alpha chain variable domain of TCR clone 367524 (TRAV12-2, TRAJ13)
CAVKKTGGYQKVTF

SEQ ID NO: 735048 - protein, 14 aa, Homo sapiens
  CDR3 for beta chain variable domain of TCR clone 367524 (TRBV7-9, TRBJ2-5)
CASSPAQDQETQYF

SEQ ID NO: 735049 - protein, 13 aa, Homo sapiens
  CDR3 for alpha chain variable domain of TCR clone 367525 (TRAV2, TRAJ29)
CAAGNSGNTPLVF

SEQ ID NO: 735050 - protein, 16 aa, Homo sapiens
  CDR3 for beta chain variable domain of TCR clone 367525 (TRBV7-2, TRBJ1-2)
CASSSNQDRRGHGYTF

SEQ ID NO: 735051 - protein, 18 aa, Homo sapiens
  CDR3 for alpha chain variable domain of TCR clone 367526 (TRAV13-1, TRAJ52)
CAAKNPNAGGTSYGKLTF

SEQ ID NO: 735052 - protein, 12 aa, Homo sapiens
  CDR3 for beta chain variable domain of TCR clone 367526 (TRBV20-1, TRBJ2-1)
CSAQYTYNEQFF

SEQ ID NO: 735053 - protein, 11 aa, Homo sapiens
  CDR3 for alpha chain variable domain of TCR clone 367527 (TRAV8-3, TRAJ15)
CAVGPGTALIF

SEQ ID NO: 735054 - protein, 20 aa, Homo sapiens
  CDR3 for beta chain variable domain of TCR clone 367527 (TRBV18, TRBJ2-3)
CASSYTSGAAVAQIRSILAQ

SEQ ID NO: 735055 - protein, 18 aa, Homo sapiens
  CDR3 for alpha chain variable domain of TCR clone 367528 (TRAV12-3, TRAJ52)
YAMSVGGAGGTSYGKLTF

SEQ ID NO: 735056 - protein, 15 aa, Homo sapiens
  CDR3 for beta chain variable domain of TCR clone 367528 (TRBV28, TRBJ2-5)
CASSPPWSYQETQYF

SEQ ID NO: 735057 - protein, 10 aa, Homo sapiens
  CDR3 for alpha chain variable domain of TCR clone 367529 (TRAV36/DV7, TRAJ49)
CALTGNQFSF

SEQ ID NO: 735058 - protein, 13 aa, Homo sapiens
  CDR3 for beta chain variable domain of TCR clone 367529 (TRBV12-4, TRBJ2-7)
CASSPTETYEQYF

SEQ ID NO: 735059 - protein, 11 aa, Homo sapiens
  CDR3 for alpha chain variable domain of TCR clone 367530 (TRAV12-2, TRAJ31)
CAVSNNARLMF

SEQ ID NO: 735060 - protein, 15 aa, Homo sapiens
  CDR3 for beta chain variable domain of TCR clone 367530 (TRBV6-3, TRBJ2-7)
CASSSPGTVFYEQYF

SEQ ID NO: 735061 - protein, 12 aa, Homo sapiens
  CDR3 for alpha chain variable domain of TCR clone 367531 (TRAV12-3, TRAJ17)
CAMTLTGNKLTF

SEQ ID NO: 735062 - protein, 14 aa, Homo sapiens
  CDR3 for beta chain variable domain of TCR clone 367531 (TRBV19, TRBJ2-7)
CASSIFAGTYEQYF

SEQ ID NO: 735063 - protein, 14 aa, Homo sapiens
  CDR3 for alpha chain variable domain of TCR clone 367532 (TRAV29/DV5, TRAJ34)
CAASASGNTDKLIF

SEQ ID NO: 735064 - protein, 12 aa, Homo sapiens
  CDR3 for beta chain variable domain of TCR clone 367532 (TRBV11-2, TRBJ2-2)
CASSLPTGELFF

SEQ ID NO: 735065 - protein, 15 aa, Homo sapiens
  CDR3 for alpha chain variable domain of TCR clone 367533 (TRAV27, TRAJ38)
CAARRNAGNNRKLIW

SEQ ID NO: 735066 - protein, 17 aa, Homo sapiens
  CDR3 for beta chain variable domain of TCR clone 367533 (TRBV4-1, TRBJ2-5)
CASSQDLTGGPIETQYF

SEQ ID NO: 735067 - protein, 12 aa, Homo sapiens
  CDR3 for alpha chain variable domain of TCR clone 367534 (TRAV13-1, TRAJ21)
CAAKEGFNKFYF

SEQ ID NO: 735068 - protein, 15 aa, Homo sapiens
  CDR3 for beta chain variable domain of TCR clone 367534 (TRBV7-7, TRBJ2-5)
CASSQLERAEETQYV

SEQ ID NO: 735069 - protein, 15 aa, Homo sapiens
  CDR3 for alpha chain variable domain of TCR clone 367535 (TRAV25, TRAJ53)
CPTSNSGGSNYKLTF

SEQ ID NO: 735070 - protein, 13 aa, Homo sapiens
  CDR3 for beta chain variable domain of TCR clone 367535 (TRBV4-1, TRBJ2-1)
CASSQAGGDEQFF

SEQ ID NO: 735071 - protein, 14 aa, Homo sapiens
  CDR3 for alpha chain variable domain of TCR clone 367536 (TRAV30, TRAJ26)
CGTEIVSYGQNFVF

SEQ ID NO: 735072 - protein, 14 aa, Homo sapiens
  CDR3 for beta chain variable domain of TCR clone 367536 (TRBV7-2, TRBJ2-7)
CASRSQGAAYEQYF

SEQ ID NO: 735073 - protein, 17 aa, Homo sapiens
  CDR3 for alpha chain variable domain of TCR clone 367537 (TRAV26-1, TRAJ58)
CIVRVGAEGTRGSRLTF

SEQ ID NO: 735074 - protein, 13 aa, Homo sapiens
  CDR3 for beta chain variable domain of TCR clone 367537 (TRBV12-5, TRBJ1-2)
CASGVRTGNGYTF

SEQ ID NO: 735075 - protein, 10 aa, Homo sapiens
  CDR3 for alpha chain variable domain of TCR clone 367538 (TRAV38-2/DV8, TRAJ40)
CASGTYKYIF

SEQ ID NO: 735076 - protein, 14 aa, Homo sapiens
  CDR3 for beta chain variable domain of TCR clone 367538 (TRBV7-9, TRBJ2-1)
CASSPRDSIYEQFF

SEQ ID NO: 735077 - protein, 14 aa, Homo sapiens
  CDR3 for alpha chain variable domain of TCR clone 367539 (TRAV26-1, TRAJ44)
CIVRPTGTASKLTF

SEQ ID NO: 735078 - protein, 15 aa, Homo sapiens
  CDR3 for beta chain variable domain of TCR clone 367539 (TRBV20-1, TRBJ2-7)
CSARDRVSGMDEQYF

SEQ ID NO: 735079 - protein, 17 aa, Homo sapiens
  CDR3 for alpha chain variable domain of TCR clone 367540 (TRAV27, TRAJ42)
CAERVIYYGGSQGNFIF

SEQ ID NO: 735080 - protein, 14 aa, Homo sapiens
  CDR3 for beta chain variable domain of TCR clone 367540 (TRBV6-6, TRBJ2-3)
CASRLQREADTQYF

SEQ ID NO: 735081 - protein, 16 aa, Homo sapiens
  CDR3 for alpha chain variable domain of TCR clone 367541 (TRAV27, TRAJ34)
CAGGGLGDYTTDKLIF

SEQ ID NO: 735082 - protein, 15 aa, Homo sapiens
  CDR3 for beta chain variable domain of TCR clone 367541 (TRBV9, TRBJ1-4)
CASSVGESTNEKLFF

SEQ ID NO: 735083 - protein, 13 aa, Homo sapiens
  CDR3 for alpha chain variable domain of TCR clone 367542 (TRAV13-1, TRAJ49)
CAAMLYTGNQFYF

SEQ ID NO: 735084 - protein, 12 aa, Homo sapiens
  CDR3 for beta chain variable domain of TCR clone 367542 (TRBV11-2, TRBJ2-2)
CASSLGGGELFF

SEQ ID NO: 735085 - protein, 15 aa, Homo sapiens
  CDR3 for alpha chain variable domain of TCR clone 367543 (TRAV8-3, TRAJ45)
CASSNSVGGADGLTF

SEQ ID NO: 735086 - protein, 17 aa, Homo sapiens
  CDR3 for beta chain variable domain of TCR clone 367543 (TRBV7-8, TRBJ1-2)
CASSLRPLQGHLYGYTF

SEQ ID NO: 735087 - protein, 14 aa, Homo sapiens
  CDR3 for alpha chain variable domain of TCR clone 367544 (TRAV2, TRAJ9)
CAVDPNTGGFKTIS

SEQ ID NO: 735088 - protein, 13 aa, Homo sapiens
  CDR3 for beta chain variable domain of TCR clone 367544 (TRBV20-1, TRBJ2-1)
CSASTGTSNEQFF

SEQ ID NO: 735089 - protein, 14 aa, Homo sapiens
  CDR3 for alpha chain variable domain of TCR clone 367545 (TRAV8-4, TRAJ13)
CAVTLSGGYQKVTF

SEQ ID NO: 735090 - protein, 14 aa, Homo sapiens
  CDR3 for beta chain variable domain of TCR clone 367545 (TRBV7-2, TRBJ1-2)
CASSQTGSTYGYTF

SEQ ID NO: 735091 - protein, 13 aa, Homo sapiens
  CDR3 for alpha chain variable domain of TCR clone 367546 (TRAV8-3, TRAJ47)
WAVSMEYGNKLVF

SEQ ID NO: 735092 - protein, 14 aa, Homo sapiens
  CDR3 for beta chain variable domain of TCR clone 367546 (TRBV2, TRBJ1-5)
CASSGTGFNQPQHF

SEQ ID NO: 735093 - protein, 15 aa, Homo sapiens
  CDR3 for alpha chain variable domain of TCR clone 367547 (TRAV14/DV4, TRAJ20)
CAMRPHVANDYKPSF

SEQ ID NO: 735094 - protein, 13 aa, Homo sapiens
  CDR3 for beta chain variable domain of TCR clone 367547 (TRBV28, TRBJ2-7)
CASSNSGNYEQYF

SEQ ID NO: 735095 - protein, 14 aa, Homo sapiens
  CDR3 for alpha chain variable domain of TCR clone 367548 (TRAV2, TRAJ9)
CAVEDRSGGFKNIF

SEQ ID NO: 735096 - protein, 18 aa, Homo sapiens
  CDR3 for beta chain variable domain of TCR clone 367548 (TRBV7-3, TRBJ2-5)
CASSFRGGGDPVLRARHA

SEQ ID NO: 735097 - protein, 14 aa, Homo sapiens
  CDR3 for alpha chain variable domain of TCR clone 367549 (TRAV1-2, TRAJ16)
CAVNRCSDGQKLLF

SEQ ID NO: 735098 - protein, 15 aa, Homo sapiens
  CDR3 for beta chain variable domain of TCR clone 367549 (TRBV13, TRBJ1-5)
CASSRTGRGHQPQHF

SEQ ID NO: 735099 - protein, 22 aa, Homo sapiens
  CDR3 for alpha chain variable domain of TCR clone 367550 (TRAV21, )
CAVRQDAGNNHTQNPDPAVYQL

SEQ ID NO: 735100 - protein, 16 aa, Homo sapiens
  CDR3 for beta chain variable domain of TCR clone 367550 (TRBV4-2, TRBJ1-1)
CASRPLDGGGNTEAFF

SEQ ID NO: 735101 - protein, 14 aa, Homo sapiens
  CDR3 for alpha chain variable domain of TCR clone 367551 (TRAV41, TRAJ48)
CAVISNFGNEELTF

SEQ ID NO: 735102 - protein, 15 aa, Homo sapiens
  CDR3 for beta chain variable domain of TCR clone 367551 (TRBV11-3, TRBJ2-2)
CASSYFSTGTGELFF

SEQ ID NO: 735103 - protein, 11 aa, Homo sapiens
  CDR3 for alpha chain variable domain of TCR clone 367552 (TRAV12-3, TRAJ43)
CAMSVSNDMRF

SEQ ID NO: 735104 - protein, 14 aa, Homo sapiens
  CDR3 for beta chain variable domain of TCR clone 367552 (TRBV2, TRBJ2-3)
CASSLEAGTDTQYF

SEQ ID NO: 735105 - protein, 14 aa, Homo sapiens
  CDR3 for alpha chain variable domain of TCR clone 367553 (TRAV1-2, TRAJ8)
CAVREDTGFQKLVF

SEQ ID NO: 735106 - protein, 13 aa, Homo sapiens
  CDR3 for beta chain variable domain of TCR clone 367553 (TRBV25-1, TRBJ2-5)
CASSESGRETQYF

SEQ ID NO: 735107 - protein, 13 aa, Homo sapiens
  CDR3 for alpha chain variable domain of TCR clone 367554 (TRAV13-1, TRAJ53)
CAASKGSNYKLTF

SEQ ID NO: 735108 - protein, 14 aa, Homo sapiens
  CDR3 for beta chain variable domain of TCR clone 367554 (TRBV19, TRBJ2-7)
CASNFRDTFTGMYF

SEQ ID NO: 735109 - protein, 11 aa, Homo sapiens
  CDR3 for alpha chain variable domain of TCR clone 367555 (TRAV3, TRAJ21)
CAVGNFNKFYF

SEQ ID NO: 735110 - protein, 14 aa, Homo sapiens
  CDR3 for beta chain variable domain of TCR clone 367555 (TRBV4-3, TRBJ2-2)
CASSQGHVTGELFF

SEQ ID NO: 735111 - protein, 16 aa, Homo sapiens
  CDR3 for alpha chain variable domain of TCR clone 367556 (TRAV12-1, TRAJ43)
CVVNPHRFGAGTRLTL

SEQ ID NO: 735112 - protein, 13 aa, Homo sapiens
  CDR3 for beta chain variable domain of TCR clone 367556 (TRBV12-4, TRBJ1-2)
CASSSGPNYGYTF

SEQ ID NO: 735113 - protein, 15 aa, Homo sapiens
  CDR3 for alpha chain variable domain of TCR clone 367557 (TRAV25, TRAJ52)
CAGRPGGTSYGKLTL

SEQ ID NO: 735114 - protein, 15 aa, Homo sapiens
  CDR3 for beta chain variable domain of TCR clone 367557 (TRBV7-8, TRBJ2-1)
CASSLADSLYNEQFF

SEQ ID NO: 735115 - protein, 18 aa, Homo sapiens
  CDR3 for alpha chain variable domain of TCR clone 367558 (TRAV26-2, TRAJ54)
CILRDVEVGIQGAQKLVF

SEQ ID NO: 735116 - protein, 13 aa, Homo sapiens
  CDR3 for beta chain variable domain of TCR clone 367558 (TRBV19, TRBJ2-5)
CASSIHSQETQYF

SEQ ID NO: 735117 - protein, 15 aa, Homo sapiens
  CDR3 for alpha chain variable domain of TCR clone 367559 (TRAV12-2, TRAJ43)
CAFDMRFGAGTRLTV

SEQ ID NO: 735118 - protein, 14 aa, Homo sapiens
  CDR3 for beta chain variable domain of TCR clone 367559 (TRBV2, TRBJ2-5)
CASKRDGTTETQYF

SEQ ID NO: 735119 - protein, 14 aa, Homo sapiens
  CDR3 for alpha chain variable domain of TCR clone 367560 (TRAV23/DV6, TRAJ53)
CAARSGGSNYKLTF

SEQ ID NO: 735120 - protein, 17 aa, Homo sapiens
  CDR3 for beta chain variable domain of TCR clone 367560 (TRBV4-2, TRBJ1-1)
CASTQFGGGSGNTEAFF

SEQ ID NO: 735121 - protein, 16 aa, Homo sapiens
  CDR3 for alpha chain variable domain of TCR clone 367561 (TRAV23/DV6, TRAJ10)
CAASRLLYPREEETNS

SEQ ID NO: 735122 - protein, 15 aa, Homo sapiens
  CDR3 for beta chain variable domain of TCR clone 367561 (TRBV20-1, TRBJ2-1)
CSAEGGLLAGDEQFF

SEQ ID NO: 735123 - protein, 14 aa, Homo sapiens
  CDR3 for alpha chain variable domain of TCR clone 367562 (TRAV8-4, TRAJ34)
CAVSDPGDTDKLIF

SEQ ID NO: 735124 - protein, 16 aa, Homo sapiens
  CDR3 for beta chain variable domain of TCR clone 367562 (TRBV28, TRBJ2-7)
CASSPWVATGDLSQYF

SEQ ID NO: 735125 - protein, 14 aa, Homo sapiens
  CDR3 for alpha chain variable domain of TCR clone 367563 (TRAV12-3, TRAJ10)
SHLPLTGGGNKLTF

SEQ ID NO: 735126 - protein, 12 aa, Homo sapiens
  CDR3 for beta chain variable domain of TCR clone 367563 (TRBV19, TRBJ1-1)
CASLTGNTEAFF

SEQ ID NO: 735127 - protein, 16 aa, Homo sapiens
  CDR3 for alpha chain variable domain of TCR clone 367564 (TRAV3, TRAJ37)
CAVRGKGSGNTGKLIF

SEQ ID NO: 735128 - protein, 15 aa, Homo sapiens
  CDR3 for beta chain variable domain of TCR clone 367564 (TRBV12-4, TRBJ2-1)
CASSLLATGNNEQFF

SEQ ID NO: 735129 - protein, 14 aa, Homo sapiens
  CDR3 for alpha chain variable domain of TCR clone 367565 (TRAV17, TRAJ12)
CATDEKDSSYKLIF

SEQ ID NO: 735130 - protein, 15 aa, Homo sapiens
  CDR3 for beta chain variable domain of TCR clone 367565 (TRBV7-3, TRBJ2-1)
CASSPTGGSRNEQFF

SEQ ID NO: 735131 - protein, 12 aa, Homo sapiens
  CDR3 for alpha chain variable domain of TCR clone 367566 (TRAV27, TRAJ35)
CAGADFGNVLHC

SEQ ID NO: 735132 - protein, 18 aa, Homo sapiens
  CDR3 for beta chain variable domain of TCR clone 367566 (TRBV25-1, TRBJ1-2)
CASSGLQNGQGLIFGYTF

SEQ ID NO: 735133 - protein, 16 aa, Homo sapiens
  CDR3 for alpha chain variable domain of TCR clone 367567 (TRAV26-1, TRAJ47)
CIVRVVLSQYGNKLVF

SEQ ID NO: 735134 - protein, 16 aa, Homo sapiens
  CDR3 for beta chain variable domain of TCR clone 367567 (TRBV5-1, TRBJ2-1)
CGSSFGVSGSYNEQFF

SEQ ID NO: 735135 - protein, 15 aa, Homo sapiens
  CDR3 for alpha chain variable domain of TCR clone 367568 (TRAV12-2, TRAJ53)
CAVNGGGGSNYKLTF

SEQ ID NO: 735136 - protein, 17 aa, Homo sapiens
  CDR3 for beta chain variable domain of TCR clone 367568 (TRBV7-3, TRBJ2-3)
RASSLMKRMRGADTHYF

SEQ ID NO: 735137 - protein, 16 aa, Homo sapiens
  CDR3 for alpha chain variable domain of TCR clone 367569 (TRAV1-2, TRAJ10)
CAVRGVPTGGGNKLTF

SEQ ID NO: 735138 - protein, 12 aa, Homo sapiens
  CDR3 for beta chain variable domain of TCR clone 367569 (TRBV11-2, TRBJ2-1)
CASSPGNNEQFF

SEQ ID NO: 735139 - protein, 12 aa, Homo sapiens
  CDR3 for alpha chain variable domain of TCR clone 367570 (TRAV8-3, TRAJ20)
CAVGATDYKLSF

SEQ ID NO: 735140 - protein, 16 aa, Homo sapiens
  CDR3 for beta chain variable domain of TCR clone 367570 (TRBV20-1, TRBJ1-2)
CSASMGQGVANYGYTF

SEQ ID NO: 735141 - protein, 13 aa, Homo sapiens
  CDR3 for alpha chain variable domain of TCR clone 367571 (TRAV21, TRAJ27)
CAARPGNAGKSTF

SEQ ID NO: 735142 - protein, 13 aa, Homo sapiens
  CDR3 for beta chain variable domain of TCR clone 367571 (TRBV7-3, TRBJ1-1)
CASCQDWGAEAFF

SEQ ID NO: 735143 - protein, 13 aa, Homo sapiens
  CDR3 for alpha chain variable domain of TCR clone 367572 (TRAV5, TRAJ30)
CAEIANRGDKIIF

SEQ ID NO: 735144 - protein, 14 aa, Homo sapiens
  CDR3 for beta chain variable domain of TCR clone 367572 (TRBV4-1, TRBJ2-2)
CASSQAVNTGELFF

SEQ ID NO: 735145 - protein, 14 aa, Homo sapiens
  CDR3 for alpha chain variable domain of TCR clone 367573 (TRAV26-1, TRAJ38)
CIADNAGNNRKLIW

SEQ ID NO: 735146 - protein, 15 aa, Homo sapiens
  CDR3 for beta chain variable domain of TCR clone 367573 (TRBV10-3, TRBJ2-3)
CAISLTSGGTDTQYF

SEQ ID NO: 735147 - protein, 10 aa, Homo sapiens
  CDR3 for alpha chain variable domain of TCR clone 367574 (TRAV12-3, TRAJ49)
CAMNDDQFYF

SEQ ID NO: 735148 - protein, 12 aa, Homo sapiens
  CDR3 for beta chain variable domain of TCR clone 367574 (TRBV5-1, TRBJ1-2)
CASSLDSYGYTF

SEQ ID NO: 735149 - protein, 13 aa, Homo sapiens
  CDR3 for alpha chain variable domain of TCR clone 367575 (TRAV27, TRAJ45)
CRSSGGGADGLTF

SEQ ID NO: 735150 - protein, 15 aa, Homo sapiens
  CDR3 for beta chain variable domain of TCR clone 367575 (TRBV7-9, TRBJ1-5)
CASSQGHQPNQPQHF

SEQ ID NO: 735151 - protein, 13 aa, Homo sapiens
  CDR3 for alpha chain variable domain of TCR clone 367576 (TRAV25, TRAJ48)
CAGPKGGNEKLTF

SEQ ID NO: 735152 - protein, 15 aa, Homo sapiens
  CDR3 for beta chain variable domain of TCR clone 367576 (TRBV9, TRBJ2-6)
CAGSVLWNGANVLTF

SEQ ID NO: 735153 - protein, 13 aa, Homo sapiens
  CDR3 for alpha chain variable domain of TCR clone 367577 (TRAV26-2, TRAJ47)
CIRLMEYGNKMVF

SEQ ID NO: 735154 - protein, 15 aa, Homo sapiens
  CDR3 for beta chain variable domain of TCR clone 367577 (TRBV7-9, TRBJ2-7)
CASSLALAEAYEQYF

SEQ ID NO: 735155 - protein, 14 aa, Homo sapiens
  CDR3 for alpha chain variable domain of TCR clone 367578 (TRAV12-2, TRAJ17)
CAGLFKAAGNKLTF

SEQ ID NO: 735156 - protein, 13 aa, Homo sapiens
  CDR3 for beta chain variable domain of TCR clone 367578 (TRBV19, TRBJ1-2)
CASSQGQVYGYTF

SEQ ID NO: 735157 - protein, 17 aa, Homo sapiens
  CDR3 for alpha chain variable domain of TCR clone 367579 (TRAV26-1, TRAJ37)
CIVRVIPVSSNTGKLIF

SEQ ID NO: 735158 - protein, 11 aa, Homo sapiens
  CDR3 for beta chain variable domain of TCR clone 367579 (TRBV29-1, TRBJ2-5)
CSEDRTGTQYF

SEQ ID NO: 735159 - protein, 15 aa, Homo sapiens
  CDR3 for alpha chain variable domain of TCR clone 367580 (TRAV1-1, TRAJ20)
CAVRGNVANDYKLSF

SEQ ID NO: 735160 - protein, 12 aa, Homo sapiens
  CDR3 for beta chain variable domain of TCR clone 367580 (TRBV7-8, TRBJ2-7)
CASSLGDREQYF

SEQ ID NO: 735161 - protein, 18 aa, Homo sapiens
  CDR3 for alpha chain variable domain of TCR clone 367581 (TRAV16, TRAJ26)
CALTRWSEFCLWSRNQIF

SEQ ID NO: 735162 - protein, 15 aa, Homo sapiens
  CDR3 for beta chain variable domain of TCR clone 367581 (TRBV4-2, TRBJ1-1)
CAISQLQGASAEAFF

SEQ ID NO: 735163 - protein, 17 aa, Homo sapiens
  CDR3 for alpha chain variable domain of TCR clone 367582 (TRAV20, TRAJ28)
CAVQEGYSGAESYQLTF

SEQ ID NO: 735164 - protein, 15 aa, Homo sapiens
  CDR3 for beta chain variable domain of TCR clone 367582 (TRBV7-2, TRBJ2-7)
CASSLSSGRTYEQYF

SEQ ID NO: 735165 - protein, 15 aa, Homo sapiens
  CDR3 for alpha chain variable domain of TCR clone 367583 (TRAV38-1, TRAJ37)
CAFIHGSGNTGKQIF

SEQ ID NO: 735166 - protein, 12 aa, Homo sapiens
  CDR3 for beta chain variable domain of TCR clone 367583 (TRBV7-9, TRBJ2-7)
CASSFGSYEQCF

SEQ ID NO: 735167 - protein, 12 aa, Homo sapiens
  CDR3 for alpha chain variable domain of TCR clone 367584 (TRAV8-3, TRAJ26)
CAGDNYGQNFLF

SEQ ID NO: 735168 - protein, 11 aa, Homo sapiens
  CDR3 for beta chain variable domain of TCR clone 367584 (TRBV29-1, TRBJ2-5)
CSEDRTGTQYF

SEQ ID NO: 735169 - protein, 14 aa, Homo sapiens
  CDR3 for alpha chain variable domain of TCR clone 367585 (TRAV23/DV6, TRAJ13)
CAASETGGYQKVTF

SEQ ID NO: 735170 - protein, 13 aa, Homo sapiens
  CDR3 for beta chain variable domain of TCR clone 367585 (TRBV7-6, TRBJ1-2)
CASSLVADYGYTF

SEQ ID NO: 735171 - protein, 15 aa, Homo sapiens
  CDR3 for alpha chain variable domain of TCR clone 367586 (TRAV3, TRAJ20)
CAVRDIKLSDYKLSF

SEQ ID NO: 735172 - protein, 12 aa, Homo sapiens
  CDR3 for beta chain variable domain of TCR clone 367586 (TRBV11-2, TRBJ2-5)
CASSLDTQTQYF

SEQ ID NO: 735173 - protein, 14 aa, Homo sapiens
  CDR3 for alpha chain variable domain of TCR clone 367587 (TRAV9-2, TRAJ39)
CALYIYNAGNMFTF

SEQ ID NO: 735174 - protein, 14 aa, Homo sapiens
  CDR3 for beta chain variable domain of TCR clone 367587 (TRBV7-2, TRBJ2-7)
CASSPKTSFYEQYF

SEQ ID NO: 735175 - protein, 15 aa, Homo sapiens
  CDR3 for alpha chain variable domain of TCR clone 367588 (TRAV21, TRAJ53)
CATLNSGGSNYKLTF

SEQ ID NO: 735176 - protein, 14 aa, Homo sapiens
  CDR3 for beta chain variable domain of TCR clone 367588 (TRBV7-2, TRBJ2-3)
CASSQTGSSYTQYF

SEQ ID NO: 735177 - protein, 13 aa, Homo sapiens
  CDR3 for alpha chain variable domain of TCR clone 367589 (TRAV21, TRAJ27)
CAARPGNAGKSTF

SEQ ID NO: 735178 - protein, 16 aa, Homo sapiens
  CDR3 for beta chain variable domain of TCR clone 367589 (TRBV5-1, TRBJ2-5)
CASSLRRTSGQETQYF

SEQ ID NO: 735179 - protein, 15 aa, Homo sapiens
  CDR3 for alpha chain variable domain of TCR clone 367590 (TRAV3, TRAJ22)
CAVRDRGGSARQLAF

SEQ ID NO: 735180 - protein, 13 aa, Homo sapiens
  CDR3 for beta chain variable domain of TCR clone 367590 (TRBV12-4, TRBJ1-2)
CASSLRQGKGYTF

SEQ ID NO: 735181 - protein, 14 aa, Homo sapiens
  CDR3 for alpha chain variable domain of TCR clone 367591 (TRAV20, TRAJ42)
CAVQGWRSQGNLIF

SEQ ID NO: 735182 - protein, 14 aa, Homo sapiens
  CDR3 for beta chain variable domain of TCR clone 367591 (TRBV19, TRBJ2-1)
CASPTFVLSGEQFF

SEQ ID NO: 735183 - protein, 15 aa, Homo sapiens
  CDR3 for alpha chain variable domain of TCR clone 367592 (TRAV4, TRAJ12)
CLVGDLMDSSYKLIF

SEQ ID NO: 735184 - protein, 14 aa, Homo sapiens
  CDR3 for beta chain variable domain of TCR clone 367592 (TRBV7-2, TRBJ1-1)
CASSHRQGRTEAFI

SEQ ID NO: 735185 - protein, 14 aa, Homo sapiens
  CDR3 for alpha chain variable domain of TCR clone 367593 (TRAV29/DV5, TRAJ36)
CAARRKTGANNLFL

SEQ ID NO: 735186 - protein, 15 aa, Homo sapiens
  CDR3 for beta chain variable domain of TCR clone 367593 (TRBV2, TRBJ2-7)
CASSEGLAWSYEQYF

SEQ ID NO: 735187 - protein, 12 aa, Homo sapiens
  CDR3 for alpha chain variable domain of TCR clone 367594 (TRAV13-1, TRAJ15)
CAASQAGTALIF

SEQ ID NO: 735188 - protein, 14 aa, Homo sapiens
  CDR3 for beta chain variable domain of TCR clone 367594 (TRBV7-8, TRBJ1-5)
CASSVGAFNQPQHF

SEQ ID NO: 735189 - protein, 15 aa, Homo sapiens
  CDR3 for alpha chain variable domain of TCR clone 367595 (TRAV26-2, TRAJ26)
CILRDFDNYSQNFVF

SEQ ID NO: 735190 - protein, 14 aa, Homo sapiens
  CDR3 for beta chain variable domain of TCR clone 367595 (TRBV29-1, TRBJ2-5)
CSFWTPYAGETQYL

SEQ ID NO: 735191 - protein, 18 aa, Homo sapiens
  CDR3 for alpha chain variable domain of TCR clone 367596 (TRAV21, TRAJ52)
CAVRPSPAGCTSYGKLTF

SEQ ID NO: 735192 - protein, 13 aa, Homo sapiens
  CDR3 for beta chain variable domain of TCR clone 367596 (TRBV10-3, TRBJ2-7)
CASKLAVNYEQYF

SEQ ID NO: 735193 - protein, 11 aa, Homo sapiens
  CDR3 for alpha chain variable domain of TCR clone 367597 (TRAV21, TRAJ27)
CAVRMQANQPL

SEQ ID NO: 735194 - protein, 16 aa, Homo sapiens
  CDR3 for beta chain variable domain of TCR clone 367597 (TRBV3-1, TRBJ2-7)
CASSQGATWVAYEQYF

SEQ ID NO: 735195 - protein, 14 aa, Homo sapiens
  CDR3 for alpha chain variable domain of TCR clone 367598 (TRAV3, TRAJ21)
CAVESRANFNKFYF

SEQ ID NO: 735196 - protein, 12 aa, Homo sapiens
  CDR3 for beta chain variable domain of TCR clone 367598 (TRBV6-3, TRBJ2-7)
CASSLTPYEQYF

SEQ ID NO: 735197 - protein, 14 aa, Homo sapiens
  CDR3 for alpha chain variable domain of TCR clone 367599 (TRAV1-2, TRAJ8)
CAVREDTGFPKLVF

SEQ ID NO: 735198 - protein, 14 aa, Homo sapiens
  CDR3 for beta chain variable domain of TCR clone 367599 (TRBV11-2, TRBJ2-3)
CASSRLARTDTQYF

SEQ ID NO: 735199 - protein, 14 aa, Homo sapiens
  CDR3 for alpha chain variable domain of TCR clone 367600 (TRAV17, TRAJ57)
CATDPQGGSEKLVF

SEQ ID NO: 735200 - protein, 15 aa, Homo sapiens
  CDR3 for beta chain variable domain of TCR clone 367600 (TRBV6-1, TRBJ2-1)
CASSELRGQYNEQFF

SEQ ID NO: 735201 - protein, 14 aa, Homo sapiens
  CDR3 for alpha chain variable domain of TCR clone 367601 (TRAV4, TRAJ37)
TGGEGSSNTGKLIF

SEQ ID NO: 735202 - protein, 15 aa, Homo sapiens
  CDR3 for beta chain variable domain of TCR clone 367601 (TRBV9, TRBJ1-6)
CASSVAGTGDSPLHF

SEQ ID NO: 735203 - protein, 16 aa, Homo sapiens
  CDR3 for alpha chain variable domain of TCR clone 367602 (TRAV23/DV6, TRAJ57)
CSKLSLSQGGSEKLVF

SEQ ID NO: 735204 - protein, 14 aa, Homo sapiens
  CDR3 for beta chain variable domain of TCR clone 367602 (TRBV25-1, TRBJ1-1)
CASTHLGGNTEAFF

SEQ ID NO: 735205 - protein, 13 aa, Homo sapiens
  CDR3 for alpha chain variable domain of TCR clone 367603 (TRAV12-3, TRAJ7)
CAMTPYGNNRLAF

SEQ ID NO: 735206 - protein, 15 aa, Homo sapiens
  CDR3 for beta chain variable domain of TCR clone 367603 (TRBV27, TRBJ2-5)
CASSLYPRGGETQYF

SEQ ID NO: 735207 - protein, 14 aa, Homo sapiens
  CDR3 for alpha chain variable domain of TCR clone 367604 (TRAV12-2, TRAJ13)
FAVKKTGGYQKVTF

SEQ ID NO: 735208 - protein, 13 aa, Homo sapiens
  CDR3 for beta chain variable domain of TCR clone 367604 (TRBV4-2, TRBJ1-1)
CASSQAGNTEAFF

SEQ ID NO: 735209 - protein, 14 aa, Homo sapiens
  CDR3 for alpha chain variable domain of TCR clone 367605 (TRAV1-2, TRAJ16)
CAVNWFSDGQQLLF

SEQ ID NO: 735210 - protein, 12 aa, Homo sapiens
  CDR3 for beta chain variable domain of TCR clone 367605 (TRBV24-1, TRBJ1-1)
CATSDSDRGAFF

SEQ ID NO: 735211 - protein, 13 aa, Homo sapiens
  CDR3 for alpha chain variable domain of TCR clone 367606 (TRAV8-3, TRAJ48)
CAVVPFGNEKLTF

SEQ ID NO: 735212 - protein, 11 aa, Homo sapiens
  CDR3 for beta chain variable domain of TCR clone 367606 (TRBV29-1, TRBJ2-5)
CSEDRTGTQYF

SEQ ID NO: 735213 - protein, 14 aa, Homo sapiens
  CDR3 for alpha chain variable domain of TCR clone 367607 (TRAV22, TRAJ6)
CAGVGPGGSYIPTF

SEQ ID NO: 735214 - protein, 14 aa, Homo sapiens
  CDR3 for beta chain variable domain of TCR clone 367607 (TRBV20-1, TRBJ2-7)
CSAKRGRSSYEQYF

SEQ ID NO: 735215 - protein, 13 aa, Homo sapiens
  CDR3 for alpha chain variable domain of TCR clone 367608 (TRAV17, TRAJ29)
CATDALRKHTSCR

SEQ ID NO: 735216 - protein, 13 aa, Homo sapiens
  CDR3 for beta chain variable domain of TCR clone 367608 (TRBV5-7, TRBJ2-6)
CASTSSGANVLTF

SEQ ID NO: 735217 - protein, 17 aa, Homo sapiens
  CDR3 for alpha chain variable domain of TCR clone 367609 (TRAV3, TRAJ6)
CAVRDGPRAGGSYIPTF

SEQ ID NO: 735218 - protein, 14 aa, Homo sapiens
  CDR3 for beta chain variable domain of TCR clone 367609 (TRBV12-4, TRBJ1-1)
CASSFDRVNTEAFF

SEQ ID NO: 735219 - protein, 12 aa, Homo sapiens
  CDR3 for alpha chain variable domain of TCR clone 367610 (TRAV16, TRAJ27)
CALNTNAGKSTF

SEQ ID NO: 735220 - protein, 16 aa, Homo sapiens
  CDR3 for beta chain variable domain of TCR clone 367610 (TRBV7-9, TRBJ2-7)
CASSFGLAGPSYEQYF

SEQ ID NO: 735221 - protein, 12 aa, Homo sapiens
  CDR3 for alpha chain variable domain of TCR clone 367611 (TRAV13-1, TRAJ36)
WRGGAGANNLFF

SEQ ID NO: 735222 - protein, 13 aa, Homo sapiens
  CDR3 for beta chain variable domain of TCR clone 367611 (TRBV12-5, TRBJ2-3)
CASGDRQSDTQYF

SEQ ID NO: 735223 - protein, 11 aa, Homo sapiens
  CDR3 for alpha chain variable domain of TCR clone 367612 (TRAV12-1, TRAJ15)
CVVNAGTALIF

SEQ ID NO: 735224 - protein, 16 aa, Homo sapiens
  CDR3 for beta chain variable domain of TCR clone 367612 (TRBV28, TRBJ2-1)
CASSSRVRDSYDEQFF

SEQ ID NO: 735225 - protein, 12 aa, Homo sapiens
  CDR3 for alpha chain variable domain of TCR clone 367613 (TRAV3, TRAJ29)
CSPNSGNTPLVF

SEQ ID NO: 735226 - protein, 16 aa, Homo sapiens
  CDR3 for beta chain variable domain of TCR clone 367613 (TRBV29-1, TRBJ1-2)
CSVEANRDIANYGYTF

SEQ ID NO: 735227 - protein, 17 aa, Homo sapiens
  CDR3 for alpha chain variable domain of TCR clone 367614 (TRAV8-3, TRAJ10)
EASNTVILTGGGNKLTF

SEQ ID NO: 735228 - protein, 14 aa, Homo sapiens
  CDR3 for beta chain variable domain of TCR clone 367614 (TRBV7-9, TRBJ1-2)
CQQLRLLFRGGYTF

SEQ ID NO: 735229 - protein, 17 aa, Homo sapiens
  CDR3 for alpha chain variable domain of TCR clone 367615 (TRAV16, TRAJ58)
CITVLSNGETSGSRLTF

SEQ ID NO: 735230 - protein, 17 aa, Homo sapiens
  CDR3 for beta chain variable domain of TCR clone 367615 (TRBV18, TRBJ2-1)
CASSKGLSGGADNEQYF

SEQ ID NO: 735231 - protein, 22 aa, Homo sapiens
  CDR3 for alpha chain variable domain of TCR clone 367616 (TRAV12-1, TRAJ33)
SSVIQPPPLCGDAPDSNYQLIW

SEQ ID NO: 735232 - protein, 15 aa, Homo sapiens
  CDR3 for beta chain variable domain of TCR clone 367616 (TRBV27, TRBJ2-1)
CASSNGGGSSNEQFF

SEQ ID NO: 735233 - protein, 17 aa, Homo sapiens
  CDR3 for alpha chain variable domain of TCR clone 367617 (TRAV8-1, TRAJ43)
CAVTNDMRFGAGTRLTV

SEQ ID NO: 735234 - protein, 14 aa, Homo sapiens
  CDR3 for beta chain variable domain of TCR clone 367617 (TRBV7-8, TRBJ1-2)
CASSPDSVSYGYTF

SEQ ID NO: 735235 - protein, 16 aa, Homo sapiens
  CDR3 for alpha chain variable domain of TCR clone 367618 (TRAV27, TRAJ53)
CAAPEGSGGSNYKLTF

SEQ ID NO: 735236 - protein, 15 aa, Homo sapiens
  CDR3 for beta chain variable domain of TCR clone 367618 (TRBV7-6, TRBJ1-5)
CASSQSSGINQPQHF

SEQ ID NO: 735237 - protein, 12 aa, Homo sapiens
  CDR3 for alpha chain variable domain of TCR clone 367619 (TRAV38-2/DV8, TRAJ47)
CVLMEYGNKLVF

SEQ ID NO: 735238 - protein, 14 aa, Homo sapiens
  CDR3 for beta chain variable domain of TCR clone 367619 (TRBV6-1, TRBJ1-3)
CASVQGGGGNTIYF

SEQ ID NO: 735239 - protein, 16 aa, Homo sapiens
  CDR3 for alpha chain variable domain of TCR clone 367620 (TRAV30, TRAJ24)
CGTEIVDADSWGKFQF

SEQ ID NO: 735240 - protein, 15 aa, Homo sapiens
  CDR3 for beta chain variable domain of TCR clone 367620 (TRBV20-1, TRBJ2-4)
CSARDRTGGPNIQYF

SEQ ID NO: 735241 - protein, 14 aa, Homo sapiens
  CDR3 for alpha chain variable domain of TCR clone 367621 (TRAV12-1, TRAJ22)
CVVTTSGSARQLTF

SEQ ID NO: 735242 - protein, 14 aa, Homo sapiens
  CDR3 for beta chain variable domain of TCR clone 367621 (TRBV7-2, TRBJ2-7)
CASSPKTSFYEQYF

SEQ ID NO: 735243 - protein, 10 aa, Homo sapiens
  CDR3 for alpha chain variable domain of TCR clone 367622 (TRAV30, TRAJ48)
CGIGNEKLTF

SEQ ID NO: 735244 - protein, 13 aa, Homo sapiens
  CDR3 for beta chain variable domain of TCR clone 367622 (TRBV25-1, TRBJ2-5)
CASSESGRETQYF

SEQ ID NO: 735245 - protein, 10 aa, Homo sapiens
  CDR3 for alpha chain variable domain of TCR clone 367623 (TRAV21, TRAJ31)
CAVDNARLMF

SEQ ID NO: 735246 - protein, 14 aa, Homo sapiens
  CDR3 for beta chain variable domain of TCR clone 367623 (TRBV19, TRBJ2-7)
CASSMGQGAIEQYF

SEQ ID NO: 735247 - protein, 16 aa, Homo sapiens
  CDR3 for alpha chain variable domain of TCR clone 367624 (TRAV3, TRAJ21)
CAVRDIERGNFNKFYF

SEQ ID NO: 735248 - protein, 14 aa, Homo sapiens
  CDR3 for beta chain variable domain of TCR clone 367624 (TRBV7-8, TRBJ2-1)
CASSSQGTYNEQFF

SEQ ID NO: 735249 - protein, 12 aa, Homo sapiens
  CDR3 for alpha chain variable domain of TCR clone 367625 (TRAV1-1, TRAJ9)
CAVDTGGFTTIF

SEQ ID NO: 735250 - protein, 15 aa, Homo sapiens
  CDR3 for beta chain variable domain of TCR clone 367625 (TRBV10-3, TRBJ2-1)
CAISLGLVGGNEQFF

SEQ ID NO: 735251 - protein, 16 aa, Homo sapiens
  CDR3 for alpha chain variable domain of TCR clone 367626 (TRAV1-1, TRAJ28)
CVVRDDSGAGSYQLTF

SEQ ID NO: 735252 - protein, 12 aa, Homo sapiens
  CDR3 for beta chain variable domain of TCR clone 367626 (TRBV11-2, TRBJ2-5)
CASSLDTQTQYF

SEQ ID NO: 735253 - protein, 14 aa, Homo sapiens
  CDR3 for alpha chain variable domain of TCR clone 367627 (TRAV12-2, TRAJ13)
CAVKKTGGYQKVTF

SEQ ID NO: 735254 - protein, 18 aa, Homo sapiens
  CDR3 for beta chain variable domain of TCR clone 367627 (TRBV11-2, TRBJ2-6)
CASSLNPFLGTGANVLTF

SEQ ID NO: 735255 - protein, 15 aa, Homo sapiens
  CDR3 for alpha chain variable domain of TCR clone 367628 (TRAV14/DV4, TRAJ33)
CAMREGRDSNYQLIW

SEQ ID NO: 735256 - protein, 13 aa, Homo sapiens
  CDR3 for beta chain variable domain of TCR clone 367628 (TRBV7-6, TRBJ1-2)
CASSLVADYGYTF

SEQ ID NO: 735257 - protein, 14 aa, Homo sapiens
  CDR3 for alpha chain variable domain of TCR clone 367629 (TRAV12-2, TRAJ13)
CAVKKTGGYQKVTF

SEQ ID NO: 735258 - protein, 18 aa, Homo sapiens
  CDR3 for beta chain variable domain of TCR clone 367629 (TRBV7-3, TRBJ2-3)
CASSSTGTYPGSTDTQYF

SEQ ID NO: 735259 - protein, 13 aa, Homo sapiens
  CDR3 for alpha chain variable domain of TCR clone 367630 (TRAV21, TRAJ37)
CAVSFGNTGKLIF

SEQ ID NO: 735260 - protein, 13 aa, Homo sapiens
  CDR3 for beta chain variable domain of TCR clone 367630 (TRBV7-6, TRBJ2-3)
CASSLRSDNTQYF

SEQ ID NO: 735261 - protein, 11 aa, Homo sapiens
  CDR3 for alpha chain variable domain of TCR clone 367631 (TRAV1-1, TRAJ5)
SALCFRRALTF

SEQ ID NO: 735262 - protein, 15 aa, Homo sapiens
  CDR3 for beta chain variable domain of TCR clone 367631 (TRBV4-1, TRBJ1-4)
CASSDTGGTNEKLFF

SEQ ID NO: 735263 - protein, 12 aa, Homo sapiens
  CDR3 for alpha chain variable domain of TCR clone 367632 (TRAV3, TRAJ20)
CAVRDPDYKLSF

SEQ ID NO: 735264 - protein, 14 aa, Homo sapiens
  CDR3 for beta chain variable domain of TCR clone 367632 (TRBV11-1, TRBJ2-7)
CASSFRQGSYEQYF

SEQ ID NO: 735265 - protein, 15 aa, Homo sapiens
  CDR3 for alpha chain variable domain of TCR clone 367633 (TRAV22, TRAJ24)
CAVPLSTYSWGKLQF

SEQ ID NO: 735266 - protein, 14 aa, Homo sapiens
  CDR3 for beta chain variable domain of TCR clone 367633 (TRBV7-2, TRBJ2-7)
CASRSQGAAYEQYF

SEQ ID NO: 735267 - protein, 15 aa, Homo sapiens
  CDR3 for alpha chain variable domain of TCR clone 367634 (TRAV26-1, TRAJ29)
CIVRVQGSGNTPLVF

SEQ ID NO: 735268 - protein, 14 aa, Homo sapiens
  CDR3 for beta chain variable domain of TCR clone 367634 (TRBV7-9, TRBJ2-5)
CASSLVGGEETQYF

SEQ ID NO: 735269 - protein, 13 aa, Homo sapiens
  CDR3 for alpha chain variable domain of TCR clone 367635 (TRAV40, TRAJ41)
CLLGAQSGYALNF

SEQ ID NO: 735270 - protein, 15 aa, Homo sapiens
  CDR3 for beta chain variable domain of TCR clone 367635 (TRBV7-9, TRBJ1-6)
CASSSPGRGNSPLHF

SEQ ID NO: 735271 - protein, 17 aa, Homo sapiens
  CDR3 for alpha chain variable domain of TCR clone 367636 (TRAV36/DV7, TRAJ52)
CAVAQRAGGTSYGKLTF

SEQ ID NO: 735272 - protein, 14 aa, Homo sapiens
  CDR3 for beta chain variable domain of TCR clone 367636 (TRBV6-1, TRBJ1-3)
CASVQRGGGNTIYF

SEQ ID NO: 735273 - protein, 11 aa, Homo sapiens
  CDR3 for alpha chain variable domain of TCR clone 367637 (TRAV23/DV6, TRAJ58)
CAARLLRGETS

SEQ ID NO: 735274 - protein, 11 aa, Homo sapiens
  CDR3 for beta chain variable domain of TCR clone 367637 (TRBV25-1, TRBJ1-1)
PTWGGNTEAFF

SEQ ID NO: 735275 - protein, 14 aa, Homo sapiens
  CDR3 for alpha chain variable domain of TCR clone 367638 (TRAV8-3, TRAJ10)
CAVGNAGGGNKLTF

SEQ ID NO: 735276 - protein, 13 aa, Homo sapiens
  CDR3 for beta chain variable domain of TCR clone 367638 (TRBV7-9, TRBJ1-2)
CASSLKQNYGYTF

SEQ ID NO: 735277 - protein, 13 aa, Homo sapiens
  CDR3 for alpha chain variable domain of TCR clone 367639 (TRAV29/DV5, TRAJ29)
CAASAAGNTPLVF

SEQ ID NO: 735278 - protein, 15 aa, Homo sapiens
  CDR3 for beta chain variable domain of TCR clone 367639 (TRBV12-4, TRBJ2-5)
CASSGTGQAQETQYF

SEQ ID NO: 735279 - protein, 14 aa, Homo sapiens
  CDR3 for alpha chain variable domain of TCR clone 367640 (TRAV21, TRAJ6)
CAVKWLVGSYIPTF

SEQ ID NO: 735280 - protein, 12 aa, Homo sapiens
  CDR3 for beta chain variable domain of TCR clone 367640 (TRBV11-2, TRBJ2-2)
CASSLGGGELFF

SEQ ID NO: 735281 - protein, 16 aa, Homo sapiens
  CDR3 for alpha chain variable domain of TCR clone 367641 (TRAV3, TRAJ3)
CAVRDRAKSSASKIII

SEQ ID NO: 735282 - protein, 13 aa, Homo sapiens
  CDR3 for beta chain variable domain of TCR clone 367641 (TRBV10-3, TRBJ2-7)
CASKLAVNYEQYF

SEQ ID NO: 735283 - protein, 12 aa, Homo sapiens
  CDR3 for alpha chain variable domain of TCR clone 367642 (TRAV4, TRAJ26)
CLVGDYGQNVVF

SEQ ID NO: 735284 - protein, 15 aa, Homo sapiens
  CDR3 for beta chain variable domain of TCR clone 367642 (TRBV27, TRBJ2-1)
CASSNGGGSSNEQFF

SEQ ID NO: 735285 - protein, 14 aa, Homo sapiens
  CDR3 for alpha chain variable domain of TCR clone 367643 (TRAV13-1, TRAJ35)
CAASKGGFGHVLHC

SEQ ID NO: 735286 - protein, 13 aa, Homo sapiens
  CDR3 for beta chain variable domain of TCR clone 367643 (TRBV7-3, TRBJ1-1)
CASSQDWGAEDFF

SEQ ID NO: 735287 - protein, 12 aa, Homo sapiens
  CDR3 for alpha chain variable domain of TCR clone 367644 (TRAV36/DV7, TRAJ54)
CAVVRGAQKLVF

SEQ ID NO: 735288 - protein, 14 aa, Homo sapiens
  CDR3 for beta chain variable domain of TCR clone 367644 (TRBV7-3, TRBJ1-1)
CASSVKGGNTDAFF

SEQ ID NO: 735289 - protein, 13 aa, Homo sapiens
  CDR3 for alpha chain variable domain of TCR clone 367645 (TRAV9-2, TRAJ53)
CALSGGSNYKLTF

SEQ ID NO: 735290 - protein, 15 aa, Homo sapiens
  CDR3 for beta chain variable domain of TCR clone 367645 (TRBV11-3, TRBJ2-3)
CVSLKDGREGDTQYF

SEQ ID NO: 735291 - protein, 23 aa, Homo sapiens
  CDR3 for alpha chain variable domain of TCR clone 367646 (TRAV26-1, TRAJ38)
CIADNAGNNHTQNPDPAAYQLRD

SEQ ID NO: 735292 - protein, 13 aa, Homo sapiens
  CDR3 for beta chain variable domain of TCR clone 367646 (TRBV20-1, TRBJ1-1)
CSARGGGNTEAFF

SEQ ID NO: 735293 - protein, 14 aa, Homo sapiens
  CDR3 for alpha chain variable domain of TCR clone 367647 (TRAV27, TRAJ13)
CRSSNPGGYQKVTF

SEQ ID NO: 735294 - protein, 10 aa, Homo sapiens
  CDR3 for beta chain variable domain of TCR clone 367647 (TRBV2, TRBJ2-5)
CASSAATQYF

SEQ ID NO: 735295 - protein, 16 aa, Homo sapiens
  CDR3 for alpha chain variable domain of TCR clone 367648 (TRAV13-1, TRAJ17)
CAASKGVKAAGNKLTF

SEQ ID NO: 735296 - protein, 15 aa, Homo sapiens
  CDR3 for beta chain variable domain of TCR clone 367648 (TRBV20-1, TRBJ1-5)
CSAREGRYSNQPQHF

SEQ ID NO: 735297 - protein, 10 aa, Homo sapiens
  CDR3 for alpha chain variable domain of TCR clone 367649 (TRAV23/DV6, TRAJ43)
CAAAVAALKQ

SEQ ID NO: 735298 - protein, 12 aa, Homo sapiens
  CDR3 for beta chain variable domain of TCR clone 367649 (TRBV11-2, TRBJ2-2)
CASSLGGGELFF

SEQ ID NO: 735299 - protein, 14 aa, Homo sapiens
  CDR3 for alpha chain variable domain of TCR clone 367650 (TRAV29/DV5, TRAJ22)
CAASATGSARQLTF

SEQ ID NO: 735300 - protein, 11 aa, Homo sapiens
  CDR3 for beta chain variable domain of TCR clone 367650 (TRBV11-2, TRBJ2-2)
CASSLPGELFF

SEQ ID NO: 735301 - protein, 23 aa, Homo sapiens
  CDR3 for alpha chain variable domain of TCR clone 367651 (TRAV26-1, TRAJ38)
CIADNAGNNHIQNPAPAVYQLRD

SEQ ID NO: 735302 - protein, 12 aa, Homo sapiens
  CDR3 for beta chain variable domain of TCR clone 367651 (TRBV11-2, TRBJ2-2)
CASSLGGGELFF

SEQ ID NO: 735303 - protein, 12 aa, Homo sapiens
  CDR3 for alpha chain variable domain of TCR clone 367652 (TRAV12-2, TRAJ9)
CAVNTGGFKTIF

SEQ ID NO: 735304 - protein, 17 aa, Homo sapiens
  CDR3 for beta chain variable domain of TCR clone 367652 (TRBV11-2, TRBJ2-1)
CASSLYPPGVEYNEQFF

SEQ ID NO: 735305 - protein, 16 aa, Homo sapiens
  CDR3 for alpha chain variable domain of TCR clone 367653 (TRAV30, TRAJ24)
CGTGIVDADSWGKFQF

SEQ ID NO: 735306 - protein, 13 aa, Homo sapiens
  CDR3 for beta chain variable domain of TCR clone 367653 (TRBV7-9, TRBJ1-2)
CASSLKQNYGYTF

SEQ ID NO: 735307 - protein, 11 aa, Homo sapiens
  CDR3 for alpha chain variable domain of TCR clone 367654 (TRAV29/DV5, TRAJ47)
CAATYGNKMVF

SEQ ID NO: 735308 - protein, 17 aa, Homo sapiens
  CDR3 for beta chain variable domain of TCR clone 367654 (TRBV7-9, TRBJ2-1)
CASSLVASYPSYNEQFF

SEQ ID NO: 735309 - protein, 13 aa, Homo sapiens
  CDR3 for alpha chain variable domain of TCR clone 367655 (TRAV21, TRAJ10)
CAVPTGGGNKLTF

SEQ ID NO: 735310 - protein, 16 aa, Homo sapiens
  CDR3 for beta chain variable domain of TCR clone 367655 (TRBV5-4, TRBJ2-3)
CASSFGAGEGTDTQYF

SEQ ID NO: 735311 - protein, 15 aa, Homo sapiens
  CDR3 for alpha chain variable domain of TCR clone 367656 (TRAV3, TRAJ5)
CAVRDRKTGRKALTF

SEQ ID NO: 735312 - protein, 15 aa, Homo sapiens
  CDR3 for beta chain variable domain of TCR clone 367656 (TRBV7-8, TRBJ2-1)
CASSLADSLYNEQLF

SEQ ID NO: 735313 - protein, 14 aa, Homo sapiens
  CDR3 for alpha chain variable domain of TCR clone 367657 (TRAV8-3, TRAJ39)
CAVGANNAGTMLTF

SEQ ID NO: 735314 - protein, 15 aa, Homo sapiens
  CDR3 for beta chain variable domain of TCR clone 367657 (TRBV4-3, TRBJ1-1)
CASSQELGRGTEAFF

SEQ ID NO: 735315 - protein, 12 aa, Homo sapiens
  CDR3 for alpha chain variable domain of TCR clone 367658 (TRAV17, TRAJ20)
CATDGDDCKLSF

SEQ ID NO: 735316 - protein, 14 aa, Homo sapiens
  CDR3 for beta chain variable domain of TCR clone 367658 (TRBV7-2, TRBJ2-5)
CASSLSGGGETQYF

SEQ ID NO: 735317 - protein, 18 aa, Homo sapiens
  CDR3 for alpha chain variable domain of TCR clone 367659 (TRAV13-1, TRAJ10)
CAALGRRKQTHLWDRHSA

SEQ ID NO: 735318 - protein, 13 aa, Homo sapiens
  CDR3 for beta chain variable domain of TCR clone 367659 (TRBV7-9, TRBJ1-2)
CASSLKQNYGYTF

SEQ ID NO: 735319 - protein, 15 aa, Homo sapiens
  CDR3 for alpha chain variable domain of TCR clone 367660 (TRAV26-1, TRAJ28)
CIVRVAGAGSYQLTF

SEQ ID NO: 735320 - protein, 19 aa, Homo sapiens
  CDR3 for beta chain variable domain of TCR clone 367660 (TRBV7-3, TRBJ2-7)
CASSLTGVAGGWPSYEQCF

SEQ ID NO: 735321 - protein, 13 aa, Homo sapiens
  CDR3 for alpha chain variable domain of TCR clone 367661 (TRAV27, TRAJ8)
CAGGPTGFQKLVF

SEQ ID NO: 735322 - protein, 19 aa, Homo sapiens
  CDR3 for beta chain variable domain of TCR clone 367661 (TRBV5-1, TRBJ2-6)
CASSRGVGRAFGGANVLTF

SEQ ID NO: 735323 - protein, 13 aa, Homo sapiens
  CDR3 for alpha chain variable domain of TCR clone 367662 (TRAV27, TRAJ29)
CAGAHSGNTPLVF

SEQ ID NO: 735324 - protein, 13 aa, Homo sapiens
  CDR3 for beta chain variable domain of TCR clone 367662 (TRBV20-1, TRBJ1-1)
CSARGGGNTEAFF

SEQ ID NO: 735325 - protein, 16 aa, Homo sapiens
  CDR3 for alpha chain variable domain of TCR clone 367663 (TRAV13-1, TRAJ37)
CAASSSSSGNTGKLIF

SEQ ID NO: 735326 - protein, 14 aa, Homo sapiens
  CDR3 for beta chain variable domain of TCR clone 367663 (TRBV13, TRBJ2-5)
CASSLERVGETQYF

SEQ ID NO: 735327 - protein, 15 aa, Homo sapiens
  CDR3 for alpha chain variable domain of TCR clone 367664 (TRAV27, TRAJ45)
CAPVDSGGGADGLTF

SEQ ID NO: 735328 - protein, 15 aa, Homo sapiens
  CDR3 for beta chain variable domain of TCR clone 367664 (TRBV23-1, TRBJ1-5)
CASSQSRGQCWGAYI

SEQ ID NO: 735329 - protein, 14 aa, Homo sapiens
  CDR3 for alpha chain variable domain of TCR clone 367665 (TRAV12-1, TRAJ3)
CVVNPGSSASTLIF

SEQ ID NO: 735330 - protein, 14 aa, Homo sapiens
  CDR3 for beta chain variable domain of TCR clone 367665 (TRBV20-1, TRBJ2-3)
CSARGGTSTDTQYF

SEQ ID NO: 735331 - protein, 14 aa, Homo sapiens
  CDR3 for alpha chain variable domain of TCR clone 367666 (TRAV1-2, TRAJ16)
CAVNRFSDVQKLLF

SEQ ID NO: 735332 - protein, 14 aa, Homo sapiens
  CDR3 for beta chain variable domain of TCR clone 367666 (TRBV23-1, TRBJ2-5)
CASSFLRSQETQYF

SEQ ID NO: 735333 - protein, 12 aa, Homo sapiens
  CDR3 for alpha chain variable domain of TCR clone 367667 (TRAV27, TRAJ13)
CAGAGGYKKVTF

SEQ ID NO: 735334 - protein, 17 aa, Homo sapiens
  CDR3 for beta chain variable domain of TCR clone 367667 (TRBV20-1, TRBJ2-2)
CSASGSGQGGLTGELFF

SEQ ID NO: 735335 - protein, 15 aa, Homo sapiens
  CDR3 for alpha chain variable domain of TCR clone 367668 (TRAV26-1, TRAJ15)
CIVRMANQAGTALIF

SEQ ID NO: 735336 - protein, 15 aa, Homo sapiens
  CDR3 for beta chain variable domain of TCR clone 367668 (TRBV20-1, TRBJ1-1)
CSARKAETSNTEAFL

SEQ ID NO: 735337 - protein, 13 aa, Homo sapiens
  CDR3 for alpha chain variable domain of TCR clone 367669 (TRAV21, TRAJ27)
CAARPGNAGKSTF

SEQ ID NO: 735338 - protein, 13 aa, Homo sapiens
  CDR3 for beta chain variable domain of TCR clone 367669 (TRBV27, TRBJ2-1)
RASRTLGVGEQCF

SEQ ID NO: 735339 - protein, 13 aa, Homo sapiens
  CDR3 for alpha chain variable domain of TCR clone 367670 (TRAV35, TRAJ36)
CAGPRIGANNLFF

SEQ ID NO: 735340 - protein, 14 aa, Homo sapiens
  CDR3 for beta chain variable domain of TCR clone 367670 (TRBV7-8, TRBJ2-3)
CASSFPDGQDTQYF

SEQ ID NO: 735341 - protein, 14 aa, Homo sapiens
  CDR3 for alpha chain variable domain of TCR clone 367671 (TRAV2, TRAJ37)
CAVDFTSNTGKPIV

SEQ ID NO: 735342 - protein, 15 aa, Homo sapiens
  CDR3 for beta chain variable domain of TCR clone 367671 (TRBV20-1, TRBJ1-1)
CSASRGVTGNTEAFF

SEQ ID NO: 735343 - protein, 17 aa, Homo sapiens
  CDR3 for alpha chain variable domain of TCR clone 367672 (TRAV3, TRAJ6)
CAVRDGPRAGGSYIPTF

SEQ ID NO: 735344 - protein, 14 aa, Homo sapiens
  CDR3 for beta chain variable domain of TCR clone 367672 (TRBV7-3, TRBJ2-1)
CASSLGTSANEQFF

SEQ ID NO: 735345 - protein, 16 aa, Homo sapiens
  CDR3 for alpha chain variable domain of TCR clone 367673 (TRAV20, TRAJ22)
CAVRLVSSGSARQLTF

SEQ ID NO: 735346 - protein, 13 aa, Homo sapiens
  CDR3 for beta chain variable domain of TCR clone 367673 (TRBV6-4, TRBJ2-3)
CASSVSWADTQYF

SEQ ID NO: 735347 - protein, 14 aa, Homo sapiens
  CDR3 for alpha chain variable domain of TCR clone 367674 (TRAV12-2, TRAJ40)
CAVKIPSGTYKYIF

SEQ ID NO: 735348 - protein, 14 aa, Homo sapiens
  CDR3 for beta chain variable domain of TCR clone 367674 (TRBV20-1, TRBJ1-1)
YSAQTRIGGTEAVF

SEQ ID NO: 735349 - protein, 15 aa, Homo sapiens
  CDR3 for alpha chain variable domain of TCR clone 367675 (TRAV8-3, TRAJ45)
CASSYSGGGADGPTF

SEQ ID NO: 735350 - protein, 18 aa, Homo sapiens
  CDR3 for beta chain variable domain of TCR clone 367675 (TRBV18, TRBJ1-3)
CASSPRGGAGPSGNTIYF

SEQ ID NO: 735351 - protein, 15 aa, Homo sapiens
  CDR3 for alpha chain variable domain of TCR clone 367676 (TRAV3, TRAJ32)
CAVCSYGGATNKLIF

SEQ ID NO: 735352 - protein, 13 aa, Homo sapiens
  CDR3 for beta chain variable domain of TCR clone 367676 (TRBV20-1, TRBJ2-7)
CSARPSTNYEQYF

SEQ ID NO: 735353 - protein, 13 aa, Homo sapiens
  CDR3 for alpha chain variable domain of TCR clone 367677 (TRAV12-3, TRAJ33)
CAVSLNSNYQLIW

SEQ ID NO: 735354 - protein, 13 aa, Homo sapiens
  CDR3 for beta chain variable domain of TCR clone 367677 (TRBV7-2, TRBJ2-2)
CASSLAVTGELFF

SEQ ID NO: 735355 - protein, 12 aa, Homo sapiens
  CDR3 for alpha chain variable domain of TCR clone 367678 (TRAV8-3, TRAJ26)
CAGDNYGQNFVF

SEQ ID NO: 735356 - protein, 16 aa, Homo sapiens
  CDR3 for beta chain variable domain of TCR clone 367678 (TRBV27, TRBJ2-2)
CASSLRPGGAPGELFF

SEQ ID NO: 735357 - protein, 18 aa, Homo sapiens
  CDR3 for alpha chain variable domain of TCR clone 367679 (TRAV21, TRAJ52)
CAVRPSPAGGTSYGKLTF

SEQ ID NO: 735358 - protein, 14 aa, Homo sapiens
  CDR3 for beta chain variable domain of TCR clone 367679 (TRBV7-3, TRBJ2-3)
CASSLAGGTNEQFF

SEQ ID NO: 735359 - protein, 14 aa, Homo sapiens
  CDR3 for alpha chain variable domain of TCR clone 367680 (TRAV12-2, TRAJ13)
CAVKKTGGYQKVTF

SEQ ID NO: 735360 - protein, 14 aa, Homo sapiens
  CDR3 for beta chain variable domain of TCR clone 367680 (TRBV19, TRBJ2-1)
CASSTFVLSGEQFF

SEQ ID NO: 735361 - protein, 14 aa, Homo sapiens
  CDR3 for alpha chain variable domain of TCR clone 367681 (TRAV16, TRAJ37)
CALSSSSNTGKLIF

SEQ ID NO: 735362 - protein, 17 aa, Homo sapiens
  CDR3 for beta chain variable domain of TCR clone 367681 (TRBV7-8, TRBJ2-6)
CASSAGTGGAGANVLTF

SEQ ID NO: 735363 - protein, 14 aa, Homo sapiens
  CDR3 for alpha chain variable domain of TCR clone 367682 (TRAV1-2, TRAJ16)
CAVNRFSDGQKLRF

SEQ ID NO: 735364 - protein, 13 aa, Homo sapiens
  CDR3 for beta chain variable domain of TCR clone 367682 (TRBV10-3, TRBJ2-7)
CASKLAVNYEQYF

SEQ ID NO: 735365 - protein, 14 aa, Homo sapiens
  CDR3 for alpha chain variable domain of TCR clone 367683 (TRAV16, TRAJ15)
FALSFNQAGTALIF

SEQ ID NO: 735366 - protein, 14 aa, Homo sapiens
  CDR3 for beta chain variable domain of TCR clone 367683 (TRBV19, TRBJ2-2)
CATTGHANTGELFF

SEQ ID NO: 735367 - protein, 13 aa, Homo sapiens
  CDR3 for alpha chain variable domain of TCR clone 367684 (TRAV9-2, TRAJ9)
CALSDRGGFKTLF

SEQ ID NO: 735368 - protein, 14 aa, Homo sapiens
  CDR3 for beta chain variable domain of TCR clone 367684 (TRBV20-1, TRBJ2-2)
CSAPDTANTGELFF

SEQ ID NO: 735369 - protein, 13 aa, Homo sapiens
  CDR3 for alpha chain variable domain of TCR clone 367685 (TRAV2, TRAJ5)
CAVPDTGRRALTF

SEQ ID NO: 735370 - protein, 15 aa, Homo sapiens
  CDR3 for beta chain variable domain of TCR clone 367685 (TRBV7-2, TRBJ2-2)
CASRTRTGYTGELFF

SEQ ID NO: 735371 - protein, 14 aa, Homo sapiens
  CDR3 for alpha chain variable domain of TCR clone 367686 (TRAV12-2, TRAJ36)
CAVNPPTGANNLFF

SEQ ID NO: 735372 - protein, 14 aa, Homo sapiens
  CDR3 for beta chain variable domain of TCR clone 367686 (TRBV6-1, TRBJ1-3)
CASVQGGGGNTIYF

SEQ ID NO: 735373 - protein, 16 aa, Homo sapiens
  CDR3 for alpha chain variable domain of TCR clone 367687 (TRAV3, TRAJ37)
CAVRPHGSGNTGKLIS

SEQ ID NO: 735374 - protein, 13 aa, Homo sapiens
  CDR3 for beta chain variable domain of TCR clone 367687 (TRBV4-1, TRBJ1-1)
CASSRKMNTEAFF

SEQ ID NO: 735375 - protein, 13 aa, Homo sapiens
  CDR3 for alpha chain variable domain of TCR clone 367688 (TRAV12-2, TRAJ20)
CAVYPSNDYKLSF

SEQ ID NO: 735376 - protein, 17 aa, Homo sapiens
  CDR3 for beta chain variable domain of TCR clone 367688 (TRBV27, TRBJ2-5)
CTSASSLYPRGGETQYF

SEQ ID NO: 735377 - protein, 12 aa, Homo sapiens
  CDR3 for alpha chain variable domain of TCR clone 367689 (TRAV25, TRAJ5)
CRGGGGRRALTF

SEQ ID NO: 735378 - protein, 15 aa, Homo sapiens
  CDR3 for beta chain variable domain of TCR clone 367689 (TRBV19, TRBJ2-4)
CASRGPRRGENIQYF

SEQ ID NO: 735379 - protein, 10 aa, Homo sapiens
  CDR3 for alpha chain variable domain of TCR clone 367690 (TRAV1-2, TRAJ31)
CAFFDARLMF

SEQ ID NO: 735380 - protein, 15 aa, Homo sapiens
  CDR3 for beta chain variable domain of TCR clone 367690 (TRBV4-1, TRBJ1-4)
CASSDTGGTNKKLFF

SEQ ID NO: 735381 - protein, 14 aa, Homo sapiens
  CDR3 for alpha chain variable domain of TCR clone 367691 (TRAV13-1, TRAJ44)
CAAKATGTASKLTF

SEQ ID NO: 735382 - protein, 13 aa, Homo sapiens
  CDR3 for beta chain variable domain of TCR clone 367691 (TRBV5-5, TRBJ1-2)
CASSFGRGEDYSF

SEQ ID NO: 735383 - protein, 14 aa, Homo sapiens
  CDR3 for alpha chain variable domain of TCR clone 367692 (TRAV1-2, TRAJ16)
CAVNRFSDGQKLPF

SEQ ID NO: 735384 - protein, 18 aa, Homo sapiens
  CDR3 for beta chain variable domain of TCR clone 367692 (TRBV20-1, TRBJ2-6)
CSAETTPTHGSGANVLTF

SEQ ID NO: 735385 - protein, 14 aa, Homo sapiens
  CDR3 for alpha chain variable domain of TCR clone 367693 (TRAV25, TRAJ44)
CAVFPTGTASKLTF

SEQ ID NO: 735386 - protein, 14 aa, Homo sapiens
  CDR3 for beta chain variable domain of TCR clone 367693 (TRBV19, TRBJ1-1)
SASTGHRLNTEAFF

SEQ ID NO: 735387 - protein, 12 aa, Homo sapiens
  CDR3 for alpha chain variable domain of TCR clone 367694 (TRAV1-1, TRAJ30)
CAVRGRDDKIIF

SEQ ID NO: 735388 - protein, 13 aa, Homo sapiens
  CDR3 for beta chain variable domain of TCR clone 367694 (TRBV11-3, TRBJ2-7)
CANSLDKLYEQYF

SEQ ID NO: 735389 - protein, 14 aa, Homo sapiens
  CDR3 for alpha chain variable domain of TCR clone 367695 (TRAV8-2, TRAJ4)
CVVSHSGGYNKLIF

SEQ ID NO: 735390 - protein, 15 aa, Homo sapiens
  CDR3 for beta chain variable domain of TCR clone 367695 (TRBV2, TRBJ2-1)
CASSELAGSYNEQFF

SEQ ID NO: 735391 - protein, 10 aa, Homo sapiens
  CDR3 for alpha chain variable domain of TCR clone 367696 (TRAV12-3, TRAJ49)
CAMNDDQFYF

SEQ ID NO: 735392 - protein, 15 aa, Homo sapiens
  CDR3 for beta chain variable domain of TCR clone 367696 (TRBV7-9, TRBJ2-1)
CASSPQREPYNEQFF

SEQ ID NO: 735393 - protein, 12 aa, Homo sapiens
  CDR3 for alpha chain variable domain of TCR clone 367697 (TRAV35, TRAJ36)
CWASDRANNLFF

SEQ ID NO: 735394 - protein, 15 aa, Homo sapiens
  CDR3 for beta chain variable domain of TCR clone 367697 (TRBV28, TRBJ2-5)
CASSPPWSYQETQYF

SEQ ID NO: 735395 - protein, 15 aa, Homo sapiens
  CDR3 for alpha chain variable domain of TCR clone 367698 (TRAV8-4, TRAJ13)
CAVSDWGGGYQKVTF

SEQ ID NO: 735396 - protein, 15 aa, Homo sapiens
  CDR3 for beta chain variable domain of TCR clone 367698 (TRBV25-1, TRBJ1-4)
CASSPGDSANEKLFF

SEQ ID NO: 735397 - protein, 15 aa, Homo sapiens
  CDR3 for alpha chain variable domain of TCR clone 367699 (TRAV29/DV5, TRAJ40)
CAASAQGSGTYKYIF

SEQ ID NO: 735398 - protein, 18 aa, Homo sapiens
  CDR3 for beta chain variable domain of TCR clone 367699 (TRBV25-1, TRBJ1-2)
CASSGLQNGQGLIFGYTF

SEQ ID NO: 735399 - protein, 12 aa, Homo sapiens
  CDR3 for alpha chain variable domain of TCR clone 367700 (TRAV12-3, TRAJ17)
CAMTLTGNKLTF

SEQ ID NO: 735400 - protein, 13 aa, Homo sapiens
  CDR3 for beta chain variable domain of TCR clone 367700 (TRBV3-1, TRBJ2-2)
CASLARGSGELFF

SEQ ID NO: 735401 - protein, 13 aa, Homo sapiens
  CDR3 for alpha chain variable domain of TCR clone 367701 (TRAV1-2, TRAJ9)
CAVKWAGGFKTIF

SEQ ID NO: 735402 - protein, 12 aa, Homo sapiens
  CDR3 for beta chain variable domain of TCR clone 367701 (TRBV7-8, TRBJ2-7)
CASSLGDREQYF

SEQ ID NO: 735403 - protein, 14 aa, Homo sapiens
  CDR3 for alpha chain variable domain of TCR clone 367702 (TRAV12-2, TRAJ13)
CAVKKTGFYQKVTF

SEQ ID NO: 735404 - protein, 15 aa, Homo sapiens
  CDR3 for beta chain variable domain of TCR clone 367702 (TRBV27, TRBJ2-1)
CASSNGGGSSNEQFF

SEQ ID NO: 735405 - protein, 13 aa, Homo sapiens
  CDR3 for alpha chain variable domain of TCR clone 367703 (TRAV8-6, TRAJ54)
CALIAQGAQKLVL

SEQ ID NO: 735406 - protein, 13 aa, Homo sapiens
  CDR3 for beta chain variable domain of TCR clone 367703 (TRBV7-9, TRBJ1-2)
CASSLKQNYGYTF

SEQ ID NO: 735407 - protein, 12 aa, Homo sapiens
  CDR3 for alpha chain variable domain of TCR clone 367704 (TRAV12-1, TRAJ48)
WVARRGNEKVTF

SEQ ID NO: 735408 - protein, 14 aa, Homo sapiens
  CDR3 for beta chain variable domain of TCR clone 367704 (TRBV28, TRBJ2-1)
CASSLNGRNNEQFF

SEQ ID NO: 735409 - protein, 14 aa, Homo sapiens
  CDR3 for alpha chain variable domain of TCR clone 367705 (TRAV1-2, TRAJ16)
RSVNRFSDGQKLLF

SEQ ID NO: 735410 - protein, 15 aa, Homo sapiens
  CDR3 for beta chain variable domain of TCR clone 367705 (TRBV7-9, TRBJ1-6)
CASSSPGRGNSPLHF

SEQ ID NO: 735411 - protein, 13 aa, Homo sapiens
  CDR3 for alpha chain variable domain of TCR clone 367706 (TRAV26-1, TRAJ48)
CIVRVVGDEELTF

SEQ ID NO: 735412 - protein, 19 aa, Homo sapiens
  CDR3 for beta chain variable domain of TCR clone 367706 (TRBV11-3, TRBJ2-2)
CASSTRPGAKTTNTGELLF

SEQ ID NO: 735413 - protein, 14 aa, Homo sapiens
  CDR3 for alpha chain variable domain of TCR clone 367707 (TRAV12-2, TRAJ13)
CAVKKTGGYQKVPF

SEQ ID NO: 735414 - protein, 12 aa, Homo sapiens
  CDR3 for beta chain variable domain of TCR clone 367707 (TRBV6-3, TRBJ2-7)
CASSLTPYEQYF

SEQ ID NO: 735415 - protein, 17 aa, Homo sapiens
  CDR3 for alpha chain variable domain of TCR clone 367708 (TRAV3, TRAJ6)
CAVRDGPRAGGRYIPTF

SEQ ID NO: 735416 - protein, 15 aa, Homo sapiens
  CDR3 for beta chain variable domain of TCR clone 367708 (TRBV7-9, TRBJ1-5)
CASSQGHQPNQPQHF

SEQ ID NO: 735417 - protein, 14 aa, Homo sapiens
  CDR3 for alpha chain variable domain of TCR clone 367709 (TRAV3, TRAJ7)
CAVREEERELQTRF

SEQ ID NO: 735418 - protein, 12 aa, Homo sapiens
  CDR3 for beta chain variable domain of TCR clone 367709 (TRBV7-8, TRBJ2-7)
CASSLGDREQYF

SEQ ID NO: 735419 - protein, 12 aa, Homo sapiens
  CDR3 for alpha chain variable domain of TCR clone 367710 (TRAV12-3, TRAJ49)
CAKFKTGNQFYF

SEQ ID NO: 735420 - protein, 15 aa, Homo sapiens
  CDR3 for beta chain variable domain of TCR clone 367710 (TRBV7-9, TRBJ1-4)
CASSARTGGNEKLFF

SEQ ID NO: 735421 - protein, 22 aa, Homo sapiens
  CDR3 for alpha chain variable domain of TCR clone 367711 (TRAV26-1, TRAJ46)
CIVRVGKEKQRRQADFWDRDSF

SEQ ID NO: 735422 - protein, 16 aa, Homo sapiens
  CDR3 for beta chain variable domain of TCR clone 367711 (TRBV27, TRBJ2-2)
CASSFRGLVRTGELFF

SEQ ID NO: 735423 - protein, 15 aa, Homo sapiens
  CDR3 for alpha chain variable domain of TCR clone 367712 (TRAV1-2, TRAJ15)
CAVDVMGSAGTALIF

SEQ ID NO: 735424 - protein, 13 aa, Homo sapiens
  CDR3 for beta chain variable domain of TCR clone 367712 (TRBV20-1, TRBJ1-1)
CSAFDRENTEAVF

SEQ ID NO: 735425 - protein, 16 aa, Homo sapiens
  CDR3 for alpha chain variable domain of TCR clone 367713 (TRAV12-3, TRAJ53)
CAMSVGSGGSNYKLTF

SEQ ID NO: 735426 - protein, 16 aa, Homo sapiens
  CDR3 for beta chain variable domain of TCR clone 367713 (TRBV19, TRBJ2-1)
CASSKAGPSSYNEQFF

SEQ ID NO: 735427 - protein, 16 aa, Homo sapiens
  CDR3 for alpha chain variable domain of TCR clone 367714 (TRAV30, TRAJ28)
CGTVTPRRAGSYQLTF

SEQ ID NO: 735428 - protein, 11 aa, Homo sapiens
  CDR3 for beta chain variable domain of TCR clone 367714 (TRBV12-4, TRBJ2-3)
CASTATDTQYF

SEQ ID NO: 735429 - protein, 13 aa, Homo sapiens
  CDR3 for alpha chain variable domain of TCR clone 367715 (TRAV16, TRAJ27)
CALRRTNAGKSTF

SEQ ID NO: 735430 - protein, 15 aa, Homo sapiens
  CDR3 for beta chain variable domain of TCR clone 367715 (TRBV18, TRBJ2-1)
CASSPPSACYNEQFF

SEQ ID NO: 735431 - protein, 14 aa, Homo sapiens
  CDR3 for alpha chain variable domain of TCR clone 367716 (TRAV29/DV5, TRAJ32)
CAAAHGGATNKLIF

SEQ ID NO: 735432 - protein, 11 aa, Homo sapiens
  CDR3 for beta chain variable domain of TCR clone 367716 (TRBV11-2, TRBJ2-2)
CASSLPGELFF

SEQ ID NO: 735433 - protein, 13 aa, Homo sapiens
  CDR3 for alpha chain variable domain of TCR clone 367717 (TRAV13-2, TRAJ13)
CADLSGGYLKVTF

SEQ ID NO: 735434 - protein, 15 aa, Homo sapiens
  CDR3 for beta chain variable domain of TCR clone 367717 (TRBV19, TRBJ1-1)
CASSIGGGRNTEAFF

SEQ ID NO: 735435 - protein, 15 aa, Homo sapiens
  CDR3 for alpha chain variable domain of TCR clone 367718 (TRAV26-1, TRAJ22)
CIVRVSFWFCKATDL

SEQ ID NO: 735436 - protein, 14 aa, Homo sapiens
  CDR3 for beta chain variable domain of TCR clone 367718 (TRBV7-9, TRBJ2-5)
CASSLAFGQETQYF

SEQ ID NO: 735437 - protein, 14 aa, Homo sapiens
  CDR3 for alpha chain variable domain of TCR clone 367719 (TRAV16, TRAJ42)
CALLAGGSQGNLVF

SEQ ID NO: 735438 - protein, 13 aa, Homo sapiens
  CDR3 for beta chain variable domain of TCR clone 367719 (TRBV7-9, TRBJ1-2)
CASSLKQNYGYTF

SEQ ID NO: 735439 - protein, 14 aa, Homo sapiens
  CDR3 for alpha chain variable domain of TCR clone 367720 (TRAV27, TRAJ50)
CAGGRKTSYDKVTF

SEQ ID NO: 735440 - protein, 11 aa, Homo sapiens
  CDR3 for beta chain variable domain of TCR clone 367720 (TRBV12-4, TRBJ2-3)
CASSSVRGRYF

SEQ ID NO: 735441 - protein, 16 aa, Homo sapiens
  CDR3 for alpha chain variable domain of TCR clone 367721 (TRAV26-1, TRAJ38)
CIVRAELGGNNRKLIW

SEQ ID NO: 735442 - protein, 14 aa, Homo sapiens
  CDR3 for beta chain variable domain of TCR clone 367721 (TRBV5-1, TRBJ2-3)
CASSPGLAADTQYF

SEQ ID NO: 735443 - protein, 15 aa, Homo sapiens
  CDR3 for alpha chain variable domain of TCR clone 367722 (TRAV13-1, TRAJ44)
CAASRGGGTASKLTL

SEQ ID NO: 735444 - protein, 14 aa, Homo sapiens
  CDR3 for beta chain variable domain of TCR clone 367722 (TRBV19, TRBJ1-5)
CASRAPDSFLSQHF

SEQ ID NO: 735445 - protein, 15 aa, Homo sapiens
  CDR3 for alpha chain variable domain of TCR clone 367723 (TRAV12-2, TRAJ53)
CAVNGGGGSNYKQTV

SEQ ID NO: 735446 - protein, 15 aa, Homo sapiens
  CDR3 for beta chain variable domain of TCR clone 367723 (TRBV12-4, TRBJ2-5)
CASSPPTGLQETQYF

SEQ ID NO: 735447 - protein, 13 aa, Homo sapiens
  CDR3 for alpha chain variable domain of TCR clone 367724 (TRAV12-1, TRAJ33)
CGDAPDSNYPLIW

SEQ ID NO: 735448 - protein, 12 aa, Homo sapiens
  CDR3 for beta chain variable domain of TCR clone 367724 (TRBV11-2, TRBJ2-2)
CASSLGGGELFF

SEQ ID NO: 735449 - protein, 15 aa, Homo sapiens
  CDR3 for alpha chain variable domain of TCR clone 367725 (TRAV13-1, TRAJ17)
CAASIERAAGNKLTF

SEQ ID NO: 735450 - protein, 15 aa, Homo sapiens
  CDR3 for beta chain variable domain of TCR clone 367725 (TRBV7-9, TRBJ2-2)
CASGPLDTFPGELFF

SEQ ID NO: 735451 - protein, 10 aa, Homo sapiens
  CDR3 for alpha chain variable domain of TCR clone 367726 (TRAV1-2, TRAJ31)
CAFFDARLMF

SEQ ID NO: 735452 - protein, 14 aa, Homo sapiens
  CDR3 for beta chain variable domain of TCR clone 367726 (TRBV7-2, TRBJ2-7)
CASSPKTSFYEQYF

SEQ ID NO: 735453 - protein, 16 aa, Homo sapiens
  CDR3 for alpha chain variable domain of TCR clone 367727 (TRAV12-3, TRAJ53)
CAMSPGSGGSHYKLPF

SEQ ID NO: 735454 - protein, 13 aa, Homo sapiens
  CDR3 for beta chain variable domain of TCR clone 367727 (TRBV20-1, TRBJ1-1)
CSAPLGGGTEAFF

SEQ ID NO: 735455 - protein, 13 aa, Homo sapiens
  CDR3 for alpha chain variable domain of TCR clone 367728 (TRAV1-2, TRAJ12)
CAVSMASSYKLIF

SEQ ID NO: 735456 - protein, 15 aa, Homo sapiens
  CDR3 for beta chain variable domain of TCR clone 367728 (TRBV27, TRBJ2-5)
CASSLIPSGGETQYF

SEQ ID NO: 735457 - protein, 15 aa, Homo sapiens
  CDR3 for alpha chain variable domain of TCR clone 367729 (TRAV3, TRAJ9)
CAVRARNTGGFKTIF

SEQ ID NO: 735458 - protein, 15 aa, Homo sapiens
  CDR3 for beta chain variable domain of TCR clone 367729 (TRBV7-3, TRBJ2-1)
CASSSRSSGRNEQFF

SEQ ID NO: 735459 - protein, 16 aa, Homo sapiens
  CDR3 for alpha chain variable domain of TCR clone 367730 (TRAV17, TRAJ52)
CATGIIGGTSYGKLTF

SEQ ID NO: 735460 - protein, 13 aa, Homo sapiens
  CDR3 for beta chain variable domain of TCR clone 367730 (TRBV20-1, TRBJ1-1)
CSSPPGGHTEAFF

SEQ ID NO: 735461 - protein, 12 aa, Homo sapiens
  CDR3 for alpha chain variable domain of TCR clone 367731 (TRAV13-2, TRAJ8)
CAPWLGFQKLVF

SEQ ID NO: 735462 - protein, 14 aa, Homo sapiens
  CDR3 for beta chain variable domain of TCR clone 367731 (TRBV18, TRBJ2-7)
CVSSPRGGAYEQYF

SEQ ID NO: 735463 - protein, 14 aa, Homo sapiens
  CDR3 for alpha chain variable domain of TCR clone 367732 (TRAV16, TRAJ15)
CALSFNQAGTALIF

SEQ ID NO: 735464 - protein, 15 aa, Homo sapiens
  CDR3 for beta chain variable domain of TCR clone 367732 (TRBV6-1, TRBJ2-3)
CASSERGGITDTQYF

SEQ ID NO: 735465 - protein, 13 aa, Homo sapiens
  CDR3 for alpha chain variable domain of TCR clone 367733 (TRAV12-3, TRAJ33)
CAMSVNSNYQLIR

SEQ ID NO: 735466 - protein, 14 aa, Homo sapiens
  CDR3 for beta chain variable domain of TCR clone 367733 (TRBV4-2, TRBJ2-1)
CASGLDRAYNEQFF

SEQ ID NO: 735467 - protein, 19 aa, Homo sapiens
  CDR3 for alpha chain variable domain of TCR clone 367734 (TRAV26-1, TRAJ52)
CIVRAHRNAGGTSYGKLTF

SEQ ID NO: 735468 - protein, 15 aa, Homo sapiens
  CDR3 for beta chain variable domain of TCR clone 367734 (TRBV9, TRBJ1-6)
CASSVAGTGESPLHF

SEQ ID NO: 735469 - protein, 16 aa, Homo sapiens
  CDR3 for alpha chain variable domain of TCR clone 367735 (TRAV20, TRAJ10)
CAVLRGLTGGGNKLTF

SEQ ID NO: 735470 - protein, 14 aa, Homo sapiens
  CDR3 for beta chain variable domain of TCR clone 367735 (TRBV19, TRBJ1-5)
CASSAPDSFLTQHF

SEQ ID NO: 735471 - protein, 12 aa, Homo sapiens
  CDR3 for alpha chain variable domain of TCR clone 367736 (TRAV17, TRAJ39)
CATGAAGNMLTF

SEQ ID NO: 735472 - protein, 14 aa, Homo sapiens
  CDR3 for beta chain variable domain of TCR clone 367736 (TRBV7-9, TRBJ1-2)
CASSRQGADYGYTF

SEQ ID NO: 735473 - protein, 15 aa, Homo sapiens
  CDR3 for alpha chain variable domain of TCR clone 367737 (TRAV8-3, TRAJ45)
CASSYSGGGADGLTF

SEQ ID NO: 735474 - protein, 12 aa, Homo sapiens
  CDR3 for beta chain variable domain of TCR clone 367737 (TRBV14, TRBJ1-1)
CASSQLKGLAFF

SEQ ID NO: 735475 - protein, 14 aa, Homo sapiens
  CDR3 for alpha chain variable domain of TCR clone 367738 (TRAV26-1, TRAJ38)
CIVVGAGNNRKLIW

SEQ ID NO: 735476 - protein, 17 aa, Homo sapiens
  CDR3 for beta chain variable domain of TCR clone 367738 (TRBV11-2, TRBJ2-1)
CASSLYPPGVEYNEQFF

SEQ ID NO: 735477 - protein, 16 aa, Homo sapiens
  CDR3 for alpha chain variable domain of TCR clone 367739 (TRAV12-3, TRAJ53)
CAMSVGSGGSNYKLTF

SEQ ID NO: 735478 - protein, 11 aa, Homo sapiens
  CDR3 for beta chain variable domain of TCR clone 367739 (TRBV29-1, TRBJ2-5)
CSVAGGETQYF

SEQ ID NO: 735479 - protein, 11 aa, Homo sapiens
  CDR3 for alpha chain variable domain of TCR clone 367740 (TRAV13-1, TRAJ6)
CATLGSFIPTF

SEQ ID NO: 735480 - protein, 12 aa, Homo sapiens
  CDR3 for beta chain variable domain of TCR clone 367740 (TRBV11-2, TRBJ2-1)
CASSPGNNEQFF

SEQ ID NO: 735481 - protein, 17 aa, Homo sapiens
  CDR3 for alpha chain variable domain of TCR clone 367741 (TRAV12-3, TRAJ6)
CAMRARGGAGESYIPTF

SEQ ID NO: 735482 - protein, 12 aa, Homo sapiens
  CDR3 for beta chain variable domain of TCR clone 367741 (TRBV12-4, TRBJ2-3)
CASSTLPDTQYF

SEQ ID NO: 735483 - protein, 18 aa, Homo sapiens
  CDR3 for alpha chain variable domain of TCR clone 367742 (TRAV8-4, TRAJ52)
CAVTRANAGGTSYGKLTY

SEQ ID NO: 735484 - protein, 20 aa, Homo sapiens
  CDR3 for beta chain variable domain of TCR clone 367742 (TRBV19, TRBJ2-1)
CASSISRTVTSTRLNNEQFF

SEQ ID NO: 735485 - protein, 15 aa, Homo sapiens
  CDR3 for alpha chain variable domain of TCR clone 367743 (TRAV38-1, TRAJ28)
CAFRYSGAGSYQLTF

SEQ ID NO: 735486 - protein, 14 aa, Homo sapiens
  CDR3 for beta chain variable domain of TCR clone 367743 (TRBV7-2, TRBJ2-7)
CASRSQGAAYEQYF

SEQ ID NO: 735487 - protein, 13 aa, Homo sapiens
  CDR3 for alpha chain variable domain of TCR clone 367744 (TRAV21, TRAJ15)
CAVPNQAGAALIV

SEQ ID NO: 735488 - protein, 15 aa, Homo sapiens
  CDR3 for beta chain variable domain of TCR clone 367744 (TRBV12-4, TRBJ2-7)
CASSRGLAGTYEQYF

SEQ ID NO: 735489 - protein, 11 aa, Homo sapiens
  CDR3 for alpha chain variable domain of TCR clone 367745 (TRAV12-3, TRAJ43)
CAMSVSNDIRF

SEQ ID NO: 735490 - protein, 13 aa, Homo sapiens
  CDR3 for beta chain variable domain of TCR clone 367745 (TRBV20-1, TRBJ1-1)
CSAPLGGGTKAFF

SEQ ID NO: 735491 - protein, 18 aa, Homo sapiens
  CDR3 for alpha chain variable domain of TCR clone 367746 (TRAV12-3, TRAJ52)
CAMSVGGAGGTSYRKPTF

SEQ ID NO: 735492 - protein, 15 aa, Homo sapiens
  CDR3 for beta chain variable domain of TCR clone 367746 (TRBV27, TRBJ1-6)
CASSFDRGLGSPLHF

SEQ ID NO: 735493 - protein, 13 aa, Homo sapiens
  CDR3 for alpha chain variable domain of TCR clone 367747 (TRAV8-1, TRAJ28)
CAVSGAGSYQLTF

SEQ ID NO: 735494 - protein, 13 aa, Homo sapiens
  CDR3 for beta chain variable domain of TCR clone 367747 (TRBV10-3, TRBJ2-7)
CASKLAVNYEQYF

SEQ ID NO: 735495 - protein, 16 aa, Homo sapiens
  CDR3 for alpha chain variable domain of TCR clone 367748 (TRAV35, TRAJ52)
CAGHGSGGTSYGKLTF

SEQ ID NO: 735496 - protein, 17 aa, Homo sapiens
  CDR3 for beta chain variable domain of TCR clone 367748 (TRBV13, TRBJ2-3)
CASSLSRVAGGRNTQYF

SEQ ID NO: 735497 - protein, 14 aa, Homo sapiens
  CDR3 for alpha chain variable domain of TCR clone 367749 (TRAV8-4, TRAJ29)
CAVSAVEGNTPLVV

SEQ ID NO: 735498 - protein, 13 aa, Homo sapiens
  CDR3 for beta chain variable domain of TCR clone 367749 (TRBV12-4, TRBJ2-7)
CASSFQGRYEQYF

SEQ ID NO: 735499 - protein, 13 aa, Homo sapiens
  CDR3 for alpha chain variable domain of TCR clone 367750 (TRAV8-4, TRAJ48)
CAVSLFGNEKLTF

SEQ ID NO: 735500 - protein, 17 aa, Homo sapiens
  CDR3 for beta chain variable domain of TCR clone 367750 (TRBV7-8, TRBJ2-6)
CASSAGTGGAGANVLTF

SEQ ID NO: 735501 - protein, 13 aa, Homo sapiens
  CDR3 for alpha chain variable domain of TCR clone 367751 (TRAV3, TRAJ20)
CAVRDTPRYKLSF

SEQ ID NO: 735502 - protein, 16 aa, Homo sapiens
  CDR3 for beta chain variable domain of TCR clone 367751 (TRBV20-1, TRBJ1-2)
CSASMGQGVANYGYTF

SEQ ID NO: 735503 - protein, 17 aa, Homo sapiens
  CDR3 for alpha chain variable domain of TCR clone 367752 (TRAV3, TRAJ6)
CAVRDGPRAGGRYIPTS

SEQ ID NO: 735504 - protein, 14 aa, Homo sapiens
  CDR3 for beta chain variable domain of TCR clone 367752 (TRBV7-2, TRBJ2-7)
CASSPKTSFYEQYF

SEQ ID NO: 735505 - protein, 14 aa, Homo sapiens
  CDR3 for alpha chain variable domain of TCR clone 367753 (TRAV8-4, TRAJ5)
CAVSTDTGRRALTF

SEQ ID NO: 735506 - protein, 16 aa, Homo sapiens
  CDR3 for beta chain variable domain of TCR clone 367753 (TRBV15, TRBJ1-2)
CATSRGPMTGGGGYTF

SEQ ID NO: 735507 - protein, 13 aa, Homo sapiens
  CDR3 for alpha chain variable domain of TCR clone 367754 (TRAV3, TRAJ27)
CAVRPLVAGKSTF

SEQ ID NO: 735508 - protein, 12 aa, Homo sapiens
  CDR3 for beta chain variable domain of TCR clone 367754 (TRBV7-9, TRBJ2-7)
CATRTDAYEQYF

SEQ ID NO: 735509 - protein, 12 aa, Homo sapiens
  CDR3 for alpha chain variable domain of TCR clone 367755 (TRAV12-3, TRAJ17)
CAMTLTGNKLTF

SEQ ID NO: 735510 - protein, 12 aa, Homo sapiens
  CDR3 for beta chain variable domain of TCR clone 367755 (TRBV29-1, TRBJ2-1)
CASSPGNNEQFF

SEQ ID NO: 735511 - protein, 11 aa, Homo sapiens
  CDR3 for alpha chain variable domain of TCR clone 367756 (TRAV8-3, TRAJ15)
CAVGPGTALIF

SEQ ID NO: 735512 - protein, 15 aa, Homo sapiens
  CDR3 for beta chain variable domain of TCR clone 367756 (TRBV7-3, TRBJ2-2)
CASSETGQGTGELFF

SEQ ID NO: 735513 - protein, 16 aa, Homo sapiens
  CDR3 for alpha chain variable domain of TCR clone 367757 (TRAV20, TRAJ26)
CAVQHRRDNYGQNFVF

SEQ ID NO: 735514 - protein, 12 aa, Homo sapiens
  CDR3 for beta chain variable domain of TCR clone 367757 (TRBV28, TRBJ2-3)
CASSLYRDTQYF

SEQ ID NO: 735515 - protein, 13 aa, Homo sapiens
  CDR3 for alpha chain variable domain of TCR clone 367758 (TRAV3, TRAJ9)
CAFWNTGGFKTIF

SEQ ID NO: 735516 - protein, 14 aa, Homo sapiens
  CDR3 for beta chain variable domain of TCR clone 367758 (TRBV18, TRBJ2-7)
CASSPRGGAYEQYF

SEQ ID NO: 735517 - protein, 13 aa, Homo sapiens
  CDR3 for alpha chain variable domain of TCR clone 367759 (TRAV17, TRAJ37)
CATAPGNTGKLIF

SEQ ID NO: 735518 - protein, 13 aa, Homo sapiens
  CDR3 for beta chain variable domain of TCR clone 367759 (TRBV5-5, TRBJ2-5)
CASSSLGQETQYF

SEQ ID NO: 735519 - protein, 11 aa, Homo sapiens
  CDR3 for alpha chain variable domain of TCR clone 367760 (TRAV2, TRAJ33)
CAVESNYQLIW

SEQ ID NO: 735520 - protein, 14 aa, Homo sapiens
  CDR3 for beta chain variable domain of TCR clone 367760 (TRBV20-1, TRBJ2-1)
CSAQIGGSANEQFF

SEQ ID NO: 735521 - protein, 16 aa, Homo sapiens
  CDR3 for alpha chain variable domain of TCR clone 367761 (TRAV30, TRAJ24)
CGTEIVDADSWGKFTF

SEQ ID NO: 735522 - protein, 13 aa, Homo sapiens
  CDR3 for beta chain variable domain of TCR clone 367761 (TRBV11-2, TRBJ1-3)
CASRLSERNTIYF

SEQ ID NO: 735523 - protein, 14 aa, Homo sapiens
  CDR3 for alpha chain variable domain of TCR clone 367762 (TRAV12-1, TRAJ23)
CVVNIPNQGGKLIF

SEQ ID NO: 735524 - protein, 14 aa, Homo sapiens
  CDR3 for beta chain variable domain of TCR clone 367762 (TRBV11-2, TRBJ2-1)
CASSPSRQGGGQFF

SEQ ID NO: 735525 - protein, 15 aa, Homo sapiens
  CDR3 for alpha chain variable domain of TCR clone 367763 (TRAV21, TRAJ53)
CATLNSGGSNFKLTF

SEQ ID NO: 735526 - protein, 15 aa, Homo sapiens
  CDR3 for beta chain variable domain of TCR clone 367763 (TRBV20-1, TRBJ2-7)
CSARDRVSGMDEQYF

SEQ ID NO: 735527 - protein, 15 aa, Homo sapiens
  CDR3 for alpha chain variable domain of TCR clone 367764 (TRAV12-3, TRAJ6)
CAMRATTGGSYIPTF

SEQ ID NO: 735528 - protein, 15 aa, Homo sapiens
  CDR3 for beta chain variable domain of TCR clone 367764 (TRBV7-8, TRBJ2-1)
CASSLADSLYNEQFF

SEQ ID NO: 735529 - protein, 12 aa, Homo sapiens
  CDR3 for alpha chain variable domain of TCR clone 367765 (TRAV8-3, TRAJ20)
CAVGANDYKLSF

SEQ ID NO: 735530 - protein, 13 aa, Homo sapiens
  CDR3 for beta chain variable domain of TCR clone 367765 (TRBV12-4, TRBJ1-5)
CASSPDRAQPQHF

SEQ ID NO: 735531 - protein, 21 aa, Homo sapiens
  CDR3 for alpha chain variable domain of TCR clone 367766 (TRAV4, TRAJ3)
CCVLLPRGCPPGYSSASKVIF

SEQ ID NO: 735532 - protein, 14 aa, Homo sapiens
  CDR3 for beta chain variable domain of TCR clone 367766 (TRBV2, TRBJ1-6)
CALSPSDPRSPLHF

SEQ ID NO: 735533 - protein, 16 aa, Homo sapiens
  CDR3 for alpha chain variable domain of TCR clone 367767 (TRAV30, TRAJ24)
CGTEIGDADSWGKFPF

SEQ ID NO: 735534 - protein, 14 aa, Homo sapiens
  CDR3 for beta chain variable domain of TCR clone 367767 (TRBV12-5, TRBJ2-5)
CASGSRTHQETQYF

SEQ ID NO: 735535 - protein, 13 aa, Homo sapiens
  CDR3 for alpha chain variable domain of TCR clone 367768 (TRAV8-3, TRAJ30)
CAVGGWRDDKIIF

SEQ ID NO: 735536 - protein, 14 aa, Homo sapiens
  CDR3 for beta chain variable domain of TCR clone 367768 (TRBV20-1, TRBJ1-1)
CSAPPADMNTEDFF

SEQ ID NO: 735537 - protein, 12 aa, Homo sapiens
  CDR3 for alpha chain variable domain of TCR clone 367769 (TRAV8-3, TRAJ26)
CAGDNYGQNFVF

SEQ ID NO: 735538 - protein, 13 aa, Homo sapiens
  CDR3 for beta chain variable domain of TCR clone 367769 (TRBV5-1, TRBJ2-5)
CASGLIPAETQYF

SEQ ID NO: 735539 - protein, 14 aa, Homo sapiens
  CDR3 for alpha chain variable domain of TCR clone 367770 (TRAV35, TRAJ50)
CSGHRKTSYDKVIF

SEQ ID NO: 735540 - protein, 13 aa, Homo sapiens
  CDR3 for beta chain variable domain of TCR clone 367770 (TRBV7-7, TRBJ2-3)
CASSLSRADTKDF

SEQ ID NO: 735541 - protein, 13 aa, Homo sapiens
  CDR3 for alpha chain variable domain of TCR clone 367771 (TRAV39, TRAJ58)
CAGEETSGPRLTF

SEQ ID NO: 735542 - protein, 15 aa, Homo sapiens
  CDR3 for beta chain variable domain of TCR clone 367771 (TRBV4-1, TRBJ2-7)
CASSQNTGRLYEQYF

SEQ ID NO: 735543 - protein, 12 aa, Homo sapiens
  CDR3 for alpha chain variable domain of TCR clone 367772 (TRAV30, TRAJ43)
CGTEERGNDMRF

SEQ ID NO: 735544 - protein, 12 aa, Homo sapiens
  CDR3 for beta chain variable domain of TCR clone 367772 (TRBV11-2, TRBJ2-2)
CASSLGGGELFF

SEQ ID NO: 735545 - protein, 14 aa, Homo sapiens
  CDR3 for alpha chain variable domain of TCR clone 367773 (TRAV16, TRAJ32)
CSKRYGGATNKPIF

SEQ ID NO: 735546 - protein, 12 aa, Homo sapiens
  CDR3 for beta chain variable domain of TCR clone 367773 (TRBV7-9, TRBJ2-7)
CATRTDAYEQYF

SEQ ID NO: 735547 - protein, 14 aa, Homo sapiens
  CDR3 for alpha chain variable domain of TCR clone 367774 (TRAV27, TRAJ22)
CAGLPSGSSRQLTF

SEQ ID NO: 735548 - protein, 16 aa, Homo sapiens
  CDR3 for beta chain variable domain of TCR clone 367774 (TRBV7-3, TRBJ2-2)
CASSLKRGTLSGELFF

SEQ ID NO: 735549 - protein, 14 aa, Homo sapiens
  CDR3 for alpha chain variable domain of TCR clone 367775 (TRAV12-2, TRAJ40)
CAVKIPPGTYKYIF

SEQ ID NO: 735550 - protein, 13 aa, Homo sapiens
  CDR3 for beta chain variable domain of TCR clone 367775 (TRBV19, TRBJ2-7)
CASSAGHGYEQYF

SEQ ID NO: 735551 - protein, 13 aa, Homo sapiens
  CDR3 for alpha chain variable domain of TCR clone 367776 (TRAV2, TRAJ40)
CAVVTSGTYKYIF

SEQ ID NO: 735552 - protein, 14 aa, Homo sapiens
  CDR3 for beta chain variable domain of TCR clone 367776 (TRBV19, TRBJ2-1)
CASPTFVGRGGQFF

SEQ ID NO: 735553 - protein, 16 aa, Homo sapiens
  CDR3 for alpha chain variable domain of TCR clone 367777 (TRAV2, TRAJ4)
CAVEDRFSGGYNKLIF

SEQ ID NO: 735554 - protein, 11 aa, Homo sapiens
  CDR3 for beta chain variable domain of TCR clone 367777 (TRBV11-2, TRBJ2-2)
CASSLPGELFF

SEQ ID NO: 735555 - protein, 13 aa, Homo sapiens
  CDR3 for alpha chain variable domain of TCR clone 367778 (TRAV12-3, TRAJ13)
CAMTSGGYQKVTF

SEQ ID NO: 735556 - protein, 14 aa, Homo sapiens
  CDR3 for beta chain variable domain of TCR clone 367778 (TRBV7-6, TRBJ2-3)
CASSLGTVTDTQYF

SEQ ID NO: 735557 - protein, 14 aa, Homo sapiens
  CDR3 for alpha chain variable domain of TCR clone 367779 (TRAV8-3, TRAJ4)
CAVGASGGYNKLIF

SEQ ID NO: 735558 - protein, 16 aa, Homo sapiens
  CDR3 for beta chain variable domain of TCR clone 367779 (TRBV19, TRBJ2-2)
CASSPSGGLNTGQLFF

SEQ ID NO: 735559 - protein, 10 aa, Homo sapiens
  CDR3 for alpha chain variable domain of TCR clone 367780 (TRAV13-2, TRAJ49)
CADTGNQFYF

SEQ ID NO: 735560 - protein, 13 aa, Homo sapiens
  CDR3 for beta chain variable domain of TCR clone 367780 (TRBV10-3, TRBJ1-2)
CAISERDSFGYTF

SEQ ID NO: 735561 - protein, 15 aa, Homo sapiens
  CDR3 for alpha chain variable domain of TCR clone 367781 (TRAV3, TRAJ9)
GAVRDINTGGFKTIF

SEQ ID NO: 735562 - protein, 16 aa, Homo sapiens
  CDR3 for beta chain variable domain of TCR clone 367781 (TRBV19, TRBJ2-7)
RASSLIAGTYFYEQYF

SEQ ID NO: 735563 - protein, 14 aa, Homo sapiens
  CDR3 for alpha chain variable domain of TCR clone 367782 (TRAV12-1, TRAJ17)
CVVNYKAAGNKLPF

SEQ ID NO: 735564 - protein, 17 aa, Homo sapiens
  CDR3 for beta chain variable domain of TCR clone 367782 (TRBV20-1, TRBJ2-1)
RSASSSGLAGSYNEQFF

SEQ ID NO: 735565 - protein, 14 aa, Homo sapiens
  CDR3 for alpha chain variable domain of TCR clone 367783 (TRAV13-1, TRAJ26)
CAASSAHYGQNFVF

SEQ ID NO: 735566 - protein, 17 aa, Homo sapiens
  CDR3 for beta chain variable domain of TCR clone 367783 (TRBV25-1, TRBJ2-5)
CASSLRGGRGGQETQYF

SEQ ID NO: 735567 - protein, 10 aa, Homo sapiens
  CDR3 for alpha chain variable domain of TCR clone 367784 (TRAV13-2, TRAJ40)
CAKGKYIFGT

SEQ ID NO: 735568 - protein, 16 aa, Homo sapiens
  CDR3 for beta chain variable domain of TCR clone 367784 (TRBV7-7, TRBJ2-1)
CASSLASGTSYNEQFF

SEQ ID NO: 735569 - protein, 11 aa, Homo sapiens
  CDR3 for alpha chain variable domain of TCR clone 367785 (TRAV16, TRAJ33)
CALHSNYQLIW

SEQ ID NO: 735570 - protein, 15 aa, Homo sapiens
  CDR3 for beta chain variable domain of TCR clone 367785 (TRBV28, TRBJ2-1)
CASRKRGALRNEQFF

SEQ ID NO: 735571 - protein, 17 aa, Homo sapiens
  CDR3 for alpha chain variable domain of TCR clone 367786 (TRAV36/DV7, TRAJ52)
CAVAQRAGGTSYGKLTF

SEQ ID NO: 735572 - protein, 17 aa, Homo sapiens
  CDR3 for beta chain variable domain of TCR clone 367786 (TRBV28, TRBJ2-5)
CASSTPAGDALQETQYF

SEQ ID NO: 735573 - protein, 15 aa, Homo sapiens
  CDR3 for alpha chain variable domain of TCR clone 367787 (TRAV25, TRAJ52)
CAGTSGGTSYGKLTF

SEQ ID NO: 735574 - protein, 15 aa, Homo sapiens
  CDR3 for beta chain variable domain of TCR clone 367787 (TRBV19, TRBJ2-1)
CASSTGASSYNEQFF

SEQ ID NO: 735575 - protein, 12 aa, Homo sapiens
  CDR3 for alpha chain variable domain of TCR clone 367788 (TRAV12-3, TRAJ17)
CAMTLTGNKLTF

SEQ ID NO: 735576 - protein, 15 aa, Homo sapiens
  CDR3 for beta chain variable domain of TCR clone 367788 (TRBV20-1, TRBJ2-7)
CSASDRGSGMDEQYF

SEQ ID NO: 735577 - protein, 14 aa, Homo sapiens
  CDR3 for alpha chain variable domain of TCR clone 367789 (TRAV12-3, TRAJ53)
CGATSGGSNYKLTC

SEQ ID NO: 735578 - protein, 13 aa, Homo sapiens
  CDR3 for beta chain variable domain of TCR clone 367789 (TRBV19, TRBJ1-5)
CASSTQDGQPQHF

SEQ ID NO: 735579 - protein, 12 aa, Homo sapiens
  CDR3 for alpha chain variable domain of TCR clone 367790 (TRAV29/DV5, TRAJ43)
CAAPYNNNDIRF

SEQ ID NO: 735580 - protein, 15 aa, Homo sapiens
  CDR3 for beta chain variable domain of TCR clone 367790 (TRBV18, TRBJ1-6)
CASSRIQGRNSPLHF

SEQ ID NO: 735581 - protein, 13 aa, Homo sapiens
  CDR3 for alpha chain variable domain of TCR clone 367791 (TRAV38-1, TRAJ20)
CAFMRDNDYKLSF

SEQ ID NO: 735582 - protein, 12 aa, Homo sapiens
  CDR3 for beta chain variable domain of TCR clone 367791 (TRBV18, TRBJ2-5)
CASSPSKEAQYF

SEQ ID NO: 735583 - protein, 13 aa, Homo sapiens
  CDR3 for alpha chain variable domain of TCR clone 367792 (TRAV12-1, TRAJ26)
SATYLYYGQNLVF

SEQ ID NO: 735584 - protein, 15 aa, Homo sapiens
  CDR3 for beta chain variable domain of TCR clone 367792 (TRBV5-1, TRBJ2-6)
CASSLDPSGANVLTF

SEQ ID NO: 735585 - protein, 13 aa, Homo sapiens
  CDR3 for alpha chain variable domain of TCR clone 367793 (TRAV8-3, TRAJ36)
CAVGATGANNLFF

SEQ ID NO: 735586 - protein, 13 aa, Homo sapiens
  CDR3 for beta chain variable domain of TCR clone 367793 (TRBV12-4, TRBJ1-2)
CASSLLQGKGYTF

SEQ ID NO: 735587 - protein, 13 aa, Homo sapiens
  CDR3 for alpha chain variable domain of TCR clone 367794 (TRAV27, TRAJ45)
CRSSGGGADALTF

SEQ ID NO: 735588 - protein, 11 aa, Homo sapiens
  CDR3 for beta chain variable domain of TCR clone 367794 (TRBV19, TRBJ1-1)
CASSIGSEAFF

SEQ ID NO: 735589 - protein, 12 aa, Homo sapiens
  CDR3 for alpha chain variable domain of TCR clone 367795 (TRAV12-3, TRAJ17)
CAMTLTGNNLTF

SEQ ID NO: 735590 - protein, 14 aa, Homo sapiens
  CDR3 for beta chain variable domain of TCR clone 367795 (TRBV12-4, TRBJ1-1)
CASSLGTGGTEAFF

SEQ ID NO: 735591 - protein, 14 aa, Homo sapiens
  CDR3 for alpha chain variable domain of TCR clone 367796 (TRAV12-2, TRAJ13)
CAVKKTGGYQKVTF

SEQ ID NO: 735592 - protein, 16 aa, Homo sapiens
  CDR3 for beta chain variable domain of TCR clone 367796 (TRBV28, TRBJ1-4)
CASSPPYRGRSGKLFF

SEQ ID NO: 735593 - protein, 13 aa, Homo sapiens
  CDR3 for alpha chain variable domain of TCR clone 367797 (TRAV2, TRAJ39)
TTVHNNAGNMLTF

SEQ ID NO: 735594 - protein, 12 aa, Homo sapiens
  CDR3 for beta chain variable domain of TCR clone 367797 (TRBV7-8, TRBJ2-7)
CASSLGDREQYF

SEQ ID NO: 735595 - protein, 11 aa, Homo sapiens
  CDR3 for alpha chain variable domain of TCR clone 367798 (TRAV21, TRAJ33)
CAVLSNYHLIW

SEQ ID NO: 735596 - protein, 15 aa, Homo sapiens
  CDR3 for beta chain variable domain of TCR clone 367798 (TRBV11-2, TRBJ2-7)
CASSLMVGGSYEQYF

SEQ ID NO: 735597 - protein, 12 aa, Homo sapiens
  CDR3 for alpha chain variable domain of TCR clone 367799 (TRAV23/DV6, TRAJ41)
CAASRDGNALNF

SEQ ID NO: 735598 - protein, 16 aa, Homo sapiens
  CDR3 for beta chain variable domain of TCR clone 367799 (TRBV6-3, TRBJ1-1)
CASSYPLVGGSYEAFF

SEQ ID NO: 735599 - protein, 12 aa, Homo sapiens
  CDR3 for alpha chain variable domain of TCR clone 367800 (TRAV17, TRAJ39)
CATGAAGNMLTF

SEQ ID NO: 735600 - protein, 14 aa, Homo sapiens
  CDR3 for beta chain variable domain of TCR clone 367800 (TRBV19, TRBJ2-1)
CASPTFVLSGEQFF

SEQ ID NO: 735601 - protein, 16 aa, Homo sapiens
  CDR3 for alpha chain variable domain of TCR clone 367801 (TRAV3, TRAJ37)
CAVSPHGSGNTGKLIF

SEQ ID NO: 735602 - protein, 14 aa, Homo sapiens
  CDR3 for beta chain variable domain of TCR clone 367801 (TRBV20-1, TRBJ2-1)
CSARGGSSYNEQFF

SEQ ID NO: 735603 - protein, 14 aa, Homo sapiens
  CDR3 for alpha chain variable domain of TCR clone 367802 (TRAV1-2, TRAJ16)
CAVNRFSDGKKLLF

SEQ ID NO: 735604 - protein, 15 aa, Homo sapiens
  CDR3 for beta chain variable domain of TCR clone 367802 (TRBV9, TRBJ1-6)
CASSVAGTGDSTLHF

SEQ ID NO: 735605 - protein, 11 aa, Homo sapiens
  CDR3 for alpha chain variable domain of TCR clone 367803 (TRAV12-3, TRAJ43)
CAMSVSNDMRF

SEQ ID NO: 735606 - protein, 14 aa, Homo sapiens
  CDR3 for beta chain variable domain of TCR clone 367803 (TRBV5-1, TRBJ2-2)
CASSQAVNTGELFF

SEQ ID NO: 735607 - protein, 15 aa, Homo sapiens
  CDR3 for alpha chain variable domain of TCR clone 367804 (TRAV12-1, TRAJ36)
CGVNEHQTGANNLFF

SEQ ID NO: 735608 - protein, 18 aa, Homo sapiens
  CDR3 for beta chain variable domain of TCR clone 367804 (TRBV10-3, TRBJ2-5)
CAIRTSGGKRPSTSGQAR

SEQ ID NO: 735609 - protein, 15 aa, Homo sapiens
  CDR3 for alpha chain variable domain of TCR clone 367805 (TRAV29/DV5, TRAJ24)
CAASGATDSWGKFQF

SEQ ID NO: 735610 - protein, 12 aa, Homo sapiens
  CDR3 for beta chain variable domain of TCR clone 367805 (TRBV11-2, TRBJ2-2)
CASSLPTGELFL

SEQ ID NO: 735611 - protein, 13 aa, Homo sapiens
  CDR3 for alpha chain variable domain of TCR clone 367806 (TRAV3, TRAJ21)
CAVREPDFDKFYF

SEQ ID NO: 735612 - protein, 18 aa, Homo sapiens
  CDR3 for beta chain variable domain of TCR clone 367806 (TRBV11-2, TRBJ2-3)
CASSLGGASRGAPNTQYF

SEQ ID NO: 735613 - protein, 12 aa, Homo sapiens
  CDR3 for alpha chain variable domain of TCR clone 367807 (TRAV12-3, TRAJ17)
CAMTLTGNKVPF

SEQ ID NO: 735614 - protein, 15 aa, Homo sapiens
  CDR3 for beta chain variable domain of TCR clone 367807 (TRBV20-1, TRBJ2-7)
CSARDRVSGMDEQYF

SEQ ID NO: 735615 - protein, 13 aa, Homo sapiens
  CDR3 for alpha chain variable domain of TCR clone 367808 (TRAV13-1, TRAJ53)
CAASKGSNYKLTF

SEQ ID NO: 735616 - protein, 13 aa, Homo sapiens
  CDR3 for beta chain variable domain of TCR clone 367808 (TRBV29-1, TRBJ2-5)
CSVTIASEETQYC

SEQ ID NO: 735617 - protein, 13 aa, Homo sapiens
  CDR3 for alpha chain variable domain of TCR clone 367809 (TRAV20, TRAJ21)
CAVEGYNFNKFYF

SEQ ID NO: 735618 - protein, 13 aa, Homo sapiens
  CDR3 for beta chain variable domain of TCR clone 367809 (TRBV12-4, TRBJ1-5)
CASSPDRAQPQHF

SEQ ID NO: 735619 - protein, 14 aa, Homo sapiens
  CDR3 for alpha chain variable domain of TCR clone 367810 (TRAV12-2, TRAJ11)
CAVNRESGYSTLTF

SEQ ID NO: 735620 - protein, 18 aa, Homo sapiens
  CDR3 for beta chain variable domain of TCR clone 367810 (TRBV11-2, TRBJ2-3)
CASSLGGASRGAPNTQYF

SEQ ID NO: 735621 - protein, 16 aa, Homo sapiens
  CDR3 for alpha chain variable domain of TCR clone 367811 (TRAV30, TRAJ24)
CGTEMVDADSWGKFPF

SEQ ID NO: 735622 - protein, 12 aa, Homo sapiens
  CDR3 for beta chain variable domain of TCR clone 367811 (TRBV11-2, TRBJ2-1)
CASSPGNNDQFF

SEQ ID NO: 735623 - protein, 11 aa, Homo sapiens
  CDR3 for alpha chain variable domain of TCR clone 367812 (TRAV17, TRAJ31)
CATSNNARLMF

SEQ ID NO: 735624 - protein, 14 aa, Homo sapiens
  CDR3 for beta chain variable domain of TCR clone 367812 (TRBV12-4, TRBJ1-6)
CASNLQGKGSPLHF

SEQ ID NO: 735625 - protein, 15 aa, Homo sapiens
  CDR3 for alpha chain variable domain of TCR clone 367813 (TRAV8-3, TRAJ21)
CAVGALPPRGYKFYF

SEQ ID NO: 735626 - protein, 15 aa, Homo sapiens
  CDR3 for beta chain variable domain of TCR clone 367813 (TRBV10-2, TRBJ2-6)
CASSEQGTGANVLTF

SEQ ID NO: 735627 - protein, 14 aa, Homo sapiens
  CDR3 for alpha chain variable domain of TCR clone 367814 (TRAV13-2, TRAJ23)
CAENTYNQGGKLIF

SEQ ID NO: 735628 - protein, 17 aa, Homo sapiens
  CDR3 for beta chain variable domain of TCR clone 367814 (TRBV19, TRBJ2-6)
CASSTGQVFSGANVLTF

SEQ ID NO: 735629 - protein, 13 aa, Homo sapiens
  CDR3 for alpha chain variable domain of TCR clone 367815 (TRAV12-2, TRAJ9)
CAVLETGGFKTIF

SEQ ID NO: 735630 - protein, 15 aa, Homo sapiens
  CDR3 for beta chain variable domain of TCR clone 367815 (TRBV6-3, TRBJ2-7)
CASSRTGVNLYEQYC

SEQ ID NO: 735631 - protein, 13 aa, Homo sapiens
  CDR3 for alpha chain variable domain of TCR clone 367816 (TRAV17, TRAJ40)
CATDEGGTYKYIF

SEQ ID NO: 735632 - protein, 13 aa, Homo sapiens
  CDR3 for beta chain variable domain of TCR clone 367816 (TRBV6-3, TRBJ2-5)
CASSYRMTENQYF

SEQ ID NO: 735633 - protein, 12 aa, Homo sapiens
  CDR3 for alpha chain variable domain of TCR clone 367817 (TRAV4, TRAJ26)
CLVGDYGQNFVF

SEQ ID NO: 735634 - protein, 13 aa, Homo sapiens
  CDR3 for beta chain variable domain of TCR clone 367817 (TRBV7-2, TRBJ1-2)
CASSSNQDRRGMA

SEQ ID NO: 735635 - protein, 13 aa, Homo sapiens
  CDR3 for alpha chain variable domain of TCR clone 367818 (TRAV13-1, TRAJ11)
CAASIRGYSTLTF

SEQ ID NO: 735636 - protein, 12 aa, Homo sapiens
  CDR3 for beta chain variable domain of TCR clone 367818 (TRBV11-2, TRBJ2-2)
CASSLPTGELFF

SEQ ID NO: 735637 - protein, 15 aa, Homo sapiens
  CDR3 for alpha chain variable domain of TCR clone 367819 (TRAV26-1, TRAJ44)
CIARVPFGTASKLTF

SEQ ID NO: 735638 - protein, 17 aa, Homo sapiens
  CDR3 for beta chain variable domain of TCR clone 367819 (TRBV24-1, TRBJ2-4)
CAPSDAEARGVRNIQYF

SEQ ID NO: 735639 - protein, 15 aa, Homo sapiens
  CDR3 for alpha chain variable domain of TCR clone 367820 (TRAV4, TRAJ10)
CLVGDGSGGGNKLTF

SEQ ID NO: 735640 - protein, 15 aa, Homo sapiens
  CDR3 for beta chain variable domain of TCR clone 367820 (TRBV27, TRBJ2-3)
CASSSLAGVIVTQYF

SEQ ID NO: 735641 - protein, 16 aa, Homo sapiens
  CDR3 for alpha chain variable domain of TCR clone 367821 (TRAV26-2, TRAJ52)
CIRGPAGGTSYGTLTF

SEQ ID NO: 735642 - protein, 15 aa, Homo sapiens
  CDR3 for beta chain variable domain of TCR clone 367821 (TRBV20-1, TRBJ1-1)
CSASRGVTGNTEAFF

SEQ ID NO: 735643 - protein, 14 aa, Homo sapiens
  CDR3 for alpha chain variable domain of TCR clone 367822 (TRAV8-3, TRAJ4)
CAVGASGGYNKLIF

SEQ ID NO: 735644 - protein, 16 aa, Homo sapiens
  CDR3 for beta chain variable domain of TCR clone 367822 (TRBV4-3, TRBJ2-2)
CASSHLQGSGTGVLFF

SEQ ID NO: 735645 - protein, 15 aa, Homo sapiens
  CDR3 for alpha chain variable domain of TCR clone 367823 (TRAV21, TRAJ13)
CAVRPTSGGYQKDTF

SEQ ID NO: 735646 - protein, 15 aa, Homo sapiens
  CDR3 for beta chain variable domain of TCR clone 367823 (TRBV28, TRBJ2-7)
CASSPGGRGFYEQYF

SEQ ID NO: 735647 - protein, 14 aa, Homo sapiens
  CDR3 for alpha chain variable domain of TCR clone 367824 (TRAV38-2/DV8, TRAJ30)
CAYMVGLGGDKIIF

SEQ ID NO: 735648 - protein, 15 aa, Homo sapiens
  CDR3 for beta chain variable domain of TCR clone 367824 (TRBV7-9, TRBJ2-2)
CASRPADRDTGELFF

SEQ ID NO: 735649 - protein, 15 aa, Homo sapiens
  CDR3 for alpha chain variable domain of TCR clone 367825 (TRAV20, TRAJ50)
CAVRQMKTSYDKVIF

SEQ ID NO: 735650 - protein, 16 aa, Homo sapiens
  CDR3 for beta chain variable domain of TCR clone 367825 (TRBV15, TRBJ1-2)
CATSRGPRSGGGGYTF

SEQ ID NO: 735651 - protein, 13 aa, Homo sapiens
  CDR3 for alpha chain variable domain of TCR clone 367826 (TRAV2, TRAJ40)
CAVVTSGTYKYIF

SEQ ID NO: 735652 - protein, 15 aa, Homo sapiens
  CDR3 for beta chain variable domain of TCR clone 367826 (TRBV6-1, TRBJ2-1)
CASSELRGQYNEQFF

SEQ ID NO: 735653 - protein, 18 aa, Homo sapiens
  CDR3 for alpha chain variable domain of TCR clone 367827 (TRAV26-2, TRAJ45)
CILRVDKYSGGGADGITF

SEQ ID NO: 735654 - protein, 16 aa, Homo sapiens
  CDR3 for beta chain variable domain of TCR clone 367827 (TRBV2, TRBJ1-4)
CASNLLRGATNEKLFF

SEQ ID NO: 735655 - protein, 17 aa, Homo sapiens
  CDR3 for alpha chain variable domain of TCR clone 367828 (TRAV27, TRAJ18)
CAGLHRGRGSTLGRLYF

SEQ ID NO: 735656 - protein, 14 aa, Homo sapiens
  CDR3 for beta chain variable domain of TCR clone 367828 (TRBV20-1, TRBJ1-5)
CSDRGRGSNQPQHF

SEQ ID NO: 735657 - protein, 13 aa, Homo sapiens
  CDR3 for alpha chain variable domain of TCR clone 367829 (TRAV13-1, TRAJ11)
CAAVLAGYSTLTF

SEQ ID NO: 735658 - protein, 15 aa, Homo sapiens
  CDR3 for beta chain variable domain of TCR clone 367829 (TRBV2, TRBJ2-1)
CASSELAGSYNEQFF

SEQ ID NO: 735659 - protein, 18 aa, Homo sapiens
  CDR3 for alpha chain variable domain of TCR clone 367830 (TRAV13-1, TRAJ52)
CAASKRSAGGTSYGKLTF

SEQ ID NO: 735660 - protein, 22 aa, Homo sapiens
  CDR3 for beta chain variable domain of TCR clone 367830 (TRBV19, TRBJ2-1)
CASSVRDRVPGLAGGSTMSSSS

SEQ ID NO: 735661 - protein, 14 aa, Homo sapiens
  CDR3 for alpha chain variable domain of TCR clone 367831 (TRAV12-1, TRAJ38)
CVVNNAGNNRKLIW

SEQ ID NO: 735662 - protein, 16 aa, Homo sapiens
  CDR3 for beta chain variable domain of TCR clone 367831 (TRBV18, TRBJ2-7)
CASSPTVGQGTYEQYF

SEQ ID NO: 735663 - protein, 16 aa, Homo sapiens
  CDR3 for alpha chain variable domain of TCR clone 367832 (TRAV3, TRAJ10)
CAVRDMRAGGGNKLNF

SEQ ID NO: 735664 - protein, 16 aa, Homo sapiens
  CDR3 for beta chain variable domain of TCR clone 367832 (TRBV20-1, TRBJ1-4)
CSAPGQGLVTNEKLFF

SEQ ID NO: 735665 - protein, 14 aa, Homo sapiens
  CDR3 for alpha chain variable domain of TCR clone 367833 (TRAV1-2, TRAJ27)
CAVRSGANAGKSTF

SEQ ID NO: 735666 - protein, 15 aa, Homo sapiens
  CDR3 for beta chain variable domain of TCR clone 367833 (TRBV18, TRBJ2-7)
CASSPLQGRTYKQYF

SEQ ID NO: 735667 - protein, 13 aa, Homo sapiens
  CDR3 for alpha chain variable domain of TCR clone 367834 (TRAV8-1, TRAJ30)
CAVSRRRDDKIIF

SEQ ID NO: 735668 - protein, 15 aa, Homo sapiens
  CDR3 for beta chain variable domain of TCR clone 367834 (TRBV27, TRBJ1-3)
CASQATGDSGNTIYI

SEQ ID NO: 735669 - protein, 15 aa, Homo sapiens
  CDR3 for alpha chain variable domain of TCR clone 367835 (TRAV3, TRAJ47)
CAVRDIGEYGNKLVF

SEQ ID NO: 735670 - protein, 12 aa, Homo sapiens
  CDR3 for beta chain variable domain of TCR clone 367835 (TRBV11-2, TRBJ2-4)
CASSSASGSEYF

SEQ ID NO: 735671 - protein, 14 aa, Homo sapiens
  CDR3 for alpha chain variable domain of TCR clone 367836 (TRAV12-1, TRAJ26)
CVVKGSNYGENFVF

SEQ ID NO: 735672 - protein, 13 aa, Homo sapiens
  CDR3 for beta chain variable domain of TCR clone 367836 (TRBV19, TRBJ1-2)
CASSVPGQDGYTF

SEQ ID NO: 735673 - protein, 15 aa, Homo sapiens
  CDR3 for alpha chain variable domain of TCR clone 367837 (TRAV16, TRAJ57)
CSLSGGQGGSEKLVF

SEQ ID NO: 735674 - protein, 15 aa, Homo sapiens
  CDR3 for beta chain variable domain of TCR clone 367837 (TRBV5-1, TRBJ2-1)
CASSPPRAPYNEQFF

SEQ ID NO: 735675 - protein, 11 aa, Homo sapiens
  CDR3 for alpha chain variable domain of TCR clone 367838 (TRAV13-2, TRAJ23)
CAESPRGKLIF

SEQ ID NO: 735676 - protein, 18 aa, Homo sapiens
  CDR3 for beta chain variable domain of TCR clone 367838 (TRBV6-5, TRBJ1-1)
CASSYSAPGWTGGTEAFF

SEQ ID NO: 735677 - protein, 14 aa, Homo sapiens
  CDR3 for alpha chain variable domain of TCR clone 367839 (TRAV26-1, TRAJ34)
CIVRVAYNTDKLIF

SEQ ID NO: 735678 - protein, 13 aa, Homo sapiens
  CDR3 for beta chain variable domain of TCR clone 367839 (TRBV20-1, TRBJ2-7)
CSARGDTQDEQYF

SEQ ID NO: 735679 - protein, 12 aa, Homo sapiens
  CDR3 for alpha chain variable domain of TCR clone 367840 (TRAV13-1, TRAJ3)
QAYNSSASKIIF

SEQ ID NO: 735680 - protein, 17 aa, Homo sapiens
  CDR3 for beta chain variable domain of TCR clone 367840 (TRBV5-1, TRBJ2-7)
CASSKPEGREASYEQYF

SEQ ID NO: 735681 - protein, 10 aa, Homo sapiens
  CDR3 for alpha chain variable domain of TCR clone 367841 (TRAV30, TRAJ48)
CGIGNEKLTF

SEQ ID NO: 735682 - protein, 16 aa, Homo sapiens
  CDR3 for beta chain variable domain of TCR clone 367841 (TRBV28, TRBJ1-6)
CASSPLGGEDNSPLHF

SEQ ID NO: 735683 - protein, 14 aa, Homo sapiens
  CDR3 for alpha chain variable domain of TCR clone 367842 (TRAV1-2, TRAJ16)
CAVNRFSYGQKLLF

SEQ ID NO: 735684 - protein, 14 aa, Homo sapiens
  CDR3 for beta chain variable domain of TCR clone 367842 (TRBV5-1, TRBJ2-7)
CASSRGESLYEQYF

SEQ ID NO: 735685 - protein, 12 aa, Homo sapiens
  CDR3 for alpha chain variable domain of TCR clone 367843 (TRAV12-3, TRAJ17)
CAMTLSGNKLTF

SEQ ID NO: 735686 - protein, 15 aa, Homo sapiens
  CDR3 for beta chain variable domain of TCR clone 367843 (TRBV6-4, TRBJ2-7)
CASSDQGPPNYEQYF

SEQ ID NO: 735687 - protein, 11 aa, Homo sapiens
  CDR3 for alpha chain variable domain of TCR clone 367844 (TRAV23/DV6, TRAJ58)
CAARLLRGETS

SEQ ID NO: 735688 - protein, 15 aa, Homo sapiens
  CDR3 for beta chain variable domain of TCR clone 367844 (TRBV7-2, TRBJ2-1)
CASSFQADEYNEQFF

SEQ ID NO: 735689 - protein, 16 aa, Homo sapiens
  CDR3 for alpha chain variable domain of TCR clone 367845 (TRAV4, TRAJ9)
CLVGDPNRPGGFKTIF

SEQ ID NO: 735690 - protein, 16 aa, Homo sapiens
  CDR3 for beta chain variable domain of TCR clone 367845 (TRBV28, TRBJ1-4)
CASSQPYRGRSEKLFF

SEQ ID NO: 735691 - protein, 22 aa, Homo sapiens
  CDR3 for alpha chain variable domain of TCR clone 367846 (TRAV12-2, TRAJ32)
CSSETPSPVIQPPKSATNKLIF

SEQ ID NO: 735692 - protein, 14 aa, Homo sapiens
  CDR3 for beta chain variable domain of TCR clone 367846 (TRBV7-3, TRBJ2-1)
CASSPSGSYNEQFF

SEQ ID NO: 735693 - protein, 12 aa, Homo sapiens
  CDR3 for alpha chain variable domain of TCR clone 367847 (TRAV13-2, TRAJ39)
CAENNAGNMLTF

SEQ ID NO: 735694 - protein, 13 aa, Homo sapiens
  CDR3 for beta chain variable domain of TCR clone 367847 (TRBV7-6, TRBJ1-1)
CASSIKLGTEAFF

SEQ ID NO: 735695 - protein, 17 aa, Homo sapiens
  CDR3 for alpha chain variable domain of TCR clone 367848 (TRAV13-1, TRAJ52)
CAASSGAGGTSYGKLTF

SEQ ID NO: 735696 - protein, 16 aa, Homo sapiens
  CDR3 for beta chain variable domain of TCR clone 367848 (TRBV3-1, TRBJ2-5)
CASSPGQFNGFGTQYF

SEQ ID NO: 735697 - protein, 18 aa, Homo sapiens
  CDR3 for alpha chain variable domain of TCR clone 367849 (TRAV21, TRAJ52)
CAVRPSPAGGTSYGKLTF

SEQ ID NO: 735698 - protein, 16 aa, Homo sapiens
  CDR3 for beta chain variable domain of TCR clone 367849 (TRBV15, TRBJ2-7)
CATSRDRGRRRGEQYF

SEQ ID NO: 735699 - protein, 16 aa, Homo sapiens
  CDR3 for alpha chain variable domain of TCR clone 367850 (TRAV3, TRAJ37)
CAVRPHGSGNTGKPIF

SEQ ID NO: 735700 - protein, 16 aa, Homo sapiens
  CDR3 for beta chain variable domain of TCR clone 367850 (TRBV20-1, TRBJ1-4)
CSAPGQGLLTNEKLFF

SEQ ID NO: 735701 - protein, 15 aa, Homo sapiens
  CDR3 for alpha chain variable domain of TCR clone 367851 (TRAV21, TRAJ24)
CSARSSTDSWGKLQF

SEQ ID NO: 735702 - protein, 14 aa, Homo sapiens
  CDR3 for beta chain variable domain of TCR clone 367851 (TRBV19, TRBJ2-1)
CASPTFVLSGEQFF

SEQ ID NO: 735703 - protein, 14 aa, Homo sapiens
  CDR3 for alpha chain variable domain of TCR clone 367852 (TRAV8-2, TRAJ5)
CVVDMDPGRRALTF

SEQ ID NO: 735704 - protein, 15 aa, Homo sapiens
  CDR3 for beta chain variable domain of TCR clone 367852 (TRBV5-7, TRBJ2-1)
CASSYISGRGNEQFF

SEQ ID NO: 735705 - protein, 14 aa, Homo sapiens
  CDR3 for alpha chain variable domain of TCR clone 367853 (TRAV29/DV5, TRAJ36)
CAVRRKTGANNLFF

SEQ ID NO: 735706 - protein, 16 aa, Homo sapiens
  CDR3 for beta chain variable domain of TCR clone 367853 (TRBV20-1, TRBJ1-4)
CSAPGQGLLTNEKLFF

SEQ ID NO: 735707 - protein, 14 aa, Homo sapiens
  CDR3 for alpha chain variable domain of TCR clone 367854 (TRAV38-1, TRAJ45)
CASHSGGGADGLTF

SEQ ID NO: 735708 - protein, 13 aa, Homo sapiens
  CDR3 for beta chain variable domain of TCR clone 367854 (TRBV6-4, TRBJ1-5)
CASSADLNQPQHF

SEQ ID NO: 735709 - protein, 16 aa, Homo sapiens
  CDR3 for alpha chain variable domain of TCR clone 367855 (TRAV3, TRAJ37)
CDVRPHGSGNTGKLIF

SEQ ID NO: 735710 - protein, 16 aa, Homo sapiens
  CDR3 for beta chain variable domain of TCR clone 367855 (TRBV9, TRBJ1-2)
CASSVEEKVSPYGYTF

SEQ ID NO: 735711 - protein, 10 aa, Homo sapiens
  CDR3 for alpha chain variable domain of TCR clone 367856 (TRAV1-2, TRAJ31)
CAFFDARLMF

SEQ ID NO: 735712 - protein, 16 aa, Homo sapiens
  CDR3 for beta chain variable domain of TCR clone 367856 (TRBV28, TRBJ1-2)
CASSHGQGVYKDGYTF

SEQ ID NO: 735713 - protein, 16 aa, Homo sapiens
  CDR3 for alpha chain variable domain of TCR clone 367857 (TRAV27, TRAJ13)
CAGAKSDSGGYQKVTF

SEQ ID NO: 735714 - protein, 14 aa, Homo sapiens
  CDR3 for beta chain variable domain of TCR clone 367857 (TRBV5-1, TRBJ2-5)
CASSLAGKQETQYF

SEQ ID NO: 735715 - protein, 14 aa, Homo sapiens
  CDR3 for alpha chain variable domain of TCR clone 367858 (TRAV3, TRAJ21)
CAVRDAYNFNKFYF

SEQ ID NO: 735716 - protein, 14 aa, Homo sapiens
  CDR3 for beta chain variable domain of TCR clone 367858 (TRBV18, TRBJ2-5)
CASSPGVSQETQYF

SEQ ID NO: 735717 - protein, 13 aa, Homo sapiens
  CDR3 for alpha chain variable domain of TCR clone 367859 (TRAV38-1, TRAJ42)
CARWGGSQGNLNF

SEQ ID NO: 735718 - protein, 17 aa, Homo sapiens
  CDR3 for beta chain variable domain of TCR clone 367859 (TRBV20-1, TRBJ2-1)
CSARDPLAGVWDDEQFF

SEQ ID NO: 735719 - protein, 14 aa, Homo sapiens
  CDR3 for alpha chain variable domain of TCR clone 367860 (TRAV12-2, TRAJ13)
CAVNPSGGYQKVTF

SEQ ID NO: 735720 - protein, 15 aa, Homo sapiens
  CDR3 for beta chain variable domain of TCR clone 367860 (TRBV27, TRBJ2-1)
CASSNGGGSSNEQFF

SEQ ID NO: 735721 - protein, 13 aa, Homo sapiens
  CDR3 for alpha chain variable domain of TCR clone 367861 (TRAV17, TRAJ5)
CAPMDTGRRALIF

SEQ ID NO: 735722 - protein, 11 aa, Homo sapiens
  CDR3 for beta chain variable domain of TCR clone 367861 (TRBV19, TRBJ1-1)
CASSIGSEAFF

SEQ ID NO: 735723 - protein, 12 aa, Homo sapiens
  CDR3 for alpha chain variable domain of TCR clone 367862 (TRAV36/DV7, TRAJ41)
CAVPWDGDALNF

SEQ ID NO: 735724 - protein, 15 aa, Homo sapiens
  CDR3 for beta chain variable domain of TCR clone 367862 (TRBV4-2, TRBJ1-6)
CASSLKEGQESPLHF

SEQ ID NO: 735725 - protein, 12 aa, Homo sapiens
  CDR3 for alpha chain variable domain of TCR clone 367863 (TRAV13-1, TRAJ9)
CASHTGGFKTSF

SEQ ID NO: 735726 - protein, 13 aa, Homo sapiens
  CDR3 for beta chain variable domain of TCR clone 367863 (TRBV12-4, TRBJ1-2)
CASSSGSKDGYTF

SEQ ID NO: 735727 - protein, 15 aa, Homo sapiens
  CDR3 for alpha chain variable domain of TCR clone 367864 (TRAV26-1, TRAJ29)
CIIRVEGSGNTPLVF

SEQ ID NO: 735728 - protein, 14 aa, Homo sapiens
  CDR3 for beta chain variable domain of TCR clone 367864 (TRBV18, TRBJ2-7)
CASSPRGGAYEQYF

SEQ ID NO: 735729 - protein, 15 aa, Homo sapiens
  CDR3 for alpha chain variable domain of TCR clone 367865 (TRAV12-1, TRAJ40)
CVVNMHFPGTYKYIF

SEQ ID NO: 735730 - protein, 13 aa, Homo sapiens
  CDR3 for beta chain variable domain of TCR clone 367865 (TRBV7-9, TRBJ1-2)
CASSLKQNYGYTF

SEQ ID NO: 735731 - protein, 16 aa, Homo sapiens
  CDR3 for alpha chain variable domain of TCR clone 367866 (TRAV8-3, TRAJ8)
CAVPRDGNTGFQKLVF

SEQ ID NO: 735732 - protein, 16 aa, Homo sapiens
  CDR3 for beta chain variable domain of TCR clone 367866 (TRBV7-3, TRBJ2-2)
CASSLKRGTLSGELFF

SEQ ID NO: 735733 - protein, 14 aa, Homo sapiens
  CDR3 for alpha chain variable domain of TCR clone 367867 (TRAV12-1, TRAJ11)
CVVRPNSGYSTLTF

SEQ ID NO: 735734 - protein, 13 aa, Homo sapiens
  CDR3 for beta chain variable domain of TCR clone 367867 (TRBV19, TRBJ1-2)
CASSVPGQDGYTF

SEQ ID NO: 735735 - protein, 13 aa, Homo sapiens
  CDR3 for alpha chain variable domain of TCR clone 367868 (TRAV17, TRAJ30)
CATDADRDDKIIF

SEQ ID NO: 735736 - protein, 16 aa, Homo sapiens
  CDR3 for beta chain variable domain of TCR clone 367868 (TRBV7-3, TRBJ2-3)
CASSRTASLSTYTQYF

SEQ ID NO: 735737 - protein, 16 aa, Homo sapiens
  CDR3 for alpha chain variable domain of TCR clone 367869 (TRAV25, TRAJ24)
CAQRRGTTDSWGKLRF

SEQ ID NO: 735738 - protein, 14 aa, Homo sapiens
  CDR3 for beta chain variable domain of TCR clone 367869 (TRBV6-6, TRBJ1-5)
CASSYGPANQPQHF

SEQ ID NO: 735739 - protein, 15 aa, Homo sapiens
  CDR3 for alpha chain variable domain of TCR clone 367870 (TRAV13-1, TRAJ5)
CAASKADTGRRALTF

SEQ ID NO: 735740 - protein, 16 aa, Homo sapiens
  CDR3 for beta chain variable domain of TCR clone 367870 (TRBV7-2, TRBJ2-1)
CASSLGRSSGDNEQFF

SEQ ID NO: 735741 - protein, 13 aa, Homo sapiens
  CDR3 for alpha chain variable domain of TCR clone 367871 (TRAV12-2, TRAJ20)
CAVYPSNDYKLSF

SEQ ID NO: 735742 - protein, 13 aa, Homo sapiens
  CDR3 for beta chain variable domain of TCR clone 367871 (TRBV12-4, TRBJ2-3)
CASSSPLGGTQYF

SEQ ID NO: 735743 - protein, 13 aa, Homo sapiens
  CDR3 for alpha chain variable domain of TCR clone 367872 (TRAV20, TRAJ3)
CARRYSSASEIIF

SEQ ID NO: 735744 - protein, 12 aa, Homo sapiens
  CDR3 for beta chain variable domain of TCR clone 367872 (TRBV28, TRBJ2-1)
CASSFRGNEQFF

SEQ ID NO: 735745 - protein, 12 aa, Homo sapiens
  CDR3 for alpha chain variable domain of TCR clone 367873 (TRAV21, TRAJ3)
CCFYSSASKINF

SEQ ID NO: 735746 - protein, 16 aa, Homo sapiens
  CDR3 for beta chain variable domain of TCR clone 367873 (TRBV19, TRBJ2-1)
CASSKAGPSSYNEQFF

SEQ ID NO: 735747 - protein, 11 aa, Homo sapiens
  CDR3 for alpha chain variable domain of TCR clone 367874 (TRAV23/DV6, TRAJ58)
CAARLLRGETS

SEQ ID NO: 735748 - protein, 12 aa, Homo sapiens
  CDR3 for beta chain variable domain of TCR clone 367874 (TRBV11-2, TRBJ2-7)
CASSLPTYEQYF

SEQ ID NO: 735749 - protein, 14 aa, Homo sapiens
  CDR3 for alpha chain variable domain of TCR clone 367875 (TRAV20, TRAJ56)
RAVQFGGANSKLTF

SEQ ID NO: 735750 - protein, 13 aa, Homo sapiens
  CDR3 for beta chain variable domain of TCR clone 367875 (TRBV7-7, TRBJ2-3)
CASSLSRADTQYF

SEQ ID NO: 735751 - protein, 16 aa, Homo sapiens
  CDR3 for alpha chain variable domain of TCR clone 367876 (TRAV20, TRAJ22)
CAVQASSSGSARQLTF

SEQ ID NO: 735752 - protein, 16 aa, Homo sapiens
  CDR3 for beta chain variable domain of TCR clone 367876 (TRBV15, TRBJ2-5)
CATSRYLEAAQETQYF

SEQ ID NO: 735753 - protein, 12 aa, Homo sapiens
  CDR3 for alpha chain variable domain of TCR clone 367877 (TRAV13-1, TRAJ43)
CAASYNNNDMRF

SEQ ID NO: 735754 - protein, 14 aa, Homo sapiens
  CDR3 for beta chain variable domain of TCR clone 367877 (TRBV7-2, TRBJ2-7)
CASSPKTSFYEQYF

SEQ ID NO: 735755 - protein, 13 aa, Homo sapiens
  CDR3 for alpha chain variable domain of TCR clone 367878 (TRAV14/DV4, TRAJ54)
CNERGPGAQKLGF

SEQ ID NO: 735756 - protein, 15 aa, Homo sapiens
  CDR3 for beta chain variable domain of TCR clone 367878 (TRBV3-1, TRBJ2-1)
CASRPRGGAYNEQFI

SEQ ID NO: 735757 - protein, 13 aa, Homo sapiens
  CDR3 for alpha chain variable domain of TCR clone 367879 (TRAV17, TRAJ40)
CATDEGGTYKYIF

SEQ ID NO: 735758 - protein, 13 aa, Homo sapiens
  CDR3 for beta chain variable domain of TCR clone 367879 (TRBV6-3, TRBJ2-5)
CASSYRMTETQFF

SEQ ID NO: 735759 - protein, 13 aa, Homo sapiens
  CDR3 for alpha chain variable domain of TCR clone 367880 (TRAV23/DV6, TRAJ58)
CAARLIRGARLTF

SEQ ID NO: 735760 - protein, 13 aa, Homo sapiens
  CDR3 for beta chain variable domain of TCR clone 367880 (TRBV2, TRBJ1-6)
CTDSGSYNSPLHF

SEQ ID NO: 735761 - protein, 14 aa, Homo sapiens
  CDR3 for alpha chain variable domain of TCR clone 367881 (TRAV21, TRAJ58)
CAVRRGRSGSRLTF

SEQ ID NO: 735762 - protein, 11 aa, Homo sapiens
  CDR3 for beta chain variable domain of TCR clone 367881 (TRBV23-1, TRBJ2-7)
SSSGTGLEQYF

SEQ ID NO: 735763 - protein, 14 aa, Homo sapiens
  CDR3 for alpha chain variable domain of TCR clone 367882 (TRAV35, TRAJ22)
CAGLRPGSASQLTF

SEQ ID NO: 735764 - protein, 15 aa, Homo sapiens
  CDR3 for beta chain variable domain of TCR clone 367882 (TRBV12-4, TRBJ2-5)
CASSPPTGLQETKYF

SEQ ID NO: 735765 - protein, 10 aa, Homo sapiens
  CDR3 for alpha chain variable domain of TCR clone 367883 (TRAV25, TRAJ20)
CAVYDYKLSF

SEQ ID NO: 735766 - protein, 13 aa, Homo sapiens
  CDR3 for beta chain variable domain of TCR clone 367883 (TRBV6-3, TRBJ2-7)
CASSFSGGYEQYF

SEQ ID NO: 735767 - protein, 12 aa, Homo sapiens
  CDR3 for alpha chain variable domain of TCR clone 367884 (TRAV3, TRAJ43)
CAVRDTNNDIRF

SEQ ID NO: 735768 - protein, 17 aa, Homo sapiens
  CDR3 for beta chain variable domain of TCR clone 367884 (TRBV7-8, TRBJ2-6)
CASSAGTGGAGANVLTF

SEQ ID NO: 735769 - protein, 12 aa, Homo sapiens
  CDR3 for alpha chain variable domain of TCR clone 367885 (TRAV29/DV5, TRAJ49)
CAATDTGNQFYF

SEQ ID NO: 735770 - protein, 13 aa, Homo sapiens
  CDR3 for beta chain variable domain of TCR clone 367885 (TRBV12-4, TRBJ2-5)
CASSLGGSRTQYF

SEQ ID NO: 735771 - protein, 13 aa, Homo sapiens
  CDR3 for alpha chain variable domain of TCR clone 367886 (TRAV29/DV5, TRAJ34)
CAARVDNTDKLIF

SEQ ID NO: 735772 - protein, 17 aa, Homo sapiens
  CDR3 for beta chain variable domain of TCR clone 367886 (TRBV7-3, TRBJ2-5)
CASSLGSGRSGSESQYF

SEQ ID NO: 735773 - protein, 16 aa, Homo sapiens
  CDR3 for alpha chain variable domain of TCR clone 367887 (TRAV12-2, TRAJ6)
CAAPLAGSRGSYIPTF

SEQ ID NO: 735774 - protein, 13 aa, Homo sapiens
  CDR3 for beta chain variable domain of TCR clone 367887 (TRBV6-9, TRBJ2-5)
CASKGDGRRTQYF

SEQ ID NO: 735775 - protein, 12 aa, Homo sapiens
  CDR3 for alpha chain variable domain of TCR clone 367888 (TRAV38-1, TRAJ30)
CAFMGRDDKIIF

SEQ ID NO: 735776 - protein, 14 aa, Homo sapiens
  CDR3 for beta chain variable domain of TCR clone 367888 (TRBV7-6, TRBJ2-3)
CASSLGTVTDTQYF

SEQ ID NO: 735777 - protein, 15 aa, Homo sapiens
  CDR3 for alpha chain variable domain of TCR clone 367889 (TRAV3, TRAJ7)
CAVRDKDNGNNRLAF

SEQ ID NO: 735778 - protein, 19 aa, Homo sapiens
  CDR3 for beta chain variable domain of TCR clone 367889 (TRBV5-8, TRBJ2-3)
CASSVLGTSGSHRTDTQYF

SEQ ID NO: 735779 - protein, 12 aa, Homo sapiens
  CDR3 for alpha chain variable domain of TCR clone 367890 (TRAV21, TRAJ11)
CAANSGYSTLTF

SEQ ID NO: 735780 - protein, 14 aa, Homo sapiens
  CDR3 for beta chain variable domain of TCR clone 367890 (TRBV20-1, TRBJ2-1)
CSAPELAGVGEQYF

SEQ ID NO: 735781 - protein, 17 aa, Homo sapiens
  CDR3 for alpha chain variable domain of TCR clone 367891 (TRAV4, )
CLVDIQNPDPAGYQLRD

SEQ ID NO: 735782 - protein, 16 aa, Homo sapiens
  CDR3 for beta chain variable domain of TCR clone 367891 (TRBV28, TRBJ1-1)
CASSLSGTGWNTEAFF

SEQ ID NO: 735783 - protein, 13 aa, Homo sapiens
  CDR3 for alpha chain variable domain of TCR clone 367892 (TRAV8-3, TRAJ28)
CAVGSVGRYQLTF

SEQ ID NO: 735784 - protein, 15 aa, Homo sapiens
  CDR3 for beta chain variable domain of TCR clone 367892 (TRBV7-9, TRBJ1-5)
CASSQGHQPNQPQHF

SEQ ID NO: 735785 - protein, 12 aa, Homo sapiens
  CDR3 for alpha chain variable domain of TCR clone 367893 (TRAV12-3, TRAJ17)
CAMSLTGNKLTF

SEQ ID NO: 735786 - protein, 12 aa, Homo sapiens
  CDR3 for beta chain variable domain of TCR clone 367893 (TRBV2, TRBJ2-1)
CAYGPPGNEQFF

SEQ ID NO: 735787 - protein, 15 aa, Homo sapiens
  CDR3 for alpha chain variable domain of TCR clone 367894 (TRAV27, TRAJ38)
CAASRNAGNNRKLIW

SEQ ID NO: 735788 - protein, 13 aa, Homo sapiens
  CDR3 for beta chain variable domain of TCR clone 367894 (TRBV20-1, TRBJ1-1)
CSARAGGNTEAFF

SEQ ID NO: 735789 - protein, 14 aa, Homo sapiens
  CDR3 for alpha chain variable domain of TCR clone 367895 (TRAV12-2, TRAJ17)
CAVLLKAAGNKLTF

SEQ ID NO: 735790 - protein, 17 aa, Homo sapiens
  CDR3 for beta chain variable domain of TCR clone 367895 (TRBV20-1, TRBJ2-2)
CSASGSRQGGLTGELFF

SEQ ID NO: 735791 - protein, 14 aa, Homo sapiens
  CDR3 for alpha chain variable domain of TCR clone 367896 (TRAV17, TRAJ12)
CATDEKDSSYKLIF

SEQ ID NO: 735792 - protein, 14 aa, Homo sapiens
  CDR3 for beta chain variable domain of TCR clone 367896 (TRBV7-6, TRBJ2-3)
CASSVAGGTDTQYF

SEQ ID NO: 735793 - protein, 15 aa, Homo sapiens
  CDR3 for alpha chain variable domain of TCR clone 367897 (TRAV3, TRAJ5)
CAVRDLDTGRIALTF

SEQ ID NO: 735794 - protein, 16 aa, Homo sapiens
  CDR3 for beta chain variable domain of TCR clone 367897 (TRBV20-1, TRBJ1-2)
CSASMGQGVANYGYTF

SEQ ID NO: 735795 - protein, 13 aa, Homo sapiens
  CDR3 for alpha chain variable domain of TCR clone 367898 (TRAV12-2, TRAJ47)
CAVFMEYGNKLVF

SEQ ID NO: 735796 - protein, 14 aa, Homo sapiens
  CDR3 for beta chain variable domain of TCR clone 367898 (TRBV4-1, TRBJ1-5)
CASSQGPTDQPQHF

SEQ ID NO: 735797 - protein, 13 aa, Homo sapiens
  CDR3 for alpha chain variable domain of TCR clone 367899 (TRAV21, TRAJ57)
CAVTQGGSAKLVF

SEQ ID NO: 735798 - protein, 15 aa, Homo sapiens
  CDR3 for beta chain variable domain of TCR clone 367899 (TRBV5-1, TRBJ1-1)
CASSSTTGTNTEAFF

SEQ ID NO: 735799 - protein, 14 aa, Homo sapiens
  CDR3 for alpha chain variable domain of TCR clone 367900 (TRAV12-3, TRAJ20)
CAMSARRGDYKLSF

SEQ ID NO: 735800 - protein, 13 aa, Homo sapiens
  CDR3 for beta chain variable domain of TCR clone 367900 (TRBV7-3, TRBJ2-3)
CRSPAARTDTQYF

SEQ ID NO: 735801 - protein, 15 aa, Homo sapiens
  CDR3 for alpha chain variable domain of TCR clone 367901 (TRAV8-3, TRAJ27)
CAVGPSKTNAGKSTF

SEQ ID NO: 735802 - protein, 13 aa, Homo sapiens
  CDR3 for beta chain variable domain of TCR clone 367901 (TRBV7-9, TRBJ1-2)
CASSLKQNYGHTF

SEQ ID NO: 735803 - protein, 13 aa, Homo sapiens
  CDR3 for alpha chain variable domain of TCR clone 367902 (TRAV3, TRAJ21)
CAVREPDFNKFYF

SEQ ID NO: 735804 - protein, 14 aa, Homo sapiens
  CDR3 for beta chain variable domain of TCR clone 367902 (TRBV7-2, TRBJ1-1)
CASSFLTGTTEAFF

SEQ ID NO: 735805 - protein, 12 aa, Homo sapiens
  CDR3 for alpha chain variable domain of TCR clone 367903 (TRAV29/DV5, TRAJ31)
CAASSHNSRPMF

SEQ ID NO: 735806 - protein, 17 aa, Homo sapiens
  CDR3 for beta chain variable domain of TCR clone 367903 (TRBV18, TRBJ2-6)
CASSPRQGAVGANVLTF

SEQ ID NO: 735807 - protein, 14 aa, Homo sapiens
  CDR3 for alpha chain variable domain of TCR clone 367904 (TRAV17, TRAJ57)
CATDPQGGSEKLVF

SEQ ID NO: 735808 - protein, 12 aa, Homo sapiens
  CDR3 for beta chain variable domain of TCR clone 367904 (TRBV24-1, TRBJ1-2)
CATSDDGGRYTF

SEQ ID NO: 735809 - protein, 14 aa, Homo sapiens
  CDR3 for alpha chain variable domain of TCR clone 367905 (TRAV3, TRAJ40)
CAVRDRRGTYKYIF

SEQ ID NO: 735810 - protein, 15 aa, Homo sapiens
  CDR3 for beta chain variable domain of TCR clone 367905 (TRBV11-1, TRBJ1-3)
CASTDPRAFGNTIDF

SEQ ID NO: 735811 - protein, 13 aa, Homo sapiens
  CDR3 for alpha chain variable domain of TCR clone 367906 (TRAV2, TRAJ40)
CAVVTSGTYKYIF

SEQ ID NO: 735812 - protein, 14 aa, Homo sapiens
  CDR3 for beta chain variable domain of TCR clone 367906 (TRBV19, TRBJ2-2)
CASSIAGAFGELFF

SEQ ID NO: 735813 - protein, 17 aa, Homo sapiens
  CDR3 for alpha chain variable domain of TCR clone 367907 (TRAV23/DV6, TRAJ57)
CAASSTLSQGGSEKLVF

SEQ ID NO: 735814 - protein, 17 aa, Homo sapiens
  CDR3 for beta chain variable domain of TCR clone 367907 (TRBV3-1, TRBJ2-2)
CASSQFRDKVDTGELFF

SEQ ID NO: 735815 - protein, 12 aa, Homo sapiens
  CDR3 for alpha chain variable domain of TCR clone 367908 (TRAV12-3, TRAJ17)
RAMPLTGNKLTF

SEQ ID NO: 735816 - protein, 15 aa, Homo sapiens
  CDR3 for beta chain variable domain of TCR clone 367908 (TRBV20-1, TRBJ2-7)
CSARDRVSGMDEQYF

SEQ ID NO: 735817 - protein, 13 aa, Homo sapiens
  CDR3 for alpha chain variable domain of TCR clone 367909 (TRAV12-3, TRAJ33)
CAISVNSNYHLIW

SEQ ID NO: 735818 - protein, 13 aa, Homo sapiens
  CDR3 for beta chain variable domain of TCR clone 367909 (TRBV7-2, TRBJ2-2)
CASSLAVTGELFF

SEQ ID NO: 735819 - protein, 13 aa, Homo sapiens
  CDR3 for alpha chain variable domain of TCR clone 367910 (TRAV3, TRAJ21)
CAVREPDFNKFYF

SEQ ID NO: 735820 - protein, 18 aa, Homo sapiens
  CDR3 for beta chain variable domain of TCR clone 367910 (TRBV4-1, TRBJ2-7)
CASSQDTGAGSGLNEQYF

SEQ ID NO: 735821 - protein, 15 aa, Homo sapiens
  CDR3 for alpha chain variable domain of TCR clone 367911 (TRAV2, TRAJ15)
CAVEDREQAGTALVF

SEQ ID NO: 735822 - protein, 13 aa, Homo sapiens
  CDR3 for beta chain variable domain of TCR clone 367911 (TRBV10-2, TRBJ2-7)
CASGTSGGYEQYF

SEQ ID NO: 735823 - protein, 13 aa, Homo sapiens
  CDR3 for alpha chain variable domain of TCR clone 367912 (TRAV12-1, TRAJ7)
CVGNMRGNNRLAF

SEQ ID NO: 735824 - protein, 16 aa, Homo sapiens
  CDR3 for beta chain variable domain of TCR clone 367912 (TRBV20-1, TRBJ1-4)
CSAPGQGLLTNEELFF

SEQ ID NO: 735825 - protein, 12 aa, Homo sapiens
  CDR3 for alpha chain variable domain of TCR clone 367913 (TRAV12-2, TRAJ34)
CAVSYNTDKLLF

SEQ ID NO: 735826 - protein, 16 aa, Homo sapiens
  CDR3 for beta chain variable domain of TCR clone 367913 (TRBV27, TRBJ2-5)
CASSYGPGGQKETQYF

SEQ ID NO: 735827 - protein, 15 aa, Homo sapiens
  CDR3 for alpha chain variable domain of TCR clone 367914 (TRAV4, TRAJ39)
CLGGPNNNAGNMLTF

SEQ ID NO: 735828 - protein, 14 aa, Homo sapiens
  CDR3 for beta chain variable domain of TCR clone 367914 (TRBV11-2, TRBJ2-5)
CASSRTGGIETQYF

SEQ ID NO: 735829 - protein, 11 aa, Homo sapiens
  CDR3 for alpha chain variable domain of TCR clone 367915 (TRAV2, TRAJ13)
CASGGYQKVTL

SEQ ID NO: 735830 - protein, 13 aa, Homo sapiens
  CDR3 for beta chain variable domain of TCR clone 367915 (TRBV12-4, TRBJ1-2)
CASSLRQGKGYTF

SEQ ID NO: 735831 - protein, 13 aa, Homo sapiens
  CDR3 for alpha chain variable domain of TCR clone 367916 (TRAV29/DV5, TRAJ40)
CAASEAGTYKYTF

SEQ ID NO: 735832 - protein, 18 aa, Homo sapiens
  CDR3 for beta chain variable domain of TCR clone 367916 (TRBV14, TRBJ2-1)
CASSQEYGGAYLRGEQFF

SEQ ID NO: 735833 - protein, 13 aa, Homo sapiens
  CDR3 for alpha chain variable domain of TCR clone 367917 (TRAV3, TRAJ40)
CAVRGSGAYNYIF

SEQ ID NO: 735834 - protein, 15 aa, Homo sapiens
  CDR3 for beta chain variable domain of TCR clone 367917 (TRBV27, TRBJ1-5)
CASSSSGTGNQPQHF

SEQ ID NO: 735835 - protein, 15 aa, Homo sapiens
  CDR3 for alpha chain variable domain of TCR clone 367918 (TRAV12-3, TRAJ23)
CAMSAIGNQGGKLIF

SEQ ID NO: 735836 - protein, 22 aa, Homo sapiens
  CDR3 for beta chain variable domain of TCR clone 367918 (TRBV7-3, TRBJ2-2)
GGTQPCISVPAAQEDTPGSCFF

SEQ ID NO: 735837 - protein, 14 aa, Homo sapiens
  CDR3 for alpha chain variable domain of TCR clone 367919 (TRAV12-2, TRAJ13)
CAVKKTGGYQQVTF

SEQ ID NO: 735838 - protein, 15 aa, Homo sapiens
  CDR3 for beta chain variable domain of TCR clone 367919 (TRBV28, TRBJ2-5)
CASSPPWSYQETQYF

SEQ ID NO: 735839 - protein, 12 aa, Homo sapiens
  CDR3 for alpha chain variable domain of TCR clone 367920 (TRAV12-3, TRAJ17)
CSMTLTGNKLTF

SEQ ID NO: 735840 - protein, 15 aa, Homo sapiens
  CDR3 for beta chain variable domain of TCR clone 367920 (TRBV20-1, TRBJ2-7)
CSARDRVSEMDEQYF

SEQ ID NO: 735841 - protein, 12 aa, Homo sapiens
  CDR3 for alpha chain variable domain of TCR clone 367921 (TRAV10, TRAJ31)
CVVRMNNARLMF

SEQ ID NO: 735842 - protein, 13 aa, Homo sapiens
  CDR3 for beta chain variable domain of TCR clone 367921 (TRBV7-9, TRBJ1-2)
CASSLKQNYGYTF

SEQ ID NO: 735843 - protein, 14 aa, Homo sapiens
  CDR3 for alpha chain variable domain of TCR clone 367922 (TRAV14/DV4, TRAJ54)
CAMREAPGAQKLVF

SEQ ID NO: 735844 - protein, 12 aa, Homo sapiens
  CDR3 for beta chain variable domain of TCR clone 367922 (TRBV12-4, TRBJ2-7)
CASSLGGYEQYF

SEQ ID NO: 735845 - protein, 14 aa, Homo sapiens
  CDR3 for alpha chain variable domain of TCR clone 367923 (TRAV12-2, TRAJ13)
CAVKKTGGYQKVTF

SEQ ID NO: 735846 - protein, 12 aa, Homo sapiens
  CDR3 for beta chain variable domain of TCR clone 367923 (TRBV29-1, TRBJ1-1)
CSESDRNTEASF

SEQ ID NO: 735847 - protein, 14 aa, Homo sapiens
  CDR3 for alpha chain variable domain of TCR clone 367924 (TRAV12-2, TRAJ6)
CASKWGGGSYIPTF

SEQ ID NO: 735848 - protein, 13 aa, Homo sapiens
  CDR3 for beta chain variable domain of TCR clone 367924 (TRBV2, TRBJ1-1)
CASSVGGNTEAFF

SEQ ID NO: 735849 - protein, 15 aa, Homo sapiens
  CDR3 for alpha chain variable domain of TCR clone 367925 (TRAV13-1, TRAJ52)
CALRTGGTSYGKLTF

SEQ ID NO: 735850 - protein, 20 aa, Homo sapiens
  CDR3 for beta chain variable domain of TCR clone 367925 (TRBV3-1, TRBJ2-6)
CASSPRPGLEGGAGANVLTF

SEQ ID NO: 735851 - protein, 13 aa, Homo sapiens
  CDR3 for alpha chain variable domain of TCR clone 367926 (TRAV17, TRAJ15)
CATDARAGTALIF

SEQ ID NO: 735852 - protein, 14 aa, Homo sapiens
  CDR3 for beta chain variable domain of TCR clone 367926 (TRBV7-2, TRBJ2-5)
CASSIRLTQKTQYF

SEQ ID NO: 735853 - protein, 14 aa, Homo sapiens
  CDR3 for alpha chain variable domain of TCR clone 367927 (TRAV14/DV4, TRAJ57)
CAMREEGGSEKPVF

SEQ ID NO: 735854 - protein, 14 aa, Homo sapiens
  CDR3 for beta chain variable domain of TCR clone 367927 (TRBV12-4, TRBJ2-5)
CASSFGDRGETQYF

SEQ ID NO: 735855 - protein, 15 aa, Homo sapiens
  CDR3 for alpha chain variable domain of TCR clone 367928 (TRAV8-1, TRAJ6)
CAVNANPGGSYIPTF

SEQ ID NO: 735856 - protein, 16 aa, Homo sapiens
  CDR3 for beta chain variable domain of TCR clone 367928 (TRBV10-2, TRBJ2-7)
CASSESPGSSGFEQYF

SEQ ID NO: 735857 - protein, 13 aa, Homo sapiens
  CDR3 for alpha chain variable domain of TCR clone 367929 (TRAV35, TRAJ36)
CAGPRIGANSLFF

SEQ ID NO: 735858 - protein, 15 aa, Homo sapiens
  CDR3 for beta chain variable domain of TCR clone 367929 (TRBV28, TRBJ2-5)
RASSPPWSYQETQYF

SEQ ID NO: 735859 - protein, 15 aa, Homo sapiens
  CDR3 for alpha chain variable domain of TCR clone 367930 (TRAV13-2, TRAJ45)
CAESDSGGGADGLTF

SEQ ID NO: 735860 - protein, 14 aa, Homo sapiens
  CDR3 for beta chain variable domain of TCR clone 367930 (TRBV19, TRBJ2-1)
CASPTFVLSGEQFF

SEQ ID NO: 735861 - protein, 13 aa, Homo sapiens
  CDR3 for alpha chain variable domain of TCR clone 367931 (TRAV39, TRAJ58)
CAGEETSGSRSTF

SEQ ID NO: 735862 - protein, 12 aa, Homo sapiens
  CDR3 for beta chain variable domain of TCR clone 367931 (TRBV6-3, TRBJ2-7)
CASSEPGFEQYF

SEQ ID NO: 735863 - protein, 14 aa, Homo sapiens
  CDR3 for alpha chain variable domain of TCR clone 367932 (TRAV16, TRAJ39)
CALSKNNAGNMLTF

SEQ ID NO: 735864 - protein, 14 aa, Homo sapiens
  CDR3 for beta chain variable domain of TCR clone 367932 (TRBV10-2, TRBJ2-1)
CASSEGTSEDEQFF

SEQ ID NO: 735865 - protein, 14 aa, Homo sapiens
  CDR3 for alpha chain variable domain of TCR clone 367933 (TRAV35, TRAJ42)
CAGRYGGSQGNLIF

SEQ ID NO: 735866 - protein, 20 aa, Homo sapiens
  CDR3 for beta chain variable domain of TCR clone 367933 (TRBV7-8, TRBJ2-2)
CASSHLFPGPTIHITGELFF

SEQ ID NO: 735867 - protein, 14 aa, Homo sapiens
  CDR3 for alpha chain variable domain of TCR clone 367934 (TRAV1-2, TRAJ8)
CAVREDTGFQKLVF

SEQ ID NO: 735868 - protein, 13 aa, Homo sapiens
  CDR3 for beta chain variable domain of TCR clone 367934 (TRBV27, TRBJ1-1)
CASSVSIGAEAFF

SEQ ID NO: 735869 - protein, 16 aa, Homo sapiens
  CDR3 for alpha chain variable domain of TCR clone 367935 (TRAV4, TRAJ22)
CLVGDLYSGSARQLTF

SEQ ID NO: 735870 - protein, 16 aa, Homo sapiens
  CDR3 for beta chain variable domain of TCR clone 367935 (TRBV4-3, TRBJ2-1)
CASSPALDRGVNEQFF

SEQ ID NO: 735871 - protein, 15 aa, Homo sapiens
  CDR3 for alpha chain variable domain of TCR clone 367936 (TRAV3, TRAJ3)
CAVIDRDSSASKIIF

SEQ ID NO: 735872 - protein, 16 aa, Homo sapiens
  CDR3 for beta chain variable domain of TCR clone 367936 (TRBV19, TRBJ2-1)
CASSKAGPSSYNEQFF

SEQ ID NO: 735873 - protein, 16 aa, Homo sapiens
  CDR3 for alpha chain variable domain of TCR clone 367937 (TRAV12-3, TRAJ53)
CAMSPGSGGSNYKLTF

SEQ ID NO: 735874 - protein, 15 aa, Homo sapiens
  CDR3 for beta chain variable domain of TCR clone 367937 (TRBV20-1, TRBJ1-5)
FSATSDRGLGQPQHF

SEQ ID NO: 735875 - protein, 13 aa, Homo sapiens
  CDR3 for alpha chain variable domain of TCR clone 367938 (TRAV17, TRAJ9)
CATGSTGGFKTIF

SEQ ID NO: 735876 - protein, 14 aa, Homo sapiens
  CDR3 for beta chain variable domain of TCR clone 367938 (TRBV7-8, TRBJ2-7)
CASPFRGGPNEQYF

SEQ ID NO: 735877 - protein, 15 aa, Homo sapiens
  CDR3 for alpha chain variable domain of TCR clone 367939 (TRAV26-1, TRAJ56)
CIVRVATGANSKLNF

SEQ ID NO: 735878 - protein, 15 aa, Homo sapiens
  CDR3 for beta chain variable domain of TCR clone 367939 (TRBV27, TRBJ2-7)
CASSPQREGQREQYF

SEQ ID NO: 735879 - protein, 16 aa, Homo sapiens
  CDR3 for alpha chain variable domain of TCR clone 367940 (TRAV16, TRAJ4)
CALSRMFSGGYNKLIF

SEQ ID NO: 735880 - protein, 14 aa, Homo sapiens
  CDR3 for beta chain variable domain of TCR clone 367940 (TRBV28, TRBJ2-1)
CASSPGEGGNEQFF

SEQ ID NO: 735881 - protein, 13 aa, Homo sapiens
  CDR3 for alpha chain variable domain of TCR clone 367941 (TRAV25, TRAJ10)
CAGRTGGGNKLTF

SEQ ID NO: 735882 - protein, 13 aa, Homo sapiens
  CDR3 for beta chain variable domain of TCR clone 367941 (TRBV9, TRBJ2-1)
CASSVGQGGEQFF

SEQ ID NO: 735883 - protein, 14 aa, Homo sapiens
  CDR3 for alpha chain variable domain of TCR clone 367942 (TRAV26-1, TRAJ38)
CIADNAGNNRKLIW

SEQ ID NO: 735884 - protein, 14 aa, Homo sapiens
  CDR3 for beta chain variable domain of TCR clone 367942 (TRBV6-1, TRBJ1-3)
CASVQGGGGNTIYF

SEQ ID NO: 735885 - protein, 11 aa, Homo sapiens
  CDR3 for alpha chain variable domain of TCR clone 367943 (TRAV2, TRAJ13)
CASGGYQKVTF

SEQ ID NO: 735886 - protein, 16 aa, Homo sapiens
  CDR3 for beta chain variable domain of TCR clone 367943 (TRBV11-2, TRBJ2-5)
CASSGQGYSPQETQYF

SEQ ID NO: 735887 - protein, 15 aa, Homo sapiens
  CDR3 for alpha chain variable domain of TCR clone 367944 (TRAV25, TRAJ52)
CAGRPGGTSYGKLKF

SEQ ID NO: 735888 - protein, 15 aa, Homo sapiens
  CDR3 for beta chain variable domain of TCR clone 367944 (TRBV20-1, TRBJ2-7)
CSARDRVSGMDEQYF

SEQ ID NO: 735889 - protein, 15 aa, Homo sapiens
  CDR3 for alpha chain variable domain of TCR clone 367945 (TRAV21, TRAJ53)
CATLNSGGSNYKLTF

SEQ ID NO: 735890 - protein, 16 aa, Homo sapiens
  CDR3 for beta chain variable domain of TCR clone 367945 (TRBV29-1, TRBJ1-2)
CSVEANRDIANYGYPF

SEQ ID NO: 735891 - protein, 14 aa, Homo sapiens
  CDR3 for alpha chain variable domain of TCR clone 367946 (TRAV16, TRAJ15)
CALSFSQAGTALIF

SEQ ID NO: 735892 - protein, 16 aa, Homo sapiens
  CDR3 for beta chain variable domain of TCR clone 367946 (TRBV9, TRBJ2-7)
CASSAGPDRSPYEQYF

SEQ ID NO: 735893 - protein, 15 aa, Homo sapiens
  CDR3 for alpha chain variable domain of TCR clone 367947 (TRAV8-4, TRAJ8)
CAVSDLNTGFQKLVF

SEQ ID NO: 735894 - protein, 14 aa, Homo sapiens
  CDR3 for beta chain variable domain of TCR clone 367947 (TRBV7-8, TRBJ2-3)
CASSSRDSTDTQYF

SEQ ID NO: 735895 - protein, 12 aa, Homo sapiens
  CDR3 for alpha chain variable domain of TCR clone 367948 (TRAV13-2, TRAJ23)
CAGRHRGGKLIF

SEQ ID NO: 735896 - protein, 12 aa, Homo sapiens
  CDR3 for beta chain variable domain of TCR clone 367948 (TRBV29-1, TRBJ2-3)
CSVTGGADTQYF

SEQ ID NO: 735897 - protein, 14 aa, Homo sapiens
  CDR3 for alpha chain variable domain of TCR clone 367949 (TRAV3, TRAJ9)
CAVRLNTGGFETIF

SEQ ID NO: 735898 - protein, 15 aa, Homo sapiens
  CDR3 for beta chain variable domain of TCR clone 367949 (TRBV7-2, TRBJ2-1)
CASSLASGRVNEQFF

SEQ ID NO: 735899 - protein, 14 aa, Homo sapiens
  CDR3 for alpha chain variable domain of TCR clone 367950 (TRAV8-2, TRAJ4)
CVVSPSGGSNKLIF

SEQ ID NO: 735900 - protein, 16 aa, Homo sapiens
  CDR3 for beta chain variable domain of TCR clone 367950 (TRBV7-3, TRBJ2-1)
CASSLEGYRSYNEQFF

SEQ ID NO: 735901 - protein, 16 aa, Homo sapiens
  CDR3 for alpha chain variable domain of TCR clone 367951 (TRAV3, TRAJ37)
CAVRPQGSGNTGKLIF

SEQ ID NO: 735902 - protein, 13 aa, Homo sapiens
  CDR3 for beta chain variable domain of TCR clone 367951 (TRBV2, TRBJ1-5)
CAGGTGGYQPQHF

SEQ ID NO: 735903 - protein, 13 aa, Homo sapiens
  CDR3 for alpha chain variable domain of TCR clone 367952 (TRAV2, TRAJ40)
CAVVTSGTYKYIF

SEQ ID NO: 735904 - protein, 16 aa, Homo sapiens
  CDR3 for beta chain variable domain of TCR clone 367952 (TRBV18, TRBJ2-7)
CASSPLQSGTHYEQYF

SEQ ID NO: 735905 - protein, 12 aa, Homo sapiens
  CDR3 for alpha chain variable domain of TCR clone 367953 (TRAV3, TRAJ26)
CAVRNYGQNFVF

SEQ ID NO: 735906 - protein, 12 aa, Homo sapiens
  CDR3 for beta chain variable domain of TCR clone 367953 (TRBV29-1, TRBJ2-3)
CSVTGGADTQYF

SEQ ID NO: 735907 - protein, 12 aa, Homo sapiens
  CDR3 for alpha chain variable domain of TCR clone 367954 (TRAV21, TRAJ33)
CAKMDSNYQLIW

SEQ ID NO: 735908 - protein, 15 aa, Homo sapiens
  CDR3 for beta chain variable domain of TCR clone 367954 (TRBV12-4, TRBJ2-5)
CASSPPTGLQETLYF

SEQ ID NO: 735909 - protein, 15 aa, Homo sapiens
  CDR3 for alpha chain variable domain of TCR clone 367955 (TRAV3, TRAJ22)
CAVRDRGGSARQLTF

SEQ ID NO: 735910 - protein, 15 aa, Homo sapiens
  CDR3 for beta chain variable domain of TCR clone 367955 (TRBV5-1, TRBJ2-7)
CASSLNGGPAREQYF

SEQ ID NO: 735911 - protein, 13 aa, Homo sapiens
  CDR3 for alpha chain variable domain of TCR clone 367956 (TRAV16, TRAJ39)
CALKDNAGNMLTF

SEQ ID NO: 735912 - protein, 17 aa, Homo sapiens
  CDR3 for beta chain variable domain of TCR clone 367956 (TRBV6-1, TRBJ2-1)
CASSLDLRGGLYNEQFF

SEQ ID NO: 735913 - protein, 22 aa, Homo sapiens
  CDR3 for alpha chain variable domain of TCR clone 367957 (TRAV23/DV6, TRAJ43)
CISWIPSLETQPPLLCSRRCSF

SEQ ID NO: 735914 - protein, 13 aa, Homo sapiens
  CDR3 for beta chain variable domain of TCR clone 367957 (TRBV12-4, TRBJ1-2)
CASSLRQGKGDTF

SEQ ID NO: 735915 - protein, 11 aa, Homo sapiens
  CDR3 for alpha chain variable domain of TCR clone 367958 (TRAV17, TRAJ31)
CATSNNDRLMF

SEQ ID NO: 735916 - protein, 16 aa, Homo sapiens
  CDR3 for beta chain variable domain of TCR clone 367958 (TRBV7-8, TRBJ2-4)
CASSAERTLAKNIQYF

SEQ ID NO: 735917 - protein, 16 aa, Homo sapiens
  CDR3 for alpha chain variable domain of TCR clone 367959 (TRAV8-3, TRAJ44)
CAVGTLMTGTASKLNS

SEQ ID NO: 735918 - protein, 13 aa, Homo sapiens
  CDR3 for beta chain variable domain of TCR clone 367959 (TRBV11-2, TRBJ2-1)
CASSLRLTHEQFF

SEQ ID NO: 735919 - protein, 14 aa, Homo sapiens
  CDR3 for alpha chain variable domain of TCR clone 367960 (TRAV12-2, TRAJ24)
CAVTPADSWWKLQV

SEQ ID NO: 735920 - protein, 16 aa, Homo sapiens
  CDR3 for beta chain variable domain of TCR clone 367960 (TRBV6-4, TRBJ2-3)
APSEGGRAWGTDTQYF

SEQ ID NO: 735921 - protein, 17 aa, Homo sapiens
  CDR3 for alpha chain variable domain of TCR clone 367961 (TRAV1-2, TRAJ27)
CAVRDKTGDTNAGKSTF

SEQ ID NO: 735922 - protein, 13 aa, Homo sapiens
  CDR3 for beta chain variable domain of TCR clone 367961 (TRBV15, TRBJ2-7)
CATSTTGHYEQYF

SEQ ID NO: 735923 - protein, 15 aa, Homo sapiens
  CDR3 for alpha chain variable domain of TCR clone 367962 (TRAV30, TRAJ32)
CGTEILGGATNKLIF

SEQ ID NO: 735924 - protein, 13 aa, Homo sapiens
  CDR3 for beta chain variable domain of TCR clone 367962 (TRBV6-3, TRBJ2-7)
CASSVSGGYEQCF

SEQ ID NO: 735925 - protein, 17 aa, Homo sapiens
  CDR3 for alpha chain variable domain of TCR clone 367963 (TRAV3, TRAJ6)
CAVRDGARAGGSYIPTF

SEQ ID NO: 735926 - protein, 14 aa, Homo sapiens
  CDR3 for beta chain variable domain of TCR clone 367963 (TRBV7-2, TRBJ2-7)
CASSPRTSFYEQYF

SEQ ID NO: 735927 - protein, 13 aa, Homo sapiens
  CDR3 for alpha chain variable domain of TCR clone 367964 (TRAV8-1, TRAJ34)
CAERPYNTDKLIF

SEQ ID NO: 735928 - protein, 15 aa, Homo sapiens
  CDR3 for beta chain variable domain of TCR clone 367964 (TRBV7-9, TRBJ1-3)
CASSLRSGSGNTIYF

SEQ ID NO: 735929 - protein, 15 aa, Homo sapiens
  CDR3 for alpha chain variable domain of TCR clone 367965 (TRAV8-3, TRAJ11)
CAVGRLNSGYSTLTF

SEQ ID NO: 735930 - protein, 12 aa, Homo sapiens
  CDR3 for beta chain variable domain of TCR clone 367965 (TRBV5-7, TRBJ1-2)
CASSLVQNGYTF

SEQ ID NO: 735931 - protein, 14 aa, Homo sapiens
  CDR3 for alpha chain variable domain of TCR clone 367966 (TRAV13-2, TRAJ45)
CAEMPGGGADGLTF

SEQ ID NO: 735932 - protein, 15 aa, Homo sapiens
  CDR3 for beta chain variable domain of TCR clone 367966 (TRBV19, TRBJ1-1)
CASTSGQIQNTEAFF

SEQ ID NO: 735933 - protein, 11 aa, Homo sapiens
  CDR3 for alpha chain variable domain of TCR clone 367967 (TRAV3, TRAJ21)
CAVGNFNKFCF

SEQ ID NO: 735934 - protein, 14 aa, Homo sapiens
  CDR3 for beta chain variable domain of TCR clone 367967 (TRBV20-1, TRBJ2-2)
CSAPDTANTGELFC

SEQ ID NO: 735935 - protein, 11 aa, Homo sapiens
  CDR3 for alpha chain variable domain of TCR clone 367968 (TRAV8-2, TRAJ26)
CVVTLLLGSEF

SEQ ID NO: 735936 - protein, 15 aa, Homo sapiens
  CDR3 for beta chain variable domain of TCR clone 367968 (TRBV11-2, TRBJ2-2)
CASSSDRVNAGELFV

SEQ ID NO: 735937 - protein, 14 aa, Homo sapiens
  CDR3 for alpha chain variable domain of TCR clone 367969 (TRAV3, TRAJ17)
CAVRDAGAGNKLTF

SEQ ID NO: 735938 - protein, 16 aa, Homo sapiens
  CDR3 for beta chain variable domain of TCR clone 367969 (TRBV20-1, TRBJ1-2)
CGASMGQGVANYGYTF

SEQ ID NO: 735939 - protein, 16 aa, Homo sapiens
  CDR3 for alpha chain variable domain of TCR clone 367970 (TRAV3, TRAJ37)
CAVRPHGSCNTGKLIF

SEQ ID NO: 735940 - protein, 13 aa, Homo sapiens
  CDR3 for beta chain variable domain of TCR clone 367970 (TRBV2, TRBJ1-5)
CASGTGGYQPQHF

SEQ ID NO: 735941 - protein, 12 aa, Homo sapiens
  CDR3 for alpha chain variable domain of TCR clone 367971 (TRAV29/DV5, TRAJ15)
CASNQAGTPLIF

SEQ ID NO: 735942 - protein, 15 aa, Homo sapiens
  CDR3 for beta chain variable domain of TCR clone 367971 (TRBV11-2, TRBJ2-2)
CASSSDRVNAGELFF

SEQ ID NO: 735943 - protein, 12 aa, Homo sapiens
  CDR3 for alpha chain variable domain of TCR clone 367972 (TRAV3, TRAJ31)
CAVRPRGPRLMF

SEQ ID NO: 735944 - protein, 17 aa, Homo sapiens
  CDR3 for beta chain variable domain of TCR clone 367972 (TRBV7-9, TRBJ1-5)
CASSASQGGYRNQPQHF

SEQ ID NO: 735945 - protein, 13 aa, Homo sapiens
  CDR3 for alpha chain variable domain of TCR clone 367973 (TRAV8-2, TRAJ26)
CVVSLGYGQNFVF

SEQ ID NO: 735946 - protein, 15 aa, Homo sapiens
  CDR3 for beta chain variable domain of TCR clone 367973 (TRBV11-2, TRBJ2-1)
CASSKNRGLIYEQFF

SEQ ID NO: 735947 - protein, 15 aa, Homo sapiens
  CDR3 for alpha chain variable domain of TCR clone 367974 (TRAV16, TRAJ4)
CALEDPSGGYSKLIF

SEQ ID NO: 735948 - protein, 13 aa, Homo sapiens
  CDR3 for beta chain variable domain of TCR clone 367974 (TRBV7-3, TRBJ2-7)
CASSQAGGYEQYF

SEQ ID NO: 735949 - protein, 10 aa, Homo sapiens
  CDR3 for alpha chain variable domain of TCR clone 367975 (TRAV23/DV6, TRAJ31)
CARGGARLMF

SEQ ID NO: 735950 - protein, 14 aa, Homo sapiens
  CDR3 for beta chain variable domain of TCR clone 367975 (TRBV7-8, TRBJ1-2)
CASSPDGLSSGYTF

SEQ ID NO: 735951 - protein, 15 aa, Homo sapiens
  CDR3 for alpha chain variable domain of TCR clone 367976 (TRAV4, TRAJ12)
CLVGDLMDSSYELIF

SEQ ID NO: 735952 - protein, 14 aa, Homo sapiens
  CDR3 for beta chain variable domain of TCR clone 367976 (TRBV7-2, TRBJ1-1)
CASSHRQGRTEAFF

SEQ ID NO: 735953 - protein, 16 aa, Homo sapiens
  CDR3 for alpha chain variable domain of TCR clone 367977 (TRAV30, TRAJ24)
CGTEIVDANSWGKFQF

SEQ ID NO: 735954 - protein, 14 aa, Homo sapiens
  CDR3 for beta chain variable domain of TCR clone 367977 (TRBV12-5, TRBJ2-5)
RASGSRTHQETQYF

SEQ ID NO: 735955 - protein, 15 aa, Homo sapiens
  CDR3 for alpha chain variable domain of TCR clone 367978 (TRAV8-3, TRAJ40)
CAAPSLVSGTCRYIF

SEQ ID NO: 735956 - protein, 16 aa, Homo sapiens
  CDR3 for beta chain variable domain of TCR clone 367978 (TRBV7-3, TRBJ2-3)
CASSLSGYRPEDTQYF

SEQ ID NO: 735957 - protein, 15 aa, Homo sapiens
  CDR3 for alpha chain variable domain of TCR clone 367979 (TRAV14/DV4, TRAJ22)
CAMRVSSGSARQLTF

SEQ ID NO: 735958 - protein, 13 aa, Homo sapiens
  CDR3 for beta chain variable domain of TCR clone 367979 (TRBV7-9, TRBJ1-2)
CASSLKQNYGYTF

SEQ ID NO: 735959 - protein, 15 aa, Homo sapiens
  CDR3 for alpha chain variable domain of TCR clone 367980 (TRAV3, TRAJ27)
CAVRGFTPMPANQPL

SEQ ID NO: 735960 - protein, 12 aa, Homo sapiens
  CDR3 for beta chain variable domain of TCR clone 367980 (TRBV11-2, TRBJ2-2)
CASSLGGGELFF

SEQ ID NO: 735961 - protein, 12 aa, Homo sapiens
  CDR3 for alpha chain variable domain of TCR clone 367981 (TRAV13-1, TRAJ21)
CAAKEGCNKFYF

SEQ ID NO: 735962 - protein, 16 aa, Homo sapiens
  CDR3 for beta chain variable domain of TCR clone 367981 (TRBV12-5, TRBJ2-5)
CASGPRTSGNQETQYF

SEQ ID NO: 735963 - protein, 14 aa, Homo sapiens
  CDR3 for alpha chain variable domain of TCR clone 367982 (TRAV9-2, TRAJ39)
CALYIYNAGNMLTF

SEQ ID NO: 735964 - protein, 17 aa, Homo sapiens
  CDR3 for beta chain variable domain of TCR clone 367982 (TRBV13, TRBJ2-3)
CASSLSRVAGGGNTQYF

SEQ ID NO: 735965 - protein, 12 aa, Homo sapiens
  CDR3 for alpha chain variable domain of TCR clone 367983 (TRAV13-1, TRAJ21)
CAAKEGFNKFYF

SEQ ID NO: 735966 - protein, 15 aa, Homo sapiens
  CDR3 for beta chain variable domain of TCR clone 367983 (TRBV15, TRBJ1-5)
CATSRDPVSKQPQHF

SEQ ID NO: 735967 - protein, 13 aa, Homo sapiens
  CDR3 for alpha chain variable domain of TCR clone 367984 (TRAV26-2, TRAJ54)
CIPRVGGAQKLVF

SEQ ID NO: 735968 - protein, 17 aa, Homo sapiens
  CDR3 for beta chain variable domain of TCR clone 367984 (TRBV24-1, TRBJ2-1)
CATSDVSTSGTYNEQFF

SEQ ID NO: 735969 - protein, 14 aa, Homo sapiens
  CDR3 for alpha chain variable domain of TCR clone 367985 (TRAV26-1, TRAJ38)
CIADNAGNNRKLVW

SEQ ID NO: 735970 - protein, 15 aa, Homo sapiens
  CDR3 for beta chain variable domain of TCR clone 367985 (TRBV20-1, TRBJ1-1)
CSARVGGTLKLSLDK

SEQ ID NO: 735971 - protein, 14 aa, Homo sapiens
  CDR3 for alpha chain variable domain of TCR clone 367986 (TRAV2, TRAJ3)
CAVRPYSSASKIIF

SEQ ID NO: 735972 - protein, 14 aa, Homo sapiens
  CDR3 for beta chain variable domain of TCR clone 367986 (TRBV7-6, TRBJ2-3)
CASSLGTVTDTQYF

SEQ ID NO: 735973 - protein, 16 aa, Homo sapiens
  CDR3 for alpha chain variable domain of TCR clone 367987 (TRAV20, TRAJ26)
CSVQHRRDNYGQNFVF

SEQ ID NO: 735974 - protein, 15 aa, Homo sapiens
  CDR3 for beta chain variable domain of TCR clone 367987 (TRBV7-2, TRBJ2-7)
CASSWGQGAIYEQYF

SEQ ID NO: 735975 - protein, 14 aa, Homo sapiens
  CDR3 for alpha chain variable domain of TCR clone 367988 (TRAV1-2, TRAJ16)
CAVNRFSDGQKLLF

SEQ ID NO: 735976 - protein, 15 aa, Homo sapiens
  CDR3 for beta chain variable domain of TCR clone 367988 (TRBV10-3, TRBJ2-5)
CAIRPGDVDLGTQYF

SEQ ID NO: 735977 - protein, 15 aa, Homo sapiens
  CDR3 for alpha chain variable domain of TCR clone 367989 (TRAV21, TRAJ57)
CAVIITQGGSEKLVF

SEQ ID NO: 735978 - protein, 14 aa, Homo sapiens
  CDR3 for beta chain variable domain of TCR clone 367989 (TRBV5-1, TRBJ2-2)
CASSLIWIPGEMFF

SEQ ID NO: 735979 - protein, 14 aa, Homo sapiens
  CDR3 for alpha chain variable domain of TCR clone 367990 (TRAV10, TRAJ32)
CGKPRGGATNKLIF

SEQ ID NO: 735980 - protein, 14 aa, Homo sapiens
  CDR3 for beta chain variable domain of TCR clone 367990 (TRBV5-4, TRBJ2-2)
CASRLDGGTGELFF

SEQ ID NO: 735981 - protein, 13 aa, Homo sapiens
  CDR3 for alpha chain variable domain of TCR clone 367991 (TRAV2, TRAJ15)
CAVASQAGTALIS

SEQ ID NO: 735982 - protein, 15 aa, Homo sapiens
  CDR3 for beta chain variable domain of TCR clone 367991 (TRBV15, TRBJ1-2)
CATSRVRASGSGYTF

SEQ ID NO: 735983 - protein, 11 aa, Homo sapiens
  CDR3 for alpha chain variable domain of TCR clone 367992 (TRAV3, TRAJ21)
CAVGNFNKFYF

SEQ ID NO: 735984 - protein, 15 aa, Homo sapiens
  CDR3 for beta chain variable domain of TCR clone 367992 (TRBV13, TRBJ1-3)
CASSPNRGSGNTIYF

SEQ ID NO: 735985 - protein, 12 aa, Homo sapiens
  CDR3 for alpha chain variable domain of TCR clone 367993 (TRAV16, TRAJ10)
CSRTGGGNKLTF

SEQ ID NO: 735986 - protein, 14 aa, Homo sapiens
  CDR3 for beta chain variable domain of TCR clone 367993 (TRBV5-1, TRBJ2-3)
CASRGQTSTDTQYF

SEQ ID NO: 735987 - protein, 17 aa, Homo sapiens
  CDR3 for alpha chain variable domain of TCR clone 367994 (TRAV17, TRAJ28)
CATDPRRGGAGGYQLTF

SEQ ID NO: 735988 - protein, 16 aa, Homo sapiens
  CDR3 for beta chain variable domain of TCR clone 367994 (TRBV25-1, TRBJ1-1)
CASSGDRDRGRIEAVF

SEQ ID NO: 735989 - protein, 12 aa, Homo sapiens
  CDR3 for alpha chain variable domain of TCR clone 367995 (TRAV23/DV6, TRAJ32)
CSTPGATNMLIF

SEQ ID NO: 735990 - protein, 17 aa, Homo sapiens
  CDR3 for beta chain variable domain of TCR clone 367995 (TRBV13, TRBJ2-3)
CASSSLGTSGLTDTQYF

SEQ ID NO: 735991 - protein, 15 aa, Homo sapiens
  CDR3 for alpha chain variable domain of TCR clone 367996 (TRAV3, TRAJ22)
CAVRDRGGSARQLTF

SEQ ID NO: 735992 - protein, 13 aa, Homo sapiens
  CDR3 for beta chain variable domain of TCR clone 367996 (TRBV15, TRBJ2-7)
CATSTTGHYEQYF

SEQ ID NO: 735993 - protein, 13 aa, Homo sapiens
  CDR3 for alpha chain variable domain of TCR clone 367997 (TRAV13-1, TRAJ21)
CAASIYNFNKFYF

SEQ ID NO: 735994 - protein, 16 aa, Homo sapiens
  CDR3 for beta chain variable domain of TCR clone 367997 (TRBV4-3, TRBJ2-1)
CASSPALDRGVNDQFF

SEQ ID NO: 735995 - protein, 15 aa, Homo sapiens
  CDR3 for alpha chain variable domain of TCR clone 367998 (TRAV8-3, TRAJ40)
CASPSLGSGTYRYIF

SEQ ID NO: 735996 - protein, 13 aa, Homo sapiens
  CDR3 for beta chain variable domain of TCR clone 367998 (TRBV10-3, TRBJ2-7)
CASKLAVNYEQYF

SEQ ID NO: 735997 - protein, 16 aa, Homo sapiens
  CDR3 for alpha chain variable domain of TCR clone 367999 (TRAV3, TRAJ10)
CAVRDMRAGGGNKLTF

SEQ ID NO: 735998 - protein, 14 aa, Homo sapiens
  CDR3 for beta chain variable domain of TCR clone 367999 (TRBV19, TRBJ2-7)
CASSIFAGTYEQYF

SEQ ID NO: 735999 - protein, 16 aa, Homo sapiens
  CDR3 for alpha chain variable domain of TCR clone 368000 (TRAV4, TRAJ22)
CLVGDLYSGSARQLTF

SEQ ID NO: 736000 - protein, 14 aa, Homo sapiens
  CDR3 for beta chain variable domain of TCR clone 368000 (TRBV28, TRBJ2-3)
CVSSWRGRADTQYF

SEQ ID NO: 736001 - protein, 15 aa, Homo sapiens
  CDR3 for alpha chain variable domain of TCR clone 368001 (TRAV3, TRAJ5)
CAVRYLYTGRRALTF

SEQ ID NO: 736002 - protein, 13 aa, Homo sapiens
  CDR3 for beta chain variable domain of TCR clone 368001 (TRBV12-4, TRBJ2-7)
CASSPTETYEQYF

SEQ ID NO: 736003 - protein, 14 aa, Homo sapiens
  CDR3 for alpha chain variable domain of TCR clone 368002 (TRAV1-2, TRAJ16)
CAVNRFSDGQKLLF

SEQ ID NO: 736004 - protein, 12 aa, Homo sapiens
  CDR3 for beta chain variable domain of TCR clone 368002 (TRBV11-2, TRBJ2-2)
CASRLGGGELFF

SEQ ID NO: 736005 - protein, 15 aa, Homo sapiens
  CDR3 for alpha chain variable domain of TCR clone 368003 (TRAV12-1, TRAJ42)
CVVTRDGGSQGNLIF

SEQ ID NO: 736006 - protein, 14 aa, Homo sapiens
  CDR3 for beta chain variable domain of TCR clone 368003 (TRBV11-2, TRBJ2-3)
YASSLGGGANTQYF

SEQ ID NO: 736007 - protein, 11 aa, Homo sapiens
  CDR3 for alpha chain variable domain of TCR clone 368004 (TRAV12-3, TRAJ43)
CAISVSNDMRF

SEQ ID NO: 736008 - protein, 18 aa, Homo sapiens
  CDR3 for beta chain variable domain of TCR clone 368004 (TRBV20-1, TRBJ2-3)
RSASGLAGGPGTTDTQYF

SEQ ID NO: 736009 - protein, 14 aa, Homo sapiens
  CDR3 for alpha chain variable domain of TCR clone 368005 (TRAV23/DV6, TRAJ22)
CADISSGSARQPTF

SEQ ID NO: 736010 - protein, 16 aa, Homo sapiens
  CDR3 for beta chain variable domain of TCR clone 368005 (TRBV5-7, TRBJ2-5)
CASIRGQTGYQETQYF

SEQ ID NO: 736011 - protein, 14 aa, Homo sapiens
  CDR3 for alpha chain variable domain of TCR clone 368006 (TRAV12-2, TRAJ13)
CAVEKTGGYQKVTF

SEQ ID NO: 736012 - protein, 15 aa, Homo sapiens
  CDR3 for beta chain variable domain of TCR clone 368006 (TRBV27, TRBJ2-1)
CASSNGGGSPNEQFF

SEQ ID NO: 736013 - protein, 11 aa, Homo sapiens
  CDR3 for alpha chain variable domain of TCR clone 368007 (TRAV2, TRAJ20)
CAVKNDYKLSF

SEQ ID NO: 736014 - protein, 16 aa, Homo sapiens
  CDR3 for beta chain variable domain of TCR clone 368007 (TRBV28, TRBJ1-4)
CASSPPYRGRSEKLFF

SEQ ID NO: 736015 - protein, 16 aa, Homo sapiens
  CDR3 for alpha chain variable domain of TCR clone 368008 (TRAV30, TRAJ24)
CGTESVDADSWGKFQF

SEQ ID NO: 736016 - protein, 14 aa, Homo sapiens
  CDR3 for beta chain variable domain of TCR clone 368008 (TRBV12-5, TRBJ2-5)
CASGSRKHQETQYF

SEQ ID NO: 736017 - protein, 11 aa, Homo sapiens
  CDR3 for alpha chain variable domain of TCR clone 368009 (TRAV3, TRAJ21)
CAVGNFNKFYF

SEQ ID NO: 736018 - protein, 16 aa, Homo sapiens
  CDR3 for beta chain variable domain of TCR clone 368009 (TRBV19, TRBJ2-1)
CASSKAGPGSYNKQFF

SEQ ID NO: 736019 - protein, 18 aa, Homo sapiens
  CDR3 for alpha chain variable domain of TCR clone 368010 (TRAV21, TRAJ52)
CAVRPSPAGGTSYGKPTF

SEQ ID NO: 736020 - protein, 17 aa, Homo sapiens
  CDR3 for beta chain variable domain of TCR clone 368010 (TRBV13, TRBJ2-3)
WASSLSRVAGGRNTQYF

SEQ ID NO: 736021 - protein, 15 aa, Homo sapiens
  CDR3 for alpha chain variable domain of TCR clone 368011 (TRAV26-1, TRAJ29)
CIVRVEGSGNTPLAF

SEQ ID NO: 736022 - protein, 15 aa, Homo sapiens
  CDR3 for beta chain variable domain of TCR clone 368011 (TRBV12-4, TRBJ1-1)
CQQQDRVVANTEAFF

SEQ ID NO: 736023 - protein, 13 aa, Homo sapiens
  CDR3 for alpha chain variable domain of TCR clone 368012 (TRAV36/DV7, TRAJ53)
CALSGGSNYKLTF

SEQ ID NO: 736024 - protein, 13 aa, Homo sapiens
  CDR3 for beta chain variable domain of TCR clone 368012 (TRBV28, TRBJ2-7)
CASSLPSRCEQYF

SEQ ID NO: 736025 - protein, 11 aa, Homo sapiens
  CDR3 for alpha chain variable domain of TCR clone 368013 (TRAV26-1, TRAJ29)
CIVRSHTPLVF

SEQ ID NO: 736026 - protein, 15 aa, Homo sapiens
  CDR3 for beta chain variable domain of TCR clone 368013 (TRBV11-3, TRBJ2-3)
CASLKDGREGDTQYF

SEQ ID NO: 736027 - protein, 15 aa, Homo sapiens
  CDR3 for alpha chain variable domain of TCR clone 368014 (TRAV20, TRAJ53)
CAVQASGGSNYKLTF

SEQ ID NO: 736028 - protein, 14 aa, Homo sapiens
  CDR3 for beta chain variable domain of TCR clone 368014 (TRBV4-1, TRBJ2-2)
CASSQAVNTGELFF

SEQ ID NO: 736029 - protein, 15 aa, Homo sapiens
  CDR3 for alpha chain variable domain of TCR clone 368015 (TRAV8-3, TRAJ3)
CAVVTGYSSASKIIF

SEQ ID NO: 736030 - protein, 15 aa, Homo sapiens
  CDR3 for beta chain variable domain of TCR clone 368015 (TRBV5-4, TRBJ2-1)
CASSLGLADINEQFF

SEQ ID NO: 736031 - protein, 15 aa, Homo sapiens
  CDR3 for alpha chain variable domain of TCR clone 368016 (TRAV26-1, TRAJ17)
CIVRVVKAAGNKLTF

SEQ ID NO: 736032 - protein, 16 aa, Homo sapiens
  CDR3 for beta chain variable domain of TCR clone 368016 (TRBV7-9, TRBJ2-1)
CASSFVSGPSYNEQFF

SEQ ID NO: 736033 - protein, 11 aa, Homo sapiens
  CDR3 for alpha chain variable domain of TCR clone 368017 (TRAV1-2, TRAJ40)
CAVPGTYKYIF

SEQ ID NO: 736034 - protein, 15 aa, Homo sapiens
  CDR3 for beta chain variable domain of TCR clone 368017 (TRBV5-7, TRBJ1-5)
CASSYGKLWDEPQHF

SEQ ID NO: 736035 - protein, 15 aa, Homo sapiens
  CDR3 for alpha chain variable domain of TCR clone 368018 (TRAV8-3, TRAJ17)
CVVRHDQSCRQQANF

SEQ ID NO: 736036 - protein, 13 aa, Homo sapiens
  CDR3 for beta chain variable domain of TCR clone 368018 (TRBV10-3, TRBJ2-1)
CAISEFSGREQFF

SEQ ID NO: 736037 - protein, 12 aa, Homo sapiens
  CDR3 for alpha chain variable domain of TCR clone 368019 (TRAV26-2, TRAJ47)
CILVEYGNKLVL

SEQ ID NO: 736038 - protein, 16 aa, Homo sapiens
  CDR3 for beta chain variable domain of TCR clone 368019 (TRBV18, TRBJ1-4)
CASSPLVGDRAEKLFF

SEQ ID NO: 736039 - protein, 13 aa, Homo sapiens
  CDR3 for alpha chain variable domain of TCR clone 368020 (TRAV3, TRAJ27)
CAVRPLGAGRSTF

SEQ ID NO: 736040 - protein, 13 aa, Homo sapiens
  CDR3 for beta chain variable domain of TCR clone 368020 (TRBV7-9, TRBJ2-3)
CTSSPGSTDTQYF

SEQ ID NO: 736041 - protein, 17 aa, Homo sapiens
  CDR3 for alpha chain variable domain of TCR clone 368021 (TRAV8-6, TRAJ58)
CAVSSWVGETSGSRLTS

SEQ ID NO: 736042 - protein, 14 aa, Homo sapiens
  CDR3 for beta chain variable domain of TCR clone 368021 (TRBV4-2, TRBJ2-1)
CASGLDRAYNEQFF

SEQ ID NO: 736043 - protein, 14 aa, Homo sapiens
  CDR3 for alpha chain variable domain of TCR clone 368022 (TRAV1-2, TRAJ16)
CAVNRFSDGQQLLF

SEQ ID NO: 736044 - protein, 14 aa, Homo sapiens
  CDR3 for beta chain variable domain of TCR clone 368022 (TRBV20-1, TRBJ2-1)
CSARGGSSYNEQFF

SEQ ID NO: 736045 - protein, 14 aa, Homo sapiens
  CDR3 for alpha chain variable domain of TCR clone 368023 (TRAV8-6, TRAJ9)
CAVSSYTGGFKTIF

SEQ ID NO: 736046 - protein, 14 aa, Homo sapiens
  CDR3 for beta chain variable domain of TCR clone 368023 (TRBV7-6, TRBJ2-3)
CASSLGTVTDTQYF

SEQ ID NO: 736047 - protein, 15 aa, Homo sapiens
  CDR3 for alpha chain variable domain of TCR clone 368024 (TRAV3, TRAJ29)
CAVRDSPSGNTPLVF

SEQ ID NO: 736048 - protein, 14 aa, Homo sapiens
  CDR3 for beta chain variable domain of TCR clone 368024 (TRBV7-9, TRBJ2-1)
CASSLANYYNEQFF

SEQ ID NO: 736049 - protein, 13 aa, Homo sapiens
  CDR3 for alpha chain variable domain of TCR clone 368025 (TRAV21, TRAJ27)
CAARPGNAGKSTF

SEQ ID NO: 736050 - protein, 15 aa, Homo sapiens
  CDR3 for beta chain variable domain of TCR clone 368025 (TRBV28, TRBJ1-4)
CASSLGTGTKEKLFF

SEQ ID NO: 736051 - protein, 14 aa, Homo sapiens
  CDR3 for alpha chain variable domain of TCR clone 368026 (TRAV12-3, TRAJ12)
CAMSEVDSSYKLIF

SEQ ID NO: 736052 - protein, 16 aa, Homo sapiens
  CDR3 for beta chain variable domain of TCR clone 368026 (TRBV12-4, TRBJ2-5)
CASSPTSGRAEGTQYF

SEQ ID NO: 736053 - protein, 16 aa, Homo sapiens
  CDR3 for alpha chain variable domain of TCR clone 368027 (TRAV16, TRAJ15)
CITVLSGPQAGTALIF

SEQ ID NO: 736054 - protein, 12 aa, Homo sapiens
  CDR3 for beta chain variable domain of TCR clone 368027 (TRBV18, TRBJ2-5)
CASSPSKETQYF

SEQ ID NO: 736055 - protein, 14 aa, Homo sapiens
  CDR3 for alpha chain variable domain of TCR clone 368028 (TRAV2, TRAJ37)
CAVDFTSNTGKLIF

SEQ ID NO: 736056 - protein, 13 aa, Homo sapiens
  CDR3 for beta chain variable domain of TCR clone 368028 (TRBV20-1, TRBJ1-1)
SAVLHLGGTEAFF

SEQ ID NO: 736057 - protein, 12 aa, Homo sapiens
  CDR3 for alpha chain variable domain of TCR clone 368029 (TRAV12-1, TRAJ40)
CVVYSGTYKYIF

SEQ ID NO: 736058 - protein, 14 aa, Homo sapiens
  CDR3 for beta chain variable domain of TCR clone 368029 (TRBV7-6, TRBJ2-1)
CASSLGGGADERFF

SEQ ID NO: 736059 - protein, 15 aa, Homo sapiens
  CDR3 for alpha chain variable domain of TCR clone 368030 (TRAV13-1, TRAJ45)
CAASGSGGGADGLTF

SEQ ID NO: 736060 - protein, 12 aa, Homo sapiens
  CDR3 for beta chain variable domain of TCR clone 368030 (TRBV11-2, TRBJ2-2)
CASSLGGRELFF

SEQ ID NO: 736061 - protein, 16 aa, Homo sapiens
  CDR3 for alpha chain variable domain of TCR clone 368031 (TRAV30, TRAJ24)
CGTAIVDADSWGKFQF

SEQ ID NO: 736062 - protein, 14 aa, Homo sapiens
  CDR3 for beta chain variable domain of TCR clone 368031 (TRBV12-5, TRBJ2-5)
CAGGSRTHQETQYF

SEQ ID NO: 736063 - protein, 14 aa, Homo sapiens
  CDR3 for alpha chain variable domain of TCR clone 368032 (TRAV12-2, TRAJ15)
CAPHTGQAGTALIF

SEQ ID NO: 736064 - protein, 14 aa, Homo sapiens
  CDR3 for beta chain variable domain of TCR clone 368032 (TRBV7-9, TRBJ2-2)
CASSLVQDTGELFF

SEQ ID NO: 736065 - protein, 14 aa, Homo sapiens
  CDR3 for alpha chain variable domain of TCR clone 368033 (TRAV12-2, TRAJ41)
CAVNRANSGYALNF

SEQ ID NO: 736066 - protein, 13 aa, Homo sapiens
  CDR3 for beta chain variable domain of TCR clone 368033 (TRBV7-9, TRBJ1-2)
CASSLRQNYGYTF

SEQ ID NO: 736067 - protein, 14 aa, Homo sapiens
  CDR3 for alpha chain variable domain of TCR clone 368034 (TRAV1-2, TRAJ8)
CAVREDTGFQKLVF

SEQ ID NO: 736068 - protein, 15 aa, Homo sapiens
  CDR3 for beta chain variable domain of TCR clone 368034 (TRBV5-1, TRBJ2-1)
CASSPPRAAYNEQFF

SEQ ID NO: 736069 - protein, 14 aa, Homo sapiens
  CDR3 for alpha chain variable domain of TCR clone 368035 (TRAV17, TRAJ57)
CATDPQGGSEKPVF

SEQ ID NO: 736070 - protein, 12 aa, Homo sapiens
  CDR3 for beta chain variable domain of TCR clone 368035 (TRBV16, TRBJ2-2)
CASSQSVGEPFF

SEQ ID NO: 736071 - protein, 15 aa, Homo sapiens
  CDR3 for alpha chain variable domain of TCR clone 368036 (TRAV17, TRAJ52)
CATEAGGTSYGKLTF

SEQ ID NO: 736072 - protein, 14 aa, Homo sapiens
  CDR3 for beta chain variable domain of TCR clone 368036 (TRBV28, TRBJ1-5)
CASSLGVGVKPQHF

SEQ ID NO: 736073 - protein, 13 aa, Homo sapiens
  CDR3 for alpha chain variable domain of TCR clone 368037 (TRAV13-2, TRAJ40)
CAETLSGTYNYIF

SEQ ID NO: 736074 - protein, 16 aa, Homo sapiens
  CDR3 for beta chain variable domain of TCR clone 368037 (TRBV20-1, TRBJ2-1)
CSARDFSGRIGDEQFF

SEQ ID NO: 736075 - protein, 10 aa, Homo sapiens
  CDR3 for alpha chain variable domain of TCR clone 368038 (TRAV30, TRAJ48)
CGIGNEKLTF

SEQ ID NO: 736076 - protein, 14 aa, Homo sapiens
  CDR3 for beta chain variable domain of TCR clone 368038 (TRBV7-2, TRBJ2-7)
CASSPKTSFYEQYF

SEQ ID NO: 736077 - protein, 14 aa, Homo sapiens
  CDR3 for alpha chain variable domain of TCR clone 368039 (TRAV8-2, TRAJ4)
CGVSPSGGYNKLIF

SEQ ID NO: 736078 - protein, 15 aa, Homo sapiens
  CDR3 for beta chain variable domain of TCR clone 368039 (TRBV4-1, TRBJ1-4)
CASSDTEGTNEKLFF

SEQ ID NO: 736079 - protein, 14 aa, Homo sapiens
  CDR3 for alpha chain variable domain of TCR clone 368040 (TRAV23/DV6, TRAJ4)
CAAPSSGGYNKLIF

SEQ ID NO: 736080 - protein, 16 aa, Homo sapiens
  CDR3 for beta chain variable domain of TCR clone 368040 (TRBV19, TRBJ1-1)
CASRFGGPVTGTEGFF

SEQ ID NO: 736081 - protein, 13 aa, Homo sapiens
  CDR3 for alpha chain variable domain of TCR clone 368041 (TRAV12-2, TRAJ20)
CAVYPSNDYKLSF

SEQ ID NO: 736082 - protein, 16 aa, Homo sapiens
  CDR3 for beta chain variable domain of TCR clone 368041 (TRBV2, TRBJ2-1)
CASRSPAGEKYNEQFF

SEQ ID NO: 736083 - protein, 12 aa, Homo sapiens
  CDR3 for alpha chain variable domain of TCR clone 368042 (TRAV13-1, TRAJ53)
AASGGSNYKLTF

SEQ ID NO: 736084 - protein, 15 aa, Homo sapiens
  CDR3 for beta chain variable domain of TCR clone 368042 (TRBV11-2, TRBJ2-5)
CASSLGAGGVETQYF

SEQ ID NO: 736085 - protein, 12 aa, Homo sapiens
  CDR3 for alpha chain variable domain of TCR clone 368043 (TRAV1-1, TRAJ9)
CAVDTGGFKTIF

SEQ ID NO: 736086 - protein, 15 aa, Homo sapiens
  CDR3 for beta chain variable domain of TCR clone 368043 (TRBV7-2, TRBJ2-2)
CASRRPGQNTGELFF

SEQ ID NO: 736087 - protein, 14 aa, Homo sapiens
  CDR3 for alpha chain variable domain of TCR clone 368044 (TRAV8-2, TRAJ6)
CVVISAGGSYIPRF

SEQ ID NO: 736088 - protein, 16 aa, Homo sapiens
  CDR3 for beta chain variable domain of TCR clone 368044 (TRBV7-6, TRBJ2-6)
CASSLPGLSGANVLTF

SEQ ID NO: 736089 - protein, 14 aa, Homo sapiens
  CDR3 for alpha chain variable domain of TCR clone 368045 (TRAV12-2, TRAJ5)
CAVNRFTGRRVLTF

SEQ ID NO: 736090 - protein, 12 aa, Homo sapiens
  CDR3 for beta chain variable domain of TCR clone 368045 (TRBV19, TRBJ1-5)
CASSIAQQPQHF

SEQ ID NO: 736091 - protein, 14 aa, Homo sapiens
  CDR3 for alpha chain variable domain of TCR clone 368046 (TRAV29/DV5, TRAJ36)
CAARRKTGANNLFP

SEQ ID NO: 736092 - protein, 14 aa, Homo sapiens
  CDR3 for beta chain variable domain of TCR clone 368046 (TRBV12-5, TRBJ2-5)
CASGSRTHQETQYF

SEQ ID NO: 736093 - protein, 14 aa, Homo sapiens
  CDR3 for alpha chain variable domain of TCR clone 368047 (TRAV12-2, TRAJ17)
CAVLFKAAGNKLTF

SEQ ID NO: 736094 - protein, 14 aa, Homo sapiens
  CDR3 for beta chain variable domain of TCR clone 368047 (TRBV4-1, TRBJ2-2)
CASSQAVNNGELFF

SEQ ID NO: 736095 - protein, 16 aa, Homo sapiens
  CDR3 for alpha chain variable domain of TCR clone 368048 (TRAV26-1, TRAJ36)
CIVRVPDQTGANKLFF

SEQ ID NO: 736096 - protein, 15 aa, Homo sapiens
  CDR3 for beta chain variable domain of TCR clone 368048 (TRBV19, TRBJ2-4)
CASRGPRRGENIQYF

SEQ ID NO: 736097 - protein, 11 aa, Homo sapiens
  CDR3 for alpha chain variable domain of TCR clone 368049 (TRAV1-1, TRAJ23)
CAVRQLGKLIF

SEQ ID NO: 736098 - protein, 13 aa, Homo sapiens
  CDR3 for beta chain variable domain of TCR clone 368049 (TRBV7-3, TRBJ1-1)
CASSQDWGAEAFF

SEQ ID NO: 736099 - protein, 12 aa, Homo sapiens
  CDR3 for alpha chain variable domain of TCR clone 368050 (TRAV12-3, TRAJ17)
CAMTLTGNKLTF

SEQ ID NO: 736100 - protein, 13 aa, Homo sapiens
  CDR3 for beta chain variable domain of TCR clone 368050 (TRBV7-8, TRBJ2-2)
PGPTIHITGELFF

SEQ ID NO: 736101 - protein, 14 aa, Homo sapiens
  CDR3 for alpha chain variable domain of TCR clone 368051 (TRAV1-2, TRAJ16)
CAVNGCSDGQKLLF

SEQ ID NO: 736102 - protein, 15 aa, Homo sapiens
  CDR3 for beta chain variable domain of TCR clone 368051 (TRBV9, TRBJ1-6)
CASSVAGTGDSPLHF

SEQ ID NO: 736103 - protein, 16 aa, Homo sapiens
  CDR3 for alpha chain variable domain of TCR clone 368052 (TRAV3, TRAJ37)
SAVRVRGSGNTGKLIF

SEQ ID NO: 736104 - protein, 15 aa, Homo sapiens
  CDR3 for beta chain variable domain of TCR clone 368052 (TRBV3-1, TRBJ2-1)
CASSPRDSGFNEQFF

SEQ ID NO: 736105 - protein, 15 aa, Homo sapiens
  CDR3 for alpha chain variable domain of TCR clone 368053 (TRAV26-1, TRAJ56)
CIVRVATGANSKLTF

SEQ ID NO: 736106 - protein, 13 aa, Homo sapiens
  CDR3 for beta chain variable domain of TCR clone 368053 (TRBV12-4, TRBJ2-5)
CASRLAVQETQYF

SEQ ID NO: 736107 - protein, 13 aa, Homo sapiens
  CDR3 for alpha chain variable domain of TCR clone 368054 (TRAV12-1, TRAJ49)
CVVILNTGNQFYF

SEQ ID NO: 736108 - protein, 13 aa, Homo sapiens
  CDR3 for beta chain variable domain of TCR clone 368054 (TRBV10-3, TRBJ2-7)
CASTLAVNYEQYF

SEQ ID NO: 736109 - protein, 13 aa, Homo sapiens
  CDR3 for alpha chain variable domain of TCR clone 368055 (TRAV12-1, TRAJ15)
CVVSNEAGTALIF

SEQ ID NO: 736110 - protein, 17 aa, Homo sapiens
  CDR3 for beta chain variable domain of TCR clone 368055 (TRBV7-2, TRBJ1-4)
CASSFKAGPTTNEKLFF

SEQ ID NO: 736111 - protein, 14 aa, Homo sapiens
  CDR3 for alpha chain variable domain of TCR clone 368056 (TRAV1-2, TRAJ16)
CAVNRFSDGQKLLF

SEQ ID NO: 736112 - protein, 15 aa, Homo sapiens
  CDR3 for beta chain variable domain of TCR clone 368056 (TRBV20-1, TRBJ1-5)
CSAFTNGQRNQPQHF

SEQ ID NO: 736113 - protein, 15 aa, Homo sapiens
  CDR3 for alpha chain variable domain of TCR clone 368057 (TRAV10, TRAJ10)
CVVSADTGGGNKLTY

SEQ ID NO: 736114 - protein, 15 aa, Homo sapiens
  CDR3 for beta chain variable domain of TCR clone 368057 (TRBV11-3, TRBJ2-7)
CASSLLSGSSYEQYF

SEQ ID NO: 736115 - protein, 14 aa, Homo sapiens
  CDR3 for alpha chain variable domain of TCR clone 368058 (TRAV1-2, TRAJ8)
CDVREDTGFQKLVF

SEQ ID NO: 736116 - protein, 15 aa, Homo sapiens
  CDR3 for beta chain variable domain of TCR clone 368058 (TRBV6-3, TRBJ2-7)
CASSSPVTVFYEQYF

SEQ ID NO: 736117 - protein, 14 aa, Homo sapiens
  CDR3 for alpha chain variable domain of TCR clone 368059 (TRAV8-2, TRAJ11)
CVVSEKSGYSTLTF

SEQ ID NO: 736118 - protein, 15 aa, Homo sapiens
  CDR3 for beta chain variable domain of TCR clone 368059 (TRBV28, TRBJ2-1)
CSSSPEYPRDNEQFF

SEQ ID NO: 736119 - protein, 15 aa, Homo sapiens
  CDR3 for alpha chain variable domain of TCR clone 368060 (TRAV26-1, TRAJ44)
CIVRIGTGTASKLTF

SEQ ID NO: 736120 - protein, 11 aa, Homo sapiens
  CDR3 for beta chain variable domain of TCR clone 368060 (TRBV7-9, TRBJ2-1)
CASSSQNEQFF

SEQ ID NO: 736121 - protein, 13 aa, Homo sapiens
  CDR3 for alpha chain variable domain of TCR clone 368061 (TRAV12-1, TRAJ37)
CGVNAGNTGKLIF

SEQ ID NO: 736122 - protein, 14 aa, Homo sapiens
  CDR3 for beta chain variable domain of TCR clone 368061 (TRBV7-2, TRBJ2-3)
CASRRGLAADTQYY

SEQ ID NO: 736123 - protein, 14 aa, Homo sapiens
  CDR3 for alpha chain variable domain of TCR clone 368062 (TRAV3, TRAJ37)
CDVKESGNTGKLVF

SEQ ID NO: 736124 - protein, 15 aa, Homo sapiens
  CDR3 for beta chain variable domain of TCR clone 368062 (TRBV7-2, TRBJ2-7)
CASSLSSGRTYEQYF

SEQ ID NO: 736125 - protein, 16 aa, Homo sapiens
  CDR3 for alpha chain variable domain of TCR clone 368063 (TRAV3, TRAJ21)
CAVRDIERGNFNKFYF

SEQ ID NO: 736126 - protein, 15 aa, Homo sapiens
  CDR3 for beta chain variable domain of TCR clone 368063 (TRBV10-3, TRBJ2-3)
CAISLTSGGTDTQYF

SEQ ID NO: 736127 - protein, 17 aa, Homo sapiens
  CDR3 for alpha chain variable domain of TCR clone 368064 (TRAV3, TRAJ6)
FAVRGGPRAGGNYIPTF

SEQ ID NO: 736128 - protein, 14 aa, Homo sapiens
  CDR3 for beta chain variable domain of TCR clone 368064 (TRBV7-2, TRBJ2-7)
CASSPKTSFYEQYF

SEQ ID NO: 736129 - protein, 12 aa, Homo sapiens
  CDR3 for alpha chain variable domain of TCR clone 368065 (TRAV1-2, TRAJ33)
CAALDSNYQLIW

SEQ ID NO: 736130 - protein, 14 aa, Homo sapiens
  CDR3 for beta chain variable domain of TCR clone 368065 (TRBV2, TRBJ2-3)
CASSEGQNTDTQYF

SEQ ID NO: 736131 - protein, 13 aa, Homo sapiens
  CDR3 for alpha chain variable domain of TCR clone 368066 (TRAV12-1, TRAJ26)
CVVRRNYGQNFVF

SEQ ID NO: 736132 - protein, 13 aa, Homo sapiens
  CDR3 for beta chain variable domain of TCR clone 368066 (TRBV28, TRBJ2-4)
CASSQSSKNIQYF

SEQ ID NO: 736133 - protein, 14 aa, Homo sapiens
  CDR3 for alpha chain variable domain of TCR clone 368067 (TRAV30, TRAJ26)
CGTEIVSYGQNFVF

SEQ ID NO: 736134 - protein, 11 aa, Homo sapiens
  CDR3 for beta chain variable domain of TCR clone 368067 (TRBV19, TRBJ1-1)
CASSIGSEAFF

SEQ ID NO: 736135 - protein, 17 aa, Homo sapiens
  CDR3 for alpha chain variable domain of TCR clone 368068 (TRAV2, TRAJ36)
CAVEDRGNWGKQPLLWD

SEQ ID NO: 736136 - protein, 14 aa, Homo sapiens
  CDR3 for beta chain variable domain of TCR clone 368068 (TRBV7-9, TRBJ2-5)
CASCLDTAQETQYF

SEQ ID NO: 736137 - protein, 11 aa, Homo sapiens
  CDR3 for alpha chain variable domain of TCR clone 368069 (TRAV12-1, TRAJ30)
CVVNGQDKIIF

SEQ ID NO: 736138 - protein, 11 aa, Homo sapiens
  CDR3 for beta chain variable domain of TCR clone 368069 (TRBV27, TRBJ2-2)
CQQTLHGELFF

SEQ ID NO: 736139 - protein, 16 aa, Homo sapiens
  CDR3 for alpha chain variable domain of TCR clone 368070 (TRAV30, TRAJ24)
CCTEIVDADSWGKFQF

SEQ ID NO: 736140 - protein, 14 aa, Homo sapiens
  CDR3 for beta chain variable domain of TCR clone 368070 (TRBV7-9, TRBJ2-4)
CASSLAMGGNIQYF

SEQ ID NO: 736141 - protein, 18 aa, Homo sapiens
  CDR3 for alpha chain variable domain of TCR clone 368071 (TRAV26-2, TRAJ45)
CILRVDKYSGGGSGGLTF

SEQ ID NO: 736142 - protein, 17 aa, Homo sapiens
  CDR3 for beta chain variable domain of TCR clone 368071 (TRBV25-1, TRBJ2-1)
CASSAYGQGRGVYEQFF

SEQ ID NO: 736143 - protein, 16 aa, Homo sapiens
  CDR3 for alpha chain variable domain of TCR clone 368072 (TRAV30, TRAJ24)
CGTEIGGADSWGKFQF

SEQ ID NO: 736144 - protein, 14 aa, Homo sapiens
  CDR3 for beta chain variable domain of TCR clone 368072 (TRBV12-5, TRBJ2-5)
CASGSRTHQETQYF

SEQ ID NO: 736145 - protein, 15 aa, Homo sapiens
  CDR3 for alpha chain variable domain of TCR clone 368073 (TRAV12-1, TRAJ44)
CVVDTPQGTASKLTF

SEQ ID NO: 736146 - protein, 18 aa, Homo sapiens
  CDR3 for beta chain variable domain of TCR clone 368073 (TRBV12-4, TRBJ2-2)
CASSLVAGTRGRTGELFF

SEQ ID NO: 736147 - protein, 12 aa, Homo sapiens
  CDR3 for alpha chain variable domain of TCR clone 368074 (TRAV1-2, TRAJ33)
CAALDSNYQLIW

SEQ ID NO: 736148 - protein, 13 aa, Homo sapiens
  CDR3 for beta chain variable domain of TCR clone 368074 (TRBV7-9, TRBJ2-5)
CASLSPGQETQYF

SEQ ID NO: 736149 - protein, 15 aa, Homo sapiens
  CDR3 for alpha chain variable domain of TCR clone 368075 (TRAV4, TRAJ29)
CLVGAYRSHETHLLS

SEQ ID NO: 736150 - protein, 17 aa, Homo sapiens
  CDR3 for beta chain variable domain of TCR clone 368075 (TRBV25-1, TRBJ2-7)
CASSDARVVFSSYEQYF

SEQ ID NO: 736151 - protein, 13 aa, Homo sapiens
  CDR3 for alpha chain variable domain of TCR clone 368076 (TRAV13-2, TRAJ48)
CAEMYFGNEKLTF

SEQ ID NO: 736152 - protein, 15 aa, Homo sapiens
  CDR3 for beta chain variable domain of TCR clone 368076 (TRBV7-9, TRBJ1-6)
CASSSPGSGNSPLHF

SEQ ID NO: 736153 - protein, 16 aa, Homo sapiens
  CDR3 for alpha chain variable domain of TCR clone 368077 (TRAV23/DV6, TRAJ48)
GAASGVVNFGNEKLTF

SEQ ID NO: 736154 - protein, 15 aa, Homo sapiens
  CDR3 for beta chain variable domain of TCR clone 368077 (TRBV20-1, TRBJ2-5)
CSAGLAGVSQETQYF

SEQ ID NO: 736155 - protein, 16 aa, Homo sapiens
  CDR3 for alpha chain variable domain of TCR clone 368078 (TRAV8-3, TRAJ8)
CAVPRDGNTGFQKLVF

SEQ ID NO: 736156 - protein, 15 aa, Homo sapiens
  CDR3 for beta chain variable domain of TCR clone 368078 (TRBV7-9, TRBJ1-6)
CASSSPGRGNSPLHF

SEQ ID NO: 736157 - protein, 12 aa, Homo sapiens
  CDR3 for alpha chain variable domain of TCR clone 368079 (TRAV13-2, TRAJ8)
CAPWLGFQKLGF

SEQ ID NO: 736158 - protein, 15 aa, Homo sapiens
  CDR3 for beta chain variable domain of TCR clone 368079 (TRBV12-4, TRBJ2-5)
CASSLSGAFQETQYF

SEQ ID NO: 736159 - protein, 13 aa, Homo sapiens
  CDR3 for alpha chain variable domain of TCR clone 368080 (TRAV16, TRAJ10)
CAPAREDETNSPL

SEQ ID NO: 736160 - protein, 19 aa, Homo sapiens
  CDR3 for beta chain variable domain of TCR clone 368080 (TRBV25-1, TRBJ2-2)
CAILVYRVDRGRKTGELFF

SEQ ID NO: 736161 - protein, 11 aa, Homo sapiens
  CDR3 for alpha chain variable domain of TCR clone 368081 (TRAV8-6, TRAJ13)
CALGIYQKVTF

SEQ ID NO: 736162 - protein, 15 aa, Homo sapiens
  CDR3 for beta chain variable domain of TCR clone 368081 (TRBV5-1, TRBJ2-7)
CASSLDGGPAREQYF

SEQ ID NO: 736163 - protein, 17 aa, Homo sapiens
  CDR3 for alpha chain variable domain of TCR clone 368082 (TRAV26-1, TRAJ37)
CIVRVITVSSNTGKLLF

SEQ ID NO: 736164 - protein, 11 aa, Homo sapiens
  CDR3 for beta chain variable domain of TCR clone 368082 (TRBV29-1, TRBJ2-5)
CSEDRTGTQYF

SEQ ID NO: 736165 - protein, 12 aa, Homo sapiens
  CDR3 for alpha chain variable domain of TCR clone 368083 (TRAV12-2, TRAJ10)
WGVTGGGNKLTF

SEQ ID NO: 736166 - protein, 14 aa, Homo sapiens
  CDR3 for beta chain variable domain of TCR clone 368083 (TRBV12-4, TRBJ1-4)
CASSRQGANEKLFF

SEQ ID NO: 736167 - protein, 16 aa, Homo sapiens
  CDR3 for alpha chain variable domain of TCR clone 368084 (TRAV38-1, TRAJ37)
CGFKGDGSSNTGKLIF

SEQ ID NO: 736168 - protein, 13 aa, Homo sapiens
  CDR3 for beta chain variable domain of TCR clone 368084 (TRBV12-4, TRBJ2-5)
CASSLFRRETQYF

SEQ ID NO: 736169 - protein, 23 aa, Homo sapiens
  CDR3 for alpha chain variable domain of TCR clone 368085 (TRAV30, TRAJ29)
PAQLLRNLLLWHRAFSGNTPLVF

SEQ ID NO: 736170 - protein, 15 aa, Homo sapiens
  CDR3 for beta chain variable domain of TCR clone 368085 (TRBV5-1, TRBJ2-2)
CASSLFGQKTGELFF

SEQ ID NO: 736171 - protein, 14 aa, Homo sapiens
  CDR3 for alpha chain variable domain of TCR clone 368086 (TRAV1-2, TRAJ16)
CAVNRLSDGQKLLF

SEQ ID NO: 736172 - protein, 16 aa, Homo sapiens
  CDR3 for beta chain variable domain of TCR clone 368086 (TRBV7-2, TRBJ2-7)
CASSLDLSGGAYEQYF

SEQ ID NO: 736173 - protein, 11 aa, Homo sapiens
  CDR3 for alpha chain variable domain of TCR clone 368087 (TRAV8-1, TRAJ8)
CAMTGFQKLVF

SEQ ID NO: 736174 - protein, 13 aa, Homo sapiens
  CDR3 for beta chain variable domain of TCR clone 368087 (TRBV7-3, TRBJ1-1)
CASSQDWGAEAFF

SEQ ID NO: 736175 - protein, 14 aa, Homo sapiens
  CDR3 for alpha chain variable domain of TCR clone 368088 (TRAV1-2, TRAJ16)
CAVNRFSDGQNLLF

SEQ ID NO: 736176 - protein, 12 aa, Homo sapiens
  CDR3 for beta chain variable domain of TCR clone 368088 (TRBV5-1, TRBJ2-5)
CASSWDQETQYF

SEQ ID NO: 736177 - protein, 15 aa, Homo sapiens
  CDR3 for alpha chain variable domain of TCR clone 368089 (TRAV38-1, TRAJ37)
CAFMRGPGNTGKLIF

SEQ ID NO: 736178 - protein, 14 aa, Homo sapiens
  CDR3 for beta chain variable domain of TCR clone 368089 (TRBV19, TRBJ2-1)
CASPTFVLSGEQFF

SEQ ID NO: 736179 - protein, 14 aa, Homo sapiens
  CDR3 for alpha chain variable domain of TCR clone 368090 (TRAV12-2, TRAJ45)
CAVNKGGGADGPTF

SEQ ID NO: 736180 - protein, 14 aa, Homo sapiens
  CDR3 for beta chain variable domain of TCR clone 368090 (TRBV20-1, TRBJ1-1)
CSAMGGTANTEAFF

SEQ ID NO: 736181 - protein, 13 aa, Homo sapiens
  CDR3 for alpha chain variable domain of TCR clone 368091 (TRAV35, TRAJ48)
CAGHEFGNEKLTF

SEQ ID NO: 736182 - protein, 15 aa, Homo sapiens
  CDR3 for beta chain variable domain of TCR clone 368091 (TRBV27, TRBJ2-7)
CASSPQQEGQREQYF

SEQ ID NO: 736183 - protein, 14 aa, Homo sapiens
  CDR3 for alpha chain variable domain of TCR clone 368092 (TRAV3, TRAJ7)
CAVREEKREQQTRF

SEQ ID NO: 736184 - protein, 14 aa, Homo sapiens
  CDR3 for beta chain variable domain of TCR clone 368092 (TRBV7-7, TRBJ2-2)
CASSTRASGGELFL

SEQ ID NO: 736185 - protein, 14 aa, Homo sapiens
  CDR3 for alpha chain variable domain of TCR clone 368093 (TRAV12-2, TRAJ13)
CAVKKTGGYQKVTF

SEQ ID NO: 736186 - protein, 15 aa, Homo sapiens
  CDR3 for beta chain variable domain of TCR clone 368093 (TRBV9, TRBJ1-6)
CASSVAGTGDSPRHF

SEQ ID NO: 736187 - protein, 15 aa, Homo sapiens
  CDR3 for alpha chain variable domain of TCR clone 368094 (TRAV23/DV6, TRAJ13)
CAAWPGGGGYQKVTF

SEQ ID NO: 736188 - protein, 14 aa, Homo sapiens
  CDR3 for beta chain variable domain of TCR clone 368094 (TRBV15, TRBJ2-3)
CATRSGTSTDTQYF

SEQ ID NO: 736189 - protein, 14 aa, Homo sapiens
  CDR3 for alpha chain variable domain of TCR clone 368095 (TRAV12-1, TRAJ17)
CVVNYKAAGNKLTF

SEQ ID NO: 736190 - protein, 15 aa, Homo sapiens
  CDR3 for beta chain variable domain of TCR clone 368095 (TRBV27, TRBJ2-1)
CASSNGGGSSHEQFF

SEQ ID NO: 736191 - protein, 12 aa, Homo sapiens
  CDR3 for alpha chain variable domain of TCR clone 368096 (TRAV2, TRAJ43)
CAVEVDNNDMRF

SEQ ID NO: 736192 - protein, 13 aa, Homo sapiens
  CDR3 for beta chain variable domain of TCR clone 368096 (TRBV12-4, TRBJ2-1)
CASRRVATYGQFF

SEQ ID NO: 736193 - protein, 16 aa, Homo sapiens
  CDR3 for alpha chain variable domain of TCR clone 368097 (TRAV12-1, TRAJ22)
CGVNSISSGSARQLTF

SEQ ID NO: 736194 - protein, 16 aa, Homo sapiens
  CDR3 for beta chain variable domain of TCR clone 368097 (TRBV19, TRBJ2-1)
CASSIWGQGARNEQFF

SEQ ID NO: 736195 - protein, 10 aa, Homo sapiens
  CDR3 for alpha chain variable domain of TCR clone 368098 (TRAV8-2, TRAJ31)
CVVVNARLMF

SEQ ID NO: 736196 - protein, 16 aa, Homo sapiens
  CDR3 for beta chain variable domain of TCR clone 368098 (TRBV12-4, TRBJ1-5)
CASSRPVGGSNQPQHF

SEQ ID NO: 736197 - protein, 15 aa, Homo sapiens
  CDR3 for alpha chain variable domain of TCR clone 368099 (TRAV13-1, TRAJ9)
CAVEDRGTGGFKTIF

SEQ ID NO: 736198 - protein, 16 aa, Homo sapiens
  CDR3 for beta chain variable domain of TCR clone 368099 (TRBV24-1, TRBJ2-3)
CATSDPGTGATDTQYF

SEQ ID NO: 736199 - protein, 13 aa, Homo sapiens
  CDR3 for alpha chain variable domain of TCR clone 368100 (TRAV13-1, TRAJ5)
CAASDTGRRALTF

SEQ ID NO: 736200 - protein, 12 aa, Homo sapiens
  CDR3 for beta chain variable domain of TCR clone 368100 (TRBV2, TRBJ2-1)
CAYGPPGNEQFF

SEQ ID NO: 736201 - protein, 17 aa, Homo sapiens
  CDR3 for alpha chain variable domain of TCR clone 368101 (TRAV13-1, TRAJ23)
CAASKRFHRLRKAYLRT

SEQ ID NO: 736202 - protein, 14 aa, Homo sapiens
  CDR3 for beta chain variable domain of TCR clone 368101 (TRBV7-2, TRBJ2-7)
CASRSQGAAYEQYF

SEQ ID NO: 736203 - protein, 16 aa, Homo sapiens
  CDR3 for alpha chain variable domain of TCR clone 368102 (TRAV14/DV4, TRAJ54)
CAMREGLAWGAQKLVF

SEQ ID NO: 736204 - protein, 15 aa, Homo sapiens
  CDR3 for beta chain variable domain of TCR clone 368102 (TRBV7-2, TRBJ2-3)
CASSLAGAFIDTQYF

SEQ ID NO: 736205 - protein, 15 aa, Homo sapiens
  CDR3 for alpha chain variable domain of TCR clone 368103 (TRAV26-1, TRAJ29)
CIVIVEGSGNTPLVF

SEQ ID NO: 736206 - protein, 13 aa, Homo sapiens
  CDR3 for beta chain variable domain of TCR clone 368103 (TRBV4-2, TRBJ1-1)
CASSQAGNTEAFF

SEQ ID NO: 736207 - protein, 13 aa, Homo sapiens
  CDR3 for alpha chain variable domain of TCR clone 368104 (TRAV12-2, TRAJ50)
CAVIVTSYDKVIF

SEQ ID NO: 736208 - protein, 13 aa, Homo sapiens
  CDR3 for beta chain variable domain of TCR clone 368104 (TRBV11-2, TRBJ1-1)
CASSLETSTEAFF

SEQ ID NO: 736209 - protein, 15 aa, Homo sapiens
  CDR3 for alpha chain variable domain of TCR clone 368105 (TRAV34, TRAJ38)
CGVDFTPGNNRKLIW

SEQ ID NO: 736210 - protein, 15 aa, Homo sapiens
  CDR3 for beta chain variable domain of TCR clone 368105 (TRBV27, TRBJ2-5)
CASSLIPSGGETQYF

SEQ ID NO: 736211 - protein, 15 aa, Homo sapiens
  CDR3 for alpha chain variable domain of TCR clone 368106 (TRAV17, TRAJ57)
CATGPSQGGSEKLVF

SEQ ID NO: 736212 - protein, 14 aa, Homo sapiens
  CDR3 for beta chain variable domain of TCR clone 368106 (TRBV28, TRBJ1-5)
CASIPYGLEQPQHF

SEQ ID NO: 736213 - protein, 14 aa, Homo sapiens
  CDR3 for alpha chain variable domain of TCR clone 368107 (TRAV1-2, TRAJ16)
CAVNRFSDGTKLLF

SEQ ID NO: 736214 - protein, 14 aa, Homo sapiens
  CDR3 for beta chain variable domain of TCR clone 368107 (TRBV7-2, TRBJ1-1)
CASSFLTGTTEAFF

SEQ ID NO: 736215 - protein, 14 aa, Homo sapiens
  CDR3 for alpha chain variable domain of TCR clone 368108 (TRAV1-2, TRAJ16)
CAVNRFSDGQKRLF

SEQ ID NO: 736216 - protein, 15 aa, Homo sapiens
  CDR3 for beta chain variable domain of TCR clone 368108 (TRBV9, TRBJ1-6)
CASSVAGTGDSLLHF

SEQ ID NO: 736217 - protein, 16 aa, Homo sapiens
  CDR3 for alpha chain variable domain of TCR clone 368109 (TRAV3, TRAJ37)
CAVRGKGSGNTGKLIF

SEQ ID NO: 736218 - protein, 16 aa, Homo sapiens
  CDR3 for beta chain variable domain of TCR clone 368109 (TRBV12-5, TRBJ2-5)
CDSGPRTSGSQETQYF

SEQ ID NO: 736219 - protein, 17 aa, Homo sapiens
  CDR3 for alpha chain variable domain of TCR clone 368110 (TRAV3, TRAJ6)
CAVRDGPRAGGSYIPTF

SEQ ID NO: 736220 - protein, 18 aa, Homo sapiens
  CDR3 for beta chain variable domain of TCR clone 368110 (TRBV7-9, TRBJ2-7)
WASSLTTSGSRTWYEQYF

SEQ ID NO: 736221 - protein, 13 aa, Homo sapiens
  CDR3 for alpha chain variable domain of TCR clone 368111 (TRAV12-2, TRAJ20)
RAVYPSNDYKLSF

SEQ ID NO: 736222 - protein, 15 aa, Homo sapiens
  CDR3 for beta chain variable domain of TCR clone 368111 (TRBV27, TRBJ2-5)
CASSLYPRGGENQCF

SEQ ID NO: 736223 - protein, 14 aa, Homo sapiens
  CDR3 for alpha chain variable domain of TCR clone 368112 (TRAV2, TRAJ9)
CAVDPNTGGFTTIF

SEQ ID NO: 736224 - protein, 13 aa, Homo sapiens
  CDR3 for beta chain variable domain of TCR clone 368112 (TRBV20-1, TRBJ2-1)
CSASTGTSNEQFF

SEQ ID NO: 736225 - protein, 14 aa, Homo sapiens
  CDR3 for alpha chain variable domain of TCR clone 368113 (TRAV1-1, TRAJ28)
CAVQLWGWELPTHF

SEQ ID NO: 736226 - protein, 14 aa, Homo sapiens
  CDR3 for beta chain variable domain of TCR clone 368113 (TRBV20-1, TRBJ1-3)
CSASPTGAGNTIYC

SEQ ID NO: 736227 - protein, 14 aa, Homo sapiens
  CDR3 for alpha chain variable domain of TCR clone 368114 (TRAV17, TRAJ58)
CATDGETSGSRWTF

SEQ ID NO: 736228 - protein, 15 aa, Homo sapiens
  CDR3 for beta chain variable domain of TCR clone 368114 (TRBV6-3, TRBJ2-7)
CASSSPGTVFYEQYF

SEQ ID NO: 736229 - protein, 14 aa, Homo sapiens
  CDR3 for alpha chain variable domain of TCR clone 368115 (TRAV36/DV7, TRAJ32)
CAVGHVGATNKLIF

SEQ ID NO: 736230 - protein, 15 aa, Homo sapiens
  CDR3 for beta chain variable domain of TCR clone 368115 (TRBV15, TRBJ2-7)
CATSRGVTPTYEQYF

SEQ ID NO: 736231 - protein, 14 aa, Homo sapiens
  CDR3 for alpha chain variable domain of TCR clone 368116 (TRAV13-2, TRAJ17)
CAENSKAAGNKLTF

SEQ ID NO: 736232 - protein, 15 aa, Homo sapiens
  CDR3 for beta chain variable domain of TCR clone 368116 (TRBV5-7, TRBJ1-5)
CASSYGKLWDQPQHF

SEQ ID NO: 736233 - protein, 11 aa, Homo sapiens
  CDR3 for alpha chain variable domain of TCR clone 368117 (TRAV2, TRAJ4)
CAAGGYNKLIL

SEQ ID NO: 736234 - protein, 13 aa, Homo sapiens
  CDR3 for beta chain variable domain of TCR clone 368117 (TRBV20-1, TRBJ1-1)
CSARVGGNTEAFF

SEQ ID NO: 736235 - protein, 13 aa, Homo sapiens
  CDR3 for alpha chain variable domain of TCR clone 368118 (TRAV12-1, TRAJ6)
CVVFPGGSYIPTF

SEQ ID NO: 736236 - protein, 14 aa, Homo sapiens
  CDR3 for beta chain variable domain of TCR clone 368118 (TRBV20-1, TRBJ1-3)
FSASPTGAGNTIYF

SEQ ID NO: 736237 - protein, 16 aa, Homo sapiens
  CDR3 for alpha chain variable domain of TCR clone 368119 (TRAV25, TRAJ47)
TDVGTYFWEYGNKLVF

SEQ ID NO: 736238 - protein, 16 aa, Homo sapiens
  CDR3 for beta chain variable domain of TCR clone 368119 (TRBV6-6, TRBJ2-1)
CASSWGGQGPYNEQFF

SEQ ID NO: 736239 - protein, 13 aa, Homo sapiens
  CDR3 for alpha chain variable domain of TCR clone 368120 (TRAV2, TRAJ40)
CAVVTSGTYKYIF

SEQ ID NO: 736240 - protein, 12 aa, Homo sapiens
  CDR3 for beta chain variable domain of TCR clone 368120 (TRBV14, TRBJ2-4)
CASSNLKSIQYF

SEQ ID NO: 736241 - protein, 23 aa, Homo sapiens
  CDR3 for alpha chain variable domain of TCR clone 368121 (TRAV1-1, TRAJ11)
LLQELQMKDSASYFCAGYSTLTF

SEQ ID NO: 736242 - protein, 18 aa, Homo sapiens
  CDR3 for beta chain variable domain of TCR clone 368121 (TRBV20-1, TRBJ2-3)
CSASGLAGGPGTTDTQYF

SEQ ID NO: 736243 - protein, 11 aa, Homo sapiens
  CDR3 for alpha chain variable domain of TCR clone 368122 (TRAV3, TRAJ21)
CAGGNFDKFYF

SEQ ID NO: 736244 - protein, 16 aa, Homo sapiens
  CDR3 for beta chain variable domain of TCR clone 368122 (TRBV19, TRBJ2-1)
CASSKAGPSSYNEQFF

SEQ ID NO: 736245 - protein, 17 aa, Homo sapiens
  CDR3 for alpha chain variable domain of TCR clone 368123 (TRAV3, TRAJ38)
CAVRDCLNAGNNRKLIW

SEQ ID NO: 736246 - protein, 16 aa, Homo sapiens
  CDR3 for beta chain variable domain of TCR clone 368123 (TRBV7-8, TRBJ2-6)
CASRVGDSSGANVLTF

SEQ ID NO: 736247 - protein, 13 aa, Homo sapiens
  CDR3 for alpha chain variable domain of TCR clone 368124 (TRAV21, TRAJ20)
CAVGLRVDYKLSF

SEQ ID NO: 736248 - protein, 18 aa, Homo sapiens
  CDR3 for beta chain variable domain of TCR clone 368124 (TRBV11-2, TRBJ2-3)
CASSLGGASRGAPNTHYF

SEQ ID NO: 736249 - protein, 16 aa, Homo sapiens
  CDR3 for alpha chain variable domain of TCR clone 368125 (TRAV21, TRAJ37)
CAVRPRGSSNTGKLIF

SEQ ID NO: 736250 - protein, 13 aa, Homo sapiens
  CDR3 for beta chain variable domain of TCR clone 368125 (TRBV7-9, TRBJ2-5)
CASLSLGQETQYF

SEQ ID NO: 736251 - protein, 15 aa, Homo sapiens
  CDR3 for alpha chain variable domain of TCR clone 368126 (TRAV35, TRAJ58)
CAGRRQETSGSRLTF

SEQ ID NO: 736252 - protein, 15 aa, Homo sapiens
  CDR3 for beta chain variable domain of TCR clone 368126 (TRBV10-2, TRBJ2-7)
CASWNRGQATYEQYF

SEQ ID NO: 736253 - protein, 15 aa, Homo sapiens
  CDR3 for alpha chain variable domain of TCR clone 368127 (TRAV17, TRAJ34)
CATDPRMVDTDKLIF

SEQ ID NO: 736254 - protein, 12 aa, Homo sapiens
  CDR3 for beta chain variable domain of TCR clone 368127 (TRBV10-2, TRBJ2-3)
CASSEGPGARYF

SEQ ID NO: 736255 - protein, 13 aa, Homo sapiens
  CDR3 for alpha chain variable domain of TCR clone 368128 (TRAV30, TRAJ49)
CGTESQPVTSSIL

SEQ ID NO: 736256 - protein, 16 aa, Homo sapiens
  CDR3 for beta chain variable domain of TCR clone 368128 (TRBV20-1, TRBJ1-2)
CSASMGQGVANYGYTF

SEQ ID NO: 736257 - protein, 15 aa, Homo sapiens
  CDR3 for alpha chain variable domain of TCR clone 368129 (TRAV3, TRAJ22)
CAVRDRGGSARQLTF

SEQ ID NO: 736258 - protein, 15 aa, Homo sapiens
  CDR3 for beta chain variable domain of TCR clone 368129 (TRBV20-1, TRBJ1-1)
CSARVGGTLKLSLDK

SEQ ID NO: 736259 - protein, 16 aa, Homo sapiens
  CDR3 for alpha chain variable domain of TCR clone 368130 (TRAV3, TRAJ10)
CAVRDMRAGGGHKLTF

SEQ ID NO: 736260 - protein, 11 aa, Homo sapiens
  CDR3 for beta chain variable domain of TCR clone 368130 (TRBV29-1, TRBJ2-5)
CSEDRTGTQYF

SEQ ID NO: 736261 - protein, 13 aa, Homo sapiens
  CDR3 for alpha chain variable domain of TCR clone 368131 (TRAV2, TRAJ26)
CAVVGNYGQNFVF

SEQ ID NO: 736262 - protein, 15 aa, Homo sapiens
  CDR3 for beta chain variable domain of TCR clone 368131 (TRBV27, TRBJ2-1)
CASSNGGGSSNEQFL

SEQ ID NO: 736263 - protein, 12 aa, Homo sapiens
  CDR3 for alpha chain variable domain of TCR clone 368132 (TRAV8-3, TRAJ27)
CAVGAEACKSTF

SEQ ID NO: 736264 - protein, 14 aa, Homo sapiens
  CDR3 for beta chain variable domain of TCR clone 368132 (TRBV2, TRBJ2-1)
CASRLIVGHDEQFF

SEQ ID NO: 736265 - protein, 14 aa, Homo sapiens
  CDR3 for alpha chain variable domain of TCR clone 368133 (TRAV12-2, TRAJ13)
CAVKKTGGYQKVTF

SEQ ID NO: 736266 - protein, 13 aa, Homo sapiens
  CDR3 for beta chain variable domain of TCR clone 368133 (TRBV7-6, TRBJ2-7)
CASSLDHTHEQYF

SEQ ID NO: 736267 - protein, 11 aa, Homo sapiens
  CDR3 for alpha chain variable domain of TCR clone 368134 (TRAV1-1, TRAJ23)
CAVRQGGKLIF

SEQ ID NO: 736268 - protein, 15 aa, Homo sapiens
  CDR3 for beta chain variable domain of TCR clone 368134 (TRBV7-6, TRBJ2-5)
CASSKPTGPQETQYF

SEQ ID NO: 736269 - protein, 13 aa, Homo sapiens
  CDR3 for alpha chain variable domain of TCR clone 368135 (TRAV12-1, TRAJ33)
CGDAPDSNYQLIW

SEQ ID NO: 736270 - protein, 15 aa, Homo sapiens
  CDR3 for beta chain variable domain of TCR clone 368135 (TRBV27, TRBJ2-1)
CASSNRGGSSNEQFF

SEQ ID NO: 736271 - protein, 17 aa, Homo sapiens
  CDR3 for alpha chain variable domain of TCR clone 368136 (TRAV8-6, TRAJ58)
CAVSSGVGETSGSRLTC

SEQ ID NO: 736272 - protein, 14 aa, Homo sapiens
  CDR3 for beta chain variable domain of TCR clone 368136 (TRBV4-2, TRBJ2-1)
CASGLDRAYNEQFF

SEQ ID NO: 736273 - protein, 14 aa, Homo sapiens
  CDR3 for alpha chain variable domain of TCR clone 368137 (TRAV8-2, TRAJ45)
CVVSAGGGADGLTF

SEQ ID NO: 736274 - protein, 12 aa, Homo sapiens
  CDR3 for beta chain variable domain of TCR clone 368137 (TRBV12-4, TRBJ2-1)
CASSLVRVEQFV

SEQ ID NO: 736275 - protein, 16 aa, Homo sapiens
  CDR3 for alpha chain variable domain of TCR clone 368138 (TRAV3, TRAJ10)
CAVRDMRAGGGNKLTF

SEQ ID NO: 736276 - protein, 12 aa, Homo sapiens
  CDR3 for beta chain variable domain of TCR clone 368138 (TRBV27, TRBJ2-5)
CASSPTGETQYF

SEQ ID NO: 736277 - protein, 13 aa, Homo sapiens
  CDR3 for alpha chain variable domain of TCR clone 368139 (TRAV1-2, TRAJ9)
CAALNTGGLKTIF

SEQ ID NO: 736278 - protein, 12 aa, Homo sapiens
  CDR3 for beta chain variable domain of TCR clone 368139 (TRBV11-3, TRBJ1-1)
CASSHRQGEAFF

SEQ ID NO: 736279 - protein, 15 aa, Homo sapiens
  CDR3 for alpha chain variable domain of TCR clone 368140 (TRAV8-3, TRAJ45)
CASSYSGGGADGLTF

SEQ ID NO: 736280 - protein, 13 aa, Homo sapiens
  CDR3 for beta chain variable domain of TCR clone 368140 (TRBV12-4, TRBJ2-2)
CASSITGSGELFF

SEQ ID NO: 736281 - protein, 14 aa, Homo sapiens
  CDR3 for alpha chain variable domain of TCR clone 368141 (TRAV12-2, TRAJ17)
CAVLFKAAGNKLTF

SEQ ID NO: 736282 - protein, 13 aa, Homo sapiens
  CDR3 for beta chain variable domain of TCR clone 368141 (TRBV19, TRBJ2-1)
CASSMYRVNEQFF

SEQ ID NO: 736283 - protein, 16 aa, Homo sapiens
  CDR3 for alpha chain variable domain of TCR clone 368142 (TRAV16, TRAJ42)
CALSGLLGGSQGNLIF

SEQ ID NO: 736284 - protein, 15 aa, Homo sapiens
  CDR3 for beta chain variable domain of TCR clone 368142 (TRBV5-1, TRBJ2-1)
CASSPGGLAGNDQFL

SEQ ID NO: 736285 - protein, 13 aa, Homo sapiens
  CDR3 for alpha chain variable domain of TCR clone 368143 (TRAV8-3, TRAJ10)
WAILTGGGNKPTF

SEQ ID NO: 736286 - protein, 10 aa, Homo sapiens
  CDR3 for beta chain variable domain of TCR clone 368143 (TRBV20-1, TRBJ2-5)
CSARFETQYF

SEQ ID NO: 736287 - protein, 13 aa, Homo sapiens
  CDR3 for alpha chain variable domain of TCR clone 368144 (TRAV30, TRAJ34)
CGTEGYNTDKLIF

SEQ ID NO: 736288 - protein, 16 aa, Homo sapiens
  CDR3 for beta chain variable domain of TCR clone 368144 (TRBV7-9, TRBJ1-2)
CASSLGFSAGEDGYTF

SEQ ID NO: 736289 - protein, 14 aa, Homo sapiens
  CDR3 for alpha chain variable domain of TCR clone 368145 (TRAV12-2, TRAJ40)
CAVKIPSGTYKYIF

SEQ ID NO: 736290 - protein, 20 aa, Homo sapiens
  CDR3 for beta chain variable domain of TCR clone 368145 (TRBV28, TRBJ2-1)
CASTPLGRSPGLAGGNEQFF

SEQ ID NO: 736291 - protein, 11 aa, Homo sapiens
  CDR3 for alpha chain variable domain of TCR clone 368146 (TRAV2, TRAJ13)
CASGGYQKVTF

SEQ ID NO: 736292 - protein, 12 aa, Homo sapiens
  CDR3 for beta chain variable domain of TCR clone 368146 (TRBV19, TRBJ2-7)
CASTSVGSEQYF

SEQ ID NO: 736293 - protein, 15 aa, Homo sapiens
  CDR3 for alpha chain variable domain of TCR clone 368147 (TRAV27, TRAJ38)
CAGRFTAGNNRKLIW

SEQ ID NO: 736294 - protein, 13 aa, Homo sapiens
  CDR3 for beta chain variable domain of TCR clone 368147 (TRBV12-5, TRBJ2-3)
CASQNRGTDTQYF

SEQ ID NO: 736295 - protein, 12 aa, Homo sapiens
  CDR3 for alpha chain variable domain of TCR clone 368148 (TRAV35, TRAJ31)
CAAASNNARLMF

SEQ ID NO: 736296 - protein, 14 aa, Homo sapiens
  CDR3 for beta chain variable domain of TCR clone 368148 (TRBV4-1, TRBJ1-2)
CASSQDPLPYGYTF

SEQ ID NO: 736297 - protein, 13 aa, Homo sapiens
  CDR3 for alpha chain variable domain of TCR clone 368149 (TRAV12-1, TRAJ49)
CVVTPFTGNQFYL

SEQ ID NO: 736298 - protein, 13 aa, Homo sapiens
  CDR3 for beta chain variable domain of TCR clone 368149 (TRBV20-1, TRBJ1-1)
CSARGGANTEAVF

SEQ ID NO: 736299 - protein, 14 aa, Homo sapiens
  CDR3 for alpha chain variable domain of TCR clone 368150 (TRAV3, TRAJ9)
CAVRLNTEGFKTIF

SEQ ID NO: 736300 - protein, 16 aa, Homo sapiens
  CDR3 for beta chain variable domain of TCR clone 368150 (TRBV12-5, TRBJ2-5)
CASGPRTSGNQETQYF

SEQ ID NO: 736301 - protein, 12 aa, Homo sapiens
  CDR3 for alpha chain variable domain of TCR clone 368151 (TRAV8-1, TRAJ26)
CAVNNYGQNFVF

SEQ ID NO: 736302 - protein, 12 aa, Homo sapiens
  CDR3 for beta chain variable domain of TCR clone 368151 (TRBV5-5, TRBJ2-5)
CASSYFVETQYF

SEQ ID NO: 736303 - protein, 12 aa, Homo sapiens
  CDR3 for alpha chain variable domain of TCR clone 368152 (TRAV17, TRAJ12)
CATLRSSYQLIF

SEQ ID NO: 736304 - protein, 14 aa, Homo sapiens
  CDR3 for beta chain variable domain of TCR clone 368152 (TRBV19, TRBJ2-1)
CARGARSFQWEQFF

SEQ ID NO: 736305 - protein, 12 aa, Homo sapiens
  CDR3 for alpha chain variable domain of TCR clone 368153 (TRAV12-3, TRAJ17)
CAMTLTGNKLIF

SEQ ID NO: 736306 - protein, 15 aa, Homo sapiens
  CDR3 for beta chain variable domain of TCR clone 368153 (TRBV20-1, TRBJ2-7)
CSARDQVSGMDEQYF

SEQ ID NO: 736307 - protein, 16 aa, Homo sapiens
  CDR3 for alpha chain variable domain of TCR clone 368154 (TRAV3, TRAJ10)
CAVRDMRAGGGNKLTF

SEQ ID NO: 736308 - protein, 16 aa, Homo sapiens
  CDR3 for beta chain variable domain of TCR clone 368154 (TRBV19, TRBJ1-5)
CASSIDRGGPRQPQHF

SEQ ID NO: 736309 - protein, 14 aa, Homo sapiens
  CDR3 for alpha chain variable domain of TCR clone 368155 (TRAV8-2, TRAJ13)
CVVTASGGYQKVTF

SEQ ID NO: 736310 - protein, 14 aa, Homo sapiens
  CDR3 for beta chain variable domain of TCR clone 368155 (TRBV7-2, TRBJ2-6)
CASRQSSGANVLTF

SEQ ID NO: 736311 - protein, 16 aa, Homo sapiens
  CDR3 for alpha chain variable domain of TCR clone 368156 (TRAV3, TRAJ10)
CAVRDMRAGGGNKLTF

SEQ ID NO: 736312 - protein, 19 aa, Homo sapiens
  CDR3 for beta chain variable domain of TCR clone 368156 (TRBV6-3, TRBJ1-2)
CASSYAKGRTGPPNYGYTF

SEQ ID NO: 736313 - protein, 14 aa, Homo sapiens
  CDR3 for alpha chain variable domain of TCR clone 368157 (TRAV38-1, TRAJ35)
CAFLTIGFGNELHC

SEQ ID NO: 736314 - protein, 17 aa, Homo sapiens
  CDR3 for beta chain variable domain of TCR clone 368157 (TRBV28, TRBJ1-1)
CASSGDLRTESNTEAFF

SEQ ID NO: 736315 - protein, 13 aa, Homo sapiens
  CDR3 for alpha chain variable domain of TCR clone 368158 (TRAV2, TRAJ40)
CAVVTSGTYKYIF

SEQ ID NO: 736316 - protein, 14 aa, Homo sapiens
  CDR3 for beta chain variable domain of TCR clone 368158 (TRBV5-1, TRBJ2-7)
CASSLVRGSGEQYF

SEQ ID NO: 736317 - protein, 13 aa, Homo sapiens
  CDR3 for alpha chain variable domain of TCR clone 368159 (TRAV21, TRAJ52)
CAVRPSPAGGTSY

SEQ ID NO: 736318 - protein, 15 aa, Homo sapiens
  CDR3 for beta chain variable domain of TCR clone 368159 (TRBV6-6, TRBJ2-7)
CASSCSYGGSYEQYF

SEQ ID NO: 736319 - protein, 16 aa, Homo sapiens
  CDR3 for alpha chain variable domain of TCR clone 368160 (TRAV8-3, TRAJ13)
CAVGAYPSGGYQKVTF

SEQ ID NO: 736320 - protein, 11 aa, Homo sapiens
  CDR3 for beta chain variable domain of TCR clone 368160 (TRBV27, TRBJ2-3)
CASSLGDTQYF

SEQ ID NO: 736321 - protein, 12 aa, Homo sapiens
  CDR3 for alpha chain variable domain of TCR clone 368161 (TRAV8-3, TRAJ6)
CAVAGGSYIPTF

SEQ ID NO: 736322 - protein, 14 aa, Homo sapiens
  CDR3 for beta chain variable domain of TCR clone 368161 (TRBV27, TRBJ2-7)
CARATGTERREQYF

SEQ ID NO: 736323 - protein, 16 aa, Homo sapiens
  CDR3 for alpha chain variable domain of TCR clone 368162 (TRAV21, TRAJ37)
CAVRTAGSSKTGQLIF

SEQ ID NO: 736324 - protein, 13 aa, Homo sapiens
  CDR3 for beta chain variable domain of TCR clone 368162 (TRBV7-9, TRBJ2-5)
CASLPSGRETQYF

SEQ ID NO: 736325 - protein, 16 aa, Homo sapiens
  CDR3 for alpha chain variable domain of TCR clone 368163 (TRAV26-1, TRAJ37)
CIVRGDGSGNTGKLIF

SEQ ID NO: 736326 - protein, 13 aa, Homo sapiens
  CDR3 for beta chain variable domain of TCR clone 368163 (TRBV12-4, TRBJ2-2)
CASSITGSGELFF

SEQ ID NO: 736327 - protein, 13 aa, Homo sapiens
  CDR3 for alpha chain variable domain of TCR clone 368164 (TRAV3, TRAJ36)
CAVSATGANNLFF

SEQ ID NO: 736328 - protein, 15 aa, Homo sapiens
  CDR3 for beta chain variable domain of TCR clone 368164 (TRBV24-1, TRBJ2-1)
CATSGSGGFYNEQFF

SEQ ID NO: 736329 - protein, 16 aa, Homo sapiens
  CDR3 for alpha chain variable domain of TCR clone 368165 (TRAV3, TRAJ37)
CAARPHGSGNTGKLIF

SEQ ID NO: 736330 - protein, 14 aa, Homo sapiens
  CDR3 for beta chain variable domain of TCR clone 368165 (TRBV20-1, TRBJ2-1)
CSARGGSSYNEQFF

SEQ ID NO: 736331 - protein, 12 aa, Homo sapiens
  CDR3 for alpha chain variable domain of TCR clone 368166 (TRAV21, TRAJ33)
CPVQDSDYQLIW

SEQ ID NO: 736332 - protein, 14 aa, Homo sapiens
  CDR3 for beta chain variable domain of TCR clone 368166 (TRBV28, TRBJ2-1)
CASSPGEGGNEQFF

SEQ ID NO: 736333 - protein, 12 aa, Homo sapiens
  CDR3 for alpha chain variable domain of TCR clone 368167 (TRAV27, TRAJ9)
CAGESGGFKTIF

SEQ ID NO: 736334 - protein, 15 aa, Homo sapiens
  CDR3 for beta chain variable domain of TCR clone 368167 (TRBV7-9, TRBJ1-5)
CASSQGHQPNQPQHF

SEQ ID NO: 736335 - protein, 12 aa, Homo sapiens
  CDR3 for alpha chain variable domain of TCR clone 368168 (TRAV13-1, TRAJ49)
CAASPMGNQFYF

SEQ ID NO: 736336 - protein, 12 aa, Homo sapiens
  CDR3 for beta chain variable domain of TCR clone 368168 (TRBV2, TRBJ2-1)
CAKREGYNERFF

SEQ ID NO: 736337 - protein, 10 aa, Homo sapiens
  CDR3 for alpha chain variable domain of TCR clone 368169 (TRAV26-1, TRAJ22)
CIAGSRQLTF

SEQ ID NO: 736338 - protein, 14 aa, Homo sapiens
  CDR3 for beta chain variable domain of TCR clone 368169 (TRBV12-5, TRBJ2-5)
CASGSRTHQETQYF

SEQ ID NO: 736339 - protein, 13 aa, Homo sapiens
  CDR3 for alpha chain variable domain of TCR clone 368170 (TRAV12-1, TRAJ49)
CVVGANTGNQFYF

SEQ ID NO: 736340 - protein, 16 aa, Homo sapiens
  CDR3 for beta chain variable domain of TCR clone 368170 (TRBV5-1, TRBJ2-2)
CASSSRTGGRTGELFF

SEQ ID NO: 736341 - protein, 11 aa, Homo sapiens
  CDR3 for alpha chain variable domain of TCR clone 368171 (TRAV2, TRAJ13)
CASGGYQKVTF

SEQ ID NO: 736342 - protein, 15 aa, Homo sapiens
  CDR3 for beta chain variable domain of TCR clone 368171 (TRBV15, TRBJ1-1)
CATSLQGGRNTEAFF

SEQ ID NO: 736343 - protein, 10 aa, Homo sapiens
  CDR3 for alpha chain variable domain of TCR clone 368172 (TRAV13-1, TRAJ5)
CAASRRALTF

SEQ ID NO: 736344 - protein, 16 aa, Homo sapiens
  CDR3 for beta chain variable domain of TCR clone 368172 (TRBV4-3, TRBJ2-3)
CASSQGELAGTDTQYF

SEQ ID NO: 736345 - protein, 18 aa, Homo sapiens
  CDR3 for alpha chain variable domain of TCR clone 368173 (TRAV13-1, TRAJ52)
CAAKNPNAGGTSYGKLTF

SEQ ID NO: 736346 - protein, 15 aa, Homo sapiens
  CDR3 for beta chain variable domain of TCR clone 368173 (TRBV4-1, TRBJ1-3)
CASSQDLRVGNTIYF

SEQ ID NO: 736347 - protein, 14 aa, Homo sapiens
  CDR3 for alpha chain variable domain of TCR clone 368174 (TRAV2, TRAJ9)
CAVEDRSGGFKTTF

SEQ ID NO: 736348 - protein, 13 aa, Homo sapiens
  CDR3 for beta chain variable domain of TCR clone 368174 (TRBV7-3, TRBJ1-1)
CASSQDWGAEAFF

SEQ ID NO: 736349 - protein, 18 aa, Homo sapiens
  CDR3 for alpha chain variable domain of TCR clone 368175 (TRAV8-3, TRAJ4)
WVRDPTSNDPGGYNKLIF

SEQ ID NO: 736350 - protein, 13 aa, Homo sapiens
  CDR3 for beta chain variable domain of TCR clone 368175 (TRBV20-1, TRBJ1-2)
CSATRIQGSGYTF

SEQ ID NO: 736351 - protein, 14 aa, Homo sapiens
  CDR3 for alpha chain variable domain of TCR clone 368176 (TRAV13-2, TRAJ10)
CAENITGGGNKLTF

SEQ ID NO: 736352 - protein, 14 aa, Homo sapiens
  CDR3 for beta chain variable domain of TCR clone 368176 (TRBV7-2, TRBJ2-7)
CASSPKTSFYEQYF

SEQ ID NO: 736353 - protein, 11 aa, Homo sapiens
  CDR3 for alpha chain variable domain of TCR clone 368177 (TRAV12-1, TRAJ43)
CVEYDNNDMRF

SEQ ID NO: 736354 - protein, 15 aa, Homo sapiens
  CDR3 for beta chain variable domain of TCR clone 368177 (TRBV18, TRBJ2-5)
CASSPRASEVETQYF

SEQ ID NO: 736355 - protein, 10 aa, Homo sapiens
  CDR3 for alpha chain variable domain of TCR clone 368178 (TRAV1-1, TRAJ20)
NVANDYKLSF

SEQ ID NO: 736356 - protein, 13 aa, Homo sapiens
  CDR3 for beta chain variable domain of TCR clone 368178 (TRBV4-1, TRBJ2-2)
CASSQENTGELFF

SEQ ID NO: 736357 - protein, 13 aa, Homo sapiens
  CDR3 for alpha chain variable domain of TCR clone 368179 (TRAV8-4, TRAJ47)
CAVTALYGNKLVF

SEQ ID NO: 736358 - protein, 14 aa, Homo sapiens
  CDR3 for beta chain variable domain of TCR clone 368179 (TRBV28, TRBJ2-7)
CASSLLRISYEQYF

SEQ ID NO: 736359 - protein, 13 aa, Homo sapiens
  CDR3 for alpha chain variable domain of TCR clone 368180 (TRAV2, TRAJ39)
TTVHNNAGNMLTF

SEQ ID NO: 736360 - protein, 16 aa, Homo sapiens
  CDR3 for beta chain variable domain of TCR clone 368180 (TRBV24-1, TRBJ2-3)
CATSGYRDRDTDTKYF

SEQ ID NO: 736361 - protein, 11 aa, Homo sapiens
  CDR3 for alpha chain variable domain of TCR clone 368181 (TRAV23/DV6, TRAJ48)
CAPRWGEKLTF

SEQ ID NO: 736362 - protein, 14 aa, Homo sapiens
  CDR3 for beta chain variable domain of TCR clone 368181 (TRBV29-1, TRBJ1-3)
CSVADRFVGNTIYF

SEQ ID NO: 736363 - protein, 18 aa, Homo sapiens
  CDR3 for alpha chain variable domain of TCR clone 368182 (TRAV26-2, TRAJ33)
CCVLLHPEEPASNYQLIW

SEQ ID NO: 736364 - protein, 17 aa, Homo sapiens
  CDR3 for beta chain variable domain of TCR clone 368182 (TRBV28, TRBJ2-5)
CASSRQGGLAGAETQYF

SEQ ID NO: 736365 - protein, 14 aa, Homo sapiens
  CDR3 for alpha chain variable domain of TCR clone 368183 (TRAV20, TRAJ22)
CAVALGGSARQLTF

SEQ ID NO: 736366 - protein, 15 aa, Homo sapiens
  CDR3 for beta chain variable domain of TCR clone 368183 (TRBV7-2, TRBJ1-1)
CASSFAGDRDTEAIF

SEQ ID NO: 736367 - protein, 23 aa, Homo sapiens
  CDR3 for alpha chain variable domain of TCR clone 368184 (TRAV13-1, TRAJ41)
CAASGPRRTQIPDIQNPDTAVYQ

SEQ ID NO: 736368 - protein, 16 aa, Homo sapiens
  CDR3 for beta chain variable domain of TCR clone 368184 (TRBV18, TRBJ2-3)
CASSPPAGGPRKYAVF

SEQ ID NO: 736369 - protein, 13 aa, Homo sapiens
  CDR3 for alpha chain variable domain of TCR clone 368185 (TRAV8-3, TRAJ28)
CAVGAVGSYQLTF

SEQ ID NO: 736370 - protein, 17 aa, Homo sapiens
  CDR3 for beta chain variable domain of TCR clone 368185 (TRBV18, TRBJ1-2)
CASSTRPSGWSNYGYTF

SEQ ID NO: 736371 - protein, 23 aa, Homo sapiens
  CDR3 for alpha chain variable domain of TCR clone 368186 (TRAV1-1, TRAJ29)
LLQELQMKDSASYFLGGNTPLVF

SEQ ID NO: 736372 - protein, 14 aa, Homo sapiens
  CDR3 for beta chain variable domain of TCR clone 368186 (TRBV9, TRBJ2-2)
CASSVGQGAGELFF

SEQ ID NO: 736373 - protein, 15 aa, Homo sapiens
  CDR3 for alpha chain variable domain of TCR clone 368187 (TRAV8-3, TRAJ32)
CAVGPYGGATNKHIF

SEQ ID NO: 736374 - protein, 14 aa, Homo sapiens
  CDR3 for beta chain variable domain of TCR clone 368187 (TRBV29-1, TRBJ2-2)
CSVLAETNTGELFF

SEQ ID NO: 736375 - protein, 15 aa, Homo sapiens
  CDR3 for alpha chain variable domain of TCR clone 368188 (TRAV26-1, TRAJ17)
CIVRVVKAAGNKLTF

SEQ ID NO: 736376 - protein, 16 aa, Homo sapiens
  CDR3 for beta chain variable domain of TCR clone 368188 (TRBV7-9, TRBJ2-1)
CASSLVSGPSYNEQFV

SEQ ID NO: 736377 - protein, 14 aa, Homo sapiens
  CDR3 for alpha chain variable domain of TCR clone 368189 (TRAV12-1, TRAJ26)
CVVKGRNYGQTFVF

SEQ ID NO: 736378 - protein, 17 aa, Homo sapiens
  CDR3 for beta chain variable domain of TCR clone 368189 (TRBV11-2, TRBJ2-6)
CASSQRDIFSGANVLTF

SEQ ID NO: 736379 - protein, 10 aa, Homo sapiens
  CDR3 for alpha chain variable domain of TCR clone 368190 (TRAV12-3, TRAJ49)
CAMNDDQFYF

SEQ ID NO: 736380 - protein, 12 aa, Homo sapiens
  CDR3 for beta chain variable domain of TCR clone 368190 (TRBV19, TRBJ2-1)
CASSRQGAEQFF

SEQ ID NO: 736381 - protein, 11 aa, Homo sapiens
  CDR3 for alpha chain variable domain of TCR clone 368191 (TRAV1-2, TRAJ31)
CAVNKNARPMF

SEQ ID NO: 736382 - protein, 15 aa, Homo sapiens
  CDR3 for beta chain variable domain of TCR clone 368191 (TRBV28, TRBJ2-1)
CASSIIAGGRSEQFF

SEQ ID NO: 736383 - protein, 15 aa, Homo sapiens
  CDR3 for alpha chain variable domain of TCR clone 368192 (TRAV35, TRAJ38)
CAGFSNACNNLKLLW

SEQ ID NO: 736384 - protein, 18 aa, Homo sapiens
  CDR3 for beta chain variable domain of TCR clone 368192 (TRBV3-1, TRBJ1-2)
CASSQDVIGWNGDYGYTF

SEQ ID NO: 736385 - protein, 13 aa, Homo sapiens
  CDR3 for alpha chain variable domain of TCR clone 368193 (TRAV13-2, TRAJ10)
CAENTGGGNKLTF

SEQ ID NO: 736386 - protein, 12 aa, Homo sapiens
  CDR3 for beta chain variable domain of TCR clone 368193 (TRBV7-8, TRBJ2-7)
CASSLGDREQYF

SEQ ID NO: 736387 - protein, 16 aa, Homo sapiens
  CDR3 for alpha chain variable domain of TCR clone 368194 (TRAV30, TRAJ24)
CGTAIVDADSWGKFQF

SEQ ID NO: 736388 - protein, 15 aa, Homo sapiens
  CDR3 for beta chain variable domain of TCR clone 368194 (TRBV5-1, TRBJ2-2)
CASSSQGGNTGELFF

SEQ ID NO: 736389 - protein, 18 aa, Homo sapiens
  CDR3 for alpha chain variable domain of TCR clone 368195 (TRAV1-1, TRAJ42)
CAVSPSAFYGGSQGNLIF

SEQ ID NO: 736390 - protein, 13 aa, Homo sapiens
  CDR3 for beta chain variable domain of TCR clone 368195 (TRBV19, TRBJ1-2)
CASSQGQVYGYAF

SEQ ID NO: 736391 - protein, 13 aa, Homo sapiens
  CDR3 for alpha chain variable domain of TCR clone 368196 (TRAV16, TRAJ28)
CALTGAGSNQLTF

SEQ ID NO: 736392 - protein, 16 aa, Homo sapiens
  CDR3 for beta chain variable domain of TCR clone 368196 (TRBV28, TRBJ1-5)
CASSLTGQGWNQPQHF

SEQ ID NO: 736393 - protein, 12 aa, Homo sapiens
  CDR3 for alpha chain variable domain of TCR clone 368197 (TRAV1-2, TRAJ39)
TSLLYAGNMLTF

SEQ ID NO: 736394 - protein, 15 aa, Homo sapiens
  CDR3 for beta chain variable domain of TCR clone 368197 (TRBV9, TRBJ1-6)
CASSVAGTGDSPLHF

SEQ ID NO: 736395 - protein, 14 aa, Homo sapiens
  CDR3 for alpha chain variable domain of TCR clone 368198 (TRAV12-2, TRAJ6)
CASTWGGGSYIPTF

SEQ ID NO: 736396 - protein, 13 aa, Homo sapiens
  CDR3 for beta chain variable domain of TCR clone 368198 (TRBV2, TRBJ1-1)
CASSGGGNTEAFF

SEQ ID NO: 736397 - protein, 15 aa, Homo sapiens
  CDR3 for alpha chain variable domain of TCR clone 368199 (TRAV1-2, TRAJ35)
CAVRDPGGFGNVLHC

SEQ ID NO: 736398 - protein, 14 aa, Homo sapiens
  CDR3 for beta chain variable domain of TCR clone 368199 (TRBV5-1, TRBJ2-1)
CASSLDDRFDKQFF

SEQ ID NO: 736399 - protein, 13 aa, Homo sapiens
  CDR3 for alpha chain variable domain of TCR clone 368200 (TRAV8-3, TRAJ23)
CAVGPLEGGKLIF

SEQ ID NO: 736400 - protein, 14 aa, Homo sapiens
  CDR3 for beta chain variable domain of TCR clone 368200 (TRBV25-1, TRBJ1-1)
CASTHLGGNTEAFF

SEQ ID NO: 736401 - protein, 12 aa, Homo sapiens
  CDR3 for alpha chain variable domain of TCR clone 368201 (TRAV8-3, TRAJ27)
GAVGAEAGKSTF

SEQ ID NO: 736402 - protein, 14 aa, Homo sapiens
  CDR3 for beta chain variable domain of TCR clone 368201 (TRBV2, TRBJ2-1)
CASGLIVGHDEQFF

SEQ ID NO: 736403 - protein, 13 aa, Homo sapiens
  CDR3 for alpha chain variable domain of TCR clone 368202 (TRAV8-3, TRAJ4)
WVFYSGGYNKLIF

SEQ ID NO: 736404 - protein, 16 aa, Homo sapiens
  CDR3 for beta chain variable domain of TCR clone 368202 (TRBV7-8, TRBJ2-3)
CASSTEGQRETDKQYF

SEQ ID NO: 736405 - protein, 14 aa, Homo sapiens
  CDR3 for alpha chain variable domain of TCR clone 368203 (TRAV3, TRAJ7)
CAVREEEREQQTRF

SEQ ID NO: 736406 - protein, 19 aa, Homo sapiens
  CDR3 for beta chain variable domain of TCR clone 368203 (TRBV7-9, TRBJ2-2)
CASRYKLAGGPSDTGELFF

SEQ ID NO: 736407 - protein, 15 aa, Homo sapiens
  CDR3 for alpha chain variable domain of TCR clone 368204 (TRAV35, TRAJ33)
CAGQPPRYSNYQLIW

SEQ ID NO: 736408 - protein, 14 aa, Homo sapiens
  CDR3 for beta chain variable domain of TCR clone 368204 (TRBV5-5, TRBJ1-5)
CASSGQGVDQPQHF

SEQ ID NO: 736409 - protein, 14 aa, Homo sapiens
  CDR3 for alpha chain variable domain of TCR clone 368205 (TRAV14/DV4, TRAJ15)
CAMRRDQAGTALIF

SEQ ID NO: 736410 - protein, 16 aa, Homo sapiens
  CDR3 for beta chain variable domain of TCR clone 368205 (TRBV15, TRBJ2-3)
CATSRELGIVTDTQYF

SEQ ID NO: 736411 - protein, 23 aa, Homo sapiens
  CDR3 for alpha chain variable domain of TCR clone 368206 (TRAV26-1, TRAJ38)
CLVRPLNAGNNHIQNPDPAVYQL

SEQ ID NO: 736412 - protein, 13 aa, Homo sapiens
  CDR3 for beta chain variable domain of TCR clone 368206 (TRBV18, TRBJ1-1)
CASSPNGDTEAFF

SEQ ID NO: 736413 - protein, 13 aa, Homo sapiens
  CDR3 for alpha chain variable domain of TCR clone 368207 (TRAV12-1, TRAJ29)
CVVDTSGNTPLVF

SEQ ID NO: 736414 - protein, 14 aa, Homo sapiens
  CDR3 for beta chain variable domain of TCR clone 368207 (TRBV7-2, TRBJ2-7)
CASSPKTSFYEQYF

SEQ ID NO: 736415 - protein, 13 aa, Homo sapiens
  CDR3 for alpha chain variable domain of TCR clone 368208 (TRAV2, TRAJ40)
CAVVTSGTYKYIF

SEQ ID NO: 736416 - protein, 15 aa, Homo sapiens
  CDR3 for beta chain variable domain of TCR clone 368208 (TRBV12-4, TRBJ2-7)
CASSLGAGGPYEQYF

SEQ ID NO: 736417 - protein, 14 aa, Homo sapiens
  CDR3 for alpha chain variable domain of TCR clone 368209 (TRAV12-1, TRAJ9)
CVVNIITGGFKTIF

SEQ ID NO: 736418 - protein, 17 aa, Homo sapiens
  CDR3 for beta chain variable domain of TCR clone 368209 (TRBV9, TRBJ2-1)
WASSVEPTGMARDEQFF

SEQ ID NO: 736419 - protein, 13 aa, Homo sapiens
  CDR3 for alpha chain variable domain of TCR clone 368210 (TRAV1-2, TRAJ12)
CAVSMDSSYKLIF

SEQ ID NO: 736420 - protein, 12 aa, Homo sapiens
  CDR3 for beta chain variable domain of TCR clone 368210 (TRBV19, TRBJ1-5)
CASSIAQQPQHF

SEQ ID NO: 736421 - protein, 13 aa, Homo sapiens
  CDR3 for alpha chain variable domain of TCR clone 368211 (TRAV1-1, TRAJ38)
CASNAGNNRKLIW

SEQ ID NO: 736422 - protein, 14 aa, Homo sapiens
  CDR3 for beta chain variable domain of TCR clone 368211 (TRBV15, TRBJ2-1)
CATSGVGDYNEQFF

SEQ ID NO: 736423 - protein, 16 aa, Homo sapiens
  CDR3 for alpha chain variable domain of TCR clone 368212 (TRAV38-1, TRAJ37)
CAFKGDGSSNTGKLIF

SEQ ID NO: 736424 - protein, 13 aa, Homo sapiens
  CDR3 for beta chain variable domain of TCR clone 368212 (TRBV12-4, TRBJ2-5)
CASSFFRRETQYF

SEQ ID NO: 736425 - protein, 14 aa, Homo sapiens
  CDR3 for alpha chain variable domain of TCR clone 368213 (TRAV12-1, TRAJ17)
CVVNYKAAGNKLTF

SEQ ID NO: 736426 - protein, 13 aa, Homo sapiens
  CDR3 for beta chain variable domain of TCR clone 368213 (TRBV4-2, TRBJ1-1)
CASSQAGTTAAFF

SEQ ID NO: 736427 - protein, 14 aa, Homo sapiens
  CDR3 for alpha chain variable domain of TCR clone 368214 (TRAV23/DV6, TRAJ4)
CAANLSGGYNKLIF

SEQ ID NO: 736428 - protein, 12 aa, Homo sapiens
  CDR3 for beta chain variable domain of TCR clone 368214 (TRBV7-9, TRBJ2-7)
CASSIKREEQYF

SEQ ID NO: 736429 - protein, 15 aa, Homo sapiens
  CDR3 for alpha chain variable domain of TCR clone 368215 (TRAV35, TRAJ38)
CAGFSIAGNNRKLIW

SEQ ID NO: 736430 - protein, 15 aa, Homo sapiens
  CDR3 for beta chain variable domain of TCR clone 368215 (TRBV7-8, TRBJ2-1)
CASSLAGGLYNEQFF

SEQ ID NO: 736431 - protein, 14 aa, Homo sapiens
  CDR3 for alpha chain variable domain of TCR clone 368216 (TRAV23/DV6, TRAJ21)
CAAYKSRPRDKFYF

SEQ ID NO: 736432 - protein, 15 aa, Homo sapiens
  CDR3 for beta chain variable domain of TCR clone 368216 (TRBV5-4, TRBJ2-2)
CASSLTSRGTGELFF

SEQ ID NO: 736433 - protein, 16 aa, Homo sapiens
  CDR3 for alpha chain variable domain of TCR clone 368217 (TRAV27, TRAJ53)
ASTSGGKRGSNYKLTF

SEQ ID NO: 736434 - protein, 13 aa, Homo sapiens
  CDR3 for beta chain variable domain of TCR clone 368217 (TRBV28, TRBJ2-5)
CASSSRNQETKYF

SEQ ID NO: 736435 - protein, 14 aa, Homo sapiens
  CDR3 for alpha chain variable domain of TCR clone 368218 (TRAV1-2, TRAJ6)
CAVSLSGGSYIPTF

SEQ ID NO: 736436 - protein, 16 aa, Homo sapiens
  CDR3 for beta chain variable domain of TCR clone 368218 (TRBV13, TRBJ2-2)
CASSPRTGEHTGELFF

SEQ ID NO: 736437 - protein, 11 aa, Homo sapiens
  CDR3 for alpha chain variable domain of TCR clone 368219 (TRAV1-2, TRAJ20)
SAVSNDYKLSF

SEQ ID NO: 736438 - protein, 16 aa, Homo sapiens
  CDR3 for beta chain variable domain of TCR clone 368219 (TRBV29-1, TRBJ2-6)
CSVEDITYSGANVLTF

SEQ ID NO: 736439 - protein, 14 aa, Homo sapiens
  CDR3 for alpha chain variable domain of TCR clone 368220 (TRAV23/DV6, TRAJ57)
CAASNQGGSEKLGF

SEQ ID NO: 736440 - protein, 13 aa, Homo sapiens
  CDR3 for beta chain variable domain of TCR clone 368220 (TRBV11-2, TRBJ2-7)
CASSSYPSYEQYF

SEQ ID NO: 736441 - protein, 16 aa, Homo sapiens
  CDR3 for alpha chain variable domain of TCR clone 368221 (TRAV3, TRAJ37)
CAVRPHGSGNTGKLIF

SEQ ID NO: 736442 - protein, 15 aa, Homo sapiens
  CDR3 for beta chain variable domain of TCR clone 368221 (TRBV20-1, TRBJ2-7)
CSASDRVSGMDEQYF

SEQ ID NO: 736443 - protein, 13 aa, Homo sapiens
  CDR3 for alpha chain variable domain of TCR clone 368222 (TRAV2, TRAJ40)
RAVVTSGTYKYIF

SEQ ID NO: 736444 - protein, 14 aa, Homo sapiens
  CDR3 for beta chain variable domain of TCR clone 368222 (TRBV19, TRBJ2-1)
CASPTFVLGGEQFF

SEQ ID NO: 736445 - protein, 14 aa, Homo sapiens
  CDR3 for alpha chain variable domain of TCR clone 368223 (TRAV1-2, TRAJ16)
CAVNRSSDGQKLLF

SEQ ID NO: 736446 - protein, 17 aa, Homo sapiens
  CDR3 for beta chain variable domain of TCR clone 368223 (TRBV10-3, TRBJ2-4)
CTSVPSVNKGSKNIQYF

SEQ ID NO: 736447 - protein, 14 aa, Homo sapiens
  CDR3 for alpha chain variable domain of TCR clone 368224 (TRAV17, TRAJ6)
CATDERRGSYILTF

SEQ ID NO: 736448 - protein, 13 aa, Homo sapiens
  CDR3 for beta chain variable domain of TCR clone 368224 (TRBV27, TRBJ2-1)
CASSLGRIWGQFF

SEQ ID NO: 736449 - protein, 12 aa, Homo sapiens
  CDR3 for alpha chain variable domain of TCR clone 368225 (TRAV13-1, TRAJ21)
CAAKEGFNKFYF

SEQ ID NO: 736450 - protein, 20 aa, Homo sapiens
  CDR3 for beta chain variable domain of TCR clone 368225 (TRBV7-8, TRBJ2-2)
CASSHLFPGPTSQITGELFF

SEQ ID NO: 736451 - protein, 13 aa, Homo sapiens
  CDR3 for alpha chain variable domain of TCR clone 368226 (TRAV12-2, TRAJ9)
CAVKWAGGFKTIF

SEQ ID NO: 736452 - protein, 15 aa, Homo sapiens
  CDR3 for beta chain variable domain of TCR clone 368226 (TRBV5-1)
CASSLTADSDEKLFF

SEQ ID NO: 736453 - protein, 14 aa, Homo sapiens
  CDR3 for alpha chain variable domain of TCR clone 368227 (TRAV12-1, TRAJ17)
CVVNYKAAGNKLTF

SEQ ID NO: 736454 - protein, 16 aa, Homo sapiens
  CDR3 for beta chain variable domain of TCR clone 368227 (TRBV4-2, TRBJ2-3)
CASSLSGTGSTDTQYL

SEQ ID NO: 736455 - protein, 13 aa, Homo sapiens
  CDR3 for alpha chain variable domain of TCR clone 368228 (TRAV10, TRAJ49)
CVVSPNTGNQFYF

SEQ ID NO: 736456 - protein, 13 aa, Homo sapiens
  CDR3 for beta chain variable domain of TCR clone 368228 (TRBV20-1, TRBJ1-1)
CSARGGGNTEAFF

SEQ ID NO: 736457 - protein, 13 aa, Homo sapiens
  CDR3 for alpha chain variable domain of TCR clone 368229 (TRAV12-2, TRAJ13)
CREEDWGYQKVTF

SEQ ID NO: 736458 - protein, 13 aa, Homo sapiens
  CDR3 for beta chain variable domain of TCR clone 368229 (TRBV4-2, TRBJ1-1)
CASSQAGNTEAFF

SEQ ID NO: 736459 - protein, 16 aa, Homo sapiens
  CDR3 for alpha chain variable domain of TCR clone 368230 (TRAV1-2, TRAJ10)
CAVRGVLTVGGNKLTF

SEQ ID NO: 736460 - protein, 13 aa, Homo sapiens
  CDR3 for beta chain variable domain of TCR clone 368230 (TRBV10-3, TRBJ2-7)
CASKLAVNYEQYF

SEQ ID NO: 736461 - protein, 12 aa, Homo sapiens
  CDR3 for alpha chain variable domain of TCR clone 368231 (TRAV27, TRAJ35)
CAGSYFGNVLHC

SEQ ID NO: 736462 - protein, 13 aa, Homo sapiens
  CDR3 for beta chain variable domain of TCR clone 368231 (TRBV7-3, TRBJ1-1)
CASSQDWGAEAFF

SEQ ID NO: 736463 - protein, 15 aa, Homo sapiens
  CDR3 for alpha chain variable domain of TCR clone 368232 (TRAV3, TRAJ22)
CAVRDRGGSARQLTF

SEQ ID NO: 736464 - protein, 14 aa, Homo sapiens
  CDR3 for beta chain variable domain of TCR clone 368232 (TRBV7-8, TRBJ2-3)
CASSSRDSTDTQYF

SEQ ID NO: 736465 - protein, 13 aa, Homo sapiens
  CDR3 for alpha chain variable domain of TCR clone 368233 (TRAV29/DV5, TRAJ47)
CAASAEYGNKLVF

SEQ ID NO: 736466 - protein, 14 aa, Homo sapiens
  CDR3 for beta chain variable domain of TCR clone 368233 (TRBV7-2, TRBJ2-7)
CASRSQGAAYEQYF

SEQ ID NO: 736467 - protein, 16 aa, Homo sapiens
  CDR3 for alpha chain variable domain of TCR clone 368234 (TRAV3, TRAJ6)
CAVRDGMGRRKLNTSI

SEQ ID NO: 736468 - protein, 15 aa, Homo sapiens
  CDR3 for beta chain variable domain of TCR clone 368234 (TRBV9, TRBJ2-1)
CASSLAGSSYNEQFF

SEQ ID NO: 736469 - protein, 13 aa, Homo sapiens
  CDR3 for alpha chain variable domain of TCR clone 368235 (TRAV30, TRAJ16)
CGTFGGDGQKLLF

SEQ ID NO: 736470 - protein, 15 aa, Homo sapiens
  CDR3 for beta chain variable domain of TCR clone 368235 (TRBV7-3, TRBJ1-1)
CASSPRADRNTEAFF

SEQ ID NO: 736471 - protein, 13 aa, Homo sapiens
  CDR3 for alpha chain variable domain of TCR clone 368236 (TRAV21, TRAJ20)
CAVGLRIDYKLSF

SEQ ID NO: 736472 - protein, 13 aa, Homo sapiens
  CDR3 for beta chain variable domain of TCR clone 368236 (TRBV6-1, TRBJ1-1)
CASSRQGNTGAFF

SEQ ID NO: 736473 - protein, 19 aa, Homo sapiens
  CDR3 for alpha chain variable domain of TCR clone 368237 (TRAV38-1, TRAJ53)
CAFMKPGLESGGSNYKLTF

SEQ ID NO: 736474 - protein, 12 aa, Homo sapiens
  CDR3 for beta chain variable domain of TCR clone 368237 (TRBV11-2, TRBJ2-2)
CASSLPTGELFF

SEQ ID NO: 736475 - protein, 14 aa, Homo sapiens
  CDR3 for alpha chain variable domain of TCR clone 368238 (TRAV8-6, TRAJ54)
CAVSPALGAQKLVF

SEQ ID NO: 736476 - protein, 15 aa, Homo sapiens
  CDR3 for beta chain variable domain of TCR clone 368238 (TRBV4-1, TRBJ1-6)
CASSAGQGYNSPLRF

SEQ ID NO: 736477 - protein, 13 aa, Homo sapiens
  CDR3 for alpha chain variable domain of TCR clone 368239 (TRAV38-2/DV8, TRAJ34)
CAYRTWNTDKLIF

SEQ ID NO: 736478 - protein, 14 aa, Homo sapiens
  CDR3 for beta chain variable domain of TCR clone 368239 (TRBV11-2, TRBJ2-1)
CASTTGQGNNEQFF

SEQ ID NO: 736479 - protein, 12 aa, Homo sapiens
  CDR3 for alpha chain variable domain of TCR clone 368240 (TRAV12-3, TRAJ17)
CAMTLTGNKLTF

SEQ ID NO: 736480 - protein, 14 aa, Homo sapiens
  CDR3 for beta chain variable domain of TCR clone 368240 (TRBV7-8, TRBJ2-7)
CASSQTQGADEQYF

SEQ ID NO: 736481 - protein, 14 aa, Homo sapiens
  CDR3 for alpha chain variable domain of TCR clone 368241 (TRAV12-2, TRAJ53)
CAVKGGGSNYKLTF

SEQ ID NO: 736482 - protein, 14 aa, Homo sapiens
  CDR3 for beta chain variable domain of TCR clone 368241 (TRBV19, TRBJ2-1)
CASPTVVLSGEQCF

SEQ ID NO: 736483 - protein, 14 aa, Homo sapiens
  CDR3 for alpha chain variable domain of TCR clone 368242 (TRAV35, TRAJ22)
CAGLRPGSARQLTF

SEQ ID NO: 736484 - protein, 16 aa, Homo sapiens
  CDR3 for beta chain variable domain of TCR clone 368242 (TRBV29-1, TRBJ2-7)
CSVEVVGTSGSYEQYF

SEQ ID NO: 736485 - protein, 12 aa, Homo sapiens
  CDR3 for alpha chain variable domain of TCR clone 368243 (TRAV12-3, TRAJ17)
SAMTLTGNKLPF

SEQ ID NO: 736486 - protein, 15 aa, Homo sapiens
  CDR3 for beta chain variable domain of TCR clone 368243 (TRBV20-1, TRBJ2-7)
CSARDRVSGMDEQYF

SEQ ID NO: 736487 - protein, 15 aa, Homo sapiens
  CDR3 for alpha chain variable domain of TCR clone 368244 (TRAV26-1, TRAJ23)
CIVRVAGYQGGKLIF

SEQ ID NO: 736488 - protein, 14 aa, Homo sapiens
  CDR3 for beta chain variable domain of TCR clone 368244 (TRBV11-2, TRBJ2-7)
CASSLGAGAYEQYF

SEQ ID NO: 736489 - protein, 15 aa, Homo sapiens
  CDR3 for alpha chain variable domain of TCR clone 368245 (TRAV12-1, TRAJ44)
CVADTPQGTASKLTF

SEQ ID NO: 736490 - protein, 13 aa, Homo sapiens
  CDR3 for beta chain variable domain of TCR clone 368245 (TRBV27, TRBJ2-1)
CASSSGSYNEQFF

SEQ ID NO: 736491 - protein, 16 aa, Homo sapiens
  CDR3 for alpha chain variable domain of TCR clone 368246 (TRAV21, TRAJ52)
CAVTNAGGTSYGKLTF

SEQ ID NO: 736492 - protein, 14 aa, Homo sapiens
  CDR3 for beta chain variable domain of TCR clone 368246 (TRBV28, TRBJ1-5)
CASSGQALYQPQHF

SEQ ID NO: 736493 - protein, 13 aa, Homo sapiens
  CDR3 for alpha chain variable domain of TCR clone 368247 (TRAV8-1, TRAJ39)
CAGLNNAGNMLTF

SEQ ID NO: 736494 - protein, 15 aa, Homo sapiens
  CDR3 for beta chain variable domain of TCR clone 368247 (TRBV4-3, TRBJ1-1)
CASSQELGRGTEAFF

SEQ ID NO: 736495 - protein, 17 aa, Homo sapiens
  CDR3 for alpha chain variable domain of TCR clone 368248 (TRAV13-2, TRAJ42)
CAEKGKNYGGSQGNLIF

SEQ ID NO: 736496 - protein, 16 aa, Homo sapiens
  CDR3 for beta chain variable domain of TCR clone 368248 (TRBV7-9, TRBJ2-1)
CASSLGTGWDYNGQFF

SEQ ID NO: 736497 - protein, 16 aa, Homo sapiens
  CDR3 for alpha chain variable domain of TCR clone 368249 (TRAV14/DV4, TRAJ45)
CAMREGERGGADGLTF

SEQ ID NO: 736498 - protein, 17 aa, Homo sapiens
  CDR3 for beta chain variable domain of TCR clone 368249 (TRBV28, TRBJ1-5)
CASSLVGSRGGNQPQHF

SEQ ID NO: 736499 - protein, 11 aa, Homo sapiens
  CDR3 for alpha chain variable domain of TCR clone 368250 (TRAV3, TRAJ21)
CAVGNFNNFYF

SEQ ID NO: 736500 - protein, 16 aa, Homo sapiens
  CDR3 for beta chain variable domain of TCR clone 368250 (TRBV19, TRBJ2-1)
CASSKAGPSSYNAQFF

SEQ ID NO: 736501 - protein, 15 aa, Homo sapiens
  CDR3 for alpha chain variable domain of TCR clone 368251 (TRAV8-3, TRAJ41)
CAVGSNSHSGYALNF

SEQ ID NO: 736502 - protein, 17 aa, Homo sapiens
  CDR3 for beta chain variable domain of TCR clone 368251 (TRBV25-1, TRBJ2-1)
CASSAYGQGRGVYEQFF

SEQ ID NO: 736503 - protein, 23 aa, Homo sapiens
  CDR3 for alpha chain variable domain of TCR clone 368252 (TRAV8-6, TRAJ36)
CAVSDWLGQTISSLGLERDSPLF

SEQ ID NO: 736504 - protein, 15 aa, Homo sapiens
  CDR3 for beta chain variable domain of TCR clone 368252 (TRBV6-1, TRBJ2-3)
CASSERGGITDTQYF

SEQ ID NO: 736505 - protein, 14 aa, Homo sapiens
  CDR3 for alpha chain variable domain of TCR clone 368253 (TRAV3, TRAJ21)
CAVRDAYNFNKFYF

SEQ ID NO: 736506 - protein, 15 aa, Homo sapiens
  CDR3 for beta chain variable domain of TCR clone 368253 (TRBV29-1, TRBJ1-2)
CSGLDVRGANYGYTF

SEQ ID NO: 736507 - protein, 15 aa, Homo sapiens
  CDR3 for alpha chain variable domain of TCR clone 368254 (TRAV41, TRAJ45)
CAASYSGGGADGLTF

SEQ ID NO: 736508 - protein, 14 aa, Homo sapiens
  CDR3 for beta chain variable domain of TCR clone 368254 (TRBV27, TRBJ2-2)
CASRPGVNTEELFF

SEQ ID NO: 736509 - protein, 11 aa, Homo sapiens
  CDR3 for alpha chain variable domain of TCR clone 368255 (TRAV2, TRAJ20)
CAVHNDYKLSF

SEQ ID NO: 736510 - protein, 16 aa, Homo sapiens
  CDR3 for beta chain variable domain of TCR clone 368255 (TRBV11-1, TRBJ2-2)
CASSAEGLKNTGELFF

SEQ ID NO: 736511 - protein, 16 aa, Homo sapiens
  CDR3 for alpha chain variable domain of TCR clone 368256 (TRAV30, TRAJ24)
CGTDIVDADSWGKFQF

SEQ ID NO: 736512 - protein, 14 aa, Homo sapiens
  CDR3 for beta chain variable domain of TCR clone 368256 (TRBV12-5, TRBJ2-5)
CARGSRTHQETQYF

SEQ ID NO: 736513 - protein, 12 aa, Homo sapiens
  CDR3 for alpha chain variable domain of TCR clone 368257 (TRAV12-3, TRAJ17)
CAMTLTGNKLTF

SEQ ID NO: 736514 - protein, 15 aa, Homo sapiens
  CDR3 for beta chain variable domain of TCR clone 368257 (TRBV6-1, TRBJ2-7)
CASSEAPPTSSTSGR

SEQ ID NO: 736515 - protein, 17 aa, Homo sapiens
  CDR3 for alpha chain variable domain of TCR clone 368258 (TRAV8-6, TRAJ58)
CAVSSWIGETSGSRLTF

SEQ ID NO: 736516 - protein, 15 aa, Homo sapiens
  CDR3 for beta chain variable domain of TCR clone 368258 (TRBV6-5, TRBJ2-1)
CASSYDAGAGNEQFF

SEQ ID NO: 736517 - protein, 14 aa, Homo sapiens
  CDR3 for alpha chain variable domain of TCR clone 368259 (TRAV8-2, TRAJ4)
CVVSPSGGYNNLIF

SEQ ID NO: 736518 - protein, 15 aa, Homo sapiens
  CDR3 for beta chain variable domain of TCR clone 368259 (TRBV4-1, TRBJ1-4)
CASSDTGGTNERLFF

SEQ ID NO: 736519 - protein, 15 aa, Homo sapiens
  CDR3 for alpha chain variable domain of TCR clone 368260 (TRAV8-3, TRAJ27)
CALVPSKTNAGKSTF

SEQ ID NO: 736520 - protein, 15 aa, Homo sapiens
  CDR3 for beta chain variable domain of TCR clone 368260 (TRBV7-2, TRBJ2-1)
CASSSGLAGGNEQFF

SEQ ID NO: 736521 - protein, 11 aa, Homo sapiens
  CDR3 for alpha chain variable domain of TCR clone 368261 (TRAV12-1, TRAJ15)
CVVNAGTALFF

SEQ ID NO: 736522 - protein, 16 aa, Homo sapiens
  CDR3 for beta chain variable domain of TCR clone 368261 (TRBV28, TRBJ2-1)
CASSSRVRDSYNEQFF

SEQ ID NO: 736523 - protein, 16 aa, Homo sapiens
  CDR3 for alpha chain variable domain of TCR clone 368262 (TRAV21, TRAJ37)
CAVRTAGSSNTGKLSF

SEQ ID NO: 736524 - protein, 13 aa, Homo sapiens
  CDR3 for beta chain variable domain of TCR clone 368262 (TRBV7-9, TRBJ2-5)
CASLPSGRETQYF

SEQ ID NO: 736525 - protein, 16 aa, Homo sapiens
  CDR3 for alpha chain variable domain of TCR clone 368263 (TRAV8-3, TRAJ52)
CAVQPAGGTSYGKLTF

SEQ ID NO: 736526 - protein, 18 aa, Homo sapiens
  CDR3 for beta chain variable domain of TCR clone 368263 (TRBV11-2, TRBJ2-3)
CASSLGGASRGAPNTQYF

SEQ ID NO: 736527 - protein, 11 aa, Homo sapiens
  CDR3 for alpha chain variable domain of TCR clone 368264 (TRAV12-1, TRAJ34)
CVVNKGRELIF

SEQ ID NO: 736528 - protein, 12 aa, Homo sapiens
  CDR3 for beta chain variable domain of TCR clone 368264 (TRBV2, TRBJ2-1)
CAYGPPGNEQFF

SEQ ID NO: 736529 - protein, 14 aa, Homo sapiens
  CDR3 for alpha chain variable domain of TCR clone 368265 (TRAV3, TRAJ17)
CAVRNAAAGNKLTF

SEQ ID NO: 736530 - protein, 16 aa, Homo sapiens
  CDR3 for beta chain variable domain of TCR clone 368265 (TRBV20-1, TRBJ1-2)
CSASMGQGVANYGDTV

SEQ ID NO: 736531 - protein, 20 aa, Homo sapiens
  CDR3 for alpha chain variable domain of TCR clone 368266 (TRAV8-3, TRAJ44)
LSTSVLWVRLYTGTASKLTF

SEQ ID NO: 736532 - protein, 16 aa, Homo sapiens
  CDR3 for beta chain variable domain of TCR clone 368266 (TRBV20-1, TRBJ2-3)
CSAVRDRGPIADTQYF

SEQ ID NO: 736533 - protein, 14 aa, Homo sapiens
  CDR3 for alpha chain variable domain of TCR clone 368267 (TRAV21, TRAJ45)
CAVVSGGGADGLTL

SEQ ID NO: 736534 - protein, 14 aa, Homo sapiens
  CDR3 for beta chain variable domain of TCR clone 368267 (TRBV20-1, TRBJ2-3)
CSALGLEGADTQYF

SEQ ID NO: 736535 - protein, 12 aa, Homo sapiens
  CDR3 for alpha chain variable domain of TCR clone 368268 (TRAV12-3, TRAJ17)
CAMTLTGNKLTF

SEQ ID NO: 736536 - protein, 14 aa, Homo sapiens
  CDR3 for beta chain variable domain of TCR clone 368268 (TRBV2, TRBJ2-3)
CASRLAGLKDTQYF

SEQ ID NO: 736537 - protein, 12 aa, Homo sapiens
  CDR3 for alpha chain variable domain of TCR clone 368269 (TRAV12-2, TRAJ3)
CAVWSSASKIIF

SEQ ID NO: 736538 - protein, 14 aa, Homo sapiens
  CDR3 for beta chain variable domain of TCR clone 368269 (TRBV5-4, TRBJ1-1)
CASSLDSRRDEAFF

SEQ ID NO: 736539 - protein, 16 aa, Homo sapiens
  CDR3 for alpha chain variable domain of TCR clone 368270 (TRAV12-3, TRAJ53)
CAMSPGSGGSNYKLTF

SEQ ID NO: 736540 - protein, 16 aa, Homo sapiens
  CDR3 for beta chain variable domain of TCR clone 368270 (TRBV7-9, TRBJ1-2)
CASSLGFSSGEDGDTF

SEQ ID NO: 736541 - protein, 13 aa, Homo sapiens
  CDR3 for alpha chain variable domain of TCR clone 368271 (TRAV21, TRAJ27)
CAARPGNAGRSTF

SEQ ID NO: 736542 - protein, 15 aa, Homo sapiens
  CDR3 for beta chain variable domain of TCR clone 368271 (TRBV2, TRBJ2-3)
YASSDAGGPPDTQYF

SEQ ID NO: 736543 - protein, 18 aa, Homo sapiens
  CDR3 for alpha chain variable domain of TCR clone 368272 (TRAV13-1, TRAJ52)
CAASKRSAGGTSYGKLTF

SEQ ID NO: 736544 - protein, 13 aa, Homo sapiens
  CDR3 for beta chain variable domain of TCR clone 368272 (TRBV12-4, TRBJ1-2)
CANSLRQGKGYSF

SEQ ID NO: 736545 - protein, 12 aa, Homo sapiens
  CDR3 for alpha chain variable domain of TCR clone 368273 (TRAV29/DV5, TRAJ49)
CAATDTGNQFYF

SEQ ID NO: 736546 - protein, 16 aa, Homo sapiens
  CDR3 for beta chain variable domain of TCR clone 368273 (TRBV7-9, TRBJ1-2)
CASSLGFSSGEDGYTF

SEQ ID NO: 736547 - protein, 14 aa, Homo sapiens
  CDR3 for alpha chain variable domain of TCR clone 368274 (TRAV12-3, TRAJ10)
SHLPLTGGGNKLTF

SEQ ID NO: 736548 - protein, 15 aa, Homo sapiens
  CDR3 for beta chain variable domain of TCR clone 368274 (TRBV5-8, TRBJ2-7)
CASSYTGTGPREQYF

SEQ ID NO: 736549 - protein, 12 aa, Homo sapiens
  CDR3 for alpha chain variable domain of TCR clone 368275 (TRAV12-3, TRAJ17)
CAMTLTCNKLTF

SEQ ID NO: 736550 - protein, 14 aa, Homo sapiens
  CDR3 for beta chain variable domain of TCR clone 368275 (TRBV20-1, TRBJ2-1)
CSAQIGGSANEQFF

SEQ ID NO: 736551 - protein, 14 aa, Homo sapiens
  CDR3 for alpha chain variable domain of TCR clone 368276 (TRAV13-1, TRAJ20)
CAARPGSTDYKLSF

SEQ ID NO: 736552 - protein, 15 aa, Homo sapiens
  CDR3 for beta chain variable domain of TCR clone 368276 (TRBV4-1, TRBJ2-7)
CASSQQGQGFDEQYF

SEQ ID NO: 736553 - protein, 17 aa, Homo sapiens
  CDR3 for alpha chain variable domain of TCR clone 368277 (TRAV38-2/DV8, TRAJ28)
CAFLTLSSGAGSYQLTF

SEQ ID NO: 736554 - protein, 14 aa, Homo sapiens
  CDR3 for beta chain variable domain of TCR clone 368277 (TRBV7-2, TRBJ2-5)
CASSLSGGGETQYF

SEQ ID NO: 736555 - protein, 14 aa, Homo sapiens
  CDR3 for alpha chain variable domain of TCR clone 368278 (TRAV26-1, TRAJ6)
CIVSPVGGIYIPTF

SEQ ID NO: 736556 - protein, 16 aa, Homo sapiens
  CDR3 for beta chain variable domain of TCR clone 368278 (TRBV4-1, TRBJ2-5)
CASSSGLAGVLGTQYF

SEQ ID NO: 736557 - protein, 14 aa, Homo sapiens
  CDR3 for alpha chain variable domain of TCR clone 368279 (TRAV26-1, TRAJ5)
CIVRVRFNRRALTF

SEQ ID NO: 736558 - protein, 17 aa, Homo sapiens
  CDR3 for beta chain variable domain of TCR clone 368279 (TRBV29-1, TRBJ2-3)
CSVAVLAGETSTDTQYF

SEQ ID NO: 736559 - protein, 15 aa, Homo sapiens
  CDR3 for alpha chain variable domain of TCR clone 368280 (TRAV26-2, TRAJ28)
CILVESGAGSYQLTF

SEQ ID NO: 736560 - protein, 11 aa, Homo sapiens
  CDR3 for beta chain variable domain of TCR clone 368280 (TRBV25-1, TRBJ2-7)
CASSKSYEQYF

SEQ ID NO: 736561 - protein, 14 aa, Homo sapiens
  CDR3 for alpha chain variable domain of TCR clone 368281 (TRAV23/DV6, TRAJ39)
CAASIGNPGNMLTF

SEQ ID NO: 736562 - protein, 12 aa, Homo sapiens
  CDR3 for beta chain variable domain of TCR clone 368281 (TRBV20-1, TRBJ2-5)
CSVGTGSETQYF

SEQ ID NO: 736563 - protein, 12 aa, Homo sapiens
  CDR3 for alpha chain variable domain of TCR clone 368282 (TRAV29/DV5, TRAJ43)
CAAPYNNNDMRF

SEQ ID NO: 736564 - protein, 16 aa, Homo sapiens
  CDR3 for beta chain variable domain of TCR clone 368282 (TRBV6-5, TRBJ2-1)
CASSETLAGHYNEQFF

SEQ ID NO: 736565 - protein, 16 aa, Homo sapiens
  CDR3 for alpha chain variable domain of TCR clone 368283 (TRAV12-3, TRAJ53)
CAMSPGSGGSNYKMTF

SEQ ID NO: 736566 - protein, 15 aa, Homo sapiens
  CDR3 for beta chain variable domain of TCR clone 368283 (TRBV10-2, TRBJ2-6)
CASSEQGTGANVLTF

SEQ ID NO: 736567 - protein, 14 aa, Homo sapiens
  CDR3 for alpha chain variable domain of TCR clone 368284 (TRAV12-2, TRAJ13)
CAVKKTGGYQKVTF

SEQ ID NO: 736568 - protein, 16 aa, Homo sapiens
  CDR3 for beta chain variable domain of TCR clone 368284 (TRBV19, TRBJ1-5)
CASSIDRGGPRQTQHF

SEQ ID NO: 736569 - protein, 12 aa, Homo sapiens
  CDR3 for alpha chain variable domain of TCR clone 368285 (TRAV26-1, TRAJ43)
CVVRGNNNDMRF

SEQ ID NO: 736570 - protein, 13 aa, Homo sapiens
  CDR3 for beta chain variable domain of TCR clone 368285 (TRBV20-1, TRBJ2-3)
CSAIYPGADTQYF

SEQ ID NO: 736571 - protein, 14 aa, Homo sapiens
  CDR3 for alpha chain variable domain of TCR clone 368286 (TRAV12-2, TRAJ13)
CAVKKTGGYQKVTF

SEQ ID NO: 736572 - protein, 14 aa, Homo sapiens
  CDR3 for beta chain variable domain of TCR clone 368286 (TRBV12-5, TRBJ2-5)
CASGSRTLQETQYF

SEQ ID NO: 736573 - protein, 16 aa, Homo sapiens
  CDR3 for alpha chain variable domain of TCR clone 368287 (TRAV16, TRAJ52)
CSLSAAGGTSYGKLTF

SEQ ID NO: 736574 - protein, 12 aa, Homo sapiens
  CDR3 for beta chain variable domain of TCR clone 368287 (TRBV11-2, TRBJ2-2)
CASSLGGGELFF

SEQ ID NO: 736575 - protein, 14 aa, Homo sapiens
  CDR3 for alpha chain variable domain of TCR clone 368288 (TRAV8-3, TRAJ37)
CAVGSSGNTGKLIF

SEQ ID NO: 736576 - protein, 15 aa, Homo sapiens
  CDR3 for beta chain variable domain of TCR clone 368288 (TRBV19, TRBJ2-1)
CASSIVRGEGREQFF

SEQ ID NO: 736577 - protein, 19 aa, Homo sapiens
  CDR3 for alpha chain variable domain of TCR clone 368289 (TRAV29/DV5, TRAJ49)
CSVLLCSKLTVDTGNQFYF

SEQ ID NO: 736578 - protein, 17 aa, Homo sapiens
  CDR3 for beta chain variable domain of TCR clone 368289 (TRBV13, TRBJ2-3)
CASSLSRVAGGEEYAVF

SEQ ID NO: 736579 - protein, 12 aa, Homo sapiens
  CDR3 for alpha chain variable domain of TCR clone 368290 (TRAV13-2, TRAJ23)
CAERHRGGKLIF

SEQ ID NO: 736580 - protein, 12 aa, Homo sapiens
  CDR3 for beta chain variable domain of TCR clone 368290 (TRBV11-3, TRBJ2-1)
CASSAAENEQFF

SEQ ID NO: 736581 - protein, 14 aa, Homo sapiens
  CDR3 for alpha chain variable domain of TCR clone 368291 (TRAV17, TRAJ57)
CATDPQGGSEKLVF

SEQ ID NO: 736582 - protein, 14 aa, Homo sapiens
  CDR3 for beta chain variable domain of TCR clone 368291 (TRBV20-1, TRBJ1-1)
SAVLHLGGGTEAFF

SEQ ID NO: 736583 - protein, 15 aa, Homo sapiens
  CDR3 for alpha chain variable domain of TCR clone 368292 (TRAV34, TRAJ38)
CGADFTPGNNRNLIW

SEQ ID NO: 736584 - protein, 14 aa, Homo sapiens
  CDR3 for beta chain variable domain of TCR clone 368292 (TRBV12-5, TRBJ2-5)
CASGSRTHQETQYF

SEQ ID NO: 736585 - protein, 14 aa, Homo sapiens
  CDR3 for alpha chain variable domain of TCR clone 368293 (TRAV13-1, TRAJ4)
CAASLSGGYNKLIF

SEQ ID NO: 736586 - protein, 12 aa, Homo sapiens
  CDR3 for beta chain variable domain of TCR clone 368293 (TRBV20-1, TRBJ2-5)
RRVAGAGETQYF

SEQ ID NO: 736587 - protein, 13 aa, Homo sapiens
  CDR3 for alpha chain variable domain of TCR clone 368294 (TRAV27, TRAJ41)
CAGEGNSGYALNF

SEQ ID NO: 736588 - protein, 16 aa, Homo sapiens
  CDR3 for beta chain variable domain of TCR clone 368294 (TRBV7-9, TRBJ2-1)
CASSDVAGGSYNEQFF

SEQ ID NO: 736589 - protein, 17 aa, Homo sapiens
  CDR3 for alpha chain variable domain of TCR clone 368295 (TRAV8-6, TRAJ58)
CAVSSSVGETSGSRLTF

SEQ ID NO: 736590 - protein, 17 aa, Homo sapiens
  CDR3 for beta chain variable domain of TCR clone 368295 (TRBV4-1, TRBJ1-4)
CASSQEGPRGVEEKLFF

SEQ ID NO: 736591 - protein, 14 aa, Homo sapiens
  CDR3 for alpha chain variable domain of TCR clone 368296 (TRAV38-1, TRAJ45)
CASHSGGGADGLTF

SEQ ID NO: 736592 - protein, 13 aa, Homo sapiens
  CDR3 for beta chain variable domain of TCR clone 368296 (TRBV19, TRBJ2-7)
CASSPLQSYEQYF

SEQ ID NO: 736593 - protein, 15 aa, Homo sapiens
  CDR3 for alpha chain variable domain of TCR clone 368297 (TRAV34, TRAJ38)
CGADFTPGNDRKLIW

SEQ ID NO: 736594 - protein, 16 aa, Homo sapiens
  CDR3 for beta chain variable domain of TCR clone 368297 (TRBV6-1, TRBJ2-3)
CASSEVIGQGTDTQYF

SEQ ID NO: 736595 - protein, 16 aa, Homo sapiens
  CDR3 for alpha chain variable domain of TCR clone 368298 (TRAV17, TRAJ28)
CATDEYSGAGSYQLTF

SEQ ID NO: 736596 - protein, 13 aa, Homo sapiens
  CDR3 for beta chain variable domain of TCR clone 368298 (TRBV7-9, TRBJ1-2)
CASRTGTNYGYTF

SEQ ID NO: 736597 - protein, 14 aa, Homo sapiens
  CDR3 for alpha chain variable domain of TCR clone 368299 (TRAV12-2, TRAJ13)
CAVKKTGGYQKVTL

SEQ ID NO: 736598 - protein, 14 aa, Homo sapiens
  CDR3 for beta chain variable domain of TCR clone 368299 (TRBV7-2, TRBJ2-7)
CASSPETSFYEQYF

SEQ ID NO: 736599 - protein, 14 aa, Homo sapiens
  CDR3 for alpha chain variable domain of TCR clone 368300 (TRAV38-1, TRAJ43)
CACMKHNNNNDMRF

SEQ ID NO: 736600 - protein, 15 aa, Homo sapiens
  CDR3 for beta chain variable domain of TCR clone 368300 (TRBV9, TRBJ1-6)
CASSVAGTGDSPLHF

SEQ ID NO: 736601 - protein, 12 aa, Homo sapiens
  CDR3 for alpha chain variable domain of TCR clone 368301 (TRAV12-3, TRAJ17)
CAMTLTGNKLTY

SEQ ID NO: 736602 - protein, 15 aa, Homo sapiens
  CDR3 for beta chain variable domain of TCR clone 368301 (TRBV20-1, TRBJ2-7)
CSARDRVSGTDEQYF

SEQ ID NO: 736603 - protein, 15 aa, Homo sapiens
  CDR3 for alpha chain variable domain of TCR clone 368302 (TRAV3, TRAJ20)
RAVRGIKLSDYKLSF

SEQ ID NO: 736604 - protein, 15 aa, Homo sapiens
  CDR3 for beta chain variable domain of TCR clone 368302 (TRBV7-9, TRBJ1-6)
CASSSPGRGNSPLHF

SEQ ID NO: 736605 - protein, 19 aa, Homo sapiens
  CDR3 for alpha chain variable domain of TCR clone 368303 (TRAV2, TRAJ20)
ILQVREADAAVYRACKLSF

SEQ ID NO: 736606 - protein, 18 aa, Homo sapiens
  CDR3 for beta chain variable domain of TCR clone 368303 (TRBV20-1, TRBJ2-3)
CSASGLAGGPGTTDTQYF

SEQ ID NO: 736607 - protein, 17 aa, Homo sapiens
  CDR3 for alpha chain variable domain of TCR clone 368304 (TRAV3, TRAJ6)
CAVRDGPRAGGSYIPTF

SEQ ID NO: 736608 - protein, 17 aa, Homo sapiens
  CDR3 for beta chain variable domain of TCR clone 368304 (TRBV5-7, TRBJ2-4)
CASSPGTGHLAKNIQYF

SEQ ID NO: 736609 - protein, 12 aa, Homo sapiens
  CDR3 for alpha chain variable domain of TCR clone 368305 (TRAV3, TRAJ43)
CAVRDPNSDMRF

SEQ ID NO: 736610 - protein, 16 aa, Homo sapiens
  CDR3 for beta chain variable domain of TCR clone 368305 (TRBV7-3, TRBJ2-2)
CASSLKRGTLSGELFF

SEQ ID NO: 736611 - protein, 11 aa, Homo sapiens
  CDR3 for alpha chain variable domain of TCR clone 368306 (TRAV1-2, TRAJ40)
CAVPGTYKYIF

SEQ ID NO: 736612 - protein, 12 aa, Homo sapiens
  CDR3 for beta chain variable domain of TCR clone 368306 (TRBV19, TRBJ1-4)
CASKDWPGGLFF

SEQ ID NO: 736613 - protein, 13 aa, Homo sapiens
  CDR3 for alpha chain variable domain of TCR clone 368307 (TRAV12-1, TRAJ9)
CVVRNTGGFKTIF

SEQ ID NO: 736614 - protein, 14 aa, Homo sapiens
  CDR3 for beta chain variable domain of TCR clone 368307 (TRBV20-1, TRBJ2-1)
GSAQIGGSANERFF

SEQ ID NO: 736615 - protein, 13 aa, Homo sapiens
  CDR3 for alpha chain variable domain of TCR clone 368308 (TRAV27, TRAJ49)
CAPRPCTGNQFYF

SEQ ID NO: 736616 - protein, 18 aa, Homo sapiens
  CDR3 for beta chain variable domain of TCR clone 368308 (TRBV7-3, TRBJ2-5)
CASSLGGAAQGRWETQYL

SEQ ID NO: 736617 - protein, 16 aa, Homo sapiens
  CDR3 for alpha chain variable domain of TCR clone 368309 (TRAV30, TRAJ24)
CGPEIGDADSWGKFQF

SEQ ID NO: 736618 - protein, 16 aa, Homo sapiens
  CDR3 for beta chain variable domain of TCR clone 368309 (TRBV2, TRBJ1-3)
CASSGGAGRSGNTIYF

SEQ ID NO: 736619 - protein, 10 aa, Homo sapiens
  CDR3 for alpha chain variable domain of TCR clone 368310 (TRAV1-2, TRAJ31)
CAFFDARLMF

SEQ ID NO: 736620 - protein, 15 aa, Homo sapiens
  CDR3 for beta chain variable domain of TCR clone 368310 (TRBV4-1, TRBJ1-4)
CASSDTGGTNEKLLF

SEQ ID NO: 736621 - protein, 12 aa, Homo sapiens
  CDR3 for alpha chain variable domain of TCR clone 368311 (TRAV3, TRAJ26)
CAVRDYGQNFVF

SEQ ID NO: 736622 - protein, 16 aa, Homo sapiens
  CDR3 for beta chain variable domain of TCR clone 368311 (TRBV11-2, TRBJ1-2)
CAISPSGREANYGYTF

SEQ ID NO: 736623 - protein, 15 aa, Homo sapiens
  CDR3 for alpha chain variable domain of TCR clone 368312 (TRAV12-3, TRAJ6)
CAMSPASGGSYIPTF

SEQ ID NO: 736624 - protein, 12 aa, Homo sapiens
  CDR3 for beta chain variable domain of TCR clone 368312 (TRBV28, TRBJ2-3)
CASSLYRDTQYF

SEQ ID NO: 736625 - protein, 11 aa, Homo sapiens
  CDR3 for alpha chain variable domain of TCR clone 368313 (TRAV17, TRAJ9)
CGFTGGFKTIF

SEQ ID NO: 736626 - protein, 14 aa, Homo sapiens
  CDR3 for beta chain variable domain of TCR clone 368313 (TRBV7-3, TRBJ1-1)
CASSLKGGNTEAFF

SEQ ID NO: 736627 - protein, 11 aa, Homo sapiens
  CDR3 for alpha chain variable domain of TCR clone 368314 (TRAV13-1, TRAJ6)
CTTLGSYIPTF

SEQ ID NO: 736628 - protein, 12 aa, Homo sapiens
  CDR3 for beta chain variable domain of TCR clone 368314 (TRBV11-2, TRBJ2-1)
CASSPGNNEQFF

SEQ ID NO: 736629 - protein, 14 aa, Homo sapiens
  CDR3 for alpha chain variable domain of TCR clone 368315 (TRAV8-3, TRAJ4)
CAVGAAGGYNKLIF

SEQ ID NO: 736630 - protein, 14 aa, Homo sapiens
  CDR3 for beta chain variable domain of TCR clone 368315 (TRBV12-5, TRBJ2-5)
CASGSRTQQETQYF

SEQ ID NO: 736631 - protein, 13 aa, Homo sapiens
  CDR3 for alpha chain variable domain of TCR clone 368316 (TRAV8-3, TRAJ9)
CAVGITGGFKTIF

SEQ ID NO: 736632 - protein, 17 aa, Homo sapiens
  CDR3 for beta chain variable domain of TCR clone 368316 (TRBV7-3, TRBJ2-3)
CASSLMKRMRGADTQYF

SEQ ID NO: 736633 - protein, 15 aa, Homo sapiens
  CDR3 for alpha chain variable domain of TCR clone 368317 (TRAV1-2, TRAJ9)
CAVRDDGTGGVKTSF

SEQ ID NO: 736634 - protein, 16 aa, Homo sapiens
  CDR3 for beta chain variable domain of TCR clone 368317 (TRBV7-2, TRBJ1-6)
CASSSFESSYNSPLHF

SEQ ID NO: 736635 - protein, 15 aa, Homo sapiens
  CDR3 for alpha chain variable domain of TCR clone 368318 (TRAV8-3, TRAJ45)
RAASYSGGGADGLTF

SEQ ID NO: 736636 - protein, 16 aa, Homo sapiens
  CDR3 for beta chain variable domain of TCR clone 368318 (TRBV20-1, TRBJ2-2)
CSASASGIPGAGELFF

SEQ ID NO: 736637 - protein, 12 aa, Homo sapiens
  CDR3 for alpha chain variable domain of TCR clone 368319 (TRAV17, TRAJ39)
CATGAAGNMLTF

SEQ ID NO: 736638 - protein, 15 aa, Homo sapiens
  CDR3 for beta chain variable domain of TCR clone 368319 (TRBV28, TRBJ2-1)
CASSIIAGGRSEQFF

SEQ ID NO: 736639 - protein, 17 aa, Homo sapiens
  CDR3 for alpha chain variable domain of TCR clone 368320 (TRAV4, TRAJ18)
CLLVAAGRGSTLGRLYF

SEQ ID NO: 736640 - protein, 17 aa, Homo sapiens
  CDR3 for beta chain variable domain of TCR clone 368320 (TRBV28, TRBJ2-2)
CTSSLATGMGDAGELFF

SEQ ID NO: 736641 - protein, 12 aa, Homo sapiens
  CDR3 for alpha chain variable domain of TCR clone 368321 (TRAV23/DV6, TRAJ3)
CAARAPQQCFQD

SEQ ID NO: 736642 - protein, 17 aa, Homo sapiens
  CDR3 for beta chain variable domain of TCR clone 368321 (TRBV7-9, TRBJ2-3)
CVSSPTVAGDLTDTQYF

SEQ ID NO: 736643 - protein, 15 aa, Homo sapiens
  CDR3 for alpha chain variable domain of TCR clone 368322 (TRAV3, TRAJ47)
CAVRDIGEHGNKLVF

SEQ ID NO: 736644 - protein, 14 aa, Homo sapiens
  CDR3 for beta chain variable domain of TCR clone 368322 (TRBV13, TRBJ2-5)
CASSLERVGETQYF

SEQ ID NO: 736645 - protein, 11 aa, Homo sapiens
  CDR3 for alpha chain variable domain of TCR clone 368323 (TRAV1-2, TRAJ11)
CAVRGYSTLTF

SEQ ID NO: 736646 - protein, 15 aa, Homo sapiens
  CDR3 for beta chain variable domain of TCR clone 368323 (TRBV7-3, TRBJ2-2)
CASSETGQGTGELFF

SEQ ID NO: 736647 - protein, 11 aa, Homo sapiens
  CDR3 for alpha chain variable domain of TCR clone 368324 (TRAV35, TRAJ22)
CAGPGVGQLTF

SEQ ID NO: 736648 - protein, 16 aa, Homo sapiens
  CDR3 for beta chain variable domain of TCR clone 368324 (TRBV13, TRBJ2-2)
CASSPRTGEHTGELFF

SEQ ID NO: 736649 - protein, 11 aa, Homo sapiens
  CDR3 for alpha chain variable domain of TCR clone 368325 (TRAV29/DV5, TRAJ47)
CAATSGNKLVF

SEQ ID NO: 736650 - protein, 17 aa, Homo sapiens
  CDR3 for beta chain variable domain of TCR clone 368325 (TRBV7-9, TRBJ2-1)
CASSLVASYPSYNEQFF

SEQ ID NO: 736651 - protein, 13 aa, Homo sapiens
  CDR3 for alpha chain variable domain of TCR clone 368326 (TRAV12-1, TRAJ16)
CVVNGPDGQKLLF

SEQ ID NO: 736652 - protein, 15 aa, Homo sapiens
  CDR3 for beta chain variable domain of TCR clone 368326 (TRBV6-3, TRBJ2-7)
CASSSPRTVFYEQYF

SEQ ID NO: 736653 - protein, 14 aa, Homo sapiens
  CDR3 for alpha chain variable domain of TCR clone 368327 (TRAV13-1, TRAJ35)
CAASKGGLGNVLHC

SEQ ID NO: 736654 - protein, 13 aa, Homo sapiens
  CDR3 for beta chain variable domain of TCR clone 368327 (TRBV7-3, TRBJ1-1)
CASSRDWGAEAFF

SEQ ID NO: 736655 - protein, 16 aa, Homo sapiens
  CDR3 for alpha chain variable domain of TCR clone 368328 (TRAV12-3, TRAJ53)
CAMSPGSGGSNYKLTF

SEQ ID NO: 736656 - protein, 11 aa, Homo sapiens
  CDR3 for beta chain variable domain of TCR clone 368328 (TRBV29-1, TRBJ2-5)
CSADREGTRYF

SEQ ID NO: 736657 - protein, 13 aa, Homo sapiens
  CDR3 for alpha chain variable domain of TCR clone 368329 (TRAV8-3, TRAJ6)
CAARRGGSYIPTF

SEQ ID NO: 736658 - protein, 12 aa, Homo sapiens
  CDR3 for beta chain variable domain of TCR clone 368329 (TRBV12-4, TRBJ2-3)
CASSTLPDTQYF

SEQ ID NO: 736659 - protein, 14 aa, Homo sapiens
  CDR3 for alpha chain variable domain of TCR clone 368330 (TRAV21, TRAJ10)
CAVALTGGGNKLTF

SEQ ID NO: 736660 - protein, 13 aa, Homo sapiens
  CDR3 for beta chain variable domain of TCR clone 368330 (TRBV7-2, TRBJ1-6)
CASSLGSNSPPHF

SEQ ID NO: 736661 - protein, 13 aa, Homo sapiens
  CDR3 for alpha chain variable domain of TCR clone 368331 (TRAV8-4, TRAJ30)
CAVSVNRDDKIIF

SEQ ID NO: 736662 - protein, 15 aa, Homo sapiens
  CDR3 for beta chain variable domain of TCR clone 368331 (TRBV19, TRBJ1-6)
CASSTQGAVGSPLHF

SEQ ID NO: 736663 - protein, 17 aa, Homo sapiens
  CDR3 for alpha chain variable domain of TCR clone 368332 (TRAV3, TRAJ28)
CAVREAYSGAGSYQLTF

SEQ ID NO: 736664 - protein, 13 aa, Homo sapiens
  CDR3 for beta chain variable domain of TCR clone 368332 (TRBV4-1, TRBJ2-5)
CASSLTRGETQYF

SEQ ID NO: 736665 - protein, 12 aa, Homo sapiens
  CDR3 for alpha chain variable domain of TCR clone 368333 (TRAV12-3, TRAJ17)
CAMTLPGNKLTF

SEQ ID NO: 736666 - protein, 16 aa, Homo sapiens
  CDR3 for beta chain variable domain of TCR clone 368333 (TRBV29-1, TRBJ2-7)
CSVEDAEDGTAYEQYF

SEQ ID NO: 736667 - protein, 16 aa, Homo sapiens
  CDR3 for alpha chain variable domain of TCR clone 368334 (TRAV12-2, TRAJ13)
CAVKKTGGYQKVPLEL

SEQ ID NO: 736668 - protein, 14 aa, Homo sapiens
  CDR3 for beta chain variable domain of TCR clone 368334 (TRBV5-5, TRBJ2-7)
CASSLGQGTYEQYF

SEQ ID NO: 736669 - protein, 12 aa, Homo sapiens
  CDR3 for alpha chain variable domain of TCR clone 368335 (TRAV9-2, TRAJ40)
CALTSGTYKYIF

SEQ ID NO: 736670 - protein, 16 aa, Homo sapiens
  CDR3 for beta chain variable domain of TCR clone 368335 (TRBV7-7, TRBJ2-2)
CASSPRTGLNTGELVF

SEQ ID NO: 736671 - protein, 12 aa, Homo sapiens
  CDR3 for alpha chain variable domain of TCR clone 368336 (TRAV12-3, TRAJ17)
CAMTLTGNKLTF

SEQ ID NO: 736672 - protein, 13 aa, Homo sapiens
  CDR3 for beta chain variable domain of TCR clone 368336 (TRBV27, TRBJ2-1)
CAIRTLGVGEQFF

SEQ ID NO: 736673 - protein, 13 aa, Homo sapiens
  CDR3 for alpha chain variable domain of TCR clone 368337 (TRAV20, TRAJ15)
CATINQAGTALIF

SEQ ID NO: 736674 - protein, 13 aa, Homo sapiens
  CDR3 for beta chain variable domain of TCR clone 368337 (TRBV12-4, TRBJ2-1)
CASRQPSNNELFF

SEQ ID NO: 736675 - protein, 15 aa, Homo sapiens
  CDR3 for alpha chain variable domain of TCR clone 368338 (TRAV12-2, TRAJ52)
CAVTSGGTSYGQLTF

SEQ ID NO: 736676 - protein, 15 aa, Homo sapiens
  CDR3 for beta chain variable domain of TCR clone 368338 (TRBV7-2, TRBJ2-1)
CASSPGFISGNEQFF

SEQ ID NO: 736677 - protein, 14 aa, Homo sapiens
  CDR3 for alpha chain variable domain of TCR clone 368339 (TRAV17, TRAJ34)
CATDSLEGTDKLIF

SEQ ID NO: 736678 - protein, 20 aa, Homo sapiens
  CDR3 for beta chain variable domain of TCR clone 368339 (TRBV28, TRBJ2-1)
CASTPIGRSPGLAGGNEQFF

SEQ ID NO: 736679 - protein, 11 aa, Homo sapiens
  CDR3 for alpha chain variable domain of TCR clone 368340 (TRAV8-4, TRAJ20)
CAVTNVLRLQA

SEQ ID NO: 736680 - protein, 16 aa, Homo sapiens
  CDR3 for beta chain variable domain of TCR clone 368340 (TRBV6-1, TRBJ1-2)
CASSGAWQGRSHGYTF

SEQ ID NO: 736681 - protein, 14 aa, Homo sapiens
  CDR3 for alpha chain variable domain of TCR clone 368341 (TRAV12-2, TRAJ11)
CAVEGGSGYSTLTF

SEQ ID NO: 736682 - protein, 13 aa, Homo sapiens
  CDR3 for beta chain variable domain of TCR clone 368341 (TRBV19, TRBJ1-2)
CASSVPGQDGYTF

SEQ ID NO: 736683 - protein, 14 aa, Homo sapiens
  CDR3 for alpha chain variable domain of TCR clone 368342 (TRAV1-2, TRAJ8)
CAVREDTGFQKLVF

SEQ ID NO: 736684 - protein, 17 aa, Homo sapiens
  CDR3 for beta chain variable domain of TCR clone 368342 (TRBV20-1, TRBJ2-1)
CSASSSGLARSYNEQFF

SEQ ID NO: 736685 - protein, 13 aa, Homo sapiens
  CDR3 for alpha chain variable domain of TCR clone 368343 (TRAV20, TRAJ54)
CAVQAGGAQKLGF

SEQ ID NO: 736686 - protein, 17 aa, Homo sapiens
  CDR3 for beta chain variable domain of TCR clone 368343 (TRBV11-2, TRBJ2-1)
CASSLYPPGVEYNEQFF

SEQ ID NO: 736687 - protein, 13 aa, Homo sapiens
  CDR3 for alpha chain variable domain of TCR clone 368344 (TRAV27, TRAJ45)
CRSSGGGADGLTF

SEQ ID NO: 736688 - protein, 17 aa, Homo sapiens
  CDR3 for beta chain variable domain of TCR clone 368344 (TRBV11-2, TRBJ2-1)
CFSSLYPPGVEYNEQFF

SEQ ID NO: 736689 - protein, 14 aa, Homo sapiens
  CDR3 for alpha chain variable domain of TCR clone 368345 (TRAV13-1, TRAJ44)
CAAKATGTASKLTF

SEQ ID NO: 736690 - protein, 17 aa, Homo sapiens
  CDR3 for beta chain variable domain of TCR clone 368345 (TRBV7-3, TRBJ2-3)
CASSLMKRMRGADQQYF

SEQ ID NO: 736691 - protein, 13 aa, Homo sapiens
  CDR3 for alpha chain variable domain of TCR clone 368346 (TRAV17, TRAJ31)
CATDENNNARLMF

SEQ ID NO: 736692 - protein, 15 aa, Homo sapiens
  CDR3 for beta chain variable domain of TCR clone 368346 (TRBV20-1, TRBJ2-7)
CSARDRVSGMDEQYF

SEQ ID NO: 736693 - protein, 14 aa, Homo sapiens
  CDR3 for alpha chain variable domain of TCR clone 368347 (TRAV13-1, TRAJ44)
CAAKATGTASKLTF

SEQ ID NO: 736694 - protein, 17 aa, Homo sapiens
  CDR3 for beta chain variable domain of TCR clone 368347 (TRBV7-3, TRBJ2-3)
CASSLMKRMRGADTQYS

SEQ ID NO: 736695 - protein, 16 aa, Homo sapiens
  CDR3 for alpha chain variable domain of TCR clone 368348 (TRAV3, TRAJ10)
CSVRDMRAGGGNKLTF

SEQ ID NO: 736696 - protein, 13 aa, Homo sapiens
  CDR3 for beta chain variable domain of TCR clone 368348 (TRBV6-1, TRBJ1-1)
CASSRQGNTEAFF

SEQ ID NO: 736697 - protein, 16 aa, Homo sapiens
  CDR3 for alpha chain variable domain of TCR clone 368349 (TRAV8-3, TRAJ42)
CAVGEGNGGSQGNLIF

SEQ ID NO: 736698 - protein, 14 aa, Homo sapiens
  CDR3 for beta chain variable domain of TCR clone 368349 (TRBV7-2, TRBJ2-7)
CASSPKTSFYEQYF

SEQ ID NO: 736699 - protein, 15 aa, Homo sapiens
  CDR3 for alpha chain variable domain of TCR clone 368350 (TRAV3, TRAJ47)
CAVRDIGEYGNKLDF

SEQ ID NO: 736700 - protein, 13 aa, Homo sapiens
  CDR3 for beta chain variable domain of TCR clone 368350 (TRBV20-1, TRBJ1-1)
CSAPLGGGTEAFF

SEQ ID NO: 736701 - protein, 13 aa, Homo sapiens
  CDR3 for alpha chain variable domain of TCR clone 368351 (TRAV35, TRAJ43)
CAGYPYNNNDMRF

SEQ ID NO: 736702 - protein, 15 aa, Homo sapiens
  CDR3 for beta chain variable domain of TCR clone 368351 (TRBV25-1, TRBJ1-4)
CARSKRIATNEKLFF

SEQ ID NO: 736703 - protein, 12 aa, Homo sapiens
  CDR3 for alpha chain variable domain of TCR clone 368352 (TRAV12-3, TRAJ17)
CAMTLTGNKLTF

SEQ ID NO: 736704 - protein, 13 aa, Homo sapiens
  CDR3 for beta chain variable domain of TCR clone 368352 (TRBV10-3, TRBJ2-7)
CASKLAVNYEQYV

SEQ ID NO: 736705 - protein, 21 aa, Homo sapiens
  CDR3 for alpha chain variable domain of TCR clone 368353 (TRAV26-2, TRAJ45)
CVLLHPERQGRSGGGADGLTF

SEQ ID NO: 736706 - protein, 15 aa, Homo sapiens
  CDR3 for beta chain variable domain of TCR clone 368353 (TRBV7-6, TRBJ2-5)
CASSKPTGPQETQYF

SEQ ID NO: 736707 - protein, 15 aa, Homo sapiens
  CDR3 for alpha chain variable domain of TCR clone 368354 (TRAV20, TRAJ37)
CCAGGGSSNTGKLIF

SEQ ID NO: 736708 - protein, 13 aa, Homo sapiens
  CDR3 for beta chain variable domain of TCR clone 368354 (TRBV7-3, TRBJ1-1)
CASSQDWGAEASF

SEQ ID NO: 736709 - protein, 15 aa, Homo sapiens
  CDR3 for alpha chain variable domain of TCR clone 368355 (TRAV8-3, TRAJ27)
CAVGPSKTNAGKSTF

SEQ ID NO: 736710 - protein, 15 aa, Homo sapiens
  CDR3 for beta chain variable domain of TCR clone 368355 (TRBV6-3, TRBJ2-7)
CAGSSPGTVFYEQYF

SEQ ID NO: 736711 - protein, 14 aa, Homo sapiens
  CDR3 for alpha chain variable domain of TCR clone 368356 (TRAV1-2, TRAJ8)
CPVREDTGFQKLVF

SEQ ID NO: 736712 - protein, 16 aa, Homo sapiens
  CDR3 for beta chain variable domain of TCR clone 368356 (TRBV19, TRBJ2-3)
CASGTGPNDGTDTQYF

SEQ ID NO: 736713 - protein, 14 aa, Homo sapiens
  CDR3 for alpha chain variable domain of TCR clone 368357 (TRAV8-3, TRAJ4)
CSVGAAGCYNKLIF

SEQ ID NO: 736714 - protein, 15 aa, Homo sapiens
  CDR3 for beta chain variable domain of TCR clone 368357 (TRBV6-5, TRBJ2-1)
CASSYDAGAGNEQFF

SEQ ID NO: 736715 - protein, 15 aa, Homo sapiens
  CDR3 for alpha chain variable domain of TCR clone 368358 (TRAV3, TRAJ13)
CAARVYSGGYPKVTF

SEQ ID NO: 736716 - protein, 15 aa, Homo sapiens
  CDR3 for beta chain variable domain of TCR clone 368358 (TRBV5-7, TRBJ1-2)
CASSLGVAANYGYTF

SEQ ID NO: 736717 - protein, 15 aa, Homo sapiens
  CDR3 for alpha chain variable domain of TCR clone 368359 (TRAV8-1, TRAJ6)
CAVNTPPGGSYIPKF

SEQ ID NO: 736718 - protein, 15 aa, Homo sapiens
  CDR3 for beta chain variable domain of TCR clone 368359 (TRBV11-2, TRBJ2-2)
CASSSDRVNAGELFF

SEQ ID NO: 736719 - protein, 16 aa, Homo sapiens
  CDR3 for alpha chain variable domain of TCR clone 368360 (TRAV21, TRAJ33)
CAVSPASMDSNYQLIW

SEQ ID NO: 736720 - protein, 19 aa, Homo sapiens
  CDR3 for beta chain variable domain of TCR clone 368360 (TRBV2, TRBJ1-4)
CASSKRELTKGRKNCFLAV

SEQ ID NO: 736721 - protein, 18 aa, Homo sapiens
  CDR3 for alpha chain variable domain of TCR clone 368361 (TRAV9-2, )
QARRYHGHPEPKIPGTQF

SEQ ID NO: 736722 - protein, 13 aa, Homo sapiens
  CDR3 for beta chain variable domain of TCR clone 368361 (TRBV15, TRBJ2-7)
CATSTTGHYEQYF

SEQ ID NO: 736723 - protein, 13 aa, Homo sapiens
  CDR3 for alpha chain variable domain of TCR clone 368362 (TRAV12-1, TRAJ21)
CVVTLYNFNKFYF

SEQ ID NO: 736724 - protein, 14 aa, Homo sapiens
  CDR3 for beta chain variable domain of TCR clone 368362 (TRBV11-2, TRBJ2-7)
CASSSTGEGYEQYF

SEQ ID NO: 736725 - protein, 11 aa, Homo sapiens
  CDR3 for alpha chain variable domain of TCR clone 368363 (TRAV16, TRAJ49)
CALRSGNQFYF

SEQ ID NO: 736726 - protein, 16 aa, Homo sapiens
  CDR3 for beta chain variable domain of TCR clone 368363 (TRBV20-1, TRBJ1-5)
CTARDVGGGWIQPQHF

SEQ ID NO: 736727 - protein, 14 aa, Homo sapiens
  CDR3 for alpha chain variable domain of TCR clone 368364 (TRAV1-2, TRAJ8)
CAVREDTGFQKLVF

SEQ ID NO: 736728 - protein, 17 aa, Homo sapiens
  CDR3 for beta chain variable domain of TCR clone 368364 (TRBV5-1, TRBJ2-1)
CASSSTAGTSGRREQFF

SEQ ID NO: 736729 - protein, 11 aa, Homo sapiens
  CDR3 for alpha chain variable domain of TCR clone 368365 (TRAV12-1, TRAJ8)
CVVTGFQKLVF

SEQ ID NO: 736730 - protein, 14 aa, Homo sapiens
  CDR3 for beta chain variable domain of TCR clone 368365 (TRBV19, TRBJ2-1)
CTSGKSTQYNEQFF

SEQ ID NO: 736731 - protein, 13 aa, Homo sapiens
  CDR3 for alpha chain variable domain of TCR clone 368366 (TRAV21, TRAJ20)
CAVGLRVDYKLSF

SEQ ID NO: 736732 - protein, 12 aa, Homo sapiens
  CDR3 for beta chain variable domain of TCR clone 368366 (TRBV12-4, TRBJ1-2)
CASSFIWLHLRF

SEQ ID NO: 736733 - protein, 12 aa, Homo sapiens
  CDR3 for alpha chain variable domain of TCR clone 368367 (TRAV13-1, TRAJ49)
CTAPNTGNQFYF

SEQ ID NO: 736734 - protein, 17 aa, Homo sapiens
  CDR3 for beta chain variable domain of TCR clone 368367 (TRBV25-1, TRBJ2-7)
CASSDARVVFSSYEQYF

SEQ ID NO: 736735 - protein, 15 aa, Homo sapiens
  CDR3 for alpha chain variable domain of TCR clone 368368 (TRAV26-1, TRAJ44)
CTVRANNGTASKLTF

SEQ ID NO: 736736 - protein, 16 aa, Homo sapiens
  CDR3 for beta chain variable domain of TCR clone 368368 (TRBV7-7, TRBJ2-1)
CASSLASGTSYNEQFF

SEQ ID NO: 736737 - protein, 18 aa, Homo sapiens
  CDR3 for alpha chain variable domain of TCR clone 368369 (TRAV12-3, TRAJ52)
CAMSVGGAGGTSYGKLTF

SEQ ID NO: 736738 - protein, 11 aa, Homo sapiens
  CDR3 for beta chain variable domain of TCR clone 368369 (TRBV27, TRBJ2-3)
CASSLGDTQYF

SEQ ID NO: 736739 - protein, 14 aa, Homo sapiens
  CDR3 for alpha chain variable domain of TCR clone 368370 (TRAV8-3, TRAJ4)
CAVGAAGGYNKLIF

SEQ ID NO: 736740 - protein, 17 aa, Homo sapiens
  CDR3 for beta chain variable domain of TCR clone 368370 (TRBV15, TRBJ1-5)
CATSRAPPGTRNQPQHF

SEQ ID NO: 736741 - protein, 17 aa, Homo sapiens
  CDR3 for alpha chain variable domain of TCR clone 368371 (TRAV12-3, TRAJ18)
CAMIRADRGSALGRLYF

SEQ ID NO: 736742 - protein, 14 aa, Homo sapiens
  CDR3 for beta chain variable domain of TCR clone 368371 (TRBV5-7, TRBJ1-6)
CASTPWPADSPLHF

SEQ ID NO: 736743 - protein, 14 aa, Homo sapiens
  CDR3 for alpha chain variable domain of TCR clone 368372 (TRAV13-2, TRAJ16)
CAENNWEDGQKLLF

SEQ ID NO: 736744 - protein, 15 aa, Homo sapiens
  CDR3 for beta chain variable domain of TCR clone 368372 (TRBV9, TRBJ1-6)
CASSVAGTGDSPLHF

SEQ ID NO: 736745 - protein, 13 aa, Homo sapiens
  CDR3 for alpha chain variable domain of TCR clone 368373 (TRAV2, TRAJ29)
CASGNSGNTPLVF

SEQ ID NO: 736746 - protein, 16 aa, Homo sapiens
  CDR3 for beta chain variable domain of TCR clone 368373 (TRBV7-9, TRBJ1-2)
CASSPGGGAINYGYTF

SEQ ID NO: 736747 - protein, 18 aa, Homo sapiens
  CDR3 for alpha chain variable domain of TCR clone 368374 (TRAV13-1, TRAJ52)
CAAKNPNAGGTSYGKITF

SEQ ID NO: 736748 - protein, 15 aa, Homo sapiens
  CDR3 for beta chain variable domain of TCR clone 368374 (TRBV6-1, TRBJ2-3)
CASSERGGITDTQYF

SEQ ID NO: 736749 - protein, 13 aa, Homo sapiens
  CDR3 for alpha chain variable domain of TCR clone 368375 (TRAV8-3, TRAJ21)
CAVGAYNFNKFYF

SEQ ID NO: 736750 - protein, 16 aa, Homo sapiens
  CDR3 for beta chain variable domain of TCR clone 368375 (TRBV19, TRBJ2-1)
CASSRGGGGSYNEQFF

SEQ ID NO: 736751 - protein, 16 aa, Homo sapiens
  CDR3 for alpha chain variable domain of TCR clone 368376 (TRAV12-2, TRAJ40)
CAVIRGGTSGTYKYIF

SEQ ID NO: 736752 - protein, 15 aa, Homo sapiens
  CDR3 for beta chain variable domain of TCR clone 368376 (TRBV6-1, TRBJ2-3)
CASSERGGITDTQYF

SEQ ID NO: 736753 - protein, 10 aa, Homo sapiens
  CDR3 for alpha chain variable domain of TCR clone 368377 (TRAV21, TRAJ31)
CAVDNARHMF

SEQ ID NO: 736754 - protein, 13 aa, Homo sapiens
  CDR3 for beta chain variable domain of TCR clone 368377 (TRBV4-1, TRBJ1-1)
CASSRKMNTAAFF

SEQ ID NO: 736755 - protein, 13 aa, Homo sapiens
  CDR3 for alpha chain variable domain of TCR clone 368378 (TRAV25, TRAJ10)
CAGRTGGGNKLTF

SEQ ID NO: 736756 - protein, 12 aa, Homo sapiens
  CDR3 for beta chain variable domain of TCR clone 368378 (TRBV7-8, TRBJ2-7)
CASSLGDREQYF

SEQ ID NO: 736757 - protein, 14 aa, Homo sapiens
  CDR3 for alpha chain variable domain of TCR clone 368379 (TRAV35, TRAJ24)
CAGPRRDSWGKLQF

SEQ ID NO: 736758 - protein, 12 aa, Homo sapiens
  CDR3 for beta chain variable domain of TCR clone 368379 (TRBV12-4, TRBJ2-3)
CASSLGQDTQYS

SEQ ID NO: 736759 - protein, 16 aa, Homo sapiens
  CDR3 for alpha chain variable domain of TCR clone 368380 (TRAV12-1, TRAJ12)
CVVNTLLMDSSYKLIF

SEQ ID NO: 736760 - protein, 13 aa, Homo sapiens
  CDR3 for beta chain variable domain of TCR clone 368380 (TRBV10-3, TRBJ2-7)
CASKLAVNYEQYF

SEQ ID NO: 736761 - protein, 13 aa, Homo sapiens
  CDR3 for alpha chain variable domain of TCR clone 368381 (TRAV2, TRAJ40)
CAVVTSGTYKYIF

SEQ ID NO: 736762 - protein, 14 aa, Homo sapiens
  CDR3 for beta chain variable domain of TCR clone 368381 (TRBV19, TRBJ2-1)
CASPTYGLSGEQFF

SEQ ID NO: 736763 - protein, 14 aa, Homo sapiens
  CDR3 for alpha chain variable domain of TCR clone 368382 (TRAV21, TRAJ4)
CAAPGVGGYNKLIF

SEQ ID NO: 736764 - protein, 13 aa, Homo sapiens
  CDR3 for beta chain variable domain of TCR clone 368382 (TRBV7-3, TRBJ2-1)
CASSPGSYTEQFF

SEQ ID NO: 736765 - protein, 12 aa, Homo sapiens
  CDR3 for alpha chain variable domain of TCR clone 368383 (TRAV16, TRAJ10)
YSRTGGGNKLTF

SEQ ID NO: 736766 - protein, 11 aa, Homo sapiens
  CDR3 for beta chain variable domain of TCR clone 368383 (TRBV29-1, TRBJ2-5)
CSEDRTGTQYF

SEQ ID NO: 736767 - protein, 16 aa, Homo sapiens
  CDR3 for alpha chain variable domain of TCR clone 368384 (TRAV39, TRAJ32)
CAVDMEYGGATNKLIF

SEQ ID NO: 736768 - protein, 14 aa, Homo sapiens
  CDR3 for beta chain variable domain of TCR clone 368384 (TRBV9, TRBJ2-4)
CASSPSGTSGLQYF

SEQ ID NO: 736769 - protein, 13 aa, Homo sapiens
  CDR3 for alpha chain variable domain of TCR clone 368385 (TRAV21, TRAJ27)
CAARPGNAGKSTF

SEQ ID NO: 736770 - protein, 13 aa, Homo sapiens
  CDR3 for beta chain variable domain of TCR clone 368385 (TRBV19, TRBJ1-2)
CASSQGQVYGYTF

SEQ ID NO: 736771 - protein, 12 aa, Homo sapiens
  CDR3 for alpha chain variable domain of TCR clone 368386 (TRAV17, TRAJ49)
CATVTTGNQFYF

SEQ ID NO: 736772 - protein, 11 aa, Homo sapiens
  CDR3 for beta chain variable domain of TCR clone 368386 (TRBV12-4, TRBJ2-2)
CASSSAGELFF

SEQ ID NO: 736773 - protein, 14 aa, Homo sapiens
  CDR3 for alpha chain variable domain of TCR clone 368387 (TRAV12-3, TRAJ10)
SHLPLTGGGNKLTF

SEQ ID NO: 736774 - protein, 15 aa, Homo sapiens
  CDR3 for beta chain variable domain of TCR clone 368387 (TRBV7-9, TRBJ1-4)
CASSRTGGFNEKLFV

SEQ ID NO: 736775 - protein, 16 aa, Homo sapiens
  CDR3 for alpha chain variable domain of TCR clone 368388 (TRAV3, TRAJ13)
CAVRDPNSGGYEKVTF

SEQ ID NO: 736776 - protein, 13 aa, Homo sapiens
  CDR3 for beta chain variable domain of TCR clone 368388 (TRBV7-9, TRBJ2-7)
CASSLQGSYEQYF

SEQ ID NO: 736777 - protein, 14 aa, Homo sapiens
  CDR3 for alpha chain variable domain of TCR clone 368389 (TRAV12-3, TRAJ10)
SHLPLTGGGNKLTF

SEQ ID NO: 736778 - protein, 15 aa, Homo sapiens
  CDR3 for beta chain variable domain of TCR clone 368389 (TRBV11-2, TRBJ1-3)
CASSLDGTVGNTIYV

SEQ ID NO: 736779 - protein, 17 aa, Homo sapiens
  CDR3 for alpha chain variable domain of TCR clone 368390 (TRAV26-1, TRAJ53)
CTVRVEDSGGSNYKLTF

SEQ ID NO: 736780 - protein, 15 aa, Homo sapiens
  CDR3 for beta chain variable domain of TCR clone 368390 (TRBV20-1, TRBJ2-7)
CSARVPAAYFYEQYF

SEQ ID NO: 736781 - protein, 14 aa, Homo sapiens
  CDR3 for alpha chain variable domain of TCR clone 368391 (TRAV3, TRAJ9)
CAVRLNTGGFKTIF

SEQ ID NO: 736782 - protein, 14 aa, Homo sapiens
  CDR3 for beta chain variable domain of TCR clone 368391 (TRBV7-9, TRBJ2-1)
CASSLAGPYNEQFF

SEQ ID NO: 736783 - protein, 15 aa, Homo sapiens
  CDR3 for alpha chain variable domain of TCR clone 368392 (TRAV12-3, TRAJ6)
CAMSATSGGSYIPTI

SEQ ID NO: 736784 - protein, 11 aa, Homo sapiens
  CDR3 for beta chain variable domain of TCR clone 368392 (TRBV20-1, TRBJ1-5)
CSAQGDQPQHF

SEQ ID NO: 736785 - protein, 13 aa, Homo sapiens
  CDR3 for alpha chain variable domain of TCR clone 368393 (TRAV3, TRAJ36)
CAVRDTGADNLFF

SEQ ID NO: 736786 - protein, 15 aa, Homo sapiens
  CDR3 for beta chain variable domain of TCR clone 368393 (TRBV24-1, TRBJ2-1)
CATSGSGGFYNEQFF

SEQ ID NO: 736787 - protein, 14 aa, Homo sapiens
  CDR3 for alpha chain variable domain of TCR clone 368394 (TRAV9-2, TRAJ39)
CALYSYNAGNMLTF

SEQ ID NO: 736788 - protein, 13 aa, Homo sapiens
  CDR3 for beta chain variable domain of TCR clone 368394 (TRBV7-9, TRBJ1-2)
CASSLKQNYGYTF

SEQ ID NO: 736789 - protein, 13 aa, Homo sapiens
  CDR3 for alpha chain variable domain of TCR clone 368395 (TRAV20, TRAJ20)
CAVRDFNDYKLSF

SEQ ID NO: 736790 - protein, 13 aa, Homo sapiens
  CDR3 for beta chain variable domain of TCR clone 368395 (TRBV19, TRBJ2-7)
CASRKAGGSEQYF

SEQ ID NO: 736791 - protein, 15 aa, Homo sapiens
  CDR3 for alpha chain variable domain of TCR clone 368396 (TRAV16, TRAJ12)
CSKWPLRDSSYKLIF

SEQ ID NO: 736792 - protein, 17 aa, Homo sapiens
  CDR3 for beta chain variable domain of TCR clone 368396 (TRBV18, TRBJ1-5)
CASSPTMGQGTNQPQHF

SEQ ID NO: 736793 - protein, 14 aa, Homo sapiens
  CDR3 for alpha chain variable domain of TCR clone 368397 (TRAV9-2, TRAJ24)
CALNPRVSWGKLQF

SEQ ID NO: 736794 - protein, 15 aa, Homo sapiens
  CDR3 for beta chain variable domain of TCR clone 368397 (TRBV7-2, TRBJ2-3)
CASSSTGLETDTQYF

SEQ ID NO: 736795 - protein, 12 aa, Homo sapiens
  CDR3 for alpha chain variable domain of TCR clone 368398 (TRAV30, TRAJ43)
CGTEKRGNDMRF

SEQ ID NO: 736796 - protein, 13 aa, Homo sapiens
  CDR3 for beta chain variable domain of TCR clone 368398 (TRBV12-4, TRBJ1-2)
CASSSGSKDGYTF

SEQ ID NO: 736797 - protein, 13 aa, Homo sapiens
  CDR3 for alpha chain variable domain of TCR clone 368399 (TRAV12-3, TRAJ5)
CAMRPTGRRALTF

SEQ ID NO: 736798 - protein, 19 aa, Homo sapiens
  CDR3 for beta chain variable domain of TCR clone 368399 (TRBV2, TRBJ2-7)
CASSDDETSGRANDYEQYF

SEQ ID NO: 736799 - protein, 18 aa, Homo sapiens
  CDR3 for alpha chain variable domain of TCR clone 368400 (TRAV12-2, )
CAVEDIQNPDPAVYQLRD

SEQ ID NO: 736800 - protein, 15 aa, Homo sapiens
  CDR3 for beta chain variable domain of TCR clone 368400 (TRBV6-5, TRBJ2-7)
CASSRTSGFAYEQYF

SEQ ID NO: 736801 - protein, 12 aa, Homo sapiens
  CDR3 for alpha chain variable domain of TCR clone 368401 (TRAV23/DV6, TRAJ53)
CAASKLGSGGSN

SEQ ID NO: 736802 - protein, 14 aa, Homo sapiens
  CDR3 for beta chain variable domain of TCR clone 368401 (TRBV7-9, TRBJ2-3)
CASSLEQGTNTQHF

SEQ ID NO: 736803 - protein, 13 aa, Homo sapiens
  CDR3 for alpha chain variable domain of TCR clone 368402 (TRAV27, TRAJ3)
ASLRGSSASKLIF

SEQ ID NO: 736804 - protein, 15 aa, Homo sapiens
  CDR3 for beta chain variable domain of TCR clone 368402 (TRBV28, TRBJ1-3)
CASSMGWASGSTIYF

SEQ ID NO: 736805 - protein, 12 aa, Homo sapiens
  CDR3 for alpha chain variable domain of TCR clone 368403 (TRAV12-1, TRAJ31)
CVVNRNNARLMF

SEQ ID NO: 736806 - protein, 13 aa, Homo sapiens
  CDR3 for beta chain variable domain of TCR clone 368403 (TRBV7-6, TRBJ1-2)
CASSLVADYGYTF

SEQ ID NO: 736807 - protein, 13 aa, Homo sapiens
  CDR3 for alpha chain variable domain of TCR clone 368404 (TRAV13-2, TRAJ48)
CPEMDFGDEKLTF

SEQ ID NO: 736808 - protein, 15 aa, Homo sapiens
  CDR3 for beta chain variable domain of TCR clone 368404 (TRBV7-3, TRBJ2-1)
CASSQRGGALSEQFF

SEQ ID NO: 736809 - protein, 12 aa, Homo sapiens
  CDR3 for alpha chain variable domain of TCR clone 368405 (TRAV1-2, TRAJ26)
CAVRYYGQNFVF

SEQ ID NO: 736810 - protein, 16 aa, Homo sapiens
  CDR3 for beta chain variable domain of TCR clone 368405 (TRBV27, TRBJ2-7)
CANSSERRDSAYEQYF

SEQ ID NO: 736811 - protein, 15 aa, Homo sapiens
  CDR3 for alpha chain variable domain of TCR clone 368406 (TRAV8-3, TRAJ3)
CAVVTGYSSASKIIF

SEQ ID NO: 736812 - protein, 15 aa, Homo sapiens
  CDR3 for beta chain variable domain of TCR clone 368406 (TRBV2, TRBJ2-7)
CASRRTSGRSYEQYF

SEQ ID NO: 736813 - protein, 12 aa, Homo sapiens
  CDR3 for alpha chain variable domain of TCR clone 368407 (TRAV12-2, TRAJ21)
CAVRYNFNKFYF

SEQ ID NO: 736814 - protein, 14 aa, Homo sapiens
  CDR3 for beta chain variable domain of TCR clone 368407 (TRBV28, TRBJ2-1)
CASSTSGGWDEQFF

SEQ ID NO: 736815 - protein, 16 aa, Homo sapiens
  CDR3 for alpha chain variable domain of TCR clone 368408 (TRAV3, TRAJ10)
CAVRDMRAGGGNKLTF

SEQ ID NO: 736816 - protein, 17 aa, Homo sapiens
  CDR3 for beta chain variable domain of TCR clone 368408 (TRBV20-1, TRBJ2-2)
CSARGSGQGGLTGELFF

SEQ ID NO: 736817 - protein, 14 aa, Homo sapiens
  CDR3 for alpha chain variable domain of TCR clone 368409 (TRAV29/DV5, TRAJ20)
CAATIRSNDYKLSF

SEQ ID NO: 736818 - protein, 15 aa, Homo sapiens
  CDR3 for beta chain variable domain of TCR clone 368409 (TRBV20-1, TRBJ2-1)
CSASAAGSSYNEQFC

SEQ ID NO: 736819 - protein, 13 aa, Homo sapiens
  CDR3 for alpha chain variable domain of TCR clone 368410 (TRAV16, TRAJ26)
CITVLCLGQNFVF

SEQ ID NO: 736820 - protein, 12 aa, Homo sapiens
  CDR3 for beta chain variable domain of TCR clone 368410 (TRBV11-2, TRBJ2-1)
CASSPGNNAQFF

SEQ ID NO: 736821 - protein, 11 aa, Homo sapiens
  CDR3 for alpha chain variable domain of TCR clone 368411 (TRAV3, TRAJ20)
CAVRDGYKLSF

SEQ ID NO: 736822 - protein, 18 aa, Homo sapiens
  CDR3 for beta chain variable domain of TCR clone 368411 (TRBV11-2, TRBJ2-3)
CASSLGGASRGAPNTQYF

SEQ ID NO: 736823 - protein, 15 aa, Homo sapiens
  CDR3 for alpha chain variable domain of TCR clone 368412 (TRAV38-1, TRAJ58)
CAFMKHGTSGSRLTF

SEQ ID NO: 736824 - protein, 14 aa, Homo sapiens
  CDR3 for beta chain variable domain of TCR clone 368412 (TRBV19, TRBJ2-1)
CASSRLASINEQFF

SEQ ID NO: 736825 - protein, 14 aa, Homo sapiens
  CDR3 for alpha chain variable domain of TCR clone 368413 (TRAV3, TRAJ37)
CAVKESGNTVHLIF

SEQ ID NO: 736826 - protein, 14 aa, Homo sapiens
  CDR3 for beta chain variable domain of TCR clone 368413 (TRBV2, TRBJ1-5)
CASSENRGGQPQHF

SEQ ID NO: 736827 - protein, 15 aa, Homo sapiens
  CDR3 for alpha chain variable domain of TCR clone 368414 (TRAV26-1, TRAJ42)
CIVRVKGGSQGNLIF

SEQ ID NO: 736828 - protein, 10 aa, Homo sapiens
  CDR3 for beta chain variable domain of TCR clone 368414 (TRBV23-1, TRBJ2-1)
KWSSYNEQFF

SEQ ID NO: 736829 - protein, 14 aa, Homo sapiens
  CDR3 for alpha chain variable domain of TCR clone 368415 (TRAV12-2, TRAJ6)
CASKWGGGSYIPTF

SEQ ID NO: 736830 - protein, 15 aa, Homo sapiens
  CDR3 for beta chain variable domain of TCR clone 368415 (TRBV5-5, TRBJ1-5)
CASSSTPGSNQPQHF

SEQ ID NO: 736831 - protein, 15 aa, Homo sapiens
  CDR3 for alpha chain variable domain of TCR clone 368416 (TRAV27, TRAJ38)
CAARRNAGNNRKLIW

SEQ ID NO: 736832 - protein, 13 aa, Homo sapiens
  CDR3 for beta chain variable domain of TCR clone 368416 (TRBV7-3, TRBJ2-1)
CASRLDSYNEQFF

SEQ ID NO: 736833 - protein, 12 aa, Homo sapiens
  CDR3 for alpha chain variable domain of TCR clone 368417 (TRAV12-1, TRAJ20)
CVAHFNDYKLSF

SEQ ID NO: 736834 - protein, 14 aa, Homo sapiens
  CDR3 for beta chain variable domain of TCR clone 368417 (TRBV3-1, TRBJ2-2)
CASSLPDSTGELFF

SEQ ID NO: 736835 - protein, 13 aa, Homo sapiens
  CDR3 for alpha chain variable domain of TCR clone 368418 (TRAV30, TRAJ6)
CGFIERGSYIPTF

SEQ ID NO: 736836 - protein, 13 aa, Homo sapiens
  CDR3 for beta chain variable domain of TCR clone 368418 (TRBV5-4, TRBJ2-5)
CASSPVSQETQYF

SEQ ID NO: 736837 - protein, 14 aa, Homo sapiens
  CDR3 for alpha chain variable domain of TCR clone 368419 (TRAV12-2, TRAJ44)
CAVNPAGTASKLTF

SEQ ID NO: 736838 - protein, 14 aa, Homo sapiens
  CDR3 for beta chain variable domain of TCR clone 368419 (TRBV7-9, TRBJ2-1)
CASRPTGPRNEQFF

SEQ ID NO: 736839 - protein, 13 aa, Homo sapiens
  CDR3 for alpha chain variable domain of TCR clone 368420 (TRAV13-1, TRAJ27)
CAASTHQCRQINL

SEQ ID NO: 736840 - protein, 13 aa, Homo sapiens
  CDR3 for beta chain variable domain of TCR clone 368420 (TRBV7-3, TRBJ1-1)
CASSQDWGAEAFF

SEQ ID NO: 736841 - protein, 12 aa, Homo sapiens
  CDR3 for alpha chain variable domain of TCR clone 368421 (TRAV12-1, TRAJ40)
CVVYSGTYKYIF

SEQ ID NO: 736842 - protein, 15 aa, Homo sapiens
  CDR3 for beta chain variable domain of TCR clone 368421 (TRBV7-2, TRBJ2-1)
CASRKTGSSYNEQFF

SEQ ID NO: 736843 - protein, 13 aa, Homo sapiens
  CDR3 for alpha chain variable domain of TCR clone 368422 (TRAV12-1, TRAJ40)
CVANSSGTYKYIF

SEQ ID NO: 736844 - protein, 14 aa, Homo sapiens
  CDR3 for beta chain variable domain of TCR clone 368422 (TRBV2, TRBJ1-6)
CASEVSSYNSPLHF

SEQ ID NO: 736845 - protein, 12 aa, Homo sapiens
  CDR3 for alpha chain variable domain of TCR clone 368423 (TRAV12-2, TRAJ10)
WGVTGGGNKLTF

SEQ ID NO: 736846 - protein, 17 aa, Homo sapiens
  CDR3 for beta chain variable domain of TCR clone 368423 (TRBV28, TRBJ2-5)
CASSTPEGDALQETQYF

SEQ ID NO: 736847 - protein, 13 aa, Homo sapiens
  CDR3 for alpha chain variable domain of TCR clone 368424 (TRAV13-1, TRAJ12)
CAANPGSSYKLIF

SEQ ID NO: 736848 - protein, 16 aa, Homo sapiens
  CDR3 for beta chain variable domain of TCR clone 368424 (TRBV15, TRBJ2-1)
CATSRERLAGAYEQFF

SEQ ID NO: 736849 - protein, 13 aa, Homo sapiens
  CDR3 for alpha chain variable domain of TCR clone 368425 (TRAV16, TRAJ34)
CALSPYNTDKLVL

SEQ ID NO: 736850 - protein, 17 aa, Homo sapiens
  CDR3 for beta chain variable domain of TCR clone 368425 (TRBV5-1, TRBJ2-1)
CASSTGTSGYSYNEQFF

SEQ ID NO: 736851 - protein, 13 aa, Homo sapiens
  CDR3 for alpha chain variable domain of TCR clone 368426 (TRAV21, TRAJ20)
CAVGLRVDYKLSF

SEQ ID NO: 736852 - protein, 14 aa, Homo sapiens
  CDR3 for beta chain variable domain of TCR clone 368426 (TRBV20-1, TRBJ2-3)
CSARGGTSTDTQYF

SEQ ID NO: 736853 - protein, 10 aa, Homo sapiens
  CDR3 for alpha chain variable domain of TCR clone 368427 (TRAV25, TRAJ20)
CAVNDYKLSF

SEQ ID NO: 736854 - protein, 18 aa, Homo sapiens
  CDR3 for beta chain variable domain of TCR clone 368427 (TRBV20-1, TRBJ2-6)
CSAETTPTPGSGANVLTF

SEQ ID NO: 736855 - protein, 12 aa, Homo sapiens
  CDR3 for alpha chain variable domain of TCR clone 368428 (TRAV3, TRAJ6)
CAVRDGMGRRKL

SEQ ID NO: 736856 - protein, 15 aa, Homo sapiens
  CDR3 for beta chain variable domain of TCR clone 368428 (TRBV9, TRBJ2-1)
CASSLAGSSYNEQFF

SEQ ID NO: 736857 - protein, 15 aa, Homo sapiens
  CDR3 for alpha chain variable domain of TCR clone 368429 (TRAV3, TRAJ47)
CAVRDIGEYGNKLVF

SEQ ID NO: 736858 - protein, 14 aa, Homo sapiens
  CDR3 for beta chain variable domain of TCR clone 368429 (TRBV13, TRBJ2-5)
CASSLDRVGETQYF

SEQ ID NO: 736859 - protein, 12 aa, Homo sapiens
  CDR3 for alpha chain variable domain of TCR clone 368430 (TRAV12-2, TRAJ7)
CAVMRGNNRLVF

SEQ ID NO: 736860 - protein, 12 aa, Homo sapiens
  CDR3 for beta chain variable domain of TCR clone 368430 (TRBV7-8, TRBJ2-7)
CAISLGDREQYF

SEQ ID NO: 736861 - protein, 17 aa, Homo sapiens
  CDR3 for alpha chain variable domain of TCR clone 368431 (TRAV26-1, TRAJ53)
CIVRGDDSGGSNYKLTF

SEQ ID NO: 736862 - protein, 15 aa, Homo sapiens
  CDR3 for beta chain variable domain of TCR clone 368431 (TRBV20-1, TRBJ2-7)
CSARVTAAYFYEQYF

SEQ ID NO: 736863 - protein, 17 aa, Homo sapiens
  CDR3 for alpha chain variable domain of TCR clone 368432 (TRAV29/DV5, TRAJ29)
CAASELLRGKHTSCLCK

SEQ ID NO: 736864 - protein, 15 aa, Homo sapiens
  CDR3 for beta chain variable domain of TCR clone 368432 (TRBV7-9, TRBJ1-5)
CASSQGHQPNQPRHF

SEQ ID NO: 736865 - protein, 13 aa, Homo sapiens
  CDR3 for alpha chain variable domain of TCR clone 368433 (TRAV21, TRAJ3)
CCEPYSSASKIIF

SEQ ID NO: 736866 - protein, 15 aa, Homo sapiens
  CDR3 for beta chain variable domain of TCR clone 368433 (TRBV7-3, TRBJ2-1)
CASSPTGGGKVEQFF

SEQ ID NO: 736867 - protein, 13 aa, Homo sapiens
  CDR3 for alpha chain variable domain of TCR clone 368434 (TRAV23/DV6, TRAJ20)
CAAGGFHDYKLRF

SEQ ID NO: 736868 - protein, 14 aa, Homo sapiens
  CDR3 for beta chain variable domain of TCR clone 368434 (TRBV3-1, TRBJ2-7)
CASSQSGAHYEQYF

SEQ ID NO: 736869 - protein, 22 aa, Homo sapiens
  CDR3 for alpha chain variable domain of TCR clone 368435 (TRAV12-2, TRAJ23)
SPVIQPPTSVPWGVNQGGKLIF

SEQ ID NO: 736870 - protein, 15 aa, Homo sapiens
  CDR3 for beta chain variable domain of TCR clone 368435 (TRBV20-1, TRBJ2-3)
CSASSGGPRTDTQYF

SEQ ID NO: 736871 - protein, 16 aa, Homo sapiens
  CDR3 for alpha chain variable domain of TCR clone 368436 (TRAV4, TRAJ18)
CCVLLIGGATLGRLYF

SEQ ID NO: 736872 - protein, 12 aa, Homo sapiens
  CDR3 for beta chain variable domain of TCR clone 368436 (TRBV6-3, TRBJ2-7)
CASSLTPYEQYF

SEQ ID NO: 736873 - protein, 14 aa, Homo sapiens
  CDR3 for alpha chain variable domain of TCR clone 368437 (TRAV2, TRAJ37)
CAVDFTSNTGKLIF

SEQ ID NO: 736874 - protein, 13 aa, Homo sapiens
  CDR3 for beta chain variable domain of TCR clone 368437 (TRBV15, TRBJ2-5)
CATSQIGEETQYF

SEQ ID NO: 736875 - protein, 13 aa, Homo sapiens
  CDR3 for alpha chain variable domain of TCR clone 368438 (TRAV21, TRAJ27)
CAARPGNAGTSTF

SEQ ID NO: 736876 - protein, 15 aa, Homo sapiens
  CDR3 for beta chain variable domain of TCR clone 368438 (TRBV6-3, TRBJ2-7)
CASSSPGTVFYEQYF

SEQ ID NO: 736877 - protein, 14 aa, Homo sapiens
  CDR3 for alpha chain variable domain of TCR clone 368439 (TRAV12-1, TRAJ17)
CVVNYKAAGNKLTF

SEQ ID NO: 736878 - protein, 15 aa, Homo sapiens
  CDR3 for beta chain variable domain of TCR clone 368439 (TRBV5-7, TRBJ2-2)
CASSLASSNTGELFF

SEQ ID NO: 736879 - protein, 14 aa, Homo sapiens
  CDR3 for alpha chain variable domain of TCR clone 368440 (TRAV26-1, TRAJ38)
CIAANAGNNRTLIW

SEQ ID NO: 736880 - protein, 13 aa, Homo sapiens
  CDR3 for beta chain variable domain of TCR clone 368440 (TRBV20-1, TRBJ1-1)
CSARGGGNTEAFF

SEQ ID NO: 736881 - protein, 13 aa, Homo sapiens
  CDR3 for alpha chain variable domain of TCR clone 368441 (TRAV27, TRAJ57)
CRSAQGGSEKLVF

SEQ ID NO: 736882 - protein, 14 aa, Homo sapiens
  CDR3 for beta chain variable domain of TCR clone 368441 (TRBV28, TRBJ2-3)
CASSWRGRADTQYF

SEQ ID NO: 736883 - protein, 11 aa, Homo sapiens
  CDR3 for alpha chain variable domain of TCR clone 368442 (TRAV21, TRAJ39)
CAADNAGNMLP

SEQ ID NO: 736884 - protein, 13 aa, Homo sapiens
  CDR3 for beta chain variable domain of TCR clone 368442 (TRBV12-4, TRBJ1-1)
CASSPGTGFEAFF

SEQ ID NO: 736885 - protein, 11 aa, Homo sapiens
  CDR3 for alpha chain variable domain of TCR clone 368443 (TRAV1-2, TRAJ20)
CVVSNDYKLSF

SEQ ID NO: 736886 - protein, 16 aa, Homo sapiens
  CDR3 for beta chain variable domain of TCR clone 368443 (TRBV29-1, TRBJ2-6)
CSVEDITYSGANVLTF

SEQ ID NO: 736887 - protein, 15 aa, Homo sapiens
  CDR3 for alpha chain variable domain of TCR clone 368444 (TRAV23/DV6, TRAJ30)
CVASSQESRDDKIIF

SEQ ID NO: 736888 - protein, 14 aa, Homo sapiens
  CDR3 for beta chain variable domain of TCR clone 368444 (TRBV25-1, TRBJ1-1)
CASTHLGGNTEAFF

SEQ ID NO: 736889 - protein, 16 aa, Homo sapiens
  CDR3 for alpha chain variable domain of TCR clone 368445 (TRAV12-3, TRAJ53)
CAMSPGCGGSNYKLTF

SEQ ID NO: 736890 - protein, 17 aa, Homo sapiens
  CDR3 for beta chain variable domain of TCR clone 368445 (TRBV28, TRBJ2-5)
CASSTPEGDALQETQYF

SEQ ID NO: 736891 - protein, 13 aa, Homo sapiens
  CDR3 for alpha chain variable domain of TCR clone 368446 (TRAV8-2, TRAJ49)
CVVSPSTGNQFYF

SEQ ID NO: 736892 - protein, 12 aa, Homo sapiens
  CDR3 for beta chain variable domain of TCR clone 368446 (TRBV7-2, TRBJ2-5)
CASSQYQETQYF

SEQ ID NO: 736893 - protein, 13 aa, Homo sapiens
  CDR3 for alpha chain variable domain of TCR clone 368447 (TRAV3, TRAJ21)
CAVREPDFNKFYF

SEQ ID NO: 736894 - protein, 15 aa, Homo sapiens
  CDR3 for beta chain variable domain of TCR clone 368447 (TRBV4-3, TRBJ2-2)
CASSQGRGGTGELFF

SEQ ID NO: 736895 - protein, 13 aa, Homo sapiens
  CDR3 for alpha chain variable domain of TCR clone 368448 (TRAV8-3, TRAJ28)
CAVGAVGSYQLTF

SEQ ID NO: 736896 - protein, 15 aa, Homo sapiens
  CDR3 for beta chain variable domain of TCR clone 368448 (TRBV2, TRBJ2-5)
CASSEQGLIGETQYF

SEQ ID NO: 736897 - protein, 13 aa, Homo sapiens
  CDR3 for alpha chain variable domain of TCR clone 368449 (TRAV22, TRAJ29)
CAVGGSGNTPLVF

SEQ ID NO: 736898 - protein, 11 aa, Homo sapiens
  CDR3 for beta chain variable domain of TCR clone 368449 (TRBV12-4, TRBJ2-3)
CASTATDTQYF

SEQ ID NO: 736899 - protein, 14 aa, Homo sapiens
  CDR3 for alpha chain variable domain of TCR clone 368450 (TRAV17, TRAJ38)
CATGIAGNNRKLIW

SEQ ID NO: 736900 - protein, 16 aa, Homo sapiens
  CDR3 for beta chain variable domain of TCR clone 368450 (TRBV19, TRBJ2-3)
CASSPGAASRTDTQYF

SEQ ID NO: 736901 - protein, 12 aa, Homo sapiens
  CDR3 for alpha chain variable domain of TCR clone 368451 (TRAV12-2, TRAJ43)
CAVNVNSNDMRF

SEQ ID NO: 736902 - protein, 14 aa, Homo sapiens
  CDR3 for beta chain variable domain of TCR clone 368451 (TRBV7-2, TRBJ2-7)
CASSFLGRVYEQYF

SEQ ID NO: 736903 - protein, 13 aa, Homo sapiens
  CDR3 for alpha chain variable domain of TCR clone 368452 (TRAV27, TRAJ6)
CAGGTRGSYIPTF

SEQ ID NO: 736904 - protein, 14 aa, Homo sapiens
  CDR3 for beta chain variable domain of TCR clone 368452 (TRBV12-4, TRBJ1-6)
CASNLQGKGSPLHF

SEQ ID NO: 736905 - protein, 13 aa, Homo sapiens
  CDR3 for alpha chain variable domain of TCR clone 368453 (TRAV29/DV5, TRAJ29)
CAASAAGNTPLVF

SEQ ID NO: 736906 - protein, 13 aa, Homo sapiens
  CDR3 for beta chain variable domain of TCR clone 368453 (TRBV7-9, TRBJ1-2)
CASSLKQNYGYTF

SEQ ID NO: 736907 - protein, 15 aa, Homo sapiens
  CDR3 for alpha chain variable domain of TCR clone 368454 (TRAV12-3, TRAJ6)
CAMSASSGGSYIPTF

SEQ ID NO: 736908 - protein, 11 aa, Homo sapiens
  CDR3 for beta chain variable domain of TCR clone 368454 (TRBV20-1, TRBJ1-5)
CSAQGDQPQHF

SEQ ID NO: 736909 - protein, 14 aa, Homo sapiens
  CDR3 for alpha chain variable domain of TCR clone 368455 (TRAV12-2, TRAJ13)
CAVKNTGGYQKVTF

SEQ ID NO: 736910 - protein, 15 aa, Homo sapiens
  CDR3 for beta chain variable domain of TCR clone 368455 (TRBV19, TRBJ1-6)
CASSTQGAVGSPLHF

SEQ ID NO: 736911 - protein, 14 aa, Homo sapiens
  CDR3 for alpha chain variable domain of TCR clone 368456 (TRAV23/DV6, TRAJ8)
CAASKNTGFQKLVF

SEQ ID NO: 736912 - protein, 16 aa, Homo sapiens
  CDR3 for beta chain variable domain of TCR clone 368456 (TRBV4-1, TRBJ2-6)
CASSEVGDPGANVLTF

SEQ ID NO: 736913 - protein, 14 aa, Homo sapiens
  CDR3 for alpha chain variable domain of TCR clone 368457 (TRAV2, TRAJ37)
CAVDFTSDTGKLIF

SEQ ID NO: 736914 - protein, 15 aa, Homo sapiens
  CDR3 for beta chain variable domain of TCR clone 368457 (TRBV28, TRBJ2-4)
CAAGSGTLLMGIQYF

SEQ ID NO: 736915 - protein, 14 aa, Homo sapiens
  CDR3 for alpha chain variable domain of TCR clone 368458 (TRAV12-3, TRAJ33)
CAMSAGDSNYQLIW

SEQ ID NO: 736916 - protein, 15 aa, Homo sapiens
  CDR3 for beta chain variable domain of TCR clone 368458 (TRBV11-3, TRBJ2-3)
CASLKDGREGDTQYF

SEQ ID NO: 736917 - protein, 15 aa, Homo sapiens
  CDR3 for alpha chain variable domain of TCR clone 368459 (TRAV3, TRAJ20)
CAVRDIKLSDYKLSF

SEQ ID NO: 736918 - protein, 13 aa, Homo sapiens
  CDR3 for beta chain variable domain of TCR clone 368459 (TRBV7-2, TRBJ1-4)
CASSLAGLEKLFF

SEQ ID NO: 736919 - protein, 15 aa, Homo sapiens
  CDR3 for alpha chain variable domain of TCR clone 368460 (TRAV12-3, TRAJ6)
CAMSATTGGSYIPTF

SEQ ID NO: 736920 - protein, 13 aa, Homo sapiens
  CDR3 for beta chain variable domain of TCR clone 368460 (TRBV12-4, TRBJ1-5)
CASSSRSYQPQHF

SEQ ID NO: 736921 - protein, 14 aa, Homo sapiens
  CDR3 for alpha chain variable domain of TCR clone 368461 (TRAV8-3, TRAJ4)
CAVGAAGGYYKLIF

SEQ ID NO: 736922 - protein, 14 aa, Homo sapiens
  CDR3 for beta chain variable domain of TCR clone 368461 (TRBV6-5, TRBJ2-1)
CQQLRCGAGNEQFF

SEQ ID NO: 736923 - protein, 15 aa, Homo sapiens
  CDR3 for alpha chain variable domain of TCR clone 368462 (TRAV4, TRAJ39)
SLVGPNNNAGNMLTF

SEQ ID NO: 736924 - protein, 16 aa, Homo sapiens
  CDR3 for beta chain variable domain of TCR clone 368462 (TRBV13, TRBJ2-2)
CASSPRTGEHTGELFF

SEQ ID NO: 736925 - protein, 14 aa, Homo sapiens
  CDR3 for alpha chain variable domain of TCR clone 368463 (TRAV1-2, TRAJ33)
CAVRAPDSNYQLIW

SEQ ID NO: 736926 - protein, 17 aa, Homo sapiens
  CDR3 for beta chain variable domain of TCR clone 368463 (TRBV20-1, TRBJ2-2)
CSASGSGQGGLTGELFF

SEQ ID NO: 736927 - protein, 15 aa, Homo sapiens
  CDR3 for alpha chain variable domain of TCR clone 368464 (TRAV3, TRAJ22)
CAVRDRGGSARQLTF

SEQ ID NO: 736928 - protein, 13 aa, Homo sapiens
  CDR3 for beta chain variable domain of TCR clone 368464 (TRBV2, TRBJ1-5)
CATAGPRNQPQHF

SEQ ID NO: 736929 - protein, 15 aa, Homo sapiens
  CDR3 for alpha chain variable domain of TCR clone 368465 (TRAV8-6, TRAJ6)
CAVRDASGGSYIPTF

SEQ ID NO: 736930 - protein, 13 aa, Homo sapiens
  CDR3 for beta chain variable domain of TCR clone 368465 (TRBV2, TRBJ2-2)
CASRAWRTVELFF

SEQ ID NO: 736931 - protein, 15 aa, Homo sapiens
  CDR3 for alpha chain variable domain of TCR clone 368466 (TRAV12-3, TRAJ6)
CAMSATTGGSYIPTF

SEQ ID NO: 736932 - protein, 13 aa, Homo sapiens
  CDR3 for beta chain variable domain of TCR clone 368466 (TRBV12-4, TRBJ1-2)
CASSSGLTVISTF

SEQ ID NO: 736933 - protein, 14 aa, Homo sapiens
  CDR3 for alpha chain variable domain of TCR clone 368467 (TRAV13-1, TRAJ9)
CAASALTGGFNTIF

SEQ ID NO: 736934 - protein, 16 aa, Homo sapiens
  CDR3 for beta chain variable domain of TCR clone 368467 (TRBV7-8, TRBJ2-4)
CASSAERTLAKNIQYF

SEQ ID NO: 736935 - protein, 12 aa, Homo sapiens
  CDR3 for alpha chain variable domain of TCR clone 368468 (TRAV21, TRAJ37)
CAVRGNTGKLIF

SEQ ID NO: 736936 - protein, 16 aa, Homo sapiens
  CDR3 for beta chain variable domain of TCR clone 368468 (TRBV27, TRBJ2-5)
CASSYGPGGQKETQYF

SEQ ID NO: 736937 - protein, 15 aa, Homo sapiens
  CDR3 for alpha chain variable domain of TCR clone 368469 (TRAV17, TRAJ56)
CATEPFTGANSELTF

SEQ ID NO: 736938 - protein, 15 aa, Homo sapiens
  CDR3 for beta chain variable domain of TCR clone 368469 (TRBV28, TRBJ1-5)
CASSRTGGYVQPQRF

SEQ ID NO: 736939 - protein, 16 aa, Homo sapiens
  CDR3 for alpha chain variable domain of TCR clone 368470 (TRAV8-2, TRAJ48)
CVVRDVSNFGNEKLTF

SEQ ID NO: 736940 - protein, 15 aa, Homo sapiens
  CDR3 for beta chain variable domain of TCR clone 368470 (TRBV11-3, TRBJ2-3)
CASLKDGREGDTQYF

SEQ ID NO: 736941 - protein, 16 aa, Homo sapiens
  CDR3 for alpha chain variable domain of TCR clone 368471 (TRAV13-2, TRAJ32)
CAENMNYCGATNKLIF

SEQ ID NO: 736942 - protein, 14 aa, Homo sapiens
  CDR3 for beta chain variable domain of TCR clone 368471 (TRBV15, TRBJ2-5)
CATSSTGYQETQYF

SEQ ID NO: 736943 - protein, 13 aa, Homo sapiens
  CDR3 for alpha chain variable domain of TCR clone 368472 (TRAV12-1, TRAJ22)
CVASGGSARQRTF

SEQ ID NO: 736944 - protein, 12 aa, Homo sapiens
  CDR3 for beta chain variable domain of TCR clone 368472 (TRBV29-1, TRBJ2-3)
CSVTGGADTQYF

SEQ ID NO: 736945 - protein, 13 aa, Homo sapiens
  CDR3 for alpha chain variable domain of TCR clone 368473 (TRAV13-1, TRAJ37)
CAAVSGNTGKLIF

SEQ ID NO: 736946 - protein, 17 aa, Homo sapiens
  CDR3 for beta chain variable domain of TCR clone 368473 (TRBV10-2, TRBJ1-6)
CASSENRGSSYNSTLDF

SEQ ID NO: 736947 - protein, 14 aa, Homo sapiens
  CDR3 for alpha chain variable domain of TCR clone 368474 (TRAV1-2, TRAJ8)
CAVREDTGFQKLVF

SEQ ID NO: 736948 - protein, 15 aa, Homo sapiens
  CDR3 for beta chain variable domain of TCR clone 368474 (TRBV5-5, TRBJ1-5)
CASRSTPGSNQPQHF

SEQ ID NO: 736949 - protein, 17 aa, Homo sapiens
  CDR3 for alpha chain variable domain of TCR clone 368475 (TRAV3, TRAJ6)
CAVRDGPRAGGGYIPPF

SEQ ID NO: 736950 - protein, 20 aa, Homo sapiens
  CDR3 for beta chain variable domain of TCR clone 368475 (TRBV28, TRBJ2-1)
CASTPIGRSPGLAGGNEQFF

SEQ ID NO: 736951 - protein, 12 aa, Homo sapiens
  CDR3 for alpha chain variable domain of TCR clone 368476 (TRAV13-1, TRAJ22)
CVPRGFCKATDL

SEQ ID NO: 736952 - protein, 16 aa, Homo sapiens
  CDR3 for beta chain variable domain of TCR clone 368476 (TRBV7-9, TRBJ1-2)
CASSLGFSSGEDGYTF

SEQ ID NO: 736953 - protein, 13 aa, Homo sapiens
  CDR3 for alpha chain variable domain of TCR clone 368477 (TRAV21, TRAJ29)
CAVRSSGNTPLVF

SEQ ID NO: 736954 - protein, 13 aa, Homo sapiens
  CDR3 for beta chain variable domain of TCR clone 368477 (TRBV7-9, TRBJ1-2)
CASSLKQNYGYTF

SEQ ID NO: 736955 - protein, 12 aa, Homo sapiens
  CDR3 for alpha chain variable domain of TCR clone 368478 (TRAV13-2, TRAJ23)
CAERHRGGKLIF

SEQ ID NO: 736956 - protein, 16 aa, Homo sapiens
  CDR3 for beta chain variable domain of TCR clone 368478 (TRBV20-1, TRBJ1-4)
CSAPGQGLLINEKLFF

SEQ ID NO: 736957 - protein, 10 aa, Homo sapiens
  CDR3 for alpha chain variable domain of TCR clone 368479 (TRAV12-3, TRAJ34)
CAMSADKLIF

SEQ ID NO: 736958 - protein, 14 aa, Homo sapiens
  CDR3 for beta chain variable domain of TCR clone 368479 (TRBV19, TRBJ2-1)
CARGARSFQWEQFF

SEQ ID NO: 736959 - protein, 16 aa, Homo sapiens
  CDR3 for alpha chain variable domain of TCR clone 368480 (TRAV21, TRAJ52)
CAVTNAGGTSYGKLTF

SEQ ID NO: 736960 - protein, 13 aa, Homo sapiens
  CDR3 for beta chain variable domain of TCR clone 368480 (TRBV13, TRBJ2-7)
CASSLERGWKKHF

SEQ ID NO: 736961 - protein, 15 aa, Homo sapiens
  CDR3 for alpha chain variable domain of TCR clone 368481 (TRAV25, TRAJ10)
CAGPLLTGGGNKLTF

SEQ ID NO: 736962 - protein, 15 aa, Homo sapiens
  CDR3 for beta chain variable domain of TCR clone 368481 (TRBV12-5, TRBJ2-2)
CASGRLGGNTGELVF

SEQ ID NO: 736963 - protein, 12 aa, Homo sapiens
  CDR3 for alpha chain variable domain of TCR clone 368482 (TRAV12-3, TRAJ40)
CAMSTGTYKYIF

SEQ ID NO: 736964 - protein, 13 aa, Homo sapiens
  CDR3 for beta chain variable domain of TCR clone 368482 (TRBV4-1, TRBJ1-1)
CASSRKMNTEAFF

SEQ ID NO: 736965 - protein, 16 aa, Homo sapiens
  CDR3 for alpha chain variable domain of TCR clone 368483 (TRAV3, TRAJ10)
CAVRDMRAGGGNKLTF

SEQ ID NO: 736966 - protein, 15 aa, Homo sapiens
  CDR3 for beta chain variable domain of TCR clone 368483 (TRBV11-2, TRBJ1-6)
CATTGFGTAVSPLHF

SEQ ID NO: 736967 - protein, 19 aa, Homo sapiens
  CDR3 for alpha chain variable domain of TCR clone 368484 (TRAV17, TRAJ40)
TASRAADTASYFRASKYIF

SEQ ID NO: 736968 - protein, 17 aa, Homo sapiens
  CDR3 for beta chain variable domain of TCR clone 368484 (TRBV11-2, TRBJ2-4)
CASSFLALGGAGDIQYF

SEQ ID NO: 736969 - protein, 11 aa, Homo sapiens
  CDR3 for alpha chain variable domain of TCR clone 368485 (TRAV1-1, TRAJ23)
CAFRQGGRLIF

SEQ ID NO: 736970 - protein, 20 aa, Homo sapiens
  CDR3 for beta chain variable domain of TCR clone 368485 (TRBV7-8, TRBJ2-2)
CASSHLFPGPTIHITGELFF

SEQ ID NO: 736971 - protein, 12 aa, Homo sapiens
  CDR3 for alpha chain variable domain of TCR clone 368486 (TRAV13-1, TRAJ21)
CAAKEGFTKFYF

SEQ ID NO: 736972 - protein, 15 aa, Homo sapiens
  CDR3 for beta chain variable domain of TCR clone 368486 (TRBV2, TRBJ2-1)
CASSELARSYNEHFF

SEQ ID NO: 736973 - protein, 15 aa, Homo sapiens
  CDR3 for alpha chain variable domain of TCR clone 368487 (TRAV23/DV6, TRAJ38)
CAARSNAGNNRNLIV

SEQ ID NO: 736974 - protein, 16 aa, Homo sapiens
  CDR3 for beta chain variable domain of TCR clone 368487 (TRBV10-2, TRBJ1-5)
CASSRDRDYSNQTQHF

SEQ ID NO: 736975 - protein, 14 aa, Homo sapiens
  CDR3 for alpha chain variable domain of TCR clone 368488 (TRAV12-2, TRAJ40)
CAVKIPSGTYKYIF

SEQ ID NO: 736976 - protein, 17 aa, Homo sapiens
  CDR3 for beta chain variable domain of TCR clone 368488 (TRBV13, TRBJ2-3)
CASSLSMVAGGRNTQYF

SEQ ID NO: 736977 - protein, 16 aa, Homo sapiens
  CDR3 for alpha chain variable domain of TCR clone 368489 (TRAV8-3, TRAJ44)
CAVGPLNTGTASKLTF

SEQ ID NO: 736978 - protein, 15 aa, Homo sapiens
  CDR3 for beta chain variable domain of TCR clone 368489 (TRBV9, TRBJ2-7)
CASSPTGTSGYEQYF

SEQ ID NO: 736979 - protein, 14 aa, Homo sapiens
  CDR3 for alpha chain variable domain of TCR clone 368490 (TRAV12-2, TRAJ17)
CAALFKAAGNKLTF

SEQ ID NO: 736980 - protein, 15 aa, Homo sapiens
  CDR3 for beta chain variable domain of TCR clone 368490 (TRBV19, TRBJ1-5)
CASSIVWADNQPQHF

SEQ ID NO: 736981 - protein, 14 aa, Homo sapiens
  CDR3 for alpha chain variable domain of TCR clone 368491 (TRAV27, TRAJ45)
CVGGGGGGADGLTF

SEQ ID NO: 736982 - protein, 13 aa, Homo sapiens
  CDR3 for beta chain variable domain of TCR clone 368491 (TRBV20-1, TRBJ1-1)
CSAPEGGNTEAFF

SEQ ID NO: 736983 - protein, 17 aa, Homo sapiens
  CDR3 for alpha chain variable domain of TCR clone 368492 (TRAV17, TRAJ52)
CATESPSGGTSYGKLTF

SEQ ID NO: 736984 - protein, 13 aa, Homo sapiens
  CDR3 for beta chain variable domain of TCR clone 368492 (TRBV7-9, TRBJ1-2)
CASSLKQNYGYTF

SEQ ID NO: 736985 - protein, 14 aa, Homo sapiens
  CDR3 for alpha chain variable domain of TCR clone 368493 (TRAV8-3, TRAJ9)
CAVVYNTGGFKTSF

SEQ ID NO: 736986 - protein, 14 aa, Homo sapiens
  CDR3 for beta chain variable domain of TCR clone 368493 (TRBV7-3, TRBJ2-2)
CASSSGGYTGELFF

SEQ ID NO: 736987 - protein, 13 aa, Homo sapiens
  CDR3 for alpha chain variable domain of TCR clone 368494 (TRAV16, TRAJ27)
CALSGGNAGKSTF

SEQ ID NO: 736988 - protein, 14 aa, Homo sapiens
  CDR3 for beta chain variable domain of TCR clone 368494 (TRBV3-1, TRBJ2-5)
CASSQGPDQETQYF

SEQ ID NO: 736989 - protein, 13 aa, Homo sapiens
  CDR3 for alpha chain variable domain of TCR clone 368495 (TRAV2, TRAJ40)
CAVVTSGTYKYIF

SEQ ID NO: 736990 - protein, 13 aa, Homo sapiens
  CDR3 for beta chain variable domain of TCR clone 368495 (TRBV19, TRBJ2-1)
CQSDFRFEREHFF

SEQ ID NO: 736991 - protein, 16 aa, Homo sapiens
  CDR3 for alpha chain variable domain of TCR clone 368496 (TRAV13-1, TRAJ37)
CASSSLGSSNTGKLIF

SEQ ID NO: 736992 - protein, 12 aa, Homo sapiens
  CDR3 for beta chain variable domain of TCR clone 368496 (TRBV6-1, TRBJ2-5)
CASSEGRETQYF

SEQ ID NO: 736993 - protein, 14 aa, Homo sapiens
  CDR3 for alpha chain variable domain of TCR clone 368497 (TRAV17, TRAJ31)
CATVLRNNNAGLMF

SEQ ID NO: 736994 - protein, 14 aa, Homo sapiens
  CDR3 for beta chain variable domain of TCR clone 368497 (TRBV12-4, TRBJ2-5)
CASSLWQKQETQYF

SEQ ID NO: 736995 - protein, 10 aa, Homo sapiens
  CDR3 for alpha chain variable domain of TCR clone 368498 (TRAV39, TRAJ49)
CAVAGNQFSF

SEQ ID NO: 736996 - protein, 14 aa, Homo sapiens
  CDR3 for beta chain variable domain of TCR clone 368498 (TRBV7-8, TRBJ2-7)
CASSPRDRVYEQYF

SEQ ID NO: 736997 - protein, 14 aa, Homo sapiens
  CDR3 for alpha chain variable domain of TCR clone 368499 (TRAV1-2, TRAJ8)
CAVREDTGFQKLVF

SEQ ID NO: 736998 - protein, 13 aa, Homo sapiens
  CDR3 for beta chain variable domain of TCR clone 368499 (TRBV4-2, TRBJ1-1)
CASSQDGNTEAFF

SEQ ID NO: 736999 - protein, 10 aa, Homo sapiens
  CDR3 for alpha chain variable domain of TCR clone 368500 (TRAV38-2/DV8, TRAJ40)
CASGTYKYIF

SEQ ID NO: 737000 - protein, 16 aa, Homo sapiens
  CDR3 for beta chain variable domain of TCR clone 368500 (TRBV29-1, TRBJ1-2)
CSVEANRDIANYGYTF

SEQ ID NO: 737001 - protein, 15 aa, Homo sapiens
  CDR3 for alpha chain variable domain of TCR clone 368501 (TRAV26-1, TRAJ39)
CIVRVVGDAGNMLTF

SEQ ID NO: 737002 - protein, 17 aa, Homo sapiens
  CDR3 for beta chain variable domain of TCR clone 368501 (TRBV13, TRBJ2-3)
CASSLSRVAGGRNTQYV

SEQ ID NO: 737003 - protein, 15 aa, Homo sapiens
  CDR3 for alpha chain variable domain of TCR clone 368502 (TRAV21, TRAJ53)
CATLNSGGSNYKLTF

SEQ ID NO: 737004 - protein, 14 aa, Homo sapiens
  CDR3 for beta chain variable domain of TCR clone 368502 (TRBV28, TRBJ2-7)
CASTFYGRAHEQYF

SEQ ID NO: 737005 - protein, 14 aa, Homo sapiens
  CDR3 for alpha chain variable domain of TCR clone 368503 (TRAV8-4, TRAJ12)
CAVSPMDSSYKLIF

SEQ ID NO: 737006 - protein, 15 aa, Homo sapiens
  CDR3 for beta chain variable domain of TCR clone 368503 (TRBV5-5, TRBJ2-1)
CASSPEAETYNEQFC

SEQ ID NO: 737007 - protein, 14 aa, Homo sapiens
  CDR3 for alpha chain variable domain of TCR clone 368504 (TRAV3, TRAJ6)
CAVIDPWGSYIPTF

SEQ ID NO: 737008 - protein, 15 aa, Homo sapiens
  CDR3 for beta chain variable domain of TCR clone 368504 (TRBV19, TRBJ1-6)
CASSTQGAVGSPLHF

SEQ ID NO: 737009 - protein, 14 aa, Homo sapiens
  CDR3 for alpha chain variable domain of TCR clone 368505 (TRAV39, TRAJ33)
CALDIKNSNYQLIW

SEQ ID NO: 737010 - protein, 13 aa, Homo sapiens
  CDR3 for beta chain variable domain of TCR clone 368505 (TRBV4-2, TRBJ2-1)
CASSPGTYNEQFF

SEQ ID NO: 737011 - protein, 12 aa, Homo sapiens
  CDR3 for alpha chain variable domain of TCR clone 368506 (TRAV1-1, TRAJ43)
CAPSVSSNDMRF

SEQ ID NO: 737012 - protein, 14 aa, Homo sapiens
  CDR3 for beta chain variable domain of TCR clone 368506 (TRBV6-1, TRBJ1-3)
CASVQGGGGNTIYF

SEQ ID NO: 737013 - protein, 14 aa, Homo sapiens
  CDR3 for alpha chain variable domain of TCR clone 368507 (TRAV12-3, TRAJ10)
SHLPLTGGGNKLTF

SEQ ID NO: 737014 - protein, 13 aa, Homo sapiens
  CDR3 for beta chain variable domain of TCR clone 368507 (TRBV20-1, TRBJ1-6)
CSAPLGVGSPLLF

SEQ ID NO: 737015 - protein, 14 aa, Homo sapiens
  CDR3 for alpha chain variable domain of TCR clone 368508 (TRAV1-2, TRAJ8)
CAVREDTGFQKLVF

SEQ ID NO: 737016 - protein, 16 aa, Homo sapiens
  CDR3 for beta chain variable domain of TCR clone 368508 (TRBV5-1, TRBJ2-5)
CASSLSLAGAQETQYF

SEQ ID NO: 737017 - protein, 11 aa, Homo sapiens
  CDR3 for alpha chain variable domain of TCR clone 368509 (TRAV1-2, TRAJ40)
CAVQGAYKYIF

SEQ ID NO: 737018 - protein, 16 aa, Homo sapiens
  CDR3 for beta chain variable domain of TCR clone 368509 (TRBV29-1, TRBJ2-7)
CSVEVVGTSGSYEQYF

SEQ ID NO: 737019 - protein, 13 aa, Homo sapiens
  CDR3 for alpha chain variable domain of TCR clone 368510 (TRAV1-1, TRAJ33)
CASHMDSNYQLIW

SEQ ID NO: 737020 - protein, 18 aa, Homo sapiens
  CDR3 for beta chain variable domain of TCR clone 368510 (TRBV20-1, TRBJ2-2)
CSARVQTARPSGNGELFF

SEQ ID NO: 737021 - protein, 18 aa, Homo sapiens
  CDR3 for alpha chain variable domain of TCR clone 368511 (TRAV21, TRAJ52)
CAVRPSPAGGTSYGKRTF

SEQ ID NO: 737022 - protein, 17 aa, Homo sapiens
  CDR3 for beta chain variable domain of TCR clone 368511 (TRBV13, TRBJ2-3)
CASGLSRVAGGRNTQYF

SEQ ID NO: 737023 - protein, 18 aa, Homo sapiens
  CDR3 for alpha chain variable domain of TCR clone 368512 (TRAV29/DV5, TRAJ52)
CAAGFRGAGGTSYGKLTF

SEQ ID NO: 737024 - protein, 13 aa, Homo sapiens
  CDR3 for beta chain variable domain of TCR clone 368512 (TRBV11-3, TRBJ2-7)
CASSLDKLYEQYF

SEQ ID NO: 737025 - protein, 14 aa, Homo sapiens
  CDR3 for alpha chain variable domain of TCR clone 368513 (TRAV8-3, TRAJ7)
CAVGANYGNNRLAF

SEQ ID NO: 737026 - protein, 13 aa, Homo sapiens
  CDR3 for beta chain variable domain of TCR clone 368513 (TRBV4-1, TRBJ1-1)
CASSQLGTGEAFF

SEQ ID NO: 737027 - protein, 15 aa, Homo sapiens
  CDR3 for alpha chain variable domain of TCR clone 368514 (TRAV8-2, TRAJ42)
CVVSSYGGSQGNLIF

SEQ ID NO: 737028 - protein, 17 aa, Homo sapiens
  CDR3 for beta chain variable domain of TCR clone 368514 (TRBV2, TRBJ2-6)
CASSLQGRSSGANVLTF

SEQ ID NO: 737029 - protein, 18 aa, Homo sapiens
  CDR3 for alpha chain variable domain of TCR clone 368515 (TRAV12-1, TRAJ52)
CVVKLINAGGTSYGKLTF

SEQ ID NO: 737030 - protein, 14 aa, Homo sapiens
  CDR3 for beta chain variable domain of TCR clone 368515 (TRBV7-2, TRBJ2-7)
CASRSQGAAYEQYF

SEQ ID NO: 737031 - protein, 16 aa, Homo sapiens
  CDR3 for alpha chain variable domain of TCR clone 368516 (TRAV3, TRAJ37)
CAVRPHGCGNTGKLIF

SEQ ID NO: 737032 - protein, 17 aa, Homo sapiens
  CDR3 for beta chain variable domain of TCR clone 368516 (TRBV7-2, TRBJ2-7)
CASSFETSGSTSSTSGR

SEQ ID NO: 737033 - protein, 14 aa, Homo sapiens
  CDR3 for alpha chain variable domain of TCR clone 368517 (TRAV12-2, TRAJ13)
CAVKKTGGYQKVTF

SEQ ID NO: 737034 - protein, 17 aa, Homo sapiens
  CDR3 for beta chain variable domain of TCR clone 368517 (TRBV11-1, TRBJ1-2)
CASSLWVDTPMATPSVL

SEQ ID NO: 737035 - protein, 12 aa, Homo sapiens
  CDR3 for alpha chain variable domain of TCR clone 368518 (TRAV12-1, TRAJ40)
CVFYSGTDKYIF

SEQ ID NO: 737036 - protein, 18 aa, Homo sapiens
  CDR3 for beta chain variable domain of TCR clone 368518 (TRBV12-4, TRBJ2-2)
CASSLVAGTRGRTGELFF

SEQ ID NO: 737037 - protein, 16 aa, Homo sapiens
  CDR3 for alpha chain variable domain of TCR clone 368519 (TRAV30, TRAJ24)
CGTEIVDAASWGKFQF

SEQ ID NO: 737038 - protein, 15 aa, Homo sapiens
  CDR3 for beta chain variable domain of TCR clone 368519 (TRBV5-1, TRBJ1-1)
CASSSTTGTNTEAFF

SEQ ID NO: 737039 - protein, 13 aa, Homo sapiens
  CDR3 for alpha chain variable domain of TCR clone 368520 (TRAV8-1, TRAJ23)
CAWRDNQGGKLIF

SEQ ID NO: 737040 - protein, 13 aa, Homo sapiens
  CDR3 for beta chain variable domain of TCR clone 368520 (TRBV10-3, TRBJ2-7)
CASKLAVNYEQYF

SEQ ID NO: 737041 - protein, 14 aa, Homo sapiens
  CDR3 for alpha chain variable domain of TCR clone 368521 (TRAV38-2/DV8, TRAJ23)
CAYRSQNQGGKLIF

SEQ ID NO: 737042 - protein, 14 aa, Homo sapiens
  CDR3 for beta chain variable domain of TCR clone 368521 (TRBV6-1, TRBJ1-3)
CASVQGGGGNTIYF

SEQ ID NO: 737043 - protein, 14 aa, Homo sapiens
  CDR3 for alpha chain variable domain of TCR clone 368522 (TRAV12-3, TRAJ9)
CAMSPNTGGSKTIF

SEQ ID NO: 737044 - protein, 15 aa, Homo sapiens
  CDR3 for beta chain variable domain of TCR clone 368522 (TRBV27, TRBJ2-5)
CASSLYPRGGETQYF

SEQ ID NO: 737045 - protein, 13 aa, Homo sapiens
  CDR3 for alpha chain variable domain of TCR clone 368523 (TRAV1-1, TRAJ7)
CAVSPLWEQQTRF

SEQ ID NO: 737046 - protein, 16 aa, Homo sapiens
  CDR3 for beta chain variable domain of TCR clone 368523 (TRBV9, TRBJ2-1)
CASSVGGGGNYNEQFF

SEQ ID NO: 737047 - protein, 14 aa, Homo sapiens
  CDR3 for alpha chain variable domain of TCR clone 368524 (TRAV38-2/DV8, TRAJ29)
CAYRSRSGNTPLVF

SEQ ID NO: 737048 - protein, 11 aa, Homo sapiens
  CDR3 for beta chain variable domain of TCR clone 368524 (TRBV7-9, TRBJ2-3)
CASSYTDTQYF

SEQ ID NO: 737049 - protein, 23 aa, Homo sapiens
  CDR3 for alpha chain variable domain of TCR clone 368525 (TRAV8-3, TRAJ36)
CAVVQLGQTTSSFGLERDSPLFP

SEQ ID NO: 737050 - protein, 15 aa, Homo sapiens
  CDR3 for beta chain variable domain of TCR clone 368525 (TRBV7-2, TRBJ1-2)
CASSPRAGWNYGYTF

SEQ ID NO: 737051 - protein, 13 aa, Homo sapiens
  CDR3 for alpha chain variable domain of TCR clone 368526 (TRAV23/DV6, TRAJ49)
CAANPNTGNQFYF

SEQ ID NO: 737052 - protein, 15 aa, Homo sapiens
  CDR3 for beta chain variable domain of TCR clone 368526 (TRBV11-2, TRBJ2-5)
CASSLPPGWSGTQYF

SEQ ID NO: 737053 - protein, 13 aa, Homo sapiens
  CDR3 for alpha chain variable domain of TCR clone 368527 (TRAV12-1, TRAJ36)
CGDAQTGANNLFF

SEQ ID NO: 737054 - protein, 15 aa, Homo sapiens
  CDR3 for beta chain variable domain of TCR clone 368527 (TRBV5-1, TRBJ2-1)
CASSPPRAPYNEQFF

SEQ ID NO: 737055 - protein, 14 aa, Homo sapiens
  CDR3 for alpha chain variable domain of TCR clone 368528 (TRAV13-1, TRAJ35)
CSASKGCFGNVLHC

SEQ ID NO: 737056 - protein, 13 aa, Homo sapiens
  CDR3 for beta chain variable domain of TCR clone 368528 (TRBV7-3, TRBJ1-1)
CASSQDWGAEAFF

SEQ ID NO: 737057 - protein, 14 aa, Homo sapiens
  CDR3 for alpha chain variable domain of TCR clone 368529 (TRAV3, TRAJ16)
CAVSGFSDGQKLLF

SEQ ID NO: 737058 - protein, 14 aa, Homo sapiens
  CDR3 for beta chain variable domain of TCR clone 368529 (TRBV19, TRBJ2-2)
CASSGQGIAGELFF

SEQ ID NO: 737059 - protein, 18 aa, Homo sapiens
  CDR3 for alpha chain variable domain of TCR clone 368530 (TRAV29/DV5, TRAJ45)
CSVLLCSKLRGGADGLTF

SEQ ID NO: 737060 - protein, 11 aa, Homo sapiens
  CDR3 for beta chain variable domain of TCR clone 368530 (TRBV11-2, TRBJ2-2)
CASSLPGELFF

SEQ ID NO: 737061 - protein, 14 aa, Homo sapiens
  CDR3 for alpha chain variable domain of TCR clone 368531 (TRAV17, TRAJ40)
CATALSSGTYKYIF

SEQ ID NO: 737062 - protein, 13 aa, Homo sapiens
  CDR3 for beta chain variable domain of TCR clone 368531 (TRBV27, TRBJ2-1)
CASSSGSYNEQFF

SEQ ID NO: 737063 - protein, 14 aa, Homo sapiens
  CDR3 for alpha chain variable domain of TCR clone 368532 (TRAV13-1, TRAJ40)
CAASMTSGTYKYIF

SEQ ID NO: 737064 - protein, 12 aa, Homo sapiens
  CDR3 for beta chain variable domain of TCR clone 368532 (TRBV7-9, TRBJ2-7)
CASSFGSYEQYF

SEQ ID NO: 737065 - protein, 14 aa, Homo sapiens
  CDR3 for alpha chain variable domain of TCR clone 368533 (TRAV25, TRAJ35)
CARRMEGVGNVLHC

SEQ ID NO: 737066 - protein, 13 aa, Homo sapiens
  CDR3 for beta chain variable domain of TCR clone 368533 (TRBV7-2, TRAJ28)
CASSLAGLEKLFF

SEQ ID NO: 737067 - protein, 10 aa, Homo sapiens
  CDR3 for alpha chain variable domain of TCR clone 368534 (TRAV30, TRAJ16)
CGTGGQKLLF

SEQ ID NO: 737068 - protein, 15 aa, Homo sapiens
  CDR3 for beta chain variable domain of TCR clone 368534 (TRBV6-3, TRBJ2-7)
CASSSPGTVFYEQYF

SEQ ID NO: 737069 - protein, 14 aa, Homo sapiens
  CDR3 for alpha chain variable domain of TCR clone 368535 (TRAV12-1, TRAJ23)
CVVNIPNQGGKLIF

SEQ ID NO: 737070 - protein, 12 aa, Homo sapiens
  CDR3 for beta chain variable domain of TCR clone 368535 (TRBV14, TRBJ1-1)
CASSQLKGLAFF

SEQ ID NO: 737071 - protein, 13 aa, Homo sapiens
  CDR3 for alpha chain variable domain of TCR clone 368536 (TRAV21, TRAJ27)
CAARPGNAGKSTF

SEQ ID NO: 737072 - protein, 13 aa, Homo sapiens
  CDR3 for beta chain variable domain of TCR clone 368536 (TRBV13, TRBJ2-1)
CASILGGRGDQFF

SEQ ID NO: 737073 - protein, 13 aa, Homo sapiens
  CDR3 for alpha chain variable domain of TCR clone 368537 (TRAV12-3, TRAJ40)
CAMSARGTYKYTF

SEQ ID NO: 737074 - protein, 16 aa, Homo sapiens
  CDR3 for beta chain variable domain of TCR clone 368537 (TRBV20-1, TRBJ2-3)
CSGEAGLAGGQDTQYF

SEQ ID NO: 737075 - protein, 12 aa, Homo sapiens
  CDR3 for alpha chain variable domain of TCR clone 368538 (TRAV13-1, TRAJ43)
CAAGRFNNDMRF

SEQ ID NO: 737076 - protein, 13 aa, Homo sapiens
  CDR3 for beta chain variable domain of TCR clone 368538 (TRBV7-9, TRBJ1-2)
CASSLKQNYGYTF

SEQ ID NO: 737077 - protein, 15 aa, Homo sapiens
  CDR3 for alpha chain variable domain of TCR clone 368539 (TRAV12-2, TRAJ8)
CAVREENAGFQKLVF

SEQ ID NO: 737078 - protein, 16 aa, Homo sapiens
  CDR3 for beta chain variable domain of TCR clone 368539 (TRBV7-3, TRBJ2-2)
CASSLKRGTLSGELFF

SEQ ID NO: 737079 - protein, 14 aa, Homo sapiens
  CDR3 for alpha chain variable domain of TCR clone 368540 (TRAV13-1, TRAJ26)
CAAPKGPDGQNFGF

SEQ ID NO: 737080 - protein, 15 aa, Homo sapiens
  CDR3 for beta chain variable domain of TCR clone 368540 (TRBV28, TRBJ2-5)
CASSFRQGALETQYF

SEQ ID NO: 737081 - protein, 11 aa, Homo sapiens
  CDR3 for alpha chain variable domain of TCR clone 368541 (TRAV12-3, TRAJ20)
CAMSYDYKLSF

SEQ ID NO: 737082 - protein, 14 aa, Homo sapiens
  CDR3 for beta chain variable domain of TCR clone 368541 (TRBV7-2, TRBJ2-7)
CASSPKTSFYEQYV

SEQ ID NO: 737083 - protein, 14 aa, Homo sapiens
  CDR3 for alpha chain variable domain of TCR clone 368542 (TRAV23/DV6, TRAJ40)
CAARKNSETYKYIF

SEQ ID NO: 737084 - protein, 14 aa, Homo sapiens
  CDR3 for beta chain variable domain of TCR clone 368542 (TRBV10-3, TRBJ2-5)
CAISERDYQETQYF

SEQ ID NO: 737085 - protein, 13 aa, Homo sapiens
  CDR3 for alpha chain variable domain of TCR clone 368543 (TRAV35, TRAJ57)
CAGSQGGSEKLVF

SEQ ID NO: 737086 - protein, 14 aa, Homo sapiens
  CDR3 for beta chain variable domain of TCR clone 368543 (TRBV25-1, TRBJ1-1)
CGSTHLGGNTEAFF

SEQ ID NO: 737087 - protein, 12 aa, Homo sapiens
  CDR3 for alpha chain variable domain of TCR clone 368544 (TRAV27, TRAJ41)
CAGRNSGYALNF

SEQ ID NO: 737088 - protein, 15 aa, Homo sapiens
  CDR3 for beta chain variable domain of TCR clone 368544 (TRBV20-1, TRBJ1-5)
CSATSDRGLAQPQHF

SEQ ID NO: 737089 - protein, 12 aa, Homo sapiens
  CDR3 for alpha chain variable domain of TCR clone 368545 (TRAV12-2, TRAJ8)
CAANTGLQKLVF

SEQ ID NO: 737090 - protein, 15 aa, Homo sapiens
  CDR3 for beta chain variable domain of TCR clone 368545 (TRBV7-8, TRBJ1-5)
CASSLERRGLEPQHF

SEQ ID NO: 737091 - protein, 18 aa, Homo sapiens
  CDR3 for alpha chain variable domain of TCR clone 368546 (TRAV21, TRAJ52)
CAVRPSPAGGTSYGKLTF

SEQ ID NO: 737092 - protein, 15 aa, Homo sapiens
  CDR3 for beta chain variable domain of TCR clone 368546 (TRBV6-3, TRBJ2-2)
CASSFLATLTGELFF

SEQ ID NO: 737093 - protein, 13 aa, Homo sapiens
  CDR3 for alpha chain variable domain of TCR clone 368547 (TRAV20, TRAJ20)
CAVQAGSGYKLSF

SEQ ID NO: 737094 - protein, 17 aa, Homo sapiens
  CDR3 for beta chain variable domain of TCR clone 368547 (TRBV7-8, TRBJ2-6)
CASSAGTGGAGANVLTF

SEQ ID NO: 737095 - protein, 12 aa, Homo sapiens
  CDR3 for alpha chain variable domain of TCR clone 368548 (TRAV12-3, TRAJ34)
CAMGYNTDKLIL

SEQ ID NO: 737096 - protein, 14 aa, Homo sapiens
  CDR3 for beta chain variable domain of TCR clone 368548 (TRBV4-1, TRBJ2-2)
CASSQAVNTGELFF

SEQ ID NO: 737097 - protein, 14 aa, Homo sapiens
  CDR3 for alpha chain variable domain of TCR clone 368549 (TRAV17, TRAJ22)
CATSPSGSARQLTF

SEQ ID NO: 737098 - protein, 14 aa, Homo sapiens
  CDR3 for beta chain variable domain of TCR clone 368549 (TRBV4-1, TRBJ2-5)
RQQQWDLYQETQYF

SEQ ID NO: 737099 - protein, 12 aa, Homo sapiens
  CDR3 for alpha chain variable domain of TCR clone 368550 (TRAV13-1, TRAJ21)
CAAKEGFNKFYF

SEQ ID NO: 737100 - protein, 16 aa, Homo sapiens
  CDR3 for beta chain variable domain of TCR clone 368550 (TRBV5-4, TRBJ2-3)
CASQRPGAGGADTQYF

SEQ ID NO: 737101 - protein, 14 aa, Homo sapiens
  CDR3 for alpha chain variable domain of TCR clone 368551 (TRAV8-4, TRAJ37)
CAVSESSNTGKLIF

SEQ ID NO: 737102 - protein, 13 aa, Homo sapiens
  CDR3 for beta chain variable domain of TCR clone 368551 (TRBV12-4, TRBJ1-1)
CASSFSEDTEAFF

SEQ ID NO: 737103 - protein, 13 aa, Homo sapiens
  CDR3 for alpha chain variable domain of TCR clone 368552 (TRAV8-3, TRAJ4)
CAVGAAGGYKLIF

SEQ ID NO: 737104 - protein, 10 aa, Homo sapiens
  CDR3 for beta chain variable domain of TCR clone 368552 (TRBV7-3, TRBJ2-1)
DSSSYNEQFF

SEQ ID NO: 737105 - protein, 14 aa, Homo sapiens
  CDR3 for alpha chain variable domain of TCR clone 368553 (TRAV12-2, TRAJ9)
CAVSFGTGGFKTIF

SEQ ID NO: 737106 - protein, 15 aa, Homo sapiens
  CDR3 for beta chain variable domain of TCR clone 368553 (TRBV2, TRBJ2-1)
CASSKLAGSYNEQFF

SEQ ID NO: 737107 - protein, 15 aa, Homo sapiens
  CDR3 for alpha chain variable domain of TCR clone 368554 (TRAV27, TRAJ32)
CAGRGYGGATNKLIF

SEQ ID NO: 737108 - protein, 17 aa, Homo sapiens
  CDR3 for beta chain variable domain of TCR clone 368554 (TRBV7-3, TRBJ2-3)
CASSLMKRMRGADTQYF

SEQ ID NO: 737109 - protein, 14 aa, Homo sapiens
  CDR3 for alpha chain variable domain of TCR clone 368555 (TRAV16, TRAJ42)
CALLAGGSQGNLIF

SEQ ID NO: 737110 - protein, 15 aa, Homo sapiens
  CDR3 for beta chain variable domain of TCR clone 368555 (TRBV2, TRBJ2-7)
CASSEGLARPYEQYF

SEQ ID NO: 737111 - protein, 15 aa, Homo sapiens
  CDR3 for alpha chain variable domain of TCR clone 368556 (TRAV3, TRAJ29)
CAVRDINSGNTPLVF

SEQ ID NO: 737112 - protein, 16 aa, Homo sapiens
  CDR3 for beta chain variable domain of TCR clone 368556 (TRBV4-1, TRBJ2-5)
CASSQTFYVDQETQYF

SEQ ID NO: 737113 - protein, 13 aa, Homo sapiens
  CDR3 for alpha chain variable domain of TCR clone 368557 (TRAV12-3, TRAJ53)
CAMRGGSNDKLTF

SEQ ID NO: 737114 - protein, 15 aa, Homo sapiens
  CDR3 for beta chain variable domain of TCR clone 368557 (TRBV2, TRBJ2-1)
CATQARLVMIGEQFF

SEQ ID NO: 737115 - protein, 12 aa, Homo sapiens
  CDR3 for alpha chain variable domain of TCR clone 368558 (TRAV12-3, TRAJ17)
CAMTLTGNKLTF

SEQ ID NO: 737116 - protein, 15 aa, Homo sapiens
  CDR3 for beta chain variable domain of TCR clone 368558 (TRBV29-1, TRBJ2-6)
CSFTGGRSGSNVLTF

SEQ ID NO: 737117 - protein, 13 aa, Homo sapiens
  CDR3 for alpha chain variable domain of TCR clone 368559 (TRAV12-3, TRAJ33)
CAMSVNSNYQLIW

SEQ ID NO: 737118 - protein, 12 aa, Homo sapiens
  CDR3 for beta chain variable domain of TCR clone 368559 (TRBV7-9, TRBJ2-7)
CASSIKREEQYF

SEQ ID NO: 737119 - protein, 14 aa, Homo sapiens
  CDR3 for alpha chain variable domain of TCR clone 368560 (TRAV35, TRAJ22)
CAGLRPGSARQLTF

SEQ ID NO: 737120 - protein, 11 aa, Homo sapiens
  CDR3 for beta chain variable domain of TCR clone 368560 (TRBV27, TRBJ2-3)
CASSLGDTQYF

SEQ ID NO: 737121 - protein, 14 aa, Homo sapiens
  CDR3 for alpha chain variable domain of TCR clone 368561 (TRAV1-2, TRAJ8)
CAVREDTGFQNLVF

SEQ ID NO: 737122 - protein, 12 aa, Homo sapiens
  CDR3 for beta chain variable domain of TCR clone 368561 (TRBV11-2, TRBJ2-2)
CASSLGGGELFF

SEQ ID NO: 737123 - protein, 16 aa, Homo sapiens
  CDR3 for alpha chain variable domain of TCR clone 368562 (TRAV30, TRAJ24)
CGTEIVDADSWGKFQF

SEQ ID NO: 737124 - protein, 13 aa, Homo sapiens
  CDR3 for beta chain variable domain of TCR clone 368562 (TRBV7-9, TRBJ1-4)
CASSLPGIEKLFF

SEQ ID NO: 737125 - protein, 14 aa, Homo sapiens
  CDR3 for alpha chain variable domain of TCR clone 368563 (TRAV6, TRAJ37)
CALGSQGNTCTLIF

SEQ ID NO: 737126 - protein, 15 aa, Homo sapiens
  CDR3 for beta chain variable domain of TCR clone 368563 (TRBV2, TRBJ2-1)
CASSEEREGDNEQFF

SEQ ID NO: 737127 - protein, 15 aa, Homo sapiens
  CDR3 for alpha chain variable domain of TCR clone 368564 (TRAV2, TRAJ9)
CAVAALNTGGFKTIF

SEQ ID NO: 737128 - protein, 13 aa, Homo sapiens
  CDR3 for beta chain variable domain of TCR clone 368564 (TRBV19, TRBJ1-2)
CASSVPGQDGYTF

SEQ ID NO: 737129 - protein, 15 aa, Homo sapiens
  CDR3 for alpha chain variable domain of TCR clone 368565 (TRAV20, TRAJ53)
CAVQASGGSNYKLTF

SEQ ID NO: 737130 - protein, 14 aa, Homo sapiens
  CDR3 for beta chain variable domain of TCR clone 368565 (TRBV7-2, TRBJ1-2)
CASSQTGSTYGDTF

SEQ ID NO: 737131 - protein, 13 aa, Homo sapiens
  CDR3 for alpha chain variable domain of TCR clone 368566 (TRAV36/DV7, TRAJ54)
CAVCTQGAQKLVF

SEQ ID NO: 737132 - protein, 17 aa, Homo sapiens
  CDR3 for beta chain variable domain of TCR clone 368566 (TRBV7-8, TRBJ2-6)
CASSAGTGGAGANVLTF

SEQ ID NO: 737133 - protein, 23 aa, Homo sapiens
  CDR3 for alpha chain variable domain of TCR clone 368567 (TRAV12-2, TRAJ22)
CSSETPSPVIQSPGRSSARQLTF

SEQ ID NO: 737134 - protein, 16 aa, Homo sapiens
  CDR3 for beta chain variable domain of TCR clone 368567 (TRBV5-1, TRBJ2-7)
CASSWGTGGRAWEQYF

SEQ ID NO: 737135 - protein, 14 aa, Homo sapiens
  CDR3 for alpha chain variable domain of TCR clone 368568 (TRAV17, TRAJ54)
CATDANQGAQKLVF

SEQ ID NO: 737136 - protein, 12 aa, Homo sapiens
  CDR3 for beta chain variable domain of TCR clone 368568 (TRBV7-9, TRBJ2-7)
CASSIKRAEQYF

SEQ ID NO: 737137 - protein, 14 aa, Homo sapiens
  CDR3 for alpha chain variable domain of TCR clone 368569 (TRAV27, TRAJ44)
CAASFTGIASKLTF

SEQ ID NO: 737138 - protein, 13 aa, Homo sapiens
  CDR3 for beta chain variable domain of TCR clone 368569 (TRBV27, TRBJ2-3)
CATSRGGLYTQYF

SEQ ID NO: 737139 - protein, 11 aa, Homo sapiens
  CDR3 for alpha chain variable domain of TCR clone 368570 (TRAV12-3, TRAJ49)
CAANTGNQFYF

SEQ ID NO: 737140 - protein, 12 aa, Homo sapiens
  CDR3 for beta chain variable domain of TCR clone 368570 (TRBV6-3, TRBJ2-7)
CASSEQGFEQYF

SEQ ID NO: 737141 - protein, 15 aa, Homo sapiens
  CDR3 for alpha chain variable domain of TCR clone 368571 (TRAV8-3, TRAJ48)
CAVGASNFGNEKLTF

SEQ ID NO: 737142 - protein, 16 aa, Homo sapiens
  CDR3 for beta chain variable domain of TCR clone 368571 (TRBV6-6, TRBJ2-1)
CASSYSFSGSYNEQFF

SEQ ID NO: 737143 - protein, 13 aa, Homo sapiens
  CDR3 for alpha chain variable domain of TCR clone 368572 (TRAV12-2, TRAJ30)
RAVNLNRNDKIIF

SEQ ID NO: 737144 - protein, 14 aa, Homo sapiens
  CDR3 for beta chain variable domain of TCR clone 368572 (TRBV7-2, TRBJ1-2)
CASSSQGAHYGYTF

SEQ ID NO: 737145 - protein, 17 aa, Homo sapiens
  CDR3 for alpha chain variable domain of TCR clone 368573 (TRAV12-2, TRAJ48)
CASNEKLTIGTGTRLTI

SEQ ID NO: 737146 - protein, 14 aa, Homo sapiens
  CDR3 for beta chain variable domain of TCR clone 368573 (TRBV5-1, TRBJ2-5)
CASSLAGKQETQYF

SEQ ID NO: 737147 - protein, 15 aa, Homo sapiens
  CDR3 for alpha chain variable domain of TCR clone 368574 (TRAV35, TRAJ23)
CAGPLRNNQGGKLIF

SEQ ID NO: 737148 - protein, 13 aa, Homo sapiens
  CDR3 for beta chain variable domain of TCR clone 368574 (TRBV7-9, TRBJ1-2)
CASSLKQNYDYTF

SEQ ID NO: 737149 - protein, 14 aa, Homo sapiens
  CDR3 for alpha chain variable domain of TCR clone 368575 (TRAV23/DV6, TRAJ27)
CAASRDTNAGNSTF

SEQ ID NO: 737150 - protein, 13 aa, Homo sapiens
  CDR3 for beta chain variable domain of TCR clone 368575 (TRBV20-1, TRBJ1-5)
CSASGRGNQPQHF

SEQ ID NO: 737151 - protein, 13 aa, Homo sapiens
  CDR3 for alpha chain variable domain of TCR clone 368576 (TRAV8-6, TRAJ34)
CAVSDQGTDKLIF

SEQ ID NO: 737152 - protein, 15 aa, Homo sapiens
  CDR3 for beta chain variable domain of TCR clone 368576 (TRBV20-1, TRBJ1-1)
CSASRGVTGNTEAFF

SEQ ID NO: 737153 - protein, 16 aa, Homo sapiens
  CDR3 for alpha chain variable domain of TCR clone 368577 (TRAV30, TRAJ24)
CGTEIVDADSWGKFQF

SEQ ID NO: 737154 - protein, 16 aa, Homo sapiens
  CDR3 for beta chain variable domain of TCR clone 368577 (TRBV6-1, TRBJ1-1)
CASRDSGRGMNTEAFF

SEQ ID NO: 737155 - protein, 14 aa, Homo sapiens
  CDR3 for alpha chain variable domain of TCR clone 368578 (TRAV35, TRAJ33)
CAGSYQDSNYQLIW

SEQ ID NO: 737156 - protein, 15 aa, Homo sapiens
  CDR3 for beta chain variable domain of TCR clone 368578 (TRBV29-1, TRBJ2-7)
CSVEFFDRGSYEQYF

SEQ ID NO: 737157 - protein, 14 aa, Homo sapiens
  CDR3 for alpha chain variable domain of TCR clone 368579 (TRAV14/DV4, TRAJ7)
CAMREAYVNNRLAF

SEQ ID NO: 737158 - protein, 15 aa, Homo sapiens
  CDR3 for beta chain variable domain of TCR clone 368579 (TRBV19, TRBJ2-1)
CASSINREPSHEQFF

SEQ ID NO: 737159 - protein, 17 aa, Homo sapiens
  CDR3 for alpha chain variable domain of TCR clone 368580 (TRAV3, TRAJ6)
CAVRDGPRAGGSYIPTF

SEQ ID NO: 737160 - protein, 15 aa, Homo sapiens
  CDR3 for beta chain variable domain of TCR clone 368580 (TRBV18, TRBJ2-7)
CASSPTFMDSYEQYF

SEQ ID NO: 737161 - protein, 13 aa, Homo sapiens
  CDR3 for alpha chain variable domain of TCR clone 368581 (TRAV9-2, TRAJ39)
CALQNNAGNMLTF

SEQ ID NO: 737162 - protein, 16 aa, Homo sapiens
  CDR3 for beta chain variable domain of TCR clone 368581 (TRBV7-3, TRBJ2-2)
CASSLKRGTLSGELFF

SEQ ID NO: 737163 - protein, 13 aa, Homo sapiens
  CDR3 for alpha chain variable domain of TCR clone 368582 (TRAV16, TRAJ11)
CALMNSGYSTLTF

SEQ ID NO: 737164 - protein, 12 aa, Homo sapiens
  CDR3 for beta chain variable domain of TCR clone 368582 (TRBV12-5, TRBJ2-5)
CASGQGVETQYF

SEQ ID NO: 737165 - protein, 17 aa, Homo sapiens
  CDR3 for alpha chain variable domain of TCR clone 368583 (TRAV19, TRAJ18)
CALSEEWRGSTLGRLYF

SEQ ID NO: 737166 - protein, 14 aa, Homo sapiens
  CDR3 for beta chain variable domain of TCR clone 368583 (TRBV2, TRBJ2-7)
CASSLTSGGYEQYF

SEQ ID NO: 737167 - protein, 11 aa, Homo sapiens
  CDR3 for alpha chain variable domain of TCR clone 368584 (TRAV21, TRAJ31)
CAVRNNARLMF

SEQ ID NO: 737168 - protein, 15 aa, Homo sapiens
  CDR3 for beta chain variable domain of TCR clone 368584 (TRBV12-4, TRBJ2-5)
CASSPPTGLQETQYF

SEQ ID NO: 737169 - protein, 12 aa, Homo sapiens
  CDR3 for alpha chain variable domain of TCR clone 368585 (TRAV13-2, TRAJ8)
CAPWLGFQKLVF

SEQ ID NO: 737170 - protein, 15 aa, Homo sapiens
  CDR3 for beta chain variable domain of TCR clone 368585 (TRBV15, TRBJ1-1)
CATSLQGGRNTEAFF

SEQ ID NO: 737171 - protein, 14 aa, Homo sapiens
  CDR3 for alpha chain variable domain of TCR clone 368586 (TRAV13-1, TRAJ44)
CAAKATGTASKLTF

SEQ ID NO: 737172 - protein, 15 aa, Homo sapiens
  CDR3 for beta chain variable domain of TCR clone 368586 (TRBV15, TRBJ1-2)
AEALGQGVANYGYTF

SEQ ID NO: 737173 - protein, 14 aa, Homo sapiens
  CDR3 for alpha chain variable domain of TCR clone 368587 (TRAV12-2, TRAJ45)
CALPASGGADGLTF

SEQ ID NO: 737174 - protein, 14 aa, Homo sapiens
  CDR3 for beta chain variable domain of TCR clone 368587 (TRBV18, TRBJ1-5)
CASSPGNSNQPQHF

SEQ ID NO: 737175 - protein, 15 aa, Homo sapiens
  CDR3 for alpha chain variable domain of TCR clone 368588 (TRAV12-3, TRAJ6)
CAISATTGGSYIPTF

SEQ ID NO: 737176 - protein, 19 aa, Homo sapiens
  CDR3 for beta chain variable domain of TCR clone 368588 (TRBV25-1, TRBJ2-2)
CAILVYRVDRGRKTGELFF

SEQ ID NO: 737177 - protein, 13 aa, Homo sapiens
  CDR3 for alpha chain variable domain of TCR clone 368589 (TRAV12-3, TRAJ21)
CAPGPPNFNKFYF

SEQ ID NO: 737178 - protein, 13 aa, Homo sapiens
  CDR3 for beta chain variable domain of TCR clone 368589 (TRBV4-2, TRBJ1-1)
CASSQAGNTEAFF

SEQ ID NO: 737179 - protein, 15 aa, Homo sapiens
  CDR3 for alpha chain variable domain of TCR clone 368590 (TRAV13-1, TRAJ32)
CSASIYGGATNKLIF

SEQ ID NO: 737180 - protein, 14 aa, Homo sapiens
  CDR3 for beta chain variable domain of TCR clone 368590 (TRBV7-9, TRBJ2-1)
CASSLASGSNEQFF

SEQ ID NO: 737181 - protein, 15 aa, Homo sapiens
  CDR3 for alpha chain variable domain of TCR clone 368591 (TRAV3, TRAJ5)
CAVRDLDTGGRALTF

SEQ ID NO: 737182 - protein, 13 aa, Homo sapiens
  CDR3 for beta chain variable domain of TCR clone 368591 (TRBV12-4, TRBJ2-7)
CASGPTETYEQYF

SEQ ID NO: 737183 - protein, 15 aa, Homo sapiens
  CDR3 for alpha chain variable domain of TCR clone 368592 (TRAV30, TRAJ32)
CGTEILGGATNKRIF

SEQ ID NO: 737184 - protein, 13 aa, Homo sapiens
  CDR3 for beta chain variable domain of TCR clone 368592 (TRBV6-3, TRBJ2-7)
CASSFSGGYEQYF

SEQ ID NO: 737185 - protein, 12 aa, Homo sapiens
  CDR3 for alpha chain variable domain of TCR clone 368593 (TRAV21, TRAJ49)
CAVNDGGNQFYF

SEQ ID NO: 737186 - protein, 12 aa, Homo sapiens
  CDR3 for beta chain variable domain of TCR clone 368593 (TRBV11-2, TRBJ2-1)
CASSPGNNEQFF

SEQ ID NO: 737187 - protein, 12 aa, Homo sapiens
  CDR3 for alpha chain variable domain of TCR clone 368594 (TRAV13-1, TRAJ21)
CAAKEGVNKFYF

SEQ ID NO: 737188 - protein, 15 aa, Homo sapiens
  CDR3 for beta chain variable domain of TCR clone 368594 (TRBV7-9, TRBJ1-6)
CAGSSPGRGNSPLHF

SEQ ID NO: 737189 - protein, 14 aa, Homo sapiens
  CDR3 for alpha chain variable domain of TCR clone 368595 (TRAV25, TRAJ6)
CAGRESGGSYIPTF

SEQ ID NO: 737190 - protein, 15 aa, Homo sapiens
  CDR3 for beta chain variable domain of TCR clone 368595 (TRBV5-5, TRBJ1-5)
CASSLEGASNQPQHF

SEQ ID NO: 737191 - protein, 20 aa, Homo sapiens
  CDR3 for alpha chain variable domain of TCR clone 368596 (TRAV1-1, TRAJ4)
CLLLLRCEGFLSGGYNKLIF

SEQ ID NO: 737192 - protein, 18 aa, Homo sapiens
  CDR3 for beta chain variable domain of TCR clone 368596 (TRBV4-3, TRBJ1-2)
CASSQDGQSAPSDYGYTF

SEQ ID NO: 737193 - protein, 12 aa, Homo sapiens
  CDR3 for alpha chain variable domain of TCR clone 368597 (TRAV8-3, TRAJ26)
CAGDNYGQNFVF

SEQ ID NO: 737194 - protein, 20 aa, Homo sapiens
  CDR3 for beta chain variable domain of TCR clone 368597 (TRBV4-1, TRBJ2-2)
CASSQASPPGLASNTGELFF

SEQ ID NO: 737195 - protein, 14 aa, Homo sapiens
  CDR3 for alpha chain variable domain of TCR clone 368598 (TRAV17, TRAJ48)
CATEGNFGNEKLTF

SEQ ID NO: 737196 - protein, 15 aa, Homo sapiens
  CDR3 for beta chain variable domain of TCR clone 368598 (TRBV9, TRBJ1-1)
CASSVALGQTYEAFF

SEQ ID NO: 737197 - protein, 10 aa, Homo sapiens
  CDR3 for alpha chain variable domain of TCR clone 368599 (TRAV23/DV6, TRAJ57)
CAASSTLSQG

SEQ ID NO: 737198 - protein, 12 aa, Homo sapiens
  CDR3 for beta chain variable domain of TCR clone 368599 (TRBV5-1, TRBJ2-5)
CASSFSWETQYF

SEQ ID NO: 737199 - protein, 13 aa, Homo sapiens
  CDR3 for alpha chain variable domain of TCR clone 368600 (TRAV8-2, TRAJ34)
CVVSDRRTDKLIF

SEQ ID NO: 737200 - protein, 15 aa, Homo sapiens
  CDR3 for beta chain variable domain of TCR clone 368600 (TRBV20-1, TRBJ2-3)
CGARVVGGSTDTQYF

SEQ ID NO: 737201 - protein, 12 aa, Homo sapiens
  CDR3 for alpha chain variable domain of TCR clone 368601 (TRAV9-2, TRAJ40)
CALTSRTYKYIF

SEQ ID NO: 737202 - protein, 16 aa, Homo sapiens
  CDR3 for beta chain variable domain of TCR clone 368601 (TRBV7-7, TRBJ2-2)
CASSPRTGLNTGELFF

SEQ ID NO: 737203 - protein, 14 aa, Homo sapiens
  CDR3 for alpha chain variable domain of TCR clone 368602 (TRAV1-2, TRAJ16)
FAVNRFSDGQKLLF

SEQ ID NO: 737204 - protein, 15 aa, Homo sapiens
  CDR3 for beta chain variable domain of TCR clone 368602 (TRBV6-6, TRBJ2-7)
CASSYSYGGSYEQYF

SEQ ID NO: 737205 - protein, 14 aa, Homo sapiens
  CDR3 for alpha chain variable domain of TCR clone 368603 (TRAV1-2, TRAJ8)
CSVREDTGFQKLVF

SEQ ID NO: 737206 - protein, 11 aa, Homo sapiens
  CDR3 for beta chain variable domain of TCR clone 368603 (TRBV20-1, TRBJ2-5)
CSADRAETQYF

SEQ ID NO: 737207 - protein, 13 aa, Homo sapiens
  CDR3 for alpha chain variable domain of TCR clone 368604 (TRAV16, TRAJ10)
CALLTGGGNKLTL

SEQ ID NO: 737208 - protein, 12 aa, Homo sapiens
  CDR3 for beta chain variable domain of TCR clone 368604 (TRBV28, TRBJ2-7)
CASTGNHYEQYF

SEQ ID NO: 737209 - protein, 12 aa, Homo sapiens
  CDR3 for alpha chain variable domain of TCR clone 368605 (TRAV17, TRAJ57)
CATDGGSEKLVF

SEQ ID NO: 737210 - protein, 15 aa, Homo sapiens
  CDR3 for beta chain variable domain of TCR clone 368605 (TRBV20-1, TRBJ2-7)
CSARDRVSRMDEQYF

SEQ ID NO: 737211 - protein, 12 aa, Homo sapiens
  CDR3 for alpha chain variable domain of TCR clone 368606 (TRAV8-3, TRAJ20)
CAVDFNYYKLSF

SEQ ID NO: 737212 - protein, 12 aa, Homo sapiens
  CDR3 for beta chain variable domain of TCR clone 368606 (TRBV29-1, TRBJ2-3)
CSVTGGADTQYF

SEQ ID NO: 737213 - protein, 16 aa, Homo sapiens
  CDR3 for alpha chain variable domain of TCR clone 368607 (TRAV30, TRAJ24)
CGTEIVDADSWGKFQF

SEQ ID NO: 737214 - protein, 19 aa, Homo sapiens
  CDR3 for beta chain variable domain of TCR clone 368607 (TRBV25-1, TRBJ2-2)
CAILVYRVDRGRKTGELFF

SEQ ID NO: 737215 - protein, 13 aa, Homo sapiens
  CDR3 for alpha chain variable domain of TCR clone 368608 (TRAV27, TRAJ28)
CAISGAGSYQLTF

SEQ ID NO: 737216 - protein, 12 aa, Homo sapiens
  CDR3 for beta chain variable domain of TCR clone 368608 (TRBV18, TRBJ2-1)
CASSPGTSEGFF

SEQ ID NO: 737217 - protein, 14 aa, Homo sapiens
  CDR3 for alpha chain variable domain of TCR clone 368609 (TRAV20, TRAJ42)
CAVQAGGSQGNLIF

SEQ ID NO: 737218 - protein, 14 aa, Homo sapiens
  CDR3 for beta chain variable domain of TCR clone 368609 (TRBV28, TRBJ1-2)
CASRIQGANYGYHF

SEQ ID NO: 737219 - protein, 13 aa, Homo sapiens
  CDR3 for alpha chain variable domain of TCR clone 368610 (TRAV26-1, TRAJ36)
CIAVRRGANNPFF

SEQ ID NO: 737220 - protein, 19 aa, Homo sapiens
  CDR3 for beta chain variable domain of TCR clone 368610 (TRBV27, TRBJ2-1)
CASSLEILSPGAAGNEQFF

SEQ ID NO: 737221 - protein, 12 aa, Homo sapiens
  CDR3 for alpha chain variable domain of TCR clone 368611 (TRAV8-3, TRAJ26)
CAGDNYGQNFVF

SEQ ID NO: 737222 - protein, 12 aa, Homo sapiens
  CDR3 for beta chain variable domain of TCR clone 368611 (TRBV19, TRBJ1-5)
CASSIAQQPQHF

SEQ ID NO: 737223 - protein, 12 aa, Homo sapiens
  CDR3 for alpha chain variable domain of TCR clone 368612 (TRAV6, TRAJ41)
CSSPLERYALNF

SEQ ID NO: 737224 - protein, 12 aa, Homo sapiens
  CDR3 for beta chain variable domain of TCR clone 368612 (TRBV29-1, TRBJ2-2)
CSVDKYTGELFF

SEQ ID NO: 737225 - protein, 14 aa, Homo sapiens
  CDR3 for alpha chain variable domain of TCR clone 368613 (TRAV38-1, TRAJ40)
RALRPTSGTYKYIF

SEQ ID NO: 737226 - protein, 14 aa, Homo sapiens
  CDR3 for beta chain variable domain of TCR clone 368613 (TRBV25-1, TRBJ1-1)
CASTHLGGNTEASF

SEQ ID NO: 737227 - protein, 15 aa, Homo sapiens
  CDR3 for alpha chain variable domain of TCR clone 368614 (TRAV35, TRAJ42)
CAGQLRGGSQGNLIF

SEQ ID NO: 737228 - protein, 13 aa, Homo sapiens
  CDR3 for beta chain variable domain of TCR clone 368614 (TRBV12-5, TRBJ2-3)
CASGDRQSDTQYF

SEQ ID NO: 737229 - protein, 19 aa, Homo sapiens
  CDR3 for alpha chain variable domain of TCR clone 368615 (TRAV26-1, TRAJ52)
YIVRAHRNAGGTSYGKLTF

SEQ ID NO: 737230 - protein, 13 aa, Homo sapiens
  CDR3 for beta chain variable domain of TCR clone 368615 (TRBV20-1, TRBJ1-6)
CSAPLGVGSPLHF

SEQ ID NO: 737231 - protein, 14 aa, Homo sapiens
  CDR3 for alpha chain variable domain of TCR clone 368616 (TRAV17, TRAJ6)
CATDASRASYIPTF

SEQ ID NO: 737232 - protein, 15 aa, Homo sapiens
  CDR3 for beta chain variable domain of TCR clone 368616 (TRBV9, TRBJ2-1)
CASSLAGSSYNEQFF

SEQ ID NO: 737233 - protein, 13 aa, Homo sapiens
  CDR3 for alpha chain variable domain of TCR clone 368617 (TRAV12-3, TRAJ33)
CAMSVNSNYQLIW

SEQ ID NO: 737234 - protein, 16 aa, Homo sapiens
  CDR3 for beta chain variable domain of TCR clone 368617 (TRBV27, TRBJ2-2)
CASSFRGLVRTGELFF

SEQ ID NO: 737235 - protein, 13 aa, Homo sapiens
  CDR3 for alpha chain variable domain of TCR clone 368618 (TRAV21, TRAJ15)
CAVANQAGTALIF

SEQ ID NO: 737236 - protein, 15 aa, Homo sapiens
  CDR3 for beta chain variable domain of TCR clone 368618 (TRBV12-4, TRBJ2-5)
CASSPPTGLQETQYF

SEQ ID NO: 737237 - protein, 11 aa, Homo sapiens
  CDR3 for alpha chain variable domain of TCR clone 368619 (TRAV16, TRAJ33)
CALHSNYQLIW

SEQ ID NO: 737238 - protein, 15 aa, Homo sapiens
  CDR3 for beta chain variable domain of TCR clone 368619 (TRBV4-1, TRBJ2-7)
CACSQQGQGFDEQYF

SEQ ID NO: 737239 - protein, 17 aa, Homo sapiens
  CDR3 for alpha chain variable domain of TCR clone 368620 (TRAV2, TRAJ22)
VLQVREADAAEQRQLTF

SEQ ID NO: 737240 - protein, 16 aa, Homo sapiens
  CDR3 for beta chain variable domain of TCR clone 368620 (TRBV2, TRBJ2-5)
CASSETQGVGEETQYF

SEQ ID NO: 737241 - protein, 16 aa, Homo sapiens
  CDR3 for alpha chain variable domain of TCR clone 368621 (TRAV26-1, TRAJ36)
CIVRAIGRSGANNLCF

SEQ ID NO: 737242 - protein, 14 aa, Homo sapiens
  CDR3 for beta chain variable domain of TCR clone 368621 (TRBV25-1, TRBJ2-1)
CASSKTGGYNEQFF

SEQ ID NO: 737243 - protein, 14 aa, Homo sapiens
  CDR3 for alpha chain variable domain of TCR clone 368622 (TRAV17, TRAJ48)
CATEGNFGNEKLTF

SEQ ID NO: 737244 - protein, 13 aa, Homo sapiens
  CDR3 for beta chain variable domain of TCR clone 368622 (TRBV20-1, TRBJ2-5)
CSAREAFQETQYF

SEQ ID NO: 737245 - protein, 13 aa, Homo sapiens
  CDR3 for alpha chain variable domain of TCR clone 368623 (TRAV12-3, TRAJ9)
CAMRNTGGFKTIF

SEQ ID NO: 737246 - protein, 15 aa, Homo sapiens
  CDR3 for beta chain variable domain of TCR clone 368623 (TRBV20-1, TRBJ2-7)
CSARVRVSGMDEQYF

SEQ ID NO: 737247 - protein, 14 aa, Homo sapiens
  CDR3 for alpha chain variable domain of TCR clone 368624 (TRAV1-2, TRAJ16)
CAVNRFSDGQKLLF

SEQ ID NO: 737248 - protein, 17 aa, Homo sapiens
  CDR3 for beta chain variable domain of TCR clone 368624 (TRBV28, TRBJ2-1)
CASSFPLTSGKANEQFF

SEQ ID NO: 737249 - protein, 12 aa, Homo sapiens
  CDR3 for alpha chain variable domain of TCR clone 368625 (TRAV13-1, TRAJ53)
CAEGGSNYKLTF

SEQ ID NO: 737250 - protein, 11 aa, Homo sapiens
  CDR3 for beta chain variable domain of TCR clone 368625 (TRBV2, TRBJ1-1)
CASREGTEAFF

SEQ ID NO: 737251 - protein, 14 aa, Homo sapiens
  CDR3 for alpha chain variable domain of TCR clone 368626 (TRAV8-1, TRAJ34)
CAVNPSYNTDKLIF

SEQ ID NO: 737252 - protein, 15 aa, Homo sapiens
  CDR3 for beta chain variable domain of TCR clone 368626 (TRBV7-2, TRBJ2-7)
CASSLGGAKSGEQYF

SEQ ID NO: 737253 - protein, 13 aa, Homo sapiens
  CDR3 for alpha chain variable domain of TCR clone 368627 (TRAV12-3, TRAJ33)
CAMSVNSNYKLIC

SEQ ID NO: 737254 - protein, 13 aa, Homo sapiens
  CDR3 for beta chain variable domain of TCR clone 368627 (TRBV4-1, TRBJ2-2)
CASSQENTGELFF

SEQ ID NO: 737255 - protein, 14 aa, Homo sapiens
  CDR3 for alpha chain variable domain of TCR clone 368628 (TRAV8-4, TRAJ34)
CAVSDPGDTDKLIF

SEQ ID NO: 737256 - protein, 16 aa, Homo sapiens
  CDR3 for beta chain variable domain of TCR clone 368628 (TRBV5-1, TRBJ2-1)
CASSIRSGGSYNEQFF

SEQ ID NO: 737257 - protein, 13 aa, Homo sapiens
  CDR3 for alpha chain variable domain of TCR clone 368629 (TRAV35, TRAJ42)
CAGFPGSQGNLIF

SEQ ID NO: 737258 - protein, 14 aa, Homo sapiens
  CDR3 for beta chain variable domain of TCR clone 368629 (TRBV4-1, TRBJ2-2)
CASSQAVNTGELVF

SEQ ID NO: 737259 - protein, 13 aa, Homo sapiens
  CDR3 for alpha chain variable domain of TCR clone 368630 (TRAV25, TRAJ16)
CAGRTARSCSLQG

SEQ ID NO: 737260 - protein, 18 aa, Homo sapiens
  CDR3 for beta chain variable domain of TCR clone 368630 (TRBV6-5, TRBJ1-1)
CTSVPALFDGLVNTEAFF

SEQ ID NO: 737261 - protein, 13 aa, Homo sapiens
  CDR3 for alpha chain variable domain of TCR clone 368631 (TRAV8-4, TRAJ10)
CAAFTGGGNKLTF

SEQ ID NO: 737262 - protein, 15 aa, Homo sapiens
  CDR3 for beta chain variable domain of TCR clone 368631 (TRBV2, TRBJ2-3)
CASSDFEKATDTQYL

SEQ ID NO: 737263 - protein, 13 aa, Homo sapiens
  CDR3 for alpha chain variable domain of TCR clone 368632 (TRAV27, TRAJ45)
CRSSGGGADGLTF

SEQ ID NO: 737264 - protein, 14 aa, Homo sapiens
  CDR3 for beta chain variable domain of TCR clone 368632 (TRBV12-4, TRBJ2-1)
CASSLGQGASEQFF

SEQ ID NO: 737265 - protein, 13 aa, Homo sapiens
  CDR3 for alpha chain variable domain of TCR clone 368633 (TRAV21, TRAJ11)
CAVPNSVYSTLTF

SEQ ID NO: 737266 - protein, 13 aa, Homo sapiens
  CDR3 for beta chain variable domain of TCR clone 368633 (TRBV3-1, TRBJ2-7)
CASSLRDGYEQYF

SEQ ID NO: 737267 - protein, 12 aa, Homo sapiens
  CDR3 for alpha chain variable domain of TCR clone 368634 (TRAV17, TRAJ57)
CATDGGSEKLVF

SEQ ID NO: 737268 - protein, 15 aa, Homo sapiens
  CDR3 for beta chain variable domain of TCR clone 368634 (TRBV19, TRBJ2-1)
CASSTPGLAYNEQFF

SEQ ID NO: 737269 - protein, 16 aa, Homo sapiens
  CDR3 for alpha chain variable domain of TCR clone 368635 (TRAV14/DV4, TRAJ15)
CAMREGPAQAGTALIF

SEQ ID NO: 737270 - protein, 12 aa, Homo sapiens
  CDR3 for beta chain variable domain of TCR clone 368635 (TRBV28, TRBJ2-6)
CAIQAGANVLTF

SEQ ID NO: 737271 - protein, 14 aa, Homo sapiens
  CDR3 for alpha chain variable domain of TCR clone 368636 (TRAV1-2, TRAJ8)
CAEREDTGFQKLVF

SEQ ID NO: 737272 - protein, 13 aa, Homo sapiens
  CDR3 for beta chain variable domain of TCR clone 368636 (TRBV7-9, TRBJ1-2)
CASSLKQNYGYTF

SEQ ID NO: 737273 - protein, 14 aa, Homo sapiens
  CDR3 for alpha chain variable domain of TCR clone 368637 (TRAV26-1, TRAJ48)
CIVRVGFGNEKLTF

SEQ ID NO: 737274 - protein, 16 aa, Homo sapiens
  CDR3 for beta chain variable domain of TCR clone 368637 (TRBV20-1, TRBJ2-1)
CSALTWTSGSYNEQFF

SEQ ID NO: 737275 - protein, 13 aa, Homo sapiens
  CDR3 for alpha chain variable domain of TCR clone 368638 (TRAV2, TRAJ15)
CAVASQAGTALIF

SEQ ID NO: 737276 - protein, 14 aa, Homo sapiens
  CDR3 for beta chain variable domain of TCR clone 368638 (TRBV4-1, TRBJ2-5)
CASSQERGRETQYF

SEQ ID NO: 737277 - protein, 15 aa, Homo sapiens
  CDR3 for alpha chain variable domain of TCR clone 368639 (TRAV23/DV6, TRAJ44)
CAAMKPTGTASKLTI

SEQ ID NO: 737278 - protein, 16 aa, Homo sapiens
  CDR3 for beta chain variable domain of TCR clone 368639 (TRBV28, TRBJ2-5)
CATSGWPSRLKETQYF

SEQ ID NO: 737279 - protein, 13 aa, Homo sapiens
  CDR3 for alpha chain variable domain of TCR clone 368640 (TRAV8-3, TRAJ50)
CAVDQTSYDKVIF

SEQ ID NO: 737280 - protein, 16 aa, Homo sapiens
  CDR3 for beta chain variable domain of TCR clone 368640 (TRBV19, TRBJ2-1)
CASSKAGPSSYNEQFF

SEQ ID NO: 737281 - protein, 12 aa, Homo sapiens
  CDR3 for alpha chain variable domain of TCR clone 368641 (TRAV12-3, TRAJ17)
CAMTLTGNKLTF

SEQ ID NO: 737282 - protein, 15 aa, Homo sapiens
  CDR3 for beta chain variable domain of TCR clone 368641 (TRBV11-2, TRBJ1-6)
CASSLDPWAVSPLHF

SEQ ID NO: 737283 - protein, 14 aa, Homo sapiens
  CDR3 for alpha chain variable domain of TCR clone 368642 (TRAV8-4, TRAJ9)
CAVRINTGGFKTIF

SEQ ID NO: 737284 - protein, 15 aa, Homo sapiens
  CDR3 for beta chain variable domain of TCR clone 368642 (TRBV19, TRBJ1-2)
CASSVGLVLNYGYSF

SEQ ID NO: 737285 - protein, 13 aa, Homo sapiens
  CDR3 for alpha chain variable domain of TCR clone 368643 (TRAV8-6, TRAJ9)
CAVWDTGGFKTIF

SEQ ID NO: 737286 - protein, 16 aa, Homo sapiens
  CDR3 for beta chain variable domain of TCR clone 368643 (TRBV4-2, TRBJ2-3)
CASSQELAGDTDTQYF

SEQ ID NO: 737287 - protein, 12 aa, Homo sapiens
  CDR3 for alpha chain variable domain of TCR clone 368644 (TRAV13-1, TRAJ21)
CAAKEGFYKFYF

SEQ ID NO: 737288 - protein, 13 aa, Homo sapiens
  CDR3 for beta chain variable domain of TCR clone 368644 (TRBV19, TRBJ1-2)
CASSVPGQDGYTF

SEQ ID NO: 737289 - protein, 14 aa, Homo sapiens
  CDR3 for alpha chain variable domain of TCR clone 368645 (TRAV13-1, TRAJ44)
CAAKATGTASKLTF

SEQ ID NO: 737290 - protein, 17 aa, Homo sapiens
  CDR3 for beta chain variable domain of TCR clone 368645 (TRBV7-3, TRBJ2-3)
RASSLMKRMRGAYTQYF

SEQ ID NO: 737291 - protein, 15 aa, Homo sapiens
  CDR3 for alpha chain variable domain of TCR clone 368646 (TRAV25, TRAJ52)
CAGRPGGTSYGKLTF

SEQ ID NO: 737292 - protein, 16 aa, Homo sapiens
  CDR3 for beta chain variable domain of TCR clone 368646 (TRBV11-2, TRBJ2-1)
RASSLERDGVDNEQFF

SEQ ID NO: 737293 - protein, 12 aa, Homo sapiens
  CDR3 for alpha chain variable domain of TCR clone 368647 (TRAV2, TRAJ33)
CAFMDSNYQLIW

SEQ ID NO: 737294 - protein, 11 aa, Homo sapiens
  CDR3 for beta chain variable domain of TCR clone 368647 (TRBV20-1, TRBJ2-7)
CSARTSYEQYF

SEQ ID NO: 737295 - protein, 17 aa, Homo sapiens
  CDR3 for alpha chain variable domain of TCR clone 368648 (TRAV13-1, TRAJ53)
CAAGWKSRGGSNYKLTF

SEQ ID NO: 737296 - protein, 19 aa, Homo sapiens
  CDR3 for beta chain variable domain of TCR clone 368648 (TRBV7-9, TRBJ2-1)
CASSHNRGALLRSYNEQFF

SEQ ID NO: 737297 - protein, 15 aa, Homo sapiens
  CDR3 for alpha chain variable domain of TCR clone 368649 (TRAV21, TRAJ53)
CATLNSGGSNYKLTF

SEQ ID NO: 737298 - protein, 15 aa, Homo sapiens
  CDR3 for beta chain variable domain of TCR clone 368649 (TRBV9, TRBJ1-6)
CASSVAGTGDSPLLF

SEQ ID NO: 737299 - protein, 13 aa, Homo sapiens
  CDR3 for alpha chain variable domain of TCR clone 368650 (TRAV21, TRAJ52)
CAVRPSPAGGTSY

SEQ ID NO: 737300 - protein, 13 aa, Homo sapiens
  CDR3 for beta chain variable domain of TCR clone 368650 (TRBV20-1, TRBJ1-1)
CSARVGGNTEAFF

SEQ ID NO: 737301 - protein, 15 aa, Homo sapiens
  CDR3 for alpha chain variable domain of TCR clone 368651 (TRAV12-2, )
CAVASLATNISRTLT

SEQ ID NO: 737302 - protein, 16 aa, Homo sapiens
  CDR3 for beta chain variable domain of TCR clone 368651 (TRBV5-1, TRBJ2-2)
CASSSRTGGRTGELFF

SEQ ID NO: 737303 - protein, 14 aa, Homo sapiens
  CDR3 for alpha chain variable domain of TCR clone 368652 (TRAV8-4, TRAJ8)
CAVSEDAGFQKLVF

SEQ ID NO: 737304 - protein, 17 aa, Homo sapiens
  CDR3 for beta chain variable domain of TCR clone 368652 (TRBV6-3, TRBJ2-2)
CASSYAGQGINTGELFF

SEQ ID NO: 737305 - protein, 12 aa, Homo sapiens
  CDR3 for alpha chain variable domain of TCR clone 368653 (TRAV17, TRAJ30)
CVPERRDDKIIF

SEQ ID NO: 737306 - protein, 14 aa, Homo sapiens
  CDR3 for beta chain variable domain of TCR clone 368653 (TRBV7-7, TRBJ2-2)
CASSRDRSSGELFF

SEQ ID NO: 737307 - protein, 13 aa, Homo sapiens
  CDR3 for alpha chain variable domain of TCR clone 368654 (TRAV8-3, TRAJ43)
CAVGIYNNNDMRF

SEQ ID NO: 737308 - protein, 16 aa, Homo sapiens
  CDR3 for beta chain variable domain of TCR clone 368654 (TRBV7-2, TRBJ2-5)
CASSLVLWTKPETQYF

SEQ ID NO: 737309 - protein, 12 aa, Homo sapiens
  CDR3 for alpha chain variable domain of TCR clone 368655 (TRAV12-3, TRAJ17)
CAMTLTCNKLTF

SEQ ID NO: 737310 - protein, 14 aa, Homo sapiens
  CDR3 for beta chain variable domain of TCR clone 368655 (TRBV6-1, TRBJ1-3)
CASVQGGGGNTIYF

SEQ ID NO: 737311 - protein, 13 aa, Homo sapiens
  CDR3 for alpha chain variable domain of TCR clone 368656 (TRAV21, TRAJ27)
CAACPGNAGKSTF

SEQ ID NO: 737312 - protein, 14 aa, Homo sapiens
  CDR3 for beta chain variable domain of TCR clone 368656 (TRBV7-6, TRBJ2-3)
CASSLGTVSDTQYF

SEQ ID NO: 737313 - protein, 17 aa, Homo sapiens
  CDR3 for alpha chain variable domain of TCR clone 368657 (TRAV4, TRAJ18)
CLVGERSVGSTLGRPYF

SEQ ID NO: 737314 - protein, 11 aa, Homo sapiens
  CDR3 for beta chain variable domain of TCR clone 368657 (TRBV29-1, TRBJ2-5)
CSEDRTGTQYF

SEQ ID NO: 737315 - protein, 14 aa, Homo sapiens
  CDR3 for alpha chain variable domain of TCR clone 368658 (TRAV29/DV5, TRAJ40)
CAAKKYSGTYKYIF

SEQ ID NO: 737316 - protein, 14 aa, Homo sapiens
  CDR3 for beta chain variable domain of TCR clone 368658 (TRBV5-1, TRBJ2-3)
CASSASGGQDTQYF

SEQ ID NO: 737317 - protein, 18 aa, Homo sapiens
  CDR3 for alpha chain variable domain of TCR clone 368659 (TRAV26-1, TRAJ23)
CMVRVGLEVWNQGGKLIF

SEQ ID NO: 737318 - protein, 16 aa, Homo sapiens
  CDR3 for beta chain variable domain of TCR clone 368659 (TRBV12-4, TRBJ2-5)
CASSFFVRGRQETQYF

SEQ ID NO: 737319 - protein, 12 aa, Homo sapiens
  CDR3 for alpha chain variable domain of TCR clone 368660 (TRAV23/DV6, TRAJ30)
CAASKGDDKIIF

SEQ ID NO: 737320 - protein, 14 aa, Homo sapiens
  CDR3 for beta chain variable domain of TCR clone 368660 (TRBV7-2, TRBJ2-5)
CASSFTQGQETQYF

SEQ ID NO: 737321 - protein, 17 aa, Homo sapiens
  CDR3 for alpha chain variable domain of TCR clone 368661 (TRAV26-1, TRAJ46)
IASSESEKKSSGDKLTF

SEQ ID NO: 737322 - protein, 15 aa, Homo sapiens
  CDR3 for beta chain variable domain of TCR clone 368661 (TRBV7-3, TRBJ2-2)
CASKANGANTGELFF

SEQ ID NO: 737323 - protein, 14 aa, Homo sapiens
  CDR3 for alpha chain variable domain of TCR clone 368662 (TRAV12-2, TRAJ5)
CAVYRSTGRRALTF

SEQ ID NO: 737324 - protein, 12 aa, Homo sapiens
  CDR3 for beta chain variable domain of TCR clone 368662 (TRBV19, TRBJ1-5)
CASSIAQQPQHF

SEQ ID NO: 737325 - protein, 14 aa, Homo sapiens
  CDR3 for alpha chain variable domain of TCR clone 368663 (TRAV1-2, TRAJ29)
CAVRELTSATPLVF

SEQ ID NO: 737326 - protein, 16 aa, Homo sapiens
  CDR3 for beta chain variable domain of TCR clone 368663 (TRBV6-1, TRBJ2-5)
CASSETLDRGAETQYF

SEQ ID NO: 737327 - protein, 11 aa, Homo sapiens
  CDR3 for alpha chain variable domain of TCR clone 368664 (TRAV21, TRAJ7)
CAAYGNNRLAF

SEQ ID NO: 737328 - protein, 13 aa, Homo sapiens
  CDR3 for beta chain variable domain of TCR clone 368664 (TRBV7-9, TRBJ1-2)
CASSLKQNYGYTF

SEQ ID NO: 737329 - protein, 14 aa, Homo sapiens
  CDR3 for alpha chain variable domain of TCR clone 368665 (TRAV12-3, TRAJ10)
SHLPLTGGGNKLTF

SEQ ID NO: 737330 - protein, 15 aa, Homo sapiens
  CDR3 for beta chain variable domain of TCR clone 368665 (TRBV27, TRBJ1-5)
CASSLGTGFDQHQHF

SEQ ID NO: 737331 - protein, 14 aa, Homo sapiens
  CDR3 for alpha chain variable domain of TCR clone 368666 (TRAV14/DV4, TRAJ15)
CAMRRDQAGTALIF

SEQ ID NO: 737332 - protein, 11 aa, Homo sapiens
  CDR3 for beta chain variable domain of TCR clone 368666 (TRBV7-2, TRBJ2-7)
CASSSGLWKYF

SEQ ID NO: 737333 - protein, 16 aa, Homo sapiens
  CDR3 for alpha chain variable domain of TCR clone 368667 (TRAV3, TRAJ37)
CAVRGKGSGNTGKLIF

SEQ ID NO: 737334 - protein, 13 aa, Homo sapiens
  CDR3 for beta chain variable domain of TCR clone 368667 (TRBV12-4, TRBJ1-2)
CASSSGLTVISTF

SEQ ID NO: 737335 - protein, 15 aa, Homo sapiens
  CDR3 for alpha chain variable domain of TCR clone 368668 (TRAV21, TRAJ53)
CATLNSGGSNYKLTF

SEQ ID NO: 737336 - protein, 14 aa, Homo sapiens
  CDR3 for beta chain variable domain of TCR clone 368668 (TRBV20-1, TRBJ2-1)
CSAQIVGSANEQFF

SEQ ID NO: 737337 - protein, 14 aa, Homo sapiens
  CDR3 for alpha chain variable domain of TCR clone 368669 (TRAV14/DV4, TRAJ54)
CAMREAPGAQKLVF

SEQ ID NO: 737338 - protein, 13 aa, Homo sapiens
  CDR3 for beta chain variable domain of TCR clone 368669 (TRBV25-1, TRBJ1-2)
CASSEAGASGYTF

SEQ ID NO: 737339 - protein, 12 aa, Homo sapiens
  CDR3 for alpha chain variable domain of TCR clone 368670 (TRAV12-1, TRAJ20)
CVVNIDDYKLSF

SEQ ID NO: 737340 - protein, 12 aa, Homo sapiens
  CDR3 for beta chain variable domain of TCR clone 368670 (TRBV7-3, TRBJ2-5)
CQQLPGGETQYF

SEQ ID NO: 737341 - protein, 12 aa, Homo sapiens
  CDR3 for alpha chain variable domain of TCR clone 368671 (TRAV1-2, TRAJ29)
CAVPSGNTPLVF

SEQ ID NO: 737342 - protein, 12 aa, Homo sapiens
  CDR3 for beta chain variable domain of TCR clone 368671 (TRBV7-9, TRBJ2-7)
CASSFGSYEQFF

SEQ ID NO: 737343 - protein, 15 aa, Homo sapiens
  CDR3 for alpha chain variable domain of TCR clone 368672 (TRAV17, TRAJ4)
CATGTWSGGYNKLIF

SEQ ID NO: 737344 - protein, 16 aa, Homo sapiens
  CDR3 for beta chain variable domain of TCR clone 368672 (TRBV20-1, TRBJ2-7)
CSARGGLAGARYEQYF

SEQ ID NO: 737345 - protein, 12 aa, Homo sapiens
  CDR3 for alpha chain variable domain of TCR clone 368673 (TRAV16, TRAJ27)
CALNTNAGKSTF

SEQ ID NO: 737346 - protein, 12 aa, Homo sapiens
  CDR3 for beta chain variable domain of TCR clone 368673 (TRBV7-9, TRBJ1-4)
CASSTDREKLFF

SEQ ID NO: 737347 - protein, 12 aa, Homo sapiens
  CDR3 for alpha chain variable domain of TCR clone 368674 (TRAV12-1, TRAJ23)
CVVNNQGGKLIF

SEQ ID NO: 737348 - protein, 16 aa, Homo sapiens
  CDR3 for beta chain variable domain of TCR clone 368674 (TRBV11-1, TRBJ2-7)
CASSAQTGTLSYEQSF

SEQ ID NO: 737349 - protein, 15 aa, Homo sapiens
  CDR3 for alpha chain variable domain of TCR clone 368675 (TRAV21, TRAJ40)
FAVRPQTSGTYKYIF

SEQ ID NO: 737350 - protein, 13 aa, Homo sapiens
  CDR3 for beta chain variable domain of TCR clone 368675 (TRBV7-2, TRBJ2-2)
CASSLVRAGELFF

SEQ ID NO: 737351 - protein, 14 aa, Homo sapiens
  CDR3 for alpha chain variable domain of TCR clone 368676 (TRAV1-2, TRAJ8)
CAVREDTGFQNLVF

SEQ ID NO: 737352 - protein, 22 aa, Homo sapiens
  CDR3 for beta chain variable domain of TCR clone 368676 (TRBV7-3, TRBJ2-2)
GGTQPCISVPAAQEDTPGSCFF

SEQ ID NO: 737353 - protein, 14 aa, Homo sapiens
  CDR3 for alpha chain variable domain of TCR clone 368677 (TRAV8-3, TRAJ4)
CAVGASGGYNKLIF

SEQ ID NO: 737354 - protein, 16 aa, Homo sapiens
  CDR3 for beta chain variable domain of TCR clone 368677 (TRBV11-2, TRBJ2-1)
CQQLIHPGVEYNEQFF

SEQ ID NO: 737355 - protein, 17 aa, Homo sapiens
  CDR3 for alpha chain variable domain of TCR clone 368678 (TRAV26-2, TRAJ42)
CILRDVGYGGSQGNLIF

SEQ ID NO: 737356 - protein, 12 aa, Homo sapiens
  CDR3 for beta chain variable domain of TCR clone 368678 (TRBV7-8, TRBJ2-7)
CASSLGDREQYF

SEQ ID NO: 737357 - protein, 15 aa, Homo sapiens
  CDR3 for alpha chain variable domain of TCR clone 368679 (TRAV26-1, TRAJ29)
CIVRVEGSGNTPLVF

SEQ ID NO: 737358 - protein, 15 aa, Homo sapiens
  CDR3 for beta chain variable domain of TCR clone 368679 (TRBV7-9, TRBJ1-5)
CASSQGHQPNQPPHC

SEQ ID NO: 737359 - protein, 13 aa, Homo sapiens
  CDR3 for alpha chain variable domain of TCR clone 368680 (TRAV8-4, TRAJ10)
CAAFTGGGNKLTF

SEQ ID NO: 737360 - protein, 11 aa, Homo sapiens
  CDR3 for beta chain variable domain of TCR clone 368680 (TRBV12-4, TRBJ2-3)
CASTATDTQYF

SEQ ID NO: 737361 - protein, 12 aa, Homo sapiens
  CDR3 for alpha chain variable domain of TCR clone 368681 (TRAV30, TRAJ43)
CGTEERGNDMRF

SEQ ID NO: 737362 - protein, 13 aa, Homo sapiens
  CDR3 for beta chain variable domain of TCR clone 368681 (TRBV28, TRBJ2-2)
CASIRESTGELFF

SEQ ID NO: 737363 - protein, 14 aa, Homo sapiens
  CDR3 for alpha chain variable domain of TCR clone 368682 (TRAV8-1, TRAJ5)
CAVRTDTGRRALAF

SEQ ID NO: 737364 - protein, 15 aa, Homo sapiens
  CDR3 for beta chain variable domain of TCR clone 368682 (TRBV7-3, TRBJ2-1)
CASSPTGGGEVEQFF

SEQ ID NO: 737365 - protein, 17 aa, Homo sapiens
  CDR3 for alpha chain variable domain of TCR clone 368683 (TRAV26-1, TRAJ44)
CIARVPFGTASNSPLGL

SEQ ID NO: 737366 - protein, 17 aa, Homo sapiens
  CDR3 for beta chain variable domain of TCR clone 368683 (TRBV24-1, TRBJ2-4)
CATSDAEARGVRNIQYF

SEQ ID NO: 737367 - protein, 12 aa, Homo sapiens
  CDR3 for alpha chain variable domain of TCR clone 368684 (TRAV26-1, TRAJ36)
FIVRVRADNLFF

SEQ ID NO: 737368 - protein, 15 aa, Homo sapiens
  CDR3 for beta chain variable domain of TCR clone 368684 (TRBV6-3, TRBJ2-7)
CASSSPGTVFYEQYF

SEQ ID NO: 737369 - protein, 13 aa, Homo sapiens
  CDR3 for alpha chain variable domain of TCR clone 368685 (TRAV17, TRAJ9)
CATDYTGGFKTIF

SEQ ID NO: 737370 - protein, 15 aa, Homo sapiens
  CDR3 for beta chain variable domain of TCR clone 368685 (TRBV27, TRBJ1-6)
CASSFDRGLGSPLHF

SEQ ID NO: 737371 - protein, 18 aa, Homo sapiens
  CDR3 for alpha chain variable domain of TCR clone 368686 (TRAV21, TRAJ52)
CAVRPSPAGGTSYGKRTF

SEQ ID NO: 737372 - protein, 15 aa, Homo sapiens
  CDR3 for beta chain variable domain of TCR clone 368686 (TRBV27, TRBJ2-1)
CASSNGGGSSNEQFF

SEQ ID NO: 737373 - protein, 14 aa, Homo sapiens
  CDR3 for alpha chain variable domain of TCR clone 368687 (TRAV12-3, TRAJ33)
CAMSAGDSNYQLIW

SEQ ID NO: 737374 - protein, 17 aa, Homo sapiens
  CDR3 for beta chain variable domain of TCR clone 368687 (TRBV28, TRBJ2-5)
CASSTPEGDALQETQYF

SEQ ID NO: 737375 - protein, 19 aa, Homo sapiens
  CDR3 for alpha chain variable domain of TCR clone 368688 (TRAV2, TRAJ20)
ILQVREADAAVYRDCKLSF

SEQ ID NO: 737376 - protein, 14 aa, Homo sapiens
  CDR3 for beta chain variable domain of TCR clone 368688 (TRBV6-1, TRBJ1-3)
CASVQGGGRNTIYF

SEQ ID NO: 737377 - protein, 14 aa, Homo sapiens
  CDR3 for alpha chain variable domain of TCR clone 368689 (TRAV12-1, TRAJ23)
CVVNAAGRKAYLRT

SEQ ID NO: 737378 - protein, 14 aa, Homo sapiens
  CDR3 for beta chain variable domain of TCR clone 368689 (TRBV6-1, TRBJ1-5)
CASSEARSYQPQHF

SEQ ID NO: 737379 - protein, 12 aa, Homo sapiens
  CDR3 for alpha chain variable domain of TCR clone 368690 (TRAV12-2, TRAJ10)
WGFTGGGNKLTF

SEQ ID NO: 737380 - protein, 14 aa, Homo sapiens
  CDR3 for beta chain variable domain of TCR clone 368690 (TRBV27, TRBJ2-7)
CASATGTERREQYF

SEQ ID NO: 737381 - protein, 14 aa, Homo sapiens
  CDR3 for alpha chain variable domain of TCR clone 368691 (TRAV20, TRAJ20)
CAVRRGYNDYKLSF

SEQ ID NO: 737382 - protein, 13 aa, Homo sapiens
  CDR3 for beta chain variable domain of TCR clone 368691 (TRBV19, TRBJ2-5)
CASSETASETQYF

SEQ ID NO: 737383 - protein, 17 aa, Homo sapiens
  CDR3 for alpha chain variable domain of TCR clone 368692 (TRAV26-1, TRAJ22)
CIVRVHSHSGSARQLTF

SEQ ID NO: 737384 - protein, 16 aa, Homo sapiens
  CDR3 for beta chain variable domain of TCR clone 368692 (TRBV28, TRBJ2-1)
CASRRSGRVVGNEQFF

SEQ ID NO: 737385 - protein, 17 aa, Homo sapiens
  CDR3 for alpha chain variable domain of TCR clone 368693 (TRAV3, TRAJ6)
CAVRDGPSAGGSYIPTF

SEQ ID NO: 737386 - protein, 14 aa, Homo sapiens
  CDR3 for beta chain variable domain of TCR clone 368693 (TRBV7-2, TRBJ2-7)
CASSPKTSFYKQYF

SEQ ID NO: 737387 - protein, 17 aa, Homo sapiens
  CDR3 for alpha chain variable domain of TCR clone 368694 (TRAV3, TRAJ12)
CSVRDGGRMDSSYKLIF

SEQ ID NO: 737388 - protein, 16 aa, Homo sapiens
  CDR3 for beta chain variable domain of TCR clone 368694 (TRBV9, TRBJ2-2)
CASSAMGKGNTGELFF

SEQ ID NO: 737389 - protein, 13 aa, Homo sapiens
  CDR3 for alpha chain variable domain of TCR clone 368695 (TRAV26-2, TRAJ32)
CVGYGGATNKLIF

SEQ ID NO: 737390 - protein, 13 aa, Homo sapiens
  CDR3 for beta chain variable domain of TCR clone 368695 (TRBV12-5, TRBJ2-3)
CASGDRQSDTQYF

SEQ ID NO: 737391 - protein, 13 aa, Homo sapiens
  CDR3 for alpha chain variable domain of TCR clone 368696 (TRAV1-1, TRAJ23)
CAVVANQGGKLIF

SEQ ID NO: 737392 - protein, 14 aa, Homo sapiens
  CDR3 for beta chain variable domain of TCR clone 368696 (TRBV7-2, TRBJ2-2)
CASRGQGAAGELFF

SEQ ID NO: 737393 - protein, 12 aa, Homo sapiens
  CDR3 for alpha chain variable domain of TCR clone 368697 (TRAV12-3, TRAJ17)
CAMTLTGNKLTF

SEQ ID NO: 737394 - protein, 16 aa, Homo sapiens
  CDR3 for beta chain variable domain of TCR clone 368697 (TRBV12-4, TRBJ2-5)
CASSLSTSGGKETQYF

SEQ ID NO: 737395 - protein, 14 aa, Homo sapiens
  CDR3 for alpha chain variable domain of TCR clone 368698 (TRAV13-1, TRAJ44)
CAAKATGTASKLTF

SEQ ID NO: 737396 - protein, 16 aa, Homo sapiens
  CDR3 for beta chain variable domain of TCR clone 368698 (TRBV7-3, TRBJ2-1)
CASSKPLAGGYNEQFF

SEQ ID NO: 737397 - protein, 13 aa, Homo sapiens
  CDR3 for alpha chain variable domain of TCR clone 368699 (TRAV17, TRAJ5)
CAPMDTGRRALTF

SEQ ID NO: 737398 - protein, 18 aa, Homo sapiens
  CDR3 for beta chain variable domain of TCR clone 368699 (TRBV11-2, TRBJ2-3)
CASSLGGASRGAPNTQYF

SEQ ID NO: 737399 - protein, 15 aa, Homo sapiens
  CDR3 for alpha chain variable domain of TCR clone 368700 (TRAV17, TRAJ18)
CATADRGSTLGRLYF

SEQ ID NO: 737400 - protein, 15 aa, Homo sapiens
  CDR3 for beta chain variable domain of TCR clone 368700 (TRBV28, TRBJ2-5)
CASSSGRTIQETQYF

SEQ ID NO: 737401 - protein, 13 aa, Homo sapiens
  CDR3 for alpha chain variable domain of TCR clone 368701 (TRAV12-3, TRAJ13)
CAMTSGGYQKVTF

SEQ ID NO: 737402 - protein, 14 aa, Homo sapiens
  CDR3 for beta chain variable domain of TCR clone 368701 (TRBV6-5, TRBJ1-2)
CASTRGGGSDGYTF

SEQ ID NO: 737403 - protein, 14 aa, Homo sapiens
  CDR3 for alpha chain variable domain of TCR clone 368702 (TRAV9-2, TRAJ39)
CALYIYNAGNMLTF

SEQ ID NO: 737404 - protein, 16 aa, Homo sapiens
  CDR3 for beta chain variable domain of TCR clone 368702 (TRBV18, TRBJ1-5)
CASSPRTGGGNQPQHF

SEQ ID NO: 737405 - protein, 16 aa, Homo sapiens
  CDR3 for alpha chain variable domain of TCR clone 368703 (TRAV12-2, TRAJ18)
CAVTTDRGSTLGRLYF

SEQ ID NO: 737406 - protein, 15 aa, Homo sapiens
  CDR3 for beta chain variable domain of TCR clone 368703 (TRBV7-9, TRBJ1-5)
CASSQGHQPNQAQHF

SEQ ID NO: 737407 - protein, 15 aa, Homo sapiens
  CDR3 for alpha chain variable domain of TCR clone 368704 (TRAV25, TRAJ53)
CPTSNSGGSNYKLTF

SEQ ID NO: 737408 - protein, 15 aa, Homo sapiens
  CDR3 for beta chain variable domain of TCR clone 368704 (TRBV4-3, TRBJ2-7)
CASSQGDWGDYEQYF

SEQ ID NO: 737409 - protein, 15 aa, Homo sapiens
  CDR3 for alpha chain variable domain of TCR clone 368705 (TRAV27, TRAJ50)
CAGVGRGTSYDKVIF

SEQ ID NO: 737410 - protein, 14 aa, Homo sapiens
  CDR3 for beta chain variable domain of TCR clone 368705 (TRBV7-2, TRBJ1-1)
CASIFYDLNTEAFF

SEQ ID NO: 737411 - protein, 15 aa, Homo sapiens
  CDR3 for alpha chain variable domain of TCR clone 368706 (TRAV12-3, TRAJ11)
CAMSEENSGYSTLTF

SEQ ID NO: 737412 - protein, 13 aa, Homo sapiens
  CDR3 for beta chain variable domain of TCR clone 368706 (TRBV20-1, TRBJ1-1)
CSARGGGNTVAFF

SEQ ID NO: 737413 - protein, 11 aa, Homo sapiens
  CDR3 for alpha chain variable domain of TCR clone 368707 (TRAV1-2, TRAJ20)
CAVSNGYKLSF

SEQ ID NO: 737414 - protein, 16 aa, Homo sapiens
  CDR3 for beta chain variable domain of TCR clone 368707 (TRBV29-1, TRBJ2-6)
CSVEDITYSGANVLTF

SEQ ID NO: 737415 - protein, 11 aa, Homo sapiens
  CDR3 for alpha chain variable domain of TCR clone 368708 (TRAV29/DV5, TRAJ49)
CAAVPGNQIYF

SEQ ID NO: 737416 - protein, 13 aa, Homo sapiens
  CDR3 for beta chain variable domain of TCR clone 368708 (TRBV10-3, TRBJ2-7)
CASKLAVNYEQYF

SEQ ID NO: 737417 - protein, 16 aa, Homo sapiens
  CDR3 for alpha chain variable domain of TCR clone 368709 (TRAV12-1, TRAJ4)
CLVNPGISGVYNKLTF

SEQ ID NO: 737418 - protein, 14 aa, Homo sapiens
  CDR3 for beta chain variable domain of TCR clone 368709 (TRBV5-7, TRBJ2-3)
CASRTSGGTDTQYF

SEQ ID NO: 737419 - protein, 12 aa, Homo sapiens
  CDR3 for alpha chain variable domain of TCR clone 368710 (TRAV12-3, TRAJ17)
CAMTLTGNKLTF

SEQ ID NO: 737420 - protein, 13 aa, Homo sapiens
  CDR3 for beta chain variable domain of TCR clone 368710 (TRBV19, TRBJ2-7)
CASSTSGSYEQYF

SEQ ID NO: 737421 - protein, 13 aa, Homo sapiens
  CDR3 for alpha chain variable domain of TCR clone 368711 (TRAV12-3, TRAJ58)
CAMGETSGSRLTF

SEQ ID NO: 737422 - protein, 15 aa, Homo sapiens
  CDR3 for beta chain variable domain of TCR clone 368711 (TRBV20-1, TRBJ2-5)
CSATPLTGGQETQYF

SEQ ID NO: 737423 - protein, 13 aa, Homo sapiens
  CDR3 for alpha chain variable domain of TCR clone 368712 (TRAV12-3, TRAJ40)
CAMSARGTYKYIF

SEQ ID NO: 737424 - protein, 16 aa, Homo sapiens
  CDR3 for beta chain variable domain of TCR clone 368712 (TRBV5-4, TRBJ2-3)
CASQQPGAGGADTQYF

SEQ ID NO: 737425 - protein, 14 aa, Homo sapiens
  CDR3 for alpha chain variable domain of TCR clone 368713 (TRAV35, TRAJ44)
CAGRPSRTDSKLAF

SEQ ID NO: 737426 - protein, 14 aa, Homo sapiens
  CDR3 for beta chain variable domain of TCR clone 368713 (TRBV7-2, TRBJ1-3)
CASSRGGTGNTIYF

SEQ ID NO: 737427 - protein, 17 aa, Homo sapiens
  CDR3 for alpha chain variable domain of TCR clone 368714 (TRAV26-2, TRAJ32)
ERSCCVGYGGATNKLIF

SEQ ID NO: 737428 - protein, 14 aa, Homo sapiens
  CDR3 for beta chain variable domain of TCR clone 368714 (TRBV4-2, TRBJ2-1)
CASGLDRAYNEQFF

SEQ ID NO: 737429 - protein, 11 aa, Homo sapiens
  CDR3 for alpha chain variable domain of TCR clone 368715 (TRAV35, TRAJ30)
CAPGGDDKITF

SEQ ID NO: 737430 - protein, 16 aa, Homo sapiens
  CDR3 for beta chain variable domain of TCR clone 368715 (TRBV7-6, TRBJ2-1)
CIAVPAAWGGADEQFF

SEQ ID NO: 737431 - protein, 16 aa, Homo sapiens
  CDR3 for alpha chain variable domain of TCR clone 368716 (TRAV3, TRAJ22)
CAVRDMGSGSARQLTF

SEQ ID NO: 737432 - protein, 13 aa, Homo sapiens
  CDR3 for beta chain variable domain of TCR clone 368716 (TRBV6-5, TRBJ2-5)
CATAPSPQETQYF

SEQ ID NO: 737433 - protein, 13 aa, Homo sapiens
  CDR3 for alpha chain variable domain of TCR clone 368717 (TRAV13-2, TRAJ15)
CAERPQAGTAVIF

SEQ ID NO: 737434 - protein, 15 aa, Homo sapiens
  CDR3 for beta chain variable domain of TCR clone 368717 (TRBV11-2, TRBJ2-7)
CASRFPGTGGYEQYF

SEQ ID NO: 737435 - protein, 15 aa, Homo sapiens
  CDR3 for alpha chain variable domain of TCR clone 368718 (TRAV26-2, TRAJ45)
CILRDRVGQEEVLTD

SEQ ID NO: 737436 - protein, 15 aa, Homo sapiens
  CDR3 for beta chain variable domain of TCR clone 368718 (TRBV7-6, TRBJ2-5)
CASSKPTGPQETQYF

SEQ ID NO: 737437 - protein, 12 aa, Homo sapiens
  CDR3 for alpha chain variable domain of TCR clone 368719 (TRAV2, TRAJ31)
CAVEDKNARLMF

SEQ ID NO: 737438 - protein, 12 aa, Homo sapiens
  CDR3 for beta chain variable domain of TCR clone 368719 (TRBV28, TRBJ2-3)
CASSLYRDTQYF

SEQ ID NO: 737439 - protein, 13 aa, Homo sapiens
  CDR3 for alpha chain variable domain of TCR clone 368720 (TRAV1-2, TRAJ9)
CAALNTGGFKTIF

SEQ ID NO: 737440 - protein, 15 aa, Homo sapiens
  CDR3 for beta chain variable domain of TCR clone 368720 (TRBV11-2, TRBJ2-1)
CASSSPSTRYNEQFF

SEQ ID NO: 737441 - protein, 16 aa, Homo sapiens
  CDR3 for alpha chain variable domain of TCR clone 368721 (TRAV1-2, TRAJ10)
CAVRDQGGGGGNKLTI

SEQ ID NO: 737442 - protein, 13 aa, Homo sapiens
  CDR3 for beta chain variable domain of TCR clone 368721 (TRBV29-1, TRBJ1-1)
CSVGDSRNTEAFF

SEQ ID NO: 737443 - protein, 17 aa, Homo sapiens
  CDR3 for alpha chain variable domain of TCR clone 368722 (TRAV8-6, TRAJ58)
CAVSSWVGETSGSRVTF

SEQ ID NO: 737444 - protein, 20 aa, Homo sapiens
  CDR3 for beta chain variable domain of TCR clone 368722 (TRBV7-8, TRBJ2-2)
CASSHLFPGPTIHITGELFF

SEQ ID NO: 737445 - protein, 11 aa, Homo sapiens
  CDR3 for alpha chain variable domain of TCR clone 368723 (TRAV1-1, TRAJ23)
CAVRHGGKLIF

SEQ ID NO: 737446 - protein, 13 aa, Homo sapiens
  CDR3 for beta chain variable domain of TCR clone 368723 (TRBV12-5, TRBJ2-3)
CASGDRQSDTQYF

SEQ ID NO: 737447 - protein, 14 aa, Homo sapiens
  CDR3 for alpha chain variable domain of TCR clone 368724 (TRAV35, TRAJ22)
CAGLRRGSARQLTF

SEQ ID NO: 737448 - protein, 14 aa, Homo sapiens
  CDR3 for beta chain variable domain of TCR clone 368724 (TRBV4-1, TRBJ2-7)
CASSPVAGGDEQYF

SEQ ID NO: 737449 - protein, 17 aa, Homo sapiens
  CDR3 for alpha chain variable domain of TCR clone 368725 (TRAV13-2, TRAJ43)
CAENEGMRFGAGTRLTV

SEQ ID NO: 737450 - protein, 13 aa, Homo sapiens
  CDR3 for beta chain variable domain of TCR clone 368725 (TRBV19, TRBJ1-1)
CASSFGRNTEAFF

SEQ ID NO: 737451 - protein, 15 aa, Homo sapiens
  CDR3 for alpha chain variable domain of TCR clone 368726 (TRAV13-1, TRAJ17)
CAASIHGCCRQQANF

SEQ ID NO: 737452 - protein, 14 aa, Homo sapiens
  CDR3 for beta chain variable domain of TCR clone 368726 (TRBV20-1, TRBJ2-4)
CSARDRGQGGIQYF

SEQ ID NO: 737453 - protein, 13 aa, Homo sapiens
  CDR3 for alpha chain variable domain of TCR clone 368727 (TRAV20, TRAJ37)
CAGCSSNTGKLIF

SEQ ID NO: 737454 - protein, 15 aa, Homo sapiens
  CDR3 for beta chain variable domain of TCR clone 368727 (TRBV11-3, TRBJ2-3)
CASLKDGREGDTQYF

SEQ ID NO: 737455 - protein, 13 aa, Homo sapiens
  CDR3 for alpha chain variable domain of TCR clone 368728 (TRAV13-1, TRAJ20)
CAARVSNDYKLSF

SEQ ID NO: 737456 - protein, 14 aa, Homo sapiens
  CDR3 for beta chain variable domain of TCR clone 368728 (TRBV7-2, TRBJ1-2)
CASSQTGSTYGYTF

SEQ ID NO: 737457 - protein, 14 aa, Homo sapiens
  CDR3 for alpha chain variable domain of TCR clone 368729 (TRAV26-1, TRAJ39)
CIARVSRAGNMLTF

SEQ ID NO: 737458 - protein, 15 aa, Homo sapiens
  CDR3 for beta chain variable domain of TCR clone 368729 (TRBV7-9, TRBJ1-5)
CASSQGHQPNQPQHF

SEQ ID NO: 737459 - protein, 13 aa, Homo sapiens
  CDR3 for alpha chain variable domain of TCR clone 368730 (TRAV8-4, TRAJ10)
CAAFTGGGNKLTV

SEQ ID NO: 737460 - protein, 15 aa, Homo sapiens
  CDR3 for beta chain variable domain of TCR clone 368730 (TRBV2, TRBJ2-3)
CASSDFEKATDTQYF

SEQ ID NO: 737461 - protein, 16 aa, Homo sapiens
  CDR3 for alpha chain variable domain of TCR clone 368731 (TRAV12-3, TRAJ53)
CAMSPGSGGSNYKLTF

SEQ ID NO: 737462 - protein, 16 aa, Homo sapiens
  CDR3 for beta chain variable domain of TCR clone 368731 (TRBV4-2, TRBJ1-1)
CASSQAGFGTNTEAFF

SEQ ID NO: 737463 - protein, 21 aa, Homo sapiens
  CDR3 for alpha chain variable domain of TCR clone 368732 (TRAV1-1, TRAJ6)
CLLLLRCERLERTGGSYIPTF

SEQ ID NO: 737464 - protein, 14 aa, Homo sapiens
  CDR3 for beta chain variable domain of TCR clone 368732 (TRBV7-2, TRBJ2-5)
CASSLSGGGETHYF

SEQ ID NO: 737465 - protein, 20 aa, Homo sapiens
  CDR3 for alpha chain variable domain of TCR clone 368733 (TRAV12-3, TRAJ41)
SLFIRDSQPSDSATPEALNF

SEQ ID NO: 737466 - protein, 16 aa, Homo sapiens
  CDR3 for beta chain variable domain of TCR clone 368733 (TRBV7-7, TRBJ2-1)
CASSLASGTSYNEQFF

SEQ ID NO: 737467 - protein, 14 aa, Homo sapiens
  CDR3 for alpha chain variable domain of TCR clone 368734 (TRAV38-1, TRAJ29)
CAFITPSGNTPLVF

SEQ ID NO: 737468 - protein, 13 aa, Homo sapiens
  CDR3 for beta chain variable domain of TCR clone 368734 (TRBV24-1, TRBJ2-2)
CATSDWSTGELFF

SEQ ID NO: 737469 - protein, 15 aa, Homo sapiens
  CDR3 for alpha chain variable domain of TCR clone 368735 (TRAV3, TRAJ5)
CAVRDRKTGRRALTF

SEQ ID NO: 737470 - protein, 15 aa, Homo sapiens
  CDR3 for beta chain variable domain of TCR clone 368735 (TRBV7-8, TRBJ2-1)
CASSIADSLYNEQFF

SEQ ID NO: 737471 - protein, 11 aa, Homo sapiens
  CDR3 for alpha chain variable domain of TCR clone 368736 (TRAV3, TRAJ21)
CAVGNFNKFYF

SEQ ID NO: 737472 - protein, 18 aa, Homo sapiens
  CDR3 for beta chain variable domain of TCR clone 368736 (TRBV7-2, TRBJ2-3)
CASSLKREGSGITDTQYF

SEQ ID NO: 737473 - protein, 17 aa, Homo sapiens
  CDR3 for alpha chain variable domain of TCR clone 368737 (TRAV4, TRAJ13)
CLVGVQGSSGGYQKVTF

SEQ ID NO: 737474 - protein, 15 aa, Homo sapiens
  CDR3 for beta chain variable domain of TCR clone 368737 (TRBV29-1, TRBJ2-1)
CSVEGGPASYNEQFF

SEQ ID NO: 737475 - protein, 18 aa, Homo sapiens
  CDR3 for alpha chain variable domain of TCR clone 368738 (TRAV13-1, TRAJ52)
CAAKNPNAGGTSYGKLTF

SEQ ID NO: 737476 - protein, 15 aa, Homo sapiens
  CDR3 for beta chain variable domain of TCR clone 368738 (TRBV6-1, TRBJ2-3)
CASSERGGITHTQYF

SEQ ID NO: 737477 - protein, 13 aa, Homo sapiens
  CDR3 for alpha chain variable domain of TCR clone 368739 (TRAV8-6, TRAJ13)
CAVRDGGYQKVTF

SEQ ID NO: 737478 - protein, 12 aa, Homo sapiens
  CDR3 for beta chain variable domain of TCR clone 368739 (TRBV7-9, TRBJ2-7)
CASSLGDREQYF

SEQ ID NO: 737479 - protein, 12 aa, Homo sapiens
  CDR3 for alpha chain variable domain of TCR clone 368740 (TRAV12-3, TRAJ17)
CAMTLTGNKLTF

SEQ ID NO: 737480 - protein, 16 aa, Homo sapiens
  CDR3 for beta chain variable domain of TCR clone 368740 (TRBV7-3, TRBJ2-2)
CASSLTRGTLSGELFF

SEQ ID NO: 737481 - protein, 12 aa, Homo sapiens
  CDR3 for alpha chain variable domain of TCR clone 368741 (TRAV12-3, TRAJ17)
CAMTLTGNKLTF

SEQ ID NO: 737482 - protein, 14 aa, Homo sapiens
  CDR3 for beta chain variable domain of TCR clone 368741 (TRBV4-1, TRBJ2-7)
CASSQDREHVEQYC

SEQ ID NO: 737483 - protein, 14 aa, Homo sapiens
  CDR3 for alpha chain variable domain of TCR clone 368742 (TRAV17, TRAJ6)
CATNPAGGRYIPTF

SEQ ID NO: 737484 - protein, 16 aa, Homo sapiens
  CDR3 for beta chain variable domain of TCR clone 368742 (TRBV13, TRBJ2-2)
CASSPRTGEHTGELFF

SEQ ID NO: 737485 - protein, 14 aa, Homo sapiens
  CDR3 for alpha chain variable domain of TCR clone 368743 (TRAV12-3, TRAJ13)
CAMRNSGGYQKVTF

SEQ ID NO: 737486 - protein, 15 aa, Homo sapiens
  CDR3 for beta chain variable domain of TCR clone 368743 (TRBV7-2, TRBJ2-7)
CASSWGQGAIYEQYF

SEQ ID NO: 737487 - protein, 16 aa, Homo sapiens
  CDR3 for alpha chain variable domain of TCR clone 368744 (TRAV13-1, TRAJ48)
CAASILGNFGNEKLTF

SEQ ID NO: 737488 - protein, 11 aa, Homo sapiens
  CDR3 for beta chain variable domain of TCR clone 368744 (TRBV27, TRBJ2-3)
CASSLGDTQYF

SEQ ID NO: 737489 - protein, 14 aa, Homo sapiens
  CDR3 for alpha chain variable domain of TCR clone 368745 (TRAV13-2, TRAJ9)
CAENSFTGGFKTIF

SEQ ID NO: 737490 - protein, 14 aa, Homo sapiens
  CDR3 for beta chain variable domain of TCR clone 368745 (TRBV5-1, TRBJ2-5)
CASSSGQGGETQYF

SEQ ID NO: 737491 - protein, 16 aa, Homo sapiens
  CDR3 for alpha chain variable domain of TCR clone 368746 (TRAV29/DV5, TRAJ36)
CAASAHYQSGANNLFF

SEQ ID NO: 737492 - protein, 14 aa, Homo sapiens
  CDR3 for beta chain variable domain of TCR clone 368746 (TRBV7-2, TRBJ2-7)
CASSPKTSFYEQYF

SEQ ID NO: 737493 - protein, 12 aa, Homo sapiens
  CDR3 for alpha chain variable domain of TCR clone 368747 (TRAV13-1, TRAJ3)
CAATGVQQCFQD

SEQ ID NO: 737494 - protein, 16 aa, Homo sapiens
  CDR3 for beta chain variable domain of TCR clone 368747 (TRBV7-3, TRBJ2-2)
CASSLKRGTLPGELFF

SEQ ID NO: 737495 - protein, 14 aa, Homo sapiens
  CDR3 for alpha chain variable domain of TCR clone 368748 (TRAV13-1, TRAJ20)
CAARPGSNEYKLSF

SEQ ID NO: 737496 - protein, 13 aa, Homo sapiens
  CDR3 for beta chain variable domain of TCR clone 368748 (TRBV20-1, TRBJ1-1)
CSAPPGGHTEAFF

SEQ ID NO: 737497 - protein, 14 aa, Homo sapiens
  CDR3 for alpha chain variable domain of TCR clone 368749 (TRAV1-2, TRAJ8)
CAVREDKGFQKLVF

SEQ ID NO: 737498 - protein, 16 aa, Homo sapiens
  CDR3 for beta chain variable domain of TCR clone 368749 (TRBV4-1, TRBJ1-4)
CASSQDLRRGGEKLFF

SEQ ID NO: 737499 - protein, 17 aa, Homo sapiens
  CDR3 for alpha chain variable domain of TCR clone 368750 (TRAV8-2, )
CVVNIQNPDPAVYQLRD

SEQ ID NO: 737500 - protein, 13 aa, Homo sapiens
  CDR3 for beta chain variable domain of TCR clone 368750 (TRBV7-9, TRBJ2-5)
CSSLVGGEETQYF

SEQ ID NO: 737501 - protein, 14 aa, Homo sapiens
  CDR3 for alpha chain variable domain of TCR clone 368751 (TRAV12-2, TRAJ13)
CAVKKTGGYQKVTF

SEQ ID NO: 737502 - protein, 13 aa, Homo sapiens
  CDR3 for beta chain variable domain of TCR clone 368751 (TRBV2, TRBJ2-7)
CASSVGGSGGQYF

SEQ ID NO: 737503 - protein, 10 aa, Homo sapiens
  CDR3 for alpha chain variable domain of TCR clone 368752 (TRAV1-2, TRAJ20)
CALNDYKLSF

SEQ ID NO: 737504 - protein, 16 aa, Homo sapiens
  CDR3 for beta chain variable domain of TCR clone 368752 (TRBV11-2, TRBJ1-1)
CASSLRQGGEHSKAFF

SEQ ID NO: 737505 - protein, 13 aa, Homo sapiens
  CDR3 for alpha chain variable domain of TCR clone 368753 (TRAV30, TRAJ24)
CGTVTDSWGKLQF

SEQ ID NO: 737506 - protein, 15 aa, Homo sapiens
  CDR3 for beta chain variable domain of TCR clone 368753 (TRBV25-1, TRBJ1-4)
CASSPGDSTNEKLFV

SEQ ID NO: 737507 - protein, 15 aa, Homo sapiens
  CDR3 for alpha chain variable domain of TCR clone 368754 (TRAV12-1, TRAJ45)
CVVLSGGGGPDGLTF

SEQ ID NO: 737508 - protein, 14 aa, Homo sapiens
  CDR3 for beta chain variable domain of TCR clone 368754 (TRBV11-2, TRBJ2-5)
CASSRTGGIETQYF

SEQ ID NO: 737509 - protein, 14 aa, Homo sapiens
  CDR3 for alpha chain variable domain of TCR clone 368755 (TRAV26-1, TRAJ39)
CIVRGSRAGNMLTF

SEQ ID NO: 737510 - protein, 16 aa, Homo sapiens
  CDR3 for beta chain variable domain of TCR clone 368755 (TRBV20-1, TRBJ1-4)
CSAPGQGLLTNEKLFF

SEQ ID NO: 737511 - protein, 15 aa, Homo sapiens
  CDR3 for alpha chain variable domain of TCR clone 368756 (TRAV16, TRAJ16)
CALQGGGSDGQKLLF

SEQ ID NO: 737512 - protein, 15 aa, Homo sapiens
  CDR3 for beta chain variable domain of TCR clone 368756 (TRBV20-1, TRBJ2-7)
CSARVRVSGMDEQYF

SEQ ID NO: 737513 - protein, 15 aa, Homo sapiens
  CDR3 for alpha chain variable domain of TCR clone 368757 (TRAV13-1, TRAJ32)
CAASNGWWCYKQAHL

SEQ ID NO: 737514 - protein, 15 aa, Homo sapiens
  CDR3 for beta chain variable domain of TCR clone 368757 (TRBV20-1, TRBJ2-7)
CSARDRVSGMDELYF

SEQ ID NO: 737515 - protein, 15 aa, Homo sapiens
  CDR3 for alpha chain variable domain of TCR clone 368758 (TRAV38-1, TRAJ57)
CAFIDSQGGSEKLVF

SEQ ID NO: 737516 - protein, 16 aa, Homo sapiens
  CDR3 for beta chain variable domain of TCR clone 368758 (TRBV10-3, TRBJ2-1)
CAISLTSGNSYNEQFF

SEQ ID NO: 737517 - protein, 13 aa, Homo sapiens
  CDR3 for alpha chain variable domain of TCR clone 368759 (TRAV21, TRAJ57)
CAVTQGGPEKLVL

SEQ ID NO: 737518 - protein, 19 aa, Homo sapiens
  CDR3 for beta chain variable domain of TCR clone 368759 (TRBV29-1, TRBJ2-7)
SAALKMLRTVRPKSSTSGR

SEQ ID NO: 737519 - protein, 13 aa, Homo sapiens
  CDR3 for alpha chain variable domain of TCR clone 368760 (TRAV12-2, TRAJ39)
CAVNNNAGNMLTF

SEQ ID NO: 737520 - protein, 13 aa, Homo sapiens
  CDR3 for beta chain variable domain of TCR clone 368760 (TRBV2, TRBJ1-5)
CATAGPGNQPQQF

SEQ ID NO: 737521 - protein, 16 aa, Homo sapiens
  CDR3 for alpha chain variable domain of TCR clone 368761 (TRAV8-6, TRAJ37)
CAVTGLGSSNTGKLIF

SEQ ID NO: 737522 - protein, 15 aa, Homo sapiens
  CDR3 for beta chain variable domain of TCR clone 368761 (TRBV20-1, TRBJ1-5)
CSARSGPSMNQPQHF

SEQ ID NO: 737523 - protein, 17 aa, Homo sapiens
  CDR3 for alpha chain variable domain of TCR clone 368762 (TRAV3, TRAJ42)
CAVRDSDYGGSQGNLIF

SEQ ID NO: 737524 - protein, 14 aa, Homo sapiens
  CDR3 for beta chain variable domain of TCR clone 368762 (TRBV19, TRBJ2-2)
CTSSGQGIAGELFF

SEQ ID NO: 737525 - protein, 18 aa, Homo sapiens
  CDR3 for alpha chain variable domain of TCR clone 368763 (TRAV12-3, TRAJ52)
CAMSVGGAGGTSYGKLTF

SEQ ID NO: 737526 - protein, 17 aa, Homo sapiens
  CDR3 for beta chain variable domain of TCR clone 368763 (TRBV7-3, TRBJ2-3)
CASSLMKRMRGAETQYF

SEQ ID NO: 737527 - protein, 13 aa, Homo sapiens
  CDR3 for alpha chain variable domain of TCR clone 368764 (TRAV22, TRAJ12)
CAGRMDSSYKLIF

SEQ ID NO: 737528 - protein, 15 aa, Homo sapiens
  CDR3 for beta chain variable domain of TCR clone 368764 (TRBV10-1, TRBJ2-1)
CASSEWRGTYYEQFF

SEQ ID NO: 737529 - protein, 16 aa, Homo sapiens
  CDR3 for alpha chain variable domain of TCR clone 368765 (TRAV23/DV6, TRAJ21)
CAASSGGGTTSTNITL

SEQ ID NO: 737530 - protein, 11 aa, Homo sapiens
  CDR3 for beta chain variable domain of TCR clone 368765 (TRBV7-8, TRBJ2-7)
CASSLSLEQYF

SEQ ID NO: 737531 - protein, 23 aa, Homo sapiens
  CDR3 for alpha chain variable domain of TCR clone 368766 (TRAV12-2, TRAJ36)
SLLIRDSQPSDSATLERANNLFF

SEQ ID NO: 737532 - protein, 14 aa, Homo sapiens
  CDR3 for beta chain variable domain of TCR clone 368766 (TRBV7-8, TRBJ2-3)
CASSLEAGTDTQYF

SEQ ID NO: 737533 - protein, 13 aa, Homo sapiens
  CDR3 for alpha chain variable domain of TCR clone 368767 (TRAV2, TRAJ10)
CAVEPGGGNKPTF

SEQ ID NO: 737534 - protein, 14 aa, Homo sapiens
  CDR3 for beta chain variable domain of TCR clone 368767 (TRBV20-1, TRBJ2-3)
CSAGGRRGTDTQYF

SEQ ID NO: 737535 - protein, 14 aa, Homo sapiens
  CDR3 for alpha chain variable domain of TCR clone 368768 (TRAV26-1, TRAJ45)
CIEVTGGGADGLAF

SEQ ID NO: 737536 - protein, 16 aa, Homo sapiens
  CDR3 for beta chain variable domain of TCR clone 368768 (TRBV10-2, TRBJ1-1)
CASSEFGEGASTEAFF

SEQ ID NO: 737537 - protein, 15 aa, Homo sapiens
  CDR3 for alpha chain variable domain of TCR clone 368769 (TRAV17, TRAJ22)
CATVAPSGSARQLTF

SEQ ID NO: 737538 - protein, 11 aa, Homo sapiens
  CDR3 for beta chain variable domain of TCR clone 368769 (TRBV7-8, TRBJ2-7)
CASSLSLEQYF

SEQ ID NO: 737539 - protein, 13 aa, Homo sapiens
  CDR3 for alpha chain variable domain of TCR clone 368770 (TRAV17, TRAJ9)
CATFLTGGFKTIF

SEQ ID NO: 737540 - protein, 17 aa, Homo sapiens
  CDR3 for beta chain variable domain of TCR clone 368770 (TRBV24-1, TRBJ2-1)
CATSDVSTSGTYNEQFF

SEQ ID NO: 737541 - protein, 13 aa, Homo sapiens
  CDR3 for alpha chain variable domain of TCR clone 368771 (TRAV8-3, TRAJ43)
CAVGADNNNDMRF

SEQ ID NO: 737542 - protein, 18 aa, Homo sapiens
  CDR3 for beta chain variable domain of TCR clone 368771 (TRBV5-5, TRBJ1-5)
CASSLRQVKGSSNQPQHF

SEQ ID NO: 737543 - protein, 17 aa, Homo sapiens
  CDR3 for alpha chain variable domain of TCR clone 368772 (TRAV3, TRAJ6)
CAVRDGTRAGGSSIPTF

SEQ ID NO: 737544 - protein, 14 aa, Homo sapiens
  CDR3 for beta chain variable domain of TCR clone 368772 (TRBV7-2, TRBJ2-7)
CASSPKTSFYEQYF

SEQ ID NO: 737545 - protein, 11 aa, Homo sapiens
  CDR3 for alpha chain variable domain of TCR clone 368773 (TRAV3, TRAJ21)
CAGGNFNKFYF

SEQ ID NO: 737546 - protein, 16 aa, Homo sapiens
  CDR3 for beta chain variable domain of TCR clone 368773 (TRBV19, TRBJ2-1)
CASSKAGPSSCNEQFF

SEQ ID NO: 737547 - protein, 16 aa, Homo sapiens
  CDR3 for alpha chain variable domain of TCR clone 368774 (TRAV3, TRAJ6)
CAVRDGMGRRTLHTYI

SEQ ID NO: 737548 - protein, 15 aa, Homo sapiens
  CDR3 for beta chain variable domain of TCR clone 368774 (TRBV5-1, TRBJ2-7)
CASSLGDFTTYEQYF

SEQ ID NO: 737549 - protein, 13 aa, Homo sapiens
  CDR3 for alpha chain variable domain of TCR clone 368775 (TRAV13-1, TRAJ6)
CAASKGGSYIPTF

SEQ ID NO: 737550 - protein, 12 aa, Homo sapiens
  CDR3 for beta chain variable domain of TCR clone 368775 (TRBV6-1, TRBJ2-7)
CASSDYSYEQYF

SEQ ID NO: 737551 - protein, 13 aa, Homo sapiens
  CDR3 for alpha chain variable domain of TCR clone 368776 (TRAV12-2, TRAJ30)
CVVNLNRDDKIIF

SEQ ID NO: 737552 - protein, 16 aa, Homo sapiens
  CDR3 for beta chain variable domain of TCR clone 368776 (TRBV29-1, TRBJ2-7)
CSVEVVGTSGSYEQYF

SEQ ID NO: 737553 - protein, 13 aa, Homo sapiens
  CDR3 for alpha chain variable domain of TCR clone 368777 (TRAV21, TRAJ46)
CAVSKSSGDKLTF

SEQ ID NO: 737554 - protein, 15 aa, Homo sapiens
  CDR3 for beta chain variable domain of TCR clone 368777 (TRBV7-2, TRBJ1-5)
CASSLGRGAGQPQHF

SEQ ID NO: 737555 - protein, 13 aa, Homo sapiens
  CDR3 for alpha chain variable domain of TCR clone 368778 (TRAV21, TRAJ27)
CAARPGNAGKSTF

SEQ ID NO: 737556 - protein, 14 aa, Homo sapiens
  CDR3 for beta chain variable domain of TCR clone 368778 (TRBV7-9, TRBJ2-2)
CASSLGHRTGELFF

SEQ ID NO: 737557 - protein, 15 aa, Homo sapiens
  CDR3 for alpha chain variable domain of TCR clone 368779 (TRAV3, TRAJ22)
CAVRDRGGFARQLTF

SEQ ID NO: 737558 - protein, 16 aa, Homo sapiens
  CDR3 for beta chain variable domain of TCR clone 368779 (TRBV11-2, TRBJ2-1)
CASARGSYSHHNEQFF

SEQ ID NO: 737559 - protein, 10 aa, Homo sapiens
  CDR3 for alpha chain variable domain of TCR clone 368780 (TRAV12-1, TRAJ42)
KGGSQGNLIF

SEQ ID NO: 737560 - protein, 18 aa, Homo sapiens
  CDR3 for beta chain variable domain of TCR clone 368780 (TRBV11-2, TRBJ2-3)
CASSLGGASRGAPNTQYF

SEQ ID NO: 737561 - protein, 13 aa, Homo sapiens
  CDR3 for alpha chain variable domain of TCR clone 368781 (TRAV2, TRAJ15)
CAVASQAGTALIF

SEQ ID NO: 737562 - protein, 12 aa, Homo sapiens
  CDR3 for beta chain variable domain of TCR clone 368781 (TRBV12-4, TRBJ1-3)
CASSFSGNTIYF

SEQ ID NO: 737563 - protein, 15 aa, Homo sapiens
  CDR3 for alpha chain variable domain of TCR clone 368782 (TRAV3, TRAJ5)
CAVRDRKTGRRALTF

SEQ ID NO: 737564 - protein, 14 aa, Homo sapiens
  CDR3 for beta chain variable domain of TCR clone 368782 (TRBV6-1, TRBJ2-2)
CASTWQGNTGELFF

SEQ ID NO: 737565 - protein, 11 aa, Homo sapiens
  CDR3 for alpha chain variable domain of TCR clone 368783 (TRAV17, TRAJ43)
CATPRSNDMRF

SEQ ID NO: 737566 - protein, 11 aa, Homo sapiens
  CDR3 for beta chain variable domain of TCR clone 368783 (TRBV12-4, TRBJ2-2)
CASSSAGELFF

SEQ ID NO: 737567 - protein, 11 aa, Homo sapiens
  CDR3 for alpha chain variable domain of TCR clone 368784 (TRAV21, TRAJ48)
FAVGGNEKLTF

SEQ ID NO: 737568 - protein, 16 aa, Homo sapiens
  CDR3 for beta chain variable domain of TCR clone 368784 (TRBV12-4, TRBJ1-5)
CASSSGPRGSNQPQHF

SEQ ID NO: 737569 - protein, 12 aa, Homo sapiens
  CDR3 for alpha chain variable domain of TCR clone 368785 (TRAV13-1, TRAJ15)
CAASQAGTALIF

SEQ ID NO: 737570 - protein, 17 aa, Homo sapiens
  CDR3 for beta chain variable domain of TCR clone 368785 (TRBV13, TRBJ2-3)
CASSLSRVAGGRNTQYF

SEQ ID NO: 737571 - protein, 12 aa, Homo sapiens
  CDR3 for alpha chain variable domain of TCR clone 368786 (TRAV1-1, TRAJ9)
CAVGTGGFKTIF

SEQ ID NO: 737572 - protein, 15 aa, Homo sapiens
  CDR3 for beta chain variable domain of TCR clone 368786 (TRBV11-1, TRBJ1-4)
CASSARTGGNEKLFF

SEQ ID NO: 737573 - protein, 13 aa, Homo sapiens
  CDR3 for alpha chain variable domain of TCR clone 368787 (TRAV26-1, TRAJ34)
CIVRPWITDKLIF

SEQ ID NO: 737574 - protein, 19 aa, Homo sapiens
  CDR3 for beta chain variable domain of TCR clone 368787 (TRBV25-1, TRBJ2-2)
CAILVYRVDRGRKTGELFF

SEQ ID NO: 737575 - protein, 11 aa, Homo sapiens
  CDR3 for alpha chain variable domain of TCR clone 368788 (TRAV12-2, TRAJ54)
CAVEGTQKLVF

SEQ ID NO: 737576 - protein, 17 aa, Homo sapiens
  CDR3 for beta chain variable domain of TCR clone 368788 (TRBV18, TRBJ1-3)
CASSPYPTGPSGNTIYF

SEQ ID NO: 737577 - protein, 12 aa, Homo sapiens
  CDR3 for alpha chain variable domain of TCR clone 368789 (TRAV30, TRAJ43)
CGTEERGNDMRF

SEQ ID NO: 737578 - protein, 11 aa, Homo sapiens
  CDR3 for beta chain variable domain of TCR clone 368789 (TRBV11-3, TRBJ2-7)
CASSRTYEQYF

SEQ ID NO: 737579 - protein, 16 aa, Homo sapiens
  CDR3 for alpha chain variable domain of TCR clone 368790 (TRAV12-1, TRAJ12)
CVVNTLLMDSSYKLIF

SEQ ID NO: 737580 - protein, 13 aa, Homo sapiens
  CDR3 for beta chain variable domain of TCR clone 368790 (TRBV11-2, TRBJ2-1)
CASSSEAYNEQYF

SEQ ID NO: 737581 - protein, 10 aa, Homo sapiens
  CDR3 for alpha chain variable domain of TCR clone 368791 (TRAV13-1, TRAJ20)
CAADDYKLSF

SEQ ID NO: 737582 - protein, 15 aa, Homo sapiens
  CDR3 for beta chain variable domain of TCR clone 368791 (TRBV7-9, TRBJ2-7)
CASSRAGESSYEQYF

SEQ ID NO: 737583 - protein, 15 aa, Homo sapiens
  CDR3 for alpha chain variable domain of TCR clone 368792 (TRAV17, TRAJ42)
CDTDHYGGSQGNLIF

SEQ ID NO: 737584 - protein, 14 aa, Homo sapiens
  CDR3 for beta chain variable domain of TCR clone 368792 (TRBV19, TRBJ2-5)
CASSIEHSQETQYF

SEQ ID NO: 737585 - protein, 15 aa, Homo sapiens
  CDR3 for alpha chain variable domain of TCR clone 368793 (TRAV30, TRAJ32)
CGTEILGGATNKLIF

SEQ ID NO: 737586 - protein, 16 aa, Homo sapiens
  CDR3 for beta chain variable domain of TCR clone 368793 (TRBV12-5, TRBJ2-5)
CASGPRTSGNQETQYF

SEQ ID NO: 737587 - protein, 12 aa, Homo sapiens
  CDR3 for alpha chain variable domain of TCR clone 368794 (TRAV13-1, TRAJ9)
CASHTGGLNTIF

SEQ ID NO: 737588 - protein, 13 aa, Homo sapiens
  CDR3 for beta chain variable domain of TCR clone 368794 (TRBV12-4, TRBJ1-2)
CASSSGSKDGYTF

SEQ ID NO: 737589 - protein, 16 aa, Homo sapiens
  CDR3 for alpha chain variable domain of TCR clone 368795 (TRAV1-2, TRAJ10)
CAVRGVLKGGGNKLTF

SEQ ID NO: 737590 - protein, 12 aa, Homo sapiens
  CDR3 for beta chain variable domain of TCR clone 368795 (TRBV11-2, TRBJ2-1)
CASSPGNNEQFF

SEQ ID NO: 737591 - protein, 15 aa, Homo sapiens
  CDR3 for alpha chain variable domain of TCR clone 368796 (TRAV13-1, TRAJ49)
CAASTEGNTGNQFYC

SEQ ID NO: 737592 - protein, 12 aa, Homo sapiens
  CDR3 for beta chain variable domain of TCR clone 368796 (TRBV11-2, TRBJ2-2)
CASSLGGGELFF

SEQ ID NO: 737593 - protein, 18 aa, Homo sapiens
  CDR3 for alpha chain variable domain of TCR clone 368797 (TRAV13-1, TRAJ52)
CAASKRSAGGTSYGKLTF

SEQ ID NO: 737594 - protein, 14 aa, Homo sapiens
  CDR3 for beta chain variable domain of TCR clone 368797 (TRBV7-2, TRBJ2-5)
CASSTGGELKTQFF

SEQ ID NO: 737595 - protein, 15 aa, Homo sapiens
  CDR3 for alpha chain variable domain of TCR clone 368798 (TRAV12-3, TRAJ18)
CAMSGGGSTLGRLYF

SEQ ID NO: 737596 - protein, 11 aa, Homo sapiens
  CDR3 for beta chain variable domain of TCR clone 368798 (TRBV29-1, TRBJ2-5)
CSEDRTGTQYF

SEQ ID NO: 737597 - protein, 15 aa, Homo sapiens
  CDR3 for alpha chain variable domain of TCR clone 368799 (TRAV3, TRAJ32)
CAVRDPGGATNNLIF

SEQ ID NO: 737598 - protein, 14 aa, Homo sapiens
  CDR3 for beta chain variable domain of TCR clone 368799 (TRBV9, TRBJ1-2)
CASSVKGDNYGYTF

SEQ ID NO: 737599 - protein, 14 aa, Homo sapiens
  CDR3 for alpha chain variable domain of TCR clone 368800 (TRAV13-1, TRAJ35)
CAASKGGFGNVLHC

SEQ ID NO: 737600 - protein, 13 aa, Homo sapiens
  CDR3 for beta chain variable domain of TCR clone 368800 (TRBV24-1, TRBJ2-2)
CATTATRTGELFF

SEQ ID NO: 737601 - protein, 16 aa, Homo sapiens
  CDR3 for alpha chain variable domain of TCR clone 368801 (TRAV4, TRAJ5)
CLVGPDHGHGQESTYF

SEQ ID NO: 737602 - protein, 18 aa, Homo sapiens
  CDR3 for beta chain variable domain of TCR clone 368801 (TRBV11-2, TRBJ2-3)
CASSLGGASRGAPNTQYF

SEQ ID NO: 737603 - protein, 15 aa, Homo sapiens
  CDR3 for alpha chain variable domain of TCR clone 368802 (TRAV27, TRAJ38)
CAARRNAGNNRKLIW

SEQ ID NO: 737604 - protein, 14 aa, Homo sapiens
  CDR3 for beta chain variable domain of TCR clone 368802 (TRBV11-2, TRBJ2-5)
CASRPLAGRETQYF

SEQ ID NO: 737605 - protein, 16 aa, Homo sapiens
  CDR3 for alpha chain variable domain of TCR clone 368803 (TRAV30, TRAJ24)
CGTEIVDANSWGKFQF

SEQ ID NO: 737606 - protein, 14 aa, Homo sapiens
  CDR3 for beta chain variable domain of TCR clone 368803 (TRBV12-5, TRBJ2-5)
CASGSRAHQETQYF

SEQ ID NO: 737607 - protein, 12 aa, Homo sapiens
  CDR3 for alpha chain variable domain of TCR clone 368804 (TRAV1-1, TRAJ29)
CASGSGNTPLVF

SEQ ID NO: 737608 - protein, 15 aa, Homo sapiens
  CDR3 for beta chain variable domain of TCR clone 368804 (TRBV27, TRBJ2-1)
CASSNGGGASNEQFF

SEQ ID NO: 737609 - protein, 13 aa, Homo sapiens
  CDR3 for alpha chain variable domain of TCR clone 368805 (TRAV2, TRAJ24)
CAVPTDSWGKLQF

SEQ ID NO: 737610 - protein, 16 aa, Homo sapiens
  CDR3 for beta chain variable domain of TCR clone 368805 (TRBV6-3, TRBJ1-2)
CASSRKLTGTPDIYTF

SEQ ID NO: 737611 - protein, 14 aa, Homo sapiens
  CDR3 for alpha chain variable domain of TCR clone 368806 (TRAV3, TRAJ40)
CAVRDMTGTYKYIF

SEQ ID NO: 737612 - protein, 16 aa, Homo sapiens
  CDR3 for beta chain variable domain of TCR clone 368806 (TRBV18, TRBJ2-7)
CASSPGRAGGACEQYF

SEQ ID NO: 737613 - protein, 14 aa, Homo sapiens
  CDR3 for alpha chain variable domain of TCR clone 368807 (TRAV12-2, TRAJ5)
CAANIRVRGRALTF

SEQ ID NO: 737614 - protein, 16 aa, Homo sapiens
  CDR3 for beta chain variable domain of TCR clone 368807 (TRBV5-1, TRBJ1-6)
CASSFTGTGGDSPLHF

SEQ ID NO: 737615 - protein, 12 aa, Homo sapiens
  CDR3 for alpha chain variable domain of TCR clone 368808 (TRAV27, TRAJ35)
CAGADFGNVLHC

SEQ ID NO: 737616 - protein, 16 aa, Homo sapiens
  CDR3 for beta chain variable domain of TCR clone 368808 (TRBV6-1, TRBJ2-1)
CASILRQGSSNNEQFF

SEQ ID NO: 737617 - protein, 16 aa, Homo sapiens
  CDR3 for alpha chain variable domain of TCR clone 368809 (TRAV30, TRAJ24)
CGTEIVDADSWGKFQF

SEQ ID NO: 737618 - protein, 16 aa, Homo sapiens
  CDR3 for beta chain variable domain of TCR clone 368809 (TRBV11-2, TRBJ2-1)
CQQLIPPGVEYNEQFF

SEQ ID NO: 737619 - protein, 18 aa, Homo sapiens
  CDR3 for alpha chain variable domain of TCR clone 368810 (TRAV21, TRAJ52)
CAVRPSPAGGTSYGNLTF

SEQ ID NO: 737620 - protein, 13 aa, Homo sapiens
  CDR3 for beta chain variable domain of TCR clone 368810 (TRBV10-3, TRBJ2-7)
CASKLAVNYEQYF

SEQ ID NO: 737621 - protein, 14 aa, Homo sapiens
  CDR3 for alpha chain variable domain of TCR clone 368811 (TRAV12-2, TRAJ13)
CAVKKTGGYQKVTF

SEQ ID NO: 737622 - protein, 14 aa, Homo sapiens
  CDR3 for beta chain variable domain of TCR clone 368811 (TRBV20-1, TRBJ2-3)
CSARVSGFTDTQYF

SEQ ID NO: 737623 - protein, 14 aa, Homo sapiens
  CDR3 for alpha chain variable domain of TCR clone 368812 (TRAV12-2, TRAJ17)
CAVLFKAAGNKLTF

SEQ ID NO: 737624 - protein, 15 aa, Homo sapiens
  CDR3 for beta chain variable domain of TCR clone 368812 (TRBV20-1, TRBJ2-5)
CSAPPRTGFGETQYF

SEQ ID NO: 737625 - protein, 16 aa, Homo sapiens
  CDR3 for alpha chain variable domain of TCR clone 368813 (TRAV3, TRAJ37)
CSVRGKGSGNTGKLIL

SEQ ID NO: 737626 - protein, 15 aa, Homo sapiens
  CDR3 for beta chain variable domain of TCR clone 368813 (TRBV7-3, TRBJ2-2)
CASSETGQGTGELFF

SEQ ID NO: 737627 - protein, 12 aa, Homo sapiens
  CDR3 for alpha chain variable domain of TCR clone 368814 (TRAV8-4, TRAJ21)
CAVSDNFNNFYF

SEQ ID NO: 737628 - protein, 15 aa, Homo sapiens
  CDR3 for beta chain variable domain of TCR clone 368814 (TRBV20-1, TRBJ2-1)
CSARFSAGGLNEQFF

SEQ ID NO: 737629 - protein, 14 aa, Homo sapiens
  CDR3 for alpha chain variable domain of TCR clone 368815 (TRAV21, TRAJ35)
CAVMPICFGNLLHC

SEQ ID NO: 737630 - protein, 12 aa, Homo sapiens
  CDR3 for beta chain variable domain of TCR clone 368815 (TRBV7-9, TRBJ2-7)
CASSIKREEQYF

SEQ ID NO: 737631 - protein, 15 aa, Homo sapiens
  CDR3 for alpha chain variable domain of TCR clone 368816 (TRAV2, TRAJ36)
CAVQGAQTGANNLFF

SEQ ID NO: 737632 - protein, 13 aa, Homo sapiens
  CDR3 for beta chain variable domain of TCR clone 368816 (TRBV6-1, TRBJ2-5)
CASSNLVGETQYF

SEQ ID NO: 737633 - protein, 12 aa, Homo sapiens
  CDR3 for alpha chain variable domain of TCR clone 368817 (TRAV17, TRAJ53)
CAPEGSNYKLTF

SEQ ID NO: 737634 - protein, 19 aa, Homo sapiens
  CDR3 for beta chain variable domain of TCR clone 368817 (TRBV5-1, TRBJ2-3)
CASSLWTSGGITTPDTQYF

SEQ ID NO: 737635 - protein, 18 aa, Homo sapiens
  CDR3 for alpha chain variable domain of TCR clone 368818 (TRAV26-1, TRAJ23)
CIVRVGLEVWKQGGKLIF

SEQ ID NO: 737636 - protein, 14 aa, Homo sapiens
  CDR3 for beta chain variable domain of TCR clone 368818 (TRBV7-6, TRBJ2-3)
CASSLGTVTDTQYF

SEQ ID NO: 737637 - protein, 11 aa, Homo sapiens
  CDR3 for alpha chain variable domain of TCR clone 368819 (TRAV4, TRAJ31)
CLVGLNARLMF

SEQ ID NO: 737638 - protein, 16 aa, Homo sapiens
  CDR3 for beta chain variable domain of TCR clone 368819 (TRBV15, TRBJ2-6)
CATIVNGGFLANVLTF

SEQ ID NO: 737639 - protein, 18 aa, Homo sapiens
  CDR3 for alpha chain variable domain of TCR clone 368820 (TRAV21, TRAJ52)
CAVRPSPAGGTSYGRLTF

SEQ ID NO: 737640 - protein, 15 aa, Homo sapiens
  CDR3 for beta chain variable domain of TCR clone 368820 (TRBV20-1, TRBJ1-5)
CSAFKNGQRNQAQHF

SEQ ID NO: 737641 - protein, 13 aa, Homo sapiens
  CDR3 for alpha chain variable domain of TCR clone 368821 (TRAV2, TRAJ24)
CAVTTDSWGKLQF

SEQ ID NO: 737642 - protein, 14 aa, Homo sapiens
  CDR3 for beta chain variable domain of TCR clone 368821 (TRBV13, TRBJ2-5)
FASSLGRGQETQYF

SEQ ID NO: 737643 - protein, 10 aa, Homo sapiens
  CDR3 for alpha chain variable domain of TCR clone 368822 (TRAV8-4, TRAJ43)
CAVSADDMRF

SEQ ID NO: 737644 - protein, 15 aa, Homo sapiens
  CDR3 for beta chain variable domain of TCR clone 368822 (TRBV5-1, TRBJ2-3)
CASNVTSGSTDTQYF

SEQ ID NO: 737645 - protein, 14 aa, Homo sapiens
  CDR3 for alpha chain variable domain of TCR clone 368823 (TRAV29/DV5, TRAJ45)
CAASFRGDADGLTF

SEQ ID NO: 737646 - protein, 11 aa, Homo sapiens
  CDR3 for beta chain variable domain of TCR clone 368823 (TRBV11-2, TRBJ2-2)
CASSLPGELFV

SEQ ID NO: 737647 - protein, 12 aa, Homo sapiens
  CDR3 for alpha chain variable domain of TCR clone 368824 (TRAV27, TRAJ9)
CAGESGGFKTIF

SEQ ID NO: 737648 - protein, 15 aa, Homo sapiens
  CDR3 for beta chain variable domain of TCR clone 368824 (TRBV6-5, TRBJ2-1)
CASSYDAGAGNEQFF

SEQ ID NO: 737649 - protein, 13 aa, Homo sapiens
  CDR3 for alpha chain variable domain of TCR clone 368825 (TRAV13-2, TRAJ5)
CAVMDTGRRALTF

SEQ ID NO: 737650 - protein, 20 aa, Homo sapiens
  CDR3 for beta chain variable domain of TCR clone 368825 (TRBV7-8, TRBJ2-2)
CASSLLFPGPTIHITGELFF

SEQ ID NO: 737651 - protein, 13 aa, Homo sapiens
  CDR3 for alpha chain variable domain of TCR clone 368826 (TRAV21, TRAJ20)
CAVGLRVDYKLSF

SEQ ID NO: 737652 - protein, 16 aa, Homo sapiens
  CDR3 for beta chain variable domain of TCR clone 368826 (TRBV19, TRBJ2-2)
CASRSPGTGATGELFF

SEQ ID NO: 737653 - protein, 12 aa, Homo sapiens
  CDR3 for alpha chain variable domain of TCR clone 368827 (TRAV12-3, TRAJ17)
CAMTLTCNKLTF

SEQ ID NO: 737654 - protein, 15 aa, Homo sapiens
  CDR3 for beta chain variable domain of TCR clone 368827 (TRBV20-1, TRBJ2-7)
CSARDRVSGLDEQYF

SEQ ID NO: 737655 - protein, 17 aa, Homo sapiens
  CDR3 for alpha chain variable domain of TCR clone 368828 (TRAV26-1, TRAJ46)
IASSESEKKSSGDKLTF

SEQ ID NO: 737656 - protein, 13 aa, Homo sapiens
  CDR3 for beta chain variable domain of TCR clone 368828 (TRBV7-9, TRBJ1-2)
CASSLKQNYGYTF

SEQ ID NO: 737657 - protein, 12 aa, Homo sapiens
  CDR3 for alpha chain variable domain of TCR clone 368829 (TRAV8-3, TRAJ40)
CAVTSGTYKYIF

SEQ ID NO: 737658 - protein, 12 aa, Homo sapiens
  CDR3 for beta chain variable domain of TCR clone 368829 (TRBV5-1, TRBJ2-7)
CASSDSTYEQYF

SEQ ID NO: 737659 - protein, 11 aa, Homo sapiens
  CDR3 for alpha chain variable domain of TCR clone 368830 (TRAV3, TRAJ13)
CAVTSYQKVTF

SEQ ID NO: 737660 - protein, 17 aa, Homo sapiens
  CDR3 for beta chain variable domain of TCR clone 368830 (TRBV7-9, TRBJ2-7)
CASSSSGLGSTSSTSGR

SEQ ID NO: 737661 - protein, 13 aa, Homo sapiens
  CDR3 for alpha chain variable domain of TCR clone 368831 (TRAV13-1, TRAJ37)
CAAVSGNTGKLIF

SEQ ID NO: 737662 - protein, 17 aa, Homo sapiens
  CDR3 for beta chain variable domain of TCR clone 368831 (TRBV10-2, TRBJ1-6)
CASSENRGSSYNSPLHV

SEQ ID NO: 737663 - protein, 18 aa, Homo sapiens
  CDR3 for alpha chain variable domain of TCR clone 368832 (TRAV35, TRAJ28)
CAGHNYPLSGAGSYQLAF

SEQ ID NO: 737664 - protein, 12 aa, Homo sapiens
  CDR3 for beta chain variable domain of TCR clone 368832 (TRBV7-9, TRBJ1-1)
CASSLEGTEAFF

SEQ ID NO: 737665 - protein, 11 aa, Homo sapiens
  CDR3 for alpha chain variable domain of TCR clone 368833 (TRAV3, TRAJ21)
CAVGNFNKFYF

SEQ ID NO: 737666 - protein, 17 aa, Homo sapiens
  CDR3 for beta chain variable domain of TCR clone 368833 (TRBV24-1, TRBJ2-1)
CATSDVSTSGTYNEQVF

SEQ ID NO: 737667 - protein, 14 aa, Homo sapiens
  CDR3 for alpha chain variable domain of TCR clone 368834 (TRAV12-1, TRAJ30)
FVVNIGGRDDKIIF

SEQ ID NO: 737668 - protein, 14 aa, Homo sapiens
  CDR3 for beta chain variable domain of TCR clone 368834 (TRBV20-1, TRBJ2-1)
CSAQIGGSANEQFF

SEQ ID NO: 737669 - protein, 12 aa, Homo sapiens
  CDR3 for alpha chain variable domain of TCR clone 368835 (TRAV17, TRAJ30)
CVPERRDDKLIF

SEQ ID NO: 737670 - protein, 17 aa, Homo sapiens
  CDR3 for beta chain variable domain of TCR clone 368835 (TRBV7-7, TRBJ2-2)
CIAVPAAGTGAPGSCFF

SEQ ID NO: 737671 - protein, 13 aa, Homo sapiens
  CDR3 for alpha chain variable domain of TCR clone 368836 (TRAV12-1, TRAJ38)
CVVPAGNNRKLIW

SEQ ID NO: 737672 - protein, 13 aa, Homo sapiens
  CDR3 for beta chain variable domain of TCR clone 368836 (TRBV5-5, TRBJ2-7)
CASSSQTRQRQYF

SEQ ID NO: 737673 - protein, 14 aa, Homo sapiens
  CDR3 for alpha chain variable domain of TCR clone 368837 (TRAV1-2, TRAJ8)
CAVREDTGFQKLVF

SEQ ID NO: 737674 - protein, 14 aa, Homo sapiens
  CDR3 for beta chain variable domain of TCR clone 368837 (TRBV20-1, TRBJ2-7)
CSAWTALSSYEQYF

SEQ ID NO: 737675 - protein, 16 aa, Homo sapiens
  CDR3 for alpha chain variable domain of TCR clone 368838 (TRAV12-3, TRAJ53)
CAMSPGSGGSNYKLTF

SEQ ID NO: 737676 - protein, 12 aa, Homo sapiens
  CDR3 for beta chain variable domain of TCR clone 368838 (TRBV14, TRBJ1-1)
CASSKLKGLAFF

SEQ ID NO: 737677 - protein, 12 aa, Homo sapiens
  CDR3 for alpha chain variable domain of TCR clone 368839 (TRAV23/DV6, TRAJ43)
CSASYIKGDMRF

SEQ ID NO: 737678 - protein, 14 aa, Homo sapiens
  CDR3 for beta chain variable domain of TCR clone 368839 (TRBV20-1, TRBJ2-5)
CSAHRQGLWETQYF

SEQ ID NO: 737679 - protein, 12 aa, Homo sapiens
  CDR3 for alpha chain variable domain of TCR clone 368840 (TRAV12-3, TRAJ17)
CAMTLTGNKLTF

SEQ ID NO: 737680 - protein, 20 aa, Homo sapiens
  CDR3 for beta chain variable domain of TCR clone 368840 (TRBV4-1, TRBJ2-5)
CASPPGGAETRDPVLRARHA

SEQ ID NO: 737681 - protein, 21 aa, Homo sapiens
  CDR3 for alpha chain variable domain of TCR clone 368841 (TRAV4, TRAJ30)
PRVSLSDTAVYYCLRDDKIIF

SEQ ID NO: 737682 - protein, 14 aa, Homo sapiens
  CDR3 for beta chain variable domain of TCR clone 368841 (TRBV16, TRBJ1-1)
CASSQAGANTEAFF

SEQ ID NO: 737683 - protein, 14 aa, Homo sapiens
  CDR3 for alpha chain variable domain of TCR clone 368842 (TRAV9-2, TRAJ39)
CALYIYNAGNMLTF

SEQ ID NO: 737684 - protein, 18 aa, Homo sapiens
  CDR3 for beta chain variable domain of TCR clone 368842 (TRBV18, TRBJ1-3)
CASSPRGGAGPSGNTIYF

SEQ ID NO: 737685 - protein, 11 aa, Homo sapiens
  CDR3 for alpha chain variable domain of TCR clone 368843 (TRAV1-1, TRAJ23)
CAVRQGGKLIF

SEQ ID NO: 737686 - protein, 20 aa, Homo sapiens
  CDR3 for beta chain variable domain of TCR clone 368843 (TRBV7-8, TRBJ2-2)
RASSHLFPGPTIHLTGELFF

SEQ ID NO: 737687 - protein, 14 aa, Homo sapiens
  CDR3 for alpha chain variable domain of TCR clone 368844 (TRAV12-3, TRAJ57)
CARALEGGTETLVF

SEQ ID NO: 737688 - protein, 17 aa, Homo sapiens
  CDR3 for beta chain variable domain of TCR clone 368844 (TRBV11-3, TRBJ2-3)
CASSLGLTGGGTDTQYF

SEQ ID NO: 737689 - protein, 15 aa, Homo sapiens
  CDR3 for alpha chain variable domain of TCR clone 368845 (TRAV2, TRAJ24)
CAVVRLKNSWGKLQF

SEQ ID NO: 737690 - protein, 15 aa, Homo sapiens
  CDR3 for beta chain variable domain of TCR clone 368845 (TRBV19, TRBJ1-2)
CASTLDSTGNYGYTF

SEQ ID NO: 737691 - protein, 14 aa, Homo sapiens
  CDR3 for alpha chain variable domain of TCR clone 368846 (TRAV29/DV5, TRAJ45)
CAASFRGGADGLTF

SEQ ID NO: 737692 - protein, 14 aa, Homo sapiens
  CDR3 for beta chain variable domain of TCR clone 368846 (TRBV4-1, TRBJ2-3)
CASSQDSGTDTQYF

SEQ ID NO: 737693 - protein, 14 aa, Homo sapiens
  CDR3 for alpha chain variable domain of TCR clone 368847 (TRAV12-1, TRAJ23)
CVVIVYNQGGKLIF

SEQ ID NO: 737694 - protein, 13 aa, Homo sapiens
  CDR3 for beta chain variable domain of TCR clone 368847 (TRBV11-2, TRBJ2-5)
CASSFSGQETQYF

SEQ ID NO: 737695 - protein, 14 aa, Homo sapiens
  CDR3 for alpha chain variable domain of TCR clone 368848 (TRAV20, TRAJ48)
SAQCPAFGNEKLTF

SEQ ID NO: 737696 - protein, 13 aa, Homo sapiens
  CDR3 for beta chain variable domain of TCR clone 368848 (TRBV25-1, TRBJ2-5)
CASSESGRETQYF

SEQ ID NO: 737697 - protein, 14 aa, Homo sapiens
  CDR3 for alpha chain variable domain of TCR clone 368849 (TRAV2, TRAJ9)
CAVEDRSGGFKTIF

SEQ ID NO: 737698 - protein, 15 aa, Homo sapiens
  CDR3 for beta chain variable domain of TCR clone 368849 (TRBV5-7, TRBJ1-6)
CASSWELGPNTPLHF

SEQ ID NO: 737699 - protein, 17 aa, Homo sapiens
  CDR3 for alpha chain variable domain of TCR clone 368850 (TRAV26-1, TRAJ47)
CIVPSLLYMEYGNKLVF

SEQ ID NO: 737700 - protein, 14 aa, Homo sapiens
  CDR3 for beta chain variable domain of TCR clone 368850 (TRBV7-3, TRBJ1-5)
RSSSFSGCNQPQHF

SEQ ID NO: 737701 - protein, 10 aa, Homo sapiens
  CDR3 for alpha chain variable domain of TCR clone 368851 (TRAV23/DV6, TRAJ57)
CAASSTLSQG

SEQ ID NO: 737702 - protein, 14 aa, Homo sapiens
  CDR3 for beta chain variable domain of TCR clone 368851 (TRBV25-1, TRBJ1-1)
CASTHLGGNTEDVF

SEQ ID NO: 737703 - protein, 14 aa, Homo sapiens
  CDR3 for alpha chain variable domain of TCR clone 368852 (TRAV17, TRAJ16)
CATAEFSDGQKLLF

SEQ ID NO: 737704 - protein, 12 aa, Homo sapiens
  CDR3 for beta chain variable domain of TCR clone 368852 (TRBV24-1, TRBJ1-1)
CATLYPDTEAFF

SEQ ID NO: 737705 - protein, 11 aa, Homo sapiens
  CDR3 for alpha chain variable domain of TCR clone 368853 (TRAV12-3, TRAJ49)
CAANTGNQFYF

SEQ ID NO: 737706 - protein, 12 aa, Homo sapiens
  CDR3 for beta chain variable domain of TCR clone 368853 (TRBV6-3, TRBJ2-7)
CATSEPGFEQYF

SEQ ID NO: 737707 - protein, 19 aa, Homo sapiens
  CDR3 for alpha chain variable domain of TCR clone 368854 (TRAV2, TRAJ20)
ILQVREADAALYRDCKLSF

SEQ ID NO: 737708 - protein, 13 aa, Homo sapiens
  CDR3 for beta chain variable domain of TCR clone 368854 (TRBV15, TRBJ1-6)
CATSGGLNSPLHF

SEQ ID NO: 737709 - protein, 17 aa, Homo sapiens
  CDR3 for alpha chain variable domain of TCR clone 368855 (TRAV26-1, TRAJ58)
CIVRVGAEETSGSRLTF

SEQ ID NO: 737710 - protein, 19 aa, Homo sapiens
  CDR3 for beta chain variable domain of TCR clone 368855 (TRBV25-1, TRBJ2-2)
CAILVYRVDRGRKTGELFF

SEQ ID NO: 737711 - protein, 13 aa, Homo sapiens
  CDR3 for alpha chain variable domain of TCR clone 368856 (TRAV16, TRAJ34)
CALRTWNTDKLIC

SEQ ID NO: 737712 - protein, 16 aa, Homo sapiens
  CDR3 for beta chain variable domain of TCR clone 368856 (TRBV2, TRBJ1-3)
CASSERGVNSGNTIYF

SEQ ID NO: 737713 - protein, 20 aa, Homo sapiens
  CDR3 for alpha chain variable domain of TCR clone 368857 (TRAV12-1, TRAJ42)
SSVIQPPTSVKGGSQGNLIF

SEQ ID NO: 737714 - protein, 13 aa, Homo sapiens
  CDR3 for beta chain variable domain of TCR clone 368857 (TRBV7-3, TRBJ1-1)
CASSQDWGAEAFF

SEQ ID NO: 737715 - protein, 11 aa, Homo sapiens
  CDR3 for alpha chain variable domain of TCR clone 368858 (TRAV35, TRAJ30)
CAGPGDDKIIF

SEQ ID NO: 737716 - protein, 18 aa, Homo sapiens
  CDR3 for beta chain variable domain of TCR clone 368858 (TRBV7-6, TRBJ2-1)
CASSPRTSGTSSYNEQFF

SEQ ID NO: 737717 - protein, 12 aa, Homo sapiens
  CDR3 for alpha chain variable domain of TCR clone 368859 (TRAV12-1, TRAJ40)
CVVYSGTYKYIF

SEQ ID NO: 737718 - protein, 12 aa, Homo sapiens
  CDR3 for beta chain variable domain of TCR clone 368859 (TRBV7-9, TRBJ2-7)
CASSIKREEQYF

SEQ ID NO: 737719 - protein, 13 aa, Homo sapiens
  CDR3 for alpha chain variable domain of TCR clone 368860 (TRAV2, TRAJ13)
CAVESGGYQKVSF

SEQ ID NO: 737720 - protein, 13 aa, Homo sapiens
  CDR3 for beta chain variable domain of TCR clone 368860 (TRBV7-2, TRBJ1-1)
CASNLKGAKVAFF

SEQ ID NO: 737721 - protein, 14 aa, Homo sapiens
  CDR3 for alpha chain variable domain of TCR clone 368861 (TRAV21, TRAJ45)
CAVSSGGGADGLTF

SEQ ID NO: 737722 - protein, 15 aa, Homo sapiens
  CDR3 for beta chain variable domain of TCR clone 368861 (TRBV6-1, TRBJ2-4)
CASSEAVWTINIKYF

SEQ ID NO: 737723 - protein, 11 aa, Homo sapiens
  CDR3 for alpha chain variable domain of TCR clone 368862 (TRAV13-1, TRAJ23)
CAASSRGKLIF

SEQ ID NO: 737724 - protein, 12 aa, Homo sapiens
  CDR3 for beta chain variable domain of TCR clone 368862 (TRBV24-1, TRBJ1-1)
CATSDSDRGAFF

SEQ ID NO: 737725 - protein, 14 aa, Homo sapiens
  CDR3 for alpha chain variable domain of TCR clone 368863 (TRAV9-2, TRAJ15)
CALSESQAGTALIF

SEQ ID NO: 737726 - protein, 13 aa, Homo sapiens
  CDR3 for beta chain variable domain of TCR clone 368863 (TRBV10-2, TRBJ2-7)
CASGASGGYEQYF

SEQ ID NO: 737727 - protein, 14 aa, Homo sapiens
  CDR3 for alpha chain variable domain of TCR clone 368864 (TRAV9-2, TRAJ39)
CALYIYNAGNMLTF

SEQ ID NO: 737728 - protein, 15 aa, Homo sapiens
  CDR3 for beta chain variable domain of TCR clone 368864 (TRBV6-5, TRBJ1-5)
CASSYSWDSNQPQHF

SEQ ID NO: 737729 - protein, 13 aa, Homo sapiens
  CDR3 for alpha chain variable domain of TCR clone 368865 (TRAV12-2, TRAJ42)
CAVNRGSQGNLIF

SEQ ID NO: 737730 - protein, 13 aa, Homo sapiens
  CDR3 for beta chain variable domain of TCR clone 368865 (TRBV7-9, TRBJ2-3)
CASSPGSTDTQYF

SEQ ID NO: 737731 - protein, 12 aa, Homo sapiens
  CDR3 for alpha chain variable domain of TCR clone 368866 (TRAV13-2, TRAJ23)
CTERHRGGKLIF

SEQ ID NO: 737732 - protein, 16 aa, Homo sapiens
  CDR3 for beta chain variable domain of TCR clone 368866 (TRBV12-5, TRBJ2-5)
CASGPRTSGNQETQYF

SEQ ID NO: 737733 - protein, 11 aa, Homo sapiens
  CDR3 for alpha chain variable domain of TCR clone 368867 (TRAV35, TRAJ31)
CAESGDARLMF

SEQ ID NO: 737734 - protein, 14 aa, Homo sapiens
  CDR3 for beta chain variable domain of TCR clone 368867 (TRBV18, TRBJ2-5)
CASSPGVSQETQYF

SEQ ID NO: 737735 - protein, 15 aa, Homo sapiens
  CDR3 for alpha chain variable domain of TCR clone 368868 (TRAV3, TRAJ22)
CAVRDRGGSARHMTF

SEQ ID NO: 737736 - protein, 16 aa, Homo sapiens
  CDR3 for beta chain variable domain of TCR clone 368868 (TRBV7-9, TRBJ2-1)
CASSDVAGGSYNEQFF

SEQ ID NO: 737737 - protein, 14 aa, Homo sapiens
  CDR3 for alpha chain variable domain of TCR clone 368869 (TRAV1-2, TRAJ16)
CAVNRFSAGQKLLF

SEQ ID NO: 737738 - protein, 14 aa, Homo sapiens
  CDR3 for beta chain variable domain of TCR clone 368869 (TRBV19, TRBJ2-7)
CASSMGQGAIEQYF

SEQ ID NO: 737739 - protein, 12 aa, Homo sapiens
  CDR3 for alpha chain variable domain of TCR clone 368870 (TRAV17, TRAJ30)
CATDARYDKIIF

SEQ ID NO: 737740 - protein, 14 aa, Homo sapiens
  CDR3 for beta chain variable domain of TCR clone 368870 (TRBV7-2, TRBJ2-7)
CASSPKTSFYEQYF

SEQ ID NO: 737741 - protein, 14 aa, Homo sapiens
  CDR3 for alpha chain variable domain of TCR clone 368871 (TRAV12-2, TRAJ53)
CAVKGGGSNYKLTF

SEQ ID NO: 737742 - protein, 14 aa, Homo sapiens
  CDR3 for beta chain variable domain of TCR clone 368871 (TRBV19, TRBJ2-1)
CASPTFVLSGDQFF

SEQ ID NO: 737743 - protein, 17 aa, Homo sapiens
  CDR3 for alpha chain variable domain of TCR clone 368872 (TRAV12-2, TRAJ52)
CAVNPYAGGTSYGKLTF

SEQ ID NO: 737744 - protein, 15 aa, Homo sapiens
  CDR3 for beta chain variable domain of TCR clone 368872 (TRBV5-1, TRBJ2-1)
CASSPPGAPYNEQFF

SEQ ID NO: 737745 - protein, 13 aa, Homo sapiens
  CDR3 for alpha chain variable domain of TCR clone 368873 (TRAV3, TRAJ27)
CAVRPLGAGKSTF

SEQ ID NO: 737746 - protein, 12 aa, Homo sapiens
  CDR3 for beta chain variable domain of TCR clone 368873 (TRBV7-9, TRBJ2-7)
CTTRTDAYEQYF

SEQ ID NO: 737747 - protein, 12 aa, Homo sapiens
  CDR3 for alpha chain variable domain of TCR clone 368874 (TRAV12-2, TRAJ10)
WWVTGGGNKLTF

SEQ ID NO: 737748 - protein, 16 aa, Homo sapiens
  CDR3 for beta chain variable domain of TCR clone 368874 (TRBV5-1, TRBJ1-1)
CASSSGGNSLNTEAFF

SEQ ID NO: 737749 - protein, 15 aa, Homo sapiens
  CDR3 for alpha chain variable domain of TCR clone 368875 (TRAV12-2, TRAJ13)
CRESLGSGGYQKVTF

SEQ ID NO: 737750 - protein, 15 aa, Homo sapiens
  CDR3 for beta chain variable domain of TCR clone 368875 (TRBV6-5, TRBJ2-1)
CASRRAQLSYKEQFF

SEQ ID NO: 737751 - protein, 14 aa, Homo sapiens
  CDR3 for alpha chain variable domain of TCR clone 368876 (TRAV38-1, TRAJ40)
CALRPTSGTYKYIF

SEQ ID NO: 737752 - protein, 15 aa, Homo sapiens
  CDR3 for beta chain variable domain of TCR clone 368876 (TRBV4-1, TRBJ2-1)
CASSQVLAGGDEQFF

SEQ ID NO: 737753 - protein, 16 aa, Homo sapiens
  CDR3 for alpha chain variable domain of TCR clone 368877 (TRAV30, TRAJ24)
CGTEIVDADSWGKFQV

SEQ ID NO: 737754 - protein, 13 aa, Homo sapiens
  CDR3 for beta chain variable domain of TCR clone 368877 (TRBV18, TRBJ1-1)
CASSGGRNTEAFF

SEQ ID NO: 737755 - protein, 18 aa, Homo sapiens
  CDR3 for alpha chain variable domain of TCR clone 368878 (TRAV9-2, TRAJ13)
CQTQRCTEPSGGYQKVTF

SEQ ID NO: 737756 - protein, 13 aa, Homo sapiens
  CDR3 for beta chain variable domain of TCR clone 368878 (TRBV5-7, TRBJ2-5)
CASRAGGGGTQYF

SEQ ID NO: 737757 - protein, 14 aa, Homo sapiens
  CDR3 for alpha chain variable domain of TCR clone 368879 (TRAV12-3, TRAJ42)
CAMNYGGSQGNLIF

SEQ ID NO: 737758 - protein, 17 aa, Homo sapiens
  CDR3 for beta chain variable domain of TCR clone 368879 (TRBV28, TRBJ2-1)
CASTGPGLAVSEDEQFF

SEQ ID NO: 737759 - protein, 12 aa, Homo sapiens
  CDR3 for alpha chain variable domain of TCR clone 368880 (TRAV13-2, TRAJ23)
CAERHRGGKLIF

SEQ ID NO: 737760 - protein, 16 aa, Homo sapiens
  CDR3 for beta chain variable domain of TCR clone 368880 (TRBV20-1, TRBJ1-4)
CSAPGQGLLTNEKLIF

SEQ ID NO: 737761 - protein, 13 aa, Homo sapiens
  CDR3 for alpha chain variable domain of TCR clone 368881 (TRAV23/DV6, TRAJ10)
ASVLTGGGNKLTF

SEQ ID NO: 737762 - protein, 13 aa, Homo sapiens
  CDR3 for beta chain variable domain of TCR clone 368881 (TRBV11-1, TRBJ1-2)
CASVGSWGYGYAV

SEQ ID NO: 737763 - protein, 15 aa, Homo sapiens
  CDR3 for alpha chain variable domain of TCR clone 368882 (TRAV21, TRAJ40)
CAVRPQTSGTYKYIF

SEQ ID NO: 737764 - protein, 15 aa, Homo sapiens
  CDR3 for beta chain variable domain of TCR clone 368882 (TRBV23-1, TRBJ2-1)
CASSQWPQLTMSSSS

SEQ ID NO: 737765 - protein, 12 aa, Homo sapiens
  CDR3 for alpha chain variable domain of TCR clone 368883 (TRAV13-2, TRAJ23)
WAERHRGGKLIF

SEQ ID NO: 737766 - protein, 16 aa, Homo sapiens
  CDR3 for beta chain variable domain of TCR clone 368883 (TRBV20-1, TRBJ1-4)
CSAPGQGLLTNEKLFF

SEQ ID NO: 737767 - protein, 14 aa, Homo sapiens
  CDR3 for alpha chain variable domain of TCR clone 368884 (TRAV12-2, TRAJ13)
CAVKKPGGYQKVTF

SEQ ID NO: 737768 - protein, 13 aa, Homo sapiens
  CDR3 for beta chain variable domain of TCR clone 368884 (TRBV7-3, TRBJ1-1)
CASSQDWGAEAFF

SEQ ID NO: 737769 - protein, 16 aa, Homo sapiens
  CDR3 for alpha chain variable domain of TCR clone 368885 (TRAV26-2, TRAJ45)
CTTASPIGGGADGLTF

SEQ ID NO: 737770 - protein, 20 aa, Homo sapiens
  CDR3 for beta chain variable domain of TCR clone 368885 (TRBV28, TRBJ2-1)
CASTPVGRSPGLAGGNEQFF

SEQ ID NO: 737771 - protein, 13 aa, Homo sapiens
  CDR3 for alpha chain variable domain of TCR clone 368886 (TRAV27, TRAJ49)
CAPRPYTGNQFYF

SEQ ID NO: 737772 - protein, 18 aa, Homo sapiens
  CDR3 for beta chain variable domain of TCR clone 368886 (TRBV7-3, TRBJ2-5)
CASSLGGAAQGRWENQYF

SEQ ID NO: 737773 - protein, 15 aa, Homo sapiens
  CDR3 for alpha chain variable domain of TCR clone 368887 (TRAV8-4, TRAJ3)
CAVTGENLVQQCFLD

SEQ ID NO: 737774 - protein, 16 aa, Homo sapiens
  CDR3 for beta chain variable domain of TCR clone 368887 (TRBV4-2, TRBJ1-1)
CASSQAGFGMNTEAFF

SEQ ID NO: 737775 - protein, 14 aa, Homo sapiens
  CDR3 for alpha chain variable domain of TCR clone 368888 (TRAV2, TRAJ12)
CAVYAMDSSYKLIF

SEQ ID NO: 737776 - protein, 13 aa, Homo sapiens
  CDR3 for beta chain variable domain of TCR clone 368888 (TRBV19, TRBJ2-1)
CASKVGAGGEQFF

SEQ ID NO: 737777 - protein, 13 aa, Homo sapiens
  CDR3 for alpha chain variable domain of TCR clone 368889 (TRAV21, TRAJ20)
CAVGLRVDYKLSF

SEQ ID NO: 737778 - protein, 13 aa, Homo sapiens
  CDR3 for beta chain variable domain of TCR clone 368889 (TRBV6-1, TRBJ1-1)
CASSRQGNTEAFF

SEQ ID NO: 737779 - protein, 15 aa, Homo sapiens
  CDR3 for alpha chain variable domain of TCR clone 368890 (TRAV26-1, TRAJ29)
CIVRGEGSGNTPLVC

SEQ ID NO: 737780 - protein, 14 aa, Homo sapiens
  CDR3 for beta chain variable domain of TCR clone 368890 (TRBV18, TRBJ2-5)
CASSPGVSQETQYF

SEQ ID NO: 737781 - protein, 16 aa, Homo sapiens
  CDR3 for alpha chain variable domain of TCR clone 368891 (TRAV16, TRAJ37)
CSKWPDGSSNTRKLIF

SEQ ID NO: 737782 - protein, 13 aa, Homo sapiens
  CDR3 for beta chain variable domain of TCR clone 368891 (TRBV7-2, TRBJ2-2)
CASSLAVTGELFF

SEQ ID NO: 737783 - protein, 15 aa, Homo sapiens
  CDR3 for alpha chain variable domain of TCR clone 368892 (TRAV40, TRAJ45)
CLMGDLGGGADGLTF

SEQ ID NO: 737784 - protein, 13 aa, Homo sapiens
  CDR3 for beta chain variable domain of TCR clone 368892 (TRBV7-9, TRBJ1-2)
CASSLKQNYGYTF

SEQ ID NO: 737785 - protein, 15 aa, Homo sapiens
  CDR3 for alpha chain variable domain of TCR clone 368893 (TRAV4, TRAJ10)
CLVGDEEGGGNKLTF

SEQ ID NO: 737786 - protein, 12 aa, Homo sapiens
  CDR3 for beta chain variable domain of TCR clone 368893 (TRBV7-9, TRBJ2-7)
CASSFGSYEQYF

SEQ ID NO: 737787 - protein, 21 aa, Homo sapiens
  CDR3 for alpha chain variable domain of TCR clone 368894 (TRAV29/DV5, TRAJ52)
CSVLLCSKREAGGTSYGKLTC

SEQ ID NO: 737788 - protein, 13 aa, Homo sapiens
  CDR3 for beta chain variable domain of TCR clone 368894 (TRBV27, TRBJ1-4)
CASSLMGDEKLFF

SEQ ID NO: 737789 - protein, 10 aa, Homo sapiens
  CDR3 for alpha chain variable domain of TCR clone 368895 (TRAV30, TRAJ24)
CGTEMWMLTA

SEQ ID NO: 737790 - protein, 16 aa, Homo sapiens
  CDR3 for beta chain variable domain of TCR clone 368895 (TRBV6-1, TRBJ2-1)
CASILRQGSSYNEQFF

SEQ ID NO: 737791 - protein, 12 aa, Homo sapiens
  CDR3 for alpha chain variable domain of TCR clone 368896 (TRAV2, TRAJ10)
CASTGGGNKLTF

SEQ ID NO: 737792 - protein, 12 aa, Homo sapiens
  CDR3 for beta chain variable domain of TCR clone 368896 (TRBV11-2, TRBJ2-2)
CASSLPTGELFF

SEQ ID NO: 737793 - protein, 14 aa, Homo sapiens
  CDR3 for alpha chain variable domain of TCR clone 368897 (TRAV38-1, TRAJ29)
CAFITPSGNTHLVF

SEQ ID NO: 737794 - protein, 15 aa, Homo sapiens
  CDR3 for beta chain variable domain of TCR clone 368897 (TRBV5-1, TRBJ2-1)
CASSPPRAPYNEQFF

SEQ ID NO: 737795 - protein, 13 aa, Homo sapiens
  CDR3 for alpha chain variable domain of TCR clone 368898 (TRAV21, TRAJ3)
CAVTGSSASKIIF

SEQ ID NO: 737796 - protein, 15 aa, Homo sapiens
  CDR3 for beta chain variable domain of TCR clone 368898 (TRBV7-3, TRBJ2-1)
CASSPTGGGEVEQFF

SEQ ID NO: 737797 - protein, 16 aa, Homo sapiens
  CDR3 for alpha chain variable domain of TCR clone 368899 (TRAV26-1, TRAJ40)
CIVRGYPTSGTYKYIF

SEQ ID NO: 737798 - protein, 16 aa, Homo sapiens
  CDR3 for beta chain variable domain of TCR clone 368899 (TRBV5-1, TRBJ1-4)
CASSSGEGGEKLFLAV

SEQ ID NO: 737799 - protein, 14 aa, Homo sapiens
  CDR3 for alpha chain variable domain of TCR clone 368900 (TRAV8-3, TRAJ27)
CAGGRNTNAGKSTF

SEQ ID NO: 737800 - protein, 14 aa, Homo sapiens
  CDR3 for beta chain variable domain of TCR clone 368900 (TRBV7-2, TRBJ2-7)
CASSSISGFSEQYF

SEQ ID NO: 737801 - protein, 15 aa, Homo sapiens
  CDR3 for alpha chain variable domain of TCR clone 368901 (TRAV27, TRAJ38)
CAASRNAGNNRKLIW

SEQ ID NO: 737802 - protein, 11 aa, Homo sapiens
  CDR3 for beta chain variable domain of TCR clone 368901 (TRBV12-4, TRBJ2-2)
CASSSAGELFF

SEQ ID NO: 737803 - protein, 14 aa, Homo sapiens
  CDR3 for alpha chain variable domain of TCR clone 368902 (TRAV2, TRAJ37)
TTVPGSSNTGKLIF

SEQ ID NO: 737804 - protein, 14 aa, Homo sapiens
  CDR3 for beta chain variable domain of TCR clone 368902 (TRBV7-8, TRBJ2-7)
RASSLWQSSYEQYF

SEQ ID NO: 737805 - protein, 14 aa, Homo sapiens
  CDR3 for alpha chain variable domain of TCR clone 368903 (TRAV2, TRAJ22)
CAVGRGGSARQLTF

SEQ ID NO: 737806 - protein, 16 aa, Homo sapiens
  CDR3 for beta chain variable domain of TCR clone 368903 (TRBV10-3, TRBJ2-7)
CAISADFADRPYEQYF

SEQ ID NO: 737807 - protein, 15 aa, Homo sapiens
  CDR3 for alpha chain variable domain of TCR clone 368904 (TRAV35, TRAJ41)
CAGQLFSNSGYALNF

SEQ ID NO: 737808 - protein, 14 aa, Homo sapiens
  CDR3 for beta chain variable domain of TCR clone 368904 (TRBV5-1, TRBJ1-4)
CASSSGQGGEKLFF

SEQ ID NO: 737809 - protein, 13 aa, Homo sapiens
  CDR3 for alpha chain variable domain of TCR clone 368905 (TRAV2, TRAJ15)
CAVASQAGTALIF

SEQ ID NO: 737810 - protein, 14 aa, Homo sapiens
  CDR3 for beta chain variable domain of TCR clone 368905 (TRBV7-9, TRBJ2-3)
CASSPSGRAGTQYF

SEQ ID NO: 737811 - protein, 19 aa, Homo sapiens
  CDR3 for alpha chain variable domain of TCR clone 368906 (TRAV2, TRAJ20)
ILQVREADAAVYRDCKLSF

SEQ ID NO: 737812 - protein, 16 aa, Homo sapiens
  CDR3 for beta chain variable domain of TCR clone 368906 (TRBV4-3, TRBJ2-1)
CASSPALDRGVNEQFF

SEQ ID NO: 737813 - protein, 15 aa, Homo sapiens
  CDR3 for alpha chain variable domain of TCR clone 368907 (TRAV8-3, TRAJ41)
CAVGSNSNSGYALNF

SEQ ID NO: 737814 - protein, 17 aa, Homo sapiens
  CDR3 for beta chain variable domain of TCR clone 368907 (TRBV25-1, TRBJ2-1)
CASSSYGQGRGVYEQFF

SEQ ID NO: 737815 - protein, 16 aa, Homo sapiens
  CDR3 for alpha chain variable domain of TCR clone 368908 (TRAV36/DV7, TRAJ30)
CAVETYGLDRDDKFIF

SEQ ID NO: 737816 - protein, 16 aa, Homo sapiens
  CDR3 for beta chain variable domain of TCR clone 368908 (TRBV5-4, TRBJ2-3)
CASQQPGAGGADTQYF

SEQ ID NO: 737817 - protein, 10 aa, Homo sapiens
  CDR3 for alpha chain variable domain of TCR clone 368909 (TRAV36/DV7, TRAJ48)
CAVGNEKLTF

SEQ ID NO: 737818 - protein, 14 aa, Homo sapiens
  CDR3 for beta chain variable domain of TCR clone 368909 (TRBV4-2, TRBJ1-5)
CASSRDRGNQPQHF

SEQ ID NO: 737819 - protein, 14 aa, Homo sapiens
  CDR3 for alpha chain variable domain of TCR clone 368910 (TRAV9-2, TRAJ39)
CAPYTYNAGNMLTF

SEQ ID NO: 737820 - protein, 11 aa, Homo sapiens
  CDR3 for beta chain variable domain of TCR clone 368910 (TRBV29-1, TRBJ2-5)
CSEDRTGTQYF

SEQ ID NO: 737821 - protein, 14 aa, Homo sapiens
  CDR3 for alpha chain variable domain of TCR clone 368911 (TRAV26-1, TRAJ31)
CIALPPNNNGRLMF

SEQ ID NO: 737822 - protein, 16 aa, Homo sapiens
  CDR3 for beta chain variable domain of TCR clone 368911 (TRBV10-2, TRBJ2-7)
CASSESPGSSGFEQYF

SEQ ID NO: 737823 - protein, 12 aa, Homo sapiens
  CDR3 for alpha chain variable domain of TCR clone 368912 (TRAV22, TRAJ22)
CAPGGSARQLTF

SEQ ID NO: 737824 - protein, 13 aa, Homo sapiens
  CDR3 for beta chain variable domain of TCR clone 368912 (TRBV19, TRBJ1-3)
CASRLSLGNTIYF

SEQ ID NO: 737825 - protein, 15 aa, Homo sapiens
  CDR3 for alpha chain variable domain of TCR clone 368913 (TRAV21, TRAJ53)
CAVRQGGGSNYKLTF

SEQ ID NO: 737826 - protein, 14 aa, Homo sapiens
  CDR3 for beta chain variable domain of TCR clone 368913 (TRBV18, TRBJ2-5)
CASSPGVSQETQYF

SEQ ID NO: 737827 - protein, 16 aa, Homo sapiens
  CDR3 for alpha chain variable domain of TCR clone 368914 (TRAV30, TRAJ24)
CGTEIVDADSWGKFQL

SEQ ID NO: 737828 - protein, 14 aa, Homo sapiens
  CDR3 for beta chain variable domain of TCR clone 368914 (TRBV20-1, TRBJ2-2)
CSAPDTANTGELFF

SEQ ID NO: 737829 - protein, 12 aa, Homo sapiens
  CDR3 for alpha chain variable domain of TCR clone 368915 (TRAV21, TRAJ37)
CAVRGNTGKLIF

SEQ ID NO: 737830 - protein, 12 aa, Homo sapiens
  CDR3 for beta chain variable domain of TCR clone 368915 (TRBV11-2, TRBJ2-1)
CASSPGNNEQFF

SEQ ID NO: 737831 - protein, 13 aa, Homo sapiens
  CDR3 for alpha chain variable domain of TCR clone 368916 (TRAV8-4, TRAJ49)
CAVSDPGGHQFYF

SEQ ID NO: 737832 - protein, 11 aa, Homo sapiens
  CDR3 for beta chain variable domain of TCR clone 368916 (TRBV29-1, TRBJ1-3)
CSVAIGNTIYF

SEQ ID NO: 737833 - protein, 20 aa, Homo sapiens
  CDR3 for alpha chain variable domain of TCR clone 368917 (TRAV12-3, TRAJ41)
SLFSNNSQPRDSATPEALNF

SEQ ID NO: 737834 - protein, 15 aa, Homo sapiens
  CDR3 for beta chain variable domain of TCR clone 368917 (TRBV5-1, TRBJ2-7)
CASSLDLTSSYEQYF

SEQ ID NO: 737835 - protein, 16 aa, Homo sapiens
  CDR3 for alpha chain variable domain of TCR clone 368918 (TRAV30, TRAJ24)
CGTEIVDADSWGKFQF

SEQ ID NO: 737836 - protein, 14 aa, Homo sapiens
  CDR3 for beta chain variable domain of TCR clone 368918 (TRBV12-5, TRBJ2-5)
CASGSRIHQKNQYF

SEQ ID NO: 737837 - protein, 16 aa, Homo sapiens
  CDR3 for alpha chain variable domain of TCR clone 368919 (TRAV21, TRAJ45)
CAVSWGSGGGADGLTF

SEQ ID NO: 737838 - protein, 14 aa, Homo sapiens
  CDR3 for beta chain variable domain of TCR clone 368919 (TRBV4-2, TRBJ1-5)
CASSRDRGNQPQHF

SEQ ID NO: 737839 - protein, 15 aa, Homo sapiens
  CDR3 for alpha chain variable domain of TCR clone 368920 (TRAV26-1, TRAJ15)
CSVRAANQAGTALIF

SEQ ID NO: 737840 - protein, 15 aa, Homo sapiens
  CDR3 for beta chain variable domain of TCR clone 368920 (TRBV20-1, TRBJ1-1)
CSARSAATSNTEAFF

SEQ ID NO: 737841 - protein, 11 aa, Homo sapiens
  CDR3 for alpha chain variable domain of TCR clone 368921 (TRAV2, TRAJ33)
CAVDINYQLIW

SEQ ID NO: 737842 - protein, 14 aa, Homo sapiens
  CDR3 for beta chain variable domain of TCR clone 368921 (TRBV11-2, TRBJ2-3)
CASNRLARTDTQYF

SEQ ID NO: 737843 - protein, 13 aa, Homo sapiens
  CDR3 for alpha chain variable domain of TCR clone 368922 (TRAV29/DV5, TRAJ47)
CAASAEYGNKLVL

SEQ ID NO: 737844 - protein, 15 aa, Homo sapiens
  CDR3 for beta chain variable domain of TCR clone 368922 (TRBV7-9, TRBJ1-4)
CASSARTGGNEKLFF

SEQ ID NO: 737845 - protein, 14 aa, Homo sapiens
  CDR3 for alpha chain variable domain of TCR clone 368923 (TRAV1-2, TRAJ29)
CAVRELTSATPLVF

SEQ ID NO: 737846 - protein, 14 aa, Homo sapiens
  CDR3 for beta chain variable domain of TCR clone 368923 (TRBV3-1, TRBJ2-5)
CGSSQGPDQETQYF

SEQ ID NO: 737847 - protein, 14 aa, Homo sapiens
  CDR3 for alpha chain variable domain of TCR clone 368924 (TRAV1-2, TRAJ16)
CAARSASDGQKLLF

SEQ ID NO: 737848 - protein, 17 aa, Homo sapiens
  CDR3 for beta chain variable domain of TCR clone 368924 (TRBV7-8, TRBJ2-6)
CASSAGTGGAGANVLTF

SEQ ID NO: 737849 - protein, 15 aa, Homo sapiens
  CDR3 for alpha chain variable domain of TCR clone 368925 (TRAV17, TRAJ57)
CATGPSQGGSEKMFF

SEQ ID NO: 737850 - protein, 11 aa, Homo sapiens
  CDR3 for beta chain variable domain of TCR clone 368925 (TRBV29-1, TRBJ2-5)
CSEDRTGTQYF

SEQ ID NO: 737851 - protein, 14 aa, Homo sapiens
  CDR3 for alpha chain variable domain of TCR clone 368926 (TRAV17, TRAJ45)
CATASGGGVYGLTF

SEQ ID NO: 737852 - protein, 15 aa, Homo sapiens
  CDR3 for beta chain variable domain of TCR clone 368926 (TRBV11-2, TRBJ2-1)
CASSRNRGLMYEQFF

SEQ ID NO: 737853 - protein, 15 aa, Homo sapiens
  CDR3 for alpha chain variable domain of TCR clone 368927 (TRAV2, TRAJ9)
CAVEDRGTGGFKTIF

SEQ ID NO: 737854 - protein, 15 aa, Homo sapiens
  CDR3 for beta chain variable domain of TCR clone 368927 (TRBV7-2, TRBJ2-5)
CASSLVSRGGETQYF

SEQ ID NO: 737855 - protein, 16 aa, Homo sapiens
  CDR3 for alpha chain variable domain of TCR clone 368928 (TRAV12-2, TRAJ39)
CAVNRGPNNAGKMLTF

SEQ ID NO: 737856 - protein, 10 aa, Homo sapiens
  CDR3 for beta chain variable domain of TCR clone 368928 (TRBV2, TRBJ2-4)
CASRGSIQYF

SEQ ID NO: 737857 - protein, 17 aa, Homo sapiens
  CDR3 for alpha chain variable domain of TCR clone 368929 (TRAV3, TRAJ6)
CAVRDGPRAGGSYIPTF

SEQ ID NO: 737858 - protein, 12 aa, Homo sapiens
  CDR3 for beta chain variable domain of TCR clone 368929 (TRBV7-2, TRBJ2-7)
CASSLEGYEQYF

SEQ ID NO: 737859 - protein, 13 aa, Homo sapiens
  CDR3 for alpha chain variable domain of TCR clone 368930 (TRAV12-3, TRAJ43)
CAMIRPNNNDMRF

SEQ ID NO: 737860 - protein, 19 aa, Homo sapiens
  CDR3 for beta chain variable domain of TCR clone 368930 (TRBV11-2, TRBJ2-3)
CASSAPRAGGNPSTDTQYF

SEQ ID NO: 737861 - protein, 13 aa, Homo sapiens
  CDR3 for alpha chain variable domain of TCR clone 368931 (TRAV30, TRAJ31)
CGTETRNNARLML

SEQ ID NO: 737862 - protein, 16 aa, Homo sapiens
  CDR3 for beta chain variable domain of TCR clone 368931 (TRBV10-3, TRBJ2-3)
CAISVSRLALTDTQYF

SEQ ID NO: 737863 - protein, 13 aa, Homo sapiens
  CDR3 for alpha chain variable domain of TCR clone 368932 (TRAV35, TRAJ48)
CAGHEFGNEKLTF

SEQ ID NO: 737864 - protein, 16 aa, Homo sapiens
  CDR3 for beta chain variable domain of TCR clone 368932 (TRBV12-5, TRBJ2-5)
CASGPRTSGNQETQYS

SEQ ID NO: 737865 - protein, 11 aa, Homo sapiens
  CDR3 for alpha chain variable domain of TCR clone 368933 (TRAV22, TRAJ30)
CAGNRDDKIIF

SEQ ID NO: 737866 - protein, 13 aa, Homo sapiens
  CDR3 for beta chain variable domain of TCR clone 368933 (TRBV7-6, TRBJ2-7)
CASSLDHTHEQYF

SEQ ID NO: 737867 - protein, 14 aa, Homo sapiens
  CDR3 for alpha chain variable domain of TCR clone 368934 (TRAV14/DV4, TRAJ20)
CAMREILNDYKLSF

SEQ ID NO: 737868 - protein, 15 aa, Homo sapiens
  CDR3 for beta chain variable domain of TCR clone 368934 (TRBV27, TRBJ2-1)
CASSNGGGSSNEQFF

SEQ ID NO: 737869 - protein, 17 aa, Homo sapiens
  CDR3 for alpha chain variable domain of TCR clone 368935 (TRAV38-1, TRAJ45)
CAYMRSHSGGGADGLTF

SEQ ID NO: 737870 - protein, 15 aa, Homo sapiens
  CDR3 for beta chain variable domain of TCR clone 368935 (TRBV7-2, TRBJ2-3)
CASSLVVRGPDTQYF

SEQ ID NO: 737871 - protein, 16 aa, Homo sapiens
  CDR3 for alpha chain variable domain of TCR clone 368936 (TRAV3, TRAJ37)
CVVGGKGSGNTGKLIF

SEQ ID NO: 737872 - protein, 13 aa, Homo sapiens
  CDR3 for beta chain variable domain of TCR clone 368936 (TRBV14, TRBJ2-7)
CASSQDRRYEQYF

SEQ ID NO: 737873 - protein, 14 aa, Homo sapiens
  CDR3 for alpha chain variable domain of TCR clone 368937 (TRAV21, TRAJ37)
CAVKGSSNTGKIIF

SEQ ID NO: 737874 - protein, 14 aa, Homo sapiens
  CDR3 for beta chain variable domain of TCR clone 368937 (TRBV7-2, TRBJ2-1)
CASSRGGARNEQFF

SEQ ID NO: 737875 - protein, 12 aa, Homo sapiens
  CDR3 for alpha chain variable domain of TCR clone 368938 (TRAV4, TRAJ26)
CLVGDYGQNFVF

SEQ ID NO: 737876 - protein, 16 aa, Homo sapiens
  CDR3 for beta chain variable domain of TCR clone 368938 (TRBV15, TRBJ2-5)
CATSRYLEAAQETQYF

SEQ ID NO: 737877 - protein, 14 aa, Homo sapiens
  CDR3 for alpha chain variable domain of TCR clone 368939 (TRAV13-1, TRAJ53)
CSKYSGGSNYKLTF

SEQ ID NO: 737878 - protein, 13 aa, Homo sapiens
  CDR3 for beta chain variable domain of TCR clone 368939 (TRBV4-2, TRBJ1-1)
CASSQAGNTEAFF

SEQ ID NO: 737879 - protein, 12 aa, Homo sapiens
  CDR3 for alpha chain variable domain of TCR clone 368940 (TRAV12-3, TRAJ17)
CAMTLTGNQLTF

SEQ ID NO: 737880 - protein, 12 aa, Homo sapiens
  CDR3 for beta chain variable domain of TCR clone 368940 (TRBV12-4, TRBJ2-3)
CASSPLPDTQYF

SEQ ID NO: 737881 - protein, 14 aa, Homo sapiens
  CDR3 for alpha chain variable domain of TCR clone 368941 (TRAV1-2, TRAJ8)
CAVREDTGFQKFVF

SEQ ID NO: 737882 - protein, 14 aa, Homo sapiens
  CDR3 for beta chain variable domain of TCR clone 368941 (TRBV19, TRBJ2-1)
CASPTFVLSGEQFF

SEQ ID NO: 737883 - protein, 13 aa, Homo sapiens
  CDR3 for alpha chain variable domain of TCR clone 368942 (TRAV23/DV6, TRAJ12)
CAPRVDSSYKFIF

SEQ ID NO: 737884 - protein, 12 aa, Homo sapiens
  CDR3 for beta chain variable domain of TCR clone 368942 (TRBV7-6, TRBJ2-5)
CASSLSQETQYF

SEQ ID NO: 737885 - protein, 12 aa, Homo sapiens
  CDR3 for alpha chain variable domain of TCR clone 368943 (TRAV35, TRAJ54)
CADLQGAQKLVF

SEQ ID NO: 737886 - protein, 14 aa, Homo sapiens
  CDR3 for beta chain variable domain of TCR clone 368943 (TRBV12-4, TRBJ1-3)
CASGQTVSGNTIYF

SEQ ID NO: 737887 - protein, 11 aa, Homo sapiens
  CDR3 for alpha chain variable domain of TCR clone 368944 (TRAV23/DV6, TRAJ49)
CAVAPVTSSIL

SEQ ID NO: 737888 - protein, 13 aa, Homo sapiens
  CDR3 for beta chain variable domain of TCR clone 368944 (TRBV6-1, TRBJ1-1)
CASSRQRNTEAFF

SEQ ID NO: 737889 - protein, 14 aa, Homo sapiens
  CDR3 for alpha chain variable domain of TCR clone 368945 (TRAV16, TRAJ54)
CALSQIQGAQKLVF

SEQ ID NO: 737890 - protein, 17 aa, Homo sapiens
  CDR3 for beta chain variable domain of TCR clone 368945 (TRBV11-2, TRBJ2-4)
CASSSVGPGGHRNIQYF

SEQ ID NO: 737891 - protein, 13 aa, Homo sapiens
  CDR3 for alpha chain variable domain of TCR clone 368946 (TRAV27, TRAJ18)
CAGRGSTLGRLYF

SEQ ID NO: 737892 - protein, 14 aa, Homo sapiens
  CDR3 for beta chain variable domain of TCR clone 368946 (TRBV5-1, TRBJ2-3)
CASSASGGQDTQYL

SEQ ID NO: 737893 - protein, 13 aa, Homo sapiens
  CDR3 for alpha chain variable domain of TCR clone 368947 (TRAV20, TRAJ53)
CAVDGGSNYKLTF

SEQ ID NO: 737894 - protein, 14 aa, Homo sapiens
  CDR3 for beta chain variable domain of TCR clone 368947 (TRBV9, TRBJ1-1)
CASSAGQRNTEAFF

SEQ ID NO: 737895 - protein, 16 aa, Homo sapiens
  CDR3 for alpha chain variable domain of TCR clone 368948 (TRAV3, TRAJ10)
CAVRDMRAGGGNNLTF

SEQ ID NO: 737896 - protein, 14 aa, Homo sapiens
  CDR3 for beta chain variable domain of TCR clone 368948 (TRBV25-1, TRBJ1-1)
CASTHLGGNTEAFF

SEQ ID NO: 737897 - protein, 12 aa, Homo sapiens
  CDR3 for alpha chain variable domain of TCR clone 368949 (TRAV25, TRAJ11)
CAGASGYSTLTF

SEQ ID NO: 737898 - protein, 15 aa, Homo sapiens
  CDR3 for beta chain variable domain of TCR clone 368949 (TRBV9, TRBJ1-6)
CASSVAGTGDSPLYF

SEQ ID NO: 737899 - protein, 12 aa, Homo sapiens
  CDR3 for alpha chain variable domain of TCR clone 368950 (TRAV12-3, TRAJ17)
CAMTLTGNKLTF

SEQ ID NO: 737900 - protein, 14 aa, Homo sapiens
  CDR3 for beta chain variable domain of TCR clone 368950 (TRBV15, TRBJ2-3)
CATRSGTSTDTQYF

SEQ ID NO: 737901 - protein, 16 aa, Homo sapiens
  CDR3 for alpha chain variable domain of TCR clone 368951 (TRAV3, TRAJ27)
CAVRDPQGANAGKSTF

SEQ ID NO: 737902 - protein, 17 aa, Homo sapiens
  CDR3 for beta chain variable domain of TCR clone 368951 (TRBV4-1, TRBJ2-7)
CASSQGRGLQTSYEQYF

SEQ ID NO: 737903 - protein, 14 aa, Homo sapiens
  CDR3 for alpha chain variable domain of TCR clone 368952 (TRAV1-1, TRAJ27)
CAVFYNTNAGKSTF

SEQ ID NO: 737904 - protein, 15 aa, Homo sapiens
  CDR3 for beta chain variable domain of TCR clone 368952 (TRBV19, TRBJ1-2)
CASSVGQVLNYGYTF

SEQ ID NO: 737905 - protein, 13 aa, Homo sapiens
  CDR3 for alpha chain variable domain of TCR clone 368953 (TRAV1-2, TRAJ11)
GAVRDSGYSTLTF

SEQ ID NO: 737906 - protein, 16 aa, Homo sapiens
  CDR3 for beta chain variable domain of TCR clone 368953 (TRBV5-1, TRBJ2-7)
CASSWGTGGRAWEQYF

SEQ ID NO: 737907 - protein, 15 aa, Homo sapiens
  CDR3 for alpha chain variable domain of TCR clone 368954 (TRAV29/DV5, TRAJ29)
CAASERSSGNTPLVF

SEQ ID NO: 737908 - protein, 14 aa, Homo sapiens
  CDR3 for beta chain variable domain of TCR clone 368954 (TRBV7-2, TRBJ1-1)
CASSFLTGTTEAFF

SEQ ID NO: 737909 - protein, 14 aa, Homo sapiens
  CDR3 for alpha chain variable domain of TCR clone 368955 (TRAV12-3, TRAJ37)
CVSEGSSKTGKLIF

SEQ ID NO: 737910 - protein, 14 aa, Homo sapiens
  CDR3 for beta chain variable domain of TCR clone 368955 (TRBV20-1, TRBJ1-1)
CSAQTRIGGTEAFF

SEQ ID NO: 737911 - protein, 13 aa, Homo sapiens
  CDR3 for alpha chain variable domain of TCR clone 368956 (TRAV17, TRAJ5)
CALRGTGRRALPF

SEQ ID NO: 737912 - protein, 14 aa, Homo sapiens
  CDR3 for beta chain variable domain of TCR clone 368956 (TRBV12-5, TRBJ2-5)
CASGSRTHQETQYF

SEQ ID NO: 737913 - protein, 22 aa, Homo sapiens
  CDR3 for alpha chain variable domain of TCR clone 368957 (TRAV26-1, TRAJ30)
CIVRERTEMTRSSLEKGHDFIF

SEQ ID NO: 737914 - protein, 18 aa, Homo sapiens
  CDR3 for beta chain variable domain of TCR clone 368957 (TRBV4-1, TRBJ1-5)
CASSQDPRGQGLNQPQHF

SEQ ID NO: 737915 - protein, 13 aa, Homo sapiens
  CDR3 for alpha chain variable domain of TCR clone 368958 (TRAV13-2, TRAJ48)
CAEMDFGNEKLTF

SEQ ID NO: 737916 - protein, 13 aa, Homo sapiens
  CDR3 for beta chain variable domain of TCR clone 368958 (TRBV13, TRBJ2-5)
CASSPGVGETQYF

SEQ ID NO: 737917 - protein, 14 aa, Homo sapiens
  CDR3 for alpha chain variable domain of TCR clone 368959 (TRAV8-4, TRAJ9)
CAVRINTGGFKTIF

SEQ ID NO: 737918 - protein, 15 aa, Homo sapiens
  CDR3 for beta chain variable domain of TCR clone 368959 (TRBV11-2, TRBJ2-2)
CASSSDRVNAGELFF

SEQ ID NO: 737919 - protein, 12 aa, Homo sapiens
  CDR3 for alpha chain variable domain of TCR clone 368960 (TRAV17, TRAJ21)
CALRYNFNKFYF

SEQ ID NO: 737920 - protein, 13 aa, Homo sapiens
  CDR3 for beta chain variable domain of TCR clone 368960 (TRBV24-1, TRBJ2-5)
CATSTRGTETQYF

SEQ ID NO: 737921 - protein, 14 aa, Homo sapiens
  CDR3 for alpha chain variable domain of TCR clone 368961 (TRAV13-1, TRAJ40)
CAASMTSGTYKYIF

SEQ ID NO: 737922 - protein, 13 aa, Homo sapiens
  CDR3 for beta chain variable domain of TCR clone 368961 (TRBV24-1, TRBJ2-2)
CATSGWSTGELFF

SEQ ID NO: 737923 - protein, 16 aa, Homo sapiens
  CDR3 for alpha chain variable domain of TCR clone 368962 (TRAV30, TRAJ24)
CGTEIVDADRWGKFQF

SEQ ID NO: 737924 - protein, 13 aa, Homo sapiens
  CDR3 for beta chain variable domain of TCR clone 368962 (TRBV20-1, TRBJ1-1)
CSARVGGNTEAFF

SEQ ID NO: 737925 - protein, 15 aa, Homo sapiens
  CDR3 for alpha chain variable domain of TCR clone 368963 (TRAV26-1, TRAJ29)
CIVRGEGSGNTPPVF

SEQ ID NO: 737926 - protein, 15 aa, Homo sapiens
  CDR3 for beta chain variable domain of TCR clone 368963 (TRBV7-9, TRBJ1-5)
CASSQGHQPNQPQHF

SEQ ID NO: 737927 - protein, 14 aa, Homo sapiens
  CDR3 for alpha chain variable domain of TCR clone 368964 (TRAV27, TRAJ58)
CAGDGETSGSRLTF

SEQ ID NO: 737928 - protein, 18 aa, Homo sapiens
  CDR3 for beta chain variable domain of TCR clone 368964 (TRBV7-2, TRBJ2-6)
CASSFPGAGISGANVLTF

SEQ ID NO: 737929 - protein, 14 aa, Homo sapiens
  CDR3 for alpha chain variable domain of TCR clone 368965 (TRAV26-1, TRAJ39)
CIVRGSRAGNMLTF

SEQ ID NO: 737930 - protein, 14 aa, Homo sapiens
  CDR3 for beta chain variable domain of TCR clone 368965 (TRBV18, TRBJ2-5)
CASSPGVSQETQYF

SEQ ID NO: 737931 - protein, 13 aa, Homo sapiens
  CDR3 for alpha chain variable domain of TCR clone 368966 (TRAV26-1, TRAJ41)
CIVRINSGYALNF

SEQ ID NO: 737932 - protein, 13 aa, Homo sapiens
  CDR3 for beta chain variable domain of TCR clone 368966 (TRBV20-1, TRBJ1-5)
CIATAAGGQPQHF

SEQ ID NO: 737933 - protein, 13 aa, Homo sapiens
  CDR3 for alpha chain variable domain of TCR clone 368967 (TRAV35, TRAJ42)
CAGFPGSQGNLIF

SEQ ID NO: 737934 - protein, 17 aa, Homo sapiens
  CDR3 for beta chain variable domain of TCR clone 368967 (TRBV28, TRBJ2-5)
CASSTPEGDALQETQYF

SEQ ID NO: 737935 - protein, 20 aa, Homo sapiens
  CDR3 for alpha chain variable domain of TCR clone 368968 (TRAV27, TRAJ35)
CAGADFGNVLHCGSGPQVIF

SEQ ID NO: 737936 - protein, 16 aa, Homo sapiens
  CDR3 for beta chain variable domain of TCR clone 368968 (TRBV6-1, TRBJ2-1)
CASILRQGSSYNEQFF

SEQ ID NO: 737937 - protein, 21 aa, Homo sapiens
  CDR3 for alpha chain variable domain of TCR clone 368969 (TRAV1-1, TRAJ6)
CLLLLRCERLERTGGSYIPTF

SEQ ID NO: 737938 - protein, 13 aa, Homo sapiens
  CDR3 for beta chain variable domain of TCR clone 368969 (TRBV10-2, TRBJ2-7)
CASVASGGYEQYF

SEQ ID NO: 737939 - protein, 15 aa, Homo sapiens
  CDR3 for alpha chain variable domain of TCR clone 368970 (TRAV3, TRAJ22)
CAVSDRGGSARQLTF

SEQ ID NO: 737940 - protein, 16 aa, Homo sapiens
  CDR3 for beta chain variable domain of TCR clone 368970 (TRBV5-4, TRBJ2-3)
CASQQPGAGGSDTQYF

SEQ ID NO: 737941 - protein, 10 aa, Homo sapiens
  CDR3 for alpha chain variable domain of TCR clone 368971 (TRAV19, TRAJ30)
CALGDDKIIF

SEQ ID NO: 737942 - protein, 16 aa, Homo sapiens
  CDR3 for beta chain variable domain of TCR clone 368971 (TRBV7-9, TRBJ2-1)
CASSDVAGGSYNEQFF

SEQ ID NO: 737943 - protein, 17 aa, Homo sapiens
  CDR3 for alpha chain variable domain of TCR clone 368972 (TRAV3, TRAJ42)
CAVRERDYGGSQGNLIF

SEQ ID NO: 737944 - protein, 12 aa, Homo sapiens
  CDR3 for beta chain variable domain of TCR clone 368972 (TRBV11-2, TRBJ2-1)
CASSPGNNEQFF

SEQ ID NO: 737945 - protein, 17 aa, Homo sapiens
  CDR3 for alpha chain variable domain of TCR clone 368973 (TRAV3, TRAJ6)
FAVRDGPRAGGNYIPTF

SEQ ID NO: 737946 - protein, 14 aa, Homo sapiens
  CDR3 for beta chain variable domain of TCR clone 368973 (TRBV7-2, TRBJ2-7)
CASSPKTSFYEQYF

SEQ ID NO: 737947 - protein, 18 aa, Homo sapiens
  CDR3 for alpha chain variable domain of TCR clone 368974 (TRAV12-2, )
CAVEDIQNPDPAVYQLRN

SEQ ID NO: 737948 - protein, 13 aa, Homo sapiens
  CDR3 for beta chain variable domain of TCR clone 368974 (TRBV5-1, TRBJ1-1)
CASSADWDTEAFF

SEQ ID NO: 737949 - protein, 14 aa, Homo sapiens
  CDR3 for alpha chain variable domain of TCR clone 368975 (TRAV1-2, TRAJ8)
FAVREDTGFQKLVF

SEQ ID NO: 737950 - protein, 14 aa, Homo sapiens
  CDR3 for beta chain variable domain of TCR clone 368975 (TRBV7-6, TRBJ2-3)
CASSLGTVTDTQYF

SEQ ID NO: 737951 - protein, 21 aa, Homo sapiens
  CDR3 for alpha chain variable domain of TCR clone 368976 (TRAV8-4, TRAJ47)
HLTKPPAHMSDAAERGNKLVF

SEQ ID NO: 737952 - protein, 12 aa, Homo sapiens
  CDR3 for beta chain variable domain of TCR clone 368976 (TRBV13, TRBJ2-7)
CASSLQAYEQYF

SEQ ID NO: 737953 - protein, 15 aa, Homo sapiens
  CDR3 for alpha chain variable domain of TCR clone 368977 (TRAV26-1, TRAJ29)
CIVRVEGSGNTPLVV

SEQ ID NO: 737954 - protein, 15 aa, Homo sapiens
  CDR3 for beta chain variable domain of TCR clone 368977 (TRBV12-4, TRBJ1-1)
CQQQDRVVANTEAFF

SEQ ID NO: 737955 - protein, 15 aa, Homo sapiens
  CDR3 for alpha chain variable domain of TCR clone 368978 (TRAV12-1, TRAJ44)
CVVFVNTGIASKLTF

SEQ ID NO: 737956 - protein, 17 aa, Homo sapiens
  CDR3 for beta chain variable domain of TCR clone 368978 (TRBV7-8, TRBJ2-6)
CASSAGTVGAGANVLTF

SEQ ID NO: 737957 - protein, 15 aa, Homo sapiens
  CDR3 for alpha chain variable domain of TCR clone 368979 (TRAV3, TRAJ32)
CAVSSYGGATNKLIF

SEQ ID NO: 737958 - protein, 17 aa, Homo sapiens
  CDR3 for beta chain variable domain of TCR clone 368979 (TRBV20-1, TRBJ2-2)
CSVSGSGQGGLTGELFF

SEQ ID NO: 737959 - protein, 13 aa, Homo sapiens
  CDR3 for alpha chain variable domain of TCR clone 368980 (TRAV3, TRAJ29)
CAVRDIIDTPLVF

SEQ ID NO: 737960 - protein, 16 aa, Homo sapiens
  CDR3 for beta chain variable domain of TCR clone 368980 (TRBV19, TRBJ2-3)
CASSPGAASRTDTQYF

SEQ ID NO: 737961 - protein, 14 aa, Homo sapiens
  CDR3 for alpha chain variable domain of TCR clone 368981 (TRAV38-1, TRAJ40)
CALRPTPGTYKYIF

SEQ ID NO: 737962 - protein, 14 aa, Homo sapiens
  CDR3 for beta chain variable domain of TCR clone 368981 (TRBV5-4, TRBJ1-1)
CASRLDSRRDEAFF

SEQ ID NO: 737963 - protein, 16 aa, Homo sapiens
  CDR3 for alpha chain variable domain of TCR clone 368982 (TRAV12-2, TRAJ43)
CAGDDMRFGAGTRLTV

SEQ ID NO: 737964 - protein, 15 aa, Homo sapiens
  CDR3 for beta chain variable domain of TCR clone 368982 (TRBV5-1, TRBJ2-7)
CASSLNGGPAREQYF

SEQ ID NO: 737965 - protein, 21 aa, Homo sapiens
  CDR3 for alpha chain variable domain of TCR clone 368983 (TRAV36/DV7, TRAJ39)
TATQTGDSAIHLPNAGNMLTF

SEQ ID NO: 737966 - protein, 15 aa, Homo sapiens
  CDR3 for beta chain variable domain of TCR clone 368983 (TRBV19, TRBJ2-1)
CASSIVRGEGREQFF

SEQ ID NO: 737967 - protein, 11 aa, Homo sapiens
  CDR3 for alpha chain variable domain of TCR clone 368984 (TRAV4, TRAJ31)
CLVGDNARLMF

SEQ ID NO: 737968 - protein, 14 aa, Homo sapiens
  CDR3 for beta chain variable domain of TCR clone 368984 (TRBV4-1, TRBJ2-2)
CASSQAVNTRELFF

SEQ ID NO: 737969 - protein, 15 aa, Homo sapiens
  CDR3 for alpha chain variable domain of TCR clone 368985 (TRAV26-1, TRAJ22)
CIVRVSFWFWKATDL

SEQ ID NO: 737970 - protein, 13 aa, Homo sapiens
  CDR3 for beta chain variable domain of TCR clone 368985 (TRBV7-9, TRBJ1-2)
CASSLKQNYGYTF

SEQ ID NO: 737971 - protein, 13 aa, Homo sapiens
  CDR3 for alpha chain variable domain of TCR clone 368986 (TRAV29/DV5, TRAJ31)
CAASRNNNARLMF

SEQ ID NO: 737972 - protein, 13 aa, Homo sapiens
  CDR3 for beta chain variable domain of TCR clone 368986 (TRBV19, TRBJ2-3)
CATWDKITDTQYF

SEQ ID NO: 737973 - protein, 16 aa, Homo sapiens
  CDR3 for alpha chain variable domain of TCR clone 368987 (TRAV3, TRAJ21)
CAVSDIERGNFNKFYF

SEQ ID NO: 737974 - protein, 16 aa, Homo sapiens
  CDR3 for beta chain variable domain of TCR clone 368987 (TRBV12-4, TRBJ1-5)
CASSRPVGGSNQPQHF

SEQ ID NO: 737975 - protein, 14 aa, Homo sapiens
  CDR3 for alpha chain variable domain of TCR clone 368988 (TRAV1-2, TRAJ8)
CAVREDTGFQKLVF

SEQ ID NO: 737976 - protein, 14 aa, Homo sapiens
  CDR3 for beta chain variable domain of TCR clone 368988 (TRBV18, TRBJ2-5)
CASSPPGHQETQYF

SEQ ID NO: 737977 - protein, 17 aa, Homo sapiens
  CDR3 for alpha chain variable domain of TCR clone 368989 (TRAV3, TRAJ6)
CAGRDGPRAGGSYIPTF

SEQ ID NO: 737978 - protein, 15 aa, Homo sapiens
  CDR3 for beta chain variable domain of TCR clone 368989 (TRBV7-2, TRBJ1-2)
CASSLVSGGDYGYTF

SEQ ID NO: 737979 - protein, 12 aa, Homo sapiens
  CDR3 for alpha chain variable domain of TCR clone 368990 (TRAV3, TRAJ7)
CADLLWEQQTPF

SEQ ID NO: 737980 - protein, 15 aa, Homo sapiens
  CDR3 for beta chain variable domain of TCR clone 368990 (TRBV7-3, TRBJ2-1)
CASSPTGGGEVEQFF

SEQ ID NO: 737981 - protein, 13 aa, Homo sapiens
  CDR3 for alpha chain variable domain of TCR clone 368991 (TRAV6, TRAJ20)
CALAVSNDYKLSF

SEQ ID NO: 737982 - protein, 16 aa, Homo sapiens
  CDR3 for beta chain variable domain of TCR clone 368991 (TRBV7-9, TRBJ2-1)
CASSDVAGGYYNEQFF

SEQ ID NO: 737983 - protein, 15 aa, Homo sapiens
  CDR3 for alpha chain variable domain of TCR clone 368992 (TRAV13-1, TRAJ17)
CSASIERAAGNKLTF

SEQ ID NO: 737984 - protein, 20 aa, Homo sapiens
  CDR3 for beta chain variable domain of TCR clone 368992 (TRBV7-8, TRBJ2-2)
CASSHLFPGPTIHITGELFF

SEQ ID NO: 737985 - protein, 14 aa, Homo sapiens
  CDR3 for alpha chain variable domain of TCR clone 368993 (TRAV1-1, TRAJ30)
CAVRSLNRDDKIIL

SEQ ID NO: 737986 - protein, 15 aa, Homo sapiens
  CDR3 for beta chain variable domain of TCR clone 368993 (TRBV28, TRBJ2-7)
CASSPGGRGFYEQYF

SEQ ID NO: 737987 - protein, 14 aa, Homo sapiens
  CDR3 for alpha chain variable domain of TCR clone 368994 (TRAV20, TRAJ42)
CCAADGGSKGNLIF

SEQ ID NO: 737988 - protein, 14 aa, Homo sapiens
  CDR3 for beta chain variable domain of TCR clone 368994 (TRBV14, TRBJ2-3)
CASSRKLAADTQYF

SEQ ID NO: 737989 - protein, 15 aa, Homo sapiens
  CDR3 for alpha chain variable domain of TCR clone 368995 (TRAV26-1, TRAJ29)
CIVRVEGSGNTPLVF

SEQ ID NO: 737990 - protein, 12 aa, Homo sapiens
  CDR3 for beta chain variable domain of TCR clone 368995 (TRBV6-1, TRBJ2-7)
CASSDYSYEQYF

SEQ ID NO: 737991 - protein, 11 aa, Homo sapiens
  CDR3 for alpha chain variable domain of TCR clone 368996 (TRAV1-1, TRAJ23)
CTVRQGGKLIF

SEQ ID NO: 737992 - protein, 14 aa, Homo sapiens
  CDR3 for beta chain variable domain of TCR clone 368996 (TRBV19, TRBJ2-1)
CASPTFVLSGEQFF

SEQ ID NO: 737993 - protein, 15 aa, Homo sapiens
  CDR3 for alpha chain variable domain of TCR clone 368997 (TRAV12-2, TRAJ11)
CAVNLRNSGNSTLTF

SEQ ID NO: 737994 - protein, 18 aa, Homo sapiens
  CDR3 for beta chain variable domain of TCR clone 368997 (TRBV7-2, TRBJ2-2)
CASSLASRGAGGPGELFF

SEQ ID NO: 737995 - protein, 14 aa, Homo sapiens
  CDR3 for alpha chain variable domain of TCR clone 368998 (TRAV26-1, TRAJ38)
CTADNAGNNRKLIW

SEQ ID NO: 737996 - protein, 14 aa, Homo sapiens
  CDR3 for beta chain variable domain of TCR clone 368998 (TRBV19, TRBJ2-1)
CASPTFVLSGEQFF

SEQ ID NO: 737997 - protein, 13 aa, Homo sapiens
  CDR3 for alpha chain variable domain of TCR clone 368999 (TRAV35, TRAJ15)
CAGQWQAGTALIF

SEQ ID NO: 737998 - protein, 15 aa, Homo sapiens
  CDR3 for beta chain variable domain of TCR clone 368999 (TRBV7-2, TRBJ2-1)
CASSLASGRVNEQFF

SEQ ID NO: 737999 - protein, 14 aa, Homo sapiens
  CDR3 for alpha chain variable domain of TCR clone 369000 (TRAV3, TRAJ36)
CAVRDGTGANNLFF

SEQ ID NO: 738000 - protein, 14 aa, Homo sapiens
  CDR3 for beta chain variable domain of TCR clone 369000 (TRBV19, TRBJ2-1)
CASPTFVLSGEQFF

SEQ ID NO: 738001 - protein, 14 aa, Homo sapiens
  CDR3 for alpha chain variable domain of TCR clone 369001 (TRAV35, TRAJ53)
GRVNSGGSNYKLTF

SEQ ID NO: 738002 - protein, 15 aa, Homo sapiens
  CDR3 for beta chain variable domain of TCR clone 369001 (TRBV7-9, TRBJ1-4)
CASSRTGGFNEKLFF

SEQ ID NO: 738003 - protein, 14 aa, Homo sapiens
  CDR3 for alpha chain variable domain of TCR clone 369002 (TRAV12-1, TRAJ17)
CVVNYKAAGNKLTF

SEQ ID NO: 738004 - protein, 16 aa, Homo sapiens
  CDR3 for beta chain variable domain of TCR clone 369002 (TRBV2, TRBJ2-1)
CASRSPAGGKYNEQFF

SEQ ID NO: 738005 - protein, 11 aa, Homo sapiens
  CDR3 for alpha chain variable domain of TCR clone 369003 (TRAV1-1, TRAJ30)
CAQNRDDKIIF

SEQ ID NO: 738006 - protein, 13 aa, Homo sapiens
  CDR3 for beta chain variable domain of TCR clone 369003 (TRBV7-8, TRBJ2-7)
CSSPGLADYEQYF

SEQ ID NO: 738007 - protein, 14 aa, Homo sapiens
  CDR3 for alpha chain variable domain of TCR clone 369004 (TRAV4, TRAJ43)
CLVGPMYNNNDMRF

SEQ ID NO: 738008 - protein, 21 aa, Homo sapiens
  CDR3 for beta chain variable domain of TCR clone 369004 (TRBV11-1, TRBJ2-1)
CASSGRERLRPEGPSYNEQFF

SEQ ID NO: 738009 - protein, 12 aa, Homo sapiens
  CDR3 for alpha chain variable domain of TCR clone 369005 (TRAV12-2, TRAJ16)
CAANLDGQKLLF

SEQ ID NO: 738010 - protein, 12 aa, Homo sapiens
  CDR3 for beta chain variable domain of TCR clone 369005 (TRBV5-7, TRBJ2-7)
CASSVQGGEQYF

SEQ ID NO: 738011 - protein, 14 aa, Homo sapiens
  CDR3 for alpha chain variable domain of TCR clone 369006 (TRAV1-2, TRAJ12)
CAVSGTDSSYKLIF

SEQ ID NO: 738012 - protein, 15 aa, Homo sapiens
  CDR3 for beta chain variable domain of TCR clone 369006 (TRBV2, TRBJ2-4)
CASSGTNLAKNIQHF

SEQ ID NO: 738013 - protein, 14 aa, Homo sapiens
  CDR3 for alpha chain variable domain of TCR clone 369007 (TRAV8-2, TRAJ26)
CVVSDWNYGQNFVF

SEQ ID NO: 738014 - protein, 15 aa, Homo sapiens
  CDR3 for beta chain variable domain of TCR clone 369007 (TRBV19, TRBJ2-1)
CASTPVGGGYNEQFF

SEQ ID NO: 738015 - protein, 15 aa, Homo sapiens
  CDR3 for alpha chain variable domain of TCR clone 369008 (TRAV13-2, TRAJ4)
CADPQERGGYNKLIF

SEQ ID NO: 738016 - protein, 15 aa, Homo sapiens
  CDR3 for beta chain variable domain of TCR clone 369008 (TRBV19, TRBJ2-1)
CASSSPGVPLDEQFF

SEQ ID NO: 738017 - protein, 14 aa, Homo sapiens
  CDR3 for alpha chain variable domain of TCR clone 369009 (TRAV1-2, TRAJ16)
CAVNRFSDGQKLLF

SEQ ID NO: 738018 - protein, 14 aa, Homo sapiens
  CDR3 for beta chain variable domain of TCR clone 369009 (TRBV7-2, TRBJ1-5)
CASSTQGAGQHQHF

SEQ ID NO: 738019 - protein, 17 aa, Homo sapiens
  CDR3 for alpha chain variable domain of TCR clone 369010 (TRAV13-2, TRAJ5)
CAESVVIVGHGQESTYF

SEQ ID NO: 738020 - protein, 18 aa, Homo sapiens
  CDR3 for beta chain variable domain of TCR clone 369010 (TRBV4-1, TRBJ2-3)
CASSHQLAGGRSTDRQYF

SEQ ID NO: 738021 - protein, 14 aa, Homo sapiens
  CDR3 for alpha chain variable domain of TCR clone 369011 (TRAV12-2, TRAJ13)
WAVKKTGGYQKVTF

SEQ ID NO: 738022 - protein, 17 aa, Homo sapiens
  CDR3 for beta chain variable domain of TCR clone 369011 (TRBV13, TRBJ2-3)
CASSLSRVAGGRNTQYF

SEQ ID NO: 738023 - protein, 14 aa, Homo sapiens
  CDR3 for alpha chain variable domain of TCR clone 369012 (TRAV12-3, TRAJ10)
SHLPLTGGGKKLTF

SEQ ID NO: 738024 - protein, 12 aa, Homo sapiens
  CDR3 for beta chain variable domain of TCR clone 369012 (TRBV7-9, TRBJ2-7)
CATRTDAYEQYF

SEQ ID NO: 738025 - protein, 18 aa, Homo sapiens
  CDR3 for alpha chain variable domain of TCR clone 369013 (TRAV21, TRAJ52)
CAARPSPAGGTSYGKLTF

SEQ ID NO: 738026 - protein, 13 aa, Homo sapiens
  CDR3 for beta chain variable domain of TCR clone 369013 (TRBV29-1, TRBJ2-2)
CSVYREDTGELFF

SEQ ID NO: 738027 - protein, 15 aa, Homo sapiens
  CDR3 for alpha chain variable domain of TCR clone 369014 (TRAV3, TRAJ9)
CAVRDSNTGGFKTIF

SEQ ID NO: 738028 - protein, 16 aa, Homo sapiens
  CDR3 for beta chain variable domain of TCR clone 369014 (TRBV15, TRBJ2-5)
CATSPTTGQDMETQYF

SEQ ID NO: 738029 - protein, 17 aa, Homo sapiens
  CDR3 for alpha chain variable domain of TCR clone 369015 (TRAV27, TRAJ18)
CAGLHRGRGSTLGRLSF

SEQ ID NO: 738030 - protein, 14 aa, Homo sapiens
  CDR3 for beta chain variable domain of TCR clone 369015 (TRBV20-1, TRBJ1-5)
CSARGRGSNQPQHF

SEQ ID NO: 738031 - protein, 14 aa, Homo sapiens
  CDR3 for alpha chain variable domain of TCR clone 369016 (TRAV12-2, TRAJ13)
CAVKKTGGYQKVTF

SEQ ID NO: 738032 - protein, 15 aa, Homo sapiens
  CDR3 for beta chain variable domain of TCR clone 369016 (TRBV28, TRBJ2-5)
CASSPPWSYKETQYF

SEQ ID NO: 738033 - protein, 15 aa, Homo sapiens
  CDR3 for alpha chain variable domain of TCR clone 369017 (TRAV21, TRAJ40)
CAVRPQTSGTYKYIF

SEQ ID NO: 738034 - protein, 15 aa, Homo sapiens
  CDR3 for beta chain variable domain of TCR clone 369017 (TRBV5-1, TRBJ2-3)
CASRVTSGSTDTQYF

SEQ ID NO: 738035 - protein, 14 aa, Homo sapiens
  CDR3 for alpha chain variable domain of TCR clone 369018 (TRAV12-2, TRAJ44)
CAVNPAGTASKLTF

SEQ ID NO: 738036 - protein, 14 aa, Homo sapiens
  CDR3 for beta chain variable domain of TCR clone 369018 (TRBV5-4, TRBJ1-1)
CASSLDSRRDEAFF

SEQ ID NO: 738037 - protein, 14 aa, Homo sapiens
  CDR3 for alpha chain variable domain of TCR clone 369019 (TRAV20, TRAJ56)
CAVQFGVANRKLTF

SEQ ID NO: 738038 - protein, 14 aa, Homo sapiens
  CDR3 for beta chain variable domain of TCR clone 369019 (TRBV20-1, TRBJ2-7)
CSAKRGRSSYEQYF

SEQ ID NO: 738039 - protein, 15 aa, Homo sapiens
  CDR3 for alpha chain variable domain of TCR clone 369020 (TRAV8-4, TRAJ39)
CAVSHHRGAGNMLTF

SEQ ID NO: 738040 - protein, 14 aa, Homo sapiens
  CDR3 for beta chain variable domain of TCR clone 369020 (TRBV23-1, TRBJ2-2)
CASSQFGTDGELFF

SEQ ID NO: 738041 - protein, 13 aa, Homo sapiens
  CDR3 for alpha chain variable domain of TCR clone 369021 (TRAV13-1, TRAJ11)
CAAVLAGYSTLTF

SEQ ID NO: 738042 - protein, 17 aa, Homo sapiens
  CDR3 for beta chain variable domain of TCR clone 369021 (TRBV4-1, TRBJ2-5)
FASSQDLTGGPIETQYF

SEQ ID NO: 738043 - protein, 16 aa, Homo sapiens
  CDR3 for alpha chain variable domain of TCR clone 369022 (TRAV16, TRAJ4)
CALSRMFSGGYNKLIF

SEQ ID NO: 738044 - protein, 15 aa, Homo sapiens
  CDR3 for beta chain variable domain of TCR clone 369022 (TRBV5-1, TRBJ2-2)
CASSSQGWNTGELFF

SEQ ID NO: 738045 - protein, 11 aa, Homo sapiens
  CDR3 for alpha chain variable domain of TCR clone 369023 (TRAV2, TRAJ33)
CAVESNYQLIW

SEQ ID NO: 738046 - protein, 12 aa, Homo sapiens
  CDR3 for beta chain variable domain of TCR clone 369023 (TRBV11-2, TRBJ2-2)
CASSLGGRELFF

SEQ ID NO: 738047 - protein, 14 aa, Homo sapiens
  CDR3 for alpha chain variable domain of TCR clone 369024 (TRAV12-2, TRAJ17)
CAVLFKAAGNKLTF

SEQ ID NO: 738048 - protein, 15 aa, Homo sapiens
  CDR3 for beta chain variable domain of TCR clone 369024 (TRBV15, TRBJ2-7)
CHQQRPIQQAYEQYF

SEQ ID NO: 738049 - protein, 14 aa, Homo sapiens
  CDR3 for alpha chain variable domain of TCR clone 369025 (TRAV1-2, TRAJ16)
CAVNRFSDGQKRLF

SEQ ID NO: 738050 - protein, 15 aa, Homo sapiens
  CDR3 for beta chain variable domain of TCR clone 369025 (TRBV11-2, TRBJ1-1)
CASSSRSSLLLSLDK

SEQ ID NO: 738051 - protein, 16 aa, Homo sapiens
  CDR3 for alpha chain variable domain of TCR clone 369026 (TRAV26-1, TRAJ37)
CIVRRDGSGNTGKLIF

SEQ ID NO: 738052 - protein, 17 aa, Homo sapiens
  CDR3 for beta chain variable domain of TCR clone 369026 (TRBV4-1, TRBJ2-7)
CASSRDPLGVRGGEQYF

SEQ ID NO: 738053 - protein, 14 aa, Homo sapiens
  CDR3 for alpha chain variable domain of TCR clone 369027 (TRAV35, TRAJ33)
CAGSSQDSNYRLIW

SEQ ID NO: 738054 - protein, 13 aa, Homo sapiens
  CDR3 for beta chain variable domain of TCR clone 369027 (TRBV10-3, TRBJ2-7)
CASKLAVNYEQYF

SEQ ID NO: 738055 - protein, 16 aa, Homo sapiens
  CDR3 for alpha chain variable domain of TCR clone 369028 (TRAV4, TRAJ6)
CLAGVYASGGSYIPTF

SEQ ID NO: 738056 - protein, 15 aa, Homo sapiens
  CDR3 for beta chain variable domain of TCR clone 369028 (TRBV14, TRBJ2-5)
CASSQGDRDQETQYF

SEQ ID NO: 738057 - protein, 12 aa, Homo sapiens
  CDR3 for alpha chain variable domain of TCR clone 369029 (TRAV36/DV7, TRAJ54)
CAVVRGGQKLVF

SEQ ID NO: 738058 - protein, 14 aa, Homo sapiens
  CDR3 for beta chain variable domain of TCR clone 369029 (TRBV7-3, TRBJ1-1)
CASSLKGGDTEAFF

SEQ ID NO: 738059 - protein, 15 aa, Homo sapiens
  CDR3 for alpha chain variable domain of TCR clone 369030 (TRAV8-3, TRAJ7)
CAVGSISYGNNRLAF

SEQ ID NO: 738060 - protein, 12 aa, Homo sapiens
  CDR3 for beta chain variable domain of TCR clone 369030 (TRBV7-8, TRBJ2-7)
CASSLGDREQYF

SEQ ID NO: 738061 - protein, 14 aa, Homo sapiens
  CDR3 for alpha chain variable domain of TCR clone 369031 (TRAV23/DV6, TRAJ17)
CAASVQAAGNNLTF

SEQ ID NO: 738062 - protein, 18 aa, Homo sapiens
  CDR3 for beta chain variable domain of TCR clone 369031 (TRBV20-1, TRBJ2-7)
CSAGLPPRSGGSPYEQYF

SEQ ID NO: 738063 - protein, 14 aa, Homo sapiens
  CDR3 for alpha chain variable domain of TCR clone 369032 (TRAV21, TRAJ35)
CAVMPIGFGNVLHC

SEQ ID NO: 738064 - protein, 14 aa, Homo sapiens
  CDR3 for beta chain variable domain of TCR clone 369032 (TRBV24-1, TRBJ1-1)
CATSIPRGDTEAFF

SEQ ID NO: 738065 - protein, 15 aa, Homo sapiens
  CDR3 for alpha chain variable domain of TCR clone 369033 (TRAV4, TRAJ36)
CLVGDRQTGANNLFF

SEQ ID NO: 738066 - protein, 15 aa, Homo sapiens
  CDR3 for beta chain variable domain of TCR clone 369033 (TRBV7-6, TRBJ2-1)
CASSSLAGEGDEQFF

SEQ ID NO: 738067 - protein, 12 aa, Homo sapiens
  CDR3 for alpha chain variable domain of TCR clone 369034 (TRAV3, TRAJ43)
CAVRDPNNDMRL

SEQ ID NO: 738068 - protein, 13 aa, Homo sapiens
  CDR3 for beta chain variable domain of TCR clone 369034 (TRBV19, TRBJ1-2)
CASSVPGQDGYAF

SEQ ID NO: 738069 - protein, 14 aa, Homo sapiens
  CDR3 for alpha chain variable domain of TCR clone 369035 (TRAV13-1, TRAJ44)
CAAEATGTASKLTF

SEQ ID NO: 738070 - protein, 16 aa, Homo sapiens
  CDR3 for beta chain variable domain of TCR clone 369035 (TRBV13, TRBJ2-2)
CASSPRTGEHTGELFF

SEQ ID NO: 738071 - protein, 14 aa, Homo sapiens
  CDR3 for alpha chain variable domain of TCR clone 369036 (TRAV26-1, TRAJ34)
CIVRVAYNTDMLIF

SEQ ID NO: 738072 - protein, 15 aa, Homo sapiens
  CDR3 for beta chain variable domain of TCR clone 369036 (TRBV20-1, TRBJ2-7)
CSARVPAAYFYEQYF

SEQ ID NO: 738073 - protein, 15 aa, Homo sapiens
  CDR3 for alpha chain variable domain of TCR clone 369037 (TRAV8-3, TRAJ27)
CAVGPSKTNAGKSTF

SEQ ID NO: 738074 - protein, 14 aa, Homo sapiens
  CDR3 for beta chain variable domain of TCR clone 369037 (TRBV18, TRBJ2-5)
CASSPGVSQETQYF

SEQ ID NO: 738075 - protein, 13 aa, Homo sapiens
  CDR3 for alpha chain variable domain of TCR clone 369038 (TRAV12-3, TRAJ13)
CAMGTGGYEKVTF

SEQ ID NO: 738076 - protein, 16 aa, Homo sapiens
  CDR3 for beta chain variable domain of TCR clone 369038 (TRBV9, TRBJ2-1)
CASSVGGGGNYNEQFF

SEQ ID NO: 738077 - protein, 13 aa, Homo sapiens
  CDR3 for alpha chain variable domain of TCR clone 369039 (TRAV35, TRAJ57)
CWSPQGGSEKLVF

SEQ ID NO: 738078 - protein, 13 aa, Homo sapiens
  CDR3 for beta chain variable domain of TCR clone 369039 (TRBV20-1, TRBJ2-2)
CSASAAGTGELFF

SEQ ID NO: 738079 - protein, 11 aa, Homo sapiens
  CDR3 for alpha chain variable domain of TCR clone 369040 (TRAV3, TRAJ21)
CAVGNFNKFYC

SEQ ID NO: 738080 - protein, 16 aa, Homo sapiens
  CDR3 for beta chain variable domain of TCR clone 369040 (TRBV19, TRBJ2-1)
CASSKAGPRSYNEQFF

SEQ ID NO: 738081 - protein, 15 aa, Homo sapiens
  CDR3 for alpha chain variable domain of TCR clone 369041 (TRAV8-3, TRAJ27)
CAVGPSKTNAGKSTF

SEQ ID NO: 738082 - protein, 14 aa, Homo sapiens
  CDR3 for beta chain variable domain of TCR clone 369041 (TRBV11-3, TRBJ2-3)
CASSRLARTDTQYF

SEQ ID NO: 738083 - protein, 10 aa, Homo sapiens
  CDR3 for alpha chain variable domain of TCR clone 369042 (TRAV23/DV6, TRAJ57)
CAASSTLSQG

SEQ ID NO: 738084 - protein, 13 aa, Homo sapiens
  CDR3 for beta chain variable domain of TCR clone 369042 (TRBV4-1, TRBJ2-2)
CASSQENTGELFF

SEQ ID NO: 738085 - protein, 12 aa, Homo sapiens
  CDR3 for alpha chain variable domain of TCR clone 369043 (TRAV8-3, TRAJ20)
CAVGANDYKLSF

SEQ ID NO: 738086 - protein, 16 aa, Homo sapiens
  CDR3 for beta chain variable domain of TCR clone 369043 (TRBV5-1, TRBJ2-1)
CASSLSSLRESNEQFF

SEQ ID NO: 738087 - protein, 18 aa, Homo sapiens
  CDR3 for alpha chain variable domain of TCR clone 369044 (TRAV35, TRAJ28)
CAGHNYPLSGAGSYQLTF

SEQ ID NO: 738088 - protein, 11 aa, Homo sapiens
  CDR3 for beta chain variable domain of TCR clone 369044 (TRBV7-6, TRBJ2-1)
CASSNYGEQFF

SEQ ID NO: 738089 - protein, 12 aa, Homo sapiens
  CDR3 for alpha chain variable domain of TCR clone 369045 (TRAV27, TRAJ35)
FAGADVGNVLHC

SEQ ID NO: 738090 - protein, 16 aa, Homo sapiens
  CDR3 for beta chain variable domain of TCR clone 369045 (TRBV6-1, TRBJ2-1)
CASILRQGSSYNEQFF

SEQ ID NO: 738091 - protein, 15 aa, Homo sapiens
  CDR3 for alpha chain variable domain of TCR clone 369046 (TRAV26-2, TRAJ53)
CIRGNSGGSNYKLTF

SEQ ID NO: 738092 - protein, 15 aa, Homo sapiens
  CDR3 for beta chain variable domain of TCR clone 369046 (TRBV11-3, TRBJ2-3)
CASLKDGREGDTQYF

SEQ ID NO: 738093 - protein, 18 aa, Homo sapiens
  CDR3 for alpha chain variable domain of TCR clone 369047 (TRAV26-2, TRAJ45)
CILRVDKDSGGGADGLTF

SEQ ID NO: 738094 - protein, 14 aa, Homo sapiens
  CDR3 for beta chain variable domain of TCR clone 369047 (TRBV7-2, TRBJ2-7)
CASRSQGAAYEQYF

SEQ ID NO: 738095 - protein, 14 aa, Homo sapiens
  CDR3 for alpha chain variable domain of TCR clone 369048 (TRAV12-3, TRAJ10)
SHLPLTGGGNKLTF

SEQ ID NO: 738096 - protein, 16 aa, Homo sapiens
  CDR3 for beta chain variable domain of TCR clone 369048 (TRBV19, TRBJ1-1)
CASRFGGPVTGTEAVF

SEQ ID NO: 738097 - protein, 16 aa, Homo sapiens
  CDR3 for alpha chain variable domain of TCR clone 369049 (TRAV3, TRAJ37)
CAVRPHGSGNTGKLIF

SEQ ID NO: 738098 - protein, 15 aa, Homo sapiens
  CDR3 for beta chain variable domain of TCR clone 369049 (TRBV20-1, TRBJ1-1)
CSASRGVTGNTEAFF

SEQ ID NO: 738099 - protein, 14 aa, Homo sapiens
  CDR3 for alpha chain variable domain of TCR clone 369050 (TRAV39, TRAJ54)
CAVVLIHGAQKLVF

SEQ ID NO: 738100 - protein, 16 aa, Homo sapiens
  CDR3 for beta chain variable domain of TCR clone 369050 (TRBV3-1, TRBJ2-7)
CASSQGATGVAYEQYF

SEQ ID NO: 738101 - protein, 11 aa, Homo sapiens
  CDR3 for alpha chain variable domain of TCR clone 369051 (TRAV17, TRAJ43)
CATPRSNDMRF

SEQ ID NO: 738102 - protein, 13 aa, Homo sapiens
  CDR3 for beta chain variable domain of TCR clone 369051 (TRBV12-5, TRBJ2-3)
CASGDRQSDTQYF

SEQ ID NO: 738103 - protein, 15 aa, Homo sapiens
  CDR3 for alpha chain variable domain of TCR clone 369052 (TRAV4, TRAJ10)
CLVGDGLGGGNKLTF

SEQ ID NO: 738104 - protein, 11 aa, Homo sapiens
  CDR3 for beta chain variable domain of TCR clone 369052 (TRBV5-1, TRBJ2-2)
CASSPSRCEHR

SEQ ID NO: 738105 - protein, 15 aa, Homo sapiens
  CDR3 for alpha chain variable domain of TCR clone 369053 (TRAV17, TRAJ34)
CATDPRMVGTDKLIF

SEQ ID NO: 738106 - protein, 12 aa, Homo sapiens
  CDR3 for beta chain variable domain of TCR clone 369053 (TRBV10-2, TRBJ2-3)
CASSEGPGPRYF

SEQ ID NO: 738107 - protein, 19 aa, Homo sapiens
  CDR3 for alpha chain variable domain of TCR clone 369054 (TRAV17, TRAJ17)
CATDGRPGVIKAAGNKLTF

SEQ ID NO: 738108 - protein, 17 aa, Homo sapiens
  CDR3 for beta chain variable domain of TCR clone 369054 (TRBV20-1, TRBJ2-1)
CSASSSGLAGSYNEQFF

SEQ ID NO: 738109 - protein, 14 aa, Homo sapiens
  CDR3 for alpha chain variable domain of TCR clone 369055 (TRAV13-2, TRAJ22)
CADGTLGSARHLTF

SEQ ID NO: 738110 - protein, 15 aa, Homo sapiens
  CDR3 for beta chain variable domain of TCR clone 369055 (TRBV6-3, TRBJ2-7)
CASSSPGTVFYEQYF

SEQ ID NO: 738111 - protein, 15 aa, Homo sapiens
  CDR3 for alpha chain variable domain of TCR clone 369056 (TRAV21, TRAJ53)
CATLNSGGSNYKQTF

SEQ ID NO: 738112 - protein, 13 aa, Homo sapiens
  CDR3 for beta chain variable domain of TCR clone 369056 (TRBV4-1, TRBJ2-2)
CASSQENNGELFF

SEQ ID NO: 738113 - protein, 16 aa, Homo sapiens
  CDR3 for alpha chain variable domain of TCR clone 369057 (TRAV3, TRAJ23)
CAVKIGSYNQGGKLIF

SEQ ID NO: 738114 - protein, 17 aa, Homo sapiens
  CDR3 for beta chain variable domain of TCR clone 369057 (TRBV10-3, TRBJ2-6)
CAISESTAPSGANDLTF

SEQ ID NO: 738115 - protein, 13 aa, Homo sapiens
  CDR3 for alpha chain variable domain of TCR clone 369058 (TRAV29/DV5, TRAJ44)
CAASTGTASKLTF

SEQ ID NO: 738116 - protein, 13 aa, Homo sapiens
  CDR3 for beta chain variable domain of TCR clone 369058 (TRBV19, TRBJ2-7)
CAIRKAGGNEQYF

SEQ ID NO: 738117 - protein, 19 aa, Homo sapiens
  CDR3 for alpha chain variable domain of TCR clone 369059 (TRAV1-1, TRAJ5)
CLLLLRCETHDTGRRALTF

SEQ ID NO: 738118 - protein, 17 aa, Homo sapiens
  CDR3 for beta chain variable domain of TCR clone 369059 (TRBV28, TRBJ2-7)
CASSPGLAGGDSSEQYF

SEQ ID NO: 738119 - protein, 14 aa, Homo sapiens
  CDR3 for alpha chain variable domain of TCR clone 369060 (TRAV12-2, TRAJ17)
CAVNTKDAGNKLTF

SEQ ID NO: 738120 - protein, 12 aa, Homo sapiens
  CDR3 for beta chain variable domain of TCR clone 369060 (TRBV7-8, TRBJ2-7)
CASSLGDREQYF

SEQ ID NO: 738121 - protein, 13 aa, Homo sapiens
  CDR3 for alpha chain variable domain of TCR clone 369061 (TRAV12-2, TRAJ49)
CAVKPNTGNQFYF

SEQ ID NO: 738122 - protein, 15 aa, Homo sapiens
  CDR3 for beta chain variable domain of TCR clone 369061 (TRBV11-2, TRBJ2-1)
CASSKNRGLIYEQFF

SEQ ID NO: 738123 - protein, 13 aa, Homo sapiens
  CDR3 for alpha chain variable domain of TCR clone 369062 (TRAV8-4, TRAJ30)
CAVSVNRVDKIIF

SEQ ID NO: 738124 - protein, 13 aa, Homo sapiens
  CDR3 for beta chain variable domain of TCR clone 369062 (TRBV3-1, TRBJ2-2)
CASLARGSGELFF

SEQ ID NO: 738125 - protein, 14 aa, Homo sapiens
  CDR3 for alpha chain variable domain of TCR clone 369063 (TRAV13-1, TRAJ9)
CAASALTGGFKTIF

SEQ ID NO: 738126 - protein, 17 aa, Homo sapiens
  CDR3 for beta chain variable domain of TCR clone 369063 (TRBV20-1, TRBJ2-2)
CSASGSGQGGLTGELFF

SEQ ID NO: 738127 - protein, 16 aa, Homo sapiens
  CDR3 for alpha chain variable domain of TCR clone 369064 (TRAV8-3, TRAJ44)
CAVGASNTVTASRLTF

SEQ ID NO: 738128 - protein, 15 aa, Homo sapiens
  CDR3 for beta chain variable domain of TCR clone 369064 (TRBV27, TRBJ1-5)
CASTFNRGSNQPQHF

SEQ ID NO: 738129 - protein, 14 aa, Homo sapiens
  CDR3 for alpha chain variable domain of TCR clone 369065 (TRAV2, TRAJ9)
CAVEDRSGGFKTIF

SEQ ID NO: 738130 - protein, 14 aa, Homo sapiens
  CDR3 for beta chain variable domain of TCR clone 369065 (TRBV18, TRBJ2-7)
CASSPRGGAYEQYF

SEQ ID NO: 738131 - protein, 13 aa, Homo sapiens
  CDR3 for alpha chain variable domain of TCR clone 369066 (TRAV12-3, TRAJ13)
CAMGTGGYQKVTF

SEQ ID NO: 738132 - protein, 16 aa, Homo sapiens
  CDR3 for beta chain variable domain of TCR clone 369066 (TRBV9, TRBJ2-1)
CASIVGGGGNYNEQFF

SEQ ID NO: 738133 - protein, 13 aa, Homo sapiens
  CDR3 for alpha chain variable domain of TCR clone 369067 (TRAV2, TRAJ15)
CAVASQAGTALIF

SEQ ID NO: 738134 - protein, 16 aa, Homo sapiens
  CDR3 for beta chain variable domain of TCR clone 369067 (TRBV5-1, TRBJ1-1)
SASSSGGNSLNTEAFF

SEQ ID NO: 738135 - protein, 15 aa, Homo sapiens
  CDR3 for alpha chain variable domain of TCR clone 369068 (TRAV20, TRAJ52)
CAVQAGGTSYGKLTF

SEQ ID NO: 738136 - protein, 16 aa, Homo sapiens
  CDR3 for beta chain variable domain of TCR clone 369068 (TRBV18, TRBJ1-5)
CASSPSTGNSNQPQHF

SEQ ID NO: 738137 - protein, 12 aa, Homo sapiens
  CDR3 for alpha chain variable domain of TCR clone 369069 (TRAV16, TRAJ10)
CSRTGGGNKLTF

SEQ ID NO: 738138 - protein, 12 aa, Homo sapiens
  CDR3 for beta chain variable domain of TCR clone 369069 (TRBV11-3, TRBJ1-1)
CASSHRQGEEFF

SEQ ID NO: 738139 - protein, 14 aa, Homo sapiens
  CDR3 for alpha chain variable domain of TCR clone 369070 (TRAV12-2, TRAJ8)
CAVKENTGFQKLVF

SEQ ID NO: 738140 - protein, 11 aa, Homo sapiens
  CDR3 for beta chain variable domain of TCR clone 369070 (TRBV7-9, TRBJ2-3)
CASSPPDTQYF

SEQ ID NO: 738141 - protein, 13 aa, Homo sapiens
  CDR3 for alpha chain variable domain of TCR clone 369071 (TRAV20, TRAJ42)
CAVRGGSQGNLIF

SEQ ID NO: 738142 - protein, 15 aa, Homo sapiens
  CDR3 for beta chain variable domain of TCR clone 369071 (TRBV10-1, TRBJ2-1)
CASSEWRGTYNEQFF

SEQ ID NO: 738143 - protein, 14 aa, Homo sapiens
  CDR3 for alpha chain variable domain of TCR clone 369072 (TRAV13-1, TRAJ9)
CAASALTGGFKTIF

SEQ ID NO: 738144 - protein, 14 aa, Homo sapiens
  CDR3 for beta chain variable domain of TCR clone 369072 (TRBV19, TRBJ2-1)
CASPTFVLSSEQFF

SEQ ID NO: 738145 - protein, 13 aa, Homo sapiens
  CDR3 for alpha chain variable domain of TCR clone 369073 (TRAV1-2, TRAJ9)
CAVLNTGGFKTSF

SEQ ID NO: 738146 - protein, 14 aa, Homo sapiens
  CDR3 for beta chain variable domain of TCR clone 369073 (TRBV19, TRBJ2-1)
CASPTFVLSGEQFF

SEQ ID NO: 738147 - protein, 14 aa, Homo sapiens
  CDR3 for alpha chain variable domain of TCR clone 369074 (TRAV1-2, TRAJ16)
CAVNRFSDGRKLLF

SEQ ID NO: 738148 - protein, 13 aa, Homo sapiens
  CDR3 for beta chain variable domain of TCR clone 369074 (TRBV7-3, TRBJ1-1)
CASSQDWGAEAFF

SEQ ID NO: 738149 - protein, 10 aa, Homo sapiens
  CDR3 for alpha chain variable domain of TCR clone 369075 (TRAV30, TRAJ48)
CGIGNEKLTF

SEQ ID NO: 738150 - protein, 12 aa, Homo sapiens
  CDR3 for beta chain variable domain of TCR clone 369075 (TRBV5-5, TRBJ2-5)
CASSYFGETQYF

SEQ ID NO: 738151 - protein, 15 aa, Homo sapiens
  CDR3 for alpha chain variable domain of TCR clone 369076 (TRAV3, TRAJ3)
CAVRDRYSNASKIIF

SEQ ID NO: 738152 - protein, 18 aa, Homo sapiens
  CDR3 for beta chain variable domain of TCR clone 369076 (TRBV25-1, TRBJ1-2)
CASSGLQNGQGLIFGYTF

SEQ ID NO: 738153 - protein, 18 aa, Homo sapiens
  CDR3 for alpha chain variable domain of TCR clone 369077 (TRAV26-1, TRAJ22)
CIVRVALISSGSARQLTF

SEQ ID NO: 738154 - protein, 14 aa, Homo sapiens
  CDR3 for beta chain variable domain of TCR clone 369077 (TRBV4-1, TRBJ2-2)
CASSQAVNTGELFF

SEQ ID NO: 738155 - protein, 13 aa, Homo sapiens
  CDR3 for alpha chain variable domain of TCR clone 369078 (TRAV20, TRAJ21)
CAVEGYNFNKFYF

SEQ ID NO: 738156 - protein, 14 aa, Homo sapiens
  CDR3 for beta chain variable domain of TCR clone 369078 (TRBV4-1, TRBJ2-2)
CASSQAVNTGELFF

SEQ ID NO: 738157 - protein, 21 aa, Homo sapiens
  CDR3 for alpha chain variable domain of TCR clone 369079 (TRAV1-1, TRAJ6)
CAVRREEATYLHLVEEPALLF

SEQ ID NO: 738158 - protein, 15 aa, Homo sapiens
  CDR3 for beta chain variable domain of TCR clone 369079 (TRBV6-6, TRBJ2-1)
CATRQGVSSYNEQFF

SEQ ID NO: 738159 - protein, 12 aa, Homo sapiens
  CDR3 for alpha chain variable domain of TCR clone 369080 (TRAV3, TRAJ39)
CAVIEWSNMLTF

SEQ ID NO: 738160 - protein, 14 aa, Homo sapiens
  CDR3 for beta chain variable domain of TCR clone 369080 (TRBV7-8, TRBJ2-3)
CASSYPDGQDTQYF

SEQ ID NO: 738161 - protein, 16 aa, Homo sapiens
  CDR3 for alpha chain variable domain of TCR clone 369081 (TRAV20, TRAJ22)
CAVQASSSGSARQLTF

SEQ ID NO: 738162 - protein, 14 aa, Homo sapiens
  CDR3 for beta chain variable domain of TCR clone 369081 (TRBV18, TRBJ2-5)
CASSPGLSQETQYF

SEQ ID NO: 738163 - protein, 14 aa, Homo sapiens
  CDR3 for alpha chain variable domain of TCR clone 369082 (TRAV34, TRAJ22)
CGADTSGSARQLTF

SEQ ID NO: 738164 - protein, 17 aa, Homo sapiens
  CDR3 for beta chain variable domain of TCR clone 369082 (TRBV4-1, TRBJ2-7)
CASSPFLTSGGVVEQYF

SEQ ID NO: 738165 - protein, 14 aa, Homo sapiens
  CDR3 for alpha chain variable domain of TCR clone 369083 (TRAV12-2, TRAJ13)
CAVKKTGGYQKVTF

SEQ ID NO: 738166 - protein, 15 aa, Homo sapiens
  CDR3 for beta chain variable domain of TCR clone 369083 (TRBV7-9, TRBJ2-7)
CASSSSGLAVYEQYF

SEQ ID NO: 738167 - protein, 17 aa, Homo sapiens
  CDR3 for alpha chain variable domain of TCR clone 369084 (TRAV8-4, TRAJ45)
CAVSEGGSGGGADGLTF

SEQ ID NO: 738168 - protein, 19 aa, Homo sapiens
  CDR3 for beta chain variable domain of TCR clone 369084 (TRBV7-8, TRBJ2-5)
CASSVLCQKLAGGQETQYF

SEQ ID NO: 738169 - protein, 14 aa, Homo sapiens
  CDR3 for alpha chain variable domain of TCR clone 369085 (TRAV25, TRAJ35)
CARRMEGFVNVLHC

SEQ ID NO: 738170 - protein, 13 aa, Homo sapiens
  CDR3 for beta chain variable domain of TCR clone 369085 (TRBV7-2, TRBJ1-4)
CASSLAGLEKLFF

SEQ ID NO: 738171 - protein, 12 aa, Homo sapiens
  CDR3 for alpha chain variable domain of TCR clone 369086 (TRAV12-3, TRAJ17)
CAMTLTGNKLTF

SEQ ID NO: 738172 - protein, 16 aa, Homo sapiens
  CDR3 for beta chain variable domain of TCR clone 369086 (TRBV19, TRBJ1-1)
CASRPRSEALNTEAFF

SEQ ID NO: 738173 - protein, 13 aa, Homo sapiens
  CDR3 for alpha chain variable domain of TCR clone 369087 (TRAV21, TRAJ34)
CAVSEGDTDKLIF

SEQ ID NO: 738174 - protein, 17 aa, Homo sapiens
  CDR3 for beta chain variable domain of TCR clone 369087 (TRBV20-1, TRBJ1-5)
SAVLEILQPGFNQPQHF

SEQ ID NO: 738175 - protein, 14 aa, Homo sapiens
  CDR3 for alpha chain variable domain of TCR clone 369088 (TRAV29/DV5, TRAJ36)
CAARRKTGAHNLFF

SEQ ID NO: 738176 - protein, 12 aa, Homo sapiens
  CDR3 for beta chain variable domain of TCR clone 369088 (TRBV11-2, TRBJ2-1)
CASSPGNNEQFF

SEQ ID NO: 738177 - protein, 19 aa, Homo sapiens
  CDR3 for alpha chain variable domain of TCR clone 369089 (TRAV26-1, TRAJ28)
CIVRVAHAYSGAGSYQLTF

SEQ ID NO: 738178 - protein, 15 aa, Homo sapiens
  CDR3 for beta chain variable domain of TCR clone 369089 (TRBV19, TRBJ1-6)
CASSTQGAVGSPLHF

SEQ ID NO: 738179 - protein, 17 aa, Homo sapiens
  CDR3 for alpha chain variable domain of TCR clone 369090 (TRAV8-6, TRAJ8)
CSVKAGIENTGFQKLVF

SEQ ID NO: 738180 - protein, 12 aa, Homo sapiens
  CDR3 for beta chain variable domain of TCR clone 369090 (TRBV19, TRBJ1-4)
CASKDWPGGLFF

SEQ ID NO: 738181 - protein, 15 aa, Homo sapiens
  CDR3 for alpha chain variable domain of TCR clone 369091 (TRAV3, TRAJ22)
CAVRDRGGSASQLTF

SEQ ID NO: 738182 - protein, 16 aa, Homo sapiens
  CDR3 for beta chain variable domain of TCR clone 369091 (TRBV5-4, TRBJ2-3)
CASQQPGAGGSDTQYF

SEQ ID NO: 738183 - protein, 12 aa, Homo sapiens
  CDR3 for alpha chain variable domain of TCR clone 369092 (TRAV16, TRAJ10)
CSRTGGGNKLTF

SEQ ID NO: 738184 - protein, 14 aa, Homo sapiens
  CDR3 for beta chain variable domain of TCR clone 369092 (TRBV11-2, TRBJ2-3)
CASSLGGGANTQYF

SEQ ID NO: 738185 - protein, 14 aa, Homo sapiens
  CDR3 for alpha chain variable domain of TCR clone 369093 (TRAV4, TRAJ30)
CLVGDFRRDDKIIF

SEQ ID NO: 738186 - protein, 17 aa, Homo sapiens
  CDR3 for beta chain variable domain of TCR clone 369093 (TRBV4-1, TRBJ2-7)
CASSRDPLGVRGGEQYF

SEQ ID NO: 738187 - protein, 16 aa, Homo sapiens
  CDR3 for alpha chain variable domain of TCR clone 369094 (TRAV30, TRAJ24)
CGTEIVDADSWGKFQF

SEQ ID NO: 738188 - protein, 14 aa, Homo sapiens
  CDR3 for beta chain variable domain of TCR clone 369094 (TRBV7-6, TRBJ2-3)
CTSSLGTVTDTQYF

SEQ ID NO: 738189 - protein, 13 aa, Homo sapiens
  CDR3 for alpha chain variable domain of TCR clone 369095 (TRAV2, TRAJ13)
RAVESGGYQKVTF

SEQ ID NO: 738190 - protein, 13 aa, Homo sapiens
  CDR3 for beta chain variable domain of TCR clone 369095 (TRBV28, TRBJ2-5)
CASSFAGGETQYF

SEQ ID NO: 738191 - protein, 14 aa, Homo sapiens
  CDR3 for alpha chain variable domain of TCR clone 369096 (TRAV16, TRAJ33)
CALSAMDSNYQLIW

SEQ ID NO: 738192 - protein, 17 aa, Homo sapiens
  CDR3 for beta chain variable domain of TCR clone 369096 (TRBV18, TRBJ2-1)
CASSKGLSGGADNEQFF

SEQ ID NO: 738193 - protein, 18 aa, Homo sapiens
  CDR3 for alpha chain variable domain of TCR clone 369097 (TRAV38-1, TRAJ40)
CALRPTSGTYKYIWNRHQ

SEQ ID NO: 738194 - protein, 14 aa, Homo sapiens
  CDR3 for beta chain variable domain of TCR clone 369097 (TRBV25-1, TRBJ1-1)
CASTHLGGNTEAFF

SEQ ID NO: 738195 - protein, 17 aa, Homo sapiens
  CDR3 for alpha chain variable domain of TCR clone 369098 (TRAV3, TRAJ12)
CAVRDGGRMESSYKLIF

SEQ ID NO: 738196 - protein, 14 aa, Homo sapiens
  CDR3 for beta chain variable domain of TCR clone 369098 (TRBV7-9, TRBJ1-2)
CASSRQGANYGYTF

SEQ ID NO: 738197 - protein, 13 aa, Homo sapiens
  CDR3 for alpha chain variable domain of TCR clone 369099 (TRAV21, TRAJ57)
CAVTQGGSEKLVF

SEQ ID NO: 738198 - protein, 17 aa, Homo sapiens
  CDR3 for beta chain variable domain of TCR clone 369099 (TRBV10-3, TRBJ2-6)
CAISKLAESSGANVLTF

SEQ ID NO: 738199 - protein, 11 aa, Homo sapiens
  CDR3 for alpha chain variable domain of TCR clone 369100 (TRAV1-2, TRAJ10)
VLTVGGNKLTF

SEQ ID NO: 738200 - protein, 12 aa, Homo sapiens
  CDR3 for beta chain variable domain of TCR clone 369100 (TRBV7-8, TRBJ2-7)
CASSLGDREQYF

SEQ ID NO: 738201 - protein, 23 aa, Homo sapiens
  CDR3 for alpha chain variable domain of TCR clone 369101 (TRAV8-3, TRAJ38)
CAVGASNAGNNHIQNPDPAVYQL

SEQ ID NO: 738202 - protein, 15 aa, Homo sapiens
  CDR3 for beta chain variable domain of TCR clone 369101 (TRBV11-3, TRBJ1-3)
CASSLFGPSGNTVYF

SEQ ID NO: 738203 - protein, 13 aa, Homo sapiens
  CDR3 for alpha chain variable domain of TCR clone 369102 (TRAV8-4, TRAJ49)
CAVRTLTGNQFYF

SEQ ID NO: 738204 - protein, 14 aa, Homo sapiens
  CDR3 for beta chain variable domain of TCR clone 369102 (TRBV20-1, TRBJ2-1)
CSAQIGGSANEQFF

SEQ ID NO: 738205 - protein, 17 aa, Homo sapiens
  CDR3 for alpha chain variable domain of TCR clone 369103 (TRAV13-1, TRAJ52)
CAASSGAGGTSYGKLTF

SEQ ID NO: 738206 - protein, 17 aa, Homo sapiens
  CDR3 for beta chain variable domain of TCR clone 369103 (TRBV11-2, TRBJ2-1)
CASSLYPPGVEYNEQLF

SEQ ID NO: 738207 - protein, 16 aa, Homo sapiens
  CDR3 for alpha chain variable domain of TCR clone 369104 (TRAV26-1, TRAJ13)
CIVSPKDSGGYQKVTF

SEQ ID NO: 738208 - protein, 16 aa, Homo sapiens
  CDR3 for beta chain variable domain of TCR clone 369104 (TRBV7-3, TRBJ2-2)
CASSLKRGTLSGELFF

SEQ ID NO: 738209 - protein, 14 aa, Homo sapiens
  CDR3 for alpha chain variable domain of TCR clone 369105 (TRAV8-3, TRAJ44)
CAVGLTGTASKLTF

SEQ ID NO: 738210 - protein, 12 aa, Homo sapiens
  CDR3 for beta chain variable domain of TCR clone 369105 (TRBV7-3, TRBJ2-1)
CASSLGFNEQFC

SEQ ID NO: 738211 - protein, 14 aa, Homo sapiens
  CDR3 for alpha chain variable domain of TCR clone 369106 (TRAV2, TRAJ29)
CAVTPPSGNTPLVF

SEQ ID NO: 738212 - protein, 13 aa, Homo sapiens
  CDR3 for beta chain variable domain of TCR clone 369106 (TRBV11-2, TRBJ2-1)
CASSLGLAWGRFF

SEQ ID NO: 738213 - protein, 13 aa, Homo sapiens
  CDR3 for alpha chain variable domain of TCR clone 369107 (TRAV13-1, TRAJ43)
CAASKNNNNDMRF

SEQ ID NO: 738214 - protein, 15 aa, Homo sapiens
  CDR3 for beta chain variable domain of TCR clone 369107 (TRBV5-1, TRBJ2-5)
CASSFKGGDQETQYF

SEQ ID NO: 738215 - protein, 17 aa, Homo sapiens
  CDR3 for alpha chain variable domain of TCR clone 369108 (TRAV3, TRAJ12)
CAVRDGGGMDSSYKLIF

SEQ ID NO: 738216 - protein, 13 aa, Homo sapiens
  CDR3 for beta chain variable domain of TCR clone 369108 (TRBV12-4, TRBJ1-2)
CASSLRQGKGYTF

SEQ ID NO: 738217 - protein, 12 aa, Homo sapiens
  CDR3 for alpha chain variable domain of TCR clone 369109 (TRAV13-1, TRAJ15)
CAASQAGTALIF

SEQ ID NO: 738218 - protein, 14 aa, Homo sapiens
  CDR3 for beta chain variable domain of TCR clone 369109 (TRBV10-3, TRBJ1-2)
CAISAGGRVDGYTF

SEQ ID NO: 738219 - protein, 13 aa, Homo sapiens
  CDR3 for alpha chain variable domain of TCR clone 369110 (TRAV1-2, TRAJ12)
CAVSIDSSYKLIF

SEQ ID NO: 738220 - protein, 14 aa, Homo sapiens
  CDR3 for beta chain variable domain of TCR clone 369110 (TRBV20-1, TRBJ2-7)
CSAKRGRSSYEQYF

SEQ ID NO: 738221 - protein, 14 aa, Homo sapiens
  CDR3 for alpha chain variable domain of TCR clone 369111 (TRAV1-2, TRAJ17)
CALRRGAAGNKLTF

SEQ ID NO: 738222 - protein, 16 aa, Homo sapiens
  CDR3 for beta chain variable domain of TCR clone 369111 (TRBV11-2, TRBJ2-7)
CASSPTTGGVSYEQYF

SEQ ID NO: 738223 - protein, 14 aa, Homo sapiens
  CDR3 for alpha chain variable domain of TCR clone 369112 (TRAV3, TRAJ37)
CAVKESGNTGKLIF

SEQ ID NO: 738224 - protein, 14 aa, Homo sapiens
  CDR3 for beta chain variable domain of TCR clone 369112 (TRBV5-5, TRBJ1-5)
CASSGQGVDQPQHF

SEQ ID NO: 738225 - protein, 16 aa, Homo sapiens
  CDR3 for alpha chain variable domain of TCR clone 369113 (TRAV25, TRAJ24)
CAQRRGTTDSWGKLQF

SEQ ID NO: 738226 - protein, 14 aa, Homo sapiens
  CDR3 for beta chain variable domain of TCR clone 369113 (TRBV6-6, TRBJ1-5)
CASSYGPTNQPQHF

SEQ ID NO: 738227 - protein, 16 aa, Homo sapiens
  CDR3 for alpha chain variable domain of TCR clone 369114 (TRAV13-1, TRAJ31)
CAPRDRLMFGDGTQRV

SEQ ID NO: 738228 - protein, 12 aa, Homo sapiens
  CDR3 for beta chain variable domain of TCR clone 369114 (TRBV7-9, TRBJ2-7)
CASSLEGYEQYF

SEQ ID NO: 738229 - protein, 15 aa, Homo sapiens
  CDR3 for alpha chain variable domain of TCR clone 369115 (TRAV12-3, TRAJ49)
CAMAVTPNTGNQSYF

SEQ ID NO: 738230 - protein, 18 aa, Homo sapiens
  CDR3 for beta chain variable domain of TCR clone 369115 (TRBV4-1, TRBJ1-5)
CASSRDPRGQGLNQPQHF

SEQ ID NO: 738231 - protein, 11 aa, Homo sapiens
  CDR3 for alpha chain variable domain of TCR clone 369116 (TRAV2, TRAJ13)
CASGGYQTVTF

SEQ ID NO: 738232 - protein, 14 aa, Homo sapiens
  CDR3 for beta chain variable domain of TCR clone 369116 (TRBV7-3, TRBJ2-1)
CASSLEGGTNEQFF

SEQ ID NO: 738233 - protein, 14 aa, Homo sapiens
  CDR3 for alpha chain variable domain of TCR clone 369117 (TRAV12-1, TRAJ12)
CGVTRMDSSYKLIF

SEQ ID NO: 738234 - protein, 14 aa, Homo sapiens
  CDR3 for beta chain variable domain of TCR clone 369117 (TRBV4-1, TRBJ2-7)
CASSPVAGGDEQYF

SEQ ID NO: 738235 - protein, 11 aa, Homo sapiens
  CDR3 for alpha chain variable domain of TCR clone 369118 (TRAV13-2, TRAJ36)
CAETGANNLFF

SEQ ID NO: 738236 - protein, 13 aa, Homo sapiens
  CDR3 for beta chain variable domain of TCR clone 369118 (TRBV7-9, TRBJ2-4)
RATEGLTGNIQYF

SEQ ID NO: 738237 - protein, 14 aa, Homo sapiens
  CDR3 for alpha chain variable domain of TCR clone 369119 (TRAV12-2, TRAJ13)
CAVKKTGGYQKVTF

SEQ ID NO: 738238 - protein, 14 aa, Homo sapiens
  CDR3 for beta chain variable domain of TCR clone 369119 (TRBV5-5, TRBJ2-7)
CASSMGQGTYEQYF

SEQ ID NO: 738239 - protein, 23 aa, Homo sapiens
  CDR3 for alpha chain variable domain of TCR clone 369120 (TRAV26-1, TRAJ38)
CIADNAGNNHIQSPDPAVSQLRD

SEQ ID NO: 738240 - protein, 13 aa, Homo sapiens
  CDR3 for beta chain variable domain of TCR clone 369120 (TRBV20-1, TRBJ1-1)
CSARGGGNTEAFF

SEQ ID NO: 738241 - protein, 13 aa, Homo sapiens
  CDR3 for alpha chain variable domain of TCR clone 369121 (TRAV1-2, TRAJ9)
CAAINTGGFKTIF

SEQ ID NO: 738242 - protein, 14 aa, Homo sapiens
  CDR3 for beta chain variable domain of TCR clone 369121 (TRBV13, TRBJ2-3)
CASSSGSPTDTQYF

SEQ ID NO: 738243 - protein, 12 aa, Homo sapiens
  CDR3 for alpha chain variable domain of TCR clone 369122 (TRAV8-3, TRAJ41)
CAVALSGYALNF

SEQ ID NO: 738244 - protein, 18 aa, Homo sapiens
  CDR3 for beta chain variable domain of TCR clone 369122 (TRBV20-1, TRBJ2-6)
CSAETTPTHGSGANDLTC

SEQ ID NO: 738245 - protein, 15 aa, Homo sapiens
  CDR3 for alpha chain variable domain of TCR clone 369123 (TRAV25, TRAJ52)
CAGRPGGTSYGKLTF

SEQ ID NO: 738246 - protein, 12 aa, Homo sapiens
  CDR3 for beta chain variable domain of TCR clone 369123 (TRBV11-2, TRBJ2-1)
CASSPGNNEQFF

SEQ ID NO: 738247 - protein, 13 aa, Homo sapiens
  CDR3 for alpha chain variable domain of TCR clone 369124 (TRAV21, TRAJ27)
CAARPGNAGKSTF

SEQ ID NO: 738248 - protein, 16 aa, Homo sapiens
  CDR3 for beta chain variable domain of TCR clone 369124 (TRBV7-6, TRBJ2-1)
CIAVPASWGGADEQFF

SEQ ID NO: 738249 - protein, 13 aa, Homo sapiens
  CDR3 for alpha chain variable domain of TCR clone 369125 (TRAV13-1, TRAJ53)
QAARGGSNYKLTF

SEQ ID NO: 738250 - protein, 13 aa, Homo sapiens
  CDR3 for beta chain variable domain of TCR clone 369125 (TRBV7-2, TRBJ2-2)
CASSSVRAGELFF

SEQ ID NO: 738251 - protein, 12 aa, Homo sapiens
  CDR3 for alpha chain variable domain of TCR clone 369126 (TRAV1-1, TRAJ8)
YAGGTGFQKLVF

SEQ ID NO: 738252 - protein, 15 aa, Homo sapiens
  CDR3 for beta chain variable domain of TCR clone 369126 (TRBV7-9, TRBJ1-4)
CASSRTGGFNGKLFF

SEQ ID NO: 738253 - protein, 14 aa, Homo sapiens
  CDR3 for alpha chain variable domain of TCR clone 369127 (TRAV12-3, TRAJ56)
CAMRVTGANSKLTF

SEQ ID NO: 738254 - protein, 22 aa, Homo sapiens
  CDR3 for beta chain variable domain of TCR clone 369127 (TRBV11-2, TRBJ1-4)
CASSLDITRRGIPRKDNEKLFF

SEQ ID NO: 738255 - protein, 13 aa, Homo sapiens
  CDR3 for alpha chain variable domain of TCR clone 369128 (TRAV21, TRAJ20)
CAVGLRVDYKLSF

SEQ ID NO: 738256 - protein, 16 aa, Homo sapiens
  CDR3 for beta chain variable domain of TCR clone 369128 (TRBV4-3, TRBJ2-1)
CASSKVASGSYNEQFF

SEQ ID NO: 738257 - protein, 17 aa, Homo sapiens
  CDR3 for alpha chain variable domain of TCR clone 369129 (TRAV3, TRAJ6)
CAVRDGPRAGGSYIPTF

SEQ ID NO: 738258 - protein, 14 aa, Homo sapiens
  CDR3 for beta chain variable domain of TCR clone 369129 (TRBV7-9, TRBJ2-5)
CASSFPQGVETQYF

SEQ ID NO: 738259 - protein, 14 aa, Homo sapiens
  CDR3 for alpha chain variable domain of TCR clone 369130 (TRAV17, TRAJ54)
WATDANQGAQKRVF

SEQ ID NO: 738260 - protein, 12 aa, Homo sapiens
  CDR3 for beta chain variable domain of TCR clone 369130 (TRBV6-3, TRBJ2-1)
CASSGSYNEQFF

SEQ ID NO: 738261 - protein, 21 aa, Homo sapiens
  CDR3 for alpha chain variable domain of TCR clone 369131 (TRAV12-1, TRAJ9)
SSVIQPPTSVVRNTGGFKTIF

SEQ ID NO: 738262 - protein, 14 aa, Homo sapiens
  CDR3 for beta chain variable domain of TCR clone 369131 (TRBV20-1, TRBJ2-1)
CSAQIDGSANEQFF

SEQ ID NO: 738263 - protein, 14 aa, Homo sapiens
  CDR3 for alpha chain variable domain of TCR clone 369132 (TRAV23/DV6, TRAJ8)
CAASKNTGFQKLEF

SEQ ID NO: 738264 - protein, 16 aa, Homo sapiens
  CDR3 for beta chain variable domain of TCR clone 369132 (TRBV4-1, TRBJ2-6)
CASSQVGDPEANVLTF

SEQ ID NO: 738265 - protein, 14 aa, Homo sapiens
  CDR3 for alpha chain variable domain of TCR clone 369133 (TRAV12-2, TRAJ13)
RAVKKTGGYQKVTF

SEQ ID NO: 738266 - protein, 16 aa, Homo sapiens
  CDR3 for beta chain variable domain of TCR clone 369133 (TRBV9, TRBJ2-3)
CASSGTSGKDTDTQYF

SEQ ID NO: 738267 - protein, 15 aa, Homo sapiens
  CDR3 for alpha chain variable domain of TCR clone 369134 (TRAV21, TRAJ40)
CAVRPQTSGTYKYIF

SEQ ID NO: 738268 - protein, 14 aa, Homo sapiens
  CDR3 for beta chain variable domain of TCR clone 369134 (TRBV18, TRBJ2-1)
CASSPQGRFNEQFF

SEQ ID NO: 738269 - protein, 15 aa, Homo sapiens
  CDR3 for alpha chain variable domain of TCR clone 369135 (TRAV3, TRAJ47)
CAVRDIGEYGNKLVF

SEQ ID NO: 738270 - protein, 17 aa, Homo sapiens
  CDR3 for beta chain variable domain of TCR clone 369135 (TRBV13, TRBJ2-3)
CASSLSRVAGGRNTQYF

SEQ ID NO: 738271 - protein, 14 aa, Homo sapiens
  CDR3 for alpha chain variable domain of TCR clone 369136 (TRAV23/DV6, TRAJ22)
CAASVSGSARQLTF

SEQ ID NO: 738272 - protein, 16 aa, Homo sapiens
  CDR3 for beta chain variable domain of TCR clone 369136 (TRBV19, TRBJ2-2)
CASSFPGQGFAGELFF

SEQ ID NO: 738273 - protein, 14 aa, Homo sapiens
  CDR3 for alpha chain variable domain of TCR clone 369137 (TRAV12-3, TRAJ11)
CAMTTNSGYSTLTF

SEQ ID NO: 738274 - protein, 16 aa, Homo sapiens
  CDR3 for beta chain variable domain of TCR clone 369137 (TRBV4-3, TRBJ2-3)
CASSLGLAGEGDTQYF

SEQ ID NO: 738275 - protein, 15 aa, Homo sapiens
  CDR3 for alpha chain variable domain of TCR clone 369138 (TRAV8-6, TRAJ37)
CAVIFSSGNTGKIIF

SEQ ID NO: 738276 - protein, 15 aa, Homo sapiens
  CDR3 for beta chain variable domain of TCR clone 369138 (TRBV25-1, TRBJ2-4)
CASSETESAKNIQYF

SEQ ID NO: 738277 - protein, 17 aa, Homo sapiens
  CDR3 for alpha chain variable domain of TCR clone 369139 (TRAV23/DV6, TRAJ57)
CAASSTLSQGGSEKLVF

SEQ ID NO: 738278 - protein, 15 aa, Homo sapiens
  CDR3 for beta chain variable domain of TCR clone 369139 (TRBV12-4, TRBJ2-1)
CASSLLATGNNEQFF

SEQ ID NO: 738279 - protein, 14 aa, Homo sapiens
  CDR3 for alpha chain variable domain of TCR clone 369140 (TRAV2, TRAJ9)
CAVEDRSGGFKAIF

SEQ ID NO: 738280 - protein, 14 aa, Homo sapiens
  CDR3 for beta chain variable domain of TCR clone 369140 (TRBV27, TRBJ1-2)
CASRTTGANYGYTF

SEQ ID NO: 738281 - protein, 14 aa, Homo sapiens
  CDR3 for alpha chain variable domain of TCR clone 369141 (TRAV12-2, TRAJ13)
CAVKKPGGYQKVTF

SEQ ID NO: 738282 - protein, 15 aa, Homo sapiens
  CDR3 for beta chain variable domain of TCR clone 369141 (TRBV7-2, TRBJ2-1)
CASSSGLAGGNEQFF

SEQ ID NO: 738283 - protein, 14 aa, Homo sapiens
  CDR3 for alpha chain variable domain of TCR clone 369142 (TRAV13-1, TRAJ44)
CAAKATGTASKLTF

SEQ ID NO: 738284 - protein, 17 aa, Homo sapiens
  CDR3 for beta chain variable domain of TCR clone 369142 (TRBV7-3, TRBJ2-3)
RANSFMKRMRGADTQYF

SEQ ID NO: 738285 - protein, 13 aa, Homo sapiens
  CDR3 for alpha chain variable domain of TCR clone 369143 (TRAV12-3, TRAJ43)
CALIRPNNNDMRF

SEQ ID NO: 738286 - protein, 12 aa, Homo sapiens
  CDR3 for beta chain variable domain of TCR clone 369143 (TRBV11-2, TRBJ2-5)
CASSLGQETQYF

SEQ ID NO: 738287 - protein, 14 aa, Homo sapiens
  CDR3 for alpha chain variable domain of TCR clone 369144 (TRAV1-2, TRAJ8)
CAVREDTGFQKLVF

SEQ ID NO: 738288 - protein, 16 aa, Homo sapiens
  CDR3 for beta chain variable domain of TCR clone 369144 (TRBV7-9, TRBJ2-1)
CASSDVAVGSYNEQFF

SEQ ID NO: 738289 - protein, 14 aa, Homo sapiens
  CDR3 for alpha chain variable domain of TCR clone 369145 (TRAV12-2, TRAJ13)
CTVKKTGGYQKVIF

SEQ ID NO: 738290 - protein, 15 aa, Homo sapiens
  CDR3 for beta chain variable domain of TCR clone 369145 (TRBV27, TRBJ2-1)
CASSNGGGSSNEQFF

SEQ ID NO: 738291 - protein, 17 aa, Homo sapiens
  CDR3 for alpha chain variable domain of TCR clone 369146 (TRAV27, TRAJ26)
CAGARAPLDNYGQNFVF

SEQ ID NO: 738292 - protein, 14 aa, Homo sapiens
  CDR3 for beta chain variable domain of TCR clone 369146 (TRBV4-2, TRBJ2-1)
CASGLDRAYNEQFF

SEQ ID NO: 738293 - protein, 14 aa, Homo sapiens
  CDR3 for alpha chain variable domain of TCR clone 369147 (TRAV35, TRAJ33)
CAGSSQDSNYRLIW

SEQ ID NO: 738294 - protein, 15 aa, Homo sapiens
  CDR3 for beta chain variable domain of TCR clone 369147 (TRBV5-1, TRBJ1-4)
FAPAAWKDGNEKLFF

SEQ ID NO: 738295 - protein, 15 aa, Homo sapiens
  CDR3 for alpha chain variable domain of TCR clone 369148 (TRAV12-2, TRAJ53)
CAVNGGGGSNYKLTF

SEQ ID NO: 738296 - protein, 17 aa, Homo sapiens
  CDR3 for beta chain variable domain of TCR clone 369148 (TRBV4-1, TRBJ2-7)
CASSQGRGLQTSYEQYF

SEQ ID NO: 738297 - protein, 11 aa, Homo sapiens
  CDR3 for alpha chain variable domain of TCR clone 369149 (TRAV16, TRAJ49)
CDLGTGNQFYF

SEQ ID NO: 738298 - protein, 16 aa, Homo sapiens
  CDR3 for beta chain variable domain of TCR clone 369149 (TRBV29-1, TRBJ2-7)
CSVEVVGTSGSYEQYF

SEQ ID NO: 738299 - protein, 12 aa, Homo sapiens
  CDR3 for alpha chain variable domain of TCR clone 369150 (TRAV12-1, TRAJ34)
CVVAGATDKLIF

SEQ ID NO: 738300 - protein, 16 aa, Homo sapiens
  CDR3 for beta chain variable domain of TCR clone 369150 (TRBV7-2, TRBJ1-2)
CASSSNQDRRGYGYTF

SEQ ID NO: 738301 - protein, 17 aa, Homo sapiens
  CDR3 for alpha chain variable domain of TCR clone 369151 (TRAV3, TRAJ6)
CAVRDGPRAGGSYIPTI

SEQ ID NO: 738302 - protein, 16 aa, Homo sapiens
  CDR3 for beta chain variable domain of TCR clone 369151 (TRBV7-8, TRBJ2-3)
CASSTEGQRETDTQYF

SEQ ID NO: 738303 - protein, 14 aa, Homo sapiens
  CDR3 for alpha chain variable domain of TCR clone 369152 (TRAV17, TRAJ39)
CATDPVRVGNMLTF

SEQ ID NO: 738304 - protein, 15 aa, Homo sapiens
  CDR3 for beta chain variable domain of TCR clone 369152 (TRBV13, TRBJ1-5)
CASSFGQGGVQPQHF

SEQ ID NO: 738305 - protein, 14 aa, Homo sapiens
  CDR3 for alpha chain variable domain of TCR clone 369153 (TRAV26-1, TRAJ44)
CIVRPTGTASKLTF

SEQ ID NO: 738306 - protein, 17 aa, Homo sapiens
  CDR3 for beta chain variable domain of TCR clone 369153 (TRBV2, TRBJ2-1)
CASSRNSLLAGGDEQFF

SEQ ID NO: 738307 - protein, 14 aa, Homo sapiens
  CDR3 for alpha chain variable domain of TCR clone 369154 (TRAV30, TRAJ26)
CGTEMVSYGQNFVF

SEQ ID NO: 738308 - protein, 13 aa, Homo sapiens
  CDR3 for beta chain variable domain of TCR clone 369154 (TRBV19, TRBJ1-3)
CASGLSLGNTIYF

SEQ ID NO: 738309 - protein, 18 aa, Homo sapiens
  CDR3 for alpha chain variable domain of TCR clone 369155 (TRAV12-3, TRAJ52)
CAMSVGGAGGTSYGKLTF

SEQ ID NO: 738310 - protein, 15 aa, Homo sapiens
  CDR3 for beta chain variable domain of TCR clone 369155 (TRBV27, TRBJ1-6)
CASSFDRGLGSPLHF

SEQ ID NO: 738311 - protein, 12 aa, Homo sapiens
  CDR3 for alpha chain variable domain of TCR clone 369156 (TRAV23/DV6, TRAJ30)
RAASKGDDKIIF

SEQ ID NO: 738312 - protein, 15 aa, Homo sapiens
  CDR3 for beta chain variable domain of TCR clone 369156 (TRBV7-2, TRBJ2-1)
CASSFQADEYNEQFF

SEQ ID NO: 738313 - protein, 14 aa, Homo sapiens
  CDR3 for alpha chain variable domain of TCR clone 369157 (TRAV12-1, TRAJ30)
CVPTGTNRDDKIIF

SEQ ID NO: 738314 - protein, 14 aa, Homo sapiens
  CDR3 for beta chain variable domain of TCR clone 369157 (TRBV25-1, TRBJ1-1)
CASTHLGGNTEAFF

SEQ ID NO: 738315 - protein, 15 aa, Homo sapiens
  CDR3 for alpha chain variable domain of TCR clone 369158 (TRAV26-1, TRAJ44)
CIVRIGTGTASKLTF

SEQ ID NO: 738316 - protein, 15 aa, Homo sapiens
  CDR3 for beta chain variable domain of TCR clone 369158 (TRBV7-6, TRBJ2-1)
CASSYLAGEGNEQFF

SEQ ID NO: 738317 - protein, 17 aa, Homo sapiens
  CDR3 for alpha chain variable domain of TCR clone 369159 (TRAV13-1, )
CAANIQNPDPAVYQLRD

SEQ ID NO: 738318 - protein, 12 aa, Homo sapiens
  CDR3 for beta chain variable domain of TCR clone 369159 (TRBV19, TRBJ2-1)
CASSRQGAEQFF

SEQ ID NO: 738319 - protein, 12 aa, Homo sapiens
  CDR3 for alpha chain variable domain of TCR clone 369160 (TRAV21, TRAJ39)
CAADNAGNMLTF

SEQ ID NO: 738320 - protein, 17 aa, Homo sapiens
  CDR3 for beta chain variable domain of TCR clone 369160 (TRBV10-3, TRBJ2-4)
CTSVPSVNKGSKNMQYF

SEQ ID NO: 738321 - protein, 16 aa, Homo sapiens
  CDR3 for alpha chain variable domain of TCR clone 369161 (TRAV8-3, TRAJ10)
CAVGPILTGGGNKLTF

SEQ ID NO: 738322 - protein, 11 aa, Homo sapiens
  CDR3 for beta chain variable domain of TCR clone 369161 (TRBV12-4, TRBJ2-7)
CASRQSYDQYF

SEQ ID NO: 738323 - protein, 13 aa, Homo sapiens
  CDR3 for alpha chain variable domain of TCR clone 369162 (TRAV12-2, TRAJ20)
CAVYPSNDYKLSF

SEQ ID NO: 738324 - protein, 14 aa, Homo sapiens
  CDR3 for beta chain variable domain of TCR clone 369162 (TRBV7-9, TRBJ1-6)
CASRPGTVNSPLHF

SEQ ID NO: 738325 - protein, 12 aa, Homo sapiens
  CDR3 for alpha chain variable domain of TCR clone 369163 (TRAV16, TRAJ10)
CSRTGGGNKLTF

SEQ ID NO: 738326 - protein, 16 aa, Homo sapiens
  CDR3 for beta chain variable domain of TCR clone 369163 (TRBV12-5, TRBJ2-5)
CASGTRTSGNQETQYF

SEQ ID NO: 738327 - protein, 14 aa, Homo sapiens
  CDR3 for alpha chain variable domain of TCR clone 369164 (TRAV38-1, TRAJ32)
CAFIYGGATHKLIF

SEQ ID NO: 738328 - protein, 17 aa, Homo sapiens
  CDR3 for beta chain variable domain of TCR clone 369164 (TRBV28, TRBJ2-1)
CASTGPGLAVSEDEQFF

SEQ ID NO: 738329 - protein, 15 aa, Homo sapiens
  CDR3 for alpha chain variable domain of TCR clone 369165 (TRAV2, TRAJ9)
CAVEDRGTGGVKTIF

SEQ ID NO: 738330 - protein, 16 aa, Homo sapiens
  CDR3 for beta chain variable domain of TCR clone 369165 (TRBV24-1, TRBJ2-3)
CATSDPGTGATDTQYL

SEQ ID NO: 738331 - protein, 13 aa, Homo sapiens
  CDR3 for alpha chain variable domain of TCR clone 369166 (TRAV16, TRAJ31)
CALSAHNNARLMF

SEQ ID NO: 738332 - protein, 13 aa, Homo sapiens
  CDR3 for beta chain variable domain of TCR clone 369166 (TRBV14, TRBJ2-7)
CASSQDRRYEQYF

SEQ ID NO: 738333 - protein, 17 aa, Homo sapiens
  CDR3 for alpha chain variable domain of TCR clone 369167 (TRAV38-2/DV8, TRAJ28)
CAFLTLYSGAGSYQLTF

SEQ ID NO: 738334 - protein, 14 aa, Homo sapiens
  CDR3 for beta chain variable domain of TCR clone 369167 (TRBV7-2, TRBJ2-5)
CASSWSGGGETQYF

SEQ ID NO: 738335 - protein, 16 aa, Homo sapiens
  CDR3 for alpha chain variable domain of TCR clone 369168 (TRAV14/DV4, TRAJ54)
RAMREGRIQGAQKLVF

SEQ ID NO: 738336 - protein, 17 aa, Homo sapiens
  CDR3 for beta chain variable domain of TCR clone 369168 (TRBV7-3, TRBJ2-3)
CASSPRGQGYGTDTQYF

SEQ ID NO: 738337 - protein, 11 aa, Homo sapiens
  CDR3 for alpha chain variable domain of TCR clone 369169 (TRAV12-3, TRAJ43)
CAMSVSNDMRF

SEQ ID NO: 738338 - protein, 19 aa, Homo sapiens
  CDR3 for beta chain variable domain of TCR clone 369169 (TRBV28, TRBJ2-7)
CASSYSGTSRLGWVYEQNF

SEQ ID NO: 738339 - protein, 16 aa, Homo sapiens
  CDR3 for alpha chain variable domain of TCR clone 369170 (TRAV3, TRAJ21)
CAVRDIERGNYNKFYF

SEQ ID NO: 738340 - protein, 13 aa, Homo sapiens
  CDR3 for beta chain variable domain of TCR clone 369170 (TRBV27, TRBJ2-7)
CASSLTTGYEQYF

SEQ ID NO: 738341 - protein, 13 aa, Homo sapiens
  CDR3 for alpha chain variable domain of TCR clone 369171 (TRAV12-2, TRAJ12)
CAVNEDSSYKLIF

SEQ ID NO: 738342 - protein, 13 aa, Homo sapiens
  CDR3 for beta chain variable domain of TCR clone 369171 (TRBV4-2, TRBJ1-1)
CASSQAGNTEAFF

SEQ ID NO: 738343 - protein, 14 aa, Homo sapiens
  CDR3 for alpha chain variable domain of TCR clone 369172 (TRAV12-2, TRAJ40)
CAVKIPSGTYKYIF

SEQ ID NO: 738344 - protein, 15 aa, Homo sapiens
  CDR3 for beta chain variable domain of TCR clone 369172 (TRBV7-9, TRBJ2-1)
CASSLGWGRANEQFF

SEQ ID NO: 738345 - protein, 15 aa, Homo sapiens
  CDR3 for alpha chain variable domain of TCR clone 369173 (TRAV17, TRAJ56)
CATDANTGANSKLTF

SEQ ID NO: 738346 - protein, 16 aa, Homo sapiens
  CDR3 for beta chain variable domain of TCR clone 369173 (TRBV7-3, TRBJ2-2)
CASSLKRGTLSGEVFF

SEQ ID NO: 738347 - protein, 15 aa, Homo sapiens
  CDR3 for alpha chain variable domain of TCR clone 369174 (TRAV12-1, TRAJ5)
CVVNLRNTGRRALTF

SEQ ID NO: 738348 - protein, 15 aa, Homo sapiens
  CDR3 for beta chain variable domain of TCR clone 369174 (TRBV7-9, TRBJ1-4)
CASSARTGGNEKLFF

SEQ ID NO: 738349 - protein, 14 aa, Homo sapiens
  CDR3 for alpha chain variable domain of TCR clone 369175 (TRAV12-2, TRAJ13)
CAVKKTGGYQKVTF

SEQ ID NO: 738350 - protein, 15 aa, Homo sapiens
  CDR3 for beta chain variable domain of TCR clone 369175 (TRBV6-3, TRBJ2-7)
CASSSPGTGFYEQYV

SEQ ID NO: 738351 - protein, 14 aa, Homo sapiens
  CDR3 for alpha chain variable domain of TCR clone 369176 (TRAV1-2, TRAJ16)
CAVNRFSDGQKLLF

SEQ ID NO: 738352 - protein, 15 aa, Homo sapiens
  CDR3 for beta chain variable domain of TCR clone 369176 (TRBV20-1, TRBJ1-1)
CSASWDRFLNTEAFF

SEQ ID NO: 738353 - protein, 14 aa, Homo sapiens
  CDR3 for alpha chain variable domain of TCR clone 369177 (TRAV12-2, TRAJ45)
CAVYSGGGADGLSF

SEQ ID NO: 738354 - protein, 14 aa, Homo sapiens
  CDR3 for beta chain variable domain of TCR clone 369177 (TRBV19, TRBJ2-7)
CASSMGQGAIEQYF

SEQ ID NO: 738355 - protein, 14 aa, Homo sapiens
  CDR3 for alpha chain variable domain of TCR clone 369178 (TRAV12-2, TRAJ33)
CAVKRARSNYQLIW

SEQ ID NO: 738356 - protein, 15 aa, Homo sapiens
  CDR3 for beta chain variable domain of TCR clone 369178 (TRBV11-2, TRBJ2-2)
CASRGLAANTGELFF

SEQ ID NO: 738357 - protein, 19 aa, Homo sapiens
  CDR3 for alpha chain variable domain of TCR clone 369179 (TRAV26-1, TRAJ52)
CIVRAHRNAGGTSNGKLTF

SEQ ID NO: 738358 - protein, 13 aa, Homo sapiens
  CDR3 for beta chain variable domain of TCR clone 369179 (TRBV19, TRBJ2-7)
CASRKAGGSEQYF

SEQ ID NO: 738359 - protein, 14 aa, Homo sapiens
  CDR3 for alpha chain variable domain of TCR clone 369180 (TRAV16, TRAJ44)
CALSTTGTASKLTF

SEQ ID NO: 738360 - protein, 15 aa, Homo sapiens
  CDR3 for beta chain variable domain of TCR clone 369180 (TRBV7-9, TRBJ1-4)
CAGSRTGGFNEKLFF

SEQ ID NO: 738361 - protein, 17 aa, Homo sapiens
  CDR3 for alpha chain variable domain of TCR clone 369181 (TRAV13-1, TRAJ52)
CAASSGAGGPSYGKLTF

SEQ ID NO: 738362 - protein, 12 aa, Homo sapiens
  CDR3 for beta chain variable domain of TCR clone 369181 (TRBV11-2, TRBJ2-2)
CASSLGGGELFF

SEQ ID NO: 738363 - protein, 13 aa, Homo sapiens
  CDR3 for alpha chain variable domain of TCR clone 369182 (TRAV38-1, TRAJ42)
CARWGGSQVNPIF

SEQ ID NO: 738364 - protein, 17 aa, Homo sapiens
  CDR3 for beta chain variable domain of TCR clone 369182 (TRBV20-1, TRBJ2-1)
CSARDPLAGVWDNEQFF

SEQ ID NO: 738365 - protein, 14 aa, Homo sapiens
  CDR3 for alpha chain variable domain of TCR clone 369183 (TRAV1-2, TRAJ29)
CAVRELTSATPLVF

SEQ ID NO: 738366 - protein, 14 aa, Homo sapiens
  CDR3 for beta chain variable domain of TCR clone 369183 (TRBV3-1, TRBJ2-5)
CASSPQGGGGAQYF

SEQ ID NO: 738367 - protein, 13 aa, Homo sapiens
  CDR3 for alpha chain variable domain of TCR clone 369184 (TRAV1-1, TRAJ9)
CAAKNTGGFKTIF

SEQ ID NO: 738368 - protein, 14 aa, Homo sapiens
  CDR3 for beta chain variable domain of TCR clone 369184 (TRBV7-9, TRBJ1-6)
CASSVMTDYSPLHF

SEQ ID NO: 738369 - protein, 13 aa, Homo sapiens
  CDR3 for alpha chain variable domain of TCR clone 369185 (TRAV12-2, TRAJ52)
CAVGGTSYGKLTF

SEQ ID NO: 738370 - protein, 13 aa, Homo sapiens
  CDR3 for beta chain variable domain of TCR clone 369185 (TRBV20-1, TRBJ1-1)
CNARGGGNTEAFF

SEQ ID NO: 738371 - protein, 11 aa, Homo sapiens
  CDR3 for alpha chain variable domain of TCR clone 369186 (TRAV12-1, TRAJ33)
CVVNSNYQLIW

SEQ ID NO: 738372 - protein, 11 aa, Homo sapiens
  CDR3 for beta chain variable domain of TCR clone 369186 (TRBV10-3, TRBJ2-7)
CAISEGLEQYF

SEQ ID NO: 738373 - protein, 14 aa, Homo sapiens
  CDR3 for alpha chain variable domain of TCR clone 369187 (TRAV3, TRAJ9)
CAVRRNTGGFKTIF

SEQ ID NO: 738374 - protein, 15 aa, Homo sapiens
  CDR3 for beta chain variable domain of TCR clone 369187 (TRBV7-2, TRBJ2-1)
CASSLASGRGNEQFF

SEQ ID NO: 738375 - protein, 16 aa, Homo sapiens
  CDR3 for alpha chain variable domain of TCR clone 369188 (TRAV12-1, TRAJ48)
CVVDMRDDFGNEKLTF

SEQ ID NO: 738376 - protein, 16 aa, Homo sapiens
  CDR3 for beta chain variable domain of TCR clone 369188 (TRBV7-6, TRBJ2-1)
CASSSVVAGTYNEQFF

SEQ ID NO: 738377 - protein, 13 aa, Homo sapiens
  CDR3 for alpha chain variable domain of TCR clone 369189 (TRAV12-1, TRAJ34)
CVVTGYNTDKLIF

SEQ ID NO: 738378 - protein, 15 aa, Homo sapiens
  CDR3 for beta chain variable domain of TCR clone 369189 (TRBV11-2, TRBJ2-2)
CASSSDRVNAGELFF

SEQ ID NO: 738379 - protein, 16 aa, Homo sapiens
  CDR3 for alpha chain variable domain of TCR clone 369190 (TRAV12-3, TRAJ53)
GAMSPGSGGSNYKLTS

SEQ ID NO: 738380 - protein, 11 aa, Homo sapiens
  CDR3 for beta chain variable domain of TCR clone 369190 (TRBV29-1, TRBJ2-5)
CSEDRTGTQYF

SEQ ID NO: 738381 - protein, 12 aa, Homo sapiens
  CDR3 for alpha chain variable domain of TCR clone 369191 (TRAV17, TRAJ49)
CATVTTGNQCYF

SEQ ID NO: 738382 - protein, 18 aa, Homo sapiens
  CDR3 for beta chain variable domain of TCR clone 369191 (TRBV11-2, TRBJ2-6)
CASSLNPFLGTGANVQTF

SEQ ID NO: 738383 - protein, 16 aa, Homo sapiens
  CDR3 for alpha chain variable domain of TCR clone 369192 (TRAV30, TRAJ24)
CGPEIVDADSWVKFQF

SEQ ID NO: 738384 - protein, 14 aa, Homo sapiens
  CDR3 for beta chain variable domain of TCR clone 369192 (TRBV12-5, TRBJ2-5)
CASGSRTHQETQYF

SEQ ID NO: 738385 - protein, 16 aa, Homo sapiens
  CDR3 for alpha chain variable domain of TCR clone 369193 (TRAV12-1, TRAJ43)
CVVNPHRFGAGTRLTV

SEQ ID NO: 738386 - protein, 15 aa, Homo sapiens
  CDR3 for beta chain variable domain of TCR clone 369193 (TRBV7-9, TRBJ1-4)
CASSARTGGNEKLFF

SEQ ID NO: 738387 - protein, 12 aa, Homo sapiens
  CDR3 for alpha chain variable domain of TCR clone 369194 (TRAV21, TRAJ6)
CDVKGGSYIPTF

SEQ ID NO: 738388 - protein, 13 aa, Homo sapiens
  CDR3 for beta chain variable domain of TCR clone 369194 (TRBV11-2, TRBJ1-1)
CASSFTENTEAFF

SEQ ID NO: 738389 - protein, 14 aa, Homo sapiens
  CDR3 for alpha chain variable domain of TCR clone 369195 (TRAV12-2, TRAJ13)
CAAKKTGGYQKVTF

SEQ ID NO: 738390 - protein, 13 aa, Homo sapiens
  CDR3 for beta chain variable domain of TCR clone 369195 (TRBV2, TRBJ2-7)
CASSVGGSGEQYF

SEQ ID NO: 738391 - protein, 15 aa, Homo sapiens
  CDR3 for alpha chain variable domain of TCR clone 369196 (TRAV8-3, TRAJ45)
CASSYSGGGADGLTF

SEQ ID NO: 738392 - protein, 15 aa, Homo sapiens
  CDR3 for beta chain variable domain of TCR clone 369196 (TRBV5-5, TRBJ2-7)
CASSGGRPVPYEQYF

SEQ ID NO: 738393 - protein, 15 aa, Homo sapiens
  CDR3 for alpha chain variable domain of TCR clone 369197 (TRAV4, TRAJ26)
CLVGDMNNYGQNVVF

SEQ ID NO: 738394 - protein, 16 aa, Homo sapiens
  CDR3 for beta chain variable domain of TCR clone 369197 (TRBV28, TRBJ1-4)
CASSSRTGAANEKLFF

SEQ ID NO: 738395 - protein, 12 aa, Homo sapiens
  CDR3 for alpha chain variable domain of TCR clone 369198 (TRAV8-3, TRAJ20)
CAVDFNDYKLSF

SEQ ID NO: 738396 - protein, 17 aa, Homo sapiens
  CDR3 for beta chain variable domain of TCR clone 369198 (TRBV7-8, TRBJ2-6)
CASGAGTGGAGANVLTF

SEQ ID NO: 738397 - protein, 13 aa, Homo sapiens
  CDR3 for alpha chain variable domain of TCR clone 369199 (TRAV2, TRAJ5)
CAVPDTGRRALTF

SEQ ID NO: 738398 - protein, 16 aa, Homo sapiens
  CDR3 for beta chain variable domain of TCR clone 369199 (TRBV4-1, TRBJ2-5)
CASSQAIAASSATQYF

SEQ ID NO: 738399 - protein, 15 aa, Homo sapiens
  CDR3 for alpha chain variable domain of TCR clone 369200 (TRAV8-3, TRAJ27)
CAVGPSKTNAGKSPF

SEQ ID NO: 738400 - protein, 13 aa, Homo sapiens
  CDR3 for beta chain variable domain of TCR clone 369200 (TRBV20-1, TRBJ1-1)
CSAPLGGGTEAFF

SEQ ID NO: 738401 - protein, 11 aa, Homo sapiens
  CDR3 for alpha chain variable domain of TCR clone 369201 (TRAV2, TRAJ33)
CAVDSNYQLIW

SEQ ID NO: 738402 - protein, 14 aa, Homo sapiens
  CDR3 for beta chain variable domain of TCR clone 369201 (TRBV7-9, TRBJ2-2)
CASSGLADTGELFF

SEQ ID NO: 738403 - protein, 13 aa, Homo sapiens
  CDR3 for alpha chain variable domain of TCR clone 369202 (TRAV17, TRAJ9)
CATDYTGGFKTIF

SEQ ID NO: 738404 - protein, 14 aa, Homo sapiens
  CDR3 for beta chain variable domain of TCR clone 369202 (TRBV11-2, TRBJ2-3)
CASSRLPRTDTQYF

SEQ ID NO: 738405 - protein, 14 aa, Homo sapiens
  CDR3 for alpha chain variable domain of TCR clone 369203 (TRAV1-2, TRAJ8)
CAVREDTGFQKLVF

SEQ ID NO: 738406 - protein, 16 aa, Homo sapiens
  CDR3 for beta chain variable domain of TCR clone 369203 (TRBV27, TRBJ2-2)
CASSFRGLVRTVELFF

SEQ ID NO: 738407 - protein, 13 aa, Homo sapiens
  CDR3 for alpha chain variable domain of TCR clone 369204 (TRAV17, TRAJ5)
CAPMDTGRRALTF

SEQ ID NO: 738408 - protein, 14 aa, Homo sapiens
  CDR3 for beta chain variable domain of TCR clone 369204 (TRBV7-9, TRBJ2-5)
CASSLAFGQETQYF

SEQ ID NO: 738409 - protein, 14 aa, Homo sapiens
  CDR3 for alpha chain variable domain of TCR clone 369205 (TRAV13-1, TRAJ35)
CAASKGGFGDVMHC

SEQ ID NO: 738410 - protein, 13 aa, Homo sapiens
  CDR3 for beta chain variable domain of TCR clone 369205 (TRBV7-3, TRBJ1-1)
CASSQDWGAEAFF

SEQ ID NO: 738411 - protein, 12 aa, Homo sapiens
  CDR3 for alpha chain variable domain of TCR clone 369206 (TRAV26-1, TRAJ43)
YIVRPRGDDMRF

SEQ ID NO: 738412 - protein, 16 aa, Homo sapiens
  CDR3 for beta chain variable domain of TCR clone 369206 (TRBV3-1, TRBJ2-1)
CASSQGGRRSFDEQFF

SEQ ID NO: 738413 - protein, 14 aa, Homo sapiens
  CDR3 for alpha chain variable domain of TCR clone 369207 (TRAV35, TRAJ42)
CRVPYGGSQGNLIF

SEQ ID NO: 738414 - protein, 18 aa, Homo sapiens
  CDR3 for beta chain variable domain of TCR clone 369207 (TRBV13, TRBJ2-6)
CASSPMTSGGSGANVLTF

SEQ ID NO: 738415 - protein, 17 aa, Homo sapiens
  CDR3 for alpha chain variable domain of TCR clone 369208 (TRAV4, TRAJ13)
CLVGVQGSSGGYQKVTF

SEQ ID NO: 738416 - protein, 14 aa, Homo sapiens
  CDR3 for beta chain variable domain of TCR clone 369208 (TRBV19, TRBJ2-1)
CASPTFVLSGEQFF

SEQ ID NO: 738417 - protein, 12 aa, Homo sapiens
  CDR3 for alpha chain variable domain of TCR clone 369209 (TRAV8-6, TRAJ11)
CAVSSGYSTLTF

SEQ ID NO: 738418 - protein, 13 aa, Homo sapiens
  CDR3 for beta chain variable domain of TCR clone 369209 (TRBV7-9, TRBJ1-2)
CASSLKQNYGYTF

SEQ ID NO: 738419 - protein, 15 aa, Homo sapiens
  CDR3 for alpha chain variable domain of TCR clone 369210 (TRAV21, TRAJ53)
CATLNSGGSNYKLIF

SEQ ID NO: 738420 - protein, 17 aa, Homo sapiens
  CDR3 for beta chain variable domain of TCR clone 369210 (TRBV20-1, TRBJ2-2)
CSASGSGQGGLTGELFF

SEQ ID NO: 738421 - protein, 14 aa, Homo sapiens
  CDR3 for alpha chain variable domain of TCR clone 369211 (TRAV1-2, TRAJ16)
CAVNRFSDGQKLLF

SEQ ID NO: 738422 - protein, 13 aa, Homo sapiens
  CDR3 for beta chain variable domain of TCR clone 369211 (TRBV13, TRBJ2-1)
CASILGGRGEQFF

SEQ ID NO: 738423 - protein, 14 aa, Homo sapiens
  CDR3 for alpha chain variable domain of TCR clone 369212 (TRAV1-1, TRAJ27)
CAVIYNTNAGKSTF

SEQ ID NO: 738424 - protein, 14 aa, Homo sapiens
  CDR3 for beta chain variable domain of TCR clone 369212 (TRBV11-2, TRBJ1-5)
CASSLDRGRQPQHF

SEQ ID NO: 738425 - protein, 15 aa, Homo sapiens
  CDR3 for alpha chain variable domain of TCR clone 369213 (TRAV12-2, TRAJ53)
CAGNGGGGGNYKLTF

SEQ ID NO: 738426 - protein, 17 aa, Homo sapiens
  CDR3 for beta chain variable domain of TCR clone 369213 (TRBV7-3, TRBJ2-3)
RASSLMKRMRGADTQYF

SEQ ID NO: 738427 - protein, 18 aa, Homo sapiens
  CDR3 for alpha chain variable domain of TCR clone 369214 (TRAV12-3, TRAJ52)
CAMSRTNAGGTSYGKLTF

SEQ ID NO: 738428 - protein, 15 aa, Homo sapiens
  CDR3 for beta chain variable domain of TCR clone 369214 (TRBV12-4, TRBJ2-5)
CASSPPTGLQETQYF

SEQ ID NO: 738429 - protein, 15 aa, Homo sapiens
  CDR3 for alpha chain variable domain of TCR clone 369215 (TRAV23/DV6, TRAJ4)
CAASPLRGGYNKLIF

SEQ ID NO: 738430 - protein, 17 aa, Homo sapiens
  CDR3 for beta chain variable domain of TCR clone 369215 (TRBV15, TRBJ1-4)
CATSRYGTGDPNEKLFF

SEQ ID NO: 738431 - protein, 11 aa, Homo sapiens
  CDR3 for alpha chain variable domain of TCR clone 369216 (TRAV2, TRAJ33)
CAVESNYQLIW

SEQ ID NO: 738432 - protein, 11 aa, Homo sapiens
  CDR3 for beta chain variable domain of TCR clone 369216 (TRBV19, TRBJ1-1)
CASSIGSEAFF

SEQ ID NO: 738433 - protein, 13 aa, Homo sapiens
  CDR3 for alpha chain variable domain of TCR clone 369217 (TRAV1-1, TRAJ7)
CAVRDHGNNRLAF

SEQ ID NO: 738434 - protein, 12 aa, Homo sapiens
  CDR3 for beta chain variable domain of TCR clone 369217 (TRBV7-8, TRBJ2-7)
CASSLGDREQYF

SEQ ID NO: 738435 - protein, 16 aa, Homo sapiens
  CDR3 for alpha chain variable domain of TCR clone 369218 (TRAV20, TRAJ53)
CAVQGNSGGSNYKLTF

SEQ ID NO: 738436 - protein, 16 aa, Homo sapiens
  CDR3 for beta chain variable domain of TCR clone 369218 (TRBV10-3, TRBJ2-1)
CAISGVGDGGGGEQFF

SEQ ID NO: 738437 - protein, 12 aa, Homo sapiens
  CDR3 for alpha chain variable domain of TCR clone 369219 (TRAV12-3, TRAJ17)
CAMTLTGNKLTF

SEQ ID NO: 738438 - protein, 15 aa, Homo sapiens
  CDR3 for beta chain variable domain of TCR clone 369219 (TRBV20-1, TRBJ2-7)
FSARDRGSGMDEQYF

SEQ ID NO: 738439 - protein, 12 aa, Homo sapiens
  CDR3 for alpha chain variable domain of TCR clone 369220 (TRAV1-1, TRAJ8)
CAGGTGFQKLVF

SEQ ID NO: 738440 - protein, 16 aa, Homo sapiens
  CDR3 for beta chain variable domain of TCR clone 369220 (TRBV12-4, TRBJ1-5)
CASSRPVGGPNQPQHF

SEQ ID NO: 738441 - protein, 14 aa, Homo sapiens
  CDR3 for alpha chain variable domain of TCR clone 369221 (TRAV8-4, TRAJ34)
CAVSDPGDTDKLIF

SEQ ID NO: 738442 - protein, 15 aa, Homo sapiens
  CDR3 for beta chain variable domain of TCR clone 369221 (TRBV19, TRBJ2-7)
CASSPAGSGEALRYF

SEQ ID NO: 738443 - protein, 15 aa, Homo sapiens
  CDR3 for alpha chain variable domain of TCR clone 369222 (TRAV4, TRAJ39)
CLVGPNNNAGNMLTF

SEQ ID NO: 738444 - protein, 14 aa, Homo sapiens
  CDR3 for beta chain variable domain of TCR clone 369222 (TRBV2, TRBJ1-5)
CASSGTVSNQPQHF

SEQ ID NO: 738445 - protein, 17 aa, Homo sapiens
  CDR3 for alpha chain variable domain of TCR clone 369223 (TRAV3, TRAJ12)
CAVRDGGRMDSSYKLIF

SEQ ID NO: 738446 - protein, 15 aa, Homo sapiens
  CDR3 for beta chain variable domain of TCR clone 369223 (TRBV15, TRBJ1-5)
CATSRDPVSNQPQHF

SEQ ID NO: 738447 - protein, 11 aa, Homo sapiens
  CDR3 for alpha chain variable domain of TCR clone 369224 (TRAV12-1, TRAJ30)
CVVNGQDKIIF

SEQ ID NO: 738448 - protein, 13 aa, Homo sapiens
  CDR3 for beta chain variable domain of TCR clone 369224 (TRBV18, TRBJ1-1)
CASSGGRNTEAFF

SEQ ID NO: 738449 - protein, 12 aa, Homo sapiens
  CDR3 for alpha chain variable domain of TCR clone 369225 (TRAV16, TRAJ10)
CSRTGGGNKLTF

SEQ ID NO: 738450 - protein, 14 aa, Homo sapiens
  CDR3 for beta chain variable domain of TCR clone 369225 (TRBV5-1, TRBJ2-3)
CASSLFGPTDTQYF

SEQ ID NO: 738451 - protein, 12 aa, Homo sapiens
  CDR3 for alpha chain variable domain of TCR clone 369226 (TRAV29/DV5, TRAJ43)
CAAPYNNNDMRF

SEQ ID NO: 738452 - protein, 14 aa, Homo sapiens
  CDR3 for beta chain variable domain of TCR clone 369226 (TRBV25-1, TRBJ1-1)
CASTHLGGNTEAFF

SEQ ID NO: 738453 - protein, 12 aa, Homo sapiens
  CDR3 for alpha chain variable domain of TCR clone 369227 (TRAV12-3, TRAJ20)
CAMVRGDYKLSF

SEQ ID NO: 738454 - protein, 15 aa, Homo sapiens
  CDR3 for beta chain variable domain of TCR clone 369227 (TRBV19, TRBJ2-3)
CAAGDTNAPNDTQYF

SEQ ID NO: 738455 - protein, 16 aa, Homo sapiens
  CDR3 for alpha chain variable domain of TCR clone 369228 (TRAV8-3, TRAJ13)
CAVGAYPSGGYQKVTF

SEQ ID NO: 738456 - protein, 13 aa, Homo sapiens
  CDR3 for beta chain variable domain of TCR clone 369228 (TRBV7-9, TRBJ1-2)
CASSLKQSYGYTF

SEQ ID NO: 738457 - protein, 12 aa, Homo sapiens
  CDR3 for alpha chain variable domain of TCR clone 369229 (TRAV41, TRAJ58)
CAVVTSGSRLTF

SEQ ID NO: 738458 - protein, 15 aa, Homo sapiens
  CDR3 for beta chain variable domain of TCR clone 369229 (TRBV29-1, TRBJ2-6)
CSVGDRGSGANVLTF

SEQ ID NO: 738459 - protein, 10 aa, Homo sapiens
  CDR3 for alpha chain variable domain of TCR clone 369230 (TRAV23/DV6, TRAJ31)
CARGGARRMF

SEQ ID NO: 738460 - protein, 14 aa, Homo sapiens
  CDR3 for beta chain variable domain of TCR clone 369230 (TRBV7-8, TRBJ1-2)
CASSPDSLSYGYTF

SEQ ID NO: 738461 - protein, 17 aa, Homo sapiens
  CDR3 for alpha chain variable domain of TCR clone 369231 (TRAV8-4, TRAJ45)
CAVSEGGSGGGADGITF

SEQ ID NO: 738462 - protein, 12 aa, Homo sapiens
  CDR3 for beta chain variable domain of TCR clone 369231 (TRBV7-9, TRBJ1-4)
CASSTDREKLFF

SEQ ID NO: 738463 - protein, 12 aa, Homo sapiens
  CDR3 for alpha chain variable domain of TCR clone 369232 (TRAV3, TRAJ26)
CAVRDYGQNFVF

SEQ ID NO: 738464 - protein, 15 aa, Homo sapiens
  CDR3 for beta chain variable domain of TCR clone 369232 (TRBV28, TRBJ2-1)
CASSIIAGGRSEQFF

SEQ ID NO: 738465 - protein, 16 aa, Homo sapiens
  CDR3 for alpha chain variable domain of TCR clone 369233 (TRAV3, TRAJ10)
CAVRDMTAGGGNKLTF

SEQ ID NO: 738466 - protein, 16 aa, Homo sapiens
  CDR3 for beta chain variable domain of TCR clone 369233 (TRBV6-3, TRBJ1-2)
CASSYSRRASNYGYTF

SEQ ID NO: 738467 - protein, 14 aa, Homo sapiens
  CDR3 for alpha chain variable domain of TCR clone 369234 (TRAV17, TRAJ15)
CATERGQAGTALIF

SEQ ID NO: 738468 - protein, 17 aa, Homo sapiens
  CDR3 for beta chain variable domain of TCR clone 369234 (TRBV29-1, TRBJ2-1)
CSVVGLAGAYSYNEQFF

SEQ ID NO: 738469 - protein, 12 aa, Homo sapiens
  CDR3 for alpha chain variable domain of TCR clone 369235 (TRAV12-1, TRAJ23)
CVVNIPGGKLIF

SEQ ID NO: 738470 - protein, 15 aa, Homo sapiens
  CDR3 for beta chain variable domain of TCR clone 369235 (TRBV7-2, TRBJ2-7)
CDSSLVSSGSYEQYF

SEQ ID NO: 738471 - protein, 14 aa, Homo sapiens
  CDR3 for alpha chain variable domain of TCR clone 369236 (TRAV24, TRAJ42)
CAQNYVGSQGNLIF

SEQ ID NO: 738472 - protein, 15 aa, Homo sapiens
  CDR3 for beta chain variable domain of TCR clone 369236 (TRBV19, TRBJ1-5)
CASSIPGGAGQPQHF

SEQ ID NO: 738473 - protein, 14 aa, Homo sapiens
  CDR3 for alpha chain variable domain of TCR clone 369237 (TRAV16, TRAJ31)
CALSGRNNNARLMF

SEQ ID NO: 738474 - protein, 12 aa, Homo sapiens
  CDR3 for beta chain variable domain of TCR clone 369237 (TRBV11-2, TRBJ1-2)
CASSREGDGYSF

SEQ ID NO: 738475 - protein, 14 aa, Homo sapiens
  CDR3 for alpha chain variable domain of TCR clone 369238 (TRAV12-1, TRAJ4)
CVGDFSGGYNKLIF

SEQ ID NO: 738476 - protein, 14 aa, Homo sapiens
  CDR3 for beta chain variable domain of TCR clone 369238 (TRBV7-3, TRBJ2-1)
CASSLAGGTNEQFF

SEQ ID NO: 738477 - protein, 14 aa, Homo sapiens
  CDR3 for alpha chain variable domain of TCR clone 369239 (TRAV1-2, TRAJ16)
CAVNRFSDGQKLLF

SEQ ID NO: 738478 - protein, 15 aa, Homo sapiens
  CDR3 for beta chain variable domain of TCR clone 369239 (TRBV27, TRBJ2-7)
CASSLSVQGGYEQYF

SEQ ID NO: 738479 - protein, 12 aa, Homo sapiens
  CDR3 for alpha chain variable domain of TCR clone 369240 (TRAV2, TRAJ9)
CAVGAGGFKTIF

SEQ ID NO: 738480 - protein, 14 aa, Homo sapiens
  CDR3 for beta chain variable domain of TCR clone 369240 (TRBV13, TRBJ2-5)
CASYRRLAEETQYF

SEQ ID NO: 738481 - protein, 11 aa, Homo sapiens
  CDR3 for alpha chain variable domain of TCR clone 369241 (TRAV3, TRAJ13)
CAVTSYQKVNF

SEQ ID NO: 738482 - protein, 15 aa, Homo sapiens
  CDR3 for beta chain variable domain of TCR clone 369241 (TRBV7-9, TRBJ2-7)
CASSSSGLAVYERYF

SEQ ID NO: 738483 - protein, 12 aa, Homo sapiens
  CDR3 for alpha chain variable domain of TCR clone 369242 (TRAV2, TRAJ9)
CAAGAGGFKTIF

SEQ ID NO: 738484 - protein, 16 aa, Homo sapiens
  CDR3 for beta chain variable domain of TCR clone 369242 (TRBV13, TRBJ2-2)
CASSPRTGEHTGGLFF

SEQ ID NO: 738485 - protein, 13 aa, Homo sapiens
  CDR3 for alpha chain variable domain of TCR clone 369243 (TRAV27, TRAJ6)
CAGGTRGSYIPTF

SEQ ID NO: 738486 - protein, 17 aa, Homo sapiens
  CDR3 for beta chain variable domain of TCR clone 369243 (TRBV7-8, TRBJ2-6)
CASSAGTGGAGANVLTF

SEQ ID NO: 738487 - protein, 16 aa, Homo sapiens
  CDR3 for alpha chain variable domain of TCR clone 369244 (TRAV12-3, TRAJ53)
CAMSPGSGGSNYKLTF

SEQ ID NO: 738488 - protein, 14 aa, Homo sapiens
  CDR3 for beta chain variable domain of TCR clone 369244 (TRBV7-2, TRBJ1-1)
CASSFLTGTSEAFF

SEQ ID NO: 738489 - protein, 12 aa, Homo sapiens
  CDR3 for alpha chain variable domain of TCR clone 369245 (TRAV27, TRAJ36)
CAGMTGANNLFF

SEQ ID NO: 738490 - protein, 13 aa, Homo sapiens
  CDR3 for beta chain variable domain of TCR clone 369245 (TRBV12-4, TRBJ2-3)
CQQLVPSTDTQYF

SEQ ID NO: 738491 - protein, 20 aa, Homo sapiens
  CDR3 for alpha chain variable domain of TCR clone 369246 (TRAV38-1, TRAJ43)
CAFMKHNSGRHALWSRALTD

SEQ ID NO: 738492 - protein, 11 aa, Homo sapiens
  CDR3 for beta chain variable domain of TCR clone 369246 (TRBV7-9, TRBJ2-3)
CASSYTDTQYF

SEQ ID NO: 738493 - protein, 16 aa, Homo sapiens
  CDR3 for alpha chain variable domain of TCR clone 369247 (TRAV3, TRAJ21)
CAVRDIERGNFNKFYF

SEQ ID NO: 738494 - protein, 13 aa, Homo sapiens
  CDR3 for beta chain variable domain of TCR clone 369247 (TRBV28, TRBJ2-7)
CASSPSGTYEQYF

SEQ ID NO: 738495 - protein, 14 aa, Homo sapiens
  CDR3 for alpha chain variable domain of TCR clone 369248 (TRAV1-2, TRAJ16)
CAVNRFSDGQKLLF

SEQ ID NO: 738496 - protein, 12 aa, Homo sapiens
  CDR3 for beta chain variable domain of TCR clone 369248 (TRBV12-4, TRBJ2-5)
CASGDYEETQYF

SEQ ID NO: 738497 - protein, 12 aa, Homo sapiens
  CDR3 for alpha chain variable domain of TCR clone 369249 (TRAV13-1, TRAJ21)
CAAKEGFNKFYF

SEQ ID NO: 738498 - protein, 13 aa, Homo sapiens
  CDR3 for beta chain variable domain of TCR clone 369249 (TRBV19, TRBJ2-7)
CASSPRQSYEQCF

SEQ ID NO: 738499 - protein, 12 aa, Homo sapiens
  CDR3 for alpha chain variable domain of TCR clone 369250 (TRAV29/DV5, TRAJ34)
CAARHNTDKLIF

SEQ ID NO: 738500 - protein, 15 aa, Homo sapiens
  CDR3 for beta chain variable domain of TCR clone 369250 (TRBV4-1, TRBJ2-5)
CASSQWDLYQETQYF

SEQ ID NO: 738501 - protein, 14 aa, Homo sapiens
  CDR3 for alpha chain variable domain of TCR clone 369251 (TRAV23/DV6, TRAJ27)
CAASRDTNAGKATF

SEQ ID NO: 738502 - protein, 13 aa, Homo sapiens
  CDR3 for beta chain variable domain of TCR clone 369251 (TRBV20-1, TRBJ1-5)
CSASGRGNQPQHF

SEQ ID NO: 738503 - protein, 14 aa, Homo sapiens
  CDR3 for alpha chain variable domain of TCR clone 369252 (TRAV1-2, TRAJ16)
CAVNRFSDGQKLLF

SEQ ID NO: 738504 - protein, 12 aa, Homo sapiens
  CDR3 for beta chain variable domain of TCR clone 369252 (TRBV14, TRBJ1-1)
CASSQLKGRAFF

SEQ ID NO: 738505 - protein, 16 aa, Homo sapiens
  CDR3 for alpha chain variable domain of TCR clone 369253 (TRAV20, TRAJ22)
CAVQASSSGSARQLTF

SEQ ID NO: 738506 - protein, 13 aa, Homo sapiens
  CDR3 for beta chain variable domain of TCR clone 369253 (TRBV7-2, TRBJ2-5)
CASSQTSVETQSC

SEQ ID NO: 738507 - protein, 15 aa, Homo sapiens
  CDR3 for alpha chain variable domain of TCR clone 369254 (TRAV27, TRAJ38)
CAARRNAGNNRKLLW

SEQ ID NO: 738508 - protein, 15 aa, Homo sapiens
  CDR3 for beta chain variable domain of TCR clone 369254 (TRBV9, TRBJ1-6)
CASSVAGTGDSPLHF

SEQ ID NO: 738509 - protein, 14 aa, Homo sapiens
  CDR3 for alpha chain variable domain of TCR clone 369255 (TRAV1-2, TRAJ16)
CAVNRFSDGQKLLF

SEQ ID NO: 738510 - protein, 15 aa, Homo sapiens
  CDR3 for beta chain variable domain of TCR clone 369255 (TRBV2, TRBJ2-7)
CASSELERGGVEQYF

SEQ ID NO: 738511 - protein, 14 aa, Homo sapiens
  CDR3 for alpha chain variable domain of TCR clone 369256 (TRAV26-1, TRAJ57)
CIREGQGGSEKLVF

SEQ ID NO: 738512 - protein, 13 aa, Homo sapiens
  CDR3 for beta chain variable domain of TCR clone 369256 (TRBV19, TRBJ2-7)
CASSLTTSYEQYF

SEQ ID NO: 738513 - protein, 13 aa, Homo sapiens
  CDR3 for alpha chain variable domain of TCR clone 369257 (TRAV21, TRAJ57)
CAVTQGGSEKLVF

SEQ ID NO: 738514 - protein, 17 aa, Homo sapiens
  CDR3 for beta chain variable domain of TCR clone 369257 (TRBV10-3, TRBJ2-6)
CAISEIAESSGANVLTF

SEQ ID NO: 738515 - protein, 15 aa, Homo sapiens
  CDR3 for alpha chain variable domain of TCR clone 369258 (TRAV3, TRAJ47)
CAVRDIGEYGNKLVF

SEQ ID NO: 738516 - protein, 14 aa, Homo sapiens
  CDR3 for beta chain variable domain of TCR clone 369258 (TRBV13, TRBJ2-5)
CASGLERVGETQYF

SEQ ID NO: 738517 - protein, 13 aa, Homo sapiens
  CDR3 for alpha chain variable domain of TCR clone 369259 (TRAV12-2, TRAJ49)
CAVNMRTGNQSYF

SEQ ID NO: 738518 - protein, 15 aa, Homo sapiens
  CDR3 for beta chain variable domain of TCR clone 369259 (TRBV7-2, TRBJ2-1)
CASSSRTSREDEQFF

SEQ ID NO: 738519 - protein, 14 aa, Homo sapiens
  CDR3 for alpha chain variable domain of TCR clone 369260 (TRAV1-2, TRAJ16)
CAVNRFSGGQKLLF

SEQ ID NO: 738520 - protein, 13 aa, Homo sapiens
  CDR3 for beta chain variable domain of TCR clone 369260 (TRBV12-4, TRBJ1-2)
CASSLRQGKGYTF

SEQ ID NO: 738521 - protein, 17 aa, Homo sapiens
  CDR3 for alpha chain variable domain of TCR clone 369261 (TRAV4, TRAJ18)
CLVGERSVGSTLGRLYF

SEQ ID NO: 738522 - protein, 16 aa, Homo sapiens
  CDR3 for beta chain variable domain of TCR clone 369261 (TRBV4-2, TRBJ1-1)
CASSPSPGRAAPEAVF

SEQ ID NO: 738523 - protein, 15 aa, Homo sapiens
  CDR3 for alpha chain variable domain of TCR clone 369262 (TRAV3, TRAJ17)
CAVRDTGAAGNKLTF

SEQ ID NO: 738524 - protein, 15 aa, Homo sapiens
  CDR3 for beta chain variable domain of TCR clone 369262 (TRBV10-3, TRBJ2-3)
CAISLTSGGTDTQYF

SEQ ID NO: 738525 - protein, 15 aa, Homo sapiens
  CDR3 for alpha chain variable domain of TCR clone 369263 (TRAV13-1, TRAJ17)
CAASIERAAGNKLTF

SEQ ID NO: 738526 - protein, 12 aa, Homo sapiens
  CDR3 for beta chain variable domain of TCR clone 369263 (TRBV5-7, TRBJ1-1)
CSSSLGRGKAFF

SEQ ID NO: 738527 - protein, 14 aa, Homo sapiens
  CDR3 for alpha chain variable domain of TCR clone 369264 (TRAV12-3, TRAJ10)
SHLPLTGGGNKLTF

SEQ ID NO: 738528 - protein, 15 aa, Homo sapiens
  CDR3 for beta chain variable domain of TCR clone 369264 (TRBV4-3, TRBJ2-1)
RSSPALDRGVNEQFF

SEQ ID NO: 738529 - protein, 12 aa, Homo sapiens
  CDR3 for alpha chain variable domain of TCR clone 369265 (TRAV1-1, TRAJ39)
CAVPVVGNMLTF

SEQ ID NO: 738530 - protein, 13 aa, Homo sapiens
  CDR3 for beta chain variable domain of TCR clone 369265 (TRBV2, TRBJ1-5)
CATAGPGNQPQHF

SEQ ID NO: 738531 - protein, 17 aa, Homo sapiens
  CDR3 for alpha chain variable domain of TCR clone 369266 (TRAV3, TRAJ6)
CAVRGGPRAGGSYIPTF

SEQ ID NO: 738532 - protein, 14 aa, Homo sapiens
  CDR3 for beta chain variable domain of TCR clone 369266 (TRBV7-2, TRBJ2-5)
CASSPKTSFYEQYF

SEQ ID NO: 738533 - protein, 15 aa, Homo sapiens
  CDR3 for alpha chain variable domain of TCR clone 369267 (TRAV21, TRAJ24)
CAARSSTDSWGKLQF

SEQ ID NO: 738534 - protein, 13 aa, Homo sapiens
  CDR3 for beta chain variable domain of TCR clone 369267 (TRBV11-2, TRBJ2-5)
CASSSTGEETQYI

SEQ ID NO: 738535 - protein, 12 aa, Homo sapiens
  CDR3 for alpha chain variable domain of TCR clone 369268 (TRAV27, TRAJ9)
CAGESGGFKTIF

SEQ ID NO: 738536 - protein, 13 aa, Homo sapiens
  CDR3 for beta chain variable domain of TCR clone 369268 (TRBV19, TRBJ2-7)
CASRKAGGSEQYF

SEQ ID NO: 738537 - protein, 14 aa, Homo sapiens
  CDR3 for alpha chain variable domain of TCR clone 369269 (TRAV2, TRAJ9)
CAVENRSGGFKTIF

SEQ ID NO: 738538 - protein, 16 aa, Homo sapiens
  CDR3 for beta chain variable domain of TCR clone 369269 (TRBV12-5, TRBJ2-5)
CASGPQTSGNQETQYF

SEQ ID NO: 738539 - protein, 15 aa, Homo sapiens
  CDR3 for alpha chain variable domain of TCR clone 369270 (TRAV8-4, TRAJ12)
CAVSDRVDSSYKLIF

SEQ ID NO: 738540 - protein, 15 aa, Homo sapiens
  CDR3 for beta chain variable domain of TCR clone 369270 (TRBV11-3, TRBJ2-1)
CASSVAGQTYNEQFF

SEQ ID NO: 738541 - protein, 14 aa, Homo sapiens
  CDR3 for alpha chain variable domain of TCR clone 369271 (TRAV1-2, TRAJ16)
CAVNRFSDGQKLLF

SEQ ID NO: 738542 - protein, 13 aa, Homo sapiens
  CDR3 for beta chain variable domain of TCR clone 369271 (TRBV4-1, TRBJ2-1)
CASSQAGGDAQFF

SEQ ID NO: 738543 - protein, 13 aa, Homo sapiens
  CDR3 for alpha chain variable domain of TCR clone 369272 (TRAV2, TRAJ40)
CAVVTSGTYKYIF

SEQ ID NO: 738544 - protein, 14 aa, Homo sapiens
  CDR3 for beta chain variable domain of TCR clone 369272 (TRBV19, TRBJ2-1)
CESKNLVLRGEQFF

SEQ ID NO: 738545 - protein, 12 aa, Homo sapiens
  CDR3 for alpha chain variable domain of TCR clone 369273 (TRAV3, TRAJ43)
CAVRDPNNDMRF

SEQ ID NO: 738546 - protein, 14 aa, Homo sapiens
  CDR3 for beta chain variable domain of TCR clone 369273 (TRBV11-2, TRBJ1-2)
CASSLYRGNYGYTF

SEQ ID NO: 738547 - protein, 12 aa, Homo sapiens
  CDR3 for alpha chain variable domain of TCR clone 369274 (TRAV1-1, TRAJ43)
CAPRVSSNDMRF

SEQ ID NO: 738548 - protein, 14 aa, Homo sapiens
  CDR3 for beta chain variable domain of TCR clone 369274 (TRBV12-5, TRBJ2-5)
CASGSRTHQETQYF

SEQ ID NO: 738549 - protein, 14 aa, Homo sapiens
  CDR3 for alpha chain variable domain of TCR clone 369275 (TRAV3, TRAJ22)
CAVRDYGSARQLTF

SEQ ID NO: 738550 - protein, 13 aa, Homo sapiens
  CDR3 for beta chain variable domain of TCR clone 369275 (TRBV6-1, TRBJ1-1)
CASSVTGRLEAFF

SEQ ID NO: 738551 - protein, 13 aa, Homo sapiens
  CDR3 for alpha chain variable domain of TCR clone 369276 (TRAV8-6, TRAJ49)
CAVITNTGNQFYF

SEQ ID NO: 738552 - protein, 16 aa, Homo sapiens
  CDR3 for beta chain variable domain of TCR clone 369276 (TRBV20-1, TRBJ1-4)
CSAPGQGLLTNEKLFF

SEQ ID NO: 738553 - protein, 18 aa, Homo sapiens
  CDR3 for alpha chain variable domain of TCR clone 369277 (TRAV13-1, TRAJ52)
CAAKNPNAGGTSYGKLTF

SEQ ID NO: 738554 - protein, 16 aa, Homo sapiens
  CDR3 for beta chain variable domain of TCR clone 369277 (TRBV11-2, TRBJ2-1)
CASARGSYSHHNEQFF

SEQ ID NO: 738555 - protein, 13 aa, Homo sapiens
  CDR3 for alpha chain variable domain of TCR clone 369278 (TRAV3, TRAJ27)
CAVRPLGAGKSTF

SEQ ID NO: 738556 - protein, 15 aa, Homo sapiens
  CDR3 for beta chain variable domain of TCR clone 369278 (TRBV6-6, TRBJ2-7)
CASSYSYGGSYEQYF

SEQ ID NO: 738557 - protein, 16 aa, Homo sapiens
  CDR3 for alpha chain variable domain of TCR clone 369279 (TRAV23/DV6, TRAJ9)
CAASILGNTGGFKTIF

SEQ ID NO: 738558 - protein, 14 aa, Homo sapiens
  CDR3 for beta chain variable domain of TCR clone 369279 (TRBV9, TRBJ2-7)
CASSVGVGSYEQYF

SEQ ID NO: 738559 - protein, 14 aa, Homo sapiens
  CDR3 for alpha chain variable domain of TCR clone 369280 (TRAV13-1, TRAJ16)
CAAGQMARSCSLQG

SEQ ID NO: 738560 - protein, 12 aa, Homo sapiens
  CDR3 for beta chain variable domain of TCR clone 369280 (TRBV29-1, TRBJ2-3)
CSVTGGADTQYF

SEQ ID NO: 738561 - protein, 18 aa, Homo sapiens
  CDR3 for alpha chain variable domain of TCR clone 369281 (TRAV26-1, TRAJ23)
CIVRVGLEVWNQGGKLIF

SEQ ID NO: 738562 - protein, 19 aa, Homo sapiens
  CDR3 for beta chain variable domain of TCR clone 369281 (TRBV25-1, TRBJ2-2)
CAILVYRVDRGRKTGELFF

SEQ ID NO: 738563 - protein, 10 aa, Homo sapiens
  CDR3 for alpha chain variable domain of TCR clone 369282 (TRAV30, TRAJ32)
CGTEKDMVVL

SEQ ID NO: 738564 - protein, 13 aa, Homo sapiens
  CDR3 for beta chain variable domain of TCR clone 369282 (TRBV15, TRBJ1-6)
CATSGGLNSPLHF

SEQ ID NO: 738565 - protein, 10 aa, Homo sapiens
  CDR3 for alpha chain variable domain of TCR clone 369283 (TRAV12-2, TRAJ22)
SAVNETQLTF

SEQ ID NO: 738566 - protein, 15 aa, Homo sapiens
  CDR3 for beta chain variable domain of TCR clone 369283 (TRBV27, TRBJ2-1)
CASSNGGGSSNEQFF

SEQ ID NO: 738567 - protein, 15 aa, Homo sapiens
  CDR3 for alpha chain variable domain of TCR clone 369284 (TRAV8-3, TRAJ41)
CDVGSNSNSGYALNF

SEQ ID NO: 738568 - protein, 17 aa, Homo sapiens
  CDR3 for beta chain variable domain of TCR clone 369284 (TRBV25-1, TRBJ2-1)
CASSAYGQGRGVYGQFF

SEQ ID NO: 738569 - protein, 14 aa, Homo sapiens
  CDR3 for alpha chain variable domain of TCR clone 369285 (TRAV2, TRAJ37)
WAGDFTSNTGKLIF

SEQ ID NO: 738570 - protein, 13 aa, Homo sapiens
  CDR3 for beta chain variable domain of TCR clone 369285 (TRBV7-8, TRBJ2-7)
CASSFAGLYEQYF

SEQ ID NO: 738571 - protein, 15 aa, Homo sapiens
  CDR3 for alpha chain variable domain of TCR clone 369286 (TRAV8-2, TRAJ16)
CVVSDGFSDGQKLRF

SEQ ID NO: 738572 - protein, 15 aa, Homo sapiens
  CDR3 for beta chain variable domain of TCR clone 369286 (TRBV7-2, TRBJ2-1)
CASSSGLAGGNEQFF

SEQ ID NO: 738573 - protein, 16 aa, Homo sapiens
  CDR3 for alpha chain variable domain of TCR clone 369287 (TRAV12-3, TRAJ4)
CAMTRLFSGGDNKLIF

SEQ ID NO: 738574 - protein, 16 aa, Homo sapiens
  CDR3 for beta chain variable domain of TCR clone 369287 (TRBV27, TRBJ2-1)
CASSARLAGVYNEQFF

SEQ ID NO: 738575 - protein, 16 aa, Homo sapiens
  CDR3 for alpha chain variable domain of TCR clone 369288 (TRAV25, TRAJ53)
CAGPKGSGGSNYKLTF

SEQ ID NO: 738576 - protein, 17 aa, Homo sapiens
  CDR3 for beta chain variable domain of TCR clone 369288 (TRBV20-1, TRBJ2-1)
CSASSSGLAGSYNEQFF

SEQ ID NO: 738577 - protein, 10 aa, Homo sapiens
  CDR3 for alpha chain variable domain of TCR clone 369289 (TRAV12-3, TRAJ49)
CAMNDDQFYF

SEQ ID NO: 738578 - protein, 14 aa, Homo sapiens
  CDR3 for beta chain variable domain of TCR clone 369289 (TRBV5-1, TRBJ2-2)
CASSLIEGAGELFF

SEQ ID NO: 738579 - protein, 18 aa, Homo sapiens
  CDR3 for alpha chain variable domain of TCR clone 369290 (TRAV9-2, TRAJ52)
CALSRHNAGGTSYGKMTF

SEQ ID NO: 738580 - protein, 16 aa, Homo sapiens
  CDR3 for beta chain variable domain of TCR clone 369290 (TRBV6-3, TRBJ1-2)
CASSYSRRASNYGYTF

SEQ ID NO: 738581 - protein, 15 aa, Homo sapiens
  CDR3 for alpha chain variable domain of TCR clone 369291 (TRAV26-1, TRAJ44)
CIVRTNTGTASKLTF

SEQ ID NO: 738582 - protein, 15 aa, Homo sapiens
  CDR3 for beta chain variable domain of TCR clone 369291 (TRBV15, TRBJ1-5)
CATSREQGGNQPQHF

SEQ ID NO: 738583 - protein, 13 aa, Homo sapiens
  CDR3 for alpha chain variable domain of TCR clone 369292 (TRAV13-2, TRAJ23)
CRASQGRKAYLRT

SEQ ID NO: 738584 - protein, 16 aa, Homo sapiens
  CDR3 for beta chain variable domain of TCR clone 369292 (TRBV20-1, TRBJ1-4)
CSAPGQGLLTNEKLFF

SEQ ID NO: 738585 - protein, 15 aa, Homo sapiens
  CDR3 for alpha chain variable domain of TCR clone 369293 (TRAV26-2, TRAJ16)
CILSLRFSDGQKLLF

SEQ ID NO: 738586 - protein, 13 aa, Homo sapiens
  CDR3 for beta chain variable domain of TCR clone 369293 (TRBV10-3, TRBJ2-7)
CASKLAVNYEQYF

SEQ ID NO: 738587 - protein, 14 aa, Homo sapiens
  CDR3 for alpha chain variable domain of TCR clone 369294 (TRAV23/DV6, TRAJ23)
CAAGPSNQGGKLIF

SEQ ID NO: 738588 - protein, 17 aa, Homo sapiens
  CDR3 for beta chain variable domain of TCR clone 369294 (TRBV4-2, TRBJ1-1)
CASSQVATGGMNTEAFF

SEQ ID NO: 738589 - protein, 17 aa, Homo sapiens
  CDR3 for alpha chain variable domain of TCR clone 369295 (TRAV3, TRAJ6)
CAVRDGPRAGGSYIPTF

SEQ ID NO: 738590 - protein, 14 aa, Homo sapiens
  CDR3 for beta chain variable domain of TCR clone 369295 (TRBV7-2, TRBJ2-7)
CASSPKTGFYEQYC

SEQ ID NO: 738591 - protein, 14 aa, Homo sapiens
  CDR3 for alpha chain variable domain of TCR clone 369296 (TRAV26-1, TRAJ49)
CIVRLTNTGNQFYF

SEQ ID NO: 738592 - protein, 14 aa, Homo sapiens
  CDR3 for beta chain variable domain of TCR clone 369296 (TRBV19, TRBJ2-7)
CASNFRDTFTGMYF

SEQ ID NO: 738593 - protein, 13 aa, Homo sapiens
  CDR3 for alpha chain variable domain of TCR clone 369297 (TRAV1-2, TRAJ9)
CAALNTGGFKTIF

SEQ ID NO: 738594 - protein, 13 aa, Homo sapiens
  CDR3 for beta chain variable domain of TCR clone 369297 (TRBV19, TRBJ1-2)
GASSVPGQDGYTF

SEQ ID NO: 738595 - protein, 16 aa, Homo sapiens
  CDR3 for alpha chain variable domain of TCR clone 369298 (TRAV21, TRAJ37)
CAVRTAGSSNTGTLIF

SEQ ID NO: 738596 - protein, 13 aa, Homo sapiens
  CDR3 for beta chain variable domain of TCR clone 369298 (TRBV7-9, TRBJ2-5)
CDSLPSGRETQYF

SEQ ID NO: 738597 - protein, 18 aa, Homo sapiens
  CDR3 for alpha chain variable domain of TCR clone 369299 (TRAV9-2, TRAJ52)
CALSRHNAGGTSYGKLTF

SEQ ID NO: 738598 - protein, 19 aa, Homo sapiens
  CDR3 for beta chain variable domain of TCR clone 369299 (TRBV19, TRBJ2-5)
CASSIGQVTDFFLGETQYF

SEQ ID NO: 738599 - protein, 15 aa, Homo sapiens
  CDR3 for alpha chain variable domain of TCR clone 369300 (TRAV26-1, TRAJ29)
CNVRVEGSGNTPLVF

SEQ ID NO: 738600 - protein, 15 aa, Homo sapiens
  CDR3 for beta chain variable domain of TCR clone 369300 (TRBV7-9, TRBJ1-5)
CASSQCHQPNQPQHF

SEQ ID NO: 738601 - protein, 14 aa, Homo sapiens
  CDR3 for alpha chain variable domain of TCR clone 369301 (TRAV26-2, TRAJ32)
CILFRGGATNKLIF

SEQ ID NO: 738602 - protein, 15 aa, Homo sapiens
  CDR3 for beta chain variable domain of TCR clone 369301 (TRBV7-9, TRBJ1-5)
CASSFGTGNNQPQHF

SEQ ID NO: 738603 - protein, 14 aa, Homo sapiens
  CDR3 for alpha chain variable domain of TCR clone 369302 (TRAV12-1, TRAJ3)
CVVNPGSSASKIIF

SEQ ID NO: 738604 - protein, 14 aa, Homo sapiens
  CDR3 for beta chain variable domain of TCR clone 369302 (TRBV20-1, TRBJ2-3)
CSARGGTITDTQYF

SEQ ID NO: 738605 - protein, 14 aa, Homo sapiens
  CDR3 for alpha chain variable domain of TCR clone 369303 (TRAV36/DV7, TRAJ21)
CAVYTTSTNFTLDL

SEQ ID NO: 738606 - protein, 15 aa, Homo sapiens
  CDR3 for beta chain variable domain of TCR clone 369303 (TRBV4-1, TRBJ2-3)
CASSQDRLPPDTQYF

SEQ ID NO: 738607 - protein, 13 aa, Homo sapiens
  CDR3 for alpha chain variable domain of TCR clone 369304 (TRAV22, TRAJ29)
CAVGGSGNTPLVF

SEQ ID NO: 738608 - protein, 15 aa, Homo sapiens
  CDR3 for beta chain variable domain of TCR clone 369304 (TRBV4-1, TRBJ1-4)
CASSPGRQGNEKLFF

SEQ ID NO: 738609 - protein, 14 aa, Homo sapiens
  CDR3 for alpha chain variable domain of TCR clone 369305 (TRAV13-1, TRAJ35)
CAASKGGIGNGLHC

SEQ ID NO: 738610 - protein, 13 aa, Homo sapiens
  CDR3 for beta chain variable domain of TCR clone 369305 (TRBV7-3, TRBJ1-1)
CASSQDWGAEAFF

SEQ ID NO: 738611 - protein, 15 aa, Homo sapiens
  CDR3 for alpha chain variable domain of TCR clone 369306 (TRAV12-3, TRAJ27)
CAMRAYNTNAGKSTF

SEQ ID NO: 738612 - protein, 20 aa, Homo sapiens
  CDR3 for beta chain variable domain of TCR clone 369306 (TRBV7-8, TRBJ2-2)
CASSHLFPGPTIHITGELFF

SEQ ID NO: 738613 - protein, 16 aa, Homo sapiens
  CDR3 for alpha chain variable domain of TCR clone 369307 (TRAV12-2, TRAJ45)
CAVKRNPGGGADGLTF

SEQ ID NO: 738614 - protein, 13 aa, Homo sapiens
  CDR3 for beta chain variable domain of TCR clone 369307 (TRBV7-3, TRBJ1-1)
CASSQDWGVEAFF

SEQ ID NO: 738615 - protein, 14 aa, Homo sapiens
  CDR3 for alpha chain variable domain of TCR clone 369308 (TRAV1-2, TRAJ8)
CTVREDTGLQELVF

SEQ ID NO: 738616 - protein, 17 aa, Homo sapiens
  CDR3 for beta chain variable domain of TCR clone 369308 (TRBV11-2, TRBJ2-1)
CASSLYPPGVEYNEQFF

SEQ ID NO: 738617 - protein, 15 aa, Homo sapiens
  CDR3 for alpha chain variable domain of TCR clone 369309 (TRAV8-3, TRAJ45)
CASSYSGGGADGLTS

SEQ ID NO: 738618 - protein, 15 aa, Homo sapiens
  CDR3 for beta chain variable domain of TCR clone 369309 (TRBV18, TRBJ1-1)
CASSPRQGENTEAFF

SEQ ID NO: 738619 - protein, 16 aa, Homo sapiens
  CDR3 for alpha chain variable domain of TCR clone 369310 (TRAV13-1, TRAJ48)
CAARIFGNFGNEKLTF

SEQ ID NO: 738620 - protein, 16 aa, Homo sapiens
  CDR3 for beta chain variable domain of TCR clone 369310 (TRBV7-2, TRBJ2-6)
CASSERRASGTNDLTF

SEQ ID NO: 738621 - protein, 14 aa, Homo sapiens
  CDR3 for alpha chain variable domain of TCR clone 369311 (TRAV8-4, TRAJ9)
CAVRINTGGFQTIF

SEQ ID NO: 738622 - protein, 14 aa, Homo sapiens
  CDR3 for beta chain variable domain of TCR clone 369311 (TRBV5-1, TRBJ1-1)
CASSLQGASTEAFF

SEQ ID NO: 738623 - protein, 14 aa, Homo sapiens
  CDR3 for alpha chain variable domain of TCR clone 369312 (TRAV1-2, TRAJ8)
CAVREDTGFQKIVF

SEQ ID NO: 738624 - protein, 15 aa, Homo sapiens
  CDR3 for beta chain variable domain of TCR clone 369312 (TRBV6-3, TRBJ2-7)
CDSSSPGTVFYEQYF

SEQ ID NO: 738625 - protein, 13 aa, Homo sapiens
  CDR3 for alpha chain variable domain of TCR clone 369313 (TRAV13-1, TRAJ21)
CAASKGNFNKFYF

SEQ ID NO: 738626 - protein, 15 aa, Homo sapiens
  CDR3 for beta chain variable domain of TCR clone 369313 (TRBV5-4, TRBJ2-3)
CQQRGTSGGTDTQYF

SEQ ID NO: 738627 - protein, 14 aa, Homo sapiens
  CDR3 for alpha chain variable domain of TCR clone 369314 (TRAV26-1, TRAJ38)
CIADNAGNNRTLIW

SEQ ID NO: 738628 - protein, 13 aa, Homo sapiens
  CDR3 for beta chain variable domain of TCR clone 369314 (TRBV20-1, TRBJ1-1)
CSARGGGNTEAVF

SEQ ID NO: 738629 - protein, 16 aa, Homo sapiens
  CDR3 for alpha chain variable domain of TCR clone 369315 (TRAV35, TRAJ37)
CWAFLRGSSNTGKLIF

SEQ ID NO: 738630 - protein, 13 aa, Homo sapiens
  CDR3 for beta chain variable domain of TCR clone 369315 (TRBV10-3, TRBJ2-7)
CASKLAVNYEQYF

SEQ ID NO: 738631 - protein, 10 aa, Homo sapiens
  CDR3 for alpha chain variable domain of TCR clone 369316 (TRAV1-2, TRAJ20)
CSCNDYKLSF

SEQ ID NO: 738632 - protein, 13 aa, Homo sapiens
  CDR3 for beta chain variable domain of TCR clone 369316 (TRBV7-2, TRBJ2-2)
CASSLAVTGELFF

SEQ ID NO: 738633 - protein, 13 aa, Homo sapiens
  CDR3 for alpha chain variable domain of TCR clone 369317 (TRAV27, TRAJ42)
CAGVRGSQGNLIF

SEQ ID NO: 738634 - protein, 14 aa, Homo sapiens
  CDR3 for beta chain variable domain of TCR clone 369317 (TRBV7-9, TRBJ2-1)
CASSFRDMVYEQFF

SEQ ID NO: 738635 - protein, 14 aa, Homo sapiens
  CDR3 for alpha chain variable domain of TCR clone 369318 (TRAV8-3, TRAJ9)
CAVVYNTGGFKTIF

SEQ ID NO: 738636 - protein, 17 aa, Homo sapiens
  CDR3 for beta chain variable domain of TCR clone 369318 (TRBV4-2, TRBJ1-1)
CASTQFGGGSGNTEAFF

SEQ ID NO: 738637 - protein, 11 aa, Homo sapiens
  CDR3 for alpha chain variable domain of TCR clone 369319 (TRAV1-2, TRAJ40)
CAVPGTYKYVF

SEQ ID NO: 738638 - protein, 16 aa, Homo sapiens
  CDR3 for beta chain variable domain of TCR clone 369319 (TRBV29-1, TRBJ2-7)
CSVEVVGTSGSYEQYV

SEQ ID NO: 738639 - protein, 18 aa, Homo sapiens
  CDR3 for alpha chain variable domain of TCR clone 369320 (TRAV26-1, TRAJ23)
CIVRVSLEVWNQGGKLIC

SEQ ID NO: 738640 - protein, 16 aa, Homo sapiens
  CDR3 for beta chain variable domain of TCR clone 369320 (TRBV12-4, TRBJ2-5)
CASSFFVRGRQETQYF

SEQ ID NO: 738641 - protein, 13 aa, Homo sapiens
  CDR3 for alpha chain variable domain of TCR clone 369321 (TRAV3, TRAJ21)
CAVREPDFNKFYF

SEQ ID NO: 738642 - protein, 16 aa, Homo sapiens
  CDR3 for beta chain variable domain of TCR clone 369321 (TRBV15, TRBJ1-2)
CATSRGPRTGGGGYTF

SEQ ID NO: 738643 - protein, 13 aa, Homo sapiens
  CDR3 for alpha chain variable domain of TCR clone 369322 (TRAV20, TRAJ20)
CAVQNPHDYKLSF

SEQ ID NO: 738644 - protein, 12 aa, Homo sapiens
  CDR3 for beta chain variable domain of TCR clone 369322 (TRBV18, TRBJ2-7)
CASPPNNNEQYF

SEQ ID NO: 738645 - protein, 13 aa, Homo sapiens
  CDR3 for alpha chain variable domain of TCR clone 369323 (TRAV12-2, TRAJ9)
CAVNKGGGFKTIF

SEQ ID NO: 738646 - protein, 15 aa, Homo sapiens
  CDR3 for beta chain variable domain of TCR clone 369323 (TRBV28, TRBJ2-1)
CASSPPGLADHEQFF

SEQ ID NO: 738647 - protein, 14 aa, Homo sapiens
  CDR3 for alpha chain variable domain of TCR clone 369324 (TRAV23/DV6, TRAJ27)
CAASRDTNAGKSTF

SEQ ID NO: 738648 - protein, 13 aa, Homo sapiens
  CDR3 for beta chain variable domain of TCR clone 369324 (TRBV20-1, TRBJ1-5)
CSASGRGNQPQHL

SEQ ID NO: 738649 - protein, 13 aa, Homo sapiens
  CDR3 for alpha chain variable domain of TCR clone 369325 (TRAV27, TRAJ41)
CAGAGNSGNALNF

SEQ ID NO: 738650 - protein, 14 aa, Homo sapiens
  CDR3 for beta chain variable domain of TCR clone 369325 (TRBV7-2, TRBJ1-1)
CASSFLTGTTEAFF

SEQ ID NO: 738651 - protein, 11 aa, Homo sapiens
  CDR3 for alpha chain variable domain of TCR clone 369326 (TRAV2, TRAJ33)
CAVESNYQLIW

SEQ ID NO: 738652 - protein, 14 aa, Homo sapiens
  CDR3 for beta chain variable domain of TCR clone 369326 (TRBV12-4, TRBJ2-5)
CASSQLAGVETQYF

SEQ ID NO: 738653 - protein, 12 aa, Homo sapiens
  CDR3 for alpha chain variable domain of TCR clone 369327 (TRAV16, TRAJ10)
CSRTGGGNKLTF

SEQ ID NO: 738654 - protein, 19 aa, Homo sapiens
  CDR3 for beta chain variable domain of TCR clone 369327 (TRBV5-1, TRBJ2-3)
CASSLTRIAADWSTDTQYF

SEQ ID NO: 738655 - protein, 22 aa, Homo sapiens
  CDR3 for alpha chain variable domain of TCR clone 369328 (TRAV8-3, TRAJ38)
CAVGASNAGNNHTQNPDPAVSQ

SEQ ID NO: 738656 - protein, 15 aa, Homo sapiens
  CDR3 for beta chain variable domain of TCR clone 369328 (TRBV11-3, TRBJ1-3)
CASSLFGPSGNTIYF

SEQ ID NO: 738657 - protein, 13 aa, Homo sapiens
  CDR3 for alpha chain variable domain of TCR clone 369329 (TRAV8-6, TRAJ40)
CAVSVTGNYKYIF

SEQ ID NO: 738658 - protein, 15 aa, Homo sapiens
  CDR3 for beta chain variable domain of TCR clone 369329 (TRBV4-1, TRBJ2-3)
CASSRGQGIPDTQYF

SEQ ID NO: 738659 - protein, 15 aa, Homo sapiens
  CDR3 for alpha chain variable domain of TCR clone 369330 (TRAV17, TRAJ35)
CATAFVIGFGNVLHC

SEQ ID NO: 738660 - protein, 12 aa, Homo sapiens
  CDR3 for beta chain variable domain of TCR clone 369330 (TRBV12-4, TRBJ1-3)
CASSFSGNTIYF

SEQ ID NO: 738661 - protein, 18 aa, Homo sapiens
  CDR3 for alpha chain variable domain of TCR clone 369331 (TRAV26-2, TRAJ45)
CILRVGKYSGGGADGLTF

SEQ ID NO: 738662 - protein, 14 aa, Homo sapiens
  CDR3 for beta chain variable domain of TCR clone 369331 (TRBV7-2, TRBJ2-7)
CASRSQGAAYEQYF

SEQ ID NO: 738663 - protein, 14 aa, Homo sapiens
  CDR3 for alpha chain variable domain of TCR clone 369332 (TRAV26-1, TRAJ21)
CIVRVAHNFNKFYF

SEQ ID NO: 738664 - protein, 13 aa, Homo sapiens
  CDR3 for beta chain variable domain of TCR clone 369332 (TRBV2, TRBJ2-7)
CASTGGSSYEQYF

SEQ ID NO: 738665 - protein, 15 aa, Homo sapiens
  CDR3 for alpha chain variable domain of TCR clone 369333 (TRAV12-1, TRAJ4)
CVVNPFSGGYNKLIF

SEQ ID NO: 738666 - protein, 15 aa, Homo sapiens
  CDR3 for beta chain variable domain of TCR clone 369333 (TRBV10-1, TRBJ2-1)
CASSEWRGTYNEQFF

SEQ ID NO: 738667 - protein, 15 aa, Homo sapiens
  CDR3 for alpha chain variable domain of TCR clone 369334 (TRAV17, TRAJ57)
CSTGPSQGGSEKLVF

SEQ ID NO: 738668 - protein, 15 aa, Homo sapiens
  CDR3 for beta chain variable domain of TCR clone 369334 (TRBV6-3, TRBJ2-7)
CASSSPGTVFYEQYF

SEQ ID NO: 738669 - protein, 12 aa, Homo sapiens
  CDR3 for alpha chain variable domain of TCR clone 369335 (TRAV21, TRAJ20)
CDVRGNDYKLSF

SEQ ID NO: 738670 - protein, 14 aa, Homo sapiens
  CDR3 for beta chain variable domain of TCR clone 369335 (TRBV7-8, TRBJ2-7)
CASSQTQGADEQYF

SEQ ID NO: 738671 - protein, 15 aa, Homo sapiens
  CDR3 for alpha chain variable domain of TCR clone 369336 (TRAV3, TRAJ22)
CAVRDRGGSARQLTF

SEQ ID NO: 738672 - protein, 13 aa, Homo sapiens
  CDR3 for beta chain variable domain of TCR clone 369336 (TRBV12-4, TRBJ1-2)
CASSLRQVKGYTF

SEQ ID NO: 738673 - protein, 11 aa, Homo sapiens
  CDR3 for alpha chain variable domain of TCR clone 369337 (TRAV13-1, TRAJ20)
CSPTGLYKLSF

SEQ ID NO: 738674 - protein, 14 aa, Homo sapiens
  CDR3 for beta chain variable domain of TCR clone 369337 (TRBV28, TRBJ2-5)
CASTGAGGVETQYL

SEQ ID NO: 738675 - protein, 13 aa, Homo sapiens
  CDR3 for alpha chain variable domain of TCR clone 369338 (TRAV20, TRAJ54)
CAVQVGGAQKLVF

SEQ ID NO: 738676 - protein, 14 aa, Homo sapiens
  CDR3 for beta chain variable domain of TCR clone 369338 (TRBV20-1, TRBJ2-7)
CSAKTGTGGYEQYF

SEQ ID NO: 738677 - protein, 13 aa, Homo sapiens
  CDR3 for alpha chain variable domain of TCR clone 369339 (TRAV2, TRAJ15)
CAVASQAGTALIF

SEQ ID NO: 738678 - protein, 15 aa, Homo sapiens
  CDR3 for beta chain variable domain of TCR clone 369339 (TRBV9, TRBJ1-2)
CASSVVGQANYGYTF

SEQ ID NO: 738679 - protein, 11 aa, Homo sapiens
  CDR3 for alpha chain variable domain of TCR clone 369340 (TRAV2, TRAJ13)
CASGGYQKVTF

SEQ ID NO: 738680 - protein, 12 aa, Homo sapiens
  CDR3 for beta chain variable domain of TCR clone 369340 (TRBV12-4, TRBJ2-7)
CASNPGGGEQYF

SEQ ID NO: 738681 - protein, 17 aa, Homo sapiens
  CDR3 for alpha chain variable domain of TCR clone 369341 (TRAV2, TRAJ36)
CSVEDRGNWGKQPLLWD

SEQ ID NO: 738682 - protein, 14 aa, Homo sapiens
  CDR3 for beta chain variable domain of TCR clone 369341 (TRBV12-4, TRBJ1-3)
CASTLTGAGNTIYF

SEQ ID NO: 738683 - protein, 13 aa, Homo sapiens
  CDR3 for alpha chain variable domain of TCR clone 369342 (TRAV3, TRAJ41)
CAVSSNSGYALNF

SEQ ID NO: 738684 - protein, 13 aa, Homo sapiens
  CDR3 for beta chain variable domain of TCR clone 369342 (TRBV20-1, TRBJ2-2)
CSALSGGAGELVF

SEQ ID NO: 738685 - protein, 16 aa, Homo sapiens
  CDR3 for alpha chain variable domain of TCR clone 369343 (TRAV3, TRAJ37)
CAVRGKGPGNTGKLIF

SEQ ID NO: 738686 - protein, 20 aa, Homo sapiens
  CDR3 for beta chain variable domain of TCR clone 369343 (TRBV7-8, TRBJ2-2)
CASSHLFPGPTIHITGELFF

SEQ ID NO: 738687 - protein, 15 aa, Homo sapiens
  CDR3 for alpha chain variable domain of TCR clone 369344 (TRAV14/DV4, TRAJ10)
CAMRELTGGGNKLTF

SEQ ID NO: 738688 - protein, 14 aa, Homo sapiens
  CDR3 for beta chain variable domain of TCR clone 369344 (TRBV4-1, TRBJ2-2)
CASSQAVNTGELFF

SEQ ID NO: 738689 - protein, 15 aa, Homo sapiens
  CDR3 for alpha chain variable domain of TCR clone 369345 (TRAV13-2, TRAJ10)
CAENRDTGGGNKLTF

SEQ ID NO: 738690 - protein, 20 aa, Homo sapiens
  CDR3 for beta chain variable domain of TCR clone 369345 (TRBV28, TRBJ2-1)
CASTPIGRSPGLVGGNEQFF

SEQ ID NO: 738691 - protein, 11 aa, Homo sapiens
  CDR3 for alpha chain variable domain of TCR clone 369346 (TRAV3, TRAJ21)
CAVGNFNKFYF

SEQ ID NO: 738692 - protein, 16 aa, Homo sapiens
  CDR3 for beta chain variable domain of TCR clone 369346 (TRBV7-6, TRBJ2-1)
CASSAQGPSSYNEQFF

SEQ ID NO: 738693 - protein, 13 aa, Homo sapiens
  CDR3 for alpha chain variable domain of TCR clone 369347 (TRAV12-3, TRAJ5)
CAMIYTGRRALTF

SEQ ID NO: 738694 - protein, 13 aa, Homo sapiens
  CDR3 for beta chain variable domain of TCR clone 369347 (TRBV7-3, TRBJ1-1)
CASSQDWGAEAFF

SEQ ID NO: 738695 - protein, 12 aa, Homo sapiens
  CDR3 for alpha chain variable domain of TCR clone 369348 (TRAV8-6, TRAJ43)
CAVSNNNNDILF

SEQ ID NO: 738696 - protein, 15 aa, Homo sapiens
  CDR3 for beta chain variable domain of TCR clone 369348 (TRBV7-3, TRBJ2-6)
CASSLGGSGANVLTF

SEQ ID NO: 738697 - protein, 16 aa, Homo sapiens
  CDR3 for alpha chain variable domain of TCR clone 369349 (TRAV23/DV6, TRAJ9)
CAASIGGNTGGFKTIL

SEQ ID NO: 738698 - protein, 12 aa, Homo sapiens
  CDR3 for beta chain variable domain of TCR clone 369349 (TRBV7-8, TRBJ2-7)
CASSLGDREQYF

SEQ ID NO: 738699 - protein, 15 aa, Homo sapiens
  CDR3 for alpha chain variable domain of TCR clone 369350 (TRAV27, TRAJ38)
CEARRNAGNNRKLTW

SEQ ID NO: 738700 - protein, 13 aa, Homo sapiens
  CDR3 for beta chain variable domain of TCR clone 369350 (TRBV12-5, TRBJ2-3)
CASGDRQSDTQYF

SEQ ID NO: 738701 - protein, 17 aa, Homo sapiens
  CDR3 for alpha chain variable domain of TCR clone 369351 (TRAV3, TRAJ42)
CAVRDRDYGGGQGNLIF

SEQ ID NO: 738702 - protein, 14 aa, Homo sapiens
  CDR3 for beta chain variable domain of TCR clone 369351 (TRBV7-8, TRBJ2-1)
CATERERSYNEQFF

SEQ ID NO: 738703 - protein, 15 aa, Homo sapiens
  CDR3 for alpha chain variable domain of TCR clone 369352 (TRAV3, TRAJ17)
CAVRDTGAAGNKLTF

SEQ ID NO: 738704 - protein, 15 aa, Homo sapiens
  CDR3 for beta chain variable domain of TCR clone 369352 (TRBV6-6, TRBJ2-1)
CATRQGVSSYNEQFF

SEQ ID NO: 738705 - protein, 14 aa, Homo sapiens
  CDR3 for alpha chain variable domain of TCR clone 369353 (TRAV1-2, TRAJ16)
CAVNRFSDGQKLLF

SEQ ID NO: 738706 - protein, 15 aa, Homo sapiens
  CDR3 for beta chain variable domain of TCR clone 369353 (TRBV28, TRBJ2-1)
CASSPPGLADHEQFF

SEQ ID NO: 738707 - protein, 12 aa, Homo sapiens
  CDR3 for alpha chain variable domain of TCR clone 369354 (TRAV17, TRAJ4)
CATDGGYNKLIF

SEQ ID NO: 738708 - protein, 13 aa, Homo sapiens
  CDR3 for beta chain variable domain of TCR clone 369354 (TRBV29-1, TRBJ2-2)
WSTTGVNTGELFF

SEQ ID NO: 738709 - protein, 13 aa, Homo sapiens
  CDR3 for alpha chain variable domain of TCR clone 369355 (TRAV13-2, TRAJ13)
CAERQGGDQKVTF

SEQ ID NO: 738710 - protein, 13 aa, Homo sapiens
  CDR3 for beta chain variable domain of TCR clone 369355 (TRBV10-3, TRBJ2-7)
CASKLAVNYEQYF

SEQ ID NO: 738711 - protein, 12 aa, Homo sapiens
  CDR3 for alpha chain variable domain of TCR clone 369356 (TRAV13-1, TRAJ36)
WRGGAGANNLFF

SEQ ID NO: 738712 - protein, 16 aa, Homo sapiens
  CDR3 for beta chain variable domain of TCR clone 369356 (TRBV7-9, TRBJ2-5)
CASSLEIGTRKETQYF

SEQ ID NO: 738713 - protein, 13 aa, Homo sapiens
  CDR3 for alpha chain variable domain of TCR clone 369357 (TRAV12-3, TRAJ9)
CAMSADGGFKTIF

SEQ ID NO: 738714 - protein, 16 aa, Homo sapiens
  CDR3 for beta chain variable domain of TCR clone 369357 (TRBV4-3, TRBJ2-1)
CASSPALDRGVNEQFF

SEQ ID NO: 738715 - protein, 18 aa, Homo sapiens
  CDR3 for alpha chain variable domain of TCR clone 369358 (TRAV3, TRAJ32)
CAVRDIRGYGGATNKPIL

SEQ ID NO: 738716 - protein, 15 aa, Homo sapiens
  CDR3 for beta chain variable domain of TCR clone 369358 (TRBV12-4, TRBJ2-2)
CASSLGVRHTGELFF

SEQ ID NO: 738717 - protein, 13 aa, Homo sapiens
  CDR3 for alpha chain variable domain of TCR clone 369359 (TRAV38-2/DV8, TRAJ56)
CAYKGGANSKLTF

SEQ ID NO: 738718 - protein, 15 aa, Homo sapiens
  CDR3 for beta chain variable domain of TCR clone 369359 (TRBV20-1, TRBJ1-6)
CSARAASSYNSPLHF

SEQ ID NO: 738719 - protein, 17 aa, Homo sapiens
  CDR3 for alpha chain variable domain of TCR clone 369360 (TRAV8-6, TRAJ58)
CAVSSWVGETSGSRLTF

SEQ ID NO: 738720 - protein, 18 aa, Homo sapiens
  CDR3 for beta chain variable domain of TCR clone 369360 (TRBV7-6, TRBJ2-1)
CASSPRTSGMSSYNEQFF

SEQ ID NO: 738721 - protein, 12 aa, Homo sapiens
  CDR3 for alpha chain variable domain of TCR clone 369361 (TRAV29/DV5, TRAJ15)
CAYNQAGTALIF

SEQ ID NO: 738722 - protein, 15 aa, Homo sapiens
  CDR3 for beta chain variable domain of TCR clone 369361 (TRBV11-2, TRBJ2-2)
CASSSDRVNAGELFF

SEQ ID NO: 738723 - protein, 15 aa, Homo sapiens
  CDR3 for alpha chain variable domain of TCR clone 369362 (TRAV13-1, TRAJ57)
CAASNTQGGSEKLVF

SEQ ID NO: 738724 - protein, 16 aa, Homo sapiens
  CDR3 for beta chain variable domain of TCR clone 369362 (TRBV19, TRBJ2-1)
CASSKAGPSSYNKQFF

SEQ ID NO: 738725 - protein, 11 aa, Homo sapiens
  CDR3 for alpha chain variable domain of TCR clone 369363 (TRAV17, TRAJ43)
CATDVTGDMRF

SEQ ID NO: 738726 - protein, 12 aa, Homo sapiens
  CDR3 for beta chain variable domain of TCR clone 369363 (TRBV11-2, TRBJ2-2)
CASSLGGGELFF

SEQ ID NO: 738727 - protein, 12 aa, Homo sapiens
  CDR3 for alpha chain variable domain of TCR clone 369364 (TRAV2, TRAJ26)
CAGSPGRLWSEF

SEQ ID NO: 738728 - protein, 15 aa, Homo sapiens
  CDR3 for beta chain variable domain of TCR clone 369364 (TRBV20-1, TRBJ1-5)
CSAREGGYSNQPQHF

SEQ ID NO: 738729 - protein, 18 aa, Homo sapiens
  CDR3 for alpha chain variable domain of TCR clone 369365 (TRAV13-1, TRAJ52)
CAAKNPNAGGTSYGKLTF

SEQ ID NO: 738730 - protein, 16 aa, Homo sapiens
  CDR3 for beta chain variable domain of TCR clone 369365 (TRBV5-1, TRBJ2-7)
CASSLEGLAGLYEQYF

SEQ ID NO: 738731 - protein, 16 aa, Homo sapiens
  CDR3 for alpha chain variable domain of TCR clone 369366 (TRAV12-2, TRAJ10)
CAVNRVLTGGGHKLTF

SEQ ID NO: 738732 - protein, 12 aa, Homo sapiens
  CDR3 for beta chain variable domain of TCR clone 369366 (TRBV28, TRBJ2-7)
CASSFSSYEQYF

SEQ ID NO: 738733 - protein, 12 aa, Homo sapiens
  CDR3 for alpha chain variable domain of TCR clone 369367 (TRAV12-3, TRAJ41)
CAMSYSGYAPNF

SEQ ID NO: 738734 - protein, 13 aa, Homo sapiens
  CDR3 for beta chain variable domain of TCR clone 369367 (TRBV7-3, TRBJ2-1)
CSSSLDSYNEQFF

SEQ ID NO: 738735 - protein, 12 aa, Homo sapiens
  CDR3 for alpha chain variable domain of TCR clone 369368 (TRAV27, TRAJ13)
CAGVRGYQKDTF

SEQ ID NO: 738736 - protein, 16 aa, Homo sapiens
  CDR3 for beta chain variable domain of TCR clone 369368 (TRBV28, TRBJ2-1)
CASSSSYSGSLNEQFF

SEQ ID NO: 738737 - protein, 16 aa, Homo sapiens
  CDR3 for alpha chain variable domain of TCR clone 369369 (TRAV3, TRAJ22)
CAVRDMGSGSARQLTF

SEQ ID NO: 738738 - protein, 15 aa, Homo sapiens
  CDR3 for beta chain variable domain of TCR clone 369369 (TRBV5-1, TRBJ2-3)
CASRNQAGSTDTQYF

SEQ ID NO: 738739 - protein, 13 aa, Homo sapiens
  CDR3 for alpha chain variable domain of TCR clone 369370 (TRAV8-3, TRAJ37)
CAVPSSNTGKLIF

SEQ ID NO: 738740 - protein, 12 aa, Homo sapiens
  CDR3 for beta chain variable domain of TCR clone 369370 (TRBV11-2, TRBJ2-1)
CASSTGNNEQFF

SEQ ID NO: 738741 - protein, 12 aa, Homo sapiens
  CDR3 for alpha chain variable domain of TCR clone 369371 (TRAV8-3, TRAJ26)
CAGDNYGQNFVF

SEQ ID NO: 738742 - protein, 13 aa, Homo sapiens
  CDR3 for beta chain variable domain of TCR clone 369371 (TRBV20-1, TRBJ1-1)
CSAPLGGGAEAFF

SEQ ID NO: 738743 - protein, 18 aa, Homo sapiens
  CDR3 for alpha chain variable domain of TCR clone 369372 (TRAV26-2, TRAJ32)
CILRAPLNYGGATNKLIF

SEQ ID NO: 738744 - protein, 13 aa, Homo sapiens
  CDR3 for beta chain variable domain of TCR clone 369372 (TRBV7-3, TRBJ2-1)
CASSLWPYNEQYF

SEQ ID NO: 738745 - protein, 13 aa, Homo sapiens
  CDR3 for alpha chain variable domain of TCR clone 369373 (TRAV16, TRAJ34)
CALSPYNTDKLIF

SEQ ID NO: 738746 - protein, 17 aa, Homo sapiens
  CDR3 for beta chain variable domain of TCR clone 369373 (TRBV5-1, TRBJ2-1)
CASSAGTSGYSYNEQFF

SEQ ID NO: 738747 - protein, 17 aa, Homo sapiens
  CDR3 for alpha chain variable domain of TCR clone 369374 (TRAV3, TRAJ42)
CAVRDRDYGGSQGNLIF

SEQ ID NO: 738748 - protein, 18 aa, Homo sapiens
  CDR3 for beta chain variable domain of TCR clone 369374 (TRBV20-1, TRBJ2-3)
CSASGLAGGPGTTDTKYF

SEQ ID NO: 738749 - protein, 16 aa, Homo sapiens
  CDR3 for alpha chain variable domain of TCR clone 369375 (TRAV26-2, TRAJ48)
CIVRPPFNFGNEKLTF

SEQ ID NO: 738750 - protein, 15 aa, Homo sapiens
  CDR3 for beta chain variable domain of TCR clone 369375 (TRBV20-1, TRBJ2-3)
CSARVEGTYTDTQYF

SEQ ID NO: 738751 - protein, 16 aa, Homo sapiens
  CDR3 for alpha chain variable domain of TCR clone 369376 (TRAV30, TRAJ24)
CGTEIVDADSWGKFQY

SEQ ID NO: 738752 - protein, 18 aa, Homo sapiens
  CDR3 for beta chain variable domain of TCR clone 369376 (TRBV7-9, TRBJ2-7)
CASSLTTSGSRTWYEQYF

SEQ ID NO: 738753 - protein, 14 aa, Homo sapiens
  CDR3 for alpha chain variable domain of TCR clone 369377 (TRAV8-3, TRAJ3)
CAVVPRSSASKIIF

SEQ ID NO: 738754 - protein, 16 aa, Homo sapiens
  CDR3 for beta chain variable domain of TCR clone 369377 (TRBV4-1, TRBJ2-3)
CASSQVTSGGGDTQYF

SEQ ID NO: 738755 - protein, 16 aa, Homo sapiens
  CDR3 for alpha chain variable domain of TCR clone 369378 (TRAV4, TRAJ18)
CCVLLIGGSTLGRLYF

SEQ ID NO: 738756 - protein, 12 aa, Homo sapiens
  CDR3 for beta chain variable domain of TCR clone 369378 (TRBV6-3, TRBJ2-7)
CASSLAPYEQYF

SEQ ID NO: 738757 - protein, 11 aa, Homo sapiens
  CDR3 for alpha chain variable domain of TCR clone 369379 (TRAV2, TRAJ33)
CAVDSNYQLFW

SEQ ID NO: 738758 - protein, 15 aa, Homo sapiens
  CDR3 for beta chain variable domain of TCR clone 369379 (TRBV19, TRBJ1-2)
CASSVGQVLNYGYTF

SEQ ID NO: 738759 - protein, 15 aa, Homo sapiens
  CDR3 for alpha chain variable domain of TCR clone 369380 (TRAV23/DV6, TRAJ18)
CAAIFRGSTLGRLYF

SEQ ID NO: 738760 - protein, 13 aa, Homo sapiens
  CDR3 for beta chain variable domain of TCR clone 369380 (TRBV28, TRBJ2-7)
CAILDRAGGEQYF

SEQ ID NO: 738761 - protein, 22 aa, Homo sapiens
  CDR3 for alpha chain variable domain of TCR clone 369381 (TRAV3, TRAJ9)
CAVRLNTEASKLSLEQEQDYLL

SEQ ID NO: 738762 - protein, 16 aa, Homo sapiens
  CDR3 for beta chain variable domain of TCR clone 369381 (TRBV12-5, TRBJ2-5)
CASGPRTSGNQETQYF

SEQ ID NO: 738763 - protein, 21 aa, Homo sapiens
  CDR3 for alpha chain variable domain of TCR clone 369382 (TRAV12-1, TRAJ32)
SSVIQPPTSMNYGGATNKLIF

SEQ ID NO: 738764 - protein, 12 aa, Homo sapiens
  CDR3 for beta chain variable domain of TCR clone 369382 (TRBV19, TRBJ1-5)
CASSIAQQPQHF

SEQ ID NO: 738765 - protein, 14 aa, Homo sapiens
  CDR3 for alpha chain variable domain of TCR clone 369383 (TRAV38-1, TRAJ27)
CAFIHNTNAGKSSF

SEQ ID NO: 738766 - protein, 12 aa, Homo sapiens
  CDR3 for beta chain variable domain of TCR clone 369383 (TRBV7-8, TRBJ2-7)
CASSLGDREQYF

SEQ ID NO: 738767 - protein, 13 aa, Homo sapiens
  CDR3 for alpha chain variable domain of TCR clone 369384 (TRAV35, TRAJ43)
CAGYPYNNNDMRF

SEQ ID NO: 738768 - protein, 15 aa, Homo sapiens
  CDR3 for beta chain variable domain of TCR clone 369384 (TRBV25-1, TRBJ1-4)
CASSKRIETNEKLFF

SEQ ID NO: 738769 - protein, 14 aa, Homo sapiens
  CDR3 for alpha chain variable domain of TCR clone 369385 (TRAV1-2, TRAJ8)
CAVREDTAFQKLVF

SEQ ID NO: 738770 - protein, 15 aa, Homo sapiens
  CDR3 for beta chain variable domain of TCR clone 369385 (TRBV11-3, TRBJ2-3)
CASLKDGREGDTQYF

SEQ ID NO: 738771 - protein, 14 aa, Homo sapiens
  CDR3 for alpha chain variable domain of TCR clone 369386 (TRAV8-1, TRAJ15)
CAVNGQQAGTALIF

SEQ ID NO: 738772 - protein, 14 aa, Homo sapiens
  CDR3 for beta chain variable domain of TCR clone 369386 (TRBV7-8, TRBJ2-7)
CASSFFAGPNEQYF

SEQ ID NO: 738773 - protein, 15 aa, Homo sapiens
  CDR3 for alpha chain variable domain of TCR clone 369387 (TRAV21, TRAJ52)
CATRGGGTSYGKLTF

SEQ ID NO: 738774 - protein, 14 aa, Homo sapiens
  CDR3 for beta chain variable domain of TCR clone 369387 (TRBV28, TRBJ2-3)
CASISAPSTDTQYF

SEQ ID NO: 738775 - protein, 12 aa, Homo sapiens
  CDR3 for alpha chain variable domain of TCR clone 369388 (TRAV13-2, TRAJ8)
CAPWLGFQKLVF

SEQ ID NO: 738776 - protein, 14 aa, Homo sapiens
  CDR3 for beta chain variable domain of TCR clone 369388 (TRBV18, TRBJ1-5)
CASSRQQRNQPQHL

SEQ ID NO: 738777 - protein, 12 aa, Homo sapiens
  CDR3 for alpha chain variable domain of TCR clone 369389 (TRAV16, TRAJ56)
RAPTGANSKLTF

SEQ ID NO: 738778 - protein, 17 aa, Homo sapiens
  CDR3 for beta chain variable domain of TCR clone 369389 (TRBV27, TRBJ2-6)
CASSLTGFASGANVLTF

SEQ ID NO: 738779 - protein, 14 aa, Homo sapiens
  CDR3 for alpha chain variable domain of TCR clone 369390 (TRAV35, TRAJ33)
CWPRGRDSNYQLIW

SEQ ID NO: 738780 - protein, 11 aa, Homo sapiens
  CDR3 for beta chain variable domain of TCR clone 369390 (TRBV10-3, TRBJ2-7)
CATSEGLEQYF

SEQ ID NO: 738781 - protein, 14 aa, Homo sapiens
  CDR3 for alpha chain variable domain of TCR clone 369391 (TRAV38-1, TRAJ39)
CAFAYDNAGNMLTF

SEQ ID NO: 738782 - protein, 15 aa, Homo sapiens
  CDR3 for beta chain variable domain of TCR clone 369391 (TRBV19, TRBJ2-6)
CASSIGPSGANVLTF

SEQ ID NO: 738783 - protein, 14 aa, Homo sapiens
  CDR3 for alpha chain variable domain of TCR clone 369392 (TRAV30, TRAJ33)
CGTVAPRSNYQLIW

SEQ ID NO: 738784 - protein, 17 aa, Homo sapiens
  CDR3 for beta chain variable domain of TCR clone 369392 (TRBV5-1, TRBJ2-5)
CASSLLGLAANQETQYF

SEQ ID NO: 738785 - protein, 14 aa, Homo sapiens
  CDR3 for alpha chain variable domain of TCR clone 369393 (TRAV12-2, TRAJ15)
CAPHTGQAGTALIC

SEQ ID NO: 738786 - protein, 17 aa, Homo sapiens
  CDR3 for beta chain variable domain of TCR clone 369393 (TRBV5-5, TRBJ1-2)
CASSLGSLDGQSEGYTF

SEQ ID NO: 738787 - protein, 14 aa, Homo sapiens
  CDR3 for alpha chain variable domain of TCR clone 369394 (TRAV1-2, TRAJ8)
CAVREDTGFQKLVF

SEQ ID NO: 738788 - protein, 15 aa, Homo sapiens
  CDR3 for beta chain variable domain of TCR clone 369394 (TRBV7-9, TRBJ1-2)
CASSSIRDRVDGYTF

SEQ ID NO: 738789 - protein, 13 aa, Homo sapiens
  CDR3 for alpha chain variable domain of TCR clone 369395 (TRAV21, TRAJ27)
CAARPGNAGKSTS

SEQ ID NO: 738790 - protein, 14 aa, Homo sapiens
  CDR3 for beta chain variable domain of TCR clone 369395 (TRBV7-6, TRBJ2-3)
CASSLGTVTDAQYF

SEQ ID NO: 738791 - protein, 14 aa, Homo sapiens
  CDR3 for alpha chain variable domain of TCR clone 369396 (TRAV14/DV4, TRAJ49)
CAFNRYLTGNQFYF

SEQ ID NO: 738792 - protein, 15 aa, Homo sapiens
  CDR3 for beta chain variable domain of TCR clone 369396 (TRBV5-1, TRBJ1-1)
CASSSTTGTNTEAFL

SEQ ID NO: 738793 - protein, 12 aa, Homo sapiens
  CDR3 for alpha chain variable domain of TCR clone 369397 (TRAV12-1, TRAJ40)
CVVYSGTYTYIV

SEQ ID NO: 738794 - protein, 18 aa, Homo sapiens
  CDR3 for beta chain variable domain of TCR clone 369397 (TRBV11-2, TRBJ2-3)
CASSLGGASRGAPNTQYF

SEQ ID NO: 738795 - protein, 14 aa, Homo sapiens
  CDR3 for alpha chain variable domain of TCR clone 369398 (TRAV13-1, TRAJ52)
CAAAGGTSNGKLTF

SEQ ID NO: 738796 - protein, 17 aa, Homo sapiens
  CDR3 for beta chain variable domain of TCR clone 369398 (TRBV19, TRBJ1-1)
CASSKSGTGGPYTEAFF

SEQ ID NO: 738797 - protein, 14 aa, Homo sapiens
  CDR3 for alpha chain variable domain of TCR clone 369399 (TRAV13-2, TRAJ41)
CAEYLSNSGYALNF

SEQ ID NO: 738798 - protein, 13 aa, Homo sapiens
  CDR3 for beta chain variable domain of TCR clone 369399 (TRBV7-9, TRBJ1-2)
CASSLKQNYGYTF

SEQ ID NO: 738799 - protein, 14 aa, Homo sapiens
  CDR3 for alpha chain variable domain of TCR clone 369400 (TRAV8-4, TRAJ34)
CAVSDPGDTDKLIF

SEQ ID NO: 738800 - protein, 14 aa, Homo sapiens
  CDR3 for beta chain variable domain of TCR clone 369400 (TRBV7-2, TRBJ2-7)
CASSPKTSFYEQYF

SEQ ID NO: 738801 - protein, 18 aa, Homo sapiens
  CDR3 for alpha chain variable domain of TCR clone 369401 (TRAV21, TRAJ52)
CPVRPSPAGGTSYGKLTF

SEQ ID NO: 738802 - protein, 17 aa, Homo sapiens
  CDR3 for beta chain variable domain of TCR clone 369401 (TRBV13, TRBJ2-3)
CASSLSRVAGVRNTQYF

SEQ ID NO: 738803 - protein, 15 aa, Homo sapiens
  CDR3 for alpha chain variable domain of TCR clone 369402 (TRAV2, TRAJ9)
CAVEDRGTEGFKTIF

SEQ ID NO: 738804 - protein, 13 aa, Homo sapiens
  CDR3 for beta chain variable domain of TCR clone 369402 (TRBV12-4, TRBJ1-2)
CASSLRQGKGYTF

SEQ ID NO: 738805 - protein, 19 aa, Homo sapiens
  CDR3 for alpha chain variable domain of TCR clone 369403 (TRAV2, TRAJ20)
ILQVREADAAVYRDCKLSF

SEQ ID NO: 738806 - protein, 15 aa, Homo sapiens
  CDR3 for beta chain variable domain of TCR clone 369403 (TRBV28, TRBJ2-3)
CASSPDRQGANTQYF

SEQ ID NO: 738807 - protein, 14 aa, Homo sapiens
  CDR3 for alpha chain variable domain of TCR clone 369404 (TRAV9-2, TRAJ20)
CALRDPLNDYKLSF

SEQ ID NO: 738808 - protein, 14 aa, Homo sapiens
  CDR3 for beta chain variable domain of TCR clone 369404 (TRBV11-2, TRBJ1-2)
CASSLFRGNYGYTF

SEQ ID NO: 738809 - protein, 14 aa, Homo sapiens
  CDR3 for alpha chain variable domain of TCR clone 369405 (TRAV8-3, TRAJ6)
CAVGASRGSYIPTF

SEQ ID NO: 738810 - protein, 17 aa, Homo sapiens
  CDR3 for beta chain variable domain of TCR clone 369405 (TRBV18, TRBJ2-2)
CASSPSDPWQNTGELFF

SEQ ID NO: 738811 - protein, 15 aa, Homo sapiens
  CDR3 for alpha chain variable domain of TCR clone 369406 (TRAV2, TRAJ9)
CAVEGRGTGGFKTIF

SEQ ID NO: 738812 - protein, 13 aa, Homo sapiens
  CDR3 for beta chain variable domain of TCR clone 369406 (TRBV7-9, TRBJ1-2)
CASSLKQNYGYTF

SEQ ID NO: 738813 - protein, 15 aa, Homo sapiens
  CDR3 for alpha chain variable domain of TCR clone 369407 (TRAV13-2, TRAJ10)
CAENRDTGGGNKLTF

SEQ ID NO: 738814 - protein, 16 aa, Homo sapiens
  CDR3 for beta chain variable domain of TCR clone 369407 (TRBV2, TRBJ1-3)
CASSQTGGSTGNTIYF

SEQ ID NO: 738815 - protein, 13 aa, Homo sapiens
  CDR3 for alpha chain variable domain of TCR clone 369408 (TRAV8-3, TRAJ44)
CAVVPGTASNLTF

SEQ ID NO: 738816 - protein, 14 aa, Homo sapiens
  CDR3 for beta chain variable domain of TCR clone 369408 (TRBV25-1, TRBJ1-1)
CASTHLGGNTEAFF

SEQ ID NO: 738817 - protein, 12 aa, Homo sapiens
  CDR3 for alpha chain variable domain of TCR clone 369409 (TRAV13-1, TRAJ53)
AASGGSNYKLTF

SEQ ID NO: 738818 - protein, 16 aa, Homo sapiens
  CDR3 for beta chain variable domain of TCR clone 369409 (TRBV7-3, TRBJ2-2)
CASSLTGTGTTGELFF

SEQ ID NO: 738819 - protein, 14 aa, Homo sapiens
  CDR3 for alpha chain variable domain of TCR clone 369410 (TRAV2, TRAJ9)
CAVEDRSGGFETIF

SEQ ID NO: 738820 - protein, 15 aa, Homo sapiens
  CDR3 for beta chain variable domain of TCR clone 369410 (TRBV28, TRBJ1-3)
CASSMGWASGNTIYF

SEQ ID NO: 738821 - protein, 14 aa, Homo sapiens
  CDR3 for alpha chain variable domain of TCR clone 369411 (TRAV1-2, TRAJ16)
CAVNRFSDGPKLLF

SEQ ID NO: 738822 - protein, 18 aa, Homo sapiens
  CDR3 for beta chain variable domain of TCR clone 369411 (TRBV20-1, TRBJ2-3)
CSASGLAGGPGTTDTQYF

SEQ ID NO: 738823 - protein, 11 aa, Homo sapiens
  CDR3 for alpha chain variable domain of TCR clone 369412 (TRAV25, TRAJ47)
CAGPYGNKLVF

SEQ ID NO: 738824 - protein, 12 aa, Homo sapiens
  CDR3 for beta chain variable domain of TCR clone 369412 (TRBV11-2, TRBJ2-2)
CASSLGGGELFF

SEQ ID NO: 738825 - protein, 17 aa, Homo sapiens
  CDR3 for alpha chain variable domain of TCR clone 369413 (TRAV14/DV4, TRAJ3)
CAMREGPEYSSASKRIF

SEQ ID NO: 738826 - protein, 17 aa, Homo sapiens
  CDR3 for beta chain variable domain of TCR clone 369413 (TRBV20-1, TRBJ1-5)
CSARVGGERQGNQPQHF

SEQ ID NO: 738827 - protein, 13 aa, Homo sapiens
  CDR3 for alpha chain variable domain of TCR clone 369414 (TRAV12-2, TRAJ50)
CAVIVTSYDNVIF

SEQ ID NO: 738828 - protein, 14 aa, Homo sapiens
  CDR3 for beta chain variable domain of TCR clone 369414 (TRBV9, TRBJ2-1)
CASSVDPRGKEQFF

SEQ ID NO: 738829 - protein, 12 aa, Homo sapiens
  CDR3 for alpha chain variable domain of TCR clone 369415 (TRAV12-3, TRAJ20)
CAMVRGDYKLSF

SEQ ID NO: 738830 - protein, 17 aa, Homo sapiens
  CDR3 for beta chain variable domain of TCR clone 369415 (TRBV28, TRBJ2-5)
CASSTPEGDALQESQYF

SEQ ID NO: 738831 - protein, 13 aa, Homo sapiens
  CDR3 for alpha chain variable domain of TCR clone 369416 (TRAV8-6, TRAJ36)
CAVIGPGANNLFF

SEQ ID NO: 738832 - protein, 17 aa, Homo sapiens
  CDR3 for beta chain variable domain of TCR clone 369416 (TRBV20-1, TRBJ2-2)
CSASGSGQGGLTGELFF

SEQ ID NO: 738833 - protein, 14 aa, Homo sapiens
  CDR3 for alpha chain variable domain of TCR clone 369417 (TRAV23/DV6, TRAJ49)
CAASTPTTGNQLYF

SEQ ID NO: 738834 - protein, 14 aa, Homo sapiens
  CDR3 for beta chain variable domain of TCR clone 369417 (TRBV18, TRBJ2-3)
CASSETSASDTQYF

SEQ ID NO: 738835 - protein, 14 aa, Homo sapiens
  CDR3 for alpha chain variable domain of TCR clone 369418 (TRAV26-1, TRAJ38)
CIAYNAGNNRKLIW

SEQ ID NO: 738836 - protein, 16 aa, Homo sapiens
  CDR3 for beta chain variable domain of TCR clone 369418 (TRBV19, TRBJ2-1)
CASSKAGPSSYNEQFF

SEQ ID NO: 738837 - protein, 14 aa, Homo sapiens
  CDR3 for alpha chain variable domain of TCR clone 369419 (TRAV12-3, TRAJ10)
SYLPLTGGGNKLTF

SEQ ID NO: 738838 - protein, 16 aa, Homo sapiens
  CDR3 for beta chain variable domain of TCR clone 369419 (TRBV10-3, TRBJ2-1)
CAISGVGDGVGGEQFF

SEQ ID NO: 738839 - protein, 16 aa, Homo sapiens
  CDR3 for alpha chain variable domain of TCR clone 369420 (TRAV12-3, TRAJ53)
CAMSPGSGGSKYKLTF

SEQ ID NO: 738840 - protein, 13 aa, Homo sapiens
  CDR3 for beta chain variable domain of TCR clone 369420 (TRBV7-9, TRBJ1-2)
CASSLKQNYGYTF

SEQ ID NO: 738841 - protein, 11 aa, Homo sapiens
  CDR3 for alpha chain variable domain of TCR clone 369421 (TRAV3, TRAJ21)
CAVGNFNKFYF

SEQ ID NO: 738842 - protein, 13 aa, Homo sapiens
  CDR3 for beta chain variable domain of TCR clone 369421 (TRBV7-9, TRBJ2-5)
CASPPSGRETQYF

SEQ ID NO: 738843 - protein, 11 aa, Homo sapiens
  CDR3 for alpha chain variable domain of TCR clone 369422 (TRAV2, TRAJ13)
CASGGYQKVTL

SEQ ID NO: 738844 - protein, 16 aa, Homo sapiens
  CDR3 for beta chain variable domain of TCR clone 369422 (TRBV6-1, TRBJ2-5)
CASGETLDRGAETQYF

SEQ ID NO: 738845 - protein, 12 aa, Homo sapiens
  CDR3 for alpha chain variable domain of TCR clone 369423 (TRAV35, TRAJ49)
CAGWNTGNQFYF

SEQ ID NO: 738846 - protein, 13 aa, Homo sapiens
  CDR3 for beta chain variable domain of TCR clone 369423 (TRBV19, TRBJ1-2)
CASSVPGQDGYTF

SEQ ID NO: 738847 - protein, 12 aa, Homo sapiens
  CDR3 for alpha chain variable domain of TCR clone 369424 (TRAV12-3, TRAJ17)
CAMTLTGNKLTF

SEQ ID NO: 738848 - protein, 17 aa, Homo sapiens
  CDR3 for beta chain variable domain of TCR clone 369424 (TRBV20-1, TRBJ2-7)
CSARDQVSGITSSTSGR

SEQ ID NO: 738849 - protein, 21 aa, Homo sapiens
  CDR3 for alpha chain variable domain of TCR clone 369425 (TRAV12-1, TRAJ32)
SSVIQPPTSMNYGGAANKLIF

SEQ ID NO: 738850 - protein, 15 aa, Homo sapiens
  CDR3 for beta chain variable domain of TCR clone 369425 (TRBV7-9, TRBJ2-2)
CASGPLDTFPGELFF

SEQ ID NO: 738851 - protein, 13 aa, Homo sapiens
  CDR3 for alpha chain variable domain of TCR clone 369426 (TRAV21, TRAJ27)
CAARPGNAGKSTP

SEQ ID NO: 738852 - protein, 14 aa, Homo sapiens
  CDR3 for beta chain variable domain of TCR clone 369426 (TRBV7-6, TRBJ2-3)
CASSLGTVTDTQYF

SEQ ID NO: 738853 - protein, 15 aa, Homo sapiens
  CDR3 for alpha chain variable domain of TCR clone 369427 (TRAV34, TRAJ38)
CGADFTPGNNRKLIW

SEQ ID NO: 738854 - protein, 14 aa, Homo sapiens
  CDR3 for beta chain variable domain of TCR clone 369427 (TRBV6-1, TRBJ1-3)
CASVQGGGGNTIYF

SEQ ID NO: 738855 - protein, 14 aa, Homo sapiens
  CDR3 for alpha chain variable domain of TCR clone 369428 (TRAV12-2, TRAJ45)
CAVNIGGGADGLTF

SEQ ID NO: 738856 - protein, 14 aa, Homo sapiens
  CDR3 for beta chain variable domain of TCR clone 369428 (TRBV12-5, TRBJ2-5)
CASGSRTHQETQYF

SEQ ID NO: 738857 - protein, 12 aa, Homo sapiens
  CDR3 for alpha chain variable domain of TCR clone 369429 (TRAV13-1, TRAJ15)
CAASQAGTALIF

SEQ ID NO: 738858 - protein, 13 aa, Homo sapiens
  CDR3 for beta chain variable domain of TCR clone 369429 (TRBV4-1, TRBJ1-1)
CASSRKMNTEAFF

SEQ ID NO: 738859 - protein, 14 aa, Homo sapiens
  CDR3 for alpha chain variable domain of TCR clone 369430 (TRAV12-2, TRAJ13)
CAVKKTGGYQKVTF

SEQ ID NO: 738860 - protein, 15 aa, Homo sapiens
  CDR3 for beta chain variable domain of TCR clone 369430 (TRBV20-1, TRBJ2-1)
CSARGSGGTYNEQFF

SEQ ID NO: 738861 - protein, 14 aa, Homo sapiens
  CDR3 for alpha chain variable domain of TCR clone 369431 (TRAV29/DV5, TRAJ36)
CAARRKTEATNLFF

SEQ ID NO: 738862 - protein, 14 aa, Homo sapiens
  CDR3 for beta chain variable domain of TCR clone 369431 (TRBV12-5, TRBJ2-5)
CASGSRTHQETQYF

SEQ ID NO: 738863 - protein, 12 aa, Homo sapiens
  CDR3 for alpha chain variable domain of TCR clone 369432 (TRAV12-3, TRAJ17)
CAMTLTGNELTF

SEQ ID NO: 738864 - protein, 15 aa, Homo sapiens
  CDR3 for beta chain variable domain of TCR clone 369432 (TRBV6-6, TRBJ2-5)
CASSPGGGLEETQYF

SEQ ID NO: 738865 - protein, 17 aa, Homo sapiens
  CDR3 for alpha chain variable domain of TCR clone 369433 (TRAV8-1, TRAJ43)
CAVPNDMRFGAGTRLTV

SEQ ID NO: 738866 - protein, 17 aa, Homo sapiens
  CDR3 for beta chain variable domain of TCR clone 369433 (TRBV5-4, TRBJ2-1)
CASSSAGGRGPYNEQFF

SEQ ID NO: 738867 - protein, 14 aa, Homo sapiens
  CDR3 for alpha chain variable domain of TCR clone 369434 (TRAV12-3, TRAJ42)
CAMNYAGSQGNLIF

SEQ ID NO: 738868 - protein, 15 aa, Homo sapiens
  CDR3 for beta chain variable domain of TCR clone 369434 (TRBV5-7, TRBJ1-5)
CASSYGKLWDQHQHF

SEQ ID NO: 738869 - protein, 14 aa, Homo sapiens
  CDR3 for alpha chain variable domain of TCR clone 369435 (TRAV20, TRAJ56)
CAVQFGGANSKLTF

SEQ ID NO: 738870 - protein, 19 aa, Homo sapiens
  CDR3 for beta chain variable domain of TCR clone 369435 (TRBV7-2, TRBJ2-3)
CASSFLSRNWGGGTDTQYF

SEQ ID NO: 738871 - protein, 13 aa, Homo sapiens
  CDR3 for alpha chain variable domain of TCR clone 369436 (TRAV29/DV5, TRAJ33)
CAASVESNYQLIW

SEQ ID NO: 738872 - protein, 14 aa, Homo sapiens
  CDR3 for beta chain variable domain of TCR clone 369436 (TRBV11-2, TRBJ2-5)
CASSRTGGIETQYY

SEQ ID NO: 738873 - protein, 11 aa, Homo sapiens
  CDR3 for alpha chain variable domain of TCR clone 369437 (TRAV21, TRAJ39)
ILVNAGNMLTF

SEQ ID NO: 738874 - protein, 16 aa, Homo sapiens
  CDR3 for beta chain variable domain of TCR clone 369437 (TRBV9, TRBJ2-7)
CASRVGLGGGTYEQYF

SEQ ID NO: 738875 - protein, 12 aa, Homo sapiens
  CDR3 for alpha chain variable domain of TCR clone 369438 (TRAV12-3, TRAJ17)
CAMTLTGNKLTF

SEQ ID NO: 738876 - protein, 17 aa, Homo sapiens
  CDR3 for beta chain variable domain of TCR clone 369438 (TRBV11-2, TRBJ2-1)
CASSLYPPRVEYNEQFF

SEQ ID NO: 738877 - protein, 14 aa, Homo sapiens
  CDR3 for alpha chain variable domain of TCR clone 369439 (TRAV1-1, TRAJ28)
CAVQLWGWELPTHF

SEQ ID NO: 738878 - protein, 14 aa, Homo sapiens
  CDR3 for beta chain variable domain of TCR clone 369439 (TRBV20-1, TRBJ1-1)
CSAQTLIGGTEAFF

SEQ ID NO: 738879 - protein, 11 aa, Homo sapiens
  CDR3 for alpha chain variable domain of TCR clone 369440 (TRAV2, TRAJ33)
CAVESNYQLIW

SEQ ID NO: 738880 - protein, 14 aa, Homo sapiens
  CDR3 for beta chain variable domain of TCR clone 369440 (TRBV20-1, TRBJ2-3)
CSARVRGSTDTQYF

SEQ ID NO: 738881 - protein, 14 aa, Homo sapiens
  CDR3 for alpha chain variable domain of TCR clone 369441 (TRAV35, TRAJ22)
CAGLRPGSARQLTF

SEQ ID NO: 738882 - protein, 15 aa, Homo sapiens
  CDR3 for beta chain variable domain of TCR clone 369441 (TRBV4-3, TRBJ1-1)
CASSQELGRGTEAFF

SEQ ID NO: 738883 - protein, 17 aa, Homo sapiens
  CDR3 for alpha chain variable domain of TCR clone 369442 (TRAV14/DV4, TRAJ28)
CAMREPVTGAGSYQLTF

SEQ ID NO: 738884 - protein, 16 aa, Homo sapiens
  CDR3 for beta chain variable domain of TCR clone 369442 (TRBV4-2, TRBJ1-1)
CASSQAGFGMNTEAFF

SEQ ID NO: 738885 - protein, 14 aa, Homo sapiens
  CDR3 for alpha chain variable domain of TCR clone 369443 (TRAV38-1, TRAJ45)
CASHSGGGADGLTF

SEQ ID NO: 738886 - protein, 14 aa, Homo sapiens
  CDR3 for beta chain variable domain of TCR clone 369443 (TRBV12-5, TRBJ2-5)
CASGSRTHQETQYF

SEQ ID NO: 738887 - protein, 14 aa, Homo sapiens
  CDR3 for alpha chain variable domain of TCR clone 369444 (TRAV16, TRAJ57)
CALPTQGGSEKLVF

SEQ ID NO: 738888 - protein, 15 aa, Homo sapiens
  CDR3 for beta chain variable domain of TCR clone 369444 (TRBV28, TRBJ1-3)
CASWGGASLWKHHIF

SEQ ID NO: 738889 - protein, 14 aa, Homo sapiens
  CDR3 for alpha chain variable domain of TCR clone 369445 (TRAV12-2, TRAJ13)
CAVKKTGCYQKVTF

SEQ ID NO: 738890 - protein, 15 aa, Homo sapiens
  CDR3 for beta chain variable domain of TCR clone 369445 (TRBV27, TRBJ2-1)
CTSSNGGGSSNEQFF

SEQ ID NO: 738891 - protein, 13 aa, Homo sapiens
  CDR3 for alpha chain variable domain of TCR clone 369446 (TRAV2, TRAJ40)
CAVVTSVTYKYIF

SEQ ID NO: 738892 - protein, 14 aa, Homo sapiens
  CDR3 for beta chain variable domain of TCR clone 369446 (TRBV7-2, TRBJ2-7)
CASSPKTGFYEQYF

SEQ ID NO: 738893 - protein, 14 aa, Homo sapiens
  CDR3 for alpha chain variable domain of TCR clone 369447 (TRAV12-3, TRAJ10)
SHLPLTGGGNKLTF

SEQ ID NO: 738894 - protein, 17 aa, Homo sapiens
  CDR3 for beta chain variable domain of TCR clone 369447 (TRBV28, TRBJ2-5)
CASSTPGGDALQETQYF

SEQ ID NO: 738895 - protein, 17 aa, Homo sapiens
  CDR3 for alpha chain variable domain of TCR clone 369448 (TRAV3, TRAJ6)
CAVRYGPRAGGSYIPTF

SEQ ID NO: 738896 - protein, 14 aa, Homo sapiens
  CDR3 for beta chain variable domain of TCR clone 369448 (TRBV7-2, TRBJ2-7)
CASGPKTSFYEQYF

SEQ ID NO: 738897 - protein, 14 aa, Homo sapiens
  CDR3 for alpha chain variable domain of TCR clone 369449 (TRAV4, TRAJ17)
CLVGDMAAGNKLTF

SEQ ID NO: 738898 - protein, 13 aa, Homo sapiens
  CDR3 for beta chain variable domain of TCR clone 369449 (TRBV18, TRBJ2-7)
CASRSGGGYEQYF

SEQ ID NO: 738899 - protein, 15 aa, Homo sapiens
  CDR3 for alpha chain variable domain of TCR clone 369450 (TRAV4, TRAJ39)
CLVGPNNNAGNMLTF

SEQ ID NO: 738900 - protein, 14 aa, Homo sapiens
  CDR3 for beta chain variable domain of TCR clone 369450 (TRBV19, TRBJ2-7)
CASNFRDTFTGMYV

SEQ ID NO: 738901 - protein, 12 aa, Homo sapiens
  CDR3 for alpha chain variable domain of TCR clone 369451 (TRAV13-1, TRAJ49)
CAASPMGNQFYF

SEQ ID NO: 738902 - protein, 22 aa, Homo sapiens
  CDR3 for beta chain variable domain of TCR clone 369451 (TRBV15, TRBJ2-7)
AWGTQPCTCVPPAEIGGNEQYF

SEQ ID NO: 738903 - protein, 16 aa, Homo sapiens
  CDR3 for alpha chain variable domain of TCR clone 369452 (TRAV16, TRAJ4)
CALSRMFSGGYNKLIS

SEQ ID NO: 738904 - protein, 15 aa, Homo sapiens
  CDR3 for beta chain variable domain of TCR clone 369452 (TRBV2, TRBJ2-4)
CASSLKTGTSNIQYF

SEQ ID NO: 738905 - protein, 15 aa, Homo sapiens
  CDR3 for alpha chain variable domain of TCR clone 369453 (TRAV1-2, TRAJ28)
CAVQYSGAGSYQLTF

SEQ ID NO: 738906 - protein, 15 aa, Homo sapiens
  CDR3 for beta chain variable domain of TCR clone 369453 (TRBV9, TRBJ1-6)
FASSVAGTGDSPLHF

SEQ ID NO: 738907 - protein, 14 aa, Homo sapiens
  CDR3 for alpha chain variable domain of TCR clone 369454 (TRAV26-1, TRAJ38)
CIADNAGNNRKLIW

SEQ ID NO: 738908 - protein, 17 aa, Homo sapiens
  CDR3 for beta chain variable domain of TCR clone 369454 (TRBV7-9, TRBJ2-3)
CASSHTVAGDLTDTQYF

SEQ ID NO: 738909 - protein, 16 aa, Homo sapiens
  CDR3 for alpha chain variable domain of TCR clone 369455 (TRAV23/DV6, TRAJ48)
CAASGVVNFGNEKLTF

SEQ ID NO: 738910 - protein, 16 aa, Homo sapiens
  CDR3 for beta chain variable domain of TCR clone 369455 (TRBV12-5, TRBJ2-5)
CASGPRTSGNQETQYF

SEQ ID NO: 738911 - protein, 14 aa, Homo sapiens
  CDR3 for alpha chain variable domain of TCR clone 369456 (TRAV12-3, TRAJ10)
RHLPLTGGGNKLTF

SEQ ID NO: 738912 - protein, 13 aa, Homo sapiens
  CDR3 for beta chain variable domain of TCR clone 369456 (TRBV9, TRBJ2-1)
CASSPSGGNEQFF

SEQ ID NO: 738913 - protein, 14 aa, Homo sapiens
  CDR3 for alpha chain variable domain of TCR clone 369457 (TRAV12-1, TRAJ22)
CVVTVSGSARQLTF

SEQ ID NO: 738914 - protein, 15 aa, Homo sapiens
  CDR3 for beta chain variable domain of TCR clone 369457 (TRBV28, TRBJ2-3)
CASSLPGTQTGTQYF

SEQ ID NO: 738915 - protein, 16 aa, Homo sapiens
  CDR3 for alpha chain variable domain of TCR clone 369458 (TRAV21, TRAJ22)
CAVKKVSSVSARQLTC

SEQ ID NO: 738916 - protein, 15 aa, Homo sapiens
  CDR3 for beta chain variable domain of TCR clone 369458 (TRBV25-1, TRBJ1-4)
CASSPGDSTNEKLFF

SEQ ID NO: 738917 - protein, 17 aa, Homo sapiens
  CDR3 for alpha chain variable domain of TCR clone 369459 (TRAV38-1, TRAJ45)
CAFMKHYMGGGADGLTF

SEQ ID NO: 738918 - protein, 15 aa, Homo sapiens
  CDR3 for beta chain variable domain of TCR clone 369459 (TRBV6-1, TRBJ2-3)
CASSERGGITDTQYF

SEQ ID NO: 738919 - protein, 11 aa, Homo sapiens
  CDR3 for alpha chain variable domain of TCR clone 369460 (TRAV17, TRAJ9)
CATTGGFTTIF

SEQ ID NO: 738920 - protein, 14 aa, Homo sapiens
  CDR3 for beta chain variable domain of TCR clone 369460 (TRBV7-9, TRBJ2-2)
CASSGLADAGELFF

SEQ ID NO: 738921 - protein, 12 aa, Homo sapiens
  CDR3 for alpha chain variable domain of TCR clone 369461 (TRAV38-2/DV8, TRAJ49)
CAYRSSGNQFYF

SEQ ID NO: 738922 - protein, 14 aa, Homo sapiens
  CDR3 for beta chain variable domain of TCR clone 369461 (TRBV5-1, TRBJ2-7)
CASSLTSGGYEQYF

SEQ ID NO: 738923 - protein, 11 aa, Homo sapiens
  CDR3 for alpha chain variable domain of TCR clone 369462 (TRAV3, TRAJ21)
GAVGNFNKFYF

SEQ ID NO: 738924 - protein, 14 aa, Homo sapiens
  CDR3 for beta chain variable domain of TCR clone 369462 (TRBV18, TRBJ2-5)
CASSPGVSQETQYF

SEQ ID NO: 738925 - protein, 12 aa, Homo sapiens
  CDR3 for alpha chain variable domain of TCR clone 369463 (TRAV38-1, TRAJ20)
CAFIWNDHKLSF

SEQ ID NO: 738926 - protein, 14 aa, Homo sapiens
  CDR3 for beta chain variable domain of TCR clone 369463 (TRBV19, TRBJ2-1)
CASSMGSGATEQFF

SEQ ID NO: 738927 - protein, 11 aa, Homo sapiens
  CDR3 for alpha chain variable domain of TCR clone 369464 (TRAV3, TRAJ17)
PRGAAGNKLTF

SEQ ID NO: 738928 - protein, 12 aa, Homo sapiens
  CDR3 for beta chain variable domain of TCR clone 369464 (TRBV11-2, TRBJ2-1)
CASSPGNNEQFF

SEQ ID NO: 738929 - protein, 13 aa, Homo sapiens
  CDR3 for alpha chain variable domain of TCR clone 369465 (TRAV12-1, TRAJ16)
CVVSTRNGQKLLF

SEQ ID NO: 738930 - protein, 19 aa, Homo sapiens
  CDR3 for beta chain variable domain of TCR clone 369465 (TRBV6-1, TRBJ2-5)
CASSRFGAGGPGLEETQDF

SEQ ID NO: 738931 - protein, 19 aa, Homo sapiens
  CDR3 for alpha chain variable domain of TCR clone 369466 (TRAV29/DV5, TRAJ49)
CSVLLCSKLTVDTGNQFYF

SEQ ID NO: 738932 - protein, 17 aa, Homo sapiens
  CDR3 for beta chain variable domain of TCR clone 369466 (TRBV13, TRBJ2-3)
CDSSLSRVAGGRNTQYF

SEQ ID NO: 738933 - protein, 13 aa, Homo sapiens
  CDR3 for alpha chain variable domain of TCR clone 369467 (TRAV20, TRAJ34)
CAFSSYNTDKLIF

SEQ ID NO: 738934 - protein, 13 aa, Homo sapiens
  CDR3 for beta chain variable domain of TCR clone 369467 (TRBV7-9, TRBJ1-2)
CVSSLKQNYGYTF

SEQ ID NO: 738935 - protein, 13 aa, Homo sapiens
  CDR3 for alpha chain variable domain of TCR clone 369468 (TRAV30, TRAJ24)
CGTVTDSWGKLQF

SEQ ID NO: 738936 - protein, 14 aa, Homo sapiens
  CDR3 for beta chain variable domain of TCR clone 369468 (TRBV6-3, TRBJ2-2)
CASTYTPDTWELFF

SEQ ID NO: 738937 - protein, 13 aa, Homo sapiens
  CDR3 for alpha chain variable domain of TCR clone 369469 (TRAV2, TRAJ15)
CDVASQAGTALIF

SEQ ID NO: 738938 - protein, 15 aa, Homo sapiens
  CDR3 for beta chain variable domain of TCR clone 369469 (TRBV7-3, TRBJ2-2)
CASSETGQGTGELFF

SEQ ID NO: 738939 - protein, 16 aa, Homo sapiens
  CDR3 for alpha chain variable domain of TCR clone 369470 (TRAV23/DV6, TRAJ9)
CAASIGGNTGGFKTIF

SEQ ID NO: 738940 - protein, 15 aa, Homo sapiens
  CDR3 for beta chain variable domain of TCR clone 369470 (TRBV2, TRBJ2-1)
CASSELAGSYNEQFF

SEQ ID NO: 738941 - protein, 10 aa, Homo sapiens
  CDR3 for alpha chain variable domain of TCR clone 369471 (TRAV8-4, TRAJ43)
CAVIADDMRF

SEQ ID NO: 738942 - protein, 15 aa, Homo sapiens
  CDR3 for beta chain variable domain of TCR clone 369471 (TRBV5-1, TRBJ2-3)
CASSVTSGSTDTQYF

SEQ ID NO: 738943 - protein, 15 aa, Homo sapiens
  CDR3 for alpha chain variable domain of TCR clone 369472 (TRAV25, TRAJ41)
CAGPWNSNSGYALNF

SEQ ID NO: 738944 - protein, 14 aa, Homo sapiens
  CDR3 for beta chain variable domain of TCR clone 369472 (TRBV11-2, TRBJ1-5)
CASSSRTGNQPQHF

SEQ ID NO: 738945 - protein, 14 aa, Homo sapiens
  CDR3 for alpha chain variable domain of TCR clone 369473 (TRAV26-1, TRAJ38)
CIADNAGNNRKLMW

SEQ ID NO: 738946 - protein, 17 aa, Homo sapiens
  CDR3 for beta chain variable domain of TCR clone 369473 (TRBV11-2, TRBJ2-1)
CASSLYPPGVEYNEQFF

SEQ ID NO: 738947 - protein, 13 aa, Homo sapiens
  CDR3 for alpha chain variable domain of TCR clone 369474 (TRAV3, TRAJ26)
CAVSRGYGQNFVF

SEQ ID NO: 738948 - protein, 15 aa, Homo sapiens
  CDR3 for beta chain variable domain of TCR clone 369474 (TRBV25-1, TRBJ2-1)
CASSLARGAYNEQFF

SEQ ID NO: 738949 - protein, 14 aa, Homo sapiens
  CDR3 for alpha chain variable domain of TCR clone 369475 (TRAV1-2, TRAJ16)
CAVNRFSDGQKLLF

SEQ ID NO: 738950 - protein, 17 aa, Homo sapiens
  CDR3 for beta chain variable domain of TCR clone 369475 (TRBV4-1, TRBJ2-7)
CASSQGRGLQTSYEQYF

SEQ ID NO: 738951 - protein, 14 aa, Homo sapiens
  CDR3 for alpha chain variable domain of TCR clone 369476 (TRAV17, TRAJ57)
CATDPQGGSEKLVF

SEQ ID NO: 738952 - protein, 14 aa, Homo sapiens
  CDR3 for beta chain variable domain of TCR clone 369476 (TRBV7-8, TRBJ2-7)
CASSTRDRVYEQYF

SEQ ID NO: 738953 - protein, 11 aa, Homo sapiens
  CDR3 for alpha chain variable domain of TCR clone 369477 (TRAV1-2, TRAJ40)
CAVPGTYKYIF

SEQ ID NO: 738954 - protein, 15 aa, Homo sapiens
  CDR3 for beta chain variable domain of TCR clone 369477 (TRBV5-7, TRBJ1-5)
CASSYGKLWDQPQYF

SEQ ID NO: 738955 - protein, 14 aa, Homo sapiens
  CDR3 for alpha chain variable domain of TCR clone 369478 (TRAV1-2, TRAJ16)
CAVNRFSDGQKLLF

SEQ ID NO: 738956 - protein, 16 aa, Homo sapiens
  CDR3 for beta chain variable domain of TCR clone 369478 (TRBV7-3, TRBJ2-2)
CASSLTGTGTTGELFF

SEQ ID NO: 738957 - protein, 15 aa, Homo sapiens
  CDR3 for alpha chain variable domain of TCR clone 369479 (TRAV4, TRAJ32)
CLVGDWGGATNKLIF

SEQ ID NO: 738958 - protein, 15 aa, Homo sapiens
  CDR3 for beta chain variable domain of TCR clone 369479 (TRBV6-5, TRBJ2-1)
CASSYDAGAGNEQFF

SEQ ID NO: 738959 - protein, 15 aa, Homo sapiens
  CDR3 for alpha chain variable domain of TCR clone 369480 (TRAV25, TRAJ8)
CAGPPPDTGFQKLVF

SEQ ID NO: 738960 - protein, 14 aa, Homo sapiens
  CDR3 for beta chain variable domain of TCR clone 369480 (TRBV11-2, TRBJ2-7)
CASSLGAGAYEQYF

SEQ ID NO: 738961 - protein, 13 aa, Homo sapiens
  CDR3 for alpha chain variable domain of TCR clone 369481 (TRAV21, TRAJ3)
CCEPYSSASKIIF

SEQ ID NO: 738962 - protein, 16 aa, Homo sapiens
  CDR3 for beta chain variable domain of TCR clone 369481 (TRBV2, TRBJ2-3)
CASSTSVEGVTDTQYF

SEQ ID NO: 738963 - protein, 14 aa, Homo sapiens
  CDR3 for alpha chain variable domain of TCR clone 369482 (TRAV8-3, TRAJ39)
CAVGANKAGNMLTF

SEQ ID NO: 738964 - protein, 12 aa, Homo sapiens
  CDR3 for beta chain variable domain of TCR clone 369482 (TRBV28, TRBJ1-3)
CASVSSGNTIYF

SEQ ID NO: 738965 - protein, 14 aa, Homo sapiens
  CDR3 for alpha chain variable domain of TCR clone 369483 (TRAV35, TRAJ32)
CAGIYGGATNKLIF

SEQ ID NO: 738966 - protein, 12 aa, Homo sapiens
  CDR3 for beta chain variable domain of TCR clone 369483 (TRBV28, TRBJ1-2)
CASARGSYGYTF

SEQ ID NO: 738967 - protein, 12 aa, Homo sapiens
  CDR3 for alpha chain variable domain of TCR clone 369484 (TRAV8-3, TRAJ20)
CAVGANDYKLSF

SEQ ID NO: 738968 - protein, 13 aa, Homo sapiens
  CDR3 for beta chain variable domain of TCR clone 369484 (TRBV7-2, TRBJ2-7)
CASSSPSGSEQYF

SEQ ID NO: 738969 - protein, 13 aa, Homo sapiens
  CDR3 for alpha chain variable domain of TCR clone 369485 (TRAV16, TRAJ12)
CALRMDSSYKLIF

SEQ ID NO: 738970 - protein, 16 aa, Homo sapiens
  CDR3 for beta chain variable domain of TCR clone 369485 (TRBV12-5, TRBJ2-5)
CASGPRTSGNQETQYF

SEQ ID NO: 738971 - protein, 12 aa, Homo sapiens
  CDR3 for alpha chain variable domain of TCR clone 369486 (TRAV12-2, TRAJ4)
GWPEGGSNKLIF

SEQ ID NO: 738972 - protein, 14 aa, Homo sapiens
  CDR3 for beta chain variable domain of TCR clone 369486 (TRBV19, TRBJ2-1)
CASPTFVLSGEQFF

SEQ ID NO: 738973 - protein, 13 aa, Homo sapiens
  CDR3 for alpha chain variable domain of TCR clone 369487 (TRAV8-6, TRAJ49)
CAVITNTGNQFYF

SEQ ID NO: 738974 - protein, 12 aa, Homo sapiens
  CDR3 for beta chain variable domain of TCR clone 369487 (TRBV12-4, TRBJ1-3)
CASSFSGNTIYF

SEQ ID NO: 738975 - protein, 15 aa, Homo sapiens
  CDR3 for alpha chain variable domain of TCR clone 369488 (TRAV17, TRAJ45)
TSVLRTGGGADGLTF

SEQ ID NO: 738976 - protein, 13 aa, Homo sapiens
  CDR3 for beta chain variable domain of TCR clone 369488 (TRBV4-1, TRBJ2-1)
CASSQAGGDEQFF

SEQ ID NO: 738977 - protein, 10 aa, Homo sapiens
  CDR3 for alpha chain variable domain of TCR clone 369489 (TRAV23/DV6, TRAJ57)
CAASSTLSQG

SEQ ID NO: 738978 - protein, 14 aa, Homo sapiens
  CDR3 for beta chain variable domain of TCR clone 369489 (TRBV25-1, TRBJ1-1)
FASTRLGGNTEAFF

SEQ ID NO: 738979 - protein, 15 aa, Homo sapiens
  CDR3 for alpha chain variable domain of TCR clone 369490 (TRAV8-4, TRAJ37)
CAVSKVSGNTGKLIF

SEQ ID NO: 738980 - protein, 16 aa, Homo sapiens
  CDR3 for beta chain variable domain of TCR clone 369490 (TRBV28, TRBJ2-2)
CTSVPAYGDWAGSCFF

SEQ ID NO: 738981 - protein, 13 aa, Homo sapiens
  CDR3 for alpha chain variable domain of TCR clone 369491 (TRAV13-2, TRAJ48)
CAEMDFGNEKLTF

SEQ ID NO: 738982 - protein, 14 aa, Homo sapiens
  CDR3 for beta chain variable domain of TCR clone 369491 (TRBV19, TRBJ1-5)
CASGTEVYNQPQHC

SEQ ID NO: 738983 - protein, 14 aa, Homo sapiens
  CDR3 for alpha chain variable domain of TCR clone 369492 (TRAV35, TRAJ50)
CAGHRKTSYDKLIF

SEQ ID NO: 738984 - protein, 15 aa, Homo sapiens
  CDR3 for beta chain variable domain of TCR clone 369492 (TRBV6-3, TRBJ2-7)
CASSSPGTVFYEQYF

SEQ ID NO: 738985 - protein, 15 aa, Homo sapiens
  CDR3 for alpha chain variable domain of TCR clone 369493 (TRAV20, TRAJ23)
CAVQAVRNQGGKVIF

SEQ ID NO: 738986 - protein, 16 aa, Homo sapiens
  CDR3 for beta chain variable domain of TCR clone 369493 (TRBV27, TRBJ2-7)
CASSKQGRGWAYEQYF

SEQ ID NO: 738987 - protein, 11 aa, Homo sapiens
  CDR3 for alpha chain variable domain of TCR clone 369494 (TRAV3, TRAJ21)
CAVGNFNKFYY

SEQ ID NO: 738988 - protein, 16 aa, Homo sapiens
  CDR3 for beta chain variable domain of TCR clone 369494 (TRBV19, TRBJ2-1)
CANSRAGPSSYNEQFF

SEQ ID NO: 738989 - protein, 16 aa, Homo sapiens
  CDR3 for alpha chain variable domain of TCR clone 369495 (TRAV20, TRAJ53)
CAVQAESGGSNYKLTF

SEQ ID NO: 738990 - protein, 14 aa, Homo sapiens
  CDR3 for beta chain variable domain of TCR clone 369495 (TRBV19, TRBJ2-7)
CASTVQGRPYEQYF

SEQ ID NO: 738991 - protein, 12 aa, Homo sapiens
  CDR3 for alpha chain variable domain of TCR clone 369496 (TRAV12-1, TRAJ40)
CLFYSGTYKYIF

SEQ ID NO: 738992 - protein, 18 aa, Homo sapiens
  CDR3 for beta chain variable domain of TCR clone 369496 (TRBV12-4, TRBJ2-2)
CAGSLVAGTRGRTGELFF

SEQ ID NO: 738993 - protein, 16 aa, Homo sapiens
  CDR3 for alpha chain variable domain of TCR clone 369497 (TRAV13-1, TRAJ18)
CAASRMRGSTMGRLYF

SEQ ID NO: 738994 - protein, 16 aa, Homo sapiens
  CDR3 for beta chain variable domain of TCR clone 369497 (TRBV27, TRBJ1-1)
CASSSRGRTGYTEAFF

SEQ ID NO: 738995 - protein, 14 aa, Homo sapiens
  CDR3 for alpha chain variable domain of TCR clone 369498 (TRAV1-1, TRAJ27)
CAVIYNTNAGKSTF

SEQ ID NO: 738996 - protein, 16 aa, Homo sapiens
  CDR3 for beta chain variable domain of TCR clone 369498 (TRBV10-3, TRBJ1-2)
CAISDKVSGPFYGYTF

SEQ ID NO: 738997 - protein, 13 aa, Homo sapiens
  CDR3 for alpha chain variable domain of TCR clone 369499 (TRAV26-1, TRAJ34)
CIVRPWITDKLIF

SEQ ID NO: 738998 - protein, 14 aa, Homo sapiens
  CDR3 for beta chain variable domain of TCR clone 369499 (TRBV7-2, TRBJ1-1)
CASSFLTGTTEAFF

SEQ ID NO: 738999 - protein, 15 aa, Homo sapiens
  CDR3 for alpha chain variable domain of TCR clone 369500 (TRAV23/DV6, TRAJ58)
CAARLLRGETSGSRL

SEQ ID NO: 739000 - protein, 13 aa, Homo sapiens
  CDR3 for beta chain variable domain of TCR clone 369500 (TRBV7-3, TRBJ1-1)
CASSQDWGAEAFF

SEQ ID NO: 739001 - protein, 13 aa, Homo sapiens
  CDR3 for alpha chain variable domain of TCR clone 369501 (TRAV35, TRAJ21)
CAGQLSNFNKFYF

SEQ ID NO: 739002 - protein, 13 aa, Homo sapiens
  CDR3 for beta chain variable domain of TCR clone 369501 (TRBV4-1, TRBJ2-1)
CASSQAGGDEQFF

SEQ ID NO: 739003 - protein, 12 aa, Homo sapiens
  CDR3 for alpha chain variable domain of TCR clone 369502 (TRAV8-6, TRAJ8)
CAVTQGFQKLVF

SEQ ID NO: 739004 - protein, 16 aa, Homo sapiens
  CDR3 for beta chain variable domain of TCR clone 369502 (TRBV7-3, TRBJ2-2)
CASSLKRGTLAGELFF

SEQ ID NO: 739005 - protein, 17 aa, Homo sapiens
  CDR3 for alpha chain variable domain of TCR clone 369503 (TRAV13-2, TRAJ5)
CAESVVIVGHGQERTYF

SEQ ID NO: 739006 - protein, 18 aa, Homo sapiens
  CDR3 for beta chain variable domain of TCR clone 369503 (TRBV4-1, TRBJ2-3)
CASSHQLAGGRSTDTQYF

SEQ ID NO: 739007 - protein, 16 aa, Homo sapiens
  CDR3 for alpha chain variable domain of TCR clone 369504 (TRAV17, TRAJ53)
CATDALSGGSNSKLTF

SEQ ID NO: 739008 - protein, 12 aa, Homo sapiens
  CDR3 for beta chain variable domain of TCR clone 369504 (TRBV5-1, TRBJ2-7)
CASSFRGYEQYF

SEQ ID NO: 739009 - protein, 14 aa, Homo sapiens
  CDR3 for alpha chain variable domain of TCR clone 369505 (TRAV12-1, TRAJ34)
CVVNLDYNTDKLIF

SEQ ID NO: 739010 - protein, 20 aa, Homo sapiens
  CDR3 for beta chain variable domain of TCR clone 369505 (TRBV7-3, TRBJ2-7)
CARSPWGLAGMVAVLRAGHQ

SEQ ID NO: 739011 - protein, 14 aa, Homo sapiens
  CDR3 for alpha chain variable domain of TCR clone 369506 (TRAV2, TRAJ37)
CAVDFTSNTGKLIF

SEQ ID NO: 739012 - protein, 13 aa, Homo sapiens
  CDR3 for beta chain variable domain of TCR clone 369506 (TRBV11-2, TRBJ2-5)
CASSFSSQETQYF

SEQ ID NO: 739013 - protein, 18 aa, Homo sapiens
  CDR3 for alpha chain variable domain of TCR clone 369507 (TRAV21, TRAJ52)
CAVRPSPAGGTSYGKLTF

SEQ ID NO: 739014 - protein, 20 aa, Homo sapiens
  CDR3 for beta chain variable domain of TCR clone 369507 (TRBV7-8, TRBJ2-2)
CASSHLFPGPTIHITGELFL

SEQ ID NO: 739015 - protein, 15 aa, Homo sapiens
  CDR3 for alpha chain variable domain of TCR clone 369508 (TRAV8-4, TRAJ36)
CAVRKSWTGANNLFF

SEQ ID NO: 739016 - protein, 13 aa, Homo sapiens
  CDR3 for beta chain variable domain of TCR clone 369508 (TRBV11-2, TRBJ2-5)
CASSSTGEETQYF

SEQ ID NO: 739017 - protein, 11 aa, Homo sapiens
  CDR3 for alpha chain variable domain of TCR clone 369509 (TRAV3, TRAJ21)
CAVGNFNKFYF

SEQ ID NO: 739018 - protein, 16 aa, Homo sapiens
  CDR3 for beta chain variable domain of TCR clone 369509 (TRBV7-9, TRBJ2-3)
CASSPWREVGTDTQYF

SEQ ID NO: 739019 - protein, 16 aa, Homo sapiens
  CDR3 for alpha chain variable domain of TCR clone 369510 (TRAV12-3, TRAJ28)
CAMRADSGAGSYQLTF

SEQ ID NO: 739020 - protein, 16 aa, Homo sapiens
  CDR3 for beta chain variable domain of TCR clone 369510 (TRBV7-2, TRBJ1-3)
CASSRLEASSGNTIYF

SEQ ID NO: 739021 - protein, 13 aa, Homo sapiens
  CDR3 for alpha chain variable domain of TCR clone 369511 (TRAV20, TRAJ37)
CAGCSSNTGELIF

SEQ ID NO: 739022 - protein, 14 aa, Homo sapiens
  CDR3 for beta chain variable domain of TCR clone 369511 (TRBV4-1, TRBJ2-2)
CASSQAVNTGELFF

SEQ ID NO: 739023 - protein, 13 aa, Homo sapiens
  CDR3 for alpha chain variable domain of TCR clone 369512 (TRAV13-1, TRAJ8)
CAARNTGFQQLVF

SEQ ID NO: 739024 - protein, 13 aa, Homo sapiens
  CDR3 for beta chain variable domain of TCR clone 369512 (TRBV19, TRBJ2-7)
CASSMGSWPEQYF

SEQ ID NO: 739025 - protein, 12 aa, Homo sapiens
  CDR3 for alpha chain variable domain of TCR clone 369513 (TRAV26-2, TRAJ21)
CILEGNFNKFYF

SEQ ID NO: 739026 - protein, 14 aa, Homo sapiens
  CDR3 for beta chain variable domain of TCR clone 369513 (TRBV12-4, TRBJ1-1)
CASSLGTGGTEAFF

SEQ ID NO: 739027 - protein, 11 aa, Homo sapiens
  CDR3 for alpha chain variable domain of TCR clone 369514 (TRAV26-1, TRAJ37)
CIVRVGRILIF

SEQ ID NO: 739028 - protein, 16 aa, Homo sapiens
  CDR3 for beta chain variable domain of TCR clone 369514 (TRBV5-1, TRBJ2-1)
CASSFGVSGSYNEQFF

SEQ ID NO: 739029 - protein, 12 aa, Homo sapiens
  CDR3 for alpha chain variable domain of TCR clone 369515 (TRAV17, TRAJ20)
CATDSNDYKLSF

SEQ ID NO: 739030 - protein, 16 aa, Homo sapiens
  CDR3 for beta chain variable domain of TCR clone 369515 (TRBV20-1, TRBJ2-1)
CSARDRLKSLYNEQFF

SEQ ID NO: 739031 - protein, 12 aa, Homo sapiens
  CDR3 for alpha chain variable domain of TCR clone 369516 (TRAV12-3, TRAJ41)
CAMSYSGYALNS

SEQ ID NO: 739032 - protein, 13 aa, Homo sapiens
  CDR3 for beta chain variable domain of TCR clone 369516 (TRBV7-3, TRBJ2-1)
CASSLDSYNEQFF

SEQ ID NO: 739033 - protein, 16 aa, Homo sapiens
  CDR3 for alpha chain variable domain of TCR clone 369517 (TRAV12-3, TRAJ53)
CAMSPGSGGSNYKLTF

SEQ ID NO: 739034 - protein, 16 aa, Homo sapiens
  CDR3 for beta chain variable domain of TCR clone 369517 (TRBV29-1, TRBJ2-5)
PAARTERHPVLRAWHA

SEQ ID NO: 739035 - protein, 15 aa, Homo sapiens
  CDR3 for alpha chain variable domain of TCR clone 369518 (TRAV8-4, TRAJ8)
CAVSDLNTGFQKLVF

SEQ ID NO: 739036 - protein, 13 aa, Homo sapiens
  CDR3 for beta chain variable domain of TCR clone 369518 (TRBV4-2, TRBJ1-1)
CASSQAGNTEAFF

SEQ ID NO: 739037 - protein, 14 aa, Homo sapiens
  CDR3 for alpha chain variable domain of TCR clone 369519 (TRAV12-2, TRAJ17)
CAVLFKAAGNKLTF

SEQ ID NO: 739038 - protein, 17 aa, Homo sapiens
  CDR3 for beta chain variable domain of TCR clone 369519 (TRBV11-2, TRBJ2-1)
CASSLYPPGVEYNEQFC

SEQ ID NO: 739039 - protein, 14 aa, Homo sapiens
  CDR3 for alpha chain variable domain of TCR clone 369520 (TRAV13-1, TRAJ26)
CAASSAHYGENFVF

SEQ ID NO: 739040 - protein, 17 aa, Homo sapiens
  CDR3 for beta chain variable domain of TCR clone 369520 (TRBV25-1, TRBJ2-5)
CAGSRRGGRGGQETQYC

SEQ ID NO: 739041 - protein, 15 aa, Homo sapiens
  CDR3 for alpha chain variable domain of TCR clone 369521 (TRAV3, TRAJ22)
CAVRDRGGSARQLTF

SEQ ID NO: 739042 - protein, 13 aa, Homo sapiens
  CDR3 for beta chain variable domain of TCR clone 369521 (TRBV20-1, TRBJ2-5)
CSAREGGKETQYF

SEQ ID NO: 739043 - protein, 13 aa, Homo sapiens
  CDR3 for alpha chain variable domain of TCR clone 369522 (TRAV21, TRAJ20)
CAVSRLGDYKLSF

SEQ ID NO: 739044 - protein, 13 aa, Homo sapiens
  CDR3 for beta chain variable domain of TCR clone 369522 (TRBV7-3, TRBJ1-1)
CASGPAGGLEAFF

SEQ ID NO: 739045 - protein, 13 aa, Homo sapiens
  CDR3 for alpha chain variable domain of TCR clone 369523 (TRAV26-1, TRAJ30)
CIVRVESNDKIIF

SEQ ID NO: 739046 - protein, 15 aa, Homo sapiens
  CDR3 for beta chain variable domain of TCR clone 369523 (TRBV6-1, TRBJ2-3)
CASSERGGIADTQYF

SEQ ID NO: 739047 - protein, 17 aa, Homo sapiens
  CDR3 for alpha chain variable domain of TCR clone 369524 (TRAV26-1, TRAJ37)
CIVRVITVSSNTGKLIF

SEQ ID NO: 739048 - protein, 12 aa, Homo sapiens
  CDR3 for beta chain variable domain of TCR clone 369524 (TRBV10-2, TRBJ2-3)
CASSPESDTQYF

SEQ ID NO: 739049 - protein, 10 aa, Homo sapiens
  CDR3 for alpha chain variable domain of TCR clone 369525 (TRAV26-1, TRAJ40)
CIAGTYKYIF

SEQ ID NO: 739050 - protein, 13 aa, Homo sapiens
  CDR3 for beta chain variable domain of TCR clone 369525 (TRBV6-5, TRBJ2-5)
CASSPQGGETQYF

SEQ ID NO: 739051 - protein, 16 aa, Homo sapiens
  CDR3 for alpha chain variable domain of TCR clone 369526 (TRAV20, TRAJ26)
CAVQHRRGNYGQNFVF

SEQ ID NO: 739052 - protein, 15 aa, Homo sapiens
  CDR3 for beta chain variable domain of TCR clone 369526 (TRBV7-2, TRBJ2-7)
CASSWGQGAIYEQYF

SEQ ID NO: 739053 - protein, 15 aa, Homo sapiens
  CDR3 for alpha chain variable domain of TCR clone 369527 (TRAV13-1, TRAJ27)
CAARELNTNAGKSTF

SEQ ID NO: 739054 - protein, 13 aa, Homo sapiens
  CDR3 for beta chain variable domain of TCR clone 369527 (TRBV4-2, TRBJ2-1)
CASSPGTYNEQFF

SEQ ID NO: 739055 - protein, 12 aa, Homo sapiens
  CDR3 for alpha chain variable domain of TCR clone 369528 (TRAV2, TRAJ10)
CASTGGGNKLTF

SEQ ID NO: 739056 - protein, 13 aa, Homo sapiens
  CDR3 for beta chain variable domain of TCR clone 369528 (TRBV6-1, TRBJ1-1)
CASSRQGNTEAFF

SEQ ID NO: 739057 - protein, 12 aa, Homo sapiens
  CDR3 for alpha chain variable domain of TCR clone 369529 (TRAV2, TRAJ9)
CTVGAGGFKTIF

SEQ ID NO: 739058 - protein, 16 aa, Homo sapiens
  CDR3 for beta chain variable domain of TCR clone 369529 (TRBV20-1, TRBJ1-4)
CSAPGRGLLTNEKLFF

SEQ ID NO: 739059 - protein, 12 aa, Homo sapiens
  CDR3 for alpha chain variable domain of TCR clone 369530 (TRAV12-2, TRAJ31)
CAVNTPDSRLMF

SEQ ID NO: 739060 - protein, 12 aa, Homo sapiens
  CDR3 for beta chain variable domain of TCR clone 369530 (TRBV12-4, TRBJ2-7)
CASSLGGYEQYF

SEQ ID NO: 739061 - protein, 14 aa, Homo sapiens
  CDR3 for alpha chain variable domain of TCR clone 369531 (TRAV26-1, TRAJ16)
CIAVPFSDGQKLLF

SEQ ID NO: 739062 - protein, 14 aa, Homo sapiens
  CDR3 for beta chain variable domain of TCR clone 369531 (TRBV18, TRBJ2-5)
CASSPGVSQETQYF

SEQ ID NO: 739063 - protein, 15 aa, Homo sapiens
  CDR3 for alpha chain variable domain of TCR clone 369532 (TRAV20, TRAJ16)
CAVQIRFSDGQKLLF

SEQ ID NO: 739064 - protein, 16 aa, Homo sapiens
  CDR3 for beta chain variable domain of TCR clone 369532 (TRBV6-1, TRBJ2-2)
CASSAFRGGDTGELFF

SEQ ID NO: 739065 - protein, 14 aa, Homo sapiens
  CDR3 for alpha chain variable domain of TCR clone 369533 (TRAV12-2, TRAJ17)
CAVLFKAAGNKLTF

SEQ ID NO: 739066 - protein, 15 aa, Homo sapiens
  CDR3 for beta chain variable domain of TCR clone 369533 (TRBV7-2, TRBJ1-1)
CASSSPGGEETEAFF

SEQ ID NO: 739067 - protein, 13 aa, Homo sapiens
  CDR3 for alpha chain variable domain of TCR clone 369534 (TRAV36/DV7, TRAJ49)
CAVEANTANQFYF

SEQ ID NO: 739068 - protein, 13 aa, Homo sapiens
  CDR3 for beta chain variable domain of TCR clone 369534 (TRBV10-3, TRBJ2-7)
CASKLAVNYEQYF

SEQ ID NO: 739069 - protein, 18 aa, Homo sapiens
  CDR3 for alpha chain variable domain of TCR clone 369535 (TRAV13-1, TRAJ52)
CAASKRSAGGTSYGKLTF

SEQ ID NO: 739070 - protein, 13 aa, Homo sapiens
  CDR3 for beta chain variable domain of TCR clone 369535 (TRBV24-1, TRBJ2-2)
CATSDWSTGELFF

SEQ ID NO: 739071 - protein, 12 aa, Homo sapiens
  CDR3 for alpha chain variable domain of TCR clone 369536 (TRAV35, TRAJ30)
CAGLNRVDKIIF

SEQ ID NO: 739072 - protein, 15 aa, Homo sapiens
  CDR3 for beta chain variable domain of TCR clone 369536 (TRBV9, TRBJ1-6)
CASSVAGTGDSPLHF

SEQ ID NO: 739073 - protein, 13 aa, Homo sapiens
  CDR3 for alpha chain variable domain of TCR clone 369537 (TRAV26-1, )
CIVSHRVEGVWNH

SEQ ID NO: 739074 - protein, 14 aa, Homo sapiens
  CDR3 for beta chain variable domain of TCR clone 369537 (TRBV20-1, TRBJ2-7)
CSAWTALSSYEQYF

SEQ ID NO: 739075 - protein, 14 aa, Homo sapiens
  CDR3 for alpha chain variable domain of TCR clone 369538 (TRAV3, TRAJ36)
CAVRDGPGANNLFF

SEQ ID NO: 739076 - protein, 18 aa, Homo sapiens
  CDR3 for beta chain variable domain of TCR clone 369538 (TRBV11-3, TRBJ2-3)
CASSLGGASRGAPNTQYF

SEQ ID NO: 739077 - protein, 15 aa, Homo sapiens
  CDR3 for alpha chain variable domain of TCR clone 369539 (TRAV21, TRAJ53)
CATLNSGGSNYKLTF

SEQ ID NO: 739078 - protein, 15 aa, Homo sapiens
  CDR3 for beta chain variable domain of TCR clone 369539 (TRBV7-6, TRBJ1-5)
CASSQGSGINQPQHF

SEQ ID NO: 739079 - protein, 12 aa, Homo sapiens
  CDR3 for alpha chain variable domain of TCR clone 369540 (TRAV13-2, TRAJ8)
CAPWLGSQKLVF

SEQ ID NO: 739080 - protein, 13 aa, Homo sapiens
  CDR3 for beta chain variable domain of TCR clone 369540 (TRBV12-4, TRBJ1-5)
CASSPDRAQPQHF

SEQ ID NO: 739081 - protein, 13 aa, Homo sapiens
  CDR3 for alpha chain variable domain of TCR clone 369541 (TRAV23/DV6, TRAJ31)
CAARRGNNARRMF

SEQ ID NO: 739082 - protein, 15 aa, Homo sapiens
  CDR3 for beta chain variable domain of TCR clone 369541 (TRBV5-4, TRBJ2-3)
CASSLAGRVTDTQYF

SEQ ID NO: 739083 - protein, 15 aa, Homo sapiens
  CDR3 for alpha chain variable domain of TCR clone 369542 (TRAV29/DV5, TRAJ53)
CAASASGGSNYKLTF

SEQ ID NO: 739084 - protein, 15 aa, Homo sapiens
  CDR3 for beta chain variable domain of TCR clone 369542 (TRBV6-1, TRBJ2-3)
CASSERGGITDTQYF

SEQ ID NO: 739085 - protein, 18 aa, Homo sapiens
  CDR3 for alpha chain variable domain of TCR clone 369543 (TRAV3, TRAJ17)
CAVRARRGGRSCRQQANF

SEQ ID NO: 739086 - protein, 14 aa, Homo sapiens
  CDR3 for beta chain variable domain of TCR clone 369543 (TRBV28, TRBJ2-5)
CASTGAGGVETQYF

SEQ ID NO: 739087 - protein, 14 aa, Homo sapiens
  CDR3 for alpha chain variable domain of TCR clone 369544 (TRAV8-3, TRAJ35)
CAVVPQGFGNVLHC

SEQ ID NO: 739088 - protein, 16 aa, Homo sapiens
  CDR3 for beta chain variable domain of TCR clone 369544 (TRBV19, TRBJ2-1)
CASSKAGPSSYNEQFF

SEQ ID NO: 739089 - protein, 12 aa, Homo sapiens
  CDR3 for alpha chain variable domain of TCR clone 369545 (TRAV21, TRAJ23)
CAVGPQGGKLIF

SEQ ID NO: 739090 - protein, 15 aa, Homo sapiens
  CDR3 for beta chain variable domain of TCR clone 369545 (TRBV7-8, TRBJ2-1)
CASSLAGGLYNEQFF

SEQ ID NO: 739091 - protein, 12 aa, Homo sapiens
  CDR3 for alpha chain variable domain of TCR clone 369546 (TRAV29/DV5, TRAJ26)
CAAIPSGQNVVF

SEQ ID NO: 739092 - protein, 15 aa, Homo sapiens
  CDR3 for beta chain variable domain of TCR clone 369546 (TRBV19, TRBJ1-5)
CASSDSGPRNQPQHF

SEQ ID NO: 739093 - protein, 14 aa, Homo sapiens
  CDR3 for alpha chain variable domain of TCR clone 369547 (TRAV12-2, TRAJ38)
CAVANAGNNRKLVW

SEQ ID NO: 739094 - protein, 16 aa, Homo sapiens
  CDR3 for beta chain variable domain of TCR clone 369547 (TRBV12-4, TRBJ1-5)
CASRQGSGLGNQPQHF

SEQ ID NO: 739095 - protein, 14 aa, Homo sapiens
  CDR3 for alpha chain variable domain of TCR clone 369548 (TRAV2, TRAJ9)
CAVEDRSGGFKTIF

SEQ ID NO: 739096 - protein, 18 aa, Homo sapiens
  CDR3 for beta chain variable domain of TCR clone 369548 (TRBV6-6, TRBJ1-3)
CASSYSKWDSMSGNTIYF

SEQ ID NO: 739097 - protein, 18 aa, Homo sapiens
  CDR3 for alpha chain variable domain of TCR clone 369549 (TRAV21, TRAJ52)
CAVRPSPAGGTNCGKLTF

SEQ ID NO: 739098 - protein, 17 aa, Homo sapiens
  CDR3 for beta chain variable domain of TCR clone 369549 (TRBV13, TRBJ2-3)
CASSLYRVAGGRNTQYF

SEQ ID NO: 739099 - protein, 11 aa, Homo sapiens
  CDR3 for alpha chain variable domain of TCR clone 369550 (TRAV17, TRAJ9)
YATTGGVKTIF

SEQ ID NO: 739100 - protein, 11 aa, Homo sapiens
  CDR3 for beta chain variable domain of TCR clone 369550 (TRBV29-1, TRBJ2-5)
CSEDRTGTQYF

SEQ ID NO: 739101 - protein, 11 aa, Homo sapiens
  CDR3 for alpha chain variable domain of TCR clone 369551 (TRAV12-3, TRAJ49)
CAANTGNQFYF

SEQ ID NO: 739102 - protein, 12 aa, Homo sapiens
  CDR3 for beta chain variable domain of TCR clone 369551 (TRBV6-3, TRBJ2-7)
CASSEPGFEQYF

SEQ ID NO: 739103 - protein, 15 aa, Homo sapiens
  CDR3 for alpha chain variable domain of TCR clone 369552 (TRAV12-2, TRAJ53)
CAVNGGGGSNYKLTF

SEQ ID NO: 739104 - protein, 16 aa, Homo sapiens
  CDR3 for beta chain variable domain of TCR clone 369552 (TRBV14, TRBJ2-2)
CASSRSLGDDTGELFF

SEQ ID NO: 739105 - protein, 15 aa, Homo sapiens
  CDR3 for alpha chain variable domain of TCR clone 369553 (TRAV35, TRAJ23)
CAGPLGNNPGGKLIF

SEQ ID NO: 739106 - protein, 14 aa, Homo sapiens
  CDR3 for beta chain variable domain of TCR clone 369553 (TRBV7-9, TRBJ1-1)
CASTPLQSYTEAFF

SEQ ID NO: 739107 - protein, 17 aa, Homo sapiens
  CDR3 for alpha chain variable domain of TCR clone 369554 (TRAV3, TRAJ42)
CAVRDRDYGGSQGNLIF

SEQ ID NO: 739108 - protein, 11 aa, Homo sapiens
  CDR3 for beta chain variable domain of TCR clone 369554 (TRBV28, TRBJ2-7)
CASSQIYEQYF

SEQ ID NO: 739109 - protein, 15 aa, Homo sapiens
  CDR3 for alpha chain variable domain of TCR clone 369555 (TRAV3, TRAJ5)
CAVRDLDTGSRALTF

SEQ ID NO: 739110 - protein, 13 aa, Homo sapiens
  CDR3 for beta chain variable domain of TCR clone 369555 (TRBV20-1, TRBJ2-5)
CSARDSKQATQYF

SEQ ID NO: 739111 - protein, 17 aa, Homo sapiens
  CDR3 for alpha chain variable domain of TCR clone 369556 (TRAV3, TRAJ42)
CAVRDRDYGGSQGNLIF

SEQ ID NO: 739112 - protein, 14 aa, Homo sapiens
  CDR3 for beta chain variable domain of TCR clone 369556 (TRBV19, TRBJ2-5)
CASSMSGQQETQYF

SEQ ID NO: 739113 - protein, 14 aa, Homo sapiens
  CDR3 for alpha chain variable domain of TCR clone 369557 (TRAV13-1, TRAJ8)
CAASEDTGFQKLVF

SEQ ID NO: 739114 - protein, 13 aa, Homo sapiens
  CDR3 for beta chain variable domain of TCR clone 369557 (TRBV19, TRBJ1-5)
CASSTRRYQPQHF

SEQ ID NO: 739115 - protein, 14 aa, Homo sapiens
  CDR3 for alpha chain variable domain of TCR clone 369558 (TRAV17, TRAJ12)
CATDGVDSSYKLIF

SEQ ID NO: 739116 - protein, 13 aa, Homo sapiens
  CDR3 for beta chain variable domain of TCR clone 369558 (TRBV7-9, TRBJ2-7)
CASSFAGAYEQYF

SEQ ID NO: 739117 - protein, 17 aa, Homo sapiens
  CDR3 for alpha chain variable domain of TCR clone 369559 (TRAV13-1, TRAJ31)
CAPRDRLMFGDGNQLVV

SEQ ID NO: 739118 - protein, 20 aa, Homo sapiens
  CDR3 for beta chain variable domain of TCR clone 369559 (TRBV7-9, TRBJ2-2)
CASSHLFPGPTIHITGELFF

SEQ ID NO: 739119 - protein, 18 aa, Homo sapiens
  CDR3 for alpha chain variable domain of TCR clone 369560 (TRAV21, TRAJ52)
CAVRPSPAGGTSYGKLTF

SEQ ID NO: 739120 - protein, 16 aa, Homo sapiens
  CDR3 for beta chain variable domain of TCR clone 369560 (TRBV7-2, TRBJ2-7)
CASSLGLAGGAYEQYF

SEQ ID NO: 739121 - protein, 14 aa, Homo sapiens
  CDR3 for alpha chain variable domain of TCR clone 369561 (TRAV8-1, TRAJ5)
CAVRTDTDRRALTF

SEQ ID NO: 739122 - protein, 14 aa, Homo sapiens
  CDR3 for beta chain variable domain of TCR clone 369561 (TRBV7-8, TRBJ2-3)
CASSFPDGQDTQYF

SEQ ID NO: 739123 - protein, 14 aa, Homo sapiens
  CDR3 for alpha chain variable domain of TCR clone 369562 (TRAV12-3, TRAJ10)
SHLPLTGGGDKLTF

SEQ ID NO: 739124 - protein, 15 aa, Homo sapiens
  CDR3 for beta chain variable domain of TCR clone 369562 (TRBV7-9, TRBJ1-4)
CASSRTGGFNEKLFF

SEQ ID NO: 739125 - protein, 15 aa, Homo sapiens
  CDR3 for alpha chain variable domain of TCR clone 369563 (TRAV25, TRAJ52)
CAGRPGGTSYGKLTF

SEQ ID NO: 739126 - protein, 15 aa, Homo sapiens
  CDR3 for beta chain variable domain of TCR clone 369563 (TRBV6-6, TRBJ2-7)
CASSYSYGGSYEQYF

SEQ ID NO: 739127 - protein, 14 aa, Homo sapiens
  CDR3 for alpha chain variable domain of TCR clone 369564 (TRAV2, TRAJ3)
CAVPPYSSASKIIF

SEQ ID NO: 739128 - protein, 13 aa, Homo sapiens
  CDR3 for beta chain variable domain of TCR clone 369564 (TRBV7-9, TRBJ1-2)
CASSLKQNYGYTF

SEQ ID NO: 739129 - protein, 13 aa, Homo sapiens
  CDR3 for alpha chain variable domain of TCR clone 369565 (TRAV12-3, TRAJ41)
CAIAPNSGYALNF

SEQ ID NO: 739130 - protein, 14 aa, Homo sapiens
  CDR3 for beta chain variable domain of TCR clone 369565 (TRBV7-2, TRBJ1-3)
CASSLGTAGNTIYC

SEQ ID NO: 739131 - protein, 15 aa, Homo sapiens
  CDR3 for alpha chain variable domain of TCR clone 369566 (TRAV2, TRAJ9)
CAVEDRGTGGFKTIF

SEQ ID NO: 739132 - protein, 16 aa, Homo sapiens
  CDR3 for beta chain variable domain of TCR clone 369566 (TRBV28, TRBJ2-7)
CASSLFFETGGPEQYF

SEQ ID NO: 739133 - protein, 14 aa, Homo sapiens
  CDR3 for alpha chain variable domain of TCR clone 369567 (TRAV12-3, TRAJ10)
SHLPLTGGGNKLTF

SEQ ID NO: 739134 - protein, 17 aa, Homo sapiens
  CDR3 for beta chain variable domain of TCR clone 369567 (TRBV13, TRBJ2-3)
CAGSLSRVAGGRNTQYF

SEQ ID NO: 739135 - protein, 13 aa, Homo sapiens
  CDR3 for alpha chain variable domain of TCR clone 369568 (TRAV13-2, TRAJ48)
CAEMDVGDEKLTF

SEQ ID NO: 739136 - protein, 15 aa, Homo sapiens
  CDR3 for beta chain variable domain of TCR clone 369568 (TRBV11-3, TRBJ2-3)
CASLKDGREGDTQYF

SEQ ID NO: 739137 - protein, 15 aa, Homo sapiens
  CDR3 for alpha chain variable domain of TCR clone 369569 (TRAV8-6, TRAJ37)
CAVIFSSGNTGKPIF

SEQ ID NO: 739138 - protein, 15 aa, Homo sapiens
  CDR3 for beta chain variable domain of TCR clone 369569 (TRBV25-1, TRBJ2-4)
CASSETESAKNIQYF

SEQ ID NO: 739139 - protein, 17 aa, Homo sapiens
  CDR3 for alpha chain variable domain of TCR clone 369570 (TRAV8-6, TRAJ58)
CAVSSWVGETSGPRLTL

SEQ ID NO: 739140 - protein, 14 aa, Homo sapiens
  CDR3 for beta chain variable domain of TCR clone 369570 (TRBV4-2, TRBJ2-1)
CASGLDRAYNEQFF

SEQ ID NO: 739141 - protein, 13 aa, Homo sapiens
  CDR3 for alpha chain variable domain of TCR clone 369571 (TRAV1-1, TRAJ9)
CAAKNTGGFKTIF

SEQ ID NO: 739142 - protein, 14 aa, Homo sapiens
  CDR3 for beta chain variable domain of TCR clone 369571 (TRBV12-5, TRBJ2-5)
CASGSRTHQETQYL

SEQ ID NO: 739143 - protein, 16 aa, Homo sapiens
  CDR3 for alpha chain variable domain of TCR clone 369572 (TRAV3, TRAJ10)
CAVRDMRAAGGNKLTF

SEQ ID NO: 739144 - protein, 19 aa, Homo sapiens
  CDR3 for beta chain variable domain of TCR clone 369572 (TRBV6-3, TRBJ1-2)
CASSYSKGRTGPPNYGYTF

SEQ ID NO: 739145 - protein, 15 aa, Homo sapiens
  CDR3 for alpha chain variable domain of TCR clone 369573 (TRAV13-2, TRAJ35)
CAESPNIGFGNVLHC

SEQ ID NO: 739146 - protein, 13 aa, Homo sapiens
  CDR3 for beta chain variable domain of TCR clone 369573 (TRBV10-2, TRBJ2-5)
CASSTLARDTQYF

SEQ ID NO: 739147 - protein, 13 aa, Homo sapiens
  CDR3 for alpha chain variable domain of TCR clone 369574 (TRAV39, TRAJ40)
CAVYTSGTYKYIF

SEQ ID NO: 739148 - protein, 16 aa, Homo sapiens
  CDR3 for beta chain variable domain of TCR clone 369574 (TRBV7-3, TRBJ2-2)
CASSLKRGTLSGELFF

SEQ ID NO: 739149 - protein, 14 aa, Homo sapiens
  CDR3 for alpha chain variable domain of TCR clone 369575 (TRAV1-2, TRAJ8)
CAVREDTGFQKLVF

SEQ ID NO: 739150 - protein, 16 aa, Homo sapiens
  CDR3 for beta chain variable domain of TCR clone 369575 (TRBV28, TRBJ1-4)
CASSPPYRGRSENLFF

SEQ ID NO: 739151 - protein, 14 aa, Homo sapiens
  CDR3 for alpha chain variable domain of TCR clone 369576 (TRAV13-1, TRAJ44)
CAAKETGTASKLTF

SEQ ID NO: 739152 - protein, 15 aa, Homo sapiens
  CDR3 for beta chain variable domain of TCR clone 369576 (TRBV9, TRBJ2-1)
CASSLAGSSYNEQFF

SEQ ID NO: 739153 - protein, 18 aa, Homo sapiens
  CDR3 for alpha chain variable domain of TCR clone 369577 (TRAV26-1, TRAJ23)
CIVRVGLEVWNQGGKLIF

SEQ ID NO: 739154 - protein, 14 aa, Homo sapiens
  CDR3 for beta chain variable domain of TCR clone 369577 (TRBV7-6, TRBJ2-3)
CVSSLGTVTDTQYF

SEQ ID NO: 739155 - protein, 14 aa, Homo sapiens
  CDR3 for alpha chain variable domain of TCR clone 369578 (TRAV16, TRAJ33)
CALSPMDSNYQLIW

SEQ ID NO: 739156 - protein, 15 aa, Homo sapiens
  CDR3 for beta chain variable domain of TCR clone 369578 (TRBV28, TRBJ2-7)
CASSLEAYTIYEQYF

SEQ ID NO: 739157 - protein, 14 aa, Homo sapiens
  CDR3 for alpha chain variable domain of TCR clone 369579 (TRAV1-2, TRAJ8)
CAVREATGFQKLVF

SEQ ID NO: 739158 - protein, 14 aa, Homo sapiens
  CDR3 for beta chain variable domain of TCR clone 369579 (TRBV12-5, TRBJ2-7)
CASGQTGNSYEQYF

SEQ ID NO: 739159 - protein, 14 aa, Homo sapiens
  CDR3 for alpha chain variable domain of TCR clone 369580 (TRAV17, TRAJ57)
CATDPQGGSEKLVF

SEQ ID NO: 739160 - protein, 15 aa, Homo sapiens
  CDR3 for beta chain variable domain of TCR clone 369580 (TRBV2, TRBJ1-2)
CASSESRTVNYGYTF

SEQ ID NO: 739161 - protein, 13 aa, Homo sapiens
  CDR3 for alpha chain variable domain of TCR clone 369581 (TRAV38-1, TRAJ42)
CARWGGSQGNLIF

SEQ ID NO: 739162 - protein, 20 aa, Homo sapiens
  CDR3 for beta chain variable domain of TCR clone 369581 (TRBV7-8, TRBJ2-2)
CASSHLFPGPTIHITGELFF

SEQ ID NO: 739163 - protein, 16 aa, Homo sapiens
  CDR3 for alpha chain variable domain of TCR clone 369582 (TRAV3, TRAJ18)
CAVRDGRGSTLGSLYF

SEQ ID NO: 739164 - protein, 15 aa, Homo sapiens
  CDR3 for beta chain variable domain of TCR clone 369582 (TRBV7-9, TRBJ1-6)
CASSSPGRGNSSLHF

SEQ ID NO: 739165 - protein, 16 aa, Homo sapiens
  CDR3 for alpha chain variable domain of TCR clone 369583 (TRAV3, TRAJ32)
CAVREKYGGATNKLIF

SEQ ID NO: 739166 - protein, 12 aa, Homo sapiens
  CDR3 for beta chain variable domain of TCR clone 369583 (TRBV20-1, TRBJ1-2)
CSVTPEGYGYTF

SEQ ID NO: 739167 - protein, 13 aa, Homo sapiens
  CDR3 for alpha chain variable domain of TCR clone 369584 (TRAV25, TRAJ26)
CAGMDNYGHNFVF

SEQ ID NO: 739168 - protein, 15 aa, Homo sapiens
  CDR3 for beta chain variable domain of TCR clone 369584 (TRBV10-3, TRBJ2-1)
CAIRNGTSGHNEQFF

SEQ ID NO: 739169 - protein, 11 aa, Homo sapiens
  CDR3 for alpha chain variable domain of TCR clone 369585 (TRAV26-1, TRAJ38)
CIAEMLATTIS

SEQ ID NO: 739170 - protein, 13 aa, Homo sapiens
  CDR3 for beta chain variable domain of TCR clone 369585 (TRBV20-1, TRBJ1-1)
CSARGGGNTEAFF

SEQ ID NO: 739171 - protein, 14 aa, Homo sapiens
  CDR3 for alpha chain variable domain of TCR clone 369586 (TRAV13-1, TRAJ44)
CEAKATGTASKLTF

SEQ ID NO: 739172 - protein, 13 aa, Homo sapiens
  CDR3 for beta chain variable domain of TCR clone 369586 (TRBV5-5, TRBJ1-2)
CASSFWRGEDYTF

SEQ ID NO: 739173 - protein, 15 aa, Homo sapiens
  CDR3 for alpha chain variable domain of TCR clone 369587 (TRAV13-1, TRAJ16)
CAARYQMARSCSLQG

SEQ ID NO: 739174 - protein, 14 aa, Homo sapiens
  CDR3 for beta chain variable domain of TCR clone 369587 (TRBV19, TRBJ2-1)
CASPTFVLSGEQFF

SEQ ID NO: 739175 - protein, 11 aa, Homo sapiens
  CDR3 for alpha chain variable domain of TCR clone 369588 (TRAV12-2, TRAJ29)
CAVTLRSPLVF

SEQ ID NO: 739176 - protein, 16 aa, Homo sapiens
  CDR3 for beta chain variable domain of TCR clone 369588 (TRBV19, TRBJ1-5)
CASSIDRGRPRQPQHF

SEQ ID NO: 739177 - protein, 18 aa, Homo sapiens
  CDR3 for alpha chain variable domain of TCR clone 369589 (TRAV3, TRAJ17)
CAVRARRGGRSCRQQANF

SEQ ID NO: 739178 - protein, 14 aa, Homo sapiens
  CDR3 for beta chain variable domain of TCR clone 369589 (TRBV4-1, TRBJ2-2)
CSSSQAVNTGELFF

SEQ ID NO: 739179 - protein, 14 aa, Homo sapiens
  CDR3 for alpha chain variable domain of TCR clone 369590 (TRAV26-1, TRAJ44)
CISPLPGTASKLTF

SEQ ID NO: 739180 - protein, 16 aa, Homo sapiens
  CDR3 for beta chain variable domain of TCR clone 369590 (TRBV19, TRBJ2-1)
CASSKAGPSSYNGQFF

SEQ ID NO: 739181 - protein, 14 aa, Homo sapiens
  CDR3 for alpha chain variable domain of TCR clone 369591 (TRAV3, TRAJ28)
CAVRRGAGSYQLTF

SEQ ID NO: 739182 - protein, 15 aa, Homo sapiens
  CDR3 for beta chain variable domain of TCR clone 369591 (TRBV7-9, TRBJ1-6)
CASSSPGRGNSPLHF

SEQ ID NO: 739183 - protein, 11 aa, Homo sapiens
  CDR3 for alpha chain variable domain of TCR clone 369592 (TRAV8-2, TRAJ36)
CVVSHLPRTTS

SEQ ID NO: 739184 - protein, 18 aa, Homo sapiens
  CDR3 for beta chain variable domain of TCR clone 369592 (TRBV7-9, TRBJ2-6)
CASSFPGAGISGANVLTF

SEQ ID NO: 739185 - protein, 13 aa, Homo sapiens
  CDR3 for alpha chain variable domain of TCR clone 369593 (TRAV12-2, TRAJ37)
CAGGSGNTGKLIF

SEQ ID NO: 739186 - protein, 16 aa, Homo sapiens
  CDR3 for beta chain variable domain of TCR clone 369593 (TRBV24-1, TRBJ2-5)
CATRLAEDCWEKTQYF

SEQ ID NO: 739187 - protein, 14 aa, Homo sapiens
  CDR3 for alpha chain variable domain of TCR clone 369594 (TRAV1-2, TRAJ8)
CAVREDTGFQKLVF

SEQ ID NO: 739188 - protein, 14 aa, Homo sapiens
  CDR3 for beta chain variable domain of TCR clone 369594 (TRBV28, TRBJ2-7)
CASSTLRGRFEQYF

SEQ ID NO: 739189 - protein, 14 aa, Homo sapiens
  CDR3 for alpha chain variable domain of TCR clone 369595 (TRAV8-2, TRAJ4)
CVVSPSGGYNKLIF

SEQ ID NO: 739190 - protein, 15 aa, Homo sapiens
  CDR3 for beta chain variable domain of TCR clone 369595 (TRBV28, TRBJ1-5)
CASSRTGGYVQPQHF

SEQ ID NO: 739191 - protein, 11 aa, Homo sapiens
  CDR3 for alpha chain variable domain of TCR clone 369596 (TRAV1-2, TRAJ40)
CAVPGTYKYIF

SEQ ID NO: 739192 - protein, 19 aa, Homo sapiens
  CDR3 for beta chain variable domain of TCR clone 369596 (TRBV29-1, TRBJ2-7)
SAALKSWGLAGARSSTSGR

SEQ ID NO: 739193 - protein, 13 aa, Homo sapiens
  CDR3 for alpha chain variable domain of TCR clone 369597 (TRAV17, TRAJ9)
CATDGTGGLKTIF

SEQ ID NO: 739194 - protein, 17 aa, Homo sapiens
  CDR3 for beta chain variable domain of TCR clone 369597 (TRBV6-5, TRBJ2-7)
CASSYSFWGQGSYEQYF

SEQ ID NO: 739195 - protein, 12 aa, Homo sapiens
  CDR3 for alpha chain variable domain of TCR clone 369598 (TRAV21, TRAJ23)
CAVMLQGGKLIF

SEQ ID NO: 739196 - protein, 13 aa, Homo sapiens
  CDR3 for beta chain variable domain of TCR clone 369598 (TRBV6-6, TRBJ2-1)
CASSVHQGDEQFF

SEQ ID NO: 739197 - protein, 13 aa, Homo sapiens
  CDR3 for alpha chain variable domain of TCR clone 369599 (TRAV13-2, TRAJ48)
CAEMDFGNEKLTF

SEQ ID NO: 739198 - protein, 13 aa, Homo sapiens
  CDR3 for beta chain variable domain of TCR clone 369599 (TRBV10-3, TRBJ2-1)
CAISEFSGREQFF

SEQ ID NO: 739199 - protein, 14 aa, Homo sapiens
  CDR3 for alpha chain variable domain of TCR clone 369600 (TRAV26-1, TRAJ39)
CIVRGSRAGNMLTF

SEQ ID NO: 739200 - protein, 11 aa, Homo sapiens
  CDR3 for beta chain variable domain of TCR clone 369600 (TRBV5-4, TRBJ1-1)
CARGQNTEAFF

SEQ ID NO: 739201 - protein, 14 aa, Homo sapiens
  CDR3 for alpha chain variable domain of TCR clone 369601 (TRAV12-3, TRAJ6)
CAMSATGGSYIPTF

SEQ ID NO: 739202 - protein, 16 aa, Homo sapiens
  CDR3 for beta chain variable domain of TCR clone 369601 (TRBV4-2, TRBJ2-1)
CSSSPRAGQGANEQFF

SEQ ID NO: 739203 - protein, 11 aa, Homo sapiens
  CDR3 for alpha chain variable domain of TCR clone 369602 (TRAV21, TRAJ39)
LLVNAGNMLTF

SEQ ID NO: 739204 - protein, 15 aa, Homo sapiens
  CDR3 for beta chain variable domain of TCR clone 369602 (TRBV5-1, TRBJ2-7)
CASSLNGGPAREQYF

SEQ ID NO: 739205 - protein, 13 aa, Homo sapiens
  CDR3 for alpha chain variable domain of TCR clone 369603 (TRAV21, TRAJ57)
CAVTQGGSEKLVF

SEQ ID NO: 739206 - protein, 15 aa, Homo sapiens
  CDR3 for beta chain variable domain of TCR clone 369603 (TRBV5-1, TRBJ1-1)
CAGSSTTGTNTEAFF

SEQ ID NO: 739207 - protein, 11 aa, Homo sapiens
  CDR3 for alpha chain variable domain of TCR clone 369604 (TRAV16, TRAJ33)
CALHSNYQLIW

SEQ ID NO: 739208 - protein, 15 aa, Homo sapiens
  CDR3 for beta chain variable domain of TCR clone 369604 (TRBV4-1, TRBJ2-7)
CASSRQGQGFDEQYL

SEQ ID NO: 739209 - protein, 13 aa, Homo sapiens
  CDR3 for alpha chain variable domain of TCR clone 369605 (TRAV1-2, TRAJ9)
CAVLNTGGFKTIF

SEQ ID NO: 739210 - protein, 14 aa, Homo sapiens
  CDR3 for beta chain variable domain of TCR clone 369605 (TRBV4-3, TRBJ2-7)
CASSQDVAGGEQYF

SEQ ID NO: 739211 - protein, 16 aa, Homo sapiens
  CDR3 for alpha chain variable domain of TCR clone 369606 (TRAV1-2, TRAJ10)
CAVGGVLTGGGNKLTF

SEQ ID NO: 739212 - protein, 12 aa, Homo sapiens
  CDR3 for beta chain variable domain of TCR clone 369606 (TRBV7-8, TRBJ2-7)
CASSLGDRDQYF

SEQ ID NO: 739213 - protein, 14 aa, Homo sapiens
  CDR3 for alpha chain variable domain of TCR clone 369607 (TRAV16, TRAJ33)
CALSAMDSNYQLIC

SEQ ID NO: 739214 - protein, 12 aa, Homo sapiens
  CDR3 for beta chain variable domain of TCR clone 369607 (TRBV28, TRBJ2-6)
CAIQAGANVLTF

SEQ ID NO: 739215 - protein, 15 aa, Homo sapiens
  CDR3 for alpha chain variable domain of TCR clone 369608 (TRAV12-3, TRAJ6)
CAMSATTGGSYIPTF

SEQ ID NO: 739216 - protein, 16 aa, Homo sapiens
  CDR3 for beta chain variable domain of TCR clone 369608 (TRBV7-2, TRBJ2-7)
CASSRPGTGLVHEQYF

SEQ ID NO: 739217 - protein, 13 aa, Homo sapiens
  CDR3 for alpha chain variable domain of TCR clone 369609 (TRAV38-2/DV8, TRAJ34)
FAYRNYNTDKLIF

SEQ ID NO: 739218 - protein, 15 aa, Homo sapiens
  CDR3 for beta chain variable domain of TCR clone 369609 (TRBV20-1, TRBJ2-5)
CSAEGTGGLQETQYF

SEQ ID NO: 739219 - protein, 14 aa, Homo sapiens
  CDR3 for alpha chain variable domain of TCR clone 369610 (TRAV16, TRAJ37)
CALDISGNTGKLIF

SEQ ID NO: 739220 - protein, 16 aa, Homo sapiens
  CDR3 for beta chain variable domain of TCR clone 369610 (TRBV19, TRBJ2-2)
CASRSPGTGATGELFF

SEQ ID NO: 739221 - protein, 16 aa, Homo sapiens
  CDR3 for alpha chain variable domain of TCR clone 369611 (TRAV8-3, TRAJ22)
CAVDLLGPGSARQLTF

SEQ ID NO: 739222 - protein, 17 aa, Homo sapiens
  CDR3 for beta chain variable domain of TCR clone 369611 (TRBV11-2, TRBJ2-1)
CASSLYPPGVEYNEQFF

SEQ ID NO: 739223 - protein, 12 aa, Homo sapiens
  CDR3 for alpha chain variable domain of TCR clone 369612 (TRAV12-2, TRAJ47)
CAVAEYGNKLVF

SEQ ID NO: 739224 - protein, 14 aa, Homo sapiens
  CDR3 for beta chain variable domain of TCR clone 369612 (TRBV19, TRBJ2-1)
CASSPGLAPNEQFF

SEQ ID NO: 739225 - protein, 17 aa, Homo sapiens
  CDR3 for alpha chain variable domain of TCR clone 369613 (TRAV3, TRAJ12)
CAVRDGARMDSSYKLIF

SEQ ID NO: 739226 - protein, 13 aa, Homo sapiens
  CDR3 for beta chain variable domain of TCR clone 369613 (TRBV20-1, TRBJ1-1)
CSAPLGGGTEAFF

SEQ ID NO: 739227 - protein, 12 aa, Homo sapiens
  CDR3 for alpha chain variable domain of TCR clone 369614 (TRAV38-1, TRAJ32)
CAPLGATNKLIF

SEQ ID NO: 739228 - protein, 17 aa, Homo sapiens
  CDR3 for beta chain variable domain of TCR clone 369614 (TRBV13, TRBJ2-3)
CASSLSRVAGGMNTQYF

SEQ ID NO: 739229 - protein, 13 aa, Homo sapiens
  CDR3 for alpha chain variable domain of TCR clone 369615 (TRAV30, TRAJ24)
CGTVTYSWGKLQF

SEQ ID NO: 739230 - protein, 15 aa, Homo sapiens
  CDR3 for beta chain variable domain of TCR clone 369615 (TRBV25-1, TRBJ1-4)
CASSPGDSTNEKLFF

SEQ ID NO: 739231 - protein, 15 aa, Homo sapiens
  CDR3 for alpha chain variable domain of TCR clone 369616 (TRAV4, TRAJ26)
CLVGDMNNYRQNFVF

SEQ ID NO: 739232 - protein, 16 aa, Homo sapiens
  CDR3 for beta chain variable domain of TCR clone 369616 (TRBV28, TRBJ1-4)
CASSSRTGAANEKLFF

SEQ ID NO: 739233 - protein, 13 aa, Homo sapiens
  CDR3 for alpha chain variable domain of TCR clone 369617 (TRAV12-3, TRAJ31)
CAMSAKNNARLMF

SEQ ID NO: 739234 - protein, 16 aa, Homo sapiens
  CDR3 for beta chain variable domain of TCR clone 369617 (TRBV7-9, TRBJ1-2)
CACSLGFSSGEDGYTF

SEQ ID NO: 739235 - protein, 13 aa, Homo sapiens
  CDR3 for alpha chain variable domain of TCR clone 369618 (TRAV3, TRAJ36)
CAVRDTGANNLFF

SEQ ID NO: 739236 - protein, 13 aa, Homo sapiens
  CDR3 for beta chain variable domain of TCR clone 369618 (TRBV20-1, TRBJ1-1)
CSARVGGDTEAFF

SEQ ID NO: 739237 - protein, 14 aa, Homo sapiens
  CDR3 for alpha chain variable domain of TCR clone 369619 (TRAV16, TRAJ33)
CALSAMDSNYQLIW

SEQ ID NO: 739238 - protein, 14 aa, Homo sapiens
  CDR3 for beta chain variable domain of TCR clone 369619 (TRBV4-2, TRBJ2-1)
CASGLDRAYNEQVF

SEQ ID NO: 739239 - protein, 16 aa, Homo sapiens
  CDR3 for alpha chain variable domain of TCR clone 369620 (TRAV12-2, TRAJ50)
YAVGTATKTSYDKVIF

SEQ ID NO: 739240 - protein, 12 aa, Homo sapiens
  CDR3 for beta chain variable domain of TCR clone 369620 (TRBV12-4, TRBJ1-5)
CASSLGRQPQHF

SEQ ID NO: 739241 - protein, 13 aa, Homo sapiens
  CDR3 for alpha chain variable domain of TCR clone 369621 (TRAV8-3, TRAJ48)
CAVVPFGNETLTF

SEQ ID NO: 739242 - protein, 19 aa, Homo sapiens
  CDR3 for beta chain variable domain of TCR clone 369621 (TRBV25-1, TRBJ2-2)
CAILVYRVDRGRKTGELFF

SEQ ID NO: 739243 - protein, 14 aa, Homo sapiens
  CDR3 for alpha chain variable domain of TCR clone 369622 (TRAV13-1, TRAJ29)
CAASKHSGNTPLVF

SEQ ID NO: 739244 - protein, 17 aa, Homo sapiens
  CDR3 for beta chain variable domain of TCR clone 369622 (TRBV13, TRBJ2-3)
CASSLSRVAGGRNTQYF

SEQ ID NO: 739245 - protein, 13 aa, Homo sapiens
  CDR3 for alpha chain variable domain of TCR clone 369623 (TRAV2, TRAJ40)
CAVVTSGTYKYIF

SEQ ID NO: 739246 - protein, 15 aa, Homo sapiens
  CDR3 for beta chain variable domain of TCR clone 369623 (TRBV5-1, TRBJ2-2)
CASSLAAGGSGELFF

SEQ ID NO: 739247 - protein, 16 aa, Homo sapiens
  CDR3 for alpha chain variable domain of TCR clone 369624 (TRAV26-1, TRAJ48)
CIVREPPNFGNETLTF

SEQ ID NO: 739248 - protein, 15 aa, Homo sapiens
  CDR3 for beta chain variable domain of TCR clone 369624 (TRBV7-2, TRBJ2-6)
CASSLQEAGANVLTF

SEQ ID NO: 739249 - protein, 14 aa, Homo sapiens
  CDR3 for alpha chain variable domain of TCR clone 369625 (TRAV12-3, TRAJ10)
SHLPLTGGGNKLTF

SEQ ID NO: 739250 - protein, 17 aa, Homo sapiens
  CDR3 for beta chain variable domain of TCR clone 369625 (TRBV28, TRBJ2-3)
CARSPTPAGGRVDTQYF

SEQ ID NO: 739251 - protein, 18 aa, Homo sapiens
  CDR3 for alpha chain variable domain of TCR clone 369626 (TRAV13-1, TRAJ52)
CAASKRSAGGTSYGKLTF

SEQ ID NO: 739252 - protein, 16 aa, Homo sapiens
  CDR3 for beta chain variable domain of TCR clone 369626 (TRBV29-1, TRBJ2-7)
CSVDVVGTSGSYEQYF

SEQ ID NO: 739253 - protein, 13 aa, Homo sapiens
  CDR3 for alpha chain variable domain of TCR clone 369627 (TRAV21, TRAJ27)
CAARPGNAGKSTF

SEQ ID NO: 739254 - protein, 13 aa, Homo sapiens
  CDR3 for beta chain variable domain of TCR clone 369627 (TRBV18, TRBJ2-5)
CASSLQGQETQYF

SEQ ID NO: 739255 - protein, 14 aa, Homo sapiens
  CDR3 for alpha chain variable domain of TCR clone 369628 (TRAV3, TRAJ34)
CAVRDINNTDKLIF

SEQ ID NO: 739256 - protein, 13 aa, Homo sapiens
  CDR3 for beta chain variable domain of TCR clone 369628 (TRBV20-1, TRBJ1-1)
CSARGGGNTQAFF

SEQ ID NO: 739257 - protein, 15 aa, Homo sapiens
  CDR3 for alpha chain variable domain of TCR clone 369629 (TRAV21, TRAJ52)
CAVRGGGTSYAKLTF

SEQ ID NO: 739258 - protein, 15 aa, Homo sapiens
  CDR3 for beta chain variable domain of TCR clone 369629 (TRBV18, TRBJ1-5)
CASSPSDRSNQPQHF

SEQ ID NO: 739259 - protein, 11 aa, Homo sapiens
  CDR3 for alpha chain variable domain of TCR clone 369630 (TRAV4, TRAJ31)
CLVGDNARPMF

SEQ ID NO: 739260 - protein, 15 aa, Homo sapiens
  CDR3 for beta chain variable domain of TCR clone 369630 (TRBV10-2, TRBJ2-6)
CASSEQGTGANVLTF

SEQ ID NO: 739261 - protein, 16 aa, Homo sapiens
  CDR3 for alpha chain variable domain of TCR clone 369631 (TRAV8-3, TRAJ28)
CARTGDSGAGSYQLTF

SEQ ID NO: 739262 - protein, 14 aa, Homo sapiens
  CDR3 for beta chain variable domain of TCR clone 369631 (TRBV7-2, TRBJ2-5)
CASSFTQGQETQYF

SEQ ID NO: 739263 - protein, 10 aa, Homo sapiens
  CDR3 for alpha chain variable domain of TCR clone 369632 (TRAV12-2, TRAJ41)
CAVTGYALNF

SEQ ID NO: 739264 - protein, 15 aa, Homo sapiens
  CDR3 for beta chain variable domain of TCR clone 369632 (TRBV4-2, TRBJ2-1)
CASSQDVGLAGVQFF

SEQ ID NO: 739265 - protein, 12 aa, Homo sapiens
  CDR3 for alpha chain variable domain of TCR clone 369633 (TRAV2, TRAJ31)
CAVEEGNTRLMF

SEQ ID NO: 739266 - protein, 18 aa, Homo sapiens
  CDR3 for beta chain variable domain of TCR clone 369633 (TRBV7-9, TRBJ2-3)
CASSLDLAGLATPDTQYF

SEQ ID NO: 739267 - protein, 14 aa, Homo sapiens
  CDR3 for alpha chain variable domain of TCR clone 369634 (TRAV16, TRAJ33)
FSLSAMDSNYQLIW

SEQ ID NO: 739268 - protein, 17 aa, Homo sapiens
  CDR3 for beta chain variable domain of TCR clone 369634 (TRBV25-1, TRBJ2-7)
CASSDARVVFSSYEQYF

SEQ ID NO: 739269 - protein, 14 aa, Homo sapiens
  CDR3 for alpha chain variable domain of TCR clone 369635 (TRAV1-2, TRAJ16)
CAVRSASDGHKLLF

SEQ ID NO: 739270 - protein, 13 aa, Homo sapiens
  CDR3 for beta chain variable domain of TCR clone 369635 (TRBV6-3, TRBJ1-4)
CASSPGPGEKLFF

SEQ ID NO: 739271 - protein, 14 aa, Homo sapiens
  CDR3 for alpha chain variable domain of TCR clone 369636 (TRAV13-1, TRAJ10)
SAAKEPGGGNKLTF

SEQ ID NO: 739272 - protein, 14 aa, Homo sapiens
  CDR3 for beta chain variable domain of TCR clone 369636 (TRBV6-6, TRBJ2-7)
CASSDSGAGYEQYF

SEQ ID NO: 739273 - protein, 14 aa, Homo sapiens
  CDR3 for alpha chain variable domain of TCR clone 369637 (TRAV12-2, TRAJ6)
CAVIASGGSYILTF

SEQ ID NO: 739274 - protein, 12 aa, Homo sapiens
  CDR3 for beta chain variable domain of TCR clone 369637 (TRBV5-1, TRBJ1-2)
CASSQDTYGYTF

SEQ ID NO: 739275 - protein, 14 aa, Homo sapiens
  CDR3 for alpha chain variable domain of TCR clone 369638 (TRAV17, TRAJ45)
FATASGGGADGLTF

SEQ ID NO: 739276 - protein, 13 aa, Homo sapiens
  CDR3 for beta chain variable domain of TCR clone 369638 (TRBV15, TRBJ2-7)
CATSTTGHYEQYF

SEQ ID NO: 739277 - protein, 13 aa, Homo sapiens
  CDR3 for alpha chain variable domain of TCR clone 369639 (TRAV13-1, TRAJ6)
CAASSGGSYIHTF

SEQ ID NO: 739278 - protein, 15 aa, Homo sapiens
  CDR3 for beta chain variable domain of TCR clone 369639 (TRBV12-4, TRBJ2-5)
CASSPPTGLQDTQYF

SEQ ID NO: 739279 - protein, 13 aa, Homo sapiens
  CDR3 for alpha chain variable domain of TCR clone 369640 (TRAV27, TRAJ40)
CAGPPSGTYKYIF

SEQ ID NO: 739280 - protein, 13 aa, Homo sapiens
  CDR3 for beta chain variable domain of TCR clone 369640 (TRBV28, TRBJ1-2)
CAGRDGGNYGYTF

SEQ ID NO: 739281 - protein, 16 aa, Homo sapiens
  CDR3 for alpha chain variable domain of TCR clone 369641 (TRAV12-3, TRAJ53)
CAMGPGSGGSNYKLTF

SEQ ID NO: 739282 - protein, 11 aa, Homo sapiens
  CDR3 for beta chain variable domain of TCR clone 369641 (TRBV29-1, TRBJ2-5)
CSEDRPGTQYF

SEQ ID NO: 739283 - protein, 17 aa, Homo sapiens
  CDR3 for alpha chain variable domain of TCR clone 369642 (TRAV3, TRAJ28)
CAVREANSGAGSYQLTF

SEQ ID NO: 739284 - protein, 17 aa, Homo sapiens
  CDR3 for beta chain variable domain of TCR clone 369642 (TRBV20-1, TRBJ2-1)
CSASSSGLAGSYNEQFF

SEQ ID NO: 739285 - protein, 13 aa, Homo sapiens
  CDR3 for alpha chain variable domain of TCR clone 369643 (TRAV2, TRAJ40)
CAVVTAGTYKYVF

SEQ ID NO: 739286 - protein, 14 aa, Homo sapiens
  CDR3 for beta chain variable domain of TCR clone 369643 (TRBV19, TRBJ2-1)
CASPTFVLSGEQFF

SEQ ID NO: 739287 - protein, 14 aa, Homo sapiens
  CDR3 for alpha chain variable domain of TCR clone 369644 (TRAV12-2, TRAJ40)
CAVKIPSGTYKYIF

SEQ ID NO: 739288 - protein, 15 aa, Homo sapiens
  CDR3 for beta chain variable domain of TCR clone 369644 (TRBV5-1, TRBJ2-3)
CASRNQAGSTDTQYF

SEQ ID NO: 739289 - protein, 15 aa, Homo sapiens
  CDR3 for alpha chain variable domain of TCR clone 369645 (TRAV12-1, TRAJ10)
CVVNKLTGGGKKLTF

SEQ ID NO: 739290 - protein, 17 aa, Homo sapiens
  CDR3 for beta chain variable domain of TCR clone 369645 (TRBV5-1, TRBJ1-6)
CASSPSLQGSDNSPLHF

SEQ ID NO: 739291 - protein, 14 aa, Homo sapiens
  CDR3 for alpha chain variable domain of TCR clone 369646 (TRAV12-2, TRAJ40)
CAVKIPSGTYKYIF

SEQ ID NO: 739292 - protein, 16 aa, Homo sapiens
  CDR3 for beta chain variable domain of TCR clone 369646 (TRBV28, TRBJ2-5)
CASSFSPAGGWETQCF

SEQ ID NO: 739293 - protein, 13 aa, Homo sapiens
  CDR3 for alpha chain variable domain of TCR clone 369647 (TRAV3, TRAJ21)
CAVREPDFNKFYF

SEQ ID NO: 739294 - protein, 15 aa, Homo sapiens
  CDR3 for beta chain variable domain of TCR clone 369647 (TRBV19, TRBJ2-1)
CASSILGEGRNEQFF

SEQ ID NO: 739295 - protein, 15 aa, Homo sapiens
  CDR3 for alpha chain variable domain of TCR clone 369648 (TRAV14/DV4, TRAJ49)
CAMREGRYTGNQFYF

SEQ ID NO: 739296 - protein, 17 aa, Homo sapiens
  CDR3 for beta chain variable domain of TCR clone 369648 (TRBV12-4, TRBJ1-5)
CASSLRGDRGPNQPQHF

SEQ ID NO: 739297 - protein, 20 aa, Homo sapiens
  CDR3 for alpha chain variable domain of TCR clone 369649 (TRAV12-1, TRAJ42)
SSVIQPPTSVKGGSQGNLIF

SEQ ID NO: 739298 - protein, 15 aa, Homo sapiens
  CDR3 for beta chain variable domain of TCR clone 369649 (TRBV7-6, TRBJ1-1)
CASSLGQEGNTEAFF

SEQ ID NO: 739299 - protein, 12 aa, Homo sapiens
  CDR3 for alpha chain variable domain of TCR clone 369650 (TRAV27, TRAJ42)
CAGGGSQGNLIC

SEQ ID NO: 739300 - protein, 13 aa, Homo sapiens
  CDR3 for beta chain variable domain of TCR clone 369650 (TRBV19, TRBJ2-7)
CASSIRSSYEQYF

SEQ ID NO: 739301 - protein, 10 aa, Homo sapiens
  CDR3 for alpha chain variable domain of TCR clone 369651 (TRAV26-1, TRAJ36)
CIVRPPGIKL

SEQ ID NO: 739302 - protein, 15 aa, Homo sapiens
  CDR3 for beta chain variable domain of TCR clone 369651 (TRBV10-3, TRBJ2-6)
CATPAAASGANVLTF

SEQ ID NO: 739303 - protein, 14 aa, Homo sapiens
  CDR3 for alpha chain variable domain of TCR clone 369652 (TRAV1-2, TRAJ8)
CAVREHTGFQKLVF

SEQ ID NO: 739304 - protein, 16 aa, Homo sapiens
  CDR3 for beta chain variable domain of TCR clone 369652 (TRBV12-5, TRBJ2-5)
CASGPRTSGNQETQYF

SEQ ID NO: 739305 - protein, 13 aa, Homo sapiens
  CDR3 for alpha chain variable domain of TCR clone 369653 (TRAV1-2, TRAJ9)
CAALNTLCFKTIF

SEQ ID NO: 739306 - protein, 14 aa, Homo sapiens
  CDR3 for beta chain variable domain of TCR clone 369653 (TRBV13, TRBJ2-3)
CASSSGSPTDTQYF

SEQ ID NO: 739307 - protein, 16 aa, Homo sapiens
  CDR3 for alpha chain variable domain of TCR clone 369654 (TRAV30, TRAJ24)
CGTVIVDADSWGKFQF

SEQ ID NO: 739308 - protein, 12 aa, Homo sapiens
  CDR3 for beta chain variable domain of TCR clone 369654 (TRBV27, TRBJ2-1)
CASRGFYNEQFF

SEQ ID NO: 739309 - protein, 13 aa, Homo sapiens
  CDR3 for alpha chain variable domain of TCR clone 369655 (TRAV8-3, TRAJ44)
CAVVPGTASKLTF

SEQ ID NO: 739310 - protein, 14 aa, Homo sapiens
  CDR3 for beta chain variable domain of TCR clone 369655 (TRBV18, TRBJ1-4)
CASSPGPNGEKLFF

SEQ ID NO: 739311 - protein, 13 aa, Homo sapiens
  CDR3 for alpha chain variable domain of TCR clone 369656 (TRAV20, TRAJ31)
CAVQAIGGARLMF

SEQ ID NO: 739312 - protein, 14 aa, Homo sapiens
  CDR3 for beta chain variable domain of TCR clone 369656 (TRBV2, TRBJ1-5)
CASSGTVSNEPQHF

SEQ ID NO: 739313 - protein, 11 aa, Homo sapiens
  CDR3 for alpha chain variable domain of TCR clone 369657 (TRAV2, TRAJ33)
CAVYSNYQLIW

SEQ ID NO: 739314 - protein, 13 aa, Homo sapiens
  CDR3 for beta chain variable domain of TCR clone 369657 (TRBV7-2, TRBJ2-4)
CASSREHANIQYF

SEQ ID NO: 739315 - protein, 16 aa, Homo sapiens
  CDR3 for alpha chain variable domain of TCR clone 369658 (TRAV23/DV6, TRAJ57)
CAASSTLSQGVSEKLF

SEQ ID NO: 739316 - protein, 14 aa, Homo sapiens
  CDR3 for beta chain variable domain of TCR clone 369658 (TRBV25-1, TRBJ1-1)
CASTHLGGNTEAFF

SEQ ID NO: 739317 - protein, 14 aa, Homo sapiens
  CDR3 for alpha chain variable domain of TCR clone 369659 (TRAV12-3, TRAJ10)
SHLPLTGGGNKLTF

SEQ ID NO: 739318 - protein, 12 aa, Homo sapiens
  CDR3 for beta chain variable domain of TCR clone 369659 (TRBV7-3, TRBJ2-5)
RASSSPGGTQYF

SEQ ID NO: 739319 - protein, 16 aa, Homo sapiens
  CDR3 for alpha chain variable domain of TCR clone 369660 (TRAV30, TRAJ24)
CGTQIVDADSWGKFQF

SEQ ID NO: 739320 - protein, 15 aa, Homo sapiens
  CDR3 for beta chain variable domain of TCR clone 369660 (TRBV7-9, TRBJ1-4)
CASSARTGGNEKLFF

SEQ ID NO: 739321 - protein, 13 aa, Homo sapiens
  CDR3 for alpha chain variable domain of TCR clone 369661 (TRAV20, TRAJ40)
CAVPFSGTYKYIF

SEQ ID NO: 739322 - protein, 13 aa, Homo sapiens
  CDR3 for beta chain variable domain of TCR clone 369661 (TRBV15, TRBJ2-5)
CAASQIGEETQYF

SEQ ID NO: 739323 - protein, 14 aa, Homo sapiens
  CDR3 for alpha chain variable domain of TCR clone 369662 (TRAV13-1, TRAJ35)
CAASKGGFGNVLHC

SEQ ID NO: 739324 - protein, 13 aa, Homo sapiens
  CDR3 for beta chain variable domain of TCR clone 369662 (TRBV7-3, TRBJ1-1)
CASSQDWWAKAFF

SEQ ID NO: 739325 - protein, 18 aa, Homo sapiens
  CDR3 for alpha chain variable domain of TCR clone 369663 (TRAV13-1, TRAJ52)
CAAKNPNAGGTSYGQLTF

SEQ ID NO: 739326 - protein, 14 aa, Homo sapiens
  CDR3 for beta chain variable domain of TCR clone 369663 (TRBV7-8, TRBJ2-3)
CASSLEAGTDTQYF

SEQ ID NO: 739327 - protein, 15 aa, Homo sapiens
  CDR3 for alpha chain variable domain of TCR clone 369664 (TRAV8-4, TRAJ45)
CAVIWTGGGADGLTF

SEQ ID NO: 739328 - protein, 14 aa, Homo sapiens
  CDR3 for beta chain variable domain of TCR clone 369664 (TRBV29-1, TRBJ2-7)
CSVDLLATSSTSGR

SEQ ID NO: 739329 - protein, 17 aa, Homo sapiens
  CDR3 for alpha chain variable domain of TCR clone 369665 (TRAV3, TRAJ6)
CAVRDGPREGGSYIPTF

SEQ ID NO: 739330 - protein, 13 aa, Homo sapiens
  CDR3 for beta chain variable domain of TCR clone 369665 (TRBV27, TRBJ2-1)
CASRTLGVGEQFF

SEQ ID NO: 739331 - protein, 15 aa, Homo sapiens
  CDR3 for alpha chain variable domain of TCR clone 369666 (TRAV9-2, TRAJ57)
CALFSGQGGSEKLVF

SEQ ID NO: 739332 - protein, 16 aa, Homo sapiens
  CDR3 for beta chain variable domain of TCR clone 369666 (TRBV12-4, TRBJ2-5)
CASSFFVRGRQETQYF

SEQ ID NO: 739333 - protein, 14 aa, Homo sapiens
  CDR3 for alpha chain variable domain of TCR clone 369667 (TRAV12-1, TRAJ43)
CVVNGRSNNNDMRF

SEQ ID NO: 739334 - protein, 13 aa, Homo sapiens
  CDR3 for beta chain variable domain of TCR clone 369667 (TRBV10-3, TRBJ2-7)
CASKLAANYEQYF

SEQ ID NO: 739335 - protein, 12 aa, Homo sapiens
  CDR3 for alpha chain variable domain of TCR clone 369668 (TRAV21, TRAJ42)
CAVGGSQGNVIF

SEQ ID NO: 739336 - protein, 14 aa, Homo sapiens
  CDR3 for beta chain variable domain of TCR clone 369668 (TRBV12-4, TRBJ1-1)
CASSLGTGGTEAFF

SEQ ID NO: 739337 - protein, 13 aa, Homo sapiens
  CDR3 for alpha chain variable domain of TCR clone 369669 (TRAV12-1, TRAJ7)
CVVNMRGNNRLAF

SEQ ID NO: 739338 - protein, 16 aa, Homo sapiens
  CDR3 for beta chain variable domain of TCR clone 369669 (TRBV20-1, TRBJ1-4)
CSAPGQGLLTNEELFF

SEQ ID NO: 739339 - protein, 15 aa, Homo sapiens
  CDR3 for alpha chain variable domain of TCR clone 369670 (TRAV3, TRAJ3)
CAVRDRDSSASKIIF

SEQ ID NO: 739340 - protein, 14 aa, Homo sapiens
  CDR3 for beta chain variable domain of TCR clone 369670 (TRBV7-9, TRBJ1-2)
CASSRQGANYGYTF

SEQ ID NO: 739341 - protein, 13 aa, Homo sapiens
  CDR3 for alpha chain variable domain of TCR clone 369671 (TRAV2, TRAJ40)
CAVVTSGTYKYFF

SEQ ID NO: 739342 - protein, 14 aa, Homo sapiens
  CDR3 for beta chain variable domain of TCR clone 369671 (TRBV7-9, TRBJ2-1)
CASSSMVGFGEQFF

SEQ ID NO: 739343 - protein, 16 aa, Homo sapiens
  CDR3 for alpha chain variable domain of TCR clone 369672 (TRAV21, TRAJ37)
CAVRTAGSSNTGKLIF

SEQ ID NO: 739344 - protein, 12 aa, Homo sapiens
  CDR3 for beta chain variable domain of TCR clone 369672 (TRBV4-1, TRBJ2-3)
CASSQGTDTQYF

SEQ ID NO: 739345 - protein, 19 aa, Homo sapiens
  CDR3 for alpha chain variable domain of TCR clone 369673 (TRAV10, TRAJ45)
PTSVWCGGYSGGGADGLTL

SEQ ID NO: 739346 - protein, 14 aa, Homo sapiens
  CDR3 for beta chain variable domain of TCR clone 369673 (TRBV7-8, TRBJ2-3)
CASSLEAGTDTQYF

SEQ ID NO: 739347 - protein, 13 aa, Homo sapiens
  CDR3 for alpha chain variable domain of TCR clone 369674 (TRAV20, TRAJ37)
CAGCSSNTGKLIF

SEQ ID NO: 739348 - protein, 21 aa, Homo sapiens
  CDR3 for beta chain variable domain of TCR clone 369674 (TRBV4-2, TRBJ2-3)
PCSQKTRPYISVPAAPDTQYF

SEQ ID NO: 739349 - protein, 14 aa, Homo sapiens
  CDR3 for alpha chain variable domain of TCR clone 369675 (TRAV38-1, TRAJ45)
CASHSGGGADGLTF

SEQ ID NO: 739350 - protein, 12 aa, Homo sapiens
  CDR3 for beta chain variable domain of TCR clone 369675 (TRBV7-9, TRBJ2-7)
CASSFGSYEQYF

SEQ ID NO: 739351 - protein, 12 aa, Homo sapiens
  CDR3 for alpha chain variable domain of TCR clone 369676 (TRAV1-1, TRAJ8)
CAGGTGFHKLVF

SEQ ID NO: 739352 - protein, 15 aa, Homo sapiens
  CDR3 for beta chain variable domain of TCR clone 369676 (TRBV24-1, TRBJ2-1)
CATSGSGGFYNEQFF

SEQ ID NO: 739353 - protein, 15 aa, Homo sapiens
  CDR3 for alpha chain variable domain of TCR clone 369677 (TRAV35, TRAJ58)
CAGRRQETSGSRMTF

SEQ ID NO: 739354 - protein, 11 aa, Homo sapiens
  CDR3 for beta chain variable domain of TCR clone 369677 (TRBV11-2, TRBJ1-1)
CASSINTEAFF

SEQ ID NO: 739355 - protein, 11 aa, Homo sapiens
  CDR3 for alpha chain variable domain of TCR clone 369678 (TRAV17, TRAJ31)
RATDRTARLMF

SEQ ID NO: 739356 - protein, 12 aa, Homo sapiens
  CDR3 for beta chain variable domain of TCR clone 369678 (TRBV29-1, TRBJ2-3)
CSVTGGADTQYF

SEQ ID NO: 739357 - protein, 10 aa, Homo sapiens
  CDR3 for alpha chain variable domain of TCR clone 369679 (TRAV8-2, TRAJ29)
CTGGNTPLVF

SEQ ID NO: 739358 - protein, 17 aa, Homo sapiens
  CDR3 for beta chain variable domain of TCR clone 369679 (TRBV2, TRBJ2-7)
CASSQALTGWDSYEQHF

SEQ ID NO: 739359 - protein, 13 aa, Homo sapiens
  CDR3 for alpha chain variable domain of TCR clone 369680 (TRAV35, TRAJ53)
CAGQESSNYKLTF

SEQ ID NO: 739360 - protein, 11 aa, Homo sapiens
  CDR3 for beta chain variable domain of TCR clone 369680 (TRBV29-1, TRBJ2-5)
CSEDRTGTQFF

SEQ ID NO: 739361 - protein, 11 aa, Homo sapiens
  CDR3 for alpha chain variable domain of TCR clone 369681 (TRAV2, TRAJ13)
CASGGYQKVTF

SEQ ID NO: 739362 - protein, 12 aa, Homo sapiens
  CDR3 for beta chain variable domain of TCR clone 369681 (TRBV12-4, TRBJ2-5)
CASSLGQETQYF

SEQ ID NO: 739363 - protein, 15 aa, Homo sapiens
  CDR3 for alpha chain variable domain of TCR clone 369682 (TRAV21, TRAJ53)
CATLNSGGSNYKLTF

SEQ ID NO: 739364 - protein, 16 aa, Homo sapiens
  CDR3 for beta chain variable domain of TCR clone 369682 (TRBV9, TRBJ2-1)
CASSVGGGGDYNEQFS

SEQ ID NO: 739365 - protein, 13 aa, Homo sapiens
  CDR3 for alpha chain variable domain of TCR clone 369683 (TRAV12-3, TRAJ13)
CAMSSGGYQKGTF

SEQ ID NO: 739366 - protein, 13 aa, Homo sapiens
  CDR3 for beta chain variable domain of TCR clone 369683 (TRBV20-1, TRBJ1-1)
CSAPPGGHTEDFF

SEQ ID NO: 739367 - protein, 18 aa, Homo sapiens
  CDR3 for alpha chain variable domain of TCR clone 369684 (TRAV21, TRAJ52)
CSVRPSPAGGTSYGKLTF

SEQ ID NO: 739368 - protein, 13 aa, Homo sapiens
  CDR3 for beta chain variable domain of TCR clone 369684 (TRBV20-1, TRBJ2-5)
CSAREAFQETQYF

SEQ ID NO: 739369 - protein, 17 aa, Homo sapiens
  CDR3 for alpha chain variable domain of TCR clone 369685 (TRAV8-6, TRAJ58)
CAVSSWVGETSGSLLTF

SEQ ID NO: 739370 - protein, 14 aa, Homo sapiens
  CDR3 for beta chain variable domain of TCR clone 369685 (TRBV4-2, TRBJ2-1)
CASGLYRAYNEQFF

SEQ ID NO: 739371 - protein, 14 aa, Homo sapiens
  CDR3 for alpha chain variable domain of TCR clone 369686 (TRAV9-2, TRAJ39)
CALYIYNAGNMLTF

SEQ ID NO: 739372 - protein, 13 aa, Homo sapiens
  CDR3 for beta chain variable domain of TCR clone 369686 (TRBV10-3, TRBJ2-7)
CAISEKGGYEQYF

SEQ ID NO: 739373 - protein, 16 aa, Homo sapiens
  CDR3 for alpha chain variable domain of TCR clone 369687 (TRAV30, TRAJ24)
CGTEIVDADSWGKFQF

SEQ ID NO: 739374 - protein, 15 aa, Homo sapiens
  CDR3 for beta chain variable domain of TCR clone 369687 (TRBV20-1, TRBJ2-4)
CSARDPTGGPNIQYF

SEQ ID NO: 739375 - protein, 13 aa, Homo sapiens
  CDR3 for alpha chain variable domain of TCR clone 369688 (TRAV3, TRAJ27)
CAVRPLGTGKSTF

SEQ ID NO: 739376 - protein, 13 aa, Homo sapiens
  CDR3 for beta chain variable domain of TCR clone 369688 (TRBV7-9, TRBJ2-5)
CASLSPGQETQYF

SEQ ID NO: 739377 - protein, 14 aa, Homo sapiens
  CDR3 for alpha chain variable domain of TCR clone 369689 (TRAV29/DV5, TRAJ36)
CAARRKTGAKNLFF

SEQ ID NO: 739378 - protein, 15 aa, Homo sapiens
  CDR3 for beta chain variable domain of TCR clone 369689 (TRBV20-1, TRBJ2-7)
CSARDRVSGMDEQYF

SEQ ID NO: 739379 - protein, 18 aa, Homo sapiens
  CDR3 for alpha chain variable domain of TCR clone 369690 (TRAV16, TRAJ4)
CITVLSRMFSGGYNKLIF

SEQ ID NO: 739380 - protein, 12 aa, Homo sapiens
  CDR3 for beta chain variable domain of TCR clone 369690 (TRBV29-1, TRBJ2-3)
CSVTGGADTQYF

SEQ ID NO: 739381 - protein, 15 aa, Homo sapiens
  CDR3 for alpha chain variable domain of TCR clone 369691 (TRAV3, TRAJ47)
CSVRDIGEYGNKLAF

SEQ ID NO: 739382 - protein, 14 aa, Homo sapiens
  CDR3 for beta chain variable domain of TCR clone 369691 (TRBV13, TRBJ2-5)
CASSLERVGETQYF

SEQ ID NO: 739383 - protein, 12 aa, Homo sapiens
  CDR3 for alpha chain variable domain of TCR clone 369692 (TRAV17, TRAJ20)
CATDSNDYKLSF

SEQ ID NO: 739384 - protein, 14 aa, Homo sapiens
  CDR3 for beta chain variable domain of TCR clone 369692 (TRBV18, TRBJ2-5)
CASSPGVSQETQYF

SEQ ID NO: 739385 - protein, 11 aa, Homo sapiens
  CDR3 for alpha chain variable domain of TCR clone 369693 (TRAV2, TRAJ13)
CASGGYHKVTF

SEQ ID NO: 739386 - protein, 14 aa, Homo sapiens
  CDR3 for beta chain variable domain of TCR clone 369693 (TRBV7-2, TRBJ2-7)
CASSLYPGRYEQYF

SEQ ID NO: 739387 - protein, 15 aa, Homo sapiens
  CDR3 for alpha chain variable domain of TCR clone 369694 (TRAV25, TRAJ41)
CAGPWNSNSGYALNF

SEQ ID NO: 739388 - protein, 13 aa, Homo sapiens
  CDR3 for beta chain variable domain of TCR clone 369694 (TRBV15, TRBJ1-1)
CATSIGIQARAFF

SEQ ID NO: 739389 - protein, 13 aa, Homo sapiens
  CDR3 for alpha chain variable domain of TCR clone 369695 (TRAV13-1, TRAJ24)
CAASDGSWGKLQF

SEQ ID NO: 739390 - protein, 13 aa, Homo sapiens
  CDR3 for beta chain variable domain of TCR clone 369695 (TRBV4-3, TRBJ2-5)
CASSRGGGETQYF

SEQ ID NO: 739391 - protein, 13 aa, Homo sapiens
  CDR3 for alpha chain variable domain of TCR clone 369696 (TRAV38-1, TRAJ42)
CARWGGSQGNLIF

SEQ ID NO: 739392 - protein, 17 aa, Homo sapiens
  CDR3 for beta chain variable domain of TCR clone 369696 (TRBV20-1, TRBJ2-1)
CSARDSLAGAWDNEQFF

SEQ ID NO: 739393 - protein, 13 aa, Homo sapiens
  CDR3 for alpha chain variable domain of TCR clone 369697 (TRAV8-3, TRAJ48)
CAVVPFGNEKLTF

SEQ ID NO: 739394 - protein, 14 aa, Homo sapiens
  CDR3 for beta chain variable domain of TCR clone 369697 (TRBV18, TRBJ2-7)
CASSPRRGAYEQYF

SEQ ID NO: 739395 - protein, 13 aa, Homo sapiens
  CDR3 for alpha chain variable domain of TCR clone 369698 (TRAV12-1, TRAJ34)
CVVTGYNTDKLIF

SEQ ID NO: 739396 - protein, 15 aa, Homo sapiens
  CDR3 for beta chain variable domain of TCR clone 369698 (TRBV28, TRBJ2-7)
CTSVPAKRGVYEQYF

SEQ ID NO: 739397 - protein, 15 aa, Homo sapiens
  CDR3 for alpha chain variable domain of TCR clone 369699 (TRAV3, TRAJ22)
CAVRDRGGSAKELTF

SEQ ID NO: 739398 - protein, 13 aa, Homo sapiens
  CDR3 for beta chain variable domain of TCR clone 369699 (TRBV2, TRBJ1-5)
CATAGPGNQPQHF

SEQ ID NO: 739399 - protein, 16 aa, Homo sapiens
  CDR3 for alpha chain variable domain of TCR clone 369700 (TRAV26-1, TRAJ38)
CIVRVELGGNNRKLIW

SEQ ID NO: 739400 - protein, 18 aa, Homo sapiens
  CDR3 for beta chain variable domain of TCR clone 369700 (TRBV12-4, TRBJ2-2)
CASSLVAGTRGRTGELFF

SEQ ID NO: 739401 - protein, 15 aa, Homo sapiens
  CDR3 for alpha chain variable domain of TCR clone 369701 (TRAV12-2, TRAJ57)
CAVSRGQGGSEKLVF

SEQ ID NO: 739402 - protein, 14 aa, Homo sapiens
  CDR3 for beta chain variable domain of TCR clone 369701 (TRBV20-1, TRBJ2-1)
CSAHPGLPYNEQFS

SEQ ID NO: 739403 - protein, 17 aa, Homo sapiens
  CDR3 for alpha chain variable domain of TCR clone 369702 (TRAV3, TRAJ12)
WAVRDGGRMDSSYKLIF

SEQ ID NO: 739404 - protein, 14 aa, Homo sapiens
  CDR3 for beta chain variable domain of TCR clone 369702 (TRBV12-4, TRBJ1-3)
CASTLTGAGNTIYF

SEQ ID NO: 739405 - protein, 11 aa, Homo sapiens
  CDR3 for alpha chain variable domain of TCR clone 369703 (TRAV17, TRAJ20)
CATDAGYKLSF

SEQ ID NO: 739406 - protein, 13 aa, Homo sapiens
  CDR3 for beta chain variable domain of TCR clone 369703 (TRBV4-1, TRBJ2-2)
CASSQENTGELFF

SEQ ID NO: 739407 - protein, 16 aa, Homo sapiens
  CDR3 for alpha chain variable domain of TCR clone 369704 (TRAV3, TRAJ10)
CAVRDMHAGGGNKLTF

SEQ ID NO: 739408 - protein, 15 aa, Homo sapiens
  CDR3 for beta chain variable domain of TCR clone 369704 (TRBV20-1, TRBJ2-7)
CSARDRVSGMDEQYF

SEQ ID NO: 739409 - protein, 13 aa, Homo sapiens
  CDR3 for alpha chain variable domain of TCR clone 369705 (TRAV26-1, TRAJ40)
CIVRVEGTYKYIF

SEQ ID NO: 739410 - protein, 15 aa, Homo sapiens
  CDR3 for beta chain variable domain of TCR clone 369705 (TRBV7-8, TRBJ2-1)
CASSLADSLYNEQFF

SEQ ID NO: 739411 - protein, 16 aa, Homo sapiens
  CDR3 for alpha chain variable domain of TCR clone 369706 (TRAV14/DV4, TRAJ39)
CAMREAYNNAGNMLTF

SEQ ID NO: 739412 - protein, 14 aa, Homo sapiens
  CDR3 for beta chain variable domain of TCR clone 369706 (TRBV7-9, TRBJ2-5)
CAGSPAQDQETQYF

SEQ ID NO: 739413 - protein, 13 aa, Homo sapiens
  CDR3 for alpha chain variable domain of TCR clone 369707 (TRAV12-2, TRAJ42)
CAVKRGSQGNLIF

SEQ ID NO: 739414 - protein, 16 aa, Homo sapiens
  CDR3 for beta chain variable domain of TCR clone 369707 (TRBV9, TRBJ2-2)
CASSAMGKGNTGVLFF

SEQ ID NO: 739415 - protein, 12 aa, Homo sapiens
  CDR3 for alpha chain variable domain of TCR clone 369708 (TRAV16, TRAJ26)
CALRSYGQNFVF

SEQ ID NO: 739416 - protein, 16 aa, Homo sapiens
  CDR3 for beta chain variable domain of TCR clone 369708 (TRBV27, TRBJ2-2)
CASSFRGLVRTGELFF

SEQ ID NO: 739417 - protein, 16 aa, Homo sapiens
  CDR3 for alpha chain variable domain of TCR clone 369709 (TRAV17, TRAJ28)
CVTASVSGAGSYHLTF

SEQ ID NO: 739418 - protein, 11 aa, Homo sapiens
  CDR3 for beta chain variable domain of TCR clone 369709 (TRBV7-9, TRBJ2-5)
CASSLGEAQYF

SEQ ID NO: 739419 - protein, 12 aa, Homo sapiens
  CDR3 for alpha chain variable domain of TCR clone 369710 (TRAV21, TRAJ8)
CAVNTGFQKLVF

SEQ ID NO: 739420 - protein, 15 aa, Homo sapiens
  CDR3 for beta chain variable domain of TCR clone 369710 (TRBV7-8, TRBJ1-5)
CASSLERRGLEPQHF

SEQ ID NO: 739421 - protein, 14 aa, Homo sapiens
  CDR3 for alpha chain variable domain of TCR clone 369711 (TRAV1-2, TRAJ16)
CAVNRFSDGQKLLF

SEQ ID NO: 739422 - protein, 15 aa, Homo sapiens
  CDR3 for beta chain variable domain of TCR clone 369711 (TRBV7-2, TRBJ2-3)
CASSLNGGGTDTQYF

SEQ ID NO: 739423 - protein, 14 aa, Homo sapiens
  CDR3 for alpha chain variable domain of TCR clone 369712 (TRAV12-1, TRAJ45)
CVVNVGGGADGLPF

SEQ ID NO: 739424 - protein, 14 aa, Homo sapiens
  CDR3 for beta chain variable domain of TCR clone 369712 (TRBV29-1, TRBJ2-3)
CSVEPGTRTDTQYF

SEQ ID NO: 739425 - protein, 15 aa, Homo sapiens
  CDR3 for alpha chain variable domain of TCR clone 369713 (TRAV3, TRAJ3)
CAVRDMSSSASKIIF

SEQ ID NO: 739426 - protein, 14 aa, Homo sapiens
  CDR3 for beta chain variable domain of TCR clone 369713 (TRBV6-3, TRBJ2-5)
CASRRDGGEETQYF

SEQ ID NO: 739427 - protein, 15 aa, Homo sapiens
  CDR3 for alpha chain variable domain of TCR clone 369714 (TRAV23/DV6, TRAJ44)
CSASGGTVTASKLTF

SEQ ID NO: 739428 - protein, 15 aa, Homo sapiens
  CDR3 for beta chain variable domain of TCR clone 369714 (TRBV6-3, TRBJ2-7)
CASSSPGTVFYEQYF

SEQ ID NO: 739429 - protein, 14 aa, Homo sapiens
  CDR3 for alpha chain variable domain of TCR clone 369715 (TRAV8-3, TRAJ28)
CAVVPEAGSYQLTF

SEQ ID NO: 739430 - protein, 15 aa, Homo sapiens
  CDR3 for beta chain variable domain of TCR clone 369715 (TRBV6-3, TRBJ2-2)
CASRGMTVDTGELFF

SEQ ID NO: 739431 - protein, 15 aa, Homo sapiens
  CDR3 for alpha chain variable domain of TCR clone 369716 (TRAV21, TRAJ10)
CAVRGLTGGGNKLTF

SEQ ID NO: 739432 - protein, 12 aa, Homo sapiens
  CDR3 for beta chain variable domain of TCR clone 369716 (TRBV11-2, TRBJ2-2)
CASSLPTGELFF

SEQ ID NO: 739433 - protein, 14 aa, Homo sapiens
  CDR3 for alpha chain variable domain of TCR clone 369717 (TRAV12-3, TRAJ10)
SHLPLTGGGNKLTF

SEQ ID NO: 739434 - protein, 13 aa, Homo sapiens
  CDR3 for beta chain variable domain of TCR clone 369717 (TRBV11-2, TRBJ2-1)
CASSLGLAGGRFF

SEQ ID NO: 739435 - protein, 13 aa, Homo sapiens
  CDR3 for alpha chain variable domain of TCR clone 369718 (TRAV12-3, TRAJ48)
CAMSLAGNEKLTF

SEQ ID NO: 739436 - protein, 11 aa, Homo sapiens
  CDR3 for beta chain variable domain of TCR clone 369718 (TRBV7-2, TRBJ2-7)
CASSSGLWQYF

SEQ ID NO: 739437 - protein, 21 aa, Homo sapiens
  CDR3 for alpha chain variable domain of TCR clone 369719 (TRAV17, TRAJ52)
CFLLLCYGRPSGGTSYGKLTF

SEQ ID NO: 739438 - protein, 15 aa, Homo sapiens
  CDR3 for beta chain variable domain of TCR clone 369719 (TRBV5-1, TRBJ2-1)
CASSLVANSYNEQFF

SEQ ID NO: 739439 - protein, 17 aa, Homo sapiens
  CDR3 for alpha chain variable domain of TCR clone 369720 (TRAV19, TRAJ24)
CAPLHYRQLTAGGNCSL

SEQ ID NO: 739440 - protein, 13 aa, Homo sapiens
  CDR3 for beta chain variable domain of TCR clone 369720 (TRBV12-5, TRBJ2-3)
CASGDRQSDTQYF

SEQ ID NO: 739441 - protein, 14 aa, Homo sapiens
  CDR3 for alpha chain variable domain of TCR clone 369721 (TRAV27, TRAJ42)
CAGEKVGSQGNLIF

SEQ ID NO: 739442 - protein, 14 aa, Homo sapiens
  CDR3 for beta chain variable domain of TCR clone 369721 (TRBV5-1, TRBJ1-1)
CASSSGTLKLSLDK

SEQ ID NO: 739443 - protein, 13 aa, Homo sapiens
  CDR3 for alpha chain variable domain of TCR clone 369722 (TRAV29/DV5, TRAJ31)
RAASRNNNARLMF

SEQ ID NO: 739444 - protein, 14 aa, Homo sapiens
  CDR3 for beta chain variable domain of TCR clone 369722 (TRBV7-9, TRBJ2-2)
CASSLVQDTGELFF

SEQ ID NO: 739445 - protein, 14 aa, Homo sapiens
  CDR3 for alpha chain variable domain of TCR clone 369723 (TRAV29/DV5, TRAJ47)
CAASEPEYGNKLVF

SEQ ID NO: 739446 - protein, 15 aa, Homo sapiens
  CDR3 for beta chain variable domain of TCR clone 369723 (TRBV4-1, TRBJ2-5)
CASSQWDLYQETQYF

SEQ ID NO: 739447 - protein, 13 aa, Homo sapiens
  CDR3 for alpha chain variable domain of TCR clone 369724 (TRAV35, TRAJ42)
CAGFPGSQGILIF

SEQ ID NO: 739448 - protein, 13 aa, Homo sapiens
  CDR3 for beta chain variable domain of TCR clone 369724 (TRBV29-1, TRBJ2-1)
CSVEGGRVNEQFF

SEQ ID NO: 739449 - protein, 12 aa, Homo sapiens
  CDR3 for alpha chain variable domain of TCR clone 369725 (TRAV8-1, TRAJ23)
CAVGNQGGKLIF

SEQ ID NO: 739450 - protein, 13 aa, Homo sapiens
  CDR3 for beta chain variable domain of TCR clone 369725 (TRBV7-9, TRBJ2-7)
CASSFAGAYEQYF

SEQ ID NO: 739451 - protein, 13 aa, Homo sapiens
  CDR3 for alpha chain variable domain of TCR clone 369726 (TRAV21, TRAJ49)
CAVRQSTGNQFYF

SEQ ID NO: 739452 - protein, 13 aa, Homo sapiens
  CDR3 for beta chain variable domain of TCR clone 369726 (TRBV20-1, TRBJ2-7)
CSATTPGIYEQYF

SEQ ID NO: 739453 - protein, 15 aa, Homo sapiens
  CDR3 for alpha chain variable domain of TCR clone 369727 (TRAV3, TRAJ20)
CAVRDIKLSDYKLSF

SEQ ID NO: 739454 - protein, 11 aa, Homo sapiens
  CDR3 for beta chain variable domain of TCR clone 369727 (TRBV29-1, TRBJ2-5)
CSEDRTGTQYF

SEQ ID NO: 739455 - protein, 14 aa, Homo sapiens
  CDR3 for alpha chain variable domain of TCR clone 369728 (TRAV8-3, TRAJ30)
CAVGDMNRDDKIIF

SEQ ID NO: 739456 - protein, 15 aa, Homo sapiens
  CDR3 for beta chain variable domain of TCR clone 369728 (TRBV9, TRBJ1-6)
CASSVAGTGDSPLHF

SEQ ID NO: 739457 - protein, 15 aa, Homo sapiens
  CDR3 for alpha chain variable domain of TCR clone 369729 (TRAV8-3, TRAJ37)
CAVGAPSSNTVKLIF

SEQ ID NO: 739458 - protein, 15 aa, Homo sapiens
  CDR3 for beta chain variable domain of TCR clone 369729 (TRBV11-2, TRBJ1-2)
CASSQMRGLNYGYTF

SEQ ID NO: 739459 - protein, 13 aa, Homo sapiens
  CDR3 for alpha chain variable domain of TCR clone 369730 (TRAV27, TRAJ39)
CAGGNNAGNMLTF

SEQ ID NO: 739460 - protein, 19 aa, Homo sapiens
  CDR3 for beta chain variable domain of TCR clone 369730 (TRBV5-1, TRBJ2-3)
CASSLWLAGGITTTDTQYF

SEQ ID NO: 739461 - protein, 16 aa, Homo sapiens
  CDR3 for alpha chain variable domain of TCR clone 369731 (TRAV3, TRAJ10)
CAVRDMRAGGGNKFTF

SEQ ID NO: 739462 - protein, 13 aa, Homo sapiens
  CDR3 for beta chain variable domain of TCR clone 369731 (TRBV6-1, TRBJ1-1)
CASSRQGNTEAFF

SEQ ID NO: 739463 - protein, 13 aa, Homo sapiens
  CDR3 for alpha chain variable domain of TCR clone 369732 (TRAV2, TRAJ29)
WAVYSSGNTPLVF

SEQ ID NO: 739464 - protein, 14 aa, Homo sapiens
  CDR3 for beta chain variable domain of TCR clone 369732 (TRBV7-9, TRBJ1-1)
CASSLGGLKTEAFF

SEQ ID NO: 739465 - protein, 20 aa, Homo sapiens
  CDR3 for alpha chain variable domain of TCR clone 369733 (TRAV25, TRAJ21)
TATQTTDVGTYPLSFNKFYF

SEQ ID NO: 739466 - protein, 15 aa, Homo sapiens
  CDR3 for beta chain variable domain of TCR clone 369733 (TRBV7-3, TRBJ2-1)
CASSPTGGGEVEQFF

SEQ ID NO: 739467 - protein, 12 aa, Homo sapiens
  CDR3 for alpha chain variable domain of TCR clone 369734 (TRAV8-1, TRAJ26)
CAVNNYGQNFVF

SEQ ID NO: 739468 - protein, 15 aa, Homo sapiens
  CDR3 for beta chain variable domain of TCR clone 369734 (TRBV20-1, TRBJ1-1)
CSASCDRFLNTEAFF

SEQ ID NO: 739469 - protein, 16 aa, Homo sapiens
  CDR3 for alpha chain variable domain of TCR clone 369735 (TRAV35, TRAJ28)
CAGQKYSGAGSYQLTF

SEQ ID NO: 739470 - protein, 13 aa, Homo sapiens
  CDR3 for beta chain variable domain of TCR clone 369735 (TRBV19, TRBJ1-2)
CASSQGQVYGYTL

SEQ ID NO: 739471 - protein, 15 aa, Homo sapiens
  CDR3 for alpha chain variable domain of TCR clone 369736 (TRAV26-2, TRAJ57)
CILRDIRGGSENLVF

SEQ ID NO: 739472 - protein, 15 aa, Homo sapiens
  CDR3 for beta chain variable domain of TCR clone 369736 (TRBV2, TRBJ2-1)
CASDIGLAGEGEQFF

SEQ ID NO: 739473 - protein, 16 aa, Homo sapiens
  CDR3 for alpha chain variable domain of TCR clone 369737 (TRAV24, TRAJ53)
CAFNMGGGGSNYKLTF

SEQ ID NO: 739474 - protein, 16 aa, Homo sapiens
  CDR3 for beta chain variable domain of TCR clone 369737 (TRBV28, TRBJ2-7)
CASSSGTSGRGYEQYF

SEQ ID NO: 739475 - protein, 12 aa, Homo sapiens
  CDR3 for alpha chain variable domain of TCR clone 369738 (TRAV17, TRAJ39)
CATGAAGNMLTF

SEQ ID NO: 739476 - protein, 14 aa, Homo sapiens
  CDR3 for beta chain variable domain of TCR clone 369738 (TRBV7-9, TRBJ1-2)
CASSREGANYGYTF

SEQ ID NO: 739477 - protein, 15 aa, Homo sapiens
  CDR3 for alpha chain variable domain of TCR clone 369739 (TRAV8-3, TRAJ27)
CAVGPSKTNAGQSTL

SEQ ID NO: 739478 - protein, 15 aa, Homo sapiens
  CDR3 for beta chain variable domain of TCR clone 369739 (TRBV7-2, TRBJ2-1)
CASSSGLAGGNEQFF

SEQ ID NO: 739479 - protein, 15 aa, Homo sapiens
  CDR3 for alpha chain variable domain of TCR clone 369740 (TRAV20, TRAJ43)
CAVQAGERSKNEMRF

SEQ ID NO: 739480 - protein, 14 aa, Homo sapiens
  CDR3 for beta chain variable domain of TCR clone 369740 (TRBV27, TRBJ2-1)
CASRHLGGGKEQFF

SEQ ID NO: 739481 - protein, 14 aa, Homo sapiens
  CDR3 for alpha chain variable domain of TCR clone 369741 (TRAV12-3, TRAJ10)
GHLPLTGGGNKLTF

SEQ ID NO: 739482 - protein, 17 aa, Homo sapiens
  CDR3 for beta chain variable domain of TCR clone 369741 (TRBV20-1, TRBJ2-3)
CSASLLGRGGSADTQYF

SEQ ID NO: 739483 - protein, 13 aa, Homo sapiens
  CDR3 for alpha chain variable domain of TCR clone 369742 (TRAV12-3, TRAJ9)
CAMRNTGGFKTIF

SEQ ID NO: 739484 - protein, 16 aa, Homo sapiens
  CDR3 for beta chain variable domain of TCR clone 369742 (TRBV19, TRBJ2-1)
CASSIDGSVAYNEQFF

SEQ ID NO: 739485 - protein, 19 aa, Homo sapiens
  CDR3 for alpha chain variable domain of TCR clone 369743 (TRAV13-1, TRAJ52)
CAASPYQNAGGTSYGKLTF

SEQ ID NO: 739486 - protein, 14 aa, Homo sapiens
  CDR3 for beta chain variable domain of TCR clone 369743 (TRBV19, TRBJ2-7)
CASTVQGRPYQQYF

SEQ ID NO: 739487 - protein, 14 aa, Homo sapiens
  CDR3 for alpha chain variable domain of TCR clone 369744 (TRAV8-3, TRAJ48)
CCGCGQFGNEKLTF

SEQ ID NO: 739488 - protein, 14 aa, Homo sapiens
  CDR3 for beta chain variable domain of TCR clone 369744 (TRBV7-6, TRBJ2-3)
CASSLGTVTDTQYF

SEQ ID NO: 739489 - protein, 13 aa, Homo sapiens
  CDR3 for alpha chain variable domain of TCR clone 369745 (TRAV21, TRAJ9)
CAVRRSGGFKTIF

SEQ ID NO: 739490 - protein, 20 aa, Homo sapiens
  CDR3 for beta chain variable domain of TCR clone 369745 (TRBV28, TRBJ2-1)
CASTPIGRSPGLAGGNEQFC

SEQ ID NO: 739491 - protein, 14 aa, Homo sapiens
  CDR3 for alpha chain variable domain of TCR clone 369746 (TRAV8-4, TRAJ9)
CAVRINTGGFKTIF

SEQ ID NO: 739492 - protein, 15 aa, Homo sapiens
  CDR3 for beta chain variable domain of TCR clone 369746 (TRBV10-2, TRBJ2-6)
CASSEQGTGANVLTF

SEQ ID NO: 739493 - protein, 14 aa, Homo sapiens
  CDR3 for alpha chain variable domain of TCR clone 369747 (TRAV12-2, TRAJ13)
CAVKKPGGYQKVTF

SEQ ID NO: 739494 - protein, 15 aa, Homo sapiens
  CDR3 for beta chain variable domain of TCR clone 369747 (TRBV27, TRBJ2-1)
CASSNGEGPPMSSSS

SEQ ID NO: 739495 - protein, 12 aa, Homo sapiens
  CDR3 for alpha chain variable domain of TCR clone 369748 (TRAV26-2, TRAJ21)
CILKGNFNKFYF

SEQ ID NO: 739496 - protein, 14 aa, Homo sapiens
  CDR3 for beta chain variable domain of TCR clone 369748 (TRBV12-4, TRBJ1-1)
CASSLGTGGTEDFF

SEQ ID NO: 739497 - protein, 13 aa, Homo sapiens
  CDR3 for alpha chain variable domain of TCR clone 369749 (TRAV21, TRAJ57)
CAVTQGGSEKLVF

SEQ ID NO: 739498 - protein, 13 aa, Homo sapiens
  CDR3 for beta chain variable domain of TCR clone 369749 (TRBV11-3, TRBJ2-7)
CASSFGVGYEQYF

SEQ ID NO: 739499 - protein, 11 aa, Homo sapiens
  CDR3 for alpha chain variable domain of TCR clone 369750 (TRAV1-1, TRAJ23)
CAVHQGGKLIF

SEQ ID NO: 739500 - protein, 20 aa, Homo sapiens
  CDR3 for beta chain variable domain of TCR clone 369750 (TRBV7-8, TRBJ2-2)
CASSHLFPGTTIQITGELFF

SEQ ID NO: 739501 - protein, 11 aa, Homo sapiens
  CDR3 for alpha chain variable domain of TCR clone 369751 (TRAV1-1, TRAJ23)
CAVRQGGKLIF

SEQ ID NO: 739502 - protein, 14 aa, Homo sapiens
  CDR3 for beta chain variable domain of TCR clone 369751 (TRBV20-1, TRBJ1-6)
CSASSVREDSPLHF

SEQ ID NO: 739503 - protein, 12 aa, Homo sapiens
  CDR3 for alpha chain variable domain of TCR clone 369752 (TRAV17, TRAJ53)
CAGGGSNYKLTF

SEQ ID NO: 739504 - protein, 16 aa, Homo sapiens
  CDR3 for beta chain variable domain of TCR clone 369752 (TRBV11-2, TRBJ2-3)
CASSLQGRGALDTQYF

SEQ ID NO: 739505 - protein, 14 aa, Homo sapiens
  CDR3 for alpha chain variable domain of TCR clone 369753 (TRAV16, TRAJ33)
CALSAMDSNYQLLW

SEQ ID NO: 739506 - protein, 15 aa, Homo sapiens
  CDR3 for beta chain variable domain of TCR clone 369753 (TRBV7-9, TRBJ1-4)
CASSARTGGNEKLFF

SEQ ID NO: 739507 - protein, 11 aa, Homo sapiens
  CDR3 for alpha chain variable domain of TCR clone 369754 (TRAV3, TRAJ20)
CAVRHSVTTTS

SEQ ID NO: 739508 - protein, 15 aa, Homo sapiens
  CDR3 for beta chain variable domain of TCR clone 369754 (TRBV6-5, TRBJ2-1)
CASSYDAGAGNEQFF

SEQ ID NO: 739509 - protein, 12 aa, Homo sapiens
  CDR3 for alpha chain variable domain of TCR clone 369755 (TRAV12-3, TRAJ17)
CAMTLTGNKLTF

SEQ ID NO: 739510 - protein, 15 aa, Homo sapiens
  CDR3 for beta chain variable domain of TCR clone 369755 (TRBV9, TRBJ1-6)
CASSVAGAGDSPLHF

SEQ ID NO: 739511 - protein, 14 aa, Homo sapiens
  CDR3 for alpha chain variable domain of TCR clone 369756 (TRAV35, TRAJ22)
CAGLRPGSARQLTF

SEQ ID NO: 739512 - protein, 12 aa, Homo sapiens
  CDR3 for beta chain variable domain of TCR clone 369756 (TRBV10-3, TRBJ2-2)
CAIRENTGELFF

SEQ ID NO: 739513 - protein, 15 aa, Homo sapiens
  CDR3 for alpha chain variable domain of TCR clone 369757 (TRAV4, TRAJ39)
CLVGPNNNAGNMLTF

SEQ ID NO: 739514 - protein, 11 aa, Homo sapiens
  CDR3 for beta chain variable domain of TCR clone 369757 (TRBV7-8, TRBJ2-7)
CASSLSLEQYF

SEQ ID NO: 739515 - protein, 12 aa, Homo sapiens
  CDR3 for alpha chain variable domain of TCR clone 369758 (TRAV12-3, TRAJ29)
CAAREANTPLVF

SEQ ID NO: 739516 - protein, 17 aa, Homo sapiens
  CDR3 for beta chain variable domain of TCR clone 369758 (TRBV18, TRBJ2-1)
CASSPLAAGAGDNEQFF

SEQ ID NO: 739517 - protein, 14 aa, Homo sapiens
  CDR3 for alpha chain variable domain of TCR clone 369759 (TRAV17, TRAJ57)
CATDPQGGSEKLVF

SEQ ID NO: 739518 - protein, 13 aa, Homo sapiens
  CDR3 for beta chain variable domain of TCR clone 369759 (TRBV20-1, TRBJ1-1)
CSARLGQGTEAFF

SEQ ID NO: 739519 - protein, 12 aa, Homo sapiens
  CDR3 for alpha chain variable domain of TCR clone 369760 (TRAV13-1, TRAJ21)
CAEKEGFNKFYF

SEQ ID NO: 739520 - protein, 13 aa, Homo sapiens
  CDR3 for beta chain variable domain of TCR clone 369760 (TRBV7-3, TRBJ1-1)
CASSQDWGAEAFF

SEQ ID NO: 739521 - protein, 13 aa, Homo sapiens
  CDR3 for alpha chain variable domain of TCR clone 369761 (TRAV8-1, TRAJ15)
CAVKNQAGTALIF

SEQ ID NO: 739522 - protein, 14 aa, Homo sapiens
  CDR3 for beta chain variable domain of TCR clone 369761 (TRBV19, TRBJ1-5)
CASRAPDSFLSQHF

SEQ ID NO: 739523 - protein, 12 aa, Homo sapiens
  CDR3 for alpha chain variable domain of TCR clone 369762 (TRAV21, TRAJ58)
CAAETSGSRLTF

SEQ ID NO: 739524 - protein, 15 aa, Homo sapiens
  CDR3 for beta chain variable domain of TCR clone 369762 (TRBV20-1, TRBJ2-7)
CSARDPVKGEGVQYF

SEQ ID NO: 739525 - protein, 12 aa, Homo sapiens
  CDR3 for alpha chain variable domain of TCR clone 369763 (TRAV30, TRAJ43)
CGTEDRGNDMRF

SEQ ID NO: 739526 - protein, 14 aa, Homo sapiens
  CDR3 for beta chain variable domain of TCR clone 369763 (TRBV7-2, TRBJ2-7)
CASSPKTSFYEQYF

SEQ ID NO: 739527 - protein, 14 aa, Homo sapiens
  CDR3 for alpha chain variable domain of TCR clone 369764 (TRAV20, TRAJ6)
CAVQERGGSYIPTF

SEQ ID NO: 739528 - protein, 14 aa, Homo sapiens
  CDR3 for beta chain variable domain of TCR clone 369764 (TRBV7-6, TRBJ2-3)
CASSLGTVTDTQYF

SEQ ID NO: 739529 - protein, 15 aa, Homo sapiens
  CDR3 for alpha chain variable domain of TCR clone 369765 (TRAV3, TRAJ22)
CAVRDRGGSARQLTF

SEQ ID NO: 739530 - protein, 15 aa, Homo sapiens
  CDR3 for beta chain variable domain of TCR clone 369765 (TRBV7-2, TRBJ2-7)
FASSTGLAGSYEQYF

SEQ ID NO: 739531 - protein, 12 aa, Homo sapiens
  CDR3 for alpha chain variable domain of TCR clone 369766 (TRAV12-3, TRAJ17)
CAMTLTGNKLTF

SEQ ID NO: 739532 - protein, 15 aa, Homo sapiens
  CDR3 for beta chain variable domain of TCR clone 369766 (TRBV7-8, TRBJ2-1)
RASSLAGGLYNEQFF

SEQ ID NO: 739533 - protein, 14 aa, Homo sapiens
  CDR3 for alpha chain variable domain of TCR clone 369767 (TRAV1-2, TRAJ16)
CAVNRFSDGQKLLL

SEQ ID NO: 739534 - protein, 15 aa, Homo sapiens
  CDR3 for beta chain variable domain of TCR clone 369767 (TRBV29-1, TRBJ2-7)
CSVEFFDRGSYEQYF

SEQ ID NO: 739535 - protein, 13 aa, Homo sapiens
  CDR3 for alpha chain variable domain of TCR clone 369768 (TRAV3, TRAJ40)
CAVRGSGAYKYLF

SEQ ID NO: 739536 - protein, 15 aa, Homo sapiens
  CDR3 for beta chain variable domain of TCR clone 369768 (TRBV27, TRBJ1-5)
CASSSSGTGNQPQHF

SEQ ID NO: 739537 - protein, 14 aa, Homo sapiens
  CDR3 for alpha chain variable domain of TCR clone 369769 (TRAV34, TRAJ44)
CGADGTGTASKLTF

SEQ ID NO: 739538 - protein, 14 aa, Homo sapiens
  CDR3 for beta chain variable domain of TCR clone 369769 (TRBV12-4, TRBJ2-3)
CASSGQGSTDTQYF

SEQ ID NO: 739539 - protein, 13 aa, Homo sapiens
  CDR3 for alpha chain variable domain of TCR clone 369770 (TRAV8-3, TRAJ36)
CAVGATGANNLFF

SEQ ID NO: 739540 - protein, 15 aa, Homo sapiens
  CDR3 for beta chain variable domain of TCR clone 369770 (TRBV7-2, TRBJ1-2)
CASSPRAGWNYCYTF

SEQ ID NO: 739541 - protein, 11 aa, Homo sapiens
  CDR3 for alpha chain variable domain of TCR clone 369771 (TRAV12-2, )
CAVASLATTIY

SEQ ID NO: 739542 - protein, 16 aa, Homo sapiens
  CDR3 for beta chain variable domain of TCR clone 369771 (TRBV5-1, TRBJ2-2)
CASSSRTGGRTGELFF

SEQ ID NO: 739543 - protein, 15 aa, Homo sapiens
  CDR3 for alpha chain variable domain of TCR clone 369772 (TRAV3, TRAJ5)
CAVRERKTGRRARTF

SEQ ID NO: 739544 - protein, 15 aa, Homo sapiens
  CDR3 for beta chain variable domain of TCR clone 369772 (TRBV7-8, TRBJ2-1)
CASSLADSLYNEQFF

SEQ ID NO: 739545 - protein, 16 aa, Homo sapiens
  CDR3 for alpha chain variable domain of TCR clone 369773 (TRAV19, TRAJ22)
CALSETPRGSARQLTF

SEQ ID NO: 739546 - protein, 17 aa, Homo sapiens
  CDR3 for beta chain variable domain of TCR clone 369773 (TRBV7-3, TRBJ2-3)
CASSPRGQGYGTDTQYF

SEQ ID NO: 739547 - protein, 16 aa, Homo sapiens
  CDR3 for alpha chain variable domain of TCR clone 369774 (TRAV20, TRAJ53)
CAVQGNSGGSNYKLTF

SEQ ID NO: 739548 - protein, 17 aa, Homo sapiens
  CDR3 for beta chain variable domain of TCR clone 369774 (TRBV5-1, TRBJ2-2)
CASSRTSGRFSTGELFF

SEQ ID NO: 739549 - protein, 13 aa, Homo sapiens
  CDR3 for alpha chain variable domain of TCR clone 369775 (TRAV21, TRAJ40)
CAVRPSRAYKYIF

SEQ ID NO: 739550 - protein, 12 aa, Homo sapiens
  CDR3 for beta chain variable domain of TCR clone 369775 (TRBV11-2, TRBJ2-2)
CASSLGGGELFF

SEQ ID NO: 739551 - protein, 11 aa, Homo sapiens
  CDR3 for alpha chain variable domain of TCR clone 369776 (TRAV27, TRAJ47)
SIVEYGNKLVF

SEQ ID NO: 739552 - protein, 18 aa, Homo sapiens
  CDR3 for beta chain variable domain of TCR clone 369776 (TRBV2, TRBJ2-1)
CASRGLAGGPRTYIEQFF

SEQ ID NO: 739553 - protein, 11 aa, Homo sapiens
  CDR3 for alpha chain variable domain of TCR clone 369777 (TRAV9-2, TRAJ49)
CALSAGNQFYF

SEQ ID NO: 739554 - protein, 14 aa, Homo sapiens
  CDR3 for beta chain variable domain of TCR clone 369777 (TRBV25-1, TRBJ1-1)
CASTHLGGNTEAFF

SEQ ID NO: 739555 - protein, 13 aa, Homo sapiens
  CDR3 for alpha chain variable domain of TCR clone 369778 (TRAV2, TRAJ40)
CAVVTSGTYKYIF

SEQ ID NO: 739556 - protein, 14 aa, Homo sapiens
  CDR3 for beta chain variable domain of TCR clone 369778 (TRBV19, TRBJ2-1)
CASPTCVLSSEQFF

SEQ ID NO: 739557 - protein, 15 aa, Homo sapiens
  CDR3 for alpha chain variable domain of TCR clone 369779 (TRAV8-4, TRAJ47)
CAVSDLLGLGNKLVF

SEQ ID NO: 739558 - protein, 16 aa, Homo sapiens
  CDR3 for beta chain variable domain of TCR clone 369779 (TRBV19, TRBJ2-2)
CASSPSGGLNTGELFF

SEQ ID NO: 739559 - protein, 11 aa, Homo sapiens
  CDR3 for alpha chain variable domain of TCR clone 369780 (TRAV3, TRAJ21)
CAVGNFNKFYF

SEQ ID NO: 739560 - protein, 16 aa, Homo sapiens
  CDR3 for beta chain variable domain of TCR clone 369780 (TRBV28, TRBJ2-7)
CASSSGTSGRGYEQYF

SEQ ID NO: 739561 - protein, 14 aa, Homo sapiens
  CDR3 for alpha chain variable domain of TCR clone 369781 (TRAV12-2, TRAJ17)
CAVNIKAAGNKLTF

SEQ ID NO: 739562 - protein, 14 aa, Homo sapiens
  CDR3 for beta chain variable domain of TCR clone 369781 (TRBV7-2, TRBJ1-2)
CASSQTGSTYGYTF

SEQ ID NO: 739563 - protein, 12 aa, Homo sapiens
  CDR3 for alpha chain variable domain of TCR clone 369782 (TRAV38-2/DV8, TRAJ47)
CVLMEYGNKLVF

SEQ ID NO: 739564 - protein, 14 aa, Homo sapiens
  CDR3 for beta chain variable domain of TCR clone 369782 (TRBV20-1, TRBJ1-5)
CSATDRSSNQPQHF

SEQ ID NO: 739565 - protein, 15 aa, Homo sapiens
  CDR3 for alpha chain variable domain of TCR clone 369783 (TRAV21, TRAJ24)
CSVRSSTDSWGKLQF

SEQ ID NO: 739566 - protein, 13 aa, Homo sapiens
  CDR3 for beta chain variable domain of TCR clone 369783 (TRBV11-3, TRBJ2-5)
CASSSTGEETQYF

SEQ ID NO: 739567 - protein, 14 aa, Homo sapiens
  CDR3 for alpha chain variable domain of TCR clone 369784 (TRAV13-2, TRAJ17)
CAQNSKAAGNKLTF

SEQ ID NO: 739568 - protein, 15 aa, Homo sapiens
  CDR3 for beta chain variable domain of TCR clone 369784 (TRBV27, TRBJ2-1)
CASSNGGGSSNEQFF

SEQ ID NO: 739569 - protein, 15 aa, Homo sapiens
  CDR3 for alpha chain variable domain of TCR clone 369785 (TRAV29/DV5, TRAJ42)
CAAKTDGGSQGNLIF

SEQ ID NO: 739570 - protein, 20 aa, Homo sapiens
  CDR3 for beta chain variable domain of TCR clone 369785 (TRBV7-8, TRBJ2-2)
CASSHLFPGPTIHITGELFF

SEQ ID NO: 739571 - protein, 18 aa, Homo sapiens
  CDR3 for alpha chain variable domain of TCR clone 369786 (TRAV13-1, TRAJ52)
CAASKRSAGGTSYGKLTF

SEQ ID NO: 739572 - protein, 14 aa, Homo sapiens
  CDR3 for beta chain variable domain of TCR clone 369786 (TRBV5-4, TRBJ1-1)
CASSLDSRRDEAFF

SEQ ID NO: 739573 - protein, 16 aa, Homo sapiens
  CDR3 for alpha chain variable domain of TCR clone 369787 (TRAV30, TRAJ24)
CGTEIVDADSWGKFQF

SEQ ID NO: 739574 - protein, 14 aa, Homo sapiens
  CDR3 for beta chain variable domain of TCR clone 369787 (TRBV25-1, TRBJ1-1)
CASTHLGGDTEAFF

SEQ ID NO: 739575 - protein, 14 aa, Homo sapiens
  CDR3 for alpha chain variable domain of TCR clone 369788 (TRAV8-3, TRAJ4)
CAVGAAGGYNKLIF

SEQ ID NO: 739576 - protein, 20 aa, Homo sapiens
  CDR3 for beta chain variable domain of TCR clone 369788 (TRBV11-2, TRBJ2-2)
LRTRPCISVPAALEAGSCFF

SEQ ID NO: 739577 - protein, 11 aa, Homo sapiens
  CDR3 for alpha chain variable domain of TCR clone 369789 (TRAV3, TRAJ31)
CAALPGARLMF

SEQ ID NO: 739578 - protein, 15 aa, Homo sapiens
  CDR3 for beta chain variable domain of TCR clone 369789 (TRBV20-1, TRBJ2-7)
CSARDRVSGMDEQYF

SEQ ID NO: 739579 - protein, 13 aa, Homo sapiens
  CDR3 for alpha chain variable domain of TCR clone 369790 (TRAV20, TRAJ21)
CAVEGYNFNKFYF

SEQ ID NO: 739580 - protein, 14 aa, Homo sapiens
  CDR3 for beta chain variable domain of TCR clone 369790 (TRBV3-1, TRBJ2-5)
CASSQGLDQETQYF

SEQ ID NO: 739581 - protein, 14 aa, Homo sapiens
  CDR3 for alpha chain variable domain of TCR clone 369791 (TRAV8-2, TRAJ37)
CVVSISGNTGKLSL

SEQ ID NO: 739582 - protein, 11 aa, Homo sapiens
  CDR3 for beta chain variable domain of TCR clone 369791 (TRBV18, TRBJ2-5)
CASSPRETQYF

SEQ ID NO: 739583 - protein, 11 aa, Homo sapiens
  CDR3 for alpha chain variable domain of TCR clone 369792 (TRAV21, TRAJ34)
CAPLDTDKLIF

SEQ ID NO: 739584 - protein, 14 aa, Homo sapiens
  CDR3 for beta chain variable domain of TCR clone 369792 (TRBV7-2, TRBJ2-7)
CASSPKTSFYEQYF

SEQ ID NO: 739585 - protein, 12 aa, Homo sapiens
  CDR3 for alpha chain variable domain of TCR clone 369793 (TRAV20, TRAJ39)
CAVGNAGSMLTF

SEQ ID NO: 739586 - protein, 15 aa, Homo sapiens
  CDR3 for beta chain variable domain of TCR clone 369793 (TRBV27, TRBJ2-1)
CASSDGGGSSNEQFF

SEQ ID NO: 739587 - protein, 12 aa, Homo sapiens
  CDR3 for alpha chain variable domain of TCR clone 369794 (TRAV27, TRAJ37)
CADSGNTDKLIF

SEQ ID NO: 739588 - protein, 18 aa, Homo sapiens
  CDR3 for beta chain variable domain of TCR clone 369794 (TRBV7-9, TRBJ1-1)
CASSKPWDTMGMNTEAFF

SEQ ID NO: 739589 - protein, 13 aa, Homo sapiens
  CDR3 for alpha chain variable domain of TCR clone 369795 (TRAV12-3, TRAJ53)
RATRGVSNYKLTF

SEQ ID NO: 739590 - protein, 15 aa, Homo sapiens
  CDR3 for beta chain variable domain of TCR clone 369795 (TRBV2, TRBJ2-1)
CATQARLVMIGEQFF

SEQ ID NO: 739591 - protein, 16 aa, Homo sapiens
  CDR3 for alpha chain variable domain of TCR clone 369796 (TRAV16, TRAJ57)
CAPYLITQRGSEKLVF

SEQ ID NO: 739592 - protein, 17 aa, Homo sapiens
  CDR3 for beta chain variable domain of TCR clone 369796 (TRBV24-1, TRBJ2-4)
CATSDAEARGVRNMQYF

SEQ ID NO: 739593 - protein, 15 aa, Homo sapiens
  CDR3 for alpha chain variable domain of TCR clone 369797 (TRAV27, TRAJ38)
CAARRNAGNNRKLIW

SEQ ID NO: 739594 - protein, 18 aa, Homo sapiens
  CDR3 for beta chain variable domain of TCR clone 369797 (TRBV2, TRBJ2-1)
CASRGLAGGPRTYNEQFF

SEQ ID NO: 739595 - protein, 14 aa, Homo sapiens
  CDR3 for alpha chain variable domain of TCR clone 369798 (TRAV14/DV4, TRAJ32)
SNVLPLTPTNKLIF

SEQ ID NO: 739596 - protein, 14 aa, Homo sapiens
  CDR3 for beta chain variable domain of TCR clone 369798 (TRBV24-1, TRBJ1-5)
CATSDGQLGQTQHF

SEQ ID NO: 739597 - protein, 15 aa, Homo sapiens
  CDR3 for alpha chain variable domain of TCR clone 369799 (TRAV3, TRAJ3)
CAVRDMSSSASKIIF

SEQ ID NO: 739598 - protein, 17 aa, Homo sapiens
  CDR3 for beta chain variable domain of TCR clone 369799 (TRBV24-1, TRBJ2-1)
CATSDVSTCGTYNEQFF

SEQ ID NO: 739599 - protein, 12 aa, Homo sapiens
  CDR3 for alpha chain variable domain of TCR clone 369800 (TRAV12-3, TRAJ40)
CAMSSGTYKYIF

SEQ ID NO: 739600 - protein, 15 aa, Homo sapiens
  CDR3 for beta chain variable domain of TCR clone 369800 (TRBV7-3, TRBJ2-2)
CASRETGQGTGELFF

SEQ ID NO: 739601 - protein, 11 aa, Homo sapiens
  CDR3 for alpha chain variable domain of TCR clone 369801 (TRAV3, TRAJ21)
CAVGNFNKFFF

SEQ ID NO: 739602 - protein, 17 aa, Homo sapiens
  CDR3 for beta chain variable domain of TCR clone 369801 (TRBV24-1, TRBJ2-1)
CATSDVSTSGTYNEQFF

SEQ ID NO: 739603 - protein, 12 aa, Homo sapiens
  CDR3 for alpha chain variable domain of TCR clone 369802 (TRAV1-1, TRAJ8)
CAGGTGFQKLVF

SEQ ID NO: 739604 - protein, 15 aa, Homo sapiens
  CDR3 for beta chain variable domain of TCR clone 369802 (TRBV7-9, TRBJ1-4)
FASSRTGGFNEKLFF

SEQ ID NO: 739605 - protein, 14 aa, Homo sapiens
  CDR3 for alpha chain variable domain of TCR clone 369803 (TRAV29/DV5, TRAJ45)
CAASFRGGADGLTF

SEQ ID NO: 739606 - protein, 14 aa, Homo sapiens
  CDR3 for beta chain variable domain of TCR clone 369803 (TRBV7-3, TRBJ2-1)
CASSLAGGTNEQFF

SEQ ID NO: 739607 - protein, 17 aa, Homo sapiens
  CDR3 for alpha chain variable domain of TCR clone 369804 (TRAV23/DV6, TRAJ57)
CAASSTLSHGGPEELVF

SEQ ID NO: 739608 - protein, 14 aa, Homo sapiens
  CDR3 for beta chain variable domain of TCR clone 369804 (TRBV25-1, TRBJ1-1)
CASTHLGGNTEAFF

SEQ ID NO: 739609 - protein, 11 aa, Homo sapiens
  CDR3 for alpha chain variable domain of TCR clone 369805 (TRAV13-1, TRAJ6)
CATLGSYIPTF

SEQ ID NO: 739610 - protein, 16 aa, Homo sapiens
  CDR3 for beta chain variable domain of TCR clone 369805 (TRBV20-1, TRBJ2-1)
CSAPGLAGSYSDEQFF

SEQ ID NO: 739611 - protein, 12 aa, Homo sapiens
  CDR3 for alpha chain variable domain of TCR clone 369806 (TRAV23/DV6, TRAJ30)
CAASKGDDKIIF

SEQ ID NO: 739612 - protein, 13 aa, Homo sapiens
  CDR3 for beta chain variable domain of TCR clone 369806 (TRBV19, TRBJ1-2)
CASSVPGQDDYTF

SEQ ID NO: 739613 - protein, 16 aa, Homo sapiens
  CDR3 for alpha chain variable domain of TCR clone 369807 (TRAV3, TRAJ37)
CSVRVRGSGNTGKLIF

SEQ ID NO: 739614 - protein, 16 aa, Homo sapiens
  CDR3 for beta chain variable domain of TCR clone 369807 (TRBV11-2, TRBJ2-7)
CASSPTTGGVSYEQYF

SEQ ID NO: 739615 - protein, 15 aa, Homo sapiens
  CDR3 for alpha chain variable domain of TCR clone 369808 (TRAV27, TRAJ38)
CAARRNAGNNRKLIW

SEQ ID NO: 739616 - protein, 14 aa, Homo sapiens
  CDR3 for beta chain variable domain of TCR clone 369808 (TRBV19, TRBJ2-2)
CASSGQGIAGELFF

SEQ ID NO: 739617 - protein, 18 aa, Homo sapiens
  CDR3 for alpha chain variable domain of TCR clone 369809 (TRAV26-2, TRAJ45)
CILRVDKYSGGGADGLTF

SEQ ID NO: 739618 - protein, 12 aa, Homo sapiens
  CDR3 for beta chain variable domain of TCR clone 369809 (TRBV24-1, TRBJ1-1)
CATLYPDTEAFF

SEQ ID NO: 739619 - protein, 14 aa, Homo sapiens
  CDR3 for alpha chain variable domain of TCR clone 369810 (TRAV12-1, TRAJ12)
CVVNDRDSSYKLIF

SEQ ID NO: 739620 - protein, 14 aa, Homo sapiens
  CDR3 for beta chain variable domain of TCR clone 369810 (TRBV12-5, TRBJ2-5)
CASGSWTHQETQYF

SEQ ID NO: 739621 - protein, 14 aa, Homo sapiens
  CDR3 for alpha chain variable domain of TCR clone 369811 (TRAV1-2, TRAJ16)
CAVNRFSDGEKLLF

SEQ ID NO: 739622 - protein, 14 aa, Homo sapiens
  CDR3 for beta chain variable domain of TCR clone 369811 (TRBV4-1, TRBJ2-2)
CASSQAVNTGELFF

SEQ ID NO: 739623 - protein, 12 aa, Homo sapiens
  CDR3 for alpha chain variable domain of TCR clone 369812 (TRAV2, TRAJ33)
CAFMASNYQLIW

SEQ ID NO: 739624 - protein, 16 aa, Homo sapiens
  CDR3 for beta chain variable domain of TCR clone 369812 (TRBV2, TRBJ2-7)
CASSEPWTGTSYEQYF

SEQ ID NO: 739625 - protein, 13 aa, Homo sapiens
  CDR3 for alpha chain variable domain of TCR clone 369813 (TRAV17, TRAJ40)
CATAFSGTYKYIF

SEQ ID NO: 739626 - protein, 13 aa, Homo sapiens
  CDR3 for beta chain variable domain of TCR clone 369813 (TRBV12-4, TRBJ2-1)
CASSSRAYNEQFF

SEQ ID NO: 739627 - protein, 15 aa, Homo sapiens
  CDR3 for alpha chain variable domain of TCR clone 369814 (TRAV26-1, TRAJ12)
IASSELMGSSYKLIF

SEQ ID NO: 739628 - protein, 11 aa, Homo sapiens
  CDR3 for beta chain variable domain of TCR clone 369814 (TRBV7-9, TRBJ2-3)
CASSPPDTQYF

SEQ ID NO: 739629 - protein, 13 aa, Homo sapiens
  CDR3 for alpha chain variable domain of TCR clone 369815 (TRAV3, TRAJ8)
CTVRFTGFQKLVF

SEQ ID NO: 739630 - protein, 15 aa, Homo sapiens
  CDR3 for beta chain variable domain of TCR clone 369815 (TRBV20-1, TRBJ2-7)
CSARDRVSGMDEQYF

SEQ ID NO: 739631 - protein, 14 aa, Homo sapiens
  CDR3 for alpha chain variable domain of TCR clone 369816 (TRAV12-3, TRAJ42)
CAKNYGGSQGNLIF

SEQ ID NO: 739632 - protein, 15 aa, Homo sapiens
  CDR3 for beta chain variable domain of TCR clone 369816 (TRBV5-7, TRBJ1-5)
CASSYGKLWDQPQHF

SEQ ID NO: 739633 - protein, 14 aa, Homo sapiens
  CDR3 for alpha chain variable domain of TCR clone 369817 (TRAV2, TRAJ9)
CAVEDRSGGVKTIF

SEQ ID NO: 739634 - protein, 15 aa, Homo sapiens
  CDR3 for beta chain variable domain of TCR clone 369817 (TRBV11-3, TRBJ2-3)
CASLKDGREGDTQYF

SEQ ID NO: 739635 - protein, 12 aa, Homo sapiens
  CDR3 for alpha chain variable domain of TCR clone 369818 (TRAV12-2, TRAJ33)
WAKMDSNYQLIW

SEQ ID NO: 739636 - protein, 14 aa, Homo sapiens
  CDR3 for beta chain variable domain of TCR clone 369818 (TRBV2, TRBJ2-7)
CASSLTSGGYEQYF

SEQ ID NO: 739637 - protein, 15 aa, Homo sapiens
  CDR3 for alpha chain variable domain of TCR clone 369819 (TRAV26-1, TRAJ28)
CIVRVAGAGSYQLTF

SEQ ID NO: 739638 - protein, 19 aa, Homo sapiens
  CDR3 for beta chain variable domain of TCR clone 369819 (TRBV7-3, TRBJ2-7)
CASSLTGVAGGWLSYEQYF

SEQ ID NO: 739639 - protein, 14 aa, Homo sapiens
  CDR3 for alpha chain variable domain of TCR clone 369820 (TRAV13-1, TRAJ3)
CAASKSSSAAKIIF

SEQ ID NO: 739640 - protein, 13 aa, Homo sapiens
  CDR3 for beta chain variable domain of TCR clone 369820 (TRBV25-1, TRBJ2-5)
CASSESGRETQYF

SEQ ID NO: 739641 - protein, 14 aa, Homo sapiens
  CDR3 for alpha chain variable domain of TCR clone 369821 (TRAV1-2, TRAJ16)
CAVNRFSDGQKLFF

SEQ ID NO: 739642 - protein, 12 aa, Homo sapiens
  CDR3 for beta chain variable domain of TCR clone 369821 (TRBV12-4, TRBJ2-3)
CASSSTTDTQYF

SEQ ID NO: 739643 - protein, 22 aa, Homo sapiens
  CDR3 for alpha chain variable domain of TCR clone 369822 (TRAV16, )
CALRTQIPDIQNPDPAVYQLRD

SEQ ID NO: 739644 - protein, 14 aa, Homo sapiens
  CDR3 for beta chain variable domain of TCR clone 369822 (TRBV19, TRBJ2-7)
CASSDRAGPYEQYF

SEQ ID NO: 739645 - protein, 12 aa, Homo sapiens
  CDR3 for alpha chain variable domain of TCR clone 369823 (TRAV29/DV5, TRAJ49)
CAATDTGNQFYF

SEQ ID NO: 739646 - protein, 15 aa, Homo sapiens
  CDR3 for beta chain variable domain of TCR clone 369823 (TRBV27, TRBJ2-5)
CASSLYPRGGENQYF

SEQ ID NO: 739647 - protein, 12 aa, Homo sapiens
  CDR3 for alpha chain variable domain of TCR clone 369824 (TRAV21, TRAJ42)
CAVGGSQGNLIF

SEQ ID NO: 739648 - protein, 15 aa, Homo sapiens
  CDR3 for beta chain variable domain of TCR clone 369824 (TRBV20-1, TRBJ2-7)
CSAESGTSGAYEQYF

SEQ ID NO: 739649 - protein, 11 aa, Homo sapiens
  CDR3 for alpha chain variable domain of TCR clone 369825 (TRAV16, TRAJ20)
CALSEGFKAAL

SEQ ID NO: 739650 - protein, 16 aa, Homo sapiens
  CDR3 for beta chain variable domain of TCR clone 369825 (TRBV18, TRBJ1-1)
CASSPGVGGRGGEAFF

SEQ ID NO: 739651 - protein, 13 aa, Homo sapiens
  CDR3 for alpha chain variable domain of TCR clone 369826 (TRAV1-1, TRAJ28)
CVTSGAGSYQLTF

SEQ ID NO: 739652 - protein, 14 aa, Homo sapiens
  CDR3 for beta chain variable domain of TCR clone 369826 (TRBV19, TRBJ2-1)
CASPTFVLSGEQFF

SEQ ID NO: 739653 - protein, 14 aa, Homo sapiens
  CDR3 for alpha chain variable domain of TCR clone 369827 (TRAV13-1, TRAJ28)
CAASKGAGSDQLTF

SEQ ID NO: 739654 - protein, 19 aa, Homo sapiens
  CDR3 for beta chain variable domain of TCR clone 369827 (TRBV28, TRBJ2-4)
CASSFQPGGPAHSKNIQYF

SEQ ID NO: 739655 - protein, 14 aa, Homo sapiens
  CDR3 for alpha chain variable domain of TCR clone 369828 (TRAV17, TRAJ57)
CATDPQGGSEKLVF

SEQ ID NO: 739656 - protein, 14 aa, Homo sapiens
  CDR3 for beta chain variable domain of TCR clone 369828 (TRBV27, TRBJ2-2)
CASRPGVNTGELFF

SEQ ID NO: 739657 - protein, 15 aa, Homo sapiens
  CDR3 for alpha chain variable domain of TCR clone 369829 (TRAV4, TRAJ36)
CIVGDRQTGANNLFF

SEQ ID NO: 739658 - protein, 15 aa, Homo sapiens
  CDR3 for beta chain variable domain of TCR clone 369829 (TRBV7-6, TRBJ2-1)
CASSSLAGEGNEEFF

SEQ ID NO: 739659 - protein, 14 aa, Homo sapiens
  CDR3 for alpha chain variable domain of TCR clone 369830 (TRAV13-1, TRAJ45)
CAAIGRGGADGLTF

SEQ ID NO: 739660 - protein, 17 aa, Homo sapiens
  CDR3 for beta chain variable domain of TCR clone 369830 (TRBV7-2, TRBJ2-3)
CASSLSRVAGGRNTQYF

SEQ ID NO: 739661 - protein, 14 aa, Homo sapiens
  CDR3 for alpha chain variable domain of TCR clone 369831 (TRAV3, TRAJ22)
FAVRDYGSARQLTF

SEQ ID NO: 739662 - protein, 13 aa, Homo sapiens
  CDR3 for beta chain variable domain of TCR clone 369831 (TRBV11-2, TRBJ2-5)
CASGHGAKETQYF

SEQ ID NO: 739663 - protein, 14 aa, Homo sapiens
  CDR3 for alpha chain variable domain of TCR clone 369832 (TRAV17, TRAJ57)
CATDTQGGSEKLVF

SEQ ID NO: 739664 - protein, 13 aa, Homo sapiens
  CDR3 for beta chain variable domain of TCR clone 369832 (TRBV19, TRBJ2-7)
CASSPRQSDEQYF

SEQ ID NO: 739665 - protein, 13 aa, Homo sapiens
  CDR3 for alpha chain variable domain of TCR clone 369833 (TRAV3, TRAJ21)
CAVREPDFNKFYF

SEQ ID NO: 739666 - protein, 18 aa, Homo sapiens
  CDR3 for beta chain variable domain of TCR clone 369833 (TRBV20-1, TRBJ2-6)
CSAETTATHGSGANVLTF

SEQ ID NO: 739667 - protein, 14 aa, Homo sapiens
  CDR3 for alpha chain variable domain of TCR clone 369834 (TRAV3, TRAJ17)
CAVRDAAAGNKLTF

SEQ ID NO: 739668 - protein, 14 aa, Homo sapiens
  CDR3 for beta chain variable domain of TCR clone 369834 (TRBV6-1, TRBJ1-3)
CASVQGGGGNTIYF

SEQ ID NO: 739669 - protein, 11 aa, Homo sapiens
  CDR3 for alpha chain variable domain of TCR clone 369835 (TRAV14/DV4, TRAJ43)
CAMREREDMRF

SEQ ID NO: 739670 - protein, 17 aa, Homo sapiens
  CDR3 for beta chain variable domain of TCR clone 369835 (TRBV28, TRBJ2-5)
CASSTPEGDALQETQYF

SEQ ID NO: 739671 - protein, 12 aa, Homo sapiens
  CDR3 for alpha chain variable domain of TCR clone 369836 (TRAV30, TRAJ20)
CGTERNDYKLSF

SEQ ID NO: 739672 - protein, 15 aa, Homo sapiens
  CDR3 for beta chain variable domain of TCR clone 369836 (TRBV20-1, TRBJ2-7)
CSARDRVSGMDEQYF

SEQ ID NO: 739673 - protein, 17 aa, Homo sapiens
  CDR3 for alpha chain variable domain of TCR clone 369837 (TRAV29/DV5, TRAJ40)
CAASVIYTTSGTYKYIF

SEQ ID NO: 739674 - protein, 14 aa, Homo sapiens
  CDR3 for beta chain variable domain of TCR clone 369837 (TRBV12-5, TRBJ2-5)
CASGSRTHQETQYF

SEQ ID NO: 739675 - protein, 14 aa, Homo sapiens
  CDR3 for alpha chain variable domain of TCR clone 369838 (TRAV17, TRAJ16)
CATADFSDGQKLLF

SEQ ID NO: 739676 - protein, 12 aa, Homo sapiens
  CDR3 for beta chain variable domain of TCR clone 369838 (TRBV24-1, TRBJ1-1)
CATLYPVTEAFF

SEQ ID NO: 739677 - protein, 17 aa, Homo sapiens
  CDR3 for alpha chain variable domain of TCR clone 369839 (TRAV3, TRAJ42)
CAVRDRDYGGSQGNLIF

SEQ ID NO: 739678 - protein, 18 aa, Homo sapiens
  CDR3 for beta chain variable domain of TCR clone 369839 (TRBV20-1, TRBJ2-3)
CSAYGLAGGPGTTDTQYF

SEQ ID NO: 739679 - protein, 17 aa, Homo sapiens
  CDR3 for alpha chain variable domain of TCR clone 369840 (TRAV8-3, TRAJ42)
CAVGKGNYGGSQGNLIF

SEQ ID NO: 739680 - protein, 18 aa, Homo sapiens
  CDR3 for beta chain variable domain of TCR clone 369840 (TRBV12-4, TRBJ2-2)
CASSRSGGAIPNTGELFF

SEQ ID NO: 739681 - protein, 12 aa, Homo sapiens
  CDR3 for alpha chain variable domain of TCR clone 369841 (TRAV3, TRAJ20)
CSVRDGDYKLSF

SEQ ID NO: 739682 - protein, 13 aa, Homo sapiens
  CDR3 for beta chain variable domain of TCR clone 369841 (TRBV9, TRBJ2-1)
CASSVGQGGEQFF

SEQ ID NO: 739683 - protein, 14 aa, Homo sapiens
  CDR3 for alpha chain variable domain of TCR clone 369842 (TRAV12-3, TRAJ10)
SHLPLTGGGNKLTF

SEQ ID NO: 739684 - protein, 14 aa, Homo sapiens
  CDR3 for beta chain variable domain of TCR clone 369842 (TRBV6-1, TRBJ1-3)
CASVQGGGGDTMYF

SEQ ID NO: 739685 - protein, 16 aa, Homo sapiens
  CDR3 for alpha chain variable domain of TCR clone 369843 (TRAV26-1, TRAJ45)
CIVEKYSGGGADGLTF

SEQ ID NO: 739686 - protein, 15 aa, Homo sapiens
  CDR3 for beta chain variable domain of TCR clone 369843 (TRBV15, TRBJ2-7)
CHHQRPIQQAYEQYF

SEQ ID NO: 739687 - protein, 15 aa, Homo sapiens
  CDR3 for alpha chain variable domain of TCR clone 369844 (TRAV34, TRAJ38)
CGAYFTPGNNRKLIW

SEQ ID NO: 739688 - protein, 16 aa, Homo sapiens
  CDR3 for beta chain variable domain of TCR clone 369844 (TRBV12-5, TRBJ2-5)
CASGPRTSGNQETQYF

SEQ ID NO: 739689 - protein, 14 aa, Homo sapiens
  CDR3 for alpha chain variable domain of TCR clone 369845 (TRAV21, TRAJ38)
CAVANAGNNHKLIW

SEQ ID NO: 739690 - protein, 16 aa, Homo sapiens
  CDR3 for beta chain variable domain of TCR clone 369845 (TRBV5-4, TRBJ2-1)
CASSLALAGAYNEQFF

SEQ ID NO: 739691 - protein, 15 aa, Homo sapiens
  CDR3 for alpha chain variable domain of TCR clone 369846 (TRAV1-1, TRAJ24)
CALSGGTDSWGQFQF

SEQ ID NO: 739692 - protein, 16 aa, Homo sapiens
  CDR3 for beta chain variable domain of TCR clone 369846 (TRBV2, TRBJ2-7)
CASSEPWTGPSYEQYF

SEQ ID NO: 739693 - protein, 15 aa, Homo sapiens
  CDR3 for alpha chain variable domain of TCR clone 369847 (TRAV17, TRAJ13)
CATAAGSGGYHKVTF

SEQ ID NO: 739694 - protein, 17 aa, Homo sapiens
  CDR3 for beta chain variable domain of TCR clone 369847 (TRBV11-2, TRBJ2-1)
CASSLYPPGVEYNEQFF

SEQ ID NO: 739695 - protein, 11 aa, Homo sapiens
  CDR3 for alpha chain variable domain of TCR clone 369848 (TRAV16, TRAJ31)
CALFNNARLMF

SEQ ID NO: 739696 - protein, 16 aa, Homo sapiens
  CDR3 for beta chain variable domain of TCR clone 369848 (TRBV11-2, TRBJ2-1)
CASSPRLAGVYNEQFF

SEQ ID NO: 739697 - protein, 23 aa, Homo sapiens
  CDR3 for alpha chain variable domain of TCR clone 369849 (TRAV26-1, TRAJ38)
CIADNAGNNHIQNPDSAVYQLRH

SEQ ID NO: 739698 - protein, 13 aa, Homo sapiens
  CDR3 for beta chain variable domain of TCR clone 369849 (TRBV20-1, TRBJ1-1)
CSARGGGNTEAFF

SEQ ID NO: 739699 - protein, 14 aa, Homo sapiens
  CDR3 for alpha chain variable domain of TCR clone 369850 (TRAV17, TRAJ6)
CATDASGGSYIPTF

SEQ ID NO: 739700 - protein, 13 aa, Homo sapiens
  CDR3 for beta chain variable domain of TCR clone 369850 (TRBV5-4, TRBJ1-1)
CASSFQVNTGAFF

SEQ ID NO: 739701 - protein, 14 aa, Homo sapiens
  CDR3 for alpha chain variable domain of TCR clone 369851 (TRAV8-3, TRAJ4)
CAVGAADGYNKLIF

SEQ ID NO: 739702 - protein, 15 aa, Homo sapiens
  CDR3 for beta chain variable domain of TCR clone 369851 (TRBV9, TRBJ1-6)
CASSVAGTGDSPLHF

SEQ ID NO: 739703 - protein, 16 aa, Homo sapiens
  CDR3 for alpha chain variable domain of TCR clone 369852 (TRAV35, TRAJ28)
CAGQRYSGAGSYQLTF

SEQ ID NO: 739704 - protein, 13 aa, Homo sapiens
  CDR3 for beta chain variable domain of TCR clone 369852 (TRBV19, TRBJ1-2)
CASSKGQVYGYTF

SEQ ID NO: 739705 - protein, 15 aa, Homo sapiens
  CDR3 for alpha chain variable domain of TCR clone 369853 (TRAV2, TRAJ15)
CAVEDRGQAGTALIF

SEQ ID NO: 739706 - protein, 16 aa, Homo sapiens
  CDR3 for beta chain variable domain of TCR clone 369853 (TRBV19, TRBJ2-2)
CASRSPGTGATGELFF

SEQ ID NO: 739707 - protein, 13 aa, Homo sapiens
  CDR3 for alpha chain variable domain of TCR clone 369854 (TRAV21, TRAJ45)
CAVMGGGADGLTF

SEQ ID NO: 739708 - protein, 18 aa, Homo sapiens
  CDR3 for beta chain variable domain of TCR clone 369854 (TRBV4-1, TRBJ2-7)
CASSQDTGAGSGLNEQYF

SEQ ID NO: 739709 - protein, 14 aa, Homo sapiens
  CDR3 for alpha chain variable domain of TCR clone 369855 (TRAV2, TRAJ23)
RAVGLRIQGGKLIF

SEQ ID NO: 739710 - protein, 13 aa, Homo sapiens
  CDR3 for beta chain variable domain of TCR clone 369855 (TRBV12-4, TRBJ2-5)
CASSPGTEETQYF

SEQ ID NO: 739711 - protein, 12 aa, Homo sapiens
  CDR3 for alpha chain variable domain of TCR clone 369856 (TRAV25, TRAJ5)
CAGGGGRRALTF

SEQ ID NO: 739712 - protein, 15 aa, Homo sapiens
  CDR3 for beta chain variable domain of TCR clone 369856 (TRBV2, TRBJ2-1)
CASSEEREGDNEQFF

SEQ ID NO: 739713 - protein, 14 aa, Homo sapiens
  CDR3 for alpha chain variable domain of TCR clone 369857 (TRAV12-1, TRAJ42)
CVVIYGGSKGNLIF

SEQ ID NO: 739714 - protein, 13 aa, Homo sapiens
  CDR3 for beta chain variable domain of TCR clone 369857 (TRBV18, TRBJ2-5)
CASSPPGKETQYF

SEQ ID NO: 739715 - protein, 15 aa, Homo sapiens
  CDR3 for alpha chain variable domain of TCR clone 369858 (TRAV8-2, TRAJ4)
CVVRGASGGYNKLIF

SEQ ID NO: 739716 - protein, 13 aa, Homo sapiens
  CDR3 for beta chain variable domain of TCR clone 369858 (TRBV7-9, TRBJ1-2)
CASSLKQNYGYTF

SEQ ID NO: 739717 - protein, 13 aa, Homo sapiens
  CDR3 for alpha chain variable domain of TCR clone 369859 (TRAV8-3, TRAJ48)
CAVVPFGNEKLTF

SEQ ID NO: 739718 - protein, 13 aa, Homo sapiens
  CDR3 for beta chain variable domain of TCR clone 369859 (TRBV27, TRBJ2-7)
CASSLTTGYEQYF

SEQ ID NO: 739719 - protein, 13 aa, Homo sapiens
  CDR3 for alpha chain variable domain of TCR clone 369860 (TRAV12-2, TRAJ10)
CAVPTGGGNTLTF

SEQ ID NO: 739720 - protein, 14 aa, Homo sapiens
  CDR3 for beta chain variable domain of TCR clone 369860 (TRBV15, TRBJ2-1)
CATSGVEDYNEQFF

SEQ ID NO: 739721 - protein, 19 aa, Homo sapiens
  CDR3 for alpha chain variable domain of TCR clone 369861 (TRAV2, TRAJ20)
ILQVREADAAVYRDCRLSF

SEQ ID NO: 739722 - protein, 16 aa, Homo sapiens
  CDR3 for beta chain variable domain of TCR clone 369861 (TRBV20-1, TRBJ1-4)
CSAPGQGLLTNEKLFF

SEQ ID NO: 739723 - protein, 15 aa, Homo sapiens
  CDR3 for alpha chain variable domain of TCR clone 369862 (TRAV12-3, TRAJ6)
CAMSPASGGSYIPTF

SEQ ID NO: 739724 - protein, 15 aa, Homo sapiens
  CDR3 for beta chain variable domain of TCR clone 369862 (TRBV2, TRBJ1-2)
CASSESRTVNYCYTF

SEQ ID NO: 739725 - protein, 13 aa, Homo sapiens
  CDR3 for alpha chain variable domain of TCR clone 369863 (TRAV19, TRAJ34)
CALSTPNTDKLIF

SEQ ID NO: 739726 - protein, 12 aa, Homo sapiens
  CDR3 for beta chain variable domain of TCR clone 369863 (TRBV5-7, TRBJ2-5)
CASEGRGETQYF

SEQ ID NO: 739727 - protein, 12 aa, Homo sapiens
  CDR3 for alpha chain variable domain of TCR clone 369864 (TRAV21, TRAJ39)
CAADNAGNMLTF

SEQ ID NO: 739728 - protein, 21 aa, Homo sapiens
  CDR3 for beta chain variable domain of TCR clone 369864 (TRBV6-1, TRBJ1-1)
CASSGVGNYKGISGFDTEAFF

SEQ ID NO: 739729 - protein, 14 aa, Homo sapiens
  CDR3 for alpha chain variable domain of TCR clone 369865 (TRAV12-2, TRAJ44)
CAVNKAGTASKLTF

SEQ ID NO: 739730 - protein, 15 aa, Homo sapiens
  CDR3 for beta chain variable domain of TCR clone 369865 (TRBV7-3, TRBJ2-1)
CASSPTGGGEVEQFF

SEQ ID NO: 739731 - protein, 14 aa, Homo sapiens
  CDR3 for alpha chain variable domain of TCR clone 369866 (TRAV1-2, TRAJ16)
CSVNRFSDGQKLLF

SEQ ID NO: 739732 - protein, 16 aa, Homo sapiens
  CDR3 for beta chain variable domain of TCR clone 369866 (TRBV29-1, TRBJ2-7)
CSVEVVGTSGSYEQYF

SEQ ID NO: 739733 - protein, 16 aa, Homo sapiens
  CDR3 for alpha chain variable domain of TCR clone 369867 (TRAV30, TRAJ24)
CGTEIVDADSRGKFQF

SEQ ID NO: 739734 - protein, 14 aa, Homo sapiens
  CDR3 for beta chain variable domain of TCR clone 369867 (TRBV7-2, TRBJ2-7)
CASRSQGAAYEQYF

SEQ ID NO: 739735 - protein, 13 aa, Homo sapiens
  CDR3 for alpha chain variable domain of TCR clone 369868 (TRAV2, TRAJ15)
CAVASQAGTALIF

SEQ ID NO: 739736 - protein, 14 aa, Homo sapiens
  CDR3 for beta chain variable domain of TCR clone 369868 (TRBV28, TRBJ2-7)
CASSLGTATYEQYF

SEQ ID NO: 739737 - protein, 13 aa, Homo sapiens
  CDR3 for alpha chain variable domain of TCR clone 369869 (TRAV8-3, TRAJ28)
CAVGAVGCYQPTF

SEQ ID NO: 739738 - protein, 15 aa, Homo sapiens
  CDR3 for beta chain variable domain of TCR clone 369869 (TRBV7-9, TRBJ1-5)
CASSQGHQPNQPQHF

SEQ ID NO: 739739 - protein, 17 aa, Homo sapiens
  CDR3 for alpha chain variable domain of TCR clone 369870 (TRAV3, TRAJ6)
CAVRDGPRAGVSNIPTF

SEQ ID NO: 739740 - protein, 14 aa, Homo sapiens
  CDR3 for beta chain variable domain of TCR clone 369870 (TRBV7-2, TRBJ2-7)
CASSPKTSFYEQYF

SEQ ID NO: 739741 - protein, 14 aa, Homo sapiens
  CDR3 for alpha chain variable domain of TCR clone 369871 (TRAV1-2, TRAJ8)
CAGREDTGFQKLVF

SEQ ID NO: 739742 - protein, 22 aa, Homo sapiens
  CDR3 for beta chain variable domain of TCR clone 369871 (TRBV23-1, TRBJ2-7)
CASSRRLDSGQGYVGGGYEQYF

SEQ ID NO: 739743 - protein, 14 aa, Homo sapiens
  CDR3 for alpha chain variable domain of TCR clone 369872 (TRAV1-2, TRAJ10)
CAVRVTGGGNKLTF

SEQ ID NO: 739744 - protein, 12 aa, Homo sapiens
  CDR3 for beta chain variable domain of TCR clone 369872 (TRBV5-4, TRBJ1-1)
CASSLGQTEAFF

SEQ ID NO: 739745 - protein, 14 aa, Homo sapiens
  CDR3 for alpha chain variable domain of TCR clone 369873 (TRAV1-1, TRAJ27)
CAVIYNTNAGKSNF

SEQ ID NO: 739746 - protein, 13 aa, Homo sapiens
  CDR3 for beta chain variable domain of TCR clone 369873 (TRBV7-3, TRBJ1-1)
CASSQDWGAEAFF

SEQ ID NO: 739747 - protein, 13 aa, Homo sapiens
  CDR3 for alpha chain variable domain of TCR clone 369874 (TRAV25, TRAJ17)
CAGLRAAVNKLTF

SEQ ID NO: 739748 - protein, 16 aa, Homo sapiens
  CDR3 for beta chain variable domain of TCR clone 369874 (TRBV12-4, TRBJ1-5)
CASSRPVGGSNQPQHF

SEQ ID NO: 739749 - protein, 16 aa, Homo sapiens
  CDR3 for alpha chain variable domain of TCR clone 369875 (TRAV30, TRAJ24)
CGTEIVDADSWGKFQY

SEQ ID NO: 739750 - protein, 12 aa, Homo sapiens
  CDR3 for beta chain variable domain of TCR clone 369875 (TRBV11-2, TRBJ2-1)
CASSPGNNEQFF

SEQ ID NO: 739751 - protein, 14 aa, Homo sapiens
  CDR3 for alpha chain variable domain of TCR clone 369876 (TRAV27, TRAJ21)
CAGVRQLQQILLWV

SEQ ID NO: 739752 - protein, 14 aa, Homo sapiens
  CDR3 for beta chain variable domain of TCR clone 369876 (TRBV7-9, TRBJ1-4)
CASSLEGQSEKLFF

SEQ ID NO: 739753 - protein, 18 aa, Homo sapiens
  CDR3 for alpha chain variable domain of TCR clone 369877 (TRAV21, TRAJ52)
CAVRPSPAGGTSYGRLTF

SEQ ID NO: 739754 - protein, 14 aa, Homo sapiens
  CDR3 for beta chain variable domain of TCR clone 369877 (TRBV5-1, TRBJ2-2)
CASSLGGGSGELFF

SEQ ID NO: 739755 - protein, 13 aa, Homo sapiens
  CDR3 for alpha chain variable domain of TCR clone 369878 (TRAV2, TRAJ40)
CAVVTSGTYKYIF

SEQ ID NO: 739756 - protein, 15 aa, Homo sapiens
  CDR3 for beta chain variable domain of TCR clone 369878 (TRBV7-2, TRBJ1-1)
CASSFAGDRDTEAFF

SEQ ID NO: 739757 - protein, 14 aa, Homo sapiens
  CDR3 for alpha chain variable domain of TCR clone 369879 (TRAV12-1, TRAJ17)
CVVNYKAAGNKLTF

SEQ ID NO: 739758 - protein, 17 aa, Homo sapiens
  CDR3 for beta chain variable domain of TCR clone 369879 (TRBV20-1, TRBJ2-1)
CSASASGLAGSYNGQFF

SEQ ID NO: 739759 - protein, 17 aa, Homo sapiens
  CDR3 for alpha chain variable domain of TCR clone 369880 (TRAV3, TRAJ42)
CAVRDRDYGGSQGNLIF

SEQ ID NO: 739760 - protein, 13 aa, Homo sapiens
  CDR3 for beta chain variable domain of TCR clone 369880 (TRBV10-3, TRBJ2-7)
CASKLAVNYGQYF

SEQ ID NO: 739761 - protein, 16 aa, Homo sapiens
  CDR3 for alpha chain variable domain of TCR clone 369881 (TRAV3, TRAJ10)
CAVRAMRAGVGNKLTF

SEQ ID NO: 739762 - protein, 15 aa, Homo sapiens
  CDR3 for beta chain variable domain of TCR clone 369881 (TRBV11-2, TRBJ1-6)
CASTGFGTAVSPLHF

SEQ ID NO: 739763 - protein, 13 aa, Homo sapiens
  CDR3 for alpha chain variable domain of TCR clone 369882 (TRAV13-2, TRAJ48)
CAEMDFGNEKLTF

SEQ ID NO: 739764 - protein, 15 aa, Homo sapiens
  CDR3 for beta chain variable domain of TCR clone 369882 (TRBV7-9, TRBJ1-6)
CASSTPGRGNSPLHC

SEQ ID NO: 739765 - protein, 12 aa, Homo sapiens
  CDR3 for alpha chain variable domain of TCR clone 369883 (TRAV21, TRAJ56)
CAVGVNRSKLTF

SEQ ID NO: 739766 - protein, 13 aa, Homo sapiens
  CDR3 for beta chain variable domain of TCR clone 369883 (TRBV3-1, TRBJ2-5)
CASSPGLQETQYF

SEQ ID NO: 739767 - protein, 11 aa, Homo sapiens
  CDR3 for alpha chain variable domain of TCR clone 369884 (TRAV35, TRAJ30)
CAGLRDDKIIF

SEQ ID NO: 739768 - protein, 20 aa, Homo sapiens
  CDR3 for beta chain variable domain of TCR clone 369884 (TRBV7-8, TRBJ2-2)
CASSHLFPGPTIHITGELFF

SEQ ID NO: 739769 - protein, 16 aa, Homo sapiens
  CDR3 for alpha chain variable domain of TCR clone 369885 (TRAV36/DV7, TRAJ33)
WRPGNKVQDSNYQLIW

SEQ ID NO: 739770 - protein, 15 aa, Homo sapiens
  CDR3 for beta chain variable domain of TCR clone 369885 (TRBV29-1, TRBJ2-1)
CSVGRHALFYNEQFL

SEQ ID NO: 739771 - protein, 13 aa, Homo sapiens
  CDR3 for alpha chain variable domain of TCR clone 369886 (TRAV12-3, TRAJ21)
CAPGPHNFNKFYF

SEQ ID NO: 739772 - protein, 16 aa, Homo sapiens
  CDR3 for beta chain variable domain of TCR clone 369886 (TRBV19, TRBJ2-3)
CASSPGAASRTDTQYF

SEQ ID NO: 739773 - protein, 14 aa, Homo sapiens
  CDR3 for alpha chain variable domain of TCR clone 369887 (TRAV29/DV5, TRAJ36)
CAARRKTGANNLFF

SEQ ID NO: 739774 - protein, 14 aa, Homo sapiens
  CDR3 for beta chain variable domain of TCR clone 369887 (TRBV12-5, TRBJ2-5)
CASGSREHQETQYF

SEQ ID NO: 739775 - protein, 12 aa, Homo sapiens
  CDR3 for alpha chain variable domain of TCR clone 369888 (TRAV6, TRAJ10)
CALERGGNKLTF

SEQ ID NO: 739776 - protein, 13 aa, Homo sapiens
  CDR3 for beta chain variable domain of TCR clone 369888 (TRBV12-4, TRBJ1-1)
CASSPGTGFEAFF

SEQ ID NO: 739777 - protein, 15 aa, Homo sapiens
  CDR3 for alpha chain variable domain of TCR clone 369889 (TRAV12-2, TRAJ53)
CAVNGGGGSNSKLTF

SEQ ID NO: 739778 - protein, 14 aa, Homo sapiens
  CDR3 for beta chain variable domain of TCR clone 369889 (TRBV12-5, TRBJ2-5)
CASGSRTHQETQYF

SEQ ID NO: 739779 - protein, 15 aa, Homo sapiens
  CDR3 for alpha chain variable domain of TCR clone 369890 (TRAV26-1, TRAJ44)
CIVRANTGTASKLTF

SEQ ID NO: 739780 - protein, 16 aa, Homo sapiens
  CDR3 for beta chain variable domain of TCR clone 369890 (TRBV7-7, TRBJ2-1)
CASSLASGTSYNERFF

SEQ ID NO: 739781 - protein, 13 aa, Homo sapiens
  CDR3 for alpha chain variable domain of TCR clone 369891 (TRAV20, TRAJ48)
CAVQGVGNEELTF

SEQ ID NO: 739782 - protein, 14 aa, Homo sapiens
  CDR3 for beta chain variable domain of TCR clone 369891 (TRBV27, TRBJ2-7)
CASSFRDGPYEQYF

SEQ ID NO: 739783 - protein, 13 aa, Homo sapiens
  CDR3 for alpha chain variable domain of TCR clone 369892 (TRAV8-3, TRAJ28)
CAVGAVGSYQLTF

SEQ ID NO: 739784 - protein, 15 aa, Homo sapiens
  CDR3 for beta chain variable domain of TCR clone 369892 (TRBV7-9, TRBJ1-5)
CASSQGHQPIQSQHF

SEQ ID NO: 739785 - protein, 18 aa, Homo sapiens
  CDR3 for alpha chain variable domain of TCR clone 369893 (TRAV12-3, TRAJ52)
CAMSVGGAGGTSYGKRTF

SEQ ID NO: 739786 - protein, 14 aa, Homo sapiens
  CDR3 for beta chain variable domain of TCR clone 369893 (TRBV19, TRBJ2-5)
CASSMTGQQETQYF

SEQ ID NO: 739787 - protein, 12 aa, Homo sapiens
  CDR3 for alpha chain variable domain of TCR clone 369894 (TRAV2, TRAJ26)
CAGSPGRLWSEF

SEQ ID NO: 739788 - protein, 19 aa, Homo sapiens
  CDR3 for beta chain variable domain of TCR clone 369894 (TRBV25-1, TRBJ2-2)
CAILVYRVDRGRKTGELFF

SEQ ID NO: 739789 - protein, 13 aa, Homo sapiens
  CDR3 for alpha chain variable domain of TCR clone 369895 (TRAV29/DV5, TRAJ31)
CAASRNNNASLMF

SEQ ID NO: 739790 - protein, 14 aa, Homo sapiens
  CDR3 for beta chain variable domain of TCR clone 369895 (TRBV20-1, TRBJ1-5)
CSARDVTGFQPQHF

SEQ ID NO: 739791 - protein, 16 aa, Homo sapiens
  CDR3 for alpha chain variable domain of TCR clone 369896 (TRAV12-3, TRAJ53)
CAMSPGSGGSKYKLTF

SEQ ID NO: 739792 - protein, 17 aa, Homo sapiens
  CDR3 for beta chain variable domain of TCR clone 369896 (TRBV11-2, TRBJ2-1)
CASSLYPTGVEYDEQFF

SEQ ID NO: 739793 - protein, 15 aa, Homo sapiens
  CDR3 for alpha chain variable domain of TCR clone 369897 (TRAV21, TRAJ53)
CATLNSGGSKYKLTF

SEQ ID NO: 739794 - protein, 14 aa, Homo sapiens
  CDR3 for beta chain variable domain of TCR clone 369897 (TRBV20-1, TRBJ2-1)
CSAQIGGSDNEQFF

SEQ ID NO: 739795 - protein, 22 aa, Homo sapiens
  CDR3 for alpha chain variable domain of TCR clone 369898 (TRAV3, )
CAVRDHTGNHHIQNPDPAVYQL

SEQ ID NO: 739796 - protein, 14 aa, Homo sapiens
  CDR3 for beta chain variable domain of TCR clone 369898 (TRBV7-2, TRBJ2-7)
CASSSTVGGYEQYF

SEQ ID NO: 739797 - protein, 13 aa, Homo sapiens
  CDR3 for alpha chain variable domain of TCR clone 369899 (TRAV27, TRAJ6)
CAGGTRGSYIPTF

SEQ ID NO: 739798 - protein, 14 aa, Homo sapiens
  CDR3 for beta chain variable domain of TCR clone 369899 (TRBV12-4, TRBJ2-5)
CASSLGDRGETQYF

SEQ ID NO: 739799 - protein, 20 aa, Homo sapiens
  CDR3 for alpha chain variable domain of TCR clone 369900 (TRAV13-1, )
CAASPMDIQNPDPAVYQLRH

SEQ ID NO: 739800 - protein, 13 aa, Homo sapiens
  CDR3 for beta chain variable domain of TCR clone 369900 (TRBV20-1, TRBJ2-2)
CSASAAGTGELFF

SEQ ID NO: 739801 - protein, 22 aa, Homo sapiens
  CDR3 for alpha chain variable domain of TCR clone 369901 (TRAV13-1, TRAJ35)
CAASKGGFGNVLHCGSVPQVIV

SEQ ID NO: 739802 - protein, 13 aa, Homo sapiens
  CDR3 for beta chain variable domain of TCR clone 369901 (TRBV7-3, TRBJ1-1)
CASSQDWGAEAFF

SEQ ID NO: 739803 - protein, 19 aa, Homo sapiens
  CDR3 for alpha chain variable domain of TCR clone 369902 (TRAV16, )
CALSGDIQNPDPAVYQLRD

SEQ ID NO: 739804 - protein, 14 aa, Homo sapiens
  CDR3 for beta chain variable domain of TCR clone 369902 (TRBV12-5, TRBJ2-5)
CASGSRTHQETQYF

SEQ ID NO: 739805 - protein, 14 aa, Homo sapiens
  CDR3 for alpha chain variable domain of TCR clone 369903 (TRAV8-6, TRAJ53)
CAVSDIGSNYKLTF

SEQ ID NO: 739806 - protein, 15 aa, Homo sapiens
  CDR3 for beta chain variable domain of TCR clone 369903 (TRBV7-2, TRBJ1-2)
CASSPRAGWNYGYTF

SEQ ID NO: 739807 - protein, 15 aa, Homo sapiens
  CDR3 for alpha chain variable domain of TCR clone 369904 (TRAV12-1, TRAJ44)
CLADLPTGPASKLTF

SEQ ID NO: 739808 - protein, 13 aa, Homo sapiens
  CDR3 for beta chain variable domain of TCR clone 369904 (TRBV6-5, TRBJ2-5)
CASSPQGGETQYF

SEQ ID NO: 739809 - protein, 18 aa, Homo sapiens
  CDR3 for alpha chain variable domain of TCR clone 369905 (TRAV26-2, TRAJ45)
CILRVDKDSGGGADGLTF

SEQ ID NO: 739810 - protein, 17 aa, Homo sapiens
  CDR3 for beta chain variable domain of TCR clone 369905 (TRBV25-1, TRBJ2-1)
CASSAYGQGRGVYEQFF

SEQ ID NO: 739811 - protein, 23 aa, Homo sapiens
  CDR3 for alpha chain variable domain of TCR clone 369906 (TRAV26-1, TRAJ38)
CIADNAGNNHIQNPDPAVYQLRD

SEQ ID NO: 739812 - protein, 14 aa, Homo sapiens
  CDR3 for beta chain variable domain of TCR clone 369906 (TRBV7-2, TRBJ2-7)
CASSPKTSFYEQYF

SEQ ID NO: 739813 - protein, 13 aa, Homo sapiens
  CDR3 for alpha chain variable domain of TCR clone 369907 (TRAV12-3, TRAJ9)
CAMSADGGFKTIF

SEQ ID NO: 739814 - protein, 15 aa, Homo sapiens
  CDR3 for beta chain variable domain of TCR clone 369907 (TRBV5-5, TRBJ1-5)
CASSSTPGSNQPQHF

SEQ ID NO: 739815 - protein, 13 aa, Homo sapiens
  CDR3 for alpha chain variable domain of TCR clone 369908 (TRAV36/DV7, TRAJ53)
CALSGGSNYKLTF

SEQ ID NO: 739816 - protein, 14 aa, Homo sapiens
  CDR3 for beta chain variable domain of TCR clone 369908 (TRBV28, TRBJ2-7)
CASSLPSTSSTSGR

SEQ ID NO: 739817 - protein, 10 aa, Homo sapiens
  CDR3 for alpha chain variable domain of TCR clone 369909 (TRAV13-2, TRAJ49)
CADTGNQFYF

SEQ ID NO: 739818 - protein, 15 aa, Homo sapiens
  CDR3 for beta chain variable domain of TCR clone 369909 (TRBV20-1, TRBJ2-7)
CSARDRVSGMDEQYF

SEQ ID NO: 739819 - protein, 13 aa, Homo sapiens
  CDR3 for alpha chain variable domain of TCR clone 369910 (TRAV27, TRAJ41)
CAGERNSGYALNF

SEQ ID NO: 739820 - protein, 13 aa, Homo sapiens
  CDR3 for beta chain variable domain of TCR clone 369910 (TRBV27, TRBJ2-7)
CASSFVSSYEQYF

SEQ ID NO: 739821 - protein, 13 aa, Homo sapiens
  CDR3 for alpha chain variable domain of TCR clone 369911 (TRAV13-1, TRAJ5)
CAASDTGRRALTF

SEQ ID NO: 739822 - protein, 11 aa, Homo sapiens
  CDR3 for beta chain variable domain of TCR clone 369911 (TRBV19, TRBJ2-2)
CASRYSGELFF

SEQ ID NO: 739823 - protein, 16 aa, Homo sapiens
  CDR3 for alpha chain variable domain of TCR clone 369912 (TRAV3, TRAJ10)
CAVRDMRAGGGNKLTL

SEQ ID NO: 739824 - protein, 13 aa, Homo sapiens
  CDR3 for beta chain variable domain of TCR clone 369912 (TRBV7-9, TRBJ1-2)
CASSLKQNYGYTF

SEQ ID NO: 739825 - protein, 14 aa, Homo sapiens
  CDR3 for alpha chain variable domain of TCR clone 369913 (TRAV23/DV6, TRAJ37)
CAATTSSNTGKPIF

SEQ ID NO: 739826 - protein, 13 aa, Homo sapiens
  CDR3 for beta chain variable domain of TCR clone 369913 (TRBV7-7, TRBJ1-1)
CASSLGANTEAFF

SEQ ID NO: 739827 - protein, 12 aa, Homo sapiens
  CDR3 for alpha chain variable domain of TCR clone 369914 (TRAV21, TRAJ3)
CCFYSRASKIIF

SEQ ID NO: 739828 - protein, 16 aa, Homo sapiens
  CDR3 for beta chain variable domain of TCR clone 369914 (TRBV19, TRBJ2-1)
CASSKAGPSSYNEQFF

SEQ ID NO: 739829 - protein, 13 aa, Homo sapiens
  CDR3 for alpha chain variable domain of TCR clone 369915 (TRAV13-1, TRAJ39)
CSKYSNTGNMLTF

SEQ ID NO: 739830 - protein, 16 aa, Homo sapiens
  CDR3 for beta chain variable domain of TCR clone 369915 (TRBV20-1, TRBJ1-4)
CSAPGQGLLTNEKLFF

SEQ ID NO: 739831 - protein, 19 aa, Homo sapiens
  CDR3 for alpha chain variable domain of TCR clone 369916 (TRAV21, TRAJ40)
SLVTQPPTSVISGTYKYIF

SEQ ID NO: 739832 - protein, 17 aa, Homo sapiens
  CDR3 for beta chain variable domain of TCR clone 369916 (TRBV7-8, TRBJ2-6)
CASSAGTGGAGANVLTF

SEQ ID NO: 739833 - protein, 15 aa, Homo sapiens
  CDR3 for alpha chain variable domain of TCR clone 369917 (TRAV20, TRAJ53)
CAVQASGGSNYKLKF

SEQ ID NO: 739834 - protein, 12 aa, Homo sapiens
  CDR3 for beta chain variable domain of TCR clone 369917 (TRBV7-2, TRBJ2-1)
CASSPQDIEQFF

SEQ ID NO: 739835 - protein, 12 aa, Homo sapiens
  CDR3 for alpha chain variable domain of TCR clone 369918 (TRAV21, TRAJ24)
CAVMDSWGKLQF

SEQ ID NO: 739836 - protein, 16 aa, Homo sapiens
  CDR3 for beta chain variable domain of TCR clone 369918 (TRBV13, TRBJ2-2)
CASSEVVGANTGELFF

SEQ ID NO: 739837 - protein, 13 aa, Homo sapiens
  CDR3 for alpha chain variable domain of TCR clone 369919 (TRAV8-1, TRAJ39)
CAGLNTAGNMLTF

SEQ ID NO: 739838 - protein, 17 aa, Homo sapiens
  CDR3 for beta chain variable domain of TCR clone 369919 (TRBV19, TRBJ2-3)
CSSSIDPAGGGTDTQYF

SEQ ID NO: 739839 - protein, 21 aa, Homo sapiens
  CDR3 for alpha chain variable domain of TCR clone 369920 (TRAV1-1, TRAJ6)
CLLLLRCERLERTGGSYIPTF

SEQ ID NO: 739840 - protein, 19 aa, Homo sapiens
  CDR3 for beta chain variable domain of TCR clone 369920 (TRBV11-2, TRBJ2-1)
CASRGLRGGASDSYNEQFF

SEQ ID NO: 739841 - protein, 14 aa, Homo sapiens
  CDR3 for alpha chain variable domain of TCR clone 369921 (TRAV3, TRAJ7)
CAVREEEREQKNRF

SEQ ID NO: 739842 - protein, 15 aa, Homo sapiens
  CDR3 for beta chain variable domain of TCR clone 369921 (TRBV9, TRBJ1-6)
CASSVAGTGDSPLHF

SEQ ID NO: 739843 - protein, 13 aa, Homo sapiens
  CDR3 for alpha chain variable domain of TCR clone 369922 (TRAV1-2, TRAJ31)
CAVRGYNNARLMF

SEQ ID NO: 739844 - protein, 14 aa, Homo sapiens
  CDR3 for beta chain variable domain of TCR clone 369922 (TRBV12-4, TRBJ1-3)
CASTLTGAGNTVYF

SEQ ID NO: 739845 - protein, 15 aa, Homo sapiens
  CDR3 for alpha chain variable domain of TCR clone 369923 (TRAV41, TRAJ45)
CAASYSGGGADGLTF

SEQ ID NO: 739846 - protein, 15 aa, Homo sapiens
  CDR3 for beta chain variable domain of TCR clone 369923 (TRBV6-5, TRBJ2-1)
CASSYDAGAGNEQFF

SEQ ID NO: 739847 - protein, 20 aa, Homo sapiens
  CDR3 for alpha chain variable domain of TCR clone 369924 (TRAV2, TRAJ20)
LILQVREADAAVYRDCKLSF

SEQ ID NO: 739848 - protein, 17 aa, Homo sapiens
  CDR3 for beta chain variable domain of TCR clone 369924 (TRBV28, TRBJ2-5)
CASSTPEGDALQETQYF

SEQ ID NO: 739849 - protein, 22 aa, Homo sapiens
  CDR3 for alpha chain variable domain of TCR clone 369925 (TRAV21, )
CAVRQDAGNNHIQNPDPAVYQL

SEQ ID NO: 739850 - protein, 14 aa, Homo sapiens
  CDR3 for beta chain variable domain of TCR clone 369925 (TRBV7-9, TRBJ2-7)
CAGSLSQGSYEQYF

SEQ ID NO: 739851 - protein, 14 aa, Homo sapiens
  CDR3 for alpha chain variable domain of TCR clone 369926 (TRAV23/DV6, TRAJ23)
CAAGPYNQGGKLIF

SEQ ID NO: 739852 - protein, 17 aa, Homo sapiens
  CDR3 for beta chain variable domain of TCR clone 369926 (TRBV4-2, TRBJ1-1)
CASSQVATVGMNTEAFF

SEQ ID NO: 739853 - protein, 13 aa, Homo sapiens
  CDR3 for alpha chain variable domain of TCR clone 369927 (TRAV41, TRAJ48)
CAVKRVGNEKLTF

SEQ ID NO: 739854 - protein, 12 aa, Homo sapiens
  CDR3 for beta chain variable domain of TCR clone 369927 (TRBV11-2, TRBJ2-2)
CASSLGGGELFF

SEQ ID NO: 739855 - protein, 14 aa, Homo sapiens
  CDR3 for alpha chain variable domain of TCR clone 369928 (TRAV12-3, TRAJ42)
CAMNYGGSQGNLIF

SEQ ID NO: 739856 - protein, 11 aa, Homo sapiens
  CDR3 for beta chain variable domain of TCR clone 369928 (TRBV12-4, TRBJ2-3)
CASTATDTQYF

SEQ ID NO: 739857 - protein, 15 aa, Homo sapiens
  CDR3 for alpha chain variable domain of TCR clone 369929 (TRAV3, TRAJ20)
CAVRDSGSNDYKLSF

SEQ ID NO: 739858 - protein, 14 aa, Homo sapiens
  CDR3 for beta chain variable domain of TCR clone 369929 (TRBV20-1, TRBJ2-7)
CSARRGNGIYEQFF

SEQ ID NO: 739859 - protein, 13 aa, Homo sapiens
  CDR3 for alpha chain variable domain of TCR clone 369930 (TRAV12-3, TRAJ54)
CAMTLQGAQKLVF

SEQ ID NO: 739860 - protein, 14 aa, Homo sapiens
  CDR3 for beta chain variable domain of TCR clone 369930 (TRBV4-1, TRBJ2-2)
CASSQAVNTGELFV

SEQ ID NO: 739861 - protein, 12 aa, Homo sapiens
  CDR3 for alpha chain variable domain of TCR clone 369931 (TRAV26-1, TRAJ17)
CIVRSAVNKLTF

SEQ ID NO: 739862 - protein, 12 aa, Homo sapiens
  CDR3 for beta chain variable domain of TCR clone 369931 (TRBV12-4, TRBJ1-1)
CASSLAGLEAFF

SEQ ID NO: 739863 - protein, 15 aa, Homo sapiens
  CDR3 for alpha chain variable domain of TCR clone 369932 (TRAV26-1, TRAJ44)
CIVRANTGTASKLTF

SEQ ID NO: 739864 - protein, 13 aa, Homo sapiens
  CDR3 for beta chain variable domain of TCR clone 369932 (TRBV12-4, TRBJ1-2)
CASSSGLTVISTF

SEQ ID NO: 739865 - protein, 12 aa, Homo sapiens
  CDR3 for alpha chain variable domain of TCR clone 369933 (TRAV27, TRAJ37)
CADSGNTGKLIF

SEQ ID NO: 739866 - protein, 22 aa, Homo sapiens
  CDR3 for beta chain variable domain of TCR clone 369933 (TRBV11-2, TRBJ1-4)
CASSLDITRRGIPRKDNENLFF

SEQ ID NO: 739867 - protein, 13 aa, Homo sapiens
  CDR3 for alpha chain variable domain of TCR clone 369934 (TRAV25, TRAJ24)
CAGGTDSWGKFQF

SEQ ID NO: 739868 - protein, 13 aa, Homo sapiens
  CDR3 for beta chain variable domain of TCR clone 369934 (TRBV4-2, TRBJ1-1)
CASSQAGNTEAFF

SEQ ID NO: 739869 - protein, 11 aa, Homo sapiens
  CDR3 for alpha chain variable domain of TCR clone 369935 (TRAV2, TRAJ33)
SAVESNYQLIW

SEQ ID NO: 739870 - protein, 15 aa, Homo sapiens
  CDR3 for beta chain variable domain of TCR clone 369935 (TRBV19, TRBJ1-1)
CASTLGQIQNTEAFF

SEQ ID NO: 739871 - protein, 12 aa, Homo sapiens
  CDR3 for alpha chain variable domain of TCR clone 369936 (TRAV12-2, TRAJ10)
WGVTGGGNKLTF

SEQ ID NO: 739872 - protein, 15 aa, Homo sapiens
  CDR3 for beta chain variable domain of TCR clone 369936 (TRBV20-1, TRBJ2-7)
CSARKGLAESYEQYF

SEQ ID NO: 739873 - protein, 13 aa, Homo sapiens
  CDR3 for alpha chain variable domain of TCR clone 369937 (TRAV3, TRAJ30)
CAARDRGDDKIIF

SEQ ID NO: 739874 - protein, 14 aa, Homo sapiens
  CDR3 for beta chain variable domain of TCR clone 369937 (TRBV5-1, TRBJ1-1)
CASSRTTGDTEAFF

SEQ ID NO: 739875 - protein, 14 aa, Homo sapiens
  CDR3 for alpha chain variable domain of TCR clone 369938 (TRAV8-3, TRAJ16)
CAVDRFSDCQKLLF

SEQ ID NO: 739876 - protein, 15 aa, Homo sapiens
  CDR3 for beta chain variable domain of TCR clone 369938 (TRBV7-6, TRBJ2-1)
CASSPGQGPYNEQFF

SEQ ID NO: 739877 - protein, 14 aa, Homo sapiens
  CDR3 for alpha chain variable domain of TCR clone 369939 (TRAV1-2, TRAJ16)
CAVNRFSDGQKLRF

SEQ ID NO: 739878 - protein, 14 aa, Homo sapiens
  CDR3 for beta chain variable domain of TCR clone 369939 (TRBV11-2, TRBJ2-3)
CASSRLARTDTQYF

SEQ ID NO: 739879 - protein, 15 aa, Homo sapiens
  CDR3 for alpha chain variable domain of TCR clone 369940 (TRAV13-2, TRAJ12)
CAESLEMDSSYKLIF

SEQ ID NO: 739880 - protein, 14 aa, Homo sapiens
  CDR3 for beta chain variable domain of TCR clone 369940 (TRBV7-6, TRBJ2-7)
CASGLGDGSYEQYF

SEQ ID NO: 739881 - protein, 13 aa, Homo sapiens
  CDR3 for alpha chain variable domain of TCR clone 369941 (TRAV27, TRAJ6)
CAGGTRGSYIPTF

SEQ ID NO: 739882 - protein, 14 aa, Homo sapiens
  CDR3 for beta chain variable domain of TCR clone 369941 (TRBV20-1, TRBJ2-4)
CSASGRVGENIQDF

SEQ ID NO: 739883 - protein, 16 aa, Homo sapiens
  CDR3 for alpha chain variable domain of TCR clone 369942 (TRAV17, TRAJ52)
CATSNAGGTSYGKLTF

SEQ ID NO: 739884 - protein, 13 aa, Homo sapiens
  CDR3 for beta chain variable domain of TCR clone 369942 (TRBV27, TRBJ1-6)
CASSLVLVSRLHF

SEQ ID NO: 739885 - protein, 16 aa, Homo sapiens
  CDR3 for alpha chain variable domain of TCR clone 369943 (TRAV3, TRAJ37)
FAVRGKGSGNTGKLIF

SEQ ID NO: 739886 - protein, 13 aa, Homo sapiens
  CDR3 for beta chain variable domain of TCR clone 369943 (TRBV14, TRBJ2-7)
CASSQDSRYEQYF

SEQ ID NO: 739887 - protein, 14 aa, Homo sapiens
  CDR3 for alpha chain variable domain of TCR clone 369944 (TRAV1-2, TRAJ8)
CAVREDTGFQKLVF

SEQ ID NO: 739888 - protein, 15 aa, Homo sapiens
  CDR3 for beta chain variable domain of TCR clone 369944 (TRBV19, TRBJ2-1)
CAISTGTSSYNEQFF

SEQ ID NO: 739889 - protein, 15 aa, Homo sapiens
  CDR3 for alpha chain variable domain of TCR clone 369945 (TRAV34, TRAJ38)
CGADFTPGNNRKLIW

SEQ ID NO: 739890 - protein, 13 aa, Homo sapiens
  CDR3 for beta chain variable domain of TCR clone 369945 (TRBV19, TRBJ1-1)
CASSIGPQAEAFF

SEQ ID NO: 739891 - protein, 13 aa, Homo sapiens
  CDR3 for alpha chain variable domain of TCR clone 369946 (TRAV12-3, TRAJ13)
CAMTSGGYQKVTF

SEQ ID NO: 739892 - protein, 13 aa, Homo sapiens
  CDR3 for beta chain variable domain of TCR clone 369946 (TRBV20-1, TRBJ1-1)
CSARVGGNTEAFF

SEQ ID NO: 739893 - protein, 13 aa, Homo sapiens
  CDR3 for alpha chain variable domain of TCR clone 369947 (TRAV12-3, TRAJ7)
CAMTPYGNNRLAF

SEQ ID NO: 739894 - protein, 12 aa, Homo sapiens
  CDR3 for beta chain variable domain of TCR clone 369947 (TRBV7-9, TRBJ2-5)
CASSPNIETQYF

SEQ ID NO: 739895 - protein, 13 aa, Homo sapiens
  CDR3 for alpha chain variable domain of TCR clone 369948 (TRAV13-1, TRAJ21)
CAASIYNFNKFYF

SEQ ID NO: 739896 - protein, 15 aa, Homo sapiens
  CDR3 for beta chain variable domain of TCR clone 369948 (TRBV5-5, TRBJ1-5)
CASSLKGCGEQPQHF

SEQ ID NO: 739897 - protein, 18 aa, Homo sapiens
  CDR3 for alpha chain variable domain of TCR clone 369949 (TRAV26-2, TRAJ45)
CILRVDKDSGGGADGITF

SEQ ID NO: 739898 - protein, 16 aa, Homo sapiens
  CDR3 for beta chain variable domain of TCR clone 369949 (TRBV2, TRBJ1-4)
CASNLLQGATNEKLFF

SEQ ID NO: 739899 - protein, 12 aa, Homo sapiens
  CDR3 for alpha chain variable domain of TCR clone 369950 (TRAV9-2, TRAJ36)
CALKKGANNLFF

SEQ ID NO: 739900 - protein, 13 aa, Homo sapiens
  CDR3 for beta chain variable domain of TCR clone 369950 (TRBV27, TRBJ1-1)
CASSLSIGAQPFF

SEQ ID NO: 739901 - protein, 16 aa, Homo sapiens
  CDR3 for alpha chain variable domain of TCR clone 369951 (TRAV3, TRAJ10)
CAVRDMRAGGGNKLTF

SEQ ID NO: 739902 - protein, 14 aa, Homo sapiens
  CDR3 for beta chain variable domain of TCR clone 369951 (TRBV13, TRBJ2-3)
CASSSGSPTDTQYF

SEQ ID NO: 739903 - protein, 14 aa, Homo sapiens
  CDR3 for alpha chain variable domain of TCR clone 369952 (TRAV1-2, TRAJ16)
CAVKRFSDGQKLLF

SEQ ID NO: 739904 - protein, 15 aa, Homo sapiens
  CDR3 for beta chain variable domain of TCR clone 369952 (TRBV11-3, TRBJ2-3)
CASLKDGREGDTQYF

SEQ ID NO: 739905 - protein, 17 aa, Homo sapiens
  CDR3 for alpha chain variable domain of TCR clone 369953 (TRAV4, TRAJ18)
CLVGERSVGSTLGRLYF

SEQ ID NO: 739906 - protein, 13 aa, Homo sapiens
  CDR3 for beta chain variable domain of TCR clone 369953 (TRBV12-4, TRBJ2-7)
CASSPTETYEQYF

SEQ ID NO: 739907 - protein, 11 aa, Homo sapiens
  CDR3 for alpha chain variable domain of TCR clone 369954 (TRAV1-2, TRAJ40)
CAVPGTYKYIF

SEQ ID NO: 739908 - protein, 16 aa, Homo sapiens
  CDR3 for beta chain variable domain of TCR clone 369954 (TRBV29-1, TRBJ2-7)
CNVDVVGTSGSYEQYF

SEQ ID NO: 739909 - protein, 13 aa, Homo sapiens
  CDR3 for alpha chain variable domain of TCR clone 369955 (TRAV29/DV5, TRAJ31)
CAASRNNNARLMF

SEQ ID NO: 739910 - protein, 13 aa, Homo sapiens
  CDR3 for beta chain variable domain of TCR clone 369955 (TRBV7-2, TRBJ2-4)
CASSRERANIQYF

SEQ ID NO: 739911 - protein, 17 aa, Homo sapiens
  CDR3 for alpha chain variable domain of TCR clone 369956 (TRAV4, TRAJ18)
CLVGERSVGSTLGRLYF

SEQ ID NO: 739912 - protein, 18 aa, Homo sapiens
  CDR3 for beta chain variable domain of TCR clone 369956 (TRBV11-2, TRBJ2-3)
CASSLGGASRGAPNKQYF

SEQ ID NO: 739913 - protein, 16 aa, Homo sapiens
  CDR3 for alpha chain variable domain of TCR clone 369957 (TRAV3, TRAJ37)
CAVRVRGSGNTGKLIF

SEQ ID NO: 739914 - protein, 15 aa, Homo sapiens
  CDR3 for beta chain variable domain of TCR clone 369957 (TRBV10-2, TRBJ2-6)
CASSEQGTGANVLTF

SEQ ID NO: 739915 - protein, 13 aa, Homo sapiens
  CDR3 for alpha chain variable domain of TCR clone 369958 (TRAV39, TRAJ33)
CAAIPDSNYQLIW

SEQ ID NO: 739916 - protein, 13 aa, Homo sapiens
  CDR3 for beta chain variable domain of TCR clone 369958 (TRBV18, TRBJ1-1)
CASSGGRNTEAFF

SEQ ID NO: 739917 - protein, 16 aa, Homo sapiens
  CDR3 for alpha chain variable domain of TCR clone 369959 (TRAV20, TRAJ38)
CAVQASNAANNRKLIW

SEQ ID NO: 739918 - protein, 16 aa, Homo sapiens
  CDR3 for beta chain variable domain of TCR clone 369959 (TRBV7-8, TRBJ2-6)
CASRVGDSSGANVLTF

SEQ ID NO: 739919 - protein, 16 aa, Homo sapiens
  CDR3 for alpha chain variable domain of TCR clone 369960 (TRAV30, TRAJ24)
CGTEIVDADSWGKFHF

SEQ ID NO: 739920 - protein, 16 aa, Homo sapiens
  CDR3 for beta chain variable domain of TCR clone 369960 (TRBV2, TRBJ2-1)
CASRSPAGGKYNEQFF

SEQ ID NO: 739921 - protein, 13 aa, Homo sapiens
  CDR3 for alpha chain variable domain of TCR clone 369961 (TRAV27, TRAJ39)
CAGDTPAGNMLTF

SEQ ID NO: 739922 - protein, 13 aa, Homo sapiens
  CDR3 for beta chain variable domain of TCR clone 369961 (TRBV4-1, TRBJ2-4)
CASSQVGIDNQYF

SEQ ID NO: 739923 - protein, 15 aa, Homo sapiens
  CDR3 for alpha chain variable domain of TCR clone 369962 (TRAV29/DV5, TRAJ42)
YAAKTDGGSQGNLIF

SEQ ID NO: 739924 - protein, 12 aa, Homo sapiens
  CDR3 for beta chain variable domain of TCR clone 369962 (TRBV11-2, TRBJ2-1)
CASSPGNNEQFF

SEQ ID NO: 739925 - protein, 13 aa, Homo sapiens
  CDR3 for alpha chain variable domain of TCR clone 369963 (TRAV20, TRAJ37)
FAGCPSNTGKLIF

SEQ ID NO: 739926 - protein, 11 aa, Homo sapiens
  CDR3 for beta chain variable domain of TCR clone 369963 (TRBV12-4, TRBJ2-3)
CASTATDTQYF

SEQ ID NO: 739927 - protein, 11 aa, Homo sapiens
  CDR3 for alpha chain variable domain of TCR clone 369964 (TRAV3, TRAJ21)
CAVGNFYKFYF

SEQ ID NO: 739928 - protein, 16 aa, Homo sapiens
  CDR3 for beta chain variable domain of TCR clone 369964 (TRBV19, TRBJ2-1)
CASSKAGPRSYNEQFF

SEQ ID NO: 739929 - protein, 14 aa, Homo sapiens
  CDR3 for alpha chain variable domain of TCR clone 369965 (TRAV12-2, TRAJ15)
CAPHTGQAGTALIL

SEQ ID NO: 739930 - protein, 17 aa, Homo sapiens
  CDR3 for beta chain variable domain of TCR clone 369965 (TRBV5-5, TRBJ1-2)
CASSLGSLDGQSEGDTF

SEQ ID NO: 739931 - protein, 13 aa, Homo sapiens
  CDR3 for alpha chain variable domain of TCR clone 369966 (TRAV8-3, TRAJ28)
CAGGAVGSYQLTF

SEQ ID NO: 739932 - protein, 17 aa, Homo sapiens
  CDR3 for beta chain variable domain of TCR clone 369966 (TRBV11-2, TRBJ2-1)
CASSLYPPGVEYNEQFF

SEQ ID NO: 739933 - protein, 14 aa, Homo sapiens
  CDR3 for alpha chain variable domain of TCR clone 369967 (TRAV1-2, TRAJ8)
CAVREDTGFQKLVF

SEQ ID NO: 739934 - protein, 13 aa, Homo sapiens
  CDR3 for beta chain variable domain of TCR clone 369967 (TRBV14, TRBJ2-7)
CASSQARRYEQYF

SEQ ID NO: 739935 - protein, 13 aa, Homo sapiens
  CDR3 for alpha chain variable domain of TCR clone 369968 (TRAV12-2, TRAJ18)
CAVRGSTLGRLYF

SEQ ID NO: 739936 - protein, 13 aa, Homo sapiens
  CDR3 for beta chain variable domain of TCR clone 369968 (TRBV15, TRBJ1-6)
CATSGGLNSPLHV

SEQ ID NO: 739937 - protein, 12 aa, Homo sapiens
  CDR3 for alpha chain variable domain of TCR clone 369969 (TRAV1-1, TRAJ8)
CAGGTGFQKHVF

SEQ ID NO: 739938 - protein, 13 aa, Homo sapiens
  CDR3 for beta chain variable domain of TCR clone 369969 (TRBV7-9, TRBJ1-2)
CASSLKQNYGYTF

SEQ ID NO: 739939 - protein, 11 aa, Homo sapiens
  CDR3 for alpha chain variable domain of TCR clone 369970 (TRAV1-2, TRAJ20)
CAVANDYKLSF

SEQ ID NO: 739940 - protein, 16 aa, Homo sapiens
  CDR3 for beta chain variable domain of TCR clone 369970 (TRBV4-3, TRBJ1-6)
CASSQDPGLYNSPLHF

SEQ ID NO: 739941 - protein, 13 aa, Homo sapiens
  CDR3 for alpha chain variable domain of TCR clone 369971 (TRAV8-3, TRAJ21)
CAVGLDNFNKSYF

SEQ ID NO: 739942 - protein, 13 aa, Homo sapiens
  CDR3 for beta chain variable domain of TCR clone 369971 (TRBV11-2, TRBJ2-5)
CASGHGAKETQYF

SEQ ID NO: 739943 - protein, 15 aa, Homo sapiens
  CDR3 for alpha chain variable domain of TCR clone 369972 (TRAV8-3, TRAJ27)
CAVGPSKTNAGKSTF

SEQ ID NO: 739944 - protein, 10 aa, Homo sapiens
  CDR3 for beta chain variable domain of TCR clone 369972 (TRBV6-6, TRBJ2-1)
SDSSYNEQFF

SEQ ID NO: 739945 - protein, 11 aa, Homo sapiens
  CDR3 for alpha chain variable domain of TCR clone 369973 (TRAV2, TRAJ33)
CAVDSNYQLIW

SEQ ID NO: 739946 - protein, 13 aa, Homo sapiens
  CDR3 for beta chain variable domain of TCR clone 369973 (TRBV5-7, TRBJ2-3)
CASSLGRTDTQYF

SEQ ID NO: 739947 - protein, 18 aa, Homo sapiens
  CDR3 for alpha chain variable domain of TCR clone 369974 (TRAV12-3, TRAJ52)
CAMSVGGAGGTSYGKLTF

SEQ ID NO: 739948 - protein, 12 aa, Homo sapiens
  CDR3 for beta chain variable domain of TCR clone 369974 (TRBV24-1, TRBJ1-1)
CATLYPDTEAFF

SEQ ID NO: 739949 - protein, 15 aa, Homo sapiens
  CDR3 for alpha chain variable domain of TCR clone 369975 (TRAV25, TRAJ52)
CAWTSGGTSYGKLTF

SEQ ID NO: 739950 - protein, 16 aa, Homo sapiens
  CDR3 for beta chain variable domain of TCR clone 369975 (TRBV15, TRBJ1-2)
CATSRGPKTGGGGYTF

SEQ ID NO: 739951 - protein, 13 aa, Homo sapiens
  CDR3 for alpha chain variable domain of TCR clone 369976 (TRAV3, TRAJ20)
CAVRSLNDYKLSF

SEQ ID NO: 739952 - protein, 13 aa, Homo sapiens
  CDR3 for beta chain variable domain of TCR clone 369976 (TRBV7-3, TRBJ1-1)
CASSQDWGAEASF

SEQ ID NO: 739953 - protein, 23 aa, Homo sapiens
  CDR3 for alpha chain variable domain of TCR clone 369977 (TRAV29/DV5, TRAJ15)
CPPSLETLQCTSVHLTRQELLIF

SEQ ID NO: 739954 - protein, 15 aa, Homo sapiens
  CDR3 for beta chain variable domain of TCR clone 369977 (TRBV11-2, TRBJ2-2)
CASSSDRVNAGELFF

SEQ ID NO: 739955 - protein, 14 aa, Homo sapiens
  CDR3 for alpha chain variable domain of TCR clone 369978 (TRAV1-2, TRAJ8)
CAVREDTGSQKIVF

SEQ ID NO: 739956 - protein, 15 aa, Homo sapiens
  CDR3 for beta chain variable domain of TCR clone 369978 (TRBV7-9, TRBJ1-1)
CASSHRGTVNTEAFF

SEQ ID NO: 739957 - protein, 14 aa, Homo sapiens
  CDR3 for alpha chain variable domain of TCR clone 369979 (TRAV12-3, TRAJ10)
NHLPLTGGGNKLTF

SEQ ID NO: 739958 - protein, 13 aa, Homo sapiens
  CDR3 for beta chain variable domain of TCR clone 369979 (TRBV7-9, TRBJ2-3)
CASSPGSTDTQYF

SEQ ID NO: 739959 - protein, 15 aa, Homo sapiens
  CDR3 for alpha chain variable domain of TCR clone 369980 (TRAV26-1, TRAJ29)
CIVRFEGSGNTPLVF

SEQ ID NO: 739960 - protein, 18 aa, Homo sapiens
  CDR3 for beta chain variable domain of TCR clone 369980 (TRBV18, TRBJ1-3)
CASSPRGGAGPSGNTIYF

SEQ ID NO: 739961 - protein, 10 aa, Homo sapiens
  CDR3 for alpha chain variable domain of TCR clone 369981 (TRAV1-2, TRAJ31)
CVSEDARLMF

SEQ ID NO: 739962 - protein, 12 aa, Homo sapiens
  CDR3 for beta chain variable domain of TCR clone 369981 (TRBV11-2, TRBJ2-1)
CASSPGNNEQFF

SEQ ID NO: 739963 - protein, 18 aa, Homo sapiens
  CDR3 for alpha chain variable domain of TCR clone 369982 (TRAV21, TRAJ52)
CAVSPSPAGGTSYGKLTF

SEQ ID NO: 739964 - protein, 12 aa, Homo sapiens
  CDR3 for beta chain variable domain of TCR clone 369982 (TRBV6-3, TRBJ2-7)
CASSLTPYEQYF

SEQ ID NO: 739965 - protein, 15 aa, Homo sapiens
  CDR3 for alpha chain variable domain of TCR clone 369983 (TRAV4, TRAJ26)
CLVGDMNNYGQNFVF

SEQ ID NO: 739966 - protein, 16 aa, Homo sapiens
  CDR3 for beta chain variable domain of TCR clone 369983 (TRBV6-1, TRBJ2-5)
CASSETLDRGAETQYF

SEQ ID NO: 739967 - protein, 14 aa, Homo sapiens
  CDR3 for alpha chain variable domain of TCR clone 369984 (TRAV13-1, TRAJ6)
CAASITGGSYIPTF

SEQ ID NO: 739968 - protein, 15 aa, Homo sapiens
  CDR3 for beta chain variable domain of TCR clone 369984 (TRBV6-1, TRBJ2-1)
CASSELRGQYNEQFF

SEQ ID NO: 739969 - protein, 12 aa, Homo sapiens
  CDR3 for alpha chain variable domain of TCR clone 369985 (TRAV12-1, TRAJ40)
CVVYSGTYKYIS

SEQ ID NO: 739970 - protein, 18 aa, Homo sapiens
  CDR3 for beta chain variable domain of TCR clone 369985 (TRBV11-3, TRBJ2-3)
CASSLGGASRGAPNTQYF

SEQ ID NO: 739971 - protein, 16 aa, Homo sapiens
  CDR3 for alpha chain variable domain of TCR clone 369986 (TRAV21, TRAJ37)
CAVRTAGSSNTGKLIF

SEQ ID NO: 739972 - protein, 12 aa, Homo sapiens
  CDR3 for beta chain variable domain of TCR clone 369986 (TRBV7-9, TRBJ2-5)
CQPSVRPRDQYF

SEQ ID NO: 739973 - protein, 14 aa, Homo sapiens
  CDR3 for alpha chain variable domain of TCR clone 369987 (TRAV1-2, TRAJ8)
CAVREDTGFQRLVF

SEQ ID NO: 739974 - protein, 13 aa, Homo sapiens
  CDR3 for beta chain variable domain of TCR clone 369987 (TRBV12-4, TRBJ1-5)
CASSPDRAQPQHF

SEQ ID NO: 739975 - protein, 15 aa, Homo sapiens
  CDR3 for alpha chain variable domain of TCR clone 369988 (TRAV3, TRAJ45)
CAVRTPWGGADGLTF

SEQ ID NO: 739976 - protein, 16 aa, Homo sapiens
  CDR3 for beta chain variable domain of TCR clone 369988 (TRBV6-1, TRBJ2-2)
CASSFGQEANTGELFF

SEQ ID NO: 739977 - protein, 16 aa, Homo sapiens
  CDR3 for alpha chain variable domain of TCR clone 369989 (TRAV23/DV6, TRAJ9)
CAASIGGNTGGFKTIF

SEQ ID NO: 739978 - protein, 13 aa, Homo sapiens
  CDR3 for beta chain variable domain of TCR clone 369989 (TRBV6-1, TRBJ2-5)
CQQLRGGEETQYF

SEQ ID NO: 739979 - protein, 11 aa, Homo sapiens
  CDR3 for alpha chain variable domain of TCR clone 369990 (TRAV2, TRAJ24)
TTVPSWGKLQF

SEQ ID NO: 739980 - protein, 12 aa, Homo sapiens
  CDR3 for beta chain variable domain of TCR clone 369990 (TRBV11-2, TRBJ2-1)
CASSPGNNEQFF

SEQ ID NO: 739981 - protein, 18 aa, Homo sapiens
  CDR3 for alpha chain variable domain of TCR clone 369991 (TRAV35, TRAJ52)
CAGLLRYPGGTSYGKLTF

SEQ ID NO: 739982 - protein, 14 aa, Homo sapiens
  CDR3 for beta chain variable domain of TCR clone 369991 (TRBV6-1, TRBJ1-3)
CASVQGGGGNTIYF

SEQ ID NO: 739983 - protein, 14 aa, Homo sapiens
  CDR3 for alpha chain variable domain of TCR clone 369992 (TRAV12-1, TRAJ17)
CVVNYEAAGNKLTF

SEQ ID NO: 739984 - protein, 15 aa, Homo sapiens
  CDR3 for beta chain variable domain of TCR clone 369992 (TRBV7-2, TRBJ2-1)
CASTHGTGIYNEQFF

SEQ ID NO: 739985 - protein, 17 aa, Homo sapiens
  CDR3 for alpha chain variable domain of TCR clone 369993 (TRAV14/DV4, TRAJ42)
CAMRGKFYGGSQGNLIF

SEQ ID NO: 739986 - protein, 12 aa, Homo sapiens
  CDR3 for beta chain variable domain of TCR clone 369993 (TRBV7-8, TRBJ2-7)
CASSLGDREQYF

SEQ ID NO: 739987 - protein, 16 aa, Homo sapiens
  CDR3 for alpha chain variable domain of TCR clone 369994 (TRAV8-3, TRAJ13)
CAVGAYPSGGYQKVTF

SEQ ID NO: 739988 - protein, 15 aa, Homo sapiens
  CDR3 for beta chain variable domain of TCR clone 369994 (TRBV19, TRBJ1-5)
CASSMVWADNQPQHF

SEQ ID NO: 739989 - protein, 13 aa, Homo sapiens
  CDR3 for alpha chain variable domain of TCR clone 369995 (TRAV12-1, TRAJ29)
CVVNGPGNTPLVF

SEQ ID NO: 739990 - protein, 13 aa, Homo sapiens
  CDR3 for beta chain variable domain of TCR clone 369995 (TRBV7-2, TRBJ2-5)
CVSSRGGLETQYF

SEQ ID NO: 739991 - protein, 13 aa, Homo sapiens
  CDR3 for alpha chain variable domain of TCR clone 369996 (TRAV27, TRAJ17)
CAGAATAGNKLTF

SEQ ID NO: 739992 - protein, 15 aa, Homo sapiens
  CDR3 for beta chain variable domain of TCR clone 369996 (TRBV5-1, TRBJ2-3)
CASRNQAGSTDTQYL

SEQ ID NO: 739993 - protein, 14 aa, Homo sapiens
  CDR3 for alpha chain variable domain of TCR clone 369997 (TRAV17, TRAJ57)
CATDPQGGSEKLVV

SEQ ID NO: 739994 - protein, 17 aa, Homo sapiens
  CDR3 for beta chain variable domain of TCR clone 369997 (TRBV5-1, TRBJ2-2)
CASSLAGLSGGTGELFF

SEQ ID NO: 739995 - protein, 13 aa, Homo sapiens
  CDR3 for alpha chain variable domain of TCR clone 369998 (TRAV20, TRAJ31)
CAVQAWNNARLMF

SEQ ID NO: 739996 - protein, 15 aa, Homo sapiens
  CDR3 for beta chain variable domain of TCR clone 369998 (TRBV2, TRBJ2-4)
CASRTQGAAKNIQYF

SEQ ID NO: 739997 - protein, 11 aa, Homo sapiens
  CDR3 for alpha chain variable domain of TCR clone 369999 (TRAV3, TRAJ13)
CAVTSYQKVTF

SEQ ID NO: 739998 - protein, 16 aa, Homo sapiens
  CDR3 for beta chain variable domain of TCR clone 369999 (TRBV7-3, TRBJ2-2)
CASSLKRGTLSGELFF

SEQ ID NO: 739999 - protein, 12 aa, Homo sapiens
  CDR3 for alpha chain variable domain of TCR clone 370000 (TRAV21, TRAJ13)
PGPSGGYQKVTF

SEQ ID NO: 740000 - protein, 15 aa, Homo sapiens
  CDR3 for beta chain variable domain of TCR clone 370000 (TRBV18, TRBJ2-7)
CASSPTFMDSYEQYF

SEQ ID NO: 740001 - protein, 13 aa, Homo sapiens
  CDR3 for alpha chain variable domain of TCR clone 370001 (TRAV12-1, TRAJ33)
CGDVPDSNYQLIW

SEQ ID NO: 740002 - protein, 15 aa, Homo sapiens
  CDR3 for beta chain variable domain of TCR clone 370001 (TRBV27, TRBJ2-1)
CASSNGGGSSNEQFF

SEQ ID NO: 740003 - protein, 10 aa, Homo sapiens
  CDR3 for alpha chain variable domain of TCR clone 370002 (TRAV23/DV6, TRAJ57)
CAATSTLFQG

SEQ ID NO: 740004 - protein, 14 aa, Homo sapiens
  CDR3 for beta chain variable domain of TCR clone 370002 (TRBV25-1, TRBJ1-1)
CASTHLGGNTEAFF

SEQ ID NO: 740005 - protein, 15 aa, Homo sapiens
  CDR3 for alpha chain variable domain of TCR clone 370003 (TRAV26-2, TRAJ50)
CILRDEETSYDKEIF

SEQ ID NO: 740006 - protein, 16 aa, Homo sapiens
  CDR3 for beta chain variable domain of TCR clone 370003 (TRBV9, TRBJ2-1)
CASSVGGGGNYNEQFF

SEQ ID NO: 740007 - protein, 14 aa, Homo sapiens
  CDR3 for alpha chain variable domain of TCR clone 370004 (TRAV1-2, TRAJ6)
CAVRSSGGSYITTF

SEQ ID NO: 740008 - protein, 16 aa, Homo sapiens
  CDR3 for beta chain variable domain of TCR clone 370004 (TRBV7-3, TRBJ2-2)
CASSLKRGTLSGELFF

SEQ ID NO: 740009 - protein, 11 aa, Homo sapiens
  CDR3 for alpha chain variable domain of TCR clone 370005 (TRAV17, TRAJ9)
CGFTGGFKTIF

SEQ ID NO: 740010 - protein, 15 aa, Homo sapiens
  CDR3 for beta chain variable domain of TCR clone 370005 (TRBV12-4, TRBJ2-5)
CASSPPTGLQETQYF

SEQ ID NO: 740011 - protein, 15 aa, Homo sapiens
  CDR3 for alpha chain variable domain of TCR clone 370006 (TRAV12-3, TRAJ6)
CAMSAAAGGSYIPTF

SEQ ID NO: 740012 - protein, 13 aa, Homo sapiens
  CDR3 for beta chain variable domain of TCR clone 370006 (TRBV20-1, TRBJ1-2)
CSASTERIYGYTF

SEQ ID NO: 740013 - protein, 14 aa, Homo sapiens
  CDR3 for alpha chain variable domain of TCR clone 370007 (TRAV4, TRAJ26)
CLVGPHNYGQNFVF

SEQ ID NO: 740014 - protein, 16 aa, Homo sapiens
  CDR3 for beta chain variable domain of TCR clone 370007 (TRBV28, TRBJ2-7)
CASSSGTSGRGYEQYF

SEQ ID NO: 740015 - protein, 14 aa, Homo sapiens
  CDR3 for alpha chain variable domain of TCR clone 370008 (TRAV12-1, TRAJ43)
CVVNGRSNNNDMRF

SEQ ID NO: 740016 - protein, 13 aa, Homo sapiens
  CDR3 for beta chain variable domain of TCR clone 370008 (TRBV2, TRBJ1-4)
CASSELGVKKLFF

SEQ ID NO: 740017 - protein, 15 aa, Homo sapiens
  CDR3 for alpha chain variable domain of TCR clone 370009 (TRAV20, TRAJ16)
CAVQIRFSDGQKLLF

SEQ ID NO: 740018 - protein, 17 aa, Homo sapiens
  CDR3 for beta chain variable domain of TCR clone 370009 (TRBV28, TRBJ2-5)
CASSRQGGLAGAETQYF

SEQ ID NO: 740019 - protein, 14 aa, Homo sapiens
  CDR3 for alpha chain variable domain of TCR clone 370010 (TRAV13-1, TRAJ40)
CAASRTSGTYKYIF

SEQ ID NO: 740020 - protein, 15 aa, Homo sapiens
  CDR3 for beta chain variable domain of TCR clone 370010 (TRBV2, TRBJ2-7)
CDSSEGLARSYEQYF

SEQ ID NO: 740021 - protein, 12 aa, Homo sapiens
  CDR3 for alpha chain variable domain of TCR clone 370011 (TRAV2, TRAJ5)
CALDTGRRALTF

SEQ ID NO: 740022 - protein, 14 aa, Homo sapiens
  CDR3 for beta chain variable domain of TCR clone 370011 (TRBV10-3, TRBJ2-1)
CHSDVQDRAYEQFF

SEQ ID NO: 740023 - protein, 12 aa, Homo sapiens
  CDR3 for alpha chain variable domain of TCR clone 370012 (TRAV17, TRAJ48)
CALNFGNEKLTF

SEQ ID NO: 740024 - protein, 13 aa, Homo sapiens
  CDR3 for beta chain variable domain of TCR clone 370012 (TRBV6-5, TRBJ2-5)
CASSSSGGETQYF

SEQ ID NO: 740025 - protein, 16 aa, Homo sapiens
  CDR3 for alpha chain variable domain of TCR clone 370013 (TRAV20, TRAJ22)
CAVQASSSGSARQLTF

SEQ ID NO: 740026 - protein, 14 aa, Homo sapiens
  CDR3 for beta chain variable domain of TCR clone 370013 (TRBV25-1, TRBJ1-1)
CASTHLGGNTEAFF

SEQ ID NO: 740027 - protein, 12 aa, Homo sapiens
  CDR3 for alpha chain variable domain of TCR clone 370014 (TRAV4, TRAJ21)
CLVGDNFNKFYF

SEQ ID NO: 740028 - protein, 12 aa, Homo sapiens
  CDR3 for beta chain variable domain of TCR clone 370014 (TRBV19, TRBJ1-5)
CASSIAQQPQHF

SEQ ID NO: 740029 - protein, 16 aa, Homo sapiens
  CDR3 for alpha chain variable domain of TCR clone 370015 (TRAV20, TRAJ10)
CAVRFFLTGGGNKLTF

SEQ ID NO: 740030 - protein, 15 aa, Homo sapiens
  CDR3 for beta chain variable domain of TCR clone 370015 (TRBV7-8, TRBJ1-1)
CASSLGSGFDTEAFY

SEQ ID NO: 740031 - protein, 16 aa, Homo sapiens
  CDR3 for alpha chain variable domain of TCR clone 370016 (TRAV12-3, TRAJ53)
CAMSPGSGGSNYKLTF

SEQ ID NO: 740032 - protein, 14 aa, Homo sapiens
  CDR3 for beta chain variable domain of TCR clone 370016 (TRBV4-2, TRBJ2-1)
CASGLDRDYNEQFF

SEQ ID NO: 740033 - protein, 11 aa, Homo sapiens
  CDR3 for alpha chain variable domain of TCR clone 370017 (TRAV12-3, TRAJ49)
CAMSSGNQFYF

SEQ ID NO: 740034 - protein, 16 aa, Homo sapiens
  CDR3 for beta chain variable domain of TCR clone 370017 (TRBV7-3, TRBJ2-2)
CASSLKRGTLSGELFF

SEQ ID NO: 740035 - protein, 14 aa, Homo sapiens
  CDR3 for alpha chain variable domain of TCR clone 370018 (TRAV6, TRAJ6)
CALPTSGGSYIPTF

SEQ ID NO: 740036 - protein, 15 aa, Homo sapiens
  CDR3 for beta chain variable domain of TCR clone 370018 (TRBV20-1, TRBJ2-7)
CSAKSGTSGAYEQYF

SEQ ID NO: 740037 - protein, 13 aa, Homo sapiens
  CDR3 for alpha chain variable domain of TCR clone 370019 (TRAV38-2/DV8, TRAJ57)
CAYTQGGSEKMVF

SEQ ID NO: 740038 - protein, 15 aa, Homo sapiens
  CDR3 for beta chain variable domain of TCR clone 370019 (TRBV7-2, TRBJ1-2)
CASSPRAGWNYGYTF

SEQ ID NO: 740039 - protein, 15 aa, Homo sapiens
  CDR3 for alpha chain variable domain of TCR clone 370020 (TRAV25, TRAJ52)
CAWRPGGTSYGKLTF

SEQ ID NO: 740040 - protein, 17 aa, Homo sapiens
  CDR3 for beta chain variable domain of TCR clone 370020 (TRBV7-8, TRBJ2-6)
RASSAGTGGAGANVLTF

SEQ ID NO: 740041 - protein, 10 aa, Homo sapiens
  CDR3 for alpha chain variable domain of TCR clone 370021 (TRAV2, TRAJ34)
CAVVNDKLIF

SEQ ID NO: 740042 - protein, 13 aa, Homo sapiens
  CDR3 for beta chain variable domain of TCR clone 370021 (TRBV19, TRBJ2-7)
CASSPRQSYEQYF

SEQ ID NO: 740043 - protein, 16 aa, Homo sapiens
  CDR3 for alpha chain variable domain of TCR clone 370022 (TRAV30, TRAJ24)
CGTEIGYADSWGKFQF

SEQ ID NO: 740044 - protein, 14 aa, Homo sapiens
  CDR3 for beta chain variable domain of TCR clone 370022 (TRBV5-5, TRBJ1-2)
CASSLDPYNYGYTF

SEQ ID NO: 740045 - protein, 18 aa, Homo sapiens
  CDR3 for alpha chain variable domain of TCR clone 370023 (TRAV21, TRAJ52)
CAVRPSPAGGTSYGKLTF

SEQ ID NO: 740046 - protein, 15 aa, Homo sapiens
  CDR3 for beta chain variable domain of TCR clone 370023 (TRBV28, TRBJ1-5)
CASSRTGGYVQPQHF

SEQ ID NO: 740047 - protein, 13 aa, Homo sapiens
  CDR3 for alpha chain variable domain of TCR clone 370024 (TRAV36/DV7, TRAJ41)
CAVEANSGYALNF

SEQ ID NO: 740048 - protein, 12 aa, Homo sapiens
  CDR3 for beta chain variable domain of TCR clone 370024 (TRBV11-2, TRBJ2-2)
CASSLGGWELFF

SEQ ID NO: 740049 - protein, 14 aa, Homo sapiens
  CDR3 for alpha chain variable domain of TCR clone 370025 (TRAV2, TRAJ9)
CAVEDRSGGFKTIF

SEQ ID NO: 740050 - protein, 14 aa, Homo sapiens
  CDR3 for beta chain variable domain of TCR clone 370025 (TRBV7-3, TRBJ1-1)
CASSPTGGVSEAFF

SEQ ID NO: 740051 - protein, 12 aa, Homo sapiens
  CDR3 for alpha chain variable domain of TCR clone 370026 (TRAV13-1, TRAJ9)
CASHTGGFKTIF

SEQ ID NO: 740052 - protein, 13 aa, Homo sapiens
  CDR3 for beta chain variable domain of TCR clone 370026 (TRBV12-4, TRBJ1-2)
CASSSGCKDGYTF

SEQ ID NO: 740053 - protein, 14 aa, Homo sapiens
  CDR3 for alpha chain variable domain of TCR clone 370027 (TRAV8-6, TRAJ49)
CAVSDPGTGNKFYF

SEQ ID NO: 740054 - protein, 13 aa, Homo sapiens
  CDR3 for beta chain variable domain of TCR clone 370027 (TRBV7-9, TRBJ1-2)
CARSLKQNYGYTF

SEQ ID NO: 740055 - protein, 11 aa, Homo sapiens
  CDR3 for alpha chain variable domain of TCR clone 370028 (TRAV26-1, TRAJ37)
CIVRVGRKLIF

SEQ ID NO: 740056 - protein, 13 aa, Homo sapiens
  CDR3 for beta chain variable domain of TCR clone 370028 (TRBV7-2, TRAJ18)
CARRLEGLEKMFF

SEQ ID NO: 740057 - protein, 14 aa, Homo sapiens
  CDR3 for alpha chain variable domain of TCR clone 370029 (TRAV1-2, TRAJ16)
CVVNRFSDGQKLLF

SEQ ID NO: 740058 - protein, 15 aa, Homo sapiens
  CDR3 for beta chain variable domain of TCR clone 370029 (TRBV7-6, TRBJ2-2)
CASSFEGGRPGELFF

SEQ ID NO: 740059 - protein, 14 aa, Homo sapiens
  CDR3 for alpha chain variable domain of TCR clone 370030 (TRAV12-2, TRAJ44)
CAVNPAGTASKLTF

SEQ ID NO: 740060 - protein, 13 aa, Homo sapiens
  CDR3 for beta chain variable domain of TCR clone 370030 (TRBV20-1, TRBJ1-6)
CIAPLGVGSPLHF

SEQ ID NO: 740061 - protein, 16 aa, Homo sapiens
  CDR3 for alpha chain variable domain of TCR clone 370031 (TRAV4, TRAJ22)
CLVGDLYSGSARQLTF

SEQ ID NO: 740062 - protein, 14 aa, Homo sapiens
  CDR3 for beta chain variable domain of TCR clone 370031 (TRBV4-2, TRBJ2-1)
CASGLDRAYNEQFF

SEQ ID NO: 740063 - protein, 16 aa, Homo sapiens
  CDR3 for alpha chain variable domain of TCR clone 370032 (TRAV1-2, TRAJ10)
CAVREVLTGGGNKLTF

SEQ ID NO: 740064 - protein, 16 aa, Homo sapiens
  CDR3 for beta chain variable domain of TCR clone 370032 (TRBV29-1, TRBJ2-7)
CSVEVVGTSGSYEQYF

SEQ ID NO: 740065 - protein, 14 aa, Homo sapiens
  CDR3 for alpha chain variable domain of TCR clone 370033 (TRAV12-1, TRAJ10)
CVVNSAGGGNKLTF

SEQ ID NO: 740066 - protein, 12 aa, Homo sapiens
  CDR3 for beta chain variable domain of TCR clone 370033 (TRBV7-2, TRBJ2-5)
CASSQYQETQYF

SEQ ID NO: 740067 - protein, 13 aa, Homo sapiens
  CDR3 for alpha chain variable domain of TCR clone 370034 (TRAV3, TRAJ21)
CAGREPDFNNFYF

SEQ ID NO: 740068 - protein, 17 aa, Homo sapiens
  CDR3 for beta chain variable domain of TCR clone 370034 (TRBV7-8, TRBJ2-6)
CASSAGTGGAGANVLSF

SEQ ID NO: 740069 - protein, 18 aa, Homo sapiens
  CDR3 for alpha chain variable domain of TCR clone 370035 (TRAV21, TRAJ52)
CAVMPSPAGGTSYGKLTF

SEQ ID NO: 740070 - protein, 13 aa, Homo sapiens
  CDR3 for beta chain variable domain of TCR clone 370035 (TRBV10-3, TRBJ2-7)
CASKLAVNYEQYF

SEQ ID NO: 740071 - protein, 14 aa, Homo sapiens
  CDR3 for alpha chain variable domain of TCR clone 370036 (TRAV17, TRAJ12)
CAILPRDSSYKLIF

SEQ ID NO: 740072 - protein, 15 aa, Homo sapiens
  CDR3 for beta chain variable domain of TCR clone 370036 (TRBV5-1, TRBJ1-1)
CASSLGEGENTEAFF

SEQ ID NO: 740073 - protein, 13 aa, Homo sapiens
  CDR3 for alpha chain variable domain of TCR clone 370037 (TRAV8-4, TRAJ40)
CAVSEGGTYKYIF

SEQ ID NO: 740074 - protein, 16 aa, Homo sapiens
  CDR3 for beta chain variable domain of TCR clone 370037 (TRBV15, TRBJ2-7)
CATSRDGGIPSYEQYF

SEQ ID NO: 740075 - protein, 14 aa, Homo sapiens
  CDR3 for alpha chain variable domain of TCR clone 370038 (TRAV2, TRAJ37)
CAVDFTSNTGKLIF

SEQ ID NO: 740076 - protein, 15 aa, Homo sapiens
  CDR3 for beta chain variable domain of TCR clone 370038 (TRBV6-1, TRBJ2-5)
CASSEGWGIQETQYF

SEQ ID NO: 740077 - protein, 13 aa, Homo sapiens
  CDR3 for alpha chain variable domain of TCR clone 370039 (TRAV2, TRAJ12)
CAVGADSSYKLIF

SEQ ID NO: 740078 - protein, 16 aa, Homo sapiens
  CDR3 for beta chain variable domain of TCR clone 370039 (TRBV7-2, TRBJ2-2)
CASSLAGGGNTGELFF

SEQ ID NO: 740079 - protein, 13 aa, Homo sapiens
  CDR3 for alpha chain variable domain of TCR clone 370040 (TRAV12-3, TRAJ33)
CAMSVNSNYQLIW

SEQ ID NO: 740080 - protein, 13 aa, Homo sapiens
  CDR3 for beta chain variable domain of TCR clone 370040 (TRBV7-6, TRBJ2-3)
CASSLRSDNTQYF

SEQ ID NO: 740081 - protein, 18 aa, Homo sapiens
  CDR3 for alpha chain variable domain of TCR clone 370041 (TRAV38-2/DV8, TRAJ42)
CAYRSADLTGGSQGNLII

SEQ ID NO: 740082 - protein, 12 aa, Homo sapiens
  CDR3 for beta chain variable domain of TCR clone 370041 (TRBV11-2, TRBJ2-2)
CASSLGGGELFF

SEQ ID NO: 740083 - protein, 23 aa, Homo sapiens
  CDR3 for alpha chain variable domain of TCR clone 370042 (TRAV26-1, TRAJ38)
CIADNAGNNHIQNPDPAVYQLRD

SEQ ID NO: 740084 - protein, 12 aa, Homo sapiens
  CDR3 for beta chain variable domain of TCR clone 370042 (TRBV11-2, TRBJ2-2)
CASILGGGELFF

SEQ ID NO: 740085 - protein, 15 aa, Homo sapiens
  CDR3 for alpha chain variable domain of TCR clone 370043 (TRAV17, TRAJ13)
CATVPNSGGYQKVTF

SEQ ID NO: 740086 - protein, 13 aa, Homo sapiens
  CDR3 for beta chain variable domain of TCR clone 370043 (TRBV3-1, TRBJ1-5)
CTSSQAGGQPQHF

SEQ ID NO: 740087 - protein, 12 aa, Homo sapiens
  CDR3 for alpha chain variable domain of TCR clone 370044 (TRAV17, TRAJ20)
CATDSNDSKLSF

SEQ ID NO: 740088 - protein, 15 aa, Homo sapiens
  CDR3 for beta chain variable domain of TCR clone 370044 (TRBV28, TRBJ2-3)
CASSPDRQGANTQYF

SEQ ID NO: 740089 - protein, 12 aa, Homo sapiens
  CDR3 for alpha chain variable domain of TCR clone 370045 (TRAV21, TRAJ8)
CALSTGFQKLVF

SEQ ID NO: 740090 - protein, 12 aa, Homo sapiens
  CDR3 for beta chain variable domain of TCR clone 370045 (TRBV7-2, TRBJ2-3)
CASSLTGDTQYF

SEQ ID NO: 740091 - protein, 18 aa, Homo sapiens
  CDR3 for alpha chain variable domain of TCR clone 370046 (TRAV17, TRAJ45)
CATSLDLYSGGGADGLTF

SEQ ID NO: 740092 - protein, 15 aa, Homo sapiens
  CDR3 for beta chain variable domain of TCR clone 370046 (TRBV19, TRBJ2-1)
CASSGGGTLYNEQFF

SEQ ID NO: 740093 - protein, 14 aa, Homo sapiens
  CDR3 for alpha chain variable domain of TCR clone 370047 (TRAV16, TRAJ15)
CALRGPQAGTALIF

SEQ ID NO: 740094 - protein, 12 aa, Homo sapiens
  CDR3 for beta chain variable domain of TCR clone 370047 (TRBV18, TRBJ2-5)
CASSPSKETQYF

SEQ ID NO: 740095 - protein, 11 aa, Homo sapiens
  CDR3 for alpha chain variable domain of TCR clone 370048 (TRAV14/DV4, TRAJ3)
RLGSSASKIIF

SEQ ID NO: 740096 - protein, 11 aa, Homo sapiens
  CDR3 for beta chain variable domain of TCR clone 370048 (TRBV14, TRBJ2-5)
CQQPVKGDQYF

SEQ ID NO: 740097 - protein, 11 aa, Homo sapiens
  CDR3 for alpha chain variable domain of TCR clone 370049 (TRAV12-2, TRAJ42)
CAPGSQGNLIF

SEQ ID NO: 740098 - protein, 15 aa, Homo sapiens
  CDR3 for beta chain variable domain of TCR clone 370049 (TRBV6-3, TRBJ2-7)
CASSSPGTVFYEQHF

SEQ ID NO: 740099 - protein, 14 aa, Homo sapiens
  CDR3 for alpha chain variable domain of TCR clone 370050 (TRAV12-1, TRAJ17)
CGVNYKAAGNKLTF

SEQ ID NO: 740100 - protein, 13 aa, Homo sapiens
  CDR3 for beta chain variable domain of TCR clone 370050 (TRBV2, TRBJ2-2)
CASSKKNTGELFF

SEQ ID NO: 740101 - protein, 14 aa, Homo sapiens
  CDR3 for alpha chain variable domain of TCR clone 370051 (TRAV21, TRAJ38)
CAVTNAGNNRKLIW

SEQ ID NO: 740102 - protein, 16 aa, Homo sapiens
  CDR3 for beta chain variable domain of TCR clone 370051 (TRBV5-4, TRBJ2-1)
CASSLALAGAYNEQFF

SEQ ID NO: 740103 - protein, 14 aa, Homo sapiens
  CDR3 for alpha chain variable domain of TCR clone 370052 (TRAV23/DV6, TRAJ17)
CAASVQAAGTKLTF

SEQ ID NO: 740104 - protein, 18 aa, Homo sapiens
  CDR3 for beta chain variable domain of TCR clone 370052 (TRBV20-1, TRBJ2-7)
CSAGLPPRSGGSPYEQYF

SEQ ID NO: 740105 - protein, 12 aa, Homo sapiens
  CDR3 for alpha chain variable domain of TCR clone 370053 (TRAV21, TRAJ23)
CAVGPQGGKLIF

SEQ ID NO: 740106 - protein, 13 aa, Homo sapiens
  CDR3 for beta chain variable domain of TCR clone 370053 (TRBV7-3, TRBJ1-2)
CASSLKRGYGYTF

SEQ ID NO: 740107 - protein, 12 aa, Homo sapiens
  CDR3 for alpha chain variable domain of TCR clone 370054 (TRAV2, TRAJ33)
CAFMDSHYQLIW

SEQ ID NO: 740108 - protein, 16 aa, Homo sapiens
  CDR3 for beta chain variable domain of TCR clone 370054 (TRBV2, TRBJ2-7)
CASSEPWTGPSYEQYF

SEQ ID NO: 740109 - protein, 14 aa, Homo sapiens
  CDR3 for alpha chain variable domain of TCR clone 370055 (TRAV9-2, TRAJ39)
CALYIYNAGNMLTF

SEQ ID NO: 740110 - protein, 14 aa, Homo sapiens
  CDR3 for beta chain variable domain of TCR clone 370055 (TRBV19, TRBJ2-1)
CASPTFVLSGDQFF

SEQ ID NO: 740111 - protein, 13 aa, Homo sapiens
  CDR3 for alpha chain variable domain of TCR clone 370056 (TRAV8-3, TRAJ43)
CAVVPYNNNDMRF

SEQ ID NO: 740112 - protein, 17 aa, Homo sapiens
  CDR3 for beta chain variable domain of TCR clone 370056 (TRBV7-7, TRBJ1-1)
CASRGDRPNLGVTEAFF

SEQ ID NO: 740113 - protein, 14 aa, Homo sapiens
  CDR3 for alpha chain variable domain of TCR clone 370057 (TRAV1-2, TRAJ17)
CALRRGAAGNKLTF

SEQ ID NO: 740114 - protein, 16 aa, Homo sapiens
  CDR3 for beta chain variable domain of TCR clone 370057 (TRBV12-5, TRBJ2-5)
CASGPRTSGNQETQYF

SEQ ID NO: 740115 - protein, 15 aa, Homo sapiens
  CDR3 for alpha chain variable domain of TCR clone 370058 (TRAV26-1, TRAJ29)
CIVRVEGSGNTPLVF

SEQ ID NO: 740116 - protein, 14 aa, Homo sapiens
  CDR3 for beta chain variable domain of TCR clone 370058 (TRBV18, TRBJ2-5)
CASSAGVSQETQYF

SEQ ID NO: 740117 - protein, 15 aa, Homo sapiens
  CDR3 for alpha chain variable domain of TCR clone 370059 (TRAV8-2, TRAJ40)
CVVLGTTSGTYKYIF

SEQ ID NO: 740118 - protein, 16 aa, Homo sapiens
  CDR3 for beta chain variable domain of TCR clone 370059 (TRBV7-3, TRBJ2-1)
CASSLESYRSYNEQFF

SEQ ID NO: 740119 - protein, 16 aa, Homo sapiens
  CDR3 for alpha chain variable domain of TCR clone 370060 (TRAV12-3, TRAJ53)
CAMSVGSGCSNYKLTF

SEQ ID NO: 740120 - protein, 11 aa, Homo sapiens
  CDR3 for beta chain variable domain of TCR clone 370060 (TRBV29-1, TRBJ2-5)
CSVASGETQYF

SEQ ID NO: 740121 - protein, 18 aa, Homo sapiens
  CDR3 for alpha chain variable domain of TCR clone 370061 (TRAV26-1, TRAJ56)
CIARVASRVTGANRKLTF

SEQ ID NO: 740122 - protein, 15 aa, Homo sapiens
  CDR3 for beta chain variable domain of TCR clone 370061 (TRBV7-9, TRBJ2-5)
CASSDTGRGRETQYF

SEQ ID NO: 740123 - protein, 12 aa, Homo sapiens
  CDR3 for alpha chain variable domain of TCR clone 370062 (TRAV8-3, TRAJ41)
CAVALSGYALNF

SEQ ID NO: 740124 - protein, 14 aa, Homo sapiens
  CDR3 for beta chain variable domain of TCR clone 370062 (TRBV7-8, TRBJ2-3)
CASSLEAGTDTQYF

SEQ ID NO: 740125 - protein, 11 aa, Homo sapiens
  CDR3 for alpha chain variable domain of TCR clone 370063 (TRAV12-3, TRAJ49)
FAANTGNQFYF

SEQ ID NO: 740126 - protein, 12 aa, Homo sapiens
  CDR3 for beta chain variable domain of TCR clone 370063 (TRBV6-3, TRBJ2-7)
CASSEPGFEQYF

SEQ ID NO: 740127 - protein, 14 aa, Homo sapiens
  CDR3 for alpha chain variable domain of TCR clone 370064 (TRAV20, TRAJ42)
CAVQAGGSQGNLIF

SEQ ID NO: 740128 - protein, 14 aa, Homo sapiens
  CDR3 for beta chain variable domain of TCR clone 370064 (TRBV28, TRBJ1-2)
GASRRQGANYGYTF

SEQ ID NO: 740129 - protein, 13 aa, Homo sapiens
  CDR3 for alpha chain variable domain of TCR clone 370065 (TRAV8-2, TRAJ36)
CVVSDLPTNNLFF

SEQ ID NO: 740130 - protein, 18 aa, Homo sapiens
  CDR3 for beta chain variable domain of TCR clone 370065 (TRBV7-9, TRBJ2-6)
CASSCPGAGIAGANVLTF

SEQ ID NO: 740131 - protein, 12 aa, Homo sapiens
  CDR3 for alpha chain variable domain of TCR clone 370066 (TRAV12-3, TRAJ17)
CAMALTGNKLTF

SEQ ID NO: 740132 - protein, 15 aa, Homo sapiens
  CDR3 for beta chain variable domain of TCR clone 370066 (TRBV20-1, TRBJ2-7)
CSPRDRVSGMDEQYF

SEQ ID NO: 740133 - protein, 16 aa, Homo sapiens
  CDR3 for alpha chain variable domain of TCR clone 370067 (TRAV27, TRAJ13)
CAGAKSDSGGYQKVTF

SEQ ID NO: 740134 - protein, 13 aa, Homo sapiens
  CDR3 for beta chain variable domain of TCR clone 370067 (TRBV10-3, TRBJ2-7)
CASKLTVNYEQYF

SEQ ID NO: 740135 - protein, 20 aa, Homo sapiens
  CDR3 for alpha chain variable domain of TCR clone 370068 (TRAV21, TRAJ13)
CAVPRSFWGLPESYLWNLTK

SEQ ID NO: 740136 - protein, 15 aa, Homo sapiens
  CDR3 for beta chain variable domain of TCR clone 370068 (TRBV7-9, TRBJ1-6)
CASSSPGRGNSPLHF

SEQ ID NO: 740137 - protein, 15 aa, Homo sapiens
  CDR3 for alpha chain variable domain of TCR clone 370069 (TRAV16, TRAJ16)
CSKWPGHRDGQKLLF

SEQ ID NO: 740138 - protein, 14 aa, Homo sapiens
  CDR3 for beta chain variable domain of TCR clone 370069 (TRBV7-9, TRBJ2-4)
CASTTGGAKNMQYF

SEQ ID NO: 740139 - protein, 16 aa, Homo sapiens
  CDR3 for alpha chain variable domain of TCR clone 370070 (TRAV12-2, TRAJ6)
CAAPLAGSGGSYIPTI

SEQ ID NO: 740140 - protein, 13 aa, Homo sapiens
  CDR3 for beta chain variable domain of TCR clone 370070 (TRBV6-9, TRBJ2-5)
CASKGDGRRTQYF

SEQ ID NO: 740141 - protein, 13 aa, Homo sapiens
  CDR3 for alpha chain variable domain of TCR clone 370071 (TRAV8-3, TRAJ28)
CAVGAVGSYQLTF

SEQ ID NO: 740142 - protein, 16 aa, Homo sapiens
  CDR3 for beta chain variable domain of TCR clone 370071 (TRBV18, TRBJ2-2)
CASSPPRTANTGELFF

SEQ ID NO: 740143 - protein, 17 aa, Homo sapiens
  CDR3 for alpha chain variable domain of TCR clone 370072 (TRAV20, TRAJ52)
CAVQANAGGTSYGKLTF

SEQ ID NO: 740144 - protein, 14 aa, Homo sapiens
  CDR3 for beta chain variable domain of TCR clone 370072 (TRBV11-2, TRBJ1-2)
CASSLGTANYGYTF

SEQ ID NO: 740145 - protein, 19 aa, Homo sapiens
  CDR3 for alpha chain variable domain of TCR clone 370073 (TRAV3, TRAJ6)
CAVRDGPRAGGSYIPQLEE

SEQ ID NO: 740146 - protein, 14 aa, Homo sapiens
  CDR3 for beta chain variable domain of TCR clone 370073 (TRBV7-2, TRBJ2-7)
CASSPKTSFYEQYF

SEQ ID NO: 740147 - protein, 11 aa, Homo sapiens
  CDR3 for alpha chain variable domain of TCR clone 370074 (TRAV23/DV6, TRAJ20)
CAAKDDYKLSF

SEQ ID NO: 740148 - protein, 12 aa, Homo sapiens
  CDR3 for beta chain variable domain of TCR clone 370074 (TRBV3-1, TRBJ2-3)
CASSSVDRAEYF

SEQ ID NO: 740149 - protein, 13 aa, Homo sapiens
  CDR3 for alpha chain variable domain of TCR clone 370075 (TRAV2, TRAJ16)
CAVEFGDGQKLLF

SEQ ID NO: 740150 - protein, 14 aa, Homo sapiens
  CDR3 for beta chain variable domain of TCR clone 370075 (TRBV6-3, TRBJ2-5)
CASSYSLREKTQYV

SEQ ID NO: 740151 - protein, 11 aa, Homo sapiens
  CDR3 for alpha chain variable domain of TCR clone 370076 (TRAV12-2, TRAJ30)
CAVGRDDKIIF

SEQ ID NO: 740152 - protein, 17 aa, Homo sapiens
  CDR3 for beta chain variable domain of TCR clone 370076 (TRBV7-8, TRBJ2-6)
CASSAGTGGAGANVLSF

SEQ ID NO: 740153 - protein, 14 aa, Homo sapiens
  CDR3 for alpha chain variable domain of TCR clone 370077 (TRAV12-3, TRAJ54)
CAMRGIQGAQKLVV

SEQ ID NO: 740154 - protein, 13 aa, Homo sapiens
  CDR3 for beta chain variable domain of TCR clone 370077 (TRBV19, TRBJ1-1)
CASSPSNGGEAFF

SEQ ID NO: 740155 - protein, 14 aa, Homo sapiens
  CDR3 for alpha chain variable domain of TCR clone 370078 (TRAV30, TRAJ33)
CGTVAPRSNYQLIW

SEQ ID NO: 740156 - protein, 16 aa, Homo sapiens
  CDR3 for beta chain variable domain of TCR clone 370078 (TRBV3-1, TRBJ2-5)
SASSPGQFNGFGTQYF

SEQ ID NO: 740157 - protein, 16 aa, Homo sapiens
  CDR3 for alpha chain variable domain of TCR clone 370079 (TRAV8-3, TRAJ45)
CAVGILFRRRCWRTHL

SEQ ID NO: 740158 - protein, 11 aa, Homo sapiens
  CDR3 for beta chain variable domain of TCR clone 370079 (TRBV20-1, TRBJ2-5)
CSADRAETQYF

SEQ ID NO: 740159 - protein, 16 aa, Homo sapiens
  CDR3 for alpha chain variable domain of TCR clone 370080 (TRAV1-2, TRAJ10)
CAVRGVLTGGGNKLTF

SEQ ID NO: 740160 - protein, 14 aa, Homo sapiens
  CDR3 for beta chain variable domain of TCR clone 370080 (TRBV7-2, TRBJ2-7)
CASSGLAGRGEQYF

SEQ ID NO: 740161 - protein, 15 aa, Homo sapiens
  CDR3 for alpha chain variable domain of TCR clone 370081 (TRAV14/DV4, TRAJ12)
CAMREERDSSYKLIF

SEQ ID NO: 740162 - protein, 17 aa, Homo sapiens
  CDR3 for beta chain variable domain of TCR clone 370081 (TRBV2, TRBJ2-1)
CSSSRPGQGVMVNEQFF

SEQ ID NO: 740163 - protein, 17 aa, Homo sapiens
  CDR3 for alpha chain variable domain of TCR clone 370082 (TRAV36/DV7, TRAJ52)
CAVAQRAGGTSYGKLTF

SEQ ID NO: 740164 - protein, 11 aa, Homo sapiens
  CDR3 for beta chain variable domain of TCR clone 370082 (TRBV29-1, TRBJ2-5)
GSEDRTGTQYF

SEQ ID NO: 740165 - protein, 12 aa, Homo sapiens
  CDR3 for alpha chain variable domain of TCR clone 370083 (TRAV35, TRAJ39)
LAPNHAGNMPTF

SEQ ID NO: 740166 - protein, 16 aa, Homo sapiens
  CDR3 for beta chain variable domain of TCR clone 370083 (TRBV2, TRBJ2-3)
CASSTSVEGVTDTQYF

SEQ ID NO: 740167 - protein, 19 aa, Homo sapiens
  CDR3 for alpha chain variable domain of TCR clone 370084 (TRAV35, TRAJ30)
CAGPETTRSSLEKGHDFIF

SEQ ID NO: 740168 - protein, 14 aa, Homo sapiens
  CDR3 for beta chain variable domain of TCR clone 370084 (TRBV7-6, TRBJ1-6)
CASSQAGGGSPLHF

SEQ ID NO: 740169 - protein, 11 aa, Homo sapiens
  CDR3 for alpha chain variable domain of TCR clone 370085 (TRAV17, TRAJ36)
CAPTGANNLFF

SEQ ID NO: 740170 - protein, 12 aa, Homo sapiens
  CDR3 for beta chain variable domain of TCR clone 370085 (TRBV29-1, TRBJ2-3)
CSVTGGEDTQYF

SEQ ID NO: 740171 - protein, 11 aa, Homo sapiens
  CDR3 for alpha chain variable domain of TCR clone 370086 (TRAV2, TRAJ21)
CAVFNFNKFYL

SEQ ID NO: 740172 - protein, 15 aa, Homo sapiens
  CDR3 for beta chain variable domain of TCR clone 370086 (TRBV5-8, TRBJ1-4)
CASSLGALVREKLFF

SEQ ID NO: 740173 - protein, 12 aa, Homo sapiens
  CDR3 for alpha chain variable domain of TCR clone 370087 (TRAV17, TRAJ4)
CATDGGYNKLIF

SEQ ID NO: 740174 - protein, 14 aa, Homo sapiens
  CDR3 for beta chain variable domain of TCR clone 370087 (TRBV20-1, TRBJ2-1)
CSAQIGGSANEQFF

SEQ ID NO: 740175 - protein, 14 aa, Homo sapiens
  CDR3 for alpha chain variable domain of TCR clone 370088 (TRAV21, TRAJ35)
FAVMPIGFGNVLHC

SEQ ID NO: 740176 - protein, 12 aa, Homo sapiens
  CDR3 for beta chain variable domain of TCR clone 370088 (TRBV7-9, TRBJ2-7)
CAGSIKREEQYF

SEQ ID NO: 740177 - protein, 12 aa, Homo sapiens
  CDR3 for alpha chain variable domain of TCR clone 370089 (TRAV29/DV5, TRAJ10)
CAYTGGGNKLTF

SEQ ID NO: 740178 - protein, 14 aa, Homo sapiens
  CDR3 for beta chain variable domain of TCR clone 370089 (TRBV5-5, TRBJ1-5)
CASSGQVVDQPQHF

SEQ ID NO: 740179 - protein, 15 aa, Homo sapiens
  CDR3 for alpha chain variable domain of TCR clone 370090 (TRAV29/DV5, TRAJ57)
CAASEFQGGSEKLVF

SEQ ID NO: 740180 - protein, 15 aa, Homo sapiens
  CDR3 for beta chain variable domain of TCR clone 370090 (TRBV20-1, TRBJ2-7)
CSARDRVSGMDEQYF

SEQ ID NO: 740181 - protein, 13 aa, Homo sapiens
  CDR3 for alpha chain variable domain of TCR clone 370091 (TRAV13-1, TRAJ4)
CAASIGGYNKLFF

SEQ ID NO: 740182 - protein, 16 aa, Homo sapiens
  CDR3 for beta chain variable domain of TCR clone 370091 (TRBV20-1, TRBJ2-1)
CSAPGLAGSYSDEQFF

SEQ ID NO: 740183 - protein, 14 aa, Homo sapiens
  CDR3 for alpha chain variable domain of TCR clone 370092 (TRAV1-2, TRAJ16)
CSVNRFSDGQKLLF

SEQ ID NO: 740184 - protein, 15 aa, Homo sapiens
  CDR3 for beta chain variable domain of TCR clone 370092 (TRBV5-1, TRBJ2-3)
CASSVTSGSTDTQYF

SEQ ID NO: 740185 - protein, 15 aa, Homo sapiens
  CDR3 for alpha chain variable domain of TCR clone 370093 (TRAV8-4, TRAJ15)
CAVSDPVQAGTALIF

SEQ ID NO: 740186 - protein, 14 aa, Homo sapiens
  CDR3 for beta chain variable domain of TCR clone 370093 (TRBV11-2, TRBJ2-1)
CASSLSGPYNEQFF

SEQ ID NO: 740187 - protein, 14 aa, Homo sapiens
  CDR3 for alpha chain variable domain of TCR clone 370094 (TRAV35, TRAJ42)
CCVPYGGSQGNLIF

SEQ ID NO: 740188 - protein, 18 aa, Homo sapiens
  CDR3 for beta chain variable domain of TCR clone 370094 (TRBV13, TRBJ2-6)
CASSPMTSGGSEANVLTF

SEQ ID NO: 740189 - protein, 18 aa, Homo sapiens
  CDR3 for alpha chain variable domain of TCR clone 370095 (TRAV29/DV5, TRAJ52)
CAAGFRGAGGTSYGKLTF

SEQ ID NO: 740190 - protein, 14 aa, Homo sapiens
  CDR3 for beta chain variable domain of TCR clone 370095 (TRBV18, TRBJ2-7)
CASSPRGGAYEQYF

SEQ ID NO: 740191 - protein, 14 aa, Homo sapiens
  CDR3 for alpha chain variable domain of TCR clone 370096 (TRAV29/DV5, TRAJ36)
CAARRKTGANNLFF

SEQ ID NO: 740192 - protein, 15 aa, Homo sapiens
  CDR3 for beta chain variable domain of TCR clone 370096 (TRBV7-2, TRBJ2-3)
CASSLAGAFIDTQYF

SEQ ID NO: 740193 - protein, 14 aa, Homo sapiens
  CDR3 for alpha chain variable domain of TCR clone 370097 (TRAV12-3, TRAJ12)
CAMSALDSSYKLIF

SEQ ID NO: 740194 - protein, 16 aa, Homo sapiens
  CDR3 for beta chain variable domain of TCR clone 370097 (TRBV7-9, TRBJ2-3)
CASSLQENPGTDTQYF

SEQ ID NO: 740195 - protein, 12 aa, Homo sapiens
  CDR3 for alpha chain variable domain of TCR clone 370098 (TRAV25, TRAJ11)
CAGTSGYNTLTF

SEQ ID NO: 740196 - protein, 14 aa, Homo sapiens
  CDR3 for beta chain variable domain of TCR clone 370098 (TRBV5-8, TRBJ2-3)
CASSLGQGTDTQYF

SEQ ID NO: 740197 - protein, 18 aa, Homo sapiens
  CDR3 for alpha chain variable domain of TCR clone 370099 (TRAV13-1, TRAJ52)
CAAKNPNAGGTSYGKLTF

SEQ ID NO: 740198 - protein, 14 aa, Homo sapiens
  CDR3 for beta chain variable domain of TCR clone 370099 (TRBV11-3, TRBJ2-3)
CASSLDPATDTQYF

SEQ ID NO: 740199 - protein, 13 aa, Homo sapiens
  CDR3 for alpha chain variable domain of TCR clone 370100 (TRAV8-3, TRAJ43)
CAVVPYNNNDMRF

SEQ ID NO: 740200 - protein, 19 aa, Homo sapiens
  CDR3 for beta chain variable domain of TCR clone 370100 (TRBV7-7, TRBJ1-1)
CASIGDRPNLGSLKLSLDK

SEQ ID NO: 740201 - protein, 15 aa, Homo sapiens
  CDR3 for alpha chain variable domain of TCR clone 370101 (TRAV8-4, TRAJ13)
CAVSDWGGGYKKVTF

SEQ ID NO: 740202 - protein, 15 aa, Homo sapiens
  CDR3 for beta chain variable domain of TCR clone 370101 (TRBV25-1, TRBJ1-4)
CASSPGDSTNEKLFF

SEQ ID NO: 740203 - protein, 11 aa, Homo sapiens
  CDR3 for alpha chain variable domain of TCR clone 370102 (TRAV2, TRAJ13)
CASEGYQKVTF

SEQ ID NO: 740204 - protein, 13 aa, Homo sapiens
  CDR3 for beta chain variable domain of TCR clone 370102 (TRBV7-9, TRBJ1-2)
CASSLKQNYGYTF

SEQ ID NO: 740205 - protein, 12 aa, Homo sapiens
  CDR3 for alpha chain variable domain of TCR clone 370103 (TRAV36/DV7, TRAJ50)
CAVEPENLLRQG

SEQ ID NO: 740206 - protein, 13 aa, Homo sapiens
  CDR3 for beta chain variable domain of TCR clone 370103 (TRBV19, TRBJ1-5)
CASSINFNQPQHF

SEQ ID NO: 740207 - protein, 15 aa, Homo sapiens
  CDR3 for alpha chain variable domain of TCR clone 370104 (TRAV25, TRAJ52)
CAGTSGGTSYGKLKF

SEQ ID NO: 740208 - protein, 10 aa, Homo sapiens
  CDR3 for beta chain variable domain of TCR clone 370104 (TRBV2, TRBJ2-5)
CASSAATQYF

SEQ ID NO: 740209 - protein, 14 aa, Homo sapiens
  CDR3 for alpha chain variable domain of TCR clone 370105 (TRAV2, TRAJ37)
CAVDFTSNTGKLII

SEQ ID NO: 740210 - protein, 15 aa, Homo sapiens
  CDR3 for beta chain variable domain of TCR clone 370105 (TRBV28, TRBJ2-1)
CASSIIAGGRSEQFF

SEQ ID NO: 740211 - protein, 15 aa, Homo sapiens
  CDR3 for alpha chain variable domain of TCR clone 370106 (TRAV21, TRAJ37)
CAVRPTLSNTGKLIF

SEQ ID NO: 740212 - protein, 15 aa, Homo sapiens
  CDR3 for beta chain variable domain of TCR clone 370106 (TRBV11-3, TRBJ2-3)
CASLKDGREGDTQYF

SEQ ID NO: 740213 - protein, 14 aa, Homo sapiens
  CDR3 for alpha chain variable domain of TCR clone 370107 (TRAV1-2, TRAJ16)
CAVNRFSDGQKLLF

SEQ ID NO: 740214 - protein, 14 aa, Homo sapiens
  CDR3 for beta chain variable domain of TCR clone 370107 (TRBV7-3, TRBJ2-1)
CASSLAGGTNEQCF

SEQ ID NO: 740215 - protein, 18 aa, Homo sapiens
  CDR3 for alpha chain variable domain of TCR clone 370108 (TRAV21, TRAJ52)
CAVRPSPAGGTSYGKLTF

SEQ ID NO: 740216 - protein, 17 aa, Homo sapiens
  CDR3 for beta chain variable domain of TCR clone 370108 (TRBV6-1, TRBJ1-5)
CASSEAEFIRARQPQHF

SEQ ID NO: 740217 - protein, 14 aa, Homo sapiens
  CDR3 for alpha chain variable domain of TCR clone 370109 (TRAV1-2, TRAJ16)
CAVNLFSDGQKLLF

SEQ ID NO: 740218 - protein, 14 aa, Homo sapiens
  CDR3 for beta chain variable domain of TCR clone 370109 (TRBV25-1, TRBJ1-1)
CASTHLGGNTEAFF

SEQ ID NO: 740219 - protein, 20 aa, Homo sapiens
  CDR3 for alpha chain variable domain of TCR clone 370110 (TRAV12-3, TRAJ41)
SLFIRDSQPSDSATPEALNF

SEQ ID NO: 740220 - protein, 15 aa, Homo sapiens
  CDR3 for beta chain variable domain of TCR clone 370110 (TRBV28, TRBJ2-1)
CASSIIAGGRSEQFF

SEQ ID NO: 740221 - protein, 16 aa, Homo sapiens
  CDR3 for alpha chain variable domain of TCR clone 370111 (TRAV30, TRAJ24)
CGTEIVDADSRGKFQF

SEQ ID NO: 740222 - protein, 12 aa, Homo sapiens
  CDR3 for beta chain variable domain of TCR clone 370111 (TRBV7-8, TRBJ2-7)
CASSLGDREQYF

SEQ ID NO: 740223 - protein, 14 aa, Homo sapiens
  CDR3 for alpha chain variable domain of TCR clone 370112 (TRAV12-3, TRAJ10)
SHLPLTGGGNKLTF

SEQ ID NO: 740224 - protein, 14 aa, Homo sapiens
  CDR3 for beta chain variable domain of TCR clone 370112 (TRBV2, TRBJ2-1)
CASSEARQGVSEFF

SEQ ID NO: 740225 - protein, 11 aa, Homo sapiens
  CDR3 for alpha chain variable domain of TCR clone 370113 (TRAV12-3, TRAJ49)
CAANTGNQFYF

SEQ ID NO: 740226 - protein, 15 aa, Homo sapiens
  CDR3 for beta chain variable domain of TCR clone 370113 (TRBV9, TRBJ1-6)
CASSAAGTGDSPLHF

SEQ ID NO: 740227 - protein, 16 aa, Homo sapiens
  CDR3 for alpha chain variable domain of TCR clone 370114 (TRAV12-2, TRAJ18)
CAVTTDRGSTLGRLYF

SEQ ID NO: 740228 - protein, 13 aa, Homo sapiens
  CDR3 for beta chain variable domain of TCR clone 370114 (TRBV19, TRBJ1-2)
CASSISEDYGYTF

SEQ ID NO: 740229 - protein, 14 aa, Homo sapiens
  CDR3 for alpha chain variable domain of TCR clone 370115 (TRAV1-2, TRAJ16)
CAVNRFSDGQKLLF

SEQ ID NO: 740230 - protein, 16 aa, Homo sapiens
  CDR3 for beta chain variable domain of TCR clone 370115 (TRBV28, TRBJ2-1)
CASSSFYSGSLNEQFF

SEQ ID NO: 740231 - protein, 11 aa, Homo sapiens
  CDR3 for alpha chain variable domain of TCR clone 370116 (TRAV2, TRAJ33)
CAVESNYQLIW

SEQ ID NO: 740232 - protein, 13 aa, Homo sapiens
  CDR3 for beta chain variable domain of TCR clone 370116 (TRBV20-1, TRBJ1-1)
CSARGGGNTEAFF

SEQ ID NO: 740233 - protein, 14 aa, Homo sapiens
  CDR3 for alpha chain variable domain of TCR clone 370117 (TRAV8-2, TRAJ45)
CVVSAGGGADGLTF

SEQ ID NO: 740234 - protein, 15 aa, Homo sapiens
  CDR3 for beta chain variable domain of TCR clone 370117 (TRBV2, TRBJ2-1)
CASSELAGSYNEQFF

SEQ ID NO: 740235 - protein, 13 aa, Homo sapiens
  CDR3 for alpha chain variable domain of TCR clone 370118 (TRAV12-1, TRAJ22)
CVVYSGSARQLTI

SEQ ID NO: 740236 - protein, 10 aa, Homo sapiens
  CDR3 for beta chain variable domain of TCR clone 370118 (TRBV6-3, TRBJ2-2)
CASRDGELFF

SEQ ID NO: 740237 - protein, 14 aa, Homo sapiens
  CDR3 for alpha chain variable domain of TCR clone 370119 (TRAV12-2, TRAJ17)
CAVLFKAAGNKLPF

SEQ ID NO: 740238 - protein, 14 aa, Homo sapiens
  CDR3 for beta chain variable domain of TCR clone 370119 (TRBV25-1, TRBJ1-1)
CASTHLGGNTEAFF

SEQ ID NO: 740239 - protein, 15 aa, Homo sapiens
  CDR3 for alpha chain variable domain of TCR clone 370120 (TRAV17, TRAJ22)
CATVAPSGTARQLTF

SEQ ID NO: 740240 - protein, 16 aa, Homo sapiens
  CDR3 for beta chain variable domain of TCR clone 370120 (TRBV10-3, TRBJ2-7)
CAISADFADRPYEQYF

SEQ ID NO: 740241 - protein, 13 aa, Homo sapiens
  CDR3 for alpha chain variable domain of TCR clone 370121 (TRAV12-1, TRAJ26)
RVVRRNYGQNFVF

SEQ ID NO: 740242 - protein, 14 aa, Homo sapiens
  CDR3 for beta chain variable domain of TCR clone 370121 (TRBV4-2, TRBJ2-1)
CASGLDRAYNEQFF

SEQ ID NO: 740243 - protein, 16 aa, Homo sapiens
  CDR3 for alpha chain variable domain of TCR clone 370122 (TRAV30, TRAJ24)
CGTEIVDADSWGKFQF

SEQ ID NO: 740244 - protein, 17 aa, Homo sapiens
  CDR3 for beta chain variable domain of TCR clone 370122 (TRBV20-1, TRBJ2-1)
CSAPTRLAGTRYNEQFF

SEQ ID NO: 740245 - protein, 16 aa, Homo sapiens
  CDR3 for alpha chain variable domain of TCR clone 370123 (TRAV3, TRAJ37)
FAVRPHGSGNTGKLIF

SEQ ID NO: 740246 - protein, 12 aa, Homo sapiens
  CDR3 for beta chain variable domain of TCR clone 370123 (TRBV11-2, TRBJ2-2)
CASSLGGGELFF

SEQ ID NO: 740247 - protein, 14 aa, Homo sapiens
  CDR3 for alpha chain variable domain of TCR clone 370124 (TRAV12-3, TRAJ12)
CAISEVDSSYKLIF

SEQ ID NO: 740248 - protein, 12 aa, Homo sapiens
  CDR3 for beta chain variable domain of TCR clone 370124 (TRBV18, TRBJ1-4)
CASSPSREKLFF

SEQ ID NO: 740249 - protein, 13 aa, Homo sapiens
  CDR3 for alpha chain variable domain of TCR clone 370125 (TRAV1-2, TRAJ9)
FAALNTGGFKTIF

SEQ ID NO: 740250 - protein, 14 aa, Homo sapiens
  CDR3 for beta chain variable domain of TCR clone 370125 (TRBV19, TRBJ1-4)
CASSMGRHNEKLFF

SEQ ID NO: 740251 - protein, 16 aa, Homo sapiens
  CDR3 for alpha chain variable domain of TCR clone 370126 (TRAV30, TRAJ24)
CGTEIVDADSWGKFQF

SEQ ID NO: 740252 - protein, 15 aa, Homo sapiens
  CDR3 for beta chain variable domain of TCR clone 370126 (TRBV7-9, TRBJ1-4)
CASSARTGGNENLFI

SEQ ID NO: 740253 - protein, 20 aa, Homo sapiens
  CDR3 for alpha chain variable domain of TCR clone 370127 (TRAV1-1, TRAJ4)
CLLLLRCEGFLSGGYNKLIF

SEQ ID NO: 740254 - protein, 13 aa, Homo sapiens
  CDR3 for beta chain variable domain of TCR clone 370127 (TRBV7-9, TRBJ1-2)
CASSLKQNYGYTF

SEQ ID NO: 740255 - protein, 12 aa, Homo sapiens
  CDR3 for alpha chain variable domain of TCR clone 370128 (TRAV12-3, TRAJ17)
CAVTLTGNKLTF

SEQ ID NO: 740256 - protein, 15 aa, Homo sapiens
  CDR3 for beta chain variable domain of TCR clone 370128 (TRBV20-1, TRBJ2-7)
CSARDRVAGMDEQYF

SEQ ID NO: 740257 - protein, 15 aa, Homo sapiens
  CDR3 for alpha chain variable domain of TCR clone 370129 (TRAV1-2, TRAJ9)
CAVRDDGTGGFKTIF

SEQ ID NO: 740258 - protein, 14 aa, Homo sapiens
  CDR3 for beta chain variable domain of TCR clone 370129 (TRBV7-2, TRBJ2-7)
CASRSQGAAYEQYF

SEQ ID NO: 740259 - protein, 14 aa, Homo sapiens
  CDR3 for alpha chain variable domain of TCR clone 370130 (TRAV13-2, TRAJ34)
CAENILIGTDKLIF

SEQ ID NO: 740260 - protein, 12 aa, Homo sapiens
  CDR3 for beta chain variable domain of TCR clone 370130 (TRBV16, TRBJ2-2)
CASSQSVGELFF

SEQ ID NO: 740261 - protein, 13 aa, Homo sapiens
  CDR3 for alpha chain variable domain of TCR clone 370131 (TRAV3, TRAJ20)
CAVRSLNAYKLSF

SEQ ID NO: 740262 - protein, 13 aa, Homo sapiens
  CDR3 for beta chain variable domain of TCR clone 370131 (TRBV6-1, TRBJ2-1)
CAGMDPTNNEQFF

SEQ ID NO: 740263 - protein, 12 aa, Homo sapiens
  CDR3 for alpha chain variable domain of TCR clone 370132 (TRAV17, TRAJ20)
CATLANDYKLSF

SEQ ID NO: 740264 - protein, 13 aa, Homo sapiens
  CDR3 for beta chain variable domain of TCR clone 370132 (TRBV2, TRBJ1-2)
CASTLGTGDGYTF

SEQ ID NO: 740265 - protein, 16 aa, Homo sapiens
  CDR3 for alpha chain variable domain of TCR clone 370133 (TRAV22, TRAJ45)
CAVERGKRGGADGLTF

SEQ ID NO: 740266 - protein, 11 aa, Homo sapiens
  CDR3 for beta chain variable domain of TCR clone 370133 (TRBV29-1, TRBJ2-5)
CSEYRTGTQYF

SEQ ID NO: 740267 - protein, 15 aa, Homo sapiens
  CDR3 for alpha chain variable domain of TCR clone 370134 (TRAV35, TRAJ58)
CAGRRQETSGYRLTF

SEQ ID NO: 740268 - protein, 11 aa, Homo sapiens
  CDR3 for beta chain variable domain of TCR clone 370134 (TRBV11-2, TRBJ1-1)
CASSINTEAFF

SEQ ID NO: 740269 - protein, 16 aa, Homo sapiens
  CDR3 for alpha chain variable domain of TCR clone 370135 (TRAV14/DV4, TRAJ53)
CAMREGGVGSNYKLTF

SEQ ID NO: 740270 - protein, 15 aa, Homo sapiens
  CDR3 for beta chain variable domain of TCR clone 370135 (TRBV15, TRBJ1-3)
CATSRDRGPGNTIYF

SEQ ID NO: 740271 - protein, 16 aa, Homo sapiens
  CDR3 for alpha chain variable domain of TCR clone 370136 (TRAV4, TRAJ22)
CLVGDLYSGSARQLTS

SEQ ID NO: 740272 - protein, 16 aa, Homo sapiens
  CDR3 for beta chain variable domain of TCR clone 370136 (TRBV7-9, TRBJ2-1)
CASSDVAVGSYNEQFF

SEQ ID NO: 740273 - protein, 11 aa, Homo sapiens
  CDR3 for alpha chain variable domain of TCR clone 370137 (TRAV26-1, TRAJ43)
CIVRPYNDMRF

SEQ ID NO: 740274 - protein, 18 aa, Homo sapiens
  CDR3 for beta chain variable domain of TCR clone 370137 (TRBV5-4, TRBJ2-7)
CASSLQGWGRTNSYEQYF

SEQ ID NO: 740275 - protein, 15 aa, Homo sapiens
  CDR3 for alpha chain variable domain of TCR clone 370138 (TRAV2, TRAJ15)
CAVEDRGQAGTALIF

SEQ ID NO: 740276 - protein, 12 aa, Homo sapiens
  CDR3 for beta chain variable domain of TCR clone 370138 (TRBV12-4, TRBJ1-5)
CASSLGRQPQHF

SEQ ID NO: 740277 - protein, 12 aa, Homo sapiens
  CDR3 for alpha chain variable domain of TCR clone 370139 (TRAV13-1, TRAJ53)
AASGGSNYKLTF

SEQ ID NO: 740278 - protein, 16 aa, Homo sapiens
  CDR3 for beta chain variable domain of TCR clone 370139 (TRBV10-3, TRBJ2-1)
CAISGVGDGGGGEQFF

SEQ ID NO: 740279 - protein, 14 aa, Homo sapiens
  CDR3 for alpha chain variable domain of TCR clone 370140 (TRAV12-3, TRAJ10)
SHLTLTGGGNKLTF

SEQ ID NO: 740280 - protein, 15 aa, Homo sapiens
  CDR3 for beta chain variable domain of TCR clone 370140 (TRBV27, TRBJ2-1)
CASSNGGGSSNEQFF

SEQ ID NO: 740281 - protein, 10 aa, Homo sapiens
  CDR3 for alpha chain variable domain of TCR clone 370141 (TRAV5, TRAJ34)
CAEDTDKLIF

SEQ ID NO: 740282 - protein, 16 aa, Homo sapiens
  CDR3 for beta chain variable domain of TCR clone 370141 (TRBV28, TRBJ1-4)
CASSPPYRGRSEKLFF

SEQ ID NO: 740283 - protein, 16 aa, Homo sapiens
  CDR3 for alpha chain variable domain of TCR clone 370142 (TRAV4, TRAJ42)
CLVGPIYGGSQGNPIF

SEQ ID NO: 740284 - protein, 17 aa, Homo sapiens
  CDR3 for beta chain variable domain of TCR clone 370142 (TRBV11-2, TRBJ2-1)
CASSLYPPGVEYNEQFF

SEQ ID NO: 740285 - protein, 12 aa, Homo sapiens
  CDR3 for alpha chain variable domain of TCR clone 370143 (TRAV30, TRAJ15)
CGTNQAGTALIF

SEQ ID NO: 740286 - protein, 14 aa, Homo sapiens
  CDR3 for beta chain variable domain of TCR clone 370143 (TRBV7-6, TRBJ2-1)
CASSLGGGADEQFF

SEQ ID NO: 740287 - protein, 15 aa, Homo sapiens
  CDR3 for alpha chain variable domain of TCR clone 370144 (TRAV12-2, TRAJ53)
CAVNGGGGSNSKLTF

SEQ ID NO: 740288 - protein, 12 aa, Homo sapiens
  CDR3 for beta chain variable domain of TCR clone 370144 (TRBV11-2, TRBJ2-1)
CASSPGNNEQFF

SEQ ID NO: 740289 - protein, 14 aa, Homo sapiens
  CDR3 for alpha chain variable domain of TCR clone 370145 (TRAV12-1, TRAJ17)
CVVNYKAAGNKLTF

SEQ ID NO: 740290 - protein, 15 aa, Homo sapiens
  CDR3 for beta chain variable domain of TCR clone 370145 (TRBV7-2, TRBJ2-1)
CASSLVAGRYNEQFF

SEQ ID NO: 740291 - protein, 14 aa, Homo sapiens
  CDR3 for alpha chain variable domain of TCR clone 370146 (TRAV8-3, TRAJ15)
CAVGRHQAGTALIF

SEQ ID NO: 740292 - protein, 13 aa, Homo sapiens
  CDR3 for beta chain variable domain of TCR clone 370146 (TRBV9, TRBJ2-7)
CASSASYSYEQYF

SEQ ID NO: 740293 - protein, 14 aa, Homo sapiens
  CDR3 for alpha chain variable domain of TCR clone 370147 (TRAV23/DV6, TRAJ10)
CAASIGTHGRRKQN

SEQ ID NO: 740294 - protein, 13 aa, Homo sapiens
  CDR3 for beta chain variable domain of TCR clone 370147 (TRBV11-1, TRBJ1-2)
CASVGSWGYGYTF

SEQ ID NO: 740295 - protein, 13 aa, Homo sapiens
  CDR3 for alpha chain variable domain of TCR clone 370148 (TRAV38-1, TRAJ57)
CALVHGGSEKLGF

SEQ ID NO: 740296 - protein, 17 aa, Homo sapiens
  CDR3 for beta chain variable domain of TCR clone 370148 (TRBV29-1, TRBJ2-3)
CSVDSPPRGARTDTQYF

SEQ ID NO: 740297 - protein, 12 aa, Homo sapiens
  CDR3 for alpha chain variable domain of TCR clone 370149 (TRAV17, TRAJ21)
CSLRYNFNKFYF

SEQ ID NO: 740298 - protein, 13 aa, Homo sapiens
  CDR3 for beta chain variable domain of TCR clone 370149 (TRBV24-1, TRBJ2-5)
CATSTGGTETQYF

SEQ ID NO: 740299 - protein, 14 aa, Homo sapiens
  CDR3 for alpha chain variable domain of TCR clone 370150 (TRAV1-2, TRAJ8)
CAVREDTGFQKLAF

SEQ ID NO: 740300 - protein, 15 aa, Homo sapiens
  CDR3 for beta chain variable domain of TCR clone 370150 (TRBV12-4, TRBJ2-5)
CASSPPTGLQETQFF

SEQ ID NO: 740301 - protein, 13 aa, Homo sapiens
  CDR3 for alpha chain variable domain of TCR clone 370151 (TRAV12-3, TRAJ9)
CAMRNTGGFKTIF

SEQ ID NO: 740302 - protein, 18 aa, Homo sapiens
  CDR3 for beta chain variable domain of TCR clone 370151 (TRBV4-1, TRBJ1-5)
CASSQDPRGQGLNQPQHF

SEQ ID NO: 740303 - protein, 14 aa, Homo sapiens
  CDR3 for alpha chain variable domain of TCR clone 370152 (TRAV12-1, TRAJ23)
CVVMIYNQGGKLIF

SEQ ID NO: 740304 - protein, 15 aa, Homo sapiens
  CDR3 for beta chain variable domain of TCR clone 370152 (TRBV28, TRBJ2-5)
CASSPPWSYQETQYF

SEQ ID NO: 740305 - protein, 14 aa, Homo sapiens
  CDR3 for alpha chain variable domain of TCR clone 370153 (TRAV12-2, TRAJ45)
CAVYSGGGAYGLTF

SEQ ID NO: 740306 - protein, 14 aa, Homo sapiens
  CDR3 for beta chain variable domain of TCR clone 370153 (TRBV6-5, TRBJ1-2)
CASTRGGGSDGYTF

SEQ ID NO: 740307 - protein, 12 aa, Homo sapiens
  CDR3 for alpha chain variable domain of TCR clone 370154 (TRAV29/DV5, TRAJ49)
CPATDTGNQFYF

SEQ ID NO: 740308 - protein, 19 aa, Homo sapiens
  CDR3 for beta chain variable domain of TCR clone 370154 (TRBV25-1, TRBJ2-2)
CAILVYRVDRGRKTGELFF

SEQ ID NO: 740309 - protein, 13 aa, Homo sapiens
  CDR3 for alpha chain variable domain of TCR clone 370155 (TRAV27, TRAJ49)
CAPRPYTGNQFYF

SEQ ID NO: 740310 - protein, 16 aa, Homo sapiens
  CDR3 for beta chain variable domain of TCR clone 370155 (TRBV4-1, TRBJ1-2)
RASSHDAGQVLYGYTF

SEQ ID NO: 740311 - protein, 16 aa, Homo sapiens
  CDR3 for alpha chain variable domain of TCR clone 370156 (TRAV8-3, TRAJ10)
CAVGPILTGGGNKRTF

SEQ ID NO: 740312 - protein, 15 aa, Homo sapiens
  CDR3 for beta chain variable domain of TCR clone 370156 (TRBV7-2, TRBJ2-2)
CASRRPGQNTGELFF

SEQ ID NO: 740313 - protein, 15 aa, Homo sapiens
  CDR3 for alpha chain variable domain of TCR clone 370157 (TRAV12-3, TRAJ6)
CAMSATTGGSNIPTF

SEQ ID NO: 740314 - protein, 13 aa, Homo sapiens
  CDR3 for beta chain variable domain of TCR clone 370157 (TRBV7-9, TRBJ1-2)
CASSLKQNYGYTF

SEQ ID NO: 740315 - protein, 14 aa, Homo sapiens
  CDR3 for alpha chain variable domain of TCR clone 370158 (TRAV13-1, TRAJ44)
CAAKATGTASKLTF

SEQ ID NO: 740316 - protein, 16 aa, Homo sapiens
  CDR3 for beta chain variable domain of TCR clone 370158 (TRBV7-9, TRBJ2-6)
CASSLKGALRANVLTF

SEQ ID NO: 740317 - protein, 14 aa, Homo sapiens
  CDR3 for alpha chain variable domain of TCR clone 370159 (TRAV14/DV4, TRAJ26)
CAMREGTYGQNFVF

SEQ ID NO: 740318 - protein, 14 aa, Homo sapiens
  CDR3 for beta chain variable domain of TCR clone 370159 (TRBV5-1, TRBJ1-2)
CASSLEPVNYGYTF

SEQ ID NO: 740319 - protein, 14 aa, Homo sapiens
  CDR3 for alpha chain variable domain of TCR clone 370160 (TRAV12-3, TRAJ10)
SHLPLTGGGNKLTF

SEQ ID NO: 740320 - protein, 12 aa, Homo sapiens
  CDR3 for beta chain variable domain of TCR clone 370160 (TRBV7-9, TRBJ2-7)
CAISIKREEQYF

SEQ ID NO: 740321 - protein, 16 aa, Homo sapiens
  CDR3 for alpha chain variable domain of TCR clone 370161 (TRAV3, TRAJ23)
CAVKIGIYNQGGKLIF

SEQ ID NO: 740322 - protein, 17 aa, Homo sapiens
  CDR3 for beta chain variable domain of TCR clone 370161 (TRBV10-3, TRBJ2-6)
CAISECTAPSGANVLTF

SEQ ID NO: 740323 - protein, 23 aa, Homo sapiens
  CDR3 for alpha chain variable domain of TCR clone 370162 (TRAV26-1, TRAJ38)
CIADNAGNNHIQNPDPAVYQLRD

SEQ ID NO: 740324 - protein, 15 aa, Homo sapiens
  CDR3 for beta chain variable domain of TCR clone 370162 (TRBV20-1, TRBJ1-5)
CSARPRGQLNQPQHF

SEQ ID NO: 740325 - protein, 13 aa, Homo sapiens
  CDR3 for alpha chain variable domain of TCR clone 370163 (TRAV13-1, TRAJ39)
CSKYSNAGNTLTF

SEQ ID NO: 740326 - protein, 18 aa, Homo sapiens
  CDR3 for beta chain variable domain of TCR clone 370163 (TRBV10-2, TRBJ2-2)
CISAPAVHRQADAGELFF

SEQ ID NO: 740327 - protein, 14 aa, Homo sapiens
  CDR3 for alpha chain variable domain of TCR clone 370164 (TRAV25, TRAJ22)
CAVRSSGSARKLTF

SEQ ID NO: 740328 - protein, 13 aa, Homo sapiens
  CDR3 for beta chain variable domain of TCR clone 370164 (TRBV4-1, TRBJ2-2)
CASSQENTGELFF

SEQ ID NO: 740329 - protein, 16 aa, Homo sapiens
  CDR3 for alpha chain variable domain of TCR clone 370165 (TRAV26-1, TRAJ33)
CIVPFWGEDSYYQLIW

SEQ ID NO: 740330 - protein, 14 aa, Homo sapiens
  CDR3 for beta chain variable domain of TCR clone 370165 (TRBV6-3, TRBJ1-1)
CASSYHSKNTEAFF

SEQ ID NO: 740331 - protein, 12 aa, Homo sapiens
  CDR3 for alpha chain variable domain of TCR clone 370166 (TRAV13-2, TRAJ23)
CAERHRGGKLIF

SEQ ID NO: 740332 - protein, 15 aa, Homo sapiens
  CDR3 for beta chain variable domain of TCR clone 370166 (TRBV20-1, TRBJ1-4)
QCSGTGLLTNEKLFF

SEQ ID NO: 740333 - protein, 17 aa, Homo sapiens
  CDR3 for alpha chain variable domain of TCR clone 370167 (TRAV3, TRAJ6)
CAVRDGPGAGGSYIPTF

SEQ ID NO: 740334 - protein, 13 aa, Homo sapiens
  CDR3 for beta chain variable domain of TCR clone 370167 (TRBV20-1, TRBJ1-6)
CSAPLGVGSPLHF

SEQ ID NO: 740335 - protein, 13 aa, Homo sapiens
  CDR3 for alpha chain variable domain of TCR clone 370168 (TRAV12-3, TRAJ13)
CAMSSGGYQKVTF

SEQ ID NO: 740336 - protein, 17 aa, Homo sapiens
  CDR3 for beta chain variable domain of TCR clone 370168 (TRBV2, TRBJ2-7)
CASSQALTGWDSYEQYF

SEQ ID NO: 740337 - protein, 14 aa, Homo sapiens
  CDR3 for alpha chain variable domain of TCR clone 370169 (TRAV4, TRAJ37)
CLVVVAGNTGKLIF

SEQ ID NO: 740338 - protein, 15 aa, Homo sapiens
  CDR3 for beta chain variable domain of TCR clone 370169 (TRBV7-2, TRBJ2-3)
CASSSTGLETDTQYF

SEQ ID NO: 740339 - protein, 12 aa, Homo sapiens
  CDR3 for alpha chain variable domain of TCR clone 370170 (TRAV13-1, TRAJ21)
CAAKEGFNKFYF

SEQ ID NO: 740340 - protein, 20 aa, Homo sapiens
  CDR3 for beta chain variable domain of TCR clone 370170 (TRBV28, TRBJ2-1)
CASTPIGRSQGLAGGNEQFF

SEQ ID NO: 740341 - protein, 14 aa, Homo sapiens
  CDR3 for alpha chain variable domain of TCR clone 370171 (TRAV3, TRAJ21)
CAVESQANFNKFYF

SEQ ID NO: 740342 - protein, 18 aa, Homo sapiens
  CDR3 for beta chain variable domain of TCR clone 370171 (TRBV7-9, TRBJ2-1)
CASSLAVSGTSGGNEQFF

SEQ ID NO: 740343 - protein, 13 aa, Homo sapiens
  CDR3 for alpha chain variable domain of TCR clone 370172 (TRAV12-1, TRAJ40)
CVVPTSGTYKYIF

SEQ ID NO: 740344 - protein, 13 aa, Homo sapiens
  CDR3 for beta chain variable domain of TCR clone 370172 (TRBV4-2, TRBJ1-1)
CASSQAGNTEAFS

SEQ ID NO: 740345 - protein, 12 aa, Homo sapiens
  CDR3 for alpha chain variable domain of TCR clone 370173 (TRAV13-1, TRAJ49)
CAASIRSNQFYF

SEQ ID NO: 740346 - protein, 14 aa, Homo sapiens
  CDR3 for beta chain variable domain of TCR clone 370173 (TRBV7-2, TRBJ2-1)
CANSPGLAGNEQFF

SEQ ID NO: 740347 - protein, 17 aa, Homo sapiens
  CDR3 for alpha chain variable domain of TCR clone 370174 (TRAV8-6, TRAJ58)
CAVSSWVGETSGSRLTF

SEQ ID NO: 740348 - protein, 16 aa, Homo sapiens
  CDR3 for beta chain variable domain of TCR clone 370174 (TRBV20-1, TRBJ1-4)
CSAPGQGLLTNENLFF

SEQ ID NO: 740349 - protein, 13 aa, Homo sapiens
  CDR3 for alpha chain variable domain of TCR clone 370175 (TRAV8-6, TRAJ49)
CAVITNTGNQFYF

SEQ ID NO: 740350 - protein, 12 aa, Homo sapiens
  CDR3 for beta chain variable domain of TCR clone 370175 (TRBV12-4, TRBJ2-7)
CASSLGGYERYF

SEQ ID NO: 740351 - protein, 23 aa, Homo sapiens
  CDR3 for alpha chain variable domain of TCR clone 370176 (TRAV8-3, )
CAVGASNAGINHIQNPDPAVYQL

SEQ ID NO: 740352 - protein, 15 aa, Homo sapiens
  CDR3 for beta chain variable domain of TCR clone 370176 (TRBV11-3, TRBJ1-3)
CASSLFGPSGNTIYF

SEQ ID NO: 740353 - protein, 14 aa, Homo sapiens
  CDR3 for alpha chain variable domain of TCR clone 370177 (TRAV9-2, TRAJ39)
CALYIYNAGNMLTF

SEQ ID NO: 740354 - protein, 15 aa, Homo sapiens
  CDR3 for beta chain variable domain of TCR clone 370177 (TRBV7-6, TRBJ2-1)
CASSPGQGPYNEQFF

SEQ ID NO: 740355 - protein, 16 aa, Homo sapiens
  CDR3 for alpha chain variable domain of TCR clone 370178 (TRAV27, TRAJ13)
CAGAKSDSGGYQKVTF

SEQ ID NO: 740356 - protein, 12 aa, Homo sapiens
  CDR3 for beta chain variable domain of TCR clone 370178 (TRBV14, TRBJ2-4)
CASSNLKSIQYF

SEQ ID NO: 740357 - protein, 13 aa, Homo sapiens
  CDR3 for alpha chain variable domain of TCR clone 370179 (TRAV16, TRAJ9)
CALRATGGFKIIF

SEQ ID NO: 740358 - protein, 16 aa, Homo sapiens
  CDR3 for beta chain variable domain of TCR clone 370179 (TRBV5-1, TRBJ1-3)
CASSRSGEDSGNTIYF

SEQ ID NO: 740359 - protein, 16 aa, Homo sapiens
  CDR3 for alpha chain variable domain of TCR clone 370180 (TRAV27, TRAJ52)
CAGASAGGTSYGKLTF

SEQ ID NO: 740360 - protein, 12 aa, Homo sapiens
  CDR3 for beta chain variable domain of TCR clone 370180 (TRBV27, TRBJ2-1)
CASRGFYNEQFF

SEQ ID NO: 740361 - protein, 10 aa, Homo sapiens
  CDR3 for alpha chain variable domain of TCR clone 370181 (TRAV1-2, TRAJ31)
CVSEDARLMF

SEQ ID NO: 740362 - protein, 16 aa, Homo sapiens
  CDR3 for beta chain variable domain of TCR clone 370181 (TRBV11-2, TRBJ2-7)
CASSPTTGGVSYEQYF

SEQ ID NO: 740363 - protein, 14 aa, Homo sapiens
  CDR3 for alpha chain variable domain of TCR clone 370182 (TRAV26-2, TRAJ23)
CSRTLYNQGGKLIF

SEQ ID NO: 740364 - protein, 15 aa, Homo sapiens
  CDR3 for beta chain variable domain of TCR clone 370182 (TRBV20-1, TRBJ2-7)
CSARDRVYGMDEQYF

SEQ ID NO: 740365 - protein, 12 aa, Homo sapiens
  CDR3 for alpha chain variable domain of TCR clone 370183 (TRAV21, TRAJ13)
PGPSGGYQKVTF

SEQ ID NO: 740366 - protein, 13 aa, Homo sapiens
  CDR3 for beta chain variable domain of TCR clone 370183 (TRBV7-9, TRBJ1-2)
CASSLKQNYGYTI

SEQ ID NO: 740367 - protein, 13 aa, Homo sapiens
  CDR3 for alpha chain variable domain of TCR clone 370184 (TRAV1-2, TRAJ9)
CAALNTGGFKTIF

SEQ ID NO: 740368 - protein, 20 aa, Homo sapiens
  CDR3 for beta chain variable domain of TCR clone 370184 (TRBV28, TRBJ2-1)
CASTAIGRSPGLAGGNEQFF

SEQ ID NO: 740369 - protein, 11 aa, Homo sapiens
  CDR3 for alpha chain variable domain of TCR clone 370185 (TRAV29/DV5, TRAJ31)
CAASYRDRIMF

SEQ ID NO: 740370 - protein, 19 aa, Homo sapiens
  CDR3 for beta chain variable domain of TCR clone 370185 (TRBV19, TRBJ2-5)
CASSIGQVTGFFLGETQYF

SEQ ID NO: 740371 - protein, 12 aa, Homo sapiens
  CDR3 for alpha chain variable domain of TCR clone 370186 (TRAV12-2, TRAJ6)
CALSGGSYIPTF

SEQ ID NO: 740372 - protein, 14 aa, Homo sapiens
  CDR3 for beta chain variable domain of TCR clone 370186 (TRBV19, TRBJ2-1)
CASPTFVLSGEQFF

SEQ ID NO: 740373 - protein, 15 aa, Homo sapiens
  CDR3 for alpha chain variable domain of TCR clone 370187 (TRAV12-2, TRAJ43)
CAFDMRFGAGTRLTG

SEQ ID NO: 740374 - protein, 14 aa, Homo sapiens
  CDR3 for beta chain variable domain of TCR clone 370187 (TRBV7-2, TRBJ2-2)
CASSLGQNTGELFF

SEQ ID NO: 740375 - protein, 12 aa, Homo sapiens
  CDR3 for alpha chain variable domain of TCR clone 370188 (TRAV22, TRAJ43)
CAVELNNNDMRF

SEQ ID NO: 740376 - protein, 16 aa, Homo sapiens
  CDR3 for beta chain variable domain of TCR clone 370188 (TRBV10-3, TRBJ2-1)
CAISGVGDGGGGEQFF

SEQ ID NO: 740377 - protein, 12 aa, Homo sapiens
  CDR3 for alpha chain variable domain of TCR clone 370189 (TRAV1-1, TRAJ30)
CAVRGRDDKIIF

SEQ ID NO: 740378 - protein, 18 aa, Homo sapiens
  CDR3 for beta chain variable domain of TCR clone 370189 (TRBV12-4, TRBJ2-2)
CASSLVAGTRGRTGELFF

SEQ ID NO: 740379 - protein, 17 aa, Homo sapiens
  CDR3 for alpha chain variable domain of TCR clone 370190 (TRAV23/DV6, TRAJ57)
CAASSTLSQGGSEKLVF

SEQ ID NO: 740380 - protein, 15 aa, Homo sapiens
  CDR3 for beta chain variable domain of TCR clone 370190 (TRBV11-2, TRBJ2-1)
CTSSLGTSGLNEQFF

SEQ ID NO: 740381 - protein, 14 aa, Homo sapiens
  CDR3 for alpha chain variable domain of TCR clone 370191 (TRAV12-2, TRAJ13)
CAVKKTGGYQKVTF

SEQ ID NO: 740382 - protein, 14 aa, Homo sapiens
  CDR3 for beta chain variable domain of TCR clone 370191 (TRBV7-2, TRBJ1-2)
CASSSQGAHYGYTF

SEQ ID NO: 740383 - protein, 13 aa, Homo sapiens
  CDR3 for alpha chain variable domain of TCR clone 370192 (TRAV8-1, TRAJ15)
CAVKNQAGTALIF

SEQ ID NO: 740384 - protein, 15 aa, Homo sapiens
  CDR3 for beta chain variable domain of TCR clone 370192 (TRBV7-3, TRBJ2-7)
CASSLTPTEYDEQYF

SEQ ID NO: 740385 - protein, 16 aa, Homo sapiens
  CDR3 for alpha chain variable domain of TCR clone 370193 (TRAV30, TRAJ24)
CGTEIVDADSWGKFQF

SEQ ID NO: 740386 - protein, 17 aa, Homo sapiens
  CDR3 for beta chain variable domain of TCR clone 370193 (TRBV20-1, TRBJ2-1)
CSASDRRRASSYNEQFF

SEQ ID NO: 740387 - protein, 14 aa, Homo sapiens
  CDR3 for alpha chain variable domain of TCR clone 370194 (TRAV12-2, TRAJ17)
CAALFKAAGNKLTF

SEQ ID NO: 740388 - protein, 16 aa, Homo sapiens
  CDR3 for beta chain variable domain of TCR clone 370194 (TRBV20-1, TRBJ2-2)
CSAIASGIPGAGELFF

SEQ ID NO: 740389 - protein, 17 aa, Homo sapiens
  CDR3 for alpha chain variable domain of TCR clone 370195 (TRAV17, TRAJ28)
CATDPRRGGAGGYLLTF

SEQ ID NO: 740390 - protein, 16 aa, Homo sapiens
  CDR3 for beta chain variable domain of TCR clone 370195 (TRBV25-1, TRBJ1-1)
CASSGDRDRGRIEAFF

SEQ ID NO: 740391 - protein, 11 aa, Homo sapiens
  CDR3 for alpha chain variable domain of TCR clone 370196 (TRAV23/DV6, TRAJ48)
CAPRWGEKLTF

SEQ ID NO: 740392 - protein, 14 aa, Homo sapiens
  CDR3 for beta chain variable domain of TCR clone 370196 (TRBV29-1, TRBJ1-3)
CSFADRVVGNTIYF

SEQ ID NO: 740393 - protein, 15 aa, Homo sapiens
  CDR3 for alpha chain variable domain of TCR clone 370197 (TRAV12-1, TRAJ6)
CVVNCPLRRKLHTYI

SEQ ID NO: 740394 - protein, 15 aa, Homo sapiens
  CDR3 for beta chain variable domain of TCR clone 370197 (TRBV19, TRBJ2-1)
CASSIQATSYNEQFF

SEQ ID NO: 740395 - protein, 14 aa, Homo sapiens
  CDR3 for alpha chain variable domain of TCR clone 370198 (TRAV27, TRAJ22)
CAGVFPGSARQLTF

SEQ ID NO: 740396 - protein, 16 aa, Homo sapiens
  CDR3 for beta chain variable domain of TCR clone 370198 (TRBV9, TRBJ2-7)
CASSVGLGGGTYEQYF

SEQ ID NO: 740397 - protein, 15 aa, Homo sapiens
  CDR3 for alpha chain variable domain of TCR clone 370199 (TRAV12-1, TRAJ47)
CVVTNRLKGGNKLVF

SEQ ID NO: 740398 - protein, 19 aa, Homo sapiens
  CDR3 for beta chain variable domain of TCR clone 370199 (TRBV20-1, TRBJ2-5)
CSARSQGLAGTSKSGTQYF

SEQ ID NO: 740399 - protein, 11 aa, Homo sapiens
  CDR3 for alpha chain variable domain of TCR clone 370200 (TRAV2, TRAJ33)
CAVDSNYQLIW

SEQ ID NO: 740400 - protein, 14 aa, Homo sapiens
  CDR3 for beta chain variable domain of TCR clone 370200 (TRBV19, TRBJ2-2)
CASSGQGIAGELFF

SEQ ID NO: 740401 - protein, 13 aa, Homo sapiens
  CDR3 for alpha chain variable domain of TCR clone 370201 (TRAV1-2, TRAJ9)
CAALNTGGFKTIF

SEQ ID NO: 740402 - protein, 15 aa, Homo sapiens
  CDR3 for beta chain variable domain of TCR clone 370201 (TRBV24-1, TRBJ2-1)
CATSGSGGCYNEQFF

SEQ ID NO: 740403 - protein, 14 aa, Homo sapiens
  CDR3 for alpha chain variable domain of TCR clone 370202 (TRAV12-2, TRAJ13)
CAVKKTGGYQKVTF

SEQ ID NO: 740404 - protein, 21 aa, Homo sapiens
  CDR3 for beta chain variable domain of TCR clone 370202 (TRBV11-1, TRBJ2-1)
CASSARERLRPEGPSYNEQFF

SEQ ID NO: 740405 - protein, 16 aa, Homo sapiens
  CDR3 for alpha chain variable domain of TCR clone 370203 (TRAV12-1, TRAJ13)
CVVNLEVSGCYQKVTF

SEQ ID NO: 740406 - protein, 16 aa, Homo sapiens
  CDR3 for beta chain variable domain of TCR clone 370203 (TRBV24-1, TRBJ2-6)
CATSDRRASGANVLTF

SEQ ID NO: 740407 - protein, 11 aa, Homo sapiens
  CDR3 for alpha chain variable domain of TCR clone 370204 (TRAV35, TRAJ34)
CWARNTDKLIF

SEQ ID NO: 740408 - protein, 13 aa, Homo sapiens
  CDR3 for beta chain variable domain of TCR clone 370204 (TRBV12-5, TRBJ2-3)
CASGDRQSDTQYF

SEQ ID NO: 740409 - protein, 14 aa, Homo sapiens
  CDR3 for alpha chain variable domain of TCR clone 370205 (TRAV9-2, TRAJ39)
CALYIYNAGNMLTF

SEQ ID NO: 740410 - protein, 15 aa, Homo sapiens
  CDR3 for beta chain variable domain of TCR clone 370205 (TRBV27, TRBJ1-6)
CASSFDRELGSPLHF

SEQ ID NO: 740411 - protein, 14 aa, Homo sapiens
  CDR3 for alpha chain variable domain of TCR clone 370206 (TRAV23/DV6, TRAJ22)
CADISSGSARQLTF

SEQ ID NO: 740412 - protein, 16 aa, Homo sapiens
  CDR3 for beta chain variable domain of TCR clone 370206 (TRBV5-6, TRBJ2-5)
CASIRGQTGYQGTQYF

SEQ ID NO: 740413 - protein, 13 aa, Homo sapiens
  CDR3 for alpha chain variable domain of TCR clone 370207 (TRAV9-2, TRAJ53)
CALSGGSNYNLTF

SEQ ID NO: 740414 - protein, 15 aa, Homo sapiens
  CDR3 for beta chain variable domain of TCR clone 370207 (TRBV10-3, TRBJ2-3)
CAISVLGQETDTQYF

SEQ ID NO: 740415 - protein, 13 aa, Homo sapiens
  CDR3 for alpha chain variable domain of TCR clone 370208 (TRAV12-1, TRAJ13)
CVVALLGYQKVTF

SEQ ID NO: 740416 - protein, 17 aa, Homo sapiens
  CDR3 for beta chain variable domain of TCR clone 370208 (TRBV28, TRBJ2-5)
CASSFGGEWGGQETQYF

SEQ ID NO: 740417 - protein, 13 aa, Homo sapiens
  CDR3 for alpha chain variable domain of TCR clone 370209 (TRAV14/DV4, TRAJ4)
CAMKAGGYTKLIF

SEQ ID NO: 740418 - protein, 15 aa, Homo sapiens
  CDR3 for beta chain variable domain of TCR clone 370209 (TRBV11-3, TRBJ1-1)
CASSLGGPGGTEAFF

SEQ ID NO: 740419 - protein, 14 aa, Homo sapiens
  CDR3 for alpha chain variable domain of TCR clone 370210 (TRAV12-1, TRAJ3)
CVVNPGSSASKIIF

SEQ ID NO: 740420 - protein, 18 aa, Homo sapiens
  CDR3 for beta chain variable domain of TCR clone 370210 (TRBV4-2, TRBJ1-2)
CASIQDKVGHTVNYGYTF

SEQ ID NO: 740421 - protein, 14 aa, Homo sapiens
  CDR3 for alpha chain variable domain of TCR clone 370211 (TRAV8-4, TRAJ8)
CAVSEDTGFQKLVF

SEQ ID NO: 740422 - protein, 14 aa, Homo sapiens
  CDR3 for beta chain variable domain of TCR clone 370211 (TRBV19, TRBJ2-1)
CASSRLASINEQFF

SEQ ID NO: 740423 - protein, 14 aa, Homo sapiens
  CDR3 for alpha chain variable domain of TCR clone 370212 (TRAV12-3, TRAJ10)
SHLPLTGGGNKLTF

SEQ ID NO: 740424 - protein, 15 aa, Homo sapiens
  CDR3 for beta chain variable domain of TCR clone 370212 (TRBV9, TRBJ1-6)
CARSVAGTGDSPLHF

SEQ ID NO: 740425 - protein, 14 aa, Homo sapiens
  CDR3 for alpha chain variable domain of TCR clone 370213 (TRAV1-2, TRAJ16)
CAVNRFSDGQKLLF

SEQ ID NO: 740426 - protein, 14 aa, Homo sapiens
  CDR3 for beta chain variable domain of TCR clone 370213 (TRBV11-2, TRBJ1-1)
CASSLRQGGGTLES

SEQ ID NO: 740427 - protein, 16 aa, Homo sapiens
  CDR3 for alpha chain variable domain of TCR clone 370214 (TRAV13-1, TRAJ48)
CSKYRESNFGNEKLTF

SEQ ID NO: 740428 - protein, 17 aa, Homo sapiens
  CDR3 for beta chain variable domain of TCR clone 370214 (TRBV28, TRBJ2-1)
CSSSSARQALTYNEQFF

SEQ ID NO: 740429 - protein, 14 aa, Homo sapiens
  CDR3 for alpha chain variable domain of TCR clone 370215 (TRAV13-1, TRAJ35)
CAASKGGFGNVLHC

SEQ ID NO: 740430 - protein, 14 aa, Homo sapiens
  CDR3 for beta chain variable domain of TCR clone 370215 (TRBV7-2, TRBJ2-7)
CAGSPKTSFYEQYF

SEQ ID NO: 740431 - protein, 12 aa, Homo sapiens
  CDR3 for alpha chain variable domain of TCR clone 370216 (TRAV26-2, TRAJ47)
CILVEYGNKLVF

SEQ ID NO: 740432 - protein, 16 aa, Homo sapiens
  CDR3 for beta chain variable domain of TCR clone 370216 (TRBV18, TRBJ1-4)
CAISPLVGDRAEKLFF

SEQ ID NO: 740433 - protein, 14 aa, Homo sapiens
  CDR3 for alpha chain variable domain of TCR clone 370217 (TRAV16, TRAJ33)
CALSAMDSNYQLIW

SEQ ID NO: 740434 - protein, 14 aa, Homo sapiens
  CDR3 for beta chain variable domain of TCR clone 370217 (TRBV25-1, TRBJ1-1)
CASTHLVGNTEAFF

SEQ ID NO: 740435 - protein, 14 aa, Homo sapiens
  CDR3 for alpha chain variable domain of TCR clone 370218 (TRAV9-2, TRAJ9)
CALSDRDGGFKTIF

SEQ ID NO: 740436 - protein, 13 aa, Homo sapiens
  CDR3 for beta chain variable domain of TCR clone 370218 (TRBV6-5, TRBJ2-7)
CASSYSAGYEQYF

SEQ ID NO: 740437 - protein, 13 aa, Homo sapiens
  CDR3 for alpha chain variable domain of TCR clone 370219 (TRAV36/DV7, TRAJ54)
CAVLIQGAQKLVF

SEQ ID NO: 740438 - protein, 13 aa, Homo sapiens
  CDR3 for beta chain variable domain of TCR clone 370219 (TRBV7-3, TRBJ2-1)
CASSLDSYNEQFF

SEQ ID NO: 740439 - protein, 14 aa, Homo sapiens
  CDR3 for alpha chain variable domain of TCR clone 370220 (TRAV8-1, TRAJ22)
CAAPSSGSARQLTF

SEQ ID NO: 740440 - protein, 13 aa, Homo sapiens
  CDR3 for beta chain variable domain of TCR clone 370220 (TRBV2, TRBJ1-4)
CASSERAGEKLFF

SEQ ID NO: 740441 - protein, 14 aa, Homo sapiens
  CDR3 for alpha chain variable domain of TCR clone 370221 (TRAV26-1, TRAJ44)
CIARTTGTASKLTF

SEQ ID NO: 740442 - protein, 12 aa, Homo sapiens
  CDR3 for beta chain variable domain of TCR clone 370221 (TRBV11-2, TRBJ2-1)
CPSSPGNNEQFF

SEQ ID NO: 740443 - protein, 16 aa, Homo sapiens
  CDR3 for alpha chain variable domain of TCR clone 370222 (TRAV8-2, TRAJ45)
CVVSEGTAGGADGLTF

SEQ ID NO: 740444 - protein, 15 aa, Homo sapiens
  CDR3 for beta chain variable domain of TCR clone 370222 (TRBV7-9, TRBJ2-5)
CASSLVAGGLETQYF

SEQ ID NO: 740445 - protein, 16 aa, Homo sapiens
  CDR3 for alpha chain variable domain of TCR clone 370223 (TRAV14/DV4, TRAJ54)
CAMREGRIQGAQKLVF

SEQ ID NO: 740446 - protein, 15 aa, Homo sapiens
  CDR3 for beta chain variable domain of TCR clone 370223 (TRBV9, TRBJ1-4)
CASSVGGSTNEKLFF

SEQ ID NO: 740447 - protein, 14 aa, Homo sapiens
  CDR3 for alpha chain variable domain of TCR clone 370224 (TRAV9-2, TRAJ39)
CALYIYNAGNMLTF

SEQ ID NO: 740448 - protein, 15 aa, Homo sapiens
  CDR3 for beta chain variable domain of TCR clone 370224 (TRBV3-1, TRBJ2-7)
CASSQGVGVKVEQYF

SEQ ID NO: 740449 - protein, 14 aa, Homo sapiens
  CDR3 for alpha chain variable domain of TCR clone 370225 (TRAV2, TRAJ9)
CAVVDRSGGFKTIF

SEQ ID NO: 740450 - protein, 17 aa, Homo sapiens
  CDR3 for beta chain variable domain of TCR clone 370225 (TRBV4-1, TRBJ2-7)
CASSRDPLGVRGGEQYF

SEQ ID NO: 740451 - protein, 15 aa, Homo sapiens
  CDR3 for alpha chain variable domain of TCR clone 370226 (TRAV12-2, TRAJ53)
CAVNEGGGSNYKLTF

SEQ ID NO: 740452 - protein, 14 aa, Homo sapiens
  CDR3 for beta chain variable domain of TCR clone 370226 (TRBV19, TRBJ2-2)
CASSTLNRSGELFF

SEQ ID NO: 740453 - protein, 12 aa, Homo sapiens
  CDR3 for alpha chain variable domain of TCR clone 370227 (TRAV2, TRAJ31)
CAVEDNNARHMF

SEQ ID NO: 740454 - protein, 16 aa, Homo sapiens
  CDR3 for beta chain variable domain of TCR clone 370227 (TRBV10-3, TRBJ2-1)
CAISGVGDGGGGEQFF

SEQ ID NO: 740455 - protein, 14 aa, Homo sapiens
  CDR3 for alpha chain variable domain of TCR clone 370228 (TRAV12-2, TRAJ5)
CAVNRSTGRRALTC

SEQ ID NO: 740456 - protein, 12 aa, Homo sapiens
  CDR3 for beta chain variable domain of TCR clone 370228 (TRBV19, TRBJ1-5)
CASSIAHQPQHF

SEQ ID NO: 740457 - protein, 12 aa, Homo sapiens
  CDR3 for alpha chain variable domain of TCR clone 370229 (TRAV29/DV5, TRAJ43)
CAAPYNNNDMRL

SEQ ID NO: 740458 - protein, 17 aa, Homo sapiens
  CDR3 for beta chain variable domain of TCR clone 370229 (TRBV19, TRBJ2-6)
CASSTGQVFSGANVLTF

SEQ ID NO: 740459 - protein, 14 aa, Homo sapiens
  CDR3 for alpha chain variable domain of TCR clone 370230 (TRAV23/DV6, TRAJ4)
RAANLSGGYNKLIF

SEQ ID NO: 740460 - protein, 11 aa, Homo sapiens
  CDR3 for beta chain variable domain of TCR clone 370230 (TRBV7-9, TRBJ2-3)
CASSPSDTQYF

SEQ ID NO: 740461 - protein, 15 aa, Homo sapiens
  CDR3 for alpha chain variable domain of TCR clone 370231 (TRAV8-2, TRAJ16)
CVVSDGFSDGQKLLF

SEQ ID NO: 740462 - protein, 13 aa, Homo sapiens
  CDR3 for beta chain variable domain of TCR clone 370231 (TRBV20-1, TRBJ1-1)
CSAPLGGGTEAFF

SEQ ID NO: 740463 - protein, 12 aa, Homo sapiens
  CDR3 for alpha chain variable domain of TCR clone 370232 (TRAV2, TRAJ26)
CAGSPGRLWSEF

SEQ ID NO: 740464 - protein, 17 aa, Homo sapiens
  CDR3 for beta chain variable domain of TCR clone 370232 (TRBV7-3, TRBJ2-3)
RASSLMKRMRGADTQYF

SEQ ID NO: 740465 - protein, 14 aa, Homo sapiens
  CDR3 for alpha chain variable domain of TCR clone 370233 (TRAV8-3, TRAJ3)
CAVVPRSSASKIIF

SEQ ID NO: 740466 - protein, 16 aa, Homo sapiens
  CDR3 for beta chain variable domain of TCR clone 370233 (TRBV4-1, TRBJ2-3)
CASRQLASGGGGYAVF

SEQ ID NO: 740467 - protein, 14 aa, Homo sapiens
  CDR3 for alpha chain variable domain of TCR clone 370234 (TRAV26-1, TRAJ38)
CIAANAGNNRKLIW

SEQ ID NO: 740468 - protein, 13 aa, Homo sapiens
  CDR3 for beta chain variable domain of TCR clone 370234 (TRBV15, TRBJ1-6)
CATSGGLKSPLHV

SEQ ID NO: 740469 - protein, 21 aa, Homo sapiens
  CDR3 for alpha chain variable domain of TCR clone 370235 (TRAV12-2, TRAJ10)
CAVRGLPGRRKQTHLWDRHSA

SEQ ID NO: 740470 - protein, 14 aa, Homo sapiens
  CDR3 for beta chain variable domain of TCR clone 370235 (TRBV19, TRBJ2-1)
CASPTFVLSGEQFF

SEQ ID NO: 740471 - protein, 13 aa, Homo sapiens
  CDR3 for alpha chain variable domain of TCR clone 370236 (TRAV13-2, TRAJ13)
CAERPGGYQKVTF

SEQ ID NO: 740472 - protein, 11 aa, Homo sapiens
  CDR3 for beta chain variable domain of TCR clone 370236 (TRBV29-1, TRBJ2-5)
CSEDRTGTQYF

SEQ ID NO: 740473 - protein, 12 aa, Homo sapiens
  CDR3 for alpha chain variable domain of TCR clone 370237 (TRAV3, TRAJ43)
CAVRDPNNDMRF

SEQ ID NO: 740474 - protein, 15 aa, Homo sapiens
  CDR3 for beta chain variable domain of TCR clone 370237 (TRBV6-5, TRBJ2-1)
CASSYDPGAGNEQFF

SEQ ID NO: 740475 - protein, 12 aa, Homo sapiens
  CDR3 for alpha chain variable domain of TCR clone 370238 (TRAV17, TRAJ36)
CATLTGANNLFF

SEQ ID NO: 740476 - protein, 15 aa, Homo sapiens
  CDR3 for beta chain variable domain of TCR clone 370238 (TRBV19, TRBJ1-2)
CASSTRTDTNYGYTF

SEQ ID NO: 740477 - protein, 13 aa, Homo sapiens
  CDR3 for alpha chain variable domain of TCR clone 370239 (TRAV1-2, TRAJ9)
CAALNTGGLKTIF

SEQ ID NO: 740478 - protein, 16 aa, Homo sapiens
  CDR3 for beta chain variable domain of TCR clone 370239 (TRBV6-1, TRBJ2-5)
CASSETLDRGAETQYF

SEQ ID NO: 740479 - protein, 13 aa, Homo sapiens
  CDR3 for alpha chain variable domain of TCR clone 370240 (TRAV26-1, TRAJ30)
CIVRVESNDKIIF

SEQ ID NO: 740480 - protein, 15 aa, Homo sapiens
  CDR3 for beta chain variable domain of TCR clone 370240 (TRBV6-1, TRBJ2-3)
FASSERGGITDTQYF

SEQ ID NO: 740481 - protein, 16 aa, Homo sapiens
  CDR3 for alpha chain variable domain of TCR clone 370241 (TRAV30, TRAJ24)
CGTEIVDVDSWGKFQF

SEQ ID NO: 740482 - protein, 14 aa, Homo sapiens
  CDR3 for beta chain variable domain of TCR clone 370241 (TRBV12-5, TRBJ2-5)
CASGSWTHQETQYF

SEQ ID NO: 740483 - protein, 16 aa, Homo sapiens
  CDR3 for alpha chain variable domain of TCR clone 370242 (TRAV16, TRAJ42)
CALSGYYGGSQGNLIF

SEQ ID NO: 740484 - protein, 15 aa, Homo sapiens
  CDR3 for beta chain variable domain of TCR clone 370242 (TRBV11-3, TRBJ2-3)
CASLKDGREGDTQYF

SEQ ID NO: 740485 - protein, 11 aa, Homo sapiens
  CDR3 for alpha chain variable domain of TCR clone 370243 (TRAV17, TRAJ9)
CGFTGGFKTIF

SEQ ID NO: 740486 - protein, 13 aa, Homo sapiens
  CDR3 for beta chain variable domain of TCR clone 370243 (TRBV19, TRBJ2-1)
CATSRGVYNEQFF

SEQ ID NO: 740487 - protein, 12 aa, Homo sapiens
  CDR3 for alpha chain variable domain of TCR clone 370244 (TRAV13-1, TRAJ21)
CAAKEGFNKFYS

SEQ ID NO: 740488 - protein, 20 aa, Homo sapiens
  CDR3 for beta chain variable domain of TCR clone 370244 (TRBV7-8, TRBJ2-2)
CASSHLFPGPTIHITGELFF

SEQ ID NO: 740489 - protein, 13 aa, Homo sapiens
  CDR3 for alpha chain variable domain of TCR clone 370245 (TRAV26-1, TRAJ36)
CITVRRGANNLFF

SEQ ID NO: 740490 - protein, 19 aa, Homo sapiens
  CDR3 for beta chain variable domain of TCR clone 370245 (TRBV27, TRBJ2-1)
CASSLEILSPGAAGNEQFF

SEQ ID NO: 740491 - protein, 16 aa, Homo sapiens
  CDR3 for alpha chain variable domain of TCR clone 370246 (TRAV30, TRAJ24)
CGTEIVDADSWGRFQF

SEQ ID NO: 740492 - protein, 13 aa, Homo sapiens
  CDR3 for beta chain variable domain of TCR clone 370246 (TRBV10-3, TRBJ1-2)
CAISERDSYGYTF

SEQ ID NO: 740493 - protein, 11 aa, Homo sapiens
  CDR3 for alpha chain variable domain of TCR clone 370247 (TRAV12-2, TRAJ21)
CAVEGLNKFYF

SEQ ID NO: 740494 - protein, 15 aa, Homo sapiens
  CDR3 for beta chain variable domain of TCR clone 370247 (TRBV20-1, TRBJ1-5)
CSASRRGDLGQPQHF

SEQ ID NO: 740495 - protein, 20 aa, Homo sapiens
  CDR3 for alpha chain variable domain of TCR clone 370248 (TRAV1-1, TRAJ4)
CLLLLRCEGFLSGGYNKLIF

SEQ ID NO: 740496 - protein, 16 aa, Homo sapiens
  CDR3 for beta chain variable domain of TCR clone 370248 (TRBV28, TRBJ1-4)
CANSPPYRGRSEKLFF

SEQ ID NO: 740497 - protein, 11 aa, Homo sapiens
  CDR3 for alpha chain variable domain of TCR clone 370249 (TRAV17, TRAJ39)
CATNPYNMLTF

SEQ ID NO: 740498 - protein, 13 aa, Homo sapiens
  CDR3 for beta chain variable domain of TCR clone 370249 (TRBV7-8, TRBJ2-1)
CASTRDAVDQQFF

SEQ ID NO: 740499 - protein, 20 aa, Homo sapiens
  CDR3 for alpha chain variable domain of TCR clone 370250 (TRAV14/DV4, TRAJ22)
CAMREGPFSLSSGSARQLTF

SEQ ID NO: 740500 - protein, 13 aa, Homo sapiens
  CDR3 for beta chain variable domain of TCR clone 370250 (TRBV4-2, TRBJ2-3)
CASSQDWQHTQYF

SEQ ID NO: 740501 - protein, 14 aa, Homo sapiens
  CDR3 for alpha chain variable domain of TCR clone 370251 (TRAV13-1, TRAJ10)
CAAKEPGGGNKLTF

SEQ ID NO: 740502 - protein, 14 aa, Homo sapiens
  CDR3 for beta chain variable domain of TCR clone 370251 (TRBV20-1, TRBJ1-1)
CSAQTRIGGTEALF

SEQ ID NO: 740503 - protein, 13 aa, Homo sapiens
  CDR3 for alpha chain variable domain of TCR clone 370252 (TRAV36/DV7, TRAJ54)
CAVLIQGAQKLVF

SEQ ID NO: 740504 - protein, 13 aa, Homo sapiens
  CDR3 for beta chain variable domain of TCR clone 370252 (TRBV29-1, TRBJ2-4)
CSVGEGTENIQYF

SEQ ID NO: 740505 - protein, 12 aa, Homo sapiens
  CDR3 for alpha chain variable domain of TCR clone 370253 (TRAV8-3, TRAJ26)
CAGDNYGQNFVF

SEQ ID NO: 740506 - protein, 16 aa, Homo sapiens
  CDR3 for beta chain variable domain of TCR clone 370253 (TRBV25-1, TRBJ2-7)
CASSELTGGGIYEQYF

SEQ ID NO: 740507 - protein, 11 aa, Homo sapiens
  CDR3 for alpha chain variable domain of TCR clone 370254 (TRAV21, TRAJ11)
CAVNGYSTLTF

SEQ ID NO: 740508 - protein, 16 aa, Homo sapiens
  CDR3 for beta chain variable domain of TCR clone 370254 (TRBV4-3, TRBJ2-2)
CASSRRQGSGTGELFF

SEQ ID NO: 740509 - protein, 18 aa, Homo sapiens
  CDR3 for alpha chain variable domain of TCR clone 370255 (TRAV2, TRAJ32)
CCLLLCLHYGGATNKLIF

SEQ ID NO: 740510 - protein, 16 aa, Homo sapiens
  CDR3 for beta chain variable domain of TCR clone 370255 (TRBV7-9, TRBJ2-7)
CASSYPDREGGYEQYV

SEQ ID NO: 740511 - protein, 14 aa, Homo sapiens
  CDR3 for alpha chain variable domain of TCR clone 370256 (TRAV26-1, TRAJ38)
CISDNAGNNRKLIW

SEQ ID NO: 740512 - protein, 17 aa, Homo sapiens
  CDR3 for beta chain variable domain of TCR clone 370256 (TRBV15, TRBJ1-1)
CATSRVGGAEGDTEAFF

SEQ ID NO: 740513 - protein, 16 aa, Homo sapiens
  CDR3 for alpha chain variable domain of TCR clone 370257 (TRAV27, TRAJ53)
CAAPEGSGGSNYKLTF

SEQ ID NO: 740514 - protein, 17 aa, Homo sapiens
  CDR3 for beta chain variable domain of TCR clone 370257 (TRBV20-1, TRBJ1-1)
CSASRGVRGTLKLSLDK

SEQ ID NO: 740515 - protein, 20 aa, Homo sapiens
  CDR3 for alpha chain variable domain of TCR clone 370258 (TRAV12-3, TRAJ41)
SLFIRDSQPSDSATPEALNF

SEQ ID NO: 740516 - protein, 12 aa, Homo sapiens
  CDR3 for beta chain variable domain of TCR clone 370258 (TRBV28, TRBJ2-3)
CASSLYRDTQYF

SEQ ID NO: 740517 - protein, 15 aa, Homo sapiens
  CDR3 for alpha chain variable domain of TCR clone 370259 (TRAV13-1, TRAJ43)
CAATPELGGNNGMRF

SEQ ID NO: 740518 - protein, 13 aa, Homo sapiens
  CDR3 for beta chain variable domain of TCR clone 370259 (TRBV4-2, TRBJ1-1)
CASSQAGNTEAFF

SEQ ID NO: 740519 - protein, 14 aa, Homo sapiens
  CDR3 for alpha chain variable domain of TCR clone 370260 (TRAV12-2, TRAJ13)
CAVKKTGGYQKVTF

SEQ ID NO: 740520 - protein, 16 aa, Homo sapiens
  CDR3 for beta chain variable domain of TCR clone 370260 (TRBV18, TRBJ1-2)
CASSPPERVTIYGYTF

SEQ ID NO: 740521 - protein, 12 aa, Homo sapiens
  CDR3 for alpha chain variable domain of TCR clone 370261 (TRAV35, TRAJ31)
CAAASNNARLIF

SEQ ID NO: 740522 - protein, 14 aa, Homo sapiens
  CDR3 for beta chain variable domain of TCR clone 370261 (TRBV2, TRBJ2-2)
CASSLFGGNGELFF

SEQ ID NO: 740523 - protein, 13 aa, Homo sapiens
  CDR3 for alpha chain variable domain of TCR clone 370262 (TRAV2, TRAJ15)
CAVASQAGTALIP

SEQ ID NO: 740524 - protein, 17 aa, Homo sapiens
  CDR3 for beta chain variable domain of TCR clone 370262 (TRBV11-2, TRBJ2-1)
CASSLYPPGVEYNEQFF

SEQ ID NO: 740525 - protein, 15 aa, Homo sapiens
  CDR3 for alpha chain variable domain of TCR clone 370263 (TRAV26-1, TRAJ40)
FIVRVTTPGTYKYIF

SEQ ID NO: 740526 - protein, 12 aa, Homo sapiens
  CDR3 for beta chain variable domain of TCR clone 370263 (TRBV7-9, TRBJ1-4)
CASSTDREKLFF

SEQ ID NO: 740527 - protein, 14 aa, Homo sapiens
  CDR3 for alpha chain variable domain of TCR clone 370264 (TRAV38-2/DV8, TRAJ47)
CAYRTLEYGNKLVF

SEQ ID NO: 740528 - protein, 16 aa, Homo sapiens
  CDR3 for beta chain variable domain of TCR clone 370264 (TRBV12-4, TRBJ2-5)
CASSFFVRGRQETQYF

SEQ ID NO: 740529 - protein, 16 aa, Homo sapiens
  CDR3 for alpha chain variable domain of TCR clone 370265 (TRAV26-2, TRAJ48)
CILRPPFNFGNEKLTF

SEQ ID NO: 740530 - protein, 15 aa, Homo sapiens
  CDR3 for beta chain variable domain of TCR clone 370265 (TRBV20-1, TRBJ2-3)
CSARVEGPYTDTQYF

SEQ ID NO: 740531 - protein, 15 aa, Homo sapiens
  CDR3 for alpha chain variable domain of TCR clone 370266 (TRAV23/DV6, TRAJ18)
CAARYRGSTLGRLYF

SEQ ID NO: 740532 - protein, 12 aa, Homo sapiens
  CDR3 for beta chain variable domain of TCR clone 370266 (TRBV19, TRBJ1-5)
CASSIAQQPQHF

SEQ ID NO: 740533 - protein, 18 aa, Homo sapiens
  CDR3 for alpha chain variable domain of TCR clone 370267 (TRAV9-2, TRAJ52)
CALSRHNAGGTSYGKLTF

SEQ ID NO: 740534 - protein, 13 aa, Homo sapiens
  CDR3 for beta chain variable domain of TCR clone 370267 (TRBV7-9, TRBJ1-2)
CASSLRQNYGYTF

SEQ ID NO: 740535 - protein, 15 aa, Homo sapiens
  CDR3 for alpha chain variable domain of TCR clone 370268 (TRAV12-2, TRAJ43)
CAFDMRFGAGTRLTG

SEQ ID NO: 740536 - protein, 18 aa, Homo sapiens
  CDR3 for beta chain variable domain of TCR clone 370268 (TRBV20-1, TRBJ2-3)
RSASGLAGGPGTTDTQYF

SEQ ID NO: 740537 - protein, 11 aa, Homo sapiens
  CDR3 for alpha chain variable domain of TCR clone 370269 (TRAV2, TRAJ33)
CAVDSNYQLIW

SEQ ID NO: 740538 - protein, 12 aa, Homo sapiens
  CDR3 for beta chain variable domain of TCR clone 370269 (TRBV19, TRBJ2-7)
CASTSGTYEQYF

SEQ ID NO: 740539 - protein, 12 aa, Homo sapiens
  CDR3 for alpha chain variable domain of TCR clone 370270 (TRAV13-2, TRAJ23)
CAERHRVGKLIF

SEQ ID NO: 740540 - protein, 13 aa, Homo sapiens
  CDR3 for beta chain variable domain of TCR clone 370270 (TRBV7-9, TRBJ2-3)
CASSPGSTDTQYF

SEQ ID NO: 740541 - protein, 12 aa, Homo sapiens
  CDR3 for alpha chain variable domain of TCR clone 370271 (TRAV36/DV7, TRAJ40)
CAVGTGTYKYIF

SEQ ID NO: 740542 - protein, 16 aa, Homo sapiens
  CDR3 for beta chain variable domain of TCR clone 370271 (TRBV6-6, TRBJ2-1)
CASSYSFSGSYNEQFF

SEQ ID NO: 740543 - protein, 15 aa, Homo sapiens
  CDR3 for alpha chain variable domain of TCR clone 370272 (TRAV10, TRAJ6)
CVVSGGSGGSYIPTF

SEQ ID NO: 740544 - protein, 15 aa, Homo sapiens
  CDR3 for beta chain variable domain of TCR clone 370272 (TRBV6-5, TRBJ2-1)
CASRGDVDSYNEQFF

SEQ ID NO: 740545 - protein, 13 aa, Homo sapiens
  CDR3 for alpha chain variable domain of TCR clone 370273 (TRAV13-1, TRAJ41)
CADAPNSGYALNF

SEQ ID NO: 740546 - protein, 13 aa, Homo sapiens
  CDR3 for beta chain variable domain of TCR clone 370273 (TRBV19, TRBJ2-7)
CASEGTTTYEHYF

SEQ ID NO: 740547 - protein, 15 aa, Homo sapiens
  CDR3 for alpha chain variable domain of TCR clone 370274 (TRAV13-2, TRAJ10)
CAENRDTGGGNKLTF

SEQ ID NO: 740548 - protein, 16 aa, Homo sapiens
  CDR3 for beta chain variable domain of TCR clone 370274 (TRBV12-5, TRBJ2-5)
CASGPRTSGNQETQYF

SEQ ID NO: 740549 - protein, 13 aa, Homo sapiens
  CDR3 for alpha chain variable domain of TCR clone 370275 (TRAV13-2, TRAJ53)
CAENMGGNYKLKF

SEQ ID NO: 740550 - protein, 13 aa, Homo sapiens
  CDR3 for beta chain variable domain of TCR clone 370275 (TRBV4-1, TRBJ2-2)
CASSQENTGELFF

SEQ ID NO: 740551 - protein, 15 aa, Homo sapiens
  CDR3 for alpha chain variable domain of TCR clone 370276 (TRAV3, TRAJ4)
CAVRDGTGGYNKLIF

SEQ ID NO: 740552 - protein, 14 aa, Homo sapiens
  CDR3 for beta chain variable domain of TCR clone 370276 (TRBV11-2, TRBJ2-7)
CASSPSTTSYEQYF

SEQ ID NO: 740553 - protein, 13 aa, Homo sapiens
  CDR3 for alpha chain variable domain of TCR clone 370277 (TRAV36/DV7, TRAJ49)
CAGDSNTGNQFYF

SEQ ID NO: 740554 - protein, 18 aa, Homo sapiens
  CDR3 for beta chain variable domain of TCR clone 370277 (TRBV20-1, TRBJ2-6)
CSARTLAGGPSGANVLTF

SEQ ID NO: 740555 - protein, 11 aa, Homo sapiens
  CDR3 for alpha chain variable domain of TCR clone 370278 (TRAV3, TRAJ21)
CAVGNFNKFYF

SEQ ID NO: 740556 - protein, 15 aa, Homo sapiens
  CDR3 for beta chain variable domain of TCR clone 370278 (TRBV7-9, TRBJ2-3)
CASSSLVSPADTQYF

SEQ ID NO: 740557 - protein, 16 aa, Homo sapiens
  CDR3 for alpha chain variable domain of TCR clone 370279 (TRAV3, TRAJ5)
CDVRNLMDTGRRALTF

SEQ ID NO: 740558 - protein, 16 aa, Homo sapiens
  CDR3 for beta chain variable domain of TCR clone 370279 (TRBV12-5, TRBJ2-5)
CASGPRTSGNQETQYF

SEQ ID NO: 740559 - protein, 14 aa, Homo sapiens
  CDR3 for alpha chain variable domain of TCR clone 370280 (TRAV2, TRAJ9)
CAVEDRSVGFKTIF

SEQ ID NO: 740560 - protein, 16 aa, Homo sapiens
  CDR3 for beta chain variable domain of TCR clone 370280 (TRBV15, TRBJ2-7)
CATSRDGGIPSYEQYF

SEQ ID NO: 740561 - protein, 14 aa, Homo sapiens
  CDR3 for alpha chain variable domain of TCR clone 370281 (TRAV3, TRAJ17)
CAVRDAAAGDQLTF

SEQ ID NO: 740562 - protein, 13 aa, Homo sapiens
  CDR3 for beta chain variable domain of TCR clone 370281 (TRBV2, TRBJ1-1)
CASSVSGYTEAFF

SEQ ID NO: 740563 - protein, 17 aa, Homo sapiens
  CDR3 for alpha chain variable domain of TCR clone 370282 (TRAV16, TRAJ58)
CITVLSNGETSGSRLTF

SEQ ID NO: 740564 - protein, 15 aa, Homo sapiens
  CDR3 for beta chain variable domain of TCR clone 370282 (TRBV4-1, TRBJ1-4)
CASSDTGGANERLFF

SEQ ID NO: 740565 - protein, 18 aa, Homo sapiens
  CDR3 for alpha chain variable domain of TCR clone 370283 (TRAV21, TRAJ52)
CAVRPSPAGGTSYGKLTF

SEQ ID NO: 740566 - protein, 15 aa, Homo sapiens
  CDR3 for beta chain variable domain of TCR clone 370283 (TRBV6-5, TRBJ2-5)
CASSPLAGGIETQYF

SEQ ID NO: 740567 - protein, 12 aa, Homo sapiens
  CDR3 for alpha chain variable domain of TCR clone 370284 (TRAV36/DV7, TRAJ40)
CAVGTGTYKYIF

SEQ ID NO: 740568 - protein, 14 aa, Homo sapiens
  CDR3 for beta chain variable domain of TCR clone 370284 (TRBV9, TRBJ2-2)
CASSVGQGAGELFF

SEQ ID NO: 740569 - protein, 12 aa, Homo sapiens
  CDR3 for alpha chain variable domain of TCR clone 370285 (TRAV13-1, TRAJ21)
CAAKEGFNKFYF

SEQ ID NO: 740570 - protein, 15 aa, Homo sapiens
  CDR3 for beta chain variable domain of TCR clone 370285 (TRBV5-1, TRBJ2-1)
CASSWGPGPGGEQFF

SEQ ID NO: 740571 - protein, 15 aa, Homo sapiens
  CDR3 for alpha chain variable domain of TCR clone 370286 (TRAV4, TRAJ39)
CLVGPNNNAGTMLTF

SEQ ID NO: 740572 - protein, 19 aa, Homo sapiens
  CDR3 for beta chain variable domain of TCR clone 370286 (TRBV14, TRBJ2-1)
CASSQDQLWEAPEYNEQFF

SEQ ID NO: 740573 - protein, 16 aa, Homo sapiens
  CDR3 for alpha chain variable domain of TCR clone 370287 (TRAV3, TRAJ10)
CAVRDMRAGGGNKLTF

SEQ ID NO: 740574 - protein, 14 aa, Homo sapiens
  CDR3 for beta chain variable domain of TCR clone 370287 (TRBV7-3, TRBJ2-2)
CASSSGGYTGELFF

SEQ ID NO: 740575 - protein, 15 aa, Homo sapiens
  CDR3 for alpha chain variable domain of TCR clone 370288 (TRAV16, TRAJ48)
CALFISNFGNEKLTF

SEQ ID NO: 740576 - protein, 15 aa, Homo sapiens
  CDR3 for beta chain variable domain of TCR clone 370288 (TRBV5-1, TRBJ2-3)
CASSSTSGSTDTQYF

SEQ ID NO: 740577 - protein, 15 aa, Homo sapiens
  CDR3 for alpha chain variable domain of TCR clone 370289 (TRAV34, TRAJ38)
CGADFTPGNNRKLIW

SEQ ID NO: 740578 - protein, 16 aa, Homo sapiens
  CDR3 for beta chain variable domain of TCR clone 370289 (TRBV28, TRBJ1-5)
CASSLTGQGWNQPQHF

SEQ ID NO: 740579 - protein, 11 aa, Homo sapiens
  CDR3 for alpha chain variable domain of TCR clone 370290 (TRAV4, TRAJ31)
CLVGLNARLMF

SEQ ID NO: 740580 - protein, 13 aa, Homo sapiens
  CDR3 for beta chain variable domain of TCR clone 370290 (TRBV19, TRBJ2-7)
CASSIRSSYEQYF

SEQ ID NO: 740581 - protein, 14 aa, Homo sapiens
  CDR3 for alpha chain variable domain of TCR clone 370291 (TRAV17, TRAJ57)
CATDPQGGSEKLVF

SEQ ID NO: 740582 - protein, 16 aa, Homo sapiens
  CDR3 for beta chain variable domain of TCR clone 370291 (TRBV11-2, TRBJ1-1)
CASSLRQGGEHSKAFF

SEQ ID NO: 740583 - protein, 14 aa, Homo sapiens
  CDR3 for alpha chain variable domain of TCR clone 370292 (TRAV26-1, TRAJ38)
CIADNAGNNRKLLW

SEQ ID NO: 740584 - protein, 15 aa, Homo sapiens
  CDR3 for beta chain variable domain of TCR clone 370292 (TRBV27, TRBJ2-1)
CASSNGGGSSNEQFF

SEQ ID NO: 740585 - protein, 13 aa, Homo sapiens
  CDR3 for alpha chain variable domain of TCR clone 370293 (TRAV17, TRAJ9)
CATDYTGGFKTIF

SEQ ID NO: 740586 - protein, 16 aa, Homo sapiens
  CDR3 for beta chain variable domain of TCR clone 370293 (TRBV7-7, TRBJ2-1)
CASSLASGASYNEQLF

SEQ ID NO: 740587 - protein, 13 aa, Homo sapiens
  CDR3 for alpha chain variable domain of TCR clone 370294 (TRAV8-1, TRAJ30)
CAVIMNRDDEIIF

SEQ ID NO: 740588 - protein, 14 aa, Homo sapiens
  CDR3 for beta chain variable domain of TCR clone 370294 (TRBV7-2, TRBJ1-6)
CASSLQGANSPLNF

SEQ ID NO: 740589 - protein, 12 aa, Homo sapiens
  CDR3 for alpha chain variable domain of TCR clone 370295 (TRAV21, TRAJ31)
CAVWGNNARLMF

SEQ ID NO: 740590 - protein, 13 aa, Homo sapiens
  CDR3 for beta chain variable domain of TCR clone 370295 (TRBV19, TRBJ2-7)
CASSPRQSYEQYF

SEQ ID NO: 740591 - protein, 15 aa, Homo sapiens
  CDR3 for alpha chain variable domain of TCR clone 370296 (TRAV3, TRAJ4)
CAVRVGTGGYNKLIF

SEQ ID NO: 740592 - protein, 16 aa, Homo sapiens
  CDR3 for beta chain variable domain of TCR clone 370296 (TRBV27, TRBJ2-2)
CASSSSGVSNTGELFF

SEQ ID NO: 740593 - protein, 12 aa, Homo sapiens
  CDR3 for alpha chain variable domain of TCR clone 370297 (TRAV12-3, TRAJ40)
CAMSSGTYKYIF

SEQ ID NO: 740594 - protein, 20 aa, Homo sapiens
  CDR3 for beta chain variable domain of TCR clone 370297 (TRBV7-8, TRBJ2-2)
CAGSHLFPGPTIHITGELFF

SEQ ID NO: 740595 - protein, 15 aa, Homo sapiens
  CDR3 for alpha chain variable domain of TCR clone 370298 (TRAV12-1, TRAJ42)
CVVTRYGGSQGNLIF

SEQ ID NO: 740596 - protein, 14 aa, Homo sapiens
  CDR3 for beta chain variable domain of TCR clone 370298 (TRBV11-2, TRBJ2-3)
CASSLGGGANTQYF

SEQ ID NO: 740597 - protein, 13 aa, Homo sapiens
  CDR3 for alpha chain variable domain of TCR clone 370299 (TRAV16, TRAJ9)
CALRATGGFKNIF

SEQ ID NO: 740598 - protein, 16 aa, Homo sapiens
  CDR3 for beta chain variable domain of TCR clone 370299 (TRBV5-1, TRBJ1-3)
CASSRSGEDSGNTIYF

SEQ ID NO: 740599 - protein, 11 aa, Homo sapiens
  CDR3 for alpha chain variable domain of TCR clone 370300 (TRAV3, TRAJ21)
CAVGNFNKFYF

SEQ ID NO: 740600 - protein, 13 aa, Homo sapiens
  CDR3 for beta chain variable domain of TCR clone 370300 (TRBV7-9, TRBJ1-2)
CDSSLKQNYGYTF

SEQ ID NO: 740601 - protein, 11 aa, Homo sapiens
  CDR3 for alpha chain variable domain of TCR clone 370301 (TRAV2, TRAJ40)
CAVEDPGNLQI

SEQ ID NO: 740602 - protein, 13 aa, Homo sapiens
  CDR3 for beta chain variable domain of TCR clone 370301 (TRBV12-5, TRBJ2-3)
CASGDRQSDTQYF

SEQ ID NO: 740603 - protein, 14 aa, Homo sapiens
  CDR3 for alpha chain variable domain of TCR clone 370302 (TRAV17, TRAJ31)
CATVLRNNNARLMF

SEQ ID NO: 740604 - protein, 13 aa, Homo sapiens
  CDR3 for beta chain variable domain of TCR clone 370302 (TRBV18, TRBJ2-7)
CASSPGQDYEQYF

SEQ ID NO: 740605 - protein, 12 aa, Homo sapiens
  CDR3 for alpha chain variable domain of TCR clone 370303 (TRAV8-3, TRAJ20)
FAVGASDYKLSF

SEQ ID NO: 740606 - protein, 16 aa, Homo sapiens
  CDR3 for beta chain variable domain of TCR clone 370303 (TRBV19, TRBJ2-2)
CASRSPGTGATGELFF

SEQ ID NO: 740607 - protein, 17 aa, Homo sapiens
  CDR3 for alpha chain variable domain of TCR clone 370304 (TRAV3, TRAJ42)
CAVRDRNYGGSQGNLIF

SEQ ID NO: 740608 - protein, 16 aa, Homo sapiens
  CDR3 for beta chain variable domain of TCR clone 370304 (TRBV20-1, TRBJ1-4)
CSAPGQGLLTNEKLFF

SEQ ID NO: 740609 - protein, 13 aa, Homo sapiens
  CDR3 for alpha chain variable domain of TCR clone 370305 (TRAV35, TRAJ57)
CAGSQVGSEKLVF

SEQ ID NO: 740610 - protein, 14 aa, Homo sapiens
  CDR3 for beta chain variable domain of TCR clone 370305 (TRBV25-1, TRBJ1-1)
CASTHLGGNTEAFF

SEQ ID NO: 740611 - protein, 11 aa, Homo sapiens
  CDR3 for alpha chain variable domain of TCR clone 370306 (TRAV2, TRAJ33)
CAVESNYQLIW

SEQ ID NO: 740612 - protein, 14 aa, Homo sapiens
  CDR3 for beta chain variable domain of TCR clone 370306 (TRBV2, TRBJ2-1)
CASSEALIYNEQFF

SEQ ID NO: 740613 - protein, 14 aa, Homo sapiens
  CDR3 for alpha chain variable domain of TCR clone 370307 (TRAV1-1, TRAJ23)
CAVSIYNQGRKLIF

SEQ ID NO: 740614 - protein, 15 aa, Homo sapiens
  CDR3 for beta chain variable domain of TCR clone 370307 (TRBV5-8, TRBJ2-2)
CASSLDRGATGELFF

SEQ ID NO: 740615 - protein, 16 aa, Homo sapiens
  CDR3 for alpha chain variable domain of TCR clone 370308 (TRAV30, TRAJ24)
CGTEIVDVESWGKFQF

SEQ ID NO: 740616 - protein, 14 aa, Homo sapiens
  CDR3 for beta chain variable domain of TCR clone 370308 (TRBV12-5, TRBJ2-5)
CASGSRTHQETQYF

SEQ ID NO: 740617 - protein, 23 aa, Homo sapiens
  CDR3 for alpha chain variable domain of TCR clone 370309 (TRAV26-1, TRAJ38)
CIADNAGNNHIQNPAPAVYQLRD

SEQ ID NO: 740618 - protein, 17 aa, Homo sapiens
  CDR3 for beta chain variable domain of TCR clone 370309 (TRBV11-2, TRBJ2-6)
CASSQRDIFSGANVLTF

SEQ ID NO: 740619 - protein, 13 aa, Homo sapiens
  CDR3 for alpha chain variable domain of TCR clone 370310 (TRAV21, TRAJ57)
CAVTQGGSEKLVF

SEQ ID NO: 740620 - protein, 16 aa, Homo sapiens
  CDR3 for beta chain variable domain of TCR clone 370310 (TRBV29-1, TRBJ2-7)
CSVVDAEDGTAYEQYF

SEQ ID NO: 740621 - protein, 23 aa, Homo sapiens
  CDR3 for alpha chain variable domain of TCR clone 370311 (TRAV30, TRAJ43)
CTLRPPSSVAQEPTSATLSDMRF

SEQ ID NO: 740622 - protein, 13 aa, Homo sapiens
  CDR3 for beta chain variable domain of TCR clone 370311 (TRBV12-4, TRBJ2-2)
CASSITGSGELFF

SEQ ID NO: 740623 - protein, 12 aa, Homo sapiens
  CDR3 for alpha chain variable domain of TCR clone 370312 (TRAV25, TRAJ11)
CAGYSGYSTLTV

SEQ ID NO: 740624 - protein, 18 aa, Homo sapiens
  CDR3 for beta chain variable domain of TCR clone 370312 (TRBV5-4, TRBJ2-3)
CASSPTAGFLPSTDTQYF

SEQ ID NO: 740625 - protein, 15 aa, Homo sapiens
  CDR3 for alpha chain variable domain of TCR clone 370313 (TRAV17, TRAJ56)
CATDANTGAYSKLTF

SEQ ID NO: 740626 - protein, 14 aa, Homo sapiens
  CDR3 for beta chain variable domain of TCR clone 370313 (TRBV19, TRBJ1-5)
CASSLGTGGQPQHF

SEQ ID NO: 740627 - protein, 14 aa, Homo sapiens
  CDR3 for alpha chain variable domain of TCR clone 370314 (TRAV1-2, TRAJ8)
CAVREDTGFQKLVF

SEQ ID NO: 740628 - protein, 15 aa, Homo sapiens
  CDR3 for beta chain variable domain of TCR clone 370314 (TRBV27, TRBJ2-5)
CASSLIPSGGETQYF

SEQ ID NO: 740629 - protein, 13 aa, Homo sapiens
  CDR3 for alpha chain variable domain of TCR clone 370315 (TRAV17, TRAJ5)
CAPMDTGRRALTF

SEQ ID NO: 740630 - protein, 14 aa, Homo sapiens
  CDR3 for beta chain variable domain of TCR clone 370315 (TRBV7-2, TRBJ2-7)
CASRSQGAAYEQYF

SEQ ID NO: 740631 - protein, 15 aa, Homo sapiens
  CDR3 for alpha chain variable domain of TCR clone 370316 (TRAV3, TRAJ5)
CAVRDLYTGRRALTF

SEQ ID NO: 740632 - protein, 14 aa, Homo sapiens
  CDR3 for beta chain variable domain of TCR clone 370316 (TRBV7-3, TRBJ2-1)
CASSLTGGANEQFF

SEQ ID NO: 740633 - protein, 19 aa, Homo sapiens
  CDR3 for alpha chain variable domain of TCR clone 370317 (TRAV3, TRAJ37)
CAVRDIVGGYPINTGKLLF

SEQ ID NO: 740634 - protein, 14 aa, Homo sapiens
  CDR3 for beta chain variable domain of TCR clone 370317 (TRBV7-8, TRBJ2-3)
CASSLEAGTDTQYF

SEQ ID NO: 740635 - protein, 16 aa, Homo sapiens
  CDR3 for alpha chain variable domain of TCR clone 370318 (TRAV3, TRAJ10)
CAVRDMRAGGGNKLTF

SEQ ID NO: 740636 - protein, 15 aa, Homo sapiens
  CDR3 for beta chain variable domain of TCR clone 370318 (TRBV11-2, TRBJ2-2)
CASSPSGGGTGELFF

SEQ ID NO: 740637 - protein, 14 aa, Homo sapiens
  CDR3 for alpha chain variable domain of TCR clone 370319 (TRAV38-1, TRAJ43)
CAFMKHNNNNDMRF

SEQ ID NO: 740638 - protein, 14 aa, Homo sapiens
  CDR3 for beta chain variable domain of TCR clone 370319 (TRBV6-1, TRBJ1-3)
CASVQGGGGNTIYF

SEQ ID NO: 740639 - protein, 14 aa, Homo sapiens
  CDR3 for alpha chain variable domain of TCR clone 370320 (TRAV1-2, TRAJ16)
CAGNRFSDGQKLLF

SEQ ID NO: 740640 - protein, 13 aa, Homo sapiens
  CDR3 for beta chain variable domain of TCR clone 370320 (TRBV19, TRBJ1-2)
CASSVPGQDGYTF

SEQ ID NO: 740641 - protein, 15 aa, Homo sapiens
  CDR3 for alpha chain variable domain of TCR clone 370321 (TRAV21, TRAJ53)
CATLNSGGSNYKLTF

SEQ ID NO: 740642 - protein, 14 aa, Homo sapiens
  CDR3 for beta chain variable domain of TCR clone 370321 (TRBV7-2, TRBJ2-7)
SASRSQGAAYEQYF

SEQ ID NO: 740643 - protein, 14 aa, Homo sapiens
  CDR3 for alpha chain variable domain of TCR clone 370322 (TRAV8-6, TRAJ54)
CAVTEGRGAQKPVF

SEQ ID NO: 740644 - protein, 14 aa, Homo sapiens
  CDR3 for beta chain variable domain of TCR clone 370322 (TRBV27, TRBJ2-7)
CASSIGQGAQKQYF

SEQ ID NO: 740645 - protein, 13 aa, Homo sapiens
  CDR3 for alpha chain variable domain of TCR clone 370323 (TRAV38-1, TRAJ42)
CARWGGSQGNLIF

SEQ ID NO: 740646 - protein, 10 aa, Homo sapiens
  CDR3 for beta chain variable domain of TCR clone 370323 (TRBV2, TRBJ2-5)
CASSDATQYF

SEQ ID NO: 740647 - protein, 14 aa, Homo sapiens
  CDR3 for alpha chain variable domain of TCR clone 370324 (TRAV12-1, TRAJ23)
CVVMIYNQGGKIIF

SEQ ID NO: 740648 - protein, 23 aa, Homo sapiens
  CDR3 for beta chain variable domain of TCR clone 370324 (TRBV7-3, TRBJ1-6)
CASSLTSRDEASDPSSYNSPLHF

SEQ ID NO: 740649 - protein, 14 aa, Homo sapiens
  CDR3 for alpha chain variable domain of TCR clone 370325 (TRAV13-1, TRAJ5)
CAASPGSRRRALTF

SEQ ID NO: 740650 - protein, 15 aa, Homo sapiens
  CDR3 for beta chain variable domain of TCR clone 370325 (TRBV7-3, TRBJ2-1)
CASSPTGGGEVEQFF

SEQ ID NO: 740651 - protein, 13 aa, Homo sapiens
  CDR3 for alpha chain variable domain of TCR clone 370326 (TRAV21, TRAJ20)
CAVGLRVDYKLSF

SEQ ID NO: 740652 - protein, 14 aa, Homo sapiens
  CDR3 for beta chain variable domain of TCR clone 370326 (TRBV23-1, TRBJ2-5)
CASSFLRSQETQYF

SEQ ID NO: 740653 - protein, 15 aa, Homo sapiens
  CDR3 for alpha chain variable domain of TCR clone 370327 (TRAV26-2, TRAJ34)
DAAVYYCIFTDKLIF

SEQ ID NO: 740654 - protein, 17 aa, Homo sapiens
  CDR3 for beta chain variable domain of TCR clone 370327 (TRBV11-2, TRBJ2-1)
CASSLYPPGVEYNEQFF

SEQ ID NO: 740655 - protein, 15 aa, Homo sapiens
  CDR3 for alpha chain variable domain of TCR clone 370328 (TRAV26-1, TRAJ17)
CIVSSFKAAGNKLTF

SEQ ID NO: 740656 - protein, 15 aa, Homo sapiens
  CDR3 for beta chain variable domain of TCR clone 370328 (TRBV7-2, TRBJ2-1)
CASTHGTGIYNEQFF

SEQ ID NO: 740657 - protein, 13 aa, Homo sapiens
  CDR3 for alpha chain variable domain of TCR clone 370329 (TRAV8-6, TRAJ16)
CAVSRWVVQKLLF

SEQ ID NO: 740658 - protein, 15 aa, Homo sapiens
  CDR3 for beta chain variable domain of TCR clone 370329 (TRBV12-4, TRBJ2-1)
CASSLSTGVSNEQFF

SEQ ID NO: 740659 - protein, 15 aa, Homo sapiens
  CDR3 for alpha chain variable domain of TCR clone 370330 (TRAV12-1, TRAJ41)
CVVNSRTGSGYALNF

SEQ ID NO: 740660 - protein, 15 aa, Homo sapiens
  CDR3 for beta chain variable domain of TCR clone 370330 (TRBV9, TRBJ1-6)
CASSVAGTGDSPLHF

SEQ ID NO: 740661 - protein, 13 aa, Homo sapiens
  CDR3 for alpha chain variable domain of TCR clone 370331 (TRAV8-6, TRAJ49)
CAVITNTGNQFYF

SEQ ID NO: 740662 - protein, 15 aa, Homo sapiens
  CDR3 for beta chain variable domain of TCR clone 370331 (TRBV6-3, TRBJ2-7)
CDSSSPGTVVYEQYF

SEQ ID NO: 740663 - protein, 14 aa, Homo sapiens
  CDR3 for alpha chain variable domain of TCR clone 370332 (TRAV1-1, TRAJ30)
CAVGSLNRDDKIIF

SEQ ID NO: 740664 - protein, 15 aa, Homo sapiens
  CDR3 for beta chain variable domain of TCR clone 370332 (TRBV27, TRBJ1-4)
CASSAQQDLNEKLFF

SEQ ID NO: 740665 - protein, 12 aa, Homo sapiens
  CDR3 for alpha chain variable domain of TCR clone 370333 (TRAV16, TRAJ26)
CALSSYGQNFVF

SEQ ID NO: 740666 - protein, 13 aa, Homo sapiens
  CDR3 for beta chain variable domain of TCR clone 370333 (TRBV12-4, TRBJ1-1)
CASSPGTGFEAFF

SEQ ID NO: 740667 - protein, 16 aa, Homo sapiens
  CDR3 for alpha chain variable domain of TCR clone 370334 (TRAV12-3, TRAJ10)
CAMKNGITGGGNKLTF

SEQ ID NO: 740668 - protein, 12 aa, Homo sapiens
  CDR3 for beta chain variable domain of TCR clone 370334 (TRBV20-1, TRBJ2-7)
CSAITPTKEQYF

SEQ ID NO: 740669 - protein, 14 aa, Homo sapiens
  CDR3 for alpha chain variable domain of TCR clone 370335 (TRAV38-1, TRAJ45)
CAYYSGGGADGLTF

SEQ ID NO: 740670 - protein, 15 aa, Homo sapiens
  CDR3 for beta chain variable domain of TCR clone 370335 (TRBV5-7, TRBJ2-1)
CASSRRLAGDDEQFF

SEQ ID NO: 740671 - protein, 14 aa, Homo sapiens
  CDR3 for alpha chain variable domain of TCR clone 370336 (TRAV1-2, TRAJ16)
CAVNRFSYGQKLLF

SEQ ID NO: 740672 - protein, 14 aa, Homo sapiens
  CDR3 for beta chain variable domain of TCR clone 370336 (TRBV7-9, TRBJ2-2)
CASSLGHRTGELFF

SEQ ID NO: 740673 - protein, 15 aa, Homo sapiens
  CDR3 for alpha chain variable domain of TCR clone 370337 (TRAV13-2, TRAJ16)
CAENERFSDGQKLLF

SEQ ID NO: 740674 - protein, 14 aa, Homo sapiens
  CDR3 for beta chain variable domain of TCR clone 370337 (TRBV4-2, TRBJ1-5)
CASSRDRGNQPQHF

SEQ ID NO: 740675 - protein, 14 aa, Homo sapiens
  CDR3 for alpha chain variable domain of TCR clone 370338 (TRAV1-2, TRAJ16)
CAVNRFSDGQKLLF

SEQ ID NO: 740676 - protein, 13 aa, Homo sapiens
  CDR3 for beta chain variable domain of TCR clone 370338 (TRBV20-1, TRBJ2-1)
YSAHGSSYNEQFF

SEQ ID NO: 740677 - protein, 11 aa, Homo sapiens
  CDR3 for alpha chain variable domain of TCR clone 370339 (TRAV2, TRAJ33)
CAVESNYQLIW

SEQ ID NO: 740678 - protein, 17 aa, Homo sapiens
  CDR3 for beta chain variable domain of TCR clone 370339 (TRBV7-9, TRBJ2-3)
CASSPTVAGDLTDTQYF

SEQ ID NO: 740679 - protein, 12 aa, Homo sapiens
  CDR3 for alpha chain variable domain of TCR clone 370340 (TRAV1-1, TRAJ39)
CAVPVVGNMLTF

SEQ ID NO: 740680 - protein, 12 aa, Homo sapiens
  CDR3 for beta chain variable domain of TCR clone 370340 (TRBV20-1, TRBJ2-1)
CSASSAYNEQFF

SEQ ID NO: 740681 - protein, 14 aa, Homo sapiens
  CDR3 for alpha chain variable domain of TCR clone 370341 (TRAV17, TRAJ31)
CATVPLSGNARRMF

SEQ ID NO: 740682 - protein, 15 aa, Homo sapiens
  CDR3 for beta chain variable domain of TCR clone 370341 (TRBV15, TRBJ2-2)
CATSGTGGRVGELFF

SEQ ID NO: 740683 - protein, 14 aa, Homo sapiens
  CDR3 for alpha chain variable domain of TCR clone 370342 (TRAV1-2, TRAJ16)
CAINRFSDGQKLLF

SEQ ID NO: 740684 - protein, 15 aa, Homo sapiens
  CDR3 for beta chain variable domain of TCR clone 370342 (TRBV29-1, TRBJ2-7)
CSVEFFDRGSYEQYF

SEQ ID NO: 740685 - protein, 14 aa, Homo sapiens
  CDR3 for alpha chain variable domain of TCR clone 370343 (TRAV12-2, TRAJ13)
CAVKKTGGYQKVTF

SEQ ID NO: 740686 - protein, 15 aa, Homo sapiens
  CDR3 for beta chain variable domain of TCR clone 370343 (TRBV27, TRBJ1-6)
CASSFDRGLGSPLHF

SEQ ID NO: 740687 - protein, 13 aa, Homo sapiens
  CDR3 for alpha chain variable domain of TCR clone 370344 (TRAV2, TRAJ15)
CAVASQAGTALIF

SEQ ID NO: 740688 - protein, 17 aa, Homo sapiens
  CDR3 for beta chain variable domain of TCR clone 370344 (TRBV20-1, TRBJ2-2)
CSASGSGQGGLTGELLF

SEQ ID NO: 740689 - protein, 14 aa, Homo sapiens
  CDR3 for alpha chain variable domain of TCR clone 370345 (TRAV12-1, TRAJ9)
CVVNRRTGGFKTIF

SEQ ID NO: 740690 - protein, 16 aa, Homo sapiens
  CDR3 for beta chain variable domain of TCR clone 370345 (TRBV4-1, TRBJ2-3)
CASSQSTSGAEETQYF

SEQ ID NO: 740691 - protein, 15 aa, Homo sapiens
  CDR3 for alpha chain variable domain of TCR clone 370346 (TRAV35, TRAJ33)
CAGQPPRYSNYQLIW

SEQ ID NO: 740692 - protein, 16 aa, Homo sapiens
  CDR3 for beta chain variable domain of TCR clone 370346 (TRBV4-1, TRBJ2-7)
CASSQNDRDNSYEQYF

SEQ ID NO: 740693 - protein, 15 aa, Homo sapiens
  CDR3 for alpha chain variable domain of TCR clone 370347 (TRAV8-1, TRAJ6)
CSVNTPPGGSYIPTF

SEQ ID NO: 740694 - protein, 15 aa, Homo sapiens
  CDR3 for beta chain variable domain of TCR clone 370347 (TRBV11-2, TRBJ2-2)
CASSSDRVNAGELFF

SEQ ID NO: 740695 - protein, 14 aa, Homo sapiens
  CDR3 for alpha chain variable domain of TCR clone 370348 (TRAV12-3, TRAJ22)
CAMNLFGSARQLTF

SEQ ID NO: 740696 - protein, 11 aa, Homo sapiens
  CDR3 for beta chain variable domain of TCR clone 370348 (TRBV12-4, TRBJ2-2)
CASSSAGELFF

SEQ ID NO: 740697 - protein, 16 aa, Homo sapiens
  CDR3 for alpha chain variable domain of TCR clone 370349 (TRAV30, TRAJ24)
RGTEIVDADSWGKFQF

SEQ ID NO: 740698 - protein, 18 aa, Homo sapiens
  CDR3 for beta chain variable domain of TCR clone 370349 (TRBV11-2, TRBJ2-3)
CASSLGGASRGAPNTQYF

SEQ ID NO: 740699 - protein, 13 aa, Homo sapiens
  CDR3 for alpha chain variable domain of TCR clone 370350 (TRAV8-3, TRAJ48)
CAVVPFGNEKLIF

SEQ ID NO: 740700 - protein, 14 aa, Homo sapiens
  CDR3 for beta chain variable domain of TCR clone 370350 (TRBV18, TRBJ2-7)
CASSPRGGAYEQYF

SEQ ID NO: 740701 - protein, 13 aa, Homo sapiens
  CDR3 for alpha chain variable domain of TCR clone 370351 (TRAV12-2, TRAJ12)
CAGPEDSSYKWIF

SEQ ID NO: 740702 - protein, 13 aa, Homo sapiens
  CDR3 for beta chain variable domain of TCR clone 370351 (TRBV28, TRBJ2-1)
CASSLIGRDEQFF

SEQ ID NO: 740703 - protein, 14 aa, Homo sapiens
  CDR3 for alpha chain variable domain of TCR clone 370352 (TRAV29/DV5, TRAJ32)
CAAAYGGATNKLIF

SEQ ID NO: 740704 - protein, 14 aa, Homo sapiens
  CDR3 for beta chain variable domain of TCR clone 370352 (TRBV18, TRBJ2-5)
CASSPGVSQETQYF

SEQ ID NO: 740705 - protein, 15 aa, Homo sapiens
  CDR3 for alpha chain variable domain of TCR clone 370353 (TRAV29/DV5, TRAJ29)
CAASERSSGNTLLVF

SEQ ID NO: 740706 - protein, 17 aa, Homo sapiens
  CDR3 for beta chain variable domain of TCR clone 370353 (TRBV4-1, TRBJ1-4)
CASSQEGPRGVEEKLFF

SEQ ID NO: 740707 - protein, 11 aa, Homo sapiens
  CDR3 for alpha chain variable domain of TCR clone 370354 (TRAV9-2, TRAJ13)
CAQGVYQKVTF

SEQ ID NO: 740708 - protein, 13 aa, Homo sapiens
  CDR3 for beta chain variable domain of TCR clone 370354 (TRBV5-1, TRBJ1-2)
CASSSTGVYGYTF

SEQ ID NO: 740709 - protein, 18 aa, Homo sapiens
  CDR3 for alpha chain variable domain of TCR clone 370355 (TRAV21, TRAJ53)
RAVKGGENSGGSNYKLTF

SEQ ID NO: 740710 - protein, 14 aa, Homo sapiens
  CDR3 for beta chain variable domain of TCR clone 370355 (TRBV6-1, TRBJ1-5)
CASSAGAGSQPQHF

SEQ ID NO: 740711 - protein, 13 aa, Homo sapiens
  CDR3 for alpha chain variable domain of TCR clone 370356 (TRAV8-6, TRAJ49)
CAVIANTGNQFYF

SEQ ID NO: 740712 - protein, 16 aa, Homo sapiens
  CDR3 for beta chain variable domain of TCR clone 370356 (TRBV28, TRBJ2-1)
CASSLVLMREYNEQFF

SEQ ID NO: 740713 - protein, 13 aa, Homo sapiens
  CDR3 for alpha chain variable domain of TCR clone 370357 (TRAV27, TRAJ56)
CAGKPGANSKLTF

SEQ ID NO: 740714 - protein, 13 aa, Homo sapiens
  CDR3 for beta chain variable domain of TCR clone 370357 (TRBV11-2, TRBJ2-5)
CASSFSSQETQYF

SEQ ID NO: 740715 - protein, 14 aa, Homo sapiens
  CDR3 for alpha chain variable domain of TCR clone 370358 (TRAV12-1, TRAJ6)
CVVARIRRKPHTYI

SEQ ID NO: 740716 - protein, 15 aa, Homo sapiens
  CDR3 for beta chain variable domain of TCR clone 370358 (TRBV7-3, TRBJ2-1)
CASSLKASEYNERFF

SEQ ID NO: 740717 - protein, 14 aa, Homo sapiens
  CDR3 for alpha chain variable domain of TCR clone 370359 (TRAV1-2, TRAJ16)
CAVNRFSDGQKLLF

SEQ ID NO: 740718 - protein, 15 aa, Homo sapiens
  CDR3 for beta chain variable domain of TCR clone 370359 (TRBV6-5, TRBJ2-1)
CASSYDAGACNEQFF

SEQ ID NO: 740719 - protein, 17 aa, Homo sapiens
  CDR3 for alpha chain variable domain of TCR clone 370360 (TRAV3, TRAJ6)
CAVRDGPRAGGSYIPKF

SEQ ID NO: 740720 - protein, 16 aa, Homo sapiens
  CDR3 for beta chain variable domain of TCR clone 370360 (TRBV7-9, TRBJ1-3)
CASSQTSGLRMGTIYF

SEQ ID NO: 740721 - protein, 15 aa, Homo sapiens
  CDR3 for alpha chain variable domain of TCR clone 370361 (TRAV26-2, TRAJ28)
CILLESVAGSYQLTF

SEQ ID NO: 740722 - protein, 11 aa, Homo sapiens
  CDR3 for beta chain variable domain of TCR clone 370361 (TRBV25-1, TRBJ2-7)
CASSTSYEQYF

SEQ ID NO: 740723 - protein, 15 aa, Homo sapiens
  CDR3 for alpha chain variable domain of TCR clone 370362 (TRAV34, TRAJ38)
CGADFTPGNNRKLLW

SEQ ID NO: 740724 - protein, 16 aa, Homo sapiens
  CDR3 for beta chain variable domain of TCR clone 370362 (TRBV4-1, TRBJ2-1)
CASSQQGAWESNEQFF

SEQ ID NO: 740725 - protein, 13 aa, Homo sapiens
  CDR3 for alpha chain variable domain of TCR clone 370363 (TRAV12-2, TRAJ42)
CAVKRGSQGNLIF

SEQ ID NO: 740726 - protein, 12 aa, Homo sapiens
  CDR3 for beta chain variable domain of TCR clone 370363 (TRBV5-7, TRBJ1-2)
CASSLVQNGYFF

SEQ ID NO: 740727 - protein, 15 aa, Homo sapiens
  CDR3 for alpha chain variable domain of TCR clone 370364 (TRAV35, TRAJ41)
CAGQLFSNPGYALNF

SEQ ID NO: 740728 - protein, 14 aa, Homo sapiens
  CDR3 for beta chain variable domain of TCR clone 370364 (TRBV7-2, TRBJ1-2)
CASSRGGTNYGYTF

SEQ ID NO: 740729 - protein, 15 aa, Homo sapiens
  CDR3 for alpha chain variable domain of TCR clone 370365 (TRAV8-4, TRAJ3)
CAVSEPYSRASKIIF

SEQ ID NO: 740730 - protein, 13 aa, Homo sapiens
  CDR3 for beta chain variable domain of TCR clone 370365 (TRBV20-1, TRBJ1-1)
CSAPLGGGTEAFF

SEQ ID NO: 740731 - protein, 13 aa, Homo sapiens
  CDR3 for alpha chain variable domain of TCR clone 370366 (TRAV20, TRAJ21)
CAVKGYNFNKFYF

SEQ ID NO: 740732 - protein, 16 aa, Homo sapiens
  CDR3 for beta chain variable domain of TCR clone 370366 (TRBV7-2, TRBJ1-2)
CASSSNQDRRGHGYTF

SEQ ID NO: 740733 - protein, 13 aa, Homo sapiens
  CDR3 for alpha chain variable domain of TCR clone 370367 (TRAV1-1, TRAJ9)
CAAKNTGGFKTIF

SEQ ID NO: 740734 - protein, 13 aa, Homo sapiens
  CDR3 for beta chain variable domain of TCR clone 370367 (TRBV7-9, TRBJ1-2)
CASSLKQNYGYSF

SEQ ID NO: 740735 - protein, 12 aa, Homo sapiens
  CDR3 for alpha chain variable domain of TCR clone 370368 (TRAV3, TRAJ20)
CAVRDPDYKLSF

SEQ ID NO: 740736 - protein, 14 aa, Homo sapiens
  CDR3 for beta chain variable domain of TCR clone 370368 (TRBV13, TRBJ2-7)
CASSGLAGLYEQYF

SEQ ID NO: 740737 - protein, 14 aa, Homo sapiens
  CDR3 for alpha chain variable domain of TCR clone 370369 (TRAV1-1, TRAJ27)
CAVIYNTNAGKSTL

SEQ ID NO: 740738 - protein, 14 aa, Homo sapiens
  CDR3 for beta chain variable domain of TCR clone 370369 (TRBV9, TRBJ2-7)
CASSVGVGSYEQYF

SEQ ID NO: 740739 - protein, 14 aa, Homo sapiens
  CDR3 for alpha chain variable domain of TCR clone 370370 (TRAV27, TRAJ40)
CAGSLLRGTYKYIF

SEQ ID NO: 740740 - protein, 15 aa, Homo sapiens
  CDR3 for beta chain variable domain of TCR clone 370370 (TRBV6-3, TRBJ1-4)
CARSSPGQENEKLFF

SEQ ID NO: 740741 - protein, 14 aa, Homo sapiens
  CDR3 for alpha chain variable domain of TCR clone 370371 (TRAV16, TRAJ32)
CALKSGGATNKLIF

SEQ ID NO: 740742 - protein, 21 aa, Homo sapiens
  CDR3 for beta chain variable domain of TCR clone 370371 (TRBV15, TRBJ1-6)
AWGTQPCTCVPPRGLNSPLHF

SEQ ID NO: 740743 - protein, 13 aa, Homo sapiens
  CDR3 for alpha chain variable domain of TCR clone 370372 (TRAV3, TRAJ21)
CAVREPDFNKFYF

SEQ ID NO: 740744 - protein, 18 aa, Homo sapiens
  CDR3 for beta chain variable domain of TCR clone 370372 (TRBV25-1, TRBJ1-2)
CASSGLQNGQGLIFGYTF

SEQ ID NO: 740745 - protein, 10 aa, Homo sapiens
  CDR3 for alpha chain variable domain of TCR clone 370373 (TRAV23/DV6, TRAJ57)
CAASSILSQG

SEQ ID NO: 740746 - protein, 12 aa, Homo sapiens
  CDR3 for beta chain variable domain of TCR clone 370373 (TRBV7-8, TRBJ2-7)
CASSLGDREQYF

SEQ ID NO: 740747 - protein, 15 aa, Homo sapiens
  CDR3 for alpha chain variable domain of TCR clone 370374 (TRAV2, TRAJ37)
CAVEDGSSNTGKLIF

SEQ ID NO: 740748 - protein, 13 aa, Homo sapiens
  CDR3 for beta chain variable domain of TCR clone 370374 (TRBV20-1, TRBJ1-6)
CSTFMEGNSPLHF

SEQ ID NO: 740749 - protein, 16 aa, Homo sapiens
  CDR3 for alpha chain variable domain of TCR clone 370375 (TRAV12-1, TRAJ42)
CVVTPYYGGSQGNLIF

SEQ ID NO: 740750 - protein, 15 aa, Homo sapiens
  CDR3 for beta chain variable domain of TCR clone 370375 (TRBV4-3, TRBJ2-7)
CASSQGGRGIYEQYV

SEQ ID NO: 740751 - protein, 14 aa, Homo sapiens
  CDR3 for alpha chain variable domain of TCR clone 370376 (TRAV21, TRAJ23)
CAIMIYNQGGKLIF

SEQ ID NO: 740752 - protein, 18 aa, Homo sapiens
  CDR3 for beta chain variable domain of TCR clone 370376 (TRBV20-1, TRBJ2-6)
CSAETTPTHGSGANDLTF

SEQ ID NO: 740753 - protein, 15 aa, Homo sapiens
  CDR3 for alpha chain variable domain of TCR clone 370377 (TRAV8-3, TRAJ45)
CASSYSGGGADGLTF

SEQ ID NO: 740754 - protein, 13 aa, Homo sapiens
  CDR3 for beta chain variable domain of TCR clone 370377 (TRBV7-9, TRBJ2-1)
CASSLDVGNEQFF

SEQ ID NO: 740755 - protein, 18 aa, Homo sapiens
  CDR3 for alpha chain variable domain of TCR clone 370378 (TRAV26-1, TRAJ23)
CIVRVGLEVWNQGGKLIF

SEQ ID NO: 740756 - protein, 14 aa, Homo sapiens
  CDR3 for beta chain variable domain of TCR clone 370378 (TRBV7-6, TRBJ2-3)
CASSLGTVTDMQYF

SEQ ID NO: 740757 - protein, 16 aa, Homo sapiens
  CDR3 for alpha chain variable domain of TCR clone 370379 (TRAV12-2, TRAJ40)
CAVIRGGTSGTYKYIF

SEQ ID NO: 740758 - protein, 14 aa, Homo sapiens
  CDR3 for beta chain variable domain of TCR clone 370379 (TRBV6-1, TRBJ2-1)
CASAKDGFYNEQFF

SEQ ID NO: 740759 - protein, 11 aa, Homo sapiens
  CDR3 for alpha chain variable domain of TCR clone 370380 (TRAV12-2, TRAJ36)
CAVDGATNLFF

SEQ ID NO: 740760 - protein, 13 aa, Homo sapiens
  CDR3 for beta chain variable domain of TCR clone 370380 (TRBV28, TRBJ2-5)
CAGVSRGEETQYF

SEQ ID NO: 740761 - protein, 10 aa, Homo sapiens
  CDR3 for alpha chain variable domain of TCR clone 370381 (TRAV23/DV6, TRAJ22)
CAASSRGSRI

SEQ ID NO: 740762 - protein, 15 aa, Homo sapiens
  CDR3 for beta chain variable domain of TCR clone 370381 (TRBV10-3, TRBJ2-3)
CAIDTSGRRTDTQYF

SEQ ID NO: 740763 - protein, 11 aa, Homo sapiens
  CDR3 for alpha chain variable domain of TCR clone 370382 (TRAV2, TRAJ33)
CAVESNYQLIW

SEQ ID NO: 740764 - protein, 17 aa, Homo sapiens
  CDR3 for beta chain variable domain of TCR clone 370382 (TRBV15, TRBJ1-5)
CATSRVKGIYSNQPQHF

SEQ ID NO: 740765 - protein, 11 aa, Homo sapiens
  CDR3 for alpha chain variable domain of TCR clone 370383 (TRAV13-1, TRAJ43)
CAASMRNDMRF

SEQ ID NO: 740766 - protein, 15 aa, Homo sapiens
  CDR3 for beta chain variable domain of TCR clone 370383 (TRBV7-9, TRBJ2-2)
CASSPETGAGGELFF

SEQ ID NO: 740767 - protein, 14 aa, Homo sapiens
  CDR3 for alpha chain variable domain of TCR clone 370384 (TRAV12-1, TRAJ12)
CVVTRMDSSYKLIF

SEQ ID NO: 740768 - protein, 13 aa, Homo sapiens
  CDR3 for beta chain variable domain of TCR clone 370384 (TRBV20-1, TRBJ1-1)
CSARGRGNTETFF

SEQ ID NO: 740769 - protein, 12 aa, Homo sapiens
  CDR3 for alpha chain variable domain of TCR clone 370385 (TRAV35, TRAJ49)
CAGWNTGNQFYF

SEQ ID NO: 740770 - protein, 16 aa, Homo sapiens
  CDR3 for beta chain variable domain of TCR clone 370385 (TRBV6-1, TRBJ2-1)
CASILRQGSSYNEQFF

SEQ ID NO: 740771 - protein, 12 aa, Homo sapiens
  CDR3 for alpha chain variable domain of TCR clone 370386 (TRAV8-3, TRAJ20)
CAVDFNDYKLSF

SEQ ID NO: 740772 - protein, 13 aa, Homo sapiens
  CDR3 for beta chain variable domain of TCR clone 370386 (TRBV5-7, TRBJ2-3)
CASSLGRTDTQHF

SEQ ID NO: 740773 - protein, 13 aa, Homo sapiens
  CDR3 for alpha chain variable domain of TCR clone 370387 (TRAV25, TRAJ29)
CAGRFVGNTPLVF

SEQ ID NO: 740774 - protein, 15 aa, Homo sapiens
  CDR3 for beta chain variable domain of TCR clone 370387 (TRBV20-1, TRBJ1-5)
CSATSDRGLGQPQHF

SEQ ID NO: 740775 - protein, 13 aa, Homo sapiens
  CDR3 for alpha chain variable domain of TCR clone 370388 (TRAV2, TRAJ40)
CAVVTSGTYKYVF

SEQ ID NO: 740776 - protein, 12 aa, Homo sapiens
  CDR3 for beta chain variable domain of TCR clone 370388 (TRBV2, TRBJ2-1)
CAKREGYNEQFF

SEQ ID NO: 740777 - protein, 18 aa, Homo sapiens
  CDR3 for alpha chain variable domain of TCR clone 370389 (TRAV13-1, TRAJ52)
CAASKRSAGGTSYGKLTF

SEQ ID NO: 740778 - protein, 13 aa, Homo sapiens
  CDR3 for beta chain variable domain of TCR clone 370389 (TRBV7-8, TRBJ2-2)
CASSSSRTGELFF

SEQ ID NO: 740779 - protein, 15 aa, Homo sapiens
  CDR3 for alpha chain variable domain of TCR clone 370390 (TRAV8-4, TRAJ37)
CAVSVSPSNTGKLIF

SEQ ID NO: 740780 - protein, 16 aa, Homo sapiens
  CDR3 for beta chain variable domain of TCR clone 370390 (TRBV28, TRBJ2-1)
CASSSPEYPRDNEQFF

SEQ ID NO: 740781 - protein, 15 aa, Homo sapiens
  CDR3 for alpha chain variable domain of TCR clone 370391 (TRAV8-3, TRAJ11)
CAVGLLNSGYRTLTF

SEQ ID NO: 740782 - protein, 16 aa, Homo sapiens
  CDR3 for beta chain variable domain of TCR clone 370391 (TRBV28, TRBJ2-1)
CASSLWGRTSGTLQFF

SEQ ID NO: 740783 - protein, 15 aa, Homo sapiens
  CDR3 for alpha chain variable domain of TCR clone 370392 (TRAV21, TRAJ53)
CATLNSGDSNYKLTF

SEQ ID NO: 740784 - protein, 16 aa, Homo sapiens
  CDR3 for beta chain variable domain of TCR clone 370392 (TRBV20-1, TRBJ1-2)
CSASMGQGVANYGYTF

SEQ ID NO: 740785 - protein, 19 aa, Homo sapiens
  CDR3 for alpha chain variable domain of TCR clone 370393 (TRAV29/DV5, TRAJ49)
CSVLLCSKLTVDTGNQFYF

SEQ ID NO: 740786 - protein, 13 aa, Homo sapiens
  CDR3 for beta chain variable domain of TCR clone 370393 (TRBV7-9, TRBJ2-5)
CASTPVGQETQYF

SEQ ID NO: 740787 - protein, 11 aa, Homo sapiens
  CDR3 for alpha chain variable domain of TCR clone 370394 (TRAV2, TRAJ23)
CAVETRGKLIF

SEQ ID NO: 740788 - protein, 14 aa, Homo sapiens
  CDR3 for beta chain variable domain of TCR clone 370394 (TRBV7-6, TRBJ2-3)
CASSLGTVTDTQYF

SEQ ID NO: 740789 - protein, 12 aa, Homo sapiens
  CDR3 for alpha chain variable domain of TCR clone 370395 (TRAV9-2, TRAJ26)
CALRGYGQNFGF

SEQ ID NO: 740790 - protein, 12 aa, Homo sapiens
  CDR3 for beta chain variable domain of TCR clone 370395 (TRBV29-1, TRBJ2-3)
CSVTGGADTQYF

SEQ ID NO: 740791 - protein, 14 aa, Homo sapiens
  CDR3 for alpha chain variable domain of TCR clone 370396 (TRAV3, TRAJ9)
CAVRLNTGGFKTIF

SEQ ID NO: 740792 - protein, 14 aa, Homo sapiens
  CDR3 for beta chain variable domain of TCR clone 370396 (TRBV2, TRBJ2-5)
CASKKATGLETQYF

SEQ ID NO: 740793 - protein, 14 aa, Homo sapiens
  CDR3 for alpha chain variable domain of TCR clone 370397 (TRAV3, TRAJ33)
CAVRDMDSNYQLIW

SEQ ID NO: 740794 - protein, 19 aa, Homo sapiens
  CDR3 for beta chain variable domain of TCR clone 370397 (TRBV7-3, TRBJ1-2)
CVSSFPQGNDGELWLHLRF

SEQ ID NO: 740795 - protein, 15 aa, Homo sapiens
  CDR3 for alpha chain variable domain of TCR clone 370398 (TRAV21, TRAJ37)
CAVRPTLSNTGKLIF

SEQ ID NO: 740796 - protein, 17 aa, Homo sapiens
  CDR3 for beta chain variable domain of TCR clone 370398 (TRBV25-1, TRBJ2-7)
CASSDARVVFSSYEQYF

SEQ ID NO: 740797 - protein, 16 aa, Homo sapiens
  CDR3 for alpha chain variable domain of TCR clone 370399 (TRAV30, TRAJ24)
CGTEIVDADSWGNFQF

SEQ ID NO: 740798 - protein, 13 aa, Homo sapiens
  CDR3 for beta chain variable domain of TCR clone 370399 (TRBV23-1, TRBJ1-4)
CASRGKFNEKLFF

SEQ ID NO: 740799 - protein, 12 aa, Homo sapiens
  CDR3 for alpha chain variable domain of TCR clone 370400 (TRAV1-2, TRAJ42)
CVAGGSQGNLIF

SEQ ID NO: 740800 - protein, 13 aa, Homo sapiens
  CDR3 for beta chain variable domain of TCR clone 370400 (TRBV14, TRBJ2-7)
CASSQDRRYEQYF

SEQ ID NO: 740801 - protein, 16 aa, Homo sapiens
  CDR3 for alpha chain variable domain of TCR clone 370401 (TRAV3, TRAJ10)
CAVRDMRAGGGNKLTF

SEQ ID NO: 740802 - protein, 18 aa, Homo sapiens
  CDR3 for beta chain variable domain of TCR clone 370401 (TRBV3-1, TRBJ1-2)
CASSQDVIGWNGDYGYTF

SEQ ID NO: 740803 - protein, 14 aa, Homo sapiens
  CDR3 for alpha chain variable domain of TCR clone 370402 (TRAV12-1, TRAJ12)
CVVNRPDSSYKLIF

SEQ ID NO: 740804 - protein, 15 aa, Homo sapiens
  CDR3 for beta chain variable domain of TCR clone 370402 (TRBV29-1, TRBJ2-7)
CSVEFFDRGSYEQYF

SEQ ID NO: 740805 - protein, 14 aa, Homo sapiens
  CDR3 for alpha chain variable domain of TCR clone 370403 (TRAV1-2, TRAJ16)
CAVNRFSDGQKLLF

SEQ ID NO: 740806 - protein, 13 aa, Homo sapiens
  CDR3 for beta chain variable domain of TCR clone 370403 (TRBV13, TRBJ1-4)
CASSLMGDKKLFF

SEQ ID NO: 740807 - protein, 15 aa, Homo sapiens
  CDR3 for alpha chain variable domain of TCR clone 370404 (TRAV3, TRAJ22)
CAVRDRGGSARQLAF

SEQ ID NO: 740808 - protein, 11 aa, Homo sapiens
  CDR3 for beta chain variable domain of TCR clone 370404 (TRBV7-8, TRBJ2-7)
CASSLSLEQYF

SEQ ID NO: 740809 - protein, 16 aa, Homo sapiens
  CDR3 for alpha chain variable domain of TCR clone 370405 (TRAV12-3, TRAJ53)
CAMSPGSGGSNYKLKF

SEQ ID NO: 740810 - protein, 16 aa, Homo sapiens
  CDR3 for beta chain variable domain of TCR clone 370405 (TRBV5-1, TRBJ2-3)
CASSLEGGSFTDTQYF

SEQ ID NO: 740811 - protein, 15 aa, Homo sapiens
  CDR3 for alpha chain variable domain of TCR clone 370406 (TRAV3, TRAJ4)
CDVRDGTGGYNKLIF

SEQ ID NO: 740812 - protein, 13 aa, Homo sapiens
  CDR3 for beta chain variable domain of TCR clone 370406 (TRBV12-5, TRBJ1-2)
CASGVRTGNGYTF

SEQ ID NO: 740813 - protein, 14 aa, Homo sapiens
  CDR3 for alpha chain variable domain of TCR clone 370407 (TRAV1-2, TRAJ8)
CAVREDTGFQKLVF

SEQ ID NO: 740814 - protein, 16 aa, Homo sapiens
  CDR3 for beta chain variable domain of TCR clone 370407 (TRBV7-3, TRBJ2-1)
CASSLVSGSSNNEQFF

SEQ ID NO: 740815 - protein, 10 aa, Homo sapiens
  CDR3 for alpha chain variable domain of TCR clone 370408 (TRAV36/DV7, TRAJ49)
CALAGNQFYF

SEQ ID NO: 740816 - protein, 16 aa, Homo sapiens
  CDR3 for beta chain variable domain of TCR clone 370408 (TRBV7-8, TRBJ2-5)
CASSFGGQPAQETQYF

SEQ ID NO: 740817 - protein, 17 aa, Homo sapiens
  CDR3 for alpha chain variable domain of TCR clone 370409 (TRAV20, TRAJ42)
CAVKAWGYGGSQGNLIF

SEQ ID NO: 740818 - protein, 16 aa, Homo sapiens
  CDR3 for beta chain variable domain of TCR clone 370409 (TRBV29-1, TRBJ2-5)
CSVEGLAGDYQETQYF

SEQ ID NO: 740819 - protein, 14 aa, Homo sapiens
  CDR3 for alpha chain variable domain of TCR clone 370410 (TRAV38-1, TRAJ11)
CAFMKHEGYSTLTF

SEQ ID NO: 740820 - protein, 12 aa, Homo sapiens
  CDR3 for beta chain variable domain of TCR clone 370410 (TRBV10-3, TRBJ2-3)
CAISESQQARVF

SEQ ID NO: 740821 - protein, 17 aa, Homo sapiens
  CDR3 for alpha chain variable domain of TCR clone 370411 (TRAV23/DV6, TRAJ57)
CAASSTLSQGGSEKLVF

SEQ ID NO: 740822 - protein, 11 aa, Homo sapiens
  CDR3 for beta chain variable domain of TCR clone 370411 (TRBV28, TRBJ2-7)
CASSTQGGKSF

SEQ ID NO: 740823 - protein, 14 aa, Homo sapiens
  CDR3 for alpha chain variable domain of TCR clone 370412 (TRAV12-3, TRAJ13)
CAMRNSGGYQKVTF

SEQ ID NO: 740824 - protein, 14 aa, Homo sapiens
  CDR3 for beta chain variable domain of TCR clone 370412 (TRBV4-1, TRBJ1-6)
CASSPGSDSSPLNF

SEQ ID NO: 740825 - protein, 11 aa, Homo sapiens
  CDR3 for alpha chain variable domain of TCR clone 370413 (TRAV17, TRAJ39)
CATGAGNMLTF

SEQ ID NO: 740826 - protein, 16 aa, Homo sapiens
  CDR3 for beta chain variable domain of TCR clone 370413 (TRBV5-1, TRBJ2-1)
CASSFGVSGSYNEKFF

SEQ ID NO: 740827 - protein, 14 aa, Homo sapiens
  CDR3 for alpha chain variable domain of TCR clone 370414 (TRAV9-2, TRAJ39)
CALYIYNAGNMLTF

SEQ ID NO: 740828 - protein, 12 aa, Homo sapiens
  CDR3 for beta chain variable domain of TCR clone 370414 (TRBV12-4, TRBJ2-3)
CASSSTTDTQYF

SEQ ID NO: 740829 - protein, 12 aa, Homo sapiens
  CDR3 for alpha chain variable domain of TCR clone 370415 (TRAV25, TRAJ11)
CAGASGYSTLTF

SEQ ID NO: 740830 - protein, 14 aa, Homo sapiens
  CDR3 for beta chain variable domain of TCR clone 370415 (TRBV5-8, TRBJ2-3)
CASSLGQGTDTQYV

SEQ ID NO: 740831 - protein, 17 aa, Homo sapiens
  CDR3 for alpha chain variable domain of TCR clone 370416 (TRAV23/DV6, TRAJ57)
CAASSTLSQAGSDKLVF

SEQ ID NO: 740832 - protein, 14 aa, Homo sapiens
  CDR3 for beta chain variable domain of TCR clone 370416 (TRBV25-1, TRBJ1-1)
CASTHLGGNTEAFF

SEQ ID NO: 740833 - protein, 14 aa, Homo sapiens
  CDR3 for alpha chain variable domain of TCR clone 370417 (TRAV2, TRAJ9)
CAVEDRSGGFKTIF

SEQ ID NO: 740834 - protein, 16 aa, Homo sapiens
  CDR3 for beta chain variable domain of TCR clone 370417 (TRBV7-6, TRBJ2-5)
CASSETSGRAVETQYF

SEQ ID NO: 740835 - protein, 14 aa, Homo sapiens
  CDR3 for alpha chain variable domain of TCR clone 370418 (TRAV1-2, TRAJ8)
CALREDTGFQKLVF

SEQ ID NO: 740836 - protein, 16 aa, Homo sapiens
  CDR3 for beta chain variable domain of TCR clone 370418 (TRBV19, TRBJ2-1)
CASSKAGPSSYNEQFF

SEQ ID NO: 740837 - protein, 12 aa, Homo sapiens
  CDR3 for alpha chain variable domain of TCR clone 370419 (TRAV36/DV7, TRAJ54)
FAVVRGAQKLVF

SEQ ID NO: 740838 - protein, 14 aa, Homo sapiens
  CDR3 for beta chain variable domain of TCR clone 370419 (TRBV7-3, TRBJ1-1)
CASSLKGGNTEAFF

SEQ ID NO: 740839 - protein, 14 aa, Homo sapiens
  CDR3 for alpha chain variable domain of TCR clone 370420 (TRAV9-2, TRAJ39)
CALYIYNAGNMLTF

SEQ ID NO: 740840 - protein, 13 aa, Homo sapiens
  CDR3 for beta chain variable domain of TCR clone 370420 (TRBV7-2, TRBJ2-5)
CASSQTSVETQYF

SEQ ID NO: 740841 - protein, 12 aa, Homo sapiens
  CDR3 for alpha chain variable domain of TCR clone 370421 (TRAV13-2, TRAJ8)
CAPWLGFQKLVF

SEQ ID NO: 740842 - protein, 15 aa, Homo sapiens
  CDR3 for beta chain variable domain of TCR clone 370421 (TRBV20-1, TRBJ1-1)
CSASWTGGMNTEAFF

SEQ ID NO: 740843 - protein, 13 aa, Homo sapiens
  CDR3 for alpha chain variable domain of TCR clone 370422 (TRAV2, TRAJ10)
CALETGGGTKLTF

SEQ ID NO: 740844 - protein, 14 aa, Homo sapiens
  CDR3 for beta chain variable domain of TCR clone 370422 (TRBV20-1, TRBJ2-3)
CSAGGRRGTDTQYF

SEQ ID NO: 740845 - protein, 15 aa, Homo sapiens
  CDR3 for alpha chain variable domain of TCR clone 370423 (TRAV29/DV5, TRAJ40)
CAASAQGSGTYKYIF

SEQ ID NO: 740846 - protein, 15 aa, Homo sapiens
  CDR3 for beta chain variable domain of TCR clone 370423 (TRBV7-2, TRBJ2-3)
CASSLAAAFIDTQYF

SEQ ID NO: 740847 - protein, 12 aa, Homo sapiens
  CDR3 for alpha chain variable domain of TCR clone 370424 (TRAV3, TRAJ31)
CAAQRANARLMF

SEQ ID NO: 740848 - protein, 13 aa, Homo sapiens
  CDR3 for beta chain variable domain of TCR clone 370424 (TRBV10-3, TRBJ2-7)
CASKLAVNYEQYF

SEQ ID NO: 740849 - protein, 17 aa, Homo sapiens
  CDR3 for alpha chain variable domain of TCR clone 370425 (TRAV13-2, TRAJ31)
CAENARLVFGDGTQLVV

SEQ ID NO: 740850 - protein, 14 aa, Homo sapiens
  CDR3 for beta chain variable domain of TCR clone 370425 (TRBV7-9, TRBJ2-1)
CASSLGVADNEQFF

SEQ ID NO: 740851 - protein, 13 aa, Homo sapiens
  CDR3 for alpha chain variable domain of TCR clone 370426 (TRAV12-3, TRAJ53)
CATRGGSNYKLTF

SEQ ID NO: 740852 - protein, 14 aa, Homo sapiens
  CDR3 for beta chain variable domain of TCR clone 370426 (TRBV7-2, TRBJ2-7)
CASRSQGAAYEQYF

SEQ ID NO: 740853 - protein, 14 aa, Homo sapiens
  CDR3 for alpha chain variable domain of TCR clone 370427 (TRAV16, TRAJ26)
CITVLSAYGQDFVF

SEQ ID NO: 740854 - protein, 14 aa, Homo sapiens
  CDR3 for beta chain variable domain of TCR clone 370427 (TRBV7-2, TRBJ2-7)
CASRSQGAAYEQYF

SEQ ID NO: 740855 - protein, 17 aa, Homo sapiens
  CDR3 for alpha chain variable domain of TCR clone 370428 (TRAV3, TRAJ6)
CAVRDGPRAGGSYIPTF

SEQ ID NO: 740856 - protein, 20 aa, Homo sapiens
  CDR3 for beta chain variable domain of TCR clone 370428 (TRBV28, TRBJ2-1)
CASTPIGRSPGLARGNEQSF

SEQ ID NO: 740857 - protein, 13 aa, Homo sapiens
  CDR3 for alpha chain variable domain of TCR clone 370429 (TRAV1-1, TRAJ9)
CAAKNTGGFKTIF

SEQ ID NO: 740858 - protein, 14 aa, Homo sapiens
  CDR3 for beta chain variable domain of TCR clone 370429 (TRBV20-1, TRBJ2-1)
CSAQIGGSANEQCF

SEQ ID NO: 740859 - protein, 18 aa, Homo sapiens
  CDR3 for alpha chain variable domain of TCR clone 370430 (TRAV12-3, TRAJ52)
CAMSVGGAGGTSYGKLTF

SEQ ID NO: 740860 - protein, 15 aa, Homo sapiens
  CDR3 for beta chain variable domain of TCR clone 370430 (TRBV4-2, TRBJ1-1)
CASSQEDLPRTEAFF

SEQ ID NO: 740861 - protein, 13 aa, Homo sapiens
  CDR3 for alpha chain variable domain of TCR clone 370431 (TRAV13-1, TRAJ5)
CAASDTGRRALTF

SEQ ID NO: 740862 - protein, 18 aa, Homo sapiens
  CDR3 for beta chain variable domain of TCR clone 370431 (TRBV5-1, TRBJ2-7)
CASSLAGFGGMSSYEQYF

SEQ ID NO: 740863 - protein, 16 aa, Homo sapiens
  CDR3 for alpha chain variable domain of TCR clone 370432 (TRAV30, TRAJ24)
CGTEIVDADSLGKFQF

SEQ ID NO: 740864 - protein, 13 aa, Homo sapiens
  CDR3 for beta chain variable domain of TCR clone 370432 (TRBV18, TRBJ1-2)
CASSASATEGYTF

SEQ ID NO: 740865 - protein, 16 aa, Homo sapiens
  CDR3 for alpha chain variable domain of TCR clone 370433 (TRAV13-1, TRAJ3)
CSKSRPSYSSASKIIF

SEQ ID NO: 740866 - protein, 18 aa, Homo sapiens
  CDR3 for beta chain variable domain of TCR clone 370433 (TRBV15, TRBJ2-3)
CATSRDGARSWDTDTQYF

SEQ ID NO: 740867 - protein, 14 aa, Homo sapiens
  CDR3 for alpha chain variable domain of TCR clone 370434 (TRAV12-1, TRAJ29)
CVVNEESGNTPLVF

SEQ ID NO: 740868 - protein, 13 aa, Homo sapiens
  CDR3 for beta chain variable domain of TCR clone 370434 (TRBV7-9, TRBJ2-3)
CASSPGSTDTQYF

SEQ ID NO: 740869 - protein, 13 aa, Homo sapiens
  CDR3 for alpha chain variable domain of TCR clone 370435 (TRAV23/DV6, TRAJ16)
CAASISDGQKLLF

SEQ ID NO: 740870 - protein, 20 aa, Homo sapiens
  CDR3 for beta chain variable domain of TCR clone 370435 (TRBV7-8, TRBJ2-2)
CASSHLFPGPTIHITGELFF

SEQ ID NO: 740871 - protein, 16 aa, Homo sapiens
  CDR3 for alpha chain variable domain of TCR clone 370436 (TRAV13-1, TRAJ8)
CAAFYRLNTGFQKLVF

SEQ ID NO: 740872 - protein, 14 aa, Homo sapiens
  CDR3 for beta chain variable domain of TCR clone 370436 (TRBV29-1, TRBJ2-5)
CSVGPAGGQETQYF

SEQ ID NO: 740873 - protein, 16 aa, Homo sapiens
  CDR3 for alpha chain variable domain of TCR clone 370437 (TRAV13-1, TRAJ22)
CAAKGGRSGSARQLTF

SEQ ID NO: 740874 - protein, 15 aa, Homo sapiens
  CDR3 for beta chain variable domain of TCR clone 370437 (TRBV9, TRBJ1-6)
CASSVAGTGDSPHHF

SEQ ID NO: 740875 - protein, 16 aa, Homo sapiens
  CDR3 for alpha chain variable domain of TCR clone 370438 (TRAV8-3, TRAJ42)
CAVAGAYGGSQGNLIF

SEQ ID NO: 740876 - protein, 11 aa, Homo sapiens
  CDR3 for beta chain variable domain of TCR clone 370438 (TRBV12-4, TRBJ1-5)
CASSYGYSQHF

SEQ ID NO: 740877 - protein, 11 aa, Homo sapiens
  CDR3 for alpha chain variable domain of TCR clone 370439 (TRAV3, TRAJ21)
CAVVNFNKFYF

SEQ ID NO: 740878 - protein, 16 aa, Homo sapiens
  CDR3 for beta chain variable domain of TCR clone 370439 (TRBV19, TRBJ2-1)
CASSKAGPSSYNEKFF

SEQ ID NO: 740879 - protein, 13 aa, Homo sapiens
  CDR3 for alpha chain variable domain of TCR clone 370440 (TRAV12-3, TRAJ9)
CAMSADGGFKTIF

SEQ ID NO: 740880 - protein, 15 aa, Homo sapiens
  CDR3 for beta chain variable domain of TCR clone 370440 (TRBV5-5, TRBJ1-5)
CASSLKGGGEQPQHF

SEQ ID NO: 740881 - protein, 14 aa, Homo sapiens
  CDR3 for alpha chain variable domain of TCR clone 370441 (TRAV9-2, TRAJ24)
CALNPRGSWGKLQF

SEQ ID NO: 740882 - protein, 18 aa, Homo sapiens
  CDR3 for beta chain variable domain of TCR clone 370441 (TRBV7-9, TRBJ2-1)
CASSLAVSGTSGRNEQFF

SEQ ID NO: 740883 - protein, 18 aa, Homo sapiens
  CDR3 for alpha chain variable domain of TCR clone 370442 (TRAV21, TRAJ52)
CAVRPPPAGGTSYGKLTF

SEQ ID NO: 740884 - protein, 14 aa, Homo sapiens
  CDR3 for beta chain variable domain of TCR clone 370442 (TRBV20-1, TRBJ1-1)
CSAQTRIGGTEAFF

SEQ ID NO: 740885 - protein, 13 aa, Homo sapiens
  CDR3 for alpha chain variable domain of TCR clone 370443 (TRAV3, TRAJ21)
CAVREPDFNKFYF

SEQ ID NO: 740886 - protein, 12 aa, Homo sapiens
  CDR3 for beta chain variable domain of TCR clone 370443 (TRBV18, TRBJ1-4)
CASSPSREKLFF

SEQ ID NO: 740887 - protein, 16 aa, Homo sapiens
  CDR3 for alpha chain variable domain of TCR clone 370444 (TRAV26-1, TRAJ36)
CIVIVPDQTGANNLFF

SEQ ID NO: 740888 - protein, 15 aa, Homo sapiens
  CDR3 for beta chain variable domain of TCR clone 370444 (TRBV19, TRBJ2-4)
CASRGPRRGENTQYF

SEQ ID NO: 740889 - protein, 13 aa, Homo sapiens
  CDR3 for alpha chain variable domain of TCR clone 370445 (TRAV23/DV6, TRAJ24)
CAASTDSWGKFQF

SEQ ID NO: 740890 - protein, 16 aa, Homo sapiens
  CDR3 for beta chain variable domain of TCR clone 370445 (TRBV28, TRBJ2-7)
CASSFPDRRLTYEQYF

SEQ ID NO: 740891 - protein, 14 aa, Homo sapiens
  CDR3 for alpha chain variable domain of TCR clone 370446 (TRAV1-2, TRAJ16)
CAVNRFSDGQKLLF

SEQ ID NO: 740892 - protein, 17 aa, Homo sapiens
  CDR3 for beta chain variable domain of TCR clone 370446 (TRBV11-2, TRBJ2-4)
CASSSVGPGGHRNIQYF

SEQ ID NO: 740893 - protein, 13 aa, Homo sapiens
  CDR3 for alpha chain variable domain of TCR clone 370447 (TRAV8-3, TRAJ7)
CAVGAYGNNRLAF

SEQ ID NO: 740894 - protein, 15 aa, Homo sapiens
  CDR3 for beta chain variable domain of TCR clone 370447 (TRBV6-6, TRBJ2-7)
CASSYSIRGVYEQYF

SEQ ID NO: 740895 - protein, 19 aa, Homo sapiens
  CDR3 for alpha chain variable domain of TCR clone 370448 (TRAV3, TRAJ6)
CAVRDRNPSRSGGSYIPTF

SEQ ID NO: 740896 - protein, 14 aa, Homo sapiens
  CDR3 for beta chain variable domain of TCR clone 370448 (TRBV7-6, TRBJ2-3)
CASSVAGGTDTQYF

SEQ ID NO: 740897 - protein, 18 aa, Homo sapiens
  CDR3 for alpha chain variable domain of TCR clone 370449 (TRAV12-2, TRAJ10)
CALGRGWRLTGGGNKPTF

SEQ ID NO: 740898 - protein, 17 aa, Homo sapiens
  CDR3 for beta chain variable domain of TCR clone 370449 (TRBV13, TRBJ2-3)
CASSLSRVAGGRNTQYF

SEQ ID NO: 740899 - protein, 17 aa, Homo sapiens
  CDR3 for alpha chain variable domain of TCR clone 370450 (TRAV35, TRAJ28)
CAGLQAYSGAGSYQLTF

SEQ ID NO: 740900 - protein, 15 aa, Homo sapiens
  CDR3 for beta chain variable domain of TCR clone 370450 (TRBV2, TRBJ1-2)
CASSEIGGANYGYAF

SEQ ID NO: 740901 - protein, 14 aa, Homo sapiens
  CDR3 for alpha chain variable domain of TCR clone 370451 (TRAV2, TRAJ42)
CAVVGGGSQGNLIF

SEQ ID NO: 740902 - protein, 14 aa, Homo sapiens
  CDR3 for beta chain variable domain of TCR clone 370451 (TRBV7-2, TRBJ2-7)
CASSGLAGRGEQYF

SEQ ID NO: 740903 - protein, 13 aa, Homo sapiens
  CDR3 for alpha chain variable domain of TCR clone 370452 (TRAV23/DV6, TRAJ47)
CAASSQYGNNLVF

SEQ ID NO: 740904 - protein, 15 aa, Homo sapiens
  CDR3 for beta chain variable domain of TCR clone 370452 (TRBV7-3, TRBJ2-1)
CASSLDGNSYNEQFF

SEQ ID NO: 740905 - protein, 14 aa, Homo sapiens
  CDR3 for alpha chain variable domain of TCR clone 370453 (TRAV1-2, TRAJ8)
CAVREDTGFQKLVF

SEQ ID NO: 740906 - protein, 17 aa, Homo sapiens
  CDR3 for beta chain variable domain of TCR clone 370453 (TRBV11-2, TRBJ2-1)
CASSSYPPGVEYNEQFF

SEQ ID NO: 740907 - protein, 11 aa, Homo sapiens
  CDR3 for alpha chain variable domain of TCR clone 370454 (TRAV1-2, TRAJ20)
CAVSNDYKLSL

SEQ ID NO: 740908 - protein, 13 aa, Homo sapiens
  CDR3 for beta chain variable domain of TCR clone 370454 (TRBV7-9, TRBJ1-2)
CASSLKQNYGYTF

SEQ ID NO: 740909 - protein, 14 aa, Homo sapiens
  CDR3 for alpha chain variable domain of TCR clone 370455 (TRAV25, TRAJ45)
CARESGGGAAGLTF

SEQ ID NO: 740910 - protein, 12 aa, Homo sapiens
  CDR3 for beta chain variable domain of TCR clone 370455 (TRBV7-9, TRBJ2-7)
CASSFDSYEQYF

SEQ ID NO: 740911 - protein, 14 aa, Homo sapiens
  CDR3 for alpha chain variable domain of TCR clone 370456 (TRAV35, TRAJ13)
CAGSPSGGYQKVTF

SEQ ID NO: 740912 - protein, 13 aa, Homo sapiens
  CDR3 for beta chain variable domain of TCR clone 370456 (TRBV29-1, TRBJ1-1)
CSVGASRNTEAFF

SEQ ID NO: 740913 - protein, 14 aa, Homo sapiens
  CDR3 for alpha chain variable domain of TCR clone 370457 (TRAV1-2, TRAJ16)
CAVNRFSNGQKLLF

SEQ ID NO: 740914 - protein, 13 aa, Homo sapiens
  CDR3 for beta chain variable domain of TCR clone 370457 (TRBV7-9, TRBJ1-2)
CASSLKQNYGYTF

SEQ ID NO: 740915 - protein, 17 aa, Homo sapiens
  CDR3 for alpha chain variable domain of TCR clone 370458 (TRAV26-1, TRAJ53)
CIVRVDDSGGSNYILTF

SEQ ID NO: 740916 - protein, 15 aa, Homo sapiens
  CDR3 for beta chain variable domain of TCR clone 370458 (TRBV20-1, TRBJ2-7)
CSARVPAAYFYEQYF

SEQ ID NO: 740917 - protein, 13 aa, Homo sapiens
  CDR3 for alpha chain variable domain of TCR clone 370459 (TRAV12-3, TRAJ5)
CAMRSTGRRALTF

SEQ ID NO: 740918 - protein, 13 aa, Homo sapiens
  CDR3 for beta chain variable domain of TCR clone 370459 (TRBV2, TRBJ2-7)
CASSVVEAYEQYF

SEQ ID NO: 740919 - protein, 13 aa, Homo sapiens
  CDR3 for alpha chain variable domain of TCR clone 370460 (TRAV26-1, TRAJ30)
CIVNMNRDDKVIF

SEQ ID NO: 740920 - protein, 16 aa, Homo sapiens
  CDR3 for beta chain variable domain of TCR clone 370460 (TRBV16, TRBJ2-7)
CASSRPAGGSSYEQYF

SEQ ID NO: 740921 - protein, 12 aa, Homo sapiens
  CDR3 for alpha chain variable domain of TCR clone 370461 (TRAV16, TRAJ10)
CSRTGGGNKLTF

SEQ ID NO: 740922 - protein, 17 aa, Homo sapiens
  CDR3 for beta chain variable domain of TCR clone 370461 (TRBV11-2, TRBJ2-1)
CASSLYPPGVEYNEQFL

SEQ ID NO: 740923 - protein, 13 aa, Homo sapiens
  CDR3 for alpha chain variable domain of TCR clone 370462 (TRAV27, TRAJ41)
CAGEGNSGYALIF

SEQ ID NO: 740924 - protein, 14 aa, Homo sapiens
  CDR3 for beta chain variable domain of TCR clone 370462 (TRBV7-2, TRBJ1-1)
CASSFLTGTTEAFF

SEQ ID NO: 740925 - protein, 14 aa, Homo sapiens
  CDR3 for alpha chain variable domain of TCR clone 370463 (TRAV12-2, TRAJ13)
CAVKKTGGYQKVTF

SEQ ID NO: 740926 - protein, 14 aa, Homo sapiens
  CDR3 for beta chain variable domain of TCR clone 370463 (TRBV19, TRBJ1-5)
CASRAPDSFLSQHF

SEQ ID NO: 740927 - protein, 16 aa, Homo sapiens
  CDR3 for alpha chain variable domain of TCR clone 370464 (TRAV26-1, TRAJ37)
CIVRGDGSGNTGKLIF

SEQ ID NO: 740928 - protein, 15 aa, Homo sapiens
  CDR3 for beta chain variable domain of TCR clone 370464 (TRBV25-1, TRBJ1-4)
CASSPGDSTNEKLFF

SEQ ID NO: 740929 - protein, 14 aa, Homo sapiens
  CDR3 for alpha chain variable domain of TCR clone 370465 (TRAV30, TRAJ33)
CGTVAPRSNYPVIW

SEQ ID NO: 740930 - protein, 15 aa, Homo sapiens
  CDR3 for beta chain variable domain of TCR clone 370465 (TRBV3-1, TRBJ2-1)
CASSQQPSGGNEQFF

SEQ ID NO: 740931 - protein, 14 aa, Homo sapiens
  CDR3 for alpha chain variable domain of TCR clone 370466 (TRAV12-2, TRAJ40)
CAVKSPSGTYKYIF

SEQ ID NO: 740932 - protein, 17 aa, Homo sapiens
  CDR3 for beta chain variable domain of TCR clone 370466 (TRBV11-2, TRBJ2-1)
CASSLYPPGVEYNEQFF

SEQ ID NO: 740933 - protein, 12 aa, Homo sapiens
  CDR3 for alpha chain variable domain of TCR clone 370467 (TRAV12-3, TRAJ17)
CAMTLTGNKLTF

SEQ ID NO: 740934 - protein, 13 aa, Homo sapiens
  CDR3 for beta chain variable domain of TCR clone 370467 (TRBV24-1, TRBJ2-2)
CATTATRTGELFF

SEQ ID NO: 740935 - protein, 14 aa, Homo sapiens
  CDR3 for alpha chain variable domain of TCR clone 370468 (TRAV2, TRAJ9)
CAVEDRSGGFKTIF

SEQ ID NO: 740936 - protein, 16 aa, Homo sapiens
  CDR3 for beta chain variable domain of TCR clone 370468 (TRBV7-3, TRBJ2-1)
CASSLEGYRSYNAQFF

SEQ ID NO: 740937 - protein, 13 aa, Homo sapiens
  CDR3 for alpha chain variable domain of TCR clone 370469 (TRAV1-2, TRAJ9)
CAALNTGGFKTIF

SEQ ID NO: 740938 - protein, 14 aa, Homo sapiens
  CDR3 for beta chain variable domain of TCR clone 370469 (TRBV12-5, TRBJ2-5)
CASGSRTHHETQYF

SEQ ID NO: 740939 - protein, 15 aa, Homo sapiens
  CDR3 for alpha chain variable domain of TCR clone 370470 (TRAV3, TRAJ17)
CAVSPKEATGNKLTF

SEQ ID NO: 740940 - protein, 12 aa, Homo sapiens
  CDR3 for beta chain variable domain of TCR clone 370470 (TRBV7-9, TRBJ1-6)
CASSLMTSPLHF

SEQ ID NO: 740941 - protein, 15 aa, Homo sapiens
  CDR3 for alpha chain variable domain of TCR clone 370471 (TRAV3, TRAJ47)
CAVRDIGEYGNKLVF

SEQ ID NO: 740942 - protein, 15 aa, Homo sapiens
  CDR3 for beta chain variable domain of TCR clone 370471 (TRBV28, TRBJ2-3)
CAPTFRDWSTDTQYF

SEQ ID NO: 740943 - protein, 15 aa, Homo sapiens
  CDR3 for alpha chain variable domain of TCR clone 370472 (TRAV8-3, TRAJ11)
CAVGLLNSGYSTLTF

SEQ ID NO: 740944 - protein, 15 aa, Homo sapiens
  CDR3 for beta chain variable domain of TCR clone 370472 (TRBV7-8, TRBJ1-5)
CASSLEGSGNQPQHF

SEQ ID NO: 740945 - protein, 16 aa, Homo sapiens
  CDR3 for alpha chain variable domain of TCR clone 370473 (TRAV1-2, TRAJ10)
CAVRWVLTGVGNKLTF

SEQ ID NO: 740946 - protein, 12 aa, Homo sapiens
  CDR3 for beta chain variable domain of TCR clone 370473 (TRBV7-8, TRBJ2-7)
CASSLGDREQYF

SEQ ID NO: 740947 - protein, 12 aa, Homo sapiens
  CDR3 for alpha chain variable domain of TCR clone 370474 (TRAV8-3, TRAJ20)
CAVDFNDYKLSF

SEQ ID NO: 740948 - protein, 16 aa, Homo sapiens
  CDR3 for beta chain variable domain of TCR clone 370474 (TRBV4-2, TRBJ1-1)
CASSPSPGRAAPEAFF

SEQ ID NO: 740949 - protein, 12 aa, Homo sapiens
  CDR3 for alpha chain variable domain of TCR clone 370475 (TRAV16, TRAJ10)
CSRTGGGNKLTF

SEQ ID NO: 740950 - protein, 14 aa, Homo sapiens
  CDR3 for beta chain variable domain of TCR clone 370475 (TRBV19, TRBJ2-5)
CASSPPGVRETQYF

SEQ ID NO: 740951 - protein, 14 aa, Homo sapiens
  CDR3 for alpha chain variable domain of TCR clone 370476 (TRAV1-2, TRAJ16)
CAVNRFSDCQKLLF

SEQ ID NO: 740952 - protein, 15 aa, Homo sapiens
  CDR3 for beta chain variable domain of TCR clone 370476 (TRBV5-8, TRBJ1-1)
CASSFSGTSLKGAFF

SEQ ID NO: 740953 - protein, 13 aa, Homo sapiens
  CDR3 for alpha chain variable domain of TCR clone 370477 (TRAV2, TRAJ35)
CAPRVGFGNGLHC

SEQ ID NO: 740954 - protein, 15 aa, Homo sapiens
  CDR3 for beta chain variable domain of TCR clone 370477 (TRBV6-3, TRBJ2-7)
CASSSPGTVFYEQYF

SEQ ID NO: 740955 - protein, 13 aa, Homo sapiens
  CDR3 for alpha chain variable domain of TCR clone 370478 (TRAV3, TRAJ41)
CAVSSNSGYALNF

SEQ ID NO: 740956 - protein, 12 aa, Homo sapiens
  CDR3 for beta chain variable domain of TCR clone 370478 (TRBV2, TRBJ2-1)
CASRPGPREQFV

SEQ ID NO: 740957 - protein, 12 aa, Homo sapiens
  CDR3 for alpha chain variable domain of TCR clone 370479 (TRAV30, TRAJ43)
CGTEERGDNMRF

SEQ ID NO: 740958 - protein, 11 aa, Homo sapiens
  CDR3 for beta chain variable domain of TCR clone 370479 (TRBV29-1, TRBJ2-5)
CSEDRTGTQYF

SEQ ID NO: 740959 - protein, 15 aa, Homo sapiens
  CDR3 for alpha chain variable domain of TCR clone 370480 (TRAV26-1, TRAJ44)
CIARVPFGTASKLTF

SEQ ID NO: 740960 - protein, 17 aa, Homo sapiens
  CDR3 for beta chain variable domain of TCR clone 370480 (TRBV24-1, TRBJ2-4)
CATSDAEARGVRKIQYF

SEQ ID NO: 740961 - protein, 13 aa, Homo sapiens
  CDR3 for alpha chain variable domain of TCR clone 370481 (TRAV16, TRAJ39)
CALSKNNAGNMLH

SEQ ID NO: 740962 - protein, 13 aa, Homo sapiens
  CDR3 for beta chain variable domain of TCR clone 370481 (TRBV20-1, TRBJ1-1)
CSAFDRENTEAFF

SEQ ID NO: 740963 - protein, 14 aa, Homo sapiens
  CDR3 for alpha chain variable domain of TCR clone 370482 (TRAV12-3, TRAJ58)
CAMSTETSGSRLTF

SEQ ID NO: 740964 - protein, 13 aa, Homo sapiens
  CDR3 for beta chain variable domain of TCR clone 370482 (TRBV7-3, TRBJ1-1)
CASSQDWGAEAFF

SEQ ID NO: 740965 - protein, 13 aa, Homo sapiens
  CDR3 for alpha chain variable domain of TCR clone 370483 (TRAV8-6, TRAJ49)
CAVITNTGNQFYF

SEQ ID NO: 740966 - protein, 12 aa, Homo sapiens
  CDR3 for beta chain variable domain of TCR clone 370483 (TRBV11-2, TRBJ2-5)
CASSLVGETQYF

SEQ ID NO: 740967 - protein, 17 aa, Homo sapiens
  CDR3 for alpha chain variable domain of TCR clone 370484 (TRAV3, TRAJ6)
YAVRDGPRAGGSYIPTF

SEQ ID NO: 740968 - protein, 18 aa, Homo sapiens
  CDR3 for beta chain variable domain of TCR clone 370484 (TRBV7-9, TRBJ2-7)
CASSLTTSGSRTWYEQYF

SEQ ID NO: 740969 - protein, 16 aa, Homo sapiens
  CDR3 for alpha chain variable domain of TCR clone 370485 (TRAV12-2, TRAJ32)
CAVNLSQGGATNKLIF

SEQ ID NO: 740970 - protein, 13 aa, Homo sapiens
  CDR3 for beta chain variable domain of TCR clone 370485 (TRBV9, TRBJ2-2)
CASSPRPAGELFF

SEQ ID NO: 740971 - protein, 17 aa, Homo sapiens
  CDR3 for alpha chain variable domain of TCR clone 370486 (TRAV3, TRAJ42)
CAVRDRDYGGSQGNLIF

SEQ ID NO: 740972 - protein, 13 aa, Homo sapiens
  CDR3 for beta chain variable domain of TCR clone 370486 (TRBV20-1, TRBJ2-5)
CSARRGTGATKYF

SEQ ID NO: 740973 - protein, 13 aa, Homo sapiens
  CDR3 for alpha chain variable domain of TCR clone 370487 (TRAV8-3, TRAJ43)
CAVGPDNNNDMRF

SEQ ID NO: 740974 - protein, 14 aa, Homo sapiens
  CDR3 for beta chain variable domain of TCR clone 370487 (TRBV19, TRBJ2-1)
FASPTFVLSGEQFF

SEQ ID NO: 740975 - protein, 14 aa, Homo sapiens
  CDR3 for alpha chain variable domain of TCR clone 370488 (TRAV35, TRAJ33)
CAGSSQDSNYQLIW

SEQ ID NO: 740976 - protein, 14 aa, Homo sapiens
  CDR3 for beta chain variable domain of TCR clone 370488 (TRBV7-3, TRBJ1-1)
CASSVKGGNTEAFF

SEQ ID NO: 740977 - protein, 15 aa, Homo sapiens
  CDR3 for alpha chain variable domain of TCR clone 370489 (TRAV3, TRAJ5)
CAVRDLDTVRRAPTF

SEQ ID NO: 740978 - protein, 13 aa, Homo sapiens
  CDR3 for beta chain variable domain of TCR clone 370489 (TRBV12-4, TRBJ2-7)
CASSPTETYEQYF

SEQ ID NO: 740979 - protein, 15 aa, Homo sapiens
  CDR3 for alpha chain variable domain of TCR clone 370490 (TRAV8-3, TRAJ23)
CAVGDRYNQGGKLIF

SEQ ID NO: 740980 - protein, 15 aa, Homo sapiens
  CDR3 for beta chain variable domain of TCR clone 370490 (TRBV2, TRBJ2-1)
CASSELAGSYNEQFF

SEQ ID NO: 740981 - protein, 15 aa, Homo sapiens
  CDR3 for alpha chain variable domain of TCR clone 370491 (TRAV12-1, TRAJ39)
CVVSPRRNAGNMLTF

SEQ ID NO: 740982 - protein, 17 aa, Homo sapiens
  CDR3 for beta chain variable domain of TCR clone 370491 (TRBV13, TRBJ2-3)
CASSLSRVAGGRNTQYF

SEQ ID NO: 740983 - protein, 20 aa, Homo sapiens
  CDR3 for alpha chain variable domain of TCR clone 370492 (TRAV12-2, TRAJ52)
SPVIQPPARAGGTSYGKLTF

SEQ ID NO: 740984 - protein, 16 aa, Homo sapiens
  CDR3 for beta chain variable domain of TCR clone 370492 (TRBV15, TRBJ1-2)
CATSRGPRTGGGGCTF

SEQ ID NO: 740985 - protein, 15 aa, Homo sapiens
  CDR3 for alpha chain variable domain of TCR clone 370493 (TRAV38-1, TRAJ37)
CAFIFGSGNTGKLIF

SEQ ID NO: 740986 - protein, 17 aa, Homo sapiens
  CDR3 for beta chain variable domain of TCR clone 370493 (TRBV18, TRBJ1-5)
CASSPTMGQGTNQPQHF

SEQ ID NO: 740987 - protein, 16 aa, Homo sapiens
  CDR3 for alpha chain variable domain of TCR clone 370494 (TRAV21, TRAJ52)
CAVTNAGGTSSGKLTF

SEQ ID NO: 740988 - protein, 11 aa, Homo sapiens
  CDR3 for beta chain variable domain of TCR clone 370494 (TRBV2, TRBJ1-1)
CASREGTEAFF

SEQ ID NO: 740989 - protein, 13 aa, Homo sapiens
  CDR3 for alpha chain variable domain of TCR clone 370495 (TRAV38-2/DV8, TRAJ34)
CAYRNYNTDKLIF

SEQ ID NO: 740990 - protein, 15 aa, Homo sapiens
  CDR3 for beta chain variable domain of TCR clone 370495 (TRBV20-1, TRBJ2-5)
CSAGGTGGLHETQYF

SEQ ID NO: 740991 - protein, 11 aa, Homo sapiens
  CDR3 for alpha chain variable domain of TCR clone 370496 (TRAV4, TRAJ20)
CLVGDKVTTTS

SEQ ID NO: 740992 - protein, 15 aa, Homo sapiens
  CDR3 for beta chain variable domain of TCR clone 370496 (TRBV18, TRBJ2-7)
CASSPSLTGNYEQYF

SEQ ID NO: 740993 - protein, 17 aa, Homo sapiens
  CDR3 for alpha chain variable domain of TCR clone 370497 (TRAV3, TRAJ6)
CAVRDGPRAGGSDIPTL

SEQ ID NO: 740994 - protein, 18 aa, Homo sapiens
  CDR3 for beta chain variable domain of TCR clone 370497 (TRBV7-3, TRBJ2-3)
CASSSTGTYPGSTDTQYF

SEQ ID NO: 740995 - protein, 13 aa, Homo sapiens
  CDR3 for alpha chain variable domain of TCR clone 370498 (TRAV1-2, TRAJ9)
CAALNTGGFKTTF

SEQ ID NO: 740996 - protein, 10 aa, Homo sapiens
  CDR3 for beta chain variable domain of TCR clone 370498 (TRBV19, TRBJ1-1)
CASRQVEAFF

SEQ ID NO: 740997 - protein, 14 aa, Homo sapiens
  CDR3 for alpha chain variable domain of TCR clone 370499 (TRAV12-2, TRAJ36)
CAVNPPTGANNHFF

SEQ ID NO: 740998 - protein, 13 aa, Homo sapiens
  CDR3 for beta chain variable domain of TCR clone 370499 (TRBV20-1, TRBJ1-6)
CSAPTGLGSHLHF

SEQ ID NO: 740999 - protein, 11 aa, Homo sapiens
  CDR3 for alpha chain variable domain of TCR clone 370500 (TRAV13-2, TRAJ36)
CAETGANNLFF

SEQ ID NO: 741000 - protein, 13 aa, Homo sapiens
  CDR3 for beta chain variable domain of TCR clone 370500 (TRBV7-9, TRBJ2-4)
CATEGLAGNTQYF

SEQ ID NO: 741001 - protein, 12 aa, Homo sapiens
  CDR3 for alpha chain variable domain of TCR clone 370501 (TRAV21, TRAJ20)
CAVRGNDYKLIF

SEQ ID NO: 741002 - protein, 14 aa, Homo sapiens
  CDR3 for beta chain variable domain of TCR clone 370501 (TRBV7-8, TRBJ2-7)
CASSQTQGADEQYF

SEQ ID NO: 741003 - protein, 15 aa, Homo sapiens
  CDR3 for alpha chain variable domain of TCR clone 370502 (TRAV17, TRAJ57)
CATGPSQGGSEKLVF

SEQ ID NO: 741004 - protein, 15 aa, Homo sapiens
  CDR3 for beta chain variable domain of TCR clone 370502 (TRBV12-4, TRBJ1-5)
CASSFGQGGVQPQHF

SEQ ID NO: 741005 - protein, 13 aa, Homo sapiens
  CDR3 for alpha chain variable domain of TCR clone 370503 (TRAV17, TRAJ21)
CATDGGNFNQFYF

SEQ ID NO: 741006 - protein, 13 aa, Homo sapiens
  CDR3 for beta chain variable domain of TCR clone 370503 (TRBV11-3, TRBJ1-1)
CASTGSLNTEAFF

SEQ ID NO: 741007 - protein, 14 aa, Homo sapiens
  CDR3 for alpha chain variable domain of TCR clone 370504 (TRAV8-1, TRAJ49)
CASSIANTGNQSYF

SEQ ID NO: 741008 - protein, 13 aa, Homo sapiens
  CDR3 for beta chain variable domain of TCR clone 370504 (TRBV11-2, TRBJ2-5)
CASSFSSQETQYF

SEQ ID NO: 741009 - protein, 13 aa, Homo sapiens
  CDR3 for alpha chain variable domain of TCR clone 370505 (TRAV12-3, TRAJ40)
CAMSDSGTYKYIF

SEQ ID NO: 741010 - protein, 14 aa, Homo sapiens
  CDR3 for beta chain variable domain of TCR clone 370505 (TRBV7-8, TRBJ2-5)
CASSATGGQETQYF

SEQ ID NO: 741011 - protein, 10 aa, Homo sapiens
  CDR3 for alpha chain variable domain of TCR clone 370506 (TRAV8-1, TRAJ21)
CAVNGTKFYF

SEQ ID NO: 741012 - protein, 13 aa, Homo sapiens
  CDR3 for beta chain variable domain of TCR clone 370506 (TRBV12-4, TRBJ1-2)
CASSLRQGKGYTF

SEQ ID NO: 741013 - protein, 12 aa, Homo sapiens
  CDR3 for alpha chain variable domain of TCR clone 370507 (TRAV21, TRAJ13)
PGPSGGYQKVTF

SEQ ID NO: 741014 - protein, 16 aa, Homo sapiens
  CDR3 for beta chain variable domain of TCR clone 370507 (TRBV6-1, TRBJ2-5)
CASSETLDRGAETQYF

SEQ ID NO: 741015 - protein, 12 aa, Homo sapiens
  CDR3 for alpha chain variable domain of TCR clone 370508 (TRAV17, TRAJ31)
CATEQGNARLMF

SEQ ID NO: 741016 - protein, 18 aa, Homo sapiens
  CDR3 for beta chain variable domain of TCR clone 370508 (TRBV20-1, TRBJ2-6)
CSAETTPTHGSGANVLTF

SEQ ID NO: 741017 - protein, 11 aa, Homo sapiens
  CDR3 for alpha chain variable domain of TCR clone 370509 (TRAV21, TRAJ34)
CAHYNTDKLIF

SEQ ID NO: 741018 - protein, 12 aa, Homo sapiens
  CDR3 for beta chain variable domain of TCR clone 370509 (TRBV19, TRBJ1-5)
CASSIAQQPQHF

SEQ ID NO: 741019 - protein, 16 aa, Homo sapiens
  CDR3 for alpha chain variable domain of TCR clone 370510 (TRAV27, TRAJ53)
CAAPEGSGGSDYKLTF

SEQ ID NO: 741020 - protein, 15 aa, Homo sapiens
  CDR3 for beta chain variable domain of TCR clone 370510 (TRBV20-1, TRBJ1-1)
CSASRGVTGNTEAFF

SEQ ID NO: 741021 - protein, 14 aa, Homo sapiens
  CDR3 for alpha chain variable domain of TCR clone 370511 (TRAV12-3, TRAJ9)
CAMSVETGGFKTIF

SEQ ID NO: 741022 - protein, 14 aa, Homo sapiens
  CDR3 for beta chain variable domain of TCR clone 370511 (TRBV7-2, TRBJ2-7)
CASRSQGAAHEQYF

SEQ ID NO: 741023 - protein, 13 aa, Homo sapiens
  CDR3 for alpha chain variable domain of TCR clone 370512 (TRAV3, TRAJ21)
CAVREPDFNKFYF

SEQ ID NO: 741024 - protein, 13 aa, Homo sapiens
  CDR3 for beta chain variable domain of TCR clone 370512 (TRBV19, TRBJ1-2)
CASSVPGQDGDTF

SEQ ID NO: 741025 - protein, 11 aa, Homo sapiens
  CDR3 for alpha chain variable domain of TCR clone 370513 (TRAV21, TRAJ33)
CKMDSNYQLIW

SEQ ID NO: 741026 - protein, 15 aa, Homo sapiens
  CDR3 for beta chain variable domain of TCR clone 370513 (TRBV9, TRBJ1-6)
CASSVAGTGDSPLHF

SEQ ID NO: 741027 - protein, 13 aa, Homo sapiens
  CDR3 for alpha chain variable domain of TCR clone 370514 (TRAV12-1, TRAJ21)
CVVNLYNFNKFYF

SEQ ID NO: 741028 - protein, 20 aa, Homo sapiens
  CDR3 for beta chain variable domain of TCR clone 370514 (TRBV7-8, TRBJ2-1)
CASSLAHRLAGVRSYNEQFF

SEQ ID NO: 741029 - protein, 16 aa, Homo sapiens
  CDR3 for alpha chain variable domain of TCR clone 370515 (TRAV1-2, TRAJ10)
CAVRGVLTGRGNILTF

SEQ ID NO: 741030 - protein, 12 aa, Homo sapiens
  CDR3 for beta chain variable domain of TCR clone 370515 (TRBV7-8, TRBJ2-7)
CASSLGDREQYF

SEQ ID NO: 741031 - protein, 12 aa, Homo sapiens
  CDR3 for alpha chain variable domain of TCR clone 370516 (TRAV8-3, TRAJ26)
CAGDNYGQNFFF

SEQ ID NO: 741032 - protein, 16 aa, Homo sapiens
  CDR3 for beta chain variable domain of TCR clone 370516 (TRBV6-1, TRBJ2-5)
CASSETLDRGAETQYF

SEQ ID NO: 741033 - protein, 14 aa, Homo sapiens
  CDR3 for alpha chain variable domain of TCR clone 370517 (TRAV13-1, TRAJ44)
CAAKATGTASKLTF

SEQ ID NO: 741034 - protein, 18 aa, Homo sapiens
  CDR3 for beta chain variable domain of TCR clone 370517 (TRBV4-1, TRBJ2-3)
CASSQGGASGGATDTQYF

SEQ ID NO: 741035 - protein, 11 aa, Homo sapiens
  CDR3 for alpha chain variable domain of TCR clone 370518 (TRAV21, TRAJ48)
CAVDGNGKLTF

SEQ ID NO: 741036 - protein, 16 aa, Homo sapiens
  CDR3 for beta chain variable domain of TCR clone 370518 (TRBV19, TRBJ2-1)
CASSSKGTRSYNEQFF

SEQ ID NO: 741037 - protein, 17 aa, Homo sapiens
  CDR3 for alpha chain variable domain of TCR clone 370519 (TRAV2, TRAJ36)
CAVEVRGNWGKQPLLWD

SEQ ID NO: 741038 - protein, 14 aa, Homo sapiens
  CDR3 for beta chain variable domain of TCR clone 370519 (TRBV7-9, TRBJ2-5)
CASSLDTAQETQYF

SEQ ID NO: 741039 - protein, 14 aa, Homo sapiens
  CDR3 for alpha chain variable domain of TCR clone 370520 (TRAV8-3, TRAJ4)
CAVGASGGYIKLIF

SEQ ID NO: 741040 - protein, 13 aa, Homo sapiens
  CDR3 for beta chain variable domain of TCR clone 370520 (TRBV18, TRBJ2-5)
CASSLQGQETQYF

SEQ ID NO: 741041 - protein, 15 aa, Homo sapiens
  CDR3 for alpha chain variable domain of TCR clone 370521 (TRAV26-1, TRAJ48)
CIVRVGDFGNEKLTF

SEQ ID NO: 741042 - protein, 17 aa, Homo sapiens
  CDR3 for beta chain variable domain of TCR clone 370521 (TRBV4-1, TRBJ1-4)
CASSQEGPRGVEEKLFF

SEQ ID NO: 741043 - protein, 14 aa, Homo sapiens
  CDR3 for alpha chain variable domain of TCR clone 370522 (TRAV13-1, TRAJ40)
CAARSTPGTYTYIF

SEQ ID NO: 741044 - protein, 15 aa, Homo sapiens
  CDR3 for beta chain variable domain of TCR clone 370522 (TRBV18, TRBJ1-5)
CASSETGGNNQPQHF

SEQ ID NO: 741045 - protein, 13 aa, Homo sapiens
  CDR3 for alpha chain variable domain of TCR clone 370523 (TRAV12-3, TRAJ13)
CAMGTGGYQKVTF

SEQ ID NO: 741046 - protein, 13 aa, Homo sapiens
  CDR3 for beta chain variable domain of TCR clone 370523 (TRBV7-2, TRBJ2-5)
CQQHRGELKTQHF

SEQ ID NO: 741047 - protein, 12 aa, Homo sapiens
  CDR3 for alpha chain variable domain of TCR clone 370524 (TRAV35, TRAJ30)
CSGLNRDDKIIF

SEQ ID NO: 741048 - protein, 15 aa, Homo sapiens
  CDR3 for beta chain variable domain of TCR clone 370524 (TRBV9, TRBJ1-6)
CASSVAGTGDSPLHF

SEQ ID NO: 741049 - protein, 18 aa, Homo sapiens
  CDR3 for alpha chain variable domain of TCR clone 370525 (TRAV29/DV5, TRAJ53)
CSVLLCSKRGGSNYKLTF

SEQ ID NO: 741050 - protein, 17 aa, Homo sapiens
  CDR3 for beta chain variable domain of TCR clone 370525 (TRBV7-8, TRBJ2-6)
CASSGGTGGAGANVLTF

SEQ ID NO: 741051 - protein, 15 aa, Homo sapiens
  CDR3 for alpha chain variable domain of TCR clone 370526 (TRAV35, TRAJ41)
CAGQLFSNSGYALNF

SEQ ID NO: 741052 - protein, 12 aa, Homo sapiens
  CDR3 for beta chain variable domain of TCR clone 370526 (TRBV11-2, TRBJ2-2)
CASSLPTGELFF

SEQ ID NO: 741053 - protein, 15 aa, Homo sapiens
  CDR3 for alpha chain variable domain of TCR clone 370527 (TRAV2, TRAJ15)
CAVGGRNQAGTALIF

SEQ ID NO: 741054 - protein, 13 aa, Homo sapiens
  CDR3 for beta chain variable domain of TCR clone 370527 (TRBV2, TRBJ1-5)
CATAGPGNQPQHF

SEQ ID NO: 741055 - protein, 15 aa, Homo sapiens
  CDR3 for alpha chain variable domain of TCR clone 370528 (TRAV3, TRAJ32)
CAVSSYGGATNKLIF

SEQ ID NO: 741056 - protein, 13 aa, Homo sapiens
  CDR3 for beta chain variable domain of TCR clone 370528 (TRBV20-1, TRBJ2-7)
FSARPSTNYEQYF

SEQ ID NO: 741057 - protein, 14 aa, Homo sapiens
  CDR3 for alpha chain variable domain of TCR clone 370529 (TRAV38-1, TRAJ45)
CASHSGGGSDGLTF

SEQ ID NO: 741058 - protein, 13 aa, Homo sapiens
  CDR3 for beta chain variable domain of TCR clone 370529 (TRBV10-3, TRBJ1-2)
CAISDRDSYGYTF

SEQ ID NO: 741059 - protein, 16 aa, Homo sapiens
  CDR3 for alpha chain variable domain of TCR clone 370530 (TRAV26-1, TRAJ53)
CIVRVAMGGSNYKLTF

SEQ ID NO: 741060 - protein, 14 aa, Homo sapiens
  CDR3 for beta chain variable domain of TCR clone 370530 (TRBV2, TRBJ1-5)
CASSENRGGQPQHF

SEQ ID NO: 741061 - protein, 13 aa, Homo sapiens
  CDR3 for alpha chain variable domain of TCR clone 370531 (TRAV12-2, TRAJ10)
CAVPTGGGNKLTF

SEQ ID NO: 741062 - protein, 14 aa, Homo sapiens
  CDR3 for beta chain variable domain of TCR clone 370531 (TRBV6-1, TRBJ1-3)
CASVQGGGWKHHIF

SEQ ID NO: 741063 - protein, 13 aa, Homo sapiens
  CDR3 for alpha chain variable domain of TCR clone 370532 (TRAV13-2, TRAJ15)
CAERPQAGTALIF

SEQ ID NO: 741064 - protein, 15 aa, Homo sapiens
  CDR3 for beta chain variable domain of TCR clone 370532 (TRBV7-9, TRBJ1-6)
CASSSPGRGNSPLHF

SEQ ID NO: 741065 - protein, 14 aa, Homo sapiens
  CDR3 for alpha chain variable domain of TCR clone 370533 (TRAV12-3, TRAJ17)
CVVNYKAAGNKLTF

SEQ ID NO: 741066 - protein, 17 aa, Homo sapiens
  CDR3 for beta chain variable domain of TCR clone 370533 (TRBV20-1, TRBJ2-1)
CSASSSGLAGSYNEQFF

SEQ ID NO: 741067 - protein, 17 aa, Homo sapiens
  CDR3 for alpha chain variable domain of TCR clone 370534 (TRAV38-2/DV8, TRAJ38)
CAYRSARGAGNNHKLIW

SEQ ID NO: 741068 - protein, 13 aa, Homo sapiens
  CDR3 for beta chain variable domain of TCR clone 370534 (TRBV6-5, TRBJ2-1)
CASRGRVGNEQFF

SEQ ID NO: 741069 - protein, 14 aa, Homo sapiens
  CDR3 for alpha chain variable domain of TCR clone 370535 (TRAV1-2, TRAJ16)
CAVNRFSDGQKLLF

SEQ ID NO: 741070 - protein, 16 aa, Homo sapiens
  CDR3 for beta chain variable domain of TCR clone 370535 (TRBV20-1, TRBJ1-4)
CSAPEQGLLTNEKLFF

SEQ ID NO: 741071 - protein, 14 aa, Homo sapiens
  CDR3 for alpha chain variable domain of TCR clone 370536 (TRAV16, TRAJ31)
CALSGRNNNARLMF

SEQ ID NO: 741072 - protein, 12 aa, Homo sapiens
  CDR3 for beta chain variable domain of TCR clone 370536 (TRBV11-2, TRBJ1-2)
CASSREGDGDTF

SEQ ID NO: 741073 - protein, 14 aa, Homo sapiens
  CDR3 for alpha chain variable domain of TCR clone 370537 (TRAV23/DV6, TRAJ17)
CAARGRAAGNKLTF

SEQ ID NO: 741074 - protein, 19 aa, Homo sapiens
  CDR3 for beta chain variable domain of TCR clone 370537 (TRBV19, TRBJ2-5)
CASSIGQVTDFFLGETQYF

SEQ ID NO: 741075 - protein, 13 aa, Homo sapiens
  CDR3 for alpha chain variable domain of TCR clone 370538 (TRAV1-2, TRAJ9)
CAALNTGGFNTIF

SEQ ID NO: 741076 - protein, 16 aa, Homo sapiens
  CDR3 for beta chain variable domain of TCR clone 370538 (TRBV20-1, TRBJ1-4)
CSAPGQGLLTNEKLFF

SEQ ID NO: 741077 - protein, 14 aa, Homo sapiens
  CDR3 for alpha chain variable domain of TCR clone 370539 (TRAV38-1, TRAJ40)
CALRPTSGTYKYIF

SEQ ID NO: 741078 - protein, 14 aa, Homo sapiens
  CDR3 for beta chain variable domain of TCR clone 370539 (TRBV25-1, TRBJ1-1)
RASTHLGGNTAAFF

SEQ ID NO: 741079 - protein, 13 aa, Homo sapiens
  CDR3 for alpha chain variable domain of TCR clone 370540 (TRAV16, TRAJ11)
CALTQSGYSTLTF

SEQ ID NO: 741080 - protein, 17 aa, Homo sapiens
  CDR3 for beta chain variable domain of TCR clone 370540 (TRBV13, TRBJ2-3)
CASSLSRVAGGRNTQYF

SEQ ID NO: 741081 - protein, 17 aa, Homo sapiens
  CDR3 for alpha chain variable domain of TCR clone 370541 (TRAV26-1, TRAJ28)
CIVRVPDSGAGSYQLTF

SEQ ID NO: 741082 - protein, 17 aa, Homo sapiens
  CDR3 for beta chain variable domain of TCR clone 370541 (TRBV28, TRBJ2-7)
CASSPLPAGGRSYEQYF

SEQ ID NO: 741083 - protein, 16 aa, Homo sapiens
  CDR3 for alpha chain variable domain of TCR clone 370542 (TRAV30, TRAJ28)
CGTDKYSGAGSYQLTF

SEQ ID NO: 741084 - protein, 15 aa, Homo sapiens
  CDR3 for beta chain variable domain of TCR clone 370542 (TRBV25-1, TRBJ2-5)
CASSDTRGYQETQYF

SEQ ID NO: 741085 - protein, 16 aa, Homo sapiens
  CDR3 for alpha chain variable domain of TCR clone 370543 (TRAV8-3, TRAJ8)
CAVPRDGNTGFQKLVF

SEQ ID NO: 741086 - protein, 16 aa, Homo sapiens
  CDR3 for beta chain variable domain of TCR clone 370543 (TRBV11-2, TRBJ2-7)
CASSPTTGGVSYEQYF

SEQ ID NO: 741087 - protein, 14 aa, Homo sapiens
  CDR3 for alpha chain variable domain of TCR clone 370544 (TRAV12-3, TRAJ10)
SHLPLTGGGNKLTF

SEQ ID NO: 741088 - protein, 12 aa, Homo sapiens
  CDR3 for beta chain variable domain of TCR clone 370544 (TRBV7-9, TRBJ1-1)
CASSLVRGEAFF

SEQ ID NO: 741089 - protein, 12 aa, Homo sapiens
  CDR3 for alpha chain variable domain of TCR clone 370545 (TRAV17, TRAJ12)
CATLRSSYKLIF

SEQ ID NO: 741090 - protein, 16 aa, Homo sapiens
  CDR3 for beta chain variable domain of TCR clone 370545 (TRBV28, TRBJ2-7)
CASSLLFETGGPEQYV

SEQ ID NO: 741091 - protein, 13 aa, Homo sapiens
  CDR3 for alpha chain variable domain of TCR clone 370546 (TRAV21, TRAJ15)
CAFANQAGTALIF

SEQ ID NO: 741092 - protein, 13 aa, Homo sapiens
  CDR3 for beta chain variable domain of TCR clone 370546 (TRBV10-3, TRBJ2-7)
CASKLAVNYEQYF

SEQ ID NO: 741093 - protein, 13 aa, Homo sapiens
  CDR3 for alpha chain variable domain of TCR clone 370547 (TRAV13-2, TRAJ53)
CAENMGSNYKLTF

SEQ ID NO: 741094 - protein, 15 aa, Homo sapiens
  CDR3 for beta chain variable domain of TCR clone 370547 (TRBV4-1, TRBJ2-2)
CISAPSQENTGELFF

SEQ ID NO: 741095 - protein, 13 aa, Homo sapiens
  CDR3 for alpha chain variable domain of TCR clone 370548 (TRAV21, TRAJ37)
CAVSSGNTGKLLF

SEQ ID NO: 741096 - protein, 17 aa, Homo sapiens
  CDR3 for beta chain variable domain of TCR clone 370548 (TRBV5-1, TRBJ2-5)
CASSLLGLAANQETQYF

SEQ ID NO: 741097 - protein, 14 aa, Homo sapiens
  CDR3 for alpha chain variable domain of TCR clone 370549 (TRAV1-2, TRAJ8)
CAVREDTGFQKLVF

SEQ ID NO: 741098 - protein, 12 aa, Homo sapiens
  CDR3 for beta chain variable domain of TCR clone 370549 (TRBV7-9, TRBJ2-7)
CASSIKREKQYF

SEQ ID NO: 741099 - protein, 21 aa, Homo sapiens
  CDR3 for alpha chain variable domain of TCR clone 370550 (TRAV3, )
CAVRPTPDIQNPDPAAYQLRD

SEQ ID NO: 741100 - protein, 15 aa, Homo sapiens
  CDR3 for beta chain variable domain of TCR clone 370550 (TRBV11-3, TRBJ2-5)
CASSDTSGGIETQYF

SEQ ID NO: 741101 - protein, 16 aa, Homo sapiens
  CDR3 for alpha chain variable domain of TCR clone 370551 (TRAV30, TRAJ24)
CGAEIVDADSWGKFQF

SEQ ID NO: 741102 - protein, 16 aa, Homo sapiens
  CDR3 for beta chain variable domain of TCR clone 370551 (TRBV9, TRBJ2-1)
CASSALGGIGNNEQFF

SEQ ID NO: 741103 - protein, 16 aa, Homo sapiens
  CDR3 for alpha chain variable domain of TCR clone 370552 (TRAV8-1, TRAJ33)
CAGNARGGDSNYQLIW

SEQ ID NO: 741104 - protein, 11 aa, Homo sapiens
  CDR3 for beta chain variable domain of TCR clone 370552 (TRBV11-2, TRBJ2-2)
CASSLPGELFF

SEQ ID NO: 741105 - protein, 16 aa, Homo sapiens
  CDR3 for alpha chain variable domain of TCR clone 370553 (TRAV30, TRAJ24)
CGTELVDADSWGKFQF

SEQ ID NO: 741106 - protein, 16 aa, Homo sapiens
  CDR3 for beta chain variable domain of TCR clone 370553 (TRBV2, TRBJ1-3)
CASSGGAGRSGNTIYF

SEQ ID NO: 741107 - protein, 12 aa, Homo sapiens
  CDR3 for alpha chain variable domain of TCR clone 370554 (TRAV21, TRAJ3)
CCFYSSASKMIF

SEQ ID NO: 741108 - protein, 12 aa, Homo sapiens
  CDR3 for beta chain variable domain of TCR clone 370554 (TRBV11-2, TRBJ2-2)
CASSLGGGELFF

SEQ ID NO: 741109 - protein, 15 aa, Homo sapiens
  CDR3 for alpha chain variable domain of TCR clone 370555 (TRAV26-1, TRAJ29)
CIVRVEGSGNTPLVF

SEQ ID NO: 741110 - protein, 15 aa, Homo sapiens
  CDR3 for beta chain variable domain of TCR clone 370555 (TRBV7-9, TRBJ2-3)
CASSPRTGSTDTQYF

SEQ ID NO: 741111 - protein, 13 aa, Homo sapiens
  CDR3 for alpha chain variable domain of TCR clone 370556 (TRAV13-2, TRAJ22)
CLGWISSARQLTF

SEQ ID NO: 741112 - protein, 15 aa, Homo sapiens
  CDR3 for beta chain variable domain of TCR clone 370556 (TRBV5-1, TRBJ1-4)
FAPAAWKDGNEKLFF

SEQ ID NO: 741113 - protein, 17 aa, Homo sapiens
  CDR3 for alpha chain variable domain of TCR clone 370557 (TRAV3, TRAJ6)
CAVRDGPRPGGSYIPKF

SEQ ID NO: 741114 - protein, 14 aa, Homo sapiens
  CDR3 for beta chain variable domain of TCR clone 370557 (TRBV7-2, TRBJ2-7)
CASSPKTSFYEQFF

SEQ ID NO: 741115 - protein, 17 aa, Homo sapiens
  CDR3 for alpha chain variable domain of TCR clone 370558 (TRAV3, TRAJ7)
CAVRDMSPLEGTTDSLL

SEQ ID NO: 741116 - protein, 17 aa, Homo sapiens
  CDR3 for beta chain variable domain of TCR clone 370558 (TRBV7-9, TRBJ2-6)
CASSFGAGYSGANVLTF

SEQ ID NO: 741117 - protein, 12 aa, Homo sapiens
  CDR3 for alpha chain variable domain of TCR clone 370559 (TRAV12-3, TRAJ17)
CAMTLTGNKLTF

SEQ ID NO: 741118 - protein, 18 aa, Homo sapiens
  CDR3 for beta chain variable domain of TCR clone 370559 (TRBV11-2, TRBJ2-7)
CASSWRTVQTGQSYEQYF

SEQ ID NO: 741119 - protein, 13 aa, Homo sapiens
  CDR3 for alpha chain variable domain of TCR clone 370560 (TRAV8-2, TRAJ49)
CVVSPSTGNKFYF

SEQ ID NO: 741120 - protein, 14 aa, Homo sapiens
  CDR3 for beta chain variable domain of TCR clone 370560 (TRBV11-2, TRBJ2-7)
CASSRSGGAGEQYF

SEQ ID NO: 741121 - protein, 13 aa, Homo sapiens
  CDR3 for alpha chain variable domain of TCR clone 370561 (TRAV29/DV5, TRAJ34)
CAARVDNTAKLIF

SEQ ID NO: 741122 - protein, 13 aa, Homo sapiens
  CDR3 for beta chain variable domain of TCR clone 370561 (TRBV4-2, TRBJ1-1)
CASSQAGNTEAFF

SEQ ID NO: 741123 - protein, 12 aa, Homo sapiens
  CDR3 for alpha chain variable domain of TCR clone 370562 (TRAV13-1, TRAJ21)
CAAKEGFNKFHF

SEQ ID NO: 741124 - protein, 18 aa, Homo sapiens
  CDR3 for beta chain variable domain of TCR clone 370562 (TRBV20-1, TRBJ2-6)
CSAETTPTHGSGANVLTF

SEQ ID NO: 741125 - protein, 12 aa, Homo sapiens
  CDR3 for alpha chain variable domain of TCR clone 370563 (TRAV12-1, TRAJ34)
CVVAGATDKLIF

SEQ ID NO: 741126 - protein, 12 aa, Homo sapiens
  CDR3 for beta chain variable domain of TCR clone 370563 (TRBV7-9, TRBJ1-1)
CASSLGRGEAFF

SEQ ID NO: 741127 - protein, 14 aa, Homo sapiens
  CDR3 for alpha chain variable domain of TCR clone 370564 (TRAV8-4, TRAJ13)
GAVTLSGGYQKGTF

SEQ ID NO: 741128 - protein, 14 aa, Homo sapiens
  CDR3 for beta chain variable domain of TCR clone 370564 (TRBV7-2, TRBJ1-2)
CASSQTGSTYGYTF

SEQ ID NO: 741129 - protein, 15 aa, Homo sapiens
  CDR3 for alpha chain variable domain of TCR clone 370565 (TRAV3, TRAJ22)
CAVRDRGGSARQLTF

SEQ ID NO: 741130 - protein, 14 aa, Homo sapiens
  CDR3 for beta chain variable domain of TCR clone 370565 (TRBV19, TRBJ2-1)
CASSRLAYINEQFF

SEQ ID NO: 741131 - protein, 16 aa, Homo sapiens
  CDR3 for alpha chain variable domain of TCR clone 370566 (TRAV30, TRAJ24)
CGTEIVDADSWGKFQV

SEQ ID NO: 741132 - protein, 14 aa, Homo sapiens
  CDR3 for beta chain variable domain of TCR clone 370566 (TRBV19, TRBJ2-1)
CASPTVVVSGEQFF

SEQ ID NO: 741133 - protein, 13 aa, Homo sapiens
  CDR3 for alpha chain variable domain of TCR clone 370567 (TRAV12-1, TRAJ22)
CVASGGSARQLTF

SEQ ID NO: 741134 - protein, 14 aa, Homo sapiens
  CDR3 for beta chain variable domain of TCR clone 370567 (TRBV11-3, TRBJ1-2)
CASSLGSGTYGYAF

SEQ ID NO: 741135 - protein, 14 aa, Homo sapiens
  CDR3 for alpha chain variable domain of TCR clone 370568 (TRAV17, TRAJ34)
CATDSLEGTDKIIF

SEQ ID NO: 741136 - protein, 13 aa, Homo sapiens
  CDR3 for beta chain variable domain of TCR clone 370568 (TRBV11-2, TRBJ2-7)
CASSGTRPYEQYF

SEQ ID NO: 741137 - protein, 10 aa, Homo sapiens
  CDR3 for alpha chain variable domain of TCR clone 370569 (TRAV3, TRAJ30)
CAVREIEIIF

SEQ ID NO: 741138 - protein, 14 aa, Homo sapiens
  CDR3 for beta chain variable domain of TCR clone 370569 (TRBV15, TRBJ2-3)
CATRSWTSTDTQYF

SEQ ID NO: 741139 - protein, 12 aa, Homo sapiens
  CDR3 for alpha chain variable domain of TCR clone 370570 (TRAV16, TRAJ27)
CALSTNAGKSTF

SEQ ID NO: 741140 - protein, 15 aa, Homo sapiens
  CDR3 for beta chain variable domain of TCR clone 370570 (TRBV19, TRBJ2-2)
CASMGETVLPGELFF

SEQ ID NO: 741141 - protein, 12 aa, Homo sapiens
  CDR3 for alpha chain variable domain of TCR clone 370571 (TRAV8-3, TRAJ26)
CAGDNYGQNFVF

SEQ ID NO: 741142 - protein, 11 aa, Homo sapiens
  CDR3 for beta chain variable domain of TCR clone 370571 (TRBV29-1, TRBJ2-5)
CSEDRTGTQYS

SEQ ID NO: 741143 - protein, 13 aa, Homo sapiens
  CDR3 for alpha chain variable domain of TCR clone 370572 (TRAV30, TRAJ49)
CGTESQPVTSSIL

SEQ ID NO: 741144 - protein, 15 aa, Homo sapiens
  CDR3 for beta chain variable domain of TCR clone 370572 (TRBV5-1, TRBJ2-2)
CASSSQGGNTGELFF

SEQ ID NO: 741145 - protein, 16 aa, Homo sapiens
  CDR3 for alpha chain variable domain of TCR clone 370573 (TRAV17, TRAJ16)
CARPTFQMARSCSLQG

SEQ ID NO: 741146 - protein, 15 aa, Homo sapiens
  CDR3 for beta chain variable domain of TCR clone 370573 (TRBV18, TRBJ2-1)
CASSPPSASYNEQFF

SEQ ID NO: 741147 - protein, 15 aa, Homo sapiens
  CDR3 for alpha chain variable domain of TCR clone 370574 (TRAV27, TRAJ38)
CAARRNAGNNRKLSW

SEQ ID NO: 741148 - protein, 15 aa, Homo sapiens
  CDR3 for beta chain variable domain of TCR clone 370574 (TRBV27, TRBJ2-7)
CASSTAGTGSYEQYF

SEQ ID NO: 741149 - protein, 13 aa, Homo sapiens
  CDR3 for alpha chain variable domain of TCR clone 370575 (TRAV2, TRAJ40)
CAVVTSGTYKYIF

SEQ ID NO: 741150 - protein, 15 aa, Homo sapiens
  CDR3 for beta chain variable domain of TCR clone 370575 (TRBV5-1, TRBJ2-7)
CASSLGDFTTYEQYF

SEQ ID NO: 741151 - protein, 13 aa, Homo sapiens
  CDR3 for alpha chain variable domain of TCR clone 370576 (TRAV8-1, TRAJ43)
CAVTSYGNNDMRF

SEQ ID NO: 741152 - protein, 15 aa, Homo sapiens
  CDR3 for beta chain variable domain of TCR clone 370576 (TRBV4-1, TRBJ2-5)
CASSQWDLYQETQYF

SEQ ID NO: 741153 - protein, 14 aa, Homo sapiens
  CDR3 for alpha chain variable domain of TCR clone 370577 (TRAV3, TRAJ9)
CAVRLNTGGFKTIF

SEQ ID NO: 741154 - protein, 16 aa, Homo sapiens
  CDR3 for beta chain variable domain of TCR clone 370577 (TRBV7-3, TRBJ2-1)
CASSLSSGGGAKEQFF

SEQ ID NO: 741155 - protein, 14 aa, Homo sapiens
  CDR3 for alpha chain variable domain of TCR clone 370578 (TRAV3, TRAJ28)
CAVRRGAGSYPLTF

SEQ ID NO: 741156 - protein, 16 aa, Homo sapiens
  CDR3 for beta chain variable domain of TCR clone 370578 (TRBV4-1, TRBJ2-7)
CASSQEWTSGPLEQYF

SEQ ID NO: 741157 - protein, 13 aa, Homo sapiens
  CDR3 for alpha chain variable domain of TCR clone 370579 (TRAV2, TRAJ40)
CAVFTSGTYKYIF

SEQ ID NO: 741158 - protein, 14 aa, Homo sapiens
  CDR3 for beta chain variable domain of TCR clone 370579 (TRBV19, TRBJ2-1)
CASPTFVLSSEQFF

SEQ ID NO: 741159 - protein, 11 aa, Homo sapiens
  CDR3 for alpha chain variable domain of TCR clone 370580 (TRAV21, TRAJ34)
CAHYNTDKLIF

SEQ ID NO: 741160 - protein, 11 aa, Homo sapiens
  CDR3 for beta chain variable domain of TCR clone 370580 (TRBV6-5, TRBJ1-1)
CATGTGGAAFF

SEQ ID NO: 741161 - protein, 18 aa, Homo sapiens
  CDR3 for alpha chain variable domain of TCR clone 370581 (TRAV23/DV6, TRAJ21)
CAASSGGGTTSKNFTLDL

SEQ ID NO: 741162 - protein, 11 aa, Homo sapiens
  CDR3 for beta chain variable domain of TCR clone 370581 (TRBV7-8, TRBJ2-7)
CASSLSLEQYF

SEQ ID NO: 741163 - protein, 15 aa, Homo sapiens
  CDR3 for alpha chain variable domain of TCR clone 370582 (TRAV3, TRAJ17)
CAVSPKEAERNKLTF

SEQ ID NO: 741164 - protein, 12 aa, Homo sapiens
  CDR3 for beta chain variable domain of TCR clone 370582 (TRBV7-9, TRBJ1-6)
CASSLMTSPLHF

SEQ ID NO: 741165 - protein, 14 aa, Homo sapiens
  CDR3 for alpha chain variable domain of TCR clone 370583 (TRAV1-2, TRAJ8)
CAVREDTGFQQLVF

SEQ ID NO: 741166 - protein, 12 aa, Homo sapiens
  CDR3 for beta chain variable domain of TCR clone 370583 (TRBV24-1, TRBJ1-1)
CATLYPDTEAFF

SEQ ID NO: 741167 - protein, 14 aa, Homo sapiens
  CDR3 for alpha chain variable domain of TCR clone 370584 (TRAV2, TRAJ9)
CAVEDRSGGFKTIF

SEQ ID NO: 741168 - protein, 16 aa, Homo sapiens
  CDR3 for beta chain variable domain of TCR clone 370584 (TRBV28, TRBJ1-5)
CASSLTGQGWNQTQHF

SEQ ID NO: 741169 - protein, 13 aa, Homo sapiens
  CDR3 for alpha chain variable domain of TCR clone 370585 (TRAV12-3, TRAJ33)
CAMSVNSNYQLIW

SEQ ID NO: 741170 - protein, 13 aa, Homo sapiens
  CDR3 for beta chain variable domain of TCR clone 370585 (TRBV4-1, TRBJ2-2)
CASSQETTGELFF

SEQ ID NO: 741171 - protein, 13 aa, Homo sapiens
  CDR3 for alpha chain variable domain of TCR clone 370586 (TRAV30, TRAJ6)
CGFIEGRSYIPTF

SEQ ID NO: 741172 - protein, 16 aa, Homo sapiens
  CDR3 for beta chain variable domain of TCR clone 370586 (TRBV7-6, TRBJ2-3)
CASSARTSRGTDTQYF

SEQ ID NO: 741173 - protein, 14 aa, Homo sapiens
  CDR3 for alpha chain variable domain of TCR clone 370587 (TRAV12-3, TRAJ10)
SHLPLTVGGNKLTF

SEQ ID NO: 741174 - protein, 13 aa, Homo sapiens
  CDR3 for beta chain variable domain of TCR clone 370587 (TRBV9, TRBJ2-1)
CASSPSGGNEQFF

SEQ ID NO: 741175 - protein, 12 aa, Homo sapiens
  CDR3 for alpha chain variable domain of TCR clone 370588 (TRAV27, TRAJ13)
CPGVRGYQKVTF

SEQ ID NO: 741176 - protein, 16 aa, Homo sapiens
  CDR3 for beta chain variable domain of TCR clone 370588 (TRBV28, TRBJ2-1)
CASSSSYSGSLNEQFF

SEQ ID NO: 741177 - protein, 17 aa, Homo sapiens
  CDR3 for alpha chain variable domain of TCR clone 370589 (TRAV12-2, TRAJ36)
CAVKDNLSFGTGTRLTV

SEQ ID NO: 741178 - protein, 15 aa, Homo sapiens
  CDR3 for beta chain variable domain of TCR clone 370589 (TRBV28, TRBJ2-2)
CASTVAGANTGELFF

SEQ ID NO: 741179 - protein, 13 aa, Homo sapiens
  CDR3 for alpha chain variable domain of TCR clone 370590 (TRAV2, TRAJ40)
CAVVTSGTYKYIF

SEQ ID NO: 741180 - protein, 16 aa, Homo sapiens
  CDR3 for beta chain variable domain of TCR clone 370590 (TRBV19, TRBJ2-2)
CPSRSPGTGATGELFF

SEQ ID NO: 741181 - protein, 12 aa, Homo sapiens
  CDR3 for alpha chain variable domain of TCR clone 370591 (TRAV1-2, TRAJ33)
CAALDSNYQLIW

SEQ ID NO: 741182 - protein, 11 aa, Homo sapiens
  CDR3 for beta chain variable domain of TCR clone 370591 (TRBV12-4, TRBJ2-3)
CASTATDTQYF

SEQ ID NO: 741183 - protein, 13 aa, Homo sapiens
  CDR3 for alpha chain variable domain of TCR clone 370592 (TRAV1-2, TRAJ9)
CAVLNTGGFKTIF

SEQ ID NO: 741184 - protein, 14 aa, Homo sapiens
  CDR3 for beta chain variable domain of TCR clone 370592 (TRBV20-1, TRBJ2-3)
CSARGGTSTDMQYC

SEQ ID NO: 741185 - protein, 17 aa, Homo sapiens
  CDR3 for alpha chain variable domain of TCR clone 370593 (TRAV13-1, TRAJ31)
CAPRDRLMFGDGTQLVV

SEQ ID NO: 741186 - protein, 14 aa, Homo sapiens
  CDR3 for beta chain variable domain of TCR clone 370593 (TRBV18, TRBJ2-5)
CASSPGVSQETQYF

SEQ ID NO: 741187 - protein, 15 aa, Homo sapiens
  CDR3 for alpha chain variable domain of TCR clone 370594 (TRAV25, TRAJ52)
CAGRPGGTSYGKLTF

SEQ ID NO: 741188 - protein, 15 aa, Homo sapiens
  CDR3 for beta chain variable domain of TCR clone 370594 (TRBV7-8, TRBJ1-5)
CASSRGGGADQPQHF

SEQ ID NO: 741189 - protein, 12 aa, Homo sapiens
  CDR3 for alpha chain variable domain of TCR clone 370595 (TRAV12-3, TRAJ43)
CAISTNNNDMRF

SEQ ID NO: 741190 - protein, 15 aa, Homo sapiens
  CDR3 for beta chain variable domain of TCR clone 370595 (TRBV27, TRBJ1-4)
CASSPRHATNEELFF

SEQ ID NO: 741191 - protein, 13 aa, Homo sapiens
  CDR3 for alpha chain variable domain of TCR clone 370596 (TRAV29/DV5, TRAJ54)
CAAHLQGAQKLVF

SEQ ID NO: 741192 - protein, 16 aa, Homo sapiens
  CDR3 for beta chain variable domain of TCR clone 370596 (TRBV7-2, TRBJ2-7)
CASSCPLAGGPLEQYF

SEQ ID NO: 741193 - protein, 15 aa, Homo sapiens
  CDR3 for alpha chain variable domain of TCR clone 370597 (TRAV17, TRAJ57)
CATGPSQGGSEKLVF

SEQ ID NO: 741194 - protein, 16 aa, Homo sapiens
  CDR3 for beta chain variable domain of TCR clone 370597 (TRBV4-1, TRBJ1-2)
CASSQDRAVPVGGYTF

SEQ ID NO: 741195 - protein, 11 aa, Homo sapiens
  CDR3 for alpha chain variable domain of TCR clone 370598 (TRAV2, TRAJ13)
CASGGYQKVTF

SEQ ID NO: 741196 - protein, 12 aa, Homo sapiens
  CDR3 for beta chain variable domain of TCR clone 370598 (TRBV6-6, TRBJ2-5)
CASNRQSGTQYF

SEQ ID NO: 741197 - protein, 14 aa, Homo sapiens
  CDR3 for alpha chain variable domain of TCR clone 370599 (TRAV35, TRAJ33)
CAGSSQDSNYQLIW

SEQ ID NO: 741198 - protein, 14 aa, Homo sapiens
  CDR3 for beta chain variable domain of TCR clone 370599 (TRBV13, TRBJ2-5)
CASSLGPRGENQYF

SEQ ID NO: 741199 - protein, 14 aa, Homo sapiens
  CDR3 for alpha chain variable domain of TCR clone 370600 (TRAV8-6, TRAJ12)
CAVKAADSSYNLIF

SEQ ID NO: 741200 - protein, 15 aa, Homo sapiens
  CDR3 for beta chain variable domain of TCR clone 370600 (TRBV5-1, TRBJ2-5)
CASSLGLAEQETQYF

SEQ ID NO: 741201 - protein, 13 aa, Homo sapiens
  CDR3 for alpha chain variable domain of TCR clone 370601 (TRAV8-6, TRAJ41)
CAVSENSGYALNF

SEQ ID NO: 741202 - protein, 17 aa, Homo sapiens
  CDR3 for beta chain variable domain of TCR clone 370601 (TRBV7-2, TRBJ2-3)
CASSLEARGTSTDTRYF

SEQ ID NO: 741203 - protein, 15 aa, Homo sapiens
  CDR3 for alpha chain variable domain of TCR clone 370602 (TRAV12-3, TRAJ6)
CAMSATSGGSYIPTF

SEQ ID NO: 741204 - protein, 13 aa, Homo sapiens
  CDR3 for beta chain variable domain of TCR clone 370602 (TRBV20-1, TRBJ1-1)
CSAPLGGGTEAFF

SEQ ID NO: 741205 - protein, 12 aa, Homo sapiens
  CDR3 for alpha chain variable domain of TCR clone 370603 (TRAV1-2, TRAJ29)
CAVPSGNTPLVF

SEQ ID NO: 741206 - protein, 17 aa, Homo sapiens
  CDR3 for beta chain variable domain of TCR clone 370603 (TRBV4-2, TRBJ1-1)
CASTQFGGGSGNTEAFF

SEQ ID NO: 741207 - protein, 14 aa, Homo sapiens
  CDR3 for alpha chain variable domain of TCR clone 370604 (TRAV12-3, TRAJ35)
CAMSLIGFGNVLHC

SEQ ID NO: 741208 - protein, 14 aa, Homo sapiens
  CDR3 for beta chain variable domain of TCR clone 370604 (TRBV12-4, TRBJ1-1)
CASSLAGLEAFLDK

SEQ ID NO: 741209 - protein, 14 aa, Homo sapiens
  CDR3 for alpha chain variable domain of TCR clone 370605 (TRAV13-1, TRAJ40)
CAARSTSGTYKYIF

SEQ ID NO: 741210 - protein, 15 aa, Homo sapiens
  CDR3 for beta chain variable domain of TCR clone 370605 (TRBV18, TRBJ1-5)
CASSGTWGNNQPQHF

SEQ ID NO: 741211 - protein, 14 aa, Homo sapiens
  CDR3 for alpha chain variable domain of TCR clone 370606 (TRAV13-1, TRAJ10)
CAAKEPGGGNKITF

SEQ ID NO: 741212 - protein, 15 aa, Homo sapiens
  CDR3 for beta chain variable domain of TCR clone 370606 (TRBV27, TRBJ2-1)
CASSNGGGSSNEQFF

SEQ ID NO: 741213 - protein, 13 aa, Homo sapiens
  CDR3 for alpha chain variable domain of TCR clone 370607 (TRAV27, TRAJ41)
CAGEGNSGYALNF

SEQ ID NO: 741214 - protein, 12 aa, Homo sapiens
  CDR3 for beta chain variable domain of TCR clone 370607 (TRBV11-2, TRBJ2-2)
CASSLPTGELFF

SEQ ID NO: 741215 - protein, 16 aa, Homo sapiens
  CDR3 for alpha chain variable domain of TCR clone 370608 (TRAV17, TRAJ28)
CATASVPGAGSHQLTF

SEQ ID NO: 741216 - protein, 11 aa, Homo sapiens
  CDR3 for beta chain variable domain of TCR clone 370608 (TRBV7-9, TRBJ2-5)
CASSLGETQYF

SEQ ID NO: 741217 - protein, 18 aa, Homo sapiens
  CDR3 for alpha chain variable domain of TCR clone 370609 (TRAV2, TRAJ32)
CCLLLCFHYGGATNKLIF

SEQ ID NO: 741218 - protein, 16 aa, Homo sapiens
  CDR3 for beta chain variable domain of TCR clone 370609 (TRBV7-9, TRBJ2-7)
CASSYPDRKGGYEQYF

SEQ ID NO: 741219 - protein, 15 aa, Homo sapiens
  CDR3 for alpha chain variable domain of TCR clone 370610 (TRAV1-2, TRAJ30)
CAVGPHGNRDDKIIF

SEQ ID NO: 741220 - protein, 13 aa, Homo sapiens
  CDR3 for beta chain variable domain of TCR clone 370610 (TRBV4-1, TRBJ2-7)
CASSQGQAYEQYF

SEQ ID NO: 741221 - protein, 23 aa, Homo sapiens
  CDR3 for alpha chain variable domain of TCR clone 370611 (TRAV26-1, TRAJ38)
CIADNAGNNHIQKPDPPVYQLRD

SEQ ID NO: 741222 - protein, 13 aa, Homo sapiens
  CDR3 for beta chain variable domain of TCR clone 370611 (TRBV20-1, TRBJ1-1)
CSARGGGNTEAFF

SEQ ID NO: 741223 - protein, 14 aa, Homo sapiens
  CDR3 for alpha chain variable domain of TCR clone 370612 (TRAV1-2, TRAJ8)
CAVREDTGFQKLVF

SEQ ID NO: 741224 - protein, 14 aa, Homo sapiens
  CDR3 for beta chain variable domain of TCR clone 370612 (TRBV7-9, TRBJ1-1)
CASTPLQSYTEAFV

SEQ ID NO: 741225 - protein, 15 aa, Homo sapiens
  CDR3 for alpha chain variable domain of TCR clone 370613 (TRAV38-1, TRAJ37)
CAFIFGSGNTGKLIF

SEQ ID NO: 741226 - protein, 12 aa, Homo sapiens
  CDR3 for beta chain variable domain of TCR clone 370613 (TRBV6-5, TRBJ2-7)
CASSSGAYEQYF

SEQ ID NO: 741227 - protein, 13 aa, Homo sapiens
  CDR3 for alpha chain variable domain of TCR clone 370614 (TRAV12-2, TRAJ37)
GAGGSGNTGKLIF

SEQ ID NO: 741228 - protein, 17 aa, Homo sapiens
  CDR3 for beta chain variable domain of TCR clone 370614 (TRBV11-2, TRBJ2-1)
CASSLYPPGVEYNEQFF

SEQ ID NO: 741229 - protein, 14 aa, Homo sapiens
  CDR3 for alpha chain variable domain of TCR clone 370615 (TRAV12-2, TRAJ15)
CAPHTSQAGTALIF

SEQ ID NO: 741230 - protein, 16 aa, Homo sapiens
  CDR3 for beta chain variable domain of TCR clone 370615 (TRBV5-4, TRBJ2-3)
CASQQPGAGGADTQYF

SEQ ID NO: 741231 - protein, 23 aa, Homo sapiens
  CDR3 for alpha chain variable domain of TCR clone 370616 (TRAV26-1, TRAJ38)
CIADNAGNNHIQNPAPAVYQLRD

SEQ ID NO: 741232 - protein, 13 aa, Homo sapiens
  CDR3 for beta chain variable domain of TCR clone 370616 (TRBV20-1, TRBJ1-1)
CSARGGGSTEAFF

SEQ ID NO: 741233 - protein, 16 aa, Homo sapiens
  CDR3 for alpha chain variable domain of TCR clone 370617 (TRAV30, TRAJ24)
CGTEIVDADSWGKFQF

SEQ ID NO: 741234 - protein, 14 aa, Homo sapiens
  CDR3 for beta chain variable domain of TCR clone 370617 (TRBV19, TRBJ2-7)
CASNFRDTFTEMYF

SEQ ID NO: 741235 - protein, 16 aa, Homo sapiens
  CDR3 for alpha chain variable domain of TCR clone 370618 (TRAV26-1, TRAJ58)
CIVRVLGETSGSRLTF

SEQ ID NO: 741236 - protein, 14 aa, Homo sapiens
  CDR3 for beta chain variable domain of TCR clone 370618 (TRBV7-8, TRBJ1-2)
CASSPDSLSYGYTF

SEQ ID NO: 741237 - protein, 14 aa, Homo sapiens
  CDR3 for alpha chain variable domain of TCR clone 370619 (TRAV1-1, TRAJ4)
SASYFCALYNKLIF

SEQ ID NO: 741238 - protein, 16 aa, Homo sapiens
  CDR3 for beta chain variable domain of TCR clone 370619 (TRBV7-3, TRBJ2-2)
CASSLKRGTLSGELFF

SEQ ID NO: 741239 - protein, 12 aa, Homo sapiens
  CDR3 for alpha chain variable domain of TCR clone 370620 (TRAV8-3, TRAJ20)
CAVGANDYKPSF

SEQ ID NO: 741240 - protein, 15 aa, Homo sapiens
  CDR3 for beta chain variable domain of TCR clone 370620 (TRBV11-2, TRBJ2-1)
CASSLGTSGLNEQFF

SEQ ID NO: 741241 - protein, 14 aa, Homo sapiens
  CDR3 for alpha chain variable domain of TCR clone 370621 (TRAV20, TRAJ32)
CCGRYGGATNKLIF

SEQ ID NO: 741242 - protein, 15 aa, Homo sapiens
  CDR3 for beta chain variable domain of TCR clone 370621 (TRBV20-1, TRBJ2-7)
CSARDRVSGMDEQYF

SEQ ID NO: 741243 - protein, 15 aa, Homo sapiens
  CDR3 for alpha chain variable domain of TCR clone 370622 (TRAV8-4, TRAJ10)
CAVSDQMGGGNKLTF

SEQ ID NO: 741244 - protein, 14 aa, Homo sapiens
  CDR3 for beta chain variable domain of TCR clone 370622 (TRBV7-2, TRBJ2-7)
CASRSQGAAYEQYF

SEQ ID NO: 741245 - protein, 13 aa, Homo sapiens
  CDR3 for alpha chain variable domain of TCR clone 370623 (TRAV2, TRAJ29)
CAARNSGNTPLVF

SEQ ID NO: 741246 - protein, 16 aa, Homo sapiens
  CDR3 for beta chain variable domain of TCR clone 370623 (TRBV7-9, TRBJ1-2)
CASSPGGGAINYGYTF

SEQ ID NO: 741247 - protein, 17 aa, Homo sapiens
  CDR3 for alpha chain variable domain of TCR clone 370624 (TRAV12-2, TRAJ52)
CAVNPYAGGTSYGKLTF

SEQ ID NO: 741248 - protein, 16 aa, Homo sapiens
  CDR3 for beta chain variable domain of TCR clone 370624 (TRBV5-5, TRBJ2-2)
CASSSRREGATGELFF

SEQ ID NO: 741249 - protein, 14 aa, Homo sapiens
  CDR3 for alpha chain variable domain of TCR clone 370625 (TRAV1-2, TRAJ8)
CAVREDTGFQKLVF

SEQ ID NO: 741250 - protein, 15 aa, Homo sapiens
  CDR3 for beta chain variable domain of TCR clone 370625 (TRBV13, TRBJ1-5)
CASSFGHGGVQPQHF

SEQ ID NO: 741251 - protein, 14 aa, Homo sapiens
  CDR3 for alpha chain variable domain of TCR clone 370626 (TRAV1-1, TRAJ23)
CAVSIYNQGGKLIF

SEQ ID NO: 741252 - protein, 12 aa, Homo sapiens
  CDR3 for beta chain variable domain of TCR clone 370626 (TRBV24-1, TRBJ1-1)
CATSDSDRGAFF

SEQ ID NO: 741253 - protein, 13 aa, Homo sapiens
  CDR3 for alpha chain variable domain of TCR clone 370627 (TRAV1-1, TRAJ31)
CASYLNNNATLMF

SEQ ID NO: 741254 - protein, 13 aa, Homo sapiens
  CDR3 for beta chain variable domain of TCR clone 370627 (TRBV15, TRBJ1-6)
CATSGGLNSPLHF

SEQ ID NO: 741255 - protein, 14 aa, Homo sapiens
  CDR3 for alpha chain variable domain of TCR clone 370628 (TRAV16, TRAJ33)
CALSAMDSNYQLIW

SEQ ID NO: 741256 - protein, 12 aa, Homo sapiens
  CDR3 for beta chain variable domain of TCR clone 370628 (TRBV11-2, TRBJ2-2)
CASSLGGGELLF

SEQ ID NO: 741257 - protein, 18 aa, Homo sapiens
  CDR3 for alpha chain variable domain of TCR clone 370629 (TRAV16, TRAJ26)
CALTRWSEFCLWSRNQIF

SEQ ID NO: 741258 - protein, 13 aa, Homo sapiens
  CDR3 for beta chain variable domain of TCR clone 370629 (TRBV4-1, TRBJ2-2)
CASSQENTGELFF

SEQ ID NO: 741259 - protein, 14 aa, Homo sapiens
  CDR3 for alpha chain variable domain of TCR clone 370630 (TRAV1-2, TRAJ8)
CAVREDTGFQKLVF

SEQ ID NO: 741260 - protein, 16 aa, Homo sapiens
  CDR3 for beta chain variable domain of TCR clone 370630 (TRBV4-2, TRBJ2-1)
CASSQGEGRTVNEQFF

SEQ ID NO: 741261 - protein, 16 aa, Homo sapiens
  CDR3 for alpha chain variable domain of TCR clone 370631 (TRAV38-1, TRAJ32)
CAFMKGGGGATNKPIF

SEQ ID NO: 741262 - protein, 13 aa, Homo sapiens
  CDR3 for beta chain variable domain of TCR clone 370631 (TRBV20-1, TRBJ2-5)
CSAREAFQEAQYF

SEQ ID NO: 741263 - protein, 15 aa, Homo sapiens
  CDR3 for alpha chain variable domain of TCR clone 370632 (TRAV12-2, TRAJ53)
CAVNGGGGSNYKLTF

SEQ ID NO: 741264 - protein, 15 aa, Homo sapiens
  CDR3 for beta chain variable domain of TCR clone 370632 (TRBV19, TRBJ1-5)
CASSIVWADNQPQHF

SEQ ID NO: 741265 - protein, 14 aa, Homo sapiens
  CDR3 for alpha chain variable domain of TCR clone 370633 (TRAV8-1, TRAJ34)
CAVNPSYNTDKLIF

SEQ ID NO: 741266 - protein, 11 aa, Homo sapiens
  CDR3 for beta chain variable domain of TCR clone 370633 (TRBV19, TRBJ1-2)
CASSISSGYTF

SEQ ID NO: 741267 - protein, 14 aa, Homo sapiens
  CDR3 for alpha chain variable domain of TCR clone 370634 (TRAV8-3, TRAJ3)
CAVVPRSSASKIIF

SEQ ID NO: 741268 - protein, 13 aa, Homo sapiens
  CDR3 for beta chain variable domain of TCR clone 370634 (TRBV19, TRBJ1-2)
CASSVPGQDGYTF

SEQ ID NO: 741269 - protein, 13 aa, Homo sapiens
  CDR3 for alpha chain variable domain of TCR clone 370635 (TRAV8-6, TRAJ40)
CAVSVTGTYKYIF

SEQ ID NO: 741270 - protein, 16 aa, Homo sapiens
  CDR3 for beta chain variable domain of TCR clone 370635 (TRBV7-3, TRBJ2-2)
CASSLKRGTLSGELFF

SEQ ID NO: 741271 - protein, 11 aa, Homo sapiens
  CDR3 for alpha chain variable domain of TCR clone 370636 (TRAV2, TRAJ13)
CASVGYPKVTF

SEQ ID NO: 741272 - protein, 12 aa, Homo sapiens
  CDR3 for beta chain variable domain of TCR clone 370636 (TRBV28, TRBJ2-7)
CASSFSSYEQYF

SEQ ID NO: 741273 - protein, 17 aa, Homo sapiens
  CDR3 for alpha chain variable domain of TCR clone 370637 (TRAV36/DV7, TRAJ52)
CAVAQRAGGTSYGKLTF

SEQ ID NO: 741274 - protein, 14 aa, Homo sapiens
  CDR3 for beta chain variable domain of TCR clone 370637 (TRBV20-1, TRBJ2-1)
CSAQIGGSANEQFF

SEQ ID NO: 741275 - protein, 14 aa, Homo sapiens
  CDR3 for alpha chain variable domain of TCR clone 370638 (TRAV1-2, TRAJ16)
CAVNLFSDGQKLLF

SEQ ID NO: 741276 - protein, 12 aa, Homo sapiens
  CDR3 for beta chain variable domain of TCR clone 370638 (TRBV11-2, TRBJ2-2)
CASSLPTGELFF

SEQ ID NO: 741277 - protein, 15 aa, Homo sapiens
  CDR3 for alpha chain variable domain of TCR clone 370639 (TRAV12-3, TRAJ42)
CAMSGHGGSQGNLIF

SEQ ID NO: 741278 - protein, 14 aa, Homo sapiens
  CDR3 for beta chain variable domain of TCR clone 370639 (TRBV7-9, TRBJ2-3)
CASSLEDGTDTQYF

SEQ ID NO: 741279 - protein, 17 aa, Homo sapiens
  CDR3 for alpha chain variable domain of TCR clone 370640 (TRAV26-1, TRAJ37)
CIVRVITVSSNTGKLSL

SEQ ID NO: 741280 - protein, 15 aa, Homo sapiens
  CDR3 for beta chain variable domain of TCR clone 370640 (TRBV9, TRBJ1-6)
CASSVAGTGDSPLHF

SEQ ID NO: 741281 - protein, 15 aa, Homo sapiens
  CDR3 for alpha chain variable domain of TCR clone 370641 (TRAV26-1, TRAJ29)
CIVRVEGSGSTPLVF

SEQ ID NO: 741282 - protein, 15 aa, Homo sapiens
  CDR3 for beta chain variable domain of TCR clone 370641 (TRBV6-3, TRBJ2-1)
CASSAGLAGNNEQFF

SEQ ID NO: 741283 - protein, 13 aa, Homo sapiens
  CDR3 for alpha chain variable domain of TCR clone 370642 (TRAV12-2, TRAJ18)
CAVRGSTLGRLYF

SEQ ID NO: 741284 - protein, 15 aa, Homo sapiens
  CDR3 for beta chain variable domain of TCR clone 370642 (TRBV20-1, TRBJ2-7)
CSARARVSGMDEQYF

SEQ ID NO: 741285 - protein, 13 aa, Homo sapiens
  CDR3 for alpha chain variable domain of TCR clone 370643 (TRAV21, TRAJ27)
CAALNTNAGKSHF

SEQ ID NO: 741286 - protein, 14 aa, Homo sapiens
  CDR3 for beta chain variable domain of TCR clone 370643 (TRBV27, TRBJ1-1)
CASSLLSGLSEAFF

SEQ ID NO: 741287 - protein, 13 aa, Homo sapiens
  CDR3 for alpha chain variable domain of TCR clone 370644 (TRAV38-1, TRAJ42)
CARWGGSQGNLIF

SEQ ID NO: 741288 - protein, 15 aa, Homo sapiens
  CDR3 for beta chain variable domain of TCR clone 370644 (TRBV28, TRBJ2-4)
CAAGSGTLLMGIQYF

SEQ ID NO: 741289 - protein, 19 aa, Homo sapiens
  CDR3 for alpha chain variable domain of TCR clone 370645 (TRAV16, )
CALSGDIQNPDPAVYQLRD

SEQ ID NO: 741290 - protein, 16 aa, Homo sapiens
  CDR3 for beta chain variable domain of TCR clone 370645 (TRBV12-5, TRBJ2-5)
CASGPRTSGNQETRYF

SEQ ID NO: 741291 - protein, 12 aa, Homo sapiens
  CDR3 for alpha chain variable domain of TCR clone 370646 (TRAV5, TRAJ36)
CAEKGGANNLFF

SEQ ID NO: 741292 - protein, 16 aa, Homo sapiens
  CDR3 for beta chain variable domain of TCR clone 370646 (TRBV5-4, TRBJ2-1)
CASSSALAGAYNEQFF

SEQ ID NO: 741293 - protein, 14 aa, Homo sapiens
  CDR3 for alpha chain variable domain of TCR clone 370647 (TRAV1-1, TRAJ27)
CAVIYNTNAGKSTF

SEQ ID NO: 741294 - protein, 15 aa, Homo sapiens
  CDR3 for beta chain variable domain of TCR clone 370647 (TRBV7-2, TRBJ2-1)
CASSSGLAGCNEQFF

SEQ ID NO: 741295 - protein, 15 aa, Homo sapiens
  CDR3 for alpha chain variable domain of TCR clone 370648 (TRAV17, TRAJ57)
CATGPSQGGSEKLVF

SEQ ID NO: 741296 - protein, 12 aa, Homo sapiens
  CDR3 for beta chain variable domain of TCR clone 370648 (TRBV7-9, TRBJ1-1)
CASSVWVEEAFF

SEQ ID NO: 741297 - protein, 13 aa, Homo sapiens
  CDR3 for alpha chain variable domain of TCR clone 370649 (TRAV8-3, TRAJ47)
CAVSMEYGNQLVF

SEQ ID NO: 741298 - protein, 14 aa, Homo sapiens
  CDR3 for beta chain variable domain of TCR clone 370649 (TRBV2, TRBJ1-5)
CASSGTGFNQPQHF

SEQ ID NO: 741299 - protein, 12 aa, Homo sapiens
  CDR3 for alpha chain variable domain of TCR clone 370650 (TRAV12-3, TRAJ42)
CAPGGSQGNLIF

SEQ ID NO: 741300 - protein, 16 aa, Homo sapiens
  CDR3 for beta chain variable domain of TCR clone 370650 (TRBV7-2, TRBJ2-5)
CASSSKWLSGQETQYF

SEQ ID NO: 741301 - protein, 14 aa, Homo sapiens
  CDR3 for alpha chain variable domain of TCR clone 370651 (TRAV12-2, TRAJ24)
CAVTPADSWGKLQF

SEQ ID NO: 741302 - protein, 15 aa, Homo sapiens
  CDR3 for beta chain variable domain of TCR clone 370651 (TRBV20-1, TRBJ2-7)
CSARDRVPGMDEQYF

SEQ ID NO: 741303 - protein, 14 aa, Homo sapiens
  CDR3 for alpha chain variable domain of TCR clone 370652 (TRAV12-1, TRAJ42)
CVVIYGGSQGNLIF

SEQ ID NO: 741304 - protein, 17 aa, Homo sapiens
  CDR3 for beta chain variable domain of TCR clone 370652 (TRBV3-1, TRBJ2-6)
CASSPNTGPAGANVLNF

SEQ ID NO: 741305 - protein, 13 aa, Homo sapiens
  CDR3 for alpha chain variable domain of TCR clone 370653 (TRAV16, TRAJ52)
CALRGTSYGKLTF

SEQ ID NO: 741306 - protein, 15 aa, Homo sapiens
  CDR3 for beta chain variable domain of TCR clone 370653 (TRBV19, TRBJ2-7)
CASRPTPGLSSEQYF

SEQ ID NO: 741307 - protein, 12 aa, Homo sapiens
  CDR3 for alpha chain variable domain of TCR clone 370654 (TRAV12-3, TRAJ17)
CAMTLTGNKLTF

SEQ ID NO: 741308 - protein, 18 aa, Homo sapiens
  CDR3 for beta chain variable domain of TCR clone 370654 (TRBV27, TRBJ2-7)
CASRTGQFFPGARDEQYF

SEQ ID NO: 741309 - protein, 14 aa, Homo sapiens
  CDR3 for alpha chain variable domain of TCR clone 370655 (TRAV12-3, TRAJ10)
SHLPLTGGGNKFTF

SEQ ID NO: 741310 - protein, 13 aa, Homo sapiens
  CDR3 for beta chain variable domain of TCR clone 370655 (TRBV2, TRBJ1-6)
CADSGSYNSPLHF

SEQ ID NO: 741311 - protein, 14 aa, Homo sapiens
  CDR3 for alpha chain variable domain of TCR clone 370656 (TRAV1-2, TRAJ8)
CAVREDTGFQKLVF

SEQ ID NO: 741312 - protein, 15 aa, Homo sapiens
  CDR3 for beta chain variable domain of TCR clone 370656 (TRBV5-5, TRBJ1-5)
YASSSTSGSNQPQHF

SEQ ID NO: 741313 - protein, 14 aa, Homo sapiens
  CDR3 for alpha chain variable domain of TCR clone 370657 (TRAV17, TRAJ57)
CATDPQGGSEKLVF

SEQ ID NO: 741314 - protein, 18 aa, Homo sapiens
  CDR3 for beta chain variable domain of TCR clone 370657 (TRBV6-5, TRBJ2-6)
CASSYSGNMGSGANDLTF

SEQ ID NO: 741315 - protein, 10 aa, Homo sapiens
  CDR3 for alpha chain variable domain of TCR clone 370658 (TRAV12-2, TRAJ52)
RSTSYGKLTF

SEQ ID NO: 741316 - protein, 15 aa, Homo sapiens
  CDR3 for beta chain variable domain of TCR clone 370658 (TRBV7-9, TRBJ1-5)
CASSQGHQPNQPQHF

SEQ ID NO: 741317 - protein, 14 aa, Homo sapiens
  CDR3 for alpha chain variable domain of TCR clone 370659 (TRAV3, TRAJ22)
CAVRDYGSARPLTF

SEQ ID NO: 741318 - protein, 13 aa, Homo sapiens
  CDR3 for beta chain variable domain of TCR clone 370659 (TRBV11-2, TRBJ2-5)
CASGHGAKETQYF

SEQ ID NO: 741319 - protein, 12 aa, Homo sapiens
  CDR3 for alpha chain variable domain of TCR clone 370660 (TRAV12-1, )
CVVNSWISRALT

SEQ ID NO: 741320 - protein, 11 aa, Homo sapiens
  CDR3 for beta chain variable domain of TCR clone 370660 (TRBV6-3, TRBJ2-3)
CATGQADTLYC

SEQ ID NO: 741321 - protein, 14 aa, Homo sapiens
  CDR3 for alpha chain variable domain of TCR clone 370661 (TRAV8-6, TRAJ29)
CAVSGWAGNTPLVF

SEQ ID NO: 741322 - protein, 18 aa, Homo sapiens
  CDR3 for beta chain variable domain of TCR clone 370661 (TRBV11-2, TRBJ2-3)
CASSLGGASRGAPNTQYF

SEQ ID NO: 741323 - protein, 15 aa, Homo sapiens
  CDR3 for alpha chain variable domain of TCR clone 370662 (TRAV26-1, TRAJ29)
CTVRVEGSENTPLVF

SEQ ID NO: 741324 - protein, 15 aa, Homo sapiens
  CDR3 for beta chain variable domain of TCR clone 370662 (TRBV7-9, TRBJ1-5)
CASSQGHQPNQPQHF

SEQ ID NO: 741325 - protein, 15 aa, Homo sapiens
  CDR3 for alpha chain variable domain of TCR clone 370663 (TRAV8-3, TRAJ45)
CASSYSGGGADGLTF

SEQ ID NO: 741326 - protein, 13 aa, Homo sapiens
  CDR3 for beta chain variable domain of TCR clone 370663 (TRBV2, TRBJ2-7)
CASSGGIAYEQYF

SEQ ID NO: 741327 - protein, 14 aa, Homo sapiens
  CDR3 for alpha chain variable domain of TCR clone 370664 (TRAV13-2, TRAJ9)
CAENSSTGGFKTIF

SEQ ID NO: 741328 - protein, 13 aa, Homo sapiens
  CDR3 for beta chain variable domain of TCR clone 370664 (TRBV19, TRBJ2-7)
CASSIDRTYEQYF

SEQ ID NO: 741329 - protein, 15 aa, Homo sapiens
  CDR3 for alpha chain variable domain of TCR clone 370665 (TRAV25, TRAJ41)
CAGPWHSNSGYALNF

SEQ ID NO: 741330 - protein, 13 aa, Homo sapiens
  CDR3 for beta chain variable domain of TCR clone 370665 (TRBV15, TRBJ1-1)
CATSRGIQARAFF

SEQ ID NO: 741331 - protein, 17 aa, Homo sapiens
  CDR3 for alpha chain variable domain of TCR clone 370666 (TRAV14/DV4, TRAJ32)
CAMRERSFGGATNKLIF

SEQ ID NO: 741332 - protein, 14 aa, Homo sapiens
  CDR3 for beta chain variable domain of TCR clone 370666 (TRBV9, TRBJ2-7)
CASSVAGVPYEQYF

SEQ ID NO: 741333 - protein, 14 aa, Homo sapiens
  CDR3 for alpha chain variable domain of TCR clone 370667 (TRAV12-1, TRAJ9)
CVLTLNTGGFKTIF

SEQ ID NO: 741334 - protein, 11 aa, Homo sapiens
  CDR3 for beta chain variable domain of TCR clone 370667 (TRBV29-1, TRBJ2-5)
CSEDRTGTQYF

SEQ ID NO: 741335 - protein, 13 aa, Homo sapiens
  CDR3 for alpha chain variable domain of TCR clone 370668 (TRAV21, TRAJ37)
CAVSSGNSGKLIF

SEQ ID NO: 741336 - protein, 17 aa, Homo sapiens
  CDR3 for beta chain variable domain of TCR clone 370668 (TRBV5-1, TRBJ2-5)
CASSLLGLAANQETQYF

SEQ ID NO: 741337 - protein, 14 aa, Homo sapiens
  CDR3 for alpha chain variable domain of TCR clone 370669 (TRAV17, TRAJ15)
CATGPNQAGTALIF

SEQ ID NO: 741338 - protein, 15 aa, Homo sapiens
  CDR3 for beta chain variable domain of TCR clone 370669 (TRBV11-3, TRBJ2-3)
CASLKDGREGDTQYF

SEQ ID NO: 741339 - protein, 16 aa, Homo sapiens
  CDR3 for alpha chain variable domain of TCR clone 370670 (TRAV3, TRAJ10)
CAVRDMRAGGGNKLTF

SEQ ID NO: 741340 - protein, 16 aa, Homo sapiens
  CDR3 for beta chain variable domain of TCR clone 370670 (TRBV7-6, TRBJ2-1)
CASSAPGPSSYNEQFF

SEQ ID NO: 741341 - protein, 18 aa, Homo sapiens
  CDR3 for alpha chain variable domain of TCR clone 370671 (TRAV26-1, TRAJ23)
CIVRVGLEVWNQGGKLIF

SEQ ID NO: 741342 - protein, 16 aa, Homo sapiens
  CDR3 for beta chain variable domain of TCR clone 370671 (TRBV12-4, TRBJ2-5)
CASSFFVRGRQVTQYF

SEQ ID NO: 741343 - protein, 13 aa, Homo sapiens
  CDR3 for alpha chain variable domain of TCR clone 370672 (TRAV9-2, TRAJ58)
CSATGTSGSRCTF

SEQ ID NO: 741344 - protein, 14 aa, Homo sapiens
  CDR3 for beta chain variable domain of TCR clone 370672 (TRBV7-9, TRBJ2-1)
CASSPRDSLYEQFF

SEQ ID NO: 741345 - protein, 11 aa, Homo sapiens
  CDR3 for alpha chain variable domain of TCR clone 370673 (TRAV12-2, TRAJ36)
CAADGANNLFF

SEQ ID NO: 741346 - protein, 13 aa, Homo sapiens
  CDR3 for beta chain variable domain of TCR clone 370673 (TRBV28, TRBJ2-5)
CAGVSRGEETQYF

SEQ ID NO: 741347 - protein, 16 aa, Homo sapiens
  CDR3 for alpha chain variable domain of TCR clone 370674 (TRAV3, TRAJ18)
CAVRDGRGSTLGRLYF

SEQ ID NO: 741348 - protein, 15 aa, Homo sapiens
  CDR3 for beta chain variable domain of TCR clone 370674 (TRBV7-9, TRBJ1-6)
CASSSPGRGYSPLHF

SEQ ID NO: 741349 - protein, 12 aa, Homo sapiens
  CDR3 for alpha chain variable domain of TCR clone 370675 (TRAV36/DV7, TRAJ54)
CAVVRGAQKLVF

SEQ ID NO: 741350 - protein, 13 aa, Homo sapiens
  CDR3 for beta chain variable domain of TCR clone 370675 (TRBV7-9, TRBJ1-2)
CASSLKQNYGYIF

SEQ ID NO: 741351 - protein, 19 aa, Homo sapiens
  CDR3 for alpha chain variable domain of TCR clone 370676 (TRAV21, TRAJ45)
CAVEAPRGDQEEVLTDSPF

SEQ ID NO: 741352 - protein, 12 aa, Homo sapiens
  CDR3 for beta chain variable domain of TCR clone 370676 (TRBV29-1, TRBJ1-3)
CSTLDSGNTIYF

SEQ ID NO: 741353 - protein, 14 aa, Homo sapiens
  CDR3 for alpha chain variable domain of TCR clone 370677 (TRAV1-2, TRAJ16)
CAVNRFSDGQKLLF

SEQ ID NO: 741354 - protein, 13 aa, Homo sapiens
  CDR3 for beta chain variable domain of TCR clone 370677 (TRBV12-4, TRBJ1-1)
CASSFGEDTEAFF

SEQ ID NO: 741355 - protein, 17 aa, Homo sapiens
  CDR3 for alpha chain variable domain of TCR clone 370678 (TRAV13-1, TRAJ52)
CAATSGAGGTSYGKLTF

SEQ ID NO: 741356 - protein, 15 aa, Homo sapiens
  CDR3 for beta chain variable domain of TCR clone 370678 (TRBV2, TRBJ2-1)
CASSELAGSYNEQFF

SEQ ID NO: 741357 - protein, 11 aa, Homo sapiens
  CDR3 for alpha chain variable domain of TCR clone 370679 (TRAV2, TRAJ31)
CSAGPPARLMF

SEQ ID NO: 741358 - protein, 12 aa, Homo sapiens
  CDR3 for beta chain variable domain of TCR clone 370679 (TRBV7-8, TRBJ2-7)
CASSLGDREQYF

SEQ ID NO: 741359 - protein, 16 aa, Homo sapiens
  CDR3 for alpha chain variable domain of TCR clone 370680 (TRAV12-2, TRAJ50)
CAVGTATKTSYDKMIF

SEQ ID NO: 741360 - protein, 12 aa, Homo sapiens
  CDR3 for beta chain variable domain of TCR clone 370680 (TRBV12-4, TRBJ1-5)
CASSLGRQPQHF

SEQ ID NO: 741361 - protein, 14 aa, Homo sapiens
  CDR3 for alpha chain variable domain of TCR clone 370681 (TRAV1-2, TRAJ15)
CAVRDRQAGTALIF

SEQ ID NO: 741362 - protein, 16 aa, Homo sapiens
  CDR3 for beta chain variable domain of TCR clone 370681 (TRBV2, TRBJ2-3)
CASSTSVEGVTDTQYF

SEQ ID NO: 741363 - protein, 11 aa, Homo sapiens
  CDR3 for alpha chain variable domain of TCR clone 370682 (TRAV17, TRAJ9)
CGFTGGFKTIF

SEQ ID NO: 741364 - protein, 15 aa, Homo sapiens
  CDR3 for beta chain variable domain of TCR clone 370682 (TRBV6-3, TRBJ2-2)
CASSFLATLTGELFF

SEQ ID NO: 741365 - protein, 14 aa, Homo sapiens
  CDR3 for alpha chain variable domain of TCR clone 370683 (TRAV8-3, TRAJ39)
CAVARGDAGNMLTF

SEQ ID NO: 741366 - protein, 15 aa, Homo sapiens
  CDR3 for beta chain variable domain of TCR clone 370683 (TRBV19, TRBJ2-1)
CASSIVRGEGREQFF

SEQ ID NO: 741367 - protein, 13 aa, Homo sapiens
  CDR3 for alpha chain variable domain of TCR clone 370684 (TRAV8-3, TRAJ54)
CAVSIQGAQKLVF

SEQ ID NO: 741368 - protein, 15 aa, Homo sapiens
  CDR3 for beta chain variable domain of TCR clone 370684 (TRBV7-2, TRBJ1-2)
CASSLVSGGDYGYTF

SEQ ID NO: 741369 - protein, 13 aa, Homo sapiens
  CDR3 for alpha chain variable domain of TCR clone 370685 (TRAV12-3, TRAJ33)
CAMSVNSNYQLIW

SEQ ID NO: 741370 - protein, 13 aa, Homo sapiens
  CDR3 for beta chain variable domain of TCR clone 370685 (TRBV7-8, TRBJ2-7)
CASSEVKFYEQYF

SEQ ID NO: 741371 - protein, 12 aa, Homo sapiens
  CDR3 for alpha chain variable domain of TCR clone 370686 (TRAV3, TRAJ43)
CAVRDPNNDMRF

SEQ ID NO: 741372 - protein, 12 aa, Homo sapiens
  CDR3 for beta chain variable domain of TCR clone 370686 (TRBV12-5, TRBJ2-5)
CASGQGVETQYF

SEQ ID NO: 741373 - protein, 13 aa, Homo sapiens
  CDR3 for alpha chain variable domain of TCR clone 370687 (TRAV38-1, TRAJ42)
CARWGGSQGNLIF

SEQ ID NO: 741374 - protein, 16 aa, Homo sapiens
  CDR3 for beta chain variable domain of TCR clone 370687 (TRBV4-1, TRBJ2-3)
CASSQSTSGAEDTQYF

SEQ ID NO: 741375 - protein, 10 aa, Homo sapiens
  CDR3 for alpha chain variable domain of TCR clone 370688 (TRAV23/DV6, TRAJ31)
CARGGARLMF

SEQ ID NO: 741376 - protein, 13 aa, Homo sapiens
  CDR3 for beta chain variable domain of TCR clone 370688 (TRBV7-2, TRBJ1-1)
CASNLKGAKVAFF

SEQ ID NO: 741377 - protein, 14 aa, Homo sapiens
  CDR3 for alpha chain variable domain of TCR clone 370689 (TRAV8-3, TRAJ39)
CVVGANNEGNMLTF

SEQ ID NO: 741378 - protein, 12 aa, Homo sapiens
  CDR3 for beta chain variable domain of TCR clone 370689 (TRBV28, TRBJ1-3)
CASVSSGNTIYF

SEQ ID NO: 741379 - protein, 15 aa, Homo sapiens
  CDR3 for alpha chain variable domain of TCR clone 370690 (TRAV17, TRAJ6)
CATDRPSGGSYIPTF

SEQ ID NO: 741380 - protein, 16 aa, Homo sapiens
  CDR3 for beta chain variable domain of TCR clone 370690 (TRBV4-1, TRBJ2-7)
CASSQDPTGYSYEQYF

SEQ ID NO: 741381 - protein, 16 aa, Homo sapiens
  CDR3 for alpha chain variable domain of TCR clone 370691 (TRAV30, TRAJ24)
CGTEIVDADSGGKFQF

SEQ ID NO: 741382 - protein, 14 aa, Homo sapiens
  CDR3 for beta chain variable domain of TCR clone 370691 (TRBV12-5, TRBJ2-5)
CASGSRTHQENQYF

SEQ ID NO: 741383 - protein, 14 aa, Homo sapiens
  CDR3 for alpha chain variable domain of TCR clone 370692 (TRAV12-2, TRAJ40)
CAVKTPSGTYKYIF

SEQ ID NO: 741384 - protein, 13 aa, Homo sapiens
  CDR3 for beta chain variable domain of TCR clone 370692 (TRBV20-1, TRBJ1-3)
CSARVQGRDTIYF

SEQ ID NO: 741385 - protein, 18 aa, Homo sapiens
  CDR3 for alpha chain variable domain of TCR clone 370693 (TRAV12-3, TRAJ52)
CAMRVGGAGGTSYGKLTF

SEQ ID NO: 741386 - protein, 15 aa, Homo sapiens
  CDR3 for beta chain variable domain of TCR clone 370693 (TRBV27, TRBJ1-6)
CASSFDRGLGSPLLF

SEQ ID NO: 741387 - protein, 18 aa, Homo sapiens
  CDR3 for alpha chain variable domain of TCR clone 370694 (TRAV13-1, TRAJ52)
CAADFPNAGDTSYGKLTF

SEQ ID NO: 741388 - protein, 14 aa, Homo sapiens
  CDR3 for beta chain variable domain of TCR clone 370694 (TRBV11-2, TRBJ2-3)
CASSLYAGRDTQYF

SEQ ID NO: 741389 - protein, 14 aa, Homo sapiens
  CDR3 for alpha chain variable domain of TCR clone 370695 (TRAV8-4, TRAJ15)
CAVTNREAGTALIF

SEQ ID NO: 741390 - protein, 13 aa, Homo sapiens
  CDR3 for beta chain variable domain of TCR clone 370695 (TRBV10-3, TRBJ2-7)
CAISEKGGYEQYF

SEQ ID NO: 741391 - protein, 12 aa, Homo sapiens
  CDR3 for alpha chain variable domain of TCR clone 370696 (TRAV21, TRAJ39)
CAADNAGNMLTF

SEQ ID NO: 741392 - protein, 15 aa, Homo sapiens
  CDR3 for beta chain variable domain of TCR clone 370696 (TRBV6-1, TRBJ2-3)
CASSERGGITDTQYF

SEQ ID NO: 741393 - protein, 15 aa, Homo sapiens
  CDR3 for alpha chain variable domain of TCR clone 370697 (TRAV12-3, TRAJ6)
RAMSATTGGSHIPTF

SEQ ID NO: 741394 - protein, 16 aa, Homo sapiens
  CDR3 for beta chain variable domain of TCR clone 370697 (TRBV20-1, TRBJ1-2)
CSASMGQGVANYGYTF

SEQ ID NO: 741395 - protein, 15 aa, Homo sapiens
  CDR3 for alpha chain variable domain of TCR clone 370698 (TRAV29/DV5, TRAJ47)
CAARPTMEFGNKLVF

SEQ ID NO: 741396 - protein, 13 aa, Homo sapiens
  CDR3 for beta chain variable domain of TCR clone 370698 (TRBV20-1, TRBJ1-1)
CSARAGGNTEAFF

SEQ ID NO: 741397 - protein, 14 aa, Homo sapiens
  CDR3 for alpha chain variable domain of TCR clone 370699 (TRAV1-2, TRAJ16)
CAMRSASDGQKLLF

SEQ ID NO: 741398 - protein, 17 aa, Homo sapiens
  CDR3 for beta chain variable domain of TCR clone 370699 (TRBV7-3, TRBJ2-3)
CASSLMKRMRGADTQYF

SEQ ID NO: 741399 - protein, 16 aa, Homo sapiens
  CDR3 for alpha chain variable domain of TCR clone 370700 (TRAV3, TRAJ21)
CAVRDIERGNFNKFYF

SEQ ID NO: 741400 - protein, 16 aa, Homo sapiens
  CDR3 for beta chain variable domain of TCR clone 370700 (TRBV7-9, TRBJ1-2)
CASSLGFSSGEDGYTF

SEQ ID NO: 741401 - protein, 19 aa, Homo sapiens
  CDR3 for alpha chain variable domain of TCR clone 370701 (TRAV26-1, TRAJ42)
CVLLHRQTYYVGSQGNLIF

SEQ ID NO: 741402 - protein, 16 aa, Homo sapiens
  CDR3 for beta chain variable domain of TCR clone 370701 (TRBV7-3, TRBJ2-2)
CASSLKRGTLSGELFF

SEQ ID NO: 741403 - protein, 14 aa, Homo sapiens
  CDR3 for alpha chain variable domain of TCR clone 370702 (TRAV27, TRAJ45)
CAGAQEEVLTDSPL

SEQ ID NO: 741404 - protein, 16 aa, Homo sapiens
  CDR3 for beta chain variable domain of TCR clone 370702 (TRBV11-2, TRBJ2-1)
CQQLIPPGVEYNEQFF

SEQ ID NO: 741405 - protein, 18 aa, Homo sapiens
  CDR3 for alpha chain variable domain of TCR clone 370703 (TRAV21, TRAJ52)
CAVRPSPAGGTSDGKLTF

SEQ ID NO: 741406 - protein, 17 aa, Homo sapiens
  CDR3 for beta chain variable domain of TCR clone 370703 (TRBV13, TRBJ2-3)
CASSLSRVAGGEEYAVF

SEQ ID NO: 741407 - protein, 18 aa, Homo sapiens
  CDR3 for alpha chain variable domain of TCR clone 370704 (TRAV21, TRAJ52)
CAVRPSPAGDTSYGKLTF

SEQ ID NO: 741408 - protein, 17 aa, Homo sapiens
  CDR3 for beta chain variable domain of TCR clone 370704 (TRBV14, TRBJ2-3)
CASSQEPSGLSTDTQYF

SEQ ID NO: 741409 - protein, 14 aa, Homo sapiens
  CDR3 for alpha chain variable domain of TCR clone 370705 (TRAV17, TRAJ22)
WATSPSGSARQLTF

SEQ ID NO: 741410 - protein, 15 aa, Homo sapiens
  CDR3 for beta chain variable domain of TCR clone 370705 (TRBV4-1, TRBJ2-5)
CASSQWDLYQETQYF

SEQ ID NO: 741411 - protein, 16 aa, Homo sapiens
  CDR3 for alpha chain variable domain of TCR clone 370706 (TRAV26-1, TRAJ48)
CIVRVGANFGNEKLTF

SEQ ID NO: 741412 - protein, 14 aa, Homo sapiens
  CDR3 for beta chain variable domain of TCR clone 370706 (TRBV19, TRBJ1-5)
CASRAPDSFLSQHF

SEQ ID NO: 741413 - protein, 15 aa, Homo sapiens
  CDR3 for alpha chain variable domain of TCR clone 370707 (TRAV26-1, TRAJ38)
CIADNAGNNHIQKPD

SEQ ID NO: 741414 - protein, 13 aa, Homo sapiens
  CDR3 for beta chain variable domain of TCR clone 370707 (TRBV20-1, TRBJ1-1)
CSARGGGNTEAFF

SEQ ID NO: 741415 - protein, 14 aa, Homo sapiens
  CDR3 for alpha chain variable domain of TCR clone 370708 (TRAV26-1, TRAJ11)
CIVPLYSGYSTLTF

SEQ ID NO: 741416 - protein, 21 aa, Homo sapiens
  CDR3 for beta chain variable domain of TCR clone 370708 (TRBV5-1, TRBJ1-6)
CASSPGGGADSTGGVRSPLHF

SEQ ID NO: 741417 - protein, 14 aa, Homo sapiens
  CDR3 for alpha chain variable domain of TCR clone 370709 (TRAV12-3, TRAJ9)
CAMSTNTGGVKTIF

SEQ ID NO: 741418 - protein, 12 aa, Homo sapiens
  CDR3 for beta chain variable domain of TCR clone 370709 (TRBV19, TRBJ1-5)
CASSIAQQPQHF

SEQ ID NO: 741419 - protein, 14 aa, Homo sapiens
  CDR3 for alpha chain variable domain of TCR clone 370710 (TRAV29/DV5, TRAJ28)
CAARAGAGSYQLTF

SEQ ID NO: 741420 - protein, 16 aa, Homo sapiens
  CDR3 for beta chain variable domain of TCR clone 370710 (TRBV12-4, TRBJ2-1)
CASKRTSGDTYNEQFF

SEQ ID NO: 741421 - protein, 16 aa, Homo sapiens
  CDR3 for alpha chain variable domain of TCR clone 370711 (TRAV1-2, TRAJ10)
CAVRGALTGGGNKLTF

SEQ ID NO: 741422 - protein, 13 aa, Homo sapiens
  CDR3 for beta chain variable domain of TCR clone 370711 (TRBV20-1, TRBJ1-1)
CSAGTVGNTEAFF

SEQ ID NO: 741423 - protein, 12 aa, Homo sapiens
  CDR3 for alpha chain variable domain of TCR clone 370712 (TRAV26-2, TRAJ47)
CILVEYGNTLVF

SEQ ID NO: 741424 - protein, 16 aa, Homo sapiens
  CDR3 for beta chain variable domain of TCR clone 370712 (TRBV18, TRBJ1-4)
CASSPLVGDRAEKLFF

SEQ ID NO: 741425 - protein, 17 aa, Homo sapiens
  CDR3 for alpha chain variable domain of TCR clone 370713 (TRAV8-3, TRAJ42)
CAVGKGNYGGSQGNLIF

SEQ ID NO: 741426 - protein, 16 aa, Homo sapiens
  CDR3 for beta chain variable domain of TCR clone 370713 (TRBV12-5, TRBJ2-5)
CASGPRTSGNQETQYL

SEQ ID NO: 741427 - protein, 16 aa, Homo sapiens
  CDR3 for alpha chain variable domain of TCR clone 370714 (TRAV12-3, TRAJ53)
CAMSPGSGGSNYKLTF

SEQ ID NO: 741428 - protein, 16 aa, Homo sapiens
  CDR3 for beta chain variable domain of TCR clone 370714 (TRBV12-4, TRBJ2-3)
CASSLRLAETTDTQYF

SEQ ID NO: 741429 - protein, 14 aa, Homo sapiens
  CDR3 for alpha chain variable domain of TCR clone 370715 (TRAV12-2, TRAJ6)
CASKWGGGSYIPTF

SEQ ID NO: 741430 - protein, 13 aa, Homo sapiens
  CDR3 for beta chain variable domain of TCR clone 370715 (TRBV10-3, TRBJ2-7)
CASKLAVNYEQYF

SEQ ID NO: 741431 - protein, 17 aa, Homo sapiens
  CDR3 for alpha chain variable domain of TCR clone 370716 (TRAV3, TRAJ6)
CAVRDGPSAGGSYIPTF

SEQ ID NO: 741432 - protein, 12 aa, Homo sapiens
  CDR3 for beta chain variable domain of TCR clone 370716 (TRBV11-3, TRBJ2-1)
CASCLRGNEQFF

SEQ ID NO: 741433 - protein, 13 aa, Homo sapiens
  CDR3 for alpha chain variable domain of TCR clone 370717 (TRAV30, TRAJ24)
CGTVTDSWGKLQL

SEQ ID NO: 741434 - protein, 15 aa, Homo sapiens
  CDR3 for beta chain variable domain of TCR clone 370717 (TRBV4-1, TRBJ2-1)
CASSQDPGNYNEQFF

SEQ ID NO: 741435 - protein, 14 aa, Homo sapiens
  CDR3 for alpha chain variable domain of TCR clone 370718 (TRAV8-3, TRAJ34)
CAVGPPHNTDKLIF

SEQ ID NO: 741436 - protein, 11 aa, Homo sapiens
  CDR3 for beta chain variable domain of TCR clone 370718 (TRBV11-2, TRBJ2-2)
CASSLPGELFF

SEQ ID NO: 741437 - protein, 21 aa, Homo sapiens
  CDR3 for alpha chain variable domain of TCR clone 370719 (TRAV35, TRAJ52)
CWAGYADGPNACGTSYGKLTF

SEQ ID NO: 741438 - protein, 12 aa, Homo sapiens
  CDR3 for beta chain variable domain of TCR clone 370719 (TRBV5-1, TRBJ2-7)
CASSFRGYEQYF

SEQ ID NO: 741439 - protein, 12 aa, Homo sapiens
  CDR3 for alpha chain variable domain of TCR clone 370720 (TRAV13-1, TRAJ53)
AASGGSNYKLTF

SEQ ID NO: 741440 - protein, 16 aa, Homo sapiens
  CDR3 for beta chain variable domain of TCR clone 370720 (TRBV28, TRBJ2-6)
CASSSRRGSGANALTF

SEQ ID NO: 741441 - protein, 16 aa, Homo sapiens
  CDR3 for alpha chain variable domain of TCR clone 370721 (TRAV12-3, TRAJ45)
CAMSMYSGGGADGLTF

SEQ ID NO: 741442 - protein, 15 aa, Homo sapiens
  CDR3 for beta chain variable domain of TCR clone 370721 (TRBV19, TRBJ1-1)
CASSIVGGLNTEAFF

SEQ ID NO: 741443 - protein, 14 aa, Homo sapiens
  CDR3 for alpha chain variable domain of TCR clone 370722 (TRAV2, TRAJ9)
CAVEDRSGGFKTIF

SEQ ID NO: 741444 - protein, 14 aa, Homo sapiens
  CDR3 for beta chain variable domain of TCR clone 370722 (TRBV7-2, TRBJ2-3)
CASSLNSGTDTQYF

SEQ ID NO: 741445 - protein, 15 aa, Homo sapiens
  CDR3 for alpha chain variable domain of TCR clone 370723 (TRAV12-1, TRAJ41)
CVVNGASNSGYALNF

SEQ ID NO: 741446 - protein, 15 aa, Homo sapiens
  CDR3 for beta chain variable domain of TCR clone 370723 (TRBV7-2, TRBJ1-5)
CASSSIGVDNQPQHF

SEQ ID NO: 741447 - protein, 15 aa, Homo sapiens
  CDR3 for alpha chain variable domain of TCR clone 370724 (TRAV8-3, TRAJ27)
CAVGPSKTNAGKSTF

SEQ ID NO: 741448 - protein, 13 aa, Homo sapiens
  CDR3 for beta chain variable domain of TCR clone 370724 (TRBV7-2, TRBJ2-3)
CASSSGSTDTQYF

SEQ ID NO: 741449 - protein, 13 aa, Homo sapiens
  CDR3 for alpha chain variable domain of TCR clone 370725 (TRAV21, TRAJ27)
CAARPGNAGKSTF

SEQ ID NO: 741450 - protein, 18 aa, Homo sapiens
  CDR3 for beta chain variable domain of TCR clone 370725 (TRBV7-8, TRBJ2-1)
CASSPYLGQRVSNNEQFF

SEQ ID NO: 741451 - protein, 14 aa, Homo sapiens
  CDR3 for alpha chain variable domain of TCR clone 370726 (TRAV12-2, TRAJ4)
CAEDLSSGYNKLIF

SEQ ID NO: 741452 - protein, 13 aa, Homo sapiens
  CDR3 for beta chain variable domain of TCR clone 370726 (TRBV7-9, TRBJ1-2)
CASSLKQNYGYTF

SEQ ID NO: 741453 - protein, 12 aa, Homo sapiens
  CDR3 for alpha chain variable domain of TCR clone 370727 (TRAV13-2, TRAJ23)
CAERHRGGKLIF

SEQ ID NO: 741454 - protein, 16 aa, Homo sapiens
  CDR3 for beta chain variable domain of TCR clone 370727 (TRBV4-2, TRBJ1-1)
CASSQAGFGMNTEAFF

SEQ ID NO: 741455 - protein, 14 aa, Homo sapiens
  CDR3 for alpha chain variable domain of TCR clone 370728 (TRAV3, TRAJ21)
WAVRDKYNFNKFYF

SEQ ID NO: 741456 - protein, 14 aa, Homo sapiens
  CDR3 for beta chain variable domain of TCR clone 370728 (TRBV27, TRBJ2-3)
CASRDSPITDTQYF

SEQ ID NO: 741457 - protein, 15 aa, Homo sapiens
  CDR3 for alpha chain variable domain of TCR clone 370729 (TRAV27, TRAJ38)
CAARRNAGNNRKLIW

SEQ ID NO: 741458 - protein, 16 aa, Homo sapiens
  CDR3 for beta chain variable domain of TCR clone 370729 (TRBV4-2, TRBJ2-3)
CASSLSGTGSTDTQYF

SEQ ID NO: 741459 - protein, 19 aa, Homo sapiens
  CDR3 for alpha chain variable domain of TCR clone 370730 (TRAV12-3, TRAJ4)
CAMTGAGTRLAVHPYILNP

SEQ ID NO: 741460 - protein, 14 aa, Homo sapiens
  CDR3 for beta chain variable domain of TCR clone 370730 (TRBV10-3, TRBJ1-1)
CAISDTDRGVEAFF

SEQ ID NO: 741461 - protein, 14 aa, Homo sapiens
  CDR3 for alpha chain variable domain of TCR clone 370731 (TRAV12-2, TRAJ17)
CAVLFKAAGNKLTF

SEQ ID NO: 741462 - protein, 14 aa, Homo sapiens
  CDR3 for beta chain variable domain of TCR clone 370731 (TRBV7-8, TRBJ2-7)
CASSFGTGGREQYF

SEQ ID NO: 741463 - protein, 10 aa, Homo sapiens
  CDR3 for alpha chain variable domain of TCR clone 370732 (TRAV12-2, TRAJ43)
CLSDWNDMRF

SEQ ID NO: 741464 - protein, 12 aa, Homo sapiens
  CDR3 for beta chain variable domain of TCR clone 370732 (TRBV20-1, TRBJ2-7)
CSAGLKMGEQYF

SEQ ID NO: 741465 - protein, 12 aa, Homo sapiens
  CDR3 for alpha chain variable domain of TCR clone 370733 (TRAV12-3, TRAJ31)
CAMSVPNARLMF

SEQ ID NO: 741466 - protein, 12 aa, Homo sapiens
  CDR3 for beta chain variable domain of TCR clone 370733 (TRBV11-2, TRBJ2-1)
CASSAQREGQFF

SEQ ID NO: 741467 - protein, 14 aa, Homo sapiens
  CDR3 for alpha chain variable domain of TCR clone 370734 (TRAV3, TRAJ9)
CAVRPNTGGFKTIF

SEQ ID NO: 741468 - protein, 14 aa, Homo sapiens
  CDR3 for beta chain variable domain of TCR clone 370734 (TRBV20-1, TRBJ1-1)
CSAQTRIGGTEAFF

SEQ ID NO: 741469 - protein, 16 aa, Homo sapiens
  CDR3 for alpha chain variable domain of TCR clone 370735 (TRAV12-1, TRAJ43)
CVVSPHRFGAGTRLTV

SEQ ID NO: 741470 - protein, 19 aa, Homo sapiens
  CDR3 for beta chain variable domain of TCR clone 370735 (TRBV4-3, TRBJ2-7)
CASSQEFIGWQVTPYEQYF

SEQ ID NO: 741471 - protein, 12 aa, Homo sapiens
  CDR3 for alpha chain variable domain of TCR clone 370736 (TRAV25, TRAJ11)
CAGYSGYSTLTF

SEQ ID NO: 741472 - protein, 13 aa, Homo sapiens
  CDR3 for beta chain variable domain of TCR clone 370736 (TRBV7-9, TRBJ1-2)
CASSLKQIYGYTF

SEQ ID NO: 741473 - protein, 15 aa, Homo sapiens
  CDR3 for alpha chain variable domain of TCR clone 370737 (TRAV12-2, TRAJ5)
CAVTPSGTGRRALTF

SEQ ID NO: 741474 - protein, 19 aa, Homo sapiens
  CDR3 for beta chain variable domain of TCR clone 370737 (TRBV25-1, TRBJ2-2)
CAILVYRVDRGRKTGELFF

SEQ ID NO: 741475 - protein, 15 aa, Homo sapiens
  CDR3 for alpha chain variable domain of TCR clone 370738 (TRAV25, TRAJ52)
CAGTSGGTSYGKLTF

SEQ ID NO: 741476 - protein, 15 aa, Homo sapiens
  CDR3 for beta chain variable domain of TCR clone 370738 (TRBV28, TRBJ2-1)
CASSPPGLADHEQFF

SEQ ID NO: 741477 - protein, 12 aa, Homo sapiens
  CDR3 for alpha chain variable domain of TCR clone 370739 (TRAV1-1, TRAJ8)
CAGGTGFQKLVF

SEQ ID NO: 741478 - protein, 13 aa, Homo sapiens
  CDR3 for beta chain variable domain of TCR clone 370739 (TRBV7-3, TRBJ1-1)
CASSQDWGAEAVF

SEQ ID NO: 741479 - protein, 17 aa, Homo sapiens
  CDR3 for alpha chain variable domain of TCR clone 370740 (TRAV3, TRAJ6)
CAVRDGPRAGGSYIPTF

SEQ ID NO: 741480 - protein, 16 aa, Homo sapiens
  CDR3 for beta chain variable domain of TCR clone 370740 (TRBV7-8, TRBJ2-3)
CASSAEGQRETDTQYF

SEQ ID NO: 741481 - protein, 16 aa, Homo sapiens
  CDR3 for alpha chain variable domain of TCR clone 370741 (TRAV17, TRAJ52)
CATSNAGGISYGKLPF

SEQ ID NO: 741482 - protein, 13 aa, Homo sapiens
  CDR3 for beta chain variable domain of TCR clone 370741 (TRBV27, TRBJ1-6)
CASSLVLVSPLHF

SEQ ID NO: 741483 - protein, 17 aa, Homo sapiens
  CDR3 for alpha chain variable domain of TCR clone 370742 (TRAV27, TRAJ26)
CAGARAPLDNYGQNFLF

SEQ ID NO: 741484 - protein, 15 aa, Homo sapiens
  CDR3 for beta chain variable domain of TCR clone 370742 (TRBV11-2, TRBJ2-5)
CASSPRSGGLETQYF

SEQ ID NO: 741485 - protein, 19 aa, Homo sapiens
  CDR3 for alpha chain variable domain of TCR clone 370743 (TRAV13-1, TRAJ52)
CATSPYQNAGGTSYGKLTF

SEQ ID NO: 741486 - protein, 13 aa, Homo sapiens
  CDR3 for beta chain variable domain of TCR clone 370743 (TRBV15, TRBJ2-7)
CATSTTGHYEQYF

SEQ ID NO: 741487 - protein, 19 aa, Homo sapiens
  CDR3 for alpha chain variable domain of TCR clone 370744 (TRAV2, TRAJ20)
ILQVREADAAVYRDCKLSF

SEQ ID NO: 741488 - protein, 16 aa, Homo sapiens
  CDR3 for beta chain variable domain of TCR clone 370744 (TRBV29-1, TRBJ2-6)
CSVEDITYSGANVLTF

SEQ ID NO: 741489 - protein, 16 aa, Homo sapiens
  CDR3 for alpha chain variable domain of TCR clone 370745 (TRAV4, TRAJ22)
CLGGDLYSGSARQLTF

SEQ ID NO: 741490 - protein, 16 aa, Homo sapiens
  CDR3 for beta chain variable domain of TCR clone 370745 (TRBV7-9, TRBJ2-3)
CASSPWREVGTDTQYF

SEQ ID NO: 741491 - protein, 15 aa, Homo sapiens
  CDR3 for alpha chain variable domain of TCR clone 370746 (TRAV12-1, TRAJ44)
CVVDTPQGTASKLTF

SEQ ID NO: 741492 - protein, 13 aa, Homo sapiens
  CDR3 for beta chain variable domain of TCR clone 370746 (TRBV27, TRBJ2-1)
CASSSGPYNEQFF

SEQ ID NO: 741493 - protein, 16 aa, Homo sapiens
  CDR3 for alpha chain variable domain of TCR clone 370747 (TRAV4, TRAJ18)
CCVLLIGGSTLGRLYF

SEQ ID NO: 741494 - protein, 16 aa, Homo sapiens
  CDR3 for beta chain variable domain of TCR clone 370747 (TRBV4-1, TRBJ2-5)
CASSSGLAGVLGTQYF

SEQ ID NO: 741495 - protein, 12 aa, Homo sapiens
  CDR3 for alpha chain variable domain of TCR clone 370748 (TRAV13-1, TRAJ21)
CAAKEGFNKFYF

SEQ ID NO: 741496 - protein, 15 aa, Homo sapiens
  CDR3 for beta chain variable domain of TCR clone 370748 (TRBV15, TRBJ1-5)
CATSRDPGSNQPQHF

SEQ ID NO: 741497 - protein, 14 aa, Homo sapiens
  CDR3 for alpha chain variable domain of TCR clone 370749 (TRAV14/DV4, TRAJ32)
SNVLPLTPTNKLIF

SEQ ID NO: 741498 - protein, 17 aa, Homo sapiens
  CDR3 for beta chain variable domain of TCR clone 370749 (TRBV20-1, TRBJ2-1)
CSASSSGLAGSYDEQFF

SEQ ID NO: 741499 - protein, 15 aa, Homo sapiens
  CDR3 for alpha chain variable domain of TCR clone 370750 (TRAV3, TRAJ20)
CAVRDIKLSDYKPSF

SEQ ID NO: 741500 - protein, 14 aa, Homo sapiens
  CDR3 for beta chain variable domain of TCR clone 370750 (TRBV25-1, TRBJ1-1)
CASTHLGGNTEAFF

SEQ ID NO: 741501 - protein, 13 aa, Homo sapiens
  CDR3 for alpha chain variable domain of TCR clone 370751 (TRAV34, TRAJ33)
CGADMNSNYQLIW

SEQ ID NO: 741502 - protein, 13 aa, Homo sapiens
  CDR3 for beta chain variable domain of TCR clone 370751 (TRBV7-9, TRBJ1-2)
CASSLKQNYGYTF

SEQ ID NO: 741503 - protein, 14 aa, Homo sapiens
  CDR3 for alpha chain variable domain of TCR clone 370752 (TRAV3, TRAJ21)
CAVRDAYKFNKFYF

SEQ ID NO: 741504 - protein, 17 aa, Homo sapiens
  CDR3 for beta chain variable domain of TCR clone 370752 (TRBV20-1, TRBJ1-6)
CSTRGGYTFSYNSPLHF

SEQ ID NO: 741505 - protein, 12 aa, Homo sapiens
  CDR3 for alpha chain variable domain of TCR clone 370753 (TRAV13-1, TRAJ15)
CAASQAGTALIF

SEQ ID NO: 741506 - protein, 18 aa, Homo sapiens
  CDR3 for beta chain variable domain of TCR clone 370753 (TRBV7-9, TRBJ2-3)
CASSFTINGQISTDTQYF

SEQ ID NO: 741507 - protein, 15 aa, Homo sapiens
  CDR3 for alpha chain variable domain of TCR clone 370754 (TRAV12-1, TRAJ44)
CVVDTPQCTASRLTF

SEQ ID NO: 741508 - protein, 13 aa, Homo sapiens
  CDR3 for beta chain variable domain of TCR clone 370754 (TRBV27, TRBJ2-1)
CASSSGSYNEQFF

SEQ ID NO: 741509 - protein, 16 aa, Homo sapiens
  CDR3 for alpha chain variable domain of TCR clone 370755 (TRAV30, TRAJ24)
CGTELVDADSWGKFQF

SEQ ID NO: 741510 - protein, 17 aa, Homo sapiens
  CDR3 for beta chain variable domain of TCR clone 370755 (TRBV20-1, TRBJ2-2)
CSASGSGQCGLTGELFF

SEQ ID NO: 741511 - protein, 17 aa, Homo sapiens
  CDR3 for alpha chain variable domain of TCR clone 370756 (TRAV26-1, TRAJ22)
CIVRVVTTSGSARQLTF

SEQ ID NO: 741512 - protein, 12 aa, Homo sapiens
  CDR3 for beta chain variable domain of TCR clone 370756 (TRBV28, TRBJ2-3)
CASSLYRDTQYF

SEQ ID NO: 741513 - protein, 13 aa, Homo sapiens
  CDR3 for alpha chain variable domain of TCR clone 370757 (TRAV2, TRAJ21)
CAVEDLNFDKFYF

SEQ ID NO: 741514 - protein, 15 aa, Homo sapiens
  CDR3 for beta chain variable domain of TCR clone 370757 (TRBV28, TRBJ2-5)
CASSPGQGSIETQCF

SEQ ID NO: 741515 - protein, 14 aa, Homo sapiens
  CDR3 for alpha chain variable domain of TCR clone 370758 (TRAV23/DV6, TRAJ9)
CAAEEGTGGFKTIF

SEQ ID NO: 741516 - protein, 15 aa, Homo sapiens
  CDR3 for beta chain variable domain of TCR clone 370758 (TRBV7-9, TRBJ1-6)
CASSSPGRGNSPLHF

SEQ ID NO: 741517 - protein, 13 aa, Homo sapiens
  CDR3 for alpha chain variable domain of TCR clone 370759 (TRAV35, TRAJ44)
CAGLSGTASKLTF

SEQ ID NO: 741518 - protein, 13 aa, Homo sapiens
  CDR3 for beta chain variable domain of TCR clone 370759 (TRBV7-9, TRBJ2-5)
CASLPSGRETQYF

SEQ ID NO: 741519 - protein, 14 aa, Homo sapiens
  CDR3 for alpha chain variable domain of TCR clone 370760 (TRAV13-1, TRAJ35)
CAASKGGFGNVLHC

SEQ ID NO: 741520 - protein, 13 aa, Homo sapiens
  CDR3 for beta chain variable domain of TCR clone 370760 (TRBV2, TRBJ2-3)
CASKRTAIDTQYF

SEQ ID NO: 741521 - protein, 15 aa, Homo sapiens
  CDR3 for alpha chain variable domain of TCR clone 370761 (TRAV8-4, TRAJ3)
CAVTGENLVQQCFRD

SEQ ID NO: 741522 - protein, 16 aa, Homo sapiens
  CDR3 for beta chain variable domain of TCR clone 370761 (TRBV4-2, TRBJ1-1)
CASSQAGFGMNTEAFF

SEQ ID NO: 741523 - protein, 14 aa, Homo sapiens
  CDR3 for alpha chain variable domain of TCR clone 370762 (TRAV8-1, TRAJ49)
CASSIANTGNQFYF

SEQ ID NO: 741524 - protein, 13 aa, Homo sapiens
  CDR3 for beta chain variable domain of TCR clone 370762 (TRBV20-1, TRBJ1-1)
CSARGGGNTEAFF

SEQ ID NO: 741525 - protein, 16 aa, Homo sapiens
  CDR3 for alpha chain variable domain of TCR clone 370763 (TRAV30, TRAJ24)
CGTEIVDADSWGKFQF

SEQ ID NO: 741526 - protein, 12 aa, Homo sapiens
  CDR3 for beta chain variable domain of TCR clone 370763 (TRBV12-4, TRBJ2-7)
CASNPGGGEQYF

SEQ ID NO: 741527 - protein, 12 aa, Homo sapiens
  CDR3 for alpha chain variable domain of TCR clone 370764 (TRAV10, TRAJ6)
CVVSEGSYIPTF

SEQ ID NO: 741528 - protein, 13 aa, Homo sapiens
  CDR3 for beta chain variable domain of TCR clone 370764 (TRBV2, TRBJ1-1)
CASSVLMNTEAFF

SEQ ID NO: 741529 - protein, 14 aa, Homo sapiens
  CDR3 for alpha chain variable domain of TCR clone 370765 (TRAV35, TRAJ22)
CSGLRPGSARQLTF

SEQ ID NO: 741530 - protein, 15 aa, Homo sapiens
  CDR3 for beta chain variable domain of TCR clone 370765 (TRBV12-4, TRBJ2-5)
CASSPPTDLQETQYF

SEQ ID NO: 741531 - protein, 10 aa, Homo sapiens
  CDR3 for alpha chain variable domain of TCR clone 370766 (TRAV12-2, TRAJ43)
CAVKVLSMPF

SEQ ID NO: 741532 - protein, 14 aa, Homo sapiens
  CDR3 for beta chain variable domain of TCR clone 370766 (TRBV11-2, TRBJ2-7)
CASSLGNSLYEQYF

SEQ ID NO: 741533 - protein, 14 aa, Homo sapiens
  CDR3 for alpha chain variable domain of TCR clone 370767 (TRAV1-2, TRAJ16)
CAVNRFSDGQKLLF

SEQ ID NO: 741534 - protein, 13 aa, Homo sapiens
  CDR3 for beta chain variable domain of TCR clone 370767 (TRBV7-2, TRBJ2-7)
CASSLGPNGEQYF

SEQ ID NO: 741535 - protein, 16 aa, Homo sapiens
  CDR3 for alpha chain variable domain of TCR clone 370768 (TRAV23/DV6, TRAJ48)
CSASGVVTFGNEKLTF

SEQ ID NO: 741536 - protein, 15 aa, Homo sapiens
  CDR3 for beta chain variable domain of TCR clone 370768 (TRBV20-1, TRBJ2-5)
CSAGLAGVSQETQYF

SEQ ID NO: 741537 - protein, 14 aa, Homo sapiens
  CDR3 for alpha chain variable domain of TCR clone 370769 (TRAV4, TRAJ42)
CLVGGGGSQGNLIF

SEQ ID NO: 741538 - protein, 13 aa, Homo sapiens
  CDR3 for beta chain variable domain of TCR clone 370769 (TRBV7-2, TRBJ2-2)
CASSLAVTGELFF

SEQ ID NO: 741539 - protein, 11 aa, Homo sapiens
  CDR3 for alpha chain variable domain of TCR clone 370770 (TRAV16, TRAJ26)
CALTRWSEFCL

SEQ ID NO: 741540 - protein, 14 aa, Homo sapiens
  CDR3 for beta chain variable domain of TCR clone 370770 (TRBV7-8, TRBJ1-2)
CASSPDSLSYGYTF

SEQ ID NO: 741541 - protein, 16 aa, Homo sapiens
  CDR3 for alpha chain variable domain of TCR clone 370771 (TRAV20, TRAJ53)
CAVQGNSGGSNYKLTF

SEQ ID NO: 741542 - protein, 14 aa, Homo sapiens
  CDR3 for beta chain variable domain of TCR clone 370771 (TRBV6-5, TRBJ2-7)
CASSPHRGLREQYF

SEQ ID NO: 741543 - protein, 14 aa, Homo sapiens
  CDR3 for alpha chain variable domain of TCR clone 370772 (TRAV25, TRAJ6)
CAGRESEGSYIPTF

SEQ ID NO: 741544 - protein, 13 aa, Homo sapiens
  CDR3 for beta chain variable domain of TCR clone 370772 (TRBV12-4, TRBJ2-7)
CASSLSGVYEQYF

SEQ ID NO: 741545 - protein, 13 aa, Homo sapiens
  CDR3 for alpha chain variable domain of TCR clone 370773 (TRAV26-1, TRAJ34)
FIVRGHNTDKLIF

SEQ ID NO: 741546 - protein, 15 aa, Homo sapiens
  CDR3 for beta chain variable domain of TCR clone 370773 (TRBV4-1, TRBJ2-7)
CASSQEWGPSYEQYF

SEQ ID NO: 741547 - protein, 12 aa, Homo sapiens
  CDR3 for alpha chain variable domain of TCR clone 370774 (TRAV2, TRAJ31)
CAVEDNNARLMF

SEQ ID NO: 741548 - protein, 18 aa, Homo sapiens
  CDR3 for beta chain variable domain of TCR clone 370774 (TRBV11-2, TRBJ2-3)
CASSLGGASRGAPNTQYF

SEQ ID NO: 741549 - protein, 15 aa, Homo sapiens
  CDR3 for alpha chain variable domain of TCR clone 370775 (TRAV27, TRAJ38)
CAARRNAGNNRKLIW

SEQ ID NO: 741550 - protein, 18 aa, Homo sapiens
  CDR3 for beta chain variable domain of TCR clone 370775 (TRBV28, TRBJ2-3)
CASSSGLAEATSTDTQYF

SEQ ID NO: 741551 - protein, 14 aa, Homo sapiens
  CDR3 for alpha chain variable domain of TCR clone 370776 (TRAV17, TRAJ15)
CATGPTQAGTALIF

SEQ ID NO: 741552 - protein, 15 aa, Homo sapiens
  CDR3 for beta chain variable domain of TCR clone 370776 (TRBV11-2, TRBJ2-2)
CASSSDRVNAGELFF

SEQ ID NO: 741553 - protein, 16 aa, Homo sapiens
  CDR3 for alpha chain variable domain of TCR clone 370777 (TRAV26-1, TRAJ37)
CIYARHGSSNTGKLIF

SEQ ID NO: 741554 - protein, 16 aa, Homo sapiens
  CDR3 for beta chain variable domain of TCR clone 370777 (TRBV19, TRBJ2-4)
CATGGLAGGTKNMQYF

SEQ ID NO: 741555 - protein, 17 aa, Homo sapiens
  CDR3 for alpha chain variable domain of TCR clone 370778 (TRAV26-1, TRAJ37)
CIVRVITVSSNTGKLIF

SEQ ID NO: 741556 - protein, 16 aa, Homo sapiens
  CDR3 for beta chain variable domain of TCR clone 370778 (TRBV2, TRBJ1-4)
CASNLLQGATNEKLFF

SEQ ID NO: 741557 - protein, 13 aa, Homo sapiens
  CDR3 for alpha chain variable domain of TCR clone 370779 (TRAV27, TRAJ45)
CRSSGGGADGLTF

SEQ ID NO: 741558 - protein, 17 aa, Homo sapiens
  CDR3 for beta chain variable domain of TCR clone 370779 (TRBV11-2, TRBJ2-1)
CASSLTPPGVEYNEQFF

SEQ ID NO: 741559 - protein, 14 aa, Homo sapiens
  CDR3 for alpha chain variable domain of TCR clone 370780 (TRAV26-1, TRAJ38)
CIADSAGNNRKLIW

SEQ ID NO: 741560 - protein, 15 aa, Homo sapiens
  CDR3 for beta chain variable domain of TCR clone 370780 (TRBV27, TRBJ2-1)
CASSNGGGSSNEQFF

SEQ ID NO: 741561 - protein, 13 aa, Homo sapiens
  CDR3 for alpha chain variable domain of TCR clone 370781 (TRAV21, TRAJ27)
CAARPGNAGKPTF

SEQ ID NO: 741562 - protein, 15 aa, Homo sapiens
  CDR3 for beta chain variable domain of TCR clone 370781 (TRBV20-1, TRBJ2-7)
CSAGDRVSGMDEQYF

SEQ ID NO: 741563 - protein, 14 aa, Homo sapiens
  CDR3 for alpha chain variable domain of TCR clone 370782 (TRAV38-2/DV8, TRAJ42)
CAYPEGGSQGNRIF

SEQ ID NO: 741564 - protein, 15 aa, Homo sapiens
  CDR3 for beta chain variable domain of TCR clone 370782 (TRBV19, TRBJ2-1)
CASSTGTSSYNEQFF

SEQ ID NO: 741565 - protein, 13 aa, Homo sapiens
  CDR3 for alpha chain variable domain of TCR clone 370783 (TRAV29/DV5, TRAJ47)
CSASAEYGNKLVF

SEQ ID NO: 741566 - protein, 15 aa, Homo sapiens
  CDR3 for beta chain variable domain of TCR clone 370783 (TRBV7-9, TRBJ1-4)
RASSARTGGNEKLFF

SEQ ID NO: 741567 - protein, 13 aa, Homo sapiens
  CDR3 for alpha chain variable domain of TCR clone 370784 (TRAV41, TRAJ48)
SVPVNFGNETLTF

SEQ ID NO: 741568 - protein, 16 aa, Homo sapiens
  CDR3 for beta chain variable domain of TCR clone 370784 (TRBV12-5, TRBJ2-5)
CASGPRTSGNQETQYF

SEQ ID NO: 741569 - protein, 22 aa, Homo sapiens
  CDR3 for alpha chain variable domain of TCR clone 370785 (TRAV38-2/DV8, TRAJ30)
CAYMDGWGVTRSSLEKGHDFIF

SEQ ID NO: 741570 - protein, 15 aa, Homo sapiens
  CDR3 for beta chain variable domain of TCR clone 370785 (TRBV7-9, TRBJ2-2)
CASRPADRDTGELFF

SEQ ID NO: 741571 - protein, 13 aa, Homo sapiens
  CDR3 for alpha chain variable domain of TCR clone 370786 (TRAV29/DV5, TRAJ31)
CAASRNNNVRLMF

SEQ ID NO: 741572 - protein, 12 aa, Homo sapiens
  CDR3 for beta chain variable domain of TCR clone 370786 (TRBV14, TRBJ2-7)
CASSSLKGEQYF

SEQ ID NO: 741573 - protein, 15 aa, Homo sapiens
  CDR3 for alpha chain variable domain of TCR clone 370787 (TRAV3, TRAJ10)
CAVRERAGGGNKLTF

SEQ ID NO: 741574 - protein, 16 aa, Homo sapiens
  CDR3 for beta chain variable domain of TCR clone 370787 (TRBV20-1, TRBJ1-4)
CSAPGQGLLTNEKLFF

SEQ ID NO: 741575 - protein, 15 aa, Homo sapiens
  CDR3 for alpha chain variable domain of TCR clone 370788 (TRAV25, TRAJ52)
CAGRPGGTSYGQLTF

SEQ ID NO: 741576 - protein, 18 aa, Homo sapiens
  CDR3 for beta chain variable domain of TCR clone 370788 (TRBV11-2, TRBJ2-3)
CASSLGGASRGAPNTQYF

SEQ ID NO: 741577 - protein, 14 aa, Homo sapiens
  CDR3 for alpha chain variable domain of TCR clone 370789 (TRAV8-6, TRAJ15)
CAVSEDQAGTALIF

SEQ ID NO: 741578 - protein, 19 aa, Homo sapiens
  CDR3 for beta chain variable domain of TCR clone 370789 (TRBV19, TRBJ2-5)
CASSIGQVTDFFLGETQYF

SEQ ID NO: 741579 - protein, 13 aa, Homo sapiens
  CDR3 for alpha chain variable domain of TCR clone 370790 (TRAV27, TRAJ45)
CRSSGGGADGLTF

SEQ ID NO: 741580 - protein, 12 aa, Homo sapiens
  CDR3 for beta chain variable domain of TCR clone 370790 (TRBV13, TRBJ2-1)
CASSLGAQEQFF

SEQ ID NO: 741581 - protein, 12 aa, Homo sapiens
  CDR3 for alpha chain variable domain of TCR clone 370791 (TRAV1-1, TRAJ43)
CAPRVSSNDMRF

SEQ ID NO: 741582 - protein, 16 aa, Homo sapiens
  CDR3 for beta chain variable domain of TCR clone 370791 (TRBV11-1, TRBJ1-1)
CASSPRGAHMNSEAFF

SEQ ID NO: 741583 - protein, 12 aa, Homo sapiens
  CDR3 for alpha chain variable domain of TCR clone 370792 (TRAV21, TRAJ49)
CAVTTTGNQFYF

SEQ ID NO: 741584 - protein, 17 aa, Homo sapiens
  CDR3 for beta chain variable domain of TCR clone 370792 (TRBV13, TRBJ2-3)
CASSLSRVAGGRNTQYF

SEQ ID NO: 741585 - protein, 14 aa, Homo sapiens
  CDR3 for alpha chain variable domain of TCR clone 370793 (TRAV38-2/DV8, TRAJ30)
CAYMDGLEGDKIIF

SEQ ID NO: 741586 - protein, 15 aa, Homo sapiens
  CDR3 for beta chain variable domain of TCR clone 370793 (TRBV7-9, TRBJ2-2)
CASRPADRDTGELFF

SEQ ID NO: 741587 - protein, 12 aa, Homo sapiens
  CDR3 for alpha chain variable domain of TCR clone 370794 (TRAV13-2, TRAJ23)
CADRHRGGKLIL

SEQ ID NO: 741588 - protein, 15 aa, Homo sapiens
  CDR3 for beta chain variable domain of TCR clone 370794 (TRBV15, TRBJ2-1)
CATSRPGQGLHEQFF

SEQ ID NO: 741589 - protein, 14 aa, Homo sapiens
  CDR3 for alpha chain variable domain of TCR clone 370795 (TRAV12-1, TRAJ9)
CVVTSDTGGFKTIF

SEQ ID NO: 741590 - protein, 16 aa, Homo sapiens
  CDR3 for beta chain variable domain of TCR clone 370795 (TRBV29-1, TRBJ1-2)
CSVEANRDIANYGYTF

SEQ ID NO: 741591 - protein, 10 aa, Homo sapiens
  CDR3 for alpha chain variable domain of TCR clone 370796 (TRAV21, TRAJ43)
CAVRIGYMRF

SEQ ID NO: 741592 - protein, 13 aa, Homo sapiens
  CDR3 for beta chain variable domain of TCR clone 370796 (TRBV20-1, TRBJ2-7)
CSAPGVADYEQYF

SEQ ID NO: 741593 - protein, 15 aa, Homo sapiens
  CDR3 for alpha chain variable domain of TCR clone 370797 (TRAV12-3, TRAJ6)
CAMSATSGGSYIPTF

SEQ ID NO: 741594 - protein, 16 aa, Homo sapiens
  CDR3 for beta chain variable domain of TCR clone 370797 (TRBV6-3, TRBJ1-1)
CASTDLGTVPNTEAFF

SEQ ID NO: 741595 - protein, 14 aa, Homo sapiens
  CDR3 for alpha chain variable domain of TCR clone 370798 (TRAV1-2, TRAJ16)
CAVNRFSDGQKLLF

SEQ ID NO: 741596 - protein, 14 aa, Homo sapiens
  CDR3 for beta chain variable domain of TCR clone 370798 (TRBV7-9, TRBJ2-2)
CASSLGHRTGELLF

SEQ ID NO: 741597 - protein, 16 aa, Homo sapiens
  CDR3 for alpha chain variable domain of TCR clone 370799 (TRAV3, TRAJ23)
CAVKIGNYNQGGKLIF

SEQ ID NO: 741598 - protein, 17 aa, Homo sapiens
  CDR3 for beta chain variable domain of TCR clone 370799 (TRBV10-3, TRBJ2-6)
CAISGSTAPSGANVLTF

SEQ ID NO: 741599 - protein, 13 aa, Homo sapiens
  CDR3 for alpha chain variable domain of TCR clone 370800 (TRAV2, TRAJ15)
CAVASQAGTALIF

SEQ ID NO: 741600 - protein, 14 aa, Homo sapiens
  CDR3 for beta chain variable domain of TCR clone 370800 (TRBV25-1, TRBJ1-1)
CASTHLGWNTEAFF

SEQ ID NO: 741601 - protein, 11 aa, Homo sapiens
  CDR3 for alpha chain variable domain of TCR clone 370801 (TRAV16, TRAJ33)
CALHSNYQLIW

SEQ ID NO: 741602 - protein, 11 aa, Homo sapiens
  CDR3 for beta chain variable domain of TCR clone 370801 (TRBV29-1, TRBJ2-5)
CSEDRTGTQYF

SEQ ID NO: 741603 - protein, 18 aa, Homo sapiens
  CDR3 for alpha chain variable domain of TCR clone 370802 (TRAV26-1, TRAJ22)
CIVGVALISSGSARQLTF

SEQ ID NO: 741604 - protein, 13 aa, Homo sapiens
  CDR3 for beta chain variable domain of TCR clone 370802 (TRBV13, TRBJ2-5)
CASSPEVGETQYF

SEQ ID NO: 741605 - protein, 12 aa, Homo sapiens
  CDR3 for alpha chain variable domain of TCR clone 370803 (TRAV12-3, TRAJ20)
CAMVRGDYKLSF

SEQ ID NO: 741606 - protein, 14 aa, Homo sapiens
  CDR3 for beta chain variable domain of TCR clone 370803 (TRBV20-1, TRBJ2-7)
GSAISREASYEQYF

SEQ ID NO: 741607 - protein, 15 aa, Homo sapiens
  CDR3 for alpha chain variable domain of TCR clone 370804 (TRAV25, TRAJ53)
CAATGGGGSNYKLTF

SEQ ID NO: 741608 - protein, 11 aa, Homo sapiens
  CDR3 for beta chain variable domain of TCR clone 370804 (TRBV12-4, TRBJ2-3)
CASTATDTQYF

SEQ ID NO: 741609 - protein, 12 aa, Homo sapiens
  CDR3 for alpha chain variable domain of TCR clone 370805 (TRAV12-3, TRAJ17)
CAMTLTDNKLTF

SEQ ID NO: 741610 - protein, 15 aa, Homo sapiens
  CDR3 for beta chain variable domain of TCR clone 370805 (TRBV5-7, TRBJ2-7)
CASSPYFEGSYEQYF

SEQ ID NO: 741611 - protein, 13 aa, Homo sapiens
  CDR3 for alpha chain variable domain of TCR clone 370806 (TRAV12-2, TRAJ6)
CAARGGGSYIPTF

SEQ ID NO: 741612 - protein, 19 aa, Homo sapiens
  CDR3 for beta chain variable domain of TCR clone 370806 (TRBV25-1, TRBJ2-2)
CAILVYRVDRGRKTGELFL

SEQ ID NO: 741613 - protein, 15 aa, Homo sapiens
  CDR3 for alpha chain variable domain of TCR clone 370807 (TRAV12-3, TRAJ6)
CAMSATSGGNYIPTF

SEQ ID NO: 741614 - protein, 11 aa, Homo sapiens
  CDR3 for beta chain variable domain of TCR clone 370807 (TRBV20-1, TRBJ1-5)
CSAQGDQPQHF

SEQ ID NO: 741615 - protein, 17 aa, Homo sapiens
  CDR3 for alpha chain variable domain of TCR clone 370808 (TRAV13-1, TRAJ28)
CAASPPYSGAGSYQLTV

SEQ ID NO: 741616 - protein, 15 aa, Homo sapiens
  CDR3 for beta chain variable domain of TCR clone 370808 (TRBV20-1, TRBJ2-7)
CSAESGTSGAYEQYF

SEQ ID NO: 741617 - protein, 13 aa, Homo sapiens
  CDR3 for alpha chain variable domain of TCR clone 370809 (TRAV13-2, TRAJ48)
CAEMDFGIETLTF

SEQ ID NO: 741618 - protein, 15 aa, Homo sapiens
  CDR3 for beta chain variable domain of TCR clone 370809 (TRBV7-9, TRBJ1-6)
CASSSPGRGNSPLHF

SEQ ID NO: 741619 - protein, 16 aa, Homo sapiens
  CDR3 for alpha chain variable domain of TCR clone 370810 (TRAV4, TRAJ22)
CLVGDLYSGSARQLTF

SEQ ID NO: 741620 - protein, 14 aa, Homo sapiens
  CDR3 for beta chain variable domain of TCR clone 370810 (TRBV28, TRBJ2-3)
CASSWRGRADTQNF

SEQ ID NO: 741621 - protein, 14 aa, Homo sapiens
  CDR3 for alpha chain variable domain of TCR clone 370811 (TRAV8-3, TRAJ6)
CAVGASGGSYIPTF

SEQ ID NO: 741622 - protein, 17 aa, Homo sapiens
  CDR3 for beta chain variable domain of TCR clone 370811 (TRBV18, TRBJ2-2)
CASLPSDPWQNTGELFF

SEQ ID NO: 741623 - protein, 13 aa, Homo sapiens
  CDR3 for alpha chain variable domain of TCR clone 370812 (TRAV12-3, TRAJ6)
CANPSGGSYIPTF

SEQ ID NO: 741624 - protein, 14 aa, Homo sapiens
  CDR3 for beta chain variable domain of TCR clone 370812 (TRBV7-2, TRBJ2-7)
CASSPKTSFYEQYF

SEQ ID NO: 741625 - protein, 14 aa, Homo sapiens
  CDR3 for alpha chain variable domain of TCR clone 370813 (TRAV1-2, TRAJ8)
CAVRGDTGFQKLVF

SEQ ID NO: 741626 - protein, 12 aa, Homo sapiens
  CDR3 for beta chain variable domain of TCR clone 370813 (TRBV11-2, TRBJ2-2)
CASSLGGGELFF

SEQ ID NO: 741627 - protein, 18 aa, Homo sapiens
  CDR3 for alpha chain variable domain of TCR clone 370814 (TRAV29/DV5, TRAJ52)
CAAGFRGAGGMSHGKLKF

SEQ ID NO: 741628 - protein, 16 aa, Homo sapiens
  CDR3 for beta chain variable domain of TCR clone 370814 (TRBV7-3, TRBJ2-2)
CASSLKRGTLSGELFF

SEQ ID NO: 741629 - protein, 14 aa, Homo sapiens
  CDR3 for alpha chain variable domain of TCR clone 370815 (TRAV12-2, TRAJ24)
CAVTPADSWGKLQF

SEQ ID NO: 741630 - protein, 12 aa, Homo sapiens
  CDR3 for beta chain variable domain of TCR clone 370815 (TRBV11-2, TRBJ2-7)
CASSLPAYEQYF

SEQ ID NO: 741631 - protein, 13 aa, Homo sapiens
  CDR3 for alpha chain variable domain of TCR clone 370816 (TRAV13-1, TRAJ39)
CSKYSNAGNMLTF

SEQ ID NO: 741632 - protein, 11 aa, Homo sapiens
  CDR3 for beta chain variable domain of TCR clone 370816 (TRBV11-2, TRBJ2-2)
CASSLPGELFF

SEQ ID NO: 741633 - protein, 10 aa, Homo sapiens
  CDR3 for alpha chain variable domain of TCR clone 370817 (TRAV12-1, TRAJ23)
CVVSGGKLIF

SEQ ID NO: 741634 - protein, 13 aa, Homo sapiens
  CDR3 for beta chain variable domain of TCR clone 370817 (TRBV6-1, TRBJ1-1)
CAGSRQGNTEAFF

SEQ ID NO: 741635 - protein, 15 aa, Homo sapiens
  CDR3 for alpha chain variable domain of TCR clone 370818 (TRAV23/DV6, TRAJ48)
CAASKTNFGNEKLTF

SEQ ID NO: 741636 - protein, 15 aa, Homo sapiens
  CDR3 for beta chain variable domain of TCR clone 370818 (TRBV12-4, TRBJ2-5)
CASSPPTGLQETQYF

SEQ ID NO: 741637 - protein, 12 aa, Homo sapiens
  CDR3 for alpha chain variable domain of TCR clone 370819 (TRAV3, TRAJ43)
CAVRDRNNDMRF

SEQ ID NO: 741638 - protein, 15 aa, Homo sapiens
  CDR3 for beta chain variable domain of TCR clone 370819 (TRBV4-3, TRBJ2-7)
CASSQGDWGDYEQYF

SEQ ID NO: 741639 - protein, 11 aa, Homo sapiens
  CDR3 for alpha chain variable domain of TCR clone 370820 (TRAV2, TRAJ33)
CAVDSNYQLIW

SEQ ID NO: 741640 - protein, 14 aa, Homo sapiens
  CDR3 for beta chain variable domain of TCR clone 370820 (TRBV7-6, TRBJ2-7)
CASSFRQGADEQYF

SEQ ID NO: 741641 - protein, 21 aa, Homo sapiens
  CDR3 for alpha chain variable domain of TCR clone 370821 (TRAV26-1, TRAJ22)
CIVRVSFWFCKATDLWIWYTI

SEQ ID NO: 741642 - protein, 13 aa, Homo sapiens
  CDR3 for beta chain variable domain of TCR clone 370821 (TRBV7-9, TRBJ1-2)
CASSLKQNYGYTF

SEQ ID NO: 741643 - protein, 16 aa, Homo sapiens
  CDR3 for alpha chain variable domain of TCR clone 370822 (TRAV17, TRAJ28)
CATASVSGAGSYQLTF

SEQ ID NO: 741644 - protein, 11 aa, Homo sapiens
  CDR3 for beta chain variable domain of TCR clone 370822 (TRBV7-9, TRBJ2-5)
CASSLGETQYL

SEQ ID NO: 741645 - protein, 11 aa, Homo sapiens
  CDR3 for alpha chain variable domain of TCR clone 370823 (TRAV1-2, TRAJ20)
CAVANDYKLSF

SEQ ID NO: 741646 - protein, 14 aa, Homo sapiens
  CDR3 for beta chain variable domain of TCR clone 370823 (TRBV13, TRBJ2-7)
CASSLKGASYEQYF

SEQ ID NO: 741647 - protein, 12 aa, Homo sapiens
  CDR3 for alpha chain variable domain of TCR clone 370824 (TRAV13-1, TRAJ21)
CAAKEGFNKFYF

SEQ ID NO: 741648 - protein, 14 aa, Homo sapiens
  CDR3 for beta chain variable domain of TCR clone 370824 (TRBV23-1, TRBJ2-5)
CASSLRRSQETQYF

SEQ ID NO: 741649 - protein, 14 aa, Homo sapiens
  CDR3 for alpha chain variable domain of TCR clone 370825 (TRAV1-2, TRAJ29)
CAVRTDAGNTPLVF

SEQ ID NO: 741650 - protein, 14 aa, Homo sapiens
  CDR3 for beta chain variable domain of TCR clone 370825 (TRBV7-2, TRBJ2-7)
CASSPKTSFYEQYF

SEQ ID NO: 741651 - protein, 12 aa, Homo sapiens
  CDR3 for alpha chain variable domain of TCR clone 370826 (TRAV12-2, TRAJ10)
WGVTGGGNKLTF

SEQ ID NO: 741652 - protein, 16 aa, Homo sapiens
  CDR3 for beta chain variable domain of TCR clone 370826 (TRBV6-4, TRBJ1-2)
CASSEAVGDPTYGYTF

SEQ ID NO: 741653 - protein, 12 aa, Homo sapiens
  CDR3 for alpha chain variable domain of TCR clone 370827 (TRAV21, TRAJ37)
CAVAPVTGKLIF

SEQ ID NO: 741654 - protein, 15 aa, Homo sapiens
  CDR3 for beta chain variable domain of TCR clone 370827 (TRBV6-3, TRBJ2-7)
CASSSPGTVFYEQYF

SEQ ID NO: 741655 - protein, 14 aa, Homo sapiens
  CDR3 for alpha chain variable domain of TCR clone 370828 (TRAV35, TRAJ33)
CAGSSQDSNYQLIW

SEQ ID NO: 741656 - protein, 15 aa, Homo sapiens
  CDR3 for beta chain variable domain of TCR clone 370828 (TRBV6-3, TRBJ2-3)
RLIHYSVGQADTQYF

SEQ ID NO: 741657 - protein, 13 aa, Homo sapiens
  CDR3 for alpha chain variable domain of TCR clone 370829 (TRAV27, TRAJ16)
CAGACSDGQKRLF

SEQ ID NO: 741658 - protein, 14 aa, Homo sapiens
  CDR3 for beta chain variable domain of TCR clone 370829 (TRBV11-2, TRBJ1-3)
CASSLAVPGNTIYF

SEQ ID NO: 741659 - protein, 13 aa, Homo sapiens
  CDR3 for alpha chain variable domain of TCR clone 370830 (TRAV12-1, TRAJ26)
CVVRRNYGQNFVF

SEQ ID NO: 741660 - protein, 16 aa, Homo sapiens
  CDR3 for beta chain variable domain of TCR clone 370830 (TRBV6-3, TRBJ1-1)
CASRYTGRALKLSLDK

SEQ ID NO: 741661 - protein, 20 aa, Homo sapiens
  CDR3 for alpha chain variable domain of TCR clone 370831 (TRAV26-1, TRAJ42)
CCVLLHRQTYYGGSQGNLIF

SEQ ID NO: 741662 - protein, 16 aa, Homo sapiens
  CDR3 for beta chain variable domain of TCR clone 370831 (TRBV19, TRBJ2-1)
CASSKAGPSSYNEQFF

SEQ ID NO: 741663 - protein, 17 aa, Homo sapiens
  CDR3 for alpha chain variable domain of TCR clone 370832 (TRAV16, TRAJ58)
CITVLSNGETSGSRLTF

SEQ ID NO: 741664 - protein, 17 aa, Homo sapiens
  CDR3 for beta chain variable domain of TCR clone 370832 (TRBV18, TRBJ2-1)
CASSKGLSGGADIEQFF

SEQ ID NO: 741665 - protein, 15 aa, Homo sapiens
  CDR3 for alpha chain variable domain of TCR clone 370833 (TRAV8-6, TRAJ10)
CAVSSKGGGGNKLTF

SEQ ID NO: 741666 - protein, 15 aa, Homo sapiens
  CDR3 for beta chain variable domain of TCR clone 370833 (TRBV28, TRBJ1-2)
CASSSHSIANYSYTF

SEQ ID NO: 741667 - protein, 13 aa, Homo sapiens
  CDR3 for alpha chain variable domain of TCR clone 370834 (TRAV13-2, TRAJ48)
CAEMDSGNEKLTF

SEQ ID NO: 741668 - protein, 15 aa, Homo sapiens
  CDR3 for beta chain variable domain of TCR clone 370834 (TRBV7-9, TRBJ1-6)
CASSSPGRGNSPLHL

SEQ ID NO: 741669 - protein, 15 aa, Homo sapiens
  CDR3 for alpha chain variable domain of TCR clone 370835 (TRAV3, TRAJ5)
FAVRDLDTGRRELTF

SEQ ID NO: 741670 - protein, 13 aa, Homo sapiens
  CDR3 for beta chain variable domain of TCR clone 370835 (TRBV12-4, TRBJ2-7)
CASSPTETYEQYF

SEQ ID NO: 741671 - protein, 14 aa, Homo sapiens
  CDR3 for alpha chain variable domain of TCR clone 370836 (TRAV12-3, TRAJ58)
CAMSTETSGSRLTF

SEQ ID NO: 741672 - protein, 15 aa, Homo sapiens
  CDR3 for beta chain variable domain of TCR clone 370836 (TRBV4-1, TRBJ1-4)
CASIDTGGTNEKLFF

SEQ ID NO: 741673 - protein, 18 aa, Homo sapiens
  CDR3 for alpha chain variable domain of TCR clone 370837 (TRAV12-3, TRAJ52)
CAMSVGGAGGTSYGKLTF

SEQ ID NO: 741674 - protein, 14 aa, Homo sapiens
  CDR3 for beta chain variable domain of TCR clone 370837 (TRBV7-2, TRBJ2-7)
CASRSQGSAYEQYF

SEQ ID NO: 741675 - protein, 14 aa, Homo sapiens
  CDR3 for alpha chain variable domain of TCR clone 370838 (TRAV17, TRAJ6)
CATDASGGSYIPTF

SEQ ID NO: 741676 - protein, 13 aa, Homo sapiens
  CDR3 for beta chain variable domain of TCR clone 370838 (TRBV7-2, TRBJ2-4)
CASSREHANIQYF

SEQ ID NO: 741677 - protein, 13 aa, Homo sapiens
  CDR3 for alpha chain variable domain of TCR clone 370839 (TRAV20, TRAJ49)
CAVQARNGNQFYF

SEQ ID NO: 741678 - protein, 13 aa, Homo sapiens
  CDR3 for beta chain variable domain of TCR clone 370839 (TRBV4-2, TRBJ1-1)
CASSQAGNTEAFF

SEQ ID NO: 741679 - protein, 14 aa, Homo sapiens
  CDR3 for alpha chain variable domain of TCR clone 370840 (TRAV26-1, TRAJ34)
CIVRVAYNTDKLIF

SEQ ID NO: 741680 - protein, 15 aa, Homo sapiens
  CDR3 for beta chain variable domain of TCR clone 370840 (TRBV20-1, TRBJ2-7)
CSAEVPAAYFYEQYF

SEQ ID NO: 741681 - protein, 14 aa, Homo sapiens
  CDR3 for alpha chain variable domain of TCR clone 370841 (TRAV29/DV5, TRAJ32)
CAAAYGGATNKLIF

SEQ ID NO: 741682 - protein, 16 aa, Homo sapiens
  CDR3 for beta chain variable domain of TCR clone 370841 (TRBV7-6, TRBJ2-1)
CASSAPGPSSYNEQFF

SEQ ID NO: 741683 - protein, 13 aa, Homo sapiens
  CDR3 for alpha chain variable domain of TCR clone 370842 (TRAV23/DV6, TRAJ45)
CAARRGGADGLTF

SEQ ID NO: 741684 - protein, 12 aa, Homo sapiens
  CDR3 for beta chain variable domain of TCR clone 370842 (TRBV7-9, TRBJ1-4)
CASSTDREKLFF

SEQ ID NO: 741685 - protein, 14 aa, Homo sapiens
  CDR3 for alpha chain variable domain of TCR clone 370843 (TRAV4, TRAJ9)
CLVGSGTGGFKTIF

SEQ ID NO: 741686 - protein, 12 aa, Homo sapiens
  CDR3 for beta chain variable domain of TCR clone 370843 (TRBV12-4, TRBJ1-3)
CASSFSGNTIYF

SEQ ID NO: 741687 - protein, 15 aa, Homo sapiens
  CDR3 for alpha chain variable domain of TCR clone 370844 (TRAV4, TRAJ36)
CLVGDRQTGANNLFL

SEQ ID NO: 741688 - protein, 11 aa, Homo sapiens
  CDR3 for beta chain variable domain of TCR clone 370844 (TRBV12-4, TRBJ2-3)
CASTATDTQYF

SEQ ID NO: 741689 - protein, 16 aa, Homo sapiens
  CDR3 for alpha chain variable domain of TCR clone 370845 (TRAV26-2, TRAJ52)
CIRGPAGGTSYGKLTF

SEQ ID NO: 741690 - protein, 15 aa, Homo sapiens
  CDR3 for beta chain variable domain of TCR clone 370845 (TRBV5-1, TRBJ2-1)
CASSWGHGPGGEQFF

SEQ ID NO: 741691 - protein, 13 aa, Homo sapiens
  CDR3 for alpha chain variable domain of TCR clone 370846 (TRAV36/DV7, TRAJ49)
CAVEAHTGNQFYF

SEQ ID NO: 741692 - protein, 14 aa, Homo sapiens
  CDR3 for beta chain variable domain of TCR clone 370846 (TRBV20-1, TRBJ2-5)
CSASSGRAAETQYF

SEQ ID NO: 741693 - protein, 15 aa, Homo sapiens
  CDR3 for alpha chain variable domain of TCR clone 370847 (TRAV8-3, TRAJ45)
CTSSYSGGGADGLPF

SEQ ID NO: 741694 - protein, 13 aa, Homo sapiens
  CDR3 for beta chain variable domain of TCR clone 370847 (TRBV10-3, TRBJ2-7)
CASKLAVNYEQYF

SEQ ID NO: 741695 - protein, 16 aa, Homo sapiens
  CDR3 for alpha chain variable domain of TCR clone 370848 (TRAV26-1, TRAJ32)
CIVWTNYGGATTKLIF

SEQ ID NO: 741696 - protein, 14 aa, Homo sapiens
  CDR3 for beta chain variable domain of TCR clone 370848 (TRBV27, TRBJ1-1)
CASSLLSGLSEAFF

SEQ ID NO: 741697 - protein, 12 aa, Homo sapiens
  CDR3 for alpha chain variable domain of TCR clone 370849 (TRAV12-3, TRAJ17)
CAMTITGNKLTF

SEQ ID NO: 741698 - protein, 14 aa, Homo sapiens
  CDR3 for beta chain variable domain of TCR clone 370849 (TRBV12-4, TRBJ2-3)
CASSGQGSTDTQYF

SEQ ID NO: 741699 - protein, 17 aa, Homo sapiens
  CDR3 for alpha chain variable domain of TCR clone 370850 (TRAV23/DV6, TRAJ57)
CAASSTLSQGGSEKLVF

SEQ ID NO: 741700 - protein, 12 aa, Homo sapiens
  CDR3 for beta chain variable domain of TCR clone 370850 (TRBV19, TRBJ2-1)
CASSRQGAEQFF

SEQ ID NO: 741701 - protein, 14 aa, Homo sapiens
  CDR3 for alpha chain variable domain of TCR clone 370851 (TRAV25, TRAJ53)
CSHGGGGSNYKLTF

SEQ ID NO: 741702 - protein, 11 aa, Homo sapiens
  CDR3 for beta chain variable domain of TCR clone 370851 (TRBV11-3, TRBJ2-2)
CASSSGGELFF

SEQ ID NO: 741703 - protein, 14 aa, Homo sapiens
  CDR3 for alpha chain variable domain of TCR clone 370852 (TRAV12-1, TRAJ12)
CVVNGRDSSYKLIF

SEQ ID NO: 741704 - protein, 13 aa, Homo sapiens
  CDR3 for beta chain variable domain of TCR clone 370852 (TRBV28, TRBJ2-2)
CASIRESTGELFC

SEQ ID NO: 741705 - protein, 16 aa, Homo sapiens
  CDR3 for alpha chain variable domain of TCR clone 370853 (TRAV35, TRAJ42)
GRMERYYGGSQGNLIF

SEQ ID NO: 741706 - protein, 12 aa, Homo sapiens
  CDR3 for beta chain variable domain of TCR clone 370853 (TRBV7-8, TRBJ2-7)
CASSLGDREQYF

SEQ ID NO: 741707 - protein, 13 aa, Homo sapiens
  CDR3 for alpha chain variable domain of TCR clone 370854 (TRAV17, TRAJ39)
CATDYGAGNMLTF

SEQ ID NO: 741708 - protein, 13 aa, Homo sapiens
  CDR3 for beta chain variable domain of TCR clone 370854 (TRBV20-1, TRBJ1-1)
CSARGGGNTEAFF

SEQ ID NO: 741709 - protein, 17 aa, Homo sapiens
  CDR3 for alpha chain variable domain of TCR clone 370855 (TRAV26-1, TRAJ37)
CIVRVITVSSNTGKLIF

SEQ ID NO: 741710 - protein, 16 aa, Homo sapiens
  CDR3 for beta chain variable domain of TCR clone 370855 (TRBV2, TRBJ2-1)
CASSVGGSLSYNEQFF

SEQ ID NO: 741711 - protein, 13 aa, Homo sapiens
  CDR3 for alpha chain variable domain of TCR clone 370856 (TRAV13-2, TRAJ13)
CAERPGGYQKVTF

SEQ ID NO: 741712 - protein, 13 aa, Homo sapiens
  CDR3 for beta chain variable domain of TCR clone 370856 (TRBV27, TRBJ2-7)
CASSFSQGYEQYF

SEQ ID NO: 741713 - protein, 13 aa, Homo sapiens
  CDR3 for alpha chain variable domain of TCR clone 370857 (TRAV12-2, TRAJ6)
CAVNVSRKLHTYI

SEQ ID NO: 741714 - protein, 14 aa, Homo sapiens
  CDR3 for beta chain variable domain of TCR clone 370857 (TRBV6-1, TRBJ1-3)
CASVQGGGGNTIYF

SEQ ID NO: 741715 - protein, 16 aa, Homo sapiens
  CDR3 for alpha chain variable domain of TCR clone 370858 (TRAV30, TRAJ24)
CGTEIVDADSWGKFQF

SEQ ID NO: 741716 - protein, 14 aa, Homo sapiens
  CDR3 for beta chain variable domain of TCR clone 370858 (TRBV12-5, TRBJ2-5)
CSSGSRTHRETQSL

SEQ ID NO: 741717 - protein, 12 aa, Homo sapiens
  CDR3 for alpha chain variable domain of TCR clone 370859 (TRAV8-3, TRAJ20)
CAVGANDHKLSF

SEQ ID NO: 741718 - protein, 16 aa, Homo sapiens
  CDR3 for beta chain variable domain of TCR clone 370859 (TRBV19, TRBJ2-2)
CASRSPGTGATEELFF

SEQ ID NO: 741719 - protein, 15 aa, Homo sapiens
  CDR3 for alpha chain variable domain of TCR clone 370860 (TRAV27, TRAJ42)
CAGGNYGGSQGNLIF

SEQ ID NO: 741720 - protein, 15 aa, Homo sapiens
  CDR3 for beta chain variable domain of TCR clone 370860 (TRBV6-3, TRBJ2-7)
CASSSPGTVFYEQYF

SEQ ID NO: 741721 - protein, 11 aa, Homo sapiens
  CDR3 for alpha chain variable domain of TCR clone 370861 (TRAV17, TRAJ31)
CATSNNARLMS

SEQ ID NO: 741722 - protein, 14 aa, Homo sapiens
  CDR3 for beta chain variable domain of TCR clone 370861 (TRBV18, TRBJ2-7)
CASSPRGGAYEQYF

SEQ ID NO: 741723 - protein, 13 aa, Homo sapiens
  CDR3 for alpha chain variable domain of TCR clone 370862 (TRAV8-6, TRAJ5)
CAVLDTGRRALTF

SEQ ID NO: 741724 - protein, 12 aa, Homo sapiens
  CDR3 for beta chain variable domain of TCR clone 370862 (TRBV7-9, TRBJ1-6)
CASSTSESPLHF

SEQ ID NO: 741725 - protein, 11 aa, Homo sapiens
  CDR3 for alpha chain variable domain of TCR clone 370863 (TRAV3, TRAJ21)
CAVGNFDKFYF

SEQ ID NO: 741726 - protein, 16 aa, Homo sapiens
  CDR3 for beta chain variable domain of TCR clone 370863 (TRBV19, TRBJ2-1)
CASSKAGPSSYNGQFF

SEQ ID NO: 741727 - protein, 11 aa, Homo sapiens
  CDR3 for alpha chain variable domain of TCR clone 370864 (TRAV2, TRAJ13)
CASGGYQKVTF

SEQ ID NO: 741728 - protein, 15 aa, Homo sapiens
  CDR3 for beta chain variable domain of TCR clone 370864 (TRBV29-1, TRBJ2-1)
CSGRDRKSSYNEQFC

SEQ ID NO: 741729 - protein, 13 aa, Homo sapiens
  CDR3 for alpha chain variable domain of TCR clone 370865 (TRAV8-1, TRAJ39)
CAVANNAGNMITF

SEQ ID NO: 741730 - protein, 15 aa, Homo sapiens
  CDR3 for beta chain variable domain of TCR clone 370865 (TRBV7-2, TRBJ2-1)
CASSLNRGAYNEQFF

SEQ ID NO: 741731 - protein, 18 aa, Homo sapiens
  CDR3 for alpha chain variable domain of TCR clone 370866 (TRAV12-3, TRAJ52)
CAMSVGGAGGTGYGKLTF

SEQ ID NO: 741732 - protein, 15 aa, Homo sapiens
  CDR3 for beta chain variable domain of TCR clone 370866 (TRBV27, TRBJ1-6)
CASSFDRGLGSPLHL

SEQ ID NO: 741733 - protein, 13 aa, Homo sapiens
  CDR3 for alpha chain variable domain of TCR clone 370867 (TRAV12-2, TRAJ6)
CAVNVSRKLHTYI

SEQ ID NO: 741734 - protein, 16 aa, Homo sapiens
  CDR3 for beta chain variable domain of TCR clone 370867 (TRBV4-2, TRBJ2-7)
CASSQEGLANSYEQYF

SEQ ID NO: 741735 - protein, 14 aa, Homo sapiens
  CDR3 for alpha chain variable domain of TCR clone 370868 (TRAV1-2, TRAJ16)
CAVNRFSDGQKLLF

SEQ ID NO: 741736 - protein, 15 aa, Homo sapiens
  CDR3 for beta chain variable domain of TCR clone 370868 (TRBV6-3, TRBJ2-7)
CASSSPGTVFYEQYY

SEQ ID NO: 741737 - protein, 14 aa, Homo sapiens
  CDR3 for alpha chain variable domain of TCR clone 370869 (TRAV13-1, )
CAANIQNPDPAVYQ

SEQ ID NO: 741738 - protein, 15 aa, Homo sapiens
  CDR3 for beta chain variable domain of TCR clone 370869 (TRBV7-9, TRBJ2-3)
CASSVGDRYTDTQYF

SEQ ID NO: 741739 - protein, 17 aa, Homo sapiens
  CDR3 for alpha chain variable domain of TCR clone 370870 (TRAV4, TRAJ18)
CLVGERSVGSTLGGRYF

SEQ ID NO: 741740 - protein, 14 aa, Homo sapiens
  CDR3 for beta chain variable domain of TCR clone 370870 (TRBV6-5, TRBJ1-2)
CASSYDGTGGGYTF

SEQ ID NO: 741741 - protein, 12 aa, Homo sapiens
  CDR3 for alpha chain variable domain of TCR clone 370871 (TRAV12-3, TRAJ13)
CNELWGLPEVTF

SEQ ID NO: 741742 - protein, 13 aa, Homo sapiens
  CDR3 for beta chain variable domain of TCR clone 370871 (TRBV20-1, TRBJ1-1)
CSAPPGGHTEAFF

SEQ ID NO: 741743 - protein, 17 aa, Homo sapiens
  CDR3 for alpha chain variable domain of TCR clone 370872 (TRAV3, TRAJ42)
CAVIDSDYGGSQGNLIF

SEQ ID NO: 741744 - protein, 15 aa, Homo sapiens
  CDR3 for beta chain variable domain of TCR clone 370872 (TRBV6-6, TRBJ2-7)
CASSYSYGGSYEQYF

SEQ ID NO: 741745 - protein, 17 aa, Homo sapiens
  CDR3 for alpha chain variable domain of TCR clone 370873 (TRAV14/DV4, TRAJ4)
CAMIEASGRGGYNKLIF

SEQ ID NO: 741746 - protein, 14 aa, Homo sapiens
  CDR3 for beta chain variable domain of TCR clone 370873 (TRBV19, TRBJ2-7)
CASSMGQGAIEQYF

SEQ ID NO: 741747 - protein, 15 aa, Homo sapiens
  CDR3 for alpha chain variable domain of TCR clone 370874 (TRAV38-1, TRAJ37)
CAFIFGSGNTGNLVF

SEQ ID NO: 741748 - protein, 12 aa, Homo sapiens
  CDR3 for beta chain variable domain of TCR clone 370874 (TRBV7-9, TRBJ2-7)
CASSLEGYEQYF

SEQ ID NO: 741749 - protein, 14 aa, Homo sapiens
  CDR3 for alpha chain variable domain of TCR clone 370875 (TRAV12-2, TRAJ44)
CAVNPAGTASKLTF

SEQ ID NO: 741750 - protein, 16 aa, Homo sapiens
  CDR3 for beta chain variable domain of TCR clone 370875 (TRBV2, TRBJ2-6)
CASSGVGGAGANVLTF

SEQ ID NO: 741751 - protein, 11 aa, Homo sapiens
  CDR3 for alpha chain variable domain of TCR clone 370876 (TRAV8-4, TRAJ9)
CADPKYLRLQN

SEQ ID NO: 741752 - protein, 11 aa, Homo sapiens
  CDR3 for beta chain variable domain of TCR clone 370876 (TRBV7-9, TRBJ2-6)
CASPRANVLTF

SEQ ID NO: 741753 - protein, 13 aa, Homo sapiens
  CDR3 for alpha chain variable domain of TCR clone 370877 (TRAV29/DV5, TRAJ44)
CAASTVTASKLTF

SEQ ID NO: 741754 - protein, 13 aa, Homo sapiens
  CDR3 for beta chain variable domain of TCR clone 370877 (TRBV19, TRBJ2-7)
CASRKAGGSEQYF

SEQ ID NO: 741755 - protein, 13 aa, Homo sapiens
  CDR3 for alpha chain variable domain of TCR clone 370878 (TRAV20, TRAJ34)
CAVSSYNTAKLIF

SEQ ID NO: 741756 - protein, 13 aa, Homo sapiens
  CDR3 for beta chain variable domain of TCR clone 370878 (TRBV7-9, TRBJ1-2)
CASSLKQNYGYTF

SEQ ID NO: 741757 - protein, 13 aa, Homo sapiens
  CDR3 for alpha chain variable domain of TCR clone 370879 (TRAV13-1, TRAJ43)
CAASLSNNNDMRF

SEQ ID NO: 741758 - protein, 20 aa, Homo sapiens
  CDR3 for beta chain variable domain of TCR clone 370879 (TRBV5-1, TRBJ2-5)
GSWCSVSAGCWGGGEKTQYF

SEQ ID NO: 741759 - protein, 12 aa, Homo sapiens
  CDR3 for alpha chain variable domain of TCR clone 370880 (TRAV12-3, TRAJ17)
CAMTLTGNKLTF

SEQ ID NO: 741760 - protein, 15 aa, Homo sapiens
  CDR3 for beta chain variable domain of TCR clone 370880 (TRBV7-6, TRBJ2-5)
CASSKPTGPQETQYF

SEQ ID NO: 741761 - protein, 11 aa, Homo sapiens
  CDR3 for alpha chain variable domain of TCR clone 370881 (TRAV13-1, TRAJ6)
CAILGSYIPTF

SEQ ID NO: 741762 - protein, 13 aa, Homo sapiens
  CDR3 for beta chain variable domain of TCR clone 370881 (TRBV6-6, TRBJ2-1)
CASSLHQGDEQFF

SEQ ID NO: 741763 - protein, 17 aa, Homo sapiens
  CDR3 for alpha chain variable domain of TCR clone 370882 (TRAV3, TRAJ6)
CAVRDGPRAGGSYIPPF

SEQ ID NO: 741764 - protein, 14 aa, Homo sapiens
  CDR3 for beta chain variable domain of TCR clone 370882 (TRBV7-2, TRBJ2-7)
CASSPKTSLYEQYF

SEQ ID NO: 741765 - protein, 14 aa, Homo sapiens
  CDR3 for alpha chain variable domain of TCR clone 370883 (TRAV12-2, TRAJ40)
YAVKIPSGTYKYIF

SEQ ID NO: 741766 - protein, 13 aa, Homo sapiens
  CDR3 for beta chain variable domain of TCR clone 370883 (TRBV7-9, TRBJ1-2)
CASRLKQNYGYTF

SEQ ID NO: 741767 - protein, 12 aa, Homo sapiens
  CDR3 for alpha chain variable domain of TCR clone 370884 (TRAV27, TRAJ35)
CAGADFGNVLHC

SEQ ID NO: 741768 - protein, 15 aa, Homo sapiens
  CDR3 for beta chain variable domain of TCR clone 370884 (TRBV5-1, TRBJ1-3)
CASSLEGGSGNTIYF

SEQ ID NO: 741769 - protein, 13 aa, Homo sapiens
  CDR3 for alpha chain variable domain of TCR clone 370885 (TRAV27, TRAJ18)
CAGRGSTLGRLYF

SEQ ID NO: 741770 - protein, 14 aa, Homo sapiens
  CDR3 for beta chain variable domain of TCR clone 370885 (TRBV5-4, TRBJ1-1)
CASSLDSRRDEAFF

SEQ ID NO: 741771 - protein, 11 aa, Homo sapiens
  CDR3 for alpha chain variable domain of TCR clone 370886 (TRAV12-2, TRAJ49)
CAVNTGNQFYF

SEQ ID NO: 741772 - protein, 12 aa, Homo sapiens
  CDR3 for beta chain variable domain of TCR clone 370886 (TRBV2, TRBJ2-3)
CVSSGRFDTQYF

SEQ ID NO: 741773 - protein, 12 aa, Homo sapiens
  CDR3 for alpha chain variable domain of TCR clone 370887 (TRAV1-1, TRAJ24)
CAVRGSCGKFQF

SEQ ID NO: 741774 - protein, 12 aa, Homo sapiens
  CDR3 for beta chain variable domain of TCR clone 370887 (TRBV11-2, TRBJ2-2)
CASSLGGGELFL

SEQ ID NO: 741775 - protein, 14 aa, Homo sapiens
  CDR3 for alpha chain variable domain of TCR clone 370888 (TRAV12-3, TRAJ9)
CAMSVETGGFKTIF

SEQ ID NO: 741776 - protein, 14 aa, Homo sapiens
  CDR3 for beta chain variable domain of TCR clone 370888 (TRBV7-2, TRBJ2-7)
CASSLYPGRYEQYS

SEQ ID NO: 741777 - protein, 14 aa, Homo sapiens
  CDR3 for alpha chain variable domain of TCR clone 370889 (TRAV12-3, TRAJ10)
SHLPLTGGGNKLTF

SEQ ID NO: 741778 - protein, 14 aa, Homo sapiens
  CDR3 for beta chain variable domain of TCR clone 370889 (TRBV5-1, TRBJ2-1)
CASSWSGSYNEQFF

SEQ ID NO: 741779 - protein, 13 aa, Homo sapiens
  CDR3 for alpha chain variable domain of TCR clone 370890 (TRAV30, TRAJ24)
CGTVTDSWGKLQF

SEQ ID NO: 741780 - protein, 18 aa, Homo sapiens
  CDR3 for beta chain variable domain of TCR clone 370890 (TRBV7-9, TRBJ2-1)
CASSTGLAEGSSYNEQFF

SEQ ID NO: 741781 - protein, 13 aa, Homo sapiens
  CDR3 for alpha chain variable domain of TCR clone 370891 (TRAV12-1, TRAJ42)
CGGVGGSQGNLIF

SEQ ID NO: 741782 - protein, 13 aa, Homo sapiens
  CDR3 for beta chain variable domain of TCR clone 370891 (TRBV3-1, TRBJ1-1)
CASSPGVITEAFF

SEQ ID NO: 741783 - protein, 15 aa, Homo sapiens
  CDR3 for alpha chain variable domain of TCR clone 370892 (TRAV9-2, TRAJ52)
CASNAGGTSYGKLTF

SEQ ID NO: 741784 - protein, 13 aa, Homo sapiens
  CDR3 for beta chain variable domain of TCR clone 370892 (TRBV4-1, TRBJ2-2)
CASSQENTGELFF

SEQ ID NO: 741785 - protein, 13 aa, Homo sapiens
  CDR3 for alpha chain variable domain of TCR clone 370893 (TRAV12-3, TRAJ33)
CAMSVNSNYQLIR

SEQ ID NO: 741786 - protein, 11 aa, Homo sapiens
  CDR3 for beta chain variable domain of TCR clone 370893 (TRBV7-3, TRBJ2-5)
CASSLSETQYF

SEQ ID NO: 741787 - protein, 13 aa, Homo sapiens
  CDR3 for alpha chain variable domain of TCR clone 370894 (TRAV35, TRAJ22)
CAGLSGSARQLTF

SEQ ID NO: 741788 - protein, 16 aa, Homo sapiens
  CDR3 for beta chain variable domain of TCR clone 370894 (TRBV7-9, TRBJ2-1)
CASSLVRTGQGNEQFF

SEQ ID NO: 741789 - protein, 17 aa, Homo sapiens
  CDR3 for alpha chain variable domain of TCR clone 370895 (TRAV24, TRAJ42)
CAFRVKNYGGRQGNLIF

SEQ ID NO: 741790 - protein, 15 aa, Homo sapiens
  CDR3 for beta chain variable domain of TCR clone 370895 (TRBV4-3, TRBJ2-7)
CASSQGDWGDYEQYF

SEQ ID NO: 741791 - protein, 13 aa, Homo sapiens
  CDR3 for alpha chain variable domain of TCR clone 370896 (TRAV2, TRAJ40)
CAVVTSGTYKYIF

SEQ ID NO: 741792 - protein, 14 aa, Homo sapiens
  CDR3 for beta chain variable domain of TCR clone 370896 (TRBV19, TRBJ2-1)
CASPTVVLSGGQFF

SEQ ID NO: 741793 - protein, 15 aa, Homo sapiens
  CDR3 for alpha chain variable domain of TCR clone 370897 (TRAV4, TRAJ39)
CLVGPNNNAGNMLTF

SEQ ID NO: 741794 - protein, 16 aa, Homo sapiens
  CDR3 for beta chain variable domain of TCR clone 370897 (TRBV18, TRBJ2-2)
CASSPPRTANTGELFF

SEQ ID NO: 741795 - protein, 16 aa, Homo sapiens
  CDR3 for alpha chain variable domain of TCR clone 370898 (TRAV21, TRAJ37)
CAVRPRGSSNTGKLIF

SEQ ID NO: 741796 - protein, 13 aa, Homo sapiens
  CDR3 for beta chain variable domain of TCR clone 370898 (TRBV20-1, TRBJ2-2)
CSAISGGAGELFF

SEQ ID NO: 741797 - protein, 16 aa, Homo sapiens
  CDR3 for alpha chain variable domain of TCR clone 370899 (TRAV12-2, TRAJ32)
CAVNLGQGGATNKLIF

SEQ ID NO: 741798 - protein, 16 aa, Homo sapiens
  CDR3 for beta chain variable domain of TCR clone 370899 (TRBV12-4, TRBJ2-5)
CASSFFVRGRQETQYF

SEQ ID NO: 741799 - protein, 14 aa, Homo sapiens
  CDR3 for alpha chain variable domain of TCR clone 370900 (TRAV2, TRAJ37)
CAVEDQGNTGKLIF

SEQ ID NO: 741800 - protein, 14 aa, Homo sapiens
  CDR3 for beta chain variable domain of TCR clone 370900 (TRBV18, TRBJ2-1)
CASSPHGRFNEQFF

SEQ ID NO: 741801 - protein, 17 aa, Homo sapiens
  CDR3 for alpha chain variable domain of TCR clone 370901 (TRAV12-2, TRAJ3)
CAVNIGERYSSASKIIF

SEQ ID NO: 741802 - protein, 15 aa, Homo sapiens
  CDR3 for beta chain variable domain of TCR clone 370901 (TRBV20-1, TRBJ2-7)
CSARDRVSGMDEQYF

SEQ ID NO: 741803 - protein, 16 aa, Homo sapiens
  CDR3 for alpha chain variable domain of TCR clone 370902 (TRAV13-2, TRAJ28)
CAEKSYSVAGSYQLTF

SEQ ID NO: 741804 - protein, 16 aa, Homo sapiens
  CDR3 for beta chain variable domain of TCR clone 370902 (TRBV19, TRBJ2-1)
CASSKAGPSSYNEQFF

SEQ ID NO: 741805 - protein, 14 aa, Homo sapiens
  CDR3 for alpha chain variable domain of TCR clone 370903 (TRAV23/DV6, TRAJ57)
CAASSQGGSEKLVF

SEQ ID NO: 741806 - protein, 13 aa, Homo sapiens
  CDR3 for beta chain variable domain of TCR clone 370903 (TRBV11-2, TRBJ2-7)
CASSSYPSYEQYF

SEQ ID NO: 741807 - protein, 12 aa, Homo sapiens
  CDR3 for alpha chain variable domain of TCR clone 370904 (TRAV27, TRAJ13)
CAGVRGYQKVTF

SEQ ID NO: 741808 - protein, 16 aa, Homo sapiens
  CDR3 for beta chain variable domain of TCR clone 370904 (TRBV28, TRBJ2-1)
CASSSSYSGRLNEQFF

SEQ ID NO: 741809 - protein, 11 aa, Homo sapiens
  CDR3 for alpha chain variable domain of TCR clone 370905 (TRAV30, TRAJ24)
WMLTAGGKFQF

SEQ ID NO: 741810 - protein, 14 aa, Homo sapiens
  CDR3 for beta chain variable domain of TCR clone 370905 (TRBV12-5, TRBJ2-5)
YASGSRTHQETQYF

SEQ ID NO: 741811 - protein, 15 aa, Homo sapiens
  CDR3 for alpha chain variable domain of TCR clone 370906 (TRAV26-1, TRAJ29)
CIVRVEGSGNTPLVF

SEQ ID NO: 741812 - protein, 12 aa, Homo sapiens
  CDR3 for beta chain variable domain of TCR clone 370906 (TRBV12-5, TRBJ2-5)
CASGQGVETQYF

SEQ ID NO: 741813 - protein, 14 aa, Homo sapiens
  CDR3 for alpha chain variable domain of TCR clone 370907 (TRAV23/DV6, TRAJ4)
CAAPSSGGYNKLIF

SEQ ID NO: 741814 - protein, 16 aa, Homo sapiens
  CDR3 for beta chain variable domain of TCR clone 370907 (TRBV19, TRBJ1-1)
CARRFGGPVTGTEAFF

SEQ ID NO: 741815 - protein, 14 aa, Homo sapiens
  CDR3 for alpha chain variable domain of TCR clone 370908 (TRAV21, TRAJ45)
CAVSSGGGAGGLTF

SEQ ID NO: 741816 - protein, 16 aa, Homo sapiens
  CDR3 for beta chain variable domain of TCR clone 370908 (TRBV7-6, TRBJ2-7)
CASSGGTGALSYEQYL

SEQ ID NO: 741817 - protein, 13 aa, Homo sapiens
  CDR3 for alpha chain variable domain of TCR clone 370909 (TRAV13-1, TRAJ9)
CAASGTGGFKTIF

SEQ ID NO: 741818 - protein, 15 aa, Homo sapiens
  CDR3 for beta chain variable domain of TCR clone 370909 (TRBV10-2, TRBJ2-6)
CASSEQGTGANVLTF

SEQ ID NO: 741819 - protein, 15 aa, Homo sapiens
  CDR3 for alpha chain variable domain of TCR clone 370910 (TRAV20, TRAJ24)
CAVQAAPDSWGKFQF

SEQ ID NO: 741820 - protein, 14 aa, Homo sapiens
  CDR3 for beta chain variable domain of TCR clone 370910 (TRBV20-1, TRBJ1-1)
CSARDRGQGSEDFF

SEQ ID NO: 741821 - protein, 15 aa, Homo sapiens
  CDR3 for alpha chain variable domain of TCR clone 370911 (TRAV21, TRAJ53)
CATLNTGGSNYKLTF

SEQ ID NO: 741822 - protein, 16 aa, Homo sapiens
  CDR3 for beta chain variable domain of TCR clone 370911 (TRBV9, TRBJ2-1)
CASSVGGGGNYNEQFF

SEQ ID NO: 741823 - protein, 16 aa, Homo sapiens
  CDR3 for alpha chain variable domain of TCR clone 370912 (TRAV12-1, TRAJ53)
CVVTSVAGGSNYKLTF

SEQ ID NO: 741824 - protein, 13 aa, Homo sapiens
  CDR3 for beta chain variable domain of TCR clone 370912 (TRBV12-4, TRBJ1-2)
CASSLRQGKGYTF

SEQ ID NO: 741825 - protein, 12 aa, Homo sapiens
  CDR3 for alpha chain variable domain of TCR clone 370913 (TRAV12-3, TRAJ17)
CAMTLTGNKLTF

SEQ ID NO: 741826 - protein, 15 aa, Homo sapiens
  CDR3 for beta chain variable domain of TCR clone 370913 (TRBV7-6, TRBJ2-1)
CASSPGQGPYNEQFF

SEQ ID NO: 741827 - protein, 11 aa, Homo sapiens
  CDR3 for alpha chain variable domain of TCR clone 370914 (TRAV21, TRAJ34)
CAVTNTDKLLF

SEQ ID NO: 741828 - protein, 12 aa, Homo sapiens
  CDR3 for beta chain variable domain of TCR clone 370914 (TRBV7-9, TRBJ1-1)
CASSLVRGEAFF

SEQ ID NO: 741829 - protein, 13 aa, Homo sapiens
  CDR3 for alpha chain variable domain of TCR clone 370915 (TRAV12-2, TRAJ23)
CAVMGIKGGKLIF

SEQ ID NO: 741830 - protein, 13 aa, Homo sapiens
  CDR3 for beta chain variable domain of TCR clone 370915 (TRBV11-3, TRBJ1-2)
CASSLPGDVGYTF

SEQ ID NO: 741831 - protein, 14 aa, Homo sapiens
  CDR3 for alpha chain variable domain of TCR clone 370916 (TRAV12-1, TRAJ40)
CVVNRDSGTYKYIF

SEQ ID NO: 741832 - protein, 15 aa, Homo sapiens
  CDR3 for beta chain variable domain of TCR clone 370916 (TRBV5-1, TRBJ2-7)
CASSSTGDQAYEQYF

SEQ ID NO: 741833 - protein, 12 aa, Homo sapiens
  CDR3 for alpha chain variable domain of TCR clone 370917 (TRAV25, TRAJ5)
CAGGGGRRALTF

SEQ ID NO: 741834 - protein, 17 aa, Homo sapiens
  CDR3 for beta chain variable domain of TCR clone 370917 (TRBV19, TRBJ2-4)
CASRGPRRGETFSTSAP

SEQ ID NO: 741835 - protein, 14 aa, Homo sapiens
  CDR3 for alpha chain variable domain of TCR clone 370918 (TRAV8-3, TRAJ9)
CAVVYNTGGFKTIF

SEQ ID NO: 741836 - protein, 15 aa, Homo sapiens
  CDR3 for beta chain variable domain of TCR clone 370918 (TRBV20-1, TRBJ2-7)
CSARVPAAYFYEQYF

SEQ ID NO: 741837 - protein, 15 aa, Homo sapiens
  CDR3 for alpha chain variable domain of TCR clone 370919 (TRAV2, TRAJ9)
TTVVEDRSGGFKTIF

SEQ ID NO: 741838 - protein, 17 aa, Homo sapiens
  CDR3 for beta chain variable domain of TCR clone 370919 (TRBV4-1, TRBJ2-7)
CASSRDPLGVRGGEQYF

SEQ ID NO: 741839 - protein, 16 aa, Homo sapiens
  CDR3 for alpha chain variable domain of TCR clone 370920 (TRAV12-3, TRAJ53)
CAMSPGSGGSNYNLTF

SEQ ID NO: 741840 - protein, 17 aa, Homo sapiens
  CDR3 for beta chain variable domain of TCR clone 370920 (TRBV28, TRBJ2-5)
CASSTPEGDALQETQYF

SEQ ID NO: 741841 - protein, 15 aa, Homo sapiens
  CDR3 for alpha chain variable domain of TCR clone 370921 (TRAV1-2, TRAJ12)
CAVIPEVDSSYKFIF

SEQ ID NO: 741842 - protein, 12 aa, Homo sapiens
  CDR3 for beta chain variable domain of TCR clone 370921 (TRBV20-1, TRBJ1-2)
CSASHPSGGYTF

SEQ ID NO: 741843 - protein, 11 aa, Homo sapiens
  CDR3 for alpha chain variable domain of TCR clone 370922 (TRAV1-1, TRAJ23)
CAVRQGGKLIF

SEQ ID NO: 741844 - protein, 14 aa, Homo sapiens
  CDR3 for beta chain variable domain of TCR clone 370922 (TRBV19, TRBJ2-1)
CASPTFVLCGEQFF

SEQ ID NO: 741845 - protein, 15 aa, Homo sapiens
  CDR3 for alpha chain variable domain of TCR clone 370923 (TRAV26-2, TRAJ28)
CIFVESGAGSYQLTF

SEQ ID NO: 741846 - protein, 16 aa, Homo sapiens
  CDR3 for beta chain variable domain of TCR clone 370923 (TRBV4-2, TRBJ1-2)
CASSQEIGGASYGYTF

SEQ ID NO: 741847 - protein, 15 aa, Homo sapiens
  CDR3 for alpha chain variable domain of TCR clone 370924 (TRAV8-3, TRAJ32)
CAVGPYGCATNKLVF

SEQ ID NO: 741848 - protein, 14 aa, Homo sapiens
  CDR3 for beta chain variable domain of TCR clone 370924 (TRBV29-1, TRBJ2-2)
CSVLAETNTGELFF

SEQ ID NO: 741849 - protein, 16 aa, Homo sapiens
  CDR3 for alpha chain variable domain of TCR clone 370925 (TRAV4, TRAJ9)
CLVGDPNRPGGFKTIF

SEQ ID NO: 741850 - protein, 13 aa, Homo sapiens
  CDR3 for beta chain variable domain of TCR clone 370925 (TRBV10-2, TRBJ2-7)
CASGASGGYEQYF

SEQ ID NO: 741851 - protein, 11 aa, Homo sapiens
  CDR3 for alpha chain variable domain of TCR clone 370926 (TRAV1-2, TRAJ11)
CAVRGYSTLTF

SEQ ID NO: 741852 - protein, 12 aa, Homo sapiens
  CDR3 for beta chain variable domain of TCR clone 370926 (TRBV12-4, TRBJ2-3)
CASSTLPDTQYF

SEQ ID NO: 741853 - protein, 14 aa, Homo sapiens
  CDR3 for alpha chain variable domain of TCR clone 370927 (TRAV1-2, TRAJ16)
CAVHRFSDGQKLLF

SEQ ID NO: 741854 - protein, 16 aa, Homo sapiens
  CDR3 for beta chain variable domain of TCR clone 370927 (TRBV29-1, TRBJ2-7)
CSVEVVGTSGSYEQYF

SEQ ID NO: 741855 - protein, 13 aa, Homo sapiens
  CDR3 for alpha chain variable domain of TCR clone 370928 (TRAV14/DV4, TRAJ23)
CAMREVKGGKLIF

SEQ ID NO: 741856 - protein, 13 aa, Homo sapiens
  CDR3 for beta chain variable domain of TCR clone 370928 (TRBV4-2, TRBJ1-1)
CAGSQAGNTVAFF

SEQ ID NO: 741857 - protein, 15 aa, Homo sapiens
  CDR3 for alpha chain variable domain of TCR clone 370929 (TRAV13-1, TRAJ52)
SYYNAGGTSYGKLTF

SEQ ID NO: 741858 - protein, 11 aa, Homo sapiens
  CDR3 for beta chain variable domain of TCR clone 370929 (TRBV12-4, TRBJ2-2)
CASSPAGELFC

SEQ ID NO: 741859 - protein, 14 aa, Homo sapiens
  CDR3 for alpha chain variable domain of TCR clone 370930 (TRAV8-4, TRAJ9)
CAVRINTGGSKTIF

SEQ ID NO: 741860 - protein, 15 aa, Homo sapiens
  CDR3 for beta chain variable domain of TCR clone 370930 (TRBV10-2, TRBJ2-6)
CASSEQGTGANVLTF

SEQ ID NO: 741861 - protein, 21 aa, Homo sapiens
  CDR3 for alpha chain variable domain of TCR clone 370931 (TRAV1-1, TRAJ6)
CLLLLRCERLERTGGSYIPTF

SEQ ID NO: 741862 - protein, 14 aa, Homo sapiens
  CDR3 for beta chain variable domain of TCR clone 370931 (TRBV19, TRBJ2-7)
CASSDRAGPYEQYF

SEQ ID NO: 741863 - protein, 14 aa, Homo sapiens
  CDR3 for alpha chain variable domain of TCR clone 370932 (TRAV6, TRAJ40)
CALDATSGTYKYIF

SEQ ID NO: 741864 - protein, 16 aa, Homo sapiens
  CDR3 for beta chain variable domain of TCR clone 370932 (TRBV7-8, TRBJ2-5)
CASSTAGGRNQETQYF

SEQ ID NO: 741865 - protein, 14 aa, Homo sapiens
  CDR3 for alpha chain variable domain of TCR clone 370933 (TRAV1-2, TRAJ16)
CAVNRFSDGQKLLF

SEQ ID NO: 741866 - protein, 14 aa, Homo sapiens
  CDR3 for beta chain variable domain of TCR clone 370933 (TRBV7-3, TRBJ1-1)
CASSLEGGNTEAFF

SEQ ID NO: 741867 - protein, 14 aa, Homo sapiens
  CDR3 for alpha chain variable domain of TCR clone 370934 (TRAV13-2, TRAJ11)
CAETGNSGYSTLTF

SEQ ID NO: 741868 - protein, 14 aa, Homo sapiens
  CDR3 for beta chain variable domain of TCR clone 370934 (TRBV12-5, TRBJ2-5)
CASGSRTHQETQYF

SEQ ID NO: 741869 - protein, 18 aa, Homo sapiens
  CDR3 for alpha chain variable domain of TCR clone 370935 (TRAV21, TRAJ52)
CAVRPSPAGGTSYVKLAF

SEQ ID NO: 741870 - protein, 17 aa, Homo sapiens
  CDR3 for beta chain variable domain of TCR clone 370935 (TRBV13, TRBJ2-3)
CASSLSRVAGGRNTQYF

SEQ ID NO: 741871 - protein, 13 aa, Homo sapiens
  CDR3 for alpha chain variable domain of TCR clone 370936 (TRAV27, TRAJ3)
ASLRGSSASKIIF

SEQ ID NO: 741872 - protein, 15 aa, Homo sapiens
  CDR3 for beta chain variable domain of TCR clone 370936 (TRBV28, TRBJ1-3)
CASSMGWATGNTIYF

SEQ ID NO: 741873 - protein, 14 aa, Homo sapiens
  CDR3 for alpha chain variable domain of TCR clone 370937 (TRAV23/DV6, TRAJ21)
CAAYKSGPRDKFYF

SEQ ID NO: 741874 - protein, 16 aa, Homo sapiens
  CDR3 for beta chain variable domain of TCR clone 370937 (TRBV7-3, TRBJ2-2)
CASSLKRGTLSGELFF

SEQ ID NO: 741875 - protein, 14 aa, Homo sapiens
  CDR3 for alpha chain variable domain of TCR clone 370938 (TRAV1-2, TRAJ16)
CAVNRFSDGQKLIF

SEQ ID NO: 741876 - protein, 13 aa, Homo sapiens
  CDR3 for beta chain variable domain of TCR clone 370938 (TRBV20-1, TRBJ1-1)
CSARVGGNTEAFF

SEQ ID NO: 741877 - protein, 13 aa, Homo sapiens
  CDR3 for alpha chain variable domain of TCR clone 370939 (TRAV6, TRAJ33)
CALPMDSNYPLIW

SEQ ID NO: 741878 - protein, 15 aa, Homo sapiens
  CDR3 for beta chain variable domain of TCR clone 370939 (TRBV11-2, TRBJ2-2)
CASRGLAANTGELFF

SEQ ID NO: 741879 - protein, 14 aa, Homo sapiens
  CDR3 for alpha chain variable domain of TCR clone 370940 (TRAV1-1, TRAJ27)
CAVIYNTNAGKSTF

SEQ ID NO: 741880 - protein, 13 aa, Homo sapiens
  CDR3 for beta chain variable domain of TCR clone 370940 (TRBV2, TRBJ1-2)
CASSVRGNYGYTF

SEQ ID NO: 741881 - protein, 12 aa, Homo sapiens
  CDR3 for alpha chain variable domain of TCR clone 370941 (TRAV8-3, TRAJ20)
CAVGANDYKLSF

SEQ ID NO: 741882 - protein, 15 aa, Homo sapiens
  CDR3 for beta chain variable domain of TCR clone 370941 (TRBV28, TRBJ2-3)
CAPTFRDWSTDTQYF

SEQ ID NO: 741883 - protein, 12 aa, Homo sapiens
  CDR3 for alpha chain variable domain of TCR clone 370942 (TRAV12-3, TRAJ40)
CTMSSGTYKYIF

SEQ ID NO: 741884 - protein, 14 aa, Homo sapiens
  CDR3 for beta chain variable domain of TCR clone 370942 (TRBV7-6, TRBJ2-3)
CASSLGTVTDTQYF

SEQ ID NO: 741885 - protein, 18 aa, Homo sapiens
  CDR3 for alpha chain variable domain of TCR clone 370943 (TRAV13-1, TRAJ52)
CAAKNPNAGGTSYGKLTF

SEQ ID NO: 741886 - protein, 14 aa, Homo sapiens
  CDR3 for beta chain variable domain of TCR clone 370943 (TRBV7-2, TRBJ2-7)
CASRSQGAADEQYF

SEQ ID NO: 741887 - protein, 13 aa, Homo sapiens
  CDR3 for alpha chain variable domain of TCR clone 370944 (TRAV12-3, TRAJ54)
CALVPQGAQKLVF

SEQ ID NO: 741888 - protein, 15 aa, Homo sapiens
  CDR3 for beta chain variable domain of TCR clone 370944 (TRBV4-1, TRBJ2-2)
GASSQDSRGTGELFF

SEQ ID NO: 741889 - protein, 14 aa, Homo sapiens
  CDR3 for alpha chain variable domain of TCR clone 370945 (TRAV38-1, TRAJ43)
CAFMKHNNNNDMRF

SEQ ID NO: 741890 - protein, 15 aa, Homo sapiens
  CDR3 for beta chain variable domain of TCR clone 370945 (TRBV9, TRBJ1-6)
CASSVAGTGDPPLHF

SEQ ID NO: 741891 - protein, 18 aa, Homo sapiens
  CDR3 for alpha chain variable domain of TCR clone 370946 (TRAV26-1, TRAJ52)
CIVRVEGAGGTSYGKLTF

SEQ ID NO: 741892 - protein, 15 aa, Homo sapiens
  CDR3 for beta chain variable domain of TCR clone 370946 (TRBV6-1, TRBJ2-3)
CASSERGGITDTQYF

SEQ ID NO: 741893 - protein, 14 aa, Homo sapiens
  CDR3 for alpha chain variable domain of TCR clone 370947 (TRAV8-4, TRAJ37)
CAVSESSNKGKLIF

SEQ ID NO: 741894 - protein, 16 aa, Homo sapiens
  CDR3 for beta chain variable domain of TCR clone 370947 (TRBV19, TRBJ1-5)
CASSTWTGGGNQPQHF

SEQ ID NO: 741895 - protein, 19 aa, Homo sapiens
  CDR3 for alpha chain variable domain of TCR clone 370948 (TRAV2, TRAJ20)
ILQVREADAAVYRDCKLSF

SEQ ID NO: 741896 - protein, 17 aa, Homo sapiens
  CDR3 for beta chain variable domain of TCR clone 370948 (TRBV11-2, TRBJ2-1)
CASSLYPRGVEYNEQFF

SEQ ID NO: 741897 - protein, 14 aa, Homo sapiens
  CDR3 for alpha chain variable domain of TCR clone 370949 (TRAV12-1, TRAJ3)
CVVNSGSSASKIIF

SEQ ID NO: 741898 - protein, 15 aa, Homo sapiens
  CDR3 for beta chain variable domain of TCR clone 370949 (TRBV5-7, TRBJ1-2)
CAGSSPGQGNYGYTF

SEQ ID NO: 741899 - protein, 16 aa, Homo sapiens
  CDR3 for alpha chain variable domain of TCR clone 370950 (TRAV13-2, TRAJ32)
CAENMTYGGATNKLIF

SEQ ID NO: 741900 - protein, 14 aa, Homo sapiens
  CDR3 for beta chain variable domain of TCR clone 370950 (TRBV15, TRBJ2-5)
CATSSTGYQETQCF

SEQ ID NO: 741901 - protein, 12 aa, Homo sapiens
  CDR3 for alpha chain variable domain of TCR clone 370951 (TRAV12-3, TRAJ17)
CAMTLTGNKPTF

SEQ ID NO: 741902 - protein, 13 aa, Homo sapiens
  CDR3 for beta chain variable domain of TCR clone 370951 (TRBV5-1, TRBJ1-1)
CASSADWDTEAFF

SEQ ID NO: 741903 - protein, 16 aa, Homo sapiens
  CDR3 for alpha chain variable domain of TCR clone 370952 (TRAV1-1, TRAJ31)
CLLLLRCEANNARLIF

SEQ ID NO: 741904 - protein, 13 aa, Homo sapiens
  CDR3 for beta chain variable domain of TCR clone 370952 (TRBV19, TRBJ1-5)
CASSGGRNQPQHF

SEQ ID NO: 741905 - protein, 13 aa, Homo sapiens
  CDR3 for alpha chain variable domain of TCR clone 370953 (TRAV13-2, TRAJ40)
CAEFTSGNYKYIF

SEQ ID NO: 741906 - protein, 12 aa, Homo sapiens
  CDR3 for beta chain variable domain of TCR clone 370953 (TRBV11-2, TRBJ2-2)
CASSLGGGELFF

SEQ ID NO: 741907 - protein, 13 aa, Homo sapiens
  CDR3 for alpha chain variable domain of TCR clone 370954 (TRAV13-1, TRAJ5)
CAASDTGRRALTF

SEQ ID NO: 741908 - protein, 13 aa, Homo sapiens
  CDR3 for beta chain variable domain of TCR clone 370954 (TRBV27, TRBJ1-1)
CASSLSMGAEAFF

SEQ ID NO: 741909 - protein, 18 aa, Homo sapiens
  CDR3 for alpha chain variable domain of TCR clone 370955 (TRAV21, TRAJ52)
CAVRPSPAGGTSYGKLTF

SEQ ID NO: 741910 - protein, 14 aa, Homo sapiens
  CDR3 for beta chain variable domain of TCR clone 370955 (TRBV19, TRBJ2-1)
CARGARSFQWEQFL

SEQ ID NO: 741911 - protein, 12 aa, Homo sapiens
  CDR3 for alpha chain variable domain of TCR clone 370956 (TRAV8-3, TRAJ20)
CAVGTNDYKLTF

SEQ ID NO: 741912 - protein, 16 aa, Homo sapiens
  CDR3 for beta chain variable domain of TCR clone 370956 (TRBV19, TRBJ2-2)
CASRSPGTGATGELFF

SEQ ID NO: 741913 - protein, 14 aa, Homo sapiens
  CDR3 for alpha chain variable domain of TCR clone 370957 (TRAV13-1, TRAJ35)
CAASKGGFGNVLHC

SEQ ID NO: 741914 - protein, 17 aa, Homo sapiens
  CDR3 for beta chain variable domain of TCR clone 370957 (TRBV4-1, TRBJ2-7)
CASSRDPLGVRGGEQYF

SEQ ID NO: 741915 - protein, 15 aa, Homo sapiens
  CDR3 for alpha chain variable domain of TCR clone 370958 (TRAV35, TRAJ40)
CAGQLGTSGTYKYIF

SEQ ID NO: 741916 - protein, 16 aa, Homo sapiens
  CDR3 for beta chain variable domain of TCR clone 370958 (TRBV7-3, TRBJ2-2)
CASSLKRGTLSGELFF

SEQ ID NO: 741917 - protein, 13 aa, Homo sapiens
  CDR3 for alpha chain variable domain of TCR clone 370959 (TRAV3, TRAJ8)
CAVGFTGFQKLVF

SEQ ID NO: 741918 - protein, 15 aa, Homo sapiens
  CDR3 for beta chain variable domain of TCR clone 370959 (TRBV20-1, TRBJ2-7)
CSARDRVSGMDEQYF

SEQ ID NO: 741919 - protein, 11 aa, Homo sapiens
  CDR3 for alpha chain variable domain of TCR clone 370960 (TRAV2, TRAJ20)
CAVLNDYKLSF

SEQ ID NO: 741920 - protein, 15 aa, Homo sapiens
  CDR3 for beta chain variable domain of TCR clone 370960 (TRBV6-3, TRBJ2-7)
CASSSPGTVFYEQYF

SEQ ID NO: 741921 - protein, 14 aa, Homo sapiens
  CDR3 for alpha chain variable domain of TCR clone 370961 (TRAV8-2, TRAJ4)
CVVSPSGGYNKLIF

SEQ ID NO: 741922 - protein, 15 aa, Homo sapiens
  CDR3 for beta chain variable domain of TCR clone 370961 (TRBV4-1, TRBJ1-4)
CASSDTWGTNEKLFF

SEQ ID NO: 741923 - protein, 16 aa, Homo sapiens
  CDR3 for alpha chain variable domain of TCR clone 370962 (TRAV30, TRAJ24)
CGTEIVDADSWGKFQS

SEQ ID NO: 741924 - protein, 15 aa, Homo sapiens
  CDR3 for beta chain variable domain of TCR clone 370962 (TRBV6-3, TRBJ2-7)
CASSSPGTVFYEQYF

SEQ ID NO: 741925 - protein, 13 aa, Homo sapiens
  CDR3 for alpha chain variable domain of TCR clone 370963 (TRAV8-6, TRAJ41)
SAVSENSGYALNF

SEQ ID NO: 741926 - protein, 17 aa, Homo sapiens
  CDR3 for beta chain variable domain of TCR clone 370963 (TRBV7-2, TRBJ2-3)
CASSLEARGTSTDTQYF

SEQ ID NO: 741927 - protein, 14 aa, Homo sapiens
  CDR3 for alpha chain variable domain of TCR clone 370964 (TRAV16, TRAJ3)
CALRQYSSASKIIF

SEQ ID NO: 741928 - protein, 13 aa, Homo sapiens
  CDR3 for beta chain variable domain of TCR clone 370964 (TRBV6-1, TRBJ1-1)
CASSRQGNTEAFF

SEQ ID NO: 741929 - protein, 14 aa, Homo sapiens
  CDR3 for alpha chain variable domain of TCR clone 370965 (TRAV9-2, TRAJ39)
CALYIYNAGNMLTF

SEQ ID NO: 741930 - protein, 16 aa, Homo sapiens
  CDR3 for beta chain variable domain of TCR clone 370965 (TRBV27, TRBJ2-2)
CASSLSGFGVTGELFF

SEQ ID NO: 741931 - protein, 14 aa, Homo sapiens
  CDR3 for alpha chain variable domain of TCR clone 370966 (TRAV17, TRAJ16)
CATADFSDGQKLLF

SEQ ID NO: 741932 - protein, 17 aa, Homo sapiens
  CDR3 for beta chain variable domain of TCR clone 370966 (TRBV13, TRBJ2-3)
CASSLSRVAGGRNTQYF

SEQ ID NO: 741933 - protein, 18 aa, Homo sapiens
  CDR3 for alpha chain variable domain of TCR clone 370967 (TRAV3, TRAJ42)
CAGRDEGTGGGSQGNLIF

SEQ ID NO: 741934 - protein, 16 aa, Homo sapiens
  CDR3 for beta chain variable domain of TCR clone 370967 (TRBV9, TRBJ1-2)
CASSVAKGRVDYGYTF

SEQ ID NO: 741935 - protein, 16 aa, Homo sapiens
  CDR3 for alpha chain variable domain of TCR clone 370968 (TRAV12-2, TRAJ37)
CAVKEKGSSNTGKLIF

SEQ ID NO: 741936 - protein, 12 aa, Homo sapiens
  CDR3 for beta chain variable domain of TCR clone 370968 (TRBV10-1, TRBJ1-5)
CASSDSNQPQHC

SEQ ID NO: 741937 - protein, 13 aa, Homo sapiens
  CDR3 for alpha chain variable domain of TCR clone 370969 (TRAV12-3, TRAJ9)
CAMRNTGGFKTIF

SEQ ID NO: 741938 - protein, 15 aa, Homo sapiens
  CDR3 for beta chain variable domain of TCR clone 370969 (TRBV5-1, TRBJ2-5)
CASSLGLAEQETQYF

SEQ ID NO: 741939 - protein, 16 aa, Homo sapiens
  CDR3 for alpha chain variable domain of TCR clone 370970 (TRAV1-2, TRAJ16)
CAVNRFSDARSCSLQG

SEQ ID NO: 741940 - protein, 15 aa, Homo sapiens
  CDR3 for beta chain variable domain of TCR clone 370970 (TRBV19, TRBJ1-5)
CASSIVWADNQPQHF

SEQ ID NO: 741941 - protein, 15 aa, Homo sapiens
  CDR3 for alpha chain variable domain of TCR clone 370971 (TRAV26-1, TRAJ40)
CIDRYATSGTYKYIF

SEQ ID NO: 741942 - protein, 11 aa, Homo sapiens
  CDR3 for beta chain variable domain of TCR clone 370971 (TRBV7-9, TRBJ2-1)
CASSSQNEQFC

SEQ ID NO: 741943 - protein, 13 aa, Homo sapiens
  CDR3 for alpha chain variable domain of TCR clone 370972 (TRAV21, TRAJ27)
CAARPGNAGKSTF

SEQ ID NO: 741944 - protein, 15 aa, Homo sapiens
  CDR3 for beta chain variable domain of TCR clone 370972 (TRBV11-2, TRBJ1-6)
CASTGFGTAVSPLHF

SEQ ID NO: 741945 - protein, 14 aa, Homo sapiens
  CDR3 for alpha chain variable domain of TCR clone 370973 (TRAV26-1, TRAJ44)
CISPLPGTASKLTF

SEQ ID NO: 741946 - protein, 13 aa, Homo sapiens
  CDR3 for beta chain variable domain of TCR clone 370973 (TRBV7-2, TRBJ1-5)
CASSFARNQPQHF

SEQ ID NO: 741947 - protein, 16 aa, Homo sapiens
  CDR3 for alpha chain variable domain of TCR clone 370974 (TRAV3, TRAJ3)
CAVRDRAKSSASKIIF

SEQ ID NO: 741948 - protein, 16 aa, Homo sapiens
  CDR3 for beta chain variable domain of TCR clone 370974 (TRBV20-1, TRBJ2-4)
CSATSLAELAKDIQYF

SEQ ID NO: 741949 - protein, 15 aa, Homo sapiens
  CDR3 for alpha chain variable domain of TCR clone 370975 (TRAV20, TRAJ4)
CAVEGSSDGYNKLIF

SEQ ID NO: 741950 - protein, 16 aa, Homo sapiens
  CDR3 for beta chain variable domain of TCR clone 370975 (TRBV7-8, TRBJ2-7)
CASTLGGPLASSTSGR

SEQ ID NO: 741951 - protein, 12 aa, Homo sapiens
  CDR3 for alpha chain variable domain of TCR clone 370976 (TRAV12-3, TRAJ40)
CAMSSGTYKYIF

SEQ ID NO: 741952 - protein, 15 aa, Homo sapiens
  CDR3 for beta chain variable domain of TCR clone 370976 (TRBV7-3, TRBJ2-2)
CASSEAGQGTGELFF

SEQ ID NO: 741953 - protein, 13 aa, Homo sapiens
  CDR3 for alpha chain variable domain of TCR clone 370977 (TRAV3, TRAJ41)
CAVSSNSGYSLNF

SEQ ID NO: 741954 - protein, 12 aa, Homo sapiens
  CDR3 for beta chain variable domain of TCR clone 370977 (TRBV2, TRBJ2-1)
CASRPGPREQFF

SEQ ID NO: 741955 - protein, 16 aa, Homo sapiens
  CDR3 for alpha chain variable domain of TCR clone 370978 (TRAV8-3, TRAJ44)
CAAGASNTGTASRLTF

SEQ ID NO: 741956 - protein, 15 aa, Homo sapiens
  CDR3 for beta chain variable domain of TCR clone 370978 (TRBV27, TRBJ1-5)
CASTFNRGSNQPQHF

SEQ ID NO: 741957 - protein, 13 aa, Homo sapiens
  CDR3 for alpha chain variable domain of TCR clone 370979 (TRAV2, TRAJ29)
CAVYSSGNTPLVF

SEQ ID NO: 741958 - protein, 11 aa, Homo sapiens
  CDR3 for beta chain variable domain of TCR clone 370979 (TRBV19, TRBJ1-1)
CASSIGSEAFF

SEQ ID NO: 741959 - protein, 12 aa, Homo sapiens
  CDR3 for alpha chain variable domain of TCR clone 370980 (TRAV2, TRAJ26)
CAGSPGRLWSGF

SEQ ID NO: 741960 - protein, 16 aa, Homo sapiens
  CDR3 for beta chain variable domain of TCR clone 370980 (TRBV13, TRBJ2-2)
CASSPRTGEHTGELFF

SEQ ID NO: 741961 - protein, 11 aa, Homo sapiens
  CDR3 for alpha chain variable domain of TCR clone 370981 (TRAV29/DV5, TRAJ47)
CAATYGNKLVF

SEQ ID NO: 741962 - protein, 17 aa, Homo sapiens
  CDR3 for beta chain variable domain of TCR clone 370981 (TRBV7-9, TRBJ2-1)
WASSLVASYPSYNEQFF

SEQ ID NO: 741963 - protein, 13 aa, Homo sapiens
  CDR3 for alpha chain variable domain of TCR clone 370982 (TRAV8-3, TRAJ43)
CAVVPYNNNDMRF

SEQ ID NO: 741964 - protein, 17 aa, Homo sapiens
  CDR3 for beta chain variable domain of TCR clone 370982 (TRBV7-7, TRBJ1-1)
CASIGDRPNLGVAEAFF

SEQ ID NO: 741965 - protein, 12 aa, Homo sapiens
  CDR3 for alpha chain variable domain of TCR clone 370983 (TRAV17, TRAJ39)
CATGAAGNMLTF

SEQ ID NO: 741966 - protein, 15 aa, Homo sapiens
  CDR3 for beta chain variable domain of TCR clone 370983 (TRBV4-1, TRBJ2-7)
CASSQQGQGFDEQYF

SEQ ID NO: 741967 - protein, 12 aa, Homo sapiens
  CDR3 for alpha chain variable domain of TCR clone 370984 (TRAV13-2, TRAJ23)
CAERHRGGKLIF

SEQ ID NO: 741968 - protein, 14 aa, Homo sapiens
  CDR3 for beta chain variable domain of TCR clone 370984 (TRBV19, TRBJ2-1)
CASSRLASINEQFF

SEQ ID NO: 741969 - protein, 13 aa, Homo sapiens
  CDR3 for alpha chain variable domain of TCR clone 370985 (TRAV2, TRAJ15)
CAVASQAGTALIF

SEQ ID NO: 741970 - protein, 16 aa, Homo sapiens
  CDR3 for beta chain variable domain of TCR clone 370985 (TRBV7-2, TRBJ1-4)
CASSPVGRFDREKLSF

SEQ ID NO: 741971 - protein, 16 aa, Homo sapiens
  CDR3 for alpha chain variable domain of TCR clone 370986 (TRAV2, TRAJ10)
CCGGSTVTGGGNKLTF

SEQ ID NO: 741972 - protein, 16 aa, Homo sapiens
  CDR3 for beta chain variable domain of TCR clone 370986 (TRBV18, TRBJ1-5)
CASSPGTGNSNQPQHF

SEQ ID NO: 741973 - protein, 16 aa, Homo sapiens
  CDR3 for alpha chain variable domain of TCR clone 370987 (TRAV12-2, TRAJ18)
CAVTTDRGSTLGRLYF

SEQ ID NO: 741974 - protein, 15 aa, Homo sapiens
  CDR3 for beta chain variable domain of TCR clone 370987 (TRBV7-2, TRBJ2-1)
CASSSRTSREDEQFF

SEQ ID NO: 741975 - protein, 15 aa, Homo sapiens
  CDR3 for alpha chain variable domain of TCR clone 370988 (TRAV3, TRAJ29)
CAVRPGNSGNTPLVF

SEQ ID NO: 741976 - protein, 16 aa, Homo sapiens
  CDR3 for beta chain variable domain of TCR clone 370988 (TRBV24-1, TRBJ2-2)
GATSDPGTANTGELFF

SEQ ID NO: 741977 - protein, 23 aa, Homo sapiens
  CDR3 for alpha chain variable domain of TCR clone 370989 (TRAV26-1, TRAJ38)
CIADSAGNNHNQNPDPAVYQLRD

SEQ ID NO: 741978 - protein, 13 aa, Homo sapiens
  CDR3 for beta chain variable domain of TCR clone 370989 (TRBV20-1, TRBJ2-1)
CSARSSPRDEQFF

SEQ ID NO: 741979 - protein, 17 aa, Homo sapiens
  CDR3 for alpha chain variable domain of TCR clone 370990 (TRAV3, TRAJ6)
CAVRDGPRAGGSYIPTF

SEQ ID NO: 741980 - protein, 18 aa, Homo sapiens
  CDR3 for beta chain variable domain of TCR clone 370990 (TRBV7-3, TRBJ2-3)
CASSCTGTYPGSTDTQYF

SEQ ID NO: 741981 - protein, 10 aa, Homo sapiens
  CDR3 for alpha chain variable domain of TCR clone 370991 (TRAV23/DV6, TRAJ57)
CGASSTLSQG

SEQ ID NO: 741982 - protein, 14 aa, Homo sapiens
  CDR3 for beta chain variable domain of TCR clone 370991 (TRBV25-1, TRBJ1-1)
CASTHLGGNTEAFF

SEQ ID NO: 741983 - protein, 15 aa, Homo sapiens
  CDR3 for alpha chain variable domain of TCR clone 370992 (TRAV8-3, TRAJ45)
CASSYSGGGADGLTF

SEQ ID NO: 741984 - protein, 16 aa, Homo sapiens
  CDR3 for beta chain variable domain of TCR clone 370992 (TRBV19, TRBJ2-1)
CASSIDGSFAYNEQFF

SEQ ID NO: 741985 - protein, 12 aa, Homo sapiens
  CDR3 for alpha chain variable domain of TCR clone 370993 (TRAV27, TRAJ21)
CAGVRQLQQILL

SEQ ID NO: 741986 - protein, 17 aa, Homo sapiens
  CDR3 for beta chain variable domain of TCR clone 370993 (TRBV13, TRBJ2-3)
CASSRSRVAGGRNTQYF

SEQ ID NO: 741987 - protein, 12 aa, Homo sapiens
  CDR3 for alpha chain variable domain of TCR clone 370994 (TRAV23/DV6, TRAJ53)
CAASKLGSGGSD

SEQ ID NO: 741988 - protein, 14 aa, Homo sapiens
  CDR3 for beta chain variable domain of TCR clone 370994 (TRBV7-9, TRBJ2-3)
CASSLEQGTNTQYF

SEQ ID NO: 741989 - protein, 12 aa, Homo sapiens
  CDR3 for alpha chain variable domain of TCR clone 370995 (TRAV8-3, TRAJ20)
CAVDFNDYKLSF

SEQ ID NO: 741990 - protein, 15 aa, Homo sapiens
  CDR3 for beta chain variable domain of TCR clone 370995 (TRBV12-4, TRBJ2-2)
CASLRRGDLTGELFF

SEQ ID NO: 741991 - protein, 13 aa, Homo sapiens
  CDR3 for alpha chain variable domain of TCR clone 370996 (TRAV17, TRAJ5)
CAPMDTGRRALTF

SEQ ID NO: 741992 - protein, 15 aa, Homo sapiens
  CDR3 for beta chain variable domain of TCR clone 370996 (TRBV6-6, TRBJ2-5)
CASSPGGGLEETQFF

SEQ ID NO: 741993 - protein, 22 aa, Homo sapiens
  CDR3 for alpha chain variable domain of TCR clone 370997 (TRAV3, )
CAVRDCLNGGNNHIQNPDPAVY

SEQ ID NO: 741994 - protein, 14 aa, Homo sapiens
  CDR3 for beta chain variable domain of TCR clone 370997 (TRBV5-5, TRBJ1-5)
CASSGQGVDQPQHF

SEQ ID NO: 741995 - protein, 12 aa, Homo sapiens
  CDR3 for alpha chain variable domain of TCR clone 370998 (TRAV8-4, TRAJ43)
CAVSVNNNDMRF

SEQ ID NO: 741996 - protein, 17 aa, Homo sapiens
  CDR3 for beta chain variable domain of TCR clone 370998 (TRBV7-8, TRBJ2-6)
CASSAGTGGAGANVLTF

SEQ ID NO: 741997 - protein, 13 aa, Homo sapiens
  CDR3 for alpha chain variable domain of TCR clone 370999 (TRAV8-4, TRAJ9)
CAVSGAGGFKTIF

SEQ ID NO: 741998 - protein, 16 aa, Homo sapiens
  CDR3 for beta chain variable domain of TCR clone 370999 (TRBV5-1, TRBJ2-7)
CASSVTSGPSTYEQYF

SEQ ID NO: 741999 - protein, 23 aa, Homo sapiens
  CDR3 for alpha chain variable domain of TCR clone 371000 (TRAV13-1, TRAJ32)
CAARAVVLQTSSSLELALCLLSS

SEQ ID NO: 742000 - protein, 11 aa, Homo sapiens
  CDR3 for beta chain variable domain of TCR clone 371000 (TRBV7-2, TRBJ2-3)
CASSSSDTQYF

SEQ ID NO: 742001 - protein, 14 aa, Homo sapiens
  CDR3 for alpha chain variable domain of TCR clone 371001 (TRAV13-2, TRAJ10)
CREYCRGGGNKLTF

SEQ ID NO: 742002 - protein, 15 aa, Homo sapiens
  CDR3 for beta chain variable domain of TCR clone 371001 (TRBV7-6, TRBJ2-1)
CASSPGQGPYNEQLF

SEQ ID NO: 742003 - protein, 18 aa, Homo sapiens
  CDR3 for alpha chain variable domain of TCR clone 371002 (TRAV12-3, TRAJ52)
CAMSRTNASGTSYGKLTF

SEQ ID NO: 742004 - protein, 14 aa, Homo sapiens
  CDR3 for beta chain variable domain of TCR clone 371002 (TRBV7-8, TRBJ2-3)
CASSLEAGTDTQYF

SEQ ID NO: 742005 - protein, 14 aa, Homo sapiens
  CDR3 for alpha chain variable domain of TCR clone 371003 (TRAV12-1, TRAJ44)
CVVTHTGTASKLTF

SEQ ID NO: 742006 - protein, 15 aa, Homo sapiens
  CDR3 for beta chain variable domain of TCR clone 371003 (TRBV20-1, TRBJ2-7)
CSARDRVSGMDEQYF

SEQ ID NO: 742007 - protein, 14 aa, Homo sapiens
  CDR3 for alpha chain variable domain of TCR clone 371004 (TRAV12-2, TRAJ15)
CAPNTGQAGTALIF

SEQ ID NO: 742008 - protein, 17 aa, Homo sapiens
  CDR3 for beta chain variable domain of TCR clone 371004 (TRBV5-5, TRBJ1-2)
CASSLGSLDGQSEGYTF

SEQ ID NO: 742009 - protein, 18 aa, Homo sapiens
  CDR3 for alpha chain variable domain of TCR clone 371005 (TRAV21, TRAJ52)
CAVRHSPAGGTGYGKLTF

SEQ ID NO: 742010 - protein, 17 aa, Homo sapiens
  CDR3 for beta chain variable domain of TCR clone 371005 (TRBV13, TRBJ2-3)
CASSLSRVAGGRNTQYF

SEQ ID NO: 742011 - protein, 12 aa, Homo sapiens
  CDR3 for alpha chain variable domain of TCR clone 371006 (TRAV1-1, TRAJ39)
CAVPVVGNMLTF

SEQ ID NO: 742012 - protein, 14 aa, Homo sapiens
  CDR3 for beta chain variable domain of TCR clone 371006 (TRBV5-1, TRBJ2-2)
CASSLVEGSGELFF

SEQ ID NO: 742013 - protein, 12 aa, Homo sapiens
  CDR3 for alpha chain variable domain of TCR clone 371007 (TRAV26-2, TRAJ48)
CILRKGNEKLTF

SEQ ID NO: 742014 - protein, 12 aa, Homo sapiens
  CDR3 for beta chain variable domain of TCR clone 371007 (TRBV28, TRBJ2-1)
CASSRLVGEQFF

SEQ ID NO: 742015 - protein, 12 aa, Homo sapiens
  CDR3 for alpha chain variable domain of TCR clone 371008 (TRAV21, TRAJ33)
CAKMDSNSQLIW

SEQ ID NO: 742016 - protein, 14 aa, Homo sapiens
  CDR3 for beta chain variable domain of TCR clone 371008 (TRBV2, TRBJ2-7)
CASSLTTGGYEHYF

SEQ ID NO: 742017 - protein, 16 aa, Homo sapiens
  CDR3 for alpha chain variable domain of TCR clone 371009 (TRAV3, TRAJ4)
CAVRAFFSGGYNKLIF

SEQ ID NO: 742018 - protein, 16 aa, Homo sapiens
  CDR3 for beta chain variable domain of TCR clone 371009 (TRBV6-1, TRBJ1-6)
CASSERGGAGNSPLHF

SEQ ID NO: 742019 - protein, 13 aa, Homo sapiens
  CDR3 for alpha chain variable domain of TCR clone 371010 (TRAV12-1, TRAJ3)
CVVNPRGASKIIF

SEQ ID NO: 742020 - protein, 13 aa, Homo sapiens
  CDR3 for beta chain variable domain of TCR clone 371010 (TRBV7-9, TRBJ1-2)
CASSPNTGYGYTF

SEQ ID NO: 742021 - protein, 12 aa, Homo sapiens
  CDR3 for alpha chain variable domain of TCR clone 371011 (TRAV3, TRAJ27)
CAVRDGAGKSTS

SEQ ID NO: 742022 - protein, 13 aa, Homo sapiens
  CDR3 for beta chain variable domain of TCR clone 371011 (TRBV10-3, TRBJ1-2)
CAINAALNSGYTF

SEQ ID NO: 742023 - protein, 15 aa, Homo sapiens
  CDR3 for alpha chain variable domain of TCR clone 371012 (TRAV4, TRAJ39)
CLVGPNNNAGNMLTF

SEQ ID NO: 742024 - protein, 13 aa, Homo sapiens
  CDR3 for beta chain variable domain of TCR clone 371012 (TRBV7-9, TRBJ1-2)
CASSLKENYGYTF

SEQ ID NO: 742025 - protein, 14 aa, Homo sapiens
  CDR3 for alpha chain variable domain of TCR clone 371013 (TRAV9-2, TRAJ39)
CALYIYNAGNMLTF

SEQ ID NO: 742026 - protein, 19 aa, Homo sapiens
  CDR3 for beta chain variable domain of TCR clone 371013 (TRBV7-2, TRBJ2-5)
CASSFLRGGKRPSTSGQAR

SEQ ID NO: 742027 - protein, 12 aa, Homo sapiens
  CDR3 for alpha chain variable domain of TCR clone 371014 (TRAV13-2, TRAJ23)
CAARHRGGKLIL

SEQ ID NO: 742028 - protein, 16 aa, Homo sapiens
  CDR3 for beta chain variable domain of TCR clone 371014 (TRBV7-2, TRBJ2-6)
CAILSGVSSGANVLTF

SEQ ID NO: 742029 - protein, 10 aa, Homo sapiens
  CDR3 for alpha chain variable domain of TCR clone 371015 (TRAV21, TRAJ31)
CAVDNARLMF

SEQ ID NO: 742030 - protein, 16 aa, Homo sapiens
  CDR3 for beta chain variable domain of TCR clone 371015 (TRBV5-1, TRBJ2-5)
CASSLALLRAGETQYF

SEQ ID NO: 742031 - protein, 13 aa, Homo sapiens
  CDR3 for alpha chain variable domain of TCR clone 371016 (TRAV12-1, TRAJ43)
CVVSHHNNNDMRF

SEQ ID NO: 742032 - protein, 14 aa, Homo sapiens
  CDR3 for beta chain variable domain of TCR clone 371016 (TRBV5-5, TRBJ2-2)
CASSLLGDTRELFF

SEQ ID NO: 742033 - protein, 11 aa, Homo sapiens
  CDR3 for alpha chain variable domain of TCR clone 371017 (TRAV17, TRAJ9)
CVTTGGFKTIF

SEQ ID NO: 742034 - protein, 11 aa, Homo sapiens
  CDR3 for beta chain variable domain of TCR clone 371017 (TRBV29-1, TRBJ2-5)
CSEDRTGTQYF

SEQ ID NO: 742035 - protein, 10 aa, Homo sapiens
  CDR3 for alpha chain variable domain of TCR clone 371018 (TRAV13-1, TRAJ8)
CAAPFQKLVF

SEQ ID NO: 742036 - protein, 20 aa, Homo sapiens
  CDR3 for beta chain variable domain of TCR clone 371018 (TRBV10-3, TRBJ2-3)
CTSVPSPTLERTSSTDTQYF

SEQ ID NO: 742037 - protein, 15 aa, Homo sapiens
  CDR3 for alpha chain variable domain of TCR clone 371019 (TRAV35, TRAJ45)
CAGRKAGGGADGLTF

SEQ ID NO: 742038 - protein, 14 aa, Homo sapiens
  CDR3 for beta chain variable domain of TCR clone 371019 (TRBV7-2, TRBJ2-7)
CASRSQGAAYEQYF

SEQ ID NO: 742039 - protein, 14 aa, Homo sapiens
  CDR3 for alpha chain variable domain of TCR clone 371020 (TRAV13-1, TRAJ44)
CAAKATGTASKLTF

SEQ ID NO: 742040 - protein, 14 aa, Homo sapiens
  CDR3 for beta chain variable domain of TCR clone 371020 (TRBV19, TRBJ2-2)
CASSTRDRSGELFF

SEQ ID NO: 742041 - protein, 15 aa, Homo sapiens
  CDR3 for alpha chain variable domain of TCR clone 371021 (TRAV27, TRAJ38)
CAARRNAGNNRKLIW

SEQ ID NO: 742042 - protein, 12 aa, Homo sapiens
  CDR3 for beta chain variable domain of TCR clone 371021 (TRBV18, TRBJ2-1)
CASSSDEDEQFF

SEQ ID NO: 742043 - protein, 14 aa, Homo sapiens
  CDR3 for alpha chain variable domain of TCR clone 371022 (TRAV13-2, TRAJ23)
CAENTYNQGGKLIF

SEQ ID NO: 742044 - protein, 12 aa, Homo sapiens
  CDR3 for beta chain variable domain of TCR clone 371022 (TRBV14, TRBJ2-7)
CASSLNQRGQYF

SEQ ID NO: 742045 - protein, 16 aa, Homo sapiens
  CDR3 for alpha chain variable domain of TCR clone 371023 (TRAV23/DV6, TRAJ9)
CAASIGGNTGGFKTIV

SEQ ID NO: 742046 - protein, 13 aa, Homo sapiens
  CDR3 for beta chain variable domain of TCR clone 371023 (TRBV10-3, TRBJ2-7)
CASKLAVNYEQYF

SEQ ID NO: 742047 - protein, 17 aa, Homo sapiens
  CDR3 for alpha chain variable domain of TCR clone 371024 (TRAV14/DV4, TRAJ12)
CAMRELPWMDSSYKLIF

SEQ ID NO: 742048 - protein, 15 aa, Homo sapiens
  CDR3 for beta chain variable domain of TCR clone 371024 (TRBV4-1, TRBJ1-4)
CASSDTGGTNEKLFF

SEQ ID NO: 742049 - protein, 15 aa, Homo sapiens
  CDR3 for alpha chain variable domain of TCR clone 371025 (TRAV17, TRAJ37)
CATDHGSSNTGKLIF

SEQ ID NO: 742050 - protein, 14 aa, Homo sapiens
  CDR3 for beta chain variable domain of TCR clone 371025 (TRBV7-2, TRBJ2-3)
CASSRTSGADTQYL

SEQ ID NO: 742051 - protein, 15 aa, Homo sapiens
  CDR3 for alpha chain variable domain of TCR clone 371026 (TRAV12-1, TRAJ42)
CVVTRDGGSQGNLIF

SEQ ID NO: 742052 - protein, 12 aa, Homo sapiens
  CDR3 for beta chain variable domain of TCR clone 371026 (TRBV19, TRBJ2-1)
CASSMQDTEQFF

SEQ ID NO: 742053 - protein, 16 aa, Homo sapiens
  CDR3 for alpha chain variable domain of TCR clone 371027 (TRAV30, TRAJ24)
CSTEIVDADSWGKFQF

SEQ ID NO: 742054 - protein, 14 aa, Homo sapiens
  CDR3 for beta chain variable domain of TCR clone 371027 (TRBV7-2, TRBJ2-5)
CASSFTQGQETQYF

SEQ ID NO: 742055 - protein, 16 aa, Homo sapiens
  CDR3 for alpha chain variable domain of TCR clone 371028 (TRAV20, TRAJ26)
CAVQHRRDNYGQNFAF

SEQ ID NO: 742056 - protein, 15 aa, Homo sapiens
  CDR3 for beta chain variable domain of TCR clone 371028 (TRBV7-2, TRBJ2-7)
CASSWGQGAIYEQYF

SEQ ID NO: 742057 - protein, 14 aa, Homo sapiens
  CDR3 for alpha chain variable domain of TCR clone 371029 (TRAV12-2, TRAJ3)
CAVSLYSSASKIIF

SEQ ID NO: 742058 - protein, 14 aa, Homo sapiens
  CDR3 for beta chain variable domain of TCR clone 371029 (TRBV27, TRBJ2-1)
CAGSIAETCNEQFF

SEQ ID NO: 742059 - protein, 15 aa, Homo sapiens
  CDR3 for alpha chain variable domain of TCR clone 371030 (TRAV3, TRAJ5)
CAVRDLDTGRRALTF

SEQ ID NO: 742060 - protein, 15 aa, Homo sapiens
  CDR3 for beta chain variable domain of TCR clone 371030 (TRBV28, TRBJ2-1)
CASSIIAGGRSEQFF

SEQ ID NO: 742061 - protein, 16 aa, Homo sapiens
  CDR3 for alpha chain variable domain of TCR clone 371031 (TRAV23/DV6, TRAJ9)
CAASIGGNTGGFKTIF

SEQ ID NO: 742062 - protein, 19 aa, Homo sapiens
  CDR3 for beta chain variable domain of TCR clone 371031 (TRBV7-2, TRBJ2-3)
CASSFLSRNWGGGTDTQYF

SEQ ID NO: 742063 - protein, 16 aa, Homo sapiens
  CDR3 for alpha chain variable domain of TCR clone 371032 (TRAV17, TRAJ9)
CATGEWGGTGGCKTIF

SEQ ID NO: 742064 - protein, 15 aa, Homo sapiens
  CDR3 for beta chain variable domain of TCR clone 371032 (TRBV20-1, TRBJ1-2)
CSARDSRGRNYGYTF

SEQ ID NO: 742065 - protein, 12 aa, Homo sapiens
  CDR3 for alpha chain variable domain of TCR clone 371033 (TRAV27, TRAJ33)
CAGDGSNYQLIW

SEQ ID NO: 742066 - protein, 15 aa, Homo sapiens
  CDR3 for beta chain variable domain of TCR clone 371033 (TRBV27, TRBJ1-5)
CASTFNRGSNQPQHF

SEQ ID NO: 742067 - protein, 16 aa, Homo sapiens
  CDR3 for alpha chain variable domain of TCR clone 371034 (TRAV12-3, TRAJ53)
CAMSPGSGGSNYKLTF

SEQ ID NO: 742068 - protein, 15 aa, Homo sapiens
  CDR3 for beta chain variable domain of TCR clone 371034 (TRBV7-3, TRBJ2-2)
CASSLTGQGTGELFF

SEQ ID NO: 742069 - protein, 11 aa, Homo sapiens
  CDR3 for alpha chain variable domain of TCR clone 371035 (TRAV27, TRAJ45)
CAGAQEEVLTD

SEQ ID NO: 742070 - protein, 11 aa, Homo sapiens
  CDR3 for beta chain variable domain of TCR clone 371035 (TRBV19, TRBJ1-1)
CASSIGGEAFF

SEQ ID NO: 742071 - protein, 14 aa, Homo sapiens
  CDR3 for alpha chain variable domain of TCR clone 371036 (TRAV12-1, TRAJ24)
CVVRSTDSWGKFQF

SEQ ID NO: 742072 - protein, 13 aa, Homo sapiens
  CDR3 for beta chain variable domain of TCR clone 371036 (TRBV7-2, TRBJ2-2)
CASSSVRAGELFF

SEQ ID NO: 742073 - protein, 14 aa, Homo sapiens
  CDR3 for alpha chain variable domain of TCR clone 371037 (TRAV16, TRAJ33)
CALSAMDSNYKLIW

SEQ ID NO: 742074 - protein, 15 aa, Homo sapiens
  CDR3 for beta chain variable domain of TCR clone 371037 (TRBV5-1, TRBJ2-7)
CASSLNGGPAREQYF

SEQ ID NO: 742075 - protein, 14 aa, Homo sapiens
  CDR3 for alpha chain variable domain of TCR clone 371038 (TRAV12-2, TRAJ32)
CAVPYGGATNKLIF

SEQ ID NO: 742076 - protein, 17 aa, Homo sapiens
  CDR3 for beta chain variable domain of TCR clone 371038 (TRBV7-2, TRBJ2-5)
CASSFYRGPNPWETQYF

SEQ ID NO: 742077 - protein, 14 aa, Homo sapiens
  CDR3 for alpha chain variable domain of TCR clone 371039 (TRAV4, TRAJ26)
CLVGPHNYGQNFVF

SEQ ID NO: 742078 - protein, 14 aa, Homo sapiens
  CDR3 for beta chain variable domain of TCR clone 371039 (TRBV7-9, TRBJ2-7)
CASSLSAATYEQYV

SEQ ID NO: 742079 - protein, 14 aa, Homo sapiens
  CDR3 for alpha chain variable domain of TCR clone 371040 (TRAV8-4, TRAJ17)
CAVSDQDAGNKLTF

SEQ ID NO: 742080 - protein, 15 aa, Homo sapiens
  CDR3 for beta chain variable domain of TCR clone 371040 (TRBV7-2, TRBJ1-2)
CASSLAPDRGLGYTF

SEQ ID NO: 742081 - protein, 14 aa, Homo sapiens
  CDR3 for alpha chain variable domain of TCR clone 371041 (TRAV12-1, TRAJ17)
CVVNYKAAGNKLTF

SEQ ID NO: 742082 - protein, 13 aa, Homo sapiens
  CDR3 for beta chain variable domain of TCR clone 371041 (TRBV28, TRBJ2-1)
CASSPTGYNEQFF

SEQ ID NO: 742083 - protein, 13 aa, Homo sapiens
  CDR3 for alpha chain variable domain of TCR clone 371042 (TRAV16, TRAJ30)
CALAQNRDDKIIF

SEQ ID NO: 742084 - protein, 16 aa, Homo sapiens
  CDR3 for beta chain variable domain of TCR clone 371042 (TRBV6-1, TRBJ2-5)
CASSETLDRGAETQYF

SEQ ID NO: 742085 - protein, 15 aa, Homo sapiens
  CDR3 for alpha chain variable domain of TCR clone 371043 (TRAV2, TRAJ9)
CAVEDRGTGGFKTIF

SEQ ID NO: 742086 - protein, 13 aa, Homo sapiens
  CDR3 for beta chain variable domain of TCR clone 371043 (TRBV20-1, TRBJ1-1)
CSAPLGGGTEAFF

SEQ ID NO: 742087 - protein, 15 aa, Homo sapiens
  CDR3 for alpha chain variable domain of TCR clone 371044 (TRAV14/DV4, TRAJ12)
CAMKEERDSSYKLIF

SEQ ID NO: 742088 - protein, 17 aa, Homo sapiens
  CDR3 for beta chain variable domain of TCR clone 371044 (TRBV2, TRBJ2-1)
CASSRPGQGVMVNEQFF

SEQ ID NO: 742089 - protein, 11 aa, Homo sapiens
  CDR3 for alpha chain variable domain of TCR clone 371045 (TRAV27, TRAJ43)
CAGANNNDMRF

SEQ ID NO: 742090 - protein, 15 aa, Homo sapiens
  CDR3 for beta chain variable domain of TCR clone 371045 (TRBV13, TRBJ1-2)
CASSSPRGVRYGYTF

SEQ ID NO: 742091 - protein, 21 aa, Homo sapiens
  CDR3 for alpha chain variable domain of TCR clone 371046 (TRAV8-3, TRAJ21)
CAGPPIQLQQISAQEFNKFYF

SEQ ID NO: 742092 - protein, 12 aa, Homo sapiens
  CDR3 for beta chain variable domain of TCR clone 371046 (TRBV7-9, TRBJ2-7)
CASSIKREEQYF

SEQ ID NO: 742093 - protein, 14 aa, Homo sapiens
  CDR3 for alpha chain variable domain of TCR clone 371047 (TRAV12-2, TRAJ13)
CAVKKTGGYQKVTF

SEQ ID NO: 742094 - protein, 16 aa, Homo sapiens
  CDR3 for beta chain variable domain of TCR clone 371047 (TRBV2, TRBJ2-1)
CASRSPAGGMYNEQFF

SEQ ID NO: 742095 - protein, 15 aa, Homo sapiens
  CDR3 for alpha chain variable domain of TCR clone 371048 (TRAV17, TRAJ35)
CATAFVIGFGNVLLC

SEQ ID NO: 742096 - protein, 14 aa, Homo sapiens
  CDR3 for beta chain variable domain of TCR clone 371048 (TRBV12-4, TRBJ2-5)
CASSQSGGGETQYF

SEQ ID NO: 742097 - protein, 12 aa, Homo sapiens
  CDR3 for alpha chain variable domain of TCR clone 371049 (TRAV1-2, TRAJ24)
CAVGGSWGKFQF

SEQ ID NO: 742098 - protein, 13 aa, Homo sapiens
  CDR3 for beta chain variable domain of TCR clone 371049 (TRBV20-1, TRBJ2-2)
CSASAAGTGELFF

SEQ ID NO: 742099 - protein, 16 aa, Homo sapiens
  CDR3 for alpha chain variable domain of TCR clone 371050 (TRAV13-1, TRAJ39)
CAASIVMQATCSPLVG

SEQ ID NO: 742100 - protein, 16 aa, Homo sapiens
  CDR3 for beta chain variable domain of TCR clone 371050 (TRBV20-1, TRBJ1-4)
CSALGQGLLTNEKLFF

SEQ ID NO: 742101 - protein, 12 aa, Homo sapiens
  CDR3 for alpha chain variable domain of TCR clone 371051 (TRAV3, TRAJ20)
SAVRDGDYKLSF

SEQ ID NO: 742102 - protein, 13 aa, Homo sapiens
  CDR3 for beta chain variable domain of TCR clone 371051 (TRBV9, TRBJ2-1)
CASSVGQGGEQFF

SEQ ID NO: 742103 - protein, 13 aa, Homo sapiens
  CDR3 for alpha chain variable domain of TCR clone 371052 (TRAV8-3, TRAJ20)
CAVGRPNDFKLSF

SEQ ID NO: 742104 - protein, 14 aa, Homo sapiens
  CDR3 for beta chain variable domain of TCR clone 371052 (TRBV12-5, TRBJ2-5)
CASGSRTHQETQYF

SEQ ID NO: 742105 - protein, 14 aa, Homo sapiens
  CDR3 for alpha chain variable domain of TCR clone 371053 (TRAV3, TRAJ9)
CAVRLNTGGFKTIF

SEQ ID NO: 742106 - protein, 15 aa, Homo sapiens
  CDR3 for beta chain variable domain of TCR clone 371053 (TRBV7-2, TRBJ2-1)
CASSFASGRVYEQFF

SEQ ID NO: 742107 - protein, 14 aa, Homo sapiens
  CDR3 for alpha chain variable domain of TCR clone 371054 (TRAV12-2, TRAJ13)
CAVKKTGGYQKVTF

SEQ ID NO: 742108 - protein, 10 aa, Homo sapiens
  CDR3 for beta chain variable domain of TCR clone 371054 (TRBV12-4, TRBJ1-2)
CASSFIWLHL

SEQ ID NO: 742109 - protein, 13 aa, Homo sapiens
  CDR3 for alpha chain variable domain of TCR clone 371055 (TRAV35, TRAJ36)
CAGPLIGANNLFF

SEQ ID NO: 742110 - protein, 15 aa, Homo sapiens
  CDR3 for beta chain variable domain of TCR clone 371055 (TRBV28, TRBJ2-5)
CASSPPWSYQETQYF

SEQ ID NO: 742111 - protein, 13 aa, Homo sapiens
  CDR3 for alpha chain variable domain of TCR clone 371056 (TRAV23/DV6, TRAJ21)
CAASIGNFNKFYF

SEQ ID NO: 742112 - protein, 14 aa, Homo sapiens
  CDR3 for beta chain variable domain of TCR clone 371056 (TRBV20-1, TRBJ2-3)
CSARGGTSTDTQYF

SEQ ID NO: 742113 - protein, 13 aa, Homo sapiens
  CDR3 for alpha chain variable domain of TCR clone 371057 (TRAV3, TRAJ27)
CAVRPLGAGKSTF

SEQ ID NO: 742114 - protein, 12 aa, Homo sapiens
  CDR3 for beta chain variable domain of TCR clone 371057 (TRBV7-9, TRBJ2-7)
CATRTDAYEKYF

SEQ ID NO: 742115 - protein, 12 aa, Homo sapiens
  CDR3 for alpha chain variable domain of TCR clone 371058 (TRAV1-2, TRAJ33)
CAALDSNYQLIW

SEQ ID NO: 742116 - protein, 14 aa, Homo sapiens
  CDR3 for beta chain variable domain of TCR clone 371058 (TRBV11-2, TRBJ2-7)
CASSSTGEGYEQYF

SEQ ID NO: 742117 - protein, 15 aa, Homo sapiens
  CDR3 for alpha chain variable domain of TCR clone 371059 (TRAV8-3, TRAJ45)
CASSYSRGGADGLTF

SEQ ID NO: 742118 - protein, 13 aa, Homo sapiens
  CDR3 for beta chain variable domain of TCR clone 371059 (TRBV10-3, TRBJ2-7)
CASKLAVKYEQYF

SEQ ID NO: 742119 - protein, 16 aa, Homo sapiens
  CDR3 for alpha chain variable domain of TCR clone 371060 (TRAV14/DV4, TRAJ54)
CAMREGLAWGAQKLVF

SEQ ID NO: 742120 - protein, 19 aa, Homo sapiens
  CDR3 for beta chain variable domain of TCR clone 371060 (TRBV7-9, TRBJ2-6)
CASSLESATVLPGANVLSF

SEQ ID NO: 742121 - protein, 15 aa, Homo sapiens
  CDR3 for alpha chain variable domain of TCR clone 371061 (TRAV4, TRAJ36)
CLVGDRQTGANNIFF

SEQ ID NO: 742122 - protein, 15 aa, Homo sapiens
  CDR3 for beta chain variable domain of TCR clone 371061 (TRBV7-6, TRBJ2-1)
CASSSLAGEGNEQFF

SEQ ID NO: 742123 - protein, 14 aa, Homo sapiens
  CDR3 for alpha chain variable domain of TCR clone 371062 (TRAV1-2, TRAJ8)
CAVREDTGCQKLVF

SEQ ID NO: 742124 - protein, 13 aa, Homo sapiens
  CDR3 for beta chain variable domain of TCR clone 371062 (TRBV10-3, TRBJ1-2)
CAISERDSYGYTF

SEQ ID NO: 742125 - protein, 15 aa, Homo sapiens
  CDR3 for alpha chain variable domain of TCR clone 371063 (TRAV12-3, TRAJ6)
CAMSATTGGSYIPTF

SEQ ID NO: 742126 - protein, 16 aa, Homo sapiens
  CDR3 for beta chain variable domain of TCR clone 371063 (TRBV27, TRBJ2-5)
CASSFGPGGAKETQYF

SEQ ID NO: 742127 - protein, 17 aa, Homo sapiens
  CDR3 for alpha chain variable domain of TCR clone 371064 (TRAV13-1, TRAJ28)
CAASPPYSGAGSYQLTF

SEQ ID NO: 742128 - protein, 15 aa, Homo sapiens
  CDR3 for beta chain variable domain of TCR clone 371064 (TRBV7-9, TRBJ1-2)
CASSLDREPNYGYTF

SEQ ID NO: 742129 - protein, 15 aa, Homo sapiens
  CDR3 for alpha chain variable domain of TCR clone 371065 (TRAV21, TRAJ48)
CAVPISNFGNEKLSF

SEQ ID NO: 742130 - protein, 16 aa, Homo sapiens
  CDR3 for beta chain variable domain of TCR clone 371065 (TRBV5-7, TRBJ2-7)
CASSLAPSVLNYEQYF

SEQ ID NO: 742131 - protein, 13 aa, Homo sapiens
  CDR3 for alpha chain variable domain of TCR clone 371066 (TRAV3, TRAJ3)
CAVADSSASKIIF

SEQ ID NO: 742132 - protein, 12 aa, Homo sapiens
  CDR3 for beta chain variable domain of TCR clone 371066 (TRBV7-8, TRBJ2-7)
CASEGGPDGQYF

SEQ ID NO: 742133 - protein, 14 aa, Homo sapiens
  CDR3 for alpha chain variable domain of TCR clone 371067 (TRAV12-2, TRAJ13)
CAVKKTGGYQKVTF

SEQ ID NO: 742134 - protein, 16 aa, Homo sapiens
  CDR3 for beta chain variable domain of TCR clone 371067 (TRBV20-1, TRBJ1-2)
CSASMGQCVANYGYTF

SEQ ID NO: 742135 - protein, 15 aa, Homo sapiens
  CDR3 for alpha chain variable domain of TCR clone 371068 (TRAV25, TRAJ52)
CAGTSGGTSYGKLTF

SEQ ID NO: 742136 - protein, 14 aa, Homo sapiens
  CDR3 for beta chain variable domain of TCR clone 371068 (TRBV11-2, TRBJ1-2)
CASSLGTANYGYTF

SEQ ID NO: 742137 - protein, 13 aa, Homo sapiens
  CDR3 for alpha chain variable domain of TCR clone 371069 (TRAV8-3, TRAJ28)
CAVGAVGSYQLTF

SEQ ID NO: 742138 - protein, 12 aa, Homo sapiens
  CDR3 for beta chain variable domain of TCR clone 371069 (TRBV5-1, TRBJ2-7)
CASSSTTYEQYF

SEQ ID NO: 742139 - protein, 13 aa, Homo sapiens
  CDR3 for alpha chain variable domain of TCR clone 371070 (TRAV13-1, TRAJ12)
CSKYMGSSYKLIF

SEQ ID NO: 742140 - protein, 15 aa, Homo sapiens
  CDR3 for beta chain variable domain of TCR clone 371070 (TRBV7-2, TRBJ1-5)
CASSLDRGQDQPQHF

SEQ ID NO: 742141 - protein, 17 aa, Homo sapiens
  CDR3 for alpha chain variable domain of TCR clone 371071 (TRAV4, TRAJ18)
CLVVAAGRGSTLGRLYF

SEQ ID NO: 742142 - protein, 16 aa, Homo sapiens
  CDR3 for beta chain variable domain of TCR clone 371071 (TRBV12-4, TRBJ1-5)
CASSRPVGGSNQPQHF

SEQ ID NO: 742143 - protein, 23 aa, Homo sapiens
  CDR3 for alpha chain variable domain of TCR clone 371072 (TRAV26-1, TRAJ38)
CIADNAGNNHIQNPDPAVNQLRD

SEQ ID NO: 742144 - protein, 13 aa, Homo sapiens
  CDR3 for beta chain variable domain of TCR clone 371072 (TRBV20-1, TRBJ1-1)
CSARGGGSTEAFF

SEQ ID NO: 742145 - protein, 16 aa, Homo sapiens
  CDR3 for alpha chain variable domain of TCR clone 371073 (TRAV30, TRAJ24)
CGTEIVDADIWGKFQF

SEQ ID NO: 742146 - protein, 13 aa, Homo sapiens
  CDR3 for beta chain variable domain of TCR clone 371073 (TRBV18, TRBJ1-2)
CASSASATEGYTF

SEQ ID NO: 742147 - protein, 13 aa, Homo sapiens
  CDR3 for alpha chain variable domain of TCR clone 371074 (TRAV8-4, TRAJ4)
CAVSDIGYNKLIF

SEQ ID NO: 742148 - protein, 13 aa, Homo sapiens
  CDR3 for beta chain variable domain of TCR clone 371074 (TRBV7-6, TRBJ2-3)
CASSLRSDNTQYF

SEQ ID NO: 742149 - protein, 12 aa, Homo sapiens
  CDR3 for alpha chain variable domain of TCR clone 371075 (TRAV13-1, TRAJ21)
CAAKEGFNKFYF

SEQ ID NO: 742150 - protein, 15 aa, Homo sapiens
  CDR3 for beta chain variable domain of TCR clone 371075 (TRBV25-1, TRBJ1-4)
CDSSPGDSTNEKLFF

SEQ ID NO: 742151 - protein, 16 aa, Homo sapiens
  CDR3 for alpha chain variable domain of TCR clone 371076 (TRAV23/DV6, TRAJ9)
CAASIGGNTGGFKNIF

SEQ ID NO: 742152 - protein, 12 aa, Homo sapiens
  CDR3 for beta chain variable domain of TCR clone 371076 (TRBV6-3, TRBJ2-7)
CASSEPGFEQYF

SEQ ID NO: 742153 - protein, 14 aa, Homo sapiens
  CDR3 for alpha chain variable domain of TCR clone 371077 (TRAV8-4, TRAJ13)
CAVTLSGGYQKVTF

SEQ ID NO: 742154 - protein, 15 aa, Homo sapiens
  CDR3 for beta chain variable domain of TCR clone 371077 (TRBV19, TRBJ2-1)
CASSSPGVPLDEQFF

SEQ ID NO: 742155 - protein, 14 aa, Homo sapiens
  CDR3 for alpha chain variable domain of TCR clone 371078 (TRAV12-2, TRAJ13)
CAVKKTGGYQKGTF

SEQ ID NO: 742156 - protein, 15 aa, Homo sapiens
  CDR3 for beta chain variable domain of TCR clone 371078 (TRBV20-1, TRBJ2-7)
CSARDRVSGMDEQYF

SEQ ID NO: 742157 - protein, 13 aa, Homo sapiens
  CDR3 for alpha chain variable domain of TCR clone 371079 (TRAV8-1, TRAJ41)
CAVNPGSGYALNF

SEQ ID NO: 742158 - protein, 14 aa, Homo sapiens
  CDR3 for beta chain variable domain of TCR clone 371079 (TRBV20-1, TRBJ1-1)
CSAQTRIGGTEAFF

SEQ ID NO: 742159 - protein, 17 aa, Homo sapiens
  CDR3 for alpha chain variable domain of TCR clone 371080 (TRAV21, TRAJ52)
CAVGANAGGTSYGKLTF

SEQ ID NO: 742160 - protein, 13 aa, Homo sapiens
  CDR3 for beta chain variable domain of TCR clone 371080 (TRBV5-1, TRBJ1-2)
CAISLQGNYGYTF

SEQ ID NO: 742161 - protein, 14 aa, Homo sapiens
  CDR3 for alpha chain variable domain of TCR clone 371081 (TRAV1-2, TRAJ16)
CAVNRFSDGQKLLF

SEQ ID NO: 742162 - protein, 14 aa, Homo sapiens
  CDR3 for beta chain variable domain of TCR clone 371081 (TRBV12-4, TRBJ1-1)
CASASSEFYTEAFF

SEQ ID NO: 742163 - protein, 18 aa, Homo sapiens
  CDR3 for alpha chain variable domain of TCR clone 371082 (TRAV13-1, TRAJ52)
CAAKDPNAGGTGYGKLTF

SEQ ID NO: 742164 - protein, 14 aa, Homo sapiens
  CDR3 for beta chain variable domain of TCR clone 371082 (TRBV7-2, TRBJ2-7)
CASRSQGAAYEQYF

SEQ ID NO: 742165 - protein, 12 aa, Homo sapiens
  CDR3 for alpha chain variable domain of TCR clone 371083 (TRAV12-3, TRAJ5)
CAMDTGRRALTF

SEQ ID NO: 742166 - protein, 15 aa, Homo sapiens
  CDR3 for beta chain variable domain of TCR clone 371083 (TRBV11-3, TRBJ2-3)
CASLKDGREGDTQYF

SEQ ID NO: 742167 - protein, 14 aa, Homo sapiens
  CDR3 for alpha chain variable domain of TCR clone 371084 (TRAV13-1, TRAJ23)
CAASRLGRGGKLIF

SEQ ID NO: 742168 - protein, 14 aa, Homo sapiens
  CDR3 for beta chain variable domain of TCR clone 371084 (TRBV7-2, TRBJ1-1)
CASSFLTGTTEAFF

SEQ ID NO: 742169 - protein, 11 aa, Homo sapiens
  CDR3 for alpha chain variable domain of TCR clone 371085 (TRAV21, TRAJ4)
HVSGGYNELIF

SEQ ID NO: 742170 - protein, 13 aa, Homo sapiens
  CDR3 for beta chain variable domain of TCR clone 371085 (TRBV7-3, TRBJ2-5)
CASSLTAGETQYF

SEQ ID NO: 742171 - protein, 13 aa, Homo sapiens
  CDR3 for alpha chain variable domain of TCR clone 371086 (TRAV2, TRAJ21)
CAVEDLNFNKFYF

SEQ ID NO: 742172 - protein, 12 aa, Homo sapiens
  CDR3 for beta chain variable domain of TCR clone 371086 (TRBV28, TRBJ2-2)
CASSLGGGELFF

SEQ ID NO: 742173 - protein, 15 aa, Homo sapiens
  CDR3 for alpha chain variable domain of TCR clone 371087 (TRAV29/DV5, TRAJ57)
CAASLLRGGSEQLVF

SEQ ID NO: 742174 - protein, 15 aa, Homo sapiens
  CDR3 for beta chain variable domain of TCR clone 371087 (TRBV5-1, TRBJ1-3)
CASSLEGGSGNTIYF

SEQ ID NO: 742175 - protein, 10 aa, Homo sapiens
  CDR3 for alpha chain variable domain of TCR clone 371088 (TRAV12-3, TRAJ18)
CAMSAEAHPW

SEQ ID NO: 742176 - protein, 13 aa, Homo sapiens
  CDR3 for beta chain variable domain of TCR clone 371088 (TRBV15, TRBJ1-6)
CATSGGLNSPLHF

SEQ ID NO: 742177 - protein, 11 aa, Homo sapiens
  CDR3 for alpha chain variable domain of TCR clone 371089 (TRAV35, TRAJ30)
CAPGGDDKIIF

SEQ ID NO: 742178 - protein, 15 aa, Homo sapiens
  CDR3 for beta chain variable domain of TCR clone 371089 (TRBV9, TRBJ1-6)
CASSVAGTGDSTLHF

SEQ ID NO: 742179 - protein, 13 aa, Homo sapiens
  CDR3 for alpha chain variable domain of TCR clone 371090 (TRAV8-3, TRAJ43)
CAVGIYNNNDMRS

SEQ ID NO: 742180 - protein, 16 aa, Homo sapiens
  CDR3 for beta chain variable domain of TCR clone 371090 (TRBV7-2, TRBJ2-5)
CASSLVLWTKQETQYF

SEQ ID NO: 742181 - protein, 14 aa, Homo sapiens
  CDR3 for alpha chain variable domain of TCR clone 371091 (TRAV26-1, TRAJ38)
CIADNAGNNRKLIW

SEQ ID NO: 742182 - protein, 15 aa, Homo sapiens
  CDR3 for beta chain variable domain of TCR clone 371091 (TRBV7-8, TRBJ2-3)
CASSTRTGSTDTQYF

SEQ ID NO: 742183 - protein, 17 aa, Homo sapiens
  CDR3 for alpha chain variable domain of TCR clone 371092 (TRAV1-2, TRAJ27)
CAVRDKTGDTNAGKSTF

SEQ ID NO: 742184 - protein, 12 aa, Homo sapiens
  CDR3 for beta chain variable domain of TCR clone 371092 (TRBV6-1, TRBJ1-1)
CASNSPTAEAFF

SEQ ID NO: 742185 - protein, 13 aa, Homo sapiens
  CDR3 for alpha chain variable domain of TCR clone 371093 (TRAV2, TRAJ10)
CAVETGGGNILTF

SEQ ID NO: 742186 - protein, 14 aa, Homo sapiens
  CDR3 for beta chain variable domain of TCR clone 371093 (TRBV20-1, TRBJ2-3)
CSAGGRRGTDTQYF

SEQ ID NO: 742187 - protein, 13 aa, Homo sapiens
  CDR3 for alpha chain variable domain of TCR clone 371094 (TRAV21, TRAJ56)
CAVRTVANSKLTF

SEQ ID NO: 742188 - protein, 15 aa, Homo sapiens
  CDR3 for beta chain variable domain of TCR clone 371094 (TRBV7-9, TRBJ1-1)
CASSHRGTVNTEAFF

SEQ ID NO: 742189 - protein, 15 aa, Homo sapiens
  CDR3 for alpha chain variable domain of TCR clone 371095 (TRAV14/DV4, TRAJ12)
CAMREGRDSSYKLIF

SEQ ID NO: 742190 - protein, 15 aa, Homo sapiens
  CDR3 for beta chain variable domain of TCR clone 371095 (TRBV20-1, TRBJ2-7)
CSARDRVSGMDEQYF

SEQ ID NO: 742191 - protein, 15 aa, Homo sapiens
  CDR3 for alpha chain variable domain of TCR clone 371096 (TRAV8-3, TRAJ45)
CASSYSGGGADGLTF

SEQ ID NO: 742192 - protein, 18 aa, Homo sapiens
  CDR3 for beta chain variable domain of TCR clone 371096 (TRBV4-1, TRBJ1-5)
CASSQDPRGQGLNQPQHF

SEQ ID NO: 742193 - protein, 16 aa, Homo sapiens
  CDR3 for alpha chain variable domain of TCR clone 371097 (TRAV14/DV4, TRAJ53)
GAMREGGGGSNYKLTF

SEQ ID NO: 742194 - protein, 14 aa, Homo sapiens
  CDR3 for beta chain variable domain of TCR clone 371097 (TRBV2, TRBJ1-2)
CASSEGGRNYGYTF

SEQ ID NO: 742195 - protein, 14 aa, Homo sapiens
  CDR3 for alpha chain variable domain of TCR clone 371098 (TRAV3, TRAJ7)
CAVREEEREQQTRF

SEQ ID NO: 742196 - protein, 15 aa, Homo sapiens
  CDR3 for beta chain variable domain of TCR clone 371098 (TRBV20-1, TRBJ1-5)
CSARPRGQLNQPQHF

SEQ ID NO: 742197 - protein, 12 aa, Homo sapiens
  CDR3 for alpha chain variable domain of TCR clone 371099 (TRAV1-1, TRAJ20)
CAVREDDYKLSF

SEQ ID NO: 742198 - protein, 15 aa, Homo sapiens
  CDR3 for beta chain variable domain of TCR clone 371099 (TRBV20-1, TRBJ2-3)
CSASGTSGYTDTQYF

SEQ ID NO: 742199 - protein, 14 aa, Homo sapiens
  CDR3 for alpha chain variable domain of TCR clone 371100 (TRAV12-2, TRAJ18)
CAVKRGPTLGRLYF

SEQ ID NO: 742200 - protein, 16 aa, Homo sapiens
  CDR3 for beta chain variable domain of TCR clone 371100 (TRBV27, TRBJ2-3)
CASSFRGQLLRDTQYF

SEQ ID NO: 742201 - protein, 11 aa, Homo sapiens
  CDR3 for alpha chain variable domain of TCR clone 371101 (TRAV2, TRAJ33)
CAVDSNYQVIW

SEQ ID NO: 742202 - protein, 13 aa, Homo sapiens
  CDR3 for beta chain variable domain of TCR clone 371101 (TRBV10-3, TRBJ2-7)
CASKLAVNYEQYF

SEQ ID NO: 742203 - protein, 14 aa, Homo sapiens
  CDR3 for alpha chain variable domain of TCR clone 371102 (TRAV12-3, TRAJ54)
CAMSALQGAQKLVF

SEQ ID NO: 742204 - protein, 13 aa, Homo sapiens
  CDR3 for beta chain variable domain of TCR clone 371102 (TRBV7-3, TRBJ1-1)
CASSQDWGAEAFF

SEQ ID NO: 742205 - protein, 12 aa, Homo sapiens
  CDR3 for alpha chain variable domain of TCR clone 371103 (TRAV12-1, TRAJ31)
CVVNRANARLMF

SEQ ID NO: 742206 - protein, 13 aa, Homo sapiens
  CDR3 for beta chain variable domain of TCR clone 371103 (TRBV15, TRBJ2-7)
CATSTTGHYEQYF

SEQ ID NO: 742207 - protein, 10 aa, Homo sapiens
  CDR3 for alpha chain variable domain of TCR clone 371104 (TRAV12-3, TRAJ18)
CAMSAEAQPW

SEQ ID NO: 742208 - protein, 13 aa, Homo sapiens
  CDR3 for beta chain variable domain of TCR clone 371104 (TRBV15, TRBJ1-6)
RATSGGLNSPLHF

SEQ ID NO: 742209 - protein, 12 aa, Homo sapiens
  CDR3 for alpha chain variable domain of TCR clone 371105 (TRAV21, TRAJ49)
CAATNTGNQFYF

SEQ ID NO: 742210 - protein, 17 aa, Homo sapiens
  CDR3 for beta chain variable domain of TCR clone 371105 (TRBV13, TRBJ2-3)
CASILSRVAGGRNTQYF

SEQ ID NO: 742211 - protein, 22 aa, Homo sapiens
  CDR3 for alpha chain variable domain of TCR clone 371106 (TRAV4, )
CIVGPHNYDIQNPDPAVYQLRD

SEQ ID NO: 742212 - protein, 17 aa, Homo sapiens
  CDR3 for beta chain variable domain of TCR clone 371106 (TRBV24-1, TRBJ2-1)
CATSDVSTSGTYNEQFF

SEQ ID NO: 742213 - protein, 17 aa, Homo sapiens
  CDR3 for alpha chain variable domain of TCR clone 371107 (TRAV35, TRAJ52)
CAGQLAAGGTSYGKLIF

SEQ ID NO: 742214 - protein, 12 aa, Homo sapiens
  CDR3 for beta chain variable domain of TCR clone 371107 (TRBV20-1, TRBJ2-7)
CSAGRRQSEQYF

SEQ ID NO: 742215 - protein, 14 aa, Homo sapiens
  CDR3 for alpha chain variable domain of TCR clone 371108 (TRAV2, TRAJ26)
CAGSPGGLWSEFCL

SEQ ID NO: 742216 - protein, 17 aa, Homo sapiens
  CDR3 for beta chain variable domain of TCR clone 371108 (TRBV11-2, TRBJ2-1)
CASSLYPPGVEYNEQFF

SEQ ID NO: 742217 - protein, 22 aa, Homo sapiens
  CDR3 for alpha chain variable domain of TCR clone 371109 (TRAV13-1, TRAJ35)
CAASKGGFGNVLHCGSVTQVIV

SEQ ID NO: 742218 - protein, 13 aa, Homo sapiens
  CDR3 for beta chain variable domain of TCR clone 371109 (TRBV7-3, TRBJ1-1)
CASSQDWEAEAFF

SEQ ID NO: 742219 - protein, 16 aa, Homo sapiens
  CDR3 for alpha chain variable domain of TCR clone 371110 (TRAV30, TRAJ24)
CGTEIVDAVSWGKFQF

SEQ ID NO: 742220 - protein, 15 aa, Homo sapiens
  CDR3 for beta chain variable domain of TCR clone 371110 (TRBV20-1, TRBJ2-7)
CSARDRVSGMDEQYF

SEQ ID NO: 742221 - protein, 16 aa, Homo sapiens
  CDR3 for alpha chain variable domain of TCR clone 371111 (TRAV3, TRAJ23)
CAVKIGIYNQGGKLIF

SEQ ID NO: 742222 - protein, 12 aa, Homo sapiens
  CDR3 for beta chain variable domain of TCR clone 371111 (TRBV7-8, TRBJ2-7)
CASEGGPHGQYF

SEQ ID NO: 742223 - protein, 12 aa, Homo sapiens
  CDR3 for alpha chain variable domain of TCR clone 371112 (TRAV2, TRAJ26)
CAGSPGRLWSEF

SEQ ID NO: 742224 - protein, 13 aa, Homo sapiens
  CDR3 for beta chain variable domain of TCR clone 371112 (TRBV7-9, TRBJ1-2)
CASNLKQNYGYTF

SEQ ID NO: 742225 - protein, 11 aa, Homo sapiens
  CDR3 for alpha chain variable domain of TCR clone 371113 (TRAV3, TRAJ21)
RAVGNFNKFYF

SEQ ID NO: 742226 - protein, 16 aa, Homo sapiens
  CDR3 for beta chain variable domain of TCR clone 371113 (TRBV19, TRBJ2-1)
CASSKAGPSSYTEQFF

SEQ ID NO: 742227 - protein, 12 aa, Homo sapiens
  CDR3 for alpha chain variable domain of TCR clone 371114 (TRAV12-2, TRAJ8)
CAVNTGFQKLVF

SEQ ID NO: 742228 - protein, 15 aa, Homo sapiens
  CDR3 for beta chain variable domain of TCR clone 371114 (TRBV7-8, TRBJ1-5)
CASSLERRGLAPQHF

SEQ ID NO: 742229 - protein, 14 aa, Homo sapiens
  CDR3 for alpha chain variable domain of TCR clone 371115 (TRAV17, TRAJ34)
CATDSLEGTDKLIF

SEQ ID NO: 742230 - protein, 13 aa, Homo sapiens
  CDR3 for beta chain variable domain of TCR clone 371115 (TRBV11-2, TRBJ2-7)
CASSGTRSYEQYF

SEQ ID NO: 742231 - protein, 11 aa, Homo sapiens
  CDR3 for alpha chain variable domain of TCR clone 371116 (TRAV3, TRAJ21)
CAVGNFNKFYF

SEQ ID NO: 742232 - protein, 11 aa, Homo sapiens
  CDR3 for beta chain variable domain of TCR clone 371116 (TRBV18, TRBJ2-1)
LAGGADNEQFF

SEQ ID NO: 742233 - protein, 14 aa, Homo sapiens
  CDR3 for alpha chain variable domain of TCR clone 371117 (TRAV12-2, TRAJ17)
CAVNIKAAGNKLTF

SEQ ID NO: 742234 - protein, 13 aa, Homo sapiens
  CDR3 for beta chain variable domain of TCR clone 371117 (TRBV20-1, TRBJ1-5)
CSASPRANQPQHF

SEQ ID NO: 742235 - protein, 12 aa, Homo sapiens
  CDR3 for alpha chain variable domain of TCR clone 371118 (TRAV3, TRAJ43)
CAVRDPNNDMRF

SEQ ID NO: 742236 - protein, 14 aa, Homo sapiens
  CDR3 for beta chain variable domain of TCR clone 371118 (TRBV7-9, TRBJ1-2)
CASSRQGANYGYTF

SEQ ID NO: 742237 - protein, 11 aa, Homo sapiens
  CDR3 for alpha chain variable domain of TCR clone 371119 (TRAV2, TRAJ38)
CAAGDNRKLIW

SEQ ID NO: 742238 - protein, 14 aa, Homo sapiens
  CDR3 for beta chain variable domain of TCR clone 371119 (TRBV11-3, TRBJ2-3)
CASSLDPATDTQYF

SEQ ID NO: 742239 - protein, 13 aa, Homo sapiens
  CDR3 for alpha chain variable domain of TCR clone 371120 (TRAV12-2, TRAJ52)
CAVGGTSYGKLTF

SEQ ID NO: 742240 - protein, 14 aa, Homo sapiens
  CDR3 for beta chain variable domain of TCR clone 371120 (TRBV19, TRBJ2-1)
CASTTFVLSGEQFF

SEQ ID NO: 742241 - protein, 16 aa, Homo sapiens
  CDR3 for alpha chain variable domain of TCR clone 371121 (TRAV4, TRAJ22)
CLVGDLYSGSARQLTF

SEQ ID NO: 742242 - protein, 17 aa, Homo sapiens
  CDR3 for beta chain variable domain of TCR clone 371121 (TRBV7-9, TRBJ2-1)
CASSLYPPGVEYNEQVF

SEQ ID NO: 742243 - protein, 15 aa, Homo sapiens
  CDR3 for alpha chain variable domain of TCR clone 371122 (TRAV25, TRAJ53)
CPTSNSGGSNYKLTF

SEQ ID NO: 742244 - protein, 14 aa, Homo sapiens
  CDR3 for beta chain variable domain of TCR clone 371122 (TRBV11-2, TRBJ2-3)
CDSSRLARTDTQYF

SEQ ID NO: 742245 - protein, 16 aa, Homo sapiens
  CDR3 for alpha chain variable domain of TCR clone 371123 (TRAV12-3, TRAJ53)
CAMSPGRGGSNYKLTF

SEQ ID NO: 742246 - protein, 14 aa, Homo sapiens
  CDR3 for beta chain variable domain of TCR clone 371123 (TRBV2, TRBJ2-7)
CASSLASGGYEQYF

SEQ ID NO: 742247 - protein, 15 aa, Homo sapiens
  CDR3 for alpha chain variable domain of TCR clone 371124 (TRAV26-1, TRAJ22)
CIARVSFWFCKATDL

SEQ ID NO: 742248 - protein, 14 aa, Homo sapiens
  CDR3 for beta chain variable domain of TCR clone 371124 (TRBV7-9, TRBJ1-2)
CASSLKQLWLHLRF

SEQ ID NO: 742249 - protein, 17 aa, Homo sapiens
  CDR3 for alpha chain variable domain of TCR clone 371125 (TRAV3, TRAJ28)
CAVREAYSGAGSYRLTF

SEQ ID NO: 742250 - protein, 15 aa, Homo sapiens
  CDR3 for beta chain variable domain of TCR clone 371125 (TRBV11-2, TRBJ2-1)
CASSRNRGLMYEQFF

SEQ ID NO: 742251 - protein, 15 aa, Homo sapiens
  CDR3 for alpha chain variable domain of TCR clone 371126 (TRAV21, TRAJ53)
CATLNSGGSNYKLTF

SEQ ID NO: 742252 - protein, 15 aa, Homo sapiens
  CDR3 for beta chain variable domain of TCR clone 371126 (TRBV5-1, TRBJ2-7)
CASSLYPDGGYEQYF

SEQ ID NO: 742253 - protein, 14 aa, Homo sapiens
  CDR3 for alpha chain variable domain of TCR clone 371127 (TRAV1-2, TRAJ16)
CAVNRFSDGQKLLF

SEQ ID NO: 742254 - protein, 13 aa, Homo sapiens
  CDR3 for beta chain variable domain of TCR clone 371127 (TRBV12-4, TRBJ2-3)
CASGDRQSDTQYF

SEQ ID NO: 742255 - protein, 16 aa, Homo sapiens
  CDR3 for alpha chain variable domain of TCR clone 371128 (TRAV12-3, TRAJ53)
CAMSPGSGGSNYKLTF

SEQ ID NO: 742256 - protein, 15 aa, Homo sapiens
  CDR3 for beta chain variable domain of TCR clone 371128 (TRBV27, TRBJ2-1)
CASSNGGGSSNEQFV

SEQ ID NO: 742257 - protein, 13 aa, Homo sapiens
  CDR3 for alpha chain variable domain of TCR clone 371129 (TRAV8-3, TRAJ28)
CAVGAVGSYQLTF

SEQ ID NO: 742258 - protein, 13 aa, Homo sapiens
  CDR3 for beta chain variable domain of TCR clone 371129 (TRBV2, TRBJ2-7)
CASSGAAAYEQYF

SEQ ID NO: 742259 - protein, 15 aa, Homo sapiens
  CDR3 for alpha chain variable domain of TCR clone 371130 (TRAV3, TRAJ4)
CAVRDGTGGYTKLIF

SEQ ID NO: 742260 - protein, 16 aa, Homo sapiens
  CDR3 for beta chain variable domain of TCR clone 371130 (TRBV27, TRBJ2-2)
CASSSSGVSNAGELFF

SEQ ID NO: 742261 - protein, 17 aa, Homo sapiens
  CDR3 for alpha chain variable domain of TCR clone 371131 (TRAV1-1, TRAJ4)
CALYDKLIFGAGTRLAV

SEQ ID NO: 742262 - protein, 18 aa, Homo sapiens
  CDR3 for beta chain variable domain of TCR clone 371131 (TRBV27, TRBJ2-7)
CASRTGQFFPGARDEQYF

SEQ ID NO: 742263 - protein, 14 aa, Homo sapiens
  CDR3 for alpha chain variable domain of TCR clone 371132 (TRAV12-3, TRAJ10)
SHLPLTGGGNKLTF

SEQ ID NO: 742264 - protein, 12 aa, Homo sapiens
  CDR3 for beta chain variable domain of TCR clone 371132 (TRBV12-4, TRBJ1-1)
CQQSGTGFEAFF

SEQ ID NO: 742265 - protein, 12 aa, Homo sapiens
  CDR3 for alpha chain variable domain of TCR clone 371133 (TRAV21, TRAJ33)
CAKMDSNYQLIW

SEQ ID NO: 742266 - protein, 14 aa, Homo sapiens
  CDR3 for beta chain variable domain of TCR clone 371133 (TRBV20-1, TRBJ1-3)
CSASPTGAGNTTYF

SEQ ID NO: 742267 - protein, 13 aa, Homo sapiens
  CDR3 for alpha chain variable domain of TCR clone 371134 (TRAV21, TRAJ3)
CCEPYSSASKIIF

SEQ ID NO: 742268 - protein, 15 aa, Homo sapiens
  CDR3 for beta chain variable domain of TCR clone 371134 (TRBV7-3, TRBJ2-1)
CASSPTGGGEDEQFF

SEQ ID NO: 742269 - protein, 17 aa, Homo sapiens
  CDR3 for alpha chain variable domain of TCR clone 371135 (TRAV13-1, TRAJ28)
CAASPPYSGAGSYQLTS

SEQ ID NO: 742270 - protein, 15 aa, Homo sapiens
  CDR3 for beta chain variable domain of TCR clone 371135 (TRBV6-3, TRBJ2-7)
CASSSPGTVFYEQYF

SEQ ID NO: 742271 - protein, 14 aa, Homo sapiens
  CDR3 for alpha chain variable domain of TCR clone 371136 (TRAV36/DV7, TRAJ20)
CAVESYSNDYKLSF

SEQ ID NO: 742272 - protein, 15 aa, Homo sapiens
  CDR3 for beta chain variable domain of TCR clone 371136 (TRBV4-2, TRBJ2-3)
CASSPAGGGIDTQYF

SEQ ID NO: 742273 - protein, 13 aa, Homo sapiens
  CDR3 for alpha chain variable domain of TCR clone 371137 (TRAV20, TRAJ21)
CAVEGYNFNKFYF

SEQ ID NO: 742274 - protein, 14 aa, Homo sapiens
  CDR3 for beta chain variable domain of TCR clone 371137 (TRBV3-1, TRBJ2-7)
CASSPSSGTYEQYF

SEQ ID NO: 742275 - protein, 12 aa, Homo sapiens
  CDR3 for alpha chain variable domain of TCR clone 371138 (TRAV8-2, TRAJ40)
CWVLPRTYKYIF

SEQ ID NO: 742276 - protein, 15 aa, Homo sapiens
  CDR3 for beta chain variable domain of TCR clone 371138 (TRBV28, TRBJ2-1)
CASSIIAGGRSEQFF

SEQ ID NO: 742277 - protein, 14 aa, Homo sapiens
  CDR3 for alpha chain variable domain of TCR clone 371139 (TRAV3, TRAJ9)
CAVRLNTGGFKTIF

SEQ ID NO: 742278 - protein, 15 aa, Homo sapiens
  CDR3 for beta chain variable domain of TCR clone 371139 (TRBV7-2, TRBJ2-1)
CASSLASGRRNEQFF

SEQ ID NO: 742279 - protein, 15 aa, Homo sapiens
  CDR3 for alpha chain variable domain of TCR clone 371140 (TRAV8-3, TRAJ27)
CVVGPSKTNAGKSTF

SEQ ID NO: 742280 - protein, 13 aa, Homo sapiens
  CDR3 for beta chain variable domain of TCR clone 371140 (TRBV20-1, TRBJ1-1)
CSAPLGGGTEAFF

SEQ ID NO: 742281 - protein, 15 aa, Homo sapiens
  CDR3 for alpha chain variable domain of TCR clone 371141 (TRAV27, TRAJ38)
CAARRNAGNNRKLLW

SEQ ID NO: 742282 - protein, 11 aa, Homo sapiens
  CDR3 for beta chain variable domain of TCR clone 371141 (TRBV12-4, TRBJ2-2)
RASSSAGELFF

SEQ ID NO: 742283 - protein, 14 aa, Homo sapiens
  CDR3 for alpha chain variable domain of TCR clone 371142 (TRAV3, TRAJ29)
CAVRPNSGNTPLVF

SEQ ID NO: 742284 - protein, 15 aa, Homo sapiens
  CDR3 for beta chain variable domain of TCR clone 371142 (TRBV5-5, TRBJ1-2)
CASSLGPTGNYGYTV

SEQ ID NO: 742285 - protein, 19 aa, Homo sapiens
  CDR3 for alpha chain variable domain of TCR clone 371143 (TRAV26-1, TRAJ52)
CIVRAHRNAGGTSYGKLKF

SEQ ID NO: 742286 - protein, 15 aa, Homo sapiens
  CDR3 for beta chain variable domain of TCR clone 371143 (TRBV29-1, TRBJ2-1)
CSGSDRKSSYNEQFF

SEQ ID NO: 742287 - protein, 15 aa, Homo sapiens
  CDR3 for alpha chain variable domain of TCR clone 371144 (TRAV21, TRAJ36)
CAVRRKQTGANNLFF

SEQ ID NO: 742288 - protein, 16 aa, Homo sapiens
  CDR3 for beta chain variable domain of TCR clone 371144 (TRBV4-2, TRBJ2-3)
CASSQELAGDTDTQYF

SEQ ID NO: 742289 - protein, 15 aa, Homo sapiens
  CDR3 for alpha chain variable domain of TCR clone 371145 (TRAV13-1, TRAJ17)
CAASIERAAGNKLTF

SEQ ID NO: 742290 - protein, 12 aa, Homo sapiens
  CDR3 for beta chain variable domain of TCR clone 371145 (TRBV5-7, TRBJ1-1)
CASSLGRGKEFF

SEQ ID NO: 742291 - protein, 13 aa, Homo sapiens
  CDR3 for alpha chain variable domain of TCR clone 371146 (TRAV27, TRAJ45)
CRSSGGGADGLTF

SEQ ID NO: 742292 - protein, 14 aa, Homo sapiens
  CDR3 for beta chain variable domain of TCR clone 371146 (TRBV18, TRBJ2-5)
CASSPGVSQETQYF

SEQ ID NO: 742293 - protein, 13 aa, Homo sapiens
  CDR3 for alpha chain variable domain of TCR clone 371147 (TRAV12-2, TRAJ47)
CAVFMEYGNKLFF

SEQ ID NO: 742294 - protein, 14 aa, Homo sapiens
  CDR3 for beta chain variable domain of TCR clone 371147 (TRBV4-1, TRBJ1-5)
CASSQGPTNQPQHF

SEQ ID NO: 742295 - protein, 14 aa, Homo sapiens
  CDR3 for alpha chain variable domain of TCR clone 371148 (TRAV12-2, TRAJ48)
CAVNAFFGNEKLTF

SEQ ID NO: 742296 - protein, 15 aa, Homo sapiens
  CDR3 for beta chain variable domain of TCR clone 371148 (TRBV20-1, TRBJ2-7)
CSARVPAAYFYEQYF

SEQ ID NO: 742297 - protein, 16 aa, Homo sapiens
  CDR3 for alpha chain variable domain of TCR clone 371149 (TRAV14/DV4, TRAJ15)
CAMREGSFQAGTALIF

SEQ ID NO: 742298 - protein, 14 aa, Homo sapiens
  CDR3 for beta chain variable domain of TCR clone 371149 (TRBV7-2, TRBJ2-7)
CASSPKTSFYEQYF

SEQ ID NO: 742299 - protein, 13 aa, Homo sapiens
  CDR3 for alpha chain variable domain of TCR clone 371150 (TRAV8-3, TRAJ28)
CAVGAVGSYQPTF

SEQ ID NO: 742300 - protein, 16 aa, Homo sapiens
  CDR3 for beta chain variable domain of TCR clone 371150 (TRBV7-2, TRBJ2-7)
CASRSQGRRTSSTSGR

SEQ ID NO: 742301 - protein, 14 aa, Homo sapiens
  CDR3 for alpha chain variable domain of TCR clone 371151 (TRAV1-2, TRAJ10)
CAVRVTGGGNKLTF

SEQ ID NO: 742302 - protein, 12 aa, Homo sapiens
  CDR3 for beta chain variable domain of TCR clone 371151 (TRBV5-4, TRBJ1-1)
CASSFRQTEAFF

SEQ ID NO: 742303 - protein, 16 aa, Homo sapiens
  CDR3 for alpha chain variable domain of TCR clone 371152 (TRAV3, TRAJ37)
CAVIGKGSGNTGKLIF

SEQ ID NO: 742304 - protein, 12 aa, Homo sapiens
  CDR3 for beta chain variable domain of TCR clone 371152 (TRBV12-4, TRBJ2-3)
CASSTLPDTQYF

SEQ ID NO: 742305 - protein, 13 aa, Homo sapiens
  CDR3 for alpha chain variable domain of TCR clone 371153 (TRAV13-1, TRAJ6)
CAARSGGSYIPTF

SEQ ID NO: 742306 - protein, 15 aa, Homo sapiens
  CDR3 for beta chain variable domain of TCR clone 371153 (TRBV12-4, TRBJ2-5)
CASSPPTGRQETQYL

SEQ ID NO: 742307 - protein, 14 aa, Homo sapiens
  CDR3 for alpha chain variable domain of TCR clone 371154 (TRAV2, TRAJ8)
TTVLFNTGFQKLVF

SEQ ID NO: 742308 - protein, 15 aa, Homo sapiens
  CDR3 for beta chain variable domain of TCR clone 371154 (TRBV15, TRBJ2-7)
CATSSRQESSYEQYF

SEQ ID NO: 742309 - protein, 12 aa, Homo sapiens
  CDR3 for alpha chain variable domain of TCR clone 371155 (TRAV12-3, TRAJ17)
CAMTLTGNKLTF

SEQ ID NO: 742310 - protein, 11 aa, Homo sapiens
  CDR3 for beta chain variable domain of TCR clone 371155 (TRBV12-4, TRBJ2-2)
CASSAAGELFF

SEQ ID NO: 742311 - protein, 17 aa, Homo sapiens
  CDR3 for alpha chain variable domain of TCR clone 371156 (TRAV3, TRAJ6)
CAVRDGPRAGGSYIPTF

SEQ ID NO: 742312 - protein, 13 aa, Homo sapiens
  CDR3 for beta chain variable domain of TCR clone 371156 (TRBV11-3, TRBJ2-3)
CASRETGRDTQYF

SEQ ID NO: 742313 - protein, 15 aa, Homo sapiens
  CDR3 for alpha chain variable domain of TCR clone 371157 (TRAV14/DV4, TRAJ54)
CNERGRIQGAQKLVF

SEQ ID NO: 742314 - protein, 15 aa, Homo sapiens
  CDR3 for beta chain variable domain of TCR clone 371157 (TRBV20-1, TRBJ2-7)
CSARDRVSGMDEQYF

SEQ ID NO: 742315 - protein, 14 aa, Homo sapiens
  CDR3 for alpha chain variable domain of TCR clone 371158 (TRAV12-3, TRAJ10)
SYLPLTGGGNKLTF

SEQ ID NO: 742316 - protein, 15 aa, Homo sapiens
  CDR3 for beta chain variable domain of TCR clone 371158 (TRBV6-6, TRBJ1-5)
CASSSIQGTNQPQHF

SEQ ID NO: 742317 - protein, 16 aa, Homo sapiens
  CDR3 for alpha chain variable domain of TCR clone 371159 (TRAV2, TRAJ20)
TTVLWSFRSNDYNLSF

SEQ ID NO: 742318 - protein, 12 aa, Homo sapiens
  CDR3 for beta chain variable domain of TCR clone 371159 (TRBV7-6, TRBJ2-3)
CASSTGTDTQYF

SEQ ID NO: 742319 - protein, 13 aa, Homo sapiens
  CDR3 for alpha chain variable domain of TCR clone 371160 (TRAV12-1, TRAJ21)
CVVTLYNFNKFYF

SEQ ID NO: 742320 - protein, 20 aa, Homo sapiens
  CDR3 for beta chain variable domain of TCR clone 371160 (TRBV7-8, TRBJ2-1)
CASSLTHRLAGVRSYNEQFF

SEQ ID NO: 742321 - protein, 14 aa, Homo sapiens
  CDR3 for alpha chain variable domain of TCR clone 371161 (TRAV4, TRAJ20)
CLVGRRSNDYKLSF

SEQ ID NO: 742322 - protein, 18 aa, Homo sapiens
  CDR3 for beta chain variable domain of TCR clone 371161 (TRBV2, TRBJ2-5)
CASSSDPQGRGAQETQYF

SEQ ID NO: 742323 - protein, 14 aa, Homo sapiens
  CDR3 for alpha chain variable domain of TCR clone 371162 (TRAV35, TRAJ33)
CWPRGRDSNCQLIW

SEQ ID NO: 742324 - protein, 11 aa, Homo sapiens
  CDR3 for beta chain variable domain of TCR clone 371162 (TRBV10-3, TRBJ2-7)
CAISEGLEQYF

SEQ ID NO: 742325 - protein, 14 aa, Homo sapiens
  CDR3 for alpha chain variable domain of TCR clone 371163 (TRAV25, TRAJ35)
CARRMAGFGNVLHC

SEQ ID NO: 742326 - protein, 13 aa, Homo sapiens
  CDR3 for beta chain variable domain of TCR clone 371163 (TRBV7-2, TRBJ1-4)
CASSLAGLEKLFF

SEQ ID NO: 742327 - protein, 12 aa, Homo sapiens
  CDR3 for alpha chain variable domain of TCR clone 371164 (TRAV8-4, TRAJ37)
CAKSSNTGKLIF

SEQ ID NO: 742328 - protein, 15 aa, Homo sapiens
  CDR3 for beta chain variable domain of TCR clone 371164 (TRBV12-4, TRBJ1-5)
CASSRDRGRNQPQHF

SEQ ID NO: 742329 - protein, 13 aa, Homo sapiens
  CDR3 for alpha chain variable domain of TCR clone 371165 (TRAV36/DV7, TRAJ49)
CAGDSNTGNQFYF

SEQ ID NO: 742330 - protein, 13 aa, Homo sapiens
  CDR3 for beta chain variable domain of TCR clone 371165 (TRBV10-3, TRBJ2-7)
CASKLAVNYEQYF

SEQ ID NO: 742331 - protein, 15 aa, Homo sapiens
  CDR3 for alpha chain variable domain of TCR clone 371166 (TRAV26-1, TRAJ29)
CIVRVEGPGNTPLVF

SEQ ID NO: 742332 - protein, 15 aa, Homo sapiens
  CDR3 for beta chain variable domain of TCR clone 371166 (TRBV7-9, TRBJ1-5)
CASSQGPQPNQPQHF

SEQ ID NO: 742333 - protein, 15 aa, Homo sapiens
  CDR3 for alpha chain variable domain of TCR clone 371167 (TRAV8-2, TRAJ44)
DAAEYFDGTGSKLTF

SEQ ID NO: 742334 - protein, 14 aa, Homo sapiens
  CDR3 for beta chain variable domain of TCR clone 371167 (TRBV7-8, TRBJ2-3)
CASSLDRGTDTQYF

SEQ ID NO: 742335 - protein, 14 aa, Homo sapiens
  CDR3 for alpha chain variable domain of TCR clone 371168 (TRAV13-1, TRAJ35)
CAAIKLGFGNVLHC

SEQ ID NO: 742336 - protein, 13 aa, Homo sapiens
  CDR3 for beta chain variable domain of TCR clone 371168 (TRBV7-3, TRBJ1-1)
CASSQDWGAEAFF

SEQ ID NO: 742337 - protein, 17 aa, Homo sapiens
  CDR3 for alpha chain variable domain of TCR clone 371169 (TRAV13-1, TRAJ28)
CAASPPYSGAGSYQLTF

SEQ ID NO: 742338 - protein, 19 aa, Homo sapiens
  CDR3 for beta chain variable domain of TCR clone 371169 (TRBV19, TRBJ2-5)
CASSIGQVTDFFLGETQYF

SEQ ID NO: 742339 - protein, 11 aa, Homo sapiens
  CDR3 for alpha chain variable domain of TCR clone 371170 (TRAV8-6, TRAJ20)
CAVIYDYKLSF

SEQ ID NO: 742340 - protein, 14 aa, Homo sapiens
  CDR3 for beta chain variable domain of TCR clone 371170 (TRBV10-2, TRBJ2-2)
CASSERSNTGELFF

SEQ ID NO: 742341 - protein, 15 aa, Homo sapiens
  CDR3 for alpha chain variable domain of TCR clone 371171 (TRAV12-2, TRAJ8)
CAVREENTGFQKLVF

SEQ ID NO: 742342 - protein, 15 aa, Homo sapiens
  CDR3 for beta chain variable domain of TCR clone 371171 (TRBV28, TRBJ2-4)
CAAGSGTLLRGIQYF

SEQ ID NO: 742343 - protein, 17 aa, Homo sapiens
  CDR3 for alpha chain variable domain of TCR clone 371172 (TRAV3, TRAJ42)
CAVRDRDYGGSQGNLIF

SEQ ID NO: 742344 - protein, 16 aa, Homo sapiens
  CDR3 for beta chain variable domain of TCR clone 371172 (TRBV7-3, TRBJ2-2)
CASGLKRGTLSGELFF

SEQ ID NO: 742345 - protein, 13 aa, Homo sapiens
  CDR3 for alpha chain variable domain of TCR clone 371173 (TRAV12-3, TRAJ54)
RAMKVQGAQKLVF

SEQ ID NO: 742346 - protein, 15 aa, Homo sapiens
  CDR3 for beta chain variable domain of TCR clone 371173 (TRBV28, TRBJ2-7)
CASSPTGTGSYEQYF

SEQ ID NO: 742347 - protein, 14 aa, Homo sapiens
  CDR3 for alpha chain variable domain of TCR clone 371174 (TRAV29/DV5, TRAJ36)
CAARRKTGANNLFF

SEQ ID NO: 742348 - protein, 14 aa, Homo sapiens
  CDR3 for beta chain variable domain of TCR clone 371174 (TRBV12-5, TRBJ2-5)
CASGSRTHQETQYF

SEQ ID NO: 742349 - protein, 14 aa, Homo sapiens
  CDR3 for alpha chain variable domain of TCR clone 371175 (TRAV1-1, TRAJ23)
CAVSIYNQGGKLIF

SEQ ID NO: 742350 - protein, 14 aa, Homo sapiens
  CDR3 for beta chain variable domain of TCR clone 371175 (TRBV19, TRBJ2-1)
CASPTFVLSGEQFF

SEQ ID NO: 742351 - protein, 11 aa, Homo sapiens
  CDR3 for alpha chain variable domain of TCR clone 371176 (TRAV8-4, TRAJ34)
CAVSWTDKLIF

SEQ ID NO: 742352 - protein, 17 aa, Homo sapiens
  CDR3 for beta chain variable domain of TCR clone 371176 (TRBV11-2, TRBJ2-1)
CASSLCPPGVEYNEQFF

SEQ ID NO: 742353 - protein, 14 aa, Homo sapiens
  CDR3 for alpha chain variable domain of TCR clone 371177 (TRAV3, TRAJ34)
CAVRAPGNTDKPIF

SEQ ID NO: 742354 - protein, 14 aa, Homo sapiens
  CDR3 for beta chain variable domain of TCR clone 371177 (TRBV5-4, TRBJ1-1)
CASSLDSRRDEAFF

SEQ ID NO: 742355 - protein, 13 aa, Homo sapiens
  CDR3 for alpha chain variable domain of TCR clone 371178 (TRAV13-1, TRAJ8)
CAASIRGFQKLVF

SEQ ID NO: 742356 - protein, 14 aa, Homo sapiens
  CDR3 for beta chain variable domain of TCR clone 371178 (TRBV7-2, TRBJ2-1)
CASSLVQGRNDRFF

SEQ ID NO: 742357 - protein, 14 aa, Homo sapiens
  CDR3 for alpha chain variable domain of TCR clone 371179 (TRAV1-2, TRAJ8)
CAVRGDTGFQKLVF

SEQ ID NO: 742358 - protein, 12 aa, Homo sapiens
  CDR3 for beta chain variable domain of TCR clone 371179 (TRBV12-5, TRBJ2-5)
CASGQGVETQYF

SEQ ID NO: 742359 - protein, 10 aa, Homo sapiens
  CDR3 for alpha chain variable domain of TCR clone 371180 (TRAV30, TRAJ34)
CGINPDKLIF

SEQ ID NO: 742360 - protein, 12 aa, Homo sapiens
  CDR3 for beta chain variable domain of TCR clone 371180 (TRBV19, TRBJ1-1)
CASSLSDTEAFF

SEQ ID NO: 742361 - protein, 10 aa, Homo sapiens
  CDR3 for alpha chain variable domain of TCR clone 371181 (TRAV9-2, TRAJ49)
CAMTGNQFYF

SEQ ID NO: 742362 - protein, 16 aa, Homo sapiens
  CDR3 for beta chain variable domain of TCR clone 371181 (TRBV19, TRBJ2-3)
CASSPGAASRTDTQYF

SEQ ID NO: 742363 - protein, 14 aa, Homo sapiens
  CDR3 for alpha chain variable domain of TCR clone 371182 (TRAV29/DV5, TRAJ36)
CAARRKTGANNLFF

SEQ ID NO: 742364 - protein, 15 aa, Homo sapiens
  CDR3 for beta chain variable domain of TCR clone 371182 (TRBV5-7, TRBJ1-5)
CASSYGKLWDQPQHF

SEQ ID NO: 742365 - protein, 14 aa, Homo sapiens
  CDR3 for alpha chain variable domain of TCR clone 371183 (TRAV1-2, TRAJ8)
CTVREDTGFQKLVF

SEQ ID NO: 742366 - protein, 16 aa, Homo sapiens
  CDR3 for beta chain variable domain of TCR clone 371183 (TRBV15, TRBJ2-3)
CATSRDLGIVTDTQYF

SEQ ID NO: 742367 - protein, 14 aa, Homo sapiens
  CDR3 for alpha chain variable domain of TCR clone 371184 (TRAV21, TRAJ45)
CAVVSGGGADGLTF

SEQ ID NO: 742368 - protein, 14 aa, Homo sapiens
  CDR3 for beta chain variable domain of TCR clone 371184 (TRBV20-1, TRBJ2-3)
CSARGLEGADTQYF

SEQ ID NO: 742369 - protein, 14 aa, Homo sapiens
  CDR3 for alpha chain variable domain of TCR clone 371185 (TRAV13-1, TRAJ44)
CAAKATGTASKLTF

SEQ ID NO: 742370 - protein, 12 aa, Homo sapiens
  CDR3 for beta chain variable domain of TCR clone 371185 (TRBV7-9, TRBJ1-6)
CASSASESPLHF

SEQ ID NO: 742371 - protein, 11 aa, Homo sapiens
  CDR3 for alpha chain variable domain of TCR clone 371186 (TRAV30, TRAJ54)
QAVQGAQKLVF

SEQ ID NO: 742372 - protein, 11 aa, Homo sapiens
  CDR3 for beta chain variable domain of TCR clone 371186 (TRBV25-1, TRBJ2-4)
CQSRDQNIQYF

SEQ ID NO: 742373 - protein, 13 aa, Homo sapiens
  CDR3 for alpha chain variable domain of TCR clone 371187 (TRAV3, TRAJ27)
CAVRPLGAGKSTF

SEQ ID NO: 742374 - protein, 16 aa, Homo sapiens
  CDR3 for beta chain variable domain of TCR clone 371187 (TRBV19, TRBJ2-1)
CASSIKLAGSYNEQFF

SEQ ID NO: 742375 - protein, 14 aa, Homo sapiens
  CDR3 for alpha chain variable domain of TCR clone 371188 (TRAV8-2, TRAJ4)
CVVSPSRGYNKLIF

SEQ ID NO: 742376 - protein, 11 aa, Homo sapiens
  CDR3 for beta chain variable domain of TCR clone 371188 (TRBV29-1, TRBJ2-5)
CSEDRTGTQYF

SEQ ID NO: 742377 - protein, 15 aa, Homo sapiens
  CDR3 for alpha chain variable domain of TCR clone 371189 (TRAV26-1, TRAJ29)
CIVRVEGSGNTPPVF

SEQ ID NO: 742378 - protein, 15 aa, Homo sapiens
  CDR3 for beta chain variable domain of TCR clone 371189 (TRBV28, TRBJ2-5)
CASSPGQGSIETQYF

SEQ ID NO: 742379 - protein, 14 aa, Homo sapiens
  CDR3 for alpha chain variable domain of TCR clone 371190 (TRAV13-1, TRAJ24)
CAASRTASWGKLQF

SEQ ID NO: 742380 - protein, 15 aa, Homo sapiens
  CDR3 for beta chain variable domain of TCR clone 371190 (TRBV7-9, TRBJ1-5)
CASSQGHQPNQPQHF

SEQ ID NO: 742381 - protein, 15 aa, Homo sapiens
  CDR3 for alpha chain variable domain of TCR clone 371191 (TRAV23/DV6, TRAJ37)
CAAGEGSSNTGKLIF

SEQ ID NO: 742382 - protein, 15 aa, Homo sapiens
  CDR3 for beta chain variable domain of TCR clone 371191 (TRBV5-1, TRBJ2-7)
CASSPQGRPLDEQYF

SEQ ID NO: 742383 - protein, 13 aa, Homo sapiens
  CDR3 for alpha chain variable domain of TCR clone 371192 (TRAV36/DV7, TRAJ50)
CAVSKTSYDKVIF

SEQ ID NO: 742384 - protein, 13 aa, Homo sapiens
  CDR3 for beta chain variable domain of TCR clone 371192 (TRBV18, TRBJ2-7)
CASSPGRNYEQFF

SEQ ID NO: 742385 - protein, 16 aa, Homo sapiens
  CDR3 for alpha chain variable domain of TCR clone 371193 (TRAV8-3, TRAJ8)
CAVPRDGNTGFQKLVF

SEQ ID NO: 742386 - protein, 14 aa, Homo sapiens
  CDR3 for beta chain variable domain of TCR clone 371193 (TRBV28, TRBJ1-1)
RASSESGRGTEAFF

SEQ ID NO: 742387 - protein, 16 aa, Homo sapiens
  CDR3 for alpha chain variable domain of TCR clone 371194 (TRAV30, TRAJ24)
CGTEIVDADSWGKFQF

SEQ ID NO: 742388 - protein, 14 aa, Homo sapiens
  CDR3 for beta chain variable domain of TCR clone 371194 (TRBV7-2, TRBJ1-5)
CASSPGRLNQPQHF

SEQ ID NO: 742389 - protein, 14 aa, Homo sapiens
  CDR3 for alpha chain variable domain of TCR clone 371195 (TRAV17, TRAJ15)
CATAPNQAGTALIF

SEQ ID NO: 742390 - protein, 14 aa, Homo sapiens
  CDR3 for beta chain variable domain of TCR clone 371195 (TRBV19, TRBJ2-7)
CASRMGQGAIEQYF

SEQ ID NO: 742391 - protein, 14 aa, Homo sapiens
  CDR3 for alpha chain variable domain of TCR clone 371196 (TRAV35, TRAJ22)
CAGLRPGSARQLTF

SEQ ID NO: 742392 - protein, 13 aa, Homo sapiens
  CDR3 for beta chain variable domain of TCR clone 371196 (TRBV7-7, TRBJ1-1)
CASSLGANTEAFF

SEQ ID NO: 742393 - protein, 17 aa, Homo sapiens
  CDR3 for alpha chain variable domain of TCR clone 371197 (TRAV13-1, TRAJ52)
CAASSGAGGTSYGKLTF

SEQ ID NO: 742394 - protein, 17 aa, Homo sapiens
  CDR3 for beta chain variable domain of TCR clone 371197 (TRBV4-1, TRBJ2-5)
CASSQDLTGGPIETQYF

SEQ ID NO: 742395 - protein, 11 aa, Homo sapiens
  CDR3 for alpha chain variable domain of TCR clone 371198 (TRAV20, TRAJ32)
CAVDGRVVLQT

SEQ ID NO: 742396 - protein, 16 aa, Homo sapiens
  CDR3 for beta chain variable domain of TCR clone 371198 (TRBV19, TRBJ2-2)
CASRSPGTGATGELFF

SEQ ID NO: 742397 - protein, 16 aa, Homo sapiens
  CDR3 for alpha chain variable domain of TCR clone 371199 (TRAV12-2, TRAJ45)
CAVIFLSGGGADGLTF

SEQ ID NO: 742398 - protein, 19 aa, Homo sapiens
  CDR3 for beta chain variable domain of TCR clone 371199 (TRBV28, TRBJ2-1)
CASSFSIRGSGRTRYEQFF

SEQ ID NO: 742399 - protein, 11 aa, Homo sapiens
  CDR3 for alpha chain variable domain of TCR clone 371200 (TRAV13-1, TRAJ43)
CAAHNNNDMRF

SEQ ID NO: 742400 - protein, 15 aa, Homo sapiens
  CDR3 for beta chain variable domain of TCR clone 371200 (TRBV6-1, TRBJ2-2)
CAGSRLRGDTGELFF

SEQ ID NO: 742401 - protein, 15 aa, Homo sapiens
  CDR3 for alpha chain variable domain of TCR clone 371201 (TRAV8-6, TRAJ10)
CAVSDQAGGGNKLTF

SEQ ID NO: 742402 - protein, 15 aa, Homo sapiens
  CDR3 for beta chain variable domain of TCR clone 371201 (TRBV3-1, TRBJ2-5)
CASSANLGGSETQYF

SEQ ID NO: 742403 - protein, 15 aa, Homo sapiens
  CDR3 for alpha chain variable domain of TCR clone 371202 (TRAV23/DV6, TRAJ33)
CAASNSGGGNYQLIW

SEQ ID NO: 742404 - protein, 14 aa, Homo sapiens
  CDR3 for beta chain variable domain of TCR clone 371202 (TRBV19, TRBJ2-5)
CASSMTGQQETQYF

SEQ ID NO: 742405 - protein, 16 aa, Homo sapiens
  CDR3 for alpha chain variable domain of TCR clone 371203 (TRAV35, TRAJ28)
CAGQRYSGTGSYQLTF

SEQ ID NO: 742406 - protein, 13 aa, Homo sapiens
  CDR3 for beta chain variable domain of TCR clone 371203 (TRBV19, TRBJ1-2)
CASSQGQVYGYTF

SEQ ID NO: 742407 - protein, 19 aa, Homo sapiens
  CDR3 for alpha chain variable domain of TCR clone 371204 (TRAV29/DV5, TRAJ49)
CSVLLCSKLTVDTGNQFYF

SEQ ID NO: 742408 - protein, 15 aa, Homo sapiens
  CDR3 for beta chain variable domain of TCR clone 371204 (TRBV4-3, TRBJ2-2)
CASNQGGTPTGELFF

SEQ ID NO: 742409 - protein, 15 aa, Homo sapiens
  CDR3 for alpha chain variable domain of TCR clone 371205 (TRAV27, TRAJ38)
CAARRNAGNNRKLIW

SEQ ID NO: 742410 - protein, 13 aa, Homo sapiens
  CDR3 for beta chain variable domain of TCR clone 371205 (TRBV7-3, TRBJ2-1)
CASSLDSYNEQFV

SEQ ID NO: 742411 - protein, 13 aa, Homo sapiens
  CDR3 for alpha chain variable domain of TCR clone 371206 (TRAV12-1, TRAJ6)
CVVFPGGSYIPTF

SEQ ID NO: 742412 - protein, 12 aa, Homo sapiens
  CDR3 for beta chain variable domain of TCR clone 371206 (TRBV11-2, TRBJ2-7)
CASSLPTYEQYF

SEQ ID NO: 742413 - protein, 14 aa, Homo sapiens
  CDR3 for alpha chain variable domain of TCR clone 371207 (TRAV2, TRAJ9)
CAVDPNTVGFKTIF

SEQ ID NO: 742414 - protein, 13 aa, Homo sapiens
  CDR3 for beta chain variable domain of TCR clone 371207 (TRBV20-1, TRBJ2-1)
CSASTGTSNEQFF

SEQ ID NO: 742415 - protein, 20 aa, Homo sapiens
  CDR3 for alpha chain variable domain of TCR clone 371208 (TRAV21, TRAJ4)
AASQPGDSATLAGCYNKLIF

SEQ ID NO: 742416 - protein, 19 aa, Homo sapiens
  CDR3 for beta chain variable domain of TCR clone 371208 (TRBV18, TRBJ1-3)
CASSPLSRTGMSSGNTMYF

SEQ ID NO: 742417 - protein, 11 aa, Homo sapiens
  CDR3 for alpha chain variable domain of TCR clone 371209 (TRAV13-1, TRAJ30)
CAASRDDKIIF

SEQ ID NO: 742418 - protein, 15 aa, Homo sapiens
  CDR3 for beta chain variable domain of TCR clone 371209 (TRBV18, TRBJ1-1)
CAGSPSSWVNTEAFF

SEQ ID NO: 742419 - protein, 15 aa, Homo sapiens
  CDR3 for alpha chain variable domain of TCR clone 371210 (TRAV3, TRAJ36)
CAVRASQTGANNLFF

SEQ ID NO: 742420 - protein, 14 aa, Homo sapiens
  CDR3 for beta chain variable domain of TCR clone 371210 (TRBV10-3, TRBJ2-2)
CASVEHIESGELFF

SEQ ID NO: 742421 - protein, 16 aa, Homo sapiens
  CDR3 for alpha chain variable domain of TCR clone 371211 (TRAV12-3, TRAJ53)
CAMSPGSGGSNYKPTF

SEQ ID NO: 742422 - protein, 11 aa, Homo sapiens
  CDR3 for beta chain variable domain of TCR clone 371211 (TRBV29-1, TRBJ2-5)
CSEDRTGTKYF

SEQ ID NO: 742423 - protein, 13 aa, Homo sapiens
  CDR3 for alpha chain variable domain of TCR clone 371212 (TRAV12-3, TRAJ7)
CAMSASGNNRLAF

SEQ ID NO: 742424 - protein, 16 aa, Homo sapiens
  CDR3 for beta chain variable domain of TCR clone 371212 (TRBV27, TRBJ2-7)
CASSSERRDSAYEQYF

SEQ ID NO: 742425 - protein, 13 aa, Homo sapiens
  CDR3 for alpha chain variable domain of TCR clone 371213 (TRAV8-3, TRAJ44)
CAVVRGTASKLTF

SEQ ID NO: 742426 - protein, 14 aa, Homo sapiens
  CDR3 for beta chain variable domain of TCR clone 371213 (TRBV11-2, TRBJ2-3)
CASSRLARTDTQYF

SEQ ID NO: 742427 - protein, 12 aa, Homo sapiens
  CDR3 for alpha chain variable domain of TCR clone 371214 (TRAV12-3, TRAJ17)
CAMTLTGNKPTF

SEQ ID NO: 742428 - protein, 14 aa, Homo sapiens
  CDR3 for beta chain variable domain of TCR clone 371214 (TRBV2, TRBJ2-3)
CASSEGQNTDTQYF

SEQ ID NO: 742429 - protein, 17 aa, Homo sapiens
  CDR3 for alpha chain variable domain of TCR clone 371215 (TRAV8-4, TRAJ45)
CAVRTRGSRRRCCRTHL

SEQ ID NO: 742430 - protein, 16 aa, Homo sapiens
  CDR3 for beta chain variable domain of TCR clone 371215 (TRBV4-2, TRBJ2-3)
CASSQELAGDTDTQYF

SEQ ID NO: 742431 - protein, 10 aa, Homo sapiens
  CDR3 for alpha chain variable domain of TCR clone 371216 (TRAV12-1, TRAJ37)
ARGNPGKLIF

SEQ ID NO: 742432 - protein, 15 aa, Homo sapiens
  CDR3 for beta chain variable domain of TCR clone 371216 (TRBV7-2, TRBJ2-3)
CASSLEQGGTDTQYF

SEQ ID NO: 742433 - protein, 15 aa, Homo sapiens
  CDR3 for alpha chain variable domain of TCR clone 371217 (TRAV16, TRAJ16)
CSKWPVHRDGQKLLF

SEQ ID NO: 742434 - protein, 14 aa, Homo sapiens
  CDR3 for beta chain variable domain of TCR clone 371217 (TRBV7-9, TRBJ2-4)
CASTTGGAKNIQYF

SEQ ID NO: 742435 - protein, 15 aa, Homo sapiens
  CDR3 for alpha chain variable domain of TCR clone 371218 (TRAV17, TRAJ57)
CATGPSQGGSEKLAL

SEQ ID NO: 742436 - protein, 14 aa, Homo sapiens
  CDR3 for beta chain variable domain of TCR clone 371218 (TRBV12-5, TRBJ2-5)
CASGSRTHQETQYF

SEQ ID NO: 742437 - protein, 15 aa, Homo sapiens
  CDR3 for alpha chain variable domain of TCR clone 371219 (TRAV2, TRAJ11)
CAVEDPNSGYSTLTF

SEQ ID NO: 742438 - protein, 11 aa, Homo sapiens
  CDR3 for beta chain variable domain of TCR clone 371219 (TRBV7-8, TRBJ2-7)
CASSLSLEQYF

SEQ ID NO: 742439 - protein, 14 aa, Homo sapiens
  CDR3 for alpha chain variable domain of TCR clone 371220 (TRAV2, TRAJ9)
CAVEDRSGGFKTIF

SEQ ID NO: 742440 - protein, 15 aa, Homo sapiens
  CDR3 for beta chain variable domain of TCR clone 371220 (TRBV7-3, TRBJ2-1)
CASSLGQGPLGEQFF

SEQ ID NO: 742441 - protein, 13 aa, Homo sapiens
  CDR3 for alpha chain variable domain of TCR clone 371221 (TRAV2, TRAJ31)
CAVEDPQQCQTHV

SEQ ID NO: 742442 - protein, 17 aa, Homo sapiens
  CDR3 for beta chain variable domain of TCR clone 371221 (TRBV20-1, TRBJ2-2)
CSARDRTSGRHTGELFL

SEQ ID NO: 742443 - protein, 14 aa, Homo sapiens
  CDR3 for alpha chain variable domain of TCR clone 371222 (TRAV12-2, TRAJ44)
CAVNPAGTASKLTF

SEQ ID NO: 742444 - protein, 15 aa, Homo sapiens
  CDR3 for beta chain variable domain of TCR clone 371222 (TRBV28, TRBJ1-5)
CASSRTGGYVQPQHF

SEQ ID NO: 742445 - protein, 14 aa, Homo sapiens
  CDR3 for alpha chain variable domain of TCR clone 371223 (TRAV1-2, TRAJ8)
CAVREDTGFQKLVF

SEQ ID NO: 742446 - protein, 12 aa, Homo sapiens
  CDR3 for beta chain variable domain of TCR clone 371223 (TRBV2, TRBJ2-1)
CAHGPPGNEQFF

SEQ ID NO: 742447 - protein, 10 aa, Homo sapiens
  CDR3 for alpha chain variable domain of TCR clone 371224 (TRAV1-2, TRAJ23)
CAGQGGKLIF

SEQ ID NO: 742448 - protein, 19 aa, Homo sapiens
  CDR3 for beta chain variable domain of TCR clone 371224 (TRBV7-2, TRBJ2-3)
CASSFLSRNWGGGTDTQYF

SEQ ID NO: 742449 - protein, 13 aa, Homo sapiens
  CDR3 for alpha chain variable domain of TCR clone 371225 (TRAV35, TRAJ42)
CWALWRKPRKYHF

SEQ ID NO: 742450 - protein, 15 aa, Homo sapiens
  CDR3 for beta chain variable domain of TCR clone 371225 (TRBV7-9, TRBJ2-1)
CASSLGWGRANEQFF

SEQ ID NO: 742451 - protein, 11 aa, Homo sapiens
  CDR3 for alpha chain variable domain of TCR clone 371226 (TRAV12-3, TRAJ49)
CAMSSGNQFYF

SEQ ID NO: 742452 - protein, 17 aa, Homo sapiens
  CDR3 for beta chain variable domain of TCR clone 371226 (TRBV5-7, TRBJ2-7)
CASSLWRVLAGSHEQYF

SEQ ID NO: 742453 - protein, 12 aa, Homo sapiens
  CDR3 for alpha chain variable domain of TCR clone 371227 (TRAV13-1, TRAJ21)
CAAKEGFNKFYF

SEQ ID NO: 742454 - protein, 20 aa, Homo sapiens
  CDR3 for beta chain variable domain of TCR clone 371227 (TRBV7-8, TRBJ2-2)
CASSHLFPGPTIYITGELFF

SEQ ID NO: 742455 - protein, 15 aa, Homo sapiens
  CDR3 for alpha chain variable domain of TCR clone 371228 (TRAV17, TRAJ28)
CATVDSGAGCYQLTF

SEQ ID NO: 742456 - protein, 13 aa, Homo sapiens
  CDR3 for beta chain variable domain of TCR clone 371228 (TRBV5-4, TRBJ2-5)
CASSRQEGETQYF

SEQ ID NO: 742457 - protein, 14 aa, Homo sapiens
  CDR3 for alpha chain variable domain of TCR clone 371229 (TRAV1-2, TRAJ8)
CAVREDTGFQKLIF

SEQ ID NO: 742458 - protein, 15 aa, Homo sapiens
  CDR3 for beta chain variable domain of TCR clone 371229 (TRBV28, TRBJ2-6)
CASSLAGSGANVLTF

SEQ ID NO: 742459 - protein, 14 aa, Homo sapiens
  CDR3 for alpha chain variable domain of TCR clone 371230 (TRAV29/DV5, TRAJ54)
CAARSRGGAQNLVF

SEQ ID NO: 742460 - protein, 13 aa, Homo sapiens
  CDR3 for beta chain variable domain of TCR clone 371230 (TRBV27, TRBJ1-1)
CASSLSIGAEAFF

SEQ ID NO: 742461 - protein, 13 aa, Homo sapiens
  CDR3 for alpha chain variable domain of TCR clone 371231 (TRAV12-3, TRAJ40)
CAMSDSGTYKYIF

SEQ ID NO: 742462 - protein, 15 aa, Homo sapiens
  CDR3 for beta chain variable domain of TCR clone 371231 (TRBV12-5, TRBJ2-2)
CASGRLGGNTGELFF

SEQ ID NO: 742463 - protein, 13 aa, Homo sapiens
  CDR3 for alpha chain variable domain of TCR clone 371232 (TRAV36/DV7, TRAJ54)
CAVLIQGAQKLVF

SEQ ID NO: 742464 - protein, 13 aa, Homo sapiens
  CDR3 for beta chain variable domain of TCR clone 371232 (TRBV29-1, TRBJ2-4)
RSVGEGTKNIQDF

SEQ ID NO: 742465 - protein, 11 aa, Homo sapiens
  CDR3 for alpha chain variable domain of TCR clone 371233 (TRAV12-3, TRAJ27)
CAMANAGKSTF

SEQ ID NO: 742466 - protein, 15 aa, Homo sapiens
  CDR3 for beta chain variable domain of TCR clone 371233 (TRBV4-1, TRBJ2-5)
CASSQWDLYKETQYF

SEQ ID NO: 742467 - protein, 15 aa, Homo sapiens
  CDR3 for alpha chain variable domain of TCR clone 371234 (TRAV4, TRAJ48)
CLVGDIDFGNEKLTF

SEQ ID NO: 742468 - protein, 10 aa, Homo sapiens
  CDR3 for beta chain variable domain of TCR clone 371234 (TRBV7-2, TRBJ2-3)
RASGISTQYF

SEQ ID NO: 742469 - protein, 13 aa, Homo sapiens
  CDR3 for alpha chain variable domain of TCR clone 371235 (TRAV27, TRAJ45)
CRSSGGGADGLTF

SEQ ID NO: 742470 - protein, 14 aa, Homo sapiens
  CDR3 for beta chain variable domain of TCR clone 371235 (TRBV7-2, TRBJ2-7)
CASSLPPGQGPQYF

SEQ ID NO: 742471 - protein, 18 aa, Homo sapiens
  CDR3 for alpha chain variable domain of TCR clone 371236 (TRAV12-3, TRAJ52)
CAMSRTNAGGTSYGKLTF

SEQ ID NO: 742472 - protein, 17 aa, Homo sapiens
  CDR3 for beta chain variable domain of TCR clone 371236 (TRBV7-8, TRBJ1-2)
CASSLRPLQGHLYGYTF

SEQ ID NO: 742473 - protein, 14 aa, Homo sapiens
  CDR3 for alpha chain variable domain of TCR clone 371237 (TRAV14/DV4, TRAJ15)
CAMRRDQAGTALIF

SEQ ID NO: 742474 - protein, 17 aa, Homo sapiens
  CDR3 for beta chain variable domain of TCR clone 371237 (TRBV11-2, TRBJ2-1)
CASSLYPPGVEYNEQFF

SEQ ID NO: 742475 - protein, 14 aa, Homo sapiens
  CDR3 for alpha chain variable domain of TCR clone 371238 (TRAV12-1, TRAJ12)
CVVTRMDSSYKLIF

SEQ ID NO: 742476 - protein, 15 aa, Homo sapiens
  CDR3 for beta chain variable domain of TCR clone 371238 (TRBV28, TRBJ2-1)
CASSIIAGGRSEQVF

SEQ ID NO: 742477 - protein, 11 aa, Homo sapiens
  CDR3 for alpha chain variable domain of TCR clone 371239 (TRAV12-1, TRAJ30)
CVGNGQDKIIF

SEQ ID NO: 742478 - protein, 12 aa, Homo sapiens
  CDR3 for beta chain variable domain of TCR clone 371239 (TRBV27, TRBJ2-2)
CASKLFTGEMFF

SEQ ID NO: 742479 - protein, 20 aa, Homo sapiens
  CDR3 for alpha chain variable domain of TCR clone 371240 (TRAV1-2, TRAJ40)
CLLPLCCEGLPYLRNLQYIF

SEQ ID NO: 742480 - protein, 14 aa, Homo sapiens
  CDR3 for beta chain variable domain of TCR clone 371240 (TRBV4-1, TRBJ2-3)
CASSQDSGTDTQYF

SEQ ID NO: 742481 - protein, 11 aa, Homo sapiens
  CDR3 for alpha chain variable domain of TCR clone 371241 (TRAV38-2/DV8, TRAJ26)
CAYMRGQNFVF

SEQ ID NO: 742482 - protein, 13 aa, Homo sapiens
  CDR3 for beta chain variable domain of TCR clone 371241 (TRBV20-1, TRBJ1-1)
CSAPLGGGTEAFF

SEQ ID NO: 742483 - protein, 12 aa, Homo sapiens
  CDR3 for alpha chain variable domain of TCR clone 371242 (TRAV30, TRAJ43)
CGTEERGNHMRF

SEQ ID NO: 742484 - protein, 13 aa, Homo sapiens
  CDR3 for beta chain variable domain of TCR clone 371242 (TRBV12-4, TRBJ1-2)
CASSSGSKDGYTF

SEQ ID NO: 742485 - protein, 13 aa, Homo sapiens
  CDR3 for alpha chain variable domain of TCR clone 371243 (TRAV3, TRAJ20)
CAVRDTPRYKLSF

SEQ ID NO: 742486 - protein, 13 aa, Homo sapiens
  CDR3 for beta chain variable domain of TCR clone 371243 (TRBV7-3, TRBJ1-1)
CASSQDWGAAAFF

SEQ ID NO: 742487 - protein, 15 aa, Homo sapiens
  CDR3 for alpha chain variable domain of TCR clone 371244 (TRAV12-1, TRAJ44)
CVADLPTGTASTLTF

SEQ ID NO: 742488 - protein, 13 aa, Homo sapiens
  CDR3 for beta chain variable domain of TCR clone 371244 (TRBV6-5, TRBJ2-5)
CASSPQGGETRYF

SEQ ID NO: 742489 - protein, 15 aa, Homo sapiens
  CDR3 for alpha chain variable domain of TCR clone 371245 (TRAV8-3, TRAJ41)
CAVGSNSNSGYALNF

SEQ ID NO: 742490 - protein, 17 aa, Homo sapiens
  CDR3 for beta chain variable domain of TCR clone 371245 (TRBV25-1, TRBJ2-1)
CASSAYGQWRGVYEQFF

SEQ ID NO: 742491 - protein, 16 aa, Homo sapiens
  CDR3 for alpha chain variable domain of TCR clone 371246 (TRAV26-2, TRAJ45)
CTTASPIGGGADGLTF

SEQ ID NO: 742492 - protein, 20 aa, Homo sapiens
  CDR3 for beta chain variable domain of TCR clone 371246 (TRBV28, TRBJ2-1)
CASTPIGRSPGLAVGNEQFF

SEQ ID NO: 742493 - protein, 14 aa, Homo sapiens
  CDR3 for alpha chain variable domain of TCR clone 371247 (TRAV8-4, TRAJ8)
CVVSEDTGFQKLVF

SEQ ID NO: 742494 - protein, 17 aa, Homo sapiens
  CDR3 for beta chain variable domain of TCR clone 371247 (TRBV11-2, TRBJ2-1)
CASSLYPPGVEYNEQFF

SEQ ID NO: 742495 - protein, 17 aa, Homo sapiens
  CDR3 for alpha chain variable domain of TCR clone 371248 (TRAV13-1, TRAJ52)
RAASSGAGGTSYGKLTF

SEQ ID NO: 742496 - protein, 15 aa, Homo sapiens
  CDR3 for beta chain variable domain of TCR clone 371248 (TRBV2, TRBJ2-1)
CASSELAGSYNEQFF

SEQ ID NO: 742497 - protein, 11 aa, Homo sapiens
  CDR3 for alpha chain variable domain of TCR clone 371249 (TRAV12-3, TRAJ49)
CAANTGNQFYF

SEQ ID NO: 742498 - protein, 15 aa, Homo sapiens
  CDR3 for beta chain variable domain of TCR clone 371249 (TRBV11-2, TRBJ2-1)
CASSLGSSGLNEQFF

SEQ ID NO: 742499 - protein, 16 aa, Homo sapiens
  CDR3 for alpha chain variable domain of TCR clone 371250 (TRAV8-4, TRAJ9)
CAVTFNTGGFKNYLWS

SEQ ID NO: 742500 - protein, 15 aa, Homo sapiens
  CDR3 for beta chain variable domain of TCR clone 371250 (TRBV7-9, TRBJ2-2)
CASSPETWAGGELFF

SEQ ID NO: 742501 - protein, 11 aa, Homo sapiens
  CDR3 for alpha chain variable domain of TCR clone 371251 (TRAV2, TRAJ13)
FASGGYQKVTF

SEQ ID NO: 742502 - protein, 15 aa, Homo sapiens
  CDR3 for beta chain variable domain of TCR clone 371251 (TRBV29-1, TRBJ2-1)
CSGRDRKSSYNEQFF

SEQ ID NO: 742503 - protein, 12 aa, Homo sapiens
  CDR3 for alpha chain variable domain of TCR clone 371252 (TRAV13-1, TRAJ21)
CAAKEGFNKFYF

SEQ ID NO: 742504 - protein, 15 aa, Homo sapiens
  CDR3 for beta chain variable domain of TCR clone 371252 (TRBV27, TRBJ2-5)
CASSLYPRGGETQYF

SEQ ID NO: 742505 - protein, 15 aa, Homo sapiens
  CDR3 for alpha chain variable domain of TCR clone 371253 (TRAV13-1, TRAJ52)
CAATSPRTSYGKLTF

SEQ ID NO: 742506 - protein, 15 aa, Homo sapiens
  CDR3 for beta chain variable domain of TCR clone 371253 (TRBV5-1, TRBJ2-1)
CASSPPRAPYNEQYF

SEQ ID NO: 742507 - protein, 16 aa, Homo sapiens
  CDR3 for alpha chain variable domain of TCR clone 371254 (TRAV3, TRAJ18)
CAVRDGRGSTLGRLYF

SEQ ID NO: 742508 - protein, 17 aa, Homo sapiens
  CDR3 for beta chain variable domain of TCR clone 371254 (TRBV28, TRBJ2-5)
CASSRQGGLAGAETQYF

SEQ ID NO: 742509 - protein, 13 aa, Homo sapiens
  CDR3 for alpha chain variable domain of TCR clone 371255 (TRAV20, TRAJ21)
CAVEGYNFNKFYF

SEQ ID NO: 742510 - protein, 14 aa, Homo sapiens
  CDR3 for beta chain variable domain of TCR clone 371255 (TRBV2, TRBJ2-5)
CASKRDGTTETQYF

SEQ ID NO: 742511 - protein, 13 aa, Homo sapiens
  CDR3 for alpha chain variable domain of TCR clone 371256 (TRAV13-1, TRAJ21)
CAASVYNFNKFYF

SEQ ID NO: 742512 - protein, 16 aa, Homo sapiens
  CDR3 for beta chain variable domain of TCR clone 371256 (TRBV20-1, TRBJ2-1)
CSARDLKQGMNNEQFF

SEQ ID NO: 742513 - protein, 16 aa, Homo sapiens
  CDR3 for alpha chain variable domain of TCR clone 371257 (TRAV3, TRAJ37)
CAVRGKGSGNTGKLIF

SEQ ID NO: 742514 - protein, 20 aa, Homo sapiens
  CDR3 for beta chain variable domain of TCR clone 371257 (TRBV7-8, TRBJ2-2)
SASSHLFPGPTIHITGELFF

SEQ ID NO: 742515 - protein, 13 aa, Homo sapiens
  CDR3 for alpha chain variable domain of TCR clone 371258 (TRAV23/DV6, TRAJ45)
CAARRGGADGLTI

SEQ ID NO: 742516 - protein, 14 aa, Homo sapiens
  CDR3 for beta chain variable domain of TCR clone 371258 (TRBV7-2, TRBJ2-3)
CASSLARGTDTQYF

SEQ ID NO: 742517 - protein, 15 aa, Homo sapiens
  CDR3 for alpha chain variable domain of TCR clone 371259 (TRAV2, TRAJ11)
CAVEDPNSGYSPLTF

SEQ ID NO: 742518 - protein, 15 aa, Homo sapiens
  CDR3 for beta chain variable domain of TCR clone 371259 (TRBV20-1, TRBJ2-7)
CSARDRVSGMDEQYF

SEQ ID NO: 742519 - protein, 16 aa, Homo sapiens
  CDR3 for alpha chain variable domain of TCR clone 371260 (TRAV16, TRAJ52)
CALSAAGGTSYGKLTF

SEQ ID NO: 742520 - protein, 12 aa, Homo sapiens
  CDR3 for beta chain variable domain of TCR clone 371260 (TRBV12-4, TRBJ1-3)
CASSFTGNTIYF

SEQ ID NO: 742521 - protein, 14 aa, Homo sapiens
  CDR3 for alpha chain variable domain of TCR clone 371261 (TRAV17, TRAJ16)
CATADFSDRQKLLF

SEQ ID NO: 742522 - protein, 15 aa, Homo sapiens
  CDR3 for beta chain variable domain of TCR clone 371261 (TRBV18, TRBJ2-1)
CASSPPSASYNEQFF

SEQ ID NO: 742523 - protein, 13 aa, Homo sapiens
  CDR3 for alpha chain variable domain of TCR clone 371262 (TRAV13-1, TRAJ5)
CAASDTGRRALTF

SEQ ID NO: 742524 - protein, 18 aa, Homo sapiens
  CDR3 for beta chain variable domain of TCR clone 371262 (TRBV28, TRBJ1-3)
CASSPPGTVTSSGNTIYF

SEQ ID NO: 742525 - protein, 13 aa, Homo sapiens
  CDR3 for alpha chain variable domain of TCR clone 371263 (TRAV26-1, TRAJ54)
CIVRVKGSQKLVF

SEQ ID NO: 742526 - protein, 15 aa, Homo sapiens
  CDR3 for beta chain variable domain of TCR clone 371263 (TRBV20-1, TRBJ2-1)
CSAQPGGGPYNEQFF

SEQ ID NO: 742527 - protein, 11 aa, Homo sapiens
  CDR3 for alpha chain variable domain of TCR clone 371264 (TRAV13-1, TRAJ39)
CASHAGNMLTF

SEQ ID NO: 742528 - protein, 16 aa, Homo sapiens
  CDR3 for beta chain variable domain of TCR clone 371264 (TRBV12-4, TRBJ1-4)
CASSFIGAGPSEKLFF

SEQ ID NO: 742529 - protein, 18 aa, Homo sapiens
  CDR3 for alpha chain variable domain of TCR clone 371265 (TRAV13-1, TRAJ52)
CAASKRSAGGTSYGKLTF

SEQ ID NO: 742530 - protein, 14 aa, Homo sapiens
  CDR3 for beta chain variable domain of TCR clone 371265 (TRBV12-4, TRBJ2-3)
CASSGQGSTDTQYF

SEQ ID NO: 742531 - protein, 14 aa, Homo sapiens
  CDR3 for alpha chain variable domain of TCR clone 371266 (TRAV12-2, TRAJ13)
CAVKKTGGYQKVTF

SEQ ID NO: 742532 - protein, 13 aa, Homo sapiens
  CDR3 for beta chain variable domain of TCR clone 371266 (TRBV4-2, TRBJ1-1)
CASSQGGNTEAFF

SEQ ID NO: 742533 - protein, 16 aa, Homo sapiens
  CDR3 for alpha chain variable domain of TCR clone 371267 (TRAV8-3, TRAJ13)
CAVGSYPSWGYQKVIF

SEQ ID NO: 742534 - protein, 15 aa, Homo sapiens
  CDR3 for beta chain variable domain of TCR clone 371267 (TRBV19, TRBJ1-5)
CASSIVWADNQPQHF

SEQ ID NO: 742535 - protein, 14 aa, Homo sapiens
  CDR3 for alpha chain variable domain of TCR clone 371268 (TRAV3, TRAJ33)
CAVRDMDSNYQLIW

SEQ ID NO: 742536 - protein, 17 aa, Homo sapiens
  CDR3 for beta chain variable domain of TCR clone 371268 (TRBV7-3, TRBJ1-2)
CASSFPQGNDGELWRHL

SEQ ID NO: 742537 - protein, 15 aa, Homo sapiens
  CDR3 for alpha chain variable domain of TCR clone 371269 (TRAV13-1, TRAJ11)
CAASNRNSGYSTLTF

SEQ ID NO: 742538 - protein, 11 aa, Homo sapiens
  CDR3 for beta chain variable domain of TCR clone 371269 (TRBV20-1, TRBJ2-7)
YSARLSYEQYF

SEQ ID NO: 742539 - protein, 16 aa, Homo sapiens
  CDR3 for alpha chain variable domain of TCR clone 371270 (TRAV3, TRAJ10)
CAVRDMRAGGGNKLTS

SEQ ID NO: 742540 - protein, 14 aa, Homo sapiens
  CDR3 for beta chain variable domain of TCR clone 371270 (TRBV25-1, TRBJ1-1)
CASTHLGGNTEAFF

SEQ ID NO: 742541 - protein, 14 aa, Homo sapiens
  CDR3 for alpha chain variable domain of TCR clone 371271 (TRAV12-2, TRAJ45)
CALPERGGADGLTF

SEQ ID NO: 742542 - protein, 15 aa, Homo sapiens
  CDR3 for beta chain variable domain of TCR clone 371271 (TRBV5-1, TRBJ2-1)
CASSPPRAPYNEQFF

SEQ ID NO: 742543 - protein, 15 aa, Homo sapiens
  CDR3 for alpha chain variable domain of TCR clone 371272 (TRAV2, TRAJ22)
CAVPSRGGSARQLTF

SEQ ID NO: 742544 - protein, 16 aa, Homo sapiens
  CDR3 for beta chain variable domain of TCR clone 371272 (TRBV9, TRBJ2-2)
CASSAMGKGNTGELFF

SEQ ID NO: 742545 - protein, 11 aa, Homo sapiens
  CDR3 for alpha chain variable domain of TCR clone 371273 (TRAV21, TRAJ27)
CAVRMQANQPL

SEQ ID NO: 742546 - protein, 16 aa, Homo sapiens
  CDR3 for beta chain variable domain of TCR clone 371273 (TRBV3-1, TRBJ2-7)
CASSRGATGVAYEQYF

SEQ ID NO: 742547 - protein, 15 aa, Homo sapiens
  CDR3 for alpha chain variable domain of TCR clone 371274 (TRAV8-3, TRAJ45)
CASSYSGGGADGLTF

SEQ ID NO: 742548 - protein, 17 aa, Homo sapiens
  CDR3 for beta chain variable domain of TCR clone 371274 (TRBV7-8, TRBJ1-2)
CASSLRPLHGHFYGYTF

SEQ ID NO: 742549 - protein, 15 aa, Homo sapiens
  CDR3 for alpha chain variable domain of TCR clone 371275 (TRAV8-4, TRAJ29)
CAVSEDFRGNTSLVF

SEQ ID NO: 742550 - protein, 12 aa, Homo sapiens
  CDR3 for beta chain variable domain of TCR clone 371275 (TRBV14, TRBJ2-7)
CASSSLKGEQYF

SEQ ID NO: 742551 - protein, 15 aa, Homo sapiens
  CDR3 for alpha chain variable domain of TCR clone 371276 (TRAV8-3, TRAJ11)
CAVGLLNSGYSTLTF

SEQ ID NO: 742552 - protein, 15 aa, Homo sapiens
  CDR3 for beta chain variable domain of TCR clone 371276 (TRBV20-1, TRBJ1-2)
CSARESLTLRYGDTF

SEQ ID NO: 742553 - protein, 17 aa, Homo sapiens
  CDR3 for alpha chain variable domain of TCR clone 371277 (TRAV3, TRAJ6)
CAVRDGPRAGGSYIPTF

SEQ ID NO: 742554 - protein, 12 aa, Homo sapiens
  CDR3 for beta chain variable domain of TCR clone 371277 (TRBV29-1, TRBJ2-6)
CSVISGANVLTF

SEQ ID NO: 742555 - protein, 14 aa, Homo sapiens
  CDR3 for alpha chain variable domain of TCR clone 371278 (TRAV2, TRAJ37)
CAVDFTSNTDKLIF

SEQ ID NO: 742556 - protein, 14 aa, Homo sapiens
  CDR3 for beta chain variable domain of TCR clone 371278 (TRBV5-1, TRBJ2-5)
CASSFGGSQETQYF

SEQ ID NO: 742557 - protein, 13 aa, Homo sapiens
  CDR3 for alpha chain variable domain of TCR clone 371279 (TRAV20, TRAJ21)
CAVEGYNFNKFYF

SEQ ID NO: 742558 - protein, 16 aa, Homo sapiens
  CDR3 for beta chain variable domain of TCR clone 371279 (TRBV7-2, TRBJ1-2)
CASSSNQDRRGHGYTF

SEQ ID NO: 742559 - protein, 14 aa, Homo sapiens
  CDR3 for alpha chain variable domain of TCR clone 371280 (TRAV13-2, TRAJ32)
CAESLGGATNKLIF

SEQ ID NO: 742560 - protein, 15 aa, Homo sapiens
  CDR3 for beta chain variable domain of TCR clone 371280 (TRBV20-1, TRBJ1-2)
CSARDSRGRNYGHTF

SEQ ID NO: 742561 - protein, 16 aa, Homo sapiens
  CDR3 for alpha chain variable domain of TCR clone 371281 (TRAV8-3, TRAJ45)
CAVGDGSGGGADGLTF

SEQ ID NO: 742562 - protein, 14 aa, Homo sapiens
  CDR3 for beta chain variable domain of TCR clone 371281 (TRBV4-2, TRBJ2-5)
CASSQDRGRETQYF

SEQ ID NO: 742563 - protein, 14 aa, Homo sapiens
  CDR3 for alpha chain variable domain of TCR clone 371282 (TRAV1-2, TRAJ8)
CAVREDTGFQKLLF

SEQ ID NO: 742564 - protein, 14 aa, Homo sapiens
  CDR3 for beta chain variable domain of TCR clone 371282 (TRBV29-1, TRBJ2-5)
CSVETSGSGETQYF

SEQ ID NO: 742565 - protein, 11 aa, Homo sapiens
  CDR3 for alpha chain variable domain of TCR clone 371283 (TRAV35, TRAJ30)
CAGPGDDKIIF

SEQ ID NO: 742566 - protein, 15 aa, Homo sapiens
  CDR3 for beta chain variable domain of TCR clone 371283 (TRBV6-6, TRBJ2-5)
CASSPGGGLEETQYF

SEQ ID NO: 742567 - protein, 13 aa, Homo sapiens
  CDR3 for alpha chain variable domain of TCR clone 371284 (TRAV21, TRAJ27)
FAARPGNAGKSTF

SEQ ID NO: 742568 - protein, 14 aa, Homo sapiens
  CDR3 for beta chain variable domain of TCR clone 371284 (TRBV20-1, TRBJ2-1)
CSAAGSGEYNEQFF

SEQ ID NO: 742569 - protein, 11 aa, Homo sapiens
  CDR3 for alpha chain variable domain of TCR clone 371285 (TRAV16, TRAJ33)
CALHSNYQLIW

SEQ ID NO: 742570 - protein, 15 aa, Homo sapiens
  CDR3 for beta chain variable domain of TCR clone 371285 (TRBV4-1, TRBJ2-7)
CARSQQGQGFDEQYF

SEQ ID NO: 742571 - protein, 14 aa, Homo sapiens
  CDR3 for alpha chain variable domain of TCR clone 371286 (TRAV29/DV5, TRAJ6)
CAARVSGGSYIPTF

SEQ ID NO: 742572 - protein, 20 aa, Homo sapiens
  CDR3 for beta chain variable domain of TCR clone 371286 (TRBV4-1, TRBJ2-2)
CASSQASPPGLASNTGELFF

SEQ ID NO: 742573 - protein, 14 aa, Homo sapiens
  CDR3 for alpha chain variable domain of TCR clone 371287 (TRAV2, TRAJ37)
CAVDVTSNTGKLIF

SEQ ID NO: 742574 - protein, 15 aa, Homo sapiens
  CDR3 for beta chain variable domain of TCR clone 371287 (TRBV20-1, TRBJ1-1)
CSASRGVAGNTEAFF

SEQ ID NO: 742575 - protein, 13 aa, Homo sapiens
  CDR3 for alpha chain variable domain of TCR clone 371288 (TRAV2, TRAJ40)
CAVVTSGTYKYIF

SEQ ID NO: 742576 - protein, 17 aa, Homo sapiens
  CDR3 for beta chain variable domain of TCR clone 371288 (TRBV5-7, TRBJ2-7)
CASSLWRVLAGSYEQYF

SEQ ID NO: 742577 - protein, 16 aa, Homo sapiens
  CDR3 for alpha chain variable domain of TCR clone 371289 (TRAV3, TRAJ37)
CAVRPHGSGHTGKLIF

SEQ ID NO: 742578 - protein, 14 aa, Homo sapiens
  CDR3 for beta chain variable domain of TCR clone 371289 (TRBV25-1, TRBJ1-1)
CASTHLGGNTEAFF

SEQ ID NO: 742579 - protein, 15 aa, Homo sapiens
  CDR3 for alpha chain variable domain of TCR clone 371290 (TRAV8-6, TRAJ23)
CAVRLIYNQGGKIIF

SEQ ID NO: 742580 - protein, 13 aa, Homo sapiens
  CDR3 for beta chain variable domain of TCR clone 371290 (TRBV11-2, TRBJ2-2)
CASSLQNTGELFF

SEQ ID NO: 742581 - protein, 16 aa, Homo sapiens
  CDR3 for alpha chain variable domain of TCR clone 371291 (TRAV30, TRAJ24)
CGTEIVDADSWGKFQF

SEQ ID NO: 742582 - protein, 15 aa, Homo sapiens
  CDR3 for beta chain variable domain of TCR clone 371291 (TRBV19, TRBJ1-3)
CASRGLRLSGNTIYF

SEQ ID NO: 742583 - protein, 12 aa, Homo sapiens
  CDR3 for alpha chain variable domain of TCR clone 371292 (TRAV2, TRAJ31)
CAVEDNNARLMF

SEQ ID NO: 742584 - protein, 20 aa, Homo sapiens
  CDR3 for beta chain variable domain of TCR clone 371292 (TRBV6-4, TRBJ2-7)
CASSDSSVSGQVPTSYEQYF

SEQ ID NO: 742585 - protein, 14 aa, Homo sapiens
  CDR3 for alpha chain variable domain of TCR clone 371293 (TRAV26-1, TRAJ39)
CIVRGSRAGSMLTF

SEQ ID NO: 742586 - protein, 15 aa, Homo sapiens
  CDR3 for beta chain variable domain of TCR clone 371293 (TRBV7-9, TRBJ1-5)
CASSQGHQPNQAQHF

SEQ ID NO: 742587 - protein, 15 aa, Homo sapiens
  CDR3 for alpha chain variable domain of TCR clone 371294 (TRAV26-1, TRAJ29)
CIVRVERSGDTPLVF

SEQ ID NO: 742588 - protein, 14 aa, Homo sapiens
  CDR3 for beta chain variable domain of TCR clone 371294 (TRBV18, TRBJ2-5)
CASSPGVSQETQYF

SEQ ID NO: 742589 - protein, 15 aa, Homo sapiens
  CDR3 for alpha chain variable domain of TCR clone 371295 (TRAV8-6, TRAJ9)
CAVSDRDTGGFKTIF

SEQ ID NO: 742590 - protein, 16 aa, Homo sapiens
  CDR3 for beta chain variable domain of TCR clone 371295 (TRBV19, TRBJ2-3)
CASIPEWDRGTDTQYF

SEQ ID NO: 742591 - protein, 17 aa, Homo sapiens
  CDR3 for alpha chain variable domain of TCR clone 371296 (TRAV3, TRAJ6)
CAVRDGPRAGGSYIPTF

SEQ ID NO: 742592 - protein, 16 aa, Homo sapiens
  CDR3 for beta chain variable domain of TCR clone 371296 (TRBV28, TRBJ2-2)
CASSLEGGSNTGELFF

SEQ ID NO: 742593 - protein, 12 aa, Homo sapiens
  CDR3 for alpha chain variable domain of TCR clone 371297 (TRAV17, TRAJ31)
CATEQGNARLMF

SEQ ID NO: 742594 - protein, 11 aa, Homo sapiens
  CDR3 for beta chain variable domain of TCR clone 371297 (TRBV6-1, TRBJ2-1)
CASISSNEQFF

SEQ ID NO: 742595 - protein, 16 aa, Homo sapiens
  CDR3 for alpha chain variable domain of TCR clone 371298 (TRAV21, TRAJ37)
CAVRTAGSSNSGKLLF

SEQ ID NO: 742596 - protein, 13 aa, Homo sapiens
  CDR3 for beta chain variable domain of TCR clone 371298 (TRBV7-9, TRBJ2-5)
CASLPSGRETQYF

SEQ ID NO: 742597 - protein, 13 aa, Homo sapiens
  CDR3 for alpha chain variable domain of TCR clone 371299 (TRAV29/DV5, TRAJ31)
CAASRNNNARPMF

SEQ ID NO: 742598 - protein, 16 aa, Homo sapiens
  CDR3 for beta chain variable domain of TCR clone 371299 (TRBV15, TRBJ1-2)
CATSRGPRTGGGGYTF

SEQ ID NO: 742599 - protein, 18 aa, Homo sapiens
  CDR3 for alpha chain variable domain of TCR clone 371300 (TRAV12-3, TRAJ52)
CAMSVGGAGGTSYGKLTF

SEQ ID NO: 742600 - protein, 16 aa, Homo sapiens
  CDR3 for beta chain variable domain of TCR clone 371300 (TRBV28, TRBJ1-5)
CASSFRGGYSNQPQHF

SEQ ID NO: 742601 - protein, 12 aa, Homo sapiens
  CDR3 for alpha chain variable domain of TCR clone 371301 (TRAV8-3, TRAJ26)
CAGDTYGQNFVF

SEQ ID NO: 742602 - protein, 11 aa, Homo sapiens
  CDR3 for beta chain variable domain of TCR clone 371301 (TRBV19, TRBJ1-1)
CASSIGSEAFF

SEQ ID NO: 742603 - protein, 14 aa, Homo sapiens
  CDR3 for alpha chain variable domain of TCR clone 371302 (TRAV1-2, TRAJ16)
CAVNRFSDCQKLLF

SEQ ID NO: 742604 - protein, 15 aa, Homo sapiens
  CDR3 for beta chain variable domain of TCR clone 371302 (TRBV9, TRBJ1-6)
CASSVAGTGDSHLHF

SEQ ID NO: 742605 - protein, 13 aa, Homo sapiens
  CDR3 for alpha chain variable domain of TCR clone 371303 (TRAV12-2, TRAJ50)
CAVIVTSYDKVIF

SEQ ID NO: 742606 - protein, 13 aa, Homo sapiens
  CDR3 for beta chain variable domain of TCR clone 371303 (TRBV20-1, TRBJ1-1)
CSARGGGNTEAFF

SEQ ID NO: 742607 - protein, 17 aa, Homo sapiens
  CDR3 for alpha chain variable domain of TCR clone 371304 (TRAV3, TRAJ42)
CDVRDRDYGGSQGNLIF

SEQ ID NO: 742608 - protein, 18 aa, Homo sapiens
  CDR3 for beta chain variable domain of TCR clone 371304 (TRBV20-1, TRBJ2-3)
CSASGLAGGPGTTDTQYF

SEQ ID NO: 742609 - protein, 14 aa, Homo sapiens
  CDR3 for alpha chain variable domain of TCR clone 371305 (TRAV1-2, TRAJ8)
CAVREDTGFQKLVF

SEQ ID NO: 742610 - protein, 14 aa, Homo sapiens
  CDR3 for beta chain variable domain of TCR clone 371305 (TRBV2, TRBJ1-5)
CASLGSRDNQPQHF

SEQ ID NO: 742611 - protein, 18 aa, Homo sapiens
  CDR3 for alpha chain variable domain of TCR clone 371306 (TRAV1-1, TRAJ42)
CAVSPSAFYGGSQGNLIF

SEQ ID NO: 742612 - protein, 16 aa, Homo sapiens
  CDR3 for beta chain variable domain of TCR clone 371306 (TRBV7-3, TRBJ2-5)
CASSLMGGASQETQYF

SEQ ID NO: 742613 - protein, 10 aa, Homo sapiens
  CDR3 for alpha chain variable domain of TCR clone 371307 (TRAV13-1, TRAJ52)
CAAKNPMLVV

SEQ ID NO: 742614 - protein, 18 aa, Homo sapiens
  CDR3 for beta chain variable domain of TCR clone 371307 (TRBV4-1, TRBJ1-4)
CASSPRTGGAWTNEKLFF

SEQ ID NO: 742615 - protein, 14 aa, Homo sapiens
  CDR3 for alpha chain variable domain of TCR clone 371308 (TRAV12-2, TRAJ44)
CAVNPAGTASKLPF

SEQ ID NO: 742616 - protein, 14 aa, Homo sapiens
  CDR3 for beta chain variable domain of TCR clone 371308 (TRBV7-2, TRBJ1-3)
CASSRLRSGNTIYF

SEQ ID NO: 742617 - protein, 14 aa, Homo sapiens
  CDR3 for alpha chain variable domain of TCR clone 371309 (TRAV12-1, TRAJ17)
CVVNYKAAANKLTF

SEQ ID NO: 742618 - protein, 17 aa, Homo sapiens
  CDR3 for beta chain variable domain of TCR clone 371309 (TRBV4-1, TRBJ1-4)
CASSQEGPRGVEEKLFF

SEQ ID NO: 742619 - protein, 14 aa, Homo sapiens
  CDR3 for alpha chain variable domain of TCR clone 371310 (TRAV13-2, TRAJ10)
CAETFTGGGNKLTF

SEQ ID NO: 742620 - protein, 16 aa, Homo sapiens
  CDR3 for beta chain variable domain of TCR clone 371310 (TRBV18, TRBJ2-7)
CASSPRSHGISYEQYF

SEQ ID NO: 742621 - protein, 15 aa, Homo sapiens
  CDR3 for alpha chain variable domain of TCR clone 371311 (TRAV12-1, TRAJ41)
CVVNSRTGSGYALNF

SEQ ID NO: 742622 - protein, 13 aa, Homo sapiens
  CDR3 for beta chain variable domain of TCR clone 371311 (TRBV11-1, TRBJ1-1)
CASSLARGSQAFF

SEQ ID NO: 742623 - protein, 18 aa, Homo sapiens
  CDR3 for alpha chain variable domain of TCR clone 371312 (TRAV21, TRAJ52)
CAVRPSPAGGTSYGKLTF

SEQ ID NO: 742624 - protein, 11 aa, Homo sapiens
  CDR3 for beta chain variable domain of TCR clone 371312 (TRBV20-1, TRBJ2-7)
CSARLSYEQYF

SEQ ID NO: 742625 - protein, 11 aa, Homo sapiens
  CDR3 for alpha chain variable domain of TCR clone 371313 (TRAV12-2, TRAJ49)
CAVNTGNQFYF

SEQ ID NO: 742626 - protein, 12 aa, Homo sapiens
  CDR3 for beta chain variable domain of TCR clone 371313 (TRBV2, TRBJ2-3)
CASSGRFDTKYF

SEQ ID NO: 742627 - protein, 15 aa, Homo sapiens
  CDR3 for alpha chain variable domain of TCR clone 371314 (TRAV21, TRAJ53)
CATLNSGGSNYKLTF

SEQ ID NO: 742628 - protein, 14 aa, Homo sapiens
  CDR3 for beta chain variable domain of TCR clone 371314 (TRBV19, TRBJ1-3)
CASSIHGFGNTIYF

SEQ ID NO: 742629 - protein, 14 aa, Homo sapiens
  CDR3 for alpha chain variable domain of TCR clone 371315 (TRAV1-2, TRAJ16)
CAVNRFSDGEKLLF

SEQ ID NO: 742630 - protein, 17 aa, Homo sapiens
  CDR3 for beta chain variable domain of TCR clone 371315 (TRBV13, TRBJ2-3)
CASSLSRVAGGRNTQYF

SEQ ID NO: 742631 - protein, 15 aa, Homo sapiens
  CDR3 for alpha chain variable domain of TCR clone 371316 (TRAV29/DV5, TRAJ44)
CAASAGTGTASKLPF

SEQ ID NO: 742632 - protein, 12 aa, Homo sapiens
  CDR3 for beta chain variable domain of TCR clone 371316 (TRBV11-2, TRBJ2-2)
CASSLGGGELFF

SEQ ID NO: 742633 - protein, 12 aa, Homo sapiens
  CDR3 for alpha chain variable domain of TCR clone 371317 (TRAV12-3, TRAJ20)
CAMVRGDYKLSF

SEQ ID NO: 742634 - protein, 13 aa, Homo sapiens
  CDR3 for beta chain variable domain of TCR clone 371317 (TRBV23-1, TRBJ1-4)
CASRGKFNAKLFF

SEQ ID NO: 742635 - protein, 16 aa, Homo sapiens
  CDR3 for alpha chain variable domain of TCR clone 371318 (TRAV3, TRAJ10)
CAVRDMRAGGGNRLTF

SEQ ID NO: 742636 - protein, 15 aa, Homo sapiens
  CDR3 for beta chain variable domain of TCR clone 371318 (TRBV20-1, TRBJ2-7)
CSASVPAAYFYEQYF

SEQ ID NO: 742637 - protein, 14 aa, Homo sapiens
  CDR3 for alpha chain variable domain of TCR clone 371319 (TRAV8-4, TRAJ17)
CAVSEGAAGNKLTF

SEQ ID NO: 742638 - protein, 13 aa, Homo sapiens
  CDR3 for beta chain variable domain of TCR clone 371319 (TRBV19, TRBJ2-1)
CASSRYRVNEQFF

SEQ ID NO: 742639 - protein, 14 aa, Homo sapiens
  CDR3 for alpha chain variable domain of TCR clone 371320 (TRAV8-6, TRAJ4)
CAVTVSGGYNKLIF

SEQ ID NO: 742640 - protein, 15 aa, Homo sapiens
  CDR3 for beta chain variable domain of TCR clone 371320 (TRBV3-1, TRBJ1-1)
CASSQGGSGPTEAFF

SEQ ID NO: 742641 - protein, 14 aa, Homo sapiens
  CDR3 for alpha chain variable domain of TCR clone 371321 (TRAV35, TRAJ13)
CAGSPSGGYQKVTF

SEQ ID NO: 742642 - protein, 13 aa, Homo sapiens
  CDR3 for beta chain variable domain of TCR clone 371321 (TRBV29-1, TRBJ1-1)
CSVGNSRNTEAFF

SEQ ID NO: 742643 - protein, 11 aa, Homo sapiens
  CDR3 for alpha chain variable domain of TCR clone 371322 (TRAV21, TRAJ34)
CAVTNTDKLIF

SEQ ID NO: 742644 - protein, 19 aa, Homo sapiens
  CDR3 for beta chain variable domain of TCR clone 371322 (TRBV20-1, TRBJ2-1)
CSARSPSGGPPTMSSSSSQ

SEQ ID NO: 742645 - protein, 12 aa, Homo sapiens
  CDR3 for alpha chain variable domain of TCR clone 371323 (TRAV1-2, TRAJ17)
CAVRAAGNKLTF

SEQ ID NO: 742646 - protein, 16 aa, Homo sapiens
  CDR3 for beta chain variable domain of TCR clone 371323 (TRBV20-1, TRBJ2-1)
CSAPGLAGAYSDEQFF

SEQ ID NO: 742647 - protein, 14 aa, Homo sapiens
  CDR3 for alpha chain variable domain of TCR clone 371324 (TRAV1-2, TRAJ17)
CAVRDMTAGNKLTF

SEQ ID NO: 742648 - protein, 13 aa, Homo sapiens
  CDR3 for beta chain variable domain of TCR clone 371324 (TRBV12-4, TRBJ1-2)
CASSSGLTVISTF

SEQ ID NO: 742649 - protein, 11 aa, Homo sapiens
  CDR3 for alpha chain variable domain of TCR clone 371325 (TRAV3, TRAJ32)
CAVREGIMVVL

SEQ ID NO: 742650 - protein, 13 aa, Homo sapiens
  CDR3 for beta chain variable domain of TCR clone 371325 (TRBV2, TRBJ1-1)
CAISEGGNTEAFF

SEQ ID NO: 742651 - protein, 11 aa, Homo sapiens
  CDR3 for alpha chain variable domain of TCR clone 371326 (TRAV21, TRAJ41)
CAVRSGYALNF

SEQ ID NO: 742652 - protein, 10 aa, Homo sapiens
  CDR3 for beta chain variable domain of TCR clone 371326 (TRBV7-9, TRBJ1-2)
CASSLKQNYS

SEQ ID NO: 742653 - protein, 13 aa, Homo sapiens
  CDR3 for alpha chain variable domain of TCR clone 371327 (TRAV2, TRAJ40)
CAVVTSGTYKYIF

SEQ ID NO: 742654 - protein, 15 aa, Homo sapiens
  CDR3 for beta chain variable domain of TCR clone 371327 (TRBV18, TRBJ2-1)
CASLPDRGRDNEQFF

SEQ ID NO: 742655 - protein, 13 aa, Homo sapiens
  CDR3 for alpha chain variable domain of TCR clone 371328 (TRAV16, TRAJ28)
CALTGAGSYQLTF

SEQ ID NO: 742656 - protein, 14 aa, Homo sapiens
  CDR3 for beta chain variable domain of TCR clone 371328 (TRBV7-6, TRBJ2-3)
CASSLGTVTDTQYF

SEQ ID NO: 742657 - protein, 13 aa, Homo sapiens
  CDR3 for alpha chain variable domain of TCR clone 371329 (TRAV36/DV7, TRAJ33)
CAVDMDSNYQLIW

SEQ ID NO: 742658 - protein, 15 aa, Homo sapiens
  CDR3 for beta chain variable domain of TCR clone 371329 (TRBV15, TRBJ2-3)
CHQTIRREAPDTQYF

SEQ ID NO: 742659 - protein, 13 aa, Homo sapiens
  CDR3 for alpha chain variable domain of TCR clone 371330 (TRAV3, TRAJ4)
CAVRDGCYNKLIF

SEQ ID NO: 742660 - protein, 12 aa, Homo sapiens
  CDR3 for beta chain variable domain of TCR clone 371330 (TRBV11-2, TRBJ2-2)
CASSLGGGELFF

SEQ ID NO: 742661 - protein, 18 aa, Homo sapiens
  CDR3 for alpha chain variable domain of TCR clone 371331 (TRAV1-2, TRAJ10)
CAVRALTPVTGGGNKLTF

SEQ ID NO: 742662 - protein, 15 aa, Homo sapiens
  CDR3 for beta chain variable domain of TCR clone 371331 (TRBV6-1, TRBJ2-1)
CASSEAAYSYNEQFF

SEQ ID NO: 742663 - protein, 15 aa, Homo sapiens
  CDR3 for alpha chain variable domain of TCR clone 371332 (TRAV9-2, TRAJ57)
CALRPNQGGSEKLVF

SEQ ID NO: 742664 - protein, 15 aa, Homo sapiens
  CDR3 for beta chain variable domain of TCR clone 371332 (TRBV20-1, TRBJ2-7)
CSARDRVSGMDEQYF

SEQ ID NO: 742665 - protein, 13 aa, Homo sapiens
  CDR3 for alpha chain variable domain of TCR clone 371333 (TRAV8-6, TRAJ21)
CAVSPSSFNKFYF

SEQ ID NO: 742666 - protein, 18 aa, Homo sapiens
  CDR3 for beta chain variable domain of TCR clone 371333 (TRBV11-2, TRBJ2-3)
CASSLGGASRGAPNTQYF

SEQ ID NO: 742667 - protein, 13 aa, Homo sapiens
  CDR3 for alpha chain variable domain of TCR clone 371334 (TRAV13-1, TRAJ39)
CSKYRNAGNMLTF

SEQ ID NO: 742668 - protein, 15 aa, Homo sapiens
  CDR3 for beta chain variable domain of TCR clone 371334 (TRBV11-2, TRBJ2-2)
CASSSDRVNAGELFF

SEQ ID NO: 742669 - protein, 12 aa, Homo sapiens
  CDR3 for alpha chain variable domain of TCR clone 371335 (TRAV27, TRAJ36)
ASTPTGANNLFF

SEQ ID NO: 742670 - protein, 13 aa, Homo sapiens
  CDR3 for beta chain variable domain of TCR clone 371335 (TRBV7-9, TRBJ2-3)
CASSPGSTDTQYF

SEQ ID NO: 742671 - protein, 15 aa, Homo sapiens
  CDR3 for alpha chain variable domain of TCR clone 371336 (TRAV17, TRAJ54)
CATEKLGQGAQKLVF

SEQ ID NO: 742672 - protein, 14 aa, Homo sapiens
  CDR3 for beta chain variable domain of TCR clone 371336 (TRBV4-1, TRBJ2-2)
CASSQAVNTGELFF

SEQ ID NO: 742673 - protein, 12 aa, Homo sapiens
  CDR3 for alpha chain variable domain of TCR clone 371337 (TRAV17, TRAJ12)
CATLRSSYKLIF

SEQ ID NO: 742674 - protein, 13 aa, Homo sapiens
  CDR3 for beta chain variable domain of TCR clone 371337 (TRBV27, TRBJ2-5)
CASSLSSLETQYF

SEQ ID NO: 742675 - protein, 17 aa, Homo sapiens
  CDR3 for alpha chain variable domain of TCR clone 371338 (TRAV3, TRAJ6)
CAVRDGPRAGGSYIPTL

SEQ ID NO: 742676 - protein, 17 aa, Homo sapiens
  CDR3 for beta chain variable domain of TCR clone 371338 (TRBV28, TRBJ2-5)
CASSTPEGDALQETQYF

SEQ ID NO: 742677 - protein, 15 aa, Homo sapiens
  CDR3 for alpha chain variable domain of TCR clone 371339 (TRAV12-3, TRAJ6)
CAMSATTGGSHIPTF

SEQ ID NO: 742678 - protein, 16 aa, Homo sapiens
  CDR3 for beta chain variable domain of TCR clone 371339 (TRBV20-1, TRBJ1-2)
CSASMGQGVANYGYIF

SEQ ID NO: 742679 - protein, 13 aa, Homo sapiens
  CDR3 for alpha chain variable domain of TCR clone 371340 (TRAV12-3, TRAJ13)
CAMSSGGYQKVTF

SEQ ID NO: 742680 - protein, 16 aa, Homo sapiens
  CDR3 for beta chain variable domain of TCR clone 371340 (TRBV6-1, TRBJ2-5)
CASSETLDRGAETQYF

SEQ ID NO: 742681 - protein, 18 aa, Homo sapiens
  CDR3 for alpha chain variable domain of TCR clone 371341 (TRAV21, TRAJ52)
CAVRPSPAGGTNYGKLTF

SEQ ID NO: 742682 - protein, 17 aa, Homo sapiens
  CDR3 for beta chain variable domain of TCR clone 371341 (TRBV13, TRBJ2-3)
CASSLSRVEGGRNTQYF

SEQ ID NO: 742683 - protein, 12 aa, Homo sapiens
  CDR3 for alpha chain variable domain of TCR clone 371342 (TRAV17, TRAJ49)
CATSNTGNQFYF

SEQ ID NO: 742684 - protein, 17 aa, Homo sapiens
  CDR3 for beta chain variable domain of TCR clone 371342 (TRBV19, TRBJ2-6)
CASSTGQVFSGANDLTF

SEQ ID NO: 742685 - protein, 14 aa, Homo sapiens
  CDR3 for alpha chain variable domain of TCR clone 371343 (TRAV12-2, TRAJ13)
CAVKKTGGYQKVTV

SEQ ID NO: 742686 - protein, 13 aa, Homo sapiens
  CDR3 for beta chain variable domain of TCR clone 371343 (TRBV4-1, TRBJ2-1)
CASSQAGGDEQFF

SEQ ID NO: 742687 - protein, 11 aa, Homo sapiens
  CDR3 for alpha chain variable domain of TCR clone 371344 (TRAV12-1, TRAJ43)
CVEYDNNDMGF

SEQ ID NO: 742688 - protein, 15 aa, Homo sapiens
  CDR3 for beta chain variable domain of TCR clone 371344 (TRBV18, TRBJ2-5)
CASSPRASEAETQYF

SEQ ID NO: 742689 - protein, 11 aa, Homo sapiens
  CDR3 for alpha chain variable domain of TCR clone 371345 (TRAV13-2, TRAJ23)
CAESPRGKLIF

SEQ ID NO: 742690 - protein, 11 aa, Homo sapiens
  CDR3 for beta chain variable domain of TCR clone 371345 (TRBV29-1, TRBJ2-5)
CSVASGETQYF

SEQ ID NO: 742691 - protein, 15 aa, Homo sapiens
  CDR3 for alpha chain variable domain of TCR clone 371346 (TRAV13-1, TRAJ57)
QVPPLSQGGSDKLVF

SEQ ID NO: 742692 - protein, 17 aa, Homo sapiens
  CDR3 for beta chain variable domain of TCR clone 371346 (TRBV7-3, TRBJ2-3)
CASSLMKRMRGADTQYF

SEQ ID NO: 742693 - protein, 14 aa, Homo sapiens
  CDR3 for alpha chain variable domain of TCR clone 371347 (TRAV13-1, TRAJ4)
CAASFSGGYNKLIF

SEQ ID NO: 742694 - protein, 12 aa, Homo sapiens
  CDR3 for beta chain variable domain of TCR clone 371347 (TRBV11-2, TRBJ2-1)
CASSPGNNEQFF

SEQ ID NO: 742695 - protein, 12 aa, Homo sapiens
  CDR3 for alpha chain variable domain of TCR clone 371348 (TRAV12-2, TRAJ30)
CAVRNRDDKIIF

SEQ ID NO: 742696 - protein, 14 aa, Homo sapiens
  CDR3 for beta chain variable domain of TCR clone 371348 (TRBV15, TRBJ2-3)
CATARDGGGDTQYF

SEQ ID NO: 742697 - protein, 12 aa, Homo sapiens
  CDR3 for alpha chain variable domain of TCR clone 371349 (TRAV1-1, TRAJ8)
CAGGTGFQKLVF

SEQ ID NO: 742698 - protein, 17 aa, Homo sapiens
  CDR3 for beta chain variable domain of TCR clone 371349 (TRBV7-8, TRBJ1-2)
CASSLRPLQGHLYGYTF

SEQ ID NO: 742699 - protein, 14 aa, Homo sapiens
  CDR3 for alpha chain variable domain of TCR clone 371350 (TRAV17, TRAJ34)
CATDSLEVTDKPIF

SEQ ID NO: 742700 - protein, 13 aa, Homo sapiens
  CDR3 for beta chain variable domain of TCR clone 371350 (TRBV11-2, TRBJ2-7)
CASSGTRPYEQYF

SEQ ID NO: 742701 - protein, 21 aa, Homo sapiens
  CDR3 for alpha chain variable domain of TCR clone 371351 (TRAV2, TRAJ10)
CCFLLCCGGSTVTGGGNKLTF

SEQ ID NO: 742702 - protein, 16 aa, Homo sapiens
  CDR3 for beta chain variable domain of TCR clone 371351 (TRBV18, TRBJ1-5)
CASSPSTGNSNQPQHF

SEQ ID NO: 742703 - protein, 15 aa, Homo sapiens
  CDR3 for alpha chain variable domain of TCR clone 371352 (TRAV25, TRAJ52)
CAGRPGGTSYGKLTF

SEQ ID NO: 742704 - protein, 17 aa, Homo sapiens
  CDR3 for beta chain variable domain of TCR clone 371352 (TRBV7-8, TRBJ2-6)
CASSAGIGGAGANVRTF

SEQ ID NO: 742705 - protein, 14 aa, Homo sapiens
  CDR3 for alpha chain variable domain of TCR clone 371353 (TRAV17, TRAJ22)
CATSPTGSARQLTF

SEQ ID NO: 742706 - protein, 15 aa, Homo sapiens
  CDR3 for beta chain variable domain of TCR clone 371353 (TRBV4-1, TRBJ2-5)
CASSQWDLYQETQYF

SEQ ID NO: 742707 - protein, 14 aa, Homo sapiens
  CDR3 for alpha chain variable domain of TCR clone 371354 (TRAV13-1, TRAJ20)
CAARPGSNDYKLSF

SEQ ID NO: 742708 - protein, 15 aa, Homo sapiens
  CDR3 for beta chain variable domain of TCR clone 371354 (TRBV4-1, TRBJ2-7)
CASSQQGQGFGEQYF

SEQ ID NO: 742709 - protein, 14 aa, Homo sapiens
  CDR3 for alpha chain variable domain of TCR clone 371355 (TRAV21, TRAJ15)
CAVSLNQAGTALIF

SEQ ID NO: 742710 - protein, 13 aa, Homo sapiens
  CDR3 for beta chain variable domain of TCR clone 371355 (TRBV7-2, TRBJ2-2)
CASSLAVTGELFF

SEQ ID NO: 742711 - protein, 14 aa, Homo sapiens
  CDR3 for alpha chain variable domain of TCR clone 371356 (TRAV14/DV4, TRAJ49)
CAFNRYLTGNQVYF

SEQ ID NO: 742712 - protein, 15 aa, Homo sapiens
  CDR3 for beta chain variable domain of TCR clone 371356 (TRBV5-1, TRBJ1-1)
CASSSTTGTNTEAFF

SEQ ID NO: 742713 - protein, 14 aa, Homo sapiens
  CDR3 for alpha chain variable domain of TCR clone 371357 (TRAV8-3, TRAJ9)
WAVVYNTGGFKTIF

SEQ ID NO: 742714 - protein, 14 aa, Homo sapiens
  CDR3 for beta chain variable domain of TCR clone 371357 (TRBV7-3, TRBJ2-2)
CASSSGGYTGELFF

SEQ ID NO: 742715 - protein, 14 aa, Homo sapiens
  CDR3 for alpha chain variable domain of TCR clone 371358 (TRAV17, TRAJ40)
CATALTSGTYKYIF

SEQ ID NO: 742716 - protein, 13 aa, Homo sapiens
  CDR3 for beta chain variable domain of TCR clone 371358 (TRBV27, TRBJ2-1)
CASSSGSYDEQFF

SEQ ID NO: 742717 - protein, 16 aa, Homo sapiens
  CDR3 for alpha chain variable domain of TCR clone 371359 (TRAV1-2, TRAJ40)
CAVRGSRTSGTYKYIF

SEQ ID NO: 742718 - protein, 14 aa, Homo sapiens
  CDR3 for beta chain variable domain of TCR clone 371359 (TRBV4-1, TRBJ2-3)
CASSQDSGTETQYF

SEQ ID NO: 742719 - protein, 12 aa, Homo sapiens
  CDR3 for alpha chain variable domain of TCR clone 371360 (TRAV1-1, TRAJ9)
CAVDTGGFTTIF

SEQ ID NO: 742720 - protein, 15 aa, Homo sapiens
  CDR3 for beta chain variable domain of TCR clone 371360 (TRBV10-1, TRBJ2-3)
CASSATSGGFDTQYF

SEQ ID NO: 742721 - protein, 13 aa, Homo sapiens
  CDR3 for alpha chain variable domain of TCR clone 371361 (TRAV27, TRAJ17)
CAGAATAGNKLTF

SEQ ID NO: 742722 - protein, 15 aa, Homo sapiens
  CDR3 for beta chain variable domain of TCR clone 371361 (TRBV4-1, TRBJ2-7)
CASSQNTGRLYEQYF

SEQ ID NO: 742723 - protein, 15 aa, Homo sapiens
  CDR3 for alpha chain variable domain of TCR clone 371362 (TRAV12-2, TRAJ53)
CAVNGGGGSNYKLTF

SEQ ID NO: 742724 - protein, 15 aa, Homo sapiens
  CDR3 for beta chain variable domain of TCR clone 371362 (TRBV28, TRBJ2-1)
RASSIIAGGRSEQFF

SEQ ID NO: 742725 - protein, 14 aa, Homo sapiens
  CDR3 for alpha chain variable domain of TCR clone 371363 (TRAV12-1, TRAJ23)
CVVMIYNQGVKLIF

SEQ ID NO: 742726 - protein, 23 aa, Homo sapiens
  CDR3 for beta chain variable domain of TCR clone 371363 (TRBV7-3, TRBJ1-6)
CASSLTSRDEASDPSSYNSPLHV

SEQ ID NO: 742727 - protein, 17 aa, Homo sapiens
  CDR3 for alpha chain variable domain of TCR clone 371364 (TRAV26-1, TRAJ53)
CIVRVDDSGGSNYKLTF

SEQ ID NO: 742728 - protein, 15 aa, Homo sapiens
  CDR3 for beta chain variable domain of TCR clone 371364 (TRBV2, TRBJ2-1)
CASSELAGSYNEQFF

SEQ ID NO: 742729 - protein, 12 aa, Homo sapiens
  CDR3 for alpha chain variable domain of TCR clone 371365 (TRAV2, TRAJ33)
CAVADSNYQLIW

SEQ ID NO: 742730 - protein, 14 aa, Homo sapiens
  CDR3 for beta chain variable domain of TCR clone 371365 (TRBV19, TRBJ1-4)
CASSINRGGEKLFF

SEQ ID NO: 742731 - protein, 14 aa, Homo sapiens
  CDR3 for alpha chain variable domain of TCR clone 371366 (TRAV12-2, TRAJ5)
CAVNRSTGRRALTF

SEQ ID NO: 742732 - protein, 13 aa, Homo sapiens
  CDR3 for beta chain variable domain of TCR clone 371366 (TRBV4-1, TRBJ2-1)
CASSQAGGDEQFF

SEQ ID NO: 742733 - protein, 12 aa, Homo sapiens
  CDR3 for alpha chain variable domain of TCR clone 371367 (TRAV13-1, TRAJ20)
CAASMVDYKLSF

SEQ ID NO: 742734 - protein, 15 aa, Homo sapiens
  CDR3 for beta chain variable domain of TCR clone 371367 (TRBV11-3, TRBJ2-3)
CASNGGLDSTDTQYF

SEQ ID NO: 742735 - protein, 14 aa, Homo sapiens
  CDR3 for alpha chain variable domain of TCR clone 371368 (TRAV12-2, TRAJ17)
CAVLFKAAGNKLTF

SEQ ID NO: 742736 - protein, 16 aa, Homo sapiens
  CDR3 for beta chain variable domain of TCR clone 371368 (TRBV10-3, TRBJ2-1)
CAIRGGGRGDYNEQFF

SEQ ID NO: 742737 - protein, 14 aa, Homo sapiens
  CDR3 for alpha chain variable domain of TCR clone 371369 (TRAV26-1, TRAJ49)
CIVRRTNTGNQFYF

SEQ ID NO: 742738 - protein, 13 aa, Homo sapiens
  CDR3 for beta chain variable domain of TCR clone 371369 (TRBV4-1, TRBJ2-7)
CASSQGQAYEQYF

SEQ ID NO: 742739 - protein, 14 aa, Homo sapiens
  CDR3 for alpha chain variable domain of TCR clone 371370 (TRAV16, TRAJ15)
CALSFNQAGTALIF

SEQ ID NO: 742740 - protein, 15 aa, Homo sapiens
  CDR3 for beta chain variable domain of TCR clone 371370 (TRBV28, TRBJ2-1)
CASSIIAGGRSEQFF

SEQ ID NO: 742741 - protein, 13 aa, Homo sapiens
  CDR3 for alpha chain variable domain of TCR clone 371371 (TRAV21, TRAJ45)
CAVMVGGADGLTF

SEQ ID NO: 742742 - protein, 14 aa, Homo sapiens
  CDR3 for beta chain variable domain of TCR clone 371371 (TRBV4-3, TRBJ1-4)
CASSPLQRNEKLFF

SEQ ID NO: 742743 - protein, 12 aa, Homo sapiens
  CDR3 for alpha chain variable domain of TCR clone 371372 (TRAV21, TRAJ58)
CAAETSGSRLTC

SEQ ID NO: 742744 - protein, 15 aa, Homo sapiens
  CDR3 for beta chain variable domain of TCR clone 371372 (TRBV20-1, TRBJ2-7)
CSARDPVKGEGEQYF

SEQ ID NO: 742745 - protein, 15 aa, Homo sapiens
  CDR3 for alpha chain variable domain of TCR clone 371373 (TRAV3, TRAJ22)
CAVRDRGGSARQLTF

SEQ ID NO: 742746 - protein, 15 aa, Homo sapiens
  CDR3 for beta chain variable domain of TCR clone 371373 (TRBV7-2, TRBJ2-1)
CASSLVAGRYNEQFF

SEQ ID NO: 742747 - protein, 15 aa, Homo sapiens
  CDR3 for alpha chain variable domain of TCR clone 371374 (TRAV16, TRAJ12)
CSKWPLRDSSYKLIF

SEQ ID NO: 742748 - protein, 15 aa, Homo sapiens
  CDR3 for beta chain variable domain of TCR clone 371374 (TRBV29-1, TRBJ2-1)
CSVGRHALFYNEQFF

SEQ ID NO: 742749 - protein, 12 aa, Homo sapiens
  CDR3 for alpha chain variable domain of TCR clone 371375 (TRAV13-2, TRAJ8)
CAPWLGFQKLVF

SEQ ID NO: 742750 - protein, 15 aa, Homo sapiens
  CDR3 for beta chain variable domain of TCR clone 371375 (TRBV12-4, TRBJ2-5)
CASSPPTGLQETQYF

SEQ ID NO: 742751 - protein, 13 aa, Homo sapiens
  CDR3 for alpha chain variable domain of TCR clone 371376 (TRAV12-3, TRAJ48)
CAMSLVGNEKLTF

SEQ ID NO: 742752 - protein, 11 aa, Homo sapiens
  CDR3 for beta chain variable domain of TCR clone 371376 (TRBV7-2, TRBJ2-7)
CARSSGLWQYF

SEQ ID NO: 742753 - protein, 14 aa, Homo sapiens
  CDR3 for alpha chain variable domain of TCR clone 371377 (TRAV3, TRAJ5)
CAVRFDTGRRALTF

SEQ ID NO: 742754 - protein, 14 aa, Homo sapiens
  CDR3 for beta chain variable domain of TCR clone 371377 (TRBV7-2, TRBJ2-3)
CASSFVMPTDTQYF

SEQ ID NO: 742755 - protein, 11 aa, Homo sapiens
  CDR3 for alpha chain variable domain of TCR clone 371378 (TRAV3, TRAJ21)
CAVGNFNKFYF

SEQ ID NO: 742756 - protein, 16 aa, Homo sapiens
  CDR3 for beta chain variable domain of TCR clone 371378 (TRBV4-2, TRBJ2-1)
CASSQGEGRTVNEQFF

SEQ ID NO: 742757 - protein, 16 aa, Homo sapiens
  CDR3 for alpha chain variable domain of TCR clone 371379 (TRAV3, TRAJ6)
CAVRDGMGSRKLHTYI

SEQ ID NO: 742758 - protein, 15 aa, Homo sapiens
  CDR3 for beta chain variable domain of TCR clone 371379 (TRBV5-1, TRBJ2-7)
CASSLGDFTTYEQYF

SEQ ID NO: 742759 - protein, 12 aa, Homo sapiens
  CDR3 for alpha chain variable domain of TCR clone 371380 (TRAV1-1, TRAJ39)
CAVPVVGNMLTF

SEQ ID NO: 742760 - protein, 15 aa, Homo sapiens
  CDR3 for beta chain variable domain of TCR clone 371380 (TRBV19, TRBJ1-6)
CASSTQGAEGSPLHS

SEQ ID NO: 742761 - protein, 12 aa, Homo sapiens
  CDR3 for alpha chain variable domain of TCR clone 371381 (TRAV2, TRAJ33)
CAFMDSNYQLIW

SEQ ID NO: 742762 - protein, 16 aa, Homo sapiens
  CDR3 for beta chain variable domain of TCR clone 371381 (TRBV2, TRBJ2-7)
CASSEPWTGPSYKQYF

SEQ ID NO: 742763 - protein, 12 aa, Homo sapiens
  CDR3 for alpha chain variable domain of TCR clone 371382 (TRAV2, TRAJ31)
CAVEDNNARLMF

SEQ ID NO: 742764 - protein, 16 aa, Homo sapiens
  CDR3 for beta chain variable domain of TCR clone 371382 (TRBV7-9, TRBJ2-1)
CASSDVAGGSYNEQFF

SEQ ID NO: 742765 - protein, 14 aa, Homo sapiens
  CDR3 for alpha chain variable domain of TCR clone 371383 (TRAV1-2, TRAJ8)
CAVREDTGFQKLVF

SEQ ID NO: 742766 - protein, 15 aa, Homo sapiens
  CDR3 for beta chain variable domain of TCR clone 371383 (TRBV20-1, TRBJ2-7)
CSARGGRDSLYEQYF

SEQ ID NO: 742767 - protein, 12 aa, Homo sapiens
  CDR3 for alpha chain variable domain of TCR clone 371384 (TRAV21, TRAJ33)
CAKMDSNYKLIW

SEQ ID NO: 742768 - protein, 14 aa, Homo sapiens
  CDR3 for beta chain variable domain of TCR clone 371384 (TRBV12-4, TRBJ2-3)
CASTIAGWGDTQYF

SEQ ID NO: 742769 - protein, 21 aa, Homo sapiens
  CDR3 for alpha chain variable domain of TCR clone 371385 (TRAV8-3, TRAJ10)
CAVGHTHGRRKQTHLWDRHSA

SEQ ID NO: 742770 - protein, 10 aa, Homo sapiens
  CDR3 for beta chain variable domain of TCR clone 371385 (TRBV20-1, TRBJ2-5)
CSARFENQYF

SEQ ID NO: 742771 - protein, 14 aa, Homo sapiens
  CDR3 for alpha chain variable domain of TCR clone 371386 (TRAV21, TRAJ35)
CAVMPIGFGNVLHC

SEQ ID NO: 742772 - protein, 13 aa, Homo sapiens
  CDR3 for beta chain variable domain of TCR clone 371386 (TRBV20-1, TRBJ1-1)
CSARGGGNTEAFF

SEQ ID NO: 742773 - protein, 15 aa, Homo sapiens
  CDR3 for alpha chain variable domain of TCR clone 371387 (TRAV8-6, TRAJ10)
CAVSDQAGGGNKLTF

SEQ ID NO: 742774 - protein, 18 aa, Homo sapiens
  CDR3 for beta chain variable domain of TCR clone 371387 (TRBV4-1, TRBJ2-3)
CASSHQLAGGRSTDTQYF

SEQ ID NO: 742775 - protein, 11 aa, Homo sapiens
  CDR3 for alpha chain variable domain of TCR clone 371388 (TRAV12-3, TRAJ16)
LTGGDGQKLLF

SEQ ID NO: 742776 - protein, 12 aa, Homo sapiens
  CDR3 for beta chain variable domain of TCR clone 371388 (TRBV19, TRBJ2-7)
CASTSVGSEQYF

SEQ ID NO: 742777 - protein, 14 aa, Homo sapiens
  CDR3 for alpha chain variable domain of TCR clone 371389 (TRAV3, TRAJ21)
CAVRDKYNFNKFYF

SEQ ID NO: 742778 - protein, 16 aa, Homo sapiens
  CDR3 for beta chain variable domain of TCR clone 371389 (TRBV7-3, TRBJ2-2)
CASSLKRGTLSGELFF

SEQ ID NO: 742779 - protein, 14 aa, Homo sapiens
  CDR3 for alpha chain variable domain of TCR clone 371390 (TRAV2, TRAJ37)
CAVDFTSYTGKLIF

SEQ ID NO: 742780 - protein, 15 aa, Homo sapiens
  CDR3 for beta chain variable domain of TCR clone 371390 (TRBV20-1, TRBJ1-1)
CSASRGVTGNTEAFL

SEQ ID NO: 742781 - protein, 15 aa, Homo sapiens
  CDR3 for alpha chain variable domain of TCR clone 371391 (TRAV3, TRAJ24)
CAVRDKMTAVGNCSL

SEQ ID NO: 742782 - protein, 14 aa, Homo sapiens
  CDR3 for beta chain variable domain of TCR clone 371391 (TRBV7-2, TRBJ2-3)
RASSQTGSSYTQYF

SEQ ID NO: 742783 - protein, 13 aa, Homo sapiens
  CDR3 for alpha chain variable domain of TCR clone 371392 (TRAV13-1, TRAJ11)
CAAVLAGYSTLTF

SEQ ID NO: 742784 - protein, 13 aa, Homo sapiens
  CDR3 for beta chain variable domain of TCR clone 371392 (TRBV7-9, TRBJ2-3)
CASSPGSTDTQYF

SEQ ID NO: 742785 - protein, 14 aa, Homo sapiens
  CDR3 for alpha chain variable domain of TCR clone 371393 (TRAV13-1, TRAJ35)
CAASKGGFGNVLHC

SEQ ID NO: 742786 - protein, 14 aa, Homo sapiens
  CDR3 for beta chain variable domain of TCR clone 371393 (TRBV7-3, TRBJ1-1)
CASSLKGGNTEAFL

SEQ ID NO: 742787 - protein, 15 aa, Homo sapiens
  CDR3 for alpha chain variable domain of TCR clone 371394 (TRAV21, TRAJ32)
CAVNSYGGATNELIF

SEQ ID NO: 742788 - protein, 18 aa, Homo sapiens
  CDR3 for beta chain variable domain of TCR clone 371394 (TRBV7-9, TRBJ2-1)
CASSTGLAEGSSYNEQFF

SEQ ID NO: 742789 - protein, 12 aa, Homo sapiens
  CDR3 for alpha chain variable domain of TCR clone 371395 (TRAV26-2, TRAJ21)
CIPKGNFNKFYF

SEQ ID NO: 742790 - protein, 14 aa, Homo sapiens
  CDR3 for beta chain variable domain of TCR clone 371395 (TRBV12-4, TRBJ1-1)
CASSLGTGGTVAFF

SEQ ID NO: 742791 - protein, 12 aa, Homo sapiens
  CDR3 for alpha chain variable domain of TCR clone 371396 (TRAV13-1, TRAJ21)
CAAKEGFNKFYF

SEQ ID NO: 742792 - protein, 15 aa, Homo sapiens
  CDR3 for beta chain variable domain of TCR clone 371396 (TRBV2, TRBJ2-1)
CASSEIAGSYNEQFF

SEQ ID NO: 742793 - protein, 12 aa, Homo sapiens
  CDR3 for alpha chain variable domain of TCR clone 371397 (TRAV1-1, TRAJ24)
CAATDSWGKLQF

SEQ ID NO: 742794 - protein, 20 aa, Homo sapiens
  CDR3 for beta chain variable domain of TCR clone 371397 (TRBV7-8, TRBJ2-2)
CASSHLFPGPTIHITGELFF

SEQ ID NO: 742795 - protein, 16 aa, Homo sapiens
  CDR3 for alpha chain variable domain of TCR clone 371398 (TRAV30, TRAJ26)
CGTESVGDNYGENFVF

SEQ ID NO: 742796 - protein, 13 aa, Homo sapiens
  CDR3 for beta chain variable domain of TCR clone 371398 (TRBV19, TRBJ1-2)
CASSISEDYGYTF

SEQ ID NO: 742797 - protein, 12 aa, Homo sapiens
  CDR3 for alpha chain variable domain of TCR clone 371399 (TRAV38-2/DV8, TRAJ47)
CGLMEYGNKLVF

SEQ ID NO: 742798 - protein, 14 aa, Homo sapiens
  CDR3 for beta chain variable domain of TCR clone 371399 (TRBV20-1, TRBJ1-5)
CSATDRGSNQPQHF

SEQ ID NO: 742799 - protein, 11 aa, Homo sapiens
  CDR3 for alpha chain variable domain of TCR clone 371400 (TRAV1-2, TRAJ31)
CAVNNSARLMF

SEQ ID NO: 742800 - protein, 12 aa, Homo sapiens
  CDR3 for beta chain variable domain of TCR clone 371400 (TRBV7-9, TRBJ1-4)
CASSTDREKLFF

SEQ ID NO: 742801 - protein, 13 aa, Homo sapiens
  CDR3 for alpha chain variable domain of TCR clone 371401 (TRAV2, TRAJ15)
CAVASQAGTSLIF

SEQ ID NO: 742802 - protein, 17 aa, Homo sapiens
  CDR3 for beta chain variable domain of TCR clone 371401 (TRBV20-1, TRBJ2-2)
CSASGSGQGGLTGELFF

SEQ ID NO: 742803 - protein, 15 aa, Homo sapiens
  CDR3 for alpha chain variable domain of TCR clone 371402 (TRAV13-1, TRAJ44)
CAASLGAGTASRLTF

SEQ ID NO: 742804 - protein, 12 aa, Homo sapiens
  CDR3 for beta chain variable domain of TCR clone 371402 (TRBV11-2, TRBJ2-2)
CASSLPTGELFF

SEQ ID NO: 742805 - protein, 14 aa, Homo sapiens
  CDR3 for alpha chain variable domain of TCR clone 371403 (TRAV1-2, TRAJ16)
RAVNRFSDGQKLLF

SEQ ID NO: 742806 - protein, 15 aa, Homo sapiens
  CDR3 for beta chain variable domain of TCR clone 371403 (TRBV7-9, TRBJ1-6)
CASSSPGRGNSPLHS

SEQ ID NO: 742807 - protein, 10 aa, Homo sapiens
  CDR3 for alpha chain variable domain of TCR clone 371404 (TRAV23/DV6, TRAJ3)
CAATTFALGG

SEQ ID NO: 742808 - protein, 17 aa, Homo sapiens
  CDR3 for beta chain variable domain of TCR clone 371404 (TRBV19, TRBJ1-6)
CASSTQGAVGSPLHLGN

SEQ ID NO: 742809 - protein, 15 aa, Homo sapiens
  CDR3 for alpha chain variable domain of TCR clone 371405 (TRAV27, TRAJ38)
CAGRFNAGNNRKRTW

SEQ ID NO: 742810 - protein, 13 aa, Homo sapiens
  CDR3 for beta chain variable domain of TCR clone 371405 (TRBV12-5, TRBJ2-3)
CASQNRGTDTQYF

SEQ ID NO: 742811 - protein, 13 aa, Homo sapiens
  CDR3 for alpha chain variable domain of TCR clone 371406 (TRAV20, TRAJ48)
CAVQGVGNEKLTF

SEQ ID NO: 742812 - protein, 19 aa, Homo sapiens
  CDR3 for beta chain variable domain of TCR clone 371406 (TRBV2, TRBJ2-2)
LASSQPGRAGGGKTGELFF

SEQ ID NO: 742813 - protein, 11 aa, Homo sapiens
  CDR3 for alpha chain variable domain of TCR clone 371407 (TRAV12-3, TRAJ49)
CAANTGNQFYF

SEQ ID NO: 742814 - protein, 12 aa, Homo sapiens
  CDR3 for beta chain variable domain of TCR clone 371407 (TRBV6-3, TRBJ2-7)
CASSEPGFEQDF

SEQ ID NO: 742815 - protein, 15 aa, Homo sapiens
  CDR3 for alpha chain variable domain of TCR clone 371408 (TRAV12-3, TRAJ47)
CAMTKVLEYGNKLVF

SEQ ID NO: 742816 - protein, 15 aa, Homo sapiens
  CDR3 for beta chain variable domain of TCR clone 371408 (TRBV5-4, TRBJ2-3)
CASTGGGRAIDAQYF

SEQ ID NO: 742817 - protein, 13 aa, Homo sapiens
  CDR3 for alpha chain variable domain of TCR clone 371409 (TRAV3, TRAJ21)
CAVREPDFNKFYL

SEQ ID NO: 742818 - protein, 17 aa, Homo sapiens
  CDR3 for beta chain variable domain of TCR clone 371409 (TRBV7-8, TRBJ2-6)
CASSAGTGGAGANVLTF

SEQ ID NO: 742819 - protein, 13 aa, Homo sapiens
  CDR3 for alpha chain variable domain of TCR clone 371410 (TRAV17, TRAJ40)
CAGALGGTYKDIF

SEQ ID NO: 742820 - protein, 16 aa, Homo sapiens
  CDR3 for beta chain variable domain of TCR clone 371410 (TRBV7-2, TRBJ1-4)
CASSLAPGRRDEKLFF

SEQ ID NO: 742821 - protein, 11 aa, Homo sapiens
  CDR3 for alpha chain variable domain of TCR clone 371411 (TRAV2, TRAJ13)
CASGGYQKVTF

SEQ ID NO: 742822 - protein, 16 aa, Homo sapiens
  CDR3 for beta chain variable domain of TCR clone 371411 (TRBV6-1, TRBJ2-5)
CASSETLDRGAETQYL

SEQ ID NO: 742823 - protein, 14 aa, Homo sapiens
  CDR3 for alpha chain variable domain of TCR clone 371412 (TRAV17, TRAJ57)
CATDASGGSEKLVF

SEQ ID NO: 742824 - protein, 14 aa, Homo sapiens
  CDR3 for beta chain variable domain of TCR clone 371412 (TRBV4-2, TRBJ2-1)
CASGLDRAYNEQCF

SEQ ID NO: 742825 - protein, 14 aa, Homo sapiens
  CDR3 for alpha chain variable domain of TCR clone 371413 (TRAV8-4, TRAJ37)
CAGSEPSNTGKLIF

SEQ ID NO: 742826 - protein, 14 aa, Homo sapiens
  CDR3 for beta chain variable domain of TCR clone 371413 (TRBV28, TRBJ2-1)
CAIHRTGARTEQFF

SEQ ID NO: 742827 - protein, 17 aa, Homo sapiens
  CDR3 for alpha chain variable domain of TCR clone 371414 (TRAV3, TRAJ42)
CAVRDRDYGGRQGNLIF

SEQ ID NO: 742828 - protein, 16 aa, Homo sapiens
  CDR3 for beta chain variable domain of TCR clone 371414 (TRBV9, TRBJ2-2)
CASSAMGKGNTGELFF

SEQ ID NO: 742829 - protein, 13 aa, Homo sapiens
  CDR3 for alpha chain variable domain of TCR clone 371415 (TRAV1-1, TRAJ38)
CASNAGNNRKLIL

SEQ ID NO: 742830 - protein, 14 aa, Homo sapiens
  CDR3 for beta chain variable domain of TCR clone 371415 (TRBV15, TRBJ2-1)
CATSGVEDYNEQFF

SEQ ID NO: 742831 - protein, 12 aa, Homo sapiens
  CDR3 for alpha chain variable domain of TCR clone 371416 (TRAV1-1, TRAJ30)
CAVRGRDDKIIF

SEQ ID NO: 742832 - protein, 13 aa, Homo sapiens
  CDR3 for beta chain variable domain of TCR clone 371416 (TRBV11-3, TRBJ2-7)
CASSLGKLYEQYF

SEQ ID NO: 742833 - protein, 15 aa, Homo sapiens
  CDR3 for alpha chain variable domain of TCR clone 371417 (TRAV20, TRAJ53)
CAVQASGGSNYKLTF

SEQ ID NO: 742834 - protein, 12 aa, Homo sapiens
  CDR3 for beta chain variable domain of TCR clone 371417 (TRBV7-6, TRBJ2-5)
CASSLSQATQYF

SEQ ID NO: 742835 - protein, 18 aa, Homo sapiens
  CDR3 for alpha chain variable domain of TCR clone 371418 (TRAV17, TRAJ45)
CATFLDLYSGGGADGLTF

SEQ ID NO: 742836 - protein, 14 aa, Homo sapiens
  CDR3 for beta chain variable domain of TCR clone 371418 (TRBV7-3, TRBJ1-1)
CASSLGTGYTEAFF

SEQ ID NO: 742837 - protein, 15 aa, Homo sapiens
  CDR3 for alpha chain variable domain of TCR clone 371419 (TRAV26-2, TRAJ13)
CILRDLSGGHQKVTF

SEQ ID NO: 742838 - protein, 11 aa, Homo sapiens
  CDR3 for beta chain variable domain of TCR clone 371419 (TRBV7-9, TRBJ2-5)
CASSLSATQYF

SEQ ID NO: 742839 - protein, 15 aa, Homo sapiens
  CDR3 for alpha chain variable domain of TCR clone 371420 (TRAV8-4, TRAJ37)
CAVSRGSGNTGKLIF

SEQ ID NO: 742840 - protein, 16 aa, Homo sapiens
  CDR3 for beta chain variable domain of TCR clone 371420 (TRBV7-3, TRBJ2-3)
CASSLSGYRPEETQYF

SEQ ID NO: 742841 - protein, 17 aa, Homo sapiens
  CDR3 for alpha chain variable domain of TCR clone 371421 (TRAV14/DV4, TRAJ28)
CAMREAYSGAGSYQLTF

SEQ ID NO: 742842 - protein, 16 aa, Homo sapiens
  CDR3 for beta chain variable domain of TCR clone 371421 (TRBV20-1, TRBJ1-2)
CSASMGQGVANYGYTF

SEQ ID NO: 742843 - protein, 13 aa, Homo sapiens
  CDR3 for alpha chain variable domain of TCR clone 371422 (TRAV26-2, TRAJ43)
CILRAVNNNDMRF

SEQ ID NO: 742844 - protein, 13 aa, Homo sapiens
  CDR3 for beta chain variable domain of TCR clone 371422 (TRBV20-1, TRBJ1-1)
CSARGGGNTEAFF

SEQ ID NO: 742845 - protein, 16 aa, Homo sapiens
  CDR3 for alpha chain variable domain of TCR clone 371423 (TRAV13-1, TRAJ17)
CAASKGAKAAGNKLTF

SEQ ID NO: 742846 - protein, 15 aa, Homo sapiens
  CDR3 for beta chain variable domain of TCR clone 371423 (TRBV20-1, TRBJ1-5)
CSAREGGYSNQPQHF

SEQ ID NO: 742847 - protein, 15 aa, Homo sapiens
  CDR3 for alpha chain variable domain of TCR clone 371424 (TRAV12-3, TRAJ6)
CAMSAASGGSYIPTF

SEQ ID NO: 742848 - protein, 13 aa, Homo sapiens
  CDR3 for beta chain variable domain of TCR clone 371424 (TRBV20-1, TRBJ1-2)
CSASPEFNYGYTF

SEQ ID NO: 742849 - protein, 12 aa, Homo sapiens
  CDR3 for alpha chain variable domain of TCR clone 371425 (TRAV12-2, TRAJ8)
CAVATGFQKLVF

SEQ ID NO: 742850 - protein, 14 aa, Homo sapiens
  CDR3 for beta chain variable domain of TCR clone 371425 (TRBV28, TRBJ1-2)
CASRIQGANYGYTF

SEQ ID NO: 742851 - protein, 14 aa, Homo sapiens
  CDR3 for alpha chain variable domain of TCR clone 371426 (TRAV1-2, TRAJ8)
CAVREDTGFQKLVF

SEQ ID NO: 742852 - protein, 16 aa, Homo sapiens
  CDR3 for beta chain variable domain of TCR clone 371426 (TRBV20-1, TRBJ1-4)
CSAPGQGLLTNEKLVF

SEQ ID NO: 742853 - protein, 14 aa, Homo sapiens
  CDR3 for alpha chain variable domain of TCR clone 371427 (TRAV38-1, TRAJ40)
CALRPTSGTYKYIF

SEQ ID NO: 742854 - protein, 18 aa, Homo sapiens
  CDR3 for beta chain variable domain of TCR clone 371427 (TRBV20-1, TRBJ2-6)
CSAETTPTHGSGANVLTF

SEQ ID NO: 742855 - protein, 12 aa, Homo sapiens
  CDR3 for alpha chain variable domain of TCR clone 371428 (TRAV8-3, TRAJ6)
CTVAGGSYIPTF

SEQ ID NO: 742856 - protein, 14 aa, Homo sapiens
  CDR3 for beta chain variable domain of TCR clone 371428 (TRBV27, TRBJ2-7)
CASATGTERREQYF

SEQ ID NO: 742857 - protein, 14 aa, Homo sapiens
  CDR3 for alpha chain variable domain of TCR clone 371429 (TRAV38-1, TRAJ45)
CASHSGGGADGLTF

SEQ ID NO: 742858 - protein, 16 aa, Homo sapiens
  CDR3 for beta chain variable domain of TCR clone 371429 (TRBV12-4, TRBJ2-5)
CASSFFVRGRQETQYF

SEQ ID NO: 742859 - protein, 12 aa, Homo sapiens
  CDR3 for alpha chain variable domain of TCR clone 371430 (TRAV12-3, TRAJ17)
CAMTLTGNKLTY

SEQ ID NO: 742860 - protein, 15 aa, Homo sapiens
  CDR3 for beta chain variable domain of TCR clone 371430 (TRBV7-9, TRBJ1-5)
CASSQGHQPNQPQHF

SEQ ID NO: 742861 - protein, 14 aa, Homo sapiens
  CDR3 for alpha chain variable domain of TCR clone 371431 (TRAV12-2, TRAJ45)
CAVNIGGGADGLTF

SEQ ID NO: 742862 - protein, 13 aa, Homo sapiens
  CDR3 for beta chain variable domain of TCR clone 371431 (TRBV12-5, TRBJ2-3)
CASGDRQSDTQYF

SEQ ID NO: 742863 - protein, 14 aa, Homo sapiens
  CDR3 for alpha chain variable domain of TCR clone 371432 (TRAV38-1, TRAJ40)
CALRPTSGTYKYIF

SEQ ID NO: 742864 - protein, 17 aa, Homo sapiens
  CDR3 for beta chain variable domain of TCR clone 371432 (TRBV7-2, TRBJ2-7)
CASSPFGSSGPSPEQYF

SEQ ID NO: 742865 - protein, 12 aa, Homo sapiens
  CDR3 for alpha chain variable domain of TCR clone 371433 (TRAV13-1, TRAJ5)
CAAKAGRRAITF

SEQ ID NO: 742866 - protein, 13 aa, Homo sapiens
  CDR3 for beta chain variable domain of TCR clone 371433 (TRBV7-9, TRBJ1-2)
CASSLKQNCGYTF

SEQ ID NO: 742867 - protein, 13 aa, Homo sapiens
  CDR3 for alpha chain variable domain of TCR clone 371434 (TRAV1-1, TRAJ9)
CATKNTGGFKTIF

SEQ ID NO: 742868 - protein, 15 aa, Homo sapiens
  CDR3 for beta chain variable domain of TCR clone 371434 (TRBV20-1, TRBJ2-7)
CSARDRVSGMDEQYF

SEQ ID NO: 742869 - protein, 13 aa, Homo sapiens
  CDR3 for alpha chain variable domain of TCR clone 371435 (TRAV1-2, TRAJ9)
CAALNTGGFKTIF

SEQ ID NO: 742870 - protein, 12 aa, Homo sapiens
  CDR3 for beta chain variable domain of TCR clone 371435 (TRBV14, TRBJ2-7)
CASSLYKDEQYF

SEQ ID NO: 742871 - protein, 14 aa, Homo sapiens
  CDR3 for alpha chain variable domain of TCR clone 371436 (TRAV12-2, TRAJ45)
CAVYSGGGADGLTF

SEQ ID NO: 742872 - protein, 14 aa, Homo sapiens
  CDR3 for beta chain variable domain of TCR clone 371436 (TRBV3-1, TRBJ2-1)
CASSQAVYLGEQFF

SEQ ID NO: 742873 - protein, 10 aa, Homo sapiens
  CDR3 for alpha chain variable domain of TCR clone 371437 (TRAV12-1, TRAJ31)
CVVNYARLMF

SEQ ID NO: 742874 - protein, 13 aa, Homo sapiens
  CDR3 for beta chain variable domain of TCR clone 371437 (TRBV20-1, TRBJ1-1)
CSARGGGNTEAFF

SEQ ID NO: 742875 - protein, 12 aa, Homo sapiens
  CDR3 for alpha chain variable domain of TCR clone 371438 (TRAV12-3, TRAJ17)
CAMTLTGNKLTF

SEQ ID NO: 742876 - protein, 13 aa, Homo sapiens
  CDR3 for beta chain variable domain of TCR clone 371438 (TRBV10-3, TRBJ2-7)
CASKLAVNFEQYF

SEQ ID NO: 742877 - protein, 15 aa, Homo sapiens
  CDR3 for alpha chain variable domain of TCR clone 371439 (TRAV3, TRAJ5)
CAVRDLDTGRRALTF

SEQ ID NO: 742878 - protein, 12 aa, Homo sapiens
  CDR3 for beta chain variable domain of TCR clone 371439 (TRBV12-4, TRBJ2-7)
CQQSDRNHEQYF

SEQ ID NO: 742879 - protein, 14 aa, Homo sapiens
  CDR3 for alpha chain variable domain of TCR clone 371440 (TRAV1-2, TRAJ8)
CSVREDTGFQKLVF

SEQ ID NO: 742880 - protein, 15 aa, Homo sapiens
  CDR3 for beta chain variable domain of TCR clone 371440 (TRBV6-3, TRBJ2-7)
CASSSPETVFYEQYF

SEQ ID NO: 742881 - protein, 11 aa, Homo sapiens
  CDR3 for alpha chain variable domain of TCR clone 371441 (TRAV2, TRAJ13)
CASGGYQKVTF

SEQ ID NO: 742882 - protein, 14 aa, Homo sapiens
  CDR3 for beta chain variable domain of TCR clone 371441 (TRBV7-3, TRBJ2-1)
CASSLAVGTNEQFF

SEQ ID NO: 742883 - protein, 15 aa, Homo sapiens
  CDR3 for alpha chain variable domain of TCR clone 371442 (TRAV26-1, TRAJ29)
CIVRVEGSGNTPLVF

SEQ ID NO: 742884 - protein, 15 aa, Homo sapiens
  CDR3 for beta chain variable domain of TCR clone 371442 (TRBV7-9, TRBJ1-5)
CASSQGHQPNRTQHF

SEQ ID NO: 742885 - protein, 14 aa, Homo sapiens
  CDR3 for alpha chain variable domain of TCR clone 371443 (TRAV8-3, TRAJ10)
CAVGNAGGGNKLTF

SEQ ID NO: 742886 - protein, 12 aa, Homo sapiens
  CDR3 for beta chain variable domain of TCR clone 371443 (TRBV5-1, TRBJ2-7)
CASSLDSYEQYF

SEQ ID NO: 742887 - protein, 15 aa, Homo sapiens
  CDR3 for alpha chain variable domain of TCR clone 371444 (TRAV21, TRAJ53)
CAVRQSGGSNYKLTF

SEQ ID NO: 742888 - protein, 14 aa, Homo sapiens
  CDR3 for beta chain variable domain of TCR clone 371444 (TRBV4-1, TRBJ2-7)
CASSPVAGGDEQYF

SEQ ID NO: 742889 - protein, 14 aa, Homo sapiens
  CDR3 for alpha chain variable domain of TCR clone 371445 (TRAV34, TRAJ22)
CGADTSGSARQLAF

SEQ ID NO: 742890 - protein, 15 aa, Homo sapiens
  CDR3 for beta chain variable domain of TCR clone 371445 (TRBV7-9, TRBJ1-5)
CASSQGHQPNQPQHF

SEQ ID NO: 742891 - protein, 19 aa, Homo sapiens
  CDR3 for alpha chain variable domain of TCR clone 371446 (TRAV16, )
CALSGDIQNPDPAVYQLRD

SEQ ID NO: 742892 - protein, 16 aa, Homo sapiens
  CDR3 for beta chain variable domain of TCR clone 371446 (TRBV12-5, TRBJ2-5)
CASGPRTSRNQETQYF

SEQ ID NO: 742893 - protein, 12 aa, Homo sapiens
  CDR3 for alpha chain variable domain of TCR clone 371447 (TRAV12-3, TRAJ40)
CAMSSGTYKYIF

SEQ ID NO: 742894 - protein, 20 aa, Homo sapiens
  CDR3 for beta chain variable domain of TCR clone 371447 (TRBV7-8, TRBJ2-2)
CASSHLFPWPTIHITGELFF

SEQ ID NO: 742895 - protein, 16 aa, Homo sapiens
  CDR3 for alpha chain variable domain of TCR clone 371448 (TRAV30, TRAJ24)
CGTEIVDADSWGKFQF

SEQ ID NO: 742896 - protein, 14 aa, Homo sapiens
  CDR3 for beta chain variable domain of TCR clone 371448 (TRBV7-2, TRBJ1-2)
CASSQTGSTYGYSF

SEQ ID NO: 742897 - protein, 23 aa, Homo sapiens
  CDR3 for alpha chain variable domain of TCR clone 371449 (TRAV26-1, )
CIADNAGINHIQNPDPAVYQLRD

SEQ ID NO: 742898 - protein, 13 aa, Homo sapiens
  CDR3 for beta chain variable domain of TCR clone 371449 (TRBV20-1, TRBJ1-1)
CSARGGGNTEAFF

SEQ ID NO: 742899 - protein, 11 aa, Homo sapiens
  CDR3 for alpha chain variable domain of TCR clone 371450 (TRAV12-3, TRAJ27)
CAMANAGKSTF

SEQ ID NO: 742900 - protein, 11 aa, Homo sapiens
  CDR3 for beta chain variable domain of TCR clone 371450 (TRBV29-1, TRBJ2-5)
CSVASGETQYF

SEQ ID NO: 742901 - protein, 12 aa, Homo sapiens
  CDR3 for alpha chain variable domain of TCR clone 371451 (TRAV16, TRAJ49)
CDLNEGGNQFYF

SEQ ID NO: 742902 - protein, 13 aa, Homo sapiens
  CDR3 for beta chain variable domain of TCR clone 371451 (TRBV7-9, TRBJ1-2)
CASSLKQNYGYTF

SEQ ID NO: 742903 - protein, 18 aa, Homo sapiens
  CDR3 for alpha chain variable domain of TCR clone 371452 (TRAV21, TRAJ52)
CAVRPSPAGGTSYGKLTF

SEQ ID NO: 742904 - protein, 14 aa, Homo sapiens
  CDR3 for beta chain variable domain of TCR clone 371452 (TRBV19, TRBJ2-7)
CASSIRLGDHEQYF

SEQ ID NO: 742905 - protein, 14 aa, Homo sapiens
  CDR3 for alpha chain variable domain of TCR clone 371453 (TRAV16, TRAJ37)
CALDISGNTGKLIF

SEQ ID NO: 742906 - protein, 14 aa, Homo sapiens
  CDR3 for beta chain variable domain of TCR clone 371453 (TRBV7-8, TRBJ2-3)
CASSSRDSTDTQYF

SEQ ID NO: 742907 - protein, 14 aa, Homo sapiens
  CDR3 for alpha chain variable domain of TCR clone 371454 (TRAV26-1, TRAJ38)
CIADNAGNNRKLIW

SEQ ID NO: 742908 - protein, 14 aa, Homo sapiens
  CDR3 for beta chain variable domain of TCR clone 371454 (TRBV20-1, TRBJ1-1)
CSAQTRIGGTEAVF

SEQ ID NO: 742909 - protein, 15 aa, Homo sapiens
  CDR3 for alpha chain variable domain of TCR clone 371455 (TRAV17, TRAJ22)
CATVAPSGSARQLTF

SEQ ID NO: 742910 - protein, 14 aa, Homo sapiens
  CDR3 for beta chain variable domain of TCR clone 371455 (TRBV20-1, TRBJ1-5)
CSARDGGAGQPQHF

SEQ ID NO: 742911 - protein, 11 aa, Homo sapiens
  CDR3 for alpha chain variable domain of TCR clone 371456 (TRAV2, TRAJ33)
CAVDSNYQLIW

SEQ ID NO: 742912 - protein, 14 aa, Homo sapiens
  CDR3 for beta chain variable domain of TCR clone 371456 (TRBV11-2, TRBJ2-3)
CASSRLARTETQYF

SEQ ID NO: 742913 - protein, 13 aa, Homo sapiens
  CDR3 for alpha chain variable domain of TCR clone 371457 (TRAV13-2, TRAJ13)
CADLSGGYQKVTF

SEQ ID NO: 742914 - protein, 13 aa, Homo sapiens
  CDR3 for beta chain variable domain of TCR clone 371457 (TRBV12-4, TRBJ2-7)
CASSPTETYEQYF

SEQ ID NO: 742915 - protein, 17 aa, Homo sapiens
  CDR3 for alpha chain variable domain of TCR clone 371458 (TRAV23/DV6, TRAJ57)
CAASSTLSQGGSEKLGF

SEQ ID NO: 742916 - protein, 14 aa, Homo sapiens
  CDR3 for beta chain variable domain of TCR clone 371458 (TRBV25-1, TRBJ1-1)
CASTHLGGNTEAFF

SEQ ID NO: 742917 - protein, 12 aa, Homo sapiens
  CDR3 for alpha chain variable domain of TCR clone 371459 (TRAV21, TRAJ31)
CAVWGNNARLMF

SEQ ID NO: 742918 - protein, 12 aa, Homo sapiens
  CDR3 for beta chain variable domain of TCR clone 371459 (TRBV2, TRBJ2-3)
CASSGRFDTQYF

SEQ ID NO: 742919 - protein, 13 aa, Homo sapiens
  CDR3 for alpha chain variable domain of TCR clone 371460 (TRAV27, TRAJ41)
CAGEGNSGYAPNF

SEQ ID NO: 742920 - protein, 16 aa, Homo sapiens
  CDR3 for beta chain variable domain of TCR clone 371460 (TRBV12-5, TRBJ2-5)
CASGPRTSGNQETQYF

SEQ ID NO: 742921 - protein, 13 aa, Homo sapiens
  CDR3 for alpha chain variable domain of TCR clone 371461 (TRAV4, TRAJ34)
CLVGDYNTDKLIF

SEQ ID NO: 742922 - protein, 23 aa, Homo sapiens
  CDR3 for beta chain variable domain of TCR clone 371461 (TRBV4-3, TRBJ2-3)
WASGQDPPRASSISGGRGDTQYF

SEQ ID NO: 742923 - protein, 11 aa, Homo sapiens
  CDR3 for alpha chain variable domain of TCR clone 371462 (TRAV2, TRAJ33)
CAVDSNYQLNW

SEQ ID NO: 742924 - protein, 15 aa, Homo sapiens
  CDR3 for beta chain variable domain of TCR clone 371462 (TRBV19, TRBJ1-2)
CASSVGQVLNYGYAF

SEQ ID NO: 742925 - protein, 12 aa, Homo sapiens
  CDR3 for alpha chain variable domain of TCR clone 371463 (TRAV12-3, TRAJ17)
CAMTLTGNKLTF

SEQ ID NO: 742926 - protein, 14 aa, Homo sapiens
  CDR3 for beta chain variable domain of TCR clone 371463 (TRBV4-1, TRBJ2-7)
CASSQDREHVVQYF

SEQ ID NO: 742927 - protein, 15 aa, Homo sapiens
  CDR3 for alpha chain variable domain of TCR clone 371464 (TRAV34, TRAJ36)
CGAPSRLGGANNLFF

SEQ ID NO: 742928 - protein, 16 aa, Homo sapiens
  CDR3 for beta chain variable domain of TCR clone 371464 (TRBV4-3, TRBJ2-1)
CASSYRRLGSWYEQFF

SEQ ID NO: 742929 - protein, 15 aa, Homo sapiens
  CDR3 for alpha chain variable domain of TCR clone 371465 (TRAV8-4, TRAJ3)
CAVTGENLVKQCFQD

SEQ ID NO: 742930 - protein, 16 aa, Homo sapiens
  CDR3 for beta chain variable domain of TCR clone 371465 (TRBV4-2, TRBJ1-1)
CASSQAGFGMNTEAFF

SEQ ID NO: 742931 - protein, 15 aa, Homo sapiens
  CDR3 for alpha chain variable domain of TCR clone 371466 (TRAV26-1, TRAJ29)
CIVRVEGSGNTPLVF

SEQ ID NO: 742932 - protein, 15 aa, Homo sapiens
  CDR3 for beta chain variable domain of TCR clone 371466 (TRBV10-3, TRBJ2-5)
CAIRPGDVDLGTQYF

SEQ ID NO: 742933 - protein, 16 aa, Homo sapiens
  CDR3 for alpha chain variable domain of TCR clone 371467 (TRAV3, TRAJ10)
CALRDMRAGGGNKLTF

SEQ ID NO: 742934 - protein, 16 aa, Homo sapiens
  CDR3 for beta chain variable domain of TCR clone 371467 (TRBV20-1, TRBJ2-1)
CSASASGYSSYNEQFF

SEQ ID NO: 742935 - protein, 13 aa, Homo sapiens
  CDR3 for alpha chain variable domain of TCR clone 371468 (TRAV8-3, TRAJ4)
WVFYSGGYNKLMF

SEQ ID NO: 742936 - protein, 18 aa, Homo sapiens
  CDR3 for beta chain variable domain of TCR clone 371468 (TRBV11-2, TRBJ2-3)
CASSLGGASRGAPNTQYF

SEQ ID NO: 742937 - protein, 15 aa, Homo sapiens
  CDR3 for alpha chain variable domain of TCR clone 371469 (TRAV8-4, TRAJ37)
CAVSTRSGNTVKLIF

SEQ ID NO: 742938 - protein, 20 aa, Homo sapiens
  CDR3 for beta chain variable domain of TCR clone 371469 (TRBV7-8, TRBJ2-2)
CASSHLFPGPTIHITGELFF

SEQ ID NO: 742939 - protein, 13 aa, Homo sapiens
  CDR3 for alpha chain variable domain of TCR clone 371470 (TRAV12-2, TRAJ12)
CAVNWDSSYKLIF

SEQ ID NO: 742940 - protein, 11 aa, Homo sapiens
  CDR3 for beta chain variable domain of TCR clone 371470 (TRBV11-2, TRBJ2-2)
CASSLPGELFF

SEQ ID NO: 742941 - protein, 15 aa, Homo sapiens
  CDR3 for alpha chain variable domain of TCR clone 371471 (TRAV13-1, TRAJ5)
CAASPRGHGQESTYF

SEQ ID NO: 742942 - protein, 15 aa, Homo sapiens
  CDR3 for beta chain variable domain of TCR clone 371471 (TRBV6-1, TRBJ2-3)
CASSERGGITDTQNF

SEQ ID NO: 742943 - protein, 15 aa, Homo sapiens
  CDR3 for alpha chain variable domain of TCR clone 371472 (TRAV8-6, TRAJ38)
CAVSSNVGNNRKLIW

SEQ ID NO: 742944 - protein, 14 aa, Homo sapiens
  CDR3 for beta chain variable domain of TCR clone 371472 (TRBV14, TRBJ2-1)
CASSQVQGRGEQFF

SEQ ID NO: 742945 - protein, 17 aa, Homo sapiens
  CDR3 for alpha chain variable domain of TCR clone 371473 (TRAV3, TRAJ6)
CAVRDGPRAGGSYIPTF

SEQ ID NO: 742946 - protein, 17 aa, Homo sapiens
  CDR3 for beta chain variable domain of TCR clone 371473 (TRBV28, TRBJ2-1)
CASSSARQALTYNEQFF

SEQ ID NO: 742947 - protein, 15 aa, Homo sapiens
  CDR3 for alpha chain variable domain of TCR clone 371474 (TRAV29/DV5, TRAJ42)
CAAKTDGGSQGNLIF

SEQ ID NO: 742948 - protein, 14 aa, Homo sapiens
  CDR3 for beta chain variable domain of TCR clone 371474 (TRBV25-1, TRBJ1-1)
CASTHLGGNTEAFF

SEQ ID NO: 742949 - protein, 12 aa, Homo sapiens
  CDR3 for alpha chain variable domain of TCR clone 371475 (TRAV17, TRAJ12)
CATLRSSYKLIF

SEQ ID NO: 742950 - protein, 16 aa, Homo sapiens
  CDR3 for beta chain variable domain of TCR clone 371475 (TRBV28, TRBJ2-7)
CASSLFFETGGPVHYF

SEQ ID NO: 742951 - protein, 12 aa, Homo sapiens
  CDR3 for alpha chain variable domain of TCR clone 371476 (TRAV12-3, TRAJ17)
CAMTLTGNKQTF

SEQ ID NO: 742952 - protein, 15 aa, Homo sapiens
  CDR3 for beta chain variable domain of TCR clone 371476 (TRBV20-1, TRBJ2-7)
CSARDQVSGMDEQYF

SEQ ID NO: 742953 - protein, 13 aa, Homo sapiens
  CDR3 for alpha chain variable domain of TCR clone 371477 (TRAV12-2, TRAJ50)
CAVIVTSYDKVKF

SEQ ID NO: 742954 - protein, 14 aa, Homo sapiens
  CDR3 for beta chain variable domain of TCR clone 371477 (TRBV9, TRBJ2-1)
CASSVDPRGKEQFF

SEQ ID NO: 742955 - protein, 14 aa, Homo sapiens
  CDR3 for alpha chain variable domain of TCR clone 371478 (TRAV20, TRAJ22)
CAVQGAGSARQLTF

SEQ ID NO: 742956 - protein, 16 aa, Homo sapiens
  CDR3 for beta chain variable domain of TCR clone 371478 (TRBV19, TRBJ2-2)
CASRSPGTGATGELFF

SEQ ID NO: 742957 - protein, 13 aa, Homo sapiens
  CDR3 for alpha chain variable domain of TCR clone 371479 (TRAV13-1, TRAJ6)
CAASKGGSYIPTF

SEQ ID NO: 742958 - protein, 14 aa, Homo sapiens
  CDR3 for beta chain variable domain of TCR clone 371479 (TRBV7-2, TRBJ2-1)
CACSLGVGYNEQFF

SEQ ID NO: 742959 - protein, 14 aa, Homo sapiens
  CDR3 for alpha chain variable domain of TCR clone 371480 (TRAV1-2, TRAJ16)
CAVNRFSDGQKLLF

SEQ ID NO: 742960 - protein, 16 aa, Homo sapiens
  CDR3 for beta chain variable domain of TCR clone 371480 (TRBV9, TRBJ2-1)
CASSVVGGGNYNEQFF

SEQ ID NO: 742961 - protein, 13 aa, Homo sapiens
  CDR3 for alpha chain variable domain of TCR clone 371481 (TRAV20, TRAJ37)
CAGCSSNTGKLIF

SEQ ID NO: 742962 - protein, 15 aa, Homo sapiens
  CDR3 for beta chain variable domain of TCR clone 371481 (TRBV12-4, TRBJ2-1)
CASSLLATGNNEQFF

SEQ ID NO: 742963 - protein, 13 aa, Homo sapiens
  CDR3 for alpha chain variable domain of TCR clone 371482 (TRAV8-3, TRAJ43)
CAVGPDNNNDMPF

SEQ ID NO: 742964 - protein, 14 aa, Homo sapiens
  CDR3 for beta chain variable domain of TCR clone 371482 (TRBV19, TRBJ2-1)
CASPTFVLGGEQFF

SEQ ID NO: 742965 - protein, 12 aa, Homo sapiens
  CDR3 for alpha chain variable domain of TCR clone 371483 (TRAV21, TRAJ33)
CAKMDSNYQLIW

SEQ ID NO: 742966 - protein, 16 aa, Homo sapiens
  CDR3 for beta chain variable domain of TCR clone 371483 (TRBV12-4, TRBJ1-5)
CASSRPVGGSNQPQHF

SEQ ID NO: 742967 - protein, 14 aa, Homo sapiens
  CDR3 for alpha chain variable domain of TCR clone 371484 (TRAV17, TRAJ37)
CATDGSSNTGKLIF

SEQ ID NO: 742968 - protein, 12 aa, Homo sapiens
  CDR3 for beta chain variable domain of TCR clone 371484 (TRBV11-2, TRBJ2-1)
CASSPQDIEQFF

SEQ ID NO: 742969 - protein, 12 aa, Homo sapiens
  CDR3 for alpha chain variable domain of TCR clone 371485 (TRAV13-1, TRAJ3)
WAATGVQQCFQD

SEQ ID NO: 742970 - protein, 16 aa, Homo sapiens
  CDR3 for beta chain variable domain of TCR clone 371485 (TRBV7-3, TRBJ2-2)
CASSLKRGTLSGELFF

SEQ ID NO: 742971 - protein, 13 aa, Homo sapiens
  CDR3 for alpha chain variable domain of TCR clone 371486 (TRAV20, TRAJ54)
CALTFEEAQKLVF

SEQ ID NO: 742972 - protein, 12 aa, Homo sapiens
  CDR3 for beta chain variable domain of TCR clone 371486 (TRBV5-1, TRBJ2-5)
CASSFSWETQYF

SEQ ID NO: 742973 - protein, 23 aa, Homo sapiens
  CDR3 for alpha chain variable domain of TCR clone 371487 (TRAV26-1, TRAJ38)
CIADNAGNNHIQNPDPPVYQLRD

SEQ ID NO: 742974 - protein, 13 aa, Homo sapiens
  CDR3 for beta chain variable domain of TCR clone 371487 (TRBV28, TRBJ2-5)
CASSFAGGETQYF

SEQ ID NO: 742975 - protein, 11 aa, Homo sapiens
  CDR3 for alpha chain variable domain of TCR clone 371488 (TRAV12-1, TRAJ30)
CVVNGHDKIIF

SEQ ID NO: 742976 - protein, 15 aa, Homo sapiens
  CDR3 for beta chain variable domain of TCR clone 371488 (TRBV28, TRBJ2-5)
CASSSGRTIQETQYF

SEQ ID NO: 742977 - protein, 14 aa, Homo sapiens
  CDR3 for alpha chain variable domain of TCR clone 371489 (TRAV13-2, TRAJ43)
CAEIHTYNDNDMRF

SEQ ID NO: 742978 - protein, 15 aa, Homo sapiens
  CDR3 for beta chain variable domain of TCR clone 371489 (TRBV7-9, TRBJ2-2)
CASGPLDTFPGELFL

SEQ ID NO: 742979 - protein, 13 aa, Homo sapiens
  CDR3 for alpha chain variable domain of TCR clone 371490 (TRAV12-1, TRAJ34)
CGEPLRNTDKLIF

SEQ ID NO: 742980 - protein, 16 aa, Homo sapiens
  CDR3 for beta chain variable domain of TCR clone 371490 (TRBV19, TRBJ2-3)
CASSPGAASRTDTQYF

SEQ ID NO: 742981 - protein, 14 aa, Homo sapiens
  CDR3 for alpha chain variable domain of TCR clone 371491 (TRAV1-2, TRAJ8)
CAVREDTGFQKHVF

SEQ ID NO: 742982 - protein, 12 aa, Homo sapiens
  CDR3 for beta chain variable domain of TCR clone 371491 (TRBV18, TRBJ1-4)
CASSPSREKLFF

SEQ ID NO: 742983 - protein, 13 aa, Homo sapiens
  CDR3 for alpha chain variable domain of TCR clone 371492 (TRAV23/DV6, TRAJ58)
CAASEIGGSRLTI

SEQ ID NO: 742984 - protein, 14 aa, Homo sapiens
  CDR3 for beta chain variable domain of TCR clone 371492 (TRBV28, TRBJ2-5)
CASSRLAGGEAQYF

SEQ ID NO: 742985 - protein, 16 aa, Homo sapiens
  CDR3 for alpha chain variable domain of TCR clone 371493 (TRAV30, TRAJ24)
CGTEILDADSWGKFPF

SEQ ID NO: 742986 - protein, 14 aa, Homo sapiens
  CDR3 for beta chain variable domain of TCR clone 371493 (TRBV12-5, TRBJ2-5)
CASGSRTHQETQYF

SEQ ID NO: 742987 - protein, 14 aa, Homo sapiens
  CDR3 for alpha chain variable domain of TCR clone 371494 (TRAV1-2, TRAJ16)
CAVNRFSDGQKLLF

SEQ ID NO: 742988 - protein, 14 aa, Homo sapiens
  CDR3 for beta chain variable domain of TCR clone 371494 (TRBV6-5, TRBJ1-2)
CASTRGGGSDGYTF

SEQ ID NO: 742989 - protein, 11 aa, Homo sapiens
  CDR3 for alpha chain variable domain of TCR clone 371495 (TRAV12-3, TRAJ43)
CAMSVSNDMRF

SEQ ID NO: 742990 - protein, 14 aa, Homo sapiens
  CDR3 for beta chain variable domain of TCR clone 371495 (TRBV20-1, TRBJ1-1)
PAMLPLGGGTEAFF

SEQ ID NO: 742991 - protein, 14 aa, Homo sapiens
  CDR3 for alpha chain variable domain of TCR clone 371496 (TRAV3, TRAJ20)
CAVPPAPNDYTLSF

SEQ ID NO: 742992 - protein, 13 aa, Homo sapiens
  CDR3 for beta chain variable domain of TCR clone 371496 (TRBV15, TRBJ1-2)
CATSRVDARSPVF

SEQ ID NO: 742993 - protein, 13 aa, Homo sapiens
  CDR3 for alpha chain variable domain of TCR clone 371497 (TRAV21, TRAJ57)
CAVTQGGSEKLVF

SEQ ID NO: 742994 - protein, 17 aa, Homo sapiens
  CDR3 for beta chain variable domain of TCR clone 371497 (TRBV23-1, TRBJ2-1)
CASSQYTAAGVVMSSSS

SEQ ID NO: 742995 - protein, 12 aa, Homo sapiens
  CDR3 for alpha chain variable domain of TCR clone 371498 (TRAV29/DV5, TRAJ15)
CASNQAGTALIF

SEQ ID NO: 742996 - protein, 15 aa, Homo sapiens
  CDR3 for beta chain variable domain of TCR clone 371498 (TRBV11-2, TRBJ2-2)
CASSSYRVNAGELFF

SEQ ID NO: 742997 - protein, 16 aa, Homo sapiens
  CDR3 for alpha chain variable domain of TCR clone 371499 (TRAV30, TRAJ24)
CGTEIVDADSWGKFQF

SEQ ID NO: 742998 - protein, 15 aa, Homo sapiens
  CDR3 for beta chain variable domain of TCR clone 371499 (TRBV27, TRBJ1-4)
CASSAQQDLNEKLFF

SEQ ID NO: 742999 - protein, 12 aa, Homo sapiens
  CDR3 for alpha chain variable domain of TCR clone 371500 (TRAV16, TRAJ10)
CSRTGGGNKLTF

SEQ ID NO: 743000 - protein, 19 aa, Homo sapiens
  CDR3 for beta chain variable domain of TCR clone 371500 (TRBV28, TRBJ2-1)
CASSFSIRGSGRARYEQFF

SEQ ID NO: 743001 - protein, 14 aa, Homo sapiens
  CDR3 for alpha chain variable domain of TCR clone 371501 (TRAV1-2, TRAJ8)
CAVREDTGFQKLVF

SEQ ID NO: 743002 - protein, 15 aa, Homo sapiens
  CDR3 for beta chain variable domain of TCR clone 371501 (TRBV5-5, TRBJ1-2)
CASSPYGSSAEGYTF

SEQ ID NO: 743003 - protein, 13 aa, Homo sapiens
  CDR3 for alpha chain variable domain of TCR clone 371502 (TRAV20, TRAJ34)
CAVRSYNTDKLIF

SEQ ID NO: 743004 - protein, 14 aa, Homo sapiens
  CDR3 for beta chain variable domain of TCR clone 371502 (TRBV7-9, TRBJ2-1)
CASSSMVGFGEQFF

SEQ ID NO: 743005 - protein, 14 aa, Homo sapiens
  CDR3 for alpha chain variable domain of TCR clone 371503 (TRAV8-1, TRAJ5)
CAVSMDTGWRALTF

SEQ ID NO: 743006 - protein, 15 aa, Homo sapiens
  CDR3 for beta chain variable domain of TCR clone 371503 (TRBV19, TRBJ2-4)
CASRGPRRGENIQYF

SEQ ID NO: 743007 - protein, 18 aa, Homo sapiens
  CDR3 for alpha chain variable domain of TCR clone 371504 (TRAV26-2, TRAJ54)
CILRDVEVGIQGAQKLVF

SEQ ID NO: 743008 - protein, 16 aa, Homo sapiens
  CDR3 for beta chain variable domain of TCR clone 371504 (TRBV7-3, TRBJ2-3)
CASSLSGYRHEDTQYF

SEQ ID NO: 743009 - protein, 11 aa, Homo sapiens
  CDR3 for alpha chain variable domain of TCR clone 371505 (TRAV16, TRAJ49)
CSLNTGNQFYF

SEQ ID NO: 743010 - protein, 11 aa, Homo sapiens
  CDR3 for beta chain variable domain of TCR clone 371505 (TRBV7-9, TRBJ1-4)
CASTDREKLFF

SEQ ID NO: 743011 - protein, 14 aa, Homo sapiens
  CDR3 for alpha chain variable domain of TCR clone 371506 (TRAV12-2, TRAJ17)
CAVLFKAAGNKLPL

SEQ ID NO: 743012 - protein, 17 aa, Homo sapiens
  CDR3 for beta chain variable domain of TCR clone 371506 (TRBV20-1, TRBJ2-2)
CSASGSGQGGLTGELFF

SEQ ID NO: 743013 - protein, 15 aa, Homo sapiens
  CDR3 for alpha chain variable domain of TCR clone 371507 (TRAV12-2, TRAJ52)
CAAPGGGTSYGKLTF

SEQ ID NO: 743014 - protein, 15 aa, Homo sapiens
  CDR3 for beta chain variable domain of TCR clone 371507 (TRBV6-4, TRBJ2-1)
CASSDSTGGYNEQFF

SEQ ID NO: 743015 - protein, 14 aa, Homo sapiens
  CDR3 for alpha chain variable domain of TCR clone 371508 (TRAV29/DV5, TRAJ57)
CAASEMGGSEKLAF

SEQ ID NO: 743016 - protein, 14 aa, Homo sapiens
  CDR3 for beta chain variable domain of TCR clone 371508 (TRBV5-4, TRBJ1-4)
CASSLNLGREKLFF

SEQ ID NO: 743017 - protein, 11 aa, Homo sapiens
  CDR3 for alpha chain variable domain of TCR clone 371509 (TRAV35, TRAJ34)
CWARNTDKLIF

SEQ ID NO: 743018 - protein, 13 aa, Homo sapiens
  CDR3 for beta chain variable domain of TCR clone 371509 (TRBV7-2, TRBJ1-4)
CASSLAGLEKLFF

SEQ ID NO: 743019 - protein, 13 aa, Homo sapiens
  CDR3 for alpha chain variable domain of TCR clone 371510 (TRAV12-1, TRAJ16)
CVVNGPDGQKLLF

SEQ ID NO: 743020 - protein, 13 aa, Homo sapiens
  CDR3 for beta chain variable domain of TCR clone 371510 (TRBV13, TRBJ2-1)
CASILGGRGEQFF

SEQ ID NO: 743021 - protein, 12 aa, Homo sapiens
  CDR3 for alpha chain variable domain of TCR clone 371511 (TRAV13-1, TRAJ11)
CAGPTGYSTLTF

SEQ ID NO: 743022 - protein, 13 aa, Homo sapiens
  CDR3 for beta chain variable domain of TCR clone 371511 (TRBV12-4, TRBJ2-1)
RASSLSPSNEQFF

SEQ ID NO: 743023 - protein, 16 aa, Homo sapiens
  CDR3 for alpha chain variable domain of TCR clone 371512 (TRAV14/DV4, TRAJ53)
CAMREGGGGSNYKMTL

SEQ ID NO: 743024 - protein, 12 aa, Homo sapiens
  CDR3 for beta chain variable domain of TCR clone 371512 (TRBV12-5, TRBJ2-3)
CASGGAADTQYF

SEQ ID NO: 743025 - protein, 12 aa, Homo sapiens
  CDR3 for alpha chain variable domain of TCR clone 371513 (TRAV12-3, TRAJ3)
CAIDSSASKLIF

SEQ ID NO: 743026 - protein, 17 aa, Homo sapiens
  CDR3 for beta chain variable domain of TCR clone 371513 (TRBV7-9, TRBJ2-3)
CASSLEEAGAYPDTQYF

SEQ ID NO: 743027 - protein, 14 aa, Homo sapiens
  CDR3 for alpha chain variable domain of TCR clone 371514 (TRAV2, TRAJ9)
CAVEDRSGGFKTIF

SEQ ID NO: 743028 - protein, 14 aa, Homo sapiens
  CDR3 for beta chain variable domain of TCR clone 371514 (TRBV9, TRBJ2-1)
CASSVDPRGKEQFF

SEQ ID NO: 743029 - protein, 13 aa, Homo sapiens
  CDR3 for alpha chain variable domain of TCR clone 371515 (TRAV2, TRAJ21)
CAVEDNNFNKFYF

SEQ ID NO: 743030 - protein, 13 aa, Homo sapiens
  CDR3 for beta chain variable domain of TCR clone 371515 (TRBV12-4, TRBJ1-2)
CASSSGLTVISTF

SEQ ID NO: 743031 - protein, 14 aa, Homo sapiens
  CDR3 for alpha chain variable domain of TCR clone 371516 (TRAV13-2, TRAJ32)
CAENHGGATNKLIF

SEQ ID NO: 743032 - protein, 15 aa, Homo sapiens
  CDR3 for beta chain variable domain of TCR clone 371516 (TRBV4-2, TRBJ2-3)
CQQPRVSGDTDTQYF

SEQ ID NO: 743033 - protein, 14 aa, Homo sapiens
  CDR3 for alpha chain variable domain of TCR clone 371517 (TRAV26-2, TRAJ32)
CCVGYGGATNKLIF

SEQ ID NO: 743034 - protein, 15 aa, Homo sapiens
  CDR3 for beta chain variable domain of TCR clone 371517 (TRBV18, TRBJ2-1)
CASSPPSASYNEQFF

SEQ ID NO: 743035 - protein, 14 aa, Homo sapiens
  CDR3 for alpha chain variable domain of TCR clone 371518 (TRAV30, TRAJ33)
CGTERRFSNYQLIW

SEQ ID NO: 743036 - protein, 15 aa, Homo sapiens
  CDR3 for beta chain variable domain of TCR clone 371518 (TRBV7-3, TRBJ2-2)
CQQLKAGDLVRELFF

SEQ ID NO: 743037 - protein, 12 aa, Homo sapiens
  CDR3 for alpha chain variable domain of TCR clone 371519 (TRAV12-3, TRAJ34)
CAMGYNTDKLIF

SEQ ID NO: 743038 - protein, 15 aa, Homo sapiens
  CDR3 for beta chain variable domain of TCR clone 371519 (TRBV7-3, TRBJ2-1)
CASSQRGGALIEQFF

SEQ ID NO: 743039 - protein, 12 aa, Homo sapiens
  CDR3 for alpha chain variable domain of TCR clone 371520 (TRAV1-1, TRAJ8)
CAGGTGFQKLVF

SEQ ID NO: 743040 - protein, 15 aa, Homo sapiens
  CDR3 for beta chain variable domain of TCR clone 371520 (TRBV20-1, TRBJ2-7)
CSARDRVSGMDEQYY

SEQ ID NO: 743041 - protein, 17 aa, Homo sapiens
  CDR3 for alpha chain variable domain of TCR clone 371521 (TRAV8-6, TRAJ58)
CAVSSWVGETSGSRLSF

SEQ ID NO: 743042 - protein, 17 aa, Homo sapiens
  CDR3 for beta chain variable domain of TCR clone 371521 (TRBV11-2, TRBJ2-1)
CASSLYPPGVEYNEQFF

SEQ ID NO: 743043 - protein, 15 aa, Homo sapiens
  CDR3 for alpha chain variable domain of TCR clone 371522 (TRAV21, TRAJ32)
FAVNSYGGATNKLIF

SEQ ID NO: 743044 - protein, 14 aa, Homo sapiens
  CDR3 for beta chain variable domain of TCR clone 371522 (TRBV7-2, TRBJ2-7)
CASSPKTSFYEQYF

SEQ ID NO: 743045 - protein, 13 aa, Homo sapiens
  CDR3 for alpha chain variable domain of TCR clone 371523 (TRAV9-2, TRAJ5)
CALYDTGRRALTF

SEQ ID NO: 743046 - protein, 14 aa, Homo sapiens
  CDR3 for beta chain variable domain of TCR clone 371523 (TRBV7-2, TRBJ2-7)
CASRSQGAAYEQYF

SEQ ID NO: 743047 - protein, 14 aa, Homo sapiens
  CDR3 for alpha chain variable domain of TCR clone 371524 (TRAV1-2, TRAJ16)
CAVKRFSDGQKLLF

SEQ ID NO: 743048 - protein, 14 aa, Homo sapiens
  CDR3 for beta chain variable domain of TCR clone 371524 (TRBV7-2, TRBJ2-7)
CASRSQGAAYEQYF

SEQ ID NO: 743049 - protein, 15 aa, Homo sapiens
  CDR3 for alpha chain variable domain of TCR clone 371525 (TRAV3, TRAJ8)
CAVRDNETGFQKLVF

SEQ ID NO: 743050 - protein, 13 aa, Homo sapiens
  CDR3 for beta chain variable domain of TCR clone 371525 (TRBV20-1, TRBJ1-1)
CSAPLGGGTEAFF

SEQ ID NO: 743051 - protein, 14 aa, Homo sapiens
  CDR3 for alpha chain variable domain of TCR clone 371526 (TRAV12-2, TRAJ40)
CAVKIPSGTYKYIF

SEQ ID NO: 743052 - protein, 14 aa, Homo sapiens
  CDR3 for beta chain variable domain of TCR clone 371526 (TRBV19, TRBJ2-1)
CASTTFVLSGEQFF

SEQ ID NO: 743053 - protein, 11 aa, Homo sapiens
  CDR3 for alpha chain variable domain of TCR clone 371527 (TRAV3, TRAJ21)
CAVGHFKKFYF

SEQ ID NO: 743054 - protein, 16 aa, Homo sapiens
  CDR3 for beta chain variable domain of TCR clone 371527 (TRBV7-6, TRBJ2-1)
CASSAPGPSSYNEQFF

SEQ ID NO: 743055 - protein, 20 aa, Homo sapiens
  CDR3 for alpha chain variable domain of TCR clone 371528 (TRAV8-3, TRAJ44)
LSTSVLWVRLYTGTASKLTF

SEQ ID NO: 743056 - protein, 15 aa, Homo sapiens
  CDR3 for beta chain variable domain of TCR clone 371528 (TRBV6-5, TRBJ1-2)
CASSYSPAFNYGDTF

SEQ ID NO: 743057 - protein, 13 aa, Homo sapiens
  CDR3 for alpha chain variable domain of TCR clone 371529 (TRAV3, TRAJ20)
CAVRDTPRYKLSF

SEQ ID NO: 743058 - protein, 16 aa, Homo sapiens
  CDR3 for beta chain variable domain of TCR clone 371529 (TRBV28, TRBJ2-1)
CASSSPEYPRDNEQFF

SEQ ID NO: 743059 - protein, 14 aa, Homo sapiens
  CDR3 for alpha chain variable domain of TCR clone 371530 (TRAV26-1, TRAJ11)
CIVPLYSGYRTLTF

SEQ ID NO: 743060 - protein, 13 aa, Homo sapiens
  CDR3 for beta chain variable domain of TCR clone 371530 (TRBV10-3, TRBJ2-7)
CASKLAVNYEQYF

SEQ ID NO: 743061 - protein, 14 aa, Homo sapiens
  CDR3 for alpha chain variable domain of TCR clone 371531 (TRAV1-2, TRAJ16)
CAVNRFSDGQKLLF

SEQ ID NO: 743062 - protein, 17 aa, Homo sapiens
  CDR3 for beta chain variable domain of TCR clone 371531 (TRBV28, TRBJ2-5)
CASSTPEGGALQETQYF

SEQ ID NO: 743063 - protein, 13 aa, Homo sapiens
  CDR3 for alpha chain variable domain of TCR clone 371532 (TRAV13-1, TRAJ10)
CAATVGGGNKLTF

SEQ ID NO: 743064 - protein, 12 aa, Homo sapiens
  CDR3 for beta chain variable domain of TCR clone 371532 (TRBV7-3, TRBJ2-1)
CASSFQSGTQFF

SEQ ID NO: 743065 - protein, 13 aa, Homo sapiens
  CDR3 for alpha chain variable domain of TCR clone 371533 (TRAV12-1, TRAJ40)
CVVPTSGTYKHIF

SEQ ID NO: 743066 - protein, 16 aa, Homo sapiens
  CDR3 for beta chain variable domain of TCR clone 371533 (TRBV7-9, TRBJ1-2)
CASSLGFSSGEDGYTF

SEQ ID NO: 743067 - protein, 16 aa, Homo sapiens
  CDR3 for alpha chain variable domain of TCR clone 371534 (TRAV12-3, TRAJ53)
CAMSPGSGGSNYTLTF

SEQ ID NO: 743068 - protein, 13 aa, Homo sapiens
  CDR3 for beta chain variable domain of TCR clone 371534 (TRBV10-3, TRBJ2-7)
CASKLAVNYEQYF

SEQ ID NO: 743069 - protein, 13 aa, Homo sapiens
  CDR3 for alpha chain variable domain of TCR clone 371535 (TRAV8-6, TRAJ49)
CAVIKNTGNQFYF

SEQ ID NO: 743070 - protein, 13 aa, Homo sapiens
  CDR3 for beta chain variable domain of TCR clone 371535 (TRBV7-9, TRBJ1-2)
CASSLKQNYGYTF

SEQ ID NO: 743071 - protein, 12 aa, Homo sapiens
  CDR3 for alpha chain variable domain of TCR clone 371536 (TRAV2, TRAJ31)
CAVEDNNARLMF

SEQ ID NO: 743072 - protein, 15 aa, Homo sapiens
  CDR3 for beta chain variable domain of TCR clone 371536 (TRBV7-2, TRBJ2-1)
CASSSGLAGGNEQFF

SEQ ID NO: 743073 - protein, 17 aa, Homo sapiens
  CDR3 for alpha chain variable domain of TCR clone 371537 (TRAV26-1, TRAJ37)
CIVRVITVSSHTGKLIF

SEQ ID NO: 743074 - protein, 14 aa, Homo sapiens
  CDR3 for beta chain variable domain of TCR clone 371537 (TRBV19, TRBJ2-1)
CASPTFVLSGEQFF

SEQ ID NO: 743075 - protein, 16 aa, Homo sapiens
  CDR3 for alpha chain variable domain of TCR clone 371538 (TRAV21, TRAJ52)
CAVTNAGGTSYGKLTF

SEQ ID NO: 743076 - protein, 16 aa, Homo sapiens
  CDR3 for beta chain variable domain of TCR clone 371538 (TRBV2, TRBJ2-1)
CSSSVGGSLSYNEQFF

SEQ ID NO: 743077 - protein, 13 aa, Homo sapiens
  CDR3 for alpha chain variable domain of TCR clone 371539 (TRAV23/DV6, TRAJ58)
CAASEIGGPRLTF

SEQ ID NO: 743078 - protein, 15 aa, Homo sapiens
  CDR3 for beta chain variable domain of TCR clone 371539 (TRBV19, TRBJ1-1)
CASTSGQIQNTEAFF

SEQ ID NO: 743079 - protein, 12 aa, Homo sapiens
  CDR3 for alpha chain variable domain of TCR clone 371540 (TRAV12-3, TRAJ17)
CAMTLTGNKLTF

SEQ ID NO: 743080 - protein, 14 aa, Homo sapiens
  CDR3 for beta chain variable domain of TCR clone 371540 (TRBV7-2, TRBJ2-1)
CASSLVAGRNEQFF

SEQ ID NO: 743081 - protein, 14 aa, Homo sapiens
  CDR3 for alpha chain variable domain of TCR clone 371541 (TRAV29/DV5, TRAJ36)
CAARRKTGANNLFF

SEQ ID NO: 743082 - protein, 12 aa, Homo sapiens
  CDR3 for beta chain variable domain of TCR clone 371541 (TRBV14, TRBJ2-7)
CASSLNQRRQYF

SEQ ID NO: 743083 - protein, 15 aa, Homo sapiens
  CDR3 for alpha chain variable domain of TCR clone 371542 (TRAV3, TRAJ9)
CAVRDINTGCFKTIF

SEQ ID NO: 743084 - protein, 13 aa, Homo sapiens
  CDR3 for beta chain variable domain of TCR clone 371542 (TRBV19, TRBJ2-7)
CASSIPSVREQYF

SEQ ID NO: 743085 - protein, 12 aa, Homo sapiens
  CDR3 for alpha chain variable domain of TCR clone 371543 (TRAV13-1, TRAJ17)
CAARTAGNKLTF

SEQ ID NO: 743086 - protein, 15 aa, Homo sapiens
  CDR3 for beta chain variable domain of TCR clone 371543 (TRBV7-6, TRBJ1-1)
CASSPQGGANTEAFC

SEQ ID NO: 743087 - protein, 13 aa, Homo sapiens
  CDR3 for alpha chain variable domain of TCR clone 371544 (TRAV21, TRAJ27)
CAARPGNAGKSTF

SEQ ID NO: 743088 - protein, 14 aa, Homo sapiens
  CDR3 for beta chain variable domain of TCR clone 371544 (TRBV11-3, TRBJ2-7)
CASSLGAGAHEQYF

SEQ ID NO: 743089 - protein, 15 aa, Homo sapiens
  CDR3 for alpha chain variable domain of TCR clone 371545 (TRAV27, TRAJ53)
CRAINSGGSNYKLTF

SEQ ID NO: 743090 - protein, 13 aa, Homo sapiens
  CDR3 for beta chain variable domain of TCR clone 371545 (TRBV10-3, TRBJ1-2)
CAISERDSYGYTF

SEQ ID NO: 743091 - protein, 14 aa, Homo sapiens
  CDR3 for alpha chain variable domain of TCR clone 371546 (TRAV26-1, TRAJ31)
CIALPPNNNSRLMF

SEQ ID NO: 743092 - protein, 16 aa, Homo sapiens
  CDR3 for beta chain variable domain of TCR clone 371546 (TRBV10-2, TRBJ2-7)
CASSESPGSSGFEQYF

SEQ ID NO: 743093 - protein, 13 aa, Homo sapiens
  CDR3 for alpha chain variable domain of TCR clone 371547 (TRAV27, TRAJ29)
CAGAHSGNTPLVC

SEQ ID NO: 743094 - protein, 14 aa, Homo sapiens
  CDR3 for beta chain variable domain of TCR clone 371547 (TRBV7-9, TRBJ2-7)
CASSIGQGAGEQYF

SEQ ID NO: 743095 - protein, 12 aa, Homo sapiens
  CDR3 for alpha chain variable domain of TCR clone 371548 (TRAV12-2, TRAJ45)
CASGGGADGLTS

SEQ ID NO: 743096 - protein, 16 aa, Homo sapiens
  CDR3 for beta chain variable domain of TCR clone 371548 (TRBV19, TRBJ2-3)
CASSPGLLASTDTQYF

SEQ ID NO: 743097 - protein, 11 aa, Homo sapiens
  CDR3 for alpha chain variable domain of TCR clone 371549 (TRAV12-3, TRAJ43)
CAMSVSNDMRF

SEQ ID NO: 743098 - protein, 15 aa, Homo sapiens
  CDR3 for beta chain variable domain of TCR clone 371549 (TRBV7-2, TRBJ2-5)
CASSGILAVAETQYS

SEQ ID NO: 743099 - protein, 15 aa, Homo sapiens
  CDR3 for alpha chain variable domain of TCR clone 371550 (TRAV27, TRAJ38)
CAARRNAGNNRKLIW

SEQ ID NO: 743100 - protein, 12 aa, Homo sapiens
  CDR3 for beta chain variable domain of TCR clone 371550 (TRBV12-4, TRBJ1-2)
CASSFIWLHLRF

SEQ ID NO: 743101 - protein, 14 aa, Homo sapiens
  CDR3 for alpha chain variable domain of TCR clone 371551 (TRAV2, TRAJ9)
CAVDPNTGGFKTIF

SEQ ID NO: 743102 - protein, 22 aa, Homo sapiens
  CDR3 for beta chain variable domain of TCR clone 371551 (TRBV7-3, TRBJ2-5)
CASARDRVILRPRDPVLRARHA

SEQ ID NO: 743103 - protein, 16 aa, Homo sapiens
  CDR3 for alpha chain variable domain of TCR clone 371552 (TRAV14/DV4, TRAJ53)
CAMREGGGGSNYTLTF

SEQ ID NO: 743104 - protein, 14 aa, Homo sapiens
  CDR3 for beta chain variable domain of TCR clone 371552 (TRBV25-1, TRBJ1-1)
CASTHLGGNTEAFF

SEQ ID NO: 743105 - protein, 15 aa, Homo sapiens
  CDR3 for alpha chain variable domain of TCR clone 371553 (TRAV12-1, TRAJ44)
CVADLPTGTASKLTF

SEQ ID NO: 743106 - protein, 13 aa, Homo sapiens
  CDR3 for beta chain variable domain of TCR clone 371553 (TRBV6-5, TRBJ2-5)
CASIPQGGETQYF

SEQ ID NO: 743107 - protein, 11 aa, Homo sapiens
  CDR3 for alpha chain variable domain of TCR clone 371554 (TRAV17, TRAJ36)
CAQTGANNLFF

SEQ ID NO: 743108 - protein, 12 aa, Homo sapiens
  CDR3 for beta chain variable domain of TCR clone 371554 (TRBV29-1, TRBJ2-3)
CSVVLGADTQYF

SEQ ID NO: 743109 - protein, 14 aa, Homo sapiens
  CDR3 for alpha chain variable domain of TCR clone 371555 (TRAV17, TRAJ31)
CATVLRNNDARLMF

SEQ ID NO: 743110 - protein, 14 aa, Homo sapiens
  CDR3 for beta chain variable domain of TCR clone 371555 (TRBV12-4, TRBJ2-5)
CASSLWQKQETQYF

SEQ ID NO: 743111 - protein, 12 aa, Homo sapiens
  CDR3 for alpha chain variable domain of TCR clone 371556 (TRAV13-2, TRAJ23)
CAERHRGGKLIF

SEQ ID NO: 743112 - protein, 15 aa, Homo sapiens
  CDR3 for beta chain variable domain of TCR clone 371556 (TRBV4-1, TRBJ1-2)
CASSQGQGAAYGYTF

SEQ ID NO: 743113 - protein, 14 aa, Homo sapiens
  CDR3 for alpha chain variable domain of TCR clone 371557 (TRAV13-1, TRAJ3)
CSKLGYSSASKIIF

SEQ ID NO: 743114 - protein, 14 aa, Homo sapiens
  CDR3 for beta chain variable domain of TCR clone 371557 (TRBV7-3, TRBJ2-1)
CASSLSGSYNEQFF

SEQ ID NO: 743115 - protein, 16 aa, Homo sapiens
  CDR3 for alpha chain variable domain of TCR clone 371558 (TRAV4, TRAJ18)
CCVLLIGGSTLGRLYF

SEQ ID NO: 743116 - protein, 12 aa, Homo sapiens
  CDR3 for beta chain variable domain of TCR clone 371558 (TRBV6-3, TRBJ2-7)
CATSLTPYEQYF

SEQ ID NO: 743117 - protein, 12 aa, Homo sapiens
  CDR3 for alpha chain variable domain of TCR clone 371559 (TRAV12-1, TRAJ6)
CVVSERSYIPTF

SEQ ID NO: 743118 - protein, 13 aa, Homo sapiens
  CDR3 for beta chain variable domain of TCR clone 371559 (TRBV10-3, TRBJ1-2)
CAISERDSYGDTF

SEQ ID NO: 743119 - protein, 13 aa, Homo sapiens
  CDR3 for alpha chain variable domain of TCR clone 371560 (TRAV12-3, TRAJ33)
CAMSVNSNYQLIW

SEQ ID NO: 743120 - protein, 12 aa, Homo sapiens
  CDR3 for beta chain variable domain of TCR clone 371560 (TRBV7-3, TRBJ2-1)
CASSFINNEQFF

SEQ ID NO: 743121 - protein, 14 aa, Homo sapiens
  CDR3 for alpha chain variable domain of TCR clone 371561 (TRAV1-2, TRAJ8)
CAVREDTGFQKLVF

SEQ ID NO: 743122 - protein, 14 aa, Homo sapiens
  CDR3 for beta chain variable domain of TCR clone 371561 (TRBV20-1, TRBJ2-5)
CSALVPGYQETQYF

SEQ ID NO: 743123 - protein, 14 aa, Homo sapiens
  CDR3 for alpha chain variable domain of TCR clone 371562 (TRAV17, TRAJ57)
CATEAQGGSEKLVF

SEQ ID NO: 743124 - protein, 16 aa, Homo sapiens
  CDR3 for beta chain variable domain of TCR clone 371562 (TRBV11-2, TRBJ1-2)
CASSPSGREANYGYTF

SEQ ID NO: 743125 - protein, 15 aa, Homo sapiens
  CDR3 for alpha chain variable domain of TCR clone 371563 (TRAV16, TRAJ12)
CSKWPLKDSSYKLIF

SEQ ID NO: 743126 - protein, 14 aa, Homo sapiens
  CDR3 for beta chain variable domain of TCR clone 371563 (TRBV7-6, TRBJ2-3)
CASSLGTVTDTQYF

SEQ ID NO: 743127 - protein, 15 aa, Homo sapiens
  CDR3 for alpha chain variable domain of TCR clone 371564 (TRAV26-1, TRAJ29)
CIVRIEGSGNTPLVF

SEQ ID NO: 743128 - protein, 15 aa, Homo sapiens
  CDR3 for beta chain variable domain of TCR clone 371564 (TRBV7-9, TRBJ1-5)
CTSSQGHQPNQPQHF

SEQ ID NO: 743129 - protein, 14 aa, Homo sapiens
  CDR3 for alpha chain variable domain of TCR clone 371565 (TRAV1-2, TRAJ16)
CAVNRFSDGQKLLF

SEQ ID NO: 743130 - protein, 13 aa, Homo sapiens
  CDR3 for beta chain variable domain of TCR clone 371565 (TRBV12-4, TRBJ1-5)
CASSPDRAQTQHF

SEQ ID NO: 743131 - protein, 15 aa, Homo sapiens
  CDR3 for alpha chain variable domain of TCR clone 371566 (TRAV23/DV6, TRAJ18)
CAASFRGSTLGRRNF

SEQ ID NO: 743132 - protein, 13 aa, Homo sapiens
  CDR3 for beta chain variable domain of TCR clone 371566 (TRBV28, TRBJ2-7)
CAILDRAGGEQYF

SEQ ID NO: 743133 - protein, 15 aa, Homo sapiens
  CDR3 for alpha chain variable domain of TCR clone 371567 (TRAV13-1, TRAJ32)
CAASNGWWCYKQDNL

SEQ ID NO: 743134 - protein, 17 aa, Homo sapiens
  CDR3 for beta chain variable domain of TCR clone 371567 (TRBV15, TRBJ1-2)
CATSGREIDVVNYGYTF

SEQ ID NO: 743135 - protein, 12 aa, Homo sapiens
  CDR3 for alpha chain variable domain of TCR clone 371568 (TRAV35, TRAJ30)
CAGVNRDDKIIF

SEQ ID NO: 743136 - protein, 15 aa, Homo sapiens
  CDR3 for beta chain variable domain of TCR clone 371568 (TRBV18, TRBJ2-3)
CASSPLAGETDTQYF

SEQ ID NO: 743137 - protein, 11 aa, Homo sapiens
  CDR3 for alpha chain variable domain of TCR clone 371569 (TRAV35, TRAJ30)
CAGERDDKIIF

SEQ ID NO: 743138 - protein, 12 aa, Homo sapiens
  CDR3 for beta chain variable domain of TCR clone 371569 (TRBV5-1, TRBJ1-2)
CASSQDTYGYTF

SEQ ID NO: 743139 - protein, 12 aa, Homo sapiens
  CDR3 for alpha chain variable domain of TCR clone 371570 (TRAV2, TRAJ9)
SAVWAGGFKTIF

SEQ ID NO: 743140 - protein, 16 aa, Homo sapiens
  CDR3 for beta chain variable domain of TCR clone 371570 (TRBV13, TRBJ2-2)
CASSPRTGEHTGELFF

SEQ ID NO: 743141 - protein, 11 aa, Homo sapiens
  CDR3 for alpha chain variable domain of TCR clone 371571 (TRAV12-3, TRAJ43)
CAMSVSNDMRF

SEQ ID NO: 743142 - protein, 14 aa, Homo sapiens
  CDR3 for beta chain variable domain of TCR clone 371571 (TRBV20-1, TRBJ1-1)
SAVLHLGGGTKAFF

SEQ ID NO: 743143 - protein, 13 aa, Homo sapiens
  CDR3 for alpha chain variable domain of TCR clone 371572 (TRAV12-1, TRAJ6)
CVVFPGGSYIPPF

SEQ ID NO: 743144 - protein, 12 aa, Homo sapiens
  CDR3 for beta chain variable domain of TCR clone 371572 (TRBV11-2, TRBJ2-2)
CASSLGGGELFF

SEQ ID NO: 743145 - protein, 12 aa, Homo sapiens
  CDR3 for alpha chain variable domain of TCR clone 371573 (TRAV12-3, TRAJ17)
CAMTLTGNKLTF

SEQ ID NO: 743146 - protein, 14 aa, Homo sapiens
  CDR3 for beta chain variable domain of TCR clone 371573 (TRBV6-1, TRBJ2-3)
CASSELTGKVTQYF

SEQ ID NO: 743147 - protein, 16 aa, Homo sapiens
  CDR3 for alpha chain variable domain of TCR clone 371574 (TRAV12-3, TRAJ53)
CAMSPGSGGSNDKLTS

SEQ ID NO: 743148 - protein, 11 aa, Homo sapiens
  CDR3 for beta chain variable domain of TCR clone 371574 (TRBV29-1, TRBJ2-5)
CSEDRTGTQYF

SEQ ID NO: 743149 - protein, 14 aa, Homo sapiens
  CDR3 for alpha chain variable domain of TCR clone 371575 (TRAV8-3, TRAJ36)
CAVGPITGATNLFF

SEQ ID NO: 743150 - protein, 15 aa, Homo sapiens
  CDR3 for beta chain variable domain of TCR clone 371575 (TRBV4-1, TRBJ2-1)
CASSQDPGNYNEQFF

SEQ ID NO: 743151 - protein, 12 aa, Homo sapiens
  CDR3 for alpha chain variable domain of TCR clone 371576 (TRAV3, TRAJ20)
CAVRDPDYKHSF

SEQ ID NO: 743152 - protein, 14 aa, Homo sapiens
  CDR3 for beta chain variable domain of TCR clone 371576 (TRBV4-2, TRBJ2-1)
CASGPDRAYNEQFF

SEQ ID NO: 743153 - protein, 12 aa, Homo sapiens
  CDR3 for alpha chain variable domain of TCR clone 371577 (TRAV1-1, TRAJ8)
CAVRPGFQKLVF

SEQ ID NO: 743154 - protein, 14 aa, Homo sapiens
  CDR3 for beta chain variable domain of TCR clone 371577 (TRBV11-3, TRBJ2-2)
CASSPRRGTGELFF

SEQ ID NO: 743155 - protein, 17 aa, Homo sapiens
  CDR3 for alpha chain variable domain of TCR clone 371578 (TRAV3, TRAJ6)
CAVRDGPRAGGSYIPTF

SEQ ID NO: 743156 - protein, 13 aa, Homo sapiens
  CDR3 for beta chain variable domain of TCR clone 371578 (TRBV12-5, TRBJ2-3)
CASGDRQSDTQYS

SEQ ID NO: 743157 - protein, 15 aa, Homo sapiens
  CDR3 for alpha chain variable domain of TCR clone 371579 (TRAV27, TRAJ33)
GAGADIMDSNYQLIG

SEQ ID NO: 743158 - protein, 13 aa, Homo sapiens
  CDR3 for beta chain variable domain of TCR clone 371579 (TRBV28, TRBJ1-2)
CASSLQGRGGYTF

SEQ ID NO: 743159 - protein, 14 aa, Homo sapiens
  CDR3 for alpha chain variable domain of TCR clone 371580 (TRAV16, TRAJ15)
CALSGPQAGTALIF

SEQ ID NO: 743160 - protein, 15 aa, Homo sapiens
  CDR3 for beta chain variable domain of TCR clone 371580 (TRBV5-5, TRBJ2-7)
CASSLAAPLSYEQYF

SEQ ID NO: 743161 - protein, 15 aa, Homo sapiens
  CDR3 for alpha chain variable domain of TCR clone 371581 (TRAV14/DV4, TRAJ12)
CAMREERDSSYKLIF

SEQ ID NO: 743162 - protein, 17 aa, Homo sapiens
  CDR3 for beta chain variable domain of TCR clone 371581 (TRBV2, TRBJ2-1)
CASSRPGQGVMVNERFF

SEQ ID NO: 743163 - protein, 14 aa, Homo sapiens
  CDR3 for alpha chain variable domain of TCR clone 371582 (TRAV12-1, TRAJ30)
CVVDIGGRDDKIIF

SEQ ID NO: 743164 - protein, 13 aa, Homo sapiens
  CDR3 for beta chain variable domain of TCR clone 371582 (TRBV12-5, TRBJ2-1)
CASGLGRGNEQFF

SEQ ID NO: 743165 - protein, 14 aa, Homo sapiens
  CDR3 for alpha chain variable domain of TCR clone 371583 (TRAV12-3, TRAJ42)
CAMNYGGSHGSLIF

SEQ ID NO: 743166 - protein, 15 aa, Homo sapiens
  CDR3 for beta chain variable domain of TCR clone 371583 (TRBV5-1, TRBJ1-5)
CASSLGTVSNQPQHF

SEQ ID NO: 743167 - protein, 14 aa, Homo sapiens
  CDR3 for alpha chain variable domain of TCR clone 371584 (TRAV12-1, TRAJ3)
CVVILYSSASKIIF

SEQ ID NO: 743168 - protein, 18 aa, Homo sapiens
  CDR3 for beta chain variable domain of TCR clone 371584 (TRBV12-4, TRBJ2-2)
CASSRSGGAIPYTGELFF

SEQ ID NO: 743169 - protein, 19 aa, Homo sapiens
  CDR3 for alpha chain variable domain of TCR clone 371585 (TRAV4, )
CLVGPHNSDIQNPDPAVYQ

SEQ ID NO: 743170 - protein, 17 aa, Homo sapiens
  CDR3 for beta chain variable domain of TCR clone 371585 (TRBV24-1, TRBJ2-1)
CATSDVSTSGTYNEQFF

SEQ ID NO: 743171 - protein, 11 aa, Homo sapiens
  CDR3 for alpha chain variable domain of TCR clone 371586 (TRAV13-1, TRAJ30)
CAASRDDKIIF

SEQ ID NO: 743172 - protein, 15 aa, Homo sapiens
  CDR3 for beta chain variable domain of TCR clone 371586 (TRBV18, TRBJ1-1)
CASSQSSWVNTEAFF

SEQ ID NO: 743173 - protein, 12 aa, Homo sapiens
  CDR3 for alpha chain variable domain of TCR clone 371587 (TRAV13-1, TRAJ21)
CAAFFNFDKFYF

SEQ ID NO: 743174 - protein, 14 aa, Homo sapiens
  CDR3 for beta chain variable domain of TCR clone 371587 (TRBV4-1, TRBJ2-7)
CASRLTSGSYEQYF

SEQ ID NO: 743175 - protein, 16 aa, Homo sapiens
  CDR3 for alpha chain variable domain of TCR clone 371588 (TRAV3, TRAJ37)
CAVRPHGSGNTGKLIF

SEQ ID NO: 743176 - protein, 16 aa, Homo sapiens
  CDR3 for beta chain variable domain of TCR clone 371588 (TRBV4-1, TRBJ2-1)
CASSQEAGQGSDEQFF

SEQ ID NO: 743177 - protein, 15 aa, Homo sapiens
  CDR3 for alpha chain variable domain of TCR clone 371589 (TRAV29/DV5, TRAJ42)
CSAKTDGGSQGNLIF

SEQ ID NO: 743178 - protein, 15 aa, Homo sapiens
  CDR3 for beta chain variable domain of TCR clone 371589 (TRBV20-1, TRBJ2-7)
CSARDRVSGMDEQYF

SEQ ID NO: 743179 - protein, 12 aa, Homo sapiens
  CDR3 for alpha chain variable domain of TCR clone 371590 (TRAV12-1, TRAJ40)
CVVYSGTYKYIF

SEQ ID NO: 743180 - protein, 15 aa, Homo sapiens
  CDR3 for beta chain variable domain of TCR clone 371590 (TRBV19, TRBJ1-1)
CASTSGQIQNTEAFF

SEQ ID NO: 743181 - protein, 13 aa, Homo sapiens
  CDR3 for alpha chain variable domain of TCR clone 371591 (TRAV12-2, TRAJ4)
CAVRSGGDNKLIF

SEQ ID NO: 743182 - protein, 15 aa, Homo sapiens
  CDR3 for beta chain variable domain of TCR clone 371591 (TRBV10-3, TRBJ2-1)
CAISDVQDRAYEQFL

SEQ ID NO: 743183 - protein, 19 aa, Homo sapiens
  CDR3 for alpha chain variable domain of TCR clone 371592 (TRAV3, TRAJ37)
CAVSDIVGGYPSNTGKLIF

SEQ ID NO: 743184 - protein, 14 aa, Homo sapiens
  CDR3 for beta chain variable domain of TCR clone 371592 (TRBV7-8, TRBJ2-3)
CASSLEAGTDTQYF

SEQ ID NO: 743185 - protein, 14 aa, Homo sapiens
  CDR3 for alpha chain variable domain of TCR clone 371593 (TRAV21, TRAJ58)
CAVKRETSGSRLTF

SEQ ID NO: 743186 - protein, 13 aa, Homo sapiens
  CDR3 for beta chain variable domain of TCR clone 371593 (TRBV11-2, TRBJ2-7)
CASSPLGSYEQYF

SEQ ID NO: 743187 - protein, 13 aa, Homo sapiens
  CDR3 for alpha chain variable domain of TCR clone 371594 (TRAV21, TRAJ27)
CAARPGNVGKSTF

SEQ ID NO: 743188 - protein, 13 aa, Homo sapiens
  CDR3 for beta chain variable domain of TCR clone 371594 (TRBV13, TRBJ2-1)
CASILGGRGEQFF

SEQ ID NO: 743189 - protein, 16 aa, Homo sapiens
  CDR3 for alpha chain variable domain of TCR clone 371595 (TRAV1-2, TRAJ10)
CAVRRVLTGGGNKLTF

SEQ ID NO: 743190 - protein, 15 aa, Homo sapiens
  CDR3 for beta chain variable domain of TCR clone 371595 (TRBV6-3, TRBJ2-7)
CASSSPGTVFYEQYF

SEQ ID NO: 743191 - protein, 16 aa, Homo sapiens
  CDR3 for alpha chain variable domain of TCR clone 371596 (TRAV17, TRAJ52)
CATGIIGGTSYVKLTS

SEQ ID NO: 743192 - protein, 15 aa, Homo sapiens
  CDR3 for beta chain variable domain of TCR clone 371596 (TRBV7-9, TRBJ1-4)
CASSARTGGNEKLFF

SEQ ID NO: 743193 - protein, 17 aa, Homo sapiens
  CDR3 for alpha chain variable domain of TCR clone 371597 (TRAV3, TRAJ42)
CAVRDRDYGGRQGNLIF

SEQ ID NO: 743194 - protein, 15 aa, Homo sapiens
  CDR3 for beta chain variable domain of TCR clone 371597 (TRBV6-6, TRBJ2-7)
CSSSYSYGGSYEQYF

SEQ ID NO: 743195 - protein, 15 aa, Homo sapiens
  CDR3 for alpha chain variable domain of TCR clone 371598 (TRAV16, TRAJ48)
CALFISNFGNEKLTF

SEQ ID NO: 743196 - protein, 18 aa, Homo sapiens
  CDR3 for beta chain variable domain of TCR clone 371598 (TRBV7-9, TRBJ2-7)
CDSSLTTSGSRTWYEQYF

SEQ ID NO: 743197 - protein, 12 aa, Homo sapiens
  CDR3 for alpha chain variable domain of TCR clone 371599 (TRAV12-3, TRAJ40)
CAMSSGTYKYIF

SEQ ID NO: 743198 - protein, 15 aa, Homo sapiens
  CDR3 for beta chain variable domain of TCR clone 371599 (TRBV7-3, TRBJ2-2)
CASRETGQGTGEMFF

SEQ ID NO: 743199 - protein, 12 aa, Homo sapiens
  CDR3 for alpha chain variable domain of TCR clone 371600 (TRAV36/DV7, TRAJ54)
CAVVRGAQKLVF

SEQ ID NO: 743200 - protein, 13 aa, Homo sapiens
  CDR3 for beta chain variable domain of TCR clone 371600 (TRBV19, TRBJ2-7)
CASRKAGGSEQYF

SEQ ID NO: 743201 - protein, 16 aa, Homo sapiens
  CDR3 for alpha chain variable domain of TCR clone 371601 (TRAV12-3, TRAJ53)
CAMSPGSGGSNYKLTF
